(19) United States
(12) Patent Application Publication
(10) Pub. No.: US 2025/0154528 A1
(43) Pub. Date: May 15, 2025

(54) ADENO-ASSOCIATED VIRAL VECTORS AND USES THEREOF

(71) Applicant: The Broad Institute, Inc., Cambridge, MA (US)

(72) Inventors: Ken Y. CHAN, Cambridge, MA (US); Benjamin E. DEVERMAN, Cambridge, MA (US); FatmaElzahraa Abdelmouty EID, Cambridge, MA (US)

(73) Assignee: The Broad Institute, Inc., Cambridge, MA (US)

(21) Appl. No.: 18/834,583

(22) PCT Filed: Jan. 31, 2023
(86) PCT No.: PCT/IB2023/050844

§ 371 Date: Jul. 30, 2024

Related U.S. Application Data
(60) Provisional application No. 63/305,508, filed on Feb. 1, 2022.
(60) Provisional application No. 63/342,001, filed on May 13, 2022.
(60) Provisional application No. 63/343,010, filed on May 17, 2022.
(60) Provisional application No. 63/476,705, filed on Dec. 22, 2022.

(51) Int. Cl. C12N 15/86; C07K 14/005; C12N 15/10

(52) U.S. Cl. CPC C12N 15/86; C07K 14/005; C12N 15/1034; C12N 2750/14122; C12N 2750/14143; C12N 2750/14145

(57) ABSTRACT

The invention provides adeno-associated viral vectors and methods of using such vectors for cell transduction.

### CROSS REFERENCE TO RELATED APPLICATIONS

[0001] The present application claims priority to U.S. Provisional Applications No. 63/476,705, filed Dec. 22, 2022, 63/343,010, filed May 17, 2022, 63/342,001, filed May 13, 2022, and 63/305,508, filed Feb. 1, 2022, the entire contents of which are hereby incorporated by reference in their entirety.

### STATEMENT OF RIGHTS TO INVENTIONS MADE UNDER FEDERALLY SPONSORED RESEARCH

[0002] This invention was made with government support under Grants No. UG3MH120096, UG3MH120096, U42 OD027094, and P51-OD0101107 awarded by the National Institutes of Health. The government has certain rights in the invention.

### SEQUENCE LISTING

[0003] This application contains a Sequence Listing which has been submitted electronically in XML format and is hereby incorporated by reference in its entirety. The Sequence Listing XML file, created on Dec. 21, 2022, is named 167741_049102_PRO3_SL.xml and is 174,116,947 bytes in size.

### BACKGROUND OF THE INVENTION

[0004] Engineering novel functions into proteins while retaining desired traits is a key challenge for developers of viral vectors, antibodies, and inhibitors of medical and industrial value. For instance, to be harnessed as a viable gene therapy vector, an adeno-associated virus (AAV) capsid must simultaneously exhibit high production yield and efficiently target the cell type(s) relevant to a specific disease across preclinical models to patients. A common approach for developing AAV capsids with novel tropisms is to funnel a random library of peptide-modified capsids through multiple rounds of selection to identify a few top-performing candidates. This approach has produced modified capsids that more efficiently transduce cells throughout the central nervous system (CNS), photoreceptors, brain endothelial cells, and skeletal muscle. These rare capsids can then be diversified to screen even more enhanced tropisms, high production yield, or cross-species functionality. However, variants optimized for one trait can be difficult to optimize for other traits, and the protein sequence space is too vast to effectively sample by chance for rare variants that are enhanced across multiple traits. As a result, AAV engineering teams often devote many years and significant resources to developing capsids that ultimately fail to be optimized across multiple traits essential for preclinical and clinical translation.

[0005] Therefore, there is a need for improved adeno-associated viral vectors for multiple traits; for example, capsids that work across species to target organs of interest.

### SUMMARY OF THE INVENTION

[0006] As described below, the present invention features adeno-associated viral vectors and methods of using such vectors.

[0007] In one aspect, the disclosure features an adeno-associated virus (AAV) capsid polypeptide containing a peptide inserted within the capsid polypeptide. The peptide contains an amino acid sequence selected from one or more of RPNRDTS (SEQ ID NO: 144800); MDGQRRI (SEQ ID NO: 132518); ETNRAGR (SEQ ID NO: 116028); TGRVDSR (SEQ ID NO: 149619); NMTRARD (SEQ ID NO: 136472); GEKPKFT (SEQ ID NO: 164722); MEPRQRT (SEQ ID NO: 132640); and variants thereof containing a substitution or deletion of one or two amino acids.

[0008] In another aspect, the disclosure features an adeno-associated virus (AAV) capsid polypeptide containing a peptide inserted within the capsid polypeptide. The peptide contains a motif selected from those listed in Tables 2-27.

[0009] In another aspect, the disclosure features a viral particle containing the AAV capsid polypeptide of any of the aspects provided herein, or embodiments thereof.

[0010] In another aspect, the disclosure features a polynucleotide encoding the capsid polypeptide of any of the aspects provided herein, or embodiments thereof.

[0011] In another aspect, the disclosure features a library of adeno-associated virus (AAV) capsid polypeptides or polynucleotides encoding the same, where the library contains two or more capsid polypeptides of any of the aspects provided herein, or embodiments thereof.

[0012] In another aspect, the disclosure features a library of adeno-associated virus (AAV) capsid polypeptides or polynucleotides encoding the same, where the library contains two or more capsid polypeptides each containing a peptide with a sequence selected from one or more of SEQ ID NOs: 1-199427 and 200028-201544.

[0013] In another aspect, the disclosure features a composition containing an adeno-associated virus (AAV) capsid any one of the aspects provided herein, or embodiments thereof.

[0014] In another aspect, the disclosure features a method for screening a library of adeno-associated virus (AAV) capsid polypeptides for a trait of interest. The method involves A) administering to an organism or contacting a population of cells with AAV particles containing the library of any of the aspects provided herein, or embodiments thereof. The method also involves B) identifying in the library those particles demonstrating the trait of interest in the organism and/or in/on the cells.

[0015] In another aspect, the disclosure features a viral particle identified by the method of any of the aspects provided herein, or embodiments thereof.

[0016] In another aspect, the disclosure features a kit suitable for use in the method of any of the aspects provided herein, or embodiments thereof, where the kit contains adeno-associated virus (AAV) particles containing the capsid polypeptides of any of the aspects provided herein, or embodiments thereof, or polynucleotides encoding the same.

[0017] In any of the aspects provided herein, or embodiments thereof, the capsid is an AAV1, AAV2, AAV3, AAV3b, AAV4, AAV5, AAV6, AAV7, AAV8, AAV9, AAV9 K449R, rh.10, rh.8, or LK03 capsid polypeptide.

[0018] In any of the aspects provided herein, or embodiments thereof, the peptide is inserted in Loop VIII of the capsid polypeptide. In any of the aspects provided herein, or embodiments thereof, the peptide is inserted between amino acids 565 and 605 of an AAV9 K449R amino acid sequence, or at an equivalent insertion position in another AAV polypeptide. In any of the aspects provided herein, or embodiments thereof, the peptide is inserted between amino acids 575 and 595 and 600 of an AAV9 K449R amino acid sequence, or at an equivalent insertion position in another AAV polypeptide. In any of the aspects provided herein, or embodiments thereof, the peptide is inserted between amino acids 588 and 589 of an AAV9 K449R amino acid sequence, or at an equivalent insertion position in another AAV polypeptide.

[0019] In any of the aspects provided herein, or embodiments thereof, a viral particle containing an AAV capsid containing the peptide has increased transduction efficiency for a cell of interest relative to an AAV capsid lacking the peptide. In any of the aspects provided herein, or embodiments thereof, the cell of interest is a liver cell, brain cell, brain endothelial cell, kidney cell, spinal cord cell, spleen cell, nerve cell, or a cell of the spinal cord, heart, or lungs.

[0020] In any of the aspects provided herein, or embodiments thereof, transduction efficiency is increased by at least about 10%, 25%, 50%, 100%, 200% or more relative to an AAV capsid lacking the peptide.

[0021] In any of the aspects provided herein, or embodiments thereof, a viral particle containing an AAV capsid containing the peptide has increased production fitness relative to an AAV capsid lacking the peptide. In any of the aspects provided herein, or embodiments thereof, production fitness is increased by at least about 10%, 25%, 50%, 100%, 200% or more relative to an AAV capsid lacking the peptide.

[0022] In any of the aspects provided herein, or embodiments thereof, a viral particle containing an AAV capsid containing the peptide has increased biodistribution in an organ of interest relative to an AAV capsid lacking the peptide. In any of the aspects provided herein, or embodiments thereof, the organ of interest is selected from one or more of brain, heart, lung, kidney, spleen, and liver.

[0023] In any of the aspects provided herein, or embodiments thereof, the AAV capsid polypeptide is an AAV9 K449R capsid polypeptide and shares at least 85% sequence identity to an amino acid sequence selected from one or more of:

AAV-BI151
(SEQ ID NO: 199456)
MAADGYLPDWLEDNLSEGIREWWALKPGAPQPKANQQHQDNARGLVLPGYKYLGPGNGLDKGEP
VNAADAAALEHDKAYDQQLKAGDNPYLKYNHADAEFQERLKEDTSFGGNLGRAVFQAKKRLLEP
LGLVEEAAKTAPGKKRPVEQSPQEPDSSAGIGKSGAQPAKKRLNFGQTGDTESVPDPQPIGEPP
AAPSGVGSLTMASGGGAPVADNNEGADGVGSSSGNWHCDSQWLGDRVITTSTRTWALPTYNNHL
YKQISNSTSGGSSNDNAYFGYSTPWGYFDFNRFHCHFSPRDWQRLINNNWGFRPKRLNFKLFNI
QVKEVTDNNGVKTIANNLTSTVQVFTDSDYQLPYVLGSAHEGCLPPFPADVFMIPQYGYLTLND
GSQAVGRSSFYCLEYFPSQMLRTGNNFQFSYEFENVPFHSSYAHSQSLDRLMNPLIDQYLYYLS
RTINGSGQNQQTLKFSVAGPSNMAVQGRNYIPGPSYRQQRVSTTVTQNNNSEFAWPGASSWALN
GRNSLMNPGPAMASHKEGEDRFFPLSGSLIFGKQGTGRDNVDADKVMITNEEEIKTTNPVATES
YGQVATNHQSAQRPNRDTSAQAQTGWVQNQGILPGMVWQDRDVYLQGPIWAKIPHTDGNFHPSP
LMGGFGMKHPPPQILIKNTPVPADPPTAFNKDKLNSFITQYSTGQVSVEIEWELQKENSKRWNP
EIQYTSNYYKSNNVEFAVNTEGVYSEPRPIGTRYLTRNL;
AAV-BI152
(SEQ ID NO: 199457)
MAADGYLPDWLEDNLSEGIREWWALKPGAPQPKANQQHQDNARGLVLPGYKYLGPGNGLDKGEP
VNAADAAALEHDKAYDQQLKAGDNPYLKYNHADAEFQERLKEDTSFGGNLGRAVFQAKKRLLEP
LGLVEEAAKTAPGKKRPVEQSPQEPDSSAGIGKSGAQPAKKRLNFGQTGDTESVPDPQPIGEPP
AAPSGVGSLTMASGGGAPVADNNEGADGVGSSSGNWHCDSQWLGDRVITTSTRTWALPTYNNHL
YKQISNSTSGGSSNDNAYFGYSTPWGYFDFNRFHCHFSPRDWQRLINNNWGFRPKRLNFKLFNI
QVKEVTDNNGVKTIANNLTSTVQVFTDSDYQLPYVLGSAHEGCLPPFPADVFMIPQYGYLTLND
GSQAVGRSSFYCLEYFPSQMLRTGNNFQFSYEFENVPFHSSYAHSQSLDRLMNPLIDQYLYYLS
RTINGSGQNQQTLKFSVAGPSNMAVQGRNYIPGPSYRQQRVSTTVTQNNNSEFAWPGASSWALN
GRNSLMNPGPAMASHKEGEDRFFPLSGSLIFGKQGTGRDNVDADKVMITNEEEIKTTNPVATES
YGQVATNHQSAQMDGQRRIAQAQTGWVQNQGILPGMVWQDRDVYLQGPIWAKIPHTDGNFHPSP
LMGGFGMKHPPPQILIKNTPVPADPPTAFNKDKLNSFITQYSTGQVSVEIEWELQKENSKRWNP
EIQYTSNYYKSNNVEFAVNTEGVYSEPRPIGTRYLTRNL;
AAV-BI153
(SEQ ID NO: 199458)
MAADGYLPDWLEDNLSEGIREWWALKPGAPQPKANQQHQDNARGLVLPGYKYLGPGNGLDKGEP
VNAADAAALEHDKAYDQQLKAGDNPYLKYNHADAEFQERLKEDTSFGGNLGRAVFQAKKRLLEP
LGLVEEAAKTAPGKKRPVEQSPQEPDSSAGIGKSGAQPAKKRLNFGQTGDTESVPDPQPIGEPP
AAPSGVGSLTMASGGGAPVADNNEGADGVGSSSGNWHCDSQWLGDRVITTSTRTWALPTYNNHL
YKQISNSTSGGSSNDNAYFGYSTPWGYFDFNRFHCHFSPRDWQRLINNNWGFRPKRLNFKLFNI
QVKEVTDNNGVKTIANNLTSTVQVFTDSDYQLPYVLGSAHEGCLPPFPADVFMIPQYGYLTLND
GSQAVGRSSFYCLEYFPSQMLRTGNNFQFSYEFENVPFHSSYAHSQSLDRLMNPLIDQYLYYLS
RTINGSGQNQQTLKFSVAGPSNMAVQGRNYIPGPSYRQQRVSTTVTQNNNSEFAWPGASSWALN
GRNSLMNPGPAMASHKEGEDRFFPLSGSLIFGKQGTGRDNVDADKVMITNEEEIKTTNPVATES
YGQVATNHQSAQETNRAGRAQAQTGWVQNQGILPGMVWQDRDVYLQGPIWAKIPHTDGNFHPSP
LMGGFGMKHPPPQILIKNTPVPADPPTAFNKDKLNSFITQYSTGQVSVEIEWELQKENSKRWNP
EIQYTSNYYKSNNVEFAVNTEGVYSEPRPIGTRYLTRNL;
AAV-BI154
(SEQ ID NO: 199459)
MAADGYLPDWLEDNLSEGIREWWALKPGAPQPKANQQHQDNARGLVLPGYKYLGPGNGLDKGEP
VNAADAAALEHDKAYDQQLKAGDNPYLKYNHADAEFQERLKEDTSFGGNLGRAVFQAKKRLLEP
LGLVEEAAKTAPGKKRPVEQSPQEPDSSAGIGKSGAQPAKKRLNFGQTGDTESVPDPQPIGEPP
AAPSGVGSLTMASGGGAPVADNNEGADGVGSSSGNWHCDSQWLGDRVITTSTRTWALPTYNNHL
YKQISNSTSGGSSNDNAYFGYSTPWGYFDFNRFHCHFSPRDWQRLINNNWGFRPKRLNFKLFNI
QVKEVTDNNGVKTIANNLTSTVQVFTDSDYQLPYVLGSAHEGCLPPFPADVFMIPQYGYLTLND
GSQAVGRSSFYCLEYFPSQMLRTGNNFQFSYEFENVPFHSSYAHSQSLDRLMNPLIDQYLYYLS
RTINGSGQNQQTLKFSVAGPSNMAVQGRNYIPGPSYRQQRVSTTVTQNNNSEFAWPGASSWALN
GRNSLMNPGPAMASHKEGEDRFFPLSGSLIFGKQGTGRDNVDADKVMITNEEEIKTTNPVATES
YGQVATNHQSAQTGRVDSRAQAQTGWVQNQGILPGMVWQDRDVYLQGPIWAKIPHTDGNFHPSP
LMGGFGMKHPPPQILIKNTPVPADPPTAFNKDKLNSFITQYSTGQVSVEIEWELQKENSKRWNP
EIQYTSNYYKSNNVEFAVNTEGVYSEPRPIGTRYLTRNL;
AAV-BI155
(SEQ ID NO: 199460)
MAADGYLPDWLEDNLSEGIREWWALKPGAPQPKANQQHQDNARGLVLPGYKYLGPGNGLDKGEP
VNAADAAALEHDKAYDQQLKAGDNPYLKYNHADAEFQERLKEDTSFGGNLGRAVFQAKKRLLEP
LGLVEEAAKTAPGKKRPVEQSPQEPDSSAGIGKSGAQPAKKRLNFGQTGDTESVPDPQPIGEPP
AAPSGVGSLTMASGGGAPVADNNEGADGVGSSSGNWHCDSQWLGDRVITTSTRTWALPTYNNHL
YKQISNSTSGGSSNDNAYFGYSTPWGYFDFNRFHCHFSPRDWQRLINNNWGFRPKRLNFKLFNI
QVKEVTDNNGVKTIANNLTSTVQVFTDSDYQLPYVLGSAHEGCLPPFPADVFMIPQYGYLTLND
GSQAVGRSSFYCLEYFPSQMLRTGNNFQFSYEFENVPFHSSYAHSQSLDRLMNPLIDQYLYYLS
RTINGSGQNQQTLKFSVAGPSNMAVQGRNYIPGPSYRQQRVSTTVTQNNNSEFAWPGASSWALN
GRNSLMNPGPAMASHKEGEDRFFPLSGSLIFGKQGTGRDNVDADKVMITNEEEIKTTNPVATES
YGQVATNHQSAQNMTRARDAQAQTGWVQNQGILPGMVWQDRDVYLQGPIWAKIPHTDGNFHPSP
LMGGFGMKHPPPQILIKNTPVPADPPTAFNKDKLNSFITQYSTGQVSVEIEWELQKENSKRWNP
EIQYTSNYYKSNNVEFAVNTEGVYSEPRPIGTRYLTRNL;
AAV-BI156
(SEQ ID NO: 199461)
MAADGYLPDWLEDNLSEGIREWWALKPGAPQPKANQQHQDNARGLVLPGYKYLGPGNGLDKGEP
VNAADAAALEHDKAYDQQLKAGDNPYLKYNHADAEFQERLKEDTSFGGNLGRAVFQAKKRLLEP
LGLVEEAAKTAPGKKRPVEQSPQEPDSSAGIGKSGAQPAKKRLNFGQTGDTESVPDPQPIGEPP
AAPSGVGSLTMASGGGAPVADNNEGADGVGSSSGNWHCDSQWLGDRVITTSTRTWALPTYNNHL
YKQISNSTSGGSSNDNAYFGYSTPWGYFDFNRFHCHFSPRDWQRLINNNWGFRPKRLNFKLFNI
QVKEVTDNNGVKTIANNLTSTVQVFTDSDYQLPYVLGSAHEGCLPPFPADVFMIPQYGYLTLND
GSQAVGRSSFYCLEYFPSQMLRTGNNFQFSYEFENVPFHSSYAHSQSLDRLMNPLIDQYLYYLS
RTINGSGQNQQTLKFSVAGPSNMAVQGRNYIPGPSYRQQRVSTTVTQNNNSEFAWPGASSWALN
GRNSLMNPGPAMASHKEGEDRFFPLSGSLIFGKQGTGRDNVDADKVMITNEEEIKTTNPVATES
YGQVATNHQSAQGEKPKFTAQAQTGWVQNQGILPGMVWQDRDVYLQGPIWAKIPHTDGNFHPSP
LMGGFGMKHPPPQILIKNTPVPADPPTAFNKDKLNSFITQYSTGQVSVEIEWELQKENSKRWNP
EIQYTSNYYKSNNVEFAVNTEGVYSEPRPIGTRYLTRNL;
and
AAV-BI157
(SEQ ID NO: 199462)
MAADGYLPDWLEDNLSEGIREWWALKPGAPQPKANQQHQDNARGLVLPGYKYLGPGNGLDKGEP
VNAADAAALEHDKAYDQQLKAGDNPYLKYNHADAEFQERLKEDTSFGGNLGRAVFQAKKRLLEP
LGLVEEAAKTAPGKKRPVEQSPQEPDSSAGIGKSGAQPAKKRLNFGQTGDTESVPDPQPIGEPP
AAPSGVGSLTMASGGGAPVADNNEGADGVGSSSGNWHCDSQWLGDRVITTSTRTWALPTYNNHL
YKQISNSTSGGSSNDNAYFGYSTPWGYFDFNRFHCHFSPRDWQRLINNNWGFRPKRLNFKLFNI
QVKEVTDNNGVKTIANNLTSTVQVFTDSDYQLPYVLGSAHEGCLPPFPADVFMIPQYGYLTLND
GSQAVGRSSFYCLEYFPSQMLRTGNNFQFSYEFENVPFHSSYAHSQSLDRLMNPLIDQYLYYLS
RTINGSGQNQQTLKFSVAGPSNMAVQGRNYIPGPSYRQQRVSTTVTQNNNSEFAWPGASSWALN
GRNSLMNPGPAMASHKEGEDRFFPLSGSLIFGKQGTGRDNVDADKVMITNEEEIKTTNPVATES
YGQVATNHQSAQMEPRQRTAQAQTGWVQNQGILPGMVWQDRDVYLQGPIWAKIPHTDGNFHPSP
LMGGFGMKHPPPQILIKNTPVPADPPTAFNKDKLNSFITQYSTGQVSVEIEWELQKENSKRWNP
EIQYTSNYYKSNNVEFAVNTEGVYSEPRPIGTRYLTRNL*.

[0024] In any of the aspects provided herein, or embodiments thereof, the capsid polypeptides are each capable of encapsidating a polynucleotide sequence to form viral particles.

[0025] In any of the aspects provided herein, or embodiments thereof, the peptide sequences are selected from one or more of SEQ ID NOs: 1-157927 and 200028-201544.

[0026] In any of the aspects provided herein, or embodiments thereof, where the capsid is an AAV1, AAV2, AAV3, AAV3b, AAV4, AAV5, AAV6, AAV7, AAV8, AAV9, AAV9 K449R, rh.10, rh.8, or LK03 capsid polypeptide. In any of the aspects provided herein, or embodiments thereof, the capsid polypeptide is derived from an AAV9 K449R capsid polypeptide.

[0027] In any of the aspects provided herein, or embodiments thereof, the library contains an amino acid sequence motif selected from one or more of:
[0028] [RQMT] [RNQP] [RQPS] [ANQGST] **G; [QTV] [ANQGKP] [RNGSTY] * [ARGT] * [GP];
[0029] [RKSV] [FPS] ** [RT] [QGS] [GS]; [GST] * [QT] [NQ]R*G; [TV] ** [NS]R [QGM]G;
[0030] [RNQT] [ANPS] [RNS] ** [NQGS]G; T [NGS] **R [AQS]G; NR** [NG] [QG]A;
[0031] R**QGGG (SEQ ID NO: 199501); [QF] [KS] [RN] ** [NP] [AP]; QR**S [TV]A (SEQ ID NO: 199502); [QKM] *G[RSV] [KT] *G;
[0032] [QMTV] [RN] * [ANV] [RQS] * [GS]; [NQ]R [NGP] [NQS] **A;
[0033] [QT] * [RT] [RT] * [NQG] [AG]; NTR**SA (SEQ ID NO: 199503);
[0034] QRP* [AS] * [AS]; RQ**TNA (SEQ ID NO: 199504); QRP** [MV] [AS];
[0035] [RN] *N [RS] * [QG]G; [MTV]R [PS] * [QT] *G; [RY]S* [QK] *Q [GS]; MRG**MG (SEQ ID NO: 199505); [GV] * [NT] *R [QS]G; [ST] [RQ] [RS]T**A; R*S*STP (SEQ ID NO: 199506); QR**TNG (SEQ ID NO: 199507); Q*RQT*P (SEQ ID NO: 199508); [NQ]RQ* [GS] *A; TR**NNA (SEQ ID NO: 199509);
[0036] [RT]S* [RQ] [QS] *A; GQ*RV*G (SEQ ID NO: 199510); T*TSR*G (SEQ ID NO: 199511); TRG**TG (SEQ ID NO: 199512); NR* [GT] * [TV]G; T*RT*SA (SEQ ID NO: 199513); MG*R*GA (SEQ ID NO: 199514); [NQ]R* [NQ]S*A;
[0037] RQ*PT*A (SEQ ID NO: 199515); T*T*RSG (SEQ ID NO: 199516); T*RGS*P (SEQ ID NO: 199517); TR**TMG (SEQ ID NO: 199518); R*TS*SP (SEQ ID NO: 199519); N**QRSA (SEQ ID NO: 199520); [QT] [RK] *S*[TY]A;
[0038] QR*PA*G (SEQ ID NO: 199521); RS*S*GG (SEQ ID NO: 199522); RTS*S*P (SEQ ID NO: 199523); TRQ*T*G (SEQ ID NO: 199524); QR*S*TG (SEQ ID NO: 199525); R*NS*SP (SEQ ID NO: 199526); MR*G*QS (SEQ ID NO: 199527); N**SRQG (SEQ ID NO: 199528); NR*ST*A (SEQ ID NO: 199529);
[0039] RSQ*G*G (SEQ ID NO: 199530); T*RTN*A (SEQ ID NO: 199531); T*S*RMG (SEQ ID NO: 199532); TR**TQA (SEQ ID NO: 199533); and TRT**SG (SEQ ID NO: 199534); YSGK**G (SEQ ID NO: 199535); or polynucleotides encoding the same, where “*” represents any amino acid and square brackets denote a list of amino acids that may occur at a position.

[0040] In any of the aspects provided herein, or embodiments thereof, the library contains an amino acid sequence motif selected from one or more of:
[0041] [RQGKST] [ARNQGFPST] ** [ARNQGKMTV] [ANQGMSV]G;
[0042] [\hat{ }ADCEHILKPW] [ARNQGKPS] [ARNQGKST] [ARNQKPSTV] ** [NDGPS];
[0043] [NQKMFSTY] [RNGKT] [\hat{ }CEHILKFSWY] ** [RNQKMPSTV] [ANDEPS];
[0044] [\hat{ }ARDCEHILW] [RGLKPSY] * [NQGKPSTV] * [ANQGFST]G;
[0045] [\hat{ }ARDCEHILPW] [ARQGKPT] [RQGKPST] ** [ANGMST]G;
[0046] [\hat{ }ADCQEHILW] [NQGLKMPST] * [\hat{ }NCEHILMFWY] [ARNQGMTV] * [GS];
[0047] [RGMY] [ANQGPS] [NQKPST] ** [ANGKMST]G;
[0048] [NQGKFSTV] [RNQGKS] ** [ARNGKT] [NQGKFSYV] [ANDGS];
[0049] [\hat{ }ARDCEHILFW] * [ARNQGKMPT] [RQGKPSTV] * [AQGST]G;
[0050] [\hat{ }ARDCEHILPW] * [RNGKPST] * [ARNGKSV] [NQGKMST]G;
[0051] [RNKT] [RNQPS] * [RQGPS] [RQGS] * [APS];
[0052] [RNMPY] [RNQKPS] * [ANQTV] * [ANQGKTV] [DGPS];
[0053] [NQGKMFTV] [ARQGKMPTV] [RNQGKPTY] * [ARQKMST] *G;
[0054] [RNQMFST] [RNQGKT] * [ARNQPST] * [AQGSTY] [APS];
[0055] [QGKMSTV] * [ARNQGKMPT] [RNQGKT] [ARNSTV] *G;
[0056] [RMT] * [NQKT] * [ARQGT] [ANQS] [GP];
[0057] [RKMSV] **[ANQGKPS] [NGMSTV] [ANGKSTV] [DGS];
[0058] [NQKMPTYV] * [ARGKPTV] [NGST] [RNQKST] * [GPS];
[0059] [RNQKMSY] [RQKST] [ADQKPST] * [AKSTV] * [ADPS]; [RK] ** [NG] [AS] [GT]A;
[0060] [RQ] * [RNPST] [AQGST] [AQGSTV] * [GPS]; R [QPS] *S* [QGV]G;
[0061] [RKV] [NGKP] *N [ANGT] *G; [NQGLKFT] [NGKS] [QKMS] ** [ARQKSV] [ANDEG];
[0062] [RQMS] * [RNQKST] [NPST] * [ARNQGMS] [DGP]; [RKT] ** [PST] [QT] [ANG]G;
[0063] [NQKMT] [ARDKPST] [RNGKP] *G*G;
[0064] [RNQKMFT] [RDGKPST] [RNQGKPT] * [NQGST] * [AS];
[0065] [RNQMST] [RNDQKST] [RGKPST] [AQGKPST] ** [APSV];
[0066] [QKT] * [KS] * [AQGS] [NQS] [AS]; [KFV] * [ANK] * [ST] [KS] [AD];
[0067] [RQKMTYV] [RNDKPS] [RQGPS] [NDQGPST] ** [GP];
[0068] [NQMT]R* [NGPTV] [AQGS] * [GS]; [QMSY] [RKP] **S [AQGKV] [ADGS];
[0069] R [NS] ** [ANQ] [AQT]A; R [QS] **T [NQ] [AS]; [RQ] * [KPT] [GST] * [ANQGT]G;
[0070] [RN] [RQP] * [GPS]T*A; [RNMPT] * [RNGKST] [ANDQKPST] [RNGST] *A;
[0071] K [QPS] * [NMS] * [QV] [GS]; K* [NQG] * [NT] [AST]G; RN*Q*SG (SEQ ID NO: 199536); K* [ANGST] [NST] * [AMS] [GS]; KT*S*GA (SEQ ID NO: 199537);
[0072] [RKMT] [RQKPST]S* [ARSTV] *G; [KM] *N*GNA (SEQ ID NO: 199538);
[0073] N**S [GT] [GM]A; K* [GPS] [GT] [AT] *A; [QG]K* [GTV] [AMS] * [AN];
[0074] [RQT] * [RNQPT] [RNST] * [QGS]A; [NQ] [RK] ** [GS]TA; [TV] **NRQG (SEQ ID NO: 199539); R [AGPS] [NQPT] * [NGST] *G; R [MST]N** [QT] [GP];
[0075] [RNQ] * [PT] [GT] [RS] *A; RS**NTG (SEQ ID NO: 199540);
[0076] [RK] *[PS]G*[NQGT]A; Q*KSA*A (SEQ ID NO: 199541); KN*G*TA (SEQ ID NO: 199542); K*S*[AS]GA (SEQ ID NO: 199543); [NG]K*[AS] [GT] *A;
[0077] [GV]NS* [RK] *G; KT*S*SA (SEQ ID NO: 199544); [RM] [KP] *[AS]S*G;
[0078] VK**STG (SEQ ID NO: 199545); [QKT] [RQGMSTV] [AGKP] [NGST] **A;
[0079] PR*AT*G (SEQ ID NO: 199546); TRS*T*M (SEQ ID NO: 199547); T**RQQA (SEQ ID NO: 199548); KN*S*SG (SEQ ID NO: 199549); RNS*[AG] *G (SEQ ID NO: 199550); R*S* [AS]T [PS]; [RG] [KS]S* [GT] * [AG]; QR*NS*A (SEQ ID NO: 199551); R*SN*TG (SEQ ID NO: 199552); R* [NS] * [GT]GG;
[0080] RAP**NS (SEQ ID NO: 199553); R*NNS*G (SEQ ID NO: 199554);
[0081] [NK] * [GKP] [GST] * [GS]A; QK*GT*G (SEQ ID NO: 199555); T**NRGG (SEQ ID NO: 199556); VK*AS*A (SEQ ID NO: 199557); K*P*TGG (SEQ ID NO: 199558); K**QNQG (SEQ ID NO: 199559); R*S*TAP (SEQ ID NO: 199560);
[0082] K*S[NG] *[GS] [GS]; R*SN*NA (SEQ ID NO: 199561); RMP**GA (SEQ ID NO: 199562); [RW] [ANP]N[AKS] **A; KT**SGG (SEQ ID NO: 199563); R*P*TGA (SEQ ID NO: 199564); N**QRSA (SEQ ID NO: 199520); K*[NQ]ST*A (SEQ ID NO: 199565); MKN[TV] **A (SEQ ID NO: 199566); KGNN**G (SEQ ID NO: 199567); TKP**AA (SEQ ID NO: 199568); TR*GT*G (SEQ ID NO: 199569); KN*G*SA (SEQ ID NO: 199570); K*ASS*A (SEQ ID NO: 199571);
[0083] KLNS**G (SEQ ID NO: 199572); N**SRQG (SEQ ID NO: 199528); and
[0084] QNR*A*P (SEQ ID NO: 199573); R*P*AGA (SEQ ID NO: 199574); RT**STP (SEQ ID NO: 199575); SRTT*NG (SEQ ID NO: 199576); T*RT*NA (SEQ ID NO: 199577); TK*NS*G (SEQ ID NO: 199578); TRP**AA (SEQ ID NO: 199579); or polynucleotides encoding the same, where “*” represents any amino acid, square brackets surrounding a list of amino acids not preceded by the symbol “\hat{ }” denote a list of amino acids that may occur at a position, and square brackets surrounding a list of amino acids preceded by the symbol “\hat{ }” denote a list of amino acids that may not occur at a position.

[0085] In any of the aspects provided herein, or embodiments thereof, a viral particle having a capsid containing the motif has increased binding to a cell of interest relative to a control viral particle.

[0086] In any of the aspects provided herein, or embodiments thereof, the library contains an amino acid sequence motif selected from one or more of: QSRT**P (SEQ ID NO: 199580); K[HP] [NT] *P* [NS]; RN*P*TS (SEQ ID NO: 199581); K**GPKD (SEQ ID NO: 199582); NRGQ**A (SEQ ID NO: 199583); A**NEKR (SEQ ID NO: 199584); TG**RSG (SEQ ID NO: 199585); TAN*R*G (SEQ ID NO: 199586); T*TNR*G (SEQ ID NO: 199587); QSR**NP (SEQ ID NO: 199588); T*T*RSG (SEQ ID NO: 199516); K**NPAN (SEQ ID NO: 199589); KM**PKD (SEQ ID NO: 199590); MSRN**A (SEQ ID NO: 199591); NDA**KK (SEQ ID NO: 199592); QR*GP*M (SEQ ID NO: 199593); RS*P*NA (SEQ ID NO: 199594); T*S*RMG (SEQ ID NO: 199532); T*TSR*G (SEQ ID NO: 199511); VAR*H*G (SEQ ID NO: 199595); or polynucleotides encoding the same, where “*” represents any amino acid and square brackets denote a list of amino acids that may occur at a position.

[0087] In any of the aspects provided herein, or embodiments thereof, a viral particle having a capsid containing the motif has increased binding to a liver cell relative to a control viral particle.

[0088] In any of the aspects provided herein, or embodiments thereof, the library contains an amino acid sequence motif selected from one or more of:
[0089] [GKMFSTYV] [NGKST] ** [ARNGKSV] [AQMFST]G;
[0090] [RNQKTY] * [NQGKPST] [ANGPST] * [NQGTV]G; [QLMFPSTYV]K* [GPSTV] * [QGST]G;
[0091] [RNQGKMPTY] [ARNQGPST] [ARNQGKPT] ** [AGKMSTV]G;
[0092] [RQGMTV] * [RQGKPST] [QGPST] * [ARQMPS] [DGPS];
[0093] [RNQGKMPST] * [AQGKMPSTV] [RNQGST] [ARNQGKST] *G;
[0094] [NGKTV] **[RNQGPSTV] [ARQGKMST] [ANQGKFST] [AGPS];
[0095] [RNGKMFSTY] [ANQLKMPT] * [ARDQGSTV] [ARQGKTV] * [GS];
[0096] [RQGKMFTV] [ARNQGPST] [RGKPST] * [\hat{ }DCEILFPWY] *G;
[0097] [RNQGIKMST] [RDLKMFST] [ANDQHMPST] ** [ARNGKMSV] [ANDEKPS];
[0098] [RNQGIKFV] * [ARNQPST] * [ARGKMTV] [ARNQGT] [DEGS];
[0099] [\hat{ }ARNCEHILP] [ANQGKMPST] [RNQGHKMST] [ARNQGKPTV] ** [ARGS];
[0100] [RNQGIMFT] [RKPSTV] [AQGHKPST] * [ARNIKST] * [EGPS];
[0101] [NQKMFSTV] [RKS] **[AGST] [ARNDKSTV] [ADEK];
[0102] [RNQKMSTY] [RNGKST] * [ARNQMPSTV] * [\hat{ }CEHILKFPWV] [ADPST];
[0103] K* [GMP] [QST] * [AQM] [GS]; [RQKTY] * [ARQKPST] [QGST] [ANGST] * [ADPS];
[0104] [NQFTY] * [KST] * [ARGS] [AQGKMTV]G; [RT] [RPT] ** [ANST] [NQT] [APS];
[0105] [RNKMPY] [ARNGLKS] * [ANQKST] * [AQGSV]G; [RNQSY] [KPST] ** [RNGMS] [QG]G;
[0106] [RKT] [PS] *[RPST] [QGS] *A; [RNQEKMS] [RNQT] [RGIPST] [NQGKPT] **[AEGFP];
[0107] [NQT]K* [AGPST] [GMS] * [AS]; [RNK] [RDLS] [RNPT]S** [GP];
[0108] [RK] * [NP] [GV] * [GT]A; [RQGMFSY] [KS] [NQGMPS] ** [NQGS] [GS];
[0109] [MFPV]K [ANPS]S** [GS]; [MF]K [NT] ** [QPT]A;
[0110] [GFT] * [GKT] * [RNQK] [KSTV] [GS]; [QGM] [RKS] [NGPS] * [AST] *A;
[0111] [RT] * [KP] * [QT] [QG]A; [GM] [HP]K** [AP]A; [TV] * [NK] *S [NS] [AS];
[0112] [QGMT] [RK] * [GPTV] [AS] *G; [RV] [KP] *NT*G; M*SKS*A (SEQ ID NO: 199596); A**NEKR (SEQ ID NO: 199584); PR*AT*G (SEQ ID NO: 199546);
[0113] NK [AGP] [AQV] ** [DGS]; [MS] **K [ST] [GT]G; [RQK] [ARF] **T [AGS]G;
[0114] [QF]K** [AN] [QS]S; [NMT]K[ANP] *G*G; R**KEEK (SEQ ID NO: 199597);
[0115] [RGV] [KP] *[AS] [ST] *[AS]; NK[NS] *G*A (SEQ ID NO: 200021); QK*GT*G (SEQ ID NO: 199555); TK*NS*G (SEQ ID NO: 199578); TGK**[AT]A (SEQ ID NO: 199598); R**AGVG (SEQ ID NO: 199599); [NT]K*[TV] *KD; MKS**TG (SEQ ID NO: 199600); G*KSV*G (SEQ ID NO: 199601);
[0116] [KM] * [NS] * [GS] [NG]A; TNK**QG (SEQ ID NO: 199602);
[0117] K [DKPS] [RNDQ] * [GK] *[AD]; NAR*T*G (SEQ ID NO: 199603); MR*NQ*G (SEQ ID NO: 199604); [FT] *K[AT] *QA; KT**GGA (SEQ ID NO: 199605);
[0118] V*NKV*G (SEQ ID NO: 199606); FKG**SA (SEQ ID NO: 199607); FNK**QG (SEQ ID NO: 199608); GPK*T*A (SEQ ID NO: 199609); KQS*S*P (SEQ ID NO: 199610); [NS] *KG*[ST]A; GP*G*KG (SEQ ID NO: 199611); RDKS**A (SEQ ID NO: 199612); R*S*STP (SEQ ID NO: 199506); KT**AGG (SEQ ID NO: 199613); FK**TQG (SEQ ID NO: 199614); FGK**TG (SEQ ID NO: 199615); NKTG**A (SEQ ID NO: 199616); TK**TYG (SEQ ID NO: 199617);
[0119] TKPG**G (SEQ ID NO: 199618); KP*T*GG (SEQ ID NO: 199619); TGK**SA (SEQ ID NO: 199620); KPN*S*A (SEQ ID NO: 199621); TGKS**A (SEQ ID NO: 199622); T*RT*SA (SEQ ID NO: 199513); V*KS*TG (SEQ ID NO: 199623); F*K*TSA (SEQ ID NO: 199624); FGK**SG (SEQ ID NO: 199625);
[0120] K*GG*AG (SEQ ID NO: 199626); KPS*N*A (SEQ ID NO: 199627); QR*NS*A (SEQ ID NO: 199551); R**QGGG (SEQ ID NO: 199501); RP*N*GG (SEQ ID NO: 199628); TK**TQG (SEQ ID NO: 199629); TKSS**A (SEQ ID NO: 199630); and V*KSQ*G (SEQ ID NO: 199631); or polynucleotides encoding the same, where “*” represents any amino acid, square brackets surrounding a list of amino acids not preceded by the symbol “\hat{ }” denote a list of amino acids that may occur at a position, and square brackets surrounding a list of amino acids preceded by the symbol “\hat{ }” denote a list of amino acids that may not occur at a position.

[0121] In any of the aspects provided herein, or embodiments thereof, a viral particle having a capsid containing the motif has increased transduction efficiency for a liver cell relative to a control viral particle.

[0122] In any of the aspects provided herein, or embodiments thereof, the library contains an amino acid sequence motif selected from one or more of:
[0123] [ARDTV] **[NKP] [REG] [QEGK] [RGK]; NAR**GG (SEQ ID NO: 199632);
[0124] N[AR] [RG]Q** [AG]; VR**SSA (SEQ ID NO: 199633); TG**RSG (SEQ ID NO: 199585); R*KDS*A (SEQ ID NO: 199634); T*T*RSG (SEQ ID NO: 199516);
[0125] T*TNR*G (SEQ ID NO: 199587); T*TSR*G (SEQ ID NO: 199511); G**SIRS (SEQ ID NO: 199635); GQSS**R (SEQ ID NO: 199636); M*KP*RD (SEQ ID NO: 199637); NDA**KK (SEQ ID NO: 199592); NK*DR*G (SEQ ID NO: 199638); QRP*A*A (SEQ ID NO: 199639); SP**RGG (SEQ ID NO: 199640);
[0126] V*N*SSA (SEQ ID NO: 199641); or polynucleotides encoding the same, where “*” represents any amino acid and square brackets denote a list of amino acids that may occur at a position.

[0127] In any of the aspects provided herein, or embodiments thereof, a viral particle having a capsid containing the motif has increased binding to a liver cell relative to a control viral particle.

[0128] In any of the aspects provided herein, or embodiments thereof, the library contains an amino acid sequence motif selected from one or more of
[0129] [NDGILST]K* [RNGHKPSTV] * [ANDGKFSY] [ADQST];
[0130] [RQGKMFPS] [RNGHPST] [RQGKPST] ** [ARQGMPSTV] [AEGS];
[0131] [MFTYV]K** [ANST] [AQSTY]G;
[0132] [NQGKMFSYV] [RQGLKS] * [ANDQKPS] [ARNQGMSTV] *G;
[0133] [RDQEK] [ARGLMST] * [ANGKPT] * [RNKMS] [AELM];
[0134] [\hat{ }ARDCEHFPWV]K [ANDQMPST] ** [RQGKMT] [NDEG];
[0135] [\hat{ }ACGHILPW] [RNDQGLKS] [\hat{ }DCELKFWYV] [\hat{ }RNCEILMFWY] ** [RNDEGKFPS];
[0136] [NKMSTW] [ARKSTV] [NQGPS] [AQGKSV] **A;
[0137] [RNQGKTYV] * [ANQGMPST] [ANQGKST] * [AQGKMS] [AEGS];
[0138] [NQGIKFSTY]K [NDQHPS] * [ARNGKT] * [ADEPS];
[0139] [NMFTYV] [KPS] * [AQGKPTV] * [AQGKS] [DEGS];
[0140] [\hat{ }ADCEHILPW] [ARNQGKFPT] ** [ARNQKMSTY] [ARNQGMS] [ADEGPS];
[0141] [NQIKFY] [ADQLK] [ANGHM] **[ARQK] [NDGK];
[0142] [ARNDQGSTV] ** [RNQGKP] [RQEGKMT] [NEGKFS] [ARGK];
[0143] [NQGMT]K* [AQGPSTV] [AGMST] * [ANGS]; [DQKS] [QKMST] ** [AGST]K [DEK];
[0144] [NQWV]K [GST] **SG; K** [ANQS] [ANQT] [ADGK] [ARDEG];
[0145] K**[NQSTY]S[AQGKT] [EGPS]; [RNQGT] *[AGST] [QGKT] [RGKT] *G;
[0146] [RNQGMST] [RNQGKPSV] [ANGPST] * [ARQGIKST] * [AGS];
[0147] [RNQGKTV] [RNQGKPS] * [ANQGSTV] [NGKMST] * [AGPS];
[0148] [QGKMT] [GFP]K* [NQEGTY] * [AQGY]; [NT] [AD] *K [RS] * [LP];
[0149] [NQMFTV] *K* [AQGMS] [AQGKTV] [EG];
[0150] [RGIKF] * [ARNQGT] * [AKMT] [ARGKS] [DEG];
[0151] [QMFT] [RNQGMPS] [RKP] [ANGST] **G; [NGMFT] [NGKS]K[DQT] **[GSW];
[0152] [GKFTY] * [AKPT] * [RNQST] [AGKST] [GS]; [QFS]K [GT] ** [ST]A;
[0153] T[RNS] [ARGK] ** [RQGT] [EG]; T*N*SKG (SEQ ID NO: 199642);
[0154] [GSTYV] *K [QT] [NGS] * [GS]; [KMFPSY] [LK] *S* [ANQIST]G; K [KS] [DST] *S*G;
[0155] [RNQMPTV] * [GKT]S [ARQKS] * [AGS]; G*K*TAA (SEQ ID NO: 199643);
[0156] K* [ANS] [GS] [GT] * [ADP]; [RQGKP] * [GKP] [NDPT] [AQMS] *A;
[0157] [MFT] *K[APT] *[RQ] [ADS]; M*SKS*A (SEQ ID NO: 199596);
[0158] TK [NMP] ** [ANQ]A; [NQGS]K**G [QGF]G; [NQF] [QS]K* [AS] *G;
[0159] GK [GT] [QT] **G; [RGT] [DGP]K [NQS] **A; TGK** [AST]A (SEQ ID NO: 199644); K [DS] [RN] *G* [AG]; [GMPTV] *K [ASTV] * [QST]G;
[0160] [ST]K* [AQ] * [QS]A; K*A [TV] * [RK]D; [MF]KN** [QP]A; Q [RQY] [KP] [ST] **A;
[0161] [NT] *KS* [ST] [AP]; TG**MKG (SEQ ID NO: 199645);
[0162] [QT] [RG] *S* [KT] [AP]; [FV] *K*TSA (SEQ ID NO: 199646);
[0163] QK[GT] [NS] **A; T**KS [GS]G (SEQ ID NO: 200022); [NP]K*S*GG (SEQ ID NO: 199647); NK**G[ST]A (SEQ ID NO: 199648); [QG]KN**SA (SEQ ID NO: 199649); TKS**SN (SEQ ID NO: 199650); MKNT**A (SEQ ID NO: 199651); Q*K[GS] *[NV]G; Q**KSNA (SEQ ID NO: 199652); NN**SKG (SEQ ID NO: 199653); M*N*GNA (SEQ ID NO: 199654); KTQ*S*S (SEQ ID NO: 199655); T**SGTP (SEQ ID NO: 199656); RS*S*GG (SEQ ID NO: 199522);
[0164] MG*R*GA (SEQ ID NO: 199514); [QT] *K[NS] [ST] *G; Q*KP*QG (SEQ ID NO: 199657); KA**GDR (SEQ ID NO: 199658); V*N*SSA (SEQ ID NO: 199641);
[0165] K*TG*RE (SEQ ID NO: 199659); M*K*TSG (SEQ ID NO: 199660); T*K*SSA (SEQ ID NO: 199661); YQK*S*S (SEQ ID NO: 199662); MK*T*TA (SEQ ID NO: 199663); KPN*S*A (SEQ ID NO: 199621); TK**GMG (SEQ ID NO: 199664); MPK*S*S (SEQ ID NO: 199665); DL*KP*K (SEQ ID NO: 199666);
[0166] KGNT**A (SEQ ID NO: 199667); MK*G*TG (SEQ ID NO: 199668); N**STMA (SEQ ID NO: 199669); NK**SDK (SEQ ID NO: 199670); T*K*SNS (SEQ ID NO: 199671); T*KG*VG (SEQ ID NO: 199672); TKQ**SA (SEQ ID NO: 199673); and V*NKV*G (SEQ ID NO: 199606); or polynucleotides encoding the same, where “*” represents any amino acid, square brackets surrounding a list of amino acids not preceded by the symbol “\hat{ }” denote a list of amino acids that may occur at a position, and square brackets surrounding a list of amino acids preceded by the symbol “\hat{ }” denote a list of amino acids that may not occur at a position.

[0167] In any of the aspects provided herein, or embodiments thereof, a viral particle having a capsid containing the motif has increased binding to a liver cell relative to a control viral particle.

[0168] In any of the aspects provided herein, or embodiments thereof, the library contains an amino acid sequence motif selected from one or more of: KQ**AKD (SEQ ID NO: 199674); NR**GGA (SEQ ID NO: 199675); KKD**RD (SEQ ID NO: 199676); QRNS**A (SEQ ID NO: 199677); NRGQ**A (SEQ ID NO: 199583); KKD**KD (SEQ ID NO: 199678); R*KDS*A (SEQ ID NO: 199634); RN**SGA (SEQ ID NO: 199679); RQ*PT*A (SEQ ID NO: 199515); or polynucleotides encoding the same, where “*” represents any amino acid and square brackets denote a list of amino acids that may occur at a position.

[0169] In any of the aspects provided herein, or embodiments thereof, a viral particle having a capsid containing the motif has increased binding to a brain endothelial cell relative to a control viral particle.

[0170] In any of the aspects provided herein, or embodiments thereof, the library contains an amino acid sequence motif selected from one or more of:
[0171] [QKMPT] [NKMPT] [ARGKS] [AQGT] ** [AG]; [TV]KPS**G (SEQ ID NO: 199680);
[0172] [QT] [KS] *G [NKT] *G; [KMT] [RT] [GS] ** [NMT]G;
[0173] [RQMT] [RQGK] [QPST] * [RGTV] *G; [GM]K [PS] ** [NT]G; KPT**MA (SEQ ID NO: 199681); [QGKT] * [GPT] [NQGT] [RKT] *G; [KT] [KS]SS** [AG];
[0174] [NGS] [AK] * [GKS] [NST] * [AP]; [GK] *T* [RT] [QS]G;
[0175] [QKT] [GKF] ** [RGT] [GSY]G; [QKS] [RGKT] * [NT] [ANGT] *G; T**NRGG (SEQ ID NO: 199556); [NK] [RY] *T*[TV]G; Q*PTS*A (SEQ ID NO: 199682);
[0176] [FS] [NG]K*[GS] *G; QR**STA (SEQ ID NO: 199683); [QMS]K*G*[NT]G;
[0177] K*ST*NG (SEQ ID NO: 199684); QRSS**G (SEQ ID NO: 199685);
[0178] [KV] [NK] * [GV] *S [AG]; N [RT] [AR] * [NT] *A; KN*GQ*G (SEQ ID NO: 199686); K*S*QSA (SEQ ID NO: 199687); [RN] [ST] [KS] *S* [GP]; QKN*A*A (SEQ ID NO: 199688); RP**MAG (SEQ ID NO: 199689); N**STMA (SEQ ID NO: 199669); N*K*GGG (SEQ ID NO: 199690); KTT**GG (SEQ ID NO: 199691); YKQ**GG (SEQ ID NO: 199692); N*K*SNP (SEQ ID NO: 199693);
[0179] NKN*G*A (SEQ ID NO: 199694); S**KTGG (SEQ ID NO: 199695); GN*VK*G (SEQ ID NO: 199696); M*SKS*A (SEQ ID NO: 199596); MK**SAG (SEQ ID NO: 199697); N*K*SQG (SEQ ID NO: 199698); NRPS**P (SEQ ID NO: 199699); QKT**GG (SEQ ID NO: 199700); RS*Q*QS (SEQ ID NO: 199701);
[0180] and T*RT*GG (SEQ ID NO: 199702); or polynucleotides encoding the same, where “*” represents any amino acid and square brackets denote a list of amino acids that may occur at a position.

[0181] In any of the aspects provided herein, or embodiments thereof, a viral particle having a capsid containing the motif has increased binding to a brain endothelial cell relative to a control viral particle.

[0182] In any of the aspects provided herein, or embodiments thereof, the library contains an amino acid sequence motif selected from one or more of: QSRT**P (SEQ ID NO: 199580); MSRN**A (SEQ ID NO: 199591); KKD**RD (SEQ ID NO: 199676); NRGQ**A (SEQ ID NO: 199583); KKD**KD (SEQ ID NO: 199678); KKD*K*D (SEQ ID NO: 199703); NR**GGA (SEQ ID NO: 199675); and R*KDS*A (SEQ ID NO: 199634); or polynucleotides encoding the same, where “*” represents any amino acid and square brackets denote a list of amino acids that may occur at a position.

[0183] In any of the aspects provided herein, or embodiments thereof, a viral particle having a capsid containing the motif has increased binding to a brain endothelial cell relative to a control viral particle.

[0184] In any of the aspects provided herein, or embodiments thereof, the library an amino acid sequence motif selected from one or more of: NR**GGA (SEQ ID NO: 199675); [STY] [KP] * [QS] [GSV] *G; [GM] ** [GT] [GK] [NF]G; QRPN**A (SEQ ID NO: 199704); [QS]K[GT] *S*G; Q*K*AQG (SEQ ID NO: 199705); Q* [GK] [NS] [KS] *G; [QY] [RK]P* [AT] * [AP]; [QM]K*G*TG (SEQ ID NO: 199706); TK*N*QG (SEQ ID NO: 199707); K*ST*SG (SEQ ID NO: 199708); KN*G*SA (SEQ ID NO: 199570); KN*GQ*G (SEQ ID NO: 199686); MK**SQG (SEQ ID NO: 199709); TGT*R*G (SEQ ID NO: 199710); GK*ST*A (SEQ ID NO: 199711); MK*GS*G (SEQ ID NO: 199712); MSK**AG (SEQ ID NO: 199713); K*PTT*G (SEQ ID NO: 199714); KP*T*GG (SEQ ID NO: 199619); MP**SGS (SEQ ID NO: 199715); Q*K*SNG (SEQ ID NO: 199716); QKY*T*G (SEQ ID NO: 199717); R*PS*QG (SEQ ID NO: 199718); T**PTAG (SEQ ID NO: 199719); and TGKS**A (SEQ ID NO: 199622); or polynucleotides encoding the same, where “*” represents any amino acid and square brackets denote a list of amino acids that may occur at a position.

[0185] In any of the aspects provided herein, or embodiments thereof, a viral particle having a capsid containing the motif has increased transduction efficiency for a brain endothelial cell relative to a control viral particle.

[0186] In any of the aspects provided herein, or embodiments thereof, the library contains an amino acid sequence motif selected from one or more of: N**SRQG (SEQ ID NO: 199528); SP**RGG (SEQ ID NO: 199640); NQ**RSA (SEQ ID NO: 199720); QKY*T*G (SEQ ID NO: 199717); S*QQR*G (SEQ ID NO: 199721); MRG**MG (SEQ ID NO: 199505); NR**GGA (SEQ ID NO: 199675); NRGQ**A (SEQ ID NO: 199583); T**NRGG (SEQ ID NO: 199556); T*S*RMG (SEQ ID NO: 199532); T*TNR*G (SEQ ID NO: 199587); and TAN*R*G (SEQ ID NO: 199586); or polynucleotides encoding the same, where “*” represents any amino acid and square brackets denote a list of amino acids that may occur at a position.

[0187] In any of the aspects provided herein, or embodiments thereof, a viral particle having a capsid containing the motif has increased binding to a brain endothelial cell relative to a control viral particle.

[0188] In any of the aspects provided herein, or embodiments thereof, the library contains an amino acid sequence motif selected from one or more of:
[0189] [QKMFT] [RNQP] [RQKPS] [ARDG] **G;
[0190] [RQGMSTY] [ARNKP] [RNGKPST] ** [RNQGKMST] [AEG];
[0191] [QGF] [GPT] [RK] * [NMS] *G; [RK] [NQ] [PT] ** [AT]G;
[0192] [RMT] [RQGT] [NPST] * [RQV] *G; [KMST] * [NQGT] [RQGS] [RQT] *G;
[0193] [RNY] [RKP]Q** [QGT] [AG]; [NQKT] [RKP] ** [NGS] [NQGTV]A;
[0194] [RKMST] [NGKPS] * [ARQS] * [ANQGTY] [AS]; [RKMP] [NKS] * [ANQS] * [AGSV]G;
[0195] [RGMFT] [NK] * [AGPV] [NGKTV] *G; [RKMTY] * [RKPST] [AGST] [GST] * [GPS];
[0196] SK*GN*A (SEQ ID NO: 199722); KP [AP] **G [AG]; [NST] [RK] *T* [NGV]G;
[0197] [RNT] * [GKT] * [ARGK] [QMST]G; [GK] [NP] [KS] * [NS] * [AS]; QK*GT*G (SEQ ID NO: 199555); [RQK] ** [ANT] [RT] [GT]G; [RK] [NF] ** [GTV]SG;
[0198] [GK] [KP] * [SV]S* [NP]; TG*NK*A (SEQ ID NO: 199723);
[0199] [NT] [RT] [PS] [KS] ** [AP]; QKY*T*G (SEQ ID NO: 199717); RS**TQS (SEQ ID NO: 199724); [RN] * [NT] [RS] *GG; KTQ**AS (SEQ ID NO: 199725);
[0200] RS**GGG (SEQ ID NO: 199726); KPP*T*G (SEQ ID NO: 199727);
[0201] [KY] * [QP]T* [GT]G; S*TT*NG (SEQ ID NO: 199728); KSPT**A (SEQ ID NO: 199729); SRTT**G (SEQ ID NO: 199730); [GY]K[QT] [QT] **G; Q**KSNA (SEQ ID NO: 199652); K*NST*A (SEQ ID NO: 199731); TRS*T*G (SEQ ID NO: 199732); K*S*SGA (SEQ ID NO: 199733); N**SRQG (SEQ ID NO: 199528); VRP*T*G (SEQ ID NO: 199734); Y*T*SKG (SEQ ID NO: 199735);
[0202] TR*VS*G (SEQ ID NO: 199736); TG**RSG (SEQ ID NO: 199585); K*P*SGG (SEQ ID NO: 199737); KTS**GG (SEQ ID NO: 199738); N**GQKG (SEQ ID NO: 199739); N*GNR*A (SEQ ID NO: 199740); QR*NS*A (SEQ ID NO: 199551); QRP*S*A (SEQ ID NO: 199741); R*QN*TG (SEQ ID NO: 199742);
[0203] RP*T*AP (SEQ ID NO: 199743); SRTT*NG (SEQ ID NO: 199576); and
[0204] TKSS**A (SEQ ID NO: 199630); or polynucleotides encoding the same, where “*” represents any amino acid and square brackets denote a list of amino acids that may occur at a position.

[0205] In any of the aspects provided herein, or embodiments thereof, a viral particle having a capsid containing the motif has increased transduction efficiency for a brain endothelial cell relative to a control viral particle.

[0206] In any of the aspects provided herein, or embodiments thereof, the library contains an amino acid sequence motif selected from one or more of:
[0207] [\hat{ }ADCEGHILWY] * [\hat{ }DCEGHILFWY] [ARNGKMPST] [ARNQGISTV] *G;
[0208] [\hat{ }ADCEHILMWY] [\hat{ }DCEHILFPWY] [\hat{ }RCEHILMFW] * [\hat{ }NDCEHLFPWY] *G;
[0209] [\hat{ }ADCEHILMW] [\hat{ }CEGHIFWYV] [\hat{ }CEHILFPW] [\hat{ }CEHILKMFWY] **G;
[0210] [RNDQKMPV] [ARNQMPST] ** [ARNQGKST] [ARNDQGKTV] [ARDIKPS];
[0211] [\hat{ }ARDCEHILW] [ARQGKPST] ** [ARNQKMSTV] [ANQGKMTYV]G;
[0212] [\hat{ }ACEHILMFSW] [\hat{ }CEHIKFWYV] * [\hat{ }DCQEHLFWY] [\hat{ }DCEHLFTWY] * [AEGLKP];
[0213] [RQKMSTV] ** [ARNQKPSTV] [ARNQGMSTV] [ARNQGSTV]G;
[0214] [\hat{ }RDCEHLPW] [\hat{ }CEHILMPSWV] [\hat{ }ANCEILMFWV] * [\hat{ }DCQILMFWV] * [NDQEGMPSY];
[0215] [RNQGKMS] [RQKST] [\hat{ }RDCEHILFWY] * [ARNMSTV] * [APS];
[0216] [\hat{ }ADCEHLFPW] * [ARNQGPST] [RQGKSTY] * [ANGKMSTV]G;
[0217] [\hat{ }ADCEHIK] [\hat{ }CQEHILFWY] [ARNQGKMPS] ** [ANQGKMSV]G;
[0218] [\hat{ }ADCEHPTWV] [\hat{ }ARCEIFWYV] [\hat{ }CILFTWY] ** [ARQGKPSTV] [ANDQEGKMS];
[0219] [RNQGSTV] **[RNGKSTV] [\hat{ }ADCHLMFPWY] [\hat{ }CHILKPWYV] [AGKPSV];
[0220] [RNGKFTYV] * [ARNQGPST] * [ARNQKPSTV] [ADQGKMSTV]G;
[0221] [ANQMFSTV] *K* [AQGST] [ANQGMST]G;
[0222] [\hat{ }ADCEHILW] * [\hat{ }ACEHILFWYV] [ANQGKPSTV] * [\hat{ }DCEHILKFWY] [ANDGPSY];
[0223] [\hat{ }ADCEHITW] [\hat{ }DCEGHIMFWY] * [ANQGMPSTV] * [\hat{ }RDCEHLPTWY]G;
[0224] [RNQILKFSV] [QGKPST]T** [ARQGKMST] [ADEGS];
[0225] [\hat{ }ACHILKW] [\hat{ }CEHILMFPWY] [\hat{ }NDCELFWYV] [\hat{ }RNCEILMFWY] ** [\hat{ }CQHILKMPTY];
[0226] [RNQGKMSY] [\hat{ }RDCGHILMWY] ** [ARGKMSTV] [\hat{ }NDCEHLPWYV] [DGPS];
[0227] [\hat{ }ARCEHILWY] [ARQGKST] * [\hat{ }CQEHILMFWY] [ARNGPST] * [NDGPS];
[0228] TK [ANQMST] ** [QKS] [NDS];
[0229] [NQGKMST] * [ARNQGKPS] [ARNQGPTV] [RNQHKMT] * [NGPS];
[0230] [NGFST]K**[ANGSTY] [ANGMPT]A; [RQMFS] [RKPT] **[NQGT] [NQS] [NGS];
[0231] [\hat{ }ADCEHPTW] [RNQLKMPST] * [\hat{ }CEILKFWY] * [\hat{ }CEHILPSWY] [ANDQEKPS];
[0232] [QT] * [QT]R*QA; [RNGT] * [RNGKST] [ARNQGT] [RNQGKMT] * [AG];
[0233] [DQEMPST] [ARGK] * [ARNQGKS] * [ADQGKSY] [ADLMPT];
[0234] [NGIKFTV] * [ARNGKTY] * [NQKMSTV] [ARNIKSV] [ADEPS];
[0235] [RNQKMFST] [RDQKS] [RNQPST] * [AGS] * [AS];
[0236] [RQGKS] [QKST] [RNQST] ** [NT] [GPS];
[0237] K**[ANGSTY] [QGMST] [ANGKMT] [ADEGP];
[0238] [RKM] [RNQGPS] *[ANQST] [NQST] * [GS]; [RQGIKT] [PS] [RKPS] *[ANGMT] *G;
[0239] [RQKM] *[NPS] *[AQGT] [ANQGST] [APS];
[0240] [ADK] ** [NGPST] [AEGMST] [ANQGKT] [ARS]; [QKMPTV] * [NKPS] [QGKPT]S*A;
[0241] [RNQGST] * [RNQGKSV] * [RNQGK] [AGKTV]G; [NQGKT] [RNK] * [ANGST] [ANGMT] *A;
[0242] [RNQGKMY] [RNQGS] * [NQGKS] * [AQGST] [AG]; [NK] **G[QT] [KS]G;
[0243] [RKMTY] [RP] [RNGKPS] * [ANQST] * [GPST];
[0244] [QKMFPYV] [RNGKPST] [RNGPST] [ARDQGKST] ** [GPS];
[0245] [RNQGKWV] [ANQKPSTV] [ARNQGKST] [AQGKST] ** [AP]; TK* [GSTV] * [QGV]G;
[0246] T[RGS] [RGKT] ** [RNST] [EGP]; [RGV]P[RNK] * [QST] *A;
[0247] [RKMV] * [ANPST]S [GKST] * [DGPS];
[0248] [NQMSTV] [RNQGHK] ** [ARGIKMST] [ARQKSV] [ADE]; [NQK] * [NKT] *S [NV]G;
[0249] [RNQFT] [RQK] [QGKST]N** [APS]; [NT] [GK] [NKMS] ** [ANQT]A;
[0250] [RQK] * [ANQGPST] [NGS] [ANGKPT] * [AGP]; [TYV] * [RK] [QGT]S* [GPS];
[0251] [NK] [RNP] [PT] [NS] ** [GP]; K* [NG] [AY] *KE; [NQ]R [NQGT] ** [NQT]A;
[0252] MKN* [GS] *G (SEQ ID NO: 199744); [QGKM] * [GS] * [KS] [NG] [AG];
[0253] [RNGMTYV] [RGKS] * [AQKPS] [NGS] *A; [QMTYV] [GK] * [NGKS] *TG;
[0254] [QKM] [RKMS] [NDP] [GSTV] **A; [NQSY]K* [QS] [ANQSV] *G; [QMT]RP** [AMS]A;
[0255] K*T [GI] * [RK] [DE]; [RQP] * [KPT] [DQGS] [AS] *A; TKP** [AQ]A (SEQ ID NO: 199745); T [RK] ** [NGL] [NMS] [AG]; K**Q [AS] [GK] [DS]; RQ* [NP]T*A (SEQ ID NO: 199746); [KS] [GY] *T* [TV]G; K* [QT] [GT] [GS] * [AS]; RT*T*SA (SEQ ID NO: 199747); K*A [NV] * [RS] [DG]; [NK] **Q [AR]S [AS];
[0256] [QG] [RP] [KP]N**A; [RT] [GS] ** [RN] [ST]G; MRPN**G (SEQ ID NO: 199748); G*KSV*G (SEQ ID NO: 199601); NK*T*SA (SEQ ID NO: 199749);
[0257] [NF] * [NK] * [NG]T [AS]; [GK] [KP] [NQT] * [GS] *A; MRT**SP (SEQ ID NO: 199750); [NM]K*QT*[GS]; GN**KNG (SEQ ID NO: 199751);
[0258] [NT] [GT] [RK] *N*A; K*ASS*A (SEQ ID NO: 199571); RT*GT*G (SEQ ID NO: 199752); [RQS] [AR] [PT] ** [NV] [GS]; RPT*S* [GS](SEQ ID NO: 199753);
[0259] K**GKSA (SEQ ID NO: 199754); [GV]KP**NA (SEQ ID NO: 199755);
[0260] TK*T* [KS] [AD]; TGK*G*A (SEQ ID NO: 199756); KP*GT*G (SEQ ID NO: 199757); RP*QQ*A (SEQ ID NO: 199758); KPNN**P (SEQ ID NO: 199759);
[0261] TGK**SA (SEQ ID NO: 199620); G**QKSG (SEQ ID NO: 199760); TG**KTA (SEQ ID NO: 199761); TN**RQG (SEQ ID NO: 199762); TG*K*SG (SEQ ID NO: 199763); I*AR*KE (SEQ ID NO: 199764); N*K*NNG (SEQ ID NO: 199765); R*S*STP (SEQ ID NO: 199506); KGNN**G (SEQ ID NO: 199567);
[0262] TK*N*QG (SEQ ID NO: 199707); G**QKGG (SEQ ID NO: 199766); K*AT*KD (SEQ ID NO: 199767); K*NQS*G (SEQ ID NO: 199768); KPS*N*A (SEQ ID NO: 199627); R*S*NVA (SEQ ID NO: 199769); RP*GT*A (SEQ ID NO: 199770); SRTT*NG (SEQ ID NO: 199576); TKQ**SA (SEQ ID NO: 199673);
[0263] and TS**RTP (SEQ ID NO: 199771); or polynucleotides encoding the same, where “*” represents any amino acid, square brackets surrounding a list of amino acids not preceded by the symbol “\hat{ }” denote a list of amino acids that may occur at a position, and square brackets surrounding a list of amino acids preceded by the symbol “\hat{ }” denote a list of amino acids that may not occur at a position.

[0264] In any of the aspects provided herein, or embodiments thereof, a viral particle having a capsid containing the motif has increased biodistribution to liver relative to a control viral particle.

[0265] In any of the aspects provided herein, or embodiments thereof, the library contains an amino acid sequence motif selected from one or more of:
[0266] RQSA**T (SEQ ID NO: 199772); RAHS**A (SEQ ID NO: 199773); DG*K*KL (SEQ ID NO: 199774); NR*A*DK (SEQ ID NO: 199775); G*N*ANR (SEQ ID NO: 199776); RQ**NST (SEQ ID NO: 199777); [RKT] [STV] [RQE] **R[ADE];
[0267] T*GG*RN (SEQ ID NO: 199778); Q*G*VRG (SEQ ID NO: 199779); MDK**QR (SEQ ID NO: 199780); NGG**GR (SEQ ID NO: 199781); V*RQ*AG (SEQ ID NO: 199782); L*REG*R (SEQ ID NO: 199783); QAG**RG (SEQ ID NO: 199784); QR*VV*A (SEQ ID NO: 199785); RE**ARG (SEQ ID NO: 199786);
[0268] RQMA**A (SEQ ID NO: 199787); S**REIR (SEQ ID NO: 199788); TK*R*DT (SEQ ID NO: 199789); V*R*SAG (SEQ ID NO: 199790); V*RS*GG (SEQ ID NO: 199791); and VQR*S*G (SEQ ID NO: 199792); or polynucleotides encoding the same, where “*” represents any amino acid and square brackets denote a list of amino acids that may occur at a position.

[0269] In any of the aspects provided herein, or embodiments thereof, a viral particle having a capsid containing the motif has increased transduction efficiency for a liver cell relative to a control viral particle.

[0270] In any of the aspects provided herein, or embodiments thereof, the library contains an amino acid sequence motif selected from one or more of:
[0271] [RNGPS] * [GKSTY] [RNGKST] * [ANGMSTV]A;
[0272] [RNGKST] [NQGKP] * [NQGKPS] [NQKMSTV] *A; K** [AS] [AS] [AK] [EPS];
[0273] [RNQGKPSTV] [ARNGKPSTV] [ANDQGPSTY] [NQGKPST] ** [AMPSV];
[0274] [RQGKPST] [RQLKPT] [NDQST] * [ANQGSV] * [AGSV];
[0275] [RGKMST] [NKPST] ** [AQGKSTV] [ANDQG] [RDGPS];
[0276] [RKMPST] [ARGKPST] [ANQPSTYV] ** [ARNGKMST] [ADMPS];
[0277] [NDGPT]K* [NQGKPT] * [NQG]A; [KP] [RNGPT] * [QGST] [ANQT] * [GPS];
[0278] [QGPS] [QK] ** [ANST] [GMST]A; [NGPT] [NQGK] [NKV] **[ANGST]A;
[0279] [NPST] * [NK] [AQKT] * [QS] [PS]; [RNGK] * [NQST] [ANQGKST] [ARNGPT] *A;
[0280] [RNQPST] [QGK] *S* [ANQGKS] [GP]; K [NPT] * [ANGS] * [QTV]A;
[0281] [RQPT] [NDGKT] [KS] [AGST] **A; [RNQK] [PST] [NQKT] ** [NQT] [APS];
[0282] [KP] [RQP] *T [GT] *A; [RKP] [QS] [NGKPS] * [GT] *A; K* [NS] [AQGT] * [QGS]A;
[0283] [RN] [ANSV] [NGK] ** [QMV]G; [NK] [KST] ** [NGP] [AQGT]A;
[0284] [NGK] * [QKT] * [NQGP] [QGMTV] [AGS]; [QPST]K* [NGPS] [AMST] * [AG];
[0285] [KT] [RT] *SG* [PV]; KQ [GT] [QT] **A; [NKMT] * [RNQPS] [NGK] [ARGT] * [GMPV];
[0286] K*N* [NG] [NGV]A; R [PS] * [PS]G*A; [GST] [QGS]K*N*A;
[0287] [KS] * [NT] * [GS] [IS] [AP]; NKPA**S (SEQ ID NO: 199793);
[0288] [GKPS] [RKST] * [AQS] * [NS] [AGS]; [NK] ** [NPST] [GPT] [ANM]A;
[0289] [NQP] *K [PST] [ST] *A; [PT] *KG [AG] *A; SK [MT] **Q [AP]; NTR**SA (SEQ ID NO: 199503); PKS**SG (SEQ ID NO: 199794); TK*PS*S (SEQ ID NO: 199795); [NG] *K[ST] [QT] *[GP]; FGKQ**S (SEQ ID NO: 199796);
[0290] [NQ] [RKPSTV] [ARNKT] * [NGT] * [AGM]; [RK] * [NT] [NS] * [NS]P; K*N [QT]S*A (SEQ ID NO: 199797); [KMS] ** [GS] [AN] [NQT] [AG]; [NQ]K* [AT] [AG] *A;
[0291] KQ**AKD (SEQ ID NO: 199674); K* [PT]S* [AQG]A; [NMS] *K [PS] * [NG]G;
[0292] NAKS**G (SEQ ID NO: 199798); KQ**TQA (SEQ ID NO: 199799);
[0293] [NK] [ST] [NK] * [AT] *P; K*TQ*GA (SEQ ID NO: 199800); T**QSGF (SEQ ID NO: 199801); KTQ*T*G (SEQ ID NO: 199802); QK**GAP (SEQ ID NO: 199803); SK**NAA (SEQ ID NO: 199804); K*AT*KD (SEQ ID NO: 199767);
[0294] R*N*ANP (SEQ ID NO: 199805); GKQ*S*P (SEQ ID NO: 199806); PQKS**A (SEQ ID NO: 199807); N[GK] *[KT] *SA; SQ**TNP (SEQ ID NO: 199808);
[0295] PR*Q*SP (SEQ ID NO: 199809); NG*R*TP (SEQ ID NO: 199810); TKM**QA (SEQ ID NO: 199811); NK*TN*S (SEQ ID NO: 199812); N*K*NNG (SEQ ID NO: 199765); PK*GN*A (SEQ ID NO: 199813); FQKA**G (SEQ ID NO: 199814); G*KT*QA (SEQ ID NO: 199815); K**TSQS (SEQ ID NO: 199816);
[0296] K*ASS*A (SEQ ID NO: 199571); MNQ*R*P (SEQ ID NO: 199817); RQ*A*TS (SEQ ID NO: 199818); SK**NQP (SEQ ID NO: 199819); and TKN**QS (SEQ ID NO: 199820); or polynucleotides encoding the same, where “*” represents any amino acid and square brackets denote a list of amino acids that may occur at a position.

[0297] In any of the aspects provided herein, or embodiments thereof, a viral particle having a capsid containing the motif has increased biodistribution to heart relative to a control viral particle.

[0298] In any of the aspects provided herein, or embodiments thereof, the library contains an amino acid sequence motif selected from one or more of:
[0299] [GFTW] [AKM] [NQKPT] [QGKP] ** [AG]; [MT] [RGP] [RQP] [KS] **G;
[0300] [QMT] [RGP] [RQGP] * [QKMT] *G; [QG] * [AGP] [GT]K*G; [RF] [KP] ** [AQ] [NQ]G;
[0301] KT[AS] ** [GK] [AEP]; G**TKMG (SEQ ID NO: 199821);
[0302] [GK] * [PT] [QG] * [QS]G; [GT] [NG] ** [RK]SG; [QT] * [RG]S [KT] *G;
[0303] [QK] * [GP] * [KST] [GSV]G; [RM]SS [KT] ** [AS]; [RM] [NQG]S* [GKV] *G;
[0304] [MT] *STK*G (SEQ ID NO: 200023); K[GT]S [QT] **G; K*P [NS] *GA (SEQ ID
[0305] NO: 199822); K[MST] [PS] [GT] **A; K[DT] [AR]S** [AG]; [IY]KP** [KS] [ND];
[0306] R[NQ]S [AS] **G; M*SKS*A (SEQ ID NO: 199596); K*S [AN] * [AGS] [AS];
[0307] [QGF] [NKS] * [GPV] [NGK] *G; [RK] [DST] [RS] * [GS] * [AGP];
[0308] [KT] [GY] * [KT] *TG; R*SN*TG (SEQ ID NO: 199552); AKY*K*E (SEQ ID NO: 199823); [KT] [QG] [AT] **[ST]G; MR*NQ*G (SEQ ID NO: 199604); K*PT*TG (SEQ ID NO: 199824); NRPS**P (SEQ ID NO: 199699); KRPD**G (SEQ ID NO: 199825); R*SSV*G (SEQ ID NO: 199826); KSSS**G (SEQ ID NO: 199827); TK*S*YA (SEQ ID NO: 199828); FK*S*QG (SEQ ID NO: 199829);
[0309] K**NTTG (SEQ ID NO: 199830); FK*P*QG (SEQ ID NO: 199831); FKM**QG (SEQ ID NO: 199832); GK*VS*N (SEQ ID NO: 199833); K*SSV*G (SEQ ID NO: 199834); K*ST*NG (SEQ ID NO: 199684); KF**TSG (SEQ ID NO: 199835); KGSS**P (SEQ ID NO: 199836); N*K*GMG (SEQ ID NO: 199837);
[0310] and YKP*T*P (SEQ ID NO: 199838); or polynucleotides encoding the same, where “*” represents any amino acid and square brackets denote a list of amino acids that may occur at a position.

[0311] In any of the aspects provided herein, or embodiments thereof, a viral particle having a capsid containing the motif has increased biodistribution to spleen relative to a control viral particle.

[0312] In any of the aspects provided herein, or embodiments thereof, the library contains an amino acid sequence motif selected from one or more of:
[0313] [NEGKMFTWY] [ARDKPST] [ARNQGST] [ANQKPST] **[AGFS];
[0314] [ARQLKM] [ANGHIT] * [RQGHP] * [AGKST] [ARDKS];
[0315] [GKFTY] [GKT] **[ARGV] [AQFS]G;
[0316] [NGKT] **[NGKMPT] [LKPST] [NGHKMFT] [RDGSY];
[0317] [RNQKMT] [RNGIL]P [NDHKST] ** [ANGKPV];
[0318] [DEGKMFT] [GKMFP] [ARHMF] ** [NQGKST] [DGKP];
[0319] [RQGFYV] * [RGLKPS] [RNGS] * [ANDQPT] [RGKPY];
[0320] [RQKM] [RGT] *[NGP] [AQGPV] *[GMY];
[0321] [RQGIKMTYV] [RNDQGHPST] [\hat{ }DCEILMFWYV] * [\hat{ }DCEHLKFWY] * [ANGKFPS];
[0322] [RGKMSTV] *[ARNHMST] [NQKST] [ARGKTV] *[ARG]; K*PG*QG (SEQ ID NO: 199839); [QGFT] [ANK] * [APTV] [ARNGKP] * [GV]; [TY]KP*T* [PY];
[0323] [QGTY] [RK]P**[AGMS] [ANG]; [GLMTY]K*[HPS] *[NFSY] [AQG];
[0324] [NKT] [RGY] * [KT] * [TV]G; [RM] [HP] [KP] ** [HP] [AM];
[0325] [RKMTY] * [GPT] * [ARNST] [QGKS]G; Q* [RP] [QG] [KT] * [GP]; S*NAH*R (SEQ ID NO: 199840); R**VRDV (SEQ ID NO: 199841); KM**PKD (SEQ ID NO: 199590); RP**[QG] [NG]G; SP**RGG (SEQ ID NO: 199640);
[0326] [MST] [HKY] [GP] [AQ] ** [KY]; [QFV] [QP] [RNG]H** [KV];
[0327] [RY]P* [KS]S* [AGS]; FK* [PS] *QG (SEQ ID NO: 199842); MGS*K*G (SEQ ID NO: 199843); [NK] * [RS] * [TV] [TY] [GM]; G*TQ*SG (SEQ ID NO: 199844);
[0328] TR*VS*G (SEQ ID NO: 199736); YKPP**G (SEQ ID NO: 199845); QR*S*TG (SEQ ID NO: 199525); SK**YGA (SEQ ID NO: 199846); TK*VS*N (SEQ ID NO: 199847); QK*PS*A (SEQ ID NO: 199848); GK*ST*A (SEQ ID NO: 199711); QKS*S*G (SEQ ID NO: 199849); K*TI*KD (SEQ ID NO: 199850);
[0329] GK*PS*A (SEQ ID NO: 199851); AKY*K*E (SEQ ID NO: 199823); FK*T*MS (SEQ ID NO: 199852); GK*VS*N (SEQ ID NO: 199833); K*MQ*QG (SEQ ID NO: 199853); Q*KPH*N (SEQ ID NO: 199854); QKT**GG (SEQ ID NO: 199700); QPRG**G (SEQ ID NO: 199855); R**SVAG (SEQ ID NO: 199856);
[0330] R*Q*APF (SEQ ID NO: 199857); and SK**NQP (SEQ ID NO: 199819); or polynucleotides encoding the same, where “*” represents any amino acid, square brackets surrounding a list of amino acids not preceded by the symbol “\hat{ }” denote a list of amino acids that may occur at a position, and square brackets surrounding a list of amino acids preceded by the symbol “\hat{ }” denote a list of amino acids that may not occur at a position.

[0331] In any of the aspects provided herein, or embodiments thereof, a viral particle having a capsid containing the motif has increased biodistribution to kidney relative to a control viral particle.

[0332] In any of the aspects provided herein, or embodiments thereof, the library contains an amino acid sequence motif selected from one or more of: YMNN**K (SEQ ID NO: 199858); I*RS*TG (SEQ ID NO: 199859); NGG**GR (SEQ ID NO: 199781); and RQMA**A (SEQ ID NO: 199787); or polynucleotides encoding the same, where “*” represents any amino acid and square brackets denote a list of amino acids that may occur at a position.

[0333] In any of the aspects provided herein, or embodiments thereof, a viral particle having a capsid containing the motif is capable of transducing kidney cells in vivo.

[0334] In any of the aspects provided herein, or embodiments thereof, the library contains an amino acid sequence motif selected from one or more of:
[0335] GK** [ST] [NMT] [AP]; [NK] * [NS] [KT] [NS] *A; [NGP] [QKS] [KT] * [NGS] * [AG];
[0336] K*N [AN] * [NQG] [AP]; [NQKPS] [NQKT] [AQGKST] [AQGST] ** [AGS];
[0337] [KP] [KPST] ** [ANK] [ANDG] [ADPS]; [NKV] [NG] * [GK] * [KST] [AG];
[0338] [GP] [RNK] [NKPT] ** [GS] [AM]; K*TS* [AS] [AV];
[0339] [NGPST] [GK] * [NQGKS] [NKT] *A; PR*Q*SP (SEQ ID NO: 199809);
[0340] [NP] [RKS] [NK] * [GT] * [APV]; [NG] [QK] [KT]N**A;
[0341] [RPST] [KT] [NMS] ** [AQT] [PS]; [NT] *KS* [ST] [AP];
[0342] [KM] [NPT] **G [QG] [ARS]; K*N* [GS] [NI]A;
[0343] [RNPS] [ARNK] [ANG] [QGKS] ** [AGP]; K [LKPT] [ND] * [AGS] *A;
[0344] KT [NQ] ** [AQGMS] [AS]; K [NQT] * [GPS] [AQGV] * [APV]; [PS] *K [AQ] *QS;
[0345] [NP] *KS [ST] *A; KQ [GT] * [TV] *A; K*TS*QA (SEQ ID NO: 199860);
[0346] [KT] * [NKP] [NG] [AG] * [AMP]; P*KG*GV (SEQ ID NO: 199861);
[0347] [NP] [RG] * [QS] [QK] *P; KP [QS] [NT] ** [AM]; K**PGMA (SEQ ID NO: 199862); N*K*NNG (SEQ ID NO: 199765); RPNN**P (SEQ ID NO: 199863);
[0348] K*T*QQA (SEQ ID NO: 199864); [PS]K[PT] **[QG] [AS]; PK*PS*A (SEQ ID NO: 199865); KTV**KD (SEQ ID NO: 199866); KA*TN*A (SEQ ID NO: 199867); KN*A*QA (SEQ ID NO: 199868); K*QTG*A (SEQ ID NO: 199869);
[0349] KTNG**P (SEQ ID NO: 199870); K*T*NTS (SEQ ID NO: 199871); KTN*A*P (SEQ ID NO: 199872); KST**TA (SEQ ID NO: 199873); DK*K*GA (SEQ ID NO: 199874); KPNN**P (SEQ ID NO: 199759); KTQ*S*S (SEQ ID NO: 199655); N*QKT*G (SEQ ID NO: 199875); K**TGNA (SEQ ID NO: 199876);
[0350] K*N*NVA (SEQ ID NO: 199877); KP*TN*S (SEQ ID NO: 199878); KPA**GA (SEQ ID NO: 199879); P*KG*SA (SEQ ID NO: 199880); QK**GAP (SEQ ID NO: 199803); SK*S*QP (SEQ ID NO: 199881); or polynucleotides encoding the same, where “*” represents any amino acid and square brackets denote a list of amino acids that may occur at a position.

[0351] In any of the aspects provided herein, or embodiments thereof, a viral particle having a capsid containing the motif has increased biodistribution to serum relative to a control viral particle.

[0352] In any of the aspects provided herein, or embodiments thereof, the library contains an amino acid sequence motif selected from one or more of:
[0353] [RQKP] [RQPT] ** [ANGT] [ANGS] [AS];
[0354] [RNQKP] [RGST] [RNQKPV] **[ARNGKMST] [RDGMPS]; K*[NQT] *[QGS] [NQIM]A;
[0355] [EGKMPST] [RGKPST] [ANQPSTYV] ** [ANGST] [AKPS];
[0356] [RNQGKPW] [ARNQGPST] [ANDQGKS] [NQGKT] ** [AKMPS];
[0357] [NGT] * [KS] [NGKS] [ANGMT] *A;
[0358] [RNGHKMP] * [NQGPSTYV] [ARNQGK] * [ANQGKS] [ARDG];
[0359] [NKT] *[NQPS] [NGK] [ARGT] *[GMP]; [NGPS] *[NQK] [AQKT] *[NQST] [GPS];
[0360] [NQGMPSV] [KS] [ANKSTY] [ANQGT] ** [AP];
[0361] [RGKMPSV] [QKPST] [NDQKST] * [ANQGSV] *A; [KMPT] [RPT] [NK] * [GS] * [GPSV];
[0362] [QGPSTV]K* [NQGPSV] [ANMST] * [AGPS]; [QK] * [NG] [NS] * [NGV] [GP];
[0363] [RGTV] ** [NQS] [QGTY] [NMT] [AKP]; [NPS] *K [GS] * [ST]A;
[0364] K** [QG]A [QS] [AS]; [NQPT] [KV] [NQKT] * [AGS] * [GMS];
[0365] [RNGKT] [QGPST] * [NQGKS] [ANQGKTV] * [AGV]; [QGT] [GT]K** [AT]A;
[0366] [NDKS] * [RKT] * [NGMS] [NPST] [KPS]; [NK] [AGT] * [GKS] [AKS] *P;
[0367] [GK] * [QHK] * [NP] [LTV] [AQ]; [QKP] * [ANK] [QST]S*A;
[0368] [NV] [RS] [AKP] * [NT] *A; [NST]K [MPT] ** [QG] [AP];
[0369] [NQKST] [RNK] [ANDQST]S**A; T**SSNR (SEQ ID NO: 199882);
[0370] [KP] [ARQ] *T [NGT] *A; [NQG] [QK] * [KST] [ANGS] * [AM]; [SV] [RK]TS** [GP];
[0371] K**GTNA (SEQ ID NO: 199883); NK [NQ] * [AG] *A; K* [PT]S* [QGS] [AV];
[0372] [KTW] [NKT] [QGS] **Q[ANKS]; [RNKP] [RNGT] *[QGKPS] *[GST] [APS]; PKS**SG (SEQ ID NO: 199794); RDKS**A (SEQ ID NO: 199612);
[0373] [RY] * [ST] [KS] * [ST] [AP]; [GF] *K [QT]T* [PS]; [RN] * [AP] [GK]S* [AG];
[0374] RNGS**G (SEQ ID NO: 199884); KT[NQG] * [AS] * [GPS]; K*NSS* [PT](SEQ ID NO: 199885); Q*GSK*G (SEQ ID NO: 199886); KVS*T*A (SEQ ID NO: 199887); NSK*T*P (SEQ ID NO: 199888); [NGP]K*[NGPST] *[ANQG]A;
[0375] K [NT] * [AG] *QA; [GKP] [QKT] ** [ANST] [NGMT] [AP]; QK**GAP (SEQ ID NO: 199803); FQK*A*G (SEQ ID NO: 199889); K*QTG*A (SEQ ID NO: 199869);
[0376] [KS] [QK] ** [QT]Q [AP]; KQTQ**A (SEQ ID NO: 199890);
[0377] [GP] *K[GT] * [QG] [AV]; [SV] * [RK] *SAG; MN**GQR (SEQ ID NO: 199891);
[0378] [NS]K*A*S[AG]; K**TGNA (SEQ ID NO: 199876); N*K*GQG (SEQ ID NO: 199892); TK*V*QG (SEQ ID NO: 199893); QK*TS*P (SEQ ID NO: 199894);
[0379] QK*S*[QS] [PS]; NKV**SA (SEQ ID NO: 199895); K*SGT*A (SEQ ID NO: 199896); PK*S*AG (SEQ ID NO: 199897); G*Q*TQG (SEQ ID NO: 199898);
[0380] K**TSQS (SEQ ID NO: 199816); K*TST*A (SEQ ID NO: 199899); KNGS**G (SEQ ID NO: 199900); KQG*T*A (SEQ ID NO: 199901); NVK**QG (SEQ ID NO: 199902); PR*QQ*P (SEQ ID NO: 199903); SN**KSA (SEQ ID NO: 199904); and T*KS*TP (SEQ ID NO: 199905); or polynucleotides encoding the same, where “*” represents any amino acid and square brackets denote a list of amino acids that may occur at a position.

[0381] In any of the aspects provided herein, or embodiments thereof, a viral particle having a capsid containing the motif has increased biodistribution to brain relative to a control viral particle.

[0382] In any of the aspects provided herein, or embodiments thereof, the library contains an amino acid sequence motif selected from one or more of:
[0383] [NPT]K[PY] [GP] **A; KT**PQA (SEQ ID NO: 199906); KT**AKE (SEQ ID NO: 199907); [KPTY] [RQKT] [APSY] **[AGKS] [ANE];
[0384] [RQK] [QPST] [KS] [MST] **G; K* [AGS] [NS] [AST] * [AP];
[0385] [RK] [GST] [AS] [GST] ** [APS]; Q*GSK*G (SEQ ID NO: 199886);
[0386] [RKMT] [RQGKS] [PS] * [QKSTV] *G; [RKY] [QKT] [PST] * [STV] * [AP];
[0387] [NK] [RMS]P [GST] ** [AP]; [MT]PK* [AT] *G; K*TTG*G (SEQ ID NO: 199908);
[0388] [TV]KP [GS] **G; PK**NGA (SEQ ID NO: 199909); PK*PS*A (SEQ ID NO: 199865); TPR*G*G (SEQ ID NO: 199910); KTQ**QA (SEQ ID NO: 199911);
[0389] QPK*G*G (SEQ ID NO: 199912); RNS**NG (SEQ ID NO: 199913); K**NTTG (SEQ ID NO: 199830); K*ST*[NS]G (SEQ ID NO: 199914); YKPP**G (SEQ ID NO: 199845); K*SSV*G (SEQ ID NO: 199834);
[0390] [RNQ] * [GKS] * [GK] [MTV]G; KQ*SV*A (SEQ ID NO: 199915); PR*Q*SP (SEQ ID NO: 199809); R*SN* [NT] [AG]; K*PS*QA (SEQ ID NO: 199916);
[0391] FK*TA*G (SEQ ID NO: 199917); GK*PS*A (SEQ ID NO: 199851); K*GS*MS (SEQ ID NO: 199918); K*SN*GS (SEQ ID NO: 199919); FK**AQG (SEQ ID NO: 199920); GQ*RV*G (SEQ ID NO: 199510); K*ASG*A (SEQ ID NO: 199921); K*SN*AA (SEQ ID NO: 199922); KY*T*TG (SEQ ID NO: 199923);
[0392] P*R*NGA (SEQ ID NO: 199924); QPR*M*G (SEQ ID NO: 199925); RPQ**TG (SEQ ID NO: 199926); T**VNRG (SEQ ID NO: 199927); and TPRS**G (SEQ ID NO: 199928); or polynucleotides encoding the same, where “*” represents any amino acid and square brackets denote a list of amino acids that may occur at a position.

[0393] In any of the aspects provided herein, or embodiments thereof, where a viral particle having a capsid containing the motif has increased biodistribution to lung relative to a control viral particle.

[0394] In any of the aspects provided herein, or embodiments thereof, the library contains an amino acid sequence motif selected from one or more of:
[0395] [RNGKS] [KPTV] [NQGS] * [ANQST] *A; K** [NST] [QS] [AQK] [DS];
[0396] [NGMPSTW] [RNQGK] [QGKMSTV] **[AQKST] [ARNDGKP];
[0397] [RGKP] [QKPT] **[NQST] [NQGMT]A; [NMPS] *[NQKS] [AQGHK] *[QGS] [RIPSV];
[0398] [RNLPS] [RGHKS] * [AQGKPT] * [ANGS] [ARGP];
[0399] [RQGMS] [NDQK] **[NGKS] [NQGS] [ARQKPT];
[0400] [RNQGKPSW] [ARNGKPT] [ANQGST] [ANQGKST] **[AGKMPS];
[0401] K[NQT] * [AGS] *Q[AS]; [RKT] [KT] [NQV] ** [ARQKT] [DPS];
[0402] [RNGKMPS] [RQST] [NGHKT] * [NQGTV] * [AKYV]; [GT] ** [QS] [SY] [NM] [RK];
[0403] [KFSY] * [ANHKP] [NQS] [AGST] * [RMST]; [NKP] [ARGK] [GHPS] ** [AG] [RMST];
[0404] [GP]K* [NS] * [AQ] [AG]; [RKP] ** [QT] [QGS] [NG]A;
[0405] [QGKP] * [NKS] [KPST] [AS] *A; [GK] * [NQHT] * [NGPV] [QLMTV] [AQS];
[0406] [GK] * [NKPS] [ANGTV] * [AQT] [AM]; K*TS* [AQ]A (SEQ ID NO: 199929);
[0407] N* [ST] [GK] [RN] *A; [GK]Q [QGT] [QGT] ** [AM]; K*NN*NP (SEQ ID NO: 199930); K[PT] [QS] ** [AQS]A; [QKP] [NST] [KT] ** [GT]A;
[0408] [KV] [QT] [QK] *S* [AS]; [RNQGKS] [AQGKPT] * [NGKST] [ANGKTV] * [AMSV];
[0409] KN*G*SA (SEQ ID NO: 199570); T**GPGR (SEQ ID NO: 199931); K*TG*KD (SEQ ID NO: 199932); K**G [AT] [NQ]A; [QT] [NQK]K [DT] **A;
[0410] [NK]K [ND] *G*A; N*QKT*G (SEQ ID NO: 199875); K [GT]N** [GT]A; GKN**SA (SEQ ID NO: 199933); K [ST] ** [AK] [ND] [DP]; PK* [NGP] [ANS] *A; TK*V*QG (SEQ ID NO: 199893); K*SGT*A (SEQ ID NO: 199896); N*K*[NS]N[GP];
[0411] [NG]KT*G* [AM]; [MP] [GK]T*S* [RG]; [NP] *KS* [GS]A; KP** [AG] [AG]S;
[0412] SK*S*QP (SEQ ID NO: 199881); S*T*GSP (SEQ ID NO: 199934); HQKP**L (SEQ ID NO: 199935); N*N*GTA (SEQ ID NO: 199936); SRTP**A (SEQ ID NO: 199937); PR*QQ*P (SEQ ID NO: 199903); P*KG*SA (SEQ ID NO: 199880); VK*NN*P (SEQ ID NO: 199938); K*N*SIA (SEQ ID NO: 199939);
[0413] KPT*P*S (SEQ ID NO: 199940); T*KS*TP (SEQ ID NO: 199905); N*KST*A (SEQ ID NO: 199941); R*TS*SP (SEQ ID NO: 199519); K*N*GNA (SEQ ID NO: 199942); KTN**GS (SEQ ID NO: 199943); N**GRTA (SEQ ID NO: 199944); NKPP**A (SEQ ID NO: 199945); SK**TNS (SEQ ID NO: 199946);
[0414] SK*V*TS (SEQ ID NO: 199947); and TK*QN*A (SEQ ID NO: 199948);
[0415] TKQ*S*S (SEQ ID NO: 199949); or polynucleotides encoding the same, where “*” represents any amino acid and square brackets denote a list of amino acids that may occur at a position.

[0416] In any of the aspects provided herein, or embodiments thereof, a viral particle having a capsid containing the motif has increased biodistribution to spinal cord relative to a control viral particle.

[0417] In any of the aspects provided herein, or embodiments thereof, the library contains an amino acid sequence motif selected from one or more of: GAG**MR (SEQ ID NO: 199950); LQSN**R (SEQ ID NO: 199951); NN*TT*R (SEQ ID NO: 199952); NQ*Q*TK (SEQ ID NO: 199953); and RVG**DK (SEQ ID NO: 199954); Y*AG*SR (SEQ ID NO: 199955); or polynucleotides encoding the same, where “*” represents any amino acid and square brackets denote a list of amino acids that may occur at a position.

[0418] In any of the aspects provided herein, or embodiments thereof, a viral particle having a capsid containing the motif has increased biodistribution to kidney relative to a control viral particle.

[0419] In any of the aspects provided herein, or embodiments thereof, the library contains an amino acid sequence motif selected from one or more of:
[0420] WNG**QK (SEQ ID NO: 199956); [DY] [KT] [FS] ** [QK] [GK];
[0421] [QSWY] [NIKM] [NGP] [NQH] ** [KY]; IKH*R*E (SEQ ID NO: 199957);
[0422] [IT] [LK] * [DH] * [KV] [RN]; [KF] * [KS] * [PT] [NY] [LM]; YKD**PR (SEQ ID NO: 199958); HN*N*GK (SEQ ID NO: 199959); KFK*E*Y (SEQ ID NO: 199960); NGQ**AR (SEQ ID NO: 199961); QI*H*AK (SEQ ID NO: 199962);
[0423] R**NGIQ (SEQ ID NO: 199963); REKP**M (SEQ ID NO: 199964); Y*H*MKG (SEQ ID NO: 199965); or polynucleotides encoding the same, where “*” represents any amino acid and square brackets denote a list of amino acids that may occur at a position.

[0424] In any of the aspects provided herein, or embodiments thereof, a viral particle having a capsid containing the motif has increased liver transduction efficiencies relative to a control viral particle.

[0425] In any of the aspects provided herein, or embodiments thereof, the library contains an amino acid sequence motif selected from one or more of:
[0426] [\hat{ }ADCEHILKW] [ARNQGKST] [ARNQGKPTV] [ARNQKPSTV] **[NGPS];
[0427] [RNQKSV] * [ANQGPST] * [ARNQKT] [ANQGKT] [EGPS];
[0428] [\hat{ }ANDCEHILFW] * [ANQGKPST] [ARDQGKPST] [ARNQGKSV] * [ADGS];
[0429] [NQGFST] * [NGKT] * [ARNQKST] [ANQGKSTV] [GP];
[0430] [NQGKMSTY] [RQGKPST] * [ARDQGKSTV] [\hat{ }ADCEHILFWY] *G;
[0431] [RNGKMPT] **[AQGKST] [ARNQGSV] [AQGKMST] [EGPS];
[0432] [NQGKFST] [ARQGKPST] [ADQGKPST] * [ARNQIKST] *G;
[0433] [RNQGHKPTV] * [ARNQGMPST] [ARNQKST] * [ANQGKMS] [DEGPSV];
[0434] [\hat{ }ARDCEHILKW]K* [ANQGST] * [ANQIKMSTV] [DGPS];
[0435] [RNGKTV] [ANQGSV] ** [ARGKSTV] [AQGKMS]G;
[0436] [\hat{ }ADCQEHFWY] [ARNQGKMPS] [\hat{ }CEHILKFWYV] ** [ANQGKMSV] [NDGPS];
[0437] [RNQGMPSTV] [ARDQGKPST] [NQGKST] [ANGKPST] ** [APS];
[0438] [RNGKMST] [RGKST] [RNQMT] ** [ARNQMST] [ADPS];
[0439] [RNQGMPSTV] * [AQGKST] [AQGKPSTV] * [NQGKSTV] [GPSV];
[0440] [NQST] * [QKT] * [GKT] [NQMS] [GP]; [RNQKSTY] [RKPT] [ANQGST] ** [ANQGT]G;
[0441] [RNQMTYV] [NQKP] [RNQGS]G**G; [RGKMT] ** [NT] [RNGKS] [ANGT]G;
[0442] [RNGT] * [ANGKT] [ARNKMST] [RNQGKS] *G;
[0443] [RQGKMPST] [NQKPST] ** [ARNKST] [\hat{ }RCQEHILFPW] [DGPS];
[0444] [RKS] [NQGPST] [ANQGKT] [ANQGT] **[APS];
[0445] [RNMPSTY] [ARNQGKSV] * [ANQKST] * [ANGKSTV] [GPS];
[0446] [NQGKPSTV] [ARQGKST] *[AQGKPST] [ANKSTV] *[APS];
[0447] [RNQGKTY] [RNQGLPST] [ARNQKPST] * [ANQSTV] * [APS];
[0448] [NQGFST] [ANGSV] [RK] ** [NQSV] [GP]; K [NQGLKST] [NDQGMPT] [NQST] **G;
[0449] [NQGKMFPST] [RQGKPS] [RDQKPST] *G* [AM];
[0450] [RQGKMST] [QKP] [NDQGS] * [ANKST] * [ADEPS]; K* [QT] * [QG] [QMT]A;
[0451] [NKMST] [ANGKP] [NGKP] * [ARNMPST] *G; [RNQPST] [RNK] ** [ARNGS] [ANGSTV]A;
[0452] [QGS]K** [GT] [AMT] [APS]; [NQGMST] [NK] ** [AQGSV] [QKMFS] [RDGPS];
[0453] [RDKST] [NQKP] * [AGKS] * [AGSTV]A;
[0454] [NQGKSTV] [RNQGK] * [NQGKS] [ANQKST] * [GPS]; [QK] [NKSV] [NDGKT] [ST] **A;
[0455] [RKMT] ** [GPS] [AT] [ANGS]G; [RKM] * [NPST] [AGT]T* [GV];
[0456] [RKV] ** [NGT] [AGST] [NQG]A; [QKST] [QKT] * [NG]G* [DG];
[0457] [RQGKT] * [RNQGPST] [RQGST] * [QGMS]A; [KV] *N* [NS] [AISV]A;
[0458] [NQKPT] [RKP] * [AGST]G* [AP]; [RNQKS] [ANMPSV] [RNQK] *G*G;
[0459] [RNST] * [QKMST] [RGS] [ARST] * [AP]; [NKS] [KST] [NK] * [NG] * [AS];
[0460] [RNGT] * [RQGKST] [NKST] [RNMT] * [AG]; [RKT] [RQT] ** [GT] [NQG]A;
[0461] [RNIK] [RNQV] * [AGS] * [NQGT] [GS]; [RGKP] [NKT] [NQTV] **G[AS];
[0462] [RNQST] [RQK]S [ANQKS] **G; R [NST] * [ANQG] [ANTV] *G; [QK] [QT] **N [GS]A;
[0463] [QPT] [RGK] *N [AKS] *A; [QGT] [QGT]K** [AT]A; RP* [NG] [NT] *G;
[0464] [FT]K**NQ[NG]; [NGS] * [GKS] [RGKS] * [AGST]A;
[0465] [ANGS] [RGK] * [NKPT] * [ANGS]A; [MT]K* [QM] *QA; [KP] [NP] [KS] ** [AG]A;
[0466] [NM] * [NK] [NK] * [QT]G; [RK] **NT [GS]G; RN* [AN] [AN] *A;
[0467] N** [NQS] [RGK] [QGS]A; [KT] * [NGT] * [GSV] [ANST] [GS];
[0468] K* [NQM] [NG] [ANG] * [GP]; [NQ] * [AGK]G [QT] *G; QKN**SA (SEQ ID NO: 199966); Q* [NK]G* [AN]G; K[NT] * [AG] *QA; F*KT*QA (SEQ ID NO: 199967);
[0469] [NST]K[GPT] *G*G; RP*[ST]G*A (SEQ ID NO: 200024); PTK**SG (SEQ ID NO: 199968); R**QQNA (SEQ ID NO: 199969); QPK**GG (SEQ ID NO: 199970); KN*ST*A (SEQ ID NO: 199971); RQ*PT*A (SEQ ID NO: 199515);
[0470] K [NQG] *N* [AT]G; R[AN] [QS] * [AT] *G; [NQ] [RN] [GKP] [NQS] **A;
[0471] KP [GP]G**G (SEQ ID NO: 199972); KPS [NGS] ** [AM]; RS*PG*A (SEQ ID NO: 199973); K* [NQT]ST*A (SEQ ID NO: 199974); [RK] * [NS] [AG]T*A;
[0472] KPSQ**P (SEQ ID NO: 199975); [NKM] *N*[GS] [NT]A; RSS*G*A (SEQ ID NO: 199976); RN*PG*G (SEQ ID NO: 199977); K[NQ] *[GS] *SG;
[0473] [NT] *K* [QPS] [NGS]A; N*RNT*P (SEQ ID NO: 199978); K*[NG]A*[QG]A;
[0474] K*GNQ*A (SEQ ID NO: 199979); S**STQS (SEQ ID NO: 199980);
[0475] NK**[GT]GG (SEQ ID NO: 199981); RN**NQA (SEQ ID NO: 199982);
[0476] NR**GQA (SEQ ID NO: 199983); K* [NT] [NS] *AA; [RK] [NT] *N*QA; NR*N*QG (SEQ ID NO: 199984); N**STMA (SEQ ID NO: 199669); N*KA*AG (SEQ ID NO: 199985); NKQ*A*A (SEQ ID NO: 199986); MKQ*G*G (SEQ ID NO: 199987); RGN*T*G (SEQ ID NO: 199988); K*NSS*P (SEQ ID NO: 199989);
[0477] K*NNP*A (SEQ ID NO: 199990); MKN*G*G (SEQ ID NO: 199991); RN*NG*G (SEQ ID NO: 199992); G*K*NVA (SEQ ID NO: 199993); K*GG*AG (SEQ ID NO: 199626); N**GTKG (SEQ ID NO: 199994); NN**NKG (SEQ ID NO: 199995); RDK**GG (SEQ ID NO: 199996); RQ*N*QG (SEQ ID NO: 199997);
[0478] SRTT*NG (SEQ ID NO: 199576); and TSKG**G (SEQ ID NO: 199998); or polynucleotides encoding the same, where “*” represents any amino acid, square brackets surrounding a list of amino acids not preceded by the symbol “\hat{ }” denote a list of amino acids that may occur at a position, and square brackets surrounding a list of amino acids preceded by the symbol “\hat{ }” denote a list of amino acids that may not occur at a position.

[0479] In any of the aspects provided herein, or embodiments thereof, a capsid containing the motif has reduced spleen biodistribution relative to a control viral particle.

[0480] In any of the aspects provided herein, or embodiments thereof, the capsid polypeptides are capable of forming viral particles with two or more of the following traits: 1) binding to liver cell; 2) transducing liver cell; and 3) biodistributing to the liver of an organism. The library contains an amino acid sequence motif selected from one or more of:
[0481] [NQGIKT] [DGKFPS] [NEHKS] * [RDEHY] * [RQEKY];
[0482] [RDS] [DQE] *[RPT] [RNK] *[RKV];
[0483] [RDKMSY] ** [RNKSV] [ARDEP] [ARNDEIKS] [ARNKMYV]; Q [RE] ** [RK] [DI] [IK];
[0484] [NMT] [RDK] *[ARGTV] *[RDSY] [ANKT]; [GLFTY] *[HKY] *[NMPY] [NKS] [AQGL];
[0485] [ANGST] * [ADEG] [RNGH] * [RK] [RNESV];
[0486] [REKFY] [ARLTYV] [DGHKP] [RDHIKS] **[ARNEIFT];
[0487] [ANQKT] [ARKPS] [RGKM] ** [RSV] [DEGY]; [RMS] * [EK] * [RV] [DPT] [DKT];
[0488] [QY] *G*V [RK]G; [IPT] [DEGP]R [AQHV] ** [ANK]; IRA**EK (SEQ ID NO: 199999); [DK] *R [NE] * [KT] [AQ]; [QI] [RD] *K [MP] * [RE]; D*KPR*Q (SEQ ID NO: 200000); [ST] [QY] [EK] * [RS] * [NK]; [EY] [ET] *K*RN; ILH**KN (SEQ ID NO: 200001); V*RSD*K (SEQ ID NO: 200002);
[0489] [ADE] [ADG] * [GK] *K [LMY]; [KV] [QLT]R* [DS] * [GI]; TD*KR*L (SEQ ID NO: 200003); [RELF] [EK] ** [AQ] [RD] [DGKS]; EK**TRQ (SEQ ID NO: 200004);
[0490] [MV] *R* [SV] [AD] [GK]; IL*H*KN (SEQ ID NO: 200005); V*KG*YN (SEQ ID NO: 200006); G**HKQL (SEQ ID NO: 200007); Y*SH*KG (SEQ ID NO: 200008); D[NK] [RH] [KV] ** [RV]; I*RS*TG (SEQ ID NO: 199859);
[0491] [IK] [GP]R* [DT] * [AG]; QGR*L*A (SEQ ID NO: 200009); YTS**KG (SEQ ID NO: 200010); G**ETRK (SEQ ID NO: 200011); V*RQ*AG (SEQ ID NO: 199782); DL*K*RA (SEQ ID NO: 200012); D*RPK*V (SEQ ID NO: 200013);
[0492] DR**VKQ (SEQ ID NO: 200014); G**TEKK (SEQ ID NO: 200015); I*R*MRE (SEQ ID NO: 200016); NDMR**K (SEQ ID NO: 200017); NE*KR*V (SEQ ID NO: 200018); QAR*E*R (SEQ ID NO: 200019); V*RS*GG (SEQ ID NO: 199791); YTE**KK (SEQ ID NO: 200020); or polynucleotides encoding the same, where “*” represents any amino acid and square brackets denote a list of amino acids that may occur at a position.

[0493] In any of the aspects provided herein, or embodiments thereof, each peptide has a net charge of +1.

[0494] In any of the aspects provided herein, or embodiments thereof, the capsid polypeptides are capable of forming viral particles with all of the following traits: 1) binding to liver cells; 2) transducing liver cells; and 3) biodistributing to the liver of an organism, and where each of the peptides has a net charge of +1.

[0495] In any of the aspects provided herein, or embodiments thereof, the composition further contains a carrier, excipient, or diluent.

[0496] In any of the aspects provided herein, or embodiments thereof, the organism is a mammal. In any of the aspects provided herein, or embodiments thereof, the mammal is a mouse or a macaque.

[0497] In any of the aspects provided herein, or embodiments thereof, the trait of interest is selected from one or traits selected from one or more of the following: binding to liver cells; biodistributing to the liver; production fitness; immune cell binding; immune cell transduction; brain endothelial cell binding; brain endothelial cell transduction; liver cell transduction; heart biodistribution; spleen biodistribution; kidney biodistribution; kidney transduction; serum biodistribution; brain biodistribution; lung biodistribution; spinal cord biodistribution; and spinal cord transduction.

[0498] In any of the aspects provided herein, or embodiments thereof, the cells contain hepatocytes. In any of the aspects provided herein, or embodiments thereof, the cells contain immune cells, brain cells, pulmonary cells, or liver cells.

[0499] In any of the aspects provided herein, or embodiments thereof, the trait of interest is increased biodistribution and/or transduction in the liver, kidney, spleen, brain, spinal cord, serum, heart, and/or lungs.

### Definitions

[0500] Unless defined otherwise, all technical and scientific terms used herein have the meaning commonly understood by a person skilled in the art to which this invention belongs. The following references provide one of skill with a general definition of many of the terms used in this invention: Singleton et al., Dictionary of Microbiology and Molecular Biology (2nd ed. 1994); The Cambridge Dictionary of Science and Technology (Walker ed., 1988); The Glossary of Genetics, 5th Ed., R. Rieger et al. (eds.), Springer Verlag (1991); and Hale & Marham, The Harper Collins Dictionary of Biology (1991). As used herein, the following terms have the meanings ascribed to them below, unless specified otherwise.

[0501] By “AAV1 polypeptide” is meant an AAV1 protein with at least about 85% amino acid sequence identity to the amino acid sequence provided below, or a fragment thereof capable of multimerization to form a capsid.

>AAV1_AAD27757.1
(SEQ ID NO: 199428)
MAADGYLPDWLEDNLSEGIREWWDLKPGAPKPKANQQKQDDGRGLVLPGY
KYLGPFNGLDKGEPVNAADAAALEHDKAYDQQLKAGDNPYLRYNHADAEF
QERLQEDTSFGGNLGRAVFQAKKRVLEPLGLVEEGAKTAPGKKRPVEQSP
QEPDSSSGIGKTGQQPAKKRLNFGQTGDSESVPDPQPLGEPPATPAAVGP
TTMASGGGAPMADNNEGADGVGNASGNWHCDSTWLGDRVITTSTRTWALP
TYNNHLYKQISSASTGASNDNHYFGYSTPWGYFDFNRFHCHFSPRDWQRL
INNNWGFRPKRLNFKLFNIQVKEVTTNDGVTTIANNLTSTVQVFSDSEYQ
LPYVLGSAHQGCLPPFPADVFMIPQYGYLTLNNGSQAVGRSSFYCLEYFP
SQMLRTGNNFTFSYTFEEVPFHSSYAHSQSLDRLMNPLIDQYLYYLNRTQ
NQSGSAQNKDLLFSRGSPAGMSVQPKNWLPGPCYRQQRVSKTKTDNNNSN
FTWTGASKYNLNGRESIINPGTAMASHKDDEDKFFPMSGVMIFGKESAGA
SNTALDNVMITDEEEIKATNPVATERFGTVAVNFQSSSTDPATGDVHAMG
ALPGMVWQDRDVYLQGPIWAKIPHTDGHFHPSPLMGGFGLKNPPPQILIK
NTPVPANPPAEFSATKFASFITQYSTGQVSVEIEWELQKENSKRWNPEVQ
YTSNYAKSANVDFTVDNNGLYTEPRPIGTRYLTRPL*

[0502] By “AAV1 polynucleotide” is meant a nucleic acid molecule encoding an AAV1 polypeptide. An exemplary AAV1 nucleotide sequence is provided below.

>AAV1_AAD27757.1
(SEQ ID NO: 199429)
ATGGCTGCCGATGGTTATCTTCCAGATTGGCTCGAGGACAACCTCTCTGA
GGGCATTCGCGAGTGGTGGGACTTGAAACCTGGAGCCCCGAAGCCCAAAG
CCAACCAGCAAAAGCAGGACGACGGCCGGGGTCTGGTGCTTCCTGGCTAC
AAGTACCTCGGACCCTTCAACGGACTCGACAAGGGGGAGCCCGTCAACGC
GGCGGACGCAGCGGCCCTCGAGCACGACAAGGCCTACGACCAGCAGCTCA
AAGCGGGTGACAATCCGTACCTGCGGTATAACCACGCCGACGCCGAGTTT
CAGGAGCGTCTGCAAGAAGATACGTCTTTTGGGGGCAACCTCGGGCGAGC
AGTCTTCCAGGCCAAGAAGCGGGTTCTCGAACCTCTCGGTCTGGTTGAGG
AAGGCGCTAAGACGGCTCCTGGAAAGAAACGTCCGGTAGAGCAGTCGCCA
CAAGAGCCAGACTCCTCCTCGGGCATCGGCAAGACAGGCCAGCAGCCCGC
TAAAAAGAGACTCAATTTTGGTCAGACTGGCGACTCAGAGTCAGTCCCCG
ATCCACAACCTCTCGGAGAACCTCCAGCAACCCCCGCTGCTGTGGGACCT
ACTACAATGGCTTCAGGCGGTGGCGCACCAATGGCAGACAATAACGAAGG
CGCCGACGGAGTGGGTAATGCCTCAGGAAATTGGCATTGCGATTCCACAT
GGCTGGGCGACAGAGTCATCACCACCAGCACCCGCACCTGGGCCTTGCCC
ACCTACAATAACCACCTCTACAAGCAAATCTCCAGTGCTTCAACGGGGGC
CAGCAACGACAACCACTACTTCGGCTACAGCACCCCCTGGGGGTATTTTG
ATTTCAACAGATTCCACTGCCACTTTTCACCACGTGACTGGCAGCGACTC
ATCAACAACAATTGGGGATTCCGGCCCAAGAGACTCAACTTCAAACTCTT
CAACATCCAAGTCAAGGAGGTCACGACGAATGATGGCGTCACAACCATCG
CTAATAACCTTACCAGCACGGTTCAAGTCTTCTCGGACTCGGAGTACCAG
CTTCCGTACGTCCTCGGCTCTGCGCACCAGGGCTGCCTCCCTCCGTTCCC
GGCGGACGTGTTCATGATTCCGCAATACGGCTACCTGACGCTCAACAATG
GCAGCCAAGCCGTGGGACGTTCATCCTTTTACTGCCTGGAATATTTCCCT
TCTCAGATGCTGAGAACGGGCAACAACTTTACCTTCAGCTACACCTTTGA
GGAAGTGCCTTTCCACAGCAGCTACGCGCACAGCCAGAGCCTGGACCGGC
TGATGAATCCTCTCATCGACCAATACCTGTATTACCTGAACAGAACTCAA
AATCAGTCCGGAAGTGCCCAAAACAAGGACTTGCTGTTTAGCCGTGGGTC
TCCAGCTGGCATGTCTGTTCAGCCCAAAAACTGGCTACCTGGACCCTGTT
ATCGGCAGCAGCGCGTTTCTAAAACAAAAACAGACAACAACAACAGCAAT
TTTACCTGGACTGGTGCTTCAAAATATAACCTCAATGGGCGTGAATCCAT
CATCAACCCTGGCACTGCTATGGCCTCACACAAAGACGACGAAGACAAGT
TCTTTCCCATGAGCGGTGTCATGATTTTTGGAAAAGAGAGCGCCGGAGCT
TCAAACACTGCATTGGACAATGTCATGATTACAGACGAAGAGGAAATTAA
AGCCACTAACCCTGTGGCCACCGAAAGATTTGGGACCGTGGCAGTCAATT
TCCAGAGCAGCAGCACAGACCCTGCGACCGGAGATGTGCATGCTATGGGA
GCATTACCTGGCATGGTGTGGCAAGATAGAGACGTGTACCTGCAGGGTCC
CATTTGGGCCAAAATTCCTCACACAGATGGACACTTTCACCCGTCTCCTC
TTATGGGCGGCTTTGGACTCAAGAACCCGCCTCCTCAGATCCTCATCAAA
AACACGCCTGTTCCTGCGAATCCTCCGGCGGAGTTTTCAGCTACAAAGTT
TGCTTCATTCATCACCCAATACTCCACAGGACAAGTGAGTGTGGAAATTG
AATGGGAGCTGCAGAAAGAAAACAGCAAGCGCTGGAATCCCGAAGTGCAG
TACACATCCAATTATGCAAAATCTGCCAACGTTGATTTTACTGTGGACAA
CAATGGACTTTATACTGAGCCTCGCCCCATTGGCACCCGTTACCTTACCC
GTCCCCTGTAA

[0503] By “AAV2 polypeptide” is meant an AAV2 protein with at least about 85% amino acid sequence identity to the amino acid sequence provided below, or a fragment thereof capable of multimerization to form a capsid.

>AAV2_AAC03780.1
(SEQ ID NO: 199430)
[sequence omitted]

[0504] By “AAV2 polynucleotide” is meant a nucleic acid molecule encoding an AAV2 polypeptide. An exemplary AAV2 nucleotide sequence is provided below.

>AAV2_AAC03780.1
(SEQ ID NO: 199431)
ATGGCTGCCGATGGTTATCTTCCAGATTGGCTCGAGGACACTCTCTCTGA
AGGAATAAGACAGTGGTGGAAGCTCAAACCTGGCCCACCACCACCAAAGC
CCGCAGAGCGGCATAAGGACGACAGCAGGGGTCTTGTGCTTCCTGGGTAC
AAGTACCTCGGACCCTTCAACGGACTCGACAAGGGAGAGCCGGTCAACGA
GGCAGACGCCGCGGCCCTCGAGCACGACAAAGCCTACGACCGGCAGCTCG
ACAGCGGAGACAACCCGTACCTCAAGTACAACCACGCCGACGCGGAGTTT
CAGGAGCGCCTTAAAGAAGATACGTCTTTTGGGGGCAACCTCGGACGAGC
AGTCTTCCAGGCGAAAAAGAGGGTTCTTGAACCTCTGGGCCTGGTTGAGG
AACCTGTTAAGACGGCTCCGGGAAAAAAGAGGCCGGTAGAGCACTCTCCT
GTGGAGCCAGACTCCTCCTCGGGAACCGGAAAGGCGGGCCAGCAGCCTGC
AAGAAAAAGATTGAATTTTGGTCAGACTGGAGACGCAGACTCAGTACCTG
ACCCCCAGCCTCTCGGACAGCCACCAGCAGCCCCCTCTGGTCTGGGAACT
AATACGATGGCTACAGGCAGTGGCGCACCAATGGCAGACAATAACGAGGG
CGCCGACGGAGTGGGTAATTCCTCGGGAAATTGGCATTGCGATTCCACAT
GGATGGGCGACAGAGTCATCACCACCAGCACCCGAACCTGGGCCCTGCCC
ACCTACAACAACCACCTCTACAAACAAATTTCCAGCCAATCAGGAGCCTC
GAACGACAATCACTACTTTGGCTACAGCACCCCTTGGGGGTATTTTGACT
TCAACAGATTCCACTGCCACTTTTCACCACGTGACTGGCAAAGACTCATC
AACAACAACTGGGGATTCCGACCCAAGAGACTCAACTTCAAGCTCTTTAA
CATTCAAGTCAAAGAGGTCACGCAGAATGACGGTACGACGACGATTGCCA
ATAACCTTACCAGCACGGTTCAGGTGTTTACTGACTCGGAGTACCAGCTC
CCGTACGTCCTCGGCTCGGCGCATCAAGGATGCCTCCCGCCGTTCCCAGC
AGACGTCTTCATGGTGCCACAGTATGGATACCTCACCCTGAACAACGGGA
GTCAGGCAGTAGGACGCTCTTCATTTTACTGCCTGGAGTACTTTCCTTCT
CAGATGCTGCGTACCGGAAACAACTTTACCTTCAGCTACACTTTTGAGGA
CGTTCCTTTCCACAGCAGCTACGCTCACAGCCAGAGTCTGGACCGTCTCA
TGAATCCTCTCATCGACCAGTACCTGTATTACTTGAGCAGAACAAACACT
CCAAGTGGAACCACCACGCAGTCAAGGCTTCAGTTTTCTCAGGCCGGAGC
GAGTGACATTCGGGACCAGTCTAGGAACTGGCTTCCTGGACCCTGTTACC
GCCAGCAGCGAGTATCAAAGACATCTGCGGATAACAACAACAGTGAATAC
TCGTGGACTGGAGCTACCAAGTACCACCTCAATGGCAGAGACTCTCTGGT
GAATCCGGGCCCGGCCATGGCAAGCCACAAGGACGATGAAGAAAAGTTTT
TTCCTCAGAGCGGGGTTCTCATCTTTGGGAAGCAAGGCTCAGAGAAAACA
AATGTGGACATTGAAAAGGTCATGATTACAGACGAAGAGGAAATCAGGAC
AACCAATCCCGTGGCTACGGAGCAGTATGGTTCTGTATCTACCAACCTCC
AGAGAGGCAACAGACAAGCAGCTACCGCAGATGTCAACACACAAGGCGTT
CTTCCAGGCATGGTCTGGCAGGACAGAGATGTGTACCTTCAGGGGCCCAT
CTGGGCAAAGATTCCACACACGGACGGACATTTTCACCCCTCTCCCCTCA
TGGGTGGATTCGGACTTAAACACCCTCCTCCACAGATTCTCATCAAGAAC
ACCCCGGTACCTGCGAATCCTTCGACCACCTTCAGTGCGGCAAAGTTTGC
TTCCTTCATCACACAGTACTCCACGGGACAGGTCAGCGTGGAGATCGAGT
GGGAGCTGCAGAAGGAAAACAGCAAACGCTGGAATCCCGAAATTCAGTAC
ACTTCCAACTACAACAAGTCTGTTAATGTGGACTTTACTGTGGACACTAA
TGGCGTGTATTCAGAGCCTCGCCCCATTGGCACCAGATACCTGACTCGTA
ATCTGTAA

[0505] By “AAV3 polypeptide” is meant an AAV3 protein with at least about 85% amino acid sequence identity to the amino acid sequence provided below, or a fragment thereof capable of multimerization to form a capsid.

>AAV3
(SEQ ID NO: 199432)
MAADGYLPDWLEDNLSEGIREWWALKPGVPQPKANQQHQDNRRGLVLPGY
KYLGPGNGLDKGEPVNEADAAALEHDKAYDQQLKAGDNPYLKYNHADAEF
QERLQEDTSFGGNLGRAVFQAKKRILEPLGLVEEAAKTAPGKKGAVDQSP
QEPDSSSGVGKSGKQPARKRLNFGQTGDSESVPDPQPLGEPPAAPTSLGS
NTMASGGGAPMADNNEGADGVGNSSGNWHCDSQWLGDRVITTSTRTWALP
TYNNHLYKQISSQSGASNDNHYFGYSTPWGYFDFNRFHCHFSPRDWQRLI
NNNWGFRPKKLSFKLFNIQVRGVTQNDGTTTIANNLTSTVQVFTDSEYQL
PYVLGSAHQGCLPPFPADVFMVPQYGYLTLNNGSQAVGRSSFYCLEYFPS
QMLRTGNNFQFSYTFEDVPFHSSYAHSQSLDRLMNPLIDQYLYYLNRTQG
TTSGTTNQSRLLFSQAGPQSMSLQARNWLPGPCYRQQRLSKTANDNNNSN
FPWTAASKYHLNGRDSLVNPGPAMASHKDDEEKFFPMHGNLIFGKEGTTA
SNAELDNVMITDEEEIRTTNPVATEQYGTVANNLQSSNTAPTTGTVNHQG
ALPGMVWQDRDVYLQGPIWAKIPHTDGHFHPSPLMGGFGLKHPPPQIMIK
NTPVPANPPTTFSPAKFASFITQYSTGQVSVEIEWELQKENSKRWNPEIQ
YTSNYNKSVNVDFTVDTNGVYSEPRPIGTRYLTRNL*

[0506] By “AAV3 polynucleotide” is meant a nucleic acid molecule encoding an AAV3 polypeptide. An exemplary AAV3 nucleotide sequence is provided below.

>AAV3
(SEQ ID NO: 199433)
ATGGCTGCTGACGGTTATCTTCCAGATTGGCTCGAGGACAACCTTTCTGA
AGGCATTCGTGAGTGGTGGGCTCTGAAACCTGGAGTCCCTCAACCCAAAG
CGAACCAACAACACCAGGACAACCGTCGGGGTCTTGTGCTTCCGGGTTAC
AAATACCTCGGACCCGGTAACGGACTCGACAAAGGAGAGCCGGTCAACGA
GGCGGACGCGGCAGCCCTCGAACACGACAAAGCTTACGACCAGCAGCTCA
AGGCCGGTGACAACCCGTACCTCAAGTACAACCACGCCGACGCCGAGTTT
CAGGAGCGTCTTCAAGAAGATACGTCTTTTGGGGGCAACCTTGGCAGAGC
AGTCTTCCAGGCCAAAAAGAGGATCCTTGAGCCTCTTGGTCTGGTTGAGG
AAGCAGCTAAAACGGCTCCTGGAAAGAAGGGGGCTGTAGATCAGTCTCCT
CAGGAACCGGACTCATCATCTGGTGTTGGCAAATCGGGCAAACAGCCTGC
CAGAAAAAGACTAAATTTCGGTCAGACTGGAGACTCAGAGTCAGTCCCAG
ACCCTCAACCTCTCGGAGAACCACCAGCAGCCCCCACAAGTTTGGGATCT
AATACAATGGCTTCAGGCGGTGGCGCACCAATGGCAGACAATAACGAGGG
TGCCGATGGAGTGGGTAATTCCTCAGGAAATTGGCATTGCGATTCCCAAT
GGCTGGGCGACAGAGTCATCACCACCAGCACCAGAACCTGGGCCCTGCCC
ACTTACAACAACCATCTCTACAAGCAAATCTCCAGCCAATCAGGAGCTTC
AAACGACAACCACTACTTTGGCTACAGCACCCCTTGGGGGTATTTTGACT
TTAACAGATTCCACTGCCACTTCTCACCACGTGACTGGCAGCGACTCATT
AACAACAACTGGGGATTCCGGCCCAAGAAACTCAGCTTCAAGCTCTTCAA
CATCCAAGTTAGAGGGGTCACGCAGAACGATGGCACGACGACTATTGCCA
ATAACCTTACCAGCACGGTTCAAGTGTTTACGGACTCGGAGTATCAGCTC
CCGTACGTGCTCGGGTCGGCGCACCAAGGCTGTCTCCCGCCGTTTCCAGC
GGACGTCTTCATGGTCCCTCAGTATGGATACCTCACCCTGAACAACGGAA
GTCAAGCGGTGGGACGCTCATCCTTTTACTGCCTGGAGTACTTCCCTTCG
CAGATGCTAAGGACTGGAAATAACTTCCAATTCAGCTATACCTTCGAGGA
TGTACCTTTTCACAGCAGCTACGCTCACAGCCAGAGTTTGGATCGCTTGA
TGAATCCTCTTATTGATCAGTATCTGTACTACCTGAACAGAACGCAAGGA
ACAACCTCTGGAACAACCAACCAATCACGGCTGCTTTTTAGCCAGGCTGG
GCCTCAGTCTATGTCTTTGCAGGCCAGAAATTGGCTACCTGGGCCCTGCT
ACCGGCAACAGAGACTTTCAAAGACTGCTAACGACAACAACAACAGTAAC
TTTCCTTGGACAGCGGCCAGCAAATATCATCTCAATGGCCGCGACTCGCT
GGTGAATCCAGGACCAGCTATGGCCAGTCACAAGGACGATGAAGAAAAAT
TTTTCCCTATGCACGGCAATCTAATATTTGGCAAAGAAGGGACAACGGCA
AGTAACGCAGAATTAGATAATGTAATGATTACGGATGAAGAAGAGATTCG
TACCACCAATCCTGTGGCAACAGAGCAGTATGGAACTGTGGCAAATAACT
TGCAGAGCTCAAATACAGCTCCCACGACTGGAACTGTCAATCATCAGGGG
GCCTTACCTGGCATGGTGTGGCAAGATCGTGACGTGTACCTTCAAGGACC
TATCTGGGCAAAGATTCCTCACACGGATGGACACTTTCATCCTTCTCCTC
TGATGGGAGGCTTTGGACTGAAACATCCGCCTCCTCAAATCATGATCAAA
AATACTCCGGTACCGGCAAATCCTCCGACGACTTTCAGCCCGGCCAAGTT
TGCTTCATTTATCACTCAGTACTCCACTGGACAGGTCAGCGTGGAAATTG
AGTGGGAGCTACAGAAAGAAAACAGCAAACGTTGGAATCCAGAGATTCAG
TACACTTCCAACTACAACAAGTCTGTTAATGTGGACTTTACTGTAGACAC
TAATGGTGTTTATAGTGAACCTCGCCCTATTGGAACCCGGTATCTCACAC
GAAACTTGTGA

[0507] By “AAV3B polypeptide” is meant an AAV3B protein with at least about 85% amino acid sequence identity to the amino acid sequence provided below, or a fragment thereof capable of multimerization to form a capsid.

>AAV3B_AAB95452.1
(SEQ ID NO: 199434)
MAADGYLPDWLEDNLSEGIREWWALKPGVPQPKANQQHQDNRRGLVLPGY
KYLGPGNGLDKGEPVNEADAAALEHDKAYDQQLKAGDNPYLKYNHADAEF
QERLQEDTSFGGNLGRAVFQAKKRILEPLGLVEEAAKTAPGKKRPVDQSP
QEPDSSSGVGKSGKQPARKRLNFGQTGDSESVPDPQPLGEPPAAPTSLGS
NTMASGGGAPMADNNEGADGVGNSSGNWHCDSQWLGDRVITTSTRTWALP
TYNNHLYKQISSQSGASNDNHYFGYSTPWGYFDFNRFHCHFSPRDWQRLI
NNNWGFRPKKLSFKLFNIQVKEVTQNDGTTTIANNLTSTVQVFTDSEYQL
PYVLGSAHQGCLPPFPADVFMVPQYGYLTLNNGSQAVGRSSFYCLEYFPS
QMLRTGNNFQFSYTFEDVPFHSSYAHSQSLDRLMNPLIDQYLYYLNRTQG
TTSGTTNQSRLLFSQAGPQSMSLQARNWLPGPCYRQQRLSKTANDNNNSN
FPWTAASKYHLNGRDSLVNPGPAMASHKDDEEKFFPMHGNLIFGKEGTTA
SNAELDNVMITDEEEIRTTNPVATEQYGTVANNLQSSNTAPTTRTVNDQG
ALPGMVWQDRDVYLQGPIWAKIPHTDGHFHPSPLMGGFGLKHPPPQIMIK
NTPVPANPPTTFSPAKFASFITQYSTGQVSVEIEWELQKENSKRWNPEIQ
YTSNYNKSVNVDFTVDTNGVYSEPRPIGTRYLTRNL*

[0508] By “AAV3B polynucleotide” is meant a nucleic acid molecule encoding an AAV3B polypeptide. An exemplary AAV3B nucleotide sequence is provided below.

>AAV3B_AAB95452.1
(SEQ ID NO: 199435)
ATGGCTGCTGACGGTTATCTTCCAGATTGGCTCGAGGACAACCTTTCTGA
AGGCATTCGTGAGTGGTGGGCTCTGAAACCTGGAGTCCCTCAACCCAAAG
CGAACCAACAACACCAGGACAACCGTCGGGGTCTTGTGCTTCCGGGTTAC
AAATACCTCGGACCCGGTAACGGACTCGACAAAGGAGAGCCGGTCAACGA
GGCGGACGCGGCAGCCCTCGAACACGACAAAGCTTACGACCAGCAGCTCA
AGGCCGGTGACAACCCGTACCTCAAGTACAACCACGCCGACGCCGAGTTT
CAGGAGCGTCTTCAAGAAGATACGTCTTTTGGGGGCAACCTTGGCAGAGC
AGTCTTCCAGGCCAAAAAGAGGATCCTTGAGCCTCTTGGTCTGGTTGAGG
AAGCAGCTAAAACGGCTCCTGGAAAGAAGAGGCCTGTAGATCAGTCTCCT
CAGGAACCGGACTCATCATCTGGTGTTGGCAAATCGGGCAAACAGCCTGC
CAGAAAAAGACTAAATTTCGGTCAGACTGGCGACTCAGAGTCAGTCCCAG
ACCCTCAACCTCTCGGAGAACCACCAGCAGCCCCCACAAGTTTGGGATCT
AATACAATGGCTTCAGGCGGTGGCGCACCAATGGCAGACAATAACGAGGG
TGCCGATGGAGTGGGTAATTCCTCAGGAAATTGGCATTGCGATTCCCAAT
GGCTGGGCGACAGAGTCATCACCACCAGCACCAGAACCTGGGCCCTGCCC
ACTTACAACAACCATCTCTACAAGCAAATCTCCAGCCAATCAGGAGCTTC
AAACGACAACCACTACTTTGGCTACAGCACCCCTTGGGGGTATTTTGACT
TTAACAGATTCCACTGCCACTTCTCACCACGTGACTGGCAGCGACTCATT
AACAACAACTGGGGATTCCGGCCCAAGAAACTCAGCTTCAAGCTCTTCAA
CATCCAAGTTAAAGAGGTCACGCAGAACGATGGCACGACGACTATTGCCA
ATAACCTTACCAGCACGGTTCAAGTGTTTACGGACTCGGAGTATCAGCTC
CCGTACGTGCTCGGGTCGGCGCACCAAGGCTGTCTCCCGCCGTTTCCAGC
GGACGTCTTCATGGTCCCTCAGTATGGATACCTCACCCTGAACAACGGAA
GTCAAGCGGTGGGACGCTCATCCTTTTACTGCCTGGAGTACTTCCCTTCG
CAGATGCTAAGGACTGGAAATAACTTCCAATTCAGCTATACCTTCGAGGA
TGTACCTTTTCACAGCAGCTACGCTCACAGCCAGAGTTTGGATCGCTTGA
TGAATCCTCTTATTGATCAGTATCTGTACTACCTGAACAGAACGCAAGGA
ACAACCTCTGGAACAACCAACCAATCACGGCTGCTTTTTAGCCAGGCTGG
GCCTCAGTCTATGTCTTTGCAGGCCAGAAATTGGCTACCTGGGCCCTGCT
ACCGGCAACAGAGACTTTCAAAGACTGCTAACGACAACAACAACAGTAAC
TTTCCTTGGACAGCGGCCAGCAAATATCATCTCAATGGCCGCGACTCGCT
GGTGAATCCAGGACCAGCTATGGCCAGTCACAAGGACGATGAAGAAAAAT
TTTTCCCTATGCACGGCAATCTAATATTTGGCAAAGAAGGGACAACGGCA
AGTAACGCAGAATTAGATAATGTAATGATTACGGATGAAGAAGAGATTCG
TACCACCAATCCTGTGGCAACAGAGCAGTATGGAACTGTGGCAAATAACT
TGCAGAGCTCAAATACAGCTCCCACGACTAGAACTGTCAATGATCAGGGG
GCCTTACCTGGCATGGTGTGGCAAGATCGTGACGTGTACCTTCAAGGACC
TATCTGGGCAAAGATTCCTCACACGGATGGACACTTTCATCCTTCTCCTC
TGATGGGAGGCTTTGGACTGAAACATCCGCCTCCTCAAATCATGATCAAA
AATACTCCGGTACCGGCAAATCCTCCGACGACTTTCAGCCCGGCCAAGTT
TGCTTCATTTATCACTCAGTACTCCACTGGACAGGTCAGCGTGGAAATTG
AGTGGGAGCTACAGAAAGAAAACAGCAAACGTTGGAATCCAGAGATTCAG
TACACTTCCAACTACAACAAGTCTGTTAATGTGGACTTTACTGTAGACAC
TAATGGTGTTTATAGTGAACCTCGCCCTATTGGAACCCGGTATCTCACAC
GAAACTTGTAA

[0509] By “AAV4 polypeptide” is meant an AAV4 protein with at least about 85% amino acid sequence identity to the amino acid sequence provided below, or a fragment thereof capable of multimerization to form a capsid.

>AAV4_AAC58045
(SEQ ID NO: 199436)
MTDGYLPDWLEDNLSEGVREWWALQPGAPKPKANQQHQDNARGLVLPGYK
YLGPGNGLDKGEPVNAADAAALEHDKAYDQQLKAGDNPYLKYNHADAEFQ
QRLQGDTSFGGNLGRAVFQAKKRVLEPLGLVEQAGETAPGKKRPLIESPQ
QPDSSTGIGKKGKQPAKKKLVFEDETGAGDGPPEGSTSGAMSDDSEMRAA
AGGAAVEGGQGADGVGNASGDWHCDSTWSEGHVTTTSTRTWVLPTYNNHL
YKRLGESLQSNTYNGFSTPWGYFDFNRFHCHFSPRDWQRLINNNWGMRPK
AMRVKIFNIQVKEVTTSNGETTVANNLTSTVQIFADSSYELPYVMDAGQE
GSLPPFPNDVFMVPQYGYCGLVTGNTSQQQTDRNAFYCLEYFPSQMLRTG
NNFEITYSFEKVPFHSMYAHSQSLDRLMNPLIDQYLWGLQSTTTGTTLNA
GTATTNFTKLRPTNFSNFKKNWLPGPSIKQQGFSKTANQNYKIPATGSDS
LIKYETHSTLDGRWSALTPGPPMATAGPADSKFSNSQLIFAGPKQNGNTA
TVPGTLIFTSEEELAATNATDTDMWGNLPGGDQSNSNLPTVDRLTALGAV
PGMVWQNRDIYYQGPIWAKIPHTDGHFHPSPLIGGFGLKHPPPQIFIKNT
PVPANPATTFSSTPVNSFITQYSTGQVSVQIDWEIQKERSKRWNPEVQFT
SNYGQQNSLLWAPDAAGKYTEPRAIGTRYLTHHL

[0510] By “AAV4 polynucleotide” is meant a nucleic acid molecule encoding an AAV4 polypeptide. An exemplary AAV4 nucleotide sequence is provided below.

>AAV4_U89790.1
(SEQ ID NO: 199437)
ATGACTGACGGTTACCTTCCAGATTGGCTAGAGGACAACCTCTCTGAAGG
CGTTCGAGAGTGGTGGGCGCTGCAACCTGGAGCCCCTAAACCCAAGGCAA
ATCAACAACATCAGGACAACGCTCGGGGTCTTGTGCTTCCGGGTTACAAA
TACCTCGGACCCGGCAACGGACTCGACAAGGGGGAACCCGTCAACGCAGC
GGACGCGGCAGCCCTCGAGCACGACAAGGCCTACGACCAGCAGCTCAAGG
CCGGTGACAACCCCTACCTCAAGTACAACCACGCCGACGCGGAGTTCCAG
CAGCGGCTTCAGGGCGACACATCGTTTGGGGGCAACCTCGGCAGAGCAGT
CTTCCAGGCCAAAAAGAGGGTTCTTGAACCTCTTGGTCTGGTTGAGCAAG
CGGGTGAGACGGCTCCTGGAAAGAAGAGACCGTTGATTGAATCCCCCCAG
CAGCCCGACTCCTCCACGGGTATCGGCAAAAAAGGCAAGCAGCCGGCTAA
AAAGAAGCTCGTTTTCGAAGACGAAACTGGAGCAGGCGACGGACCCCCTG
AGGGATCAACTTCCGGAGCCATGTCTGATGACAGTGAGATGCGTGCAGCA
GCTGGCGGAGCTGCAGTCGAGGGCGGACAAGGTGCCGATGGAGTGGGTAA
TGCCTCGGGTGATTGGCATTGCGATTCCACCTGGTCTGAGGGCCACGTCA
CGACCACCAGCACCAGAACCTGGGTCTTGCCCACCTACAACAACCACCTC
TACAAGCGACTCGGAGAGAGCCTGCAGTCCAACACCTACAACGGATTCTC
CACCCCCTGGGGATACTTTGACTTCAACCGCTTCCACTGCCACTTCTCAC
CACGTGACTGGCAGCGACTCATCAACAACAACTGGGGCATGCGACCCAAA
GCCATGCGGGTCAAAATCTTCAACATCCAGGTCAAGGAGGTCACGACGTC
GAACGGCGAGACAACGGTGGCTAATAACCTTACCAGCACGGTTCAGATCT
TTGCGGACTCGTCGTACGAACTGCCGTACGTGATGGATGCGGGTCAAGAG
GGCAGCCTGCCTCCTTTTCCCAACGACGTCTTTATGGTGCCCCAGTACGG
CTACTGTGGACTGGTGACCGGCAACACTTCGCAGCAACAGACTGACAGAA
ATGCCTTCTACTGCCTGGAGTACTTTCCTTCGCAGATGCTGCGGACTGGC
AACAACTTTGAAATTACGTACAGTTTTGAGAAGGTGCCTTTCCACTCGAT
GTACGCGCACAGCCAGAGCCTGGACCGGCTGATGAACCCTCTCATCGACC
AGTACCTGTGGGGACTGCAATCGACCACCACCGGAACCACCCTGAATGCC
GGGACTGCCACCACCAACTTTACCAAGCTGCGGCCTACCAACTTTTCCAA
CTTTAAAAAGAACTGGCTGCCCGGGCCTTCAATCAAGCAGCAGGGCTTCT
CAAAGACTGCCAATCAAAACTACAAGATCCCTGCCACCGGGTCAGACAGT
CTCATCAAATACGAGACGCACAGCACTCTGGACGGAAGATGGAGTGCCCT
GACCCCCGGACCTCCAATGGCCACGGCTGGACCTGCGGACAGCAAGTTCA
GCAACAGCCAGCTCATCTTTGCGGGGCCTAAACAGAACGGCAACACGGCC
ACCGTACCCGGGACTCTGATCTTCACCTCTGAGGAGGAGCTGGCAGCCAC
CAACGCCACCGATACGGACATGTGGGGCAACCTACCTGGCGGTGACCAGA
GCAACAGCAACCTGCCGACCGTGGACAGACTGACAGCCTTGGGAGCCGTG
CCTGGAATGGTCTGGCAAAACAGAGACATTTACTACCAGGGTCCCATTTG
GGCCAAGATTCCTCATACCGATGGACACTTTCACCCCTCACCGCTGATTG
GTGGGTTTGGGCTGAAACACCCGCCTCCTCAAATTTTTATCAAGAACACC
CCGGTACCTGCGAATCCTGCAACGACCTTCAGCTCTACTCCGGTAAACTC
CTTCATTACTCAGTACAGCACTGGCCAGGTGTCGGTGCAGATTGACTGGG
AGATCCAGAAGGAGCGGTCCAAACGCTGGAACCCCGAGGTCCAGTTTACC
TCCAACTACGGACAGCAAAACTCTCTGTTGTGGGCTCCCGATGCGGCTGG
GAAATACACTGAGCCTAGGGCTATCGGTACCCGCTACCTCACCCACCACC
TG

[0511] By “AAV5 polypeptide” is meant an AAV5 protein with at least about 85% amino acid sequence identity to the amino acid sequence provided below, or a fragment thereof capable of multimerization to form a capsid.

>AAV5_AAD13756.1
(SEQ ID NO: 199438)
MSFVDHPPDWLEEVGEGLREFLGLEAGPPKPKPNQQHQDQARGLVLPGYN
YLGPGNGLDRGEPVNRADEVAREHDISYNEQLEAGDNPYLKYNHADAEFQ
EKLADDTSFGGNLGKAVFQAKKRVLEPFGLVEEGAKTAPTGKRIDDHFPK
RKKARTEEDSKPSTSSDAEAGPSGSQQLQIPAQPASSLGADTMSAGGGGP
LGDNNQGADGVGNASGDWHCDSTWMGDRVVTKSTRTWVLPSYNNHQYREI
KSGSVDGSNANAYFGYSTPWGYFDFNRFHSHWSPRDWQRLINNYWGFRPR
SLRVKIFNIQVKEVTVQDSTTTIANNLTSTVQVFTDDDYQLPYVVGNGTE
GCLPAFPPQVFTLPQYGYATLNRDNTENPTERSSFFCLEYFPSKMLRTGN
NFEFTYNFEEVPFHSSFAPSQNLFKLANPLVDQYLYRFVSTNNTGGVQFN
KNLAGRYANTYKNWFPGPMGRTQGWNLGSGVNRASVSAFATTNRMELEGA
SYQVPPQPNGMTNNLQGSNTYALENTMIFNSQPANPGTTATYLEGNMLIT
SESETQPVNRVAYNVGGQMATNNQSSTTAPATGTYNLQEIVPGSVWMERD
VYLQGPIWAKIPETGAHFHPSPAMGGFGLKHPPPMMLIKNTPVPGNITSF
SDVPVSSFITQYSTGQVTVEMEWELKKENSKRWNPEIQYTNNYNDPQFVD
FAPDSTGEYRTTRPIGTRYLTRPL

[0512] By “AAV5 polynucleotide” is meant a nucleic acid molecule encoding an AAV5 polypeptide. An exemplary AAV5 nucleotide sequence is provided below.

>AAV5_AF085716.1
(SEQ ID NO: 199439)
ATGTCTTTTGTTGATCACCCTCCAGATTGGTTGGAAGAAGTTGGTGAAGG
TCTTCGCGAGTTTTTGGGCCTTGAAGCGGGCCCACCGAAACCAAAACCCA
ATCAGCAGCATCAAGATCAAGCCCGTGGTCTTGTGCTGCCTGGTTATAAC
TATCTCGGACCCGGAAACGGTCTCGATCGAGGAGAGCCTGTCAACAGGGC
AGACGAGGTCGCGCGAGAGCACGACATCTCGTACAACGAGCAGCTTGAGG
CGGGAGACAACCCCTACCTCAAGTACAACCACGCGGACGCCGAGTTTCAG
GAGAAGCTCGCCGACGACACATCCTTCGGGGGAAACCTCGGAAAGGCAGT
CTTTCAGGCCAAGAAAAGGGTTCTCGAACCTTTTGGCCTGGTTGAAGAGG
GTGCTAAGACGGCCCCTACCGGAAAGCGGATAGACGACCACTTTCCAAAA
AGAAAGAAGGCTCGGACCGAAGAGGACTCCAAGCCTTCCACCTCGTCAGA
CGCCGAAGCTGGACCCAGCGGATCCCAGCAGCTGCAAATCCCAGCCCAAC
CAGCCTCAAGTTTGGGAGCTGATACAATGTCTGCGGGAGGTGGCGGCCCA
TTGGGCGACAATAACCAAGGTGCCGATGGAGTGGGCAATGCCTCGGGAGA
TTGGCATTGCGATTCCACGTGGATGGGGGACAGAGTCGTCACCAAGTCCA
CCCGAACCTGGGTGCTGCCCAGCTACAACAACCACCAGTACCGAGAGATC
AAAAGCGGCTCCGTCGACGGAAGCAACGCCAACGCCTACTTTGGATACAG
CACCCCCTGGGGGTACTTTGACTTTAACCGCTTCCACAGCCACTGGAGCC
CCCGAGACTGGCAAAGACTCATCAACAACTACTGGGGCTTCAGACCCCGG
TCCCTCAGAGTCAAAATCTTCAACATTCAAGTCAAAGAGGTCACGGTGCA
GGACTCCACCACCACCATCGCCAACAACCTCACCTCCACCGTCCAAGTGT
TTACGGACGACGACTACCAGCTGCCCTACGTCGTCGGCAACGGGACCGAG
GGATGCCTGCCGGCCTTCCCTCCGCAGGTCTTTACGCTGCCGCAGTACGG
TTACGCGACGCTGAACCGCGACAACACAGAAAATCCCACCGAGAGGAGCA
GCTTCTTCTGCCTAGAGTACTTTCCCAGCAAGATGCTGAGAACGGGCAAC
AACTTTGAGTTTACCTACAACTTTGAGGAGGTGCCCTTCCACTCCAGCTT
CGCTCCCAGTCAGAACCTGTTCAAGCTGGCCAACCCGCTGGTGGACCAGT
ACTTGTACCGCTTCGTGAGCACAAATAACACTGGCGGAGTCCAGTTCAAC
AAGAACCTGGCCGGGAGATACGCCAACACCTACAAAAACTGGTTCCCGGG
GCCCATGGGCCGAACCCAGGGCTGGAACCTGGGCTCCGGGGTCAACCGCG
CCAGTGTCAGCGCCTTCGCCACGACCAATAGGATGGAGCTCGAGGGCGCG
AGTTACCAGGTGCCCCCGCAGCCGAACGGCATGACCAACAACCTCCAGGG
CAGCAACACCTATGCCCTGGAGAACACTATGATCTTCAACAGCCAGCCGG
CGAACCCGGGCACCACCGCCACGTACCTCGAGGGCAACATGCTCATCACC
AGCGAGAGCGAGACGCAGCCGGTGAACCGCGTGGCGTACAACGTCGGCGG
GCAGATGGCCACCAACAACCAGAGCTCCACCACTGCCCCCGCGACCGGCA
CGTACAACCTCCAGGAAATCGTGCCCGGCAGCGTGTGGATGGAGAGGGAC
GTGTACCTCCAAGGACCCATCTGGGCCAAGATCCCAGAGACGGGGGCGCA
CTTTCACCCCTCTCCGGCCATGGGCGGATTCGGACTCAAACACCCACCGC
CCATGATGCTCATCAAGAACACGCCTGTGCCCGGAAATATCACCAGCTTC
TCGGACGTGCCCGTCAGCAGCTTCATCACCCAGTACAGCACCGGGCAGGT
CACCGTGGAGATGGAGTGGGAGCTCAAGAAGGAAAACTCCAAGAGGTGGA
ACCCAGAGATCCAGTACACAAACAACTACAACGACCCCCAGTTTGTGGAC
TTTGCCCCGGACAGCACCGGGGAATACAGAACCACCAGACCTATCGGAAC
CCGATACCTTACCCGACCCCTTTAA

[0513] By “AAV6 polypeptide” is meant an AAV6 protein with at least about 85% amino acid sequence identity to the amino acid sequence provided below, or a fragment thereof capable of multimerization to form a capsid.

>AAV6_AAB95450.1
(SEQ ID NO: 199440)
MAADGYLPDWLEDNLSEGIREWWDLKPGAPKPKANQQKQDDGRGLVLPGY
KYLGPFNGLDKGEPVNAADAAALEHDKAYDQQLKAGDNPYLRYNHADAEF
QERLQEDTSFGGNLGRAVFQAKKRVLEPFGLVEEGAKTAPGKKRPVEQSP
QEPDSSSGIGKTGQQPAKKRLNFGQTGDSESVPDPQPLGEPPATPAAVGP
TTMASGGGAPMADNNEGADGVGNASGNWHCDSTWLGDRVITTSTRTWALP
TYNNHLYKQISSASTGASNDNHYFGYSTPWGYFDFNRFHCHFSPRDWQRL
INNNWGFRPKRLNFKLFNIQVKEVTTNDGVTTIANNLTSTVQVFSDSEYQ
LPYVLGSAHQGCLPPFPADVFMIPQYGYLTLNNGSQAVGRSSFYCLEYFP
SQMLRTGNNFTFSYTFEDVPFHSSYAHSQSLDRLMNPLIDQYLYYLNRTQ
NQSGSAQNKDLLFSRGSPAGMSVQPKNWLPGPCYRQQRVSKTKTDNNNSN
FTWTGASKYNLNGRESIINPGTAMASHKDDKDKFFPMSGVMIFGKESAGA
SNTALDNVMITDEEEIKATNPVATERFGTVAVNLQSSSTDPATGDVHVMG
ALPGMVWQDRDVYLQGPIWAKIPHTDGHFHPSPLMGGFGLKHPPPQILIK
NTPVPANPPAEFSATKFASFITQYSTGQVSVEIEWELQKENSKRWNPEVQ
YTSNYAKSANVDFTVDNNGLYTEPRPIGTRYLTRPL*

[0514] By “AAV6 polynucleotide” is meant a nucleic acid molecule encoding an AAV6 polypeptide. An exemplary AAV6 nucleotide sequence is provided below.

>AAV6_AAB95450.1
(SEQ ID NO: 199441)
ATGGCTGCCGATGGTTATCTTCCAGATTGGCTCGAGGACAACCTCTCTGA
GGGCATTCGCGAGTGGTGGGACTTGAAACCTGGAGCCCCGAAACCCAAAG
CCAACCAGCAAAAGCAGGACGACGGCCGGGGTCTGGTGCTTCCTGGCTAC
AAGTACCTCGGACCCTTCAACGGACTCGACAAGGGGGAGCCCGTCAACGC
GGCGGATGCAGCGGCCCTCGAGCACGACAAGGCCTACGACCAGCAGCTCA
AAGCGGGTGACAATCCGTACCTGCGGTATAACCACGCCGACGCCGAGTTT
CAGGAGCGTCTGCAAGAAGATACGTCTTTTGGGGGCAACCTCGGGCGAGC
AGTCTTCCAGGCCAAGAAGAGGGTTCTCGAACCTTTTGGTCTGGTTGAGG
AAGGTGCTAAGACGGCTCCTGGAAAGAAACGTCCGGTAGAGCAGTCGCCA
CAAGAGCCAGACTCCTCCTCGGGCATTGGCAAGACAGGCCAGCAGCCCGC
TAAAAAGAGACTCAATTTTGGTCAGACTGGCGACTCAGAGTCAGTCCCCG
ACCCACAACCTCTCGGAGAACCTCCAGCAACCCCCGCTGCTGTGGGACCT
ACTACAATGGCTTCAGGCGGTGGCGCACCAATGGCAGACAATAACGAAGG
CGCCGACGGAGTGGGTAATGCCTCAGGAAATTGGCATTGCGATTCCACAT
GGCTGGGCGACAGAGTCATCACCACCAGCACCCGAACATGGGCCTTGCCC
ACCTATAACAACCACCTCTACAAGCAAATCTCCAGTGCTTCAACGGGGGC
CAGCAACGACAACCACTACTTCGGCTACAGCACCCCCTGGGGGTATTTTG
ATTTCAACAGATTCCACTGCCATTTCTCACCACGTGACTGGCAGCGACTC
ATCAACAACAATTGGGGATTCCGGCCCAAGAGACTCAACTTCAAGCTCTT
CAACATCCAAGTCAAGGAGGTCACGACGAATGATGGCGTCACGACCATCG
CTAATAACCTTACCAGCACGGTTCAAGTCTTCTCGGACTCGGAGTACCAG
TTGCCGTACGTCCTCGGCTCTGCGCACCAGGGCTGCCTCCCTCCGTTCCC
GGCGGACGTGTTCATGATTCCGCAGTACGGCTACCTAACGCTCAACAATG
GCAGCCAGGCAGTGGGACGGTCATCCTTTTACTGCCTGGAATATTTCCCA
TCGCAGATGCTGAGAACGGGCAATAACTTTACCTTCAGCTACACCTTCGA
GGACGTGCCTTTCCACAGCAGCTACGCGCACAGCCAGAGCCTGGACCGGC
TGATGAATCCTCTCATCGACCAGTACCTGTATTACCTGAACAGAACTCAG
AATCAGTCCGGAAGTGCCCAAAACAAGGACTTGCTGTTTAGCCGGGGGTC
TCCAGCTGGCATGTCTGTTCAGCCCAAAAACTGGCTACCTGGACCCTGTT
ACCGGCAGCAGCGCGTTTCTAAAACAAAAACAGACAACAACAACAGCAAC
TTTACCTGGACTGGTGCTTCAAAATATAACCTTAATGGGCGTGAATCTAT
AATCAACCCTGGCACTGCTATGGCCTCACACAAAGACGACAAAGACAAGT
TCTTTCCCATGAGCGGTGTCATGATTTTTGGAAAGGAGAGCGCCGGAGCT
TCAAACACTGCATTGGACAATGTCATGATCACAGACGAAGAGGAAATCAA
AGCCACTAACCCCGTGGCCACCGAAAGATTTGGGACTGTGGCAGTCAATC
TCCAGAGCAGCAGCACAGACCCTGCGACCGGAGATGTGCATGTTATGGGA
GCCTTACCTGGAATGGTGTGGCAAGACAGAGACGTATACCTGCAGGGTCC
TATTTGGGCCAAAATTCCTCACACGGATGGACACTTTCACCCGTCTCCTC
TCATGGGCGGCTTTGGACTTAAGCACCCGCCTCCTCAGATCCTCATCAAA
AACACGCCTGTTCCTGCGAATCCTCCGGCAGAGTTTTCGGCTACAAAGTT
TGCTTCATTCATCACCCAGTATTCCACAGGACAAGTGAGCGTGGAGATTG
AATGGGAGCTGCAGAAAGAAAACAGCAAACGCTGGAATCCCGAAGTGCAG
TATACATCTAACTATGCAAAATCTGCCAACGTTGATTTCACTGTGGACAA
CAATGGACTTTATACTGAGCCTCGCCCCATTGGCACCCGTTACCTCACCC
GTCCCCTGTAA

[0515] By “AAV7 polypeptide” is meant an AAV7 protein with at least about 85% amino acid sequence identity to the amino acid sequence provided below, or a fragment thereof capable of multimerization to form a capsid.

>AAV7_AAN03855.1
(SEQ ID NO: 199442)
MAADGYLPDWLEDNLSEGIREWWDLKPGAPKPKANQQKQDNGRGLVLPGY
KYLGPFNGLDKGEPVNAADAAALEHDKAYDQQLKAGDNPYLRYNHADAEF
QERLQEDTSFGGNLGRAVFQAKKRVLEPLGLVEEGAKTAPAKKRPVEPSP
QRSPDSSTGIGKKGQQPARKRLNFGQTGDSESVPDPQPLGEPPAAPSSVG
SGTVAAGGGAPMADNNEGADGVGNASGNWHCDSTWLGDRVITTSTRTWAL
PTYNNHLYKQISSETAGSTNDNTYFGYSTPWGYFDFNRFHCHFSPRDWQR
LINNNWGFRPKKLRFKLFNIQVKEVTTNDGVTTIANNLTSTIQVFSDSEY
QLPYVLGSAHQGCLPPFPADVFMIPQYGYLTLNNGSQSVGRSSFYCLEYF
PSQMLRTGNNFEFSYSFEDVPFHSSYAHSQSLDRLMNPLIDQYLYYLART
QSNPGGTAGNRELQFYQGGPSTMAEQAKNWLPGPCFRQQRVSKTLDQNNN
SNFAWTGATKYHLNGRNSLVNPGVAMATHKDDEDRFFPSSGVLIFGKTGA
TNKTTLENVLMTNEEEIRPTNPVATEEYGIVSSNLQAANTAAQTQVVNNQ
GALPGMVWQNRDVYLQGPIWAKIPHTDGNFHPSPLMGGFGLKHPPPQILI
KNTPVPANPPEVFTPAKFASFITQYSTGQVSVEIEWELQKENSKRWNPEI
QYTSNFEKQTGVDFAVDSQGVYSEPRPIGTRYLTRNL*

[0516] By “AAV7 polynucleotide” is meant a nucleic acid molecule encoding an AAV7 polypeptide. An exemplary AAV7 nucleotide sequence is provided below.

>AAV7_AAN03855.1
(SEQ ID NO: 199443)
ATGGCTGCCGATGGTTATCTTCCAGATTGGCTCGAGGACAACCTCTCTGA
GGGCATTCGCGAGTGGTGGGACCTGAAACCTGGAGCCCCGAAACCCAAAG
CCAACCAGCAAAAGCAGGACAACGGCCGGGGTCTGGTGCTTCCTGGCTAC
AAGTACCTCGGACCCTTCAACGGACTCGACAAGGGGGAGCCCGTCAACGC
GGCGGACGCAGCGGCCCTCGAGCACGACAAGGCCTACGACCAGCAGCTCA
AAGCGGGTGACAATCCGTACCTGCGGTATAACCACGCCGACGCCGAGTTT
CAGGAGCGTCTGCAAGAAGATACGTCATTTGGGGGCAACCTCGGGCGAGC
AGTCTTCCAGGCCAAGAAGCGGGTTCTCGAACCTCTCGGTCTGGTTGAGG
AAGGCGCTAAGACGGCTCCTGCAAAGAAGAGACCGGTAGAGCCGTCACCT
CAGCGTTCCCCCGACTCCTCCACGGGCATCGGCAAGAAAGGCCAGCAGCC
CGCCAGAAAGAGACTCAATTTCGGTCAGACTGGCGACTCAGAGTCAGTCC
CCGACCCTCAACCTCTCGGAGAACCTCCAGCAGCGCCCTCTAGTGTGGGA
TCTGGTACAGTGGCTGCAGGCGGTGGCGCACCAATGGCAGACAATAACGA
AGGTGCCGACGGAGTGGGTAATGCCTCAGGAAATTGGCATTGCGATTCCA
CATGGCTGGGCGACAGAGTCATTACCACCAGCACCCGAACCTGGGCCCTG
CCCACCTACAACAACCACCTCTACAAGCAAATCTCCAGTGAAACTGCAGG
TAGTACCAACGACAACACCTACTTCGGCTACAGCACCCCCTGGGGGTATT
TTGACTTTAACAGATTCCACTGCCACTTCTCACCACGTGACTGGCAGCGA
CTCATCAACAACAACTGGGGATTCCGGCCCAAGAAGCTGCGGTTCAAGCT
CTTCAACATCCAGGTCAAGGAGGTCACGACGAATGACGGCGTTACGACCA
TCGCTAATAACCTTACCAGCACGATTCAGGTATTCTCGGACTCGGAATAC
CAGCTGCCGTACGTCCTCGGCTCTGCGCACCAGGGCTGCCTGCCTCCGTT
CCCGGCGGACGTCTTCATGATTCCTCAGTACGGCTACCTGACTCTCAACA
ATGGCAGTCAGTCTGTGGGACGTTCCTCCTTCTACTGCCTGGAGTACTTC
CCCTCTCAGATGCTGAGAACGGGCAACAACTTTGAGTTCAGCTACAGCTT
CGAGGACGTGCCTTTCCACAGCAGCTACGCACACAGCCAGAGCCTGGACC
GGCTGATGAATCCCCTCATCGACCAGTACTTGTACTACCTGGCCAGAACA
CAGAGTAACCCAGGAGGCACAGCTGGCAATCGGGAACTGCAGTTTTACCA
GGGCGGGCCTTCAACTATGGCCGAACAAGCCAAGAATTGGTTACCTGGAC
CTTGCTTCCGGCAACAAAGAGTCTCCAAAACGCTGGATCAAAACAACAAC
AGCAACTTTGCTTGGACTGGTGCCACCAAATATCACCTGAACGGCAGAAA
CTCGTTGGTTAATCCCGGCGTCGCCATGGCAACTCACAAGGACGACGAGG
ACCGCTTTTTCCCATCCAGCGGAGTCCTGATTTTTGGAAAAACTGGAGCA
ACTAACAAAACTACATTGGAAAATGTGTTAATGACAAATGAAGAAGAAAT
TCGTCCTACTAATCCTGTAGCCACGGAAGAATACGGGATAGTCAGCAGCA
ACTTACAAGCGGCTAATACTGCAGCCCAGACACAAGTIGTCAACAACCAG
GGAGCCTTACCTGGCATGGTCTGGCAGAACCGGGACGTGTACCTGCAGGG
TCCCATCTGGGCCAAGATTCCTCACACGGATGGCAACTTTCACCCGTCTC
CTTTGATGGGCGGCTTTGGACTTAAACATCCGCCTCCTCAGATCCTGATC
AAGAACACTCCCGTTCCCGCTAATCCTCCGGAGGTGTTTACTCCTGCCAA
GTTTGCTTCGTTCATCACACAGTACAGCACCGGACAAGTCAGCGTGGAAA
TCGAGTGGGAGCTGCAGAAGGAAAACAGCAAGCGCTGGAACCCGGAGATT
CAGTACACCTCCAACTTTGAAAAGCAGACTGGTGTGGACTTTGCCGTTGA
CAGCCAGGGTGTTTACTCTGAGCCTCGCCCTATTGGCACTCGTTACCTCA
CCCGTAATCTGTAA

[0517] By “AAV8 polypeptide” is meant an AAV8 protein with at least about 85% amino acid sequence identity to the amino acid sequence provided below, or a fragment thereof capable of multimerization to form a capsid.

>AAV8_AAN03857.1
(SEQ ID NO: 199444)
MAADGYLPDWLEDNLSEGIREWWALKPGAPKPKANQQKQDDGRGLVLPGY
KYLGPFNGLDKGEPVNAADAAALEHDKAYDQQLQAGDNPYLRYNHADAEF
QERLQEDTSFGGNLGRAVFQAKKRVLEPLGLVEEGAKTAPGKKRPVEPSP
QRSPDSSTGIGKKGQQPARKRLNFGQTGDSESVPDPQPLGEPPAAPSGVG
PNTMAAGGGAPMADNNEGADGVGSSSGNWHCDSTWLGDRVITTSTRTWAL
PTYNNHLYKQISNGTSGGATNDNTYFGYSTPWGYFDFNRFHCHFSPRDWQ
RLINNNWGFRPKRLSFKLFNIQVKEVTQNEGTKTIANNLTSTIQVFTDSE
YQLPYVLGSAHQGCLPPFPADVFMIPQYGYLTLNNGSQAVGRSSFYCLEY
FPSQMLRTGNNFQFTYTFEDVPFHSSYAHSQSLDRLMNPLIDQYLYYLSR
TQTTGGTANTQTLGFSQGGPNTMANQAKNWLPGPCYRQQRVSTTTGQNNN
SNFAWTAGTKYHLNGRNSLANPGIAMATHKDDEERFFPSNGILIFGKQNA
ARDNADYSDVMLTSEEEIKTTNPVATEEYGIVADNLQQQNTAPQIGTVNS
QGALPGMVWQNRDVYLQGPIWAKIPHTDGNFHPSPLMGGFGLKHPPPQIL
IKNTPVPADPPTTFNQSKLNSFITQYSTGQVSVEIEWELQKENSKRWNPE
IQYTSNYYKSTSVDFAVNTEGVYSEPRPIGTRYLTRNL*

[0518] By “AAV8 polynucleotide” is meant a nucleic acid molecule encoding an AAV8 polypeptide. An exemplary AAV8 nucleotide sequence is provided below.

>AAV8_AAN03857.1
(SEQ ID NO: 199445)
ATGGCTGCCGATGGTTATCTTCCAGATTGGCTCGAGGACAACCTCTCTGA
GGGCATTCGCGAGTGGTGGGCGCTGAAACCTGGAGCCCCGAAGCCCAAAG
CCAACCAGCAAAAGCAGGACGACGGCCGGGGTCTGGTGCTTCCTGGCTAC
AAGTACCTCGGACCCTTCAACGGACTCGACAAGGGGGAGCCCGTCAACGC
GGCGGACGCAGCGGCCCTCGAGCACGACAAGGCCTACGACCAGCAGCTGC
AGGCGGGTGACAATCCGTACCTGCGGTATAACCACGCCGACGCCGAGTTT
CAGGAGCGTCTGCAAGAAGATACGTCTTTTGGGGGCAACCTCGGGCGAGC
AGTCTTCCAGGCCAAGAAGCGGGTTCTCGAACCTCTCGGTCTGGTTGAGG
AAGGCGCTAAGACGGCTCCTGGAAAGAAGAGACCGGTAGAGCCATCACCC
CAGCGTTCTCCAGACTCCTCTACGGGCATCGGCAAGAAAGGCCAACAGCC
CGCCAGAAAAAGACTCAATTTTGGTCAGACTGGCGACTCAGAGTCAGTTC
CAGACCCTCAACCTCTCGGAGAACCTCCAGCAGCGCCCTCTGGTGTGGGA
CCTAATACAATGGCTGCAGGCGGTGGCGCACCAATGGCAGACAATAACGA
AGGCGCCGACGGAGTGGGTAGTTCCTCGGGAAATTGGCATTGCGATTCCA
CATGGCTGGGCGACAGAGTCATCACCACCAGCACCCGAACCTGGGCCCTG
CCCACCTACAACAACCACCTCTACAAGCAAATCTCCAACGGGACATCGGG
AGGAGCCACCAACGACAACACCTACTTCGGCTACAGCACCCCCTGGGGGT
ATTTTGACTTTAACAGATTCCACTGCCACTTTTCACCACGTGACTGGCAG
CGACTCATCAACAACAACTGGGGATTCCGGCCCAAGAGACTCAGCTTCAA
GCTCTTCAACATCCAGGTCAAGGAGGTCACGCAGAATGAAGGCACCAAGA
CCATCGCCAATAACCTCACCAGCACCATCCAGGTGTTTACGGACTCGGAG
TACCAGCTGCCGTACGTTCTCGGCTCTGCCCACCAGGGCTGCCTGCCTCC
GTTCCCGGCGGACGTGTTCATGATTCCCCAGTACGGCTACCTAACACTCA
ACAACGGTAGTCAGGCCGTGGGACGCTCCTCCTTCTACTGCCTGGAATAC
TTTCCTTCGCAGATGCTGAGAACCGGCAACAACTTCCAGTTTACTTACAC
CTTCGAGGACGTGCCTTTCCACAGCAGCTACGCCCACAGCCAGAGCTTGG
ACCGGCTGATGAATCCTCTGATTGACCAGTACCTGTACTACTTGTCTCGG
ACTCAAACAACAGGAGGCACGGCAAATACGCAGACTCTGGGCTTCAGCCA
AGGTGGGCCTAATACAATGGCCAATCAGGCAAAGAACTGGCTGCCAGGAC
CCTGTTACCGCCAACAACGCGTCTCAACGACAACCGGGCAAAACAACAAT
AGCAACTTTGCCTGGACTGCTGGGACCAAATACCATCTGAATGGAAGAAA
TTCATTGGCTAATCCTGGCATCGCTATGGCAACACACAAAGACGACGAGG
AGCGTTTTTTTCCCAGTAACGGGATCCTGATTTTTGGCAAACAAAATGCT
GCCAGAGACAATGCGGATTACAGCGATGTCATGCTCACCAGCGAGGAAGA
AATCAAAACCACTAACCCTGTGGCTACAGAGGAATACGGTATCGTGGCAG
ATAACTTGCAGCAGCAAAACACGGCTCCTCAAATTGGAACTGTCAACAGC
CAGGGGGCCTTACCCGGTATGGTCTGGCAGAACCGGGACGTGTACCTGCA
GGGTCCCATCTGGGCCAAGATTCCTCACACGGACGGCAACTTCCACCCGT
CTCCGCTGATGGGCGGCTTTGGCCTGAAACATCCTCCGCCTCAGATCCTG
ATCAAGAACACGCCTGTACCTGCGGATCCTCCGACCACCTTCAACCAGTC
AAAGCTGAACTCTTTCATCACGCAATACAGCACCGGACAGGTCAGCGTGG
AAATTGAATGGGAGCTGCAGAAGGAAAACAGCAAGCGCTGGAACCCCGAG
ATCCAGTACACCTCCAACTACTACAAATCTACAAGTGTGGACTTTGCTGT
TAATACAGAAGGCGTGTACTCTGAACCCCGCCCCATTGGCACCCGTTACC
TCACCCGTAATCTGTAA

[0519] By “AAV9 K549R polypeptide” is meant an AAV9 K549R protein with at least about 85% amino acid sequence identity to the amino acid sequence provided below, or a fragment thereof capable of multimerization to form a capsid.

>AAV9 K549R
(SEQ ID NO: 199446)
MAADGYLPDWLEDNLSEGIREWWALKPGAPQPKANQQHQDNARGLVLPGY
KYLGPGNGLDKGEPVNAADAAALEHDKAYDQQLKAGDNPYLKYNHADAEF
QERLKEDTSFGGNLGRAVFQAKKRLLEPLGLVEEAAKTAPGKKRPVEQSP
QEPDSSAGIGKSGAQPAKKRLNFGQTGDTESVPDPQPIGEPPAAPSGVGS
LTMASGGGAPVADNNEGADGVGSSSGNWHCDSQWLGDRVITTSTRTWALP
TYNNHLYKQISNSTSGGSSNDNAYFGYSTPWGYFDFNRFHCHFSPRDWQR
LINNNWGFRPKRLNFKLFNIQVKEVTDNNGVKTIANNLTSTVQVFTDSDY
QLPYVLGSAHEGCLPPFPADVFMIPQYGYLTLNDGSQAVGRSSFYCLEYF
PSQMLRTGNNFQFSYEFENVPFHSSYAHSQSLDRLMNPLIDQYLYYLSRT
INGSGQNQQTLKFSVAGPSNMAVQGRNYIPGPSYRQQRVSTTVTQNNNSE
FAWPGASSWALNGRNSLMNPGPAMASHKEGEDRFFPLSGSLIFGKQGTGR
DNVDADKVMITNEEEIKTTNPVATESYGQVATNHQSAQAQAQTGWVQNQG
ILPGMVWQDRDVYLQGPIWAKIPHTDGNFHPSPLMGGFGMKHPPPQILIK
NTPVPADPPTAFNKDKLNSFITQYSTGQVSVEIEWELQKENSKRWNPEIQ
YTSNYYKSNNVEFAVNTEGVYSEPRPIGTRYLTRNL*

[0520] By “AAV9 K549R polynucleotide” is meant a nucleic acid molecule encoding an AAV9 K549R polypeptide. An exemplary AAV9 K549R nucleotide sequence is provided below.

>AAV9 K449R
(SEQ ID NO: 199447)
ATGGCTGCCGATGGTTATCTTCCAGATTGGCTCGAGGACAACCTTAGTGA
AGGAATTCGCGAGTGGTGGGCTTTGAAACCTGGAGCCCCTCAACCCAAGG
CAAATCAACAACATCAAGACAACGCTCGAGGTCTTGTGCTTCCGGGTTAC
AAATACCTTGGACCCGGCAACGGACTCGACAAGGGGGAGCCGGTCAACGC
AGCAGACGCGGCGGCCCTCGAGCACGACAAGGCCTACGACCAGCAGCTCA
AGGCCGGAGACAACCCGTACCTCAAGTACAACCACGCCGACGCCGAGTTC
CAGGAGCGGCTCAAAGAAGATACGTCTTTTGGGGGCAACCTCGGGCGAGC
AGTCTTCCAGGCCAAAAAGAGGCTTCTTGAACCTCTTGGTCTGGTTGAGG
AAGCGGCTAAGACGGCTCCTGGAAAGAAGAGGCCTGTAGAGCAGTCTCCT
CAGGAACCGGACTCCTCCGCGGGTATTGGCAAATCGGGTGCACAGCCCGC
TAAAAAGAGACTCAATTTCGGTCAGACTGGCGACACAGAGTCAGTCCCAG
ACCCTCAACCAATCGGAGAACCTCCCGCAGCCCCCTCAGGTGTGGGATCT
CTTACAATGGCTTCAGGTGGTGGCGCACCAGTGGCAGACAATAACGAAGG
TGCCGATGGAGTGGGTAGTTCCTCGGGAAATTGGCATTGCGATTCCCAAT
GGCTGGGGGACAGAGTCATCACCACCAGCACCCGAACCTGGGCCCTGCCC
ACCTACAACAATCACCTCTACAAGCAAATCTCCAACAGCACATCTGGAGG
ATCTTCAAATGACAACGCCTACTTCGGCTACAGCACCCCCTGGGGGTATT
TTGACTTCAACAGATTCCACTGCCACTTCTCACCACGTGACTGGCAGCGA
CTCATCAACAACAACTGGGGATTCCGGCCTAAGCGACTCAACTTCAAGCT
CTTCAACATTCAGGTCAAAGAGGTTACGGACAACAATGGAGTCAAGACCA
TCGCCAATAACCTTACCAGCACGGTCCAGGTCTTCACGGACTCAGACTAT
CAGCTCCCGTACGTGCTCGGGTCGGCTCACGAGGGCTGCCTCCCGCCGTT
CCCAGCGGACGTTTTCATGATTCCTCAGTACGGGTATCTGACGCTTAATG
ATGGAAGCCAGGCCGTGGGTCGTTCGTCCTTTTACTGCCTGGAATATTTC
CCGTCGCAAATGCTAAGAACGGGTAACAACTTCCAGTTCAGCTACGAGTT
TGAGAACGTACCTTTCCATAGCAGCTACGCTCACAGCCAAAGCCTGGACC
GACTAATGAATCCACTCATCGACCAATACTTGTACTATCTCTCTAGAACT
ATTAACGGTTCTGGACAGAATCAACAAACGCTAAAATTCAGTGTGGCCGG
ACCCAGCAACATGGCTGTCCAGGGAAGAAACTACATACCTGGACCCAGCT
ACCGACAACAACGTGTCTCAACCACTGTGACTCAAAACAACAACAGCGAA
TTTGCTTGGCCTGGAGCTTCTTCTTGGGCTCTCAATGGACGTAATAGCTT
GATGAATCCTGGACCTGCTATGGCCAGCCACAAAGAAGGAGAGGACCGTT
TCTTTCCTTTGTCTGGATCTTTAATTTTTGGCAAACAAGGTACCGGCAGA
GACAACGTGGATGCGGACAAAGTCATGATAACCAACGAAGAAGAAATTAA
AACTACTAACCCGGTAGCAACGGAGTCCTATGGACAAGTGGCCACAAACC
ACCAGAGTGCACAAGCGCAGGCTCAAACCGGTTGGGTTCAAAACCAAGGA
ATACTTCCGGGTATGGTTTGGCAGGACAGAGATGTGTACCTGCAAGGACC
CATTTGGGCCAAAATTCCTCACACGGACGGCAACTTTCACCCTTCTCCGC
TGATGGGAGGGTTTGGAATGAAGCACCCGCCTCCTCAGATCCTCATCAAA
AACACACCTGTACCTGCGGATCCTCCAACGGCCTTCAACAAGGACAAGCT
GAACTCTTTCATCACCCAGTATTCTACTGGCCAAGTCAGCGTGGAGATCG
AGTGGGAGCTGCAGAAGGAAAACAGCAAGCGCTGGAACCCGGAGATCCAG
TACACTTCCAACTATTACAAGTCTAATAATGTTGAATTTGCTGTTAATAC
TGAAGGTGTATATAGTGAACCCCGCCCCATTGGCACCAGATACCTGACTC
GTAATCTGTAA

[0521] By “AAV9 polypeptide” is meant an AAV9 protein with at least about 85% amino acid sequence identity to the amino acid sequence provided below, or a fragment thereof capable of multimerization to form a capsid.

>AAV9
(SEQ ID NO: 199448)
MAADGYLPDWLEDNLSEGIREWWALKPGAPQPKANQQHQDNARGLVLPGY
KYLGPGNGLDKGEPVNAADAAALEHDKAYDQQLKAGDNPYLKYNHADAEF
QERLKEDTSFGGNLGRAVFQAKKRLLEPLGLVEEAAKTAPGKKRPVEQSP
QEPDSSAGIGKSGAQPAKKRLNFGQTGDTESVPDPQPIGEPPAAPSGVGS
LTMASGGGAPVADNNEGADGVGSSSGNWHCDSQWLGDRVITTSTRTWALP
TYNNHLYKQISNSTSGGSSNDNAYFGYSTPWGYFDFNRFHCHFSPRDWQR
LINNNWGFRPKRLNFKLFNIQVKEVTDNNGVKTIANNLTSTVQVFTDSDY
QLPYVLGSAHEGCLPPFPADVFMIPQYGYLTLNDGSQAVGRSSFYCLEYF
PSQMLRTGNNFQFSYEFENVPFHSSYAHSQSLDRLMNPLIDQYLYYLSKT
INGSGQNQQTLKFSVAGPSNMAVQGRNYIPGPSYRQQRVSTTVTQNNNSE
FAWPGASSWALNGRNSLMNPGPAMASHKEGEDRFFPLSGSLIFGKQGTGR
DNVDADKVMITNEEEIKTTNPVATESYGQVATNHQSAQAQAQTGWVQNQG
ILPGMVWQDRDVYLQGPIWAKIPHTDGNFHPSPLMGGFGMKHPPPQILIK
NTPVPADPPTAFNKDKLNSFITQYSTGQVSVEIEWELQKENSKRWNPEIQ
YTSNYYKSNNVEFAVNTEGVYSEPRPIGTRYLTRNL*

[0522] By “AAV9 polynucleotide” is meant a nucleic acid molecule encoding an AAV9 polypeptide. An exemplary AAV9 nucleotide sequence is provided below.

>AAV9
(SEQ ID NO: 199449)
ATGGCTGCCGATGGTTATCTTCCAGATTGGCTCGAGGACAACCTTAGTGA
AGGAATTCGCGAGTGGTGGGCTTTGAAACCTGGAGCCCCTCAACCCAAGG
CAAATCAACAACATCAAGACAACGCTCGAGGTCTTGTGCTTCCGGGTTAC
AAATACCTTGGACCCGGCAACGGACTCGACAAGGGGGAGCCGGTCAACGC
AGCAGACGCGGCGGCCCTCGAGCACGACAAGGCCTACGACCAGCAGCTCA
AGGCCGGAGACAACCCGTACCTCAAGTACAACCACGCCGACGCCGAGTTC
CAGGAGCGGCTCAAAGAAGATACGTCTTTTGGGGGCAACCTCGGGCGAGC
AGTCTTCCAGGCCAAAAAGAGGCTTCTTGAACCTCTTGGTCTGGTTGAGG
AAGCGGCTAAGACGGCTCCTGGAAAGAAGAGGCCTGTAGAGCAGTCTCCT
CAGGAACCGGACTCCTCCGCGGGTATTGGCAAATCGGGTGCACAGCCCGC
TAAAAAGAGACTCAATTTCGGTCAGACTGGCGACACAGAGTCAGTCCCAG
ACCCTCAACCAATCGGAGAACCTCCCGCAGCCCCCTCAGGTGTGGGATCT
CTTACAATGGCTTCAGGTGGTGGCGCACCAGTGGCAGACAATAACGAAGG
TGCCGATGGAGTGGGTAGTTCCTCGGGAAATTGGCATTGCGATTCCCAAT
GGCTGGGGGACAGAGTCATCACCACCAGCACCCGAACCTGGGCCCTGCCC
ACCTACAACAATCACCTCTACAAGCAAATCTCCAACAGCACATCTGGAGG
ATCTTCAAATGACAACGCCTACTTCGGCTACAGCACCCCCTGGGGGTATT
TTGACTTCAACAGATTCCACTGCCACTTCTCACCACGTGACTGGCAGCGA
CTCATCAACAACAACTGGGGATTCCGGCCTAAGCGACTCAACTTCAAGCT
CTTCAACATTCAGGTCAAAGAGGTTACGGACAACAATGGAGTCAAGACCA
TCGCCAATAACCTTACCAGCACGGTCCAGGTCTTCACGGACTCAGACTAT
CAGCTCCCGTACGTGCTCGGGTCGGCTCACGAGGGCTGCCTCCCGCCGTT
CCCAGCGGACGTTTTCATGATTCCTCAGTACGGGTATCTGACGCTTAATG
ATGGAAGCCAGGCCGTGGGTCGTTCGTCCTTTTACTGCCTGGAATATTTC
CCGTCGCAAATGCTAAGAACGGGTAACAACTTCCAGTTCAGCTACGAGTT
TGAGAACGTACCTTTCCATAGCAGCTACGCTCACAGCCAAAGCCTGGACC
GACTAATGAATCCACTCATCGACCAATACTTGTACTATCTCTCAAAGACT
ATTAACGGTTCTGGACAGAATCAACAAACGCTAAAATTCAGTGTGGCCGG
ACCCAGCAACATGGCTGTCCAGGGAAGAAACTACATACCTGGACCCAGCT
ACCGACAACAACGTGTCTCAACCACTGTGACTCAAAACAACAACAGCGAA
TTTGCTTGGCCTGGAGCTTCTTCTTGGGCTCTCAATGGACGTAATAGCTT
GATGAATCCTGGACCTGCTATGGCCAGCCACAAAGAAGGAGAGGACCGTT
TCTTTCCTTTGTCTGGATCTTTAATTTTTGGCAAACAAGGAACTGGAAGA
GACAACGTGGATGCGGACAAAGTCATGATAACCAACGAAGAAGAAATTAA
AACTACTAACCCGGTAGCAACGGAGTCCTATGGACAAGTGGCCACAAACC
ACCAGAGTGCCCAAGCACAGGCGCAGACCGGCTGGGTTCAAAACCAAGGA
ATACTTCCGGGTATGGTTTGGCAGGACAGAGATGTGTACCTGCAAGGACC
CATTTGGGCCAAAATTCCTCACACGGACGGCAACTTTCACCCTTCTCCGC
TGATGGGAGGGTTTGGAATGAAGCACCCGCCTCCTCAGATCCTCATCAAA
AACACACCTGTACCTGCGGATCCTCCAACGGCCTTCAACAAGGACAAGCT
GAACTCTTTCATCACCCAGTATTCTACTGGCCAAGTCAGCGTGGAGATCG
AGTGGGAGCTGCAGAAGGAAAACAGCAAGCGCTGGAACCCGGAGATCCAG
TACACTTCCAACTATTACAAGTCTAATAATGTTGAATTTGCTGTTAATAC
TGAAGGTGTATATAGTGAACCCCGCCCCATTGGCACCAGATACCTGACTC
GTAATCTGTAA

[0523] By “AAVrh.10 polypeptide” is meant an AAVrh.10 protein with at least about 85% amino acid sequence identity to the amino acid sequence provided below, or a fragment thereof capable of multimerization to form a capsid.

>AAVrh10_AAO88201.1
(SEQ ID NO: 199450)
MAADGYLPDWLEDNLSEGIREWWDLKPGAPKPKANQQKQDDGRGLVLPGY
KYLGPFNGLDKGEPVNAADAAALEHDKAYDQQLKAGDNPYLRYNHADAEF
QERLQEDTSFGGNLGRAVFQAKKRVLEPLGLVEEGAKTAPGKKRPVEPSP
QRSPDSSTGIGKKGQQPAKKRLNFGQTGDSESVPDPQPIGEPPAGPSGLG
SGTMAAGGGAPMADNNEGADGVGSSSGNWHCDSTWLGDRVITTSTRTWAL
PTYNNHLYKQISNGTSGGSTNDNTYFGYSTPWGYFDFNRFHCHFSPRDWQ
RLINNNWGFRPKRLNFKLFNIQVKEVTQNEGTKTIANNLTSTIQVFTDSE
YQLPYVLGSAHQGCLPPFPADVFMIPQYGYLTLNNGSQAVGRSSFYCLEY
FPSQMLRTGNNFEFSYQFEDVPFHSSYAHSQSLDRLMNPLIDQYLYYLSR
TQSTGGTAGTQQLLFSQAGPNNMSAQAKNWLPGPCYRQQRVSTTLSQNNN
SNFAWTGATKYHLNGRDSLVNPGVAMATHKDDEERFFPSSGVLMFGKQGA
GKDNVDYSSVMLTSEEEIKTTNPVATEQYGVVADNLQQQNAAPIVGAVNS
QGALPGMVWQNRDVYLQGPIWAKIPHTDGNFHPSPLMGGFGLKHPPPQIL
IKNTPVPADPPTTFSQAKLASFITQYSTGQVSVEIEWELQKENSKRWNPE
IQYTSNYYKSTNVDFAVNTDGTYSEPRPIGTRYLTRNL*

[0524] By “AAVrh.10 polynucleotide” is meant a nucleic acid molecule encoding an AAVrh.10 polypeptide. An exemplary AAVrh.10 nucleotide sequence is provided below.

>AAVRH10_AAO88201.1
(SEQ ID NO: 199451)
ATGGCTGCCGATGGTTATCTTCCAGATTGGCTCGAGGACAACCTCTCTGA
GGGCATTCGCGAGTGGTGGGACTTGAAACCTGGAGCCCCGAAACCCAAAG
CCAACCAGCAAAAGCAGGACGACGGCCGGGGTCTGGTGCTTCCTGGCTAC
AAGTACCTCGGACCCTTCAACGGACTCGACAAGGGGGAGCCCGTCAACGC
GGCGGACGCAGCGGCCCTCGAGCACGACAAGGCCTACGACCAGCAGCTCA
AAGCGGGTGACAATCCGTACCTGCGGTATAACCACGCCGACGCCGAGTTT
CAGGAGCGTCTGCAAGAAGATACGTCTTTTGGGGGCAACCTCGGGCGAGC
AGTCTTCCAGGCCAAGAAGCGGGTTCTCGAACCTCTCGGTCTGGTTGAGG
AAGGCGCTAAGACGGCTCCTGGAAAGAAGAGACCGGTAGAGCCATCACCC
CAGCGTTCTCCAGACTCCTCTACGGGCATCGGCAAGAAAGGCCAGCAGCC
CGCGAAAAAGAGACTCAACTTTGGGCAGACTGGCGACTCAGAGTCAGTGC
CCGACCCTCAACCAATCGGAGAACCCCCCGCAGGCCCCTCTGGTCTGGGA
TCTGGTACAATGGCTGCAGGCGGTGGCGCTCCAATGGCAGACAATAACGA
AGGCGCCGACGGAGTGGGTAGTTCCTCAGGAAATTGGCATTGCGATTCCA
CATGGCTGGGCGACAGAGTCATCACCACCAGCACCCGAACCTGGGCCCTC
CCCACCTACAACAACCACCTCTACAAGCAAATCTCCAACGGGACTTCGGG
AGGAAGCACCAACGACAACACCTACTTCGGCTACAGCACCCCCTGGGGGT
ATTTTGACTTTAACAGATTCCACTGCCACTTCTCACCACGTGACTGGCAG
CGACTCATCAACAACAACTGGGGATTCCGGCCCAAGAGACTCAACTTCAA
GCTCTTCAACATCCAGGTCAAGGAGGTCACGCAGAATGAAGGCACCAAGA
CCATCGCCAATAACCTTACCAGCACGATTCAGGTCTTTACGGACTCGGAA
TACCAGCTCCCGTACGTCCTCGGCTCTGCGCACCAGGGCTGCCTGCCTCC
GTTCCCGGCGGACGTCTTCATGATTCCTCAGTACGGGTACCTGACTCTGA
ACAATGGCAGTCAGGCCGTGGGCCGTTCCTCCTTCTACTGCCTGGAGTAC
TTTCCTTCTCAAATGCTGAGAACGGGCAACAACTTTGAGTTCAGCTACCA
GTTTGAGGACGTGCCTTTTCACAGCAGCTACGCGCACAGCCAAAGCCTGG
ACCGGCTGATGAACCCCCTCATCGACCAGTACCTGTACTACCTGTCTCGG
ACTCAGTCCACGGGAGGTACCGCAGGAACTCAGCAGTTGCTATTTTCTCA
GGCCGGGCCTAATAACATGTCGGCTCAGGCCAAAAACTGGCTACCCGGGC
CCTGCTACCGGCAGCAACGCGTCTCCACGACACTGTCGCAAAATAACAAC
AGCAACTTTGCCTGGACCGGTGCCACCAAGTATCATCTGAATGGCAGAGA
CTCTCTGGTAAATCCCGGTGTCGCTATGGCAACCCACAAGGACGACGAAG
AGCGATTTTTTCCGTCCAGCGGAGTCTTAATGTTTGGGAAACAGGGAGCT
GGAAAAGACAACGTGGACTATAGCAGCGTTATGCTAACCAGTGAGGAAGA
AATTAAAACCACCAACCCAGTGGCCACAGAACAGTACGGCGTGGTGGCCG
ATAACCTGCAACAGCAAAACGCCGCTCCTATTGTAGGGGCCGTCAACAGT
CAAGGAGCCTTACCTGGCATGGTCTGGCAGAACCGGGACGTGTACCTGCA
GGGTCCTATCTGGGCCAAGATTCCTCACACGGACGGAAACTTTCATCCCT
CGCCGCTGATGGGAGGCTTTGGACTGAAACACCCGCCTCCTCAGATCCTG
ATTAAGAATACACCTGTTCCCGCGGATCCTCCAACTACCTTCAGTCAAGC
TAAGCTGGCGTCGTTCATCACGCAGTACAGCACCGGACAGGTCAGCGTGG
AAATTGAATGGGAGCTGCAGAAAGAAAACAGCAAACGCTGGAACCCAGAG
ATTCAATACACTTCCAACTACTACAAATCTACAAATGTGGACTTTGCTGT
TAACACAGATGGCACTTATTCTGAGCCTCGCCCCATCGGCACCCGTTACC
TCACCCGTAATCTGTAA

[0525] By “AAVrh.8 polypeptide” is meant an AAVrh.8 protein with at least about 85% amino acid sequence identity to the amino acid sequence provided below, or a fragment thereof capable of multimerization to form a capsid.

>AAVrh8 AAO88183.1
(SEQ ID NO: 199452)
MAADGYLPDWLEDNLSEGIREWWDLKPGAPKPKANQQKQDDGRGLVLPGY
KYLGPFNGLDKGEPVNAADAAALEHDKAYDQQLKAGDNPYLRYNHADAEF
QERLQEDTSFGGNLGRAVFQAKKRVLEPLGLVEEGAKTAPGKKRPVEQSP
QEPDSSSGIGKTGQQPAKKRLNFGQTGDSESVPDPQPLGEPPAAPSGLGP
NTMASGGGAPMADNNEGADGVGNSSGNWHCDSTWLGDRVITTSTRTWALP
TYNNHLYKQISNGTSGGSTNDNTYFGYSTPWGYFDFNRFHCHFSPRDWQR
LINNNWGFRPKRLNFKLFNIQVKEVTTNEGTKTIANNLTSTVQVFTDSEY
QLPYVLGSAHQGCLPPFPADVFMVPQYGYLTLNNGSQALGRSSFYCLEYF
PSQMLRTGNNFQFSYTFEDVPFHSSYAHSQSLDRLMNPLIDQYLYYLVRT
QTTGTGGTQTLAFSQAGPSSMANQARNWVPGPCYRQQRVSTTTNQNNNSN
FAWTGAAKFKLNGRDSLMNPGVAMASHKDDDDRFFPSSGVLIFGKQGAGN
DGVDYSQVLITDEEEIKATNPVATEEYGAVAINNQAANTQAQTGLVHNQG
VIPGMVWQNRDVYLQGPIWAKIPHTDGNFHPSPLMGGFGLKHPPPQILIK
NTPVPADPPLTFNQAKLNSFITQYSTGQVSVEIEWELQKENSKRWNPEIQ
YTSNYYKSTNVDFAVNTEGVYSEPRPIGTRYLTRNL*

[0526] By “AAVrh.8 polynucleotide” is meant a nucleic acid molecule encoding an AAVrh.8 polypeptide. An exemplary AAVrh.8 nucleotide sequence is provided below.

>AAVRH8_AAO88183.1
(SEQ ID NO: 199453)
ATGGCTGCCGATGGTTATCTTCCAGATTGGCTCGAGGACAACCTCTCTGA
GGGCATTCGCGAGTGGTGGGACTTGAAACCTGGAGCCCCGAAACCCAAAG
CCAACCAGCAAAAGCAGGACGACGGCCGGGGTCTGGTGCTTCCTGGCTAC
AAGTACCTCGGACCCTTCAACGGACTCGACAAGGGGGAGCCCGTCAACGC
GGCGGACGCAGCGGCCCTCGAGCACGACAAAGCCTACGACCAGCAGCTCA
AAGCGGGTGACAATCCGTACCTGCGGTATAATCACGCCGACGCCGAGTTT
CAGGAGCGTCTGCAAGAAGATACGTCTTTTGGGGGCAACCTCGGGCGAGC
AGTCTTCCAGGCCAAGAAGCGGGTTCTCGAACCTCTCGGTCTGGTTGAGG
AAGGCGCTAAGACGGCTCCTGGAAAGAAGAGACCGGTAGAGCAGTCGCCA
CAAGAGCCAGACTCCTCCTCGGGCATCGGCAAGACAGGCCAGCAGCCCGC
TAAAAAGAGACTCAATTTTGGTCAGACTGGCGACTCAGAGTCAGTCCCCG
ACCCACAACCTCTCGGAGAACCTCCAGCAGCCCCCTCAGGTCTGGGACCT
AATACAATGGCTTCAGGCGGTGGCGCTCCAATGGCAGACAATAACGAAGG
CGCCGACGGAGTGGGTAATTCCTCGGGAAATTGGCATTGCGATTCCACAT
GGCTGGGGGACAGAGTCATCACCACCAGCACCCGAACCTGGGCCCTGCCC
ACCTACAACAACCACCTCTACAAGCAAATCTCCAACGGCACCTCGGGAGG
AAGCACCAACGACAACACCTATTTTGGCTACAGCACCCCCTGGGGGTATT
TTGACTTCAACAGATTCCACTGTCACTTTTCACCACGTGACTGGCAACGA
CTCATCAACAACAATTGGGGATTCCGGCCCAAAAGACTCAACTTCAAGCT
GTTCAACATCCAGGTCAAGGAAGTCACGACGAACGAAGGCACCAAGACCA
TCGCCAATAATCTCACCAGCACCGTGCAGGTCTTTACGGACTCGGAGTAC
CAGTTACCGTACGTGCTAGGATCCGCTCACCAGGGATGTCTGCCTCCGTT
CCCGGCGGACGTCTTCATGGTTCCTCAGTACGGCTATTTAACTTTAAACA
ATGGAAGCCAAGCCCTGGGACGTTCCTCCTTCTACTGTCTGGAGTATTTC
CCATCGCAGATGCTGAGAACCGGCAACAACTTTCAGTTCAGCTACACCTT
CGAGGACGTGCCTTTCCACAGCAGCTACGCGCACAGCCAGAGCCTGGACA
GGCTGATGAATCCCCTCATCGACCAGTACCTGTACTACCTGGTCAGAACG
CAAACGACTGGAACTGGAGGGACGCAGACTCTGGCATTCAGCCAAGCGGG
TCCTAGCTCAATGGCCAACCAGGCTAGAAATTGGGTGCCCGGACCTTGCT
ACCGGCAGCAGCGCGTCTCCACGACAACCAACCAGAACAACAACAGCAAC
TTTGCCTGGACGGGAGCTGCCAAGTTTAAGCTGAACGGCCGAGACTCTCT
AATGAATCCGGGCGTGGCAATGGCTTCCCACAAGGATGACGACGACCGCT
TCTTCCCTTCGAGCGGGGTCCTGATTTTTGGCAAGCAAGGAGCCGGGAAC
GATGGAGTGGATTACAGCCAAGTGCTGATTACAGATGAGGAAGAAATCAA
GGCTACCAACCCCGTGGCCACAGAAGAATATGGAGCAGTGGCCATCAACA
ACCAGGCCGCCAATACGCAGGCGCAGACCGGACTCGTGCACAACCAGGGG
GTGATTCCCGGCATGGTGTGGCAGAATAGAGACGTGTACCTGCAGGGTCC
CATCTGGGCCAAAATTCCTCACACGGACGGCAACTTTCACCCGTCTCCCC
TGATGGGCGGCTTTGGACTGAAGCACCCGCCTCCTCAAATTCTCATCAAG
AACACACCGGTTCCAGCGGACCCGCCGCTTACCTTCAACCAGGCCAAGCT
GAACTCTTTCATCACGCAGTACAGCACCGGACAGGTCAGCGTGGAAATCG
AGTGGGAGCTGCAGAAAGAAAACAGCAAACGCTGGAATCCAGAGATTCAA
TACACTTCCAACTACTACAAATCTACAAATGTGGACTTTGCTGTCAACAC
GGAGGGGGTTTATAGCGAGCCTCGCCCCATTGGCACCCGTTACCTCACCC
GCAACCTGTAA

[0527] By “LK03 polypeptide” is meant an LK03 protein with at least about 85% amino acid sequence identity to the amino acid sequence provided below, or a fragment thereof capable of multimerization to form a capsid.

>LK03
(SEQ ID NO: 199454)
MAADGYLPDWLEDNLSEGIREWWALQPGAPKPKANQQHQDNARGLVLPGY
KYLGPGNGLDKGEPVNAADAAALEHDKAYDQQLKAGDNPYLKYNHADAEF
QERLKEDTSFGGNLGRAVFQAKKRLLEPLGLVEEAAKTAPGKKRPVDQSP
QEPDSSSGVGKSGKQPARKRLNFGQTGDSESVPDPQPLGEPPAAPTSLGS
NTMASGGGAPMADNNEGADGVGNSSGNWHCDSQWLGDRVITTSTRTWALP
TYNNHLYKQISSQSGASNDNHYFGYSTPWGYFDFNRFHCHFSPRDWQRLI
NNNWGFRPKKLSFKLFNIQVKEVTQNDGTTTIANNLTSTVQVFTDSEYQL
PYVLGSAHQGCLPPFPADVFMVPQYGYLTLNNGSQAVGRSSFYCLEYFPS
QMLRTGNNFQFSYTFEDVPFHSSYAHSQSLDRLMNPLIDQYLYYLNRTQG
TTSGTTNQSRLLFSQAGPQSMSLQARNWLPGPCYRQQRLSKTANDNNNSN
FPWTAASKYHLNGRDSLVNPGPAMASHKDDEEKFFPMHGNLIFGKEGTTA
SNAELDNVMITDEEEIRTTNPVATEQYGTVANNLQSSNTAPTTRTVNDQG
ALPGMVWQDRDVYLQGPIWAKIPHTDGHFHPSPLMGGFGLKHPPPQIMIK
NTPVPANPPTTFSPAKFASFITQYSTGQVSVEIEWELQKENSKRWNPEIQ
YTSNYNKSVNVDFTVDINGVYSEPRPIGTRYLTRPL*

[0528] By “LK03 polynucleotide” is meant a nucleic acid molecule encoding an LK03 polypeptide. An exemplary LK03 nucleotide sequence is provided below.

>LK03
(SEQ ID NO: 199455)
ATGGCTGCTGACGGTTATCTTCCAGATTGGCTCGAGGACAACCTTTCTGA
AGGCATTCGAGAGTGGTGGGCGCTGCAACCTGGAGCCCCTAAACCCAAGG
CAAATCAACAACATCAGGACAACGCTCGGGGTCTTGTGCTTCCGGGTTAC
AAATACCTCGGACCCGGCAACGGACTCGACAAGGGGGAACCCGTCAACGC
AGCGGACGCGGCAGCCCTCGAGCACGACAAGGCCTACGACCAGCAGCTCA
AGGCCGGTGACAACCCCTACCTCAAGTACAACCACGCCGACGCCGAGTTC
CAGGAGCGGCTCAAAGAAGATACGTCTTTTGGGGGCAACCTCGGGCGAGC
AGTCTTCCAGGCCAAAAAGAGGCTTCTTGAACCTCTTGGTCTGGTTGAGG
AAGCGGCTAAGACGGCTCCTGGAAAGAAGAGGCCTGTAGATCAGTCTCCT
CAGGAACCGGACTCATCATCTGGTGTTGGCAAATCGGGCAAACAGCCTGC
CAGAAAAAGACTAAATTTCGGTCAGACTGGCGACTCAGAGTCAGTCCCAG
ACCCTCAACCTCTCGGAGAACCACCAGCAGCCCCCACAAGTTTGGGATCT
AATACAATGGCTTCAGGCGGTGGCGCACCAATGGCAGACAATAACGAGGG
TGCCGATGGAGTGGGTAATTCCTCAGGAAATTGGCATTGCGATTCCCAAT
GGCTGGGCGACAGAGTCATCACCACCAGCACCAGAACCTGGGCCCTGCCC
ACTTACAACAACCATCTCTACAAGCAAATCTCCAGCCAATCAGGAGCTTC
AAACGACAACCACTACTTTGGCTACAGCACCCCTTGGGGGTATTTTGACT
TTAACAGATTCCACTGCCACTTCTCACCACGTGACTGGCAGCGACTCATT
AACAACAACTGGGGATTCCGGCCCAAGAAACTCAGCTTCAAGCTCTTCAA
CATCCAAGTTAAAGAGGTCACGCAGAACGATGGCACGACGACTATTGCCA
ATAACCTTACCAGCACGGTTCAAGTGTTTACGGACTCGGAGTATCAGCTC
CCGTACGTGCTCGGGTCGGCGCACCAAGGCTGTCTCCCGCCGTTTCCAGC
GGACGTCTTCATGGTCCCTCAGTATGGATACCTCACCCTGAACAACGGAA
GTCAAGCGGTGGGACGCTCATCCTTTTACTGCCTGGAGTACTTCCCTTCG
CAGATGCTAAGGACTGGAAATAACTTCCAATTCAGCTATACCTTCGAGGA
TGTACCTTTTCACAGCAGCTACGCTCACAGCCAGAGTTTGGATCGCTTGA
TGAATCCTCTTATTGATCAGTATCTGTACTACCTGAACAGAACGCAAGGA
ACAACCTCTGGAACAACCAACCAATCACGGCTGCTTTTTAGCCAGGCTGG
GCCTCAGTCTATGTCTTTGCAGGCCAGAAATTGGCTACCTGGGCCCTGCT
ACCGGCAACAGAGACTTTCAAAGACTGCTAACGACAACAACAACAGTAAC
TTTCCTTGGACAGCGGCCAGCAAATATCATCTCAATGGCCGCGACTCGCT
GGTGAATCCAGGACCAGCTATGGCCAGTCACAAGGACGATGAAGAAAAAT
TTTTCCCTATGCACGGCAATCTAATATTTGGCAAAGAAGGGACAACGGCA
AGTAACGCAGAATTAGATAATGTAATGATTACGGATGAAGAAGAGATTCG
TACCACCAATCCTGTGGCAACAGAGCAGTATGGAACTGTGGCAAATAACT
TGCAGAGCTCAAATACAGCTCCCACGACTAGAACTGTCAATGATCAGGGG
GCCTTACCTGGCATGGTGTGGCAAGATCGTGACGTGTACCTTCAAGGACC
TATCTGGGCAAAGATTCCTCACACGGATGGACACTTTCATCCTTCTCCTC
TGATGGGAGGCTTTGGACTGAAACATCCGCCTCCTCAAATCATGATCAAA
AATACTCCGGTACCGGCAAATCCTCCGACGACTTTCAGCCCGGCCAAGTT
TGCTTCATTTATCACTCAGTACTCCACTGGACAGGTCAGCGTGGAAATTG
AGTGGGAGCTACAGAAAGAAAACAGCAAACGTTGGAATCCAGAGATTCAG
TACACTTCCAACTACAACAAGTCTGTTAATGTGGACTTTACTGTAGACAC
TAATGGTGTTTATAGTGAACCTCGCCCCATTGGCACCCGTTACCTTACCC
GTCCCCTGTAA.

[0529] By “administering” is meant giving, supplying, dispensing a composition, agent, therapeutic product, and the like to a subject, or applying or bringing the composition and the like into contact with the subject. Administering or administration may be accomplished by any of a number of routes, such as, for example, without limitation, parenteral or systemic, intravenous (IV), (injection), subcutaneous, intrathecal, intracranial, intramuscular, dermal, intradermal, inhalation, rectal, intravaginal, topical, oral, subcutaneous, intramuscular, or intraocular. In embodiments, administration is systemic, such as by inoculation, injection, or intravenous injection.

[0530] By “agent” is meant any viral particle comprising a therapeutic molecule (e.g., antibody, nucleic acid molecule, or polypeptide, or fragments thereof). A non-limiting example of an agent is an AAV of the present disclosure.

[0531] By “alteration” is meant a change in the expression levels or activity of a gene or polypeptide as detected by standard art known methods such as those described herein. The alteration can be an increase or a decrease. As used herein, an alteration includes a 10% change in expression levels, preferably a 25% change, more preferably a 40% change, and most preferably a 50% or greater change in expression levels.”

[0532] By “analog” is meant a molecule that is not identical but has analogous functional or structural features. For example, a polypeptide analog retains the biological activity of a corresponding naturally occurring polypeptide, while having certain biochemical modifications that enhance the analog's function relative to a naturally occurring polypeptide. Such biochemical modifications could increase the analog's protease resistance, membrane permeability, or half-life, without altering, for example, ligand binding. An analog may include an unnatural amino acid.

[0533] In this disclosure, “comprises,” “comprising,” “containing” and “having” and the like can have the meaning ascribed to them in U.S. Patent law and can mean “includes,” “including,” and the like; “consisting essentially of” or “consists essentially” likewise has the meaning ascribed in U.S. Patent law and the term is open-ended, allowing for the presence of more than that which is recited so long as basic or novel characteristics of that which is recited is not changed by the presence of more than that which is recited, but excludes prior art embodiments. Any embodiments specified as “comprising” a particular component(s) or element(s) are also contemplated as “consisting of” or “consisting essentially of” the particular component(s) or element(s) in some embodiments.

[0534] By “consist essentially” it is meant that the ingredients include only the listed components along with the normal impurities present in commercial materials and with any other additives present at levels which do not affect the operation of the disclosure, for instance at levels less than 5% by weight or less than 1% or even 0.5% by weight.

[0535] “Detect” refers to identifying the presence, absence, or amount of the analyte to be detected.

[0536] By “detectable label” is meant a composition that when linked to a molecule of interest renders the latter detectable, via spectroscopic, photochemical, biochemical, immunochemical, or chemical means. For example, useful labels include radioactive isotopes, magnetic beads, metallic beads, colloidal particles, fluorescent dyes, electron-dense reagents, enzymes (for example, as commonly used in an ELISA), biotin, digoxigenin, or haptens.

[0537] By “fragment” is meant a portion of a polypeptide or nucleic acid molecule. This portion contains at least about 10%, 20%, 30%, 40%, 50%, 60%, 70%, 80%, or 90% of the entire length of the reference nucleic acid molecule or polypeptide. A fragment may contain 10, 20, 30, 40, 50, 60, 70, 80, 90, or 100, 200, 300, 400, 500, 600, 700, 800, 900, or 1000 nucleotides or amino acids.

[0538] By “gene” is meant a region of a polynucleotide that is transcribed as a single unit. Typically, a gene is transcribed to produce a single RNA molecule.

[0539] “Hybridization” means hydrogen bonding, which may be Watson-Crick, Hoogsteen or reversed Hoogsteen hydrogen bonding, between complementary nucleobases. For example, adenine and thymine are complementary nucleobases that pair through the formation of hydrogen bonds.

[0540] By “increase” is meant to alter positively by at least 5% relative to a reference. An increase may be by 5%, 10%, 25%, 30%, 50%, 75%, or even by 100%.

[0541] The terms “isolated,” “purified,” or “biologically pure” refer to material that is free to varying degrees from components which normally accompany it as found in its native state. “Isolate” denotes a degree of separation from original source or surroundings. “Purify” denotes a degree of separation that is higher than isolation. A “purified” or “biologically pure” protein is sufficiently free of other materials such that any impurities do not materially affect the biological properties of the protein or cause other adverse consequences. That is, a nucleic acid or peptide of this invention is purified if it is substantially free of cellular material, viral material, or culture medium when produced by recombinant DNA techniques, or chemical precursors or other chemicals when chemically synthesized. Purity and homogeneity are typically determined using analytical chemistry techniques, for example, polyacrylamide gel electrophoresis or high-performance liquid chromatography. The term “purified” can denote that a nucleic acid or protein gives rise to essentially one band in an electrophoretic gel. For a protein that can be subjected to modifications, for example, phosphorylation or glycosylation, different modifications may give rise to different isolated proteins, which can be separately purified.

[0542] By “isolated polynucleotide” is meant a nucleic acid that is free of the genes which, in the naturally occurring genome of the organism from which the nucleic acid molecule of the invention is derived, flank the gene. The term therefore includes, for example, a recombinant DNA that is incorporated into a vector; into an autonomously replicating plasmid or virus; or into the genomic DNA of a prokaryote or eukaryote; or that exists as a separate molecule (for example, a cDNA or a genomic or cDNA fragment produced by PCR or restriction endonuclease digestion) independent of other sequences. In addition, the term includes an RNA molecule that is transcribed from a DNA molecule, as well as a recombinant DNA that is part of a hybrid gene encoding additional polypeptide sequence.

[0543] By an “isolated polypeptide” is meant a polypeptide of the invention that has been separated from components that naturally accompany it. Typically, the polypeptide is isolated when it is at least 60%, by weight, free from the proteins and naturally occurring organic molecules with which it is naturally associated. Preferably, the preparation is at least 75%, more preferably at least 90%, and most preferably at least 99%, by weight, a polypeptide of the invention. An isolated polypeptide of the invention may be obtained, for example, by extraction from a natural source, by expression of a recombinant nucleic acid encoding such a polypeptide; or by chemically synthesizing the protein. Purity can be measured by any appropriate method, for example, column chromatography, polyacrylamide gel electrophoresis, or by HPLC analysis.

[0544] By “marker” is meant any protein or polynucleotide having an alteration in expression level or activity that is associated with a developmental state, condition, disease, or disorder.

[0545] As used herein, “obtaining” as in “obtaining an agent” includes synthesizing, purchasing, or otherwise acquiring the agent.

[0546] By “polypeptide” or “amino acid sequence” is meant any chain of amino acids, regardless of length or post-translational modification. In various embodiments, the post-translational modification is glycosylation or phosphorylation. In various embodiments, conservative amino acid substitutions may be made to a polypeptide to provide functionally equivalent variants, or homologs of the polypeptide. In some aspects the invention embraces sequence alterations that result in conservative amino acid substitutions. In some embodiments, a “conservative amino acid substitution” refers to an amino acid substitution that does not alter the relative charge or size characteristics of the protein in which the conservative amino acid substitution is made. Variants can be prepared according to methods for altering polypeptide sequence known to one of ordinary skill in the art such as are found in references that compile such methods, e.g., Molecular Cloning: A Laboratory Manual, J. Sambrook, et al., eds., Second Edition, Cold Spring Harbor Laboratory Press, Cold Spring Harbor, N.Y., 1989, or Current Protocols in Molecular Biology, F. M. Ausubel, et al., eds., John Wiley & Sons, Inc., New York. Non-limiting examples of conservative substitutions of amino acids include substitutions made among amino acids within the following groups: (a) M, I, L, V; (b) F, Y, W; (c) K, R, H; (d) A, G; (e) S, T; (f) Q, N; and (g) E, D. In various embodiments, conservative amino acid substitutions can be made to the amino acid sequence of the proteins and polypeptides disclosed herein.

[0547] By “manufacturability,” “production fitness,” “production,” or “produces” with reference to a capsid polypeptide is meant how well a capsid polynucleotide is expressed in a cell and the amount of viral particles produced from the expressed capsid polypeptides that are capable of delivering a payload to a cell. In embodiments, the production efficiency of a capsid polypeptide may be measured as the number of functional viral particles produced using a particular amount of a polynucleotide encoding the capsid polypeptide. In some cases, an AAV capsid with good production is an AAV capsid that yields greater or comparable levels of functional AAV viral particles relative to a reference AAV viral capsid. Production fitness of a capsid polypeptide can be assessed using methods provided herein.

[0548] The term “recombinant” as used herein in the context of proteins or nucleic acids refers to proteins or nucleic acids that do not occur in nature or in a naturally occurring protein or nucleic acid sequence, but are the product of human engineering, often or typically utilizing molecular biological or molecular genetic tools and techniques practiced by the skilled practitioner in the art. For example, in some embodiments, a recombinant protein or nucleic acid molecule comprises an amino acid or nucleotide sequence that comprises at least one, at least two, at least three, at least four, at least five, at least six, at least seven, or at least eight mutations as compared to any naturally occurring sequence.

[0549] By “reduce” is meant to alter negatively by at least 5% relative to a reference. A reduction may be by 5%, 10%, 25%, 30%, 50%, 75%, or even by 100%.

[0550] By “reference” is meant a standard or control condition. In embodiments, a reference is a cell or animal that does not express a particular recombinase (e.g., Cre or FLP). In some embodiments, the reference is a cell or animal that has not been contacted with or administered a viral particle. In some cases, a reference is a capsid polypeptide that does not comprise a peptide insert of the present disclosure.

[0551] A “reference sequence” is a defined sequence used as a basis for sequence comparison. A reference sequence may be a subset of or the entirety of a specified sequence; for example, a segment of a full-length cDNA or gene sequence, or the complete cDNA or gene sequence. For polypeptides, the length of the reference polypeptide sequence will generally be at least about 16 amino acids, preferably at least about 20 amino acids, more preferably at least about 25 amino acids, and even more preferably about 35 amino acids, about 50 amino acids, or about 100 amino acids. For nucleic acids, the length of the reference nucleic acid sequence will generally be at least about 50 nucleotides, preferably at least about 60 nucleotides, more preferably at least about 75 nucleotides, and even more preferably about 100 nucleotides or about 300 nucleotides or any integer thereabout or therebetween.

[0552] Nucleic acid molecules useful in the methods of the invention include any nucleic acid molecule that can be transcribed into an mRNA molecule or that encodes a polypeptide of the invention or a fragment thereof. In embodiments, the mRNA contains a sequence corresponding to a barcode and/or invertible spacer of the present disclosure. In embodiments, nucleic acid molecules need not be 100% identical with an endogenous nucleic acid sequence but will typically exhibit substantial identity. Polynucleotides having “substantial identity” to an endogenous sequence are typically capable of hybridizing with at least one strand of a double-stranded nucleic acid molecule. Nucleic acid molecules useful in the methods of the invention include any nucleic acid molecule that encodes a polypeptide of the invention or a fragment thereof. Polynucleotides having “substantial identity” to an endogenous sequence are typically capable of hybridizing with at least one strand of a double-stranded nucleic acid molecule. By “hybridize” is meant pair to form a double-stranded molecule between complementary polynucleotide sequences (e.g., a gene described herein), or portions thereof, under various conditions of stringency. (See, e.g., Wahl, G. M., and S. L. Berger (1987) Methods Enzymol. 152:399; Kimmel, A. R. (1987) Methods Enzymol. 152:507). In some instances, the nucleic acid molecule encodes a polypeptide that is not endogenous to a target cell or animal. In some cases, the nucleic acid molecule encodes a capsid polypeptide of the present disclosure or a fragment thereof.

[0553] For example, stringent salt concentration will ordinarily be less than about 750 mM NaCl and 75 mM trisodium citrate, preferably less than about 500 mM NaCl and 50 mM trisodium citrate, and more preferably less than about 250 mM NaCl and 25 mM trisodium citrate. Low stringency hybridization can be obtained in the absence of organic solvent, e.g., formamide, while high stringency hybridization can be obtained in the presence of at least about 35% formamide, and more preferably at least about 50% formamide. Stringent temperature conditions will ordinarily include temperatures of at least about 30° C., more preferably of at least about 37° C., and most preferably of at least about 42° C. Varying additional parameters, such as hybridization time, the concentration of detergent, e.g., sodium dodecyl sulfate (SDS), and the inclusion or exclusion of carrier DNA, are well known to those skilled in the art. Various levels of stringency are accomplished by combining these various conditions as needed. In a preferred: embodiment, hybridization will occur at 30° C. in 750 mM NaCl, 75 mM trisodium citrate, and 1% SDS. In a more preferred embodiment, hybridization will occur at 37° C. in 500 mM NaCl, 50 mM trisodium citrate, 1% SDS, 35% formamide, and 100 μg/ml denatured salmon sperm DNA (ssDNA). In a most preferred embodiment, hybridization will occur at 42° C. in 250 mM NaCl, 25 mM trisodium citrate, 1% SDS, 50% formamide, and 200 g/ml ssDNA. Useful variations on these conditions will be readily apparent to those skilled in the art.

[0554] For most applications, washing steps that follow hybridization will also vary in stringency. Wash stringency conditions can be defined by salt concentration and by temperature. As above, wash stringency can be increased by decreasing salt concentration or by increasing temperature. For example, stringent salt concentration for the wash steps will preferably be less than about 30 mM NaCl and 3 mM trisodium citrate, and most preferably less than about 15 mM NaCl and 1.5 mM trisodium citrate. Stringent temperature conditions for the wash steps will ordinarily include a temperature of at least about 25° C., more preferably of at least about 42° C., and even more preferably of at least about 68° C. In a preferred embodiment, wash steps will occur at 25° C. in 30 mM NaCl, 3 mM trisodium citrate, and 0.1% SDS. In a more preferred embodiment, wash steps will occur at 42 C in 15 mM NaCl, 1.5 mM trisodium citrate, and 0.1% SDS. In a more preferred embodiment, wash steps will occur at 68° C. in 15 mM NaCl, 1.5 mM trisodium citrate, and 0.1% SDS. Additional variations on these conditions will be readily apparent to those skilled in the art. Hybridization techniques are well known to those skilled in the art and are described, for example, in Benton and Davis (Science 196:180, 1977); Grunstein and Hogness (Proc. Natl. Acad. Sci., USA 72:3961, 1975); Ausubel et al. (Current Protocols in Molecular Biology, Wiley Interscience, New York, 2001); Berger and Kimmel (Guide to Molecular Cloning Techniques, 1987, Academic Press, New York); and Sambrook et al., Molecular Cloning: A Laboratory Manual, Cold Spring Harbor Laboratory Press, New York.

[0555] By “substantially identical” is meant a polypeptide or nucleic acid molecule exhibiting at least 50% identity to a reference amino acid sequence or nucleic acid sequence. In embodiments, such a sequence is at least 60%, more preferably 80% or 85%, and more preferably 90%, 95% or even 99% identical at the amino acid level or nucleic acid to the sequence used for comparison.

[0556] Sequence identity is typically measured using sequence analysis software (for example, Sequence Analysis Software Package of the Genetics Computer Group, University of Wisconsin Biotechnology Center, 1710 University Avenue, Madison, Wis. 53705, BLAST, BESTFIT, GAP, or PILEUP/PRETTYBOX programs). Such software matches identical or similar sequences by assigning degrees of homology to various substitutions, deletions, and/or other modifications. Conservative substitutions typically include substitutions within the following groups: glycine, alanine; valine, isoleucine, leucine; aspartic acid, glutamic acid, asparagine, glutamine; serine, threonine; lysine, arginine; and phenylalanine, tyrosine. In an exemplary approach to determining the degree of identity, a BLAST program may be used, with a probability score between e⁻³ and e⁻¹⁰⁰ indicating a closely related sequence.

[0557] By “subject” is meant an organism. In embodiments, the organism is a mammal. Non-limiting examples of a subject include a human or non-human mammal, such as a non-human primate (e.g., a marmoset), or a non-human mammal, such as a bovine, equine, canine, ovine, or feline mammal, or a sheep, goat, llama, camel, or a rodent (rat, mouse), ferret, gerbil, hamster, or zebrafish.

[0558] Ranges provided herein are understood to be shorthand for all of the values within the range. For example, a range of 1 to 50 is understood to include any number, combination of numbers, or sub-range from the group consisting of 1, 2, 3, 4, 5, 6, 7, 8, 9, 10, 11, 12, 13, 14, 15, 16, 17, 18, 19, 20, 21, 22, 23, 24, 25, 26, 27, 28, 29, 30, 31, 32, 33, 34, 35, 36, 37, 38, 39, 40, 41, 42, 43, 44, 45, 46, 47, 48, 49, or 50.

[0559] “Transduction” refers to a process by which a polynucleotide is introduced or transferred into a cell. In embodiments, a cell is transduced by a virus or viral vector. In embodiments, the transduced polynucleotide (e.g., RNA, DNA) is expressed in the transduced cell.

[0560] As used herein, the term “vehicle” refers to a solvent, diluent, or carrier component of a pharmaceutical composition.

[0561] By “viral genome” is meant a polynucleotide molecule suitable for encapsidation by a viral capsid. A non-limiting example of a viral genome is a polynucleotide (e.g., single-stranded DNA) containing and/or flanked by two adeno-associated virus inverted terminal repeats (ITR's). In some cases, a viral genome contains a rep open reading frame and/or a cap open reading frame. In embodiments, the viral capsid is an adeno-associated virus capsid or a lentivirus capsid. In various instances, the viral genome is of sufficient size for encapsidation by a viral capsid (e.g., less than 4.7 kilobases long).

[0562] Unless specifically stated or obvious from context, as used herein, the term “or” is understood to be inclusive. Unless specifically stated or obvious from context, as used herein, the terms “a”, “an”, and “the” are understood to be singular or plural.

[0563] Unless specifically stated or obvious from context, as used herein, the term “about” is understood as within a range of normal tolerance in the art, for example within 2 standard deviations of the mean. Unless otherwise clear from context, all numerical values provided herein are modified by the term about.

[0564] In any of the above aspects, or embodiments thereof, the cells form part of an organoid or virtual organ. In any of the above aspects, or embodiments thereof, the cells contain two or more different cell types.

[0565] The recitation of a listing of chemical groups in any definition of a variable herein includes definitions of that variable as any single group or combination of listed groups. The recitation of an embodiment for a variable or aspect herein includes that embodiment as any single embodiment or in combination with any other embodiments or portions thereof.

[0566] Any compositions or methods provided herein can be combined with one or more of any of the other compositions and methods provided herein.

### BRIEF DESCRIPTION OF THE DRAWINGS

[0567] FIGS. 1A-1E provide illustrations showing an overview of a systematic multi-trait protein optimization paradigm. FIG. 1A provides an illustration of an insertion-modified AAV virus library that uniformly samples the 7-mer sequence space (1.28 billion possible variants) and is designed and used to produce AAV particles. Variant production fitness is measured via NGS of nuclease-resistant Cap-containing genomes (VRPM) relative to the number of genomes in the DNA library (DRPM). FIG. 1B provides an illustration of a fitness predictor and graph showing that the production fitness data is used to train a sequence-to-production-fitness ML model that is then used to design the Fit4Function library, which uniformly and exclusively samples the high production fitness sequence space. A sequence-to-production-fitness ML model was built and used to create the Fit4Function library, which uniformly and exclusively samples the high production fitness sequence space. FIG. 1C provides an illustration showing that the Fit4Function library can be screened in vivo or in vivo for functions of interest, and the data are used to derive ML models that predict these functions from random 7-mer sequences. FIG. 1D is an illustration showing that the production fitness and functional models are used in combination to populate MultiFunction libraries consisting of variants predicted to perform well across the desired traits (see checkered areas that represent the overlap between the functional sequence spaces of interest). FIG. 1E is an illustration showing that the MultiFunction libraries were screened for all functions of interest, The top performing variants were then individually validated.

[0568] FIG. 2 provides a series of heatmaps showing that production fitness replication quality improved upon hierarchical aggregation of replicates. The heatmaps show replication quality between replicates, where replication quality was defined as the Pearson correlation of log 2 reads per million (RPM) between replicates. Going from left-to-right in FIG. 2, data was collapsed by technical replicates, then biological replicates, then by researchers, with replication quality increasing as replicates were collapsed.

[0569] FIGS. 3A-3G provide scatter plots, histograms, heatmaps, and a plot showing mapping and learning the 7-mer production fitness landscape. FIG. 3A provides a scatter plot showing a correlation between the production fitness score of codon replicate pairs. Each pair was aggregated across 12 replications. The vertical and horizontal distributions correspond to ‘missing’ cases, where only one codon replicate of a pair was detected. FIG. 3B provides a histogram showing the production fitness distribution of the training library representing the variants detected in at least one of the 24 replicates (92.4% of total variants). The distributions representing low versus high production fitness are depicted. FIG. 3C provides a heatmap showing the AA distribution by position for the variants in the 70K most abundant sequences in an NNK library versus the high fit distribution of the training library (27K). FIG. 3I) provides a scatter plot showing production fitness replication quality of the control set (10K) shared between the training and assessment libraries. FIGS. 3E and 3F provide scatter plots showing measured versus predicted fitness score when the model is trained on a subset of the training library and tested on another subset of the same library (FIG. 3E) versus when tested on the independent assessment library, not including the overlapping 10K set (FIG. 3F). FIG. 3G provides a plot showing performance of the fitness prediction model across different training set sizes.

[0570] FIGS. 4A-4C provide histograms and a stacked bar graph showing codon usage of 7-mer insertions minimally affected capsid fitness. FIG. 4A provides a histogram showing the distribution of the difference in fitness scores measured between codon replicate pairs and between technical replicate pairs are similar (Kullback-Leibler divergence=0.006±0.007). FIG. 4B provides a histogram showing the variants with a single codon replicate detected (missing matching codon) had fitness scores on the low end of the fitness bimodal distribution. FIG. 4C provides a bar graph showing codon usage distribution in the training library followed the expected uniform distribution for each amino acid.

[0571] FIG. 5 provides a bar chart and histogram distinguishing high- and low-production fitness distributions. The production fitness of detected stop-codon containing variants in the training library, presumably arising due to cross-packaging, versus the production fitness landscape of the detected library non-control variants (codon replicates not aggregated). 40.1% of the stop codon-containing sequences were undetected in the virus library.

[0572] FIGS. 6A-6H provide a schematic, a histogram, a heat map, bar graphs, and scatter plots showing Fit4Function libraries evenly sampled the high fit production space and enabled more accurate functional screening and prediction. FIG. 6A provides a schematic showing the composition of the Fit4Function library. FIG. 6B provides a histogram showing a calibrated distribution of the measured fitness scores for the Fit4Function library versus the training library. FIG. 6C provides a heatmap showing the AA distribution by position for the variants in the Fit4Function library, high fit distribution of the training library, and 240K most abundant sequences in an NNK library. FIG. 6D provides a bar graph showing a distribution of Hamming distances between pairs of variants in NNK vs the Fit4Function library. FIG. 6E provides a bar graph showing a quantitative comparison of pairwise Pearson correlations among biological triplicates for functional screens using the Fit4Function library (240K) versus an NNK library (top 240K variants). hCMEC/d3=human brain endothelial cell line, mBMVEC=C57 primary brain microvascular endothelial cells, hBMVEC=human primary brain microvascular endothelial cells. FIG. 6F provides scatter plots showing measured versus predicted log 2 enrichment scores for models trained on Fit4Function versus NNK library data. FIG. 6G provides a bar graph showing replication quality between pairs of animals for the biodistribution in eight organs. FIG. 6H provides scatter plots showing prediction performance of models trained on in vivo biodistribution of Fit4Function library across 8 organs.

[0573] FIG. 7 provides a heatmap showing Fit4Function variant biodistribution correlation between organs.

[0574] FIGS. 8A and 8B provide plots showing replicability of five assays for hepatocyte MultiFunction training from Fit4Function screens. Pairwise correlations between biological triplicates for (FIG. 8A) production fitness and (FIG. 8B) in vitro assays of HepG2 binding or transduction and THLE binding or transduction.

[0575] FIGS. 9A-9D provide scatter plots, histograms, a bar graph, and a heatmap relating to MultiFunction library generation from functional screens of the Fit4Function Library. FIG. 9A provides a series of scatter plots showing Pearson correlation of measured versus predicted enrichment for production fitness and functional assays relevant to hepatocyte cross-species targeting. FIG. 9B provides histograms showing the distribution of enrichment across variants sampled from the Uniform (3K), Fit4Function (10K), Positive Control (Fit4Function variants satisfying the six conditions), and MultiFunction libraries. Histograms are density-normalized, including non-detected variants (ND). FIG. 9C provides a bar graph showing hit rate for variants satisfying the six conditions in each listed variant set. Positive control variants were selected to all meet the six conditions and are not plotted. FIG. 9D provides a heatmap showing the AA distribution by position for the variants in the MultiFunction library.

[0576] FIGS. 10A-10C provide plots showing replicability of MultiFunction library across in vitro and in vivo assays. FIG. 10A provides plots of production fitness. FIG. 10B provides plots of human in vivo cell binding and transduction. FIG. 10C provides plots of in vivo liver biodistribution in C57BL/6J mice.

[0577] FIGS. 11A-11F provide a schematic, web plots, histograms, and a bar graph showing individual validation of MultiFunction capsids with enhanced cross-species hepatocyte transduction. FIG. 11A provides a schematic and a collection of web plots showing on-target and off-target measurements for the seven selected capsids (BI151-157) and AAV9 in the MultiFunction library pool, shown as normalized log 2 enrichments of the selected capsid (2 codon replicates) as compared to AAV9 (4 codon replicates). Measured enrichment was linearly normalized according to the maximum and minimum enrichment values for each assay across all capsids. Individual codon replicates are plotted as points, and the average normalized enrichments across replicates are plotted as polygon vertices. FIG. 11B provides provides histograms showing C57BL/6J liver transduction by AAV9 or MultiFunction capsids. Mice were injected with 1×10¹⁰ vg of the indicated capsid packaging AAV-CAG-GFP-2A-Luc-WPRE-pA and assessed for GFP expression three weeks later (n=5 mice for each AAV treatment condition, n=3 mice for the no AAV control, mean±s.d., all BI capsids were not significantly different from AAV9 in unpaired, one-sided t-tests with Bonferroni correction). The distributions of median GFP pixel intensity per DAPI+ nuclei, combined across n=5 animals for each AAV treatment condition, and n=3 animals for the no AAV control are shown. The vertical lines within each distribution represent the mean of each animal. FIG. 11C provides a bar graph showing HepG2 and THLE transduction assessed 24 hours post transduction with 3000 vg/cell using a luciferase assay. Luciferase relative light units were normalized to AAV9. N=4 per group, mean±s.d., ***p<0.001, unpaired, one-sided t-tests corrected for multiple-hypotheses (Bonferroni). For each pair of bars in FIG. 11C, the bar on the left corresponds to THLE and the bar on the right corresponds to HEPG2. FIG. 11D provides a histogram showing on-target and off-target measurements for the seven selected capsids (BI151-157) and AAV9 in the MultiFunction library pool, shown as normalized log 2 enrichments of the selected capsid (two 7-mer replicates) as compared to AAV9 (four 7-mer replicates). Measured enrichment was linearly normalized according to the maximum and minimum enrichment values for each assay across all capsids. Individual 7-mer replicates are plotted as points, and the average normalized enrichments across replicates are plotted as polygon vertices. FIG. 11E provides a bar graph and illustration that HepG2 and THLE transduction were assessed 24 hours post-transduction at 3000 vg/cell using a luciferase assay (n=4 transduction replicates per group, mean±s.d., ****p<1e-4, unpaired, one-sided t-tests on log-transformed values, and Bonferroni corrected for multiple-hypotheses). Luciferase relative light units were normalized to AAV9. FIG. 11F provides a plot showing macaque liver transduction efficiency for the seven individually characterized liver MultiFunction variants (n=2 rhesus macaques). In the virus library, each variant was represented by two 7-mer replicates while AAV9 was represented by three replicates.

[0578] FIGS. 12A-12C provide bar graphs showing individual assessment of liver MultiFunction capsids for production and cell transduction. FIG. 12A provides a bar graph of production yields for the selected capsids when individually manufactured. FIG. 12B provides a bar graph presenting data from an experiment where AAV9 or the indicated AAV capsid was used to transduce C57BL/6J mice at 1×10¹⁰ vg/mouse. Three weeks after AAV administration, liver transduction was measured by RT-qPCR of AAV transcripts from extracted tissue. ΔΔCt was obtained by normalizing against the reference gene (GAPDH), and then against the control (AAV9). N=5/group; mean±s.d., unpaired one-sided t-tests corrected for multiple-hypotheses (Bonferroni). FIG. 12C provides a bar graph showing normalized luciferase activity in human liver cell line (THLE, HepG2) and HEK293 transduction 24 hours after exposure to 5000 vg/cell of the capsid packaging AAV-CAG-GFP-2A-Lue-WPRE-pA. N=4 per group, mean±s.d., *p<0.05, **p<0.01, ***p<0.001, unpaired one-sided t-tests corrected for multiple-hypotheses (Bonferroni). For each set of three bars in FIG. 12C, the left bar corresponds to THLE, the middle bar corresponds to HEPG2, and the right bar corresponds to HEK293.

[0579] FIG. 13 provides a set of histograms showing production fitness distributions of AAV9 capsid variants modified with 7mer insertions between amino acid 588 and 589. Production fitness was measured by the enrichment (fold change) in virus production for a variant relative to its starting plasmid reported (the packaged virus DNA RPM/plasmid DNA RPM). The vertical line and text indicate the number of capsid variants that were positively enriched. Experiments 1 and 2 show distributions of a library of capsids that uniformly sampled the 7mer amino acid (AA) sequence space. Experiments 3 and 4 show the production fitness distributions of capsids that sample the high fitness sequence space. Enrichment was averaged across technical and biological replicates for each experiment and reported as log 2(enrichment).

[0580] FIG. 14 provides a collection of histograms showing in vivo binding and transduction distributions of AAV9 capsid variants modified with 7mer insertions between amino acid 588 and 589. A Fit4Function library comprising 240K unique high production fit capsids was screened on the indicated human and mouse primary cells and established cell lines. The vertical line and text indicate the number of capsid variants that were positively enriched for each assay and for production fitness. Enrichment was measured and shown as in FIG. 13.

[0581] FIG. 15 provides a set of histograms showing AAV9 capsid loop VIII 7-mer variant in vivo biodistribution and transduction. A Fit4Function library comprising 240K unique high production fit capsids was administered intravenously to C57BL/6J mice. Two hours later, DNA was isolated from serum or indicated organs and AAV capsid sequences were recovered through PCR amplification and NGS sequencing. The plots show the distribution of enrichment for the specific assay. The vertical line and text indicate the number of capsid variants that were both positively enriched for each assay and for production fitness (not shown). Enrichment was measured and shown as in FIG. 13.

[0582] FIG. 16 provides a set of bar graphs showing charge distribution by position within the 7-mer and in total for the 30K MultiFunction liver capsid variants. The plots show the frequency of positively charged amino acid (AA) (+1; R or K), negatively charged AA (−1; D and E), and neutral (0, includes H). Nearly all of the liver MultiFunction capsids had a 7-mer with an net charge of +1 (bottom left).

[0583] FIG. 17 provides a schematic showing an overview of an embodiment of a systematic multi-parameter protein optimization paradigm. FIG. 17 discloses SEQ ID NOS 200025-200027 and 200025-200027, respectively in order of appearance.

[0584] FIG. 18 provides images showing in vivo mouse liver transduction by each MultiFunction capsid. Representative GFP images of liver slices for the no AAV control, AAV9, and BI variants. Images were chosen from the median replicate of the median animal per condition. All images were taken at the same exposure and rescaled to the same intensity range. Scale bar in all images=100 μm.

[0585] FIG. 19 provides a histogram showing macaque detargeted AAV variants with production fitness above WT.

[0586] FIG. 20 provides a series of plots showing that Fit4Function enabled top candidate selection from a single round of screening. A Fit4Function library containing 90K unique 7-mers was injected intravenously into a single cynomolgus macaque and tissues were collected 4 hours later for biodistribution analysis. The plots show the correlations between two biological 7-mer replicates for the most enriched sequences in each organ. Variants with a log 2 enrichment at least two-fold greater than that of AAV9 within each organ are shown. The top two AAV9 replicates were selected in each organ separately to set a more stringent threshold for top hit identification.

### DETAILED DESCRIPTION OF THE INVENTION

[0587] As described below, the present invention features adeno-associated viral vectors and methods of using such vectors.

[0588] The invention of the disclosure is based, at least in part, upon the design of new adeno-associated virus (AAV) capsids and libraries comprising the same. Systematically identifying protein variants with multiple enhanced traits remains a major protein engineering challenge. Focusing on adeno-associated virus (AAV) capsids, a machine learning-compatible Fit4Function library was designed that evenly samples the sequence space of high production fit variants. With this library, generalizable MIL models were trained to predict gene therapy-relevant traits including production yield, in vivo biodistribution, and binding and transduction of human cells. The models were used to design a library that efficiently explored capsids predicted to possess multiple traits important for hepatocyte gene delivery. Upon validation, 90% of the library variants met all predetermined criteria. Individually tested capsids exhibited efficient cross-species hepatocyte transduction. In embodiments, the Fit4Function approach is applicable to the multi-trait enhancement of other proteins amenable to quantitative, high-throughput engineering.

[0589] As described above, the invention of the disclosure is based, at least in part, upon the development of a generalizable machine learning-guided approach to systematically and simultaneously map 7-mer-modified AAV9 capsid sequences to multiple functions. To generate high-quality data that would enable the training of accurate ML models, a low bias, high diversity library composed only of capsid variants with high production fitness was created (FIG. 1). This “Fit4Function” library was subjected to in vitro and in vivo screens for traits relevant to gene therapy, which, as anticipated, resulted in highly reproducible data that could be used to train robust machine learning models. The models trained using the Fit4Function data were of sufficient accuracy that they could be leveraged in combination to search the much larger, untested, theoretical high production fitness sequence space in silico for rare multi-trait variants. It was first demonstrated that six of these models relating to liver-targeting, when combined, resulted in a high 88.5% validation rate. Then, despite being trained only on mouse in vivo and human in vitro data, this combination of models was translated to the macaque, and all individually validated variants performed well across human cells, mice and macaque compared to AAV9. Notably, the combination of in vivo and in vitro functional predictors boosted the precision of cross-species prediction compared to the use of any individual model. In other words, value was observed in training models on human cell in vitro data to predict variants that exhibit the traits of interest in mice and macaque in vivo. The Fit4Function approach allowed for the systemic and ready identification of combination of traits important in predicting a given function of interest. Appropriate screening models can be identified and used to enrich for multi-trait capsids prior to more costly studies in NHPs or clinical trials. This strategy can inform intelligent searches for AAV capsids that are functional across species and likely to translate from preclinical models to investigational human gene therapies.

[0590] In various embodiments, the capsids and/or capsid libraries of the present disclosure possess one or more of the following traits: enhanced on-target delivery; reduced delivery to common accumulation sites; resistance to pre-existing antibodies (e.g., pre-existing circulating antibodies in a subject); and/or improved or maintained manufacturability. In embodiments, the capsids and/or capsid libraries of the present disclosure are suitable for infecting human cells. In some instances, the capsids and/or capsid libraries of the present disclosure are resistant to a polyclonal response. In some embodiments, capsids and/or capsid libraries of the present invention are suitable for infecting one or more species (e.g., a mouse and a primate, such as a human). In some cases, the present disclosure provides capsids or libraries containing the same that have increased immune evasion.

### Capsid Libraries and Screening

[0591] In various aspects, the disclosure features capsid libraries containing polypeptides or polynucleotides encoding the same. In aspects, the disclosure features methods for screening the capsid libraries. In aspects, the present disclosure features viral particles containing capsid polypeptides. In various cases, the capsid libraries are prepared by inserting peptides of a predetermined length into a parent/reference adeno-associated virus capsid polypeptide (e.g., an AAV9 K449R polypeptide). In embodiments, the peptides are 2-mers, 3-mers, 4-mers, 5-mers, 6-mers, 7-mers, 8-mers, 9-mers, 10-mers, 11-mers, 12-mers, 13-mers, 14-mers, 15-mers, or longer n-mers. The peptides can be inserted at any of various locations in the capsid polypeptide, such as within a loop of the capsid polypeptide (e.g., Loop VIII of the polypeptide); for example, the peptide may be inserted after or before amino acid position 577, 586, 587, 588, 589, or 590 of the polypeptide. In some cases, the capsid polypeptide is an AAV1, AAV2, AAV3, AAv3b, AAV4, AAV5, AAV6, AAV7, AAV8, AAV9, AAV9 K449R, rh.10, rh.8, or LK03 polypeptide. Non-limiting examples of representative insertion sites are provided in Table 1 below. A capsid library can contain about, or at least about 2, 5, 10, 50, 100, 500, 1e3, 5e3, 1e4, 5e4, 1e5, 2e5, 3e5, 4e5, 5e5, 6e5, 7e5, 8e5, 9e6, 1e6, 5e6, or 1e7 unique insertions.

TABLE 1
Variable region VIII insertion sites in alternative AAV capsids.
Equivalent insertion indicates the position within the indicated
capsid that best aligns with the insertion site after AA 588
of AAV9 K449R. Insertions may alternatively be placed after
the indicated adjacent amino acids within Loop VIII.

| | Equivalent insertion | |
|---|---|---|
| | (where the insertion is | |
| | between the listed | |
| | amino acid and the | |
| | following n + 1 amino | |
| | acid (e.g., between AA | Loop VIII amino |
| Capsid | 588 and 589)) | acids |
| AAV1 | 588 | [586-592] |
| AAV2 | 586 | [584-590] |
| AAV3 | 587 | [585-591] |
| AAV3b | 587 | [585-591] |
| AAV4 | 586 | [584-590] |
| AAV5 | 577 | [575-581] |
| AAV6 | 588 | [586-592] |
| AAV7 | 589 | [587-593] |
| AAV8 | 590 | [588-594] |
| AAV9 | 588 | [586-592] |
| AAV9 | 588 | [586-592] |
| K449R | | |
| rh. 10 | 590 | [588-594] |
| rh. 8 | 588 | [586-592] |
| LK03 | 588 | [586-592] |

[0592] In embodiments, a capsid library of the present disclosure contains two or more capsids individually containing unique 7-mers selected from SEQ ID NOs: 1-199427. In embodiments, the library contains 2, 5, 10, 50, 100, 500, 1e3, 5e3, 1e4, 5e4, 1e5, or 199,427 unique 7-mers selected from SEQ ID NOs: 1-199,427. In embodiments, all of the sequences in the capsid library are capable of forming viral particles sharing 1, 2, 3, 4, 5, 6 or more common traits selected from one or more of those described herein, such as binding a cell of interest (e.g., liver cell, hepatocyte, HepG2, THLE, T cell; HEK293 cell, brain endothelial cell; C57 brain endothelial cell; hCME CD3; kidney cell; spinal cord cell); transducing a cell of interest (e.g., liver cell, hepatocyte, HepG2, THLE, T cell; HEK293 cell, brain endothelial cell; C57 brain endothelial cell; hCME CD3; kidney cell; spinal cord cell); biodistributing to the liver of an organism (e.g., human, rodent); production fitness; heart biodistribution; spleen biodistribution; kidney biodistribution; serum biodistribution; brain biodistribution; lung biodistribution; spinal cord biodistribution; and spinal cord transduction. In embodiments, the common trait(s) is increased relative to a reference viral particle. In some cases, the reference viral particle is selected from a viral particle containing a capsid polypeptide selected from one or more of the following and not including any peptide insert: AAV1, AAV2, AAV3, AAv3b, AAV4, AAV5, AAV6, AAV7, AAV8, AAV9, AAV9 K449R, rh.10, rh.8, or LK03. Further non-limiting examples of common traits include binding to or transfecting one or more of the following cell types: HEK293 T cells, primary mouse brain microvascular endothelial cells, primary human BMVEC cells, and/or human brain endothelial cell line hCMEC/D3 cells. In some cases, the common trait(s) include increased biodistribution relative to a reference viral particle in one or more of the following organs: liver, kidney, spleen, brain, spinal cord, serum, heart, and/or lungs. In embodiments, a capsid library is enriched for capsids capable of forming viral particles with the common trait(s) relative to reference capsid library (e.g., a randomly selected library of capsid sequences and/or a library of capsid sequences containing a random collection of 7-mer peptides inserted at a particular amino acid location).

[0593] In various embodiments, the methods of the present disclosure involve selecting from a library of capsid polypeptides those capsid polypeptides having a trait(s) of interest (e.g., binding, biodistribution, or transduction capabilities). The selection can be carried out in silico or in vivo using a selection criterion or selective pressure. In embodiments, the methods of the present disclosure allow for the simultaneous optimization of multiple capsid functions, such as production, biodistribution to a target organ in a particular species, enhanced biodistribution to a target organ in a particular species, and enhanced target cell type (e.g., a human target cell type) transduction. In embodiments, machine learning (ML) models are used to deeply sample sequence space for capsids that have traits of interest. Capsids identified as having traits of interest can then be selected to populate a multi-function library containing the in silico predicted sequences (see, e.g., FIG. 17). Libraries of capsid sequences prepared in this manner can be referred to as “Fit4Function” libraries or “MultiFunction” libraries. In various instances, Fit4Function libraries contain only AAV capsids that have a trait of interest, such as production fitness (FIG. 17). The Fit4Function libraries and individual capsids thereof can be characterized, and information gained through such characterization can be used to further optimize the machine learning models to more accurately identify capsids with traits of interest. The Fit4Function libraries can be screened in vivo or in silico for capsid variants having enhanced functions (FIG. 17). Such screens can be carried out using any methods available in the art and/or those methods described herein.

[0594] In embodiments, a Fit4Function library contains high production capsids. It can be advantageous for the Fit4Function libraries to contain less amino acid bias than libraries constructed using alternative approaches (e.g., random selection of sequences, such as traditional NNN/NNK libraries). All sequences contained within a Fit4Function library are known and, accordingly, each library is accompanied by a member list providing a comprehensive list of all capsid sequences contained within the library. In some cases, the Fit4Function libraries facilitate more accurate machine learning (ML) models that can learn a theoretical sequence-to-function mapping. The Fit4Function libraries can enable efficient exploration of the multi-functional fitness space and/or enable data accumulation across species and experiments.

[0595] In some cases, the present disclosure provides libraries of capsid polypeptides, or polynucleotides encoding the same, where the libraries contain capsid polypeptides that satisfy a detargeting trait. Non-limiting examples of detargeting traits include reduced transduction of a target cell type or organ (e.g., reduced liver transduction) and reduced biodistribution in a particular organ (e.g., spleen biodistribution) or species.

[0596] In various embodiments, a library of capsids of the present disclosure contains a higher proportion of capsids with a trait(s) of interest than a reference library of randomly selected capsid sequences (e.g., capsids containing a random selection of 7-mer peptides inserted at a particular amino acid position within a reference capsid polypeptide sequence). In embodiments, a library of capsids contains capsids or contains only capsids having one or more (e.g., 1, 2, 3, 4, 5, or all) of the following traits: 1) high binding affinity to HepG2 cells, 2) high binding affinity to THLE cells, 3) high transduction of HepG2 wells, 4) high transduction of THLE cells, 5) high biodistribution to C57 mice liver, and 6) high production fitness.

[0597] In embodiments, viral particles containing capsids polypeptides of the present disclosure can transduce muscle, liver, brain, retina, and/or lung cells in vivo and/or in vitro. The efficiency of rAAV transduction is dependent on the efficiency at each step of AAV infection, i.e., virus binding, entry, trafficking, nuclear entry, uncoating, and second-strand synthesis.

### Adeno-Associated Virus (AAV)

[0598] Adeno-associated viruses (AA-V) are small non-enveloped icosahedral capsid viruses of the Parvoviridae family characterized by a single stranded DNA viral genome. Parvoviridae family viruses consist of two subfamilies: Parvovirinae, which infect vertebrates, and Densovirinae, which infect invertebrates. The Parvoviridae family comprises the Dependovirus genus which includes AAV, capable of replication in vertebrate hosts including, but not limited to, human, primate, bovine, canine, equine, and ovine species.

[0599] The parvoviruses and other members of the Parvoviridae family are generally described in Kenneth I. Berns, “Parvoviridae: The Viruses and Their Replication,” Chapter 69 in FIELDS VIROLOGY (3d Ed. 1996), the contents of which are incorporated by reference in their entirety.

[0600] AAV have proven to be useful as a biological tool due to their relatively simple structure, their ability to infect a wide range of cells (including quiescent and dividing cells) without integration into the host genome and without replicating, and their relatively benign immunogenic profile. The genome of the virus may be manipulated to contain a minimum of components for the assembly of a functional recombinant virus, or viral particle, which is loaded with or engineered to target a particular tissue and express or deliver a desired payload.

[0601] The wild-type AAV vector genome is a linear, single-stranded DNA (ssDNA) molecule approximately 5,000 nucleotides (nt) in length. Inverted terminal repeats (ITRs) traditionally cap the viral genome at both the 5′ and the 3′ end, providing origins of replication for the viral genome. While not wishing to be bound by theory, an AAV viral genome typically comprises two ITR sequences. These ITRs have a characteristic T-shaped hairpin structure defined by a self-complementary region (145 nt in wild-type AAV) at the 5′ and 3′ ends of the ssDNA which form an energetically stable double stranded region. The double stranded hairpin structures comprise multiple functions including, but not limited to, acting as an origin for DNA replication by functioning as primers for the endogenous DNA polymerase complex of the host viral replication cell.

[0602] The wild-type AAV viral genome further comprises nucleotide sequences for two open reading frames, one for the four non-structural Rep proteins (Rep78, Rep68, Rep52, Rep40, encoded by Rep genes) and one for the three capsid, or structural, proteins (VP1, VP2, VP3, encoded by capsid genes or Cap genes) The Rep proteins are important for replication and packaging, while the capsid proteins are assembled to create the protein shell of the AAV, or AAV capsid. Alternative splicing and alternate initiation codons and promoters result in the generation of four different Rep proteins from a single open reading frame and the generation of three capsid proteins from a single open reading frame. Though it varies by AAV serotype, as a non-limiting example, for AAV9/hu.14 (SEQ ID NO: 123 of U.S. Pat. No. 7,906,111, the contents of which are herein incorporated by reference in their entirety) VP1 refers to amino acids 1-736, VP2 refers to amino acids 138-736, and VP3 refers to amino acids 203-736. In other words, VP1 is the full-length capsid sequence, while VP2 and VP3 are shorter components of the whole. As a result, changes in the sequence in the VP3 region, are also changes to VP1 and VP2, however, the percent difference as compared to the parent sequence will be greatest for VP3 since it is the shortest sequence of the three. Though described here in relation to the amino acid sequence, the nucleic acid sequence encoding these proteins can be similarly described. Together, the three capsid proteins assemble to create the AAV capsid protein. While not wishing to be bound by theory, the AAV capsid protein typically comprises a molar ratio of 1:1:10 of VP1:VP2:VP3. As used herein, an “AAV serotype” is defined primarily by the AAV capsid. In some instances, the ITRs are also specifically described by the AAV serotype (e.g., AAV2/9).

[0603] For use as a biological tool, the wild-type AAV viral genome can be modified to replace the rep/cap sequences with a nucleic acid sequence comprising a payload region with at least one ITR region. Typically, in recombinant AAV viral genomes there are two ITR regions. The rep/cap sequences can be provided in trans during production to generate AAV particles.

[0604] In addition to the encoded heterologous payload, AAV vectors may comprise the viral genome, in whole or in part, of any naturally occurring and/or recombinant AAV serotype nucleotide sequence or variant. AAV variants may have sequences of significant homology at the nucleic acid (genome or capsid) and amino acid levels (capsids), to produce constructs which are generally physical and functional equivalents, replicate by similar mechanisms, and assemble by similar mechanisms Chiorini et al, J. Vir. 71: 6823-33(1997) Srivastava et al., J. Vir. 45:555-64 (1983.) Chiorini et al., J. Vir. 73:1309-1319 (1999); Rutledge et al., J. Vir. 72:309-319 (1998), and Wu et al., J. Vir 74. 8635-47 (2000), the contents of each of which are incorporated herein by reference in their entirety.

[0605] In certain embodiments, AAV particles of the present disclosure are recombinant AAV viral vectors which are replication defective and lacking sequences encoding functional Rep and Cap proteins within their viral genome. These defective AAV vectors may lack most or all parental coding sequences and essentially carry only one or two AAV ITR sequences and the nucleic acid of interest for delivery to a cell, a tissue, an organ, or an organism.

[0606] In certain embodiments, the viral genome of the AAV particles of the present disclosure comprises at least one control element which provides for the replication, transcription, and translation of a coding sequence encoded therein. Not all of the control elements need always be present as long as the coding sequence is capable of being replicated, transcribed, and/or translated in an appropriate host cell Non-limiting examples of expression control elements include sequences for transcription initiation and/or termination, promoter and/or enhancer sequences, efficient RNA processing signals such as splicing and polyadenylation signals, sequences that stabilize cytoplasmic mRNA, sequences that enhance translation efficacy (e.g., Kozak consensus sequence), sequences that enhance protein stability, and/or sequences that enhance protein processing and/or secretion.

[0607] According to the present disclosure, AAV particles for use in therapeutics and/or diagnostics comprise a virus that has been distilled or reduced to the minimum components necessary for transduction of a nucleic acid payload or cargo of interest. In this manner, AAV particles are engineered as vehicles for specific delivery while lacking the deleterious replication and/or integration features found in wild-type viruses.

[0608] AAV vectors of the present disclosure may be produced recombinantly and may be based on adeno-associated virus (AAV) parent or reference sequences. As used herein, a “vector” is any molecule or moiety which transports, transduces, or otherwise acts as a carrier of a heterologous molecule such as the nucleic acids described herein.

[0609] In addition to single stranded AAV viral genomes (e.g., ssAAVs), the present invention also provides for self-complementary AAV (scAAVs) viral genomes, scAAV vector genomes contain DNA strands which anneal together to form double stranded DNA. By skipping second strand synthesis, scAAVs allow for rapid expression in the transduced cell.

[0610] In certain embodiments, the AAV particle of the present disclosure is an scAAV.

[0611] In certain embodiments, the AAV particle of the present disclosure is an ssAAV.

[0612] Methods for producing and/or modifying AAV particles are provided herein and are disclosed in the art such as pseudotyped AAV vectors (PCT Patent Publication Nos. WO200028004, WO200123001; WO2004112727; WO2005005610; and WO2005072364, the content of each of which is incorporated herein by reference in its entirety).

[0613] AAV particles may be modified by methods such as those provided herein to enhance the efficiency of delivery. Such modified AAV particles can be packaged efficiently and be used to successfully infect the target cells at high frequency and with minimal toxicity. In some embodiments, the capsids of the AAV particles are engineered according to the methods provided herein and/or those described in US Publication Number US20130195801, the contents of which are incorporated herein by reference in their entirety.

[0614] AAVs are well suited for use as vectors and vehicles for gene transfer to cells. AAVs provide safe, long-term expression in a cell (e.g., a nerve cell). AAV vectors have been highly successful in fulfilling all of the features desired for a delivery vehicle, such as the ability to attach to and enter the target cell, successful transfer to the nucleus, the ability to be expressed in the nucleus for a sustained period of time, and a general lack of pathogenicity and toxicity. Recombinant AAV (rAAV) is advantageous as a delivery vector, particularly for delivery to the central nervous system, as it is focally injectable; it exhibits stable expression over time; and it is both non-pathogenic and non-integrative into the genome of the cell into which it is transduced. Twelve human serotypes of AAV (AAV serotype 1 (AAV-1) to AAV-12) and more than 100 serotypes from nonhuman primates have been reported to date. (Daya, S. and Berns, K. I., 2008, Clin. Microbiol. Rev., 21(4):583-593). In addition, rAAV has been approved by the FDA for use as a vector in at least 38 protocols for several different human clinical trials. AAV's lack of pathogenicity, persistence and its many available serotypes have increased the potential of the virus as a delivery vehicle for a gene therapy application in accordance with the described compositions and methods.

### AAV Capsids

[0615] AAV particles of the present disclosure may comprise or be derived from any natural or recombinant AAV serotype. AAV serotypes may differ in traits such as, but not limited to, packaging, tropism, transduction, and immunogenic profiles. While not wishing to be bound by theory, the AAV capsid protein is often considered to be the driver of AAV particle tropism to a particular tissue.

[0616] In certain embodiments, an AAV particle may have a capsid protein and ITR sequences derived from the same parent serotype (e.g., AAV2 capsid and AAV2 ITRs). In another embodiment, the AAV particle may be a pseudo-typed AAV particle, wherein the capsid protein and ITR sequences are derived from different parent serotypes (e.g., AAV9 capsid and AAV2 ITRs; AAV2/9).

[0617] The AAV particles of the present disclosure may comprise an AAV capsid protein with a targeting peptide inserted into the parent sequence. The parent capsid or serotype may comprise or be derived from any natural or recombinant AAV serotype. As used herein, a “parent” sequence is a nucleotide or amino acid sequence into which a targeting sequence is inserted (i.e., nucleotide insertion into nucleic acid sequence or amino acid sequence insertion into amino acid sequence).

[0618] In another embodiment, the parent AAV capsid nucleotide sequence is a K449R variant, wherein the codon encoding a lysine (e.g., AAA or AAG) at position 449 in the amino acid sequence is exchanged for one encoding an arginine (CGT, CGC, CGA, CGG, AGA, AGG). The K449R variant has the same function as wild-type AAV9.

[0619] The parent AAV serotype and associated capsid sequence may be any of those known in the art. Non-limiting examples of such AAV serotypes include. AAV9, AAV9 K449R (or K449R AAV9), AAV1, AAVrh10, AAV-DJ, AAV-DJ8, AAV5, AAVPHP.B (PHP.B), AAVPHP.A (PHP A), AAVG2B-26, AAVG2B-13, AAVTH1.1-32, AAVTH1.1-35, AAVPHP.B2 (PHP.B2), AAVPHP.B3 (PHP.B3), AAVPHP.N/PHP.B-DGT, AAVPHP.B-EST, AAVPHP.B-GGT, AAVPHP.B-ATP, AAVPHP.B-ATT-T, AAVPHP.B-DGT-T, AAVPHP.13-GGT-T, AAVPHP.B-SGS, AAVPHP.B-AQP, AAVPHP.B-QQP, AAVPHP.B-SNP(3), AAVPHP.B-SNP, AAVPHP.B-QGT, AAVPHP.B-NQT, AAVPHP.B-EGS, AAVPHP.B-SGN, AAVPHP.B-EGT, AAVPHP.B-DST, AAVPHP.B-DST, AAVPHP.B-STP, AAVPHP.B-PQP, AAVPHP.B-SQP, AAVPHP.B-QLP, AAVPHP.B-TMP, AAVPHP.B-TTP, AAVPHP.S/G2A12, AAVG2A15/(G2A3 (G2A3), AAVG2B4 (G2B4), AAVG2B5 (G2B5), PHP.S, AAV2, AAV2G9, AAV3, AAV3a, AAV3b, AAV3-3, AAV4, AAV4-4, AAV6, AAV6.1, AAV6.2, AAV6.1.2, AAV7, AAV7.2. AAV8, AAV9.11, AAV9.13, AAV9.16, AAV9.24, AAV9.45, AAV9.47, AAV9.61, AAV9.68, AAV9.84, AAV9.9, AAV10, AAV11, AAV12, AAV16.3. AAV24.1, AAV27.3, AAV42.12, AAV42-1b, AAV42-2, AAV42-3a, AAV42-3b, AAV42-4, AAV42-Sa, AAV42-5b, AAV42-6b, AAV42-8, AAV42-10, AAV42-11, AAV42-12, AAV42-13, AAV42-15, AAV42-aa, AAV43-1, AAV43-12, AAV43-20, AAV43-21, AAV43-23, AAV43-25, AAV43-5, AAV44.1, AAV44.2, AAV44.5, AAV223.1, AAV223.2, AAV223.4, AAV223.5, AAV223.6, AAV223.7, AAV1-7/rh.48, AAV1-8/rh.49. AAV2-15/rh.62, AAV2-3/rh.61, AAV2-4/rh 50, AAV2-5/rh.51, AAV3.1/hu.6. AAV3.1/hu 9, AAV3-9/rh.52, AAV3-11/rh.53, AAV4-8/r11.64, AAV4-9/rh.54. AAV4-19/rh.55, AAV5-3/rh.57, AAV5-22/rh.58, AAV7.3/hu.7, AAV16.8/hu.10, AAV16.12/hu.11, AAV29.3/bb.1, AAV29.5/bb 2, AAV106.1/hu.37, AAV114.3/hu.40, AAV127.2/hu.41. AAV127.5/hu.42, AAV128.3/hu.44, AAV130.4/hu.48, AAV145.1/hu.53, AAV145.5/hu 54, AAV145.6/hu.55, AAV161.10/hu 60, AAV161.6/hu.61, AAV33.12/hu.17, AAV33.4/hu.15, AAV33.8/hu.16, AAV52/hu.19, AAV52.1/hu.20, AAV58.2/hu.25, AAVA3.3, AAVA3.4, AAVA3.5, AAVA3.7, AAVC1, AAVC2, AAVC5, AAVF3, AAVF5, AAVH2, AAVrh.72, AAVhu.8, AAVrb.68, AAVrh.70, AAVpi.1 AAVpi.3, AAVpi.2, AAVrh.60, AAVrh.44, AAVrh.65, AAVrh.55. AAVrh.47, AAVrh.69, AAVrh.45, AAVrh.59, AAVhu.12, AAVH16, AAVH-1/hu.1, AAVH-5/hu.3, AAVLG-10/rh.40, AAVLG-4/rh.38, AAVLG-9/hu.39, AAVN721-8/rh.43, AAVCh.5, AAVCh.5R1, AAVcy.2. AAVcy.3. AAVcy.4. AAVcy 5, AAVCy.5R1, AAVCy.5R2, AAVCy.5R3, AAVCy.5R4, AAVcy 6, AAVhu.1, AAVhu.2, AAVhu.3, AAVhu.4, AAVhu.5, AAVhu.6, AAVhu.7, AAVhu.9, AAVhu.10, AAVhu.11, AAVhu 13, AAVhu.15, AAVbu.16, AAVhu.17, AAVhu.18, AAVhu.20, AAVhu.21. AAVhu.22, AAVhu.23.2, AAVhu.24, AAVhu.25, AAVhu.27, AAVhu 28, AAVhu.29. AAVhu.29R. AAVbu.31. AAVhu 32, AAVhu.34, AAVhu.35, AAVhu.37, AAVhu.39, AAVhu.40, AAVhu.41, AAVhu.42, AAVhu.43, AAVhu.44, AAVhu.44R1, AAVhu.44R2, AAVhu.44R3, AAVhu.45, AAVbu.46, AAVhu 47, AAVhu.48, AAVhu.48R1, AAVhu.48R2. AAVhu.48R3, AAVhu.49, AAVbu.51, AAVhu 52, AAVhu.54, AAVhu.55, AAVhu.56, AAVhu.57, AAVhu.58, AAVhu.60, AAVhu.61, AAVhu.63, AAVhu 64, AAVhu.66, AAVhu.67, AAVhu.14/9, AAVhu.t 19, AAVrh.2, AAVrh.2R. AAVrb.8, AAVrh.8R, AAVrh.10, AAVrh.12, AAVrh.13. AAVrh.13R. AAVrh.14. AAVrh.17, AAVrh.18, AAVrh.19, AAVrh.20, AAVrh.21 AAVrh.22, AAVrh.23, AAVrh.24, AAVrh.25, AAVrh.31, AAVrh.32, AAVrh.33, AAVrh.34, AAVrh.35, AAVrb.36, AAVrb.37, AAVrh.37R2, AAVrh.38, AAVrh.39, AAVrh.40, AAVrh.46, AAVrb.48, AAVrh.48.1, AAVrh.48.1.2, AAVrh.48.2, AAVrh.49, AAVrh.51. AAVrh.52, AAVrh.53, AAVrh.54, AAVrh.56, AAVrh.57, AAVrb.58, AAVrb.61, AAVrh.64, AAVrh.64R1, AAVrh.64R2, AAVrb.67, AAVrh.73, AAVrb 74, AAVrh8R, AAVrh8R A586R mutant, AAVrh8R R533A mutant, AAAV.BAAV, caprine AAV, bovine AAV, AAVhE1.1. AAVhEr1.5, AAVhER1.14, AAVhEr1.8, AAVhEr1.16, AAVhEr1.18, AAVhEr1.35, AAVhEr1.7, AAVhEr1.36, AAVhEr2.29, AAVhEr2.4, AAVhEr2.16, AAVhEr2.30, AAVhEr2.31, AAVhEr2.36, AAVhER1.23, AAVhEr3.1, AAV2.ST, AAV-PAEC, AAV-LK01, AAV-LK02, AAV-LK03, AAV-LK04, AAV-LK05, AAV-LK06, AAV-LK07, AAV-LK08, AAV-LK09, AAV-LK10, AAV-LK11, AAV-LK12, AAV-LK13, AAV-LK14, AAV-LK15, AAV-LK16, AAV-LK17, AAV-LK18, AAV-LK19, AAV-PAEC2, AAV-PAEC4, AAV-PAEC6, AAV-PAEC7, AAV-PAEC8, AAV-PAEC11, AAV-PAEC12, AAV-2-pre-miRNA-101, AAV-8h, AAV-8b, AAV-h, AAV-b, AAV SM 10-2. AAV Shuffle 100-1, AAV Shuffle 100-3, AAV Shuffle 100-7, AAV Shuffle 10-2, AAV Shuffle 10-6, AAV Shuffle 10-8, AAV Shuffle 100-2, AAV SM 10-1, AAV SM 10-8, AAV SM 100-3, AAV SM 100-10, BNP61 AAV, BNP62 AAV, BNP63 AAV, AAVrh.50, AAVrh.43, AAVrh.62, AAVrh.48, AAVhu.19, AAVhu.11, AAVhu.53, AAV4-8/rh.64, AAVLG-9/hu.39, AAV54.5/hu.23, AAV54.2/hu.22, AAV54.7/hu.24, AAV54.1/hu.21, AAV54.4R/hu 27, AAV46.2/hu.28, AAV46.6/hu.29, AAV128.1/hu.43, true type AAV (ttAAV), UPENN AAV10, Japanese AAV10 serotypes, AAV CBr-7.1, AAV CBr-7.10, AAV CBr-7.2, AAV CBr-7.3, AAV CBr-7.4, AAV CBr-7.5, AAV CBr-7.7, AAV CBr-7.8. AAV CBr-137.3, AAV CBr-B7.4, AAV CBr-E1, AAV CBr-E2, AAV CBr-E3, AAV CBr-E4, AAV CBr-E5, AAV CBr-e5, AAV CBr-E6, AAV CBr-E7, AAV CBr-E8, AAV CHt-1, AAV CHt-2, AAV CHt-3, AAV CHt-6.1, AAV CHt-6.10, AAV CHt-6.5, AAV CHt-6.6, AAV CHt-6.7, AAV CHt-6.8, AAV C-It-P1, AAV CHt-P2, AAV CHt-P5, AAV CHt-P6, AAV CHt-P8, AAV CHt-P9, AAV CKd-1, AAV CKd-10. AAV CKd-2, AAV CKd-3, AAV CKd-4, AAV CKd-6, AAV CKd-7, AAV CKd-8, AAV CKd-BI, AAV CKd-B2, AAV CKd-B3, AAV CKd-B4, AAV CKd-B5, AAV CKd-B6, AAV CKd-B7, AAV CKd-B8, AAV CKd-H1, AAV CKd-H2, AAV CKd-H3, AAV CKd-H4, AAV CKd-H5, AAV CKd-H6, AAV CKd-N3, AAV CKd-N4, AAV CKd-N9, AAV CLg-F1, AAV CLg-F2, AAV CLg-F3, AAV CLg-F4, AAV CLg-F5, AAV CLg-F6, AAV CLg-F7, AAV CLg-F8, AAV CLv-1, AAV CLv1-1, AAV CLv1-10, AAV CLv1-2, AAV CLv-12, AAV CLv1-3, AAV CLv-13, AAV CLv1-4, AAV Clv1-7, AAV CLv1-8, AAV Clv1-9, AAV CLv-2, AAV CLv-3, AAV CLv-4, AAV CLv-6, AAV CLv-8, AAV CLv-D1, AAV CLv-D2, AAV CLv-D3, AAV CLv-D4, AAV CLv-D5, AAV CLv-D6, AAV CLv-D7, AAV CLv-D8, AAV CLv-E1, AAV CLv-KL, AAV CLv-K3, AAV CLv-K6, AAV CLv-L4, AAV CLv-L5, AAV CLv-L6, AAV CLv-M1, AAV CLv-M11, AAV CLv-M2, AAV CLv-M5, AAV CLv-M6, AAV CLv-M7, AAV CLv-M8, AAV CLv-M9, AAV CLv-R1, AAV CLv-R2, AAV CLv-R3, AAV CLv-R4, AAV CLv-R5, AAV CLv-R6, AAV CLv-R7, AAV CLv-R8, AAV CLv-R9, AAV CSp-1, AAV CSp-10, AAV CSp-11, AAV CSp-2, AAV CSp-3, AAV CSp-4, AAV CSp-6, AAV CSp-7, AAV CSp-8, AAV CSp-8.10, AAV CSp-8.2, AAV CSp-8.4, AAV CSp-8.5, AAV CSp-8.6, AAV CSp-8.7, AAV CSp-8.8, AAV CSp-8.9, AAV CSp-9, AAV hu.48R3, AAV.VR-355, AAV3B, AAV4, AAV5, AAVF1/HSC1, AAVF11/HSC11. AAVF12/HSC12, AAVF13/HSC13, AAVF14/HSC14, AAVF15/HSC15, AAVF16/HSC16, AAVF17/HSC17, AAVF2/HSC2, AAVF3/HSC3, AAVF4/HSC4, AAVF5/HSC5, AAVF6/HSC6, AAVF7/HSC7, AAVF8/HSC8, and/or AAVF9/HSC9 and variants thereof.

[0620] In embodiments, a capsid or capsid library of the present disclosure is derived from AAV-PHP.B (see, e.g., Deverman, et al. “Cre-dependent selection yields AAV variants for widespread gene transfer to the adult brain,” Nat Biotechnol. 2016 February; 34(2) 204-209. PMCID. PMC5088052, the disclosure of which is incorporated herein by reference in its entirety for all purposes), AAV-PHP.eB (described in Deverman B E, Pravdo P L, Simpson B P, Kumar S R, Chan K Y, Banerjee A, Wu W-L, Yang B, Huber N, Pasca S P, Gradinaru V. Cre-dependent selection yields AAV variants for widespread gene transfer to the adult brain. Nat Biotechnol. 2016 February; 34(2):204-209. PMCID: PMC5088052; and Chan K Y, Jang M J, Yoo B B, Greenbaum A, Ravi N, Wu W-L, Sinchez-Guardado L. Lois C, Mazmanian S K, Deverman B E, Gradinaru V. Engineered AAVs for efficient noninvasive gene delivery to the central and peripheral nervous systems. Nat Neurosci. 2017 August; 20(8):1172-1179. PMCID: PMC5529245), AAVF (described in Hanlon K S, Meltzer J C, Buzhdygan T, Cheng M J, Sena-Esteves M, Bennett R E, Sullivan T P, Razmpour R, Gong Y, Ng C. Nammour J, Maiz D, Dujardin S. Ramirez S H, Hudry E, Maguire C A. Selection of an Efficient AAV Vector for Robust CNS Transgene Expression. Mol Ther Methods Clin Dev. 2019 Dec. 13; 15:320-332. PMCID: PMC6881693, the disclosure of which is incorporated herein by reference in its entirety for all purposes), AAV-PHP.B4-B8, AAV-PHP.C1-C3 (Kumar, S. R. et al. Multiplexed Cre-dependent selection yields systemic AAVs for targeting distinct brain cell types. Nat Methods 17, 541-550 (2020), 9P31) or other capsids with similar properties (Nonnenmacher, M. et al. Rapid Evolution of Blood-Brain Barrier-Penetrating AAV Capsids by RNA-Driven Biopanning. Mol Ther—Methods Clin Dev (2020) doi:10.1016/j.omtm.2020.12.006), or CAP-B10 or CAP-B22 (Goertsen, D. et al. AAV capsid variants with brain-wide transgene expression and decreased liver targeting after intravenous delivery in mouse and marmoset. Nat Neurosci 1-10 (2021) doi:10.1038/s41593-021-00969-4). Further non-limiting examples of AAV capsids suitable for encapsidation of polynucleotides include those described in PCT/US2019/044796, PCT/US2020/027708, PCT/US2020/044487, or PCT/US2020/015972, the disclosures of each of which are incorporated herein by reference in their entireties for all purposes.

[0621] In some embodiments, the serotype may be AAVDJ or a variant thereof, such as AAVDJ8 (or AAV-DJ8), as described by Grimm et al. (Journal of Virology 82(12): 5887-5911 (2008), US Publication US20140359799 and U.S. Pat. No. 7,588,772, each of which is herein incorporated by reference in its entirety). The amino acid sequence of AAVDJ8 may comprise two or more mutations in order to remove the heparin binding domain (1-BD). As a non-limiting example, the AAV-DJ sequence is as described by SEQ ID NO: 1 in U.S. Pat. No. 7,588,772, the contents of which are herein incorporated by reference in their entirety, and the AAVDJ8 sequence may comprise two mutations: (1) R587Q where arginine (R, Arg) at amino acid 587 is changed to glutamine (Q; Gln) and (2) R590T where arginine (R; Arg) at amino acid 590 is changed to threonine (T: Thr). As another non-limiting example, the AAVDJ8 sequence may comprise three mutations: (1) K406R where lysine (K; Lys) at amino acid 406 is changed to arginine (R: Arg), (2) R587Q where arginine (R Arg) at amino acid 587 is changed to glutamine (Q; Gln) and (3) R590T where arginine (R: Arg) at amino acid 590 is changed to threonine (T; Thr).

[0622] While not wishing to be bound by theory, it is understood that a parent AAV capsid sequence comprises a VP1 region. In certain embodiments, a parent AAV capsid sequence comprises a VP1, VP2 and/or VP3 region, or any combination thereof. A parent VP1 sequence may be considered synonymous with a parent AAV capsid sequence.

[0623] In certain embodiments, the initiation codon for translation of the AAV VP1 capsid protein may be CTG, TTG, or GTG as described in U.S. Pat. No. 8,163,543, the contents of which are herein incorporated by reference in their entirety.

[0624] The present disclosure refers to structural capsid proteins (including VP1. VP2 and VP3) which are encoded by capsid (Cap) genes. These capsid proteins form an outer protein structural shell (i.e. capsid) of a viral vector such as AAV. VP capsid proteins synthesized from Cap polynucleotides generally include a methionine as the first amino acid in the peptide sequence (Met1), which is associated with the start codon (AUG or ATG) in the corresponding Cap nucleotide sequence. However, it is common for a first-methionine (Met1) residue or generally any first amino acid (AA1) to be cleaved off after or during polypeptide synthesis by protein processing enzymes such as Met-aminopeptidases. This “Met/AA-clipping” process often correlates with a corresponding acetylation of the second amino acid in the polypeptide sequence (e.g., alanine, valine, serine, threonine, etc.). Met-clipping commonly occurs with VP1 and VP3 capsid proteins but can also occur with VP2 capsid proteins.

[0625] Where the Met/AA-clipping is incomplete, a mixture of one or more (one, two or three) VP capsid proteins comprising the viral capsid may be produced, some of which may include a Met1/AA1 amino acid (Met+/AA+) and some of which may lack a Met1/AA1 amino acid as a result of Met/AA-clipping (Met−/AA−). For further discussion regarding Met/AA-clipping in capsid proteins, see Jin, et al. Direct Liquid Chromatography/Mass Spectrometry Analysis for Complete Characterization of Recombinant Adeno-Associated Virus Capsid Proteins. Hum Gene Ther Methods. 2017 Oct. 28(5):255-267; Hwang, et al. N-Terminal Acetylation of Cellular Proteins Creates Specific Degradation Signals. Science. 2010 Feb. 19, 327(5968) 973-977; the contents of which are each incorporated herein by reference in its entirety.

[0626] According to the present disclosure, references to capsid proteins is not limited to either clipped (Met−/AA−) or unclipped (Met+/AA+) and may, in context, refer to independent capsid proteins, viral capsids comprised of a mixture of capsid proteins, and/or polynucleotide sequences (or fragments thereof) which encode, describe, produce or result in capsid proteins of the present disclosure A direct reference to a “capsid protein” or “capsid polypeptide” (such as VP1, VP2 or VP2) may also comprise VP capsid proteins which include a Met1/AA1 amino acid (Met+/AA+) as well as corresponding VP capsid proteins which lack the Met1/AA1 amino acid as a result of Met/AA-clipping (Met−/AA−).

[0627] Further according to the present disclosure, a reference to a specific SEQ ID NO: (whether a protein or nucleic acid) which comprises or encodes, respectively, one or more capsid proteins which include a Met1/AA1 amino acid (Met+/AA+) should be understood to teach the VP capsid proteins which lack the Met1/AA1 amino acid as upon review of the sequence, it is readily apparent any sequence which merely lacks the first listed amino acid (whether or not Met1/AA1).

[0628] As a non-limiting example, reference to a VP1 polypeptide sequence which is 736 amino acids in length and which includes a “Met1” amino acid (Met+) encoded by the AUG/ATG start codon may also be understood to teach a VP1 polypeptide sequence which is 735 amino acids in length and which does not include the “Met1” amino acid (Met−) of the 736 amino acid Met+ sequence.

[0629] As a second non-limiting example, reference to a VP1 polypeptide sequence which is 736 amino acids in length and which includes an “AA1” amino acid (AA1+) encoded by any NNN initiator codon may also be understood to teach a VP1 polypeptide sequence which is 735 amino acids in length and which does not include the “AA1” amino acid (AA1−) of the 736 amino acid AA1 sequence.

[0630] References to viral capsids formed from VP capsid proteins (such as reference to specific AAV capsid serotypes), can incorporate VP capsid proteins which include a Met1/AA1 amino acid (Met+/AA1+), corresponding VP capsid proteins which lack the Met1/AA1 amino acid as a result of Met/AA1-clipping (Met−/AA1−), and combinations thereof (Met+/AA1+ and Met−/AA1−).

[0631] As a non-limiting example, an AAV capsid serotype can include VP1 (Met+/AA1+), VP1 (Met−/AA1−), or a combination of VP1 (Met+/AA1+) and VP1 (Met−/AA1−). An AAV capsid serotype can also include VP3 (Met+/AA1−), VP3 (Met−/AAV1−) or a combination of VP3 (Met+/AA1+) and VP3 (Met−/AA1−); and can also include similar optional combinations of VP2 (Met+/AA1) and VP2 (Met−/AA1−).

[0632] In certain embodiments, the parent AAV capsid sequence may comprise an amino acid sequence with 50%, 51%, 52%, 53%, 54%, 55%, 56%, 57%, 58%, 59%, 0, 60%, 61%, 62%, 63%, 64%, 65%, 66%, 67%, 68%, 69%, 70%, 71%, 72%, 73%, 74%, 75%, 76%, 77%, 78%, 79%, 80%, 81%, 82%, 83%, 84%, 85%, 86%, 87%, 88%, 89%, 90%, 91%, 92%, 93%, 94%, 95%, 96%, 97%, 98%, 99%, or 100% identity to any of the those amino acid sequences (e.g., 7-mer peptide sequences) provided in the Sequence Listing.

[0633] In certain embodiments, the parent AAV capsid sequence may be encoded by a nucleotide sequence with 50%, 51%, 52%, 53%, 54%, 55%, 56%, 57%, 58%, 59%, 60%, 61%, 62%, 63%, 64%, 65%, 66%, 67%, 68%, 69%, 70%, 71%, 72%, 73%, 74%, 75%, 76%, 77%, 78%, 79%, 80%, 81%, 82%, 83%, 84%, 85%, 86%, 87%, 88%, 89%, 90%, 91%, 92%, 93%, 94%, 95%, 96%, 97%, 98%, 99%, or 100% identity to any of the those nucleotide sequences provided in the Sequence Listing.

[0634] Recombinant or engineered AAV vectors have shown promise for use in therapy for the treatment of human disease. However, a need still exists for AAV particles with more specific and/or enhanced tropism for target tissues. Capsid engineering methods, including those provided herein, have been used to try to identify capsids with enhanced transduction of target tissues (e.g., brain, spinal cord, DRG). A variety of methods have been used, including mutational methods, DNA barcoding, directed evolution, random peptide insertions, and capsid shuffling and/or chimeras.

[0635] One method used to generate AAV particles with desirable traits is through the use of insertion of peptides, such as those provided herein, into a parent AAV capsid sequence according to the methods provided herein.

[0636] Rational engineering and mutational methods have been used to direct AAV to a target tissue. In rational design, structure-function relationships are used to determine regions in which changes to the capsid sequence may be made. As non-limiting examples, surface loop structures, receptor binding sites, and/or heparin binding sites may be mutated, or otherwise altered, for rational design of recombinant AAV capsids for enhanced targeting to a target tissue. In one example of rational design, AAV capsids were modified by mutation of surface exposed tyrosines to phenylalanine, in order to evade ubiquitination, reduce proteasomal degradation and allow for increased AAV particle and viral genome expression (Lochrie M A, et al, J Virol 2006 January; 80(2):821-34; Santiago-Ortiz J L and Schaffer D V, J Control Release, 2016 Oct. 28; 240:287-301, the contents of each of which are incorporated by reference in their entirety). Rational design also encompasses the addition of targeting peptides to a parent AAV capsid sequence, wherein the targeting peptide may have an affinity for a receptor of interest within a target tissue.

[0637] In certain embodiments, rational engineering and/or mutational methods are used to identify AAV capsids and/or targeting peptides having enhanced transduction of a target tissue (e.g., CNS or PNS).

[0638] Capsid shuffling, and/or chimeras describe a method in which fragments of at least two parent AAV capsids are combined to generate a new recombinant capsid protein, the number of parent AAV capsids used may be 2-20, or more than 20.

[0639] In certain embodiments, capsid shuffling is used to identify AAV capsids and/or targeting peptides having enhanced transduction of a target tissue (e.g., CNS or PNS).

[0640] Directed evolution involves the generation of AAV capsid libraries (^{˜}10⁴-10⁸) by any of a variety of mutagenesis techniques and selection of lead candidates based on response to selective pressure by properties of interest (e.g., tropism). Directed evolution of AAV capsids allows for positive selection from a pool of diverse mutants without necessitating extensive prior characterization of the mutant library. Directed evolution libraries may be generated by any molecular biology technique known in the art, and may include, DNA shuffling, random point mutagenesis, insertional mutagenesis (e.g., targeting peptides), random peptide insertions, or ancestral reconstructions. AAV capsid libraries may be subjected to more than one round of selection using directed evolution for further optimization. Directed evolution methods are most commonly used to identify AAV capsid proteins with enhanced transduction of a target tissue. Capsids with enhanced transduction of a target tissue have been identified for the targeting human airway epithelium, neural stem cells, human pluripotent stem cells, retinal cells, and other in vivo and in vivo cells.

[0641] In certain embodiments directed evolution methods are used to identify AAV capsids and/or targeting peptides having enhanced transduction of a target tissue (e.g., CNS or PNS).

[0642] One method described for high-throughput characterization of the phenotypes of a large number of AAV serotypes is known as AAV Barcode-Seq (Adachi K et al, Nature Communications 5:3075 (2014), the contents of which are herein incorporated by reference in their entirety) In this next-generation sequence (NGS) based method, AAV libraries are created comprising DNA barcode tags, which can be assessed by multi-plexed Illumina barcode sequencing. This method can be used to identify AAV variants with altered receptor binding, tropism, neutralization and or blood clearance as compared to wild-type or non-variant sequences. Amino acids of the AAV capsid that are important to these functions can also be identified in this manner.

[0643] As described in Adachi et al 2014, AAV capsid libraries were generated, wherein each mutant carried a wild-type AAV2 rep gene and an AAV cap gene derived from a series of variants or mutants, and a pair of left and right 12-nucleotide long DNA bar-codes downstream of an AAV2 polyadenylation signal (pA). In this manner, 7 different DNA barcode AAV capsid libraries were generated. Capsid libraries were then provided to mice. At a pre-set timepoint, samples were collected, DNA extracted and PCR-amplified using AAV-clone specific virus bar codes and sample-specific bar code attached PCR primers. All the virus barcode PCR amplicons were Illumina sequenced and converted to raw sequence read number data by a computational algorithm. The core of the Barcode-Seq approach is a 96-nucleotide cassette comprising the DNA bar-codes (left and right) described above, three PCR primer binding sites and two restriction enzyme sites. As an exemplar, an AAV rep-cap genome was used, but the system can be applied to any AAV viral genome, including one devoid of rep and cap genes. The advantage of the Barcode Seq method is the collection of a large data set and correlation to desirable phenotype with few replicates and in a short period of time.

[0644] The DNA Barcode Seq method can be similarly applied to RNA In certain embodiments, the Barcode Seq method is used to identify AAV capsids and/or targeting peptides having enhanced transduction of a target tissue (e.g., CNS or PNS)

### Capsid Engineering

[0645] The rational design of AAV vectors that display selective tissue/organ targeting has broadened the applications of AAV as vector/vehicle for polynucleotide delivery to cells. Both direct and indirect targeting approaches have been used to enhance AAV vector cell targeting specificity and retargeting. By way of example, in direct targeting, AAV vector targeting to certain cell types is mediated by small peptides or ligands that have been directly inserted into the viral capsid sequence. This approach has been successfully employed to target endothelial cells. Direct targeting requires detailed knowledge of the capsid structure such that peptides or ligands are positioned at sites that are exposed to the capsid surface; the insertion does not significantly affect capsid structure and assembly; and the native tropism is ablated to maximize targeting to a specific cell type. In indirect targeting, AAV vector targeting is mediated by an associating molecule that interacts with both the viral surface and the specific cell surface receptor. Such associating molecules for AAV vectors may include bispecific antibodies and biotin. The advantages of indirect targeting are that different adaptors can be coupled to the capsid without resulting in significant changes in the capsid structure, and the native tropism can be easily ablated. A disadvantage of using adaptors for targeting involves a potential for decreased stability of the capsid-adaptor complex in vivo.

[0646] In addition, AAV vectors may be produced that comprise capsids that allow for the increased transduction of cells and gene transfer to the central nervous system and the brain via the vasculature (Chan, K. Y. et al., 2017, Nat. Neurosci., 20(8):1172-1179). Such vectors facilitate robust transduction of neuronal cells, including interneurons. In embodiments, AAV vectors contain an AAVF, AAV-PHP.B4, AAV-PHP.B5, AAV-PHP.C1, 9P31, or an AAV-PHP.eB capsid.

### Viral Genome of an AAV Particle

[0647] AA V particles of the disclosure, comprising targeting peptides, may be used for the delivery of any viral genome to a target tissue. The viral genome may encode any payload, such as but not limited to a polypeptide, an antibody, an enzyme, an RNAi agent and/or components of a gene editing system. In certain embodiments, the AAV particles of the disclosure are used to deliver a payload to cells of the CNS, after intravenous delivery. In some embodiments, the AAV particles of the disclosure are used to deliver a payload to cells of the liver, kidney, spleen, brain, spinal cord, serum, heart, or lungs. In some cases, the AAV particles of the disclosure are used to deliver a payload to a cell (e.g., HEK293, primary mouse brain microvascular endothelial cell, primary human BMVEC, and human brain endothelial cell line hCMEC/D3, human liver epithelial cells, hepatocytes, or human hepatocellular carcinoma cells (HepG2)). In embodiments, a viral particle comprising a capsid of the present disclosure has one or more traits selected from the following. 1) high binding affinity to HepG2 cells, 2) high binding affinity to THLE cells, 3) high transduction of HepG2 cells, 4) high transduction of THLE cells, 5) high biodistribution to C57 mice liver, and 6) high production fitness.

[0648] A viral genome of an AAV particle of the disclosure, comprises a nucleic acid sequence with at least one payload region encoding a payload, and at least one ITR. A viral genome typically comprises two ITR sequences, one at each of the 5′ and 3′ ends. Further, a viral genome of the AAV particles of the disclosure may comprise nucleic acid sequences for additional components, such as, but not limited to, a regulatory element (e.g., promoter), untranslated regions (UTR), a polyadenylation sequence (polyA), a filler or stuffer sequence, an intron, and/or a linker sequence for enhanced expression.

[0649] These viral genome components can be selected and/or engineered to further tailor the specificity and efficiency of expression of a given payload in a target tissue (e.g., CNS or DRG).

### Inverted Terminal Repeals (ITRs)

[0650] The AAV particles of the present disclosure comprise a viral genome with at least one ITR and a payload region. In certain embodiments, the viral genome has two ITRs. These two ITRs flank the payload region at the 5′ and 3′ ends. The ITRs function as origins of replication comprising recognition sites for replication. ITRs comprise sequence regions which can be complementary and symmetrically arranged ITRs incorporated into viral genomes of the disclosure may be comprised of naturally occurring polynucleotide sequences or recombinantly derived polynucleotide sequences.

[0651] The ITRs may be derived from the same serotype as the capsid, selected from any of the known serotypes, or a derivative thereof. The ITR may be of a different serotype than the capsid. In certain embodiments, the AAV particle has more than one ITR. In a non-limiting example, the AAV particle has a viral genome comprising two ITRs. In certain embodiments, the ITRs are of the same serotype as one another. In another embodiment, the ITRs are of different serotypes. Non-limiting examples include zero, one or both of the ITRs having the same serotype as the capsid. In certain embodiments both ITRs of the viral genome of the AAV particle are AAV2 ITRs.

[0652] Independently, each ITR may be about 100 to about 150 nucleotides in length. An ITR may be about 100-105 nucleotides in length, 106-110 nucleotides in length, 111-115 nucleotides in length, 116-120 nucleotides in length, 121-125 nucleotides in length, 126-130 nucleotides in length, 131-135 nucleotides in length, 136-140 nucleotides in length, 141-145 nucleotides in length or 146-150 nucleotides in length. In certain embodiments, the ITRs are 140-142 nucleotides in length. Non-limiting examples of ITR length are 102, 105, 130, 140, 141, 142, 145 nucleotides in length. ITRs encompassed by the present disclosure include those with at least 90% identity, at least 95% identity, at least 98% identity, or at least 99% identity to a known AAV serotype ITR sequence.

### Promoters

[0653] In certain embodiments, the payload region of the viral genome comprises at least one element to enhance the payload target specificity and expression (See e.g., Powell et al. Viral Expression Cassette Elements to Enhance Transgene Target Specificity and Expression in Gene Therapy, 2015: the contents of which are herein incorporated by reference in their entirety). Non-limiting examples of elements to enhance payload target specificity and expression include promoters, endogenous miRNAs, post-transcriptional regulatory elements (PREs), polyadenylation (PolyA) signal sequences and upstream enhancers (USEs), CMV enhancers and introns.

[0654] A person skilled in the art may recognize that expression of a payload in a target cell may require a specific promoter, including but not limited to, a promoter that is species specific, inducible, tissue-specific, or cell cycle-specific (Parr et al., Nat. Med 3.1145-9 (1997): the contents of which are herein incorporated by reference in their entirety).

[0655] In certain embodiments, the promoter is deemed to be efficient when it drives expression of the payload encoded by the viral genome of the AAV particle.

[0656] In certain embodiments, the promoter is a promoter deemed to be efficient when it drives expression in a cell being targeted.

[0657] In certain embodiments, the promoter is a promoter having a tropism for a cell being targeted.

[0658] In certain embodiments, the promoter drives expression of the payload for a period of time in targeted tissues. Expression driven by a promoter may be for a period of 1 hour, 2, hours, 3 hours, 4 hours, 5 hours, 6 hours, 7 hours, 8 hours, 9 hours, 10 hours, 11 hours, 12 hours, 13 hours, 14 hours, 15 hours, 16 hours, 17 hours, 18 hours, 19 hours, 20 hours, 21 hours, 22 hours, 23 hours, 1 day, 2 days, 3 days, 4 days, 5 days, 6 days, 7 week, 8 days, 9 days, 10 days, 11 days, 12 days, 13 days, 2 weeks, 15 days, 16 days, 17 days, 18 days, 19 days, 20 days, 3 weeks, 22 days, 23 days, 24 days, 25 days, 26 days, 27 days, 28 days, 29 days, 30 days, 31 days, 1 month, 2 months, 3 months, 4 months, 5 months, 6 months, 7 months, 8 months, 9 months, 10 months, 11 months, 1 year, 13 months, 14 months, 15 months, 16 months, 17 months, 18 months, 19 months, 20 months, 21 months, 22 months, 23 months, 2 years, 3 years, 4 years, 5 years, 6 years, 7 years, 8 years, 9 years, 10 years or more than 10 years. Expression may be for 1-5 hours, 1-12 hours, 1-2 days, 1-5 days, 1-2 weeks, 1-3 weeks, 1-4 weeks, 1-2 months, 1-4 months, 1-6 months, 2-6 months, 3-6 months, 3-9 months, 4-8 months, 6-12 months, 1-2 years, 1-5 years, 2-5 years, 3-6 years, 3-8 years, 4-8 years, or 5-10 years. As a non-limiting example, the promoter is a selected for sustained expression of a payload in tissues and/or cells of the central or peripheral nervous system.

[0659] Promoters may be naturally occurring or non-naturally occurring. Non-limiting examples of promoters include those derived from viruses, plants, mammals, or humans. In some embodiments, the promoters may be those derived from human cells or systems in some embodiments, the promoter may be truncated or mutated.

[0660] Promoters which drive or promote expression in most tissues include, but are not limited to, the human elongation factor 1α-subunit (EF1α) promoter, the cytomegalovirus (CMV) immediate-early enhancer and/or promoter, the chicken β-actin (CBA) promoter and its derivative CAG, β glucuronidase (GUSB) promoter, or ubiquitin C (UBC) promoter Tissue-specific promoters can be used to restrict expression to certain cell types such as, but not limited to, cells of the central or peripheral nervous systems, targeted regions within (e.g., frontal cortex), and/or sub-sets of cells therein (e.g., excitatory neurons). As non-limiting examples, cell-type specific promoters may be used to restrict expression of a payload to excitatory neurons (e.g., glutamatergic), inhibitory neurons (e.g., GABA-ergic), neurons of the sympathetic or parasympathetic nervous system, sensory neurons, neurons of the dorsal root ganglia, motor neurons, or supportive cells of the nervous systems such as microglia, astrocytes, oligodendrocytes, and/or Schwann cells.

[0661] Cell-type specific promoters also exist for other tissues of the body, with non-limiting examples including, liver promoters (e.g., hAAT, TBG), skeletal muscle specific promoters (e.g., desmin, MCK, C512), B cell promoters, monocyte promoters, leukocyte promoters, macrophage promoters, pancreatic acinar cell promoters, endothelial cell promoters, lung tissue promoters, and/or cardiac or cardiovascular promoters (e.g., αMHC, cTnT, and CMV-MLC2k).

[0662] Non-limiting examples of tissue-specific promoters for targeting payload expression to central nervous system tissues and cells include synapsin (Syn), glutamate vesicular transporter (VGLUT), vesicular GABA transporter (VGAT), parvalbumin (PV), sodium channel Nav 1.8, tyrosine hydroxylase (TH), choline acetyltransferase (ChaT), methyl-CpG binding protein 2 (MeCP2), Ca²⁺/calmodulin-dependent protein kinase II (CaMKII), metabotropic glutamate receptor 2 (mGluR2), neurofilament light (NFL) or heavy (NFH), neuron-specific enolase (NSE), p-globin minigene np2, preproenkephalin (PPE), enkephalin (Enk) and excitatory amino acid transporter 2 (EAAT2) promoters. Non-limiting examples of tissue-specific expression elements for astrocytes include glial fibrillary acidic protein (GFAP) and EAAT2 promoters. A non-limiting example of a tissue-specific expression element for oligodendrocytes includes the myelin basic protein (MBP) promoter.

[0663] In certain embodiments, the promoter may be less than 1 kb. The promoter may have a length of 200, 210, 220, 230, 240, 250, 260, 270, 280, 290, 300, 310, 320, 330, 340, 350, 360, 370, 380, 390, 400, 410, 420, 430, 440, 450, 460, 470, 480, 490, 500, 510, 520, 530, 540, 550, 560, 570, 580, 590, 600, 610, 620, 630, 640, 650, 660, 670, 680, 690, 700, 710, 720, 730, 740, 750, 760, 770, 780, 790, 800 or more than 800 nucleotides. The promoter may have a length between 200-300, 200400, 200-500, 200-600, 200-700, 200-800, 300-400, 300-500, 300-600, 300-700, 300-800, 400-500, 400-600, 400-700, 400-800, 500-600, 500-700, 500-800, 600-700, 600-800 or 700-800 nucleotides.

[0664] In certain embodiments, the promoter may be a combination of two or more components of the same or different starting or parental promoters such as, but not limited to, CMV and CBA. Each component may have a length of 200, 210, 220, 230, 240, 250, 260, 270, 280, 290, 300, 310, 320, 330, 340, 350, 360, 370, 380, 381, 382, 383, 384, 385, 386, 387, 388, 389, 390, 400, 410, 420, 430, 440, 450, 460, 470, 480, 490, 500, 510, 520, 530, 540, 550, 560, 570, 580, 590, 600, 610, 620, 630, 640, 650, 660, 670, 680, 690, 700, 710, 720, 730, 740, 750, 760, 770, 780, 790, 800 or more than 800 nucleotides. Each component may have a length between 200-300, 200400, 200-500, 200-600, 200-700, 200-800, 300-400, 300-500, 300-600, 300-700, 300-800, 400-500, 400-600, 400-700, 400-800, 500-600, 500-700, 500-800, 600-700, 600-800 or 700-800 nucleotides. In certain embodiments, the promoter is a combination of a 382 nucleotide CMV-enhancer sequence and a 260 nucleotide CBA-promoter sequence.

[0665] In certain embodiments, the viral genome comprises a ubiquitous promoter. Non-limiting examples of ubiquitous promoters include CMV, CBA (including derivatives CAG, CBh, etc.), EF-1α, PGK, UBC, GUSB (hGBp), and UCOE (promoter of HNRPA2BI-CBX3).

[0666] Yu et al (Molecular Pam 2011, 7:63; the contents of which are herein incorporated by reference in their entirety) evaluated the expression of eGFP under the CAG, EF1α, PGK and UBC promoters in rat DRG cells and primary DRG cells using lentiviral vectors and found that UBC showed weaker expression than the other 3 promoters and only 10-12% glial expression was seen for all promoters. Soderblom et al. (E. Neuro 2015, 2(2): ENEURO.0001-15; the contents of which are herein incorporated by reference in their entirety) evaluated the expression of eGFP in AAV8 with CMV and UBC promoters and AAV2 with the CMV promoter after injection in the motor cortex. Intranasal administration of a plasmid containing a UBC or EF1a promoter showed a sustained airway expression greater than the expression with the CMV promoter (See e.g., Gill et al., Gene Therapy 2001, Vol. 8, 1539-1546; the contents of which are herein incorporated by reference in their entirety). Husain et al. (Gene Therapy 2009, 16(7) 927-932; the contents of which are herein incorporated by reference in their entirety) evaluated an NOH construct with a hGUSB promoter, a HSV-ILAT promoter and an NSE promoter and found that the HpH construct showed weaker expression than NSE in mouse brain. Passini and Wolfe (J. Virol. 2001, 12382-12392, the contents of which are herein incorporated by reference in their entirety) evaluated the long-term effects of the HpH vector following an intraventricular injection in neonatal mice and found that there was sustained expression for at least 1 year Low expression in all brain regions was found by Xu et al. (Gene Therapy 2001, 8, 1323-1332, the contents of which are herein incorporated by reference in their entirety) when NFL and NFH promoters were used as compared to the CMV-lacZ, CMV-luc, EF, GFAP, hENK, nAChR, PPE, PPE+wpre, NSE (0.3 kb), NSE (1.8 kb) and NSE (1.8 kb+wpre). Xu et al. found that the promoter activity in descending order was NSE (1.8 kb), EF, NSE (0.3 kb), GFAP, CMV, hENK, PPE, NFL and NFH. NFL is a 650-nucleotide promoter and NFH is a 920-nucleotide promoter which are both absent in the liver but NFH is abundant in the sensory proprioceptive neurons, brain, and spinal cord and NFH is present in the heart. SCN8A (Nav 1.6) is a 470 nucleotide promoter which expresses throughout the DRG, spinal cord and brain with particularly high expression seen in the hippocampal neurons and cerebellar Purkinje cells, cortex, thalamus and hypothalamus (See e.g., Drews et al. Identification of evolutionary conserved, functional noncoding elements in the promoter region of the sodium channel gene SCN8A. Mamm Genome (2007) 18:723-731; and Raymond et al. Expression of Alternatively Spliced Sodium Channel α-subunit genes Journal of Biological Chemistry (2004) 279(44) 46234-46241; the contents of each of which are herein incorporated by reference in their entireties).

[0667] Any of the promoters taught by the aforementioned Yu, Soderblom, Gill, Husain, Passini, Xu, Drews or Raymond may be used herein.

[0668] In certain embodiments, the promoter is not cell specific.

[0669] In certain embodiments, the promoter is a RNA pol III promoter. As a non-limiting example, the RNA pol III promoter is U6. As a non-limiting example, the RNA pol III promoter is H1.

[0670] In certain embodiments, the viral genome comprises an enhancer element.

[0671] In certain embodiments, the viral genome comprises an engineered promoter.

[0672] In another embodiment, the viral genome comprises a promoter from a naturally expressed protein.

### Untranslated Regions (UTRs)

[0673] By definition, wild type untranslated regions (UTRs) of a gene are transcribed but not translated. Generally, the 5′ UTR starts at the transcription start site and ends at the start codon and the 3′ UTR starts immediately following the stop codon and continues until the termination signal for transcription.

[0674] Features typically found in abundantly expressed genes of specific target organs (e.g., CNS tissue or DRG) may be engineered into UTRs to enhance stability and protein production. As a non-limiting example, a 5′ UTR from mRNA normally expressed in the brain (e.g., huntingtin) may be used in the viral genomes of the AAV particles of the disclosure to enhance expression in neuronal cells or other cells of the central nervous system.

[0675] While not wishing to be bound by theory, wild-type 5′ untranslated regions (UTRs) include features which play roles in translation initiation. Kozak sequences, which are commonly known to be involved in the process by which the ribosome initiates translation of many genes, are usually included in 5′ UTRs. Kozak sequences have the consensus CCRCCAUGG, where R is a purine (adenine or guanine) three bases upstream of the start codon (ATG), which is followed by another ‘G’.

[0676] In certain embodiments, the 5′UTR in the viral genome includes a Kozak sequence.

[0677] In certain embodiments, the 5′UTR in the viral genome does not include a Kozak sequence.

[0678] While not wishing to be bound by theory, wild-type 3′ UTRs are known to have stretches of Adenosines and Uridines embedded therein. These AU rich signatures are particularly prevalent in genes with high rates of turnover. Based on their sequence features and functional properties, the AU rich elements (AREs) can be separated into three classes (Chen et al, 1995, the contents of which are herein incorporated by reference in its entirety): Class I AREs, such as, but not limited to, c-Myc and MyoD, contain several dispersed copies of an AUUUA motif within U-rich regions. Class II AREs, such as, but not limited to, GM-CSF and TNF-α, possess two or more overlapping UUAUUUA(U/A)(U/A) nonamers. Class II ARES, such as, but not limited to, c-Jun and Myogenin, are less well defined. These U rich regions do not contain an AUUUA motif. Most proteins binding to the AREs are known to destabilize the messenger, whereas members of the ELAV family, most notably HuR, have been documented to increase the stability of mRNA. HuR binds to AREs of all the three classes. Engineering the HuR specific binding sites into the 3′ UTR of nucleic acid molecules will lead to HuR binding and thus, stabilization of the message in vivo.

[0679] Introduction, removal, or modification of 3′ UTR AU rich elements (AREs) can be used to modulate the stability of a polynucleotide. When engineering specific polynucleotides, e.g., payload regions of viral genomes, one or more copies of an ARE can be introduced to make polynucleotides less stable and thereby curtail translation and decrease production of the resultant protein. Likewise. AREs can be identified and removed or mutated to increase the intracellular stability and thus increase translation and production of the resultant protein.

[0680] In certain embodiments, the 3′ UTR of the viral genome may include an oligo(dT) sequence for templated addition of a poly-A tail.

[0681] In certain embodiments, the viral genome may include at least one miRNA seed, binding site or full sequence, microRNAs (or miRNA or miR) are 19-25 nucleotide noncoding RNAs that bind to the sites of nucleic acid targets and down-regulate gene expression either by reducing nucleic acid molecule stability or by inhibiting translation. A microRNA sequence comprises a “seed” region, i.e., a sequence in the region of positions 2-8 of the mature microRNA, which has perfect Watson-Crick sequence complementarity to the miRNA target sequence of the nucleic acid.

[0682] In certain embodiments, the viral genome may be engineered to include, alter, or remove at least one miRNA binding site, full sequence, or seed region.

[0683] Any UTR from any gene known in the art may be incorporated into the viral genome of the AAV particle. These UTRs, or portions thereof, may be placed in the same orientation as in the gene from which they were selected, or they may be altered in orientation or location. In certain embodiments, the UTR used in the viral genome of the AAV particle may be inverted, shortened, lengthened, made with one or more other 5′ UTRs or 3′ UTRs known in the art. As used herein, the term “altered” as it relates to a UTR, means that the UTR has been changed in some way in relation to a reference sequence. For example, a 3′ or 5′ UTR may be altered relative to a wild type or native UTR by the change in orientation or location as taught above or may be altered by the inclusion of additional nucleotides, deletion of nucleotides, swapping or transposition of nucleotides.

[0684] In certain embodiments, the viral genome of the AAV particle comprises at least one artificial UTR which is not a variant of a wild type UTR.

[0685] In certain embodiments, the viral genome of the AAV particle comprises UTRs which have been selected from a family of transcripts whose proteins share a common function, structure, feature, or property.

### Polyadenylation Sequence

[0686] The viral genome of the AAV particles of the present disclosure may comprise at least one polyadenylation sequence. In certain embodiments, the viral genome of the AAV particle comprises a polyadenylation sequence between the 3′ end of the payload encoding region and the 5′ end of the 3′ITR.

[0687] In certain embodiments, the polyadenylation sequence or “polyA sequence” may range from absent to about 500 nucleotides in length. The polyadenylation sequence may be, but is not limited to, 1, 2, 3, 4, 5, 6, 7, 8, 9, 10, 11, 12, 13, 14, 15, 16, 17, 18, 19, 20, 21, 22, 23, 24, 25, 26, 27, 28, 29, 30, 31, 32, 33, 34, 35, 36, 37, 38, 39, 40, 41, 42, 43, 44, 45, 46, 47, 48, 49, 50, 51, 52, 53, 54, 55, 56, 57, 58, 59, 60, 61, 62, 63, 64, 65, 66, 67, 68, 69, 70, 71, 72, 73, 74, 75, 76, 77, 78, 79, 80, 81, 82, 83, 84, 85, 86, 87, 88, 89, 90, 91, 92, 93, 94, 95, 96, 97, 98, 99, 100, 101, 102, 103, 104, 105, 106, 107, 108, 109, 110, 111, 112, 113, 114, 115, 116, 117, 118, 119, 120, 121, 122, 123, 124, 125, 126, 127, 128, 129, 130, 131, 132, 133, 134, 135, 136, 137, 138, 139, 140, 141, 142, 143, 144, 145, 146, 147, 148, 149, 150, 151, 152, 153, 154, 155, 156, 157, 158, 159, 160, 161, 162, 163, 164, 165, 166, 167, 168, 169, 170, 171, 172, 173, 174, 175, 176, 177, 178, 179, 180, 181, 182, 183, 184, 185, 186, 187, 188, 189, 190, 191, 192, 193, 194, 195, 196, 197, 198, 199, 200, 201, 202, 203, 204, 205, 206, 207, 208, 209, 210, 211, 212, 213, 214, 215, 216, 217, 218, 219, 220, 221, 222, 223, 224, 225, 226, 227, 228, 229, 230, 231, 232, 233, 234, 235, 236, 237, 238, 239, 240, 241, 242, 243, 244, 245, 246, 247, 248, 249, 250, 251, 252, 253, 254, 255, 256, 257, 258, 259, 260, 261, 262, 263, 264, 265, 266, 267, 268, 269, 270, 271, 272, 273, 274, 275, 276, 277, 278, 279, 280, 281, 282, 283, 284, 285, 286, 287, 288, 289, 290, 291, 292, 293, 294, 295, 296, 297, 298, 299, 300, 301, 302, 303, 304, 305, 306, 307, 308, 309, 310, 311, 312, 313, 314, 315, 316, 317, 318, 319, 320, 321, 322, 323, 324, 325, 326, 327, 328, 329, 330, 331, 332, 333, 334, 335, 336, 337, 338, 339, 340, 341, 342, 343, 344, 345, 346, 347, 348, 349, 350, 351, 352, 353, 354, 355, 356, 357, 358, 359, 360, 361, 362, 363, 364, 365, 366, 367, 368, 369, 370, 371, 372, 373, 374, 375, 376, 377, 378, 379, 380, 381, 382, 383, 384, 385, 386, 387, 388, 389, 390, 391, 392, 393, 394, 395, 396, 397, 398, 399, 400, 401, 402, 403, 404, 405, 406, 407, 408, 409, 410, 411, 412, 413, 414, 415, 416, 417, 418, 419, 420, 421, 422, 423, 424, 425, 426, 427, 428, 429, 430, 431, 432, 433, 434, 435, 436, 437, 438, 439, 440, 441, 442, 443, 444, 445, 446, 447, 448, 449, 450, 451, 452, 453, 454, 455, 456, 457, 458, 459, 460, 461, 462, 463, 464, 465, 466, 467, 468, 469, 470, 471, 472, 473, 474, 475, 476, 477, 478, 479, 480, 481, 482, 483, 484, 485, 486, 487, 488, 489, 490, 491, 492, 493, 494, 495, 496, 497, 498, 499, and 500 nucleotides in length.

### Introns

[0688] In certain embodiments, the viral genome of the AAV particles of the present disclosure comprises at least one element to enhance the payload target specificity and expression (See e.g., Powell et al. Viral Expression Cassette Elements to Enhance Transgene Target Specificity and Expression in Gene Therapy, Discov. Med, 2015, 19(102): 49-57; the contents of which are herein incorporated by reference in their entirety) such as an intron. Non-limiting examples of introns include. MVM (67-97 bps), FIX truncated intron 1 (300 bps), pi-globin SD/immunoglobulin heavy chain splice acceptor (250 bps), adenovirus splice donor/immunoglobin splice acceptor (500 bps), SV40 late splice donor/splice acceptor (19S/16S) (180 bps) and hybrid adenovirus splice donor/IgG splice acceptor (230 bps).

[0689] In certain embodiments, the intron or intron portion may be 100-500 nucleotides in length. The intron may have a length of 80, 90, 100, 110, 120, 130, 140, 150, 160, 170, 171, 172, 173, 174, 175, 176, 177, 178, 179, 180, 190, 200, 210, 220, 230, 240, 250, 260, 270, 280, 290, 300, 310, 320, 330, 340, 350, 360, 370, 380, 390, 400, 410, 420, 430, 440, 450, 460, 470, 480, 490 or 500 nucleotides. The intron may have a length between 80-100, 80-120, 80-140, 80-160, 80-180, 80-200, 80-250, 80-300, 80-350, 80-400, 80-450, 80-500, 200-300, 200-400, 200-500, 300-400, 300-500, or 400-500 nucleotides.

### Stuffer Sequences

[0690] In certain embodiments, the viral genome of the AAV particles of the present disclosure comprises at least one element to improve packaging efficiency and expression, such as a stuffer or tiller sequence. Non-limiting examples of stuffer sequences include albumin and/or alpha-1 antitrypsin. Any known viral, mammalian, or plant sequence may be manipulated for use as a stuffer sequence.

[0691] In certain embodiments, the stuffer or tiller sequence may be from about 100-3500 nucleotides in length. The stuffer sequence may have a length of about 100, 200, 300, 400, 500, 600, 700, 800, 900, 1000, 1100, 1200, 1300, 1400, 1500, 1600, 1700, 1800, 1900, 2000, 2100, 2200, 2300, 2400, 2500, 2600, 2700, 2800, 2900 or 3000 nucleotides.

miRNA

[0692] In certain embodiments, the viral genome comprises at least one sequence encoding a miRNA to reduce the expression of the payload in an “off-target” tissue. As used herein, “off-target” indicates a tissue or cell-type unintentionally targeted by the AAV particles of the disclosure. As an example, an “off-target” tissue or cell when targeting the DRG, may be neurons of other ganglia, such as those of the sympathetic or parasympathetic nervous system, miRNAs and their targeted tissues are well known in the art. As a non-limiting example, a miR-122 miRNA may be encoded in the viral genome to reduce the expression of the viral genome in the liver.

### Selectable Marker

[0693] In some embodiments, the viral genome of the AAV particles of the disclosure optionally encodes a selectable marker. The selectable marker may comprise a cell-surface marker, such as any protein expressed on the surface of the cell including, but not limited to receptors, CD markers, lectins, integrins, or truncated versions thereof.

[0694] In some embodiments, selectable marker reporter genes are described in International Publication Nos. WO 1996023810 and WO 1996030540; Heim et al., Current Biology 2:178-182 (1996); Heim et al., Proc. Natl. Acad. Sci. USA (1995); or Heim et al., Science 373:663-664 (1995), the contents of each of which are incorporated herein by reference in their entirety.

### Genome Size

[0695] In certain embodiments, the AAV particles of the disclosure may comprise a single-stranded or double-stranded viral genome. The size of the viral genome may be small, medium, large or the maximum size. As described above, the viral genome may comprise a promoter and a polyA tail.

[0696] In certain embodiments, the viral genome may be a small single stranded viral genome. A small single stranded viral genome may be 2.1 to 3.5 kb in size such as, but not limited to, about 2.1, 2.2, 2.3, 2.4, 2.5, 2.6, 2.7, 2.8, 2.9, 3.0, 3.1, 3.2, 3.3, 3.4, and 3.5 kb in size.

[0697] In certain embodiments, the viral genome may be a small double stranded viral genome A small double stranded viral genome may be 1.3 to 1.7 kb in size such as, but not limited to, about 1.3, 1.4, 1.5, 1.6, and 1.7 kb in size.

[0698] In certain embodiments, the viral genome may be a medium single stranded viral genome. A medium single stranded viral genome may be 3.6 to 4.3 kb in size such as, but not limited to, about 3.6, 3.7, 3.8, 3.9, 4.0, 4.1, 4.2 and 4.3 kb in size.

[0699] In certain embodiments, the viral genome may be a medium double stranded viral genome. A medium double stranded viral genome may be 1.8 to 2.1 kb in size such as, but not limited to, about 1.8, 1.9, 2.0, and 2.1 kb in size.

[0700] In certain embodiments, the viral genome may be a large single stranded viral genome. A large single stranded viral genome may be 4.4 to 6.0 kb in size such as, but not limited to, about 4.4, 4.5, 4.6, 4.7, 4.8, 4.9, 5.0, 5.1, 5.2, 5.3, 5.4, 5.5, 5.6, 5.7, 5.8, 5.9 and 6.0 kb in size.

[0701] In certain embodiments, the viral genome may be a large double stranded viral genome A large double stranded viral genome may be 2.2 to 3.0 kb in size such as, but not limited to, about 2.2, 2.3, 2.4, 2.5, 2.6, 2.7, 2.8, 2.9 and 3.0 kb in size.

### Payloads

[0702] The AAV particles of the present disclosure comprise a viral genome with at least one payload region. As used herein, a “payload region” is any nucleic acid sequence (e.g., within the viral genome) which encodes one or more “payloads” of the disclosure. As non-limiting examples, a payload region may be a nucleic acid sequence within the viral genome of an AAV particle, which encodes a payload, wherein the payload is a polynucleotide or polypeptide. Payloads of the present disclosure may be, but are not limited to, peptides, polypeptides, proteins, antibodies, polynucleotides, etc.

[0703] The payload region can contain a combination of coding and non-coding nucleic acid sequences.

[0704] In certain embodiments, the AAV particle comprises a viral genome with a payload region encoding more than one payload of interest. In such an embodiment, a viral genome encoding more than one payload may be replicated and packaged into a viral particle. A target cell transduced with a viral particle comprising more than one payload may express each of the payloads in a single cell.

### Modified Polynucleotides

[0705] In some embodiments of any of the aspects, a nucleic acid sequence as described herein is chemically modified to enhance stability or other beneficial characteristics. The nucleic acids described herein may be synthesized and/or modified by methods such as those described in “Current protocols in nucleic acid chemistry,” Beaucage, S. L. et al. (Edrs.), John Wiley & Sons, Inc., New York, NY, USA, which is hereby incorporated herein by reference. Modifications include, for example, (a) end modifications, e.g., 5′ end modifications (phosphorylation, conjugation, inverted linkages, etc.) 3′ end modifications (conjugation, DNA nucleotides, inverted linkages, etc.), (b) base modifications, e.g., replacement with stabilizing bases, destabilizing bases, or bases that base pair with an expanded repertoire of partners, removal of bases (abasic nucleotides), or conjugated bases, (c) sugar modifications (e.g., at the 2′ position or 4′ position) or replacement of the sugar, as well as (d) backbone modifications, including modification or replacement of the phosphodiester linkages. Specific examples of nucleic acid compounds useful in the embodiments described herein include but are not limited to nucleic acids containing modified backbones or no natural internucleoside linkages nucleic acids having modified backbones include, among others, those that do not have a phosphorus atom in the backbone.

[0706] Modified nucleic acids that do not have a phosphorus atom in their internucleoside backbone can also be considered to be oligonucleosides. In some embodiments, the modified nucleic acid will have a phosphorus atom in its internucleoside backbone.

[0707] Modified nucleic acid backbones can include, for example, phosphorothioates, chiral phosphorothioates, phosphorodithioates, phosphotriesters, aminoalkylphosphotriesters, methyl and other alkyl phosphonates including 3′-alkylene phosphonates and chiral phosphonates, phosphinates, phosphoramidates including 3′-amino phosphoramidate and aminoalkylphosphoramidates, thionophosphoramidates, thionoalkylphosphonates, thionoalkylphosphotriesters, and boranophosphates having normal 3′-5′ linkages, 2′-5′ linked analogs of these, and those) having inverted polarity wherein the adjacent pairs of nucleoside units are linked 3′-5′ to 5′-3′ or 2′-5′ to 5′-2′. Various salts, mixed salts and free acid forms are also included. Modified nucleic acid backbones that do not include a phosphorus atom therein have backbones that are formed by short chain alkyl or cycloalkyl internucleoside linkages, mixed heteroatoms, and alkyl or cycloalkyl internucleoside linkages, or one or more short chain heteroatomic or heterocyclic internucleoside linkages. These include those having morpholino linkages (formed in part from the sugar portion of a nucleoside); siloxane backbones; sulfide, sulfoxide and sulfone backbones; formacetyl and thioformacetyl backbones; methylene formacetyl and thioformacetyl backbones; alkene containing backbones; sulfamate backbones; methyleneimino and methylenehydrazino backbones; sulfonate and sulfonamide backbones; amide backbones; others having mixed N, O, S and CH₂ component parts, and oligonucleosides with heteroatom backbones, and in particular —CH2-NH—CH2-, —CH2-N(CH3)-O—CH2- [known as a methylene (methylimino) or MMI backbone], —CH2-O—N(CH3)-CH2-, —CH2-N(CH3)-N(CH3)-CH2- and —N(CH3)-CH2-CH2-[wherein the native phosphodiester backbone is represented as —O—P—O—CH2-].

[0708] In other nucleic acid mimetics, both the sugar and the internucleoside linkage, i.e., the backbone, of the nucleotide units are replaced with novel groups. The base units are maintained for hybridization with an appropriate nucleic acid target compound. One such oligomeric compound, an RNA mimetic that has been shown to have excellent hybridization properties, is referred to as a peptide nucleic acid (PNA). In PNA compounds, the sugar backbone of an RNA is replaced with an amide containing backbone, in particular an aminoethylglycine backbone. The nucleobases are retained and are bound directly or indirectly to aza nitrogen atoms of the amide portion of the backbone.

[0709] The nucleic acid can also be modified to include one or more locked nucleic acids (LNA). A locked nucleic acid is a nucleotide having a modified ribose moiety in which the ribose moiety comprises an extra bridge connecting the 2′ and 4′ carbons. This structure effectively “locks” the ribose in the 3′-endo structural conformation. The addition of locked nucleic acids to siRNAs has been shown to increase siRNA stability in serum, and to reduce off-target effects (Elmen, J. et ah, (2005) Nucleic Acids Research 33(1):439-447; Mook, O R. et al., (2007) Mol. Cane. Ther. 6(3):833-843; Grunweller, A. et ah, (2003) Nucleic Acids Research 31(12):3185-3193).

[0710] Modified nucleic acids can also contain one or more substituted sugar moieties. The nucleic acids described herein can include one of the following at the 2′ position: OH; F; O-, S-, or N-alkyl; O-, S-, or N-alkenyl; O-, S- or N-alkynyl; or O-alkyl-O-alkyl, where the alkyl, alkenyl and alkynyl may be substituted or unsubstituted C1 to CIO alkyl or C2 to CIO alkenyl and alkynyl. Exemplary suitable modifications include O[(CH2)nO]mCH₃, O(CH2)nOCH₃, O(CH2)nNH2, O(CH2) nCH3, O(CH2)nONH2, and O(CH2)nON[(CH2)nCH3)]2, where n and m are from 1 to about 10. In some embodiments, nucleic acids include one of the following at the 2′ position: C1 to CIO lower alkyl, substituted lower alkyl, alkaryl, aralkyl, O-alkaryl or O-aralkyl, SH, SCH3, OCN, Cl, Br, CN, CF3, OCF3, SOCH3, SO2CH3, ONO2, NO2, N3, NH2, heterocycloalkyl, heterocycloalkaryl, aminoalkylamino, polyalkylamino, substituted silyl, an RNA cleaving group, a reporter group, an intercalator, a group for improving the pharmacokinetic properties of a nucleic acid, or a group for improving the pharmacodynamic properties of a nucleic acid, and other substituents having similar properties. In some embodiments, the modification includes a 2′ methoxyethoxy (2′-O—CH2CH2OCH3, also known as 2′-O-(2-methoxyethyl) or 2′-MOE) (Martin et al, Helv. Chim. Acta, 1995, 78:486-504) i.e., an alkoxy-alkoxy group. Another exemplary modification is 2′-dimethylaminooxyethoxy, i.e., a O(CH2)2ON(CH3)2 group, also known as 2′-DMAOE, as described in examples herein below, and 2′-dimethylaminoethoxyethoxy (also known in the art as 2′-O-dimethylaminoethoxyethyl or 2′-DMAEOE), i.e., 2′-O—CH2-O—CH2-N(CH2)2).

[0711] Other modifications include 2′-methoxy (2′-OCH3), 2′-aminopropoxy (2′-OCH2CH2CH2NH2) and 2′-fluoro (2′-F). Similar modifications can also be made at other positions on the nucleic acid, particularly the 3′ position of the sugar on the 3′ terminal nucleotide or in 2′-5′ linked dsRNAs and the 5′ position of 5′ terminal nucleotide. Nucleic acids may also have sugar mimetics such as cyclobutyl moieties in place of the pentofuranosyl sugar.

[0712] A nucleic acid can also include nucleobase (often referred to in the art simply as “base”) modifications or substitutions. “Unmodified” or “natural” nucleobases include the purine bases adenine (A) and guanine (G), and the pyrimidine bases thymine (T), cytosine (C) and uracil (U). Modified nucleobases can include other synthetic and natural nucleobases including but not limited to as 5-methylcytosine (5-me-C), 5-hydroxymethyl cytosine, xanthine, hypoxanthine, 2-aminoadenine, 6-methyl and other alkyl derivatives of adenine and guanine, 2-propyl and other alkyl derivatives of adenine and guanine, 2-thiouracil, 2-thiothymine and 2-thiocytosine, 5-halouracil and cytosine, 5-propynyl uracil and cytosine, 6-azo uracil, cytosine and thymine, 5-uracil (pseudouracil), 4-thiouracil, 8-halo, 8-amino, 8-thiol, 8-thioalkyl, 8-hydroxyl anal other 8-substituted adenines and guanines, 5-halo, particularly 5-bromo, 5-trifluoromethyl and other 5-substituted uracils and cytosines, 7-methylguanine and 7-methyladenine, 8-azaguanine and 8-azaadenine, 7-deazaguanine and 7-daazaadenine and 3-deazaguanine and 3-deazaadenine. Certain of these nucleobases are particularly useful for increasing the binding affinity of the inhibitory nucleic acids featured in the invention. These include 5-substituted pyrimidines, 6-azapyrimidines and N-2, N-6 and 0-6 substituted purines, including 2-aminopropyladenine, 5-propynyluracil and 5-propynylcytosine. 5-methylcytosine substitutions have been shown to increase nucleic acid duplex stability by 0.6-1.2° C. (Sanghvi, Y. S., Crooke, S. T. and Lebleu, B., Eds., dsRNA Research and Applications, CRC Press, Boca Raton, 1993, pp. 276-278) and are exemplary base substitutions, even more particularly when combined with 2′-O-methoxyethyl sugar modifications. In some embodiments, modified nucleobases can include d5SICS and dNAM, which are a non-limiting example of unnatural nucleobases that can be used separately or together as base pairs (see e.g., Leconte et. al. J. Am. Chem. Soc. 2008, 130, 7, 2336-2343; Malyshev et. al. PNAS. 2012. 109 (30) 12005-12010). In some embodiments, oligonucleotide tags (e.g., Oligopaint) comprise any modified nucleobases known in the art, i.e., any nucleobase that is modified from an unmodified and/or natural nucleobase.

[0713] The preparation of the modified nucleic acids, backbones, and nucleobases described above are known in the art.

[0714] Another modification of a nucleic acid featured in the disclosure involves chemically linking to a polynucleotide one or more ligands, moieties or conjugates that enhance the activity, cellular distribution, pharmacokinetic properties, or cellular uptake of the polynucleotide. Such moieties include but are not limited to lipid moieties such as a cholesterol moiety (Letsinger et al., Proc. Natl. Acid. Sci. USA, 1989, 86: 6553-6556), cholic acid (Manoharan et al., Biorg. Med. Chem. Let., 1994, 4: 1053-1060), a thioether, e.g., beryl-S-tritylthiol (Manoharan et al., Ann. N.Y. Acad. Sci., 1992, 660:306-309; Manoharan et al., Biorg. Med. Chem. Let., 1993, 3:2765-2770), a thiocholesterol (Oberhauser et al., Nucl. Acids Res., 1992, 20:533-538), an aliphatic chain, e.g., dodecandiol or undecyl residues (Saison-Behmoaras et ak, EMBO J, 1991, 10: 1111-1118; Kabanov et al., LEBS Lett., 1990, 259:327-330; Svinarchuk et al., Biochimie, 1993, 75:49-54), a phospholipid, e.g., di-hexadecyl-rac-glycerol or triethyl-ammonium 1,2-di-O-hexadecyl-rac-glycero-3-phosphonate (Manoharan et al., Tetrahedron Lett., 1995, 36:3651-3654; Shea et al., Nucl. Acids Res., 1990, 18:3777-3783), a polyamine or a polyethylene glycol chain (Manoharan et al., Nucleosides & Nucleotides, 1995, 14:969-973), or adamantane acetic acid (Manoharan et al., Tetrahedron Lett., 1995, 36:3651-3654), a palmityl moiety (Mishra et al., Biochim. Biophys. Acta, 1995, 1264:229-237), or an octadecylamine or hexylamino-carbonyloxycholesterol moiety (Crooke et al., J. Pharmacol. Exp. Ther., 1996, 277:923-937).

### AAV Production

[0715] Viral production disclosed herein describes processes and methods for producing AAV particles may be used to contact a target cell to deliver a payload.

[0716] The present disclosure provides methods for the generation of AAV particles containing capsids with improved traits. In certain embodiments, the AAV particles are prepared by viral genome replication in a viral replication cell. Any method known in the art may be used for the preparation of AAV particles. In certain embodiments, AAV particles are produced in mammalian cells (e.g., HEK293). In another embodiment, AAV particles are produced in insect cells (e.g., Sf9)

[0717] Methods of making AAV particles are well known in the art and are described in e.g., U.S. Pat. Nos. 6,204,059, 5,756,283, 6,258,595, 6,261,551, 6,270,996, 6,281,010, 6,365,394, 6,475,769, 6,482,634, 6,485,966, 6,943,019, 6,953,690, 7,022,519, 7,238,526, 7,291,498 and 7,491,508, 5,064,764, 6,194,191 6,566,118, 8,137,948; or International Publication Nos WO1996039530, WO1998010088, WO1999014354, WO1999015685, WO1999047691, WO2000055342, WO2000075353 and WO2001023597; Methods In Molecular Biology, ed. Richard, Humana Press, NJ (1995); O'Reilly et al., Baculovirus Expression Vectors, A Laboratory Manual. Oxford Univ. Press (1994); Samulski et al., J. Vir. 63:3822-8 (1989), Kajigaya et al., Proc. Nat'l. Acad. Sci. USA 88. 4646-50 (1991): Ruffing et al, J. Vir. 66:6922-30 (1992); Kimbauer et al, Vir., 219:37-44 (1996); Zhao et al., Vir. 272:382-93 (2000); the contents of each of which are herein incorporated by reference in their entirety. In certain embodiments, the AAV particles are made using the methods described in International Patent Publication WO2015191508, the contents of which are herein incorporated by reference in their entirety.

[0718] The viral replication cell may be selected from any biological organism, including prokaryotic (e.g., bacterial) cells, and eukaryotic cells, including, insect cells, yeast cells and mammalian cells. Viral replication cells commonly used for production of recombinant AAV viral particles include, but are not limited to, HEK293 cells, COS cells, HeLa cells, KB cells, and other mammalian cell lines as described in U.S. Pat. Nos. 6,156,303, 5,387,484, 5,741,683, 5,691,176, and 5,688,676; U.S. Patent Application Publication No. 2002/0081721, and International Patent Publication Nos. WO 2000047757, WO 2000024916, and WO 1996017947, the contents of each of which are herein incorporated by reference in their entirety. Viral replication cells may comprise other mammalian cells such as A549. WEH1, 3T3, 10T1/2, BHK, MDCK, COS 1, COS 7, BSC 1, BSC 40, BMT 10, VERO, W138, Saos, C2C12, L cells, HT1080, HepG2 and primary fibroblast, hepatocyte and myoblast cells derived from mammals. Viral replication cells may comprise cells derived from mammalian species including, but not limited to, human, monkey, mouse, rat, rabbit, and hamster. Viral replication cells may comprise cells derived from a cell type, including but not limited to fibroblast, hepatocyte, tumor cell, cell line transformed cell, etc.

[0719] In some embodiments, the present disclosure provides a method for producing an AAV particle in mammalian cells, comprising the steps of 1) simultaneously co-transfecting mammalian cells, such as, but not limited to HE-K293 cells, with a viral genome comprising a payload region (payload construct), a viral genome comprising polynucleotide sequences for rep and cap genes (rep/cap construct) and a viral genome comprising polynucleotide sequences encoding helper components (helper construct), 2) harvesting and purifying the AAV particles comprising a viral genome. This triple transfection method of AAV particle production may be utilized to produce small lots of virus.

[0720] In certain embodiments, the AAV particles may be produced in a viral replication cell that comprises an insect cell.

[0721] Growing conditions for insect cells in culture, and production of heterologous products in insect cells in culture are well-known in the art, see U.S. Pat. No. 6,204,059, the contents of which are herein incorporated by reference in their entirety.

[0722] Any insect cell which allows for replication of parvovirus and which can be maintained in culture can be used in accordance with the present disclosure. Cell lines may be used from Spodoptera frugiperda, including, but not limited to the Sf9 or Sf21 cell lines, Drosophila cell lines, or mosquito cell lines, such as Aedes albopictus derived cell lines. Use of insect cells for expression of heterologous proteins is well documented, as are methods of introducing nucleic acids, such as vectors, e.g., insect-cell compatible vectors, into such cells and methods of maintaining such cells in culture. See, for example, Methods in Molecular Biology, ed. Richard, Humana Press, NJ (1995). O'Reilly et al., Baculovirus Expression Vectors, A Laboratory Manual, Oxford Univ Press (1994): Samulski et al., J. Vir. 63:3822-8 (1989) Kajigaya et al., Proc. Nat'l. Acad. Sci. USA 88: 4646-50 (1991); Ruffing et al., J. Vir. 66:6922-30 (1992); Kimbauer et al., Vir. 219:37-44 (1996), Zhao et al., Vir. 272. 82-93 (2000), and Samulski et al., U.S. Pat. No. 6,204,059, the contents of each of which is herein incorporated by reference in its entirety.

[0723] In some embodiments, the present disclosure provides a method for producing an AAV particle in a baculovirus/Sf9 system, comprising the steps of: 1) co-transfecting competent bacterial cells with a bacmid vector and either a viral construct vector and/or AAV payload construct vector, 2) isolating the resultant viral construct expression vector and AAV payload construct expression vector and separately transfecting viral replication cells, 3) isolating and purifying resultant payload and viral construct particles comprising viral construct expression vector or AAV payload construct expression vector, 4) co-infecting a viral replication cell with both the AAV payload and viral construct particles comprising viral construct expression vector or AAV payload construct expression vector, and 5) harvesting and purifying AAV particles comprising a viral genome.

[0724] Briefly, the viral construct vector and the AAV payload construct vector are each incorporated by a transposon donor/acceptor system into a bacmid, also known as a baculovirus plasmid, by standard molecular biology techniques known and performed by a person skilled in the art. Transfection of separate viral replication cell populations produces two baculoviruses, one that comprises the viral construct expression vector, and another that comprises the AAV payload construct expression vector. The two baculoviruses may be used to infect a single viral replication cell population for production of AAV particles.

[0725] Baculovirus expression vectors for producing viral particles in insect cells, including but not limited to Spodoptera frugiperda (Sf9) cells, provide high titers of viral particle product. Recombinant baculovirus encoding the viral construct expression vector and AAV payload construct expression vector initiates a productive infection of viral replicating cells. Infectious baculovirus particles released from the primary infection secondarily infect additional cells in the culture, exponentially infecting the entire cell culture population in a number of infection cycles that is a function of the initial multiplicity of infection, see Urabe, M, et al., J Virol. 2006 February; 80 (4):1874-85, the contents of which are herein incorporated by reference in their entirety.

[0726] Production of AAV particles with baculovirus in an insect cell system may address known baculovirus genetic and physical instability. In certain embodiments, the production system addresses baculovirus instability over multiple passages by utilizing a titerless infected-cells preservation and scale-up system. Small scale seed cultures of viral producing cells are transfected with viral expression constructs encoding the structural, non-structural, components of the viral particle. Baculovirus-infected viral producing cells are harvested into aliquots that may be cryopreserved in liquid nitrogen, the aliquots retain viability and infectivity for infection of large scale viral producing cell culture Wasilko D J et al., Protein Expr Purif, 2009 June; 65(2).122-32, the contents of which are herein incorporated by reference in their entirety.

[0727] A genetically stable baculovirus may be used as the source of one or more of the components for producing AAV particles in invertebrate cells in certain embodiments, defective baculovirus expression vectors may be maintained episomally in insect cells. In such an embodiment the bacmid vector is engineered with replication control elements, including but not limited to promoters, enhancers, and/or cell-cycle regulated replication elements.

[0728] In certain embodiments, stable viral replication cells permissive for baculovirus infection are engineered with at least one stable integrated copy of any of the elements necessary for AAV replication and viral particle production including, but not limited to, the entire AAV genome, Rep and Cap genes, Rep genes, Cap genes, each Rep protein as a separate transcription cassette, each VP protein as a separate transcription cassette, the AAP (assembly activation protein), or at least one of the baculovirus helper genes with native or non-native promoters.

[0729] AAV particles described herein may be produced by triple transfection or baculovirus mediated virus production, or any other method known in the art. Any suitable permissive or packaging cell known in the art may be employed to produce the particles. Mammalian cells are often preferred. Also preferred are trans-complementing packaging cell lines that provide functions deleted from a replication-defective helper virus, e.g., 293 cells or other E1a trans-complementing cells. A packaging cell line may be used that is stably transformed to express cap and/or rep genes. Alternatively, a packaging cell line may be used that is stably transformed to express helper constructs necessary for AAV particle assembly.

[0730] Recombinant AAV virus particles are, in some cases, produced and purified from culture supernatants according to the procedure as described in US20160032254, the contents of which are incorporated by reference.

[0731] In certain embodiments, AAV particles are produced wherein all three VP proteins are expressed at a stoichiometry around 1:1:10 (VP1:VP2:VP3). While not wishing to be bound by theory, the regulatory mechanisms that allow this controlled level of expression include the production of two mRNAs, one for VP1, and the other for VP2 and VP3, produced by differential splicing.

[0732] In certain embodiments, the viral construct vector(s) used for AAV production may contain a nucleotide sequence encoding the AAV capsid proteins where the initiation codon of the AAV VP1 capsid protein is a non-ATG, i.e., a suboptimal initiation codon, allowing the expression of a modified ratio of the viral capsid proteins in the production system, to provide improved infectivity of the host cell. In a non-limiting example, a viral construct vector may contain a nucleic acid construct comprising a nucleotide sequence encoding AAV VP1, VP2, and VP3 capsid proteins, wherein the initiation codon for translation of the AAV VP1 capsid protein is CTG, TTG, or GTG, as described in U.S. Pat. No. 8,163,543, the contents of which are herein incorporated by reference in its entirety.

[0733] In certain embodiments, the viral construct vector(s) used for AAV production may contain a nucleotide sequence encoding the AAV rep proteins where the initiation codon of the AAV rep protein or proteins is a non-ATG. In certain embodiments, a single coding sequence is used for the Rep78 and Rep52 proteins, wherein initiation codon for translation of the Rep78 protein is a suboptimal initiation codon, selected from the group consisting of ACG, TTG, CTG and GTG, that effects partial exon skipping upon expression in insect cells, as described in U.S. Pat. No. 8,512,981, the contents of which is herein incorporated by reference in its entirety, for example to promote less abundant expression of Rcp78 as compared to Rep52, which may be advantageous in that it promotes high vector yields Small-scale production

[0734] In some cases, 293T cells (adhesion/suspension) are transfected with polyethyleneimine (PEI) with plasmids required for production of AAV, i.e., AAV2 rep, an adenoviral helper construct and a ITR flanked payload cassette. The AAV2 rep plasmid also contains the cap sequence of the particular virus being studied. Twenty-four hours after transfection (no medium changes for suspension), which occurs in DMEM/F17 with/without serum, the medium is replaced with fresh medium with or without serum. Three (3) days after transfection, a sample is taken from the culture medium of the 293 adherent cells. Subsequently cells are scraped, or suspension cells are pelleted, and transferred into a receptacle. For adhesion cells, after centrifugation to remove cellular pellet, a second sample is taken from the supernatant after scraping Next, cell lysis is achieved by three consecutive freeze-thaw cycles (−80 C to 37 C) or adding detergent triton. Cellular debris is removed by centrifugation or depth filtration and sample 3 is taken from the medium. The samples are quantified for AAV particles by DNase resistant genome titration by DNA qPCR. The total production yield from such a transfection is equal to the particle concentration from sample 3.

[0735] AAV particle titers are measured according to genome copy number (genome particles per milliliter). Genome particle concentrations are based on DNA qPCR of the vector DNA as previously reported (Clark et al. (1999) Hum. Gene Ther., 10:1031-1039; Veldwijk et al. (2002) Mol. Ther., 6:272-278).

### Large-Scale Production

[0736] In some embodiments. AAV particle production may be modified to increase the scale of production. Large scale viral production methods according to the present disclosure may include any of those taught in U.S. Pat. Nos. 5,756,283, 6,258,595, 6,261,551, 6,270,996, 6,281,010, 6,365,394, 6,475,769, 6,482,634, 6,485,966, 6,943,019, 6,953,690, 7,022,519, 7,238,526, 7,291,498 and 7,491,508 or International Publication Nos. WO1996039530, WO1998010088, WO1999014354, WO1999015685, WO1999047691, WO2000055342, WO2000075353 and WO2001023597, the contents of each of which are herein incorporated by reference in their entirety. Methods of increasing viral particle production scale typically comprise increasing the number of viral replication cells. In some embodiments, viral replication cells comprise adherent cells. To increase the scale of viral particle production by adherent viral replication cells, larger cell culture surfaces are required. In some cases, large-scale production methods comprise the use of roller bottles to increase cell culture surfaces. Other cell culture substrates with increased surface areas are known in the art. Examples of additional adherent cell culture products with increased surface areas include, but are not limited to CELLSTACK®, CELLCUBE® (Corning Corp., Corning, N.Y.) and NUNC™ CELL FACTORY™ (ThermoFisher Scientific, Waltham, Mass.). In some cases, large-scale adherent cell surfaces may comprise from about 1,000 cm to about 100,000 cm². In some cases, large-scale adherent cell cultures may comprise from about 10⁷ to about 10⁹ cells, from about 1 to about 10¹⁰ cells, from about 10⁹ to about 10¹² cells or at least 10¹² cells. In some cases, large-scale adherent cultures may produce from about 10⁹ to about 10¹², from about 10¹⁰ to about 10¹³, from about 10¹¹ to about 10¹⁴, from about 10¹² to about 10¹⁵ or at least 10¹⁵ viral particles.

[0737] In some embodiments, large-scale viral production methods of the present disclosure may comprise the use of suspension cell cultures. Suspension cell culture allows for significantly increased numbers of cells. Typically, the number of adherent cells that can be grown on about 10-50 cm² of surface area can be grown in about 1 cm³ volume in suspension.

[0738] Transfection of replication cells in large-scale culture formats may be carried out according to any methods known in the art. For large-scale adherent cell cultures, transfection methods may include, but are not limited to the use of inorganic compounds (e.g. calcium phosphate), organic compounds [e.g. polyethyleneimine (PEI)] or the use of non-chemical methods (e.g. electroporation.) With cells grown in suspension, transfection methods may include, but are not limited to the use of calcium phosphate and the use of PEI. In some cases, transfection of large-scale suspension cultures may be carried out according to the section entitled “Transfection Procedure” described in Feng, L, et al., 2008 Biotechnol Appl. Biochem. 50:121-32, the contents of which are herein incorporated by reference in their entirety. According to such embodiments, PEI-DNA complexes may be formed for introduction of plasmids to be transfected. In some cases, cells being transfected with PEI-DNA complexes may be ‘shocked’ prior to transfection. This comprises lowering cell culture temperatures to 4° C. for a period of about 1 hour. In some cases, cell cultures may be shocked for a period of from about 10 minutes to about 5 hours in some cases, cell cultures may be shocked at a temperature of from about 0° C. to about 20° C.

[0739] In some cases, transfections may include one or more vectors for expression of an RNA effector molecule to reduce expression of nucleic acids from one or more AAV payload constructs. Such methods may enhance the production of viral particles by reducing cellular resources wasted on expressing payload constructs. In some cases, such methods may be carried out according to those methods taught in US Publication No. US2014/0099666, the contents of which are herein incorporated by reference in their entirety.

### Compositions

[0740] Provided herein are compositions containing AAV particles, AAV capsids, and/or polynucleotides encoding the same. The AAV particles may be contained in any appropriate amount in any suitable carrier substance and is/are generally present in an amount of 0.01-95% by weight of the total weight of the composition. The composition may be provided in a form that is suitable for a parenteral (e.g., subcutaneous, intravenous, intramuscular, or intraperitoneal) administration route, such that the agent, such as a viral particle described herein, is systemically delivered. In some instances, a reporter product is also encoded by the vector. The compositions may be formulated according to conventional pharmaceutical practice (see, e.g., Remington: The Science and Practice of Pharmacy (20th ed.), ed. A. R. Gennaro, Lippincott Williams & Wilkins, 2000 and Encyclopedia of Pharmaceutical Technology, eds. J. Swarbrick and J. C. Boylan, 1988-1999, Marcel Dekker, New York).

[0741] Compositions may be formulated to release the viral particles substantially immediately upon administration or at any predetermined time or time after administration. The latter types of compositions are generally known as controlled release formulations, which include (i) compositions that create a substantially constant concentration of the agent within the body over an extended period of time; (ii) compositions that after a predetermined lag time create a substantially constant concentration of the drug within the body over an extended period of time; (iii) compositions that sustain action during a predetermined time period by maintaining a relatively constant, effective level in the body with concomitant minimization of undesirable side effects associated with fluctuations in the plasma level of the active substance (sawtooth kinetic pattern); (iv) compositions that localize action by, e.g., spatial placement of a controlled release composition adjacent to or in contact with a target site or location, e.g., in a region of a tissue or organ; (v) compositions that allow for convenient dosing, such that doses are administered, for example, once every one, two, or several weeks; and (vi) compositions that target a specific tissue or cell type using carriers, chemical derivatives, or specifically designed viral particles (e.g., comprising a certain capsid composition) to deliver a payload to a cell.

[0742] The composition may be administered systemically, for example, in an acceptable buffer such as physiological saline. In an embodiment, systemic injection of an rAAV vector as described herein allows for the delivery of a payload (e.g., a polynucleotide) to a cell or organ.

[0743] Routes of administration include, for example, intracranial, parenteral, subcutaneous (s.c.), intravenous (i.v.), intraperitoneal (i.p.), intramuscular (i.m.), or intradermal administration. The amount of the vector to be administered can vary depending upon the requirements of a given screen. Generally, amounts will be in the range of those used for other viral vector-based agents employed in the delivery of polynucleotides to cells. In embodiments, about, at least about, and/or no more than about 1×10e5, 1×10e6, 1×10e7, 1×10e8, 1×10e9, 1×10e10, 1×10e11, 1×10e12, 1×10e13, 1×10e14, or 1×10e15 vector genomes are delivered to a subject (e.g., a mouse) to screen a library of enhancers. A composition is administered at a level that is effective in meeting the objectives of a screen.

[0744] The composition may be in the form of a solution, a suspension, an emulsion, an infusion device, or a delivery device for implantation, or it may be presented as a dry powder to be reconstituted with water or another suitable vehicle before use. The composition may include suitable parenterally acceptable carriers and/or excipients. The active therapeutic agent(s) may be incorporated into microspheres, microcapsules, nanoparticles, liposomes, or the like for controlled release. Furthermore, the composition may include suspending, solubilizing, stabilizing, pH-adjusting agents, tonicity adjusting agents, and/or dispersing, agents.

[0745] In some embodiments, the composition is formulated for intravenous delivery. As noted above, the compositions according to the described embodiments may be in a form suitable for sterile injection. To prepare such a composition, the suitable therapeutic(s) are dissolved or suspended in a parenterally acceptable liquid vehicle. Acceptable vehicles and solvents that may be employed include water, water adjusted to a suitable pH by addition of an appropriate amount of hydrochloric acid, sodium hydroxide or a suitable buffer, 1,3-butanediol, Ringer's solution, isotonic sodium chloride solution and dextrose solution. The aqueous formulation may also contain one or more preservatives (e.g., methyl, ethyl, or n-propyl p-hydroxybenzoate). In cases where one of the agents is only sparingly or slightly soluble in water, a dissolution enhancing or solubilizing agent can be added, or the solvent may include 10-60% w/w of propylene glycol or the like.

### Delivery of Recombinant Adeno-Associated Viral Vectors

[0746] For direct delivery to the brain, rAAV vectors may be administered by open neurosurgical procedure or by focal injection in order to bypass the blood-brain barrier, to temporally and spatially restrict transgene expression, and to target specific areas of the brain, e.g., interneuron cells and brain tissue comprising these cells.

[0747] In some cases, an rAAV vector is delivered to a subject intravenously. In some cases, the rAAV vector is delivered to the central nervous system using the vasculature.

[0748] Systemic rAAV delivery (by intravenous injection) provides a non-invasive alternative for broad gene delivery to the nervous system. Several groups have developed rAAV capsids that enhance gene transfer to the CNS and certain tissues and cell populations after intravenous delivery. By way of example, AAV-AS capsid18 utilizes a polyalanine N-terminal extension to the AAV9.4719 VP2 capsid protein to provide higher neuronal transduction, particularly in the striatum. The AAV-BR1 capsid20, based on AAV2, may be useful for more efficient and selective transduction of brain endothelial cells. Another AAV capsid, AAV-PHP.B, comprises a capsid that transduces the majority of neurons and astrocytes across many regions of the adult mouse brain and spinal cord after intravenous injection.

[0749] Other modes of rAAV vector administration may include lipid-mediated vector delivery, hydrodynamic delivery, and a gene gun.

[0750] The virus vectors and compositions thereof as described herein may be used to screen libraries of capsid polypeptides that have specificity or particular activity levels in particular cell types or tissues (e.g., an organ).

### Polynucleotide Sequencing

[0751] Preparation of a library for sequencing may involve an amplification step. Amplification may involve thermocycling (e.g., PCR) or isothermal amplification (such as through the methods NEAR, RNA-Seq, RPA or LAMP). Amplification can refer to any method employing a primer and a polymerase capable of replicating a target sequence with reasonable fidelity. Amplification may be carried out by natural or recombinant DNA polymerases, such as TaqGold™, T7 DNA polymerase, Klenow fragment of E. coli DNA polymerase, and reverse transcriptase. A preferred amplification method is PCR. In some embodiments, isolated RNA is contacted with a reverse transcriptase to produce cDNA for sequencing and/or PCR amplification.

[0752] Sequencing may be performed on any high-throughput platform. Methods of sequencing oligonucleotides and nucleic acids are well known in the art (see, e.g., WO93/23564, WO98/28440 and WO98/13523; U.S. Pat. App. Pub. No. 2019/0078232; U.S. Pat. Nos. 5,525,464; 5,202,231; 5,695,940; 4,971,903; 5,902,723; 5,795,782; 5,547,839 and 5,403,708; Sanger et al., Proc. Natl. Acad. Sci. USA 74:5463 (1977); Drmanac et al., Genomics 4:114 (1989); Koster et al., Nature Biotechnology 14:1123 (1996); Hyman, Anal. Biochem. 174:423 (1988); Rosenthal, International Patent Application Publication 761107 (1989); Metzker et al., Nucl. Acids Res. 22:4259 (1994); Jones, Biotechniques 22:938 (1997); Ronaghi et al., Anal. Biochem. 242:84 (1996); Ronaghi et al., Science 281:363 (1998); Nyren et al., Anal. Biochem. 151:504 (1985); Canard and Arzumanov, Gene 11:1 (1994); Dyatkina and Arzumanov, Nucleic Acids Symp Ser 18:117 (1987); Johnson et al., Anal. Biochem. 136:192 (1984); and Elgen and Rigler, Proc. Natl. Acad. Sci. USA 91(13):5740 (1994), all of which are expressly incorporated by reference).

[0753] The sequencing of a polynucleotide can be carried out using any suitable commercially available sequencing technology. In embodiments, the sequencing of a polynucleotide is carried out using a chain termination method of DNA sequencing (e.g., Sanger sequencing). In some embodiments, commercially available sequencing technology is a next-generation sequencing technology, including as non-limiting examples combinatorial probe anchor synthesis (cPAS), DNA nanoball sequencing, droplet-based or digital microfluidics, heliscope single molecule sequencing, nanopore sequencing (e.g., Oxford Nanopore technologies), GeneGap sequencing, massively parallel signature sequencing (MPSS), microfluidic Sanger sequencing, microscopy-based techniques (e.g., transmission electronic microscopy DNA sequencing), RNA polymerase (RNAP) sequencing, single-molecule real-time (SMRT) sequencing, SOLiD sequencing, ion semiconductor sequencing, polony sequencing, Pyrosequencing (454), sequencing by hybridization, sequencing by synthesis (e.g., Illumina™ sequencing), sequencing with mass spectrometry, and tunneling currents DNA sequencing.

### Hardware and Software

[0754] A computer system (or digital device) may be used to receive, transmit, display and/or store results, analyze the results, and/or produce a report of the results and analysis. A computer system may be understood as a logical apparatus that can read instructions from media (e.g., software) and/or network port (e.g., from the internet), which can optionally be connected to a server having fixed media. A computer system may comprise one or more of a CPU, disk drives, input devices such as keyboard and/or mouse, and a display (e.g., a monitor). Data communication, such as transmission of instructions or reports, can be achieved through a communication medium to a server at a local or a remote location. The communication medium can include any means of transmitting and/or receiving data. For example, the communication medium can be a network connection, a wireless connection, or an internet connection. Such a connection can provide for communication over the World Wide Web. It is envisioned that data relating to the present invention can be transmitted over such networks or connections (or any other suitable means for transmitting information, including but not limited to mailing a physical report, such as a print-out) for reception and/or for review by a receiver. One can record results of calculations (e.g., sequence analysis or a listing of hybrid capture probe sequences) made by a computer on tangible medium, for example, in computer-readable format such as a memory drive or disk, as an output displayed on a computer monitor or other monitor, or simply printed on paper. The results can be reported on a computer screen. The receiver can be but is not limited to an individual, or electronic system (e.g., one or more computers, and/or one or more servers).

[0755] In some embodiments, the computer system may comprise one or more processors. Processors may be associated with one or more controllers, calculation units, and/or other units of a computer system, or implanted in firmware as desired. If implemented in software, the routines may be stored in any computer readable memory such as in RAM, ROM, flash memory, a magnetic disk, a laser disk, or other suitable storage medium. Likewise, this software may be delivered to a computing device via any known delivery method including, for example, over a communication channel such as a telephone line, the internet, a wireless connection, etc., or via a transportable medium, such as a computer readable disk, flash drive, etc. The various steps may be implemented as various blocks, operations, tools, modules, and techniques which, in turn, may be implemented in hardware, firmware, software, or any combination of hardware, firmware, and/or software. When implemented in hardware, some or all of the blocks, operations, techniques, etc. may be implemented in, for example, a custom integrated circuit (IC), an application specific integrated circuit (ASIC), a field programmable logic array (FPGA), a programmable logic array (PLA), etc.

[0756] A client-server, relational database architecture can be used in embodiments of the invention. A client-server architecture is a network architecture in which each computer or process on the network is either a client or a server. Server computers are typically powerful computers dedicated to managing disk drives (file servers), printers (print servers), or network traffic (network servers). Client computers include PCs (personal computers) or workstations on which users run applications, as well as example output devices as disclosed herein. Client computers rely on server computers for resources, such as files, devices, and even processing power. In some embodiments of the invention, the server computer handles all of the database functionality. The client computer can have software that handles all the front-end data management and can also receive data input from users.

[0757] A machine-readable medium which may comprise computer-executable code may take many forms, including but not limited to, a tangible storage medium, a carrier wave medium or physical transmission medium. Non-volatile storage media include, for example, optical or magnetic disks, such as any of the storage devices in any computer(s) or the like, such as may be used to implement the databases, etc. shown in the drawings. Volatile storage media include dynamic memory, such as main memory of such a computer platform. Tangible transmission media include coaxial cables; copper wire and fiber optics, including the wires that comprise a bus within a computer system. Carrier-wave transmission media may take the form of electric or electromagnetic signals, or acoustic or light waves such as those generated during radio frequency (RF) and infrared (IR) data communications. Common forms of computer-readable media therefore include for example: a floppy disk, a flexible disk, hard disk, magnetic tape, any other magnetic medium, a CD-ROM, DVD or DVD-ROM, any other optical medium, punch cards paper tape, any other physical storage medium with patterns of holes, a RAM, a ROM, a PROM and EPROM, a FLASH-EPROM, any other memory chip or cartridge, a carrier wave transporting data or instructions, cables or links transporting such a carrier wave, or any other medium from which a computer may read programming code and/or data. Many of these forms of computer readable media may be involved in carrying one or more sequences of one or more instructions to a processor for execution.

[0758] The subject computer-executable code can be executed on any suitable device which may comprise a processor, including a server, a PC, or a mobile device such as a smartphone or tablet. Any controller or computer optionally includes a monitor, which can be a cathode ray tube (“CRT”) display, a flat panel display (e.g., active-matrix liquid crystal display, liquid crystal display, etc.), or others. Computer circuitry is often placed in a box, which includes numerous integrated circuit chips, such as a microprocessor, memory, interface circuits, and others. The box also optionally includes a hard disk drive, a floppy disk drive, a high-capacity removable drive such as a writeable CD-ROM, and other common peripheral elements. Inputting devices such as a keyboard, mouse, or touch-sensitive screen, optionally provide for input from a user. The computer can include appropriate software for receiving user instructions, either in the form of user input into a set of parameter fields, e.g., in a GUI, or in the form of preprogrammed instructions, e.g., preprogrammed for a variety of different specific operations.

### Kits

[0759] Also provided are kits comprising engineered AAV capsids, and/or polynucleotides encoding the same. Typically, kits will comprise sufficient amounts and/or numbers of components to allow a user to perform multiple treatments of a subject(s) and/or to perform multiple experiments.

[0760] Any of the capsid polypeptides, or polynucleotides encoding the same, of the present disclosure may be contained in a kit. In some embodiments, kits may further include reagents and/or instructions for creating and/or synthesizing compounds and/or compositions of the present disclosure. In some embodiments, kits may also include one or more buffers.

[0761] In some embodiments, kit components may be packaged either in aqueous media or in lyophilized form. The container means of the kits will generally include at least one vial, test tube, flask, bottle, syringe, or other container means, into which a component may be placed, and preferably, suitably aliquoted. Where there is more than one kit component, (labeling reagent and label may be packaged together), kits may also generally contain second, third or other additional containers into which additional components may be separately placed. In some embodiments, kits may also comprise second container means for containing sterile, pharmaceutically acceptable buffers and/or other diluents. In some embodiments, various combinations of components may be comprised in one or more vial. Kits of the present disclosure may also typically include means for containing compounds and/or compositions of the present disclosure, e.g., proteins, nucleic acids, and any other reagent containers in close confinement for commercial sale. Such containers may include injection or blow-molded plastic containers into which desired vials are retained.

[0762] In some embodiments, kit components are provided in one and/or more liquid solutions. In some embodiments, liquid solutions are aqueous solutions, with sterile aqueous solutions being particularly preferred. In some embodiments, kit components may be provided as dried powder(s). When reagents and/or components are provided as dry powders, such powders may be reconstituted by the addition of suitable volumes of solvent. In some embodiments, it is envisioned that solvents may also be provided in another container means. In some embodiments, labeling dyes are provided as dried powders. In some embodiments, it is contemplated that 10, 20, 30, 40, 50, 60, 70, 80, 90, 100, 120, 120, 130, 140, 150, 160, 170, 180, 190, 200, 300, 400, 500, 600, 700, 800, 900, 1000 micrograms or at least or at most those amounts of dried dye are provided in kits of the disclosure. In such embodiments, dye may then be resuspended in any suitable solvent, such as DMSO.

[0763] The kit can include instructions for use of the compositions in a method provided herein (e.g., to deliver a payload to a cell). The instructions may be printed directly on the container (when present), or as a label applied to the container, or as a separate sheet, pamphlet, card, computer-readable medium, or folder supplied in or with the container.

[0764] The practice of the present invention employs, unless otherwise indicated, conventional techniques of molecular biology (including recombinant techniques), microbiology, cell biology, biochemistry, and immunology, which are well within the purview of the skilled artisan. Such techniques are explained fully in the literature, such as, “Molecular Cloning: A Laboratory Manual”, second edition (Sambrook, 1989); “Oligonucleotide Synthesis” (Gait, 1984); “Animal Cell Culture” (Freshney, 1987); “Methods in Enzymology” “Handbook of Experimental Immunology” (Weir, 1996); “Gene Transfer Vectors for Mammalian Cells” (Miller and Calos, 1987); “Current Protocols in Molecular Biology” (Ausubel, 1987); “PCR: The Polymerase Chain Reaction”, (Mullis, 1994); “Current Protocols in Immunology” (Coligan, 1991). These techniques are applicable to the production of the polynucleotides and polypeptides of the invention, and, as such, may be considered in making and practicing the invention. Particularly useful techniques for particular embodiments will be discussed in the sections that follow.

[0765] The following examples are put forth so as to provide those of ordinary skill in the art with a complete disclosure and description of how to make and use the assay, screening, and therapeutic methods of the invention, and are not intended to limit the scope of what the inventors regard as their invention.

### EXAMPLES

### Example 1: High Production Fitness Space Mapping

[0766] Experiments were undertaken to develop improved gene delivery vectors derived from AAV9, by inserting into the AAV9 capsid 7 amino acids (7-mer) between VP1 residues 588 and 589 (FIGS. 1A-1E). To create an accurate and generalizable sequence-to-production fitness ML model, synthetic training and assessment libraries were designed to each consist of 74.5K variants that evenly sample the sequence space (each amino acid was sampled with an equal probability at each position); 10K of the 74.5K were common to both libraries to assess reproducibility across libraries. This was distinct from conventional NNN or NNK (where N is any base and K is a G or T) libraries where millions of variants are synthesized stochastically by uniformly sampling the nucleotide space, which biases toward AAs represented by more codons. Both training and assessment libraries were also designed to assess whether codon usage impacted production fitness; each variant was represented by two maximally different nucleotide sequences (7-mer amino acid replicates). Both libraries were produced in triplicate, in two separate runs, by two different researchers, for a total of 12 replicates each. The reproducibility (measured by the agreement between replicates) of variant production fitness scores between preparations by different researchers improved as technical and biological replicates were aggregated (FIG. 2). Therefore, all subsequent analyses on production fitness were performed using scores aggregated across all replicates for each library.

[0767] It was first assessed whether codon usage impacted the production fitness of identical amino acid variants. If so, it would be necessary to train on the nucleotide sequence space (617 for NNN, 31⁷ for NNK, where “N” represents any nucleotide and “K” represents G or T, and where 61 and 31 correspond to the number of amino-acid encoding codons with the sequence NNN or NNK, respectively), which is much larger than the amino acid sequence space (207). High correlation was observed between the fitness scores of 7-mer amino acid replicates (FIG. 3A, FIG. 5), and the distribution of measured differences between codon replicates did not exceed those observed between technical replicates (FIG. 4A). Of the 13,217 codon replicates where only one of the two codon sequences was detected in virus (20.5% of the 64,500 AA variants), >99% had fitness scores on the low end of the fitness distribution, suggesting that the missing replicates were not detected due to low abundance (FIGS. 3A and 4B). Furthermore, no codon usage bias was observed for individual AAs (FIG. 4C). Therefore, production fitness was averaged across 7-mer replicates for all downstream modeling.

[0768] The production fitness distribution of the training library was modeled by a mixture of two Gaussian distributions: a “low fitness” versus a “high fitness” distribution (FIG. 3B). The low fitness distribution overlapped with the production fitness distribution of the stop codon containing variants which were presumably detected in the virus library due to cross-packaging (FIG. 5). The variants in the high fitness distribution exhibited distinguishing amino acid sequence characteristics, such as a general enrichment of negatively charged residues and depletion of cysteine and tryptophan (FIG. 3C). Nonetheless, this high production fitness distribution had less bias than an analogous set of the most abundant 70K variants from an NNK library (FIG. 3C). The fitness scores for the 10K variants common to both libraries were consistent across the training and assessment libraries, suggesting that variant fitness is not noticeably impacted by the other variants in the library (FIG. 3D).

### Example 2: A Generalizable Production Fitness Model

[0769] A regression model was used to capture the large variation in relative production fitness scores (±5-fold; log 2 enrichment) within the high fitness and low fitness distributions (FIG. 3B). The model was first trained using the sequence and production fitness measurements of 24K variants unique to the training library. The accuracy of each model in this study was assessed by the agreement (Pearson correlation) between the measured fitness scores and the model's predicted scores. Remarkably, the sequence-to-production-fitness model achieved high accuracy the remaining subset of the library not used in the training process (FIG. 3E), as well as on the independent assessment library (FIG. 3F). In addition, the model did not require large amounts of training data to obtain high accuracy, reducing the training from 24K to 5K variants only slightly reduced performance (r=0.924±0.001 vs r=0.899±0.015, FIG. 3G). These data demonstrated that the model was generalizable across libraries and to unseen variants and required relatively small training datasets.

### Example 3: Fit4Function Enables Reproducible Data and Accurate Prediction Models

[0770] Using the production fitness model, the fitness of 24M AA variants was randomly generated and predicted in silico. The predicted high production fitness sequence space was then evenly sampled for 240K variants to create a “Fit4Function” library that evenly sampled only the high fit sequence space (FIG. 6A). As expected, the measured fitness scores for the Fit4Function variants, when synthesized, mapped to a single distribution that closely followed the production fitness distribution after calibration (FIG. 6B). The amino acid distribution in the Fit4Function library was similar to that of the production fitness distribution from the training library and was similarly less biased when compared to that of the 240K most abundant variants in an NNK library (FIG. 6C). To assess library diversity, the pairwise Hamming distance (how many residues differ) was computed between all variant pairs; 67% of the Fit4Function pairs had a distance of seven (all positions) compared to 57.8% of the pairs from the 240K most abundant sequences in an NNK library (FIG. 6D). It is important to note that the criterion for high production fitness in populating Fit4Function libraries was not so stringent as to eliminate potentially promising functional candidates for downstream optimization; only variants with poor production (i.e., those whose production fitness was comparable to stop-codon containing control sequences) were considered low in production fitness and not sampled for Fit4Function libraries (FIG. 5).

[0771] Fit4Function libraries were designed to enable the generation of reproducible and ML-compatible functional screening data. Specifically, the library was limited to a moderate size that enabled deeper sequencing depth and sampled only variants with high production fitness, which enabled more quantitative and reliable detection of each variant in the library. In addition, the library evenly sampled the high production fitness amino acid sequence space, which resulted in less biased ML models that generalized well across the sequence space.

[0772] The outcomes of the Fit4Function library screening strategy were compared versus an NNK library across five functional assays: (1) HEK293 cell binding, (2) primary mouse brain microvascular endothelial cell (BMVEC) binding, (3) primary human BMVEC binding, (4) human brain endothelial cell line (hCMEC/D3) binding, and (5) HEK293 transduction. Binding and transduction were measured by quantitative sequencing capsid variant abundance at the DNA and mRNA levels, respectively. The Fit4Function library consistently yielded higher replication quality data than the NNK library (one-tailed paired t-test, n=5 assays; p=0.0074; FIG. 6E). Models trained on functional data derived from the Fit4Function library were built and compared versus an NNK library (only data from the most abundant 240K variants in the NNK virus library was used). The Fit4Function-based models consistently achieved higher prediction accuracy (FIG. 6F).

[0773] It was next sought to examine the use of the Fit4Function library to train prediction models of in vivo AAV biodistribution after systemic administration in adult C57BL/6J mice. The replication quality was high in liver, kidney, and spleen, and moderate in the brain, spinal cord, serum, heart, and lungs (FIGS. 6G and 7). Independent models were trained to predict the variant tropism for each organ. The training data measurements were aggregated across three animals, and the data from the fourth animal was held out for independent testing. The models performed reasonably well when trained on assays with more reproducible data (FIG. 6H; model performance correlated with the data replication quality FIG. 6G), demonstrating the applicability of the approach to in vivo data.

### Example 4: Multi-Trait Capsid Identification

[0774] Efficient and durable gene delivery to the liver remains challenging due to capsid antigen presentation and T cell-mediated immunity. Liver-directed therapies should benefit from the development of potent AAV vectors that can be administered at lower doses to reduce the exposure to capsid antigens. There is a need for capsids that are compatible with preclinical efficacy and safety testing. The objective was to design a ‘MultiFunction’ library consisting only of variants that were each predicted to possess multiple enhanced functions related to cross-species hepatocyte gene delivery. Toward this goal, five separate functional screens of the Fit4Function library were performed for capsids capable of cross-species hepatocyte gene delivery: (1) binding (2) transduction of the human hepatocellular carcinoma cell line (HepG2), (3) binding or (4) transduction of the human liver epithelial cell line (THLE), and (5) efficient liver biodistribution in C57BL/6J mice (FIGS. 8A and 8B). This high-quality data from these functional screens was used to train and assess the performance of five independent sequence-to-function models (FIG. 9A). With the and production fitness model and these five functional fitness models, 10M randomly generated capsid variants were screened in silico and 30K liver-targeted MultiFunction candidate variants predicted to have enhanced phenotypes across all five functions and production fitness were selected. “Enhanced phenotype” was arbitrarily defined as any variant above the 50th percentile of measured enrichment scores. In the MultiFunction library, each variant was encoded by two nucleotide sequences serving as biological replicates. In addition, 3K variants were included from the training library (high and low production fitness; Uniform Control), 10K from the Fit4Function library (Fit4Function Control), and 3K from the known hits in Fit4Function library, i.e., variants from the Fit4Function library that had been experimentally confirmed to exhibit enhanced phenotypes for the five hepatocyte-related traits and production fitness (Positive Control).

[0775] To assess the accuracy of researchers' predictions and identify the top-performing variants, the MultiFunction library was screened on the same five assays related to hepatocyte targeting and on production fitness (see replicate correlations in FIGS. 10A-10C).). The MultiFunction variants either matched or surpassed the performance of the positive controls from the Fit4Function library (FIG. 9B); >88.5% of the MultiFunction library variants satisfied the enhanced phenotype definition as compared to 2.9% of sequences in the uniform space or 7.1% of the Fit4Function library control (FIG. 9C). Although the 7-mer sequences in the MultiFunction library have an increased frequency of arginine and lysine, the library diversity remained high (FIG. 9D).

[0776] The performance of seven variants that were selected from the MultiFunction library were individually assessed based on their measured production fitness, liver biodistribution and transduction in mice, and their enhanced ability to bind and transduce human HEPG2 and THLE cells (FIG. 11A). Each capsid and AAV9, as a control, were used to package a single-stranded GFP and Luciferase dual reporter AAV2 genome. Production yields were comparable to that of AAV9 (FIG. 12A). When administered to mice at 1×10¹⁰ vg/mouse and assessed for GFP expression three weeks later, each capsid and AAV9 efficiently transduced hepatocytes as assessed by the native GFP fluorescence in DAPI⁺ liver nuclei (FIGS. 11B, 12B, and 18). All novel AAVs were more effective than AAV9 at transducing the HEPG2 and THLE cell lines (FIGS. 11C and 12C).

### Example 5: Fit4Function Translates Across Species to Macaques

[0777] A 100K member Fit4Function library was administered intravenously to an adult cynomolgus macaque and assessed biodistribution. Liver-targeted MultiFunction capsids, predicted with the six prior models that were trained only on human cell and mouse data and production fitness, were highly enriched in terms of macaque liver biodistribution (FIG. 11D). The combination of multiple functional predictors was more effective at identifying variants with increased biodistribution to the macaque liver than any single predictor used in isolation (FIG. 11E). The five liver models exhibited redundancy, which is unsurprising given that they are readouts of related functions (FIG. 11E). Surprisingly, the in vivo human hepatocyte transduction models translated better to cynomolgus macaque liver biodistribution compared to the in vivo mouse liver biodistribution model, which was neither necessary nor sufficient to demonstrate transferability to macaque liver biodistribution; the hit rate did not decrease when the mouse liver model was not included in the combination of models (FIG. 11E). The hit rate decreased only modestly when both human hepatocyte transduction models were excluded, demonstrating the utility of using models in combination (FIG. 11E). All seven of the liver MultiFunction capsids individually validated in mice and human cells (FIG. 11A, 12C) were more efficient than AAV9 at transducing the macaque liver (FIG. 11F; n=2 rhesus macaques) when administered as a library.

### Example 6: Production Fitness

[0778] Production fitness is a bottleneck for manufacturability of viral vectors. Screening randomly synthesized libraries can result in the identification of capsids optimized for function, but that are challenging to manufacture. Four experiments were, therefore, undertaken (i.e., Experiments 1-4) to assess the “manufacturability” or production fitness under defined conditions for capsid variants in a library (FIG. 13). The process was compatible with low bias purification processes as well as more scalable customized manufacturing processes. Capsid production fitness was measured in a library format by measuring nuclease resistant (packaged) AAV genomes using next generation sequencing (NGS). Each genome was packaged by the capsid that it encodes, which made it possible to quantitatively measure the relative production fitness of individual variants within a capsid library. Production fitness was scored by measuring the log 2 enrichment (mean reads per million (RPM) for a capsid sequence in the packaged virus library vs the plasmid RPM used to generate the virus library). Variants with high production fitness were suitable to be utilized to generate a library suitable to be subsequently screened for different functions to obtain variants that would be manufacturable and carry enhanced function(s) of interest.

### Example 7: Functional Fitness In Vitro

[0779] AAV capsid variants had different attributes that could be assessed through in vitro and in vivo assays that measure the ability of specific capsids to bind or transduce relevant cell types including those derived from humans, mice, or other species commonly used for disease models. Accordingly, the data shown in FIG. 14 was generated using Fit4Function libraries to learn to map 7-mer sequence to in vivo cell binding and transduction. Tables 2-13 below list 7-mer motifs found to be enriched for the indicated trait, where “*” represents any amino acid, square brackets surrounding a list of amino acids not preceded by the symbol “\hat{ }” denote a list of amino acids that may occur at a position, and square brackets surrounding a list of amino acids preceded by the symbol “\hat{ }” denote a list of amino acids that may not occur at a position. In Tables 2-13, “enriched” means a log 2 enrichment value of greater than 0.

TABLE 2
7-mer motifs enriched for HEK293 binding.

| | Reported | Possible |
|---|---|---|
| Motifs | Variants | Variants |
| [RQMT][RNQP][RQPS][ANQGST]**G | 161 | 153600 |
| [QTV][ANQGKP][RNGSTY]*[ARGT]*[GP] | 180 | 345600 |
| [RKSV][FPS]**[RT][QGS][GS] | 23 | 57600 |
| [GST]*[QT][NQ]R*G | 19 | 4800 |
| [TV]**[NS]R[QGM]G | 23 | 4800 |
| [RNQT][ANPS][RNS]**[NQGS]G | 93 | 76800 |
| T[NGS]**R[AQS]G | 19 | 3600 |
| NR**[NG][QG]A | 9 | 1600 |
| R**QGGG (SEQ ID NO: 199501) | 4 | 400 |
| [QF][KS][RN]**[NP][AP] | 11 | 12800 |
| QR**S[TV]A (SEQ ID NO: 199502) | 9 | 800 |
| [QKM]*G[RSV][KT]*G | 14 | 7200 |
| [QMTV][RN]*[ANV][RQS]*[GS] | 45 | 57600 |
| [NQ]R[NGP][NQS]**A | 34 | 7200 |
| [QT]*[RT][RT]*[NQG][AG] | 32 | 19200 |
| NTR**SA (SEQ ID NO: 199503) | 4 | 400 |
| QRP*[AS]*[AS] | 12 | 1600 |
| RQ**TNA (SEQ ID NO: 199504) | 4 | 400 |
| QRP**[MV][AS] | 11 | 1600 |
| [RN]*N[RS]*[QG]G | 13 | 3200 |
| [MTV]R[PS]*[QT]*G | 19 | 4800 |
| [RY]S*[QK]*Q[GS] | 8 | 3200 |
| MRG**MG (SEQ ID NO: 199505) | 5 | 400 |
| [GV]*[NT]*R[QS]G | 11 | 3200 |
| [ST][RQ][RS]T**A | 12 | 3200 |
| R*S*STP (SEQ ID NO: 199506) | 4 | 400 |
| QR**TNG (SEQ ID NO: 199507) | 4 | 400 |
| Q*RQT*P (SEQ ID NO: 199508) | 4 | 400 |
| [NQ]RQ*[GS]*A | 13 | 1600 |
| TR**NNA (SEQ ID NO: 199509) | 4 | 400 |
| [RT]S*[RQ][QS]*A | 8 | 3200 |
| GQ*RV*G (SEQ ID NO: 199510) | 5 | 400 |
| T*TSR*G (SEQ ID NO: 199511) | 6 | 400 |
| TRG**TG (SEQ ID NO: 199512) | 4 | 400 |
| NR*[GT]*[TV]G | 10 | 1600 |
| T*RT*SA (SEQ ID NO: 199513) | 4 | 400 |
| MG*R*GA (SEQ ID NO: 199514) | 4 | 400 |
| [NQ]R*[NQ]S*A | 9 | 1600 |
| RQ*PT*A (SEQ ID NO: 199515) | 4 | 400 |
| T*T*RSG (SEQ ID NO: 199516) | 4 | 400 |
| T*RGS*P (SEQ ID NO: 199517) | 4 | 400 |
| TR**TMG (SEQ ID NO: 199518) | 4 | 400 |
| R*TS*SP (SEQ ID NO: 199519) | 5 | 400 |
| N**QRSA (SEQ ID NO: 199520) | 4 | 400 |
| [QT][RK]*S*[TY]A | 12 | 3200 |
| QR*PA*G (SEQ ID NO: 199521) | 4 | 400 |
| RS*S*GG (SEQ ID NO: 199522) | 4 | 400 |
| RTS*S*P (SEQ ID NO: 199523) | 4 | 400 |
| TRQ*T*G (SEQ ID NO: 199524) | 4 | 400 |
| QR*S*TG (SEQ ID NO: 199525) | 4 | 400 |
| R*NS*SP (SEQ ID NO: 199526) | 5 | 400 |
| MR*G*QS (SEQ ID NO: 199527) | 4 | 400 |
| N**SRQG (SEQ ID NO: 199528) | 4 | 400 |
| NR*ST*A (SEQ ID NO: 199529) | 4 | 400 |
| RSQ*G*G (SEQ ID NO: 199530) | 4 | 400 |
| T*RTN*A (SEQ ID NO: 199531) | 4 | 400 |
| T*S*RMG (SEQ ID NO: 199532) | 4 | 400 |
| TR**TQA (SEQ ID NO: 199533) | 4 | 400 |
| TRT**SG (SEQ ID NO: 199534) | 4 | 400 |
| YSGK**G (SEQ ID NO: 199535) | 4 | 400 |

TABLE 3
7-mer motifs enriched for
HEK293 transduction.

| | Reported | Possible |
|---|---|---|
| Motifs | Variants | Variants |
| [RQGKST][ARNQGFPST]** | 1130 | 1360800 |
| [ARNQGKMTV][ANQGMSV]G | | |
| [\hat{ }ADCEHILKPW][ARNQGKPS] | 3535 | 11520000 |
| [ARNQGKST][ARNQKPSTV]**[NDGPS] | | |
| [NQKMFSTY][RNGKT][?CEHILKFSWY] | 1872 | 8640000 |
| **[RNQKMPSTV][ANDEPS] | | |
| [\hat{ }ARDCEHILW][RGLKPSY]* | 1289 | 1724800 |
| [NQGKPSTV]*[ANQGFST]G | | |
| [\hat{ }ARDCEHILPW][ARQGKPT] | 1139 | 1176000 |
| [RQGKPST]**[ANGMST]G | | |
| [\hat{ }ADCQEHILW][NQGLKMPST]* | 2306 | 6336000 |
| [\hat{ }NCEHILMFWY][ARNQGMTV]*[GS] | | |
| [RGMY][ANQGPS][NQKPST]** | 503 | 403200 |
| [ANGKMST]G | | |
| [NQGKFSTV][RNQGKS]**[ARNGKT] | 1614 | 4608000 |
| [NQGKFSYV][ANDGS] | | |
| [\hat{ }ARDCEHILFW]*[ARNQGKMPT] | 1297 | 1440000 |
| [RQGKPSTV]*[AQGST]G | | |
| [\hat{ }ARDCEHILPW]*[RNGKPST]* | 1236 | 1372000 |
| [ARNGKSV][NQGKMST]G | | |
| [RNKT][RNQPS]*[RQGPS][RQGS]* | 330 | 480000 |
| [APS] | | |
| [RNMPY][RNQKPS]*[ANQTV]* | 733 | 1680000 |
| [ANQGKTV][DGPS] | | |
| [NQGKMFTV][ARQGKMPTV] | 1056 | 1612800 |
| [RNQGKPTY]*[ARQKMST]*G | | |
| [RNQMFST][RNQGKT]*[ARNQPST]* | 1150 | 2116800 |
| [AQGSTY][APS] | | |
| [QGKMSTV]*[ARNQGKMPT][RNQGKT] | 770 | 907200 |
| [ARNSTV]*G | | |
| [RMT]*[NQKT]*[ARQGT][ANQS][GP] | 222 | 192000 |
| [RKMSV]**[ANQGKPS][NGMSTV] | 910 | 1764000 |
| [ANGKSTV][DGS] | | |
| [NQKMPTYV]*[ARGKPTV][NGST] | 960 | 1612800 |
| [RNQKST]*[GPS] | | |
| [RNQKMSY][RQKST][ADQKPST]* | 837 | 1960000 |
| [AKSTV]*[ADPS] | | |
| [RK]**[NG][AS][GT]A | 29 | 6400 |
| [RQ]*[RNPST][AQGST][AQGSTV]* | 411 | 360000 |
| [GPS] | | |
| R[QPS]*S*[QGV]G | 19 | 3600 |
| [RKV][NGKP]*N[ANGT]*G | 41 | 19200 |
| [NQGLKFT][NGKS][QKMS]** | 507 | 1344000 |
| [ARQKSV][ANDEG] | | |
| [RQMS]*[RNQKST][NPST]* | 478 | 806400 |
| [ARNQGMS][DGP] | | |
| [RKT]**[PST][QT][ANG]G | 54 | 21600 |
| [NQKMT][ARDKPST][RNGKP]*G*G | 117 | 70000 |
| [RNQKMFT][RDGKPST][RNQGKPT]* | 819 | 1372000 |
| [NQGST]*[AS] | | |
| [RNQMST][RNDQKST][RGKPST] | 1093 | 2822400 |
| [AQGKPST]**[APSV] | | |
| [QKT]*[KS]*[AQGS][NQS][AS] | 69 | 57600 |
| [KFV]*[ANK]*[ST][KS][AD] | 31 | 28800 |
| [RQKMTYV][RNDKPS][RQGPS] | 749 | 1176000 |
| [NDQGPST]**[GP] | | |
| [NQMT]R*[NGPTV][AQGS]*[GS] | 114 | 64000 |
| [QMSY][RKP]**S[AQGKV][ADGS] | 116 | 96000 |
| R[NS]**[ANQ][AQT]A | 21 | 7200 |
| R[QS]**T[NQ][AS] | 13 | 3200 |
| [RQ]*[KPT][GST]*[ANQGT]G | 85 | 36000 |
| [RN][RQP]*[GPS]T*A | 20 | 7200 |
| [RNMPT]*[RNGKST][ANDQKPST] | 355 | 480000 |
| [RNGST]*A | | |
| K[QPS]*[NMS]*[QV][GS] | 27 | 14400 |
| K*[NQG]*[NT][AST]G | 33 | 7200 |
| RN*Q*SG (SEQ ID NO: 199536) | 4 | 400 |
| K*[ANGST][NST]*[AMS][GS] | 68 | 36000 |
| KT*S*GA (SEQ ID NO: 199537) | 4 | 400 |
| [RKMT][RQKPST]S*[ARSTV]*G | 86 | 48000 |
| [KM]*N*GNA (SEQ ID NO: 199538) | 8 | 800 |
| N**S[GT][GM]A | 9 | 1600 |
| K*[GPS][GT][AT]*A | 20 | 4800 |
| [QG]K*[GTV][AMS]*[AN] | 23 | 14400 |
| [RQT]*[RNQPT][RNST]*[QGS]A | 102 | 72000 |
| [NQ][RK]**[GS]TA | 12 | 3200 |
| [TV]**NRQG (SEQ ID NO: 199539) | 8 | 800 |
| R[AGPS][NQPT]*[NGST]*G | 94 | 25600 |
| R[MST]N**[QT][GP] | 21 | 4800 |
| [RNQ]*[PT][GT][RS]*A | 24 | 9600 |
| RS**NTG (SEQ ID NO: 199540) | 4 | 400 |
| [RK]*[PS]G*[NQGT]A | 31 | 6400 |
| Q*KSA*A (SEQ ID NO: 199541) | 4 | 400 |
| KN*G*TA (SEQ ID NO: 199542) | 4 | 400 |
| K*S*[AS]GA (SEQ ID NO: 199543) | 8 | 800 |
| [NG]K*[AS][GT]*A | 14 | 3200 |
| [GV]NS*[RK]*G | 8 | 1600 |
| KT*S*SA (SEQ ID NO: 199544) | 4 | 400 |
| [RM][KP]*[AS]S*G | 15 | 3200 |
| VK**STG (SEQ ID NO: 199545) | 4 | 400 |
| [QKT][RQGMSTV][AGKP][NGST]**A | 138 | 134400 |
| PR*AT*G (SEQ ID NO: 199546) | 4 | 400 |
| TRS*T*M (SEQ ID NO: 199547) | 4 | 400 |
| T**RQQA (SEQ ID NO: 199548) | 4 | 400 |
| KN*S*SG (SEQ ID NO: 199549) | 4 | 400 |
| RNS*[AG]*G (SEQ ID NO: 199550) | 8 | 800 |
| R*S*[AS]T[PS] | 9 | 1600 |
| [RG][KS]S*[GT]*[AG] | 13 | 6400 |
| QR*NS*A (SEQ ID NO: 199551) | 4 | 400 |
| R*SN*TG (SEQ ID NO: 199552) | 4 | 400 |
| R*[NS]*[GT]GG | 11 | 1600 |
| RAP**NS (SEQ ID NO: 199553) | 4 | 400 |
| R*NNS*G (SEQ ID NO: 199554) | 4 | 400 |
| [NK]*[GKP][GST]*[GS]A | 37 | 14400 |
| QK*GT*G (SEQ ID NO: 199555) | 4 | 400 |
| T**NRGG (SEQ ID NO: 199556) | 4 | 400 |
| VK*AS*A (SEQ ID NO: 199557) | 5 | 400 |
| K*P*TGG (SEQ ID NO: 199558) | 4 | 400 |
| K**QNQG (SEQ ID NO: 199559) | 4 | 400 |
| R*S*TAP (SEQ ID NO: 199560) | 4 | 400 |
| K*S[NG]*[GS][GS] | 13 | 3200 |
| R*SN*NA (SEQ ID NO: 199561) | 4 | 400 |
| RMP**GA (SEQ ID NO: 199562) | 4 | 400 |
| [RW][ANP]N[AKS]**A | 14 | 7200 |
| KT**SGG (SEQ ID NO: 199563) | 4 | 400 |
| R*P*TGA (SEQ ID NO: 199564) | 4 | 400 |
| N**QRSA (SEQ ID NO: 199520) | 4 | 400 |
| K*[NQ]ST*A (SEQ ID NO: 199565) | 8 | 800 |
| MKN[TV]**A (SEQ ID NO: 199566) | 9 | 800 |
| KGNN**G (SEQ ID NO: 199567) | 5 | 400 |
| TKP**AA (SEQ ID NO: 199568) | 4 | 400 |
| TR*GT*G (SEQ ID NO: 199569) | 4 | 400 |
| KN*G*SA (SEQ ID NO: 199570) | 5 | 400 |
| K*ASS*A (SEQ ID NO: 199571) | 4 | 400 |
| KLNS**G (SEQ ID NO: 199572) | 4 | 400 |
| N**SRQG (SEQ ID NO: 199528) | 4 | 400 |
| QNR*A*P (SEQ ID NO: 199573) | 4 | 400 |
| R*P*AGA (SEQ ID NO: 199574) | 4 | 400 |
| RT**STP (SEQ ID NO: 199575) | 4 | 400 |
| SRTT*NG (SEQ ID NO: 199576) | 4 | 20 |
| T*RT*NA (SEQ ID NO: 199577) | 4 | 400 |
| TK*NS*G (SEQ ID NO: 199578) | 4 | 400 |
| TRP**AA (SEQ ID NO: 199579) | 4 | 400 |

TABLE 4
7-mer motifs enriched for THLE binding.

| | Reported | Possible |
|---|---|---|
| Motifs | Variants | Variants |
| QSRT**P (SEQ ID NO: 199580) | 4 | 400 |
| K[HP][NT]*P*[NS] | 12 | 3200 |
| RN*P*TS (SEQ ID NO: 199581) | 4 | 400 |
| K**GPKD (SEQ ID NO: 199582) | 5 | 400 |
| NRGQ**A (SEQ ID NO: 199583) | 4 | 400 |
| A**NEKR (SEQ ID NO: 199584) | 4 | 400 |
| TG**RSG (SEQ ID NO: 199585) | 4 | 400 |
| TAN*R*G (SEQ ID NO: 199586) | 4 | 400 |
| T*TNR*G (SEQ ID NO: 199587) | 4 | 400 |
| QSR**NP (SEQ ID NO: 199588) | 4 | 400 |
| T*T*RSG (SEQ ID NO: 199516) | 4 | 400 |
| K**NPAN (SEQ ID NO: 199589) | 4 | 400 |
| KM**PKD (SEQ ID NO: 199590) | 4 | 400 |
| MSRN**A (SEQ ID NO: 199591) | 4 | 400 |
| NDA**KK (SEQ ID NO: 199592) | 4 | 400 |
| QR*GP*M (SEQ ID NO: 199593) | 4 | 400 |
| RS*P*NA (SEQ ID NO: 199594) | 4 | 400 |
| T*S*RMG (SEQ ID NO: 199532) | 4 | 400 |
| T*TSR*G (SEQ ID NO: 199511) | 4 | 400 |
| VAR*H*G (SEQ ID NO: 199595) | 4 | 400 |

TABLE 5
7-mer motifs enriched for THLE transduction.

| | Reported | Possible |
|---|---|---|
| Motifs | Variants | Variants |
| [GKMFSTYV][NGKST]**[ARNGKSV] | 613 | 672000 |
| [AQMFST]G | | |
| [RNQKTY]*[NQGKPST][ANGPST]* | 603 | 504000 |
| [NQGTV]G | | |
| [QLMFPSTYV]K*[GPSTV]*[QGST]G | 202 | 72000 |
| [RNQGKMPTY][ARNQGPST] | 1338 | 1612800 |
| [ARNQGKPT]**[AGKMSTV]G | | |
| [RQGMTV]*[RQGKPST][QGPST]* | 812 | 2016000 |
| [ARQMPS][DGPS] | | |
| [RNQGKMPST]*[AQGKMPSTV] | 1315 | 1555200 |
| [RNQGST][ARNQGKST]*G | | |
| [NGKTV]**[RNQGPSTV][ARQGKMST] | 2062 | 4096000 |
| [ANQGKFST][AGPS] | | |
| [RNGKMFSTY][ANQLKMPT]* | 1289 | 3225600 |
| [ARDQGSTV][ARQGKTV]*[GS] | | |
| [RQGKMFTV][ARNQGPST][RGKPST]* | 1343 | 1689600 |
| [^DCEILFPWY]*G | | |
| [RNQGIKMST][RDLKMFST][ANDQHMPST] | 2136 | 14515200 |
| **[ARNGKMSV][ANDEKPS] | | |
| [RNQGIKFV]*[ARNQPST]*[ARGKMTV] | 1151 | 3763200 |
| [ARNQGT][DEGS] | | |
| [^ARNCEHILP][ANQGKMPST] | 3823 | 12830400 |
| [RNQGHKMST][ARNQGKPTV]**[ARGS] | | |
| [RNQGIMFT][RKPSTV][AQGHKPST]* | 1492 | 4300800 |
| A[RNIKST]*[EGPS] | | |
| [NQKMFSTV][RKS]**[AGST][ARNDKSTV] | 483 | 1228800 |
| [ADEK] | | |
| [RNQKMSTY][RNGKST]*[ARNQMPSTV]* | 2032 | 8640000 |
| [^CEHILKFPWV][ADPST] | | |
| K*[GMP][QST]*[AQM][GS] | 40 | 21600 |
| [RQKTY]*[ARQKPST][QGST][ANGST]* | 617 | 1120000 |
| [ADPS] | | |
| [NQFTY]*[KST]*[ARGS][AQGKMTV]G | 203 | 168000 |
| [RT][RPT]**[ANST][NQT][APS] | 88 | 86400 |
| [RNKMPY][ARNGLKS]*[ANQKST]* | 505 | 504000 |
| [AQGSV]G | | |
| [RNQSY][KPST]**[RNGMS][QG]G | 126 | 80000 |
| [RKT][PS]*[RPST][QGS]*A | 60 | 28800 |
| [RNQEKMS][RNQT][RGIPST][NQGKPT] | 606 | 2016000 |
| **[AEGFP] | | |
| [NQT]K*[AGPST][GMS]*[AS] | 85 | 36000 |
| [RNK][RDLS][RNPT]S**[GP] | 32 | 38400 |
| [RK]*[NP][GV]*[GT]A | 18 | 6400 |
| [RQGMFSY][KS][NQGMPS]**[NQGS] | 299 | 268800 |
| [GS] | | |
| [MFPV]K[ANPS]S**[GS] | 42 | 12800 |
| [MF]K[NT]**[QPT]A | 17 | 4800 |
| [GFT]*[GKT]*[RNQK][KSTV][GS] | 92 | 115200 |
| [QGM][RKS][NGPS]*[AST]*A | 94 | 43200 |
| [RT]*[KP]*[QT][QG]A | 12 | 6400 |
| [GM][HP]K**[AP]A | 10 | 3200 |
| [TV]*[NK]*S[NS][AS] | 23 | 6400 |
| [QGMT][RK]*[GPTV][AS]*G | 63 | 25600 |
| [RV][KP]*NT*G | 9 | 1600 |
| M*SKS*A (SEQ ID NO: 199596) | 4 | 400 |
| A**NEKR (SEQ ID NO: 199584) | 4 | 400 |
| PR*AT*G (SEQ ID NO: 199546) | 4 | 400 |
| NK[AGP][AQV]**[DGS] | 28 | 10800 |
| [MS]**K[ST][GT]G | 10 | 3200 |
| [RQK][ARF]**T[AGS]G | 26 | 10800 |
| [QF]K**[AN][QS]s | 10 | 3200 |
| [NMT]K[ANP]*G*G | 19 | 3600 |
| R**KEEK (SEQ ID NO: 199597) | 4 | 400 |
| [RGV][KP]*[AS][ST]*[AS] | 35 | 19200 |
| NK[NS]*G*A (SEQ ID NO: 200021) | 8 | 800 |
| QK*GT*G (SEQ ID NO: 199555) | 5 | 400 |
| TK*NS*G (SEQ ID NO: 199578) | 4 | 400 |
| TGK**[AT]A (SEQ ID NO: 199598) | 8 | 800 |
| R**AGVG (SEQ ID NO: 199599) | 4 | 400 |
| [NT]K*[TV]*KD | 9 | 1600 |
| MKS**TG (SEQ ID NO: 199600) | 4 | 400 |
| G*KSV*G (SEQ ID NO: 199601) | 4 | 400 |
| [KM]*[NS]*[GS][NG]A | 25 | 6400 |
| TNK**QG (SEQ ID NO: 199602) | 4 | 400 |
| K[DKPS][RNDQ]*[GK]*[AD] | 22 | 25600 |
| NAR*T*G (SEQ ID NO: 199603) | 4 | 400 |
| MR*NQ*G (SEQ ID NO: 199604) | 4 | 400 |
| [FT]*K[AT]*QA | 10 | 1600 |
| KT**GGA (SEQ ID NO: 199605) | 4 | 400 |
| V*NKV*G (SEQ ID NO: 199606) | 4 | 400 |
| FKG**SA (SEQ ID NO: 199607) | 4 | 400 |
| FNK**QG (SEQ ID NO: 199608) | 4 | 400 |
| GPK*T*A (SEQ ID NO: 199609) | 4 | 400 |
| KQS*S*P (SEQ ID NO: 199610) | 4 | 400 |
| [NS]*KG*[ST]A | 9 | 1600 |
| GP*G*KG (SEQ ID NO: 199611) | 4 | 400 |
| RDKS**A (SEQ ID NO: 199612) | 4 | 400 |
| R*S*STP (SEQ ID NO: 199506) | 4 | 400 |
| KT**AGG (SEQ ID NO: 199613) | 4 | 400 |
| FK**TQG (SEQ ID NO: 199614) | 4 | 400 |
| FGK**TG (SEQ ID NO: 199615) | 5 | 400 |
| NKTG**A (SEQ ID NO: 199616) | 4 | 400 |
| TK**TYG (SEQ ID NO: 199617) | 5 | 400 |
| TKPG**G (SEQ ID NO: 199618) | 4 | 400 |
| KP*T*GG (SEQ ID NO: 199619) | 4 | 400 |
| TGK**SA (SEQ ID NO: 199620) | 4 | 400 |
| KPN*S*A (SEQ ID NO: 199621) | 7 | 400 |
| TGKS**A (SEQ ID NO: 199622) | 5 | 400 |
| T*RT*SA (SEQ ID NO: 199513) | 4 | 400 |
| V*KS*TG (SEQ ID NO: 199623) | 4 | 400 |
| F*K*TSA (SEQ ID NO: 199624) | 4 | 400 |
| FGK**SG (SEQ ID NO: 199625) | 4 | 400 |
| K*GG*AG (SEQ ID NO: 199626) | 4 | 400 |
| KPS*N*A (SEQ ID NO: 199627) | 4 | 400 |
| QR*NS*A (SEQ ID NO: 199551) | 4 | 400 |
| R**QGGG (SEQ ID NO: 199501) | 4 | 400 |
| RP*N*GG (SEQ ID NO: 199628) | 4 | 400 |
| TK**TQG (SEQ ID NO: 199629) | 4 | 400 |
| TKSS**A (SEQ ID NO: 199630) | 4 | 400 |
| V*KSQ*G (SEQ ID NO: 199631) | 4 | 400 |

TABLE 6
7-mer motifs enriched for HepG2 binding.

| | Reported | Possible |
|---|---|---|
| Motifs | Variants | Variants |
| [ARDTV]**[NKP][REG][QEGK][RGK] | 42 | 216000 |
| NAR**GG (SEQ ID NO: 199632) | 4 | 400 |
| N[AR][RG]Q**[AG] | 9 | 3200 |
| VR**SSA (SEQ ID NO: 199633) | 4 | 400 |
| TG**RSG (SEQ ID NO: 199585) | 5 | 400 |
| R*KDS*A (SEQ ID NO: 199634) | 4 | 400 |
| T*T*RSG (SEQ ID NO: 199516) | 4 | 400 |
| T*TNR*G (SEQ ID NO: 199587) | 4 | 400 |
| T*TSR*G (SEQ ID NO: 199511) | 5 | 400 |
| G**SIRS (SEQ ID NO: 199635) | 4 | 400 |
| GQSS**R (SEQ ID NO: 199636) | 4 | 400 |
| M*KP*RD (SEQ ID NO: 199637) | 4 | 400 |
| NDA**KK (SEQ ID NO: 199592) | 4 | 400 |
| NK*DR*G (SEQ ID NO: 199638) | 4 | 400 |
| QRP*A*A (SEQ ID NO: 199639) | 4 | 400 |
| SP**RGG (SEQ ID NO: 199640) | 4 | 400 |
| V*N*SSA (SEQ ID NO: 199641) | 4 | 400 |

TABLE 7
7-mer motifs enriched for HepG2 transduction.

| | Reported | Possible |
|---|---|---|
| Motifs | Variants | Variants |
| [NDGILST]K*[RNGHKPSTV]*[ANDGKFSY] | 442 | 1008000 |
| [ADQST] | | |
| [RQGKMFPS][RNGHPST][RQGKPST]** | 1786 | 5644800 |
| [ARQGMPSTV][AEGS] | | |
| [MFTYV]K**[ANST][AQSTY]G | 133 | 40000 |
| [NQGKMFSYV][RQGLKS]*[ANDQKPS] | 866 | 1360800 |
| [ARNQGMSTV]*G | | |
| [RDQEK][ARGLMST]*[ANGKPT]*[RNKMS] | 278 | 1680000 |
| [AELM] | | |
| [\hat{ }ARDCEHFPWV]K[ANDQMPST]**[RQGKMT] | 684 | 768000 |
| [NDEG] | | |
| [\hat{ }ACGHILPW][RNDQGLKS][\hat{ }DCELKFWYV] | 5154 | 38016000 |
| [\hat{ }RNCEILMFWY]**[RNDEGKFPS] | | |
| [NKMSTW][ARKSTV][NQGPS][AQGKSV]**A | 293 | 432000 |
| [RNQGKTYV]*[ANQGMPST][ANQGKST]* | 1991 | 4300800 |
| [AQGKMS][AEGS] | | |
| [NQGIKFSTY]K[NDQHPS]*[ARNGKT]* | 442 | 648000 |
| [ADEPS] | | |
| [NMFTYV][KPS]*[AQGKPTV]*[AQGKS] | 551 | 1008000 |
| [DEGS] | | |
| [\hat{ }ADCEHILPW][ARNQGKFPT]** | 4152 | 14968800 |
| [ARNQKMSTY][ARNQGMS][ADEGPS] | | |
| [NQIKFY][ADQLK][ANGHM]**[ARQK] | 255 | 960000 |
| [NDGK] | | |
| [ARNDQGSTV]**[RNQGKP][RQEGKMT] | 822 | 3628800 |
| [NEGKFS][ARGK] | | |
| [NQGMT]K*[AQGPSTV][AGMST]*[ANGS] | 540 | 280000 |
| [DQKS][QKMST]**[AGST]K[DEK] | 73 | 96000 |
| [NQWV]K[GST]**SG | 27 | 4800 |
| K**[ANQS][ANQT][ADGK][ARDEG] | 105 | 128000 |
| K**[NQSTY]S[AQGKT][EGPS] | 71 | 40000 |
| [RNQGT]*[AGST][QGKT][RGKT]*G | 179 | 128000 |
| [RNQGMST][RNQGKPSV][ANGPST]* | 1668 | 3225600 |
| [ARQGIKST]*[AGS] | | |
| [RNQGKTV][RNQGKPS]*[ANQGSTV] | 1885 | 3292800 |
| [NGKMST]*[AGPS] | | |
| [QGKMT][GFP]K*[NQEGTY]*[AQGY] | 137 | 144000 |
| [NT][AD]*K[RS]*[LP] | 8 | 6400 |
| [NQMFTV]*K*[AQGMS][AQGKTV][EG] | 200 | 144000 |
| [RGIKF]*[ARNQGT]*[AKMT][ARGKS] | 268 | 720000 |
| [DEG] | | |
| [QMFT][RNQGMPS][RKP][ANGST]**G | 232 | 168000 |
| [NGMFT][NGKS]K[DQT]**[GSW] | 89 | 72000 |
| [GKFTY]*[AKPT]*[RNQST][AGKST][GS] | 315 | 400000 |
| [QFS]K[GT]**[ST]A | 23 | 4800 |
| T[RNS][ARGK]**[RQGT][EG] | 39 | 38400 |
| T*N*SKG (SEQ ID NO: 199642) | 4 | 400 |
| [GSTYV]*K[QT][NGS]*[GS] | 62 | 24000 |
| [KMFPSY][LK]*S*[ANQIST]G | 58 | 28800 |
| K[KS][DST]*S*G | 14 | 2400 |
| [RNQMPTV]*[GKT]S[ARQKS]*[AGS] | 134 | 126000 |
| G*K*TAA (SEQ ID NO: 199643) | 4 | 400 |
| K*[ANS][GS][GT]*[ADP] | 36 | 14400 |
| [RQGKP]*[GKP][NDPT][AQMS]*A | 92 | 96000 |
| [MFT]*K[APT]*[RQ][ADS] | 32 | 21600 |
| M*SKS*A (SEQ ID NO: 199596) | 6 | 400 |
| TK[NMP]**[ANQ]A | 21 | 3600 |
| [NQGS]K**G[QGF]G | 29 | 4800 |
| [NQF][QS]K*[AS]*G | 21 | 4800 |
| GK[GT][QT]**G | 11 | 1600 |
| [RGT][DGP]K[NQS]**A | 26 | 10800 |
| TGK**[AST]A (SEQ ID NO: 199644) | 12 | 1200 |
| K[DS][RN]*G*[AG] | 11 | 3200 |
| [GMPTV]*K[ASTV]*[QST]G | 74 | 24000 |
| [ST]K*[AQ]*[QS]A | 18 | 3200 |
| K*A[TV]*[RK]D | 11 | 1600 |
| [MF]KN**[QP]A | 8 | 1600 |
| Q[RQY][KP][ST]**A | 16 | 4800 |
| [NT]*KS*[ST][AP] | 16 | 3200 |
| TG**MKG (SEQ ID NO: 199645) | 4 | 400 |
| [QT][RG]*S*[KT][AP] | 12 | 6400 |
| [FV]*K*TSA (SEQ ID NO: 199646) | 8 | 800 |
| QK[GT][NS]**A | 8 | 1600 |
| T**KS[GS]G (SEQ ID NO: 200022) | 8 | 800 |
| [NP]K*S*GG (SEQ ID NO: 199647) | 10 | 800 |
| NK**G[ST]A (SEQ ID NO: 199648) | 8 | 800 |
| [QG]KN**SA (SEQ ID NO: 199649) | 10 | 800 |
| TKS**SN (SEQ ID NO: 199650) | 4 | 400 |
| MKNT**A (SEQ ID NO: 199651) | 4 | 400 |
| Q*K[GS]*[NV]G | 11 | 1600 |
| Q**KSNA (SEQ ID NO: 199652) | 4 | 400 |
| NN**SKG (SEQ ID NO: 199653) | 5 | 400 |
| M*N*GNA (SEQ ID NO: 199654) | 4 | 400 |
| KTQ*S*S (SEQ ID NO: 199655) | 4 | 400 |
| T**SGTP (SEQ ID NO: 199656) | 4 | 400 |
| RS*S*GG (SEQ ID NO: 199522) | 4 | 400 |
| MG*R*GA (SEQ ID NO: 199514) | 4 | 400 |
| [QT]*K[NS][ST]*G | 15 | 3200 |
| Q*KP*QG (SEQ ID NO: 199657) | 4 | 400 |
| KA**GDR (SEQ ID NO: 199658) | 4 | 400 |
| V*N*SSA (SEQ ID NO: 199641) | 4 | 400 |
| K*TG*RE (SEQ ID NO: 199659) | 4 | 400 |
| M*K*TSG (SEQ ID NO: 199660) | 4 | 400 |
| T*K*SSA (SEQ ID NO: 199661) | 4 | 400 |
| YQK*S*S (SEQ ID NO: 199662) | 4 | 400 |
| MK*T*TA (SEQ ID NO: 199663) | 4 | 400 |
| KPN*S*A (SEQ ID NO: 199621) | 5 | 400 |
| TK**GMG (SEQ ID NO: 199664) | 5 | 400 |
| MPK*S*S (SEQ ID NO: 199665) | 5 | 400 |
| DL*KP*K (SEQ ID NO: 199666) | 4 | 400 |
| KGNT**A (SEQ ID NO: 199667) | 4 | 400 |
| MK*G*TG (SEQ ID NO: 199668) | 4 | 400 |
| N**STMA (SEQ ID NO: 199669) | 4 | 400 |
| NK**SDK (SEQ ID NO: 199670) | 4 | 400 |
| T*K*SNS (SEQ ID NO: 199671) | 4 | 400 |
| T*KG*VG (SEQ ID NO: 199672) | 4 | 400 |
| TKQ**SA (SEQ ID NO: 199673) | 4 | 400 |
| V*NKV*G (SEQ ID NO: 199606) | 4 | 400 |

TABLE 8
7-mer motifs enriched for C57 brain
endothelia binding.

| | Reported | Possible |
|---|---|---|
| Motifs | Variants | Variants |
| KQ**AKD (SEQ ID NO: 199674) | 4 | 400 |
| NR**GGA (SEQ ID NO: 199675) | 5 | 400 |
| KKD**RD (SEQ ID NO: 199676) | 4 | 400 |
| QRNS**A (SEQ ID NO: 199677) | 4 | 400 |
| NRGQ**A (SEQ ID NO: 199583) | 5 | 400 |
| KKD**KD (SEQ ID NO: 199678) | 4 | 400 |
| R*KDS*A (SEQ ID NO: 199634) | 4 | 400 |
| RN**SGA (SEQ ID NO: 199679) | 4 | 400 |
| RQ*PT*A (SEQ ID NO: 199515) | 4 | 400 |

TABLE 9
7-mer motifs enriched for C57 brain endothelia transduction.

| | Reported | Possible |
|---|---|---|
| Motifs | Variants | Variants |
| [QKMPT][NKMPT][ARGKS][AQGT]**[AG] | 230 | 400000 |
| [TV]KPS**G (SEQ ID NO: 199680) | 8 | 800 |
| [QT][KS]*G[NKT]*G | 22 | 4800 |
| [KMT][RT][GS]**[NMT]G | 24 | 14400 |
| [RQMT][RQGK][QPST]*[RGTV]*G | 84 | 102400 |
| [GM]K[PS]**[NT]G | 13 | 3200 |
| KPT**MA (SEQ ID NO: 199681) | 4 | 400 |
| [QGKT]*[GPT][NQGT][RKT]*G | 65 | 57600 |
| [KT][KS]SS**[AG] | 8 | 3200 |
| [NGS][AK]*[GKS][NST]*[AP] | 35 | 43200 |
| [GK]*T*[RT][QS]G | 8 | 3200 |
| [QKT][GKF]**[RGT][GSY]G | 38 | 32400 |
| [QKS][RGKT]*[NT][ANGT]*G | 44 | 38400 |
| T**NRGG (SEQ ID NO: 199556) | 4 | 400 |
| [NK][RY]*T*[TV]G | 8 | 3200 |
| Q*PTS*A (SEQ ID NO: 199682) | 4 | 400 |
| [FS][NG]K*[GS]*G | 10 | 3200 |
| QR**STA (SEQ ID NO: 199683) | 4 | 400 |
| [QMS]K*G*[NT]G | 14 | 2400 |
| K*ST*NG (SEQ ID NO: 199684) | 5 | 400 |
| QRSS**G (SEQ ID NO: 199685) | 4 | 400 |
| [KV][NK]*[GV]*S[AG] | 12 | 6400 |
| N[RT][AR]*[NT]*A | 10 | 3200 |
| KN*GQ*G (SEQ ID NO: 199686) | 5 | 400 |
| K*S*QSA (SEQ ID NO: 199687) | 5 | 400 |
| [RN][ST][KS]*S*[GP] | 12 | 6400 |
| QKN*A*A (SEQ ID NO: 199688) | 4 | 400 |
| RP**MAG (SEQ ID NO: 199689) | 4 | 400 |
| N**STMA (SEQ ID NO: 199669) | 4 | 400 |
| N*K*GGG (SEQ ID NO: 199690) | 4 | 400 |
| KTT**GG (SEQ ID NO: 199691) | 5 | 400 |
| YKQ**GG (SEQ ID NO: 199692) | 4 | 400 |
| N*K*SNP (SEQ ID NO: 199693) | 4 | 400 |
| NKN*G*A (SEQ ID NO: 199694) | 5 | 400 |
| S**KTGG (SEQ ID NO: 199695) | 5 | 400 |
| GN*VK*G (SEQ ID NO: 199696) | 4 | 400 |
| M*SKS*A (SEQ ID NO: 199596) | 4 | 400 |
| MK**SAG (SEQ ID NO: 199697) | 4 | 400 |
| N*K*SQG (SEQ ID NO: 199698) | 4 | 400 |
| NRPS**P (SEQ ID NO: 199699) | 4 | 400 |
| QKT**GG (SEQ ID NO: 199700) | 4 | 400 |
| RS*Q*QS (SEQ ID NO: 199701) | 4 | 400 |
| T*RT*GG (SEQ ID NO: 199702) | 4 | 400 |

TABLE 10
7-mer motifs enriched for human brain endothelia binding.

| | Reported | Possible |
|---|---|---|
| Motifs | Variants | Variants |
| QSRT**P (SEQ ID NO: 199580) | 4 | 400 |
| MSRN**A (SEQ ID NO: 199591) | 4 | 400 |
| KKD**RD (SEQ ID NO: 199676) | 4 | 400 |
| NRGQ**A (SEQ ID NO: 199583) | 5 | 400 |
| KKD**KD (SEQ ID NO: 199678) | 4 | 400 |
| KKD*K*D (SEQ ID NO: 199703) | 4 | 400 |
| NR**GGA (SEQ ID NO: 199675) | 4 | 400 |
| R*KDS*A (SEQ ID NO: 199634) | 4 | 400 |

TABLE 11
7-mer motifs enriched for human brain endothelia transduction.

| | Reported | Possible |
|---|---|---|
| Motifs | Variants | Variants |
| NR**GGA (SEQ ID NO: 199675) | 4 | 400 |
| [STY][KP]*[QS][GSV]*G | 20 | 14400 |
| [GM]**[GT][GK][NF] G | 11 | 6400 |
| QRPN**A (SEQ ID NO: 199704) | 5 | 400 |
| [QS]K[GT]*S*G | 10 | 1600 |
| Q*K*AQG (SEQ ID NO: 199705) | 4 | 400 |
| Q*[GK][NS][KS]*G | 12 | 3200 |
| [QY][RK]P*[AT]*[AP] | 12 | 6400 |
| [QM]K*G*TG (SEQ ID NO: 199706) | 8 | 800 |
| TK*N*QG (SEQ ID NO: 199707) | 5 | 400 |
| K*ST*SG (SEQ ID NO: 199708) | 4 | 400 |
| KN*G*SA (SEQ ID NO: 199570) | 4 | 400 |
| KN*GQ*G (SEQ ID NO: 199686) | 5 | 400 |
| MK**SQG (SEQ ID NO: 199709) | 4 | 400 |
| TGT*R*G (SEQ ID NO: 199710) | 5 | 400 |
| GK*ST*A (SEQ ID NO: 199711) | 4 | 400 |
| MK*GS*G (SEQ ID NO: 199712) | 5 | 400 |
| MSK**AG (SEQ ID NO: 199713) | 5 | 400 |
| K*PTT*G (SEQ ID NO: 199714) | 4 | 400 |
| KP*T*GG (SEQ ID NO: 199619) | 4 | 400 |
| MP**SGS (SEQ ID NO: 199715) | 4 | 400 |
| Q*K*SNG (SEQ ID NO: 199716) | 4 | 400 |
| QKY*T*G (SEQ ID NO: 199717) | 4 | 400 |
| R*PS*QG (SEQ ID NO: 199718) | 4 | 400 |
| T**PTAG (SEQ ID NO: 199719) | 4 | 400 |
| TGKS**A (SEQ ID NO: 199622) | 4 | 400 |

TABLE 12
7-mer motifs enriched for human CMECD3 binding.

| | Reported | Possible |
|---|---|---|
| Motifs | Variants | Variants |
| N**SRQG (SEQ ID NO: 199528) | 4 | 400 |
| SP**RGG (SEQ ID NO: 199640) | 4 | 400 |
| NQ**RSA (SEQ ID NO: 199720) | 4 | 400 |
| QKY*T*G (SEQ ID NO: 199717) | 4 | 400 |
| S*QQR*G (SEQ ID NO: 199721) | 4 | 400 |
| MRG**MG (SEQ ID NO: 199505) | 5 | 400 |
| NR**GGA (SEQ ID NO: 199675) | 5 | 400 |
| NRGQ**A (SEQ ID NO: 199583) | 4 | 400 |
| T**NRGG (SEQ ID NO: 199556) | 4 | 400 |
| T*S*RMG (SEQ ID NO: 199532) | 4 | 400 |
| T*TNR*G (SEQ ID NO: 199587) | 4 | 400 |
| TAN*R*G (SEQ ID NO: 199586) | 4 | 400 |

TABLE 13
7-mer motifs enriched for human CMED3 transduction.

| | Reported | Possible |
|---|---|---|
| Motifs | Variants | Variants |
| [QKMFT][RNQP][RQKPS][ARDG]**G | 87 | 160000 |
| [RQGMSTY][ARNKP][RNGKPST]**[RNQGKMST][AEG] | 910 | 2352000 |
| [QGF][GPT][RK]*[NMS]*G | 26 | 21600 |
| [RK][NQ][PT]**[AT]G | 18 | 6400 |
| [RMT][RQGT][NPST]*[RQV]*G | 60 | 57600 |
| [KMST]*[NQGT][RQGS][RQT]*G | 69 | 76800 |
| [RNY][RKP]Q**[QGT][AG] | 28 | 21600 |
| [NQKT][RKP]**[NGS][NQGTV]A | 89 | 72000 |
| [RKMST][NGKPS]*[ARQS]*[ANQGTY][AS] | 178 | 480000 |
| [RKMP][NKS]*[ANQS]*[AGSV]G | 95 | 76800 |
| [RGMFT][NK]*[AGPV][NGKTV]*G | 71 | 80000 |
| [RKMTY]*[RKPST][AGST][GST]*[GPS] | 273 | 360000 |
| SK*GN*A (SEQ ID NO: 199722) | 4 | 400 |
| KP[AP]**G[AG] | 11 | 1600 |
| [NST][RK]*T*[NGV]G | 21 | 7200 |
| [RNT]*[GKT]*[ARGK][QMST]G | 62 | 57600 |
| [GK][NP][KS]*[NS]*[AS] | 15 | 12800 |
| QK*GT*G (SEQ ID NO: 199555) | 4 | 400 |
| [RQK]**[ANT][RT][GT]G | 30 | 14400 |
| [RK][NF]**[GTV]SG | 15 | 4800 |
| [GK][KP]*[SV]S*[NP] | 8 | 6400 |
| TG*NK*A (SEQ ID NO: 199723) | 5 | 400 |
| [NT][RT][PS][KS]**[AP] | 14 | 12800 |
| QKY*T*G (SEQ ID NO: 199717) | 4 | 400 |
| RS**TQS (SEQ ID NO: 199724) | 4 | 400 |
| [RN]*[NT][RS]*GG | 11 | 3200 |
| KTQ**AS (SEQ ID NO: 199725) | 4 | 400 |
| RS**GGG (SEQ ID NO: 199726) | 4 | 400 |
| KPP*T*G (SEQ ID NO: 199727) | 4 | 400 |
| [KY]*[QP]T*[GT]G | 12 | 3200 |
| S*TT*NG (SEQ ID NO: 199728) | 4 | 400 |
| KSPT**A (SEQ ID NO: 199729) | 4 | 400 |
| SRTT**G (SEQ ID NO: 199730) | 4 | 400 |
| [GY]K[QT][QT]**G | 14 | 3200 |
| Q**KSNA (SEQ ID NO: 199652) | 4 | 400 |
| K*NST*A (SEQ ID NO: 199731) | 4 | 400 |
| TRS*T*G (SEQ ID NO: 199732) | 4 | 400 |
| K*S*SGA (SEQ ID NO: 199733) | 4 | 400 |
| N**SRQG (SEQ ID NO: 199528) | 4 | 400 |
| VRP*T*G (SEQ ID NO: 199734) | 4 | 400 |
| Y*T*SKG (SEQ ID NO: 199735) | 4 | 400 |
| TR*VS*G (SEQ ID NO: 199736) | 5 | 400 |
| TG**RSG (SEQ ID NO: 199585) | 7 | 400 |
| K*P*SGG (SEQ ID NO: 199737) | 4 | 400 |
| KTS**GG (SEQ ID NO: 199738) | 4 | 400 |
| N**GQKG (SEQ ID NO: 199739) | 4 | 400 |
| N*GNR*A (SEQ ID NO: 199740) | 4 | 400 |
| QR*NS*A (SEQ ID NO: 199551) | 4 | 400 |
| QRP*S*A (SEQ ID NO: 199741) | 4 | 400 |
| R*QN*TG (SEQ ID NO: 199742) | 4 | 400 |
| RP*T*AP (SEQ ID NO: 199743) | 4 | 400 |
| SRTT*NG (SEQ ID NO: 199576) | 4 | 20 |
| TKSS**A (SEQ ID NO: 199630) | 4 | 400 |

### Example 8: Functional In Vivo Fitness

[0780] AAV libraries were screened to assess their in vivo biodistribution in mice (FIG. 15). Variants of AAV9 capsids modified at 588 site loop VIII with 7mer insertions were positively enriched for biodistribution or transduction of the indicated C57BL/6J mouse organ. Plotted sequences were also positively enriched for production fitness. Biodistribution/transduction fitness enrichment was measured by the fold change increase in abundance after screening in the indicated assay relative to its amount in the unscreened virus library. Enrichment was averaged across technical and biological replicates for each experiment.

[0781] Tables 14-24 below list 7-mer motifs found to be enriched for the indicated trait. In Tables 14-24 provided herein, “*” represents any amino acid, amino acids listed between brackets (“[ ]”) without the symbol “\hat{ }” represent the amino acids observed at a position, and amino acids listed between brackets (“[ ]”) and preceded by the symbol “\hat{ }” indicate amino acids not observed at the position. In Tables 14-24, “enriched” means a log 2 enrichment value of greater than 0.

TABLE 14
7-mer motifs enriched for liver biodistribution.

| | Reported | Possible |
|---|---|---|
| Motifs | Variants | Variants |
| [^{∧}ADCEGHILWY]*[^{∧}DCEGHILFWY] | 3195 | 3240000 |
| [ARNGKMPST\|[ARNQGISTV]*G | | |
| [^{∧}ADCEHILMWY][^{∧}DCEHILFPWY] | 3688 | 4400000 |
| [^{∧}RCEHILMFW]*[^{∧}NDCEHLFPWY]*G | | |
| [^{∧}ADCEHILMW][^{∧}CEGHIFWYV][^{∧}CEHILFPW] | 3883 | 5808000 |
| [^{∧}CEHILKMFWY]**G | | |
| [RNDQKMPV][ARNQMPST]**[ARNQGKST] | 3311 | 12902400 |
| [ARNDQGKTV][ARDIKPS] | | |
| [^{∧}ARDCEHILW][ARQGKPST]** | 2792 | 2851200 |
| [ARNQKMSTVI[ANQGKMTYVIG | | |
| [^{∧}ACEHILMFSW][^{∧}CEHIKFWYV]* | 8148 | 31944000 |
| [^{∧}DCQEHLFWY][^{∧}DCEHLFTWY]*[AEGLKP] | | |
| [RQKMSTV]**[ARNQKPSTV][ARNQGMSTV] | 2256 | 1814400 |
| [ARNQGSTVIG | | |
| [^{∧}RDCEHLPW][^{∧}CEHILMPSWV][^{∧}ANCEILMFWV] | 8875 | 47520000 |
| *[^{∧}DCQILMFWV]*[NDQEGMPSY] | | |
| [RNQGKMS][RQKST][^{∧}RDCEHILFWY]* | 2047 | 2940000 |
| [ARNMSTV]*[APS] | | |
| [^{∧}ADCEHLFPW]*[ARNQGPST][RQGKSTY]* | 2293 | 1971200 |
| [ANGKMSTV]G | | |
| [^{∧}ADCEHIK][^{∧}CQEHILFWY][ARNQGKMPS]** | 3429 | 4118400 |
| [ANQGKMSV]G | | |
| [^{∧}ADCEHPTWV][^{∧}ARCEIFWYV][^{∧}CILFTWY]* | 11347 | 50965200 |
| *[ARQGKPSTV][ANDQEGKMS] | | |
| [RNQGSTV]**[RNGKSTV][^{∧}ADCHLMFPWY] | 5260 | 12936000 |
| [^{∧}CHILKPWYV][AGKPSV] | | |
| [RNGKFTYV]*[ARNQGPST]*[ARNQKPSTV] | 2196 | 2073600 |
| [ADQGKMSTV]G | | |
| [ANQMFSTV]*K*[AQGST][ANQGMST]G | 421 | 112000 |
| [^{∧}ADCEHILW]*[?ACEHILFWYV] | 12565 | 30240000 |
| [ANQGKPSTV]*[^{∧}DCEHILKFWY][ANDGPSY] | | |
| [^{∧}ADCEHITW][^{∧}DCEGHIMFWY]* | 3249 | 4320000 |
| [ANQGMPSTV]*[^{∧}RDCEHLPTWY]G | | |
| [RNQILKFSV][QGKPST]T**[ARQGKMST] | 522 | 864000 |
| [ADEGS] | | |
| [^{∧}ACHILKW][^{∧}CEHILMFPWY] | 11213 | 57200000 |
| [^{∧}NDCELFWYV][^{∧}RNCEILMFWY]**[^{∧}CQHILKMPTY] | | |
| [RNQGKMSY][^{∧}RDCGHILMWY]** | 4166 | 10240000 |
| [ARGKMSTV][^{∧}NDCEHLPWYV][DGPS] | | |
| [^{∧}ARCEHILWY][ARQGKST]*[^{∧}CQEHILMFWY] | 4433 | 10780000 |
| [ARNGPST]*[NDGPS] | | |
| TK[ANQMST]**[QKS][NDS] | 50 | 21600 |
| [NQGKMST]*[ARNQGKPS][ARNQGPTV] | 2571 | 5017600 |
| [RNQHKMT]*[NGPS] | | |
| [NGFST]K**[ANGSTY][ANGMPT]A | 191 | 72000 |
| [RQMFS][RKPT]**[NQGT][NQS][NGS] | 324 | 288000 |
| [^{∧}ADCEHPTW][RNQLKMPST]*[^{∧}CEILKFWY] | 9173 | 45619200 |
| *[^{∧}CEHILPSWY][ANDQEKPS] | | |
| [QT]*[QT]R*QA | 9 | 1600 |
| [RNGT]*[RNGKST][ARNQGT][RNQGKMT]* | 1092 | 806400 |
| [AG] | | |
| [DQEMPST][ARGK]*[ARNQGKS]* | 979 | 3292800 |
| [ADQGKSY][ADLMPT] | | |
| [NGIKFTV]*[ARNGKTY]*[NQKMSTV] | 1746 | 4802000 |
| [ARNIKSV][ADEPS] | | |
| [RNQKMFST][RDQKS][RNQPST]*[AGS]*[AS] | 622 | 576000 |
| [RQGKS][QKST][RNQST]**[NT][GPS] | 281 | 240000 |
| K**[ANGSTY][QGMST][ANGKMT][ADEGP] | 457 | 360000 |
| [RKM][RNQGPS]*[ANQST][NQST]*[GS] | 477 | 288000 |
| [RQGIKT][PS][RKPS]*[ANGMT]*G | 168 | 96000 |
| [RQKM]*[NPS]*[AQGT][ANQGST][APS] | 461 | 345600 |
| [ADK]**[NGPST][AEGMST][ANQGKT][ARS] | 290 | 648000 |
| [QKMPTV]*[NKPS][QGKPT]S*A | 105 | 48000 |
| [RNQGST]*[RNQGKSV]*[RNQGK][AGKTV]G | 515 | 420000 |
| [NQGKT][RNK]*[ANGST][ANGMT]*A | 277 | 150000 |
| [RNQGKMY][RNQGS]*[NQGKS]*[AQGST] | 1049 | 700000 |
| [AG] | | |
| [NK]**G[QT][KS]G | 20 | 3200 |
| [RKMTY][RP][RNGKPS]*[ANQST]*[GPST] | 388 | 480000 |
| [QKMFPYV][RNGKPST][RNGPST] | 2021 | 2822400 |
| [ARDQGKST]**[GPS] | | |
| [RNQGKWV][ANQKPSTV][ARNQGKST] | 1476 | 2150400 |
| [AQGKST]**[AP] | | |
| TK*[GSTV]*[QGV]G | 30 | 4800 |
| T[RGS][RGKT]**[RNST][EGP] | 65 | 57600 |
| [RGV]P[RNK]*[QST]*A | 25 | 10800 |
| [RKMV]*[ANPST]S[GKST]*[DGPS] | 194 | 128000 |
| [NQMSTV][RNQGHK]**[ARGIKMST] | 1003 | 2073600 |
| [ARQKSV][ADE] | | |
| [NQK]*[NKT]*S[NV]G | 27 | 7200 |
| [RNQFT][RQK][QGKST]N**[APS] | 105 | 90000 |
| [NT][GK][NKMS]**[ANQT]A | 61 | 25600 |
| [RQK]*[ANQGPST][NGS][ANGKPT]*[AGP] | 759 | 453600 |
| [TYV]*[RK][QGT]S*[GPS] | 52 | 21600 |
| [NK][RNP][PT][NS]**[GP] | 34 | 19200 |
| K*[NG][AY]*KE | 11 | 1600 |
| [NQ]R[NQGT]**[NQT]A | 33 | 9600 |
| MKN*[GS]*G (SEQ ID NO: 199744) | 9 | 800 |
| [QGKM]*[GS]*[KS][NG][AG] | 56 | 25600 |
| [RNGMTYV][RGKS]*[AQKPS][NGS]*A | 227 | 168000 |
| [QMTYV][GK]*[NGKS]*TG | 58 | 16000 |
| [QKM][RKMS][NDP][GSTV]**A | 87 | 57600 |
| [NQSY]K*[QS][ANQSV]*G | 65 | 16000 |
| [QMT]RP**[AMS]A | 20 | 3600 |
| K*T[GI]*[RK][DE] | 12 | 3200 |
| [RQP]*[KPT][DQGS][AS]*A | 55 | 28800 |
| TKP**[AQ]A (SEQ ID NO: 199745) | 9 | 800 |
| T[RK]**[NGL][NMS][AG] | 39 | 14400 |
| K**Q[AS][GK][DS] | 11 | 3200 |
| RQ*[NP]T*A (SEQ ID NO: 199746) | 8 | 800 |
| [KS][GY]*T*[TV]G | 9 | 3200 |
| K*[QT][GT][GS]*[AS] | 27 | 6400 |
| RT*T*SA (SEQ ID NO: 199747) | 5 | 400 |
| K*A[NV]*[RS][DG] | 10 | 3200 |
| [NK]**Q[AR]S[AS] | 9 | 3200 |
| [QG][RP][KP]N**A | 10 | 3200 |
| [RT][GS]**[RN][ST]G | 21 | 6400 |
| MRPN**G (SEQ ID NO: 199748) | 4 | 400 |
| G*KSV*G (SEQ ID NO: 199601) | 4 | 400 |
| NK*T*SA (SEQ ID NO: 199749) | 5 | 400 |
| [NF]*[NK]*[NG]T[AS] | 14 | 6400 |
| [GK][KP][NQT]*[GS]*A | 27 | 9600 |
| MRT**SP (SEQ ID NO: 199750) | 4 | 400 |
| [NM]K*QT*[GS] | 10 | 1600 |
| GN**KNG (SEQ ID NO: 199751) | 4 | 400 |
| [NT][GT][RK]*N*A | 11 | 3200 |
| K*ASS*A (SEQ ID NO: 199571) | 4 | 400 |
| RT*GT*G (SEQ ID NO: 199752) | 5 | 400 |
| [RQS][AR][PT]**[NV][GS] | 26 | 19200 |
| RPT*S*[GS] (SEQ ID NO: 199753) | 8 | 800 |
| K**GKSA (SEQ ID NO: 199754) | 4 | 400 |
| [GV]KP**NA (SEQ ID NO: 199755) | 8 | 800 |
| TK*T*[KS][AD] | 11 | 1600 |
| TGK*G*A (SEQ ID NO: 199756) | 4 | 400 |
| KP*GT*G (SEQ ID NO: 199757) | 5 | 400 |
| RP*QQ*A (SEQ ID NO: 199758) | 4 | 400 |
| KPNN**P (SEQ ID NO: 199759) | 4 | 400 |
| TGK**SA (SEQ ID NO: 199620) | 4 | 400 |
| G**QKSG (SEQ ID NO: 199760) | 6 | 400 |
| TG**KTA (SEQ ID NO: 199761) | 4 | 400 |
| TN**RQG (SEQ ID NO: 199762) | 4 | 400 |
| TG*K*SG (SEQ ID NO: 199763) | 4 | 400 |
| I*AR*KE (SEQ ID NO: 199764) | 4 | 400 |
| N*K*NNG (SEQ ID NO: 199765) | 5 | 400 |
| R*S*STP (SEQ ID NO: 199506) | 5 | 400 |
| KGNN**G (SEQ ID NO: 199567) | 5 | 400 |
| TK*N*QG (SEQ ID NO: 199707) | 5 | 400 |
| G**QKGG (SEQ ID NO: 199766) | 4 | 400 |
| K*AT*KD (SEQ ID NO: 199767) | 4 | 400 |
| K*NQS*G (SEQ ID NO: 199768) | 4 | 400 |
| KPS*N*A (SEQ ID NO: 199627) | 4 | 400 |
| R*S*NVA (SEQ ID NO: 199769) | 4 | 400 |
| RP*GT*A (SEQ ID NO: 199770) | 4 | 400 |
| SRTT*NG (SEQ ID NO: 199576) | 4 | 20 |
| TKQ**SA (SEQ ID NO: 199673) | 4 | 400 |
| TS**RTP (SEQ ID NO: 199771) | 4 | 400 |

TABLE 15
7-mer motifs enriched for liver transduction.

| | Reported | Possible |
|---|---|---|
| Motifs | Variants | Variants |
| RQSA**T (SEQ ID NO: 199772) | 4 | 400 |
| RAHS**A (SEQ ID NO: 199773) | 4 | 400 |
| DG*K*KL (SEQ ID NO: 199774) | 4 | 400 |
| NR*A*DK (SEQ ID NO: 199775) | 4 | 400 |
| G*N*ANR (SEQ ID NO: 199776) | 4 | 400 |
| RQ**NST (SEQ ID NO: 199777) | 4 | 400 |
| [RKT][STV][RQE]**R[ADE] | 18 | 32400 |
| T*GG*RN (SEQ ID NO: 199778) | 4 | 400 |
| Q*G*VRG (SEQ ID NO: 199779) | 4 | 400 |
| MDK**QR (SEQ ID NO: 199780) | 4 | 400 |
| NGG**GR (SEQ ID NO: 199781) | 4 | 400 |
| V*RQ*AG (SEQ ID NO: 199782) | 4 | 400 |
| L*REG*R (SEQ ID NO: 199783) | 4 | 400 |
| QAG**RG (SEQ ID NO: 199784) | 4 | 400 |
| QR*VV*A (SEQ ID NO: 199785) | 4 | 400 |
| RE**ARG (SEQ ID NO: 199786) | 4 | 400 |
| RQMA**A (SEQ ID NO: 199787) | 4 | 400 |
| S**REIR (SEQ ID NO: 199788) | 4 | 400 |
| TK*R*DT (SEQ ID NO: 199789) | 4 | 400 |
| V*R*SAG (SEQ ID NO: 199790) | 4 | 400 |
| V*RS*GG (SEQ ID NO: 199791) | 4 | 400 |
| VQR*S*G (SEQ ID NO: 199792) | 4 | 400 |

TABLE 16
7-mer motifs enriched for heart biodistribution.

| | Reported | Possible |
|---|---|---|
| Motifs | Variants | Variants |
| [RNGPS]*[GKSTY][RNGKST]*[ANGMSTV]A | 347 | 420000 |
| [RNGKST][NQGKP]*[NQGKPS][NQKMSTV]*A | 505 | 504000 |
| K**[AS][AS][AK][EPS] | 18 | 9600 |
| [RNQGKPSTV][ARNGKPSTV][ANDQGPSTY][NQGKPST]** | 3694 | 10206000 |
| [AMPSV] | | |
| [RQGKPST][RQLKPT][NDQST]*[ANQGSV]*[AGSV] | 1057 | 2016000 |
| [RGKMST][NKPST]**[AQGKSTV][ANDQG][RDGPS] | 670 | 2100000 |
| [RKMPST][ARGKPST][ANQPSTYV]**[ARNGKMST][ADMPS] | 1643 | 5376000 |
| [NDGPT]K*[NQGKPT]*[NQG]A | 84 | 36000 |
| [KP][RNGPT]*[QGST][ANQT]*[GPS] | 159 | 192000 |
| [QGPS][QK]**[ANST][GMST]A | 96 | 51200 |
| [NGPT][NQGK][NKV]**[ANGST]A | 106 | 96000 |
| [NPST]*[NK][AQKT]*[QS][PS] | 54 | 51200 |
| [RNGK]*[NQST][ANQGKST][ARNGPT]*A | 335 | 268800 |
| [RNQPST][QGK]*S*[ANQGKS][GP] | 88 | 86400 |
| K[NPT]*[ANGS]*[QTV]A | 40 | 14400 |
| [RQPT][NDGKT][KS][AGST]**A | 72 | 64000 |
| [RNQK][PST][NQKT]**[NQT][APS] | 214 | 172800 |
| [KP][RQP]*T[GT]*A | 14 | 4800 |
| [RKP][QS][NGKPS]*[GT]*A | 48 | 24000 |
| K*[NS][AQGT]*[QGS]A | 34 | 9600 |
| [RN][ANSV][NGK]**[QMV]G | 24 | 28800 |
| [NK][KST]**[NGP][AQGT]A | 60 | 28800 |
| [NGK]*[QKT]*[NQGP][QGMTV][AGS] | 199 | 216000 |
| [QPST]K*[NGPS][AMST]*[AG] | 105 | 51200 |
| [KT][RT]*SG*[PV] | 9 | 3200 |
| KQ[GT][QT]**A | 10 | 1600 |
| [NKMT]*[RNQPS][NGK][ARGT]*[GMPV] | 130 | 384000 |
| K*N*[NG][NGV]A | 14 | 2400 |
| R[PS]*[PS]G*A | 9 | 1600 |
| [GST][QGS]K*N*A | 14 | 3600 |
| [KS]*[NT]*[GS][IS][AP] | 23 | 12800 |
| NKPA**S (SEQ ID NO: 199793) | 5 | 400 |
| [GKPS][RKST]*[AQS]*[NS][AGS] | 109 | 115200 |
| [NK]**[NPST][GPT][ANM]A | 51 | 28800 |
| [NQP]*K[PST][ST]*A | 25 | 7200 |
| [PT]*KG[AG]*A | 9 | 1600 |
| SK[MT]**Q[AP] | 12 | 1600 |
| NTR**SA (SEQ ID NO: 199503) | 4 | 400 |
| PKS**SG (SEQ ID NO: 199794) | 4 | 400 |
| TK*PS*S (SEQ ID NO: 199795) | 5 | 400 |
| [NG]*K[ST][QT]*[GP] | 21 | 6400 |
| FGKQ**S (SEQ ID NO: 199796) | 4 | 400 |
| [NQ][RKPSTV][ARNKT]*[NGT]*[AGM] | 152 | 216000 |
| [RK]*[NT][NS]*[NS]P | 26 | 6400 |
| K*N[QT]S*A (SEQ ID NO: 199797) | 9 | 800 |
| [KMS]**[GS][AN][NQT][AG] | 45 | 28800 |
| [NQ]K*[AT][AG]*A | 12 | 3200 |
| KQ**AKD (SEQ ID NO: 199674) | 4 | 400 |
| K*[PT]S*[AQG]A | 18 | 2400 |
| [NMS]*K[PS]*[NG]G | 19 | 4800 |
| NAKS**G (SEQ ID NO: 199798) | 5 | 400 |
| KQ**TQA (SEQ ID NO: 199799) | 5 | 400 |
| [NK][ST][NK]*[AT]*P | 12 | 6400 |
| K*TQ*GA (SEQ ID NO: 199800) | 4 | 400 |
| T**QSGF (SEQ ID NO: 199801) | 4 | 400 |
| KTQ*T*G (SEQ ID NO: 199802) | 4 | 400 |
| QK**GAP (SEQ ID NO: 199803) | 4 | 400 |
| SK**NAA (SEQ ID NO: 199804) | 4 | 400 |
| K*AT*KD (SEQ ID NO: 199767) | 4 | 400 |
| R*N*ANP (SEQ ID NO: 199805) | 4 | 400 |
| GKQ*S*P (SEQ ID NO: 199806) | 4 | 400 |
| PQKS**A (SEQ ID NO: 199807) | 4 | 400 |
| N[GK]*[KT]*SA | 9 | 1600 |
| SQ**TNP (SEQ ID NO: 199808) | 4 | 400 |
| PR*Q*SP (SEQ ID NO: 199809) | 5 | 400 |
| NG*R*TP (SEQ ID NO: 199810) | 4 | 400 |
| TKM**QA (SEQ ID NO: 199811) | 4 | 400 |
| NK*TN*S (SEQ ID NO: 199812) | 5 | 400 |
| N*K*NNG (SEQ ID NO: 199765) | 5 | 400 |
| PK*GN*A (SEQ ID NO: 199813) | 5 | 400 |
| FQKA**G (SEQ ID NO: 199814) | 4 | 400 |
| G*KT*QA (SEQ ID NO: 199815) | 4 | 400 |
| K**TSQS (SEQ ID NO: 199816) | 4 | 400 |
| K*ASS*A (SEQ ID NO: 199571) | 4 | 400 |
| MNQ*R*P (SEQ ID NO: 199817) | 4 | 400 |
| RQ*A*TS (SEQ ID NO: 199818) | 4 | 400 |
| SK**NQP (SEQ ID NO: 199819) | 4 | 400 |
| TKN**QS (SEQ ID NO: 199820) | 4 | 400 |

TABLE 17
7-mer motifs enriched for spleen biodistribution.

| | Reported | Possible |
|---|---|---|
| Motifs | Variants | Variants |
| [GFTW][AKM][NQKPT][QGKP]**[AG] | 70 | 192000 |
| [MT][RGP][RQP][KS]**G | 28 | 14400 |
| [QMT][RGP][RQGP]*[QKMT]*G | 56 | 57600 |
| [QG]*[AGP][GT]K*G | 17 | 4800 |
| [RF][KP]**[AQ][NQ]G | 9 | 6400 |
| KT[AS]**[GK][AEP] | 15 | 4800 |
| G**TKMG (SEQ ID NO: 199821) | 4 | 400 |
| [GK]*[PT][QG]*[QS]G | 14 | 6400 |
| [GT][NG]**[RK]SG | 13 | 3200 |
| [QT]*[RG]S[KT]*G | 9 | 3200 |
| [QK]*[GP]*[KST][GSV]G | 25 | 14400 |
| [RM]SS[KT]**[AS] | 11 | 3200 |
| [RM][NQG]S*[GKV]*G | 17 | 7200 |
| [MT]*STK*G (SEQ ID NO: 200023) | 8 | 800 |
| K[GT]S[QT]**G | 14 | 1600 |
| K*P[NS]*GA (SEQ ID NO: 199822) | 8 | 800 |
| K[MST][PS][GT]**A | 21 | 4800 |
| K[DT][AR]S**[AG] | 14 | 3200 |
| [IY]KP**[KS][ND] | 9 | 3200 |
| R[NQ]S[AS]**G | 9 | 1600 |
| M*SKS*A (SEQ ID NO: 199596) | 4 | 400 |
| K*S[AN]*[AGS][AS] | 20 | 4800 |
| [QGF][NKS]*[GPV][NGK]*G | 29 | 32400 |
| [RK][DST][RS]*[GS]*[AGP] | 47 | 28800 |
| [KT][GY]*[KT]*TG | 8 | 3200 |
| R*SN*TG (SEQ ID NO: 199552) | 5 | 400 |
| AKY*K*E (SEQ ID NO: 199823) | 4 | 400 |
| [KT][QG][AT]**[ST]G | 11 | 6400 |
| MR*NQ*G (SEQ ID NO: 199604) | 4 | 400 |
| K*PT*TG (SEQ ID NO: 199824) | 4 | 400 |
| NRPS**P (SEQ ID NO: 199699) | 5 | 400 |
| KRPD**G (SEQ ID NO: 199825) | 4 | 400 |
| R*SSV*G (SEQ ID NO: 199826) | 4 | 400 |
| KSSS**G (SEQ ID NO: 199827) | 5 | 400 |
| TK*S*YA (SEQ ID NO: 199828) | 4 | 400 |
| FK*S*QG (SEQ ID NO: 199829) | 4 | 400 |
| K**NTTG (SEQ ID NO: 199830) | 5 | 400 |
| FK*P*QG (SEQ ID NO: 199831) | 4 | 400 |
| FKM**QG (SEQ ID NO: 199832) | 4 | 400 |
| GK*VS*N (SEQ ID NO: 199833) | 4 | 400 |
| K*SSV*G (SEQ ID NO: 199834) | 4 | 400 |
| K*ST*NG (SEQ ID NO: 199684) | 4 | 400 |
| KF**TSG (SEQ ID NO: 199835) | 4 | 400 |
| KGSS**P (SEQ ID NO: 199836) | 4 | 400 |
| N*K*GMG (SEQ ID NO: 199837) | 4 | 400 |
| YKP*T*P (SEQ ID NO: 199838) | 4 | 400 |

TABLE 18
7-mer motifs enriched for kidney biodistribution.

| | Reported | Possible |
|---|---|---|
| Motifs | Variants | Variants |
| [NEGKMFTWY][ARDKPST][ARNQGST] | 1237 | 4939200 |
| [ANQKPST]**[AGFS] | | |
| [ARQLKM][ANGHIT]*[RQGHP]* | 329 | 1800000 |
| [AGKST][ARDKS] | | |
| [GKFTY][GKT]**[ARGV][AQFS]G | 79 | 96000 |
| [NGKT]**[NGKMPT][LKPST] | 328 | 1680000 |
| [NGHKMFT][RDGSY] | | |
| [RNQKMT][RNGIL]P[NDHKST]** | 172 | 432000 |
| [ANGKPV] | | |
| [DEGKMFT][GKMFP][ARHMF]** | 287 | 1680000 |
| [NQGKST][DGKP] | | |
| [RQGFYV]*[RGLKPS][RNGS]* | 382 | 1728000 |
| [ANDQPT][RGKPY] | | |
| [RQKM][RGT]*[NGP][AQGPV]*[GMY] | 86 | 216000 |
| [RQGIKMTYV][RNDQGHPST] | 5044 | 24948000 |
| [^{∧}DCEILMFWYV]*[^{∧}DCEHLKFWY]*[ANGKFPS] | | |
| [RGKMSTV]*[ARNHMST][NQKST] | 587 | 1764000 |
| [ARGKTV]*[ARG] | | |
| K*PG*QG (SEQ ID NO: 199839) | 4 | 400 |
| [QGFT][ANK]*[APTV][ARNGKP]* | 89 | 230400 |
| [GV] | | |
| [TY]KP*T*[PY] | 8 | 1600 |
| [QGTY][RK]P**[AGMS][ANG] | 71 | 38400 |
| [GLMTY]K*[HPS]*[NFSY][AQG] | 67 | 72000 |
| [NKT][RGY]*[KT]*[TV]G | 20 | 14400 |
| [RM][HP][KP]**[HP][AM] | 10 | 12800 |
| [RKMTY]*[GPT]*[ARNST][QGKS]G | 96 | 120000 |
| Q*[RP][QG][KT]*[GP] | 9 | 6400 |
| S*NAH*R (SEQ ID NO: 199840) | 4 | 400 |
| R**VRDV (SEQ ID NO: 199841) | | |
| KM**PKD (SEQ ID NO: 199590) | 4 | 400 |
| RP**[QG][NG]G | 10 | 1600 |
| SP**RGG (SEQ ID NO: 199640) | 4 | 400 |
| [MST][HKY][GP][AQ]**[KY] | 17 | 28800 |
| [QFV][QP][RNG]H**[KV] | 16 | 14400 |
| [RY]P*[KS]S*[AGS] | 18 | 4800 |
| FK*[PS]*QG (SEQ ID NO: 199842) | 8 | 800 |
| MGS*K*G (SEQ ID NO: 199843) | 4 | 400 |
| [NK]*[RS]*[TV][TY][GM] | 17 | 12800 |
| G*TQ*SG (SEQ ID NO: 199844) | 4 | 400 |
| TR*VS*G (SEQ ID NO: 199736) | 4 | 400 |
| YKPP**G (SEQ ID NO: 199845) | 4 | 400 |
| QR*S*TG (SEQ ID NO: 199525) | 4 | 400 |
| SK**YGA (SEQ ID NO: 199846) | 4 | 400 |
| TK*VS*N (SEQ ID NO: 199847) | 4 | 400 |
| QK*PS*A (SEQ ID NO: 199848) | 4 | 400 |
| GK*ST*A (SEQ ID NO: 199711) | 4 | 400 |
| QKS*S*G (SEQ ID NO: 199849) | 4 | 400 |
| K*TI*KD (SEQ ID NO: 199850) | 4 | 400 |
| GK*PS*A (SEQ ID NO: 199851) | 4 | 400 |
| AKY*K*E (SEQ ID NO: 199823) | 4 | 400 |
| FK*T*MS (SEQ ID NO: 199852) | 4 | 400 |
| GK*VS*N (SEQ ID NO: 199833) | 4 | 400 |
| K*MQ*QG (SEQ ID NO: 199853) | 4 | 400 |
| Q*KPH*N (SEQ ID NO: 199854) | 4 | 400 |
| QKT**GG (SEQ ID NO: 199700) | 4 | 400 |
| QPRG**G (SEQ ID NO: 199855) | 4 | 400 |
| R**SVAG (SEQ ID NO: 199856) | 4 | 400 |
| R*Q*APF (SEQ ID NO: 199857) | 4 | 400 |
| SK**NQP (SEQ ID NO: 199819) | 4 | 400 |

TABLE 19
7-mer motifs enriched for kidney transduction.

| | Reported | Possible |
|---|---|---|
| Motifs | Variants | Variants |
| YMNN**K (SEQ ID NO: 199858) | 4 | 400 |
| I*RS*TG (SEQ ID NO: 199859) | 4 | 400 |
| NGG**GR (SEQ ID NO: 199781) | 4 | 400 |
| RQMA**A (SEQ ID NO: 199787) | 4 | 400 |

TABLE 20
7-mer motifs enriched for serum biodistribution.

| | Reported | Possible |
|---|---|---|
| Motifs | Variants | Variants |
| GK**[ST][NMT][AP] | 14 | 4800 |
| [NK]*[NS][KT][NS]*A | 14 | 6400 |
| [NGP][QKS][KT]*[NGS]*[AG] | 54 | 43200 |
| K*N[AN]*[NQG][AP] | 22 | 4800 |
| [NQKPS][NQKT][AQGKST][AQGST]**[AGS] | 459 | 720000 |
| [KP][KPST]**[ANK][ANDG][ADPS] | 88 | 153600 |
| [NKV][NG]*[GK]*[KST][AG] | 24 | 28800 |
| [GP][RNK][NKPT]**[GS][AM] | 43 | 38400 |
| K*TS*[AS][AV] | 8 | 1600 |
| [NGPST][GK]*[NQGKS][NKT]*A | 77 | 60000 |
| PR*Q*SP (SEQ ID NO: 199809) | 4 | 400 |
| [NP][RKS][NK]*[GT]*[APV] | 31 | 28800 |
| [NG][QK][KT]N**A | 11 | 3200 |
| [RPST][KT][NMS]**[AQT][PS] | 46 | 57600 |
| [NT]*KS*[ST][AP] | 16 | 3200 |
| [KM][NPT]**G[QG][ARS] | 21 | 14400 |
| K*N*[GS][NI]A | 9 | 1600 |
| [RNPS][ARNK][ANG][QGKS]**[AGP] | 118 | 230400 |
| K[LKPT][ND]*[AGS]*A | 25 | 9600 |
| KT[NQ]**[AQGMS][AS] | 42 | 8000 |
| K[NQT]*[GPS][AQGV]*[APV] | 68 | 43200 |
| [PS]*K[AQ]*QS | 9 | 1600 |
| [NP]*KS[ST]*A | 9 | 1600 |
| KQ[GT]*[TV]*A | 12 | 1600 |
| K*TS*QA (SEQ ID NO: 199860) | 4 | 400 |
| [KT]*[NKP][NG][AG]*[AMP] | 33 | 28800 |
| P*KG*GV (SEQ ID NO: 199861) | 4 | 400 |
| [NP][RG]*[QS][QK]*P | 9 | 6400 |
| KP[QS][NT]**[AM] | 9 | 3200 |
| K**PGMA (SEQ ID NO: 199862) | 4 | 400 |
| N*K*NNG (SEQ ID NO: 199765) | 4 | 400 |
| RPNN**P (SEQ ID NO: 199863) | 4 | 400 |
| K*T*QQA (SEQ ID NO: 199864) | 4 | 400 |
| [PS]K[PT]**[QG][AS] | 15 | 6400 |
| PK*PS*A (SEQ ID NO: 199865) | 4 | 400 |
| KTV**KD (SEQ ID NO: 199866) | 4 | 400 |
| KA*TN*A (SEQ ID NO: 199867) | 4 | 400 |
| KN*A*QA (SEQ ID NO: 199868) | 4 | 400 |
| K*QTG*A (SEQ ID NO: 199869) | 4 | 400 |
| KTNG**P (SEQ ID NO: 199870) | 4 | 400 |
| K*T*NTS (SEQ ID NO: 199871) | 4 | 400 |
| KTN*A*P (SEQ ID NO: 199872) | 4 | 400 |
| KST**TA (SEQ ID NO: 199873) | 4 | 400 |
| DK*K*GA (SEQ ID NO: 199874) | 4 | 400 |
| KPNN**P (SEQ ID NO: 199759) | 5 | 400 |
| KTQ*S*S (SEQ ID NO: 199655) | 5 | 400 |
| N*QKT*G (SEQ ID NO: 199875) | 5 | 400 |
| K**TGNA (SEQ ID NO: 199876) | 4 | 400 |
| K*N*NVA (SEQ ID NO: 199877) | 4 | 400 |
| KP*TN*S (SEQ ID NO: 199878) | 4 | 400 |
| KPA**GA (SEQ ID NO: 199879) | 4 | 400 |
| P*KG*SA (SEQ ID NO: 199880) | 4 | 400 |
| QK**GAP (SEQ ID NO: 199803) | 4 | 400 |
| SK*S*QP (SEQ ID NO: 199881) | 4 | 400 |

TABLE 21
7-mer motifs enriched for brain biodistribution.

| | Reported | Possible |
|---|---|---|
| Motifs | Variants | Variants |
| [RQKP][RQPT]**[ANGT][ANGS][AS] | 192 | 204800 |
| [RNQKP][RGST][RNQKPV]**[ARNGKMST][RDGMPS] | 535 | 2304000 |
| K*[NQT]*[QGS][NQIM]A | 34 | 14400 |
| [EGKMPST][RGKPST][ANQPSTYV]**[ANGST][AKPS] | 1106 | 2688000 |
| [RNQGKPW][ARNQGPST][ANDQGKS][NQGKT]**[AKMPS] | 1453 | 3920000 |
| [NGT]*[KS][NGKS][ANGMT]*A | 71 | 48000 |
| [RNGHKMP]*[NQGPSTYV][ARNQGK]*[ANQGKS][ARDG] | 1039 | 3225600 |
| [NKT]*[NQPS][NGK][ARGT]*[GMP] | 92 | 172800 |
| [NGPS]*[NQK][AQKT]*[NQST][GPS] | 202 | 230400 |
| [NQGMPSV][KS][ANKSTY][ANQGT]**[AP] | 324 | 336000 |
| [RGKMPSV][QKPST][NDQKST]*[ANQGSV]*A | 465 | 504000 |
| [KMPT][RPT][NK]*[GS]*[GPSV] | 67 | 76800 |
| [QGPSTV]K*[NQGPSV][ANMST]*[AGPS] | 412 | 288000 |
| [QK]*[NG][NS]*[NGV][GP] | 34 | 19200 |
| [RGTV]**[NQS][QGTY][NMT][AKP] | 96 | 172800 |
| [NPS]*K[GS]*[ST]A | 26 | 4800 |
| K**[QG]A[QS][AS] | 11 | 3200 |
| [NQPT][KV][NQKT]*[AGS]*[GMS] | 111 | 115200 |
| [RNGKT][QGPST]*[NQGKS][ANQGKTV]*[AGV] | 606 | 1050000 |
| [QGT][GT]K**[AT]A | 17 | 4800 |
| [NDKS]*[RKT]*[NGMS][NPST][KPS] | 85 | 230400 |
| [NK][AGT]*[GKS][AKS]*P | 33 | 21600 |
| [GK]*[QHK]*[NP][LTV][AQ] | 24 | 28800 |
| [QKP]*[ANK][QST]S*A | 27 | 10800 |
| [NV][RS][AKP]*[NT]*A | 17 | 9600 |
| [NST]K[MPT]**[QG][AP] | 39 | 14400 |
| [NQKST][RNK][ANDQST]S**A | 55 | 36000 |
| T**SSNR (SEQ ID NO: 199882) | 4 | 400 |
| [KP][ARQ]*T[NGT]*A | 18 | 7200 |
| [NQG][QK]*[KST][ANGS]*[AM] | 69 | 57600 |
| [SV][RK]TS**[GP] | 14 | 3200 |
| K**GTNA (SEQ ID NO: 199883) | 4 | 400 |
| NK[NQ]*[AG]*A | 9 | 1600 |
| K*[PT]S*[QGS][AV] | 17 | 4800 |
| [KTW][NKT][QGS]**Q[ANKS] | 37 | 43200 |
| [RNKP][RNGT]*[QGKPS]*[GST][APS] | 225 | 288000 |
| PKS**SG (SEQ ID NO: 199794) | 4 | 400 |
| RDKS**A (SEQ ID NO: 199612) | 5 | 400 |
| [RY]*[ST][KS]*[ST][AP] | 17 | 12800 |
| [GF]*K[QT]T*[PS] | 9 | 3200 |
| [RN]*[AP][GK]S*[AG] | 11 | 6400 |
| RNGS**G (SEQ ID NO: 199884) | 4 | 400 |
| KT[NQG]*[AS]*[GPS] | 26 | 7200 |
| K*NSS*[PT] (SEQ ID NO: 199885) | 8 | 800 |
| Q*GSK*G (SEQ ID NO: 199886) | 4 | 400 |
| KVS*T*A (SEQ ID NO: 199887) | 4 | 400 |
| NSK*T*P (SEQ ID NO: 199888) | 4 | 400 |
| [NGP]K*[NGPST]*[ANQG]A | 88 | 24000 |
| K[NT]*[AG]*QA | 9 | 1600 |
| [GKP][QKT]**[ANST][NGMT][AP] | 156 | 115200 |
| QK*GAP (SEQ ID NO: 199803) | 4 | 400 |
| FQK*A*G (SEQ ID NO: 199889) | 4 | 400 |
| K*QTG*A (SEQ ID NO: 199869) | 4 | 400 |
| [KS][QK]**[QT]Q[AP] | 11 | 6400 |
| KQTQ**A (SEQ ID NO: 199890) | 4 | 400 |
| [GP]*K[GT]*[QG][AV] | 11 | 6400 |
| [SV]*[RK]*SAG | 8 | 1600 |
| MN**GQR (SEQ ID NO: 199891) | 4 | 400 |
| [NS]K*A*S[AG] | 10 | 1600 |
| K**TGNA (SEQ ID NO: 199876) | 4 | 400 |
| N*K*GQG (SEQ ID NO: 199892) | 4 | 400 |
| TK*V*QG (SEQ ID NO: 199893) | 4 | 400 |
| QK*TS*P (SEQ ID NO: 199894) | 4 | 400 |
| QK*S[QS][PS] | 8 | 1600 |
| NKV**SA (SEQ ID NO: 199895) | 4 | 400 |
| K*SGT*A (SEQ ID NO: 199896) | 4 | 400 |
| PK*S*AG (SEQ ID NO: 199897) | 5 | 400 |
| G*Q*TQG (SEQ ID NO: 199898) | 4 | 400 |
| K**TSQS (SEQ ID NO: 199816) | 4 | 400 |
| K*TST*A (SEQ ID NO: 199899) | 4 | 400 |
| KNGS**G (SEQ ID NO: 199900) | 4 | 400 |
| KQG*T*A (SEQ ID NO: 199901) | 4 | 400 |
| NVK**QG (SEQ ID NO: 199902) | 4 | 400 |
| PR*QQ*P (SEQ ID NO: 199903) | 4 | 400 |
| SN**KSA (SEQ ID NO: 199904) | 4 | 400 |
| T*KS*TP (SEQ ID NO: 199905) | 4 | 400 |

TABLE 22
7-mer motifs enriched for lung biodistribution.

| | Reported | Possible |
|---|---|---|
| Motifs | Variants | Variants |
| [NPT]K[PY][GP]**A | 15 | 4800 |
| KT**PQA (SEQ ID NO: 199906) | 4 | 400 |
| KT**AKE (SEQ ID NO: 199907) | 4 | 400 |
| [KPTY][RQKT][APSY]**[AGKS][ANE] | 97 | 307200 |
| [RQK][QPST][KS][MST]**G | 38 | 28800 |
| K*[AGS][NS][AST]*[AP] | 36 | 14400 |
| [RK][GST][AS][GST]**[APS] | 67 | 43200 |
| Q*GSK*G (SEQ ID NO: 199886) | 6 | 400 |
| [RKMT][RQKS][PS]*[QKSTV]*G | 67 | 80000 |
| [RKY][QKT][PST]*[STV]*[AP] | 66 | 64800 |
| [NK][RMS]P[GST]**[AP] | 22 | 14400 |
| [MT]PK*[AT]*G | 9 | 1600 |
| K*TTG*G (SEQ ID NO: 199908) | 4 | 400 |
| [TV]KP[GS]**G | 13 | 1600 |
| PK**NGA (SEQ ID NO: 199909) | 4 | 400 |
| PK*PS*A (SEQ ID NO: 199865) | 4 | 400 |
| TPR*G*G (SEQ ID NO: 199910) | 4 | 400 |
| KTQ**QA (SEQ ID NO: 199911) | 5 | 400 |
| QPK*G*G (SEQ ID NO: 199912) | 4 | 400 |
| RNS**NG (SEQ ID NO: 199913) | 4 | 400 |
| K**NTTG (SEQ ID NO: 199830) | 4 | 400 |
| K*ST*[NS]G (SEQ ID NO: 199914) | 8 | 800 |
| YKPP**G (SEQ ID NO: 199845) | 4 | 400 |
| K*SSV*G (SEQ ID NO: 199834) | 4 | 400 |
| [RNQ]*[GKS]*[GK][MTV]G | 25 | 21600 |
| KQ*SV*A (SEQ ID NO: 199915) | 4 | 400 |
| PR*Q*SP (SEQ ID NO: 199809) | 4 | 400 |
| R*SN*[NT][AG] | 13 | 1600 |
| K*PS*QA (SEQ ID NO: 199916) | 4 | 400 |
| FK*TA*G (SEQ ID NO: 199917) | 4 | 400 |
| GK*PS*A (SEQ ID NO: 199851) | 5 | 400 |
| K*GS*MS (SEQ ID NO: 199918) | 4 | 400 |
| K*SN*GS (SEQ ID NO: 199919) | 4 | 400 |
| FK**AQG (SEQ ID NO: 199920) | 4 | 400 |
| GQ*RV*G (SEQ ID NO: 199510) | 4 | 400 |
| K*ASG*A (SEQ ID NO: 199921) | 4 | 400 |
| K*SN*AA (SEQ ID NO: 199922) | 4 | 400 |
| KY*T*TG (SEQ ID NO: 199923) | 4 | 400 |
| P*R*NGA (SEQ ID NO: 199924) | 4 | 400 |
| QPR*M*G (SEQ ID NO: 199925) | 4 | 400 |
| RPQ**TG (SEQ ID NO: 199926) | 4 | 400 |
| T**VNRG (SEQ ID NO: 199927) | 4 | 400 |
| TPRS**G (SEQ ID NO: 199928) | 4 | 400 |

TABLE 23
7-mer motifs enriched for spinal cord biodistribution.

| | Reported | Possible |
|---|---|---|
| Motifs | Variants | Variants |
| [RNGKS][KPTV][NQGS]*[ANQST]*A | 199 | 160000 |
| K**[NST][QS][AQK][DS] | 22 | 14400 |
| [NGMPSTW][RNQGK][QGKMSTV]**[AQKST][ARNDGKP] | 1096 | 3430000 |
| [RGKP][QKPT]**[NQST][NQGMT]A | 189 | 128000 |
| [NMPS]*[NQKS][AQGHK]*[QGS][RIPSV] | 198 | 480000 |
| [RNLPS][RGHKS]*[AQGKPT]*[ANGS][ARGP] | 410 | 960000 |
| [RQGMS][NDQK]**[NGKS][NQGS][ARQKPT] | 310 | 768000 |
| [RNQGKPSW][ARNGKPT][ANQGST][ANQGKST]**[AGKMPS] | 2230 | 5644800 |
| K[NQT]*[AGS]*Q[AS] | 24 | 7200 |
| [RKT][KT][NQV]**[ARQKT][DPS] | 54 | 108000 |
| [RNGKMPS][RQST][NGHKT]*[NQGTV]*[AKYV] | 362 | 1120000 |
| [GT]**[QS][SY][NM][RK] | 16 | 12800 |
| [KFSY]*[ANHKP][NQS][AGST]*[RMST] | 161 | 384000 |
| [NKP][ARGK][GHPS]**[AG][RMST] | 61 | 153600 |
| [GP]K*[NS]*[AQ][AG] | 24 | 6400 |
| [RKP]**[QT][QGS][NG]A | 35 | 14400 |
| [QGKP]*[NKS][KPST][AS]*A | 54 | 38400 |
| [GK]*[NQHT]*[NGPV][QLMTV][AQS] | 126 | 192000 |
| [GK]*[NKPS][ANGTV]*[AQT][AM] | 95 | 96000 |
| K*TS*[AQ]A (SEQ ID NO: 199929) | 8 | 800 |
| N*[ST][GK][RN]*A | 10 | 3200 |
| [GK]Q[QGT][QGT]**[AM] | 19 | 14400 |
| K*NN*NP (SEQ ID NO: 199930) | 5 | 400 |
| K[PT][QS]**[AQS]A | 18 | 4800 |
| [QKP][NST][KT]**[GT]A | 27 | 14400 |
| [KV][QT][QK]*S*[AS] | 15 | 6400 |
| [RNQGKS][AQGKPT]*[NGKST][ANGKTV]*[AMSV] | 860 | 1728000 |
| KN*G*SA (SEQ ID NO: 199570) | 5 | 400 |
| T**GPGR (SEQ ID NO: 199931) | 4 | 400 |
| K*TG*KD (SEQ ID NO: 199932) | 4 | 400 |
| K**G[AT][NQ]A | 11 | 1600 |
| [QT][NQK]K[DT]**A | 14 | 4800 |
| [NK]K[ND]*G*A | 10 | 1600 |
| N*QKT*G (SEQ ID NO: 199875) | 5 | 400 |
| K[GT]N**[GT]A | 8 | 1600 |
| GKN**SA (SEQ ID NO: 199933) | 4 | 400 |
| K[ST]**[AK][ND][DP] | 10 | 6400 |
| PK*[NGP][ANS]*A | 16 | 3600 |
| TK*V*QG (SEQ ID NO: 199893) | 4 | 400 |
| K*SGT*A (SEQ ID NO: 199896) | 5 | 400 |
| N*K*[NS]N[GP] | 9 | 1600 |
| [NG]KT*G*[AM] | 9 | 1600 |
| [MP][GK]T*S*[RG] | 9 | 3200 |
| [NP]*KS*[GS]A | 13 | 1600 |
| KP**[AG][AG]S | 9 | 1600 |
| SK*S*QP (SEQ ID NO: 199881) | 4 | 400 |
| S*T*GSP (SEQ ID NO: 199934) | 4 | 400 |
| HQKP**L (SEQ ID NO: 199935) | 4 | 400 |
| N*N*GTA (SEQ ID NO: 199936) | 4 | 400 |
| SRTP**A (SEQ ID NO: 199937) | 4 | 400 |
| PR*QQ*P (SEQ ID NO: 199903) | 4 | 400 |
| P*KG*SA (SEQ ID NO: 199880) | 4 | 400 |
| VK*NN*P (SEQ ID NO: 199938) | 4 | 400 |
| K*N*SIA (SEQ ID NO: 199939) | 5 | 400 |
| KPT*P*S (SEQ ID NO: 199940) | 4 | 400 |
| T*KS*TP (SEQ ID NO: 199905) | 4 | 400 |
| N*KST*A (SEQ ID NO: 199941) | 5 | 400 |
| R*TS*SP (SEQ ID NO: 199519) | 5 | 400 |
| K*N*GNA (SEQ ID NO: 199942) | 4 | 400 |
| KTN**GS (SEQ ID NO: 199943) | 4 | 400 |
| N**GRTA (SEQ ID NO: 199944) | 4 | 400 |
| NKPP**A (SEQ ID NO: 199945) | 4 | 400 |
| SK**TNS (SEQ ID NO: 199946) | 4 | 400 |
| SK*V*TS (SEQ ID NO: 199947) | 4 | 400 |
| TK*QN*A (SEQ ID NO: 199948) | 4 | 400 |
| TKQ*S*S (SEQ ID NO: 199949) | 4 | 400 |

TABLE 24
7-mer motifs enriched for spinal cord transduction.

| | Reported | Possible |
|---|---|---|
| Motifs | Variants | Variants |
| GAG**MR (SEQ ID NO: 199950) | 3 | 400 |
| LQSN**R (SEQ ID NO: 199951) | 3 | 400 |
| NN*TT*R (SEQ ID NO: 199952) | 3 | 400 |
| NQ*Q*TK (SEQ ID NO: 199953) | 3 | 400 |
| RVG**DK (SEQ ID NO: 199954) | 3 | 400 |
| Y*AG*SR (SEQ ID NO: 199955) | 3 | 400 |

### Example 9: Functional In Vivo Detargeting

[0782] Recombinant AAVs made using the naturally occurring AAV9 capsid transduced the C57BL/6J mouse liver with high efficiency. In some applications, it is preferable to reduce the accumulation of AAV particles within the liver and reduce the transduction of liver cells. Therefore, experiments were undertaken to identify AAV capsids that produced well but had low transduction to the liver or biodistribution to the spleen. Tables 25 and 26 below list 7-mer motifs observed for 7-mer sequences that had low transduction to the liver or low biodistribution to the spleen. In Tables 25 and 26, 7-mers associated with a negative log 2 enrichment value were considered as having the indicated trait (i.e., reduced liver transduction or reduced spleen biodistribution). In Tables 25 and 26, “*” represents any amino acid, amino acids listed between brackets (“[ ]”) without the symbol “\hat{ }” represent the amino acids observed at a position, and amino acids listed between brackets (“[ ]”) and preceded by the symbol “\hat{ }” indicate amino acids not observed at the position

TABLE 25
7-mer motifs associated with reduced liver transduction.

| | Reported | Possible |
|---|---|---|
| Motifs | Variants | Variants |
| WNG**QK (SEQ ID NO: 199956) | 4 | 400 |
| [DY][KT][FS]**[QK][GK] | 9 | 12800 |
| [QSWY][NIKM][NGP][NQH]**[KY] | 32 | 115200 |
| IKH*R*E (SEQ ID NO: 199957) | 4 | 400 |
| [IT][LK]*[DH]*[KV][RN] | 9 | 12800 |
| [KF]*[KS]*[PT][NY][LM] | 9 | 12800 |
| YKD**PR (SEQ ID NO: 199958) | 4 | 400 |
| HN*N*GK (SEQ ID NO: 199959) | 4 | 400 |
| KFK*E*Y (SEQ ID NO: 199960) | 4 | 400 |
| NGQ**AR (SEQ ID NO: 199961) | 4 | 400 |
| QI*H*AK (SEQ ID NO: 199962) | 4 | 400 |
| R**NGIQ (SEQ ID NO: 199963) | 4 | 400 |
| REKP**M (SEQ ID NO: 199964) | 4 | 400 |
| Y*H*MKG (SEQ ID NO: 199965) | 4 | 400 |

TABLE 26
7-mer motifs associated with reduced spleen biodistribution.

| | Reported | Possible |
|---|---|---|
| Motifs | Variants | Variants |
| [^{∧}ADCEHILKW][ARNQGKST][ARNQGKPTV] | 4663 | 11404800 |
| [ARNQKPSTV]**[NGPS] | | |
| [RNQKSV]*[ANQGPST]*[ARNQKT][ANQGKT] | 1403 | 2419200 |
| [EGPS] | | |
| [^{∧}ANDCEHILFW]*[ANQGKPST][ARDQGKPST] | 4651 | 9216000 |
| [ARNQGKSV]*[ADGS] | | |
| [NQGFST]*[NGKT]*[ARNQKST][ANQGKSTV][GP] | 1185 | 1075200 |
| [NQGKMSTY][RQGKPST]*[ARDQGKSTV][^{∧}ADCEHILFWY] | 1565 | 2016000 |
| *G | | |
| [RNGKMPT]**[AQGKST][ARNQGSV][AQGKMST] | 2047 | 3292800 |
| [EGPS] | | |
| [NQGKFST][ARQGKPST][ADQGKPST]*[ARNQIKST] | 1211 | 1433600 |
| *G | | |
| [RNQGHKPTV]*[ARNQGMPST][ARNQKST]* | 3742 | 9525600 |
| [ANQGKMS][DEGPSV] | | |
| [^{∧}ARDCEHILKW]K*[ANQGST]*[ANQIKMSTV] | 986 | 864000 |
| [DGPS] | | |
| [RNGKTV][ANQGSV]**[ARGKSTV][AQGKMS]G | 666 | 604800 |
| [^{∧}ADCQEHFWY][ARNQGKMPS][^{∧}CEHILKFWYV]** | 5052 | 15840000 |
| [ANQGKMSV][NDGPS] | | |
| [RNQGMPSTV][ARDQGKPST][NQGKST][ANGKPST] | 2449 | 4082400 |
| **[APS] | | |
| [RNGKMST][RGKST][RNQMT]**[ARNQMST][ADPS] | 1041 | 1960000 |
| [RNQGMPSTV]*[AQGKST][AQGKPSTV]*[NQGKSTV] | 2830 | 4838400 |
| [GPSV] | | |
| [NQST]*[QKT]*[GKT][NQMS][GP] | 152 | 115200 |
| [RNQKSTY][RKPT][ANQGST]**[ANQGT]G | 510 | 336000 |
| [RNQMTYV][NQKP][RNQGS]G**G | 118 | 56000 |
| [RGKMT]**[NT][RNGKS][ANGT]G | 133 | 80000 |
| [RNGT]*[ANGKT][ARNKMST][RNQGKS]*G | 444 | 336000 |
| [RQGKMPST][NQKPST]**[ARNKST][^{∧}RCQEHILFPW] | 2211 | 4608000 |
| [DGPS] | | |
| [RKS][NQGPST][ANQGKT][ANQGT]**[APS] | 680 | 648000 |
| [RNMPSTY][ARNQGKSV]*[ANQKST]*[ANGKSTV] | 1949 | 2822400 |
| [GPS] | | |
| [NQGKPSTV][ARQGKST]*[AQGKPST][ANKSTV]* | 1765 | 2822400 |
| [APS] | | |
| [RNQGKTY][RNQGLPST][ARNQKPST]*[ANQSTV]* | 1890 | 3225600 |
| [APS] | | |
| [NQGFST][ANGSV][RK]**[NQSV][GP] | 260 | 192000 |
| K[NQGLKST][NDQGMPT][NQST]**G | 174 | 78400 |
| [NQGKMFPST][RQGKPS][RDQKPST]*G*[AM] | 201 | 302400 |
| [RQGKMST][QKP][NDQGS]*[ANKST]*[ADEPS] | 688 | 1050000 |
| K*[QT]*[QG][QMT]A | 19 | 4800 |
| [NKMST][ANGKP][NGKP]*[ARNMPST]*G | 367 | 280000 |
| [RNQPST][RNK]**[ARNGS][ANGSTV]A | 328 | 216000 |
| [QGS]K**[GT][AMT][APS] | 49 | 21600 |
| [NQGMST][NK]**[AQGSV][QKMFS][RDGPS] | 348 | 600000 |
| [RDKST][NQKP]*[AGKS]*[AGSTV]A | 183 | 160000 |
| [NQGKSTV][RNQGK]*[NQGKS][ANQKST]*[GPS] | 1192 | 1260000 |
| [QK][NKSV][NDGKT][ST]**A | 54 | 32000 |
| [RKMT]**[GPS][AT][ANGS]G | 72 | 38400 |
| [RKM]*[NPST][AGT]T*[GV] | 66 | 28800 |
| [RKV]**[NGT][AGST][NQG]A | 92 | 43200 |
| [QKST][QKT]*[NG]G*[DG] | 42 | 19200 |
| [RQGKT]*[RNQGPST][RQGST]*[QGMS]A | 339 | 280000 |
| [KV]*N*[NS][AISV]A | 25 | 6400 |
| [NQKPT][RKP]*[AGST]G*[AP] | 96 | 48000 |
| [RNQKS][ANMPSV][RNQK]*G*G | 89 | 48000 |
| [RNST]*[QKMST][RGS][ARST]*[AP] | 172 | 192000 |
| [NKS][KST][NK]*[NG]*[AS] | 62 | 28800 |
| [RNGT]*[RQGKST][NKST][RNMT]*[AG] | 375 | 307200 |
| [RKT][RQT]**[GT][NQG]A | 40 | 21600 |
| [RNIK][RNQV]*[AGS]*[NQGT][GS] | 178 | 153600 |
| [RGKP][NKT][NQTV]**G[AS] | 54 | 38400 |
| [RNQST][RQK]S[ANQKS]**G | 72 | 30000 |
| R[NST]*[ANQG][ANTV]*G | 48 | 19200 |
| [QK][QT]**N[GS]A | 14 | 3200 |
| [QPT][RGK]*N[AKS]*A | 31 | 10800 |
| [QGT][QGT]K**[AT]A | 27 | 7200 |
| RP*[NG][NT]*G | 11 | 1600 |
| [FT]K**NQ[NG] | 8 | 1600 |
| [NGS]*[GKS][RGKS]*[AGST]A | 86 | 57600 |
| [ANGS][RGK]*[NKPT]*[ANGS]A | 109 | 76800 |
| [MT]K*[QM]*QA | 10 | 1600 |
| [KP][NP][KS]**[AG]A | 13 | 6400 |
| [NM]*[NK][NK]*[QT]G | 20 | 6400 |
| [RK]**NT[GS]G | 10 | 1600 |
| RN*[AN][AN]*A | 9 | 1600 |
| N**[NQS][RGK][QGS]A | 29 | 10800 |
| [KT]*[NGT]*[GSV][ANST][GS] | 95 | 57600 |
| K*[NQM][NG][ANG]*[GP] | 39 | 14400 |
| [NQ]*[AGK]G[QT]*G | 19 | 4800 |
| QKN**SA (SEQ ID NO: 199966) | 4 | 400 |
| Q*[NK]G*[AN]G | 16 | 1600 |
| K[NT]*[AG]*QA | 9 | 1600 |
| F*KT*QA (SEQ ID NO: 199967) | 4 | 400 |
| [NST]K[GPT]*G*G | 27 | 3600 |
| RP*[ST]G*A (SEQ ID NO: 200024) | 8 | 800 |
| PTK**SG (SEQ ID NO: 199968) | 4 | 400 |
| R**QQNA (SEQ ID NO: 199969) | 4 | 400 |
| QPK**GG (SEQ ID NO: 199970) | 4 | 400 |
| KN*ST*A (SEQ ID NO: 199971) | 4 | 400 |
| RQ*PT*A (SEQ ID NO: 199515) | 4 | 400 |
| K[NQG]*N*[AT]G | 16 | 2400 |
| R[AN][QS]*[AT]*G | 16 | 3200 |
| [NQ][RN][GKP][NQS]**A | 29 | 14400 |
| KP[GP]G**G (SEQ ID NO: 199972) | 8 | 800 |
| KPS[NGS]**[AM] | 15 | 2400 |
| RS*PG*A (SEQ ID NO: 199973) | 4 | 400 |
| K*[NQT]ST*A (SEQ ID NO: 199974) | 12 | 1200 |
| [RK]*[NS][AG]T*A | 14 | 3200 |
| KPSQ**P (SEQ ID NO: 199975) | 4 | 400 |
| [NKM]*N*[GS][NT]A | 28 | 4800 |
| RSS*G*A (SEQ ID NO: 199976) | 4 | 400 |
| RN*PG*G (SEQ ID NO: 199977) | 4 | 400 |
| K[NQ]*[GS]*SG | 11 | 1600 |
| [NT]*K*[QPS][NGS]A | 26 | 7200 |
| N*RNT*P (SEQ ID NO: 199978) | 4 | 400 |
| K*[NG]A*[QG]A | 11 | 1600 |
| K*GNQ*A (SEQ ID NO: 199979) | 4 | 400 |
| S**STQS (SEQ ID NO: 199980) | 4 | 400 |
| NK**[GT]GG (SEQ ID NO: 199981) | 9 | 800 |
| RN**NQA (SEQ ID NO: 199982) | 4 | 400 |
| NR**GQA (SEQ ID NO: 199983) | 4 | 400 |
| K*[NT][NS]*AA | 11 | 1600 |
| [RK][NT]*N*QA | 11 | 1600 |
| NR*N*QG (SEQ ID NO: 199984) | 4 | 400 |
| N**STMA (SEQ ID NO: 199669) | 5 | 400 |
| N*KA*AG (SEQ ID NO: 199985) | 4 | 400 |
| NKQ*A*A (SEQ ID NO: 199986) | 4 | 400 |
| MKQ*G*G (SEQ ID NO: 199987) | 4 | 400 |
| RGN*T*G (SEQ ID NO: 199988) | 4 | 400 |
| K*NSS*P (SEQ ID NO: 199989) | 4 | 400 |
| K*NNP*A (SEQ ID NO: 199990) | 5 | 400 |
| MKN*G*G (SEQ ID NO: 199991) | 5 | 400 |
| RN*NG*G (SEQ ID NO: 199992) | 5 | 400 |
| G*K*NVA (SEQ ID NO: 199993) | 4 | 400 |
| K*GG*AG (SEQ ID NO: 199626) | 4 | 400 |
| N**GTKG (SEQ ID NO: 199994) | 4 | 400 |
| NN**NKG (SEQ ID NO: 199995) | 4 | 400 |
| RDK**GG (SEQ ID NO: 199996) | 4 | 400 |
| RQ*N*QG (SEQ ID NO: 199997) | 4 | 400 |
| SRTT*NG (SEQ ID NO: 199576) | 4 | 20 |
| TSKG**G (SEQ ID NO: 199998) | 4 | 400 |

### Example 10: MultiFunction Liver Targeting

[0783] A positive control set of 3K variants was sampled from a pool of 240K variants such that each variant satisfied six traits relevant to cross-species hepatocyte targeting. Specifically, the traits were 1) high binding affinity to HepG2 cells, 2) high binding affinity to THLE cells, 3) high transduction of HepG2 cells, 4) high transduction of THLE cells, 5) high biodistribution to C57 mice liver, and 6) high production fitness. The positive set was then used in a different library of 240K along with other variants. After screening the new library for the six traits, the designed variants were considered as hits and selected only if they did not fall below the affinity/enrichment of the positive control distributions (threshold is the mean of each enrichment of each of the six traits minus 2 standard deviations) for the six traits simultaneously (see Table 27 below). Nearly all of the liver MultiFunction capsids (e.g., those containing the 7-mers listed in Table 27) had a 7-mer with an net charge of +1 (FIG. 16 and Table 28). In Table 27, “*” represents any amino acid, amino acids listed between brackets (“[ ]”) without the symbol “\hat{ }” represent the amino acids observed at a position, and amino acids listed between brackets (“[ ]”) and preceded by the symbol “\hat{ }” indicate amino acids not observed at the position

TABLE 27
7-mer motifs associated with vectors having the following six traits: 1) high
binding affinity to HepG2 cells, 2) high binding affinity to THLE cells, 3)
high transduction of HepG2 cells, 4) high transduction of THLE cells, 5) high
biodistribution to C57 mice liver, and 6) high production fitness.

| | Reported | Possible |
|---|---|---|
| Motifs | Variants | Varaints |
| [NQGIKT][DGKFPS][NEHKS]*[RDEHY]*[RQEKY] | 185 | 1800000 |
| [RDS][DQE]*[RPT][RNK]*[RKV] | 35 | 97200 |
| [RDKMSY]**[RNKSV][ARDEP][ARNDEIKS][ARNKMYV] | 581 | 3360000 |
| Q[RE]**[RK][DI][IK] | 9 | 6400 |
| [NMT][RDK]*[ARGTV]*[RDSY][ANKT] | 76 | 288000 |
| [GLFTY]*[HKY]*[NMPY][NKS][AQGL] | 70 | 288000 |
| [ANGST]*[ADEG][RNGH]*[RK][RNESV] | 140 | 320000 |
| [REKFY][ARLTYV][DGHKP][RDHIKS]**[ARNEIFT] | 250 | 2520000 |
| [ANQKT][ARKPS][RGKM]**[RSV][DEGY] | 121 | 480000 |
| [RMS]*[EK]*[RV][DPT][DKT] | 16 | 43200 |
| [QY]*G*V[RK]G | 9 | 1600 |
| [IPT][DEGP]R[AQHV]**[ANK] | 37 | 57600 |
| IRA**EK (SEQ ID NO: 199999) | 4 | 400 |
| [DK]*R[NE]*[KT][AQ] | 8 | 6400 |
| [QI][RD]*K[MP]*[RE] | 15 | 6400 |
| D*KPR*Q (SEQ ID NO: 200000) | 4 | 400 |
| [ST][QY][EK]*[RS]*[NK] | 12 | 12800 |
| [EY][ET]*K*RN | 8 | 1600 |
| ILH**KN (SEQ ID NO: 200001) | 4 | 400 |
| V*RSD*K (SEQ ID NO: 200002) | 4 | 400 |
| [ADE][ADG]*[GK]*K[LMY] | 22 | 21600 |
| [KV][QLT]R*[DS]*[GI] | 13 | 9600 |
| TD*KR*L (SEQ ID NO: 200003) | 5 | 400 |
| [RELF][EK]**[AQ][RD][DGKS] | 24 | 51200 |
| EK**TRQ (SEQ ID NO: 200004) | 4 | 400 |
| [MV]*R*[SV][AD][GK] | 10 | 6400 |
| IL*H*KN (SEQ ID NO: 200005) | 4 | 400 |
| V*KG*YN (SEQ ID NO: 200006) | 4 | 400 |
| G**HKQL (SEQ ID NO: 200007) | 4 | 400 |
| Y*SH*KG (SEQ ID NO: 200008) | 4 | 400 |
| D[NK][RH][KV]**[RV] | 10 | 6400 |
| I*RS*TG (SEQ ID NO: 199859) | 4 | 400 |
| [IK][GP]R*[DT]*[AG] | 14 | 6400 |
| QGR*L*A (SEQ ID NO: 200009) | 4 | 400 |
| YTS**KG (SEQ ID NO: 200010) | 4 | 400 |
| G**ETRK (SEQ ID NO: 200011) | 4 | 400 |
| V*RQ*AG (SEQ ID NO: 199782) | 4 | 400 |
| DL*K*RA (SEQ ID NO: 200012) | 5 | 400 |
| D*RPK*V (SEQ ID NO: 200013) | 4 | 400 |
| DR**VKQ (SEQ ID NO: 200014) | 4 | 400 |
| G**TEKK (SEQ ID NO: 200015) | 4 | 400 |
| I*R*MRE (SEQ ID NO: 200016) | 4 | 400 |
| NDMR**K (SEQ ID NO: 200017) | 4 | 400 |
| NE*KR*V (SEQ ID NO: 200018) | 4 | 400 |
| QAR*E*R (SEQ ID NO: 200019) | 4 | 400 |
| V*RS*GG (SEQ ID NO: 199791) | 4 | 400 |
| YTE**KK (SEQ ID NO: 200020) | 4 | 400 |

TABLE 28
The charge patterns in the selected 30K liver MultiFunction
capsid variants compared to their expected ratio in a random
sequence set. SumCharge indicates the 7-mer net charge, Pos
and Neg indicates the number of positive (Pos) and negative
(Neg) charges within the 7-mer, GroupCount indicates the number
of sequences with the defined charge characteristics, Percentage
provides the fraction of the liver MultiFunction library with
the indicated charge characteristics, and Expected provides
the frequency of sequences with the indicated charge characteristics
expected within a random set of 7-mers.

| Sum Charge | Pos | Neg | Group Count | Percentage | Expected |
|---|---|---|---|---|---|
| 1 | 2 | 1 | 18937 | 0.63123333 | 0.043092 |
| 1 | 1 | 0 | 10259 | 0.34196667 | 0.183788 |
| 1 | 3 | 2 | 775 | 0.02583333 | 0.001349 |
| 2 | 2 | 0 | 23 | 0.00076667 | 0.069128 |
| 0 | 2 | 2 | 3 | 0.0001 | 0.010598 |
| 1 | 4 | 3 | 3 | 0.0001 | 2.00E−06 |

### Example 11: MultiFunction Liver Targeting Individual Variants

[0784] Seven variants individually validated as described in the above Examples were found to transduce C57 mice livers and produce comparable to AAV9 WT while transducing two human hepatocyte cell lines 10×-1000× better than AAV9 WT (see Table 29). Full characterization of the individual variants and the selection process is described in the above Examples and the methods provided herein.

TABLE 29
Sequences.

| Variant Name | 7-mer | SEQ ID NO |
|---|---|---|
| AAV-BI151 | RPNRDTS | 144800 |
| AAV-BI152 | MDGQRRI | 132518 |
| AAV-BI153 | ETNRAGR | 116028 |
| AAV-BI154 | TGRVDSR | 149619 |
| AAV-BI155 | NMTRARD | 136472 |
| AAV-BI156 | GEKPKFT | 164722 |
| AAV-BI157 | MEPRQRT | 132640 |

[0785] The 7-mer sequences listed in Table 26 above were inserted between AAV9 K549R (SEQ ID NO: 199446) amino acid positions 588 and 589 and the amino acid and nucleotide sequences for the resulting capsids are provided below.

### Amino Acid Sequences:

>AAV-BI151
(SEQ ID NO: 199456)
MAADGYLPDWLEDNLSEGIREWWALKPGAPQPKANQQHQDNARGLVLPGYKYLGPGNGLDKGEP
VNAADAAALEHDKAYDQQLKAGDNPYLKYNHADAEFQERLKEDTSFGGNLGRAVFQAKKRLLEP
LGLVEEAAKTAPGKKRPVEQSPQEPDSSAGIGKSGAQPAKKRLNFGQTGDTESVPDPQPIGEPP
AAPSGVGSLTMASGGGAPVADNNEGADGVGSSSGNWHCDSQWLGDRVITTSTRTWALPTYNNHL
YKQISNSTSGGSSNDNAYFGYSTPWGYFDFNRFHCHFSPRDWQRLINNNWGFRPKRLNFKLFNI
QVKEVTDNNGVKTIANNLTSTVQVFTDSDYQLPYVLGSAHEGCLPPFPADVFMIPQYGYLTLND
GSQAVGRSSFYCLEYFPSQMLRTGNNFQFSYEFENVPFHSSYAHSQSLDRLMNPLIDQYLYYLS
RTINGSGQNQQTLKFSVAGPSNMAVQGRNYIPGPSYRQQRVSTTVTQNNNSEFAWPGASSWALN
GRNSLMNPGPAMASHKEGEDRFFPLSGSLIFGKQGTGRDNVDADKVMITNEEEIKTTNPVATES
YGQVATNHQSAQRPNRDTSAQAQTGWVQNQGILPGMVWQDRDVYLQGPIWAKIPHTDGNFHPSP
LMGGFGMKHPPPQILIKNTPVPADPPTAFNKDKLNSFITQYSTGQVSVEIEWELQKENSKRWNP
EIQYTSNYYKSNNVEFAVNTEGVYSEPRPIGTRYLTRNL*
>AAV-BI152
(SEQ ID NO: 199457)
MAADGYLPDWLEDNLSEGIREWWALKPGAPQPKANQQHQDNARGLVLPGYKYLGPGNGLDKGEP
VNAADAAALEHDKAYDQQLKAGDNPYLKYNHADAEFQERLKEDTSFGGNLGRAVFQAKKRLLEP
LGLVEEAAKTAPGKKRPVEQSPQEPDSSAGIGKSGAQPAKKRLNFGQTGDTESVPDPQPIGEPP
AAPSGVGSLTMASGGGAPVADNNEGADGVGSSSGNWHCDSQWLGDRVITTSTRTWALPTYNNHL
YKQISNSTSGGSSNDNAYFGYSTPWGYFDFNRFHCHFSPRDWQRLINNNWGFRPKRLNFKLFNI
QVKEVTDNNGVKTIANNLTSTVQVFTDSDYQLPYVLGSAHEGCLPPFPADVFMIPQYGYLTLND
GSQAVGRSSFYCLEYFPSQMLRTGNNFQFSYEFENVPFHSSYAHSQSLDRLMNPLIDQYLYYLS
RTINGSGQNQQTLKFSVAGPSNMAVQGRNYIPGPSYRQQRVSTTVTQNNNSEFAWPGASSWALN
GRNSLMNPGPAMASHKEGEDRFFPLSGSLIFGKQGTGRDNVDADKVMITNEEEIKTTNPVATES
YGQVATNHQSAQMDGQRRIAQAQTGWVQNQGILPGMVWQDRDVYLQGPIWAKIPHTDGNFHPSP
LMGGFGMKHPPPQILIKNTPVPADPPTAFNKDKLNSFITQYSTGQVSVEIEWELQKENSKRWNP
EIQYTSNYYKSNNVEFAVNTEGVYSEPRPIGTRYLTRNL*
>AAV-BI153
(SEQ ID NO: 199458)
MAADGYLPDWLEDNLSEGIREWWALKPGAPQPKANQQHQDNARGLVLPGYKYLGPGNGLDKGEP
VNAADAAALEHDKAYDQQLKAGDNPYLKYNHADAEFQERLKEDTSFGGNLGRAVFQAKKRLLEP
LGLVEEAAKTAPGKKRPVEQSPQEPDSSAGIGKSGAQPAKKRLNFGQTGDTESVPDPQPIGEPP
AAPSGVGSLTMASGGGAPVADNNEGADGVGSSSGNWHCDSQWLGDRVITTSTRTWALPTYNNHL
YKQISNSTSGGSSNDNAYFGYSTPWGYFDFNRFHCHFSPRDWQRLINNNWGFRPKRLNFKLFNI
QVKEVTDNNGVKTIANNLTSTVQVFTDSDYQLPYVLGSAHEGCLPPFPADVFMIPQYGYLTLND
GSQAVGRSSFYCLEYFPSQMLRTGNNFQFSYEFENVPFHSSYAHSQSLDRLMNPLIDQYLYYLS
RTINGSGQNQQTLKFSVAGPSNMAVQGRNYIPGPSYRQQRVSTTVTQNNNSEFAWPGASSWALN
GRNSLMNPGPAMASHKEGEDRFFPLSGSLIFGKQGTGRDNVDADKVMITNEEEIKTTNPVATES
YGQVATNHQSAQETNRAGRAQAQTGWVQNQGILPGMVWQDRDVYLQGPIWAKIPHTDGNFHPSP
LMGGFGMKHPPPQILIKNTPVPADPPTAFNKDKLNSFITQYSTGQVSVEIEWELQKENSKRWNP
EIQYTSNYYKSNNVEFAVNTEGVYSEPRPIGTRYLTRNL*
>AAV-BI154
(SEQ ID NO: 199459)
MAADGYLPDWLEDNLSEGIREWWALKPGAPQPKANQQHQDNARGLVLPGYKYLGPGNGLDKGEP
VNAADAAALEHDKAYDQQLKAGDNPYLKYNHADAEFQERLKEDTSFGGNLGRAVFQAKKRLLEP
LGLVEEAAKTAPGKKRPVEQSPQEPDSSAGIGKSGAQPAKKRLNFGQTGDTESVPDPQPIGEPP
AAPSGVGSLTMASGGGAPVADNNEGADGVGSSSGNWHCDSQWLGDRVITTSTRTWALPTYNNHL
YKQISNSTSGGSSNDNAYFGYSTPWGYFDFNRFHCHFSPRDWQRLINNNWGFRPKRLNFKLFNI
QVKEVTDNNGVKTIANNLTSTVQVFTDSDYQLPYVLGSAHEGCLPPFPADVFMIPQYGYLTLND
GSQAVGRSSFYCLEYFPSQMLRTGNNFQFSYEFENVPFHSSYAHSQSLDRLMNPLIDQYLYYLS
RTINGSGQNQQTLKFSVAGPSNMAVQGRNYIPGPSYRQQRVSTTVTQNNNSEFAWPGASSWALN
GRNSLMNPGPAMASHKEGEDRFFPLSGSLIFGKQGTGRDNVDADKVMITNEEEIKTTNPVATES
YGQVATNHQSAQTGRVDSRAQAQTGWVQNQGILPGMVWQDRDVYLQGPIWAKIPHTDGNFHPSP
LMGGFGMKHPPPQILIKNTPVPADPPTAFNKDKLNSFITQYSTGQVSVEIEWELQKENSKRWNP
EIQYTSNYYKSNNVEFAVNTEGVYSEPRPIGTRYLTRNL*
>AAV-BI155
(SEQ ID NO: 199460)
MAADGYLPDWLEDNLSEGIREWWALKPGAPQPKANQQHQDNARGLVLPGYKYLGPGNGLDKGEP
VNAADAAALEHDKAYDQQLKAGDNPYLKYNHADAEFQERLKEDTSFGGNLGRAVFQAKKRLLEP
LGLVEEAAKTAPGKKRPVEQSPQEPDSSAGIGKSGAQPAKKRLNFGQTGDTESVPDPQPIGEPP
AAPSGVGSLTMASGGGAPVADNNEGADGVGSSSGNWHCDSQWLGDRVITTSTRTWALPTYNNHL
YKQISNSTSGGSSNDNAYFGYSTPWGYFDFNRFHCHFSPRDWQRLINNNWGFRPKRLNFKLFNI
QVKEVTDNNGVKTIANNLTSTVQVFTDSDYQLPYVLGSAHEGCLPPFPADVFMIPQYGYLTLND
GSQAVGRSSFYCLEYFPSQMLRTGNNFQFSYEFENVPFHSSYAHSQSLDRLMNPLIDQYLYYLS
RTINGSGQNQQTLKFSVAGPSNMAVQGRNYIPGPSYRQQRVSTTVTQNNNSEFAWPGASSWALN
GRNSLMNPGPAMASHKEGEDRFFPLSGSLIFGKQGTGRDNVDADKVMITNEEEIKTTNPVATES
YGQVATNHQSAQNMTRARDAQAQTGWVQNQGILPGMVWQDRDVYLQGPIWAKIPHTDGNFHPSP
LMGGFGMKHPPPQILIKNTPVPADPPTAFNKDKLNSFITQYSTGQVSVEIEWELQKENSKRWNP
EIQYTSNYYKSNNVEFAVNTEGVYSEPRPIGTRYLTRNL*
>AAV-BI156
(SEQ ID NO: 199461)
MAADGYLPDWLEDNLSEGIREWWALKPGAPQPKANQQHQDNARGLVLPGYKYLGPGNGLDKGEP
VNAADAAALEHDKAYDQQLKAGDNPYLKYNHADAEFQERLKEDTSFGGNLGRAVFQAKKRLLEP
LGLVEEAAKTAPGKKRPVEQSPQEPDSSAGIGKSGAQPAKKRLNFGQTGDTESVPDPQPIGEPP
AAPSGVGSLTMASGGGAPVADNNEGADGVGSSSGNWHCDSQWLGDRVITTSTRTWALPTYNNHL
YKQISNSTSGGSSNDNAYFGYSTPWGYFDFNRFHCHFSPRDWQRLINNNWGFRPKRLNFKLFNI
QVKEVTDNNGVKTIANNLTSTVQVFTDSDYQLPYVLGSAHEGCLPPFPADVFMIPQYGYLTLND
GSQAVGRSSFYCLEYFPSQMLRTGNNFQFSYEFENVPFHSSYAHSQSLDRLMNPLIDQYLYYLS
RTINGSGQNQQTLKFSVAGPSNMAVQGRNYIPGPSYRQQRVSTTVTQNNNSEFAWPGASSWALN
GRNSLMNPGPAMASHKEGEDRFFPLSGSLIFGKQGTGRDNVDADKVMITNEEEIKTTNPVATES
YGQVATNHQSAQGEKPKFTAQAQTGWVQNQGILPGMVWQDRDVYLQGPIWAKIPHTDGNFHPSP
LMGGFGMKHPPPQILIKNTPVPADPPTAFNKDKLNSFITQYSTGQVSVEIEWELQKENSKRWNP
EIQYTSNYYKSNNVEFAVNTEGVYSEPRPIGTRYLTRNL*
>AAV-BI157
(SEQ ID NO: 199462)
MAADGYLPDWLEDNLSEGIREWWALKPGAPQPKANQQHQDNARGLVLPGYKYLGPGNGLDKGEP
VNAADAAALEHDKAYDQQLKAGDNPYLKYNHADAEFQERLKEDTSFGGNLGRAVFQAKKRLLEP
LGLVEEAAKTAPGKKRPVEQSPQEPDSSAGIGKSGAQPAKKRLNFGQTGDTESVPDPQPIGEPP
AAPSGVGSLTMASGGGAPVADNNEGADGVGSSSGNWHCDSQWLGDRVITTSTRTWALPTYNNHL
YKQISNSTSGGSSNDNAYFGYSTPWGYFDFNRFHCHFSPRDWQRLINNNWGFRPKRLNFKLFNI
QVKEVTDNNGVKTIANNLTSTVQVFTDSDYQLPYVLGSAHEGCLPPFPADVFMIPQYGYLTLND
GSQAVGRSSFYCLEYFPSQMLRTGNNFQFSYEFENVPFHSSYAHSQSLDRLMNPLIDQYLYYLS
RTINGSGQNQQTLKFSVAGPSNMAVQGRNYIPGPSYRQQRVSTTVTQNNNSEFAWPGASSWALN
GRNSLMNPGPAMASHKEGEDRFFPLSGSLIFGKQGTGRDNVDADKVMITNEEEIKTTNPVATES
YGQVATNHQSAQMEPRQRTAQAQTGWVQNQGILPGMVWQDRDVYLQGPIWAKIPHTDGNFHPSP
LMGGFGMKHPPPQILIKNTPVPADPPTAFNKDKLNSFITQYSTGQVSVEIEWELQKENSKRWNP
EIQYTSNYYKSNNVEFAVNTEGVYSEPRPIGTRYLTRNL*

### Nucleotide Sequences:

>AAV-BI151
(SEQ ID NO: 199463)
ATGGCTGCCGATGGTTATCTTCCAGATTGGCTCGAGGACAACCTTAGTGAAGGAATTCGCGAGT
GGTGGGCTTTGAAACCTGGAGCCCCTCAACCCAAGGCAAATCAACAACATCAAGACAACGCTCG
AGGTCTTGTGCTTCCGGGTTACAAATACCTTGGACCCGGCAACGGACTCGACAAGGGGGAGCCG
GTCAACGCAGCAGACGCGGCGGCCCTCGAGCACGACAAGGCCTACGACCAGCAGCTCAAGGCCG
GAGACAACCCGTACCTCAAGTACAACCACGCCGACGCCGAGTTCCAGGAGCGGCTCAAAGAAGA
TACGTCTTTTGGGGGCAACCTCGGGCGAGCAGTCTTCCAGGCCAAAAAGAGGCTTCTTGAACCT
CTTGGTCTGGTTGAGGAAGCGGCTAAGACGGCTCCTGGAAAGAAGAGGCCTGTAGAGCAGTCTC
CTCAGGAACCGGACTCCTCCGCGGGTATTGGCAAATCGGGTGCACAGCCCGCTAAAAAGAGACT
CAATTTCGGTCAGACTGGCGACACAGAGTCAGTCCCAGACCCTCAACCAATCGGAGAACCTCCC
GCAGCCCCCTCAGGTGTGGGATCTCTTACAATGGCTTCAGGTGGTGGCGCACCAGTGGCAGACA
ATAACGAAGGTGCCGATGGAGTGGGTAGTTCCTCGGGAAATTGGCATTGCGATTCCCAATGGCT
GGGGGACAGAGTCATCACCACCAGCACCCGAACCTGGGCCCTGCCCACCTACAACAATCACCTC
TACAAGCAAATCTCCAACAGCACATCTGGAGGATCTTCAAATGACAACGCCTACTTCGGCTACA
GCACCCCCTGGGGGTATTTTGACTTCAACAGATTCCACTGCCACTTCTCACCACGTGACTGGCA
GCGACTCATCAACAACAACTGGGGATTCCGGCCTAAGCGACTCAACTTCAAGCTCTTCAACATT
CAGGTCAAAGAGGTTACGGACAACAATGGAGTCAAGACCATCGCCAATAACCTTACCAGCACGG
TCCAGGTCTTCACGGACTCAGACTATCAGCTCCCGTACGTGCTCGGGTCGGCTCACGAGGGCTG
CCTCCCGCCGTTCCCAGCGGACGTTTTCATGATTCCTCAGTACGGGTATCTGACGCTTAATGAT
GGAAGCCAGGCCGTGGGTCGTTCGTCCTTTTACTGCCTGGAATATTTCCCGTCGCAAATGCTAA
GAACGGGTAACAACTTCCAGTTCAGCTACGAGTTTGAGAACGTACCTTTCCATAGCAGCTACGC
TCACAGCCAAAGCCTGGACCGACTAATGAATCCACTCATCGACCAATACTTGTACTATCTCTCT
AGAACTATTAACGGTTCTGGACAGAATCAACAAACGCTAAAATTCAGTGTGGCCGGACCCAGCA
ACATGGCTGTCCAGGGAAGAAACTACATACCTGGACCCAGCTACCGACAACAACGTGTCTCAAC
CACTGTGACTCAAAACAACAACAGCGAATTTGCTTGGCCTGGAGCTTCTTCTTGGGCTCTCAAT
GGACGTAATAGCTTGATGAATCCTGGACCTGCTATGGCCAGCCACAAAGAAGGAGAGGACCGTT
TCTTTCCTTTGTCTGGATCTTTAATTTTTGGCAAACAAGGTACCGGCAGAGACAACGTGGATGC
GGACAAAGTCATGATAACCAACGAAGAAGAAATTAAAACTACTAACCCGGTAGCAACGGAGTCC
TATGGACAAGTGGCCACAAACCACCAGAGTGCACAACGCCCGAATCGCGATACTTCCGCGCAGG
CTCAAACCGGTTGGGTTCAAAACCAAGGAATACTTCCGGGTATGGTTTGGCAGGACAGAGATGT
GTACCTGCAAGGACCCATTTGGGCCAAAATTCCTCACACGGACGGCAACTTTCACCCTTCTCCG
CTGATGGGAGGGTTTGGAATGAAGCACCCGCCTCCTCAGATCCTCATCAAAAACACACCTGTAC
CTGCGGATCCTCCAACGGCCTTCAACAAGGACAAGCTGAACTCTTTCATCACCCAGTATTCTAC
TGGCCAAGTCAGCGTGGAGATCGAGTGGGAGCTGCAGAAGGAAAACAGCAAGCGCTGGAACCCG
GAGATCCAGTACACTTCCAACTATTACAAGTCTAATAATGTTGAATTTGCTGTTAATACTGAAG
GTGTATATAGTGAACCCCGCCCCATTGGCACCAGATACCTGACTCGTAATCTGTAA
>AAV-BI152
(SEQ ID NO: 199464)
ATGGCTGCCGATGGTTATCTTCCAGATTGGCTCGAGGACAACCTTAGTGAAGGAATTCGCGAGT
GGTGGGCTTTGAAACCTGGAGCCCCTCAACCCAAGGCAAATCAACAACATCAAGACAACGCTCG
AGGTCTTGTGCTTCCGGGTTACAAATACCTTGGACCCGGCAACGGACTCGACAAGGGGGAGCCG
GTCAACGCAGCAGACGCGGCGGCCCTCGAGCACGACAAGGCCTACGACCAGCAGCTCAAGGCCG
GAGACAACCCGTACCTCAAGTACAACCACGCCGACGCCGAGTTCCAGGAGCGGCTCAAAGAAGA
TACGTCTTTTGGGGGCAACCTCGGGCGAGCAGTCTTCCAGGCCAAAAAGAGGCTTCTTGAACCT
CTTGGTCTGGTTGAGGAAGCGGCTAAGACGGCTCCTGGAAAGAAGAGGCCTGTAGAGCAGTCTC
CTCAGGAACCGGACTCCTCCGCGGGTATTGGCAAATCGGGTGCACAGCCCGCTAAAAAGAGACT
CAATTTCGGTCAGACTGGCGACACAGAGTCAGTCCCAGACCCTCAACCAATCGGAGAACCTCCC
GCAGCCCCCTCAGGTGTGGGATCTCTTACAATGGCTTCAGGTGGTGGCGCACCAGTGGCAGACA
ATAACGAAGGTGCCGATGGAGTGGGTAGTTCCTCGGGAAATTGGCATTGCGATTCCCAATGGCT
GGGGGACAGAGTCATCACCACCAGCACCCGAACCTGGGCCCTGCCCACCTACAACAATCACCTC
TACAAGCAAATCTCCAACAGCACATCTGGAGGATCTTCAAATGACAACGCCTACTTCGGCTACA
GCACCCCCTGGGGGTATTTTGACTTCAACAGATTCCACTGCCACTTCTCACCACGTGACTGGCA
GCGACTCATCAACAACAACTGGGGATTCCGGCCTAAGCGACTCAACTTCAAGCTCTTCAACATT
CAGGTCAAAGAGGTTACGGACAACAATGGAGTCAAGACCATCGCCAATAACCTTACCAGCACGG
TCCAGGTCTTCACGGACTCAGACTATCAGCTCCCGTACGTGCTCGGGTCGGCTCACGAGGGCTG
CCTCCCGCCGTTCCCAGCGGACGTTTTCATGATTCCTCAGTACGGGTATCTGACGCTTAATGAT
GGAAGCCAGGCCGTGGGTCGTTCGTCCTTTTACTGCCTGGAATATTTCCCGTCGCAAATGCTAA
GAACGGGTAACAACTTCCAGTTCAGCTACGAGTTTGAGAACGTACCTTTCCATAGCAGCTACGC
TCACAGCCAAAGCCTGGACCGACTAATGAATCCACTCATCGACCAATACTTGTACTATCTCTCT
AGAACTATTAACGGTTCTGGACAGAATCAACAAACGCTAAAATTCAGTGTGGCCGGACCCAGCA
ACATGGCTGTCCAGGGAAGAAACTACATACCTGGACCCAGCTACCGACAACAACGTGTCTCAAC
CACTGTGACTCAAAACAACAACAGCGAATTTGCTTGGCCTGGAGCTTCTTCTTGGGCTCTCAAT
GGACGTAATAGCTTGATGAATCCTGGACCTGCTATGGCCAGCCACAAAGAAGGAGAGGACCGTT
TCTTTCCTTTGTCTGGATCTTTAATTTTTGGCAAACAAGGTACCGGCAGAGACAACGTGGATGC
GGACAAAGTCATGATAACCAACGAAGAAGAAATTAAAACTACTAACCCGGTAGCAACGGAGTCC
TATGGACAAGTGGCCACAAACCACCAGAGTGCACAACGCCCGAATCGCGATACTTCCGCGCAGG
CTCAAACCGGTTGGGTTCAAAACCAAGGAATACTTCCGGGTATGGTTTGGCAGGACAGAGATGT
GTACCTGCAAGGACCCATTTGGGCCAAAATTCCTCACACGGACGGCAACTTTCACCCTTCTCCG
CTGATGGGAGGGTTTGGAATGAAGCACCCGCCTCCTCAGATCCTCATCAAAAACACACCTGTAC
CTGCGGATCCTCCAACGGCCTTCAACAAGGACAAGCTGAACTCTTTCATCACCCAGTATTCTAC
TGGCCAAGTCAGCGTGGAGATCGAGTGGGAGCTGCAGAAGGAAAACAGCAAGCGCTGGAACCCG
GAGATCCAGTACACTTCCAACTATTACAAGTCTAATAATGTTGAATTTGCTGTTAATACTGAAG
GTGTATATAGTGAACCCCGCCCCATTGGCACCAGATACCTGACTCGTAATCTGTAA
>AAV-BI153
(SEQ ID NO: 199465)
ATGGCTGCCGATGGTTATCTTCCAGATTGGCTCGAGGACAACCTTAGTGAAGGAATTCGCGAGT
GGTGGGCTTTGAAACCTGGAGCCCCTCAACCCAAGGCAAATCAACAACATCAAGACAACGCTCG
AGGTCTTGTGCTTCCGGGTTACAAATACCTTGGACCCGGCAACGGACTCGACAAGGGGGAGCCG
GTCAACGCAGCAGACGCGGCGGCCCTCGAGCACGACAAGGCCTACGACCAGCAGCTCAAGGCCG
GAGACAACCCGTACCTCAAGTACAACCACGCCGACGCCGAGTTCCAGGAGCGGCTCAAAGAAGA
TACGTCTTTTGGGGGCAACCTCGGGCGAGCAGTCTTCCAGGCCAAAAAGAGGCTTCTTGAACCT
CTTGGTCTGGTTGAGGAAGCGGCTAAGACGGCTCCTGGAAAGAAGAGGCCTGTAGAGCAGTCTC
CTCAGGAACCGGACTCCTCCGCGGGTATTGGCAAATCGGGTGCACAGCCCGCTAAAAAGAGACT
CAATTTCGGTCAGACTGGCGACACAGAGTCAGTCCCAGACCCTCAACCAATCGGAGAACCTCCC
GCAGCCCCCTCAGGTGTGGGATCTCTTACAATGGCTTCAGGTGGTGGCGCACCAGTGGCAGACA
ATAACGAAGGTGCCGATGGAGTGGGTAGTTCCTCGGGAAATTGGCATTGCGATTCCCAATGGCT
GGGGGACAGAGTCATCACCACCAGCACCCGAACCTGGGCCCTGCCCACCTACAACAATCACCTC
TACAAGCAAATCTCCAACAGCACATCTGGAGGATCTTCAAATGACAACGCCTACTTCGGCTACA
GCACCCCCTGGGGGTATTTTGACTTCAACAGATTCCACTGCCACTTCTCACCACGTGACTGGCA
GCGACTCATCAACAACAACTGGGGATTCCGGCCTAAGCGACTCAACTTCAAGCTCTTCAACATT
CAGGTCAAAGAGGTTACGGACAACAATGGAGTCAAGACCATCGCCAATAACCTTACCAGCACGG
TCCAGGTCTTCACGGACTCAGACTATCAGCTCCCGTACGTGCTCGGGTCGGCTCACGAGGGCTG
CCTCCCGCCGTTCCCAGCGGACGTTTTCATGATTCCTCAGTACGGGTATCTGACGCTTAATGAT
GGAAGCCAGGCCGTGGGTCGTTCGTCCTTTTACTGCCTGGAATATTTCCCGTCGCAAATGCTAA
GAACGGGTAACAACTTCCAGTTCAGCTACGAGTTTGAGAACGTACCTTTCCATAGCAGCTACGC
TCACAGCCAAAGCCTGGACCGACTAATGAATCCACTCATCGACCAATACTTGTACTATCTCTCT
AGAACTATTAACGGTTCTGGACAGAATCAACAAACGCTAAAATTCAGTGTGGCCGGACCCAGCA
ACATGGCTGTCCAGGGAAGAAACTACATACCTGGACCCAGCTACCGACAACAACGTGTCTCAAC
CACTGTGACTCAAAACAACAACAGCGAATTTGCTTGGCCTGGAGCTTCTTCTTGGGCTCTCAAT
GGACGTAATAGCTTGATGAATCCTGGACCTGCTATGGCCAGCCACAAAGAAGGAGAGGACCGTT
TCTTTCCTTTGTCTGGATCTTTAATTTTTGGCAAACAAGGTACCGGCAGAGACAACGTGGATGC
GGACAAAGTCATGATAACCAACGAAGAAGAAATTAAAACTACTAACCCGGTAGCAACGGAGTCC
TATGGACAAGTGGCCACAAACCACCAGAGTGCACAAGAAACCAACCGCGCGGGACGTGCGCAGG
CTCAAACCGGTTGGGTTCAAAACCAAGGAATACTTCCGGGTATGGTTTGGCAGGACAGAGATGT
GTACCTGCAAGGACCCATTTGGGCCAAAATTCCTCACACGGACGGCAACTTTCACCCTTCTCCG
CTGATGGGAGGGTTTGGAATGAAGCACCCGCCTCCTCAGATCCTCATCAAAAACACACCTGTAC
CTGCGGATCCTCCAACGGCCTTCAACAAGGACAAGCTGAACTCTTTCATCACCCAGTATTCTAC
TGGCCAAGTCAGCGTGGAGATCGAGTGGGAGCTGCAGAAGGAAAACAGCAAGCGCTGGAACCCG
GAGATCCAGTACACTTCCAACTATTACAAGTCTAATAATGTTGAATTTGCTGTTAATACTGAAG
GTGTATATAGTGAACCCCGCCCCATTGGCACCAGATACCTGACTCGTAATCTGTAA
>AAV-BI154
(SEQ ID NO: 199466)
ATGGCTGCCGATGGTTATCTTCCAGATTGGCTCGAGGACAACCTTAGTGAAGGAATTCGCGAGT
GGTGGGCTTTGAAACCTGGAGCCCCTCAACCCAAGGCAAATCAACAACATCAAGACAACGCTCG
AGGTCTTGTGCTTCCGGGTTACAAATACCTTGGACCCGGCAACGGACTCGACAAGGGGGAGCCG
GTCAACGCAGCAGACGCGGCGGCCCTCGAGCACGACAAGGCCTACGACCAGCAGCTCAAGGCCG
GAGACAACCCGTACCTCAAGTACAACCACGCCGACGCCGAGTTCCAGGAGCGGCTCAAAGAAGA
TACGTCTTTTGGGGGCAACCTCGGGCGAGCAGTCTTCCAGGCCAAAAAGAGGCTTCTTGAACCT
CTTGGTCTGGTTGAGGAAGCGGCTAAGACGGCTCCTGGAAAGAAGAGGCCTGTAGAGCAGTCTC
CTCAGGAACCGGACTCCTCCGCGGGTATTGGCAAATCGGGTGCACAGCCCGCTAAAAAGAGACT
CAATTTCGGTCAGACTGGCGACACAGAGTCAGTCCCAGACCCTCAACCAATCGGAGAACCTCCC
GCAGCCCCCTCAGGTGTGGGATCTCTTACAATGGCTTCAGGTGGTGGCGCACCAGTGGCAGACA
ATAACGAAGGTGCCGATGGAGTGGGTAGTTCCTCGGGAAATTGGCATTGCGATTCCCAATGGCT
GGGGGACAGAGTCATCACCACCAGCACCCGAACCTGGGCCCTGCCCACCTACAACAATCACCTC
TACAAGCAAATCTCCAACAGCACATCTGGAGGATCTTCAAATGACAACGCCTACTTCGGCTACA
GCACCCCCTGGGGGTATTTTGACTTCAACAGATTCCACTGCCACTTCTCACCACGTGACTGGCA
GCGACTCATCAACAACAACTGGGGATTCCGGCCTAAGCGACTCAACTTCAAGCTCTTCAACATT
CAGGTCAAAGAGGTTACGGACAACAATGGAGTCAAGACCATCGCCAATAACCTTACCAGCACGG
TCCAGGTCTTCACGGACTCAGACTATCAGCTCCCGTACGTGCTCGGGTCGGCTCACGAGGGCTG
CCTCCCGCCGTTCCCAGCGGACGTTTTCATGATTCCTCAGTACGGGTATCTGACGCTTAATGAT
GGAAGCCAGGCCGTGGGTCGTTCGTCCTTTTACTGCCTGGAATATTTCCCGTCGCAAATGCTAA
GAACGGGTAACAACTTCCAGTTCAGCTACGAGTTTGAGAACGTACCTTTCCATAGCAGCTACGC
TCACAGCCAAAGCCTGGACCGACTAATGAATCCACTCATCGACCAATACTTGTACTATCTCTCT
AGAACTATTAACGGTTCTGGACAGAATCAACAAACGCTAAAATTCAGTGTGGCCGGACCCAGCA
ACATGGCTGTCCAGGGAAGAAACTACATACCTGGACCCAGCTACCGACAACAACGTGTCTCAAC
CACTGTGACTCAAAACAACAACAGCGAATTTGCTTGGCCTGGAGCTTCTTCTTGGGCTCTCAAT
GGACGTAATAGCTTGATGAATCCTGGACCTGCTATGGCCAGCCACAAAGAAGGAGAGGACCGTT
TCTTTCCTTTGTCTGGATCTTTAATTTTTGGCAAACAAGGTACCGGCAGAGACAACGTGGATGC
GGACAAAGTCATGATAACCAACGAAGAAGAAATTAAAACTACTAACCCGGTAGCAACGGAGTCC
TATGGACAAGTGGCCACAAACCACCAGAGTGCACAAACTGGACGAGTCGATTCGCGTGCGCAGG
CTCAAACCGGTTGGGTTCAAAACCAAGGAATACTTCCGGGTATGGTTTGGCAGGACAGAGATGT
GTACCTGCAAGGACCCATTTGGGCCAAAATTCCTCACACGGACGGCAACTTTCACCCTTCTCCG
CTGATGGGAGGGTTTGGAATGAAGCACCCGCCTCCTCAGATCCTCATCAAAAACACACCTGTAC
CTGCGGATCCTCCAACGGCCTTCAACAAGGACAAGCTGAACTCTTTCATCACCCAGTATTCTAC
TGGCCAAGTCAGCGTGGAGATCGAGTGGGAGCTGCAGAAGGAAAACAGCAAGCGCTGGAACCCG
GAGATCCAGTACACTTCCAACTATTACAAGTCTAATAATGTTGAATTTGCTGTTAATACTGAAG
GTGTATATAGTGAACCCCGCCCCATTGGCACCAGATACCTGACTCGTAATCTGTAA
>AAV-BI155
(SEQ ID NO: 199467)
ATGGCTGCCGATGGTTATCTTCCAGATTGGCTCGAGGACAACCTTAGTGAAGGAATTCGCGAGT
GGTGGGCTTTGAAACCTGGAGCCCCTCAACCCAAGGCAAATCAACAACATCAAGACAACGCTCG
AGGTCTTGTGCTTCCGGGTTACAAATACCTTGGACCCGGCAACGGACTCGACAAGGGGGAGCCG
GTCAACGCAGCAGACGCGGCGGCCCTCGAGCACGACAAGGCCTACGACCAGCAGCTCAAGGCCG
GAGACAACCCGTACCTCAAGTACAACCACGCCGACGCCGAGTTCCAGGAGCGGCTCAAAGAAGA
TACGTCTTTTGGGGGCAACCTCGGGCGAGCAGTCTTCCAGGCCAAAAAGAGGCTTCTTGAACCT
CTTGGTCTGGTTGAGGAAGCGGCTAAGACGGCTCCTGGAAAGAAGAGGCCTGTAGAGCAGTCTC
CTCAGGAACCGGACTCCTCCGCGGGTATTGGCAAATCGGGTGCACAGCCCGCTAAAAAGAGACT
CAATTTCGGTCAGACTGGCGACACAGAGTCAGTCCCAGACCCTCAACCAATCGGAGAACCTCCC
GCAGCCCCCTCAGGTGTGGGATCTCTTACAATGGCTTCAGGTGGTGGCGCACCAGTGGCAGACA
ATAACGAAGGTGCCGATGGAGTGGGTAGTTCCTCGGGAAATTGGCATTGCGATTCCCAATGGCT
GGGGGACAGAGTCATCACCACCAGCACCCGAACCTGGGCCCTGCCCACCTACAACAATCACCTC
TACAAGCAAATCTCCAACAGCACATCTGGAGGATCTTCAAATGACAACGCCTACTTCGGCTACA
GCACCCCCTGGGGGTATTTTGACTTCAACAGATTCCACTGCCACTTCTCACCACGTGACTGGCA
GCGACTCATCAACAACAACTGGGGATTCCGGCCTAAGCGACTCAACTTCAAGCTCTTCAACATT
CAGGTCAAAGAGGTTACGGACAACAATGGAGTCAAGACCATCGCCAATAACCTTACCAGCACGG
TCCAGGTCTTCACGGACTCAGACTATCAGCTCCCGTACGTGCTCGGGTCGGCTCACGAGGGCTG
CCTCCCGCCGTTCCCAGCGGACGTTTTCATGATTCCTCAGTACGGGTATCTGACGCTTAATGAT
GGAAGCCAGGCCGTGGGTCGTTCGTCCTTTTACTGCCTGGAATATTTCCCGTCGCAAATGCTAA
GAACGGGTAACAACTTCCAGTTCAGCTACGAGTTTGAGAACGTACCTTTCCATAGCAGCTACGC
TCACAGCCAAAGCCTGGACCGACTAATGAATCCACTCATCGACCAATACTTGTACTATCTCTCT
AGAACTATTAACGGTTCTGGACAGAATCAACAAACGCTAAAATTCAGTGTGGCCGGACCCAGCA
ACATGGCTGTCCAGGGAAGAAACTACATACCTGGACCCAGCTACCGACAACAACGTGTCTCAAC
CACTGTGACTCAAAACAACAACAGCGAATTTGCTTGGCCTGGAGCTTCTTCTTGGGCTCTCAAT
GGACGTAATAGCTTGATGAATCCTGGACCTGCTATGGCCAGCCACAAAGAAGGAGAGGACCGTT
TCTTTCCTTTGTCTGGATCTTTAATTTTTGGCAAACAAGGTACCGGCAGAGACAACGTGGATGC
GGACAAAGTCATGATAACCAACGAAGAAGAAATTAAAACTACTAACCCGGTAGCAACGGAGTCC
TATGGACAAGTGGCCACAAACCACCAGAGTGCACAAAATATGACCAGGGCAAGGGACGCGCAGG
CTCAAACCGGTTGGGTTCAAAACCAAGGAATACTTCCGGGTATGGTTTGGCAGGACAGAGATGT
GTACCTGCAAGGACCCATTTGGGCCAAAATTCCTCACACGGACGGCAACTTTCACCCTTCTCCG
CTGATGGGAGGGTTTGGAATGAAGCACCCGCCTCCTCAGATCCTCATCAAAAACACACCTGTAC
CTGCGGATCCTCCAACGGCCTTCAACAAGGACAAGCTGAACTCTTTCATCACCCAGTATTCTAC
TGGCCAAGTCAGCGTGGAGATCGAGTGGGAGCTGCAGAAGGAAAACAGCAAGCGCTGGAACCCG
GAGATCCAGTACACTTCCAACTATTACAAGTCTAATAATGTTGAATTTGCTGTTAATACTGAAG
GTGTATATAGTGAACCCCGCCCCATTGGCACCAGATACCTGACTCGTAATCTGTAA
>AAV-BI156
(SEQ ID NO: 199468)
ATGGCTGCCGATGGTTATCTTCCAGATTGGCTCGAGGACAACCTTAGTGAAGGAATTCGCGAGT
GGTGGGCTTTGAAACCTGGAGCCCCTCAACCCAAGGCAAATCAACAACATCAAGACAACGCTCG
AGGTCTTGTGCTTCCGGGTTACAAATACCTTGGACCCGGCAACGGACTCGACAAGGGGGAGCCG
GTCAACGCAGCAGACGCGGCGGCCCTCGAGCACGACAAGGCCTACGACCAGCAGCTCAAGGCCG
GAGACAACCCGTACCTCAAGTACAACCACGCCGACGCCGAGTTCCAGGAGCGGCTCAAAGAAGA
TACGTCTTTTGGGGGCAACCTCGGGCGAGCAGTCTTCCAGGCCAAAAAGAGGCTTCTTGAACCT
CTTGGTCTGGTTGAGGAAGCGGCTAAGACGGCTCCTGGAAAGAAGAGGCCTGTAGAGCAGTCTC
CTCAGGAACCGGACTCCTCCGCGGGTATTGGCAAATCGGGTGCACAGCCCGCTAAAAAGAGACT
CAATTTCGGTCAGACTGGCGACACAGAGTCAGTCCCAGACCCTCAACCAATCGGAGAACCTCCC
GCAGCCCCCTCAGGTGTGGGATCTCTTACAATGGCTTCAGGTGGTGGCGCACCAGTGGCAGACA
ATAACGAAGGTGCCGATGGAGTGGGTAGTTCCTCGGGAAATTGGCATTGCGATTCCCAATGGCT
GGGGGACAGAGTCATCACCACCAGCACCCGAACCTGGGCCCTGCCCACCTACAACAATCACCTC
TACAAGCAAATCTCCAACAGCACATCTGGAGGATCTTCAAATGACAACGCCTACTTCGGCTACA
GCACCCCCTGGGGGTATTTTGACTTCAACAGATTCCACTGCCACTTCTCACCACGTGACTGGCA
GCGACTCATCAACAACAACTGGGGATTCCGGCCTAAGCGACTCAACTTCAAGCTCTTCAACATT
CAGGTCAAAGAGGTTACGGACAACAATGGAGTCAAGACCATCGCCAATAACCTTACCAGCACGG
TCCAGGTCTTCACGGACTCAGACTATCAGCTCCCGTACGTGCTCGGGTCGGCTCACGAGGGCTG
CCTCCCGCCGTTCCCAGCGGACGTTTTCATGATTCCTCAGTACGGGTATCTGACGCTTAATGAT
GGAAGCCAGGCCGTGGGTCGTTCGTCCTTTTACTGCCTGGAATATTTCCCGTCGCAAATGCTAA
GAACGGGTAACAACTTCCAGTTCAGCTACGAGTTTGAGAACGTACCTTTCCATAGCAGCTACGC
TCACAGCCAAAGCCTGGACCGACTAATGAATCCACTCATCGACCAATACTTGTACTATCTCTCT
AGAACTATTAACGGTTCTGGACAGAATCAACAAACGCTAAAATTCAGTGTGGCCGGACCCAGCA
ACATGGCTGTCCAGGGAAGAAACTACATACCTGGACCCAGCTACCGACAACAACGTGTCTCAAC
CACTGTGACTCAAAACAACAACAGCGAATTTGCTTGGCCTGGAGCTTCTTCTTGGGCTCTCAAT
GGACGTAATAGCTTGATGAATCCTGGACCTGCTATGGCCAGCCACAAAGAAGGAGAGGACCGTT
TCTTTCCTTTGTCTGGATCTTTAATTTTTGGCAAACAAGGTACCGGCAGAGACAACGTGGATGC
GGACAAAGTCATGATAACCAACGAAGAAGAAATTAAAACTACTAACCCGGTAGCAACGGAGTCC
TATGGACAAGTGGCCACAAACCACCAGAGTGCACAAGGTGAAAAGCCGAAGTTTACTGCGCAGG
CTCAAACCGGTTGGGTTCAAAACCAAGGAATACTTCCGGGTATGGTTTGGCAGGACAGAGATGT
GTACCTGCAAGGACCCATTTGGGCCAAAATTCCTCACACGGACGGCAACTTTCACCCTTCTCCG
CTGATGGGAGGGTTTGGAATGAAGCACCCGCCTCCTCAGATCCTCATCAAAAACACACCTGTAC
CTGCGGATCCTCCAACGGCCTTCAACAAGGACAAGCTGAACTCTTTCATCACCCAGTATTCTAC
TGGCCAAGTCAGCGTGGAGATCGAGTGGGAGCTGCAGAAGGAAAACAGCAAGCGCTGGAACCCG
GAGATCCAGTACACTTCCAACTATTACAAGTCTAATAATGTTGAATTTGCTGTTAATACTGAAG
GTGTATATAGTGAACCCCGCCCCATTGGCACCAGATACCTGACTCGTAATCTGTAA
>AAV-BI157
(SEQ ID NO: 199469)
ATGGCTGCCGATGGTTATCTTCCAGATTGGCTCGAGGACAACCTTAGTGAAGGAATTCGCGAGT
GGTGGGCTTTGAAACCTGGAGCCCCTCAACCCAAGGCAAATCAACAACATCAAGACAACGCTCG
AGGTCTTGTGCTTCCGGGTTACAAATACCTTGGACCCGGCAACGGACTCGACAAGGGGGAGCCG
GTCAACGCAGCAGACGCGGCGGCCCTCGAGCACGACAAGGCCTACGACCAGCAGCTCAAGGCCG
GAGACAACCCGTACCTCAAGTACAACCACGCCGACGCCGAGTTCCAGGAGCGGCTCAAAGAAGA
TACGTCTTTTGGGGGCAACCTCGGGCGAGCAGTCTTCCAGGCCAAAAAGAGGCTTCTTGAACCT
CTTGGTCTGGTTGAGGAAGCGGCTAAGACGGCTCCTGGAAAGAAGAGGCCTGTAGAGCAGTCTC
CTCAGGAACCGGACTCCTCCGCGGGTATTGGCAAATCGGGTGCACAGCCCGCTAAAAAGAGACT
CAATTTCGGTCAGACTGGCGACACAGAGTCAGTCCCAGACCCTCAACCAATCGGAGAACCTCCC
GCAGCCCCCTCAGGTGTGGGATCTCTTACAATGGCTTCAGGTGGTGGCGCACCAGTGGCAGACA
ATAACGAAGGTGCCGATGGAGTGGGTAGTTCCTCGGGAAATTGGCATTGCGATTCCCAATGGCT
GGGGGACAGAGTCATCACCACCAGCACCCGAACCTGGGCCCTGCCCACCTACAACAATCACCTC
TACAAGCAAATCTCCAACAGCACATCTGGAGGATCTTCAAATGACAACGCCTACTTCGGCTACA
GCACCCCCTGGGGGTATTTTGACTTCAACAGATTCCACTGCCACTTCTCACCACGTGACTGGCA
GCGACTCATCAACAACAACTGGGGATTCCGGCCTAAGCGACTCAACTTCAAGCTCTTCAACATT
CAGGTCAAAGAGGTTACGGACAACAATGGAGTCAAGACCATCGCCAATAACCTTACCAGCACGG
TCCAGGTCTTCACGGACTCAGACTATCAGCTCCCGTACGTGCTCGGGTCGGCTCACGAGGGCTG
CCTCCCGCCGTTCCCAGCGGACGTTTTCATGATTCCTCAGTACGGGTATCTGACGCTTAATGAT
GGAAGCCAGGCCGTGGGTCGTTCGTCCTTTTACTGCCTGGAATATTTCCCGTCGCAAATGCTAA
GAACGGGTAACAACTTCCAGTTCAGCTACGAGTTTGAGAACGTACCTTTCCATAGCAGCTACGC
TCACAGCCAAAGCCTGGACCGACTAATGAATCCACTCATCGACCAATACTTGTACTATCTCTCT
AGAACTATTAACGGTTCTGGACAGAATCAACAAACGCTAAAATTCAGTGTGGCCGGACCCAGCA
ACATGGCTGTCCAGGGAAGAAACTACATACCTGGACCCAGCTACCGACAACAACGTGTCTCAAC
CACTGTGACTCAAAACAACAACAGCGAATTTGCTTGGCCTGGAGCTTCTTCTTGGGCTCTCAAT
GGACGTAATAGCTTGATGAATCCTGGACCTGCTATGGCCAGCCACAAAGAAGGAGAGGACCGTT
TCTTTCCTTTGTCTGGATCTTTAATTTTTGGCAAACAAGGTACCGGCAGAGACAACGTGGATGC
GGACAAAGTCATGATAACCAACGAAGAAGAAATTAAAACTACTAACCCGGTAGCAACGGAGTCC
TATGGACAAGTGGCCACAAACCACCAGAGTGCACAAATGGAGCCGCGACAGAGGACTGCGCAGG
CTCAAACCGGTTGGGTTCAAAACCAAGGAATACTTCCGGGTATGGTTTGGCAGGACAGAGATGT
GTACCTGCAAGGACCCATTTGGGCCAAAATTCCTCACACGGACGGCAACTTTCACCCTTCTCCG
CTGATGGGAGGGTTTGGAATGAAGCACCCGCCTCCTCAGATCCTCATCAAAAACACACCTGTAC
CTGCGGATCCTCCAACGGCCTTCAACAAGGACAAGCTGAACTCTTTCATCACCCAGTATTCTAC
TGGCCAAGTCAGCGTGGAGATCGAGTGGGAGCTGCAGAAGGAAAACAGCAAGCGCTGGAACCCG
GAGATCCAGTACACTTCCAACTATTACAAGTCTAATAATGTTGAATTTGCTGTTAATACTGAAG
GTGTATATAGTGAACCCCGCCCCATTGGCACCAGATACCTGACTCGTAATCTGTAA

### Example 12: Saturation Mutagenesis

[0786] Triple site saturation mutagenesis was performed around each of the seven variants of Example 11 in silico using the same six trait prediction models as in Example 10 and filtration criteria to determine which variants were predicted to possess the six traits simultaneously. Because the 6-trait combined prediction hit rate was demonstrated to be ˜90%, those predicted variants were expected to have only a false discovery rate (FDR) of 0.1.

### Example 13: In Vivo Evaluation of Biodistribution of AAV Variants in Macaques

[0787] Experiments were undertaken to evaluate production fitness and enrichment in different organs of a macaque for AAV particles prepared as described above containing 7-mer inserts. In particular, a Fit4Function library was administered intravenously to an adult cynomolgus macaque and biodistribution of the AAV particles was assessed. The library administered had 100,000 unique amino acid variants designed according to Fit4Function criteria (uniformly sampled from a high production fitness sequence space) in addition to a calibration set (3K), control variants, and wild-type AAV9. Each capsid variant in the Fit4Function distribution was represented by either two or six 7-mer replicates (codon replicates; considered biological replicates in the same sample), and AAV9 was represented by two replicates. A purified virus library prepared based upon the Fit4Function distribution was injected at a dose of 4.6×10¹² viral genomes (vg)/kg into a female cynomolgus macaque that was pre-screened for neutralizing antibodies (NAbs) against AAV9 (CRL). Four hours after systemic delivery, the animal was perfused with cold PBS and organs were harvested and snap frozen using dry ice. DNA was extracted using a DNeasy kit in a Qiagen QIAcube Connect. Samples were then processed and analyzed as described herein. The data collected is provided below in Lists 1-14. The highly reproducible data obtained via the Fit4Function approach enabled the quantitative identification of top-performing capsids that localized to major organs in the macaque (i.e., accumulation of capsids in different organs after four hours of injection) in a reproducible manner across 7-mer replicates from a single round of screening (FIG. 20).

[0788] AAV particles containing the peptides listed in Lists 1-6 showed high levels of enrichment in macaque organs relative to AAV9 while maintaining good production fitness. For all organs except liver, the threshold for “high level of enrichment” was set as having an average log 2 enrichment that was 2-fold greater than AAV9 (mean abundance of replicates in organ/abundance in virus library administered). For the liver, the threshold was 3 log 2 fold changes. To avoid listing variants that were poorly produced/packaged and thus not manufacturable, all variants included in any of Lists 1-6 were determined to have good production fitness. “Good production fitness” was defined as being in a production-fit distribution determined using a control set of 3K variants, where the production fitness threshold was set as −2 on the log 2 scale.

[0789] AAV particles containing the peptides listed in List 7 (see also FIG. 19) were poorly enriched (i.e., detargeted) in macaque liver relative to AAV9, while maintaining production fitness that was higher than AAV9. AAV particles having an average log 2 enrichment (abundance in liver/abundance in virus library administered to the macaque) that was more than 2-fold less than the log 2 enrichment of AAV9 in the liver were considered as being detargeted from the liver. By requiring that the listed peptides were associated with good production fitness, it was ensured that low levels of enrichment were not the result of low production fitness and a correspondingly low abundance in the library of AAV particles administered to the macaques.

[0790] AAV particles containing the peptides listed in Lists 8-12 showed low enrichment in the macaque liver relative to AAV9 while maintaining high biodistribution for other organs. AAV particles having an average log 2 enrichment (abundance in liver/abundance in virus library administered to the macaque) that was more than 2-fold less than the log 2 enrichment of AAV9 in the liver were considered as being detargeted from the liver. The targeting thresholds for the indicated organs were 1-fold (log 2 fold change) greater than AAV9, except for the kidney where the threshold was set as equal to or above AAV9.

[0791] In each of Lists 1-12, all enrichment scores include a SEQ ID NO for a peptide followed by one or two log 2 enrichment score values measured for the indicated organ(s) for AAV particles containing capsid polypeptides containing the peptide. An enrichment score for a peptide in an organ of a macaque was calculated as the log 2 of (the relative abundance in the organ of AAV particles containing capsid polypeptides containing the peptide)/(the relative abundance of AAV particles containing capsid polypeptides containing the peptide in a library of AAV particles administered to the macaque). Production fitness was calculated as log 2 of (abundance of an AAV capsid in a virus prep obtained from producer cells)/(abundance of an AAV capsid encoded by DNA used to transfect the producer cells). Abundance was calculated as “reads per million” (RPM).

[0792] List 1, which follows, provides a list of SEQ ID NOs and log 2 enrichment values for peptides inserted within the capsids of AAV particles that were found to be associated with good levels of enrichment of the AAV particles in the liver: 63377, 2.3; 72606, 2.4; 200042, 2.3; 63893, 2.3; 53936, 2.2; 43600, 2.2; 107077, 2.2; 52070, 2.2; 47760, 2.2; 83582, 2.1; 200087, 2.3; 200092, 2.2; 69722, 2.3; 53854, 2.3; 66599, 2.3; 73203, 2.3; 200160, 2.1; 68765, 2.3; 104947, 2.8; 200218, 2.4; 200219, 2.3; 74205, 2.1; 105895, 2.2; 83793, 2.3; 36564, 2.4; 76161, 2.3; 39205, 2.3; 78303, 2.2; 200316, 2.4; 101825, 2.7; 200335, 2.2; 200337, 2.3; 200340, 2.2; 78907, 2.2; 74944, 2.3; 77319, 2.5; 200344, 2.3; 200345, 2.3; 200346, 2.1; 50231, 2.1; 58710, 2.4; 115673, 2.1; 200386, 2.2; 43597, 2.3; 86219, 2.3; 109013, 2.3; 82151, 2.2; 67799, 2.4; 200403, 2.2; 200443, 2.2; 80572, 2.2; 200450, 2.5; 35715, 2.3; 39958, 2.1; 63448, 2.2; 50707, 2.3; 200467, 2.4; 48339, 2.3; 52382, 2.2; 200472, 2.3; 45011, 2.5; 67162, 2.4; 200479, 2.2; 102466, 2.1; 33589, 2.2; 78623, 2.1; 46938, 2.2; 33617, 2.1; 57932, 2.3; 81772, 2.4; 200499, 2.2; 49034, 2.4; 53890, 2.1; 91074, 2.2; 106483, 2.4; 100827, 2.3; 37681, 2.2; 77327, 2.2; 120765, 2.4; 74299, 2.2; 87527, 2.3; 49384, 2.2; 200624, 2.2; 50918, 2.2; 200626, 2.2; 41626, 2.1; 105940, 2.1; 88295, 2.2; 43046, 2.2; 35789, 2.5; 68794, 2.1; 200678, 2.1; 32616, 2.5; 64285, 2.1; 44345, 2.2; 57401, 2.3; 90989, 2.5; 42065, 2.1; 38223, 2.4; 55985, 2.2; 45001, 2.2; 65734, 2.1; 69593, 2.2; 83057, 2.2; 42050, 2.1; 56186, 2.3; 67135, 2.5; 62413, 2.1; 50995, 2.1; 45109, 2.3; 200772, 2.4; 94568, 2.1; 200776, 2.3; 108000, 2.2; 200777, 2.1; 200778, 2.1; 200783, 2.1; 200785, 2.2; 52400, 2.1; 200794, 2.2; 69533, 2.4; 105880, 2.5; 101506, 2.3; 63358, 2.1; 68670, 2.4; 39479, 2.1; 44338, 2.1; 36166, 2.2; 47387, 2.3; 97547, 2.1; 35833, 2.2; 43467, 2.6; 38169, 2.3; 200888, 2.2; 45708, 2.2; 47571, 2.1; 35892, 2.1; 99065, 2.2; 81255, 2.2; 200902, 2.1; 93082, 2.2; 89706, 2.3; 48974, 2.1; 200922, 2.1; 200923, 2.1; 64883, 2.2; 67094, 2.1; 200927, 2.2; 65933, 2.1; 38734, 2.3; 78793, 2.2; 55643, 2.2; 200937, 2.1; 98298, 2.3; 200968, 2.1; 106882, 2.1; 46939, 2.4; 60204, 2.2; 200999, 2.3; 201003, 2.3; 201005, 2.2; 70168, 2.6; 48238, 2.2; 201027, 2.2; 35219, 2.3; 102543, 2.5; 51915, 2.1; 201085, 2.2; 201094, 2.2; 95810, 2.2; 201102, 2.3; 108261, 2.3; 64635, 2.2; 49434, 2.5; 85369, 2.5; 201112, 2.5; 201115, 2.5; 52112, 2.1; 201137, 2.2; 43959, 2.2; 37155, 2.2; 201152, 2.2; 74640, 2.2; 201159, 2.2; 100982, 2.4; 75005, 2.1; 143060, 2.1; 88402, 2.3; 79669, 2.2; 80900, 2.1; 13607, 2.2; 75657, 2.2; 86415, 2.3; 201176, 2.1; 201177, 2.3; 163393, 2.1; 201179, 2.1; 85309, 2.1; 87337, 2.2; 88148, 2.3; 201197, 2.2; 94565, 2.5; 56622, 2.3; 91083, 2.1; 201207, 2.2; 201208, 2.4; 68541, 2.5; 69173, 2.4; 49742, 2.4; 62222, 2.1; 201276, 2.2; 201279, 2.1; 201280, 2.3; 72078, 2.2; 65825, 2.2; 201299, 2.2; 83935, 2.1; 201314, 2.5; 108279, 2.2; 97373, 2.2; 66461, 2.2; 201328, 2.2; 72227, 2.2; 38217, 2.2; 40082, 2.2; 52736, 2.1; 201341, 2.3; 201346, 2.1; 50977, 2.3; 201361, 2.3; 65895, 2.1; 201363, 2.5; 38419, 2.2; 101482, 2.4; 54528, 2.4; 64493, 2.1; 36563, 2.1; 201398, 2.3; 201408, 2.4; 60113, 2.1; 81262, 2.2; 201420, 2.1; 201421, 2.2; 201422, 2.1; 152992, 2.1; 50948, 2.2; 201442, 2.2; 37358, 2.2; 153995, 2.2; 201449, 2.1; 84004, 2.2; 51244, 2.2; 201458, 2.3; 41729, 2.1; 66907, 2.2; 61875, 2.1; 103566, 2.3; 59464, 2.4; 201482, 2.8; 64902, 2.6; 98751, 2.2; 50376, 2.2; 42538, 2.6; 155181, 2.1; 55980, 2.6; 71904, 2.1; 79516, 2.2; 201506, 2.5; 47079, 2.1; 82333, 2.3; 52416, 2.3; 163321, 2.3; 201524, 2.2; 201526, 2.2; 201527, 2.1; 98668, 2.3; 201534, 2.3; 96547, 2.3; 90806, 2.7; 94161, 2.2; 52119, 2.1; and 59395, 2.3.

[0793] List 2, which follows, provides a list of SEQ ID NOs and log 2 enrichment values for peptides inserted within the capsids of AAV particles that were found to be associated with good levels of enrichment of the AAV particles in the lungs: 200031, 4.1; 200048, 3.5; 200052, 4.9; 200059, 3.2; 200060, 3.3; 84763, 5.3; 200065, 9.3; 200102, 6.8; 200121, 6.9; 32538, 3.3; 200189, 5.4; 200191, 5.8; 200212, 3.8; 200216, 8.1; 200280, 3.8; 200327, 5.4; 200348, 3.1; 200355, 4.5; 200364, 4.4; 200371, 4.8; 7263, 3.9; 200398, 7.4; 200399, 3.4; 200406, 3.5; 200418, 8.9; 200427, 8.5; 97877, 5.1; 200471, 3.2; 61260, 3.5; 71754, 3.9; 200507, 8.0; 200521, 7.5; 200528, 3.5; 200540, 5.1; 200545, 7.7; 200546, 6.7; 200585, 3.7; 200611, 8.9; 200617, 4.5; 200618, 5.9; 200631, 3.1; 200646, 8.9; 101635, 7.7; 52625, 5.6; 200664, 3.5; 200711, 3.3; 94148, 3.4; 200723, 4.0; 109331, 3.1; 89312, 6.4; 200755, 3.6; 68196, 5.5; 92906, 7.5; 99892, 4.8; 200761, 6.0; 200763, 3.8; 66764, 3.5; 101214, 8.8; 200793, 6.3; 200796, 6.6; 200798, 4.7; 200799, 9.6; 200802, 8.7; 200809, 3.1; 200814, 6.3; 108890, 3.5; 200873, 3.4; 200874, 4.4; 200875, 8.6; 200891, 4.6; 103281, 3.2; 200893, 3.6; 71742, 3.1; 101302, 6.5; 200942, 5.4; 200973, 3.2; 200977, 8.4; 200979, 8.8; 200988, 4.2; 200991, 9.0; 201001, 4.2; 201002, 3.1; 201025, 4.9; 201028, 7.9; 33382, 4.3; 201035, 4.9; 201036, 8.8; 201049, 3.8; 201064, 7.8; 201067, 7.7; 201075, 6.6; 201077, 3.9; 201126, 8.1; 32565, 3.9; 44912, 4.2; 201139, 6.4; 201141, 3.1; 201158, 7.2; 201169, 5.1; 201171, 4.0; 32506, 4.5; 201172, 6.0; 75489, 3.1; 201209, 4.0; 201210, 4.8; 201225, 4.8; 201229, 5.3; 201236, 6.9; 107803, 6.2; 201256, 4.0; 201262, 3.5; 201268, 7.6; 201271, 5.2; 49119, 8.4; 201277, 9.8; 61210, 6.4; 201286, 4.0; 56844, 3.3; 201332, 3.5; 34471, 3.6; 201364, 3.3; 201381, 8.9; 201406, 3.4; 88680, 7.2; 110284, 6.2; 49578, 3.4; 201432, 9.1; 96654, 3.4; 201493, 4.1; 201517, 3.4; 48875, 5.1; 201523, 4.3; 201531, 8.6; and 201541, 3.4.

[0794] List 3, which follows, provides a list of SEQ ID NOs and log 2 enrichment values for peptides inserted within the capsids of AAV particles that were found to be associated with good levels of enrichment of the AAV particles in muscle: 200052, 4.3; 200056, 2.8; 105464, 2.9; 79382, 2.8; 200140, 5.8; 200189, 4.6; 200191, 6.4; 68765, 2.9; 200250, 5.2; 200280, 4.2; 200293, 3.5; 200327, 5.8; 53704, 3.3; 32763, 3.3; 200371, 4.8; 7263, 4.8; 200410, 3.3; 200534, 3.9; 200686, 3.7; 200723, 6.6; 200852, 3.1; 200943, 2.8; 44631, 3.0; 36404, 3.5; 53237, 3.7; 201040, 2.8; 201062, 3.9; 201075, 5.7; 33865, 3.3; 32998, 3.6; 59224, 3.0; 32565, 4.7; 201139, 5.8; 201154, 3.3; 201158, 6.8; 201178, 2.9; 32637, 3.4; 93298, 3.2; 55075, 2.9; 32712, 3.2; 32722, 3.6; 32709, 3.3; 46083, 3.6; 96654, 4.3; 32753, 3.7; 201493, 3.7; 156812, 3.3; and 36771, 3.6.

[0795] List 4, which follows, provides a list of SEQ ID NOs and log 2 enrichment values for peptides inserted within the capsids of AAV particles that were found to be associated with good levels of enrichment of the AAV particles in the heart: 200052, 3.0; 200140, 5.5; 200189, 3.7; 200191, 5.5; 200250, 3.5; 200327, 5.1; 32763, 2.9; 200371, 4.2; 7263, 4.4; 200534, 3.7; 200570, 8.0; 200723, 5.4; 36404, 2.9; 53237, 3.5; 201062, 3.7; 201075, 5.6; 33865, 3.3; 32998, 3.5; 59224, 3.0; 32565, 4.3; 201139, 5.7; 201154, 2.9; 201158, 6.7; 201169, 5.7; 201206, 4.4; 32637, 3.2; 93298, 3.4; 32712, 3.1; 32722, 3.4; 32709, 3.3; 46083, 3.4; 96654, 4.1; 32753, 3.5; 41456, 3.2; 201493, 4.0; 156812, 3.0; and 36771, 3.3.

[0796] List 5, which follows, provides a list of SEQ ID NOs and log 2 enrichment values for peptides inserted within the capsids of AAV particles that were found to be associated with good levels of enrichment of the AAV particles in the brain: 200028, 2.4; 200029, 2.2; 21985, 2.4; 200033, 3.0; 200045, 2.3; 53936, 2.4; 200055, 1.9; 200060, 2.4; 169361, 2.2; 200061, 2.2; 91886, 2.4; 200063, 2.2; 106074, 2.3; 84763, 2.2; 200064, 1.9; 86507, 2.1; 70796, 1.9; 200070, 3.7; 79598, 2.0; 109250, 2.1; 96433, 2.0; 96584, 2.0; 200080, 2.2; 200084, 2.2; 89468, 1.9; 77619, 1.9; 200088, 1.9; 200090, 2.0; 200099, 1.9; 71979, 2.3; 200101, 2.8; 200106, 2.0; 200107, 2.1; 200111, 2.0; 87751, 2.8; 46410, 2.5; 68765, 2.7; 200204, 1.9; 200208, 2.0; 200262, 2.3; 200268, 2.2; 200274, 3.7; 200284, 2.7; 200285, 2.7; 200294, 2.3; 200309, 2.3; 200323, 2.0; 200333, 2.6; 200346, 2.0; 200351, 2.4; 200363, 2.0; 53704, 2.2; 32763, 3.5; 33390, 2.1; 200373, 3.4; 70780, 2.3; 7263, 4.2; 200399, 1.9; 200400, 2.6; 200404, 1.9; 200406, 2.7; 200433, 2.8; 200456, 2.1; 200461, 1.9; 200462, 2.1; 200469, 2.2; 200473, 2.2; 61260, 2.8; 200476, 2.3; 200477, 2.0; 200478, 2.5; 64490, 2.1; 200480, 2.1; 106273, 2.7; 200481, 2.0; 200482, 2.0; 89826, 2.1; 200484, 2.2; 200485, 2.0; 10077, 2.1; 200488, 1.9; 78003, 2.0; 3124, 1.9; 200490, 2.1; 200491, 2.2; 117765, 2.4; 200500, 2.2; 167913, 2.3; 200501, 2.0; 200504, 2.5; 106483, 1.9; 63204, 2.2; 200516, 2.1; 200520, 1.9; 200525, 2.2; 42550, 2.1; 200526, 2.2; 76850, 2.1; 38739, 2.1; 101451, 2.2; 200532, 2.4; 200534, 3.4; 32519, 2.5; 57001, 3.0; 58157, 2.0; 103752, 2.2; 45722, 2.1; 86300, 1.9; 99128, 2.0; 50757, 1.9; 200556, 2.0; 42876, 2.5; 200561, 2.1; 40050, 2.3; 200565, 2.1; 200566, 2.0; 63907, 2.3; 200570, 10.2; 200572, 2.1; 200582, 3.0; 200590, 2.2; 200591, 2.6; 200594, 2.0; 72225, 2.0; 81977, 2.1; 91663, 2.2; 200601, 2.0; 200604, 2.6; 200607, 2.2; 200608, 2.1; 78915, 2.0; 200610, 2.0; 48213, 2.2; 200612, 2.4; 70453, 2.0; 48388, 2.1; 86682, 2.2; 102260, 1.9; 50918, 2.1; 99471, 2.1; 200626, 2.1; 200635, 2.0; 43046, 2.1; 200647, 2.0; 46259, 2.1; 77074, 1.9; 200650, 2.4; 13019, 2.2; 200661, 2.3; 200667, 2.5; 200668, 2.0; 88766, 2.7; 200677, 1.9; 200679, 3.3; 200680, 2.5; 200681, 2.0; 200682, 2.4; 200683, 1.9; 200684, 2.3; 200685, 2.4; 87904, 2.0; 108679, 1.9; 101370, 2.0; 34357, 2.2; 88923, 2.1; 200704, 2.1; 200706, 2.4; 200709, 2.0; 200711, 2.0; 200713, 2.0; 93829, 2.0; 108721, 2.1; 200718, 2.0; 65420, 2.1; 200720, 1.9; 200721, 2.2; 60848, 2.3; 200727, 2.1; 126497, 1.9; 200742, 2.2; 200743, 2.1; 200746, 1.9; 60287, 2.1; 75869, 2.4; 108841, 1.9; 200751, 2.3; 68056, 2.4; 94834, 2.0; 200755, 2.4; 72403, 1.9; 102461, 1.9; 45832, 2.5; 200757, 2.1; 72004, 2.0; 88621, 2.2; 68196, 2.0; 200758, 2.4; 76324, 2.1; 200764, 4.3; 200766, 2.6; 94599, 1.9; 13597, 2.1; 200767, 2.0; 94426, 1.9; 49869, 1.9; 200769, 2.0; 200770, 2.1; 200771, 2.4; 54060, 1.9; 67584, 1.9; 109588, 2.0; 91006, 2.0; 66764, 2.0; 70827, 3.7; 162412, 2.1; 200786, 2.1; 200787, 2.0; 52933, 1.9; 49962, 2.2; 200790, 2.2; 38653, 1.9; 58737, 2.3; 200797, 1.9; 200800, 2.0; 43137, 2.0; 200801, 2.6; 58042, 2.0; 94866, 2.0; 200805, 2.0; 200806, 2.2; 200810, 2.3; 38280, 1.9; 35108, 2.6; 34898, 1.9; 200823, 2.4; 200824, 2.2; 200825, 2.1; 200826, 2.2; 200828, 2.9; 200829, 2.0; 200830, 2.1; 200831, 2.1; 61975, 2.5; 84093, 2.1; 88723, 2.2; 200834, 1.9; 105687, 2.2; 94857, 2.3; 104076, 2.2; 40045, 2.0; 200843, 1.9; 78168, 2.3; 200844, 2.1; 200846, 2.3; 81592, 2.0; 100586, 2.6; 200847, 2.3; 70809, 2.1; 200848, 2.4; 200849, 2.0; 200853, 2.1; 48313, 2.0; 97547, 2.1; 200855, 2.3; 200858, 2.0; 200859, 1.9; 200860, 3.0; 105106, 2.1; 200861, 2.2; 35224, 2.0; 67019, 2.0; 200866, 2.1; 200867, 2.3; 200868, 1.9; 200869, 2.1; 68699, 1.9; 34718, 2.2; 200876, 1.9; 101351, 1.9; 200890, 2.1; 103281, 2.4; 65578, 2.0; 200892, 1.9; 133104, 2.2; 200895, 2.4; 200896, 2.3; 98413, 1.9; 200898, 2.0; 200899, 2.1; 200900, 2.1; 200901, 1.9; 89957, 1.9; 62586, 1.9; 200910, 3.0; 200911, 2.3; 200914, 2.7; 87020, 1.9; 200919, 2.3; 200921, 2.0; 200924, 2.4; 51909, 2.1; 200928, 2.1; 200929, 2.6; 200930, 2.0; 61587, 1.9; 200936, 1.9; 70504, 1.9; 109291, 2.9; 51953, 2.3; 200978, 2.1; 200983, 2.0; 200984, 2.0; 36404, 3.9; 53237, 3.6; 48216, 2.2; 60838, 2.0; 200994, 2.3; 200996, 2.2; 200997, 2.2; 200998, 2.2; 90107, 2.2; 201003, 2.2; 50151, 2.1; 201005, 1.9; 201007, 2.0; 201011, 2.9; 82422, 2.1; 201013, 2.1; 66952, 1.9; 79038, 2.0; 201025, 4.2; 33382, 2.5; 201030, 2.1; 201031, 2.2; 53701, 1.9; 55860, 2.0; 201045, 2.1; 201050, 2.4; 201051, 2.6; 201054, 2.1; 201056, 2.0; 201057, 2.0; 201062, 2.4; 201071, 2.0; 201076, 2.5; 201077, 2.4; 201078, 2.3; 201079, 1.9; 43755, 1.9; 201086, 1.9; 201094, 2.0; 201108, 2.4; 76196, 2.0; 51301, 2.0; 201113, 1.9; 95594, 2.3; 140888, 2.2; 101051, 2.1; 33865, 3.1; 32998, 2.7; 32565, 5.4; 102163, 2.1; 201135, 2.4; 103316, 1.9; 78067, 2.1; 63626, 1.9; 201140, 2.2; 91320, 1.9; 43796, 1.9; 74779, 2.0; 104866, 2.5; 201157, 1.9; 76252, 1.9; 201160, 2.5; 201161, 2.5; 2634, 2.1; 201169, 8.7; 32506, 2.5; 81155, 3.7; 99430, 1.9; 201175, 1.9; 89279, 2.0; 201178, 5.2; 201185, 2.1; 201187, 2.1; 201188, 2.4; 100364, 1.9; 201189, 2.0; 201190, 2.1; 84377, 2.1; 201194, 2.2; 201195, 2.6; 74793, 2.0; 201196, 2.2; 201199, 3.0; 75489, 2.4; 201203, 2.4; 76621, 2.1; 201205, 2.1; 75744, 2.0; 40943, 2.4; 201206, 6.5; 69429, 2.0; 76785, 2.2; 57077, 2.3; 201213, 2.1; 201217, 2.1; 201234, 1.9; 97177, 1.9; 100548, 2.5; 201251, 2.0; 201253, 2.2; 201254, 2.3; 106862, 1.9; 201260, 1.9; 94898, 3.9; 201264, 2.5; 72595, 2.1; 32637, 3.5; 32649, 2.4; 93298, 3.1; 8018, 2.0; 201273, 2.0; 109039, 2.3; 99240, 1.9; 35585, 1.9; 81812, 2.3; 61210, 3.0; 201281, 2.4; 201283, 2.0; 201290, 2.4; 201291, 2.3; 201298, 2.0; 51974, 2.2; 87296, 2.0; 201301, 2.5; 55075, 2.6; 201329, 1.9; 201334, 2.2; 201337, 2.7; 90405, 2.2; 105267, 1.9; 32958, 1.9; 38480, 1.9; 34471, 2.6; 49231, 1.9; 60450, 1.9; 201343, 2.0; 32712, 3.1; 201351, 3.5; 32722, 3.1; 201354, 2.1; 201359, 2.0; 109053, 2.0; 47063, 2.0; 201372, 2.4; 201373, 2.1; 104481, 2.0; 201375, 2.1; 201377, 2.5; 201380, 1.9; 99040, 2.1; 77969, 1.9; 109783, 2.5; 201382, 2.0; 201385, 2.0; 102859, 2.0; 201392, 1.9; 201405, 1.9; 201407, 2.2; 71829, 2.0; 91638, 2.1; 49578, 2.9; 201418, 2.6; 44640, 2.0; 80748, 1.9; 201423, 2.3; 201425, 2.1; 201428, 3.3; 94711, 2.0; 32709, 3.1; 46083, 3.9; 96654, 4.0; 32753, 3.7; 201436, 2.2; 201440, 2.3; 201446, 2.0; 81815, 2.3; 201464, 2.1; 201468, 2.3; 33824, 2.3; 201473, 1.9; 201476, 2.2; 201479, 2.4; 201480, 2.7; 201481, 2.1; 44517, 2.0; 201483, 2.0; 201485, 2.1; 2744, 2.2; 108782, 1.9; 43721, 2.4; 201488, 2.4; 97488, 1.9; 201490, 2.0; 108521, 4.5; 201491, 3.6; 49001, 2.1; 201492, 2.2; 201493, 3.4; 201505, 2.6; 201512, 2.0; 201513, 1.9; 201515, 2.2; 201518, 1.9; 156099, 2.0; 201519, 2.1; 101307, 2.2; 75166, 2.0; 63975, 2.6; 201522, 1.9; 76664, 2.5; 110032, 5.9; 201523, 2.3; 156812, 2.9; 66173, 1.9; 201529, 2.5; 36771, 2.7; 201530, 1.9; 99931, 1.9; 71471, 1.9; 77043, 2.2; 79041, 1.9; 70516, 1.9; 37561, 3.9; 48428, 2.1; 201542, 2.3; and 70659, 2.2.

[0797] List 6, which follows, provides a list of SEQ ID NOs and log 2 enrichment values for peptides inserted within the capsids of AAV particles that were found to be associated with good levels of enrichment of the AAV particles in the kidneys: 46026, 4.2; 50088, 4.5; 200098, 3.1; 38820, 3.2; 106273, 3.4; 200494, 3.5; 200495, 3.2; 200497, 3.9; 35576, 3.4; 38739, 4.6; 101451, 4.4; 58157, 4.5; 48089, 3.4; 62617, 4.0; 42876, 4.6; 85112, 3.7; 40050, 4.7; 67392, 3.5; 101176, 3.7; 200568, 3.8; 200570, 6.1; 48213, 4.9; 48388, 3.4; 200676, 3.1; 88766, 4.8; 103140, 3.2; 60287, 4.0; 103773, 4.3; 39984, 3.3; 61975, 3.4; 80013, 3.2; 41683, 3.5; 88943, 3.6; 200924, 4.8; 50855, 3.6; 51909, 4.7; 200929, 5.0; 200940, 3.1; 85694, 3.6; 50151, 3.3; 52650, 3.1; 201076, 3.6; 43755, 3.4; 201169, 4.9; 82993, 3.6; 40943, 3.5; 201206, 3.4; 69429, 3.7; 76853, 4.3; 57077, 3.5; 27565, 3.4; 49696, 3.2; 101305, 3.3; 38904, 3.4; 53231, 3.4; 100240, 3.8; 201428, 4.0; and 201521, 3.8.

[0798] List 7, which follows, provides a list of SEQ ID NOs and log 2 enrichment values for peptides inserted within the capsids of AAV particles that were found to be associated with low levels of enrichment (i.e., detargeting) of the AAV particles in the liver: 82853, −3.1; 200032, −3.9; 200034, −3.0; 99534, −3.2; 200036, −4.1; 107243, −3.3; 200037, −3.9; 200038, −3.3; 200039, −4.4; 200040, −3.2; 200041, −4.0; 200043, −2.9; 200044, −3.9; 200047, −3.0; 200050, −3.0; 200051, −3.4; 200053, −3.0; 200058, −3.8; 200068, −3.4; 159746, −2.9; 89132, −3.1; 200072, −4.6; 200073, −3.5; 200074, −3.2; 200075, −3.1; 200076, −3.9; 200077, −3.4; 97447, −3.2; 200082, −3.4; 200083, −3.4; 200086, −3.6; 200094, −2.9; 200095, −2.9; 200097, −3.0; 97276, −3.6; 200103, −2.9; 200105, −3.0; 200109, −3.0; 200110, −3.2; 200112, −3.0; 200114, −3.7; 200115, −3.6; 106717, −2.9; 276, −3.3; 200116, −3.5; 200118, −3.6; 79885, −2.9; 200119, −3.7; 200120, −3.3; 200122, −3.5; 200123, −3.6; 200125, −3.3; 200126, −3.1; 200127, −3.1; 200128, −2.9; 200129, −3.0; 200130, −4.0; 200131, −3.3; 200133, −3.0; 200134, −3.7; 200135, −3.2; 200136, −3.2; 200137, −3.0; 200141, −3.1; 200142, −3.0; 200143, −3.4; 200144, −3.6; 200145, −4.0; 200146, −3.1; 200148, −3.0; 200149, −3.4; 200150, −3.6; 9595, −3.3; 200151, −3.8; 200154, −3.0; 200155, −3.7; 200156, −3.2; 200157, −3.0; 200158, −3.3; 200159, −3.3; 200161, −3.1; 200163, −3.5; 200165, −3.5; 200166, −2.9; 200167, −3.4; 41434, −3.9; 200169, −3.5; 200170, −3.5; 200172, −3.0; 200174, −4.2; 200175, −3.1; 200178, −3.2; 200179, −4.5; 200180, −3.2; 200183, −3.6; 200185, −2.9; 200186, −4.5; 200187, −4.1; 200188, −3.0; 200190, −3.0; 200192, −5.0; 159634, −2.9; 200193, −3.9; 200194, −4.2; 104139, −3.3; 200195, −3.3; 200196, −3.7; 200197, −2.9; 200198, −3.5; 200199, −2.9; 200200, −3.5; 200201, −3.2; 200203, −5.1; 200205, −3.0; 200207, −3.4; 200209, −3.1; 200210, −3.9; 200211, −4.9; 86589, −3.0; 200213, −4.1; 200214, −3.0; 11809, −3.0; 200215, −3.4; 105416, −2.9; 200217, −3.7; 200221, −4.6; 200222, −3.7; 200223, −3.1; 200224, −4.0; 200226, −3.2; 200227, −3.2; 200229, −4.8; 200230, −3.9; 200231, −4.1; 200233, −3.1; 200235, −3.0; 200236, −3.2; 200237, −3.2; 200239, −3.2; 200241, −3.3; 200244, −3.2; 200245, −4.1; 200249, −3.2; 200252, −3.5; 200254, −2.9; 200256, −3.1; 200258, −3.2; 200259, −4.6; 200260, −3.1; 200265, −4.2; 200267, −3.3; 200269, −3.1; 200271, −2.9; 200272, −3.4; 74254, −3.2; 200273, −3.1; 200276, −3.1; 78462, −3.0; 200278, −3.0; 99977, −4.4; 200281, −2.9; 99543, −3.0; 12395, −4.9; 200289, −4.3; 200290, −4.2; 200291, −3.2; 200295, −3.3; 200296, −3.2; 200297, −3.9; 200298, −4.6; 200299, −3.6; 200300, −5.7; 200301, −4.9; 200302, −3.3; 200303, −3.0; 200306, −4.3; 200307, −3.1; 200314, −3.0; 7772, −2.9; 200315, −3.5; 200317, −3.7; 200319, −3.0; 200320, −3.4; 200322, −3.0; 109195, −3.1; 92765, −3.0; 200324, −4.0; 200325, −3.8; 200326, −4.1; 200328, −3.4; 200329, −3.5; 97581, −3.4; 200330, −3.3; 109197, −2.9; 200331, −3.1; 200332, −3.2; 95485, −4.3; 200339, −3.3; 200341, −3.3; 200342, −3.2; 200343, −3.5; 200347, −3.3; 200352, −3.1; 200354, −3.4; 200360, −3.7; 200362, −2.9; 63264, −3.0; 200366, −2.9; 200367, −3.8; 200369, −3.5; 200372, −3.1; 79466, −3.0; 200376, −3.8; 200377, −3.3; 200379, −3.4; 200380, −3.0; 200381, −2.9; 200382, −3.9; 200383, −3.3; 200384, −3.1; 200385, −3.0; 200387, −3.0; 200388, −2.9; 200392, −2.9; 200393, −3.4; 200394, −3.3; 200395, −3.1; 200397, −3.0; 200401, −3.3; 200407, −3.9; 200408, −4.2; 200409, −5.6; 200411, −3.5; 200412, −4.8; 200413, −3.4; 200417, −3.8; 200420, −3.9; 200421, −3.5; 200422, −3.0; 200423, −3.8; 200424, −4.1; 200425, −3.2; 200432, −3.2; 200434, −3.0; 200435, −4.1; 200436, −3.2; 200438, −3.2; 200440, −3.3; 200442, −3.1; 200451, −3.5; 200452, −3.2; 200454, −3.8; 200455, −4.9; 200458, −3.1; 109676, −3.0; 200463, −3.3; 200468, −3.0; 200474, −3.6; 200486, −3.6; 200487, −4.1; 200489, −4.3; 200496, −3.0; 200505, −3.1; 200508, −3.8; 100527, −2.9; 200509, −4.2; 200510, −3.3; 200511, −3.7; 200512, −3.6; 200514, −3.1; 200517, −3.2; 200518, −4.1; 200519, −3.3; 200522, −2.9; 200524, −3.1; 83308, −3.6; 83170, −3.7; 200530, −3.6; 200533, −3.2; 93048, −4.1; 200536, −3.1; 200538, −3.3; 200539, −3.9; 100632, −3.9; 200543, −3.8; 200544, −3.4; 200549, −3.5; 200552, −3.7; 200553, −3.6; 200554, −4.4; 200557, −3.5; 200558, −3.1; 200562, −3.7; 200564, −2.9; 200574, −3.3; 200575, −4.2; 200576, −3.8; 200578, −3.9; 200579, −3.8; 200580, −3.6; 200581, −3.0; 200586, −4.0; 200587, −3.0; 200589, −3.0; 200592, −3.1; 87987, −3.1; 200595, −3.0; 200596, −3.5; 100356, −3.9; 109414, −3.5; 67930, −2.9; 200598, −3.0; 200613, −3.6; 200614, −3.7; 200615, −3.0; 81196, −3.5; 200619, −3.6; 200620, −3.8; 200621, −2.9; 200623, −3.2; 200627, −3.9; 200629, −4.1; 200630, −3.2; 200633, −3.0; 200634, −3.6; 200636, −3.3; 200637, −3.3; 200638, −3.6; 200639, −3.6; 200640, −3.9; 200643, −3.1; 200651, −3.2; 200652, −3.6; 97034, −3.4; 200653, −3.3; 200654, −2.9; 107841, −3.2; 200655, −3.9; 200656, −4.3; 200657, −3.5; 200659, −3.1; 200660, −3.4; 200662, −3.3; 200663, −4.1; 200666, −3.5; 200670, −3.5; 200671, −2.9; 200687, −3.1; 200688, −4.3; 200690, −4.0; 200693, −3.5; 200694, −3.3; 200699, −3.2; 200703, −3.1; 107939, −3.5; 200707, −4.0; 200712, −3.0; 200715, −3.3; 200716, −3.0; 200717, −3.7; 200724, −4.1; 200725, −3.0; 200726, −3.1; 200729, −3.1; 100441, −3.2; 200731, −3.8; 200732, −3.9; 200739, −3.1; 99822, −3.2; 200745, −2.9; 200747, −3.1; 84445, −3.1; 200749, −3.4; 160029, −3.4; 90695, −3.9; 200759, −4.8; 200760, −4.2; 106405, −2.9; 200768, −3.9; 200774, −3.2; 200780, −3.0; 200781, −3.0; 200782, −3.0; 200788, −3.4; 65598, −3.3; 200803, −3.1; 200804, −3.7; 94066, −3.7; 200808, −3.7; 200816, −2.9; 200820, −3.5; 200821, −3.7; 110191, −3.1; 160068, −3.0; 200837, −3.2; 200839, −3.4; 200841, −3.3; 200842, −3.7; 100348, −3.3; 160076, −3.4; 200850, −3.2; 200851, −3.2; 200854, −3.2; 104536, −3.0; 200863, −3.0; 200870, −3.7; 200877, −3.3; 44930, −2.9; 200880, −2.9; 200881, −3.1; 200883, −3.0; 200884, −3.0; 200886, −4.1; 200889, −4.4; 104699, −3.4; 200903, −3.7; 200907, −3.9; 200915, −3.2; 200916, −3.1; 200917, −3.5; 200918, −3.0; 200925, −3.3; 200931, −2.9; 200934, −3.0; 200938, −3.5; 88971, −2.9; 200945, −4.0; 106064, −3.0; 200947, −3.3; 200949, −3.2; 200950, −3.1; 200951, −4.1; 200952, −2.9; 200953, −3.3; 200956, −3.3; 200957, −3.0; 200958, −3.4; 200961, −3.1; 54729, −3.5; 200962, −3.2; 200963, −3.9; 200964, −4.0; 104615, −2.9; 200965, −3.9; 200966, −3.4; 200969, −2.9; 93726, −3.0; 200972, −2.9; 200976, −3.7; 136333, −3.9; 200980, −4.0; 200982, −3.0; 200985, −3.1; 200986, −3.1; 93161, −4.5; 99024, −3.2; 201000, −4.6; 201009, −3.2; 201012, −3.1; 9212, −3.3; 201014, −4.4; 201015, −3.4; 201017, −3.3; 201018, −3.0; 201019, −2.9; 201020, −3.3; 201021, −3.5; 201023, −3.0; 201029, −4.1; 201033, −3.9; 96403, −3.5; 201042, −3.2; 201044, −3.3; 201046, −3.2; 52630, −3.0; 201053, −4.1; 201055, −3.9; 201058, −2.9; 201059, −3.8; 201060, −3.0; 201065, −2.9; 67035, −3.0; 201068, −4.1; 98522, −3.2; 201069, −3.5; 201070, −2.9; 201072, −3.3; 201073, −4.0; 201080, −3.0; 201082, −3.3; 201083, −2.9; 201087, −3.5; 9420, −3.4; 201088, −4.6; 201089, −3.1; 201090, −3.3; 201091, −3.0; 201092, −3.5; 201093, −3.1; 201096, −3.2; 160223, −3.0; 201097, −3.3; 201099, −3.3; 201100, −3.4; 201103, −3.6; 201104, −3.9; 201105, −3.0; 201106, −3.2; 201109, −3.2; 201114, −3.1; 201116, −3.1; 201117, −4.2; 201118, −2.9; 201119, −2.9; 201120, −3.1; 201121, −3.1; 60853, −3.1; 201122, −3.1; 201123, −3.4; 110378, −3.5; 201124, −3.3; 87362, −2.9; 201127, −3.8; 201130, −2.9; 201132, −3.5; 201133, −3.3; 201142, −4.7; 201144, −3.1; 201145, −4.4; 81605, −2.9; 201147, −3.2; 201148, −4.0; 201149, −3.1; 201150, −2.9; 201151, −3.3; 201156, −2.9; 201162, −3.0; 201163, −3.4; 201164, −2.9; 201165, −3.3; 201166, −4.0; 201180, −3.5; 201182, −3.1; 86814, −3.1; 201211, −3.1; 201212, −3.1; 201214, −4.8; 201215, −3.1; 86262, −3.1; 201216, −3.1; 201218, −3.3; 201219, −3.9; 201220, −3.7; 90505, −2.9; 201222, −3.2; 201223, −3.0; 201231, −3.9; 201232, −3.2; 201233, −4.1; 201239, −5.0; 201240, −3.7; 201241, −3.3; 201242, −3.3; 104571, −2.9; 201245, −2.9; 201246, −3.1; 201247, −3.7; 201248, −3.1; 105643, −3.2; 201255, −2.9; 201257, −3.1; 201261, −3.9; 201263, −3.2; 201265, −3.6; 201266, −3.1; 92723, −3.5; 201267, −3.9; 201269, −3.6; 201272, −3.0; 201274, −2.9; 201275, −3.9; 15689, −3.6; 97843, −3.0; 201278, −3.0; 201284, −4.6; 201285, −3.4; 201287, −6.1; 100846, −3.1; 201288, −3.3; 201289, −3.7; 201292, −3.3; 201293, −3.7; 201294, −4.0; 201295, −3.1; 201296, −4.1; 201297, −4.2; 201302, −3.1; 82168, −3.1; 201303, −4.1; 201306, −3.2; 201309, −3.6; 201310, −2.9; 201315, −3.9; 201317, −3.1; 201318, −2.9; 201319, −3.0; 201320, −3.1; 201322, −3.5; 68865, −3.5; 201323, −3.0; 201325, −3.3; 201326, −3.2; 201330, −3.0; 89460, −3.0; 201333, −3.8; 201335, −3.1; 85836, −3.0; 201338, −4.4; 81455, −3.2; 201344, −4.2; 201345, −3.6; 201348, −3.0; 201349, −3.3; 201350, −3.0; 201353, −2.9; 80573, −3.1; 201355, −3.0; 201357, −3.6; 201358, −3.4; 201360, −3.0; 68273, −3.5; 201367, −3.1; 201368, −3.0; 89891, −3.4; 201369, −3.4; 201370, −4.8; 201374, −3.0; 94764, −3.2; 201376, −4.0; 201379, −3.4; 88050, −3.3; 201383, −3.8; 106023, −3.3; 201386, −3.1; 201388, −3.0; 201389, −3.0; 201390, −3.3; 201393, −3.2; 201394, −3.0; 201395, −3.4; 201396, −3.3; 82139, −2.9; 201401, −3.6; 201402, −3.8; 201403, −3.8; 201409, −3.7; 201412, −3.9; 201413, −2.9; 201414, −3.7; 201415, −3.3; 96034, −3.2; 201416, −3.1; 201417, −3.2; 63568, −3.7; 93991, −3.4; 201424, −3.8; 160398, −3.1; 201433, −3.0; 201434, −3.2; 201435, −3.5; 90928, −3.1; 84923, −3.2; 201438, −4.1; 201439, −3.4; 201447, −4.5; 201448, −3.2; 10491, −3.0; 201451, −2.9; 201452, −3.0; 201454, −4.5; 201456, −3.4; 201457, −4.6; 201459, −3.1; 201460, −3.9; 201461, −4.1; 201465, −3.5; 201469, −3.9; 201470, −3.4; 201471, −3.1; 201484, −3.4; 82420, −2.9; 201489, −3.4; 201494, −4.2; 201495, −3.3; 201496, −3.2; 201497, −3.3; 201499, −4.0; 201502, −2.9; 201503, −3.8; 201504, −4.6; 201507, −2.9; 201508, −3.1; 201510, −3.5; 201514, −3.2; 201516, −3.0; 56014, −3.2; 201525, −3.1; 90100, −3.1; 91383, −3.0; 201532, −3.2; 201533, −3.2; 201535, −4.3; 201536, −4.0; 201537, −3.7; 201540, −2.9; and 201544, −2.9.

[0799] List 8, which follows, provides a list of SEQ ID NOs and log 2 enrichment values for peptides inserted within the capsids of AAV particles that were found to be associated with low levels of enrichment (i.e., detargeting) of the AAV particles in the liver (first log 2 enrichment value) and good levels of enrichment of the AAV particles in the lungs (second log 2 enrichment value): 200189, −4.0, 5.4; 200191, −4.4, 5.8; 200216, −4.3, 8.1; 200327, −3.4, 5.4; 200371, −2.9, 4.8; 200418, −3.7, 8.9; 200427, −5.2, 8.5; 200507, −3.2, 8.0; 200597, −4.0, 6.2; 200605, −3.5, 9.6; 200611, −4.6, 8.9; 200645, −3.1, 3.2; 200646, −3.7, 8.9; 101214, −3.6, 8.8; 200822, −3.1, 8.6; 200875, −3.4, 8.6; 200879, −3.9, 9.0; 200905, −3.3, 8.4; 200909, −5.2, 7.0; 200979, −5.0, 8.8; 200991, −3.5, 9.0; 201026, −3.2, 7.2; 201028, −3.5, 7.9; 201036, −3.7, 8.8; 201039, −3.1, 8.2; 201047, −4.6, 9.3; 201048, −3.0, 9.0; 201075, −3.1, 6.6; 201243, −3.9, 6.1; 201304, −4.0, 8.8; 201339, −3.2, 7.0; 201347, −2.9, 2.5; and 201381, −5.1, 8.9.

[0800] List 9, which follows, provides a list of SEQ ID NOs and log 2 enrichment values for peptides inserted within the capsids of AAV particles that were found to be associated with low levels of enrichment (i.e., detargeting) of the AAV particles in the liver (first log 2 enrichment value) and good levels of enrichment of the AAV particles in muscle (second log 2 enrichment value): 200066, −3.3, 1.7; 200068, −3.4, 1.8; 200096, −3.2, 1.9; 200100, −3.5, 1.9; 200113, −3.2, 1.9; 200138, −2.9, 1.8; 200140, −3.7, 5.8; 200164, −3.1, 2.0; 200165, −3.5, 1.8; 200173, −3.7, 1.9; 200181, −3.3, 1.7; 200184, −3.4, 1.8; 200188, −3.0, 1.8; 200189, −4.0, 4.6; 200191, −4.4, 6.4; 200202, −3.0, 2.0; 200206, −3.0, 1.8; 200235, −3.0, 1.8; 200246, −3.2, 2.0; 200250, −4.5, 5.2; 200263, −3.5, 1.8; 200275, −3.0, 1.7; 200327, −3.4, 5.8; 200336, −4.9, 2.0; 200356, −3.4, 1.9; 200357, −3.0, 1.8; 200358, −3.1, 1.8; 200361, −3.2, 1.8; 200365, −4.3, 2.1; 200368, −3.0, 1.8; 200371, −2.9, 4.8; 200390, −2.9, 1.8; 200415, −3.1, 2.0; 200416, −3.3, 1.8; 200426, −3.0, 2.0; 200431, −4.3, 1.8; 200445, −3.1, 1.8; 200446, −3.2, 2.0; 200447, −3.2, 1.9; 200448, −3.2, 1.8; 200460, −3.6, 1.9; 200466, −3.4, 2.3; 200483, −3.6, 1.9; 200493, −3.1, 1.8; 200560, −3.3, 1.8; 200597, −4.0, 6.5; 96355, −4.4, 1.9; 200632, −2.9, 1.9; 106643, −3.0, 1.7; 200642, −3.1, 1.7; 200644, −3.0, 1.7; 200648, −3.6, 1.8; 200649, −3.0, 1.8; 200665, −3.4, 1.8; 200691, −3.2, 1.8; 200695, −3.9, 1.8; 200700, −2.9, 1.8; 200701, −3.2, 2.0; 200719, −3.4, 1.8; 200807, −2.9, 2.1; 200812, −3.0, 2.0; 200836, −3.3, 1.8; 200840, −2.9, 1.9; 200878, −3.3, 1.8; 200882, −3.2, 1.8; 200904, −4.4, 1.8; 200909, −5.2, 5.1; 200932, −3.2, 1.8; 200967, −3.0, 2.1; 201010, −2.9, 1.7; 201024, −3.1, 1.9; 201026, −3.2, 6.5; 201066, −3.3, 1.8; 201075, −3.1, 5.7; 201084, −3.3, 1.9; 201095, −3.2, 2.3; 201098, −3.0, 1.8; 201145, −4.4, 1.8; 201146, −3.2, 1.7; 201221, −4.1, 1.9; 201226, −3.1, 1.8; 201243, −3.9, 4.1; 201259, −3.2, 1.9; 201269, −3.6, 1.7; 201316, −2.9, 1.8; 201321, −3.8, 1.8; 68865, −3.5, 1.8; 201378, −4.2, 2.0; 201397, −4.3, 1.8; 201404, −3.0, 2.3; 201431, −3.1, 2.0; 201453, −3.6, 2.0; 201455, −3.9, 1.9; 160413, −3.7, 1.9; 201461, −4.1, 1.8; 201462, −3.0, 1.8; 201475, −4.7, 1.9; 201477, −3.9, 1.8; 201500, −3.6, 1.8; and 56014, −3.2, 1.8.

[0801] List 10, which follows, provides a list of SEQ ID NOs and log 2 enrichment values for peptides inserted within the capsids of AAV particles that were found to be associated with low levels of enrichment (i.e., detargeting) of the AAV particles in the liver (first log 2 enrichment value) and good levels of enrichment of the AAV particles in the heart (second log 2 enrichment value): 200140, −3.7, 5.5; 200189, −4.0, 3.7; 200191, −4.4, 5.5; 200250, −4.5, 3.5; 200327, −3.4, 5.1; 200371, −2.9, 4.2; 200483, −3.6, 2.2; 200597, −4.0, 5.8; 200645, −3.1, 1.9; 200909, −5.2, 5.2; 201026, −3.2, 6.3; 201075, −3.1, 5.6; 201111, −3.2, 1.9; and 201243, −3.9, 3.9.

[0802] List 11, which follows, provides a list of SEQ ID NOs and log 2 enrichment values for peptides inserted within the capsids of AAV particles that were found to be associated with low levels of enrichment (i.e., detargeting) of the AAV particles in the liver (first log 2 enrichment value) and good levels of enrichment of the AAV particles in the brain (second log 2 enrichment value): 82853, −3.1, 1.2; 200030, −3.0, 1.1; 200035, −3.3, 1.0; 104779, −3.1, 1.0; 200071, −3.4, 2.4; 200079, −3.5, 1.0; 200104, −3.3, 2.4; 200108, −2.9, 1.0; 200132, −2.9, 0.9; 200152, −3.1, 2.4; 200182, −3.8, 1.1; 200202, −3.0, 1.1; 200204, −3.7, 1.9; 200228, −3.9, 0.9; 200232, −3.5, 1.3; 200237, −3.2, 1.3; 200238, −3.0, 1.1; 200243, −3.5, 0.9; 200248, −3.5, 1.7; 200257, −3.3, 0.9; 200261, −3.0, 2.2; 200286, −3.3, 1.2; 200287, −2.9, 1.4; 200292, −2.9, 1.0; 200304, −3.2, 1.0; 200318, −3.4, 1.5; 200319, −3.0, 1.3; 200349, −3.1, 1.0; 200360, −3.7, 0.9; 79466, −3.0, 1.1; 109926, −3.1, 1.5; 200436, −3.2, 1.0; 200437, −3.3, 1.1; 200439, −3.0, 1.0; 200459, −3.5, 1.8; 200465, −3.3, 1.0; 200466, −3.4, 1.2; 200483, −3.6, 1.5; 200503, −3.5, 1.6; 200523, −3.3, 1.8; 83170, −3.7, 1.1; 200531, −3.2, 1.0; 200542, −3.2, 1.1; 200555, −3.0, 1.0; 200560, −3.3, 0.9; 200569, −3.1, 1.0; 200598, −3.0, 1.1; 200599, −3.2, 1.3; 200622, −2.9, 3.2; 200632, −2.9, 1.0; 200637, −3.3, 1.0; 200665, −3.4, 1.1; 200673, −3.2, 1.9; 200675, −2.9, 1.4; 200689, −3.1, 0.9; 200695, −3.9, 0.9; 200708, −3.6, 1.8; 200768, −3.9, 1.0; 200815, −4.1, 1.0; 200818, −3.1, 1.0; 200819, −3.0, 1.0; 200827, −4.3, 1.5; 200832, −3.4, 1.0; 200835, −3.1, 0.9; 99435, −3.1, 0.9; 200845, −2.9, 1.1; 78297, −3.2, 1.3; 200871, −3.3, 1.2; 200879, −3.9, 1.0; 200887, −2.9, 2.7; 79765, −3.0, 1.0; 200935, −2.9, 2.3; 200941, −3.5, 1.2; 200944, −3.4, 1.0; 200946, −3.6, 1.0; 200955, −3.1, 2.1; 200967, −3.0, 1.6; 200970, −2.9, 1.7; 200995, −2.9, 1.5; 201004, −3.0, 1.2; 201006, −3.8, 1.6; 95858, −3.0, 1.3; 201024, −3.1, 1.2; 98522, −3.2, 1.1; 201084, −3.3, 1.5; 201091, −3.0, 1.2; 201098, −3.0, 1.3; 201111, −3.2, 2.6; 201125, −3.0, 1.3; 201134, −3.3, 0.9; 201146, −3.2, 1.2; 201221, −4.1, 1.1; 201224, −4.5, 1.2; 201227, −3.2, 1.4; 201228, −3.8, 1.6; 201230, −3.2, 0.9; 201270, −3.5, 1.2; 160330, −2.9, 1.0; 92858, −3.1, 1.5; 201305, −3.0, 1.1; 201312, −3.1, 1.4; 201324, −4.3, 0.9; 201339, −3.2, 1.0; 201378, −4.2, 1.3; 88050, −3.3, 0.9; 201399, −3.0, 1.5; 201404, −3.0, 1.7; 201431, −3.1, 2.1; 201437, −3.7, 1.0; 201441, −3.8, 1.5; 201466, −2.9, 1.5; 201477, −3.9, 1.0; 201507, −2.9, 1.2; 201509, −3.1, 1.5; 201539, −3.1, 1.1; and 201543, −4.1, 1.2.

[0803] List 12, which follows, provides a list of SEQ ID NOs and log 2 enrichment values for peptides inserted within the capsids of AAV particles that were found to be associated with low levels of enrichment (i.e., detargeting) of the AAV particles in the liver (first log 2 enrichment value) and good levels of enrichment of the AAV particles in the kidneys (second log 2 enrichment value): 82853, −3.1, 1.4; 200030, −3.0, 1.1; 200035, −3.3, 1.9; 104779, −3.1, 1.1; 200049, −3.4, 1.2; 200054, −3.2, 1.3; 200057, −3.3, 1.1; 200062, −3.1, 1.3; 200066, −3.3, 1.2; 200067, −3.4, 1.3; 200068, −3.4, 1.2; 200069, −3.0, 1.5; 200071, −3.4, 1.3; 200089, −3.1, 1.1; 200091, −3.4, 1.1; 200096, −3.2, 1.2; 200100, −3.5, 1.9; 200108, −2.9, 1.6; 200113, −3.2, 1.1; 106717, −2.9, 1.2; 200117, −3.7, 1.1; 200124, −3.1, 1.3; 200138, −2.9, 1.2; 200147, −3.0, 1.3; 200152, −3.1, 1.1; 13424, −3.0, 1.2; 200153, −3.1, 1.2; 200164, −3.1, 1.1; 200166, −2.9, 1.1; 200168, −3.1, 1.2; 200171, −3.3, 1.2; 200173, −3.7, 1.3; 200176, −3.1, 1.1; 200181, −3.3, 1.1; 200182, −3.8, 1.1; 200184, −3.4, 1.1; 200202, −3.0, 1.2; 200225, −3.1, 1.2; 200228, −3.9, 1.1; 200234, −3.1, 1.1; 200240, −4.1, 1.2; 200242, −3.1, 1.2; 200247, −3.2, 1.2; 200251, −3.7, 1.1; 200253, −3.0, 1.1; 200255, −3.6, 1.2; 200261, −3.0, 1.6; 200266, −4.4, 1.1; 200270, −3.0, 1.0; 200275, −3.0, 1.1; 200279, −3.8, 1.1; 200283, −3.0, 1.2; 200286, −3.3, 1.2; 200287, −2.9, 1.5; 200288, −3.0, 1.2; 200305, −3.4, 1.1; 200308, −3.5, 1.1; 200311, −3.0, 1.2; 200312, −3.4, 1.2; 200313, −2.9, 1.2; 200318, −3.4, 1.3; 200321, −3.0, 1.1; 109197, −2.9, 1.2; 200334, −3.8, 1.1; 200336, −4.9, 1.3; 200338, −3.0, 1.3; 200343, −3.5, 1.0; 200349, −3.1, 1.2; 200350, −3.5, 1.4; 200353, −2.9, 1.4; 200356, −3.4, 1.4; 200357, −3.0, 1.1; 200361, −3.2, 1.3; 200365, −4.3, 1.5; 200368, −3.0, 1.3; 200370, −2.9, 1.1; 200374, −3.1, 1.3; 79466, −3.0, 1.3; 200375, −2.9, 1.3; 200378, −3.4, 1.2; 17057, −3.1, 1.3; 200389, −3.2, 1.4; 200390, −2.9, 1.4; 200391, −4.0, 1.4; 109926, −3.1, 1.2; 200414, −3.2, 1.2; 200415, −3.1, 1.3; 200419, −2.9, 1.8; 200426, −3.0, 1.3; 200429, −2.9, 1.4; 200430, −3.4, 1.4; 200441, −3.7, 1.1; 159845, −3.9, 1.3; 200444, −3.1, 1.1; 200445, −3.1, 1.2; 200446, −3.2, 1.3; 200447, −3.2, 1.4; 200448, −3.2, 1.3; 200449, −3.4, 1.4; 200453, −2.9, 1.2; 200457, −3.1, 1.2; 200459, −3.5, 1.3; 200460, −3.6, 1.2; 200463, −3.3, 1.6; 200464, −3.1, 1.2; 200465, −3.3, 1.2; 200466, −3.4, 1.6; 200474, −3.6, 1.1; 200475, −3.1, 1.3; 200483, −3.6, 2.2; 200493, −3.1, 1.2; 200502, −3.0, 1.3; 200503, −3.5, 1.8; 200531, −3.2, 1.1; 200547, −3.0, 1.2; 200548, −3.6, 1.1; 200560, −3.3, 1.3; 200577, −3.2, 1.1; 200583, −3.4, 1.1; 200584, −3.0, 1.6; 200588, −2.9, 1.6; 200600, −3.6, 1.7; 200603, −3.1, 1.2; 200606, −3.2, 1.3; 96355, −4.4, 1.2; 200632, −2.9, 1.5; 106643, −3.0, 1.1; 83899, −2.9, 1.3; 200642, −3.1, 1.2; 200643, −3.1, 1.0; 200644, −3.0, 1.3; 200645, −3.1, 1.7; 200648, −3.6, 1.2; 200649, −3.0, 1.3; 200651, −3.2, 1.0; 159979, −3.2, 1.2; 97034, −3.4, 1.1; 200673, −3.2, 1.6; 200674, −3.2, 1.1; 200675, −2.9, 1.5; 200691, −3.2, 1.1; 200692, −3.0, 1.3; 200695, −3.9, 1.4; 200700, −2.9, 1.2; 200701, −3.2, 1.1; 200705, −3.1, 1.8; 200710, −3.0, 1.2; 200714, −2.9, 1.1; 200717, −3.7, 1.1; 200719, −3.4, 1.1; 200752, −3.1, 1.2; 200754, −3.1, 1.4; 200779, −3.1, 1.1; 65598, −3.3, 1.3; 200807, −2.9, 1.6; 108006, −2.9, 1.4; 200811, −3.1, 1.2; 200812, −3.0, 1.1; 200813, −3.1, 1.1; 200819, −3.0, 1.4; 200832, −3.4, 1.4; 200833, −3.4, 1.2; 200835, −3.1, 1.1; 200836, −3.3, 1.3; 200838, −3.0, 1.2; 200840, −2.9, 1.3; 99435, −3.1, 1.4; 200845, −2.9, 1.4; 78297, −3.2, 1.2; 75929, −3.0, 1.1; 200856, −3.1, 1.2; 97381, −3.2, 1.3; 200871, −3.3, 1.4; 200872, −3.8, 1.3; 200878, −3.3, 1.1; 200882, −3.2, 1.1; 200885, −3.3, 1.1; 200894, −3.1, 1.4; 200904, −4.4, 1.1; 200906, −4.4, 1.1; 107915, −4.0, 1.1; 200912, −3.7, 1.1; 79765, −3.0, 1.7; 200920, −3.0, 1.2; 134573, −2.9, 1.1; 200932, −3.2, 1.2; 200941, −3.5, 1.3; 107749, −3.4, 1.1; 200946, −3.6, 1.5; 200954, −3.3, 1.1; 200959, −3.1, 1.1; 200960, −3.2, 1.1; 54729, −3.5, 1.2; 200967, −3.0, 1.1; 200971, −3.1, 1.4; 200981, −3.2, 1.1; 200987, −3.0, 1.1; 200990, −3.2, 1.1; 200992, −3.6, 1.3; 201006, −3.8, 1.1; 201008, −3.2, 1.1; 95858, −3.0, 1.6; 201010, −2.9, 1.2; 109276, −3.3, 1.1; 201023, −3.0, 1.2; 201024, −3.1, 1.4; 201037, −3.4, 1.2; 91104, −3.5, 1.4; 201043, −3.5, 1.1; 201058, −2.9, 1.0; 201061, −4.0, 1.1; 201066, −3.3, 1.2; 201074, −4.4, 1.1; 201081, −3.2, 1.3; 201095, −3.2, 1.5; 201098, −3.0, 1.3; 201111, −3.2, 2.2; 201134, −3.3, 1.1; 201138, −3.2, 1.1; 201143, −3.2, 1.1; 201146, −3.2, 1.4; 201181, −3.5, 1.1; 201221, −4.1, 1.4; 9200, −2.9, 1.1; 201224, −4.5, 1.2; 201237, −3.3, 1.1; 201250, −3.7, 1.4; 201258, −2.9, 1.3; 201259, −3.2, 1.3; 160330, −2.9, 1.1; 92858, −3.1, 1.4; 201308, −3.0, 1.1; 201311, −3.1, 1.1; 201312, −3.1, 1.1; 201313, −3.1, 1.1; 201316, −2.9, 1.2; 201319, −3.0, 1.2; 201321, −3.8, 1.2; 68865, −3.5, 1.3; 105742, −3.1, 1.2; 201327, −2.9, 1.2; 201342, −3.2, 1.4; 77117, −3.3, 1.2; 201365, −4.6, 1.0; 89087, −3.0, 1.1; 201378, −4.2, 1.5; 201384, −3.2, 1.1; 201387, −3.2, 1.1; 201397, −4.3, 1.2; 201400, −3.0, 1.4; 201404, −3.0, 1.6; 201411, −3.9, 1.1; 201419, −3.2, 1.4; 160391, −2.9, 1.3; 103120, −3.1, 1.3; 201427, −4.2, 1.1; 201430, −3.0, 1.1; 201441, −3.8, 1.9; 201453, −3.6, 1.3; 201455, −3.9, 1.3; 160413, −3.7, 1.9; 201462, −3.0, 1.2; 201466, −2.9, 1.5; 201472, −2.9, 1.5; 201474, −3.5, 1.2; 201475, −4.7, 1.4; 201477, −3.9, 1.6; 201478, −3.6, 1.1; 201484, −3.4, 1.1; 201487, −3.0, 1.1; 105656, −3.2, 1.4; 201498, −3.7, 1.4; 201500, −3.6, 1.2; 201501, −3.3, 1.9; 56014, −3.2, 1.1; 201528, −3.8, 1.1; 201537, −3.7, 1.1; 201538, −3.3, 1.1; 201539, −3.1, 1.1; and 201543, −4.1, 1.1.

### Example 14: In Vivo Evaluation Macaque Retina Transduction Using AAV Variants

[0804] Experiments were undertaken to evaluate the ability of the AAV variants prepared as described in Example X1 to transduce macaque retinas. The purified virus library was injected at a dose of 4.6×10¹¹ viral genomes (vg)/eye into a male cynomolgus macaque. The injection was intravitreal to both eyes, posterior to the limbus in the superotemporal quadrant. After 28 days, the retina and retinal pigment epithelium (RPE) were harvested and RNA was recovered using a QIACube Connect. Afterwards next generation sequencing (NGS) samples were processed as detailed herein. Five biological samples were collected, two from one eye and three from the other. List 13 provided below lists consistently enriched variants detected in the retina and RPE. Variants were included in List 13 if two or more of their 7-mer amino acid (AA) replicates (considered biological replicates in the same sample) were detected in at least four biological retina samples. As a reference, AAV9 was represented by five 7-mer AA replicates but only two were detected in a single retina sample from one of the eyes.

[0805] List 13, which is provided below, provides a list of SEQ ID NOs for peptides inserted within capsid polypeptides of AAV particles, where each SEQ ID NO is followed by the mean log 2 enrichment measured for each peptide in retina samples from each eye (Eye 1 and Eye 2) calculated across all 7-mer AA and sample replicates. An enrichment score for a peptide in an eye was calculated as the log 2 of (the relative abundance in the eye of AAV particles containing capsid polypeptides containing the peptide)/(the relative abundance of AAV particles containing capsid polypeptides containing the peptide in a library of AAV particles administered to the eye).

[0806] List 13: 73517, 2.0, 0.1; 102905, 2.1, 1.4; 86093, 1.8, 2.7; 43154, 2.7, 1.4; 110065, 2.2, 3.1; 110846, 2.3, 1.2; 102312, 2.5, 3.3; 68125, 1.9, 0.1; 97033, 2.6, 3.1; 39026, 1.9, 2.0; 33918, −0.3, 0.2; 200046, 1.2, 2.2; 72754, 3.0, 2.1; 53356, 1.4, 1.7; 56089, −0.5, 1.1; 73794, 1.6, 1.0; 39836, 0.0, −1.2; 64279, 1.6, 1.4; 98530, −0.2, −1.5; 88519, 2.2, 2.2; 44039, 2.6, 2.5; 200078, 0.3, 2.2; 61178, 2.3, 3.5; 74818, 1.2, −0.7; 50470, 1.3, 0.8; 200081, 1.7, 1.7; 82949, 2.5, 2.0; 87162, 3.5, 2.6; 200085, 1.8, 3.0; 50938, 0.9, 0.9; 34455, 0.4, −1.5; 93376, 0.9, 1.3; 200092, 3.0, 2.5; 200093, 0.9, −0.2; 84029, 3.6, 2.1; 70403, 2.3, 1.2; 60798, 3.7, 2.3; 59901, 0.5, 0.9; 80016, 2.1, 1.4; 60788, 1.9, 1.3; 33040, 4.7, 3.8; 99238, 1.1, 3.0; 43949, 3.2, 2.4; 93919, 2.2, 1.8; 100299, 4.3, 2.4; 73203, 3.7, 5.1; 71893, 0.9, 1.7; 103728, 1.1, 1.5; 200139, 1.9, 2.8; 168044, 2.9, −0.4; 54005, 3.0, 3.2; 42888, 2.5, 2.2; 47866, 1.8, 2.2; 33859, 1.5, 0.9; 200162, 4.6, 3.8; 33221, −0.1, 1.7; 76972, 1.4, 2.4; 74799, 0.5, −0.2; 113512, 2.9, 1.6; 96628, 0.1, −0.1; 79110, 2.1, 1.5; 78211, 0.6, 2.7; 43507, 1.9, 1.2; 74449, 4.0, 4.0; 82504, 2.7, 2.6; 54762, 2.6, 1.5; 200177, 2.9, 0.7; 53964, 2.0, 2.1; 72330, 4.6, 0.3; 38237, 2.0, 1.9; 67477, 3.2, 2.2; 84086, 1.4, 0.3; 69990, 1.6, 0.6; 93953, 0.1, −0.7; 97026, 1.3, −0.7; 114200, 0.1, 1.3; 61964, 1.9, 2.0; 41658, 1.1, 1.7; 82767, 1.4, 1.2; 110475, 2.2, 5.0; 67500, 0.8, 1.6; 70906, 0.5, −0.8; 200219, 2.6, 3.0; 62885, 1.2, 0.8; 87199, 2.5, 2.1; 200220, 3.0, 2.5; 72056, 2.9, 3.3; 58691, 1.8, 1.4; 76565, 0.5, 0.5; 200264, 1.1, 0.5; 68453, 1.5, 0.9; 43792, 1.7, 1.5; 200277, 4.6, 2.4; 98273, 3.8, 2.6; 200282, 1.7, 3.8; 86588, 1.3, 1.3; 73905, 1.1, 0.5; 64528, 2.8, 2.6; 61920, 3.5, 3.2; 200310, 2.4, 1.4; 200337, 2.6, 1.0; 77319, 2.0, 0.9; 200344, 0.7, 0.4; 99123, 1.8, 0.4; 35141, 2.3, 0.9; 35926, 2.3, 2.2; 85434, 1.4, 0.8; 200359, 4.6, 1.1; 50231, 2.6, 2.3; 109198, 1.3, 0.6; 81680, 2.7, 2.2; 92616, 1.1, 0.5; 104149, 3.4, 2.5; 76646, 2.7, 3.2; 200396, 3.1, 0.9; 85023, 2.3, 0.0; 62873, 3.3, 1.3; 92233, 0.7, 1.1; 67799, 1.5, 2.5; 36877, 0.6, 0.5; 115884, 4.0, 2.5; 48846, 2.9, 0.8; 44096, 2.8, 1.6; 40908, 0.8, 1.5; 200402, 0.8, 0.9; 68188, 2.2, 0.3; 200405, 2.9, 2.2; 63427, 1.8, 1.1; 200428, 1.4, 0.7; 89046, 1.8, 1.0; 116062, 1.6, 1.8; 116127, 1.9, 0.4; 107386, 1.7, 0.7; 103349, 1.7, 3.3; 70917, 3.5, 0.4; 103466, 1.4, 0.1; 52024, 0.6, 0.2; 108790, 1.9, 1.2; 49866, 1.2, 0.3; 200470, 0.6, −0.1; 41720, 1.3, 0.7; 48552, 1.7, 1.0; 45851, 1.4, 1.4; 32677, 3.6, 2.2; 49467, 3.0, 1.0; 74263, 1.5, −1.6; 87124, 1.6, 1.2; 53182, 2.0, 0.4; 57386, 2.8, 0.2; 33898, 0.9, 2.9; 78499, 0.9, 2.0; 39861, −0.4, 0.8; 44814, 0.9, 0.4; 38154, 1.3, −0.4; 32901, 1.2, 0.1; 45011, 2.5, 4.0; 37743, 1.4, 0.1; 41440, 1.0, 0.9; 66963, 1.0, −0.1; 68903, 1.7, 0.2; 37761, 1.3, 1.4; 90884, 5.0, 5.7; 39060, 0.2, −0.1; 36480, 0.2, 0.5; 43537, 0.9, 0.7; 49567, 1.6, 1.6; 40690, −0.7, 0.2; 57111, 0.8, −0.1; 84947, 3.7, 1.3; 36092, 1.9, 1.1; 45410, 1.4, 2.2; 47455, 2.3, 2.5; 77101, 0.9, 1.3; 200492, 3.0, 2.3; 97526, 1.9, 1.2; 40438, 2.3, 0.5; 44330, 0.6, 0.1; 109139, 0.7, 0.5; 66146, 1.4, 0.5; 106814, 1.3, −0.1; 94060, 2.0, 2.1; 55451, 2.4, 2.5; 50473, 0.9, 1.7; 63119, 0.3, 1.0; 78830, 3.3, 2.3; 200498, 1.5, 2.3; 117961, 3.0, 3.7; 109407, 1.0, 1.4; 56459, 1.5, −0.2; 36671, 1.0, 1.6; 200506, 2.2, 1.5; 73412, 1.3, 1.6; 63367, 1.2, 2.4; 45617, 0.0, 0.4; 73252, 1.8, 1.4; 36030, 1.2, 0.8; 48997, 1.5, 3.1; 59612, 1.2, 1.4; 75238, 2.8, 2.8; 68239, 3.3, 3.2; 108683, 1.7, 1.5; 52611, 0.2, 1.2; 41962, 1.9, 0.6; 200513, 2.8, 1.3; 92025, 0.5, 2.1; 72079, 1.6, 2.6; 200515, 2.5, 2.1; 32900, −0.1, 1.9; 55750, −0.8, 0.4; 95649, 2.4, 5.0; 73387, 1.7, 1.2; 71316, 2.8, 2.8; 46856, 2.2, 3.7; 34601, 0.3, −0.1; 36084, −0.3, 1.4; 36195, 1.8, 1.9; 92732, 1.4, 1.7; 64799, 3.2, 1.8; 93636, −0.1, 0.3; 67071, 0.9, 0.2; 36926, 0.2, 2.8; 97230, 2.0, 0.8; 200527, −0.3, 1.1; 67118, 1.3, 0.9; 42117, 1.0, 0.2; 57296, 0.0, 1.4; 200529, 2.0, 1.7; 37451, 0.5, 2.0; 108834, 2.4, 1.6; 75911, 1.3, 0.7; 39822, 0.4, 1.0; 91538, 1.5, 2.1; 42712, 0.2, 0.6; 80117, 0.3, 1.0; 51697, 1.3, 1.6; 38775, 0.8, −0.5; 67655, 0.5, 1.3; 78594, 0.6, 0.0; 53130, 1.3, −0.7; 49721, 2.2, 1.4; 33856, −0.8, 2.6; 34758, 3.2, 2.4; 52668, 0.6, 0.7; 69283, 0.1, 1.1; 96281, 1.3, 3.3; 44450, 1.3, 0.1; 99883, 5.3, 1.4; 103488, 1.1, 0.6; 200535, 1.0, 1.0; 44271, 2.7, 2.6; 56461, 3.2, 1.5; 200537, 2.1, 0.8; 89469, 1.5, 0.0; 34187, 0.9, 2.9; 67005, 1.4, 1.2; 63552, 2.9, 2.4; 36848, 1.0, 1.1; 34779, 1.6, 2.0; 91480, 1.0, 0.5; 40308, 1.5, 2.9; 75776, 0.6, 1.5; 40514, 0.9, 1.6; 200541, 2.3, 0.0; 99979, 1.8, 0.7; 32885, 1.2, 1.4; 35922, 0.7, 1.9; 72381, 1.2, −0.1; 63096, 2.7, 2.4; 70173, 1.8, 2.6; 39206, 2.7, 0.7; 45353, 1.0, 2.7; 67958, −0.8, 1.1; 35605, 0.8, −0.3; 70129, 2.2, 0.7; 52666, 0.9, 1.4; 71060, 1.6, 2.4; 200550, 1.7, 0.5; 82781, 1.3, 1.9; 35814, 2.7, −0.2; 50817, 0.9, 1.8; 200551, 2.5, −0.7; 71473, 2.0, 1.4; 90539, 1.8, 0.8; 64295, 3.5, 2.1; 88396, 3.6, 1.9; 43814, 0.7, 1.2; 39858, 0.9, 1.3; 85632, 0.9, 1.8; 81087, 3.0, 3.4; 200559, 1.9, 2.3; 37131, 0.4, 1.7; 59144, 0.7, 0.7; 83476, 0.0, 1.1; 41856, 4.1, 3.2; 200563, 2.7, 2.0; 200567, 2.3, 1.7; 200571, 1.1, 2.5; 200573, 1.9, 2.1; 55147, 3.4, 1.2; 57255, 0.7, 1.9; 200593, 2.7, 3.0; 200602, 0.0, −0.2; 40372, 1.3, 1.3; 122102, 1.6, 0.9; 65439, 0.4, 1.8; 200609, 2.6, 1.5; 45398, 1.7, 2.0; 74334, 3.0, 1.3; 58607, 1.7, 2.4; 48213, 3.1, 2.9; 102349, 1.2, 1.9; 47059, 1.9, −0.2; 63889, 2.4, 2.3; 200616, 2.3, 2.0; 92794, 2.0, 1.8; 65688, 1.8, 1.7; 48005, 0.4, 1.2; 200625, 2.9, 3.1; 47252, 1.6, 0.9; 200628, 1.7, 2.1; 59733, 2.6, 2.9; 57816, 1.3, 0.3; 122945, 1.9, 1.4; 159968, 1.5, 1.0; 59752, 3.3, 0.8; 51005, −0.5, 0.3; 87008, 2.4, 2.7; 108800, 1.2, 3.1; 200641, 3.6, −0.1; 35960, 1.8, 1.6; 66069, 3.7, 0.0; 42506, 2.2, 1.4; 89879, −0.3, −0.2; 73137, 0.9, 2.0; 85556, 0.6, 1.5; 51655, 3.2, 6.1; 49779, 1.7, 0.6; 33875, 0.8, 0.4; 84657, 1.6, 1.4; 40535, 0.2, −0.2; 70934, 1.8, 1.2; 33287, 2.6, 1.8; 200658, 1.2, 1.7; 43449, 1.7, 2.3; 54532, 3.5, 0.5; 46052, 2.8, 2.0; 46251, 1.5, 1.1; 47397, 3.0, 1.1; 36194, 0.0, 1.3; 96327, 0.9, 0.5; 39643, 1.4, 1.9; 65064, 1.0, 1.6; 37207, 3.1, 1.3; 51950, 0.8, 1.1; 36952, 2.2, 2.5; 56887, 0.9, 0.7; 200669, 2.1, −1.0; 33378, 0.5, 1.7; 200672, 0.8, 1.9; 73035, 2.3, 1.1; 90264, 1.6, 3.6; 100678, 1.3, −0.6; 90935, 0.3, 1.6; 83695, 1.0, 1.6; 45265, 2.2, 2.7; 80803, −0.2, 0.3; 37012, 1.2, 1.6; 48623, 0.4, 1.7; 39350, 0.7, 0.8; 57596, 1.4, −0.4; 44009, 1.3, 2.2; 37175, −0.6, 1.1; 46186, 1.6, 0.2; 50270, 2.6, 1.6; 54346, 1.2, 2.8; 51104, 1.5, 1.5; 68392, 1.4, −0.5; 46418, 0.5, 1.7; 49787, 0.1, 3.1; 74182, 0.7, 1.7; 169151, 2.1, 1.6; 80731, 0.3, 2.0; 41532, 1.9, 2.1; 73595, 2.1, 3.5; 64285, 2.9, 3.7; 72505, 3.0, 5.5; 44058, 1.3, 0.7; 57286, 1.6, 1.8; 70297, −0.6, −2.1; 33331, 0.0, 2.8; 47634, 1.2, 2.7; 35918, 0.6, 0.7; 43189, 2.4, 2.9; 40454, 1.3, 2.4; 35490, 3.0, 1.9; 98280, 2.8, 2.6; 83016, 1.8, 5.5; 53503, 1.3, 2.1; 75368, 1.7, 4.9; 35146, 1.9, 1.4; 44345, 0.8, 2.0; 88518, 1.8, 1.2; 39754, 0.7, 1.2; 70667, 4.0, 2.9; 105818, 0.9, 1.9; 200696, 2.4, 0.2; 56666, 2.1, 3.1; 71601, 1.9, 0.8; 38126, 1.0, 3.2; 200697, 2.7, 1.9; 70288, 0.8, 1.5; 160004, 2.1, 2.2; 48442, 1.0, 0.9; 35197, −0.2, 0.4; 52244, 1.9, 1.9; 200698, 1.7, 2.4; 200702, 2.8, 0.8; 62300, 1.6, 2.2; 106694, 0.9, 1.5; 87726, 1.4, 0.0; 74567, 1.3, 1.4; 75165, 1.5, 0.9; 43220, 2.2, 3.0; 108721, 2.4, 2.9; 96641, 2.3, −2.0; 36284, 1.4, 1.3; 200722, 2.9, 2.7; 75845, 0.8, −0.4; 91982, 0.0, 1.3; 81409, 3.3, 0.8; 71378, 0.8, −0.4; 52394, 0.9, −0.3; 95809, 0.7, 0.8; 160014, 0.8, 0.9; 200728, 0.7, 1.3; 200730, −0.2, −1.2; 42336, −1.3, 2.2; 51402, 1.5, 1.4; 87101, 4.8, 3.9; 36411, 2.8, 0.9; 38753, 0.2, 0.3; 200733, 0.8, 1.6; 200734, 1.9, −0.4; 200735, 0.5, 1.4; 200736, 2.4, −1.2; 72344, 0.4, 1.8; 200737, 0.7, −0.4; 200738, 1.1, 2.1; 51122, 0.4, −0.9; 77576, −0.2, 0.2; 200740, 1.6, 4.1; 65453, 0.0, 0.3; 54343, −0.3, 2.7; 200741, 0.7, 0.9; 48643, 0.0, −0.1; 75977, 2.0, 1.2; 37314, 1.1, 0.8; 62413, 2.6, 2.1; 35171, 0.0, 0.0; 49605, 1.5, 1.5; 200744, 2.8, 2.5; 55249, 3.7, 1.2; 61075, 1.9, 2.7; 46035, 1.5, 0.9; 34782, 2.1, 0.7; 35756, 3.2, 2.1; 42183, 1.2, 1.2; 63476, 1.1, 2.4; 52049, 0.9, 0.8; 83620, 1.8, 0.3; 200748, 0.7, 1.2; 200750, 1.9, 0.7; 69667, 0.7, 0.6; 200753, −0.6, 2.3; 48894, 1.9, 2.5; 53236, 0.8, 3.1; 34065, 1.7, 1.1; 45921, −0.6, 0.6; 98404, 1.4, 0.5; 53091, −1.9, −0.6; 40016, 1.0, 2.1; 53052, 1.6, 0.7; 64333, 1.2, 0.2; 45332, 2.1, −0.1; 200756, 1.7, 0.3; 46450, 2.0, 2.1; 49984, 1.2, 1.9; 85416, 0.9, −0.4; 86920, 0.5, 1.9; 39392, 0.4, 1.9; 73796, 1.2, 0.6; 38991, 1.7, 1.5; 65240, 2.3, 1.6; 200762, 1.3, 1.2; 110324, 2.7, 3.0; 57267, −0.2, 0.0; 36086, 2.2, 0.3; 78994, 1.2, 0.9; 35683, 0.4, 1.3; 74388, 1.3, 1.6; 46556, 1.3, 2.2; 66199, 0.4, 0.6; 32636, 0.2, −0.3; 67901, 1.2, 1.5; 37249, −0.3, −0.4; 35616, 1.1, 1.6; 87511, 1.0, 0.8; 200765, 0.2, 2.5; 70826, −0.4, 0.4; 36173, 0.8, 0.6; 75949, 0.3, 1.5; 75033, 1.4, 1.5; 69455, 1.6, 1.9; 55777, 2.1, 2.4; 40606, 1.1, 1.4; 107691, 2.4, 2.9; 81252, 1.9, 2.1; 104066, 0.8, −1.7; 81163, 0.0, 2.1; 200773, 1.2, 0.0; 54589, 1.1, 0.0; 34012, −0.6, 0.1; 67916, 2.1, 3.1; 94568, 2.7, 1.2; 80125, 1.4, 0.9; 71094, 4.3, 2.4; 58647, 1.2, 0.7; 81471, 2.5, 3.5; 200775, 2.9, 0.7; 68211, 0.7, 1.9; 43921, 0.4, 0.8; 91671, 0.2, 0.7; 50911, 0.6, 1.7; 128753, 2.1, 1.7; 39017, −0.9, 0.2; 33821, 2.5, 2.7; 66336, 3.8, 3.7; 44035, 0.2, 1.3; 77459, 3.3, 2.1; 44884, 2.0, 1.3; 49098, 2.0, 2.0; 103645, 1.9, 0.4; 35487, 0.3, 0.9; 73221, 0.0, 2.2; 200784, 3.7, 3.2; 70827, 1.5, 1.1; 75612, 0.1, 2.3; 73482, 0.5, 0.1; 40942, 1.3, 1.2; 35523, 2.2, 0.2; 78673, 1.0, −0.1; 200789, 2.4, 1.4; 67525, −0.7, −0.1; 64415, 2.0, −1.2; 72665, 1.3, 1.9; 71052, −0.3, 3.3; 94335, 1.3, 2.8; 94502, 0.3, 0.6; 69362, 1.5, 3.3; 66912, 0.8, 2.0; 107367, 1.1, 0.7; 129246, 1.5, 2.4; 200791, 0.3, 1.7; 200792, 1.4, 2.2; 88305, 1.3, 1.8; 87297, 2.1, 1.8; 42628, −0.5, 0.8; 200794, 3.3, 2.8; 200795, 2.2, 0.8; 105536, 1.0, 1.1; 63741, 0.3, 1.1; 57624, 2.6, 2.2; 38873, −0.1, 2.3; 45200, 0.6, 0.8; 53998, 0.3, −0.3; 57159, 1.9, 1.5; 101506, 1.6, 1.8; 78313, 3.5, 2.3; 36988, 1.6, 1.5; 94593, 1.3, 1.6; 59548, 4.4, 2.7; 62716, 0.1, 0.8; 46500, 1.3, 1.1; 200817, 2.5, 2.8; 64229, 1.1, 1.9; 34338, 3.7, 2.2; 56966, 2.2, 1.2; 39608, 2.3, 1.6; 81475, 2.6, 0.5; 99794, 2.0, 0.2; 36542, 1.1, 2.2; 84093, −0.2, 0.4; 34117, 2.4, 1.0; 51450, 2.3, 1.7; 67408, 0.8, −0.7; 54913, 1.9, 1.6; 54592, 2.1, 0.3; 37767, 1.3, 1.3; 54392, 0.4, 2.5; 33508, 2.7, 1.9; 81258, 2.5, 1.4; 72923, 2.0, 2.2; 101868, 3.1, 1.9; 200857, 3.2, 1.3; 86753, 1.7, 2.7; 56470, 2.4, 2.5; 33854, 2.6, 2.5; 200862, −0.2, 0.9; 41298, 2.5, 0.2; 40645, 0.9, 1.5; 56142, −0.1, 1.0; 77578, 3.0, 1.3; 58389, 3.9, 1.4; 38160, 1.3, 1.5; 33761, −0.3, 0.6; 42679, 0.9, 2.4; 49356, 2.2, 1.0; 200864, 0.1, 0.0; 200865, 0.2, 0.4; 36341, 1.3, 2.5; 200867, 3.8, 6.3; 39074, 2.9, 1.7; 101320, 2.2, 0.7; 44224, 1.0, 0.1; 34718, 1.7, 1.0; 33486, 1.0, 2.6; 99551, 2.1, 1.2; 48557, 0.0, 1.6; 36465, 0.3, 1.2; 91640, 1.4, 2.1; 34349, 1.9, −0.9; 38494, 2.6, 2.2; 78835, 1.1, 0.4; 33773, 2.6, 1.5; 44626, 1.7, 3.2; 66711, 1.1, 1.2; 41078, 2.1, 1.9; 55262, 1.0, 0.0; 44125, 2.6, 1.5; 38169, 2.5, 3.4; 92961, 1.9, 0.6; 71463, 2.3, 1.0; 53136, 0.9, 3.0; 34132, 1.4, 1.8; 42959, 1.8, 0.2; 40087, 1.2, 2.2; 33005, 5.2, 4.1; 34109, −0.3, 1.7; 73993, 2.4, 2.6; 35998, 3.0, 2.5; 75423, 1.2, 2.1; 97268, 1.3, 2.8; 52385, 1.7, 0.1; 133004, 0.6, 1.0; 93206, 0.9, 0.0; 41154, −0.8, 1.9; 61116, 0.2, −0.2; 81377, 1.1, 0.6; 71981, 1.7, 1.7; 52058, 0.0, 2.8; 32731, −1.1, 1.8; 50642, 0.7, 0.9; 69989, 0.8, 3.2; 35569, −0.5, 1.3; 41850, 3.6, 2.9; 200897, 3.3, 2.3; 44042, 1.6, 2.6; 46122, 1.6, 0.5; 200908, −0.3, 1.4; 33882, 3.0, 0.8; 48787, 1.5, 1.9; 65619, 0.9, 1.8; 98151, 0.0, 2.6; 34907, −0.4, −0.3; 51609, 0.4, 0.6; 52786, 1.3, 1.3; 37133, −0.4, 0.7; 83752, 2.8, 0.9; 58140, 0.7, 1.9; 80974, 0.6, 2.1; 200913, 1.4, −0.5; 66872, 2.7, 0.4; 34622, 1.3, 0.3; 42100, 0.8, −2.2; 104516, 0.6, 0.9; 56062, 0.4, 1.1; 37864, 2.4, 1.6; 56696, 1.7, 3.6; 47102, 0.9, 1.6; 60835, 0.6, 0.5; 200926, 5.3, 3.1; 85051, 1.2, 1.5; 84551, 3.2, 3.3; 32743, 2.7, −1.0; 38828, 0.2, 1.1; 59782, 4.6, 4.1; 56954, 3.1, 1.7; 48938, 1.6, 0.8; 38579, 0.9, −0.6; 50581, 2.7, 1.4; 62719, 1.4, 1.3; 43708, 2.3, 1.7; 33059, −0.3, 1.5; 42478, 1.7, 2.1; 34512, 0.4, 1.9; 55733, 2.3, 0.8; 63923, 2.1, 2.3; 34586, 1.4, 2.0; 40001, 1.0, −0.1; 45448, 0.4, 0.3; 54500, 0.3, 0.3; 40237, 0.9, −0.1; 50166, 0.3, 0.8; 76921, 1.7, 1.6; 58444, 1.9, 1.2; 39975, 3.0, 2.5; 200933, 2.0, 3.3; 67867, 2.0, 1.1; 33117, 1.2, 1.9; 55643, 2.8, 2.0; 200937, 4.1, 4.2; 98298, 2.3, 1.6; 48130, 0.5, 2.1; 200939, 2.3, 4.2; 33753, 1.9, 0.1; 37498, 0.0, 1.1; 99584, 0.7, 1.1; 41986, 0.9, 1.0; 59714, 1.7, 3.2; 48911, 1.6, 0.4; 48908, 1.2, 0.7; 42234, 0.4, 0.5; 64324, 0.7, 0.8; 35768, 2.5, 2.0; 69612, 0.7, 0.2; 107478, 2.1, 1.0; 58436, 2.1, 1.4; 96992, 1.0, 3.2; 88797, 3.1, 1.7; 200948, 0.4, 2.1; 37202, 0.2, 0.0; 38974, 1.4, −0.9; 62313, 1.8, 1.2; 59718, 1.8, 1.0; 90369, 1.4, 1.3; 76521, 1.6, 1.0; 80552, 0.7, 1.5; 55056, 0.6, 3.5; 51287, 1.0, 1.7; 88215, 1.9, 1.1; 108833, 1.6, 2.9; 63423, 1.4, 1.2; 41512, 1.9, 0.3; 76971, 0.1, 0.0; 51883, 0.0, 1.6; 42428, 0.7, −0.2; 74145, 0.1, 0.4; 37566, −0.6, 0.6; 39358, 0.5, 0.4; 200974, 2.0, −0.2; 35140, 2.0, 1.0; 58555, 1.2, 1.5; 47926, 0.0, 1.9; 32702, 1.0, 1.0; 41041, 1.3, 0.5; 33085, −0.1, 1.0; 200975, 0.4, 0.2; 41638, 1.7, 0.6; 34466, 2.9, 1.4; 33541, 1.7, 0.3; 74517, 0.8, 2.3; 59658, 2.6, 2.0; 64356, 2.2, 1.7; 43000, 2.9, 1.8; 84931, 0.1, 1.3; 78865, 2.3, 3.4; 46705, 0.5, 1.6; 84158, 0.3, 0.8; 35579, 2.3, −0.2; 50499, 2.2, 1.6; 57462, 1.7, 2.3; 91234, 1.8, 1.1; 48618, 1.8, −0.1; 36352, 1.1, 0.4; 200989, 2.5, 3.2; 65386, 2.0, 2.8; 88894, 2.3, 2.3; 93362, 1.9, 0.6; 50386, 0.9, 1.2; 87979, 0.7, 1.2; 200993, 1.8, 1.5; 63840, 0.1, 0.4; 34381, 0.9, 1.6; 94794, 1.8, 2.0; 39478, 1.7, −0.3; 56577, 0.2, 1.7; 74610, 2.0, 1.5; 33498, 2.8, 1.6; 105191, 3.1, 1.7; 65878, 2.7, 1.6; 60332, 1.4, 0.5; 49403, 0.9, 2.7; 53861, 3.9, 1.6; 65671, −0.4, 4.6; 44381, 1.0, 2.0; 86860, 1.4, 4.6; 101663, 0.5, 2.5; 86075, 2.7, 2.6; 42562, 2.1, 0.5; 61037, 1.1, 2.2; 46606, 2.5, 1.6; 37186, −0.6, 0.3; 37552, 0.9, 1.4; 96556, 0.7, 2.9; 55234, 1.7, 0.5; 38591, 2.5, 2.7; 56712, 1.6, 1.9; 38932, −0.3, −0.3; 99856, 2.9, 4.3; 85972, 2.3, −0.3; 40485, 0.7, 1.1; 109307, 0.2, 0.5; 79844, 0.7, 0.1; 62209, 1.0, 1.5; 90870, 1.9, 1.3; 42418, 0.9, 0.2; 41108, 0.7, 1.1; 41488, 2.0, 2.7; 48185, 0.5, 1.0; 52202, 0.9, 2.8; 41810, 1.7, 1.6; 201016, 1.1, 2.1; 83301, 2.5, 1.6; 201022, 0.8, 1.4; 43275, 2.5, 2.2; 35431, 2.0, 1.0; 68101, 2.0, 2.1; 43125, 1.6, 1.5; 46285, 0.9, −1.0; 44198, 0.4, 0.2; 74939, 1.8, 3.5; 78356, 2.0, 2.2; 62739, 1.6, 2.8; 201032, 1.0, 0.7; 201034, 1.1, 1.7; 201038, 5.7, 3.0; 201041, 3.1, 4.3; 43011, 2.8, 0.4; 41464, 1.7, 2.3; 65215, 1.5, 2.3; 71623, 0.8, 0.7; 57969, 0.4, 1.1; 106666, 1.6, 1.8; 89243, 2.7, 4.2; 107156, 0.8, 1.2; 64976, 1.5, 1.9; 65457, 1.8, 1.1; 201052, 3.9, 2.9; 108863, 3.2, 2.4; 105586, 2.3, 1.7; 96203, 0.2, 1.2; 87762, 3.4, 2.0; 34527, 1.3, 1.0; 37109, 1.3, 1.8; 74665, 0.9, 2.6; 64376, 1.3, 2.3; 49011, 1.2, 0.5; 201063, 1.8, 2.3; 104011, 3.1, 2.8; 97366, 0.9, 0.5; 39184, 1.1, 1.0; 58578, −0.2, 1.2; 34742, 1.8, 2.7; 64143, 1.2, −0.3; 33747, −0.3, 2.5; 55955, 1.4, 0.9; 72183, 3.0, 0.6; 61653, 2.3, 1.3; 82307, 1.5, 1.4; 71991, 4.9, 2.2; 76786, 1.8, −0.2; 43864, −1.0, 1.5; 58384, 0.3, 1.4; 54813, 2.0, 1.8; 40705, 1.1, 2.3; 104159, 1.5, 1.1; 47900, 2.2, 1.6; 94509, 2.8, 2.5; 78735, 1.7, 0.6; 52869, 2.5, 1.1; 103117, 2.0, 2.7; 79297, 0.1, 3.0; 42243, 1.5, 1.6; 51915, 3.3, 3.3; 139469, 0.3, 1.8; 103193, 1.3, 1.9; 56374, 1.7, 1.4; 40391, 1.6, 2.8; 37003, 1.4, 1.5; 44832, −0.4, 0.7; 201101, 1.2, 1.5; 70343, 1.7, 0.5; 34030, 0.9, −0.6; 47826, 2.5, 1.7; 34558, 0.0, 0.9; 46582, 2.0, 1.1; 76758, 1.4, 1.0; 87783, 1.0, −1.1; 63431, 0.8, 2.4; 83366, 1.5, 1.2; 201107, 0.6, 0.0; 75928, 3.3, 3.8; 64635, 2.0, 4.3; 39257, 1.2, −0.4; 140306, 2.7, 2.7; 72889, 0.2, 0.6; 54003, −0.4, 0.0; 42762, 1.6, 1.6; 63146, 1.4, 1.1; 50632, −0.5, −0.4; 35157, 0.6, 0.3; 74632, 2.0, −0.5; 201110, 1.2, 0.0; 73547, 3.0, −1.2; 41631, 2.5, 2.5; 68456, 0.2, −0.1; 89180, 1.4, 0.0; 85369, 2.0, 3.1; 93096, 0.7, 2.2; 49577, 0.6, 0.7; 73358, 1.3, 1.5; 54065, 0.4, 1.7; 77776, 1.5, 1.3; 33012, 1.5, 0.5; 36630, 1.2, 0.6; 96315, 4.0, 2.8; 82574, 0.2, 0.8; 63328, 1.9, 3.7; 78479, −0.5, 1.3; 85529, 2.0, 1.2; 33792, 2.3, 1.2; 43888, 0.1, 2.7; 48565, 0.6, 1.2; 106963, 0.8, −0.5; 89249, 2.6, 1.0; 32565, −0.3, 0.4; 103825, 1.9, 3.0; 71602, 1.7, 1.9; 49853, −0.5, 1.3; 38972, 0.5, 2.6; 44787, 3.3, 2.6; 201128, 1.5, 1.4; 33404, 0.4, 2.2; 33011, 1.8, 1.0; 201129, 2.2, 4.3; 35612, 1.1, 1.5; 201131, −0.1, 0.9; 56367, 0.2, 0.5; 33137, 0.3, 2.0; 48840, 0.6, 1.5; 59864, 1.1, 1.2; 39542, 3.2, 1.9; 53134, 0.6, 0.3; 83458, 1.3, 3.8; 35306, 0.7, 0.8; 38502, 0.6, 2.6; 46447, 4.1, 1.3; 105608, 3.7, 3.1; 83139, 2.0, 1.1; 52063, 2.8, 1.4; 44967, −1.0, 1.3; 201136, 0.8, −0.5; 42613, 1.6, −0.2; 55881, 2.5, −0.5; 51830, 1.0, 3.3; 34607, 1.0, −0.4; 42444, −0.2, 2.1; 34386, 1.2, −1.5; 89824, 4.9, 1.9; 42988, 3.5, 1.9; 64024, 2.2, 3.0; 35096, 0.4, −0.5; 142074, 2.0, 1.3; 46614, 2.3, 4.0; 85654, 1.2, 2.2; 45405, 1.6, 0.1; 56109, 0.9, 1.6; 107146, 2.2, 1.2; 42429, 2.1, 1.8; 43959, 2.5, 3.4; 89217, 1.3, 1.2; 48805, 0.8, −0.2; 64467, 1.4, 2.9; 47772, 1.2, 1.5; 85367, 1.4, 2.7; 52205, 2.5, 1.7; 45774, 1.3, 1.5; 201153, 2.4, −1.5; 201155, 0.8, 1.5; 81931, 0.7, 1.5; 34474, 1.2, 0.4; 57587, 1.5, 2.6; 78884, 2.3, 2.4; 109299, 1.6, 0.6; 90978, 1.6, 1.6; 55422, 2.2, 2.7; 81476, 2.6, 1.9; 34254, 1.1, 0.6; 67873, 1.7, 0.9; 82785, 2.5, 2.9; 86018, 0.9, 0.3; 86652, 0.0, 1.8; 45161, 2.1, 4.0; 39757, −0.2, −1.3; 143060, 2.7, 2.8; 98209, 1.0, 2.4; 88402, 2.0, 2.0; 75703, 2.8, −0.2; 143210, −0.2, 1.2; 201167, 0.5, −0.1; 89310, 1.7, 1.9; 85485, 3.4, 1.8; 97350, 4.2, 4.2; 201168, 2.0, 2.6; 89064, 0.1, −0.4; 201170, 2.7, 1.0; 79669, 2.8, 2.3; 61644, 3.0, 2.3; 35326, 2.9, 2.6; 59258, 1.2, −1.2; 33025, −0.1, −0.7; 54829, 1.8, 1.0; 35526, 0.4, 0.9; 64085, 3.0, 2.7; 60141, 2.1, 2.6; 48832, 1.6, 0.7; 53428, 1.4, 2.8; 36881, 3.5, 1.4; 81187, 2.9, 3.5; 201173, 1.6, 0.9; 55544, 0.5, 0.4; 78574, 3.3, 2.8; 57786, 0.9, 0.7; 79478, 1.6, 3.8; 201174, 2.7, 1.7; 65561, 1.9, 2.3; 96541, −1.0, 0.3; 51702, 2.6, 0.9; 80211, 2.1, 1.9; 85309, 3.3, 3.4; 34981, 0.5, −0.7; 91894, 0.7, 1.4; 201183, 2.1, 1.6; 201184, 3.7, 3.3; 64124, 3.1, 4.0; 42098, 1.3, 1.5; 40723, −0.1, 2.0; 201186, 1.6, 1.4; 41602, 0.5, 0.7; 71342, 0.2, 0.8; 59170, 0.6, 1.4; 85387, 0.4, −0.3; 68339, 1.2, 1.6; 63595, 2.6, −0.1; 34691, 1.9, −0.2; 59893, 1.5, 2.8; 42700, 1.3, 1.9; 88908, 2.4, −0.6; 44856, 0.9, 0.4; 49656, 0.3, −2.1; 46820, 1.7, 1.9; 45119, 0.6, 1.7; 43059, 1.5, 2.0; 33430, −0.5, 1.6; 40658, 0.4, 1.1; 42794, 2.2, 1.6; 71897, 0.3, 2.5; 105556, 1.1, 0.2; 48078, 1.6, 1.7; 201191, 0.7, −1.0; 201192, 1.8, 0.3; 84339, 4.0, 0.8; 44362, 0.7, 0.5; 201193, −0.1, 0.8; 57191, 1.5, 1.9; 50831, 1.5, 1.0; 81071, 1.1, 2.6; 39151, 3.5, 2.4; 36860, 1.6, 0.4; 77047, 1.1, 4.2; 90473, 0.8, 2.5; 41859, 1.6, 1.3; 201197, 3.5, 4.5; 96033, 2.6, 1.8; 47490, 0.2, −0.6; 201198, −0.2, 0.7; 57081, 1.4, 2.0; 43228, 0.5, 1.9; 40262, 0.5, 1.5; 201200, 3.9, 2.6; 60358, 1.1, 2.6; 52439, 1.1, 1.7; 52894, 1.5, 1.2; 40989, 0.7, −0.9; 38625, −0.4, 0.6; 86688, 1.8, 2.0; 201201, 0.9, 2.3; 49238, 1.3, 3.8; 57689, 0.9, 2.4; 63694, 1.1, 0.5; 201202, 1.9, 2.4; 92009, 2.3, 1.8; 57258, 0.8, 1.6; 35865, 1.0, 2.0; 35137, 1.4, −0.5; 43472, 1.0, −1.0; 72472, 3.5, 2.9; 67117, 0.6, 0.6; 92545, 1.8, 2.3; 95134, 1.9, 2.6; 47973, 1.9, 1.8; 68975, 1.9, −1.0; 78937, 2.5, 0.6; 56916, 1.1, 1.3; 201204, 0.3, 2.0; 43510, 1.2, 0.9; 72396, 2.0, 0.3; 40078, −0.4, 1.5; 56648, 1.6, 1.0; 95248, 1.8, 3.8; 87636, 2.8, 1.7; 64670, 4.0, 1.4; 43731, 4.5, 4.5; 79563, 1.1, 2.3; 108191, 1.2, 2.8; 95223, 2.2, 1.4; 58602, 2.1, 0.4; 40278, 1.4, 0.9; 76402, 1.3, 2.0; 63206, 1.6, 0.8; 52437, 0.6, 0.2; 70477, 1.3, 2.3; 68494, 1.3, 2.5; 57904, 2.0, 1.7; 69406, 2.0, 3.0; 74986, 2.7, 2.8; 201235, 2.3, 4.5; 98167, 1.1, −0.7; 201238, 0.9, 2.4; 85366, 2.5, 1.4; 68696, 1.9, −1.1; 94789, 0.8, 1.7; 57301, 2.6, 1.2; 40799, 2.1, 2.5; 64077, 1.8, 2.0; 106158, 0.8, 0.7; 201244, 3.6, 3.3; 51971, 1.3, −0.3; 105328, 1.5, 2.7; 201249, 1.9, −0.5; 67789, 0.8, 0.7; 102809, 4.3, 3.7; 88106, 0.6, 2.1; 51895, 0.0, 0.5; 201252, 1.6, 1.0; 62898, 1.2, 1.5; 61457, 1.1, 1.8; 44525, 0.4, 1.4; 49948, 0.5, 3.0; 45543, −0.9, 1.7; 34503, 0.7, 1.4; 78808, 2.3, 1.3; 38709, 0.7, 0.9; 34952, 1.2, 1.4; 61576, 2.8, 1.2; 41732, 2.6, 1.8; 73746, 1.7, 0.4; 59015, 1.2, 1.9; 44913, 2.6, 1.9; 45659, 2.2, 2.8; 41575, 2.8, 2.8; 73227, 2.0, 3.0; 43828, 1.5, 1.2; 108839, 3.0, 1.3; 94535, 2.8, 3.3; 86380, 1.1, 1.2; 59050, 0.5, 1.6; 64137, 1.5, 4.0; 51671, 2.2, 0.5; 91711, 2.4, 1.6; 73148, 2.0, 1.9; 74289, 1.7, 2.4; 60490, 2.8, 2.2; 43242, 2.0, 2.3; 60099, 0.5, 1.7; 54490, 1.0, −0.1; 65503, 1.4, 0.5; 33518, 0.9, 1.7; 65242, 1.7, 1.4; 51000, 0.0, 1.9; 50526, 1.4, 0.6; 61681, 3.0, 2.9; 38476, 2.2, 1.5; 38935, 0.5, 0.5; 74159, 0.8, 1.2; 35780, 2.8, 0.1; 38981, −0.3, −1.7; 81645, 1.3, 1.5; 201282, 1.1, 0.5; 42508, 1.5, 0.8; 86750, 2.3, 3.1; 60549, 0.9, 0.4; 51052, 2.9, 2.0; 64075, 0.8, 2.3; 96756, 0.5, 2.0; 65825, 2.1, 3.4; 98121, 3.1, 2.3; 54271, 0.8, 0.3; 97719, 1.2, 3.6; 43455, 2.9, 3.0; 201300, 2.1, 1.0; 48541, 1.1, 2.0; 46421, 3.0, 0.5; 55994, 1.9, 1.8; 39229, 1.4, 0.5; 77660, 1.3, 0.7; 35363, 0.5, 2.9; 35125, 2.0, 1.5; 201307, 2.3, 1.3; 57578, 2.2, 0.6; 37910, 0.4, 1.6; 36151, 0.9, 2.6; 42205, 2.2, 1.3; 33281, 1.2, 2.3; 47977, 0.6, 0.0; 66956, 0.8, 2.1; 57883, 3.3, 3.5; 40586, 1.6, 1.8; 47962, 1.9, 1.0; 201331, 0.1, 0.3; 56310, 2.5, 2.2; 38643, 0.4, 1.3; 42294, 1.9, 1.2; 36051, 1.0, 1.5; 56948, 1.9, 1.0; 201336, 0.7, 0.5; 54323, 2.6, −0.6; 37856, 2.9, 0.2; 36511, 0.4, 1.9; 35706, 2.6, 2.6; 39361, 1.3, 3.3; 72039, 0.9, 0.2; 34054, 1.9, 1.1; 61115, 1.6, 2.2; 45950, 2.4, 3.1; 68058, 0.5, −0.3; 63168, 0.9, 1.7; 52312, 1.2, 3.6; 91559, 1.0, 1.2; 38039, 1.6, 0.2; 32613, 1.7, 1.5; 43839, 1.3, 2.1; 38725, 1.1, 0.4; 56074, 0.4, 1.6; 78321, −0.4, 0.9; 201340, 1.0, 1.7; 50245, −0.1, −0.6; 81736, 1.3, 1.1; 81899, 2.3, 1.7; 58620, 1.8, 1.2; 55281, 0.3, 1.0; 150377, 1.1, 3.9; 54130, 0.6, 2.0; 71033, 2.2, 1.0; 53415, 2.1, 2.6; 47856, 0.1, −1.0; 38745, 1.4, −1.2; 40766, 1.2, 1.7; 62823, 3.0, 1.6; 36817, −0.4, 0.8; 52071, 1.7, 2.0; 201352, 0.0, −0.2; 77350, 1.5, 3.3; 34834, −0.3, −0.7; 66623, 2.1, 1.9; 75731, 3.6, 1.7; 201356, 0.1, −0.1; 46898, 2.3, 2.7; 94392, 2.2, 5.2; 36438, 1.1, 0.6; 37188, 2.4, 0.8; 50127, 0.6, −1.2; 51937, 0.4, 0.2; 79874, 0.8, −0.5; 75634, 3.4, 2.7; 35028, 1.6, 1.3; 47256, 0.5, 2.7; 37896, 0.3, 0.4; 56905, 2.3, 1.2; 201362, 2.4, 2.5; 49087, 2.2, 0.8; 52274, 0.4, 2.2; 42005, 1.0, 0.4; 37004, 2.0, 3.5; 41447, 2.5, 2.1; 47654, 1.0, 1.4; 55619, 3.2, 2.0; 87442, 2.1, 2.1; 50484, 1.5, 1.8; 43221, 0.6, 0.2; 63876, 3.9, 1.2; 38321, 1.1, 1.2; 42147, 1.9, 2.5; 69062, 1.9, 1.0; 75617, −0.3, −0.4; 201366, 1.8, 3.6; 33240, 1.6, 1.5; 36065, 3.7, 2.8; 86780, 0.3, 1.9; 39269, 1.2, 2.1; 44893, 3.4, 0.7; 35553, 3.1, 2.5; 36884, 0.2, −0.3; 50798, 3.5, 2.9; 201371, 2.7, 2.7; 37776, 0.5, 0.8; 47791, 1.3, 0.7; 34344, 1.8, 2.6; 110411, 2.2, 1.6; 68462, 1.9, 3.8; 37198, 2.4, 2.0; 41044, 2.0, 2.1; 42061, 1.0, 2.3; 33831, 1.5, 0.5; 87962, −0.5, 0.7; 48178, 1.9, 1.7; 35949, 0.7, 1.1; 67335, 2.4, 3.0; 57706, 1.6, 1.4; 110632, 2.8, 1.6; 201391, 3.3, 2.7; 97724, 1.7, −1.9; 94587, 1.5, 0.2; 38335, 0.4, −0.8; 91959, 0.7, 0.6; 75101, 0.0, −1.0; 77699, 0.5, 1.2; 57920, 1.0, 1.2; 201410, 1.0, 1.9; 71900, 2.2, 1.6; 37858, 2.5, 2.5; 37222, 1.4, 1.7; 88613, 2.4, 2.2; 52302, 2.1, −0.4; 79002, 2.0, 3.2; 46438, 0.1, 1.1; 102727, 0.5, 2.2; 77758, 1.2, 1.5; 80748, 2.8, 3.2; 47373, 1.9, −0.9; 32834, 2.5, 1.2; 45783, 1.8, 1.1; 58700, 2.6, 0.1; 50085, 0.1, 2.0; 53885, 0.8, 0.9; 48910, 0.6, 0.5; 53402, 1.1, 1.0; 58345, 1.7, 2.2; 58549, 0.9, 0.3; 92579, 2.2, 2.7; 69740, −0.7, 1.3; 201426, 2.2, 0.9; 106663, 2.9, 1.8; 48696, 1.7, 2.7; 201429, 1.4, 3.5; 32905, 0.5, 2.5; 38004, −0.6, 0.3; 54442, 0.7, −1.6; 38880, 1.6, 1.1; 48690, 1.7, 2.9; 47053, 1.9, 0.6; 93415, 0.7, 0.3; 32957, 1.8, 1.0; 99083, 1.4, 2.7; 71062, 1.7, 2.9; 62514, 1.3, 2.7; 44230, 1.7, 2.3; 201442, 2.8, 3.0; 41699, 1.2, 2.7; 201443, 2.6, 1.8; 67542, 3.2, 0.9; 201444, 0.2, 1.4; 37093, 2.9, 2.2; 201445, 1.0, 1.2; 201449, 2.1, 2.8; 84004, 4.3, 2.9; 33551, 1.1, 1.6; 37581, 1.5, 1.6; 201450, 2.5, 1.8; 73985, 0.3, 1.7; 71344, 1.6, 2.2; 85128, 0.9, 1.5; 110492, 0.6, 1.3; 36538, 1.9, 1.2; 201458, 2.7, 2.2; 46691, 1.1, 1.2; 107868, 2.1, 1.3; 37974, 0.5, 1.9; 84055, 0.2, 2.7; 110108, 1.2, 0.9; 95121, 2.5, 2.9; 201463, 4.2, 2.5; 40496, 1.6, 1.2; 201467, 2.0, 2.1; 41103, 2.5, 3.1; 37291, 2.8, 1.8; 74705, 2.9, 2.2; 89298, 4.1, 2.5; 33949, 0.8, 0.3; 46976, 2.6, 0.6; 60724, 0.4, 1.1; 79333, 3.1, 2.2; 37071, 2.1, 3.5; 35008, 1.9, −0.4; 46033, 2.8, 2.9; 35352, 2.4, 2.3; 201486, 1.3, 1.4; 35249, 1.3, 0.8; 67949, 1.2, 0.8; 86585, 1.5, 1.5; 55980, 3.3, 0.9; 71904, 2.8, 2.8; 38719, 1.4, 1.8; 59067, 2.7, 3.1; 36974, 1.3, 1.9; 48828, 1.2, 1.3; 36985, 1.5, 2.3; 46968, 1.5, 3.7; 49156, 1.0, 1.7; 201511, 0.6, 0.9; 36130, 0.9, 1.5; 35693, 2.1, −0.2; 86071, 3.0, 2.7; 82333, 2.4, 2.0; 64821, 1.1, 1.3; 201520, 2.1, 0.5; 57358, 1.5, 0.9; 37151, −0.1, 1.5; 41502, 0.9, 0.9; 40463, 0.5, 0.2; 32748, 0.0, 2.2; 47076, 1.1, 0.8; 67639, 0.1, 0.9; 59922, 1.1, 2.0; 39638, 1.7, 0.0; 201527, 1.9, 1.5; 102586, 3.2, 1.4; 34427, 1.4, 2.9; 59042, 2.3, 1.7; 47230, 0.9, 1.1; 47961, 2.4, 0.3; 44592, 2.2, 1.8; 49294, 1.5, 1.4; 58989, 1.1, 3.1; 38695, 0.4, 1.7; 40549, 2.1, 2.0; 34475, 2.2, 2.0; 52119, 2.4, 2.5; 37717, 1.4, 0.8; 36203, 1.1, 0.8; 37166, 0.1, 1.1; 46105, 2.5, 2.4; 50053, 2.1, 1.5; and 43726, 0.2, 0.5.

[0807] The following is a list of amino acid sequences for peptides used in the above examples, where each amino acid sequence is preceded by its corresponding SEQ ID NO: 200028, AAFHINA; 200029, AAIRGYA; 200030, AAITPEN; 200031, AASYKWE; 200032, ADDGPVK; 200033, ADHYVLG; 200034, ADNREDL; 200035, ADPPLQI; 200036, ADSGALE; 200037, ADTQDAA; 200038, ADYSGDT; 200039, AEDNVKA; 200040, AEDRTSE; 200041, AENSGGE; 200042, AFATRRE; 200043, AGAQQNE; 200044, AGHNEEN; 200045, AGLIISK; 200046, AGMPHLR; 200047, AGNHYDE; 200048, AGPLMGL; 200049, AGQHQYF; 200050, AGSEAWA; 200051, AHADNSV; 200052, AHDTYYL; 200053, AHGDVTS; 200054, AHHGAMW; 200055, AHHMVHH; 200056, AHLDMHI; 200057, AIEERVV; 200058, AIGSDPD; 200059, AILDIDW; 200060, AILGTVR; 200061, AIQQRTF; 200062, AISDISN; 200063, AKDVAWR; 200064, AKNYAYA; 200065, AKPFVQL; 200066, ALATVTD; 200067, ALLGTDT; 200068, ALTGNEL; 200069, AMKNDHW; 200070, AMLGTHR; 200071, AMQSEYN; 200072, ANDDNKD; 200073, ANDQDKW; 200074, ANDVHGE; 200075, ANEEAPQ; 200076, ANGDAYI; 200077, ANGHNEG; 200078, ANLNAAK; 200079, ANTEPTV; 200080, APIHHAI; 200081, APTHQRL; 200082, AQANSDL; 200083, AQHDTGD; 200084, AQLTMHS; 200085, AQPHPKF; 200086, ARDHLDE; 200087, ARYDINK; 200088, ARYPVTN; 200089, ASENFTV; 200090, ASFSKLP; 200091, ASIPGHW; 200092, ASLARRD; 200093, ASQMHNK; 200094, ASVTDKD; 200095, ATDSIAG; 200096, ATMHNDM; 200097, ATSPFQD; 200098, AVKFVPP; 200099, AVYGIDM; 200100, AYDPAPS; 200101, AYINQTA; 200102, AYQLQSL; 200103, AYTSDPE; 200104, CDHVKAQ; 200105, CEKSGCH; 200106, CGPQRVC; 200107, CMMKECR; 200108, CNLPMCK; 200109, CNTDKCI; 200110, CPTAECA; 200111, CSKSACL; 200112, CVNDPCT; 200113, DAALDNV; 200114, DAAQDKG; 200115, DAGERST; 200116, DAPPTSH; 200117, DAQNSEC; 200118, DASAEAG; 200119, DATQNNE; 200120, DATYAES; 200121, DAVLTSL; 200122, DDGANKV; 200123, DDKEREL; 200124, DDKISQI; 200125, DDKKDDF; 200126, DDQSSRA; 200127, DDSKQNI; 200128, DDSQGTW; 200129, DDTNAGK; 200130, DDTVDTT; 200131, DDWDGGN; 200132, DDYLSMH; 200133, DEDGYEK; 200134, DEHQQSA; 200135, DEKSLSS; 200136, DEPYQHK; 200137, DFDGKNS; 200138, DFGTPTT; 200139, DFKMSRN; 200140, DFVDLVD; 200141, DGAAQQP; 200142, DGDFEQE; 200143, DGDHSHD; 200144, DGDNSRQ; 200145, DGGQQVI; 200146, DGGSVNT; 200147, DGKAVAW; 200148, DGLGQEP; 200149, DGLNQDS; 200150, DGLQREE; 200151, DGPQNDK; 200152, DGPQSAW; 200153, DGYNEIH; 200154, DHDNAGR; 200155, DHDQASH; 200156, DHGNAYA; 200157, DHQRESE; 200158, DHSTETV; 200159, DIEDGTR; 200160, DIKRFAN; 200161, DINEQRA; 200162, DIRDGRR; 200163, DISTQND; 200164, DITAVNE; 200165, DKGTEQL; 200166, DKPPEIA; 200167, DKQPESI; 200168, DKTLDSF; 200169, DKTNDHE; 200170, DKWENGM; 200171, DLAMEKM; 200172, DLGGYNE; 200173, DLGLDST; 200174, DLSDAKA; 200175, DLTHDTH; 200176, DMEPKAF; 200177, DMGLMRK; 200178, DMGNDTN; 200179, DMGNKEI; 200180, DMNDNRV; 200181, DMQHQGI; 200182, DMSIQGT; 200183, DMSPNQD; 200184, DMSTAEM; 200185, DMTANTG; 200186, DMTNMAD; 200187, DMTSEST; 200188, DNAQNVH; 200189, DNDFDIW; 200190, DNDHRDI; 200191, DNDPYNM; 200192, DNDVTHA; 200193, DNGDKKI; 200194, DNGGGMD; 200195, DNGKEVP; 200196, DNGQFIE; 200197, DNGYDEK; 200198, DNHNESL; 200199, DNHNPHQ; 200200, DNPKPEN; 200201, DNQSEED; 200202, DNTPISQ; 200203, DNVPENQ; 200204, DPMYSEN; 200205, DPPNSST; 200206, DPPQATV; 200207, DPPTEGP; 200208, DPSKEKC; 200209, DPSLPGE; 200210, DQAEGTF; 200211, DQGNESN; 200212, DQGVTWI; 200213, DQPSMET; 200214, DQSFAAE; 200215, DRDNYTD; 200216, DRESFPW; 200217, DRGNEDE; 200218, DRNFTRQ; 200219, DRPMVNR; 200220, DRRTAIG; 200221, DRTDETS; 200222, DRTLEES; 200223, DRVNDDQ; 200224, DSAHGAA; 200225, DSAHLQN; 200226, DSDGISE; 200227, DSDQNNE; 200228, DSDVVGK; 200229, DSGGQEL; 200230, DSGQLVA; 200231, DSGQPQP; 200232, DSKEDMR; 200233, DSKNYSI; 200234, DSMQTDQ; 200235, DSNSVGH; 200236, DSRNEAQ; 200237, DSSTNDK; 200238, DSTAPEF; 200239, DSTNVSD; 200240, DSTPIQV; 200241, DSTPTAT; 200242, DSVRNEI; 200243, DSVRNET; 200244, DTAGTHN; 200245, DTANVDA; 200246, DTAQLVE; 200247, DTAVPAV; 200248, DTDHNKC; 200249, DTDHQLS; 200250, DTDPMNF; 200251, DTENRVF; 200252, DTFGGSE; 200253, DTGFQGI; 200254, DTGKEYH; 200255, DTGMVNV; 200256, DTGNHGS; 200257, DTGYEIT; 200258, DTHHQDA; 200259, DTKENSS; 200260, DTLGPEK; 200261, DTLPLTT; 200262, DTMVQSL; 200263, DTPMEGQ; 200264, DTTYLKK; 200265, DTYNDSE; 200266, DTYPAEI; 200267, DVGGSPA; 200268, DVGMSIL; 200269, DVHGTIE; 200270, DVINQDV; 200271, DVITPEE; 200272, DVKSEVE; 200273, DVPSQAH; 200274, DVVWVGE; 200275, DYADTHK; 200276, DYANDEN; 200277, DYKPIVK; 200278, EADNYDQ; 200279, EAGNLTV; 200280, EAGSEFW; 200281, EAIKEQG; 200282, EAKQLSK; 200283, EAPMINM; 200284, EAQVWTD; 200285, EATIIPT; 200286, EATLAQT; 200287, EAVHQFL; 200288, EAYQSPL; 200289, EDDGTMN; 200290, EDDSGGH; 200291, EDEVVWE; 200292, EDFGTAK; 200293, EDGLEEF; 200294, EDIILHS; 200295, EDKDYAI; 200296, EDNKDAA; 200297, EDQGLKN; 200298, EDSHSAY; 200299, EDTGMQG; 200300, EDYAGTE; 200301, EEADINK; 200302, EEAEDNV; 200303, EEDNNPR; 200304, EEHLRHD; 200305, EEHVMIN; 200306, EESGTAV; 200307, EETGHTL; 200308, EFGASSW; 200309, EFHGHFK; 200310, EFKTQLK; 200311, EFQDLPK; 200312, EFQNTSI; 200313, EFSYDLI; 200314, EGDEDRK; 200315, EGHQVGV; 200316, EGKMIRI; 200317, EGNMEKS; 200318, EGNTYLN; 200319, EGPTGNQ; 200320, EGQQERS; 200321, EGQTFNH; 200322, EGSMEGV; 200323, EGWNMEA; 200324, EHDKEGM; 200325, EHDNVAE; 200326, EHDQGSV; 200327, EHDVDWH; 200328, EHHNQHD; 200329, EHKEQQV; 200330, EHNHAEL; 200331, EHRDNER; 200332, EHTGPEV; 200333, EHYAIHS; 200334, EIKPQET; 200335, EIKVRDR; 200336, EILHEGK; 200337, EIRLMNK; 200338, EITPNTR; 200339, EITSGTK; 200340, EKALRIT; 200341, EKDTVIA; 200342, EKGEEIQ; 200343, EKGVEIK; 200344, EKKLIIS; 200345, EKRLNLA; 200346, EKSKIYF; 200347, EKTVENS; 200348, EKVPNYM; 200349, ELGPTIS; 200350, ELHLRFE; 200351, ELINLMP; 200352, ELKDNEY; 200353, ELPYTHN; 200354, ELQDSKG; 200355, ELQGNPW; 200356, ELSAALT; 200357, ELTAATV; 200358, EMADPKP; 200359, EMAFKKT; 200360, EMAGNQV; 200361, EMAQLKD; 200362, EMGASNM; 200363, EMHTDPQ; 200364, EMKRYGI; 200365, EMTSITT; 200366, ENADDGQ; 200367, ENDGMQA; 200368, ENHVPTI; 200369, ENISNDG; 200370, ENMQTVI; 200371, ENPGEFW; 200372, ENPNQDR; 200373, ENPVWTT; 200374, ENQQPIL; 200375, ENTSALW; 200376, ENTSTAL; 200377, ENVAEGP; 200378, ENVGTSF; 200379, ENYDQGI; 200380, EPFMKED; 200381, EPNSNYE; 200382, EPQDNHS; 200383, EPQGNTP; 200384, EPSKEQS; 200385, EQAGQGD; 200386, EQFKKMM; 200387, EQHVQAD; 200388, EQKNQVD; 200389, EQNIQIT; 200390, EQPVIVP; 200391, EQQLPLT; 200392, EQQSQYP; 200393, EQSSSHE; 200394, EQTAQHV; 200395, EQYTNDE; 200396, ERDAKVR; 200397, ERHDQEA; 200398, ERIPNWS; 200399, ERMLGMH; 200400, ERPEWLK; 200401, ERSDTNE; 200402, ERSLPNK; 200403, ERTKYAA; 200404, ERTLTHM; 200405, ERTPYKM; 200406, ERYGIQV; 200407, ESADFHD; 200408, ESAPTSE; 200409, ESAQKDE; 200410, ESDPFHY; 200411, ESHGHTD; 200412, ESHNDDA; 200413, ESHNTST; 200414, ESIQGVL; 200415, ESLTFDD; 200416, ESQLDNT; 200417, ESQQNEE; 200418, ESTFKPW; 200419, ESVLASV; 200420, ETDRGAT; 200421, ETDTYRE; 200422, ETEVDRM; 200423, ETGAMEH; 200424, ETGGEPK; 200425, ETHSPES; 200426, ETIGSIQ; 200427, ETIPDWV; 200428, ETMMIKK; 200429, ETMSIER; 200430, ETPLASV; 200431, ETQELDH; 200432, ETQEPQN; 200433, ETRNFTY; 200434, ETSNKES; 200435, ETTEQDS; 200436, ETTPQYA; 200437, ETVQHPY; 200438, ETYENKA; 200439, ETYQQHT; 200440, EVAGGGV; 200441, EVATFDN; 200442, EVATGHP; 200443, EVKITVR; 200444, EVLGKDV; 200445, EVMPPQH; 200446, EVQIEGI; 200447, EVQNLSV; 200448, EVQTHIQ; 200449, EVQTIVT; 200450, EVRKPPI; 200451, EVSDGGV; 200452, EVSEAAG; 200453, EVSPAMM; 200454, EVTGDEQ; 200455, EVYGNDS; 200456, EWNVTGT; 200457, EYNTMDK; 200458, EYNVDDR; 200459, EYQAVAI; 200460, EYTQQSL; 200461, FALNMMS; 200462, FALVTKS; 200463, FDPGNRE; 200464, FDSVPAT; 200465, FDSVPIM; 200466, FETQITV; 200467, FEVARKN; 200468, FGAQHVE; 200469, FGGNVVI; 200470, FGKSGQA; 200471, FGLHSVI; 200472, FGLRSGT; 200473, FGLSKPL; 200474, FGSNMEH; 200475, FIQTSQW; 200476, FITKQVH; 200477, FKENILG; 200478, FKPMHSH; 200479, FKRSAQD; 200480, FKTHLQN; 200481, FLSHPHI; 200482, FMAEKHR; 200483, FMGATGW; 200484, FMKPVGH; 200485, FMSNINK; 200486, FNDHEAQ; 200487, FNGENEK; 200488, FNSHLMK; 200489, FNSTDGE; 200490, FPVGIAV; 200491, FQALHAN; 200492, FQQKERL; 200493, FQVGEDI; 200494, FREKWPP; 200495, FRQQPPL; 200496, FSKEQIE; 200497, FSQPRVP; 200498, FSTKPDR; 200499, FTGSRVQ; 200500, FTKTHHP; 200501, FVDMNFA; 200502, FVDTGGF; 200503, FVIGAVN; 200504, FWLEQDP; 200505, GADKGNE; 200506, GADKVGR; 200507, GAHSHPW; 200508, GAMSDRE; 200509, GDGNDKS; 200510, GEHDQTP; 200511, GESENSA; 200512, GESGDSA; 200513, GFDTRKF; 200514, GFENSIS; 200515, GFQPQGR; 200516, GFTHDIR; 200517, GGDVVSG; 200518, GGGDDRK; 200519, GGGTDEK; 200520, GGKMFTI; 200521, GGLHAML; 200522, GGVWEEE; 200523, GHDQYVI; 200524, GHEREHQ; 200525, GHKPPFH; 200526, GIIMKPH; 200527, GIRGVNP; 200528, GKDLMPW; 200529, GKDSRFN; 200530, GKEASVD; 200531, GLADPPP; 200532, GMQYKNH; 200533, GNGQPET; 200534, GNIIRVH; 200535, GNMPSKH; 200536, GNPDGNH; 200537, GNQPVQK; 200538, GPDQGSA; 200539, GPGGDTQ; 200540, GPINSIF; 200541, GPVRNNG; 200542, GQDNCCD; 200543, GQDQTGE; 200544, GQHNNDP; 200545, GQITTPW; 200546, GQMSVPW; 200547, GSDLHGI; 200548, GSDTMIM; 200549, GSEHQDS; 200550, GSKAGHN; 200551, GSPLQSR; 200552, GSPPNID; 200553, GTDTSNI; 200554, GTSNELE; 200555, GTTMFTD; 200556, GVALLPR; 200557, GVDGAAN; 200558, GVGAGED; 200559, GVIKADR; 200560, GVMEVPN; 200561, GVMQHMR; 200562, GVNAQPD; 200563, GVRISEK; 200564, GWNEKGE; 200565, GWNQHHT; 200566, GWQINHP; 200567, GYMKQQH; 200568, GYMRNMG; 200569, HALGAQH; 200570, HALGQYK; 200571, HANISPR; 200572, HANMGRF; 200573, HDIKGKF; 200574, HDKPEIQ; 200575, HDQVFKE; 200576, HDSASEA; 200577, HDSDLRH; 200578, HDSDMKN; 200579, HEHATPE; 200580, HEKNDSP; 200581, HESNAAE; 200582, HFDNYNT; 200583, HGAGMDT; 200584, HGAGVNW; 200585, HGALDPL; 200586, HGDEVDN; 200587, HGDTGDA; 200588, HGDVLAF; 200589, HGGADEY; 200590, HGMPFGT; 200591, HGPFIKS; 200592, HGTHDQN; 200593, HGTLSVR; 200594, HGVIYEI; 200595, HGVPDQG; 200596, HHADTGE; 200597, HHDPLFQ; 200598, HHSDSMS; 200599, HHSGDQL; 200600, HIPNAYY; 200601, HITRPGY; 200602, HKERAVL; 200603, HKNYEGW; 200604, HKQFAHS; 200605, HKTFATL; 200606, HLADATN; 200607, HLALAVS; 200608, HLKSAML; 200609, HMGVNTR; 200610, HIMNLTAR; 200611, HNAFTTL; 200612, HNAYMTI; 200613, HNDSSTN; 200614, HNGDALD; 200615, HNGDNSM; 200616, HPIAMNR; 200617, HPTMMLP; 200618, HQAIERF; 200619, HQDASQG; 200620, HQEDVND; 200621, HQEHGPV; 200622, HQKLIGC; 200623, HQNDSEA; 200624, HQQPVKV; 200625, HQVKSTS; 200626, HQYQLKQ; 200627, HRDSDDH; 200628, HRIESSK; 200629, HSDSDDS; 200630, HSETKVE; 200631, HSLMGVL; 200632, HSLQDAI; 200633, HSNDIPQ; 200634, HSSDMQP; 200635, HSTEFAY; 200636, HSYDEEE; 200637, HTDHPQA; 200638, HTDSDIA; 200639, HTESPKT; 200640, HTGDLTE; 200641, HTGPMIK; 200642, HTLTASD; 200643, HTPSPEQ; 200644, HVAPAEH; 200645, HVVSSTW; 200646, HYNLESL; 200647, HYQYRDP; 200648, IALEQAT; 200649, IAVEQHI; 200650, IAYKMSQ; 200651, IDAQQIQ; 200652, IDHDAHE; 200653, IDKQDQT; 200654, IDNDLKA; 200655, IDSSASP; 200656, IDTEHAQ; 200657, IDTGQYD; 200658, IEIKMAK; 200659, IENNSET; 200660, IETSQPG; 200661, IFITPGG; 200662, IGAQQFE; 200663, IGDKPED; 200664, IGDRDFW; 200665, IGNEMTQ; 200666, IGSEKEF; 200667, IGYNRQS; 200668, IHAHILT; 200669, IHAISGR; 200670, IHDKPEE; 200671, IHENDPD; 200672, IHNKIPH; 200673, IHNQSHW; 200674, IHTAEIN; 200675, IIDSAGK; 200676, IIKPMIG; 200677, IIPSSTL; 200678, IISRNQT; 200679, IITQPMK; 200680, IKANAFI; 200681, IKTYPNV; 200682, ILGRNLM; 200683, ILIKNPA; 200684, ILLKVQP; 200685, ILNKPPI; 200686, ILNMEEW; 200687, IMNEYTD; 200688, INDAPVS; 200689, INDMSTF; 200690, INSDSPQ; 200691, INSEYTL; 200692, IQIDTGS; 200693, IQQDHKE; 200694, IQSDQES; 200695, IQTHLDD; 200696, IRDSVRH; 200697, IRMSLKD; 200698, IRTSTHN; 200699, ISAQVGD; 200700, ISDITPI; 200701, ISDYGDT; 200702, ISEPRAK; 200703, ISGMQDS; 200704, ISIQFKN; 200705, ISRDHFY; 200706, ISSFSTL; 200707, ISTDKSE; 200708, ISVAATC; 200709, ISVSMTV; 200710, ITAIETS; 200711, ITDMHMR; 200712, ITGTPGE; 200713, ITMQITK; 200714, ITQAEAV; 200715, ITSREDE; 200716, ITSTQGE; 200717, ITTDSHV; 200718, IVMAQSM; 200719, IVQPAEM; 200720, KAHNTLF; 200721, KAMHVQM; 200722, KAQWEAK; 200723, KDDPILM; 200724, KDDPTGV; 200725, KDDYSGA; 200726, KDGTHEE; 200727, KDMIMVM; 200728, KDNAQRY; 200729, KDNDSPK; 200730, KDNHPKV; 200731, KDSDEAH; 200732, KDTADGD; 200733, KDTTRVS; 200734, KEAHRNL; 200735, KEAMKDR; 200736, KEAQVMR; 200737, KEKFEAK; 200738, KEKQHNQ; 200739, KEKTDTL; 200740, KEPPSKF; 200741, KEVNPRS; 200742, KFYQSSD; 200743, KGLNAMY; 200744, KGMQEFR; 200745, KGNDIEM; 200746, KGVNYMT; 200747, KHDDVSD; 200748, KHTTQIQ; 200749, KIDGAEE; 200750, KIEKDVR; 200751, KIIHADW; 200752, KIKEDGV; 200753, KIMGSHI; 200754, KIVENTP; 200755, KLDIVVR; 200756, KLHAGMT; 200757, KLIVATG; 200758, KMVQIVN; 200759, KNDDAAT; 200760, KNDDAGD; 200761, KNDLPQL; 200762, KNEARQL; 200763, KNNFEVF; 200764, KPEGYFL; 200765, KPGKIFE; 200766, KPSFIQS; 200767, KPVNFVS; 200768, KQDTADL; 200769, KQFTQNP; 200770, KQHAVFV; 200771, KQIPMIS; 200772, KQIVRDY; 200773, KQPEQRS; 200774, KQSDEHD; 200775, KQYNEIK; 200776, KRANFDS; 200777, KRQFGEV; 200778, KRQPMME; 200779, KSDPAWT; 200780, KSDVIGE; 200781, KSHSDDA; 200782, KSQDEKI; 200783, KSRVPNE; 200784, KTDNYRP; 200785, KTGLKPP; 200786, KTHAMFP; 200787, KTHLPGI; 200788, KTMNEDI; 200789, KTMNTEK; 200790, KTYTTNS; 200791, KVMVKSE; 200792, KVQTQHA; 200793, KWHTAEL; 200794, KYDMGSR; 200795, KYDSGQK; 200796, KYEQMHF; 200797, KYMTAGL; 200798, KYNDVFL; 200799, KYPNQVF; 200800, LAITYTS; 200801, LAMSSFN; 200802, LAVIEQM; 200803, LDDTGNR; 200804, LDGPGAP; 200805, LDKLMVV; 200806, LDLSEKQ; 200807, LDTMIQH; 200808, LDVHNNE; 200809, LEAISNM; 200810, LEFEGDN; 200811, LELLAGP; 200812, LEQSVPK; 200813, LESHSQI; 200814, LGALSTF; 200815, LGDHDGV; 200816, LGESGGD; 200817, LGKIHQQ; 200818, LGLQDSS; 200819, LGMRDQW; 200820, LGNNEEN; 200821, LGNQDAP; 200822, LGTPEWI; 200823, LGTYLEG; 200824, LGVQPYS; 200825, LGVVPYK; 200826, LHALSDL; 200827, LHFAMPD; 200828, LHMNAPF; 200829, LHTIRPV; 200830, LILRSQP; 200831, LITQYSS; 200832, LLDGYER; 200833, LMDHQPT; 200834, LMGAMPR; 200835, LMSDVSQ; 200836, LNDLVEL; 200837, LNDQKET; 200838, LNDTPKH; 200839, LNGDTNL; 200840, LNGELSL; 200841, LNGGGVE; 200842, LNGQEST; 200843, LNHNFNM; 200844, LNVDLSF; 200845, LPAYSPY; 200846, LPGAVVR; 200847, LPIRMHG; 200848, LPMITKL; 200849, LPPNDYY; 200850, LQAGNEV; 200851, LQDDMPD; 200852, LQDPFNY; 200853, LQEAQIT; 200854, LQERGIE; 200855, LQTVTTT; 200856, LQVQEDI; 200857, LQYTQGK; 200858, LRIGNSM; 200859, LRISADY; 200860, LRITTTH; 200861, LRSEVMQ; 200862, LSAPHAK; 200863, LTGDPTQ; 200864, LTHGGQK; 200865, LTHGQNK; 200866, LTINQRI; 200867, LTMHVRS; 200868, LTMPIDQ; 200869, LTTGFMK; 200870, LVDNHQD; 200871, LVQSLND; 200872, LVYPHET; 200873, LWATPEL; 200874, LYQTPAL; 200875, LYRGFNE; 200876, LYVQAGI; 200877, MADQQPG; 200878, MADSIST; 200879, MAQAAWV; 200880, MASQNPE; 200881, MDHGAVD; 200882, MDNIQQM; 200883, MDNTGSE; 200884, MDYAAGD; 200885, MEDVSGV; 200886, MEHAQDS; 200887, MEYAITH; 200888, MGGFAQR; 200889, MGGSDDS; 200890, MGIMRPH; 200891, MGVLNHM; 200892, MIEIPHL; 200893, MIHDYNH; 200894, MISALVD; 200895, MKILTAQ; 200896, MKIMTHN; 200897, MLEQRQR; 200898, MLLHSKT; 200899, MLMQADI; 200900, MLPGTFS; 200901, MLQIQDI; 200902, MMRTHGN; 200903, MNDHGHD; 200904, MNDHVAV; 200905, MNEALWI; 200906, MNEHGGV; 200907, MNGADGN; 200908, MNKDAGK; 200909, MNTAEFW; 200910, MNTYHHT; 200911, MNVIHMK; 200912, MNVTGEN; 200913, MPAKDHK; 200914, MPAKFLQ; 200915, MPGQVPD; 200916, MPHNDAA; 200917, MPSDQNE; 200918, MQAAEQT; 200919, MQEQYSY; 200920, MQGVENI; 200921, MQHNIYS; 200922, MQHQRLT; 200923, MQHQRQN; 200924, MQMPRMP; 200925, MQTQGGD; 200926, MQVREIR; 200927, MRERIHQ; 200928, MRNMDMY; 200929, MRVMGGM; 200930, MRVMPNH; 200931, MSARVEE; 200932, MSGGEIL; 200933, MSLTRNN; 200934, MSSDHHE; 200935, MTAIKTC; 200936, MTARQTI; 200937, MTDTFKR; 200938, MTDTGAQ; 200939, MTGGTRL; 200940, MTGKLPP; 200941, MTSPMPD; 200942, MVSQQPW; 200943, MYDMAAM; 200944, NADGSFT; 200945, NADHVSE; 200946, NAISEIK; 200947, NAQHEQL; 200948, NAQLHNK; 200949, NATEPKS; 200950, NDAVDQS; 200951, NDDDYAE; 200952, NDDEYTG; 200953, NDFAQAE; 200954, NDFGYPV; 200955, NDGFAYI; 200956, NDHGDVA; 200957, NDKNSPE; 200958, NDKTDTI; 200959, NDNIAVK; 200960, NDQEVRC; 200961, NDVTAGG; 200962, NGDSHTP; 200963, NGGGEAL; 200964, NGGQEAM; 200965, NGTEVSS; 200966, NGTQEHN; 200967, NGVVEMQ; 200968, NGYRSIA; 200969, NHDDSSP; 200970, NIDSMRT; 200971, NIVGTYY; 200972, NKEYPQE; 200973, NKGVYPF; 200974, NKPKSGE; 200975, NKSQTTN; 200976, NLGGDQE; 200977, NLINYTG; 200978, NLLGDLA; 200979, NLTEAPW; 200980, NMDQANV; 200981, NMDSASI; 200982, NMGENTS; 200983, NMNIELN; 200984, NMRVTMM; 200985, NNAWHEG; 200986, NNGDKPF; 200987, NPNGNIY; 200988, NPNLHPY; 200989, NPPDNRR; 200990, NPQAEMV; 200991, NPVLPVL; 200992, NQDLAQI; 200993, NQGPGNR; 200994, NQNLRYT; 200995, NRDQMNC; 200996, NRGWPQE; 200997, NRMVSMT; 200998, NRNAPVY; 200999, NRQEMRY; 201000, NSDNEAV; 201001, NSHLQHL; 201002, NSMLRGL; 201003, NSMYRTS; 201004, NSQALEQ; 201005, NSQFSRM; 201006, NTAPEDC; 201007, NTAQKIW; 201008, NTASDLQ; 201009, NTDNPRH; 201010, NTDVYTH; 201011, NTIIMKN; 201012, NTKEDIT; 201013, NTNFHAK; 201014, NTSDNTV; 201015, NTYNDPE; 201016, NVAREIK; 201017, NVDSTPS; 201018, NVEQGDR; 201019, NVGDEPF; 201020, NVHDTPV; 201021, NVNHSDE; 201022, NVQVDRK; 201023, NVVEHHP; 201024, NVVLDSP; 201025, NVYSINV; 201026, NYDPLLI; 201027, NYQNLAR; 201028, PAESDWL; 201029, PAEWDKS; 201030, PALYNKI; 201031, PATQIKW; 201032, PDANKKF; 201033, PDHNKEE; 201034, PDTLSRK; 201035, PEIPDWM; 201036, PEMVKPW; 201037, PENSHPK; 201038, PENVKYR; 201039, PEPKHWI; 201040, PFDGLLL; 201041, PFKMHPG; 201042, PGDAQNS; 201043, PGLSNTD; 201044, PGSDNQT; 201045, PHNHGSW; 201046, PHSDGGN; 201047, PIAQSPW; 201048, PISQNPW; 201049, PISSDPW; 201050, PISVYKT; 201051, PKFDKGW; 201052, PLHGPTR; 201053, PLQDNTP; 201054, PLTAIPP; 201055, PMGEYKD; 201056, PMKVVPH; 201057, PMPIGKI; 201058, PMQDGKH; 201059, PNAQTSE; 201060, PNDPSDV; 201061, PNLTENQ; 201062, PNLTRGY; 201063, PQAQHNK; 201064, PQHMSHL; 201065, PQQGGGE; 201066, PQVGEHP; 201067, PRMfHFTE; 201068, PSADNRD; 201069, PSDQFHE; 201070, PSQDHQD; 201071, PSQKAHF; 201072, PTKDSEE; 201073, PVANQTE; 201074, PVPPADK; 201075, PVSSHIF; 201076, PWKSNIP; 201077, PYMDLPR; 201078, PYQNLRT; 201079, PYTYQSS; 201080, QADERSR; 201081, QAELPQP; 201082, QAGDVRE; 201083, QAHSADL; 201084, QAKNDAC; 201085, QASYTSR; 201086, QATGITL; 201087, QDDHEHA; 201088, QDDNVTQ; 201089, QDGHPGQ; 201090, QDGNAEV; 201091, QDGNGAM; 201092, QDHGMGE; 201093, QDKDNSI; 201094, QDKVRLY; 201095, QDLVLTV; 201096, QDQSNNN; 201097, QEHGMTA; 201098, QEHILEN; 201099, QETEHQV; 201100, QFSGAEE; 201101, QGDKQGR; 201102, QGFKSSI; 201103, QGGVEHE; 201104, QGNDPEN; 201105, QGQDPTD; 201106, QHDQENK; 201107, QHQVDKR; 201108, QIAIDRH; 201109, QKDADPN; 201110, QKPHQNG; 201111, QKVNEWY; 201112, QKYQSGF; 201113, QLDILTR; 201114, QLEQGVT; 201115, QMKKYFE; 201116, QMSEKER; 201117, QNADNEK; 201118, QNDHMGV; 201119, QNDKNEV; 201120, QNDPEKV; 201121, QNDWDEE; 201122, QNGQDTS; 201123, QNGQNDT; 201124, QNGVDES; 201125, QNTLDFI; 201126, QNVPDWV; 201127, QQDNSES; 201128, QQGEKPR; 201129, QQITPHR; 201130, QQKSDAD; 201131, QQNNVHK; 201132, QQSGDEV; 201133, QQTDPQE; 201134, QQTLTDN; 201135, QQTTILK; 201136, QRPASGG; 201137, QRQERIL; 201138, QSADQKW; 201139, QSDFLGM; 201140, QSINFVP; 201141, QSYNYVP; 201142, QTAEGMN; 201143, QTAMVDM; 201144, QTAYEGE; 201145, QTDQTNV; 201146, QTQNLDW; 201147, QTTATSD; 201148, QVEPRDV; 201149, QVGDTKT; 201150, QVGGDEA; 201151, QVQDDSE; 201152, QVRDYQR; 201153, QVTKQIH; 201154, QYDMMKL; 201155, QYEPTKK; 201156, QYTETPE; 201157, RAAGISF; 201158, RADPLRF; 201159, RAMRAEN; 201160, RDDGLFI; 201161, RDFSPPV; 201162, RDNERDH; 201163, RDQDDTV; 201164, RDQSETR; 201165, RDTHEEP; 201166, REDDGNT; 201167, REPNQMK; 201168, RESINRT; 201169, RESIPFH; 201170, REVPFKQ; 201171, RFELGSL; 201172, RGQAFGS; 201173, RGSTMQV; 201174, RHATVGT; 201175, RHTVPLT; 201176, RIETRVT; 201177, RINKEYQ; 201178, RKEQVYI; 201179, RKSQLPD; 201180, RLDDNAD; 201181, RLDSEAK; 201182, RLEDAEG; 201183, RMLESSR; 201184, RMLGATT; 201185, RMMAQQM; 201186, RMTENMR; 201187, RNEMYIH; 201188, RNWQAHE; 201189, RPGAIYN; 201190, RPTALMV; 201191, RQEQVAK; 201192, RQESIKF; 201193, RQGMTEK; 201194, RQGPPYM; 201195, RQIQYPP; 201196, RQTADMW; 201197, RRENSNF; 201198, RSDQRGG; 201199, RSGVYGQ; 201200, RSLGTER; 201201, RSPTTGS; 201202, RSSMDRA; 201203, RTGQQTW; 201204, RTLVGRE; 201205, RTMNIVN; 201206, RVEGYLH; 201207, RVISMER; 201208, RVKIPEM; 201209, RWNSDTL; 201210, RYKEMEW; 201211, SAANSEG; 201212, SAHDLKE; 201213, SAITPTL; 201214, SANEVDG; 201215, SANSGPE; 201216, SATEDKI; 201217, SAVSLLN; 201218, SDETDKL; 201219, SDGSDTR; 201220, SDGTIQP; 201221, SDIERHL; 201222, SDPPGDS; 201223, SDQGPVH; 201224, SDTAIQQ; 201225, SDTPEWM; 201226, SDVSQVY; 201227, SEHEPRT; 201228, SEHQVNQ; 201229, SEMMTRF; 201230, SEQADIC; 201231, SETAGTQ; 201232, SETSNDP; 201233, SEVSANA; 201234, SFAYGKV; 201235, SFVSEKK; 201236, SGALGNW; 201237, SGDYIQM; 201238, SGGVPRG; 201239, SGIQDDA; 201240, SGNAPEV; 201241, SGNYDED; 201242, SGSGDHI; 201243, SGTTDFW; 201244, SGVYPQR; 201245, SHDKHDE; 201246, SHGDASN; 201247, SHNSDEN; 201248, SHTDNLA; 201249, SIGDYKK; 201250, SIGEALI; 201251, SIVERVN; 201252, SKFDEKR; 201253, SKGMYVN; 201254, SKPLVYT; 201255, SKSDVSD; 201256, SKTMGLF; 201257, SLGETTE; 201258, SLLDQAA; 201259, SLQGEII; 201260, SLYGTTL; 201261, SMDQEKE; 201262, SMLHTAL; 201263, SMPNGEH; 201264, SMTRMMT; 201265, SNAGSEE; 201266, SNDEVMQ; 201267, SNDSVAE; 201268, SNEYKPW; 201269, SNGQDSM; 201270, SPANGDC; 201271, SPGMEWM; 201272, SPKEMED; 201273, SPRPPTY; 201274, SQDVPQS; 201275, SQEDDRP; 201276, SQPTYSR; 201277, SREMKPW; 201278, SRENNDM; 201279, SRFASGT; 201280, SRVREGL; 201281, SSIAAIL; 201282, SSPLHRV; 201283, SSVRGLY; 201284, SSYNEDE; 201285, STADGGL; 201286, STDAYPW; 201287, STDQEAM; 201288, STHDGGM; 201289, STHGDDD; 201290, STMPEKW; 201291, STVAIRQ; 201292, SVDNHNS; 201293, SVEHGSV; 201294, SVERDSP; 201295, SVGASVD; 201296, SVNAESD; 201297, SVSSQDE; 201298, SVTLLSK; 201299, SYEVKKY; 201300, SYGGKQM; 201301, TAAMDFT; 201302, TADDNRK; 201303, TADNAQI; 201304, TALHYLS; 201305, TAMQDNQ; 201306, TANENPQ; 201307, TAREIQK; 201308, TAVSETV; 201309, TDAGQTS; 201310, TDASQTA; 201311, TDAVPPI; 201312, TDHMVNV; 201313, TDIAQVT; 201314, TDKRQYI; 201315, TDNDTSA; 201316, TDNVTSL; 201317, TDQGQPH; 201318, TDQMNTS; 201319, TDQTYAK; 201320, TDQVPRE; 201321, TDSSVLY; 201322, TDTDVER; 201323, TEDKLTS; 201324, TEEKPWL; 201325, TEHGATQ; 201326, TESDSYY; 201327, TEVTSAK; 201328, TFRAQNM; 201329, TFTPNIR; 201330, TGDQFPS; 201331, TGEFKQK; 201332, TGFHVTL; 201333, TGHGEDP; 201334, TGLNPHT; 201335, TGNHDMH; 201336, TGPQIHK; 201337, TGSTKWI; 201338, TGTMGED; 201339, TGVHSIF; 201340, TKMTHGP; 201341, TKRVPPE; 201342, TLSDLGN; 201343, TMVTYPK; 201344, TNDVGGE; 201345, TNEHSNI; 201346, TNFRVQV; 201347, TNGDDWW; 201348, TNGGQTD; 201349, TNGHDPA; 201350, TNGIVSE; 201351, TNIGTLR; 201352, TNPNSKH; 201353, TNQDAGP; 201354, TNTALRF; 201355, TNTRESE; 201356, TPHGMTK; 201357, TQADEAV; 201358, TQGNEIE; 201359, TQIGTPY; 201360, TQQDVKI; 201361, TQRNYNQ; 201362, TRFDGPR; 201363, TRQFERT; 201364, TRQQDWL; 201365, TSDTPVL; 201366, TSGPVTR; 201367, TSTDNKH; 201368, TSTMAIE; 201369, TTDQYGA; 201370, TTINEGE; 201371, TTIRMNQ; 201372, TTMDMMM; 201373, TTPGFMI; 201374, TTQQTDG; 201375, TTVPVKL; 201376, TVDQGAP; 201377, TVGYKPQ; 201378, TVMEASI; 201379, TVNKEEV; 201380, TVTANMV; 201381, TYQLTQL; 201382, TYVPLEM; 201383, VADSKEA; 201384, VAKTDEC; 201385, VATHFTN; 201386, VDNYESS; 201387, VDPSPMR; 201388, VDSAGQQ; 201389, VDSEPNV; 201390, VDTGDAP; 201391, VDVRIRT; 201392, VDWDSRM; 201393, VEDQDHE; 201394, VEEGTWD; 201395, VEGSMEF; 201396, VEHGSSA; 201397, VEHQIEV; 201398, VEIYKNK; 201399, VENGYYT; 201400, VESPLFP; 201401, VESPQTS; 201402, VETSLDA; 201403, VETSSGD; 201404, VEYTVSL; 201405, VFIGVGT; 201406, VFSHQVL; 201407, VFSNPSF; 201408, VGDYRRV; 201409, VGGAADD; 201410, VGHKFPV; 201411, VGLTEQQ; 201412, VGNDDTS; 201413, VGNDQMS; 201414, VGNGQDE; 201415, VGQDQPS; 201416, VGTQTQD; 201417, VGVQQTD; 201418, VHLIRSP; 201419, VILDNSV; 201420, VINRAYN; 201421, VITRPVM; 201422, VKKAEWQ; 201423, VKNERWM; 201424, VLNKDDE; 201425, VLNPYGT; 201426, VLPDSRK; 201427, VMEKVEH; 201428, VMLNRIG; 201429, VMTNLHK; 201430, VMTSEPN; 201431, VNGQSQC; 201432, VNMLPQL; 201433, VNMNGQE; 201434, VNREETP; 201435, VNTQPED; 201436, VNVVKYP; 201437, VPDVHQP; 201438, VQGDLQE; 201439, VQGGSEG; 201440, VQISLAH; 201441, VQLDKWT; 201442, VRERSYQ; 201443, VRIKEDR; 201444, VRMTQNT; 201445, VRSNSNV; 201446, VRTMSPL; 201447, VSDSDAN; 201448, VSDYSDD; 201449, VSEMKRY; 201450, VSKTQVG; 201451, VSTQDAG; 201452, VTADTYA; 201453, VTDALVT; 201454, VTDGSQS; 201455, VTDPGLQ; 201456, VTGGELE; 201457, VTHDSGE; 201458, VTLRERT; 201459, VTSDNKM; 201460, VTSPDGE; 201461, VTSQETE; 201462, VVDSGGH; 201463, VVDSRVR; 201464, VVMYQTS; 201465, VVNSIED; 201466, VVSTLEK; 201467, VYDKRTL; 201468, WAGRTIN; 201469, WANSDPD; 201470, WDEETAD; 201471, WDGNDPV; 201472, WDPPVSD; 201473, WDVKFSV; 201474, WEDSYRI; 201475, WEPGDHI; 201476, WEQILDH; 201477, WGDILVT; 201478, WIDHGPY; 201479, WIRTDDF; 201480, WIVDTAP; 201481, WKDTLRQ; 201482, WKKLNIE; 201483, WNGNQNW; 201484, WNTSNVD; 201485, WPEVWTD; 201486, WPVEQKK; 201487, WQVSQPE; 201488, WSQQQPR; 201489, WTADTEV; 201490, WVQNSMK; 201491, YAGIPLI; 201492, YARPEWP; 201493, YDARARY; 201494, YDDVRAD; 201495, YDHSVEK; 201496, YDSGKQE; 201497, YDSKQPE; 201498, YDSMLAT; 201499, YDSQSEE; 201500, YDSVVQH; 201501, YDVTDRN; 201502, YEANVNT; 201503, YEDSATM; 201504, YEHAQEA; 201505, YEYDGSW; 201506, YFERVKS; 201507, YGAGDDM; 201508, YGAVTSE; 201509, YGDNIIK; 201510, YGEEKSV; 201511, YGELGKK; 201512, YGMKVSL; 201513, YGNQYNS; 201514, YGTIDHA; 201515, YHDALFH; 201516, YHSEYNE; 201517, YIDAQLR; 201518, YIQKSAI; 201519, YKAGSWV; 201520, YKEIQPR; 201521, YKLTPAL; 201522, YLAKSML; 201523, YMDQHPL; 201524, YMHKTSM; 201525, YNAFAEE; 201526, YNMPGNR; 201527, YNMSNRQ; 201528, YNRDNPD; 201529, YNTRAVH; 201530, YNYGMDA; 201531, YPNLHHL; 201532, YPTNDDK; 201533, YQGPDTD; 201534, YQMERGR; 201535, YQTGESE; 201536, YRNDDID; 201537, YSGVDNV; 201538, YSNEYIQ; 201539, YTDNTML; 201540, YTGDV™; 201541, YTIMGSP; 201542, YVPISQH; 201543, YYDVPSK; and 201544, YYQDETV.

[0808] The Fit4Function pipeline presents a significant conceptual and technological advance over prior AAV engineering studies, including those that leverage ML. Conventional in vivo selections use sequential rounds to narrow the focus of sequence exploration to a handful of top candidates, which may not have other traits required for translation to preclinical and clinical trials. Simultaneously engineering multiple traits into AAV capsids or other proteins of interest has become an important but challenging goal. To date, most protein engineering efforts, including those leveraging ML, have focused on optimizing a single function, e.g. generating more efficiently produced and diversified AAV capsid libraries but stopping short of multi-trait prediction. A few groups have gone beyond single trait engineering by combining multiple previously validated functional structures into a single protein, e.g., by recombining structurally independent segments from different channelrhodopsins possessing known functions, localizations, and photocurrent properties of interest, or by applying protein design tools to filter out variants that do not meet additional characteristics such as solubility and immunogenicity. A few groups have gone beyond single trait engineering by combining multiple previously validated functional structures into a single protein, e.g., by recombining structurally independent segments from different channelrhodopsins possessing known functions, localizations, and photocurrent properties of interest, or by applying protein design tools to filter out variants that do not meet additional characteristics such as solubility and immunogenicity. However, as these strategies rely on the recombination of multiple existing functional structures into a single protein or the use of third-party protein design tools, they cannot be broadly generalized to engineer multiple de novo functions. A key obstacle to combining multiple ML models that predict different traits is the aggregated error that increases with each added model. The Fit4Function approach directly tackles this problem by leveraging a moderately sized, all viable, low-bias (ML-designed) library to generate highly reproducible data for multi-trait learning with a low false positive rate. This allows the models to be applied in different combinations with a low risk of aggregating significant error. MultiFunction libraries can thus be generated to more efficiently explore the vast sequence space for multi-trait capsids.

[0809] The Fit4Function approach can help to reduce the need for extensive screening in macaques in two ways. Firstly, the unique features of Fit4Function libraries enable the quantitative assessment of capsid biodistribution and top candidate selection in multiple organs from just a single round of screening. It is only necessary to screen a Fit4Function library once for a given function to then predict the functionality of sequences that were not contained in the original library. In contrast, it typically requires 2-6 rounds of in vivo screening to reliably identify top candidates from conventional selections, and the data from these screens cannot be used to accurately predict the traits of variants not tested in that screen. This means that the Fit4Function approach can be used to design libraries full of diverse and promising candidates for more efficient screening in macaques or other animals or assays. Secondly, unlike existing screening strategies, our approach can systematically determine the functional assays or combinations thereof that drive cross-species transferability. As the Fit4Function approach is applied to more NHP functions of interest (e.g., BBB-crossing), it will become apparent whether it is worthwhile to continue screening in mice or other animals for those functions. This can inform the choice of cell or animal models to perform screens in and develop vectors that are more likely to translate preclinically and clinically.

[0810] As with other ML-guided approaches, Fit4Function can be more challenging to implement with assays that produce low quality data due to lower detection sensitivities. For example, data reproducibility and subsequent model performance can be bottlenecked by in vivo transduction assays in some organs due to the inherent tropism of the parental capsid, inter-animal variability, and technical challenges related to tissue sampling. One approach to improve data quality with low sensitivity assays may be to use smaller Fit4Function libraries, because reducing library diversity increases the sampling of each individual variant and therefore the quality of the screening data. A second limitation that affects any multi-objective engineering effort is that variants that are maximally optimized for multiple objectives may not exist, especially in cases where performance on functions are negatively correlated. While Fit4Function cannot overcome this fundamental problem, it provides the means to efficiently search the vast production fit sequence space for variants that are reasonably well optimized for multiple traits.

[0811] With continued application across experiments and laboratories, the Fit4Function approach should enable the assembly of a vast ML atlas that can accurately predict the performance of AAV capsid variants across dozens of traits and inform the design of screening pipelines. In addition, the Fit4Function approach should translate to engineering other proteins that are amenable to quantitative, high-throughput screening of libraries that are diversified at a defined set of residues.

[0812] The following materials and methods were employed in the above examples.

### Training and Assessment Library Design

[0813] The training and assessment libraries were designed to contain 150K nucleotide sequences each. The libraries were composed of 64.5K unique and 10K shared amino acid sequences generated by uniformly sampling all 20 amino acids at each position. The 74.5K variants were duplicated via 7-mer replication. 1K sequences containing stop codons were included to detect problems with cross packaging. In total, each library comprised a final set of 150K sequences.

### Capsid Library Synthesis

[0814] To produce synthetic library inserts, lyophilized DNA oligonucleotide libraries (Agilent G7223A) or NNK hand mixed primers (IDT) were spun down at 8000 RCF for 1 minute, resuspended in 10 μL UltraPure DNase/RNase-Free Distilled Water (Thermo Fisher Scientific, 10977015), and incubated at 37° C. for 20 minutes. For pooled synthetic oligonucleotide libraries, the following primer format was used: 5′-GTATTCCTTGGTTTTGAACCCAACCGGTCTGCGCCTGTGC-(NNN)₇-TTGGCACTCTGGTGGTTTGTGGCCAC. (SEQ ID NO: 199470, where the 7-mer contained 21 (7×3) nucleotides). To produce NNK inserts, the AAV9_K449R_Forward (CGGACTCAGACTATCAGCTCCC (SEQ ID NO: 199471)) and AAV9_K449R_NNK_Reverse (5′-GTATTCCTTGGTTTTGAACCCAACCGGTCTGCGCCTGTGC(MNN)₇TTGGGCACTCTGGTGGTTTG TG) (SEQ ID NO: 199472; where “N” represents A, C, G, or T and “M” represents A or C) primers were used.

[0815] To amplify the oligonucleotide libraries and incorporate them into an AAV9 (K449R) template, 2 μL of the resuspended pooled oligonucleotide library or NNK-based library was used as an initial reverse primer along with 0.5 μM AAV9_K449R_Forward primer in a 25 μL PCR amplification reaction using Q5 Hot Start High-Fidelity 2X Master Mix (NEB, M0494S). 50 ng of a plasmid containing only AAV9 (K449R) VP1 amino acids 347-586 was used as a PCR template. PCR was performed following the manufacturer's protocol with an annealing temperature of 65° C. for 20 seconds and an extension time of 90 seconds. After six PCR cycles, 0.5 μM AAV9_K449R_Reverse (GTATTCCTTGGTTTIGAACCCAACCG (SEQ ID NO: 199473)) was spiked into the reaction as a reverse primer to further amplify sequences containing the oligonucleotide library for an additional 25 cycles. To remove the PCR template, 1 μL of DpnI (NEB, R0176S) was added to the PCR reaction and incubated at 37° C. for one hour. Afterwards, the PCR products were cleaned using AMPure XP beads (Beckman, A63881) following the manufacturer's protocol.

[0816] The PCR insert was assembled into 1600 ng of a linearized mRNA selection vector (AAV9-CMV-Express) with NEBuilder HiFi DNA Assembly Master Mix (NEB, E2621L) at a 3:1 insert:vector Molar ratio in a 80 μL reaction volume, incubated at 50° C. for one hour, and then at 72° C. for 5 minutes. Afterwards, 4 μL of Quick CIP (NEB, M0508S) was spiked into the reaction and incubated at 37° C. for 30 minutes to dephosphorylate unincorporated dNTPs that may inhibit downstream processes. Finally, 4 μL of T5 Exonuclease (NEB M0663S) was added to the reaction and incubated at 37° C. for 30 minutes to remove unassembled products. The final assembled products were cleaned using AMPure XP beads (Beckman, A63881) following the manufacturer's protocol and their concentrations were quantified with a Qubit dsDNA HS Assay Kit (Thermo Fisher Scientific, Q32851) and a Qubit fluorometer.

mRNA Selection Vector

[0817] The mRNA selection vector (AAV9-CMV-Express) was designed to enrich for functional AAV capsid sequences by recovering capsid mRNA from transduced cells. AAV9-CMV-Express used a ubiquitous CMV enhancer and AAV5 p41 gene regulatory elements to drive AAV Cap expression. The AAV-Express plasmid was constructed by cloning the following elements into an AAV genome plasmid in the following order: a cytomegalovirus (CMV) enhancer-promoter, a synthetic intron and the AAV5 P41 promoter along with the 3′ end of the AAV2 Rep gene, which included the splice donor sequences for the capsid RNA. The capsid gene splice donor sequence in AAV2 Rep was modified from a non-consensus donor sequence CAGGTACCA to a consensus donor sequence CAGGTAAGT. The AAV9 capsid gene sequence was synthesized with nucleotide changes at S448 (TCA to TCT, silent mutation), K449R (AAG to AGA), and G594 (GGC to GGT, silent mutation) to introduce restriction enzyme recognition sites for oligonucleotide library fragment cloning. The AAV2 polyadenylation sequence was replaced with a simian virus 40 (SV40) late polyadenylation signal to terminate the capsid RNA transcript.

### Virus Production

[0818] For library production, HEK293T/17 cells (ATCC, CRL-11268) were seeded at 22 million cells per 15 cm plate the day before transfection and grown in DMEM with GlutaMAX (Gibco, 10569010) supplemented with 5% FBS and 1× non-essential amino acid solution (NEAA) (Gibco, 11140050). The next day, each plate was triple transfected with 39.93 g of total plasmid DNA encoding pHelper, RepStop encoding the AAV2 Rep genes, pUC19 at a ratio of 2:1:1, respectively, and with 10 ng of assembled library DNA. The media was exchanged for fresh DMEM with 5% FBS and 1×NEAA at 20 hours post transfection. At 60 hours, the media and cell lysates were harvested and purified following a protocol described in R. C. Challis, et al., “Systemic AAV vectors for widespread and targeted gene delivery in rodents,” Nat. Protoc. 14, 379-414 (2019).

[0819] Individual recombinant AAVs were produced in suspension HEK293T cells, using F17 media (ThermoFisher Scientific). Cell suspensions were incubated at 37° C., 8% C02, 125 RPM. 24 hours before transfection, cells were seeded in 200 mL at ˜1 million cells/mL. The day after, cells (˜2 million cells/mL) were transfected with pHelper, pRepCap and pTransgene (2:1:1 ratio, 2 ug DNA per million cells) using Transport 5 transfection reagent (Polysciences) with a 2:1 PEI:DNA ratio. Three days post-transfection, cells were pelleted at 2000 RPM for 10 minutes into Nalgene conical bottles. The supernatant was discarded, and cell pellets were stored at −20° C. until purification. Each pellet, corresponding to 200 mL of cell culture, was resuspended in 7 mL of 500 mM NaCl, 40 mM Tris-base, 10 mM MgCl₂, with Salt Active Nuclease (ArcticZymes, #70920-202) at 100 U/mL. Afterwards, the lysate was clarified at 2000 RCF for 10 minutes and loaded onto a density step gradient containing OptiPrep (Cosmo Bio, AXS-1114542) at 60%, 40%, 25%, and 15% at a volume of 5, 5, 6, and 6 mL respectively in OptiSeal tubes (Beckman, 361625). The step gradients were spun in a Beckman Type 70ti rotor (Beckman, 337922) in a Sorvall WX+ ultracentrifuge (ThermoFisher Scientific, 75000090) at 69,000 RPM for 1 hour at 18° C. Afterwards, ˜4.5 mL of the 40-60% interface was extracted using a 16-gauge needle, filtered through a 0.22 μm PES filter, buffer exchanged with 100K MWCO protein concentrators (Thermo Fisher Scientific, 88532) into PBS containing 0.001% Pluronic F-68, and concentrated down to a volume of 500 μL. The concentrated virus was filtered through a 0.22 μm PES filter and stored at 4° C. or −80° C.

### AAV Titering

[0820] To determine AAV titers, 5 μL of each purified virus library were incubated with 100 μL of an endonuclease cocktail consisting of 1000U/mL Turbonuclease (Sigma T4330-50KU) with 1× DNase I reaction buffer (NEB B0303S) in UltraPure DNase/RNase-Free distilled water at 37° C. for one hour. Next, the endonuclease solution was inactivated by adding 5 μL of 0.5M EDTA, pH 8.0 (Thermo Fisher Scientific, 15575020) and incubated at room temperature for 5 minutes and then at 70° C. for 10 minutes. To release the encapsidated AAV genomes, 120 μL of a Proteinase K cocktail consisting of 1M NaCl, 1% N-lauroylsarcosine, 100 g/mL Proteinase K (Qiagen, 19131) in UltraPure DNase/RNase-Free distilled water was added to the mixture and incubated at 56° C. for 2 to 16 hours. The Proteinase K-treated samples were then heat-inactivated at 95° C. for 10 minutes. The released AAV genomes were serial diluted between 460-460,000× in dilution buffer consisting of 1×PCR Buffer (Thermo Fisher Scientific, N8080129), 2 g/mL sheared salmon sperm DNA (Thermo Fisher Scientific, AM9680), and 0.05% Pluronic F68 (Thermo Fisher Scientific, 24040032) in UltraPure Water (Thermo Fisher Scientific). 2 μL of the diluted samples were used as input in a ddPCR supermix (Bio-Rad, 1863023). Primers and probes, targeting the ITR and CAG promoter region, were used for titration, at a final concentration of 900 nM and 250 nM, respectively (ITR2_Forward: GGAACCCCTAGTGATGGAGTT (SEQ ID NO: 199474); ITR2_Reverse: CGGCCTCAGTGAGCGA (SEQ ID NO: 199475); ITR2_Probe: CACTCCCTCTCTGCGCGCTCG (SEQ ID NO: 199476) [FAM/Iowa Black FQ Zen]; CAG Forward: TGTTCCCATAGTAACGCCAATAG (SEQ ID NO: 199477); CAG_Reverse: GTACTTGGCATATGATACACTTGATG (SEQ ID NO: 199478); CAG_Probe: TTACGGTAAACTGCCCACTTGGCA (SEQ ID NO: 199479) [FAM/Iowa Black FQ Zen]). Droplets were generated using a QX100 Droplet Generator following the manufacturer's protocol. The droplets were transferred to thermocycler and cycled according to the manufacturer's protocol with an annealing/extension of 58° C. for one minute. Finally, droplets were read on a QX100 Droplet Digital System to determine titers.

### Assessing Production Fitness

[0821] To recover only encapsidated AAV genomes for downstream analysis, 10¹¹ viral genomes were extracted using the endonuclease and Proteinase K steps outlined above (AAV Titering). After Proteinase K treatment, samples were column purified using a DNA Clean and Concentrator Kit (Zymo Research, D4033) and eluted in 25 μL elution buffer for NGS preparation.

### NGS Sample Preparation

[0822] To prepare AAV libraries for sequencing, qPCR was performed on extracted AAV genomes or cDNA to determine the cycle thresholds for each sample type to prevent overamplification. PCR amplification using equal primer pairs (1-8) (Table 30; Described in Huang et al., bioRxiv 2022.10.31.514553 (2022), the disclosure of which is incorporated herein by reference in its entirety for all purposes), was used to attach partial Illumina Read 1 and Read 2 sequences using Q5 Hot Start High-Fidelity 2× Master Mix with an annealing temperature of 65° C. for 20 seconds and an extension time of 60 seconds. Round one PCR products were purified using AMPure XP beads following the manufacturer's protocol and eluted in 25 μL UltraPure Water (Thermo Fisher Scientific). 2 μL was used as input in a second round of PCR to attach on Illumina adaptors and dual index primers (NEB, E7600S) for five PCR cycles using Q5 HotStart-High-Fidelity 2× Master Mix with an annealing temperature of 65° C. for 20 seconds and an extension time of 60 seconds. The round two PCR products were purified using AMPure XP beads following the manufacturer's protocol and eluted in 25 μL UltraPure DNase/RNase-Free distilled water (Thermo Fisher Scientific).

[0823] To quantify the amount of PCR products for NGS, an Agilent High Sensitivity DNA Kit (Agilent, 5067-4626) was used with an Agilent 2100 Bioanalyzer. PCR products were pooled and diluted to 2-4 nM in 10 mM Tris-HCl, pH 8.5 and sequenced on an Illumina NextSeq 550 following the manufacturer's instructions using a NextSeq 500/550 Mid or High Output Kit (Illumina, 20024904 or 20024907), or on an Illumina NextSeq 1000 following the manufacturer's instructions using NextSeq P2 v3 kits (Illumina, 20046812). Reads were allocated as follows: I1: 8, I2: 8, R1: 150, R2: 0.

TABLE 30
PCR1 primers

| | | | SEQ ID |
|---|---|---|---|
| Name | 5′ Handle | Sequence | NO |
| seq1_F | Read 1 | CTTTCCCTACACGACGCTCTTCCGATCTNNNNNNN | 199480 |
| | | NCCAACGAAGAAGAAATTAAAACTACTAACCCG | |
| seq2_F | Read 1 | CTTTCCCTACACGACGCTCTTCCGATCTNNNNNNN | 199481 |
| | | CCAACGAAGAAGAAATTAAAACTACTAACCCG | |
| seq3_F | Read 1 | CTTTCCCTACACGACGCTCTTCCGATCTNNNNNNC | 199482 |
| | | CAACGAAGAAGAAATTAAAACTACTAACCCG | |
| seq4_F | Read 1 | CTTTCCCTACACGACGCTCTTCCGATCTNNNNNCC | 199483 |
| | | AACGAAGAAGAAATTAAAACTACTAACCCG | |
| seq5_F | Read 1 | CTTTCCCTACACGACGCTCTTCCGATCTNNNNCCA | 199484 |
| | | ACGAAGAAGAAATTAAAACTACTAACCCG | |
| seq6_F | Read 1 | CTTTCCCTACACGACGCTCTTCCGATCTNNNCCAA | 199485 |
| | | CGAAGAAGAAATTAAAACTACTAACCCG | |
| seq7_F | Read 1 | CTTTCCCTACACGACGCTCTTCCGATCTNNCCAAC | 199486 |
| | | GAAGAAGAAATTAAAACTACTAACCCG | |
| seq8_F | Read 1 | CTTTCCCTACACGACGCTCTTCCGATCTNCCAACG | 199487 |
| | | AAGAAGAAATTAAAACTACTAACCCG | |
| seq1_R | Read 2 | GGAGTTCAGACGTGTGCTCTTCCGATCTCATCTCT | 199488 |
| | | GTCCTGCCAAACCATACC | |
| seq2_R | Read 2 | GGAGTTCAGACGTGTGCTCTTCCGATCTNCATCTC | 199489 |
| | | TGTCCTGCCAAACCATACC | |
| seq3_R | Read 2 | GGAGTTCAGACGTGTGCTCTTCCGATCTNNCATCT | 199490 |
| | | CTGTCCTGCCAAACCATACC | |
| seq4_R | Read 2 | GGAGTTCAGACGTGTGCTCTTCCGATCTNNNCATC | 199491 |
| | | TCTGTCCTGCCAAACCATACC | |
| seq5_R | Read 2 | GGAGTTCAGACGTGTGCTCTTCCGATCTNNNNCAT | 199492 |
| | | CTCTGTCCTGCCAAACCATACC | |
| seq6_R | Read 2 | GGAGTTCAGACGTGTGCTCTTCCGATCTNNNNNCA | 199493 |
| | | TCTCTGTCCTGCCAAACCATACC | |
| seq7_R | Read 2 | GGAGTTCAGACGTGTGCTCTTCCGATCTNNNNNNC | 199494 |
| | | ATCTCTGTCCTGCCAAACCATACC | |
| seq8_R | Read 2 | GGAGTTCAGACGTGTGCTCTTCCGATCTNNNNNNN | 199495 |
| | | CATCTCTGTCCTGCCAAACCATACC | |

### NGS Data Processing

[0824] Sequencing data was de-multiplexed with bcl2fastq (version v2.20.0.422) using the default parameters. The Read 1 sequence (excluding Illumina barcodes) was aligned to a short reference sequence of AAV9: reference sequence of AAV9: 5 CCAACGAAGAAGAAATTAAAACTACTAACCCGGTAGCAACGGAGTCCTATGGACAAGTGGCCAC AAACCACCAGAGTGCCCAANNNNNNNNNNNNNNNNNNNNNGCACAGGCGCAGACCGGTTGGGTT CAAAACCAAGGAATACTTCCG (SEQ ID NO: 199496). Alignment was performed with bowtie2 (version 2.4.1) (B. Langmead and S. L. Salzberg, “Fast gapped-read alignment with Bowtie 2,” Nat. Methods. 9, 357-359 (2012)) with the following parameters: −-end-to-end --very-sensitive --np 0 --n-ceil L,21,0.5 --xeq -N 1 --reorder --score-mmn L,−0.6,−0.6−5 8−3 8. Resulting sam files from bowtie2 were sorted by read and compressed to bam files with samtools (version 1.11-2-g26d7c73, htslib version 1.11-9-g2264113) (P. Danecek, et al, “Twelve years of SAMtools and BCFtools,” Gigascience. 10 (2021), doi:10.1093/gigascience/giab008; and H. Li, et al., “1000 Genome Project Data Processing Subgroup, The Sequence Alignment/Map format and SAMtools,” Bioinformatics. 25, 2078-2079 (2009)).

[0825] Python (version 3.8.3) scripts and pysam (version 0.15.4) were used to extract the 21 nucleotide insertion from each amplicon read. Each read was assigned to one of the following bins: Failed, Invalid, or Valid. Failed reads were defined as reads that did not align to the reference sequence, or that had an in/del in the insertion region (i.e., 20 bases instead of 21 bases). Invalid reads were defined as reads whose 21 bases were successfully extracted, but matched any of the following conditions: 1) Any one base of the 21 bases had a quality score (AKA Phred score, QScore) below 20, i.e., error probability >1/100, 2) Any one base was undetermined, i.e., “N”, 3) The 21 base sequence was not from the synthetic library (this case does not apply to NNK library). Valid reads were defined as reads that did not fit into either the Failed or Invalid bins. The Failed and Invalid reads were collected and analyzed for quality control purposes, and all subsequent analyses were performed on the Valid reads.

[0826] Count data for valid reads was aggregated per sequence, per sample, and was stored in a pivot table format, with nucleotide sequences on the rows, and samples (Illumina barcodes) on the columns. Sequences not detected in samples were assigned a count of 0.

### Data Normalization

[0827] Count data was read-per-million (RPM) normalized to the sequencing depth of each sample (Illumina barcode) with:

$${r}_{i , j} = \frac{{k}_{i , j}}{{\sum }_{l = 1}^{n} {k}_{i , j}} \times 1 , 000 , 000 ,$$

where r is the RPM-normalized count, k is the raw count, i=1 . . . n sequences, and j=1 . . . m samples.

[0828] As each biological sampi was run in triplicate data were aggregated for each sample by taking the mean of the RPMs:

$${μ}_{i , s} = \frac{{\sum }_{l = 1}^{p} {r}_{i , l}}{p} ,$$

across p replicates of sample s. Normalized variance was estimated across replicates by taking the coefficient of variaton (CV):

$$C {V}_{i , s} = \frac{{μ}_{i , s}}{{σ}_{i , s}} ,$$

where sigma{i,s} is the standard deviation for variant i in sample s over p replicates. Log 2 enrichment for each sequence was defined as:

$${e}_{i , s} = {log}_{2} ( \frac{{μ}_{i , s}}{{μ}_{corrected , i , t}} ) ,$$

where e is the log 2 enrichment, mu is the mean of the replicate RPMs, and t is the normalization sample. For production fitness, the sample s is the variant abundance after virus production, and the normalization sample t is the variant abundance in the plasmid pool. For functional screens, the sample s is the variant abundance of the screen, and the normalization factor t is the variant abundance after virus production. To avoid dividing by 0 in e (for NNK library processing), mu_corrected is defined as:

$${μ}_{corrected , i , t} = \{ \begin{matrix}{μ}_{i , t} , & for {μ}_{i , t} > 0 \\ 1 / {\sum }_{l = 1}^{n} {k}_{l , t} , & for {μ}_{i , t} = 0\end{matrix} \} ,$$

i.e., counts of 0 across all 3 replicates for the normalization sample were adjusted to a count of 1 across all 3 replicates.

### Production Fitness Training and Assessment

[0829] A robust ML framework was designed and used for the production fitness and Fit4Function functional mappings. A long short-term memory (LSTM) regression model with two hidden layers of 140 and 20 nodes was implemented in Keras (keras-team, GitHub-keras-team/keras: Deep Learning for humans. GitHub, (available at github.com/keras-team/keras)). RNNs, and LSTMs in particular, have been successfully applied for learning functions from biological sequence data as they are designed to capture local and distant relationships across different parts of the input sequences (D. H. Bryant, et al. “Deep diversification of an AAV capsid protein by machine learning.” Nat. Biotechnol. (2021), doi:10.1038/s41587-020-00793-4; and E. Alley, et al. “Unified rational protein engineering with sequence-based deep representation learning,” doi:10.21203/rs.2.13774/v1.). Model parameters and hyperparameters were subject to fine tuning processes but no significant performance was gained across all different functional models implemented in this study. Thus, the simplest model architecture was kept across all modeling throughout this study. The input layer was 7-mer amino acid sequences one-hot encoded into a 20×7 matrix. The target/output is the relative production (or functional) fitness score. Loss was optimized by mean-squared-error with Adam optimizer running on a learning rate of 0.001 (D. P. Kingma and J. Ba, “Adam: A Method for Stochastic Optimization” (2014), (available at arxiv.org/abs/1412.6980).). The batch size was set to 500 observations. To avoid overfitting, model training was controlled by a custom early stopping procedure where the training process was terminated if the ratio of training error to validation error dropped below 0.90.

[0830] For production fitness learning, the training size was optimized by training the framework on increments of 1K variants. Variants that were not detected (n=5,279) after virus production were filtered out from training. Model validation performance was reported at each training size, and a size of 24K variants was arbitrarily selected for final model training given that the model performance reached a plateau after a training size of ˜5K. The training library core variants (N ˜60K, after removing the non-detected sequences) were then randomly divided into training (24K), validation (12K) and testing subsets (24K), all from the training library. The model was trained on the training set (24K), validated during the training process on the validation set (12K), and tested on the testing set (24K). The model was further tested on the unique variants from the assessment library to assess its generalization across libraries.

### Fit4Function Library Sampling

[0831] The Fit4Function libraries were intended to be sampled from the high production fitness space. For the Fit4Function library utilized in the Examples of the present disclosure, a set of 7-mer amino acid sequences was first uniformly sampled 100 times the required library size (240K Fit4Function variants*100=24M variants), by equally sampling each amino acid at each of the 7 positions. Duplicates were removed and the remaining sequences were scored using the production fitness model. Then, the 240K Fit4Function library variants were probabilistically sampled from the parametrized high production fitness distribution. In addition to the 240K high production fitness variants, 1K stop codon-containing variants and 3K variants from the 10K shared variants between the training and assessment libraries were added as a control set.

### Fit4Function Library Validation

[0832] Fitness enrichment scores are relative across library variants due to normalization calculations; calibration is needed to make the fitness scores of two libraries of different compositions comparable for assessment or integration purposes. To calibrate the Fit4Function library production fitness, the 3K control set was used to fit an ordinary linear regression model of the measured production fitness scores between the Fit4Function library and the training library. These regression parameters were applied to the production fitness measured scores of the 240K Fit4Function variants to obtain calibrated production fitness scores. After synthesizing the Fit4Function library, the predicted fitness scores were compared to the calibrated measured fitness by means of correlation.

### Animals

[0833] All mouse procedures were performed as approved by the Broad Institute Institutional Animal Care and Use Committee (IACUC), approval number 0213-06-18-1. Female C57BL/6J (000664) mice were obtained from the Jackson Laboratory (JAX). Recombinant AAV vectors were administered intravenously via the retro-orbital sinus in young adult (7- to 8-week-old) animals. Mice were randomly assigned to groups based on predetermined sample sizes. No mice were excluded from the analyses. For all assays, mice were anesthetized with EUTHASOL™ (Virbac) and transcardially perfused with phosphate buffer saline, pH 7.4, at room temperature (RT). Experimenters were not blinded to the sample groups.

[0834] For the cynomolgus macaque experiments, the study plan involving the care and use of animals was reviewed and approved by the Charles River CR-LAV Institutional Animal Care and Use Committee (IACUC). During the study, the care and use of animals was conducted by CR-LAV with guidance from the USA National Research Council and the Canadian Council on Animal Care (CCAC). The Test Facility is accredited by the CCAC and AAALAC. Per the CCAC guidelines, this study was considered as a category of invasiveness C.

[0835] The rhesus macaque study (n=2) was conducted in the NIH Nonhuman Primate Testing Center for Evaluation of Somatic Cell Genome Editing Tools at the University of California, Davis. All procedures conformed to the requirements of the Animal Welfare Act, and protocols were approved prior to implementation by the UC Davis IACUC.

### AAV Mouse In Vivo Biodistribution Assays

[0836] Purified virus libraries were injected at a dose of 1×10¹² into C57BL/6J mice. Two hours post-injection serum was collected and organs were harvested using disposable 3 mm biopsy punches (Integra, 33-32-P/25) with a new biopsy punch used per organ per replicate. Harvested tissues were immediately frozen in dry ice. AAV genomes were recovered using a DNeasy kit (Qiagen, 69504) following the manufacturer's protocol and samples were eluted in 200 μL elution buffer for NGS preparation.

### AAV Cynomolgus Macaque In Vivo Biodistribution Assays

[0837] The library administered had 100K unique amino acid variants following the Fit4Function criteria (uniformly sampled from the high production fitness sequence space) in addition to a calibration set (3K), control variants, and AAV9. Each variant in the Fit4Function distribution was represented by either two or six 7-mer replicates; AAV9 was represented by two replicates. The purified virus library was injected at a dose of 4.6×1012 vg/kg into a female cynomolgus macaque that was pre-screened for NAbs against AAV9 (CRL). Six hours after systemic delivery, the animal was perfused with cold PBS and organs were harvested and snap frozen in dry ice. DNA was extracted using a DNeasy kit in a Qiagen QIAcube Connect. Samples were then processed as detailed in the NGS sample preparation section.

### AAV NHP In Vivo Transduction Assays

[0838] Approximately 3-month-old rhesus monkeys (˜1 kg; one male, one female) were screened then assigned to the project after confirming seronegative status for AAV9 antibodies. Sedation with Telazol (IM) was performed prior to IV administration of a purified virus library (1×1013 vg/kg) with blood samples collected (˜4 mL; hematology, clinical chemistry, serum, plasma; pre-administration then weekly post-administration). Animals were monitored closely during the study period and until endpoint (four weeks post-administration). They remained robust and healthy with no evidence of adverse findings (body weights, hematology and clinical chemistry panels were all in the normative range at all timepoints; data not shown). Four weeks after systemic delivery, tissues were collected and snap frozen over liquid nitrogen then placed on dry ice immediately prior to storage at ≤−80° C. RNA and DNA were extracted using TRIzol (Invitrogen, 15596026) following the manufacturer's instructions. Total RNA was cleaned up using a RNeasy kit (Qiagen, 74106) followed by on-column DNA digestion. RNA was converted to cDNA using Maxima H Minus Reverse Transcriptase (ThermoFisher Scientific, EP0751) according to the manufacturer's instructions. Samples were then processed as detailed in the NGS sample preparation section.

### NHP Serum Screening for Anti-AAV9 Neutralizing Antibodies

[0839] Neutralization assays were performed at two MOIs, 500 and 1000, in Perkin-Elmer white 96-well plates. Four-fold serial dilutions (1:4 to 1:16,384) of macaque serum samples were prepared in 96-well plates using DMEM supplemented with 5% FCS. Then, 40 μL of each dilution was transferred to a separate 96-well plate, mixed with an equal volume of AAV9.CAG-GFP-P2A-Luciferase-WPRE-SV40 vector (4-8E7 vg per 40 μL, diluted in DMEM-5% FCS), and incubated for one hour at 37° C. Following the incubation, AAV-serum samples were transferred into a new 96-well plate (20 uL triplicates) and a total of 80 μL of DMEM-5% FCS, containing 20,000 HEK293T cells, was added to each well (final volume of 100 μL). 96-well plates were incubated for 48 hours at 37° C., 5% C02. Luminescence levels were read using a Perkin Elner Victor Luminescence Plate Reader using the britelite plus Reporter Gene Assay System (Perkin-Elmer, #6066761). Data was analyzed using the neutcurve Python package developed by the Bloom lab. The neutralizing antibody titer was measured as the concentration that resulted in a 50% reduction in luciferase activity relative to the no-serum control. Animals used in the transduction study had NAb titers <1:12 in this set of antibody screens.

### In Vitro Binding and Transduction

[0840] HEK293T/17 (ATCC® CRL-11268™), HepG2 (ATCC® HB-8065™), THLE-2 (ATCC® CRL-2706™), hCMEC/D3 (Millipore, SCC066), and human and mouse BMVECs (Cell Biologics, H-6023 and C57-H6023) were grown in 100 mm dishes and exposed to the Fit4Function or (NNK) 7-mer library (MOI 1E4 for HEK293T/17, MOI3E4 for hCMEC/D3, MOI 6E4 for primary human and mouse BMVECs and MOI5E3 for HepG2 and THLE-2) diluted in 10 mL of growth media at 4° C. with gentle rocking for two hours. After that, cells were washed three times with DPBS, and total DNA was extracted with DNeasy kit (Qiagen) according to the manufacturer instructions. Half of the recovered DNA was used in PCR amplification for viral genome sequence recovery.

[0841] Transduction assays were performed as described above with the following exceptions. The cells were cultured in growth media containing virus for 60 hours and total RNA was then extracted with the RNeasy kit (Qiagen), 5 g of RNA was converted to cDNA using the Maxima H Minus Reverse Transcriptase according to the manufacturer's instructions.

### Sequence-to-Function Mapping

[0842] Functional scores were quantified as the log 2 of the fold-change enrichment of the variant reads-per-million (RPM) after the screen relative to its RPM in the virus library, i.e. log 2 (Assay RPM/Virus RPM). Fit4Function models utilized the same design of the ML framework utilized for production fitness mapping (two-layer LSTM, custom early stopping, batch size of 500 variants, MSE error and Adam optimizer). Out of the 240K variants in the Fit4Function library, 90K were allocated for training and testing the ML function models (model construction) and 150K variants were held-out for validation of the MultiFunction approach. The training size for each function model was optimized independently. As with the production fitness model, the function models were assessed by correlation between the predicted and measured functional scores.

### MultiFunction Library Design

[0843] Using the previously generated fitness models of the production fitness and the five functional models described in the Examples provided above, an in-silico screen of 10M randomly sampled 7-mer sequences was conducted to identify variants that are highly fit for all six traits. The threshold of high fitness for each function was arbitrarily set to the 50th percentile of each functional fitness distribution from the Fit4Function screening data. The percentiles were calculated on the detected variants of each functional assay from the 90K model construction data set. To reduce false positive predictions (variants predicted above the thresholds due to model errors), the filtration thresholds were increased slightly when applied to the predictions. For example, if the measured threshold is at fitness score of 2.5, variants predicted to have fitness >2.5+shift were considered. The shift in applied thresholds is arbitrarily set to be 5% of the fitness dynamic range of each function. The thresholds were then used to filter out the 10M variants that were run through the six functional prediction models. Out of the variants predicted to pass the six modified thresholds, 30K variants were sampled to be included in the MultiFunction library. The 30K variants were each represented by two 7-mer replicates.

[0844] The MultiFunction library also included (1) a positive control set (3K) that was drawn from the subset of the 150K Fit4Function validation set that met the six conditions on the actual measurements (without modifying the thresholds), (2) a set of 10K variants randomly sampled from the Fit4Function 240K core variants as background controls representing the high production fitness space, (3) a set of 3K calibration variants present in the Fit4Function library (and the training library) to be used as background controls representing the entire (unbiased) sequence space, and (4) 1K stop codon containing sequences.

### MultiFunction Library Validation

[0845] The MultiFunction library was synthesized, virus was produced, and the five liver-related functions were screened in the same way the Fit4Function library was processed. The success rate of the MultiFunction library was quantified in terms of hit rate, i.e. out of the 30K variants predicted to meet the six criteria, what percentage satisfied the six criteria when the MultiFunction library was screened on those functions (predicted positive versus measured positive). To determine whether a variant met specific functional criteria, the distribution of that function for the MultiFunction variants against was compared the positive control set. For a variant to be considered a hit for a specific function, its measured value should be above the mean-2SD (standard deviations) of the positive control set measured in the same experiment. A variant was considered a hit in calculating the MultiFunction hit rate only if it was a hit for all six functions; a variant that met five or fewer conditions was not considered a hit.

[0846] The hit rate of the Fit4Function space was the number of non-control variants from the Fit4Function library measured to pass the six thresholds (without the prediction marginal shifts used for MultiFunction variant design) divided by the number of non-control variants in the library. The hit rate for the uniform sequence space could be estimated as the hit rate in the Fit4Function library (representing the high production fitness space—all the low production fitness variants were filtered out from the selection), relative to the percentage of the space occupied by the high production fitness variants. Uniform hit rate=Fit4Function hit rate×High production fitness ratio=7.1%×40.8%=2.9%.

### Individual Capsid Characterization

[0847] Individual capsids were cloned into iCAP-AAV9 (K449R) backbone (GenScript), and administered to C57BL/6J (The Jackson Laboratory, 000664) mice at a dose of 1×10¹⁰ vg/mouse (n=5/group). Three weeks later, three separate lobes of the liver were collected for RNA extraction and a single lobe per mouse was dropped fixed into 4% PFA.

[0848] For microscopy, fixed liver tissues were sectioned at 100 μm using a Leica VT1200 vibratome. Sections were mounted with ProLong™ Gold Antifade Mountant with DAPI (ThermoFisher, P36931). Liver images were collected using the optical sectioning module on a Keyence BZ-X800 with a Plan Apochromat 20× objective (Keyence, BZ-PA20). 3 images were taken for each animal (n=5/group) and compared to a no injection control (n=3 animals). In CellProfiler, nuclei were segmented and DAPI+ nuclei were identified using a threshold on DAPI intensity determined from the no injection control. Each DAPI+ nuclei was then quantified with the median pixel intensity in the GFP channel.

[0849] For assessment of liver transduction by quantitative RT-PCR, total RNA was recovered using TRIzol (Invitrogen, 15596026) following the manufacturer's instructions. Afterwards, total RNA was cleaned up using a RNeasy kit (Qiagen, 74106) followed by on-column DNA digestion. RNA was converted to cDNA using Maxima H Minus Reverse Transcriptase (ThermoFisher Scientific, EP0751) according to manufacturer instructions. Afterwards, qPCR was used to detect AAV encoded RNA transcripts with the following primer pair (5′-GCACAAGCTGGAGTACAACTA-3′ (SEQ ID NO: 199497)) and (5′-TGTITGTGGCGGATCTTGAA-3′ (SEQ ID NO: 199498)) and the following primer pair for GAPDH (5′-ACCACAGTCCATGCCATCAC-3′ (SEQ ID NO: 199499)) and (5′-TCCACCACCCTGTTGCTGTA-3′ (SEQ ID NO: 199500)).

[0850] THLE and HepG2 cells were seeded in a 96 well plate the day before adding the AAVs at 5000 vg/cell. For binding assays, viruses were diluted in media and incubated with cells at 4° C. with gentle shaking for one hour. After incubation, cells were washed three times with PBS to remove unbound virus and treated with proteinase K to release viral genomes for qPCR quantification. For transduction assays, cells were incubated with the AAVs for 24 hours at 37° C. and assayed with Britelite plus (Perkin Elmer, cat #6066766) following the manufacturer's protocol.

7 Individual Variants when Tested in Macaque

[0851] The rhesus macaque study (n=2) was conducted in the NIH Nonhuman Primate Testing Center for Evaluation of Somatic Cell Genome Editing Tools at the University of California, Davis. All procedures conformed to the requirements of the Animal Welfare Act, and protocols were approved prior to implementation by the UC Davis IACUC.

[0852] Approximately 3-month-old rhesus monkeys (˜1 kg; one male, one female) were screened then assigned to the project after confirming seronegative status for AAV9 antibodies. Sedation with Telazol (IM) was performed prior to IV administration of a purified virus library (1×1013 vg/kg) with blood samples collected (˜4 mL; hematology, clinical chemistry, serum, plasma; pre-administration then weekly post-administration). Animals were monitored closely during the study period and until endpoint (four weeks post-administration). They remained robust and healthy with no evidence of adverse findings (body weights, hematology and clinical chemistry panels were all in the normative range at all timepoints; data not shown). Four weeks after systemic delivery, tissues were collected and snap frozen over liquid nitrogen then placed on dry ice immediately prior to storage at ≤−80° C. RNA and DNA were extracted using TRIzol (Invitrogen, 15596026) following the manufacturer's instructions. Total RNA was cleaned up using a RNeasy kit (Qiagen, 74106) followed by on-column DNA digestion. RNA was converted to cDNA using Maxima H Minus Reverse Transcriptase (ThermoFisher Scientific, EP0751) according to the manufacturer's instructions. Samples were then processed as detailed in the NGS sample preparation section.

[0853] Relative transduction efficiencies were assessed by measuring the enrichment of the capsid RNA for each variant in the liver relative to the starting virus. It was found that the macaque liver transduction efficiency for the seven individually characterized liver MultiFunction variants are significantly higher than that of AAV9 (FIG. 11F; n=2 rhesus macaques). In the virus library, each variant was represented by two 7-mer replicates while AAV9 was represented by three replicates.

### OTHER EMBODIMENTS

[0854] From the foregoing description, it will be apparent that variations and modifications may be made to the invention described herein to adapt it to various usages and conditions. Such embodiments are also within the scope of the following claims.

[0855] The recitation of a listing of elements in any definition of a variable herein includes definitions of that variable as any single element or combination (or subcombination) of listed elements. The recitation of an embodiment herein includes that embodiment as any single embodiment or in combination with any other embodiments or portions thereof.

[0856] All patents and publications mentioned in this specification are herein incorporated by reference to the same extent as if each independent patent and publication was specifically and individually indicated to be incorporated by reference. The disclosures of the following U.S. Provisional patent applications are incorporated herein by reference in their entireties for all purposes: 63/342,001, filed May 13, 2022 and 63/343,010, filed May 17, 2022.

The application's sequence listing, which the Patent Office published only in electronic form, follows.

SEQUENCE LISTING (200027 sequences)

SEQ ID NO: 1 - protein, 7 aa, synthetic construct
VAVRQQG

SEQ ID NO: 2 - protein, 7 aa, synthetic construct
PNDKPGM

SEQ ID NO: 3 - protein, 7 aa, synthetic construct
KRDKPGD

SEQ ID NO: 4 - protein, 7 aa, synthetic construct
LKYGTGP

SEQ ID NO: 5 - protein, 7 aa, synthetic construct
KPNTSSN

SEQ ID NO: 6 - protein, 7 aa, synthetic construct
IMQKATI

SEQ ID NO: 7 - protein, 7 aa, synthetic construct
GQDRTKD

SEQ ID NO: 8 - protein, 7 aa, synthetic construct
ENRLPAM

SEQ ID NO: 9 - protein, 7 aa, synthetic construct
AAHNSYA

SEQ ID NO: 10 - protein, 7 aa, synthetic construct
DSNKPTI

SEQ ID NO: 11 - protein, 7 aa, synthetic construct
GVGLNRG

SEQ ID NO: 12 - protein, 7 aa, synthetic construct
DPPSRYT

SEQ ID NO: 13 - protein, 7 aa, synthetic construct
QVGYHAA

SEQ ID NO: 14 - protein, 7 aa, synthetic construct
QQNKIGN

SEQ ID NO: 15 - protein, 7 aa, synthetic construct
SRSISPG

SEQ ID NO: 16 - protein, 7 aa, synthetic construct
YAASSKT

SEQ ID NO: 17 - protein, 7 aa, synthetic construct
TVQGARS

SEQ ID NO: 18 - protein, 7 aa, synthetic construct
DGKSNGG

SEQ ID NO: 19 - protein, 7 aa, synthetic construct
PNKTTPH

SEQ ID NO: 20 - protein, 7 aa, synthetic construct
QKGWAAG

SEQ ID NO: 21 - protein, 7 aa, synthetic construct
LPQQKKD

SEQ ID NO: 22 - protein, 7 aa, synthetic construct
MDAKPTW

SEQ ID NO: 23 - protein, 7 aa, synthetic construct
VNRELNL

SEQ ID NO: 24 - protein, 7 aa, synthetic construct
TKTSGKE

SEQ ID NO: 25 - protein, 7 aa, synthetic construct
TDKRAQP

SEQ ID NO: 26 - protein, 7 aa, synthetic construct
VQGKFAG

SEQ ID NO: 27 - protein, 7 aa, synthetic construct
SWRGEVP

SEQ ID NO: 28 - protein, 7 aa, synthetic construct
ERGKSPD

SEQ ID NO: 29 - protein, 7 aa, synthetic construct
PPKPTYL

SEQ ID NO: 30 - protein, 7 aa, synthetic construct
RQPVGAP

SEQ ID NO: 31 - protein, 7 aa, synthetic construct
WREGTDG

SEQ ID NO: 32 - protein, 7 aa, synthetic construct
KQYPNSD

SEQ ID NO: 33 - protein, 7 aa, synthetic construct
DAHASKV

SEQ ID NO: 34 - protein, 7 aa, synthetic construct
YKPSGTQ

SEQ ID NO: 35 - protein, 7 aa, synthetic construct
RTQGSME

SEQ ID NO: 36 - protein, 7 aa, synthetic construct
YDRAHSN

SEQ ID NO: 37 - protein, 7 aa, synthetic construct
RGNAPLM

SEQ ID NO: 38 - protein, 7 aa, synthetic construct
QYGKNGV

SEQ ID NO: 39 - protein, 7 aa, synthetic construct
INDKPHI

SEQ ID NO: 40 - protein, 7 aa, synthetic construct
STAGAVR

SEQ ID NO: 41 - protein, 7 aa, synthetic construct
NRTSHNG

SEQ ID NO: 42 - protein, 7 aa, synthetic construct
KQSSAGT

SEQ ID NO: 43 - protein, 7 aa, synthetic construct
GKNTAGI

SEQ ID NO: 44 - protein, 7 aa, synthetic construct
ISQKAFG

SEQ ID NO: 45 - protein, 7 aa, synthetic construct
HKQMVMA

SEQ ID NO: 46 - protein, 7 aa, synthetic construct
KNQNLPA

SEQ ID NO: 47 - protein, 7 aa, synthetic construct
NGTKNTG

SEQ ID NO: 48 - protein, 7 aa, synthetic construct
TAHQSVA

SEQ ID NO: 49 - protein, 7 aa, synthetic construct
HRPQGDT

SEQ ID NO: 50 - protein, 7 aa, synthetic construct
QGKPPIA

SEQ ID NO: 51 - protein, 7 aa, synthetic construct
TPRTPGT

SEQ ID NO: 52 - protein, 7 aa, synthetic construct
MQQKPDI

SEQ ID NO: 53 - protein, 7 aa, synthetic construct
RPNLNFE

SEQ ID NO: 54 - protein, 7 aa, synthetic construct
KPPEKPG

SEQ ID NO: 55 - protein, 7 aa, synthetic construct
TQHVKTA

SEQ ID NO: 56 - protein, 7 aa, synthetic construct
KTNIALA

SEQ ID NO: 57 - protein, 7 aa, synthetic construct
NEKKAFA

SEQ ID NO: 58 - protein, 7 aa, synthetic construct
MPKRMVE

SEQ ID NO: 59 - protein, 7 aa, synthetic construct
MAPKSEP

SEQ ID NO: 60 - protein, 7 aa, synthetic construct
HRVGHPE

SEQ ID NO: 61 - protein, 7 aa, synthetic construct
EKMAGHF

SEQ ID NO: 62 - protein, 7 aa, synthetic construct
PAHSKPE

SEQ ID NO: 63 - protein, 7 aa, synthetic construct
DMPLRAS

SEQ ID NO: 64 - protein, 7 aa, synthetic construct
DNSGANR

SEQ ID NO: 65 - protein, 7 aa, synthetic construct
QRMQTQD

SEQ ID NO: 66 - protein, 7 aa, synthetic construct
GRNDYNH

SEQ ID NO: 67 - protein, 7 aa, synthetic construct
QQKVNGQ

SEQ ID NO: 68 - protein, 7 aa, synthetic construct
SKVVGAP

SEQ ID NO: 69 - protein, 7 aa, synthetic construct
SPMRVKD

SEQ ID NO: 70 - protein, 7 aa, synthetic construct
SRHDINI

SEQ ID NO: 71 - protein, 7 aa, synthetic construct
MNPRSGG

SEQ ID NO: 72 - protein, 7 aa, synthetic construct
DKSKPSI

SEQ ID NO: 73 - protein, 7 aa, synthetic construct
ARTGTGA

SEQ ID NO: 74 - protein, 7 aa, synthetic construct
MANGGLA

SEQ ID NO: 75 - protein, 7 aa, synthetic construct
RDNHAAV

SEQ ID NO: 76 - protein, 7 aa, synthetic construct
TTGYSNH

SEQ ID NO: 77 - protein, 7 aa, synthetic construct
DNRMKAP

SEQ ID NO: 78 - protein, 7 aa, synthetic construct
YTRTADN

SEQ ID NO: 79 - protein, 7 aa, synthetic construct
PRQGAVE

SEQ ID NO: 80 - protein, 7 aa, synthetic construct
NANKAGM

SEQ ID NO: 81 - protein, 7 aa, synthetic construct
WHHLEKD

SEQ ID NO: 82 - protein, 7 aa, synthetic construct
TTMANTK

SEQ ID NO: 83 - protein, 7 aa, synthetic construct
KLTASKE

SEQ ID NO: 84 - protein, 7 aa, synthetic construct
EQRHNGA

SEQ ID NO: 85 - protein, 7 aa, synthetic construct
QPKSIPL

SEQ ID NO: 86 - protein, 7 aa, synthetic construct
AQDKTAF

SEQ ID NO: 87 - protein, 7 aa, synthetic construct
TNRPSQS

SEQ ID NO: 88 - protein, 7 aa, synthetic construct
GGRMLDS

SEQ ID NO: 89 - protein, 7 aa, synthetic construct
TVHTGPS

SEQ ID NO: 90 - protein, 7 aa, synthetic construct
QYNKTVG

SEQ ID NO: 91 - protein, 7 aa, synthetic construct
AVQPHMA

SEQ ID NO: 92 - protein, 7 aa, synthetic construct
TPKSPLH

SEQ ID NO: 93 - protein, 7 aa, synthetic construct
VKSPQVT

SEQ ID NO: 94 - protein, 7 aa, synthetic construct
EFKNVPG

SEQ ID NO: 95 - protein, 7 aa, synthetic construct
SKVGTTL

SEQ ID NO: 96 - protein, 7 aa, synthetic construct
SVRSETN

SEQ ID NO: 97 - protein, 7 aa, synthetic construct
NMKQQTG

SEQ ID NO: 98 - protein, 7 aa, synthetic construct
SSKVQTP

SEQ ID NO: 99 - protein, 7 aa, synthetic construct
ERTSRTD

SEQ ID NO: 100 - protein, 7 aa, synthetic construct
RTPRHED

SEQ ID NO: 101 - protein, 7 aa, synthetic construct
QWNRPEM

SEQ ID NO: 102 - protein, 7 aa, synthetic construct
ASENHAP

SEQ ID NO: 103 - protein, 7 aa, synthetic construct
VGQHGSI

SEQ ID NO: 104 - protein, 7 aa, synthetic construct
PTAGRVS

SEQ ID NO: 105 - protein, 7 aa, synthetic construct
MFETTVY

SEQ ID NO: 106 - protein, 7 aa, synthetic construct
KNTKEPG

SEQ ID NO: 107 - protein, 7 aa, synthetic construct
GTKAQVY

SEQ ID NO: 108 - protein, 7 aa, synthetic construct
TQGGYNP

SEQ ID NO: 109 - protein, 7 aa, synthetic construct
TSAHSQS

SEQ ID NO: 110 - protein, 7 aa, synthetic construct
RVSDARS

SEQ ID NO: 111 - protein, 7 aa, synthetic construct
QKANQSN

SEQ ID NO: 112 - protein, 7 aa, synthetic construct
HHQTHHP

SEQ ID NO: 113 - protein, 7 aa, synthetic construct
QQPKQAF

SEQ ID NO: 114 - protein, 7 aa, synthetic construct
SSKGSVG

SEQ ID NO: 115 - protein, 7 aa, synthetic construct
TQRSTQS

SEQ ID NO: 116 - protein, 7 aa, synthetic construct
QSGNRAP

SEQ ID NO: 117 - protein, 7 aa, synthetic construct
RINPANM

SEQ ID NO: 118 - protein, 7 aa, synthetic construct
GKVGPVQ

SEQ ID NO: 119 - protein, 7 aa, synthetic construct
ETVVRAP

SEQ ID NO: 120 - protein, 7 aa, synthetic construct
NNRVSQG

SEQ ID NO: 121 - protein, 7 aa, synthetic construct
VSRATAG

SEQ ID NO: 122 - protein, 7 aa, synthetic construct
SKISPYG

SEQ ID NO: 123 - protein, 7 aa, synthetic construct
NVAQRSG

SEQ ID NO: 124 - protein, 7 aa, synthetic construct
QVKGSLG

SEQ ID NO: 125 - protein, 7 aa, synthetic construct
HQKGMQV

SEQ ID NO: 126 - protein, 7 aa, synthetic construct
RNEKAGS

SEQ ID NO: 127 - protein, 7 aa, synthetic construct
REKGVNQ

SEQ ID NO: 128 - protein, 7 aa, synthetic construct
EMSKREP

SEQ ID NO: 129 - protein, 7 aa, synthetic construct
SKAPPMI

SEQ ID NO: 130 - protein, 7 aa, synthetic construct
QKYGPAA

SEQ ID NO: 131 - protein, 7 aa, synthetic construct
WQPPNEG

SEQ ID NO: 132 - protein, 7 aa, synthetic construct
FNNSTKM

SEQ ID NO: 133 - protein, 7 aa, synthetic construct
LAKTVGA

SEQ ID NO: 134 - protein, 7 aa, synthetic construct
TINKSGY

SEQ ID NO: 135 - protein, 7 aa, synthetic construct
VKNIIGG

SEQ ID NO: 136 - protein, 7 aa, synthetic construct
KQAQNNT

SEQ ID NO: 137 - protein, 7 aa, synthetic construct
IHPKATT

SEQ ID NO: 138 - protein, 7 aa, synthetic construct
DKHMGQG

SEQ ID NO: 139 - protein, 7 aa, synthetic construct
QKGSIMH

SEQ ID NO: 140 - protein, 7 aa, synthetic construct
YISQRGG

SEQ ID NO: 141 - protein, 7 aa, synthetic construct
YMQRTTE

SEQ ID NO: 142 - protein, 7 aa, synthetic construct
TRIKTGE

SEQ ID NO: 143 - protein, 7 aa, synthetic construct
QDEHMEF

SEQ ID NO: 144 - protein, 7 aa, synthetic construct
KANPGND

SEQ ID NO: 145 - protein, 7 aa, synthetic construct
KAKLDAG

SEQ ID NO: 146 - protein, 7 aa, synthetic construct
MGGAGAL

SEQ ID NO: 147 - protein, 7 aa, synthetic construct
DKLSPHS

SEQ ID NO: 148 - protein, 7 aa, synthetic construct
KNESAKN

SEQ ID NO: 149 - protein, 7 aa, synthetic construct
TGQFANA

SEQ ID NO: 150 - protein, 7 aa, synthetic construct
TTDVFLG

SEQ ID NO: 151 - protein, 7 aa, synthetic construct
YDKTQNA

SEQ ID NO: 152 - protein, 7 aa, synthetic construct
PEDTTHG

SEQ ID NO: 153 - protein, 7 aa, synthetic construct
LKNGHDL

SEQ ID NO: 154 - protein, 7 aa, synthetic construct
NGLGNTL

SEQ ID NO: 155 - protein, 7 aa, synthetic construct
YHKSEAV

SEQ ID NO: 156 - protein, 7 aa, synthetic construct
VSGFVHA

SEQ ID NO: 157 - protein, 7 aa, synthetic construct
SNQLSAG

SEQ ID NO: 158 - protein, 7 aa, synthetic construct
PTKMQNL

SEQ ID NO: 159 - protein, 7 aa, synthetic construct
YTGGGGE

SEQ ID NO: 160 - protein, 7 aa, synthetic construct
SQLSVAG

SEQ ID NO: 161 - protein, 7 aa, synthetic construct
RGDMMAL

SEQ ID NO: 162 - protein, 7 aa, synthetic construct
REVRVNN

SEQ ID NO: 163 - protein, 7 aa, synthetic construct
PPKGTGF

SEQ ID NO: 164 - protein, 7 aa, synthetic construct
TNTAKPP

SEQ ID NO: 165 - protein, 7 aa, synthetic construct
YRGTGGM

SEQ ID NO: 166 - protein, 7 aa, synthetic construct
SKKTEAQ

SEQ ID NO: 167 - protein, 7 aa, synthetic construct
GPPKPMQ

SEQ ID NO: 168 - protein, 7 aa, synthetic construct
AGVKEKT

SEQ ID NO: 169 - protein, 7 aa, synthetic construct
NTNNQKA

SEQ ID NO: 170 - protein, 7 aa, synthetic construct
QAAKDPG

SEQ ID NO: 171 - protein, 7 aa, synthetic construct
SQNHRIE

SEQ ID NO: 172 - protein, 7 aa, synthetic construct
PAYGGHP

SEQ ID NO: 173 - protein, 7 aa, synthetic construct
CHRDDFC

SEQ ID NO: 174 - protein, 7 aa, synthetic construct
MTGKAAP

SEQ ID NO: 175 - protein, 7 aa, synthetic construct
KLGVTNE

SEQ ID NO: 176 - protein, 7 aa, synthetic construct
DRQKVPL

SEQ ID NO: 177 - protein, 7 aa, synthetic construct
ISRSINE

SEQ ID NO: 178 - protein, 7 aa, synthetic construct
QRSQMEM

SEQ ID NO: 179 - protein, 7 aa, synthetic construct
IGKVVTS

SEQ ID NO: 180 - protein, 7 aa, synthetic construct
DRSKVTS

SEQ ID NO: 181 - protein, 7 aa, synthetic construct
ISRNFGE

SEQ ID NO: 182 - protein, 7 aa, synthetic construct
GQPLNSG

SEQ ID NO: 183 - protein, 7 aa, synthetic construct
AKNVGIN

SEQ ID NO: 184 - protein, 7 aa, synthetic construct
HRSVLKE

SEQ ID NO: 185 - protein, 7 aa, synthetic construct
APAVREG

SEQ ID NO: 186 - protein, 7 aa, synthetic construct
NRATGLN

SEQ ID NO: 187 - protein, 7 aa, synthetic construct
DRVTSTA

SEQ ID NO: 188 - protein, 7 aa, synthetic construct
NKQLGGQ

SEQ ID NO: 189 - protein, 7 aa, synthetic construct
RSDHTPG

SEQ ID NO: 190 - protein, 7 aa, synthetic construct
SSRDNKQ

SEQ ID NO: 191 - protein, 7 aa, synthetic construct
MIHGGPA

SEQ ID NO: 192 - protein, 7 aa, synthetic construct
QSGLGPN

SEQ ID NO: 193 - protein, 7 aa, synthetic construct
TQRVSTN

SEQ ID NO: 194 - protein, 7 aa, synthetic construct
SNGRGPA

SEQ ID NO: 195 - protein, 7 aa, synthetic construct
RVGGTNN

SEQ ID NO: 196 - protein, 7 aa, synthetic construct
IGSPHSA

SEQ ID NO: 197 - protein, 7 aa, synthetic construct
TNKPLTA

SEQ ID NO: 198 - protein, 7 aa, synthetic construct
HKTMQQP

SEQ ID NO: 199 - protein, 7 aa, synthetic construct
LIPMKSS

SEQ ID NO: 200 - protein, 7 aa, synthetic construct
GTNLSPP

SEQ ID NO: 201 - protein, 7 aa, synthetic construct
TNGNAGR

SEQ ID NO: 202 - protein, 7 aa, synthetic construct
NRGTNEA

SEQ ID NO: 203 - protein, 7 aa, synthetic construct
QMKQTPS

SEQ ID NO: 204 - protein, 7 aa, synthetic construct
MQNHRQD

SEQ ID NO: 205 - protein, 7 aa, synthetic construct
FVGAKPA

SEQ ID NO: 206 - protein, 7 aa, synthetic construct
HAQKSNP

SEQ ID NO: 207 - protein, 7 aa, synthetic construct
SPRTIAP

SEQ ID NO: 208 - protein, 7 aa, synthetic construct
GHPGYGS

SEQ ID NO: 209 - protein, 7 aa, synthetic construct
AHRGDNP

SEQ ID NO: 210 - protein, 7 aa, synthetic construct
KSNPIQG

SEQ ID NO: 211 - protein, 7 aa, synthetic construct
THQKAMG

SEQ ID NO: 212 - protein, 7 aa, synthetic construct
LWNDNSG

SEQ ID NO: 213 - protein, 7 aa, synthetic construct
YHERPVG

SEQ ID NO: 214 - protein, 7 aa, synthetic construct
GLYNQKQ

SEQ ID NO: 215 - protein, 7 aa, synthetic construct
FDKAHSP

SEQ ID NO: 216 - protein, 7 aa, synthetic construct
FTKTPYV

SEQ ID NO: 217 - protein, 7 aa, synthetic construct
VDRTSIS

SEQ ID NO: 218 - protein, 7 aa, synthetic construct
VHKELFL

SEQ ID NO: 219 - protein, 7 aa, synthetic construct
NIMARSG

SEQ ID NO: 220 - protein, 7 aa, synthetic construct
WSKKQED

SEQ ID NO: 221 - protein, 7 aa, synthetic construct
AANHAQE

SEQ ID NO: 222 - protein, 7 aa, synthetic construct
SMNKTTA

SEQ ID NO: 223 - protein, 7 aa, synthetic construct
TRLVTAG

SEQ ID NO: 224 - protein, 7 aa, synthetic construct
QSAPANP

SEQ ID NO: 225 - protein, 7 aa, synthetic construct
DDDLRRV

SEQ ID NO: 226 - protein, 7 aa, synthetic construct
QHPGVRE

SEQ ID NO: 227 - protein, 7 aa, synthetic construct
DEQRHNI

SEQ ID NO: 228 - protein, 7 aa, synthetic construct
QRERTMA

SEQ ID NO: 229 - protein, 7 aa, synthetic construct
PGSHTNG

SEQ ID NO: 230 - protein, 7 aa, synthetic construct
TNRIQTV

SEQ ID NO: 231 - protein, 7 aa, synthetic construct
VGRAPNE

SEQ ID NO: 232 - protein, 7 aa, synthetic construct
YGREQHV

SEQ ID NO: 233 - protein, 7 aa, synthetic construct
TMTKEPP

SEQ ID NO: 234 - protein, 7 aa, synthetic construct
ERANKQP

SEQ ID NO: 235 - protein, 7 aa, synthetic construct
TEMKGAR

SEQ ID NO: 236 - protein, 7 aa, synthetic construct
MKGNGEK

SEQ ID NO: 237 - protein, 7 aa, synthetic construct
HGSRTDY

SEQ ID NO: 238 - protein, 7 aa, synthetic construct
SGAFGNP

SEQ ID NO: 239 - protein, 7 aa, synthetic construct
RMSPQDF

SEQ ID NO: 240 - protein, 7 aa, synthetic construct
HGMKTGG

SEQ ID NO: 241 - protein, 7 aa, synthetic construct
QKAHVEM

SEQ ID NO: 242 - protein, 7 aa, synthetic construct
GKTQVQT

SEQ ID NO: 243 - protein, 7 aa, synthetic construct
KSNHPEQ

SEQ ID NO: 244 - protein, 7 aa, synthetic construct
RGGNTQT

SEQ ID NO: 245 - protein, 7 aa, synthetic construct
YGPTGPH

SEQ ID NO: 246 - protein, 7 aa, synthetic construct
QNSNRQG

SEQ ID NO: 247 - protein, 7 aa, synthetic construct
GKGPSSS

SEQ ID NO: 248 - protein, 7 aa, synthetic construct
YAKPSDY

SEQ ID NO: 249 - protein, 7 aa, synthetic construct
VPARAVG

SEQ ID NO: 250 - protein, 7 aa, synthetic construct
NARPMKD

SEQ ID NO: 251 - protein, 7 aa, synthetic construct
HVKGNGH

SEQ ID NO: 252 - protein, 7 aa, synthetic construct
VNKQNMM

SEQ ID NO: 253 - protein, 7 aa, synthetic construct
QERGQVM

SEQ ID NO: 254 - protein, 7 aa, synthetic construct
TYKAMET

SEQ ID NO: 255 - protein, 7 aa, synthetic construct
SHKDPKV

SEQ ID NO: 256 - protein, 7 aa, synthetic construct
GFQTGVS

SEQ ID NO: 257 - protein, 7 aa, synthetic construct
DKHNNVI

SEQ ID NO: 258 - protein, 7 aa, synthetic construct
LVAAHPI

SEQ ID NO: 259 - protein, 7 aa, synthetic construct
NKKWEEE

SEQ ID NO: 260 - protein, 7 aa, synthetic construct
RGNHTLA

SEQ ID NO: 261 - protein, 7 aa, synthetic construct
SHGVSGA

SEQ ID NO: 262 - protein, 7 aa, synthetic construct
ARPPPGQ

SEQ ID NO: 263 - protein, 7 aa, synthetic construct
SKYDSAM

SEQ ID NO: 264 - protein, 7 aa, synthetic construct
VGMYAKD

SEQ ID NO: 265 - protein, 7 aa, synthetic construct
PMAKAYI

SEQ ID NO: 266 - protein, 7 aa, synthetic construct
VDYNAHG

SEQ ID NO: 267 - protein, 7 aa, synthetic construct
TNHTRIS

SEQ ID NO: 268 - protein, 7 aa, synthetic construct
MEAKKAS

SEQ ID NO: 269 - protein, 7 aa, synthetic construct
ITGGGAH

SEQ ID NO: 270 - protein, 7 aa, synthetic construct
HQIRHPG

SEQ ID NO: 271 - protein, 7 aa, synthetic construct
RNASREG

SEQ ID NO: 272 - protein, 7 aa, synthetic construct
NRPGNVE

SEQ ID NO: 273 - protein, 7 aa, synthetic construct
YRESKIN

SEQ ID NO: 274 - protein, 7 aa, synthetic construct
KNTVSYT

SEQ ID NO: 275 - protein, 7 aa, synthetic construct
PGAKWAE

SEQ ID NO: 276 - protein, 7 aa, synthetic construct
DAHGQQH

SEQ ID NO: 277 - protein, 7 aa, synthetic construct
AYKETPG

SEQ ID NO: 278 - protein, 7 aa, synthetic construct
MGHIKNG

SEQ ID NO: 279 - protein, 7 aa, synthetic construct
SSMAVNS

SEQ ID NO: 280 - protein, 7 aa, synthetic construct
KKVTDQT

SEQ ID NO: 281 - protein, 7 aa, synthetic construct
QNNQRVQ

SEQ ID NO: 282 - protein, 7 aa, synthetic construct
MKNYDSG

SEQ ID NO: 283 - protein, 7 aa, synthetic construct
HHYGGSS

SEQ ID NO: 284 - protein, 7 aa, synthetic construct
PKDVKAW

SEQ ID NO: 285 - protein, 7 aa, synthetic construct
YTMQNKV

SEQ ID NO: 286 - protein, 7 aa, synthetic construct
ASPHKMG

SEQ ID NO: 287 - protein, 7 aa, synthetic construct
AWRNAEG

SEQ ID NO: 288 - protein, 7 aa, synthetic construct
KQKPEVF

SEQ ID NO: 289 - protein, 7 aa, synthetic construct
VNHTRSF

SEQ ID NO: 290 - protein, 7 aa, synthetic construct
ISSYKKE

SEQ ID NO: 291 - protein, 7 aa, synthetic construct
VNSNGPP

SEQ ID NO: 292 - protein, 7 aa, synthetic construct
LYKNMDG

SEQ ID NO: 293 - protein, 7 aa, synthetic construct
AARGPPA

SEQ ID NO: 294 - protein, 7 aa, synthetic construct
KNAGMTQ

SEQ ID NO: 295 - protein, 7 aa, synthetic construct
PRSGQQT

SEQ ID NO: 296 - protein, 7 aa, synthetic construct
GSKGTGN

SEQ ID NO: 297 - protein, 7 aa, synthetic construct
VAKAVIQ

SEQ ID NO: 298 - protein, 7 aa, synthetic construct
QHHTPAS

SEQ ID NO: 299 - protein, 7 aa, synthetic construct
FGRMTNQ

SEQ ID NO: 300 - protein, 7 aa, synthetic construct
NSRGQVV

SEQ ID NO: 301 - protein, 7 aa, synthetic construct
NRQPVVS

SEQ ID NO: 302 - protein, 7 aa, synthetic construct
RDPKSVQ

SEQ ID NO: 303 - protein, 7 aa, synthetic construct
TQNITKQ

SEQ ID NO: 304 - protein, 7 aa, synthetic construct
TMAPKSP

SEQ ID NO: 305 - protein, 7 aa, synthetic construct
RQPQALS

SEQ ID NO: 306 - protein, 7 aa, synthetic construct
GQQKSLH

SEQ ID NO: 307 - protein, 7 aa, synthetic construct
DSKNKPG

SEQ ID NO: 308 - protein, 7 aa, synthetic construct
SKGLVAN

SEQ ID NO: 309 - protein, 7 aa, synthetic construct
KKSEFEV

SEQ ID NO: 310 - protein, 7 aa, synthetic construct
GTHGTPM

SEQ ID NO: 311 - protein, 7 aa, synthetic construct
QAKDMRS

SEQ ID NO: 312 - protein, 7 aa, synthetic construct
RDSKNDG

SEQ ID NO: 313 - protein, 7 aa, synthetic construct
YRGHDER

SEQ ID NO: 314 - protein, 7 aa, synthetic construct
RSSSSFE

SEQ ID NO: 315 - protein, 7 aa, synthetic construct
HNTKSGA

SEQ ID NO: 316 - protein, 7 aa, synthetic construct
PSGRSMP

SEQ ID NO: 317 - protein, 7 aa, synthetic construct
YKTPSTQ

SEQ ID NO: 318 - protein, 7 aa, synthetic construct
RTQNPAG

SEQ ID NO: 319 - protein, 7 aa, synthetic construct
LNNKSQA

SEQ ID NO: 320 - protein, 7 aa, synthetic construct
MKHYITE

SEQ ID NO: 321 - protein, 7 aa, synthetic construct
NSYNIPS

SEQ ID NO: 322 - protein, 7 aa, synthetic construct
LGSQPER

SEQ ID NO: 323 - protein, 7 aa, synthetic construct
NGFGQGN

SEQ ID NO: 324 - protein, 7 aa, synthetic construct
NQVKEHQ

SEQ ID NO: 325 - protein, 7 aa, synthetic construct
SNGAKYS

SEQ ID NO: 326 - protein, 7 aa, synthetic construct
LSNRGPG

SEQ ID NO: 327 - protein, 7 aa, synthetic construct
DGRRGDM

SEQ ID NO: 328 - protein, 7 aa, synthetic construct
SQFNAAG

SEQ ID NO: 329 - protein, 7 aa, synthetic construct
AINHSPK

SEQ ID NO: 330 - protein, 7 aa, synthetic construct
LNGRSGL

SEQ ID NO: 331 - protein, 7 aa, synthetic construct
FMSRDPE

SEQ ID NO: 332 - protein, 7 aa, synthetic construct
FVKGQTV

SEQ ID NO: 333 - protein, 7 aa, synthetic construct
TKVATHG

SEQ ID NO: 334 - protein, 7 aa, synthetic construct
TNKWGGD

SEQ ID NO: 335 - protein, 7 aa, synthetic construct
QMTHKNN

SEQ ID NO: 336 - protein, 7 aa, synthetic construct
TQYQKGE

SEQ ID NO: 337 - protein, 7 aa, synthetic construct
IAMYKSE

SEQ ID NO: 338 - protein, 7 aa, synthetic construct
HVMGQHG

SEQ ID NO: 339 - protein, 7 aa, synthetic construct
GKPALSN

SEQ ID NO: 340 - protein, 7 aa, synthetic construct
NPANSKD

SEQ ID NO: 341 - protein, 7 aa, synthetic construct
THHNNTP

SEQ ID NO: 342 - protein, 7 aa, synthetic construct
QDKTASL

SEQ ID NO: 343 - protein, 7 aa, synthetic construct
KYTASGT

SEQ ID NO: 344 - protein, 7 aa, synthetic construct
SRQDKTP

SEQ ID NO: 345 - protein, 7 aa, synthetic construct
FPDKVRG

SEQ ID NO: 346 - protein, 7 aa, synthetic construct
GNHPTQE

SEQ ID NO: 347 - protein, 7 aa, synthetic construct
WKEMKIN

SEQ ID NO: 348 - protein, 7 aa, synthetic construct
YTGVSTP

SEQ ID NO: 349 - protein, 7 aa, synthetic construct
YGMIQNE

SEQ ID NO: 350 - protein, 7 aa, synthetic construct
NAPLAHA

SEQ ID NO: 351 - protein, 7 aa, synthetic construct
KTVGAMG

SEQ ID NO: 352 - protein, 7 aa, synthetic construct
SKGIQSV

SEQ ID NO: 353 - protein, 7 aa, synthetic construct
REAREPQ

SEQ ID NO: 354 - protein, 7 aa, synthetic construct
FGGARMD

SEQ ID NO: 355 - protein, 7 aa, synthetic construct
RPRMSEG

SEQ ID NO: 356 - protein, 7 aa, synthetic construct
KKLDADH

SEQ ID NO: 357 - protein, 7 aa, synthetic construct
GSPELRA

SEQ ID NO: 358 - protein, 7 aa, synthetic construct
ARMDMER

SEQ ID NO: 359 - protein, 7 aa, synthetic construct
GVKSAPL

SEQ ID NO: 360 - protein, 7 aa, synthetic construct
TSGSHFA

SEQ ID NO: 361 - protein, 7 aa, synthetic construct
YGTNKYA

SEQ ID NO: 362 - protein, 7 aa, synthetic construct
MGHDHTR

SEQ ID NO: 363 - protein, 7 aa, synthetic construct
SANSAVH

SEQ ID NO: 364 - protein, 7 aa, synthetic construct
VFRGNTD

SEQ ID NO: 365 - protein, 7 aa, synthetic construct
HTSRGAV

SEQ ID NO: 366 - protein, 7 aa, synthetic construct
NRQQGVQ

SEQ ID NO: 367 - protein, 7 aa, synthetic construct
LSKPTVM

SEQ ID NO: 368 - protein, 7 aa, synthetic construct
EGRGMAF

SEQ ID NO: 369 - protein, 7 aa, synthetic construct
QARTVEI

SEQ ID NO: 370 - protein, 7 aa, synthetic construct
GDWNRKE

SEQ ID NO: 371 - protein, 7 aa, synthetic construct
GVTRYVG

SEQ ID NO: 372 - protein, 7 aa, synthetic construct
VDSRSGM

SEQ ID NO: 373 - protein, 7 aa, synthetic construct
PIADHNI

SEQ ID NO: 374 - protein, 7 aa, synthetic construct
SAGARAG

SEQ ID NO: 375 - protein, 7 aa, synthetic construct
RDHGAPM

SEQ ID NO: 376 - protein, 7 aa, synthetic construct
QQKGIQS

SEQ ID NO: 377 - protein, 7 aa, synthetic construct
IPKQYAQ

SEQ ID NO: 378 - protein, 7 aa, synthetic construct
MTRQSLD

SEQ ID NO: 379 - protein, 7 aa, synthetic construct
QPGGKIN

SEQ ID NO: 380 - protein, 7 aa, synthetic construct
AGPRTES

SEQ ID NO: 381 - protein, 7 aa, synthetic construct
TQTNTNH

SEQ ID NO: 382 - protein, 7 aa, synthetic construct
RGLNTTP

SEQ ID NO: 383 - protein, 7 aa, synthetic construct
TQHAKQQ

SEQ ID NO: 384 - protein, 7 aa, synthetic construct
SYRSEDR

SEQ ID NO: 385 - protein, 7 aa, synthetic construct
RTASGTP

SEQ ID NO: 386 - protein, 7 aa, synthetic construct
VNSAVKP

SEQ ID NO: 387 - protein, 7 aa, synthetic construct
TPMGNAA

SEQ ID NO: 388 - protein, 7 aa, synthetic construct
VQPRFDG

SEQ ID NO: 389 - protein, 7 aa, synthetic construct
TREPSPK

SEQ ID NO: 390 - protein, 7 aa, synthetic construct
ERPIKSE

SEQ ID NO: 391 - protein, 7 aa, synthetic construct
AGSISMP

SEQ ID NO: 392 - protein, 7 aa, synthetic construct
RQAISQV

SEQ ID NO: 393 - protein, 7 aa, synthetic construct
GSGKPHI

SEQ ID NO: 394 - protein, 7 aa, synthetic construct
EIKKTNA

SEQ ID NO: 395 - protein, 7 aa, synthetic construct
FRNNGAP

SEQ ID NO: 396 - protein, 7 aa, synthetic construct
WMKMASD

SEQ ID NO: 397 - protein, 7 aa, synthetic construct
ENAVRAR

SEQ ID NO: 398 - protein, 7 aa, synthetic construct
RKQTHDD

SEQ ID NO: 399 - protein, 7 aa, synthetic construct
NNDTKNG

SEQ ID NO: 400 - protein, 7 aa, synthetic construct
FHKSGKD

SEQ ID NO: 401 - protein, 7 aa, synthetic construct
GRQAMEV

SEQ ID NO: 402 - protein, 7 aa, synthetic construct
YMDFVDR

SEQ ID NO: 403 - protein, 7 aa, synthetic construct
IQRESSY

SEQ ID NO: 404 - protein, 7 aa, synthetic construct
LPRAQPE

SEQ ID NO: 405 - protein, 7 aa, synthetic construct
PEYAKYA

SEQ ID NO: 406 - protein, 7 aa, synthetic construct
NPPKQYA

SEQ ID NO: 407 - protein, 7 aa, synthetic construct
GGINRGP

SEQ ID NO: 408 - protein, 7 aa, synthetic construct
QIAGHMA

SEQ ID NO: 409 - protein, 7 aa, synthetic construct
QGEKKMM

SEQ ID NO: 410 - protein, 7 aa, synthetic construct
YANQMKT

SEQ ID NO: 411 - protein, 7 aa, synthetic construct
GPQPQRS

SEQ ID NO: 412 - protein, 7 aa, synthetic construct
LRRIPEE

SEQ ID NO: 413 - protein, 7 aa, synthetic construct
FKNDWAQ

SEQ ID NO: 414 - protein, 7 aa, synthetic construct
ANQRLTD

SEQ ID NO: 415 - protein, 7 aa, synthetic construct
RDSQVPQ

SEQ ID NO: 416 - protein, 7 aa, synthetic construct
KISNMDV

SEQ ID NO: 417 - protein, 7 aa, synthetic construct
VGTHRVE

SEQ ID NO: 418 - protein, 7 aa, synthetic construct
MPGRMDT

SEQ ID NO: 419 - protein, 7 aa, synthetic construct
NGKAAPA

SEQ ID NO: 420 - protein, 7 aa, synthetic construct
NNTNTKQ

SEQ ID NO: 421 - protein, 7 aa, synthetic construct
QAQDRQG

SEQ ID NO: 422 - protein, 7 aa, synthetic construct
KNNASGT

SEQ ID NO: 423 - protein, 7 aa, synthetic construct
GASFKEE

SEQ ID NO: 424 - protein, 7 aa, synthetic construct
TAENRSA

SEQ ID NO: 425 - protein, 7 aa, synthetic construct
MAKGWGD

SEQ ID NO: 426 - protein, 7 aa, synthetic construct
GKPQQGG

SEQ ID NO: 427 - protein, 7 aa, synthetic construct
GKLHSDN

SEQ ID NO: 428 - protein, 7 aa, synthetic construct
VDGIKKQ

SEQ ID NO: 429 - protein, 7 aa, synthetic construct
VDPRQMA

SEQ ID NO: 430 - protein, 7 aa, synthetic construct
PQGMTHV

SEQ ID NO: 431 - protein, 7 aa, synthetic construct
SDRQQHA

SEQ ID NO: 432 - protein, 7 aa, synthetic construct
LPKQQNG

SEQ ID NO: 433 - protein, 7 aa, synthetic construct
WKPPMRD

SEQ ID NO: 434 - protein, 7 aa, synthetic construct
VINTYRE

SEQ ID NO: 435 - protein, 7 aa, synthetic construct
DRHAKDY

SEQ ID NO: 436 - protein, 7 aa, synthetic construct
SGSHGSA

SEQ ID NO: 437 - protein, 7 aa, synthetic construct
RGYEKQG

SEQ ID NO: 438 - protein, 7 aa, synthetic construct
FQQHMSG

SEQ ID NO: 439 - protein, 7 aa, synthetic construct
YKGKAVE

SEQ ID NO: 440 - protein, 7 aa, synthetic construct
SRTANVG

SEQ ID NO: 441 - protein, 7 aa, synthetic construct
TTPRGSN

SEQ ID NO: 442 - protein, 7 aa, synthetic construct
QNTVSNH

SEQ ID NO: 443 - protein, 7 aa, synthetic construct
QEGKPWQ

SEQ ID NO: 444 - protein, 7 aa, synthetic construct
DGHKNTT

SEQ ID NO: 445 - protein, 7 aa, synthetic construct
NGAQKVP

SEQ ID NO: 446 - protein, 7 aa, synthetic construct
WRSSATE

SEQ ID NO: 447 - protein, 7 aa, synthetic construct
MRSESQK

SEQ ID NO: 448 - protein, 7 aa, synthetic construct
NPMRSNV

SEQ ID NO: 449 - protein, 7 aa, synthetic construct
GSFGTHA

SEQ ID NO: 450 - protein, 7 aa, synthetic construct
MQSKGVP

SEQ ID NO: 451 - protein, 7 aa, synthetic construct
ISGYQMA

SEQ ID NO: 452 - protein, 7 aa, synthetic construct
NGNIVMV

SEQ ID NO: 453 - protein, 7 aa, synthetic construct
QKSFTQE

SEQ ID NO: 454 - protein, 7 aa, synthetic construct
DRHGMQT

SEQ ID NO: 455 - protein, 7 aa, synthetic construct
KTNQDAG

SEQ ID NO: 456 - protein, 7 aa, synthetic construct
TTNRNAM

SEQ ID NO: 457 - protein, 7 aa, synthetic construct
LREGLKG

SEQ ID NO: 458 - protein, 7 aa, synthetic construct
TTSQKQM

SEQ ID NO: 459 - protein, 7 aa, synthetic construct
YDKSKTG

SEQ ID NO: 460 - protein, 7 aa, synthetic construct
NRMNVNA

SEQ ID NO: 461 - protein, 7 aa, synthetic construct
GGNTQQT

SEQ ID NO: 462 - protein, 7 aa, synthetic construct
YGKPTTP

SEQ ID NO: 463 - protein, 7 aa, synthetic construct
QHTHTER

SEQ ID NO: 464 - protein, 7 aa, synthetic construct
PPNKQMG

SEQ ID NO: 465 - protein, 7 aa, synthetic construct
NRPLVGE

SEQ ID NO: 466 - protein, 7 aa, synthetic construct
PSKSPPQ

SEQ ID NO: 467 - protein, 7 aa, synthetic construct
RGENPQG

SEQ ID NO: 468 - protein, 7 aa, synthetic construct
MYKETAA

SEQ ID NO: 469 - protein, 7 aa, synthetic construct
RPADWRD

SEQ ID NO: 470 - protein, 7 aa, synthetic construct
SPKKATT

SEQ ID NO: 471 - protein, 7 aa, synthetic construct
KYAGPAT

SEQ ID NO: 472 - protein, 7 aa, synthetic construct
RVNGESG

SEQ ID NO: 473 - protein, 7 aa, synthetic construct
VATGHKW

SEQ ID NO: 474 - protein, 7 aa, synthetic construct
ALNGVRD

SEQ ID NO: 475 - protein, 7 aa, synthetic construct
TTISSHG

SEQ ID NO: 476 - protein, 7 aa, synthetic construct
VNQQRVL

SEQ ID NO: 477 - protein, 7 aa, synthetic construct
ERGKQVE

SEQ ID NO: 478 - protein, 7 aa, synthetic construct
GIGREKV

SEQ ID NO: 479 - protein, 7 aa, synthetic construct
TRKDGMN

SEQ ID NO: 480 - protein, 7 aa, synthetic construct
SPNWPAA

SEQ ID NO: 481 - protein, 7 aa, synthetic construct
IYPSSAT

SEQ ID NO: 482 - protein, 7 aa, synthetic construct
FKGGTQA

SEQ ID NO: 483 - protein, 7 aa, synthetic construct
HNHVSNG

SEQ ID NO: 484 - protein, 7 aa, synthetic construct
NGVQSTS

SEQ ID NO: 485 - protein, 7 aa, synthetic construct
NKNQSGF

SEQ ID NO: 486 - protein, 7 aa, synthetic construct
SHQMKVS

SEQ ID NO: 487 - protein, 7 aa, synthetic construct
THSDSVK

SEQ ID NO: 488 - protein, 7 aa, synthetic construct
YKSPMSE

SEQ ID NO: 489 - protein, 7 aa, synthetic construct
SHERVAG

SEQ ID NO: 490 - protein, 7 aa, synthetic construct
TERPYAP

SEQ ID NO: 491 - protein, 7 aa, synthetic construct
RGQVFTG

SEQ ID NO: 492 - protein, 7 aa, synthetic construct
GIYKVQT

SEQ ID NO: 493 - protein, 7 aa, synthetic construct
DKYGKQE

SEQ ID NO: 494 - protein, 7 aa, synthetic construct
TVPAGQK

SEQ ID NO: 495 - protein, 7 aa, synthetic construct
NGMNTSG

SEQ ID NO: 496 - protein, 7 aa, synthetic construct
VQQKESG

SEQ ID NO: 497 - protein, 7 aa, synthetic construct
VGGARAE

SEQ ID NO: 498 - protein, 7 aa, synthetic construct
ARRTDEN

SEQ ID NO: 499 - protein, 7 aa, synthetic construct
FMHTTHA

SEQ ID NO: 500 - protein, 7 aa, synthetic construct
GQTLKGV

SEQ ID NO: 501 - protein, 7 aa, synthetic construct
EKHQRGD

SEQ ID NO: 502 - protein, 7 aa, synthetic construct
FIPMKEG

SEQ ID NO: 503 - protein, 7 aa, synthetic construct
VMKENPG

SEQ ID NO: 504 - protein, 7 aa, synthetic construct
SYNRSAN

SEQ ID NO: 505 - protein, 7 aa, synthetic construct
SPKYGHG

SEQ ID NO: 506 - protein, 7 aa, synthetic construct
SVHTGHI

SEQ ID NO: 507 - protein, 7 aa, synthetic construct
FINKGLT

SEQ ID NO: 508 - protein, 7 aa, synthetic construct
PPAARVQ

SEQ ID NO: 509 - protein, 7 aa, synthetic construct
DLKHTDM

SEQ ID NO: 510 - protein, 7 aa, synthetic construct
QRLPVDH

SEQ ID NO: 511 - protein, 7 aa, synthetic construct
RAELVKG

SEQ ID NO: 512 - protein, 7 aa, synthetic construct
EYHGRVG

SEQ ID NO: 513 - protein, 7 aa, synthetic construct
SSKIIAD

SEQ ID NO: 514 - protein, 7 aa, synthetic construct
HIQSIKN

SEQ ID NO: 515 - protein, 7 aa, synthetic construct
RYTKDET

SEQ ID NO: 516 - protein, 7 aa, synthetic construct
AKKGHEP

SEQ ID NO: 517 - protein, 7 aa, synthetic construct
WGSTAKN

SEQ ID NO: 518 - protein, 7 aa, synthetic construct
YHRGMEA

SEQ ID NO: 519 - protein, 7 aa, synthetic construct
TNNERVG

SEQ ID NO: 520 - protein, 7 aa, synthetic construct
KSPKFDP

SEQ ID NO: 521 - protein, 7 aa, synthetic construct
SSNGNKM

SEQ ID NO: 522 - protein, 7 aa, synthetic construct
TERGFHA

SEQ ID NO: 523 - protein, 7 aa, synthetic construct
HKLSHME

SEQ ID NO: 524 - protein, 7 aa, synthetic construct
KPYAGNA

SEQ ID NO: 525 - protein, 7 aa, synthetic construct
AKNKEHF

SEQ ID NO: 526 - protein, 7 aa, synthetic construct
MKATSTD

SEQ ID NO: 527 - protein, 7 aa, synthetic construct
VASRDQP

SEQ ID NO: 528 - protein, 7 aa, synthetic construct
TPPQTGQ

SEQ ID NO: 529 - protein, 7 aa, synthetic construct
DKFDAKP

SEQ ID NO: 530 - protein, 7 aa, synthetic construct
DTAATRN

SEQ ID NO: 531 - protein, 7 aa, synthetic construct
LQMSAIR

SEQ ID NO: 532 - protein, 7 aa, synthetic construct
FKPHQIG

SEQ ID NO: 533 - protein, 7 aa, synthetic construct
QMRPGFA

SEQ ID NO: 534 - protein, 7 aa, synthetic construct
RTTNYPE

SEQ ID NO: 535 - protein, 7 aa, synthetic construct
MKPTYSD

SEQ ID NO: 536 - protein, 7 aa, synthetic construct
RNGQDNR

SEQ ID NO: 537 - protein, 7 aa, synthetic construct
VNMSTTA

SEQ ID NO: 538 - protein, 7 aa, synthetic construct
MGSMTAG

SEQ ID NO: 539 - protein, 7 aa, synthetic construct
PQKGVQF

SEQ ID NO: 540 - protein, 7 aa, synthetic construct
ERPIGNN

SEQ ID NO: 541 - protein, 7 aa, synthetic construct
KHASQQV

SEQ ID NO: 542 - protein, 7 aa, synthetic construct
ERNVTSF

SEQ ID NO: 543 - protein, 7 aa, synthetic construct
HAQMAGS

SEQ ID NO: 544 - protein, 7 aa, synthetic construct
TEQVRKV

SEQ ID NO: 545 - protein, 7 aa, synthetic construct
WNASQKV

SEQ ID NO: 546 - protein, 7 aa, synthetic construct
ANGVGYH

SEQ ID NO: 547 - protein, 7 aa, synthetic construct
TGQQMRP

SEQ ID NO: 548 - protein, 7 aa, synthetic construct
PGHMTAP

SEQ ID NO: 549 - protein, 7 aa, synthetic construct
KNTIVNP

SEQ ID NO: 550 - protein, 7 aa, synthetic construct
AGHRIEM

SEQ ID NO: 551 - protein, 7 aa, synthetic construct
NVGQVGS

SEQ ID NO: 552 - protein, 7 aa, synthetic construct
QRQLGEA

SEQ ID NO: 553 - protein, 7 aa, synthetic construct
RMHYQAE

SEQ ID NO: 554 - protein, 7 aa, synthetic construct
NGHGYTN

SEQ ID NO: 555 - protein, 7 aa, synthetic construct
YGTHMHM

SEQ ID NO: 556 - protein, 7 aa, synthetic construct
YQGVNKA

SEQ ID NO: 557 - protein, 7 aa, synthetic construct
GSTGRGM

SEQ ID NO: 558 - protein, 7 aa, synthetic construct
QMNRNMV

SEQ ID NO: 559 - protein, 7 aa, synthetic construct
MAKAWQG

SEQ ID NO: 560 - protein, 7 aa, synthetic construct
SLDGKKF

SEQ ID NO: 561 - protein, 7 aa, synthetic construct
NKSCDPC

SEQ ID NO: 562 - protein, 7 aa, synthetic construct
YKNTNNN

SEQ ID NO: 563 - protein, 7 aa, synthetic construct
KHEDATG

SEQ ID NO: 564 - protein, 7 aa, synthetic construct
SYPKEPI

SEQ ID NO: 565 - protein, 7 aa, synthetic construct
KVGAVQA

SEQ ID NO: 566 - protein, 7 aa, synthetic construct
SDRYAKV

SEQ ID NO: 567 - protein, 7 aa, synthetic construct
FPAPTKV

SEQ ID NO: 568 - protein, 7 aa, synthetic construct
SGPVAYS

SEQ ID NO: 569 - protein, 7 aa, synthetic construct
DGVRRDS

SEQ ID NO: 570 - protein, 7 aa, synthetic construct
NRPNSTF

SEQ ID NO: 571 - protein, 7 aa, synthetic construct
MQPNSVV

SEQ ID NO: 572 - protein, 7 aa, synthetic construct
WDKFVSE

SEQ ID NO: 573 - protein, 7 aa, synthetic construct
STQPKTP

SEQ ID NO: 574 - protein, 7 aa, synthetic construct
TNKVSMT

SEQ ID NO: 575 - protein, 7 aa, synthetic construct
ENRPSTF

SEQ ID NO: 576 - protein, 7 aa, synthetic construct
RENFVMQ

SEQ ID NO: 577 - protein, 7 aa, synthetic construct
MQREGQR

SEQ ID NO: 578 - protein, 7 aa, synthetic construct
NAIRPTI

SEQ ID NO: 579 - protein, 7 aa, synthetic construct
GHNMGNP

SEQ ID NO: 580 - protein, 7 aa, synthetic construct
ADMRVTP

SEQ ID NO: 581 - protein, 7 aa, synthetic construct
FFNATAG

SEQ ID NO: 582 - protein, 7 aa, synthetic construct
TREGKQM

SEQ ID NO: 583 - protein, 7 aa, synthetic construct
GQKPHAI

SEQ ID NO: 584 - protein, 7 aa, synthetic construct
HDKFSVI

SEQ ID NO: 585 - protein, 7 aa, synthetic construct
CGKFCNE

SEQ ID NO: 586 - protein, 7 aa, synthetic construct
VNQKPNL

SEQ ID NO: 587 - protein, 7 aa, synthetic construct
RDHSSYG

SEQ ID NO: 588 - protein, 7 aa, synthetic construct
SQMPSQA

SEQ ID NO: 589 - protein, 7 aa, synthetic construct
HRAEQGW

SEQ ID NO: 590 - protein, 7 aa, synthetic construct
QHTRTPA

SEQ ID NO: 591 - protein, 7 aa, synthetic construct
HTKTPFD

SEQ ID NO: 592 - protein, 7 aa, synthetic construct
KNVAVTN

SEQ ID NO: 593 - protein, 7 aa, synthetic construct
VRDMELR

SEQ ID NO: 594 - protein, 7 aa, synthetic construct
VMHSAHP

SEQ ID NO: 595 - protein, 7 aa, synthetic construct
SANYNGK

SEQ ID NO: 596 - protein, 7 aa, synthetic construct
YKIVSQG

SEQ ID NO: 597 - protein, 7 aa, synthetic construct
RDKQVGF

SEQ ID NO: 598 - protein, 7 aa, synthetic construct
RKDYVDS

SEQ ID NO: 599 - protein, 7 aa, synthetic construct
LTNPNQN

SEQ ID NO: 600 - protein, 7 aa, synthetic construct
ARMSPQG

SEQ ID NO: 601 - protein, 7 aa, synthetic construct
KREHDTN

SEQ ID NO: 602 - protein, 7 aa, synthetic construct
MDSLTKV

SEQ ID NO: 603 - protein, 7 aa, synthetic construct
VSFRTPE

SEQ ID NO: 604 - protein, 7 aa, synthetic construct
AHTQQSG

SEQ ID NO: 605 - protein, 7 aa, synthetic construct
HSKMIAE

SEQ ID NO: 606 - protein, 7 aa, synthetic construct
RNPGAQD

SEQ ID NO: 607 - protein, 7 aa, synthetic construct
KQPVLTP

SEQ ID NO: 608 - protein, 7 aa, synthetic construct
IPTAQYA

SEQ ID NO: 609 - protein, 7 aa, synthetic construct
TPSTNAP

SEQ ID NO: 610 - protein, 7 aa, synthetic construct
YGAKQLP

SEQ ID NO: 611 - protein, 7 aa, synthetic construct
RIEEPEF

SEQ ID NO: 612 - protein, 7 aa, synthetic construct
MGRNLEI

SEQ ID NO: 613 - protein, 7 aa, synthetic construct
RALPHDK

SEQ ID NO: 614 - protein, 7 aa, synthetic construct
VKYTNQM

SEQ ID NO: 615 - protein, 7 aa, synthetic construct
NGNLPRA

SEQ ID NO: 616 - protein, 7 aa, synthetic construct
LGPSPMP

SEQ ID NO: 617 - protein, 7 aa, synthetic construct
ITKVETL

SEQ ID NO: 618 - protein, 7 aa, synthetic construct
HSTTRDD

SEQ ID NO: 619 - protein, 7 aa, synthetic construct
MVPGVKG

SEQ ID NO: 620 - protein, 7 aa, synthetic construct
EHSKSTA

SEQ ID NO: 621 - protein, 7 aa, synthetic construct
APGTKMS

SEQ ID NO: 622 - protein, 7 aa, synthetic construct
YGHNVRD

SEQ ID NO: 623 - protein, 7 aa, synthetic construct
TGKFHDS

SEQ ID NO: 624 - protein, 7 aa, synthetic construct
AAVHAKE

SEQ ID NO: 625 - protein, 7 aa, synthetic construct
LEKVKYQ

SEQ ID NO: 626 - protein, 7 aa, synthetic construct
KENGGRE

SEQ ID NO: 627 - protein, 7 aa, synthetic construct
LNRDTST

SEQ ID NO: 628 - protein, 7 aa, synthetic construct
MTRQVHD

SEQ ID NO: 629 - protein, 7 aa, synthetic construct
IRHSSAD

SEQ ID NO: 630 - protein, 7 aa, synthetic construct
RDIKHTN

SEQ ID NO: 631 - protein, 7 aa, synthetic construct
TSKVEVQ

SEQ ID NO: 632 - protein, 7 aa, synthetic construct
SPLEITG

SEQ ID NO: 633 - protein, 7 aa, synthetic construct
MMGGASG

SEQ ID NO: 634 - protein, 7 aa, synthetic construct
YMPQRPD

SEQ ID NO: 635 - protein, 7 aa, synthetic construct
NGHTKFP

SEQ ID NO: 636 - protein, 7 aa, synthetic construct
ISPRVTN

SEQ ID NO: 637 - protein, 7 aa, synthetic construct
LRTHQTD

SEQ ID NO: 638 - protein, 7 aa, synthetic construct
VTPAHTV

SEQ ID NO: 639 - protein, 7 aa, synthetic construct
KGDKMYA

SEQ ID NO: 640 - protein, 7 aa, synthetic construct
SSFDRQG

SEQ ID NO: 641 - protein, 7 aa, synthetic construct
TSRNATA

SEQ ID NO: 642 - protein, 7 aa, synthetic construct
YHGNNME

SEQ ID NO: 643 - protein, 7 aa, synthetic construct
FHNAPNT

SEQ ID NO: 644 - protein, 7 aa, synthetic construct
NRADKEW

SEQ ID NO: 645 - protein, 7 aa, synthetic construct
RMPEQTA

SEQ ID NO: 646 - protein, 7 aa, synthetic construct
MRTEPVP

SEQ ID NO: 647 - protein, 7 aa, synthetic construct
RNQENPN

SEQ ID NO: 648 - protein, 7 aa, synthetic construct
SRQVMVA

SEQ ID NO: 649 - protein, 7 aa, synthetic construct
DMTKYAG

SEQ ID NO: 650 - protein, 7 aa, synthetic construct
FGTNRMD

SEQ ID NO: 651 - protein, 7 aa, synthetic construct
KMINNSP

SEQ ID NO: 652 - protein, 7 aa, synthetic construct
TIAVGNA

SEQ ID NO: 653 - protein, 7 aa, synthetic construct
VVTSTKM

SEQ ID NO: 654 - protein, 7 aa, synthetic construct
YSPMHKS

SEQ ID NO: 655 - protein, 7 aa, synthetic construct
QKLAVSP

SEQ ID NO: 656 - protein, 7 aa, synthetic construct
TKSFAMG

SEQ ID NO: 657 - protein, 7 aa, synthetic construct
GPMAVNH

SEQ ID NO: 658 - protein, 7 aa, synthetic construct
APPAAGK

SEQ ID NO: 659 - protein, 7 aa, synthetic construct
EQPYRAS

SEQ ID NO: 660 - protein, 7 aa, synthetic construct
TPRHQEF

SEQ ID NO: 661 - protein, 7 aa, synthetic construct
KVSQGQM

SEQ ID NO: 662 - protein, 7 aa, synthetic construct
IPNLRQS

SEQ ID NO: 663 - protein, 7 aa, synthetic construct
MHVGGKE

SEQ ID NO: 664 - protein, 7 aa, synthetic construct
NKSTNPQ

SEQ ID NO: 665 - protein, 7 aa, synthetic construct
YPQSHAS

SEQ ID NO: 666 - protein, 7 aa, synthetic construct
HGGTGSL

SEQ ID NO: 667 - protein, 7 aa, synthetic construct
QQDKMKF

SEQ ID NO: 668 - protein, 7 aa, synthetic construct
QPSHATA

SEQ ID NO: 669 - protein, 7 aa, synthetic construct
YPPVNKQ

SEQ ID NO: 670 - protein, 7 aa, synthetic construct
ANHVKNI

SEQ ID NO: 671 - protein, 7 aa, synthetic construct
FPGQGSY

SEQ ID NO: 672 - protein, 7 aa, synthetic construct
TGATRVP

SEQ ID NO: 673 - protein, 7 aa, synthetic construct
LEVRRDG

SEQ ID NO: 674 - protein, 7 aa, synthetic construct
YMRMMPE

SEQ ID NO: 675 - protein, 7 aa, synthetic construct
KAKSQDV

SEQ ID NO: 676 - protein, 7 aa, synthetic construct
DYGMVKP

SEQ ID NO: 677 - protein, 7 aa, synthetic construct
YKGVPNL

SEQ ID NO: 678 - protein, 7 aa, synthetic construct
QLGYSSS

SEQ ID NO: 679 - protein, 7 aa, synthetic construct
GIHGQQA

SEQ ID NO: 680 - protein, 7 aa, synthetic construct
YMKLVQD

SEQ ID NO: 681 - protein, 7 aa, synthetic construct
SKTMAGL

SEQ ID NO: 682 - protein, 7 aa, synthetic construct
IKGVAET

SEQ ID NO: 683 - protein, 7 aa, synthetic construct
KMPMMVS

SEQ ID NO: 684 - protein, 7 aa, synthetic construct
TTGTSQT

SEQ ID NO: 685 - protein, 7 aa, synthetic construct
VRPSGVV

SEQ ID NO: 686 - protein, 7 aa, synthetic construct
VTPHMMP

SEQ ID NO: 687 - protein, 7 aa, synthetic construct
HELSTAG

SEQ ID NO: 688 - protein, 7 aa, synthetic construct
PSNGLPW

SEQ ID NO: 689 - protein, 7 aa, synthetic construct
SGQGETK

SEQ ID NO: 690 - protein, 7 aa, synthetic construct
SDHRGHA

SEQ ID NO: 691 - protein, 7 aa, synthetic construct
LRQEWVG

SEQ ID NO: 692 - protein, 7 aa, synthetic construct
PMRSTND

SEQ ID NO: 693 - protein, 7 aa, synthetic construct
MRQLSAD

SEQ ID NO: 694 - protein, 7 aa, synthetic construct
ESGRVNP

SEQ ID NO: 695 - protein, 7 aa, synthetic construct
SVTKAHP

SEQ ID NO: 696 - protein, 7 aa, synthetic construct
RDNVRMV

SEQ ID NO: 697 - protein, 7 aa, synthetic construct
HVKDTSN

SEQ ID NO: 698 - protein, 7 aa, synthetic construct
KSNGVEA

SEQ ID NO: 699 - protein, 7 aa, synthetic construct
VYAKLSD

SEQ ID NO: 700 - protein, 7 aa, synthetic construct
DITSKKA

SEQ ID NO: 701 - protein, 7 aa, synthetic construct
GIQGRQS

SEQ ID NO: 702 - protein, 7 aa, synthetic construct
QRNGMVN

SEQ ID NO: 703 - protein, 7 aa, synthetic construct
SKEQYAS

SEQ ID NO: 704 - protein, 7 aa, synthetic construct
HMQGITP

SEQ ID NO: 705 - protein, 7 aa, synthetic construct
RKQNDEY

SEQ ID NO: 706 - protein, 7 aa, synthetic construct
LAAPYHE

SEQ ID NO: 707 - protein, 7 aa, synthetic construct
STRNVSG

SEQ ID NO: 708 - protein, 7 aa, synthetic construct
VATHNPL

SEQ ID NO: 709 - protein, 7 aa, synthetic construct
QMKAEQA

SEQ ID NO: 710 - protein, 7 aa, synthetic construct
YDERRNS

SEQ ID NO: 711 - protein, 7 aa, synthetic construct
YRGGDEF

SEQ ID NO: 712 - protein, 7 aa, synthetic construct
MTKKEDH

SEQ ID NO: 713 - protein, 7 aa, synthetic construct
LKPEVRG

SEQ ID NO: 714 - protein, 7 aa, synthetic construct
DRDRMVM

SEQ ID NO: 715 - protein, 7 aa, synthetic construct
YRRPDET

SEQ ID NO: 716 - protein, 7 aa, synthetic construct
VATMKGA

SEQ ID NO: 717 - protein, 7 aa, synthetic construct
TQNLSKS

SEQ ID NO: 718 - protein, 7 aa, synthetic construct
KLGSTTD

SEQ ID NO: 719 - protein, 7 aa, synthetic construct
IAQRNMQ

SEQ ID NO: 720 - protein, 7 aa, synthetic construct
GMESHNA

SEQ ID NO: 721 - protein, 7 aa, synthetic construct
QPMNKHM

SEQ ID NO: 722 - protein, 7 aa, synthetic construct
AKREPFF

SEQ ID NO: 723 - protein, 7 aa, synthetic construct
VKSVNVI

SEQ ID NO: 724 - protein, 7 aa, synthetic construct
GPRGYNP

SEQ ID NO: 725 - protein, 7 aa, synthetic construct
MTNTALR

SEQ ID NO: 726 - protein, 7 aa, synthetic construct
MNRGAGV

SEQ ID NO: 727 - protein, 7 aa, synthetic construct
NGPTIRE

SEQ ID NO: 728 - protein, 7 aa, synthetic construct
LHQTVRD

SEQ ID NO: 729 - protein, 7 aa, synthetic construct
KQANNDM

SEQ ID NO: 730 - protein, 7 aa, synthetic construct
SNFKMTE

SEQ ID NO: 731 - protein, 7 aa, synthetic construct
LGRHVES

SEQ ID NO: 732 - protein, 7 aa, synthetic construct
QNEYTKG

SEQ ID NO: 733 - protein, 7 aa, synthetic construct
PSSMNKG

SEQ ID NO: 734 - protein, 7 aa, synthetic construct
ARSMEDP

SEQ ID NO: 735 - protein, 7 aa, synthetic construct
DAHKYTG

SEQ ID NO: 736 - protein, 7 aa, synthetic construct
NKYTQDP

SEQ ID NO: 737 - protein, 7 aa, synthetic construct
NSGIKSF

SEQ ID NO: 738 - protein, 7 aa, synthetic construct
TRPPYEI

SEQ ID NO: 739 - protein, 7 aa, synthetic construct
FAGRMDH

SEQ ID NO: 740 - protein, 7 aa, synthetic construct
TPPKATE

SEQ ID NO: 741 - protein, 7 aa, synthetic construct
SQQKGLA

SEQ ID NO: 742 - protein, 7 aa, synthetic construct
GGTPSKL

SEQ ID NO: 743 - protein, 7 aa, synthetic construct
LNRQQES

SEQ ID NO: 744 - protein, 7 aa, synthetic construct
NDPAVGG

SEQ ID NO: 745 - protein, 7 aa, synthetic construct
QTKNQNP

SEQ ID NO: 746 - protein, 7 aa, synthetic construct
IATKKES

SEQ ID NO: 747 - protein, 7 aa, synthetic construct
LRPPAMG

SEQ ID NO: 748 - protein, 7 aa, synthetic construct
KGPGVAV

SEQ ID NO: 749 - protein, 7 aa, synthetic construct
TDHKGNY

SEQ ID NO: 750 - protein, 7 aa, synthetic construct
PKRGEED

SEQ ID NO: 751 - protein, 7 aa, synthetic construct
VYPEMAG

SEQ ID NO: 752 - protein, 7 aa, synthetic construct
LMASKSQ

SEQ ID NO: 753 - protein, 7 aa, synthetic construct
PVPMKAG

SEQ ID NO: 754 - protein, 7 aa, synthetic construct
MKGAYHD

SEQ ID NO: 755 - protein, 7 aa, synthetic construct
TSQSAMP

SEQ ID NO: 756 - protein, 7 aa, synthetic construct
KTPQMER

SEQ ID NO: 757 - protein, 7 aa, synthetic construct
APASRDE

SEQ ID NO: 758 - protein, 7 aa, synthetic construct
SPIVTRE

SEQ ID NO: 759 - protein, 7 aa, synthetic construct
GLHSSTF

SEQ ID NO: 760 - protein, 7 aa, synthetic construct
KKPTAGE

SEQ ID NO: 761 - protein, 7 aa, synthetic construct
DKSGHNF

SEQ ID NO: 762 - protein, 7 aa, synthetic construct
YHANSHP

SEQ ID NO: 763 - protein, 7 aa, synthetic construct
GSKPADL

SEQ ID NO: 764 - protein, 7 aa, synthetic construct
DQKAVRP

SEQ ID NO: 765 - protein, 7 aa, synthetic construct
LKQPNQG

SEQ ID NO: 766 - protein, 7 aa, synthetic construct
NKKAQNE

SEQ ID NO: 767 - protein, 7 aa, synthetic construct
PGTAHTA

SEQ ID NO: 768 - protein, 7 aa, synthetic construct
NEKAVKP

SEQ ID NO: 769 - protein, 7 aa, synthetic construct
ILSTKNG

SEQ ID NO: 770 - protein, 7 aa, synthetic construct
GPTKKES

SEQ ID NO: 771 - protein, 7 aa, synthetic construct
RFPHEKD

SEQ ID NO: 772 - protein, 7 aa, synthetic construct
VSAKSTL

SEQ ID NO: 773 - protein, 7 aa, synthetic construct
IGSPPKG

SEQ ID NO: 774 - protein, 7 aa, synthetic construct
NQYPEPK

SEQ ID NO: 775 - protein, 7 aa, synthetic construct
KDQIHPG

SEQ ID NO: 776 - protein, 7 aa, synthetic construct
AGQYQSA

SEQ ID NO: 777 - protein, 7 aa, synthetic construct
ASSQLRE

SEQ ID NO: 778 - protein, 7 aa, synthetic construct
VGGFTKD

SEQ ID NO: 779 - protein, 7 aa, synthetic construct
NQDVPRD

SEQ ID NO: 780 - protein, 7 aa, synthetic construct
DRGYASS

SEQ ID NO: 781 - protein, 7 aa, synthetic construct
VQMTGRG

SEQ ID NO: 782 - protein, 7 aa, synthetic construct
QKDNAHH

SEQ ID NO: 783 - protein, 7 aa, synthetic construct
KNHESFN

SEQ ID NO: 784 - protein, 7 aa, synthetic construct
RSSATTS

SEQ ID NO: 785 - protein, 7 aa, synthetic construct
KKQDMIQ

SEQ ID NO: 786 - protein, 7 aa, synthetic construct
SVKAQAA

SEQ ID NO: 787 - protein, 7 aa, synthetic construct
GVRPNFQ

SEQ ID NO: 788 - protein, 7 aa, synthetic construct
FTSQATH

SEQ ID NO: 789 - protein, 7 aa, synthetic construct
EHDRRNG

SEQ ID NO: 790 - protein, 7 aa, synthetic construct
NQRAVEL

SEQ ID NO: 791 - protein, 7 aa, synthetic construct
DKAGSRV

SEQ ID NO: 792 - protein, 7 aa, synthetic construct
GNMIRPV

SEQ ID NO: 793 - protein, 7 aa, synthetic construct
IRAGMST

SEQ ID NO: 794 - protein, 7 aa, synthetic construct
SHLTRLP

SEQ ID NO: 795 - protein, 7 aa, synthetic construct
IKGVSTD

SEQ ID NO: 796 - protein, 7 aa, synthetic construct
TDRVANK

SEQ ID NO: 797 - protein, 7 aa, synthetic construct
GEVARYA

SEQ ID NO: 798 - protein, 7 aa, synthetic construct
VEGFMSN

SEQ ID NO: 799 - protein, 7 aa, synthetic construct
WSNHQVS

SEQ ID NO: 800 - protein, 7 aa, synthetic construct
KYDSFPG

SEQ ID NO: 801 - protein, 7 aa, synthetic construct
RDFKMAA

SEQ ID NO: 802 - protein, 7 aa, synthetic construct
AYNESKG

SEQ ID NO: 803 - protein, 7 aa, synthetic construct
KHHDAIP

SEQ ID NO: 804 - protein, 7 aa, synthetic construct
RMQQEYH

SEQ ID NO: 805 - protein, 7 aa, synthetic construct
ESKYMDK

SEQ ID NO: 806 - protein, 7 aa, synthetic construct
MNKMTEI

SEQ ID NO: 807 - protein, 7 aa, synthetic construct
KLSTQST

SEQ ID NO: 808 - protein, 7 aa, synthetic construct
SQSGTTK

SEQ ID NO: 809 - protein, 7 aa, synthetic construct
IGRFPDQ

SEQ ID NO: 810 - protein, 7 aa, synthetic construct
QYAGHAV

SEQ ID NO: 811 - protein, 7 aa, synthetic construct
IRDHRMP

SEQ ID NO: 812 - protein, 7 aa, synthetic construct
TSHMAIS

SEQ ID NO: 813 - protein, 7 aa, synthetic construct
GREAGNI

SEQ ID NO: 814 - protein, 7 aa, synthetic construct
SSAATFS

SEQ ID NO: 815 - protein, 7 aa, synthetic construct
AKSGYDN

SEQ ID NO: 816 - protein, 7 aa, synthetic construct
VNAVKPM

SEQ ID NO: 817 - protein, 7 aa, synthetic construct
QRSTSEI

SEQ ID NO: 818 - protein, 7 aa, synthetic construct
DAKTQKA

SEQ ID NO: 819 - protein, 7 aa, synthetic construct
TAVKMGA

SEQ ID NO: 820 - protein, 7 aa, synthetic construct
YAPKNGY

SEQ ID NO: 821 - protein, 7 aa, synthetic construct
FMHDNGK

SEQ ID NO: 822 - protein, 7 aa, synthetic construct
GIPSSKT

SEQ ID NO: 823 - protein, 7 aa, synthetic construct
RTDRGID

SEQ ID NO: 824 - protein, 7 aa, synthetic construct
FVKSTNG

SEQ ID NO: 825 - protein, 7 aa, synthetic construct
LARNSQE

SEQ ID NO: 826 - protein, 7 aa, synthetic construct
YQRKDYD

SEQ ID NO: 827 - protein, 7 aa, synthetic construct
LGQAQKA

SEQ ID NO: 828 - protein, 7 aa, synthetic construct
YGGAVKV

SEQ ID NO: 829 - protein, 7 aa, synthetic construct
RFTSVGG

SEQ ID NO: 830 - protein, 7 aa, synthetic construct
QAAGQLY

SEQ ID NO: 831 - protein, 7 aa, synthetic construct
LPQGVST

SEQ ID NO: 832 - protein, 7 aa, synthetic construct
ASAYQAP

SEQ ID NO: 833 - protein, 7 aa, synthetic construct
KNGETRQ

SEQ ID NO: 834 - protein, 7 aa, synthetic construct
TMNGKSG

SEQ ID NO: 835 - protein, 7 aa, synthetic construct
QGAAKND

SEQ ID NO: 836 - protein, 7 aa, synthetic construct
MTAKTDS

SEQ ID NO: 837 - protein, 7 aa, synthetic construct
PKSYDQA

SEQ ID NO: 838 - protein, 7 aa, synthetic construct
AYGAEHR

SEQ ID NO: 839 - protein, 7 aa, synthetic construct
KQDPPQG

SEQ ID NO: 840 - protein, 7 aa, synthetic construct
HSTTQVS

SEQ ID NO: 841 - protein, 7 aa, synthetic construct
MTATTTA

SEQ ID NO: 842 - protein, 7 aa, synthetic construct
SGKAAES

SEQ ID NO: 843 - protein, 7 aa, synthetic construct
APRHEFP

SEQ ID NO: 844 - protein, 7 aa, synthetic construct
ADPFLKP

SEQ ID NO: 845 - protein, 7 aa, synthetic construct
ASKPTQF

SEQ ID NO: 846 - protein, 7 aa, synthetic construct
GQFSHQD

SEQ ID NO: 847 - protein, 7 aa, synthetic construct
GKQDKIF

SEQ ID NO: 848 - protein, 7 aa, synthetic construct
RSRSEED

SEQ ID NO: 849 - protein, 7 aa, synthetic construct
HQDKPKL

SEQ ID NO: 850 - protein, 7 aa, synthetic construct
YKGDKTD

SEQ ID NO: 851 - protein, 7 aa, synthetic construct
QAGTFGK

SEQ ID NO: 852 - protein, 7 aa, synthetic construct
LAQKSQG

SEQ ID NO: 853 - protein, 7 aa, synthetic construct
NDSQYRA

SEQ ID NO: 854 - protein, 7 aa, synthetic construct
PHPSGVA

SEQ ID NO: 855 - protein, 7 aa, synthetic construct
TLTHQIA

SEQ ID NO: 856 - protein, 7 aa, synthetic construct
IPTKFAE

SEQ ID NO: 857 - protein, 7 aa, synthetic construct
VTHSSIG

SEQ ID NO: 858 - protein, 7 aa, synthetic construct
VSQRNPT

SEQ ID NO: 859 - protein, 7 aa, synthetic construct
YGARATA

SEQ ID NO: 860 - protein, 7 aa, synthetic construct
QATKHTD

SEQ ID NO: 861 - protein, 7 aa, synthetic construct
FAKFDQN

SEQ ID NO: 862 - protein, 7 aa, synthetic construct
SYHGGSA

SEQ ID NO: 863 - protein, 7 aa, synthetic construct
HMHAQAP

SEQ ID NO: 864 - protein, 7 aa, synthetic construct
ILAQAKE

SEQ ID NO: 865 - protein, 7 aa, synthetic construct
DKGYQDS

SEQ ID NO: 866 - protein, 7 aa, synthetic construct
VHSTRIE

SEQ ID NO: 867 - protein, 7 aa, synthetic construct
TKMEMNY

SEQ ID NO: 868 - protein, 7 aa, synthetic construct
HMTHAHA

SEQ ID NO: 869 - protein, 7 aa, synthetic construct
FNMKQAN

SEQ ID NO: 870 - protein, 7 aa, synthetic construct
FRDVGTN

SEQ ID NO: 871 - protein, 7 aa, synthetic construct
SGNNQQS

SEQ ID NO: 872 - protein, 7 aa, synthetic construct
PTHHANV

SEQ ID NO: 873 - protein, 7 aa, synthetic construct
HKGEEGA

SEQ ID NO: 874 - protein, 7 aa, synthetic construct
TRTGSVD

SEQ ID NO: 875 - protein, 7 aa, synthetic construct
RYDQPGD

SEQ ID NO: 876 - protein, 7 aa, synthetic construct
ILGSAKQ

SEQ ID NO: 877 - protein, 7 aa, synthetic construct
HKPHDAE

SEQ ID NO: 878 - protein, 7 aa, synthetic construct
TAAHTQF

SEQ ID NO: 879 - protein, 7 aa, synthetic construct
MSVKNTA

SEQ ID NO: 880 - protein, 7 aa, synthetic construct
QGQKKEA

SEQ ID NO: 881 - protein, 7 aa, synthetic construct
SPMVKNV

SEQ ID NO: 882 - protein, 7 aa, synthetic construct
TTLTKTV

SEQ ID NO: 883 - protein, 7 aa, synthetic construct
IHNHKVP

SEQ ID NO: 884 - protein, 7 aa, synthetic construct
PPKQGDK

SEQ ID NO: 885 - protein, 7 aa, synthetic construct
SMANQGP

SEQ ID NO: 886 - protein, 7 aa, synthetic construct
DNRPTIP

SEQ ID NO: 887 - protein, 7 aa, synthetic construct
QHKIVPD

SEQ ID NO: 888 - protein, 7 aa, synthetic construct
IDGFKAK

SEQ ID NO: 889 - protein, 7 aa, synthetic construct
SEYHGAG

SEQ ID NO: 890 - protein, 7 aa, synthetic construct
DPRRHQE

SEQ ID NO: 891 - protein, 7 aa, synthetic construct
DWGQSVK

SEQ ID NO: 892 - protein, 7 aa, synthetic construct
FAGGTPQ

SEQ ID NO: 893 - protein, 7 aa, synthetic construct
AQNRYDV

SEQ ID NO: 894 - protein, 7 aa, synthetic construct
YESARAL

SEQ ID NO: 895 - protein, 7 aa, synthetic construct
NSQAKQA

SEQ ID NO: 896 - protein, 7 aa, synthetic construct
KDKPDKV

SEQ ID NO: 897 - protein, 7 aa, synthetic construct
MTGQQMQ

SEQ ID NO: 898 - protein, 7 aa, synthetic construct
QLSTQPG

SEQ ID NO: 899 - protein, 7 aa, synthetic construct
MTKMNQD

SEQ ID NO: 900 - protein, 7 aa, synthetic construct
QRDRGTP

SEQ ID NO: 901 - protein, 7 aa, synthetic construct
TKQAHNM

SEQ ID NO: 902 - protein, 7 aa, synthetic construct
KGVNQQS

SEQ ID NO: 903 - protein, 7 aa, synthetic construct
PKGAMMG

SEQ ID NO: 904 - protein, 7 aa, synthetic construct
NPPLDFP

SEQ ID NO: 905 - protein, 7 aa, synthetic construct
KQQEGGI

SEQ ID NO: 906 - protein, 7 aa, synthetic construct
HTSNVPV

SEQ ID NO: 907 - protein, 7 aa, synthetic construct
IGGTVKQ

SEQ ID NO: 908 - protein, 7 aa, synthetic construct
MRKAGME

SEQ ID NO: 909 - protein, 7 aa, synthetic construct
MVGVQPN

SEQ ID NO: 910 - protein, 7 aa, synthetic construct
KTVREMP

SEQ ID NO: 911 - protein, 7 aa, synthetic construct
RAPGVTI

SEQ ID NO: 912 - protein, 7 aa, synthetic construct
SKIHQFG

SEQ ID NO: 913 - protein, 7 aa, synthetic construct
NVQHKEH

SEQ ID NO: 914 - protein, 7 aa, synthetic construct
VIGFKNP

SEQ ID NO: 915 - protein, 7 aa, synthetic construct
LGSRQDG

SEQ ID NO: 916 - protein, 7 aa, synthetic construct
YSTGRMM

SEQ ID NO: 917 - protein, 7 aa, synthetic construct
MGKAISG

SEQ ID NO: 918 - protein, 7 aa, synthetic construct
MGPSQMQ

SEQ ID NO: 919 - protein, 7 aa, synthetic construct
IGRGTDT

SEQ ID NO: 920 - protein, 7 aa, synthetic construct
DNKGALR

SEQ ID NO: 921 - protein, 7 aa, synthetic construct
AQGIRRE

SEQ ID NO: 922 - protein, 7 aa, synthetic construct
DTNKQAM

SEQ ID NO: 923 - protein, 7 aa, synthetic construct
LAKHQGQ

SEQ ID NO: 924 - protein, 7 aa, synthetic construct
NEKQNRQ

SEQ ID NO: 925 - protein, 7 aa, synthetic construct
KESQFRG

SEQ ID NO: 926 - protein, 7 aa, synthetic construct
HRHQDDS

SEQ ID NO: 927 - protein, 7 aa, synthetic construct
NLNKDSW

SEQ ID NO: 928 - protein, 7 aa, synthetic construct
NSRNDSA

SEQ ID NO: 929 - protein, 7 aa, synthetic construct
KEGAPNM

SEQ ID NO: 930 - protein, 7 aa, synthetic construct
KTYSDHL

SEQ ID NO: 931 - protein, 7 aa, synthetic construct
PRNLPLD

SEQ ID NO: 932 - protein, 7 aa, synthetic construct
KFASNNG

SEQ ID NO: 933 - protein, 7 aa, synthetic construct
NRVEPGN

SEQ ID NO: 934 - protein, 7 aa, synthetic construct
SHKMQED

SEQ ID NO: 935 - protein, 7 aa, synthetic construct
WHKMSED

SEQ ID NO: 936 - protein, 7 aa, synthetic construct
VGEQKRV

SEQ ID NO: 937 - protein, 7 aa, synthetic construct
EPALPRT

SEQ ID NO: 938 - protein, 7 aa, synthetic construct
HGGAQHP

SEQ ID NO: 939 - protein, 7 aa, synthetic construct
PKEGHMG

SEQ ID NO: 940 - protein, 7 aa, synthetic construct
WHQGDDA

SEQ ID NO: 941 - protein, 7 aa, synthetic construct
FPQPPQR

SEQ ID NO: 942 - protein, 7 aa, synthetic construct
FTHSSMP

SEQ ID NO: 943 - protein, 7 aa, synthetic construct
EPGEWKA

SEQ ID NO: 944 - protein, 7 aa, synthetic construct
VNATTGN

SEQ ID NO: 945 - protein, 7 aa, synthetic construct
LPIGQGG

SEQ ID NO: 946 - protein, 7 aa, synthetic construct
QRSTVAD

SEQ ID NO: 947 - protein, 7 aa, synthetic construct
QATHDAA

SEQ ID NO: 948 - protein, 7 aa, synthetic construct
GKGVPVP

SEQ ID NO: 949 - protein, 7 aa, synthetic construct
RRNEAES

SEQ ID NO: 950 - protein, 7 aa, synthetic construct
RPSMTDK

SEQ ID NO: 951 - protein, 7 aa, synthetic construct
ATPQSYG

SEQ ID NO: 952 - protein, 7 aa, synthetic construct
NHPVKSN

SEQ ID NO: 953 - protein, 7 aa, synthetic construct
SPKINWD

SEQ ID NO: 954 - protein, 7 aa, synthetic construct
HHKGMNV

SEQ ID NO: 955 - protein, 7 aa, synthetic construct
KTVQAKE

SEQ ID NO: 956 - protein, 7 aa, synthetic construct
MNTSQGA

SEQ ID NO: 957 - protein, 7 aa, synthetic construct
LRNPVTA

SEQ ID NO: 958 - protein, 7 aa, synthetic construct
RAAQQGN

SEQ ID NO: 959 - protein, 7 aa, synthetic construct
RAHNEKP

SEQ ID NO: 960 - protein, 7 aa, synthetic construct
FGSTHTS

SEQ ID NO: 961 - protein, 7 aa, synthetic construct
KIEGVAV

SEQ ID NO: 962 - protein, 7 aa, synthetic construct
QRHQGVD

SEQ ID NO: 963 - protein, 7 aa, synthetic construct
QKNQPMH

SEQ ID NO: 964 - protein, 7 aa, synthetic construct
IDKYASM

SEQ ID NO: 965 - protein, 7 aa, synthetic construct
VHAASVG

SEQ ID NO: 966 - protein, 7 aa, synthetic construct
PQPGAAV

SEQ ID NO: 967 - protein, 7 aa, synthetic construct
MMRTAQG

SEQ ID NO: 968 - protein, 7 aa, synthetic construct
GVYGGSY

SEQ ID NO: 969 - protein, 7 aa, synthetic construct
GYNKGSV

SEQ ID NO: 970 - protein, 7 aa, synthetic construct
RTQPPVE

SEQ ID NO: 971 - protein, 7 aa, synthetic construct
HQRQPSE

SEQ ID NO: 972 - protein, 7 aa, synthetic construct
FQNLSRE

SEQ ID NO: 973 - protein, 7 aa, synthetic construct
RGETNKG

SEQ ID NO: 974 - protein, 7 aa, synthetic construct
MEKYSMS

SEQ ID NO: 975 - protein, 7 aa, synthetic construct
TRGAGLV

SEQ ID NO: 976 - protein, 7 aa, synthetic construct
IDHHRDS

SEQ ID NO: 977 - protein, 7 aa, synthetic construct
SKYNNMD

SEQ ID NO: 978 - protein, 7 aa, synthetic construct
MHTKQQG

SEQ ID NO: 979 - protein, 7 aa, synthetic construct
PMTNPNG

SEQ ID NO: 980 - protein, 7 aa, synthetic construct
SASMVTH

SEQ ID NO: 981 - protein, 7 aa, synthetic construct
LSSPMHG

SEQ ID NO: 982 - protein, 7 aa, synthetic construct
HGNLGLA

SEQ ID NO: 983 - protein, 7 aa, synthetic construct
VGGTSAK

SEQ ID NO: 984 - protein, 7 aa, synthetic construct
VPSQMKL

SEQ ID NO: 985 - protein, 7 aa, synthetic construct
MAAVGKN

SEQ ID NO: 986 - protein, 7 aa, synthetic construct
RSANMPP

SEQ ID NO: 987 - protein, 7 aa, synthetic construct
ERGDGQW

SEQ ID NO: 988 - protein, 7 aa, synthetic construct
DGGFGQG

SEQ ID NO: 989 - protein, 7 aa, synthetic construct
LRSYVEA

SEQ ID NO: 990 - protein, 7 aa, synthetic construct
YAREVTN

SEQ ID NO: 991 - protein, 7 aa, synthetic construct
STKSQPS

SEQ ID NO: 992 - protein, 7 aa, synthetic construct
AHEFGPI

SEQ ID NO: 993 - protein, 7 aa, synthetic construct
TGKAGYD

SEQ ID NO: 994 - protein, 7 aa, synthetic construct
YTGQRTP

SEQ ID NO: 995 - protein, 7 aa, synthetic construct
QRDDFTK

SEQ ID NO: 996 - protein, 7 aa, synthetic construct
KSTVTSP

SEQ ID NO: 997 - protein, 7 aa, synthetic construct
GQYPMTS

SEQ ID NO: 998 - protein, 7 aa, synthetic construct
VRVYKEE

SEQ ID NO: 999 - protein, 7 aa, synthetic construct
VKMSMQH

SEQ ID NO: 1000 - protein, 7 aa, synthetic construct
FSVGPAA

SEQ ID NO: 1001 - protein, 7 aa, synthetic construct
TRSATAY

SEQ ID NO: 1002 - protein, 7 aa, synthetic construct
LKMNVND

SEQ ID NO: 1003 - protein, 7 aa, synthetic construct
AREPTFN

SEQ ID NO: 1004 - protein, 7 aa, synthetic construct
DTQHTMK

SEQ ID NO: 1005 - protein, 7 aa, synthetic construct
NSIRDSP

SEQ ID NO: 1006 - protein, 7 aa, synthetic construct
LPQESRA

SEQ ID NO: 1007 - protein, 7 aa, synthetic construct
IENVMRG

SEQ ID NO: 1008 - protein, 7 aa, synthetic construct
LKASGKP

SEQ ID NO: 1009 - protein, 7 aa, synthetic construct
ERGSQQS

SEQ ID NO: 1010 - protein, 7 aa, synthetic construct
ANPMKPY

SEQ ID NO: 1011 - protein, 7 aa, synthetic construct
ETRSAFE

SEQ ID NO: 1012 - protein, 7 aa, synthetic construct
ADRNQQP

SEQ ID NO: 1013 - protein, 7 aa, synthetic construct
TAPHVKG

SEQ ID NO: 1014 - protein, 7 aa, synthetic construct
TNSTKES

SEQ ID NO: 1015 - protein, 7 aa, synthetic construct
SLNNNKL

SEQ ID NO: 1016 - protein, 7 aa, synthetic construct
YHGNEQK

SEQ ID NO: 1017 - protein, 7 aa, synthetic construct
KAPGPST

SEQ ID NO: 1018 - protein, 7 aa, synthetic construct
YKSVAGS

SEQ ID NO: 1019 - protein, 7 aa, synthetic construct
MAQRMIA

SEQ ID NO: 1020 - protein, 7 aa, synthetic construct
MLPRVDK

SEQ ID NO: 1021 - protein, 7 aa, synthetic construct
REARHPN

SEQ ID NO: 1022 - protein, 7 aa, synthetic construct
ISAKNER

SEQ ID NO: 1023 - protein, 7 aa, synthetic construct
NHMSVQP

SEQ ID NO: 1024 - protein, 7 aa, synthetic construct
YGASGFT

SEQ ID NO: 1025 - protein, 7 aa, synthetic construct
LHPIKGQ

SEQ ID NO: 1026 - protein, 7 aa, synthetic construct
DYPVAKA

SEQ ID NO: 1027 - protein, 7 aa, synthetic construct
QYKDHPG

SEQ ID NO: 1028 - protein, 7 aa, synthetic construct
ESKSVSA

SEQ ID NO: 1029 - protein, 7 aa, synthetic construct
QLAKAER

SEQ ID NO: 1030 - protein, 7 aa, synthetic construct
RGGGIVL

SEQ ID NO: 1031 - protein, 7 aa, synthetic construct
KGEGTHP

SEQ ID NO: 1032 - protein, 7 aa, synthetic construct
IKQLHAP

SEQ ID NO: 1033 - protein, 7 aa, synthetic construct
VDKRVAA

SEQ ID NO: 1034 - protein, 7 aa, synthetic construct
MPTRTEH

SEQ ID NO: 1035 - protein, 7 aa, synthetic construct
IRGQNGS

SEQ ID NO: 1036 - protein, 7 aa, synthetic construct
HRFGSET

SEQ ID NO: 1037 - protein, 7 aa, synthetic construct
GRHAPES

SEQ ID NO: 1038 - protein, 7 aa, synthetic construct
DTHARGM

SEQ ID NO: 1039 - protein, 7 aa, synthetic construct
QNGRNQE

SEQ ID NO: 1040 - protein, 7 aa, synthetic construct
QTVSTSA

SEQ ID NO: 1041 - protein, 7 aa, synthetic construct
RWSSDAP

SEQ ID NO: 1042 - protein, 7 aa, synthetic construct
RPGYTLA

SEQ ID NO: 1043 - protein, 7 aa, synthetic construct
GNHQVKA

SEQ ID NO: 1044 - protein, 7 aa, synthetic construct
EGIQQKT

SEQ ID NO: 1045 - protein, 7 aa, synthetic construct
KNDLRID

SEQ ID NO: 1046 - protein, 7 aa, synthetic construct
TKSTPEQ

SEQ ID NO: 1047 - protein, 7 aa, synthetic construct
HNGSRDA

SEQ ID NO: 1048 - protein, 7 aa, synthetic construct
VTQGGNG

SEQ ID NO: 1049 - protein, 7 aa, synthetic construct
QVQKNSV

SEQ ID NO: 1050 - protein, 7 aa, synthetic construct
THSEPGR

SEQ ID NO: 1051 - protein, 7 aa, synthetic construct
PNNRGSA

SEQ ID NO: 1052 - protein, 7 aa, synthetic construct
SRTGHEH

SEQ ID NO: 1053 - protein, 7 aa, synthetic construct
SYDKSVA

SEQ ID NO: 1054 - protein, 7 aa, synthetic construct
EGQLKSA

SEQ ID NO: 1055 - protein, 7 aa, synthetic construct
EPMIAKS

SEQ ID NO: 1056 - protein, 7 aa, synthetic construct
ERWTPED

SEQ ID NO: 1057 - protein, 7 aa, synthetic construct
SVKNMQP

SEQ ID NO: 1058 - protein, 7 aa, synthetic construct
HVPNQTG

SEQ ID NO: 1059 - protein, 7 aa, synthetic construct
IQKTPQF

SEQ ID NO: 1060 - protein, 7 aa, synthetic construct
APGSSMR

SEQ ID NO: 1061 - protein, 7 aa, synthetic construct
GGSNKMT

SEQ ID NO: 1062 - protein, 7 aa, synthetic construct
EPGYSGG

SEQ ID NO: 1063 - protein, 7 aa, synthetic construct
YSAVVSG

SEQ ID NO: 1064 - protein, 7 aa, synthetic construct
FAAAGRE

SEQ ID NO: 1065 - protein, 7 aa, synthetic construct
RDSMLGS

SEQ ID NO: 1066 - protein, 7 aa, synthetic construct
IRGDPIP

SEQ ID NO: 1067 - protein, 7 aa, synthetic construct
TRENQRA

SEQ ID NO: 1068 - protein, 7 aa, synthetic construct
LGKTEQF

SEQ ID NO: 1069 - protein, 7 aa, synthetic construct
TGHHGTQ

SEQ ID NO: 1070 - protein, 7 aa, synthetic construct
SQPNGRF

SEQ ID NO: 1071 - protein, 7 aa, synthetic construct
ILRESHE

SEQ ID NO: 1072 - protein, 7 aa, synthetic construct
VPDKGRM

SEQ ID NO: 1073 - protein, 7 aa, synthetic construct
SPVFGPG

SEQ ID NO: 1074 - protein, 7 aa, synthetic construct
KLGQEPG

SEQ ID NO: 1075 - protein, 7 aa, synthetic construct
WGGEMKG

SEQ ID NO: 1076 - protein, 7 aa, synthetic construct
NKTHVEV

SEQ ID NO: 1077 - protein, 7 aa, synthetic construct
TNRTQAE

SEQ ID NO: 1078 - protein, 7 aa, synthetic construct
TNDIHME

SEQ ID NO: 1079 - protein, 7 aa, synthetic construct
ETKLLQK

SEQ ID NO: 1080 - protein, 7 aa, synthetic construct
SGDRMDF

SEQ ID NO: 1081 - protein, 7 aa, synthetic construct
HQKPSSG

SEQ ID NO: 1082 - protein, 7 aa, synthetic construct
WSEHGPS

SEQ ID NO: 1083 - protein, 7 aa, synthetic construct
NSEHKPA

SEQ ID NO: 1084 - protein, 7 aa, synthetic construct
ERGTAAQ

SEQ ID NO: 1085 - protein, 7 aa, synthetic construct
RNMQGDN

SEQ ID NO: 1086 - protein, 7 aa, synthetic construct
QGSWHPE

SEQ ID NO: 1087 - protein, 7 aa, synthetic construct
QLGGQPH

SEQ ID NO: 1088 - protein, 7 aa, synthetic construct
LVRKEEP

SEQ ID NO: 1089 - protein, 7 aa, synthetic construct
DTRGTFI

SEQ ID NO: 1090 - protein, 7 aa, synthetic construct
DHTRAYV

SEQ ID NO: 1091 - protein, 7 aa, synthetic construct
QESHRPG

SEQ ID NO: 1092 - protein, 7 aa, synthetic construct
VKGFGSA

SEQ ID NO: 1093 - protein, 7 aa, synthetic construct
SGKSQNV

SEQ ID NO: 1094 - protein, 7 aa, synthetic construct
IDSRPLQ

SEQ ID NO: 1095 - protein, 7 aa, synthetic construct
KFSDVPR

SEQ ID NO: 1096 - protein, 7 aa, synthetic construct
ATQSVMG

SEQ ID NO: 1097 - protein, 7 aa, synthetic construct
LQQGANS

SEQ ID NO: 1098 - protein, 7 aa, synthetic construct
VHQNGPN

SEQ ID NO: 1099 - protein, 7 aa, synthetic construct
AKNNEVM

SEQ ID NO: 1100 - protein, 7 aa, synthetic construct
IIGNKQF

SEQ ID NO: 1101 - protein, 7 aa, synthetic construct
LKGPPSQ

SEQ ID NO: 1102 - protein, 7 aa, synthetic construct
TKSGMVD

SEQ ID NO: 1103 - protein, 7 aa, synthetic construct
RQINDPE

SEQ ID NO: 1104 - protein, 7 aa, synthetic construct
AGGRGDM

SEQ ID NO: 1105 - protein, 7 aa, synthetic construct
APQHDYM

SEQ ID NO: 1106 - protein, 7 aa, synthetic construct
KGNPPYP

SEQ ID NO: 1107 - protein, 7 aa, synthetic construct
SNLENRA

SEQ ID NO: 1108 - protein, 7 aa, synthetic construct
YPPMNST

SEQ ID NO: 1109 - protein, 7 aa, synthetic construct
LSNDKGQ

SEQ ID NO: 1110 - protein, 7 aa, synthetic construct
QERQTFS

SEQ ID NO: 1111 - protein, 7 aa, synthetic construct
NTAPRDP

SEQ ID NO: 1112 - protein, 7 aa, synthetic construct
KTQNTSD

SEQ ID NO: 1113 - protein, 7 aa, synthetic construct
KSSNPSP

SEQ ID NO: 1114 - protein, 7 aa, synthetic construct
GASHNER

SEQ ID NO: 1115 - protein, 7 aa, synthetic construct
DGSVYKL

SEQ ID NO: 1116 - protein, 7 aa, synthetic construct
TQKVGKE

SEQ ID NO: 1117 - protein, 7 aa, synthetic construct
ATGHPYP

SEQ ID NO: 1118 - protein, 7 aa, synthetic construct
THGMNTM

SEQ ID NO: 1119 - protein, 7 aa, synthetic construct
WTPTQTQ

SEQ ID NO: 1120 - protein, 7 aa, synthetic construct
GFKTMDM

SEQ ID NO: 1121 - protein, 7 aa, synthetic construct
AQTAKMS

SEQ ID NO: 1122 - protein, 7 aa, synthetic construct
SSSTQQG

SEQ ID NO: 1123 - protein, 7 aa, synthetic construct
KPGQTTA

SEQ ID NO: 1124 - protein, 7 aa, synthetic construct
ERTETKN

SEQ ID NO: 1125 - protein, 7 aa, synthetic construct
MKTEMRM

SEQ ID NO: 1126 - protein, 7 aa, synthetic construct
VFKGREG

SEQ ID NO: 1127 - protein, 7 aa, synthetic construct
RGNQDMY

SEQ ID NO: 1128 - protein, 7 aa, synthetic construct
AGTNTKI

SEQ ID NO: 1129 - protein, 7 aa, synthetic construct
AHPQARV

SEQ ID NO: 1130 - protein, 7 aa, synthetic construct
LEPSFRG

SEQ ID NO: 1131 - protein, 7 aa, synthetic construct
DTKGDMR

SEQ ID NO: 1132 - protein, 7 aa, synthetic construct
IFGGRGD

SEQ ID NO: 1133 - protein, 7 aa, synthetic construct
HMREHQA

SEQ ID NO: 1134 - protein, 7 aa, synthetic construct
PMNSNHM

SEQ ID NO: 1135 - protein, 7 aa, synthetic construct
SQQQAVS

SEQ ID NO: 1136 - protein, 7 aa, synthetic construct
FAKEKFG

SEQ ID NO: 1137 - protein, 7 aa, synthetic construct
QPQHGVA

SEQ ID NO: 1138 - protein, 7 aa, synthetic construct
QPTNFGA

SEQ ID NO: 1139 - protein, 7 aa, synthetic construct
GEKANFT

SEQ ID NO: 1140 - protein, 7 aa, synthetic construct
IGTMHKY

SEQ ID NO: 1141 - protein, 7 aa, synthetic construct
IVEARTG

SEQ ID NO: 1142 - protein, 7 aa, synthetic construct
NQKATEN

SEQ ID NO: 1143 - protein, 7 aa, synthetic construct
AANRAET

SEQ ID NO: 1144 - protein, 7 aa, synthetic construct
GNHVVYA

SEQ ID NO: 1145 - protein, 7 aa, synthetic construct
KDRHEEL

SEQ ID NO: 1146 - protein, 7 aa, synthetic construct
TQALSGA

SEQ ID NO: 1147 - protein, 7 aa, synthetic construct
KPSPMVA

SEQ ID NO: 1148 - protein, 7 aa, synthetic construct
PSPRTLP

SEQ ID NO: 1149 - protein, 7 aa, synthetic construct
HQKPQTD

SEQ ID NO: 1150 - protein, 7 aa, synthetic construct
PPSKGFV

SEQ ID NO: 1151 - protein, 7 aa, synthetic construct
KSTYPTT

SEQ ID NO: 1152 - protein, 7 aa, synthetic construct
GQEWNSP

SEQ ID NO: 1153 - protein, 7 aa, synthetic construct
LHLPTDK

SEQ ID NO: 1154 - protein, 7 aa, synthetic construct
NTATNDT

SEQ ID NO: 1155 - protein, 7 aa, synthetic construct
KPSVAGV

SEQ ID NO: 1156 - protein, 7 aa, synthetic construct
NEYRDKT

SEQ ID NO: 1157 - protein, 7 aa, synthetic construct
RMGLATP

SEQ ID NO: 1158 - protein, 7 aa, synthetic construct
GQRSMLD

SEQ ID NO: 1159 - protein, 7 aa, synthetic construct
MTAGRSS

SEQ ID NO: 1160 - protein, 7 aa, synthetic construct
PRVANNI

SEQ ID NO: 1161 - protein, 7 aa, synthetic construct
LMGKNQH

SEQ ID NO: 1162 - protein, 7 aa, synthetic construct
DGKHKLD

SEQ ID NO: 1163 - protein, 7 aa, synthetic construct
YSPRANI

SEQ ID NO: 1164 - protein, 7 aa, synthetic construct
DVNIKHG

SEQ ID NO: 1165 - protein, 7 aa, synthetic construct
QGAMQPN

SEQ ID NO: 1166 - protein, 7 aa, synthetic construct
GVNRFTE

SEQ ID NO: 1167 - protein, 7 aa, synthetic construct
TNPDIKK

SEQ ID NO: 1168 - protein, 7 aa, synthetic construct
RVDSFGD

SEQ ID NO: 1169 - protein, 7 aa, synthetic construct
DSKAKIA

SEQ ID NO: 1170 - protein, 7 aa, synthetic construct
STRPNLG

SEQ ID NO: 1171 - protein, 7 aa, synthetic construct
HAREYAS

SEQ ID NO: 1172 - protein, 7 aa, synthetic construct
HMKHEQI

SEQ ID NO: 1173 - protein, 7 aa, synthetic construct
LGRHEGV

SEQ ID NO: 1174 - protein, 7 aa, synthetic construct
RINGAHN

SEQ ID NO: 1175 - protein, 7 aa, synthetic construct
TSSSGDR

SEQ ID NO: 1176 - protein, 7 aa, synthetic construct
VRGAQPV

SEQ ID NO: 1177 - protein, 7 aa, synthetic construct
IRLGQSA

SEQ ID NO: 1178 - protein, 7 aa, synthetic construct
DMRQKNG

SEQ ID NO: 1179 - protein, 7 aa, synthetic construct
QKSDAKG

SEQ ID NO: 1180 - protein, 7 aa, synthetic construct
PTMGKGE

SEQ ID NO: 1181 - protein, 7 aa, synthetic construct
SAKENGI

SEQ ID NO: 1182 - protein, 7 aa, synthetic construct
GELGTRM

SEQ ID NO: 1183 - protein, 7 aa, synthetic construct
RHNLTTE

SEQ ID NO: 1184 - protein, 7 aa, synthetic construct
THHNSAL

SEQ ID NO: 1185 - protein, 7 aa, synthetic construct
PKHNDAN

SEQ ID NO: 1186 - protein, 7 aa, synthetic construct
VKNSNLV

SEQ ID NO: 1187 - protein, 7 aa, synthetic construct
RQVASQQ

SEQ ID NO: 1188 - protein, 7 aa, synthetic construct
YKAGSDI

SEQ ID NO: 1189 - protein, 7 aa, synthetic construct
NNRPLQH

SEQ ID NO: 1190 - protein, 7 aa, synthetic construct
MDFRHTA

SEQ ID NO: 1191 - protein, 7 aa, synthetic construct
AKHNNVS

SEQ ID NO: 1192 - protein, 7 aa, synthetic construct
NPRDTQG

SEQ ID NO: 1193 - protein, 7 aa, synthetic construct
MWNTNKD

SEQ ID NO: 1194 - protein, 7 aa, synthetic construct
IDRMQMQ

SEQ ID NO: 1195 - protein, 7 aa, synthetic construct
QFHTPKE

SEQ ID NO: 1196 - protein, 7 aa, synthetic construct
IDGRPFQ

SEQ ID NO: 1197 - protein, 7 aa, synthetic construct
MPKEDQK

SEQ ID NO: 1198 - protein, 7 aa, synthetic construct
DMFQAHG

SEQ ID NO: 1199 - protein, 7 aa, synthetic construct
EYKRDHP

SEQ ID NO: 1200 - protein, 7 aa, synthetic construct
MLSKHNL

SEQ ID NO: 1201 - protein, 7 aa, synthetic construct
IAGTTQK

SEQ ID NO: 1202 - protein, 7 aa, synthetic construct
QNHAQTF

SEQ ID NO: 1203 - protein, 7 aa, synthetic construct
GGIHREA

SEQ ID NO: 1204 - protein, 7 aa, synthetic construct
HVTMRGS

SEQ ID NO: 1205 - protein, 7 aa, synthetic construct
GAKFTEA

SEQ ID NO: 1206 - protein, 7 aa, synthetic construct
QDKHSAY

SEQ ID NO: 1207 - protein, 7 aa, synthetic construct
NTGMVVK

SEQ ID NO: 1208 - protein, 7 aa, synthetic construct
QASTGNR

SEQ ID NO: 1209 - protein, 7 aa, synthetic construct
HQHMSQS

SEQ ID NO: 1210 - protein, 7 aa, synthetic construct
ILRQSGN

SEQ ID NO: 1211 - protein, 7 aa, synthetic construct
KNSNQAY

SEQ ID NO: 1212 - protein, 7 aa, synthetic construct
YQNTQVM

SEQ ID NO: 1213 - protein, 7 aa, synthetic construct
RNSQIHG

SEQ ID NO: 1214 - protein, 7 aa, synthetic construct
VQGDRQG

SEQ ID NO: 1215 - protein, 7 aa, synthetic construct
KVQGQYM

SEQ ID NO: 1216 - protein, 7 aa, synthetic construct
TDNMHRA

SEQ ID NO: 1217 - protein, 7 aa, synthetic construct
VAQRHTG

SEQ ID NO: 1218 - protein, 7 aa, synthetic construct
HHRGSLE

SEQ ID NO: 1219 - protein, 7 aa, synthetic construct
TNSYSQT

SEQ ID NO: 1220 - protein, 7 aa, synthetic construct
STPNMTH

SEQ ID NO: 1221 - protein, 7 aa, synthetic construct
GGDRNDR

SEQ ID NO: 1222 - protein, 7 aa, synthetic construct
KNSPPNP

SEQ ID NO: 1223 - protein, 7 aa, synthetic construct
IMGLAAP

SEQ ID NO: 1224 - protein, 7 aa, synthetic construct
VTGQSMM

SEQ ID NO: 1225 - protein, 7 aa, synthetic construct
SHRADTP

SEQ ID NO: 1226 - protein, 7 aa, synthetic construct
DIKNQRI

SEQ ID NO: 1227 - protein, 7 aa, synthetic construct
GNGGFQG

SEQ ID NO: 1228 - protein, 7 aa, synthetic construct
QAHTRPG

SEQ ID NO: 1229 - protein, 7 aa, synthetic construct
IASRSGI

SEQ ID NO: 1230 - protein, 7 aa, synthetic construct
KYGNMTN

SEQ ID NO: 1231 - protein, 7 aa, synthetic construct
KVQAIAA

SEQ ID NO: 1232 - protein, 7 aa, synthetic construct
KHYNEEA

SEQ ID NO: 1233 - protein, 7 aa, synthetic construct
EVRNYEK

SEQ ID NO: 1234 - protein, 7 aa, synthetic construct
TSLARNE

SEQ ID NO: 1235 - protein, 7 aa, synthetic construct
TTRPGYN

SEQ ID NO: 1236 - protein, 7 aa, synthetic construct
RSTQATY

SEQ ID NO: 1237 - protein, 7 aa, synthetic construct
LKNGFMG

SEQ ID NO: 1238 - protein, 7 aa, synthetic construct
FQPHQGN

SEQ ID NO: 1239 - protein, 7 aa, synthetic construct
NPVPREV

SEQ ID NO: 1240 - protein, 7 aa, synthetic construct
FKRPSEE

SEQ ID NO: 1241 - protein, 7 aa, synthetic construct
YQIKSEA

SEQ ID NO: 1242 - protein, 7 aa, synthetic construct
PKKDNYA

SEQ ID NO: 1243 - protein, 7 aa, synthetic construct
AKGNPSE

SEQ ID NO: 1244 - protein, 7 aa, synthetic construct
FGVGTAK

SEQ ID NO: 1245 - protein, 7 aa, synthetic construct
ATKAPMF

SEQ ID NO: 1246 - protein, 7 aa, synthetic construct
NAYPDMK

SEQ ID NO: 1247 - protein, 7 aa, synthetic construct
IQHGVAG

SEQ ID NO: 1248 - protein, 7 aa, synthetic construct
IKKDSGG

SEQ ID NO: 1249 - protein, 7 aa, synthetic construct
NQRGHES

SEQ ID NO: 1250 - protein, 7 aa, synthetic construct
MADKVAH

SEQ ID NO: 1251 - protein, 7 aa, synthetic construct
IGMVKRE

SEQ ID NO: 1252 - protein, 7 aa, synthetic construct
RQPNHEI

SEQ ID NO: 1253 - protein, 7 aa, synthetic construct
LYQHAAP

SEQ ID NO: 1254 - protein, 7 aa, synthetic construct
VDKFGSK

SEQ ID NO: 1255 - protein, 7 aa, synthetic construct
QKLQTME

SEQ ID NO: 1256 - protein, 7 aa, synthetic construct
NFKLNKE

SEQ ID NO: 1257 - protein, 7 aa, synthetic construct
PTRHESM

SEQ ID NO: 1258 - protein, 7 aa, synthetic construct
RIASDET

SEQ ID NO: 1259 - protein, 7 aa, synthetic construct
SGINAKG

SEQ ID NO: 1260 - protein, 7 aa, synthetic construct
GQQLAQK

SEQ ID NO: 1261 - protein, 7 aa, synthetic construct
EKTSMDS

SEQ ID NO: 1262 - protein, 7 aa, synthetic construct
AQHNNYV

SEQ ID NO: 1263 - protein, 7 aa, synthetic construct
PKNLKEL

SEQ ID NO: 1264 - protein, 7 aa, synthetic construct
MGPTMFA

SEQ ID NO: 1265 - protein, 7 aa, synthetic construct
NHITTGG

SEQ ID NO: 1266 - protein, 7 aa, synthetic construct
GSGIIKV

SEQ ID NO: 1267 - protein, 7 aa, synthetic construct
KPNPAIM

SEQ ID NO: 1268 - protein, 7 aa, synthetic construct
GNGGRQY

SEQ ID NO: 1269 - protein, 7 aa, synthetic construct
NFEKIDK

SEQ ID NO: 1270 - protein, 7 aa, synthetic construct
YREEGHN

SEQ ID NO: 1271 - protein, 7 aa, synthetic construct
QRKEETR

SEQ ID NO: 1272 - protein, 7 aa, synthetic construct
RQKDEQG

SEQ ID NO: 1273 - protein, 7 aa, synthetic construct
QRNGEAG

SEQ ID NO: 1274 - protein, 7 aa, synthetic construct
MGDTQRY

SEQ ID NO: 1275 - protein, 7 aa, synthetic construct
LTHRQNA

SEQ ID NO: 1276 - protein, 7 aa, synthetic construct
DKLGKSL

SEQ ID NO: 1277 - protein, 7 aa, synthetic construct
KGQNLLA

SEQ ID NO: 1278 - protein, 7 aa, synthetic construct
APREHTL

SEQ ID NO: 1279 - protein, 7 aa, synthetic construct
SPPFLTG

SEQ ID NO: 1280 - protein, 7 aa, synthetic construct
RQEGVGG

SEQ ID NO: 1281 - protein, 7 aa, synthetic construct
SNGRDDG

SEQ ID NO: 1282 - protein, 7 aa, synthetic construct
YTPHDKV

SEQ ID NO: 1283 - protein, 7 aa, synthetic construct
QFNTSQM

SEQ ID NO: 1284 - protein, 7 aa, synthetic construct
TSSGSVS

SEQ ID NO: 1285 - protein, 7 aa, synthetic construct
HQSGGHI

SEQ ID NO: 1286 - protein, 7 aa, synthetic construct
LSGITHP

SEQ ID NO: 1287 - protein, 7 aa, synthetic construct
NPYTKVH

SEQ ID NO: 1288 - protein, 7 aa, synthetic construct
ERPQTGK

SEQ ID NO: 1289 - protein, 7 aa, synthetic construct
ASRQGQE

SEQ ID NO: 1290 - protein, 7 aa, synthetic construct
KKVNEGY

SEQ ID NO: 1291 - protein, 7 aa, synthetic construct
QKHMSEM

SEQ ID NO: 1292 - protein, 7 aa, synthetic construct
TQPAYTM

SEQ ID NO: 1293 - protein, 7 aa, synthetic construct
QIREGRE

SEQ ID NO: 1294 - protein, 7 aa, synthetic construct
NMAPLGG

SEQ ID NO: 1295 - protein, 7 aa, synthetic construct
VKGEYPM

SEQ ID NO: 1296 - protein, 7 aa, synthetic construct
VKQDPAQ

SEQ ID NO: 1297 - protein, 7 aa, synthetic construct
MTKLAAA

SEQ ID NO: 1298 - protein, 7 aa, synthetic construct
YENSLKS

SEQ ID NO: 1299 - protein, 7 aa, synthetic construct
NFLSKMG

SEQ ID NO: 1300 - protein, 7 aa, synthetic construct
FRTNDAQ

SEQ ID NO: 1301 - protein, 7 aa, synthetic construct
SDKKVDK

SEQ ID NO: 1302 - protein, 7 aa, synthetic construct
DKKENHA

SEQ ID NO: 1303 - protein, 7 aa, synthetic construct
HARFPDS

SEQ ID NO: 1304 - protein, 7 aa, synthetic construct
DETKYKP

SEQ ID NO: 1305 - protein, 7 aa, synthetic construct
VPSRNTT

SEQ ID NO: 1306 - protein, 7 aa, synthetic construct
KTASFPS

SEQ ID NO: 1307 - protein, 7 aa, synthetic construct
KMSGNGD

SEQ ID NO: 1308 - protein, 7 aa, synthetic construct
KDLKYAT

SEQ ID NO: 1309 - protein, 7 aa, synthetic construct
GLGGSVK

SEQ ID NO: 1310 - protein, 7 aa, synthetic construct
VGSLRTD

SEQ ID NO: 1311 - protein, 7 aa, synthetic construct
AHKNVIG

SEQ ID NO: 1312 - protein, 7 aa, synthetic construct
KIVHAAD

SEQ ID NO: 1313 - protein, 7 aa, synthetic construct
LSSYKNG

SEQ ID NO: 1314 - protein, 7 aa, synthetic construct
YGKTTTM

SEQ ID NO: 1315 - protein, 7 aa, synthetic construct
NNKMGQN

SEQ ID NO: 1316 - protein, 7 aa, synthetic construct
DVDSPPF

SEQ ID NO: 1317 - protein, 7 aa, synthetic construct
MERSKNA

SEQ ID NO: 1318 - protein, 7 aa, synthetic construct
SGHHEIS

SEQ ID NO: 1319 - protein, 7 aa, synthetic construct
GEGASRV

SEQ ID NO: 1320 - protein, 7 aa, synthetic construct
LNTAGKV

SEQ ID NO: 1321 - protein, 7 aa, synthetic construct
GANKADQ

SEQ ID NO: 1322 - protein, 7 aa, synthetic construct
RHGIKEV

SEQ ID NO: 1323 - protein, 7 aa, synthetic construct
YGMGPPA

SEQ ID NO: 1324 - protein, 7 aa, synthetic construct
TRMPVTS

SEQ ID NO: 1325 - protein, 7 aa, synthetic construct
ARPSNTT

SEQ ID NO: 1326 - protein, 7 aa, synthetic construct
LGNMHQM

SEQ ID NO: 1327 - protein, 7 aa, synthetic construct
IWKVESD

SEQ ID NO: 1328 - protein, 7 aa, synthetic construct
TKYTYTP

SEQ ID NO: 1329 - protein, 7 aa, synthetic construct
DGHRAMG

SEQ ID NO: 1330 - protein, 7 aa, synthetic construct
RMSDNGT

SEQ ID NO: 1331 - protein, 7 aa, synthetic construct
HAGHREI

SEQ ID NO: 1332 - protein, 7 aa, synthetic construct
LDRRDRD

SEQ ID NO: 1333 - protein, 7 aa, synthetic construct
GDHIHVM

SEQ ID NO: 1334 - protein, 7 aa, synthetic construct
VMSMRSE

SEQ ID NO: 1335 - protein, 7 aa, synthetic construct
DKQKQNE

SEQ ID NO: 1336 - protein, 7 aa, synthetic construct
KEVSGIQ

SEQ ID NO: 1337 - protein, 7 aa, synthetic construct
SAPPVTK

SEQ ID NO: 1338 - protein, 7 aa, synthetic construct
TKGTIKE

SEQ ID NO: 1339 - protein, 7 aa, synthetic construct
LMGPNSV

SEQ ID NO: 1340 - protein, 7 aa, synthetic construct
TKQIHDP

SEQ ID NO: 1341 - protein, 7 aa, synthetic construct
RNNNQGM

SEQ ID NO: 1342 - protein, 7 aa, synthetic construct
NFAGRHD

SEQ ID NO: 1343 - protein, 7 aa, synthetic construct
VVNVKHT

SEQ ID NO: 1344 - protein, 7 aa, synthetic construct
QEKVSVY

SEQ ID NO: 1345 - protein, 7 aa, synthetic construct
DFNNLAR

SEQ ID NO: 1346 - protein, 7 aa, synthetic construct
FHNSNNP

SEQ ID NO: 1347 - protein, 7 aa, synthetic construct
PRLQTPE

SEQ ID NO: 1348 - protein, 7 aa, synthetic construct
GKNETFI

SEQ ID NO: 1349 - protein, 7 aa, synthetic construct
HPPGLEY

SEQ ID NO: 1350 - protein, 7 aa, synthetic construct
NSINAAK

SEQ ID NO: 1351 - protein, 7 aa, synthetic construct
KHNKDNP

SEQ ID NO: 1352 - protein, 7 aa, synthetic construct
SGTLSVV

SEQ ID NO: 1353 - protein, 7 aa, synthetic construct
QAKANLI

SEQ ID NO: 1354 - protein, 7 aa, synthetic construct
TKFTGDD

SEQ ID NO: 1355 - protein, 7 aa, synthetic construct
KDVKGIM

SEQ ID NO: 1356 - protein, 7 aa, synthetic construct
KGSHGQD

SEQ ID NO: 1357 - protein, 7 aa, synthetic construct
RGEGHDT

SEQ ID NO: 1358 - protein, 7 aa, synthetic construct
QGTVGHA

SEQ ID NO: 1359 - protein, 7 aa, synthetic construct
GPKSEFM

SEQ ID NO: 1360 - protein, 7 aa, synthetic construct
TGHSGAF

SEQ ID NO: 1361 - protein, 7 aa, synthetic construct
GGNAKQG

SEQ ID NO: 1362 - protein, 7 aa, synthetic construct
LHSTNDK

SEQ ID NO: 1363 - protein, 7 aa, synthetic construct
RDRGTPS

SEQ ID NO: 1364 - protein, 7 aa, synthetic construct
KNHVVQD

SEQ ID NO: 1365 - protein, 7 aa, synthetic construct
FPTEYRD

SEQ ID NO: 1366 - protein, 7 aa, synthetic construct
HTTNAMM

SEQ ID NO: 1367 - protein, 7 aa, synthetic construct
KNQMMGP

SEQ ID NO: 1368 - protein, 7 aa, synthetic construct
QDNKPTN

SEQ ID NO: 1369 - protein, 7 aa, synthetic construct
TMKGIST

SEQ ID NO: 1370 - protein, 7 aa, synthetic construct
TKAYAEL

SEQ ID NO: 1371 - protein, 7 aa, synthetic construct
NTHAQAM

SEQ ID NO: 1372 - protein, 7 aa, synthetic construct
KTKDIQS

SEQ ID NO: 1373 - protein, 7 aa, synthetic construct
ADMNKYG

SEQ ID NO: 1374 - protein, 7 aa, synthetic construct
MQQRIDM

SEQ ID NO: 1375 - protein, 7 aa, synthetic construct
QLHATRV

SEQ ID NO: 1376 - protein, 7 aa, synthetic construct
GYAHAEK

SEQ ID NO: 1377 - protein, 7 aa, synthetic construct
KAQSHTI

SEQ ID NO: 1378 - protein, 7 aa, synthetic construct
KSADPMS

SEQ ID NO: 1379 - protein, 7 aa, synthetic construct
MRGPIEK

SEQ ID NO: 1380 - protein, 7 aa, synthetic construct
GMNLNSK

SEQ ID NO: 1381 - protein, 7 aa, synthetic construct
FKEMQHQ

SEQ ID NO: 1382 - protein, 7 aa, synthetic construct
SPHKSAP

SEQ ID NO: 1383 - protein, 7 aa, synthetic construct
GTTFREN

SEQ ID NO: 1384 - protein, 7 aa, synthetic construct
TRNHPSE

SEQ ID NO: 1385 - protein, 7 aa, synthetic construct
DPVRREQ

SEQ ID NO: 1386 - protein, 7 aa, synthetic construct
YTQADAG

SEQ ID NO: 1387 - protein, 7 aa, synthetic construct
MGNLKQH

SEQ ID NO: 1388 - protein, 7 aa, synthetic construct
FTASSSS

SEQ ID NO: 1389 - protein, 7 aa, synthetic construct
KGPVNLT

SEQ ID NO: 1390 - protein, 7 aa, synthetic construct
MKDMVRQ

SEQ ID NO: 1391 - protein, 7 aa, synthetic construct
YGSEPNH

SEQ ID NO: 1392 - protein, 7 aa, synthetic construct
YGMQHHN

SEQ ID NO: 1393 - protein, 7 aa, synthetic construct
SIAKTSM

SEQ ID NO: 1394 - protein, 7 aa, synthetic construct
FYGDSKS

SEQ ID NO: 1395 - protein, 7 aa, synthetic construct
YKSTNHE

SEQ ID NO: 1396 - protein, 7 aa, synthetic construct
FGGSPKQ

SEQ ID NO: 1397 - protein, 7 aa, synthetic construct
EQPKRQS

SEQ ID NO: 1398 - protein, 7 aa, synthetic construct
TPVTRVT

SEQ ID NO: 1399 - protein, 7 aa, synthetic construct
GMKADDW

SEQ ID NO: 1400 - protein, 7 aa, synthetic construct
PHAGPIP

SEQ ID NO: 1401 - protein, 7 aa, synthetic construct
YVHRMDA

SEQ ID NO: 1402 - protein, 7 aa, synthetic construct
NPLAGKV

SEQ ID NO: 1403 - protein, 7 aa, synthetic construct
YNTSNGS

SEQ ID NO: 1404 - protein, 7 aa, synthetic construct
RKQLDIA

SEQ ID NO: 1405 - protein, 7 aa, synthetic construct
GMGAVKY

SEQ ID NO: 1406 - protein, 7 aa, synthetic construct
NQANMKM

SEQ ID NO: 1407 - protein, 7 aa, synthetic construct
PDRRQIT

SEQ ID NO: 1408 - protein, 7 aa, synthetic construct
QAGMTRH

SEQ ID NO: 1409 - protein, 7 aa, synthetic construct
MSGPVHT

SEQ ID NO: 1410 - protein, 7 aa, synthetic construct
LNSRHGQ

SEQ ID NO: 1411 - protein, 7 aa, synthetic construct
AQGQKEW

SEQ ID NO: 1412 - protein, 7 aa, synthetic construct
MRVAKEA

SEQ ID NO: 1413 - protein, 7 aa, synthetic construct
SVPVIKH

SEQ ID NO: 1414 - protein, 7 aa, synthetic construct
MPKGPSQ

SEQ ID NO: 1415 - protein, 7 aa, synthetic construct
ILSTGKP

SEQ ID NO: 1416 - protein, 7 aa, synthetic construct
NKSNDNN

SEQ ID NO: 1417 - protein, 7 aa, synthetic construct
KNSENYS

SEQ ID NO: 1418 - protein, 7 aa, synthetic construct
KRSDAQM

SEQ ID NO: 1419 - protein, 7 aa, synthetic construct
LNGDRGA

SEQ ID NO: 1420 - protein, 7 aa, synthetic construct
KEFPGHE

SEQ ID NO: 1421 - protein, 7 aa, synthetic construct
NAWTNAE

SEQ ID NO: 1422 - protein, 7 aa, synthetic construct
QHAYESP

SEQ ID NO: 1423 - protein, 7 aa, synthetic construct
GQYQPRE

SEQ ID NO: 1424 - protein, 7 aa, synthetic construct
KINQNSV

SEQ ID NO: 1425 - protein, 7 aa, synthetic construct
QSAQKKD

SEQ ID NO: 1426 - protein, 7 aa, synthetic construct
KTQTQLY

SEQ ID NO: 1427 - protein, 7 aa, synthetic construct
ARIAPDH

SEQ ID NO: 1428 - protein, 7 aa, synthetic construct
AKMQHSE

SEQ ID NO: 1429 - protein, 7 aa, synthetic construct
DKHTPYS

SEQ ID NO: 1430 - protein, 7 aa, synthetic construct
VKPYPVA

SEQ ID NO: 1431 - protein, 7 aa, synthetic construct
SYAATDG

SEQ ID NO: 1432 - protein, 7 aa, synthetic construct
STGASPR

SEQ ID NO: 1433 - protein, 7 aa, synthetic construct
KERINAM

SEQ ID NO: 1434 - protein, 7 aa, synthetic construct
VIRREDV

SEQ ID NO: 1435 - protein, 7 aa, synthetic construct
NARSDFG

SEQ ID NO: 1436 - protein, 7 aa, synthetic construct
KYPYQEH

SEQ ID NO: 1437 - protein, 7 aa, synthetic construct
ENRTYMH

SEQ ID NO: 1438 - protein, 7 aa, synthetic construct
DTSKPSW

SEQ ID NO: 1439 - protein, 7 aa, synthetic construct
DAKMRFV

SEQ ID NO: 1440 - protein, 7 aa, synthetic construct
NVGVHAI

SEQ ID NO: 1441 - protein, 7 aa, synthetic construct
EQSSKMW

SEQ ID NO: 1442 - protein, 7 aa, synthetic construct
MQAQREI

SEQ ID NO: 1443 - protein, 7 aa, synthetic construct
LKHQPIG

SEQ ID NO: 1444 - protein, 7 aa, synthetic construct
GSAGTQA

SEQ ID NO: 1445 - protein, 7 aa, synthetic construct
FHNAANN

SEQ ID NO: 1446 - protein, 7 aa, synthetic construct
LNKAVLG

SEQ ID NO: 1447 - protein, 7 aa, synthetic construct
LFKDRAP

SEQ ID NO: 1448 - protein, 7 aa, synthetic construct
NQMRAPQ

SEQ ID NO: 1449 - protein, 7 aa, synthetic construct
MKQEVLR

SEQ ID NO: 1450 - protein, 7 aa, synthetic construct
WLNVTSA

SEQ ID NO: 1451 - protein, 7 aa, synthetic construct
SGDPPKG

SEQ ID NO: 1452 - protein, 7 aa, synthetic construct
KPHDSHV

SEQ ID NO: 1453 - protein, 7 aa, synthetic construct
GHAFKNG

SEQ ID NO: 1454 - protein, 7 aa, synthetic construct
NAYRRED

SEQ ID NO: 1455 - protein, 7 aa, synthetic construct
LERKTDT

SEQ ID NO: 1456 - protein, 7 aa, synthetic construct
AKRPIEL

SEQ ID NO: 1457 - protein, 7 aa, synthetic construct
AHHSPEE

SEQ ID NO: 1458 - protein, 7 aa, synthetic construct
WQNDAAP

SEQ ID NO: 1459 - protein, 7 aa, synthetic construct
NGDWHME

SEQ ID NO: 1460 - protein, 7 aa, synthetic construct
QTPKNVS

SEQ ID NO: 1461 - protein, 7 aa, synthetic construct
KGANWAD

SEQ ID NO: 1462 - protein, 7 aa, synthetic construct
VSERMRE

SEQ ID NO: 1463 - protein, 7 aa, synthetic construct
FVKSGTN

SEQ ID NO: 1464 - protein, 7 aa, synthetic construct
TKNQPNV

SEQ ID NO: 1465 - protein, 7 aa, synthetic construct
SGNNVKI

SEQ ID NO: 1466 - protein, 7 aa, synthetic construct
AQYHVAE

SEQ ID NO: 1467 - protein, 7 aa, synthetic construct
DIRNYGA

SEQ ID NO: 1468 - protein, 7 aa, synthetic construct
LNNQRTD

SEQ ID NO: 1469 - protein, 7 aa, synthetic construct
HSKNDNG

SEQ ID NO: 1470 - protein, 7 aa, synthetic construct
GQHGNHV

SEQ ID NO: 1471 - protein, 7 aa, synthetic construct
VAPDKVG

SEQ ID NO: 1472 - protein, 7 aa, synthetic construct
YGPRQST

SEQ ID NO: 1473 - protein, 7 aa, synthetic construct
LKTQMTI

SEQ ID NO: 1474 - protein, 7 aa, synthetic construct
ANNTPKV

SEQ ID NO: 1475 - protein, 7 aa, synthetic construct
ASMQDKS

SEQ ID NO: 1476 - protein, 7 aa, synthetic construct
KAGIMAH

SEQ ID NO: 1477 - protein, 7 aa, synthetic construct
GRPHMMD

SEQ ID NO: 1478 - protein, 7 aa, synthetic construct
VKQQYKE

SEQ ID NO: 1479 - protein, 7 aa, synthetic construct
DNAVKVL

SEQ ID NO: 1480 - protein, 7 aa, synthetic construct
LQQKLPS

SEQ ID NO: 1481 - protein, 7 aa, synthetic construct
FSKYHEG

SEQ ID NO: 1482 - protein, 7 aa, synthetic construct
HRSDTSL

SEQ ID NO: 1483 - protein, 7 aa, synthetic construct
YNSFVKS

SEQ ID NO: 1484 - protein, 7 aa, synthetic construct
TSTKFSP

SEQ ID NO: 1485 - protein, 7 aa, synthetic construct
KPTCQSC

SEQ ID NO: 1486 - protein, 7 aa, synthetic construct
SRMSHQP

SEQ ID NO: 1487 - protein, 7 aa, synthetic construct
VAQPYKF

SEQ ID NO: 1488 - protein, 7 aa, synthetic construct
KNSVQGM

SEQ ID NO: 1489 - protein, 7 aa, synthetic construct
PAARERP

SEQ ID NO: 1490 - protein, 7 aa, synthetic construct
YLQHEVP

SEQ ID NO: 1491 - protein, 7 aa, synthetic construct
GSKTQAP

SEQ ID NO: 1492 - protein, 7 aa, synthetic construct
TVRQISN

SEQ ID NO: 1493 - protein, 7 aa, synthetic construct
KKTQGEI

SEQ ID NO: 1494 - protein, 7 aa, synthetic construct
NSHNKPA

SEQ ID NO: 1495 - protein, 7 aa, synthetic construct
KYPITEA

SEQ ID NO: 1496 - protein, 7 aa, synthetic construct
HRVDSYG

SEQ ID NO: 1497 - protein, 7 aa, synthetic construct
VYDKGMA

SEQ ID NO: 1498 - protein, 7 aa, synthetic construct
THVSPSN

SEQ ID NO: 1499 - protein, 7 aa, synthetic construct
FNPVNRE

SEQ ID NO: 1500 - protein, 7 aa, synthetic construct
QKHVSVP

SEQ ID NO: 1501 - protein, 7 aa, synthetic construct
AEGRNPS

SEQ ID NO: 1502 - protein, 7 aa, synthetic construct
MNSPVHD

SEQ ID NO: 1503 - protein, 7 aa, synthetic construct
GREFVTQ

SEQ ID NO: 1504 - protein, 7 aa, synthetic construct
TAHLAAQ

SEQ ID NO: 1505 - protein, 7 aa, synthetic construct
DKKNGNH

SEQ ID NO: 1506 - protein, 7 aa, synthetic construct
APSPQFR

SEQ ID NO: 1507 - protein, 7 aa, synthetic construct
RNPEWGV

SEQ ID NO: 1508 - protein, 7 aa, synthetic construct
HMQRGMQ

SEQ ID NO: 1509 - protein, 7 aa, synthetic construct
PHAGKAV

SEQ ID NO: 1510 - protein, 7 aa, synthetic construct
TSRLNSA

SEQ ID NO: 1511 - protein, 7 aa, synthetic construct
FKGANPI

SEQ ID NO: 1512 - protein, 7 aa, synthetic construct
TRDIGQN

SEQ ID NO: 1513 - protein, 7 aa, synthetic construct
DKRDVLF

SEQ ID NO: 1514 - protein, 7 aa, synthetic construct
VGGGGFI

SEQ ID NO: 1515 - protein, 7 aa, synthetic construct
TTERRDQ

SEQ ID NO: 1516 - protein, 7 aa, synthetic construct
AGTRIMA

SEQ ID NO: 1517 - protein, 7 aa, synthetic construct
NIANRPE

SEQ ID NO: 1518 - protein, 7 aa, synthetic construct
NRVSPAI

SEQ ID NO: 1519 - protein, 7 aa, synthetic construct
FSYKETG

SEQ ID NO: 1520 - protein, 7 aa, synthetic construct
TLGATTH

SEQ ID NO: 1521 - protein, 7 aa, synthetic construct
QKPESVV

SEQ ID NO: 1522 - protein, 7 aa, synthetic construct
QMQGAPY

SEQ ID NO: 1523 - protein, 7 aa, synthetic construct
SLTANDR

SEQ ID NO: 1524 - protein, 7 aa, synthetic construct
MGKSPSY

SEQ ID NO: 1525 - protein, 7 aa, synthetic construct
PPAKGAN

SEQ ID NO: 1526 - protein, 7 aa, synthetic construct
ARQELQA

SEQ ID NO: 1527 - protein, 7 aa, synthetic construct
NPLTGHN

SEQ ID NO: 1528 - protein, 7 aa, synthetic construct
SNAHLQG

SEQ ID NO: 1529 - protein, 7 aa, synthetic construct
GGGKAES

SEQ ID NO: 1530 - protein, 7 aa, synthetic construct
MYERKPE

SEQ ID NO: 1531 - protein, 7 aa, synthetic construct
MSPQFAG

SEQ ID NO: 1532 - protein, 7 aa, synthetic construct
SQYNAKE

SEQ ID NO: 1533 - protein, 7 aa, synthetic construct
NERYQMT

SEQ ID NO: 1534 - protein, 7 aa, synthetic construct
RPSDSDY

SEQ ID NO: 1535 - protein, 7 aa, synthetic construct
QPKNEQR

SEQ ID NO: 1536 - protein, 7 aa, synthetic construct
NIQKGTF

SEQ ID NO: 1537 - protein, 7 aa, synthetic construct
DPQYTRV

SEQ ID NO: 1538 - protein, 7 aa, synthetic construct
NQPNYAK

SEQ ID NO: 1539 - protein, 7 aa, synthetic construct
PAAKTEG

SEQ ID NO: 1540 - protein, 7 aa, synthetic construct
WNEHGVR

SEQ ID NO: 1541 - protein, 7 aa, synthetic construct
DRPQAAK

SEQ ID NO: 1542 - protein, 7 aa, synthetic construct
NIQKGSY

SEQ ID NO: 1543 - protein, 7 aa, synthetic construct
SDKHMHD

SEQ ID NO: 1544 - protein, 7 aa, synthetic construct
NGIYSQD

SEQ ID NO: 1545 - protein, 7 aa, synthetic construct
YQKDSNL

SEQ ID NO: 1546 - protein, 7 aa, synthetic construct
NYKIGTT

SEQ ID NO: 1547 - protein, 7 aa, synthetic construct
LGSSWKG

SEQ ID NO: 1548 - protein, 7 aa, synthetic construct
FMQSTVS

SEQ ID NO: 1549 - protein, 7 aa, synthetic construct
GGTPGKG

SEQ ID NO: 1550 - protein, 7 aa, synthetic construct
DKPQKLG

SEQ ID NO: 1551 - protein, 7 aa, synthetic construct
GNMKGNS

SEQ ID NO: 1552 - protein, 7 aa, synthetic construct
SAMKESF

SEQ ID NO: 1553 - protein, 7 aa, synthetic construct
DTSQKQA

SEQ ID NO: 1554 - protein, 7 aa, synthetic construct
NPDRGRD

SEQ ID NO: 1555 - protein, 7 aa, synthetic construct
PGHEGLG

SEQ ID NO: 1556 - protein, 7 aa, synthetic construct
RVHNEEV

SEQ ID NO: 1557 - protein, 7 aa, synthetic construct
LVYKDQV

SEQ ID NO: 1558 - protein, 7 aa, synthetic construct
GQQQRDS

SEQ ID NO: 1559 - protein, 7 aa, synthetic construct
HAKASAF

SEQ ID NO: 1560 - protein, 7 aa, synthetic construct
AKSQFEH

SEQ ID NO: 1561 - protein, 7 aa, synthetic construct
HTSIGKD

SEQ ID NO: 1562 - protein, 7 aa, synthetic construct
ARAIEGK

SEQ ID NO: 1563 - protein, 7 aa, synthetic construct
WKNERLA

SEQ ID NO: 1564 - protein, 7 aa, synthetic construct
MNGVVQT

SEQ ID NO: 1565 - protein, 7 aa, synthetic construct
SHDRPQQ

SEQ ID NO: 1566 - protein, 7 aa, synthetic construct
MHGQGHL

SEQ ID NO: 1567 - protein, 7 aa, synthetic construct
TMPRQTQ

SEQ ID NO: 1568 - protein, 7 aa, synthetic construct
VPSNHVM

SEQ ID NO: 1569 - protein, 7 aa, synthetic construct
RQDSMAA

SEQ ID NO: 1570 - protein, 7 aa, synthetic construct
SARTAQM

SEQ ID NO: 1571 - protein, 7 aa, synthetic construct
TKGYSAM

SEQ ID NO: 1572 - protein, 7 aa, synthetic construct
DEKWPER

SEQ ID NO: 1573 - protein, 7 aa, synthetic construct
PGQVPPY

SEQ ID NO: 1574 - protein, 7 aa, synthetic construct
VFNTDKM

SEQ ID NO: 1575 - protein, 7 aa, synthetic construct
KDNKIMI

SEQ ID NO: 1576 - protein, 7 aa, synthetic construct
GSVYKGG

SEQ ID NO: 1577 - protein, 7 aa, synthetic construct
NHQAHPV

SEQ ID NO: 1578 - protein, 7 aa, synthetic construct
KTNALRD

SEQ ID NO: 1579 - protein, 7 aa, synthetic construct
SMKTSAV

SEQ ID NO: 1580 - protein, 7 aa, synthetic construct
TPNMKQD

SEQ ID NO: 1581 - protein, 7 aa, synthetic construct
DTTMGQG

SEQ ID NO: 1582 - protein, 7 aa, synthetic construct
KQKPTLD

SEQ ID NO: 1583 - protein, 7 aa, synthetic construct
RQHTQME

SEQ ID NO: 1584 - protein, 7 aa, synthetic construct
NEGRKNA

SEQ ID NO: 1585 - protein, 7 aa, synthetic construct
DRGNQMG

SEQ ID NO: 1586 - protein, 7 aa, synthetic construct
GHKNSFA

SEQ ID NO: 1587 - protein, 7 aa, synthetic construct
NTEYKGA

SEQ ID NO: 1588 - protein, 7 aa, synthetic construct
RSQSAES

SEQ ID NO: 1589 - protein, 7 aa, synthetic construct
YHDTWKD

SEQ ID NO: 1590 - protein, 7 aa, synthetic construct
GEMREKG

SEQ ID NO: 1591 - protein, 7 aa, synthetic construct
QMANVKA

SEQ ID NO: 1592 - protein, 7 aa, synthetic construct
SQGQRGE

SEQ ID NO: 1593 - protein, 7 aa, synthetic construct
TMSAAME

SEQ ID NO: 1594 - protein, 7 aa, synthetic construct
TSMMMKG

SEQ ID NO: 1595 - protein, 7 aa, synthetic construct
HNNLSHG

SEQ ID NO: 1596 - protein, 7 aa, synthetic construct
KEEFKPY

SEQ ID NO: 1597 - protein, 7 aa, synthetic construct
TMATNPP

SEQ ID NO: 1598 - protein, 7 aa, synthetic construct
MADRMGN

SEQ ID NO: 1599 - protein, 7 aa, synthetic construct
NPAPKTS

SEQ ID NO: 1600 - protein, 7 aa, synthetic construct
KYPDNSG

SEQ ID NO: 1601 - protein, 7 aa, synthetic construct
TGNTVPK

SEQ ID NO: 1602 - protein, 7 aa, synthetic construct
EWRVEDA

SEQ ID NO: 1603 - protein, 7 aa, synthetic construct
NHNDSYK

SEQ ID NO: 1604 - protein, 7 aa, synthetic construct
QKMERTT

SEQ ID NO: 1605 - protein, 7 aa, synthetic construct
LPHRPVD

SEQ ID NO: 1606 - protein, 7 aa, synthetic construct
YGQVEHS

SEQ ID NO: 1607 - protein, 7 aa, synthetic construct
KFKPQDI

SEQ ID NO: 1608 - protein, 7 aa, synthetic construct
SQARSEV

SEQ ID NO: 1609 - protein, 7 aa, synthetic construct
IYKGGPF

SEQ ID NO: 1610 - protein, 7 aa, synthetic construct
AQLPVPH

SEQ ID NO: 1611 - protein, 7 aa, synthetic construct
YPDRLDQ

SEQ ID NO: 1612 - protein, 7 aa, synthetic construct
INKLGYA

SEQ ID NO: 1613 - protein, 7 aa, synthetic construct
IKDKAQL

SEQ ID NO: 1614 - protein, 7 aa, synthetic construct
KYGDMTR

SEQ ID NO: 1615 - protein, 7 aa, synthetic construct
TIPFPKG

SEQ ID NO: 1616 - protein, 7 aa, synthetic construct
YKTDPDQ

SEQ ID NO: 1617 - protein, 7 aa, synthetic construct
GKSQYPD

SEQ ID NO: 1618 - protein, 7 aa, synthetic construct
LPQKVHM

SEQ ID NO: 1619 - protein, 7 aa, synthetic construct
PRSNGQL

SEQ ID NO: 1620 - protein, 7 aa, synthetic construct
GRGEGSS

SEQ ID NO: 1621 - protein, 7 aa, synthetic construct
SAKMDTL

SEQ ID NO: 1622 - protein, 7 aa, synthetic construct
SKPPDGG

SEQ ID NO: 1623 - protein, 7 aa, synthetic construct
MHQAATL

SEQ ID NO: 1624 - protein, 7 aa, synthetic construct
QRPQGPA

SEQ ID NO: 1625 - protein, 7 aa, synthetic construct
NPRGPDE

SEQ ID NO: 1626 - protein, 7 aa, synthetic construct
RVPDMNA

SEQ ID NO: 1627 - protein, 7 aa, synthetic construct
NNKQWMD

SEQ ID NO: 1628 - protein, 7 aa, synthetic construct
GEQANRL

SEQ ID NO: 1629 - protein, 7 aa, synthetic construct
ATNRGFP

SEQ ID NO: 1630 - protein, 7 aa, synthetic construct
YPYNKRE

SEQ ID NO: 1631 - protein, 7 aa, synthetic construct
ASNTEKG

SEQ ID NO: 1632 - protein, 7 aa, synthetic construct
DVRVKMD

SEQ ID NO: 1633 - protein, 7 aa, synthetic construct
AAFQHGE

SEQ ID NO: 1634 - protein, 7 aa, synthetic construct
AQSKKDA

SEQ ID NO: 1635 - protein, 7 aa, synthetic construct
YKTGNMS

SEQ ID NO: 1636 - protein, 7 aa, synthetic construct
REKPSPV

SEQ ID NO: 1637 - protein, 7 aa, synthetic construct
YTYHDGK

SEQ ID NO: 1638 - protein, 7 aa, synthetic construct
DRMPQNA

SEQ ID NO: 1639 - protein, 7 aa, synthetic construct
LDKIKLS

SEQ ID NO: 1640 - protein, 7 aa, synthetic construct
GVRGPNP

SEQ ID NO: 1641 - protein, 7 aa, synthetic construct
PVMQKEK

SEQ ID NO: 1642 - protein, 7 aa, synthetic construct
LYESAHG

SEQ ID NO: 1643 - protein, 7 aa, synthetic construct
KGSEYAQ

SEQ ID NO: 1644 - protein, 7 aa, synthetic construct
ASSRADV

SEQ ID NO: 1645 - protein, 7 aa, synthetic construct
INHLNMP

SEQ ID NO: 1646 - protein, 7 aa, synthetic construct
LPRQAAL

SEQ ID NO: 1647 - protein, 7 aa, synthetic construct
KGSRLTE

SEQ ID NO: 1648 - protein, 7 aa, synthetic construct
LSKNASN

SEQ ID NO: 1649 - protein, 7 aa, synthetic construct
VNKTPMD

SEQ ID NO: 1650 - protein, 7 aa, synthetic construct
DRPEHNT

SEQ ID NO: 1651 - protein, 7 aa, synthetic construct
NPNAMPM

SEQ ID NO: 1652 - protein, 7 aa, synthetic construct
GQAGDQR

SEQ ID NO: 1653 - protein, 7 aa, synthetic construct
MDMKHGP

SEQ ID NO: 1654 - protein, 7 aa, synthetic construct
SVRKLEG

SEQ ID NO: 1655 - protein, 7 aa, synthetic construct
TNTGLQA

SEQ ID NO: 1656 - protein, 7 aa, synthetic construct
LNGKPGP

SEQ ID NO: 1657 - protein, 7 aa, synthetic construct
RLMNGSI

SEQ ID NO: 1658 - protein, 7 aa, synthetic construct
QNTAKDH

SEQ ID NO: 1659 - protein, 7 aa, synthetic construct
GANEHTM

SEQ ID NO: 1660 - protein, 7 aa, synthetic construct
KTTNELA

SEQ ID NO: 1661 - protein, 7 aa, synthetic construct
GSQNVSS

SEQ ID NO: 1662 - protein, 7 aa, synthetic construct
QKNQGWL

SEQ ID NO: 1663 - protein, 7 aa, synthetic construct
EHSKVTI

SEQ ID NO: 1664 - protein, 7 aa, synthetic construct
GDGGHHV

SEQ ID NO: 1665 - protein, 7 aa, synthetic construct
GQQAPSS

SEQ ID NO: 1666 - protein, 7 aa, synthetic construct
KVPMGHD

SEQ ID NO: 1667 - protein, 7 aa, synthetic construct
THMTAMV

SEQ ID NO: 1668 - protein, 7 aa, synthetic construct
HGRPPEN

SEQ ID NO: 1669 - protein, 7 aa, synthetic construct
PIKSEKQ

SEQ ID NO: 1670 - protein, 7 aa, synthetic construct
PKSAQDK

SEQ ID NO: 1671 - protein, 7 aa, synthetic construct
TQHPAIT

SEQ ID NO: 1672 - protein, 7 aa, synthetic construct
GKVNSAT

SEQ ID NO: 1673 - protein, 7 aa, synthetic construct
QPPGPPE

SEQ ID NO: 1674 - protein, 7 aa, synthetic construct
HQINIPA

SEQ ID NO: 1675 - protein, 7 aa, synthetic construct
DVGSSDR

SEQ ID NO: 1676 - protein, 7 aa, synthetic construct
TRLSNEP

SEQ ID NO: 1677 - protein, 7 aa, synthetic construct
MGKGVIV

SEQ ID NO: 1678 - protein, 7 aa, synthetic construct
MGKGYND

SEQ ID NO: 1679 - protein, 7 aa, synthetic construct
VKPAHDM

SEQ ID NO: 1680 - protein, 7 aa, synthetic construct
QQRSGFV

SEQ ID NO: 1681 - protein, 7 aa, synthetic construct
WLNHTEA

SEQ ID NO: 1682 - protein, 7 aa, synthetic construct
TPEYMSS

SEQ ID NO: 1683 - protein, 7 aa, synthetic construct
QSSNSLP

SEQ ID NO: 1684 - protein, 7 aa, synthetic construct
TDYSNSR

SEQ ID NO: 1685 - protein, 7 aa, synthetic construct
QHPPWNE

SEQ ID NO: 1686 - protein, 7 aa, synthetic construct
RQQAMAS

SEQ ID NO: 1687 - protein, 7 aa, synthetic construct
HQGMVRG

SEQ ID NO: 1688 - protein, 7 aa, synthetic construct
DRAANYG

SEQ ID NO: 1689 - protein, 7 aa, synthetic construct
YSQTGIL

SEQ ID NO: 1690 - protein, 7 aa, synthetic construct
GTENKVQ

SEQ ID NO: 1691 - protein, 7 aa, synthetic construct
GDRKGME

SEQ ID NO: 1692 - protein, 7 aa, synthetic construct
SHDTHFR

SEQ ID NO: 1693 - protein, 7 aa, synthetic construct
FNKDADW

SEQ ID NO: 1694 - protein, 7 aa, synthetic construct
ESSRQGH

SEQ ID NO: 1695 - protein, 7 aa, synthetic construct
NWTAGDP

SEQ ID NO: 1696 - protein, 7 aa, synthetic construct
LSYSGSQ

SEQ ID NO: 1697 - protein, 7 aa, synthetic construct
IEMRNRV

SEQ ID NO: 1698 - protein, 7 aa, synthetic construct
REAHATG

SEQ ID NO: 1699 - protein, 7 aa, synthetic construct
TKTVHWE

SEQ ID NO: 1700 - protein, 7 aa, synthetic construct
EAGKYTT

SEQ ID NO: 1701 - protein, 7 aa, synthetic construct
QEGRAHY

SEQ ID NO: 1702 - protein, 7 aa, synthetic construct
QKTVSNE

SEQ ID NO: 1703 - protein, 7 aa, synthetic construct
NYHAQNL

SEQ ID NO: 1704 - protein, 7 aa, synthetic construct
IKELGSH

SEQ ID NO: 1705 - protein, 7 aa, synthetic construct
ILPNQRG

SEQ ID NO: 1706 - protein, 7 aa, synthetic construct
AAGTKIN

SEQ ID NO: 1707 - protein, 7 aa, synthetic construct
VSGSVRP

SEQ ID NO: 1708 - protein, 7 aa, synthetic construct
VGDNLVR

SEQ ID NO: 1709 - protein, 7 aa, synthetic construct
QATSPQN

SEQ ID NO: 1710 - protein, 7 aa, synthetic construct
DKLHSHG

SEQ ID NO: 1711 - protein, 7 aa, synthetic construct
QDYQTHK

SEQ ID NO: 1712 - protein, 7 aa, synthetic construct
YAGSGTT

SEQ ID NO: 1713 - protein, 7 aa, synthetic construct
TENGDKM

SEQ ID NO: 1714 - protein, 7 aa, synthetic construct
MDHKIIT

SEQ ID NO: 1715 - protein, 7 aa, synthetic construct
KKIEIPT

SEQ ID NO: 1716 - protein, 7 aa, synthetic construct
DLPYGKG

SEQ ID NO: 1717 - protein, 7 aa, synthetic construct
KYQTQYP

SEQ ID NO: 1718 - protein, 7 aa, synthetic construct
RGPHVEV

SEQ ID NO: 1719 - protein, 7 aa, synthetic construct
DMGRATA

SEQ ID NO: 1720 - protein, 7 aa, synthetic construct
GPTPERP

SEQ ID NO: 1721 - protein, 7 aa, synthetic construct
YLPKDKS

SEQ ID NO: 1722 - protein, 7 aa, synthetic construct
QAKPADQ

SEQ ID NO: 1723 - protein, 7 aa, synthetic construct
TANGNMA

SEQ ID NO: 1724 - protein, 7 aa, synthetic construct
MQHGDRM

SEQ ID NO: 1725 - protein, 7 aa, synthetic construct
TPIEKNP

SEQ ID NO: 1726 - protein, 7 aa, synthetic construct
YHKAAVT

SEQ ID NO: 1727 - protein, 7 aa, synthetic construct
IGDSMSV

SEQ ID NO: 1728 - protein, 7 aa, synthetic construct
GGTGAPG

SEQ ID NO: 1729 - protein, 7 aa, synthetic construct
TARTMHP

SEQ ID NO: 1730 - protein, 7 aa, synthetic construct
KMHGAEW

SEQ ID NO: 1731 - protein, 7 aa, synthetic construct
LKKIEIT

SEQ ID NO: 1732 - protein, 7 aa, synthetic construct
KKGENMN

SEQ ID NO: 1733 - protein, 7 aa, synthetic construct
ANGLLPQ

SEQ ID NO: 1734 - protein, 7 aa, synthetic construct
NTVQGGM

SEQ ID NO: 1735 - protein, 7 aa, synthetic construct
LAKPNFA

SEQ ID NO: 1736 - protein, 7 aa, synthetic construct
MGVGKQM

SEQ ID NO: 1737 - protein, 7 aa, synthetic construct
SNTSMML

SEQ ID NO: 1738 - protein, 7 aa, synthetic construct
NPVQKPL

SEQ ID NO: 1739 - protein, 7 aa, synthetic construct
PALKEHK

SEQ ID NO: 1740 - protein, 7 aa, synthetic construct
TTRAMQP

SEQ ID NO: 1741 - protein, 7 aa, synthetic construct
FQIGHGA

SEQ ID NO: 1742 - protein, 7 aa, synthetic construct
FTATRND

SEQ ID NO: 1743 - protein, 7 aa, synthetic construct
HKPAQDV

SEQ ID NO: 1744 - protein, 7 aa, synthetic construct
AEYTPQP

SEQ ID NO: 1745 - protein, 7 aa, synthetic construct
ERQRTAE

SEQ ID NO: 1746 - protein, 7 aa, synthetic construct
LMQADVR

SEQ ID NO: 1747 - protein, 7 aa, synthetic construct
MHSDRMM

SEQ ID NO: 1748 - protein, 7 aa, synthetic construct
HGPNTMG

SEQ ID NO: 1749 - protein, 7 aa, synthetic construct
MNSNYSS

SEQ ID NO: 1750 - protein, 7 aa, synthetic construct
KREQPEE

SEQ ID NO: 1751 - protein, 7 aa, synthetic construct
ENVNQKA

SEQ ID NO: 1752 - protein, 7 aa, synthetic construct
NPPLFTP

SEQ ID NO: 1753 - protein, 7 aa, synthetic construct
MSDIKMQ

SEQ ID NO: 1754 - protein, 7 aa, synthetic construct
YPRSSVG

SEQ ID NO: 1755 - protein, 7 aa, synthetic construct
GKGPNGS

SEQ ID NO: 1756 - protein, 7 aa, synthetic construct
MDTGRTP

SEQ ID NO: 1757 - protein, 7 aa, synthetic construct
AFRSYPD

SEQ ID NO: 1758 - protein, 7 aa, synthetic construct
NFQERGA

SEQ ID NO: 1759 - protein, 7 aa, synthetic construct
WSQHNKV

SEQ ID NO: 1760 - protein, 7 aa, synthetic construct
TPSLIEA

SEQ ID NO: 1761 - protein, 7 aa, synthetic construct
PNPALGS

SEQ ID NO: 1762 - protein, 7 aa, synthetic construct
MREGWQD

SEQ ID NO: 1763 - protein, 7 aa, synthetic construct
HDERRGP

SEQ ID NO: 1764 - protein, 7 aa, synthetic construct
HNQVAAA

SEQ ID NO: 1765 - protein, 7 aa, synthetic construct
SYAQQSM

SEQ ID NO: 1766 - protein, 7 aa, synthetic construct
RQHLTDE

SEQ ID NO: 1767 - protein, 7 aa, synthetic construct
AHTRETS

SEQ ID NO: 1768 - protein, 7 aa, synthetic construct
TEFNNRT

SEQ ID NO: 1769 - protein, 7 aa, synthetic construct
AHKLGAN

SEQ ID NO: 1770 - protein, 7 aa, synthetic construct
ALKREVP

SEQ ID NO: 1771 - protein, 7 aa, synthetic construct
AHMHGQL

SEQ ID NO: 1772 - protein, 7 aa, synthetic construct
DQKYTRE

SEQ ID NO: 1773 - protein, 7 aa, synthetic construct
HFPQAPP

SEQ ID NO: 1774 - protein, 7 aa, synthetic construct
NQIGSFH

SEQ ID NO: 1775 - protein, 7 aa, synthetic construct
NGSETHP

SEQ ID NO: 1776 - protein, 7 aa, synthetic construct
DFSRGAD

SEQ ID NO: 1777 - protein, 7 aa, synthetic construct
VKAHMIE

SEQ ID NO: 1778 - protein, 7 aa, synthetic construct
HQRHDTA

SEQ ID NO: 1779 - protein, 7 aa, synthetic construct
DKNYQIG

SEQ ID NO: 1780 - protein, 7 aa, synthetic construct
EQNPRYY

SEQ ID NO: 1781 - protein, 7 aa, synthetic construct
HSPLGGG

SEQ ID NO: 1782 - protein, 7 aa, synthetic construct
GKAGDEN

SEQ ID NO: 1783 - protein, 7 aa, synthetic construct
GDMKGNI

SEQ ID NO: 1784 - protein, 7 aa, synthetic construct
QDPAMAG

SEQ ID NO: 1785 - protein, 7 aa, synthetic construct
PPRVEHT

SEQ ID NO: 1786 - protein, 7 aa, synthetic construct
MYGKMQD

SEQ ID NO: 1787 - protein, 7 aa, synthetic construct
IPSNQPA

SEQ ID NO: 1788 - protein, 7 aa, synthetic construct
NNMTTEY

SEQ ID NO: 1789 - protein, 7 aa, synthetic construct
LKPERTV

SEQ ID NO: 1790 - protein, 7 aa, synthetic construct
SRGDNWL

SEQ ID NO: 1791 - protein, 7 aa, synthetic construct
NMARIAA

SEQ ID NO: 1792 - protein, 7 aa, synthetic construct
RDFQHNG

SEQ ID NO: 1793 - protein, 7 aa, synthetic construct
QKNVHGN

SEQ ID NO: 1794 - protein, 7 aa, synthetic construct
VSKQYSG

SEQ ID NO: 1795 - protein, 7 aa, synthetic construct
TPNNAGP

SEQ ID NO: 1796 - protein, 7 aa, synthetic construct
WGGRQEV

SEQ ID NO: 1797 - protein, 7 aa, synthetic construct
FFPSGTH

SEQ ID NO: 1798 - protein, 7 aa, synthetic construct
IQSHHAG

SEQ ID NO: 1799 - protein, 7 aa, synthetic construct
IENQKYY

SEQ ID NO: 1800 - protein, 7 aa, synthetic construct
HDGQAHS

SEQ ID NO: 1801 - protein, 7 aa, synthetic construct
GAYTHAD

SEQ ID NO: 1802 - protein, 7 aa, synthetic construct
FIPRQAQ

SEQ ID NO: 1803 - protein, 7 aa, synthetic construct
NKHIMQT

SEQ ID NO: 1804 - protein, 7 aa, synthetic construct
QRSGTPI

SEQ ID NO: 1805 - protein, 7 aa, synthetic construct
FRKEDSN

SEQ ID NO: 1806 - protein, 7 aa, synthetic construct
HYKVNQS

SEQ ID NO: 1807 - protein, 7 aa, synthetic construct
KSDANML

SEQ ID NO: 1808 - protein, 7 aa, synthetic construct
GLGERAA

SEQ ID NO: 1809 - protein, 7 aa, synthetic construct
ARGAGQN

SEQ ID NO: 1810 - protein, 7 aa, synthetic construct
SRQGDMV

SEQ ID NO: 1811 - protein, 7 aa, synthetic construct
FHKPADI

SEQ ID NO: 1812 - protein, 7 aa, synthetic construct
NSPNFVA

SEQ ID NO: 1813 - protein, 7 aa, synthetic construct
SAKVVRE

SEQ ID NO: 1814 - protein, 7 aa, synthetic construct
WSKDSNH

SEQ ID NO: 1815 - protein, 7 aa, synthetic construct
QERTDYR

SEQ ID NO: 1816 - protein, 7 aa, synthetic construct
NKQNHYE

SEQ ID NO: 1817 - protein, 7 aa, synthetic construct
LAHNGAP

SEQ ID NO: 1818 - protein, 7 aa, synthetic construct
SQNHSTD

SEQ ID NO: 1819 - protein, 7 aa, synthetic construct
VKGPDYG

SEQ ID NO: 1820 - protein, 7 aa, synthetic construct
ASRANGF

SEQ ID NO: 1821 - protein, 7 aa, synthetic construct
RSMHDQP

SEQ ID NO: 1822 - protein, 7 aa, synthetic construct
PSGGDNK

SEQ ID NO: 1823 - protein, 7 aa, synthetic construct
VFPPANG

SEQ ID NO: 1824 - protein, 7 aa, synthetic construct
IGADSVK

SEQ ID NO: 1825 - protein, 7 aa, synthetic construct
KHYDIDP

SEQ ID NO: 1826 - protein, 7 aa, synthetic construct
LVRAKDA

SEQ ID NO: 1827 - protein, 7 aa, synthetic construct
MHQYGPA

SEQ ID NO: 1828 - protein, 7 aa, synthetic construct
SKEQRAD

SEQ ID NO: 1829 - protein, 7 aa, synthetic construct
MSAAMTS

SEQ ID NO: 1830 - protein, 7 aa, synthetic construct
PNQVNGA

SEQ ID NO: 1831 - protein, 7 aa, synthetic construct
KPAERVA

SEQ ID NO: 1832 - protein, 7 aa, synthetic construct
YMKFQPD

SEQ ID NO: 1833 - protein, 7 aa, synthetic construct
KHGASMP

SEQ ID NO: 1834 - protein, 7 aa, synthetic construct
LSPSMYA

SEQ ID NO: 1835 - protein, 7 aa, synthetic construct
SQRNPMG

SEQ ID NO: 1836 - protein, 7 aa, synthetic construct
YGHAARN

SEQ ID NO: 1837 - protein, 7 aa, synthetic construct
HFERDHP

SEQ ID NO: 1838 - protein, 7 aa, synthetic construct
TQNERHL

SEQ ID NO: 1839 - protein, 7 aa, synthetic construct
QFDMKTG

SEQ ID NO: 1840 - protein, 7 aa, synthetic construct
MRKDMST

SEQ ID NO: 1841 - protein, 7 aa, synthetic construct
SKLDLRA

SEQ ID NO: 1842 - protein, 7 aa, synthetic construct
LAGKLTY

SEQ ID NO: 1843 - protein, 7 aa, synthetic construct
DNRGTNI

SEQ ID NO: 1844 - protein, 7 aa, synthetic construct
AKPIPGN

SEQ ID NO: 1845 - protein, 7 aa, synthetic construct
YKPGYIQ

SEQ ID NO: 1846 - protein, 7 aa, synthetic construct
GNMRAGG

SEQ ID NO: 1847 - protein, 7 aa, synthetic construct
RDHTERS

SEQ ID NO: 1848 - protein, 7 aa, synthetic construct
YNGQRHI

SEQ ID NO: 1849 - protein, 7 aa, synthetic construct
NVRTKET

SEQ ID NO: 1850 - protein, 7 aa, synthetic construct
LRSTIAT

SEQ ID NO: 1851 - protein, 7 aa, synthetic construct
SHAKQQD

SEQ ID NO: 1852 - protein, 7 aa, synthetic construct
KIDNNMV

SEQ ID NO: 1853 - protein, 7 aa, synthetic construct
DGRGANS

SEQ ID NO: 1854 - protein, 7 aa, synthetic construct
LRPHPSE

SEQ ID NO: 1855 - protein, 7 aa, synthetic construct
PKQPYEG

SEQ ID NO: 1856 - protein, 7 aa, synthetic construct
SVAQKFP

SEQ ID NO: 1857 - protein, 7 aa, synthetic construct
KVNNNPQ

SEQ ID NO: 1858 - protein, 7 aa, synthetic construct
EYAGLPR

SEQ ID NO: 1859 - protein, 7 aa, synthetic construct
HNMANVS

SEQ ID NO: 1860 - protein, 7 aa, synthetic construct
KNNQDMV

SEQ ID NO: 1861 - protein, 7 aa, synthetic construct
VGNPQRN

SEQ ID NO: 1862 - protein, 7 aa, synthetic construct
NSAAAPN

SEQ ID NO: 1863 - protein, 7 aa, synthetic construct
QQHNISV

SEQ ID NO: 1864 - protein, 7 aa, synthetic construct
YIGQNTR

SEQ ID NO: 1865 - protein, 7 aa, synthetic construct
MSRPELT

SEQ ID NO: 1866 - protein, 7 aa, synthetic construct
RANDKLY

SEQ ID NO: 1867 - protein, 7 aa, synthetic construct
KVDAKGD

SEQ ID NO: 1868 - protein, 7 aa, synthetic construct
LPLRDNP

SEQ ID NO: 1869 - protein, 7 aa, synthetic construct
NSASRTV

SEQ ID NO: 1870 - protein, 7 aa, synthetic construct
LGSDVKA

SEQ ID NO: 1871 - protein, 7 aa, synthetic construct
TDHGAKA

SEQ ID NO: 1872 - protein, 7 aa, synthetic construct
SYGPKYE

SEQ ID NO: 1873 - protein, 7 aa, synthetic construct
RATAPVQ

SEQ ID NO: 1874 - protein, 7 aa, synthetic construct
TYSNNER

SEQ ID NO: 1875 - protein, 7 aa, synthetic construct
TDRAHNE

SEQ ID NO: 1876 - protein, 7 aa, synthetic construct
NIGMGAG

SEQ ID NO: 1877 - protein, 7 aa, synthetic construct
RGGYDKI

SEQ ID NO: 1878 - protein, 7 aa, synthetic construct
QMNKAMP

SEQ ID NO: 1879 - protein, 7 aa, synthetic construct
MQQMRGS

SEQ ID NO: 1880 - protein, 7 aa, synthetic construct
MQNDAQS

SEQ ID NO: 1881 - protein, 7 aa, synthetic construct
TEYRMSN

SEQ ID NO: 1882 - protein, 7 aa, synthetic construct
SQKTNAN

SEQ ID NO: 1883 - protein, 7 aa, synthetic construct
TNVSKIE

SEQ ID NO: 1884 - protein, 7 aa, synthetic construct
RKPTEET

SEQ ID NO: 1885 - protein, 7 aa, synthetic construct
GRNIASD

SEQ ID NO: 1886 - protein, 7 aa, synthetic construct
YDRAVTS

SEQ ID NO: 1887 - protein, 7 aa, synthetic construct
RFNDPTN

SEQ ID NO: 1888 - protein, 7 aa, synthetic construct
KTAQSEG

SEQ ID NO: 1889 - protein, 7 aa, synthetic construct
NPKLSSD

SEQ ID NO: 1890 - protein, 7 aa, synthetic construct
NQTTSKY

SEQ ID NO: 1891 - protein, 7 aa, synthetic construct
KVQMQNP

SEQ ID NO: 1892 - protein, 7 aa, synthetic construct
HRSMSHD

SEQ ID NO: 1893 - protein, 7 aa, synthetic construct
HHAQHHP

SEQ ID NO: 1894 - protein, 7 aa, synthetic construct
VTTESAY

SEQ ID NO: 1895 - protein, 7 aa, synthetic construct
SNYGNNV

SEQ ID NO: 1896 - protein, 7 aa, synthetic construct
SLHRDAD

SEQ ID NO: 1897 - protein, 7 aa, synthetic construct
DTPKGVA

SEQ ID NO: 1898 - protein, 7 aa, synthetic construct
RSQQYDT

SEQ ID NO: 1899 - protein, 7 aa, synthetic construct
NTRQTLE

SEQ ID NO: 1900 - protein, 7 aa, synthetic construct
KHATNIP

SEQ ID NO: 1901 - protein, 7 aa, synthetic construct
NKDHTYT

SEQ ID NO: 1902 - protein, 7 aa, synthetic construct
FIRGEMP

SEQ ID NO: 1903 - protein, 7 aa, synthetic construct
QAAYASG

SEQ ID NO: 1904 - protein, 7 aa, synthetic construct
DYSSPRN

SEQ ID NO: 1905 - protein, 7 aa, synthetic construct
VIPRSQD

SEQ ID NO: 1906 - protein, 7 aa, synthetic construct
QVPRGRD

SEQ ID NO: 1907 - protein, 7 aa, synthetic construct
FAEHSMA

SEQ ID NO: 1908 - protein, 7 aa, synthetic construct
GRKDYEQ

SEQ ID NO: 1909 - protein, 7 aa, synthetic construct
AKSATQG

SEQ ID NO: 1910 - protein, 7 aa, synthetic construct
PRPQQES

SEQ ID NO: 1911 - protein, 7 aa, synthetic construct
ELHFSAG

SEQ ID NO: 1912 - protein, 7 aa, synthetic construct
SQGTISM

SEQ ID NO: 1913 - protein, 7 aa, synthetic construct
TTAHTAR

SEQ ID NO: 1914 - protein, 7 aa, synthetic construct
GNRFSQP

SEQ ID NO: 1915 - protein, 7 aa, synthetic construct
MGSKHLD

SEQ ID NO: 1916 - protein, 7 aa, synthetic construct
SANMPRD

SEQ ID NO: 1917 - protein, 7 aa, synthetic construct
HHKNVNG

SEQ ID NO: 1918 - protein, 7 aa, synthetic construct
KQAIQTQ

SEQ ID NO: 1919 - protein, 7 aa, synthetic construct
GAKQTFG

SEQ ID NO: 1920 - protein, 7 aa, synthetic construct
SRPINND

SEQ ID NO: 1921 - protein, 7 aa, synthetic construct
PNRSWDE

SEQ ID NO: 1922 - protein, 7 aa, synthetic construct
QAGRPHD

SEQ ID NO: 1923 - protein, 7 aa, synthetic construct
MSTRVMS

SEQ ID NO: 1924 - protein, 7 aa, synthetic construct
AEGRVMP

SEQ ID NO: 1925 - protein, 7 aa, synthetic construct
NEVKWSS

SEQ ID NO: 1926 - protein, 7 aa, synthetic construct
FPSKGAV

SEQ ID NO: 1927 - protein, 7 aa, synthetic construct
VTQRVDP

SEQ ID NO: 1928 - protein, 7 aa, synthetic construct
NWGKAEE

SEQ ID NO: 1929 - protein, 7 aa, synthetic construct
NIKYPKD

SEQ ID NO: 1930 - protein, 7 aa, synthetic construct
MSTKTLQ

SEQ ID NO: 1931 - protein, 7 aa, synthetic construct
KHANAHD

SEQ ID NO: 1932 - protein, 7 aa, synthetic construct
NLAVPMD

SEQ ID NO: 1933 - protein, 7 aa, synthetic construct
DGRLGAS

SEQ ID NO: 1934 - protein, 7 aa, synthetic construct
NDMQKPS

SEQ ID NO: 1935 - protein, 7 aa, synthetic construct
IGMQSNY

SEQ ID NO: 1936 - protein, 7 aa, synthetic construct
MKDHINA

SEQ ID NO: 1937 - protein, 7 aa, synthetic construct
LEPAHLR

SEQ ID NO: 1938 - protein, 7 aa, synthetic construct
MHKMKAE

SEQ ID NO: 1939 - protein, 7 aa, synthetic construct
NPGMNHG

SEQ ID NO: 1940 - protein, 7 aa, synthetic construct
ETHKMTG

SEQ ID NO: 1941 - protein, 7 aa, synthetic construct
FGKGSDP

SEQ ID NO: 1942 - protein, 7 aa, synthetic construct
RNTMKVE

SEQ ID NO: 1943 - protein, 7 aa, synthetic construct
QQATRME

SEQ ID NO: 1944 - protein, 7 aa, synthetic construct
GNMDRGL

SEQ ID NO: 1945 - protein, 7 aa, synthetic construct
MTTKHVP

SEQ ID NO: 1946 - protein, 7 aa, synthetic construct
PPTQMSH

SEQ ID NO: 1947 - protein, 7 aa, synthetic construct
PHKSASM

SEQ ID NO: 1948 - protein, 7 aa, synthetic construct
PASKNIM

SEQ ID NO: 1949 - protein, 7 aa, synthetic construct
QSMRGED

SEQ ID NO: 1950 - protein, 7 aa, synthetic construct
NQPINKN

SEQ ID NO: 1951 - protein, 7 aa, synthetic construct
NYNAVRE

SEQ ID NO: 1952 - protein, 7 aa, synthetic construct
SDMRTVE

SEQ ID NO: 1953 - protein, 7 aa, synthetic construct
HPKNQVT

SEQ ID NO: 1954 - protein, 7 aa, synthetic construct
GSAMKSN

SEQ ID NO: 1955 - protein, 7 aa, synthetic construct
RPHNHEL

SEQ ID NO: 1956 - protein, 7 aa, synthetic construct
ENYRGSM

SEQ ID NO: 1957 - protein, 7 aa, synthetic construct
GNFSVSA

SEQ ID NO: 1958 - protein, 7 aa, synthetic construct
NGQPARP

SEQ ID NO: 1959 - protein, 7 aa, synthetic construct
FRIDGVA

SEQ ID NO: 1960 - protein, 7 aa, synthetic construct
THQTKGN

SEQ ID NO: 1961 - protein, 7 aa, synthetic construct
RDNHPKV

SEQ ID NO: 1962 - protein, 7 aa, synthetic construct
IHKEVTY

SEQ ID NO: 1963 - protein, 7 aa, synthetic construct
INPPLQK

SEQ ID NO: 1964 - protein, 7 aa, synthetic construct
QTFQSVP

SEQ ID NO: 1965 - protein, 7 aa, synthetic construct
GPPNLVQ

SEQ ID NO: 1966 - protein, 7 aa, synthetic construct
QGGRQPQ

SEQ ID NO: 1967 - protein, 7 aa, synthetic construct
VRAQQDY

SEQ ID NO: 1968 - protein, 7 aa, synthetic construct
NKDSMTV

SEQ ID NO: 1969 - protein, 7 aa, synthetic construct
LYAHRDA

SEQ ID NO: 1970 - protein, 7 aa, synthetic construct
VKNSTTT

SEQ ID NO: 1971 - protein, 7 aa, synthetic construct
EPPAPTG

SEQ ID NO: 1972 - protein, 7 aa, synthetic construct
LMKDSTH

SEQ ID NO: 1973 - protein, 7 aa, synthetic construct
YSNSTIT

SEQ ID NO: 1974 - protein, 7 aa, synthetic construct
PKEGHNY

SEQ ID NO: 1975 - protein, 7 aa, synthetic construct
MKALSYN

SEQ ID NO: 1976 - protein, 7 aa, synthetic construct
PAKMHDH

SEQ ID NO: 1977 - protein, 7 aa, synthetic construct
TAMAHGG

SEQ ID NO: 1978 - protein, 7 aa, synthetic construct
IRMTETG

SEQ ID NO: 1979 - protein, 7 aa, synthetic construct
TMSMNHV

SEQ ID NO: 1980 - protein, 7 aa, synthetic construct
IDMIKTP

SEQ ID NO: 1981 - protein, 7 aa, synthetic construct
TKSHFGT

SEQ ID NO: 1982 - protein, 7 aa, synthetic construct
LHSKGEG

SEQ ID NO: 1983 - protein, 7 aa, synthetic construct
EKKDVTY

SEQ ID NO: 1984 - protein, 7 aa, synthetic construct
QMHTSGV

SEQ ID NO: 1985 - protein, 7 aa, synthetic construct
SNSGIGA

SEQ ID NO: 1986 - protein, 7 aa, synthetic construct
HSTDSKA

SEQ ID NO: 1987 - protein, 7 aa, synthetic construct
HKVMMPD

SEQ ID NO: 1988 - protein, 7 aa, synthetic construct
EGPYSGR

SEQ ID NO: 1989 - protein, 7 aa, synthetic construct
FGPATPD

SEQ ID NO: 1990 - protein, 7 aa, synthetic construct
LKVMKEE

SEQ ID NO: 1991 - protein, 7 aa, synthetic construct
TSPIKFG

SEQ ID NO: 1992 - protein, 7 aa, synthetic construct
MTKPVQY

SEQ ID NO: 1993 - protein, 7 aa, synthetic construct
GKDKTLN

SEQ ID NO: 1994 - protein, 7 aa, synthetic construct
QKSGMYE

SEQ ID NO: 1995 - protein, 7 aa, synthetic construct
VTEYKHA

SEQ ID NO: 1996 - protein, 7 aa, synthetic construct
SRRDTPD

SEQ ID NO: 1997 - protein, 7 aa, synthetic construct
ASDRIAP

SEQ ID NO: 1998 - protein, 7 aa, synthetic construct
RSQDIRA

SEQ ID NO: 1999 - protein, 7 aa, synthetic construct
FSKPEKG

SEQ ID NO: 2000 - protein, 7 aa, synthetic construct
GLTTHSV

SEQ ID NO: 2001 - protein, 7 aa, synthetic construct
FGQTKTI

SEQ ID NO: 2002 - protein, 7 aa, synthetic construct
LMRQNDP

SEQ ID NO: 2003 - protein, 7 aa, synthetic construct
DKSGHQT

SEQ ID NO: 2004 - protein, 7 aa, synthetic construct
QTSHINV

SEQ ID NO: 2005 - protein, 7 aa, synthetic construct
TLGASHT

SEQ ID NO: 2006 - protein, 7 aa, synthetic construct
FQPNSLS

SEQ ID NO: 2007 - protein, 7 aa, synthetic construct
WPSKESQ

SEQ ID NO: 2008 - protein, 7 aa, synthetic construct
QDPPSAK

SEQ ID NO: 2009 - protein, 7 aa, synthetic construct
RSTPNHS

SEQ ID NO: 2010 - protein, 7 aa, synthetic construct
LDPHHQG

SEQ ID NO: 2011 - protein, 7 aa, synthetic construct
HVNSTHE

SEQ ID NO: 2012 - protein, 7 aa, synthetic construct
RGAQFAG

SEQ ID NO: 2013 - protein, 7 aa, synthetic construct
YPKVEKS

SEQ ID NO: 2014 - protein, 7 aa, synthetic construct
HEPYGTV

SEQ ID NO: 2015 - protein, 7 aa, synthetic construct
NRESAGH

SEQ ID NO: 2016 - protein, 7 aa, synthetic construct
WEREHKA

SEQ ID NO: 2017 - protein, 7 aa, synthetic construct
KSYPEVP

SEQ ID NO: 2018 - protein, 7 aa, synthetic construct
GNFTSAR

SEQ ID NO: 2019 - protein, 7 aa, synthetic construct
AQSIGDR

SEQ ID NO: 2020 - protein, 7 aa, synthetic construct
NSGTRMS

SEQ ID NO: 2021 - protein, 7 aa, synthetic construct
FMNTSID

SEQ ID NO: 2022 - protein, 7 aa, synthetic construct
EPKQNGK

SEQ ID NO: 2023 - protein, 7 aa, synthetic construct
DIGRGEF

SEQ ID NO: 2024 - protein, 7 aa, synthetic construct
RSFGGAD

SEQ ID NO: 2025 - protein, 7 aa, synthetic construct
GIKRDSI

SEQ ID NO: 2026 - protein, 7 aa, synthetic construct
FPFDETR

SEQ ID NO: 2027 - protein, 7 aa, synthetic construct
TSNTKPV

SEQ ID NO: 2028 - protein, 7 aa, synthetic construct
ERLGNDH

SEQ ID NO: 2029 - protein, 7 aa, synthetic construct
GNQQEQS

SEQ ID NO: 2030 - protein, 7 aa, synthetic construct
GQQKGGP

SEQ ID NO: 2031 - protein, 7 aa, synthetic construct
YIADHHA

SEQ ID NO: 2032 - protein, 7 aa, synthetic construct
AAKNKEM

SEQ ID NO: 2033 - protein, 7 aa, synthetic construct
FDSIQFS

SEQ ID NO: 2034 - protein, 7 aa, synthetic construct
AQQNVAH

SEQ ID NO: 2035 - protein, 7 aa, synthetic construct
IPKNTTV

SEQ ID NO: 2036 - protein, 7 aa, synthetic construct
RASPVGT

SEQ ID NO: 2037 - protein, 7 aa, synthetic construct
ANGQVAA

SEQ ID NO: 2038 - protein, 7 aa, synthetic construct
MKLGTED

SEQ ID NO: 2039 - protein, 7 aa, synthetic construct
HANVSHV

SEQ ID NO: 2040 - protein, 7 aa, synthetic construct
KPMPAMG

SEQ ID NO: 2041 - protein, 7 aa, synthetic construct
KREVVLT

SEQ ID NO: 2042 - protein, 7 aa, synthetic construct
AGPASSK

SEQ ID NO: 2043 - protein, 7 aa, synthetic construct
KDYPNAQ

SEQ ID NO: 2044 - protein, 7 aa, synthetic construct
NKYSIDG

SEQ ID NO: 2045 - protein, 7 aa, synthetic construct
AARDDQH

SEQ ID NO: 2046 - protein, 7 aa, synthetic construct
WKEDPVP

SEQ ID NO: 2047 - protein, 7 aa, synthetic construct
KNNANGN

SEQ ID NO: 2048 - protein, 7 aa, synthetic construct
FQTKNAV

SEQ ID NO: 2049 - protein, 7 aa, synthetic construct
PEKNISM

SEQ ID NO: 2050 - protein, 7 aa, synthetic construct
ETKQHVG

SEQ ID NO: 2051 - protein, 7 aa, synthetic construct
GRSIARE

SEQ ID NO: 2052 - protein, 7 aa, synthetic construct
ALKSDMG

SEQ ID NO: 2053 - protein, 7 aa, synthetic construct
SRDHKGP

SEQ ID NO: 2054 - protein, 7 aa, synthetic construct
HMSMIPP

SEQ ID NO: 2055 - protein, 7 aa, synthetic construct
NDEMRRM

SEQ ID NO: 2056 - protein, 7 aa, synthetic construct
PSPEKSK

SEQ ID NO: 2057 - protein, 7 aa, synthetic construct
TKKDEQI

SEQ ID NO: 2058 - protein, 7 aa, synthetic construct
LTDLHRK

SEQ ID NO: 2059 - protein, 7 aa, synthetic construct
MNPNFMG

SEQ ID NO: 2060 - protein, 7 aa, synthetic construct
AQPMGGM

SEQ ID NO: 2061 - protein, 7 aa, synthetic construct
FNPTMQA

SEQ ID NO: 2062 - protein, 7 aa, synthetic construct
MPHWTAD

SEQ ID NO: 2063 - protein, 7 aa, synthetic construct
RVNAEPA

SEQ ID NO: 2064 - protein, 7 aa, synthetic construct
IDHKKNA

SEQ ID NO: 2065 - protein, 7 aa, synthetic construct
IPYNGAL

SEQ ID NO: 2066 - protein, 7 aa, synthetic construct
VKPETGW

SEQ ID NO: 2067 - protein, 7 aa, synthetic construct
QGKDMKP

SEQ ID NO: 2068 - protein, 7 aa, synthetic construct
IGSTSTT

SEQ ID NO: 2069 - protein, 7 aa, synthetic construct
WSQKQTI

SEQ ID NO: 2070 - protein, 7 aa, synthetic construct
SMVKSSG

SEQ ID NO: 2071 - protein, 7 aa, synthetic construct
DKHMGME

SEQ ID NO: 2072 - protein, 7 aa, synthetic construct
VKINTLG

SEQ ID NO: 2073 - protein, 7 aa, synthetic construct
TKRDPMY

SEQ ID NO: 2074 - protein, 7 aa, synthetic construct
PFSGKQD

SEQ ID NO: 2075 - protein, 7 aa, synthetic construct
MSNVQGY

SEQ ID NO: 2076 - protein, 7 aa, synthetic construct
FNNAQNF

SEQ ID NO: 2077 - protein, 7 aa, synthetic construct
AGAERND

SEQ ID NO: 2078 - protein, 7 aa, synthetic construct
IPQKIPA

SEQ ID NO: 2079 - protein, 7 aa, synthetic construct
VSVHFKG

SEQ ID NO: 2080 - protein, 7 aa, synthetic construct
PHTGPPS

SEQ ID NO: 2081 - protein, 7 aa, synthetic construct
NKDMGYD

SEQ ID NO: 2082 - protein, 7 aa, synthetic construct
RSQPEFN

SEQ ID NO: 2083 - protein, 7 aa, synthetic construct
MKMGTIA

SEQ ID NO: 2084 - protein, 7 aa, synthetic construct
RVQINGS

SEQ ID NO: 2085 - protein, 7 aa, synthetic construct
VPKMVEM

SEQ ID NO: 2086 - protein, 7 aa, synthetic construct
LQNKWHD

SEQ ID NO: 2087 - protein, 7 aa, synthetic construct
IHTPKEF

SEQ ID NO: 2088 - protein, 7 aa, synthetic construct
FQQGVTS

SEQ ID NO: 2089 - protein, 7 aa, synthetic construct
NSRQSIE

SEQ ID NO: 2090 - protein, 7 aa, synthetic construct
GTRYETA

SEQ ID NO: 2091 - protein, 7 aa, synthetic construct
MSEHKPI

SEQ ID NO: 2092 - protein, 7 aa, synthetic construct
TPADNLR

SEQ ID NO: 2093 - protein, 7 aa, synthetic construct
KHVPQEG

SEQ ID NO: 2094 - protein, 7 aa, synthetic construct
WTNTNGV

SEQ ID NO: 2095 - protein, 7 aa, synthetic construct
SGTMSPP

SEQ ID NO: 2096 - protein, 7 aa, synthetic construct
TSTNLTG

SEQ ID NO: 2097 - protein, 7 aa, synthetic construct
VHPKQGN

SEQ ID NO: 2098 - protein, 7 aa, synthetic construct
KAQGSHE

SEQ ID NO: 2099 - protein, 7 aa, synthetic construct
RSDSEVY

SEQ ID NO: 2100 - protein, 7 aa, synthetic construct
KQVTQIE

SEQ ID NO: 2101 - protein, 7 aa, synthetic construct
THAENKL

SEQ ID NO: 2102 - protein, 7 aa, synthetic construct
YYDHTHP

SEQ ID NO: 2103 - protein, 7 aa, synthetic construct
QSQSDHG

SEQ ID NO: 2104 - protein, 7 aa, synthetic construct
RSQSFDH

SEQ ID NO: 2105 - protein, 7 aa, synthetic construct
FAQQSAG

SEQ ID NO: 2106 - protein, 7 aa, synthetic construct
MNTIKGD

SEQ ID NO: 2107 - protein, 7 aa, synthetic construct
NGSHAMH

SEQ ID NO: 2108 - protein, 7 aa, synthetic construct
SNYSVEP

SEQ ID NO: 2109 - protein, 7 aa, synthetic construct
QIPSSKE

SEQ ID NO: 2110 - protein, 7 aa, synthetic construct
ETGGWNG

SEQ ID NO: 2111 - protein, 7 aa, synthetic construct
HVTSNKD

SEQ ID NO: 2112 - protein, 7 aa, synthetic construct
QHGKNQI

SEQ ID NO: 2113 - protein, 7 aa, synthetic construct
YPKHPVQ

SEQ ID NO: 2114 - protein, 7 aa, synthetic construct
QAPDRYM

SEQ ID NO: 2115 - protein, 7 aa, synthetic construct
SYQFKAE

SEQ ID NO: 2116 - protein, 7 aa, synthetic construct
QYDFQKN

SEQ ID NO: 2117 - protein, 7 aa, synthetic construct
FTGPGQT

SEQ ID NO: 2118 - protein, 7 aa, synthetic construct
KYQVAEE

SEQ ID NO: 2119 - protein, 7 aa, synthetic construct
HGMSHQP

SEQ ID NO: 2120 - protein, 7 aa, synthetic construct
PGQGQHP

SEQ ID NO: 2121 - protein, 7 aa, synthetic construct
KYDTGKE

SEQ ID NO: 2122 - protein, 7 aa, synthetic construct
PQAQHQD

SEQ ID NO: 2123 - protein, 7 aa, synthetic construct
VEYSIKA

SEQ ID NO: 2124 - protein, 7 aa, synthetic construct
TDVKMAS

SEQ ID NO: 2125 - protein, 7 aa, synthetic construct
ERHVGQD

SEQ ID NO: 2126 - protein, 7 aa, synthetic construct
HYHPNNS

SEQ ID NO: 2127 - protein, 7 aa, synthetic construct
RTGFPSQ

SEQ ID NO: 2128 - protein, 7 aa, synthetic construct
TQMIKHD

SEQ ID NO: 2129 - protein, 7 aa, synthetic construct
NEKADGK

SEQ ID NO: 2130 - protein, 7 aa, synthetic construct
EKGNIMI

SEQ ID NO: 2131 - protein, 7 aa, synthetic construct
HTNKDQH

SEQ ID NO: 2132 - protein, 7 aa, synthetic construct
VPVKTDY

SEQ ID NO: 2133 - protein, 7 aa, synthetic construct
LINGMPP

SEQ ID NO: 2134 - protein, 7 aa, synthetic construct
MTTQKNW

SEQ ID NO: 2135 - protein, 7 aa, synthetic construct
QPYSSHA

SEQ ID NO: 2136 - protein, 7 aa, synthetic construct
PPARQIE

SEQ ID NO: 2137 - protein, 7 aa, synthetic construct
DDITKHS

SEQ ID NO: 2138 - protein, 7 aa, synthetic construct
QVDMHRP

SEQ ID NO: 2139 - protein, 7 aa, synthetic construct
INGNMRL

SEQ ID NO: 2140 - protein, 7 aa, synthetic construct
RQFDSTE

SEQ ID NO: 2141 - protein, 7 aa, synthetic construct
TAKQEYD

SEQ ID NO: 2142 - protein, 7 aa, synthetic construct
RPDKDSM

SEQ ID NO: 2143 - protein, 7 aa, synthetic construct
NYKELSA

SEQ ID NO: 2144 - protein, 7 aa, synthetic construct
LSEGKFE

SEQ ID NO: 2145 - protein, 7 aa, synthetic construct
IEPKYSK

SEQ ID NO: 2146 - protein, 7 aa, synthetic construct
ALKDREW

SEQ ID NO: 2147 - protein, 7 aa, synthetic construct
SFTGERM

SEQ ID NO: 2148 - protein, 7 aa, synthetic construct
WKVASHG

SEQ ID NO: 2149 - protein, 7 aa, synthetic construct
QGDPSKQ

SEQ ID NO: 2150 - protein, 7 aa, synthetic construct
RNMGDNW

SEQ ID NO: 2151 - protein, 7 aa, synthetic construct
FDNKDKG

SEQ ID NO: 2152 - protein, 7 aa, synthetic construct
QAGTAVY

SEQ ID NO: 2153 - protein, 7 aa, synthetic construct
IYSKGVE

SEQ ID NO: 2154 - protein, 7 aa, synthetic construct
CKMVEQC

SEQ ID NO: 2155 - protein, 7 aa, synthetic construct
RQTHTSD

SEQ ID NO: 2156 - protein, 7 aa, synthetic construct
KGQLDPP

SEQ ID NO: 2157 - protein, 7 aa, synthetic construct
YPFGHAE

SEQ ID NO: 2158 - protein, 7 aa, synthetic construct
KPGVSEQ

SEQ ID NO: 2159 - protein, 7 aa, synthetic construct
LMEYSSS

SEQ ID NO: 2160 - protein, 7 aa, synthetic construct
SAHGEGV

SEQ ID NO: 2161 - protein, 7 aa, synthetic construct
RAQRLED

SEQ ID NO: 2162 - protein, 7 aa, synthetic construct
IQVKSDG

SEQ ID NO: 2163 - protein, 7 aa, synthetic construct
TTAQGVS

SEQ ID NO: 2164 - protein, 7 aa, synthetic construct
MKANGVI

SEQ ID NO: 2165 - protein, 7 aa, synthetic construct
MGVNQEP

SEQ ID NO: 2166 - protein, 7 aa, synthetic construct
RFNISGD

SEQ ID NO: 2167 - protein, 7 aa, synthetic construct
TQAVHQT

SEQ ID NO: 2168 - protein, 7 aa, synthetic construct
SNNSLQE

SEQ ID NO: 2169 - protein, 7 aa, synthetic construct
MSPSKQF

SEQ ID NO: 2170 - protein, 7 aa, synthetic construct
HASSQAP

SEQ ID NO: 2171 - protein, 7 aa, synthetic construct
SHTVGNG

SEQ ID NO: 2172 - protein, 7 aa, synthetic construct
THMHGEA

SEQ ID NO: 2173 - protein, 7 aa, synthetic construct
VDRRLAE

SEQ ID NO: 2174 - protein, 7 aa, synthetic construct
FGNKDDI

SEQ ID NO: 2175 - protein, 7 aa, synthetic construct
PAFGTSP

SEQ ID NO: 2176 - protein, 7 aa, synthetic construct
GSRALSE

SEQ ID NO: 2177 - protein, 7 aa, synthetic construct
THNHGKE

SEQ ID NO: 2178 - protein, 7 aa, synthetic construct
FRTQTQT

SEQ ID NO: 2179 - protein, 7 aa, synthetic construct
HNGHKMQ

SEQ ID NO: 2180 - protein, 7 aa, synthetic construct
KPVTNAY

SEQ ID NO: 2181 - protein, 7 aa, synthetic construct
SHSAPNE

SEQ ID NO: 2182 - protein, 7 aa, synthetic construct
GAGGIMP

SEQ ID NO: 2183 - protein, 7 aa, synthetic construct
MEKEYSG

SEQ ID NO: 2184 - protein, 7 aa, synthetic construct
RGITENV

SEQ ID NO: 2185 - protein, 7 aa, synthetic construct
NGRHAIA

SEQ ID NO: 2186 - protein, 7 aa, synthetic construct
DRSQSQD

SEQ ID NO: 2187 - protein, 7 aa, synthetic construct
RKLDITN

SEQ ID NO: 2188 - protein, 7 aa, synthetic construct
NVPTRAE

SEQ ID NO: 2189 - protein, 7 aa, synthetic construct
HKMPGTS

SEQ ID NO: 2190 - protein, 7 aa, synthetic construct
KKDVDFN

SEQ ID NO: 2191 - protein, 7 aa, synthetic construct
FRNDIGM

SEQ ID NO: 2192 - protein, 7 aa, synthetic construct
MSHGKIM

SEQ ID NO: 2193 - protein, 7 aa, synthetic construct
QRAGMHL

SEQ ID NO: 2194 - protein, 7 aa, synthetic construct
PHVRSTI

SEQ ID NO: 2195 - protein, 7 aa, synthetic construct
HINEARV

SEQ ID NO: 2196 - protein, 7 aa, synthetic construct
NAERDHG

SEQ ID NO: 2197 - protein, 7 aa, synthetic construct
MNRPVID

SEQ ID NO: 2198 - protein, 7 aa, synthetic construct
NSNHGMI

SEQ ID NO: 2199 - protein, 7 aa, synthetic construct
HKVDPGQ

SEQ ID NO: 2200 - protein, 7 aa, synthetic construct
LQDNKVF

SEQ ID NO: 2201 - protein, 7 aa, synthetic construct
TQSHMME

SEQ ID NO: 2202 - protein, 7 aa, synthetic construct
NGQTQHA

SEQ ID NO: 2203 - protein, 7 aa, synthetic construct
ISDQFQG

SEQ ID NO: 2204 - protein, 7 aa, synthetic construct
GSLQTEV

SEQ ID NO: 2205 - protein, 7 aa, synthetic construct
YVSSASN

SEQ ID NO: 2206 - protein, 7 aa, synthetic construct
NYMREGM

SEQ ID NO: 2207 - protein, 7 aa, synthetic construct
GTDHRAL

SEQ ID NO: 2208 - protein, 7 aa, synthetic construct
KMNETRF

SEQ ID NO: 2209 - protein, 7 aa, synthetic construct
GSPTHNP

SEQ ID NO: 2210 - protein, 7 aa, synthetic construct
SEANKGG

SEQ ID NO: 2211 - protein, 7 aa, synthetic construct
NKNDQHY

SEQ ID NO: 2212 - protein, 7 aa, synthetic construct
HKANMMS

SEQ ID NO: 2213 - protein, 7 aa, synthetic construct
KSYSTID

SEQ ID NO: 2214 - protein, 7 aa, synthetic construct
REHGYGS

SEQ ID NO: 2215 - protein, 7 aa, synthetic construct
TIYSPVK

SEQ ID NO: 2216 - protein, 7 aa, synthetic construct
TLKQRTE

SEQ ID NO: 2217 - protein, 7 aa, synthetic construct
YHQGGSA

SEQ ID NO: 2218 - protein, 7 aa, synthetic construct
RDPVPHS

SEQ ID NO: 2219 - protein, 7 aa, synthetic construct
VGNKVNV

SEQ ID NO: 2220 - protein, 7 aa, synthetic construct
GYEKSQF

SEQ ID NO: 2221 - protein, 7 aa, synthetic construct
SPGGMGV

SEQ ID NO: 2222 - protein, 7 aa, synthetic construct
HRLTEDI

SEQ ID NO: 2223 - protein, 7 aa, synthetic construct
KPPLNHN

SEQ ID NO: 2224 - protein, 7 aa, synthetic construct
FTGRQEA

SEQ ID NO: 2225 - protein, 7 aa, synthetic construct
VERNVVA

SEQ ID NO: 2226 - protein, 7 aa, synthetic construct
KEVSVPG

SEQ ID NO: 2227 - protein, 7 aa, synthetic construct
NQTHSIQ

SEQ ID NO: 2228 - protein, 7 aa, synthetic construct
KGHSGYE

SEQ ID NO: 2229 - protein, 7 aa, synthetic construct
GQKAPPN

SEQ ID NO: 2230 - protein, 7 aa, synthetic construct
QVQMRTN

SEQ ID NO: 2231 - protein, 7 aa, synthetic construct
ISKMTTQ

SEQ ID NO: 2232 - protein, 7 aa, synthetic construct
KEPIQRY

SEQ ID NO: 2233 - protein, 7 aa, synthetic construct
TFTEKNE

SEQ ID NO: 2234 - protein, 7 aa, synthetic construct
RIKSIDA

SEQ ID NO: 2235 - protein, 7 aa, synthetic construct
LRDIKDM

SEQ ID NO: 2236 - protein, 7 aa, synthetic construct
GAVGARE

SEQ ID NO: 2237 - protein, 7 aa, synthetic construct
KLNYTQE

SEQ ID NO: 2238 - protein, 7 aa, synthetic construct
VASHASM

SEQ ID NO: 2239 - protein, 7 aa, synthetic construct
MVNGDKQ

SEQ ID NO: 2240 - protein, 7 aa, synthetic construct
NQPQGAH

SEQ ID NO: 2241 - protein, 7 aa, synthetic construct
DNKSSNF

SEQ ID NO: 2242 - protein, 7 aa, synthetic construct
QKPTNAE

SEQ ID NO: 2243 - protein, 7 aa, synthetic construct
HHPNEPQ

SEQ ID NO: 2244 - protein, 7 aa, synthetic construct
DKLERMT

SEQ ID NO: 2245 - protein, 7 aa, synthetic construct
FRPALTG

SEQ ID NO: 2246 - protein, 7 aa, synthetic construct
KPPHDGW

SEQ ID NO: 2247 - protein, 7 aa, synthetic construct
FDAIRGP

SEQ ID NO: 2248 - protein, 7 aa, synthetic construct
RGEYFVG

SEQ ID NO: 2249 - protein, 7 aa, synthetic construct
GKYAAFN

SEQ ID NO: 2250 - protein, 7 aa, synthetic construct
MSKATMG

SEQ ID NO: 2251 - protein, 7 aa, synthetic construct
YNATHDP

SEQ ID NO: 2252 - protein, 7 aa, synthetic construct
NKETYHG

SEQ ID NO: 2253 - protein, 7 aa, synthetic construct
KDNESKR

SEQ ID NO: 2254 - protein, 7 aa, synthetic construct
SMRTMND

SEQ ID NO: 2255 - protein, 7 aa, synthetic construct
EGRIQRD

SEQ ID NO: 2256 - protein, 7 aa, synthetic construct
TNEVRHQ

SEQ ID NO: 2257 - protein, 7 aa, synthetic construct
TGAKYVD

SEQ ID NO: 2258 - protein, 7 aa, synthetic construct
ADAVRVQ

SEQ ID NO: 2259 - protein, 7 aa, synthetic construct
GDNNYKV

SEQ ID NO: 2260 - protein, 7 aa, synthetic construct
QNVKIGP

SEQ ID NO: 2261 - protein, 7 aa, synthetic construct
QISTVKV

SEQ ID NO: 2262 - protein, 7 aa, synthetic construct
SMSHNGP

SEQ ID NO: 2263 - protein, 7 aa, synthetic construct
MLRDVPQ

SEQ ID NO: 2264 - protein, 7 aa, synthetic construct
DEGKGYR

SEQ ID NO: 2265 - protein, 7 aa, synthetic construct
QTNRHYE

SEQ ID NO: 2266 - protein, 7 aa, synthetic construct
IQQGKAM

SEQ ID NO: 2267 - protein, 7 aa, synthetic construct
MAANADH

SEQ ID NO: 2268 - protein, 7 aa, synthetic construct
DFRHIEK

SEQ ID NO: 2269 - protein, 7 aa, synthetic construct
RFHEQAP

SEQ ID NO: 2270 - protein, 7 aa, synthetic construct
NQRPIEP

SEQ ID NO: 2271 - protein, 7 aa, synthetic construct
FGKYQIN

SEQ ID NO: 2272 - protein, 7 aa, synthetic construct
IHPIRED

SEQ ID NO: 2273 - protein, 7 aa, synthetic construct
PMKSSPH

SEQ ID NO: 2274 - protein, 7 aa, synthetic construct
GPNDKQF

SEQ ID NO: 2275 - protein, 7 aa, synthetic construct
GYNGAKP

SEQ ID NO: 2276 - protein, 7 aa, synthetic construct
IGMMHVA

SEQ ID NO: 2277 - protein, 7 aa, synthetic construct
SGEKHHY

SEQ ID NO: 2278 - protein, 7 aa, synthetic construct
ELNSNKF

SEQ ID NO: 2279 - protein, 7 aa, synthetic construct
KIDSQWQ

SEQ ID NO: 2280 - protein, 7 aa, synthetic construct
LWEGATG

SEQ ID NO: 2281 - protein, 7 aa, synthetic construct
YKGSIAF

SEQ ID NO: 2282 - protein, 7 aa, synthetic construct
HAAQMSS

SEQ ID NO: 2283 - protein, 7 aa, synthetic construct
RDGWRED

SEQ ID NO: 2284 - protein, 7 aa, synthetic construct
WGGAMEG

SEQ ID NO: 2285 - protein, 7 aa, synthetic construct
INKDRFQ

SEQ ID NO: 2286 - protein, 7 aa, synthetic construct
GRINDGF

SEQ ID NO: 2287 - protein, 7 aa, synthetic construct
GMSTTAG

SEQ ID NO: 2288 - protein, 7 aa, synthetic construct
FNEKRQN

SEQ ID NO: 2289 - protein, 7 aa, synthetic construct
DRKHHDA

SEQ ID NO: 2290 - protein, 7 aa, synthetic construct
NNPGISG

SEQ ID NO: 2291 - protein, 7 aa, synthetic construct
QGFTHQE

SEQ ID NO: 2292 - protein, 7 aa, synthetic construct
KMGSKDF

SEQ ID NO: 2293 - protein, 7 aa, synthetic construct
HGEKTNF

SEQ ID NO: 2294 - protein, 7 aa, synthetic construct
DTIIRAG

SEQ ID NO: 2295 - protein, 7 aa, synthetic construct
GYPQNDV

SEQ ID NO: 2296 - protein, 7 aa, synthetic construct
TQREKAH

SEQ ID NO: 2297 - protein, 7 aa, synthetic construct
NMHIAMG

SEQ ID NO: 2298 - protein, 7 aa, synthetic construct
NWTKDVD

SEQ ID NO: 2299 - protein, 7 aa, synthetic construct
QNQVMQH

SEQ ID NO: 2300 - protein, 7 aa, synthetic construct
TASAHSA

SEQ ID NO: 2301 - protein, 7 aa, synthetic construct
NQHTPYP

SEQ ID NO: 2302 - protein, 7 aa, synthetic construct
SEGWNAE

SEQ ID NO: 2303 - protein, 7 aa, synthetic construct
RDVNKGQ

SEQ ID NO: 2304 - protein, 7 aa, synthetic construct
FHKNNMS

SEQ ID NO: 2305 - protein, 7 aa, synthetic construct
TPNTRLG

SEQ ID NO: 2306 - protein, 7 aa, synthetic construct
THRVERE

SEQ ID NO: 2307 - protein, 7 aa, synthetic construct
TGSKPMY

SEQ ID NO: 2308 - protein, 7 aa, synthetic construct
IKTSPDS

SEQ ID NO: 2309 - protein, 7 aa, synthetic construct
RPIERQE

SEQ ID NO: 2310 - protein, 7 aa, synthetic construct
PIAQPYN

SEQ ID NO: 2311 - protein, 7 aa, synthetic construct
HVGMRMD

SEQ ID NO: 2312 - protein, 7 aa, synthetic construct
RPQHNEV

SEQ ID NO: 2313 - protein, 7 aa, synthetic construct
LVPFNKE

SEQ ID NO: 2314 - protein, 7 aa, synthetic construct
PDKRTVA

SEQ ID NO: 2315 - protein, 7 aa, synthetic construct
HTGLTSV

SEQ ID NO: 2316 - protein, 7 aa, synthetic construct
RRGIDEN

SEQ ID NO: 2317 - protein, 7 aa, synthetic construct
GMRKAND

SEQ ID NO: 2318 - protein, 7 aa, synthetic construct
PHNDPAH

SEQ ID NO: 2319 - protein, 7 aa, synthetic construct
WKDHQVY

SEQ ID NO: 2320 - protein, 7 aa, synthetic construct
ESSRGTS

SEQ ID NO: 2321 - protein, 7 aa, synthetic construct
GPSMPRN

SEQ ID NO: 2322 - protein, 7 aa, synthetic construct
NNTNNMT

SEQ ID NO: 2323 - protein, 7 aa, synthetic construct
QTHVSPI

SEQ ID NO: 2324 - protein, 7 aa, synthetic construct
TEKMASM

SEQ ID NO: 2325 - protein, 7 aa, synthetic construct
WKDKNEY

SEQ ID NO: 2326 - protein, 7 aa, synthetic construct
ANRSNDE

SEQ ID NO: 2327 - protein, 7 aa, synthetic construct
DAHKSME

SEQ ID NO: 2328 - protein, 7 aa, synthetic construct
NTASSGI

SEQ ID NO: 2329 - protein, 7 aa, synthetic construct
ATMGSRE

SEQ ID NO: 2330 - protein, 7 aa, synthetic construct
REHSYDH

SEQ ID NO: 2331 - protein, 7 aa, synthetic construct
LVKHWEE

SEQ ID NO: 2332 - protein, 7 aa, synthetic construct
GNDHSRQ

SEQ ID NO: 2333 - protein, 7 aa, synthetic construct
MKYVETA

SEQ ID NO: 2334 - protein, 7 aa, synthetic construct
SRPEGHH

SEQ ID NO: 2335 - protein, 7 aa, synthetic construct
KGQGEDR

SEQ ID NO: 2336 - protein, 7 aa, synthetic construct
KFPEGEA

SEQ ID NO: 2337 - protein, 7 aa, synthetic construct
YKDALGQ

SEQ ID NO: 2338 - protein, 7 aa, synthetic construct
AIAAKGA

SEQ ID NO: 2339 - protein, 7 aa, synthetic construct
SEHRIPF

SEQ ID NO: 2340 - protein, 7 aa, synthetic construct
TAHTVAD

SEQ ID NO: 2341 - protein, 7 aa, synthetic construct
SQHNGKM

SEQ ID NO: 2342 - protein, 7 aa, synthetic construct
NGNRLGG

SEQ ID NO: 2343 - protein, 7 aa, synthetic construct
NKMEWGD

SEQ ID NO: 2344 - protein, 7 aa, synthetic construct
TISHKMG

SEQ ID NO: 2345 - protein, 7 aa, synthetic construct
DDIRRPS

SEQ ID NO: 2346 - protein, 7 aa, synthetic construct
NEFYGRA

SEQ ID NO: 2347 - protein, 7 aa, synthetic construct
PQRVNSG

SEQ ID NO: 2348 - protein, 7 aa, synthetic construct
MTGLANN

SEQ ID NO: 2349 - protein, 7 aa, synthetic construct
TINFNDK

SEQ ID NO: 2350 - protein, 7 aa, synthetic construct
TARGPTD

SEQ ID NO: 2351 - protein, 7 aa, synthetic construct
NSGQYTI

SEQ ID NO: 2352 - protein, 7 aa, synthetic construct
ATQVGSY

SEQ ID NO: 2353 - protein, 7 aa, synthetic construct
PPMSAGP

SEQ ID NO: 2354 - protein, 7 aa, synthetic construct
LSSGQVP

SEQ ID NO: 2355 - protein, 7 aa, synthetic construct
LVSGGSF

SEQ ID NO: 2356 - protein, 7 aa, synthetic construct
IGMERQR

SEQ ID NO: 2357 - protein, 7 aa, synthetic construct
SSYNSMA

SEQ ID NO: 2358 - protein, 7 aa, synthetic construct
TDANSSV

SEQ ID NO: 2359 - protein, 7 aa, synthetic construct
FRLNEPG

SEQ ID NO: 2360 - protein, 7 aa, synthetic construct
QNQTPGN

SEQ ID NO: 2361 - protein, 7 aa, synthetic construct
TYTANAH

SEQ ID NO: 2362 - protein, 7 aa, synthetic construct
SDGISKL

SEQ ID NO: 2363 - protein, 7 aa, synthetic construct
YGMSLTA

SEQ ID NO: 2364 - protein, 7 aa, synthetic construct
NKNNVEN

SEQ ID NO: 2365 - protein, 7 aa, synthetic construct
MKQSTLA

SEQ ID NO: 2366 - protein, 7 aa, synthetic construct
KNVHTDY

SEQ ID NO: 2367 - protein, 7 aa, synthetic construct
LRNPQTE

SEQ ID NO: 2368 - protein, 7 aa, synthetic construct
QTTSMSI

SEQ ID NO: 2369 - protein, 7 aa, synthetic construct
TLGMNAP

SEQ ID NO: 2370 - protein, 7 aa, synthetic construct
YVDTQAM

SEQ ID NO: 2371 - protein, 7 aa, synthetic construct
DYKRYPE

SEQ ID NO: 2372 - protein, 7 aa, synthetic construct
YDGHLKD

SEQ ID NO: 2373 - protein, 7 aa, synthetic construct
LQSHIQQ

SEQ ID NO: 2374 - protein, 7 aa, synthetic construct
IAREQAE

SEQ ID NO: 2375 - protein, 7 aa, synthetic construct
NVGQAVK

SEQ ID NO: 2376 - protein, 7 aa, synthetic construct
NMYSATP

SEQ ID NO: 2377 - protein, 7 aa, synthetic construct
SQNHAPP

SEQ ID NO: 2378 - protein, 7 aa, synthetic construct
VQGRIME

SEQ ID NO: 2379 - protein, 7 aa, synthetic construct
YLNHTYH

SEQ ID NO: 2380 - protein, 7 aa, synthetic construct
GNLGMKL

SEQ ID NO: 2381 - protein, 7 aa, synthetic construct
YPNQSPH

SEQ ID NO: 2382 - protein, 7 aa, synthetic construct
HMKGAVA

SEQ ID NO: 2383 - protein, 7 aa, synthetic construct
DKLEYPP

SEQ ID NO: 2384 - protein, 7 aa, synthetic construct
STPKEPV

SEQ ID NO: 2385 - protein, 7 aa, synthetic construct
HISDNNA

SEQ ID NO: 2386 - protein, 7 aa, synthetic construct
IRPDMRQ

SEQ ID NO: 2387 - protein, 7 aa, synthetic construct
KDYMPEP

SEQ ID NO: 2388 - protein, 7 aa, synthetic construct
AQYRDTF

SEQ ID NO: 2389 - protein, 7 aa, synthetic construct
GIEDVRF

SEQ ID NO: 2390 - protein, 7 aa, synthetic construct
YKQTSDG

SEQ ID NO: 2391 - protein, 7 aa, synthetic construct
SSSPTTY

SEQ ID NO: 2392 - protein, 7 aa, synthetic construct
STGPGQA

SEQ ID NO: 2393 - protein, 7 aa, synthetic construct
TETMHDK

SEQ ID NO: 2394 - protein, 7 aa, synthetic construct
ATQMSAM

SEQ ID NO: 2395 - protein, 7 aa, synthetic construct
HSTKQIA

SEQ ID NO: 2396 - protein, 7 aa, synthetic construct
QGVNHQM

SEQ ID NO: 2397 - protein, 7 aa, synthetic construct
LRDRSQT

SEQ ID NO: 2398 - protein, 7 aa, synthetic construct
GPVIEKA

SEQ ID NO: 2399 - protein, 7 aa, synthetic construct
NTNNNKM

SEQ ID NO: 2400 - protein, 7 aa, synthetic construct
KTENHYG

SEQ ID NO: 2401 - protein, 7 aa, synthetic construct
FTVHERN

SEQ ID NO: 2402 - protein, 7 aa, synthetic construct
LSMNKYE

SEQ ID NO: 2403 - protein, 7 aa, synthetic construct
ISKPMVH

SEQ ID NO: 2404 - protein, 7 aa, synthetic construct
LAKSEGK

SEQ ID NO: 2405 - protein, 7 aa, synthetic construct
GVKPTNM

SEQ ID NO: 2406 - protein, 7 aa, synthetic construct
TRQPNQV

SEQ ID NO: 2407 - protein, 7 aa, synthetic construct
DEVAAHG

SEQ ID NO: 2408 - protein, 7 aa, synthetic construct
PTPITHS

SEQ ID NO: 2409 - protein, 7 aa, synthetic construct
SRTPNSG

SEQ ID NO: 2410 - protein, 7 aa, synthetic construct
IAVAKTD

SEQ ID NO: 2411 - protein, 7 aa, synthetic construct
VDNTRTT

SEQ ID NO: 2412 - protein, 7 aa, synthetic construct
YPQGVHH

SEQ ID NO: 2413 - protein, 7 aa, synthetic construct
MPHTEAH

SEQ ID NO: 2414 - protein, 7 aa, synthetic construct
HPIGPNQ

SEQ ID NO: 2415 - protein, 7 aa, synthetic construct
QIRAADH

SEQ ID NO: 2416 - protein, 7 aa, synthetic construct
QHGASDV

SEQ ID NO: 2417 - protein, 7 aa, synthetic construct
HNAKPMS

SEQ ID NO: 2418 - protein, 7 aa, synthetic construct
NMPGWAD

SEQ ID NO: 2419 - protein, 7 aa, synthetic construct
MHKGMIE

SEQ ID NO: 2420 - protein, 7 aa, synthetic construct
NHPMHKE

SEQ ID NO: 2421 - protein, 7 aa, synthetic construct
QRGTSQF

SEQ ID NO: 2422 - protein, 7 aa, synthetic construct
GRTEPGS

SEQ ID NO: 2423 - protein, 7 aa, synthetic construct
YHKKDEM

SEQ ID NO: 2424 - protein, 7 aa, synthetic construct
YHGNKFA

SEQ ID NO: 2425 - protein, 7 aa, synthetic construct
WMQNEKA

SEQ ID NO: 2426 - protein, 7 aa, synthetic construct
LRHGLEL

SEQ ID NO: 2427 - protein, 7 aa, synthetic construct
VKGKVET

SEQ ID NO: 2428 - protein, 7 aa, synthetic construct
TSETPTA

SEQ ID NO: 2429 - protein, 7 aa, synthetic construct
MVGTNQM

SEQ ID NO: 2430 - protein, 7 aa, synthetic construct
GRTNHTN

SEQ ID NO: 2431 - protein, 7 aa, synthetic construct
KTQSILA

SEQ ID NO: 2432 - protein, 7 aa, synthetic construct
DVERTPQ

SEQ ID NO: 2433 - protein, 7 aa, synthetic construct
YAQKTNF

SEQ ID NO: 2434 - protein, 7 aa, synthetic construct
YAAWEES

SEQ ID NO: 2435 - protein, 7 aa, synthetic construct
QGREGVV

SEQ ID NO: 2436 - protein, 7 aa, synthetic construct
YTTVQLD

SEQ ID NO: 2437 - protein, 7 aa, synthetic construct
HHNKPDY

SEQ ID NO: 2438 - protein, 7 aa, synthetic construct
YTTSGLP

SEQ ID NO: 2439 - protein, 7 aa, synthetic construct
DKSNNSI

SEQ ID NO: 2440 - protein, 7 aa, synthetic construct
GYKMGTE

SEQ ID NO: 2441 - protein, 7 aa, synthetic construct
TTLKANP

SEQ ID NO: 2442 - protein, 7 aa, synthetic construct
GGNALQK

SEQ ID NO: 2443 - protein, 7 aa, synthetic construct
RQQGPGV

SEQ ID NO: 2444 - protein, 7 aa, synthetic construct
MKDATVP

SEQ ID NO: 2445 - protein, 7 aa, synthetic construct
EQGHGYI

SEQ ID NO: 2446 - protein, 7 aa, synthetic construct
KVHNETH

SEQ ID NO: 2447 - protein, 7 aa, synthetic construct
VMRAQST

SEQ ID NO: 2448 - protein, 7 aa, synthetic construct
DMRAHMT

SEQ ID NO: 2449 - protein, 7 aa, synthetic construct
LNGQPFK

SEQ ID NO: 2450 - protein, 7 aa, synthetic construct
IMNATTN

SEQ ID NO: 2451 - protein, 7 aa, synthetic construct
WKSQSRE

SEQ ID NO: 2452 - protein, 7 aa, synthetic construct
EGPHAMI

SEQ ID NO: 2453 - protein, 7 aa, synthetic construct
VIKPFDK

SEQ ID NO: 2454 - protein, 7 aa, synthetic construct
MGNVKPF

SEQ ID NO: 2455 - protein, 7 aa, synthetic construct
SAEKLAP

SEQ ID NO: 2456 - protein, 7 aa, synthetic construct
QLQQKIE

SEQ ID NO: 2457 - protein, 7 aa, synthetic construct
VSRQEPD

SEQ ID NO: 2458 - protein, 7 aa, synthetic construct
SSYNNTG

SEQ ID NO: 2459 - protein, 7 aa, synthetic construct
RRMEPLG

SEQ ID NO: 2460 - protein, 7 aa, synthetic construct
VRTNQLT

SEQ ID NO: 2461 - protein, 7 aa, synthetic construct
HNSTHRP

SEQ ID NO: 2462 - protein, 7 aa, synthetic construct
VKEMLNA

SEQ ID NO: 2463 - protein, 7 aa, synthetic construct
TVQKALA

SEQ ID NO: 2464 - protein, 7 aa, synthetic construct
RGQDMSL

SEQ ID NO: 2465 - protein, 7 aa, synthetic construct
GQIRVAN

SEQ ID NO: 2466 - protein, 7 aa, synthetic construct
YSTHHDV

SEQ ID NO: 2467 - protein, 7 aa, synthetic construct
VVPGNAQ

SEQ ID NO: 2468 - protein, 7 aa, synthetic construct
HRKEVEL

SEQ ID NO: 2469 - protein, 7 aa, synthetic construct
PEKQVSK

SEQ ID NO: 2470 - protein, 7 aa, synthetic construct
STGASFS

SEQ ID NO: 2471 - protein, 7 aa, synthetic construct
TGHRGAM

SEQ ID NO: 2472 - protein, 7 aa, synthetic construct
AKDPKIL

SEQ ID NO: 2473 - protein, 7 aa, synthetic construct
QLRENAS

SEQ ID NO: 2474 - protein, 7 aa, synthetic construct
QPMQGKA

SEQ ID NO: 2475 - protein, 7 aa, synthetic construct
WKSQHAE

SEQ ID NO: 2476 - protein, 7 aa, synthetic construct
RPQSYGG

SEQ ID NO: 2477 - protein, 7 aa, synthetic construct
SRDMHPD

SEQ ID NO: 2478 - protein, 7 aa, synthetic construct
FQVKIPG

SEQ ID NO: 2479 - protein, 7 aa, synthetic construct
MGVTMQL

SEQ ID NO: 2480 - protein, 7 aa, synthetic construct
SAKGPEA

SEQ ID NO: 2481 - protein, 7 aa, synthetic construct
KAWGNID

SEQ ID NO: 2482 - protein, 7 aa, synthetic construct
YGANTWQ

SEQ ID NO: 2483 - protein, 7 aa, synthetic construct
TDGRSGS

SEQ ID NO: 2484 - protein, 7 aa, synthetic construct
SRQGIIQ

SEQ ID NO: 2485 - protein, 7 aa, synthetic construct
NGNYALP

SEQ ID NO: 2486 - protein, 7 aa, synthetic construct
QGSFERP

SEQ ID NO: 2487 - protein, 7 aa, synthetic construct
IAMDPNK

SEQ ID NO: 2488 - protein, 7 aa, synthetic construct
VGIPPQG

SEQ ID NO: 2489 - protein, 7 aa, synthetic construct
ELGPNRA

SEQ ID NO: 2490 - protein, 7 aa, synthetic construct
LNSTTLD

SEQ ID NO: 2491 - protein, 7 aa, synthetic construct
DFKFSGG

SEQ ID NO: 2492 - protein, 7 aa, synthetic construct
IRDKAER

SEQ ID NO: 2493 - protein, 7 aa, synthetic construct
RVPYPSG

SEQ ID NO: 2494 - protein, 7 aa, synthetic construct
MPQPHMA

SEQ ID NO: 2495 - protein, 7 aa, synthetic construct
VKPKVET

SEQ ID NO: 2496 - protein, 7 aa, synthetic construct
SSSSGVI

SEQ ID NO: 2497 - protein, 7 aa, synthetic construct
VGMANTK

SEQ ID NO: 2498 - protein, 7 aa, synthetic construct
SKTPSNE

SEQ ID NO: 2499 - protein, 7 aa, synthetic construct
DGGDSKP

SEQ ID NO: 2500 - protein, 7 aa, synthetic construct
SGTRRVE

SEQ ID NO: 2501 - protein, 7 aa, synthetic construct
GMRDKDD

SEQ ID NO: 2502 - protein, 7 aa, synthetic construct
KIRENDS

SEQ ID NO: 2503 - protein, 7 aa, synthetic construct
RRTDVSE

SEQ ID NO: 2504 - protein, 7 aa, synthetic construct
NNGHSVE

SEQ ID NO: 2505 - protein, 7 aa, synthetic construct
GMKQPVL

SEQ ID NO: 2506 - protein, 7 aa, synthetic construct
LAKVEPT

SEQ ID NO: 2507 - protein, 7 aa, synthetic construct
DAAQSRF

SEQ ID NO: 2508 - protein, 7 aa, synthetic construct
TRPHITA

SEQ ID NO: 2509 - protein, 7 aa, synthetic construct
MEGYMKE

SEQ ID NO: 2510 - protein, 7 aa, synthetic construct
YMKSQDD

SEQ ID NO: 2511 - protein, 7 aa, synthetic construct
FRNFQEG

SEQ ID NO: 2512 - protein, 7 aa, synthetic construct
NPVDQKK

SEQ ID NO: 2513 - protein, 7 aa, synthetic construct
TTSQGFQ

SEQ ID NO: 2514 - protein, 7 aa, synthetic construct
KRDPEAF

SEQ ID NO: 2515 - protein, 7 aa, synthetic construct
GQRMDGM

SEQ ID NO: 2516 - protein, 7 aa, synthetic construct
VTEYQQP

SEQ ID NO: 2517 - protein, 7 aa, synthetic construct
TTNGRGL

SEQ ID NO: 2518 - protein, 7 aa, synthetic construct
IHKQEGF

SEQ ID NO: 2519 - protein, 7 aa, synthetic construct
RRQYQEE

SEQ ID NO: 2520 - protein, 7 aa, synthetic construct
IKSHALG

SEQ ID NO: 2521 - protein, 7 aa, synthetic construct
GHPQGHI

SEQ ID NO: 2522 - protein, 7 aa, synthetic construct
TAVKTTL

SEQ ID NO: 2523 - protein, 7 aa, synthetic construct
VRMADDK

SEQ ID NO: 2524 - protein, 7 aa, synthetic construct
GHHSFME

SEQ ID NO: 2525 - protein, 7 aa, synthetic construct
NQPKMPV

SEQ ID NO: 2526 - protein, 7 aa, synthetic construct
DDTVKHF

SEQ ID NO: 2527 - protein, 7 aa, synthetic construct
GGPHSSV

SEQ ID NO: 2528 - protein, 7 aa, synthetic construct
MNGVPHF

SEQ ID NO: 2529 - protein, 7 aa, synthetic construct
KVLEGRT

SEQ ID NO: 2530 - protein, 7 aa, synthetic construct
NAHDPRD

SEQ ID NO: 2531 - protein, 7 aa, synthetic construct
IMVYKSE

SEQ ID NO: 2532 - protein, 7 aa, synthetic construct
GNGGAAK

SEQ ID NO: 2533 - protein, 7 aa, synthetic construct
VREQYKE

SEQ ID NO: 2534 - protein, 7 aa, synthetic construct
ANPIGDR

SEQ ID NO: 2535 - protein, 7 aa, synthetic construct
MMGFQNA

SEQ ID NO: 2536 - protein, 7 aa, synthetic construct
PIYKQEI

SEQ ID NO: 2537 - protein, 7 aa, synthetic construct
EPTMAKG

SEQ ID NO: 2538 - protein, 7 aa, synthetic construct
PTNSHKD

SEQ ID NO: 2539 - protein, 7 aa, synthetic construct
FKVEHHA

SEQ ID NO: 2540 - protein, 7 aa, synthetic construct
ELVKHNY

SEQ ID NO: 2541 - protein, 7 aa, synthetic construct
RQPLPVD

SEQ ID NO: 2542 - protein, 7 aa, synthetic construct
TDGQRPI

SEQ ID NO: 2543 - protein, 7 aa, synthetic construct
LTHKVVD

SEQ ID NO: 2544 - protein, 7 aa, synthetic construct
TSVKEGL

SEQ ID NO: 2545 - protein, 7 aa, synthetic construct
TERMPIK

SEQ ID NO: 2546 - protein, 7 aa, synthetic construct
PNKALQD

SEQ ID NO: 2547 - protein, 7 aa, synthetic construct
LGMKPFD

SEQ ID NO: 2548 - protein, 7 aa, synthetic construct
KEAFTPA

SEQ ID NO: 2549 - protein, 7 aa, synthetic construct
QGQVAVR

SEQ ID NO: 2550 - protein, 7 aa, synthetic construct
HGASSDR

SEQ ID NO: 2551 - protein, 7 aa, synthetic construct
RTTIMPA

SEQ ID NO: 2552 - protein, 7 aa, synthetic construct
MMAPRGD

SEQ ID NO: 2553 - protein, 7 aa, synthetic construct
LKMSPAP

SEQ ID NO: 2554 - protein, 7 aa, synthetic construct
ASKTMVE

SEQ ID NO: 2555 - protein, 7 aa, synthetic construct
PAHMVGA

SEQ ID NO: 2556 - protein, 7 aa, synthetic construct
EPHVIDR

SEQ ID NO: 2557 - protein, 7 aa, synthetic construct
PAGSNFK

SEQ ID NO: 2558 - protein, 7 aa, synthetic construct
MQPRVEI

SEQ ID NO: 2559 - protein, 7 aa, synthetic construct
MVSHMNG

SEQ ID NO: 2560 - protein, 7 aa, synthetic construct
QHSMRED

SEQ ID NO: 2561 - protein, 7 aa, synthetic construct
YNGYKDQ

SEQ ID NO: 2562 - protein, 7 aa, synthetic construct
LHTNKYE

SEQ ID NO: 2563 - protein, 7 aa, synthetic construct
QQRTENT

SEQ ID NO: 2564 - protein, 7 aa, synthetic construct
EQRPTGP

SEQ ID NO: 2565 - protein, 7 aa, synthetic construct
KGDAYQG

SEQ ID NO: 2566 - protein, 7 aa, synthetic construct
DRTRQIG

SEQ ID NO: 2567 - protein, 7 aa, synthetic construct
VAPFMTQ

SEQ ID NO: 2568 - protein, 7 aa, synthetic construct
MRQTGHG

SEQ ID NO: 2569 - protein, 7 aa, synthetic construct
AGVYNKT

SEQ ID NO: 2570 - protein, 7 aa, synthetic construct
MNNHQST

SEQ ID NO: 2571 - protein, 7 aa, synthetic construct
FPGHSMN

SEQ ID NO: 2572 - protein, 7 aa, synthetic construct
QYPKGAF

SEQ ID NO: 2573 - protein, 7 aa, synthetic construct
GRVQEEN

SEQ ID NO: 2574 - protein, 7 aa, synthetic construct
IYTGSQL

SEQ ID NO: 2575 - protein, 7 aa, synthetic construct
HVRAPFD

SEQ ID NO: 2576 - protein, 7 aa, synthetic construct
ETRLAGK

SEQ ID NO: 2577 - protein, 7 aa, synthetic construct
QHAMTEV

SEQ ID NO: 2578 - protein, 7 aa, synthetic construct
IQGTNAF

SEQ ID NO: 2579 - protein, 7 aa, synthetic construct
HPEIKNS

SEQ ID NO: 2580 - protein, 7 aa, synthetic construct
YPDRNKD

SEQ ID NO: 2581 - protein, 7 aa, synthetic construct
EKEQRVS

SEQ ID NO: 2582 - protein, 7 aa, synthetic construct
QGSVSYN

SEQ ID NO: 2583 - protein, 7 aa, synthetic construct
ALQHGMG

SEQ ID NO: 2584 - protein, 7 aa, synthetic construct
AITQGKA

SEQ ID NO: 2585 - protein, 7 aa, synthetic construct
TPTSHEM

SEQ ID NO: 2586 - protein, 7 aa, synthetic construct
SLNQRHD

SEQ ID NO: 2587 - protein, 7 aa, synthetic construct
TGEKKMN

SEQ ID NO: 2588 - protein, 7 aa, synthetic construct
AGGSIQI

SEQ ID NO: 2589 - protein, 7 aa, synthetic construct
GNHNNYV

SEQ ID NO: 2590 - protein, 7 aa, synthetic construct
PRESREA

SEQ ID NO: 2591 - protein, 7 aa, synthetic construct
KDTQTSM

SEQ ID NO: 2592 - protein, 7 aa, synthetic construct
PTSDKMP

SEQ ID NO: 2593 - protein, 7 aa, synthetic construct
VEWKSRD

SEQ ID NO: 2594 - protein, 7 aa, synthetic construct
AHLGKGV

SEQ ID NO: 2595 - protein, 7 aa, synthetic construct
DGRSEIK

SEQ ID NO: 2596 - protein, 7 aa, synthetic construct
YWPGQTE

SEQ ID NO: 2597 - protein, 7 aa, synthetic construct
SNRENEF

SEQ ID NO: 2598 - protein, 7 aa, synthetic construct
LTVKSFP

SEQ ID NO: 2599 - protein, 7 aa, synthetic construct
TANKYDS

SEQ ID NO: 2600 - protein, 7 aa, synthetic construct
TQGVDYH

SEQ ID NO: 2601 - protein, 7 aa, synthetic construct
DHNKRTA

SEQ ID NO: 2602 - protein, 7 aa, synthetic construct
LFSGKKE

SEQ ID NO: 2603 - protein, 7 aa, synthetic construct
HQNSLNY

SEQ ID NO: 2604 - protein, 7 aa, synthetic construct
FGSAEGR

SEQ ID NO: 2605 - protein, 7 aa, synthetic construct
RSPATQE

SEQ ID NO: 2606 - protein, 7 aa, synthetic construct
GSGQHQM

SEQ ID NO: 2607 - protein, 7 aa, synthetic construct
KGPDNRI

SEQ ID NO: 2608 - protein, 7 aa, synthetic construct
GLNQSPH

SEQ ID NO: 2609 - protein, 7 aa, synthetic construct
ADQGGAP

SEQ ID NO: 2610 - protein, 7 aa, synthetic construct
HISKQQA

SEQ ID NO: 2611 - protein, 7 aa, synthetic construct
FNKIMDS

SEQ ID NO: 2612 - protein, 7 aa, synthetic construct
SQGYNVP

SEQ ID NO: 2613 - protein, 7 aa, synthetic construct
SPKVITH

SEQ ID NO: 2614 - protein, 7 aa, synthetic construct
TQQPHDH

SEQ ID NO: 2615 - protein, 7 aa, synthetic construct
REVNGRM

SEQ ID NO: 2616 - protein, 7 aa, synthetic construct
WMKSGTG

SEQ ID NO: 2617 - protein, 7 aa, synthetic construct
WSNRITD

SEQ ID NO: 2618 - protein, 7 aa, synthetic construct
IGRQVTV

SEQ ID NO: 2619 - protein, 7 aa, synthetic construct
SPRDGAK

SEQ ID NO: 2620 - protein, 7 aa, synthetic construct
YGISREA

SEQ ID NO: 2621 - protein, 7 aa, synthetic construct
DTTKSDR

SEQ ID NO: 2622 - protein, 7 aa, synthetic construct
SNATDRT

SEQ ID NO: 2623 - protein, 7 aa, synthetic construct
QDKGHIL

SEQ ID NO: 2624 - protein, 7 aa, synthetic construct
GVDVRPS

SEQ ID NO: 2625 - protein, 7 aa, synthetic construct
FQREAVG

SEQ ID NO: 2626 - protein, 7 aa, synthetic construct
NYQAGQI

SEQ ID NO: 2627 - protein, 7 aa, synthetic construct
PDKPNYT

SEQ ID NO: 2628 - protein, 7 aa, synthetic construct
EGSNQST

SEQ ID NO: 2629 - protein, 7 aa, synthetic construct
PTQSAGH

SEQ ID NO: 2630 - protein, 7 aa, synthetic construct
MSMNKMS

SEQ ID NO: 2631 - protein, 7 aa, synthetic construct
LWKTADT

SEQ ID NO: 2632 - protein, 7 aa, synthetic construct
KEPYVKI

SEQ ID NO: 2633 - protein, 7 aa, synthetic construct
NTSTGLF

SEQ ID NO: 2634 - protein, 7 aa, synthetic construct
RDHGYGL

SEQ ID NO: 2635 - protein, 7 aa, synthetic construct
RHDAREQ

SEQ ID NO: 2636 - protein, 7 aa, synthetic construct
AGPFARE

SEQ ID NO: 2637 - protein, 7 aa, synthetic construct
MPHKNID

SEQ ID NO: 2638 - protein, 7 aa, synthetic construct
YMERGIV

SEQ ID NO: 2639 - protein, 7 aa, synthetic construct
RMSGQPM

SEQ ID NO: 2640 - protein, 7 aa, synthetic construct
DRKPEKI

SEQ ID NO: 2641 - protein, 7 aa, synthetic construct
YTQTKEY

SEQ ID NO: 2642 - protein, 7 aa, synthetic construct
NSTHHAA

SEQ ID NO: 2643 - protein, 7 aa, synthetic construct
PLNTKVY

SEQ ID NO: 2644 - protein, 7 aa, synthetic construct
QFVQEKS

SEQ ID NO: 2645 - protein, 7 aa, synthetic construct
SNPTMRQ

SEQ ID NO: 2646 - protein, 7 aa, synthetic construct
IRGDIDQ

SEQ ID NO: 2647 - protein, 7 aa, synthetic construct
KIAGMPD

SEQ ID NO: 2648 - protein, 7 aa, synthetic construct
AYGPSPI

SEQ ID NO: 2649 - protein, 7 aa, synthetic construct
TGSQPEN

SEQ ID NO: 2650 - protein, 7 aa, synthetic construct
IGGNERW

SEQ ID NO: 2651 - protein, 7 aa, synthetic construct
EKTSMRE

SEQ ID NO: 2652 - protein, 7 aa, synthetic construct
HKGVKEV

SEQ ID NO: 2653 - protein, 7 aa, synthetic construct
PHGEFAL

SEQ ID NO: 2654 - protein, 7 aa, synthetic construct
RTTQADV

SEQ ID NO: 2655 - protein, 7 aa, synthetic construct
AGGHMTA

SEQ ID NO: 2656 - protein, 7 aa, synthetic construct
HQNSTQS

SEQ ID NO: 2657 - protein, 7 aa, synthetic construct
LEHNKFE

SEQ ID NO: 2658 - protein, 7 aa, synthetic construct
PPPINTD

SEQ ID NO: 2659 - protein, 7 aa, synthetic construct
QQATQEA

SEQ ID NO: 2660 - protein, 7 aa, synthetic construct
KGTEAAK

SEQ ID NO: 2661 - protein, 7 aa, synthetic construct
KVAEQSR

SEQ ID NO: 2662 - protein, 7 aa, synthetic construct
QDMTHEV

SEQ ID NO: 2663 - protein, 7 aa, synthetic construct
NGKEAHS

SEQ ID NO: 2664 - protein, 7 aa, synthetic construct
ASQMPRA

SEQ ID NO: 2665 - protein, 7 aa, synthetic construct
VKEGQHM

SEQ ID NO: 2666 - protein, 7 aa, synthetic construct
IYGRLAD

SEQ ID NO: 2667 - protein, 7 aa, synthetic construct
KSFEKEP

SEQ ID NO: 2668 - protein, 7 aa, synthetic construct
VASNRGY

SEQ ID NO: 2669 - protein, 7 aa, synthetic construct
LSVPNSS

SEQ ID NO: 2670 - protein, 7 aa, synthetic construct
NNYPDAK

SEQ ID NO: 2671 - protein, 7 aa, synthetic construct
SGSMPMG

SEQ ID NO: 2672 - protein, 7 aa, synthetic construct
RFSHPDG

SEQ ID NO: 2673 - protein, 7 aa, synthetic construct
LKDAAHL

SEQ ID NO: 2674 - protein, 7 aa, synthetic construct
LKQNFVP

SEQ ID NO: 2675 - protein, 7 aa, synthetic construct
SYESPKV

SEQ ID NO: 2676 - protein, 7 aa, synthetic construct
DKNHVMN

SEQ ID NO: 2677 - protein, 7 aa, synthetic construct
YAPDRAV

SEQ ID NO: 2678 - protein, 7 aa, synthetic construct
SRGFNPN

SEQ ID NO: 2679 - protein, 7 aa, synthetic construct
DARSTKV

SEQ ID NO: 2680 - protein, 7 aa, synthetic construct
PGPNAGV

SEQ ID NO: 2681 - protein, 7 aa, synthetic construct
GQKYVSH

SEQ ID NO: 2682 - protein, 7 aa, synthetic construct
SSKHIAI

SEQ ID NO: 2683 - protein, 7 aa, synthetic construct
HKGTALN

SEQ ID NO: 2684 - protein, 7 aa, synthetic construct
GFINGEP

SEQ ID NO: 2685 - protein, 7 aa, synthetic construct
STYKEIS

SEQ ID NO: 2686 - protein, 7 aa, synthetic construct
PSGKVDD

SEQ ID NO: 2687 - protein, 7 aa, synthetic construct
QLGFEQA

SEQ ID NO: 2688 - protein, 7 aa, synthetic construct
SGSQSDN

SEQ ID NO: 2689 - protein, 7 aa, synthetic construct
YKNGMTF

SEQ ID NO: 2690 - protein, 7 aa, synthetic construct
FNPMALQ

SEQ ID NO: 2691 - protein, 7 aa, synthetic construct
MKQSYGM

SEQ ID NO: 2692 - protein, 7 aa, synthetic construct
TSRENRE

SEQ ID NO: 2693 - protein, 7 aa, synthetic construct
PSTQKNP

SEQ ID NO: 2694 - protein, 7 aa, synthetic construct
KMGVDRA

SEQ ID NO: 2695 - protein, 7 aa, synthetic construct
HTHEYET

SEQ ID NO: 2696 - protein, 7 aa, synthetic construct
VAQSKLD

SEQ ID NO: 2697 - protein, 7 aa, synthetic construct
NVHSGNG

SEQ ID NO: 2698 - protein, 7 aa, synthetic construct
QNGQPIM

SEQ ID NO: 2699 - protein, 7 aa, synthetic construct
EKMQAMH

SEQ ID NO: 2700 - protein, 7 aa, synthetic construct
LLQNHAN

SEQ ID NO: 2701 - protein, 7 aa, synthetic construct
IHSKIQF

SEQ ID NO: 2702 - protein, 7 aa, synthetic construct
LKYITTD

SEQ ID NO: 2703 - protein, 7 aa, synthetic construct
FMKGYED

SEQ ID NO: 2704 - protein, 7 aa, synthetic construct
NQPATHS

SEQ ID NO: 2705 - protein, 7 aa, synthetic construct
KSEKIVP

SEQ ID NO: 2706 - protein, 7 aa, synthetic construct
KKLDHMT

SEQ ID NO: 2707 - protein, 7 aa, synthetic construct
EKGFTAQ

SEQ ID NO: 2708 - protein, 7 aa, synthetic construct
YSMGRQP

SEQ ID NO: 2709 - protein, 7 aa, synthetic construct
HSAKKDE

SEQ ID NO: 2710 - protein, 7 aa, synthetic construct
NDRNNLA

SEQ ID NO: 2711 - protein, 7 aa, synthetic construct
SLRAVTA

SEQ ID NO: 2712 - protein, 7 aa, synthetic construct
WGAAEKT

SEQ ID NO: 2713 - protein, 7 aa, synthetic construct
HSNSGIL

SEQ ID NO: 2714 - protein, 7 aa, synthetic construct
VVRGDAS

SEQ ID NO: 2715 - protein, 7 aa, synthetic construct
MVTGKYM

SEQ ID NO: 2716 - protein, 7 aa, synthetic construct
AKPTVNT

SEQ ID NO: 2717 - protein, 7 aa, synthetic construct
SPPNTNG

SEQ ID NO: 2718 - protein, 7 aa, synthetic construct
DMGKSAL

SEQ ID NO: 2719 - protein, 7 aa, synthetic construct
YHMNNHP

SEQ ID NO: 2720 - protein, 7 aa, synthetic construct
LGSSARA

SEQ ID NO: 2721 - protein, 7 aa, synthetic construct
HRDAVSS

SEQ ID NO: 2722 - protein, 7 aa, synthetic construct
IEKFMKS

SEQ ID NO: 2723 - protein, 7 aa, synthetic construct
ERQDNSN

SEQ ID NO: 2724 - protein, 7 aa, synthetic construct
WGSTVQK

SEQ ID NO: 2725 - protein, 7 aa, synthetic construct
TAQDHNN

SEQ ID NO: 2726 - protein, 7 aa, synthetic construct
DQRVPRS

SEQ ID NO: 2727 - protein, 7 aa, synthetic construct
YKGFANH

SEQ ID NO: 2728 - protein, 7 aa, synthetic construct
PFKIQDG

SEQ ID NO: 2729 - protein, 7 aa, synthetic construct
IMNSHNN

SEQ ID NO: 2730 - protein, 7 aa, synthetic construct
ARLGNDT

SEQ ID NO: 2731 - protein, 7 aa, synthetic construct
VRHDTSA

SEQ ID NO: 2732 - protein, 7 aa, synthetic construct
DKKMPEA

SEQ ID NO: 2733 - protein, 7 aa, synthetic construct
HLDQKNW

SEQ ID NO: 2734 - protein, 7 aa, synthetic construct
FKSASNM

SEQ ID NO: 2735 - protein, 7 aa, synthetic construct
GQARPGT

SEQ ID NO: 2736 - protein, 7 aa, synthetic construct
SGRMEGN

SEQ ID NO: 2737 - protein, 7 aa, synthetic construct
ISYSAEE

SEQ ID NO: 2738 - protein, 7 aa, synthetic construct
KITTNDA

SEQ ID NO: 2739 - protein, 7 aa, synthetic construct
NENAAKQ

SEQ ID NO: 2740 - protein, 7 aa, synthetic construct
PTRINTG

SEQ ID NO: 2741 - protein, 7 aa, synthetic construct
EDPKYLR

SEQ ID NO: 2742 - protein, 7 aa, synthetic construct
RVHPGSN

SEQ ID NO: 2743 - protein, 7 aa, synthetic construct
QNHSQSI

SEQ ID NO: 2744 - protein, 7 aa, synthetic construct
WQHKNSP

SEQ ID NO: 2745 - protein, 7 aa, synthetic construct
YSPVRIE

SEQ ID NO: 2746 - protein, 7 aa, synthetic construct
RQIEGPL

SEQ ID NO: 2747 - protein, 7 aa, synthetic construct
LPQINQS

SEQ ID NO: 2748 - protein, 7 aa, synthetic construct
QTSGTGL

SEQ ID NO: 2749 - protein, 7 aa, synthetic construct
DKTHIVE

SEQ ID NO: 2750 - protein, 7 aa, synthetic construct
GAAIAAE

SEQ ID NO: 2751 - protein, 7 aa, synthetic construct
LGAHLQQ

SEQ ID NO: 2752 - protein, 7 aa, synthetic construct
KGGIAPH

SEQ ID NO: 2753 - protein, 7 aa, synthetic construct
EKTPPLQ

SEQ ID NO: 2754 - protein, 7 aa, synthetic construct
QIGMRGP

SEQ ID NO: 2755 - protein, 7 aa, synthetic construct
VRGSANE

SEQ ID NO: 2756 - protein, 7 aa, synthetic construct
KTSPNPS

SEQ ID NO: 2757 - protein, 7 aa, synthetic construct
TPSNAVD

SEQ ID NO: 2758 - protein, 7 aa, synthetic construct
TDGGYLV

SEQ ID NO: 2759 - protein, 7 aa, synthetic construct
VPPKYAD

SEQ ID NO: 2760 - protein, 7 aa, synthetic construct
VTSKGFA

SEQ ID NO: 2761 - protein, 7 aa, synthetic construct
HEHLVSA

SEQ ID NO: 2762 - protein, 7 aa, synthetic construct
YTKMNEL

SEQ ID NO: 2763 - protein, 7 aa, synthetic construct
QDRIVIG

SEQ ID NO: 2764 - protein, 7 aa, synthetic construct
TLPRETP

SEQ ID NO: 2765 - protein, 7 aa, synthetic construct
DRSAIEH

SEQ ID NO: 2766 - protein, 7 aa, synthetic construct
SQTVRTA

SEQ ID NO: 2767 - protein, 7 aa, synthetic construct
AAHVSGY

SEQ ID NO: 2768 - protein, 7 aa, synthetic construct
HTPKQGA

SEQ ID NO: 2769 - protein, 7 aa, synthetic construct
FNQPEAV

SEQ ID NO: 2770 - protein, 7 aa, synthetic construct
NQNLKMV

SEQ ID NO: 2771 - protein, 7 aa, synthetic construct
QQNGGFH

SEQ ID NO: 2772 - protein, 7 aa, synthetic construct
FGSLSTP

SEQ ID NO: 2773 - protein, 7 aa, synthetic construct
GNSGILT

SEQ ID NO: 2774 - protein, 7 aa, synthetic construct
RAEGAHP

SEQ ID NO: 2775 - protein, 7 aa, synthetic construct
RQGTPDK

SEQ ID NO: 2776 - protein, 7 aa, synthetic construct
RVQQLQP

SEQ ID NO: 2777 - protein, 7 aa, synthetic construct
YYKHVES

SEQ ID NO: 2778 - protein, 7 aa, synthetic construct
HVNAPYD

SEQ ID NO: 2779 - protein, 7 aa, synthetic construct
VMSARNG

SEQ ID NO: 2780 - protein, 7 aa, synthetic construct
MNMERSS

SEQ ID NO: 2781 - protein, 7 aa, synthetic construct
PYIGSGA

SEQ ID NO: 2782 - protein, 7 aa, synthetic construct
WGGFANG

SEQ ID NO: 2783 - protein, 7 aa, synthetic construct
TLGYQTQ

SEQ ID NO: 2784 - protein, 7 aa, synthetic construct
FGGTAHT

SEQ ID NO: 2785 - protein, 7 aa, synthetic construct
TMAHKDH

SEQ ID NO: 2786 - protein, 7 aa, synthetic construct
RNQNEVT

SEQ ID NO: 2787 - protein, 7 aa, synthetic construct
DNHVEHR

SEQ ID NO: 2788 - protein, 7 aa, synthetic construct
DFRGLAA

SEQ ID NO: 2789 - protein, 7 aa, synthetic construct
REHDSVN

SEQ ID NO: 2790 - protein, 7 aa, synthetic construct
NPRYEMV

SEQ ID NO: 2791 - protein, 7 aa, synthetic construct
ISSNGQI

SEQ ID NO: 2792 - protein, 7 aa, synthetic construct
GDLGFRA

SEQ ID NO: 2793 - protein, 7 aa, synthetic construct
PYNTSSD

SEQ ID NO: 2794 - protein, 7 aa, synthetic construct
LYGMQQP

SEQ ID NO: 2795 - protein, 7 aa, synthetic construct
IMSGVMP

SEQ ID NO: 2796 - protein, 7 aa, synthetic construct
AIVRNSL

SEQ ID NO: 2797 - protein, 7 aa, synthetic construct
TDEIRAT

SEQ ID NO: 2798 - protein, 7 aa, synthetic construct
RFTEISA

SEQ ID NO: 2799 - protein, 7 aa, synthetic construct
HNVIKDS

SEQ ID NO: 2800 - protein, 7 aa, synthetic construct
LPTFGKN

SEQ ID NO: 2801 - protein, 7 aa, synthetic construct
GTGNQNQ

SEQ ID NO: 2802 - protein, 7 aa, synthetic construct
QDQKLHQ

SEQ ID NO: 2803 - protein, 7 aa, synthetic construct
LYGTKGQ

SEQ ID NO: 2804 - protein, 7 aa, synthetic construct
YGNKHKE

SEQ ID NO: 2805 - protein, 7 aa, synthetic construct
WIKSTAS

SEQ ID NO: 2806 - protein, 7 aa, synthetic construct
YISNDTH

SEQ ID NO: 2807 - protein, 7 aa, synthetic construct
TTTPGRD

SEQ ID NO: 2808 - protein, 7 aa, synthetic construct
GALQHSM

SEQ ID NO: 2809 - protein, 7 aa, synthetic construct
SKIYQEG

SEQ ID NO: 2810 - protein, 7 aa, synthetic construct
YQTHSGN

SEQ ID NO: 2811 - protein, 7 aa, synthetic construct
QHMSKVI

SEQ ID NO: 2812 - protein, 7 aa, synthetic construct
PKAGEGG

SEQ ID NO: 2813 - protein, 7 aa, synthetic construct
ARPVTLD

SEQ ID NO: 2814 - protein, 7 aa, synthetic construct
FVQQHGD

SEQ ID NO: 2815 - protein, 7 aa, synthetic construct
VKWAPQD

SEQ ID NO: 2816 - protein, 7 aa, synthetic construct
LQKALPT

SEQ ID NO: 2817 - protein, 7 aa, synthetic construct
MLSKAER

SEQ ID NO: 2818 - protein, 7 aa, synthetic construct
FHPNMGG

SEQ ID NO: 2819 - protein, 7 aa, synthetic construct
VQFQTQN

SEQ ID NO: 2820 - protein, 7 aa, synthetic construct
NQTYKQE

SEQ ID NO: 2821 - protein, 7 aa, synthetic construct
AIAAQQG

SEQ ID NO: 2822 - protein, 7 aa, synthetic construct
EKRPIPE

SEQ ID NO: 2823 - protein, 7 aa, synthetic construct
FRSNPMQ

SEQ ID NO: 2824 - protein, 7 aa, synthetic construct
VEHWSNE

SEQ ID NO: 2825 - protein, 7 aa, synthetic construct
IGQAAYV

SEQ ID NO: 2826 - protein, 7 aa, synthetic construct
HRRTEET

SEQ ID NO: 2827 - protein, 7 aa, synthetic construct
GIQKPGD

SEQ ID NO: 2828 - protein, 7 aa, synthetic construct
NRPMQEA

SEQ ID NO: 2829 - protein, 7 aa, synthetic construct
IISERER

SEQ ID NO: 2830 - protein, 7 aa, synthetic construct
KENKQFV

SEQ ID NO: 2831 - protein, 7 aa, synthetic construct
VVTMNQH

SEQ ID NO: 2832 - protein, 7 aa, synthetic construct
PFKNQHD

SEQ ID NO: 2833 - protein, 7 aa, synthetic construct
IKNLVGG

SEQ ID NO: 2834 - protein, 7 aa, synthetic construct
LPMDGEM

SEQ ID NO: 2835 - protein, 7 aa, synthetic construct
HPMNQAR

SEQ ID NO: 2836 - protein, 7 aa, synthetic construct
KMQADDW

SEQ ID NO: 2837 - protein, 7 aa, synthetic construct
SAPLGTH

SEQ ID NO: 2838 - protein, 7 aa, synthetic construct
MRDTFKP

SEQ ID NO: 2839 - protein, 7 aa, synthetic construct
RVGIDIV

SEQ ID NO: 2840 - protein, 7 aa, synthetic construct
EIGISHE

SEQ ID NO: 2841 - protein, 7 aa, synthetic construct
YSPKAKP

SEQ ID NO: 2842 - protein, 7 aa, synthetic construct
FNSGVHE

SEQ ID NO: 2843 - protein, 7 aa, synthetic construct
KVIEKDS

SEQ ID NO: 2844 - protein, 7 aa, synthetic construct
IGPMPVG

SEQ ID NO: 2845 - protein, 7 aa, synthetic construct
WEGVRMS

SEQ ID NO: 2846 - protein, 7 aa, synthetic construct
RPNVQMI

SEQ ID NO: 2847 - protein, 7 aa, synthetic construct
DRGESIY

SEQ ID NO: 2848 - protein, 7 aa, synthetic construct
EFHDGNR

SEQ ID NO: 2849 - protein, 7 aa, synthetic construct
HMQEQKA

SEQ ID NO: 2850 - protein, 7 aa, synthetic construct
EAHHAYK

SEQ ID NO: 2851 - protein, 7 aa, synthetic construct
NTHMPNQ

SEQ ID NO: 2852 - protein, 7 aa, synthetic construct
NVRANGF

SEQ ID NO: 2853 - protein, 7 aa, synthetic construct
VGAPPKS

SEQ ID NO: 2854 - protein, 7 aa, synthetic construct
PKNGEHF

SEQ ID NO: 2855 - protein, 7 aa, synthetic construct
YQHANGD

SEQ ID NO: 2856 - protein, 7 aa, synthetic construct
TAIGSRT

SEQ ID NO: 2857 - protein, 7 aa, synthetic construct
QMTPHVS

SEQ ID NO: 2858 - protein, 7 aa, synthetic construct
VQMLSKE

SEQ ID NO: 2859 - protein, 7 aa, synthetic construct
QTSKAYV

SEQ ID NO: 2860 - protein, 7 aa, synthetic construct
NVNVYKA

SEQ ID NO: 2861 - protein, 7 aa, synthetic construct
KLSASVP

SEQ ID NO: 2862 - protein, 7 aa, synthetic construct
YDQHPKN

SEQ ID NO: 2863 - protein, 7 aa, synthetic construct
RTMESET

SEQ ID NO: 2864 - protein, 7 aa, synthetic construct
PVGSAKS

SEQ ID NO: 2865 - protein, 7 aa, synthetic construct
QEAKIPP

SEQ ID NO: 2866 - protein, 7 aa, synthetic construct
AEYQQQK

SEQ ID NO: 2867 - protein, 7 aa, synthetic construct
NGGVSND

SEQ ID NO: 2868 - protein, 7 aa, synthetic construct
VHGVPQD

SEQ ID NO: 2869 - protein, 7 aa, synthetic construct
MREREQV

SEQ ID NO: 2870 - protein, 7 aa, synthetic construct
PAHTEWP

SEQ ID NO: 2871 - protein, 7 aa, synthetic construct
EHKQIDK

SEQ ID NO: 2872 - protein, 7 aa, synthetic construct
KINVGMA

SEQ ID NO: 2873 - protein, 7 aa, synthetic construct
FMTKMDP

SEQ ID NO: 2874 - protein, 7 aa, synthetic construct
VDMKGPA

SEQ ID NO: 2875 - protein, 7 aa, synthetic construct
GYKNADN

SEQ ID NO: 2876 - protein, 7 aa, synthetic construct
RKEERED

SEQ ID NO: 2877 - protein, 7 aa, synthetic construct
DSRLVAE

SEQ ID NO: 2878 - protein, 7 aa, synthetic construct
IQNNPVS

SEQ ID NO: 2879 - protein, 7 aa, synthetic construct
MVPSMNG

SEQ ID NO: 2880 - protein, 7 aa, synthetic construct
PQNQDHE

SEQ ID NO: 2881 - protein, 7 aa, synthetic construct
TVDRIRE

SEQ ID NO: 2882 - protein, 7 aa, synthetic construct
DAVHRGP

SEQ ID NO: 2883 - protein, 7 aa, synthetic construct
WRNDKPS

SEQ ID NO: 2884 - protein, 7 aa, synthetic construct
ESEKMGF

SEQ ID NO: 2885 - protein, 7 aa, synthetic construct
GGVRFPP

SEQ ID NO: 2886 - protein, 7 aa, synthetic construct
DHMKPPW

SEQ ID NO: 2887 - protein, 7 aa, synthetic construct
GNLDNTR

SEQ ID NO: 2888 - protein, 7 aa, synthetic construct
PVKGGIG

SEQ ID NO: 2889 - protein, 7 aa, synthetic construct
SSPHRES

SEQ ID NO: 2890 - protein, 7 aa, synthetic construct
KSLHEMV

SEQ ID NO: 2891 - protein, 7 aa, synthetic construct
DHQNHRG

SEQ ID NO: 2892 - protein, 7 aa, synthetic construct
IPYVPRD

SEQ ID NO: 2893 - protein, 7 aa, synthetic construct
ISTDPNK

SEQ ID NO: 2894 - protein, 7 aa, synthetic construct
KNGVGPN

SEQ ID NO: 2895 - protein, 7 aa, synthetic construct
GSESRAF

SEQ ID NO: 2896 - protein, 7 aa, synthetic construct
IKVQNGI

SEQ ID NO: 2897 - protein, 7 aa, synthetic construct
PFAKQGM

SEQ ID NO: 2898 - protein, 7 aa, synthetic construct
DSHAMDR

SEQ ID NO: 2899 - protein, 7 aa, synthetic construct
NYHKDLG

SEQ ID NO: 2900 - protein, 7 aa, synthetic construct
PYHDESR

SEQ ID NO: 2901 - protein, 7 aa, synthetic construct
NLEAKAG

SEQ ID NO: 2902 - protein, 7 aa, synthetic construct
MKMNGFN

SEQ ID NO: 2903 - protein, 7 aa, synthetic construct
SNNQGSL

SEQ ID NO: 2904 - protein, 7 aa, synthetic construct
MGSFYGP

SEQ ID NO: 2905 - protein, 7 aa, synthetic construct
SSGGGMF

SEQ ID NO: 2906 - protein, 7 aa, synthetic construct
IKNDHFT

SEQ ID NO: 2907 - protein, 7 aa, synthetic construct
IMATSAG

SEQ ID NO: 2908 - protein, 7 aa, synthetic construct
KAQMQNN

SEQ ID NO: 2909 - protein, 7 aa, synthetic construct
FTPPRNA

SEQ ID NO: 2910 - protein, 7 aa, synthetic construct
YTANRPA

SEQ ID NO: 2911 - protein, 7 aa, synthetic construct
NQHDDAR

SEQ ID NO: 2912 - protein, 7 aa, synthetic construct
TQKNYQQ

SEQ ID NO: 2913 - protein, 7 aa, synthetic construct
NGKFNVM

SEQ ID NO: 2914 - protein, 7 aa, synthetic construct
WKMNHPE

SEQ ID NO: 2915 - protein, 7 aa, synthetic construct
TSIKDQY

SEQ ID NO: 2916 - protein, 7 aa, synthetic construct
TLVNAHS

SEQ ID NO: 2917 - protein, 7 aa, synthetic construct
YGLEKAI

SEQ ID NO: 2918 - protein, 7 aa, synthetic construct
SISQSEK

SEQ ID NO: 2919 - protein, 7 aa, synthetic construct
RKEQDQA

SEQ ID NO: 2920 - protein, 7 aa, synthetic construct
SDGPTPP

SEQ ID NO: 2921 - protein, 7 aa, synthetic construct
MGRGEDH

SEQ ID NO: 2922 - protein, 7 aa, synthetic construct
YAQERYN

SEQ ID NO: 2923 - protein, 7 aa, synthetic construct
SAEHPNY

SEQ ID NO: 2924 - protein, 7 aa, synthetic construct
MSKEKDV

SEQ ID NO: 2925 - protein, 7 aa, synthetic construct
HRTTMMD

SEQ ID NO: 2926 - protein, 7 aa, synthetic construct
GMHRVVP

SEQ ID NO: 2927 - protein, 7 aa, synthetic construct
MKGNSDH

SEQ ID NO: 2928 - protein, 7 aa, synthetic construct
MNTGGDG

SEQ ID NO: 2929 - protein, 7 aa, synthetic construct
SPPHSHG

SEQ ID NO: 2930 - protein, 7 aa, synthetic construct
QLGRSTF

SEQ ID NO: 2931 - protein, 7 aa, synthetic construct
RGESGYA

SEQ ID NO: 2932 - protein, 7 aa, synthetic construct
RLDEKGT

SEQ ID NO: 2933 - protein, 7 aa, synthetic construct
SRPLMHD

SEQ ID NO: 2934 - protein, 7 aa, synthetic construct
PDDFKGK

SEQ ID NO: 2935 - protein, 7 aa, synthetic construct
VKNREIH

SEQ ID NO: 2936 - protein, 7 aa, synthetic construct
QLRHNQD

SEQ ID NO: 2937 - protein, 7 aa, synthetic construct
VNGHEQR

SEQ ID NO: 2938 - protein, 7 aa, synthetic construct
HKATHDF

SEQ ID NO: 2939 - protein, 7 aa, synthetic construct
FYTTGKN

SEQ ID NO: 2940 - protein, 7 aa, synthetic construct
SPMHTHS

SEQ ID NO: 2941 - protein, 7 aa, synthetic construct
NGSNGLD

SEQ ID NO: 2942 - protein, 7 aa, synthetic construct
QETMLPH

SEQ ID NO: 2943 - protein, 7 aa, synthetic construct
WEVNNRS

SEQ ID NO: 2944 - protein, 7 aa, synthetic construct
NHNNFEA

SEQ ID NO: 2945 - protein, 7 aa, synthetic construct
MPMPKEP

SEQ ID NO: 2946 - protein, 7 aa, synthetic construct
DTKQGMV

SEQ ID NO: 2947 - protein, 7 aa, synthetic construct
FNKEVMT

SEQ ID NO: 2948 - protein, 7 aa, synthetic construct
SPEHPRG

SEQ ID NO: 2949 - protein, 7 aa, synthetic construct
FEYQTKA

SEQ ID NO: 2950 - protein, 7 aa, synthetic construct
TTNGFVK

SEQ ID NO: 2951 - protein, 7 aa, synthetic construct
STDNKPL

SEQ ID NO: 2952 - protein, 7 aa, synthetic construct
TKRDDYV

SEQ ID NO: 2953 - protein, 7 aa, synthetic construct
LQPRDRD

SEQ ID NO: 2954 - protein, 7 aa, synthetic construct
NKQQPLQ

SEQ ID NO: 2955 - protein, 7 aa, synthetic construct
KETSHIQ

SEQ ID NO: 2956 - protein, 7 aa, synthetic construct
AGHNTTP

SEQ ID NO: 2957 - protein, 7 aa, synthetic construct
DTAKPRA

SEQ ID NO: 2958 - protein, 7 aa, synthetic construct
QQTHSPY

SEQ ID NO: 2959 - protein, 7 aa, synthetic construct
QPPDSMK

SEQ ID NO: 2960 - protein, 7 aa, synthetic construct
EIEKNGR

SEQ ID NO: 2961 - protein, 7 aa, synthetic construct
IAGGYNI

SEQ ID NO: 2962 - protein, 7 aa, synthetic construct
KQKTEEF

SEQ ID NO: 2963 - protein, 7 aa, synthetic construct
YATQSRP

SEQ ID NO: 2964 - protein, 7 aa, synthetic construct
GKHSVLA

SEQ ID NO: 2965 - protein, 7 aa, synthetic construct
KDHKLAQ

SEQ ID NO: 2966 - protein, 7 aa, synthetic construct
SDATAYS

SEQ ID NO: 2967 - protein, 7 aa, synthetic construct
HRNVDSI

SEQ ID NO: 2968 - protein, 7 aa, synthetic construct
QRLPEQN

SEQ ID NO: 2969 - protein, 7 aa, synthetic construct
HIAQRYE

SEQ ID NO: 2970 - protein, 7 aa, synthetic construct
IPASLSS

SEQ ID NO: 2971 - protein, 7 aa, synthetic construct
SATLGAH

SEQ ID NO: 2972 - protein, 7 aa, synthetic construct
STRGPEG

SEQ ID NO: 2973 - protein, 7 aa, synthetic construct
ITPARYP

SEQ ID NO: 2974 - protein, 7 aa, synthetic construct
ARGMGYP

SEQ ID NO: 2975 - protein, 7 aa, synthetic construct
HTSEFIP

SEQ ID NO: 2976 - protein, 7 aa, synthetic construct
PKNSNDW

SEQ ID NO: 2977 - protein, 7 aa, synthetic construct
RPTVMND

SEQ ID NO: 2978 - protein, 7 aa, synthetic construct
PNSHHGN

SEQ ID NO: 2979 - protein, 7 aa, synthetic construct
HVTGNKI

SEQ ID NO: 2980 - protein, 7 aa, synthetic construct
TLTTATD

SEQ ID NO: 2981 - protein, 7 aa, synthetic construct
HQQQYKG

SEQ ID NO: 2982 - protein, 7 aa, synthetic construct
DRDRVAF

SEQ ID NO: 2983 - protein, 7 aa, synthetic construct
TSQDSHR

SEQ ID NO: 2984 - protein, 7 aa, synthetic construct
VQKYTQE

SEQ ID NO: 2985 - protein, 7 aa, synthetic construct
ADQPGTR

SEQ ID NO: 2986 - protein, 7 aa, synthetic construct
EGTTVTV

SEQ ID NO: 2987 - protein, 7 aa, synthetic construct
SPAQLPQ

SEQ ID NO: 2988 - protein, 7 aa, synthetic construct
QSTQFAP

SEQ ID NO: 2989 - protein, 7 aa, synthetic construct
KMSNADE

SEQ ID NO: 2990 - protein, 7 aa, synthetic construct
EQTHPTK

SEQ ID NO: 2991 - protein, 7 aa, synthetic construct
QKRVEEA

SEQ ID NO: 2992 - protein, 7 aa, synthetic construct
TEALHKN

SEQ ID NO: 2993 - protein, 7 aa, synthetic construct
QMAKDVY

SEQ ID NO: 2994 - protein, 7 aa, synthetic construct
FEHSRPD

SEQ ID NO: 2995 - protein, 7 aa, synthetic construct
HRLHENQ

SEQ ID NO: 2996 - protein, 7 aa, synthetic construct
YEREGMT

SEQ ID NO: 2997 - protein, 7 aa, synthetic construct
NKTDQSH

SEQ ID NO: 2998 - protein, 7 aa, synthetic construct
SIMHKET

SEQ ID NO: 2999 - protein, 7 aa, synthetic construct
QKSSKED

SEQ ID NO: 3000 - protein, 7 aa, synthetic construct
EKHPAQQ

SEQ ID NO: 3001 - protein, 7 aa, synthetic construct
KENGNSR

SEQ ID NO: 3002 - protein, 7 aa, synthetic construct
PPHQHQM

SEQ ID NO: 3003 - protein, 7 aa, synthetic construct
ERSTREI

SEQ ID NO: 3004 - protein, 7 aa, synthetic construct
DGGHHIL

SEQ ID NO: 3005 - protein, 7 aa, synthetic construct
NQTSAIM

SEQ ID NO: 3006 - protein, 7 aa, synthetic construct
RREQVEL

SEQ ID NO: 3007 - protein, 7 aa, synthetic construct
LDPNYKS

SEQ ID NO: 3008 - protein, 7 aa, synthetic construct
AARAEGE

SEQ ID NO: 3009 - protein, 7 aa, synthetic construct
ELRPQEK

SEQ ID NO: 3010 - protein, 7 aa, synthetic construct
WLAHHKE

SEQ ID NO: 3011 - protein, 7 aa, synthetic construct
MMHEQKP

SEQ ID NO: 3012 - protein, 7 aa, synthetic construct
VRREEGI

SEQ ID NO: 3013 - protein, 7 aa, synthetic construct
VRNNLLV

SEQ ID NO: 3014 - protein, 7 aa, synthetic construct
WTQGGTP

SEQ ID NO: 3015 - protein, 7 aa, synthetic construct
SRDMDTS

SEQ ID NO: 3016 - protein, 7 aa, synthetic construct
DKAHTIA

SEQ ID NO: 3017 - protein, 7 aa, synthetic construct
VNPTTFP

SEQ ID NO: 3018 - protein, 7 aa, synthetic construct
QTQTNLV

SEQ ID NO: 3019 - protein, 7 aa, synthetic construct
MIHGERV

SEQ ID NO: 3020 - protein, 7 aa, synthetic construct
HQNPNNY

SEQ ID NO: 3021 - protein, 7 aa, synthetic construct
VSQDRMA

SEQ ID NO: 3022 - protein, 7 aa, synthetic construct
HTQERYI

SEQ ID NO: 3023 - protein, 7 aa, synthetic construct
MFVDKGT

SEQ ID NO: 3024 - protein, 7 aa, synthetic construct
DQNVHRY

SEQ ID NO: 3025 - protein, 7 aa, synthetic construct
SSARIQE

SEQ ID NO: 3026 - protein, 7 aa, synthetic construct
AQADYMA

SEQ ID NO: 3027 - protein, 7 aa, synthetic construct
EARPTGY

SEQ ID NO: 3028 - protein, 7 aa, synthetic construct
FNSKEDH

SEQ ID NO: 3029 - protein, 7 aa, synthetic construct
IVNQRIT

SEQ ID NO: 3030 - protein, 7 aa, synthetic construct
HRQEYQT

SEQ ID NO: 3031 - protein, 7 aa, synthetic construct
AGNGYKA

SEQ ID NO: 3032 - protein, 7 aa, synthetic construct
LQNTPAT

SEQ ID NO: 3033 - protein, 7 aa, synthetic construct
RTQSEYT

SEQ ID NO: 3034 - protein, 7 aa, synthetic construct
YKSLQSD

SEQ ID NO: 3035 - protein, 7 aa, synthetic construct
KNKTNQD

SEQ ID NO: 3036 - protein, 7 aa, synthetic construct
SSIKMPA

SEQ ID NO: 3037 - protein, 7 aa, synthetic construct
VANVSIA

SEQ ID NO: 3038 - protein, 7 aa, synthetic construct
GRGALED

SEQ ID NO: 3039 - protein, 7 aa, synthetic construct
YFGESST

SEQ ID NO: 3040 - protein, 7 aa, synthetic construct
FENHTPL

SEQ ID NO: 3041 - protein, 7 aa, synthetic construct
AQVGGGF

SEQ ID NO: 3042 - protein, 7 aa, synthetic construct
VRQGYMG

SEQ ID NO: 3043 - protein, 7 aa, synthetic construct
TKEKYGY

SEQ ID NO: 3044 - protein, 7 aa, synthetic construct
LPKSDGK

SEQ ID NO: 3045 - protein, 7 aa, synthetic construct
MSQGMQV

SEQ ID NO: 3046 - protein, 7 aa, synthetic construct
RNEGKAT

SEQ ID NO: 3047 - protein, 7 aa, synthetic construct
QRPDELM

SEQ ID NO: 3048 - protein, 7 aa, synthetic construct
LHGNAHG

SEQ ID NO: 3049 - protein, 7 aa, synthetic construct
YKMYNEE

SEQ ID NO: 3050 - protein, 7 aa, synthetic construct
MPAVSHI

SEQ ID NO: 3051 - protein, 7 aa, synthetic construct
FSHADKS

SEQ ID NO: 3052 - protein, 7 aa, synthetic construct
ATMKHTY

SEQ ID NO: 3053 - protein, 7 aa, synthetic construct
TTKGDGM

SEQ ID NO: 3054 - protein, 7 aa, synthetic construct
TYHNKGE

SEQ ID NO: 3055 - protein, 7 aa, synthetic construct
NIPTVQS

SEQ ID NO: 3056 - protein, 7 aa, synthetic construct
VRVSEVH

SEQ ID NO: 3057 - protein, 7 aa, synthetic construct
IQDRGMN

SEQ ID NO: 3058 - protein, 7 aa, synthetic construct
TNLKENL

SEQ ID NO: 3059 - protein, 7 aa, synthetic construct
ASSQQVT

SEQ ID NO: 3060 - protein, 7 aa, synthetic construct
RPLNAPH

SEQ ID NO: 3061 - protein, 7 aa, synthetic construct
NKDNAFA

SEQ ID NO: 3062 - protein, 7 aa, synthetic construct
ISTNRQD

SEQ ID NO: 3063 - protein, 7 aa, synthetic construct
QENYRQN

SEQ ID NO: 3064 - protein, 7 aa, synthetic construct
NAAATQS

SEQ ID NO: 3065 - protein, 7 aa, synthetic construct
EEHKTFG

SEQ ID NO: 3066 - protein, 7 aa, synthetic construct
QPDKERV

SEQ ID NO: 3067 - protein, 7 aa, synthetic construct
QRIPTQT

SEQ ID NO: 3068 - protein, 7 aa, synthetic construct
VAANMRN

SEQ ID NO: 3069 - protein, 7 aa, synthetic construct
LKEYAPT

SEQ ID NO: 3070 - protein, 7 aa, synthetic construct
ALAQDHI

SEQ ID NO: 3071 - protein, 7 aa, synthetic construct
LTMGNAH

SEQ ID NO: 3072 - protein, 7 aa, synthetic construct
YPKNPGF

SEQ ID NO: 3073 - protein, 7 aa, synthetic construct
WANESRS

SEQ ID NO: 3074 - protein, 7 aa, synthetic construct
GMGTHIG

SEQ ID NO: 3075 - protein, 7 aa, synthetic construct
SIKDVPT

SEQ ID NO: 3076 - protein, 7 aa, synthetic construct
TLKGAPS

SEQ ID NO: 3077 - protein, 7 aa, synthetic construct
ETKSHEK

SEQ ID NO: 3078 - protein, 7 aa, synthetic construct
KERISMS

SEQ ID NO: 3079 - protein, 7 aa, synthetic construct
IMKMENT

SEQ ID NO: 3080 - protein, 7 aa, synthetic construct
ENSNAVK

SEQ ID NO: 3081 - protein, 7 aa, synthetic construct
QKALKTD

SEQ ID NO: 3082 - protein, 7 aa, synthetic construct
RVGIGNN

SEQ ID NO: 3083 - protein, 7 aa, synthetic construct
PQNTAWS

SEQ ID NO: 3084 - protein, 7 aa, synthetic construct
SPNGVMI

SEQ ID NO: 3085 - protein, 7 aa, synthetic construct
RGDQASK

SEQ ID NO: 3086 - protein, 7 aa, synthetic construct
DRNQMVV

SEQ ID NO: 3087 - protein, 7 aa, synthetic construct
HGSGVYE

SEQ ID NO: 3088 - protein, 7 aa, synthetic construct
AMGGETM

SEQ ID NO: 3089 - protein, 7 aa, synthetic construct
MMQKNES

SEQ ID NO: 3090 - protein, 7 aa, synthetic construct
YNAAQRA

SEQ ID NO: 3091 - protein, 7 aa, synthetic construct
IDQWGKG

SEQ ID NO: 3092 - protein, 7 aa, synthetic construct
HQKLPEI

SEQ ID NO: 3093 - protein, 7 aa, synthetic construct
ETEYKQK

SEQ ID NO: 3094 - protein, 7 aa, synthetic construct
SMRESVP

SEQ ID NO: 3095 - protein, 7 aa, synthetic construct
SAGWTNE

SEQ ID NO: 3096 - protein, 7 aa, synthetic construct
HDSIVKV

SEQ ID NO: 3097 - protein, 7 aa, synthetic construct
LPPESMA

SEQ ID NO: 3098 - protein, 7 aa, synthetic construct
QTSEFQV

SEQ ID NO: 3099 - protein, 7 aa, synthetic construct
VQNQGEM

SEQ ID NO: 3100 - protein, 7 aa, synthetic construct
EGPPNTP

SEQ ID NO: 3101 - protein, 7 aa, synthetic construct
LSRQDAY

SEQ ID NO: 3102 - protein, 7 aa, synthetic construct
HVGPNAS

SEQ ID NO: 3103 - protein, 7 aa, synthetic construct
YGPSAEA

SEQ ID NO: 3104 - protein, 7 aa, synthetic construct
FDKSKHV

SEQ ID NO: 3105 - protein, 7 aa, synthetic construct
NAGSTTS

SEQ ID NO: 3106 - protein, 7 aa, synthetic construct
INPSMTG

SEQ ID NO: 3107 - protein, 7 aa, synthetic construct
QDRSTMP

SEQ ID NO: 3108 - protein, 7 aa, synthetic construct
WGDHNDG

SEQ ID NO: 3109 - protein, 7 aa, synthetic construct
ARTDSNS

SEQ ID NO: 3110 - protein, 7 aa, synthetic construct
MQSMNTK

SEQ ID NO: 3111 - protein, 7 aa, synthetic construct
NAMNKSV

SEQ ID NO: 3112 - protein, 7 aa, synthetic construct
QHSVDRS

SEQ ID NO: 3113 - protein, 7 aa, synthetic construct
QIPFEKV

SEQ ID NO: 3114 - protein, 7 aa, synthetic construct
HEYKHGD

SEQ ID NO: 3115 - protein, 7 aa, synthetic construct
EYNKGGY

SEQ ID NO: 3116 - protein, 7 aa, synthetic construct
MDRNITE

SEQ ID NO: 3117 - protein, 7 aa, synthetic construct
VVEGRGF

SEQ ID NO: 3118 - protein, 7 aa, synthetic construct
EPVKPFN

SEQ ID NO: 3119 - protein, 7 aa, synthetic construct
GIQSQTD

SEQ ID NO: 3120 - protein, 7 aa, synthetic construct
PDRGFNV

SEQ ID NO: 3121 - protein, 7 aa, synthetic construct
VYPKQQE

SEQ ID NO: 3122 - protein, 7 aa, synthetic construct
GTKLSMH

SEQ ID NO: 3123 - protein, 7 aa, synthetic construct
VMHGGIS

SEQ ID NO: 3124 - protein, 7 aa, synthetic construct
FPKQHPM

SEQ ID NO: 3125 - protein, 7 aa, synthetic construct
PRSMTPP

SEQ ID NO: 3126 - protein, 7 aa, synthetic construct
HATLGNT

SEQ ID NO: 3127 - protein, 7 aa, synthetic construct
YNGEKTE

SEQ ID NO: 3128 - protein, 7 aa, synthetic construct
KGGHYFE

SEQ ID NO: 3129 - protein, 7 aa, synthetic construct
KHNDQHI

SEQ ID NO: 3130 - protein, 7 aa, synthetic construct
MPSHMKT

SEQ ID NO: 3131 - protein, 7 aa, synthetic construct
PGSLQNP

SEQ ID NO: 3132 - protein, 7 aa, synthetic construct
HGQDRSI

SEQ ID NO: 3133 - protein, 7 aa, synthetic construct
VNGVTIG

SEQ ID NO: 3134 - protein, 7 aa, synthetic construct
PQGQKPI

SEQ ID NO: 3135 - protein, 7 aa, synthetic construct
HPAVAMS

SEQ ID NO: 3136 - protein, 7 aa, synthetic construct
YEGSFQA

SEQ ID NO: 3137 - protein, 7 aa, synthetic construct
NHTNDPR

SEQ ID NO: 3138 - protein, 7 aa, synthetic construct
RPREQVE

SEQ ID NO: 3139 - protein, 7 aa, synthetic construct
TQEGKIM

SEQ ID NO: 3140 - protein, 7 aa, synthetic construct
GFKPHDH

SEQ ID NO: 3141 - protein, 7 aa, synthetic construct
VHTSSKQ

SEQ ID NO: 3142 - protein, 7 aa, synthetic construct
AKQDINR

SEQ ID NO: 3143 - protein, 7 aa, synthetic construct
DHHAMNA

SEQ ID NO: 3144 - protein, 7 aa, synthetic construct
IVLGAAP

SEQ ID NO: 3145 - protein, 7 aa, synthetic construct
VIQHGPN

SEQ ID NO: 3146 - protein, 7 aa, synthetic construct
HSAHKEG

SEQ ID NO: 3147 - protein, 7 aa, synthetic construct
IQHSGAS

SEQ ID NO: 3148 - protein, 7 aa, synthetic construct
FLDQIRA

SEQ ID NO: 3149 - protein, 7 aa, synthetic construct
SKWDGGS

SEQ ID NO: 3150 - protein, 7 aa, synthetic construct
DTAPNTR

SEQ ID NO: 3151 - protein, 7 aa, synthetic construct
SYQDMSA

SEQ ID NO: 3152 - protein, 7 aa, synthetic construct
GPSLQGV

SEQ ID NO: 3153 - protein, 7 aa, synthetic construct
SMSDGQN

SEQ ID NO: 3154 - protein, 7 aa, synthetic construct
YGGFRVE

SEQ ID NO: 3155 - protein, 7 aa, synthetic construct
GTSHNVG

SEQ ID NO: 3156 - protein, 7 aa, synthetic construct
HIPQRQP

SEQ ID NO: 3157 - protein, 7 aa, synthetic construct
RHQETSA

SEQ ID NO: 3158 - protein, 7 aa, synthetic construct
ILQEHRS

SEQ ID NO: 3159 - protein, 7 aa, synthetic construct
AQVKHLG

SEQ ID NO: 3160 - protein, 7 aa, synthetic construct
YKDRGHI

SEQ ID NO: 3161 - protein, 7 aa, synthetic construct
FLPKVEP

SEQ ID NO: 3162 - protein, 7 aa, synthetic construct
TMAHVHE

SEQ ID NO: 3163 - protein, 7 aa, synthetic construct
ISPTVKH

SEQ ID NO: 3164 - protein, 7 aa, synthetic construct
YGKMERV

SEQ ID NO: 3165 - protein, 7 aa, synthetic construct
ANHPSGK

SEQ ID NO: 3166 - protein, 7 aa, synthetic construct
TKISNVE

SEQ ID NO: 3167 - protein, 7 aa, synthetic construct
VNSLGHK

SEQ ID NO: 3168 - protein, 7 aa, synthetic construct
AKDEGTN

SEQ ID NO: 3169 - protein, 7 aa, synthetic construct
NHFTSGG

SEQ ID NO: 3170 - protein, 7 aa, synthetic construct
KPGPRPA

SEQ ID NO: 3171 - protein, 7 aa, synthetic construct
IADHRMI

SEQ ID NO: 3172 - protein, 7 aa, synthetic construct
IPTFHKE

SEQ ID NO: 3173 - protein, 7 aa, synthetic construct
VINGGQW

SEQ ID NO: 3174 - protein, 7 aa, synthetic construct
DNNYGEI

SEQ ID NO: 3175 - protein, 7 aa, synthetic construct
NKEFTVA

SEQ ID NO: 3176 - protein, 7 aa, synthetic construct
AKSTDTQ

SEQ ID NO: 3177 - protein, 7 aa, synthetic construct
VMVGPTP

SEQ ID NO: 3178 - protein, 7 aa, synthetic construct
AKKSLDG

SEQ ID NO: 3179 - protein, 7 aa, synthetic construct
EFNQSHG

SEQ ID NO: 3180 - protein, 7 aa, synthetic construct
DKFGALA

SEQ ID NO: 3181 - protein, 7 aa, synthetic construct
GSIKPGW

SEQ ID NO: 3182 - protein, 7 aa, synthetic construct
MNQPYNE

SEQ ID NO: 3183 - protein, 7 aa, synthetic construct
TTAHADV

SEQ ID NO: 3184 - protein, 7 aa, synthetic construct
DSGKQYV

SEQ ID NO: 3185 - protein, 7 aa, synthetic construct
NVPDKKM

SEQ ID NO: 3186 - protein, 7 aa, synthetic construct
KMQYAVS

SEQ ID NO: 3187 - protein, 7 aa, synthetic construct
HSQQRID

SEQ ID NO: 3188 - protein, 7 aa, synthetic construct
RNFKEEN

SEQ ID NO: 3189 - protein, 7 aa, synthetic construct
TNKPHYG

SEQ ID NO: 3190 - protein, 7 aa, synthetic construct
FHNSKPT

SEQ ID NO: 3191 - protein, 7 aa, synthetic construct
NRIESGH

SEQ ID NO: 3192 - protein, 7 aa, synthetic construct
IKPVQQS

SEQ ID NO: 3193 - protein, 7 aa, synthetic construct
GTGALHG

SEQ ID NO: 3194 - protein, 7 aa, synthetic construct
VGQEFKN

SEQ ID NO: 3195 - protein, 7 aa, synthetic construct
FKVMEEG

SEQ ID NO: 3196 - protein, 7 aa, synthetic construct
GRQTTDV

SEQ ID NO: 3197 - protein, 7 aa, synthetic construct
MDAKWDK

SEQ ID NO: 3198 - protein, 7 aa, synthetic construct
DRSKGYG

SEQ ID NO: 3199 - protein, 7 aa, synthetic construct
RDRADSE

SEQ ID NO: 3200 - protein, 7 aa, synthetic construct
FKREHDS

SEQ ID NO: 3201 - protein, 7 aa, synthetic construct
VVKLGDD

SEQ ID NO: 3202 - protein, 7 aa, synthetic construct
VPHNESE

SEQ ID NO: 3203 - protein, 7 aa, synthetic construct
ATNRETW

SEQ ID NO: 3204 - protein, 7 aa, synthetic construct
AEKHAMH

SEQ ID NO: 3205 - protein, 7 aa, synthetic construct
SREVTVH

SEQ ID NO: 3206 - protein, 7 aa, synthetic construct
TSGVFQG

SEQ ID NO: 3207 - protein, 7 aa, synthetic construct
VRMSDKA

SEQ ID NO: 3208 - protein, 7 aa, synthetic construct
EKKAIGI

SEQ ID NO: 3209 - protein, 7 aa, synthetic construct
EGNPKDM

SEQ ID NO: 3210 - protein, 7 aa, synthetic construct
MNNHEDK

SEQ ID NO: 3211 - protein, 7 aa, synthetic construct
SRPEHLG

SEQ ID NO: 3212 - protein, 7 aa, synthetic construct
PVSGQSA

SEQ ID NO: 3213 - protein, 7 aa, synthetic construct
LQNPERY

SEQ ID NO: 3214 - protein, 7 aa, synthetic construct
QAHRLEE

SEQ ID NO: 3215 - protein, 7 aa, synthetic construct
HKDRNEI

SEQ ID NO: 3216 - protein, 7 aa, synthetic construct
SGQGYMV

SEQ ID NO: 3217 - protein, 7 aa, synthetic construct
KDRPSSQ

SEQ ID NO: 3218 - protein, 7 aa, synthetic construct
AIRPNMP

SEQ ID NO: 3219 - protein, 7 aa, synthetic construct
IFPAHDG

SEQ ID NO: 3220 - protein, 7 aa, synthetic construct
SYSSGMM

SEQ ID NO: 3221 - protein, 7 aa, synthetic construct
MSATMQM

SEQ ID NO: 3222 - protein, 7 aa, synthetic construct
RTDNLDP

SEQ ID NO: 3223 - protein, 7 aa, synthetic construct
FSEVQHM

SEQ ID NO: 3224 - protein, 7 aa, synthetic construct
YHQTPGG

SEQ ID NO: 3225 - protein, 7 aa, synthetic construct
HDHRWQE

SEQ ID NO: 3226 - protein, 7 aa, synthetic construct
WHVEVKD

SEQ ID NO: 3227 - protein, 7 aa, synthetic construct
RTVSVDH

SEQ ID NO: 3228 - protein, 7 aa, synthetic construct
PHESGWS

SEQ ID NO: 3229 - protein, 7 aa, synthetic construct
NNIRGGN

SEQ ID NO: 3230 - protein, 7 aa, synthetic construct
DKHGAFL

SEQ ID NO: 3231 - protein, 7 aa, synthetic construct
ESSPRAQ

SEQ ID NO: 3232 - protein, 7 aa, synthetic construct
REMGDGA

SEQ ID NO: 3233 - protein, 7 aa, synthetic construct
HNPVGIS

SEQ ID NO: 3234 - protein, 7 aa, synthetic construct
RTVDSIT

SEQ ID NO: 3235 - protein, 7 aa, synthetic construct
QLNSVNP

SEQ ID NO: 3236 - protein, 7 aa, synthetic construct
HMSRMVA

SEQ ID NO: 3237 - protein, 7 aa, synthetic construct
SAMIKHS

SEQ ID NO: 3238 - protein, 7 aa, synthetic construct
PNQNYGR

SEQ ID NO: 3239 - protein, 7 aa, synthetic construct
QGQGSDL

SEQ ID NO: 3240 - protein, 7 aa, synthetic construct
GKMDVAS

SEQ ID NO: 3241 - protein, 7 aa, synthetic construct
GKLAESQ

SEQ ID NO: 3242 - protein, 7 aa, synthetic construct
GHSKGVQ

SEQ ID NO: 3243 - protein, 7 aa, synthetic construct
QQRGRGE

SEQ ID NO: 3244 - protein, 7 aa, synthetic construct
KQTAAIM

SEQ ID NO: 3245 - protein, 7 aa, synthetic construct
TMSAAQI

SEQ ID NO: 3246 - protein, 7 aa, synthetic construct
GERDKLT

SEQ ID NO: 3247 - protein, 7 aa, synthetic construct
AWKKDEV

SEQ ID NO: 3248 - protein, 7 aa, synthetic construct
FRPDGSM

SEQ ID NO: 3249 - protein, 7 aa, synthetic construct
HKGPTVT

SEQ ID NO: 3250 - protein, 7 aa, synthetic construct
QIKPPEG

SEQ ID NO: 3251 - protein, 7 aa, synthetic construct
SMNKLGN

SEQ ID NO: 3252 - protein, 7 aa, synthetic construct
SDVRGQA

SEQ ID NO: 3253 - protein, 7 aa, synthetic construct
VNKEMVK

SEQ ID NO: 3254 - protein, 7 aa, synthetic construct
AQLAQGI

SEQ ID NO: 3255 - protein, 7 aa, synthetic construct
VYKGPMT

SEQ ID NO: 3256 - protein, 7 aa, synthetic construct
VAAKYPL

SEQ ID NO: 3257 - protein, 7 aa, synthetic construct
HHSISQI

SEQ ID NO: 3258 - protein, 7 aa, synthetic construct
LEHGQTM

SEQ ID NO: 3259 - protein, 7 aa, synthetic construct
AGGKMDW

SEQ ID NO: 3260 - protein, 7 aa, synthetic construct
DRVPGGT

SEQ ID NO: 3261 - protein, 7 aa, synthetic construct
PRMTQDI

SEQ ID NO: 3262 - protein, 7 aa, synthetic construct
MKMQQAV

SEQ ID NO: 3263 - protein, 7 aa, synthetic construct
LIKSQQG

SEQ ID NO: 3264 - protein, 7 aa, synthetic construct
QIMPRIE

SEQ ID NO: 3265 - protein, 7 aa, synthetic construct
HTVNGKD

SEQ ID NO: 3266 - protein, 7 aa, synthetic construct
GTNKLIG

SEQ ID NO: 3267 - protein, 7 aa, synthetic construct
KDQTPGQ

SEQ ID NO: 3268 - protein, 7 aa, synthetic construct
EITPRSE

SEQ ID NO: 3269 - protein, 7 aa, synthetic construct
GVQKLGP

SEQ ID NO: 3270 - protein, 7 aa, synthetic construct
DVPGRQM

SEQ ID NO: 3271 - protein, 7 aa, synthetic construct
NGVNIDR

SEQ ID NO: 3272 - protein, 7 aa, synthetic construct
IPLEKAY

SEQ ID NO: 3273 - protein, 7 aa, synthetic construct
FPAQSMN

SEQ ID NO: 3274 - protein, 7 aa, synthetic construct
GLRTSQG

SEQ ID NO: 3275 - protein, 7 aa, synthetic construct
LHKNQEE

SEQ ID NO: 3276 - protein, 7 aa, synthetic construct
EMTASTY

SEQ ID NO: 3277 - protein, 7 aa, synthetic construct
NWSAQAA

SEQ ID NO: 3278 - protein, 7 aa, synthetic construct
GPRMPEE

SEQ ID NO: 3279 - protein, 7 aa, synthetic construct
EFTYMKE

SEQ ID NO: 3280 - protein, 7 aa, synthetic construct
VTYTHAD

SEQ ID NO: 3281 - protein, 7 aa, synthetic construct
MEQTHYE

SEQ ID NO: 3282 - protein, 7 aa, synthetic construct
NKNSQYT

SEQ ID NO: 3283 - protein, 7 aa, synthetic construct
NNKKMQD

SEQ ID NO: 3284 - protein, 7 aa, synthetic construct
IGSPSMA

SEQ ID NO: 3285 - protein, 7 aa, synthetic construct
GANNVVQ

SEQ ID NO: 3286 - protein, 7 aa, synthetic construct
FRDKAMD

SEQ ID NO: 3287 - protein, 7 aa, synthetic construct
NQMQMKQ

SEQ ID NO: 3288 - protein, 7 aa, synthetic construct
ATRGSNS

SEQ ID NO: 3289 - protein, 7 aa, synthetic construct
RPQIKDG

SEQ ID NO: 3290 - protein, 7 aa, synthetic construct
IDPYWKQ

SEQ ID NO: 3291 - protein, 7 aa, synthetic construct
AGHREET

SEQ ID NO: 3292 - protein, 7 aa, synthetic construct
MGRQVGP

SEQ ID NO: 3293 - protein, 7 aa, synthetic construct
WSGHQEI

SEQ ID NO: 3294 - protein, 7 aa, synthetic construct
KHLDENK

SEQ ID NO: 3295 - protein, 7 aa, synthetic construct
DNSRGMA

SEQ ID NO: 3296 - protein, 7 aa, synthetic construct
ERARMDA

SEQ ID NO: 3297 - protein, 7 aa, synthetic construct
QQRQGWP

SEQ ID NO: 3298 - protein, 7 aa, synthetic construct
EGHRSQD

SEQ ID NO: 3299 - protein, 7 aa, synthetic construct
QPTQPGS

SEQ ID NO: 3300 - protein, 7 aa, synthetic construct
VGAERVN

SEQ ID NO: 3301 - protein, 7 aa, synthetic construct
AVGANFP

SEQ ID NO: 3302 - protein, 7 aa, synthetic construct
KFMEPND

SEQ ID NO: 3303 - protein, 7 aa, synthetic construct
DAIASKA

SEQ ID NO: 3304 - protein, 7 aa, synthetic construct
KINDRSL

SEQ ID NO: 3305 - protein, 7 aa, synthetic construct
HNSHASL

SEQ ID NO: 3306 - protein, 7 aa, synthetic construct
THQQESR

SEQ ID NO: 3307 - protein, 7 aa, synthetic construct
GKGDYHT

SEQ ID NO: 3308 - protein, 7 aa, synthetic construct
DRPVGHS

SEQ ID NO: 3309 - protein, 7 aa, synthetic construct
GTNEAVK

SEQ ID NO: 3310 - protein, 7 aa, synthetic construct
REQHSVT

SEQ ID NO: 3311 - protein, 7 aa, synthetic construct
NPEYAQP

SEQ ID NO: 3312 - protein, 7 aa, synthetic construct
NPDQVGK

SEQ ID NO: 3313 - protein, 7 aa, synthetic construct
DQRPHID

SEQ ID NO: 3314 - protein, 7 aa, synthetic construct
PSYHGQI

SEQ ID NO: 3315 - protein, 7 aa, synthetic construct
TPIRDAV

SEQ ID NO: 3316 - protein, 7 aa, synthetic construct
PPGTITP

SEQ ID NO: 3317 - protein, 7 aa, synthetic construct
FKQGLVD

SEQ ID NO: 3318 - protein, 7 aa, synthetic construct
QNNGNPF

SEQ ID NO: 3319 - protein, 7 aa, synthetic construct
YKSLIHP

SEQ ID NO: 3320 - protein, 7 aa, synthetic construct
LPAHKDA

SEQ ID NO: 3321 - protein, 7 aa, synthetic construct
NQSNFSM

SEQ ID NO: 3322 - protein, 7 aa, synthetic construct
KTPFVNA

SEQ ID NO: 3323 - protein, 7 aa, synthetic construct
ASAMMKD

SEQ ID NO: 3324 - protein, 7 aa, synthetic construct
RYHKVEE

SEQ ID NO: 3325 - protein, 7 aa, synthetic construct
EAGRGGI

SEQ ID NO: 3326 - protein, 7 aa, synthetic construct
YGLKTID

SEQ ID NO: 3327 - protein, 7 aa, synthetic construct
NQPPMQR

SEQ ID NO: 3328 - protein, 7 aa, synthetic construct
RNDPLHM

SEQ ID NO: 3329 - protein, 7 aa, synthetic construct
QHGAASD

SEQ ID NO: 3330 - protein, 7 aa, synthetic construct
HYNRIED

SEQ ID NO: 3331 - protein, 7 aa, synthetic construct
IKVGMSE

SEQ ID NO: 3332 - protein, 7 aa, synthetic construct
SVVHRLG

SEQ ID NO: 3333 - protein, 7 aa, synthetic construct
VERSVQT

SEQ ID NO: 3334 - protein, 7 aa, synthetic construct
KGAEINP

SEQ ID NO: 3335 - protein, 7 aa, synthetic construct
WRNSENH

SEQ ID NO: 3336 - protein, 7 aa, synthetic construct
WLNGKAQ

SEQ ID NO: 3337 - protein, 7 aa, synthetic construct
ATFNMVP

SEQ ID NO: 3338 - protein, 7 aa, synthetic construct
KGTENVV

SEQ ID NO: 3339 - protein, 7 aa, synthetic construct
DDKEYRA

SEQ ID NO: 3340 - protein, 7 aa, synthetic construct
RDQTHDS

SEQ ID NO: 3341 - protein, 7 aa, synthetic construct
HMQKQPE

SEQ ID NO: 3342 - protein, 7 aa, synthetic construct
WREVTSG

SEQ ID NO: 3343 - protein, 7 aa, synthetic construct
RELREHT

SEQ ID NO: 3344 - protein, 7 aa, synthetic construct
YVLDNKG

SEQ ID NO: 3345 - protein, 7 aa, synthetic construct
KILASDG

SEQ ID NO: 3346 - protein, 7 aa, synthetic construct
VKAIGEH

SEQ ID NO: 3347 - protein, 7 aa, synthetic construct
TNNAAHK

SEQ ID NO: 3348 - protein, 7 aa, synthetic construct
MNRVELG

SEQ ID NO: 3349 - protein, 7 aa, synthetic construct
GDSAHSP

SEQ ID NO: 3350 - protein, 7 aa, synthetic construct
DQKKISH

SEQ ID NO: 3351 - protein, 7 aa, synthetic construct
HPDRFDK

SEQ ID NO: 3352 - protein, 7 aa, synthetic construct
WPHHGNT

SEQ ID NO: 3353 - protein, 7 aa, synthetic construct
RPNDVKL

SEQ ID NO: 3354 - protein, 7 aa, synthetic construct
MPDAKNL

SEQ ID NO: 3355 - protein, 7 aa, synthetic construct
NKATGLF

SEQ ID NO: 3356 - protein, 7 aa, synthetic construct
KENPAIA

SEQ ID NO: 3357 - protein, 7 aa, synthetic construct
YHERPGV

SEQ ID NO: 3358 - protein, 7 aa, synthetic construct
VYNKERV

SEQ ID NO: 3359 - protein, 7 aa, synthetic construct
VKSMSDN

SEQ ID NO: 3360 - protein, 7 aa, synthetic construct
TQFNEGK

SEQ ID NO: 3361 - protein, 7 aa, synthetic construct
SHHSPQD

SEQ ID NO: 3362 - protein, 7 aa, synthetic construct
TAFDKTM

SEQ ID NO: 3363 - protein, 7 aa, synthetic construct
QIPHKMQ

SEQ ID NO: 3364 - protein, 7 aa, synthetic construct
TNDNSMM

SEQ ID NO: 3365 - protein, 7 aa, synthetic construct
DHGKPAF

SEQ ID NO: 3366 - protein, 7 aa, synthetic construct
QAGFDHH

SEQ ID NO: 3367 - protein, 7 aa, synthetic construct
HMQVMAA

SEQ ID NO: 3368 - protein, 7 aa, synthetic construct
WDNMIHS

SEQ ID NO: 3369 - protein, 7 aa, synthetic construct
QPQITMS

SEQ ID NO: 3370 - protein, 7 aa, synthetic construct
QHESTLH

SEQ ID NO: 3371 - protein, 7 aa, synthetic construct
KGAVDHG

SEQ ID NO: 3372 - protein, 7 aa, synthetic construct
ATKDFHG

SEQ ID NO: 3373 - protein, 7 aa, synthetic construct
WDISPQP

SEQ ID NO: 3374 - protein, 7 aa, synthetic construct
RSGGIEF

SEQ ID NO: 3375 - protein, 7 aa, synthetic construct
HMKPQAS

SEQ ID NO: 3376 - protein, 7 aa, synthetic construct
SKLAVYA

SEQ ID NO: 3377 - protein, 7 aa, synthetic construct
IEGRIHS

SEQ ID NO: 3378 - protein, 7 aa, synthetic construct
LNNVQPE

SEQ ID NO: 3379 - protein, 7 aa, synthetic construct
QYQNAKN

SEQ ID NO: 3380 - protein, 7 aa, synthetic construct
VSPHDLR

SEQ ID NO: 3381 - protein, 7 aa, synthetic construct
IPMSTST

SEQ ID NO: 3382 - protein, 7 aa, synthetic construct
LRDIQMQ

SEQ ID NO: 3383 - protein, 7 aa, synthetic construct
MMHLHKE

SEQ ID NO: 3384 - protein, 7 aa, synthetic construct
GKADAIQ

SEQ ID NO: 3385 - protein, 7 aa, synthetic construct
MPGSSFI

SEQ ID NO: 3386 - protein, 7 aa, synthetic construct
QQYNGLP

SEQ ID NO: 3387 - protein, 7 aa, synthetic construct
LGRQDLE

SEQ ID NO: 3388 - protein, 7 aa, synthetic construct
KAGPEFR

SEQ ID NO: 3389 - protein, 7 aa, synthetic construct
RSHGSPN

SEQ ID NO: 3390 - protein, 7 aa, synthetic construct
VFKTDAV

SEQ ID NO: 3391 - protein, 7 aa, synthetic construct
HNSSSGQ

SEQ ID NO: 3392 - protein, 7 aa, synthetic construct
KSHVEHG

SEQ ID NO: 3393 - protein, 7 aa, synthetic construct
HTTGYGQ

SEQ ID NO: 3394 - protein, 7 aa, synthetic construct
QGNGQQH

SEQ ID NO: 3395 - protein, 7 aa, synthetic construct
MKAHGNA

SEQ ID NO: 3396 - protein, 7 aa, synthetic construct
VDERNPG

SEQ ID NO: 3397 - protein, 7 aa, synthetic construct
LKTVELN

SEQ ID NO: 3398 - protein, 7 aa, synthetic construct
YRPTAGA

SEQ ID NO: 3399 - protein, 7 aa, synthetic construct
YAEKHLT

SEQ ID NO: 3400 - protein, 7 aa, synthetic construct
RNGETIN

SEQ ID NO: 3401 - protein, 7 aa, synthetic construct
NDHPQHV

SEQ ID NO: 3402 - protein, 7 aa, synthetic construct
KSESSSE

SEQ ID NO: 3403 - protein, 7 aa, synthetic construct
NKLMAGH

SEQ ID NO: 3404 - protein, 7 aa, synthetic construct
NEAHNKD

SEQ ID NO: 3405 - protein, 7 aa, synthetic construct
SDSQKMH

SEQ ID NO: 3406 - protein, 7 aa, synthetic construct
SDMKARN

SEQ ID NO: 3407 - protein, 7 aa, synthetic construct
WQERHAN

SEQ ID NO: 3408 - protein, 7 aa, synthetic construct
HYARNGV

SEQ ID NO: 3409 - protein, 7 aa, synthetic construct
SKSIGTG

SEQ ID NO: 3410 - protein, 7 aa, synthetic construct
SEQTHAL

SEQ ID NO: 3411 - protein, 7 aa, synthetic construct
QPLHSKI

SEQ ID NO: 3412 - protein, 7 aa, synthetic construct
ANTGVQK

SEQ ID NO: 3413 - protein, 7 aa, synthetic construct
TNQNIMK

SEQ ID NO: 3414 - protein, 7 aa, synthetic construct
LMSATSA

SEQ ID NO: 3415 - protein, 7 aa, synthetic construct
YDHGETA

SEQ ID NO: 3416 - protein, 7 aa, synthetic construct
VGTQKHG

SEQ ID NO: 3417 - protein, 7 aa, synthetic construct
GGANASN

SEQ ID NO: 3418 - protein, 7 aa, synthetic construct
QRNIIID

SEQ ID NO: 3419 - protein, 7 aa, synthetic construct
VESVVRQ

SEQ ID NO: 3420 - protein, 7 aa, synthetic construct
YKNLRDS

SEQ ID NO: 3421 - protein, 7 aa, synthetic construct
PNNPGVP

SEQ ID NO: 3422 - protein, 7 aa, synthetic construct
GNYARTP

SEQ ID NO: 3423 - protein, 7 aa, synthetic construct
IKVNNAN

SEQ ID NO: 3424 - protein, 7 aa, synthetic construct
LTNHSHS

SEQ ID NO: 3425 - protein, 7 aa, synthetic construct
HMKSEYA

SEQ ID NO: 3426 - protein, 7 aa, synthetic construct
APKIEWD

SEQ ID NO: 3427 - protein, 7 aa, synthetic construct
VVSSHHP

SEQ ID NO: 3428 - protein, 7 aa, synthetic construct
VSMSGEG

SEQ ID NO: 3429 - protein, 7 aa, synthetic construct
QKEDHSM

SEQ ID NO: 3430 - protein, 7 aa, synthetic construct
GKFEKDN

SEQ ID NO: 3431 - protein, 7 aa, synthetic construct
GKMDQVW

SEQ ID NO: 3432 - protein, 7 aa, synthetic construct
FVKPHHD

SEQ ID NO: 3433 - protein, 7 aa, synthetic construct
TVATVPN

SEQ ID NO: 3434 - protein, 7 aa, synthetic construct
HDKYRLA

SEQ ID NO: 3435 - protein, 7 aa, synthetic construct
SAPNSIH

SEQ ID NO: 3436 - protein, 7 aa, synthetic construct
NNGQISL

SEQ ID NO: 3437 - protein, 7 aa, synthetic construct
QDNKAGW

SEQ ID NO: 3438 - protein, 7 aa, synthetic construct
NPNTTFK

SEQ ID NO: 3439 - protein, 7 aa, synthetic construct
SHYQKMP

SEQ ID NO: 3440 - protein, 7 aa, synthetic construct
GIKYEQG

SEQ ID NO: 3441 - protein, 7 aa, synthetic construct
VLGATQE

SEQ ID NO: 3442 - protein, 7 aa, synthetic construct
IQHQGTF

SEQ ID NO: 3443 - protein, 7 aa, synthetic construct
SKAGNEG

SEQ ID NO: 3444 - protein, 7 aa, synthetic construct
DPRWPVS

SEQ ID NO: 3445 - protein, 7 aa, synthetic construct
KTNADSD

SEQ ID NO: 3446 - protein, 7 aa, synthetic construct
AAMDKND

SEQ ID NO: 3447 - protein, 7 aa, synthetic construct
KNNQGIN

SEQ ID NO: 3448 - protein, 7 aa, synthetic construct
SKLTNNP

SEQ ID NO: 3449 - protein, 7 aa, synthetic construct
NTQSHQT

SEQ ID NO: 3450 - protein, 7 aa, synthetic construct
RYPTSGD

SEQ ID NO: 3451 - protein, 7 aa, synthetic construct
LANHTGP

SEQ ID NO: 3452 - protein, 7 aa, synthetic construct
LGRGGYI

SEQ ID NO: 3453 - protein, 7 aa, synthetic construct
DVRQGAR

SEQ ID NO: 3454 - protein, 7 aa, synthetic construct
PLVKGGI

SEQ ID NO: 3455 - protein, 7 aa, synthetic construct
QSSTYIP

SEQ ID NO: 3456 - protein, 7 aa, synthetic construct
SLMRADI

SEQ ID NO: 3457 - protein, 7 aa, synthetic construct
TTHATVH

SEQ ID NO: 3458 - protein, 7 aa, synthetic construct
VDHALKE

SEQ ID NO: 3459 - protein, 7 aa, synthetic construct
GFVEGQH

SEQ ID NO: 3460 - protein, 7 aa, synthetic construct
MGGENKN

SEQ ID NO: 3461 - protein, 7 aa, synthetic construct
IMQMQNK

SEQ ID NO: 3462 - protein, 7 aa, synthetic construct
RDKVHTY

SEQ ID NO: 3463 - protein, 7 aa, synthetic construct
DDLRRGV

SEQ ID NO: 3464 - protein, 7 aa, synthetic construct
KMMNHDD

SEQ ID NO: 3465 - protein, 7 aa, synthetic construct
QGATKEW

SEQ ID NO: 3466 - protein, 7 aa, synthetic construct
YKNNLQH

SEQ ID NO: 3467 - protein, 7 aa, synthetic construct
EVRARDY

SEQ ID NO: 3468 - protein, 7 aa, synthetic construct
ASPDWHG

SEQ ID NO: 3469 - protein, 7 aa, synthetic construct
RTDHHLV

SEQ ID NO: 3470 - protein, 7 aa, synthetic construct
APPGYDG

SEQ ID NO: 3471 - protein, 7 aa, synthetic construct
ERQSPFN

SEQ ID NO: 3472 - protein, 7 aa, synthetic construct
VSKFHVP

SEQ ID NO: 3473 - protein, 7 aa, synthetic construct
TQVVRVT

SEQ ID NO: 3474 - protein, 7 aa, synthetic construct
AEQHHMV

SEQ ID NO: 3475 - protein, 7 aa, synthetic construct
KTQDKTQ

SEQ ID NO: 3476 - protein, 7 aa, synthetic construct
MPHLLQA

SEQ ID NO: 3477 - protein, 7 aa, synthetic construct
ELKWIEE

SEQ ID NO: 3478 - protein, 7 aa, synthetic construct
LKESNRF

SEQ ID NO: 3479 - protein, 7 aa, synthetic construct
GTFGFDG

SEQ ID NO: 3480 - protein, 7 aa, synthetic construct
NGQRPFM

SEQ ID NO: 3481 - protein, 7 aa, synthetic construct
EKDPNFW

SEQ ID NO: 3482 - protein, 7 aa, synthetic construct
YGGIRNG

SEQ ID NO: 3483 - protein, 7 aa, synthetic construct
GSPHPEW

SEQ ID NO: 3484 - protein, 7 aa, synthetic construct
NMRHDSG

SEQ ID NO: 3485 - protein, 7 aa, synthetic construct
EFARGAM

SEQ ID NO: 3486 - protein, 7 aa, synthetic construct
RNRPDPE

SEQ ID NO: 3487 - protein, 7 aa, synthetic construct
DEKLKFM

SEQ ID NO: 3488 - protein, 7 aa, synthetic construct
QADRPTY

SEQ ID NO: 3489 - protein, 7 aa, synthetic construct
KDNPKIG

SEQ ID NO: 3490 - protein, 7 aa, synthetic construct
KPDVPHH

SEQ ID NO: 3491 - protein, 7 aa, synthetic construct
STHEMRN

SEQ ID NO: 3492 - protein, 7 aa, synthetic construct
VNASPMP

SEQ ID NO: 3493 - protein, 7 aa, synthetic construct
AQEKYAG

SEQ ID NO: 3494 - protein, 7 aa, synthetic construct
TRDAGVH

SEQ ID NO: 3495 - protein, 7 aa, synthetic construct
ENHKHPN

SEQ ID NO: 3496 - protein, 7 aa, synthetic construct
MKKLADG

SEQ ID NO: 3497 - protein, 7 aa, synthetic construct
VQPQPRN

SEQ ID NO: 3498 - protein, 7 aa, synthetic construct
KIYNGND

SEQ ID NO: 3499 - protein, 7 aa, synthetic construct
IKGMVYE

SEQ ID NO: 3500 - protein, 7 aa, synthetic construct
CEDETFC

SEQ ID NO: 3501 - protein, 7 aa, synthetic construct
RYHTAEM

SEQ ID NO: 3502 - protein, 7 aa, synthetic construct
IAGLNYP

SEQ ID NO: 3503 - protein, 7 aa, synthetic construct
AWSAERG

SEQ ID NO: 3504 - protein, 7 aa, synthetic construct
EQNMMPA

SEQ ID NO: 3505 - protein, 7 aa, synthetic construct
NLDNVHK

SEQ ID NO: 3506 - protein, 7 aa, synthetic construct
ASKQHLS

SEQ ID NO: 3507 - protein, 7 aa, synthetic construct
IYKDIKE

SEQ ID NO: 3508 - protein, 7 aa, synthetic construct
TYVKQEI

SEQ ID NO: 3509 - protein, 7 aa, synthetic construct
VAKTEGD

SEQ ID NO: 3510 - protein, 7 aa, synthetic construct
MRPDWDQ

SEQ ID NO: 3511 - protein, 7 aa, synthetic construct
PQGEAAT

SEQ ID NO: 3512 - protein, 7 aa, synthetic construct
YNSDLSK

SEQ ID NO: 3513 - protein, 7 aa, synthetic construct
KDDYRQA

SEQ ID NO: 3514 - protein, 7 aa, synthetic construct
PENPKNT

SEQ ID NO: 3515 - protein, 7 aa, synthetic construct
WTPGEST

SEQ ID NO: 3516 - protein, 7 aa, synthetic construct
KEAIQVM

SEQ ID NO: 3517 - protein, 7 aa, synthetic construct
PDRQKHV

SEQ ID NO: 3518 - protein, 7 aa, synthetic construct
LQPYMQQ

SEQ ID NO: 3519 - protein, 7 aa, synthetic construct
LPGKDYT

SEQ ID NO: 3520 - protein, 7 aa, synthetic construct
KMPEAYP

SEQ ID NO: 3521 - protein, 7 aa, synthetic construct
QLDIQHH

SEQ ID NO: 3522 - protein, 7 aa, synthetic construct
TNKYGQS

SEQ ID NO: 3523 - protein, 7 aa, synthetic construct
SKDNAFY

SEQ ID NO: 3524 - protein, 7 aa, synthetic construct
GGKHLTV

SEQ ID NO: 3525 - protein, 7 aa, synthetic construct
KVPAIKV

SEQ ID NO: 3526 - protein, 7 aa, synthetic construct
QAISQRN

SEQ ID NO: 3527 - protein, 7 aa, synthetic construct
ENDKNKI

SEQ ID NO: 3528 - protein, 7 aa, synthetic construct
YLSNHSI

SEQ ID NO: 3529 - protein, 7 aa, synthetic construct
LNLGVAS

SEQ ID NO: 3530 - protein, 7 aa, synthetic construct
FNKNWDN

SEQ ID NO: 3531 - protein, 7 aa, synthetic construct
FHAQNFD

SEQ ID NO: 3532 - protein, 7 aa, synthetic construct
SKQQTSH

SEQ ID NO: 3533 - protein, 7 aa, synthetic construct
HTVEMPG

SEQ ID NO: 3534 - protein, 7 aa, synthetic construct
YRVAQTQ

SEQ ID NO: 3535 - protein, 7 aa, synthetic construct
VKHEGFL

SEQ ID NO: 3536 - protein, 7 aa, synthetic construct
HAINAMA

SEQ ID NO: 3537 - protein, 7 aa, synthetic construct
ISQNTQT

SEQ ID NO: 3538 - protein, 7 aa, synthetic construct
SKDDSDR

SEQ ID NO: 3539 - protein, 7 aa, synthetic construct
GAPMTEY

SEQ ID NO: 3540 - protein, 7 aa, synthetic construct
LEGKWSV

SEQ ID NO: 3541 - protein, 7 aa, synthetic construct
YNNQEAR

SEQ ID NO: 3542 - protein, 7 aa, synthetic construct
QNGARIE

SEQ ID NO: 3543 - protein, 7 aa, synthetic construct
FQKSTQH

SEQ ID NO: 3544 - protein, 7 aa, synthetic construct
GKYQAPV

SEQ ID NO: 3545 - protein, 7 aa, synthetic construct
AGNQLSG

SEQ ID NO: 3546 - protein, 7 aa, synthetic construct
VSNQHGV

SEQ ID NO: 3547 - protein, 7 aa, synthetic construct
TGDAPRM

SEQ ID NO: 3548 - protein, 7 aa, synthetic construct
RFAGDEG

SEQ ID NO: 3549 - protein, 7 aa, synthetic construct
QAGYTSI

SEQ ID NO: 3550 - protein, 7 aa, synthetic construct
NLRNNML

SEQ ID NO: 3551 - protein, 7 aa, synthetic construct
YHQQNPA

SEQ ID NO: 3552 - protein, 7 aa, synthetic construct
VHSMAQQ

SEQ ID NO: 3553 - protein, 7 aa, synthetic construct
HQSKMDT

SEQ ID NO: 3554 - protein, 7 aa, synthetic construct
GDRQQQV

SEQ ID NO: 3555 - protein, 7 aa, synthetic construct
YEKNGIV

SEQ ID NO: 3556 - protein, 7 aa, synthetic construct
YESNQTH

SEQ ID NO: 3557 - protein, 7 aa, synthetic construct
YPTRVEN

SEQ ID NO: 3558 - protein, 7 aa, synthetic construct
ERSNPNI

SEQ ID NO: 3559 - protein, 7 aa, synthetic construct
PFAVHSS

SEQ ID NO: 3560 - protein, 7 aa, synthetic construct
HQPEGAG

SEQ ID NO: 3561 - protein, 7 aa, synthetic construct
KSQEVQW

SEQ ID NO: 3562 - protein, 7 aa, synthetic construct
LAAINQQ

SEQ ID NO: 3563 - protein, 7 aa, synthetic construct
MIKAQEM

SEQ ID NO: 3564 - protein, 7 aa, synthetic construct
LPERTSP

SEQ ID NO: 3565 - protein, 7 aa, synthetic construct
ASNMRPE

SEQ ID NO: 3566 - protein, 7 aa, synthetic construct
TGTFSGV

SEQ ID NO: 3567 - protein, 7 aa, synthetic construct
TIRGTSI

SEQ ID NO: 3568 - protein, 7 aa, synthetic construct
GLREASD

SEQ ID NO: 3569 - protein, 7 aa, synthetic construct
AYQQPHT

SEQ ID NO: 3570 - protein, 7 aa, synthetic construct
PGLQIHG

SEQ ID NO: 3571 - protein, 7 aa, synthetic construct
ERLHMVE

SEQ ID NO: 3572 - protein, 7 aa, synthetic construct
ETLRTLG

SEQ ID NO: 3573 - protein, 7 aa, synthetic construct
PSQTIVG

SEQ ID NO: 3574 - protein, 7 aa, synthetic construct
IQSPTIP

SEQ ID NO: 3575 - protein, 7 aa, synthetic construct
STEGRTP

SEQ ID NO: 3576 - protein, 7 aa, synthetic construct
GVNMRNN

SEQ ID NO: 3577 - protein, 7 aa, synthetic construct
GDGQNGW

SEQ ID NO: 3578 - protein, 7 aa, synthetic construct
VPTMHKS

SEQ ID NO: 3579 - protein, 7 aa, synthetic construct
FVQSQNQ

SEQ ID NO: 3580 - protein, 7 aa, synthetic construct
HFDNKAV

SEQ ID NO: 3581 - protein, 7 aa, synthetic construct
HDSWSKG

SEQ ID NO: 3582 - protein, 7 aa, synthetic construct
KDNNHEK

SEQ ID NO: 3583 - protein, 7 aa, synthetic construct
PAGLGKN

SEQ ID NO: 3584 - protein, 7 aa, synthetic construct
DYQNKAH

SEQ ID NO: 3585 - protein, 7 aa, synthetic construct
KGFEAAN

SEQ ID NO: 3586 - protein, 7 aa, synthetic construct
KQGALPM

SEQ ID NO: 3587 - protein, 7 aa, synthetic construct
EKQLGFT

SEQ ID NO: 3588 - protein, 7 aa, synthetic construct
FEMHHME

SEQ ID NO: 3589 - protein, 7 aa, synthetic construct
NDAQTFK

SEQ ID NO: 3590 - protein, 7 aa, synthetic construct
IGGTTTL

SEQ ID NO: 3591 - protein, 7 aa, synthetic construct
LNTNTPL

SEQ ID NO: 3592 - protein, 7 aa, synthetic construct
GRTWDEK

SEQ ID NO: 3593 - protein, 7 aa, synthetic construct
TDRMKNL

SEQ ID NO: 3594 - protein, 7 aa, synthetic construct
KTQYSPA

SEQ ID NO: 3595 - protein, 7 aa, synthetic construct
HYPDKDF

SEQ ID NO: 3596 - protein, 7 aa, synthetic construct
MPNPMGG

SEQ ID NO: 3597 - protein, 7 aa, synthetic construct
AKPMMNI

SEQ ID NO: 3598 - protein, 7 aa, synthetic construct
MVTGGVT

SEQ ID NO: 3599 - protein, 7 aa, synthetic construct
IVGKHNE

SEQ ID NO: 3600 - protein, 7 aa, synthetic construct
QNTHKSD

SEQ ID NO: 3601 - protein, 7 aa, synthetic construct
SNVGQSA

SEQ ID NO: 3602 - protein, 7 aa, synthetic construct
GQVHTLA

SEQ ID NO: 3603 - protein, 7 aa, synthetic construct
DHGKTEI

SEQ ID NO: 3604 - protein, 7 aa, synthetic construct
HTKTTFV

SEQ ID NO: 3605 - protein, 7 aa, synthetic construct
NAHVEKV

SEQ ID NO: 3606 - protein, 7 aa, synthetic construct
NMAAHTS

SEQ ID NO: 3607 - protein, 7 aa, synthetic construct
FANNNMM

SEQ ID NO: 3608 - protein, 7 aa, synthetic construct
GAGNPHY

SEQ ID NO: 3609 - protein, 7 aa, synthetic construct
FKDQHQN

SEQ ID NO: 3610 - protein, 7 aa, synthetic construct
GRHINSD

SEQ ID NO: 3611 - protein, 7 aa, synthetic construct
TWQQGAI

SEQ ID NO: 3612 - protein, 7 aa, synthetic construct
HQADNRM

SEQ ID NO: 3613 - protein, 7 aa, synthetic construct
NMSMTPK

SEQ ID NO: 3614 - protein, 7 aa, synthetic construct
FNDTRRP

SEQ ID NO: 3615 - protein, 7 aa, synthetic construct
WSTRNES

SEQ ID NO: 3616 - protein, 7 aa, synthetic construct
FGGNPAP

SEQ ID NO: 3617 - protein, 7 aa, synthetic construct
VSPHQSS

SEQ ID NO: 3618 - protein, 7 aa, synthetic construct
HHRHMQE

SEQ ID NO: 3619 - protein, 7 aa, synthetic construct
PPLKPHI

SEQ ID NO: 3620 - protein, 7 aa, synthetic construct
YHRDAEA

SEQ ID NO: 3621 - protein, 7 aa, synthetic construct
RVTADSK

SEQ ID NO: 3622 - protein, 7 aa, synthetic construct
AQGGEPM

SEQ ID NO: 3623 - protein, 7 aa, synthetic construct
SEKNPNS

SEQ ID NO: 3624 - protein, 7 aa, synthetic construct
FEPAIRQ

SEQ ID NO: 3625 - protein, 7 aa, synthetic construct
GQKSIMP

SEQ ID NO: 3626 - protein, 7 aa, synthetic construct
NRESTAQ

SEQ ID NO: 3627 - protein, 7 aa, synthetic construct
SYSTNHG

SEQ ID NO: 3628 - protein, 7 aa, synthetic construct
KGSPDMP

SEQ ID NO: 3629 - protein, 7 aa, synthetic construct
SDSAKFS

SEQ ID NO: 3630 - protein, 7 aa, synthetic construct
ERGDNYS

SEQ ID NO: 3631 - protein, 7 aa, synthetic construct
HSNAIND

SEQ ID NO: 3632 - protein, 7 aa, synthetic construct
TAPNLIN

SEQ ID NO: 3633 - protein, 7 aa, synthetic construct
GTKESGY

SEQ ID NO: 3634 - protein, 7 aa, synthetic construct
MGKQPHD

SEQ ID NO: 3635 - protein, 7 aa, synthetic construct
INEMGRE

SEQ ID NO: 3636 - protein, 7 aa, synthetic construct
MHVHTQA

SEQ ID NO: 3637 - protein, 7 aa, synthetic construct
ETQDPHP

SEQ ID NO: 3638 - protein, 7 aa, synthetic construct
QGMHNDK

SEQ ID NO: 3639 - protein, 7 aa, synthetic construct
MGLPKTS

SEQ ID NO: 3640 - protein, 7 aa, synthetic construct
FRPSKED

SEQ ID NO: 3641 - protein, 7 aa, synthetic construct
QHHTHNM

SEQ ID NO: 3642 - protein, 7 aa, synthetic construct
PKHNGYV

SEQ ID NO: 3643 - protein, 7 aa, synthetic construct
IRMNEVT

SEQ ID NO: 3644 - protein, 7 aa, synthetic construct
GHPERGI

SEQ ID NO: 3645 - protein, 7 aa, synthetic construct
YPYGHSA

SEQ ID NO: 3646 - protein, 7 aa, synthetic construct
QPQRNWD

SEQ ID NO: 3647 - protein, 7 aa, synthetic construct
GYHQQPQ

SEQ ID NO: 3648 - protein, 7 aa, synthetic construct
HHTDSPQ

SEQ ID NO: 3649 - protein, 7 aa, synthetic construct
RQTEHTF

SEQ ID NO: 3650 - protein, 7 aa, synthetic construct
TATQVMN

SEQ ID NO: 3651 - protein, 7 aa, synthetic construct
VEKTFRD

SEQ ID NO: 3652 - protein, 7 aa, synthetic construct
FSPPSKS

SEQ ID NO: 3653 - protein, 7 aa, synthetic construct
VTSQSEY

SEQ ID NO: 3654 - protein, 7 aa, synthetic construct
QKNALGN

SEQ ID NO: 3655 - protein, 7 aa, synthetic construct
YPSKLLS

SEQ ID NO: 3656 - protein, 7 aa, synthetic construct
TGTGYKA

SEQ ID NO: 3657 - protein, 7 aa, synthetic construct
EIGQQKM

SEQ ID NO: 3658 - protein, 7 aa, synthetic construct
MRTGNDM

SEQ ID NO: 3659 - protein, 7 aa, synthetic construct
LKNAAPP

SEQ ID NO: 3660 - protein, 7 aa, synthetic construct
LDTDITK

SEQ ID NO: 3661 - protein, 7 aa, synthetic construct
IGGSHLP

SEQ ID NO: 3662 - protein, 7 aa, synthetic construct
RQLQNAN

SEQ ID NO: 3663 - protein, 7 aa, synthetic construct
TMVSGHG

SEQ ID NO: 3664 - protein, 7 aa, synthetic construct
KFTTGAI

SEQ ID NO: 3665 - protein, 7 aa, synthetic construct
ERQSESM

SEQ ID NO: 3666 - protein, 7 aa, synthetic construct
QRELQSH

SEQ ID NO: 3667 - protein, 7 aa, synthetic construct
QGNTQYF

SEQ ID NO: 3668 - protein, 7 aa, synthetic construct
NAPNIIN

SEQ ID NO: 3669 - protein, 7 aa, synthetic construct
NPQRDEN

SEQ ID NO: 3670 - protein, 7 aa, synthetic construct
GSTTINM

SEQ ID NO: 3671 - protein, 7 aa, synthetic construct
MKTAGFI

SEQ ID NO: 3672 - protein, 7 aa, synthetic construct
PSIADPG

SEQ ID NO: 3673 - protein, 7 aa, synthetic construct
NKQEGEL

SEQ ID NO: 3674 - protein, 7 aa, synthetic construct
HKAEAAL

SEQ ID NO: 3675 - protein, 7 aa, synthetic construct
TIKTARE

SEQ ID NO: 3676 - protein, 7 aa, synthetic construct
MDHQYGP

SEQ ID NO: 3677 - protein, 7 aa, synthetic construct
AGASHHT

SEQ ID NO: 3678 - protein, 7 aa, synthetic construct
QNGNLSL

SEQ ID NO: 3679 - protein, 7 aa, synthetic construct
DGSNPMK

SEQ ID NO: 3680 - protein, 7 aa, synthetic construct
NERAIDK

SEQ ID NO: 3681 - protein, 7 aa, synthetic construct
QPDAKHV

SEQ ID NO: 3682 - protein, 7 aa, synthetic construct
IFQEGGH

SEQ ID NO: 3683 - protein, 7 aa, synthetic construct
HHNHVNF

SEQ ID NO: 3684 - protein, 7 aa, synthetic construct
SSNASHS

SEQ ID NO: 3685 - protein, 7 aa, synthetic construct
SRIDKDL

SEQ ID NO: 3686 - protein, 7 aa, synthetic construct
GASKINP

SEQ ID NO: 3687 - protein, 7 aa, synthetic construct
RREGITA

SEQ ID NO: 3688 - protein, 7 aa, synthetic construct
NHLLPKN

SEQ ID NO: 3689 - protein, 7 aa, synthetic construct
WRPTTPA

SEQ ID NO: 3690 - protein, 7 aa, synthetic construct
AKMPDGS

SEQ ID NO: 3691 - protein, 7 aa, synthetic construct
TANTLYV

SEQ ID NO: 3692 - protein, 7 aa, synthetic construct
GRLSTMQ

SEQ ID NO: 3693 - protein, 7 aa, synthetic construct
FNPHAVS

SEQ ID NO: 3694 - protein, 7 aa, synthetic construct
NHTLKGV

SEQ ID NO: 3695 - protein, 7 aa, synthetic construct
KFGHNGV

SEQ ID NO: 3696 - protein, 7 aa, synthetic construct
DLAKTDH

SEQ ID NO: 3697 - protein, 7 aa, synthetic construct
GTHSSPH

SEQ ID NO: 3698 - protein, 7 aa, synthetic construct
TFQQEAR

SEQ ID NO: 3699 - protein, 7 aa, synthetic construct
IKQDPHN

SEQ ID NO: 3700 - protein, 7 aa, synthetic construct
PTQNSPM

SEQ ID NO: 3701 - protein, 7 aa, synthetic construct
ADRAVKD

SEQ ID NO: 3702 - protein, 7 aa, synthetic construct
AKDGQPF

SEQ ID NO: 3703 - protein, 7 aa, synthetic construct
TQTQNYL

SEQ ID NO: 3704 - protein, 7 aa, synthetic construct
DNRRFDP

SEQ ID NO: 3705 - protein, 7 aa, synthetic construct
VDIKMMK

SEQ ID NO: 3706 - protein, 7 aa, synthetic construct
WANAERS

SEQ ID NO: 3707 - protein, 7 aa, synthetic construct
AIVGKSM

SEQ ID NO: 3708 - protein, 7 aa, synthetic construct
FPQVSMS

SEQ ID NO: 3709 - protein, 7 aa, synthetic construct
MRTGIME

SEQ ID NO: 3710 - protein, 7 aa, synthetic construct
ITDWGTG

SEQ ID NO: 3711 - protein, 7 aa, synthetic construct
HQHVSGV

SEQ ID NO: 3712 - protein, 7 aa, synthetic construct
GSSGPSY

SEQ ID NO: 3713 - protein, 7 aa, synthetic construct
AYDTSKV

SEQ ID NO: 3714 - protein, 7 aa, synthetic construct
NFQVNPA

SEQ ID NO: 3715 - protein, 7 aa, synthetic construct
SGENRSH

SEQ ID NO: 3716 - protein, 7 aa, synthetic construct
QNGWNEE

SEQ ID NO: 3717 - protein, 7 aa, synthetic construct
QSRSDPL

SEQ ID NO: 3718 - protein, 7 aa, synthetic construct
NPLIKQG

SEQ ID NO: 3719 - protein, 7 aa, synthetic construct
RGNLAHS

SEQ ID NO: 3720 - protein, 7 aa, synthetic construct
FKSPSIT

SEQ ID NO: 3721 - protein, 7 aa, synthetic construct
ENNSGPY

SEQ ID NO: 3722 - protein, 7 aa, synthetic construct
IQKQIMQ

SEQ ID NO: 3723 - protein, 7 aa, synthetic construct
WKNMEEA

SEQ ID NO: 3724 - protein, 7 aa, synthetic construct
NIRIQQE

SEQ ID NO: 3725 - protein, 7 aa, synthetic construct
TRMMDGH

SEQ ID NO: 3726 - protein, 7 aa, synthetic construct
YWEHHQE

SEQ ID NO: 3727 - protein, 7 aa, synthetic construct
GNMEQAR

SEQ ID NO: 3728 - protein, 7 aa, synthetic construct
IQVNNAH

SEQ ID NO: 3729 - protein, 7 aa, synthetic construct
NEAGQHS

SEQ ID NO: 3730 - protein, 7 aa, synthetic construct
RPESDNT

SEQ ID NO: 3731 - protein, 7 aa, synthetic construct
TPEASAT

SEQ ID NO: 3732 - protein, 7 aa, synthetic construct
VMGYNND

SEQ ID NO: 3733 - protein, 7 aa, synthetic construct
IRVHQAA

SEQ ID NO: 3734 - protein, 7 aa, synthetic construct
GDKLTYP

SEQ ID NO: 3735 - protein, 7 aa, synthetic construct
GVNSQKD

SEQ ID NO: 3736 - protein, 7 aa, synthetic construct
ERHFVNE

SEQ ID NO: 3737 - protein, 7 aa, synthetic construct
QRHEMMQ

SEQ ID NO: 3738 - protein, 7 aa, synthetic construct
FKGLTIS

SEQ ID NO: 3739 - protein, 7 aa, synthetic construct
MREMTKP

SEQ ID NO: 3740 - protein, 7 aa, synthetic construct
KAEDRQG

SEQ ID NO: 3741 - protein, 7 aa, synthetic construct
KQDIGLV

SEQ ID NO: 3742 - protein, 7 aa, synthetic construct
FQKAIMG

SEQ ID NO: 3743 - protein, 7 aa, synthetic construct
GGAIGDR

SEQ ID NO: 3744 - protein, 7 aa, synthetic construct
TNYKGGM

SEQ ID NO: 3745 - protein, 7 aa, synthetic construct
KQPGQGE

SEQ ID NO: 3746 - protein, 7 aa, synthetic construct
YMYNEIE

SEQ ID NO: 3747 - protein, 7 aa, synthetic construct
DTRMHEM

SEQ ID NO: 3748 - protein, 7 aa, synthetic construct
GVPSSGM

SEQ ID NO: 3749 - protein, 7 aa, synthetic construct
KPVQNFS

SEQ ID NO: 3750 - protein, 7 aa, synthetic construct
GNDKVTK

SEQ ID NO: 3751 - protein, 7 aa, synthetic construct
KGHLPGI

SEQ ID NO: 3752 - protein, 7 aa, synthetic construct
HKFTTEF

SEQ ID NO: 3753 - protein, 7 aa, synthetic construct
MHKGETI

SEQ ID NO: 3754 - protein, 7 aa, synthetic construct
SLHRNEL

SEQ ID NO: 3755 - protein, 7 aa, synthetic construct
DRTPNMQ

SEQ ID NO: 3756 - protein, 7 aa, synthetic construct
PPTAGAY

SEQ ID NO: 3757 - protein, 7 aa, synthetic construct
YNTHMGP

SEQ ID NO: 3758 - protein, 7 aa, synthetic construct
MISMRTD

SEQ ID NO: 3759 - protein, 7 aa, synthetic construct
RFSSIAD

SEQ ID NO: 3760 - protein, 7 aa, synthetic construct
MAGFKYD

SEQ ID NO: 3761 - protein, 7 aa, synthetic construct
GRTPSEI

SEQ ID NO: 3762 - protein, 7 aa, synthetic construct
DNTRPLY

SEQ ID NO: 3763 - protein, 7 aa, synthetic construct
QGLHDKV

SEQ ID NO: 3764 - protein, 7 aa, synthetic construct
RQHGDVM

SEQ ID NO: 3765 - protein, 7 aa, synthetic construct
ERLGMTD

SEQ ID NO: 3766 - protein, 7 aa, synthetic construct
TDAWKAE

SEQ ID NO: 3767 - protein, 7 aa, synthetic construct
ENRRTEQ

SEQ ID NO: 3768 - protein, 7 aa, synthetic construct
INNRPDV

SEQ ID NO: 3769 - protein, 7 aa, synthetic construct
LAAPHKI

SEQ ID NO: 3770 - protein, 7 aa, synthetic construct
GKHDEAS

SEQ ID NO: 3771 - protein, 7 aa, synthetic construct
REMHQHM

SEQ ID NO: 3772 - protein, 7 aa, synthetic construct
LDLRKLQ

SEQ ID NO: 3773 - protein, 7 aa, synthetic construct
SQPKSLE

SEQ ID NO: 3774 - protein, 7 aa, synthetic construct
DHANRMP

SEQ ID NO: 3775 - protein, 7 aa, synthetic construct
KHPPVLE

SEQ ID NO: 3776 - protein, 7 aa, synthetic construct
SKKEAAF

SEQ ID NO: 3777 - protein, 7 aa, synthetic construct
NENHSKF

SEQ ID NO: 3778 - protein, 7 aa, synthetic construct
IHMQNKD

SEQ ID NO: 3779 - protein, 7 aa, synthetic construct
PRGSFPD

SEQ ID NO: 3780 - protein, 7 aa, synthetic construct
PHDKHMF

SEQ ID NO: 3781 - protein, 7 aa, synthetic construct
VGGIKGT

SEQ ID NO: 3782 - protein, 7 aa, synthetic construct
ALKAMTT

SEQ ID NO: 3783 - protein, 7 aa, synthetic construct
QNTHTPM

SEQ ID NO: 3784 - protein, 7 aa, synthetic construct
DWKAEGM

SEQ ID NO: 3785 - protein, 7 aa, synthetic construct
TSRPLAE

SEQ ID NO: 3786 - protein, 7 aa, synthetic construct
PINKENR

SEQ ID NO: 3787 - protein, 7 aa, synthetic construct
NMGGGKP

SEQ ID NO: 3788 - protein, 7 aa, synthetic construct
QDTNMKA

SEQ ID NO: 3789 - protein, 7 aa, synthetic construct
PAHSGTI

SEQ ID NO: 3790 - protein, 7 aa, synthetic construct
DKTGTTG

SEQ ID NO: 3791 - protein, 7 aa, synthetic construct
GFGSMVV

SEQ ID NO: 3792 - protein, 7 aa, synthetic construct
PMKNDEY

SEQ ID NO: 3793 - protein, 7 aa, synthetic construct
QTKDPPF

SEQ ID NO: 3794 - protein, 7 aa, synthetic construct
DMVGRAM

SEQ ID NO: 3795 - protein, 7 aa, synthetic construct
NVHQPYK

SEQ ID NO: 3796 - protein, 7 aa, synthetic construct
SRPGDTE

SEQ ID NO: 3797 - protein, 7 aa, synthetic construct
VNTRLGS

SEQ ID NO: 3798 - protein, 7 aa, synthetic construct
SKHQLLQ

SEQ ID NO: 3799 - protein, 7 aa, synthetic construct
IHTESAN

SEQ ID NO: 3800 - protein, 7 aa, synthetic construct
VLHDTRP

SEQ ID NO: 3801 - protein, 7 aa, synthetic construct
EKATGAA

SEQ ID NO: 3802 - protein, 7 aa, synthetic construct
WRNENSF

SEQ ID NO: 3803 - protein, 7 aa, synthetic construct
TGTATQM

SEQ ID NO: 3804 - protein, 7 aa, synthetic construct
NSMAREM

SEQ ID NO: 3805 - protein, 7 aa, synthetic construct
SLPSHPD

SEQ ID NO: 3806 - protein, 7 aa, synthetic construct
KEQQTLQ

SEQ ID NO: 3807 - protein, 7 aa, synthetic construct
NIVKVGG

SEQ ID NO: 3808 - protein, 7 aa, synthetic construct
QGQSGLP

SEQ ID NO: 3809 - protein, 7 aa, synthetic construct
GKNYRIE

SEQ ID NO: 3810 - protein, 7 aa, synthetic construct
INDATYS

SEQ ID NO: 3811 - protein, 7 aa, synthetic construct
RDSTVGY

SEQ ID NO: 3812 - protein, 7 aa, synthetic construct
TLIHQKE

SEQ ID NO: 3813 - protein, 7 aa, synthetic construct
VGDRTRI

SEQ ID NO: 3814 - protein, 7 aa, synthetic construct
PQPYNAS

SEQ ID NO: 3815 - protein, 7 aa, synthetic construct
NASAKDF

SEQ ID NO: 3816 - protein, 7 aa, synthetic construct
MQDIPKA

SEQ ID NO: 3817 - protein, 7 aa, synthetic construct
SHQEKGA

SEQ ID NO: 3818 - protein, 7 aa, synthetic construct
VYEGPIS

SEQ ID NO: 3819 - protein, 7 aa, synthetic construct
TLTRKNE

SEQ ID NO: 3820 - protein, 7 aa, synthetic construct
SSPHSVI

SEQ ID NO: 3821 - protein, 7 aa, synthetic construct
LFSAHNA

SEQ ID NO: 3822 - protein, 7 aa, synthetic construct
SPMQQGY

SEQ ID NO: 3823 - protein, 7 aa, synthetic construct
EVKAHTF

SEQ ID NO: 3824 - protein, 7 aa, synthetic construct
DEWHSDA

SEQ ID NO: 3825 - protein, 7 aa, synthetic construct
KVSNIQQ

SEQ ID NO: 3826 - protein, 7 aa, synthetic construct
NLYLGDA

SEQ ID NO: 3827 - protein, 7 aa, synthetic construct
NSHGYSS

SEQ ID NO: 3828 - protein, 7 aa, synthetic construct
APRASDD

SEQ ID NO: 3829 - protein, 7 aa, synthetic construct
GGADRKP

SEQ ID NO: 3830 - protein, 7 aa, synthetic construct
NMGYSRG

SEQ ID NO: 3831 - protein, 7 aa, synthetic construct
GIKGVMY

SEQ ID NO: 3832 - protein, 7 aa, synthetic construct
FNRATPQ

SEQ ID NO: 3833 - protein, 7 aa, synthetic construct
YMRSHQD

SEQ ID NO: 3834 - protein, 7 aa, synthetic construct
MSQQGLI

SEQ ID NO: 3835 - protein, 7 aa, synthetic construct
HKPQYEE

SEQ ID NO: 3836 - protein, 7 aa, synthetic construct
WQSGGSD

SEQ ID NO: 3837 - protein, 7 aa, synthetic construct
QGHKTET

SEQ ID NO: 3838 - protein, 7 aa, synthetic construct
SIRFPQP

SEQ ID NO: 3839 - protein, 7 aa, synthetic construct
FQRVTSG

SEQ ID NO: 3840 - protein, 7 aa, synthetic construct
RKDNHAN

SEQ ID NO: 3841 - protein, 7 aa, synthetic construct
PTNGTQL

SEQ ID NO: 3842 - protein, 7 aa, synthetic construct
NGLYQKQ

SEQ ID NO: 3843 - protein, 7 aa, synthetic construct
GEKQTNF

SEQ ID NO: 3844 - protein, 7 aa, synthetic construct
YYTATNP

SEQ ID NO: 3845 - protein, 7 aa, synthetic construct
TQTDRQP

SEQ ID NO: 3846 - protein, 7 aa, synthetic construct
AQKPDAK

SEQ ID NO: 3847 - protein, 7 aa, synthetic construct
MSHAETF

SEQ ID NO: 3848 - protein, 7 aa, synthetic construct
AKDPRNH

SEQ ID NO: 3849 - protein, 7 aa, synthetic construct
LGSNDLR

SEQ ID NO: 3850 - protein, 7 aa, synthetic construct
QYHSGSS

SEQ ID NO: 3851 - protein, 7 aa, synthetic construct
VVGGSDP

SEQ ID NO: 3852 - protein, 7 aa, synthetic construct
PRGNNEF

SEQ ID NO: 3853 - protein, 7 aa, synthetic construct
KDSMTKI

SEQ ID NO: 3854 - protein, 7 aa, synthetic construct
EAATDKP

SEQ ID NO: 3855 - protein, 7 aa, synthetic construct
IFKEVEY

SEQ ID NO: 3856 - protein, 7 aa, synthetic construct
NGHQSYT

SEQ ID NO: 3857 - protein, 7 aa, synthetic construct
AKGIDLE

SEQ ID NO: 3858 - protein, 7 aa, synthetic construct
LTHTTTH

SEQ ID NO: 3859 - protein, 7 aa, synthetic construct
VREMLPQ

SEQ ID NO: 3860 - protein, 7 aa, synthetic construct
NKFNQES

SEQ ID NO: 3861 - protein, 7 aa, synthetic construct
HALAMTV

SEQ ID NO: 3862 - protein, 7 aa, synthetic construct
IPRDDMT

SEQ ID NO: 3863 - protein, 7 aa, synthetic construct
FTNIHRE

SEQ ID NO: 3864 - protein, 7 aa, synthetic construct
SEKTMQP

SEQ ID NO: 3865 - protein, 7 aa, synthetic construct
FVKPNTY

SEQ ID NO: 3866 - protein, 7 aa, synthetic construct
THSGQPI

SEQ ID NO: 3867 - protein, 7 aa, synthetic construct
KQGIENA

SEQ ID NO: 3868 - protein, 7 aa, synthetic construct
REGQPFD

SEQ ID NO: 3869 - protein, 7 aa, synthetic construct
GTQVLSA

SEQ ID NO: 3870 - protein, 7 aa, synthetic construct
PGAQQFH

SEQ ID NO: 3871 - protein, 7 aa, synthetic construct
SKESANP

SEQ ID NO: 3872 - protein, 7 aa, synthetic construct
RQAVHMD

SEQ ID NO: 3873 - protein, 7 aa, synthetic construct
GQRDGAA

SEQ ID NO: 3874 - protein, 7 aa, synthetic construct
DQSARPS

SEQ ID NO: 3875 - protein, 7 aa, synthetic construct
SFPSKDA

SEQ ID NO: 3876 - protein, 7 aa, synthetic construct
VATGSHV

SEQ ID NO: 3877 - protein, 7 aa, synthetic construct
MDMNTKE

SEQ ID NO: 3878 - protein, 7 aa, synthetic construct
GPQTHSE

SEQ ID NO: 3879 - protein, 7 aa, synthetic construct
RKDSMTV

SEQ ID NO: 3880 - protein, 7 aa, synthetic construct
SHYTPDA

SEQ ID NO: 3881 - protein, 7 aa, synthetic construct
NTQTGGV

SEQ ID NO: 3882 - protein, 7 aa, synthetic construct
FNMRVDG

SEQ ID NO: 3883 - protein, 7 aa, synthetic construct
IMKGQTV

SEQ ID NO: 3884 - protein, 7 aa, synthetic construct
KPLQGGD

SEQ ID NO: 3885 - protein, 7 aa, synthetic construct
DKVHQHV

SEQ ID NO: 3886 - protein, 7 aa, synthetic construct
VLNAGMN

SEQ ID NO: 3887 - protein, 7 aa, synthetic construct
EHVHRIE

SEQ ID NO: 3888 - protein, 7 aa, synthetic construct
KWSVGHD

SEQ ID NO: 3889 - protein, 7 aa, synthetic construct
SMFTNSE

SEQ ID NO: 3890 - protein, 7 aa, synthetic construct
VLKNQMM

SEQ ID NO: 3891 - protein, 7 aa, synthetic construct
HQGRNYE

SEQ ID NO: 3892 - protein, 7 aa, synthetic construct
SFNLPAG

SEQ ID NO: 3893 - protein, 7 aa, synthetic construct
QSGNKNE

SEQ ID NO: 3894 - protein, 7 aa, synthetic construct
EKGMIPT

SEQ ID NO: 3895 - protein, 7 aa, synthetic construct
SIDNRHD

SEQ ID NO: 3896 - protein, 7 aa, synthetic construct
GNTPTSF

SEQ ID NO: 3897 - protein, 7 aa, synthetic construct
AKPWAEA

SEQ ID NO: 3898 - protein, 7 aa, synthetic construct
GTDWNRE

SEQ ID NO: 3899 - protein, 7 aa, synthetic construct
MKVARGE

SEQ ID NO: 3900 - protein, 7 aa, synthetic construct
VQMKPHL

SEQ ID NO: 3901 - protein, 7 aa, synthetic construct
YEKQMTV

SEQ ID NO: 3902 - protein, 7 aa, synthetic construct
QEPRGPW

SEQ ID NO: 3903 - protein, 7 aa, synthetic construct
SSEASQN

SEQ ID NO: 3904 - protein, 7 aa, synthetic construct
FTIPKPS

SEQ ID NO: 3905 - protein, 7 aa, synthetic construct
NHQASDW

SEQ ID NO: 3906 - protein, 7 aa, synthetic construct
TSHTTLH

SEQ ID NO: 3907 - protein, 7 aa, synthetic construct
MVRTMTG

SEQ ID NO: 3908 - protein, 7 aa, synthetic construct
SHSVNPI

SEQ ID NO: 3909 - protein, 7 aa, synthetic construct
QADYSAS

SEQ ID NO: 3910 - protein, 7 aa, synthetic construct
IQQDKLG

SEQ ID NO: 3911 - protein, 7 aa, synthetic construct
GQQTGDP

SEQ ID NO: 3912 - protein, 7 aa, synthetic construct
TVKKEDH

SEQ ID NO: 3913 - protein, 7 aa, synthetic construct
WQRETNP

SEQ ID NO: 3914 - protein, 7 aa, synthetic construct
RDISNTP

SEQ ID NO: 3915 - protein, 7 aa, synthetic construct
YRGDKSP

SEQ ID NO: 3916 - protein, 7 aa, synthetic construct
HYAEKNV

SEQ ID NO: 3917 - protein, 7 aa, synthetic construct
FINKIEA

SEQ ID NO: 3918 - protein, 7 aa, synthetic construct
DEAQRIP

SEQ ID NO: 3919 - protein, 7 aa, synthetic construct
LFSPQTK

SEQ ID NO: 3920 - protein, 7 aa, synthetic construct
AGKFGMN

SEQ ID NO: 3921 - protein, 7 aa, synthetic construct
IMNGRPL

SEQ ID NO: 3922 - protein, 7 aa, synthetic construct
LVSAGTQ

SEQ ID NO: 3923 - protein, 7 aa, synthetic construct
HVVGNNN

SEQ ID NO: 3924 - protein, 7 aa, synthetic construct
SHESHQD

SEQ ID NO: 3925 - protein, 7 aa, synthetic construct
VSNQPQA

SEQ ID NO: 3926 - protein, 7 aa, synthetic construct
STSDTWK

SEQ ID NO: 3927 - protein, 7 aa, synthetic construct
PGAPSNR

SEQ ID NO: 3928 - protein, 7 aa, synthetic construct
QREVYVT

SEQ ID NO: 3929 - protein, 7 aa, synthetic construct
IGTSHQH

SEQ ID NO: 3930 - protein, 7 aa, synthetic construct
YNQSING

SEQ ID NO: 3931 - protein, 7 aa, synthetic construct
DMTSKFT

SEQ ID NO: 3932 - protein, 7 aa, synthetic construct
GTPHNAV

SEQ ID NO: 3933 - protein, 7 aa, synthetic construct
LEQRMHA

SEQ ID NO: 3934 - protein, 7 aa, synthetic construct
TQYPPDQ

SEQ ID NO: 3935 - protein, 7 aa, synthetic construct
GLRENVH

SEQ ID NO: 3936 - protein, 7 aa, synthetic construct
TADNQMM

SEQ ID NO: 3937 - protein, 7 aa, synthetic construct
LQKVNAI

SEQ ID NO: 3938 - protein, 7 aa, synthetic construct
IDGHHNL

SEQ ID NO: 3939 - protein, 7 aa, synthetic construct
TPLPENI

SEQ ID NO: 3940 - protein, 7 aa, synthetic construct
LSSSHAH

SEQ ID NO: 3941 - protein, 7 aa, synthetic construct
KSSGETI

SEQ ID NO: 3942 - protein, 7 aa, synthetic construct
DPHKDGM

SEQ ID NO: 3943 - protein, 7 aa, synthetic construct
AKQRIDG

SEQ ID NO: 3944 - protein, 7 aa, synthetic construct
HEYKIRE

SEQ ID NO: 3945 - protein, 7 aa, synthetic construct
SPGNELT

SEQ ID NO: 3946 - protein, 7 aa, synthetic construct
PEHNFPH

SEQ ID NO: 3947 - protein, 7 aa, synthetic construct
HPDAGHG

SEQ ID NO: 3948 - protein, 7 aa, synthetic construct
TRFEDKL

SEQ ID NO: 3949 - protein, 7 aa, synthetic construct
SHGKPTS

SEQ ID NO: 3950 - protein, 7 aa, synthetic construct
ANAPAFS

SEQ ID NO: 3951 - protein, 7 aa, synthetic construct
LQYSAKV

SEQ ID NO: 3952 - protein, 7 aa, synthetic construct
FHGQTQK

SEQ ID NO: 3953 - protein, 7 aa, synthetic construct
IFNSGVE

SEQ ID NO: 3954 - protein, 7 aa, synthetic construct
WDEQKQR

SEQ ID NO: 3955 - protein, 7 aa, synthetic construct
ASTLKAP

SEQ ID NO: 3956 - protein, 7 aa, synthetic construct
MHNKMGE

SEQ ID NO: 3957 - protein, 7 aa, synthetic construct
LQKTPIG

SEQ ID NO: 3958 - protein, 7 aa, synthetic construct
GHYQKDE

SEQ ID NO: 3959 - protein, 7 aa, synthetic construct
HGAHKND

SEQ ID NO: 3960 - protein, 7 aa, synthetic construct
NPPTRDS

SEQ ID NO: 3961 - protein, 7 aa, synthetic construct
PLRHEFS

SEQ ID NO: 3962 - protein, 7 aa, synthetic construct
GYNAQHL

SEQ ID NO: 3963 - protein, 7 aa, synthetic construct
PSQTHQL

SEQ ID NO: 3964 - protein, 7 aa, synthetic construct
AQQLHGV

SEQ ID NO: 3965 - protein, 7 aa, synthetic construct
ENAKLYP

SEQ ID NO: 3966 - protein, 7 aa, synthetic construct
FNLRQDP

SEQ ID NO: 3967 - protein, 7 aa, synthetic construct
MPPATHG

SEQ ID NO: 3968 - protein, 7 aa, synthetic construct
RVDGFPQ

SEQ ID NO: 3969 - protein, 7 aa, synthetic construct
EVHRNFE

SEQ ID NO: 3970 - protein, 7 aa, synthetic construct
EDASPNW

SEQ ID NO: 3971 - protein, 7 aa, synthetic construct
WSTYEIE

SEQ ID NO: 3972 - protein, 7 aa, synthetic construct
RTAPDNH

SEQ ID NO: 3973 - protein, 7 aa, synthetic construct
SHMEQVP

SEQ ID NO: 3974 - protein, 7 aa, synthetic construct
FLGKQQD

SEQ ID NO: 3975 - protein, 7 aa, synthetic construct
KLVGIDL

SEQ ID NO: 3976 - protein, 7 aa, synthetic construct
FQHTGNH

SEQ ID NO: 3977 - protein, 7 aa, synthetic construct
MPVETGP

SEQ ID NO: 3978 - protein, 7 aa, synthetic construct
KMDRKDQ

SEQ ID NO: 3979 - protein, 7 aa, synthetic construct
DHKPSDY

SEQ ID NO: 3980 - protein, 7 aa, synthetic construct
AYMGLAS

SEQ ID NO: 3981 - protein, 7 aa, synthetic construct
KPRETLD

SEQ ID NO: 3982 - protein, 7 aa, synthetic construct
PFKAHQE

SEQ ID NO: 3983 - protein, 7 aa, synthetic construct
IEVTHRD

SEQ ID NO: 3984 - protein, 7 aa, synthetic construct
NHTDKKG

SEQ ID NO: 3985 - protein, 7 aa, synthetic construct
NASQKVD

SEQ ID NO: 3986 - protein, 7 aa, synthetic construct
QPQKTII

SEQ ID NO: 3987 - protein, 7 aa, synthetic construct
VAVGADT

SEQ ID NO: 3988 - protein, 7 aa, synthetic construct
HGLKVGE

SEQ ID NO: 3989 - protein, 7 aa, synthetic construct
NRGNDQR

SEQ ID NO: 3990 - protein, 7 aa, synthetic construct
QSPKVLT

SEQ ID NO: 3991 - protein, 7 aa, synthetic construct
AMADREF

SEQ ID NO: 3992 - protein, 7 aa, synthetic construct
KGHSDGM

SEQ ID NO: 3993 - protein, 7 aa, synthetic construct
NFSKGFP

SEQ ID NO: 3994 - protein, 7 aa, synthetic construct
LTQAIKH

SEQ ID NO: 3995 - protein, 7 aa, synthetic construct
ARNDDKI

SEQ ID NO: 3996 - protein, 7 aa, synthetic construct
PDTHTRD

SEQ ID NO: 3997 - protein, 7 aa, synthetic construct
FKMVKID

SEQ ID NO: 3998 - protein, 7 aa, synthetic construct
PLKHADK

SEQ ID NO: 3999 - protein, 7 aa, synthetic construct
RDQKIFM

SEQ ID NO: 4000 - protein, 7 aa, synthetic construct
IRVMSGD

SEQ ID NO: 4001 - protein, 7 aa, synthetic construct
LKLGTKD

SEQ ID NO: 4002 - protein, 7 aa, synthetic construct
LSGYGLE

SEQ ID NO: 4003 - protein, 7 aa, synthetic construct
LHQMQRV

SEQ ID NO: 4004 - protein, 7 aa, synthetic construct
IQNPDVN

SEQ ID NO: 4005 - protein, 7 aa, synthetic construct
KYQSVSN

SEQ ID NO: 4006 - protein, 7 aa, synthetic construct
FPMKKEG

SEQ ID NO: 4007 - protein, 7 aa, synthetic construct
LNQRGAN

SEQ ID NO: 4008 - protein, 7 aa, synthetic construct
WPVAADK

SEQ ID NO: 4009 - protein, 7 aa, synthetic construct
KLQTEGM

SEQ ID NO: 4010 - protein, 7 aa, synthetic construct
IQSYNMS

SEQ ID NO: 4011 - protein, 7 aa, synthetic construct
MNENFPP

SEQ ID NO: 4012 - protein, 7 aa, synthetic construct
EVPPEYS

SEQ ID NO: 4013 - protein, 7 aa, synthetic construct
LYERQIP

SEQ ID NO: 4014 - protein, 7 aa, synthetic construct
PSGAMPL

SEQ ID NO: 4015 - protein, 7 aa, synthetic construct
ASPHHLD

SEQ ID NO: 4016 - protein, 7 aa, synthetic construct
PNMRVGP

SEQ ID NO: 4017 - protein, 7 aa, synthetic construct
AMVSKNA

SEQ ID NO: 4018 - protein, 7 aa, synthetic construct
GQGPVAL

SEQ ID NO: 4019 - protein, 7 aa, synthetic construct
QPMNPSP

SEQ ID NO: 4020 - protein, 7 aa, synthetic construct
QGEARPF

SEQ ID NO: 4021 - protein, 7 aa, synthetic construct
LAKYGDP

SEQ ID NO: 4022 - protein, 7 aa, synthetic construct
LHTNMAQ

SEQ ID NO: 4023 - protein, 7 aa, synthetic construct
FKDIINA

SEQ ID NO: 4024 - protein, 7 aa, synthetic construct
KTVSLSQ

SEQ ID NO: 4025 - protein, 7 aa, synthetic construct
QGRIVGM

SEQ ID NO: 4026 - protein, 7 aa, synthetic construct
YVPAKTP

SEQ ID NO: 4027 - protein, 7 aa, synthetic construct
HNVLMRD

SEQ ID NO: 4028 - protein, 7 aa, synthetic construct
TKVGDVA

SEQ ID NO: 4029 - protein, 7 aa, synthetic construct
SQNETHW

SEQ ID NO: 4030 - protein, 7 aa, synthetic construct
QSQHDPR

SEQ ID NO: 4031 - protein, 7 aa, synthetic construct
NEQIKIT

SEQ ID NO: 4032 - protein, 7 aa, synthetic construct
KNRTDFP

SEQ ID NO: 4033 - protein, 7 aa, synthetic construct
IIQSGTH

SEQ ID NO: 4034 - protein, 7 aa, synthetic construct
GGPIHPA

SEQ ID NO: 4035 - protein, 7 aa, synthetic construct
RNVTDHE

SEQ ID NO: 4036 - protein, 7 aa, synthetic construct
YRGEAEM

SEQ ID NO: 4037 - protein, 7 aa, synthetic construct
DSNHRTD

SEQ ID NO: 4038 - protein, 7 aa, synthetic construct
TMMGIEA

SEQ ID NO: 4039 - protein, 7 aa, synthetic construct
YFTKSET

SEQ ID NO: 4040 - protein, 7 aa, synthetic construct
IKVHDAM

SEQ ID NO: 4041 - protein, 7 aa, synthetic construct
DTKGPVH

SEQ ID NO: 4042 - protein, 7 aa, synthetic construct
KGNSESN

SEQ ID NO: 4043 - protein, 7 aa, synthetic construct
YMDKYHA

SEQ ID NO: 4044 - protein, 7 aa, synthetic construct
APPEFRI

SEQ ID NO: 4045 - protein, 7 aa, synthetic construct
MSPHMME

SEQ ID NO: 4046 - protein, 7 aa, synthetic construct
IGDPHRV

SEQ ID NO: 4047 - protein, 7 aa, synthetic construct
NKGDNAI

SEQ ID NO: 4048 - protein, 7 aa, synthetic construct
PHKEALM

SEQ ID NO: 4049 - protein, 7 aa, synthetic construct
FGHKPVM

SEQ ID NO: 4050 - protein, 7 aa, synthetic construct
TQPHSSE

SEQ ID NO: 4051 - protein, 7 aa, synthetic construct
DQIKKSM

SEQ ID NO: 4052 - protein, 7 aa, synthetic construct
QKNVVMQ

SEQ ID NO: 4053 - protein, 7 aa, synthetic construct
VEHRYNE

SEQ ID NO: 4054 - protein, 7 aa, synthetic construct
RIEQHTH

SEQ ID NO: 4055 - protein, 7 aa, synthetic construct
KIKGEDL

SEQ ID NO: 4056 - protein, 7 aa, synthetic construct
TIYAQGS

SEQ ID NO: 4057 - protein, 7 aa, synthetic construct
SRKPDMV

SEQ ID NO: 4058 - protein, 7 aa, synthetic construct
EMRANTP

SEQ ID NO: 4059 - protein, 7 aa, synthetic construct
VYTEKKT

SEQ ID NO: 4060 - protein, 7 aa, synthetic construct
PTNGVKH

SEQ ID NO: 4061 - protein, 7 aa, synthetic construct
YHQQAIT

SEQ ID NO: 4062 - protein, 7 aa, synthetic construct
QATKMFS

SEQ ID NO: 4063 - protein, 7 aa, synthetic construct
MPATQNN

SEQ ID NO: 4064 - protein, 7 aa, synthetic construct
LAGGAQA

SEQ ID NO: 4065 - protein, 7 aa, synthetic construct
RPNKSTE

SEQ ID NO: 4066 - protein, 7 aa, synthetic construct
TVPKTFD

SEQ ID NO: 4067 - protein, 7 aa, synthetic construct
KTQNDAW

SEQ ID NO: 4068 - protein, 7 aa, synthetic construct
RQIGENH

SEQ ID NO: 4069 - protein, 7 aa, synthetic construct
HNDSMKF

SEQ ID NO: 4070 - protein, 7 aa, synthetic construct
FWSKTDP

SEQ ID NO: 4071 - protein, 7 aa, synthetic construct
LWQAGHE

SEQ ID NO: 4072 - protein, 7 aa, synthetic construct
HQDPLGK

SEQ ID NO: 4073 - protein, 7 aa, synthetic construct
SSETQWS

SEQ ID NO: 4074 - protein, 7 aa, synthetic construct
TTQKDNE

SEQ ID NO: 4075 - protein, 7 aa, synthetic construct
TVTGEIS

SEQ ID NO: 4076 - protein, 7 aa, synthetic construct
RTEQAPL

SEQ ID NO: 4077 - protein, 7 aa, synthetic construct
CKDLNKC

SEQ ID NO: 4078 - protein, 7 aa, synthetic construct
NGHHQLV

SEQ ID NO: 4079 - protein, 7 aa, synthetic construct
SAPIANG

SEQ ID NO: 4080 - protein, 7 aa, synthetic construct
ISHDMEF

SEQ ID NO: 4081 - protein, 7 aa, synthetic construct
TIDRSKH

SEQ ID NO: 4082 - protein, 7 aa, synthetic construct
FMNNNNH

SEQ ID NO: 4083 - protein, 7 aa, synthetic construct
VKFDDNR

SEQ ID NO: 4084 - protein, 7 aa, synthetic construct
HSHELNA

SEQ ID NO: 4085 - protein, 7 aa, synthetic construct
VSDYIAP

SEQ ID NO: 4086 - protein, 7 aa, synthetic construct
NTTSSQL

SEQ ID NO: 4087 - protein, 7 aa, synthetic construct
KVVVHGT

SEQ ID NO: 4088 - protein, 7 aa, synthetic construct
DHQLTKT

SEQ ID NO: 4089 - protein, 7 aa, synthetic construct
VDKHMSF

SEQ ID NO: 4090 - protein, 7 aa, synthetic construct
SEKHHDD

SEQ ID NO: 4091 - protein, 7 aa, synthetic construct
GRVDNNH

SEQ ID NO: 4092 - protein, 7 aa, synthetic construct
IIQGMPD

SEQ ID NO: 4093 - protein, 7 aa, synthetic construct
WSQKQNH

SEQ ID NO: 4094 - protein, 7 aa, synthetic construct
ETPTYKY

SEQ ID NO: 4095 - protein, 7 aa, synthetic construct
GKLMNGQ

SEQ ID NO: 4096 - protein, 7 aa, synthetic construct
IARNTIQ

SEQ ID NO: 4097 - protein, 7 aa, synthetic construct
FGFATEN

SEQ ID NO: 4098 - protein, 7 aa, synthetic construct
ERQVGAA

SEQ ID NO: 4099 - protein, 7 aa, synthetic construct
QREQDRP

SEQ ID NO: 4100 - protein, 7 aa, synthetic construct
QVQRSML

SEQ ID NO: 4101 - protein, 7 aa, synthetic construct
KGTGISH

SEQ ID NO: 4102 - protein, 7 aa, synthetic construct
IMQARDR

SEQ ID NO: 4103 - protein, 7 aa, synthetic construct
RGVEVSD

SEQ ID NO: 4104 - protein, 7 aa, synthetic construct
FRPGDKL

SEQ ID NO: 4105 - protein, 7 aa, synthetic construct
GYHPQNA

SEQ ID NO: 4106 - protein, 7 aa, synthetic construct
DNDFNSR

SEQ ID NO: 4107 - protein, 7 aa, synthetic construct
FAGLEPA

SEQ ID NO: 4108 - protein, 7 aa, synthetic construct
INDYTAQ

SEQ ID NO: 4109 - protein, 7 aa, synthetic construct
QAEYRSQ

SEQ ID NO: 4110 - protein, 7 aa, synthetic construct
QMLGSLP

SEQ ID NO: 4111 - protein, 7 aa, synthetic construct
HTMHGGS

SEQ ID NO: 4112 - protein, 7 aa, synthetic construct
NAGQQTS

SEQ ID NO: 4113 - protein, 7 aa, synthetic construct
HQIQGSG

SEQ ID NO: 4114 - protein, 7 aa, synthetic construct
LKASTSG

SEQ ID NO: 4115 - protein, 7 aa, synthetic construct
LRNDQSY

SEQ ID NO: 4116 - protein, 7 aa, synthetic construct
RGEFHHP

SEQ ID NO: 4117 - protein, 7 aa, synthetic construct
AQEKIQA

SEQ ID NO: 4118 - protein, 7 aa, synthetic construct
YMNASNY

SEQ ID NO: 4119 - protein, 7 aa, synthetic construct
HTTAAHL

SEQ ID NO: 4120 - protein, 7 aa, synthetic construct
FRTTPST

SEQ ID NO: 4121 - protein, 7 aa, synthetic construct
NNYEAQS

SEQ ID NO: 4122 - protein, 7 aa, synthetic construct
EIKRNDP

SEQ ID NO: 4123 - protein, 7 aa, synthetic construct
NFQGMHP

SEQ ID NO: 4124 - protein, 7 aa, synthetic construct
AEKYMEM

SEQ ID NO: 4125 - protein, 7 aa, synthetic construct
TELHKYM

SEQ ID NO: 4126 - protein, 7 aa, synthetic construct
QRDGHAV

SEQ ID NO: 4127 - protein, 7 aa, synthetic construct
QTNGTMF

SEQ ID NO: 4128 - protein, 7 aa, synthetic construct
QRPIVDY

SEQ ID NO: 4129 - protein, 7 aa, synthetic construct
GHLANHD

SEQ ID NO: 4130 - protein, 7 aa, synthetic construct
KEYSQVA

SEQ ID NO: 4131 - protein, 7 aa, synthetic construct
DGRRQDG

SEQ ID NO: 4132 - protein, 7 aa, synthetic construct
VTTEREY

SEQ ID NO: 4133 - protein, 7 aa, synthetic construct
REKAHPP

SEQ ID NO: 4134 - protein, 7 aa, synthetic construct
SNNPKQD

SEQ ID NO: 4135 - protein, 7 aa, synthetic construct
QTGAKVW

SEQ ID NO: 4136 - protein, 7 aa, synthetic construct
GLSKDGP

SEQ ID NO: 4137 - protein, 7 aa, synthetic construct
YESWTAS

SEQ ID NO: 4138 - protein, 7 aa, synthetic construct
NSGGINL

SEQ ID NO: 4139 - protein, 7 aa, synthetic construct
PTFNGLP

SEQ ID NO: 4140 - protein, 7 aa, synthetic construct
YMNRGDY

SEQ ID NO: 4141 - protein, 7 aa, synthetic construct
PNVPNNR

SEQ ID NO: 4142 - protein, 7 aa, synthetic construct
TNHREPF

SEQ ID NO: 4143 - protein, 7 aa, synthetic construct
GSKPLYM

SEQ ID NO: 4144 - protein, 7 aa, synthetic construct
SYAQARM

SEQ ID NO: 4145 - protein, 7 aa, synthetic construct
EAKKAGY

SEQ ID NO: 4146 - protein, 7 aa, synthetic construct
ENYGVNG

SEQ ID NO: 4147 - protein, 7 aa, synthetic construct
PHQAGKD

SEQ ID NO: 4148 - protein, 7 aa, synthetic construct
AKIMDID

SEQ ID NO: 4149 - protein, 7 aa, synthetic construct
DRQGHVQ

SEQ ID NO: 4150 - protein, 7 aa, synthetic construct
MGGGNTL

SEQ ID NO: 4151 - protein, 7 aa, synthetic construct
GEPNKSF

SEQ ID NO: 4152 - protein, 7 aa, synthetic construct
RPQTQST

SEQ ID NO: 4153 - protein, 7 aa, synthetic construct
LQMTRQP

SEQ ID NO: 4154 - protein, 7 aa, synthetic construct
QTHEARP

SEQ ID NO: 4155 - protein, 7 aa, synthetic construct
KKDEMKM

SEQ ID NO: 4156 - protein, 7 aa, synthetic construct
EGNVGKH

SEQ ID NO: 4157 - protein, 7 aa, synthetic construct
VYKADLT

SEQ ID NO: 4158 - protein, 7 aa, synthetic construct
SHGADQG

SEQ ID NO: 4159 - protein, 7 aa, synthetic construct
QNAHNPP

SEQ ID NO: 4160 - protein, 7 aa, synthetic construct
LYNKPYV

SEQ ID NO: 4161 - protein, 7 aa, synthetic construct
KQFATQN

SEQ ID NO: 4162 - protein, 7 aa, synthetic construct
VRNPSMM

SEQ ID NO: 4163 - protein, 7 aa, synthetic construct
GYNKQVT

SEQ ID NO: 4164 - protein, 7 aa, synthetic construct
MLDKSMT

SEQ ID NO: 4165 - protein, 7 aa, synthetic construct
VFSVASK

SEQ ID NO: 4166 - protein, 7 aa, synthetic construct
NQQNMGS

SEQ ID NO: 4167 - protein, 7 aa, synthetic construct
EYNENGS

SEQ ID NO: 4168 - protein, 7 aa, synthetic construct
SVNDKSQ

SEQ ID NO: 4169 - protein, 7 aa, synthetic construct
GSIKEGL

SEQ ID NO: 4170 - protein, 7 aa, synthetic construct
GANQNVA

SEQ ID NO: 4171 - protein, 7 aa, synthetic construct
LKAHAFN

SEQ ID NO: 4172 - protein, 7 aa, synthetic construct
RVYEGEM

SEQ ID NO: 4173 - protein, 7 aa, synthetic construct
WKTAPGP

SEQ ID NO: 4174 - protein, 7 aa, synthetic construct
MNAPNKS

SEQ ID NO: 4175 - protein, 7 aa, synthetic construct
DSKNEVM

SEQ ID NO: 4176 - protein, 7 aa, synthetic construct
KRDTWQG

SEQ ID NO: 4177 - protein, 7 aa, synthetic construct
NTGQVGT

SEQ ID NO: 4178 - protein, 7 aa, synthetic construct
QTERNIP

SEQ ID NO: 4179 - protein, 7 aa, synthetic construct
YEHEYPR

SEQ ID NO: 4180 - protein, 7 aa, synthetic construct
WDHRLHE

SEQ ID NO: 4181 - protein, 7 aa, synthetic construct
NSHTRLS

SEQ ID NO: 4182 - protein, 7 aa, synthetic construct
VFTKSDI

SEQ ID NO: 4183 - protein, 7 aa, synthetic construct
YGRANYQ

SEQ ID NO: 4184 - protein, 7 aa, synthetic construct
TVGRARE

SEQ ID NO: 4185 - protein, 7 aa, synthetic construct
QPGAKFI

SEQ ID NO: 4186 - protein, 7 aa, synthetic construct
QLVRGGH

SEQ ID NO: 4187 - protein, 7 aa, synthetic construct
TNKTTLS

SEQ ID NO: 4188 - protein, 7 aa, synthetic construct
IPPKDAK

SEQ ID NO: 4189 - protein, 7 aa, synthetic construct
VPNDKSS

SEQ ID NO: 4190 - protein, 7 aa, synthetic construct
STSNKLI

SEQ ID NO: 4191 - protein, 7 aa, synthetic construct
EVIHKEH

SEQ ID NO: 4192 - protein, 7 aa, synthetic construct
ANEVMPF

SEQ ID NO: 4193 - protein, 7 aa, synthetic construct
TDQHSKT

SEQ ID NO: 4194 - protein, 7 aa, synthetic construct
MHNSTYL

SEQ ID NO: 4195 - protein, 7 aa, synthetic construct
WEHPTKD

SEQ ID NO: 4196 - protein, 7 aa, synthetic construct
TQGSAKA

SEQ ID NO: 4197 - protein, 7 aa, synthetic construct
SISSMMA

SEQ ID NO: 4198 - protein, 7 aa, synthetic construct
NIGNVKS

SEQ ID NO: 4199 - protein, 7 aa, synthetic construct
NRDSNRE

SEQ ID NO: 4200 - protein, 7 aa, synthetic construct
RNLNDAS

SEQ ID NO: 4201 - protein, 7 aa, synthetic construct
HHDAAQN

SEQ ID NO: 4202 - protein, 7 aa, synthetic construct
PKVHIGP

SEQ ID NO: 4203 - protein, 7 aa, synthetic construct
MQLNGAP

SEQ ID NO: 4204 - protein, 7 aa, synthetic construct
GIPIRQD

SEQ ID NO: 4205 - protein, 7 aa, synthetic construct
EQTGQGR

SEQ ID NO: 4206 - protein, 7 aa, synthetic construct
ATPYNKA

SEQ ID NO: 4207 - protein, 7 aa, synthetic construct
MSQNAPF

SEQ ID NO: 4208 - protein, 7 aa, synthetic construct
LETRQGI

SEQ ID NO: 4209 - protein, 7 aa, synthetic construct
QRQAHFP

SEQ ID NO: 4210 - protein, 7 aa, synthetic construct
HSLKANV

SEQ ID NO: 4211 - protein, 7 aa, synthetic construct
NLAAGQI

SEQ ID NO: 4212 - protein, 7 aa, synthetic construct
WNEVSNM

SEQ ID NO: 4213 - protein, 7 aa, synthetic construct
LVQMQNS

SEQ ID NO: 4214 - protein, 7 aa, synthetic construct
HHSADKE

SEQ ID NO: 4215 - protein, 7 aa, synthetic construct
DMRMAQV

SEQ ID NO: 4216 - protein, 7 aa, synthetic construct
HTKQQEH

SEQ ID NO: 4217 - protein, 7 aa, synthetic construct
FRENMPM

SEQ ID NO: 4218 - protein, 7 aa, synthetic construct
MREHYES

SEQ ID NO: 4219 - protein, 7 aa, synthetic construct
YASVNNP

SEQ ID NO: 4220 - protein, 7 aa, synthetic construct
QGIAARG

SEQ ID NO: 4221 - protein, 7 aa, synthetic construct
MHGPNEN

SEQ ID NO: 4222 - protein, 7 aa, synthetic construct
LSAYMNE

SEQ ID NO: 4223 - protein, 7 aa, synthetic construct
LKDEGYV

SEQ ID NO: 4224 - protein, 7 aa, synthetic construct
GSTPRSG

SEQ ID NO: 4225 - protein, 7 aa, synthetic construct
HPDHAMT

SEQ ID NO: 4226 - protein, 7 aa, synthetic construct
KSGIFTE

SEQ ID NO: 4227 - protein, 7 aa, synthetic construct
IVTNGYS

SEQ ID NO: 4228 - protein, 7 aa, synthetic construct
FKAEKTY

SEQ ID NO: 4229 - protein, 7 aa, synthetic construct
IARADET

SEQ ID NO: 4230 - protein, 7 aa, synthetic construct
SGNPSDA

SEQ ID NO: 4231 - protein, 7 aa, synthetic construct
AQAPVDT

SEQ ID NO: 4232 - protein, 7 aa, synthetic construct
FTNERGP

SEQ ID NO: 4233 - protein, 7 aa, synthetic construct
EPSGVMT

SEQ ID NO: 4234 - protein, 7 aa, synthetic construct
FPYDKGA

SEQ ID NO: 4235 - protein, 7 aa, synthetic construct
AGVRGSM

SEQ ID NO: 4236 - protein, 7 aa, synthetic construct
WHGTVKA

SEQ ID NO: 4237 - protein, 7 aa, synthetic construct
SLIKSNS

SEQ ID NO: 4238 - protein, 7 aa, synthetic construct
VKEAAHQ

SEQ ID NO: 4239 - protein, 7 aa, synthetic construct
INNGNTT

SEQ ID NO: 4240 - protein, 7 aa, synthetic construct
PHAKQPD

SEQ ID NO: 4241 - protein, 7 aa, synthetic construct
EAANTYK

SEQ ID NO: 4242 - protein, 7 aa, synthetic construct
QHKANEN

SEQ ID NO: 4243 - protein, 7 aa, synthetic construct
ARQAEQS

SEQ ID NO: 4244 - protein, 7 aa, synthetic construct
ITEFSNK

SEQ ID NO: 4245 - protein, 7 aa, synthetic construct
HPNLNIG

SEQ ID NO: 4246 - protein, 7 aa, synthetic construct
EPDKVDM

SEQ ID NO: 4247 - protein, 7 aa, synthetic construct
RDHKPTE

SEQ ID NO: 4248 - protein, 7 aa, synthetic construct
KSATQVY

SEQ ID NO: 4249 - protein, 7 aa, synthetic construct
NQEQMHM

SEQ ID NO: 4250 - protein, 7 aa, synthetic construct
GKDSNIN

SEQ ID NO: 4251 - protein, 7 aa, synthetic construct
EATHNNS

SEQ ID NO: 4252 - protein, 7 aa, synthetic construct
NGHMQFS

SEQ ID NO: 4253 - protein, 7 aa, synthetic construct
NKNRGEA

SEQ ID NO: 4254 - protein, 7 aa, synthetic construct
TKYIEHQ

SEQ ID NO: 4255 - protein, 7 aa, synthetic construct
YQSQPNG

SEQ ID NO: 4256 - protein, 7 aa, synthetic construct
TGSTMKY

SEQ ID NO: 4257 - protein, 7 aa, synthetic construct
LTRVMNS

SEQ ID NO: 4258 - protein, 7 aa, synthetic construct
YSETREF

SEQ ID NO: 4259 - protein, 7 aa, synthetic construct
RAHHTGE

SEQ ID NO: 4260 - protein, 7 aa, synthetic construct
DKNYVHQ

SEQ ID NO: 4261 - protein, 7 aa, synthetic construct
VWGKELV

SEQ ID NO: 4262 - protein, 7 aa, synthetic construct
FYDRSVV

SEQ ID NO: 4263 - protein, 7 aa, synthetic construct
GNAIGRD

SEQ ID NO: 4264 - protein, 7 aa, synthetic construct
EPTKIHS

SEQ ID NO: 4265 - protein, 7 aa, synthetic construct
TASVHGN

SEQ ID NO: 4266 - protein, 7 aa, synthetic construct
RSMNKGD

SEQ ID NO: 4267 - protein, 7 aa, synthetic construct
HQTMHAI

SEQ ID NO: 4268 - protein, 7 aa, synthetic construct
GEFGNTR

SEQ ID NO: 4269 - protein, 7 aa, synthetic construct
DKHSKQY

SEQ ID NO: 4270 - protein, 7 aa, synthetic construct
GAIKWDE

SEQ ID NO: 4271 - protein, 7 aa, synthetic construct
DPNSKFA

SEQ ID NO: 4272 - protein, 7 aa, synthetic construct
NANYSLS

SEQ ID NO: 4273 - protein, 7 aa, synthetic construct
DATRASS

SEQ ID NO: 4274 - protein, 7 aa, synthetic construct
ASPGQTM

SEQ ID NO: 4275 - protein, 7 aa, synthetic construct
GQPIASF

SEQ ID NO: 4276 - protein, 7 aa, synthetic construct
HQYGEDS

SEQ ID NO: 4277 - protein, 7 aa, synthetic construct
KREVEPG

SEQ ID NO: 4278 - protein, 7 aa, synthetic construct
DQNIKTV

SEQ ID NO: 4279 - protein, 7 aa, synthetic construct
VHNSMAM

SEQ ID NO: 4280 - protein, 7 aa, synthetic construct
EGVNKQF

SEQ ID NO: 4281 - protein, 7 aa, synthetic construct
PQNYQQS

SEQ ID NO: 4282 - protein, 7 aa, synthetic construct
GMIKSDT

SEQ ID NO: 4283 - protein, 7 aa, synthetic construct
QQQNDKM

SEQ ID NO: 4284 - protein, 7 aa, synthetic construct
NPQNLGV

SEQ ID NO: 4285 - protein, 7 aa, synthetic construct
GFAKASI

SEQ ID NO: 4286 - protein, 7 aa, synthetic construct
RETNPRY

SEQ ID NO: 4287 - protein, 7 aa, synthetic construct
LDTYHGP

SEQ ID NO: 4288 - protein, 7 aa, synthetic construct
SHIVNTS

SEQ ID NO: 4289 - protein, 7 aa, synthetic construct
GGTTFGH

SEQ ID NO: 4290 - protein, 7 aa, synthetic construct
DFKDHQH

SEQ ID NO: 4291 - protein, 7 aa, synthetic construct
ITGTMIE

SEQ ID NO: 4292 - protein, 7 aa, synthetic construct
KPVEKDI

SEQ ID NO: 4293 - protein, 7 aa, synthetic construct
QADKWPT

SEQ ID NO: 4294 - protein, 7 aa, synthetic construct
LENKVTG

SEQ ID NO: 4295 - protein, 7 aa, synthetic construct
KPAMHAV

SEQ ID NO: 4296 - protein, 7 aa, synthetic construct
TGHNHDG

SEQ ID NO: 4297 - protein, 7 aa, synthetic construct
QDRHIAT

SEQ ID NO: 4298 - protein, 7 aa, synthetic construct
SKQVQTF

SEQ ID NO: 4299 - protein, 7 aa, synthetic construct
PRDKNNP

SEQ ID NO: 4300 - protein, 7 aa, synthetic construct
NPIKPEL

SEQ ID NO: 4301 - protein, 7 aa, synthetic construct
IKADPIG

SEQ ID NO: 4302 - protein, 7 aa, synthetic construct
RPSGSTQ

SEQ ID NO: 4303 - protein, 7 aa, synthetic construct
AMASTGK

SEQ ID NO: 4304 - protein, 7 aa, synthetic construct
LMGTKMI

SEQ ID NO: 4305 - protein, 7 aa, synthetic construct
SEQSNYP

SEQ ID NO: 4306 - protein, 7 aa, synthetic construct
SMIHVNG

SEQ ID NO: 4307 - protein, 7 aa, synthetic construct
HRDIHMG

SEQ ID NO: 4308 - protein, 7 aa, synthetic construct
MGHLEMS

SEQ ID NO: 4309 - protein, 7 aa, synthetic construct
DGLGPRF

SEQ ID NO: 4310 - protein, 7 aa, synthetic construct
EPGWSEP

SEQ ID NO: 4311 - protein, 7 aa, synthetic construct
WKLDKIS

SEQ ID NO: 4312 - protein, 7 aa, synthetic construct
AITKNAL

SEQ ID NO: 4313 - protein, 7 aa, synthetic construct
PVAIKEV

SEQ ID NO: 4314 - protein, 7 aa, synthetic construct
THHLQSS

SEQ ID NO: 4315 - protein, 7 aa, synthetic construct
LASNSER

SEQ ID NO: 4316 - protein, 7 aa, synthetic construct
GQNKDWS

SEQ ID NO: 4317 - protein, 7 aa, synthetic construct
RSESNAQ

SEQ ID NO: 4318 - protein, 7 aa, synthetic construct
KSTAVMY

SEQ ID NO: 4319 - protein, 7 aa, synthetic construct
RESMETH

SEQ ID NO: 4320 - protein, 7 aa, synthetic construct
MANNQPW

SEQ ID NO: 4321 - protein, 7 aa, synthetic construct
WHDNNHS

SEQ ID NO: 4322 - protein, 7 aa, synthetic construct
DTQGPPQ

SEQ ID NO: 4323 - protein, 7 aa, synthetic construct
NNMQSPG

SEQ ID NO: 4324 - protein, 7 aa, synthetic construct
WQKTMQE

SEQ ID NO: 4325 - protein, 7 aa, synthetic construct
IPKISFN

SEQ ID NO: 4326 - protein, 7 aa, synthetic construct
QVAVYTE

SEQ ID NO: 4327 - protein, 7 aa, synthetic construct
RGDPNTF

SEQ ID NO: 4328 - protein, 7 aa, synthetic construct
KPRIDDH

SEQ ID NO: 4329 - protein, 7 aa, synthetic construct
KPEGDKW

SEQ ID NO: 4330 - protein, 7 aa, synthetic construct
IVPHKYQ

SEQ ID NO: 4331 - protein, 7 aa, synthetic construct
GMAAMHE

SEQ ID NO: 4332 - protein, 7 aa, synthetic construct
WVDKTQA

SEQ ID NO: 4333 - protein, 7 aa, synthetic construct
LAKDVRY

SEQ ID NO: 4334 - protein, 7 aa, synthetic construct
PRNQNYT

SEQ ID NO: 4335 - protein, 7 aa, synthetic construct
PSASMSK

SEQ ID NO: 4336 - protein, 7 aa, synthetic construct
DKQRDSV

SEQ ID NO: 4337 - protein, 7 aa, synthetic construct
HTKDWDT

SEQ ID NO: 4338 - protein, 7 aa, synthetic construct
SHMKSED

SEQ ID NO: 4339 - protein, 7 aa, synthetic construct
EMPVTNR

SEQ ID NO: 4340 - protein, 7 aa, synthetic construct
TQPGGVK

SEQ ID NO: 4341 - protein, 7 aa, synthetic construct
VSRSSSG

SEQ ID NO: 4342 - protein, 7 aa, synthetic construct
NFNNQAR

SEQ ID NO: 4343 - protein, 7 aa, synthetic construct
MTREHVL

SEQ ID NO: 4344 - protein, 7 aa, synthetic construct
DNHSTHR

SEQ ID NO: 4345 - protein, 7 aa, synthetic construct
DIPYMAA

SEQ ID NO: 4346 - protein, 7 aa, synthetic construct
ETQGKYI

SEQ ID NO: 4347 - protein, 7 aa, synthetic construct
ISHQWAA

SEQ ID NO: 4348 - protein, 7 aa, synthetic construct
GQFRTPE

SEQ ID NO: 4349 - protein, 7 aa, synthetic construct
SYRHAVE

SEQ ID NO: 4350 - protein, 7 aa, synthetic construct
THDSIKP

SEQ ID NO: 4351 - protein, 7 aa, synthetic construct
SNQGLAT

SEQ ID NO: 4352 - protein, 7 aa, synthetic construct
WHTTIQP

SEQ ID NO: 4353 - protein, 7 aa, synthetic construct
YGQWTLA

SEQ ID NO: 4354 - protein, 7 aa, synthetic construct
HMRGDET

SEQ ID NO: 4355 - protein, 7 aa, synthetic construct
INSVMRG

SEQ ID NO: 4356 - protein, 7 aa, synthetic construct
SLRGEAH

SEQ ID NO: 4357 - protein, 7 aa, synthetic construct
WNAPKMG

SEQ ID NO: 4358 - protein, 7 aa, synthetic construct
RNGHMDN

SEQ ID NO: 4359 - protein, 7 aa, synthetic construct
VPKTTIM

SEQ ID NO: 4360 - protein, 7 aa, synthetic construct
YNSGYAM

SEQ ID NO: 4361 - protein, 7 aa, synthetic construct
MRERETA

SEQ ID NO: 4362 - protein, 7 aa, synthetic construct
EKHPNNM

SEQ ID NO: 4363 - protein, 7 aa, synthetic construct
GPNMSAI

SEQ ID NO: 4364 - protein, 7 aa, synthetic construct
LRGADMR

SEQ ID NO: 4365 - protein, 7 aa, synthetic construct
VVQPGQG

SEQ ID NO: 4366 - protein, 7 aa, synthetic construct
QKNRDMM

SEQ ID NO: 4367 - protein, 7 aa, synthetic construct
ASAGVPG

SEQ ID NO: 4368 - protein, 7 aa, synthetic construct
HIKTIDD

SEQ ID NO: 4369 - protein, 7 aa, synthetic construct
SGESKWL

SEQ ID NO: 4370 - protein, 7 aa, synthetic construct
RDNRPAN

SEQ ID NO: 4371 - protein, 7 aa, synthetic construct
KPPMLGN

SEQ ID NO: 4372 - protein, 7 aa, synthetic construct
MNSDAFG

SEQ ID NO: 4373 - protein, 7 aa, synthetic construct
RIYPAEA

SEQ ID NO: 4374 - protein, 7 aa, synthetic construct
GSMGNMP

SEQ ID NO: 4375 - protein, 7 aa, synthetic construct
HKLEKFV

SEQ ID NO: 4376 - protein, 7 aa, synthetic construct
KMSGTML

SEQ ID NO: 4377 - protein, 7 aa, synthetic construct
DTATLQG

SEQ ID NO: 4378 - protein, 7 aa, synthetic construct
FTEFERG

SEQ ID NO: 4379 - protein, 7 aa, synthetic construct
KFEHSGQ

SEQ ID NO: 4380 - protein, 7 aa, synthetic construct
EFSRPGA

SEQ ID NO: 4381 - protein, 7 aa, synthetic construct
YRMTQEV

SEQ ID NO: 4382 - protein, 7 aa, synthetic construct
QQGGLMF

SEQ ID NO: 4383 - protein, 7 aa, synthetic construct
HLREDRV

SEQ ID NO: 4384 - protein, 7 aa, synthetic construct
HTQSKEW

SEQ ID NO: 4385 - protein, 7 aa, synthetic construct
GWQTKLP

SEQ ID NO: 4386 - protein, 7 aa, synthetic construct
GNGHERM

SEQ ID NO: 4387 - protein, 7 aa, synthetic construct
PPVTTGA

SEQ ID NO: 4388 - protein, 7 aa, synthetic construct
FDSVRSP

SEQ ID NO: 4389 - protein, 7 aa, synthetic construct
QPDKIDV

SEQ ID NO: 4390 - protein, 7 aa, synthetic construct
WSNAASM

SEQ ID NO: 4391 - protein, 7 aa, synthetic construct
DAYNSSK

SEQ ID NO: 4392 - protein, 7 aa, synthetic construct
HRASDIH

SEQ ID NO: 4393 - protein, 7 aa, synthetic construct
RPMPEGN

SEQ ID NO: 4394 - protein, 7 aa, synthetic construct
REGDPKA

SEQ ID NO: 4395 - protein, 7 aa, synthetic construct
MYPHQKQ

SEQ ID NO: 4396 - protein, 7 aa, synthetic construct
CKAGDCN

SEQ ID NO: 4397 - protein, 7 aa, synthetic construct
ARLHPPE

SEQ ID NO: 4398 - protein, 7 aa, synthetic construct
PLKTHIM

SEQ ID NO: 4399 - protein, 7 aa, synthetic construct
ARMKMDS

SEQ ID NO: 4400 - protein, 7 aa, synthetic construct
LLTGYSG

SEQ ID NO: 4401 - protein, 7 aa, synthetic construct
RNHSHND

SEQ ID NO: 4402 - protein, 7 aa, synthetic construct
VQDYGRQ

SEQ ID NO: 4403 - protein, 7 aa, synthetic construct
IVQEANR

SEQ ID NO: 4404 - protein, 7 aa, synthetic construct
RNDHPRL

SEQ ID NO: 4405 - protein, 7 aa, synthetic construct
QDNGMKQ

SEQ ID NO: 4406 - protein, 7 aa, synthetic construct
EGPPAAG

SEQ ID NO: 4407 - protein, 7 aa, synthetic construct
YYGTDDM

SEQ ID NO: 4408 - protein, 7 aa, synthetic construct
KIGVDDI

SEQ ID NO: 4409 - protein, 7 aa, synthetic construct
QAHPMED

SEQ ID NO: 4410 - protein, 7 aa, synthetic construct
GPHQTQY

SEQ ID NO: 4411 - protein, 7 aa, synthetic construct
TRDPKQH

SEQ ID NO: 4412 - protein, 7 aa, synthetic construct
EGKISPH

SEQ ID NO: 4413 - protein, 7 aa, synthetic construct
HITPRDD

SEQ ID NO: 4414 - protein, 7 aa, synthetic construct
GMNHKQS

SEQ ID NO: 4415 - protein, 7 aa, synthetic construct
YDQPVGP

SEQ ID NO: 4416 - protein, 7 aa, synthetic construct
RPHEVMS

SEQ ID NO: 4417 - protein, 7 aa, synthetic construct
TNSTVFA

SEQ ID NO: 4418 - protein, 7 aa, synthetic construct
TINTNQF

SEQ ID NO: 4419 - protein, 7 aa, synthetic construct
HVSMPGG

SEQ ID NO: 4420 - protein, 7 aa, synthetic construct
LKVEANN

SEQ ID NO: 4421 - protein, 7 aa, synthetic construct
LQPASVH

SEQ ID NO: 4422 - protein, 7 aa, synthetic construct
PMQDNHR

SEQ ID NO: 4423 - protein, 7 aa, synthetic construct
SMGPERH

SEQ ID NO: 4424 - protein, 7 aa, synthetic construct
DPPADME

SEQ ID NO: 4425 - protein, 7 aa, synthetic construct
KNTVAIM

SEQ ID NO: 4426 - protein, 7 aa, synthetic construct
IPTRTHP

SEQ ID NO: 4427 - protein, 7 aa, synthetic construct
RAIRQEE

SEQ ID NO: 4428 - protein, 7 aa, synthetic construct
TEANAHF

SEQ ID NO: 4429 - protein, 7 aa, synthetic construct
KMADFPK

SEQ ID NO: 4430 - protein, 7 aa, synthetic construct
TGDRDMK

SEQ ID NO: 4431 - protein, 7 aa, synthetic construct
AWEKKER

SEQ ID NO: 4432 - protein, 7 aa, synthetic construct
AKTTDNR

SEQ ID NO: 4433 - protein, 7 aa, synthetic construct
NGERLSK

SEQ ID NO: 4434 - protein, 7 aa, synthetic construct
TNYPSET

SEQ ID NO: 4435 - protein, 7 aa, synthetic construct
SQWSATS

SEQ ID NO: 4436 - protein, 7 aa, synthetic construct
KTEQQMR

SEQ ID NO: 4437 - protein, 7 aa, synthetic construct
DVSGIRI

SEQ ID NO: 4438 - protein, 7 aa, synthetic construct
EGQKDGI

SEQ ID NO: 4439 - protein, 7 aa, synthetic construct
QLPREVS

SEQ ID NO: 4440 - protein, 7 aa, synthetic construct
VTRAMLG

SEQ ID NO: 4441 - protein, 7 aa, synthetic construct
KSAGASY

SEQ ID NO: 4442 - protein, 7 aa, synthetic construct
YIKNEDP

SEQ ID NO: 4443 - protein, 7 aa, synthetic construct
KREPPSD

SEQ ID NO: 4444 - protein, 7 aa, synthetic construct
YRRENDP

SEQ ID NO: 4445 - protein, 7 aa, synthetic construct
PMIKADA

SEQ ID NO: 4446 - protein, 7 aa, synthetic construct
MELKRQA

SEQ ID NO: 4447 - protein, 7 aa, synthetic construct
YAFGSEG

SEQ ID NO: 4448 - protein, 7 aa, synthetic construct
FGQKAQM

SEQ ID NO: 4449 - protein, 7 aa, synthetic construct
TFLAKND

SEQ ID NO: 4450 - protein, 7 aa, synthetic construct
QRTNPLG

SEQ ID NO: 4451 - protein, 7 aa, synthetic construct
DPQILRP

SEQ ID NO: 4452 - protein, 7 aa, synthetic construct
NKQYENG

SEQ ID NO: 4453 - protein, 7 aa, synthetic construct
LKANHEG

SEQ ID NO: 4454 - protein, 7 aa, synthetic construct
KFDREMG

SEQ ID NO: 4455 - protein, 7 aa, synthetic construct
QKYIDTA

SEQ ID NO: 4456 - protein, 7 aa, synthetic construct
VAPKGGG

SEQ ID NO: 4457 - protein, 7 aa, synthetic construct
HALSEDF

SEQ ID NO: 4458 - protein, 7 aa, synthetic construct
DNHRVNN

SEQ ID NO: 4459 - protein, 7 aa, synthetic construct
QKYITED

SEQ ID NO: 4460 - protein, 7 aa, synthetic construct
LMMNKDA

SEQ ID NO: 4461 - protein, 7 aa, synthetic construct
DGKIVLP

SEQ ID NO: 4462 - protein, 7 aa, synthetic construct
TVKHDMA

SEQ ID NO: 4463 - protein, 7 aa, synthetic construct
YVQSGGI

SEQ ID NO: 4464 - protein, 7 aa, synthetic construct
FHNRQTD

SEQ ID NO: 4465 - protein, 7 aa, synthetic construct
IGPRTII

SEQ ID NO: 4466 - protein, 7 aa, synthetic construct
FKEKVYT

SEQ ID NO: 4467 - protein, 7 aa, synthetic construct
SFPGVSA

SEQ ID NO: 4468 - protein, 7 aa, synthetic construct
ISSDATK

SEQ ID NO: 4469 - protein, 7 aa, synthetic construct
PHVAQIA

SEQ ID NO: 4470 - protein, 7 aa, synthetic construct
PGGSMGL

SEQ ID NO: 4471 - protein, 7 aa, synthetic construct
SFKRQDE

SEQ ID NO: 4472 - protein, 7 aa, synthetic construct
KDHKANG

SEQ ID NO: 4473 - protein, 7 aa, synthetic construct
HMTQGRM

SEQ ID NO: 4474 - protein, 7 aa, synthetic construct
LRSMRAD

SEQ ID NO: 4475 - protein, 7 aa, synthetic construct
YHATHNM

SEQ ID NO: 4476 - protein, 7 aa, synthetic construct
DKKPQNM

SEQ ID NO: 4477 - protein, 7 aa, synthetic construct
EDFPHRT

SEQ ID NO: 4478 - protein, 7 aa, synthetic construct
KFHHGQE

SEQ ID NO: 4479 - protein, 7 aa, synthetic construct
HKNYVGA

SEQ ID NO: 4480 - protein, 7 aa, synthetic construct
PYDGNVG

SEQ ID NO: 4481 - protein, 7 aa, synthetic construct
RTADLGY

SEQ ID NO: 4482 - protein, 7 aa, synthetic construct
SQAQGFH

SEQ ID NO: 4483 - protein, 7 aa, synthetic construct
GKQTAQF

SEQ ID NO: 4484 - protein, 7 aa, synthetic construct
SWGADKL

SEQ ID NO: 4485 - protein, 7 aa, synthetic construct
DTKHETH

SEQ ID NO: 4486 - protein, 7 aa, synthetic construct
YTGGNAE

SEQ ID NO: 4487 - protein, 7 aa, synthetic construct
PKHGLTS

SEQ ID NO: 4488 - protein, 7 aa, synthetic construct
QDGQNQK

SEQ ID NO: 4489 - protein, 7 aa, synthetic construct
APSGVNT

SEQ ID NO: 4490 - protein, 7 aa, synthetic construct
SSRNGEK

SEQ ID NO: 4491 - protein, 7 aa, synthetic construct
NIPTNGA

SEQ ID NO: 4492 - protein, 7 aa, synthetic construct
IRGLMLE

SEQ ID NO: 4493 - protein, 7 aa, synthetic construct
DHRLEGE

SEQ ID NO: 4494 - protein, 7 aa, synthetic construct
GVPKLAN

SEQ ID NO: 4495 - protein, 7 aa, synthetic construct
GGTPTVI

SEQ ID NO: 4496 - protein, 7 aa, synthetic construct
HSNSQPI

SEQ ID NO: 4497 - protein, 7 aa, synthetic construct
FGPKPSN

SEQ ID NO: 4498 - protein, 7 aa, synthetic construct
IKAEYDR

SEQ ID NO: 4499 - protein, 7 aa, synthetic construct
GQHLGVN

SEQ ID NO: 4500 - protein, 7 aa, synthetic construct
RANNDLR

SEQ ID NO: 4501 - protein, 7 aa, synthetic construct
VGTQNIG

SEQ ID NO: 4502 - protein, 7 aa, synthetic construct
KAMNHAS

SEQ ID NO: 4503 - protein, 7 aa, synthetic construct
TMNEQFP

SEQ ID NO: 4504 - protein, 7 aa, synthetic construct
SYSTENV

SEQ ID NO: 4505 - protein, 7 aa, synthetic construct
GGGNDDR

SEQ ID NO: 4506 - protein, 7 aa, synthetic construct
VQTHRVG

SEQ ID NO: 4507 - protein, 7 aa, synthetic construct
NNLARGG

SEQ ID NO: 4508 - protein, 7 aa, synthetic construct
GVPKPGD

SEQ ID NO: 4509 - protein, 7 aa, synthetic construct
AHRDNDS

SEQ ID NO: 4510 - protein, 7 aa, synthetic construct
YPSHVIS

SEQ ID NO: 4511 - protein, 7 aa, synthetic construct
APKYATS

SEQ ID NO: 4512 - protein, 7 aa, synthetic construct
AENQKMN

SEQ ID NO: 4513 - protein, 7 aa, synthetic construct
TDGSQNP

SEQ ID NO: 4514 - protein, 7 aa, synthetic construct
VTMSMAE

SEQ ID NO: 4515 - protein, 7 aa, synthetic construct
YLDFAVS

SEQ ID NO: 4516 - protein, 7 aa, synthetic construct
TLYSAET

SEQ ID NO: 4517 - protein, 7 aa, synthetic construct
KEVHAQG

SEQ ID NO: 4518 - protein, 7 aa, synthetic construct
NEGRQVI

SEQ ID NO: 4519 - protein, 7 aa, synthetic construct
DFSHTKM

SEQ ID NO: 4520 - protein, 7 aa, synthetic construct
SSPVMPA

SEQ ID NO: 4521 - protein, 7 aa, synthetic construct
NKPPHGA

SEQ ID NO: 4522 - protein, 7 aa, synthetic construct
PHKDHSE

SEQ ID NO: 4523 - protein, 7 aa, synthetic construct
DKQGQPT

SEQ ID NO: 4524 - protein, 7 aa, synthetic construct
MAMKGDK

SEQ ID NO: 4525 - protein, 7 aa, synthetic construct
LQNSAPR

SEQ ID NO: 4526 - protein, 7 aa, synthetic construct
QTEPTAR

SEQ ID NO: 4527 - protein, 7 aa, synthetic construct
QASYNAQ

SEQ ID NO: 4528 - protein, 7 aa, synthetic construct
GPSQNYE

SEQ ID NO: 4529 - protein, 7 aa, synthetic construct
QTTQFSV

SEQ ID NO: 4530 - protein, 7 aa, synthetic construct
QRSDMAM

SEQ ID NO: 4531 - protein, 7 aa, synthetic construct
SQTMVAP

SEQ ID NO: 4532 - protein, 7 aa, synthetic construct
VEWKPEI

SEQ ID NO: 4533 - protein, 7 aa, synthetic construct
KSPNQPT

SEQ ID NO: 4534 - protein, 7 aa, synthetic construct
HQKAPDP

SEQ ID NO: 4535 - protein, 7 aa, synthetic construct
RREKSLE

SEQ ID NO: 4536 - protein, 7 aa, synthetic construct
NLYQENK

SEQ ID NO: 4537 - protein, 7 aa, synthetic construct
EPQGSFK

SEQ ID NO: 4538 - protein, 7 aa, synthetic construct
KEPHQYA

SEQ ID NO: 4539 - protein, 7 aa, synthetic construct
HAHGTYI

SEQ ID NO: 4540 - protein, 7 aa, synthetic construct
QDVRHGY

SEQ ID NO: 4541 - protein, 7 aa, synthetic construct
RHQEFDG

SEQ ID NO: 4542 - protein, 7 aa, synthetic construct
DSMNHMR

SEQ ID NO: 4543 - protein, 7 aa, synthetic construct
RIGGENF

SEQ ID NO: 4544 - protein, 7 aa, synthetic construct
WRKGQED

SEQ ID NO: 4545 - protein, 7 aa, synthetic construct
KSDRQDV

SEQ ID NO: 4546 - protein, 7 aa, synthetic construct
HMVFKNE

SEQ ID NO: 4547 - protein, 7 aa, synthetic construct
WNHLGEG

SEQ ID NO: 4548 - protein, 7 aa, synthetic construct
KGKMADL

SEQ ID NO: 4549 - protein, 7 aa, synthetic construct
TPFHGTA

SEQ ID NO: 4550 - protein, 7 aa, synthetic construct
LMPLTGA

SEQ ID NO: 4551 - protein, 7 aa, synthetic construct
ALKREDG

SEQ ID NO: 4552 - protein, 7 aa, synthetic construct
PNNAIQK

SEQ ID NO: 4553 - protein, 7 aa, synthetic construct
MPRPDGY

SEQ ID NO: 4554 - protein, 7 aa, synthetic construct
WQKQPMP

SEQ ID NO: 4555 - protein, 7 aa, synthetic construct
NATPGAA

SEQ ID NO: 4556 - protein, 7 aa, synthetic construct
NEHHRAP

SEQ ID NO: 4557 - protein, 7 aa, synthetic construct
GGAVFAG

SEQ ID NO: 4558 - protein, 7 aa, synthetic construct
QGDGMKQ

SEQ ID NO: 4559 - protein, 7 aa, synthetic construct
QRQDIES

SEQ ID NO: 4560 - protein, 7 aa, synthetic construct
AVGEASK

SEQ ID NO: 4561 - protein, 7 aa, synthetic construct
QVDRPHG

SEQ ID NO: 4562 - protein, 7 aa, synthetic construct
NKIENGR

SEQ ID NO: 4563 - protein, 7 aa, synthetic construct
IPPHDKE

SEQ ID NO: 4564 - protein, 7 aa, synthetic construct
QAGPKEQ

SEQ ID NO: 4565 - protein, 7 aa, synthetic construct
YMVHGDA

SEQ ID NO: 4566 - protein, 7 aa, synthetic construct
IGERTSD

SEQ ID NO: 4567 - protein, 7 aa, synthetic construct
LGKPHEH

SEQ ID NO: 4568 - protein, 7 aa, synthetic construct
STGAHHM

SEQ ID NO: 4569 - protein, 7 aa, synthetic construct
PIRPVID

SEQ ID NO: 4570 - protein, 7 aa, synthetic construct
VQANGPM

SEQ ID NO: 4571 - protein, 7 aa, synthetic construct
GQHNLQT

SEQ ID NO: 4572 - protein, 7 aa, synthetic construct
NYAKDSM

SEQ ID NO: 4573 - protein, 7 aa, synthetic construct
MPPLAEK

SEQ ID NO: 4574 - protein, 7 aa, synthetic construct
AADKNMS

SEQ ID NO: 4575 - protein, 7 aa, synthetic construct
TFQNQDK

SEQ ID NO: 4576 - protein, 7 aa, synthetic construct
AYLNRPG

SEQ ID NO: 4577 - protein, 7 aa, synthetic construct
TGNYKSA

SEQ ID NO: 4578 - protein, 7 aa, synthetic construct
IGQHMQD

SEQ ID NO: 4579 - protein, 7 aa, synthetic construct
DPQHDKF

SEQ ID NO: 4580 - protein, 7 aa, synthetic construct
DQHVMKN

SEQ ID NO: 4581 - protein, 7 aa, synthetic construct
KGLEYKD

SEQ ID NO: 4582 - protein, 7 aa, synthetic construct
TMGPHPK

SEQ ID NO: 4583 - protein, 7 aa, synthetic construct
SMRTAEM

SEQ ID NO: 4584 - protein, 7 aa, synthetic construct
YVKHQQP

SEQ ID NO: 4585 - protein, 7 aa, synthetic construct
SQQGEGM

SEQ ID NO: 4586 - protein, 7 aa, synthetic construct
DKWNAGQ

SEQ ID NO: 4587 - protein, 7 aa, synthetic construct
SGSGINT

SEQ ID NO: 4588 - protein, 7 aa, synthetic construct
TATNELV

SEQ ID NO: 4589 - protein, 7 aa, synthetic construct
VQNMDTR

SEQ ID NO: 4590 - protein, 7 aa, synthetic construct
AVGYALE

SEQ ID NO: 4591 - protein, 7 aa, synthetic construct
YPPMVGD

SEQ ID NO: 4592 - protein, 7 aa, synthetic construct
MGEKAYY

SEQ ID NO: 4593 - protein, 7 aa, synthetic construct
WPKPGEQ

SEQ ID NO: 4594 - protein, 7 aa, synthetic construct
WNQMINN

SEQ ID NO: 4595 - protein, 7 aa, synthetic construct
VGIHTQP

SEQ ID NO: 4596 - protein, 7 aa, synthetic construct
MLKALEE

SEQ ID NO: 4597 - protein, 7 aa, synthetic construct
GAKRGEA

SEQ ID NO: 4598 - protein, 7 aa, synthetic construct
MNQKYNE

SEQ ID NO: 4599 - protein, 7 aa, synthetic construct
AGGIQHM

SEQ ID NO: 4600 - protein, 7 aa, synthetic construct
SANQALS

SEQ ID NO: 4601 - protein, 7 aa, synthetic construct
DHTGAML

SEQ ID NO: 4602 - protein, 7 aa, synthetic construct
GHFDPDQ

SEQ ID NO: 4603 - protein, 7 aa, synthetic construct
KMTSQDW

SEQ ID NO: 4604 - protein, 7 aa, synthetic construct
MEGSGYI

SEQ ID NO: 4605 - protein, 7 aa, synthetic construct
DMKTNSF

SEQ ID NO: 4606 - protein, 7 aa, synthetic construct
TVSPVGH

SEQ ID NO: 4607 - protein, 7 aa, synthetic construct
KIDFITG

SEQ ID NO: 4608 - protein, 7 aa, synthetic construct
HNLNGPR

SEQ ID NO: 4609 - protein, 7 aa, synthetic construct
PQEKERF

SEQ ID NO: 4610 - protein, 7 aa, synthetic construct
SYETHAY

SEQ ID NO: 4611 - protein, 7 aa, synthetic construct
EGNKNLP

SEQ ID NO: 4612 - protein, 7 aa, synthetic construct
QGIHRLE

SEQ ID NO: 4613 - protein, 7 aa, synthetic construct
GTREQRT

SEQ ID NO: 4614 - protein, 7 aa, synthetic construct
FAKHHVA

SEQ ID NO: 4615 - protein, 7 aa, synthetic construct
YKEERNI

SEQ ID NO: 4616 - protein, 7 aa, synthetic construct
RLIHDND

SEQ ID NO: 4617 - protein, 7 aa, synthetic construct
QKDVSTA

SEQ ID NO: 4618 - protein, 7 aa, synthetic construct
MKNVVET

SEQ ID NO: 4619 - protein, 7 aa, synthetic construct
FKDPQMS

SEQ ID NO: 4620 - protein, 7 aa, synthetic construct
AKAHELN

SEQ ID NO: 4621 - protein, 7 aa, synthetic construct
FIPKVSE

SEQ ID NO: 4622 - protein, 7 aa, synthetic construct
GVLANNS

SEQ ID NO: 4623 - protein, 7 aa, synthetic construct
NHAPMHE

SEQ ID NO: 4624 - protein, 7 aa, synthetic construct
FHKPRDE

SEQ ID NO: 4625 - protein, 7 aa, synthetic construct
PNKSPNV

SEQ ID NO: 4626 - protein, 7 aa, synthetic construct
STAKPAH

SEQ ID NO: 4627 - protein, 7 aa, synthetic construct
RMGDMIV

SEQ ID NO: 4628 - protein, 7 aa, synthetic construct
DEFNRDT

SEQ ID NO: 4629 - protein, 7 aa, synthetic construct
TSSGQYV

SEQ ID NO: 4630 - protein, 7 aa, synthetic construct
PHDQHAF

SEQ ID NO: 4631 - protein, 7 aa, synthetic construct
GESHMNM

SEQ ID NO: 4632 - protein, 7 aa, synthetic construct
LSQLVQP

SEQ ID NO: 4633 - protein, 7 aa, synthetic construct
NPHDHSF

SEQ ID NO: 4634 - protein, 7 aa, synthetic construct
YKQIPEP

SEQ ID NO: 4635 - protein, 7 aa, synthetic construct
SHDKAYD

SEQ ID NO: 4636 - protein, 7 aa, synthetic construct
GLPQNTW

SEQ ID NO: 4637 - protein, 7 aa, synthetic construct
KGTEGSI

SEQ ID NO: 4638 - protein, 7 aa, synthetic construct
QTKIISD

SEQ ID NO: 4639 - protein, 7 aa, synthetic construct
MPQAQQF

SEQ ID NO: 4640 - protein, 7 aa, synthetic construct
SVFHGPP

SEQ ID NO: 4641 - protein, 7 aa, synthetic construct
QSGNDNV

SEQ ID NO: 4642 - protein, 7 aa, synthetic construct
GASSAHL

SEQ ID NO: 4643 - protein, 7 aa, synthetic construct
LYKQNAV

SEQ ID NO: 4644 - protein, 7 aa, synthetic construct
THSRTTN

SEQ ID NO: 4645 - protein, 7 aa, synthetic construct
INKFAMG

SEQ ID NO: 4646 - protein, 7 aa, synthetic construct
QSQRTEI

SEQ ID NO: 4647 - protein, 7 aa, synthetic construct
WGKMTGN

SEQ ID NO: 4648 - protein, 7 aa, synthetic construct
AQINFHS

SEQ ID NO: 4649 - protein, 7 aa, synthetic construct
ITVRSTG

SEQ ID NO: 4650 - protein, 7 aa, synthetic construct
DPHKYDS

SEQ ID NO: 4651 - protein, 7 aa, synthetic construct
GYSMEHP

SEQ ID NO: 4652 - protein, 7 aa, synthetic construct
GFSQMSD

SEQ ID NO: 4653 - protein, 7 aa, synthetic construct
WPGMAKG

SEQ ID NO: 4654 - protein, 7 aa, synthetic construct
IARPLDA

SEQ ID NO: 4655 - protein, 7 aa, synthetic construct
AASTNPD

SEQ ID NO: 4656 - protein, 7 aa, synthetic construct
FDGSQGK

SEQ ID NO: 4657 - protein, 7 aa, synthetic construct
FNIAHGG

SEQ ID NO: 4658 - protein, 7 aa, synthetic construct
VTMREAH

SEQ ID NO: 4659 - protein, 7 aa, synthetic construct
VHHQTFS

SEQ ID NO: 4660 - protein, 7 aa, synthetic construct
DAYHMNG

SEQ ID NO: 4661 - protein, 7 aa, synthetic construct
QQKQDNE

SEQ ID NO: 4662 - protein, 7 aa, synthetic construct
DKGTNQD

SEQ ID NO: 4663 - protein, 7 aa, synthetic construct
DSTNGRL

SEQ ID NO: 4664 - protein, 7 aa, synthetic construct
TQKGHEL

SEQ ID NO: 4665 - protein, 7 aa, synthetic construct
FGNNQMP

SEQ ID NO: 4666 - protein, 7 aa, synthetic construct
RSDKDSN

SEQ ID NO: 4667 - protein, 7 aa, synthetic construct
NALSVVG

SEQ ID NO: 4668 - protein, 7 aa, synthetic construct
VESTRLP

SEQ ID NO: 4669 - protein, 7 aa, synthetic construct
YLSASAP

SEQ ID NO: 4670 - protein, 7 aa, synthetic construct
DNNRPVW

SEQ ID NO: 4671 - protein, 7 aa, synthetic construct
REDYHID

SEQ ID NO: 4672 - protein, 7 aa, synthetic construct
NTPRGRD

SEQ ID NO: 4673 - protein, 7 aa, synthetic construct
LYNEPHD

SEQ ID NO: 4674 - protein, 7 aa, synthetic construct
YAVLPQG

SEQ ID NO: 4675 - protein, 7 aa, synthetic construct
GQQVVRA

SEQ ID NO: 4676 - protein, 7 aa, synthetic construct
DNMSGAR

SEQ ID NO: 4677 - protein, 7 aa, synthetic construct
AWSGVDG

SEQ ID NO: 4678 - protein, 7 aa, synthetic construct
INAHTQY

SEQ ID NO: 4679 - protein, 7 aa, synthetic construct
SVVNQGG

SEQ ID NO: 4680 - protein, 7 aa, synthetic construct
MVRYQAE

SEQ ID NO: 4681 - protein, 7 aa, synthetic construct
YIPGIGP

SEQ ID NO: 4682 - protein, 7 aa, synthetic construct
RAHEQHV

SEQ ID NO: 4683 - protein, 7 aa, synthetic construct
FTAQDEH

SEQ ID NO: 4684 - protein, 7 aa, synthetic construct
LDDKRVQ

SEQ ID NO: 4685 - protein, 7 aa, synthetic construct
HGPEKVI

SEQ ID NO: 4686 - protein, 7 aa, synthetic construct
VNKPLDL

SEQ ID NO: 4687 - protein, 7 aa, synthetic construct
VVGSAND

SEQ ID NO: 4688 - protein, 7 aa, synthetic construct
IHNLQGD

SEQ ID NO: 4689 - protein, 7 aa, synthetic construct
GKHYEEN

SEQ ID NO: 4690 - protein, 7 aa, synthetic construct
LASNAGY

SEQ ID NO: 4691 - protein, 7 aa, synthetic construct
VSVVGRP

SEQ ID NO: 4692 - protein, 7 aa, synthetic construct
RAVSMNE

SEQ ID NO: 4693 - protein, 7 aa, synthetic construct
MSPSKWK

SEQ ID NO: 4694 - protein, 7 aa, synthetic construct
FRHRDSE

SEQ ID NO: 4695 - protein, 7 aa, synthetic construct
GQRDYMV

SEQ ID NO: 4696 - protein, 7 aa, synthetic construct
GGEGKRF

SEQ ID NO: 4697 - protein, 7 aa, synthetic construct
QANSAES

SEQ ID NO: 4698 - protein, 7 aa, synthetic construct
YQTTKHA

SEQ ID NO: 4699 - protein, 7 aa, synthetic construct
QDHAQVR

SEQ ID NO: 4700 - protein, 7 aa, synthetic construct
QKYDGVK

SEQ ID NO: 4701 - protein, 7 aa, synthetic construct
KTVNYEV

SEQ ID NO: 4702 - protein, 7 aa, synthetic construct
QRVPGIG

SEQ ID NO: 4703 - protein, 7 aa, synthetic construct
MPSAKHL

SEQ ID NO: 4704 - protein, 7 aa, synthetic construct
NSHPMER

SEQ ID NO: 4705 - protein, 7 aa, synthetic construct
LDKLKNL

SEQ ID NO: 4706 - protein, 7 aa, synthetic construct
HGGVREG

SEQ ID NO: 4707 - protein, 7 aa, synthetic construct
YSKNPDT

SEQ ID NO: 4708 - protein, 7 aa, synthetic construct
FNGGPQS

SEQ ID NO: 4709 - protein, 7 aa, synthetic construct
VMNRTDN

SEQ ID NO: 4710 - protein, 7 aa, synthetic construct
GDGRRET

SEQ ID NO: 4711 - protein, 7 aa, synthetic construct
FRPTMET

SEQ ID NO: 4712 - protein, 7 aa, synthetic construct
GRATMGL

SEQ ID NO: 4713 - protein, 7 aa, synthetic construct
MSNVAIH

SEQ ID NO: 4714 - protein, 7 aa, synthetic construct
YMNHQEA

SEQ ID NO: 4715 - protein, 7 aa, synthetic construct
SKEDTRN

SEQ ID NO: 4716 - protein, 7 aa, synthetic construct
NAMHQQI

SEQ ID NO: 4717 - protein, 7 aa, synthetic construct
QKNPGAH

SEQ ID NO: 4718 - protein, 7 aa, synthetic construct
QTRPSIG

SEQ ID NO: 4719 - protein, 7 aa, synthetic construct
DFQDGTR

SEQ ID NO: 4720 - protein, 7 aa, synthetic construct
GQQNFGE

SEQ ID NO: 4721 - protein, 7 aa, synthetic construct
QDDKWKN

SEQ ID NO: 4722 - protein, 7 aa, synthetic construct
SYGGSAV

SEQ ID NO: 4723 - protein, 7 aa, synthetic construct
VMEARSG

SEQ ID NO: 4724 - protein, 7 aa, synthetic construct
HRATDQY

SEQ ID NO: 4725 - protein, 7 aa, synthetic construct
DRAEGHM

SEQ ID NO: 4726 - protein, 7 aa, synthetic construct
ILSNMPK

SEQ ID NO: 4727 - protein, 7 aa, synthetic construct
YNMSDHI

SEQ ID NO: 4728 - protein, 7 aa, synthetic construct
AIHGGVD

SEQ ID NO: 4729 - protein, 7 aa, synthetic construct
LKNMLSN

SEQ ID NO: 4730 - protein, 7 aa, synthetic construct
YHQHQTS

SEQ ID NO: 4731 - protein, 7 aa, synthetic construct
DPKMRGE

SEQ ID NO: 4732 - protein, 7 aa, synthetic construct
HKDHNYD

SEQ ID NO: 4733 - protein, 7 aa, synthetic construct
NVIKPDD

SEQ ID NO: 4734 - protein, 7 aa, synthetic construct
KQPQFSP

SEQ ID NO: 4735 - protein, 7 aa, synthetic construct
LSPSHIS

SEQ ID NO: 4736 - protein, 7 aa, synthetic construct
HYAAGQV

SEQ ID NO: 4737 - protein, 7 aa, synthetic construct
RDPRRDL

SEQ ID NO: 4738 - protein, 7 aa, synthetic construct
KVNEVSL

SEQ ID NO: 4739 - protein, 7 aa, synthetic construct
GLHIRVE

SEQ ID NO: 4740 - protein, 7 aa, synthetic construct
RTHGNEP

SEQ ID NO: 4741 - protein, 7 aa, synthetic construct
RIISGAQ

SEQ ID NO: 4742 - protein, 7 aa, synthetic construct
RHQSVSV

SEQ ID NO: 4743 - protein, 7 aa, synthetic construct
MVDGYSK

SEQ ID NO: 4744 - protein, 7 aa, synthetic construct
SGNWRHE

SEQ ID NO: 4745 - protein, 7 aa, synthetic construct
IAPRTTY

SEQ ID NO: 4746 - protein, 7 aa, synthetic construct
SNKWIKE

SEQ ID NO: 4747 - protein, 7 aa, synthetic construct
FISANDG

SEQ ID NO: 4748 - protein, 7 aa, synthetic construct
DNAFHHP

SEQ ID NO: 4749 - protein, 7 aa, synthetic construct
ASSPGPQ

SEQ ID NO: 4750 - protein, 7 aa, synthetic construct
SNDKRNM

SEQ ID NO: 4751 - protein, 7 aa, synthetic construct
HYAINSG

SEQ ID NO: 4752 - protein, 7 aa, synthetic construct
YQMPEKQ

SEQ ID NO: 4753 - protein, 7 aa, synthetic construct
ILKMSEM

SEQ ID NO: 4754 - protein, 7 aa, synthetic construct
YNVSSTT

SEQ ID NO: 4755 - protein, 7 aa, synthetic construct
FQDMVHP

SEQ ID NO: 4756 - protein, 7 aa, synthetic construct
MTKHGTS

SEQ ID NO: 4757 - protein, 7 aa, synthetic construct
SDHKSMV

SEQ ID NO: 4758 - protein, 7 aa, synthetic construct
QIQNRTE

SEQ ID NO: 4759 - protein, 7 aa, synthetic construct
RSSAQDM

SEQ ID NO: 4760 - protein, 7 aa, synthetic construct
PRESNKP

SEQ ID NO: 4761 - protein, 7 aa, synthetic construct
PPHTPEE

SEQ ID NO: 4762 - protein, 7 aa, synthetic construct
NRSVTHM

SEQ ID NO: 4763 - protein, 7 aa, synthetic construct
YATSSVH

SEQ ID NO: 4764 - protein, 7 aa, synthetic construct
VRHGVPM

SEQ ID NO: 4765 - protein, 7 aa, synthetic construct
VYMTPDE

SEQ ID NO: 4766 - protein, 7 aa, synthetic construct
QRITIEG

SEQ ID NO: 4767 - protein, 7 aa, synthetic construct
YTSEEPR

SEQ ID NO: 4768 - protein, 7 aa, synthetic construct
KHDIVIG

SEQ ID NO: 4769 - protein, 7 aa, synthetic construct
VDDRFQY

SEQ ID NO: 4770 - protein, 7 aa, synthetic construct
DKLPKHD

SEQ ID NO: 4771 - protein, 7 aa, synthetic construct
LPRPLSN

SEQ ID NO: 4772 - protein, 7 aa, synthetic construct
PEGSPRI

SEQ ID NO: 4773 - protein, 7 aa, synthetic construct
LGGMGQD

SEQ ID NO: 4774 - protein, 7 aa, synthetic construct
GEFHNGG

SEQ ID NO: 4775 - protein, 7 aa, synthetic construct
TRHHVIE

SEQ ID NO: 4776 - protein, 7 aa, synthetic construct
DKADPLN

SEQ ID NO: 4777 - protein, 7 aa, synthetic construct
AARITHE

SEQ ID NO: 4778 - protein, 7 aa, synthetic construct
GHPNMRE

SEQ ID NO: 4779 - protein, 7 aa, synthetic construct
VHQVTTK

SEQ ID NO: 4780 - protein, 7 aa, synthetic construct
SYLNRGG

SEQ ID NO: 4781 - protein, 7 aa, synthetic construct
RVKDNIM

SEQ ID NO: 4782 - protein, 7 aa, synthetic construct
HNSPVPQ

SEQ ID NO: 4783 - protein, 7 aa, synthetic construct
ANELKTF

SEQ ID NO: 4784 - protein, 7 aa, synthetic construct
KLVGGVG

SEQ ID NO: 4785 - protein, 7 aa, synthetic construct
WAEGQGI

SEQ ID NO: 4786 - protein, 7 aa, synthetic construct
SLSREEI

SEQ ID NO: 4787 - protein, 7 aa, synthetic construct
PANAAIL

SEQ ID NO: 4788 - protein, 7 aa, synthetic construct
AADGVSM

SEQ ID NO: 4789 - protein, 7 aa, synthetic construct
DRKGQFG

SEQ ID NO: 4790 - protein, 7 aa, synthetic construct
VTGMMTN

SEQ ID NO: 4791 - protein, 7 aa, synthetic construct
GFEHGPR

SEQ ID NO: 4792 - protein, 7 aa, synthetic construct
NGQPHKF

SEQ ID NO: 4793 - protein, 7 aa, synthetic construct
FAGSPMI

SEQ ID NO: 4794 - protein, 7 aa, synthetic construct
GKEQNNK

SEQ ID NO: 4795 - protein, 7 aa, synthetic construct
GHESNMK

SEQ ID NO: 4796 - protein, 7 aa, synthetic construct
KDYPQGL

SEQ ID NO: 4797 - protein, 7 aa, synthetic construct
PLRKDNH

SEQ ID NO: 4798 - protein, 7 aa, synthetic construct
VHKAFPV

SEQ ID NO: 4799 - protein, 7 aa, synthetic construct
INQASRT

SEQ ID NO: 4800 - protein, 7 aa, synthetic construct
LPTHKTN

SEQ ID NO: 4801 - protein, 7 aa, synthetic construct
GKVIPMS

SEQ ID NO: 4802 - protein, 7 aa, synthetic construct
TVHFENA

SEQ ID NO: 4803 - protein, 7 aa, synthetic construct
KINNEFH

SEQ ID NO: 4804 - protein, 7 aa, synthetic construct
LGAKDVM

SEQ ID NO: 4805 - protein, 7 aa, synthetic construct
ATSVGFV

SEQ ID NO: 4806 - protein, 7 aa, synthetic construct
EHRNRDM

SEQ ID NO: 4807 - protein, 7 aa, synthetic construct
YQGKFQT

SEQ ID NO: 4808 - protein, 7 aa, synthetic construct
SQDGQTR

SEQ ID NO: 4809 - protein, 7 aa, synthetic construct
PKVQHDL

SEQ ID NO: 4810 - protein, 7 aa, synthetic construct
YDGPGTI

SEQ ID NO: 4811 - protein, 7 aa, synthetic construct
ADSPNKE

SEQ ID NO: 4812 - protein, 7 aa, synthetic construct
NNETGAR

SEQ ID NO: 4813 - protein, 7 aa, synthetic construct
WKSPERT

SEQ ID NO: 4814 - protein, 7 aa, synthetic construct
TDIYVKD

SEQ ID NO: 4815 - protein, 7 aa, synthetic construct
QNDQRIQ

SEQ ID NO: 4816 - protein, 7 aa, synthetic construct
VADKGTM

SEQ ID NO: 4817 - protein, 7 aa, synthetic construct
DGLGGMR

SEQ ID NO: 4818 - protein, 7 aa, synthetic construct
IHGQKPI

SEQ ID NO: 4819 - protein, 7 aa, synthetic construct
TKPSNIH

SEQ ID NO: 4820 - protein, 7 aa, synthetic construct
GVHPDGR

SEQ ID NO: 4821 - protein, 7 aa, synthetic construct
METKEFA

SEQ ID NO: 4822 - protein, 7 aa, synthetic construct
YTHEAHA

SEQ ID NO: 4823 - protein, 7 aa, synthetic construct
KASEDPG

SEQ ID NO: 4824 - protein, 7 aa, synthetic construct
GPITQTV

SEQ ID NO: 4825 - protein, 7 aa, synthetic construct
AFEKNHT

SEQ ID NO: 4826 - protein, 7 aa, synthetic construct
WMKASLG

SEQ ID NO: 4827 - protein, 7 aa, synthetic construct
QLQSMPQ

SEQ ID NO: 4828 - protein, 7 aa, synthetic construct
NSVNKNF

SEQ ID NO: 4829 - protein, 7 aa, synthetic construct
VSYTRAE

SEQ ID NO: 4830 - protein, 7 aa, synthetic construct
RSHDGMN

SEQ ID NO: 4831 - protein, 7 aa, synthetic construct
DQRNDGF

SEQ ID NO: 4832 - protein, 7 aa, synthetic construct
DNDPHRG

SEQ ID NO: 4833 - protein, 7 aa, synthetic construct
LPQSMNG

SEQ ID NO: 4834 - protein, 7 aa, synthetic construct
FKNIQTV

SEQ ID NO: 4835 - protein, 7 aa, synthetic construct
IREHMVP

SEQ ID NO: 4836 - protein, 7 aa, synthetic construct
WDRHMHD

SEQ ID NO: 4837 - protein, 7 aa, synthetic construct
IHDYNAD

SEQ ID NO: 4838 - protein, 7 aa, synthetic construct
TPGNYTA

SEQ ID NO: 4839 - protein, 7 aa, synthetic construct
APPTRPI

SEQ ID NO: 4840 - protein, 7 aa, synthetic construct
MPDGGRD

SEQ ID NO: 4841 - protein, 7 aa, synthetic construct
VGNGQYM

SEQ ID NO: 4842 - protein, 7 aa, synthetic construct
VARSPIG

SEQ ID NO: 4843 - protein, 7 aa, synthetic construct
STPAYNV

SEQ ID NO: 4844 - protein, 7 aa, synthetic construct
KDAEAVR

SEQ ID NO: 4845 - protein, 7 aa, synthetic construct
IFDHMAS

SEQ ID NO: 4846 - protein, 7 aa, synthetic construct
WNPQTFS

SEQ ID NO: 4847 - protein, 7 aa, synthetic construct
KSGVEFM

SEQ ID NO: 4848 - protein, 7 aa, synthetic construct
GMQNVKN

SEQ ID NO: 4849 - protein, 7 aa, synthetic construct
ANLPNSF

SEQ ID NO: 4850 - protein, 7 aa, synthetic construct
KYNVLSP

SEQ ID NO: 4851 - protein, 7 aa, synthetic construct
EFQIGGS

SEQ ID NO: 4852 - protein, 7 aa, synthetic construct
KFSGLQE

SEQ ID NO: 4853 - protein, 7 aa, synthetic construct
AVRKDNY

SEQ ID NO: 4854 - protein, 7 aa, synthetic construct
FKLGQHL

SEQ ID NO: 4855 - protein, 7 aa, synthetic construct
MAIDPTK

SEQ ID NO: 4856 - protein, 7 aa, synthetic construct
QKEWAHN

SEQ ID NO: 4857 - protein, 7 aa, synthetic construct
ALLRNGA

SEQ ID NO: 4858 - protein, 7 aa, synthetic construct
HGVNETR

SEQ ID NO: 4859 - protein, 7 aa, synthetic construct
GTTIATL

SEQ ID NO: 4860 - protein, 7 aa, synthetic construct
HGKTNTM

SEQ ID NO: 4861 - protein, 7 aa, synthetic construct
LGNQTFG

SEQ ID NO: 4862 - protein, 7 aa, synthetic construct
QGFAGNM

SEQ ID NO: 4863 - protein, 7 aa, synthetic construct
IVAKMST

SEQ ID NO: 4864 - protein, 7 aa, synthetic construct
ALRHLPE

SEQ ID NO: 4865 - protein, 7 aa, synthetic construct
GEIGRQM

SEQ ID NO: 4866 - protein, 7 aa, synthetic construct
LHNNYNV

SEQ ID NO: 4867 - protein, 7 aa, synthetic construct
EWKDGQE

SEQ ID NO: 4868 - protein, 7 aa, synthetic construct
KAREDGY

SEQ ID NO: 4869 - protein, 7 aa, synthetic construct
RLGQNQN

SEQ ID NO: 4870 - protein, 7 aa, synthetic construct
EQVHGEA

SEQ ID NO: 4871 - protein, 7 aa, synthetic construct
KHQMPDA

SEQ ID NO: 4872 - protein, 7 aa, synthetic construct
NHEGISQ

SEQ ID NO: 4873 - protein, 7 aa, synthetic construct
QVHTAAH

SEQ ID NO: 4874 - protein, 7 aa, synthetic construct
MQGVMHA

SEQ ID NO: 4875 - protein, 7 aa, synthetic construct
SMTHGYS

SEQ ID NO: 4876 - protein, 7 aa, synthetic construct
LNRVVQG

SEQ ID NO: 4877 - protein, 7 aa, synthetic construct
KTAGDAN

SEQ ID NO: 4878 - protein, 7 aa, synthetic construct
RIETNPP

SEQ ID NO: 4879 - protein, 7 aa, synthetic construct
ANISVPG

SEQ ID NO: 4880 - protein, 7 aa, synthetic construct
NQKSPED

SEQ ID NO: 4881 - protein, 7 aa, synthetic construct
MREDRHH

SEQ ID NO: 4882 - protein, 7 aa, synthetic construct
PPTKTEE

SEQ ID NO: 4883 - protein, 7 aa, synthetic construct
PKDPDPH

SEQ ID NO: 4884 - protein, 7 aa, synthetic construct
SSPPSGR

SEQ ID NO: 4885 - protein, 7 aa, synthetic construct
AVEGPRD

SEQ ID NO: 4886 - protein, 7 aa, synthetic construct
PEKHVVM

SEQ ID NO: 4887 - protein, 7 aa, synthetic construct
FATQVNV

SEQ ID NO: 4888 - protein, 7 aa, synthetic construct
KSAYMAD

SEQ ID NO: 4889 - protein, 7 aa, synthetic construct
RGNREIA

SEQ ID NO: 4890 - protein, 7 aa, synthetic construct
PHPNIHE

SEQ ID NO: 4891 - protein, 7 aa, synthetic construct
PGYTPEP

SEQ ID NO: 4892 - protein, 7 aa, synthetic construct
RTNNIPV

SEQ ID NO: 4893 - protein, 7 aa, synthetic construct
TVRSHNT

SEQ ID NO: 4894 - protein, 7 aa, synthetic construct
ISKQSPF

SEQ ID NO: 4895 - protein, 7 aa, synthetic construct
TIGMMPQ

SEQ ID NO: 4896 - protein, 7 aa, synthetic construct
SPTQQRV

SEQ ID NO: 4897 - protein, 7 aa, synthetic construct
DWSKMGS

SEQ ID NO: 4898 - protein, 7 aa, synthetic construct
QHIANPG

SEQ ID NO: 4899 - protein, 7 aa, synthetic construct
DYTTTNG

SEQ ID NO: 4900 - protein, 7 aa, synthetic construct
GGSAGNF

SEQ ID NO: 4901 - protein, 7 aa, synthetic construct
NLASQAE

SEQ ID NO: 4902 - protein, 7 aa, synthetic construct
VHDKIIQ

SEQ ID NO: 4903 - protein, 7 aa, synthetic construct
ALHPTKE

SEQ ID NO: 4904 - protein, 7 aa, synthetic construct
RADQGTG

SEQ ID NO: 4905 - protein, 7 aa, synthetic construct
WMGAYKE

SEQ ID NO: 4906 - protein, 7 aa, synthetic construct
EQSQVSM

SEQ ID NO: 4907 - protein, 7 aa, synthetic construct
NTQTNSL

SEQ ID NO: 4908 - protein, 7 aa, synthetic construct
FENHMSR

SEQ ID NO: 4909 - protein, 7 aa, synthetic construct
DNKKGES

SEQ ID NO: 4910 - protein, 7 aa, synthetic construct
IADYGNG

SEQ ID NO: 4911 - protein, 7 aa, synthetic construct
APQMTVA

SEQ ID NO: 4912 - protein, 7 aa, synthetic construct
SWQDIEK

SEQ ID NO: 4913 - protein, 7 aa, synthetic construct
MQGRAPL

SEQ ID NO: 4914 - protein, 7 aa, synthetic construct
SGKGHDD

SEQ ID NO: 4915 - protein, 7 aa, synthetic construct
IDNRNGW

SEQ ID NO: 4916 - protein, 7 aa, synthetic construct
PTTAIRS

SEQ ID NO: 4917 - protein, 7 aa, synthetic construct
SAGTGLE

SEQ ID NO: 4918 - protein, 7 aa, synthetic construct
QHRDERD

SEQ ID NO: 4919 - protein, 7 aa, synthetic construct
TKPNEKE

SEQ ID NO: 4920 - protein, 7 aa, synthetic construct
GLGTKIV

SEQ ID NO: 4921 - protein, 7 aa, synthetic construct
FAQGRTI

SEQ ID NO: 4922 - protein, 7 aa, synthetic construct
KKSQENA

SEQ ID NO: 4923 - protein, 7 aa, synthetic construct
FWQETSP

SEQ ID NO: 4924 - protein, 7 aa, synthetic construct
ISARWSG

SEQ ID NO: 4925 - protein, 7 aa, synthetic construct
YGHLQER

SEQ ID NO: 4926 - protein, 7 aa, synthetic construct
HKVGSAE

SEQ ID NO: 4927 - protein, 7 aa, synthetic construct
TTDFTPH

SEQ ID NO: 4928 - protein, 7 aa, synthetic construct
KMGQSYV

SEQ ID NO: 4929 - protein, 7 aa, synthetic construct
WSGSGGM

SEQ ID NO: 4930 - protein, 7 aa, synthetic construct
KFANVDE

SEQ ID NO: 4931 - protein, 7 aa, synthetic construct
VRAYQEA

SEQ ID NO: 4932 - protein, 7 aa, synthetic construct
QHQYERE

SEQ ID NO: 4933 - protein, 7 aa, synthetic construct
SVKSSEQ

SEQ ID NO: 4934 - protein, 7 aa, synthetic construct
NHDQANH

SEQ ID NO: 4935 - protein, 7 aa, synthetic construct
TTKPPLE

SEQ ID NO: 4936 - protein, 7 aa, synthetic construct
VRFEGQF

SEQ ID NO: 4937 - protein, 7 aa, synthetic construct
MLGISHN

SEQ ID NO: 4938 - protein, 7 aa, synthetic construct
AVPPDAY

SEQ ID NO: 4939 - protein, 7 aa, synthetic construct
DYRDESI

SEQ ID NO: 4940 - protein, 7 aa, synthetic construct
LLSKENT

SEQ ID NO: 4941 - protein, 7 aa, synthetic construct
PNQHLDA

SEQ ID NO: 4942 - protein, 7 aa, synthetic construct
ISGIQRG

SEQ ID NO: 4943 - protein, 7 aa, synthetic construct
GDRHPQS

SEQ ID NO: 4944 - protein, 7 aa, synthetic construct
LIKFNDA

SEQ ID NO: 4945 - protein, 7 aa, synthetic construct
GKGHNAA

SEQ ID NO: 4946 - protein, 7 aa, synthetic construct
VQADRKQ

SEQ ID NO: 4947 - protein, 7 aa, synthetic construct
NGSFKAM

SEQ ID NO: 4948 - protein, 7 aa, synthetic construct
RLGPVVP

SEQ ID NO: 4949 - protein, 7 aa, synthetic construct
WELKSNI

SEQ ID NO: 4950 - protein, 7 aa, synthetic construct
RMAADDR

SEQ ID NO: 4951 - protein, 7 aa, synthetic construct
MLDKHKD

SEQ ID NO: 4952 - protein, 7 aa, synthetic construct
ITKPSNT

SEQ ID NO: 4953 - protein, 7 aa, synthetic construct
LRTHGEI

SEQ ID NO: 4954 - protein, 7 aa, synthetic construct
DAMGNNI

SEQ ID NO: 4955 - protein, 7 aa, synthetic construct
SHEETHG

SEQ ID NO: 4956 - protein, 7 aa, synthetic construct
VNQVKMM

SEQ ID NO: 4957 - protein, 7 aa, synthetic construct
TDGKALF

SEQ ID NO: 4958 - protein, 7 aa, synthetic construct
YKDISTR

SEQ ID NO: 4959 - protein, 7 aa, synthetic construct
INAKHET

SEQ ID NO: 4960 - protein, 7 aa, synthetic construct
WHREVPT

SEQ ID NO: 4961 - protein, 7 aa, synthetic construct
PVKVANN

SEQ ID NO: 4962 - protein, 7 aa, synthetic construct
PLTRTAN

SEQ ID NO: 4963 - protein, 7 aa, synthetic construct
DEKMKYE

SEQ ID NO: 4964 - protein, 7 aa, synthetic construct
KPDRQVY

SEQ ID NO: 4965 - protein, 7 aa, synthetic construct
FAPSGQE

SEQ ID NO: 4966 - protein, 7 aa, synthetic construct
IANDRQN

SEQ ID NO: 4967 - protein, 7 aa, synthetic construct
SEVNQRP

SEQ ID NO: 4968 - protein, 7 aa, synthetic construct
TVGVRLD

SEQ ID NO: 4969 - protein, 7 aa, synthetic construct
GLRYTAE

SEQ ID NO: 4970 - protein, 7 aa, synthetic construct
FVSQQPA

SEQ ID NO: 4971 - protein, 7 aa, synthetic construct
INGQTFH

SEQ ID NO: 4972 - protein, 7 aa, synthetic construct
DHMNQTG

SEQ ID NO: 4973 - protein, 7 aa, synthetic construct
VPNHANV

SEQ ID NO: 4974 - protein, 7 aa, synthetic construct
QGQIERY

SEQ ID NO: 4975 - protein, 7 aa, synthetic construct
VDPDRGR

SEQ ID NO: 4976 - protein, 7 aa, synthetic construct
MVNYENS

SEQ ID NO: 4977 - protein, 7 aa, synthetic construct
KVQVTAN

SEQ ID NO: 4978 - protein, 7 aa, synthetic construct
GHQSTEY

SEQ ID NO: 4979 - protein, 7 aa, synthetic construct
MGKDLMS

SEQ ID NO: 4980 - protein, 7 aa, synthetic construct
TNDMPKL

SEQ ID NO: 4981 - protein, 7 aa, synthetic construct
HHHNNVQ

SEQ ID NO: 4982 - protein, 7 aa, synthetic construct
FRTEIGT

SEQ ID NO: 4983 - protein, 7 aa, synthetic construct
RPYMDME

SEQ ID NO: 4984 - protein, 7 aa, synthetic construct
GQMHGMT

SEQ ID NO: 4985 - protein, 7 aa, synthetic construct
RGIVGEM

SEQ ID NO: 4986 - protein, 7 aa, synthetic construct
FQPGHEP

SEQ ID NO: 4987 - protein, 7 aa, synthetic construct
MVRSEGP

SEQ ID NO: 4988 - protein, 7 aa, synthetic construct
LIGRSYG

SEQ ID NO: 4989 - protein, 7 aa, synthetic construct
HQKELIN

SEQ ID NO: 4990 - protein, 7 aa, synthetic construct
QHASISL

SEQ ID NO: 4991 - protein, 7 aa, synthetic construct
DAAPAEK

SEQ ID NO: 4992 - protein, 7 aa, synthetic construct
KINGFNT

SEQ ID NO: 4993 - protein, 7 aa, synthetic construct
WYQGKDH

SEQ ID NO: 4994 - protein, 7 aa, synthetic construct
HRTTYNE

SEQ ID NO: 4995 - protein, 7 aa, synthetic construct
AGGMISP

SEQ ID NO: 4996 - protein, 7 aa, synthetic construct
RMGDMAT

SEQ ID NO: 4997 - protein, 7 aa, synthetic construct
MMNPPNG

SEQ ID NO: 4998 - protein, 7 aa, synthetic construct
QHTEQMR

SEQ ID NO: 4999 - protein, 7 aa, synthetic construct
KSPGEQR

SEQ ID NO: 5000 - protein, 7 aa, synthetic construct
MKEANAL

SEQ ID NO: 5001 - protein, 7 aa, synthetic construct
SHERTKI

SEQ ID NO: 5002 - protein, 7 aa, synthetic construct
KSSGVEW

SEQ ID NO: 5003 - protein, 7 aa, synthetic construct
WKAYIEN

SEQ ID NO: 5004 - protein, 7 aa, synthetic construct
AHYSADE

SEQ ID NO: 5005 - protein, 7 aa, synthetic construct
MIKKDHV

SEQ ID NO: 5006 - protein, 7 aa, synthetic construct
AIAKYDS

SEQ ID NO: 5007 - protein, 7 aa, synthetic construct
VWNRTTD

SEQ ID NO: 5008 - protein, 7 aa, synthetic construct
AIQNGTR

SEQ ID NO: 5009 - protein, 7 aa, synthetic construct
KADGILR

SEQ ID NO: 5010 - protein, 7 aa, synthetic construct
KQIGMGI

SEQ ID NO: 5011 - protein, 7 aa, synthetic construct
VRPPYIS

SEQ ID NO: 5012 - protein, 7 aa, synthetic construct
RDQNIIS

SEQ ID NO: 5013 - protein, 7 aa, synthetic construct
RGEIQMA

SEQ ID NO: 5014 - protein, 7 aa, synthetic construct
LAQSHNV

SEQ ID NO: 5015 - protein, 7 aa, synthetic construct
QVHNNAF

SEQ ID NO: 5016 - protein, 7 aa, synthetic construct
WPTHEAV

SEQ ID NO: 5017 - protein, 7 aa, synthetic construct
IRTESGP

SEQ ID NO: 5018 - protein, 7 aa, synthetic construct
SGAAKED

SEQ ID NO: 5019 - protein, 7 aa, synthetic construct
WPKNQEG

SEQ ID NO: 5020 - protein, 7 aa, synthetic construct
QTIKTHP

SEQ ID NO: 5021 - protein, 7 aa, synthetic construct
YSQVANM

SEQ ID NO: 5022 - protein, 7 aa, synthetic construct
VHQQEGG

SEQ ID NO: 5023 - protein, 7 aa, synthetic construct
GDSHFQM

SEQ ID NO: 5024 - protein, 7 aa, synthetic construct
VQMNQPM

SEQ ID NO: 5025 - protein, 7 aa, synthetic construct
LPHNSEH

SEQ ID NO: 5026 - protein, 7 aa, synthetic construct
FFADKDR

SEQ ID NO: 5027 - protein, 7 aa, synthetic construct
TNGAGND

SEQ ID NO: 5028 - protein, 7 aa, synthetic construct
DEGDITK

SEQ ID NO: 5029 - protein, 7 aa, synthetic construct
GMGWASE

SEQ ID NO: 5030 - protein, 7 aa, synthetic construct
RWSDHDK

SEQ ID NO: 5031 - protein, 7 aa, synthetic construct
MKPPMIM

SEQ ID NO: 5032 - protein, 7 aa, synthetic construct
REPATMK

SEQ ID NO: 5033 - protein, 7 aa, synthetic construct
PPSFTQG

SEQ ID NO: 5034 - protein, 7 aa, synthetic construct
VPGLAHD

SEQ ID NO: 5035 - protein, 7 aa, synthetic construct
ASMRIPD

SEQ ID NO: 5036 - protein, 7 aa, synthetic construct
SNQYTND

SEQ ID NO: 5037 - protein, 7 aa, synthetic construct
TQDRSKT

SEQ ID NO: 5038 - protein, 7 aa, synthetic construct
NNPAASP

SEQ ID NO: 5039 - protein, 7 aa, synthetic construct
ELIKGNP

SEQ ID NO: 5040 - protein, 7 aa, synthetic construct
KQNDHGK

SEQ ID NO: 5041 - protein, 7 aa, synthetic construct
RDKASHE

SEQ ID NO: 5042 - protein, 7 aa, synthetic construct
KHGTPMD

SEQ ID NO: 5043 - protein, 7 aa, synthetic construct
NQNNVPG

SEQ ID NO: 5044 - protein, 7 aa, synthetic construct
TSDREPV

SEQ ID NO: 5045 - protein, 7 aa, synthetic construct
AFHASLG

SEQ ID NO: 5046 - protein, 7 aa, synthetic construct
VQPNAIG

SEQ ID NO: 5047 - protein, 7 aa, synthetic construct
NTNPADK

SEQ ID NO: 5048 - protein, 7 aa, synthetic construct
FRDNIQN

SEQ ID NO: 5049 - protein, 7 aa, synthetic construct
HAIHGGY

SEQ ID NO: 5050 - protein, 7 aa, synthetic construct
IPHYDAP

SEQ ID NO: 5051 - protein, 7 aa, synthetic construct
LAPNAHY

SEQ ID NO: 5052 - protein, 7 aa, synthetic construct
LHSELST

SEQ ID NO: 5053 - protein, 7 aa, synthetic construct
GRDSIHF

SEQ ID NO: 5054 - protein, 7 aa, synthetic construct
VHANDSW

SEQ ID NO: 5055 - protein, 7 aa, synthetic construct
WSPKDQY

SEQ ID NO: 5056 - protein, 7 aa, synthetic construct
IVRELGQ

SEQ ID NO: 5057 - protein, 7 aa, synthetic construct
VSESIRA

SEQ ID NO: 5058 - protein, 7 aa, synthetic construct
LTDTRQN

SEQ ID NO: 5059 - protein, 7 aa, synthetic construct
GANVLKH

SEQ ID NO: 5060 - protein, 7 aa, synthetic construct
PQKVGDF

SEQ ID NO: 5061 - protein, 7 aa, synthetic construct
KYGQESG

SEQ ID NO: 5062 - protein, 7 aa, synthetic construct
YRTSDYV

SEQ ID NO: 5063 - protein, 7 aa, synthetic construct
SHMRDQH

SEQ ID NO: 5064 - protein, 7 aa, synthetic construct
GNTSVYE

SEQ ID NO: 5065 - protein, 7 aa, synthetic construct
ANKSQQI

SEQ ID NO: 5066 - protein, 7 aa, synthetic construct
KELHNDS

SEQ ID NO: 5067 - protein, 7 aa, synthetic construct
DSHHMVE

SEQ ID NO: 5068 - protein, 7 aa, synthetic construct
FMTKAVP

SEQ ID NO: 5069 - protein, 7 aa, synthetic construct
YSMRQEL

SEQ ID NO: 5070 - protein, 7 aa, synthetic construct
NYNGSEI

SEQ ID NO: 5071 - protein, 7 aa, synthetic construct
KIDGTGP

SEQ ID NO: 5072 - protein, 7 aa, synthetic construct
WRNKEIH

SEQ ID NO: 5073 - protein, 7 aa, synthetic construct
VISTKSP

SEQ ID NO: 5074 - protein, 7 aa, synthetic construct
VRAHHDG

SEQ ID NO: 5075 - protein, 7 aa, synthetic construct
KPETTWI

SEQ ID NO: 5076 - protein, 7 aa, synthetic construct
DRHIGSD

SEQ ID NO: 5077 - protein, 7 aa, synthetic construct
ERAQEVS

SEQ ID NO: 5078 - protein, 7 aa, synthetic construct
QNEAGRT

SEQ ID NO: 5079 - protein, 7 aa, synthetic construct
IGTGEHT

SEQ ID NO: 5080 - protein, 7 aa, synthetic construct
GERPAQH

SEQ ID NO: 5081 - protein, 7 aa, synthetic construct
LTKGFSV

SEQ ID NO: 5082 - protein, 7 aa, synthetic construct
AWAQKPE

SEQ ID NO: 5083 - protein, 7 aa, synthetic construct
YSTDYER

SEQ ID NO: 5084 - protein, 7 aa, synthetic construct
ATTSGPA

SEQ ID NO: 5085 - protein, 7 aa, synthetic construct
HKEITGP

SEQ ID NO: 5086 - protein, 7 aa, synthetic construct
GSQVIVE

SEQ ID NO: 5087 - protein, 7 aa, synthetic construct
SKGKMME

SEQ ID NO: 5088 - protein, 7 aa, synthetic construct
RVGQALA

SEQ ID NO: 5089 - protein, 7 aa, synthetic construct
GTKAGFQ

SEQ ID NO: 5090 - protein, 7 aa, synthetic construct
VRDPMVH

SEQ ID NO: 5091 - protein, 7 aa, synthetic construct
PDSRGHQ

SEQ ID NO: 5092 - protein, 7 aa, synthetic construct
KQTHQQF

SEQ ID NO: 5093 - protein, 7 aa, synthetic construct
HPPGLGT

SEQ ID NO: 5094 - protein, 7 aa, synthetic construct
QSIEPNR

SEQ ID NO: 5095 - protein, 7 aa, synthetic construct
AVIAQDT

SEQ ID NO: 5096 - protein, 7 aa, synthetic construct
KPKMDEY

SEQ ID NO: 5097 - protein, 7 aa, synthetic construct
RNGREPS

SEQ ID NO: 5098 - protein, 7 aa, synthetic construct
FKTETGH

SEQ ID NO: 5099 - protein, 7 aa, synthetic construct
VQDWQSA

SEQ ID NO: 5100 - protein, 7 aa, synthetic construct
GQDKVVM

SEQ ID NO: 5101 - protein, 7 aa, synthetic construct
LTIASET

SEQ ID NO: 5102 - protein, 7 aa, synthetic construct
YVVQSDS

SEQ ID NO: 5103 - protein, 7 aa, synthetic construct
QDKAFYG

SEQ ID NO: 5104 - protein, 7 aa, synthetic construct
HNGNITG

SEQ ID NO: 5105 - protein, 7 aa, synthetic construct
DGHNGQW

SEQ ID NO: 5106 - protein, 7 aa, synthetic construct
SGDLKKH

SEQ ID NO: 5107 - protein, 7 aa, synthetic construct
MAFMQSG

SEQ ID NO: 5108 - protein, 7 aa, synthetic construct
NLQSTPF

SEQ ID NO: 5109 - protein, 7 aa, synthetic construct
RQATDHD

SEQ ID NO: 5110 - protein, 7 aa, synthetic construct
IVRTQKE

SEQ ID NO: 5111 - protein, 7 aa, synthetic construct
ESHYQGP

SEQ ID NO: 5112 - protein, 7 aa, synthetic construct
HTESLNS

SEQ ID NO: 5113 - protein, 7 aa, synthetic construct
LVQHNIP

SEQ ID NO: 5114 - protein, 7 aa, synthetic construct
AHPHNVI

SEQ ID NO: 5115 - protein, 7 aa, synthetic construct
ISVKSTF

SEQ ID NO: 5116 - protein, 7 aa, synthetic construct
LASRTED

SEQ ID NO: 5117 - protein, 7 aa, synthetic construct
NQGTANY

SEQ ID NO: 5118 - protein, 7 aa, synthetic construct
YNKAEAF

SEQ ID NO: 5119 - protein, 7 aa, synthetic construct
NKQEQYI

SEQ ID NO: 5120 - protein, 7 aa, synthetic construct
GHKIESA

SEQ ID NO: 5121 - protein, 7 aa, synthetic construct
IPGQFKG

SEQ ID NO: 5122 - protein, 7 aa, synthetic construct
ADESRPM

SEQ ID NO: 5123 - protein, 7 aa, synthetic construct
QGTHSVT

SEQ ID NO: 5124 - protein, 7 aa, synthetic construct
DTTVHNK

SEQ ID NO: 5125 - protein, 7 aa, synthetic construct
TPKLNTD

SEQ ID NO: 5126 - protein, 7 aa, synthetic construct
KSTHIAS

SEQ ID NO: 5127 - protein, 7 aa, synthetic construct
IETSYKM

SEQ ID NO: 5128 - protein, 7 aa, synthetic construct
QSMSTLT

SEQ ID NO: 5129 - protein, 7 aa, synthetic construct
YAMWTGE

SEQ ID NO: 5130 - protein, 7 aa, synthetic construct
WTGVPAA

SEQ ID NO: 5131 - protein, 7 aa, synthetic construct
TISMGKN

SEQ ID NO: 5132 - protein, 7 aa, synthetic construct
FAKKLDP

SEQ ID NO: 5133 - protein, 7 aa, synthetic construct
DIGHNEF

SEQ ID NO: 5134 - protein, 7 aa, synthetic construct
KHTVADF

SEQ ID NO: 5135 - protein, 7 aa, synthetic construct
DKYDHHF

SEQ ID NO: 5136 - protein, 7 aa, synthetic construct
YHQLQEP

SEQ ID NO: 5137 - protein, 7 aa, synthetic construct
YPQPHKP

SEQ ID NO: 5138 - protein, 7 aa, synthetic construct
YQRLNTA

SEQ ID NO: 5139 - protein, 7 aa, synthetic construct
HAHPHVG

SEQ ID NO: 5140 - protein, 7 aa, synthetic construct
GRIEEPF

SEQ ID NO: 5141 - protein, 7 aa, synthetic construct
YSQNTST

SEQ ID NO: 5142 - protein, 7 aa, synthetic construct
GAGATVF

SEQ ID NO: 5143 - protein, 7 aa, synthetic construct
VRVGAYG

SEQ ID NO: 5144 - protein, 7 aa, synthetic construct
HKTDQDS

SEQ ID NO: 5145 - protein, 7 aa, synthetic construct
GNTLKDY

SEQ ID NO: 5146 - protein, 7 aa, synthetic construct
LATSGFA

SEQ ID NO: 5147 - protein, 7 aa, synthetic construct
SATVMMP

SEQ ID NO: 5148 - protein, 7 aa, synthetic construct
VTVRDTE

SEQ ID NO: 5149 - protein, 7 aa, synthetic construct
PRYHGES

SEQ ID NO: 5150 - protein, 7 aa, synthetic construct
SHSANIV

SEQ ID NO: 5151 - protein, 7 aa, synthetic construct
YHKAPMS

SEQ ID NO: 5152 - protein, 7 aa, synthetic construct
TINQSAA

SEQ ID NO: 5153 - protein, 7 aa, synthetic construct
MLGPPKM

SEQ ID NO: 5154 - protein, 7 aa, synthetic construct
SMQSKVV

SEQ ID NO: 5155 - protein, 7 aa, synthetic construct
KQAHMST

SEQ ID NO: 5156 - protein, 7 aa, synthetic construct
PVKDMTN

SEQ ID NO: 5157 - protein, 7 aa, synthetic construct
KFEKNDL

SEQ ID NO: 5158 - protein, 7 aa, synthetic construct
DHKTNVT

SEQ ID NO: 5159 - protein, 7 aa, synthetic construct
HSSKQVF

SEQ ID NO: 5160 - protein, 7 aa, synthetic construct
FTDARID

SEQ ID NO: 5161 - protein, 7 aa, synthetic construct
RGAETQK

SEQ ID NO: 5162 - protein, 7 aa, synthetic construct
MHPDMQY

SEQ ID NO: 5163 - protein, 7 aa, synthetic construct
MHGVNSL

SEQ ID NO: 5164 - protein, 7 aa, synthetic construct
GNSERPR

SEQ ID NO: 5165 - protein, 7 aa, synthetic construct
IMHRHVD

SEQ ID NO: 5166 - protein, 7 aa, synthetic construct
GQHTNAI

SEQ ID NO: 5167 - protein, 7 aa, synthetic construct
HMVREGY

SEQ ID NO: 5168 - protein, 7 aa, synthetic construct
AQYKVAD

SEQ ID NO: 5169 - protein, 7 aa, synthetic construct
DNPTMRV

SEQ ID NO: 5170 - protein, 7 aa, synthetic construct
PGRTDAG

SEQ ID NO: 5171 - protein, 7 aa, synthetic construct
SKNIMSD

SEQ ID NO: 5172 - protein, 7 aa, synthetic construct
MYKPAMT

SEQ ID NO: 5173 - protein, 7 aa, synthetic construct
PNHKETE

SEQ ID NO: 5174 - protein, 7 aa, synthetic construct
QKKIEID

SEQ ID NO: 5175 - protein, 7 aa, synthetic construct
RQLKALE

SEQ ID NO: 5176 - protein, 7 aa, synthetic construct
VEQWMQD

SEQ ID NO: 5177 - protein, 7 aa, synthetic construct
MHHDMGM

SEQ ID NO: 5178 - protein, 7 aa, synthetic construct
GVDGQRE

SEQ ID NO: 5179 - protein, 7 aa, synthetic construct
VTGIIQP

SEQ ID NO: 5180 - protein, 7 aa, synthetic construct
EYHHGKS

SEQ ID NO: 5181 - protein, 7 aa, synthetic construct
HKFVDEG

SEQ ID NO: 5182 - protein, 7 aa, synthetic construct
QHIKGEM

SEQ ID NO: 5183 - protein, 7 aa, synthetic construct
IGVMHVS

SEQ ID NO: 5184 - protein, 7 aa, synthetic construct
QSMHVLD

SEQ ID NO: 5185 - protein, 7 aa, synthetic construct
LNGTELR

SEQ ID NO: 5186 - protein, 7 aa, synthetic construct
DREGFGN

SEQ ID NO: 5187 - protein, 7 aa, synthetic construct
SNDQSGY

SEQ ID NO: 5188 - protein, 7 aa, synthetic construct
LPAHKTP

SEQ ID NO: 5189 - protein, 7 aa, synthetic construct
AQVPSAQ

SEQ ID NO: 5190 - protein, 7 aa, synthetic construct
NPLTRQS

SEQ ID NO: 5191 - protein, 7 aa, synthetic construct
HKLDDEH

SEQ ID NO: 5192 - protein, 7 aa, synthetic construct
YERGVYQ

SEQ ID NO: 5193 - protein, 7 aa, synthetic construct
HLQEGRS

SEQ ID NO: 5194 - protein, 7 aa, synthetic construct
EPVSYAA

SEQ ID NO: 5195 - protein, 7 aa, synthetic construct
TNVVTTY

SEQ ID NO: 5196 - protein, 7 aa, synthetic construct
SDGKGYL

SEQ ID NO: 5197 - protein, 7 aa, synthetic construct
KFITEQG

SEQ ID NO: 5198 - protein, 7 aa, synthetic construct
RNSEAAA

SEQ ID NO: 5199 - protein, 7 aa, synthetic construct
IYINTQE

SEQ ID NO: 5200 - protein, 7 aa, synthetic construct
GYSISGP

SEQ ID NO: 5201 - protein, 7 aa, synthetic construct
DREDFRS

SEQ ID NO: 5202 - protein, 7 aa, synthetic construct
KQAGMEG

SEQ ID NO: 5203 - protein, 7 aa, synthetic construct
VNGLKNF

SEQ ID NO: 5204 - protein, 7 aa, synthetic construct
NLMKHTP

SEQ ID NO: 5205 - protein, 7 aa, synthetic construct
VRIPEAW

SEQ ID NO: 5206 - protein, 7 aa, synthetic construct
HQGDHAP

SEQ ID NO: 5207 - protein, 7 aa, synthetic construct
VAQQDSH

SEQ ID NO: 5208 - protein, 7 aa, synthetic construct
MRPYPQD

SEQ ID NO: 5209 - protein, 7 aa, synthetic construct
RPVDPEK

SEQ ID NO: 5210 - protein, 7 aa, synthetic construct
GWRNDIG

SEQ ID NO: 5211 - protein, 7 aa, synthetic construct
HPQFASM

SEQ ID NO: 5212 - protein, 7 aa, synthetic construct
DIYNGKG

SEQ ID NO: 5213 - protein, 7 aa, synthetic construct
MAVTTHG

SEQ ID NO: 5214 - protein, 7 aa, synthetic construct
DKNMIPA

SEQ ID NO: 5215 - protein, 7 aa, synthetic construct
NHMRISE

SEQ ID NO: 5216 - protein, 7 aa, synthetic construct
AFNMVSD

SEQ ID NO: 5217 - protein, 7 aa, synthetic construct
TGMGTSI

SEQ ID NO: 5218 - protein, 7 aa, synthetic construct
LKTAWHE

SEQ ID NO: 5219 - protein, 7 aa, synthetic construct
FDTITHA

SEQ ID NO: 5220 - protein, 7 aa, synthetic construct
HMGLHRE

SEQ ID NO: 5221 - protein, 7 aa, synthetic construct
MAERDKD

SEQ ID NO: 5222 - protein, 7 aa, synthetic construct
KEGHDVH

SEQ ID NO: 5223 - protein, 7 aa, synthetic construct
RAVEGER

SEQ ID NO: 5224 - protein, 7 aa, synthetic construct
HKAAAIA

SEQ ID NO: 5225 - protein, 7 aa, synthetic construct
AEKVPGD

SEQ ID NO: 5226 - protein, 7 aa, synthetic construct
FENIHTM

SEQ ID NO: 5227 - protein, 7 aa, synthetic construct
GTTPSQH

SEQ ID NO: 5228 - protein, 7 aa, synthetic construct
INGIEHE

SEQ ID NO: 5229 - protein, 7 aa, synthetic construct
FKGHQLG

SEQ ID NO: 5230 - protein, 7 aa, synthetic construct
RSSLDNN

SEQ ID NO: 5231 - protein, 7 aa, synthetic construct
HANGKPE

SEQ ID NO: 5232 - protein, 7 aa, synthetic construct
GSGAAAD

SEQ ID NO: 5233 - protein, 7 aa, synthetic construct
TRIVAMD

SEQ ID NO: 5234 - protein, 7 aa, synthetic construct
IQSVEHI

SEQ ID NO: 5235 - protein, 7 aa, synthetic construct
MQQTQAM

SEQ ID NO: 5236 - protein, 7 aa, synthetic construct
QPKDHGW

SEQ ID NO: 5237 - protein, 7 aa, synthetic construct
LKGDENS

SEQ ID NO: 5238 - protein, 7 aa, synthetic construct
YMTPSNE

SEQ ID NO: 5239 - protein, 7 aa, synthetic construct
GQMSHMA

SEQ ID NO: 5240 - protein, 7 aa, synthetic construct
DQPTSNP

SEQ ID NO: 5241 - protein, 7 aa, synthetic construct
IDKAPDW

SEQ ID NO: 5242 - protein, 7 aa, synthetic construct
VAMVGPG

SEQ ID NO: 5243 - protein, 7 aa, synthetic construct
NQFHETM

SEQ ID NO: 5244 - protein, 7 aa, synthetic construct
FFSTADE

SEQ ID NO: 5245 - protein, 7 aa, synthetic construct
AGSPYIG

SEQ ID NO: 5246 - protein, 7 aa, synthetic construct
GKPEMAY

SEQ ID NO: 5247 - protein, 7 aa, synthetic construct
SPFTNGE

SEQ ID NO: 5248 - protein, 7 aa, synthetic construct
RPMREQP

SEQ ID NO: 5249 - protein, 7 aa, synthetic construct
PYPDPEL

SEQ ID NO: 5250 - protein, 7 aa, synthetic construct
HKDINVH

SEQ ID NO: 5251 - protein, 7 aa, synthetic construct
MPHQPAL

SEQ ID NO: 5252 - protein, 7 aa, synthetic construct
RSTENHP

SEQ ID NO: 5253 - protein, 7 aa, synthetic construct
DPVHEGK

SEQ ID NO: 5254 - protein, 7 aa, synthetic construct
TLGFHDR

SEQ ID NO: 5255 - protein, 7 aa, synthetic construct
IHNIGVK

SEQ ID NO: 5256 - protein, 7 aa, synthetic construct
DEMQKKF

SEQ ID NO: 5257 - protein, 7 aa, synthetic construct
STIQNQM

SEQ ID NO: 5258 - protein, 7 aa, synthetic construct
QHKTDVH

SEQ ID NO: 5259 - protein, 7 aa, synthetic construct
SGTVLRV

SEQ ID NO: 5260 - protein, 7 aa, synthetic construct
FREQPID

SEQ ID NO: 5261 - protein, 7 aa, synthetic construct
GADSKHP

SEQ ID NO: 5262 - protein, 7 aa, synthetic construct
NHTSPQA

SEQ ID NO: 5263 - protein, 7 aa, synthetic construct
DHTFQEI

SEQ ID NO: 5264 - protein, 7 aa, synthetic construct
YHVGNGM

SEQ ID NO: 5265 - protein, 7 aa, synthetic construct
NAAAVQL

SEQ ID NO: 5266 - protein, 7 aa, synthetic construct
MNQDMMK

SEQ ID NO: 5267 - protein, 7 aa, synthetic construct
PDPGQPA

SEQ ID NO: 5268 - protein, 7 aa, synthetic construct
QTYQMHP

SEQ ID NO: 5269 - protein, 7 aa, synthetic construct
AIDSNQK

SEQ ID NO: 5270 - protein, 7 aa, synthetic construct
ITPYENA

SEQ ID NO: 5271 - protein, 7 aa, synthetic construct
EAVYNSK

SEQ ID NO: 5272 - protein, 7 aa, synthetic construct
VSREVMA

SEQ ID NO: 5273 - protein, 7 aa, synthetic construct
KLNLEQF

SEQ ID NO: 5274 - protein, 7 aa, synthetic construct
KLMDQNT

SEQ ID NO: 5275 - protein, 7 aa, synthetic construct
QMVKDER

SEQ ID NO: 5276 - protein, 7 aa, synthetic construct
VAQANMS

SEQ ID NO: 5277 - protein, 7 aa, synthetic construct
MQTMDKG

SEQ ID NO: 5278 - protein, 7 aa, synthetic construct
GQNDIQK

SEQ ID NO: 5279 - protein, 7 aa, synthetic construct
ITAMHNQ

SEQ ID NO: 5280 - protein, 7 aa, synthetic construct
TMYGRLE

SEQ ID NO: 5281 - protein, 7 aa, synthetic construct
SRGAASP

SEQ ID NO: 5282 - protein, 7 aa, synthetic construct
TAHDTHS

SEQ ID NO: 5283 - protein, 7 aa, synthetic construct
IPPMSFN

SEQ ID NO: 5284 - protein, 7 aa, synthetic construct
IHDPNEI

SEQ ID NO: 5285 - protein, 7 aa, synthetic construct
YSGPISN

SEQ ID NO: 5286 - protein, 7 aa, synthetic construct
PIIGPRD

SEQ ID NO: 5287 - protein, 7 aa, synthetic construct
SANPNTK

SEQ ID NO: 5288 - protein, 7 aa, synthetic construct
KDPYMPG

SEQ ID NO: 5289 - protein, 7 aa, synthetic construct
KVNQLGP

SEQ ID NO: 5290 - protein, 7 aa, synthetic construct
LFRDMDQ

SEQ ID NO: 5291 - protein, 7 aa, synthetic construct
DSGPHFK

SEQ ID NO: 5292 - protein, 7 aa, synthetic construct
NIQSRFT

SEQ ID NO: 5293 - protein, 7 aa, synthetic construct
QQYADEA

SEQ ID NO: 5294 - protein, 7 aa, synthetic construct
VVGLGDK

SEQ ID NO: 5295 - protein, 7 aa, synthetic construct
NQNASYE

SEQ ID NO: 5296 - protein, 7 aa, synthetic construct
FTSNAMQ

SEQ ID NO: 5297 - protein, 7 aa, synthetic construct
MIRPDAE

SEQ ID NO: 5298 - protein, 7 aa, synthetic construct
LDRQIDH

SEQ ID NO: 5299 - protein, 7 aa, synthetic construct
GQPWVEH

SEQ ID NO: 5300 - protein, 7 aa, synthetic construct
ILRQPVS

SEQ ID NO: 5301 - protein, 7 aa, synthetic construct
ANKASFH

SEQ ID NO: 5302 - protein, 7 aa, synthetic construct
YMESMHG

SEQ ID NO: 5303 - protein, 7 aa, synthetic construct
TLIASQD

SEQ ID NO: 5304 - protein, 7 aa, synthetic construct
KTMSPES

SEQ ID NO: 5305 - protein, 7 aa, synthetic construct
TQADGTN

SEQ ID NO: 5306 - protein, 7 aa, synthetic construct
GLKYDDS

SEQ ID NO: 5307 - protein, 7 aa, synthetic construct
MAHTNKA

SEQ ID NO: 5308 - protein, 7 aa, synthetic construct
KPSPNPS

SEQ ID NO: 5309 - protein, 7 aa, synthetic construct
TPGARIY

SEQ ID NO: 5310 - protein, 7 aa, synthetic construct
IRPLTDD

SEQ ID NO: 5311 - protein, 7 aa, synthetic construct
MTGTTGV

SEQ ID NO: 5312 - protein, 7 aa, synthetic construct
TKDIHMF

SEQ ID NO: 5313 - protein, 7 aa, synthetic construct
FMNGRSN

SEQ ID NO: 5314 - protein, 7 aa, synthetic construct
ETNVRPY

SEQ ID NO: 5315 - protein, 7 aa, synthetic construct
NHALTPE

SEQ ID NO: 5316 - protein, 7 aa, synthetic construct
QAPYRAG

SEQ ID NO: 5317 - protein, 7 aa, synthetic construct
IGGRQSD

SEQ ID NO: 5318 - protein, 7 aa, synthetic construct
AQVDGPK

SEQ ID NO: 5319 - protein, 7 aa, synthetic construct
YPAESRD

SEQ ID NO: 5320 - protein, 7 aa, synthetic construct
RTANHVI

SEQ ID NO: 5321 - protein, 7 aa, synthetic construct
YLRHDSD

SEQ ID NO: 5322 - protein, 7 aa, synthetic construct
NDQKNST

SEQ ID NO: 5323 - protein, 7 aa, synthetic construct
MDGQKAY

SEQ ID NO: 5324 - protein, 7 aa, synthetic construct
WQGWTHE

SEQ ID NO: 5325 - protein, 7 aa, synthetic construct
NEKIRHT

SEQ ID NO: 5326 - protein, 7 aa, synthetic construct
YPSGHTY

SEQ ID NO: 5327 - protein, 7 aa, synthetic construct
GGYGHIA

SEQ ID NO: 5328 - protein, 7 aa, synthetic construct
WSQAIKD

SEQ ID NO: 5329 - protein, 7 aa, synthetic construct
HADMSTS

SEQ ID NO: 5330 - protein, 7 aa, synthetic construct
KSPGDLE

SEQ ID NO: 5331 - protein, 7 aa, synthetic construct
IPKQFDR

SEQ ID NO: 5332 - protein, 7 aa, synthetic construct
YFSHLKD

SEQ ID NO: 5333 - protein, 7 aa, synthetic construct
HDNRIVN

SEQ ID NO: 5334 - protein, 7 aa, synthetic construct
NLRSSMM

SEQ ID NO: 5335 - protein, 7 aa, synthetic construct
SYHQTDI

SEQ ID NO: 5336 - protein, 7 aa, synthetic construct
EKPQNFT

SEQ ID NO: 5337 - protein, 7 aa, synthetic construct
NSAQEAL

SEQ ID NO: 5338 - protein, 7 aa, synthetic construct
IQNPVPN

SEQ ID NO: 5339 - protein, 7 aa, synthetic construct
AGPNERY

SEQ ID NO: 5340 - protein, 7 aa, synthetic construct
APSHHVV

SEQ ID NO: 5341 - protein, 7 aa, synthetic construct
QGEVKGN

SEQ ID NO: 5342 - protein, 7 aa, synthetic construct
QQPITNG

SEQ ID NO: 5343 - protein, 7 aa, synthetic construct
QVPITKQ

SEQ ID NO: 5344 - protein, 7 aa, synthetic construct
QGKVHRD

SEQ ID NO: 5345 - protein, 7 aa, synthetic construct
KFKIPDV

SEQ ID NO: 5346 - protein, 7 aa, synthetic construct
ATKNQDD

SEQ ID NO: 5347 - protein, 7 aa, synthetic construct
HGQVLIG

SEQ ID NO: 5348 - protein, 7 aa, synthetic construct
ATNDSNM

SEQ ID NO: 5349 - protein, 7 aa, synthetic construct
DQQRGNL

SEQ ID NO: 5350 - protein, 7 aa, synthetic construct
GEKRVTD

SEQ ID NO: 5351 - protein, 7 aa, synthetic construct
MQMGGLD

SEQ ID NO: 5352 - protein, 7 aa, synthetic construct
SQESNLV

SEQ ID NO: 5353 - protein, 7 aa, synthetic construct
DNQNKHT

SEQ ID NO: 5354 - protein, 7 aa, synthetic construct
DRAGEKF

SEQ ID NO: 5355 - protein, 7 aa, synthetic construct
SDMGRMP

SEQ ID NO: 5356 - protein, 7 aa, synthetic construct
IGTAGMD

SEQ ID NO: 5357 - protein, 7 aa, synthetic construct
VVLPMNG

SEQ ID NO: 5358 - protein, 7 aa, synthetic construct
RVQTITA

SEQ ID NO: 5359 - protein, 7 aa, synthetic construct
QPKFSHS

SEQ ID NO: 5360 - protein, 7 aa, synthetic construct
VPYHGHT

SEQ ID NO: 5361 - protein, 7 aa, synthetic construct
ERLGGGF

SEQ ID NO: 5362 - protein, 7 aa, synthetic construct
QPRSVQH

SEQ ID NO: 5363 - protein, 7 aa, synthetic construct
GHHSNLL

SEQ ID NO: 5364 - protein, 7 aa, synthetic construct
IAQHIEI

SEQ ID NO: 5365 - protein, 7 aa, synthetic construct
HHEHLKV

SEQ ID NO: 5366 - protein, 7 aa, synthetic construct
HIHQMIE

SEQ ID NO: 5367 - protein, 7 aa, synthetic construct
NKYAEDH

SEQ ID NO: 5368 - protein, 7 aa, synthetic construct
KSPVRGP

SEQ ID NO: 5369 - protein, 7 aa, synthetic construct
PNQQNLK

SEQ ID NO: 5370 - protein, 7 aa, synthetic construct
RVHETDV

SEQ ID NO: 5371 - protein, 7 aa, synthetic construct
LEPGFPR

SEQ ID NO: 5372 - protein, 7 aa, synthetic construct
ITSNMYA

SEQ ID NO: 5373 - protein, 7 aa, synthetic construct
RSDTHMS

SEQ ID NO: 5374 - protein, 7 aa, synthetic construct
FFGKEME

SEQ ID NO: 5375 - protein, 7 aa, synthetic construct
DARAGYR

SEQ ID NO: 5376 - protein, 7 aa, synthetic construct
TAIRTTF

SEQ ID NO: 5377 - protein, 7 aa, synthetic construct
KDALVSK

SEQ ID NO: 5378 - protein, 7 aa, synthetic construct
YPAVRNN

SEQ ID NO: 5379 - protein, 7 aa, synthetic construct
RMVGADI

SEQ ID NO: 5380 - protein, 7 aa, synthetic construct
AGRFPDI

SEQ ID NO: 5381 - protein, 7 aa, synthetic construct
TFMVSDA

SEQ ID NO: 5382 - protein, 7 aa, synthetic construct
ASSENWE

SEQ ID NO: 5383 - protein, 7 aa, synthetic construct
KNLDVEK

SEQ ID NO: 5384 - protein, 7 aa, synthetic construct
TFREDGQ

SEQ ID NO: 5385 - protein, 7 aa, synthetic construct
EHLGHRQ

SEQ ID NO: 5386 - protein, 7 aa, synthetic construct
KPEHENQ

SEQ ID NO: 5387 - protein, 7 aa, synthetic construct
MHKTDNP

SEQ ID NO: 5388 - protein, 7 aa, synthetic construct
NKDVNYV

SEQ ID NO: 5389 - protein, 7 aa, synthetic construct
QYADRPK

SEQ ID NO: 5390 - protein, 7 aa, synthetic construct
DQLARNP

SEQ ID NO: 5391 - protein, 7 aa, synthetic construct
MNGWETG

SEQ ID NO: 5392 - protein, 7 aa, synthetic construct
GTGALDG

SEQ ID NO: 5393 - protein, 7 aa, synthetic construct
NGQIQYM

SEQ ID NO: 5394 - protein, 7 aa, synthetic construct
TANSGGW

SEQ ID NO: 5395 - protein, 7 aa, synthetic construct
VKATLDG

SEQ ID NO: 5396 - protein, 7 aa, synthetic construct
HDGRQAN

SEQ ID NO: 5397 - protein, 7 aa, synthetic construct
THAAGYE

SEQ ID NO: 5398 - protein, 7 aa, synthetic construct
SPGKLEF

SEQ ID NO: 5399 - protein, 7 aa, synthetic construct
WTQPNSD

SEQ ID NO: 5400 - protein, 7 aa, synthetic construct
KEYKMPV

SEQ ID NO: 5401 - protein, 7 aa, synthetic construct
PTNIKIY

SEQ ID NO: 5402 - protein, 7 aa, synthetic construct
MTQMGGD

SEQ ID NO: 5403 - protein, 7 aa, synthetic construct
LANSQNG

SEQ ID NO: 5404 - protein, 7 aa, synthetic construct
SLNMAAT

SEQ ID NO: 5405 - protein, 7 aa, synthetic construct
QYKEGPH

SEQ ID NO: 5406 - protein, 7 aa, synthetic construct
WGGGPNI

SEQ ID NO: 5407 - protein, 7 aa, synthetic construct
QRSTVLV

SEQ ID NO: 5408 - protein, 7 aa, synthetic construct
EQSAQYA

SEQ ID NO: 5409 - protein, 7 aa, synthetic construct
TNLDPGD

SEQ ID NO: 5410 - protein, 7 aa, synthetic construct
LGGHNAL

SEQ ID NO: 5411 - protein, 7 aa, synthetic construct
VRAGENH

SEQ ID NO: 5412 - protein, 7 aa, synthetic construct
MGDMRYG

SEQ ID NO: 5413 - protein, 7 aa, synthetic construct
QASHEFA

SEQ ID NO: 5414 - protein, 7 aa, synthetic construct
HNSIRPF

SEQ ID NO: 5415 - protein, 7 aa, synthetic construct
QRHGISM

SEQ ID NO: 5416 - protein, 7 aa, synthetic construct
QRNEMTR

SEQ ID NO: 5417 - protein, 7 aa, synthetic construct
AQTGNVI

SEQ ID NO: 5418 - protein, 7 aa, synthetic construct
QQRDHIF

SEQ ID NO: 5419 - protein, 7 aa, synthetic construct
EGSAMSA

SEQ ID NO: 5420 - protein, 7 aa, synthetic construct
WKMHDPV

SEQ ID NO: 5421 - protein, 7 aa, synthetic construct
GHTSSKV

SEQ ID NO: 5422 - protein, 7 aa, synthetic construct
EVQIQES

SEQ ID NO: 5423 - protein, 7 aa, synthetic construct
IESYERK

SEQ ID NO: 5424 - protein, 7 aa, synthetic construct
FPLESKD

SEQ ID NO: 5425 - protein, 7 aa, synthetic construct
SISVQQG

SEQ ID NO: 5426 - protein, 7 aa, synthetic construct
DEDWSPA

SEQ ID NO: 5427 - protein, 7 aa, synthetic construct
YIKEIDR

SEQ ID NO: 5428 - protein, 7 aa, synthetic construct
MGGMQAH

SEQ ID NO: 5429 - protein, 7 aa, synthetic construct
ENGRQIE

SEQ ID NO: 5430 - protein, 7 aa, synthetic construct
VPTLSAM

SEQ ID NO: 5431 - protein, 7 aa, synthetic construct
RGPLQID

SEQ ID NO: 5432 - protein, 7 aa, synthetic construct
GGGHGFQ

SEQ ID NO: 5433 - protein, 7 aa, synthetic construct
YEKLDQM

SEQ ID NO: 5434 - protein, 7 aa, synthetic construct
YHKEYMN

SEQ ID NO: 5435 - protein, 7 aa, synthetic construct
AFTATKA

SEQ ID NO: 5436 - protein, 7 aa, synthetic construct
MREDYNA

SEQ ID NO: 5437 - protein, 7 aa, synthetic construct
YQPTQSM

SEQ ID NO: 5438 - protein, 7 aa, synthetic construct
SDMSKHG

SEQ ID NO: 5439 - protein, 7 aa, synthetic construct
RALEPNT

SEQ ID NO: 5440 - protein, 7 aa, synthetic construct
HDFERAD

SEQ ID NO: 5441 - protein, 7 aa, synthetic construct
RTSATLT

SEQ ID NO: 5442 - protein, 7 aa, synthetic construct
RSAEIIN

SEQ ID NO: 5443 - protein, 7 aa, synthetic construct
YKIDMGE

SEQ ID NO: 5444 - protein, 7 aa, synthetic construct
EKKDSFV

SEQ ID NO: 5445 - protein, 7 aa, synthetic construct
TITSSFE

SEQ ID NO: 5446 - protein, 7 aa, synthetic construct
DLMNQKS

SEQ ID NO: 5447 - protein, 7 aa, synthetic construct
PEASMRL

SEQ ID NO: 5448 - protein, 7 aa, synthetic construct
TGEPHPS

SEQ ID NO: 5449 - protein, 7 aa, synthetic construct
YQESYKL

SEQ ID NO: 5450 - protein, 7 aa, synthetic construct
NFNKDYV

SEQ ID NO: 5451 - protein, 7 aa, synthetic construct
QYRDPAT

SEQ ID NO: 5452 - protein, 7 aa, synthetic construct
IQQYGME

SEQ ID NO: 5453 - protein, 7 aa, synthetic construct
DQWTGAV

SEQ ID NO: 5454 - protein, 7 aa, synthetic construct
DRAPKLD

SEQ ID NO: 5455 - protein, 7 aa, synthetic construct
KFYKPED

SEQ ID NO: 5456 - protein, 7 aa, synthetic construct
VRTHDLH

SEQ ID NO: 5457 - protein, 7 aa, synthetic construct
GKTDGAV

SEQ ID NO: 5458 - protein, 7 aa, synthetic construct
DADSAYF

SEQ ID NO: 5459 - protein, 7 aa, synthetic construct
PAASAVL

SEQ ID NO: 5460 - protein, 7 aa, synthetic construct
LSSDRDT

SEQ ID NO: 5461 - protein, 7 aa, synthetic construct
IQKNTEI

SEQ ID NO: 5462 - protein, 7 aa, synthetic construct
PGEPAFD

SEQ ID NO: 5463 - protein, 7 aa, synthetic construct
YPVNGTG

SEQ ID NO: 5464 - protein, 7 aa, synthetic construct
MRPNEID

SEQ ID NO: 5465 - protein, 7 aa, synthetic construct
HSQLWAE

SEQ ID NO: 5466 - protein, 7 aa, synthetic construct
PVVQQPP

SEQ ID NO: 5467 - protein, 7 aa, synthetic construct
NYADKFV

SEQ ID NO: 5468 - protein, 7 aa, synthetic construct
LIQEEKS

SEQ ID NO: 5469 - protein, 7 aa, synthetic construct
HLPAAPI

SEQ ID NO: 5470 - protein, 7 aa, synthetic construct
GPKYDVQ

SEQ ID NO: 5471 - protein, 7 aa, synthetic construct
RHGTDDF

SEQ ID NO: 5472 - protein, 7 aa, synthetic construct
SGGPNNF

SEQ ID NO: 5473 - protein, 7 aa, synthetic construct
FTQQLKN

SEQ ID NO: 5474 - protein, 7 aa, synthetic construct
GPEKMYI

SEQ ID NO: 5475 - protein, 7 aa, synthetic construct
WQDDAQV

SEQ ID NO: 5476 - protein, 7 aa, synthetic construct
QLKHTGS

SEQ ID NO: 5477 - protein, 7 aa, synthetic construct
KHVKHDE

SEQ ID NO: 5478 - protein, 7 aa, synthetic construct
KPTKMEA

SEQ ID NO: 5479 - protein, 7 aa, synthetic construct
QRLPGDW

SEQ ID NO: 5480 - protein, 7 aa, synthetic construct
GQTHAFG

SEQ ID NO: 5481 - protein, 7 aa, synthetic construct
YPSGKEI

SEQ ID NO: 5482 - protein, 7 aa, synthetic construct
GAFQHKD

SEQ ID NO: 5483 - protein, 7 aa, synthetic construct
IGEKFTR

SEQ ID NO: 5484 - protein, 7 aa, synthetic construct
RHQAESL

SEQ ID NO: 5485 - protein, 7 aa, synthetic construct
ASPDKQW

SEQ ID NO: 5486 - protein, 7 aa, synthetic construct
PNQSGVE

SEQ ID NO: 5487 - protein, 7 aa, synthetic construct
IGQKLND

SEQ ID NO: 5488 - protein, 7 aa, synthetic construct
SFNDGRH

SEQ ID NO: 5489 - protein, 7 aa, synthetic construct
DPNWKDK

SEQ ID NO: 5490 - protein, 7 aa, synthetic construct
PGAKTIE

SEQ ID NO: 5491 - protein, 7 aa, synthetic construct
LDKDFRM

SEQ ID NO: 5492 - protein, 7 aa, synthetic construct
KEETNIP

SEQ ID NO: 5493 - protein, 7 aa, synthetic construct
YSNSQSQ

SEQ ID NO: 5494 - protein, 7 aa, synthetic construct
IDRATAL

SEQ ID NO: 5495 - protein, 7 aa, synthetic construct
TEYNNMV

SEQ ID NO: 5496 - protein, 7 aa, synthetic construct
HSNFNNS

SEQ ID NO: 5497 - protein, 7 aa, synthetic construct
SVQPQNA

SEQ ID NO: 5498 - protein, 7 aa, synthetic construct
LNARDDV

SEQ ID NO: 5499 - protein, 7 aa, synthetic construct
QIKDIPM

SEQ ID NO: 5500 - protein, 7 aa, synthetic construct
TEHAQKE

SEQ ID NO: 5501 - protein, 7 aa, synthetic construct
LSQTSVY

SEQ ID NO: 5502 - protein, 7 aa, synthetic construct
MQGQSLP

SEQ ID NO: 5503 - protein, 7 aa, synthetic construct
RYESNNQ

SEQ ID NO: 5504 - protein, 7 aa, synthetic construct
ETPVNAS

SEQ ID NO: 5505 - protein, 7 aa, synthetic construct
NNHAKAT

SEQ ID NO: 5506 - protein, 7 aa, synthetic construct
QPMWDGD

SEQ ID NO: 5507 - protein, 7 aa, synthetic construct
GAYGNIA

SEQ ID NO: 5508 - protein, 7 aa, synthetic construct
NGQNVMG

SEQ ID NO: 5509 - protein, 7 aa, synthetic construct
PRPETQK

SEQ ID NO: 5510 - protein, 7 aa, synthetic construct
TKNIITI

SEQ ID NO: 5511 - protein, 7 aa, synthetic construct
RQTMALA

SEQ ID NO: 5512 - protein, 7 aa, synthetic construct
HDLVYKD

SEQ ID NO: 5513 - protein, 7 aa, synthetic construct
GNGLKPI

SEQ ID NO: 5514 - protein, 7 aa, synthetic construct
NASPGKH

SEQ ID NO: 5515 - protein, 7 aa, synthetic construct
GHAVPNP

SEQ ID NO: 5516 - protein, 7 aa, synthetic construct
YHGDYPP

SEQ ID NO: 5517 - protein, 7 aa, synthetic construct
RNDEPGY

SEQ ID NO: 5518 - protein, 7 aa, synthetic construct
YMLGFKE

SEQ ID NO: 5519 - protein, 7 aa, synthetic construct
EGTGHAT

SEQ ID NO: 5520 - protein, 7 aa, synthetic construct
ITQNPTF

SEQ ID NO: 5521 - protein, 7 aa, synthetic construct
LWEREEN

SEQ ID NO: 5522 - protein, 7 aa, synthetic construct
SFVYKEA

SEQ ID NO: 5523 - protein, 7 aa, synthetic construct
YPGGVMT

SEQ ID NO: 5524 - protein, 7 aa, synthetic construct
HEKPAML

SEQ ID NO: 5525 - protein, 7 aa, synthetic construct
KSPRIDD

SEQ ID NO: 5526 - protein, 7 aa, synthetic construct
GRDTDIR

SEQ ID NO: 5527 - protein, 7 aa, synthetic construct
FMHENTI

SEQ ID NO: 5528 - protein, 7 aa, synthetic construct
NGPKYAH

SEQ ID NO: 5529 - protein, 7 aa, synthetic construct
SIQSAGL

SEQ ID NO: 5530 - protein, 7 aa, synthetic construct
QAERHIE

SEQ ID NO: 5531 - protein, 7 aa, synthetic construct
ATTAWRE

SEQ ID NO: 5532 - protein, 7 aa, synthetic construct
VLSNADY

SEQ ID NO: 5533 - protein, 7 aa, synthetic construct
LGHDPGH

SEQ ID NO: 5534 - protein, 7 aa, synthetic construct
ITAAGSP

SEQ ID NO: 5535 - protein, 7 aa, synthetic construct
QETAKTP

SEQ ID NO: 5536 - protein, 7 aa, synthetic construct
FSNVKQI

SEQ ID NO: 5537 - protein, 7 aa, synthetic construct
WEDRHHQ

SEQ ID NO: 5538 - protein, 7 aa, synthetic construct
IMHEKNF

SEQ ID NO: 5539 - protein, 7 aa, synthetic construct
EGRPEAY

SEQ ID NO: 5540 - protein, 7 aa, synthetic construct
IAGVIQD

SEQ ID NO: 5541 - protein, 7 aa, synthetic construct
TGTSQEA

SEQ ID NO: 5542 - protein, 7 aa, synthetic construct
GGPHQNT

SEQ ID NO: 5543 - protein, 7 aa, synthetic construct
FSTQSEH

SEQ ID NO: 5544 - protein, 7 aa, synthetic construct
RSSVMFD

SEQ ID NO: 5545 - protein, 7 aa, synthetic construct
NSSVVYA

SEQ ID NO: 5546 - protein, 7 aa, synthetic construct
MAGNNRV

SEQ ID NO: 5547 - protein, 7 aa, synthetic construct
HYQPNER

SEQ ID NO: 5548 - protein, 7 aa, synthetic construct
SHSHSTY

SEQ ID NO: 5549 - protein, 7 aa, synthetic construct
NKWDAVE

SEQ ID NO: 5550 - protein, 7 aa, synthetic construct
KPMTTAH

SEQ ID NO: 5551 - protein, 7 aa, synthetic construct
SSAGEKL

SEQ ID NO: 5552 - protein, 7 aa, synthetic construct
FNSNDSI

SEQ ID NO: 5553 - protein, 7 aa, synthetic construct
GANAQPM

SEQ ID NO: 5554 - protein, 7 aa, synthetic construct
YGNTYKM

SEQ ID NO: 5555 - protein, 7 aa, synthetic construct
VMERINS

SEQ ID NO: 5556 - protein, 7 aa, synthetic construct
FGHAIAA

SEQ ID NO: 5557 - protein, 7 aa, synthetic construct
KTMGGSI

SEQ ID NO: 5558 - protein, 7 aa, synthetic construct
QSYGGMM

SEQ ID NO: 5559 - protein, 7 aa, synthetic construct
FSPPNVS

SEQ ID NO: 5560 - protein, 7 aa, synthetic construct
LHKEIFA

SEQ ID NO: 5561 - protein, 7 aa, synthetic construct
HKESIDT

SEQ ID NO: 5562 - protein, 7 aa, synthetic construct
MEKSLMR

SEQ ID NO: 5563 - protein, 7 aa, synthetic construct
MYNYIED

SEQ ID NO: 5564 - protein, 7 aa, synthetic construct
NRGEGYA

SEQ ID NO: 5565 - protein, 7 aa, synthetic construct
ALMKESI

SEQ ID NO: 5566 - protein, 7 aa, synthetic construct
LETVHAS

SEQ ID NO: 5567 - protein, 7 aa, synthetic construct
DESVHSK

SEQ ID NO: 5568 - protein, 7 aa, synthetic construct
NAGIWAG

SEQ ID NO: 5569 - protein, 7 aa, synthetic construct
YGRAEHH

SEQ ID NO: 5570 - protein, 7 aa, synthetic construct
ANDVKGM

SEQ ID NO: 5571 - protein, 7 aa, synthetic construct
IQFGNSN

SEQ ID NO: 5572 - protein, 7 aa, synthetic construct
ISYPGVP

SEQ ID NO: 5573 - protein, 7 aa, synthetic construct
DKMDSSE

SEQ ID NO: 5574 - protein, 7 aa, synthetic construct
STTHKLT

SEQ ID NO: 5575 - protein, 7 aa, synthetic construct
QESINKP

SEQ ID NO: 5576 - protein, 7 aa, synthetic construct
HMHDRSA

SEQ ID NO: 5577 - protein, 7 aa, synthetic construct
GSSPIYH

SEQ ID NO: 5578 - protein, 7 aa, synthetic construct
QIVPGDG

SEQ ID NO: 5579 - protein, 7 aa, synthetic construct
KGQHHIS

SEQ ID NO: 5580 - protein, 7 aa, synthetic construct
IKDKQIY

SEQ ID NO: 5581 - protein, 7 aa, synthetic construct
HENVGSA

SEQ ID NO: 5582 - protein, 7 aa, synthetic construct
NFISTQA

SEQ ID NO: 5583 - protein, 7 aa, synthetic construct
TPDSMNK

SEQ ID NO: 5584 - protein, 7 aa, synthetic construct
NRMGKDS

SEQ ID NO: 5585 - protein, 7 aa, synthetic construct
QYTVPSI

SEQ ID NO: 5586 - protein, 7 aa, synthetic construct
DDYAKPG

SEQ ID NO: 5587 - protein, 7 aa, synthetic construct
NDKKEWY

SEQ ID NO: 5588 - protein, 7 aa, synthetic construct
LIGAEHQ

SEQ ID NO: 5589 - protein, 7 aa, synthetic construct
FSGIRKD

SEQ ID NO: 5590 - protein, 7 aa, synthetic construct
TFAGSSF

SEQ ID NO: 5591 - protein, 7 aa, synthetic construct
LMHAPKS

SEQ ID NO: 5592 - protein, 7 aa, synthetic construct
HPGTAYD

SEQ ID NO: 5593 - protein, 7 aa, synthetic construct
TMLTPGT

SEQ ID NO: 5594 - protein, 7 aa, synthetic construct
TDPRGNF

SEQ ID NO: 5595 - protein, 7 aa, synthetic construct
LHGEVTI

SEQ ID NO: 5596 - protein, 7 aa, synthetic construct
EMGATKQ

SEQ ID NO: 5597 - protein, 7 aa, synthetic construct
NVSVVLK

SEQ ID NO: 5598 - protein, 7 aa, synthetic construct
QAIKDNG

SEQ ID NO: 5599 - protein, 7 aa, synthetic construct
GHPAQSF

SEQ ID NO: 5600 - protein, 7 aa, synthetic construct
NIGGMGP

SEQ ID NO: 5601 - protein, 7 aa, synthetic construct
GREVLKI

SEQ ID NO: 5602 - protein, 7 aa, synthetic construct
FKDYKNP

SEQ ID NO: 5603 - protein, 7 aa, synthetic construct
LTNRSEI

SEQ ID NO: 5604 - protein, 7 aa, synthetic construct
GQNRLLP

SEQ ID NO: 5605 - protein, 7 aa, synthetic construct
GLSPHAI

SEQ ID NO: 5606 - protein, 7 aa, synthetic construct
VRVGINN

SEQ ID NO: 5607 - protein, 7 aa, synthetic construct
ANGMDKV

SEQ ID NO: 5608 - protein, 7 aa, synthetic construct
GHNDAGP

SEQ ID NO: 5609 - protein, 7 aa, synthetic construct
LVRQTTE

SEQ ID NO: 5610 - protein, 7 aa, synthetic construct
NMGHLGY

SEQ ID NO: 5611 - protein, 7 aa, synthetic construct
NPPQFGV

SEQ ID NO: 5612 - protein, 7 aa, synthetic construct
ESNRRDT

SEQ ID NO: 5613 - protein, 7 aa, synthetic construct
KGGDVEF

SEQ ID NO: 5614 - protein, 7 aa, synthetic construct
NTMEKQN

SEQ ID NO: 5615 - protein, 7 aa, synthetic construct
SRHEEEL

SEQ ID NO: 5616 - protein, 7 aa, synthetic construct
RSAEKMG

SEQ ID NO: 5617 - protein, 7 aa, synthetic construct
HGSHGQA

SEQ ID NO: 5618 - protein, 7 aa, synthetic construct
NEEKFQF

SEQ ID NO: 5619 - protein, 7 aa, synthetic construct
GEAKNQD

SEQ ID NO: 5620 - protein, 7 aa, synthetic construct
SGMPNPP

SEQ ID NO: 5621 - protein, 7 aa, synthetic construct
RMHIIPD

SEQ ID NO: 5622 - protein, 7 aa, synthetic construct
IQAGSTV

SEQ ID NO: 5623 - protein, 7 aa, synthetic construct
VTQQIGK

SEQ ID NO: 5624 - protein, 7 aa, synthetic construct
RQEAHDN

SEQ ID NO: 5625 - protein, 7 aa, synthetic construct
LQDAMRP

SEQ ID NO: 5626 - protein, 7 aa, synthetic construct
RYDTHPL

SEQ ID NO: 5627 - protein, 7 aa, synthetic construct
LGSGHAM

SEQ ID NO: 5628 - protein, 7 aa, synthetic construct
INSHYEQ

SEQ ID NO: 5629 - protein, 7 aa, synthetic construct
AQMDHAG

SEQ ID NO: 5630 - protein, 7 aa, synthetic construct
YHRRADD

SEQ ID NO: 5631 - protein, 7 aa, synthetic construct
QGPLQVA

SEQ ID NO: 5632 - protein, 7 aa, synthetic construct
LLSANRS

SEQ ID NO: 5633 - protein, 7 aa, synthetic construct
DKRYEQF

SEQ ID NO: 5634 - protein, 7 aa, synthetic construct
NEASTAG

SEQ ID NO: 5635 - protein, 7 aa, synthetic construct
VHGSAGD

SEQ ID NO: 5636 - protein, 7 aa, synthetic construct
DNNYKLT

SEQ ID NO: 5637 - protein, 7 aa, synthetic construct
GPNMAHE

SEQ ID NO: 5638 - protein, 7 aa, synthetic construct
QHLGSPS

SEQ ID NO: 5639 - protein, 7 aa, synthetic construct
NMTQIGS

SEQ ID NO: 5640 - protein, 7 aa, synthetic construct
MEKTLRS

SEQ ID NO: 5641 - protein, 7 aa, synthetic construct
FGSHVQV

SEQ ID NO: 5642 - protein, 7 aa, synthetic construct
MGTRGTT

SEQ ID NO: 5643 - protein, 7 aa, synthetic construct
GILKHIP

SEQ ID NO: 5644 - protein, 7 aa, synthetic construct
QNVTVHA

SEQ ID NO: 5645 - protein, 7 aa, synthetic construct
QNGPIMQ

SEQ ID NO: 5646 - protein, 7 aa, synthetic construct
FGTTQKQ

SEQ ID NO: 5647 - protein, 7 aa, synthetic construct
NTPTFGE

SEQ ID NO: 5648 - protein, 7 aa, synthetic construct
ADIHSHE

SEQ ID NO: 5649 - protein, 7 aa, synthetic construct
AQRLVSD

SEQ ID NO: 5650 - protein, 7 aa, synthetic construct
KSERYPD

SEQ ID NO: 5651 - protein, 7 aa, synthetic construct
QQNNISL

SEQ ID NO: 5652 - protein, 7 aa, synthetic construct
QVMENRS

SEQ ID NO: 5653 - protein, 7 aa, synthetic construct
QEVNHQV

SEQ ID NO: 5654 - protein, 7 aa, synthetic construct
DQKVMNP

SEQ ID NO: 5655 - protein, 7 aa, synthetic construct
PKTSEMI

SEQ ID NO: 5656 - protein, 7 aa, synthetic construct
YKDRASV

SEQ ID NO: 5657 - protein, 7 aa, synthetic construct
RDGVRTM

SEQ ID NO: 5658 - protein, 7 aa, synthetic construct
ELMGYRA

SEQ ID NO: 5659 - protein, 7 aa, synthetic construct
DMRFTPS

SEQ ID NO: 5660 - protein, 7 aa, synthetic construct
DNSQHIL

SEQ ID NO: 5661 - protein, 7 aa, synthetic construct
TRPNMLE

SEQ ID NO: 5662 - protein, 7 aa, synthetic construct
HKITEAT

SEQ ID NO: 5663 - protein, 7 aa, synthetic construct
KGAPMMP

SEQ ID NO: 5664 - protein, 7 aa, synthetic construct
QKDDYHL

SEQ ID NO: 5665 - protein, 7 aa, synthetic construct
SQNSRTY

SEQ ID NO: 5666 - protein, 7 aa, synthetic construct
YKDSERW

SEQ ID NO: 5667 - protein, 7 aa, synthetic construct
DIDRPKQ

SEQ ID NO: 5668 - protein, 7 aa, synthetic construct
GVAHRMD

SEQ ID NO: 5669 - protein, 7 aa, synthetic construct
DDTRIHI

SEQ ID NO: 5670 - protein, 7 aa, synthetic construct
AWADDGA

SEQ ID NO: 5671 - protein, 7 aa, synthetic construct
GINGDGY

SEQ ID NO: 5672 - protein, 7 aa, synthetic construct
NKQHNNN

SEQ ID NO: 5673 - protein, 7 aa, synthetic construct
WVPPQEA

SEQ ID NO: 5674 - protein, 7 aa, synthetic construct
NPNMLVA

SEQ ID NO: 5675 - protein, 7 aa, synthetic construct
HKAPNPM

SEQ ID NO: 5676 - protein, 7 aa, synthetic construct
YIESNRL

SEQ ID NO: 5677 - protein, 7 aa, synthetic construct
KENAGEH

SEQ ID NO: 5678 - protein, 7 aa, synthetic construct
TKMESEF

SEQ ID NO: 5679 - protein, 7 aa, synthetic construct
GWGQHED

SEQ ID NO: 5680 - protein, 7 aa, synthetic construct
YATSGYE

SEQ ID NO: 5681 - protein, 7 aa, synthetic construct
YGGVLSH

SEQ ID NO: 5682 - protein, 7 aa, synthetic construct
GDNTHMM

SEQ ID NO: 5683 - protein, 7 aa, synthetic construct
GEPRAII

SEQ ID NO: 5684 - protein, 7 aa, synthetic construct
MTHGYQP

SEQ ID NO: 5685 - protein, 7 aa, synthetic construct
GEREKQW

SEQ ID NO: 5686 - protein, 7 aa, synthetic construct
MIGRVGE

SEQ ID NO: 5687 - protein, 7 aa, synthetic construct
PAGQETY

SEQ ID NO: 5688 - protein, 7 aa, synthetic construct
TQQITNM

SEQ ID NO: 5689 - protein, 7 aa, synthetic construct
ILKHHAD

SEQ ID NO: 5690 - protein, 7 aa, synthetic construct
QLPGYHE

SEQ ID NO: 5691 - protein, 7 aa, synthetic construct
GHDKFKG

SEQ ID NO: 5692 - protein, 7 aa, synthetic construct
MQPWSAE

SEQ ID NO: 5693 - protein, 7 aa, synthetic construct
YGAVSDP

SEQ ID NO: 5694 - protein, 7 aa, synthetic construct
AAMHPNP

SEQ ID NO: 5695 - protein, 7 aa, synthetic construct
KQQNPQD

SEQ ID NO: 5696 - protein, 7 aa, synthetic construct
LGPDGKK

SEQ ID NO: 5697 - protein, 7 aa, synthetic construct
DLHHGAA

SEQ ID NO: 5698 - protein, 7 aa, synthetic construct
TFDDRPA

SEQ ID NO: 5699 - protein, 7 aa, synthetic construct
RMYVGEG

SEQ ID NO: 5700 - protein, 7 aa, synthetic construct
MQHVSVE

SEQ ID NO: 5701 - protein, 7 aa, synthetic construct
PKVPNAE

SEQ ID NO: 5702 - protein, 7 aa, synthetic construct
HMRGHEV

SEQ ID NO: 5703 - protein, 7 aa, synthetic construct
QQAAGNS

SEQ ID NO: 5704 - protein, 7 aa, synthetic construct
IKHPMVL

SEQ ID NO: 5705 - protein, 7 aa, synthetic construct
KSMDLTV

SEQ ID NO: 5706 - protein, 7 aa, synthetic construct
TATHKVI

SEQ ID NO: 5707 - protein, 7 aa, synthetic construct
WGKEHFS

SEQ ID NO: 5708 - protein, 7 aa, synthetic construct
IHAQMQQ

SEQ ID NO: 5709 - protein, 7 aa, synthetic construct
QRKDETR

SEQ ID NO: 5710 - protein, 7 aa, synthetic construct
NIRISGV

SEQ ID NO: 5711 - protein, 7 aa, synthetic construct
GVMKGDS

SEQ ID NO: 5712 - protein, 7 aa, synthetic construct
QLEHTMI

SEQ ID NO: 5713 - protein, 7 aa, synthetic construct
GVNNDRS

SEQ ID NO: 5714 - protein, 7 aa, synthetic construct
PKDIPIT

SEQ ID NO: 5715 - protein, 7 aa, synthetic construct
ADRNIKV

SEQ ID NO: 5716 - protein, 7 aa, synthetic construct
MHVKVMG

SEQ ID NO: 5717 - protein, 7 aa, synthetic construct
SQMNDYE

SEQ ID NO: 5718 - protein, 7 aa, synthetic construct
YENRVEN

SEQ ID NO: 5719 - protein, 7 aa, synthetic construct
TRVFKLE

SEQ ID NO: 5720 - protein, 7 aa, synthetic construct
DDHGEVR

SEQ ID NO: 5721 - protein, 7 aa, synthetic construct
AGIPDHN

SEQ ID NO: 5722 - protein, 7 aa, synthetic construct
EHQVKDI

SEQ ID NO: 5723 - protein, 7 aa, synthetic construct
VNNTVHA

SEQ ID NO: 5724 - protein, 7 aa, synthetic construct
RPGRDKD

SEQ ID NO: 5725 - protein, 7 aa, synthetic construct
MQQTQLN

SEQ ID NO: 5726 - protein, 7 aa, synthetic construct
SMMGNFA

SEQ ID NO: 5727 - protein, 7 aa, synthetic construct
WQHQLQS

SEQ ID NO: 5728 - protein, 7 aa, synthetic construct
KKHDAIG

SEQ ID NO: 5729 - protein, 7 aa, synthetic construct
DGMTGPK

SEQ ID NO: 5730 - protein, 7 aa, synthetic construct
MDAKELK

SEQ ID NO: 5731 - protein, 7 aa, synthetic construct
RDTMIMT

SEQ ID NO: 5732 - protein, 7 aa, synthetic construct
FVHAAIE

SEQ ID NO: 5733 - protein, 7 aa, synthetic construct
HIPIGEG

SEQ ID NO: 5734 - protein, 7 aa, synthetic construct
EMPQMKG

SEQ ID NO: 5735 - protein, 7 aa, synthetic construct
DKNGTRE

SEQ ID NO: 5736 - protein, 7 aa, synthetic construct
VDGHRIH

SEQ ID NO: 5737 - protein, 7 aa, synthetic construct
HNVVTSA

SEQ ID NO: 5738 - protein, 7 aa, synthetic construct
QEFGQRM

SEQ ID NO: 5739 - protein, 7 aa, synthetic construct
LGNQVSR

SEQ ID NO: 5740 - protein, 7 aa, synthetic construct
SQITSDS

SEQ ID NO: 5741 - protein, 7 aa, synthetic construct
DSIKTIK

SEQ ID NO: 5742 - protein, 7 aa, synthetic construct
EFYGGRP

SEQ ID NO: 5743 - protein, 7 aa, synthetic construct
FGGSDNS

SEQ ID NO: 5744 - protein, 7 aa, synthetic construct
PIVSKGI

SEQ ID NO: 5745 - protein, 7 aa, synthetic construct
YKVQITN

SEQ ID NO: 5746 - protein, 7 aa, synthetic construct
HIHDEEM

SEQ ID NO: 5747 - protein, 7 aa, synthetic construct
EFSSTNR

SEQ ID NO: 5748 - protein, 7 aa, synthetic construct
LYAARQD

SEQ ID NO: 5749 - protein, 7 aa, synthetic construct
TPHVEAN

SEQ ID NO: 5750 - protein, 7 aa, synthetic construct
PKEHPSV

SEQ ID NO: 5751 - protein, 7 aa, synthetic construct
WHNVPQS

SEQ ID NO: 5752 - protein, 7 aa, synthetic construct
PVDQLPS

SEQ ID NO: 5753 - protein, 7 aa, synthetic construct
SQLGFSA

SEQ ID NO: 5754 - protein, 7 aa, synthetic construct
WEHKYNG

SEQ ID NO: 5755 - protein, 7 aa, synthetic construct
VSTKSYF

SEQ ID NO: 5756 - protein, 7 aa, synthetic construct
FAGPDNT

SEQ ID NO: 5757 - protein, 7 aa, synthetic construct
LKNANGH

SEQ ID NO: 5758 - protein, 7 aa, synthetic construct
GLRVYDG

SEQ ID NO: 5759 - protein, 7 aa, synthetic construct
GQQNFLA

SEQ ID NO: 5760 - protein, 7 aa, synthetic construct
CMNPTVC

SEQ ID NO: 5761 - protein, 7 aa, synthetic construct
GEPYRNS

SEQ ID NO: 5762 - protein, 7 aa, synthetic construct
FNTGMSS

SEQ ID NO: 5763 - protein, 7 aa, synthetic construct
VAMQGNL

SEQ ID NO: 5764 - protein, 7 aa, synthetic construct
GDQGQWS

SEQ ID NO: 5765 - protein, 7 aa, synthetic construct
NVPMSAE

SEQ ID NO: 5766 - protein, 7 aa, synthetic construct
MTHAKGV

SEQ ID NO: 5767 - protein, 7 aa, synthetic construct
MSNATDV

SEQ ID NO: 5768 - protein, 7 aa, synthetic construct
TRLQIMD

SEQ ID NO: 5769 - protein, 7 aa, synthetic construct
SGSGEWV

SEQ ID NO: 5770 - protein, 7 aa, synthetic construct
DKISING

SEQ ID NO: 5771 - protein, 7 aa, synthetic construct
FNESIKP

SEQ ID NO: 5772 - protein, 7 aa, synthetic construct
WSQSSYV

SEQ ID NO: 5773 - protein, 7 aa, synthetic construct
SKYADQQ

SEQ ID NO: 5774 - protein, 7 aa, synthetic construct
AAQPQYS

SEQ ID NO: 5775 - protein, 7 aa, synthetic construct
YDKNAVV

SEQ ID NO: 5776 - protein, 7 aa, synthetic construct
ALRGNYI

SEQ ID NO: 5777 - protein, 7 aa, synthetic construct
SMGSAQP

SEQ ID NO: 5778 - protein, 7 aa, synthetic construct
LGRMYEE

SEQ ID NO: 5779 - protein, 7 aa, synthetic construct
SHKDTEY

SEQ ID NO: 5780 - protein, 7 aa, synthetic construct
WNNGEAM

SEQ ID NO: 5781 - protein, 7 aa, synthetic construct
GNSGPIW

SEQ ID NO: 5782 - protein, 7 aa, synthetic construct
KEHSGER

SEQ ID NO: 5783 - protein, 7 aa, synthetic construct
LDKPHYD

SEQ ID NO: 5784 - protein, 7 aa, synthetic construct
PTDQLRT

SEQ ID NO: 5785 - protein, 7 aa, synthetic construct
DGKQPKL

SEQ ID NO: 5786 - protein, 7 aa, synthetic construct
LGSAINQ

SEQ ID NO: 5787 - protein, 7 aa, synthetic construct
SFSKHDA

SEQ ID NO: 5788 - protein, 7 aa, synthetic construct
MHGEMPN

SEQ ID NO: 5789 - protein, 7 aa, synthetic construct
DTMHNIP

SEQ ID NO: 5790 - protein, 7 aa, synthetic construct
IGAPAQG

SEQ ID NO: 5791 - protein, 7 aa, synthetic construct
SVSGFPM

SEQ ID NO: 5792 - protein, 7 aa, synthetic construct
WAEGSYP

SEQ ID NO: 5793 - protein, 7 aa, synthetic construct
MWKNLNE

SEQ ID NO: 5794 - protein, 7 aa, synthetic construct
DMTMKVP

SEQ ID NO: 5795 - protein, 7 aa, synthetic construct
GQKMSDE

SEQ ID NO: 5796 - protein, 7 aa, synthetic construct
AGLHKGS

SEQ ID NO: 5797 - protein, 7 aa, synthetic construct
KYGMNSN

SEQ ID NO: 5798 - protein, 7 aa, synthetic construct
SASYHGH

SEQ ID NO: 5799 - protein, 7 aa, synthetic construct
NHHEVPT

SEQ ID NO: 5800 - protein, 7 aa, synthetic construct
SQNHESV

SEQ ID NO: 5801 - protein, 7 aa, synthetic construct
KFGNPDV

SEQ ID NO: 5802 - protein, 7 aa, synthetic construct
HGGDPFL

SEQ ID NO: 5803 - protein, 7 aa, synthetic construct
KYAAEYV

SEQ ID NO: 5804 - protein, 7 aa, synthetic construct
KVTFNEE

SEQ ID NO: 5805 - protein, 7 aa, synthetic construct
PKDGMAG

SEQ ID NO: 5806 - protein, 7 aa, synthetic construct
AHLEHKT

SEQ ID NO: 5807 - protein, 7 aa, synthetic construct
TSQPHFE

SEQ ID NO: 5808 - protein, 7 aa, synthetic construct
ISVAHNA

SEQ ID NO: 5809 - protein, 7 aa, synthetic construct
SMGVQPN

SEQ ID NO: 5810 - protein, 7 aa, synthetic construct
EQNLTIA

SEQ ID NO: 5811 - protein, 7 aa, synthetic construct
DYGSAFE

SEQ ID NO: 5812 - protein, 7 aa, synthetic construct
DDLKKHP

SEQ ID NO: 5813 - protein, 7 aa, synthetic construct
TGSVTSI

SEQ ID NO: 5814 - protein, 7 aa, synthetic construct
GERKPAI

SEQ ID NO: 5815 - protein, 7 aa, synthetic construct
NPKNENF

SEQ ID NO: 5816 - protein, 7 aa, synthetic construct
QYHNLIE

SEQ ID NO: 5817 - protein, 7 aa, synthetic construct
DFGKQGT

SEQ ID NO: 5818 - protein, 7 aa, synthetic construct
LLGRIAG

SEQ ID NO: 5819 - protein, 7 aa, synthetic construct
YLDIVKY

SEQ ID NO: 5820 - protein, 7 aa, synthetic construct
TVDADHI

SEQ ID NO: 5821 - protein, 7 aa, synthetic construct
GGDNRMA

SEQ ID NO: 5822 - protein, 7 aa, synthetic construct
ADRQRNT

SEQ ID NO: 5823 - protein, 7 aa, synthetic construct
DEGQASD

SEQ ID NO: 5824 - protein, 7 aa, synthetic construct
IERIPKD

SEQ ID NO: 5825 - protein, 7 aa, synthetic construct
EAAQKSF

SEQ ID NO: 5826 - protein, 7 aa, synthetic construct
SLGGEQI

SEQ ID NO: 5827 - protein, 7 aa, synthetic construct
FMNKYGE

SEQ ID NO: 5828 - protein, 7 aa, synthetic construct
IRRQDND

SEQ ID NO: 5829 - protein, 7 aa, synthetic construct
DYSRSNV

SEQ ID NO: 5830 - protein, 7 aa, synthetic construct
QEQFAKH

SEQ ID NO: 5831 - protein, 7 aa, synthetic construct
QPTSNHY

SEQ ID NO: 5832 - protein, 7 aa, synthetic construct
NTMHDKL

SEQ ID NO: 5833 - protein, 7 aa, synthetic construct
RDVEQPN

SEQ ID NO: 5834 - protein, 7 aa, synthetic construct
DKVRTVM

SEQ ID NO: 5835 - protein, 7 aa, synthetic construct
IKENPTI

SEQ ID NO: 5836 - protein, 7 aa, synthetic construct
AMTRANM

SEQ ID NO: 5837 - protein, 7 aa, synthetic construct
KDPPNAG

SEQ ID NO: 5838 - protein, 7 aa, synthetic construct
LDTNRHS

SEQ ID NO: 5839 - protein, 7 aa, synthetic construct
NAINTNE

SEQ ID NO: 5840 - protein, 7 aa, synthetic construct
AIREDNN

SEQ ID NO: 5841 - protein, 7 aa, synthetic construct
MHSGVND

SEQ ID NO: 5842 - protein, 7 aa, synthetic construct
RDARQPY

SEQ ID NO: 5843 - protein, 7 aa, synthetic construct
KERPNHN

SEQ ID NO: 5844 - protein, 7 aa, synthetic construct
EHRTMGI

SEQ ID NO: 5845 - protein, 7 aa, synthetic construct
IDEFHAY

SEQ ID NO: 5846 - protein, 7 aa, synthetic construct
KSGINVN

SEQ ID NO: 5847 - protein, 7 aa, synthetic construct
GYMPTEG

SEQ ID NO: 5848 - protein, 7 aa, synthetic construct
TPKVTQF

SEQ ID NO: 5849 - protein, 7 aa, synthetic construct
LVNMTKD

SEQ ID NO: 5850 - protein, 7 aa, synthetic construct
KNKLNED

SEQ ID NO: 5851 - protein, 7 aa, synthetic construct
LNDPTNA

SEQ ID NO: 5852 - protein, 7 aa, synthetic construct
IDARAIH

SEQ ID NO: 5853 - protein, 7 aa, synthetic construct
KPTIGWE

SEQ ID NO: 5854 - protein, 7 aa, synthetic construct
ISHPAAH

SEQ ID NO: 5855 - protein, 7 aa, synthetic construct
MFAVKPE

SEQ ID NO: 5856 - protein, 7 aa, synthetic construct
PPSVPAQ

SEQ ID NO: 5857 - protein, 7 aa, synthetic construct
NGSGKNI

SEQ ID NO: 5858 - protein, 7 aa, synthetic construct
QTGQNYK

SEQ ID NO: 5859 - protein, 7 aa, synthetic construct
SHHDEIP

SEQ ID NO: 5860 - protein, 7 aa, synthetic construct
TRPIHNA

SEQ ID NO: 5861 - protein, 7 aa, synthetic construct
LYKQSMS

SEQ ID NO: 5862 - protein, 7 aa, synthetic construct
PFGTSVP

SEQ ID NO: 5863 - protein, 7 aa, synthetic construct
QSQKHEQ

SEQ ID NO: 5864 - protein, 7 aa, synthetic construct
GTSAQEH

SEQ ID NO: 5865 - protein, 7 aa, synthetic construct
YNNGEAK

SEQ ID NO: 5866 - protein, 7 aa, synthetic construct
EHEASRE

SEQ ID NO: 5867 - protein, 7 aa, synthetic construct
VRVPSDE

SEQ ID NO: 5868 - protein, 7 aa, synthetic construct
REKNMAE

SEQ ID NO: 5869 - protein, 7 aa, synthetic construct
VGHQLKS

SEQ ID NO: 5870 - protein, 7 aa, synthetic construct
RLVDSDI

SEQ ID NO: 5871 - protein, 7 aa, synthetic construct
PIRPSQP

SEQ ID NO: 5872 - protein, 7 aa, synthetic construct
MKHLEID

SEQ ID NO: 5873 - protein, 7 aa, synthetic construct
NGAPIKE

SEQ ID NO: 5874 - protein, 7 aa, synthetic construct
EPRSQVL

SEQ ID NO: 5875 - protein, 7 aa, synthetic construct
PPFDKPA

SEQ ID NO: 5876 - protein, 7 aa, synthetic construct
MAGKGHN

SEQ ID NO: 5877 - protein, 7 aa, synthetic construct
NVPAHPF

SEQ ID NO: 5878 - protein, 7 aa, synthetic construct
VGQADVT

SEQ ID NO: 5879 - protein, 7 aa, synthetic construct
MFDEKRQ

SEQ ID NO: 5880 - protein, 7 aa, synthetic construct
SVPQHVE

SEQ ID NO: 5881 - protein, 7 aa, synthetic construct
KYVSTEP

SEQ ID NO: 5882 - protein, 7 aa, synthetic construct
QMGNKAL

SEQ ID NO: 5883 - protein, 7 aa, synthetic construct
KTDDVMR

SEQ ID NO: 5884 - protein, 7 aa, synthetic construct
HGNDALA

SEQ ID NO: 5885 - protein, 7 aa, synthetic construct
VKLHMDG

SEQ ID NO: 5886 - protein, 7 aa, synthetic construct
NEIKNGL

SEQ ID NO: 5887 - protein, 7 aa, synthetic construct
KFTPGNA

SEQ ID NO: 5888 - protein, 7 aa, synthetic construct
HQNNGMD

SEQ ID NO: 5889 - protein, 7 aa, synthetic construct
IKHHHEA

SEQ ID NO: 5890 - protein, 7 aa, synthetic construct
VAHGMYP

SEQ ID NO: 5891 - protein, 7 aa, synthetic construct
KMTMPPQ

SEQ ID NO: 5892 - protein, 7 aa, synthetic construct
FMGGEIS

SEQ ID NO: 5893 - protein, 7 aa, synthetic construct
PMHTTPI

SEQ ID NO: 5894 - protein, 7 aa, synthetic construct
HIRGDHE

SEQ ID NO: 5895 - protein, 7 aa, synthetic construct
HVNPTMH

SEQ ID NO: 5896 - protein, 7 aa, synthetic construct
LLYSATD

SEQ ID NO: 5897 - protein, 7 aa, synthetic construct
SSNLGRN

SEQ ID NO: 5898 - protein, 7 aa, synthetic construct
IQTPERY

SEQ ID NO: 5899 - protein, 7 aa, synthetic construct
WDFQENE

SEQ ID NO: 5900 - protein, 7 aa, synthetic construct
SVSYESE

SEQ ID NO: 5901 - protein, 7 aa, synthetic construct
DPGPNFF

SEQ ID NO: 5902 - protein, 7 aa, synthetic construct
TSGHAPI

SEQ ID NO: 5903 - protein, 7 aa, synthetic construct
EKISSQW

SEQ ID NO: 5904 - protein, 7 aa, synthetic construct
YSQNKNL

SEQ ID NO: 5905 - protein, 7 aa, synthetic construct
ANSGDPE

SEQ ID NO: 5906 - protein, 7 aa, synthetic construct
MATPENR

SEQ ID NO: 5907 - protein, 7 aa, synthetic construct
YFDRGST

SEQ ID NO: 5908 - protein, 7 aa, synthetic construct
LHEPHRQ

SEQ ID NO: 5909 - protein, 7 aa, synthetic construct
GTHNGNW

SEQ ID NO: 5910 - protein, 7 aa, synthetic construct
KAHQTEI

SEQ ID NO: 5911 - protein, 7 aa, synthetic construct
ALGEKMP

SEQ ID NO: 5912 - protein, 7 aa, synthetic construct
TEVDPRE

SEQ ID NO: 5913 - protein, 7 aa, synthetic construct
LGDGSYR

SEQ ID NO: 5914 - protein, 7 aa, synthetic construct
AGMLVAD

SEQ ID NO: 5915 - protein, 7 aa, synthetic construct
DMKYPVH

SEQ ID NO: 5916 - protein, 7 aa, synthetic construct
QMRQPAF

SEQ ID NO: 5917 - protein, 7 aa, synthetic construct
HKQESSA

SEQ ID NO: 5918 - protein, 7 aa, synthetic construct
SRFQDGT

SEQ ID NO: 5919 - protein, 7 aa, synthetic construct
NTKMPMI

SEQ ID NO: 5920 - protein, 7 aa, synthetic construct
NYDAANI

SEQ ID NO: 5921 - protein, 7 aa, synthetic construct
LQAQAVR

SEQ ID NO: 5922 - protein, 7 aa, synthetic construct
NVIEKGY

SEQ ID NO: 5923 - protein, 7 aa, synthetic construct
WGKGPTN

SEQ ID NO: 5924 - protein, 7 aa, synthetic construct
KSFEEHN

SEQ ID NO: 5925 - protein, 7 aa, synthetic construct
HYDAQVI

SEQ ID NO: 5926 - protein, 7 aa, synthetic construct
PMQNGTP

SEQ ID NO: 5927 - protein, 7 aa, synthetic construct
QNYHNDT

SEQ ID NO: 5928 - protein, 7 aa, synthetic construct
DLNIQKP

SEQ ID NO: 5929 - protein, 7 aa, synthetic construct
RGGDWMD

SEQ ID NO: 5930 - protein, 7 aa, synthetic construct
MNNNNIR

SEQ ID NO: 5931 - protein, 7 aa, synthetic construct
RSEQHHQ

SEQ ID NO: 5932 - protein, 7 aa, synthetic construct
NLRNATA

SEQ ID NO: 5933 - protein, 7 aa, synthetic construct
LKFNGDG

SEQ ID NO: 5934 - protein, 7 aa, synthetic construct
QMQTTIG

SEQ ID NO: 5935 - protein, 7 aa, synthetic construct
KPYETPL

SEQ ID NO: 5936 - protein, 7 aa, synthetic construct
HFQKAEQ

SEQ ID NO: 5937 - protein, 7 aa, synthetic construct
HHGNGHS

SEQ ID NO: 5938 - protein, 7 aa, synthetic construct
ENQHKDM

SEQ ID NO: 5939 - protein, 7 aa, synthetic construct
AFGQELH

SEQ ID NO: 5940 - protein, 7 aa, synthetic construct
REGEKQD

SEQ ID NO: 5941 - protein, 7 aa, synthetic construct
SGKFDEL

SEQ ID NO: 5942 - protein, 7 aa, synthetic construct
WRDTSPN

SEQ ID NO: 5943 - protein, 7 aa, synthetic construct
HSESGES

SEQ ID NO: 5944 - protein, 7 aa, synthetic construct
INKEIKG

SEQ ID NO: 5945 - protein, 7 aa, synthetic construct
ALPKDSN

SEQ ID NO: 5946 - protein, 7 aa, synthetic construct
STQVGAF

SEQ ID NO: 5947 - protein, 7 aa, synthetic construct
RPNEKID

SEQ ID NO: 5948 - protein, 7 aa, synthetic construct
TFKRVVE

SEQ ID NO: 5949 - protein, 7 aa, synthetic construct
LKAGHFM

SEQ ID NO: 5950 - protein, 7 aa, synthetic construct
DTKWGNE

SEQ ID NO: 5951 - protein, 7 aa, synthetic construct
ETGKMMG

SEQ ID NO: 5952 - protein, 7 aa, synthetic construct
IMAHANH

SEQ ID NO: 5953 - protein, 7 aa, synthetic construct
SNGESYT

SEQ ID NO: 5954 - protein, 7 aa, synthetic construct
WRQAERA

SEQ ID NO: 5955 - protein, 7 aa, synthetic construct
GSYDTAR

SEQ ID NO: 5956 - protein, 7 aa, synthetic construct
FADPRAT

SEQ ID NO: 5957 - protein, 7 aa, synthetic construct
QAQMQDL

SEQ ID NO: 5958 - protein, 7 aa, synthetic construct
TNNVDEI

SEQ ID NO: 5959 - protein, 7 aa, synthetic construct
ENVKSMV

SEQ ID NO: 5960 - protein, 7 aa, synthetic construct
DYHPGQR

SEQ ID NO: 5961 - protein, 7 aa, synthetic construct
KEQSANV

SEQ ID NO: 5962 - protein, 7 aa, synthetic construct
SSHVTSL

SEQ ID NO: 5963 - protein, 7 aa, synthetic construct
QNSSNTQ

SEQ ID NO: 5964 - protein, 7 aa, synthetic construct
TVNHEFM

SEQ ID NO: 5965 - protein, 7 aa, synthetic construct
NVNNLEK

SEQ ID NO: 5966 - protein, 7 aa, synthetic construct
KGNSKVE

SEQ ID NO: 5967 - protein, 7 aa, synthetic construct
EKAGQLY

SEQ ID NO: 5968 - protein, 7 aa, synthetic construct
WSASSNP

SEQ ID NO: 5969 - protein, 7 aa, synthetic construct
NLKGDDW

SEQ ID NO: 5970 - protein, 7 aa, synthetic construct
WAKGDVY

SEQ ID NO: 5971 - protein, 7 aa, synthetic construct
WATETSA

SEQ ID NO: 5972 - protein, 7 aa, synthetic construct
LLRERSY

SEQ ID NO: 5973 - protein, 7 aa, synthetic construct
RMDMDKS

SEQ ID NO: 5974 - protein, 7 aa, synthetic construct
QGMRTIH

SEQ ID NO: 5975 - protein, 7 aa, synthetic construct
FVKTGIT

SEQ ID NO: 5976 - protein, 7 aa, synthetic construct
DGIQQRD

SEQ ID NO: 5977 - protein, 7 aa, synthetic construct
KPGSLEL

SEQ ID NO: 5978 - protein, 7 aa, synthetic construct
EHASDAG

SEQ ID NO: 5979 - protein, 7 aa, synthetic construct
QTKISFG

SEQ ID NO: 5980 - protein, 7 aa, synthetic construct
MDKLGYV

SEQ ID NO: 5981 - protein, 7 aa, synthetic construct
DPVEKAR

SEQ ID NO: 5982 - protein, 7 aa, synthetic construct
NDYATQR

SEQ ID NO: 5983 - protein, 7 aa, synthetic construct
ASKSQAH

SEQ ID NO: 5984 - protein, 7 aa, synthetic construct
GVEMGHI

SEQ ID NO: 5985 - protein, 7 aa, synthetic construct
GTRHPPV

SEQ ID NO: 5986 - protein, 7 aa, synthetic construct
NQMVLQS

SEQ ID NO: 5987 - protein, 7 aa, synthetic construct
LTNPLRV

SEQ ID NO: 5988 - protein, 7 aa, synthetic construct
VQHQKYF

SEQ ID NO: 5989 - protein, 7 aa, synthetic construct
DRGFINP

SEQ ID NO: 5990 - protein, 7 aa, synthetic construct
YKKMLGE

SEQ ID NO: 5991 - protein, 7 aa, synthetic construct
FHEKNNQ

SEQ ID NO: 5992 - protein, 7 aa, synthetic construct
ALGPEAL

SEQ ID NO: 5993 - protein, 7 aa, synthetic construct
DDKWPDK

SEQ ID NO: 5994 - protein, 7 aa, synthetic construct
GIVAGYP

SEQ ID NO: 5995 - protein, 7 aa, synthetic construct
ATKPVIE

SEQ ID NO: 5996 - protein, 7 aa, synthetic construct
KDNFWAG

SEQ ID NO: 5997 - protein, 7 aa, synthetic construct
VKSEFAH

SEQ ID NO: 5998 - protein, 7 aa, synthetic construct
VMDHHMD

SEQ ID NO: 5999 - protein, 7 aa, synthetic construct
SRYNGVI

SEQ ID NO: 6000 - protein, 7 aa, synthetic construct
QQHYNGN

SEQ ID NO: 6001 - protein, 7 aa, synthetic construct
NEAQARE

SEQ ID NO: 6002 - protein, 7 aa, synthetic construct
VTREQRV

SEQ ID NO: 6003 - protein, 7 aa, synthetic construct
QFHIENE

SEQ ID NO: 6004 - protein, 7 aa, synthetic construct
KEPMANH

SEQ ID NO: 6005 - protein, 7 aa, synthetic construct
PPNPSDT

SEQ ID NO: 6006 - protein, 7 aa, synthetic construct
RDERQDR

SEQ ID NO: 6007 - protein, 7 aa, synthetic construct
QMQENRH

SEQ ID NO: 6008 - protein, 7 aa, synthetic construct
TQTPMLV

SEQ ID NO: 6009 - protein, 7 aa, synthetic construct
EREAKPE

SEQ ID NO: 6010 - protein, 7 aa, synthetic construct
DHTKGFE

SEQ ID NO: 6011 - protein, 7 aa, synthetic construct
LGLPQQE

SEQ ID NO: 6012 - protein, 7 aa, synthetic construct
EVATGSH

SEQ ID NO: 6013 - protein, 7 aa, synthetic construct
YPHKMQP

SEQ ID NO: 6014 - protein, 7 aa, synthetic construct
EQFNLRE

SEQ ID NO: 6015 - protein, 7 aa, synthetic construct
HEPTPHE

SEQ ID NO: 6016 - protein, 7 aa, synthetic construct
KTDIHQV

SEQ ID NO: 6017 - protein, 7 aa, synthetic construct
AVGQNYI

SEQ ID NO: 6018 - protein, 7 aa, synthetic construct
NTSNQMA

SEQ ID NO: 6019 - protein, 7 aa, synthetic construct
FGQPLIG

SEQ ID NO: 6020 - protein, 7 aa, synthetic construct
DLNYMAE

SEQ ID NO: 6021 - protein, 7 aa, synthetic construct
MIAPDRF

SEQ ID NO: 6022 - protein, 7 aa, synthetic construct
SSEIQAS

SEQ ID NO: 6023 - protein, 7 aa, synthetic construct
PMMRRDD

SEQ ID NO: 6024 - protein, 7 aa, synthetic construct
MQRNVQI

SEQ ID NO: 6025 - protein, 7 aa, synthetic construct
RDFVVTE

SEQ ID NO: 6026 - protein, 7 aa, synthetic construct
GDESLRL

SEQ ID NO: 6027 - protein, 7 aa, synthetic construct
HNVRSPD

SEQ ID NO: 6028 - protein, 7 aa, synthetic construct
KPSHRED

SEQ ID NO: 6029 - protein, 7 aa, synthetic construct
ATRLDDI

SEQ ID NO: 6030 - protein, 7 aa, synthetic construct
TGHDYSM

SEQ ID NO: 6031 - protein, 7 aa, synthetic construct
GIYDADK

SEQ ID NO: 6032 - protein, 7 aa, synthetic construct
HAPHYAV

SEQ ID NO: 6033 - protein, 7 aa, synthetic construct
MQEFTVQ

SEQ ID NO: 6034 - protein, 7 aa, synthetic construct
EQMSHKN

SEQ ID NO: 6035 - protein, 7 aa, synthetic construct
TQTPKQH

SEQ ID NO: 6036 - protein, 7 aa, synthetic construct
QNIGEKV

SEQ ID NO: 6037 - protein, 7 aa, synthetic construct
NDLGFKS

SEQ ID NO: 6038 - protein, 7 aa, synthetic construct
EIRDRYQ

SEQ ID NO: 6039 - protein, 7 aa, synthetic construct
YVKTDNR

SEQ ID NO: 6040 - protein, 7 aa, synthetic construct
IQNQHVQ

SEQ ID NO: 6041 - protein, 7 aa, synthetic construct
HDAQGSL

SEQ ID NO: 6042 - protein, 7 aa, synthetic construct
AGYDNVR

SEQ ID NO: 6043 - protein, 7 aa, synthetic construct
PTRDPSG

SEQ ID NO: 6044 - protein, 7 aa, synthetic construct
NEFATSA

SEQ ID NO: 6045 - protein, 7 aa, synthetic construct
AISGDKH

SEQ ID NO: 6046 - protein, 7 aa, synthetic construct
IDKMTHH

SEQ ID NO: 6047 - protein, 7 aa, synthetic construct
VYAQHHS

SEQ ID NO: 6048 - protein, 7 aa, synthetic construct
TPPQTRD

SEQ ID NO: 6049 - protein, 7 aa, synthetic construct
PVKTGFG

SEQ ID NO: 6050 - protein, 7 aa, synthetic construct
GEPNKTH

SEQ ID NO: 6051 - protein, 7 aa, synthetic construct
DNTKRAV

SEQ ID NO: 6052 - protein, 7 aa, synthetic construct
APPTQQT

SEQ ID NO: 6053 - protein, 7 aa, synthetic construct
FNEPIRP

SEQ ID NO: 6054 - protein, 7 aa, synthetic construct
QGELKMK

SEQ ID NO: 6055 - protein, 7 aa, synthetic construct
QSRETET

SEQ ID NO: 6056 - protein, 7 aa, synthetic construct
YTKYAEY

SEQ ID NO: 6057 - protein, 7 aa, synthetic construct
MDPLVHA

SEQ ID NO: 6058 - protein, 7 aa, synthetic construct
HSEAKAQ

SEQ ID NO: 6059 - protein, 7 aa, synthetic construct
AHQNNFP

SEQ ID NO: 6060 - protein, 7 aa, synthetic construct
NIHDHVL

SEQ ID NO: 6061 - protein, 7 aa, synthetic construct
TKAGEIE

SEQ ID NO: 6062 - protein, 7 aa, synthetic construct
IGPKDIQ

SEQ ID NO: 6063 - protein, 7 aa, synthetic construct
SSQRESD

SEQ ID NO: 6064 - protein, 7 aa, synthetic construct
IPQYINE

SEQ ID NO: 6065 - protein, 7 aa, synthetic construct
PQNSLGE

SEQ ID NO: 6066 - protein, 7 aa, synthetic construct
YTTEVTG

SEQ ID NO: 6067 - protein, 7 aa, synthetic construct
SMPTKGV

SEQ ID NO: 6068 - protein, 7 aa, synthetic construct
PQKDHMS

SEQ ID NO: 6069 - protein, 7 aa, synthetic construct
NASGIER

SEQ ID NO: 6070 - protein, 7 aa, synthetic construct
DQVATHT

SEQ ID NO: 6071 - protein, 7 aa, synthetic construct
AKVGVET

SEQ ID NO: 6072 - protein, 7 aa, synthetic construct
GKSEYGA

SEQ ID NO: 6073 - protein, 7 aa, synthetic construct
HAGQMMA

SEQ ID NO: 6074 - protein, 7 aa, synthetic construct
RSHMGAL

SEQ ID NO: 6075 - protein, 7 aa, synthetic construct
EKTTVMG

SEQ ID NO: 6076 - protein, 7 aa, synthetic construct
VKTGQQE

SEQ ID NO: 6077 - protein, 7 aa, synthetic construct
TQSHLSS

SEQ ID NO: 6078 - protein, 7 aa, synthetic construct
YGQFRLD

SEQ ID NO: 6079 - protein, 7 aa, synthetic construct
NRKEVVL

SEQ ID NO: 6080 - protein, 7 aa, synthetic construct
FHTAVPE

SEQ ID NO: 6081 - protein, 7 aa, synthetic construct
NKFPDEY

SEQ ID NO: 6082 - protein, 7 aa, synthetic construct
KKSPHQE

SEQ ID NO: 6083 - protein, 7 aa, synthetic construct
NKNNFQQ

SEQ ID NO: 6084 - protein, 7 aa, synthetic construct
HKPHMAT

SEQ ID NO: 6085 - protein, 7 aa, synthetic construct
TNYRESI

SEQ ID NO: 6086 - protein, 7 aa, synthetic construct
PKPISEQ

SEQ ID NO: 6087 - protein, 7 aa, synthetic construct
EKTLSQW

SEQ ID NO: 6088 - protein, 7 aa, synthetic construct
LASGTFE

SEQ ID NO: 6089 - protein, 7 aa, synthetic construct
NHQQKDM

SEQ ID NO: 6090 - protein, 7 aa, synthetic construct
KSSLSVE

SEQ ID NO: 6091 - protein, 7 aa, synthetic construct
PFREQGY

SEQ ID NO: 6092 - protein, 7 aa, synthetic construct
DVQSNNL

SEQ ID NO: 6093 - protein, 7 aa, synthetic construct
KDDSTIF

SEQ ID NO: 6094 - protein, 7 aa, synthetic construct
VTNIGQE

SEQ ID NO: 6095 - protein, 7 aa, synthetic construct
PNRDMNY

SEQ ID NO: 6096 - protein, 7 aa, synthetic construct
LDHKHYA

SEQ ID NO: 6097 - protein, 7 aa, synthetic construct
TMGSFSE

SEQ ID NO: 6098 - protein, 7 aa, synthetic construct
VSPMNKI

SEQ ID NO: 6099 - protein, 7 aa, synthetic construct
TVAKLNM

SEQ ID NO: 6100 - protein, 7 aa, synthetic construct
IGETKHS

SEQ ID NO: 6101 - protein, 7 aa, synthetic construct
KLSTFPA

SEQ ID NO: 6102 - protein, 7 aa, synthetic construct
KSDNSAY

SEQ ID NO: 6103 - protein, 7 aa, synthetic construct
APDKSDA

SEQ ID NO: 6104 - protein, 7 aa, synthetic construct
AHHEPDD

SEQ ID NO: 6105 - protein, 7 aa, synthetic construct
KSMSHTE

SEQ ID NO: 6106 - protein, 7 aa, synthetic construct
QESLDQR

SEQ ID NO: 6107 - protein, 7 aa, synthetic construct
YETGVIA

SEQ ID NO: 6108 - protein, 7 aa, synthetic construct
RHTIADA

SEQ ID NO: 6109 - protein, 7 aa, synthetic construct
TQPSGII

SEQ ID NO: 6110 - protein, 7 aa, synthetic construct
DLMKPNK

SEQ ID NO: 6111 - protein, 7 aa, synthetic construct
AGNSPGI

SEQ ID NO: 6112 - protein, 7 aa, synthetic construct
SVPGHVI

SEQ ID NO: 6113 - protein, 7 aa, synthetic construct
ESKATSD

SEQ ID NO: 6114 - protein, 7 aa, synthetic construct
ERHPGDE

SEQ ID NO: 6115 - protein, 7 aa, synthetic construct
TTYKDEA

SEQ ID NO: 6116 - protein, 7 aa, synthetic construct
SQFMVTE

SEQ ID NO: 6117 - protein, 7 aa, synthetic construct
MPPMHHQ

SEQ ID NO: 6118 - protein, 7 aa, synthetic construct
VRTPESM

SEQ ID NO: 6119 - protein, 7 aa, synthetic construct
TAKKDFS

SEQ ID NO: 6120 - protein, 7 aa, synthetic construct
EFNGKIN

SEQ ID NO: 6121 - protein, 7 aa, synthetic construct
ARDTMQT

SEQ ID NO: 6122 - protein, 7 aa, synthetic construct
DELNRTA

SEQ ID NO: 6123 - protein, 7 aa, synthetic construct
SYPPATQ

SEQ ID NO: 6124 - protein, 7 aa, synthetic construct
IDHNQLP

SEQ ID NO: 6125 - protein, 7 aa, synthetic construct
HKEVHLQ

SEQ ID NO: 6126 - protein, 7 aa, synthetic construct
ISKVNDH

SEQ ID NO: 6127 - protein, 7 aa, synthetic construct
CAGCPIG

SEQ ID NO: 6128 - protein, 7 aa, synthetic construct
AGKYAPA

SEQ ID NO: 6129 - protein, 7 aa, synthetic construct
VFQHNSP

SEQ ID NO: 6130 - protein, 7 aa, synthetic construct
PLIQHQS

SEQ ID NO: 6131 - protein, 7 aa, synthetic construct
KPDIQNF

SEQ ID NO: 6132 - protein, 7 aa, synthetic construct
PALKDMA

SEQ ID NO: 6133 - protein, 7 aa, synthetic construct
MVQGEQF

SEQ ID NO: 6134 - protein, 7 aa, synthetic construct
QQHYNAV

SEQ ID NO: 6135 - protein, 7 aa, synthetic construct
QRTVEQT

SEQ ID NO: 6136 - protein, 7 aa, synthetic construct
TRIGMDP

SEQ ID NO: 6137 - protein, 7 aa, synthetic construct
EISKVHP

SEQ ID NO: 6138 - protein, 7 aa, synthetic construct
YSKSDTQ

SEQ ID NO: 6139 - protein, 7 aa, synthetic construct
LRTATLP

SEQ ID NO: 6140 - protein, 7 aa, synthetic construct
RDPSHEI

SEQ ID NO: 6141 - protein, 7 aa, synthetic construct
EPKAEQD

SEQ ID NO: 6142 - protein, 7 aa, synthetic construct
RMQELQT

SEQ ID NO: 6143 - protein, 7 aa, synthetic construct
IRVPVQG

SEQ ID NO: 6144 - protein, 7 aa, synthetic construct
ITASKIF

SEQ ID NO: 6145 - protein, 7 aa, synthetic construct
VKQEFNL

SEQ ID NO: 6146 - protein, 7 aa, synthetic construct
FISEAKS

SEQ ID NO: 6147 - protein, 7 aa, synthetic construct
QNVIERM

SEQ ID NO: 6148 - protein, 7 aa, synthetic construct
NSAPSAL

SEQ ID NO: 6149 - protein, 7 aa, synthetic construct
KLAGYGT

SEQ ID NO: 6150 - protein, 7 aa, synthetic construct
RAMDDNK

SEQ ID NO: 6151 - protein, 7 aa, synthetic construct
AYGKSVH

SEQ ID NO: 6152 - protein, 7 aa, synthetic construct
SKDHGGM

SEQ ID NO: 6153 - protein, 7 aa, synthetic construct
VDGNRLV

SEQ ID NO: 6154 - protein, 7 aa, synthetic construct
GASVGGN

SEQ ID NO: 6155 - protein, 7 aa, synthetic construct
AQNILRD

SEQ ID NO: 6156 - protein, 7 aa, synthetic construct
MPNVHHV

SEQ ID NO: 6157 - protein, 7 aa, synthetic construct
AGNGKQW

SEQ ID NO: 6158 - protein, 7 aa, synthetic construct
QHAQLPS

SEQ ID NO: 6159 - protein, 7 aa, synthetic construct
GRDFTSG

SEQ ID NO: 6160 - protein, 7 aa, synthetic construct
RMTDETS

SEQ ID NO: 6161 - protein, 7 aa, synthetic construct
PGEMAMK

SEQ ID NO: 6162 - protein, 7 aa, synthetic construct
RHESQDM

SEQ ID NO: 6163 - protein, 7 aa, synthetic construct
PQKLEDD

SEQ ID NO: 6164 - protein, 7 aa, synthetic construct
FITHEGA

SEQ ID NO: 6165 - protein, 7 aa, synthetic construct
QPYHQHA

SEQ ID NO: 6166 - protein, 7 aa, synthetic construct
TTQYRDA

SEQ ID NO: 6167 - protein, 7 aa, synthetic construct
VNYDNPK

SEQ ID NO: 6168 - protein, 7 aa, synthetic construct
LNSDKMN

SEQ ID NO: 6169 - protein, 7 aa, synthetic construct
RTKGITD

SEQ ID NO: 6170 - protein, 7 aa, synthetic construct
SRTEPMF

SEQ ID NO: 6171 - protein, 7 aa, synthetic construct
GYDAEKN

SEQ ID NO: 6172 - protein, 7 aa, synthetic construct
EFHTIRD

SEQ ID NO: 6173 - protein, 7 aa, synthetic construct
TGMNIES

SEQ ID NO: 6174 - protein, 7 aa, synthetic construct
HAMAHIA

SEQ ID NO: 6175 - protein, 7 aa, synthetic construct
IRKYEME

SEQ ID NO: 6176 - protein, 7 aa, synthetic construct
FNAGEQS

SEQ ID NO: 6177 - protein, 7 aa, synthetic construct
AAMIHKE

SEQ ID NO: 6178 - protein, 7 aa, synthetic construct
QQQMRTN

SEQ ID NO: 6179 - protein, 7 aa, synthetic construct
PSASTNH

SEQ ID NO: 6180 - protein, 7 aa, synthetic construct
YYTDQTE

SEQ ID NO: 6181 - protein, 7 aa, synthetic construct
SETVAAR

SEQ ID NO: 6182 - protein, 7 aa, synthetic construct
VIAGAMA

SEQ ID NO: 6183 - protein, 7 aa, synthetic construct
KGEIMVQ

SEQ ID NO: 6184 - protein, 7 aa, synthetic construct
YKENYRM

SEQ ID NO: 6185 - protein, 7 aa, synthetic construct
NVISPKK

SEQ ID NO: 6186 - protein, 7 aa, synthetic construct
ASNGDIS

SEQ ID NO: 6187 - protein, 7 aa, synthetic construct
PDTVSGS

SEQ ID NO: 6188 - protein, 7 aa, synthetic construct
DRDDLHR

SEQ ID NO: 6189 - protein, 7 aa, synthetic construct
EPHTHGA

SEQ ID NO: 6190 - protein, 7 aa, synthetic construct
GASIMQV

SEQ ID NO: 6191 - protein, 7 aa, synthetic construct
KLINLHG

SEQ ID NO: 6192 - protein, 7 aa, synthetic construct
IYSHAVP

SEQ ID NO: 6193 - protein, 7 aa, synthetic construct
GGQPDER

SEQ ID NO: 6194 - protein, 7 aa, synthetic construct
GWTEHHP

SEQ ID NO: 6195 - protein, 7 aa, synthetic construct
ISTHKPY

SEQ ID NO: 6196 - protein, 7 aa, synthetic construct
INNQAGK

SEQ ID NO: 6197 - protein, 7 aa, synthetic construct
SGEHTPL

SEQ ID NO: 6198 - protein, 7 aa, synthetic construct
QNKEPNV

SEQ ID NO: 6199 - protein, 7 aa, synthetic construct
AWQAGTK

SEQ ID NO: 6200 - protein, 7 aa, synthetic construct
RLAGHKE

SEQ ID NO: 6201 - protein, 7 aa, synthetic construct
IYPKTDA

SEQ ID NO: 6202 - protein, 7 aa, synthetic construct
HDQKYEA

SEQ ID NO: 6203 - protein, 7 aa, synthetic construct
SRGIMTA

SEQ ID NO: 6204 - protein, 7 aa, synthetic construct
HPIRQTI

SEQ ID NO: 6205 - protein, 7 aa, synthetic construct
TSESKSM

SEQ ID NO: 6206 - protein, 7 aa, synthetic construct
VKVNEDL

SEQ ID NO: 6207 - protein, 7 aa, synthetic construct
GNNHEKN

SEQ ID NO: 6208 - protein, 7 aa, synthetic construct
LKQEFEV

SEQ ID NO: 6209 - protein, 7 aa, synthetic construct
KEWSKEP

SEQ ID NO: 6210 - protein, 7 aa, synthetic construct
NRGDTQH

SEQ ID NO: 6211 - protein, 7 aa, synthetic construct
PEYATAG

SEQ ID NO: 6212 - protein, 7 aa, synthetic construct
HSHTPLA

SEQ ID NO: 6213 - protein, 7 aa, synthetic construct
SLANAGE

SEQ ID NO: 6214 - protein, 7 aa, synthetic construct
MANMERK

SEQ ID NO: 6215 - protein, 7 aa, synthetic construct
KGFPSVE

SEQ ID NO: 6216 - protein, 7 aa, synthetic construct
QAGSSMF

SEQ ID NO: 6217 - protein, 7 aa, synthetic construct
FNAHGSH

SEQ ID NO: 6218 - protein, 7 aa, synthetic construct
LFHSKQP

SEQ ID NO: 6219 - protein, 7 aa, synthetic construct
STASSFI

SEQ ID NO: 6220 - protein, 7 aa, synthetic construct
IWQDTNA

SEQ ID NO: 6221 - protein, 7 aa, synthetic construct
ITSQRDD

SEQ ID NO: 6222 - protein, 7 aa, synthetic construct
EFPANRP

SEQ ID NO: 6223 - protein, 7 aa, synthetic construct
RNGSPSY

SEQ ID NO: 6224 - protein, 7 aa, synthetic construct
INSARGD

SEQ ID NO: 6225 - protein, 7 aa, synthetic construct
KINTGSM

SEQ ID NO: 6226 - protein, 7 aa, synthetic construct
NQAFETV

SEQ ID NO: 6227 - protein, 7 aa, synthetic construct
YARNYID

SEQ ID NO: 6228 - protein, 7 aa, synthetic construct
KSEKNNQ

SEQ ID NO: 6229 - protein, 7 aa, synthetic construct
YIQSTEN

SEQ ID NO: 6230 - protein, 7 aa, synthetic construct
GHFETNL

SEQ ID NO: 6231 - protein, 7 aa, synthetic construct
MVHNEIV

SEQ ID NO: 6232 - protein, 7 aa, synthetic construct
NMASIDM

SEQ ID NO: 6233 - protein, 7 aa, synthetic construct
SARTQGW

SEQ ID NO: 6234 - protein, 7 aa, synthetic construct
TEKMFQD

SEQ ID NO: 6235 - protein, 7 aa, synthetic construct
QFQHSER

SEQ ID NO: 6236 - protein, 7 aa, synthetic construct
GYKSMDF

SEQ ID NO: 6237 - protein, 7 aa, synthetic construct
SRNEGDL

SEQ ID NO: 6238 - protein, 7 aa, synthetic construct
QHQVQKQ

SEQ ID NO: 6239 - protein, 7 aa, synthetic construct
VIGNAKF

SEQ ID NO: 6240 - protein, 7 aa, synthetic construct
SVQPPKI

SEQ ID NO: 6241 - protein, 7 aa, synthetic construct
GPPFNDG

SEQ ID NO: 6242 - protein, 7 aa, synthetic construct
TKQLEQD

SEQ ID NO: 6243 - protein, 7 aa, synthetic construct
HTYKPSP

SEQ ID NO: 6244 - protein, 7 aa, synthetic construct
SKMDLYD

SEQ ID NO: 6245 - protein, 7 aa, synthetic construct
RENFVNN

SEQ ID NO: 6246 - protein, 7 aa, synthetic construct
AANMNPL

SEQ ID NO: 6247 - protein, 7 aa, synthetic construct
NDNTNKN

SEQ ID NO: 6248 - protein, 7 aa, synthetic construct
EMNSSPG

SEQ ID NO: 6249 - protein, 7 aa, synthetic construct
MMPRPKE

SEQ ID NO: 6250 - protein, 7 aa, synthetic construct
ASPARNA

SEQ ID NO: 6251 - protein, 7 aa, synthetic construct
PTNVDYH

SEQ ID NO: 6252 - protein, 7 aa, synthetic construct
KDFDYAE

SEQ ID NO: 6253 - protein, 7 aa, synthetic construct
HQETKPN

SEQ ID NO: 6254 - protein, 7 aa, synthetic construct
QYQIVDE

SEQ ID NO: 6255 - protein, 7 aa, synthetic construct
GVKEVDS

SEQ ID NO: 6256 - protein, 7 aa, synthetic construct
ADTSTVS

SEQ ID NO: 6257 - protein, 7 aa, synthetic construct
SNYTPKS

SEQ ID NO: 6258 - protein, 7 aa, synthetic construct
GFSNVHD

SEQ ID NO: 6259 - protein, 7 aa, synthetic construct
TQPHEEF

SEQ ID NO: 6260 - protein, 7 aa, synthetic construct
KVGNVHT

SEQ ID NO: 6261 - protein, 7 aa, synthetic construct
LSTHSND

SEQ ID NO: 6262 - protein, 7 aa, synthetic construct
MKDNLNN

SEQ ID NO: 6263 - protein, 7 aa, synthetic construct
WPNNESM

SEQ ID NO: 6264 - protein, 7 aa, synthetic construct
EGNTQKP

SEQ ID NO: 6265 - protein, 7 aa, synthetic construct
IQGTNIL

SEQ ID NO: 6266 - protein, 7 aa, synthetic construct
YPPRDVI

SEQ ID NO: 6267 - protein, 7 aa, synthetic construct
GIREMYT

SEQ ID NO: 6268 - protein, 7 aa, synthetic construct
WLGASAG

SEQ ID NO: 6269 - protein, 7 aa, synthetic construct
VTKFIEG

SEQ ID NO: 6270 - protein, 7 aa, synthetic construct
KVDAYPT

SEQ ID NO: 6271 - protein, 7 aa, synthetic construct
FVKPNLE

SEQ ID NO: 6272 - protein, 7 aa, synthetic construct
TVPENIK

SEQ ID NO: 6273 - protein, 7 aa, synthetic construct
VYKHIAE

SEQ ID NO: 6274 - protein, 7 aa, synthetic construct
QKNFADH

SEQ ID NO: 6275 - protein, 7 aa, synthetic construct
GNADDTK

SEQ ID NO: 6276 - protein, 7 aa, synthetic construct
YQEGGSA

SEQ ID NO: 6277 - protein, 7 aa, synthetic construct
DKNISRY

SEQ ID NO: 6278 - protein, 7 aa, synthetic construct
LSSGFSH

SEQ ID NO: 6279 - protein, 7 aa, synthetic construct
QTFQPNP

SEQ ID NO: 6280 - protein, 7 aa, synthetic construct
FQNNSSF

SEQ ID NO: 6281 - protein, 7 aa, synthetic construct
YSKHMEP

SEQ ID NO: 6282 - protein, 7 aa, synthetic construct
LWKEMQS

SEQ ID NO: 6283 - protein, 7 aa, synthetic construct
VSEVYGM

SEQ ID NO: 6284 - protein, 7 aa, synthetic construct
TMRYDDD

SEQ ID NO: 6285 - protein, 7 aa, synthetic construct
YTMTKVA

SEQ ID NO: 6286 - protein, 7 aa, synthetic construct
PQRNIGM

SEQ ID NO: 6287 - protein, 7 aa, synthetic construct
DQVTTHT

SEQ ID NO: 6288 - protein, 7 aa, synthetic construct
ANEPYHA

SEQ ID NO: 6289 - protein, 7 aa, synthetic construct
LTQQVRN

SEQ ID NO: 6290 - protein, 7 aa, synthetic construct
LQTEANH

SEQ ID NO: 6291 - protein, 7 aa, synthetic construct
THEDRYT

SEQ ID NO: 6292 - protein, 7 aa, synthetic construct
GHTTGAE

SEQ ID NO: 6293 - protein, 7 aa, synthetic construct
QGRGNEN

SEQ ID NO: 6294 - protein, 7 aa, synthetic construct
SIGIGDF

SEQ ID NO: 6295 - protein, 7 aa, synthetic construct
RAYENSY

SEQ ID NO: 6296 - protein, 7 aa, synthetic construct
MVNASMH

SEQ ID NO: 6297 - protein, 7 aa, synthetic construct
FKEITTP

SEQ ID NO: 6298 - protein, 7 aa, synthetic construct
QAGDGKD

SEQ ID NO: 6299 - protein, 7 aa, synthetic construct
VIGEFHK

SEQ ID NO: 6300 - protein, 7 aa, synthetic construct
NKPYPAN

SEQ ID NO: 6301 - protein, 7 aa, synthetic construct
LQRKEML

SEQ ID NO: 6302 - protein, 7 aa, synthetic construct
YEHMGTI

SEQ ID NO: 6303 - protein, 7 aa, synthetic construct
HSQDNSM

SEQ ID NO: 6304 - protein, 7 aa, synthetic construct
LIVHKTA

SEQ ID NO: 6305 - protein, 7 aa, synthetic construct
EPPFATR

SEQ ID NO: 6306 - protein, 7 aa, synthetic construct
QYHQQGH

SEQ ID NO: 6307 - protein, 7 aa, synthetic construct
DQRDKLN

SEQ ID NO: 6308 - protein, 7 aa, synthetic construct
RETVMSA

SEQ ID NO: 6309 - protein, 7 aa, synthetic construct
MMNGQYG

SEQ ID NO: 6310 - protein, 7 aa, synthetic construct
KDLAQKE

SEQ ID NO: 6311 - protein, 7 aa, synthetic construct
SGMKDFV

SEQ ID NO: 6312 - protein, 7 aa, synthetic construct
YIHGSHE

SEQ ID NO: 6313 - protein, 7 aa, synthetic construct
EYKFAEA

SEQ ID NO: 6314 - protein, 7 aa, synthetic construct
AISGNQM

SEQ ID NO: 6315 - protein, 7 aa, synthetic construct
AMNTSLD

SEQ ID NO: 6316 - protein, 7 aa, synthetic construct
NATRLNY

SEQ ID NO: 6317 - protein, 7 aa, synthetic construct
SNQLGRN

SEQ ID NO: 6318 - protein, 7 aa, synthetic construct
SNYSGPE

SEQ ID NO: 6319 - protein, 7 aa, synthetic construct
MGVNMGK

SEQ ID NO: 6320 - protein, 7 aa, synthetic construct
NGGFNVG

SEQ ID NO: 6321 - protein, 7 aa, synthetic construct
LEDKWKH

SEQ ID NO: 6322 - protein, 7 aa, synthetic construct
ADAYTGK

SEQ ID NO: 6323 - protein, 7 aa, synthetic construct
WNPTAPE

SEQ ID NO: 6324 - protein, 7 aa, synthetic construct
VDTTNKY

SEQ ID NO: 6325 - protein, 7 aa, synthetic construct
DDGAQMM

SEQ ID NO: 6326 - protein, 7 aa, synthetic construct
LDRNFQS

SEQ ID NO: 6327 - protein, 7 aa, synthetic construct
MDGHLKP

SEQ ID NO: 6328 - protein, 7 aa, synthetic construct
TVQEAPH

SEQ ID NO: 6329 - protein, 7 aa, synthetic construct
TPYSPLT

SEQ ID NO: 6330 - protein, 7 aa, synthetic construct
RLQDDYG

SEQ ID NO: 6331 - protein, 7 aa, synthetic construct
QFEGQHL

SEQ ID NO: 6332 - protein, 7 aa, synthetic construct
LSMSERM

SEQ ID NO: 6333 - protein, 7 aa, synthetic construct
DSISTYA

SEQ ID NO: 6334 - protein, 7 aa, synthetic construct
MDQAVQR

SEQ ID NO: 6335 - protein, 7 aa, synthetic construct
GQGTALQ

SEQ ID NO: 6336 - protein, 7 aa, synthetic construct
PTNRTFS

SEQ ID NO: 6337 - protein, 7 aa, synthetic construct
SPPDREN

SEQ ID NO: 6338 - protein, 7 aa, synthetic construct
FRPIDDN

SEQ ID NO: 6339 - protein, 7 aa, synthetic construct
GVYVGKS

SEQ ID NO: 6340 - protein, 7 aa, synthetic construct
GGDTRYI

SEQ ID NO: 6341 - protein, 7 aa, synthetic construct
SAFMRGD

SEQ ID NO: 6342 - protein, 7 aa, synthetic construct
IWADNDR

SEQ ID NO: 6343 - protein, 7 aa, synthetic construct
AEHSHNK

SEQ ID NO: 6344 - protein, 7 aa, synthetic construct
ATETKVF

SEQ ID NO: 6345 - protein, 7 aa, synthetic construct
YAVDPHP

SEQ ID NO: 6346 - protein, 7 aa, synthetic construct
KATTWQD

SEQ ID NO: 6347 - protein, 7 aa, synthetic construct
VHHNDNH

SEQ ID NO: 6348 - protein, 7 aa, synthetic construct
APITAVG

SEQ ID NO: 6349 - protein, 7 aa, synthetic construct
WPQKSEP

SEQ ID NO: 6350 - protein, 7 aa, synthetic construct
PVGPSTF

SEQ ID NO: 6351 - protein, 7 aa, synthetic construct
YQHENNT

SEQ ID NO: 6352 - protein, 7 aa, synthetic construct
VSGVQGP

SEQ ID NO: 6353 - protein, 7 aa, synthetic construct
YHGPSSF

SEQ ID NO: 6354 - protein, 7 aa, synthetic construct
QAMGSSP

SEQ ID NO: 6355 - protein, 7 aa, synthetic construct
PWKQSTG

SEQ ID NO: 6356 - protein, 7 aa, synthetic construct
MVTTEGT

SEQ ID NO: 6357 - protein, 7 aa, synthetic construct
KHNHPAS

SEQ ID NO: 6358 - protein, 7 aa, synthetic construct
HEPFDMV

SEQ ID NO: 6359 - protein, 7 aa, synthetic construct
MPLDKRG

SEQ ID NO: 6360 - protein, 7 aa, synthetic construct
RQNTSPF

SEQ ID NO: 6361 - protein, 7 aa, synthetic construct
IGMQQDP

SEQ ID NO: 6362 - protein, 7 aa, synthetic construct
TTPNLNR

SEQ ID NO: 6363 - protein, 7 aa, synthetic construct
TYQKPGL

SEQ ID NO: 6364 - protein, 7 aa, synthetic construct
LYALNEA

SEQ ID NO: 6365 - protein, 7 aa, synthetic construct
DPIHVAA

SEQ ID NO: 6366 - protein, 7 aa, synthetic construct
GVSTGMA

SEQ ID NO: 6367 - protein, 7 aa, synthetic construct
WPPNGMD

SEQ ID NO: 6368 - protein, 7 aa, synthetic construct
GEAKYEG

SEQ ID NO: 6369 - protein, 7 aa, synthetic construct
ATVGWPA

SEQ ID NO: 6370 - protein, 7 aa, synthetic construct
FGHNAYE

SEQ ID NO: 6371 - protein, 7 aa, synthetic construct
KAIPDEY

SEQ ID NO: 6372 - protein, 7 aa, synthetic construct
TNFHNAV

SEQ ID NO: 6373 - protein, 7 aa, synthetic construct
PIGQNAV

SEQ ID NO: 6374 - protein, 7 aa, synthetic construct
STQHDGA

SEQ ID NO: 6375 - protein, 7 aa, synthetic construct
QVAHDHT

SEQ ID NO: 6376 - protein, 7 aa, synthetic construct
DITKIRN

SEQ ID NO: 6377 - protein, 7 aa, synthetic construct
RSEKVHE

SEQ ID NO: 6378 - protein, 7 aa, synthetic construct
FKPESHA

SEQ ID NO: 6379 - protein, 7 aa, synthetic construct
VERPAEN

SEQ ID NO: 6380 - protein, 7 aa, synthetic construct
EPGRLTH

SEQ ID NO: 6381 - protein, 7 aa, synthetic construct
EKIRTSQ

SEQ ID NO: 6382 - protein, 7 aa, synthetic construct
DVEHIRP

SEQ ID NO: 6383 - protein, 7 aa, synthetic construct
GYAVSTM

SEQ ID NO: 6384 - protein, 7 aa, synthetic construct
IMDARHL

SEQ ID NO: 6385 - protein, 7 aa, synthetic construct
HGMSAIP

SEQ ID NO: 6386 - protein, 7 aa, synthetic construct
VTASNKI

SEQ ID NO: 6387 - protein, 7 aa, synthetic construct
RLKAESQ

SEQ ID NO: 6388 - protein, 7 aa, synthetic construct
MGEVPMN

SEQ ID NO: 6389 - protein, 7 aa, synthetic construct
PPMNDQP

SEQ ID NO: 6390 - protein, 7 aa, synthetic construct
NDTHNHH

SEQ ID NO: 6391 - protein, 7 aa, synthetic construct
LAKPTHE

SEQ ID NO: 6392 - protein, 7 aa, synthetic construct
MQANVIT

SEQ ID NO: 6393 - protein, 7 aa, synthetic construct
VRNSPEG

SEQ ID NO: 6394 - protein, 7 aa, synthetic construct
THFAETV

SEQ ID NO: 6395 - protein, 7 aa, synthetic construct
VAGAEDS

SEQ ID NO: 6396 - protein, 7 aa, synthetic construct
IGVVQKF

SEQ ID NO: 6397 - protein, 7 aa, synthetic construct
RLPQPAQ

SEQ ID NO: 6398 - protein, 7 aa, synthetic construct
IVVHEPR

SEQ ID NO: 6399 - protein, 7 aa, synthetic construct
FDRAAKM

SEQ ID NO: 6400 - protein, 7 aa, synthetic construct
EVEKQFS

SEQ ID NO: 6401 - protein, 7 aa, synthetic construct
PNPNVLI

SEQ ID NO: 6402 - protein, 7 aa, synthetic construct
ERHYDED

SEQ ID NO: 6403 - protein, 7 aa, synthetic construct
HSVSPGA

SEQ ID NO: 6404 - protein, 7 aa, synthetic construct
KMHTAGV

SEQ ID NO: 6405 - protein, 7 aa, synthetic construct
QTEQKWV

SEQ ID NO: 6406 - protein, 7 aa, synthetic construct
HIKRQEP

SEQ ID NO: 6407 - protein, 7 aa, synthetic construct
TFRLEKS

SEQ ID NO: 6408 - protein, 7 aa, synthetic construct
GYDANGL

SEQ ID NO: 6409 - protein, 7 aa, synthetic construct
AVNDYQR

SEQ ID NO: 6410 - protein, 7 aa, synthetic construct
RVAEGFV

SEQ ID NO: 6411 - protein, 7 aa, synthetic construct
YMEANAS

SEQ ID NO: 6412 - protein, 7 aa, synthetic construct
FKPLMQS

SEQ ID NO: 6413 - protein, 7 aa, synthetic construct
TQRVMEA

SEQ ID NO: 6414 - protein, 7 aa, synthetic construct
RDTPAYF

SEQ ID NO: 6415 - protein, 7 aa, synthetic construct
GIYAERE

SEQ ID NO: 6416 - protein, 7 aa, synthetic construct
VQQSGHA

SEQ ID NO: 6417 - protein, 7 aa, synthetic construct
QFQNKHE

SEQ ID NO: 6418 - protein, 7 aa, synthetic construct
DYDGAVA

SEQ ID NO: 6419 - protein, 7 aa, synthetic construct
NKDPWPT

SEQ ID NO: 6420 - protein, 7 aa, synthetic construct
IRNMMDA

SEQ ID NO: 6421 - protein, 7 aa, synthetic construct
RGQSADR

SEQ ID NO: 6422 - protein, 7 aa, synthetic construct
LQNVHDK

SEQ ID NO: 6423 - protein, 7 aa, synthetic construct
WTDIGTG

SEQ ID NO: 6424 - protein, 7 aa, synthetic construct
KSDHGKT

SEQ ID NO: 6425 - protein, 7 aa, synthetic construct
DGYTARL

SEQ ID NO: 6426 - protein, 7 aa, synthetic construct
LSDKGSG

SEQ ID NO: 6427 - protein, 7 aa, synthetic construct
EKDMSKH

SEQ ID NO: 6428 - protein, 7 aa, synthetic construct
ITVETKP

SEQ ID NO: 6429 - protein, 7 aa, synthetic construct
KPRLEMA

SEQ ID NO: 6430 - protein, 7 aa, synthetic construct
GVHSTGV

SEQ ID NO: 6431 - protein, 7 aa, synthetic construct
VPVMDSS

SEQ ID NO: 6432 - protein, 7 aa, synthetic construct
ITMVQGN

SEQ ID NO: 6433 - protein, 7 aa, synthetic construct
HETHLVK

SEQ ID NO: 6434 - protein, 7 aa, synthetic construct
SAANIQK

SEQ ID NO: 6435 - protein, 7 aa, synthetic construct
FETTKNA

SEQ ID NO: 6436 - protein, 7 aa, synthetic construct
QTAHTNY

SEQ ID NO: 6437 - protein, 7 aa, synthetic construct
VKIGDVY

SEQ ID NO: 6438 - protein, 7 aa, synthetic construct
RSPPPLT

SEQ ID NO: 6439 - protein, 7 aa, synthetic construct
QANRIQL

SEQ ID NO: 6440 - protein, 7 aa, synthetic construct
YMEHSAI

SEQ ID NO: 6441 - protein, 7 aa, synthetic construct
VAIPSAA

SEQ ID NO: 6442 - protein, 7 aa, synthetic construct
ASHADIL

SEQ ID NO: 6443 - protein, 7 aa, synthetic construct
VHKIGQL

SEQ ID NO: 6444 - protein, 7 aa, synthetic construct
YQGVRMT

SEQ ID NO: 6445 - protein, 7 aa, synthetic construct
VDNVAFV

SEQ ID NO: 6446 - protein, 7 aa, synthetic construct
SQDRSVS

SEQ ID NO: 6447 - protein, 7 aa, synthetic construct
ERLGLKV

SEQ ID NO: 6448 - protein, 7 aa, synthetic construct
KDQENNY

SEQ ID NO: 6449 - protein, 7 aa, synthetic construct
ERIGHLS

SEQ ID NO: 6450 - protein, 7 aa, synthetic construct
YSHEIQH

SEQ ID NO: 6451 - protein, 7 aa, synthetic construct
AGIKIVH

SEQ ID NO: 6452 - protein, 7 aa, synthetic construct
IEKKAEH

SEQ ID NO: 6453 - protein, 7 aa, synthetic construct
NYRSTEQ

SEQ ID NO: 6454 - protein, 7 aa, synthetic construct
FEMQPRP

SEQ ID NO: 6455 - protein, 7 aa, synthetic construct
EPSEYAA

SEQ ID NO: 6456 - protein, 7 aa, synthetic construct
EEQTHGP

SEQ ID NO: 6457 - protein, 7 aa, synthetic construct
NSHMKYV

SEQ ID NO: 6458 - protein, 7 aa, synthetic construct
FSPSATF

SEQ ID NO: 6459 - protein, 7 aa, synthetic construct
GLQAPGY

SEQ ID NO: 6460 - protein, 7 aa, synthetic construct
GIYPGND

SEQ ID NO: 6461 - protein, 7 aa, synthetic construct
GWKKEHE

SEQ ID NO: 6462 - protein, 7 aa, synthetic construct
ASQGERT

SEQ ID NO: 6463 - protein, 7 aa, synthetic construct
GEHRAVN

SEQ ID NO: 6464 - protein, 7 aa, synthetic construct
MLNLVEG

SEQ ID NO: 6465 - protein, 7 aa, synthetic construct
LFKNVNT

SEQ ID NO: 6466 - protein, 7 aa, synthetic construct
NGFPTLP

SEQ ID NO: 6467 - protein, 7 aa, synthetic construct
STKPQDH

SEQ ID NO: 6468 - protein, 7 aa, synthetic construct
HRGSLLS

SEQ ID NO: 6469 - protein, 7 aa, synthetic construct
ASLPSPG

SEQ ID NO: 6470 - protein, 7 aa, synthetic construct
RSHSGDW

SEQ ID NO: 6471 - protein, 7 aa, synthetic construct
FGQDGQA

SEQ ID NO: 6472 - protein, 7 aa, synthetic construct
KETFNER

SEQ ID NO: 6473 - protein, 7 aa, synthetic construct
HQDDPAW

SEQ ID NO: 6474 - protein, 7 aa, synthetic construct
NQPEAFM

SEQ ID NO: 6475 - protein, 7 aa, synthetic construct
HYSDEKI

SEQ ID NO: 6476 - protein, 7 aa, synthetic construct
YYETDSM

SEQ ID NO: 6477 - protein, 7 aa, synthetic construct
EKFAHHM

SEQ ID NO: 6478 - protein, 7 aa, synthetic construct
LHVQQRG

SEQ ID NO: 6479 - protein, 7 aa, synthetic construct
KYSAVDL

SEQ ID NO: 6480 - protein, 7 aa, synthetic construct
HNLQDGD

SEQ ID NO: 6481 - protein, 7 aa, synthetic construct
VDAPKGP

SEQ ID NO: 6482 - protein, 7 aa, synthetic construct
HAYIKLE

SEQ ID NO: 6483 - protein, 7 aa, synthetic construct
GQTESRW

SEQ ID NO: 6484 - protein, 7 aa, synthetic construct
HKDDSGG

SEQ ID NO: 6485 - protein, 7 aa, synthetic construct
NKHMTEE

SEQ ID NO: 6486 - protein, 7 aa, synthetic construct
YDPTHME

SEQ ID NO: 6487 - protein, 7 aa, synthetic construct
TPEKKSD

SEQ ID NO: 6488 - protein, 7 aa, synthetic construct
ITEGKVH

SEQ ID NO: 6489 - protein, 7 aa, synthetic construct
VANQEMP

SEQ ID NO: 6490 - protein, 7 aa, synthetic construct
AKEHDTY

SEQ ID NO: 6491 - protein, 7 aa, synthetic construct
NDRHMDT

SEQ ID NO: 6492 - protein, 7 aa, synthetic construct
TDKDWKE

SEQ ID NO: 6493 - protein, 7 aa, synthetic construct
SNNTISQ

SEQ ID NO: 6494 - protein, 7 aa, synthetic construct
MQEHHPV

SEQ ID NO: 6495 - protein, 7 aa, synthetic construct
TTGMPLT

SEQ ID NO: 6496 - protein, 7 aa, synthetic construct
WAGESDM

SEQ ID NO: 6497 - protein, 7 aa, synthetic construct
QPRPNAS

SEQ ID NO: 6498 - protein, 7 aa, synthetic construct
WDLKMDS

SEQ ID NO: 6499 - protein, 7 aa, synthetic construct
DRPHQEF

SEQ ID NO: 6500 - protein, 7 aa, synthetic construct
FEVNNPG

SEQ ID NO: 6501 - protein, 7 aa, synthetic construct
VRQNKDQ

SEQ ID NO: 6502 - protein, 7 aa, synthetic construct
GHSIAYD

SEQ ID NO: 6503 - protein, 7 aa, synthetic construct
SNPHGLI

SEQ ID NO: 6504 - protein, 7 aa, synthetic construct
WKDYPPS

SEQ ID NO: 6505 - protein, 7 aa, synthetic construct
KHNVEHD

SEQ ID NO: 6506 - protein, 7 aa, synthetic construct
AGDTIRD

SEQ ID NO: 6507 - protein, 7 aa, synthetic construct
IKAEDSQ

SEQ ID NO: 6508 - protein, 7 aa, synthetic construct
AMKIEAE

SEQ ID NO: 6509 - protein, 7 aa, synthetic construct
DHAVTKY

SEQ ID NO: 6510 - protein, 7 aa, synthetic construct
MPTMPSL

SEQ ID NO: 6511 - protein, 7 aa, synthetic construct
SQQHEMD

SEQ ID NO: 6512 - protein, 7 aa, synthetic construct
SSRPLAS

SEQ ID NO: 6513 - protein, 7 aa, synthetic construct
THAPTTP

SEQ ID NO: 6514 - protein, 7 aa, synthetic construct
LPTQHFV

SEQ ID NO: 6515 - protein, 7 aa, synthetic construct
LMRGDAN

SEQ ID NO: 6516 - protein, 7 aa, synthetic construct
MAPSIHH

SEQ ID NO: 6517 - protein, 7 aa, synthetic construct
TAQNIAN

SEQ ID NO: 6518 - protein, 7 aa, synthetic construct
AHLDKSM

SEQ ID NO: 6519 - protein, 7 aa, synthetic construct
MEHLGPP

SEQ ID NO: 6520 - protein, 7 aa, synthetic construct
YEKESMG

SEQ ID NO: 6521 - protein, 7 aa, synthetic construct
KERDYTD

SEQ ID NO: 6522 - protein, 7 aa, synthetic construct
DRHVPHT

SEQ ID NO: 6523 - protein, 7 aa, synthetic construct
RDLIQLE

SEQ ID NO: 6524 - protein, 7 aa, synthetic construct
RFETMHD

SEQ ID NO: 6525 - protein, 7 aa, synthetic construct
MGVVYEA

SEQ ID NO: 6526 - protein, 7 aa, synthetic construct
FASIAQN

SEQ ID NO: 6527 - protein, 7 aa, synthetic construct
DYDNRQI

SEQ ID NO: 6528 - protein, 7 aa, synthetic construct
MEEFARS

SEQ ID NO: 6529 - protein, 7 aa, synthetic construct
FGQNVVN

SEQ ID NO: 6530 - protein, 7 aa, synthetic construct
GKEGARN

SEQ ID NO: 6531 - protein, 7 aa, synthetic construct
MDSSQNN

SEQ ID NO: 6532 - protein, 7 aa, synthetic construct
DVFDRPT

SEQ ID NO: 6533 - protein, 7 aa, synthetic construct
WLADDMD

SEQ ID NO: 6534 - protein, 7 aa, synthetic construct
FTRQGDE

SEQ ID NO: 6535 - protein, 7 aa, synthetic construct
YLGVAQE

SEQ ID NO: 6536 - protein, 7 aa, synthetic construct
VEGNGSF

SEQ ID NO: 6537 - protein, 7 aa, synthetic construct
PFTMHEE

SEQ ID NO: 6538 - protein, 7 aa, synthetic construct
HVKPANS

SEQ ID NO: 6539 - protein, 7 aa, synthetic construct
EVGFSHP

SEQ ID NO: 6540 - protein, 7 aa, synthetic construct
VKIQIQP

SEQ ID NO: 6541 - protein, 7 aa, synthetic construct
GEPSNIR

SEQ ID NO: 6542 - protein, 7 aa, synthetic construct
HQEKLVG

SEQ ID NO: 6543 - protein, 7 aa, synthetic construct
KDMAGMP

SEQ ID NO: 6544 - protein, 7 aa, synthetic construct
VTSKEAM

SEQ ID NO: 6545 - protein, 7 aa, synthetic construct
EVVTHHP

SEQ ID NO: 6546 - protein, 7 aa, synthetic construct
PNYADQG

SEQ ID NO: 6547 - protein, 7 aa, synthetic construct
QNLSEQV

SEQ ID NO: 6548 - protein, 7 aa, synthetic construct
VPAPYEL

SEQ ID NO: 6549 - protein, 7 aa, synthetic construct
GLGFGEI

SEQ ID NO: 6550 - protein, 7 aa, synthetic construct
TEMSKLP

SEQ ID NO: 6551 - protein, 7 aa, synthetic construct
YDKNDIS

SEQ ID NO: 6552 - protein, 7 aa, synthetic construct
TMGMSLP

SEQ ID NO: 6553 - protein, 7 aa, synthetic construct
VLNQGPY

SEQ ID NO: 6554 - protein, 7 aa, synthetic construct
IDHKKEM

SEQ ID NO: 6555 - protein, 7 aa, synthetic construct
VHHRNGP

SEQ ID NO: 6556 - protein, 7 aa, synthetic construct
APMMGMH

SEQ ID NO: 6557 - protein, 7 aa, synthetic construct
YNPPEPN

SEQ ID NO: 6558 - protein, 7 aa, synthetic construct
SQSNSNY

SEQ ID NO: 6559 - protein, 7 aa, synthetic construct
QIHRTGA

SEQ ID NO: 6560 - protein, 7 aa, synthetic construct
LALNTTS

SEQ ID NO: 6561 - protein, 7 aa, synthetic construct
RDSVVAD

SEQ ID NO: 6562 - protein, 7 aa, synthetic construct
MAKTLED

SEQ ID NO: 6563 - protein, 7 aa, synthetic construct
MSAHYFE

SEQ ID NO: 6564 - protein, 7 aa, synthetic construct
QHDHSTK

SEQ ID NO: 6565 - protein, 7 aa, synthetic construct
ISDKLKT

SEQ ID NO: 6566 - protein, 7 aa, synthetic construct
MQVRNPG

SEQ ID NO: 6567 - protein, 7 aa, synthetic construct
PSPPQVN

SEQ ID NO: 6568 - protein, 7 aa, synthetic construct
LHEKFPY

SEQ ID NO: 6569 - protein, 7 aa, synthetic construct
ITGIGMR

SEQ ID NO: 6570 - protein, 7 aa, synthetic construct
RADNGSD

SEQ ID NO: 6571 - protein, 7 aa, synthetic construct
MLKIHQN

SEQ ID NO: 6572 - protein, 7 aa, synthetic construct
TQGVVML

SEQ ID NO: 6573 - protein, 7 aa, synthetic construct
QNDLKPA

SEQ ID NO: 6574 - protein, 7 aa, synthetic construct
YMKLESP

SEQ ID NO: 6575 - protein, 7 aa, synthetic construct
VMQPANG

SEQ ID NO: 6576 - protein, 7 aa, synthetic construct
MEKGVYD

SEQ ID NO: 6577 - protein, 7 aa, synthetic construct
NKHTLQY

SEQ ID NO: 6578 - protein, 7 aa, synthetic construct
ATDQPHT

SEQ ID NO: 6579 - protein, 7 aa, synthetic construct
YASMSDV

SEQ ID NO: 6580 - protein, 7 aa, synthetic construct
HDAGEHQ

SEQ ID NO: 6581 - protein, 7 aa, synthetic construct
NNQPSYN

SEQ ID NO: 6582 - protein, 7 aa, synthetic construct
ERTNDAM

SEQ ID NO: 6583 - protein, 7 aa, synthetic construct
FRKDAQF

SEQ ID NO: 6584 - protein, 7 aa, synthetic construct
NLMPANM

SEQ ID NO: 6585 - protein, 7 aa, synthetic construct
EPKFPTM

SEQ ID NO: 6586 - protein, 7 aa, synthetic construct
HEKFLQN

SEQ ID NO: 6587 - protein, 7 aa, synthetic construct
HPPENAY

SEQ ID NO: 6588 - protein, 7 aa, synthetic construct
DDGTQKH

SEQ ID NO: 6589 - protein, 7 aa, synthetic construct
HKWNTVE

SEQ ID NO: 6590 - protein, 7 aa, synthetic construct
AGPGVTL

SEQ ID NO: 6591 - protein, 7 aa, synthetic construct
LNVKIVS

SEQ ID NO: 6592 - protein, 7 aa, synthetic construct
MGSMMSK

SEQ ID NO: 6593 - protein, 7 aa, synthetic construct
PRQNWEA

SEQ ID NO: 6594 - protein, 7 aa, synthetic construct
SPFPRST

SEQ ID NO: 6595 - protein, 7 aa, synthetic construct
HSERVEI

SEQ ID NO: 6596 - protein, 7 aa, synthetic construct
CNKPCIE

SEQ ID NO: 6597 - protein, 7 aa, synthetic construct
HEQSKTM

SEQ ID NO: 6598 - protein, 7 aa, synthetic construct
QMQDRHM

SEQ ID NO: 6599 - protein, 7 aa, synthetic construct
VGNQPKF

SEQ ID NO: 6600 - protein, 7 aa, synthetic construct
LQERSLR

SEQ ID NO: 6601 - protein, 7 aa, synthetic construct
LPKRMEM

SEQ ID NO: 6602 - protein, 7 aa, synthetic construct
PPKMPLG

SEQ ID NO: 6603 - protein, 7 aa, synthetic construct
VAKQENA

SEQ ID NO: 6604 - protein, 7 aa, synthetic construct
KQAKETN

SEQ ID NO: 6605 - protein, 7 aa, synthetic construct
PTPEGIT

SEQ ID NO: 6606 - protein, 7 aa, synthetic construct
SNKPSNY

SEQ ID NO: 6607 - protein, 7 aa, synthetic construct
KTFVSEH

SEQ ID NO: 6608 - protein, 7 aa, synthetic construct
RHETMKN

SEQ ID NO: 6609 - protein, 7 aa, synthetic construct
LTADLRS

SEQ ID NO: 6610 - protein, 7 aa, synthetic construct
NTVSVGP

SEQ ID NO: 6611 - protein, 7 aa, synthetic construct
HIDQNNH

SEQ ID NO: 6612 - protein, 7 aa, synthetic construct
KNPQEKH

SEQ ID NO: 6613 - protein, 7 aa, synthetic construct
DTEKLDM

SEQ ID NO: 6614 - protein, 7 aa, synthetic construct
PESTPNM

SEQ ID NO: 6615 - protein, 7 aa, synthetic construct
EPPTQLR

SEQ ID NO: 6616 - protein, 7 aa, synthetic construct
PYNPNAI

SEQ ID NO: 6617 - protein, 7 aa, synthetic construct
QPRGQGF

SEQ ID NO: 6618 - protein, 7 aa, synthetic construct
MNVPSSQ

SEQ ID NO: 6619 - protein, 7 aa, synthetic construct
LAFGRSE

SEQ ID NO: 6620 - protein, 7 aa, synthetic construct
FLHGRIE

SEQ ID NO: 6621 - protein, 7 aa, synthetic construct
DVNKQHQ

SEQ ID NO: 6622 - protein, 7 aa, synthetic construct
IDDMWPR

SEQ ID NO: 6623 - protein, 7 aa, synthetic construct
PVRRDQF

SEQ ID NO: 6624 - protein, 7 aa, synthetic construct
DLRDKAI

SEQ ID NO: 6625 - protein, 7 aa, synthetic construct
ESPQVSF

SEQ ID NO: 6626 - protein, 7 aa, synthetic construct
SNSQPMP

SEQ ID NO: 6627 - protein, 7 aa, synthetic construct
VKGDEPA

SEQ ID NO: 6628 - protein, 7 aa, synthetic construct
NSEHMRN

SEQ ID NO: 6629 - protein, 7 aa, synthetic construct
LRMDMEK

SEQ ID NO: 6630 - protein, 7 aa, synthetic construct
IEKGQLH

SEQ ID NO: 6631 - protein, 7 aa, synthetic construct
KDMPNMT

SEQ ID NO: 6632 - protein, 7 aa, synthetic construct
MASDAHH

SEQ ID NO: 6633 - protein, 7 aa, synthetic construct
NLDKKFL

SEQ ID NO: 6634 - protein, 7 aa, synthetic construct
EVMGHHR

SEQ ID NO: 6635 - protein, 7 aa, synthetic construct
QATGSVQ

SEQ ID NO: 6636 - protein, 7 aa, synthetic construct
AKVSEFE

SEQ ID NO: 6637 - protein, 7 aa, synthetic construct
FYQNPNS

SEQ ID NO: 6638 - protein, 7 aa, synthetic construct
VTPNSQQ

SEQ ID NO: 6639 - protein, 7 aa, synthetic construct
IGQILVA

SEQ ID NO: 6640 - protein, 7 aa, synthetic construct
ANELPVA

SEQ ID NO: 6641 - protein, 7 aa, synthetic construct
QSKEELP

SEQ ID NO: 6642 - protein, 7 aa, synthetic construct
SYGKVDH

SEQ ID NO: 6643 - protein, 7 aa, synthetic construct
AKSENPD

SEQ ID NO: 6644 - protein, 7 aa, synthetic construct
QETPNPH

SEQ ID NO: 6645 - protein, 7 aa, synthetic construct
IIENNKQ

SEQ ID NO: 6646 - protein, 7 aa, synthetic construct
LGSRLTH

SEQ ID NO: 6647 - protein, 7 aa, synthetic construct
DMFSDAK

SEQ ID NO: 6648 - protein, 7 aa, synthetic construct
IGKIENP

SEQ ID NO: 6649 - protein, 7 aa, synthetic construct
MHANTIP

SEQ ID NO: 6650 - protein, 7 aa, synthetic construct
FRNTNSP

SEQ ID NO: 6651 - protein, 7 aa, synthetic construct
RIPHGEW

SEQ ID NO: 6652 - protein, 7 aa, synthetic construct
KSNLEVI

SEQ ID NO: 6653 - protein, 7 aa, synthetic construct
SEVKHQE

SEQ ID NO: 6654 - protein, 7 aa, synthetic construct
LFAPNTD

SEQ ID NO: 6655 - protein, 7 aa, synthetic construct
SHTAKDR

SEQ ID NO: 6656 - protein, 7 aa, synthetic construct
SVPDKFR

SEQ ID NO: 6657 - protein, 7 aa, synthetic construct
KEGAMES

SEQ ID NO: 6658 - protein, 7 aa, synthetic construct
GFRDGPA

SEQ ID NO: 6659 - protein, 7 aa, synthetic construct
MEKDGTM

SEQ ID NO: 6660 - protein, 7 aa, synthetic construct
PHGQGNT

SEQ ID NO: 6661 - protein, 7 aa, synthetic construct
REEGINK

SEQ ID NO: 6662 - protein, 7 aa, synthetic construct
ESQKFLV

SEQ ID NO: 6663 - protein, 7 aa, synthetic construct
QKPERIG

SEQ ID NO: 6664 - protein, 7 aa, synthetic construct
YPNHAFG

SEQ ID NO: 6665 - protein, 7 aa, synthetic construct
FSQKTEE

SEQ ID NO: 6666 - protein, 7 aa, synthetic construct
REMKAHD

SEQ ID NO: 6667 - protein, 7 aa, synthetic construct
MPERDYE

SEQ ID NO: 6668 - protein, 7 aa, synthetic construct
RPPDDFR

SEQ ID NO: 6669 - protein, 7 aa, synthetic construct
EYRNDAT

SEQ ID NO: 6670 - protein, 7 aa, synthetic construct
NKGDGRH

SEQ ID NO: 6671 - protein, 7 aa, synthetic construct
SRSDEPF

SEQ ID NO: 6672 - protein, 7 aa, synthetic construct
RASDIVH

SEQ ID NO: 6673 - protein, 7 aa, synthetic construct
MGHDARY

SEQ ID NO: 6674 - protein, 7 aa, synthetic construct
HFKAKTE

SEQ ID NO: 6675 - protein, 7 aa, synthetic construct
KNIMTNG

SEQ ID NO: 6676 - protein, 7 aa, synthetic construct
FNNHPIT

SEQ ID NO: 6677 - protein, 7 aa, synthetic construct
YPEDHDR

SEQ ID NO: 6678 - protein, 7 aa, synthetic construct
YDITSKG

SEQ ID NO: 6679 - protein, 7 aa, synthetic construct
YVSKQQD

SEQ ID NO: 6680 - protein, 7 aa, synthetic construct
LTKNDAM

SEQ ID NO: 6681 - protein, 7 aa, synthetic construct
IGVTYIS

SEQ ID NO: 6682 - protein, 7 aa, synthetic construct
YRIQSEE

SEQ ID NO: 6683 - protein, 7 aa, synthetic construct
QVEAQYG

SEQ ID NO: 6684 - protein, 7 aa, synthetic construct
TMIDRPE

SEQ ID NO: 6685 - protein, 7 aa, synthetic construct
KPMDKHI

SEQ ID NO: 6686 - protein, 7 aa, synthetic construct
QRESLEE

SEQ ID NO: 6687 - protein, 7 aa, synthetic construct
PATMTNT

SEQ ID NO: 6688 - protein, 7 aa, synthetic construct
QVKESGD

SEQ ID NO: 6689 - protein, 7 aa, synthetic construct
QNGVPLS

SEQ ID NO: 6690 - protein, 7 aa, synthetic construct
HHSLPAH

SEQ ID NO: 6691 - protein, 7 aa, synthetic construct
GMVIKVT

SEQ ID NO: 6692 - protein, 7 aa, synthetic construct
EIDRKPA

SEQ ID NO: 6693 - protein, 7 aa, synthetic construct
PINAGIK

SEQ ID NO: 6694 - protein, 7 aa, synthetic construct
GVFPGKN

SEQ ID NO: 6695 - protein, 7 aa, synthetic construct
DQAGIFG

SEQ ID NO: 6696 - protein, 7 aa, synthetic construct
NPPDSMS

SEQ ID NO: 6697 - protein, 7 aa, synthetic construct
KEISHQM

SEQ ID NO: 6698 - protein, 7 aa, synthetic construct
AQQQFSL

SEQ ID NO: 6699 - protein, 7 aa, synthetic construct
KMGHEVA

SEQ ID NO: 6700 - protein, 7 aa, synthetic construct
TQRGQPN

SEQ ID NO: 6701 - protein, 7 aa, synthetic construct
NDSMYRP

SEQ ID NO: 6702 - protein, 7 aa, synthetic construct
TFGSVQK

SEQ ID NO: 6703 - protein, 7 aa, synthetic construct
MEKSHIN

SEQ ID NO: 6704 - protein, 7 aa, synthetic construct
QAQPELH

SEQ ID NO: 6705 - protein, 7 aa, synthetic construct
LRQDRNI

SEQ ID NO: 6706 - protein, 7 aa, synthetic construct
QGRDDAM

SEQ ID NO: 6707 - protein, 7 aa, synthetic construct
PSRIIEG

SEQ ID NO: 6708 - protein, 7 aa, synthetic construct
DTREYRS

SEQ ID NO: 6709 - protein, 7 aa, synthetic construct
QNVMRDV

SEQ ID NO: 6710 - protein, 7 aa, synthetic construct
VNSLGPQ

SEQ ID NO: 6711 - protein, 7 aa, synthetic construct
AFNPNKH

SEQ ID NO: 6712 - protein, 7 aa, synthetic construct
EITTTHA

SEQ ID NO: 6713 - protein, 7 aa, synthetic construct
YGGDRSY

SEQ ID NO: 6714 - protein, 7 aa, synthetic construct
QSKTAHI

SEQ ID NO: 6715 - protein, 7 aa, synthetic construct
FAQVQDT

SEQ ID NO: 6716 - protein, 7 aa, synthetic construct
KNEHKNM

SEQ ID NO: 6717 - protein, 7 aa, synthetic construct
LHNIVMN

SEQ ID NO: 6718 - protein, 7 aa, synthetic construct
PLPPARV

SEQ ID NO: 6719 - protein, 7 aa, synthetic construct
FVNNVVA

SEQ ID NO: 6720 - protein, 7 aa, synthetic construct
NAPLTMD

SEQ ID NO: 6721 - protein, 7 aa, synthetic construct
TMQSAQL

SEQ ID NO: 6722 - protein, 7 aa, synthetic construct
LENGRLY

SEQ ID NO: 6723 - protein, 7 aa, synthetic construct
YQHPEIS

SEQ ID NO: 6724 - protein, 7 aa, synthetic construct
FQGKTEQ

SEQ ID NO: 6725 - protein, 7 aa, synthetic construct
MNSVHLK

SEQ ID NO: 6726 - protein, 7 aa, synthetic construct
GTHGNEF

SEQ ID NO: 6727 - protein, 7 aa, synthetic construct
IHAMNIP

SEQ ID NO: 6728 - protein, 7 aa, synthetic construct
DDFQYRG

SEQ ID NO: 6729 - protein, 7 aa, synthetic construct
QLKREVV

SEQ ID NO: 6730 - protein, 7 aa, synthetic construct
MPNHEVT

SEQ ID NO: 6731 - protein, 7 aa, synthetic construct
FFGDAEN

SEQ ID NO: 6732 - protein, 7 aa, synthetic construct
QLNDGFS

SEQ ID NO: 6733 - protein, 7 aa, synthetic construct
KDPDQKR

SEQ ID NO: 6734 - protein, 7 aa, synthetic construct
FWKKDEE

SEQ ID NO: 6735 - protein, 7 aa, synthetic construct
ERSIMKA

SEQ ID NO: 6736 - protein, 7 aa, synthetic construct
PKSMSDP

SEQ ID NO: 6737 - protein, 7 aa, synthetic construct
GMVVGKN

SEQ ID NO: 6738 - protein, 7 aa, synthetic construct
NHINHQM

SEQ ID NO: 6739 - protein, 7 aa, synthetic construct
KESPNPE

SEQ ID NO: 6740 - protein, 7 aa, synthetic construct
IIMNKTE

SEQ ID NO: 6741 - protein, 7 aa, synthetic construct
TTKMKDD

SEQ ID NO: 6742 - protein, 7 aa, synthetic construct
TMMENRF

SEQ ID NO: 6743 - protein, 7 aa, synthetic construct
SGHMVGK

SEQ ID NO: 6744 - protein, 7 aa, synthetic construct
DVIHKEL

SEQ ID NO: 6745 - protein, 7 aa, synthetic construct
SPKDWVH

SEQ ID NO: 6746 - protein, 7 aa, synthetic construct
YEKPISS

SEQ ID NO: 6747 - protein, 7 aa, synthetic construct
DHNAAHE

SEQ ID NO: 6748 - protein, 7 aa, synthetic construct
QNHPAMA

SEQ ID NO: 6749 - protein, 7 aa, synthetic construct
YRDQPME

SEQ ID NO: 6750 - protein, 7 aa, synthetic construct
CYPRECT

SEQ ID NO: 6751 - protein, 7 aa, synthetic construct
PPPNAAL

SEQ ID NO: 6752 - protein, 7 aa, synthetic construct
INRSNVH

SEQ ID NO: 6753 - protein, 7 aa, synthetic construct
YHLQPAQ

SEQ ID NO: 6754 - protein, 7 aa, synthetic construct
TEKVGKV

SEQ ID NO: 6755 - protein, 7 aa, synthetic construct
QSSDASI

SEQ ID NO: 6756 - protein, 7 aa, synthetic construct
PDKIQGA

SEQ ID NO: 6757 - protein, 7 aa, synthetic construct
NSHKGFQ

SEQ ID NO: 6758 - protein, 7 aa, synthetic construct
VQQKVGQ

SEQ ID NO: 6759 - protein, 7 aa, synthetic construct
PNTIEGS

SEQ ID NO: 6760 - protein, 7 aa, synthetic construct
FMDGVDG

SEQ ID NO: 6761 - protein, 7 aa, synthetic construct
PGKGMQY

SEQ ID NO: 6762 - protein, 7 aa, synthetic construct
KPVEADV

SEQ ID NO: 6763 - protein, 7 aa, synthetic construct
VHDTLKD

SEQ ID NO: 6764 - protein, 7 aa, synthetic construct
FYKEIGK

SEQ ID NO: 6765 - protein, 7 aa, synthetic construct
ANTPGSD

SEQ ID NO: 6766 - protein, 7 aa, synthetic construct
PRTMEFE

SEQ ID NO: 6767 - protein, 7 aa, synthetic construct
WRDMGGH

SEQ ID NO: 6768 - protein, 7 aa, synthetic construct
GTMHADK

SEQ ID NO: 6769 - protein, 7 aa, synthetic construct
VDDHKLH

SEQ ID NO: 6770 - protein, 7 aa, synthetic construct
AERIREE

SEQ ID NO: 6771 - protein, 7 aa, synthetic construct
HADFTAA

SEQ ID NO: 6772 - protein, 7 aa, synthetic construct
RDMVEDL

SEQ ID NO: 6773 - protein, 7 aa, synthetic construct
ELEKSAR

SEQ ID NO: 6774 - protein, 7 aa, synthetic construct
RDNERIF

SEQ ID NO: 6775 - protein, 7 aa, synthetic construct
NYDGMFV

SEQ ID NO: 6776 - protein, 7 aa, synthetic construct
DTGAMGE

SEQ ID NO: 6777 - protein, 7 aa, synthetic construct
MEAKEGY

SEQ ID NO: 6778 - protein, 7 aa, synthetic construct
RNEGTPS

SEQ ID NO: 6779 - protein, 7 aa, synthetic construct
VNKDIVR

SEQ ID NO: 6780 - protein, 7 aa, synthetic construct
NTGNEMT

SEQ ID NO: 6781 - protein, 7 aa, synthetic construct
IKDPVNM

SEQ ID NO: 6782 - protein, 7 aa, synthetic construct
MQYDPSE

SEQ ID NO: 6783 - protein, 7 aa, synthetic construct
GIGHIDR

SEQ ID NO: 6784 - protein, 7 aa, synthetic construct
FQKPGIH

SEQ ID NO: 6785 - protein, 7 aa, synthetic construct
ENQNIHA

SEQ ID NO: 6786 - protein, 7 aa, synthetic construct
YPKAMAE

SEQ ID NO: 6787 - protein, 7 aa, synthetic construct
TLGITQG

SEQ ID NO: 6788 - protein, 7 aa, synthetic construct
GQPNYDM

SEQ ID NO: 6789 - protein, 7 aa, synthetic construct
SAYGFEA

SEQ ID NO: 6790 - protein, 7 aa, synthetic construct
MEHETFK

SEQ ID NO: 6791 - protein, 7 aa, synthetic construct
DPHIEQK

SEQ ID NO: 6792 - protein, 7 aa, synthetic construct
MASPGIV

SEQ ID NO: 6793 - protein, 7 aa, synthetic construct
TGDQWAV

SEQ ID NO: 6794 - protein, 7 aa, synthetic construct
EYQTSTA

SEQ ID NO: 6795 - protein, 7 aa, synthetic construct
GAQNSPG

SEQ ID NO: 6796 - protein, 7 aa, synthetic construct
YKHVKAE

SEQ ID NO: 6797 - protein, 7 aa, synthetic construct
VWSGKAV

SEQ ID NO: 6798 - protein, 7 aa, synthetic construct
AYEGFSP

SEQ ID NO: 6799 - protein, 7 aa, synthetic construct
NMVNAET

SEQ ID NO: 6800 - protein, 7 aa, synthetic construct
HMRDQHD

SEQ ID NO: 6801 - protein, 7 aa, synthetic construct
SLNSGTK

SEQ ID NO: 6802 - protein, 7 aa, synthetic construct
QKQADFY

SEQ ID NO: 6803 - protein, 7 aa, synthetic construct
RGEAPKP

SEQ ID NO: 6804 - protein, 7 aa, synthetic construct
GMKQGVY

SEQ ID NO: 6805 - protein, 7 aa, synthetic construct
DNEKRLL

SEQ ID NO: 6806 - protein, 7 aa, synthetic construct
PSGSDAG

SEQ ID NO: 6807 - protein, 7 aa, synthetic construct
HTSMSTY

SEQ ID NO: 6808 - protein, 7 aa, synthetic construct
HEKFQYT

SEQ ID NO: 6809 - protein, 7 aa, synthetic construct
FGTIVDG

SEQ ID NO: 6810 - protein, 7 aa, synthetic construct
KREDMYE

SEQ ID NO: 6811 - protein, 7 aa, synthetic construct
VEEGRFL

SEQ ID NO: 6812 - protein, 7 aa, synthetic construct
GEQNTKS

SEQ ID NO: 6813 - protein, 7 aa, synthetic construct
INATDRS

SEQ ID NO: 6814 - protein, 7 aa, synthetic construct
NPTDTDM

SEQ ID NO: 6815 - protein, 7 aa, synthetic construct
AITPLKG

SEQ ID NO: 6816 - protein, 7 aa, synthetic construct
AAEHYGR

SEQ ID NO: 6817 - protein, 7 aa, synthetic construct
NGADFAT

SEQ ID NO: 6818 - protein, 7 aa, synthetic construct
WHSGSTE

SEQ ID NO: 6819 - protein, 7 aa, synthetic construct
ENLSGNK

SEQ ID NO: 6820 - protein, 7 aa, synthetic construct
AERHDEP

SEQ ID NO: 6821 - protein, 7 aa, synthetic construct
QGNGTIT

SEQ ID NO: 6822 - protein, 7 aa, synthetic construct
VNYSHSA

SEQ ID NO: 6823 - protein, 7 aa, synthetic construct
ERLQAIS

SEQ ID NO: 6824 - protein, 7 aa, synthetic construct
TKADIHR

SEQ ID NO: 6825 - protein, 7 aa, synthetic construct
QYSQKLV

SEQ ID NO: 6826 - protein, 7 aa, synthetic construct
WRPQDPD

SEQ ID NO: 6827 - protein, 7 aa, synthetic construct
EPAFMTG

SEQ ID NO: 6828 - protein, 7 aa, synthetic construct
HSVPDAR

SEQ ID NO: 6829 - protein, 7 aa, synthetic construct
VDRTYHL

SEQ ID NO: 6830 - protein, 7 aa, synthetic construct
AVNPHKT

SEQ ID NO: 6831 - protein, 7 aa, synthetic construct
VVVKDGT

SEQ ID NO: 6832 - protein, 7 aa, synthetic construct
KWSDAMH

SEQ ID NO: 6833 - protein, 7 aa, synthetic construct
EQQMVSA

SEQ ID NO: 6834 - protein, 7 aa, synthetic construct
WQHKLVE

SEQ ID NO: 6835 - protein, 7 aa, synthetic construct
IRLLESE

SEQ ID NO: 6836 - protein, 7 aa, synthetic construct
FHEVKVS

SEQ ID NO: 6837 - protein, 7 aa, synthetic construct
KVMDQTN

SEQ ID NO: 6838 - protein, 7 aa, synthetic construct
EQHSMHA

SEQ ID NO: 6839 - protein, 7 aa, synthetic construct
VIPAIGK

SEQ ID NO: 6840 - protein, 7 aa, synthetic construct
YSTQHES

SEQ ID NO: 6841 - protein, 7 aa, synthetic construct
DYGLPTR

SEQ ID NO: 6842 - protein, 7 aa, synthetic construct
PGIEGKG

SEQ ID NO: 6843 - protein, 7 aa, synthetic construct
RMQVAED

SEQ ID NO: 6844 - protein, 7 aa, synthetic construct
YSRHMTE

SEQ ID NO: 6845 - protein, 7 aa, synthetic construct
NREEHQY

SEQ ID NO: 6846 - protein, 7 aa, synthetic construct
LMTNYPD

SEQ ID NO: 6847 - protein, 7 aa, synthetic construct
FTHRGGV

SEQ ID NO: 6848 - protein, 7 aa, synthetic construct
AAQSHDV

SEQ ID NO: 6849 - protein, 7 aa, synthetic construct
NVFHSGD

SEQ ID NO: 6850 - protein, 7 aa, synthetic construct
MYNQEVA

SEQ ID NO: 6851 - protein, 7 aa, synthetic construct
AITLQTE

SEQ ID NO: 6852 - protein, 7 aa, synthetic construct
HEQAGTF

SEQ ID NO: 6853 - protein, 7 aa, synthetic construct
WTGEHEP

SEQ ID NO: 6854 - protein, 7 aa, synthetic construct
DVVSRHQ

SEQ ID NO: 6855 - protein, 7 aa, synthetic construct
PGKLPTF

SEQ ID NO: 6856 - protein, 7 aa, synthetic construct
HNPISAD

SEQ ID NO: 6857 - protein, 7 aa, synthetic construct
DGSSMVR

SEQ ID NO: 6858 - protein, 7 aa, synthetic construct
DSDPNKS

SEQ ID NO: 6859 - protein, 7 aa, synthetic construct
QPPNYNH

SEQ ID NO: 6860 - protein, 7 aa, synthetic construct
GQDHNGH

SEQ ID NO: 6861 - protein, 7 aa, synthetic construct
AWNKGTS

SEQ ID NO: 6862 - protein, 7 aa, synthetic construct
PQSIPYG

SEQ ID NO: 6863 - protein, 7 aa, synthetic construct
MEGQMIV

SEQ ID NO: 6864 - protein, 7 aa, synthetic construct
LSEMKHQ

SEQ ID NO: 6865 - protein, 7 aa, synthetic construct
NATFSGT

SEQ ID NO: 6866 - protein, 7 aa, synthetic construct
GMREGSI

SEQ ID NO: 6867 - protein, 7 aa, synthetic construct
INVTTNM

SEQ ID NO: 6868 - protein, 7 aa, synthetic construct
NKIEVIQ

SEQ ID NO: 6869 - protein, 7 aa, synthetic construct
PFNESIR

SEQ ID NO: 6870 - protein, 7 aa, synthetic construct
VAGEYLK

SEQ ID NO: 6871 - protein, 7 aa, synthetic construct
ENASVKY

SEQ ID NO: 6872 - protein, 7 aa, synthetic construct
IIQHKMA

SEQ ID NO: 6873 - protein, 7 aa, synthetic construct
RHDKNPN

SEQ ID NO: 6874 - protein, 7 aa, synthetic construct
NDHPHTH

SEQ ID NO: 6875 - protein, 7 aa, synthetic construct
GTAKPLM

SEQ ID NO: 6876 - protein, 7 aa, synthetic construct
NRGVDVV

SEQ ID NO: 6877 - protein, 7 aa, synthetic construct
GPMGGMD

SEQ ID NO: 6878 - protein, 7 aa, synthetic construct
QTFQTGY

SEQ ID NO: 6879 - protein, 7 aa, synthetic construct
IFNIGQA

SEQ ID NO: 6880 - protein, 7 aa, synthetic construct
SAIKVEE

SEQ ID NO: 6881 - protein, 7 aa, synthetic construct
PTHADME

SEQ ID NO: 6882 - protein, 7 aa, synthetic construct
NQNDKFY

SEQ ID NO: 6883 - protein, 7 aa, synthetic construct
ANQEGGP

SEQ ID NO: 6884 - protein, 7 aa, synthetic construct
HSTIQGE

SEQ ID NO: 6885 - protein, 7 aa, synthetic construct
KMISTGV

SEQ ID NO: 6886 - protein, 7 aa, synthetic construct
IGNGHIE

SEQ ID NO: 6887 - protein, 7 aa, synthetic construct
YPMQPAA

SEQ ID NO: 6888 - protein, 7 aa, synthetic construct
IHDLKEA

SEQ ID NO: 6889 - protein, 7 aa, synthetic construct
TEYNEHF

SEQ ID NO: 6890 - protein, 7 aa, synthetic construct
MKQISHT

SEQ ID NO: 6891 - protein, 7 aa, synthetic construct
IHGRVHQ

SEQ ID NO: 6892 - protein, 7 aa, synthetic construct
QQVEDSR

SEQ ID NO: 6893 - protein, 7 aa, synthetic construct
TTMMKSE

SEQ ID NO: 6894 - protein, 7 aa, synthetic construct
KKAPYDQ

SEQ ID NO: 6895 - protein, 7 aa, synthetic construct
PSNAYEY

SEQ ID NO: 6896 - protein, 7 aa, synthetic construct
LTPMGHQ

SEQ ID NO: 6897 - protein, 7 aa, synthetic construct
LTAYRDM

SEQ ID NO: 6898 - protein, 7 aa, synthetic construct
LHMPQMD

SEQ ID NO: 6899 - protein, 7 aa, synthetic construct
KDPSIMN

SEQ ID NO: 6900 - protein, 7 aa, synthetic construct
PEWKNTI

SEQ ID NO: 6901 - protein, 7 aa, synthetic construct
NTGYEQV

SEQ ID NO: 6902 - protein, 7 aa, synthetic construct
EKMGAEH

SEQ ID NO: 6903 - protein, 7 aa, synthetic construct
NLMKEAY

SEQ ID NO: 6904 - protein, 7 aa, synthetic construct
KSKESFL

SEQ ID NO: 6905 - protein, 7 aa, synthetic construct
LYKYEEV

SEQ ID NO: 6906 - protein, 7 aa, synthetic construct
WIHMSPE

SEQ ID NO: 6907 - protein, 7 aa, synthetic construct
LDEMKKN

SEQ ID NO: 6908 - protein, 7 aa, synthetic construct
IGPDFSP

SEQ ID NO: 6909 - protein, 7 aa, synthetic construct
GGLTMGH

SEQ ID NO: 6910 - protein, 7 aa, synthetic construct
HPHESTS

SEQ ID NO: 6911 - protein, 7 aa, synthetic construct
DTMRNSM

SEQ ID NO: 6912 - protein, 7 aa, synthetic construct
HDHMVQG

SEQ ID NO: 6913 - protein, 7 aa, synthetic construct
EGFVAHA

SEQ ID NO: 6914 - protein, 7 aa, synthetic construct
RDGFPVV

SEQ ID NO: 6915 - protein, 7 aa, synthetic construct
PNAPMQK

SEQ ID NO: 6916 - protein, 7 aa, synthetic construct
TTVNSLP

SEQ ID NO: 6917 - protein, 7 aa, synthetic construct
RDTGQVN

SEQ ID NO: 6918 - protein, 7 aa, synthetic construct
GYDRMPI

SEQ ID NO: 6919 - protein, 7 aa, synthetic construct
GQIVTTM

SEQ ID NO: 6920 - protein, 7 aa, synthetic construct
YKPNHGT

SEQ ID NO: 6921 - protein, 7 aa, synthetic construct
KGQDGKF

SEQ ID NO: 6922 - protein, 7 aa, synthetic construct
DRNDKVE

SEQ ID NO: 6923 - protein, 7 aa, synthetic construct
YVQTQNV

SEQ ID NO: 6924 - protein, 7 aa, synthetic construct
GYTAKDE

SEQ ID NO: 6925 - protein, 7 aa, synthetic construct
SMAIENE

SEQ ID NO: 6926 - protein, 7 aa, synthetic construct
PHVGPMK

SEQ ID NO: 6927 - protein, 7 aa, synthetic construct
TSVAVIS

SEQ ID NO: 6928 - protein, 7 aa, synthetic construct
GGNKFIV

SEQ ID NO: 6929 - protein, 7 aa, synthetic construct
NDHSDGI

SEQ ID NO: 6930 - protein, 7 aa, synthetic construct
NMALTQA

SEQ ID NO: 6931 - protein, 7 aa, synthetic construct
MDHNNSH

SEQ ID NO: 6932 - protein, 7 aa, synthetic construct
IDQNTNH

SEQ ID NO: 6933 - protein, 7 aa, synthetic construct
GKNIDGD

SEQ ID NO: 6934 - protein, 7 aa, synthetic construct
DNAYMVD

SEQ ID NO: 6935 - protein, 7 aa, synthetic construct
DIAHKEY

SEQ ID NO: 6936 - protein, 7 aa, synthetic construct
QAISTED

SEQ ID NO: 6937 - protein, 7 aa, synthetic construct
FQTNAVV

SEQ ID NO: 6938 - protein, 7 aa, synthetic construct
DYIKSGH

SEQ ID NO: 6939 - protein, 7 aa, synthetic construct
VNTQFIT

SEQ ID NO: 6940 - protein, 7 aa, synthetic construct
VAHLPDE

SEQ ID NO: 6941 - protein, 7 aa, synthetic construct
KNLQNSS

SEQ ID NO: 6942 - protein, 7 aa, synthetic construct
KHQVTED

SEQ ID NO: 6943 - protein, 7 aa, synthetic construct
NSYAQDV

SEQ ID NO: 6944 - protein, 7 aa, synthetic construct
GTHLIAP

SEQ ID NO: 6945 - protein, 7 aa, synthetic construct
MNEYTHM

SEQ ID NO: 6946 - protein, 7 aa, synthetic construct
MAEGHGS

SEQ ID NO: 6947 - protein, 7 aa, synthetic construct
EAGMHVK

SEQ ID NO: 6948 - protein, 7 aa, synthetic construct
EGKKGDW

SEQ ID NO: 6949 - protein, 7 aa, synthetic construct
DDNNQSR

SEQ ID NO: 6950 - protein, 7 aa, synthetic construct
SLTKINT

SEQ ID NO: 6951 - protein, 7 aa, synthetic construct
KVYNYEG

SEQ ID NO: 6952 - protein, 7 aa, synthetic construct
TPESGDW

SEQ ID NO: 6953 - protein, 7 aa, synthetic construct
MQPKGGH

SEQ ID NO: 6954 - protein, 7 aa, synthetic construct
PYKNLYE

SEQ ID NO: 6955 - protein, 7 aa, synthetic construct
TTKMAFT

SEQ ID NO: 6956 - protein, 7 aa, synthetic construct
LPHLSAQ

SEQ ID NO: 6957 - protein, 7 aa, synthetic construct
SNQLGHQ

SEQ ID NO: 6958 - protein, 7 aa, synthetic construct
TLSGMEP

SEQ ID NO: 6959 - protein, 7 aa, synthetic construct
RPKMIEP

SEQ ID NO: 6960 - protein, 7 aa, synthetic construct
RYMDTVT

SEQ ID NO: 6961 - protein, 7 aa, synthetic construct
LFDRSED

SEQ ID NO: 6962 - protein, 7 aa, synthetic construct
DFDQHTP

SEQ ID NO: 6963 - protein, 7 aa, synthetic construct
AGIEYKS

SEQ ID NO: 6964 - protein, 7 aa, synthetic construct
KILDHPE

SEQ ID NO: 6965 - protein, 7 aa, synthetic construct
RDDAGHE

SEQ ID NO: 6966 - protein, 7 aa, synthetic construct
AWDEKFP

SEQ ID NO: 6967 - protein, 7 aa, synthetic construct
YWHKGAE

SEQ ID NO: 6968 - protein, 7 aa, synthetic construct
VSIKHNE

SEQ ID NO: 6969 - protein, 7 aa, synthetic construct
GTSDHLS

SEQ ID NO: 6970 - protein, 7 aa, synthetic construct
KMKIEDH

SEQ ID NO: 6971 - protein, 7 aa, synthetic construct
VDKKPIH

SEQ ID NO: 6972 - protein, 7 aa, synthetic construct
KVNQYME

SEQ ID NO: 6973 - protein, 7 aa, synthetic construct
GAHSDVQ

SEQ ID NO: 6974 - protein, 7 aa, synthetic construct
VLAPNRN

SEQ ID NO: 6975 - protein, 7 aa, synthetic construct
PQNNDNS

SEQ ID NO: 6976 - protein, 7 aa, synthetic construct
SVEPPAG

SEQ ID NO: 6977 - protein, 7 aa, synthetic construct
YATFTSN

SEQ ID NO: 6978 - protein, 7 aa, synthetic construct
RDDGKFL

SEQ ID NO: 6979 - protein, 7 aa, synthetic construct
TVTMKAI

SEQ ID NO: 6980 - protein, 7 aa, synthetic construct
KLHFSPE

SEQ ID NO: 6981 - protein, 7 aa, synthetic construct
HGANVGD

SEQ ID NO: 6982 - protein, 7 aa, synthetic construct
HAPQRAM

SEQ ID NO: 6983 - protein, 7 aa, synthetic construct
HNEKLGE

SEQ ID NO: 6984 - protein, 7 aa, synthetic construct
EPGPGIR

SEQ ID NO: 6985 - protein, 7 aa, synthetic construct
DHAKGFA

SEQ ID NO: 6986 - protein, 7 aa, synthetic construct
KMPQNGL

SEQ ID NO: 6987 - protein, 7 aa, synthetic construct
PWHSEDP

SEQ ID NO: 6988 - protein, 7 aa, synthetic construct
DVKYPVK

SEQ ID NO: 6989 - protein, 7 aa, synthetic construct
VYGGAST

SEQ ID NO: 6990 - protein, 7 aa, synthetic construct
SHHSNHE

SEQ ID NO: 6991 - protein, 7 aa, synthetic construct
LASEHTR

SEQ ID NO: 6992 - protein, 7 aa, synthetic construct
DIRSYSG

SEQ ID NO: 6993 - protein, 7 aa, synthetic construct
TDSLTNM

SEQ ID NO: 6994 - protein, 7 aa, synthetic construct
RSTVEDV

SEQ ID NO: 6995 - protein, 7 aa, synthetic construct
RTTEPIA

SEQ ID NO: 6996 - protein, 7 aa, synthetic construct
EHHKMAI

SEQ ID NO: 6997 - protein, 7 aa, synthetic construct
DKVSSEY

SEQ ID NO: 6998 - protein, 7 aa, synthetic construct
MAKDSSK

SEQ ID NO: 6999 - protein, 7 aa, synthetic construct
DEDRVKK

SEQ ID NO: 7000 - protein, 7 aa, synthetic construct
VSDMDQG

SEQ ID NO: 7001 - protein, 7 aa, synthetic construct
SMEKNAG

SEQ ID NO: 7002 - protein, 7 aa, synthetic construct
TMAVTMK

SEQ ID NO: 7003 - protein, 7 aa, synthetic construct
MGLDSAK

SEQ ID NO: 7004 - protein, 7 aa, synthetic construct
AVKVGQP

SEQ ID NO: 7005 - protein, 7 aa, synthetic construct
QHTNSFM

SEQ ID NO: 7006 - protein, 7 aa, synthetic construct
GGPQSLE

SEQ ID NO: 7007 - protein, 7 aa, synthetic construct
HPAHMQQ

SEQ ID NO: 7008 - protein, 7 aa, synthetic construct
TSTPYHA

SEQ ID NO: 7009 - protein, 7 aa, synthetic construct
DYHKEKP

SEQ ID NO: 7010 - protein, 7 aa, synthetic construct
PGVPAEQ

SEQ ID NO: 7011 - protein, 7 aa, synthetic construct
ARGMQQF

SEQ ID NO: 7012 - protein, 7 aa, synthetic construct
YYEITKD

SEQ ID NO: 7013 - protein, 7 aa, synthetic construct
MQHDRSE

SEQ ID NO: 7014 - protein, 7 aa, synthetic construct
YSYKPAD

SEQ ID NO: 7015 - protein, 7 aa, synthetic construct
PKPEKDE

SEQ ID NO: 7016 - protein, 7 aa, synthetic construct
GGEVASK

SEQ ID NO: 7017 - protein, 7 aa, synthetic construct
FGHEMTH

SEQ ID NO: 7018 - protein, 7 aa, synthetic construct
ARIVQSG

SEQ ID NO: 7019 - protein, 7 aa, synthetic construct
YKPSLGH

SEQ ID NO: 7020 - protein, 7 aa, synthetic construct
NLGDRLA

SEQ ID NO: 7021 - protein, 7 aa, synthetic construct
APTDQSQ

SEQ ID NO: 7022 - protein, 7 aa, synthetic construct
DFEDGNM

SEQ ID NO: 7023 - protein, 7 aa, synthetic construct
TSKMERS

SEQ ID NO: 7024 - protein, 7 aa, synthetic construct
MRAEPVI

SEQ ID NO: 7025 - protein, 7 aa, synthetic construct
SSLGAVS

SEQ ID NO: 7026 - protein, 7 aa, synthetic construct
SAADLQY

SEQ ID NO: 7027 - protein, 7 aa, synthetic construct
DVTHRDK

SEQ ID NO: 7028 - protein, 7 aa, synthetic construct
PSQHIEG

SEQ ID NO: 7029 - protein, 7 aa, synthetic construct
PTANETA

SEQ ID NO: 7030 - protein, 7 aa, synthetic construct
TSFSAQM

SEQ ID NO: 7031 - protein, 7 aa, synthetic construct
RHAQGGF

SEQ ID NO: 7032 - protein, 7 aa, synthetic construct
QDRQNAF

SEQ ID NO: 7033 - protein, 7 aa, synthetic construct
MTVRHDT

SEQ ID NO: 7034 - protein, 7 aa, synthetic construct
TEQRPME

SEQ ID NO: 7035 - protein, 7 aa, synthetic construct
KSSKIET

SEQ ID NO: 7036 - protein, 7 aa, synthetic construct
NYEKQDW

SEQ ID NO: 7037 - protein, 7 aa, synthetic construct
IMKNSHY

SEQ ID NO: 7038 - protein, 7 aa, synthetic construct
REMSPLH

SEQ ID NO: 7039 - protein, 7 aa, synthetic construct
PGRISNG

SEQ ID NO: 7040 - protein, 7 aa, synthetic construct
QTREDYM

SEQ ID NO: 7041 - protein, 7 aa, synthetic construct
NNAPHDK

SEQ ID NO: 7042 - protein, 7 aa, synthetic construct
VDPRMKS

SEQ ID NO: 7043 - protein, 7 aa, synthetic construct
TEFVHTG

SEQ ID NO: 7044 - protein, 7 aa, synthetic construct
DPHQSEV

SEQ ID NO: 7045 - protein, 7 aa, synthetic construct
WSTESAL

SEQ ID NO: 7046 - protein, 7 aa, synthetic construct
HQMSKAE

SEQ ID NO: 7047 - protein, 7 aa, synthetic construct
GTDRQIE

SEQ ID NO: 7048 - protein, 7 aa, synthetic construct
ITVNVPM

SEQ ID NO: 7049 - protein, 7 aa, synthetic construct
RLKDNGL

SEQ ID NO: 7050 - protein, 7 aa, synthetic construct
PTKPDGE

SEQ ID NO: 7051 - protein, 7 aa, synthetic construct
HANQTTR

SEQ ID NO: 7052 - protein, 7 aa, synthetic construct
KLSPEMN

SEQ ID NO: 7053 - protein, 7 aa, synthetic construct
YPEIQSR

SEQ ID NO: 7054 - protein, 7 aa, synthetic construct
SAPMTER

SEQ ID NO: 7055 - protein, 7 aa, synthetic construct
LDDRNNT

SEQ ID NO: 7056 - protein, 7 aa, synthetic construct
IIMNNGR

SEQ ID NO: 7057 - protein, 7 aa, synthetic construct
TQTGEMK

SEQ ID NO: 7058 - protein, 7 aa, synthetic construct
NHLTREQ

SEQ ID NO: 7059 - protein, 7 aa, synthetic construct
AYEHQKF

SEQ ID NO: 7060 - protein, 7 aa, synthetic construct
NEEKMLQ

SEQ ID NO: 7061 - protein, 7 aa, synthetic construct
TTAARHQ

SEQ ID NO: 7062 - protein, 7 aa, synthetic construct
APERFNM

SEQ ID NO: 7063 - protein, 7 aa, synthetic construct
VLTDRNH

SEQ ID NO: 7064 - protein, 7 aa, synthetic construct
RRDDKVN

SEQ ID NO: 7065 - protein, 7 aa, synthetic construct
DDFAGKA

SEQ ID NO: 7066 - protein, 7 aa, synthetic construct
RTQITSP

SEQ ID NO: 7067 - protein, 7 aa, synthetic construct
SGTQGFM

SEQ ID NO: 7068 - protein, 7 aa, synthetic construct
PQTAKVP

SEQ ID NO: 7069 - protein, 7 aa, synthetic construct
GNIGAIV

SEQ ID NO: 7070 - protein, 7 aa, synthetic construct
YPTLLGG

SEQ ID NO: 7071 - protein, 7 aa, synthetic construct
KIFGDTL

SEQ ID NO: 7072 - protein, 7 aa, synthetic construct
SKQIMQD

SEQ ID NO: 7073 - protein, 7 aa, synthetic construct
KGVMTQA

SEQ ID NO: 7074 - protein, 7 aa, synthetic construct
NPNMAQS

SEQ ID NO: 7075 - protein, 7 aa, synthetic construct
IAGIGDR

SEQ ID NO: 7076 - protein, 7 aa, synthetic construct
QVGAEMP

SEQ ID NO: 7077 - protein, 7 aa, synthetic construct
VHDLHLA

SEQ ID NO: 7078 - protein, 7 aa, synthetic construct
KDSLFAA

SEQ ID NO: 7079 - protein, 7 aa, synthetic construct
MPGHDMN

SEQ ID NO: 7080 - protein, 7 aa, synthetic construct
PYLGIQE

SEQ ID NO: 7081 - protein, 7 aa, synthetic construct
KTVHNQV

SEQ ID NO: 7082 - protein, 7 aa, synthetic construct
EFSYTKP

SEQ ID NO: 7083 - protein, 7 aa, synthetic construct
TRPDLVQ

SEQ ID NO: 7084 - protein, 7 aa, synthetic construct
EAQKLMT

SEQ ID NO: 7085 - protein, 7 aa, synthetic construct
GGLNVHS

SEQ ID NO: 7086 - protein, 7 aa, synthetic construct
QVAGWQE

SEQ ID NO: 7087 - protein, 7 aa, synthetic construct
ALDMRPR

SEQ ID NO: 7088 - protein, 7 aa, synthetic construct
QGKSWAA

SEQ ID NO: 7089 - protein, 7 aa, synthetic construct
QLQGQGH

SEQ ID NO: 7090 - protein, 7 aa, synthetic construct
PTKFEKM

SEQ ID NO: 7091 - protein, 7 aa, synthetic construct
LKDFNVN

SEQ ID NO: 7092 - protein, 7 aa, synthetic construct
WDMNTAR

SEQ ID NO: 7093 - protein, 7 aa, synthetic construct
NFVQNAP

SEQ ID NO: 7094 - protein, 7 aa, synthetic construct
GMTHGIV

SEQ ID NO: 7095 - protein, 7 aa, synthetic construct
PAFPHKG

SEQ ID NO: 7096 - protein, 7 aa, synthetic construct
VGQLQQV

SEQ ID NO: 7097 - protein, 7 aa, synthetic construct
PFIRSED

SEQ ID NO: 7098 - protein, 7 aa, synthetic construct
NYKDHQN

SEQ ID NO: 7099 - protein, 7 aa, synthetic construct
GKPDDSI

SEQ ID NO: 7100 - protein, 7 aa, synthetic construct
DPLKDHV

SEQ ID NO: 7101 - protein, 7 aa, synthetic construct
GDNHFQG

SEQ ID NO: 7102 - protein, 7 aa, synthetic construct
MDKKAYE

SEQ ID NO: 7103 - protein, 7 aa, synthetic construct
PASHEQK

SEQ ID NO: 7104 - protein, 7 aa, synthetic construct
GVAHEEK

SEQ ID NO: 7105 - protein, 7 aa, synthetic construct
RDVPDQT

SEQ ID NO: 7106 - protein, 7 aa, synthetic construct
IIPLHAP

SEQ ID NO: 7107 - protein, 7 aa, synthetic construct
DNNEHKR

SEQ ID NO: 7108 - protein, 7 aa, synthetic construct
NWKEDSS

SEQ ID NO: 7109 - protein, 7 aa, synthetic construct
SGHEQFI

SEQ ID NO: 7110 - protein, 7 aa, synthetic construct
PSGKMAH

SEQ ID NO: 7111 - protein, 7 aa, synthetic construct
LPNGSWQ

SEQ ID NO: 7112 - protein, 7 aa, synthetic construct
DHQQDNS

SEQ ID NO: 7113 - protein, 7 aa, synthetic construct
EGFQNNR

SEQ ID NO: 7114 - protein, 7 aa, synthetic construct
LDTKKVS

SEQ ID NO: 7115 - protein, 7 aa, synthetic construct
FTAHTTP

SEQ ID NO: 7116 - protein, 7 aa, synthetic construct
KWKDPQS

SEQ ID NO: 7117 - protein, 7 aa, synthetic construct
NTDQNRQ

SEQ ID NO: 7118 - protein, 7 aa, synthetic construct
GLDHHDR

SEQ ID NO: 7119 - protein, 7 aa, synthetic construct
DMTRMGP

SEQ ID NO: 7120 - protein, 7 aa, synthetic construct
TYKMSME

SEQ ID NO: 7121 - protein, 7 aa, synthetic construct
QHYNSIG

SEQ ID NO: 7122 - protein, 7 aa, synthetic construct
QSNIAAN

SEQ ID NO: 7123 - protein, 7 aa, synthetic construct
SIKQQHI

SEQ ID NO: 7124 - protein, 7 aa, synthetic construct
MNPAVAH

SEQ ID NO: 7125 - protein, 7 aa, synthetic construct
MYNGMTS

SEQ ID NO: 7126 - protein, 7 aa, synthetic construct
MAAQDKV

SEQ ID NO: 7127 - protein, 7 aa, synthetic construct
QSDAPPY

SEQ ID NO: 7128 - protein, 7 aa, synthetic construct
HDAGMTS

SEQ ID NO: 7129 - protein, 7 aa, synthetic construct
NEFNSDH

SEQ ID NO: 7130 - protein, 7 aa, synthetic construct
YVKAPTM

SEQ ID NO: 7131 - protein, 7 aa, synthetic construct
GIMRPVP

SEQ ID NO: 7132 - protein, 7 aa, synthetic construct
QPTMPMT

SEQ ID NO: 7133 - protein, 7 aa, synthetic construct
TASSLAL

SEQ ID NO: 7134 - protein, 7 aa, synthetic construct
ARNEVFQ

SEQ ID NO: 7135 - protein, 7 aa, synthetic construct
IKQVLHN

SEQ ID NO: 7136 - protein, 7 aa, synthetic construct
FMRTPDP

SEQ ID NO: 7137 - protein, 7 aa, synthetic construct
MPTPSQE

SEQ ID NO: 7138 - protein, 7 aa, synthetic construct
IEARIKV

SEQ ID NO: 7139 - protein, 7 aa, synthetic construct
WKDFASH

SEQ ID NO: 7140 - protein, 7 aa, synthetic construct
APGPNMW

SEQ ID NO: 7141 - protein, 7 aa, synthetic construct
TNLDKQD

SEQ ID NO: 7142 - protein, 7 aa, synthetic construct
PKEGAVQ

SEQ ID NO: 7143 - protein, 7 aa, synthetic construct
WEENKGA

SEQ ID NO: 7144 - protein, 7 aa, synthetic construct
RSHIVVE

SEQ ID NO: 7145 - protein, 7 aa, synthetic construct
NMNAAMN

SEQ ID NO: 7146 - protein, 7 aa, synthetic construct
EGQGSGE

SEQ ID NO: 7147 - protein, 7 aa, synthetic construct
NGHELAF

SEQ ID NO: 7148 - protein, 7 aa, synthetic construct
NVSTFAG

SEQ ID NO: 7149 - protein, 7 aa, synthetic construct
LDLKPKA

SEQ ID NO: 7150 - protein, 7 aa, synthetic construct
MNSMDGR

SEQ ID NO: 7151 - protein, 7 aa, synthetic construct
LGLIPEG

SEQ ID NO: 7152 - protein, 7 aa, synthetic construct
GGAHIER

SEQ ID NO: 7153 - protein, 7 aa, synthetic construct
PQPRPIN

SEQ ID NO: 7154 - protein, 7 aa, synthetic construct
MEQKNIK

SEQ ID NO: 7155 - protein, 7 aa, synthetic construct
KHPPDSI

SEQ ID NO: 7156 - protein, 7 aa, synthetic construct
AAHAVTD

SEQ ID NO: 7157 - protein, 7 aa, synthetic construct
NYNGNTS

SEQ ID NO: 7158 - protein, 7 aa, synthetic construct
VHPQTYK

SEQ ID NO: 7159 - protein, 7 aa, synthetic construct
VMSNTRQ

SEQ ID NO: 7160 - protein, 7 aa, synthetic construct
MPSQEIG

SEQ ID NO: 7161 - protein, 7 aa, synthetic construct
HMMQPVE

SEQ ID NO: 7162 - protein, 7 aa, synthetic construct
AHLLEGK

SEQ ID NO: 7163 - protein, 7 aa, synthetic construct
MKEYKSE

SEQ ID NO: 7164 - protein, 7 aa, synthetic construct
KSRDTMH

SEQ ID NO: 7165 - protein, 7 aa, synthetic construct
HLERIPH

SEQ ID NO: 7166 - protein, 7 aa, synthetic construct
MTDRSQV

SEQ ID NO: 7167 - protein, 7 aa, synthetic construct
TNHLDTV

SEQ ID NO: 7168 - protein, 7 aa, synthetic construct
SQGNGPR

SEQ ID NO: 7169 - protein, 7 aa, synthetic construct
VARAENF

SEQ ID NO: 7170 - protein, 7 aa, synthetic construct
QQLGKGS

SEQ ID NO: 7171 - protein, 7 aa, synthetic construct
DKHHPHV

SEQ ID NO: 7172 - protein, 7 aa, synthetic construct
RGSVTSV

SEQ ID NO: 7173 - protein, 7 aa, synthetic construct
TKALSFQ

SEQ ID NO: 7174 - protein, 7 aa, synthetic construct
VHNFHTA

SEQ ID NO: 7175 - protein, 7 aa, synthetic construct
CTQCDPV

SEQ ID NO: 7176 - protein, 7 aa, synthetic construct
DVKGLIS

SEQ ID NO: 7177 - protein, 7 aa, synthetic construct
KTNNIEP

SEQ ID NO: 7178 - protein, 7 aa, synthetic construct
LINTTNE

SEQ ID NO: 7179 - protein, 7 aa, synthetic construct
NVRGPSF

SEQ ID NO: 7180 - protein, 7 aa, synthetic construct
EEGYKRQ

SEQ ID NO: 7181 - protein, 7 aa, synthetic construct
SYGEQQG

SEQ ID NO: 7182 - protein, 7 aa, synthetic construct
LKDIEGE

SEQ ID NO: 7183 - protein, 7 aa, synthetic construct
YDMVTKM

SEQ ID NO: 7184 - protein, 7 aa, synthetic construct
EQQGPVI

SEQ ID NO: 7185 - protein, 7 aa, synthetic construct
FQNKMYG

SEQ ID NO: 7186 - protein, 7 aa, synthetic construct
KFHNPGQ

SEQ ID NO: 7187 - protein, 7 aa, synthetic construct
AGATFGI

SEQ ID NO: 7188 - protein, 7 aa, synthetic construct
PNIPHAD

SEQ ID NO: 7189 - protein, 7 aa, synthetic construct
YRGPPAN

SEQ ID NO: 7190 - protein, 7 aa, synthetic construct
TLTRENE

SEQ ID NO: 7191 - protein, 7 aa, synthetic construct
FVDKNDR

SEQ ID NO: 7192 - protein, 7 aa, synthetic construct
YHSDRGH

SEQ ID NO: 7193 - protein, 7 aa, synthetic construct
QNPTIHI

SEQ ID NO: 7194 - protein, 7 aa, synthetic construct
VTQNMVH

SEQ ID NO: 7195 - protein, 7 aa, synthetic construct
SQTALTT

SEQ ID NO: 7196 - protein, 7 aa, synthetic construct
PVGGLDK

SEQ ID NO: 7197 - protein, 7 aa, synthetic construct
KAESGSG

SEQ ID NO: 7198 - protein, 7 aa, synthetic construct
PAVAMEG

SEQ ID NO: 7199 - protein, 7 aa, synthetic construct
KMLQNEY

SEQ ID NO: 7200 - protein, 7 aa, synthetic construct
WGSQSSS

SEQ ID NO: 7201 - protein, 7 aa, synthetic construct
WVKNGQN

SEQ ID NO: 7202 - protein, 7 aa, synthetic construct
NDKGTKP

SEQ ID NO: 7203 - protein, 7 aa, synthetic construct
EKYPVVI

SEQ ID NO: 7204 - protein, 7 aa, synthetic construct
PNAQAYH

SEQ ID NO: 7205 - protein, 7 aa, synthetic construct
ITNDRGW

SEQ ID NO: 7206 - protein, 7 aa, synthetic construct
KQVNDKA

SEQ ID NO: 7207 - protein, 7 aa, synthetic construct
NEKVQHG

SEQ ID NO: 7208 - protein, 7 aa, synthetic construct
DFKQPRV

SEQ ID NO: 7209 - protein, 7 aa, synthetic construct
RRDNGNM

SEQ ID NO: 7210 - protein, 7 aa, synthetic construct
LGDQYQV

SEQ ID NO: 7211 - protein, 7 aa, synthetic construct
AYHTTVT

SEQ ID NO: 7212 - protein, 7 aa, synthetic construct
RTEKGEH

SEQ ID NO: 7213 - protein, 7 aa, synthetic construct
IITEQRS

SEQ ID NO: 7214 - protein, 7 aa, synthetic construct
GGDKYQW

SEQ ID NO: 7215 - protein, 7 aa, synthetic construct
VAMNLKA

SEQ ID NO: 7216 - protein, 7 aa, synthetic construct
MAGVYKV

SEQ ID NO: 7217 - protein, 7 aa, synthetic construct
NIPQAGY

SEQ ID NO: 7218 - protein, 7 aa, synthetic construct
MRLEGIA

SEQ ID NO: 7219 - protein, 7 aa, synthetic construct
KTVTLAQ

SEQ ID NO: 7220 - protein, 7 aa, synthetic construct
PIRNDIH

SEQ ID NO: 7221 - protein, 7 aa, synthetic construct
SPTLLAN

SEQ ID NO: 7222 - protein, 7 aa, synthetic construct
TMAGIVV

SEQ ID NO: 7223 - protein, 7 aa, synthetic construct
NNVVYAE

SEQ ID NO: 7224 - protein, 7 aa, synthetic construct
GRNPVVI

SEQ ID NO: 7225 - protein, 7 aa, synthetic construct
NAINKDY

SEQ ID NO: 7226 - protein, 7 aa, synthetic construct
PESPSLW

SEQ ID NO: 7227 - protein, 7 aa, synthetic construct
NNESQMN

SEQ ID NO: 7228 - protein, 7 aa, synthetic construct
HVEKHTI

SEQ ID NO: 7229 - protein, 7 aa, synthetic construct
KLGEHGM

SEQ ID NO: 7230 - protein, 7 aa, synthetic construct
DSYAGHA

SEQ ID NO: 7231 - protein, 7 aa, synthetic construct
PYQDARH

SEQ ID NO: 7232 - protein, 7 aa, synthetic construct
FKAHHES

SEQ ID NO: 7233 - protein, 7 aa, synthetic construct
AAEGAYT

SEQ ID NO: 7234 - protein, 7 aa, synthetic construct
TNDKLFI

SEQ ID NO: 7235 - protein, 7 aa, synthetic construct
NMGQDSA

SEQ ID NO: 7236 - protein, 7 aa, synthetic construct
TSTNPAA

SEQ ID NO: 7237 - protein, 7 aa, synthetic construct
REVGMQT

SEQ ID NO: 7238 - protein, 7 aa, synthetic construct
PGQAAFS

SEQ ID NO: 7239 - protein, 7 aa, synthetic construct
DYYTEEK

SEQ ID NO: 7240 - protein, 7 aa, synthetic construct
RIGELHA

SEQ ID NO: 7241 - protein, 7 aa, synthetic construct
TWKPEYS

SEQ ID NO: 7242 - protein, 7 aa, synthetic construct
LSAGMNV

SEQ ID NO: 7243 - protein, 7 aa, synthetic construct
RLDDPKV

SEQ ID NO: 7244 - protein, 7 aa, synthetic construct
SEVQNVK

SEQ ID NO: 7245 - protein, 7 aa, synthetic construct
NRTANSF

SEQ ID NO: 7246 - protein, 7 aa, synthetic construct
NWQKEME

SEQ ID NO: 7247 - protein, 7 aa, synthetic construct
MFSATHS

SEQ ID NO: 7248 - protein, 7 aa, synthetic construct
PEKTTIE

SEQ ID NO: 7249 - protein, 7 aa, synthetic construct
HYGPGDF

SEQ ID NO: 7250 - protein, 7 aa, synthetic construct
TELKPNE

SEQ ID NO: 7251 - protein, 7 aa, synthetic construct
WRVEAVK

SEQ ID NO: 7252 - protein, 7 aa, synthetic construct
WQGSIQP

SEQ ID NO: 7253 - protein, 7 aa, synthetic construct
DTITPRV

SEQ ID NO: 7254 - protein, 7 aa, synthetic construct
VNMLGHV

SEQ ID NO: 7255 - protein, 7 aa, synthetic construct
NPVNSET

SEQ ID NO: 7256 - protein, 7 aa, synthetic construct
FAKESYT

SEQ ID NO: 7257 - protein, 7 aa, synthetic construct
FGTTIMD

SEQ ID NO: 7258 - protein, 7 aa, synthetic construct
LDGFTEK

SEQ ID NO: 7259 - protein, 7 aa, synthetic construct
EWKATKT

SEQ ID NO: 7260 - protein, 7 aa, synthetic construct
HISNISP

SEQ ID NO: 7261 - protein, 7 aa, synthetic construct
PQGPRYP

SEQ ID NO: 7262 - protein, 7 aa, synthetic construct
EANNSSR

SEQ ID NO: 7263 - protein, 7 aa, synthetic construct
ENVTRLL

SEQ ID NO: 7264 - protein, 7 aa, synthetic construct
MKFVDNL

SEQ ID NO: 7265 - protein, 7 aa, synthetic construct
SVLGNVS

SEQ ID NO: 7266 - protein, 7 aa, synthetic construct
HSSKHSN

SEQ ID NO: 7267 - protein, 7 aa, synthetic construct
QSAQMSL

SEQ ID NO: 7268 - protein, 7 aa, synthetic construct
NSVYISG

SEQ ID NO: 7269 - protein, 7 aa, synthetic construct
KNGVDFV

SEQ ID NO: 7270 - protein, 7 aa, synthetic construct
ERSEVTG

SEQ ID NO: 7271 - protein, 7 aa, synthetic construct
AAHPTRQ

SEQ ID NO: 7272 - protein, 7 aa, synthetic construct
GYSAAHD

SEQ ID NO: 7273 - protein, 7 aa, synthetic construct
QYQSMTE

SEQ ID NO: 7274 - protein, 7 aa, synthetic construct
NEIKTQL

SEQ ID NO: 7275 - protein, 7 aa, synthetic construct
NESVKNH

SEQ ID NO: 7276 - protein, 7 aa, synthetic construct
TQQQSNV

SEQ ID NO: 7277 - protein, 7 aa, synthetic construct
GRDFIEF

SEQ ID NO: 7278 - protein, 7 aa, synthetic construct
DPYPASS

SEQ ID NO: 7279 - protein, 7 aa, synthetic construct
AGIQFKD

SEQ ID NO: 7280 - protein, 7 aa, synthetic construct
VVQIRGG

SEQ ID NO: 7281 - protein, 7 aa, synthetic construct
APDPSAN

SEQ ID NO: 7282 - protein, 7 aa, synthetic construct
LSQIQHN

SEQ ID NO: 7283 - protein, 7 aa, synthetic construct
HSPFYQA

SEQ ID NO: 7284 - protein, 7 aa, synthetic construct
QQNETLY

SEQ ID NO: 7285 - protein, 7 aa, synthetic construct
QEVKSID

SEQ ID NO: 7286 - protein, 7 aa, synthetic construct
VKILQQE

SEQ ID NO: 7287 - protein, 7 aa, synthetic construct
IAQEEGK

SEQ ID NO: 7288 - protein, 7 aa, synthetic construct
FLNGKVP

SEQ ID NO: 7289 - protein, 7 aa, synthetic construct
QNDASDR

SEQ ID NO: 7290 - protein, 7 aa, synthetic construct
VRQENDM

SEQ ID NO: 7291 - protein, 7 aa, synthetic construct
EAIRHLE

SEQ ID NO: 7292 - protein, 7 aa, synthetic construct
KFSANIN

SEQ ID NO: 7293 - protein, 7 aa, synthetic construct
PVMGGGI

SEQ ID NO: 7294 - protein, 7 aa, synthetic construct
IHEPMDN

SEQ ID NO: 7295 - protein, 7 aa, synthetic construct
VSTPIHP

SEQ ID NO: 7296 - protein, 7 aa, synthetic construct
NQHLSEH

SEQ ID NO: 7297 - protein, 7 aa, synthetic construct
ARPSMST

SEQ ID NO: 7298 - protein, 7 aa, synthetic construct
MVTQASR

SEQ ID NO: 7299 - protein, 7 aa, synthetic construct
KEPVPVS

SEQ ID NO: 7300 - protein, 7 aa, synthetic construct
GNDVQYV

SEQ ID NO: 7301 - protein, 7 aa, synthetic construct
PNDKHTW

SEQ ID NO: 7302 - protein, 7 aa, synthetic construct
RSAGPIY

SEQ ID NO: 7303 - protein, 7 aa, synthetic construct
IDRYQAD

SEQ ID NO: 7304 - protein, 7 aa, synthetic construct
EQKWQEQ

SEQ ID NO: 7305 - protein, 7 aa, synthetic construct
GTQNSRS

SEQ ID NO: 7306 - protein, 7 aa, synthetic construct
LHVGNPS

SEQ ID NO: 7307 - protein, 7 aa, synthetic construct
HSGDHNP

SEQ ID NO: 7308 - protein, 7 aa, synthetic construct
TKAFKYD

SEQ ID NO: 7309 - protein, 7 aa, synthetic construct
EKNADVV

SEQ ID NO: 7310 - protein, 7 aa, synthetic construct
KEGQEMS

SEQ ID NO: 7311 - protein, 7 aa, synthetic construct
RFGMQEI

SEQ ID NO: 7312 - protein, 7 aa, synthetic construct
LAVNQNE

SEQ ID NO: 7313 - protein, 7 aa, synthetic construct
WFPGDVE

SEQ ID NO: 7314 - protein, 7 aa, synthetic construct
RMYGLPE

SEQ ID NO: 7315 - protein, 7 aa, synthetic construct
EKVPELF

SEQ ID NO: 7316 - protein, 7 aa, synthetic construct
TYTEPAR

SEQ ID NO: 7317 - protein, 7 aa, synthetic construct
MAPFQRD

SEQ ID NO: 7318 - protein, 7 aa, synthetic construct
YINDKIS

SEQ ID NO: 7319 - protein, 7 aa, synthetic construct
DEPPLIG

SEQ ID NO: 7320 - protein, 7 aa, synthetic construct
SIAFPES

SEQ ID NO: 7321 - protein, 7 aa, synthetic construct
EKQLISS

SEQ ID NO: 7322 - protein, 7 aa, synthetic construct
MANLQRT

SEQ ID NO: 7323 - protein, 7 aa, synthetic construct
KHYDAAA

SEQ ID NO: 7324 - protein, 7 aa, synthetic construct
ADRKGYV

SEQ ID NO: 7325 - protein, 7 aa, synthetic construct
GGLGRAA

SEQ ID NO: 7326 - protein, 7 aa, synthetic construct
PPKDNHN

SEQ ID NO: 7327 - protein, 7 aa, synthetic construct
MADIKPE

SEQ ID NO: 7328 - protein, 7 aa, synthetic construct
WPDDHSK

SEQ ID NO: 7329 - protein, 7 aa, synthetic construct
IPDVRAS

SEQ ID NO: 7330 - protein, 7 aa, synthetic construct
MDIQKEG

SEQ ID NO: 7331 - protein, 7 aa, synthetic construct
IHASKIM

SEQ ID NO: 7332 - protein, 7 aa, synthetic construct
GHQEAVA

SEQ ID NO: 7333 - protein, 7 aa, synthetic construct
VAHMFKD

SEQ ID NO: 7334 - protein, 7 aa, synthetic construct
IEERFPG

SEQ ID NO: 7335 - protein, 7 aa, synthetic construct
IEPYFHA

SEQ ID NO: 7336 - protein, 7 aa, synthetic construct
HLQHNRP

SEQ ID NO: 7337 - protein, 7 aa, synthetic construct
GNFNVTQ

SEQ ID NO: 7338 - protein, 7 aa, synthetic construct
PIQGEFD

SEQ ID NO: 7339 - protein, 7 aa, synthetic construct
HSDLAQN

SEQ ID NO: 7340 - protein, 7 aa, synthetic construct
YQVPSNP

SEQ ID NO: 7341 - protein, 7 aa, synthetic construct
SQNMWRE

SEQ ID NO: 7342 - protein, 7 aa, synthetic construct
KSDSNWI

SEQ ID NO: 7343 - protein, 7 aa, synthetic construct
HFDVDEG

SEQ ID NO: 7344 - protein, 7 aa, synthetic construct
GAQTIMM

SEQ ID NO: 7345 - protein, 7 aa, synthetic construct
LEKQYVE

SEQ ID NO: 7346 - protein, 7 aa, synthetic construct
MFAKEEY

SEQ ID NO: 7347 - protein, 7 aa, synthetic construct
NDGEHRL

SEQ ID NO: 7348 - protein, 7 aa, synthetic construct
AVSMEYS

SEQ ID NO: 7349 - protein, 7 aa, synthetic construct
DVPKSWS

SEQ ID NO: 7350 - protein, 7 aa, synthetic construct
NAMSDLK

SEQ ID NO: 7351 - protein, 7 aa, synthetic construct
SGRALNQ

SEQ ID NO: 7352 - protein, 7 aa, synthetic construct
NLKVNAN

SEQ ID NO: 7353 - protein, 7 aa, synthetic construct
DHYHEDK

SEQ ID NO: 7354 - protein, 7 aa, synthetic construct
PIQPPGE

SEQ ID NO: 7355 - protein, 7 aa, synthetic construct
LSPNWMG

SEQ ID NO: 7356 - protein, 7 aa, synthetic construct
ISPHKFG

SEQ ID NO: 7357 - protein, 7 aa, synthetic construct
QKELVTN

SEQ ID NO: 7358 - protein, 7 aa, synthetic construct
NEKGALM

SEQ ID NO: 7359 - protein, 7 aa, synthetic construct
FEEQQKP

SEQ ID NO: 7360 - protein, 7 aa, synthetic construct
NLDTETA

SEQ ID NO: 7361 - protein, 7 aa, synthetic construct
PAAATRL

SEQ ID NO: 7362 - protein, 7 aa, synthetic construct
VLERKSP

SEQ ID NO: 7363 - protein, 7 aa, synthetic construct
EANNTMK

SEQ ID NO: 7364 - protein, 7 aa, synthetic construct
RSSMFPN

SEQ ID NO: 7365 - protein, 7 aa, synthetic construct
EEKAKQI

SEQ ID NO: 7366 - protein, 7 aa, synthetic construct
DLREKPV

SEQ ID NO: 7367 - protein, 7 aa, synthetic construct
VQSNLTP

SEQ ID NO: 7368 - protein, 7 aa, synthetic construct
QHPIANP

SEQ ID NO: 7369 - protein, 7 aa, synthetic construct
MFQKSNI

SEQ ID NO: 7370 - protein, 7 aa, synthetic construct
VVGAEPP

SEQ ID NO: 7371 - protein, 7 aa, synthetic construct
QQRLIQP

SEQ ID NO: 7372 - protein, 7 aa, synthetic construct
RNTYSQE

SEQ ID NO: 7373 - protein, 7 aa, synthetic construct
ATGGPGL

SEQ ID NO: 7374 - protein, 7 aa, synthetic construct
AQVLRDG

SEQ ID NO: 7375 - protein, 7 aa, synthetic construct
HAGEIAA

SEQ ID NO: 7376 - protein, 7 aa, synthetic construct
MMSMRQS

SEQ ID NO: 7377 - protein, 7 aa, synthetic construct
HDREHPD

SEQ ID NO: 7378 - protein, 7 aa, synthetic construct
QGEYAIR

SEQ ID NO: 7379 - protein, 7 aa, synthetic construct
VANDSHG

SEQ ID NO: 7380 - protein, 7 aa, synthetic construct
IMTTHSE

SEQ ID NO: 7381 - protein, 7 aa, synthetic construct
EEWMRTA

SEQ ID NO: 7382 - protein, 7 aa, synthetic construct
MKYEPEE

SEQ ID NO: 7383 - protein, 7 aa, synthetic construct
AQSFSQD

SEQ ID NO: 7384 - protein, 7 aa, synthetic construct
NGENSRW

SEQ ID NO: 7385 - protein, 7 aa, synthetic construct
VTMGYPS

SEQ ID NO: 7386 - protein, 7 aa, synthetic construct
PHQVSSI

SEQ ID NO: 7387 - protein, 7 aa, synthetic construct
YTDKGQL

SEQ ID NO: 7388 - protein, 7 aa, synthetic construct
EYNSKPH

SEQ ID NO: 7389 - protein, 7 aa, synthetic construct
SVKEYNE

SEQ ID NO: 7390 - protein, 7 aa, synthetic construct
HMDRNTE

SEQ ID NO: 7391 - protein, 7 aa, synthetic construct
GDPGRDN

SEQ ID NO: 7392 - protein, 7 aa, synthetic construct
IDPGHFI

SEQ ID NO: 7393 - protein, 7 aa, synthetic construct
ADFHQEA

SEQ ID NO: 7394 - protein, 7 aa, synthetic construct
SGLTQHA

SEQ ID NO: 7395 - protein, 7 aa, synthetic construct
DMQASNR

SEQ ID NO: 7396 - protein, 7 aa, synthetic construct
TKDFGEM

SEQ ID NO: 7397 - protein, 7 aa, synthetic construct
NQAHIVM

SEQ ID NO: 7398 - protein, 7 aa, synthetic construct
IKNMLPM

SEQ ID NO: 7399 - protein, 7 aa, synthetic construct
DIHDHVA

SEQ ID NO: 7400 - protein, 7 aa, synthetic construct
DFQVGSI

SEQ ID NO: 7401 - protein, 7 aa, synthetic construct
IGRDWAA

SEQ ID NO: 7402 - protein, 7 aa, synthetic construct
TLRPEHL

SEQ ID NO: 7403 - protein, 7 aa, synthetic construct
YDQQEKQ

SEQ ID NO: 7404 - protein, 7 aa, synthetic construct
VHASAIV

SEQ ID NO: 7405 - protein, 7 aa, synthetic construct
KSTPAVF

SEQ ID NO: 7406 - protein, 7 aa, synthetic construct
PHETPRP

SEQ ID NO: 7407 - protein, 7 aa, synthetic construct
TQSMMHH

SEQ ID NO: 7408 - protein, 7 aa, synthetic construct
TTQPFIG

SEQ ID NO: 7409 - protein, 7 aa, synthetic construct
DEKSLKH

SEQ ID NO: 7410 - protein, 7 aa, synthetic construct
VSMTDGG

SEQ ID NO: 7411 - protein, 7 aa, synthetic construct
GVMRIGS

SEQ ID NO: 7412 - protein, 7 aa, synthetic construct
KDIYDRP

SEQ ID NO: 7413 - protein, 7 aa, synthetic construct
KDPGKPS

SEQ ID NO: 7414 - protein, 7 aa, synthetic construct
PDWGGTV

SEQ ID NO: 7415 - protein, 7 aa, synthetic construct
RAKEDID

SEQ ID NO: 7416 - protein, 7 aa, synthetic construct
VKMEEIR

SEQ ID NO: 7417 - protein, 7 aa, synthetic construct
YGHNSDE

SEQ ID NO: 7418 - protein, 7 aa, synthetic construct
SRDGIMH

SEQ ID NO: 7419 - protein, 7 aa, synthetic construct
MWRAKDE

SEQ ID NO: 7420 - protein, 7 aa, synthetic construct
TVNYPSD

SEQ ID NO: 7421 - protein, 7 aa, synthetic construct
WGPSMVP

SEQ ID NO: 7422 - protein, 7 aa, synthetic construct
VNVIVGA

SEQ ID NO: 7423 - protein, 7 aa, synthetic construct
EGSRQTE

SEQ ID NO: 7424 - protein, 7 aa, synthetic construct
IQDMHTM

SEQ ID NO: 7425 - protein, 7 aa, synthetic construct
PTKIHPG

SEQ ID NO: 7426 - protein, 7 aa, synthetic construct
VKMGDSD

SEQ ID NO: 7427 - protein, 7 aa, synthetic construct
WVKADLP

SEQ ID NO: 7428 - protein, 7 aa, synthetic construct
HTPGMPE

SEQ ID NO: 7429 - protein, 7 aa, synthetic construct
DPNHPQL

SEQ ID NO: 7430 - protein, 7 aa, synthetic construct
DPTKHIT

SEQ ID NO: 7431 - protein, 7 aa, synthetic construct
CASSDCG

SEQ ID NO: 7432 - protein, 7 aa, synthetic construct
NNPPMRA

SEQ ID NO: 7433 - protein, 7 aa, synthetic construct
KTNAIGI

SEQ ID NO: 7434 - protein, 7 aa, synthetic construct
ARGIVQA

SEQ ID NO: 7435 - protein, 7 aa, synthetic construct
QMHTVAE

SEQ ID NO: 7436 - protein, 7 aa, synthetic construct
PIIKMMP

SEQ ID NO: 7437 - protein, 7 aa, synthetic construct
TTVLADK

SEQ ID NO: 7438 - protein, 7 aa, synthetic construct
PINHGQV

SEQ ID NO: 7439 - protein, 7 aa, synthetic construct
NIGVNHV

SEQ ID NO: 7440 - protein, 7 aa, synthetic construct
QERATKG

SEQ ID NO: 7441 - protein, 7 aa, synthetic construct
YTPDPHE

SEQ ID NO: 7442 - protein, 7 aa, synthetic construct
PPAHVEE

SEQ ID NO: 7443 - protein, 7 aa, synthetic construct
NDNTSMM

SEQ ID NO: 7444 - protein, 7 aa, synthetic construct
NHTNPQG

SEQ ID NO: 7445 - protein, 7 aa, synthetic construct
SADRLQI

SEQ ID NO: 7446 - protein, 7 aa, synthetic construct
SNQTDKR

SEQ ID NO: 7447 - protein, 7 aa, synthetic construct
PNSEIQA

SEQ ID NO: 7448 - protein, 7 aa, synthetic construct
HYSAHPP

SEQ ID NO: 7449 - protein, 7 aa, synthetic construct
KKDDFLD

SEQ ID NO: 7450 - protein, 7 aa, synthetic construct
PRGGDSR

SEQ ID NO: 7451 - protein, 7 aa, synthetic construct
NPVLNHI

SEQ ID NO: 7452 - protein, 7 aa, synthetic construct
NYQAGVP

SEQ ID NO: 7453 - protein, 7 aa, synthetic construct
SNKHEQQ

SEQ ID NO: 7454 - protein, 7 aa, synthetic construct
VTDKFQG

SEQ ID NO: 7455 - protein, 7 aa, synthetic construct
DTGKTIV

SEQ ID NO: 7456 - protein, 7 aa, synthetic construct
NMIEHSP

SEQ ID NO: 7457 - protein, 7 aa, synthetic construct
LDYPGER

SEQ ID NO: 7458 - protein, 7 aa, synthetic construct
QRVQPNN

SEQ ID NO: 7459 - protein, 7 aa, synthetic construct
LKAEDIS

SEQ ID NO: 7460 - protein, 7 aa, synthetic construct
QYQPEPG

SEQ ID NO: 7461 - protein, 7 aa, synthetic construct
VDKAFPA

SEQ ID NO: 7462 - protein, 7 aa, synthetic construct
IRIQMNA

SEQ ID NO: 7463 - protein, 7 aa, synthetic construct
DSEYISE

SEQ ID NO: 7464 - protein, 7 aa, synthetic construct
RDVYAKD

SEQ ID NO: 7465 - protein, 7 aa, synthetic construct
PENNKHD

SEQ ID NO: 7466 - protein, 7 aa, synthetic construct
SPRKARD

SEQ ID NO: 7467 - protein, 7 aa, synthetic construct
MSSLPPH

SEQ ID NO: 7468 - protein, 7 aa, synthetic construct
NYHGDFD

SEQ ID NO: 7469 - protein, 7 aa, synthetic construct
LSMLTQE

SEQ ID NO: 7470 - protein, 7 aa, synthetic construct
ELHREQL

SEQ ID NO: 7471 - protein, 7 aa, synthetic construct
PVRALEY

SEQ ID NO: 7472 - protein, 7 aa, synthetic construct
HMREIQE

SEQ ID NO: 7473 - protein, 7 aa, synthetic construct
ETQHQDH

SEQ ID NO: 7474 - protein, 7 aa, synthetic construct
LTDDRAK

SEQ ID NO: 7475 - protein, 7 aa, synthetic construct
ASGIKHV

SEQ ID NO: 7476 - protein, 7 aa, synthetic construct
DYAVDRA

SEQ ID NO: 7477 - protein, 7 aa, synthetic construct
NMKHEWV

SEQ ID NO: 7478 - protein, 7 aa, synthetic construct
YPEHAFK

SEQ ID NO: 7479 - protein, 7 aa, synthetic construct
QGQMQLN

SEQ ID NO: 7480 - protein, 7 aa, synthetic construct
GEGGVQV

SEQ ID NO: 7481 - protein, 7 aa, synthetic construct
ANDSGKQ

SEQ ID NO: 7482 - protein, 7 aa, synthetic construct
DFGKPHS

SEQ ID NO: 7483 - protein, 7 aa, synthetic construct
PRDAHWS

SEQ ID NO: 7484 - protein, 7 aa, synthetic construct
RIRIEHD

SEQ ID NO: 7485 - protein, 7 aa, synthetic construct
NRHFLGE

SEQ ID NO: 7486 - protein, 7 aa, synthetic construct
NEQMSAK

SEQ ID NO: 7487 - protein, 7 aa, synthetic construct
WNEHWAD

SEQ ID NO: 7488 - protein, 7 aa, synthetic construct
VNEHMMM

SEQ ID NO: 7489 - protein, 7 aa, synthetic construct
ANQMGKF

SEQ ID NO: 7490 - protein, 7 aa, synthetic construct
SQPGGIF

SEQ ID NO: 7491 - protein, 7 aa, synthetic construct
WPGQDRP

SEQ ID NO: 7492 - protein, 7 aa, synthetic construct
YVAGHDI

SEQ ID NO: 7493 - protein, 7 aa, synthetic construct
ITTKNLL

SEQ ID NO: 7494 - protein, 7 aa, synthetic construct
SERDITM

SEQ ID NO: 7495 - protein, 7 aa, synthetic construct
THHPQQR

SEQ ID NO: 7496 - protein, 7 aa, synthetic construct
DSRGGLF

SEQ ID NO: 7497 - protein, 7 aa, synthetic construct
LDSISIG

SEQ ID NO: 7498 - protein, 7 aa, synthetic construct
LNSVNGM

SEQ ID NO: 7499 - protein, 7 aa, synthetic construct
EYHQIKD

SEQ ID NO: 7500 - protein, 7 aa, synthetic construct
DAHGSMA

SEQ ID NO: 7501 - protein, 7 aa, synthetic construct
SSIHAHL

SEQ ID NO: 7502 - protein, 7 aa, synthetic construct
RVPDILT

SEQ ID NO: 7503 - protein, 7 aa, synthetic construct
TSANKVV

SEQ ID NO: 7504 - protein, 7 aa, synthetic construct
INMRGVM

SEQ ID NO: 7505 - protein, 7 aa, synthetic construct
EGHKIPP

SEQ ID NO: 7506 - protein, 7 aa, synthetic construct
PNLNGLA

SEQ ID NO: 7507 - protein, 7 aa, synthetic construct
KHEAHDF

SEQ ID NO: 7508 - protein, 7 aa, synthetic construct
SKPNGTS

SEQ ID NO: 7509 - protein, 7 aa, synthetic construct
SQTGLGV

SEQ ID NO: 7510 - protein, 7 aa, synthetic construct
EDYKPHA

SEQ ID NO: 7511 - protein, 7 aa, synthetic construct
DEEVKAT

SEQ ID NO: 7512 - protein, 7 aa, synthetic construct
QKVQTEP

SEQ ID NO: 7513 - protein, 7 aa, synthetic construct
WQGDKNP

SEQ ID NO: 7514 - protein, 7 aa, synthetic construct
YADVRMV

SEQ ID NO: 7515 - protein, 7 aa, synthetic construct
RTDYLEK

SEQ ID NO: 7516 - protein, 7 aa, synthetic construct
EEQSNLS

SEQ ID NO: 7517 - protein, 7 aa, synthetic construct
MVPGMQI

SEQ ID NO: 7518 - protein, 7 aa, synthetic construct
VMDRDIN

SEQ ID NO: 7519 - protein, 7 aa, synthetic construct
RLQKMDY

SEQ ID NO: 7520 - protein, 7 aa, synthetic construct
FDAMNNK

SEQ ID NO: 7521 - protein, 7 aa, synthetic construct
ATDSTSA

SEQ ID NO: 7522 - protein, 7 aa, synthetic construct
RDKVMLQ

SEQ ID NO: 7523 - protein, 7 aa, synthetic construct
VAQNMHW

SEQ ID NO: 7524 - protein, 7 aa, synthetic construct
QDTSNQI

SEQ ID NO: 7525 - protein, 7 aa, synthetic construct
TDKVSFY

SEQ ID NO: 7526 - protein, 7 aa, synthetic construct
FPSESME

SEQ ID NO: 7527 - protein, 7 aa, synthetic construct
FAEGQVA

SEQ ID NO: 7528 - protein, 7 aa, synthetic construct
QVHDPGD

SEQ ID NO: 7529 - protein, 7 aa, synthetic construct
IPHTVEP

SEQ ID NO: 7530 - protein, 7 aa, synthetic construct
GPYVQAT

SEQ ID NO: 7531 - protein, 7 aa, synthetic construct
NQHSQRD

SEQ ID NO: 7532 - protein, 7 aa, synthetic construct
HKQMGSL

SEQ ID NO: 7533 - protein, 7 aa, synthetic construct
IVPNATY

SEQ ID NO: 7534 - protein, 7 aa, synthetic construct
MVSAKPE

SEQ ID NO: 7535 - protein, 7 aa, synthetic construct
LAQIGAE

SEQ ID NO: 7536 - protein, 7 aa, synthetic construct
TDRDTSW

SEQ ID NO: 7537 - protein, 7 aa, synthetic construct
PDQSVRL

SEQ ID NO: 7538 - protein, 7 aa, synthetic construct
QMMGVKI

SEQ ID NO: 7539 - protein, 7 aa, synthetic construct
TDHGEQS

SEQ ID NO: 7540 - protein, 7 aa, synthetic construct
NAKDELQ

SEQ ID NO: 7541 - protein, 7 aa, synthetic construct
YADLSHS

SEQ ID NO: 7542 - protein, 7 aa, synthetic construct
LKDPSDM

SEQ ID NO: 7543 - protein, 7 aa, synthetic construct
YVKDWEE

SEQ ID NO: 7544 - protein, 7 aa, synthetic construct
AEKQDFW

SEQ ID NO: 7545 - protein, 7 aa, synthetic construct
FIAVGAA

SEQ ID NO: 7546 - protein, 7 aa, synthetic construct
MGMSDAK

SEQ ID NO: 7547 - protein, 7 aa, synthetic construct
DVANARL

SEQ ID NO: 7548 - protein, 7 aa, synthetic construct
NREEHFV

SEQ ID NO: 7549 - protein, 7 aa, synthetic construct
EPNTRDR

SEQ ID NO: 7550 - protein, 7 aa, synthetic construct
PHGKPVM

SEQ ID NO: 7551 - protein, 7 aa, synthetic construct
SGEKGMD

SEQ ID NO: 7552 - protein, 7 aa, synthetic construct
IQHPYED

SEQ ID NO: 7553 - protein, 7 aa, synthetic construct
YLGPEEM

SEQ ID NO: 7554 - protein, 7 aa, synthetic construct
DAISGIN

SEQ ID NO: 7555 - protein, 7 aa, synthetic construct
QKQHHAS

SEQ ID NO: 7556 - protein, 7 aa, synthetic construct
QTNSIGL

SEQ ID NO: 7557 - protein, 7 aa, synthetic construct
NPPRYTM

SEQ ID NO: 7558 - protein, 7 aa, synthetic construct
QAMSHHM

SEQ ID NO: 7559 - protein, 7 aa, synthetic construct
ISPVQTD

SEQ ID NO: 7560 - protein, 7 aa, synthetic construct
PGMDVKN

SEQ ID NO: 7561 - protein, 7 aa, synthetic construct
GGGGWKE

SEQ ID NO: 7562 - protein, 7 aa, synthetic construct
AFKAIGS

SEQ ID NO: 7563 - protein, 7 aa, synthetic construct
TMKPIEL

SEQ ID NO: 7564 - protein, 7 aa, synthetic construct
YEADHSL

SEQ ID NO: 7565 - protein, 7 aa, synthetic construct
WHHGKLE

SEQ ID NO: 7566 - protein, 7 aa, synthetic construct
GHTDEGH

SEQ ID NO: 7567 - protein, 7 aa, synthetic construct
DAQFEAK

SEQ ID NO: 7568 - protein, 7 aa, synthetic construct
DKEPPPE

SEQ ID NO: 7569 - protein, 7 aa, synthetic construct
RDAEYTS

SEQ ID NO: 7570 - protein, 7 aa, synthetic construct
ATQNMFK

SEQ ID NO: 7571 - protein, 7 aa, synthetic construct
EKFEQTI

SEQ ID NO: 7572 - protein, 7 aa, synthetic construct
QQVESLS

SEQ ID NO: 7573 - protein, 7 aa, synthetic construct
AHAVNST

SEQ ID NO: 7574 - protein, 7 aa, synthetic construct
ELVTRMP

SEQ ID NO: 7575 - protein, 7 aa, synthetic construct
QSNSTYE

SEQ ID NO: 7576 - protein, 7 aa, synthetic construct
GHQPDPE

SEQ ID NO: 7577 - protein, 7 aa, synthetic construct
AKAQELM

SEQ ID NO: 7578 - protein, 7 aa, synthetic construct
QPKGLEK

SEQ ID NO: 7579 - protein, 7 aa, synthetic construct
HIKTYDV

SEQ ID NO: 7580 - protein, 7 aa, synthetic construct
SEPTRYM

SEQ ID NO: 7581 - protein, 7 aa, synthetic construct
REKMMIE

SEQ ID NO: 7582 - protein, 7 aa, synthetic construct
DNWNEGR

SEQ ID NO: 7583 - protein, 7 aa, synthetic construct
PGMGQQG

SEQ ID NO: 7584 - protein, 7 aa, synthetic construct
AEIRQGG

SEQ ID NO: 7585 - protein, 7 aa, synthetic construct
HIMENRE

SEQ ID NO: 7586 - protein, 7 aa, synthetic construct
LQEQARE

SEQ ID NO: 7587 - protein, 7 aa, synthetic construct
PSTEPGD

SEQ ID NO: 7588 - protein, 7 aa, synthetic construct
QLRHTSL

SEQ ID NO: 7589 - protein, 7 aa, synthetic construct
QTKVVNI

SEQ ID NO: 7590 - protein, 7 aa, synthetic construct
ERIEAPG

SEQ ID NO: 7591 - protein, 7 aa, synthetic construct
ATQHTTN

SEQ ID NO: 7592 - protein, 7 aa, synthetic construct
GSPRGPE

SEQ ID NO: 7593 - protein, 7 aa, synthetic construct
TDEHGKP

SEQ ID NO: 7594 - protein, 7 aa, synthetic construct
TPQDNHG

SEQ ID NO: 7595 - protein, 7 aa, synthetic construct
DNKSQIF

SEQ ID NO: 7596 - protein, 7 aa, synthetic construct
VQRQDQK

SEQ ID NO: 7597 - protein, 7 aa, synthetic construct
VNAENNS

SEQ ID NO: 7598 - protein, 7 aa, synthetic construct
LDKPFPL

SEQ ID NO: 7599 - protein, 7 aa, synthetic construct
DKYQLEI

SEQ ID NO: 7600 - protein, 7 aa, synthetic construct
RSNGVSW

SEQ ID NO: 7601 - protein, 7 aa, synthetic construct
THEVPKS

SEQ ID NO: 7602 - protein, 7 aa, synthetic construct
SKMDADP

SEQ ID NO: 7603 - protein, 7 aa, synthetic construct
QGTSRDR

SEQ ID NO: 7604 - protein, 7 aa, synthetic construct
SSVHDAI

SEQ ID NO: 7605 - protein, 7 aa, synthetic construct
DLAAKKV

SEQ ID NO: 7606 - protein, 7 aa, synthetic construct
TLEQRSA

SEQ ID NO: 7607 - protein, 7 aa, synthetic construct
HIVGVQA

SEQ ID NO: 7608 - protein, 7 aa, synthetic construct
KYTAVIE

SEQ ID NO: 7609 - protein, 7 aa, synthetic construct
QADKEFM

SEQ ID NO: 7610 - protein, 7 aa, synthetic construct
GHHIGPQ

SEQ ID NO: 7611 - protein, 7 aa, synthetic construct
LNIMYKD

SEQ ID NO: 7612 - protein, 7 aa, synthetic construct
ESGKTIR

SEQ ID NO: 7613 - protein, 7 aa, synthetic construct
SLFPANG

SEQ ID NO: 7614 - protein, 7 aa, synthetic construct
VNEQKLF

SEQ ID NO: 7615 - protein, 7 aa, synthetic construct
ETREGSI

SEQ ID NO: 7616 - protein, 7 aa, synthetic construct
MDAPQHI

SEQ ID NO: 7617 - protein, 7 aa, synthetic construct
DLSHGPE

SEQ ID NO: 7618 - protein, 7 aa, synthetic construct
YNHTTPE

SEQ ID NO: 7619 - protein, 7 aa, synthetic construct
TTGGPES

SEQ ID NO: 7620 - protein, 7 aa, synthetic construct
NHYNNNQ

SEQ ID NO: 7621 - protein, 7 aa, synthetic construct
PAVSAHH

SEQ ID NO: 7622 - protein, 7 aa, synthetic construct
EGDKEHH

SEQ ID NO: 7623 - protein, 7 aa, synthetic construct
QPTQPNP

SEQ ID NO: 7624 - protein, 7 aa, synthetic construct
DWSQSKG

SEQ ID NO: 7625 - protein, 7 aa, synthetic construct
LGNEPVA

SEQ ID NO: 7626 - protein, 7 aa, synthetic construct
KESADRG

SEQ ID NO: 7627 - protein, 7 aa, synthetic construct
FQGLQHD

SEQ ID NO: 7628 - protein, 7 aa, synthetic construct
SRTGLHI

SEQ ID NO: 7629 - protein, 7 aa, synthetic construct
YNEWQND

SEQ ID NO: 7630 - protein, 7 aa, synthetic construct
HIPVDRP

SEQ ID NO: 7631 - protein, 7 aa, synthetic construct
PQASMTN

SEQ ID NO: 7632 - protein, 7 aa, synthetic construct
TIHINNA

SEQ ID NO: 7633 - protein, 7 aa, synthetic construct
AHQPSIS

SEQ ID NO: 7634 - protein, 7 aa, synthetic construct
SMNVGLR

SEQ ID NO: 7635 - protein, 7 aa, synthetic construct
SKITYTQ

SEQ ID NO: 7636 - protein, 7 aa, synthetic construct
TNSEKPE

SEQ ID NO: 7637 - protein, 7 aa, synthetic construct
GKISNSY

SEQ ID NO: 7638 - protein, 7 aa, synthetic construct
AKTDEKR

SEQ ID NO: 7639 - protein, 7 aa, synthetic construct
GELTHND

SEQ ID NO: 7640 - protein, 7 aa, synthetic construct
ITANMAV

SEQ ID NO: 7641 - protein, 7 aa, synthetic construct
IRDPQWE

SEQ ID NO: 7642 - protein, 7 aa, synthetic construct
MWKEKDM

SEQ ID NO: 7643 - protein, 7 aa, synthetic construct
HGRLTPS

SEQ ID NO: 7644 - protein, 7 aa, synthetic construct
RNNEYGI

SEQ ID NO: 7645 - protein, 7 aa, synthetic construct
RTDAIRV

SEQ ID NO: 7646 - protein, 7 aa, synthetic construct
PEDIKKT

SEQ ID NO: 7647 - protein, 7 aa, synthetic construct
RNEKYEQ

SEQ ID NO: 7648 - protein, 7 aa, synthetic construct
WENSVGM

SEQ ID NO: 7649 - protein, 7 aa, synthetic construct
NVRREEY

SEQ ID NO: 7650 - protein, 7 aa, synthetic construct
AHNLPGF

SEQ ID NO: 7651 - protein, 7 aa, synthetic construct
IWSETNL

SEQ ID NO: 7652 - protein, 7 aa, synthetic construct
FKDEERV

SEQ ID NO: 7653 - protein, 7 aa, synthetic construct
PVTISGS

SEQ ID NO: 7654 - protein, 7 aa, synthetic construct
KDTGNIR

SEQ ID NO: 7655 - protein, 7 aa, synthetic construct
QQGDPNS

SEQ ID NO: 7656 - protein, 7 aa, synthetic construct
LPRQYDP

SEQ ID NO: 7657 - protein, 7 aa, synthetic construct
KSASNPY

SEQ ID NO: 7658 - protein, 7 aa, synthetic construct
LDQYMGE

SEQ ID NO: 7659 - protein, 7 aa, synthetic construct
MFQKLED

SEQ ID NO: 7660 - protein, 7 aa, synthetic construct
EASRVHL

SEQ ID NO: 7661 - protein, 7 aa, synthetic construct
NATEDRR

SEQ ID NO: 7662 - protein, 7 aa, synthetic construct
SDSTKLN

SEQ ID NO: 7663 - protein, 7 aa, synthetic construct
TESGMGH

SEQ ID NO: 7664 - protein, 7 aa, synthetic construct
ATDGKEG

SEQ ID NO: 7665 - protein, 7 aa, synthetic construct
RTDAETW

SEQ ID NO: 7666 - protein, 7 aa, synthetic construct
AQHLQEI

SEQ ID NO: 7667 - protein, 7 aa, synthetic construct
PENDHAW

SEQ ID NO: 7668 - protein, 7 aa, synthetic construct
DMFGQGI

SEQ ID NO: 7669 - protein, 7 aa, synthetic construct
PQVSQLT

SEQ ID NO: 7670 - protein, 7 aa, synthetic construct
PYQVQQD

SEQ ID NO: 7671 - protein, 7 aa, synthetic construct
YDHKEII

SEQ ID NO: 7672 - protein, 7 aa, synthetic construct
PTDKEFV

SEQ ID NO: 7673 - protein, 7 aa, synthetic construct
TQVVKER

SEQ ID NO: 7674 - protein, 7 aa, synthetic construct
RVNAKYE

SEQ ID NO: 7675 - protein, 7 aa, synthetic construct
YPNTIGR

SEQ ID NO: 7676 - protein, 7 aa, synthetic construct
DQDYDKI

SEQ ID NO: 7677 - protein, 7 aa, synthetic construct
SYKQGPA

SEQ ID NO: 7678 - protein, 7 aa, synthetic construct
PGNDHEK

SEQ ID NO: 7679 - protein, 7 aa, synthetic construct
RTEVHKQ

SEQ ID NO: 7680 - protein, 7 aa, synthetic construct
LQIHMKG

SEQ ID NO: 7681 - protein, 7 aa, synthetic construct
QKGYPMI

SEQ ID NO: 7682 - protein, 7 aa, synthetic construct
HFNTTSP

SEQ ID NO: 7683 - protein, 7 aa, synthetic construct
VRQDFLG

SEQ ID NO: 7684 - protein, 7 aa, synthetic construct
GSTKLYI

SEQ ID NO: 7685 - protein, 7 aa, synthetic construct
MQSAMNS

SEQ ID NO: 7686 - protein, 7 aa, synthetic construct
MIDNRMQ

SEQ ID NO: 7687 - protein, 7 aa, synthetic construct
LEHNRTN

SEQ ID NO: 7688 - protein, 7 aa, synthetic construct
LEAYHPV

SEQ ID NO: 7689 - protein, 7 aa, synthetic construct
VDGLYLS

SEQ ID NO: 7690 - protein, 7 aa, synthetic construct
DEMRPLS

SEQ ID NO: 7691 - protein, 7 aa, synthetic construct
WKSIEDN

SEQ ID NO: 7692 - protein, 7 aa, synthetic construct
FYPAEFE

SEQ ID NO: 7693 - protein, 7 aa, synthetic construct
GQGDHIT

SEQ ID NO: 7694 - protein, 7 aa, synthetic construct
FQTENNV

SEQ ID NO: 7695 - protein, 7 aa, synthetic construct
NTKVLMQ

SEQ ID NO: 7696 - protein, 7 aa, synthetic construct
NRPPFPI

SEQ ID NO: 7697 - protein, 7 aa, synthetic construct
GIPPVSP

SEQ ID NO: 7698 - protein, 7 aa, synthetic construct
VAGEPRA

SEQ ID NO: 7699 - protein, 7 aa, synthetic construct
GSKDTFP

SEQ ID NO: 7700 - protein, 7 aa, synthetic construct
NINSVGR

SEQ ID NO: 7701 - protein, 7 aa, synthetic construct
PESINHE

SEQ ID NO: 7702 - protein, 7 aa, synthetic construct
PDSKIAV

SEQ ID NO: 7703 - protein, 7 aa, synthetic construct
VVPKPVE

SEQ ID NO: 7704 - protein, 7 aa, synthetic construct
VEDKKVS

SEQ ID NO: 7705 - protein, 7 aa, synthetic construct
NDHPHER

SEQ ID NO: 7706 - protein, 7 aa, synthetic construct
KDRHVVT

SEQ ID NO: 7707 - protein, 7 aa, synthetic construct
GRDYPQF

SEQ ID NO: 7708 - protein, 7 aa, synthetic construct
MSDISVG

SEQ ID NO: 7709 - protein, 7 aa, synthetic construct
VLTIGNA

SEQ ID NO: 7710 - protein, 7 aa, synthetic construct
PARQGAD

SEQ ID NO: 7711 - protein, 7 aa, synthetic construct
LDGMNNH

SEQ ID NO: 7712 - protein, 7 aa, synthetic construct
KAAIEMK

SEQ ID NO: 7713 - protein, 7 aa, synthetic construct
ARLEYRE

SEQ ID NO: 7714 - protein, 7 aa, synthetic construct
DRYQGMD

SEQ ID NO: 7715 - protein, 7 aa, synthetic construct
LPFPAQG

SEQ ID NO: 7716 - protein, 7 aa, synthetic construct
TPDLMSN

SEQ ID NO: 7717 - protein, 7 aa, synthetic construct
AQRNDEK

SEQ ID NO: 7718 - protein, 7 aa, synthetic construct
DSEKGNP

SEQ ID NO: 7719 - protein, 7 aa, synthetic construct
FNAMGDT

SEQ ID NO: 7720 - protein, 7 aa, synthetic construct
FIPATAQ

SEQ ID NO: 7721 - protein, 7 aa, synthetic construct
VNALMPK

SEQ ID NO: 7722 - protein, 7 aa, synthetic construct
DISDKGM

SEQ ID NO: 7723 - protein, 7 aa, synthetic construct
DVATRNL

SEQ ID NO: 7724 - protein, 7 aa, synthetic construct
MMPKDKE

SEQ ID NO: 7725 - protein, 7 aa, synthetic construct
RNYVISE

SEQ ID NO: 7726 - protein, 7 aa, synthetic construct
DGHHGFE

SEQ ID NO: 7727 - protein, 7 aa, synthetic construct
LSGVFSE

SEQ ID NO: 7728 - protein, 7 aa, synthetic construct
GLDNVKS

SEQ ID NO: 7729 - protein, 7 aa, synthetic construct
FRMGLEH

SEQ ID NO: 7730 - protein, 7 aa, synthetic construct
EQGGIVG

SEQ ID NO: 7731 - protein, 7 aa, synthetic construct
VPYTPGP

SEQ ID NO: 7732 - protein, 7 aa, synthetic construct
NQMAMYE

SEQ ID NO: 7733 - protein, 7 aa, synthetic construct
NAGGVAF

SEQ ID NO: 7734 - protein, 7 aa, synthetic construct
TQAAINR

SEQ ID NO: 7735 - protein, 7 aa, synthetic construct
MPGDHGH

SEQ ID NO: 7736 - protein, 7 aa, synthetic construct
CSKTALP

SEQ ID NO: 7737 - protein, 7 aa, synthetic construct
SNHAVAS

SEQ ID NO: 7738 - protein, 7 aa, synthetic construct
TLMYGGE

SEQ ID NO: 7739 - protein, 7 aa, synthetic construct
SLDLKSH

SEQ ID NO: 7740 - protein, 7 aa, synthetic construct
IQNQQSD

SEQ ID NO: 7741 - protein, 7 aa, synthetic construct
KKENVVY

SEQ ID NO: 7742 - protein, 7 aa, synthetic construct
NTVYDDG

SEQ ID NO: 7743 - protein, 7 aa, synthetic construct
NYEYRTE

SEQ ID NO: 7744 - protein, 7 aa, synthetic construct
VETTLNK

SEQ ID NO: 7745 - protein, 7 aa, synthetic construct
TERIAQF

SEQ ID NO: 7746 - protein, 7 aa, synthetic construct
NSSSDST

SEQ ID NO: 7747 - protein, 7 aa, synthetic construct
YSPAHVY

SEQ ID NO: 7748 - protein, 7 aa, synthetic construct
SGHIMKE

SEQ ID NO: 7749 - protein, 7 aa, synthetic construct
IHEKNNI

SEQ ID NO: 7750 - protein, 7 aa, synthetic construct
DRYVKKE

SEQ ID NO: 7751 - protein, 7 aa, synthetic construct
RMSGLMG

SEQ ID NO: 7752 - protein, 7 aa, synthetic construct
VQNGPYK

SEQ ID NO: 7753 - protein, 7 aa, synthetic construct
SINNQGF

SEQ ID NO: 7754 - protein, 7 aa, synthetic construct
LMETQNH

SEQ ID NO: 7755 - protein, 7 aa, synthetic construct
LSDTHKN

SEQ ID NO: 7756 - protein, 7 aa, synthetic construct
QVPSGQQ

SEQ ID NO: 7757 - protein, 7 aa, synthetic construct
EVHSKMH

SEQ ID NO: 7758 - protein, 7 aa, synthetic construct
QEKPTWP

SEQ ID NO: 7759 - protein, 7 aa, synthetic construct
QKELKPH

SEQ ID NO: 7760 - protein, 7 aa, synthetic construct
KFDHFAP

SEQ ID NO: 7761 - protein, 7 aa, synthetic construct
VQKETEY

SEQ ID NO: 7762 - protein, 7 aa, synthetic construct
ENNTIHP

SEQ ID NO: 7763 - protein, 7 aa, synthetic construct
NDQNAPV

SEQ ID NO: 7764 - protein, 7 aa, synthetic construct
DRDAGGI

SEQ ID NO: 7765 - protein, 7 aa, synthetic construct
FSENYNV

SEQ ID NO: 7766 - protein, 7 aa, synthetic construct
PATIAKT

SEQ ID NO: 7767 - protein, 7 aa, synthetic construct
LSPEKTP

SEQ ID NO: 7768 - protein, 7 aa, synthetic construct
LHDQNGM

SEQ ID NO: 7769 - protein, 7 aa, synthetic construct
SSEMRET

SEQ ID NO: 7770 - protein, 7 aa, synthetic construct
HISPYED

SEQ ID NO: 7771 - protein, 7 aa, synthetic construct
RPAHMPM

SEQ ID NO: 7772 - protein, 7 aa, synthetic construct
EGFSGVA

SEQ ID NO: 7773 - protein, 7 aa, synthetic construct
SLTPHMT

SEQ ID NO: 7774 - protein, 7 aa, synthetic construct
FFAGDGK

SEQ ID NO: 7775 - protein, 7 aa, synthetic construct
NGFGNGT

SEQ ID NO: 7776 - protein, 7 aa, synthetic construct
MFRKESD

SEQ ID NO: 7777 - protein, 7 aa, synthetic construct
NPPTHRL

SEQ ID NO: 7778 - protein, 7 aa, synthetic construct
DFPKFTG

SEQ ID NO: 7779 - protein, 7 aa, synthetic construct
DTSDTLR

SEQ ID NO: 7780 - protein, 7 aa, synthetic construct
VTKEWAA

SEQ ID NO: 7781 - protein, 7 aa, synthetic construct
HQAGFAD

SEQ ID NO: 7782 - protein, 7 aa, synthetic construct
YDQQQVR

SEQ ID NO: 7783 - protein, 7 aa, synthetic construct
SDRPSIP

SEQ ID NO: 7784 - protein, 7 aa, synthetic construct
QNHFQAS

SEQ ID NO: 7785 - protein, 7 aa, synthetic construct
TVFDNHP

SEQ ID NO: 7786 - protein, 7 aa, synthetic construct
SAYYDGE

SEQ ID NO: 7787 - protein, 7 aa, synthetic construct
FHATINT

SEQ ID NO: 7788 - protein, 7 aa, synthetic construct
GPHMSRP

SEQ ID NO: 7789 - protein, 7 aa, synthetic construct
HHARDSL

SEQ ID NO: 7790 - protein, 7 aa, synthetic construct
EPQHMSA

SEQ ID NO: 7791 - protein, 7 aa, synthetic construct
IPLLNKD

SEQ ID NO: 7792 - protein, 7 aa, synthetic construct
YPEHNFA

SEQ ID NO: 7793 - protein, 7 aa, synthetic construct
ILGETNN

SEQ ID NO: 7794 - protein, 7 aa, synthetic construct
ANSQSIR

SEQ ID NO: 7795 - protein, 7 aa, synthetic construct
TAPGAVD

SEQ ID NO: 7796 - protein, 7 aa, synthetic construct
DPPPLIA

SEQ ID NO: 7797 - protein, 7 aa, synthetic construct
QHDEWSI

SEQ ID NO: 7798 - protein, 7 aa, synthetic construct
LNPTQDH

SEQ ID NO: 7799 - protein, 7 aa, synthetic construct
PVTGTAK

SEQ ID NO: 7800 - protein, 7 aa, synthetic construct
YNVSNTE

SEQ ID NO: 7801 - protein, 7 aa, synthetic construct
YGEKMPM

SEQ ID NO: 7802 - protein, 7 aa, synthetic construct
FEPAERP

SEQ ID NO: 7803 - protein, 7 aa, synthetic construct
MQGNDWR

SEQ ID NO: 7804 - protein, 7 aa, synthetic construct
GKEDRQD

SEQ ID NO: 7805 - protein, 7 aa, synthetic construct
KDDKMHE

SEQ ID NO: 7806 - protein, 7 aa, synthetic construct
TGFQDEM

SEQ ID NO: 7807 - protein, 7 aa, synthetic construct
MNLEKMM

SEQ ID NO: 7808 - protein, 7 aa, synthetic construct
WQPGTNV

SEQ ID NO: 7809 - protein, 7 aa, synthetic construct
HNNMNMV

SEQ ID NO: 7810 - protein, 7 aa, synthetic construct
PPSTKFL

SEQ ID NO: 7811 - protein, 7 aa, synthetic construct
NTAMAVP

SEQ ID NO: 7812 - protein, 7 aa, synthetic construct
HPSALPT

SEQ ID NO: 7813 - protein, 7 aa, synthetic construct
LPTNEVH

SEQ ID NO: 7814 - protein, 7 aa, synthetic construct
WNQTHSN

SEQ ID NO: 7815 - protein, 7 aa, synthetic construct
HREFTDA

SEQ ID NO: 7816 - protein, 7 aa, synthetic construct
YHDNDNG

SEQ ID NO: 7817 - protein, 7 aa, synthetic construct
AQAGKQF

SEQ ID NO: 7818 - protein, 7 aa, synthetic construct
PNETGFL

SEQ ID NO: 7819 - protein, 7 aa, synthetic construct
FDRFPHA

SEQ ID NO: 7820 - protein, 7 aa, synthetic construct
LKMPPPI

SEQ ID NO: 7821 - protein, 7 aa, synthetic construct
EATGHQY

SEQ ID NO: 7822 - protein, 7 aa, synthetic construct
FMGLGVQ

SEQ ID NO: 7823 - protein, 7 aa, synthetic construct
ENYMPKV

SEQ ID NO: 7824 - protein, 7 aa, synthetic construct
SRDTTAT

SEQ ID NO: 7825 - protein, 7 aa, synthetic construct
SINMTVS

SEQ ID NO: 7826 - protein, 7 aa, synthetic construct
PTRSKEL

SEQ ID NO: 7827 - protein, 7 aa, synthetic construct
FDQNMDR

SEQ ID NO: 7828 - protein, 7 aa, synthetic construct
TIMMQSG

SEQ ID NO: 7829 - protein, 7 aa, synthetic construct
NGRYNMD

SEQ ID NO: 7830 - protein, 7 aa, synthetic construct
HNSRPPE

SEQ ID NO: 7831 - protein, 7 aa, synthetic construct
ADLRVKD

SEQ ID NO: 7832 - protein, 7 aa, synthetic construct
VEANQKI

SEQ ID NO: 7833 - protein, 7 aa, synthetic construct
MAKHLDI

SEQ ID NO: 7834 - protein, 7 aa, synthetic construct
SNEMTQN

SEQ ID NO: 7835 - protein, 7 aa, synthetic construct
VEQRVQW

SEQ ID NO: 7836 - protein, 7 aa, synthetic construct
TNLQNET

SEQ ID NO: 7837 - protein, 7 aa, synthetic construct
HPPMTLM

SEQ ID NO: 7838 - protein, 7 aa, synthetic construct
RMLDDKN

SEQ ID NO: 7839 - protein, 7 aa, synthetic construct
HTGNPPD

SEQ ID NO: 7840 - protein, 7 aa, synthetic construct
RHDQQFH

SEQ ID NO: 7841 - protein, 7 aa, synthetic construct
HYMKPHE

SEQ ID NO: 7842 - protein, 7 aa, synthetic construct
HLSDHAG

SEQ ID NO: 7843 - protein, 7 aa, synthetic construct
PLEKYMG

SEQ ID NO: 7844 - protein, 7 aa, synthetic construct
NNREESS

SEQ ID NO: 7845 - protein, 7 aa, synthetic construct
AYHEDGS

SEQ ID NO: 7846 - protein, 7 aa, synthetic construct
NGQRPIF

SEQ ID NO: 7847 - protein, 7 aa, synthetic construct
ALPSHVL

SEQ ID NO: 7848 - protein, 7 aa, synthetic construct
GHPEKMF

SEQ ID NO: 7849 - protein, 7 aa, synthetic construct
IAPQYNQ

SEQ ID NO: 7850 - protein, 7 aa, synthetic construct
TNGSIGF

SEQ ID NO: 7851 - protein, 7 aa, synthetic construct
RLQETHL

SEQ ID NO: 7852 - protein, 7 aa, synthetic construct
GQVRTTW

SEQ ID NO: 7853 - protein, 7 aa, synthetic construct
TEREAVM

SEQ ID NO: 7854 - protein, 7 aa, synthetic construct
TKTHTMT

SEQ ID NO: 7855 - protein, 7 aa, synthetic construct
YPVADHH

SEQ ID NO: 7856 - protein, 7 aa, synthetic construct
TKPDLTL

SEQ ID NO: 7857 - protein, 7 aa, synthetic construct
FQTLPEG

SEQ ID NO: 7858 - protein, 7 aa, synthetic construct
VATKYSD

SEQ ID NO: 7859 - protein, 7 aa, synthetic construct
SNTRQNM

SEQ ID NO: 7860 - protein, 7 aa, synthetic construct
KETYGRP

SEQ ID NO: 7861 - protein, 7 aa, synthetic construct
TKMDSQP

SEQ ID NO: 7862 - protein, 7 aa, synthetic construct
IVAPEFV

SEQ ID NO: 7863 - protein, 7 aa, synthetic construct
HQMRDHE

SEQ ID NO: 7864 - protein, 7 aa, synthetic construct
KHQEMFN

SEQ ID NO: 7865 - protein, 7 aa, synthetic construct
FRQDKYA

SEQ ID NO: 7866 - protein, 7 aa, synthetic construct
YKVEDAN

SEQ ID NO: 7867 - protein, 7 aa, synthetic construct
WGPGSKG

SEQ ID NO: 7868 - protein, 7 aa, synthetic construct
STAKFIG

SEQ ID NO: 7869 - protein, 7 aa, synthetic construct
VVTQREM

SEQ ID NO: 7870 - protein, 7 aa, synthetic construct
WESNKQS

SEQ ID NO: 7871 - protein, 7 aa, synthetic construct
HTQHDIL

SEQ ID NO: 7872 - protein, 7 aa, synthetic construct
PRGAALG

SEQ ID NO: 7873 - protein, 7 aa, synthetic construct
IGAKHDE

SEQ ID NO: 7874 - protein, 7 aa, synthetic construct
IMTKEEY

SEQ ID NO: 7875 - protein, 7 aa, synthetic construct
QAFGETV

SEQ ID NO: 7876 - protein, 7 aa, synthetic construct
RDKEGID

SEQ ID NO: 7877 - protein, 7 aa, synthetic construct
HNTEGRA

SEQ ID NO: 7878 - protein, 7 aa, synthetic construct
LRMQDMK

SEQ ID NO: 7879 - protein, 7 aa, synthetic construct
LEDVKEV

SEQ ID NO: 7880 - protein, 7 aa, synthetic construct
YYQEMGA

SEQ ID NO: 7881 - protein, 7 aa, synthetic construct
TGMIQIA

SEQ ID NO: 7882 - protein, 7 aa, synthetic construct
TDYDQLG

SEQ ID NO: 7883 - protein, 7 aa, synthetic construct
FAFAKNE

SEQ ID NO: 7884 - protein, 7 aa, synthetic construct
AAGLRAT

SEQ ID NO: 7885 - protein, 7 aa, synthetic construct
SGNYHMT

SEQ ID NO: 7886 - protein, 7 aa, synthetic construct
QVVPGMP

SEQ ID NO: 7887 - protein, 7 aa, synthetic construct
LPIKHNP

SEQ ID NO: 7888 - protein, 7 aa, synthetic construct
MKEKFVQ

SEQ ID NO: 7889 - protein, 7 aa, synthetic construct
PQSDMMS

SEQ ID NO: 7890 - protein, 7 aa, synthetic construct
KPQFIPD

SEQ ID NO: 7891 - protein, 7 aa, synthetic construct
RGVDQNI

SEQ ID NO: 7892 - protein, 7 aa, synthetic construct
GSNVERL

SEQ ID NO: 7893 - protein, 7 aa, synthetic construct
SKIFPAS

SEQ ID NO: 7894 - protein, 7 aa, synthetic construct
AGQVDWS

SEQ ID NO: 7895 - protein, 7 aa, synthetic construct
YNDRHLY

SEQ ID NO: 7896 - protein, 7 aa, synthetic construct
TFLHNIP

SEQ ID NO: 7897 - protein, 7 aa, synthetic construct
PRDNWPV

SEQ ID NO: 7898 - protein, 7 aa, synthetic construct
LIEDPQN

SEQ ID NO: 7899 - protein, 7 aa, synthetic construct
HLDPNKM

SEQ ID NO: 7900 - protein, 7 aa, synthetic construct
MLISIPS

SEQ ID NO: 7901 - protein, 7 aa, synthetic construct
TDRPSPP

SEQ ID NO: 7902 - protein, 7 aa, synthetic construct
ARSNREG

SEQ ID NO: 7903 - protein, 7 aa, synthetic construct
PRHIADK

SEQ ID NO: 7904 - protein, 7 aa, synthetic construct
LTHESMG

SEQ ID NO: 7905 - protein, 7 aa, synthetic construct
AMGHMTI

SEQ ID NO: 7906 - protein, 7 aa, synthetic construct
HHHGSIA

SEQ ID NO: 7907 - protein, 7 aa, synthetic construct
EEGSFRA

SEQ ID NO: 7908 - protein, 7 aa, synthetic construct
SKENEKP

SEQ ID NO: 7909 - protein, 7 aa, synthetic construct
DVQGNAY

SEQ ID NO: 7910 - protein, 7 aa, synthetic construct
SDPEMRV

SEQ ID NO: 7911 - protein, 7 aa, synthetic construct
LMDSHFG

SEQ ID NO: 7912 - protein, 7 aa, synthetic construct
RENLGTP

SEQ ID NO: 7913 - protein, 7 aa, synthetic construct
LQSISNV

SEQ ID NO: 7914 - protein, 7 aa, synthetic construct
QKLENVP

SEQ ID NO: 7915 - protein, 7 aa, synthetic construct
LMEKMMP

SEQ ID NO: 7916 - protein, 7 aa, synthetic construct
SDEPKKI

SEQ ID NO: 7917 - protein, 7 aa, synthetic construct
VVVKETQ

SEQ ID NO: 7918 - protein, 7 aa, synthetic construct
RAESETH

SEQ ID NO: 7919 - protein, 7 aa, synthetic construct
TNPRTEL

SEQ ID NO: 7920 - protein, 7 aa, synthetic construct
TGKQLDK

SEQ ID NO: 7921 - protein, 7 aa, synthetic construct
ITVQVDR

SEQ ID NO: 7922 - protein, 7 aa, synthetic construct
GVQTYNT

SEQ ID NO: 7923 - protein, 7 aa, synthetic construct
QGKLMAS

SEQ ID NO: 7924 - protein, 7 aa, synthetic construct
AVKQVYV

SEQ ID NO: 7925 - protein, 7 aa, synthetic construct
KHVITEV

SEQ ID NO: 7926 - protein, 7 aa, synthetic construct
LKEKALN

SEQ ID NO: 7927 - protein, 7 aa, synthetic construct
GHPMHSP

SEQ ID NO: 7928 - protein, 7 aa, synthetic construct
NMEQVKT

SEQ ID NO: 7929 - protein, 7 aa, synthetic construct
TDGDVGH

SEQ ID NO: 7930 - protein, 7 aa, synthetic construct
RLPNHHG

SEQ ID NO: 7931 - protein, 7 aa, synthetic construct
IQNGDFL

SEQ ID NO: 7932 - protein, 7 aa, synthetic construct
LDTKTYN

SEQ ID NO: 7933 - protein, 7 aa, synthetic construct
MTVNVRS

SEQ ID NO: 7934 - protein, 7 aa, synthetic construct
PKPPEFS

SEQ ID NO: 7935 - protein, 7 aa, synthetic construct
AFNGMQL

SEQ ID NO: 7936 - protein, 7 aa, synthetic construct
NQPTMAL

SEQ ID NO: 7937 - protein, 7 aa, synthetic construct
TDQINEK

SEQ ID NO: 7938 - protein, 7 aa, synthetic construct
WLEKGLG

SEQ ID NO: 7939 - protein, 7 aa, synthetic construct
NAAGPVG

SEQ ID NO: 7940 - protein, 7 aa, synthetic construct
VGDRDAH

SEQ ID NO: 7941 - protein, 7 aa, synthetic construct
IINYMHE

SEQ ID NO: 7942 - protein, 7 aa, synthetic construct
NMKDNEW

SEQ ID NO: 7943 - protein, 7 aa, synthetic construct
FMQEPMT

SEQ ID NO: 7944 - protein, 7 aa, synthetic construct
QLMRSNV

SEQ ID NO: 7945 - protein, 7 aa, synthetic construct
ASSIYPH

SEQ ID NO: 7946 - protein, 7 aa, synthetic construct
KIKEEMN

SEQ ID NO: 7947 - protein, 7 aa, synthetic construct
WDVAGTG

SEQ ID NO: 7948 - protein, 7 aa, synthetic construct
EPKGWVA

SEQ ID NO: 7949 - protein, 7 aa, synthetic construct
IYHPEDL

SEQ ID NO: 7950 - protein, 7 aa, synthetic construct
NAMDAMP

SEQ ID NO: 7951 - protein, 7 aa, synthetic construct
WVMSKEV

SEQ ID NO: 7952 - protein, 7 aa, synthetic construct
HHYSGHT

SEQ ID NO: 7953 - protein, 7 aa, synthetic construct
EPGLQGL

SEQ ID NO: 7954 - protein, 7 aa, synthetic construct
IGANIQP

SEQ ID NO: 7955 - protein, 7 aa, synthetic construct
WDGDSKN

SEQ ID NO: 7956 - protein, 7 aa, synthetic construct
RTMEGQF

SEQ ID NO: 7957 - protein, 7 aa, synthetic construct
AKNQSLF

SEQ ID NO: 7958 - protein, 7 aa, synthetic construct
DERFTTD

SEQ ID NO: 7959 - protein, 7 aa, synthetic construct
KENNVHK

SEQ ID NO: 7960 - protein, 7 aa, synthetic construct
NMKLSPY

SEQ ID NO: 7961 - protein, 7 aa, synthetic construct
EKDVARV

SEQ ID NO: 7962 - protein, 7 aa, synthetic construct
RNASLVP

SEQ ID NO: 7963 - protein, 7 aa, synthetic construct
VTHMSDG

SEQ ID NO: 7964 - protein, 7 aa, synthetic construct
TYSIPEA

SEQ ID NO: 7965 - protein, 7 aa, synthetic construct
AQEAEAH

SEQ ID NO: 7966 - protein, 7 aa, synthetic construct
LQPGNIG

SEQ ID NO: 7967 - protein, 7 aa, synthetic construct
ERKPAMY

SEQ ID NO: 7968 - protein, 7 aa, synthetic construct
AKAEIEI

SEQ ID NO: 7969 - protein, 7 aa, synthetic construct
GHMLNEP

SEQ ID NO: 7970 - protein, 7 aa, synthetic construct
NQMETKH

SEQ ID NO: 7971 - protein, 7 aa, synthetic construct
NSFAHGS

SEQ ID NO: 7972 - protein, 7 aa, synthetic construct
DRYIPTE

SEQ ID NO: 7973 - protein, 7 aa, synthetic construct
ATSEHFS

SEQ ID NO: 7974 - protein, 7 aa, synthetic construct
QIDSGYP

SEQ ID NO: 7975 - protein, 7 aa, synthetic construct
GQHAISH

SEQ ID NO: 7976 - protein, 7 aa, synthetic construct
SGNDFTR

SEQ ID NO: 7977 - protein, 7 aa, synthetic construct
GNMYVKM

SEQ ID NO: 7978 - protein, 7 aa, synthetic construct
KEGLMGV

SEQ ID NO: 7979 - protein, 7 aa, synthetic construct
TSHDNYV

SEQ ID NO: 7980 - protein, 7 aa, synthetic construct
ARQEPVM

SEQ ID NO: 7981 - protein, 7 aa, synthetic construct
KMHTDWE

SEQ ID NO: 7982 - protein, 7 aa, synthetic construct
SKTEFSE

SEQ ID NO: 7983 - protein, 7 aa, synthetic construct
TEQAGTL

SEQ ID NO: 7984 - protein, 7 aa, synthetic construct
NYSPQNF

SEQ ID NO: 7985 - protein, 7 aa, synthetic construct
ITPNGLV

SEQ ID NO: 7986 - protein, 7 aa, synthetic construct
ISAMLTA

SEQ ID NO: 7987 - protein, 7 aa, synthetic construct
FDPHRHD

SEQ ID NO: 7988 - protein, 7 aa, synthetic construct
IDHNGQQ

SEQ ID NO: 7989 - protein, 7 aa, synthetic construct
IQKDWEE

SEQ ID NO: 7990 - protein, 7 aa, synthetic construct
IGSEESK

SEQ ID NO: 7991 - protein, 7 aa, synthetic construct
NAVNGEF

SEQ ID NO: 7992 - protein, 7 aa, synthetic construct
YDPARAV

SEQ ID NO: 7993 - protein, 7 aa, synthetic construct
SHKDDIR

SEQ ID NO: 7994 - protein, 7 aa, synthetic construct
HLKAEVA

SEQ ID NO: 7995 - protein, 7 aa, synthetic construct
SRSQPIQ

SEQ ID NO: 7996 - protein, 7 aa, synthetic construct
NATFMGE

SEQ ID NO: 7997 - protein, 7 aa, synthetic construct
NSNSWPK

SEQ ID NO: 7998 - protein, 7 aa, synthetic construct
LKPMHVV

SEQ ID NO: 7999 - protein, 7 aa, synthetic construct
MESSAYP

SEQ ID NO: 8000 - protein, 7 aa, synthetic construct
RIPPTDT

SEQ ID NO: 8001 - protein, 7 aa, synthetic construct
YPKHTLM

SEQ ID NO: 8002 - protein, 7 aa, synthetic construct
QKDGGEY

SEQ ID NO: 8003 - protein, 7 aa, synthetic construct
LVHRAEF

SEQ ID NO: 8004 - protein, 7 aa, synthetic construct
PHIRTGD

SEQ ID NO: 8005 - protein, 7 aa, synthetic construct
KNNHSVT

SEQ ID NO: 8006 - protein, 7 aa, synthetic construct
HAGYEGD

SEQ ID NO: 8007 - protein, 7 aa, synthetic construct
KLLKDEP

SEQ ID NO: 8008 - protein, 7 aa, synthetic construct
QNSEYMD

SEQ ID NO: 8009 - protein, 7 aa, synthetic construct
MIREEML

SEQ ID NO: 8010 - protein, 7 aa, synthetic construct
LDRGLLR

SEQ ID NO: 8011 - protein, 7 aa, synthetic construct
FAETASV

SEQ ID NO: 8012 - protein, 7 aa, synthetic construct
TNNHVLL

SEQ ID NO: 8013 - protein, 7 aa, synthetic construct
ADSIGYA

SEQ ID NO: 8014 - protein, 7 aa, synthetic construct
HNAIVGT

SEQ ID NO: 8015 - protein, 7 aa, synthetic construct
GEHYALV

SEQ ID NO: 8016 - protein, 7 aa, synthetic construct
VHEKNEI

SEQ ID NO: 8017 - protein, 7 aa, synthetic construct
DQKNKEH

SEQ ID NO: 8018 - protein, 7 aa, synthetic construct
SPLIHRG

SEQ ID NO: 8019 - protein, 7 aa, synthetic construct
NMTSGDI

SEQ ID NO: 8020 - protein, 7 aa, synthetic construct
IMGREDD

SEQ ID NO: 8021 - protein, 7 aa, synthetic construct
PSTTKSW

SEQ ID NO: 8022 - protein, 7 aa, synthetic construct
LAGMDNS

SEQ ID NO: 8023 - protein, 7 aa, synthetic construct
NMQHVPS

SEQ ID NO: 8024 - protein, 7 aa, synthetic construct
PLPSHAE

SEQ ID NO: 8025 - protein, 7 aa, synthetic construct
IDAGWEG

SEQ ID NO: 8026 - protein, 7 aa, synthetic construct
SNLHRDE

SEQ ID NO: 8027 - protein, 7 aa, synthetic construct
RMSPDQK

SEQ ID NO: 8028 - protein, 7 aa, synthetic construct
AAASQPM

SEQ ID NO: 8029 - protein, 7 aa, synthetic construct
RANVDVP

SEQ ID NO: 8030 - protein, 7 aa, synthetic construct
VNQYIDP

SEQ ID NO: 8031 - protein, 7 aa, synthetic construct
KYNVKND

SEQ ID NO: 8032 - protein, 7 aa, synthetic construct
VEAHDNY

SEQ ID NO: 8033 - protein, 7 aa, synthetic construct
WVVEGKP

SEQ ID NO: 8034 - protein, 7 aa, synthetic construct
IEYSSHA

SEQ ID NO: 8035 - protein, 7 aa, synthetic construct
VFDISME

SEQ ID NO: 8036 - protein, 7 aa, synthetic construct
QQPRYPE

SEQ ID NO: 8037 - protein, 7 aa, synthetic construct
PLNKEFW

SEQ ID NO: 8038 - protein, 7 aa, synthetic construct
SAKDEAN

SEQ ID NO: 8039 - protein, 7 aa, synthetic construct
LEHKVFS

SEQ ID NO: 8040 - protein, 7 aa, synthetic construct
AASMAEK

SEQ ID NO: 8041 - protein, 7 aa, synthetic construct
YASFHNA

SEQ ID NO: 8042 - protein, 7 aa, synthetic construct
LVPQYDS

SEQ ID NO: 8043 - protein, 7 aa, synthetic construct
KQKGMDT

SEQ ID NO: 8044 - protein, 7 aa, synthetic construct
LMRDFNM

SEQ ID NO: 8045 - protein, 7 aa, synthetic construct
FGDHVDK

SEQ ID NO: 8046 - protein, 7 aa, synthetic construct
PKLADTH

SEQ ID NO: 8047 - protein, 7 aa, synthetic construct
VNVGIEI

SEQ ID NO: 8048 - protein, 7 aa, synthetic construct
EQENYQH

SEQ ID NO: 8049 - protein, 7 aa, synthetic construct
ASRADYD

SEQ ID NO: 8050 - protein, 7 aa, synthetic construct
GEIRLSM

SEQ ID NO: 8051 - protein, 7 aa, synthetic construct
HQPLMAD

SEQ ID NO: 8052 - protein, 7 aa, synthetic construct
QYNHLGP

SEQ ID NO: 8053 - protein, 7 aa, synthetic construct
TGYTQAM

SEQ ID NO: 8054 - protein, 7 aa, synthetic construct
MGMGHDH

SEQ ID NO: 8055 - protein, 7 aa, synthetic construct
YFNKLET

SEQ ID NO: 8056 - protein, 7 aa, synthetic construct
GAEGMVK

SEQ ID NO: 8057 - protein, 7 aa, synthetic construct
QEGERTQ

SEQ ID NO: 8058 - protein, 7 aa, synthetic construct
AQDQVHF

SEQ ID NO: 8059 - protein, 7 aa, synthetic construct
IPVTIHG

SEQ ID NO: 8060 - protein, 7 aa, synthetic construct
YNETHNN

SEQ ID NO: 8061 - protein, 7 aa, synthetic construct
VRLGEDD

SEQ ID NO: 8062 - protein, 7 aa, synthetic construct
SHSANTK

SEQ ID NO: 8063 - protein, 7 aa, synthetic construct
HVNPHDL

SEQ ID NO: 8064 - protein, 7 aa, synthetic construct
NQLAKEY

SEQ ID NO: 8065 - protein, 7 aa, synthetic construct
DLHRSED

SEQ ID NO: 8066 - protein, 7 aa, synthetic construct
HNNNYEE

SEQ ID NO: 8067 - protein, 7 aa, synthetic construct
VYSGSTM

SEQ ID NO: 8068 - protein, 7 aa, synthetic construct
PMSTTID

SEQ ID NO: 8069 - protein, 7 aa, synthetic construct
KEGNVIM

SEQ ID NO: 8070 - protein, 7 aa, synthetic construct
IYQREDL

SEQ ID NO: 8071 - protein, 7 aa, synthetic construct
PYPKMQV

SEQ ID NO: 8072 - protein, 7 aa, synthetic construct
FHKTPGL

SEQ ID NO: 8073 - protein, 7 aa, synthetic construct
MYKSGFN

SEQ ID NO: 8074 - protein, 7 aa, synthetic construct
VERGGNM

SEQ ID NO: 8075 - protein, 7 aa, synthetic construct
ALQADDM

SEQ ID NO: 8076 - protein, 7 aa, synthetic construct
VSKINNI

SEQ ID NO: 8077 - protein, 7 aa, synthetic construct
DCNRTVC

SEQ ID NO: 8078 - protein, 7 aa, synthetic construct
LTNTAQT

SEQ ID NO: 8079 - protein, 7 aa, synthetic construct
RQTEPKI

SEQ ID NO: 8080 - protein, 7 aa, synthetic construct
GGYTAGD

SEQ ID NO: 8081 - protein, 7 aa, synthetic construct
GPPAMVE

SEQ ID NO: 8082 - protein, 7 aa, synthetic construct
ANESFIK

SEQ ID NO: 8083 - protein, 7 aa, synthetic construct
NQVASPE

SEQ ID NO: 8084 - protein, 7 aa, synthetic construct
NTIDKNW

SEQ ID NO: 8085 - protein, 7 aa, synthetic construct
GHKEVGH

SEQ ID NO: 8086 - protein, 7 aa, synthetic construct
RSHDLKI

SEQ ID NO: 8087 - protein, 7 aa, synthetic construct
TLRMDYG

SEQ ID NO: 8088 - protein, 7 aa, synthetic construct
KEAISYP

SEQ ID NO: 8089 - protein, 7 aa, synthetic construct
WSELAVQ

SEQ ID NO: 8090 - protein, 7 aa, synthetic construct
HAKGEDA

SEQ ID NO: 8091 - protein, 7 aa, synthetic construct
IQATPAS

SEQ ID NO: 8092 - protein, 7 aa, synthetic construct
HPTDSQG

SEQ ID NO: 8093 - protein, 7 aa, synthetic construct
FTKWEIE

SEQ ID NO: 8094 - protein, 7 aa, synthetic construct
QITQADF

SEQ ID NO: 8095 - protein, 7 aa, synthetic construct
YQAAKHT

SEQ ID NO: 8096 - protein, 7 aa, synthetic construct
FADGHAV

SEQ ID NO: 8097 - protein, 7 aa, synthetic construct
QESAYIH

SEQ ID NO: 8098 - protein, 7 aa, synthetic construct
RQKEHTP

SEQ ID NO: 8099 - protein, 7 aa, synthetic construct
HFDKEMK

SEQ ID NO: 8100 - protein, 7 aa, synthetic construct
PVVERGR

SEQ ID NO: 8101 - protein, 7 aa, synthetic construct
KIDHEWK

SEQ ID NO: 8102 - protein, 7 aa, synthetic construct
MTAALQA

SEQ ID NO: 8103 - protein, 7 aa, synthetic construct
IVDGSQR

SEQ ID NO: 8104 - protein, 7 aa, synthetic construct
EAHSLRA

SEQ ID NO: 8105 - protein, 7 aa, synthetic construct
ERKDTPW

SEQ ID NO: 8106 - protein, 7 aa, synthetic construct
HLGNGEH

SEQ ID NO: 8107 - protein, 7 aa, synthetic construct
MPTEKEQ

SEQ ID NO: 8108 - protein, 7 aa, synthetic construct
YEYKVGG

SEQ ID NO: 8109 - protein, 7 aa, synthetic construct
DILHIKS

SEQ ID NO: 8110 - protein, 7 aa, synthetic construct
LPPTGNT

SEQ ID NO: 8111 - protein, 7 aa, synthetic construct
RYGPEHH

SEQ ID NO: 8112 - protein, 7 aa, synthetic construct
QNYNPKD

SEQ ID NO: 8113 - protein, 7 aa, synthetic construct
RRPDELY

SEQ ID NO: 8114 - protein, 7 aa, synthetic construct
QKEENQH

SEQ ID NO: 8115 - protein, 7 aa, synthetic construct
KKTGSHE

SEQ ID NO: 8116 - protein, 7 aa, synthetic construct
AKTPGMY

SEQ ID NO: 8117 - protein, 7 aa, synthetic construct
DLHHKQH

SEQ ID NO: 8118 - protein, 7 aa, synthetic construct
DHAGYHA

SEQ ID NO: 8119 - protein, 7 aa, synthetic construct
MNEMKKQ

SEQ ID NO: 8120 - protein, 7 aa, synthetic construct
SIRIHTD

SEQ ID NO: 8121 - protein, 7 aa, synthetic construct
SEQRGHH

SEQ ID NO: 8122 - protein, 7 aa, synthetic construct
GQSEVTF

SEQ ID NO: 8123 - protein, 7 aa, synthetic construct
NAGLNAR

SEQ ID NO: 8124 - protein, 7 aa, synthetic construct
LHQQVVH

SEQ ID NO: 8125 - protein, 7 aa, synthetic construct
HNHKFID

SEQ ID NO: 8126 - protein, 7 aa, synthetic construct
DFRKTDL

SEQ ID NO: 8127 - protein, 7 aa, synthetic construct
SVLGDRP

SEQ ID NO: 8128 - protein, 7 aa, synthetic construct
RGVDEMA

SEQ ID NO: 8129 - protein, 7 aa, synthetic construct
HHPHNIS

SEQ ID NO: 8130 - protein, 7 aa, synthetic construct
KLSAYEE

SEQ ID NO: 8131 - protein, 7 aa, synthetic construct
NMANVSY

SEQ ID NO: 8132 - protein, 7 aa, synthetic construct
DNKNDAG

SEQ ID NO: 8133 - protein, 7 aa, synthetic construct
TTPIPDK

SEQ ID NO: 8134 - protein, 7 aa, synthetic construct
HGGDTRM

SEQ ID NO: 8135 - protein, 7 aa, synthetic construct
DMNYSRG

SEQ ID NO: 8136 - protein, 7 aa, synthetic construct
EHTPPSE

SEQ ID NO: 8137 - protein, 7 aa, synthetic construct
GKDGYES

SEQ ID NO: 8138 - protein, 7 aa, synthetic construct
HKTLGTA

SEQ ID NO: 8139 - protein, 7 aa, synthetic construct
KQVDMGW

SEQ ID NO: 8140 - protein, 7 aa, synthetic construct
QKIMSSV

SEQ ID NO: 8141 - protein, 7 aa, synthetic construct
GANLITK

SEQ ID NO: 8142 - protein, 7 aa, synthetic construct
ENTGRRP

SEQ ID NO: 8143 - protein, 7 aa, synthetic construct
RDSPIMK

SEQ ID NO: 8144 - protein, 7 aa, synthetic construct
GREPVNI

SEQ ID NO: 8145 - protein, 7 aa, synthetic construct
EKPMVQI

SEQ ID NO: 8146 - protein, 7 aa, synthetic construct
HPMWKTD

SEQ ID NO: 8147 - protein, 7 aa, synthetic construct
IFKNGYP

SEQ ID NO: 8148 - protein, 7 aa, synthetic construct
KYMDTQL

SEQ ID NO: 8149 - protein, 7 aa, synthetic construct
EGRSTMQ

SEQ ID NO: 8150 - protein, 7 aa, synthetic construct
ITETRFM

SEQ ID NO: 8151 - protein, 7 aa, synthetic construct
TDAANQK

SEQ ID NO: 8152 - protein, 7 aa, synthetic construct
LQNPSQF

SEQ ID NO: 8153 - protein, 7 aa, synthetic construct
LSHTHLP

SEQ ID NO: 8154 - protein, 7 aa, synthetic construct
DKGHKQS

SEQ ID NO: 8155 - protein, 7 aa, synthetic construct
ASQIQSP

SEQ ID NO: 8156 - protein, 7 aa, synthetic construct
PYKGTFG

SEQ ID NO: 8157 - protein, 7 aa, synthetic construct
DAWQDAP

SEQ ID NO: 8158 - protein, 7 aa, synthetic construct
GIGMDEV

SEQ ID NO: 8159 - protein, 7 aa, synthetic construct
RIEGPLN

SEQ ID NO: 8160 - protein, 7 aa, synthetic construct
GTMQISL

SEQ ID NO: 8161 - protein, 7 aa, synthetic construct
LHDKEGH

SEQ ID NO: 8162 - protein, 7 aa, synthetic construct
RQDFKNE

SEQ ID NO: 8163 - protein, 7 aa, synthetic construct
TAGGSDP

SEQ ID NO: 8164 - protein, 7 aa, synthetic construct
SDNYAVD

SEQ ID NO: 8165 - protein, 7 aa, synthetic construct
TNFEAVV

SEQ ID NO: 8166 - protein, 7 aa, synthetic construct
HPQHHST

SEQ ID NO: 8167 - protein, 7 aa, synthetic construct
PQHTHYD

SEQ ID NO: 8168 - protein, 7 aa, synthetic construct
NHEMAVP

SEQ ID NO: 8169 - protein, 7 aa, synthetic construct
RGEMYYE

SEQ ID NO: 8170 - protein, 7 aa, synthetic construct
AKYEHSQ

SEQ ID NO: 8171 - protein, 7 aa, synthetic construct
PVQYPQT

SEQ ID NO: 8172 - protein, 7 aa, synthetic construct
PPPLRSP

SEQ ID NO: 8173 - protein, 7 aa, synthetic construct
KNHQSNF

SEQ ID NO: 8174 - protein, 7 aa, synthetic construct
LNRSDPD

SEQ ID NO: 8175 - protein, 7 aa, synthetic construct
DIHAQHE

SEQ ID NO: 8176 - protein, 7 aa, synthetic construct
EALQHGE

SEQ ID NO: 8177 - protein, 7 aa, synthetic construct
NNNYDED

SEQ ID NO: 8178 - protein, 7 aa, synthetic construct
FHARHEM

SEQ ID NO: 8179 - protein, 7 aa, synthetic construct
APTPVMH

SEQ ID NO: 8180 - protein, 7 aa, synthetic construct
HLSMADL

SEQ ID NO: 8181 - protein, 7 aa, synthetic construct
NSGNHDM

SEQ ID NO: 8182 - protein, 7 aa, synthetic construct
SDIDLTR

SEQ ID NO: 8183 - protein, 7 aa, synthetic construct
LQTGGDV

SEQ ID NO: 8184 - protein, 7 aa, synthetic construct
GDVHGPP

SEQ ID NO: 8185 - protein, 7 aa, synthetic construct
TQGHDDL

SEQ ID NO: 8186 - protein, 7 aa, synthetic construct
VMHVHEI

SEQ ID NO: 8187 - protein, 7 aa, synthetic construct
DKQQNYK

SEQ ID NO: 8188 - protein, 7 aa, synthetic construct
HALKLHG

SEQ ID NO: 8189 - protein, 7 aa, synthetic construct
YYDEKQT

SEQ ID NO: 8190 - protein, 7 aa, synthetic construct
EMDVHKG

SEQ ID NO: 8191 - protein, 7 aa, synthetic construct
QIASAYS

SEQ ID NO: 8192 - protein, 7 aa, synthetic construct
VTSQKWG

SEQ ID NO: 8193 - protein, 7 aa, synthetic construct
NGNIPST

SEQ ID NO: 8194 - protein, 7 aa, synthetic construct
EDKTAVL

SEQ ID NO: 8195 - protein, 7 aa, synthetic construct
TSGMYTK

SEQ ID NO: 8196 - protein, 7 aa, synthetic construct
TERDPYN

SEQ ID NO: 8197 - protein, 7 aa, synthetic construct
FSQPDGT

SEQ ID NO: 8198 - protein, 7 aa, synthetic construct
KMTDLYP

SEQ ID NO: 8199 - protein, 7 aa, synthetic construct
TSEQAGA

SEQ ID NO: 8200 - protein, 7 aa, synthetic construct
AHAGENF

SEQ ID NO: 8201 - protein, 7 aa, synthetic construct
AFMDREP

SEQ ID NO: 8202 - protein, 7 aa, synthetic construct
DHTEAKN

SEQ ID NO: 8203 - protein, 7 aa, synthetic construct
FEKLQNF

SEQ ID NO: 8204 - protein, 7 aa, synthetic construct
DPRDSHY

SEQ ID NO: 8205 - protein, 7 aa, synthetic construct
GVSGLQI

SEQ ID NO: 8206 - protein, 7 aa, synthetic construct
YRSSQEQ

SEQ ID NO: 8207 - protein, 7 aa, synthetic construct
YPTENAY

SEQ ID NO: 8208 - protein, 7 aa, synthetic construct
AVFSSGV

SEQ ID NO: 8209 - protein, 7 aa, synthetic construct
RIQTNDA

SEQ ID NO: 8210 - protein, 7 aa, synthetic construct
MPANLPL

SEQ ID NO: 8211 - protein, 7 aa, synthetic construct
NNNDSMH

SEQ ID NO: 8212 - protein, 7 aa, synthetic construct
YHPVTFE

SEQ ID NO: 8213 - protein, 7 aa, synthetic construct
DTMRREL

SEQ ID NO: 8214 - protein, 7 aa, synthetic construct
NDLTIAR

SEQ ID NO: 8215 - protein, 7 aa, synthetic construct
QGLRVNM

SEQ ID NO: 8216 - protein, 7 aa, synthetic construct
QAQSAHW

SEQ ID NO: 8217 - protein, 7 aa, synthetic construct
DVGWDRD

SEQ ID NO: 8218 - protein, 7 aa, synthetic construct
HDGEVQH

SEQ ID NO: 8219 - protein, 7 aa, synthetic construct
QDVSVVG

SEQ ID NO: 8220 - protein, 7 aa, synthetic construct
VVQRGIH

SEQ ID NO: 8221 - protein, 7 aa, synthetic construct
VRENRLQ

SEQ ID NO: 8222 - protein, 7 aa, synthetic construct
NEYSRSW

SEQ ID NO: 8223 - protein, 7 aa, synthetic construct
FESKSIP

SEQ ID NO: 8224 - protein, 7 aa, synthetic construct
VTVARKE

SEQ ID NO: 8225 - protein, 7 aa, synthetic construct
DVAHSIQ

SEQ ID NO: 8226 - protein, 7 aa, synthetic construct
TQVNKYT

SEQ ID NO: 8227 - protein, 7 aa, synthetic construct
TQGHDRL

SEQ ID NO: 8228 - protein, 7 aa, synthetic construct
FFVQGSP

SEQ ID NO: 8229 - protein, 7 aa, synthetic construct
GSLPNVR

SEQ ID NO: 8230 - protein, 7 aa, synthetic construct
GDPMFKW

SEQ ID NO: 8231 - protein, 7 aa, synthetic construct
SWNGHGI

SEQ ID NO: 8232 - protein, 7 aa, synthetic construct
SINGVPS

SEQ ID NO: 8233 - protein, 7 aa, synthetic construct
YHQPDHS

SEQ ID NO: 8234 - protein, 7 aa, synthetic construct
YPMQEAV

SEQ ID NO: 8235 - protein, 7 aa, synthetic construct
HDHAYER

SEQ ID NO: 8236 - protein, 7 aa, synthetic construct
TGRMVSS

SEQ ID NO: 8237 - protein, 7 aa, synthetic construct
SQVPTRM

SEQ ID NO: 8238 - protein, 7 aa, synthetic construct
CREDPCD

SEQ ID NO: 8239 - protein, 7 aa, synthetic construct
SERGILG

SEQ ID NO: 8240 - protein, 7 aa, synthetic construct
CKNKDEC

SEQ ID NO: 8241 - protein, 7 aa, synthetic construct
SKITSMS

SEQ ID NO: 8242 - protein, 7 aa, synthetic construct
EAEGFKS

SEQ ID NO: 8243 - protein, 7 aa, synthetic construct
VLPQMPK

SEQ ID NO: 8244 - protein, 7 aa, synthetic construct
RGLHMSE

SEQ ID NO: 8245 - protein, 7 aa, synthetic construct
QPSFDKK

SEQ ID NO: 8246 - protein, 7 aa, synthetic construct
MFPNSSS

SEQ ID NO: 8247 - protein, 7 aa, synthetic construct
ELNMVVK

SEQ ID NO: 8248 - protein, 7 aa, synthetic construct
DDGQKLA

SEQ ID NO: 8249 - protein, 7 aa, synthetic construct
AMKNEEK

SEQ ID NO: 8250 - protein, 7 aa, synthetic construct
LPSHIEN

SEQ ID NO: 8251 - protein, 7 aa, synthetic construct
DVPHQLS

SEQ ID NO: 8252 - protein, 7 aa, synthetic construct
YGLVQTK

SEQ ID NO: 8253 - protein, 7 aa, synthetic construct
VDRVAGW

SEQ ID NO: 8254 - protein, 7 aa, synthetic construct
IWTGPND

SEQ ID NO: 8255 - protein, 7 aa, synthetic construct
IKMVNDG

SEQ ID NO: 8256 - protein, 7 aa, synthetic construct
IHNPRPD

SEQ ID NO: 8257 - protein, 7 aa, synthetic construct
YLLKTVP

SEQ ID NO: 8258 - protein, 7 aa, synthetic construct
ALSEQGP

SEQ ID NO: 8259 - protein, 7 aa, synthetic construct
LSQNQVE

SEQ ID NO: 8260 - protein, 7 aa, synthetic construct
IHKTDEW

SEQ ID NO: 8261 - protein, 7 aa, synthetic construct
GHVKLSD

SEQ ID NO: 8262 - protein, 7 aa, synthetic construct
QSPVKSH

SEQ ID NO: 8263 - protein, 7 aa, synthetic construct
MGNPPML

SEQ ID NO: 8264 - protein, 7 aa, synthetic construct
LRPETKE

SEQ ID NO: 8265 - protein, 7 aa, synthetic construct
IHGGSDH

SEQ ID NO: 8266 - protein, 7 aa, synthetic construct
PRPDMMY

SEQ ID NO: 8267 - protein, 7 aa, synthetic construct
TASPHMF

SEQ ID NO: 8268 - protein, 7 aa, synthetic construct
NDLSERK

SEQ ID NO: 8269 - protein, 7 aa, synthetic construct
MKTYDAM

SEQ ID NO: 8270 - protein, 7 aa, synthetic construct
INVHVQQ

SEQ ID NO: 8271 - protein, 7 aa, synthetic construct
SQMNAED

SEQ ID NO: 8272 - protein, 7 aa, synthetic construct
DLTMRGP

SEQ ID NO: 8273 - protein, 7 aa, synthetic construct
RPTMVEF

SEQ ID NO: 8274 - protein, 7 aa, synthetic construct
DHKQIHD

SEQ ID NO: 8275 - protein, 7 aa, synthetic construct
DFMPGQH

SEQ ID NO: 8276 - protein, 7 aa, synthetic construct
GHPPSVY

SEQ ID NO: 8277 - protein, 7 aa, synthetic construct
DAPVEHR

SEQ ID NO: 8278 - protein, 7 aa, synthetic construct
NEHPALP

SEQ ID NO: 8279 - protein, 7 aa, synthetic construct
FGTGADH

SEQ ID NO: 8280 - protein, 7 aa, synthetic construct
YVNNRGM

SEQ ID NO: 8281 - protein, 7 aa, synthetic construct
EENGYGM

SEQ ID NO: 8282 - protein, 7 aa, synthetic construct
HEMVKWE

SEQ ID NO: 8283 - protein, 7 aa, synthetic construct
MEMASRM

SEQ ID NO: 8284 - protein, 7 aa, synthetic construct
QTATTAQ

SEQ ID NO: 8285 - protein, 7 aa, synthetic construct
KFNKGDN

SEQ ID NO: 8286 - protein, 7 aa, synthetic construct
SHKAPYD

SEQ ID NO: 8287 - protein, 7 aa, synthetic construct
IPDPRMA

SEQ ID NO: 8288 - protein, 7 aa, synthetic construct
YQKDVMI

SEQ ID NO: 8289 - protein, 7 aa, synthetic construct
FGDHIHK

SEQ ID NO: 8290 - protein, 7 aa, synthetic construct
RASYANN

SEQ ID NO: 8291 - protein, 7 aa, synthetic construct
EKPTTEK

SEQ ID NO: 8292 - protein, 7 aa, synthetic construct
DTFNENR

SEQ ID NO: 8293 - protein, 7 aa, synthetic construct
GDAPKAY

SEQ ID NO: 8294 - protein, 7 aa, synthetic construct
TDVESVK

SEQ ID NO: 8295 - protein, 7 aa, synthetic construct
GVHTRIV

SEQ ID NO: 8296 - protein, 7 aa, synthetic construct
MPIQNPQ

SEQ ID NO: 8297 - protein, 7 aa, synthetic construct
SYNPING

SEQ ID NO: 8298 - protein, 7 aa, synthetic construct
GRVQFND

SEQ ID NO: 8299 - protein, 7 aa, synthetic construct
ERSTPPW

SEQ ID NO: 8300 - protein, 7 aa, synthetic construct
RHMPTSE

SEQ ID NO: 8301 - protein, 7 aa, synthetic construct
DTRVDNN

SEQ ID NO: 8302 - protein, 7 aa, synthetic construct
VMGDHHV

SEQ ID NO: 8303 - protein, 7 aa, synthetic construct
QVLNSAS

SEQ ID NO: 8304 - protein, 7 aa, synthetic construct
GTKNSFE

SEQ ID NO: 8305 - protein, 7 aa, synthetic construct
YESQNIK

SEQ ID NO: 8306 - protein, 7 aa, synthetic construct
DVFAKGD

SEQ ID NO: 8307 - protein, 7 aa, synthetic construct
SESPWKE

SEQ ID NO: 8308 - protein, 7 aa, synthetic construct
GANSSSG

SEQ ID NO: 8309 - protein, 7 aa, synthetic construct
RQRLEVG

SEQ ID NO: 8310 - protein, 7 aa, synthetic construct
QPAKMAY

SEQ ID NO: 8311 - protein, 7 aa, synthetic construct
YKASDVR

SEQ ID NO: 8312 - protein, 7 aa, synthetic construct
PKEFHAE

SEQ ID NO: 8313 - protein, 7 aa, synthetic construct
IDNWNQG

SEQ ID NO: 8314 - protein, 7 aa, synthetic construct
VPYLKSP

SEQ ID NO: 8315 - protein, 7 aa, synthetic construct
RSFGTSE

SEQ ID NO: 8316 - protein, 7 aa, synthetic construct
SSQDIMG

SEQ ID NO: 8317 - protein, 7 aa, synthetic construct
KLANNER

SEQ ID NO: 8318 - protein, 7 aa, synthetic construct
AEKNTIL

SEQ ID NO: 8319 - protein, 7 aa, synthetic construct
ELGRMIA

SEQ ID NO: 8320 - protein, 7 aa, synthetic construct
TTYEGPN

SEQ ID NO: 8321 - protein, 7 aa, synthetic construct
KYEEGYP

SEQ ID NO: 8322 - protein, 7 aa, synthetic construct
PDSLSNA

SEQ ID NO: 8323 - protein, 7 aa, synthetic construct
PDSPIQK

SEQ ID NO: 8324 - protein, 7 aa, synthetic construct
MNPERIV

SEQ ID NO: 8325 - protein, 7 aa, synthetic construct
QQHDITV

SEQ ID NO: 8326 - protein, 7 aa, synthetic construct
KFDAIVP

SEQ ID NO: 8327 - protein, 7 aa, synthetic construct
LQIDKPN

SEQ ID NO: 8328 - protein, 7 aa, synthetic construct
TQMTQHV

SEQ ID NO: 8329 - protein, 7 aa, synthetic construct
QTHNNNE

SEQ ID NO: 8330 - protein, 7 aa, synthetic construct
HDGGILA

SEQ ID NO: 8331 - protein, 7 aa, synthetic construct
LPPESIH

SEQ ID NO: 8332 - protein, 7 aa, synthetic construct
IKVNAVQ

SEQ ID NO: 8333 - protein, 7 aa, synthetic construct
FQQQIVD

SEQ ID NO: 8334 - protein, 7 aa, synthetic construct
RHEHQIS

SEQ ID NO: 8335 - protein, 7 aa, synthetic construct
LVTAVPN

SEQ ID NO: 8336 - protein, 7 aa, synthetic construct
MYTHVNA

SEQ ID NO: 8337 - protein, 7 aa, synthetic construct
PKGAEYL

SEQ ID NO: 8338 - protein, 7 aa, synthetic construct
PEARMTE

SEQ ID NO: 8339 - protein, 7 aa, synthetic construct
FRAPEMI

SEQ ID NO: 8340 - protein, 7 aa, synthetic construct
PHSSKFE

SEQ ID NO: 8341 - protein, 7 aa, synthetic construct
LDGKTMR

SEQ ID NO: 8342 - protein, 7 aa, synthetic construct
QDKSDVK

SEQ ID NO: 8343 - protein, 7 aa, synthetic construct
TNYDKQM

SEQ ID NO: 8344 - protein, 7 aa, synthetic construct
LDKTYLK

SEQ ID NO: 8345 - protein, 7 aa, synthetic construct
PSKANGW

SEQ ID NO: 8346 - protein, 7 aa, synthetic construct
ISANNVS

SEQ ID NO: 8347 - protein, 7 aa, synthetic construct
QNDSINK

SEQ ID NO: 8348 - protein, 7 aa, synthetic construct
IGGMDKK

SEQ ID NO: 8349 - protein, 7 aa, synthetic construct
LGTIATQ

SEQ ID NO: 8350 - protein, 7 aa, synthetic construct
YDGAQYI

SEQ ID NO: 8351 - protein, 7 aa, synthetic construct
VYEMDSP

SEQ ID NO: 8352 - protein, 7 aa, synthetic construct
KEDQWDL

SEQ ID NO: 8353 - protein, 7 aa, synthetic construct
HDISTTS

SEQ ID NO: 8354 - protein, 7 aa, synthetic construct
FMPVMKS

SEQ ID NO: 8355 - protein, 7 aa, synthetic construct
DVDQNRG

SEQ ID NO: 8356 - protein, 7 aa, synthetic construct
EKVNSMS

SEQ ID NO: 8357 - protein, 7 aa, synthetic construct
PTQETNY

SEQ ID NO: 8358 - protein, 7 aa, synthetic construct
LSVSYQS

SEQ ID NO: 8359 - protein, 7 aa, synthetic construct
RTVEIHQ

SEQ ID NO: 8360 - protein, 7 aa, synthetic construct
GRERSLQ

SEQ ID NO: 8361 - protein, 7 aa, synthetic construct
YVMHEHE

SEQ ID NO: 8362 - protein, 7 aa, synthetic construct
NETNMMH

SEQ ID NO: 8363 - protein, 7 aa, synthetic construct
NKNLHAV

SEQ ID NO: 8364 - protein, 7 aa, synthetic construct
DDETSRG

SEQ ID NO: 8365 - protein, 7 aa, synthetic construct
DPKYFDP

SEQ ID NO: 8366 - protein, 7 aa, synthetic construct
KFVTDDD

SEQ ID NO: 8367 - protein, 7 aa, synthetic construct
QTAHDRY

SEQ ID NO: 8368 - protein, 7 aa, synthetic construct
NASGLQE

SEQ ID NO: 8369 - protein, 7 aa, synthetic construct
SGRDEIQ

SEQ ID NO: 8370 - protein, 7 aa, synthetic construct
QHLKLQH

SEQ ID NO: 8371 - protein, 7 aa, synthetic construct
NYVSQVA

SEQ ID NO: 8372 - protein, 7 aa, synthetic construct
DIKMGLY

SEQ ID NO: 8373 - protein, 7 aa, synthetic construct
GRTTEKF

SEQ ID NO: 8374 - protein, 7 aa, synthetic construct
QSLGKTP

SEQ ID NO: 8375 - protein, 7 aa, synthetic construct
EIRHVDK

SEQ ID NO: 8376 - protein, 7 aa, synthetic construct
GHNTDKW

SEQ ID NO: 8377 - protein, 7 aa, synthetic construct
EHMRMEF

SEQ ID NO: 8378 - protein, 7 aa, synthetic construct
NQMNDGE

SEQ ID NO: 8379 - protein, 7 aa, synthetic construct
GFPTNVS

SEQ ID NO: 8380 - protein, 7 aa, synthetic construct
SGDQVKH

SEQ ID NO: 8381 - protein, 7 aa, synthetic construct
MSAQQLM

SEQ ID NO: 8382 - protein, 7 aa, synthetic construct
QVPEQKA

SEQ ID NO: 8383 - protein, 7 aa, synthetic construct
LMPNPTG

SEQ ID NO: 8384 - protein, 7 aa, synthetic construct
EPVTMQS

SEQ ID NO: 8385 - protein, 7 aa, synthetic construct
ATMSPGR

SEQ ID NO: 8386 - protein, 7 aa, synthetic construct
ENQRSVS

SEQ ID NO: 8387 - protein, 7 aa, synthetic construct
WTSTLTE

SEQ ID NO: 8388 - protein, 7 aa, synthetic construct
PTNNILL

SEQ ID NO: 8389 - protein, 7 aa, synthetic construct
DKGDGVM

SEQ ID NO: 8390 - protein, 7 aa, synthetic construct
QPNTKML

SEQ ID NO: 8391 - protein, 7 aa, synthetic construct
VESNETP

SEQ ID NO: 8392 - protein, 7 aa, synthetic construct
ISEQRLA

SEQ ID NO: 8393 - protein, 7 aa, synthetic construct
FGHVIID

SEQ ID NO: 8394 - protein, 7 aa, synthetic construct
KRQIDAY

SEQ ID NO: 8395 - protein, 7 aa, synthetic construct
SNDSLMK

SEQ ID NO: 8396 - protein, 7 aa, synthetic construct
ESPAFQD

SEQ ID NO: 8397 - protein, 7 aa, synthetic construct
YVPLVKP

SEQ ID NO: 8398 - protein, 7 aa, synthetic construct
GNPHITN

SEQ ID NO: 8399 - protein, 7 aa, synthetic construct
QGKMPSE

SEQ ID NO: 8400 - protein, 7 aa, synthetic construct
WDGAKHF

SEQ ID NO: 8401 - protein, 7 aa, synthetic construct
FPGVPQH

SEQ ID NO: 8402 - protein, 7 aa, synthetic construct
DRYTNRE

SEQ ID NO: 8403 - protein, 7 aa, synthetic construct
QYGEQNR

SEQ ID NO: 8404 - protein, 7 aa, synthetic construct
EPTVAPR

SEQ ID NO: 8405 - protein, 7 aa, synthetic construct
HPNDVWI

SEQ ID NO: 8406 - protein, 7 aa, synthetic construct
HEALSIV

SEQ ID NO: 8407 - protein, 7 aa, synthetic construct
MHGVKAN

SEQ ID NO: 8408 - protein, 7 aa, synthetic construct
FSMGPPT

SEQ ID NO: 8409 - protein, 7 aa, synthetic construct
NKAGSHM

SEQ ID NO: 8410 - protein, 7 aa, synthetic construct
DSQKIAT

SEQ ID NO: 8411 - protein, 7 aa, synthetic construct
AAQDRGL

SEQ ID NO: 8412 - protein, 7 aa, synthetic construct
CTDCPMA

SEQ ID NO: 8413 - protein, 7 aa, synthetic construct
PATDRMY

SEQ ID NO: 8414 - protein, 7 aa, synthetic construct
PDHNDDR

SEQ ID NO: 8415 - protein, 7 aa, synthetic construct
HIGWNLE

SEQ ID NO: 8416 - protein, 7 aa, synthetic construct
QHDIRNA

SEQ ID NO: 8417 - protein, 7 aa, synthetic construct
QAGITIL

SEQ ID NO: 8418 - protein, 7 aa, synthetic construct
MMHPGER

SEQ ID NO: 8419 - protein, 7 aa, synthetic construct
CQRFPSG

SEQ ID NO: 8420 - protein, 7 aa, synthetic construct
APIEREQ

SEQ ID NO: 8421 - protein, 7 aa, synthetic construct
ISFAKEK

SEQ ID NO: 8422 - protein, 7 aa, synthetic construct
TQYRNNV

SEQ ID NO: 8423 - protein, 7 aa, synthetic construct
EDQMFGV

SEQ ID NO: 8424 - protein, 7 aa, synthetic construct
RKEGGVI

SEQ ID NO: 8425 - protein, 7 aa, synthetic construct
LSSDRHQ

SEQ ID NO: 8426 - protein, 7 aa, synthetic construct
QGRNEFE

SEQ ID NO: 8427 - protein, 7 aa, synthetic construct
ERASSHQ

SEQ ID NO: 8428 - protein, 7 aa, synthetic construct
EQFVKDK

SEQ ID NO: 8429 - protein, 7 aa, synthetic construct
ENGYNEI

SEQ ID NO: 8430 - protein, 7 aa, synthetic construct
VQDYQSD

SEQ ID NO: 8431 - protein, 7 aa, synthetic construct
WEKESNN

SEQ ID NO: 8432 - protein, 7 aa, synthetic construct
GRHREEH

SEQ ID NO: 8433 - protein, 7 aa, synthetic construct
VTRNYID

SEQ ID NO: 8434 - protein, 7 aa, synthetic construct
TMSGTFR

SEQ ID NO: 8435 - protein, 7 aa, synthetic construct
QDYPADT

SEQ ID NO: 8436 - protein, 7 aa, synthetic construct
IQYTKQG

SEQ ID NO: 8437 - protein, 7 aa, synthetic construct
KFGDGLD

SEQ ID NO: 8438 - protein, 7 aa, synthetic construct
RVNLTAT

SEQ ID NO: 8439 - protein, 7 aa, synthetic construct
QERMMEI

SEQ ID NO: 8440 - protein, 7 aa, synthetic construct
WHDQQER

SEQ ID NO: 8441 - protein, 7 aa, synthetic construct
TLEQFAA

SEQ ID NO: 8442 - protein, 7 aa, synthetic construct
QKDSGLT

SEQ ID NO: 8443 - protein, 7 aa, synthetic construct
SNVDAQT

SEQ ID NO: 8444 - protein, 7 aa, synthetic construct
QPSNPYP

SEQ ID NO: 8445 - protein, 7 aa, synthetic construct
NQQGDIN

SEQ ID NO: 8446 - protein, 7 aa, synthetic construct
NQEPVLF

SEQ ID NO: 8447 - protein, 7 aa, synthetic construct
TTRTMHE

SEQ ID NO: 8448 - protein, 7 aa, synthetic construct
KRDYTDE

SEQ ID NO: 8449 - protein, 7 aa, synthetic construct
RYQPDTY

SEQ ID NO: 8450 - protein, 7 aa, synthetic construct
RDYADKP

SEQ ID NO: 8451 - protein, 7 aa, synthetic construct
HQQYGIT

SEQ ID NO: 8452 - protein, 7 aa, synthetic construct
QFGFDDK

SEQ ID NO: 8453 - protein, 7 aa, synthetic construct
LHNYEDA

SEQ ID NO: 8454 - protein, 7 aa, synthetic construct
LSLATKN

SEQ ID NO: 8455 - protein, 7 aa, synthetic construct
TVGKINE

SEQ ID NO: 8456 - protein, 7 aa, synthetic construct
HNKQPNY

SEQ ID NO: 8457 - protein, 7 aa, synthetic construct
ETDFVHY

SEQ ID NO: 8458 - protein, 7 aa, synthetic construct
VPGPDNL

SEQ ID NO: 8459 - protein, 7 aa, synthetic construct
HADHLLG

SEQ ID NO: 8460 - protein, 7 aa, synthetic construct
VQPINMH

SEQ ID NO: 8461 - protein, 7 aa, synthetic construct
HDHNKLN

SEQ ID NO: 8462 - protein, 7 aa, synthetic construct
EGMHSPA

SEQ ID NO: 8463 - protein, 7 aa, synthetic construct
HDKHALA

SEQ ID NO: 8464 - protein, 7 aa, synthetic construct
MEGMQSE

SEQ ID NO: 8465 - protein, 7 aa, synthetic construct
MARIPEY

SEQ ID NO: 8466 - protein, 7 aa, synthetic construct
RQTLDAK

SEQ ID NO: 8467 - protein, 7 aa, synthetic construct
GDRNPLK

SEQ ID NO: 8468 - protein, 7 aa, synthetic construct
EEGTRPG

SEQ ID NO: 8469 - protein, 7 aa, synthetic construct
GNTAMPF

SEQ ID NO: 8470 - protein, 7 aa, synthetic construct
NPSVAGD

SEQ ID NO: 8471 - protein, 7 aa, synthetic construct
GLQGDDQ

SEQ ID NO: 8472 - protein, 7 aa, synthetic construct
IGSERMR

SEQ ID NO: 8473 - protein, 7 aa, synthetic construct
IPQGLRL

SEQ ID NO: 8474 - protein, 7 aa, synthetic construct
PNPMNEY

SEQ ID NO: 8475 - protein, 7 aa, synthetic construct
LASPSNN

SEQ ID NO: 8476 - protein, 7 aa, synthetic construct
LRLQPAA

SEQ ID NO: 8477 - protein, 7 aa, synthetic construct
DLIRNQD

SEQ ID NO: 8478 - protein, 7 aa, synthetic construct
AHLKLNE

SEQ ID NO: 8479 - protein, 7 aa, synthetic construct
AHAQQME

SEQ ID NO: 8480 - protein, 7 aa, synthetic construct
TNLIRQQ

SEQ ID NO: 8481 - protein, 7 aa, synthetic construct
GRDFIIA

SEQ ID NO: 8482 - protein, 7 aa, synthetic construct
DNLTDNK

SEQ ID NO: 8483 - protein, 7 aa, synthetic construct
MAPQQTM

SEQ ID NO: 8484 - protein, 7 aa, synthetic construct
HSGHSEY

SEQ ID NO: 8485 - protein, 7 aa, synthetic construct
LSSGHPD

SEQ ID NO: 8486 - protein, 7 aa, synthetic construct
WQADNGL

SEQ ID NO: 8487 - protein, 7 aa, synthetic construct
YGTAMFD

SEQ ID NO: 8488 - protein, 7 aa, synthetic construct
GMNAALL

SEQ ID NO: 8489 - protein, 7 aa, synthetic construct
PVSTPQM

SEQ ID NO: 8490 - protein, 7 aa, synthetic construct
QAPKHST

SEQ ID NO: 8491 - protein, 7 aa, synthetic construct
THGLKVI

SEQ ID NO: 8492 - protein, 7 aa, synthetic construct
IFEKSPY

SEQ ID NO: 8493 - protein, 7 aa, synthetic construct
PWDDKGS

SEQ ID NO: 8494 - protein, 7 aa, synthetic construct
YSHQSAN

SEQ ID NO: 8495 - protein, 7 aa, synthetic construct
RNIIGID

SEQ ID NO: 8496 - protein, 7 aa, synthetic construct
SDTPKGQ

SEQ ID NO: 8497 - protein, 7 aa, synthetic construct
VNMSPQP

SEQ ID NO: 8498 - protein, 7 aa, synthetic construct
LYHNTAS

SEQ ID NO: 8499 - protein, 7 aa, synthetic construct
TLTSTLH

SEQ ID NO: 8500 - protein, 7 aa, synthetic construct
PFEQTHV

SEQ ID NO: 8501 - protein, 7 aa, synthetic construct
TIHNSEI

SEQ ID NO: 8502 - protein, 7 aa, synthetic construct
WEPQHSG

SEQ ID NO: 8503 - protein, 7 aa, synthetic construct
QDKEPGH

SEQ ID NO: 8504 - protein, 7 aa, synthetic construct
SLGHPMQ

SEQ ID NO: 8505 - protein, 7 aa, synthetic construct
HFDTAAY

SEQ ID NO: 8506 - protein, 7 aa, synthetic construct
EEHNDSR

SEQ ID NO: 8507 - protein, 7 aa, synthetic construct
KPNDLIF

SEQ ID NO: 8508 - protein, 7 aa, synthetic construct
SSIQNLS

SEQ ID NO: 8509 - protein, 7 aa, synthetic construct
QHDTGPY

SEQ ID NO: 8510 - protein, 7 aa, synthetic construct
EFPNNGS

SEQ ID NO: 8511 - protein, 7 aa, synthetic construct
SERNHQF

SEQ ID NO: 8512 - protein, 7 aa, synthetic construct
RIDTKEA

SEQ ID NO: 8513 - protein, 7 aa, synthetic construct
YGPQLHH

SEQ ID NO: 8514 - protein, 7 aa, synthetic construct
GNWKSGN

SEQ ID NO: 8515 - protein, 7 aa, synthetic construct
RTKEITM

SEQ ID NO: 8516 - protein, 7 aa, synthetic construct
NREDPVM

SEQ ID NO: 8517 - protein, 7 aa, synthetic construct
GIYKAAH

SEQ ID NO: 8518 - protein, 7 aa, synthetic construct
HGDENKG

SEQ ID NO: 8519 - protein, 7 aa, synthetic construct
QMSQHEW

SEQ ID NO: 8520 - protein, 7 aa, synthetic construct
LIVPKVS

SEQ ID NO: 8521 - protein, 7 aa, synthetic construct
HSVREDL

SEQ ID NO: 8522 - protein, 7 aa, synthetic construct
EVGARAS

SEQ ID NO: 8523 - protein, 7 aa, synthetic construct
MFGGNQV

SEQ ID NO: 8524 - protein, 7 aa, synthetic construct
HPDKANP

SEQ ID NO: 8525 - protein, 7 aa, synthetic construct
FSPYTTV

SEQ ID NO: 8526 - protein, 7 aa, synthetic construct
FPTQNLP

SEQ ID NO: 8527 - protein, 7 aa, synthetic construct
ISDNLHH

SEQ ID NO: 8528 - protein, 7 aa, synthetic construct
TLGIMTH

SEQ ID NO: 8529 - protein, 7 aa, synthetic construct
VESGTSR

SEQ ID NO: 8530 - protein, 7 aa, synthetic construct
VQHKMVN

SEQ ID NO: 8531 - protein, 7 aa, synthetic construct
QPDQHGD

SEQ ID NO: 8532 - protein, 7 aa, synthetic construct
SIRHDVQ

SEQ ID NO: 8533 - protein, 7 aa, synthetic construct
GGADLRD

SEQ ID NO: 8534 - protein, 7 aa, synthetic construct
SSPGDRR

SEQ ID NO: 8535 - protein, 7 aa, synthetic construct
VSGDQVA

SEQ ID NO: 8536 - protein, 7 aa, synthetic construct
PKMEQYY

SEQ ID NO: 8537 - protein, 7 aa, synthetic construct
PRSSGEG

SEQ ID NO: 8538 - protein, 7 aa, synthetic construct
LSRMTIS

SEQ ID NO: 8539 - protein, 7 aa, synthetic construct
EVYHDHE

SEQ ID NO: 8540 - protein, 7 aa, synthetic construct
AGSEHLN

SEQ ID NO: 8541 - protein, 7 aa, synthetic construct
RMQAIGV

SEQ ID NO: 8542 - protein, 7 aa, synthetic construct
EVGKMVK

SEQ ID NO: 8543 - protein, 7 aa, synthetic construct
NEIQQNH

SEQ ID NO: 8544 - protein, 7 aa, synthetic construct
AQPSLAH

SEQ ID NO: 8545 - protein, 7 aa, synthetic construct
SIHARQM

SEQ ID NO: 8546 - protein, 7 aa, synthetic construct
GDKGGIV

SEQ ID NO: 8547 - protein, 7 aa, synthetic construct
PNEMTKV

SEQ ID NO: 8548 - protein, 7 aa, synthetic construct
DYETSRA

SEQ ID NO: 8549 - protein, 7 aa, synthetic construct
VMAKESN

SEQ ID NO: 8550 - protein, 7 aa, synthetic construct
GEFNMMA

SEQ ID NO: 8551 - protein, 7 aa, synthetic construct
NNPHLEM

SEQ ID NO: 8552 - protein, 7 aa, synthetic construct
KMDEQYH

SEQ ID NO: 8553 - protein, 7 aa, synthetic construct
MYAGNEA

SEQ ID NO: 8554 - protein, 7 aa, synthetic construct
SPTTIHQ

SEQ ID NO: 8555 - protein, 7 aa, synthetic construct
FEDKKDL

SEQ ID NO: 8556 - protein, 7 aa, synthetic construct
LNNHCCA

SEQ ID NO: 8557 - protein, 7 aa, synthetic construct
NNREEQP

SEQ ID NO: 8558 - protein, 7 aa, synthetic construct
FETEKHV

SEQ ID NO: 8559 - protein, 7 aa, synthetic construct
QDRYSMP

SEQ ID NO: 8560 - protein, 7 aa, synthetic construct
SFPVTNP

SEQ ID NO: 8561 - protein, 7 aa, synthetic construct
MAQTMYE

SEQ ID NO: 8562 - protein, 7 aa, synthetic construct
KLQVTVS

SEQ ID NO: 8563 - protein, 7 aa, synthetic construct
HGSAGGF

SEQ ID NO: 8564 - protein, 7 aa, synthetic construct
YFDKAGM

SEQ ID NO: 8565 - protein, 7 aa, synthetic construct
LTVSQIA

SEQ ID NO: 8566 - protein, 7 aa, synthetic construct
KHEYVEK

SEQ ID NO: 8567 - protein, 7 aa, synthetic construct
WESSPKM

SEQ ID NO: 8568 - protein, 7 aa, synthetic construct
PQLEHKY

SEQ ID NO: 8569 - protein, 7 aa, synthetic construct
MTLPKGS

SEQ ID NO: 8570 - protein, 7 aa, synthetic construct
TPPDMTY

SEQ ID NO: 8571 - protein, 7 aa, synthetic construct
MVGVQPK

SEQ ID NO: 8572 - protein, 7 aa, synthetic construct
RLQMQEE

SEQ ID NO: 8573 - protein, 7 aa, synthetic construct
HVRPDIT

SEQ ID NO: 8574 - protein, 7 aa, synthetic construct
NSDGGSY

SEQ ID NO: 8575 - protein, 7 aa, synthetic construct
HNDNAHD

SEQ ID NO: 8576 - protein, 7 aa, synthetic construct
KAMKNID

SEQ ID NO: 8577 - protein, 7 aa, synthetic construct
DDRVQFD

SEQ ID NO: 8578 - protein, 7 aa, synthetic construct
VGPEHGR

SEQ ID NO: 8579 - protein, 7 aa, synthetic construct
NERQAPE

SEQ ID NO: 8580 - protein, 7 aa, synthetic construct
SNGIAPY

SEQ ID NO: 8581 - protein, 7 aa, synthetic construct
HPMDKAV

SEQ ID NO: 8582 - protein, 7 aa, synthetic construct
FYRADQN

SEQ ID NO: 8583 - protein, 7 aa, synthetic construct
TRETHDG

SEQ ID NO: 8584 - protein, 7 aa, synthetic construct
NFKAGGF

SEQ ID NO: 8585 - protein, 7 aa, synthetic construct
RNKVDTY

SEQ ID NO: 8586 - protein, 7 aa, synthetic construct
SPQYLDD

SEQ ID NO: 8587 - protein, 7 aa, synthetic construct
EFMSTDS

SEQ ID NO: 8588 - protein, 7 aa, synthetic construct
HSFDATV

SEQ ID NO: 8589 - protein, 7 aa, synthetic construct
MRNGPYV

SEQ ID NO: 8590 - protein, 7 aa, synthetic construct
TRDHDDR

SEQ ID NO: 8591 - protein, 7 aa, synthetic construct
VAYEAHV

SEQ ID NO: 8592 - protein, 7 aa, synthetic construct
DYNHPAS

SEQ ID NO: 8593 - protein, 7 aa, synthetic construct
TSQETNH

SEQ ID NO: 8594 - protein, 7 aa, synthetic construct
TKEADPK

SEQ ID NO: 8595 - protein, 7 aa, synthetic construct
GDFSEKI

SEQ ID NO: 8596 - protein, 7 aa, synthetic construct
NLRDVPS

SEQ ID NO: 8597 - protein, 7 aa, synthetic construct
PYSGDRH

SEQ ID NO: 8598 - protein, 7 aa, synthetic construct
LLANGIN

SEQ ID NO: 8599 - protein, 7 aa, synthetic construct
QVPAQQM

SEQ ID NO: 8600 - protein, 7 aa, synthetic construct
PELRNAD

SEQ ID NO: 8601 - protein, 7 aa, synthetic construct
FTSGETH

SEQ ID NO: 8602 - protein, 7 aa, synthetic construct
MGPHQEL

SEQ ID NO: 8603 - protein, 7 aa, synthetic construct
KDYDNNG

SEQ ID NO: 8604 - protein, 7 aa, synthetic construct
TDGNARH

SEQ ID NO: 8605 - protein, 7 aa, synthetic construct
LLYAENT

SEQ ID NO: 8606 - protein, 7 aa, synthetic construct
DSEVRHV

SEQ ID NO: 8607 - protein, 7 aa, synthetic construct
LNPTYES

SEQ ID NO: 8608 - protein, 7 aa, synthetic construct
GNIDGRT

SEQ ID NO: 8609 - protein, 7 aa, synthetic construct
GIKNALF

SEQ ID NO: 8610 - protein, 7 aa, synthetic construct
MEKGMGE

SEQ ID NO: 8611 - protein, 7 aa, synthetic construct
HGDTAGW

SEQ ID NO: 8612 - protein, 7 aa, synthetic construct
ETQISTD

SEQ ID NO: 8613 - protein, 7 aa, synthetic construct
HENTAVL

SEQ ID NO: 8614 - protein, 7 aa, synthetic construct
DHLTEKS

SEQ ID NO: 8615 - protein, 7 aa, synthetic construct
TQHASWE

SEQ ID NO: 8616 - protein, 7 aa, synthetic construct
FTNVMPD

SEQ ID NO: 8617 - protein, 7 aa, synthetic construct
EEQRQMA

SEQ ID NO: 8618 - protein, 7 aa, synthetic construct
HADRQLP

SEQ ID NO: 8619 - protein, 7 aa, synthetic construct
VTQKIQL

SEQ ID NO: 8620 - protein, 7 aa, synthetic construct
YYVSGTS

SEQ ID NO: 8621 - protein, 7 aa, synthetic construct
HEGEKLY

SEQ ID NO: 8622 - protein, 7 aa, synthetic construct
KLQDAGE

SEQ ID NO: 8623 - protein, 7 aa, synthetic construct
TRYGFQD

SEQ ID NO: 8624 - protein, 7 aa, synthetic construct
VPGQLSS

SEQ ID NO: 8625 - protein, 7 aa, synthetic construct
GIWQETM

SEQ ID NO: 8626 - protein, 7 aa, synthetic construct
SRAPMAL

SEQ ID NO: 8627 - protein, 7 aa, synthetic construct
QPAWAED

SEQ ID NO: 8628 - protein, 7 aa, synthetic construct
TDTHVLR

SEQ ID NO: 8629 - protein, 7 aa, synthetic construct
TGHPNLV

SEQ ID NO: 8630 - protein, 7 aa, synthetic construct
HAGLNEN

SEQ ID NO: 8631 - protein, 7 aa, synthetic construct
QDLATRE

SEQ ID NO: 8632 - protein, 7 aa, synthetic construct
TSKYWAE

SEQ ID NO: 8633 - protein, 7 aa, synthetic construct
KNMHHQP

SEQ ID NO: 8634 - protein, 7 aa, synthetic construct
GFHAQDP

SEQ ID NO: 8635 - protein, 7 aa, synthetic construct
TKEGHYN

SEQ ID NO: 8636 - protein, 7 aa, synthetic construct
LDRTMAI

SEQ ID NO: 8637 - protein, 7 aa, synthetic construct
GFRDIKL

SEQ ID NO: 8638 - protein, 7 aa, synthetic construct
RPMGKHD

SEQ ID NO: 8639 - protein, 7 aa, synthetic construct
WKPEHSP

SEQ ID NO: 8640 - protein, 7 aa, synthetic construct
DHKHMAN

SEQ ID NO: 8641 - protein, 7 aa, synthetic construct
PYMKLAV

SEQ ID NO: 8642 - protein, 7 aa, synthetic construct
LGEHTTI

SEQ ID NO: 8643 - protein, 7 aa, synthetic construct
GNFIVSP

SEQ ID NO: 8644 - protein, 7 aa, synthetic construct
KVAGVYN

SEQ ID NO: 8645 - protein, 7 aa, synthetic construct
EASKIHD

SEQ ID NO: 8646 - protein, 7 aa, synthetic construct
FDRYEQE

SEQ ID NO: 8647 - protein, 7 aa, synthetic construct
ENAPGVS

SEQ ID NO: 8648 - protein, 7 aa, synthetic construct
NQFSPSS

SEQ ID NO: 8649 - protein, 7 aa, synthetic construct
LSASMPK

SEQ ID NO: 8650 - protein, 7 aa, synthetic construct
RSGIDGI

SEQ ID NO: 8651 - protein, 7 aa, synthetic construct
EYANKSL

SEQ ID NO: 8652 - protein, 7 aa, synthetic construct
ISHNAVI

SEQ ID NO: 8653 - protein, 7 aa, synthetic construct
GPERFKI

SEQ ID NO: 8654 - protein, 7 aa, synthetic construct
MMKNRDI

SEQ ID NO: 8655 - protein, 7 aa, synthetic construct
NVLQQGT

SEQ ID NO: 8656 - protein, 7 aa, synthetic construct
GDHQPGE

SEQ ID NO: 8657 - protein, 7 aa, synthetic construct
SFHGEVP

SEQ ID NO: 8658 - protein, 7 aa, synthetic construct
PVITPNP

SEQ ID NO: 8659 - protein, 7 aa, synthetic construct
TLGKVFA

SEQ ID NO: 8660 - protein, 7 aa, synthetic construct
DGKEAME

SEQ ID NO: 8661 - protein, 7 aa, synthetic construct
YMVRSQP

SEQ ID NO: 8662 - protein, 7 aa, synthetic construct
FASLTAD

SEQ ID NO: 8663 - protein, 7 aa, synthetic construct
SEYNRPE

SEQ ID NO: 8664 - protein, 7 aa, synthetic construct
ENAHDQP

SEQ ID NO: 8665 - protein, 7 aa, synthetic construct
GDHGVEG

SEQ ID NO: 8666 - protein, 7 aa, synthetic construct
MNMDNGV

SEQ ID NO: 8667 - protein, 7 aa, synthetic construct
EVKTAQE

SEQ ID NO: 8668 - protein, 7 aa, synthetic construct
YYHQEKH

SEQ ID NO: 8669 - protein, 7 aa, synthetic construct
GDDSHKI

SEQ ID NO: 8670 - protein, 7 aa, synthetic construct
KQIRDNY

SEQ ID NO: 8671 - protein, 7 aa, synthetic construct
AEHKTQM

SEQ ID NO: 8672 - protein, 7 aa, synthetic construct
KDSHQWP

SEQ ID NO: 8673 - protein, 7 aa, synthetic construct
TSNVLHI

SEQ ID NO: 8674 - protein, 7 aa, synthetic construct
NATALVG

SEQ ID NO: 8675 - protein, 7 aa, synthetic construct
SLEWEQS

SEQ ID NO: 8676 - protein, 7 aa, synthetic construct
QNWSNNV

SEQ ID NO: 8677 - protein, 7 aa, synthetic construct
DAHKLTH

SEQ ID NO: 8678 - protein, 7 aa, synthetic construct
TSIGMIP

SEQ ID NO: 8679 - protein, 7 aa, synthetic construct
PSESTAK

SEQ ID NO: 8680 - protein, 7 aa, synthetic construct
EARNMVN

SEQ ID NO: 8681 - protein, 7 aa, synthetic construct
LKNGPYE

SEQ ID NO: 8682 - protein, 7 aa, synthetic construct
GPGVQGI

SEQ ID NO: 8683 - protein, 7 aa, synthetic construct
YQLDHTV

SEQ ID NO: 8684 - protein, 7 aa, synthetic construct
GLNYPPE

SEQ ID NO: 8685 - protein, 7 aa, synthetic construct
LKMAVNT

SEQ ID NO: 8686 - protein, 7 aa, synthetic construct
ELKKPVT

SEQ ID NO: 8687 - protein, 7 aa, synthetic construct
GEDIKRS

SEQ ID NO: 8688 - protein, 7 aa, synthetic construct
LAKMQDA

SEQ ID NO: 8689 - protein, 7 aa, synthetic construct
QDRTSSV

SEQ ID NO: 8690 - protein, 7 aa, synthetic construct
NDHHLLR

SEQ ID NO: 8691 - protein, 7 aa, synthetic construct
NGDFMQR

SEQ ID NO: 8692 - protein, 7 aa, synthetic construct
IDQYNAM

SEQ ID NO: 8693 - protein, 7 aa, synthetic construct
IDTQNIH

SEQ ID NO: 8694 - protein, 7 aa, synthetic construct
PEDYNPS

SEQ ID NO: 8695 - protein, 7 aa, synthetic construct
PKDPTHI

SEQ ID NO: 8696 - protein, 7 aa, synthetic construct
HGNGHSN

SEQ ID NO: 8697 - protein, 7 aa, synthetic construct
FLGNKNF

SEQ ID NO: 8698 - protein, 7 aa, synthetic construct
PHMQTKP

SEQ ID NO: 8699 - protein, 7 aa, synthetic construct
DSFMPIA

SEQ ID NO: 8700 - protein, 7 aa, synthetic construct
YLDYVDV

SEQ ID NO: 8701 - protein, 7 aa, synthetic construct
IQYQRND

SEQ ID NO: 8702 - protein, 7 aa, synthetic construct
FGFAAEA

SEQ ID NO: 8703 - protein, 7 aa, synthetic construct
YNVQQGM

SEQ ID NO: 8704 - protein, 7 aa, synthetic construct
CQLPCND

SEQ ID NO: 8705 - protein, 7 aa, synthetic construct
LKDPRDD

SEQ ID NO: 8706 - protein, 7 aa, synthetic construct
KPITQHQ

SEQ ID NO: 8707 - protein, 7 aa, synthetic construct
KKHEAEV

SEQ ID NO: 8708 - protein, 7 aa, synthetic construct
TQYMTGK

SEQ ID NO: 8709 - protein, 7 aa, synthetic construct
PDSHPSG

SEQ ID NO: 8710 - protein, 7 aa, synthetic construct
NDRSTME

SEQ ID NO: 8711 - protein, 7 aa, synthetic construct
HPMIDEQ

SEQ ID NO: 8712 - protein, 7 aa, synthetic construct
YLDERAY

SEQ ID NO: 8713 - protein, 7 aa, synthetic construct
IEVHSHD

SEQ ID NO: 8714 - protein, 7 aa, synthetic construct
GPGLAMV

SEQ ID NO: 8715 - protein, 7 aa, synthetic construct
AQMDRVR

SEQ ID NO: 8716 - protein, 7 aa, synthetic construct
CFDTKCF

SEQ ID NO: 8717 - protein, 7 aa, synthetic construct
KAVQMEM

SEQ ID NO: 8718 - protein, 7 aa, synthetic construct
DSARGIK

SEQ ID NO: 8719 - protein, 7 aa, synthetic construct
PYIDRHS

SEQ ID NO: 8720 - protein, 7 aa, synthetic construct
IGDFVRM

SEQ ID NO: 8721 - protein, 7 aa, synthetic construct
KHGSPMN

SEQ ID NO: 8722 - protein, 7 aa, synthetic construct
EEQGTNR

SEQ ID NO: 8723 - protein, 7 aa, synthetic construct
QSGLNAF

SEQ ID NO: 8724 - protein, 7 aa, synthetic construct
NKLNNSM

SEQ ID NO: 8725 - protein, 7 aa, synthetic construct
QLVHPVQ

SEQ ID NO: 8726 - protein, 7 aa, synthetic construct
GQTLRNG

SEQ ID NO: 8727 - protein, 7 aa, synthetic construct
EFEKHMR

SEQ ID NO: 8728 - protein, 7 aa, synthetic construct
VPGLPMA

SEQ ID NO: 8729 - protein, 7 aa, synthetic construct
EDRNGVD

SEQ ID NO: 8730 - protein, 7 aa, synthetic construct
EVGAGYP

SEQ ID NO: 8731 - protein, 7 aa, synthetic construct
TMDVTKY

SEQ ID NO: 8732 - protein, 7 aa, synthetic construct
KIGDNKF

SEQ ID NO: 8733 - protein, 7 aa, synthetic construct
ASKEMVE

SEQ ID NO: 8734 - protein, 7 aa, synthetic construct
YVTDPSF

SEQ ID NO: 8735 - protein, 7 aa, synthetic construct
NTPAEYI

SEQ ID NO: 8736 - protein, 7 aa, synthetic construct
ETQDQEE

SEQ ID NO: 8737 - protein, 7 aa, synthetic construct
KEKETSY

SEQ ID NO: 8738 - protein, 7 aa, synthetic construct
LMGDSYI

SEQ ID NO: 8739 - protein, 7 aa, synthetic construct
QINIMPQ

SEQ ID NO: 8740 - protein, 7 aa, synthetic construct
MDMTHRA

SEQ ID NO: 8741 - protein, 7 aa, synthetic construct
KDIQSME

SEQ ID NO: 8742 - protein, 7 aa, synthetic construct
TSSIHWE

SEQ ID NO: 8743 - protein, 7 aa, synthetic construct
ETQRFVT

SEQ ID NO: 8744 - protein, 7 aa, synthetic construct
IDRINSE

SEQ ID NO: 8745 - protein, 7 aa, synthetic construct
GSEVKDW

SEQ ID NO: 8746 - protein, 7 aa, synthetic construct
GFELSSG

SEQ ID NO: 8747 - protein, 7 aa, synthetic construct
SNLSSHV

SEQ ID NO: 8748 - protein, 7 aa, synthetic construct
AAQPIRT

SEQ ID NO: 8749 - protein, 7 aa, synthetic construct
TPDHTGH

SEQ ID NO: 8750 - protein, 7 aa, synthetic construct
VYKDAML

SEQ ID NO: 8751 - protein, 7 aa, synthetic construct
STHPKPL

SEQ ID NO: 8752 - protein, 7 aa, synthetic construct
EEYKPND

SEQ ID NO: 8753 - protein, 7 aa, synthetic construct
YIQERAV

SEQ ID NO: 8754 - protein, 7 aa, synthetic construct
AREDWMM

SEQ ID NO: 8755 - protein, 7 aa, synthetic construct
GYDREIK

SEQ ID NO: 8756 - protein, 7 aa, synthetic construct
VQPDKVT

SEQ ID NO: 8757 - protein, 7 aa, synthetic construct
FNMNRSP

SEQ ID NO: 8758 - protein, 7 aa, synthetic construct
AHPAPKS

SEQ ID NO: 8759 - protein, 7 aa, synthetic construct
AHDESHT

SEQ ID NO: 8760 - protein, 7 aa, synthetic construct
PGHNDEM

SEQ ID NO: 8761 - protein, 7 aa, synthetic construct
TAESAHQ

SEQ ID NO: 8762 - protein, 7 aa, synthetic construct
THGEILT

SEQ ID NO: 8763 - protein, 7 aa, synthetic construct
LRGLLQG

SEQ ID NO: 8764 - protein, 7 aa, synthetic construct
QGEFMFE

SEQ ID NO: 8765 - protein, 7 aa, synthetic construct
QNYESKQ

SEQ ID NO: 8766 - protein, 7 aa, synthetic construct
LYDNQRL

SEQ ID NO: 8767 - protein, 7 aa, synthetic construct
SGKYAIS

SEQ ID NO: 8768 - protein, 7 aa, synthetic construct
TYHDLAT

SEQ ID NO: 8769 - protein, 7 aa, synthetic construct
YNNSRGH

SEQ ID NO: 8770 - protein, 7 aa, synthetic construct
AESGAQI

SEQ ID NO: 8771 - protein, 7 aa, synthetic construct
IQNEPAP

SEQ ID NO: 8772 - protein, 7 aa, synthetic construct
MYGPNPT

SEQ ID NO: 8773 - protein, 7 aa, synthetic construct
NQWQLSA

SEQ ID NO: 8774 - protein, 7 aa, synthetic construct
HHNMREV

SEQ ID NO: 8775 - protein, 7 aa, synthetic construct
EHYKYTE

SEQ ID NO: 8776 - protein, 7 aa, synthetic construct
GPKWQVN

SEQ ID NO: 8777 - protein, 7 aa, synthetic construct
ITHGLDM

SEQ ID NO: 8778 - protein, 7 aa, synthetic construct
DIERTPY

SEQ ID NO: 8779 - protein, 7 aa, synthetic construct
VRTDLRV

SEQ ID NO: 8780 - protein, 7 aa, synthetic construct
NIYITQP

SEQ ID NO: 8781 - protein, 7 aa, synthetic construct
YRNESEV

SEQ ID NO: 8782 - protein, 7 aa, synthetic construct
VGDVHFM

SEQ ID NO: 8783 - protein, 7 aa, synthetic construct
SAFAEPD

SEQ ID NO: 8784 - protein, 7 aa, synthetic construct
LKMTGAS

SEQ ID NO: 8785 - protein, 7 aa, synthetic construct
VRPYSEI

SEQ ID NO: 8786 - protein, 7 aa, synthetic construct
LKPNSDN

SEQ ID NO: 8787 - protein, 7 aa, synthetic construct
MDQPKIK

SEQ ID NO: 8788 - protein, 7 aa, synthetic construct
VAEQMKK

SEQ ID NO: 8789 - protein, 7 aa, synthetic construct
DFYKGTA

SEQ ID NO: 8790 - protein, 7 aa, synthetic construct
YTFRTGE

SEQ ID NO: 8791 - protein, 7 aa, synthetic construct
HQKPLQT

SEQ ID NO: 8792 - protein, 7 aa, synthetic construct
SDDKNGS

SEQ ID NO: 8793 - protein, 7 aa, synthetic construct
YEEHKIK

SEQ ID NO: 8794 - protein, 7 aa, synthetic construct
ELEPRYE

SEQ ID NO: 8795 - protein, 7 aa, synthetic construct
PPKQMVN

SEQ ID NO: 8796 - protein, 7 aa, synthetic construct
PVTGNLS

SEQ ID NO: 8797 - protein, 7 aa, synthetic construct
QKVMDQV

SEQ ID NO: 8798 - protein, 7 aa, synthetic construct
HIHNKQT

SEQ ID NO: 8799 - protein, 7 aa, synthetic construct
DRTFSGE

SEQ ID NO: 8800 - protein, 7 aa, synthetic construct
ERGAASQ

SEQ ID NO: 8801 - protein, 7 aa, synthetic construct
PNARALI

SEQ ID NO: 8802 - protein, 7 aa, synthetic construct
IPQLLGA

SEQ ID NO: 8803 - protein, 7 aa, synthetic construct
EPYFARE

SEQ ID NO: 8804 - protein, 7 aa, synthetic construct
INQMKVD

SEQ ID NO: 8805 - protein, 7 aa, synthetic construct
QMQDKMP

SEQ ID NO: 8806 - protein, 7 aa, synthetic construct
QNFGEFV

SEQ ID NO: 8807 - protein, 7 aa, synthetic construct
MASTLMG

SEQ ID NO: 8808 - protein, 7 aa, synthetic construct
PVYHPDD

SEQ ID NO: 8809 - protein, 7 aa, synthetic construct
NDHTSSS

SEQ ID NO: 8810 - protein, 7 aa, synthetic construct
ITGPLDK

SEQ ID NO: 8811 - protein, 7 aa, synthetic construct
AEAKNVI

SEQ ID NO: 8812 - protein, 7 aa, synthetic construct
NSQILSK

SEQ ID NO: 8813 - protein, 7 aa, synthetic construct
PDSIASA

SEQ ID NO: 8814 - protein, 7 aa, synthetic construct
LWRKDDN

SEQ ID NO: 8815 - protein, 7 aa, synthetic construct
NRNEIMK

SEQ ID NO: 8816 - protein, 7 aa, synthetic construct
SMNDNPK

SEQ ID NO: 8817 - protein, 7 aa, synthetic construct
YEGHAMY

SEQ ID NO: 8818 - protein, 7 aa, synthetic construct
DLRATIP

SEQ ID NO: 8819 - protein, 7 aa, synthetic construct
RMDNGWD

SEQ ID NO: 8820 - protein, 7 aa, synthetic construct
YENMTPS

SEQ ID NO: 8821 - protein, 7 aa, synthetic construct
RVQQPQM

SEQ ID NO: 8822 - protein, 7 aa, synthetic construct
HDSDRMH

SEQ ID NO: 8823 - protein, 7 aa, synthetic construct
VRVQETL

SEQ ID NO: 8824 - protein, 7 aa, synthetic construct
WTKDISL

SEQ ID NO: 8825 - protein, 7 aa, synthetic construct
NPRPGSQ

SEQ ID NO: 8826 - protein, 7 aa, synthetic construct
ADNYELP

SEQ ID NO: 8827 - protein, 7 aa, synthetic construct
IRPLAMN

SEQ ID NO: 8828 - protein, 7 aa, synthetic construct
HREDSWN

SEQ ID NO: 8829 - protein, 7 aa, synthetic construct
VYHVPTE

SEQ ID NO: 8830 - protein, 7 aa, synthetic construct
HTQPAYE

SEQ ID NO: 8831 - protein, 7 aa, synthetic construct
GHTTNRQ

SEQ ID NO: 8832 - protein, 7 aa, synthetic construct
AIPQPKE

SEQ ID NO: 8833 - protein, 7 aa, synthetic construct
RVEMKEH

SEQ ID NO: 8834 - protein, 7 aa, synthetic construct
PNSVVTH

SEQ ID NO: 8835 - protein, 7 aa, synthetic construct
HLRVNLS

SEQ ID NO: 8836 - protein, 7 aa, synthetic construct
IEQQFPE

SEQ ID NO: 8837 - protein, 7 aa, synthetic construct
EMQRTEL

SEQ ID NO: 8838 - protein, 7 aa, synthetic construct
LIRDTGM

SEQ ID NO: 8839 - protein, 7 aa, synthetic construct
TVLPAGT

SEQ ID NO: 8840 - protein, 7 aa, synthetic construct
ISGMLPD

SEQ ID NO: 8841 - protein, 7 aa, synthetic construct
YGKDRNY

SEQ ID NO: 8842 - protein, 7 aa, synthetic construct
MLLGRPA

SEQ ID NO: 8843 - protein, 7 aa, synthetic construct
NRVTPMI

SEQ ID NO: 8844 - protein, 7 aa, synthetic construct
GKSEPNE

SEQ ID NO: 8845 - protein, 7 aa, synthetic construct
PAHSISS

SEQ ID NO: 8846 - protein, 7 aa, synthetic construct
PMTDKER

SEQ ID NO: 8847 - protein, 7 aa, synthetic construct
VMHGRNP

SEQ ID NO: 8848 - protein, 7 aa, synthetic construct
HQAQPNY

SEQ ID NO: 8849 - protein, 7 aa, synthetic construct
TVKTLLG

SEQ ID NO: 8850 - protein, 7 aa, synthetic construct
VEHRWSG

SEQ ID NO: 8851 - protein, 7 aa, synthetic construct
NSHERAH

SEQ ID NO: 8852 - protein, 7 aa, synthetic construct
PEPHNAP

SEQ ID NO: 8853 - protein, 7 aa, synthetic construct
IPVSTDR

SEQ ID NO: 8854 - protein, 7 aa, synthetic construct
PQASVSM

SEQ ID NO: 8855 - protein, 7 aa, synthetic construct
NTIEPKT

SEQ ID NO: 8856 - protein, 7 aa, synthetic construct
TEFHGDM

SEQ ID NO: 8857 - protein, 7 aa, synthetic construct
SRAGFDR

SEQ ID NO: 8858 - protein, 7 aa, synthetic construct
GGAQTNT

SEQ ID NO: 8859 - protein, 7 aa, synthetic construct
DEMSIKR

SEQ ID NO: 8860 - protein, 7 aa, synthetic construct
WEADGIQ

SEQ ID NO: 8861 - protein, 7 aa, synthetic construct
TKGDPFR

SEQ ID NO: 8862 - protein, 7 aa, synthetic construct
MLQGGIL

SEQ ID NO: 8863 - protein, 7 aa, synthetic construct
KAARSID

SEQ ID NO: 8864 - protein, 7 aa, synthetic construct
DHYNEPE

SEQ ID NO: 8865 - protein, 7 aa, synthetic construct
KIDAKLV

SEQ ID NO: 8866 - protein, 7 aa, synthetic construct
PMKVMVE

SEQ ID NO: 8867 - protein, 7 aa, synthetic construct
PQKMSHF

SEQ ID NO: 8868 - protein, 7 aa, synthetic construct
VPAGSRL

SEQ ID NO: 8869 - protein, 7 aa, synthetic construct
QQDFGVI

SEQ ID NO: 8870 - protein, 7 aa, synthetic construct
GVPIDHG

SEQ ID NO: 8871 - protein, 7 aa, synthetic construct
RVVVDKT

SEQ ID NO: 8872 - protein, 7 aa, synthetic construct
PWSETQS

SEQ ID NO: 8873 - protein, 7 aa, synthetic construct
EPQHEAG

SEQ ID NO: 8874 - protein, 7 aa, synthetic construct
AMTEMAG

SEQ ID NO: 8875 - protein, 7 aa, synthetic construct
DMATRLQ

SEQ ID NO: 8876 - protein, 7 aa, synthetic construct
IRAYIED

SEQ ID NO: 8877 - protein, 7 aa, synthetic construct
HGLNNLV

SEQ ID NO: 8878 - protein, 7 aa, synthetic construct
NTFNLPP

SEQ ID NO: 8879 - protein, 7 aa, synthetic construct
TENANNR

SEQ ID NO: 8880 - protein, 7 aa, synthetic construct
TIQKGML

SEQ ID NO: 8881 - protein, 7 aa, synthetic construct
QPKSIAH

SEQ ID NO: 8882 - protein, 7 aa, synthetic construct
PDSDHTP

SEQ ID NO: 8883 - protein, 7 aa, synthetic construct
HWNQTER

SEQ ID NO: 8884 - protein, 7 aa, synthetic construct
WAETQMS

SEQ ID NO: 8885 - protein, 7 aa, synthetic construct
RNPTAAM

SEQ ID NO: 8886 - protein, 7 aa, synthetic construct
MLIETKQ

SEQ ID NO: 8887 - protein, 7 aa, synthetic construct
NQSDVPG

SEQ ID NO: 8888 - protein, 7 aa, synthetic construct
EFSTMHE

SEQ ID NO: 8889 - protein, 7 aa, synthetic construct
VYQLENG

SEQ ID NO: 8890 - protein, 7 aa, synthetic construct
RLDTQRS

SEQ ID NO: 8891 - protein, 7 aa, synthetic construct
VDQTEIA

SEQ ID NO: 8892 - protein, 7 aa, synthetic construct
VIPAGRI

SEQ ID NO: 8893 - protein, 7 aa, synthetic construct
GMKAITV

SEQ ID NO: 8894 - protein, 7 aa, synthetic construct
PWKLPEG

SEQ ID NO: 8895 - protein, 7 aa, synthetic construct
GENGYAL

SEQ ID NO: 8896 - protein, 7 aa, synthetic construct
TMSHEWD

SEQ ID NO: 8897 - protein, 7 aa, synthetic construct
GADRYPT

SEQ ID NO: 8898 - protein, 7 aa, synthetic construct
IEHFKYD

SEQ ID NO: 8899 - protein, 7 aa, synthetic construct
QGNIGLM

SEQ ID NO: 8900 - protein, 7 aa, synthetic construct
NMHIDTI

SEQ ID NO: 8901 - protein, 7 aa, synthetic construct
QNSQLNL

SEQ ID NO: 8902 - protein, 7 aa, synthetic construct
QIGRAQF

SEQ ID NO: 8903 - protein, 7 aa, synthetic construct
LMPYHQG

SEQ ID NO: 8904 - protein, 7 aa, synthetic construct
KVYNGMV

SEQ ID NO: 8905 - protein, 7 aa, synthetic construct
PMMDRAL

SEQ ID NO: 8906 - protein, 7 aa, synthetic construct
SENDKSP

SEQ ID NO: 8907 - protein, 7 aa, synthetic construct
GDWAPFA

SEQ ID NO: 8908 - protein, 7 aa, synthetic construct
NAPPVPD

SEQ ID NO: 8909 - protein, 7 aa, synthetic construct
SNLIRQP

SEQ ID NO: 8910 - protein, 7 aa, synthetic construct
GPWQDPE

SEQ ID NO: 8911 - protein, 7 aa, synthetic construct
NNGNQHH

SEQ ID NO: 8912 - protein, 7 aa, synthetic construct
MQAMNQS

SEQ ID NO: 8913 - protein, 7 aa, synthetic construct
YIDHPED

SEQ ID NO: 8914 - protein, 7 aa, synthetic construct
GSGDTMK

SEQ ID NO: 8915 - protein, 7 aa, synthetic construct
SPIQRDI

SEQ ID NO: 8916 - protein, 7 aa, synthetic construct
LKGKQDF

SEQ ID NO: 8917 - protein, 7 aa, synthetic construct
MPFPEQA

SEQ ID NO: 8918 - protein, 7 aa, synthetic construct
QHSTRSV

SEQ ID NO: 8919 - protein, 7 aa, synthetic construct
HEGLIRD

SEQ ID NO: 8920 - protein, 7 aa, synthetic construct
NLGVQKV

SEQ ID NO: 8921 - protein, 7 aa, synthetic construct
PPTQSMY

SEQ ID NO: 8922 - protein, 7 aa, synthetic construct
FKTISGE

SEQ ID NO: 8923 - protein, 7 aa, synthetic construct
GNAHMQA

SEQ ID NO: 8924 - protein, 7 aa, synthetic construct
RREPDYK

SEQ ID NO: 8925 - protein, 7 aa, synthetic construct
MAPFTPN

SEQ ID NO: 8926 - protein, 7 aa, synthetic construct
WQGQHGL

SEQ ID NO: 8927 - protein, 7 aa, synthetic construct
EPHPVAV

SEQ ID NO: 8928 - protein, 7 aa, synthetic construct
KMSPMLD

SEQ ID NO: 8929 - protein, 7 aa, synthetic construct
YQGEMMK

SEQ ID NO: 8930 - protein, 7 aa, synthetic construct
NTDTAKK

SEQ ID NO: 8931 - protein, 7 aa, synthetic construct
PGMAREY

SEQ ID NO: 8932 - protein, 7 aa, synthetic construct
MQEATQG

SEQ ID NO: 8933 - protein, 7 aa, synthetic construct
IEQPMTV

SEQ ID NO: 8934 - protein, 7 aa, synthetic construct
LRAQPNH

SEQ ID NO: 8935 - protein, 7 aa, synthetic construct
GDAEHFA

SEQ ID NO: 8936 - protein, 7 aa, synthetic construct
HAHMVNI

SEQ ID NO: 8937 - protein, 7 aa, synthetic construct
SNEWTKQ

SEQ ID NO: 8938 - protein, 7 aa, synthetic construct
YRVNGVP

SEQ ID NO: 8939 - protein, 7 aa, synthetic construct
SSDTNTY

SEQ ID NO: 8940 - protein, 7 aa, synthetic construct
DMGNHRT

SEQ ID NO: 8941 - protein, 7 aa, synthetic construct
HFEQYNA

SEQ ID NO: 8942 - protein, 7 aa, synthetic construct
GYPMEKE

SEQ ID NO: 8943 - protein, 7 aa, synthetic construct
ESPSYGS

SEQ ID NO: 8944 - protein, 7 aa, synthetic construct
QSDKNEP

SEQ ID NO: 8945 - protein, 7 aa, synthetic construct
TNEKYTV

SEQ ID NO: 8946 - protein, 7 aa, synthetic construct
MSDNRPK

SEQ ID NO: 8947 - protein, 7 aa, synthetic construct
KFSTKDI

SEQ ID NO: 8948 - protein, 7 aa, synthetic construct
WGNIPQV

SEQ ID NO: 8949 - protein, 7 aa, synthetic construct
QMHPTDA

SEQ ID NO: 8950 - protein, 7 aa, synthetic construct
REFYKDS

SEQ ID NO: 8951 - protein, 7 aa, synthetic construct
FVKTQRD

SEQ ID NO: 8952 - protein, 7 aa, synthetic construct
TAFKEYG

SEQ ID NO: 8953 - protein, 7 aa, synthetic construct
IQDQFQM

SEQ ID NO: 8954 - protein, 7 aa, synthetic construct
PTATVGG

SEQ ID NO: 8955 - protein, 7 aa, synthetic construct
VENKMDY

SEQ ID NO: 8956 - protein, 7 aa, synthetic construct
VDDPKYR

SEQ ID NO: 8957 - protein, 7 aa, synthetic construct
LIAASHV

SEQ ID NO: 8958 - protein, 7 aa, synthetic construct
YETFMVD

SEQ ID NO: 8959 - protein, 7 aa, synthetic construct
TQLRQSP

SEQ ID NO: 8960 - protein, 7 aa, synthetic construct
FNPQQVT

SEQ ID NO: 8961 - protein, 7 aa, synthetic construct
LPAYTHH

SEQ ID NO: 8962 - protein, 7 aa, synthetic construct
DTYPDDR

SEQ ID NO: 8963 - protein, 7 aa, synthetic construct
SNMPNPK

SEQ ID NO: 8964 - protein, 7 aa, synthetic construct
LRVHDTG

SEQ ID NO: 8965 - protein, 7 aa, synthetic construct
LDFHEGM

SEQ ID NO: 8966 - protein, 7 aa, synthetic construct
QADGHNM

SEQ ID NO: 8967 - protein, 7 aa, synthetic construct
SDKFVQN

SEQ ID NO: 8968 - protein, 7 aa, synthetic construct
GASLSVQ

SEQ ID NO: 8969 - protein, 7 aa, synthetic construct
SVTDKPN

SEQ ID NO: 8970 - protein, 7 aa, synthetic construct
YEQQPII

SEQ ID NO: 8971 - protein, 7 aa, synthetic construct
KQAVREN

SEQ ID NO: 8972 - protein, 7 aa, synthetic construct
MIETKHD

SEQ ID NO: 8973 - protein, 7 aa, synthetic construct
MQEGPFE

SEQ ID NO: 8974 - protein, 7 aa, synthetic construct
PHTPLRE

SEQ ID NO: 8975 - protein, 7 aa, synthetic construct
TMTPPRM

SEQ ID NO: 8976 - protein, 7 aa, synthetic construct
VTAHLMP

SEQ ID NO: 8977 - protein, 7 aa, synthetic construct
PYHNKPV

SEQ ID NO: 8978 - protein, 7 aa, synthetic construct
NNISNDD

SEQ ID NO: 8979 - protein, 7 aa, synthetic construct
TPVQNPI

SEQ ID NO: 8980 - protein, 7 aa, synthetic construct
GNRMQEI

SEQ ID NO: 8981 - protein, 7 aa, synthetic construct
HAMHEHI

SEQ ID NO: 8982 - protein, 7 aa, synthetic construct
HMEVRVS

SEQ ID NO: 8983 - protein, 7 aa, synthetic construct
PMEGSTA

SEQ ID NO: 8984 - protein, 7 aa, synthetic construct
EAHTLIH

SEQ ID NO: 8985 - protein, 7 aa, synthetic construct
ASDFREV

SEQ ID NO: 8986 - protein, 7 aa, synthetic construct
YQAVEPT

SEQ ID NO: 8987 - protein, 7 aa, synthetic construct
SMKFNGI

SEQ ID NO: 8988 - protein, 7 aa, synthetic construct
TFNSDYI

SEQ ID NO: 8989 - protein, 7 aa, synthetic construct
YYKNTGS

SEQ ID NO: 8990 - protein, 7 aa, synthetic construct
HQKPQDH

SEQ ID NO: 8991 - protein, 7 aa, synthetic construct
DITVTKQ

SEQ ID NO: 8992 - protein, 7 aa, synthetic construct
VSDHYKN

SEQ ID NO: 8993 - protein, 7 aa, synthetic construct
FHHERIG

SEQ ID NO: 8994 - protein, 7 aa, synthetic construct
PGNPRPF

SEQ ID NO: 8995 - protein, 7 aa, synthetic construct
EPRIEGH

SEQ ID NO: 8996 - protein, 7 aa, synthetic construct
GMAVHEG

SEQ ID NO: 8997 - protein, 7 aa, synthetic construct
ISMGFVG

SEQ ID NO: 8998 - protein, 7 aa, synthetic construct
ESEDWDG

SEQ ID NO: 8999 - protein, 7 aa, synthetic construct
SGEEQNR

SEQ ID NO: 9000 - protein, 7 aa, synthetic construct
HEFQRIS

SEQ ID NO: 9001 - protein, 7 aa, synthetic construct
LKINNVH

SEQ ID NO: 9002 - protein, 7 aa, synthetic construct
AAPGRDP

SEQ ID NO: 9003 - protein, 7 aa, synthetic construct
NWQGMEI

SEQ ID NO: 9004 - protein, 7 aa, synthetic construct
TQNHVGW

SEQ ID NO: 9005 - protein, 7 aa, synthetic construct
IWQQNEP

SEQ ID NO: 9006 - protein, 7 aa, synthetic construct
KTNTMGE

SEQ ID NO: 9007 - protein, 7 aa, synthetic construct
MKQDLIH

SEQ ID NO: 9008 - protein, 7 aa, synthetic construct
QGSQDTR

SEQ ID NO: 9009 - protein, 7 aa, synthetic construct
QNAEHWS

SEQ ID NO: 9010 - protein, 7 aa, synthetic construct
AHPSHQI

SEQ ID NO: 9011 - protein, 7 aa, synthetic construct
KEDSGPQ

SEQ ID NO: 9012 - protein, 7 aa, synthetic construct
EDKDRVH

SEQ ID NO: 9013 - protein, 7 aa, synthetic construct
NNGPGPF

SEQ ID NO: 9014 - protein, 7 aa, synthetic construct
SSVLRQE

SEQ ID NO: 9015 - protein, 7 aa, synthetic construct
ADQVTKS

SEQ ID NO: 9016 - protein, 7 aa, synthetic construct
ERSPGAL

SEQ ID NO: 9017 - protein, 7 aa, synthetic construct
DHARHEQ

SEQ ID NO: 9018 - protein, 7 aa, synthetic construct
GNWGTEA

SEQ ID NO: 9019 - protein, 7 aa, synthetic construct
HRAINDP

SEQ ID NO: 9020 - protein, 7 aa, synthetic construct
HPMKGDL

SEQ ID NO: 9021 - protein, 7 aa, synthetic construct
REGAHHQ

SEQ ID NO: 9022 - protein, 7 aa, synthetic construct
KGDLMEF

SEQ ID NO: 9023 - protein, 7 aa, synthetic construct
TDENGRK

SEQ ID NO: 9024 - protein, 7 aa, synthetic construct
AHANLPR

SEQ ID NO: 9025 - protein, 7 aa, synthetic construct
GNEPHQT

SEQ ID NO: 9026 - protein, 7 aa, synthetic construct
LKILNDT

SEQ ID NO: 9027 - protein, 7 aa, synthetic construct
ADLTVGE

SEQ ID NO: 9028 - protein, 7 aa, synthetic construct
VAKSERL

SEQ ID NO: 9029 - protein, 7 aa, synthetic construct
APGPIKG

SEQ ID NO: 9030 - protein, 7 aa, synthetic construct
KHMVSNN

SEQ ID NO: 9031 - protein, 7 aa, synthetic construct
GSPNIQG

SEQ ID NO: 9032 - protein, 7 aa, synthetic construct
SIYDEDG

SEQ ID NO: 9033 - protein, 7 aa, synthetic construct
IHQLKPT

SEQ ID NO: 9034 - protein, 7 aa, synthetic construct
SQNYHSD

SEQ ID NO: 9035 - protein, 7 aa, synthetic construct
FQPQRTQ

SEQ ID NO: 9036 - protein, 7 aa, synthetic construct
PDQEISK

SEQ ID NO: 9037 - protein, 7 aa, synthetic construct
STEEKVR

SEQ ID NO: 9038 - protein, 7 aa, synthetic construct
HGTSVTR

SEQ ID NO: 9039 - protein, 7 aa, synthetic construct
EVSMDRH

SEQ ID NO: 9040 - protein, 7 aa, synthetic construct
GSTADQG

SEQ ID NO: 9041 - protein, 7 aa, synthetic construct
YENKDFF

SEQ ID NO: 9042 - protein, 7 aa, synthetic construct
SIHKPPS

SEQ ID NO: 9043 - protein, 7 aa, synthetic construct
DTPQTEP

SEQ ID NO: 9044 - protein, 7 aa, synthetic construct
PIDSQQM

SEQ ID NO: 9045 - protein, 7 aa, synthetic construct
ENGGYEM

SEQ ID NO: 9046 - protein, 7 aa, synthetic construct
MMSMHEP

SEQ ID NO: 9047 - protein, 7 aa, synthetic construct
VYAEMQS

SEQ ID NO: 9048 - protein, 7 aa, synthetic construct
EKRDVSR

SEQ ID NO: 9049 - protein, 7 aa, synthetic construct
QAVDTQT

SEQ ID NO: 9050 - protein, 7 aa, synthetic construct
LPDQNGS

SEQ ID NO: 9051 - protein, 7 aa, synthetic construct
LHHDYPL

SEQ ID NO: 9052 - protein, 7 aa, synthetic construct
PADQKFD

SEQ ID NO: 9053 - protein, 7 aa, synthetic construct
VLQPAHQ

SEQ ID NO: 9054 - protein, 7 aa, synthetic construct
GYQFSTP

SEQ ID NO: 9055 - protein, 7 aa, synthetic construct
QYKADGR

SEQ ID NO: 9056 - protein, 7 aa, synthetic construct
KLGMDFS

SEQ ID NO: 9057 - protein, 7 aa, synthetic construct
DISALRN

SEQ ID NO: 9058 - protein, 7 aa, synthetic construct
HAFPHDE

SEQ ID NO: 9059 - protein, 7 aa, synthetic construct
QNRAGNY

SEQ ID NO: 9060 - protein, 7 aa, synthetic construct
WSNNFEA

SEQ ID NO: 9061 - protein, 7 aa, synthetic construct
DDNKSPR

SEQ ID NO: 9062 - protein, 7 aa, synthetic construct
ANTENTF

SEQ ID NO: 9063 - protein, 7 aa, synthetic construct
HEKLTDP

SEQ ID NO: 9064 - protein, 7 aa, synthetic construct
KDPQEDS

SEQ ID NO: 9065 - protein, 7 aa, synthetic construct
DQINDKY

SEQ ID NO: 9066 - protein, 7 aa, synthetic construct
DREMQIP

SEQ ID NO: 9067 - protein, 7 aa, synthetic construct
TGTAPTD

SEQ ID NO: 9068 - protein, 7 aa, synthetic construct
TESTMLH

SEQ ID NO: 9069 - protein, 7 aa, synthetic construct
EAPLIKP

SEQ ID NO: 9070 - protein, 7 aa, synthetic construct
KALKVDY

SEQ ID NO: 9071 - protein, 7 aa, synthetic construct
MGSPPAM

SEQ ID NO: 9072 - protein, 7 aa, synthetic construct
DYATNAG

SEQ ID NO: 9073 - protein, 7 aa, synthetic construct
QTGERKF

SEQ ID NO: 9074 - protein, 7 aa, synthetic construct
YMDERTH

SEQ ID NO: 9075 - protein, 7 aa, synthetic construct
LHNFNAV

SEQ ID NO: 9076 - protein, 7 aa, synthetic construct
KHEEPGQ

SEQ ID NO: 9077 - protein, 7 aa, synthetic construct
VTNSSPL

SEQ ID NO: 9078 - protein, 7 aa, synthetic construct
PIGAQSV

SEQ ID NO: 9079 - protein, 7 aa, synthetic construct
AFMQPGA

SEQ ID NO: 9080 - protein, 7 aa, synthetic construct
MSGENFS

SEQ ID NO: 9081 - protein, 7 aa, synthetic construct
PRQEIPI

SEQ ID NO: 9082 - protein, 7 aa, synthetic construct
WKDADGT

SEQ ID NO: 9083 - protein, 7 aa, synthetic construct
GMVPPLP

SEQ ID NO: 9084 - protein, 7 aa, synthetic construct
DGRMHPP

SEQ ID NO: 9085 - protein, 7 aa, synthetic construct
SQMPQNQ

SEQ ID NO: 9086 - protein, 7 aa, synthetic construct
VLEEKQM

SEQ ID NO: 9087 - protein, 7 aa, synthetic construct
EPATNHP

SEQ ID NO: 9088 - protein, 7 aa, synthetic construct
DNEIKKD

SEQ ID NO: 9089 - protein, 7 aa, synthetic construct
NRDDWTI

SEQ ID NO: 9090 - protein, 7 aa, synthetic construct
KDNLETH

SEQ ID NO: 9091 - protein, 7 aa, synthetic construct
LNRTGYM

SEQ ID NO: 9092 - protein, 7 aa, synthetic construct
IKPADQG

SEQ ID NO: 9093 - protein, 7 aa, synthetic construct
SPNPLMH

SEQ ID NO: 9094 - protein, 7 aa, synthetic construct
VMAAPGP

SEQ ID NO: 9095 - protein, 7 aa, synthetic construct
LGGGHMK

SEQ ID NO: 9096 - protein, 7 aa, synthetic construct
SKPPNQD

SEQ ID NO: 9097 - protein, 7 aa, synthetic construct
HPPQSGK

SEQ ID NO: 9098 - protein, 7 aa, synthetic construct
AVADAKQ

SEQ ID NO: 9099 - protein, 7 aa, synthetic construct
REDFNVH

SEQ ID NO: 9100 - protein, 7 aa, synthetic construct
PVKHKEG

SEQ ID NO: 9101 - protein, 7 aa, synthetic construct
RASFEAM

SEQ ID NO: 9102 - protein, 7 aa, synthetic construct
KRNILDE

SEQ ID NO: 9103 - protein, 7 aa, synthetic construct
DAHDKGN

SEQ ID NO: 9104 - protein, 7 aa, synthetic construct
YENHASE

SEQ ID NO: 9105 - protein, 7 aa, synthetic construct
TVRTYEK

SEQ ID NO: 9106 - protein, 7 aa, synthetic construct
IMDISVR

SEQ ID NO: 9107 - protein, 7 aa, synthetic construct
ADHHKIY

SEQ ID NO: 9108 - protein, 7 aa, synthetic construct
QNISHGA

SEQ ID NO: 9109 - protein, 7 aa, synthetic construct
GSHQVSQ

SEQ ID NO: 9110 - protein, 7 aa, synthetic construct
DRMAGHL

SEQ ID NO: 9111 - protein, 7 aa, synthetic construct
TVRQEWD

SEQ ID NO: 9112 - protein, 7 aa, synthetic construct
TMQTRDQ

SEQ ID NO: 9113 - protein, 7 aa, synthetic construct
INLPHSG

SEQ ID NO: 9114 - protein, 7 aa, synthetic construct
GRPAAHS

SEQ ID NO: 9115 - protein, 7 aa, synthetic construct
QWQQVNG

SEQ ID NO: 9116 - protein, 7 aa, synthetic construct
INLMGKM

SEQ ID NO: 9117 - protein, 7 aa, synthetic construct
EQPHQNG

SEQ ID NO: 9118 - protein, 7 aa, synthetic construct
PMQNQKA

SEQ ID NO: 9119 - protein, 7 aa, synthetic construct
NGGMTPT

SEQ ID NO: 9120 - protein, 7 aa, synthetic construct
RMHTPDK

SEQ ID NO: 9121 - protein, 7 aa, synthetic construct
SEQNARQ

SEQ ID NO: 9122 - protein, 7 aa, synthetic construct
FQDKLNP

SEQ ID NO: 9123 - protein, 7 aa, synthetic construct
FTGVVRG

SEQ ID NO: 9124 - protein, 7 aa, synthetic construct
SLNASSS

SEQ ID NO: 9125 - protein, 7 aa, synthetic construct
DVQEGVE

SEQ ID NO: 9126 - protein, 7 aa, synthetic construct
RRNEFAT

SEQ ID NO: 9127 - protein, 7 aa, synthetic construct
ISINTNY

SEQ ID NO: 9128 - protein, 7 aa, synthetic construct
NSPRISQ

SEQ ID NO: 9129 - protein, 7 aa, synthetic construct
QVDKFYS

SEQ ID NO: 9130 - protein, 7 aa, synthetic construct
FESARHI

SEQ ID NO: 9131 - protein, 7 aa, synthetic construct
NMAIYKD

SEQ ID NO: 9132 - protein, 7 aa, synthetic construct
HDTPTAH

SEQ ID NO: 9133 - protein, 7 aa, synthetic construct
SQEDWRD

SEQ ID NO: 9134 - protein, 7 aa, synthetic construct
FEKTSRL

SEQ ID NO: 9135 - protein, 7 aa, synthetic construct
ETHPPKE

SEQ ID NO: 9136 - protein, 7 aa, synthetic construct
NRIEDGS

SEQ ID NO: 9137 - protein, 7 aa, synthetic construct
EREFSNG

SEQ ID NO: 9138 - protein, 7 aa, synthetic construct
MHSFESP

SEQ ID NO: 9139 - protein, 7 aa, synthetic construct
QDPGIDH

SEQ ID NO: 9140 - protein, 7 aa, synthetic construct
WSAEARD

SEQ ID NO: 9141 - protein, 7 aa, synthetic construct
EPSIDKH

SEQ ID NO: 9142 - protein, 7 aa, synthetic construct
WPKTSDV

SEQ ID NO: 9143 - protein, 7 aa, synthetic construct
GDHSDGN

SEQ ID NO: 9144 - protein, 7 aa, synthetic construct
NKLDQQE

SEQ ID NO: 9145 - protein, 7 aa, synthetic construct
YEKNPYP

SEQ ID NO: 9146 - protein, 7 aa, synthetic construct
LIGNNFA

SEQ ID NO: 9147 - protein, 7 aa, synthetic construct
FQEPSQR

SEQ ID NO: 9148 - protein, 7 aa, synthetic construct
LESGKAP

SEQ ID NO: 9149 - protein, 7 aa, synthetic construct
VMQNKGP

SEQ ID NO: 9150 - protein, 7 aa, synthetic construct
HDTAGIN

SEQ ID NO: 9151 - protein, 7 aa, synthetic construct
ATTQEKI

SEQ ID NO: 9152 - protein, 7 aa, synthetic construct
YDLKHFT

SEQ ID NO: 9153 - protein, 7 aa, synthetic construct
QDGQSAT

SEQ ID NO: 9154 - protein, 7 aa, synthetic construct
QGPTAPT

SEQ ID NO: 9155 - protein, 7 aa, synthetic construct
ITAVSGY

SEQ ID NO: 9156 - protein, 7 aa, synthetic construct
DSAVAAY

SEQ ID NO: 9157 - protein, 7 aa, synthetic construct
PIRLDID

SEQ ID NO: 9158 - protein, 7 aa, synthetic construct
MITEGGP

SEQ ID NO: 9159 - protein, 7 aa, synthetic construct
MDPREVS

SEQ ID NO: 9160 - protein, 7 aa, synthetic construct
LLAVSNP

SEQ ID NO: 9161 - protein, 7 aa, synthetic construct
QVNAYPL

SEQ ID NO: 9162 - protein, 7 aa, synthetic construct
AQHRTVY

SEQ ID NO: 9163 - protein, 7 aa, synthetic construct
PANTLPM

SEQ ID NO: 9164 - protein, 7 aa, synthetic construct
PAMKDKH

SEQ ID NO: 9165 - protein, 7 aa, synthetic construct
YGGLISA

SEQ ID NO: 9166 - protein, 7 aa, synthetic construct
TDMHGEE

SEQ ID NO: 9167 - protein, 7 aa, synthetic construct
EATTGRL

SEQ ID NO: 9168 - protein, 7 aa, synthetic construct
MHTEKQI

SEQ ID NO: 9169 - protein, 7 aa, synthetic construct
DFTKSTF

SEQ ID NO: 9170 - protein, 7 aa, synthetic construct
YKNIEHV

SEQ ID NO: 9171 - protein, 7 aa, synthetic construct
WQNAEAV

SEQ ID NO: 9172 - protein, 7 aa, synthetic construct
WPQQQIA

SEQ ID NO: 9173 - protein, 7 aa, synthetic construct
ERDNYHK

SEQ ID NO: 9174 - protein, 7 aa, synthetic construct
NTNVPLA

SEQ ID NO: 9175 - protein, 7 aa, synthetic construct
EVTMLTE

SEQ ID NO: 9176 - protein, 7 aa, synthetic construct
IETHTYH

SEQ ID NO: 9177 - protein, 7 aa, synthetic construct
MNQRNSM

SEQ ID NO: 9178 - protein, 7 aa, synthetic construct
QPYQGEH

SEQ ID NO: 9179 - protein, 7 aa, synthetic construct
ASTKDQM

SEQ ID NO: 9180 - protein, 7 aa, synthetic construct
DKTFGDS

SEQ ID NO: 9181 - protein, 7 aa, synthetic construct
YVSRVPH

SEQ ID NO: 9182 - protein, 7 aa, synthetic construct
ATATDDH

SEQ ID NO: 9183 - protein, 7 aa, synthetic construct
RDSEGLW

SEQ ID NO: 9184 - protein, 7 aa, synthetic construct
RFGVNQP

SEQ ID NO: 9185 - protein, 7 aa, synthetic construct
KSNEIPM

SEQ ID NO: 9186 - protein, 7 aa, synthetic construct
LHHTPGI

SEQ ID NO: 9187 - protein, 7 aa, synthetic construct
KVPKVYE

SEQ ID NO: 9188 - protein, 7 aa, synthetic construct
TGGSKMS

SEQ ID NO: 9189 - protein, 7 aa, synthetic construct
DRGMAPD

SEQ ID NO: 9190 - protein, 7 aa, synthetic construct
HYMDREA

SEQ ID NO: 9191 - protein, 7 aa, synthetic construct
FGQPMVA

SEQ ID NO: 9192 - protein, 7 aa, synthetic construct
WNGPEGK

SEQ ID NO: 9193 - protein, 7 aa, synthetic construct
TAPDSTN

SEQ ID NO: 9194 - protein, 7 aa, synthetic construct
DSATVRE

SEQ ID NO: 9195 - protein, 7 aa, synthetic construct
QHDGITI

SEQ ID NO: 9196 - protein, 7 aa, synthetic construct
SQGVLAA

SEQ ID NO: 9197 - protein, 7 aa, synthetic construct
EARLSSV

SEQ ID NO: 9198 - protein, 7 aa, synthetic construct
HGMEVNR

SEQ ID NO: 9199 - protein, 7 aa, synthetic construct
HVMPNEE

SEQ ID NO: 9200 - protein, 7 aa, synthetic construct
SDISMQR

SEQ ID NO: 9201 - protein, 7 aa, synthetic construct
GIMDMKP

SEQ ID NO: 9202 - protein, 7 aa, synthetic construct
GDGEEWG

SEQ ID NO: 9203 - protein, 7 aa, synthetic construct
GFHDMQT

SEQ ID NO: 9204 - protein, 7 aa, synthetic construct
ILKQNGY

SEQ ID NO: 9205 - protein, 7 aa, synthetic construct
ANVMHRD

SEQ ID NO: 9206 - protein, 7 aa, synthetic construct
HEKDYPQ

SEQ ID NO: 9207 - protein, 7 aa, synthetic construct
NSRHDQF

SEQ ID NO: 9208 - protein, 7 aa, synthetic construct
RNFDQTF

SEQ ID NO: 9209 - protein, 7 aa, synthetic construct
YNAVDTV

SEQ ID NO: 9210 - protein, 7 aa, synthetic construct
DQKGLMW

SEQ ID NO: 9211 - protein, 7 aa, synthetic construct
GSRMDYL

SEQ ID NO: 9212 - protein, 7 aa, synthetic construct
NTKEDVV

SEQ ID NO: 9213 - protein, 7 aa, synthetic construct
IEGKASS

SEQ ID NO: 9214 - protein, 7 aa, synthetic construct
DVNKGSW

SEQ ID NO: 9215 - protein, 7 aa, synthetic construct
SQPSAAL

SEQ ID NO: 9216 - protein, 7 aa, synthetic construct
TNAAWEY

SEQ ID NO: 9217 - protein, 7 aa, synthetic construct
YQHIEEN

SEQ ID NO: 9218 - protein, 7 aa, synthetic construct
APYPNTY

SEQ ID NO: 9219 - protein, 7 aa, synthetic construct
LALENTS

SEQ ID NO: 9220 - protein, 7 aa, synthetic construct
APDKQWY

SEQ ID NO: 9221 - protein, 7 aa, synthetic construct
DLNNHSK

SEQ ID NO: 9222 - protein, 7 aa, synthetic construct
SSEGKHV

SEQ ID NO: 9223 - protein, 7 aa, synthetic construct
APPERAD

SEQ ID NO: 9224 - protein, 7 aa, synthetic construct
GSFKSAQ

SEQ ID NO: 9225 - protein, 7 aa, synthetic construct
EVSHHAE

SEQ ID NO: 9226 - protein, 7 aa, synthetic construct
QDSQRLK

SEQ ID NO: 9227 - protein, 7 aa, synthetic construct
TRWAETP

SEQ ID NO: 9228 - protein, 7 aa, synthetic construct
DGANTSM

SEQ ID NO: 9229 - protein, 7 aa, synthetic construct
KMIPDAP

SEQ ID NO: 9230 - protein, 7 aa, synthetic construct
QDGVRIY

SEQ ID NO: 9231 - protein, 7 aa, synthetic construct
YAPAGFH

SEQ ID NO: 9232 - protein, 7 aa, synthetic construct
GEQGGRV

SEQ ID NO: 9233 - protein, 7 aa, synthetic construct
KHEMEEA

SEQ ID NO: 9234 - protein, 7 aa, synthetic construct
VGNVIAY

SEQ ID NO: 9235 - protein, 7 aa, synthetic construct
AYRDGLH

SEQ ID NO: 9236 - protein, 7 aa, synthetic construct
YKQTLTG

SEQ ID NO: 9237 - protein, 7 aa, synthetic construct
IYNPQKV

SEQ ID NO: 9238 - protein, 7 aa, synthetic construct
HGSGRVT

SEQ ID NO: 9239 - protein, 7 aa, synthetic construct
NDAKLPS

SEQ ID NO: 9240 - protein, 7 aa, synthetic construct
YATYVHV

SEQ ID NO: 9241 - protein, 7 aa, synthetic construct
KLLIDGK

SEQ ID NO: 9242 - protein, 7 aa, synthetic construct
FDGPQQG

SEQ ID NO: 9243 - protein, 7 aa, synthetic construct
FWESKGA

SEQ ID NO: 9244 - protein, 7 aa, synthetic construct
WAPSDKH

SEQ ID NO: 9245 - protein, 7 aa, synthetic construct
TQAPNFE

SEQ ID NO: 9246 - protein, 7 aa, synthetic construct
EQVNGEH

SEQ ID NO: 9247 - protein, 7 aa, synthetic construct
YKEKQAF

SEQ ID NO: 9248 - protein, 7 aa, synthetic construct
LESGPYV

SEQ ID NO: 9249 - protein, 7 aa, synthetic construct
PKQANVA

SEQ ID NO: 9250 - protein, 7 aa, synthetic construct
SARQYGG

SEQ ID NO: 9251 - protein, 7 aa, synthetic construct
QHLSAQL

SEQ ID NO: 9252 - protein, 7 aa, synthetic construct
IQQRHHQ

SEQ ID NO: 9253 - protein, 7 aa, synthetic construct
WEDHAKQ

SEQ ID NO: 9254 - protein, 7 aa, synthetic construct
VVKDELI

SEQ ID NO: 9255 - protein, 7 aa, synthetic construct
PNGVTLT

SEQ ID NO: 9256 - protein, 7 aa, synthetic construct
EQSPPVP

SEQ ID NO: 9257 - protein, 7 aa, synthetic construct
PQDRPLK

SEQ ID NO: 9258 - protein, 7 aa, synthetic construct
HVPAYEH

SEQ ID NO: 9259 - protein, 7 aa, synthetic construct
VNYGDSH

SEQ ID NO: 9260 - protein, 7 aa, synthetic construct
DIPSNMH

SEQ ID NO: 9261 - protein, 7 aa, synthetic construct
TVIQDRV

SEQ ID NO: 9262 - protein, 7 aa, synthetic construct
WYEDGDD

SEQ ID NO: 9263 - protein, 7 aa, synthetic construct
VNLAFEP

SEQ ID NO: 9264 - protein, 7 aa, synthetic construct
MPGKLVN

SEQ ID NO: 9265 - protein, 7 aa, synthetic construct
VERQGQL

SEQ ID NO: 9266 - protein, 7 aa, synthetic construct
LAYSQAM

SEQ ID NO: 9267 - protein, 7 aa, synthetic construct
KKAFSEV

SEQ ID NO: 9268 - protein, 7 aa, synthetic construct
QKTPMSI

SEQ ID NO: 9269 - protein, 7 aa, synthetic construct
GHNSATR

SEQ ID NO: 9270 - protein, 7 aa, synthetic construct
RGHGLPQ

SEQ ID NO: 9271 - protein, 7 aa, synthetic construct
RGSFDEV

SEQ ID NO: 9272 - protein, 7 aa, synthetic construct
QSNPLNP

SEQ ID NO: 9273 - protein, 7 aa, synthetic construct
DAGTIRH

SEQ ID NO: 9274 - protein, 7 aa, synthetic construct
VEWAKSE

SEQ ID NO: 9275 - protein, 7 aa, synthetic construct
FSGMMGV

SEQ ID NO: 9276 - protein, 7 aa, synthetic construct
PDDRRDV

SEQ ID NO: 9277 - protein, 7 aa, synthetic construct
QWNSQRE

SEQ ID NO: 9278 - protein, 7 aa, synthetic construct
QAQGMSE

SEQ ID NO: 9279 - protein, 7 aa, synthetic construct
KKQNLFE

SEQ ID NO: 9280 - protein, 7 aa, synthetic construct
PKNNVAS

SEQ ID NO: 9281 - protein, 7 aa, synthetic construct
KQNMNAE

SEQ ID NO: 9282 - protein, 7 aa, synthetic construct
PMTTVQA

SEQ ID NO: 9283 - protein, 7 aa, synthetic construct
LDANLHS

SEQ ID NO: 9284 - protein, 7 aa, synthetic construct
HVPQDHM

SEQ ID NO: 9285 - protein, 7 aa, synthetic construct
AREHEES

SEQ ID NO: 9286 - protein, 7 aa, synthetic construct
VHKVPHT

SEQ ID NO: 9287 - protein, 7 aa, synthetic construct
AEAQVMT

SEQ ID NO: 9288 - protein, 7 aa, synthetic construct
EAAYTPS

SEQ ID NO: 9289 - protein, 7 aa, synthetic construct
DKHNINL

SEQ ID NO: 9290 - protein, 7 aa, synthetic construct
GVHFPHQ

SEQ ID NO: 9291 - protein, 7 aa, synthetic construct
NDNHDQN

SEQ ID NO: 9292 - protein, 7 aa, synthetic construct
NHYKENI

SEQ ID NO: 9293 - protein, 7 aa, synthetic construct
NTDTWKP

SEQ ID NO: 9294 - protein, 7 aa, synthetic construct
KLMGQHG

SEQ ID NO: 9295 - protein, 7 aa, synthetic construct
SHPQMHG

SEQ ID NO: 9296 - protein, 7 aa, synthetic construct
LTQGLEL

SEQ ID NO: 9297 - protein, 7 aa, synthetic construct
LIENQVT

SEQ ID NO: 9298 - protein, 7 aa, synthetic construct
RAKSDYG

SEQ ID NO: 9299 - protein, 7 aa, synthetic construct
RHDQPYG

SEQ ID NO: 9300 - protein, 7 aa, synthetic construct
AGRYDGH

SEQ ID NO: 9301 - protein, 7 aa, synthetic construct
YAKSFEE

SEQ ID NO: 9302 - protein, 7 aa, synthetic construct
IGFKVND

SEQ ID NO: 9303 - protein, 7 aa, synthetic construct
YMSDGMI

SEQ ID NO: 9304 - protein, 7 aa, synthetic construct
TSDYQDI

SEQ ID NO: 9305 - protein, 7 aa, synthetic construct
THEVNPS

SEQ ID NO: 9306 - protein, 7 aa, synthetic construct
VGPHHPI

SEQ ID NO: 9307 - protein, 7 aa, synthetic construct
AQLLKVE

SEQ ID NO: 9308 - protein, 7 aa, synthetic construct
YNANHII

SEQ ID NO: 9309 - protein, 7 aa, synthetic construct
LPEWVQS

SEQ ID NO: 9310 - protein, 7 aa, synthetic construct
SKSMEME

SEQ ID NO: 9311 - protein, 7 aa, synthetic construct
EGEMQNR

SEQ ID NO: 9312 - protein, 7 aa, synthetic construct
AVPDPGL

SEQ ID NO: 9313 - protein, 7 aa, synthetic construct
WNVHDAP

SEQ ID NO: 9314 - protein, 7 aa, synthetic construct
CPTMACV

SEQ ID NO: 9315 - protein, 7 aa, synthetic construct
SVATSGD

SEQ ID NO: 9316 - protein, 7 aa, synthetic construct
GTMGKNW

SEQ ID NO: 9317 - protein, 7 aa, synthetic construct
ESASHRL

SEQ ID NO: 9318 - protein, 7 aa, synthetic construct
AKSSAQW

SEQ ID NO: 9319 - protein, 7 aa, synthetic construct
SGDFNNI

SEQ ID NO: 9320 - protein, 7 aa, synthetic construct
QKNEQWF

SEQ ID NO: 9321 - protein, 7 aa, synthetic construct
HWDKRET

SEQ ID NO: 9322 - protein, 7 aa, synthetic construct
LNKVAEL

SEQ ID NO: 9323 - protein, 7 aa, synthetic construct
QLHGQHS

SEQ ID NO: 9324 - protein, 7 aa, synthetic construct
RPMPVGM

SEQ ID NO: 9325 - protein, 7 aa, synthetic construct
HKDGQQQ

SEQ ID NO: 9326 - protein, 7 aa, synthetic construct
QADLKAF

SEQ ID NO: 9327 - protein, 7 aa, synthetic construct
TQFRPDM

SEQ ID NO: 9328 - protein, 7 aa, synthetic construct
RDMVNPH

SEQ ID NO: 9329 - protein, 7 aa, synthetic construct
VDHTIQS

SEQ ID NO: 9330 - protein, 7 aa, synthetic construct
SQQESNV

SEQ ID NO: 9331 - protein, 7 aa, synthetic construct
AINVGEL

SEQ ID NO: 9332 - protein, 7 aa, synthetic construct
EHQHEQK

SEQ ID NO: 9333 - protein, 7 aa, synthetic construct
YAIDNNR

SEQ ID NO: 9334 - protein, 7 aa, synthetic construct
AKDIMRP

SEQ ID NO: 9335 - protein, 7 aa, synthetic construct
IQEREYA

SEQ ID NO: 9336 - protein, 7 aa, synthetic construct
PNDTKDH

SEQ ID NO: 9337 - protein, 7 aa, synthetic construct
NHMPNSM

SEQ ID NO: 9338 - protein, 7 aa, synthetic construct
KNEVHKL

SEQ ID NO: 9339 - protein, 7 aa, synthetic construct
HQNAVLP

SEQ ID NO: 9340 - protein, 7 aa, synthetic construct
IYAGNDS

SEQ ID NO: 9341 - protein, 7 aa, synthetic construct
DIIKGGV

SEQ ID NO: 9342 - protein, 7 aa, synthetic construct
FDEHKKA

SEQ ID NO: 9343 - protein, 7 aa, synthetic construct
PPVPYDS

SEQ ID NO: 9344 - protein, 7 aa, synthetic construct
EKMIVAE

SEQ ID NO: 9345 - protein, 7 aa, synthetic construct
KDIHLNQ

SEQ ID NO: 9346 - protein, 7 aa, synthetic construct
DVRQGNA

SEQ ID NO: 9347 - protein, 7 aa, synthetic construct
IVIAAEP

SEQ ID NO: 9348 - protein, 7 aa, synthetic construct
MHSTKEN

SEQ ID NO: 9349 - protein, 7 aa, synthetic construct
TLTVRMN

SEQ ID NO: 9350 - protein, 7 aa, synthetic construct
VPKPQTE

SEQ ID NO: 9351 - protein, 7 aa, synthetic construct
ARVENHL

SEQ ID NO: 9352 - protein, 7 aa, synthetic construct
QHDHNDA

SEQ ID NO: 9353 - protein, 7 aa, synthetic construct
YDDHSIY

SEQ ID NO: 9354 - protein, 7 aa, synthetic construct
DHKPAEF

SEQ ID NO: 9355 - protein, 7 aa, synthetic construct
QLKEVPF

SEQ ID NO: 9356 - protein, 7 aa, synthetic construct
MMHEGNE

SEQ ID NO: 9357 - protein, 7 aa, synthetic construct
GFKTTDR

SEQ ID NO: 9358 - protein, 7 aa, synthetic construct
FHKENEN

SEQ ID NO: 9359 - protein, 7 aa, synthetic construct
HHALTDG

SEQ ID NO: 9360 - protein, 7 aa, synthetic construct
DPLKPQW

SEQ ID NO: 9361 - protein, 7 aa, synthetic construct
DTYHMQG

SEQ ID NO: 9362 - protein, 7 aa, synthetic construct
IPSDARL

SEQ ID NO: 9363 - protein, 7 aa, synthetic construct
PPIQGAD

SEQ ID NO: 9364 - protein, 7 aa, synthetic construct
SHDGGQT

SEQ ID NO: 9365 - protein, 7 aa, synthetic construct
SELGSPA

SEQ ID NO: 9366 - protein, 7 aa, synthetic construct
FKSEGHL

SEQ ID NO: 9367 - protein, 7 aa, synthetic construct
LPKYPLS

SEQ ID NO: 9368 - protein, 7 aa, synthetic construct
HEQVMSK

SEQ ID NO: 9369 - protein, 7 aa, synthetic construct
DAPSEYK

SEQ ID NO: 9370 - protein, 7 aa, synthetic construct
HNVAFQS

SEQ ID NO: 9371 - protein, 7 aa, synthetic construct
QTNSAAD

SEQ ID NO: 9372 - protein, 7 aa, synthetic construct
LSLRLSA

SEQ ID NO: 9373 - protein, 7 aa, synthetic construct
LLTTADQ

SEQ ID NO: 9374 - protein, 7 aa, synthetic construct
YNANPDS

SEQ ID NO: 9375 - protein, 7 aa, synthetic construct
FPAHEKD

SEQ ID NO: 9376 - protein, 7 aa, synthetic construct
FNFDQSG

SEQ ID NO: 9377 - protein, 7 aa, synthetic construct
TMVDHHL

SEQ ID NO: 9378 - protein, 7 aa, synthetic construct
IKGMMHA

SEQ ID NO: 9379 - protein, 7 aa, synthetic construct
NGTAEGY

SEQ ID NO: 9380 - protein, 7 aa, synthetic construct
LISGDDL

SEQ ID NO: 9381 - protein, 7 aa, synthetic construct
VGTEREV

SEQ ID NO: 9382 - protein, 7 aa, synthetic construct
HHTIATG

SEQ ID NO: 9383 - protein, 7 aa, synthetic construct
YDTGAAK

SEQ ID NO: 9384 - protein, 7 aa, synthetic construct
YMTQAHA

SEQ ID NO: 9385 - protein, 7 aa, synthetic construct
DSRDEKL

SEQ ID NO: 9386 - protein, 7 aa, synthetic construct
YEAQKYF

SEQ ID NO: 9387 - protein, 7 aa, synthetic construct
KAMDNNS

SEQ ID NO: 9388 - protein, 7 aa, synthetic construct
AEALKGN

SEQ ID NO: 9389 - protein, 7 aa, synthetic construct
MKQQHPG

SEQ ID NO: 9390 - protein, 7 aa, synthetic construct
LLHNTDI

SEQ ID NO: 9391 - protein, 7 aa, synthetic construct
AEQSKIT

SEQ ID NO: 9392 - protein, 7 aa, synthetic construct
ELARSVD

SEQ ID NO: 9393 - protein, 7 aa, synthetic construct
DQPGAYS

SEQ ID NO: 9394 - protein, 7 aa, synthetic construct
HYGDFQS

SEQ ID NO: 9395 - protein, 7 aa, synthetic construct
KPTIEAH

SEQ ID NO: 9396 - protein, 7 aa, synthetic construct
VYNVDKD

SEQ ID NO: 9397 - protein, 7 aa, synthetic construct
LDRLQLN

SEQ ID NO: 9398 - protein, 7 aa, synthetic construct
AVEGVRQ

SEQ ID NO: 9399 - protein, 7 aa, synthetic construct
GHTGPHP

SEQ ID NO: 9400 - protein, 7 aa, synthetic construct
NQRNPYE

SEQ ID NO: 9401 - protein, 7 aa, synthetic construct
SSQSAHK

SEQ ID NO: 9402 - protein, 7 aa, synthetic construct
DPDFKVS

SEQ ID NO: 9403 - protein, 7 aa, synthetic construct
QPTVDHE

SEQ ID NO: 9404 - protein, 7 aa, synthetic construct
QWEMGPV

SEQ ID NO: 9405 - protein, 7 aa, synthetic construct
TTGALAA

SEQ ID NO: 9406 - protein, 7 aa, synthetic construct
FKSVESF

SEQ ID NO: 9407 - protein, 7 aa, synthetic construct
DEFKMVI

SEQ ID NO: 9408 - protein, 7 aa, synthetic construct
VKQEHYI

SEQ ID NO: 9409 - protein, 7 aa, synthetic construct
NMAHSAH

SEQ ID NO: 9410 - protein, 7 aa, synthetic construct
TKKYIQE

SEQ ID NO: 9411 - protein, 7 aa, synthetic construct
IYASHAD

SEQ ID NO: 9412 - protein, 7 aa, synthetic construct
VNGYTLK

SEQ ID NO: 9413 - protein, 7 aa, synthetic construct
GPDFMTV

SEQ ID NO: 9414 - protein, 7 aa, synthetic construct
NGTAQKN

SEQ ID NO: 9415 - protein, 7 aa, synthetic construct
HDFNHTV

SEQ ID NO: 9416 - protein, 7 aa, synthetic construct
SGALAEQ

SEQ ID NO: 9417 - protein, 7 aa, synthetic construct
RENYNVE

SEQ ID NO: 9418 - protein, 7 aa, synthetic construct
NQSTKPW

SEQ ID NO: 9419 - protein, 7 aa, synthetic construct
HATPDAH

SEQ ID NO: 9420 - protein, 7 aa, synthetic construct
QDDKQAH

SEQ ID NO: 9421 - protein, 7 aa, synthetic construct
LTGANDK

SEQ ID NO: 9422 - protein, 7 aa, synthetic construct
IYSTNMM

SEQ ID NO: 9423 - protein, 7 aa, synthetic construct
KIVHVSD

SEQ ID NO: 9424 - protein, 7 aa, synthetic construct
PMEKHEG

SEQ ID NO: 9425 - protein, 7 aa, synthetic construct
ISNETQT

SEQ ID NO: 9426 - protein, 7 aa, synthetic construct
KNADGGP

SEQ ID NO: 9427 - protein, 7 aa, synthetic construct
DGAYSQT

SEQ ID NO: 9428 - protein, 7 aa, synthetic construct
NYTMGED

SEQ ID NO: 9429 - protein, 7 aa, synthetic construct
SEGAGIV

SEQ ID NO: 9430 - protein, 7 aa, synthetic construct
ELHNQPD

SEQ ID NO: 9431 - protein, 7 aa, synthetic construct
HPGYEVN

SEQ ID NO: 9432 - protein, 7 aa, synthetic construct
MIEQHHE

SEQ ID NO: 9433 - protein, 7 aa, synthetic construct
QVAQWQE

SEQ ID NO: 9434 - protein, 7 aa, synthetic construct
GDWMPAA

SEQ ID NO: 9435 - protein, 7 aa, synthetic construct
DKSNDAP

SEQ ID NO: 9436 - protein, 7 aa, synthetic construct
TAPGQGW

SEQ ID NO: 9437 - protein, 7 aa, synthetic construct
GNILGPD

SEQ ID NO: 9438 - protein, 7 aa, synthetic construct
EDCRPVC

SEQ ID NO: 9439 - protein, 7 aa, synthetic construct
RLVMAGS

SEQ ID NO: 9440 - protein, 7 aa, synthetic construct
IVAMQEP

SEQ ID NO: 9441 - protein, 7 aa, synthetic construct
PRGALMA

SEQ ID NO: 9442 - protein, 7 aa, synthetic construct
IQTNIRT

SEQ ID NO: 9443 - protein, 7 aa, synthetic construct
NGTFINE

SEQ ID NO: 9444 - protein, 7 aa, synthetic construct
IEEAQKV

SEQ ID NO: 9445 - protein, 7 aa, synthetic construct
NPATEPY

SEQ ID NO: 9446 - protein, 7 aa, synthetic construct
KQPAYGF

SEQ ID NO: 9447 - protein, 7 aa, synthetic construct
IKPYEHA

SEQ ID NO: 9448 - protein, 7 aa, synthetic construct
QVANEVE

SEQ ID NO: 9449 - protein, 7 aa, synthetic construct
WAQHREH

SEQ ID NO: 9450 - protein, 7 aa, synthetic construct
TVNPTSY

SEQ ID NO: 9451 - protein, 7 aa, synthetic construct
SDEAIVM

SEQ ID NO: 9452 - protein, 7 aa, synthetic construct
PIGHLKS

SEQ ID NO: 9453 - protein, 7 aa, synthetic construct
DGEAARN

SEQ ID NO: 9454 - protein, 7 aa, synthetic construct
CKELQCI

SEQ ID NO: 9455 - protein, 7 aa, synthetic construct
MTENSMA

SEQ ID NO: 9456 - protein, 7 aa, synthetic construct
TQTEMGH

SEQ ID NO: 9457 - protein, 7 aa, synthetic construct
WASGGLD

SEQ ID NO: 9458 - protein, 7 aa, synthetic construct
SFSGYTD

SEQ ID NO: 9459 - protein, 7 aa, synthetic construct
THFLGSE

SEQ ID NO: 9460 - protein, 7 aa, synthetic construct
APIAGEL

SEQ ID NO: 9461 - protein, 7 aa, synthetic construct
EAKHIIG

SEQ ID NO: 9462 - protein, 7 aa, synthetic construct
QIVNKQN

SEQ ID NO: 9463 - protein, 7 aa, synthetic construct
YAEIKMS

SEQ ID NO: 9464 - protein, 7 aa, synthetic construct
KQLENDG

SEQ ID NO: 9465 - protein, 7 aa, synthetic construct
ARDDDHS

SEQ ID NO: 9466 - protein, 7 aa, synthetic construct
SLYEQMP

SEQ ID NO: 9467 - protein, 7 aa, synthetic construct
VSPALTL

SEQ ID NO: 9468 - protein, 7 aa, synthetic construct
EQQVQFP

SEQ ID NO: 9469 - protein, 7 aa, synthetic construct
IDVHGKP

SEQ ID NO: 9470 - protein, 7 aa, synthetic construct
AASGEGE

SEQ ID NO: 9471 - protein, 7 aa, synthetic construct
HPYRIEM

SEQ ID NO: 9472 - protein, 7 aa, synthetic construct
DANHFFE

SEQ ID NO: 9473 - protein, 7 aa, synthetic construct
PSNTVTN

SEQ ID NO: 9474 - protein, 7 aa, synthetic construct
SKHLVRE

SEQ ID NO: 9475 - protein, 7 aa, synthetic construct
VNVTKVS

SEQ ID NO: 9476 - protein, 7 aa, synthetic construct
YHKEPFL

SEQ ID NO: 9477 - protein, 7 aa, synthetic construct
NHNLPKS

SEQ ID NO: 9478 - protein, 7 aa, synthetic construct
HNSMFPS

SEQ ID NO: 9479 - protein, 7 aa, synthetic construct
AKLPEEM

SEQ ID NO: 9480 - protein, 7 aa, synthetic construct
VHHSVDE

SEQ ID NO: 9481 - protein, 7 aa, synthetic construct
KQSLNLI

SEQ ID NO: 9482 - protein, 7 aa, synthetic construct
WGMSPIA

SEQ ID NO: 9483 - protein, 7 aa, synthetic construct
MSGEGVS

SEQ ID NO: 9484 - protein, 7 aa, synthetic construct
YSIAQQV

SEQ ID NO: 9485 - protein, 7 aa, synthetic construct
PSYNNLS

SEQ ID NO: 9486 - protein, 7 aa, synthetic construct
PHHAQFS

SEQ ID NO: 9487 - protein, 7 aa, synthetic construct
RRVPSQD

SEQ ID NO: 9488 - protein, 7 aa, synthetic construct
FQTQDNH

SEQ ID NO: 9489 - protein, 7 aa, synthetic construct
GLNPVNN

SEQ ID NO: 9490 - protein, 7 aa, synthetic construct
TLEIGPP

SEQ ID NO: 9491 - protein, 7 aa, synthetic construct
KLPGDYY

SEQ ID NO: 9492 - protein, 7 aa, synthetic construct
NEQGNVI

SEQ ID NO: 9493 - protein, 7 aa, synthetic construct
LGDSSLT

SEQ ID NO: 9494 - protein, 7 aa, synthetic construct
QPNMNMY

SEQ ID NO: 9495 - protein, 7 aa, synthetic construct
TDGQFGV

SEQ ID NO: 9496 - protein, 7 aa, synthetic construct
TGLPGGM

SEQ ID NO: 9497 - protein, 7 aa, synthetic construct
AVQFSHD

SEQ ID NO: 9498 - protein, 7 aa, synthetic construct
GPTHDKD

SEQ ID NO: 9499 - protein, 7 aa, synthetic construct
TEDSYRI

SEQ ID NO: 9500 - protein, 7 aa, synthetic construct
FVEKSDQ

SEQ ID NO: 9501 - protein, 7 aa, synthetic construct
LLPPTGE

SEQ ID NO: 9502 - protein, 7 aa, synthetic construct
VPTKPSY

SEQ ID NO: 9503 - protein, 7 aa, synthetic construct
AGNEQIS

SEQ ID NO: 9504 - protein, 7 aa, synthetic construct
KYSPMDE

SEQ ID NO: 9505 - protein, 7 aa, synthetic construct
HYRGVDM

SEQ ID NO: 9506 - protein, 7 aa, synthetic construct
HFEEKNI

SEQ ID NO: 9507 - protein, 7 aa, synthetic construct
SLPKVEM

SEQ ID NO: 9508 - protein, 7 aa, synthetic construct
YMKAEGI

SEQ ID NO: 9509 - protein, 7 aa, synthetic construct
SPLQHSH

SEQ ID NO: 9510 - protein, 7 aa, synthetic construct
EIHKTEV

SEQ ID NO: 9511 - protein, 7 aa, synthetic construct
DDRDGMA

SEQ ID NO: 9512 - protein, 7 aa, synthetic construct
EHMIASK

SEQ ID NO: 9513 - protein, 7 aa, synthetic construct
VTNSNIS

SEQ ID NO: 9514 - protein, 7 aa, synthetic construct
IFSHVAE

SEQ ID NO: 9515 - protein, 7 aa, synthetic construct
QTSVATF

SEQ ID NO: 9516 - protein, 7 aa, synthetic construct
EKERDII

SEQ ID NO: 9517 - protein, 7 aa, synthetic construct
GKGYPGI

SEQ ID NO: 9518 - protein, 7 aa, synthetic construct
RNTPRME

SEQ ID NO: 9519 - protein, 7 aa, synthetic construct
IGMHMDS

SEQ ID NO: 9520 - protein, 7 aa, synthetic construct
YQSEFMD

SEQ ID NO: 9521 - protein, 7 aa, synthetic construct
NTRGEAW

SEQ ID NO: 9522 - protein, 7 aa, synthetic construct
MFAPHST

SEQ ID NO: 9523 - protein, 7 aa, synthetic construct
PNMDNHR

SEQ ID NO: 9524 - protein, 7 aa, synthetic construct
NADTLRL

SEQ ID NO: 9525 - protein, 7 aa, synthetic construct
EAQSGAP

SEQ ID NO: 9526 - protein, 7 aa, synthetic construct
PANEIKA

SEQ ID NO: 9527 - protein, 7 aa, synthetic construct
LSMDPSG

SEQ ID NO: 9528 - protein, 7 aa, synthetic construct
WEARFHA

SEQ ID NO: 9529 - protein, 7 aa, synthetic construct
MWTERGA

SEQ ID NO: 9530 - protein, 7 aa, synthetic construct
QSIGFAK

SEQ ID NO: 9531 - protein, 7 aa, synthetic construct
RNQDLSP

SEQ ID NO: 9532 - protein, 7 aa, synthetic construct
AHELGVH

SEQ ID NO: 9533 - protein, 7 aa, synthetic construct
PNMQQHR

SEQ ID NO: 9534 - protein, 7 aa, synthetic construct
KDEKFQV

SEQ ID NO: 9535 - protein, 7 aa, synthetic construct
YQDHPLA

SEQ ID NO: 9536 - protein, 7 aa, synthetic construct
SDVIGPS

SEQ ID NO: 9537 - protein, 7 aa, synthetic construct
STRIIQM

SEQ ID NO: 9538 - protein, 7 aa, synthetic construct
HMRYVDP

SEQ ID NO: 9539 - protein, 7 aa, synthetic construct
QPWSAGE

SEQ ID NO: 9540 - protein, 7 aa, synthetic construct
EDIKAAS

SEQ ID NO: 9541 - protein, 7 aa, synthetic construct
MAQVNLK

SEQ ID NO: 9542 - protein, 7 aa, synthetic construct
YHDPSVR

SEQ ID NO: 9543 - protein, 7 aa, synthetic construct
GVHRPHD

SEQ ID NO: 9544 - protein, 7 aa, synthetic construct
EEHTNDR

SEQ ID NO: 9545 - protein, 7 aa, synthetic construct
EEKIMNP

SEQ ID NO: 9546 - protein, 7 aa, synthetic construct
GFFEMSE

SEQ ID NO: 9547 - protein, 7 aa, synthetic construct
VPMDSAT

SEQ ID NO: 9548 - protein, 7 aa, synthetic construct
DHAGPSF

SEQ ID NO: 9549 - protein, 7 aa, synthetic construct
RMDETQW

SEQ ID NO: 9550 - protein, 7 aa, synthetic construct
YPIQLEG

SEQ ID NO: 9551 - protein, 7 aa, synthetic construct
LDEFGRQ

SEQ ID NO: 9552 - protein, 7 aa, synthetic construct
APIISKV

SEQ ID NO: 9553 - protein, 7 aa, synthetic construct
QMHTEQS

SEQ ID NO: 9554 - protein, 7 aa, synthetic construct
AKHHVEI

SEQ ID NO: 9555 - protein, 7 aa, synthetic construct
NDMAPKV

SEQ ID NO: 9556 - protein, 7 aa, synthetic construct
ITSAIET

SEQ ID NO: 9557 - protein, 7 aa, synthetic construct
PMSGEHY

SEQ ID NO: 9558 - protein, 7 aa, synthetic construct
YVEDNPL

SEQ ID NO: 9559 - protein, 7 aa, synthetic construct
HTPHGSF

SEQ ID NO: 9560 - protein, 7 aa, synthetic construct
VATRFTA

SEQ ID NO: 9561 - protein, 7 aa, synthetic construct
AFPRSEI

SEQ ID NO: 9562 - protein, 7 aa, synthetic construct
EETKQRW

SEQ ID NO: 9563 - protein, 7 aa, synthetic construct
LDMTKSI

SEQ ID NO: 9564 - protein, 7 aa, synthetic construct
TDGSYSD

SEQ ID NO: 9565 - protein, 7 aa, synthetic construct
EYYGGRT

SEQ ID NO: 9566 - protein, 7 aa, synthetic construct
GDGHRVY

SEQ ID NO: 9567 - protein, 7 aa, synthetic construct
RREFPGT

SEQ ID NO: 9568 - protein, 7 aa, synthetic construct
DRAMMPV

SEQ ID NO: 9569 - protein, 7 aa, synthetic construct
DIQMSGE

SEQ ID NO: 9570 - protein, 7 aa, synthetic construct
SGMNNDH

SEQ ID NO: 9571 - protein, 7 aa, synthetic construct
GQNIALI

SEQ ID NO: 9572 - protein, 7 aa, synthetic construct
WSEHNNV

SEQ ID NO: 9573 - protein, 7 aa, synthetic construct
VTDVQPS

SEQ ID NO: 9574 - protein, 7 aa, synthetic construct
DGGANGY

SEQ ID NO: 9575 - protein, 7 aa, synthetic construct
GADMIQR

SEQ ID NO: 9576 - protein, 7 aa, synthetic construct
NNEVAVV

SEQ ID NO: 9577 - protein, 7 aa, synthetic construct
MGNYDDD

SEQ ID NO: 9578 - protein, 7 aa, synthetic construct
QDDIRWH

SEQ ID NO: 9579 - protein, 7 aa, synthetic construct
EAQPIHY

SEQ ID NO: 9580 - protein, 7 aa, synthetic construct
KLDPRKE

SEQ ID NO: 9581 - protein, 7 aa, synthetic construct
QENIVLT

SEQ ID NO: 9582 - protein, 7 aa, synthetic construct
AKMDNFV

SEQ ID NO: 9583 - protein, 7 aa, synthetic construct
REQKDIR

SEQ ID NO: 9584 - protein, 7 aa, synthetic construct
LQHVHAN

SEQ ID NO: 9585 - protein, 7 aa, synthetic construct
NDRVRHS

SEQ ID NO: 9586 - protein, 7 aa, synthetic construct
AIAAQLE

SEQ ID NO: 9587 - protein, 7 aa, synthetic construct
DFITPEN

SEQ ID NO: 9588 - protein, 7 aa, synthetic construct
WGRHQTV

SEQ ID NO: 9589 - protein, 7 aa, synthetic construct
NENWKST

SEQ ID NO: 9590 - protein, 7 aa, synthetic construct
ISQLTTY

SEQ ID NO: 9591 - protein, 7 aa, synthetic construct
NQHTKNF

SEQ ID NO: 9592 - protein, 7 aa, synthetic construct
IGEWTGI

SEQ ID NO: 9593 - protein, 7 aa, synthetic construct
VNDYMAT

SEQ ID NO: 9594 - protein, 7 aa, synthetic construct
IYQDAAA

SEQ ID NO: 9595 - protein, 7 aa, synthetic construct
DGNTASN

SEQ ID NO: 9596 - protein, 7 aa, synthetic construct
REVIQAD

SEQ ID NO: 9597 - protein, 7 aa, synthetic construct
VQRIASQ

SEQ ID NO: 9598 - protein, 7 aa, synthetic construct
DSTNQAV

SEQ ID NO: 9599 - protein, 7 aa, synthetic construct
AGVHQGK

SEQ ID NO: 9600 - protein, 7 aa, synthetic construct
ASNERKT

SEQ ID NO: 9601 - protein, 7 aa, synthetic construct
GGQYLPQ

SEQ ID NO: 9602 - protein, 7 aa, synthetic construct
FQAEPET

SEQ ID NO: 9603 - protein, 7 aa, synthetic construct
YYPNGDG

SEQ ID NO: 9604 - protein, 7 aa, synthetic construct
FMEHVPV

SEQ ID NO: 9605 - protein, 7 aa, synthetic construct
SKEPLAR

SEQ ID NO: 9606 - protein, 7 aa, synthetic construct
WKERNET

SEQ ID NO: 9607 - protein, 7 aa, synthetic construct
IARPEAA

SEQ ID NO: 9608 - protein, 7 aa, synthetic construct
KNHGVQL

SEQ ID NO: 9609 - protein, 7 aa, synthetic construct
HDYKWGE

SEQ ID NO: 9610 - protein, 7 aa, synthetic construct
MQALNRA

SEQ ID NO: 9611 - protein, 7 aa, synthetic construct
GPVQMDA

SEQ ID NO: 9612 - protein, 7 aa, synthetic construct
SNDQAAF

SEQ ID NO: 9613 - protein, 7 aa, synthetic construct
EITRHIE

SEQ ID NO: 9614 - protein, 7 aa, synthetic construct
SSARQLI

SEQ ID NO: 9615 - protein, 7 aa, synthetic construct
MDDGRRH

SEQ ID NO: 9616 - protein, 7 aa, synthetic construct
SIDNGQQ

SEQ ID NO: 9617 - protein, 7 aa, synthetic construct
MRPPEPA

SEQ ID NO: 9618 - protein, 7 aa, synthetic construct
SSQIHVS

SEQ ID NO: 9619 - protein, 7 aa, synthetic construct
TTKEAMV

SEQ ID NO: 9620 - protein, 7 aa, synthetic construct
MMRTGEM

SEQ ID NO: 9621 - protein, 7 aa, synthetic construct
HEKVEAE

SEQ ID NO: 9622 - protein, 7 aa, synthetic construct
RTPQAEK

SEQ ID NO: 9623 - protein, 7 aa, synthetic construct
TDIQHMK

SEQ ID NO: 9624 - protein, 7 aa, synthetic construct
WASNNMK

SEQ ID NO: 9625 - protein, 7 aa, synthetic construct
ATYPALP

SEQ ID NO: 9626 - protein, 7 aa, synthetic construct
RGQDKLF

SEQ ID NO: 9627 - protein, 7 aa, synthetic construct
YEHQGLT

SEQ ID NO: 9628 - protein, 7 aa, synthetic construct
MMTSVEH

SEQ ID NO: 9629 - protein, 7 aa, synthetic construct
EPKNNDV

SEQ ID NO: 9630 - protein, 7 aa, synthetic construct
QNQISHN

SEQ ID NO: 9631 - protein, 7 aa, synthetic construct
LQIKPQL

SEQ ID NO: 9632 - protein, 7 aa, synthetic construct
EINRYID

SEQ ID NO: 9633 - protein, 7 aa, synthetic construct
HGAELSQ

SEQ ID NO: 9634 - protein, 7 aa, synthetic construct
DDSRMGS

SEQ ID NO: 9635 - protein, 7 aa, synthetic construct
NPVHMES

SEQ ID NO: 9636 - protein, 7 aa, synthetic construct
GHPEKAR

SEQ ID NO: 9637 - protein, 7 aa, synthetic construct
VHAIDSV

SEQ ID NO: 9638 - protein, 7 aa, synthetic construct
TEIAQGG

SEQ ID NO: 9639 - protein, 7 aa, synthetic construct
HPRSMNT

SEQ ID NO: 9640 - protein, 7 aa, synthetic construct
SKDHTPW

SEQ ID NO: 9641 - protein, 7 aa, synthetic construct
QFQEDKH

SEQ ID NO: 9642 - protein, 7 aa, synthetic construct
PYQELGM

SEQ ID NO: 9643 - protein, 7 aa, synthetic construct
HESPQEN

SEQ ID NO: 9644 - protein, 7 aa, synthetic construct
QLIGGVM

SEQ ID NO: 9645 - protein, 7 aa, synthetic construct
PGIGDPP

SEQ ID NO: 9646 - protein, 7 aa, synthetic construct
RDPEATQ

SEQ ID NO: 9647 - protein, 7 aa, synthetic construct
MNSAHLE

SEQ ID NO: 9648 - protein, 7 aa, synthetic construct
TESYKNE

SEQ ID NO: 9649 - protein, 7 aa, synthetic construct
YAWKKDP

SEQ ID NO: 9650 - protein, 7 aa, synthetic construct
DAHHNED

SEQ ID NO: 9651 - protein, 7 aa, synthetic construct
FYPGQPS

SEQ ID NO: 9652 - protein, 7 aa, synthetic construct
IMPNNMG

SEQ ID NO: 9653 - protein, 7 aa, synthetic construct
PALAERN

SEQ ID NO: 9654 - protein, 7 aa, synthetic construct
VDAKQTQ

SEQ ID NO: 9655 - protein, 7 aa, synthetic construct
QMVHNKN

SEQ ID NO: 9656 - protein, 7 aa, synthetic construct
YSAVDSH

SEQ ID NO: 9657 - protein, 7 aa, synthetic construct
SGDGGTK

SEQ ID NO: 9658 - protein, 7 aa, synthetic construct
GTTFPNK

SEQ ID NO: 9659 - protein, 7 aa, synthetic construct
YPGYEQM

SEQ ID NO: 9660 - protein, 7 aa, synthetic construct
DSEGGYY

SEQ ID NO: 9661 - protein, 7 aa, synthetic construct
QTPMFPH

SEQ ID NO: 9662 - protein, 7 aa, synthetic construct
HFSSMPE

SEQ ID NO: 9663 - protein, 7 aa, synthetic construct
LETRVNK

SEQ ID NO: 9664 - protein, 7 aa, synthetic construct
PNGMKHN

SEQ ID NO: 9665 - protein, 7 aa, synthetic construct
RDIMNGL

SEQ ID NO: 9666 - protein, 7 aa, synthetic construct
TIIQMPA

SEQ ID NO: 9667 - protein, 7 aa, synthetic construct
SVPQEHQ

SEQ ID NO: 9668 - protein, 7 aa, synthetic construct
CVKECKE

SEQ ID NO: 9669 - protein, 7 aa, synthetic construct
PDHIVHG

SEQ ID NO: 9670 - protein, 7 aa, synthetic construct
KLNNGND

SEQ ID NO: 9671 - protein, 7 aa, synthetic construct
DIGGIPH

SEQ ID NO: 9672 - protein, 7 aa, synthetic construct
TANQGEG

SEQ ID NO: 9673 - protein, 7 aa, synthetic construct
NMMFQQG

SEQ ID NO: 9674 - protein, 7 aa, synthetic construct
GHTEENT

SEQ ID NO: 9675 - protein, 7 aa, synthetic construct
KGQHDHT

SEQ ID NO: 9676 - protein, 7 aa, synthetic construct
PKVISGM

SEQ ID NO: 9677 - protein, 7 aa, synthetic construct
GNEAYSL

SEQ ID NO: 9678 - protein, 7 aa, synthetic construct
SVQVHQI

SEQ ID NO: 9679 - protein, 7 aa, synthetic construct
AGDLWQG

SEQ ID NO: 9680 - protein, 7 aa, synthetic construct
FKDGHHT

SEQ ID NO: 9681 - protein, 7 aa, synthetic construct
AMNPTTI

SEQ ID NO: 9682 - protein, 7 aa, synthetic construct
MLVRADD

SEQ ID NO: 9683 - protein, 7 aa, synthetic construct
MFQGMEH

SEQ ID NO: 9684 - protein, 7 aa, synthetic construct
AGGDLAP

SEQ ID NO: 9685 - protein, 7 aa, synthetic construct
PIPNNDY

SEQ ID NO: 9686 - protein, 7 aa, synthetic construct
HLPHRAT

SEQ ID NO: 9687 - protein, 7 aa, synthetic construct
GPGLEIK

SEQ ID NO: 9688 - protein, 7 aa, synthetic construct
HSDENYT

SEQ ID NO: 9689 - protein, 7 aa, synthetic construct
DNGRYEI

SEQ ID NO: 9690 - protein, 7 aa, synthetic construct
MTQSQMH

SEQ ID NO: 9691 - protein, 7 aa, synthetic construct
QEAGGHS

SEQ ID NO: 9692 - protein, 7 aa, synthetic construct
GPGVQAY

SEQ ID NO: 9693 - protein, 7 aa, synthetic construct
RSSPTEH

SEQ ID NO: 9694 - protein, 7 aa, synthetic construct
TGENHMY

SEQ ID NO: 9695 - protein, 7 aa, synthetic construct
KKDSGLN

SEQ ID NO: 9696 - protein, 7 aa, synthetic construct
DGVVAVS

SEQ ID NO: 9697 - protein, 7 aa, synthetic construct
KHMIQAP

SEQ ID NO: 9698 - protein, 7 aa, synthetic construct
GNPDKIH

SEQ ID NO: 9699 - protein, 7 aa, synthetic construct
RDAAFDM

SEQ ID NO: 9700 - protein, 7 aa, synthetic construct
NWTDDDS

SEQ ID NO: 9701 - protein, 7 aa, synthetic construct
QGPNYKT

SEQ ID NO: 9702 - protein, 7 aa, synthetic construct
KQYEGHS

SEQ ID NO: 9703 - protein, 7 aa, synthetic construct
NSQNPPV

SEQ ID NO: 9704 - protein, 7 aa, synthetic construct
MDVKDEF

SEQ ID NO: 9705 - protein, 7 aa, synthetic construct
EGKPQLR

SEQ ID NO: 9706 - protein, 7 aa, synthetic construct
MRFDDHD

SEQ ID NO: 9707 - protein, 7 aa, synthetic construct
GSPMHEM

SEQ ID NO: 9708 - protein, 7 aa, synthetic construct
DHKFTNI

SEQ ID NO: 9709 - protein, 7 aa, synthetic construct
SHNPGNR

SEQ ID NO: 9710 - protein, 7 aa, synthetic construct
WGGEALM

SEQ ID NO: 9711 - protein, 7 aa, synthetic construct
ATGQHTW

SEQ ID NO: 9712 - protein, 7 aa, synthetic construct
PTIVGQV

SEQ ID NO: 9713 - protein, 7 aa, synthetic construct
EHRIEKL

SEQ ID NO: 9714 - protein, 7 aa, synthetic construct
NREDRFH

SEQ ID NO: 9715 - protein, 7 aa, synthetic construct
DHPHAAS

SEQ ID NO: 9716 - protein, 7 aa, synthetic construct
YHEMLHP

SEQ ID NO: 9717 - protein, 7 aa, synthetic construct
KPGYYSG

SEQ ID NO: 9718 - protein, 7 aa, synthetic construct
NAAFAVA

SEQ ID NO: 9719 - protein, 7 aa, synthetic construct
AMHPFPA

SEQ ID NO: 9720 - protein, 7 aa, synthetic construct
AQMTGII

SEQ ID NO: 9721 - protein, 7 aa, synthetic construct
WHAEVDG

SEQ ID NO: 9722 - protein, 7 aa, synthetic construct
DNKGDPG

SEQ ID NO: 9723 - protein, 7 aa, synthetic construct
MIGAVPH

SEQ ID NO: 9724 - protein, 7 aa, synthetic construct
EGNSNGY

SEQ ID NO: 9725 - protein, 7 aa, synthetic construct
DNFRVVI

SEQ ID NO: 9726 - protein, 7 aa, synthetic construct
KPETGIR

SEQ ID NO: 9727 - protein, 7 aa, synthetic construct
ETTQRVK

SEQ ID NO: 9728 - protein, 7 aa, synthetic construct
QNIGGHI

SEQ ID NO: 9729 - protein, 7 aa, synthetic construct
MHDHQFP

SEQ ID NO: 9730 - protein, 7 aa, synthetic construct
VPPFGDF

SEQ ID NO: 9731 - protein, 7 aa, synthetic construct
HSRGMVG

SEQ ID NO: 9732 - protein, 7 aa, synthetic construct
VHSAAYI

SEQ ID NO: 9733 - protein, 7 aa, synthetic construct
LKQGPAW

SEQ ID NO: 9734 - protein, 7 aa, synthetic construct
VRVNMPY

SEQ ID NO: 9735 - protein, 7 aa, synthetic construct
WTPDKTR

SEQ ID NO: 9736 - protein, 7 aa, synthetic construct
NTPRVAA

SEQ ID NO: 9737 - protein, 7 aa, synthetic construct
EQDRNRT

SEQ ID NO: 9738 - protein, 7 aa, synthetic construct
PTMPNGL

SEQ ID NO: 9739 - protein, 7 aa, synthetic construct
PSFEVRT

SEQ ID NO: 9740 - protein, 7 aa, synthetic construct
DMNRKGY

SEQ ID NO: 9741 - protein, 7 aa, synthetic construct
ITRTLGA

SEQ ID NO: 9742 - protein, 7 aa, synthetic construct
QNAQQQL

SEQ ID NO: 9743 - protein, 7 aa, synthetic construct
DESLREG

SEQ ID NO: 9744 - protein, 7 aa, synthetic construct
LHAPDTN

SEQ ID NO: 9745 - protein, 7 aa, synthetic construct
EGYRSPI

SEQ ID NO: 9746 - protein, 7 aa, synthetic construct
VERHQLE

SEQ ID NO: 9747 - protein, 7 aa, synthetic construct
PPMNLNT

SEQ ID NO: 9748 - protein, 7 aa, synthetic construct
QEKKKEW

SEQ ID NO: 9749 - protein, 7 aa, synthetic construct
FGAIPTM

SEQ ID NO: 9750 - protein, 7 aa, synthetic construct
AIESVKA

SEQ ID NO: 9751 - protein, 7 aa, synthetic construct
HAKNQYT

SEQ ID NO: 9752 - protein, 7 aa, synthetic construct
THENYTF

SEQ ID NO: 9753 - protein, 7 aa, synthetic construct
KMSQEEG

SEQ ID NO: 9754 - protein, 7 aa, synthetic construct
EYVRAGV

SEQ ID NO: 9755 - protein, 7 aa, synthetic construct
PATTTNA

SEQ ID NO: 9756 - protein, 7 aa, synthetic construct
SQESITK

SEQ ID NO: 9757 - protein, 7 aa, synthetic construct
HLKGGYP

SEQ ID NO: 9758 - protein, 7 aa, synthetic construct
YEAVHTL

SEQ ID NO: 9759 - protein, 7 aa, synthetic construct
PLRQNYT

SEQ ID NO: 9760 - protein, 7 aa, synthetic construct
KHVEYLP

SEQ ID NO: 9761 - protein, 7 aa, synthetic construct
IPNNTKW

SEQ ID NO: 9762 - protein, 7 aa, synthetic construct
QLSINRI

SEQ ID NO: 9763 - protein, 7 aa, synthetic construct
QDQVHGK

SEQ ID NO: 9764 - protein, 7 aa, synthetic construct
PKTVPYV

SEQ ID NO: 9765 - protein, 7 aa, synthetic construct
QTGHETY

SEQ ID NO: 9766 - protein, 7 aa, synthetic construct
DQDFRDP

SEQ ID NO: 9767 - protein, 7 aa, synthetic construct
AKDVPVV

SEQ ID NO: 9768 - protein, 7 aa, synthetic construct
RELMGEK

SEQ ID NO: 9769 - protein, 7 aa, synthetic construct
WDERENA

SEQ ID NO: 9770 - protein, 7 aa, synthetic construct
MPHQSYA

SEQ ID NO: 9771 - protein, 7 aa, synthetic construct
LVHDEHE

SEQ ID NO: 9772 - protein, 7 aa, synthetic construct
EQKEIAR

SEQ ID NO: 9773 - protein, 7 aa, synthetic construct
HEHASPD

SEQ ID NO: 9774 - protein, 7 aa, synthetic construct
SNINGHN

SEQ ID NO: 9775 - protein, 7 aa, synthetic construct
LEMAGAS

SEQ ID NO: 9776 - protein, 7 aa, synthetic construct
DSEAHRR

SEQ ID NO: 9777 - protein, 7 aa, synthetic construct
GERYKEQ

SEQ ID NO: 9778 - protein, 7 aa, synthetic construct
EGLASTK

SEQ ID NO: 9779 - protein, 7 aa, synthetic construct
IDAQLNY

SEQ ID NO: 9780 - protein, 7 aa, synthetic construct
EDPQKGP

SEQ ID NO: 9781 - protein, 7 aa, synthetic construct
DEQQAFA

SEQ ID NO: 9782 - protein, 7 aa, synthetic construct
EMRGPGI

SEQ ID NO: 9783 - protein, 7 aa, synthetic construct
PDSFRDH

SEQ ID NO: 9784 - protein, 7 aa, synthetic construct
DIDSMQS

SEQ ID NO: 9785 - protein, 7 aa, synthetic construct
KENDQQF

SEQ ID NO: 9786 - protein, 7 aa, synthetic construct
MASHVDL

SEQ ID NO: 9787 - protein, 7 aa, synthetic construct
HSIVEGP

SEQ ID NO: 9788 - protein, 7 aa, synthetic construct
ALNFTVG

SEQ ID NO: 9789 - protein, 7 aa, synthetic construct
WMQGADD

SEQ ID NO: 9790 - protein, 7 aa, synthetic construct
ARESSNM

SEQ ID NO: 9791 - protein, 7 aa, synthetic construct
DEAKLMV

SEQ ID NO: 9792 - protein, 7 aa, synthetic construct
NASFTQV

SEQ ID NO: 9793 - protein, 7 aa, synthetic construct
MHEWETP

SEQ ID NO: 9794 - protein, 7 aa, synthetic construct
HMLNGTP

SEQ ID NO: 9795 - protein, 7 aa, synthetic construct
DTEFRQD

SEQ ID NO: 9796 - protein, 7 aa, synthetic construct
GNNWIEP

SEQ ID NO: 9797 - protein, 7 aa, synthetic construct
FDTHPGI

SEQ ID NO: 9798 - protein, 7 aa, synthetic construct
PPFTDVS

SEQ ID NO: 9799 - protein, 7 aa, synthetic construct
HNESHVR

SEQ ID NO: 9800 - protein, 7 aa, synthetic construct
YAGAEPF

SEQ ID NO: 9801 - protein, 7 aa, synthetic construct
GMKPMEL

SEQ ID NO: 9802 - protein, 7 aa, synthetic construct
VMQPMKA

SEQ ID NO: 9803 - protein, 7 aa, synthetic construct
PNFEKDT

SEQ ID NO: 9804 - protein, 7 aa, synthetic construct
YGPAEQG

SEQ ID NO: 9805 - protein, 7 aa, synthetic construct
AQYRHEF

SEQ ID NO: 9806 - protein, 7 aa, synthetic construct
QREEQLH

SEQ ID NO: 9807 - protein, 7 aa, synthetic construct
AFERLGE

SEQ ID NO: 9808 - protein, 7 aa, synthetic construct
GGMEEGS

SEQ ID NO: 9809 - protein, 7 aa, synthetic construct
HEMAIVD

SEQ ID NO: 9810 - protein, 7 aa, synthetic construct
DPMKLPP

SEQ ID NO: 9811 - protein, 7 aa, synthetic construct
HYEPADK

SEQ ID NO: 9812 - protein, 7 aa, synthetic construct
RFSGVLD

SEQ ID NO: 9813 - protein, 7 aa, synthetic construct
QSKFVDL

SEQ ID NO: 9814 - protein, 7 aa, synthetic construct
YMHKWEA

SEQ ID NO: 9815 - protein, 7 aa, synthetic construct
MNNTIDN

SEQ ID NO: 9816 - protein, 7 aa, synthetic construct
NIYEMSE

SEQ ID NO: 9817 - protein, 7 aa, synthetic construct
RWSQDDY

SEQ ID NO: 9818 - protein, 7 aa, synthetic construct
MNDPTHI

SEQ ID NO: 9819 - protein, 7 aa, synthetic construct
AVDKAQW

SEQ ID NO: 9820 - protein, 7 aa, synthetic construct
GDNPHDY

SEQ ID NO: 9821 - protein, 7 aa, synthetic construct
RGEMQYI

SEQ ID NO: 9822 - protein, 7 aa, synthetic construct
WMKTVST

SEQ ID NO: 9823 - protein, 7 aa, synthetic construct
MRGAHYE

SEQ ID NO: 9824 - protein, 7 aa, synthetic construct
TQHGVER

SEQ ID NO: 9825 - protein, 7 aa, synthetic construct
FKMKSYD

SEQ ID NO: 9826 - protein, 7 aa, synthetic construct
DVKQPKT

SEQ ID NO: 9827 - protein, 7 aa, synthetic construct
QGFGSYE

SEQ ID NO: 9828 - protein, 7 aa, synthetic construct
KVEPGVP

SEQ ID NO: 9829 - protein, 7 aa, synthetic construct
ISPTVAW

SEQ ID NO: 9830 - protein, 7 aa, synthetic construct
VAQDQLH

SEQ ID NO: 9831 - protein, 7 aa, synthetic construct
QYRTPVA

SEQ ID NO: 9832 - protein, 7 aa, synthetic construct
FGSIIAH

SEQ ID NO: 9833 - protein, 7 aa, synthetic construct
YHKVEHS

SEQ ID NO: 9834 - protein, 7 aa, synthetic construct
SDVKRAF

SEQ ID NO: 9835 - protein, 7 aa, synthetic construct
HNSEQDL

SEQ ID NO: 9836 - protein, 7 aa, synthetic construct
RREQVEM

SEQ ID NO: 9837 - protein, 7 aa, synthetic construct
RQYDLKD

SEQ ID NO: 9838 - protein, 7 aa, synthetic construct
TFIHGDK

SEQ ID NO: 9839 - protein, 7 aa, synthetic construct
LDLRANV

SEQ ID NO: 9840 - protein, 7 aa, synthetic construct
HEMSAIR

SEQ ID NO: 9841 - protein, 7 aa, synthetic construct
YAKQPGT

SEQ ID NO: 9842 - protein, 7 aa, synthetic construct
GNKDMVA

SEQ ID NO: 9843 - protein, 7 aa, synthetic construct
GFHLVTE

SEQ ID NO: 9844 - protein, 7 aa, synthetic construct
GMNEHKV

SEQ ID NO: 9845 - protein, 7 aa, synthetic construct
GNENIAP

SEQ ID NO: 9846 - protein, 7 aa, synthetic construct
NAPDITY

SEQ ID NO: 9847 - protein, 7 aa, synthetic construct
WANAHEK

SEQ ID NO: 9848 - protein, 7 aa, synthetic construct
VNAAQQP

SEQ ID NO: 9849 - protein, 7 aa, synthetic construct
PIGAKQE

SEQ ID NO: 9850 - protein, 7 aa, synthetic construct
CAPNVSC

SEQ ID NO: 9851 - protein, 7 aa, synthetic construct
DIREEAH

SEQ ID NO: 9852 - protein, 7 aa, synthetic construct
QTDWDNE

SEQ ID NO: 9853 - protein, 7 aa, synthetic construct
YPADAHR

SEQ ID NO: 9854 - protein, 7 aa, synthetic construct
VWTKDPG

SEQ ID NO: 9855 - protein, 7 aa, synthetic construct
VMHVDNY

SEQ ID NO: 9856 - protein, 7 aa, synthetic construct
WVEMNQG

SEQ ID NO: 9857 - protein, 7 aa, synthetic construct
KLHITNV

SEQ ID NO: 9858 - protein, 7 aa, synthetic construct
NYKTLMD

SEQ ID NO: 9859 - protein, 7 aa, synthetic construct
ITGPDVI

SEQ ID NO: 9860 - protein, 7 aa, synthetic construct
IKPMPQY

SEQ ID NO: 9861 - protein, 7 aa, synthetic construct
DLFASKN

SEQ ID NO: 9862 - protein, 7 aa, synthetic construct
ISMGSEG

SEQ ID NO: 9863 - protein, 7 aa, synthetic construct
ETTAHMK

SEQ ID NO: 9864 - protein, 7 aa, synthetic construct
NHGHYAD

SEQ ID NO: 9865 - protein, 7 aa, synthetic construct
GNSQIFK

SEQ ID NO: 9866 - protein, 7 aa, synthetic construct
SPQNNHD

SEQ ID NO: 9867 - protein, 7 aa, synthetic construct
LRMQRDS

SEQ ID NO: 9868 - protein, 7 aa, synthetic construct
HQAPMMQ

SEQ ID NO: 9869 - protein, 7 aa, synthetic construct
HLAMQEF

SEQ ID NO: 9870 - protein, 7 aa, synthetic construct
VANMIDP

SEQ ID NO: 9871 - protein, 7 aa, synthetic construct
ERHQLKI

SEQ ID NO: 9872 - protein, 7 aa, synthetic construct
SNETAKY

SEQ ID NO: 9873 - protein, 7 aa, synthetic construct
TTSVLIS

SEQ ID NO: 9874 - protein, 7 aa, synthetic construct
HAEMIPG

SEQ ID NO: 9875 - protein, 7 aa, synthetic construct
LDNTGNT

SEQ ID NO: 9876 - protein, 7 aa, synthetic construct
IEHPGEL

SEQ ID NO: 9877 - protein, 7 aa, synthetic construct
NQIMRIA

SEQ ID NO: 9878 - protein, 7 aa, synthetic construct
CTDGPCE

SEQ ID NO: 9879 - protein, 7 aa, synthetic construct
VHGFEEV

SEQ ID NO: 9880 - protein, 7 aa, synthetic construct
QKDMMLS

SEQ ID NO: 9881 - protein, 7 aa, synthetic construct
STKEDQT

SEQ ID NO: 9882 - protein, 7 aa, synthetic construct
HLQPEVD

SEQ ID NO: 9883 - protein, 7 aa, synthetic construct
TLPPTEK

SEQ ID NO: 9884 - protein, 7 aa, synthetic construct
ESKLMQK

SEQ ID NO: 9885 - protein, 7 aa, synthetic construct
GAPFGPP

SEQ ID NO: 9886 - protein, 7 aa, synthetic construct
PEISIMS

SEQ ID NO: 9887 - protein, 7 aa, synthetic construct
KMDDYKP

SEQ ID NO: 9888 - protein, 7 aa, synthetic construct
GLERDSA

SEQ ID NO: 9889 - protein, 7 aa, synthetic construct
KTSPIGH

SEQ ID NO: 9890 - protein, 7 aa, synthetic construct
QDGGGKN

SEQ ID NO: 9891 - protein, 7 aa, synthetic construct
SRFGDHM

SEQ ID NO: 9892 - protein, 7 aa, synthetic construct
YAKEGPA

SEQ ID NO: 9893 - protein, 7 aa, synthetic construct
EELRYKI

SEQ ID NO: 9894 - protein, 7 aa, synthetic construct
GHKHSSE

SEQ ID NO: 9895 - protein, 7 aa, synthetic construct
RGEMNED

SEQ ID NO: 9896 - protein, 7 aa, synthetic construct
AYESATH

SEQ ID NO: 9897 - protein, 7 aa, synthetic construct
WHMRSGE

SEQ ID NO: 9898 - protein, 7 aa, synthetic construct
WRDETSF

SEQ ID NO: 9899 - protein, 7 aa, synthetic construct
WSHATIN

SEQ ID NO: 9900 - protein, 7 aa, synthetic construct
EVTFING

SEQ ID NO: 9901 - protein, 7 aa, synthetic construct
NMVHEDY

SEQ ID NO: 9902 - protein, 7 aa, synthetic construct
SVDKFSM

SEQ ID NO: 9903 - protein, 7 aa, synthetic construct
GTISMPS

SEQ ID NO: 9904 - protein, 7 aa, synthetic construct
NEFNVKK

SEQ ID NO: 9905 - protein, 7 aa, synthetic construct
TANESLR

SEQ ID NO: 9906 - protein, 7 aa, synthetic construct
NWGEGAD

SEQ ID NO: 9907 - protein, 7 aa, synthetic construct
AIGTPNR

SEQ ID NO: 9908 - protein, 7 aa, synthetic construct
GSTYDSE

SEQ ID NO: 9909 - protein, 7 aa, synthetic construct
EHVDIAG

SEQ ID NO: 9910 - protein, 7 aa, synthetic construct
KNRDCCE

SEQ ID NO: 9911 - protein, 7 aa, synthetic construct
QAQIQGI

SEQ ID NO: 9912 - protein, 7 aa, synthetic construct
KENQYLD

SEQ ID NO: 9913 - protein, 7 aa, synthetic construct
HGDSGDQ

SEQ ID NO: 9914 - protein, 7 aa, synthetic construct
VEDSMRS

SEQ ID NO: 9915 - protein, 7 aa, synthetic construct
KQIEDSK

SEQ ID NO: 9916 - protein, 7 aa, synthetic construct
QSADYVK

SEQ ID NO: 9917 - protein, 7 aa, synthetic construct
GAGEKSR

SEQ ID NO: 9918 - protein, 7 aa, synthetic construct
WNKADNK

SEQ ID NO: 9919 - protein, 7 aa, synthetic construct
HAAGEDA

SEQ ID NO: 9920 - protein, 7 aa, synthetic construct
DLHNDRW

SEQ ID NO: 9921 - protein, 7 aa, synthetic construct
YHVDQPM

SEQ ID NO: 9922 - protein, 7 aa, synthetic construct
AAMDGTP

SEQ ID NO: 9923 - protein, 7 aa, synthetic construct
AWQDKTM

SEQ ID NO: 9924 - protein, 7 aa, synthetic construct
VWEQTQS

SEQ ID NO: 9925 - protein, 7 aa, synthetic construct
ALTHESI

SEQ ID NO: 9926 - protein, 7 aa, synthetic construct
TEKAVLV

SEQ ID NO: 9927 - protein, 7 aa, synthetic construct
TFPGSQE

SEQ ID NO: 9928 - protein, 7 aa, synthetic construct
KAEGMNL

SEQ ID NO: 9929 - protein, 7 aa, synthetic construct
DSPTGSL

SEQ ID NO: 9930 - protein, 7 aa, synthetic construct
GMSENST

SEQ ID NO: 9931 - protein, 7 aa, synthetic construct
SASISHK

SEQ ID NO: 9932 - protein, 7 aa, synthetic construct
RSHLHFE

SEQ ID NO: 9933 - protein, 7 aa, synthetic construct
SNLTIVP

SEQ ID NO: 9934 - protein, 7 aa, synthetic construct
VHSEISP

SEQ ID NO: 9935 - protein, 7 aa, synthetic construct
QHIMKDG

SEQ ID NO: 9936 - protein, 7 aa, synthetic construct
QNQNYLM

SEQ ID NO: 9937 - protein, 7 aa, synthetic construct
MTPSTEY

SEQ ID NO: 9938 - protein, 7 aa, synthetic construct
PVTAYGV

SEQ ID NO: 9939 - protein, 7 aa, synthetic construct
FTGKEES

SEQ ID NO: 9940 - protein, 7 aa, synthetic construct
EYDKKEI

SEQ ID NO: 9941 - protein, 7 aa, synthetic construct
LSMADVP

SEQ ID NO: 9942 - protein, 7 aa, synthetic construct
FNSTVTE

SEQ ID NO: 9943 - protein, 7 aa, synthetic construct
NEHAIYD

SEQ ID NO: 9944 - protein, 7 aa, synthetic construct
MFVEGAE

SEQ ID NO: 9945 - protein, 7 aa, synthetic construct
LQSISSG

SEQ ID NO: 9946 - protein, 7 aa, synthetic construct
GMNPPED

SEQ ID NO: 9947 - protein, 7 aa, synthetic construct
DDELRKT

SEQ ID NO: 9948 - protein, 7 aa, synthetic construct
PGVQNPE

SEQ ID NO: 9949 - protein, 7 aa, synthetic construct
QSGHEII

SEQ ID NO: 9950 - protein, 7 aa, synthetic construct
QPAMTPQ

SEQ ID NO: 9951 - protein, 7 aa, synthetic construct
YSMGGAM

SEQ ID NO: 9952 - protein, 7 aa, synthetic construct
SQKANHA

SEQ ID NO: 9953 - protein, 7 aa, synthetic construct
VHRTTQM

SEQ ID NO: 9954 - protein, 7 aa, synthetic construct
ATMADDR

SEQ ID NO: 9955 - protein, 7 aa, synthetic construct
RKQWEET

SEQ ID NO: 9956 - protein, 7 aa, synthetic construct
SPRDIHW

SEQ ID NO: 9957 - protein, 7 aa, synthetic construct
GDGFQVQ

SEQ ID NO: 9958 - protein, 7 aa, synthetic construct
MRENDEA

SEQ ID NO: 9959 - protein, 7 aa, synthetic construct
PHDAKLP

SEQ ID NO: 9960 - protein, 7 aa, synthetic construct
AMSGDPD

SEQ ID NO: 9961 - protein, 7 aa, synthetic construct
DHDKQIG

SEQ ID NO: 9962 - protein, 7 aa, synthetic construct
VSQHGQE

SEQ ID NO: 9963 - protein, 7 aa, synthetic construct
MHHIQFE

SEQ ID NO: 9964 - protein, 7 aa, synthetic construct
GRTTPQQ

SEQ ID NO: 9965 - protein, 7 aa, synthetic construct
SYAALQP

SEQ ID NO: 9966 - protein, 7 aa, synthetic construct
PTFAAAA

SEQ ID NO: 9967 - protein, 7 aa, synthetic construct
HEKFEPL

SEQ ID NO: 9968 - protein, 7 aa, synthetic construct
GQHLQMS

SEQ ID NO: 9969 - protein, 7 aa, synthetic construct
FDDLALS

SEQ ID NO: 9970 - protein, 7 aa, synthetic construct
DIEGSQS

SEQ ID NO: 9971 - protein, 7 aa, synthetic construct
MGPITHQ

SEQ ID NO: 9972 - protein, 7 aa, synthetic construct
MPNDHFG

SEQ ID NO: 9973 - protein, 7 aa, synthetic construct
SAWTRQE

SEQ ID NO: 9974 - protein, 7 aa, synthetic construct
RMGVLTH

SEQ ID NO: 9975 - protein, 7 aa, synthetic construct
HGQDTLK

SEQ ID NO: 9976 - protein, 7 aa, synthetic construct
GNLEENW

SEQ ID NO: 9977 - protein, 7 aa, synthetic construct
QFDWDIP

SEQ ID NO: 9978 - protein, 7 aa, synthetic construct
QNRVPLP

SEQ ID NO: 9979 - protein, 7 aa, synthetic construct
KTETTHN

SEQ ID NO: 9980 - protein, 7 aa, synthetic construct
IGSFHMA

SEQ ID NO: 9981 - protein, 7 aa, synthetic construct
QIREFGR

SEQ ID NO: 9982 - protein, 7 aa, synthetic construct
PGTSIGS

SEQ ID NO: 9983 - protein, 7 aa, synthetic construct
ATGNWED

SEQ ID NO: 9984 - protein, 7 aa, synthetic construct
GPDYAKM

SEQ ID NO: 9985 - protein, 7 aa, synthetic construct
DVQKEHK

SEQ ID NO: 9986 - protein, 7 aa, synthetic construct
EPQTGWR

SEQ ID NO: 9987 - protein, 7 aa, synthetic construct
QGRAFPM

SEQ ID NO: 9988 - protein, 7 aa, synthetic construct
NQGEYMS

SEQ ID NO: 9989 - protein, 7 aa, synthetic construct
YAHKYQS

SEQ ID NO: 9990 - protein, 7 aa, synthetic construct
SSVMIVP

SEQ ID NO: 9991 - protein, 7 aa, synthetic construct
IELNDRK

SEQ ID NO: 9992 - protein, 7 aa, synthetic construct
PPPQLKT

SEQ ID NO: 9993 - protein, 7 aa, synthetic construct
LTGRETE

SEQ ID NO: 9994 - protein, 7 aa, synthetic construct
ANDAQKN

SEQ ID NO: 9995 - protein, 7 aa, synthetic construct
LDRHGKH

SEQ ID NO: 9996 - protein, 7 aa, synthetic construct
VVEHRME

SEQ ID NO: 9997 - protein, 7 aa, synthetic construct
WGHSDLE

SEQ ID NO: 9998 - protein, 7 aa, synthetic construct
YPAVQSI

SEQ ID NO: 9999 - protein, 7 aa, synthetic construct
QVGDGPA

SEQ ID NO: 10000 - protein, 7 aa, synthetic construct
QMKLEIA

SEQ ID NO: 10001 - protein, 7 aa, synthetic construct
YFNTIPS

SEQ ID NO: 10002 - protein, 7 aa, synthetic construct
NPAHMPQ

SEQ ID NO: 10003 - protein, 7 aa, synthetic construct
ANEPGNF

SEQ ID NO: 10004 - protein, 7 aa, synthetic construct
SRDIYGS

SEQ ID NO: 10005 - protein, 7 aa, synthetic construct
AITHIQT

SEQ ID NO: 10006 - protein, 7 aa, synthetic construct
DFSHHSS

SEQ ID NO: 10007 - protein, 7 aa, synthetic construct
PHLTTHE

SEQ ID NO: 10008 - protein, 7 aa, synthetic construct
HGGSEQV

SEQ ID NO: 10009 - protein, 7 aa, synthetic construct
RMELFPS

SEQ ID NO: 10010 - protein, 7 aa, synthetic construct
WINGVVA

SEQ ID NO: 10011 - protein, 7 aa, synthetic construct
TGIREHE

SEQ ID NO: 10012 - protein, 7 aa, synthetic construct
VSPPDIM

SEQ ID NO: 10013 - protein, 7 aa, synthetic construct
GGNTIES

SEQ ID NO: 10014 - protein, 7 aa, synthetic construct
WQSEDRT

SEQ ID NO: 10015 - protein, 7 aa, synthetic construct
FVEDNRM

SEQ ID NO: 10016 - protein, 7 aa, synthetic construct
PHGASHG

SEQ ID NO: 10017 - protein, 7 aa, synthetic construct
EPDRHML

SEQ ID NO: 10018 - protein, 7 aa, synthetic construct
MPGTTIH

SEQ ID NO: 10019 - protein, 7 aa, synthetic construct
GLNHNKH

SEQ ID NO: 10020 - protein, 7 aa, synthetic construct
SPLRGEQ

SEQ ID NO: 10021 - protein, 7 aa, synthetic construct
HIAMMNA

SEQ ID NO: 10022 - protein, 7 aa, synthetic construct
AVRQVAM

SEQ ID NO: 10023 - protein, 7 aa, synthetic construct
HPMNDDK

SEQ ID NO: 10024 - protein, 7 aa, synthetic construct
KAAPIMP

SEQ ID NO: 10025 - protein, 7 aa, synthetic construct
NTGHIDD

SEQ ID NO: 10026 - protein, 7 aa, synthetic construct
APYGDLD

SEQ ID NO: 10027 - protein, 7 aa, synthetic construct
PTNDALY

SEQ ID NO: 10028 - protein, 7 aa, synthetic construct
WDGNDMR

SEQ ID NO: 10029 - protein, 7 aa, synthetic construct
LHMTAPD

SEQ ID NO: 10030 - protein, 7 aa, synthetic construct
MRTVDNP

SEQ ID NO: 10031 - protein, 7 aa, synthetic construct
ELEKTVV

SEQ ID NO: 10032 - protein, 7 aa, synthetic construct
VVAMIGN

SEQ ID NO: 10033 - protein, 7 aa, synthetic construct
GDNAITM

SEQ ID NO: 10034 - protein, 7 aa, synthetic construct
FNRYSVQ

SEQ ID NO: 10035 - protein, 7 aa, synthetic construct
PPMQIPH

SEQ ID NO: 10036 - protein, 7 aa, synthetic construct
LREFKSP

SEQ ID NO: 10037 - protein, 7 aa, synthetic construct
YPDNSNP

SEQ ID NO: 10038 - protein, 7 aa, synthetic construct
FYQEKEA

SEQ ID NO: 10039 - protein, 7 aa, synthetic construct
NLGEQQG

SEQ ID NO: 10040 - protein, 7 aa, synthetic construct
DPHDLQI

SEQ ID NO: 10041 - protein, 7 aa, synthetic construct
TMESPKP

SEQ ID NO: 10042 - protein, 7 aa, synthetic construct
IIRTPDV

SEQ ID NO: 10043 - protein, 7 aa, synthetic construct
WNSEGNL

SEQ ID NO: 10044 - protein, 7 aa, synthetic construct
YANPQTM

SEQ ID NO: 10045 - protein, 7 aa, synthetic construct
SYVNAGK

SEQ ID NO: 10046 - protein, 7 aa, synthetic construct
ARFQGEF

SEQ ID NO: 10047 - protein, 7 aa, synthetic construct
YPGNDLS

SEQ ID NO: 10048 - protein, 7 aa, synthetic construct
FANGYDD

SEQ ID NO: 10049 - protein, 7 aa, synthetic construct
IEKAVGY

SEQ ID NO: 10050 - protein, 7 aa, synthetic construct
AGFSNEK

SEQ ID NO: 10051 - protein, 7 aa, synthetic construct
RKVENYS

SEQ ID NO: 10052 - protein, 7 aa, synthetic construct
GMSIEPP

SEQ ID NO: 10053 - protein, 7 aa, synthetic construct
GLSASTM

SEQ ID NO: 10054 - protein, 7 aa, synthetic construct
IDKQDSY

SEQ ID NO: 10055 - protein, 7 aa, synthetic construct
FKDFPHI

SEQ ID NO: 10056 - protein, 7 aa, synthetic construct
TQTPQYT

SEQ ID NO: 10057 - protein, 7 aa, synthetic construct
NYEQGFG

SEQ ID NO: 10058 - protein, 7 aa, synthetic construct
RPGYHLE

SEQ ID NO: 10059 - protein, 7 aa, synthetic construct
MQMRTQH

SEQ ID NO: 10060 - protein, 7 aa, synthetic construct
FTVEYDE

SEQ ID NO: 10061 - protein, 7 aa, synthetic construct
NIPFVQD

SEQ ID NO: 10062 - protein, 7 aa, synthetic construct
SQDVKGQ

SEQ ID NO: 10063 - protein, 7 aa, synthetic construct
DQIQMQA

SEQ ID NO: 10064 - protein, 7 aa, synthetic construct
QIKFDVQ

SEQ ID NO: 10065 - protein, 7 aa, synthetic construct
PNCKMGI

SEQ ID NO: 10066 - protein, 7 aa, synthetic construct
HEHYTQS

SEQ ID NO: 10067 - protein, 7 aa, synthetic construct
FMGAVES

SEQ ID NO: 10068 - protein, 7 aa, synthetic construct
SSNSEAY

SEQ ID NO: 10069 - protein, 7 aa, synthetic construct
QQYPALN

SEQ ID NO: 10070 - protein, 7 aa, synthetic construct
RSKDADQ

SEQ ID NO: 10071 - protein, 7 aa, synthetic construct
DPIKSSR

SEQ ID NO: 10072 - protein, 7 aa, synthetic construct
PKSIEIT

SEQ ID NO: 10073 - protein, 7 aa, synthetic construct
HMTPAQF

SEQ ID NO: 10074 - protein, 7 aa, synthetic construct
QAMTHKG

SEQ ID NO: 10075 - protein, 7 aa, synthetic construct
SMIIKEM

SEQ ID NO: 10076 - protein, 7 aa, synthetic construct
EIAHGPA

SEQ ID NO: 10077 - protein, 7 aa, synthetic construct
FNHRTPT

SEQ ID NO: 10078 - protein, 7 aa, synthetic construct
TKEITYI

SEQ ID NO: 10079 - protein, 7 aa, synthetic construct
EWLSDEG

SEQ ID NO: 10080 - protein, 7 aa, synthetic construct
DPKDVVQ

SEQ ID NO: 10081 - protein, 7 aa, synthetic construct
NQSTVES

SEQ ID NO: 10082 - protein, 7 aa, synthetic construct
THDKFIN

SEQ ID NO: 10083 - protein, 7 aa, synthetic construct
QENTTVM

SEQ ID NO: 10084 - protein, 7 aa, synthetic construct
VIGSTLV

SEQ ID NO: 10085 - protein, 7 aa, synthetic construct
TPDMSHQ

SEQ ID NO: 10086 - protein, 7 aa, synthetic construct
WGDQFVR

SEQ ID NO: 10087 - protein, 7 aa, synthetic construct
QTRIADF

SEQ ID NO: 10088 - protein, 7 aa, synthetic construct
HDSQDAI

SEQ ID NO: 10089 - protein, 7 aa, synthetic construct
IITDANL

SEQ ID NO: 10090 - protein, 7 aa, synthetic construct
IYNMREP

SEQ ID NO: 10091 - protein, 7 aa, synthetic construct
EVGPKGI

SEQ ID NO: 10092 - protein, 7 aa, synthetic construct
PRPDALN

SEQ ID NO: 10093 - protein, 7 aa, synthetic construct
ATKFQLG

SEQ ID NO: 10094 - protein, 7 aa, synthetic construct
NPHSSNL

SEQ ID NO: 10095 - protein, 7 aa, synthetic construct
QKDHPHP

SEQ ID NO: 10096 - protein, 7 aa, synthetic construct
NRDDFVI

SEQ ID NO: 10097 - protein, 7 aa, synthetic construct
GSQNFTE

SEQ ID NO: 10098 - protein, 7 aa, synthetic construct
HFGDHGP

SEQ ID NO: 10099 - protein, 7 aa, synthetic construct
ATTKAED

SEQ ID NO: 10100 - protein, 7 aa, synthetic construct
RNIEMPG

SEQ ID NO: 10101 - protein, 7 aa, synthetic construct
AYAGKSW

SEQ ID NO: 10102 - protein, 7 aa, synthetic construct
CEGTQCN

SEQ ID NO: 10103 - protein, 7 aa, synthetic construct
NREDSKE

SEQ ID NO: 10104 - protein, 7 aa, synthetic construct
DSAGIYP

SEQ ID NO: 10105 - protein, 7 aa, synthetic construct
GKQASDE

SEQ ID NO: 10106 - protein, 7 aa, synthetic construct
TVVMEED

SEQ ID NO: 10107 - protein, 7 aa, synthetic construct
EQNFTVK

SEQ ID NO: 10108 - protein, 7 aa, synthetic construct
SYSNIGG

SEQ ID NO: 10109 - protein, 7 aa, synthetic construct
INTRFHE

SEQ ID NO: 10110 - protein, 7 aa, synthetic construct
FDRLSIK

SEQ ID NO: 10111 - protein, 7 aa, synthetic construct
QNVPAEH

SEQ ID NO: 10112 - protein, 7 aa, synthetic construct
EPKQDKH

SEQ ID NO: 10113 - protein, 7 aa, synthetic construct
VSQLTKY

SEQ ID NO: 10114 - protein, 7 aa, synthetic construct
DLPYIRT

SEQ ID NO: 10115 - protein, 7 aa, synthetic construct
KVGEAHM

SEQ ID NO: 10116 - protein, 7 aa, synthetic construct
YFQTQPD

SEQ ID NO: 10117 - protein, 7 aa, synthetic construct
FEKSGYQ

SEQ ID NO: 10118 - protein, 7 aa, synthetic construct
IRINEEH

SEQ ID NO: 10119 - protein, 7 aa, synthetic construct
ITIDKLN

SEQ ID NO: 10120 - protein, 7 aa, synthetic construct
DESVQNH

SEQ ID NO: 10121 - protein, 7 aa, synthetic construct
GTSGDAA

SEQ ID NO: 10122 - protein, 7 aa, synthetic construct
GDTHNIV

SEQ ID NO: 10123 - protein, 7 aa, synthetic construct
GFEMSKE

SEQ ID NO: 10124 - protein, 7 aa, synthetic construct
SEEHRHM

SEQ ID NO: 10125 - protein, 7 aa, synthetic construct
MLRQHGI

SEQ ID NO: 10126 - protein, 7 aa, synthetic construct
WMDKIQV

SEQ ID NO: 10127 - protein, 7 aa, synthetic construct
LDGQWAS

SEQ ID NO: 10128 - protein, 7 aa, synthetic construct
HHTGFPP

SEQ ID NO: 10129 - protein, 7 aa, synthetic construct
SQGSLVG

SEQ ID NO: 10130 - protein, 7 aa, synthetic construct
DPYNNRS

SEQ ID NO: 10131 - protein, 7 aa, synthetic construct
LQSGLQK

SEQ ID NO: 10132 - protein, 7 aa, synthetic construct
DGAERSY

SEQ ID NO: 10133 - protein, 7 aa, synthetic construct
NVRGHET

SEQ ID NO: 10134 - protein, 7 aa, synthetic construct
SIGNEIP

SEQ ID NO: 10135 - protein, 7 aa, synthetic construct
THYIQNA

SEQ ID NO: 10136 - protein, 7 aa, synthetic construct
VEHVETA

SEQ ID NO: 10137 - protein, 7 aa, synthetic construct
YDKQLNT

SEQ ID NO: 10138 - protein, 7 aa, synthetic construct
QPYKDDN

SEQ ID NO: 10139 - protein, 7 aa, synthetic construct
FYEQSTG

SEQ ID NO: 10140 - protein, 7 aa, synthetic construct
NKDDVIS

SEQ ID NO: 10141 - protein, 7 aa, synthetic construct
YILGTSM

SEQ ID NO: 10142 - protein, 7 aa, synthetic construct
YQDDDGH

SEQ ID NO: 10143 - protein, 7 aa, synthetic construct
NYDDPSQ

SEQ ID NO: 10144 - protein, 7 aa, synthetic construct
MPTWDEV

SEQ ID NO: 10145 - protein, 7 aa, synthetic construct
TDPHLRY

SEQ ID NO: 10146 - protein, 7 aa, synthetic construct
QEDGYKG

SEQ ID NO: 10147 - protein, 7 aa, synthetic construct
ADQNTTD

SEQ ID NO: 10148 - protein, 7 aa, synthetic construct
STMKGPL

SEQ ID NO: 10149 - protein, 7 aa, synthetic construct
DGMPQNI

SEQ ID NO: 10150 - protein, 7 aa, synthetic construct
YEFHSTI

SEQ ID NO: 10151 - protein, 7 aa, synthetic construct
KDREHMD

SEQ ID NO: 10152 - protein, 7 aa, synthetic construct
QGNDTYI

SEQ ID NO: 10153 - protein, 7 aa, synthetic construct
TKEEKQG

SEQ ID NO: 10154 - protein, 7 aa, synthetic construct
GLHNNKT

SEQ ID NO: 10155 - protein, 7 aa, synthetic construct
IPLSEGV

SEQ ID NO: 10156 - protein, 7 aa, synthetic construct
NHKFPVL

SEQ ID NO: 10157 - protein, 7 aa, synthetic construct
HKVSHSM

SEQ ID NO: 10158 - protein, 7 aa, synthetic construct
SEGPFVH

SEQ ID NO: 10159 - protein, 7 aa, synthetic construct
DFTAPEY

SEQ ID NO: 10160 - protein, 7 aa, synthetic construct
MSGPHLD

SEQ ID NO: 10161 - protein, 7 aa, synthetic construct
PGLNRIV

SEQ ID NO: 10162 - protein, 7 aa, synthetic construct
VKISAGA

SEQ ID NO: 10163 - protein, 7 aa, synthetic construct
DKITIGG

SEQ ID NO: 10164 - protein, 7 aa, synthetic construct
IDKQVDV

SEQ ID NO: 10165 - protein, 7 aa, synthetic construct
VKTLTHV

SEQ ID NO: 10166 - protein, 7 aa, synthetic construct
AVSQSHM

SEQ ID NO: 10167 - protein, 7 aa, synthetic construct
GDPQDGW

SEQ ID NO: 10168 - protein, 7 aa, synthetic construct
QQDKDEM

SEQ ID NO: 10169 - protein, 7 aa, synthetic construct
MVEKWGE

SEQ ID NO: 10170 - protein, 7 aa, synthetic construct
RMHEVLN

SEQ ID NO: 10171 - protein, 7 aa, synthetic construct
HSMHHED

SEQ ID NO: 10172 - protein, 7 aa, synthetic construct
MNTPGHN

SEQ ID NO: 10173 - protein, 7 aa, synthetic construct
KSLQTMN

SEQ ID NO: 10174 - protein, 7 aa, synthetic construct
SHEEMAI

SEQ ID NO: 10175 - protein, 7 aa, synthetic construct
PAKYEMY

SEQ ID NO: 10176 - protein, 7 aa, synthetic construct
KLDGMVR

SEQ ID NO: 10177 - protein, 7 aa, synthetic construct
AQKAMYV

SEQ ID NO: 10178 - protein, 7 aa, synthetic construct
QPHADKQ

SEQ ID NO: 10179 - protein, 7 aa, synthetic construct
MEMPYKP

SEQ ID NO: 10180 - protein, 7 aa, synthetic construct
NQWQSAS

SEQ ID NO: 10181 - protein, 7 aa, synthetic construct
LDLRYPN

SEQ ID NO: 10182 - protein, 7 aa, synthetic construct
DQHGFIP

SEQ ID NO: 10183 - protein, 7 aa, synthetic construct
DKSVAPE

SEQ ID NO: 10184 - protein, 7 aa, synthetic construct
VDPATKK

SEQ ID NO: 10185 - protein, 7 aa, synthetic construct
LHATLKN

SEQ ID NO: 10186 - protein, 7 aa, synthetic construct
TQDNTFI

SEQ ID NO: 10187 - protein, 7 aa, synthetic construct
LTEHKDL

SEQ ID NO: 10188 - protein, 7 aa, synthetic construct
DQQLPSH

SEQ ID NO: 10189 - protein, 7 aa, synthetic construct
SANEILG

SEQ ID NO: 10190 - protein, 7 aa, synthetic construct
HNLKVLN

SEQ ID NO: 10191 - protein, 7 aa, synthetic construct
IGHEWEM

SEQ ID NO: 10192 - protein, 7 aa, synthetic construct
FSDLMHA

SEQ ID NO: 10193 - protein, 7 aa, synthetic construct
HSQFGEQ

SEQ ID NO: 10194 - protein, 7 aa, synthetic construct
WVHQTNA

SEQ ID NO: 10195 - protein, 7 aa, synthetic construct
YNIHVSK

SEQ ID NO: 10196 - protein, 7 aa, synthetic construct
INTQAMG

SEQ ID NO: 10197 - protein, 7 aa, synthetic construct
MSMVSVD

SEQ ID NO: 10198 - protein, 7 aa, synthetic construct
FENNTAG

SEQ ID NO: 10199 - protein, 7 aa, synthetic construct
LKEDPVQ

SEQ ID NO: 10200 - protein, 7 aa, synthetic construct
FPEREIP

SEQ ID NO: 10201 - protein, 7 aa, synthetic construct
IFHSPGG

SEQ ID NO: 10202 - protein, 7 aa, synthetic construct
GAMREED

SEQ ID NO: 10203 - protein, 7 aa, synthetic construct
DRPDWNK

SEQ ID NO: 10204 - protein, 7 aa, synthetic construct
SRNNMSE

SEQ ID NO: 10205 - protein, 7 aa, synthetic construct
NHPQEIP

SEQ ID NO: 10206 - protein, 7 aa, synthetic construct
YKIEYGN

SEQ ID NO: 10207 - protein, 7 aa, synthetic construct
DRGSVNP

SEQ ID NO: 10208 - protein, 7 aa, synthetic construct
NQYVSTT

SEQ ID NO: 10209 - protein, 7 aa, synthetic construct
TKRIELL

SEQ ID NO: 10210 - protein, 7 aa, synthetic construct
MAHVMSD

SEQ ID NO: 10211 - protein, 7 aa, synthetic construct
YAPIGES

SEQ ID NO: 10212 - protein, 7 aa, synthetic construct
PKNVELY

SEQ ID NO: 10213 - protein, 7 aa, synthetic construct
QSDDMTM

SEQ ID NO: 10214 - protein, 7 aa, synthetic construct
GNTPDAH

SEQ ID NO: 10215 - protein, 7 aa, synthetic construct
QPPSLTA

SEQ ID NO: 10216 - protein, 7 aa, synthetic construct
IQRELSY

SEQ ID NO: 10217 - protein, 7 aa, synthetic construct
AIMRDVG

SEQ ID NO: 10218 - protein, 7 aa, synthetic construct
NHVITLG

SEQ ID NO: 10219 - protein, 7 aa, synthetic construct
GDQFRKA

SEQ ID NO: 10220 - protein, 7 aa, synthetic construct
IREELDW

SEQ ID NO: 10221 - protein, 7 aa, synthetic construct
DMTVADA

SEQ ID NO: 10222 - protein, 7 aa, synthetic construct
ETTEKEG

SEQ ID NO: 10223 - protein, 7 aa, synthetic construct
WDHHQDG

SEQ ID NO: 10224 - protein, 7 aa, synthetic construct
VQGPHRS

SEQ ID NO: 10225 - protein, 7 aa, synthetic construct
HQPTHPP

SEQ ID NO: 10226 - protein, 7 aa, synthetic construct
WGHAEIR

SEQ ID NO: 10227 - protein, 7 aa, synthetic construct
EQLKHHD

SEQ ID NO: 10228 - protein, 7 aa, synthetic construct
ITINDPR

SEQ ID NO: 10229 - protein, 7 aa, synthetic construct
SPNRQDE

SEQ ID NO: 10230 - protein, 7 aa, synthetic construct
INQDGHT

SEQ ID NO: 10231 - protein, 7 aa, synthetic construct
YRHPTGA

SEQ ID NO: 10232 - protein, 7 aa, synthetic construct
APEGMPT

SEQ ID NO: 10233 - protein, 7 aa, synthetic construct
FIPQNNA

SEQ ID NO: 10234 - protein, 7 aa, synthetic construct
GRQETDI

SEQ ID NO: 10235 - protein, 7 aa, synthetic construct
LKFPDKI

SEQ ID NO: 10236 - protein, 7 aa, synthetic construct
MDSWQTP

SEQ ID NO: 10237 - protein, 7 aa, synthetic construct
SYTVSHH

SEQ ID NO: 10238 - protein, 7 aa, synthetic construct
KDHVNGS

SEQ ID NO: 10239 - protein, 7 aa, synthetic construct
SQDQNSR

SEQ ID NO: 10240 - protein, 7 aa, synthetic construct
SPKCADC

SEQ ID NO: 10241 - protein, 7 aa, synthetic construct
KTHNDMW

SEQ ID NO: 10242 - protein, 7 aa, synthetic construct
FPHMHQE

SEQ ID NO: 10243 - protein, 7 aa, synthetic construct
HSFQEEH

SEQ ID NO: 10244 - protein, 7 aa, synthetic construct
LDREFLV

SEQ ID NO: 10245 - protein, 7 aa, synthetic construct
SNTVTEP

SEQ ID NO: 10246 - protein, 7 aa, synthetic construct
SRDNIIR

SEQ ID NO: 10247 - protein, 7 aa, synthetic construct
EVQQVGS

SEQ ID NO: 10248 - protein, 7 aa, synthetic construct
FYQYPDE

SEQ ID NO: 10249 - protein, 7 aa, synthetic construct
WRITDND

SEQ ID NO: 10250 - protein, 7 aa, synthetic construct
ETKQLQD

SEQ ID NO: 10251 - protein, 7 aa, synthetic construct
ENANMKW

SEQ ID NO: 10252 - protein, 7 aa, synthetic construct
GDKTMLH

SEQ ID NO: 10253 - protein, 7 aa, synthetic construct
IHPETDL

SEQ ID NO: 10254 - protein, 7 aa, synthetic construct
TTHSFDD

SEQ ID NO: 10255 - protein, 7 aa, synthetic construct
WNQFSPN

SEQ ID NO: 10256 - protein, 7 aa, synthetic construct
QYAPNAH

SEQ ID NO: 10257 - protein, 7 aa, synthetic construct
LPAGLIT

SEQ ID NO: 10258 - protein, 7 aa, synthetic construct
KNSYAHD

SEQ ID NO: 10259 - protein, 7 aa, synthetic construct
VHNMGQY

SEQ ID NO: 10260 - protein, 7 aa, synthetic construct
SDNYAHE

SEQ ID NO: 10261 - protein, 7 aa, synthetic construct
PFSGGMI

SEQ ID NO: 10262 - protein, 7 aa, synthetic construct
QIQIHQE

SEQ ID NO: 10263 - protein, 7 aa, synthetic construct
MSISSLA

SEQ ID NO: 10264 - protein, 7 aa, synthetic construct
YEPAADM

SEQ ID NO: 10265 - protein, 7 aa, synthetic construct
NNSMIVV

SEQ ID NO: 10266 - protein, 7 aa, synthetic construct
TPMVESN

SEQ ID NO: 10267 - protein, 7 aa, synthetic construct
QQLIKYE

SEQ ID NO: 10268 - protein, 7 aa, synthetic construct
QHNRDKP

SEQ ID NO: 10269 - protein, 7 aa, synthetic construct
RHHEQGA

SEQ ID NO: 10270 - protein, 7 aa, synthetic construct
IDPQHKF

SEQ ID NO: 10271 - protein, 7 aa, synthetic construct
EGMKTHP

SEQ ID NO: 10272 - protein, 7 aa, synthetic construct
TVTNIQD

SEQ ID NO: 10273 - protein, 7 aa, synthetic construct
VQELSRK

SEQ ID NO: 10274 - protein, 7 aa, synthetic construct
KFSEEFV

SEQ ID NO: 10275 - protein, 7 aa, synthetic construct
YLAREHF

SEQ ID NO: 10276 - protein, 7 aa, synthetic construct
LNVLGKI

SEQ ID NO: 10277 - protein, 7 aa, synthetic construct
TFPNTIT

SEQ ID NO: 10278 - protein, 7 aa, synthetic construct
MDREQTM

SEQ ID NO: 10279 - protein, 7 aa, synthetic construct
NMSDALI

SEQ ID NO: 10280 - protein, 7 aa, synthetic construct
RSANQGA

SEQ ID NO: 10281 - protein, 7 aa, synthetic construct
KPPSDQV

SEQ ID NO: 10282 - protein, 7 aa, synthetic construct
NKVQQVA

SEQ ID NO: 10283 - protein, 7 aa, synthetic construct
APSYNAP

SEQ ID NO: 10284 - protein, 7 aa, synthetic construct
DIHAHDM

SEQ ID NO: 10285 - protein, 7 aa, synthetic construct
DNQKAHH

SEQ ID NO: 10286 - protein, 7 aa, synthetic construct
VTPTRVN

SEQ ID NO: 10287 - protein, 7 aa, synthetic construct
INHNAYS

SEQ ID NO: 10288 - protein, 7 aa, synthetic construct
AKVNHDQ

SEQ ID NO: 10289 - protein, 7 aa, synthetic construct
IHNTEPL

SEQ ID NO: 10290 - protein, 7 aa, synthetic construct
PNSEIPP

SEQ ID NO: 10291 - protein, 7 aa, synthetic construct
PHAPSDA

SEQ ID NO: 10292 - protein, 7 aa, synthetic construct
HQERIGK

SEQ ID NO: 10293 - protein, 7 aa, synthetic construct
TKEDYER

SEQ ID NO: 10294 - protein, 7 aa, synthetic construct
ENAQFNS

SEQ ID NO: 10295 - protein, 7 aa, synthetic construct
FDGANGV

SEQ ID NO: 10296 - protein, 7 aa, synthetic construct
HDERILR

SEQ ID NO: 10297 - protein, 7 aa, synthetic construct
SKGQLIH

SEQ ID NO: 10298 - protein, 7 aa, synthetic construct
TSPDFAV

SEQ ID NO: 10299 - protein, 7 aa, synthetic construct
IKQMPTA

SEQ ID NO: 10300 - protein, 7 aa, synthetic construct
QEIVPNR

SEQ ID NO: 10301 - protein, 7 aa, synthetic construct
MHSHHFA

SEQ ID NO: 10302 - protein, 7 aa, synthetic construct
ATGNHKS

SEQ ID NO: 10303 - protein, 7 aa, synthetic construct
IAINGMV

SEQ ID NO: 10304 - protein, 7 aa, synthetic construct
TGQMPHD

SEQ ID NO: 10305 - protein, 7 aa, synthetic construct
QQTGHET

SEQ ID NO: 10306 - protein, 7 aa, synthetic construct
GLMNLTA

SEQ ID NO: 10307 - protein, 7 aa, synthetic construct
DKHHINH

SEQ ID NO: 10308 - protein, 7 aa, synthetic construct
YQTAHAI

SEQ ID NO: 10309 - protein, 7 aa, synthetic construct
HSHNVGW

SEQ ID NO: 10310 - protein, 7 aa, synthetic construct
FDQSNRS

SEQ ID NO: 10311 - protein, 7 aa, synthetic construct
QYVDHTI

SEQ ID NO: 10312 - protein, 7 aa, synthetic construct
NAIEFGR

SEQ ID NO: 10313 - protein, 7 aa, synthetic construct
NGSRVAV

SEQ ID NO: 10314 - protein, 7 aa, synthetic construct
FDGSHYE

SEQ ID NO: 10315 - protein, 7 aa, synthetic construct
AKEPHVY

SEQ ID NO: 10316 - protein, 7 aa, synthetic construct
HDPEAKA

SEQ ID NO: 10317 - protein, 7 aa, synthetic construct
PDMNPNV

SEQ ID NO: 10318 - protein, 7 aa, synthetic construct
GQDGMFV

SEQ ID NO: 10319 - protein, 7 aa, synthetic construct
HDHDQRD

SEQ ID NO: 10320 - protein, 7 aa, synthetic construct
LTRAERE

SEQ ID NO: 10321 - protein, 7 aa, synthetic construct
QNAGPEE

SEQ ID NO: 10322 - protein, 7 aa, synthetic construct
PMIGQTT

SEQ ID NO: 10323 - protein, 7 aa, synthetic construct
ITDAPKN

SEQ ID NO: 10324 - protein, 7 aa, synthetic construct
YRDSYPQ

SEQ ID NO: 10325 - protein, 7 aa, synthetic construct
LADNQVR

SEQ ID NO: 10326 - protein, 7 aa, synthetic construct
VQHYSVG

SEQ ID NO: 10327 - protein, 7 aa, synthetic construct
DAQTHAF

SEQ ID NO: 10328 - protein, 7 aa, synthetic construct
HQLITKD

SEQ ID NO: 10329 - protein, 7 aa, synthetic construct
TISMGIE

SEQ ID NO: 10330 - protein, 7 aa, synthetic construct
FYDASAS

SEQ ID NO: 10331 - protein, 7 aa, synthetic construct
GDGRAFY

SEQ ID NO: 10332 - protein, 7 aa, synthetic construct
GANPSYD

SEQ ID NO: 10333 - protein, 7 aa, synthetic construct
DNPMISP

SEQ ID NO: 10334 - protein, 7 aa, synthetic construct
NEGHGTE

SEQ ID NO: 10335 - protein, 7 aa, synthetic construct
MQVQIEG

SEQ ID NO: 10336 - protein, 7 aa, synthetic construct
LTPAESN

SEQ ID NO: 10337 - protein, 7 aa, synthetic construct
PAQRYDD

SEQ ID NO: 10338 - protein, 7 aa, synthetic construct
KVVGGEE

SEQ ID NO: 10339 - protein, 7 aa, synthetic construct
AHVPDTM

SEQ ID NO: 10340 - protein, 7 aa, synthetic construct
RNVLEIK

SEQ ID NO: 10341 - protein, 7 aa, synthetic construct
GEMNKVS

SEQ ID NO: 10342 - protein, 7 aa, synthetic construct
DANKWEE

SEQ ID NO: 10343 - protein, 7 aa, synthetic construct
SPVVGSH

SEQ ID NO: 10344 - protein, 7 aa, synthetic construct
TGTIHLD

SEQ ID NO: 10345 - protein, 7 aa, synthetic construct
IFQENIS

SEQ ID NO: 10346 - protein, 7 aa, synthetic construct
MPENQRE

SEQ ID NO: 10347 - protein, 7 aa, synthetic construct
PRQYAEL

SEQ ID NO: 10348 - protein, 7 aa, synthetic construct
WQDDHMH

SEQ ID NO: 10349 - protein, 7 aa, synthetic construct
QADLAVR

SEQ ID NO: 10350 - protein, 7 aa, synthetic construct
EYYVDKD

SEQ ID NO: 10351 - protein, 7 aa, synthetic construct
MNGDRNE

SEQ ID NO: 10352 - protein, 7 aa, synthetic construct
HVYEHGG

SEQ ID NO: 10353 - protein, 7 aa, synthetic construct
INMSTRL

SEQ ID NO: 10354 - protein, 7 aa, synthetic construct
RLEHIEP

SEQ ID NO: 10355 - protein, 7 aa, synthetic construct
AWKPQGP

SEQ ID NO: 10356 - protein, 7 aa, synthetic construct
EMPRQSL

SEQ ID NO: 10357 - protein, 7 aa, synthetic construct
WIDEPRM

SEQ ID NO: 10358 - protein, 7 aa, synthetic construct
MISHAIE

SEQ ID NO: 10359 - protein, 7 aa, synthetic construct
KYENASL

SEQ ID NO: 10360 - protein, 7 aa, synthetic construct
HWEKVRE

SEQ ID NO: 10361 - protein, 7 aa, synthetic construct
DTLKVKS

SEQ ID NO: 10362 - protein, 7 aa, synthetic construct
REEAKNI

SEQ ID NO: 10363 - protein, 7 aa, synthetic construct
KITNLAI

SEQ ID NO: 10364 - protein, 7 aa, synthetic construct
HEVPSKL

SEQ ID NO: 10365 - protein, 7 aa, synthetic construct
YINNEPK

SEQ ID NO: 10366 - protein, 7 aa, synthetic construct
PNERGNE

SEQ ID NO: 10367 - protein, 7 aa, synthetic construct
QHEKGNH

SEQ ID NO: 10368 - protein, 7 aa, synthetic construct
FPAYIEP

SEQ ID NO: 10369 - protein, 7 aa, synthetic construct
WGMSTPP

SEQ ID NO: 10370 - protein, 7 aa, synthetic construct
PTEWTRN

SEQ ID NO: 10371 - protein, 7 aa, synthetic construct
KFEINES

SEQ ID NO: 10372 - protein, 7 aa, synthetic construct
FLVDENR

SEQ ID NO: 10373 - protein, 7 aa, synthetic construct
HFAAELE

SEQ ID NO: 10374 - protein, 7 aa, synthetic construct
SDGQANG

SEQ ID NO: 10375 - protein, 7 aa, synthetic construct
TWNEAQG

SEQ ID NO: 10376 - protein, 7 aa, synthetic construct
PALDHRS

SEQ ID NO: 10377 - protein, 7 aa, synthetic construct
FAAERYV

SEQ ID NO: 10378 - protein, 7 aa, synthetic construct
VYVNNQG

SEQ ID NO: 10379 - protein, 7 aa, synthetic construct
SFDFRPD

SEQ ID NO: 10380 - protein, 7 aa, synthetic construct
VMSGEQH

SEQ ID NO: 10381 - protein, 7 aa, synthetic construct
FKQPTEA

SEQ ID NO: 10382 - protein, 7 aa, synthetic construct
RMHVELM

SEQ ID NO: 10383 - protein, 7 aa, synthetic construct
NGENQDK

SEQ ID NO: 10384 - protein, 7 aa, synthetic construct
DPSGEHS

SEQ ID NO: 10385 - protein, 7 aa, synthetic construct
DMSMWEE

SEQ ID NO: 10386 - protein, 7 aa, synthetic construct
PVKDSRF

SEQ ID NO: 10387 - protein, 7 aa, synthetic construct
GENEKHD

SEQ ID NO: 10388 - protein, 7 aa, synthetic construct
LSVHDQE

SEQ ID NO: 10389 - protein, 7 aa, synthetic construct
MDKEIPA

SEQ ID NO: 10390 - protein, 7 aa, synthetic construct
WHDEKQA

SEQ ID NO: 10391 - protein, 7 aa, synthetic construct
QGDGPQE

SEQ ID NO: 10392 - protein, 7 aa, synthetic construct
FLDKKAN

SEQ ID NO: 10393 - protein, 7 aa, synthetic construct
GQKHHLP

SEQ ID NO: 10394 - protein, 7 aa, synthetic construct
DINNQNH

SEQ ID NO: 10395 - protein, 7 aa, synthetic construct
RMPDEDV

SEQ ID NO: 10396 - protein, 7 aa, synthetic construct
ERDGFVM

SEQ ID NO: 10397 - protein, 7 aa, synthetic construct
KETMREW

SEQ ID NO: 10398 - protein, 7 aa, synthetic construct
DNIHEHL

SEQ ID NO: 10399 - protein, 7 aa, synthetic construct
HNDATFA

SEQ ID NO: 10400 - protein, 7 aa, synthetic construct
TFQPELP

SEQ ID NO: 10401 - protein, 7 aa, synthetic construct
YIQTANA

SEQ ID NO: 10402 - protein, 7 aa, synthetic construct
IRQNINN

SEQ ID NO: 10403 - protein, 7 aa, synthetic construct
HHGDFTS

SEQ ID NO: 10404 - protein, 7 aa, synthetic construct
DIDYNRI

SEQ ID NO: 10405 - protein, 7 aa, synthetic construct
GFRMDEI

SEQ ID NO: 10406 - protein, 7 aa, synthetic construct
YRIEKAG

SEQ ID NO: 10407 - protein, 7 aa, synthetic construct
QPEMQNF

SEQ ID NO: 10408 - protein, 7 aa, synthetic construct
MTLKMNQ

SEQ ID NO: 10409 - protein, 7 aa, synthetic construct
WDGGPLR

SEQ ID NO: 10410 - protein, 7 aa, synthetic construct
EHGSGYK

SEQ ID NO: 10411 - protein, 7 aa, synthetic construct
PTEGSNS

SEQ ID NO: 10412 - protein, 7 aa, synthetic construct
QSEGNDK

SEQ ID NO: 10413 - protein, 7 aa, synthetic construct
DDKNNNR

SEQ ID NO: 10414 - protein, 7 aa, synthetic construct
EAKAAGL

SEQ ID NO: 10415 - protein, 7 aa, synthetic construct
VHTIHMA

SEQ ID NO: 10416 - protein, 7 aa, synthetic construct
NIMRTEY

SEQ ID NO: 10417 - protein, 7 aa, synthetic construct
HDLQMDK

SEQ ID NO: 10418 - protein, 7 aa, synthetic construct
DRSDETL

SEQ ID NO: 10419 - protein, 7 aa, synthetic construct
SDKQWAP

SEQ ID NO: 10420 - protein, 7 aa, synthetic construct
PYKHSVN

SEQ ID NO: 10421 - protein, 7 aa, synthetic construct
SYLQEQP

SEQ ID NO: 10422 - protein, 7 aa, synthetic construct
QTEINIS

SEQ ID NO: 10423 - protein, 7 aa, synthetic construct
GISVPMQ

SEQ ID NO: 10424 - protein, 7 aa, synthetic construct
GDPKSSW

SEQ ID NO: 10425 - protein, 7 aa, synthetic construct
NAGDNVQ

SEQ ID NO: 10426 - protein, 7 aa, synthetic construct
GTDSDAL

SEQ ID NO: 10427 - protein, 7 aa, synthetic construct
NEKDLSF

SEQ ID NO: 10428 - protein, 7 aa, synthetic construct
FVQNSNY

SEQ ID NO: 10429 - protein, 7 aa, synthetic construct
TKNQYAY

SEQ ID NO: 10430 - protein, 7 aa, synthetic construct
VMDIQEK

SEQ ID NO: 10431 - protein, 7 aa, synthetic construct
VLSLGEI

SEQ ID NO: 10432 - protein, 7 aa, synthetic construct
GNYPTKN

SEQ ID NO: 10433 - protein, 7 aa, synthetic construct
ANIGHQN

SEQ ID NO: 10434 - protein, 7 aa, synthetic construct
EYDKYPG

SEQ ID NO: 10435 - protein, 7 aa, synthetic construct
GDIAKQL

SEQ ID NO: 10436 - protein, 7 aa, synthetic construct
FNSGPRI

SEQ ID NO: 10437 - protein, 7 aa, synthetic construct
VNQMQRM

SEQ ID NO: 10438 - protein, 7 aa, synthetic construct
SDGDGGF

SEQ ID NO: 10439 - protein, 7 aa, synthetic construct
ETGYHDV

SEQ ID NO: 10440 - protein, 7 aa, synthetic construct
KPDAAAY

SEQ ID NO: 10441 - protein, 7 aa, synthetic construct
YNNEMPG

SEQ ID NO: 10442 - protein, 7 aa, synthetic construct
RDQGRNN

SEQ ID NO: 10443 - protein, 7 aa, synthetic construct
QSAVMRS

SEQ ID NO: 10444 - protein, 7 aa, synthetic construct
SEARMTM

SEQ ID NO: 10445 - protein, 7 aa, synthetic construct
IVTDPYG

SEQ ID NO: 10446 - protein, 7 aa, synthetic construct
HNGFNKA

SEQ ID NO: 10447 - protein, 7 aa, synthetic construct
AVYVNED

SEQ ID NO: 10448 - protein, 7 aa, synthetic construct
LSIHQSV

SEQ ID NO: 10449 - protein, 7 aa, synthetic construct
SEYPQMA

SEQ ID NO: 10450 - protein, 7 aa, synthetic construct
FQEQQTF

SEQ ID NO: 10451 - protein, 7 aa, synthetic construct
NMREFDE

SEQ ID NO: 10452 - protein, 7 aa, synthetic construct
MSKYPNI

SEQ ID NO: 10453 - protein, 7 aa, synthetic construct
THGEQFF

SEQ ID NO: 10454 - protein, 7 aa, synthetic construct
SSATWSE

SEQ ID NO: 10455 - protein, 7 aa, synthetic construct
PPAWQSS

SEQ ID NO: 10456 - protein, 7 aa, synthetic construct
TWADHAR

SEQ ID NO: 10457 - protein, 7 aa, synthetic construct
HQHADTY

SEQ ID NO: 10458 - protein, 7 aa, synthetic construct
NPSTDNH

SEQ ID NO: 10459 - protein, 7 aa, synthetic construct
AQENHNM

SEQ ID NO: 10460 - protein, 7 aa, synthetic construct
PGAVSPV

SEQ ID NO: 10461 - protein, 7 aa, synthetic construct
INENQHA

SEQ ID NO: 10462 - protein, 7 aa, synthetic construct
PVGDHEL

SEQ ID NO: 10463 - protein, 7 aa, synthetic construct
ENVDPDD

SEQ ID NO: 10464 - protein, 7 aa, synthetic construct
IQNAVPL

SEQ ID NO: 10465 - protein, 7 aa, synthetic construct
IDITYSS

SEQ ID NO: 10466 - protein, 7 aa, synthetic construct
MQFGNTN

SEQ ID NO: 10467 - protein, 7 aa, synthetic construct
APPRLDY

SEQ ID NO: 10468 - protein, 7 aa, synthetic construct
KENVIML

SEQ ID NO: 10469 - protein, 7 aa, synthetic construct
IVVGGNS

SEQ ID NO: 10470 - protein, 7 aa, synthetic construct
PKQIEPH

SEQ ID NO: 10471 - protein, 7 aa, synthetic construct
AGVGERA

SEQ ID NO: 10472 - protein, 7 aa, synthetic construct
QVKHDAR

SEQ ID NO: 10473 - protein, 7 aa, synthetic construct
NIKLYKD

SEQ ID NO: 10474 - protein, 7 aa, synthetic construct
GNYSYSG

SEQ ID NO: 10475 - protein, 7 aa, synthetic construct
TAREIHV

SEQ ID NO: 10476 - protein, 7 aa, synthetic construct
SHDQWSK

SEQ ID NO: 10477 - protein, 7 aa, synthetic construct
VQSVLNT

SEQ ID NO: 10478 - protein, 7 aa, synthetic construct
KSYDAEW

SEQ ID NO: 10479 - protein, 7 aa, synthetic construct
MHEIERY

SEQ ID NO: 10480 - protein, 7 aa, synthetic construct
QMTQEIH

SEQ ID NO: 10481 - protein, 7 aa, synthetic construct
NLGERKD

SEQ ID NO: 10482 - protein, 7 aa, synthetic construct
RGPEQNI

SEQ ID NO: 10483 - protein, 7 aa, synthetic construct
HAGFMGV

SEQ ID NO: 10484 - protein, 7 aa, synthetic construct
IHADMRD

SEQ ID NO: 10485 - protein, 7 aa, synthetic construct
KPREDNK

SEQ ID NO: 10486 - protein, 7 aa, synthetic construct
TVLSQLP

SEQ ID NO: 10487 - protein, 7 aa, synthetic construct
RGGVFVN

SEQ ID NO: 10488 - protein, 7 aa, synthetic construct
AANKHHI

SEQ ID NO: 10489 - protein, 7 aa, synthetic construct
ATFQSNL

SEQ ID NO: 10490 - protein, 7 aa, synthetic construct
QPVVAIQ

SEQ ID NO: 10491 - protein, 7 aa, synthetic construct
VSEGQNN

SEQ ID NO: 10492 - protein, 7 aa, synthetic construct
LDNSMVR

SEQ ID NO: 10493 - protein, 7 aa, synthetic construct
EQAGGEF

SEQ ID NO: 10494 - protein, 7 aa, synthetic construct
EIYPQME

SEQ ID NO: 10495 - protein, 7 aa, synthetic construct
RGPVDGD

SEQ ID NO: 10496 - protein, 7 aa, synthetic construct
ESAIKDI

SEQ ID NO: 10497 - protein, 7 aa, synthetic construct
DAQTPKM

SEQ ID NO: 10498 - protein, 7 aa, synthetic construct
IFNDSQD

SEQ ID NO: 10499 - protein, 7 aa, synthetic construct
APNSWQD

SEQ ID NO: 10500 - protein, 7 aa, synthetic construct
LAAHTQP

SEQ ID NO: 10501 - protein, 7 aa, synthetic construct
ISKLVQI

SEQ ID NO: 10502 - protein, 7 aa, synthetic construct
GYNGVHL

SEQ ID NO: 10503 - protein, 7 aa, synthetic construct
PRGVTNY

SEQ ID NO: 10504 - protein, 7 aa, synthetic construct
EDAVRFS

SEQ ID NO: 10505 - protein, 7 aa, synthetic construct
PLNVRGD

SEQ ID NO: 10506 - protein, 7 aa, synthetic construct
QGIEKNL

SEQ ID NO: 10507 - protein, 7 aa, synthetic construct
MDKTVEE

SEQ ID NO: 10508 - protein, 7 aa, synthetic construct
DQNVRVH

SEQ ID NO: 10509 - protein, 7 aa, synthetic construct
LRSAGFH

SEQ ID NO: 10510 - protein, 7 aa, synthetic construct
KSEHEVR

SEQ ID NO: 10511 - protein, 7 aa, synthetic construct
QANDWER

SEQ ID NO: 10512 - protein, 7 aa, synthetic construct
IGIDSSR

SEQ ID NO: 10513 - protein, 7 aa, synthetic construct
HGTQGGK

SEQ ID NO: 10514 - protein, 7 aa, synthetic construct
LFNHKHP

SEQ ID NO: 10515 - protein, 7 aa, synthetic construct
NLGDVHP

SEQ ID NO: 10516 - protein, 7 aa, synthetic construct
NQTGKHI

SEQ ID NO: 10517 - protein, 7 aa, synthetic construct
YNVVEQH

SEQ ID NO: 10518 - protein, 7 aa, synthetic construct
HQSFEPK

SEQ ID NO: 10519 - protein, 7 aa, synthetic construct
WPSASFA

SEQ ID NO: 10520 - protein, 7 aa, synthetic construct
WDQVGPA

SEQ ID NO: 10521 - protein, 7 aa, synthetic construct
SDIPTAP

SEQ ID NO: 10522 - protein, 7 aa, synthetic construct
PIVPNNN

SEQ ID NO: 10523 - protein, 7 aa, synthetic construct
CPPPKCH

SEQ ID NO: 10524 - protein, 7 aa, synthetic construct
ALAIAPP

SEQ ID NO: 10525 - protein, 7 aa, synthetic construct
AFMKHSP

SEQ ID NO: 10526 - protein, 7 aa, synthetic construct
AMENLRG

SEQ ID NO: 10527 - protein, 7 aa, synthetic construct
IQGDFER

SEQ ID NO: 10528 - protein, 7 aa, synthetic construct
QERLIQQ

SEQ ID NO: 10529 - protein, 7 aa, synthetic construct
HDHTTNI

SEQ ID NO: 10530 - protein, 7 aa, synthetic construct
CDIIHCA

SEQ ID NO: 10531 - protein, 7 aa, synthetic construct
DTMKGLD

SEQ ID NO: 10532 - protein, 7 aa, synthetic construct
NDYHGNP

SEQ ID NO: 10533 - protein, 7 aa, synthetic construct
PIAMPNR

SEQ ID NO: 10534 - protein, 7 aa, synthetic construct
FVHPAVG

SEQ ID NO: 10535 - protein, 7 aa, synthetic construct
FIEGADT

SEQ ID NO: 10536 - protein, 7 aa, synthetic construct
NYTDGWE

SEQ ID NO: 10537 - protein, 7 aa, synthetic construct
LMKMVPI

SEQ ID NO: 10538 - protein, 7 aa, synthetic construct
IVLDQPQ

SEQ ID NO: 10539 - protein, 7 aa, synthetic construct
LNAVNPL

SEQ ID NO: 10540 - protein, 7 aa, synthetic construct
RHVSMPH

SEQ ID NO: 10541 - protein, 7 aa, synthetic construct
TIMMKDL

SEQ ID NO: 10542 - protein, 7 aa, synthetic construct
FTQHNVN

SEQ ID NO: 10543 - protein, 7 aa, synthetic construct
YESPKMA

SEQ ID NO: 10544 - protein, 7 aa, synthetic construct
AQDNKQE

SEQ ID NO: 10545 - protein, 7 aa, synthetic construct
ANPHIVQ

SEQ ID NO: 10546 - protein, 7 aa, synthetic construct
TWQASSN

SEQ ID NO: 10547 - protein, 7 aa, synthetic construct
RLPDANL

SEQ ID NO: 10548 - protein, 7 aa, synthetic construct
NSIPIQT

SEQ ID NO: 10549 - protein, 7 aa, synthetic construct
TVDHADE

SEQ ID NO: 10550 - protein, 7 aa, synthetic construct
AKEPAVY

SEQ ID NO: 10551 - protein, 7 aa, synthetic construct
MLINKDI

SEQ ID NO: 10552 - protein, 7 aa, synthetic construct
RETEEHL

SEQ ID NO: 10553 - protein, 7 aa, synthetic construct
HVRVDPP

SEQ ID NO: 10554 - protein, 7 aa, synthetic construct
VKSQGTQ

SEQ ID NO: 10555 - protein, 7 aa, synthetic construct
GPKDLID

SEQ ID NO: 10556 - protein, 7 aa, synthetic construct
LESYQQE

SEQ ID NO: 10557 - protein, 7 aa, synthetic construct
LDGPKKI

SEQ ID NO: 10558 - protein, 7 aa, synthetic construct
PPHMQAM

SEQ ID NO: 10559 - protein, 7 aa, synthetic construct
DKAVKHI

SEQ ID NO: 10560 - protein, 7 aa, synthetic construct
PTKLLDY

SEQ ID NO: 10561 - protein, 7 aa, synthetic construct
DGFAGSS

SEQ ID NO: 10562 - protein, 7 aa, synthetic construct
FAHNFIA

SEQ ID NO: 10563 - protein, 7 aa, synthetic construct
KFGLNQI

SEQ ID NO: 10564 - protein, 7 aa, synthetic construct
SLYPDQN

SEQ ID NO: 10565 - protein, 7 aa, synthetic construct
GGKIFDS

SEQ ID NO: 10566 - protein, 7 aa, synthetic construct
HNTTFQL

SEQ ID NO: 10567 - protein, 7 aa, synthetic construct
WPIQEAG

SEQ ID NO: 10568 - protein, 7 aa, synthetic construct
PDMVKHY

SEQ ID NO: 10569 - protein, 7 aa, synthetic construct
KQQFERI

SEQ ID NO: 10570 - protein, 7 aa, synthetic construct
VNLMKRE

SEQ ID NO: 10571 - protein, 7 aa, synthetic construct
PDHSLHI

SEQ ID NO: 10572 - protein, 7 aa, synthetic construct
VNHAIAM

SEQ ID NO: 10573 - protein, 7 aa, synthetic construct
DQTFNQP

SEQ ID NO: 10574 - protein, 7 aa, synthetic construct
DMQMRQR

SEQ ID NO: 10575 - protein, 7 aa, synthetic construct
NANLYGE

SEQ ID NO: 10576 - protein, 7 aa, synthetic construct
MGMDGSV

SEQ ID NO: 10577 - protein, 7 aa, synthetic construct
HFPQTSL

SEQ ID NO: 10578 - protein, 7 aa, synthetic construct
ERDRIDQ

SEQ ID NO: 10579 - protein, 7 aa, synthetic construct
KAPLDME

SEQ ID NO: 10580 - protein, 7 aa, synthetic construct
FNEGLGE

SEQ ID NO: 10581 - protein, 7 aa, synthetic construct
YHPQMVK

SEQ ID NO: 10582 - protein, 7 aa, synthetic construct
NVITNGE

SEQ ID NO: 10583 - protein, 7 aa, synthetic construct
RGVAHHA

SEQ ID NO: 10584 - protein, 7 aa, synthetic construct
FWETAAA

SEQ ID NO: 10585 - protein, 7 aa, synthetic construct
PKFENVV

SEQ ID NO: 10586 - protein, 7 aa, synthetic construct
DRTPEES

SEQ ID NO: 10587 - protein, 7 aa, synthetic construct
LALGTNS

SEQ ID NO: 10588 - protein, 7 aa, synthetic construct
EQKEANS

SEQ ID NO: 10589 - protein, 7 aa, synthetic construct
IHEIKGH

SEQ ID NO: 10590 - protein, 7 aa, synthetic construct
DMNPVHD

SEQ ID NO: 10591 - protein, 7 aa, synthetic construct
TQVSGTD

SEQ ID NO: 10592 - protein, 7 aa, synthetic construct
DRMFAEP

SEQ ID NO: 10593 - protein, 7 aa, synthetic construct
GEHDAHG

SEQ ID NO: 10594 - protein, 7 aa, synthetic construct
PWSNGQE

SEQ ID NO: 10595 - protein, 7 aa, synthetic construct
YGLEVKA

SEQ ID NO: 10596 - protein, 7 aa, synthetic construct
KMSWERE

SEQ ID NO: 10597 - protein, 7 aa, synthetic construct
FDQMVKK

SEQ ID NO: 10598 - protein, 7 aa, synthetic construct
VTHMENI

SEQ ID NO: 10599 - protein, 7 aa, synthetic construct
LQQDRIH

SEQ ID NO: 10600 - protein, 7 aa, synthetic construct
AHTYLKD

SEQ ID NO: 10601 - protein, 7 aa, synthetic construct
KGHFDAV

SEQ ID NO: 10602 - protein, 7 aa, synthetic construct
AVSSEDA

SEQ ID NO: 10603 - protein, 7 aa, synthetic construct
GHMANPL

SEQ ID NO: 10604 - protein, 7 aa, synthetic construct
GLTHAMA

SEQ ID NO: 10605 - protein, 7 aa, synthetic construct
SYHINNV

SEQ ID NO: 10606 - protein, 7 aa, synthetic construct
EVKSRLI

SEQ ID NO: 10607 - protein, 7 aa, synthetic construct
GAPNYNL

SEQ ID NO: 10608 - protein, 7 aa, synthetic construct
DAHNMII

SEQ ID NO: 10609 - protein, 7 aa, synthetic construct
TPMQNAV

SEQ ID NO: 10610 - protein, 7 aa, synthetic construct
GMREIYV

SEQ ID NO: 10611 - protein, 7 aa, synthetic construct
EPPGVPR

SEQ ID NO: 10612 - protein, 7 aa, synthetic construct
APEIRRT

SEQ ID NO: 10613 - protein, 7 aa, synthetic construct
AFDQRDP

SEQ ID NO: 10614 - protein, 7 aa, synthetic construct
IDEIKIH

SEQ ID NO: 10615 - protein, 7 aa, synthetic construct
DLSSADS

SEQ ID NO: 10616 - protein, 7 aa, synthetic construct
EPFTDKR

SEQ ID NO: 10617 - protein, 7 aa, synthetic construct
NTEQVGH

SEQ ID NO: 10618 - protein, 7 aa, synthetic construct
DDHRPKA

SEQ ID NO: 10619 - protein, 7 aa, synthetic construct
AHGSHKI

SEQ ID NO: 10620 - protein, 7 aa, synthetic construct
MASDNIN

SEQ ID NO: 10621 - protein, 7 aa, synthetic construct
ENPHKMN

SEQ ID NO: 10622 - protein, 7 aa, synthetic construct
ADNPVIG

SEQ ID NO: 10623 - protein, 7 aa, synthetic construct
SNALEQH

SEQ ID NO: 10624 - protein, 7 aa, synthetic construct
RKPFNDS

SEQ ID NO: 10625 - protein, 7 aa, synthetic construct
GTHTDKI

SEQ ID NO: 10626 - protein, 7 aa, synthetic construct
NASVRVG

SEQ ID NO: 10627 - protein, 7 aa, synthetic construct
TMNDEVG

SEQ ID NO: 10628 - protein, 7 aa, synthetic construct
RESEQQF

SEQ ID NO: 10629 - protein, 7 aa, synthetic construct
MQNFDSI

SEQ ID NO: 10630 - protein, 7 aa, synthetic construct
GAYTDIV

SEQ ID NO: 10631 - protein, 7 aa, synthetic construct
SPTPMVD

SEQ ID NO: 10632 - protein, 7 aa, synthetic construct
NNMPEEI

SEQ ID NO: 10633 - protein, 7 aa, synthetic construct
EKDAIKV

SEQ ID NO: 10634 - protein, 7 aa, synthetic construct
RPPYFGD

SEQ ID NO: 10635 - protein, 7 aa, synthetic construct
AKAYNTG

SEQ ID NO: 10636 - protein, 7 aa, synthetic construct
PASLDSV

SEQ ID NO: 10637 - protein, 7 aa, synthetic construct
ARIDSFK

SEQ ID NO: 10638 - protein, 7 aa, synthetic construct
DPPTKSW

SEQ ID NO: 10639 - protein, 7 aa, synthetic construct
SGEMHSG

SEQ ID NO: 10640 - protein, 7 aa, synthetic construct
HHTSLDS

SEQ ID NO: 10641 - protein, 7 aa, synthetic construct
SVQQATT

SEQ ID NO: 10642 - protein, 7 aa, synthetic construct
WDREMRP

SEQ ID NO: 10643 - protein, 7 aa, synthetic construct
FTSMEHS

SEQ ID NO: 10644 - protein, 7 aa, synthetic construct
EEEMRGM

SEQ ID NO: 10645 - protein, 7 aa, synthetic construct
MSEMHRL

SEQ ID NO: 10646 - protein, 7 aa, synthetic construct
ADKKKEW

SEQ ID NO: 10647 - protein, 7 aa, synthetic construct
YLNETAL

SEQ ID NO: 10648 - protein, 7 aa, synthetic construct
HELSNPP

SEQ ID NO: 10649 - protein, 7 aa, synthetic construct
WTDQGAH

SEQ ID NO: 10650 - protein, 7 aa, synthetic construct
HYTAEAA

SEQ ID NO: 10651 - protein, 7 aa, synthetic construct
QYDPVDK

SEQ ID NO: 10652 - protein, 7 aa, synthetic construct
IHLGEHM

SEQ ID NO: 10653 - protein, 7 aa, synthetic construct
SEQRFHG

SEQ ID NO: 10654 - protein, 7 aa, synthetic construct
THHVIVE

SEQ ID NO: 10655 - protein, 7 aa, synthetic construct
EAPSMRL

SEQ ID NO: 10656 - protein, 7 aa, synthetic construct
HYENMMA

SEQ ID NO: 10657 - protein, 7 aa, synthetic construct
YSANQRT

SEQ ID NO: 10658 - protein, 7 aa, synthetic construct
DMMISRP

SEQ ID NO: 10659 - protein, 7 aa, synthetic construct
EAGTIGK

SEQ ID NO: 10660 - protein, 7 aa, synthetic construct
NSGHEDV

SEQ ID NO: 10661 - protein, 7 aa, synthetic construct
THKQAPY

SEQ ID NO: 10662 - protein, 7 aa, synthetic construct
FMSIRSA

SEQ ID NO: 10663 - protein, 7 aa, synthetic construct
TMFPAIE

SEQ ID NO: 10664 - protein, 7 aa, synthetic construct
QAATPRI

SEQ ID NO: 10665 - protein, 7 aa, synthetic construct
GKHELGM

SEQ ID NO: 10666 - protein, 7 aa, synthetic construct
YEERREV

SEQ ID NO: 10667 - protein, 7 aa, synthetic construct
VKEQNID

SEQ ID NO: 10668 - protein, 7 aa, synthetic construct
EYGHFQE

SEQ ID NO: 10669 - protein, 7 aa, synthetic construct
GPHHRGI

SEQ ID NO: 10670 - protein, 7 aa, synthetic construct
NSEAMII

SEQ ID NO: 10671 - protein, 7 aa, synthetic construct
NHDWQTK

SEQ ID NO: 10672 - protein, 7 aa, synthetic construct
NQLPNGW

SEQ ID NO: 10673 - protein, 7 aa, synthetic construct
QGAAIHY

SEQ ID NO: 10674 - protein, 7 aa, synthetic construct
IQAMNEP

SEQ ID NO: 10675 - protein, 7 aa, synthetic construct
NWQEEGG

SEQ ID NO: 10676 - protein, 7 aa, synthetic construct
FKDAPVF

SEQ ID NO: 10677 - protein, 7 aa, synthetic construct
NGKHVNM

SEQ ID NO: 10678 - protein, 7 aa, synthetic construct
TYMDASD

SEQ ID NO: 10679 - protein, 7 aa, synthetic construct
DTNPQLL

SEQ ID NO: 10680 - protein, 7 aa, synthetic construct
LEGQHQG

SEQ ID NO: 10681 - protein, 7 aa, synthetic construct
HAVKIAT

SEQ ID NO: 10682 - protein, 7 aa, synthetic construct
LIAAETR

SEQ ID NO: 10683 - protein, 7 aa, synthetic construct
EREAMEL

SEQ ID NO: 10684 - protein, 7 aa, synthetic construct
ELYQKTD

SEQ ID NO: 10685 - protein, 7 aa, synthetic construct
ENYNQNE

SEQ ID NO: 10686 - protein, 7 aa, synthetic construct
HNIRGAL

SEQ ID NO: 10687 - protein, 7 aa, synthetic construct
TSEVHYY

SEQ ID NO: 10688 - protein, 7 aa, synthetic construct
VGHFHRD

SEQ ID NO: 10689 - protein, 7 aa, synthetic construct
GTMKEFM

SEQ ID NO: 10690 - protein, 7 aa, synthetic construct
QPKNSYH

SEQ ID NO: 10691 - protein, 7 aa, synthetic construct
ADFHTET

SEQ ID NO: 10692 - protein, 7 aa, synthetic construct
RSADGYI

SEQ ID NO: 10693 - protein, 7 aa, synthetic construct
AHDQLIM

SEQ ID NO: 10694 - protein, 7 aa, synthetic construct
TDEHLTA

SEQ ID NO: 10695 - protein, 7 aa, synthetic construct
SAIDGEK

SEQ ID NO: 10696 - protein, 7 aa, synthetic construct
RQFNAAA

SEQ ID NO: 10697 - protein, 7 aa, synthetic construct
REKEIKY

SEQ ID NO: 10698 - protein, 7 aa, synthetic construct
DGPQKWT

SEQ ID NO: 10699 - protein, 7 aa, synthetic construct
MEEWSDH

SEQ ID NO: 10700 - protein, 7 aa, synthetic construct
GRILDPA

SEQ ID NO: 10701 - protein, 7 aa, synthetic construct
RDQHHSV

SEQ ID NO: 10702 - protein, 7 aa, synthetic construct
NGYTTIG

SEQ ID NO: 10703 - protein, 7 aa, synthetic construct
QEKLVAS

SEQ ID NO: 10704 - protein, 7 aa, synthetic construct
QGRVNQD

SEQ ID NO: 10705 - protein, 7 aa, synthetic construct
TQRPEPG

SEQ ID NO: 10706 - protein, 7 aa, synthetic construct
WKDSNTV

SEQ ID NO: 10707 - protein, 7 aa, synthetic construct
TNSPQIR

SEQ ID NO: 10708 - protein, 7 aa, synthetic construct
DTKLVRS

SEQ ID NO: 10709 - protein, 7 aa, synthetic construct
YESAQGK

SEQ ID NO: 10710 - protein, 7 aa, synthetic construct
WKDQEFA

SEQ ID NO: 10711 - protein, 7 aa, synthetic construct
WQAQRVA

SEQ ID NO: 10712 - protein, 7 aa, synthetic construct
PSSGIKD

SEQ ID NO: 10713 - protein, 7 aa, synthetic construct
KGPSHGV

SEQ ID NO: 10714 - protein, 7 aa, synthetic construct
SDMIVKP

SEQ ID NO: 10715 - protein, 7 aa, synthetic construct
PMHSTNP

SEQ ID NO: 10716 - protein, 7 aa, synthetic construct
RYQTADK

SEQ ID NO: 10717 - protein, 7 aa, synthetic construct
VMELKVP

SEQ ID NO: 10718 - protein, 7 aa, synthetic construct
DSENFGK

SEQ ID NO: 10719 - protein, 7 aa, synthetic construct
SSSFSIE

SEQ ID NO: 10720 - protein, 7 aa, synthetic construct
PLDNERN

SEQ ID NO: 10721 - protein, 7 aa, synthetic construct
VIAPVNN

SEQ ID NO: 10722 - protein, 7 aa, synthetic construct
IEFQGGV

SEQ ID NO: 10723 - protein, 7 aa, synthetic construct
EWKNAGY

SEQ ID NO: 10724 - protein, 7 aa, synthetic construct
GVNDKRF

SEQ ID NO: 10725 - protein, 7 aa, synthetic construct
GEMDLPP

SEQ ID NO: 10726 - protein, 7 aa, synthetic construct
WSNYVVS

SEQ ID NO: 10727 - protein, 7 aa, synthetic construct
LMPSVAD

SEQ ID NO: 10728 - protein, 7 aa, synthetic construct
FQQEDGM

SEQ ID NO: 10729 - protein, 7 aa, synthetic construct
ETVPIKS

SEQ ID NO: 10730 - protein, 7 aa, synthetic construct
TVSPEQN

SEQ ID NO: 10731 - protein, 7 aa, synthetic construct
TAPISVK

SEQ ID NO: 10732 - protein, 7 aa, synthetic construct
HSVQEII

SEQ ID NO: 10733 - protein, 7 aa, synthetic construct
PTRQMGH

SEQ ID NO: 10734 - protein, 7 aa, synthetic construct
RSEHFVP

SEQ ID NO: 10735 - protein, 7 aa, synthetic construct
GTEMMKD

SEQ ID NO: 10736 - protein, 7 aa, synthetic construct
DRIHLKT

SEQ ID NO: 10737 - protein, 7 aa, synthetic construct
KALAHGI

SEQ ID NO: 10738 - protein, 7 aa, synthetic construct
MSNNYSD

SEQ ID NO: 10739 - protein, 7 aa, synthetic construct
YNHARTQ

SEQ ID NO: 10740 - protein, 7 aa, synthetic construct
QIDQLDS

SEQ ID NO: 10741 - protein, 7 aa, synthetic construct
IIREPEY

SEQ ID NO: 10742 - protein, 7 aa, synthetic construct
VDPPYRL

SEQ ID NO: 10743 - protein, 7 aa, synthetic construct
YQSIKPN

SEQ ID NO: 10744 - protein, 7 aa, synthetic construct
ATNYQAG

SEQ ID NO: 10745 - protein, 7 aa, synthetic construct
TLLAQED

SEQ ID NO: 10746 - protein, 7 aa, synthetic construct
KLKIADF

SEQ ID NO: 10747 - protein, 7 aa, synthetic construct
DSQLDAR

SEQ ID NO: 10748 - protein, 7 aa, synthetic construct
GKDEQLH

SEQ ID NO: 10749 - protein, 7 aa, synthetic construct
YDDMHDN

SEQ ID NO: 10750 - protein, 7 aa, synthetic construct
GASAFKQ

SEQ ID NO: 10751 - protein, 7 aa, synthetic construct
GAMRLMD

SEQ ID NO: 10752 - protein, 7 aa, synthetic construct
MADQASW

SEQ ID NO: 10753 - protein, 7 aa, synthetic construct
DVQIQRV

SEQ ID NO: 10754 - protein, 7 aa, synthetic construct
LFTLQDP

SEQ ID NO: 10755 - protein, 7 aa, synthetic construct
LKTDQPD

SEQ ID NO: 10756 - protein, 7 aa, synthetic construct
VMMQQMP

SEQ ID NO: 10757 - protein, 7 aa, synthetic construct
LIVGMNN

SEQ ID NO: 10758 - protein, 7 aa, synthetic construct
KETAVPG

SEQ ID NO: 10759 - protein, 7 aa, synthetic construct
DYGEHGL

SEQ ID NO: 10760 - protein, 7 aa, synthetic construct
HVPSPPS

SEQ ID NO: 10761 - protein, 7 aa, synthetic construct
LMSRTTL

SEQ ID NO: 10762 - protein, 7 aa, synthetic construct
LGNEVEY

SEQ ID NO: 10763 - protein, 7 aa, synthetic construct
NEDRMRS

SEQ ID NO: 10764 - protein, 7 aa, synthetic construct
DSKNIFV

SEQ ID NO: 10765 - protein, 7 aa, synthetic construct
AHGYLGD

SEQ ID NO: 10766 - protein, 7 aa, synthetic construct
SEKPMYQ

SEQ ID NO: 10767 - protein, 7 aa, synthetic construct
PHYNMGA

SEQ ID NO: 10768 - protein, 7 aa, synthetic construct
ELIKAYS

SEQ ID NO: 10769 - protein, 7 aa, synthetic construct
QMEMGME

SEQ ID NO: 10770 - protein, 7 aa, synthetic construct
TRVPDQN

SEQ ID NO: 10771 - protein, 7 aa, synthetic construct
WRQGPPV

SEQ ID NO: 10772 - protein, 7 aa, synthetic construct
NLQEDGA

SEQ ID NO: 10773 - protein, 7 aa, synthetic construct
REYHMDI

SEQ ID NO: 10774 - protein, 7 aa, synthetic construct
KHAGYVP

SEQ ID NO: 10775 - protein, 7 aa, synthetic construct
HGVSEGF

SEQ ID NO: 10776 - protein, 7 aa, synthetic construct
MDHVFHD

SEQ ID NO: 10777 - protein, 7 aa, synthetic construct
TVAMKHQ

SEQ ID NO: 10778 - protein, 7 aa, synthetic construct
IHYGMTE

SEQ ID NO: 10779 - protein, 7 aa, synthetic construct
RGEAGET

SEQ ID NO: 10780 - protein, 7 aa, synthetic construct
EDKPTSI

SEQ ID NO: 10781 - protein, 7 aa, synthetic construct
SIHIRGS

SEQ ID NO: 10782 - protein, 7 aa, synthetic construct
NGQWHHA

SEQ ID NO: 10783 - protein, 7 aa, synthetic construct
RNETPLL

SEQ ID NO: 10784 - protein, 7 aa, synthetic construct
NVTAHHY

SEQ ID NO: 10785 - protein, 7 aa, synthetic construct
ERGERPL

SEQ ID NO: 10786 - protein, 7 aa, synthetic construct
RDIAASK

SEQ ID NO: 10787 - protein, 7 aa, synthetic construct
YHEPPED

SEQ ID NO: 10788 - protein, 7 aa, synthetic construct
EMVSVAK

SEQ ID NO: 10789 - protein, 7 aa, synthetic construct
TVTLPQS

SEQ ID NO: 10790 - protein, 7 aa, synthetic construct
AENADLS

SEQ ID NO: 10791 - protein, 7 aa, synthetic construct
HPMEGSE

SEQ ID NO: 10792 - protein, 7 aa, synthetic construct
KMDVYDA

SEQ ID NO: 10793 - protein, 7 aa, synthetic construct
DREQDHY

SEQ ID NO: 10794 - protein, 7 aa, synthetic construct
DFDHLDY

SEQ ID NO: 10795 - protein, 7 aa, synthetic construct
EEKRDPK

SEQ ID NO: 10796 - protein, 7 aa, synthetic construct
TIANMGV

SEQ ID NO: 10797 - protein, 7 aa, synthetic construct
SKMNSLY

SEQ ID NO: 10798 - protein, 7 aa, synthetic construct
MSNGSKC

SEQ ID NO: 10799 - protein, 7 aa, synthetic construct
SGAQEIQ

SEQ ID NO: 10800 - protein, 7 aa, synthetic construct
QDENGGH

SEQ ID NO: 10801 - protein, 7 aa, synthetic construct
WADASNR

SEQ ID NO: 10802 - protein, 7 aa, synthetic construct
QNYHGSL

SEQ ID NO: 10803 - protein, 7 aa, synthetic construct
EIMKTQY

SEQ ID NO: 10804 - protein, 7 aa, synthetic construct
YANLTPK

SEQ ID NO: 10805 - protein, 7 aa, synthetic construct
LENDMKS

SEQ ID NO: 10806 - protein, 7 aa, synthetic construct
ELMPEIN

SEQ ID NO: 10807 - protein, 7 aa, synthetic construct
ISHWVED

SEQ ID NO: 10808 - protein, 7 aa, synthetic construct
KNGIWAA

SEQ ID NO: 10809 - protein, 7 aa, synthetic construct
YGHDYQD

SEQ ID NO: 10810 - protein, 7 aa, synthetic construct
FMERGVM

SEQ ID NO: 10811 - protein, 7 aa, synthetic construct
EEYGGRH

SEQ ID NO: 10812 - protein, 7 aa, synthetic construct
YLDIIPL

SEQ ID NO: 10813 - protein, 7 aa, synthetic construct
QRSEWAL

SEQ ID NO: 10814 - protein, 7 aa, synthetic construct
SKHKVIE

SEQ ID NO: 10815 - protein, 7 aa, synthetic construct
YPDDRIP

SEQ ID NO: 10816 - protein, 7 aa, synthetic construct
GFHGDYA

SEQ ID NO: 10817 - protein, 7 aa, synthetic construct
SEITNQK

SEQ ID NO: 10818 - protein, 7 aa, synthetic construct
IEPRIDH

SEQ ID NO: 10819 - protein, 7 aa, synthetic construct
NHHEIMR

SEQ ID NO: 10820 - protein, 7 aa, synthetic construct
DAQGYAD

SEQ ID NO: 10821 - protein, 7 aa, synthetic construct
HRAPGYD

SEQ ID NO: 10822 - protein, 7 aa, synthetic construct
CQVTDNC

SEQ ID NO: 10823 - protein, 7 aa, synthetic construct
VEQVGIM

SEQ ID NO: 10824 - protein, 7 aa, synthetic construct
WKEERDV

SEQ ID NO: 10825 - protein, 7 aa, synthetic construct
AARSYDP

SEQ ID NO: 10826 - protein, 7 aa, synthetic construct
VETRKTG

SEQ ID NO: 10827 - protein, 7 aa, synthetic construct
TDQIKLQ

SEQ ID NO: 10828 - protein, 7 aa, synthetic construct
QASMIRQ

SEQ ID NO: 10829 - protein, 7 aa, synthetic construct
NPVKDNG

SEQ ID NO: 10830 - protein, 7 aa, synthetic construct
ILKQEIK

SEQ ID NO: 10831 - protein, 7 aa, synthetic construct
GPMPRAE

SEQ ID NO: 10832 - protein, 7 aa, synthetic construct
SYAHHMP

SEQ ID NO: 10833 - protein, 7 aa, synthetic construct
VVAERAL

SEQ ID NO: 10834 - protein, 7 aa, synthetic construct
SKSLQSG

SEQ ID NO: 10835 - protein, 7 aa, synthetic construct
DGVSSSE

SEQ ID NO: 10836 - protein, 7 aa, synthetic construct
AVAPDVK

SEQ ID NO: 10837 - protein, 7 aa, synthetic construct
VNLGTMA

SEQ ID NO: 10838 - protein, 7 aa, synthetic construct
VHMPPAH

SEQ ID NO: 10839 - protein, 7 aa, synthetic construct
TYSEPRH

SEQ ID NO: 10840 - protein, 7 aa, synthetic construct
KINMFDD

SEQ ID NO: 10841 - protein, 7 aa, synthetic construct
QQEIKWT

SEQ ID NO: 10842 - protein, 7 aa, synthetic construct
LSQFEIK

SEQ ID NO: 10843 - protein, 7 aa, synthetic construct
KQGDDVM

SEQ ID NO: 10844 - protein, 7 aa, synthetic construct
MPNLQQV

SEQ ID NO: 10845 - protein, 7 aa, synthetic construct
DPTASKH

SEQ ID NO: 10846 - protein, 7 aa, synthetic construct
PDKPEMS

SEQ ID NO: 10847 - protein, 7 aa, synthetic construct
QYQMVNK

SEQ ID NO: 10848 - protein, 7 aa, synthetic construct
EVQFHDD

SEQ ID NO: 10849 - protein, 7 aa, synthetic construct
IVNHHPV

SEQ ID NO: 10850 - protein, 7 aa, synthetic construct
WDRDERG

SEQ ID NO: 10851 - protein, 7 aa, synthetic construct
QMANTAM

SEQ ID NO: 10852 - protein, 7 aa, synthetic construct
FLKGADR

SEQ ID NO: 10853 - protein, 7 aa, synthetic construct
GTPDRNE

SEQ ID NO: 10854 - protein, 7 aa, synthetic construct
RGISHPV

SEQ ID NO: 10855 - protein, 7 aa, synthetic construct
YMIENNK

SEQ ID NO: 10856 - protein, 7 aa, synthetic construct
FGTQINM

SEQ ID NO: 10857 - protein, 7 aa, synthetic construct
HNAVPEF

SEQ ID NO: 10858 - protein, 7 aa, synthetic construct
VKFEMKM

SEQ ID NO: 10859 - protein, 7 aa, synthetic construct
NDREDFY

SEQ ID NO: 10860 - protein, 7 aa, synthetic construct
DEARAPD

SEQ ID NO: 10861 - protein, 7 aa, synthetic construct
HVLAHNS

SEQ ID NO: 10862 - protein, 7 aa, synthetic construct
DEHQPLR

SEQ ID NO: 10863 - protein, 7 aa, synthetic construct
TSYQREK

SEQ ID NO: 10864 - protein, 7 aa, synthetic construct
IPSDQNH

SEQ ID NO: 10865 - protein, 7 aa, synthetic construct
SIQNSFS

SEQ ID NO: 10866 - protein, 7 aa, synthetic construct
GNYSDGT

SEQ ID NO: 10867 - protein, 7 aa, synthetic construct
AMTSFTE

SEQ ID NO: 10868 - protein, 7 aa, synthetic construct
VSVNFNP

SEQ ID NO: 10869 - protein, 7 aa, synthetic construct
IPPGLTR

SEQ ID NO: 10870 - protein, 7 aa, synthetic construct
SKDIPKD

SEQ ID NO: 10871 - protein, 7 aa, synthetic construct
GPFPGYE

SEQ ID NO: 10872 - protein, 7 aa, synthetic construct
IRQSHVF

SEQ ID NO: 10873 - protein, 7 aa, synthetic construct
NSPYAKQ

SEQ ID NO: 10874 - protein, 7 aa, synthetic construct
ANFQNVT

SEQ ID NO: 10875 - protein, 7 aa, synthetic construct
SVAINKL

SEQ ID NO: 10876 - protein, 7 aa, synthetic construct
TYGHISQ

SEQ ID NO: 10877 - protein, 7 aa, synthetic construct
EAPSGNG

SEQ ID NO: 10878 - protein, 7 aa, synthetic construct
GKFDVTD

SEQ ID NO: 10879 - protein, 7 aa, synthetic construct
SASAMAV

SEQ ID NO: 10880 - protein, 7 aa, synthetic construct
NKIMMLG

SEQ ID NO: 10881 - protein, 7 aa, synthetic construct
EQDRMRN

SEQ ID NO: 10882 - protein, 7 aa, synthetic construct
REVVYDH

SEQ ID NO: 10883 - protein, 7 aa, synthetic construct
HTGAEKE

SEQ ID NO: 10884 - protein, 7 aa, synthetic construct
MEKQLHT

SEQ ID NO: 10885 - protein, 7 aa, synthetic construct
PEKMMIT

SEQ ID NO: 10886 - protein, 7 aa, synthetic construct
KRFDEYP

SEQ ID NO: 10887 - protein, 7 aa, synthetic construct
EHTVMHR

SEQ ID NO: 10888 - protein, 7 aa, synthetic construct
EHYKEKA

SEQ ID NO: 10889 - protein, 7 aa, synthetic construct
VEEMNTR

SEQ ID NO: 10890 - protein, 7 aa, synthetic construct
AFGAYNP

SEQ ID NO: 10891 - protein, 7 aa, synthetic construct
QWDEAQK

SEQ ID NO: 10892 - protein, 7 aa, synthetic construct
HPKAIMG

SEQ ID NO: 10893 - protein, 7 aa, synthetic construct
FNELKMT

SEQ ID NO: 10894 - protein, 7 aa, synthetic construct
SENGSMK

SEQ ID NO: 10895 - protein, 7 aa, synthetic construct
DHMEEQS

SEQ ID NO: 10896 - protein, 7 aa, synthetic construct
EMPRFTD

SEQ ID NO: 10897 - protein, 7 aa, synthetic construct
TFQGEVT

SEQ ID NO: 10898 - protein, 7 aa, synthetic construct
NKIQNFT

SEQ ID NO: 10899 - protein, 7 aa, synthetic construct
HDMKKGS

SEQ ID NO: 10900 - protein, 7 aa, synthetic construct
HPIGPNE

SEQ ID NO: 10901 - protein, 7 aa, synthetic construct
TTRHMED

SEQ ID NO: 10902 - protein, 7 aa, synthetic construct
SGKDVSP

SEQ ID NO: 10903 - protein, 7 aa, synthetic construct
SPRQIAL

SEQ ID NO: 10904 - protein, 7 aa, synthetic construct
NWNEQQP

SEQ ID NO: 10905 - protein, 7 aa, synthetic construct
PVHSLAD

SEQ ID NO: 10906 - protein, 7 aa, synthetic construct
EVSRDGI

SEQ ID NO: 10907 - protein, 7 aa, synthetic construct
EEALGSM

SEQ ID NO: 10908 - protein, 7 aa, synthetic construct
SVNPETV

SEQ ID NO: 10909 - protein, 7 aa, synthetic construct
RDELGQD

SEQ ID NO: 10910 - protein, 7 aa, synthetic construct
TVNAEIT

SEQ ID NO: 10911 - protein, 7 aa, synthetic construct
EDHIAPP

SEQ ID NO: 10912 - protein, 7 aa, synthetic construct
GTSNMDI

SEQ ID NO: 10913 - protein, 7 aa, synthetic construct
PDGAGHG

SEQ ID NO: 10914 - protein, 7 aa, synthetic construct
IHVGKPT

SEQ ID NO: 10915 - protein, 7 aa, synthetic construct
QKERDYL

SEQ ID NO: 10916 - protein, 7 aa, synthetic construct
GDSTVGH

SEQ ID NO: 10917 - protein, 7 aa, synthetic construct
ISETIAN

SEQ ID NO: 10918 - protein, 7 aa, synthetic construct
TASKADE

SEQ ID NO: 10919 - protein, 7 aa, synthetic construct
AHTYQQA

SEQ ID NO: 10920 - protein, 7 aa, synthetic construct
RERDYDK

SEQ ID NO: 10921 - protein, 7 aa, synthetic construct
EGFEAYP

SEQ ID NO: 10922 - protein, 7 aa, synthetic construct
QNDDFSV

SEQ ID NO: 10923 - protein, 7 aa, synthetic construct
LRTMSHN

SEQ ID NO: 10924 - protein, 7 aa, synthetic construct
GPGTMEI

SEQ ID NO: 10925 - protein, 7 aa, synthetic construct
GSHLGVV

SEQ ID NO: 10926 - protein, 7 aa, synthetic construct
EKAEAQR

SEQ ID NO: 10927 - protein, 7 aa, synthetic construct
PTGENYY

SEQ ID NO: 10928 - protein, 7 aa, synthetic construct
THKQSNH

SEQ ID NO: 10929 - protein, 7 aa, synthetic construct
GSFSPDK

SEQ ID NO: 10930 - protein, 7 aa, synthetic construct
HGENSMV

SEQ ID NO: 10931 - protein, 7 aa, synthetic construct
EVFDRSG

SEQ ID NO: 10932 - protein, 7 aa, synthetic construct
DGKISEP

SEQ ID NO: 10933 - protein, 7 aa, synthetic construct
FDRGEMM

SEQ ID NO: 10934 - protein, 7 aa, synthetic construct
FNSQFGK

SEQ ID NO: 10935 - protein, 7 aa, synthetic construct
VQDLQSW

SEQ ID NO: 10936 - protein, 7 aa, synthetic construct
PKDIKPI

SEQ ID NO: 10937 - protein, 7 aa, synthetic construct
FHGVEQA

SEQ ID NO: 10938 - protein, 7 aa, synthetic construct
GMMQKEW

SEQ ID NO: 10939 - protein, 7 aa, synthetic construct
WRGVMAQ

SEQ ID NO: 10940 - protein, 7 aa, synthetic construct
MDTEGSS

SEQ ID NO: 10941 - protein, 7 aa, synthetic construct
ESYANQS

SEQ ID NO: 10942 - protein, 7 aa, synthetic construct
TDSYHGI

SEQ ID NO: 10943 - protein, 7 aa, synthetic construct
FFEAERA

SEQ ID NO: 10944 - protein, 7 aa, synthetic construct
KLVVTSP

SEQ ID NO: 10945 - protein, 7 aa, synthetic construct
EEVRPER

SEQ ID NO: 10946 - protein, 7 aa, synthetic construct
VRSEGWT

SEQ ID NO: 10947 - protein, 7 aa, synthetic construct
GRQQMTQ

SEQ ID NO: 10948 - protein, 7 aa, synthetic construct
NNDKKST

SEQ ID NO: 10949 - protein, 7 aa, synthetic construct
DYVPDVA

SEQ ID NO: 10950 - protein, 7 aa, synthetic construct
ANRNMGD

SEQ ID NO: 10951 - protein, 7 aa, synthetic construct
EGVKITF

SEQ ID NO: 10952 - protein, 7 aa, synthetic construct
PVDVHMA

SEQ ID NO: 10953 - protein, 7 aa, synthetic construct
RADWDSA

SEQ ID NO: 10954 - protein, 7 aa, synthetic construct
IHDSALQ

SEQ ID NO: 10955 - protein, 7 aa, synthetic construct
FKPDQNQ

SEQ ID NO: 10956 - protein, 7 aa, synthetic construct
QYEPNEG

SEQ ID NO: 10957 - protein, 7 aa, synthetic construct
DAHSGGM

SEQ ID NO: 10958 - protein, 7 aa, synthetic construct
FMPEYMG

SEQ ID NO: 10959 - protein, 7 aa, synthetic construct
EHAARNT

SEQ ID NO: 10960 - protein, 7 aa, synthetic construct
KEQAGDS

SEQ ID NO: 10961 - protein, 7 aa, synthetic construct
TKDGHVT

SEQ ID NO: 10962 - protein, 7 aa, synthetic construct
HETKDHF

SEQ ID NO: 10963 - protein, 7 aa, synthetic construct
DSRLDPF

SEQ ID NO: 10964 - protein, 7 aa, synthetic construct
HEMKAEA

SEQ ID NO: 10965 - protein, 7 aa, synthetic construct
WEHGEHV

SEQ ID NO: 10966 - protein, 7 aa, synthetic construct
SYPPINS

SEQ ID NO: 10967 - protein, 7 aa, synthetic construct
EIWKEGA

SEQ ID NO: 10968 - protein, 7 aa, synthetic construct
KYGTSDM

SEQ ID NO: 10969 - protein, 7 aa, synthetic construct
AKQQDGD

SEQ ID NO: 10970 - protein, 7 aa, synthetic construct
GEIFTVG

SEQ ID NO: 10971 - protein, 7 aa, synthetic construct
ENAKAQK

SEQ ID NO: 10972 - protein, 7 aa, synthetic construct
FTPEVDR

SEQ ID NO: 10973 - protein, 7 aa, synthetic construct
VFTTTSE

SEQ ID NO: 10974 - protein, 7 aa, synthetic construct
KSMMAQP

SEQ ID NO: 10975 - protein, 7 aa, synthetic construct
FAGTEAP

SEQ ID NO: 10976 - protein, 7 aa, synthetic construct
SSQLDAL

SEQ ID NO: 10977 - protein, 7 aa, synthetic construct
TITLHRG

SEQ ID NO: 10978 - protein, 7 aa, synthetic construct
QWTQEEF

SEQ ID NO: 10979 - protein, 7 aa, synthetic construct
TQAPPTK

SEQ ID NO: 10980 - protein, 7 aa, synthetic construct
WRPNNDI

SEQ ID NO: 10981 - protein, 7 aa, synthetic construct
KPADIHR

SEQ ID NO: 10982 - protein, 7 aa, synthetic construct
DLRYVSE

SEQ ID NO: 10983 - protein, 7 aa, synthetic construct
QLQQSYP

SEQ ID NO: 10984 - protein, 7 aa, synthetic construct
PNDFMNE

SEQ ID NO: 10985 - protein, 7 aa, synthetic construct
EYSKPQH

SEQ ID NO: 10986 - protein, 7 aa, synthetic construct
HPPAIPM

SEQ ID NO: 10987 - protein, 7 aa, synthetic construct
QPDEKEG

SEQ ID NO: 10988 - protein, 7 aa, synthetic construct
HRTETLE

SEQ ID NO: 10989 - protein, 7 aa, synthetic construct
KIDNTVV

SEQ ID NO: 10990 - protein, 7 aa, synthetic construct
NNQEENF

SEQ ID NO: 10991 - protein, 7 aa, synthetic construct
TGLKHFD

SEQ ID NO: 10992 - protein, 7 aa, synthetic construct
IPPVIIE

SEQ ID NO: 10993 - protein, 7 aa, synthetic construct
REDHEKQ

SEQ ID NO: 10994 - protein, 7 aa, synthetic construct
KYNGISH

SEQ ID NO: 10995 - protein, 7 aa, synthetic construct
NTPKAHE

SEQ ID NO: 10996 - protein, 7 aa, synthetic construct
WTDLKTD

SEQ ID NO: 10997 - protein, 7 aa, synthetic construct
IDKSPEH

SEQ ID NO: 10998 - protein, 7 aa, synthetic construct
MEQSNSI

SEQ ID NO: 10999 - protein, 7 aa, synthetic construct
AEMWKDD

SEQ ID NO: 11000 - protein, 7 aa, synthetic construct
FDDHVHA

SEQ ID NO: 11001 - protein, 7 aa, synthetic construct
VSSAEPW

SEQ ID NO: 11002 - protein, 7 aa, synthetic construct
NGMLEAS

SEQ ID NO: 11003 - protein, 7 aa, synthetic construct
WKGVAAV

SEQ ID NO: 11004 - protein, 7 aa, synthetic construct
DAQDGKH

SEQ ID NO: 11005 - protein, 7 aa, synthetic construct
RSQFHGP

SEQ ID NO: 11006 - protein, 7 aa, synthetic construct
MADASTW

SEQ ID NO: 11007 - protein, 7 aa, synthetic construct
PHKGREE

SEQ ID NO: 11008 - protein, 7 aa, synthetic construct
MHEVMER

SEQ ID NO: 11009 - protein, 7 aa, synthetic construct
LTMQQET

SEQ ID NO: 11010 - protein, 7 aa, synthetic construct
PGVVARA

SEQ ID NO: 11011 - protein, 7 aa, synthetic construct
NAPQQNM

SEQ ID NO: 11012 - protein, 7 aa, synthetic construct
PGLRATS

SEQ ID NO: 11013 - protein, 7 aa, synthetic construct
ATDGTND

SEQ ID NO: 11014 - protein, 7 aa, synthetic construct
SGFSSVH

SEQ ID NO: 11015 - protein, 7 aa, synthetic construct
GRGEKLV

SEQ ID NO: 11016 - protein, 7 aa, synthetic construct
NTSAVQQ

SEQ ID NO: 11017 - protein, 7 aa, synthetic construct
FISEGDR

SEQ ID NO: 11018 - protein, 7 aa, synthetic construct
KHDPDDS

SEQ ID NO: 11019 - protein, 7 aa, synthetic construct
KEPMLDF

SEQ ID NO: 11020 - protein, 7 aa, synthetic construct
MIGVKFT

SEQ ID NO: 11021 - protein, 7 aa, synthetic construct
STFDADS

SEQ ID NO: 11022 - protein, 7 aa, synthetic construct
QDLGEIR

SEQ ID NO: 11023 - protein, 7 aa, synthetic construct
NIQIEMD

SEQ ID NO: 11024 - protein, 7 aa, synthetic construct
GIAVQHY

SEQ ID NO: 11025 - protein, 7 aa, synthetic construct
TSDSNTS

SEQ ID NO: 11026 - protein, 7 aa, synthetic construct
NFVHAKP

SEQ ID NO: 11027 - protein, 7 aa, synthetic construct
GGDGSDV

SEQ ID NO: 11028 - protein, 7 aa, synthetic construct
NGSGDSF

SEQ ID NO: 11029 - protein, 7 aa, synthetic construct
NGEPHTY

SEQ ID NO: 11030 - protein, 7 aa, synthetic construct
NFRQQLS

SEQ ID NO: 11031 - protein, 7 aa, synthetic construct
SQQQDRV

SEQ ID NO: 11032 - protein, 7 aa, synthetic construct
HGPDLNP

SEQ ID NO: 11033 - protein, 7 aa, synthetic construct
ASNPDSV

SEQ ID NO: 11034 - protein, 7 aa, synthetic construct
ERHMDID

SEQ ID NO: 11035 - protein, 7 aa, synthetic construct
QDPVWKT

SEQ ID NO: 11036 - protein, 7 aa, synthetic construct
VKDRVDQ

SEQ ID NO: 11037 - protein, 7 aa, synthetic construct
QVHETVE

SEQ ID NO: 11038 - protein, 7 aa, synthetic construct
EGYPVTE

SEQ ID NO: 11039 - protein, 7 aa, synthetic construct
PYAEGAG

SEQ ID NO: 11040 - protein, 7 aa, synthetic construct
SMKNDLI

SEQ ID NO: 11041 - protein, 7 aa, synthetic construct
VNLPIDH

SEQ ID NO: 11042 - protein, 7 aa, synthetic construct
FNLGQQV

SEQ ID NO: 11043 - protein, 7 aa, synthetic construct
SHTGAIL

SEQ ID NO: 11044 - protein, 7 aa, synthetic construct
IIANVKE

SEQ ID NO: 11045 - protein, 7 aa, synthetic construct
WTNAFKE

SEQ ID NO: 11046 - protein, 7 aa, synthetic construct
RHQMKDI

SEQ ID NO: 11047 - protein, 7 aa, synthetic construct
EARSPLK

SEQ ID NO: 11048 - protein, 7 aa, synthetic construct
NDDPNWG

SEQ ID NO: 11049 - protein, 7 aa, synthetic construct
YMDKTDE

SEQ ID NO: 11050 - protein, 7 aa, synthetic construct
IGMVNVN

SEQ ID NO: 11051 - protein, 7 aa, synthetic construct
MGQENQS

SEQ ID NO: 11052 - protein, 7 aa, synthetic construct
NESLVQV

SEQ ID NO: 11053 - protein, 7 aa, synthetic construct
VDAAYRH

SEQ ID NO: 11054 - protein, 7 aa, synthetic construct
RYASNDI

SEQ ID NO: 11055 - protein, 7 aa, synthetic construct
NSGSFEE

SEQ ID NO: 11056 - protein, 7 aa, synthetic construct
IYNEIVQ

SEQ ID NO: 11057 - protein, 7 aa, synthetic construct
ATAQPIE

SEQ ID NO: 11058 - protein, 7 aa, synthetic construct
AALPQLK

SEQ ID NO: 11059 - protein, 7 aa, synthetic construct
DHTYEDK

SEQ ID NO: 11060 - protein, 7 aa, synthetic construct
HVDMPNG

SEQ ID NO: 11061 - protein, 7 aa, synthetic construct
IVDVGVG

SEQ ID NO: 11062 - protein, 7 aa, synthetic construct
MGQKEKN

SEQ ID NO: 11063 - protein, 7 aa, synthetic construct
IYLSSQS

SEQ ID NO: 11064 - protein, 7 aa, synthetic construct
PAPTKEV

SEQ ID NO: 11065 - protein, 7 aa, synthetic construct
DAKSIGH

SEQ ID NO: 11066 - protein, 7 aa, synthetic construct
PAQMQHS

SEQ ID NO: 11067 - protein, 7 aa, synthetic construct
REQPPTM

SEQ ID NO: 11068 - protein, 7 aa, synthetic construct
RFENPHA

SEQ ID NO: 11069 - protein, 7 aa, synthetic construct
WGTMTDV

SEQ ID NO: 11070 - protein, 7 aa, synthetic construct
TRPLHGS

SEQ ID NO: 11071 - protein, 7 aa, synthetic construct
SLAQAKI

SEQ ID NO: 11072 - protein, 7 aa, synthetic construct
YPFKPDN

SEQ ID NO: 11073 - protein, 7 aa, synthetic construct
WQKDQIA

SEQ ID NO: 11074 - protein, 7 aa, synthetic construct
DAEKAQV

SEQ ID NO: 11075 - protein, 7 aa, synthetic construct
EHAADNE

SEQ ID NO: 11076 - protein, 7 aa, synthetic construct
MFEVQTG

SEQ ID NO: 11077 - protein, 7 aa, synthetic construct
HPAKMLQ

SEQ ID NO: 11078 - protein, 7 aa, synthetic construct
STDPIFG

SEQ ID NO: 11079 - protein, 7 aa, synthetic construct
AGPRFEK

SEQ ID NO: 11080 - protein, 7 aa, synthetic construct
NEVAGPW

SEQ ID NO: 11081 - protein, 7 aa, synthetic construct
QELQRTM

SEQ ID NO: 11082 - protein, 7 aa, synthetic construct
HAYDAKM

SEQ ID NO: 11083 - protein, 7 aa, synthetic construct
MSDMQSH

SEQ ID NO: 11084 - protein, 7 aa, synthetic construct
YLAGNEE

SEQ ID NO: 11085 - protein, 7 aa, synthetic construct
IPDVPAQ

SEQ ID NO: 11086 - protein, 7 aa, synthetic construct
PGVGMQT

SEQ ID NO: 11087 - protein, 7 aa, synthetic construct
ENKTLMF

SEQ ID NO: 11088 - protein, 7 aa, synthetic construct
QMIAPDA

SEQ ID NO: 11089 - protein, 7 aa, synthetic construct
GNGYAEA

SEQ ID NO: 11090 - protein, 7 aa, synthetic construct
KGETAHH

SEQ ID NO: 11091 - protein, 7 aa, synthetic construct
HVIPANH

SEQ ID NO: 11092 - protein, 7 aa, synthetic construct
INERKEW

SEQ ID NO: 11093 - protein, 7 aa, synthetic construct
HAYNEGG

SEQ ID NO: 11094 - protein, 7 aa, synthetic construct
QDDKIDW

SEQ ID NO: 11095 - protein, 7 aa, synthetic construct
GVGASFE

SEQ ID NO: 11096 - protein, 7 aa, synthetic construct
SWTGSDK

SEQ ID NO: 11097 - protein, 7 aa, synthetic construct
DVPKPKD

SEQ ID NO: 11098 - protein, 7 aa, synthetic construct
KNMNYEF

SEQ ID NO: 11099 - protein, 7 aa, synthetic construct
WEQSTNH

SEQ ID NO: 11100 - protein, 7 aa, synthetic construct
ETEHVSM

SEQ ID NO: 11101 - protein, 7 aa, synthetic construct
RGQGDHR

SEQ ID NO: 11102 - protein, 7 aa, synthetic construct
EQLRKTP

SEQ ID NO: 11103 - protein, 7 aa, synthetic construct
WQDGDMV

SEQ ID NO: 11104 - protein, 7 aa, synthetic construct
GFPGTDM

SEQ ID NO: 11105 - protein, 7 aa, synthetic construct
ISTEKIQ

SEQ ID NO: 11106 - protein, 7 aa, synthetic construct
ENEHKGL

SEQ ID NO: 11107 - protein, 7 aa, synthetic construct
MDREMDN

SEQ ID NO: 11108 - protein, 7 aa, synthetic construct
HTDFGFE

SEQ ID NO: 11109 - protein, 7 aa, synthetic construct
GHTLSLE

SEQ ID NO: 11110 - protein, 7 aa, synthetic construct
TPGPMHD

SEQ ID NO: 11111 - protein, 7 aa, synthetic construct
PILKTVG

SEQ ID NO: 11112 - protein, 7 aa, synthetic construct
IKQDEDL

SEQ ID NO: 11113 - protein, 7 aa, synthetic construct
GPAEFKD

SEQ ID NO: 11114 - protein, 7 aa, synthetic construct
EPAIMDA

SEQ ID NO: 11115 - protein, 7 aa, synthetic construct
RLNEGET

SEQ ID NO: 11116 - protein, 7 aa, synthetic construct
SETTGIM

SEQ ID NO: 11117 - protein, 7 aa, synthetic construct
NHKNAQN

SEQ ID NO: 11118 - protein, 7 aa, synthetic construct
LKEDIDR

SEQ ID NO: 11119 - protein, 7 aa, synthetic construct
PQMMSRG

SEQ ID NO: 11120 - protein, 7 aa, synthetic construct
VYSENQK

SEQ ID NO: 11121 - protein, 7 aa, synthetic construct
ENIKAYV

SEQ ID NO: 11122 - protein, 7 aa, synthetic construct
KKHELQL

SEQ ID NO: 11123 - protein, 7 aa, synthetic construct
EDRGIKN

SEQ ID NO: 11124 - protein, 7 aa, synthetic construct
LDKSMRQ

SEQ ID NO: 11125 - protein, 7 aa, synthetic construct
GYSEHGM

SEQ ID NO: 11126 - protein, 7 aa, synthetic construct
QADAFPN

SEQ ID NO: 11127 - protein, 7 aa, synthetic construct
WITGDSM

SEQ ID NO: 11128 - protein, 7 aa, synthetic construct
RDIQGNM

SEQ ID NO: 11129 - protein, 7 aa, synthetic construct
HQSMQHD

SEQ ID NO: 11130 - protein, 7 aa, synthetic construct
DLKGTME

SEQ ID NO: 11131 - protein, 7 aa, synthetic construct
IMESVPK

SEQ ID NO: 11132 - protein, 7 aa, synthetic construct
NMQVTIQ

SEQ ID NO: 11133 - protein, 7 aa, synthetic construct
IDSNHIQ

SEQ ID NO: 11134 - protein, 7 aa, synthetic construct
FYNDPMM

SEQ ID NO: 11135 - protein, 7 aa, synthetic construct
TWSHSGV

SEQ ID NO: 11136 - protein, 7 aa, synthetic construct
FKSVEWG

SEQ ID NO: 11137 - protein, 7 aa, synthetic construct
TNSDTIN

SEQ ID NO: 11138 - protein, 7 aa, synthetic construct
EHPHVNP

SEQ ID NO: 11139 - protein, 7 aa, synthetic construct
NSVRMKD

SEQ ID NO: 11140 - protein, 7 aa, synthetic construct
EDWKSRM

SEQ ID NO: 11141 - protein, 7 aa, synthetic construct
FSGPDQE

SEQ ID NO: 11142 - protein, 7 aa, synthetic construct
ATQMTKG

SEQ ID NO: 11143 - protein, 7 aa, synthetic construct
TWDRQVT

SEQ ID NO: 11144 - protein, 7 aa, synthetic construct
WPKQEQV

SEQ ID NO: 11145 - protein, 7 aa, synthetic construct
PADAYEY

SEQ ID NO: 11146 - protein, 7 aa, synthetic construct
QIGDYRE

SEQ ID NO: 11147 - protein, 7 aa, synthetic construct
TELAGRM

SEQ ID NO: 11148 - protein, 7 aa, synthetic construct
PQAQGEI

SEQ ID NO: 11149 - protein, 7 aa, synthetic construct
HKSEKSN

SEQ ID NO: 11150 - protein, 7 aa, synthetic construct
IFDHYPQ

SEQ ID NO: 11151 - protein, 7 aa, synthetic construct
PKSLYDD

SEQ ID NO: 11152 - protein, 7 aa, synthetic construct
VLMGQLP

SEQ ID NO: 11153 - protein, 7 aa, synthetic construct
ATLDAQE

SEQ ID NO: 11154 - protein, 7 aa, synthetic construct
MDQSKLD

SEQ ID NO: 11155 - protein, 7 aa, synthetic construct
LLQSARN

SEQ ID NO: 11156 - protein, 7 aa, synthetic construct
LPAPDPV

SEQ ID NO: 11157 - protein, 7 aa, synthetic construct
LSQDTIF

SEQ ID NO: 11158 - protein, 7 aa, synthetic construct
PLMEKGG

SEQ ID NO: 11159 - protein, 7 aa, synthetic construct
VSDTISP

SEQ ID NO: 11160 - protein, 7 aa, synthetic construct
KDGGLRL

SEQ ID NO: 11161 - protein, 7 aa, synthetic construct
PHHIEVT

SEQ ID NO: 11162 - protein, 7 aa, synthetic construct
GHDIGQT

SEQ ID NO: 11163 - protein, 7 aa, synthetic construct
VDQIKIQ

SEQ ID NO: 11164 - protein, 7 aa, synthetic construct
QQDDYPQ

SEQ ID NO: 11165 - protein, 7 aa, synthetic construct
NVAVMEG

SEQ ID NO: 11166 - protein, 7 aa, synthetic construct
SDVIRSL

SEQ ID NO: 11167 - protein, 7 aa, synthetic construct
RSVQTYS

SEQ ID NO: 11168 - protein, 7 aa, synthetic construct
LHYNQTP

SEQ ID NO: 11169 - protein, 7 aa, synthetic construct
MFSPHEL

SEQ ID NO: 11170 - protein, 7 aa, synthetic construct
LMPQFSN

SEQ ID NO: 11171 - protein, 7 aa, synthetic construct
MDDFVDA

SEQ ID NO: 11172 - protein, 7 aa, synthetic construct
VLYDGQP

SEQ ID NO: 11173 - protein, 7 aa, synthetic construct
HDHNNDY

SEQ ID NO: 11174 - protein, 7 aa, synthetic construct
VMSGDSD

SEQ ID NO: 11175 - protein, 7 aa, synthetic construct
FNANPPT

SEQ ID NO: 11176 - protein, 7 aa, synthetic construct
PITHEEK

SEQ ID NO: 11177 - protein, 7 aa, synthetic construct
TGQFPAM

SEQ ID NO: 11178 - protein, 7 aa, synthetic construct
GMKVHER

SEQ ID NO: 11179 - protein, 7 aa, synthetic construct
TQMRVDW

SEQ ID NO: 11180 - protein, 7 aa, synthetic construct
HDITIGS

SEQ ID NO: 11181 - protein, 7 aa, synthetic construct
ILGSNRN

SEQ ID NO: 11182 - protein, 7 aa, synthetic construct
FMNEGMQ

SEQ ID NO: 11183 - protein, 7 aa, synthetic construct
VNQAIET

SEQ ID NO: 11184 - protein, 7 aa, synthetic construct
QVQNLHE

SEQ ID NO: 11185 - protein, 7 aa, synthetic construct
EGKVDET

SEQ ID NO: 11186 - protein, 7 aa, synthetic construct
MLSEMEL

SEQ ID NO: 11187 - protein, 7 aa, synthetic construct
QSHPEMK

SEQ ID NO: 11188 - protein, 7 aa, synthetic construct
LVGSMPG

SEQ ID NO: 11189 - protein, 7 aa, synthetic construct
PVPNTII

SEQ ID NO: 11190 - protein, 7 aa, synthetic construct
MNDSPRH

SEQ ID NO: 11191 - protein, 7 aa, synthetic construct
IFVQAQA

SEQ ID NO: 11192 - protein, 7 aa, synthetic construct
ASGFEDV

SEQ ID NO: 11193 - protein, 7 aa, synthetic construct
DMHSYEA

SEQ ID NO: 11194 - protein, 7 aa, synthetic construct
IHGEVIS

SEQ ID NO: 11195 - protein, 7 aa, synthetic construct
KEPWEIE

SEQ ID NO: 11196 - protein, 7 aa, synthetic construct
SHQSLTG

SEQ ID NO: 11197 - protein, 7 aa, synthetic construct
HLSIRDP

SEQ ID NO: 11198 - protein, 7 aa, synthetic construct
HVHVAGA

SEQ ID NO: 11199 - protein, 7 aa, synthetic construct
SANLLHP

SEQ ID NO: 11200 - protein, 7 aa, synthetic construct
SGERDLP

SEQ ID NO: 11201 - protein, 7 aa, synthetic construct
FAKKGND

SEQ ID NO: 11202 - protein, 7 aa, synthetic construct
FVDKPEH

SEQ ID NO: 11203 - protein, 7 aa, synthetic construct
NTNKTFI

SEQ ID NO: 11204 - protein, 7 aa, synthetic construct
QNQLTEG

SEQ ID NO: 11205 - protein, 7 aa, synthetic construct
YWQAHEP

SEQ ID NO: 11206 - protein, 7 aa, synthetic construct
MFQPEST

SEQ ID NO: 11207 - protein, 7 aa, synthetic construct
NDVLKYP

SEQ ID NO: 11208 - protein, 7 aa, synthetic construct
DLGKDNV

SEQ ID NO: 11209 - protein, 7 aa, synthetic construct
LHEQMNS

SEQ ID NO: 11210 - protein, 7 aa, synthetic construct
WQHAPRE

SEQ ID NO: 11211 - protein, 7 aa, synthetic construct
DINPPFS

SEQ ID NO: 11212 - protein, 7 aa, synthetic construct
IYVEKGM

SEQ ID NO: 11213 - protein, 7 aa, synthetic construct
VFNPSRG

SEQ ID NO: 11214 - protein, 7 aa, synthetic construct
MVHIDGY

SEQ ID NO: 11215 - protein, 7 aa, synthetic construct
ADDFPQG

SEQ ID NO: 11216 - protein, 7 aa, synthetic construct
DDKATKE

SEQ ID NO: 11217 - protein, 7 aa, synthetic construct
IVLQKTD

SEQ ID NO: 11218 - protein, 7 aa, synthetic construct
RVQQQDE

SEQ ID NO: 11219 - protein, 7 aa, synthetic construct
QFSNEDS

SEQ ID NO: 11220 - protein, 7 aa, synthetic construct
AGENKNR

SEQ ID NO: 11221 - protein, 7 aa, synthetic construct
SDKNEVM

SEQ ID NO: 11222 - protein, 7 aa, synthetic construct
HGFVYED

SEQ ID NO: 11223 - protein, 7 aa, synthetic construct
QERQAYY

SEQ ID NO: 11224 - protein, 7 aa, synthetic construct
TNVYERP

SEQ ID NO: 11225 - protein, 7 aa, synthetic construct
DKLHIMA

SEQ ID NO: 11226 - protein, 7 aa, synthetic construct
WVIGQTE

SEQ ID NO: 11227 - protein, 7 aa, synthetic construct
MNHGSKA

SEQ ID NO: 11228 - protein, 7 aa, synthetic construct
REHYPVS

SEQ ID NO: 11229 - protein, 7 aa, synthetic construct
MPVKQGS

SEQ ID NO: 11230 - protein, 7 aa, synthetic construct
NTVTTEF

SEQ ID NO: 11231 - protein, 7 aa, synthetic construct
VNAETVQ

SEQ ID NO: 11232 - protein, 7 aa, synthetic construct
MAKKETH

SEQ ID NO: 11233 - protein, 7 aa, synthetic construct
NTGEADG

SEQ ID NO: 11234 - protein, 7 aa, synthetic construct
YKDGTDM

SEQ ID NO: 11235 - protein, 7 aa, synthetic construct
QSERSYQ

SEQ ID NO: 11236 - protein, 7 aa, synthetic construct
MESFHPH

SEQ ID NO: 11237 - protein, 7 aa, synthetic construct
APKSMLS

SEQ ID NO: 11238 - protein, 7 aa, synthetic construct
SIQPVEP

SEQ ID NO: 11239 - protein, 7 aa, synthetic construct
QLHGMDD

SEQ ID NO: 11240 - protein, 7 aa, synthetic construct
MGDFTSG

SEQ ID NO: 11241 - protein, 7 aa, synthetic construct
RPEGFLH

SEQ ID NO: 11242 - protein, 7 aa, synthetic construct
TENMNAP

SEQ ID NO: 11243 - protein, 7 aa, synthetic construct
SVEKLTT

SEQ ID NO: 11244 - protein, 7 aa, synthetic construct
HVVSEGK

SEQ ID NO: 11245 - protein, 7 aa, synthetic construct
RQGLNMQ

SEQ ID NO: 11246 - protein, 7 aa, synthetic construct
WQKMAEI

SEQ ID NO: 11247 - protein, 7 aa, synthetic construct
NTLNRGM

SEQ ID NO: 11248 - protein, 7 aa, synthetic construct
LFYTPEE

SEQ ID NO: 11249 - protein, 7 aa, synthetic construct
METKVFP

SEQ ID NO: 11250 - protein, 7 aa, synthetic construct
YKSEIPF

SEQ ID NO: 11251 - protein, 7 aa, synthetic construct
IINGFQD

SEQ ID NO: 11252 - protein, 7 aa, synthetic construct
AKNWSKD

SEQ ID NO: 11253 - protein, 7 aa, synthetic construct
LTDNPRD

SEQ ID NO: 11254 - protein, 7 aa, synthetic construct
MVERIID

SEQ ID NO: 11255 - protein, 7 aa, synthetic construct
PHPDTDN

SEQ ID NO: 11256 - protein, 7 aa, synthetic construct
PISRVLD

SEQ ID NO: 11257 - protein, 7 aa, synthetic construct
WTPFLNE

SEQ ID NO: 11258 - protein, 7 aa, synthetic construct
HLMGTGL

SEQ ID NO: 11259 - protein, 7 aa, synthetic construct
LSNKEKN

SEQ ID NO: 11260 - protein, 7 aa, synthetic construct
LNVQHEP

SEQ ID NO: 11261 - protein, 7 aa, synthetic construct
PGTAQDA

SEQ ID NO: 11262 - protein, 7 aa, synthetic construct
VDLVSQA

SEQ ID NO: 11263 - protein, 7 aa, synthetic construct
DIHGHAK

SEQ ID NO: 11264 - protein, 7 aa, synthetic construct
KVDMTIQ

SEQ ID NO: 11265 - protein, 7 aa, synthetic construct
TIRHLNM

SEQ ID NO: 11266 - protein, 7 aa, synthetic construct
GPSEHMY

SEQ ID NO: 11267 - protein, 7 aa, synthetic construct
HSQGEQW

SEQ ID NO: 11268 - protein, 7 aa, synthetic construct
VHHEFMD

SEQ ID NO: 11269 - protein, 7 aa, synthetic construct
PIGMQST

SEQ ID NO: 11270 - protein, 7 aa, synthetic construct
VSQRYSS

SEQ ID NO: 11271 - protein, 7 aa, synthetic construct
KSEPIEP

SEQ ID NO: 11272 - protein, 7 aa, synthetic construct
QRAVEKH

SEQ ID NO: 11273 - protein, 7 aa, synthetic construct
DEGAQQH

SEQ ID NO: 11274 - protein, 7 aa, synthetic construct
QSQSAEV

SEQ ID NO: 11275 - protein, 7 aa, synthetic construct
GHNWQNP

SEQ ID NO: 11276 - protein, 7 aa, synthetic construct
SEKPMTK

SEQ ID NO: 11277 - protein, 7 aa, synthetic construct
TRDGEEL

SEQ ID NO: 11278 - protein, 7 aa, synthetic construct
LSPHIFA

SEQ ID NO: 11279 - protein, 7 aa, synthetic construct
FELRQSS

SEQ ID NO: 11280 - protein, 7 aa, synthetic construct
GSGAWED

SEQ ID NO: 11281 - protein, 7 aa, synthetic construct
HAAVERT

SEQ ID NO: 11282 - protein, 7 aa, synthetic construct
ISLKEEP

SEQ ID NO: 11283 - protein, 7 aa, synthetic construct
SGHDPQV

SEQ ID NO: 11284 - protein, 7 aa, synthetic construct
TLHGMKG

SEQ ID NO: 11285 - protein, 7 aa, synthetic construct
ATQHMST

SEQ ID NO: 11286 - protein, 7 aa, synthetic construct
MGGEEMQ

SEQ ID NO: 11287 - protein, 7 aa, synthetic construct
MLENNHN

SEQ ID NO: 11288 - protein, 7 aa, synthetic construct
KNAQLLL

SEQ ID NO: 11289 - protein, 7 aa, synthetic construct
LHGWAKD

SEQ ID NO: 11290 - protein, 7 aa, synthetic construct
YDDAKKC

SEQ ID NO: 11291 - protein, 7 aa, synthetic construct
NSPEIAM

SEQ ID NO: 11292 - protein, 7 aa, synthetic construct
DRLPFPH

SEQ ID NO: 11293 - protein, 7 aa, synthetic construct
TNFQQHP

SEQ ID NO: 11294 - protein, 7 aa, synthetic construct
HVNIDHL

SEQ ID NO: 11295 - protein, 7 aa, synthetic construct
NDDYRPE

SEQ ID NO: 11296 - protein, 7 aa, synthetic construct
ELHKTQR

SEQ ID NO: 11297 - protein, 7 aa, synthetic construct
VATFEND

SEQ ID NO: 11298 - protein, 7 aa, synthetic construct
DISSHIH

SEQ ID NO: 11299 - protein, 7 aa, synthetic construct
QNVHGLE

SEQ ID NO: 11300 - protein, 7 aa, synthetic construct
NNTLPSQ

SEQ ID NO: 11301 - protein, 7 aa, synthetic construct
SQNAGEM

SEQ ID NO: 11302 - protein, 7 aa, synthetic construct
ANEQAHM

SEQ ID NO: 11303 - protein, 7 aa, synthetic construct
AESNRFV

SEQ ID NO: 11304 - protein, 7 aa, synthetic construct
GTFISSP

SEQ ID NO: 11305 - protein, 7 aa, synthetic construct
PPKEQLM

SEQ ID NO: 11306 - protein, 7 aa, synthetic construct
VKNMINM

SEQ ID NO: 11307 - protein, 7 aa, synthetic construct
NEDDSAR

SEQ ID NO: 11308 - protein, 7 aa, synthetic construct
QGQPHTD

SEQ ID NO: 11309 - protein, 7 aa, synthetic construct
WHDNVGM

SEQ ID NO: 11310 - protein, 7 aa, synthetic construct
YNLAQQQ

SEQ ID NO: 11311 - protein, 7 aa, synthetic construct
HHPIQSF

SEQ ID NO: 11312 - protein, 7 aa, synthetic construct
DMVGGKH

SEQ ID NO: 11313 - protein, 7 aa, synthetic construct
GNAHVMV

SEQ ID NO: 11314 - protein, 7 aa, synthetic construct
YKMMMVD

SEQ ID NO: 11315 - protein, 7 aa, synthetic construct
QQGFLPS

SEQ ID NO: 11316 - protein, 7 aa, synthetic construct
SQSHANQ

SEQ ID NO: 11317 - protein, 7 aa, synthetic construct
WGADGVM

SEQ ID NO: 11318 - protein, 7 aa, synthetic construct
SEQQMTD

SEQ ID NO: 11319 - protein, 7 aa, synthetic construct
WPTATFG

SEQ ID NO: 11320 - protein, 7 aa, synthetic construct
VDTPGHS

SEQ ID NO: 11321 - protein, 7 aa, synthetic construct
GVSTDKP

SEQ ID NO: 11322 - protein, 7 aa, synthetic construct
EDGPFVR

SEQ ID NO: 11323 - protein, 7 aa, synthetic construct
VYVDQKY

SEQ ID NO: 11324 - protein, 7 aa, synthetic construct
RNAHQSY

SEQ ID NO: 11325 - protein, 7 aa, synthetic construct
HTKPQHV

SEQ ID NO: 11326 - protein, 7 aa, synthetic construct
TALGIIE

SEQ ID NO: 11327 - protein, 7 aa, synthetic construct
YQFHTTD

SEQ ID NO: 11328 - protein, 7 aa, synthetic construct
WTKMFTE

SEQ ID NO: 11329 - protein, 7 aa, synthetic construct
SVTHLAN

SEQ ID NO: 11330 - protein, 7 aa, synthetic construct
FMGPNGD

SEQ ID NO: 11331 - protein, 7 aa, synthetic construct
PPISPQQ

SEQ ID NO: 11332 - protein, 7 aa, synthetic construct
GLNKPVE

SEQ ID NO: 11333 - protein, 7 aa, synthetic construct
ETTFNRP

SEQ ID NO: 11334 - protein, 7 aa, synthetic construct
LMTDERN

SEQ ID NO: 11335 - protein, 7 aa, synthetic construct
NHAITLT

SEQ ID NO: 11336 - protein, 7 aa, synthetic construct
NHADQQR

SEQ ID NO: 11337 - protein, 7 aa, synthetic construct
LNTRNII

SEQ ID NO: 11338 - protein, 7 aa, synthetic construct
SRDETPF

SEQ ID NO: 11339 - protein, 7 aa, synthetic construct
IAAYQVD

SEQ ID NO: 11340 - protein, 7 aa, synthetic construct
GGGVFPE

SEQ ID NO: 11341 - protein, 7 aa, synthetic construct
EKTKSFE

SEQ ID NO: 11342 - protein, 7 aa, synthetic construct
NIAWKTD

SEQ ID NO: 11343 - protein, 7 aa, synthetic construct
EAHKMHT

SEQ ID NO: 11344 - protein, 7 aa, synthetic construct
VLSLSTG

SEQ ID NO: 11345 - protein, 7 aa, synthetic construct
GKYEMTS

SEQ ID NO: 11346 - protein, 7 aa, synthetic construct
WHNDIVG

SEQ ID NO: 11347 - protein, 7 aa, synthetic construct
KVTEMNE

SEQ ID NO: 11348 - protein, 7 aa, synthetic construct
AEAAMSH

SEQ ID NO: 11349 - protein, 7 aa, synthetic construct
GYMADGV

SEQ ID NO: 11350 - protein, 7 aa, synthetic construct
MSMNSLK

SEQ ID NO: 11351 - protein, 7 aa, synthetic construct
GEDRNFS

SEQ ID NO: 11352 - protein, 7 aa, synthetic construct
KAHENQD

SEQ ID NO: 11353 - protein, 7 aa, synthetic construct
SQGTSIP

SEQ ID NO: 11354 - protein, 7 aa, synthetic construct
YPTPPHI

SEQ ID NO: 11355 - protein, 7 aa, synthetic construct
INQMVNN

SEQ ID NO: 11356 - protein, 7 aa, synthetic construct
HTQNVGG

SEQ ID NO: 11357 - protein, 7 aa, synthetic construct
YADPHRV

SEQ ID NO: 11358 - protein, 7 aa, synthetic construct
NPERGGF

SEQ ID NO: 11359 - protein, 7 aa, synthetic construct
MNMNIAA

SEQ ID NO: 11360 - protein, 7 aa, synthetic construct
WMNDAHR

SEQ ID NO: 11361 - protein, 7 aa, synthetic construct
NVEHMIG

SEQ ID NO: 11362 - protein, 7 aa, synthetic construct
ATLTASP

SEQ ID NO: 11363 - protein, 7 aa, synthetic construct
KFPANRD

SEQ ID NO: 11364 - protein, 7 aa, synthetic construct
TPGLAVM

SEQ ID NO: 11365 - protein, 7 aa, synthetic construct
ADSFGQD

SEQ ID NO: 11366 - protein, 7 aa, synthetic construct
SLVQART

SEQ ID NO: 11367 - protein, 7 aa, synthetic construct
ISQNPEN

SEQ ID NO: 11368 - protein, 7 aa, synthetic construct
SVNGFID

SEQ ID NO: 11369 - protein, 7 aa, synthetic construct
KHLNMAE

SEQ ID NO: 11370 - protein, 7 aa, synthetic construct
DRNNHDW

SEQ ID NO: 11371 - protein, 7 aa, synthetic construct
QERGNTY

SEQ ID NO: 11372 - protein, 7 aa, synthetic construct
MEGFERF

SEQ ID NO: 11373 - protein, 7 aa, synthetic construct
FNAPDAI

SEQ ID NO: 11374 - protein, 7 aa, synthetic construct
RMMHTRE

SEQ ID NO: 11375 - protein, 7 aa, synthetic construct
PQLHPDY

SEQ ID NO: 11376 - protein, 7 aa, synthetic construct
DHSADTV

SEQ ID NO: 11377 - protein, 7 aa, synthetic construct
FTVKSTN

SEQ ID NO: 11378 - protein, 7 aa, synthetic construct
PTGEPLH

SEQ ID NO: 11379 - protein, 7 aa, synthetic construct
HPLMSDD

SEQ ID NO: 11380 - protein, 7 aa, synthetic construct
PQPGMMT

SEQ ID NO: 11381 - protein, 7 aa, synthetic construct
GQTMQSM

SEQ ID NO: 11382 - protein, 7 aa, synthetic construct
LAMPPEQ

SEQ ID NO: 11383 - protein, 7 aa, synthetic construct
YNTSEDS

SEQ ID NO: 11384 - protein, 7 aa, synthetic construct
DGPPNSI

SEQ ID NO: 11385 - protein, 7 aa, synthetic construct
MHPLLDP

SEQ ID NO: 11386 - protein, 7 aa, synthetic construct
EGQKLNP

SEQ ID NO: 11387 - protein, 7 aa, synthetic construct
MTNATMD

SEQ ID NO: 11388 - protein, 7 aa, synthetic construct
LESAFNK

SEQ ID NO: 11389 - protein, 7 aa, synthetic construct
ISDDRSI

SEQ ID NO: 11390 - protein, 7 aa, synthetic construct
LGASLGG

SEQ ID NO: 11391 - protein, 7 aa, synthetic construct
DIKQIDP

SEQ ID NO: 11392 - protein, 7 aa, synthetic construct
HHSDTYL

SEQ ID NO: 11393 - protein, 7 aa, synthetic construct
DYKQGAH

SEQ ID NO: 11394 - protein, 7 aa, synthetic construct
QARFEED

SEQ ID NO: 11395 - protein, 7 aa, synthetic construct
NNGNFVR

SEQ ID NO: 11396 - protein, 7 aa, synthetic construct
REYHINS

SEQ ID NO: 11397 - protein, 7 aa, synthetic construct
EEVKNPY

SEQ ID NO: 11398 - protein, 7 aa, synthetic construct
AHHMSEE

SEQ ID NO: 11399 - protein, 7 aa, synthetic construct
SAWLQNG

SEQ ID NO: 11400 - protein, 7 aa, synthetic construct
TYSINKV

SEQ ID NO: 11401 - protein, 7 aa, synthetic construct
QYGETDF

SEQ ID NO: 11402 - protein, 7 aa, synthetic construct
IHNTNRT

SEQ ID NO: 11403 - protein, 7 aa, synthetic construct
HRYHGAE

SEQ ID NO: 11404 - protein, 7 aa, synthetic construct
EPFFQEH

SEQ ID NO: 11405 - protein, 7 aa, synthetic construct
SFGDRAF

SEQ ID NO: 11406 - protein, 7 aa, synthetic construct
GDSHISE

SEQ ID NO: 11407 - protein, 7 aa, synthetic construct
VMEEFGG

SEQ ID NO: 11408 - protein, 7 aa, synthetic construct
LHNSESE

SEQ ID NO: 11409 - protein, 7 aa, synthetic construct
MPMPSHM

SEQ ID NO: 11410 - protein, 7 aa, synthetic construct
STIEFEW

SEQ ID NO: 11411 - protein, 7 aa, synthetic construct
ATSKIDG

SEQ ID NO: 11412 - protein, 7 aa, synthetic construct
NKLVIDP

SEQ ID NO: 11413 - protein, 7 aa, synthetic construct
RITDNVK

SEQ ID NO: 11414 - protein, 7 aa, synthetic construct
RHSPTIH

SEQ ID NO: 11415 - protein, 7 aa, synthetic construct
EAQRIYA

SEQ ID NO: 11416 - protein, 7 aa, synthetic construct
INQPTET

SEQ ID NO: 11417 - protein, 7 aa, synthetic construct
LPEQMHY

SEQ ID NO: 11418 - protein, 7 aa, synthetic construct
YYPPYED

SEQ ID NO: 11419 - protein, 7 aa, synthetic construct
WIDFQKE

SEQ ID NO: 11420 - protein, 7 aa, synthetic construct
REIDQDD

SEQ ID NO: 11421 - protein, 7 aa, synthetic construct
TLRGVHN

SEQ ID NO: 11422 - protein, 7 aa, synthetic construct
TGHITKY

SEQ ID NO: 11423 - protein, 7 aa, synthetic construct
SIQPQIH

SEQ ID NO: 11424 - protein, 7 aa, synthetic construct
PTKVDKY

SEQ ID NO: 11425 - protein, 7 aa, synthetic construct
IFGSTNN

SEQ ID NO: 11426 - protein, 7 aa, synthetic construct
LGMNGPF

SEQ ID NO: 11427 - protein, 7 aa, synthetic construct
GSEFMQI

SEQ ID NO: 11428 - protein, 7 aa, synthetic construct
TQPQWEF

SEQ ID NO: 11429 - protein, 7 aa, synthetic construct
KGITIQN

SEQ ID NO: 11430 - protein, 7 aa, synthetic construct
QQYLEAS

SEQ ID NO: 11431 - protein, 7 aa, synthetic construct
MEDKHMI

SEQ ID NO: 11432 - protein, 7 aa, synthetic construct
TAFEPQP

SEQ ID NO: 11433 - protein, 7 aa, synthetic construct
RDDTNQV

SEQ ID NO: 11434 - protein, 7 aa, synthetic construct
VTPQIAD

SEQ ID NO: 11435 - protein, 7 aa, synthetic construct
QDKLGWS

SEQ ID NO: 11436 - protein, 7 aa, synthetic construct
PQVNKMH

SEQ ID NO: 11437 - protein, 7 aa, synthetic construct
GMEQLRS

SEQ ID NO: 11438 - protein, 7 aa, synthetic construct
SAERKEN

SEQ ID NO: 11439 - protein, 7 aa, synthetic construct
LEGWLSE

SEQ ID NO: 11440 - protein, 7 aa, synthetic construct
GLAHDTG

SEQ ID NO: 11441 - protein, 7 aa, synthetic construct
SAREIVW

SEQ ID NO: 11442 - protein, 7 aa, synthetic construct
WNPNKEW

SEQ ID NO: 11443 - protein, 7 aa, synthetic construct
VKGVLYV

SEQ ID NO: 11444 - protein, 7 aa, synthetic construct
QKIMPSA

SEQ ID NO: 11445 - protein, 7 aa, synthetic construct
TSQQLGM

SEQ ID NO: 11446 - protein, 7 aa, synthetic construct
RGLADQG

SEQ ID NO: 11447 - protein, 7 aa, synthetic construct
IYVSGTV

SEQ ID NO: 11448 - protein, 7 aa, synthetic construct
FGKQLEF

SEQ ID NO: 11449 - protein, 7 aa, synthetic construct
ALHDTVI

SEQ ID NO: 11450 - protein, 7 aa, synthetic construct
HNKMYAT

SEQ ID NO: 11451 - protein, 7 aa, synthetic construct
ASGIYGE

SEQ ID NO: 11452 - protein, 7 aa, synthetic construct
MSGRFGS

SEQ ID NO: 11453 - protein, 7 aa, synthetic construct
FAGIGNH

SEQ ID NO: 11454 - protein, 7 aa, synthetic construct
MPTMVTK

SEQ ID NO: 11455 - protein, 7 aa, synthetic construct
EHHPSTT

SEQ ID NO: 11456 - protein, 7 aa, synthetic construct
QGAHADP

SEQ ID NO: 11457 - protein, 7 aa, synthetic construct
DMGGLNA

SEQ ID NO: 11458 - protein, 7 aa, synthetic construct
AKFNYDK

SEQ ID NO: 11459 - protein, 7 aa, synthetic construct
TMEEYLP

SEQ ID NO: 11460 - protein, 7 aa, synthetic construct
PTGTQLE

SEQ ID NO: 11461 - protein, 7 aa, synthetic construct
TRMMSAV

SEQ ID NO: 11462 - protein, 7 aa, synthetic construct
LSRLDSH

SEQ ID NO: 11463 - protein, 7 aa, synthetic construct
RYQEEEE

SEQ ID NO: 11464 - protein, 7 aa, synthetic construct
ASPLYVP

SEQ ID NO: 11465 - protein, 7 aa, synthetic construct
IEHSFKV

SEQ ID NO: 11466 - protein, 7 aa, synthetic construct
SVGDHTF

SEQ ID NO: 11467 - protein, 7 aa, synthetic construct
HDDEYTT

SEQ ID NO: 11468 - protein, 7 aa, synthetic construct
HFAGLDN

SEQ ID NO: 11469 - protein, 7 aa, synthetic construct
QRMEDPM

SEQ ID NO: 11470 - protein, 7 aa, synthetic construct
PGNSLEE

SEQ ID NO: 11471 - protein, 7 aa, synthetic construct
KYTHEPF

SEQ ID NO: 11472 - protein, 7 aa, synthetic construct
NVIKDEF

SEQ ID NO: 11473 - protein, 7 aa, synthetic construct
KSANNLQ

SEQ ID NO: 11474 - protein, 7 aa, synthetic construct
AYSREDP

SEQ ID NO: 11475 - protein, 7 aa, synthetic construct
GDWKRND

SEQ ID NO: 11476 - protein, 7 aa, synthetic construct
GYHNHNA

SEQ ID NO: 11477 - protein, 7 aa, synthetic construct
PTDQFLA

SEQ ID NO: 11478 - protein, 7 aa, synthetic construct
NLYEQQS

SEQ ID NO: 11479 - protein, 7 aa, synthetic construct
DHGRDGR

SEQ ID NO: 11480 - protein, 7 aa, synthetic construct
HWEGSGN

SEQ ID NO: 11481 - protein, 7 aa, synthetic construct
TSINEDL

SEQ ID NO: 11482 - protein, 7 aa, synthetic construct
AFDDMNT

SEQ ID NO: 11483 - protein, 7 aa, synthetic construct
DGDEYTL

SEQ ID NO: 11484 - protein, 7 aa, synthetic construct
MGQRLPS

SEQ ID NO: 11485 - protein, 7 aa, synthetic construct
QHFPKGG

SEQ ID NO: 11486 - protein, 7 aa, synthetic construct
GSNHGKF

SEQ ID NO: 11487 - protein, 7 aa, synthetic construct
TDKFMSE

SEQ ID NO: 11488 - protein, 7 aa, synthetic construct
ANQVQAD

SEQ ID NO: 11489 - protein, 7 aa, synthetic construct
DQHVITS

SEQ ID NO: 11490 - protein, 7 aa, synthetic construct
KYLKTYD

SEQ ID NO: 11491 - protein, 7 aa, synthetic construct
ADYPQIS

SEQ ID NO: 11492 - protein, 7 aa, synthetic construct
HIHDHFG

SEQ ID NO: 11493 - protein, 7 aa, synthetic construct
DGDRGMG

SEQ ID NO: 11494 - protein, 7 aa, synthetic construct
WTERHSS

SEQ ID NO: 11495 - protein, 7 aa, synthetic construct
CVDMGAC

SEQ ID NO: 11496 - protein, 7 aa, synthetic construct
QVVMNRT

SEQ ID NO: 11497 - protein, 7 aa, synthetic construct
YAIRDAP

SEQ ID NO: 11498 - protein, 7 aa, synthetic construct
ENKDSVP

SEQ ID NO: 11499 - protein, 7 aa, synthetic construct
KKEIVFT

SEQ ID NO: 11500 - protein, 7 aa, synthetic construct
HSPIITM

SEQ ID NO: 11501 - protein, 7 aa, synthetic construct
PTAHVTR

SEQ ID NO: 11502 - protein, 7 aa, synthetic construct
KMTSHTH

SEQ ID NO: 11503 - protein, 7 aa, synthetic construct
QLAFPEH

SEQ ID NO: 11504 - protein, 7 aa, synthetic construct
HPHQMGL

SEQ ID NO: 11505 - protein, 7 aa, synthetic construct
SINVNRH

SEQ ID NO: 11506 - protein, 7 aa, synthetic construct
YVYKQVE

SEQ ID NO: 11507 - protein, 7 aa, synthetic construct
TISVEDR

SEQ ID NO: 11508 - protein, 7 aa, synthetic construct
PLADGMN

SEQ ID NO: 11509 - protein, 7 aa, synthetic construct
SMRGFSG

SEQ ID NO: 11510 - protein, 7 aa, synthetic construct
DLPNAIM

SEQ ID NO: 11511 - protein, 7 aa, synthetic construct
LNFKTQG

SEQ ID NO: 11512 - protein, 7 aa, synthetic construct
LHKEYHG

SEQ ID NO: 11513 - protein, 7 aa, synthetic construct
LHRATIP

SEQ ID NO: 11514 - protein, 7 aa, synthetic construct
EGRFEIQ

SEQ ID NO: 11515 - protein, 7 aa, synthetic construct
HTEERGM

SEQ ID NO: 11516 - protein, 7 aa, synthetic construct
HRLQHYE

SEQ ID NO: 11517 - protein, 7 aa, synthetic construct
ADFQRQL

SEQ ID NO: 11518 - protein, 7 aa, synthetic construct
MPSVDVH

SEQ ID NO: 11519 - protein, 7 aa, synthetic construct
MQGGAEF

SEQ ID NO: 11520 - protein, 7 aa, synthetic construct
QQGDDIN

SEQ ID NO: 11521 - protein, 7 aa, synthetic construct
GPIAHSI

SEQ ID NO: 11522 - protein, 7 aa, synthetic construct
ETQSGGL

SEQ ID NO: 11523 - protein, 7 aa, synthetic construct
FQEIHKV

SEQ ID NO: 11524 - protein, 7 aa, synthetic construct
NITGSLK

SEQ ID NO: 11525 - protein, 7 aa, synthetic construct
ANMETGG

SEQ ID NO: 11526 - protein, 7 aa, synthetic construct
PSPITHS

SEQ ID NO: 11527 - protein, 7 aa, synthetic construct
QDVQIGK

SEQ ID NO: 11528 - protein, 7 aa, synthetic construct
TLKRVAD

SEQ ID NO: 11529 - protein, 7 aa, synthetic construct
DTNGVAA

SEQ ID NO: 11530 - protein, 7 aa, synthetic construct
GAKTIED

SEQ ID NO: 11531 - protein, 7 aa, synthetic construct
QIDKLDT

SEQ ID NO: 11532 - protein, 7 aa, synthetic construct
NMQTYDS

SEQ ID NO: 11533 - protein, 7 aa, synthetic construct
ESRTSHM

SEQ ID NO: 11534 - protein, 7 aa, synthetic construct
FAQRYNA

SEQ ID NO: 11535 - protein, 7 aa, synthetic construct
WFKEEKV

SEQ ID NO: 11536 - protein, 7 aa, synthetic construct
PQASDLS

SEQ ID NO: 11537 - protein, 7 aa, synthetic construct
EKTLTKI

SEQ ID NO: 11538 - protein, 7 aa, synthetic construct
LVNSGFS

SEQ ID NO: 11539 - protein, 7 aa, synthetic construct
LHAQDRS

SEQ ID NO: 11540 - protein, 7 aa, synthetic construct
IFDKEHS

SEQ ID NO: 11541 - protein, 7 aa, synthetic construct
DITRPGI

SEQ ID NO: 11542 - protein, 7 aa, synthetic construct
GDQSHKD

SEQ ID NO: 11543 - protein, 7 aa, synthetic construct
DPRDIRM

SEQ ID NO: 11544 - protein, 7 aa, synthetic construct
YQMVKVN

SEQ ID NO: 11545 - protein, 7 aa, synthetic construct
QQNNMNE

SEQ ID NO: 11546 - protein, 7 aa, synthetic construct
VPAQEWH

SEQ ID NO: 11547 - protein, 7 aa, synthetic construct
SFAANEY

SEQ ID NO: 11548 - protein, 7 aa, synthetic construct
FAGIMGV

SEQ ID NO: 11549 - protein, 7 aa, synthetic construct
SMPPIQN

SEQ ID NO: 11550 - protein, 7 aa, synthetic construct
TALHSEN

SEQ ID NO: 11551 - protein, 7 aa, synthetic construct
VWVTTGD

SEQ ID NO: 11552 - protein, 7 aa, synthetic construct
PENTYAH

SEQ ID NO: 11553 - protein, 7 aa, synthetic construct
QAKYEGK

SEQ ID NO: 11554 - protein, 7 aa, synthetic construct
FKMMDMR

SEQ ID NO: 11555 - protein, 7 aa, synthetic construct
ARPQHWE

SEQ ID NO: 11556 - protein, 7 aa, synthetic construct
FLMGEMG

SEQ ID NO: 11557 - protein, 7 aa, synthetic construct
TEHNNWI

SEQ ID NO: 11558 - protein, 7 aa, synthetic construct
RNFQDLN

SEQ ID NO: 11559 - protein, 7 aa, synthetic construct
HFDSEQE

SEQ ID NO: 11560 - protein, 7 aa, synthetic construct
IPHDYVV

SEQ ID NO: 11561 - protein, 7 aa, synthetic construct
QHAGRAM

SEQ ID NO: 11562 - protein, 7 aa, synthetic construct
LPEGYNN

SEQ ID NO: 11563 - protein, 7 aa, synthetic construct
HEGHHNP

SEQ ID NO: 11564 - protein, 7 aa, synthetic construct
RMDTSSK

SEQ ID NO: 11565 - protein, 7 aa, synthetic construct
GANNPKD

SEQ ID NO: 11566 - protein, 7 aa, synthetic construct
IWSKQNG

SEQ ID NO: 11567 - protein, 7 aa, synthetic construct
HHAQAVK

SEQ ID NO: 11568 - protein, 7 aa, synthetic construct
EHGDIKY

SEQ ID NO: 11569 - protein, 7 aa, synthetic construct
NMSHINV

SEQ ID NO: 11570 - protein, 7 aa, synthetic construct
SQRVDMR

SEQ ID NO: 11571 - protein, 7 aa, synthetic construct
AFDTGIG

SEQ ID NO: 11572 - protein, 7 aa, synthetic construct
LTAQYTL

SEQ ID NO: 11573 - protein, 7 aa, synthetic construct
NNQFQHT

SEQ ID NO: 11574 - protein, 7 aa, synthetic construct
ATNNLES

SEQ ID NO: 11575 - protein, 7 aa, synthetic construct
TTRELMT

SEQ ID NO: 11576 - protein, 7 aa, synthetic construct
IPIQSET

SEQ ID NO: 11577 - protein, 7 aa, synthetic construct
SNGPEFT

SEQ ID NO: 11578 - protein, 7 aa, synthetic construct
FLHGPTQ

SEQ ID NO: 11579 - protein, 7 aa, synthetic construct
IPDQPAW

SEQ ID NO: 11580 - protein, 7 aa, synthetic construct
YQREPQI

SEQ ID NO: 11581 - protein, 7 aa, synthetic construct
LSDQVKQ

SEQ ID NO: 11582 - protein, 7 aa, synthetic construct
KTIPNME

SEQ ID NO: 11583 - protein, 7 aa, synthetic construct
TNSVWSD

SEQ ID NO: 11584 - protein, 7 aa, synthetic construct
PETGNGY

SEQ ID NO: 11585 - protein, 7 aa, synthetic construct
KDDLDWV

SEQ ID NO: 11586 - protein, 7 aa, synthetic construct
QASVHPM

SEQ ID NO: 11587 - protein, 7 aa, synthetic construct
VAHDMYE

SEQ ID NO: 11588 - protein, 7 aa, synthetic construct
HMVQPKI

SEQ ID NO: 11589 - protein, 7 aa, synthetic construct
HPKNIDH

SEQ ID NO: 11590 - protein, 7 aa, synthetic construct
WDQAEPT

SEQ ID NO: 11591 - protein, 7 aa, synthetic construct
YHTGNAF

SEQ ID NO: 11592 - protein, 7 aa, synthetic construct
PDRDNDS

SEQ ID NO: 11593 - protein, 7 aa, synthetic construct
PEQFGIA

SEQ ID NO: 11594 - protein, 7 aa, synthetic construct
ENMGGDV

SEQ ID NO: 11595 - protein, 7 aa, synthetic construct
EKKMNNN

SEQ ID NO: 11596 - protein, 7 aa, synthetic construct
VTGHQDE

SEQ ID NO: 11597 - protein, 7 aa, synthetic construct
GTYQAVM

SEQ ID NO: 11598 - protein, 7 aa, synthetic construct
SNFTTNV

SEQ ID NO: 11599 - protein, 7 aa, synthetic construct
HTLHQGI

SEQ ID NO: 11600 - protein, 7 aa, synthetic construct
KPKPLEN

SEQ ID NO: 11601 - protein, 7 aa, synthetic construct
LESKETV

SEQ ID NO: 11602 - protein, 7 aa, synthetic construct
PRNYQMS

SEQ ID NO: 11603 - protein, 7 aa, synthetic construct
SEGADAR

SEQ ID NO: 11604 - protein, 7 aa, synthetic construct
GIGDTPK

SEQ ID NO: 11605 - protein, 7 aa, synthetic construct
GTPYYKM

SEQ ID NO: 11606 - protein, 7 aa, synthetic construct
HQGETNT

SEQ ID NO: 11607 - protein, 7 aa, synthetic construct
FYKNNIG

SEQ ID NO: 11608 - protein, 7 aa, synthetic construct
YESKAAW

SEQ ID NO: 11609 - protein, 7 aa, synthetic construct
MHAETMN

SEQ ID NO: 11610 - protein, 7 aa, synthetic construct
HPFPSVE

SEQ ID NO: 11611 - protein, 7 aa, synthetic construct
TISETSM

SEQ ID NO: 11612 - protein, 7 aa, synthetic construct
VQDVSPM

SEQ ID NO: 11613 - protein, 7 aa, synthetic construct
ILATKPL

SEQ ID NO: 11614 - protein, 7 aa, synthetic construct
SKIDDEW

SEQ ID NO: 11615 - protein, 7 aa, synthetic construct
DVADSKA

SEQ ID NO: 11616 - protein, 7 aa, synthetic construct
RDPVGEA

SEQ ID NO: 11617 - protein, 7 aa, synthetic construct
FNAIKVI

SEQ ID NO: 11618 - protein, 7 aa, synthetic construct
DLMSIGG

SEQ ID NO: 11619 - protein, 7 aa, synthetic construct
TNQMEAV

SEQ ID NO: 11620 - protein, 7 aa, synthetic construct
ANQHDLL

SEQ ID NO: 11621 - protein, 7 aa, synthetic construct
IFSDTQL

SEQ ID NO: 11622 - protein, 7 aa, synthetic construct
MSDTDNH

SEQ ID NO: 11623 - protein, 7 aa, synthetic construct
IVNVESS

SEQ ID NO: 11624 - protein, 7 aa, synthetic construct
YSDTAPQ

SEQ ID NO: 11625 - protein, 7 aa, synthetic construct
ALMEMKA

SEQ ID NO: 11626 - protein, 7 aa, synthetic construct
DIPGDSP

SEQ ID NO: 11627 - protein, 7 aa, synthetic construct
TVDDDIP

SEQ ID NO: 11628 - protein, 7 aa, synthetic construct
GANMETL

SEQ ID NO: 11629 - protein, 7 aa, synthetic construct
NLREHLE

SEQ ID NO: 11630 - protein, 7 aa, synthetic construct
KFREPNM

SEQ ID NO: 11631 - protein, 7 aa, synthetic construct
WNQNQLK

SEQ ID NO: 11632 - protein, 7 aa, synthetic construct
SKAVLSY

SEQ ID NO: 11633 - protein, 7 aa, synthetic construct
QSTTYMI

SEQ ID NO: 11634 - protein, 7 aa, synthetic construct
HMNNIAV

SEQ ID NO: 11635 - protein, 7 aa, synthetic construct
IHIPNDT

SEQ ID NO: 11636 - protein, 7 aa, synthetic construct
VNMADLN

SEQ ID NO: 11637 - protein, 7 aa, synthetic construct
RSTGLPQ

SEQ ID NO: 11638 - protein, 7 aa, synthetic construct
GATEWRN

SEQ ID NO: 11639 - protein, 7 aa, synthetic construct
IMQAAEH

SEQ ID NO: 11640 - protein, 7 aa, synthetic construct
QNLGEFK

SEQ ID NO: 11641 - protein, 7 aa, synthetic construct
YVSVSNY

SEQ ID NO: 11642 - protein, 7 aa, synthetic construct
EKYKDTA

SEQ ID NO: 11643 - protein, 7 aa, synthetic construct
PAGGHLH

SEQ ID NO: 11644 - protein, 7 aa, synthetic construct
NHNPDIF

SEQ ID NO: 11645 - protein, 7 aa, synthetic construct
TAPEAGL

SEQ ID NO: 11646 - protein, 7 aa, synthetic construct
YVGANFD

SEQ ID NO: 11647 - protein, 7 aa, synthetic construct
WQQQHGN

SEQ ID NO: 11648 - protein, 7 aa, synthetic construct
TASQWNS

SEQ ID NO: 11649 - protein, 7 aa, synthetic construct
MRESNFN

SEQ ID NO: 11650 - protein, 7 aa, synthetic construct
PGDTLTH

SEQ ID NO: 11651 - protein, 7 aa, synthetic construct
YEPSVHT

SEQ ID NO: 11652 - protein, 7 aa, synthetic construct
NETASSP

SEQ ID NO: 11653 - protein, 7 aa, synthetic construct
IRLQTDF

SEQ ID NO: 11654 - protein, 7 aa, synthetic construct
HEQEHKN

SEQ ID NO: 11655 - protein, 7 aa, synthetic construct
VNEDRNE

SEQ ID NO: 11656 - protein, 7 aa, synthetic construct
PTATMRL

SEQ ID NO: 11657 - protein, 7 aa, synthetic construct
DKSGEQE

SEQ ID NO: 11658 - protein, 7 aa, synthetic construct
VKTFAEK

SEQ ID NO: 11659 - protein, 7 aa, synthetic construct
ESALSPD

SEQ ID NO: 11660 - protein, 7 aa, synthetic construct
SLKNMNM

SEQ ID NO: 11661 - protein, 7 aa, synthetic construct
FDASTNH

SEQ ID NO: 11662 - protein, 7 aa, synthetic construct
GDHPNHN

SEQ ID NO: 11663 - protein, 7 aa, synthetic construct
DINLQKA

SEQ ID NO: 11664 - protein, 7 aa, synthetic construct
TMVEIEK

SEQ ID NO: 11665 - protein, 7 aa, synthetic construct
RPDDMQY

SEQ ID NO: 11666 - protein, 7 aa, synthetic construct
NENNSKI

SEQ ID NO: 11667 - protein, 7 aa, synthetic construct
YSALVTI

SEQ ID NO: 11668 - protein, 7 aa, synthetic construct
TQNFKMQ

SEQ ID NO: 11669 - protein, 7 aa, synthetic construct
PAFVDRS

SEQ ID NO: 11670 - protein, 7 aa, synthetic construct
GMKLMDP

SEQ ID NO: 11671 - protein, 7 aa, synthetic construct
MVLGEFE

SEQ ID NO: 11672 - protein, 7 aa, synthetic construct
MFEENKD

SEQ ID NO: 11673 - protein, 7 aa, synthetic construct
QSEKMSE

SEQ ID NO: 11674 - protein, 7 aa, synthetic construct
HNPDVNK

SEQ ID NO: 11675 - protein, 7 aa, synthetic construct
MEEMRFK

SEQ ID NO: 11676 - protein, 7 aa, synthetic construct
LQDFKPE

SEQ ID NO: 11677 - protein, 7 aa, synthetic construct
EARIPPV

SEQ ID NO: 11678 - protein, 7 aa, synthetic construct
ITADEQV

SEQ ID NO: 11679 - protein, 7 aa, synthetic construct
RDTKGML

SEQ ID NO: 11680 - protein, 7 aa, synthetic construct
QYREHPA

SEQ ID NO: 11681 - protein, 7 aa, synthetic construct
AMDDYHT

SEQ ID NO: 11682 - protein, 7 aa, synthetic construct
TEPNRAD

SEQ ID NO: 11683 - protein, 7 aa, synthetic construct
WSEKIPD

SEQ ID NO: 11684 - protein, 7 aa, synthetic construct
EYAQFQK

SEQ ID NO: 11685 - protein, 7 aa, synthetic construct
IPPREIR

SEQ ID NO: 11686 - protein, 7 aa, synthetic construct
LNADAQT

SEQ ID NO: 11687 - protein, 7 aa, synthetic construct
VPPQFSH

SEQ ID NO: 11688 - protein, 7 aa, synthetic construct
IPHTVGE

SEQ ID NO: 11689 - protein, 7 aa, synthetic construct
KISPYDL

SEQ ID NO: 11690 - protein, 7 aa, synthetic construct
AFQQITE

SEQ ID NO: 11691 - protein, 7 aa, synthetic construct
PTGKIHY

SEQ ID NO: 11692 - protein, 7 aa, synthetic construct
RSEIKII

SEQ ID NO: 11693 - protein, 7 aa, synthetic construct
GMQGRSH

SEQ ID NO: 11694 - protein, 7 aa, synthetic construct
PLNEVQG

SEQ ID NO: 11695 - protein, 7 aa, synthetic construct
VSIDSDR

SEQ ID NO: 11696 - protein, 7 aa, synthetic construct
NVFEPQA

SEQ ID NO: 11697 - protein, 7 aa, synthetic construct
AYAKSNN

SEQ ID NO: 11698 - protein, 7 aa, synthetic construct
HSDSSLH

SEQ ID NO: 11699 - protein, 7 aa, synthetic construct
IVKDSVY

SEQ ID NO: 11700 - protein, 7 aa, synthetic construct
IVNHMNE

SEQ ID NO: 11701 - protein, 7 aa, synthetic construct
MNWGNEA

SEQ ID NO: 11702 - protein, 7 aa, synthetic construct
GVTTAFD

SEQ ID NO: 11703 - protein, 7 aa, synthetic construct
KEPNQVW

SEQ ID NO: 11704 - protein, 7 aa, synthetic construct
MYESNGF

SEQ ID NO: 11705 - protein, 7 aa, synthetic construct
GFQGLGM

SEQ ID NO: 11706 - protein, 7 aa, synthetic construct
QMSRPSN

SEQ ID NO: 11707 - protein, 7 aa, synthetic construct
GKNLLSP

SEQ ID NO: 11708 - protein, 7 aa, synthetic construct
LDKFFDA

SEQ ID NO: 11709 - protein, 7 aa, synthetic construct
KHAPIEK

SEQ ID NO: 11710 - protein, 7 aa, synthetic construct
LLGHLAG

SEQ ID NO: 11711 - protein, 7 aa, synthetic construct
PLQHETK

SEQ ID NO: 11712 - protein, 7 aa, synthetic construct
QFDDATF

SEQ ID NO: 11713 - protein, 7 aa, synthetic construct
EKALEHD

SEQ ID NO: 11714 - protein, 7 aa, synthetic construct
RQQVTNE

SEQ ID NO: 11715 - protein, 7 aa, synthetic construct
EVHSYDD

SEQ ID NO: 11716 - protein, 7 aa, synthetic construct
PIQETNG

SEQ ID NO: 11717 - protein, 7 aa, synthetic construct
RGFKEGA

SEQ ID NO: 11718 - protein, 7 aa, synthetic construct
SHHFPNP

SEQ ID NO: 11719 - protein, 7 aa, synthetic construct
HIMGSAI

SEQ ID NO: 11720 - protein, 7 aa, synthetic construct
TNMATQR

SEQ ID NO: 11721 - protein, 7 aa, synthetic construct
FMNTSIS

SEQ ID NO: 11722 - protein, 7 aa, synthetic construct
EVGSTSD

SEQ ID NO: 11723 - protein, 7 aa, synthetic construct
HVTDHTK

SEQ ID NO: 11724 - protein, 7 aa, synthetic construct
TKDNPLY

SEQ ID NO: 11725 - protein, 7 aa, synthetic construct
CSKAQAC

SEQ ID NO: 11726 - protein, 7 aa, synthetic construct
GETEKQN

SEQ ID NO: 11727 - protein, 7 aa, synthetic construct
TQWASMA

SEQ ID NO: 11728 - protein, 7 aa, synthetic construct
NEHDFKG

SEQ ID NO: 11729 - protein, 7 aa, synthetic construct
LMAADKG

SEQ ID NO: 11730 - protein, 7 aa, synthetic construct
QYQHIHE

SEQ ID NO: 11731 - protein, 7 aa, synthetic construct
VPEYTSV

SEQ ID NO: 11732 - protein, 7 aa, synthetic construct
SLKDSLV

SEQ ID NO: 11733 - protein, 7 aa, synthetic construct
EGHNAFE

SEQ ID NO: 11734 - protein, 7 aa, synthetic construct
FHRPLPE

SEQ ID NO: 11735 - protein, 7 aa, synthetic construct
KNEEYQP

SEQ ID NO: 11736 - protein, 7 aa, synthetic construct
MVPVHAT

SEQ ID NO: 11737 - protein, 7 aa, synthetic construct
VDDGTYM

SEQ ID NO: 11738 - protein, 7 aa, synthetic construct
DLQKQMD

SEQ ID NO: 11739 - protein, 7 aa, synthetic construct
PMYLGEP

SEQ ID NO: 11740 - protein, 7 aa, synthetic construct
THSYKEH

SEQ ID NO: 11741 - protein, 7 aa, synthetic construct
WEMQEKR

SEQ ID NO: 11742 - protein, 7 aa, synthetic construct
SPEPWQA

SEQ ID NO: 11743 - protein, 7 aa, synthetic construct
YGPPPID

SEQ ID NO: 11744 - protein, 7 aa, synthetic construct
RHKDFDD

SEQ ID NO: 11745 - protein, 7 aa, synthetic construct
VDPAKNP

SEQ ID NO: 11746 - protein, 7 aa, synthetic construct
TRVQMAL

SEQ ID NO: 11747 - protein, 7 aa, synthetic construct
LHHAQTI

SEQ ID NO: 11748 - protein, 7 aa, synthetic construct
GTASKGL

SEQ ID NO: 11749 - protein, 7 aa, synthetic construct
LKTLDVK

SEQ ID NO: 11750 - protein, 7 aa, synthetic construct
KNYEKVG

SEQ ID NO: 11751 - protein, 7 aa, synthetic construct
FKVQGGL

SEQ ID NO: 11752 - protein, 7 aa, synthetic construct
GVTTGVR

SEQ ID NO: 11753 - protein, 7 aa, synthetic construct
LKFGQHV

SEQ ID NO: 11754 - protein, 7 aa, synthetic construct
PPLNPTQ

SEQ ID NO: 11755 - protein, 7 aa, synthetic construct
RADMEVR

SEQ ID NO: 11756 - protein, 7 aa, synthetic construct
PFMDNSS

SEQ ID NO: 11757 - protein, 7 aa, synthetic construct
PEHVRDA

SEQ ID NO: 11758 - protein, 7 aa, synthetic construct
GYRPNNN

SEQ ID NO: 11759 - protein, 7 aa, synthetic construct
NFRNSKD

SEQ ID NO: 11760 - protein, 7 aa, synthetic construct
MPNMETF

SEQ ID NO: 11761 - protein, 7 aa, synthetic construct
FKMQNDE

SEQ ID NO: 11762 - protein, 7 aa, synthetic construct
HMPGNIH

SEQ ID NO: 11763 - protein, 7 aa, synthetic construct
IDKEKLY

SEQ ID NO: 11764 - protein, 7 aa, synthetic construct
DTIGPDR

SEQ ID NO: 11765 - protein, 7 aa, synthetic construct
FVKPEML

SEQ ID NO: 11766 - protein, 7 aa, synthetic construct
FTTESVV

SEQ ID NO: 11767 - protein, 7 aa, synthetic construct
TVFPNAE

SEQ ID NO: 11768 - protein, 7 aa, synthetic construct
VEEQVNY

SEQ ID NO: 11769 - protein, 7 aa, synthetic construct
IPDPGKG

SEQ ID NO: 11770 - protein, 7 aa, synthetic construct
EVGPHIS

SEQ ID NO: 11771 - protein, 7 aa, synthetic construct
REFHEEG

SEQ ID NO: 11772 - protein, 7 aa, synthetic construct
KSDISRI

SEQ ID NO: 11773 - protein, 7 aa, synthetic construct
AQMIATK

SEQ ID NO: 11774 - protein, 7 aa, synthetic construct
NLEWEIK

SEQ ID NO: 11775 - protein, 7 aa, synthetic construct
KYDDAKI

SEQ ID NO: 11776 - protein, 7 aa, synthetic construct
PYNIQAP

SEQ ID NO: 11777 - protein, 7 aa, synthetic construct
QGMESAN

SEQ ID NO: 11778 - protein, 7 aa, synthetic construct
TPQINLI

SEQ ID NO: 11779 - protein, 7 aa, synthetic construct
NDQNMMV

SEQ ID NO: 11780 - protein, 7 aa, synthetic construct
TQSPEII

SEQ ID NO: 11781 - protein, 7 aa, synthetic construct
PSHGEFF

SEQ ID NO: 11782 - protein, 7 aa, synthetic construct
LLNPAFE

SEQ ID NO: 11783 - protein, 7 aa, synthetic construct
DPVPKQR

SEQ ID NO: 11784 - protein, 7 aa, synthetic construct
NSWKHEN

SEQ ID NO: 11785 - protein, 7 aa, synthetic construct
TQLTVHG

SEQ ID NO: 11786 - protein, 7 aa, synthetic construct
SFLNDGK

SEQ ID NO: 11787 - protein, 7 aa, synthetic construct
MNDRVSM

SEQ ID NO: 11788 - protein, 7 aa, synthetic construct
MPHEQAQ

SEQ ID NO: 11789 - protein, 7 aa, synthetic construct
NDKFGIV

SEQ ID NO: 11790 - protein, 7 aa, synthetic construct
TISDDYP

SEQ ID NO: 11791 - protein, 7 aa, synthetic construct
HGIGGDW

SEQ ID NO: 11792 - protein, 7 aa, synthetic construct
PGDSYRN

SEQ ID NO: 11793 - protein, 7 aa, synthetic construct
VSEHVMS

SEQ ID NO: 11794 - protein, 7 aa, synthetic construct
GMETKIL

SEQ ID NO: 11795 - protein, 7 aa, synthetic construct
FMSRDDH

SEQ ID NO: 11796 - protein, 7 aa, synthetic construct
HQAFSYD

SEQ ID NO: 11797 - protein, 7 aa, synthetic construct
HTVVAES

SEQ ID NO: 11798 - protein, 7 aa, synthetic construct
MQQPHDS

SEQ ID NO: 11799 - protein, 7 aa, synthetic construct
WNEDRPG

SEQ ID NO: 11800 - protein, 7 aa, synthetic construct
YEQDPNK

SEQ ID NO: 11801 - protein, 7 aa, synthetic construct
DVATVNY

SEQ ID NO: 11802 - protein, 7 aa, synthetic construct
LPGDGND

SEQ ID NO: 11803 - protein, 7 aa, synthetic construct
DIGNVRY

SEQ ID NO: 11804 - protein, 7 aa, synthetic construct
HGEYKLV

SEQ ID NO: 11805 - protein, 7 aa, synthetic construct
TNTLKIH

SEQ ID NO: 11806 - protein, 7 aa, synthetic construct
THTMQRL

SEQ ID NO: 11807 - protein, 7 aa, synthetic construct
LSSYEVL

SEQ ID NO: 11808 - protein, 7 aa, synthetic construct
SYEGVKF

SEQ ID NO: 11809 - protein, 7 aa, synthetic construct
DQSSQRE

SEQ ID NO: 11810 - protein, 7 aa, synthetic construct
SETGEGV

SEQ ID NO: 11811 - protein, 7 aa, synthetic construct
SNADLKL

SEQ ID NO: 11812 - protein, 7 aa, synthetic construct
KSHSNPV

SEQ ID NO: 11813 - protein, 7 aa, synthetic construct
MGHMQGT

SEQ ID NO: 11814 - protein, 7 aa, synthetic construct
IDAQGMP

SEQ ID NO: 11815 - protein, 7 aa, synthetic construct
FPIHQGS

SEQ ID NO: 11816 - protein, 7 aa, synthetic construct
LRPDEIQ

SEQ ID NO: 11817 - protein, 7 aa, synthetic construct
STIHLKM

SEQ ID NO: 11818 - protein, 7 aa, synthetic construct
TDSRSYE

SEQ ID NO: 11819 - protein, 7 aa, synthetic construct
LGAANFD

SEQ ID NO: 11820 - protein, 7 aa, synthetic construct
IYDGASR

SEQ ID NO: 11821 - protein, 7 aa, synthetic construct
DGRLGQN

SEQ ID NO: 11822 - protein, 7 aa, synthetic construct
YFGVVAD

SEQ ID NO: 11823 - protein, 7 aa, synthetic construct
PKSPLLN

SEQ ID NO: 11824 - protein, 7 aa, synthetic construct
LGRVLSM

SEQ ID NO: 11825 - protein, 7 aa, synthetic construct
AKIASQE

SEQ ID NO: 11826 - protein, 7 aa, synthetic construct
NSDTRPD

SEQ ID NO: 11827 - protein, 7 aa, synthetic construct
QPGLEQV

SEQ ID NO: 11828 - protein, 7 aa, synthetic construct
PLDDAYS

SEQ ID NO: 11829 - protein, 7 aa, synthetic construct
WPNPHMA

SEQ ID NO: 11830 - protein, 7 aa, synthetic construct
AQDLVRN

SEQ ID NO: 11831 - protein, 7 aa, synthetic construct
IRNTEFM

SEQ ID NO: 11832 - protein, 7 aa, synthetic construct
SEHFDHG

SEQ ID NO: 11833 - protein, 7 aa, synthetic construct
VIRQVEQ

SEQ ID NO: 11834 - protein, 7 aa, synthetic construct
QPSANWH

SEQ ID NO: 11835 - protein, 7 aa, synthetic construct
WNNEYGV

SEQ ID NO: 11836 - protein, 7 aa, synthetic construct
CHASTQC

SEQ ID NO: 11837 - protein, 7 aa, synthetic construct
HMSANEY

SEQ ID NO: 11838 - protein, 7 aa, synthetic construct
YDINRFD

SEQ ID NO: 11839 - protein, 7 aa, synthetic construct
GLLGLMP

SEQ ID NO: 11840 - protein, 7 aa, synthetic construct
ATSDDRA

SEQ ID NO: 11841 - protein, 7 aa, synthetic construct
GESPGAG

SEQ ID NO: 11842 - protein, 7 aa, synthetic construct
ERGGDYL

SEQ ID NO: 11843 - protein, 7 aa, synthetic construct
VKLNTDT

SEQ ID NO: 11844 - protein, 7 aa, synthetic construct
RLQRTTE

SEQ ID NO: 11845 - protein, 7 aa, synthetic construct
EIDWEAE

SEQ ID NO: 11846 - protein, 7 aa, synthetic construct
SGDVPDK

SEQ ID NO: 11847 - protein, 7 aa, synthetic construct
AYSHNDH

SEQ ID NO: 11848 - protein, 7 aa, synthetic construct
EETKMFS

SEQ ID NO: 11849 - protein, 7 aa, synthetic construct
VGSMRYA

SEQ ID NO: 11850 - protein, 7 aa, synthetic construct
LPSLKDV

SEQ ID NO: 11851 - protein, 7 aa, synthetic construct
HRPVNHM

SEQ ID NO: 11852 - protein, 7 aa, synthetic construct
ISDPSEL

SEQ ID NO: 11853 - protein, 7 aa, synthetic construct
LQAQGED

SEQ ID NO: 11854 - protein, 7 aa, synthetic construct
GYENRHI

SEQ ID NO: 11855 - protein, 7 aa, synthetic construct
QGLGFGP

SEQ ID NO: 11856 - protein, 7 aa, synthetic construct
ITQGAIL

SEQ ID NO: 11857 - protein, 7 aa, synthetic construct
FQFQSGD

SEQ ID NO: 11858 - protein, 7 aa, synthetic construct
KQEFEFQ

SEQ ID NO: 11859 - protein, 7 aa, synthetic construct
MDKDMIK

SEQ ID NO: 11860 - protein, 7 aa, synthetic construct
VMEGSMY

SEQ ID NO: 11861 - protein, 7 aa, synthetic construct
RIPIEKN

SEQ ID NO: 11862 - protein, 7 aa, synthetic construct
HDHKEND

SEQ ID NO: 11863 - protein, 7 aa, synthetic construct
HPFQQIP

SEQ ID NO: 11864 - protein, 7 aa, synthetic construct
ADKVVFV

SEQ ID NO: 11865 - protein, 7 aa, synthetic construct
GGDHAMG

SEQ ID NO: 11866 - protein, 7 aa, synthetic construct
IKNWQNN

SEQ ID NO: 11867 - protein, 7 aa, synthetic construct
YKEDQAP

SEQ ID NO: 11868 - protein, 7 aa, synthetic construct
QPIPGFG

SEQ ID NO: 11869 - protein, 7 aa, synthetic construct
TVSREDL

SEQ ID NO: 11870 - protein, 7 aa, synthetic construct
NVPPQLL

SEQ ID NO: 11871 - protein, 7 aa, synthetic construct
QIAYPTP

SEQ ID NO: 11872 - protein, 7 aa, synthetic construct
TPVPDEN

SEQ ID NO: 11873 - protein, 7 aa, synthetic construct
FERNEMD

SEQ ID NO: 11874 - protein, 7 aa, synthetic construct
KQRDQTF

SEQ ID NO: 11875 - protein, 7 aa, synthetic construct
LYNPSAA

SEQ ID NO: 11876 - protein, 7 aa, synthetic construct
YNKDGFH

SEQ ID NO: 11877 - protein, 7 aa, synthetic construct
FVHTGMK

SEQ ID NO: 11878 - protein, 7 aa, synthetic construct
MMNDWVE

SEQ ID NO: 11879 - protein, 7 aa, synthetic construct
RNDIQKH

SEQ ID NO: 11880 - protein, 7 aa, synthetic construct
VIKEHAI

SEQ ID NO: 11881 - protein, 7 aa, synthetic construct
GNGNLLI

SEQ ID NO: 11882 - protein, 7 aa, synthetic construct
NHSAHPL

SEQ ID NO: 11883 - protein, 7 aa, synthetic construct
DMEHDIA

SEQ ID NO: 11884 - protein, 7 aa, synthetic construct
FLDADKA

SEQ ID NO: 11885 - protein, 7 aa, synthetic construct
WQTLTTA

SEQ ID NO: 11886 - protein, 7 aa, synthetic construct
VWESKTV

SEQ ID NO: 11887 - protein, 7 aa, synthetic construct
SEMLAQR

SEQ ID NO: 11888 - protein, 7 aa, synthetic construct
WYEGNTV

SEQ ID NO: 11889 - protein, 7 aa, synthetic construct
ITGVDGM

SEQ ID NO: 11890 - protein, 7 aa, synthetic construct
YDHDHHQ

SEQ ID NO: 11891 - protein, 7 aa, synthetic construct
CSIVNCS

SEQ ID NO: 11892 - protein, 7 aa, synthetic construct
AFSANIR

SEQ ID NO: 11893 - protein, 7 aa, synthetic construct
LSKNDVY

SEQ ID NO: 11894 - protein, 7 aa, synthetic construct
NNDSEDY

SEQ ID NO: 11895 - protein, 7 aa, synthetic construct
WLPSTVP

SEQ ID NO: 11896 - protein, 7 aa, synthetic construct
WAIEHKN

SEQ ID NO: 11897 - protein, 7 aa, synthetic construct
MPQDVKK

SEQ ID NO: 11898 - protein, 7 aa, synthetic construct
TTDNNFY

SEQ ID NO: 11899 - protein, 7 aa, synthetic construct
KWSDAEV

SEQ ID NO: 11900 - protein, 7 aa, synthetic construct
SDALNQH

SEQ ID NO: 11901 - protein, 7 aa, synthetic construct
ATDYQQP

SEQ ID NO: 11902 - protein, 7 aa, synthetic construct
VPLLPQG

SEQ ID NO: 11903 - protein, 7 aa, synthetic construct
VDENGRN

SEQ ID NO: 11904 - protein, 7 aa, synthetic construct
AEPMDWK

SEQ ID NO: 11905 - protein, 7 aa, synthetic construct
MGDQQEM

SEQ ID NO: 11906 - protein, 7 aa, synthetic construct
CDRSKNA

SEQ ID NO: 11907 - protein, 7 aa, synthetic construct
DNPMAPD

SEQ ID NO: 11908 - protein, 7 aa, synthetic construct
NDQKPKG

SEQ ID NO: 11909 - protein, 7 aa, synthetic construct
PQASNEI

SEQ ID NO: 11910 - protein, 7 aa, synthetic construct
STESAAR

SEQ ID NO: 11911 - protein, 7 aa, synthetic construct
TQQREDA

SEQ ID NO: 11912 - protein, 7 aa, synthetic construct
FYDQSVN

SEQ ID NO: 11913 - protein, 7 aa, synthetic construct
YMTNVER

SEQ ID NO: 11914 - protein, 7 aa, synthetic construct
RTPPLLT

SEQ ID NO: 11915 - protein, 7 aa, synthetic construct
VAKGEMV

SEQ ID NO: 11916 - protein, 7 aa, synthetic construct
YVGDFAA

SEQ ID NO: 11917 - protein, 7 aa, synthetic construct
CAQFNCA

SEQ ID NO: 11918 - protein, 7 aa, synthetic construct
WSEELMG

SEQ ID NO: 11919 - protein, 7 aa, synthetic construct
LLPGFPM

SEQ ID NO: 11920 - protein, 7 aa, synthetic construct
PESQANI

SEQ ID NO: 11921 - protein, 7 aa, synthetic construct
TQSENYV

SEQ ID NO: 11922 - protein, 7 aa, synthetic construct
HENEGSI

SEQ ID NO: 11923 - protein, 7 aa, synthetic construct
HHEDMTI

SEQ ID NO: 11924 - protein, 7 aa, synthetic construct
ELPQNHR

SEQ ID NO: 11925 - protein, 7 aa, synthetic construct
IDNDKTP

SEQ ID NO: 11926 - protein, 7 aa, synthetic construct
RNENEVA

SEQ ID NO: 11927 - protein, 7 aa, synthetic construct
HAGPQWN

SEQ ID NO: 11928 - protein, 7 aa, synthetic construct
ITGELPD

SEQ ID NO: 11929 - protein, 7 aa, synthetic construct
WDVHQDM

SEQ ID NO: 11930 - protein, 7 aa, synthetic construct
KAEWETN

SEQ ID NO: 11931 - protein, 7 aa, synthetic construct
ERQWKHE

SEQ ID NO: 11932 - protein, 7 aa, synthetic construct
PQGETYM

SEQ ID NO: 11933 - protein, 7 aa, synthetic construct
DQVYTQR

SEQ ID NO: 11934 - protein, 7 aa, synthetic construct
MEPLWPP

SEQ ID NO: 11935 - protein, 7 aa, synthetic construct
DNLQRTF

SEQ ID NO: 11936 - protein, 7 aa, synthetic construct
IQRNAEK

SEQ ID NO: 11937 - protein, 7 aa, synthetic construct
IEPEMNR

SEQ ID NO: 11938 - protein, 7 aa, synthetic construct
IADYNKD

SEQ ID NO: 11939 - protein, 7 aa, synthetic construct
RRVEDLK

SEQ ID NO: 11940 - protein, 7 aa, synthetic construct
IDHVDYH

SEQ ID NO: 11941 - protein, 7 aa, synthetic construct
AGGDDGE

SEQ ID NO: 11942 - protein, 7 aa, synthetic construct
GVDQTGG

SEQ ID NO: 11943 - protein, 7 aa, synthetic construct
DGNNHKA

SEQ ID NO: 11944 - protein, 7 aa, synthetic construct
QYEEVVA

SEQ ID NO: 11945 - protein, 7 aa, synthetic construct
PTHDTES

SEQ ID NO: 11946 - protein, 7 aa, synthetic construct
AREPQMG

SEQ ID NO: 11947 - protein, 7 aa, synthetic construct
PLSTYRE

SEQ ID NO: 11948 - protein, 7 aa, synthetic construct
SYGPHGY

SEQ ID NO: 11949 - protein, 7 aa, synthetic construct
DEYQKYY

SEQ ID NO: 11950 - protein, 7 aa, synthetic construct
AIERTPY

SEQ ID NO: 11951 - protein, 7 aa, synthetic construct
EHRQYDP

SEQ ID NO: 11952 - protein, 7 aa, synthetic construct
YKDKVMF

SEQ ID NO: 11953 - protein, 7 aa, synthetic construct
VASYQVH

SEQ ID NO: 11954 - protein, 7 aa, synthetic construct
EALPHET

SEQ ID NO: 11955 - protein, 7 aa, synthetic construct
TLMNAKF

SEQ ID NO: 11956 - protein, 7 aa, synthetic construct
MHAQIES

SEQ ID NO: 11957 - protein, 7 aa, synthetic construct
NNDNKVL

SEQ ID NO: 11958 - protein, 7 aa, synthetic construct
PAQEIST

SEQ ID NO: 11959 - protein, 7 aa, synthetic construct
GLPKPLF

SEQ ID NO: 11960 - protein, 7 aa, synthetic construct
EKAVMMD

SEQ ID NO: 11961 - protein, 7 aa, synthetic construct
MLNARHV

SEQ ID NO: 11962 - protein, 7 aa, synthetic construct
EPSTWME

SEQ ID NO: 11963 - protein, 7 aa, synthetic construct
TGIDNRI

SEQ ID NO: 11964 - protein, 7 aa, synthetic construct
IQSESGW

SEQ ID NO: 11965 - protein, 7 aa, synthetic construct
AITPHLS

SEQ ID NO: 11966 - protein, 7 aa, synthetic construct
DVSQSQL

SEQ ID NO: 11967 - protein, 7 aa, synthetic construct
QPHMITP

SEQ ID NO: 11968 - protein, 7 aa, synthetic construct
GPQNEES

SEQ ID NO: 11969 - protein, 7 aa, synthetic construct
DFEGQQY

SEQ ID NO: 11970 - protein, 7 aa, synthetic construct
VYVKDKM

SEQ ID NO: 11971 - protein, 7 aa, synthetic construct
IPNFNGV

SEQ ID NO: 11972 - protein, 7 aa, synthetic construct
LREISEE

SEQ ID NO: 11973 - protein, 7 aa, synthetic construct
PQPSPDV

SEQ ID NO: 11974 - protein, 7 aa, synthetic construct
WGPKHQP

SEQ ID NO: 11975 - protein, 7 aa, synthetic construct
LAPKINY

SEQ ID NO: 11976 - protein, 7 aa, synthetic construct
KRVTEIP

SEQ ID NO: 11977 - protein, 7 aa, synthetic construct
MLKPHGY

SEQ ID NO: 11978 - protein, 7 aa, synthetic construct
QFNVQMT

SEQ ID NO: 11979 - protein, 7 aa, synthetic construct
GHKYELP

SEQ ID NO: 11980 - protein, 7 aa, synthetic construct
AQDKGTD

SEQ ID NO: 11981 - protein, 7 aa, synthetic construct
RPAPMDK

SEQ ID NO: 11982 - protein, 7 aa, synthetic construct
ATMMRTA

SEQ ID NO: 11983 - protein, 7 aa, synthetic construct
WPDSTFV

SEQ ID NO: 11984 - protein, 7 aa, synthetic construct
GTWKDLG

SEQ ID NO: 11985 - protein, 7 aa, synthetic construct
VEPNASG

SEQ ID NO: 11986 - protein, 7 aa, synthetic construct
GNLMKQQ

SEQ ID NO: 11987 - protein, 7 aa, synthetic construct
WIDSRMS

SEQ ID NO: 11988 - protein, 7 aa, synthetic construct
IAIHTSI

SEQ ID NO: 11989 - protein, 7 aa, synthetic construct
ELSTMIE

SEQ ID NO: 11990 - protein, 7 aa, synthetic construct
EEKNNAD

SEQ ID NO: 11991 - protein, 7 aa, synthetic construct
TEGSASQ

SEQ ID NO: 11992 - protein, 7 aa, synthetic construct
TMPDLEG

SEQ ID NO: 11993 - protein, 7 aa, synthetic construct
PGASDWG

SEQ ID NO: 11994 - protein, 7 aa, synthetic construct
ATVKDIR

SEQ ID NO: 11995 - protein, 7 aa, synthetic construct
FNTAVIT

SEQ ID NO: 11996 - protein, 7 aa, synthetic construct
LAKVDTF

SEQ ID NO: 11997 - protein, 7 aa, synthetic construct
NAQVDWE

SEQ ID NO: 11998 - protein, 7 aa, synthetic construct
QGVNNFA

SEQ ID NO: 11999 - protein, 7 aa, synthetic construct
EMAVQSS

SEQ ID NO: 12000 - protein, 7 aa, synthetic construct
FQNDNAI

SEQ ID NO: 12001 - protein, 7 aa, synthetic construct
REITLRD

SEQ ID NO: 12002 - protein, 7 aa, synthetic construct
TIVPMEN

SEQ ID NO: 12003 - protein, 7 aa, synthetic construct
NWRAEQG

SEQ ID NO: 12004 - protein, 7 aa, synthetic construct
FELKRLN

SEQ ID NO: 12005 - protein, 7 aa, synthetic construct
LIQDESG

SEQ ID NO: 12006 - protein, 7 aa, synthetic construct
PPAIDTW

SEQ ID NO: 12007 - protein, 7 aa, synthetic construct
HQDKQQV

SEQ ID NO: 12008 - protein, 7 aa, synthetic construct
EVHKDVE

SEQ ID NO: 12009 - protein, 7 aa, synthetic construct
MPGNQLV

SEQ ID NO: 12010 - protein, 7 aa, synthetic construct
SANPEKE

SEQ ID NO: 12011 - protein, 7 aa, synthetic construct
SMRNEGW

SEQ ID NO: 12012 - protein, 7 aa, synthetic construct
PTGMMDE

SEQ ID NO: 12013 - protein, 7 aa, synthetic construct
NFSHQNT

SEQ ID NO: 12014 - protein, 7 aa, synthetic construct
EPGVDAR

SEQ ID NO: 12015 - protein, 7 aa, synthetic construct
LNERTPW

SEQ ID NO: 12016 - protein, 7 aa, synthetic construct
AVLPSVD

SEQ ID NO: 12017 - protein, 7 aa, synthetic construct
PPSITID

SEQ ID NO: 12018 - protein, 7 aa, synthetic construct
HAMNVEE

SEQ ID NO: 12019 - protein, 7 aa, synthetic construct
AFRPEDP

SEQ ID NO: 12020 - protein, 7 aa, synthetic construct
TGEMMQL

SEQ ID NO: 12021 - protein, 7 aa, synthetic construct
ENVQSFK

SEQ ID NO: 12022 - protein, 7 aa, synthetic construct
LDFPGHK

SEQ ID NO: 12023 - protein, 7 aa, synthetic construct
PISPLRN

SEQ ID NO: 12024 - protein, 7 aa, synthetic construct
VTLKPAV

SEQ ID NO: 12025 - protein, 7 aa, synthetic construct
QARHNVS

SEQ ID NO: 12026 - protein, 7 aa, synthetic construct
INVDSQT

SEQ ID NO: 12027 - protein, 7 aa, synthetic construct
HNMMVTV

SEQ ID NO: 12028 - protein, 7 aa, synthetic construct
MIAKHRD

SEQ ID NO: 12029 - protein, 7 aa, synthetic construct
TDIYGDS

SEQ ID NO: 12030 - protein, 7 aa, synthetic construct
DGMHMPD

SEQ ID NO: 12031 - protein, 7 aa, synthetic construct
GHESYHA

SEQ ID NO: 12032 - protein, 7 aa, synthetic construct
GNDHPNP

SEQ ID NO: 12033 - protein, 7 aa, synthetic construct
AAYEQSH

SEQ ID NO: 12034 - protein, 7 aa, synthetic construct
HNNGIVK

SEQ ID NO: 12035 - protein, 7 aa, synthetic construct
EKAASMN

SEQ ID NO: 12036 - protein, 7 aa, synthetic construct
RESHGGH

SEQ ID NO: 12037 - protein, 7 aa, synthetic construct
TGVAPTF

SEQ ID NO: 12038 - protein, 7 aa, synthetic construct
QAAMPTE

SEQ ID NO: 12039 - protein, 7 aa, synthetic construct
SKMDLIS

SEQ ID NO: 12040 - protein, 7 aa, synthetic construct
SIVQGSK

SEQ ID NO: 12041 - protein, 7 aa, synthetic construct
PDIKEDS

SEQ ID NO: 12042 - protein, 7 aa, synthetic construct
LRDVVLN

SEQ ID NO: 12043 - protein, 7 aa, synthetic construct
QVEMGPN

SEQ ID NO: 12044 - protein, 7 aa, synthetic construct
HEDYAYE

SEQ ID NO: 12045 - protein, 7 aa, synthetic construct
KTMVEED

SEQ ID NO: 12046 - protein, 7 aa, synthetic construct
QGHTRGF

SEQ ID NO: 12047 - protein, 7 aa, synthetic construct
ADRETVN

SEQ ID NO: 12048 - protein, 7 aa, synthetic construct
DRNFPNN

SEQ ID NO: 12049 - protein, 7 aa, synthetic construct
AHRVVFE

SEQ ID NO: 12050 - protein, 7 aa, synthetic construct
VPAPLDG

SEQ ID NO: 12051 - protein, 7 aa, synthetic construct
LANIAHK

SEQ ID NO: 12052 - protein, 7 aa, synthetic construct
FLKNPGA

SEQ ID NO: 12053 - protein, 7 aa, synthetic construct
DPPYHNQ

SEQ ID NO: 12054 - protein, 7 aa, synthetic construct
RNMNSKD

SEQ ID NO: 12055 - protein, 7 aa, synthetic construct
WDPIKLA

SEQ ID NO: 12056 - protein, 7 aa, synthetic construct
PDGHGNG

SEQ ID NO: 12057 - protein, 7 aa, synthetic construct
GEYVSQI

SEQ ID NO: 12058 - protein, 7 aa, synthetic construct
HTIPVAS

SEQ ID NO: 12059 - protein, 7 aa, synthetic construct
EKAPGTG

SEQ ID NO: 12060 - protein, 7 aa, synthetic construct
RKADLTI

SEQ ID NO: 12061 - protein, 7 aa, synthetic construct
SGKSWPE

SEQ ID NO: 12062 - protein, 7 aa, synthetic construct
PVAERFL

SEQ ID NO: 12063 - protein, 7 aa, synthetic construct
QHMIDQK

SEQ ID NO: 12064 - protein, 7 aa, synthetic construct
QYDTQIG

SEQ ID NO: 12065 - protein, 7 aa, synthetic construct
LLQHKTE

SEQ ID NO: 12066 - protein, 7 aa, synthetic construct
HPDNVIH

SEQ ID NO: 12067 - protein, 7 aa, synthetic construct
QFTTLTE

SEQ ID NO: 12068 - protein, 7 aa, synthetic construct
YHQVHSQ

SEQ ID NO: 12069 - protein, 7 aa, synthetic construct
QSARMAH

SEQ ID NO: 12070 - protein, 7 aa, synthetic construct
PERNHEG

SEQ ID NO: 12071 - protein, 7 aa, synthetic construct
SRINDQQ

SEQ ID NO: 12072 - protein, 7 aa, synthetic construct
RMTSKDI

SEQ ID NO: 12073 - protein, 7 aa, synthetic construct
VSAATAA

SEQ ID NO: 12074 - protein, 7 aa, synthetic construct
ANVEPEL

SEQ ID NO: 12075 - protein, 7 aa, synthetic construct
MVLSEDS

SEQ ID NO: 12076 - protein, 7 aa, synthetic construct
NAEQLHE

SEQ ID NO: 12077 - protein, 7 aa, synthetic construct
VIVSTQS

SEQ ID NO: 12078 - protein, 7 aa, synthetic construct
RLVQKDL

SEQ ID NO: 12079 - protein, 7 aa, synthetic construct
ARMNSQQ

SEQ ID NO: 12080 - protein, 7 aa, synthetic construct
EATQGMI

SEQ ID NO: 12081 - protein, 7 aa, synthetic construct
STAIREL

SEQ ID NO: 12082 - protein, 7 aa, synthetic construct
WGHSGEE

SEQ ID NO: 12083 - protein, 7 aa, synthetic construct
DQHASYE

SEQ ID NO: 12084 - protein, 7 aa, synthetic construct
WVHSMSD

SEQ ID NO: 12085 - protein, 7 aa, synthetic construct
ENIHHNR

SEQ ID NO: 12086 - protein, 7 aa, synthetic construct
MQMKNIV

SEQ ID NO: 12087 - protein, 7 aa, synthetic construct
LEQTVHP

SEQ ID NO: 12088 - protein, 7 aa, synthetic construct
NYVKDNN

SEQ ID NO: 12089 - protein, 7 aa, synthetic construct
RDDYVSV

SEQ ID NO: 12090 - protein, 7 aa, synthetic construct
SFVSTLS

SEQ ID NO: 12091 - protein, 7 aa, synthetic construct
PPQNDYD

SEQ ID NO: 12092 - protein, 7 aa, synthetic construct
IHDKIMR

SEQ ID NO: 12093 - protein, 7 aa, synthetic construct
WGSQAHY

SEQ ID NO: 12094 - protein, 7 aa, synthetic construct
GPQLPID

SEQ ID NO: 12095 - protein, 7 aa, synthetic construct
IMRGDHL

SEQ ID NO: 12096 - protein, 7 aa, synthetic construct
IMYDDSA

SEQ ID NO: 12097 - protein, 7 aa, synthetic construct
RVHENQK

SEQ ID NO: 12098 - protein, 7 aa, synthetic construct
SVMMQHA

SEQ ID NO: 12099 - protein, 7 aa, synthetic construct
REHAYTV

SEQ ID NO: 12100 - protein, 7 aa, synthetic construct
ASDSIPM

SEQ ID NO: 12101 - protein, 7 aa, synthetic construct
RGTTNFT

SEQ ID NO: 12102 - protein, 7 aa, synthetic construct
GIYTKHD

SEQ ID NO: 12103 - protein, 7 aa, synthetic construct
HQDTSMT

SEQ ID NO: 12104 - protein, 7 aa, synthetic construct
KFDHQEI

SEQ ID NO: 12105 - protein, 7 aa, synthetic construct
PSQIDPE

SEQ ID NO: 12106 - protein, 7 aa, synthetic construct
LGLSHSE

SEQ ID NO: 12107 - protein, 7 aa, synthetic construct
ERHLTAM

SEQ ID NO: 12108 - protein, 7 aa, synthetic construct
HKPVEMI

SEQ ID NO: 12109 - protein, 7 aa, synthetic construct
TSMKFTM

SEQ ID NO: 12110 - protein, 7 aa, synthetic construct
WQREMEE

SEQ ID NO: 12111 - protein, 7 aa, synthetic construct
MLTGKDM

SEQ ID NO: 12112 - protein, 7 aa, synthetic construct
PYDAEKT

SEQ ID NO: 12113 - protein, 7 aa, synthetic construct
GNYGVMH

SEQ ID NO: 12114 - protein, 7 aa, synthetic construct
SSHTMDK

SEQ ID NO: 12115 - protein, 7 aa, synthetic construct
EPTMMVG

SEQ ID NO: 12116 - protein, 7 aa, synthetic construct
HDGTTDE

SEQ ID NO: 12117 - protein, 7 aa, synthetic construct
GIATGSY

SEQ ID NO: 12118 - protein, 7 aa, synthetic construct
TQYVQHS

SEQ ID NO: 12119 - protein, 7 aa, synthetic construct
YESVNTH

SEQ ID NO: 12120 - protein, 7 aa, synthetic construct
HDPSFVD

SEQ ID NO: 12121 - protein, 7 aa, synthetic construct
LNTDVEK

SEQ ID NO: 12122 - protein, 7 aa, synthetic construct
VQRETLG

SEQ ID NO: 12123 - protein, 7 aa, synthetic construct
AAKYPSM

SEQ ID NO: 12124 - protein, 7 aa, synthetic construct
AWQSTSM

SEQ ID NO: 12125 - protein, 7 aa, synthetic construct
FGMEEHS

SEQ ID NO: 12126 - protein, 7 aa, synthetic construct
DAQSPKG

SEQ ID NO: 12127 - protein, 7 aa, synthetic construct
RGDVHFM

SEQ ID NO: 12128 - protein, 7 aa, synthetic construct
VLMDQEA

SEQ ID NO: 12129 - protein, 7 aa, synthetic construct
QPVNSFN

SEQ ID NO: 12130 - protein, 7 aa, synthetic construct
HSTMIVA

SEQ ID NO: 12131 - protein, 7 aa, synthetic construct
QRALGTQ

SEQ ID NO: 12132 - protein, 7 aa, synthetic construct
VNVEPEA

SEQ ID NO: 12133 - protein, 7 aa, synthetic construct
KKQHDTT

SEQ ID NO: 12134 - protein, 7 aa, synthetic construct
GGMMVIS

SEQ ID NO: 12135 - protein, 7 aa, synthetic construct
PKDDAYL

SEQ ID NO: 12136 - protein, 7 aa, synthetic construct
VTQVTAL

SEQ ID NO: 12137 - protein, 7 aa, synthetic construct
NEWGIEG

SEQ ID NO: 12138 - protein, 7 aa, synthetic construct
VVDGDLN

SEQ ID NO: 12139 - protein, 7 aa, synthetic construct
MHQNRHA

SEQ ID NO: 12140 - protein, 7 aa, synthetic construct
NSHQPKD

SEQ ID NO: 12141 - protein, 7 aa, synthetic construct
QKTAVEG

SEQ ID NO: 12142 - protein, 7 aa, synthetic construct
NQMRVGL

SEQ ID NO: 12143 - protein, 7 aa, synthetic construct
YVNDTAL

SEQ ID NO: 12144 - protein, 7 aa, synthetic construct
DVYHDEI

SEQ ID NO: 12145 - protein, 7 aa, synthetic construct
GTSGTMF

SEQ ID NO: 12146 - protein, 7 aa, synthetic construct
DNNTLNH

SEQ ID NO: 12147 - protein, 7 aa, synthetic construct
TLQESVA

SEQ ID NO: 12148 - protein, 7 aa, synthetic construct
ANIEKPD

SEQ ID NO: 12149 - protein, 7 aa, synthetic construct
LNGQDKV

SEQ ID NO: 12150 - protein, 7 aa, synthetic construct
ALGILDE

SEQ ID NO: 12151 - protein, 7 aa, synthetic construct
PKTLISA

SEQ ID NO: 12152 - protein, 7 aa, synthetic construct
TRINSGH

SEQ ID NO: 12153 - protein, 7 aa, synthetic construct
PWDEGHT

SEQ ID NO: 12154 - protein, 7 aa, synthetic construct
GWASVDE

SEQ ID NO: 12155 - protein, 7 aa, synthetic construct
PYPLQDS

SEQ ID NO: 12156 - protein, 7 aa, synthetic construct
GKEGMKI

SEQ ID NO: 12157 - protein, 7 aa, synthetic construct
KSPFPGS

SEQ ID NO: 12158 - protein, 7 aa, synthetic construct
NGIEPTS

SEQ ID NO: 12159 - protein, 7 aa, synthetic construct
MHSTSYV

SEQ ID NO: 12160 - protein, 7 aa, synthetic construct
RITTSQV

SEQ ID NO: 12161 - protein, 7 aa, synthetic construct
PWQDGDK

SEQ ID NO: 12162 - protein, 7 aa, synthetic construct
MGTTIDY

SEQ ID NO: 12163 - protein, 7 aa, synthetic construct
HEVSTES

SEQ ID NO: 12164 - protein, 7 aa, synthetic construct
RTGIGHH

SEQ ID NO: 12165 - protein, 7 aa, synthetic construct
YYTIKES

SEQ ID NO: 12166 - protein, 7 aa, synthetic construct
AGPNNDF

SEQ ID NO: 12167 - protein, 7 aa, synthetic construct
YSVLNDE

SEQ ID NO: 12168 - protein, 7 aa, synthetic construct
DRDEPTG

SEQ ID NO: 12169 - protein, 7 aa, synthetic construct
NQSGLKL

SEQ ID NO: 12170 - protein, 7 aa, synthetic construct
LQHPRTA

SEQ ID NO: 12171 - protein, 7 aa, synthetic construct
KMQITGP

SEQ ID NO: 12172 - protein, 7 aa, synthetic construct
PTRQEYK

SEQ ID NO: 12173 - protein, 7 aa, synthetic construct
KADYETH

SEQ ID NO: 12174 - protein, 7 aa, synthetic construct
PYEDLST

SEQ ID NO: 12175 - protein, 7 aa, synthetic construct
GSEKANK

SEQ ID NO: 12176 - protein, 7 aa, synthetic construct
ERMDQKV

SEQ ID NO: 12177 - protein, 7 aa, synthetic construct
ESAQHIY

SEQ ID NO: 12178 - protein, 7 aa, synthetic construct
FQADIAG

SEQ ID NO: 12179 - protein, 7 aa, synthetic construct
NYVPGQF

SEQ ID NO: 12180 - protein, 7 aa, synthetic construct
ISDYTAV

SEQ ID NO: 12181 - protein, 7 aa, synthetic construct
FVQQQDY

SEQ ID NO: 12182 - protein, 7 aa, synthetic construct
HSIPTVV

SEQ ID NO: 12183 - protein, 7 aa, synthetic construct
MEFNQGA

SEQ ID NO: 12184 - protein, 7 aa, synthetic construct
KTEFVDG

SEQ ID NO: 12185 - protein, 7 aa, synthetic construct
QEYSEGT

SEQ ID NO: 12186 - protein, 7 aa, synthetic construct
SLRDSIM

SEQ ID NO: 12187 - protein, 7 aa, synthetic construct
GEAGQEI

SEQ ID NO: 12188 - protein, 7 aa, synthetic construct
HMKDTIV

SEQ ID NO: 12189 - protein, 7 aa, synthetic construct
TETSQDK

SEQ ID NO: 12190 - protein, 7 aa, synthetic construct
IMHPPNK

SEQ ID NO: 12191 - protein, 7 aa, synthetic construct
LEDRFVR

SEQ ID NO: 12192 - protein, 7 aa, synthetic construct
DKTYSML

SEQ ID NO: 12193 - protein, 7 aa, synthetic construct
TNFNVDR

SEQ ID NO: 12194 - protein, 7 aa, synthetic construct
LIQNGHH

SEQ ID NO: 12195 - protein, 7 aa, synthetic construct
VIIPDGM

SEQ ID NO: 12196 - protein, 7 aa, synthetic construct
QDSAYHG

SEQ ID NO: 12197 - protein, 7 aa, synthetic construct
YMAHPDK

SEQ ID NO: 12198 - protein, 7 aa, synthetic construct
TQLNNDA

SEQ ID NO: 12199 - protein, 7 aa, synthetic construct
LREPPDL

SEQ ID NO: 12200 - protein, 7 aa, synthetic construct
IGIPAEK

SEQ ID NO: 12201 - protein, 7 aa, synthetic construct
QEQPVIN

SEQ ID NO: 12202 - protein, 7 aa, synthetic construct
IPERQET

SEQ ID NO: 12203 - protein, 7 aa, synthetic construct
NEANWHE

SEQ ID NO: 12204 - protein, 7 aa, synthetic construct
VVPDQPY

SEQ ID NO: 12205 - protein, 7 aa, synthetic construct
VYPQQSI

SEQ ID NO: 12206 - protein, 7 aa, synthetic construct
PDTEWIS

SEQ ID NO: 12207 - protein, 7 aa, synthetic construct
GQDHPEF

SEQ ID NO: 12208 - protein, 7 aa, synthetic construct
GGHMEHG

SEQ ID NO: 12209 - protein, 7 aa, synthetic construct
GILTGEA

SEQ ID NO: 12210 - protein, 7 aa, synthetic construct
TTQTMVI

SEQ ID NO: 12211 - protein, 7 aa, synthetic construct
TKVISKA

SEQ ID NO: 12212 - protein, 7 aa, synthetic construct
KMGPPNM

SEQ ID NO: 12213 - protein, 7 aa, synthetic construct
KEGEVMD

SEQ ID NO: 12214 - protein, 7 aa, synthetic construct
QASPQAM

SEQ ID NO: 12215 - protein, 7 aa, synthetic construct
TLDEHSM

SEQ ID NO: 12216 - protein, 7 aa, synthetic construct
HTATNGQ

SEQ ID NO: 12217 - protein, 7 aa, synthetic construct
IAQWQMQ

SEQ ID NO: 12218 - protein, 7 aa, synthetic construct
HGIQKGL

SEQ ID NO: 12219 - protein, 7 aa, synthetic construct
IHNRMGM

SEQ ID NO: 12220 - protein, 7 aa, synthetic construct
FSDQTVN

SEQ ID NO: 12221 - protein, 7 aa, synthetic construct
KLSYNAV

SEQ ID NO: 12222 - protein, 7 aa, synthetic construct
LPADQER

SEQ ID NO: 12223 - protein, 7 aa, synthetic construct
FTEQMPH

SEQ ID NO: 12224 - protein, 7 aa, synthetic construct
FRGHDEM

SEQ ID NO: 12225 - protein, 7 aa, synthetic construct
EPATGYH

SEQ ID NO: 12226 - protein, 7 aa, synthetic construct
LVQTTFG

SEQ ID NO: 12227 - protein, 7 aa, synthetic construct
DQEFADY

SEQ ID NO: 12228 - protein, 7 aa, synthetic construct
DGVEHVP

SEQ ID NO: 12229 - protein, 7 aa, synthetic construct
NQQAETS

SEQ ID NO: 12230 - protein, 7 aa, synthetic construct
MYTVMQG

SEQ ID NO: 12231 - protein, 7 aa, synthetic construct
QPLGGMT

SEQ ID NO: 12232 - protein, 7 aa, synthetic construct
EEPAHRE

SEQ ID NO: 12233 - protein, 7 aa, synthetic construct
QQHPGMT

SEQ ID NO: 12234 - protein, 7 aa, synthetic construct
NDPNMNS

SEQ ID NO: 12235 - protein, 7 aa, synthetic construct
MSHTDGT

SEQ ID NO: 12236 - protein, 7 aa, synthetic construct
SGNRDIK

SEQ ID NO: 12237 - protein, 7 aa, synthetic construct
TLVDDTG

SEQ ID NO: 12238 - protein, 7 aa, synthetic construct
TKAGTLF

SEQ ID NO: 12239 - protein, 7 aa, synthetic construct
AMTEMAM

SEQ ID NO: 12240 - protein, 7 aa, synthetic construct
VGAEDYG

SEQ ID NO: 12241 - protein, 7 aa, synthetic construct
QVNIEQT

SEQ ID NO: 12242 - protein, 7 aa, synthetic construct
YSSYPIP

SEQ ID NO: 12243 - protein, 7 aa, synthetic construct
GGDVSPY

SEQ ID NO: 12244 - protein, 7 aa, synthetic construct
VGSQLQF

SEQ ID NO: 12245 - protein, 7 aa, synthetic construct
WGKFGAA

SEQ ID NO: 12246 - protein, 7 aa, synthetic construct
SDQGYVS

SEQ ID NO: 12247 - protein, 7 aa, synthetic construct
GPMLQGF

SEQ ID NO: 12248 - protein, 7 aa, synthetic construct
REQQTMW

SEQ ID NO: 12249 - protein, 7 aa, synthetic construct
EFKEAKW

SEQ ID NO: 12250 - protein, 7 aa, synthetic construct
HYRTNEY

SEQ ID NO: 12251 - protein, 7 aa, synthetic construct
YPRHQQQ

SEQ ID NO: 12252 - protein, 7 aa, synthetic construct
DMERMSH

SEQ ID NO: 12253 - protein, 7 aa, synthetic construct
HLAKQAL

SEQ ID NO: 12254 - protein, 7 aa, synthetic construct
LSDMDSK

SEQ ID NO: 12255 - protein, 7 aa, synthetic construct
VLHEHKH

SEQ ID NO: 12256 - protein, 7 aa, synthetic construct
GNEHSMM

SEQ ID NO: 12257 - protein, 7 aa, synthetic construct
AFKEEWI

SEQ ID NO: 12258 - protein, 7 aa, synthetic construct
QMRQQPQ

SEQ ID NO: 12259 - protein, 7 aa, synthetic construct
AITVQAG

SEQ ID NO: 12260 - protein, 7 aa, synthetic construct
NHIEHVD

SEQ ID NO: 12261 - protein, 7 aa, synthetic construct
TGNTNEN

SEQ ID NO: 12262 - protein, 7 aa, synthetic construct
PGDRKYT

SEQ ID NO: 12263 - protein, 7 aa, synthetic construct
MDNELFG

SEQ ID NO: 12264 - protein, 7 aa, synthetic construct
GIQKSNN

SEQ ID NO: 12265 - protein, 7 aa, synthetic construct
VSMGNDW

SEQ ID NO: 12266 - protein, 7 aa, synthetic construct
HTSAEQE

SEQ ID NO: 12267 - protein, 7 aa, synthetic construct
SAEDTTV

SEQ ID NO: 12268 - protein, 7 aa, synthetic construct
WSKFDTD

SEQ ID NO: 12269 - protein, 7 aa, synthetic construct
RNINGST

SEQ ID NO: 12270 - protein, 7 aa, synthetic construct
QGIQMEQ

SEQ ID NO: 12271 - protein, 7 aa, synthetic construct
MISNTIG

SEQ ID NO: 12272 - protein, 7 aa, synthetic construct
EKQSMDW

SEQ ID NO: 12273 - protein, 7 aa, synthetic construct
MTDHAFI

SEQ ID NO: 12274 - protein, 7 aa, synthetic construct
ATNRDSR

SEQ ID NO: 12275 - protein, 7 aa, synthetic construct
EVQREHD

SEQ ID NO: 12276 - protein, 7 aa, synthetic construct
SILSVES

SEQ ID NO: 12277 - protein, 7 aa, synthetic construct
LISSAVK

SEQ ID NO: 12278 - protein, 7 aa, synthetic construct
TAIATFH

SEQ ID NO: 12279 - protein, 7 aa, synthetic construct
AIYPAGL

SEQ ID NO: 12280 - protein, 7 aa, synthetic construct
VQQDYEA

SEQ ID NO: 12281 - protein, 7 aa, synthetic construct
YEVQTQD

SEQ ID NO: 12282 - protein, 7 aa, synthetic construct
NMRDFSV

SEQ ID NO: 12283 - protein, 7 aa, synthetic construct
QKFGNHM

SEQ ID NO: 12284 - protein, 7 aa, synthetic construct
FRTEYTT

SEQ ID NO: 12285 - protein, 7 aa, synthetic construct
MNSEGIG

SEQ ID NO: 12286 - protein, 7 aa, synthetic construct
QTMGQIT

SEQ ID NO: 12287 - protein, 7 aa, synthetic construct
LLSDPET

SEQ ID NO: 12288 - protein, 7 aa, synthetic construct
DSQTAHR

SEQ ID NO: 12289 - protein, 7 aa, synthetic construct
APYDGQI

SEQ ID NO: 12290 - protein, 7 aa, synthetic construct
NTEERSI

SEQ ID NO: 12291 - protein, 7 aa, synthetic construct
NIEQMPI

SEQ ID NO: 12292 - protein, 7 aa, synthetic construct
APTEGDW

SEQ ID NO: 12293 - protein, 7 aa, synthetic construct
VEAGYPD

SEQ ID NO: 12294 - protein, 7 aa, synthetic construct
DADRKED

SEQ ID NO: 12295 - protein, 7 aa, synthetic construct
LHDMEES

SEQ ID NO: 12296 - protein, 7 aa, synthetic construct
RIEDNFA

SEQ ID NO: 12297 - protein, 7 aa, synthetic construct
PWEKGAM

SEQ ID NO: 12298 - protein, 7 aa, synthetic construct
PYMKQIG

SEQ ID NO: 12299 - protein, 7 aa, synthetic construct
PALPNAE

SEQ ID NO: 12300 - protein, 7 aa, synthetic construct
FVQNQYE

SEQ ID NO: 12301 - protein, 7 aa, synthetic construct
SPQTPAP

SEQ ID NO: 12302 - protein, 7 aa, synthetic construct
WMTDRAQ

SEQ ID NO: 12303 - protein, 7 aa, synthetic construct
HTESMAF

SEQ ID NO: 12304 - protein, 7 aa, synthetic construct
RLNGHLP

SEQ ID NO: 12305 - protein, 7 aa, synthetic construct
YGNVWEP

SEQ ID NO: 12306 - protein, 7 aa, synthetic construct
RVVDEME

SEQ ID NO: 12307 - protein, 7 aa, synthetic construct
YPFDVGG

SEQ ID NO: 12308 - protein, 7 aa, synthetic construct
AMPGAMA

SEQ ID NO: 12309 - protein, 7 aa, synthetic construct
PVPMQNM

SEQ ID NO: 12310 - protein, 7 aa, synthetic construct
KDGYTLR

SEQ ID NO: 12311 - protein, 7 aa, synthetic construct
YYKDSNE

SEQ ID NO: 12312 - protein, 7 aa, synthetic construct
KWHNHED

SEQ ID NO: 12313 - protein, 7 aa, synthetic construct
EDINSKT

SEQ ID NO: 12314 - protein, 7 aa, synthetic construct
HNAEYLP

SEQ ID NO: 12315 - protein, 7 aa, synthetic construct
VKYKELH

SEQ ID NO: 12316 - protein, 7 aa, synthetic construct
AGMENYF

SEQ ID NO: 12317 - protein, 7 aa, synthetic construct
YLANTAK

SEQ ID NO: 12318 - protein, 7 aa, synthetic construct
YTTYRLD

SEQ ID NO: 12319 - protein, 7 aa, synthetic construct
LYPRALA

SEQ ID NO: 12320 - protein, 7 aa, synthetic construct
WIATQEK

SEQ ID NO: 12321 - protein, 7 aa, synthetic construct
AETSNRE

SEQ ID NO: 12322 - protein, 7 aa, synthetic construct
SMQIGQN

SEQ ID NO: 12323 - protein, 7 aa, synthetic construct
FNIHSHP

SEQ ID NO: 12324 - protein, 7 aa, synthetic construct
VYATKIS

SEQ ID NO: 12325 - protein, 7 aa, synthetic construct
DGDMMQR

SEQ ID NO: 12326 - protein, 7 aa, synthetic construct
DRSEHMF

SEQ ID NO: 12327 - protein, 7 aa, synthetic construct
WPDQYQD

SEQ ID NO: 12328 - protein, 7 aa, synthetic construct
QDSMETS

SEQ ID NO: 12329 - protein, 7 aa, synthetic construct
KDVHSHI

SEQ ID NO: 12330 - protein, 7 aa, synthetic construct
WNPPDVE

SEQ ID NO: 12331 - protein, 7 aa, synthetic construct
GTSRQVN

SEQ ID NO: 12332 - protein, 7 aa, synthetic construct
SSRGLDQ

SEQ ID NO: 12333 - protein, 7 aa, synthetic construct
YSNAMNS

SEQ ID NO: 12334 - protein, 7 aa, synthetic construct
AGASSYL

SEQ ID NO: 12335 - protein, 7 aa, synthetic construct
NGGDVGW

SEQ ID NO: 12336 - protein, 7 aa, synthetic construct
KNPEMSF

SEQ ID NO: 12337 - protein, 7 aa, synthetic construct
LVVDMTK

SEQ ID NO: 12338 - protein, 7 aa, synthetic construct
SHMPGKQ

SEQ ID NO: 12339 - protein, 7 aa, synthetic construct
METAPHH

SEQ ID NO: 12340 - protein, 7 aa, synthetic construct
QSEPRIL

SEQ ID NO: 12341 - protein, 7 aa, synthetic construct
MQKFQEL

SEQ ID NO: 12342 - protein, 7 aa, synthetic construct
KLTNISG

SEQ ID NO: 12343 - protein, 7 aa, synthetic construct
QSKSPFE

SEQ ID NO: 12344 - protein, 7 aa, synthetic construct
MHEANMN

SEQ ID NO: 12345 - protein, 7 aa, synthetic construct
REPYTMK

SEQ ID NO: 12346 - protein, 7 aa, synthetic construct
NGIEHNE

SEQ ID NO: 12347 - protein, 7 aa, synthetic construct
YPEKMAQ

SEQ ID NO: 12348 - protein, 7 aa, synthetic construct
SFVEGDV

SEQ ID NO: 12349 - protein, 7 aa, synthetic construct
ADADNRH

SEQ ID NO: 12350 - protein, 7 aa, synthetic construct
HFPDTSL

SEQ ID NO: 12351 - protein, 7 aa, synthetic construct
DLPIAFK

SEQ ID NO: 12352 - protein, 7 aa, synthetic construct
IEHLKGL

SEQ ID NO: 12353 - protein, 7 aa, synthetic construct
FMNTGQQ

SEQ ID NO: 12354 - protein, 7 aa, synthetic construct
YAHIRPE

SEQ ID NO: 12355 - protein, 7 aa, synthetic construct
SHADHPW

SEQ ID NO: 12356 - protein, 7 aa, synthetic construct
VPAHLRG

SEQ ID NO: 12357 - protein, 7 aa, synthetic construct
LFEISQG

SEQ ID NO: 12358 - protein, 7 aa, synthetic construct
TLDREAL

SEQ ID NO: 12359 - protein, 7 aa, synthetic construct
QSHEENA

SEQ ID NO: 12360 - protein, 7 aa, synthetic construct
MVVNRMD

SEQ ID NO: 12361 - protein, 7 aa, synthetic construct
VEGGMSP

SEQ ID NO: 12362 - protein, 7 aa, synthetic construct
SLNEKMG

SEQ ID NO: 12363 - protein, 7 aa, synthetic construct
HHGDGKN

SEQ ID NO: 12364 - protein, 7 aa, synthetic construct
DYKVGDY

SEQ ID NO: 12365 - protein, 7 aa, synthetic construct
LPHPRLE

SEQ ID NO: 12366 - protein, 7 aa, synthetic construct
ADVIVRE

SEQ ID NO: 12367 - protein, 7 aa, synthetic construct
WKDFKVS

SEQ ID NO: 12368 - protein, 7 aa, synthetic construct
TSAESEP

SEQ ID NO: 12369 - protein, 7 aa, synthetic construct
KYEGDKS

SEQ ID NO: 12370 - protein, 7 aa, synthetic construct
HVQDPLS

SEQ ID NO: 12371 - protein, 7 aa, synthetic construct
TNLLAHP

SEQ ID NO: 12372 - protein, 7 aa, synthetic construct
YEAADEM

SEQ ID NO: 12373 - protein, 7 aa, synthetic construct
KSAAEWM

SEQ ID NO: 12374 - protein, 7 aa, synthetic construct
DHLGSKH

SEQ ID NO: 12375 - protein, 7 aa, synthetic construct
NQDPEGN

SEQ ID NO: 12376 - protein, 7 aa, synthetic construct
THQTMME

SEQ ID NO: 12377 - protein, 7 aa, synthetic construct
NIPGDDI

SEQ ID NO: 12378 - protein, 7 aa, synthetic construct
WHDKVAE

SEQ ID NO: 12379 - protein, 7 aa, synthetic construct
WDAGVTH

SEQ ID NO: 12380 - protein, 7 aa, synthetic construct
LPHGLYA

SEQ ID NO: 12381 - protein, 7 aa, synthetic construct
KVQQMPL

SEQ ID NO: 12382 - protein, 7 aa, synthetic construct
IIERNMD

SEQ ID NO: 12383 - protein, 7 aa, synthetic construct
NSIRMRE

SEQ ID NO: 12384 - protein, 7 aa, synthetic construct
SPNEGWS

SEQ ID NO: 12385 - protein, 7 aa, synthetic construct
MSGFGQQ

SEQ ID NO: 12386 - protein, 7 aa, synthetic construct
TPSTARM

SEQ ID NO: 12387 - protein, 7 aa, synthetic construct
KGQYNGF

SEQ ID NO: 12388 - protein, 7 aa, synthetic construct
VSFNDKN

SEQ ID NO: 12389 - protein, 7 aa, synthetic construct
VDKPQSW

SEQ ID NO: 12390 - protein, 7 aa, synthetic construct
MIAQASH

SEQ ID NO: 12391 - protein, 7 aa, synthetic construct
GNPTNSF

SEQ ID NO: 12392 - protein, 7 aa, synthetic construct
KAEDMMT

SEQ ID NO: 12393 - protein, 7 aa, synthetic construct
HEQIAVD

SEQ ID NO: 12394 - protein, 7 aa, synthetic construct
KIPASFV

SEQ ID NO: 12395 - protein, 7 aa, synthetic construct
EASGSLD

SEQ ID NO: 12396 - protein, 7 aa, synthetic construct
IRSVEMI

SEQ ID NO: 12397 - protein, 7 aa, synthetic construct
MSDDLMR

SEQ ID NO: 12398 - protein, 7 aa, synthetic construct
GKQVVDL

SEQ ID NO: 12399 - protein, 7 aa, synthetic construct
MNNALTI

SEQ ID NO: 12400 - protein, 7 aa, synthetic construct
HSPPLPL

SEQ ID NO: 12401 - protein, 7 aa, synthetic construct
NQQLQAY

SEQ ID NO: 12402 - protein, 7 aa, synthetic construct
NIVTKDF

SEQ ID NO: 12403 - protein, 7 aa, synthetic construct
LNSNMYT

SEQ ID NO: 12404 - protein, 7 aa, synthetic construct
DSPDAGE

SEQ ID NO: 12405 - protein, 7 aa, synthetic construct
DSMSVRE

SEQ ID NO: 12406 - protein, 7 aa, synthetic construct
LRPHQNM

SEQ ID NO: 12407 - protein, 7 aa, synthetic construct
KTAEMPA

SEQ ID NO: 12408 - protein, 7 aa, synthetic construct
CAVPRCS

SEQ ID NO: 12409 - protein, 7 aa, synthetic construct
AAAFQEE

SEQ ID NO: 12410 - protein, 7 aa, synthetic construct
QDMIDRP

SEQ ID NO: 12411 - protein, 7 aa, synthetic construct
KFTEVGI

SEQ ID NO: 12412 - protein, 7 aa, synthetic construct
YQTDLKY

SEQ ID NO: 12413 - protein, 7 aa, synthetic construct
HTFNAHS

SEQ ID NO: 12414 - protein, 7 aa, synthetic construct
EATAHES

SEQ ID NO: 12415 - protein, 7 aa, synthetic construct
GNEKKVL

SEQ ID NO: 12416 - protein, 7 aa, synthetic construct
NHEAWSK

SEQ ID NO: 12417 - protein, 7 aa, synthetic construct
KRVDYAS

SEQ ID NO: 12418 - protein, 7 aa, synthetic construct
PENSDTR

SEQ ID NO: 12419 - protein, 7 aa, synthetic construct
TNITEAA

SEQ ID NO: 12420 - protein, 7 aa, synthetic construct
GDHPTTL

SEQ ID NO: 12421 - protein, 7 aa, synthetic construct
SYPSVDN

SEQ ID NO: 12422 - protein, 7 aa, synthetic construct
AGDLKQM

SEQ ID NO: 12423 - protein, 7 aa, synthetic construct
GKEQDIY

SEQ ID NO: 12424 - protein, 7 aa, synthetic construct
PSIRSPS

SEQ ID NO: 12425 - protein, 7 aa, synthetic construct
VEYDKVS

SEQ ID NO: 12426 - protein, 7 aa, synthetic construct
EVNDQHH

SEQ ID NO: 12427 - protein, 7 aa, synthetic construct
NLHPIPG

SEQ ID NO: 12428 - protein, 7 aa, synthetic construct
GNDRIQV

SEQ ID NO: 12429 - protein, 7 aa, synthetic construct
QPVDPEI

SEQ ID NO: 12430 - protein, 7 aa, synthetic construct
GAQFMHS

SEQ ID NO: 12431 - protein, 7 aa, synthetic construct
VRKGQEF

SEQ ID NO: 12432 - protein, 7 aa, synthetic construct
HPVESIS

SEQ ID NO: 12433 - protein, 7 aa, synthetic construct
VPADEEI

SEQ ID NO: 12434 - protein, 7 aa, synthetic construct
HKNNVSF

SEQ ID NO: 12435 - protein, 7 aa, synthetic construct
TAMRPVY

SEQ ID NO: 12436 - protein, 7 aa, synthetic construct
DESEKKE

SEQ ID NO: 12437 - protein, 7 aa, synthetic construct
GIKFNPL

SEQ ID NO: 12438 - protein, 7 aa, synthetic construct
KNNFEVK

SEQ ID NO: 12439 - protein, 7 aa, synthetic construct
NDVGPIE

SEQ ID NO: 12440 - protein, 7 aa, synthetic construct
NSMGLTF

SEQ ID NO: 12441 - protein, 7 aa, synthetic construct
HAIRQSQ

SEQ ID NO: 12442 - protein, 7 aa, synthetic construct
IEPVHVG

SEQ ID NO: 12443 - protein, 7 aa, synthetic construct
MKVKMLD

SEQ ID NO: 12444 - protein, 7 aa, synthetic construct
IEVKGIN

SEQ ID NO: 12445 - protein, 7 aa, synthetic construct
EYHDAMV

SEQ ID NO: 12446 - protein, 7 aa, synthetic construct
PRDTHDS

SEQ ID NO: 12447 - protein, 7 aa, synthetic construct
GDQATDV

SEQ ID NO: 12448 - protein, 7 aa, synthetic construct
KVDQMIE

SEQ ID NO: 12449 - protein, 7 aa, synthetic construct
EDPHVFP

SEQ ID NO: 12450 - protein, 7 aa, synthetic construct
PNIDYKT

SEQ ID NO: 12451 - protein, 7 aa, synthetic construct
PQTQSPM

SEQ ID NO: 12452 - protein, 7 aa, synthetic construct
MLTEYKM

SEQ ID NO: 12453 - protein, 7 aa, synthetic construct
NNIESLS

SEQ ID NO: 12454 - protein, 7 aa, synthetic construct
DGSATLA

SEQ ID NO: 12455 - protein, 7 aa, synthetic construct
YKEFERV

SEQ ID NO: 12456 - protein, 7 aa, synthetic construct
LSAIPRS

SEQ ID NO: 12457 - protein, 7 aa, synthetic construct
IAMGTKI

SEQ ID NO: 12458 - protein, 7 aa, synthetic construct
GFATVKS

SEQ ID NO: 12459 - protein, 7 aa, synthetic construct
PLNDVEY

SEQ ID NO: 12460 - protein, 7 aa, synthetic construct
EVTTNSM

SEQ ID NO: 12461 - protein, 7 aa, synthetic construct
NHPTEGR

SEQ ID NO: 12462 - protein, 7 aa, synthetic construct
AMVKLNA

SEQ ID NO: 12463 - protein, 7 aa, synthetic construct
HDFSGHG

SEQ ID NO: 12464 - protein, 7 aa, synthetic construct
PNSRANL

SEQ ID NO: 12465 - protein, 7 aa, synthetic construct
LRGVSGS

SEQ ID NO: 12466 - protein, 7 aa, synthetic construct
GLVPQDS

SEQ ID NO: 12467 - protein, 7 aa, synthetic construct
DMDNGAQ

SEQ ID NO: 12468 - protein, 7 aa, synthetic construct
SITSGMH

SEQ ID NO: 12469 - protein, 7 aa, synthetic construct
VSDVEKD

SEQ ID NO: 12470 - protein, 7 aa, synthetic construct
KKVQVEE

SEQ ID NO: 12471 - protein, 7 aa, synthetic construct
KLDQKCC

SEQ ID NO: 12472 - protein, 7 aa, synthetic construct
GNQPDIL

SEQ ID NO: 12473 - protein, 7 aa, synthetic construct
PWNAHPP

SEQ ID NO: 12474 - protein, 7 aa, synthetic construct
QGQLQSH

SEQ ID NO: 12475 - protein, 7 aa, synthetic construct
VPDKLDT

SEQ ID NO: 12476 - protein, 7 aa, synthetic construct
RDEIKAD

SEQ ID NO: 12477 - protein, 7 aa, synthetic construct
NPAPMMR

SEQ ID NO: 12478 - protein, 7 aa, synthetic construct
ATRDSNF

SEQ ID NO: 12479 - protein, 7 aa, synthetic construct
AEAVMPP

SEQ ID NO: 12480 - protein, 7 aa, synthetic construct
PGETTMH

SEQ ID NO: 12481 - protein, 7 aa, synthetic construct
DERELTS

SEQ ID NO: 12482 - protein, 7 aa, synthetic construct
IVQETMA

SEQ ID NO: 12483 - protein, 7 aa, synthetic construct
VLIDHSA

SEQ ID NO: 12484 - protein, 7 aa, synthetic construct
ESKDGMK

SEQ ID NO: 12485 - protein, 7 aa, synthetic construct
HGFQQAN

SEQ ID NO: 12486 - protein, 7 aa, synthetic construct
NSEQTLN

SEQ ID NO: 12487 - protein, 7 aa, synthetic construct
EWTKTKV

SEQ ID NO: 12488 - protein, 7 aa, synthetic construct
GGDHDQV

SEQ ID NO: 12489 - protein, 7 aa, synthetic construct
HLHYQSS

SEQ ID NO: 12490 - protein, 7 aa, synthetic construct
TVFPNQH

SEQ ID NO: 12491 - protein, 7 aa, synthetic construct
ESSAINT

SEQ ID NO: 12492 - protein, 7 aa, synthetic construct
EHEQDSS

SEQ ID NO: 12493 - protein, 7 aa, synthetic construct
SLHLNVA

SEQ ID NO: 12494 - protein, 7 aa, synthetic construct
PMHVADV

SEQ ID NO: 12495 - protein, 7 aa, synthetic construct
KLPFNET

SEQ ID NO: 12496 - protein, 7 aa, synthetic construct
GNPGADV

SEQ ID NO: 12497 - protein, 7 aa, synthetic construct
HHKMQAN

SEQ ID NO: 12498 - protein, 7 aa, synthetic construct
FREHEGH

SEQ ID NO: 12499 - protein, 7 aa, synthetic construct
FIMTKED

SEQ ID NO: 12500 - protein, 7 aa, synthetic construct
VETPHNS

SEQ ID NO: 12501 - protein, 7 aa, synthetic construct
EIWMGKP

SEQ ID NO: 12502 - protein, 7 aa, synthetic construct
RVQVFGE

SEQ ID NO: 12503 - protein, 7 aa, synthetic construct
KPPISED

SEQ ID NO: 12504 - protein, 7 aa, synthetic construct
ENGSFPP

SEQ ID NO: 12505 - protein, 7 aa, synthetic construct
KNFPEEH

SEQ ID NO: 12506 - protein, 7 aa, synthetic construct
MYADIGS

SEQ ID NO: 12507 - protein, 7 aa, synthetic construct
NDPPAVL

SEQ ID NO: 12508 - protein, 7 aa, synthetic construct
PIKISHS

SEQ ID NO: 12509 - protein, 7 aa, synthetic construct
DKASDMM

SEQ ID NO: 12510 - protein, 7 aa, synthetic construct
YTPVDNG

SEQ ID NO: 12511 - protein, 7 aa, synthetic construct
TIVGSFE

SEQ ID NO: 12512 - protein, 7 aa, synthetic construct
KLQEKYH

SEQ ID NO: 12513 - protein, 7 aa, synthetic construct
SLQFQEN

SEQ ID NO: 12514 - protein, 7 aa, synthetic construct
YDGQDGP

SEQ ID NO: 12515 - protein, 7 aa, synthetic construct
EPNQGNP

SEQ ID NO: 12516 - protein, 7 aa, synthetic construct
RHYAQPE

SEQ ID NO: 12517 - protein, 7 aa, synthetic construct
MHAHIGD

SEQ ID NO: 12518 - protein, 7 aa, synthetic construct
GVSDPGD

SEQ ID NO: 12519 - protein, 7 aa, synthetic construct
KIATNLL

SEQ ID NO: 12520 - protein, 7 aa, synthetic construct
EQIEGKL

SEQ ID NO: 12521 - protein, 7 aa, synthetic construct
RTTFDEN

SEQ ID NO: 12522 - protein, 7 aa, synthetic construct
SWEPNNF

SEQ ID NO: 12523 - protein, 7 aa, synthetic construct
EMAPINH

SEQ ID NO: 12524 - protein, 7 aa, synthetic construct
PDFDFET

SEQ ID NO: 12525 - protein, 7 aa, synthetic construct
VWGGSGQ

SEQ ID NO: 12526 - protein, 7 aa, synthetic construct
FNQWHVD

SEQ ID NO: 12527 - protein, 7 aa, synthetic construct
DAITPMP

SEQ ID NO: 12528 - protein, 7 aa, synthetic construct
NTVDPLQ

SEQ ID NO: 12529 - protein, 7 aa, synthetic construct
GQFRNRE

SEQ ID NO: 12530 - protein, 7 aa, synthetic construct
KSNEHGE

SEQ ID NO: 12531 - protein, 7 aa, synthetic construct
HTMMDGV

SEQ ID NO: 12532 - protein, 7 aa, synthetic construct
MKHPNRD

SEQ ID NO: 12533 - protein, 7 aa, synthetic construct
PPKKDGC

SEQ ID NO: 12534 - protein, 7 aa, synthetic construct
ITDQLQK

SEQ ID NO: 12535 - protein, 7 aa, synthetic construct
QMRDTHN

SEQ ID NO: 12536 - protein, 7 aa, synthetic construct
NWMGESH

SEQ ID NO: 12537 - protein, 7 aa, synthetic construct
SESGMDT

SEQ ID NO: 12538 - protein, 7 aa, synthetic construct
PKQERDN

SEQ ID NO: 12539 - protein, 7 aa, synthetic construct
KMQEMVK

SEQ ID NO: 12540 - protein, 7 aa, synthetic construct
ASDPGFW

SEQ ID NO: 12541 - protein, 7 aa, synthetic construct
PTIVNQN

SEQ ID NO: 12542 - protein, 7 aa, synthetic construct
AEIDLAR

SEQ ID NO: 12543 - protein, 7 aa, synthetic construct
SGVTRFP

SEQ ID NO: 12544 - protein, 7 aa, synthetic construct
EDGPTGS

SEQ ID NO: 12545 - protein, 7 aa, synthetic construct
HVDRNAE

SEQ ID NO: 12546 - protein, 7 aa, synthetic construct
AIHREGK

SEQ ID NO: 12547 - protein, 7 aa, synthetic construct
PNSYTAI

SEQ ID NO: 12548 - protein, 7 aa, synthetic construct
VEEAQHF

SEQ ID NO: 12549 - protein, 7 aa, synthetic construct
DSAPWIA

SEQ ID NO: 12550 - protein, 7 aa, synthetic construct
DESATRQ

SEQ ID NO: 12551 - protein, 7 aa, synthetic construct
LTLAKHN

SEQ ID NO: 12552 - protein, 7 aa, synthetic construct
HFGVQGT

SEQ ID NO: 12553 - protein, 7 aa, synthetic construct
TSNFNNN

SEQ ID NO: 12554 - protein, 7 aa, synthetic construct
DKEGWPN

SEQ ID NO: 12555 - protein, 7 aa, synthetic construct
YMQVAGN

SEQ ID NO: 12556 - protein, 7 aa, synthetic construct
NTEFVDE

SEQ ID NO: 12557 - protein, 7 aa, synthetic construct
QRYGEKQ

SEQ ID NO: 12558 - protein, 7 aa, synthetic construct
GNNELEA

SEQ ID NO: 12559 - protein, 7 aa, synthetic construct
VPGHSGK

SEQ ID NO: 12560 - protein, 7 aa, synthetic construct
PGAQMGS

SEQ ID NO: 12561 - protein, 7 aa, synthetic construct
ADNVLHE

SEQ ID NO: 12562 - protein, 7 aa, synthetic construct
LRTLIAD

SEQ ID NO: 12563 - protein, 7 aa, synthetic construct
DMSQPFA

SEQ ID NO: 12564 - protein, 7 aa, synthetic construct
DTLGEMD

SEQ ID NO: 12565 - protein, 7 aa, synthetic construct
FSQVMDG

SEQ ID NO: 12566 - protein, 7 aa, synthetic construct
ELVKQDY

SEQ ID NO: 12567 - protein, 7 aa, synthetic construct
FLDHGKK

SEQ ID NO: 12568 - protein, 7 aa, synthetic construct
MVGHIIP

SEQ ID NO: 12569 - protein, 7 aa, synthetic construct
SQFAADI

SEQ ID NO: 12570 - protein, 7 aa, synthetic construct
DQQKQYE

SEQ ID NO: 12571 - protein, 7 aa, synthetic construct
ILKPPPS

SEQ ID NO: 12572 - protein, 7 aa, synthetic construct
SNAYDDE

SEQ ID NO: 12573 - protein, 7 aa, synthetic construct
HMVKFME

SEQ ID NO: 12574 - protein, 7 aa, synthetic construct
SFTNRVM

SEQ ID NO: 12575 - protein, 7 aa, synthetic construct
GGPEELH

SEQ ID NO: 12576 - protein, 7 aa, synthetic construct
DMKMQEA

SEQ ID NO: 12577 - protein, 7 aa, synthetic construct
DMVKSAL

SEQ ID NO: 12578 - protein, 7 aa, synthetic construct
IMTDQEG

SEQ ID NO: 12579 - protein, 7 aa, synthetic construct
SAYDNNM

SEQ ID NO: 12580 - protein, 7 aa, synthetic construct
HMPDKIM

SEQ ID NO: 12581 - protein, 7 aa, synthetic construct
SFDRVSV

SEQ ID NO: 12582 - protein, 7 aa, synthetic construct
IGGIIGD

SEQ ID NO: 12583 - protein, 7 aa, synthetic construct
FRDESWD

SEQ ID NO: 12584 - protein, 7 aa, synthetic construct
GQDERVF

SEQ ID NO: 12585 - protein, 7 aa, synthetic construct
GEKLIFT

SEQ ID NO: 12586 - protein, 7 aa, synthetic construct
SDQLGYH

SEQ ID NO: 12587 - protein, 7 aa, synthetic construct
TLDYLKN

SEQ ID NO: 12588 - protein, 7 aa, synthetic construct
IEDNTTN

SEQ ID NO: 12589 - protein, 7 aa, synthetic construct
FINQVFE

SEQ ID NO: 12590 - protein, 7 aa, synthetic construct
TTTAKVH

SEQ ID NO: 12591 - protein, 7 aa, synthetic construct
WMSNITR

SEQ ID NO: 12592 - protein, 7 aa, synthetic construct
EIKDQEK

SEQ ID NO: 12593 - protein, 7 aa, synthetic construct
HNELFPL

SEQ ID NO: 12594 - protein, 7 aa, synthetic construct
GIQNFTM

SEQ ID NO: 12595 - protein, 7 aa, synthetic construct
EYGISET

SEQ ID NO: 12596 - protein, 7 aa, synthetic construct
MGDDPFQ

SEQ ID NO: 12597 - protein, 7 aa, synthetic construct
EGNTIAV

SEQ ID NO: 12598 - protein, 7 aa, synthetic construct
RIQDTNT

SEQ ID NO: 12599 - protein, 7 aa, synthetic construct
DKDMEVI

SEQ ID NO: 12600 - protein, 7 aa, synthetic construct
WEKAAIR

SEQ ID NO: 12601 - protein, 7 aa, synthetic construct
DLMKKYS

SEQ ID NO: 12602 - protein, 7 aa, synthetic construct
SEYKVKT

SEQ ID NO: 12603 - protein, 7 aa, synthetic construct
PVSLKGS

SEQ ID NO: 12604 - protein, 7 aa, synthetic construct
MVQSYNA

SEQ ID NO: 12605 - protein, 7 aa, synthetic construct
TDMGPAV

SEQ ID NO: 12606 - protein, 7 aa, synthetic construct
HAYNDNH

SEQ ID NO: 12607 - protein, 7 aa, synthetic construct
NDDPKYV

SEQ ID NO: 12608 - protein, 7 aa, synthetic construct
HDVKPDY

SEQ ID NO: 12609 - protein, 7 aa, synthetic construct
QMHNDHR

SEQ ID NO: 12610 - protein, 7 aa, synthetic construct
TQGDHWM

SEQ ID NO: 12611 - protein, 7 aa, synthetic construct
QLNALPM

SEQ ID NO: 12612 - protein, 7 aa, synthetic construct
IQVSSAQ

SEQ ID NO: 12613 - protein, 7 aa, synthetic construct
YRDWESQ

SEQ ID NO: 12614 - protein, 7 aa, synthetic construct
AGYVAQA

SEQ ID NO: 12615 - protein, 7 aa, synthetic construct
DKDKNND

SEQ ID NO: 12616 - protein, 7 aa, synthetic construct
MSKPYLQ

SEQ ID NO: 12617 - protein, 7 aa, synthetic construct
VQDNLIG

SEQ ID NO: 12618 - protein, 7 aa, synthetic construct
VFVASKN

SEQ ID NO: 12619 - protein, 7 aa, synthetic construct
HYGDQQD

SEQ ID NO: 12620 - protein, 7 aa, synthetic construct
FDPIKHE

SEQ ID NO: 12621 - protein, 7 aa, synthetic construct
MRGHPPT

SEQ ID NO: 12622 - protein, 7 aa, synthetic construct
MTRSLNS

SEQ ID NO: 12623 - protein, 7 aa, synthetic construct
TQMFNKD

SEQ ID NO: 12624 - protein, 7 aa, synthetic construct
PRVVEPS

SEQ ID NO: 12625 - protein, 7 aa, synthetic construct
PNVGRMM

SEQ ID NO: 12626 - protein, 7 aa, synthetic construct
SAEGMEF

SEQ ID NO: 12627 - protein, 7 aa, synthetic construct
TNTLPGY

SEQ ID NO: 12628 - protein, 7 aa, synthetic construct
EKTFPAD

SEQ ID NO: 12629 - protein, 7 aa, synthetic construct
LTKRIET

SEQ ID NO: 12630 - protein, 7 aa, synthetic construct
MAQSTAW

SEQ ID NO: 12631 - protein, 7 aa, synthetic construct
QEDQNNW

SEQ ID NO: 12632 - protein, 7 aa, synthetic construct
PENQQAE

SEQ ID NO: 12633 - protein, 7 aa, synthetic construct
VHMKDED

SEQ ID NO: 12634 - protein, 7 aa, synthetic construct
GKFEVTH

SEQ ID NO: 12635 - protein, 7 aa, synthetic construct
FEASAMQ

SEQ ID NO: 12636 - protein, 7 aa, synthetic construct
SKGSHEW

SEQ ID NO: 12637 - protein, 7 aa, synthetic construct
SIQMEEP

SEQ ID NO: 12638 - protein, 7 aa, synthetic construct
SDGMRAY

SEQ ID NO: 12639 - protein, 7 aa, synthetic construct
MSAKAMD

SEQ ID NO: 12640 - protein, 7 aa, synthetic construct
AEDNEKD

SEQ ID NO: 12641 - protein, 7 aa, synthetic construct
NTIDHEI

SEQ ID NO: 12642 - protein, 7 aa, synthetic construct
QARLAEF

SEQ ID NO: 12643 - protein, 7 aa, synthetic construct
YDHRIHS

SEQ ID NO: 12644 - protein, 7 aa, synthetic construct
TRDMRMT

SEQ ID NO: 12645 - protein, 7 aa, synthetic construct
AVSRAGW

SEQ ID NO: 12646 - protein, 7 aa, synthetic construct
MGVADKF

SEQ ID NO: 12647 - protein, 7 aa, synthetic construct
YEVREMV

SEQ ID NO: 12648 - protein, 7 aa, synthetic construct
WDSMNGA

SEQ ID NO: 12649 - protein, 7 aa, synthetic construct
TVSVSEV

SEQ ID NO: 12650 - protein, 7 aa, synthetic construct
VEYMQPE

SEQ ID NO: 12651 - protein, 7 aa, synthetic construct
DVSPPYP

SEQ ID NO: 12652 - protein, 7 aa, synthetic construct
FWASSEE

SEQ ID NO: 12653 - protein, 7 aa, synthetic construct
QTGGAPD

SEQ ID NO: 12654 - protein, 7 aa, synthetic construct
APQAVEH

SEQ ID NO: 12655 - protein, 7 aa, synthetic construct
TFPTEEV

SEQ ID NO: 12656 - protein, 7 aa, synthetic construct
WGERVRG

SEQ ID NO: 12657 - protein, 7 aa, synthetic construct
DHHLHTG

SEQ ID NO: 12658 - protein, 7 aa, synthetic construct
ETVGDNR

SEQ ID NO: 12659 - protein, 7 aa, synthetic construct
GDNIQSG

SEQ ID NO: 12660 - protein, 7 aa, synthetic construct
YVDRIEE

SEQ ID NO: 12661 - protein, 7 aa, synthetic construct
FVSGTRP

SEQ ID NO: 12662 - protein, 7 aa, synthetic construct
ALAMNQI

SEQ ID NO: 12663 - protein, 7 aa, synthetic construct
DNRFQNF

SEQ ID NO: 12664 - protein, 7 aa, synthetic construct
TDGYAEA

SEQ ID NO: 12665 - protein, 7 aa, synthetic construct
GYEPQLM

SEQ ID NO: 12666 - protein, 7 aa, synthetic construct
ETAGVLK

SEQ ID NO: 12667 - protein, 7 aa, synthetic construct
HEYVPSE

SEQ ID NO: 12668 - protein, 7 aa, synthetic construct
GAPRTPY

SEQ ID NO: 12669 - protein, 7 aa, synthetic construct
QWNQAQK

SEQ ID NO: 12670 - protein, 7 aa, synthetic construct
DDQNKGR

SEQ ID NO: 12671 - protein, 7 aa, synthetic construct
YKGWTPQ

SEQ ID NO: 12672 - protein, 7 aa, synthetic construct
DEHFPDQ

SEQ ID NO: 12673 - protein, 7 aa, synthetic construct
NPDASGM

SEQ ID NO: 12674 - protein, 7 aa, synthetic construct
ARSNEWM

SEQ ID NO: 12675 - protein, 7 aa, synthetic construct
WSDWGEP

SEQ ID NO: 12676 - protein, 7 aa, synthetic construct
INEFHAI

SEQ ID NO: 12677 - protein, 7 aa, synthetic construct
PFQQVVA

SEQ ID NO: 12678 - protein, 7 aa, synthetic construct
NNYHFDE

SEQ ID NO: 12679 - protein, 7 aa, synthetic construct
HGNWESP

SEQ ID NO: 12680 - protein, 7 aa, synthetic construct
ELSLQAR

SEQ ID NO: 12681 - protein, 7 aa, synthetic construct
HELPKMA

SEQ ID NO: 12682 - protein, 7 aa, synthetic construct
AVRQSIQ

SEQ ID NO: 12683 - protein, 7 aa, synthetic construct
RVEMQNK

SEQ ID NO: 12684 - protein, 7 aa, synthetic construct
VFSGMQK

SEQ ID NO: 12685 - protein, 7 aa, synthetic construct
TDINGVP

SEQ ID NO: 12686 - protein, 7 aa, synthetic construct
WMGNGVL

SEQ ID NO: 12687 - protein, 7 aa, synthetic construct
IENVNFT

SEQ ID NO: 12688 - protein, 7 aa, synthetic construct
TSDSHPK

SEQ ID NO: 12689 - protein, 7 aa, synthetic construct
IHLEMKS

SEQ ID NO: 12690 - protein, 7 aa, synthetic construct
RQDQIFV

SEQ ID NO: 12691 - protein, 7 aa, synthetic construct
IADQWDE

SEQ ID NO: 12692 - protein, 7 aa, synthetic construct
HMAQEMM

SEQ ID NO: 12693 - protein, 7 aa, synthetic construct
PGDPAFV

SEQ ID NO: 12694 - protein, 7 aa, synthetic construct
TKTDAAA

SEQ ID NO: 12695 - protein, 7 aa, synthetic construct
QSMSPNE

SEQ ID NO: 12696 - protein, 7 aa, synthetic construct
FPIDHVS

SEQ ID NO: 12697 - protein, 7 aa, synthetic construct
SMQHLDP

SEQ ID NO: 12698 - protein, 7 aa, synthetic construct
STINAGG

SEQ ID NO: 12699 - protein, 7 aa, synthetic construct
VKVIEDY

SEQ ID NO: 12700 - protein, 7 aa, synthetic construct
RQHNTWE

SEQ ID NO: 12701 - protein, 7 aa, synthetic construct
TRVTLMA

SEQ ID NO: 12702 - protein, 7 aa, synthetic construct
PISSRPY

SEQ ID NO: 12703 - protein, 7 aa, synthetic construct
FLEQRAI

SEQ ID NO: 12704 - protein, 7 aa, synthetic construct
HMIADGI

SEQ ID NO: 12705 - protein, 7 aa, synthetic construct
HTAEASV

SEQ ID NO: 12706 - protein, 7 aa, synthetic construct
NMHGMHN

SEQ ID NO: 12707 - protein, 7 aa, synthetic construct
APDAVLS

SEQ ID NO: 12708 - protein, 7 aa, synthetic construct
LINEMPH

SEQ ID NO: 12709 - protein, 7 aa, synthetic construct
TEQISNE

SEQ ID NO: 12710 - protein, 7 aa, synthetic construct
QSPDWDM

SEQ ID NO: 12711 - protein, 7 aa, synthetic construct
QSERMLR

SEQ ID NO: 12712 - protein, 7 aa, synthetic construct
EVKDQGD

SEQ ID NO: 12713 - protein, 7 aa, synthetic construct
TYDLSHS

SEQ ID NO: 12714 - protein, 7 aa, synthetic construct
PSDNPKR

SEQ ID NO: 12715 - protein, 7 aa, synthetic construct
RKVEDPV

SEQ ID NO: 12716 - protein, 7 aa, synthetic construct
YHNSAEW

SEQ ID NO: 12717 - protein, 7 aa, synthetic construct
NLSFMSE

SEQ ID NO: 12718 - protein, 7 aa, synthetic construct
SNFVGFE

SEQ ID NO: 12719 - protein, 7 aa, synthetic construct
TLEANHD

SEQ ID NO: 12720 - protein, 7 aa, synthetic construct
PEKNKFV

SEQ ID NO: 12721 - protein, 7 aa, synthetic construct
GMTDGGE

SEQ ID NO: 12722 - protein, 7 aa, synthetic construct
VSMDTVG

SEQ ID NO: 12723 - protein, 7 aa, synthetic construct
VFAYSDS

SEQ ID NO: 12724 - protein, 7 aa, synthetic construct
SHNGFAL

SEQ ID NO: 12725 - protein, 7 aa, synthetic construct
SPLKQVF

SEQ ID NO: 12726 - protein, 7 aa, synthetic construct
EAPKKFN

SEQ ID NO: 12727 - protein, 7 aa, synthetic construct
TMAKVVM

SEQ ID NO: 12728 - protein, 7 aa, synthetic construct
ISLNHDL

SEQ ID NO: 12729 - protein, 7 aa, synthetic construct
PEVHPKS

SEQ ID NO: 12730 - protein, 7 aa, synthetic construct
GVNDAPQ

SEQ ID NO: 12731 - protein, 7 aa, synthetic construct
DEGGPMR

SEQ ID NO: 12732 - protein, 7 aa, synthetic construct
ERPQTDI

SEQ ID NO: 12733 - protein, 7 aa, synthetic construct
LEHPNYA

SEQ ID NO: 12734 - protein, 7 aa, synthetic construct
NHTIHKM

SEQ ID NO: 12735 - protein, 7 aa, synthetic construct
HLNAMLD

SEQ ID NO: 12736 - protein, 7 aa, synthetic construct
ERYSHNA

SEQ ID NO: 12737 - protein, 7 aa, synthetic construct
VENFTVH

SEQ ID NO: 12738 - protein, 7 aa, synthetic construct
ILDYQES

SEQ ID NO: 12739 - protein, 7 aa, synthetic construct
DHNEKQK

SEQ ID NO: 12740 - protein, 7 aa, synthetic construct
HGETFGE

SEQ ID NO: 12741 - protein, 7 aa, synthetic construct
SEHLQPQ

SEQ ID NO: 12742 - protein, 7 aa, synthetic construct
TASDFLK

SEQ ID NO: 12743 - protein, 7 aa, synthetic construct
TQKHVHI

SEQ ID NO: 12744 - protein, 7 aa, synthetic construct
RSEYQSI

SEQ ID NO: 12745 - protein, 7 aa, synthetic construct
VMGNQAY

SEQ ID NO: 12746 - protein, 7 aa, synthetic construct
YDQQEHP

SEQ ID NO: 12747 - protein, 7 aa, synthetic construct
ETVATHI

SEQ ID NO: 12748 - protein, 7 aa, synthetic construct
SMQHRMS

SEQ ID NO: 12749 - protein, 7 aa, synthetic construct
TGDQHVG

SEQ ID NO: 12750 - protein, 7 aa, synthetic construct
SITNTEW

SEQ ID NO: 12751 - protein, 7 aa, synthetic construct
AQPGIDF

SEQ ID NO: 12752 - protein, 7 aa, synthetic construct
SVESMNH

SEQ ID NO: 12753 - protein, 7 aa, synthetic construct
LRGEDWI

SEQ ID NO: 12754 - protein, 7 aa, synthetic construct
EHFHPQK

SEQ ID NO: 12755 - protein, 7 aa, synthetic construct
SSEMKMS

SEQ ID NO: 12756 - protein, 7 aa, synthetic construct
LITVSED

SEQ ID NO: 12757 - protein, 7 aa, synthetic construct
SWERKVG

SEQ ID NO: 12758 - protein, 7 aa, synthetic construct
FDNPTSF

SEQ ID NO: 12759 - protein, 7 aa, synthetic construct
NTDYRAN

SEQ ID NO: 12760 - protein, 7 aa, synthetic construct
SDTNQNI

SEQ ID NO: 12761 - protein, 7 aa, synthetic construct
HAVNVVP

SEQ ID NO: 12762 - protein, 7 aa, synthetic construct
HLQPPHS

SEQ ID NO: 12763 - protein, 7 aa, synthetic construct
YDDMKME

SEQ ID NO: 12764 - protein, 7 aa, synthetic construct
IDINYSE

SEQ ID NO: 12765 - protein, 7 aa, synthetic construct
NLQDHAH

SEQ ID NO: 12766 - protein, 7 aa, synthetic construct
EEEGSHK

SEQ ID NO: 12767 - protein, 7 aa, synthetic construct
QYKHTTV

SEQ ID NO: 12768 - protein, 7 aa, synthetic construct
HDGQYVI

SEQ ID NO: 12769 - protein, 7 aa, synthetic construct
IELSRGL

SEQ ID NO: 12770 - protein, 7 aa, synthetic construct
RAIVDTV

SEQ ID NO: 12771 - protein, 7 aa, synthetic construct
QEAEWKE

SEQ ID NO: 12772 - protein, 7 aa, synthetic construct
WSGKSGV

SEQ ID NO: 12773 - protein, 7 aa, synthetic construct
VPDKYDG

SEQ ID NO: 12774 - protein, 7 aa, synthetic construct
EYLAPVE

SEQ ID NO: 12775 - protein, 7 aa, synthetic construct
FGNDQFR

SEQ ID NO: 12776 - protein, 7 aa, synthetic construct
IEEKYNH

SEQ ID NO: 12777 - protein, 7 aa, synthetic construct
DPIQGSF

SEQ ID NO: 12778 - protein, 7 aa, synthetic construct
HADVSVK

SEQ ID NO: 12779 - protein, 7 aa, synthetic construct
ATYSIEH

SEQ ID NO: 12780 - protein, 7 aa, synthetic construct
YVPGPDL

SEQ ID NO: 12781 - protein, 7 aa, synthetic construct
DVEQKTI

SEQ ID NO: 12782 - protein, 7 aa, synthetic construct
NATALHT

SEQ ID NO: 12783 - protein, 7 aa, synthetic construct
KPQWQME

SEQ ID NO: 12784 - protein, 7 aa, synthetic construct
VEAPDGH

SEQ ID NO: 12785 - protein, 7 aa, synthetic construct
MIKVTDI

SEQ ID NO: 12786 - protein, 7 aa, synthetic construct
PKKDEPV

SEQ ID NO: 12787 - protein, 7 aa, synthetic construct
GETGMHI

SEQ ID NO: 12788 - protein, 7 aa, synthetic construct
LGINQPD

SEQ ID NO: 12789 - protein, 7 aa, synthetic construct
QENASMH

SEQ ID NO: 12790 - protein, 7 aa, synthetic construct
VYQSYEH

SEQ ID NO: 12791 - protein, 7 aa, synthetic construct
MYATSNH

SEQ ID NO: 12792 - protein, 7 aa, synthetic construct
PSQVNFK

SEQ ID NO: 12793 - protein, 7 aa, synthetic construct
NTHSGDT

SEQ ID NO: 12794 - protein, 7 aa, synthetic construct
LQSRTVH

SEQ ID NO: 12795 - protein, 7 aa, synthetic construct
RDPLYSY

SEQ ID NO: 12796 - protein, 7 aa, synthetic construct
SPLMVAA

SEQ ID NO: 12797 - protein, 7 aa, synthetic construct
ASQGNSE

SEQ ID NO: 12798 - protein, 7 aa, synthetic construct
HTAELND

SEQ ID NO: 12799 - protein, 7 aa, synthetic construct
LDPDKNN

SEQ ID NO: 12800 - protein, 7 aa, synthetic construct
ERNLKAH

SEQ ID NO: 12801 - protein, 7 aa, synthetic construct
NEHDHTM

SEQ ID NO: 12802 - protein, 7 aa, synthetic construct
GEIHYQD

SEQ ID NO: 12803 - protein, 7 aa, synthetic construct
RENAMTD

SEQ ID NO: 12804 - protein, 7 aa, synthetic construct
WEMNAPA

SEQ ID NO: 12805 - protein, 7 aa, synthetic construct
YDKWVNI

SEQ ID NO: 12806 - protein, 7 aa, synthetic construct
KVQVGAV

SEQ ID NO: 12807 - protein, 7 aa, synthetic construct
GEAIVPQ

SEQ ID NO: 12808 - protein, 7 aa, synthetic construct
HMQEHLA

SEQ ID NO: 12809 - protein, 7 aa, synthetic construct
HWDTQDI

SEQ ID NO: 12810 - protein, 7 aa, synthetic construct
EASALNM

SEQ ID NO: 12811 - protein, 7 aa, synthetic construct
NFGGNVQ

SEQ ID NO: 12812 - protein, 7 aa, synthetic construct
VILTGEA

SEQ ID NO: 12813 - protein, 7 aa, synthetic construct
NSDTGHH

SEQ ID NO: 12814 - protein, 7 aa, synthetic construct
FMRIQPD

SEQ ID NO: 12815 - protein, 7 aa, synthetic construct
QRVHPQV

SEQ ID NO: 12816 - protein, 7 aa, synthetic construct
NVPLTVY

SEQ ID NO: 12817 - protein, 7 aa, synthetic construct
LVAHNDW

SEQ ID NO: 12818 - protein, 7 aa, synthetic construct
FQESNEV

SEQ ID NO: 12819 - protein, 7 aa, synthetic construct
QDEERVT

SEQ ID NO: 12820 - protein, 7 aa, synthetic construct
PTGEIGS

SEQ ID NO: 12821 - protein, 7 aa, synthetic construct
FMEGHQT

SEQ ID NO: 12822 - protein, 7 aa, synthetic construct
YNLIEDS

SEQ ID NO: 12823 - protein, 7 aa, synthetic construct
ALQDYVD

SEQ ID NO: 12824 - protein, 7 aa, synthetic construct
NQPMEKW

SEQ ID NO: 12825 - protein, 7 aa, synthetic construct
TGRWEEE

SEQ ID NO: 12826 - protein, 7 aa, synthetic construct
KRDDQYH

SEQ ID NO: 12827 - protein, 7 aa, synthetic construct
NQETNAG

SEQ ID NO: 12828 - protein, 7 aa, synthetic construct
MTEGSDL

SEQ ID NO: 12829 - protein, 7 aa, synthetic construct
AVATHHD

SEQ ID NO: 12830 - protein, 7 aa, synthetic construct
IAQDALQ

SEQ ID NO: 12831 - protein, 7 aa, synthetic construct
LGANDHF

SEQ ID NO: 12832 - protein, 7 aa, synthetic construct
FTETQEL

SEQ ID NO: 12833 - protein, 7 aa, synthetic construct
NNEEYQN

SEQ ID NO: 12834 - protein, 7 aa, synthetic construct
PDGIYGP

SEQ ID NO: 12835 - protein, 7 aa, synthetic construct
ITPTEPQ

SEQ ID NO: 12836 - protein, 7 aa, synthetic construct
KGEDPTH

SEQ ID NO: 12837 - protein, 7 aa, synthetic construct
WGPNQAL

SEQ ID NO: 12838 - protein, 7 aa, synthetic construct
KVGWVHD

SEQ ID NO: 12839 - protein, 7 aa, synthetic construct
YAEGEMW

SEQ ID NO: 12840 - protein, 7 aa, synthetic construct
HYSHDLG

SEQ ID NO: 12841 - protein, 7 aa, synthetic construct
MTFDGMK

SEQ ID NO: 12842 - protein, 7 aa, synthetic construct
QPAQVHI

SEQ ID NO: 12843 - protein, 7 aa, synthetic construct
PMAESTL

SEQ ID NO: 12844 - protein, 7 aa, synthetic construct
GIYGADI

SEQ ID NO: 12845 - protein, 7 aa, synthetic construct
QNTDNEP

SEQ ID NO: 12846 - protein, 7 aa, synthetic construct
IVAQNEF

SEQ ID NO: 12847 - protein, 7 aa, synthetic construct
DKDPLNE

SEQ ID NO: 12848 - protein, 7 aa, synthetic construct
DQVNLKP

SEQ ID NO: 12849 - protein, 7 aa, synthetic construct
TLDFQTR

SEQ ID NO: 12850 - protein, 7 aa, synthetic construct
KSERLGN

SEQ ID NO: 12851 - protein, 7 aa, synthetic construct
MEAGDDI

SEQ ID NO: 12852 - protein, 7 aa, synthetic construct
SHDNENF

SEQ ID NO: 12853 - protein, 7 aa, synthetic construct
VIHLRSP

SEQ ID NO: 12854 - protein, 7 aa, synthetic construct
FMADESL

SEQ ID NO: 12855 - protein, 7 aa, synthetic construct
TYIADPP

SEQ ID NO: 12856 - protein, 7 aa, synthetic construct
AQHDASD

SEQ ID NO: 12857 - protein, 7 aa, synthetic construct
TSTGYMT

SEQ ID NO: 12858 - protein, 7 aa, synthetic construct
EDNHGES

SEQ ID NO: 12859 - protein, 7 aa, synthetic construct
NVMGIMK

SEQ ID NO: 12860 - protein, 7 aa, synthetic construct
FLQQTVA

SEQ ID NO: 12861 - protein, 7 aa, synthetic construct
IRITEEA

SEQ ID NO: 12862 - protein, 7 aa, synthetic construct
GHQVPKT

SEQ ID NO: 12863 - protein, 7 aa, synthetic construct
PIHEHDT

SEQ ID NO: 12864 - protein, 7 aa, synthetic construct
SGYTVEE

SEQ ID NO: 12865 - protein, 7 aa, synthetic construct
NWDVDMP

SEQ ID NO: 12866 - protein, 7 aa, synthetic construct
HKLHANN

SEQ ID NO: 12867 - protein, 7 aa, synthetic construct
NEGFGQD

SEQ ID NO: 12868 - protein, 7 aa, synthetic construct
VVKWNLE

SEQ ID NO: 12869 - protein, 7 aa, synthetic construct
IPQAVAM

SEQ ID NO: 12870 - protein, 7 aa, synthetic construct
PWMDQIP

SEQ ID NO: 12871 - protein, 7 aa, synthetic construct
TISALDK

SEQ ID NO: 12872 - protein, 7 aa, synthetic construct
GINTNDG

SEQ ID NO: 12873 - protein, 7 aa, synthetic construct
QIPKTDF

SEQ ID NO: 12874 - protein, 7 aa, synthetic construct
VMGVTSI

SEQ ID NO: 12875 - protein, 7 aa, synthetic construct
NFTNDHD

SEQ ID NO: 12876 - protein, 7 aa, synthetic construct
NRDRMLP

SEQ ID NO: 12877 - protein, 7 aa, synthetic construct
KMLQAGH

SEQ ID NO: 12878 - protein, 7 aa, synthetic construct
PGYHETD

SEQ ID NO: 12879 - protein, 7 aa, synthetic construct
MGASDAE

SEQ ID NO: 12880 - protein, 7 aa, synthetic construct
NINADNE

SEQ ID NO: 12881 - protein, 7 aa, synthetic construct
HNMAKSQ

SEQ ID NO: 12882 - protein, 7 aa, synthetic construct
RHPALID

SEQ ID NO: 12883 - protein, 7 aa, synthetic construct
MNSGIED

SEQ ID NO: 12884 - protein, 7 aa, synthetic construct
ANQINRF

SEQ ID NO: 12885 - protein, 7 aa, synthetic construct
QPPTYGF

SEQ ID NO: 12886 - protein, 7 aa, synthetic construct
NNVILAH

SEQ ID NO: 12887 - protein, 7 aa, synthetic construct
DREEGMP

SEQ ID NO: 12888 - protein, 7 aa, synthetic construct
PGEWAQE

SEQ ID NO: 12889 - protein, 7 aa, synthetic construct
FIAEMAS

SEQ ID NO: 12890 - protein, 7 aa, synthetic construct
IHKMQYV

SEQ ID NO: 12891 - protein, 7 aa, synthetic construct
MEYGQMA

SEQ ID NO: 12892 - protein, 7 aa, synthetic construct
MKNNVLF

SEQ ID NO: 12893 - protein, 7 aa, synthetic construct
VMPVDHH

SEQ ID NO: 12894 - protein, 7 aa, synthetic construct
DIVEHFG

SEQ ID NO: 12895 - protein, 7 aa, synthetic construct
YMAAYER

SEQ ID NO: 12896 - protein, 7 aa, synthetic construct
FPETMGL

SEQ ID NO: 12897 - protein, 7 aa, synthetic construct
AWQTGKM

SEQ ID NO: 12898 - protein, 7 aa, synthetic construct
GQFEAVD

SEQ ID NO: 12899 - protein, 7 aa, synthetic construct
KHHMSSA

SEQ ID NO: 12900 - protein, 7 aa, synthetic construct
PGFMEDL

SEQ ID NO: 12901 - protein, 7 aa, synthetic construct
TYQGHML

SEQ ID NO: 12902 - protein, 7 aa, synthetic construct
EQIKEQI

SEQ ID NO: 12903 - protein, 7 aa, synthetic construct
HNVLGEF

SEQ ID NO: 12904 - protein, 7 aa, synthetic construct
HLKTNIL

SEQ ID NO: 12905 - protein, 7 aa, synthetic construct
GVKIPQV

SEQ ID NO: 12906 - protein, 7 aa, synthetic construct
VPTRNPM

SEQ ID NO: 12907 - protein, 7 aa, synthetic construct
MNFNSPR

SEQ ID NO: 12908 - protein, 7 aa, synthetic construct
DASGGGA

SEQ ID NO: 12909 - protein, 7 aa, synthetic construct
TYTVDPK

SEQ ID NO: 12910 - protein, 7 aa, synthetic construct
LEFQKKN

SEQ ID NO: 12911 - protein, 7 aa, synthetic construct
DLLHYPK

SEQ ID NO: 12912 - protein, 7 aa, synthetic construct
ANDHQDR

SEQ ID NO: 12913 - protein, 7 aa, synthetic construct
INPDPVD

SEQ ID NO: 12914 - protein, 7 aa, synthetic construct
MKLEKGD

SEQ ID NO: 12915 - protein, 7 aa, synthetic construct
EPPYERP

SEQ ID NO: 12916 - protein, 7 aa, synthetic construct
HNMTSNF

SEQ ID NO: 12917 - protein, 7 aa, synthetic construct
NKHFPYD

SEQ ID NO: 12918 - protein, 7 aa, synthetic construct
PKMLHVS

SEQ ID NO: 12919 - protein, 7 aa, synthetic construct
FIRTAPP

SEQ ID NO: 12920 - protein, 7 aa, synthetic construct
GNDNHTT

SEQ ID NO: 12921 - protein, 7 aa, synthetic construct
ESHAFQH

SEQ ID NO: 12922 - protein, 7 aa, synthetic construct
THELKKA

SEQ ID NO: 12923 - protein, 7 aa, synthetic construct
FAKHMQM

SEQ ID NO: 12924 - protein, 7 aa, synthetic construct
NQTATIF

SEQ ID NO: 12925 - protein, 7 aa, synthetic construct
FGGLEDN

SEQ ID NO: 12926 - protein, 7 aa, synthetic construct
YDQWVES

SEQ ID NO: 12927 - protein, 7 aa, synthetic construct
NPLQAQN

SEQ ID NO: 12928 - protein, 7 aa, synthetic construct
YLEMSIA

SEQ ID NO: 12929 - protein, 7 aa, synthetic construct
RETDNMQ

SEQ ID NO: 12930 - protein, 7 aa, synthetic construct
IPYPRLE

SEQ ID NO: 12931 - protein, 7 aa, synthetic construct
REHEDET

SEQ ID NO: 12932 - protein, 7 aa, synthetic construct
PSDAGTD

SEQ ID NO: 12933 - protein, 7 aa, synthetic construct
FDTTRGY

SEQ ID NO: 12934 - protein, 7 aa, synthetic construct
MNQMRVT

SEQ ID NO: 12935 - protein, 7 aa, synthetic construct
HHGVEYV

SEQ ID NO: 12936 - protein, 7 aa, synthetic construct
NLDDHYR

SEQ ID NO: 12937 - protein, 7 aa, synthetic construct
TNKHPHY

SEQ ID NO: 12938 - protein, 7 aa, synthetic construct
AAEVIKN

SEQ ID NO: 12939 - protein, 7 aa, synthetic construct
SPGMMAG

SEQ ID NO: 12940 - protein, 7 aa, synthetic construct
EQEWTSD

SEQ ID NO: 12941 - protein, 7 aa, synthetic construct
HNQTVDF

SEQ ID NO: 12942 - protein, 7 aa, synthetic construct
YMEKILP

SEQ ID NO: 12943 - protein, 7 aa, synthetic construct
ALSNDEM

SEQ ID NO: 12944 - protein, 7 aa, synthetic construct
NEINTER

SEQ ID NO: 12945 - protein, 7 aa, synthetic construct
WRNLDQQ

SEQ ID NO: 12946 - protein, 7 aa, synthetic construct
IVQVEGA

SEQ ID NO: 12947 - protein, 7 aa, synthetic construct
MHKHVEH

SEQ ID NO: 12948 - protein, 7 aa, synthetic construct
PKDIRSP

SEQ ID NO: 12949 - protein, 7 aa, synthetic construct
DEWITTI

SEQ ID NO: 12950 - protein, 7 aa, synthetic construct
DREESGE

SEQ ID NO: 12951 - protein, 7 aa, synthetic construct
QPPFTVM

SEQ ID NO: 12952 - protein, 7 aa, synthetic construct
AAWKEDL

SEQ ID NO: 12953 - protein, 7 aa, synthetic construct
EINWHDE

SEQ ID NO: 12954 - protein, 7 aa, synthetic construct
PWSAAVP

SEQ ID NO: 12955 - protein, 7 aa, synthetic construct
HVKIQFQ

SEQ ID NO: 12956 - protein, 7 aa, synthetic construct
PDYMGFE

SEQ ID NO: 12957 - protein, 7 aa, synthetic construct
TELTGLH

SEQ ID NO: 12958 - protein, 7 aa, synthetic construct
VEKKIGE

SEQ ID NO: 12959 - protein, 7 aa, synthetic construct
PKTPLKL

SEQ ID NO: 12960 - protein, 7 aa, synthetic construct
DWGTDHS

SEQ ID NO: 12961 - protein, 7 aa, synthetic construct
TKMDINM

SEQ ID NO: 12962 - protein, 7 aa, synthetic construct
RQLTGVV

SEQ ID NO: 12963 - protein, 7 aa, synthetic construct
PIADHES

SEQ ID NO: 12964 - protein, 7 aa, synthetic construct
QEASPEG

SEQ ID NO: 12965 - protein, 7 aa, synthetic construct
SAPTDAF

SEQ ID NO: 12966 - protein, 7 aa, synthetic construct
FITNHNH

SEQ ID NO: 12967 - protein, 7 aa, synthetic construct
TQSEVWE

SEQ ID NO: 12968 - protein, 7 aa, synthetic construct
VPTPGEV

SEQ ID NO: 12969 - protein, 7 aa, synthetic construct
QYHPHPG

SEQ ID NO: 12970 - protein, 7 aa, synthetic construct
GIVAPAR

SEQ ID NO: 12971 - protein, 7 aa, synthetic construct
PQATFPP

SEQ ID NO: 12972 - protein, 7 aa, synthetic construct
LPHDVSP

SEQ ID NO: 12973 - protein, 7 aa, synthetic construct
EYVQTVA

SEQ ID NO: 12974 - protein, 7 aa, synthetic construct
VDQVDQH

SEQ ID NO: 12975 - protein, 7 aa, synthetic construct
GMNEQAQ

SEQ ID NO: 12976 - protein, 7 aa, synthetic construct
NVMHSSV

SEQ ID NO: 12977 - protein, 7 aa, synthetic construct
EESGNTW

SEQ ID NO: 12978 - protein, 7 aa, synthetic construct
YSIQIGH

SEQ ID NO: 12979 - protein, 7 aa, synthetic construct
PHGIDQE

SEQ ID NO: 12980 - protein, 7 aa, synthetic construct
TSETIPL

SEQ ID NO: 12981 - protein, 7 aa, synthetic construct
ELKYSHD

SEQ ID NO: 12982 - protein, 7 aa, synthetic construct
QGIIINE

SEQ ID NO: 12983 - protein, 7 aa, synthetic construct
YNLTAQV

SEQ ID NO: 12984 - protein, 7 aa, synthetic construct
DIPQWAA

SEQ ID NO: 12985 - protein, 7 aa, synthetic construct
ATATLKI

SEQ ID NO: 12986 - protein, 7 aa, synthetic construct
TPIADNF

SEQ ID NO: 12987 - protein, 7 aa, synthetic construct
QLDSNSP

SEQ ID NO: 12988 - protein, 7 aa, synthetic construct
VGSDLVN

SEQ ID NO: 12989 - protein, 7 aa, synthetic construct
DYEGTGG

SEQ ID NO: 12990 - protein, 7 aa, synthetic construct
SGSIEHY

SEQ ID NO: 12991 - protein, 7 aa, synthetic construct
AIQGADA

SEQ ID NO: 12992 - protein, 7 aa, synthetic construct
NEYRPQV

SEQ ID NO: 12993 - protein, 7 aa, synthetic construct
TPPENGD

SEQ ID NO: 12994 - protein, 7 aa, synthetic construct
PKYEKGY

SEQ ID NO: 12995 - protein, 7 aa, synthetic construct
FGQDASW

SEQ ID NO: 12996 - protein, 7 aa, synthetic construct
VSHPTLY

SEQ ID NO: 12997 - protein, 7 aa, synthetic construct
NNSHYTF

SEQ ID NO: 12998 - protein, 7 aa, synthetic construct
TKSAKEH

SEQ ID NO: 12999 - protein, 7 aa, synthetic construct
FNASADA

SEQ ID NO: 13000 - protein, 7 aa, synthetic construct
FPIDSAP

SEQ ID NO: 13001 - protein, 7 aa, synthetic construct
MKDTLGF

SEQ ID NO: 13002 - protein, 7 aa, synthetic construct
TYQKSTN

SEQ ID NO: 13003 - protein, 7 aa, synthetic construct
LDPAIPG

SEQ ID NO: 13004 - protein, 7 aa, synthetic construct
IKTETPR

SEQ ID NO: 13005 - protein, 7 aa, synthetic construct
SQRALTV

SEQ ID NO: 13006 - protein, 7 aa, synthetic construct
RFEDVQW

SEQ ID NO: 13007 - protein, 7 aa, synthetic construct
VHDKDKQ

SEQ ID NO: 13008 - protein, 7 aa, synthetic construct
NVMKHDI

SEQ ID NO: 13009 - protein, 7 aa, synthetic construct
VFDSAID

SEQ ID NO: 13010 - protein, 7 aa, synthetic construct
VHTDLGP

SEQ ID NO: 13011 - protein, 7 aa, synthetic construct
RDHKDMF

SEQ ID NO: 13012 - protein, 7 aa, synthetic construct
TLPSESF

SEQ ID NO: 13013 - protein, 7 aa, synthetic construct
DQYVIEL

SEQ ID NO: 13014 - protein, 7 aa, synthetic construct
GMMHSAS

SEQ ID NO: 13015 - protein, 7 aa, synthetic construct
YIHETSI

SEQ ID NO: 13016 - protein, 7 aa, synthetic construct
AHPRQNA

SEQ ID NO: 13017 - protein, 7 aa, synthetic construct
DNPTIHF

SEQ ID NO: 13018 - protein, 7 aa, synthetic construct
AHVDQTH

SEQ ID NO: 13019 - protein, 7 aa, synthetic construct
IEHITLT

SEQ ID NO: 13020 - protein, 7 aa, synthetic construct
TKQNREV

SEQ ID NO: 13021 - protein, 7 aa, synthetic construct
TETAGYQ

SEQ ID NO: 13022 - protein, 7 aa, synthetic construct
DGRPHDW

SEQ ID NO: 13023 - protein, 7 aa, synthetic construct
IRMNEKM

SEQ ID NO: 13024 - protein, 7 aa, synthetic construct
VPQWEQT

SEQ ID NO: 13025 - protein, 7 aa, synthetic construct
LLASGPI

SEQ ID NO: 13026 - protein, 7 aa, synthetic construct
AMSPLGY

SEQ ID NO: 13027 - protein, 7 aa, synthetic construct
MWEHQEM

SEQ ID NO: 13028 - protein, 7 aa, synthetic construct
NKFDDIA

SEQ ID NO: 13029 - protein, 7 aa, synthetic construct
TSLPKHQ

SEQ ID NO: 13030 - protein, 7 aa, synthetic construct
IMLKKAE

SEQ ID NO: 13031 - protein, 7 aa, synthetic construct
VYGYKEQ

SEQ ID NO: 13032 - protein, 7 aa, synthetic construct
QDGNAEM

SEQ ID NO: 13033 - protein, 7 aa, synthetic construct
HGMGAIM

SEQ ID NO: 13034 - protein, 7 aa, synthetic construct
GRGHMKE

SEQ ID NO: 13035 - protein, 7 aa, synthetic construct
HWHEEKE

SEQ ID NO: 13036 - protein, 7 aa, synthetic construct
HHSKMIV

SEQ ID NO: 13037 - protein, 7 aa, synthetic construct
VAEYTSL

SEQ ID NO: 13038 - protein, 7 aa, synthetic construct
HYRVQIE

SEQ ID NO: 13039 - protein, 7 aa, synthetic construct
NAMKHQT

SEQ ID NO: 13040 - protein, 7 aa, synthetic construct
DHVMRDK

SEQ ID NO: 13041 - protein, 7 aa, synthetic construct
VGMTMEV

SEQ ID NO: 13042 - protein, 7 aa, synthetic construct
HMQNYTI

SEQ ID NO: 13043 - protein, 7 aa, synthetic construct
PTLIEGA

SEQ ID NO: 13044 - protein, 7 aa, synthetic construct
NDVAGHH

SEQ ID NO: 13045 - protein, 7 aa, synthetic construct
IDASQVH

SEQ ID NO: 13046 - protein, 7 aa, synthetic construct
GDNRIDW

SEQ ID NO: 13047 - protein, 7 aa, synthetic construct
EMYATPP

SEQ ID NO: 13048 - protein, 7 aa, synthetic construct
AEHAKQQ

SEQ ID NO: 13049 - protein, 7 aa, synthetic construct
PEFHHNA

SEQ ID NO: 13050 - protein, 7 aa, synthetic construct
WHDRAIP

SEQ ID NO: 13051 - protein, 7 aa, synthetic construct
VTDGYDK

SEQ ID NO: 13052 - protein, 7 aa, synthetic construct
WKQPPSQ

SEQ ID NO: 13053 - protein, 7 aa, synthetic construct
YDHSEYF

SEQ ID NO: 13054 - protein, 7 aa, synthetic construct
HNADTLK

SEQ ID NO: 13055 - protein, 7 aa, synthetic construct
LAQKHNH

SEQ ID NO: 13056 - protein, 7 aa, synthetic construct
ALSDKHV

SEQ ID NO: 13057 - protein, 7 aa, synthetic construct
DNRYTSI

SEQ ID NO: 13058 - protein, 7 aa, synthetic construct
MSQVFGD

SEQ ID NO: 13059 - protein, 7 aa, synthetic construct
MEAAKYQ

SEQ ID NO: 13060 - protein, 7 aa, synthetic construct
SRWAAME

SEQ ID NO: 13061 - protein, 7 aa, synthetic construct
VPFESAA

SEQ ID NO: 13062 - protein, 7 aa, synthetic construct
PKTIDFH

SEQ ID NO: 13063 - protein, 7 aa, synthetic construct
LPDREER

SEQ ID NO: 13064 - protein, 7 aa, synthetic construct
FMNRFSE

SEQ ID NO: 13065 - protein, 7 aa, synthetic construct
RGNTELA

SEQ ID NO: 13066 - protein, 7 aa, synthetic construct
FIDIASS

SEQ ID NO: 13067 - protein, 7 aa, synthetic construct
ITNINSF

SEQ ID NO: 13068 - protein, 7 aa, synthetic construct
QHVLRQA

SEQ ID NO: 13069 - protein, 7 aa, synthetic construct
KVHNPMM

SEQ ID NO: 13070 - protein, 7 aa, synthetic construct
SYNEDTA

SEQ ID NO: 13071 - protein, 7 aa, synthetic construct
HTDVEIS

SEQ ID NO: 13072 - protein, 7 aa, synthetic construct
SNVDGQN

SEQ ID NO: 13073 - protein, 7 aa, synthetic construct
AVNNWEE

SEQ ID NO: 13074 - protein, 7 aa, synthetic construct
DQVTSNE

SEQ ID NO: 13075 - protein, 7 aa, synthetic construct
PISVGIP

SEQ ID NO: 13076 - protein, 7 aa, synthetic construct
PWTDMHA

SEQ ID NO: 13077 - protein, 7 aa, synthetic construct
FYANAQQ

SEQ ID NO: 13078 - protein, 7 aa, synthetic construct
DVQQRQK

SEQ ID NO: 13079 - protein, 7 aa, synthetic construct
QPTWDTD

SEQ ID NO: 13080 - protein, 7 aa, synthetic construct
LFLKQDN

SEQ ID NO: 13081 - protein, 7 aa, synthetic construct
FENENAG

SEQ ID NO: 13082 - protein, 7 aa, synthetic construct
HKDLHHG

SEQ ID NO: 13083 - protein, 7 aa, synthetic construct
SNFEEGH

SEQ ID NO: 13084 - protein, 7 aa, synthetic construct
VGHQIGD

SEQ ID NO: 13085 - protein, 7 aa, synthetic construct
PVSHQKQ

SEQ ID NO: 13086 - protein, 7 aa, synthetic construct
DGAIAMG

SEQ ID NO: 13087 - protein, 7 aa, synthetic construct
PVKDPVS

SEQ ID NO: 13088 - protein, 7 aa, synthetic construct
LSDTDAM

SEQ ID NO: 13089 - protein, 7 aa, synthetic construct
AADHTTV

SEQ ID NO: 13090 - protein, 7 aa, synthetic construct
AEYKMYE

SEQ ID NO: 13091 - protein, 7 aa, synthetic construct
GGVNSMD

SEQ ID NO: 13092 - protein, 7 aa, synthetic construct
WEASVNF

SEQ ID NO: 13093 - protein, 7 aa, synthetic construct
TLVPPPK

SEQ ID NO: 13094 - protein, 7 aa, synthetic construct
NAEEHSM

SEQ ID NO: 13095 - protein, 7 aa, synthetic construct
GLQNVET

SEQ ID NO: 13096 - protein, 7 aa, synthetic construct
YPGMGHF

SEQ ID NO: 13097 - protein, 7 aa, synthetic construct
QYTPINP

SEQ ID NO: 13098 - protein, 7 aa, synthetic construct
KKWDSFE

SEQ ID NO: 13099 - protein, 7 aa, synthetic construct
AMDHKID

SEQ ID NO: 13100 - protein, 7 aa, synthetic construct
DAHEKRA

SEQ ID NO: 13101 - protein, 7 aa, synthetic construct
TSDYQEI

SEQ ID NO: 13102 - protein, 7 aa, synthetic construct
HHQDQLR

SEQ ID NO: 13103 - protein, 7 aa, synthetic construct
EEKAIKP

SEQ ID NO: 13104 - protein, 7 aa, synthetic construct
QHHDDSH

SEQ ID NO: 13105 - protein, 7 aa, synthetic construct
IFFKDSE

SEQ ID NO: 13106 - protein, 7 aa, synthetic construct
EDLAVSS

SEQ ID NO: 13107 - protein, 7 aa, synthetic construct
YIDKINQ

SEQ ID NO: 13108 - protein, 7 aa, synthetic construct
VKFDGTK

SEQ ID NO: 13109 - protein, 7 aa, synthetic construct
ETGKVQK

SEQ ID NO: 13110 - protein, 7 aa, synthetic construct
PLAASPY

SEQ ID NO: 13111 - protein, 7 aa, synthetic construct
VAPQATW

SEQ ID NO: 13112 - protein, 7 aa, synthetic construct
NLYATMS

SEQ ID NO: 13113 - protein, 7 aa, synthetic construct
YLPNEKY

SEQ ID NO: 13114 - protein, 7 aa, synthetic construct
NLAGLTA

SEQ ID NO: 13115 - protein, 7 aa, synthetic construct
VDPHPMQ

SEQ ID NO: 13116 - protein, 7 aa, synthetic construct
EFAQTQP

SEQ ID NO: 13117 - protein, 7 aa, synthetic construct
NLSVIKN

SEQ ID NO: 13118 - protein, 7 aa, synthetic construct
TGGLYKG

SEQ ID NO: 13119 - protein, 7 aa, synthetic construct
TDEISTQ

SEQ ID NO: 13120 - protein, 7 aa, synthetic construct
HPFGMGN

SEQ ID NO: 13121 - protein, 7 aa, synthetic construct
NIEVPKW

SEQ ID NO: 13122 - protein, 7 aa, synthetic construct
HRHSEPH

SEQ ID NO: 13123 - protein, 7 aa, synthetic construct
AIEPHYE

SEQ ID NO: 13124 - protein, 7 aa, synthetic construct
SMAEPEE

SEQ ID NO: 13125 - protein, 7 aa, synthetic construct
NQKMRPP

SEQ ID NO: 13126 - protein, 7 aa, synthetic construct
AEQHTDA

SEQ ID NO: 13127 - protein, 7 aa, synthetic construct
ARKGFEF

SEQ ID NO: 13128 - protein, 7 aa, synthetic construct
PVRTNPM

SEQ ID NO: 13129 - protein, 7 aa, synthetic construct
AAEINHT

SEQ ID NO: 13130 - protein, 7 aa, synthetic construct
KEQVVGM

SEQ ID NO: 13131 - protein, 7 aa, synthetic construct
QEHQTYV

SEQ ID NO: 13132 - protein, 7 aa, synthetic construct
LDTPHFD

SEQ ID NO: 13133 - protein, 7 aa, synthetic construct
DMNSLVD

SEQ ID NO: 13134 - protein, 7 aa, synthetic construct
QVQDDAN

SEQ ID NO: 13135 - protein, 7 aa, synthetic construct
HSDSEIQ

SEQ ID NO: 13136 - protein, 7 aa, synthetic construct
LLVDMNG

SEQ ID NO: 13137 - protein, 7 aa, synthetic construct
KAILMET

SEQ ID NO: 13138 - protein, 7 aa, synthetic construct
MGDHDKT

SEQ ID NO: 13139 - protein, 7 aa, synthetic construct
SPQNEDA

SEQ ID NO: 13140 - protein, 7 aa, synthetic construct
PPTMSGL

SEQ ID NO: 13141 - protein, 7 aa, synthetic construct
LFPKENE

SEQ ID NO: 13142 - protein, 7 aa, synthetic construct
LYNGVED

SEQ ID NO: 13143 - protein, 7 aa, synthetic construct
FQQNEEV

SEQ ID NO: 13144 - protein, 7 aa, synthetic construct
PAVREVN

SEQ ID NO: 13145 - protein, 7 aa, synthetic construct
QFMRAGE

SEQ ID NO: 13146 - protein, 7 aa, synthetic construct
VQQHVMH

SEQ ID NO: 13147 - protein, 7 aa, synthetic construct
VEDNGWG

SEQ ID NO: 13148 - protein, 7 aa, synthetic construct
HEAFDHT

SEQ ID NO: 13149 - protein, 7 aa, synthetic construct
DMMPPHA

SEQ ID NO: 13150 - protein, 7 aa, synthetic construct
SVGPPGQ

SEQ ID NO: 13151 - protein, 7 aa, synthetic construct
VVGAQDM

SEQ ID NO: 13152 - protein, 7 aa, synthetic construct
LTKMIEK

SEQ ID NO: 13153 - protein, 7 aa, synthetic construct
NHKWDEP

SEQ ID NO: 13154 - protein, 7 aa, synthetic construct
QQDREYS

SEQ ID NO: 13155 - protein, 7 aa, synthetic construct
QSMGNYE

SEQ ID NO: 13156 - protein, 7 aa, synthetic construct
REMGWEE

SEQ ID NO: 13157 - protein, 7 aa, synthetic construct
MGQMHNM

SEQ ID NO: 13158 - protein, 7 aa, synthetic construct
NDFEPEA

SEQ ID NO: 13159 - protein, 7 aa, synthetic construct
SPSNVLE

SEQ ID NO: 13160 - protein, 7 aa, synthetic construct
HIVDSND

SEQ ID NO: 13161 - protein, 7 aa, synthetic construct
LGTQREE

SEQ ID NO: 13162 - protein, 7 aa, synthetic construct
GAMQSMP

SEQ ID NO: 13163 - protein, 7 aa, synthetic construct
PEMHTHG

SEQ ID NO: 13164 - protein, 7 aa, synthetic construct
KLNERDP

SEQ ID NO: 13165 - protein, 7 aa, synthetic construct
IAHPPGE

SEQ ID NO: 13166 - protein, 7 aa, synthetic construct
FDAPFKA

SEQ ID NO: 13167 - protein, 7 aa, synthetic construct
VDGFPFA

SEQ ID NO: 13168 - protein, 7 aa, synthetic construct
PQAAQLI

SEQ ID NO: 13169 - protein, 7 aa, synthetic construct
PERQENT

SEQ ID NO: 13170 - protein, 7 aa, synthetic construct
FTESRER

SEQ ID NO: 13171 - protein, 7 aa, synthetic construct
LRNILQD

SEQ ID NO: 13172 - protein, 7 aa, synthetic construct
YGFVRDI

SEQ ID NO: 13173 - protein, 7 aa, synthetic construct
NMDIHMM

SEQ ID NO: 13174 - protein, 7 aa, synthetic construct
HTNVQGK

SEQ ID NO: 13175 - protein, 7 aa, synthetic construct
SDPRLLE

SEQ ID NO: 13176 - protein, 7 aa, synthetic construct
LSGEVNN

SEQ ID NO: 13177 - protein, 7 aa, synthetic construct
FHEGMNY

SEQ ID NO: 13178 - protein, 7 aa, synthetic construct
WEHADAH

SEQ ID NO: 13179 - protein, 7 aa, synthetic construct
SMKIAEN

SEQ ID NO: 13180 - protein, 7 aa, synthetic construct
EHGVNNI

SEQ ID NO: 13181 - protein, 7 aa, synthetic construct
TISKNIM

SEQ ID NO: 13182 - protein, 7 aa, synthetic construct
EYQAHET

SEQ ID NO: 13183 - protein, 7 aa, synthetic construct
KMQEGVW

SEQ ID NO: 13184 - protein, 7 aa, synthetic construct
PPFSADM

SEQ ID NO: 13185 - protein, 7 aa, synthetic construct
QADLAMM

SEQ ID NO: 13186 - protein, 7 aa, synthetic construct
SANGPTV

SEQ ID NO: 13187 - protein, 7 aa, synthetic construct
PNNLALV

SEQ ID NO: 13188 - protein, 7 aa, synthetic construct
HATGSKW

SEQ ID NO: 13189 - protein, 7 aa, synthetic construct
PDPQRAW

SEQ ID NO: 13190 - protein, 7 aa, synthetic construct
RGDACLG

SEQ ID NO: 13191 - protein, 7 aa, synthetic construct
HEAERQD

SEQ ID NO: 13192 - protein, 7 aa, synthetic construct
TTFREGN

SEQ ID NO: 13193 - protein, 7 aa, synthetic construct
PMTGENM

SEQ ID NO: 13194 - protein, 7 aa, synthetic construct
SAEQTAN

SEQ ID NO: 13195 - protein, 7 aa, synthetic construct
DFVHREI

SEQ ID NO: 13196 - protein, 7 aa, synthetic construct
KPPQYTI

SEQ ID NO: 13197 - protein, 7 aa, synthetic construct
WVTETPA

SEQ ID NO: 13198 - protein, 7 aa, synthetic construct
SERSNTI

SEQ ID NO: 13199 - protein, 7 aa, synthetic construct
KEAVAGA

SEQ ID NO: 13200 - protein, 7 aa, synthetic construct
HDRTAYT

SEQ ID NO: 13201 - protein, 7 aa, synthetic construct
GLHLPNL

SEQ ID NO: 13202 - protein, 7 aa, synthetic construct
PYIDTQD

SEQ ID NO: 13203 - protein, 7 aa, synthetic construct
PEKSIKS

SEQ ID NO: 13204 - protein, 7 aa, synthetic construct
KHNSYLP

SEQ ID NO: 13205 - protein, 7 aa, synthetic construct
TGITNYV

SEQ ID NO: 13206 - protein, 7 aa, synthetic construct
THDKWNT

SEQ ID NO: 13207 - protein, 7 aa, synthetic construct
LHIAANH

SEQ ID NO: 13208 - protein, 7 aa, synthetic construct
VDGYNGM

SEQ ID NO: 13209 - protein, 7 aa, synthetic construct
NTYEPKP

SEQ ID NO: 13210 - protein, 7 aa, synthetic construct
VDMQGYM

SEQ ID NO: 13211 - protein, 7 aa, synthetic construct
GFEKTNE

SEQ ID NO: 13212 - protein, 7 aa, synthetic construct
LTHDTDY

SEQ ID NO: 13213 - protein, 7 aa, synthetic construct
QNEDAAS

SEQ ID NO: 13214 - protein, 7 aa, synthetic construct
SRKAELT

SEQ ID NO: 13215 - protein, 7 aa, synthetic construct
AVEWTPD

SEQ ID NO: 13216 - protein, 7 aa, synthetic construct
WTNLQMD

SEQ ID NO: 13217 - protein, 7 aa, synthetic construct
GISLSGS

SEQ ID NO: 13218 - protein, 7 aa, synthetic construct
YQGRNII

SEQ ID NO: 13219 - protein, 7 aa, synthetic construct
AGIADAP

SEQ ID NO: 13220 - protein, 7 aa, synthetic construct
PNLKGIM

SEQ ID NO: 13221 - protein, 7 aa, synthetic construct
MTQTVEQ

SEQ ID NO: 13222 - protein, 7 aa, synthetic construct
PHSVMNE

SEQ ID NO: 13223 - protein, 7 aa, synthetic construct
TPHPKGE

SEQ ID NO: 13224 - protein, 7 aa, synthetic construct
MRHSVYE

SEQ ID NO: 13225 - protein, 7 aa, synthetic construct
PRHIESY

SEQ ID NO: 13226 - protein, 7 aa, synthetic construct
PVSNHFA

SEQ ID NO: 13227 - protein, 7 aa, synthetic construct
EMVKNPI

SEQ ID NO: 13228 - protein, 7 aa, synthetic construct
EGPSTYP

SEQ ID NO: 13229 - protein, 7 aa, synthetic construct
VIIQNLG

SEQ ID NO: 13230 - protein, 7 aa, synthetic construct
HTMPMDT

SEQ ID NO: 13231 - protein, 7 aa, synthetic construct
ILARPVS

SEQ ID NO: 13232 - protein, 7 aa, synthetic construct
LGSVVES

SEQ ID NO: 13233 - protein, 7 aa, synthetic construct
QHEGTAV

SEQ ID NO: 13234 - protein, 7 aa, synthetic construct
PNHDAVE

SEQ ID NO: 13235 - protein, 7 aa, synthetic construct
DHANINF

SEQ ID NO: 13236 - protein, 7 aa, synthetic construct
LSGAGLF

SEQ ID NO: 13237 - protein, 7 aa, synthetic construct
SESEHEH

SEQ ID NO: 13238 - protein, 7 aa, synthetic construct
DQRLVLA

SEQ ID NO: 13239 - protein, 7 aa, synthetic construct
LSHVLHQ

SEQ ID NO: 13240 - protein, 7 aa, synthetic construct
INDPNEL

SEQ ID NO: 13241 - protein, 7 aa, synthetic construct
FTGTTYP

SEQ ID NO: 13242 - protein, 7 aa, synthetic construct
NESILPT

SEQ ID NO: 13243 - protein, 7 aa, synthetic construct
VPADEVY

SEQ ID NO: 13244 - protein, 7 aa, synthetic construct
KEQDEFT

SEQ ID NO: 13245 - protein, 7 aa, synthetic construct
MLQVTQN

SEQ ID NO: 13246 - protein, 7 aa, synthetic construct
EREGVDR

SEQ ID NO: 13247 - protein, 7 aa, synthetic construct
TKAEGLQ

SEQ ID NO: 13248 - protein, 7 aa, synthetic construct
NNGRNME

SEQ ID NO: 13249 - protein, 7 aa, synthetic construct
PPVDHYK

SEQ ID NO: 13250 - protein, 7 aa, synthetic construct
DYHVATD

SEQ ID NO: 13251 - protein, 7 aa, synthetic construct
FDGQLVA

SEQ ID NO: 13252 - protein, 7 aa, synthetic construct
HPRYDSN

SEQ ID NO: 13253 - protein, 7 aa, synthetic construct
ASPFSYE

SEQ ID NO: 13254 - protein, 7 aa, synthetic construct
LEPPEPP

SEQ ID NO: 13255 - protein, 7 aa, synthetic construct
YEGQENT

SEQ ID NO: 13256 - protein, 7 aa, synthetic construct
DLTMDDR

SEQ ID NO: 13257 - protein, 7 aa, synthetic construct
DRSYQDS

SEQ ID NO: 13258 - protein, 7 aa, synthetic construct
LKEDPEA

SEQ ID NO: 13259 - protein, 7 aa, synthetic construct
QFEKPSE

SEQ ID NO: 13260 - protein, 7 aa, synthetic construct
QQDPHPH

SEQ ID NO: 13261 - protein, 7 aa, synthetic construct
PAITQQY

SEQ ID NO: 13262 - protein, 7 aa, synthetic construct
FRDSEFK

SEQ ID NO: 13263 - protein, 7 aa, synthetic construct
MADRLLP

SEQ ID NO: 13264 - protein, 7 aa, synthetic construct
HPRAGLD

SEQ ID NO: 13265 - protein, 7 aa, synthetic construct
NDPPPTD

SEQ ID NO: 13266 - protein, 7 aa, synthetic construct
KVDHTMH

SEQ ID NO: 13267 - protein, 7 aa, synthetic construct
HTDPFGM

SEQ ID NO: 13268 - protein, 7 aa, synthetic construct
DTGAHYI

SEQ ID NO: 13269 - protein, 7 aa, synthetic construct
PQLTVHP

SEQ ID NO: 13270 - protein, 7 aa, synthetic construct
APRTSIT

SEQ ID NO: 13271 - protein, 7 aa, synthetic construct
WQTGSKQ

SEQ ID NO: 13272 - protein, 7 aa, synthetic construct
TIPIGED

SEQ ID NO: 13273 - protein, 7 aa, synthetic construct
LEREYEE

SEQ ID NO: 13274 - protein, 7 aa, synthetic construct
SEHALEW

SEQ ID NO: 13275 - protein, 7 aa, synthetic construct
TERIYME

SEQ ID NO: 13276 - protein, 7 aa, synthetic construct
HNHIVSI

SEQ ID NO: 13277 - protein, 7 aa, synthetic construct
IVGAETH

SEQ ID NO: 13278 - protein, 7 aa, synthetic construct
WQAVKGQ

SEQ ID NO: 13279 - protein, 7 aa, synthetic construct
PLHTGQE

SEQ ID NO: 13280 - protein, 7 aa, synthetic construct
QESHTEL

SEQ ID NO: 13281 - protein, 7 aa, synthetic construct
NDFEPYP

SEQ ID NO: 13282 - protein, 7 aa, synthetic construct
IQAGSDD

SEQ ID NO: 13283 - protein, 7 aa, synthetic construct
MAADPLG

SEQ ID NO: 13284 - protein, 7 aa, synthetic construct
RPNRTDY

SEQ ID NO: 13285 - protein, 7 aa, synthetic construct
SQASTEG

SEQ ID NO: 13286 - protein, 7 aa, synthetic construct
HETYEPQ

SEQ ID NO: 13287 - protein, 7 aa, synthetic construct
RALDDVV

SEQ ID NO: 13288 - protein, 7 aa, synthetic construct
KKYSEQI

SEQ ID NO: 13289 - protein, 7 aa, synthetic construct
STASFNN

SEQ ID NO: 13290 - protein, 7 aa, synthetic construct
PEPVSEG

SEQ ID NO: 13291 - protein, 7 aa, synthetic construct
FTPEKEI

SEQ ID NO: 13292 - protein, 7 aa, synthetic construct
NLVAHER

SEQ ID NO: 13293 - protein, 7 aa, synthetic construct
RVIMGGP

SEQ ID NO: 13294 - protein, 7 aa, synthetic construct
DLRDHTF

SEQ ID NO: 13295 - protein, 7 aa, synthetic construct
FAVNATL

SEQ ID NO: 13296 - protein, 7 aa, synthetic construct
VIQDKFM

SEQ ID NO: 13297 - protein, 7 aa, synthetic construct
LGVQIMP

SEQ ID NO: 13298 - protein, 7 aa, synthetic construct
MEVIAGD

SEQ ID NO: 13299 - protein, 7 aa, synthetic construct
WSDVGSY

SEQ ID NO: 13300 - protein, 7 aa, synthetic construct
MPASRPY

SEQ ID NO: 13301 - protein, 7 aa, synthetic construct
HTHAAFA

SEQ ID NO: 13302 - protein, 7 aa, synthetic construct
QEGNPPN

SEQ ID NO: 13303 - protein, 7 aa, synthetic construct
MGLPMSE

SEQ ID NO: 13304 - protein, 7 aa, synthetic construct
SGRMNMQ

SEQ ID NO: 13305 - protein, 7 aa, synthetic construct
ALGENTK

SEQ ID NO: 13306 - protein, 7 aa, synthetic construct
QPDSTGK

SEQ ID NO: 13307 - protein, 7 aa, synthetic construct
MSGTYQY

SEQ ID NO: 13308 - protein, 7 aa, synthetic construct
YSTAELM

SEQ ID NO: 13309 - protein, 7 aa, synthetic construct
MLDKNHD

SEQ ID NO: 13310 - protein, 7 aa, synthetic construct
SDPIDGI

SEQ ID NO: 13311 - protein, 7 aa, synthetic construct
EMHDAGI

SEQ ID NO: 13312 - protein, 7 aa, synthetic construct
IGGELIM

SEQ ID NO: 13313 - protein, 7 aa, synthetic construct
HLATMER

SEQ ID NO: 13314 - protein, 7 aa, synthetic construct
SQTDTMF

SEQ ID NO: 13315 - protein, 7 aa, synthetic construct
ITEEKEY

SEQ ID NO: 13316 - protein, 7 aa, synthetic construct
PAPAATE

SEQ ID NO: 13317 - protein, 7 aa, synthetic construct
AAMSMGL

SEQ ID NO: 13318 - protein, 7 aa, synthetic construct
EAAGNDS

SEQ ID NO: 13319 - protein, 7 aa, synthetic construct
TESGDHQ

SEQ ID NO: 13320 - protein, 7 aa, synthetic construct
KVDAPFP

SEQ ID NO: 13321 - protein, 7 aa, synthetic construct
MGVEMPP

SEQ ID NO: 13322 - protein, 7 aa, synthetic construct
QNTQGAL

SEQ ID NO: 13323 - protein, 7 aa, synthetic construct
VGETMGQ

SEQ ID NO: 13324 - protein, 7 aa, synthetic construct
EESLMRG

SEQ ID NO: 13325 - protein, 7 aa, synthetic construct
NQKKEVH

SEQ ID NO: 13326 - protein, 7 aa, synthetic construct
FKDLTFP

SEQ ID NO: 13327 - protein, 7 aa, synthetic construct
VFNENNR

SEQ ID NO: 13328 - protein, 7 aa, synthetic construct
EYSDGLM

SEQ ID NO: 13329 - protein, 7 aa, synthetic construct
EQHPKRV

SEQ ID NO: 13330 - protein, 7 aa, synthetic construct
ETEAKRK

SEQ ID NO: 13331 - protein, 7 aa, synthetic construct
ERNGASR

SEQ ID NO: 13332 - protein, 7 aa, synthetic construct
PIHPEFI

SEQ ID NO: 13333 - protein, 7 aa, synthetic construct
LNETNVP

SEQ ID NO: 13334 - protein, 7 aa, synthetic construct
EWEHRTG

SEQ ID NO: 13335 - protein, 7 aa, synthetic construct
WDGVQTE

SEQ ID NO: 13336 - protein, 7 aa, synthetic construct
PGAYKVN

SEQ ID NO: 13337 - protein, 7 aa, synthetic construct
TAGDTRY

SEQ ID NO: 13338 - protein, 7 aa, synthetic construct
YGGVEES

SEQ ID NO: 13339 - protein, 7 aa, synthetic construct
WSNGADV

SEQ ID NO: 13340 - protein, 7 aa, synthetic construct
RVIDRSQ

SEQ ID NO: 13341 - protein, 7 aa, synthetic construct
YIHAEKH

SEQ ID NO: 13342 - protein, 7 aa, synthetic construct
TTQDVEV

SEQ ID NO: 13343 - protein, 7 aa, synthetic construct
HFRVEDS

SEQ ID NO: 13344 - protein, 7 aa, synthetic construct
QHDSPIP

SEQ ID NO: 13345 - protein, 7 aa, synthetic construct
DHALGQH

SEQ ID NO: 13346 - protein, 7 aa, synthetic construct
NKFLMME

SEQ ID NO: 13347 - protein, 7 aa, synthetic construct
GEGEFGH

SEQ ID NO: 13348 - protein, 7 aa, synthetic construct
KLEVMDS

SEQ ID NO: 13349 - protein, 7 aa, synthetic construct
ILEGGNF

SEQ ID NO: 13350 - protein, 7 aa, synthetic construct
ETLHDER

SEQ ID NO: 13351 - protein, 7 aa, synthetic construct
REQGDGE

SEQ ID NO: 13352 - protein, 7 aa, synthetic construct
TTGSFVS

SEQ ID NO: 13353 - protein, 7 aa, synthetic construct
DNIEANT

SEQ ID NO: 13354 - protein, 7 aa, synthetic construct
VSINDKY

SEQ ID NO: 13355 - protein, 7 aa, synthetic construct
WSRMYNE

SEQ ID NO: 13356 - protein, 7 aa, synthetic construct
GNPQAEI

SEQ ID NO: 13357 - protein, 7 aa, synthetic construct
RQAEQWE

SEQ ID NO: 13358 - protein, 7 aa, synthetic construct
YEDPNMH

SEQ ID NO: 13359 - protein, 7 aa, synthetic construct
EKKIAIQ

SEQ ID NO: 13360 - protein, 7 aa, synthetic construct
SQNNIDP

SEQ ID NO: 13361 - protein, 7 aa, synthetic construct
AYDTHKY

SEQ ID NO: 13362 - protein, 7 aa, synthetic construct
MMLNMKS

SEQ ID NO: 13363 - protein, 7 aa, synthetic construct
HHLSDPD

SEQ ID NO: 13364 - protein, 7 aa, synthetic construct
DVRSHFT

SEQ ID NO: 13365 - protein, 7 aa, synthetic construct
VYLAHTD

SEQ ID NO: 13366 - protein, 7 aa, synthetic construct
KLSMYHE

SEQ ID NO: 13367 - protein, 7 aa, synthetic construct
VQEGNPK

SEQ ID NO: 13368 - protein, 7 aa, synthetic construct
LDYIGPA

SEQ ID NO: 13369 - protein, 7 aa, synthetic construct
QANEDSL

SEQ ID NO: 13370 - protein, 7 aa, synthetic construct
PDTKLQV

SEQ ID NO: 13371 - protein, 7 aa, synthetic construct
HDADTSH

SEQ ID NO: 13372 - protein, 7 aa, synthetic construct
LVPPNRP

SEQ ID NO: 13373 - protein, 7 aa, synthetic construct
DEPMRHK

SEQ ID NO: 13374 - protein, 7 aa, synthetic construct
GHMQNNK

SEQ ID NO: 13375 - protein, 7 aa, synthetic construct
PENASFY

SEQ ID NO: 13376 - protein, 7 aa, synthetic construct
EDKKNSW

SEQ ID NO: 13377 - protein, 7 aa, synthetic construct
PGNDEYG

SEQ ID NO: 13378 - protein, 7 aa, synthetic construct
GTASSPD

SEQ ID NO: 13379 - protein, 7 aa, synthetic construct
LHLDHDS

SEQ ID NO: 13380 - protein, 7 aa, synthetic construct
QEQPASD

SEQ ID NO: 13381 - protein, 7 aa, synthetic construct
VYMAAQE

SEQ ID NO: 13382 - protein, 7 aa, synthetic construct
WMATKTV

SEQ ID NO: 13383 - protein, 7 aa, synthetic construct
EGLPMGI

SEQ ID NO: 13384 - protein, 7 aa, synthetic construct
YRDRWTE

SEQ ID NO: 13385 - protein, 7 aa, synthetic construct
VAQNVID

SEQ ID NO: 13386 - protein, 7 aa, synthetic construct
YMEGIET

SEQ ID NO: 13387 - protein, 7 aa, synthetic construct
FTAKLND

SEQ ID NO: 13388 - protein, 7 aa, synthetic construct
GLDELPM

SEQ ID NO: 13389 - protein, 7 aa, synthetic construct
MILQSTD

SEQ ID NO: 13390 - protein, 7 aa, synthetic construct
IIPEQKM

SEQ ID NO: 13391 - protein, 7 aa, synthetic construct
LSTDMAP

SEQ ID NO: 13392 - protein, 7 aa, synthetic construct
KIDINRP

SEQ ID NO: 13393 - protein, 7 aa, synthetic construct
MLNMHDE

SEQ ID NO: 13394 - protein, 7 aa, synthetic construct
AFDKTEN

SEQ ID NO: 13395 - protein, 7 aa, synthetic construct
NFNAGEE

SEQ ID NO: 13396 - protein, 7 aa, synthetic construct
PIYDMDH

SEQ ID NO: 13397 - protein, 7 aa, synthetic construct
NGKFMTY

SEQ ID NO: 13398 - protein, 7 aa, synthetic construct
MLYKDGH

SEQ ID NO: 13399 - protein, 7 aa, synthetic construct
VSQLYQP

SEQ ID NO: 13400 - protein, 7 aa, synthetic construct
HELRDNE

SEQ ID NO: 13401 - protein, 7 aa, synthetic construct
STDETMA

SEQ ID NO: 13402 - protein, 7 aa, synthetic construct
FAHAPVV

SEQ ID NO: 13403 - protein, 7 aa, synthetic construct
LHGSVLV

SEQ ID NO: 13404 - protein, 7 aa, synthetic construct
TESYKGD

SEQ ID NO: 13405 - protein, 7 aa, synthetic construct
MVTHEPR

SEQ ID NO: 13406 - protein, 7 aa, synthetic construct
GEEHYSP

SEQ ID NO: 13407 - protein, 7 aa, synthetic construct
KGIHDTV

SEQ ID NO: 13408 - protein, 7 aa, synthetic construct
LKMRIDM

SEQ ID NO: 13409 - protein, 7 aa, synthetic construct
EQDPIAA

SEQ ID NO: 13410 - protein, 7 aa, synthetic construct
SSSPSHQ

SEQ ID NO: 13411 - protein, 7 aa, synthetic construct
EAQTESL

SEQ ID NO: 13412 - protein, 7 aa, synthetic construct
QTENQEA

SEQ ID NO: 13413 - protein, 7 aa, synthetic construct
PMWKDEH

SEQ ID NO: 13414 - protein, 7 aa, synthetic construct
YMKHHVP

SEQ ID NO: 13415 - protein, 7 aa, synthetic construct
FWAPDKP

SEQ ID NO: 13416 - protein, 7 aa, synthetic construct
SGFMDRA

SEQ ID NO: 13417 - protein, 7 aa, synthetic construct
NDSQSMT

SEQ ID NO: 13418 - protein, 7 aa, synthetic construct
TLIADGA

SEQ ID NO: 13419 - protein, 7 aa, synthetic construct
PLSKHYI

SEQ ID NO: 13420 - protein, 7 aa, synthetic construct
TRTESWP

SEQ ID NO: 13421 - protein, 7 aa, synthetic construct
IHYEKPH

SEQ ID NO: 13422 - protein, 7 aa, synthetic construct
YVTTVLD

SEQ ID NO: 13423 - protein, 7 aa, synthetic construct
TTRSHMI

SEQ ID NO: 13424 - protein, 7 aa, synthetic construct
DGSTQIL

SEQ ID NO: 13425 - protein, 7 aa, synthetic construct
RPVDRHS

SEQ ID NO: 13426 - protein, 7 aa, synthetic construct
GPVWTED

SEQ ID NO: 13427 - protein, 7 aa, synthetic construct
YYSIQQE

SEQ ID NO: 13428 - protein, 7 aa, synthetic construct
TIGYVPK

SEQ ID NO: 13429 - protein, 7 aa, synthetic construct
ADYEGGT

SEQ ID NO: 13430 - protein, 7 aa, synthetic construct
DDHKTYT

SEQ ID NO: 13431 - protein, 7 aa, synthetic construct
DLKDWGD

SEQ ID NO: 13432 - protein, 7 aa, synthetic construct
MIIHENN

SEQ ID NO: 13433 - protein, 7 aa, synthetic construct
GWGAEGI

SEQ ID NO: 13434 - protein, 7 aa, synthetic construct
FEVERQH

SEQ ID NO: 13435 - protein, 7 aa, synthetic construct
VVAPSIN

SEQ ID NO: 13436 - protein, 7 aa, synthetic construct
FVADGKR

SEQ ID NO: 13437 - protein, 7 aa, synthetic construct
INHGQDD

SEQ ID NO: 13438 - protein, 7 aa, synthetic construct
DGISIPE

SEQ ID NO: 13439 - protein, 7 aa, synthetic construct
VDMVRKI

SEQ ID NO: 13440 - protein, 7 aa, synthetic construct
AFSKQNE

SEQ ID NO: 13441 - protein, 7 aa, synthetic construct
KYDIGQV

SEQ ID NO: 13442 - protein, 7 aa, synthetic construct
SKQISIL

SEQ ID NO: 13443 - protein, 7 aa, synthetic construct
DMQNTKK

SEQ ID NO: 13444 - protein, 7 aa, synthetic construct
VDSENPK

SEQ ID NO: 13445 - protein, 7 aa, synthetic construct
DSNTDNA

SEQ ID NO: 13446 - protein, 7 aa, synthetic construct
GDDHNQF

SEQ ID NO: 13447 - protein, 7 aa, synthetic construct
EITHNDP

SEQ ID NO: 13448 - protein, 7 aa, synthetic construct
HTVDGYH

SEQ ID NO: 13449 - protein, 7 aa, synthetic construct
YIDIASD

SEQ ID NO: 13450 - protein, 7 aa, synthetic construct
EMNSQET

SEQ ID NO: 13451 - protein, 7 aa, synthetic construct
KQFEALV

SEQ ID NO: 13452 - protein, 7 aa, synthetic construct
WEKIDGH

SEQ ID NO: 13453 - protein, 7 aa, synthetic construct
GGVDEDK

SEQ ID NO: 13454 - protein, 7 aa, synthetic construct
TLQQQYT

SEQ ID NO: 13455 - protein, 7 aa, synthetic construct
PPFQDNY

SEQ ID NO: 13456 - protein, 7 aa, synthetic construct
GGHILED

SEQ ID NO: 13457 - protein, 7 aa, synthetic construct
HSFNDEM

SEQ ID NO: 13458 - protein, 7 aa, synthetic construct
HRVVNEL

SEQ ID NO: 13459 - protein, 7 aa, synthetic construct
LNLNDLT

SEQ ID NO: 13460 - protein, 7 aa, synthetic construct
WKGYEVI

SEQ ID NO: 13461 - protein, 7 aa, synthetic construct
DEEHKGK

SEQ ID NO: 13462 - protein, 7 aa, synthetic construct
NSHELVP

SEQ ID NO: 13463 - protein, 7 aa, synthetic construct
MHDDKTE

SEQ ID NO: 13464 - protein, 7 aa, synthetic construct
LPYAPEH

SEQ ID NO: 13465 - protein, 7 aa, synthetic construct
ISQNIHD

SEQ ID NO: 13466 - protein, 7 aa, synthetic construct
VNDYEAI

SEQ ID NO: 13467 - protein, 7 aa, synthetic construct
HMEGSDV

SEQ ID NO: 13468 - protein, 7 aa, synthetic construct
EMVGEHA

SEQ ID NO: 13469 - protein, 7 aa, synthetic construct
EVYVMPE

SEQ ID NO: 13470 - protein, 7 aa, synthetic construct
YSEEGHN

SEQ ID NO: 13471 - protein, 7 aa, synthetic construct
QQEEHII

SEQ ID NO: 13472 - protein, 7 aa, synthetic construct
AVDSIKH

SEQ ID NO: 13473 - protein, 7 aa, synthetic construct
YGVEMYK

SEQ ID NO: 13474 - protein, 7 aa, synthetic construct
FEALADD

SEQ ID NO: 13475 - protein, 7 aa, synthetic construct
TLLASQP

SEQ ID NO: 13476 - protein, 7 aa, synthetic construct
VASEVGN

SEQ ID NO: 13477 - protein, 7 aa, synthetic construct
VMQAGAE

SEQ ID NO: 13478 - protein, 7 aa, synthetic construct
MTEPQDN

SEQ ID NO: 13479 - protein, 7 aa, synthetic construct
IIPEGQG

SEQ ID NO: 13480 - protein, 7 aa, synthetic construct
RVNQNFS

SEQ ID NO: 13481 - protein, 7 aa, synthetic construct
GEVHPPV

SEQ ID NO: 13482 - protein, 7 aa, synthetic construct
KTFNEQR

SEQ ID NO: 13483 - protein, 7 aa, synthetic construct
PLPDRQF

SEQ ID NO: 13484 - protein, 7 aa, synthetic construct
MKHYPAG

SEQ ID NO: 13485 - protein, 7 aa, synthetic construct
PIPLKDI

SEQ ID NO: 13486 - protein, 7 aa, synthetic construct
KMVEAPW

SEQ ID NO: 13487 - protein, 7 aa, synthetic construct
EDKLTDL

SEQ ID NO: 13488 - protein, 7 aa, synthetic construct
VRPEYEQ

SEQ ID NO: 13489 - protein, 7 aa, synthetic construct
ISDASVL

SEQ ID NO: 13490 - protein, 7 aa, synthetic construct
TIGDNMS

SEQ ID NO: 13491 - protein, 7 aa, synthetic construct
REANYRG

SEQ ID NO: 13492 - protein, 7 aa, synthetic construct
RMPQVDL

SEQ ID NO: 13493 - protein, 7 aa, synthetic construct
THIDNNT

SEQ ID NO: 13494 - protein, 7 aa, synthetic construct
DPPEAKM

SEQ ID NO: 13495 - protein, 7 aa, synthetic construct
FDDVTFT

SEQ ID NO: 13496 - protein, 7 aa, synthetic construct
QNSEDQF

SEQ ID NO: 13497 - protein, 7 aa, synthetic construct
HPMDFET

SEQ ID NO: 13498 - protein, 7 aa, synthetic construct
QETDWKG

SEQ ID NO: 13499 - protein, 7 aa, synthetic construct
RSIPYEV

SEQ ID NO: 13500 - protein, 7 aa, synthetic construct
GHTVMPR

SEQ ID NO: 13501 - protein, 7 aa, synthetic construct
LEDRSEM

SEQ ID NO: 13502 - protein, 7 aa, synthetic construct
IPGRFLD

SEQ ID NO: 13503 - protein, 7 aa, synthetic construct
VQATAQQ

SEQ ID NO: 13504 - protein, 7 aa, synthetic construct
MADDYYA

SEQ ID NO: 13505 - protein, 7 aa, synthetic construct
AAETMLA

SEQ ID NO: 13506 - protein, 7 aa, synthetic construct
MHNHAYE

SEQ ID NO: 13507 - protein, 7 aa, synthetic construct
IDNTFVR

SEQ ID NO: 13508 - protein, 7 aa, synthetic construct
SPDLRIP

SEQ ID NO: 13509 - protein, 7 aa, synthetic construct
DEFKGQR

SEQ ID NO: 13510 - protein, 7 aa, synthetic construct
RHSGVAL

SEQ ID NO: 13511 - protein, 7 aa, synthetic construct
GRSLNAP

SEQ ID NO: 13512 - protein, 7 aa, synthetic construct
VCESKCV

SEQ ID NO: 13513 - protein, 7 aa, synthetic construct
EKNDFVE

SEQ ID NO: 13514 - protein, 7 aa, synthetic construct
LVQPFQE

SEQ ID NO: 13515 - protein, 7 aa, synthetic construct
QQHAHAP

SEQ ID NO: 13516 - protein, 7 aa, synthetic construct
YIEGGYT

SEQ ID NO: 13517 - protein, 7 aa, synthetic construct
GREPVNW

SEQ ID NO: 13518 - protein, 7 aa, synthetic construct
QTNDIEK

SEQ ID NO: 13519 - protein, 7 aa, synthetic construct
NNFNSKA

SEQ ID NO: 13520 - protein, 7 aa, synthetic construct
VEYEHQF

SEQ ID NO: 13521 - protein, 7 aa, synthetic construct
YDNVGQN

SEQ ID NO: 13522 - protein, 7 aa, synthetic construct
CQDMRCV

SEQ ID NO: 13523 - protein, 7 aa, synthetic construct
VYEGKVK

SEQ ID NO: 13524 - protein, 7 aa, synthetic construct
GYDPIQL

SEQ ID NO: 13525 - protein, 7 aa, synthetic construct
WVVGAQA

SEQ ID NO: 13526 - protein, 7 aa, synthetic construct
AAKYGMS

SEQ ID NO: 13527 - protein, 7 aa, synthetic construct
WSLRNGD

SEQ ID NO: 13528 - protein, 7 aa, synthetic construct
FDKRHDE

SEQ ID NO: 13529 - protein, 7 aa, synthetic construct
NMIDSKI

SEQ ID NO: 13530 - protein, 7 aa, synthetic construct
WQYTGEP

SEQ ID NO: 13531 - protein, 7 aa, synthetic construct
DIQGFAF

SEQ ID NO: 13532 - protein, 7 aa, synthetic construct
DPDGVML

SEQ ID NO: 13533 - protein, 7 aa, synthetic construct
VQDDTNS

SEQ ID NO: 13534 - protein, 7 aa, synthetic construct
PLDVAQF

SEQ ID NO: 13535 - protein, 7 aa, synthetic construct
HQGQFIP

SEQ ID NO: 13536 - protein, 7 aa, synthetic construct
MTKHMMD

SEQ ID NO: 13537 - protein, 7 aa, synthetic construct
VLHGIVG

SEQ ID NO: 13538 - protein, 7 aa, synthetic construct
FPYPQNQ

SEQ ID NO: 13539 - protein, 7 aa, synthetic construct
EMMSSKF

SEQ ID NO: 13540 - protein, 7 aa, synthetic construct
SYENHMG

SEQ ID NO: 13541 - protein, 7 aa, synthetic construct
HEDYAPD

SEQ ID NO: 13542 - protein, 7 aa, synthetic construct
AASIQNN

SEQ ID NO: 13543 - protein, 7 aa, synthetic construct
HGIPMDD

SEQ ID NO: 13544 - protein, 7 aa, synthetic construct
IGPINIK

SEQ ID NO: 13545 - protein, 7 aa, synthetic construct
ILKEEYE

SEQ ID NO: 13546 - protein, 7 aa, synthetic construct
DLPVRTR

SEQ ID NO: 13547 - protein, 7 aa, synthetic construct
WDRAQDG

SEQ ID NO: 13548 - protein, 7 aa, synthetic construct
KAYMAQG

SEQ ID NO: 13549 - protein, 7 aa, synthetic construct
IPRGPHM

SEQ ID NO: 13550 - protein, 7 aa, synthetic construct
DLDDYAN

SEQ ID NO: 13551 - protein, 7 aa, synthetic construct
NANTATF

SEQ ID NO: 13552 - protein, 7 aa, synthetic construct
TIGENHL

SEQ ID NO: 13553 - protein, 7 aa, synthetic construct
IIADAKF

SEQ ID NO: 13554 - protein, 7 aa, synthetic construct
AQEKPMW

SEQ ID NO: 13555 - protein, 7 aa, synthetic construct
LASAIDN

SEQ ID NO: 13556 - protein, 7 aa, synthetic construct
PSVPNGV

SEQ ID NO: 13557 - protein, 7 aa, synthetic construct
ESKYHGG

SEQ ID NO: 13558 - protein, 7 aa, synthetic construct
KLGAMIP

SEQ ID NO: 13559 - protein, 7 aa, synthetic construct
MMVYKND

SEQ ID NO: 13560 - protein, 7 aa, synthetic construct
MGMTVQR

SEQ ID NO: 13561 - protein, 7 aa, synthetic construct
AQPTIQN

SEQ ID NO: 13562 - protein, 7 aa, synthetic construct
AGDIEIP

SEQ ID NO: 13563 - protein, 7 aa, synthetic construct
YQLADPV

SEQ ID NO: 13564 - protein, 7 aa, synthetic construct
PDDTFIS

SEQ ID NO: 13565 - protein, 7 aa, synthetic construct
NPPPQQF

SEQ ID NO: 13566 - protein, 7 aa, synthetic construct
TADAGTS

SEQ ID NO: 13567 - protein, 7 aa, synthetic construct
VLEVKAK

SEQ ID NO: 13568 - protein, 7 aa, synthetic construct
QNDVTWH

SEQ ID NO: 13569 - protein, 7 aa, synthetic construct
RTPQERH

SEQ ID NO: 13570 - protein, 7 aa, synthetic construct
HAIPSLN

SEQ ID NO: 13571 - protein, 7 aa, synthetic construct
DWTEDLG

SEQ ID NO: 13572 - protein, 7 aa, synthetic construct
IQLKVTS

SEQ ID NO: 13573 - protein, 7 aa, synthetic construct
VISEANF

SEQ ID NO: 13574 - protein, 7 aa, synthetic construct
PYFGQDD

SEQ ID NO: 13575 - protein, 7 aa, synthetic construct
MLNANPP

SEQ ID NO: 13576 - protein, 7 aa, synthetic construct
DQDAYYG

SEQ ID NO: 13577 - protein, 7 aa, synthetic construct
SEDQMKN

SEQ ID NO: 13578 - protein, 7 aa, synthetic construct
GTYTASQ

SEQ ID NO: 13579 - protein, 7 aa, synthetic construct
MQEVEYP

SEQ ID NO: 13580 - protein, 7 aa, synthetic construct
NTFVDGN

SEQ ID NO: 13581 - protein, 7 aa, synthetic construct
GNGVYME

SEQ ID NO: 13582 - protein, 7 aa, synthetic construct
PASKIHV

SEQ ID NO: 13583 - protein, 7 aa, synthetic construct
LSFENRI

SEQ ID NO: 13584 - protein, 7 aa, synthetic construct
INEAINI

SEQ ID NO: 13585 - protein, 7 aa, synthetic construct
IDPDEVS

SEQ ID NO: 13586 - protein, 7 aa, synthetic construct
MKDMGTF

SEQ ID NO: 13587 - protein, 7 aa, synthetic construct
TVHQHGF

SEQ ID NO: 13588 - protein, 7 aa, synthetic construct
ESGPELT

SEQ ID NO: 13589 - protein, 7 aa, synthetic construct
KIHTQHQ

SEQ ID NO: 13590 - protein, 7 aa, synthetic construct
ETTKNLT

SEQ ID NO: 13591 - protein, 7 aa, synthetic construct
HLKHADH

SEQ ID NO: 13592 - protein, 7 aa, synthetic construct
NRPDHRN

SEQ ID NO: 13593 - protein, 7 aa, synthetic construct
DNEKHST

SEQ ID NO: 13594 - protein, 7 aa, synthetic construct
AQNEEVP

SEQ ID NO: 13595 - protein, 7 aa, synthetic construct
FHEQIGN

SEQ ID NO: 13596 - protein, 7 aa, synthetic construct
TMDDKIL

SEQ ID NO: 13597 - protein, 7 aa, synthetic construct
KPVMDKN

SEQ ID NO: 13598 - protein, 7 aa, synthetic construct
LEQEYRT

SEQ ID NO: 13599 - protein, 7 aa, synthetic construct
SSSELNV

SEQ ID NO: 13600 - protein, 7 aa, synthetic construct
EDQHARG

SEQ ID NO: 13601 - protein, 7 aa, synthetic construct
NDMSHEI

SEQ ID NO: 13602 - protein, 7 aa, synthetic construct
GAENDQS

SEQ ID NO: 13603 - protein, 7 aa, synthetic construct
FMGHHTM

SEQ ID NO: 13604 - protein, 7 aa, synthetic construct
RSEGWDH

SEQ ID NO: 13605 - protein, 7 aa, synthetic construct
TDDNGYH

SEQ ID NO: 13606 - protein, 7 aa, synthetic construct
FNQHDET

SEQ ID NO: 13607 - protein, 7 aa, synthetic construct
RFTSSAS

SEQ ID NO: 13608 - protein, 7 aa, synthetic construct
QSALLEG

SEQ ID NO: 13609 - protein, 7 aa, synthetic construct
DAHHITD

SEQ ID NO: 13610 - protein, 7 aa, synthetic construct
RFHNGTV

SEQ ID NO: 13611 - protein, 7 aa, synthetic construct
DSQAFPR

SEQ ID NO: 13612 - protein, 7 aa, synthetic construct
VENPYQE

SEQ ID NO: 13613 - protein, 7 aa, synthetic construct
VWKQTNI

SEQ ID NO: 13614 - protein, 7 aa, synthetic construct
FLRNDHG

SEQ ID NO: 13615 - protein, 7 aa, synthetic construct
LIKMGAL

SEQ ID NO: 13616 - protein, 7 aa, synthetic construct
HQDLDYI

SEQ ID NO: 13617 - protein, 7 aa, synthetic construct
SVTTTME

SEQ ID NO: 13618 - protein, 7 aa, synthetic construct
IFEVHNQ

SEQ ID NO: 13619 - protein, 7 aa, synthetic construct
HLTGKPH

SEQ ID NO: 13620 - protein, 7 aa, synthetic construct
QEKIQIL

SEQ ID NO: 13621 - protein, 7 aa, synthetic construct
TVYEEAM

SEQ ID NO: 13622 - protein, 7 aa, synthetic construct
ANNPVQP

SEQ ID NO: 13623 - protein, 7 aa, synthetic construct
GEVVDGG

SEQ ID NO: 13624 - protein, 7 aa, synthetic construct
QHTIDNV

SEQ ID NO: 13625 - protein, 7 aa, synthetic construct
LHDDIQG

SEQ ID NO: 13626 - protein, 7 aa, synthetic construct
HAPRPNI

SEQ ID NO: 13627 - protein, 7 aa, synthetic construct
DEAGSGM

SEQ ID NO: 13628 - protein, 7 aa, synthetic construct
APIDVGP

SEQ ID NO: 13629 - protein, 7 aa, synthetic construct
TSDLDAF

SEQ ID NO: 13630 - protein, 7 aa, synthetic construct
GTFVHHD

SEQ ID NO: 13631 - protein, 7 aa, synthetic construct
YPQTDLP

SEQ ID NO: 13632 - protein, 7 aa, synthetic construct
YDHAPEA

SEQ ID NO: 13633 - protein, 7 aa, synthetic construct
STNKVLQ

SEQ ID NO: 13634 - protein, 7 aa, synthetic construct
SAQAYRV

SEQ ID NO: 13635 - protein, 7 aa, synthetic construct
REEINAD

SEQ ID NO: 13636 - protein, 7 aa, synthetic construct
LTDAHES

SEQ ID NO: 13637 - protein, 7 aa, synthetic construct
DSHEHEH

SEQ ID NO: 13638 - protein, 7 aa, synthetic construct
ENGNAID

SEQ ID NO: 13639 - protein, 7 aa, synthetic construct
GMRSDHL

SEQ ID NO: 13640 - protein, 7 aa, synthetic construct
PTFKSTL

SEQ ID NO: 13641 - protein, 7 aa, synthetic construct
LDLGNRN

SEQ ID NO: 13642 - protein, 7 aa, synthetic construct
YLHDEQI

SEQ ID NO: 13643 - protein, 7 aa, synthetic construct
HHTKMQT

SEQ ID NO: 13644 - protein, 7 aa, synthetic construct
TPGNLHL

SEQ ID NO: 13645 - protein, 7 aa, synthetic construct
KDIHHLE

SEQ ID NO: 13646 - protein, 7 aa, synthetic construct
SGMTKAM

SEQ ID NO: 13647 - protein, 7 aa, synthetic construct
ATTFKNM

SEQ ID NO: 13648 - protein, 7 aa, synthetic construct
FEDTKYS

SEQ ID NO: 13649 - protein, 7 aa, synthetic construct
GWEYDGP

SEQ ID NO: 13650 - protein, 7 aa, synthetic construct
PMINQGR

SEQ ID NO: 13651 - protein, 7 aa, synthetic construct
IGTIFGE

SEQ ID NO: 13652 - protein, 7 aa, synthetic construct
HDRETVL

SEQ ID NO: 13653 - protein, 7 aa, synthetic construct
EPDFGMP

SEQ ID NO: 13654 - protein, 7 aa, synthetic construct
DFDRNHF

SEQ ID NO: 13655 - protein, 7 aa, synthetic construct
IHKAHTS

SEQ ID NO: 13656 - protein, 7 aa, synthetic construct
LQYEPAA

SEQ ID NO: 13657 - protein, 7 aa, synthetic construct
KFTAEYI

SEQ ID NO: 13658 - protein, 7 aa, synthetic construct
IGLADGL

SEQ ID NO: 13659 - protein, 7 aa, synthetic construct
DSHFDEK

SEQ ID NO: 13660 - protein, 7 aa, synthetic construct
LDTPEYR

SEQ ID NO: 13661 - protein, 7 aa, synthetic construct
VDNTNMW

SEQ ID NO: 13662 - protein, 7 aa, synthetic construct
SVQQVSD

SEQ ID NO: 13663 - protein, 7 aa, synthetic construct
FSPTSGK

SEQ ID NO: 13664 - protein, 7 aa, synthetic construct
GPVHWEM

SEQ ID NO: 13665 - protein, 7 aa, synthetic construct
PFSDLMH

SEQ ID NO: 13666 - protein, 7 aa, synthetic construct
SNPTFPN

SEQ ID NO: 13667 - protein, 7 aa, synthetic construct
GLGTMLN

SEQ ID NO: 13668 - protein, 7 aa, synthetic construct
LDDPNAW

SEQ ID NO: 13669 - protein, 7 aa, synthetic construct
HADRGRV

SEQ ID NO: 13670 - protein, 7 aa, synthetic construct
DEPKQMS

SEQ ID NO: 13671 - protein, 7 aa, synthetic construct
TMQEKNL

SEQ ID NO: 13672 - protein, 7 aa, synthetic construct
WEDDAHN

SEQ ID NO: 13673 - protein, 7 aa, synthetic construct
GHLNNEH

SEQ ID NO: 13674 - protein, 7 aa, synthetic construct
IENFEIS

SEQ ID NO: 13675 - protein, 7 aa, synthetic construct
EIHLPER

SEQ ID NO: 13676 - protein, 7 aa, synthetic construct
TVMPHNV

SEQ ID NO: 13677 - protein, 7 aa, synthetic construct
SWPNENM

SEQ ID NO: 13678 - protein, 7 aa, synthetic construct
VSEVKNE

SEQ ID NO: 13679 - protein, 7 aa, synthetic construct
QMGMESI

SEQ ID NO: 13680 - protein, 7 aa, synthetic construct
TGGGPHY

SEQ ID NO: 13681 - protein, 7 aa, synthetic construct
LDTAAPN

SEQ ID NO: 13682 - protein, 7 aa, synthetic construct
WNSWQDA

SEQ ID NO: 13683 - protein, 7 aa, synthetic construct
VMEIQPS

SEQ ID NO: 13684 - protein, 7 aa, synthetic construct
SQLFEKP

SEQ ID NO: 13685 - protein, 7 aa, synthetic construct
QNEAAHD

SEQ ID NO: 13686 - protein, 7 aa, synthetic construct
HNSPLKH

SEQ ID NO: 13687 - protein, 7 aa, synthetic construct
DRNIQSL

SEQ ID NO: 13688 - protein, 7 aa, synthetic construct
PRSSHFA

SEQ ID NO: 13689 - protein, 7 aa, synthetic construct
VTHQADS

SEQ ID NO: 13690 - protein, 7 aa, synthetic construct
NISQIKY

SEQ ID NO: 13691 - protein, 7 aa, synthetic construct
CGRTGND

SEQ ID NO: 13692 - protein, 7 aa, synthetic construct
HTHKVSN

SEQ ID NO: 13693 - protein, 7 aa, synthetic construct
APGFGDT

SEQ ID NO: 13694 - protein, 7 aa, synthetic construct
HYVNEGE

SEQ ID NO: 13695 - protein, 7 aa, synthetic construct
AHQEQDN

SEQ ID NO: 13696 - protein, 7 aa, synthetic construct
TGVNVLG

SEQ ID NO: 13697 - protein, 7 aa, synthetic construct
TQAPARQ

SEQ ID NO: 13698 - protein, 7 aa, synthetic construct
TGSEEAE

SEQ ID NO: 13699 - protein, 7 aa, synthetic construct
MHEGDQS

SEQ ID NO: 13700 - protein, 7 aa, synthetic construct
GPWGEID

SEQ ID NO: 13701 - protein, 7 aa, synthetic construct
NDKMGGM

SEQ ID NO: 13702 - protein, 7 aa, synthetic construct
RMAPGHG

SEQ ID NO: 13703 - protein, 7 aa, synthetic construct
WDMDREA

SEQ ID NO: 13704 - protein, 7 aa, synthetic construct
EYHVQSD

SEQ ID NO: 13705 - protein, 7 aa, synthetic construct
SEMMLSR

SEQ ID NO: 13706 - protein, 7 aa, synthetic construct
TDQPVLM

SEQ ID NO: 13707 - protein, 7 aa, synthetic construct
SMQQPEF

SEQ ID NO: 13708 - protein, 7 aa, synthetic construct
NDNRGRP

SEQ ID NO: 13709 - protein, 7 aa, synthetic construct
WEKEMHT

SEQ ID NO: 13710 - protein, 7 aa, synthetic construct
DDHRLFK

SEQ ID NO: 13711 - protein, 7 aa, synthetic construct
DEHNFDS

SEQ ID NO: 13712 - protein, 7 aa, synthetic construct
RNADTHM

SEQ ID NO: 13713 - protein, 7 aa, synthetic construct
AVAYPND

SEQ ID NO: 13714 - protein, 7 aa, synthetic construct
PASDHEI

SEQ ID NO: 13715 - protein, 7 aa, synthetic construct
KSIIQFE

SEQ ID NO: 13716 - protein, 7 aa, synthetic construct
HNPFTTD

SEQ ID NO: 13717 - protein, 7 aa, synthetic construct
VTKNLIT

SEQ ID NO: 13718 - protein, 7 aa, synthetic construct
HIMSSPK

SEQ ID NO: 13719 - protein, 7 aa, synthetic construct
LSSDSNE

SEQ ID NO: 13720 - protein, 7 aa, synthetic construct
TAMRLDM

SEQ ID NO: 13721 - protein, 7 aa, synthetic construct
MTDNARE

SEQ ID NO: 13722 - protein, 7 aa, synthetic construct
AETAVAT

SEQ ID NO: 13723 - protein, 7 aa, synthetic construct
YETPSFD

SEQ ID NO: 13724 - protein, 7 aa, synthetic construct
FEKKFMV

SEQ ID NO: 13725 - protein, 7 aa, synthetic construct
PLEPMPR

SEQ ID NO: 13726 - protein, 7 aa, synthetic construct
NKYVIQD

SEQ ID NO: 13727 - protein, 7 aa, synthetic construct
GQDNAQD

SEQ ID NO: 13728 - protein, 7 aa, synthetic construct
LYESPRQ

SEQ ID NO: 13729 - protein, 7 aa, synthetic construct
PYQHPSV

SEQ ID NO: 13730 - protein, 7 aa, synthetic construct
AILGMND

SEQ ID NO: 13731 - protein, 7 aa, synthetic construct
DTISKNT

SEQ ID NO: 13732 - protein, 7 aa, synthetic construct
ERMGTNL

SEQ ID NO: 13733 - protein, 7 aa, synthetic construct
QVTEKEM

SEQ ID NO: 13734 - protein, 7 aa, synthetic construct
PSPTAKD

SEQ ID NO: 13735 - protein, 7 aa, synthetic construct
ETIQSEI

SEQ ID NO: 13736 - protein, 7 aa, synthetic construct
PENAMRP

SEQ ID NO: 13737 - protein, 7 aa, synthetic construct
RVAEWGN

SEQ ID NO: 13738 - protein, 7 aa, synthetic construct
LGQHQEV

SEQ ID NO: 13739 - protein, 7 aa, synthetic construct
CGVTCNI

SEQ ID NO: 13740 - protein, 7 aa, synthetic construct
VFADTQG

SEQ ID NO: 13741 - protein, 7 aa, synthetic construct
FNSDVAF

SEQ ID NO: 13742 - protein, 7 aa, synthetic construct
MDHLANG

SEQ ID NO: 13743 - protein, 7 aa, synthetic construct
AQEVYKT

SEQ ID NO: 13744 - protein, 7 aa, synthetic construct
ARPLHDN

SEQ ID NO: 13745 - protein, 7 aa, synthetic construct
SQQIDTD

SEQ ID NO: 13746 - protein, 7 aa, synthetic construct
VASDYEY

SEQ ID NO: 13747 - protein, 7 aa, synthetic construct
WNDEMNT

SEQ ID NO: 13748 - protein, 7 aa, synthetic construct
VSKEEWL

SEQ ID NO: 13749 - protein, 7 aa, synthetic construct
HALHGDE

SEQ ID NO: 13750 - protein, 7 aa, synthetic construct
TDPYEAD

SEQ ID NO: 13751 - protein, 7 aa, synthetic construct
PNIFDHP

SEQ ID NO: 13752 - protein, 7 aa, synthetic construct
TLNSPDD

SEQ ID NO: 13753 - protein, 7 aa, synthetic construct
EVGVPIK

SEQ ID NO: 13754 - protein, 7 aa, synthetic construct
QSADGWG

SEQ ID NO: 13755 - protein, 7 aa, synthetic construct
QTNRQFI

SEQ ID NO: 13756 - protein, 7 aa, synthetic construct
GQKNNTW

SEQ ID NO: 13757 - protein, 7 aa, synthetic construct
SYADQYE

SEQ ID NO: 13758 - protein, 7 aa, synthetic construct
NNHTEYA

SEQ ID NO: 13759 - protein, 7 aa, synthetic construct
GSRDYRT

SEQ ID NO: 13760 - protein, 7 aa, synthetic construct
TEAGAEL

SEQ ID NO: 13761 - protein, 7 aa, synthetic construct
WFAPENE

SEQ ID NO: 13762 - protein, 7 aa, synthetic construct
VKSFVQN

SEQ ID NO: 13763 - protein, 7 aa, synthetic construct
MGELSQG

SEQ ID NO: 13764 - protein, 7 aa, synthetic construct
KIKFEIT

SEQ ID NO: 13765 - protein, 7 aa, synthetic construct
FRMNQAV

SEQ ID NO: 13766 - protein, 7 aa, synthetic construct
ASFDYPK

SEQ ID NO: 13767 - protein, 7 aa, synthetic construct
IEGLFPV

SEQ ID NO: 13768 - protein, 7 aa, synthetic construct
EAEYRVD

SEQ ID NO: 13769 - protein, 7 aa, synthetic construct
SMAPEQK

SEQ ID NO: 13770 - protein, 7 aa, synthetic construct
GKDLGLY

SEQ ID NO: 13771 - protein, 7 aa, synthetic construct
PHAQYST

SEQ ID NO: 13772 - protein, 7 aa, synthetic construct
VAAHDDV

SEQ ID NO: 13773 - protein, 7 aa, synthetic construct
KVDEVAH

SEQ ID NO: 13774 - protein, 7 aa, synthetic construct
MNDMYLE

SEQ ID NO: 13775 - protein, 7 aa, synthetic construct
VFPMEIE

SEQ ID NO: 13776 - protein, 7 aa, synthetic construct
ADDYGKS

SEQ ID NO: 13777 - protein, 7 aa, synthetic construct
LEFLPQA

SEQ ID NO: 13778 - protein, 7 aa, synthetic construct
WRHPDHD

SEQ ID NO: 13779 - protein, 7 aa, synthetic construct
VIGATIS

SEQ ID NO: 13780 - protein, 7 aa, synthetic construct
ANNDIPI

SEQ ID NO: 13781 - protein, 7 aa, synthetic construct
AQDKTAW

SEQ ID NO: 13782 - protein, 7 aa, synthetic construct
QLEKDPK

SEQ ID NO: 13783 - protein, 7 aa, synthetic construct
EMQHWDE

SEQ ID NO: 13784 - protein, 7 aa, synthetic construct
YKNMMPF

SEQ ID NO: 13785 - protein, 7 aa, synthetic construct
SDGSESG

SEQ ID NO: 13786 - protein, 7 aa, synthetic construct
KEMIEIK

SEQ ID NO: 13787 - protein, 7 aa, synthetic construct
RVEPIMG

SEQ ID NO: 13788 - protein, 7 aa, synthetic construct
QYTDEAS

SEQ ID NO: 13789 - protein, 7 aa, synthetic construct
QEVAERF

SEQ ID NO: 13790 - protein, 7 aa, synthetic construct
HNDHGMW

SEQ ID NO: 13791 - protein, 7 aa, synthetic construct
HGGSWTQ

SEQ ID NO: 13792 - protein, 7 aa, synthetic construct
HQYHQNN

SEQ ID NO: 13793 - protein, 7 aa, synthetic construct
TYDHNAF

SEQ ID NO: 13794 - protein, 7 aa, synthetic construct
FYQDTVS

SEQ ID NO: 13795 - protein, 7 aa, synthetic construct
VAGENQT

SEQ ID NO: 13796 - protein, 7 aa, synthetic construct
FHTDMPD

SEQ ID NO: 13797 - protein, 7 aa, synthetic construct
FATDPGE

SEQ ID NO: 13798 - protein, 7 aa, synthetic construct
EHGNQPQ

SEQ ID NO: 13799 - protein, 7 aa, synthetic construct
SDDTWGE

SEQ ID NO: 13800 - protein, 7 aa, synthetic construct
SMRAEWS

SEQ ID NO: 13801 - protein, 7 aa, synthetic construct
VSPDFID

SEQ ID NO: 13802 - protein, 7 aa, synthetic construct
PERDGWH

SEQ ID NO: 13803 - protein, 7 aa, synthetic construct
NNPLINN

SEQ ID NO: 13804 - protein, 7 aa, synthetic construct
ADNSKSI

SEQ ID NO: 13805 - protein, 7 aa, synthetic construct
TESSFAT

SEQ ID NO: 13806 - protein, 7 aa, synthetic construct
DETLNER

SEQ ID NO: 13807 - protein, 7 aa, synthetic construct
EQEMKHN

SEQ ID NO: 13808 - protein, 7 aa, synthetic construct
ESDVRHH

SEQ ID NO: 13809 - protein, 7 aa, synthetic construct
KTTEIPD

SEQ ID NO: 13810 - protein, 7 aa, synthetic construct
PRQFIPE

SEQ ID NO: 13811 - protein, 7 aa, synthetic construct
TKWHHDQ

SEQ ID NO: 13812 - protein, 7 aa, synthetic construct
QPPYNQD

SEQ ID NO: 13813 - protein, 7 aa, synthetic construct
REIGYAT

SEQ ID NO: 13814 - protein, 7 aa, synthetic construct
DDKPENW

SEQ ID NO: 13815 - protein, 7 aa, synthetic construct
APGYDSA

SEQ ID NO: 13816 - protein, 7 aa, synthetic construct
CIPSDRC

SEQ ID NO: 13817 - protein, 7 aa, synthetic construct
LLVDNTV

SEQ ID NO: 13818 - protein, 7 aa, synthetic construct
QGEGIHM

SEQ ID NO: 13819 - protein, 7 aa, synthetic construct
AHESDDA

SEQ ID NO: 13820 - protein, 7 aa, synthetic construct
DESDFLN

SEQ ID NO: 13821 - protein, 7 aa, synthetic construct
WITEGSP

SEQ ID NO: 13822 - protein, 7 aa, synthetic construct
DIDNHQW

SEQ ID NO: 13823 - protein, 7 aa, synthetic construct
RSGFADL

SEQ ID NO: 13824 - protein, 7 aa, synthetic construct
GAHPKFL

SEQ ID NO: 13825 - protein, 7 aa, synthetic construct
HNTQQHH

SEQ ID NO: 13826 - protein, 7 aa, synthetic construct
IDSHLSQ

SEQ ID NO: 13827 - protein, 7 aa, synthetic construct
TPYDMSE

SEQ ID NO: 13828 - protein, 7 aa, synthetic construct
QEDKNWD

SEQ ID NO: 13829 - protein, 7 aa, synthetic construct
HNDISTW

SEQ ID NO: 13830 - protein, 7 aa, synthetic construct
EQPQMTD

SEQ ID NO: 13831 - protein, 7 aa, synthetic construct
TSMEVGI

SEQ ID NO: 13832 - protein, 7 aa, synthetic construct
YDATVHY

SEQ ID NO: 13833 - protein, 7 aa, synthetic construct
HEFDRAD

SEQ ID NO: 13834 - protein, 7 aa, synthetic construct
LVEDNYQ

SEQ ID NO: 13835 - protein, 7 aa, synthetic construct
HERKMVI

SEQ ID NO: 13836 - protein, 7 aa, synthetic construct
RNGDHPP

SEQ ID NO: 13837 - protein, 7 aa, synthetic construct
VRQQEFD

SEQ ID NO: 13838 - protein, 7 aa, synthetic construct
MVKVAFS

SEQ ID NO: 13839 - protein, 7 aa, synthetic construct
QDLAETD

SEQ ID NO: 13840 - protein, 7 aa, synthetic construct
AHARASS

SEQ ID NO: 13841 - protein, 7 aa, synthetic construct
ANAPERP

SEQ ID NO: 13842 - protein, 7 aa, synthetic construct
DWNVTQS

SEQ ID NO: 13843 - protein, 7 aa, synthetic construct
KNTNFTP

SEQ ID NO: 13844 - protein, 7 aa, synthetic construct
DDKPHSK

SEQ ID NO: 13845 - protein, 7 aa, synthetic construct
FMSDMEM

SEQ ID NO: 13846 - protein, 7 aa, synthetic construct
VLHEVPA

SEQ ID NO: 13847 - protein, 7 aa, synthetic construct
VPVLKGM

SEQ ID NO: 13848 - protein, 7 aa, synthetic construct
SVIPGYG

SEQ ID NO: 13849 - protein, 7 aa, synthetic construct
TARQYNG

SEQ ID NO: 13850 - protein, 7 aa, synthetic construct
VMHFDES

SEQ ID NO: 13851 - protein, 7 aa, synthetic construct
PTSAETM

SEQ ID NO: 13852 - protein, 7 aa, synthetic construct
KIQREAT

SEQ ID NO: 13853 - protein, 7 aa, synthetic construct
GVTYEVT

SEQ ID NO: 13854 - protein, 7 aa, synthetic construct
SVQKIQF

SEQ ID NO: 13855 - protein, 7 aa, synthetic construct
TQELDRG

SEQ ID NO: 13856 - protein, 7 aa, synthetic construct
VYLADLE

SEQ ID NO: 13857 - protein, 7 aa, synthetic construct
NNEMIQA

SEQ ID NO: 13858 - protein, 7 aa, synthetic construct
GSFPAVM

SEQ ID NO: 13859 - protein, 7 aa, synthetic construct
VDAAQHQ

SEQ ID NO: 13860 - protein, 7 aa, synthetic construct
VPHKLMQ

SEQ ID NO: 13861 - protein, 7 aa, synthetic construct
AKNDRTE

SEQ ID NO: 13862 - protein, 7 aa, synthetic construct
AMNPDTP

SEQ ID NO: 13863 - protein, 7 aa, synthetic construct
INMTQQE

SEQ ID NO: 13864 - protein, 7 aa, synthetic construct
EPGYSHH

SEQ ID NO: 13865 - protein, 7 aa, synthetic construct
WGQTMNN

SEQ ID NO: 13866 - protein, 7 aa, synthetic construct
KEMEDGT

SEQ ID NO: 13867 - protein, 7 aa, synthetic construct
DSTAVIH

SEQ ID NO: 13868 - protein, 7 aa, synthetic construct
SASETDD

SEQ ID NO: 13869 - protein, 7 aa, synthetic construct
GMYREEA

SEQ ID NO: 13870 - protein, 7 aa, synthetic construct
AWAVTQD

SEQ ID NO: 13871 - protein, 7 aa, synthetic construct
SINVGIG

SEQ ID NO: 13872 - protein, 7 aa, synthetic construct
VNMNTVT

SEQ ID NO: 13873 - protein, 7 aa, synthetic construct
AWDKDGD

SEQ ID NO: 13874 - protein, 7 aa, synthetic construct
DAHSMQM

SEQ ID NO: 13875 - protein, 7 aa, synthetic construct
HIGPENI

SEQ ID NO: 13876 - protein, 7 aa, synthetic construct
QQQGVHR

SEQ ID NO: 13877 - protein, 7 aa, synthetic construct
PPLAPQG

SEQ ID NO: 13878 - protein, 7 aa, synthetic construct
AVRLTGM

SEQ ID NO: 13879 - protein, 7 aa, synthetic construct
ELKGGLL

SEQ ID NO: 13880 - protein, 7 aa, synthetic construct
WYDNDES

SEQ ID NO: 13881 - protein, 7 aa, synthetic construct
IQEYSLE

SEQ ID NO: 13882 - protein, 7 aa, synthetic construct
DSNNPVE

SEQ ID NO: 13883 - protein, 7 aa, synthetic construct
GINNGTV

SEQ ID NO: 13884 - protein, 7 aa, synthetic construct
YSSNEDL

SEQ ID NO: 13885 - protein, 7 aa, synthetic construct
FFIENTP

SEQ ID NO: 13886 - protein, 7 aa, synthetic construct
SVFPAPN

SEQ ID NO: 13887 - protein, 7 aa, synthetic construct
FIDQQTM

SEQ ID NO: 13888 - protein, 7 aa, synthetic construct
LNDAPGE

SEQ ID NO: 13889 - protein, 7 aa, synthetic construct
FYEQTIA

SEQ ID NO: 13890 - protein, 7 aa, synthetic construct
MPYVNQK

SEQ ID NO: 13891 - protein, 7 aa, synthetic construct
MAEKRWS

SEQ ID NO: 13892 - protein, 7 aa, synthetic construct
EEEARKD

SEQ ID NO: 13893 - protein, 7 aa, synthetic construct
RMAGEEA

SEQ ID NO: 13894 - protein, 7 aa, synthetic construct
TPHHDGI

SEQ ID NO: 13895 - protein, 7 aa, synthetic construct
GQEQDYP

SEQ ID NO: 13896 - protein, 7 aa, synthetic construct
IGQGNRF

SEQ ID NO: 13897 - protein, 7 aa, synthetic construct
WFYDADD

SEQ ID NO: 13898 - protein, 7 aa, synthetic construct
QADVNLE

SEQ ID NO: 13899 - protein, 7 aa, synthetic construct
QYQVVPH

SEQ ID NO: 13900 - protein, 7 aa, synthetic construct
MPVGAFG

SEQ ID NO: 13901 - protein, 7 aa, synthetic construct
IKSDMLL

SEQ ID NO: 13902 - protein, 7 aa, synthetic construct
NRIHGDH

SEQ ID NO: 13903 - protein, 7 aa, synthetic construct
VTANMEM

SEQ ID NO: 13904 - protein, 7 aa, synthetic construct
HIHDDID

SEQ ID NO: 13905 - protein, 7 aa, synthetic construct
GEPQQNS

SEQ ID NO: 13906 - protein, 7 aa, synthetic construct
KYNVLME

SEQ ID NO: 13907 - protein, 7 aa, synthetic construct
PDDKTEK

SEQ ID NO: 13908 - protein, 7 aa, synthetic construct
PNNGVMD

SEQ ID NO: 13909 - protein, 7 aa, synthetic construct
ANASQAG

SEQ ID NO: 13910 - protein, 7 aa, synthetic construct
LHMKNFE

SEQ ID NO: 13911 - protein, 7 aa, synthetic construct
TVQNDPH

SEQ ID NO: 13912 - protein, 7 aa, synthetic construct
NFGTNAL

SEQ ID NO: 13913 - protein, 7 aa, synthetic construct
ILAVGYE

SEQ ID NO: 13914 - protein, 7 aa, synthetic construct
VDAQSNI

SEQ ID NO: 13915 - protein, 7 aa, synthetic construct
IDGDAAF

SEQ ID NO: 13916 - protein, 7 aa, synthetic construct
HGIVIPA

SEQ ID NO: 13917 - protein, 7 aa, synthetic construct
LFTGEVY

SEQ ID NO: 13918 - protein, 7 aa, synthetic construct
RESKTIV

SEQ ID NO: 13919 - protein, 7 aa, synthetic construct
EQFNDRD

SEQ ID NO: 13920 - protein, 7 aa, synthetic construct
RNPNPPY

SEQ ID NO: 13921 - protein, 7 aa, synthetic construct
TYDYRKD

SEQ ID NO: 13922 - protein, 7 aa, synthetic construct
QEHPIEH

SEQ ID NO: 13923 - protein, 7 aa, synthetic construct
PHKPHMY

SEQ ID NO: 13924 - protein, 7 aa, synthetic construct
VIFPNAN

SEQ ID NO: 13925 - protein, 7 aa, synthetic construct
YHVGEVI

SEQ ID NO: 13926 - protein, 7 aa, synthetic construct
WTAVNVG

SEQ ID NO: 13927 - protein, 7 aa, synthetic construct
NNETIVH

SEQ ID NO: 13928 - protein, 7 aa, synthetic construct
TRGLDPR

SEQ ID NO: 13929 - protein, 7 aa, synthetic construct
VNQYSDL

SEQ ID NO: 13930 - protein, 7 aa, synthetic construct
TNSATMD

SEQ ID NO: 13931 - protein, 7 aa, synthetic construct
SPFIKLD

SEQ ID NO: 13932 - protein, 7 aa, synthetic construct
INPEWAD

SEQ ID NO: 13933 - protein, 7 aa, synthetic construct
HINQNIY

SEQ ID NO: 13934 - protein, 7 aa, synthetic construct
PESAQQE

SEQ ID NO: 13935 - protein, 7 aa, synthetic construct
DFADPQM

SEQ ID NO: 13936 - protein, 7 aa, synthetic construct
SVDDGRG

SEQ ID NO: 13937 - protein, 7 aa, synthetic construct
VSYNNDA

SEQ ID NO: 13938 - protein, 7 aa, synthetic construct
YAPNVLE

SEQ ID NO: 13939 - protein, 7 aa, synthetic construct
NLPNGLG

SEQ ID NO: 13940 - protein, 7 aa, synthetic construct
YQHDDQF

SEQ ID NO: 13941 - protein, 7 aa, synthetic construct
SHESFEK

SEQ ID NO: 13942 - protein, 7 aa, synthetic construct
DKWDQPT

SEQ ID NO: 13943 - protein, 7 aa, synthetic construct
VATDNVR

SEQ ID NO: 13944 - protein, 7 aa, synthetic construct
EYTKGLL

SEQ ID NO: 13945 - protein, 7 aa, synthetic construct
RPEAINW

SEQ ID NO: 13946 - protein, 7 aa, synthetic construct
FRNDQKH

SEQ ID NO: 13947 - protein, 7 aa, synthetic construct
TIIEGDW

SEQ ID NO: 13948 - protein, 7 aa, synthetic construct
QVEKQSK

SEQ ID NO: 13949 - protein, 7 aa, synthetic construct
QMHGFES

SEQ ID NO: 13950 - protein, 7 aa, synthetic construct
TEHPITD

SEQ ID NO: 13951 - protein, 7 aa, synthetic construct
VHKADRF

SEQ ID NO: 13952 - protein, 7 aa, synthetic construct
VLSILPD

SEQ ID NO: 13953 - protein, 7 aa, synthetic construct
KFDISGH

SEQ ID NO: 13954 - protein, 7 aa, synthetic construct
PHMNIEL

SEQ ID NO: 13955 - protein, 7 aa, synthetic construct
AAGAVNV

SEQ ID NO: 13956 - protein, 7 aa, synthetic construct
HVHSNML

SEQ ID NO: 13957 - protein, 7 aa, synthetic construct
NMLELKD

SEQ ID NO: 13958 - protein, 7 aa, synthetic construct
GKPSVFI

SEQ ID NO: 13959 - protein, 7 aa, synthetic construct
WTPPESM

SEQ ID NO: 13960 - protein, 7 aa, synthetic construct
AMDDNWV

SEQ ID NO: 13961 - protein, 7 aa, synthetic construct
DGMPNAY

SEQ ID NO: 13962 - protein, 7 aa, synthetic construct
TNKNYIL

SEQ ID NO: 13963 - protein, 7 aa, synthetic construct
GDDDRYF

SEQ ID NO: 13964 - protein, 7 aa, synthetic construct
ELQSESS

SEQ ID NO: 13965 - protein, 7 aa, synthetic construct
AEMSSSA

SEQ ID NO: 13966 - protein, 7 aa, synthetic construct
PGDSAFI

SEQ ID NO: 13967 - protein, 7 aa, synthetic construct
PQLAPGY

SEQ ID NO: 13968 - protein, 7 aa, synthetic construct
IEQMNSH

SEQ ID NO: 13969 - protein, 7 aa, synthetic construct
VADGVAI

SEQ ID NO: 13970 - protein, 7 aa, synthetic construct
QIDNSAD

SEQ ID NO: 13971 - protein, 7 aa, synthetic construct
LFDMSQD

SEQ ID NO: 13972 - protein, 7 aa, synthetic construct
HLDSMAK

SEQ ID NO: 13973 - protein, 7 aa, synthetic construct
GKGNMLF

SEQ ID NO: 13974 - protein, 7 aa, synthetic construct
NRFDRDG

SEQ ID NO: 13975 - protein, 7 aa, synthetic construct
MGKIMYQ

SEQ ID NO: 13976 - protein, 7 aa, synthetic construct
RINQMDF

SEQ ID NO: 13977 - protein, 7 aa, synthetic construct
GPETGEN

SEQ ID NO: 13978 - protein, 7 aa, synthetic construct
DVWHGKA

SEQ ID NO: 13979 - protein, 7 aa, synthetic construct
GMEYGDS

SEQ ID NO: 13980 - protein, 7 aa, synthetic construct
TTISLME

SEQ ID NO: 13981 - protein, 7 aa, synthetic construct
TFKPFAA

SEQ ID NO: 13982 - protein, 7 aa, synthetic construct
IFANEPL

SEQ ID NO: 13983 - protein, 7 aa, synthetic construct
DMDFMEP

SEQ ID NO: 13984 - protein, 7 aa, synthetic construct
NMEIDMA

SEQ ID NO: 13985 - protein, 7 aa, synthetic construct
NMKEATW

SEQ ID NO: 13986 - protein, 7 aa, synthetic construct
EDPRDAK

SEQ ID NO: 13987 - protein, 7 aa, synthetic construct
ISMQYMK

SEQ ID NO: 13988 - protein, 7 aa, synthetic construct
KEEYEMY

SEQ ID NO: 13989 - protein, 7 aa, synthetic construct
AKNEDYD

SEQ ID NO: 13990 - protein, 7 aa, synthetic construct
MTNNGFD

SEQ ID NO: 13991 - protein, 7 aa, synthetic construct
KNEKARE

SEQ ID NO: 13992 - protein, 7 aa, synthetic construct
IGMAAVI

SEQ ID NO: 13993 - protein, 7 aa, synthetic construct
QQMQTPI

SEQ ID NO: 13994 - protein, 7 aa, synthetic construct
HIEVSYG

SEQ ID NO: 13995 - protein, 7 aa, synthetic construct
AHSSIST

SEQ ID NO: 13996 - protein, 7 aa, synthetic construct
AHNREKQ

SEQ ID NO: 13997 - protein, 7 aa, synthetic construct
QDMLKKV

SEQ ID NO: 13998 - protein, 7 aa, synthetic construct
TMPEMQE

SEQ ID NO: 13999 - protein, 7 aa, synthetic construct
SQNDARH

SEQ ID NO: 14000 - protein, 7 aa, synthetic construct
MYNMANK

SEQ ID NO: 14001 - protein, 7 aa, synthetic construct
NAWKETV

SEQ ID NO: 14002 - protein, 7 aa, synthetic construct
NVSHEDT

SEQ ID NO: 14003 - protein, 7 aa, synthetic construct
VWDELQP

SEQ ID NO: 14004 - protein, 7 aa, synthetic construct
RMPDQDD

SEQ ID NO: 14005 - protein, 7 aa, synthetic construct
VVGTPVY

SEQ ID NO: 14006 - protein, 7 aa, synthetic construct
WAEQNMV

SEQ ID NO: 14007 - protein, 7 aa, synthetic construct
PADQPGW

SEQ ID NO: 14008 - protein, 7 aa, synthetic construct
PLYHQNP

SEQ ID NO: 14009 - protein, 7 aa, synthetic construct
GELSNAM

SEQ ID NO: 14010 - protein, 7 aa, synthetic construct
FGTPTLG

SEQ ID NO: 14011 - protein, 7 aa, synthetic construct
TQRTTFY

SEQ ID NO: 14012 - protein, 7 aa, synthetic construct
GSRDRLN

SEQ ID NO: 14013 - protein, 7 aa, synthetic construct
NISHNQW

SEQ ID NO: 14014 - protein, 7 aa, synthetic construct
HAVHHNT

SEQ ID NO: 14015 - protein, 7 aa, synthetic construct
AQEPNQN

SEQ ID NO: 14016 - protein, 7 aa, synthetic construct
HVSDQTL

SEQ ID NO: 14017 - protein, 7 aa, synthetic construct
HTAEEHS

SEQ ID NO: 14018 - protein, 7 aa, synthetic construct
EASTMQT

SEQ ID NO: 14019 - protein, 7 aa, synthetic construct
KRDGRMP

SEQ ID NO: 14020 - protein, 7 aa, synthetic construct
YHQDGRD

SEQ ID NO: 14021 - protein, 7 aa, synthetic construct
MEEWRQD

SEQ ID NO: 14022 - protein, 7 aa, synthetic construct
NYNDFNG

SEQ ID NO: 14023 - protein, 7 aa, synthetic construct
KEGDYND

SEQ ID NO: 14024 - protein, 7 aa, synthetic construct
IMVAQDA

SEQ ID NO: 14025 - protein, 7 aa, synthetic construct
ELNQFVA

SEQ ID NO: 14026 - protein, 7 aa, synthetic construct
GMPNVQM

SEQ ID NO: 14027 - protein, 7 aa, synthetic construct
PLYDLTD

SEQ ID NO: 14028 - protein, 7 aa, synthetic construct
TGAPHTL

SEQ ID NO: 14029 - protein, 7 aa, synthetic construct
NAPESPE

SEQ ID NO: 14030 - protein, 7 aa, synthetic construct
DVGTAPM

SEQ ID NO: 14031 - protein, 7 aa, synthetic construct
EDRVSDM

SEQ ID NO: 14032 - protein, 7 aa, synthetic construct
NYGPHII

SEQ ID NO: 14033 - protein, 7 aa, synthetic construct
FDHLTQT

SEQ ID NO: 14034 - protein, 7 aa, synthetic construct
LTDNNEN

SEQ ID NO: 14035 - protein, 7 aa, synthetic construct
HAWNEGK

SEQ ID NO: 14036 - protein, 7 aa, synthetic construct
EQNATQF

SEQ ID NO: 14037 - protein, 7 aa, synthetic construct
MRQYDAQ

SEQ ID NO: 14038 - protein, 7 aa, synthetic construct
HWEGPVE

SEQ ID NO: 14039 - protein, 7 aa, synthetic construct
PWDQHDI

SEQ ID NO: 14040 - protein, 7 aa, synthetic construct
FEDASSI

SEQ ID NO: 14041 - protein, 7 aa, synthetic construct
NEVPPNG

SEQ ID NO: 14042 - protein, 7 aa, synthetic construct
DVTDRVA

SEQ ID NO: 14043 - protein, 7 aa, synthetic construct
QYDDIAT

SEQ ID NO: 14044 - protein, 7 aa, synthetic construct
IENTPQS

SEQ ID NO: 14045 - protein, 7 aa, synthetic construct
YHNPDGM

SEQ ID NO: 14046 - protein, 7 aa, synthetic construct
PEHITVH

SEQ ID NO: 14047 - protein, 7 aa, synthetic construct
EYSTSMM

SEQ ID NO: 14048 - protein, 7 aa, synthetic construct
ERDERNI

SEQ ID NO: 14049 - protein, 7 aa, synthetic construct
IETTDHP

SEQ ID NO: 14050 - protein, 7 aa, synthetic construct
RSVMTIT

SEQ ID NO: 14051 - protein, 7 aa, synthetic construct
WMVEATP

SEQ ID NO: 14052 - protein, 7 aa, synthetic construct
GGHQDIG

SEQ ID NO: 14053 - protein, 7 aa, synthetic construct
NGNENHW

SEQ ID NO: 14054 - protein, 7 aa, synthetic construct
LFGVQEE

SEQ ID NO: 14055 - protein, 7 aa, synthetic construct
SLPTDHH

SEQ ID NO: 14056 - protein, 7 aa, synthetic construct
LPTTILK

SEQ ID NO: 14057 - protein, 7 aa, synthetic construct
SRGVVAF

SEQ ID NO: 14058 - protein, 7 aa, synthetic construct
HTGEGQP

SEQ ID NO: 14059 - protein, 7 aa, synthetic construct
VRTELHI

SEQ ID NO: 14060 - protein, 7 aa, synthetic construct
HAVEFHE

SEQ ID NO: 14061 - protein, 7 aa, synthetic construct
HVLTRTE

SEQ ID NO: 14062 - protein, 7 aa, synthetic construct
MVKMPLT

SEQ ID NO: 14063 - protein, 7 aa, synthetic construct
HAEDPRQ

SEQ ID NO: 14064 - protein, 7 aa, synthetic construct
KHQTLLS

SEQ ID NO: 14065 - protein, 7 aa, synthetic construct
ETPQMEK

SEQ ID NO: 14066 - protein, 7 aa, synthetic construct
MEVRSPL

SEQ ID NO: 14067 - protein, 7 aa, synthetic construct
PHHGAED

SEQ ID NO: 14068 - protein, 7 aa, synthetic construct
MSVSYVP

SEQ ID NO: 14069 - protein, 7 aa, synthetic construct
HYEIAQR

SEQ ID NO: 14070 - protein, 7 aa, synthetic construct
PSGINAT

SEQ ID NO: 14071 - protein, 7 aa, synthetic construct
PGAWESS

SEQ ID NO: 14072 - protein, 7 aa, synthetic construct
SVSLEVE

SEQ ID NO: 14073 - protein, 7 aa, synthetic construct
IAIENGM

SEQ ID NO: 14074 - protein, 7 aa, synthetic construct
PDIRGEN

SEQ ID NO: 14075 - protein, 7 aa, synthetic construct
QLENHAW

SEQ ID NO: 14076 - protein, 7 aa, synthetic construct
NDHDVTA

SEQ ID NO: 14077 - protein, 7 aa, synthetic construct
MGQENYE

SEQ ID NO: 14078 - protein, 7 aa, synthetic construct
TMGEFNT

SEQ ID NO: 14079 - protein, 7 aa, synthetic construct
VHADMNA

SEQ ID NO: 14080 - protein, 7 aa, synthetic construct
EFNTKHG

SEQ ID NO: 14081 - protein, 7 aa, synthetic construct
TSDYDGD

SEQ ID NO: 14082 - protein, 7 aa, synthetic construct
PARDEIN

SEQ ID NO: 14083 - protein, 7 aa, synthetic construct
LDNQVPF

SEQ ID NO: 14084 - protein, 7 aa, synthetic construct
GFARDIT

SEQ ID NO: 14085 - protein, 7 aa, synthetic construct
GTWTNDK

SEQ ID NO: 14086 - protein, 7 aa, synthetic construct
PMDRAFL

SEQ ID NO: 14087 - protein, 7 aa, synthetic construct
QADEVFS

SEQ ID NO: 14088 - protein, 7 aa, synthetic construct
REDNIDY

SEQ ID NO: 14089 - protein, 7 aa, synthetic construct
LHPVQLE

SEQ ID NO: 14090 - protein, 7 aa, synthetic construct
LIRGEYK

SEQ ID NO: 14091 - protein, 7 aa, synthetic construct
MEGDDGM

SEQ ID NO: 14092 - protein, 7 aa, synthetic construct
EDQHGTA

SEQ ID NO: 14093 - protein, 7 aa, synthetic construct
PEIDNHK

SEQ ID NO: 14094 - protein, 7 aa, synthetic construct
ELFINAD

SEQ ID NO: 14095 - protein, 7 aa, synthetic construct
TLTIAVA

SEQ ID NO: 14096 - protein, 7 aa, synthetic construct
SLDGSMP

SEQ ID NO: 14097 - protein, 7 aa, synthetic construct
QYETKWA

SEQ ID NO: 14098 - protein, 7 aa, synthetic construct
IQITTPQ

SEQ ID NO: 14099 - protein, 7 aa, synthetic construct
ANMEWIK

SEQ ID NO: 14100 - protein, 7 aa, synthetic construct
IMHRMMG

SEQ ID NO: 14101 - protein, 7 aa, synthetic construct
WGFEEQK

SEQ ID NO: 14102 - protein, 7 aa, synthetic construct
HQYMLQD

SEQ ID NO: 14103 - protein, 7 aa, synthetic construct
SHTTAEI

SEQ ID NO: 14104 - protein, 7 aa, synthetic construct
MDPFKPL

SEQ ID NO: 14105 - protein, 7 aa, synthetic construct
NQTDLTH

SEQ ID NO: 14106 - protein, 7 aa, synthetic construct
LDGHYEI

SEQ ID NO: 14107 - protein, 7 aa, synthetic construct
AHQRGPT

SEQ ID NO: 14108 - protein, 7 aa, synthetic construct
ESSSVAT

SEQ ID NO: 14109 - protein, 7 aa, synthetic construct
LRLSDEN

SEQ ID NO: 14110 - protein, 7 aa, synthetic construct
EWGMEQS

SEQ ID NO: 14111 - protein, 7 aa, synthetic construct
EDVGFAG

SEQ ID NO: 14112 - protein, 7 aa, synthetic construct
MLHVGDR

SEQ ID NO: 14113 - protein, 7 aa, synthetic construct
IYDSSTQ

SEQ ID NO: 14114 - protein, 7 aa, synthetic construct
IDGDHIE

SEQ ID NO: 14115 - protein, 7 aa, synthetic construct
FHDPDMM

SEQ ID NO: 14116 - protein, 7 aa, synthetic construct
PLGANKW

SEQ ID NO: 14117 - protein, 7 aa, synthetic construct
IYTETFS

SEQ ID NO: 14118 - protein, 7 aa, synthetic construct
NANGETY

SEQ ID NO: 14119 - protein, 7 aa, synthetic construct
NTRLLME

SEQ ID NO: 14120 - protein, 7 aa, synthetic construct
FIDNEDW

SEQ ID NO: 14121 - protein, 7 aa, synthetic construct
GRIEDTD

SEQ ID NO: 14122 - protein, 7 aa, synthetic construct
NLPPIEV

SEQ ID NO: 14123 - protein, 7 aa, synthetic construct
QPSQVES

SEQ ID NO: 14124 - protein, 7 aa, synthetic construct
DVLQNNA

SEQ ID NO: 14125 - protein, 7 aa, synthetic construct
EYTGKFM

SEQ ID NO: 14126 - protein, 7 aa, synthetic construct
HWEQTNI

SEQ ID NO: 14127 - protein, 7 aa, synthetic construct
TYPPQGK

SEQ ID NO: 14128 - protein, 7 aa, synthetic construct
HAENEEA

SEQ ID NO: 14129 - protein, 7 aa, synthetic construct
LKPAVFH

SEQ ID NO: 14130 - protein, 7 aa, synthetic construct
QLTESQD

SEQ ID NO: 14131 - protein, 7 aa, synthetic construct
AEAIASH

SEQ ID NO: 14132 - protein, 7 aa, synthetic construct
TFQDVTH

SEQ ID NO: 14133 - protein, 7 aa, synthetic construct
VAEQVMG

SEQ ID NO: 14134 - protein, 7 aa, synthetic construct
YTAAIRM

SEQ ID NO: 14135 - protein, 7 aa, synthetic construct
DPGTPML

SEQ ID NO: 14136 - protein, 7 aa, synthetic construct
EKISINV

SEQ ID NO: 14137 - protein, 7 aa, synthetic construct
LSEALSR

SEQ ID NO: 14138 - protein, 7 aa, synthetic construct
KESHLMG

SEQ ID NO: 14139 - protein, 7 aa, synthetic construct
PAIMNDD

SEQ ID NO: 14140 - protein, 7 aa, synthetic construct
KAMIMSS

SEQ ID NO: 14141 - protein, 7 aa, synthetic construct
QPAIHLT

SEQ ID NO: 14142 - protein, 7 aa, synthetic construct
FTGQTVY

SEQ ID NO: 14143 - protein, 7 aa, synthetic construct
DQEPEQM

SEQ ID NO: 14144 - protein, 7 aa, synthetic construct
FPPAQFH

SEQ ID NO: 14145 - protein, 7 aa, synthetic construct
QPPNAYI

SEQ ID NO: 14146 - protein, 7 aa, synthetic construct
YSKTMHF

SEQ ID NO: 14147 - protein, 7 aa, synthetic construct
IPKVDGL

SEQ ID NO: 14148 - protein, 7 aa, synthetic construct
RETPDWV

SEQ ID NO: 14149 - protein, 7 aa, synthetic construct
IFNELHS

SEQ ID NO: 14150 - protein, 7 aa, synthetic construct
VDRPSNY

SEQ ID NO: 14151 - protein, 7 aa, synthetic construct
ETIEDKG

SEQ ID NO: 14152 - protein, 7 aa, synthetic construct
HLGGMMD

SEQ ID NO: 14153 - protein, 7 aa, synthetic construct
ENGFGMP

SEQ ID NO: 14154 - protein, 7 aa, synthetic construct
EFQDRLD

SEQ ID NO: 14155 - protein, 7 aa, synthetic construct
VKVYAST

SEQ ID NO: 14156 - protein, 7 aa, synthetic construct
HAMSGYI

SEQ ID NO: 14157 - protein, 7 aa, synthetic construct
KADVFPT

SEQ ID NO: 14158 - protein, 7 aa, synthetic construct
GSHQLQR

SEQ ID NO: 14159 - protein, 7 aa, synthetic construct
GAPYNVL

SEQ ID NO: 14160 - protein, 7 aa, synthetic construct
MEQGPDL

SEQ ID NO: 14161 - protein, 7 aa, synthetic construct
QSKMEET

SEQ ID NO: 14162 - protein, 7 aa, synthetic construct
FDASDGY

SEQ ID NO: 14163 - protein, 7 aa, synthetic construct
DGMDIKM

SEQ ID NO: 14164 - protein, 7 aa, synthetic construct
FVTPHDI

SEQ ID NO: 14165 - protein, 7 aa, synthetic construct
NIPEDPH

SEQ ID NO: 14166 - protein, 7 aa, synthetic construct
SASTWKE

SEQ ID NO: 14167 - protein, 7 aa, synthetic construct
SPTEHHT

SEQ ID NO: 14168 - protein, 7 aa, synthetic construct
EGADHMI

SEQ ID NO: 14169 - protein, 7 aa, synthetic construct
LIGTRAY

SEQ ID NO: 14170 - protein, 7 aa, synthetic construct
FDTIDYV

SEQ ID NO: 14171 - protein, 7 aa, synthetic construct
GEKRNEP

SEQ ID NO: 14172 - protein, 7 aa, synthetic construct
SGKHVMF

SEQ ID NO: 14173 - protein, 7 aa, synthetic construct
HANATFA

SEQ ID NO: 14174 - protein, 7 aa, synthetic construct
KDEQAQV

SEQ ID NO: 14175 - protein, 7 aa, synthetic construct
AWQISSG

SEQ ID NO: 14176 - protein, 7 aa, synthetic construct
EMNVPTV

SEQ ID NO: 14177 - protein, 7 aa, synthetic construct
SDSDMIF

SEQ ID NO: 14178 - protein, 7 aa, synthetic construct
TPHTDMA

SEQ ID NO: 14179 - protein, 7 aa, synthetic construct
FANQLRS

SEQ ID NO: 14180 - protein, 7 aa, synthetic construct
FDHIKVY

SEQ ID NO: 14181 - protein, 7 aa, synthetic construct
EDGSHDS

SEQ ID NO: 14182 - protein, 7 aa, synthetic construct
THNGEVY

SEQ ID NO: 14183 - protein, 7 aa, synthetic construct
SNIQKPL

SEQ ID NO: 14184 - protein, 7 aa, synthetic construct
WSDLGDA

SEQ ID NO: 14185 - protein, 7 aa, synthetic construct
PHLDRER

SEQ ID NO: 14186 - protein, 7 aa, synthetic construct
NENLMFE

SEQ ID NO: 14187 - protein, 7 aa, synthetic construct
EVLMEQK

SEQ ID NO: 14188 - protein, 7 aa, synthetic construct
RGKHEGG

SEQ ID NO: 14189 - protein, 7 aa, synthetic construct
MVSRSFV

SEQ ID NO: 14190 - protein, 7 aa, synthetic construct
HKSIMEI

SEQ ID NO: 14191 - protein, 7 aa, synthetic construct
RHGLLDK

SEQ ID NO: 14192 - protein, 7 aa, synthetic construct
HNNKFGI

SEQ ID NO: 14193 - protein, 7 aa, synthetic construct
AHEMPKR

SEQ ID NO: 14194 - protein, 7 aa, synthetic construct
NKIVPPA

SEQ ID NO: 14195 - protein, 7 aa, synthetic construct
YQSQTAF

SEQ ID NO: 14196 - protein, 7 aa, synthetic construct
DTFTQRK

SEQ ID NO: 14197 - protein, 7 aa, synthetic construct
PNQLEPE

SEQ ID NO: 14198 - protein, 7 aa, synthetic construct
FLVTSVA

SEQ ID NO: 14199 - protein, 7 aa, synthetic construct
TIKFQPG

SEQ ID NO: 14200 - protein, 7 aa, synthetic construct
YKEDEMY

SEQ ID NO: 14201 - protein, 7 aa, synthetic construct
YDVSHVY

SEQ ID NO: 14202 - protein, 7 aa, synthetic construct
NEWTTKY

SEQ ID NO: 14203 - protein, 7 aa, synthetic construct
DVGVQVH

SEQ ID NO: 14204 - protein, 7 aa, synthetic construct
FTHARYD

SEQ ID NO: 14205 - protein, 7 aa, synthetic construct
VASPPMR

SEQ ID NO: 14206 - protein, 7 aa, synthetic construct
SHSHQTL

SEQ ID NO: 14207 - protein, 7 aa, synthetic construct
ADVETKH

SEQ ID NO: 14208 - protein, 7 aa, synthetic construct
NISSFSS

SEQ ID NO: 14209 - protein, 7 aa, synthetic construct
HYNPSHH

SEQ ID NO: 14210 - protein, 7 aa, synthetic construct
MSPMGTV

SEQ ID NO: 14211 - protein, 7 aa, synthetic construct
EERNDLF

SEQ ID NO: 14212 - protein, 7 aa, synthetic construct
HSPFKID

SEQ ID NO: 14213 - protein, 7 aa, synthetic construct
TQQEDMS

SEQ ID NO: 14214 - protein, 7 aa, synthetic construct
ETKISLH

SEQ ID NO: 14215 - protein, 7 aa, synthetic construct
IDEKFQY

SEQ ID NO: 14216 - protein, 7 aa, synthetic construct
FTMYREA

SEQ ID NO: 14217 - protein, 7 aa, synthetic construct
KVAPITA

SEQ ID NO: 14218 - protein, 7 aa, synthetic construct
FIHSVSE

SEQ ID NO: 14219 - protein, 7 aa, synthetic construct
QEDSNVS

SEQ ID NO: 14220 - protein, 7 aa, synthetic construct
AAEGDIV

SEQ ID NO: 14221 - protein, 7 aa, synthetic construct
IGYLSQS

SEQ ID NO: 14222 - protein, 7 aa, synthetic construct
TIDAHNF

SEQ ID NO: 14223 - protein, 7 aa, synthetic construct
RSDDTDP

SEQ ID NO: 14224 - protein, 7 aa, synthetic construct
YTNSGVQ

SEQ ID NO: 14225 - protein, 7 aa, synthetic construct
TETMKGQ

SEQ ID NO: 14226 - protein, 7 aa, synthetic construct
NVDAVVY

SEQ ID NO: 14227 - protein, 7 aa, synthetic construct
EQQPGFL

SEQ ID NO: 14228 - protein, 7 aa, synthetic construct
VATWENI

SEQ ID NO: 14229 - protein, 7 aa, synthetic construct
HVEQPVI

SEQ ID NO: 14230 - protein, 7 aa, synthetic construct
LRDYHME

SEQ ID NO: 14231 - protein, 7 aa, synthetic construct
WAKLTVN

SEQ ID NO: 14232 - protein, 7 aa, synthetic construct
TAAIVTS

SEQ ID NO: 14233 - protein, 7 aa, synthetic construct
NSNGIMM

SEQ ID NO: 14234 - protein, 7 aa, synthetic construct
AYIRAGP

SEQ ID NO: 14235 - protein, 7 aa, synthetic construct
EIYLSQE

SEQ ID NO: 14236 - protein, 7 aa, synthetic construct
NLTEVRH

SEQ ID NO: 14237 - protein, 7 aa, synthetic construct
AHQPLIL

SEQ ID NO: 14238 - protein, 7 aa, synthetic construct
MLPNAIL

SEQ ID NO: 14239 - protein, 7 aa, synthetic construct
MPAKIQW

SEQ ID NO: 14240 - protein, 7 aa, synthetic construct
MAENHFD

SEQ ID NO: 14241 - protein, 7 aa, synthetic construct
ISYEEDI

SEQ ID NO: 14242 - protein, 7 aa, synthetic construct
FRQNLND

SEQ ID NO: 14243 - protein, 7 aa, synthetic construct
DESQAPF

SEQ ID NO: 14244 - protein, 7 aa, synthetic construct
ISFDKSS

SEQ ID NO: 14245 - protein, 7 aa, synthetic construct
ELNHQGR

SEQ ID NO: 14246 - protein, 7 aa, synthetic construct
GESGLET

SEQ ID NO: 14247 - protein, 7 aa, synthetic construct
ADAQVQE

SEQ ID NO: 14248 - protein, 7 aa, synthetic construct
KNHEMQY

SEQ ID NO: 14249 - protein, 7 aa, synthetic construct
DNNTDLT

SEQ ID NO: 14250 - protein, 7 aa, synthetic construct
RPMMDNK

SEQ ID NO: 14251 - protein, 7 aa, synthetic construct
QQDERGV

SEQ ID NO: 14252 - protein, 7 aa, synthetic construct
DERHFVT

SEQ ID NO: 14253 - protein, 7 aa, synthetic construct
DSNQRDE

SEQ ID NO: 14254 - protein, 7 aa, synthetic construct
MEQAPAH

SEQ ID NO: 14255 - protein, 7 aa, synthetic construct
EQEMSMP

SEQ ID NO: 14256 - protein, 7 aa, synthetic construct
LDGPIYR

SEQ ID NO: 14257 - protein, 7 aa, synthetic construct
MPSPLTA

SEQ ID NO: 14258 - protein, 7 aa, synthetic construct
ALSDTMR

SEQ ID NO: 14259 - protein, 7 aa, synthetic construct
NDRIEGE

SEQ ID NO: 14260 - protein, 7 aa, synthetic construct
LDFHPPD

SEQ ID NO: 14261 - protein, 7 aa, synthetic construct
NTESMTN

SEQ ID NO: 14262 - protein, 7 aa, synthetic construct
KLPIEDA

SEQ ID NO: 14263 - protein, 7 aa, synthetic construct
MMQQMED

SEQ ID NO: 14264 - protein, 7 aa, synthetic construct
KHEMRFA

SEQ ID NO: 14265 - protein, 7 aa, synthetic construct
YDAQSDR

SEQ ID NO: 14266 - protein, 7 aa, synthetic construct
SQSTIRY

SEQ ID NO: 14267 - protein, 7 aa, synthetic construct
DAVQSIE

SEQ ID NO: 14268 - protein, 7 aa, synthetic construct
LFNGEIV

SEQ ID NO: 14269 - protein, 7 aa, synthetic construct
MLKYFPE

SEQ ID NO: 14270 - protein, 7 aa, synthetic construct
LDVFKGQ

SEQ ID NO: 14271 - protein, 7 aa, synthetic construct
SSDDRVV

SEQ ID NO: 14272 - protein, 7 aa, synthetic construct
TTVLHSE

SEQ ID NO: 14273 - protein, 7 aa, synthetic construct
QTPPGNM

SEQ ID NO: 14274 - protein, 7 aa, synthetic construct
SVGLVGI

SEQ ID NO: 14275 - protein, 7 aa, synthetic construct
DSFEHQI

SEQ ID NO: 14276 - protein, 7 aa, synthetic construct
EPKHHYH

SEQ ID NO: 14277 - protein, 7 aa, synthetic construct
ITYMQDS

SEQ ID NO: 14278 - protein, 7 aa, synthetic construct
RKNLAPE

SEQ ID NO: 14279 - protein, 7 aa, synthetic construct
RETWLES

SEQ ID NO: 14280 - protein, 7 aa, synthetic construct
TPLMHDK

SEQ ID NO: 14281 - protein, 7 aa, synthetic construct
IVVIQED

SEQ ID NO: 14282 - protein, 7 aa, synthetic construct
EEFGTPS

SEQ ID NO: 14283 - protein, 7 aa, synthetic construct
LNRLHDI

SEQ ID NO: 14284 - protein, 7 aa, synthetic construct
ETVHDID

SEQ ID NO: 14285 - protein, 7 aa, synthetic construct
RIVLVDG

SEQ ID NO: 14286 - protein, 7 aa, synthetic construct
WGDEAGM

SEQ ID NO: 14287 - protein, 7 aa, synthetic construct
EDNADYI

SEQ ID NO: 14288 - protein, 7 aa, synthetic construct
DQDLKVH

SEQ ID NO: 14289 - protein, 7 aa, synthetic construct
MDFSHAK

SEQ ID NO: 14290 - protein, 7 aa, synthetic construct
GDIGQAT

SEQ ID NO: 14291 - protein, 7 aa, synthetic construct
PEADTAT

SEQ ID NO: 14292 - protein, 7 aa, synthetic construct
LPSHYMD

SEQ ID NO: 14293 - protein, 7 aa, synthetic construct
PMALGHG

SEQ ID NO: 14294 - protein, 7 aa, synthetic construct
YVDDYKA

SEQ ID NO: 14295 - protein, 7 aa, synthetic construct
IGGNDDF

SEQ ID NO: 14296 - protein, 7 aa, synthetic construct
DPGGIAL

SEQ ID NO: 14297 - protein, 7 aa, synthetic construct
PPVMPEP

SEQ ID NO: 14298 - protein, 7 aa, synthetic construct
AMSNFAK

SEQ ID NO: 14299 - protein, 7 aa, synthetic construct
HFDDPMF

SEQ ID NO: 14300 - protein, 7 aa, synthetic construct
EHKMNWS

SEQ ID NO: 14301 - protein, 7 aa, synthetic construct
QHVHEDL

SEQ ID NO: 14302 - protein, 7 aa, synthetic construct
IIAPTNF

SEQ ID NO: 14303 - protein, 7 aa, synthetic construct
EGYGEGN

SEQ ID NO: 14304 - protein, 7 aa, synthetic construct
VHSIDES

SEQ ID NO: 14305 - protein, 7 aa, synthetic construct
LYGVHEH

SEQ ID NO: 14306 - protein, 7 aa, synthetic construct
CVEEEMC

SEQ ID NO: 14307 - protein, 7 aa, synthetic construct
HAPDWHV

SEQ ID NO: 14308 - protein, 7 aa, synthetic construct
MAKPGNM

SEQ ID NO: 14309 - protein, 7 aa, synthetic construct
DFTKEDA

SEQ ID NO: 14310 - protein, 7 aa, synthetic construct
LGVENLK

SEQ ID NO: 14311 - protein, 7 aa, synthetic construct
LHYAADT

SEQ ID NO: 14312 - protein, 7 aa, synthetic construct
WDGDDQE

SEQ ID NO: 14313 - protein, 7 aa, synthetic construct
SAYDQMK

SEQ ID NO: 14314 - protein, 7 aa, synthetic construct
TGDTSGF

SEQ ID NO: 14315 - protein, 7 aa, synthetic construct
WHSVAIA

SEQ ID NO: 14316 - protein, 7 aa, synthetic construct
EAVNPVV

SEQ ID NO: 14317 - protein, 7 aa, synthetic construct
PVDPNKE

SEQ ID NO: 14318 - protein, 7 aa, synthetic construct
HDNIPAP

SEQ ID NO: 14319 - protein, 7 aa, synthetic construct
TQESGWA

SEQ ID NO: 14320 - protein, 7 aa, synthetic construct
SDGVEHQ

SEQ ID NO: 14321 - protein, 7 aa, synthetic construct
VQEKDLP

SEQ ID NO: 14322 - protein, 7 aa, synthetic construct
NPLRTTH

SEQ ID NO: 14323 - protein, 7 aa, synthetic construct
SKQAGFE

SEQ ID NO: 14324 - protein, 7 aa, synthetic construct
RGMEQSW

SEQ ID NO: 14325 - protein, 7 aa, synthetic construct
PIDRLAF

SEQ ID NO: 14326 - protein, 7 aa, synthetic construct
KMVNSLI

SEQ ID NO: 14327 - protein, 7 aa, synthetic construct
SMMNQGH

SEQ ID NO: 14328 - protein, 7 aa, synthetic construct
KSSPQKN

SEQ ID NO: 14329 - protein, 7 aa, synthetic construct
ELERSPI

SEQ ID NO: 14330 - protein, 7 aa, synthetic construct
QGRGKAE

SEQ ID NO: 14331 - protein, 7 aa, synthetic construct
MRIDEPL

SEQ ID NO: 14332 - protein, 7 aa, synthetic construct
AHDDPTS

SEQ ID NO: 14333 - protein, 7 aa, synthetic construct
LVASNLT

SEQ ID NO: 14334 - protein, 7 aa, synthetic construct
KDDANWK

SEQ ID NO: 14335 - protein, 7 aa, synthetic construct
KDHLRGQ

SEQ ID NO: 14336 - protein, 7 aa, synthetic construct
VPPEHTE

SEQ ID NO: 14337 - protein, 7 aa, synthetic construct
MITQEHK

SEQ ID NO: 14338 - protein, 7 aa, synthetic construct
QKNPHDN

SEQ ID NO: 14339 - protein, 7 aa, synthetic construct
DDAKLHL

SEQ ID NO: 14340 - protein, 7 aa, synthetic construct
GFIPQVP

SEQ ID NO: 14341 - protein, 7 aa, synthetic construct
GTQEMHF

SEQ ID NO: 14342 - protein, 7 aa, synthetic construct
RDESVED

SEQ ID NO: 14343 - protein, 7 aa, synthetic construct
AIHADSL

SEQ ID NO: 14344 - protein, 7 aa, synthetic construct
KPAKHYD

SEQ ID NO: 14345 - protein, 7 aa, synthetic construct
AGPQVVS

SEQ ID NO: 14346 - protein, 7 aa, synthetic construct
QNTDNQG

SEQ ID NO: 14347 - protein, 7 aa, synthetic construct
PLNDQPS

SEQ ID NO: 14348 - protein, 7 aa, synthetic construct
MALVGIE

SEQ ID NO: 14349 - protein, 7 aa, synthetic construct
VELTAGL

SEQ ID NO: 14350 - protein, 7 aa, synthetic construct
WTDDGLN

SEQ ID NO: 14351 - protein, 7 aa, synthetic construct
LYANTAA

SEQ ID NO: 14352 - protein, 7 aa, synthetic construct
IQYEASI

SEQ ID NO: 14353 - protein, 7 aa, synthetic construct
QDVQMYS

SEQ ID NO: 14354 - protein, 7 aa, synthetic construct
PPGMMGE

SEQ ID NO: 14355 - protein, 7 aa, synthetic construct
KAADQVY

SEQ ID NO: 14356 - protein, 7 aa, synthetic construct
TTFTQTL

SEQ ID NO: 14357 - protein, 7 aa, synthetic construct
NYTPDHM

SEQ ID NO: 14358 - protein, 7 aa, synthetic construct
FSAIMQS

SEQ ID NO: 14359 - protein, 7 aa, synthetic construct
TFDESSS

SEQ ID NO: 14360 - protein, 7 aa, synthetic construct
PQSVEWE

SEQ ID NO: 14361 - protein, 7 aa, synthetic construct
ITNDGLI

SEQ ID NO: 14362 - protein, 7 aa, synthetic construct
DEGFPHG

SEQ ID NO: 14363 - protein, 7 aa, synthetic construct
VQFTNEN

SEQ ID NO: 14364 - protein, 7 aa, synthetic construct
QNESYEW

SEQ ID NO: 14365 - protein, 7 aa, synthetic construct
YHHPASQ

SEQ ID NO: 14366 - protein, 7 aa, synthetic construct
YQDLELQ

SEQ ID NO: 14367 - protein, 7 aa, synthetic construct
PQPFSEK

SEQ ID NO: 14368 - protein, 7 aa, synthetic construct
ILGGLQL

SEQ ID NO: 14369 - protein, 7 aa, synthetic construct
PDHVRHD

SEQ ID NO: 14370 - protein, 7 aa, synthetic construct
KGAIMNH

SEQ ID NO: 14371 - protein, 7 aa, synthetic construct
PFRDIDE

SEQ ID NO: 14372 - protein, 7 aa, synthetic construct
HDQPENR

SEQ ID NO: 14373 - protein, 7 aa, synthetic construct
LDTYAEP

SEQ ID NO: 14374 - protein, 7 aa, synthetic construct
FESILNG

SEQ ID NO: 14375 - protein, 7 aa, synthetic construct
WQGIQMG

SEQ ID NO: 14376 - protein, 7 aa, synthetic construct
HTSIHGK

SEQ ID NO: 14377 - protein, 7 aa, synthetic construct
TDHPKPH

SEQ ID NO: 14378 - protein, 7 aa, synthetic construct
AGIDGWK

SEQ ID NO: 14379 - protein, 7 aa, synthetic construct
HMSQELG

SEQ ID NO: 14380 - protein, 7 aa, synthetic construct
SRPGNPT

SEQ ID NO: 14381 - protein, 7 aa, synthetic construct
EDNTGHL

SEQ ID NO: 14382 - protein, 7 aa, synthetic construct
MWNDEHA

SEQ ID NO: 14383 - protein, 7 aa, synthetic construct
DAISQQM

SEQ ID NO: 14384 - protein, 7 aa, synthetic construct
RAGEHHL

SEQ ID NO: 14385 - protein, 7 aa, synthetic construct
NLDIQSD

SEQ ID NO: 14386 - protein, 7 aa, synthetic construct
QREIEPT

SEQ ID NO: 14387 - protein, 7 aa, synthetic construct
MNEDNHR

SEQ ID NO: 14388 - protein, 7 aa, synthetic construct
WTPQQEI

SEQ ID NO: 14389 - protein, 7 aa, synthetic construct
PGDAYAM

SEQ ID NO: 14390 - protein, 7 aa, synthetic construct
IIHSIKA

SEQ ID NO: 14391 - protein, 7 aa, synthetic construct
FYEGINN

SEQ ID NO: 14392 - protein, 7 aa, synthetic construct
MFKDYRP

SEQ ID NO: 14393 - protein, 7 aa, synthetic construct
VHYDGNK

SEQ ID NO: 14394 - protein, 7 aa, synthetic construct
THQLNTI

SEQ ID NO: 14395 - protein, 7 aa, synthetic construct
EHEHVGV

SEQ ID NO: 14396 - protein, 7 aa, synthetic construct
QESMGFE

SEQ ID NO: 14397 - protein, 7 aa, synthetic construct
NHERFVD

SEQ ID NO: 14398 - protein, 7 aa, synthetic construct
LGRNNMV

SEQ ID NO: 14399 - protein, 7 aa, synthetic construct
PSINDES

SEQ ID NO: 14400 - protein, 7 aa, synthetic construct
WVQDGTF

SEQ ID NO: 14401 - protein, 7 aa, synthetic construct
DEGNVQN

SEQ ID NO: 14402 - protein, 7 aa, synthetic construct
YHHEVKH

SEQ ID NO: 14403 - protein, 7 aa, synthetic construct
LHADSPV

SEQ ID NO: 14404 - protein, 7 aa, synthetic construct
APDGDMD

SEQ ID NO: 14405 - protein, 7 aa, synthetic construct
RPHVVVS

SEQ ID NO: 14406 - protein, 7 aa, synthetic construct
RFKIISE

SEQ ID NO: 14407 - protein, 7 aa, synthetic construct
AEYKVEE

SEQ ID NO: 14408 - protein, 7 aa, synthetic construct
PPSPHKW

SEQ ID NO: 14409 - protein, 7 aa, synthetic construct
HSYPVDR

SEQ ID NO: 14410 - protein, 7 aa, synthetic construct
SNEEHTI

SEQ ID NO: 14411 - protein, 7 aa, synthetic construct
VYQHNVT

SEQ ID NO: 14412 - protein, 7 aa, synthetic construct
EDRDIAI

SEQ ID NO: 14413 - protein, 7 aa, synthetic construct
HGDSTIP

SEQ ID NO: 14414 - protein, 7 aa, synthetic construct
MAQTFFE

SEQ ID NO: 14415 - protein, 7 aa, synthetic construct
ENNRHGF

SEQ ID NO: 14416 - protein, 7 aa, synthetic construct
AVIPNTV

SEQ ID NO: 14417 - protein, 7 aa, synthetic construct
EDHRHNQ

SEQ ID NO: 14418 - protein, 7 aa, synthetic construct
YKQLPAF

SEQ ID NO: 14419 - protein, 7 aa, synthetic construct
EFTPSTS

SEQ ID NO: 14420 - protein, 7 aa, synthetic construct
PIPTMNT

SEQ ID NO: 14421 - protein, 7 aa, synthetic construct
TDNHHKE

SEQ ID NO: 14422 - protein, 7 aa, synthetic construct
WVKMQND

SEQ ID NO: 14423 - protein, 7 aa, synthetic construct
HTPTSYT

SEQ ID NO: 14424 - protein, 7 aa, synthetic construct
WKDAVVE

SEQ ID NO: 14425 - protein, 7 aa, synthetic construct
VVMESMR

SEQ ID NO: 14426 - protein, 7 aa, synthetic construct
HLESGRK

SEQ ID NO: 14427 - protein, 7 aa, synthetic construct
EADSDMM

SEQ ID NO: 14428 - protein, 7 aa, synthetic construct
STHGLYD

SEQ ID NO: 14429 - protein, 7 aa, synthetic construct
AVKYNEW

SEQ ID NO: 14430 - protein, 7 aa, synthetic construct
YIYANHA

SEQ ID NO: 14431 - protein, 7 aa, synthetic construct
IMEDSQK

SEQ ID NO: 14432 - protein, 7 aa, synthetic construct
WSEKLPF

SEQ ID NO: 14433 - protein, 7 aa, synthetic construct
IWDDQEI

SEQ ID NO: 14434 - protein, 7 aa, synthetic construct
YRAEPVT

SEQ ID NO: 14435 - protein, 7 aa, synthetic construct
LDDIEWE

SEQ ID NO: 14436 - protein, 7 aa, synthetic construct
ILADDHG

SEQ ID NO: 14437 - protein, 7 aa, synthetic construct
YLELVNP

SEQ ID NO: 14438 - protein, 7 aa, synthetic construct
IYVGKHN

SEQ ID NO: 14439 - protein, 7 aa, synthetic construct
TMDHWPM

SEQ ID NO: 14440 - protein, 7 aa, synthetic construct
QFKMQPL

SEQ ID NO: 14441 - protein, 7 aa, synthetic construct
IDVDGMW

SEQ ID NO: 14442 - protein, 7 aa, synthetic construct
DQTYAYS

SEQ ID NO: 14443 - protein, 7 aa, synthetic construct
GETANGM

SEQ ID NO: 14444 - protein, 7 aa, synthetic construct
NLITVKP

SEQ ID NO: 14445 - protein, 7 aa, synthetic construct
VAGIFKE

SEQ ID NO: 14446 - protein, 7 aa, synthetic construct
QGDALTK

SEQ ID NO: 14447 - protein, 7 aa, synthetic construct
LLSDHDD

SEQ ID NO: 14448 - protein, 7 aa, synthetic construct
FELQFPK

SEQ ID NO: 14449 - protein, 7 aa, synthetic construct
WEDSLSP

SEQ ID NO: 14450 - protein, 7 aa, synthetic construct
WQAPGAE

SEQ ID NO: 14451 - protein, 7 aa, synthetic construct
WGTQLDE

SEQ ID NO: 14452 - protein, 7 aa, synthetic construct
IDQVTTE

SEQ ID NO: 14453 - protein, 7 aa, synthetic construct
DWEPTVV

SEQ ID NO: 14454 - protein, 7 aa, synthetic construct
GDGEMDK

SEQ ID NO: 14455 - protein, 7 aa, synthetic construct
IEKQEDA

SEQ ID NO: 14456 - protein, 7 aa, synthetic construct
MSLDASG

SEQ ID NO: 14457 - protein, 7 aa, synthetic construct
NDYSQSI

SEQ ID NO: 14458 - protein, 7 aa, synthetic construct
HHHEGEQ

SEQ ID NO: 14459 - protein, 7 aa, synthetic construct
AWDDKIE

SEQ ID NO: 14460 - protein, 7 aa, synthetic construct
ITDTQIV

SEQ ID NO: 14461 - protein, 7 aa, synthetic construct
FASIRYD

SEQ ID NO: 14462 - protein, 7 aa, synthetic construct
ETKIMMT

SEQ ID NO: 14463 - protein, 7 aa, synthetic construct
SQEESKE

SEQ ID NO: 14464 - protein, 7 aa, synthetic construct
DWNGEGE

SEQ ID NO: 14465 - protein, 7 aa, synthetic construct
ILTNTNI

SEQ ID NO: 14466 - protein, 7 aa, synthetic construct
THSEPMA

SEQ ID NO: 14467 - protein, 7 aa, synthetic construct
KGIGLEA

SEQ ID NO: 14468 - protein, 7 aa, synthetic construct
DLEKKIR

SEQ ID NO: 14469 - protein, 7 aa, synthetic construct
HGDEIHI

SEQ ID NO: 14470 - protein, 7 aa, synthetic construct
IQQIEER

SEQ ID NO: 14471 - protein, 7 aa, synthetic construct
MWETHMD

SEQ ID NO: 14472 - protein, 7 aa, synthetic construct
HTDTGDF

SEQ ID NO: 14473 - protein, 7 aa, synthetic construct
SPLMRMS

SEQ ID NO: 14474 - protein, 7 aa, synthetic construct
PENSGHN

SEQ ID NO: 14475 - protein, 7 aa, synthetic construct
MGFSIES

SEQ ID NO: 14476 - protein, 7 aa, synthetic construct
VEQHYVE

SEQ ID NO: 14477 - protein, 7 aa, synthetic construct
DTPQDQS

SEQ ID NO: 14478 - protein, 7 aa, synthetic construct
YKAMVNH

SEQ ID NO: 14479 - protein, 7 aa, synthetic construct
KADEWIF

SEQ ID NO: 14480 - protein, 7 aa, synthetic construct
YPMQVGT

SEQ ID NO: 14481 - protein, 7 aa, synthetic construct
FADSYTD

SEQ ID NO: 14482 - protein, 7 aa, synthetic construct
VGFPSAI

SEQ ID NO: 14483 - protein, 7 aa, synthetic construct
PTNILQS

SEQ ID NO: 14484 - protein, 7 aa, synthetic construct
NHVNKVL

SEQ ID NO: 14485 - protein, 7 aa, synthetic construct
QDIKWDD

SEQ ID NO: 14486 - protein, 7 aa, synthetic construct
QDNAWHA

SEQ ID NO: 14487 - protein, 7 aa, synthetic construct
SIAYKDI

SEQ ID NO: 14488 - protein, 7 aa, synthetic construct
VQAQYMD

SEQ ID NO: 14489 - protein, 7 aa, synthetic construct
RQVQIVS

SEQ ID NO: 14490 - protein, 7 aa, synthetic construct
WPQPDSN

SEQ ID NO: 14491 - protein, 7 aa, synthetic construct
PDYAPSE

SEQ ID NO: 14492 - protein, 7 aa, synthetic construct
LHVEMGI

SEQ ID NO: 14493 - protein, 7 aa, synthetic construct
QELFAAD

SEQ ID NO: 14494 - protein, 7 aa, synthetic construct
QNLSKFG

SEQ ID NO: 14495 - protein, 7 aa, synthetic construct
GTSPKQI

SEQ ID NO: 14496 - protein, 7 aa, synthetic construct
WQKSEER

SEQ ID NO: 14497 - protein, 7 aa, synthetic construct
WQGSTFV

SEQ ID NO: 14498 - protein, 7 aa, synthetic construct
PQVDNSL

SEQ ID NO: 14499 - protein, 7 aa, synthetic construct
EVQMPNG

SEQ ID NO: 14500 - protein, 7 aa, synthetic construct
NDLEEPK

SEQ ID NO: 14501 - protein, 7 aa, synthetic construct
IVGGGGF

SEQ ID NO: 14502 - protein, 7 aa, synthetic construct
FFRYEED

SEQ ID NO: 14503 - protein, 7 aa, synthetic construct
DTYRELT

SEQ ID NO: 14504 - protein, 7 aa, synthetic construct
IESPIQE

SEQ ID NO: 14505 - protein, 7 aa, synthetic construct
RIHQERS

SEQ ID NO: 14506 - protein, 7 aa, synthetic construct
NSEETIQ

SEQ ID NO: 14507 - protein, 7 aa, synthetic construct
FMTNAKL

SEQ ID NO: 14508 - protein, 7 aa, synthetic construct
MANGAGS

SEQ ID NO: 14509 - protein, 7 aa, synthetic construct
KEERDTR

SEQ ID NO: 14510 - protein, 7 aa, synthetic construct
KDQEMHR

SEQ ID NO: 14511 - protein, 7 aa, synthetic construct
WMPNGYE

SEQ ID NO: 14512 - protein, 7 aa, synthetic construct
LYETPEN

SEQ ID NO: 14513 - protein, 7 aa, synthetic construct
WQIGAET

SEQ ID NO: 14514 - protein, 7 aa, synthetic construct
YLSPPLA

SEQ ID NO: 14515 - protein, 7 aa, synthetic construct
KIHMMIE

SEQ ID NO: 14516 - protein, 7 aa, synthetic construct
DVENYQK

SEQ ID NO: 14517 - protein, 7 aa, synthetic construct
NTLPEVK

SEQ ID NO: 14518 - protein, 7 aa, synthetic construct
RTGEYPT

SEQ ID NO: 14519 - protein, 7 aa, synthetic construct
LHEPHFQ

SEQ ID NO: 14520 - protein, 7 aa, synthetic construct
ADAQESY

SEQ ID NO: 14521 - protein, 7 aa, synthetic construct
QQVTPEL

SEQ ID NO: 14522 - protein, 7 aa, synthetic construct
VHLDEQT

SEQ ID NO: 14523 - protein, 7 aa, synthetic construct
NLPSVHD

SEQ ID NO: 14524 - protein, 7 aa, synthetic construct
HDGLAEQ

SEQ ID NO: 14525 - protein, 7 aa, synthetic construct
DFQLSVD

SEQ ID NO: 14526 - protein, 7 aa, synthetic construct
THNMPLG

SEQ ID NO: 14527 - protein, 7 aa, synthetic construct
GENQTNE

SEQ ID NO: 14528 - protein, 7 aa, synthetic construct
QDEVPRW

SEQ ID NO: 14529 - protein, 7 aa, synthetic construct
YHATQTL

SEQ ID NO: 14530 - protein, 7 aa, synthetic construct
KNQDSNH

SEQ ID NO: 14531 - protein, 7 aa, synthetic construct
SIWANED

SEQ ID NO: 14532 - protein, 7 aa, synthetic construct
NAHSSWE

SEQ ID NO: 14533 - protein, 7 aa, synthetic construct
IFRPATQ

SEQ ID NO: 14534 - protein, 7 aa, synthetic construct
DVGTAQL

SEQ ID NO: 14535 - protein, 7 aa, synthetic construct
VRLIMTE

SEQ ID NO: 14536 - protein, 7 aa, synthetic construct
GVMAHMS

SEQ ID NO: 14537 - protein, 7 aa, synthetic construct
LDVANIP

SEQ ID NO: 14538 - protein, 7 aa, synthetic construct
TGEFPNH

SEQ ID NO: 14539 - protein, 7 aa, synthetic construct
ATHDYAA

SEQ ID NO: 14540 - protein, 7 aa, synthetic construct
LESDRYQ

SEQ ID NO: 14541 - protein, 7 aa, synthetic construct
LQQTNYQ

SEQ ID NO: 14542 - protein, 7 aa, synthetic construct
AHSMEQE

SEQ ID NO: 14543 - protein, 7 aa, synthetic construct
PEGEEFK

SEQ ID NO: 14544 - protein, 7 aa, synthetic construct
DYISTNV

SEQ ID NO: 14545 - protein, 7 aa, synthetic construct
GSPHADD

SEQ ID NO: 14546 - protein, 7 aa, synthetic construct
NPGQETA

SEQ ID NO: 14547 - protein, 7 aa, synthetic construct
APFLQTP

SEQ ID NO: 14548 - protein, 7 aa, synthetic construct
PSIPTEY

SEQ ID NO: 14549 - protein, 7 aa, synthetic construct
QMTLTSR

SEQ ID NO: 14550 - protein, 7 aa, synthetic construct
VMNHELK

SEQ ID NO: 14551 - protein, 7 aa, synthetic construct
NTAMSMP

SEQ ID NO: 14552 - protein, 7 aa, synthetic construct
QVLTIRD

SEQ ID NO: 14553 - protein, 7 aa, synthetic construct
PVEVQMV

SEQ ID NO: 14554 - protein, 7 aa, synthetic construct
TEVSSSK

SEQ ID NO: 14555 - protein, 7 aa, synthetic construct
AGNKQSH

SEQ ID NO: 14556 - protein, 7 aa, synthetic construct
RQYTGYE

SEQ ID NO: 14557 - protein, 7 aa, synthetic construct
KIDIMDH

SEQ ID NO: 14558 - protein, 7 aa, synthetic construct
DDVTFGS

SEQ ID NO: 14559 - protein, 7 aa, synthetic construct
SEGISQS

SEQ ID NO: 14560 - protein, 7 aa, synthetic construct
MDEPFFG

SEQ ID NO: 14561 - protein, 7 aa, synthetic construct
YQHMETV

SEQ ID NO: 14562 - protein, 7 aa, synthetic construct
HEVTGTF

SEQ ID NO: 14563 - protein, 7 aa, synthetic construct
DDDREYF

SEQ ID NO: 14564 - protein, 7 aa, synthetic construct
LVGKLVL

SEQ ID NO: 14565 - protein, 7 aa, synthetic construct
AEPRAKI

SEQ ID NO: 14566 - protein, 7 aa, synthetic construct
KLMGSAH

SEQ ID NO: 14567 - protein, 7 aa, synthetic construct
YEGVSNP

SEQ ID NO: 14568 - protein, 7 aa, synthetic construct
WGKDNFL

SEQ ID NO: 14569 - protein, 7 aa, synthetic construct
SPQDEQS

SEQ ID NO: 14570 - protein, 7 aa, synthetic construct
FDDHNHE

SEQ ID NO: 14571 - protein, 7 aa, synthetic construct
WILTAGD

SEQ ID NO: 14572 - protein, 7 aa, synthetic construct
LMKGEMW

SEQ ID NO: 14573 - protein, 7 aa, synthetic construct
QEAVGPK

SEQ ID NO: 14574 - protein, 7 aa, synthetic construct
ALRQSEQ

SEQ ID NO: 14575 - protein, 7 aa, synthetic construct
MGGYGII

SEQ ID NO: 14576 - protein, 7 aa, synthetic construct
QQTQHHQ

SEQ ID NO: 14577 - protein, 7 aa, synthetic construct
PNPSPND

SEQ ID NO: 14578 - protein, 7 aa, synthetic construct
HYEKADW

SEQ ID NO: 14579 - protein, 7 aa, synthetic construct
AGQELEG

SEQ ID NO: 14580 - protein, 7 aa, synthetic construct
DYLHLEK

SEQ ID NO: 14581 - protein, 7 aa, synthetic construct
YPFVGSA

SEQ ID NO: 14582 - protein, 7 aa, synthetic construct
AHLPGLK

SEQ ID NO: 14583 - protein, 7 aa, synthetic construct
GYIGDDI

SEQ ID NO: 14584 - protein, 7 aa, synthetic construct
FISNEMI

SEQ ID NO: 14585 - protein, 7 aa, synthetic construct
QHQVSIH

SEQ ID NO: 14586 - protein, 7 aa, synthetic construct
LEWTAEN

SEQ ID NO: 14587 - protein, 7 aa, synthetic construct
DFPAPHN

SEQ ID NO: 14588 - protein, 7 aa, synthetic construct
MYEHPMA

SEQ ID NO: 14589 - protein, 7 aa, synthetic construct
SADVINN

SEQ ID NO: 14590 - protein, 7 aa, synthetic construct
TGVHYPL

SEQ ID NO: 14591 - protein, 7 aa, synthetic construct
KLTQLQA

SEQ ID NO: 14592 - protein, 7 aa, synthetic construct
DNNKYNT

SEQ ID NO: 14593 - protein, 7 aa, synthetic construct
HHHFEGD

SEQ ID NO: 14594 - protein, 7 aa, synthetic construct
CQDMICG

SEQ ID NO: 14595 - protein, 7 aa, synthetic construct
FPGITQG

SEQ ID NO: 14596 - protein, 7 aa, synthetic construct
GMEPGHK

SEQ ID NO: 14597 - protein, 7 aa, synthetic construct
WNGEPTM

SEQ ID NO: 14598 - protein, 7 aa, synthetic construct
KLGVSWD

SEQ ID NO: 14599 - protein, 7 aa, synthetic construct
QLDSSSA

SEQ ID NO: 14600 - protein, 7 aa, synthetic construct
FHQTPAY

SEQ ID NO: 14601 - protein, 7 aa, synthetic construct
LDPTVAI

SEQ ID NO: 14602 - protein, 7 aa, synthetic construct
FEGKNDP

SEQ ID NO: 14603 - protein, 7 aa, synthetic construct
FIKHNNI

SEQ ID NO: 14604 - protein, 7 aa, synthetic construct
VSDYSQE

SEQ ID NO: 14605 - protein, 7 aa, synthetic construct
NSFQEHR

SEQ ID NO: 14606 - protein, 7 aa, synthetic construct
RFIEPIE

SEQ ID NO: 14607 - protein, 7 aa, synthetic construct
FEQAYKF

SEQ ID NO: 14608 - protein, 7 aa, synthetic construct
KGMLQGM

SEQ ID NO: 14609 - protein, 7 aa, synthetic construct
AANFTLD

SEQ ID NO: 14610 - protein, 7 aa, synthetic construct
FSNSKLM

SEQ ID NO: 14611 - protein, 7 aa, synthetic construct
FIDAREH

SEQ ID NO: 14612 - protein, 7 aa, synthetic construct
ITAAEKW

SEQ ID NO: 14613 - protein, 7 aa, synthetic construct
DLVNDGP

SEQ ID NO: 14614 - protein, 7 aa, synthetic construct
HPNNDET

SEQ ID NO: 14615 - protein, 7 aa, synthetic construct
ENVQKFI

SEQ ID NO: 14616 - protein, 7 aa, synthetic construct
SMNENQT

SEQ ID NO: 14617 - protein, 7 aa, synthetic construct
EQYDIIE

SEQ ID NO: 14618 - protein, 7 aa, synthetic construct
VKMSSPF

SEQ ID NO: 14619 - protein, 7 aa, synthetic construct
HAIRASN

SEQ ID NO: 14620 - protein, 7 aa, synthetic construct
LPLDQHD

SEQ ID NO: 14621 - protein, 7 aa, synthetic construct
IKAPTTW

SEQ ID NO: 14622 - protein, 7 aa, synthetic construct
MSDDMYA

SEQ ID NO: 14623 - protein, 7 aa, synthetic construct
LSQTEWI

SEQ ID NO: 14624 - protein, 7 aa, synthetic construct
QAQIVYP

SEQ ID NO: 14625 - protein, 7 aa, synthetic construct
GTNLRAF

SEQ ID NO: 14626 - protein, 7 aa, synthetic construct
PEHDSQG

SEQ ID NO: 14627 - protein, 7 aa, synthetic construct
ENADSHT

SEQ ID NO: 14628 - protein, 7 aa, synthetic construct
EDAQIHP

SEQ ID NO: 14629 - protein, 7 aa, synthetic construct
VHGASVQ

SEQ ID NO: 14630 - protein, 7 aa, synthetic construct
RFEPQMA

SEQ ID NO: 14631 - protein, 7 aa, synthetic construct
LDEHLHK

SEQ ID NO: 14632 - protein, 7 aa, synthetic construct
IPMNQQH

SEQ ID NO: 14633 - protein, 7 aa, synthetic construct
NTNEVEG

SEQ ID NO: 14634 - protein, 7 aa, synthetic construct
THRVHAE

SEQ ID NO: 14635 - protein, 7 aa, synthetic construct
RVEPVDR

SEQ ID NO: 14636 - protein, 7 aa, synthetic construct
KEHEDFY

SEQ ID NO: 14637 - protein, 7 aa, synthetic construct
GPDNAQM

SEQ ID NO: 14638 - protein, 7 aa, synthetic construct
EPQQMAM

SEQ ID NO: 14639 - protein, 7 aa, synthetic construct
YLQPLDK

SEQ ID NO: 14640 - protein, 7 aa, synthetic construct
DMADSFS

SEQ ID NO: 14641 - protein, 7 aa, synthetic construct
PVFQNTM

SEQ ID NO: 14642 - protein, 7 aa, synthetic construct
PENERTI

SEQ ID NO: 14643 - protein, 7 aa, synthetic construct
KTVEQLY

SEQ ID NO: 14644 - protein, 7 aa, synthetic construct
VVYGPKQ

SEQ ID NO: 14645 - protein, 7 aa, synthetic construct
DKDHMVA

SEQ ID NO: 14646 - protein, 7 aa, synthetic construct
VESTTWM

SEQ ID NO: 14647 - protein, 7 aa, synthetic construct
DEPKWKE

SEQ ID NO: 14648 - protein, 7 aa, synthetic construct
FETKLMK

SEQ ID NO: 14649 - protein, 7 aa, synthetic construct
IYKENDG

SEQ ID NO: 14650 - protein, 7 aa, synthetic construct
KFGNTPT

SEQ ID NO: 14651 - protein, 7 aa, synthetic construct
IARNINQ

SEQ ID NO: 14652 - protein, 7 aa, synthetic construct
ISIEDPG

SEQ ID NO: 14653 - protein, 7 aa, synthetic construct
QGTMELA

SEQ ID NO: 14654 - protein, 7 aa, synthetic construct
EMHSPDA

SEQ ID NO: 14655 - protein, 7 aa, synthetic construct
IGDWVVQ

SEQ ID NO: 14656 - protein, 7 aa, synthetic construct
TEMNWED

SEQ ID NO: 14657 - protein, 7 aa, synthetic construct
INPGLNS

SEQ ID NO: 14658 - protein, 7 aa, synthetic construct
YTAMDEV

SEQ ID NO: 14659 - protein, 7 aa, synthetic construct
EDNFSFE

SEQ ID NO: 14660 - protein, 7 aa, synthetic construct
HSQNLAR

SEQ ID NO: 14661 - protein, 7 aa, synthetic construct
TQDYSNL

SEQ ID NO: 14662 - protein, 7 aa, synthetic construct
IGLNPQD

SEQ ID NO: 14663 - protein, 7 aa, synthetic construct
GNDQDIV

SEQ ID NO: 14664 - protein, 7 aa, synthetic construct
NKHIPSH

SEQ ID NO: 14665 - protein, 7 aa, synthetic construct
NLAIHKS

SEQ ID NO: 14666 - protein, 7 aa, synthetic construct
LRFPTKE

SEQ ID NO: 14667 - protein, 7 aa, synthetic construct
TFEAMKH

SEQ ID NO: 14668 - protein, 7 aa, synthetic construct
DHHQPAT

SEQ ID NO: 14669 - protein, 7 aa, synthetic construct
NGVPSAN

SEQ ID NO: 14670 - protein, 7 aa, synthetic construct
IMMEEGP

SEQ ID NO: 14671 - protein, 7 aa, synthetic construct
GHSNNNA

SEQ ID NO: 14672 - protein, 7 aa, synthetic construct
QDFQDGY

SEQ ID NO: 14673 - protein, 7 aa, synthetic construct
EPLMVES

SEQ ID NO: 14674 - protein, 7 aa, synthetic construct
PVTSIEG

SEQ ID NO: 14675 - protein, 7 aa, synthetic construct
TLSDLQR

SEQ ID NO: 14676 - protein, 7 aa, synthetic construct
LMGLALG

SEQ ID NO: 14677 - protein, 7 aa, synthetic construct
NMSDRTF

SEQ ID NO: 14678 - protein, 7 aa, synthetic construct
LMQPGAE

SEQ ID NO: 14679 - protein, 7 aa, synthetic construct
ELTLTSA

SEQ ID NO: 14680 - protein, 7 aa, synthetic construct
HDWEGAT

SEQ ID NO: 14681 - protein, 7 aa, synthetic construct
RHEISLN

SEQ ID NO: 14682 - protein, 7 aa, synthetic construct
LTRETLM

SEQ ID NO: 14683 - protein, 7 aa, synthetic construct
YGPQSIE

SEQ ID NO: 14684 - protein, 7 aa, synthetic construct
QYEGIFA

SEQ ID NO: 14685 - protein, 7 aa, synthetic construct
VEDIGDR

SEQ ID NO: 14686 - protein, 7 aa, synthetic construct
YQEDEQV

SEQ ID NO: 14687 - protein, 7 aa, synthetic construct
SHDFTLG

SEQ ID NO: 14688 - protein, 7 aa, synthetic construct
HSHADNW

SEQ ID NO: 14689 - protein, 7 aa, synthetic construct
NHGIIGT

SEQ ID NO: 14690 - protein, 7 aa, synthetic construct
SGAFIEQ

SEQ ID NO: 14691 - protein, 7 aa, synthetic construct
NETDQYG

SEQ ID NO: 14692 - protein, 7 aa, synthetic construct
TPPPHSP

SEQ ID NO: 14693 - protein, 7 aa, synthetic construct
FQSSFEH

SEQ ID NO: 14694 - protein, 7 aa, synthetic construct
QQNHIPR

SEQ ID NO: 14695 - protein, 7 aa, synthetic construct
QWEMEIP

SEQ ID NO: 14696 - protein, 7 aa, synthetic construct
SIAESFS

SEQ ID NO: 14697 - protein, 7 aa, synthetic construct
YSATVFN

SEQ ID NO: 14698 - protein, 7 aa, synthetic construct
SPKQYNH

SEQ ID NO: 14699 - protein, 7 aa, synthetic construct
YIEQHHN

SEQ ID NO: 14700 - protein, 7 aa, synthetic construct
KASPLFG

SEQ ID NO: 14701 - protein, 7 aa, synthetic construct
AYDTIHH

SEQ ID NO: 14702 - protein, 7 aa, synthetic construct
RDDSYPD

SEQ ID NO: 14703 - protein, 7 aa, synthetic construct
IWNPGND

SEQ ID NO: 14704 - protein, 7 aa, synthetic construct
LQAAFRE

SEQ ID NO: 14705 - protein, 7 aa, synthetic construct
LDTASSF

SEQ ID NO: 14706 - protein, 7 aa, synthetic construct
HTSFMGP

SEQ ID NO: 14707 - protein, 7 aa, synthetic construct
IIQNVVK

SEQ ID NO: 14708 - protein, 7 aa, synthetic construct
EGGGDVL

SEQ ID NO: 14709 - protein, 7 aa, synthetic construct
TTLQMSV

SEQ ID NO: 14710 - protein, 7 aa, synthetic construct
EESMTIH

SEQ ID NO: 14711 - protein, 7 aa, synthetic construct
LSSYEPY

SEQ ID NO: 14712 - protein, 7 aa, synthetic construct
MESDATA

SEQ ID NO: 14713 - protein, 7 aa, synthetic construct
KDVNHSQ

SEQ ID NO: 14714 - protein, 7 aa, synthetic construct
HSGHKPF

SEQ ID NO: 14715 - protein, 7 aa, synthetic construct
GWEHESV

SEQ ID NO: 14716 - protein, 7 aa, synthetic construct
MAESEQV

SEQ ID NO: 14717 - protein, 7 aa, synthetic construct
LDPNPAH

SEQ ID NO: 14718 - protein, 7 aa, synthetic construct
AQGNEAF

SEQ ID NO: 14719 - protein, 7 aa, synthetic construct
EHDNQAL

SEQ ID NO: 14720 - protein, 7 aa, synthetic construct
GIIGLTH

SEQ ID NO: 14721 - protein, 7 aa, synthetic construct
DMRNWKD

SEQ ID NO: 14722 - protein, 7 aa, synthetic construct
WQELGQE

SEQ ID NO: 14723 - protein, 7 aa, synthetic construct
VIMNRDH

SEQ ID NO: 14724 - protein, 7 aa, synthetic construct
LQVGQNF

SEQ ID NO: 14725 - protein, 7 aa, synthetic construct
SEHDYVD

SEQ ID NO: 14726 - protein, 7 aa, synthetic construct
IPHEATK

SEQ ID NO: 14727 - protein, 7 aa, synthetic construct
ADGVVMM

SEQ ID NO: 14728 - protein, 7 aa, synthetic construct
NFAEMQT

SEQ ID NO: 14729 - protein, 7 aa, synthetic construct
LIYGIGA

SEQ ID NO: 14730 - protein, 7 aa, synthetic construct
KFYPQEI

SEQ ID NO: 14731 - protein, 7 aa, synthetic construct
TAESWPR

SEQ ID NO: 14732 - protein, 7 aa, synthetic construct
VYPEEHN

SEQ ID NO: 14733 - protein, 7 aa, synthetic construct
DPDVPLS

SEQ ID NO: 14734 - protein, 7 aa, synthetic construct
NYRNPPP

SEQ ID NO: 14735 - protein, 7 aa, synthetic construct
TIDSTWE

SEQ ID NO: 14736 - protein, 7 aa, synthetic construct
YHESPNF

SEQ ID NO: 14737 - protein, 7 aa, synthetic construct
ADKNDAD

SEQ ID NO: 14738 - protein, 7 aa, synthetic construct
FQGLIAA

SEQ ID NO: 14739 - protein, 7 aa, synthetic construct
NHTQESD

SEQ ID NO: 14740 - protein, 7 aa, synthetic construct
SLQGEGQ

SEQ ID NO: 14741 - protein, 7 aa, synthetic construct
RLQDAHQ

SEQ ID NO: 14742 - protein, 7 aa, synthetic construct
ISYKGDY

SEQ ID NO: 14743 - protein, 7 aa, synthetic construct
GLEKLNQ

SEQ ID NO: 14744 - protein, 7 aa, synthetic construct
NLEVPHE

SEQ ID NO: 14745 - protein, 7 aa, synthetic construct
IRFDTQK

SEQ ID NO: 14746 - protein, 7 aa, synthetic construct
FESHTDW

SEQ ID NO: 14747 - protein, 7 aa, synthetic construct
SLAALAQ

SEQ ID NO: 14748 - protein, 7 aa, synthetic construct
GRFNSTV

SEQ ID NO: 14749 - protein, 7 aa, synthetic construct
ELTTYYE

SEQ ID NO: 14750 - protein, 7 aa, synthetic construct
MGENAPE

SEQ ID NO: 14751 - protein, 7 aa, synthetic construct
ERPDFIV

SEQ ID NO: 14752 - protein, 7 aa, synthetic construct
FTSKYGT

SEQ ID NO: 14753 - protein, 7 aa, synthetic construct
AVVQSSE

SEQ ID NO: 14754 - protein, 7 aa, synthetic construct
HIDQNEW

SEQ ID NO: 14755 - protein, 7 aa, synthetic construct
QETGKDI

SEQ ID NO: 14756 - protein, 7 aa, synthetic construct
DVAQEPE

SEQ ID NO: 14757 - protein, 7 aa, synthetic construct
MRGDPVQ

SEQ ID NO: 14758 - protein, 7 aa, synthetic construct
LDSHGYK

SEQ ID NO: 14759 - protein, 7 aa, synthetic construct
FANGGQL

SEQ ID NO: 14760 - protein, 7 aa, synthetic construct
ASWGIEA

SEQ ID NO: 14761 - protein, 7 aa, synthetic construct
VVNEESP

SEQ ID NO: 14762 - protein, 7 aa, synthetic construct
VTRLKDP

SEQ ID NO: 14763 - protein, 7 aa, synthetic construct
SGQVEQT

SEQ ID NO: 14764 - protein, 7 aa, synthetic construct
MNPPSME

SEQ ID NO: 14765 - protein, 7 aa, synthetic construct
HGEFAFS

SEQ ID NO: 14766 - protein, 7 aa, synthetic construct
YQEDKFS

SEQ ID NO: 14767 - protein, 7 aa, synthetic construct
NTMQSLA

SEQ ID NO: 14768 - protein, 7 aa, synthetic construct
NNVFTQS

SEQ ID NO: 14769 - protein, 7 aa, synthetic construct
ISADQQV

SEQ ID NO: 14770 - protein, 7 aa, synthetic construct
VNKNTLI

SEQ ID NO: 14771 - protein, 7 aa, synthetic construct
KAAEKMF

SEQ ID NO: 14772 - protein, 7 aa, synthetic construct
MEFEHVV

SEQ ID NO: 14773 - protein, 7 aa, synthetic construct
PYQIPNA

SEQ ID NO: 14774 - protein, 7 aa, synthetic construct
WPSPDSD

SEQ ID NO: 14775 - protein, 7 aa, synthetic construct
SIEADDT

SEQ ID NO: 14776 - protein, 7 aa, synthetic construct
YVRDVPK

SEQ ID NO: 14777 - protein, 7 aa, synthetic construct
VGYTADT

SEQ ID NO: 14778 - protein, 7 aa, synthetic construct
QELKKIE

SEQ ID NO: 14779 - protein, 7 aa, synthetic construct
TLDRVHN

SEQ ID NO: 14780 - protein, 7 aa, synthetic construct
GDFVSID

SEQ ID NO: 14781 - protein, 7 aa, synthetic construct
LNGSWDD

SEQ ID NO: 14782 - protein, 7 aa, synthetic construct
QADDGQM

SEQ ID NO: 14783 - protein, 7 aa, synthetic construct
EQKRGWS

SEQ ID NO: 14784 - protein, 7 aa, synthetic construct
WPVSEPE

SEQ ID NO: 14785 - protein, 7 aa, synthetic construct
MQEVNTL

SEQ ID NO: 14786 - protein, 7 aa, synthetic construct
GDHWNEA

SEQ ID NO: 14787 - protein, 7 aa, synthetic construct
PTMSIMA

SEQ ID NO: 14788 - protein, 7 aa, synthetic construct
NSTESHL

SEQ ID NO: 14789 - protein, 7 aa, synthetic construct
SEFHDEN

SEQ ID NO: 14790 - protein, 7 aa, synthetic construct
MDGLLRV

SEQ ID NO: 14791 - protein, 7 aa, synthetic construct
FEMHEPI

SEQ ID NO: 14792 - protein, 7 aa, synthetic construct
DLSIKAK

SEQ ID NO: 14793 - protein, 7 aa, synthetic construct
DWNLKSA

SEQ ID NO: 14794 - protein, 7 aa, synthetic construct
RLEEIGH

SEQ ID NO: 14795 - protein, 7 aa, synthetic construct
TSLINAA

SEQ ID NO: 14796 - protein, 7 aa, synthetic construct
QEIIDVE

SEQ ID NO: 14797 - protein, 7 aa, synthetic construct
HLDSIDK

SEQ ID NO: 14798 - protein, 7 aa, synthetic construct
VPDQQYP

SEQ ID NO: 14799 - protein, 7 aa, synthetic construct
NQSDADE

SEQ ID NO: 14800 - protein, 7 aa, synthetic construct
ENNVDDE

SEQ ID NO: 14801 - protein, 7 aa, synthetic construct
MGDIPDA

SEQ ID NO: 14802 - protein, 7 aa, synthetic construct
MGMAFKM

SEQ ID NO: 14803 - protein, 7 aa, synthetic construct
PFLNDGP

SEQ ID NO: 14804 - protein, 7 aa, synthetic construct
DMHDQSP

SEQ ID NO: 14805 - protein, 7 aa, synthetic construct
FKHPANI

SEQ ID NO: 14806 - protein, 7 aa, synthetic construct
ASRGAFQ

SEQ ID NO: 14807 - protein, 7 aa, synthetic construct
LQPHGQF

SEQ ID NO: 14808 - protein, 7 aa, synthetic construct
DLTPLDS

SEQ ID NO: 14809 - protein, 7 aa, synthetic construct
LNQAVLD

SEQ ID NO: 14810 - protein, 7 aa, synthetic construct
SQENTES

SEQ ID NO: 14811 - protein, 7 aa, synthetic construct
PHDYPFP

SEQ ID NO: 14812 - protein, 7 aa, synthetic construct
QIIGADN

SEQ ID NO: 14813 - protein, 7 aa, synthetic construct
LMQVDEP

SEQ ID NO: 14814 - protein, 7 aa, synthetic construct
PFDLKNN

SEQ ID NO: 14815 - protein, 7 aa, synthetic construct
MMAYSAA

SEQ ID NO: 14816 - protein, 7 aa, synthetic construct
GEMPPHH

SEQ ID NO: 14817 - protein, 7 aa, synthetic construct
IWKQDFA

SEQ ID NO: 14818 - protein, 7 aa, synthetic construct
AYSHEFI

SEQ ID NO: 14819 - protein, 7 aa, synthetic construct
PAGRKDT

SEQ ID NO: 14820 - protein, 7 aa, synthetic construct
EPDAIGL

SEQ ID NO: 14821 - protein, 7 aa, synthetic construct
SERVFEP

SEQ ID NO: 14822 - protein, 7 aa, synthetic construct
PYPLNSS

SEQ ID NO: 14823 - protein, 7 aa, synthetic construct
VKVVINS

SEQ ID NO: 14824 - protein, 7 aa, synthetic construct
FERHDHT

SEQ ID NO: 14825 - protein, 7 aa, synthetic construct
SANTVVQ

SEQ ID NO: 14826 - protein, 7 aa, synthetic construct
FEGEGHF

SEQ ID NO: 14827 - protein, 7 aa, synthetic construct
MDSPPRD

SEQ ID NO: 14828 - protein, 7 aa, synthetic construct
ENTVFQP

SEQ ID NO: 14829 - protein, 7 aa, synthetic construct
ASGDEKH

SEQ ID NO: 14830 - protein, 7 aa, synthetic construct
ADESHDS

SEQ ID NO: 14831 - protein, 7 aa, synthetic construct
PLGTMHM

SEQ ID NO: 14832 - protein, 7 aa, synthetic construct
FLESKND

SEQ ID NO: 14833 - protein, 7 aa, synthetic construct
QCPPHPC

SEQ ID NO: 14834 - protein, 7 aa, synthetic construct
EIRALVN

SEQ ID NO: 14835 - protein, 7 aa, synthetic construct
MYGSAYE

SEQ ID NO: 14836 - protein, 7 aa, synthetic construct
GSPMEDV

SEQ ID NO: 14837 - protein, 7 aa, synthetic construct
THGWNES

SEQ ID NO: 14838 - protein, 7 aa, synthetic construct
TFNVESE

SEQ ID NO: 14839 - protein, 7 aa, synthetic construct
GQGGWAM

SEQ ID NO: 14840 - protein, 7 aa, synthetic construct
APHSMVE

SEQ ID NO: 14841 - protein, 7 aa, synthetic construct
AGDHSEV

SEQ ID NO: 14842 - protein, 7 aa, synthetic construct
TDPPQHQ

SEQ ID NO: 14843 - protein, 7 aa, synthetic construct
AHTQRTF

SEQ ID NO: 14844 - protein, 7 aa, synthetic construct
FLGNDAQ

SEQ ID NO: 14845 - protein, 7 aa, synthetic construct
YQSLQDP

SEQ ID NO: 14846 - protein, 7 aa, synthetic construct
MTANIHS

SEQ ID NO: 14847 - protein, 7 aa, synthetic construct
LYPRNLA

SEQ ID NO: 14848 - protein, 7 aa, synthetic construct
LPMMEIE

SEQ ID NO: 14849 - protein, 7 aa, synthetic construct
FYGDFNE

SEQ ID NO: 14850 - protein, 7 aa, synthetic construct
GVAEAPN

SEQ ID NO: 14851 - protein, 7 aa, synthetic construct
SDAMEGF

SEQ ID NO: 14852 - protein, 7 aa, synthetic construct
VRANQMM

SEQ ID NO: 14853 - protein, 7 aa, synthetic construct
SMPHDDI

SEQ ID NO: 14854 - protein, 7 aa, synthetic construct
DHRMQVT

SEQ ID NO: 14855 - protein, 7 aa, synthetic construct
QNYEVHK

SEQ ID NO: 14856 - protein, 7 aa, synthetic construct
YFPKDTG

SEQ ID NO: 14857 - protein, 7 aa, synthetic construct
NTHIPAF

SEQ ID NO: 14858 - protein, 7 aa, synthetic construct
GDQRDSY

SEQ ID NO: 14859 - protein, 7 aa, synthetic construct
LREVRIS

SEQ ID NO: 14860 - protein, 7 aa, synthetic construct
GIDTDPG

SEQ ID NO: 14861 - protein, 7 aa, synthetic construct
ISTMNDI

SEQ ID NO: 14862 - protein, 7 aa, synthetic construct
GERTEPL

SEQ ID NO: 14863 - protein, 7 aa, synthetic construct
IHPLVSD

SEQ ID NO: 14864 - protein, 7 aa, synthetic construct
FNSGTEH

SEQ ID NO: 14865 - protein, 7 aa, synthetic construct
PIPSNPM

SEQ ID NO: 14866 - protein, 7 aa, synthetic construct
REGRFGN

SEQ ID NO: 14867 - protein, 7 aa, synthetic construct
YGARMSH

SEQ ID NO: 14868 - protein, 7 aa, synthetic construct
STDKIYA

SEQ ID NO: 14869 - protein, 7 aa, synthetic construct
SEFIGFE

SEQ ID NO: 14870 - protein, 7 aa, synthetic construct
GQSYAMS

SEQ ID NO: 14871 - protein, 7 aa, synthetic construct
DMPVLSP

SEQ ID NO: 14872 - protein, 7 aa, synthetic construct
IDGWTPV

SEQ ID NO: 14873 - protein, 7 aa, synthetic construct
CKGGSQS

SEQ ID NO: 14874 - protein, 7 aa, synthetic construct
TTYEPIK

SEQ ID NO: 14875 - protein, 7 aa, synthetic construct
ERLEAYK

SEQ ID NO: 14876 - protein, 7 aa, synthetic construct
LSGLHGI

SEQ ID NO: 14877 - protein, 7 aa, synthetic construct
LTADTFH

SEQ ID NO: 14878 - protein, 7 aa, synthetic construct
SGHHMME

SEQ ID NO: 14879 - protein, 7 aa, synthetic construct
QRQVPTQ

SEQ ID NO: 14880 - protein, 7 aa, synthetic construct
NGTVQDM

SEQ ID NO: 14881 - protein, 7 aa, synthetic construct
PIPGHGY

SEQ ID NO: 14882 - protein, 7 aa, synthetic construct
GEYTSPV

SEQ ID NO: 14883 - protein, 7 aa, synthetic construct
KYQLKDY

SEQ ID NO: 14884 - protein, 7 aa, synthetic construct
QHDAFEQ

SEQ ID NO: 14885 - protein, 7 aa, synthetic construct
AAALKGI

SEQ ID NO: 14886 - protein, 7 aa, synthetic construct
DILNAEH

SEQ ID NO: 14887 - protein, 7 aa, synthetic construct
MVVEVRP

SEQ ID NO: 14888 - protein, 7 aa, synthetic construct
YLDSRAL

SEQ ID NO: 14889 - protein, 7 aa, synthetic construct
VLIAHEM

SEQ ID NO: 14890 - protein, 7 aa, synthetic construct
YENYTNQ

SEQ ID NO: 14891 - protein, 7 aa, synthetic construct
QSGLFLG

SEQ ID NO: 14892 - protein, 7 aa, synthetic construct
YQDLIVT

SEQ ID NO: 14893 - protein, 7 aa, synthetic construct
HEDEFNY

SEQ ID NO: 14894 - protein, 7 aa, synthetic construct
LREPPFH

SEQ ID NO: 14895 - protein, 7 aa, synthetic construct
SDAENHA

SEQ ID NO: 14896 - protein, 7 aa, synthetic construct
YNDPKMN

SEQ ID NO: 14897 - protein, 7 aa, synthetic construct
ANGHEFT

SEQ ID NO: 14898 - protein, 7 aa, synthetic construct
HTTIGER

SEQ ID NO: 14899 - protein, 7 aa, synthetic construct
RRQPELI

SEQ ID NO: 14900 - protein, 7 aa, synthetic construct
YADLITD

SEQ ID NO: 14901 - protein, 7 aa, synthetic construct
LVVEATG

SEQ ID NO: 14902 - protein, 7 aa, synthetic construct
HDANWAH

SEQ ID NO: 14903 - protein, 7 aa, synthetic construct
QVGDEVI

SEQ ID NO: 14904 - protein, 7 aa, synthetic construct
VILSAEV

SEQ ID NO: 14905 - protein, 7 aa, synthetic construct
DPTPSED

SEQ ID NO: 14906 - protein, 7 aa, synthetic construct
DNVSNAT

SEQ ID NO: 14907 - protein, 7 aa, synthetic construct
NINREMW

SEQ ID NO: 14908 - protein, 7 aa, synthetic construct
QFVDGEI

SEQ ID NO: 14909 - protein, 7 aa, synthetic construct
ILTDGGL

SEQ ID NO: 14910 - protein, 7 aa, synthetic construct
MKHDGMK

SEQ ID NO: 14911 - protein, 7 aa, synthetic construct
ENERHMP

SEQ ID NO: 14912 - protein, 7 aa, synthetic construct
DPSRLLD

SEQ ID NO: 14913 - protein, 7 aa, synthetic construct
IEHKAME

SEQ ID NO: 14914 - protein, 7 aa, synthetic construct
QQLTPEL

SEQ ID NO: 14915 - protein, 7 aa, synthetic construct
VTQWDQS

SEQ ID NO: 14916 - protein, 7 aa, synthetic construct
TRMNTQQ

SEQ ID NO: 14917 - protein, 7 aa, synthetic construct
MHDSVHF

SEQ ID NO: 14918 - protein, 7 aa, synthetic construct
FFPQGIS

SEQ ID NO: 14919 - protein, 7 aa, synthetic construct
TPAVIWE

SEQ ID NO: 14920 - protein, 7 aa, synthetic construct
MSHDAYR

SEQ ID NO: 14921 - protein, 7 aa, synthetic construct
WGTSRGM

SEQ ID NO: 14922 - protein, 7 aa, synthetic construct
RDQAAHK

SEQ ID NO: 14923 - protein, 7 aa, synthetic construct
TWNHLPD

SEQ ID NO: 14924 - protein, 7 aa, synthetic construct
SQLKLYP

SEQ ID NO: 14925 - protein, 7 aa, synthetic construct
TSDWEMD

SEQ ID NO: 14926 - protein, 7 aa, synthetic construct
ENHEGYH

SEQ ID NO: 14927 - protein, 7 aa, synthetic construct
SAGGEEK

SEQ ID NO: 14928 - protein, 7 aa, synthetic construct
TAIDKRM

SEQ ID NO: 14929 - protein, 7 aa, synthetic construct
WYNDGEE

SEQ ID NO: 14930 - protein, 7 aa, synthetic construct
IHDQDDQ

SEQ ID NO: 14931 - protein, 7 aa, synthetic construct
KEPHAVL

SEQ ID NO: 14932 - protein, 7 aa, synthetic construct
DGDAKTK

SEQ ID NO: 14933 - protein, 7 aa, synthetic construct
LNSMNFI

SEQ ID NO: 14934 - protein, 7 aa, synthetic construct
PVMHMKT

SEQ ID NO: 14935 - protein, 7 aa, synthetic construct
QGEPLLL

SEQ ID NO: 14936 - protein, 7 aa, synthetic construct
WDTGSNT

SEQ ID NO: 14937 - protein, 7 aa, synthetic construct
HPGAALL

SEQ ID NO: 14938 - protein, 7 aa, synthetic construct
FVTMMAE

SEQ ID NO: 14939 - protein, 7 aa, synthetic construct
IHITDPA

SEQ ID NO: 14940 - protein, 7 aa, synthetic construct
NDDVDTW

SEQ ID NO: 14941 - protein, 7 aa, synthetic construct
DERNAPQ

SEQ ID NO: 14942 - protein, 7 aa, synthetic construct
INTRPAY

SEQ ID NO: 14943 - protein, 7 aa, synthetic construct
AIEAQTN

SEQ ID NO: 14944 - protein, 7 aa, synthetic construct
LVMYNGE

SEQ ID NO: 14945 - protein, 7 aa, synthetic construct
AEDTSHK

SEQ ID NO: 14946 - protein, 7 aa, synthetic construct
IDQNHHD

SEQ ID NO: 14947 - protein, 7 aa, synthetic construct
IPGAEAH

SEQ ID NO: 14948 - protein, 7 aa, synthetic construct
LHAAYGK

SEQ ID NO: 14949 - protein, 7 aa, synthetic construct
HADLNDT

SEQ ID NO: 14950 - protein, 7 aa, synthetic construct
WRQIHMD

SEQ ID NO: 14951 - protein, 7 aa, synthetic construct
PDPGSVM

SEQ ID NO: 14952 - protein, 7 aa, synthetic construct
DEVHAMM

SEQ ID NO: 14953 - protein, 7 aa, synthetic construct
FESSNLY

SEQ ID NO: 14954 - protein, 7 aa, synthetic construct
GPVHAKI

SEQ ID NO: 14955 - protein, 7 aa, synthetic construct
KVDLDSS

SEQ ID NO: 14956 - protein, 7 aa, synthetic construct
EQQWGKS

SEQ ID NO: 14957 - protein, 7 aa, synthetic construct
LHRIGRE

SEQ ID NO: 14958 - protein, 7 aa, synthetic construct
QKYHGNS

SEQ ID NO: 14959 - protein, 7 aa, synthetic construct
TGQNFEQ

SEQ ID NO: 14960 - protein, 7 aa, synthetic construct
TAFVPVT

SEQ ID NO: 14961 - protein, 7 aa, synthetic construct
VNAVIQQ

SEQ ID NO: 14962 - protein, 7 aa, synthetic construct
EQKQHMR

SEQ ID NO: 14963 - protein, 7 aa, synthetic construct
DIFGEIA

SEQ ID NO: 14964 - protein, 7 aa, synthetic construct
IEKKFFS

SEQ ID NO: 14965 - protein, 7 aa, synthetic construct
QTSLPYA

SEQ ID NO: 14966 - protein, 7 aa, synthetic construct
REAEDIL

SEQ ID NO: 14967 - protein, 7 aa, synthetic construct
HSKADEM

SEQ ID NO: 14968 - protein, 7 aa, synthetic construct
TAGQRYV

SEQ ID NO: 14969 - protein, 7 aa, synthetic construct
PGAVDVE

SEQ ID NO: 14970 - protein, 7 aa, synthetic construct
AFQDMEV

SEQ ID NO: 14971 - protein, 7 aa, synthetic construct
STDAEHA

SEQ ID NO: 14972 - protein, 7 aa, synthetic construct
IGIKPSL

SEQ ID NO: 14973 - protein, 7 aa, synthetic construct
TTQEGAP

SEQ ID NO: 14974 - protein, 7 aa, synthetic construct
PERNHFV

SEQ ID NO: 14975 - protein, 7 aa, synthetic construct
WSMAINE

SEQ ID NO: 14976 - protein, 7 aa, synthetic construct
FSPTESA

SEQ ID NO: 14977 - protein, 7 aa, synthetic construct
IWQDVVP

SEQ ID NO: 14978 - protein, 7 aa, synthetic construct
GTHLSLT

SEQ ID NO: 14979 - protein, 7 aa, synthetic construct
KMKVHDM

SEQ ID NO: 14980 - protein, 7 aa, synthetic construct
NADYSND

SEQ ID NO: 14981 - protein, 7 aa, synthetic construct
ARFGKTD

SEQ ID NO: 14982 - protein, 7 aa, synthetic construct
AATIIGP

SEQ ID NO: 14983 - protein, 7 aa, synthetic construct
PWGGIGD

SEQ ID NO: 14984 - protein, 7 aa, synthetic construct
YYDGMMD

SEQ ID NO: 14985 - protein, 7 aa, synthetic construct
GMAVLGN

SEQ ID NO: 14986 - protein, 7 aa, synthetic construct
SGQLLVA

SEQ ID NO: 14987 - protein, 7 aa, synthetic construct
HHQSWQG

SEQ ID NO: 14988 - protein, 7 aa, synthetic construct
FDAALPD

SEQ ID NO: 14989 - protein, 7 aa, synthetic construct
QIVTSIA

SEQ ID NO: 14990 - protein, 7 aa, synthetic construct
HIMRERN

SEQ ID NO: 14991 - protein, 7 aa, synthetic construct
HSAGLLQ

SEQ ID NO: 14992 - protein, 7 aa, synthetic construct
LQSGHFV

SEQ ID NO: 14993 - protein, 7 aa, synthetic construct
ELKVQIT

SEQ ID NO: 14994 - protein, 7 aa, synthetic construct
PNQFGAT

SEQ ID NO: 14995 - protein, 7 aa, synthetic construct
SDGEIQE

SEQ ID NO: 14996 - protein, 7 aa, synthetic construct
EVDMKMI

SEQ ID NO: 14997 - protein, 7 aa, synthetic construct
MMDMISG

SEQ ID NO: 14998 - protein, 7 aa, synthetic construct
VNPAFQN

SEQ ID NO: 14999 - protein, 7 aa, synthetic construct
DHAIRAI

SEQ ID NO: 15000 - protein, 7 aa, synthetic construct
KEHLNEY

SEQ ID NO: 15001 - protein, 7 aa, synthetic construct
FRAMPMD

SEQ ID NO: 15002 - protein, 7 aa, synthetic construct
NHFDNQN

SEQ ID NO: 15003 - protein, 7 aa, synthetic construct
LSNHTRI

SEQ ID NO: 15004 - protein, 7 aa, synthetic construct
RWDGAVP

SEQ ID NO: 15005 - protein, 7 aa, synthetic construct
DHGKWEP

SEQ ID NO: 15006 - protein, 7 aa, synthetic construct
AWGYEEV

SEQ ID NO: 15007 - protein, 7 aa, synthetic construct
TDGQAYY

SEQ ID NO: 15008 - protein, 7 aa, synthetic construct
VLPIRPK

SEQ ID NO: 15009 - protein, 7 aa, synthetic construct
QDVGGIL

SEQ ID NO: 15010 - protein, 7 aa, synthetic construct
GFKGQFS

SEQ ID NO: 15011 - protein, 7 aa, synthetic construct
DSTAMDS

SEQ ID NO: 15012 - protein, 7 aa, synthetic construct
NHNMLQV

SEQ ID NO: 15013 - protein, 7 aa, synthetic construct
QAGHPSK

SEQ ID NO: 15014 - protein, 7 aa, synthetic construct
IIRPPPQ

SEQ ID NO: 15015 - protein, 7 aa, synthetic construct
ATDWSNG

SEQ ID NO: 15016 - protein, 7 aa, synthetic construct
YSQIDKW

SEQ ID NO: 15017 - protein, 7 aa, synthetic construct
LFVEHDP

SEQ ID NO: 15018 - protein, 7 aa, synthetic construct
YVSDGMF

SEQ ID NO: 15019 - protein, 7 aa, synthetic construct
DERVILE

SEQ ID NO: 15020 - protein, 7 aa, synthetic construct
AQKLELY

SEQ ID NO: 15021 - protein, 7 aa, synthetic construct
GAKPMYL

SEQ ID NO: 15022 - protein, 7 aa, synthetic construct
YNEPIGF

SEQ ID NO: 15023 - protein, 7 aa, synthetic construct
WDGHVNQ

SEQ ID NO: 15024 - protein, 7 aa, synthetic construct
SMADYHM

SEQ ID NO: 15025 - protein, 7 aa, synthetic construct
TPEDGNG

SEQ ID NO: 15026 - protein, 7 aa, synthetic construct
HFRVNPD

SEQ ID NO: 15027 - protein, 7 aa, synthetic construct
DTHRGDE

SEQ ID NO: 15028 - protein, 7 aa, synthetic construct
RTKIIET

SEQ ID NO: 15029 - protein, 7 aa, synthetic construct
DWHDHTI

SEQ ID NO: 15030 - protein, 7 aa, synthetic construct
MHDIPNT

SEQ ID NO: 15031 - protein, 7 aa, synthetic construct
NWALEEH

SEQ ID NO: 15032 - protein, 7 aa, synthetic construct
VYEKAIL

SEQ ID NO: 15033 - protein, 7 aa, synthetic construct
NISSQLL

SEQ ID NO: 15034 - protein, 7 aa, synthetic construct
TYESSVS

SEQ ID NO: 15035 - protein, 7 aa, synthetic construct
EGIIQEM

SEQ ID NO: 15036 - protein, 7 aa, synthetic construct
NSGVVDV

SEQ ID NO: 15037 - protein, 7 aa, synthetic construct
GIAEMSQ

SEQ ID NO: 15038 - protein, 7 aa, synthetic construct
MWTHDDA

SEQ ID NO: 15039 - protein, 7 aa, synthetic construct
PTDENNL

SEQ ID NO: 15040 - protein, 7 aa, synthetic construct
QFNEGDH

SEQ ID NO: 15041 - protein, 7 aa, synthetic construct
TTANETA

SEQ ID NO: 15042 - protein, 7 aa, synthetic construct
WEFASEN

SEQ ID NO: 15043 - protein, 7 aa, synthetic construct
SLGTVPY

SEQ ID NO: 15044 - protein, 7 aa, synthetic construct
VDTNGRK

SEQ ID NO: 15045 - protein, 7 aa, synthetic construct
FYKHMQG

SEQ ID NO: 15046 - protein, 7 aa, synthetic construct
TSLGHLL

SEQ ID NO: 15047 - protein, 7 aa, synthetic construct
QDFDAVN

SEQ ID NO: 15048 - protein, 7 aa, synthetic construct
EIHNHKV

SEQ ID NO: 15049 - protein, 7 aa, synthetic construct
WLSPKEI

SEQ ID NO: 15050 - protein, 7 aa, synthetic construct
PMLGSDL

SEQ ID NO: 15051 - protein, 7 aa, synthetic construct
FGQDQAM

SEQ ID NO: 15052 - protein, 7 aa, synthetic construct
WHSEYHP

SEQ ID NO: 15053 - protein, 7 aa, synthetic construct
ARPLSHT

SEQ ID NO: 15054 - protein, 7 aa, synthetic construct
DWQDNAA

SEQ ID NO: 15055 - protein, 7 aa, synthetic construct
ADFQQRT

SEQ ID NO: 15056 - protein, 7 aa, synthetic construct
VDKDISV

SEQ ID NO: 15057 - protein, 7 aa, synthetic construct
ALMHEHY

SEQ ID NO: 15058 - protein, 7 aa, synthetic construct
DLTFEDY

SEQ ID NO: 15059 - protein, 7 aa, synthetic construct
RGDSRFS

SEQ ID NO: 15060 - protein, 7 aa, synthetic construct
NYEGNDV

SEQ ID NO: 15061 - protein, 7 aa, synthetic construct
KFEMPHP

SEQ ID NO: 15062 - protein, 7 aa, synthetic construct
QATENIG

SEQ ID NO: 15063 - protein, 7 aa, synthetic construct
DTNHLYE

SEQ ID NO: 15064 - protein, 7 aa, synthetic construct
DTTIGVE

SEQ ID NO: 15065 - protein, 7 aa, synthetic construct
VDAQGQP

SEQ ID NO: 15066 - protein, 7 aa, synthetic construct
KEVADKW

SEQ ID NO: 15067 - protein, 7 aa, synthetic construct
IEQADVM

SEQ ID NO: 15068 - protein, 7 aa, synthetic construct
RGQTHVH

SEQ ID NO: 15069 - protein, 7 aa, synthetic construct
NMPDAHW

SEQ ID NO: 15070 - protein, 7 aa, synthetic construct
LGESYES

SEQ ID NO: 15071 - protein, 7 aa, synthetic construct
PVDNDPK

SEQ ID NO: 15072 - protein, 7 aa, synthetic construct
FRLEQPA

SEQ ID NO: 15073 - protein, 7 aa, synthetic construct
LRKLNIE

SEQ ID NO: 15074 - protein, 7 aa, synthetic construct
IDYANPS

SEQ ID NO: 15075 - protein, 7 aa, synthetic construct
FSQGWSN

SEQ ID NO: 15076 - protein, 7 aa, synthetic construct
GMYSTKN

SEQ ID NO: 15077 - protein, 7 aa, synthetic construct
INNEFNP

SEQ ID NO: 15078 - protein, 7 aa, synthetic construct
VGAEMFS

SEQ ID NO: 15079 - protein, 7 aa, synthetic construct
TVDEIQN

SEQ ID NO: 15080 - protein, 7 aa, synthetic construct
EEWRENT

SEQ ID NO: 15081 - protein, 7 aa, synthetic construct
GEDKQIA

SEQ ID NO: 15082 - protein, 7 aa, synthetic construct
LPAYNSH

SEQ ID NO: 15083 - protein, 7 aa, synthetic construct
DRLDNEW

SEQ ID NO: 15084 - protein, 7 aa, synthetic construct
WDKNYSL

SEQ ID NO: 15085 - protein, 7 aa, synthetic construct
PYEGQEL

SEQ ID NO: 15086 - protein, 7 aa, synthetic construct
DDTDSNG

SEQ ID NO: 15087 - protein, 7 aa, synthetic construct
EMDHTLM

SEQ ID NO: 15088 - protein, 7 aa, synthetic construct
HKEQIGR

SEQ ID NO: 15089 - protein, 7 aa, synthetic construct
VHQLGIS

SEQ ID NO: 15090 - protein, 7 aa, synthetic construct
LPQDDGV

SEQ ID NO: 15091 - protein, 7 aa, synthetic construct
STVSVAE

SEQ ID NO: 15092 - protein, 7 aa, synthetic construct
HASEYEF

SEQ ID NO: 15093 - protein, 7 aa, synthetic construct
MTEIPRM

SEQ ID NO: 15094 - protein, 7 aa, synthetic construct
GDEFKSI

SEQ ID NO: 15095 - protein, 7 aa, synthetic construct
YQNDLQV

SEQ ID NO: 15096 - protein, 7 aa, synthetic construct
PHTMHTM

SEQ ID NO: 15097 - protein, 7 aa, synthetic construct
HWDERRG

SEQ ID NO: 15098 - protein, 7 aa, synthetic construct
NYSGHPY

SEQ ID NO: 15099 - protein, 7 aa, synthetic construct
SLHQYDE

SEQ ID NO: 15100 - protein, 7 aa, synthetic construct
SKDSRED

SEQ ID NO: 15101 - protein, 7 aa, synthetic construct
CKERIME

SEQ ID NO: 15102 - protein, 7 aa, synthetic construct
PSGVQTF

SEQ ID NO: 15103 - protein, 7 aa, synthetic construct
QVESVHL

SEQ ID NO: 15104 - protein, 7 aa, synthetic construct
IIADHRH

SEQ ID NO: 15105 - protein, 7 aa, synthetic construct
IDHTPEE

SEQ ID NO: 15106 - protein, 7 aa, synthetic construct
DVSMKEF

SEQ ID NO: 15107 - protein, 7 aa, synthetic construct
IYSNHNM

SEQ ID NO: 15108 - protein, 7 aa, synthetic construct
ENVGDTP

SEQ ID NO: 15109 - protein, 7 aa, synthetic construct
HTHVNIQ

SEQ ID NO: 15110 - protein, 7 aa, synthetic construct
PYFDGNS

SEQ ID NO: 15111 - protein, 7 aa, synthetic construct
YTFAHED

SEQ ID NO: 15112 - protein, 7 aa, synthetic construct
STAEGYA

SEQ ID NO: 15113 - protein, 7 aa, synthetic construct
AVLQAMP

SEQ ID NO: 15114 - protein, 7 aa, synthetic construct
YHDSMDD

SEQ ID NO: 15115 - protein, 7 aa, synthetic construct
NNSDTPS

SEQ ID NO: 15116 - protein, 7 aa, synthetic construct
PLAVLQE

SEQ ID NO: 15117 - protein, 7 aa, synthetic construct
NVVWKGG

SEQ ID NO: 15118 - protein, 7 aa, synthetic construct
YADAGVE

SEQ ID NO: 15119 - protein, 7 aa, synthetic construct
WNEPHEI

SEQ ID NO: 15120 - protein, 7 aa, synthetic construct
SDAHTDT

SEQ ID NO: 15121 - protein, 7 aa, synthetic construct
GPPGDLP

SEQ ID NO: 15122 - protein, 7 aa, synthetic construct
HSEMMMS

SEQ ID NO: 15123 - protein, 7 aa, synthetic construct
ASKEAKP

SEQ ID NO: 15124 - protein, 7 aa, synthetic construct
FERNAHP

SEQ ID NO: 15125 - protein, 7 aa, synthetic construct
PDFAVQV

SEQ ID NO: 15126 - protein, 7 aa, synthetic construct
KNASLML

SEQ ID NO: 15127 - protein, 7 aa, synthetic construct
YWDGIPQ

SEQ ID NO: 15128 - protein, 7 aa, synthetic construct
PGKDDIM

SEQ ID NO: 15129 - protein, 7 aa, synthetic construct
DNWERES

SEQ ID NO: 15130 - protein, 7 aa, synthetic construct
GVIRGVH

SEQ ID NO: 15131 - protein, 7 aa, synthetic construct
IADHDLL

SEQ ID NO: 15132 - protein, 7 aa, synthetic construct
FHPPSLA

SEQ ID NO: 15133 - protein, 7 aa, synthetic construct
QMKVYSS

SEQ ID NO: 15134 - protein, 7 aa, synthetic construct
IHESDAG

SEQ ID NO: 15135 - protein, 7 aa, synthetic construct
YQMAPVK

SEQ ID NO: 15136 - protein, 7 aa, synthetic construct
QKYIKVE

SEQ ID NO: 15137 - protein, 7 aa, synthetic construct
AGDMHQL

SEQ ID NO: 15138 - protein, 7 aa, synthetic construct
HHPDEHG

SEQ ID NO: 15139 - protein, 7 aa, synthetic construct
PHHEQFH

SEQ ID NO: 15140 - protein, 7 aa, synthetic construct
SSYVGSH

SEQ ID NO: 15141 - protein, 7 aa, synthetic construct
IEKQMEM

SEQ ID NO: 15142 - protein, 7 aa, synthetic construct
FAGQDDI

SEQ ID NO: 15143 - protein, 7 aa, synthetic construct
STMENPE

SEQ ID NO: 15144 - protein, 7 aa, synthetic construct
YPKGMYV

SEQ ID NO: 15145 - protein, 7 aa, synthetic construct
YKELGWS

SEQ ID NO: 15146 - protein, 7 aa, synthetic construct
RDGFIME

SEQ ID NO: 15147 - protein, 7 aa, synthetic construct
FNDAGIM

SEQ ID NO: 15148 - protein, 7 aa, synthetic construct
NETDEQT

SEQ ID NO: 15149 - protein, 7 aa, synthetic construct
QREPHGG

SEQ ID NO: 15150 - protein, 7 aa, synthetic construct
DVDLKIF

SEQ ID NO: 15151 - protein, 7 aa, synthetic construct
AAHANDD

SEQ ID NO: 15152 - protein, 7 aa, synthetic construct
EHQTIVI

SEQ ID NO: 15153 - protein, 7 aa, synthetic construct
VSVHPHS

SEQ ID NO: 15154 - protein, 7 aa, synthetic construct
NLNWPTG

SEQ ID NO: 15155 - protein, 7 aa, synthetic construct
GMDQIQQ

SEQ ID NO: 15156 - protein, 7 aa, synthetic construct
HVEFHAV

SEQ ID NO: 15157 - protein, 7 aa, synthetic construct
KLVTMNP

SEQ ID NO: 15158 - protein, 7 aa, synthetic construct
EYHQMDH

SEQ ID NO: 15159 - protein, 7 aa, synthetic construct
ISSVDPG

SEQ ID NO: 15160 - protein, 7 aa, synthetic construct
ETPDTKW

SEQ ID NO: 15161 - protein, 7 aa, synthetic construct
HRQSLLP

SEQ ID NO: 15162 - protein, 7 aa, synthetic construct
NVSEEFA

SEQ ID NO: 15163 - protein, 7 aa, synthetic construct
TMMVGIK

SEQ ID NO: 15164 - protein, 7 aa, synthetic construct
DDRDVTW

SEQ ID NO: 15165 - protein, 7 aa, synthetic construct
VHQPLQM

SEQ ID NO: 15166 - protein, 7 aa, synthetic construct
VLHKPDR

SEQ ID NO: 15167 - protein, 7 aa, synthetic construct
SGMSNTW

SEQ ID NO: 15168 - protein, 7 aa, synthetic construct
GPFYRAD

SEQ ID NO: 15169 - protein, 7 aa, synthetic construct
ENPSAST

SEQ ID NO: 15170 - protein, 7 aa, synthetic construct
ASWPNDM

SEQ ID NO: 15171 - protein, 7 aa, synthetic construct
SNHDHHF

SEQ ID NO: 15172 - protein, 7 aa, synthetic construct
FTTGHHF

SEQ ID NO: 15173 - protein, 7 aa, synthetic construct
WGVQASN

SEQ ID NO: 15174 - protein, 7 aa, synthetic construct
QTMGELN

SEQ ID NO: 15175 - protein, 7 aa, synthetic construct
MDNEANG

SEQ ID NO: 15176 - protein, 7 aa, synthetic construct
QYPKNIS

SEQ ID NO: 15177 - protein, 7 aa, synthetic construct
MVSVVNE

SEQ ID NO: 15178 - protein, 7 aa, synthetic construct
APPDNGT

SEQ ID NO: 15179 - protein, 7 aa, synthetic construct
FRPMNNN

SEQ ID NO: 15180 - protein, 7 aa, synthetic construct
IEATTFI

SEQ ID NO: 15181 - protein, 7 aa, synthetic construct
RAEHKVF

SEQ ID NO: 15182 - protein, 7 aa, synthetic construct
KLPFYDE

SEQ ID NO: 15183 - protein, 7 aa, synthetic construct
YSVEPHT

SEQ ID NO: 15184 - protein, 7 aa, synthetic construct
RAMVNDK

SEQ ID NO: 15185 - protein, 7 aa, synthetic construct
QNGNEYT

SEQ ID NO: 15186 - protein, 7 aa, synthetic construct
TDAASQN

SEQ ID NO: 15187 - protein, 7 aa, synthetic construct
LSEENEI

SEQ ID NO: 15188 - protein, 7 aa, synthetic construct
QFELNKH

SEQ ID NO: 15189 - protein, 7 aa, synthetic construct
DYPPKDV

SEQ ID NO: 15190 - protein, 7 aa, synthetic construct
PGRMREV

SEQ ID NO: 15191 - protein, 7 aa, synthetic construct
TGLQRGN

SEQ ID NO: 15192 - protein, 7 aa, synthetic construct
SMFTNSN

SEQ ID NO: 15193 - protein, 7 aa, synthetic construct
VYNVHAQ

SEQ ID NO: 15194 - protein, 7 aa, synthetic construct
TDDGPDF

SEQ ID NO: 15195 - protein, 7 aa, synthetic construct
DAENFQS

SEQ ID NO: 15196 - protein, 7 aa, synthetic construct
ENGDSFP

SEQ ID NO: 15197 - protein, 7 aa, synthetic construct
HTGSNLY

SEQ ID NO: 15198 - protein, 7 aa, synthetic construct
TMYGKPT

SEQ ID NO: 15199 - protein, 7 aa, synthetic construct
RDKVVFM

SEQ ID NO: 15200 - protein, 7 aa, synthetic construct
FPIEGEH

SEQ ID NO: 15201 - protein, 7 aa, synthetic construct
DRLSTAR

SEQ ID NO: 15202 - protein, 7 aa, synthetic construct
ADPRGWP

SEQ ID NO: 15203 - protein, 7 aa, synthetic construct
NEWVSDV

SEQ ID NO: 15204 - protein, 7 aa, synthetic construct
EWLGVEP

SEQ ID NO: 15205 - protein, 7 aa, synthetic construct
EMTRYDD

SEQ ID NO: 15206 - protein, 7 aa, synthetic construct
HNKEMRF

SEQ ID NO: 15207 - protein, 7 aa, synthetic construct
VVEEWKQ

SEQ ID NO: 15208 - protein, 7 aa, synthetic construct
GKQEPWL

SEQ ID NO: 15209 - protein, 7 aa, synthetic construct
YEEHRRD

SEQ ID NO: 15210 - protein, 7 aa, synthetic construct
HTAPAKQ

SEQ ID NO: 15211 - protein, 7 aa, synthetic construct
GMPLVQV

SEQ ID NO: 15212 - protein, 7 aa, synthetic construct
QMHGQSY

SEQ ID NO: 15213 - protein, 7 aa, synthetic construct
EGFVPHA

SEQ ID NO: 15214 - protein, 7 aa, synthetic construct
TSKHFNQ

SEQ ID NO: 15215 - protein, 7 aa, synthetic construct
SVTRFID

SEQ ID NO: 15216 - protein, 7 aa, synthetic construct
TMGPWLE

SEQ ID NO: 15217 - protein, 7 aa, synthetic construct
WDIGDDV

SEQ ID NO: 15218 - protein, 7 aa, synthetic construct
IIDAAAD

SEQ ID NO: 15219 - protein, 7 aa, synthetic construct
VTQKELW

SEQ ID NO: 15220 - protein, 7 aa, synthetic construct
KRMMTDA

SEQ ID NO: 15221 - protein, 7 aa, synthetic construct
GHGRSPY

SEQ ID NO: 15222 - protein, 7 aa, synthetic construct
LTEMQVA

SEQ ID NO: 15223 - protein, 7 aa, synthetic construct
AEQSYDP

SEQ ID NO: 15224 - protein, 7 aa, synthetic construct
NPGESDV

SEQ ID NO: 15225 - protein, 7 aa, synthetic construct
NEVLSSR

SEQ ID NO: 15226 - protein, 7 aa, synthetic construct
VPSSYQR

SEQ ID NO: 15227 - protein, 7 aa, synthetic construct
VITTPLP

SEQ ID NO: 15228 - protein, 7 aa, synthetic construct
EPFPQGY

SEQ ID NO: 15229 - protein, 7 aa, synthetic construct
ALPWRED

SEQ ID NO: 15230 - protein, 7 aa, synthetic construct
AGEFDGY

SEQ ID NO: 15231 - protein, 7 aa, synthetic construct
YQHDEMT

SEQ ID NO: 15232 - protein, 7 aa, synthetic construct
GNLISSP

SEQ ID NO: 15233 - protein, 7 aa, synthetic construct
VVEYYEE

SEQ ID NO: 15234 - protein, 7 aa, synthetic construct
LFNQNPG

SEQ ID NO: 15235 - protein, 7 aa, synthetic construct
RTGHDLF

SEQ ID NO: 15236 - protein, 7 aa, synthetic construct
GGREYEA

SEQ ID NO: 15237 - protein, 7 aa, synthetic construct
KVNSLTY

SEQ ID NO: 15238 - protein, 7 aa, synthetic construct
IKTHLFA

SEQ ID NO: 15239 - protein, 7 aa, synthetic construct
SDYDTDA

SEQ ID NO: 15240 - protein, 7 aa, synthetic construct
PHRTPIT

SEQ ID NO: 15241 - protein, 7 aa, synthetic construct
NVQSVQW

SEQ ID NO: 15242 - protein, 7 aa, synthetic construct
FKSEAYW

SEQ ID NO: 15243 - protein, 7 aa, synthetic construct
KLGYDHM

SEQ ID NO: 15244 - protein, 7 aa, synthetic construct
HQVRMPP

SEQ ID NO: 15245 - protein, 7 aa, synthetic construct
FMAELSA

SEQ ID NO: 15246 - protein, 7 aa, synthetic construct
GMGRSSH

SEQ ID NO: 15247 - protein, 7 aa, synthetic construct
AKNPTHS

SEQ ID NO: 15248 - protein, 7 aa, synthetic construct
HMSLPEF

SEQ ID NO: 15249 - protein, 7 aa, synthetic construct
QQRFSEY

SEQ ID NO: 15250 - protein, 7 aa, synthetic construct
ITNEVMG

SEQ ID NO: 15251 - protein, 7 aa, synthetic construct
PPELAIQ

SEQ ID NO: 15252 - protein, 7 aa, synthetic construct
DDEMNMA

SEQ ID NO: 15253 - protein, 7 aa, synthetic construct
TPGWSHA

SEQ ID NO: 15254 - protein, 7 aa, synthetic construct
IVGGHDQ

SEQ ID NO: 15255 - protein, 7 aa, synthetic construct
AHEANGL

SEQ ID NO: 15256 - protein, 7 aa, synthetic construct
STSIGDV

SEQ ID NO: 15257 - protein, 7 aa, synthetic construct
LMGAMLE

SEQ ID NO: 15258 - protein, 7 aa, synthetic construct
HEHVNFI

SEQ ID NO: 15259 - protein, 7 aa, synthetic construct
QTHMAPL

SEQ ID NO: 15260 - protein, 7 aa, synthetic construct
PGNITSM

SEQ ID NO: 15261 - protein, 7 aa, synthetic construct
IYEQEMS

SEQ ID NO: 15262 - protein, 7 aa, synthetic construct
RVEALNV

SEQ ID NO: 15263 - protein, 7 aa, synthetic construct
LGHTYGM

SEQ ID NO: 15264 - protein, 7 aa, synthetic construct
AKFSQAH

SEQ ID NO: 15265 - protein, 7 aa, synthetic construct
RDRFGMG

SEQ ID NO: 15266 - protein, 7 aa, synthetic construct
QIEIKTV

SEQ ID NO: 15267 - protein, 7 aa, synthetic construct
TEMFLVA

SEQ ID NO: 15268 - protein, 7 aa, synthetic construct
KDPQHDR

SEQ ID NO: 15269 - protein, 7 aa, synthetic construct
WQSMEHK

SEQ ID NO: 15270 - protein, 7 aa, synthetic construct
FFETSQS

SEQ ID NO: 15271 - protein, 7 aa, synthetic construct
ENDVGNH

SEQ ID NO: 15272 - protein, 7 aa, synthetic construct
METGTDG

SEQ ID NO: 15273 - protein, 7 aa, synthetic construct
DMVANQP

SEQ ID NO: 15274 - protein, 7 aa, synthetic construct
HKLAESF

SEQ ID NO: 15275 - protein, 7 aa, synthetic construct
PDSSTEE

SEQ ID NO: 15276 - protein, 7 aa, synthetic construct
SDFSRTY

SEQ ID NO: 15277 - protein, 7 aa, synthetic construct
KDVGNDD

SEQ ID NO: 15278 - protein, 7 aa, synthetic construct
NKRESKE

SEQ ID NO: 15279 - protein, 7 aa, synthetic construct
KIENEEL

SEQ ID NO: 15280 - protein, 7 aa, synthetic construct
WDIHHTL

SEQ ID NO: 15281 - protein, 7 aa, synthetic construct
DPHEKPR

SEQ ID NO: 15282 - protein, 7 aa, synthetic construct
QANMNVE

SEQ ID NO: 15283 - protein, 7 aa, synthetic construct
HHMRTMD

SEQ ID NO: 15284 - protein, 7 aa, synthetic construct
HTHDMNN

SEQ ID NO: 15285 - protein, 7 aa, synthetic construct
SQSLMVE

SEQ ID NO: 15286 - protein, 7 aa, synthetic construct
QIDPTTT

SEQ ID NO: 15287 - protein, 7 aa, synthetic construct
TDIKQEY

SEQ ID NO: 15288 - protein, 7 aa, synthetic construct
QGPVAHF

SEQ ID NO: 15289 - protein, 7 aa, synthetic construct
STPDPEG

SEQ ID NO: 15290 - protein, 7 aa, synthetic construct
LPWGTPN

SEQ ID NO: 15291 - protein, 7 aa, synthetic construct
SMQEQDV

SEQ ID NO: 15292 - protein, 7 aa, synthetic construct
DAGSHVV

SEQ ID NO: 15293 - protein, 7 aa, synthetic construct
AESENQE

SEQ ID NO: 15294 - protein, 7 aa, synthetic construct
QMDVAMK

SEQ ID NO: 15295 - protein, 7 aa, synthetic construct
TDTFNDE

SEQ ID NO: 15296 - protein, 7 aa, synthetic construct
YVEYSVK

SEQ ID NO: 15297 - protein, 7 aa, synthetic construct
PAEFKMM

SEQ ID NO: 15298 - protein, 7 aa, synthetic construct
LEKRVYQ

SEQ ID NO: 15299 - protein, 7 aa, synthetic construct
GLYPAVQ

SEQ ID NO: 15300 - protein, 7 aa, synthetic construct
ENARPIK

SEQ ID NO: 15301 - protein, 7 aa, synthetic construct
EFVDATK

SEQ ID NO: 15302 - protein, 7 aa, synthetic construct
VFAVERT

SEQ ID NO: 15303 - protein, 7 aa, synthetic construct
GNMDDMG

SEQ ID NO: 15304 - protein, 7 aa, synthetic construct
VTHQDKF

SEQ ID NO: 15305 - protein, 7 aa, synthetic construct
VNQPVAW

SEQ ID NO: 15306 - protein, 7 aa, synthetic construct
WTNEAAT

SEQ ID NO: 15307 - protein, 7 aa, synthetic construct
QMDHMDD

SEQ ID NO: 15308 - protein, 7 aa, synthetic construct
LEQPHLV

SEQ ID NO: 15309 - protein, 7 aa, synthetic construct
EVPEFDG

SEQ ID NO: 15310 - protein, 7 aa, synthetic construct
HGDEGAG

SEQ ID NO: 15311 - protein, 7 aa, synthetic construct
CMADVCP

SEQ ID NO: 15312 - protein, 7 aa, synthetic construct
KSDHDSE

SEQ ID NO: 15313 - protein, 7 aa, synthetic construct
MVEDADY

SEQ ID NO: 15314 - protein, 7 aa, synthetic construct
PDMTHLS

SEQ ID NO: 15315 - protein, 7 aa, synthetic construct
VKNPDNH

SEQ ID NO: 15316 - protein, 7 aa, synthetic construct
MVEKVVV

SEQ ID NO: 15317 - protein, 7 aa, synthetic construct
PTLLEND

SEQ ID NO: 15318 - protein, 7 aa, synthetic construct
KYVHGQS

SEQ ID NO: 15319 - protein, 7 aa, synthetic construct
LHRVSFD

SEQ ID NO: 15320 - protein, 7 aa, synthetic construct
DFQSIPE

SEQ ID NO: 15321 - protein, 7 aa, synthetic construct
QNVNAPQ

SEQ ID NO: 15322 - protein, 7 aa, synthetic construct
QGVEAEN

SEQ ID NO: 15323 - protein, 7 aa, synthetic construct
LTKFIPQ

SEQ ID NO: 15324 - protein, 7 aa, synthetic construct
NSFGRHA

SEQ ID NO: 15325 - protein, 7 aa, synthetic construct
AEWENIA

SEQ ID NO: 15326 - protein, 7 aa, synthetic construct
FEFKSSI

SEQ ID NO: 15327 - protein, 7 aa, synthetic construct
AFHANAL

SEQ ID NO: 15328 - protein, 7 aa, synthetic construct
QAMGSVC

SEQ ID NO: 15329 - protein, 7 aa, synthetic construct
ENGDHPF

SEQ ID NO: 15330 - protein, 7 aa, synthetic construct
REEHSLP

SEQ ID NO: 15331 - protein, 7 aa, synthetic construct
SYAAQQT

SEQ ID NO: 15332 - protein, 7 aa, synthetic construct
TEQMPTV

SEQ ID NO: 15333 - protein, 7 aa, synthetic construct
HDNFNSV

SEQ ID NO: 15334 - protein, 7 aa, synthetic construct
AGGRAQM

SEQ ID NO: 15335 - protein, 7 aa, synthetic construct
SIQEKIM

SEQ ID NO: 15336 - protein, 7 aa, synthetic construct
EGMGAYP

SEQ ID NO: 15337 - protein, 7 aa, synthetic construct
PDKHEHT

SEQ ID NO: 15338 - protein, 7 aa, synthetic construct
VYASRAV

SEQ ID NO: 15339 - protein, 7 aa, synthetic construct
TSTGWEP

SEQ ID NO: 15340 - protein, 7 aa, synthetic construct
HAAGPSP

SEQ ID NO: 15341 - protein, 7 aa, synthetic construct
EYMHHTP

SEQ ID NO: 15342 - protein, 7 aa, synthetic construct
AGAPNVV

SEQ ID NO: 15343 - protein, 7 aa, synthetic construct
QYAPKQH

SEQ ID NO: 15344 - protein, 7 aa, synthetic construct
GQFDTNM

SEQ ID NO: 15345 - protein, 7 aa, synthetic construct
YKGNFQF

SEQ ID NO: 15346 - protein, 7 aa, synthetic construct
DTMVGVP

SEQ ID NO: 15347 - protein, 7 aa, synthetic construct
SPKLHYT

SEQ ID NO: 15348 - protein, 7 aa, synthetic construct
GPPTVDK

SEQ ID NO: 15349 - protein, 7 aa, synthetic construct
RPLIATE

SEQ ID NO: 15350 - protein, 7 aa, synthetic construct
GFVQSRN

SEQ ID NO: 15351 - protein, 7 aa, synthetic construct
SPNDNVD

SEQ ID NO: 15352 - protein, 7 aa, synthetic construct
SIQVMQH

SEQ ID NO: 15353 - protein, 7 aa, synthetic construct
NFVISGH

SEQ ID NO: 15354 - protein, 7 aa, synthetic construct
SFKGLPQ

SEQ ID NO: 15355 - protein, 7 aa, synthetic construct
VHHSQQI

SEQ ID NO: 15356 - protein, 7 aa, synthetic construct
DSWTDEK

SEQ ID NO: 15357 - protein, 7 aa, synthetic construct
TELKENK

SEQ ID NO: 15358 - protein, 7 aa, synthetic construct
SVTAHLI

SEQ ID NO: 15359 - protein, 7 aa, synthetic construct
KKPDLWS

SEQ ID NO: 15360 - protein, 7 aa, synthetic construct
SEWPADL

SEQ ID NO: 15361 - protein, 7 aa, synthetic construct
WIREISE

SEQ ID NO: 15362 - protein, 7 aa, synthetic construct
DSNAKVK

SEQ ID NO: 15363 - protein, 7 aa, synthetic construct
FDTNGRP

SEQ ID NO: 15364 - protein, 7 aa, synthetic construct
IMEMDKK

SEQ ID NO: 15365 - protein, 7 aa, synthetic construct
YAFSDVR

SEQ ID NO: 15366 - protein, 7 aa, synthetic construct
IIKYHSD

SEQ ID NO: 15367 - protein, 7 aa, synthetic construct
DHHVLGP

SEQ ID NO: 15368 - protein, 7 aa, synthetic construct
HQHTELS

SEQ ID NO: 15369 - protein, 7 aa, synthetic construct
TQFGQDD

SEQ ID NO: 15370 - protein, 7 aa, synthetic construct
GWENTEA

SEQ ID NO: 15371 - protein, 7 aa, synthetic construct
ALPAARY

SEQ ID NO: 15372 - protein, 7 aa, synthetic construct
TLAPDDF

SEQ ID NO: 15373 - protein, 7 aa, synthetic construct
DFNSPRS

SEQ ID NO: 15374 - protein, 7 aa, synthetic construct
PVDDPLR

SEQ ID NO: 15375 - protein, 7 aa, synthetic construct
GLTMQPI

SEQ ID NO: 15376 - protein, 7 aa, synthetic construct
GDPNNSG

SEQ ID NO: 15377 - protein, 7 aa, synthetic construct
TIAIVQD

SEQ ID NO: 15378 - protein, 7 aa, synthetic construct
NPAFQPQ

SEQ ID NO: 15379 - protein, 7 aa, synthetic construct
HNHAPVN

SEQ ID NO: 15380 - protein, 7 aa, synthetic construct
TQDWNNV

SEQ ID NO: 15381 - protein, 7 aa, synthetic construct
MSANPFD

SEQ ID NO: 15382 - protein, 7 aa, synthetic construct
VANHQLY

SEQ ID NO: 15383 - protein, 7 aa, synthetic construct
NESDFQP

SEQ ID NO: 15384 - protein, 7 aa, synthetic construct
AKMTTNW

SEQ ID NO: 15385 - protein, 7 aa, synthetic construct
ELTPNTE

SEQ ID NO: 15386 - protein, 7 aa, synthetic construct
SSAPVDM

SEQ ID NO: 15387 - protein, 7 aa, synthetic construct
MWPKDEA

SEQ ID NO: 15388 - protein, 7 aa, synthetic construct
KEEGEFT

SEQ ID NO: 15389 - protein, 7 aa, synthetic construct
NIATMHI

SEQ ID NO: 15390 - protein, 7 aa, synthetic construct
KTLVTSP

SEQ ID NO: 15391 - protein, 7 aa, synthetic construct
ADDGESD

SEQ ID NO: 15392 - protein, 7 aa, synthetic construct
HEPPNQD

SEQ ID NO: 15393 - protein, 7 aa, synthetic construct
EDPKTGW

SEQ ID NO: 15394 - protein, 7 aa, synthetic construct
EQNLHSV

SEQ ID NO: 15395 - protein, 7 aa, synthetic construct
WKGLFDD

SEQ ID NO: 15396 - protein, 7 aa, synthetic construct
KNIMGHG

SEQ ID NO: 15397 - protein, 7 aa, synthetic construct
QIHHDDQ

SEQ ID NO: 15398 - protein, 7 aa, synthetic construct
HSYGGPY

SEQ ID NO: 15399 - protein, 7 aa, synthetic construct
NWTKKQE

SEQ ID NO: 15400 - protein, 7 aa, synthetic construct
KVLHSNS

SEQ ID NO: 15401 - protein, 7 aa, synthetic construct
PTFAEIP

SEQ ID NO: 15402 - protein, 7 aa, synthetic construct
PFETYNG

SEQ ID NO: 15403 - protein, 7 aa, synthetic construct
QPMINTI

SEQ ID NO: 15404 - protein, 7 aa, synthetic construct
FTKMEIE

SEQ ID NO: 15405 - protein, 7 aa, synthetic construct
TRTMYME

SEQ ID NO: 15406 - protein, 7 aa, synthetic construct
PEFHKVI

SEQ ID NO: 15407 - protein, 7 aa, synthetic construct
YMSDSDF

SEQ ID NO: 15408 - protein, 7 aa, synthetic construct
RLQLDAL

SEQ ID NO: 15409 - protein, 7 aa, synthetic construct
AIIMGED

SEQ ID NO: 15410 - protein, 7 aa, synthetic construct
MAGEVGE

SEQ ID NO: 15411 - protein, 7 aa, synthetic construct
VNSVLTV

SEQ ID NO: 15412 - protein, 7 aa, synthetic construct
GVSYEPR

SEQ ID NO: 15413 - protein, 7 aa, synthetic construct
LVKRLDN

SEQ ID NO: 15414 - protein, 7 aa, synthetic construct
QTRVGIV

SEQ ID NO: 15415 - protein, 7 aa, synthetic construct
WEKIAQK

SEQ ID NO: 15416 - protein, 7 aa, synthetic construct
SLSDELS

SEQ ID NO: 15417 - protein, 7 aa, synthetic construct
KQHEDHH

SEQ ID NO: 15418 - protein, 7 aa, synthetic construct
IGIILRA

SEQ ID NO: 15419 - protein, 7 aa, synthetic construct
DFAGLEA

SEQ ID NO: 15420 - protein, 7 aa, synthetic construct
FGNPKLV

SEQ ID NO: 15421 - protein, 7 aa, synthetic construct
GAPSIDA

SEQ ID NO: 15422 - protein, 7 aa, synthetic construct
SKVNQFY

SEQ ID NO: 15423 - protein, 7 aa, synthetic construct
WQTPVEE

SEQ ID NO: 15424 - protein, 7 aa, synthetic construct
TAKEPID

SEQ ID NO: 15425 - protein, 7 aa, synthetic construct
QMDHDIV

SEQ ID NO: 15426 - protein, 7 aa, synthetic construct
GTSHHMN

SEQ ID NO: 15427 - protein, 7 aa, synthetic construct
IPSMGWD

SEQ ID NO: 15428 - protein, 7 aa, synthetic construct
AYAQFSE

SEQ ID NO: 15429 - protein, 7 aa, synthetic construct
QMGYHHA

SEQ ID NO: 15430 - protein, 7 aa, synthetic construct
LFEATAS

SEQ ID NO: 15431 - protein, 7 aa, synthetic construct
TRQAHNQ

SEQ ID NO: 15432 - protein, 7 aa, synthetic construct
EFAERPT

SEQ ID NO: 15433 - protein, 7 aa, synthetic construct
LQTDQFL

SEQ ID NO: 15434 - protein, 7 aa, synthetic construct
YRGFQHA

SEQ ID NO: 15435 - protein, 7 aa, synthetic construct
PHDQAPE

SEQ ID NO: 15436 - protein, 7 aa, synthetic construct
DSALITA

SEQ ID NO: 15437 - protein, 7 aa, synthetic construct
PYVDANA

SEQ ID NO: 15438 - protein, 7 aa, synthetic construct
NANSDVI

SEQ ID NO: 15439 - protein, 7 aa, synthetic construct
QIDQVLY

SEQ ID NO: 15440 - protein, 7 aa, synthetic construct
MWDAEAS

SEQ ID NO: 15441 - protein, 7 aa, synthetic construct
HDLVKKM

SEQ ID NO: 15442 - protein, 7 aa, synthetic construct
GPNIQVN

SEQ ID NO: 15443 - protein, 7 aa, synthetic construct
VPMPIKM

SEQ ID NO: 15444 - protein, 7 aa, synthetic construct
GKKENLH

SEQ ID NO: 15445 - protein, 7 aa, synthetic construct
NEHETET

SEQ ID NO: 15446 - protein, 7 aa, synthetic construct
RVPDGED

SEQ ID NO: 15447 - protein, 7 aa, synthetic construct
DNDDSTY

SEQ ID NO: 15448 - protein, 7 aa, synthetic construct
IATEGHG

SEQ ID NO: 15449 - protein, 7 aa, synthetic construct
EKPYWEP

SEQ ID NO: 15450 - protein, 7 aa, synthetic construct
TQENITV

SEQ ID NO: 15451 - protein, 7 aa, synthetic construct
EETAQVH

SEQ ID NO: 15452 - protein, 7 aa, synthetic construct
SWIGTAE

SEQ ID NO: 15453 - protein, 7 aa, synthetic construct
HYQMTIE

SEQ ID NO: 15454 - protein, 7 aa, synthetic construct
MLRPAEH

SEQ ID NO: 15455 - protein, 7 aa, synthetic construct
KMEDNSD

SEQ ID NO: 15456 - protein, 7 aa, synthetic construct
MERKNYS

SEQ ID NO: 15457 - protein, 7 aa, synthetic construct
VVIENQV

SEQ ID NO: 15458 - protein, 7 aa, synthetic construct
EHPQQVD

SEQ ID NO: 15459 - protein, 7 aa, synthetic construct
PIIGTMA

SEQ ID NO: 15460 - protein, 7 aa, synthetic construct
TSINTLQ

SEQ ID NO: 15461 - protein, 7 aa, synthetic construct
TIHQHAK

SEQ ID NO: 15462 - protein, 7 aa, synthetic construct
WINIEIE

SEQ ID NO: 15463 - protein, 7 aa, synthetic construct
PNLETMG

SEQ ID NO: 15464 - protein, 7 aa, synthetic construct
PAVLQTS

SEQ ID NO: 15465 - protein, 7 aa, synthetic construct
GFEHPVT

SEQ ID NO: 15466 - protein, 7 aa, synthetic construct
EAMRAVL

SEQ ID NO: 15467 - protein, 7 aa, synthetic construct
NFDVKNN

SEQ ID NO: 15468 - protein, 7 aa, synthetic construct
YGVMRPQ

SEQ ID NO: 15469 - protein, 7 aa, synthetic construct
HPDAYHE

SEQ ID NO: 15470 - protein, 7 aa, synthetic construct
YILPKVG

SEQ ID NO: 15471 - protein, 7 aa, synthetic construct
DIPHIAP

SEQ ID NO: 15472 - protein, 7 aa, synthetic construct
AGNIQHI

SEQ ID NO: 15473 - protein, 7 aa, synthetic construct
GGDSITR

SEQ ID NO: 15474 - protein, 7 aa, synthetic construct
FGMRTIV

SEQ ID NO: 15475 - protein, 7 aa, synthetic construct
QLDFNDI

SEQ ID NO: 15476 - protein, 7 aa, synthetic construct
PKGQLEA

SEQ ID NO: 15477 - protein, 7 aa, synthetic construct
FRPIDWE

SEQ ID NO: 15478 - protein, 7 aa, synthetic construct
WEIEAPQ

SEQ ID NO: 15479 - protein, 7 aa, synthetic construct
GEGHIYD

SEQ ID NO: 15480 - protein, 7 aa, synthetic construct
KIQPLWD

SEQ ID NO: 15481 - protein, 7 aa, synthetic construct
AYVPGDV

SEQ ID NO: 15482 - protein, 7 aa, synthetic construct
DPMDERG

SEQ ID NO: 15483 - protein, 7 aa, synthetic construct
PMANDEF

SEQ ID NO: 15484 - protein, 7 aa, synthetic construct
QIEQAVQ

SEQ ID NO: 15485 - protein, 7 aa, synthetic construct
MALTDDK

SEQ ID NO: 15486 - protein, 7 aa, synthetic construct
IRHNGHI

SEQ ID NO: 15487 - protein, 7 aa, synthetic construct
HVSQIIA

SEQ ID NO: 15488 - protein, 7 aa, synthetic construct
MPAPEGE

SEQ ID NO: 15489 - protein, 7 aa, synthetic construct
DEHNEKE

SEQ ID NO: 15490 - protein, 7 aa, synthetic construct
AFITSDK

SEQ ID NO: 15491 - protein, 7 aa, synthetic construct
FATEMAV

SEQ ID NO: 15492 - protein, 7 aa, synthetic construct
NFRTSNL

SEQ ID NO: 15493 - protein, 7 aa, synthetic construct
GEFIKEV

SEQ ID NO: 15494 - protein, 7 aa, synthetic construct
GSKEATQ

SEQ ID NO: 15495 - protein, 7 aa, synthetic construct
VFDVAMP

SEQ ID NO: 15496 - protein, 7 aa, synthetic construct
NYNQFGA

SEQ ID NO: 15497 - protein, 7 aa, synthetic construct
TQEEYDK

SEQ ID NO: 15498 - protein, 7 aa, synthetic construct
LQERYIT

SEQ ID NO: 15499 - protein, 7 aa, synthetic construct
GVRHDKI

SEQ ID NO: 15500 - protein, 7 aa, synthetic construct
DMQQNLL

SEQ ID NO: 15501 - protein, 7 aa, synthetic construct
DRKEELT

SEQ ID NO: 15502 - protein, 7 aa, synthetic construct
SKHYSAN

SEQ ID NO: 15503 - protein, 7 aa, synthetic construct
MALIQTA

SEQ ID NO: 15504 - protein, 7 aa, synthetic construct
NFVHDAR

SEQ ID NO: 15505 - protein, 7 aa, synthetic construct
AQSHQMF

SEQ ID NO: 15506 - protein, 7 aa, synthetic construct
QQAIQDD

SEQ ID NO: 15507 - protein, 7 aa, synthetic construct
AIFTGQD

SEQ ID NO: 15508 - protein, 7 aa, synthetic construct
VDNHQDW

SEQ ID NO: 15509 - protein, 7 aa, synthetic construct
MPVAISK

SEQ ID NO: 15510 - protein, 7 aa, synthetic construct
ETAEHLR

SEQ ID NO: 15511 - protein, 7 aa, synthetic construct
ASIATNF

SEQ ID NO: 15512 - protein, 7 aa, synthetic construct
TLEPLQK

SEQ ID NO: 15513 - protein, 7 aa, synthetic construct
SMHGMND

SEQ ID NO: 15514 - protein, 7 aa, synthetic construct
NQYEHPQ

SEQ ID NO: 15515 - protein, 7 aa, synthetic construct
MGDMDPS

SEQ ID NO: 15516 - protein, 7 aa, synthetic construct
QDNLLRS

SEQ ID NO: 15517 - protein, 7 aa, synthetic construct
THRNYIE

SEQ ID NO: 15518 - protein, 7 aa, synthetic construct
TAQISMI

SEQ ID NO: 15519 - protein, 7 aa, synthetic construct
LDEVDFE

SEQ ID NO: 15520 - protein, 7 aa, synthetic construct
KEPYDQS

SEQ ID NO: 15521 - protein, 7 aa, synthetic construct
HPIQERK

SEQ ID NO: 15522 - protein, 7 aa, synthetic construct
AFYGMKA

SEQ ID NO: 15523 - protein, 7 aa, synthetic construct
GGNVGIT

SEQ ID NO: 15524 - protein, 7 aa, synthetic construct
HRQLHIG

SEQ ID NO: 15525 - protein, 7 aa, synthetic construct
VGENASS

SEQ ID NO: 15526 - protein, 7 aa, synthetic construct
VVHGLLV

SEQ ID NO: 15527 - protein, 7 aa, synthetic construct
NHDDDGV

SEQ ID NO: 15528 - protein, 7 aa, synthetic construct
DGIAIDF

SEQ ID NO: 15529 - protein, 7 aa, synthetic construct
DDSTPTY

SEQ ID NO: 15530 - protein, 7 aa, synthetic construct
SHDPVNF

SEQ ID NO: 15531 - protein, 7 aa, synthetic construct
TNREWDG

SEQ ID NO: 15532 - protein, 7 aa, synthetic construct
PQIEDFA

SEQ ID NO: 15533 - protein, 7 aa, synthetic construct
VQLGAMY

SEQ ID NO: 15534 - protein, 7 aa, synthetic construct
FPPVLDF

SEQ ID NO: 15535 - protein, 7 aa, synthetic construct
GRSFLKD

SEQ ID NO: 15536 - protein, 7 aa, synthetic construct
SLDKFQT

SEQ ID NO: 15537 - protein, 7 aa, synthetic construct
KFNDDID

SEQ ID NO: 15538 - protein, 7 aa, synthetic construct
HPQLPET

SEQ ID NO: 15539 - protein, 7 aa, synthetic construct
HNTEYQN

SEQ ID NO: 15540 - protein, 7 aa, synthetic construct
ATEGKGA

SEQ ID NO: 15541 - protein, 7 aa, synthetic construct
PNHAYQT

SEQ ID NO: 15542 - protein, 7 aa, synthetic construct
DDHREQH

SEQ ID NO: 15543 - protein, 7 aa, synthetic construct
ATGEENY

SEQ ID NO: 15544 - protein, 7 aa, synthetic construct
HIGGLST

SEQ ID NO: 15545 - protein, 7 aa, synthetic construct
ESVQAHE

SEQ ID NO: 15546 - protein, 7 aa, synthetic construct
FRDSIPL

SEQ ID NO: 15547 - protein, 7 aa, synthetic construct
GDQRDFY

SEQ ID NO: 15548 - protein, 7 aa, synthetic construct
KWNTEKA

SEQ ID NO: 15549 - protein, 7 aa, synthetic construct
MDGVERV

SEQ ID NO: 15550 - protein, 7 aa, synthetic construct
IGTPDME

SEQ ID NO: 15551 - protein, 7 aa, synthetic construct
IMHIQDH

SEQ ID NO: 15552 - protein, 7 aa, synthetic construct
FAYVTHD

SEQ ID NO: 15553 - protein, 7 aa, synthetic construct
TEIEKQN

SEQ ID NO: 15554 - protein, 7 aa, synthetic construct
VQDGHDA

SEQ ID NO: 15555 - protein, 7 aa, synthetic construct
QMYPDIE

SEQ ID NO: 15556 - protein, 7 aa, synthetic construct
EPTPIGP

SEQ ID NO: 15557 - protein, 7 aa, synthetic construct
KKDGKVS

SEQ ID NO: 15558 - protein, 7 aa, synthetic construct
GNQFQDI

SEQ ID NO: 15559 - protein, 7 aa, synthetic construct
GEWHPSE

SEQ ID NO: 15560 - protein, 7 aa, synthetic construct
SFSEFKV

SEQ ID NO: 15561 - protein, 7 aa, synthetic construct
VTRNQGL

SEQ ID NO: 15562 - protein, 7 aa, synthetic construct
YEGEPGS

SEQ ID NO: 15563 - protein, 7 aa, synthetic construct
QIRVTNM

SEQ ID NO: 15564 - protein, 7 aa, synthetic construct
LIGYNLA

SEQ ID NO: 15565 - protein, 7 aa, synthetic construct
WETNTQE

SEQ ID NO: 15566 - protein, 7 aa, synthetic construct
FEIDAQY

SEQ ID NO: 15567 - protein, 7 aa, synthetic construct
GQVTIIT

SEQ ID NO: 15568 - protein, 7 aa, synthetic construct
FAGHGRA

SEQ ID NO: 15569 - protein, 7 aa, synthetic construct
YGMYTEL

SEQ ID NO: 15570 - protein, 7 aa, synthetic construct
EERRLHH

SEQ ID NO: 15571 - protein, 7 aa, synthetic construct
HPPNEYR

SEQ ID NO: 15572 - protein, 7 aa, synthetic construct
MHPQKAI

SEQ ID NO: 15573 - protein, 7 aa, synthetic construct
HYHLDGE

SEQ ID NO: 15574 - protein, 7 aa, synthetic construct
GHNIVMV

SEQ ID NO: 15575 - protein, 7 aa, synthetic construct
NPSVRLY

SEQ ID NO: 15576 - protein, 7 aa, synthetic construct
DVDWNPS

SEQ ID NO: 15577 - protein, 7 aa, synthetic construct
QPPMYMN

SEQ ID NO: 15578 - protein, 7 aa, synthetic construct
GQPGEAP

SEQ ID NO: 15579 - protein, 7 aa, synthetic construct
HDQELTH

SEQ ID NO: 15580 - protein, 7 aa, synthetic construct
QKKVEHT

SEQ ID NO: 15581 - protein, 7 aa, synthetic construct
SQVFSSS

SEQ ID NO: 15582 - protein, 7 aa, synthetic construct
TSMMNTV

SEQ ID NO: 15583 - protein, 7 aa, synthetic construct
YQEYATG

SEQ ID NO: 15584 - protein, 7 aa, synthetic construct
PPNDSQD

SEQ ID NO: 15585 - protein, 7 aa, synthetic construct
REVELAI

SEQ ID NO: 15586 - protein, 7 aa, synthetic construct
IAVLNTP

SEQ ID NO: 15587 - protein, 7 aa, synthetic construct
GIVEGGW

SEQ ID NO: 15588 - protein, 7 aa, synthetic construct
GIHKNFI

SEQ ID NO: 15589 - protein, 7 aa, synthetic construct
DQTEDTG

SEQ ID NO: 15590 - protein, 7 aa, synthetic construct
MSQFKGN

SEQ ID NO: 15591 - protein, 7 aa, synthetic construct
DFESDKI

SEQ ID NO: 15592 - protein, 7 aa, synthetic construct
MGILEGD

SEQ ID NO: 15593 - protein, 7 aa, synthetic construct
EDIANLR

SEQ ID NO: 15594 - protein, 7 aa, synthetic construct
EDHDARM

SEQ ID NO: 15595 - protein, 7 aa, synthetic construct
LVQESEG

SEQ ID NO: 15596 - protein, 7 aa, synthetic construct
FNHQRIV

SEQ ID NO: 15597 - protein, 7 aa, synthetic construct
WTDFEKE

SEQ ID NO: 15598 - protein, 7 aa, synthetic construct
APDYNMA

SEQ ID NO: 15599 - protein, 7 aa, synthetic construct
ESADEYA

SEQ ID NO: 15600 - protein, 7 aa, synthetic construct
SWKTDNQ

SEQ ID NO: 15601 - protein, 7 aa, synthetic construct
NFLSGNS

SEQ ID NO: 15602 - protein, 7 aa, synthetic construct
YDTEQMN

SEQ ID NO: 15603 - protein, 7 aa, synthetic construct
LKDSFLI

SEQ ID NO: 15604 - protein, 7 aa, synthetic construct
TVTVDNI

SEQ ID NO: 15605 - protein, 7 aa, synthetic construct
MIHLHPS

SEQ ID NO: 15606 - protein, 7 aa, synthetic construct
IEHDVLV

SEQ ID NO: 15607 - protein, 7 aa, synthetic construct
TDDQWKH

SEQ ID NO: 15608 - protein, 7 aa, synthetic construct
RFSELLP

SEQ ID NO: 15609 - protein, 7 aa, synthetic construct
IWKPAEE

SEQ ID NO: 15610 - protein, 7 aa, synthetic construct
GNRAWDV

SEQ ID NO: 15611 - protein, 7 aa, synthetic construct
PEQGDDT

SEQ ID NO: 15612 - protein, 7 aa, synthetic construct
SFGIPEM

SEQ ID NO: 15613 - protein, 7 aa, synthetic construct
SHQYGEN

SEQ ID NO: 15614 - protein, 7 aa, synthetic construct
DKAWSET

SEQ ID NO: 15615 - protein, 7 aa, synthetic construct
QNPTEQN

SEQ ID NO: 15616 - protein, 7 aa, synthetic construct
MPSIMVP

SEQ ID NO: 15617 - protein, 7 aa, synthetic construct
NLSAKLL

SEQ ID NO: 15618 - protein, 7 aa, synthetic construct
MDGWMKG

SEQ ID NO: 15619 - protein, 7 aa, synthetic construct
QNAGTDL

SEQ ID NO: 15620 - protein, 7 aa, synthetic construct
NIVDQAR

SEQ ID NO: 15621 - protein, 7 aa, synthetic construct
GSDPQWV

SEQ ID NO: 15622 - protein, 7 aa, synthetic construct
NLDQIQS

SEQ ID NO: 15623 - protein, 7 aa, synthetic construct
MWNTRDP

SEQ ID NO: 15624 - protein, 7 aa, synthetic construct
TTEMNLK

SEQ ID NO: 15625 - protein, 7 aa, synthetic construct
WDAEHDN

SEQ ID NO: 15626 - protein, 7 aa, synthetic construct
PYHMNGE

SEQ ID NO: 15627 - protein, 7 aa, synthetic construct
MHQHQVH

SEQ ID NO: 15628 - protein, 7 aa, synthetic construct
EGENNKL

SEQ ID NO: 15629 - protein, 7 aa, synthetic construct
GFDAEGE

SEQ ID NO: 15630 - protein, 7 aa, synthetic construct
QSERYGN

SEQ ID NO: 15631 - protein, 7 aa, synthetic construct
EQWENHI

SEQ ID NO: 15632 - protein, 7 aa, synthetic construct
YNHVNMR

SEQ ID NO: 15633 - protein, 7 aa, synthetic construct
TLKYDER

SEQ ID NO: 15634 - protein, 7 aa, synthetic construct
IYEWHPA

SEQ ID NO: 15635 - protein, 7 aa, synthetic construct
TEDIAYQ

SEQ ID NO: 15636 - protein, 7 aa, synthetic construct
FVYSKVD

SEQ ID NO: 15637 - protein, 7 aa, synthetic construct
QDVGWKD

SEQ ID NO: 15638 - protein, 7 aa, synthetic construct
PHLAPMK

SEQ ID NO: 15639 - protein, 7 aa, synthetic construct
SDVLRGI

SEQ ID NO: 15640 - protein, 7 aa, synthetic construct
GGNVEYY

SEQ ID NO: 15641 - protein, 7 aa, synthetic construct
VNEIDSI

SEQ ID NO: 15642 - protein, 7 aa, synthetic construct
EIGPQSS

SEQ ID NO: 15643 - protein, 7 aa, synthetic construct
DTGEVGM

SEQ ID NO: 15644 - protein, 7 aa, synthetic construct
AADGMGV

SEQ ID NO: 15645 - protein, 7 aa, synthetic construct
EQSKKFM

SEQ ID NO: 15646 - protein, 7 aa, synthetic construct
LEGAPTK

SEQ ID NO: 15647 - protein, 7 aa, synthetic construct
PEEQETR

SEQ ID NO: 15648 - protein, 7 aa, synthetic construct
GYQEYEV

SEQ ID NO: 15649 - protein, 7 aa, synthetic construct
VLQASID

SEQ ID NO: 15650 - protein, 7 aa, synthetic construct
AEYHDHH

SEQ ID NO: 15651 - protein, 7 aa, synthetic construct
IEYHNTL

SEQ ID NO: 15652 - protein, 7 aa, synthetic construct
VTMVMKQ

SEQ ID NO: 15653 - protein, 7 aa, synthetic construct
RYPSIEY

SEQ ID NO: 15654 - protein, 7 aa, synthetic construct
GESIEYF

SEQ ID NO: 15655 - protein, 7 aa, synthetic construct
TEFMQNH

SEQ ID NO: 15656 - protein, 7 aa, synthetic construct
WTERMNK

SEQ ID NO: 15657 - protein, 7 aa, synthetic construct
HIGSTLL

SEQ ID NO: 15658 - protein, 7 aa, synthetic construct
SVFQEGH

SEQ ID NO: 15659 - protein, 7 aa, synthetic construct
DAGWEPD

SEQ ID NO: 15660 - protein, 7 aa, synthetic construct
DEPAWPF

SEQ ID NO: 15661 - protein, 7 aa, synthetic construct
QHFSTPS

SEQ ID NO: 15662 - protein, 7 aa, synthetic construct
MDTEWSM

SEQ ID NO: 15663 - protein, 7 aa, synthetic construct
ENMQFEE

SEQ ID NO: 15664 - protein, 7 aa, synthetic construct
DAYHPEF

SEQ ID NO: 15665 - protein, 7 aa, synthetic construct
GLDPKFL

SEQ ID NO: 15666 - protein, 7 aa, synthetic construct
TVMPGQD

SEQ ID NO: 15667 - protein, 7 aa, synthetic construct
NLESKFI

SEQ ID NO: 15668 - protein, 7 aa, synthetic construct
QPEPFRD

SEQ ID NO: 15669 - protein, 7 aa, synthetic construct
LPQGHIG

SEQ ID NO: 15670 - protein, 7 aa, synthetic construct
MLTHTHM

SEQ ID NO: 15671 - protein, 7 aa, synthetic construct
GGAEWSD

SEQ ID NO: 15672 - protein, 7 aa, synthetic construct
QGMQPRL

SEQ ID NO: 15673 - protein, 7 aa, synthetic construct
LTVNGLD

SEQ ID NO: 15674 - protein, 7 aa, synthetic construct
LVQEEFS

SEQ ID NO: 15675 - protein, 7 aa, synthetic construct
NNDIHNG

SEQ ID NO: 15676 - protein, 7 aa, synthetic construct
ESEMMVA

SEQ ID NO: 15677 - protein, 7 aa, synthetic construct
YSSTFSM

SEQ ID NO: 15678 - protein, 7 aa, synthetic construct
VAIRPTN

SEQ ID NO: 15679 - protein, 7 aa, synthetic construct
NALKHPD

SEQ ID NO: 15680 - protein, 7 aa, synthetic construct
GHQTEFE

SEQ ID NO: 15681 - protein, 7 aa, synthetic construct
QGVVDAY

SEQ ID NO: 15682 - protein, 7 aa, synthetic construct
LATEDRN

SEQ ID NO: 15683 - protein, 7 aa, synthetic construct
STPQEEN

SEQ ID NO: 15684 - protein, 7 aa, synthetic construct
QGSFYPM

SEQ ID NO: 15685 - protein, 7 aa, synthetic construct
AGNSGDH

SEQ ID NO: 15686 - protein, 7 aa, synthetic construct
RGDDIWP

SEQ ID NO: 15687 - protein, 7 aa, synthetic construct
NYEANEP

SEQ ID NO: 15688 - protein, 7 aa, synthetic construct
FESVWTD

SEQ ID NO: 15689 - protein, 7 aa, synthetic construct
SQHNIEE

SEQ ID NO: 15690 - protein, 7 aa, synthetic construct
GMHEVFH

SEQ ID NO: 15691 - protein, 7 aa, synthetic construct
RLEKNWA

SEQ ID NO: 15692 - protein, 7 aa, synthetic construct
GVNRQQW

SEQ ID NO: 15693 - protein, 7 aa, synthetic construct
YMTKVAY

SEQ ID NO: 15694 - protein, 7 aa, synthetic construct
VTVRDTN

SEQ ID NO: 15695 - protein, 7 aa, synthetic construct
MTEGLIE

SEQ ID NO: 15696 - protein, 7 aa, synthetic construct
DIQIMTD

SEQ ID NO: 15697 - protein, 7 aa, synthetic construct
EDETYLV

SEQ ID NO: 15698 - protein, 7 aa, synthetic construct
ADTGAGW

SEQ ID NO: 15699 - protein, 7 aa, synthetic construct
EYYSTKE

SEQ ID NO: 15700 - protein, 7 aa, synthetic construct
PESHTDN

SEQ ID NO: 15701 - protein, 7 aa, synthetic construct
LQDFTGD

SEQ ID NO: 15702 - protein, 7 aa, synthetic construct
GRHSMEN

SEQ ID NO: 15703 - protein, 7 aa, synthetic construct
EMDVDRL

SEQ ID NO: 15704 - protein, 7 aa, synthetic construct
IEKILQD

SEQ ID NO: 15705 - protein, 7 aa, synthetic construct
DATNEAA

SEQ ID NO: 15706 - protein, 7 aa, synthetic construct
HVISQDQ

SEQ ID NO: 15707 - protein, 7 aa, synthetic construct
FYHEPDM

SEQ ID NO: 15708 - protein, 7 aa, synthetic construct
FTRDKGS

SEQ ID NO: 15709 - protein, 7 aa, synthetic construct
GPATILE

SEQ ID NO: 15710 - protein, 7 aa, synthetic construct
NLAADNA

SEQ ID NO: 15711 - protein, 7 aa, synthetic construct
NAVRVEH

SEQ ID NO: 15712 - protein, 7 aa, synthetic construct
VTAMEDT

SEQ ID NO: 15713 - protein, 7 aa, synthetic construct
HQATFQM

SEQ ID NO: 15714 - protein, 7 aa, synthetic construct
ESPHNDD

SEQ ID NO: 15715 - protein, 7 aa, synthetic construct
NPMEEFA

SEQ ID NO: 15716 - protein, 7 aa, synthetic construct
GHELEAV

SEQ ID NO: 15717 - protein, 7 aa, synthetic construct
HGFIHPD

SEQ ID NO: 15718 - protein, 7 aa, synthetic construct
NLSPLHS

SEQ ID NO: 15719 - protein, 7 aa, synthetic construct
QADDVGW

SEQ ID NO: 15720 - protein, 7 aa, synthetic construct
LNDTNQI

SEQ ID NO: 15721 - protein, 7 aa, synthetic construct
QHKLNLH

SEQ ID NO: 15722 - protein, 7 aa, synthetic construct
FARAHTS

SEQ ID NO: 15723 - protein, 7 aa, synthetic construct
YTRDDMT

SEQ ID NO: 15724 - protein, 7 aa, synthetic construct
DSEHWDP

SEQ ID NO: 15725 - protein, 7 aa, synthetic construct
DLPREQD

SEQ ID NO: 15726 - protein, 7 aa, synthetic construct
REHQTNM

SEQ ID NO: 15727 - protein, 7 aa, synthetic construct
DKGQEYR

SEQ ID NO: 15728 - protein, 7 aa, synthetic construct
YDHVVDI

SEQ ID NO: 15729 - protein, 7 aa, synthetic construct
KMVAEMV

SEQ ID NO: 15730 - protein, 7 aa, synthetic construct
MGDIGND

SEQ ID NO: 15731 - protein, 7 aa, synthetic construct
SSEKMVM

SEQ ID NO: 15732 - protein, 7 aa, synthetic construct
LIRGMPG

SEQ ID NO: 15733 - protein, 7 aa, synthetic construct
EVAHTPE

SEQ ID NO: 15734 - protein, 7 aa, synthetic construct
LFEDVDP

SEQ ID NO: 15735 - protein, 7 aa, synthetic construct
AMQNKEN

SEQ ID NO: 15736 - protein, 7 aa, synthetic construct
QPSRTEV

SEQ ID NO: 15737 - protein, 7 aa, synthetic construct
DAMATID

SEQ ID NO: 15738 - protein, 7 aa, synthetic construct
GEHHSNQ

SEQ ID NO: 15739 - protein, 7 aa, synthetic construct
KELNQQD

SEQ ID NO: 15740 - protein, 7 aa, synthetic construct
DSNKYEY

SEQ ID NO: 15741 - protein, 7 aa, synthetic construct
PGTALRL

SEQ ID NO: 15742 - protein, 7 aa, synthetic construct
DVTDTVA

SEQ ID NO: 15743 - protein, 7 aa, synthetic construct
MIDLPNG

SEQ ID NO: 15744 - protein, 7 aa, synthetic construct
PHILQEK

SEQ ID NO: 15745 - protein, 7 aa, synthetic construct
HTHINTY

SEQ ID NO: 15746 - protein, 7 aa, synthetic construct
ATVTRAE

SEQ ID NO: 15747 - protein, 7 aa, synthetic construct
KHSTHEK

SEQ ID NO: 15748 - protein, 7 aa, synthetic construct
ATSDDIR

SEQ ID NO: 15749 - protein, 7 aa, synthetic construct
EFPSMMS

SEQ ID NO: 15750 - protein, 7 aa, synthetic construct
AVNQRII

SEQ ID NO: 15751 - protein, 7 aa, synthetic construct
DWQPHID

SEQ ID NO: 15752 - protein, 7 aa, synthetic construct
EANNYKL

SEQ ID NO: 15753 - protein, 7 aa, synthetic construct
QHDWIVD

SEQ ID NO: 15754 - protein, 7 aa, synthetic construct
AIGINEA

SEQ ID NO: 15755 - protein, 7 aa, synthetic construct
ATVPIAV

SEQ ID NO: 15756 - protein, 7 aa, synthetic construct
GWTKSPL

SEQ ID NO: 15757 - protein, 7 aa, synthetic construct
VRKDWMQ

SEQ ID NO: 15758 - protein, 7 aa, synthetic construct
SSDAGIY

SEQ ID NO: 15759 - protein, 7 aa, synthetic construct
FWTHGND

SEQ ID NO: 15760 - protein, 7 aa, synthetic construct
DVKMMLP

SEQ ID NO: 15761 - protein, 7 aa, synthetic construct
NKVVYDR

SEQ ID NO: 15762 - protein, 7 aa, synthetic construct
FSSPLAN

SEQ ID NO: 15763 - protein, 7 aa, synthetic construct
IDVVDQA

SEQ ID NO: 15764 - protein, 7 aa, synthetic construct
RQVVPFT

SEQ ID NO: 15765 - protein, 7 aa, synthetic construct
EPEVSTF

SEQ ID NO: 15766 - protein, 7 aa, synthetic construct
NGVVIPL

SEQ ID NO: 15767 - protein, 7 aa, synthetic construct
GELWTPK

SEQ ID NO: 15768 - protein, 7 aa, synthetic construct
PFSMNGT

SEQ ID NO: 15769 - protein, 7 aa, synthetic construct
PIPAAAA

SEQ ID NO: 15770 - protein, 7 aa, synthetic construct
YHEMLNG

SEQ ID NO: 15771 - protein, 7 aa, synthetic construct
GPPGRHM

SEQ ID NO: 15772 - protein, 7 aa, synthetic construct
TSNPLVE

SEQ ID NO: 15773 - protein, 7 aa, synthetic construct
EVYDPEY

SEQ ID NO: 15774 - protein, 7 aa, synthetic construct
FEKIMLG

SEQ ID NO: 15775 - protein, 7 aa, synthetic construct
IDEQGPG

SEQ ID NO: 15776 - protein, 7 aa, synthetic construct
IRHDGYH

SEQ ID NO: 15777 - protein, 7 aa, synthetic construct
NRFNFES

SEQ ID NO: 15778 - protein, 7 aa, synthetic construct
NYNLMED

SEQ ID NO: 15779 - protein, 7 aa, synthetic construct
QASEGET

SEQ ID NO: 15780 - protein, 7 aa, synthetic construct
VESTEQI

SEQ ID NO: 15781 - protein, 7 aa, synthetic construct
HMEGAED

SEQ ID NO: 15782 - protein, 7 aa, synthetic construct
DPHHMIN

SEQ ID NO: 15783 - protein, 7 aa, synthetic construct
TMYTKHT

SEQ ID NO: 15784 - protein, 7 aa, synthetic construct
EVKAIHL

SEQ ID NO: 15785 - protein, 7 aa, synthetic construct
VVTGIDI

SEQ ID NO: 15786 - protein, 7 aa, synthetic construct
ELSGDGA

SEQ ID NO: 15787 - protein, 7 aa, synthetic construct
FIKDGHF

SEQ ID NO: 15788 - protein, 7 aa, synthetic construct
MHDDSAT

SEQ ID NO: 15789 - protein, 7 aa, synthetic construct
PAGHTAW

SEQ ID NO: 15790 - protein, 7 aa, synthetic construct
SSHFSVQ

SEQ ID NO: 15791 - protein, 7 aa, synthetic construct
IDFAYEV

SEQ ID NO: 15792 - protein, 7 aa, synthetic construct
MPSQDFR

SEQ ID NO: 15793 - protein, 7 aa, synthetic construct
PHQDGWV

SEQ ID NO: 15794 - protein, 7 aa, synthetic construct
WKPITNT

SEQ ID NO: 15795 - protein, 7 aa, synthetic construct
NHDDRLL

SEQ ID NO: 15796 - protein, 7 aa, synthetic construct
KFEEHGF

SEQ ID NO: 15797 - protein, 7 aa, synthetic construct
VVEDQSV

SEQ ID NO: 15798 - protein, 7 aa, synthetic construct
NAQMIRQ

SEQ ID NO: 15799 - protein, 7 aa, synthetic construct
HDIKEKR

SEQ ID NO: 15800 - protein, 7 aa, synthetic construct
WKEGSEY

SEQ ID NO: 15801 - protein, 7 aa, synthetic construct
TQDNQDD

SEQ ID NO: 15802 - protein, 7 aa, synthetic construct
TLQQEIV

SEQ ID NO: 15803 - protein, 7 aa, synthetic construct
RVVDNSA

SEQ ID NO: 15804 - protein, 7 aa, synthetic construct
MDMDGKT

SEQ ID NO: 15805 - protein, 7 aa, synthetic construct
LHLSDEF

SEQ ID NO: 15806 - protein, 7 aa, synthetic construct
PTEFRHG

SEQ ID NO: 15807 - protein, 7 aa, synthetic construct
KHKTNND

SEQ ID NO: 15808 - protein, 7 aa, synthetic construct
NDEMSHF

SEQ ID NO: 15809 - protein, 7 aa, synthetic construct
FGDLDQE

SEQ ID NO: 15810 - protein, 7 aa, synthetic construct
TQFDENN

SEQ ID NO: 15811 - protein, 7 aa, synthetic construct
PQYIGPQ

SEQ ID NO: 15812 - protein, 7 aa, synthetic construct
NNVIPIT

SEQ ID NO: 15813 - protein, 7 aa, synthetic construct
HMGSRVF

SEQ ID NO: 15814 - protein, 7 aa, synthetic construct
GEVHPEV

SEQ ID NO: 15815 - protein, 7 aa, synthetic construct
SFEAMSL

SEQ ID NO: 15816 - protein, 7 aa, synthetic construct
IGDEWKV

SEQ ID NO: 15817 - protein, 7 aa, synthetic construct
WESIMKG

SEQ ID NO: 15818 - protein, 7 aa, synthetic construct
MMGALNH

SEQ ID NO: 15819 - protein, 7 aa, synthetic construct
VTADAEH

SEQ ID NO: 15820 - protein, 7 aa, synthetic construct
KDEANHD

SEQ ID NO: 15821 - protein, 7 aa, synthetic construct
GVFTNPV

SEQ ID NO: 15822 - protein, 7 aa, synthetic construct
SINEEMS

SEQ ID NO: 15823 - protein, 7 aa, synthetic construct
VKPPHHW

SEQ ID NO: 15824 - protein, 7 aa, synthetic construct
YDKPQPW

SEQ ID NO: 15825 - protein, 7 aa, synthetic construct
IVFEKGI

SEQ ID NO: 15826 - protein, 7 aa, synthetic construct
MMGTESG

SEQ ID NO: 15827 - protein, 7 aa, synthetic construct
TRDIPEL

SEQ ID NO: 15828 - protein, 7 aa, synthetic construct
GNAFSYE

SEQ ID NO: 15829 - protein, 7 aa, synthetic construct
TTYIQDK

SEQ ID NO: 15830 - protein, 7 aa, synthetic construct
SGESEML

SEQ ID NO: 15831 - protein, 7 aa, synthetic construct
EDLGYMP

SEQ ID NO: 15832 - protein, 7 aa, synthetic construct
GFSNKGW

SEQ ID NO: 15833 - protein, 7 aa, synthetic construct
AAEMVDF

SEQ ID NO: 15834 - protein, 7 aa, synthetic construct
PIEKLTL

SEQ ID NO: 15835 - protein, 7 aa, synthetic construct
NMLRGIA

SEQ ID NO: 15836 - protein, 7 aa, synthetic construct
LMDKQEE

SEQ ID NO: 15837 - protein, 7 aa, synthetic construct
LPTDELQ

SEQ ID NO: 15838 - protein, 7 aa, synthetic construct
RPPQPFG

SEQ ID NO: 15839 - protein, 7 aa, synthetic construct
VKEDLYH

SEQ ID NO: 15840 - protein, 7 aa, synthetic construct
SMGLADH

SEQ ID NO: 15841 - protein, 7 aa, synthetic construct
RFQFTDP

SEQ ID NO: 15842 - protein, 7 aa, synthetic construct
LTDIDFA

SEQ ID NO: 15843 - protein, 7 aa, synthetic construct
ITTDNIP

SEQ ID NO: 15844 - protein, 7 aa, synthetic construct
QNTVRMF

SEQ ID NO: 15845 - protein, 7 aa, synthetic construct
YPEVWDH

SEQ ID NO: 15846 - protein, 7 aa, synthetic construct
KLALTEA

SEQ ID NO: 15847 - protein, 7 aa, synthetic construct
EEDQMIA

SEQ ID NO: 15848 - protein, 7 aa, synthetic construct
YSMTKAT

SEQ ID NO: 15849 - protein, 7 aa, synthetic construct
IEDQHYM

SEQ ID NO: 15850 - protein, 7 aa, synthetic construct
FNGGYAY

SEQ ID NO: 15851 - protein, 7 aa, synthetic construct
GISTMGK

SEQ ID NO: 15852 - protein, 7 aa, synthetic construct
AMDMNIK

SEQ ID NO: 15853 - protein, 7 aa, synthetic construct
VKQEDWQ

SEQ ID NO: 15854 - protein, 7 aa, synthetic construct
EHHNHAM

SEQ ID NO: 15855 - protein, 7 aa, synthetic construct
GMIDNGR

SEQ ID NO: 15856 - protein, 7 aa, synthetic construct
SSEPEKF

SEQ ID NO: 15857 - protein, 7 aa, synthetic construct
VQSMGIY

SEQ ID NO: 15858 - protein, 7 aa, synthetic construct
TGDYWKA

SEQ ID NO: 15859 - protein, 7 aa, synthetic construct
SSVVLTE

SEQ ID NO: 15860 - protein, 7 aa, synthetic construct
HKLYIEP

SEQ ID NO: 15861 - protein, 7 aa, synthetic construct
DWEQMND

SEQ ID NO: 15862 - protein, 7 aa, synthetic construct
LNDEGVA

SEQ ID NO: 15863 - protein, 7 aa, synthetic construct
ITMQYQH

SEQ ID NO: 15864 - protein, 7 aa, synthetic construct
RHAMPVA

SEQ ID NO: 15865 - protein, 7 aa, synthetic construct
AGVPDLK

SEQ ID NO: 15866 - protein, 7 aa, synthetic construct
HMHVESD

SEQ ID NO: 15867 - protein, 7 aa, synthetic construct
SDHTDIV

SEQ ID NO: 15868 - protein, 7 aa, synthetic construct
SLLYGAE

SEQ ID NO: 15869 - protein, 7 aa, synthetic construct
IKTVVLP

SEQ ID NO: 15870 - protein, 7 aa, synthetic construct
MIPVIPA

SEQ ID NO: 15871 - protein, 7 aa, synthetic construct
IANLVGE

SEQ ID NO: 15872 - protein, 7 aa, synthetic construct
HTIITEA

SEQ ID NO: 15873 - protein, 7 aa, synthetic construct
NEDPSQS

SEQ ID NO: 15874 - protein, 7 aa, synthetic construct
ANYHYEA

SEQ ID NO: 15875 - protein, 7 aa, synthetic construct
AVHQQRD

SEQ ID NO: 15876 - protein, 7 aa, synthetic construct
AHITTVR

SEQ ID NO: 15877 - protein, 7 aa, synthetic construct
DVEATVG

SEQ ID NO: 15878 - protein, 7 aa, synthetic construct
FDAQATE

SEQ ID NO: 15879 - protein, 7 aa, synthetic construct
LREEVAY

SEQ ID NO: 15880 - protein, 7 aa, synthetic construct
SSDLTDG

SEQ ID NO: 15881 - protein, 7 aa, synthetic construct
MFPEDGG

SEQ ID NO: 15882 - protein, 7 aa, synthetic construct
SITGLGT

SEQ ID NO: 15883 - protein, 7 aa, synthetic construct
WDDHYSM

SEQ ID NO: 15884 - protein, 7 aa, synthetic construct
DVSTAMR

SEQ ID NO: 15885 - protein, 7 aa, synthetic construct
GNYEHRF

SEQ ID NO: 15886 - protein, 7 aa, synthetic construct
PIESFQE

SEQ ID NO: 15887 - protein, 7 aa, synthetic construct
MHVSTAD

SEQ ID NO: 15888 - protein, 7 aa, synthetic construct
YRHMPLD

SEQ ID NO: 15889 - protein, 7 aa, synthetic construct
PVQARLM

SEQ ID NO: 15890 - protein, 7 aa, synthetic construct
MQEVIQD

SEQ ID NO: 15891 - protein, 7 aa, synthetic construct
YDSWLDP

SEQ ID NO: 15892 - protein, 7 aa, synthetic construct
FDDYYTS

SEQ ID NO: 15893 - protein, 7 aa, synthetic construct
ATGFKQI

SEQ ID NO: 15894 - protein, 7 aa, synthetic construct
TNPNDTD

SEQ ID NO: 15895 - protein, 7 aa, synthetic construct
IMPPNPR

SEQ ID NO: 15896 - protein, 7 aa, synthetic construct
PEVADGS

SEQ ID NO: 15897 - protein, 7 aa, synthetic construct
TKWPDQP

SEQ ID NO: 15898 - protein, 7 aa, synthetic construct
HLDERSG

SEQ ID NO: 15899 - protein, 7 aa, synthetic construct
IADDNHQ

SEQ ID NO: 15900 - protein, 7 aa, synthetic construct
SDWEPHE

SEQ ID NO: 15901 - protein, 7 aa, synthetic construct
FTDHVVL

SEQ ID NO: 15902 - protein, 7 aa, synthetic construct
PPSLMIA

SEQ ID NO: 15903 - protein, 7 aa, synthetic construct
FIGTDTV

SEQ ID NO: 15904 - protein, 7 aa, synthetic construct
MDESDRS

SEQ ID NO: 15905 - protein, 7 aa, synthetic construct
SISLPLG

SEQ ID NO: 15906 - protein, 7 aa, synthetic construct
GPPGDKW

SEQ ID NO: 15907 - protein, 7 aa, synthetic construct
PTAEDSA

SEQ ID NO: 15908 - protein, 7 aa, synthetic construct
RIEQGAV

SEQ ID NO: 15909 - protein, 7 aa, synthetic construct
SAGSDIF

SEQ ID NO: 15910 - protein, 7 aa, synthetic construct
TGTETFD

SEQ ID NO: 15911 - protein, 7 aa, synthetic construct
YDKLWPN

SEQ ID NO: 15912 - protein, 7 aa, synthetic construct
QDHGSDE

SEQ ID NO: 15913 - protein, 7 aa, synthetic construct
VWDTVEA

SEQ ID NO: 15914 - protein, 7 aa, synthetic construct
GDNPSLT

SEQ ID NO: 15915 - protein, 7 aa, synthetic construct
PTNAHNL

SEQ ID NO: 15916 - protein, 7 aa, synthetic construct
PEAWDME

SEQ ID NO: 15917 - protein, 7 aa, synthetic construct
EKEIIHK

SEQ ID NO: 15918 - protein, 7 aa, synthetic construct
YDQLHGF

SEQ ID NO: 15919 - protein, 7 aa, synthetic construct
ITSEHVQ

SEQ ID NO: 15920 - protein, 7 aa, synthetic construct
PSKDELD

SEQ ID NO: 15921 - protein, 7 aa, synthetic construct
YSMAGLT

SEQ ID NO: 15922 - protein, 7 aa, synthetic construct
WQIKSNN

SEQ ID NO: 15923 - protein, 7 aa, synthetic construct
QNEMKYT

SEQ ID NO: 15924 - protein, 7 aa, synthetic construct
FVRGVVT

SEQ ID NO: 15925 - protein, 7 aa, synthetic construct
SPAIDIQ

SEQ ID NO: 15926 - protein, 7 aa, synthetic construct
QHTWQPD

SEQ ID NO: 15927 - protein, 7 aa, synthetic construct
QHEDGIY

SEQ ID NO: 15928 - protein, 7 aa, synthetic construct
SHNIGET

SEQ ID NO: 15929 - protein, 7 aa, synthetic construct
KMDRNFL

SEQ ID NO: 15930 - protein, 7 aa, synthetic construct
QQAQQDF

SEQ ID NO: 15931 - protein, 7 aa, synthetic construct
IKHMTVV

SEQ ID NO: 15932 - protein, 7 aa, synthetic construct
QPNVMDE

SEQ ID NO: 15933 - protein, 7 aa, synthetic construct
DDNPEMW

SEQ ID NO: 15934 - protein, 7 aa, synthetic construct
IQMADDK

SEQ ID NO: 15935 - protein, 7 aa, synthetic construct
MRLAESK

SEQ ID NO: 15936 - protein, 7 aa, synthetic construct
IDSFKGF

SEQ ID NO: 15937 - protein, 7 aa, synthetic construct
DQDGRTF

SEQ ID NO: 15938 - protein, 7 aa, synthetic construct
TINLRDY

SEQ ID NO: 15939 - protein, 7 aa, synthetic construct
GVMNAES

SEQ ID NO: 15940 - protein, 7 aa, synthetic construct
RMEFETG

SEQ ID NO: 15941 - protein, 7 aa, synthetic construct
HLDNYDV

SEQ ID NO: 15942 - protein, 7 aa, synthetic construct
AGDNTVE

SEQ ID NO: 15943 - protein, 7 aa, synthetic construct
EVQTMDD

SEQ ID NO: 15944 - protein, 7 aa, synthetic construct
DLMDMAG

SEQ ID NO: 15945 - protein, 7 aa, synthetic construct
YMNMGPH

SEQ ID NO: 15946 - protein, 7 aa, synthetic construct
CLGTMCL

SEQ ID NO: 15947 - protein, 7 aa, synthetic construct
LIMPEHD

SEQ ID NO: 15948 - protein, 7 aa, synthetic construct
KYGLGVQ

SEQ ID NO: 15949 - protein, 7 aa, synthetic construct
PDAKETH

SEQ ID NO: 15950 - protein, 7 aa, synthetic construct
SPTAEYD

SEQ ID NO: 15951 - protein, 7 aa, synthetic construct
EAADPIY

SEQ ID NO: 15952 - protein, 7 aa, synthetic construct
PDASHSV

SEQ ID NO: 15953 - protein, 7 aa, synthetic construct
DVRDLVA

SEQ ID NO: 15954 - protein, 7 aa, synthetic construct
RRENISQ

SEQ ID NO: 15955 - protein, 7 aa, synthetic construct
HLGIALP

SEQ ID NO: 15956 - protein, 7 aa, synthetic construct
GTFHHDK

SEQ ID NO: 15957 - protein, 7 aa, synthetic construct
IFAVDSH

SEQ ID NO: 15958 - protein, 7 aa, synthetic construct
CLPGTCN

SEQ ID NO: 15959 - protein, 7 aa, synthetic construct
YLQNISV

SEQ ID NO: 15960 - protein, 7 aa, synthetic construct
SWEGLKS

SEQ ID NO: 15961 - protein, 7 aa, synthetic construct
SIDQADT

SEQ ID NO: 15962 - protein, 7 aa, synthetic construct
PEGQIDA

SEQ ID NO: 15963 - protein, 7 aa, synthetic construct
YNVQYMA

SEQ ID NO: 15964 - protein, 7 aa, synthetic construct
GDTEQFA

SEQ ID NO: 15965 - protein, 7 aa, synthetic construct
NADTELK

SEQ ID NO: 15966 - protein, 7 aa, synthetic construct
EMKAEQD

SEQ ID NO: 15967 - protein, 7 aa, synthetic construct
HGKILMH

SEQ ID NO: 15968 - protein, 7 aa, synthetic construct
QSEFDTP

SEQ ID NO: 15969 - protein, 7 aa, synthetic construct
SDRGEFF

SEQ ID NO: 15970 - protein, 7 aa, synthetic construct
APKSKEI

SEQ ID NO: 15971 - protein, 7 aa, synthetic construct
PSINVKF

SEQ ID NO: 15972 - protein, 7 aa, synthetic construct
QAFAQTI

SEQ ID NO: 15973 - protein, 7 aa, synthetic construct
QEHGYNR

SEQ ID NO: 15974 - protein, 7 aa, synthetic construct
QHPAVSY

SEQ ID NO: 15975 - protein, 7 aa, synthetic construct
QMEDVYS

SEQ ID NO: 15976 - protein, 7 aa, synthetic construct
IGTNPKE

SEQ ID NO: 15977 - protein, 7 aa, synthetic construct
PVDADIP

SEQ ID NO: 15978 - protein, 7 aa, synthetic construct
PDESWVG

SEQ ID NO: 15979 - protein, 7 aa, synthetic construct
QYDIDGS

SEQ ID NO: 15980 - protein, 7 aa, synthetic construct
IIHQMHE

SEQ ID NO: 15981 - protein, 7 aa, synthetic construct
NGITPAN

SEQ ID NO: 15982 - protein, 7 aa, synthetic construct
QDIHELD

SEQ ID NO: 15983 - protein, 7 aa, synthetic construct
YTSLEDA

SEQ ID NO: 15984 - protein, 7 aa, synthetic construct
QAMPVIA

SEQ ID NO: 15985 - protein, 7 aa, synthetic construct
EWEVDSD

SEQ ID NO: 15986 - protein, 7 aa, synthetic construct
GTDPNMW

SEQ ID NO: 15987 - protein, 7 aa, synthetic construct
QGMENPV

SEQ ID NO: 15988 - protein, 7 aa, synthetic construct
DYSQFQP

SEQ ID NO: 15989 - protein, 7 aa, synthetic construct
QENPPEL

SEQ ID NO: 15990 - protein, 7 aa, synthetic construct
SHQQMSQ

SEQ ID NO: 15991 - protein, 7 aa, synthetic construct
PETIVGE

SEQ ID NO: 15992 - protein, 7 aa, synthetic construct
WTHNVPV

SEQ ID NO: 15993 - protein, 7 aa, synthetic construct
TDELTET

SEQ ID NO: 15994 - protein, 7 aa, synthetic construct
ASDSPET

SEQ ID NO: 15995 - protein, 7 aa, synthetic construct
DRLADIS

SEQ ID NO: 15996 - protein, 7 aa, synthetic construct
FESGMDK

SEQ ID NO: 15997 - protein, 7 aa, synthetic construct
GQLGTIT

SEQ ID NO: 15998 - protein, 7 aa, synthetic construct
AYITTIG

SEQ ID NO: 15999 - protein, 7 aa, synthetic construct
HDNVPIN

SEQ ID NO: 16000 - protein, 7 aa, synthetic construct
KKNIMDF

SEQ ID NO: 16001 - protein, 7 aa, synthetic construct
DSQAYAD

SEQ ID NO: 16002 - protein, 7 aa, synthetic construct
EFKLTMS

SEQ ID NO: 16003 - protein, 7 aa, synthetic construct
DLRPMGP

SEQ ID NO: 16004 - protein, 7 aa, synthetic construct
FDHWHIE

SEQ ID NO: 16005 - protein, 7 aa, synthetic construct
GHKMAHI

SEQ ID NO: 16006 - protein, 7 aa, synthetic construct
HWEGANY

SEQ ID NO: 16007 - protein, 7 aa, synthetic construct
QGVGQMH

SEQ ID NO: 16008 - protein, 7 aa, synthetic construct
MLDATHK

SEQ ID NO: 16009 - protein, 7 aa, synthetic construct
DGNDVHN

SEQ ID NO: 16010 - protein, 7 aa, synthetic construct
AHPALSN

SEQ ID NO: 16011 - protein, 7 aa, synthetic construct
IVTDHVT

SEQ ID NO: 16012 - protein, 7 aa, synthetic construct
QGPDDVY

SEQ ID NO: 16013 - protein, 7 aa, synthetic construct
FHGHDLR

SEQ ID NO: 16014 - protein, 7 aa, synthetic construct
KSTKEEC

SEQ ID NO: 16015 - protein, 7 aa, synthetic construct
EASVGKL

SEQ ID NO: 16016 - protein, 7 aa, synthetic construct
MIHIAQK

SEQ ID NO: 16017 - protein, 7 aa, synthetic construct
AMSDRWS

SEQ ID NO: 16018 - protein, 7 aa, synthetic construct
DHPDESS

SEQ ID NO: 16019 - protein, 7 aa, synthetic construct
QVRDQGQ

SEQ ID NO: 16020 - protein, 7 aa, synthetic construct
EAPVAQE

SEQ ID NO: 16021 - protein, 7 aa, synthetic construct
ALETVYK

SEQ ID NO: 16022 - protein, 7 aa, synthetic construct
NFDMHMP

SEQ ID NO: 16023 - protein, 7 aa, synthetic construct
QPLHDLM

SEQ ID NO: 16024 - protein, 7 aa, synthetic construct
SCKDRCV

SEQ ID NO: 16025 - protein, 7 aa, synthetic construct
GWRIQSE

SEQ ID NO: 16026 - protein, 7 aa, synthetic construct
TFQTITN

SEQ ID NO: 16027 - protein, 7 aa, synthetic construct
NVAEFDR

SEQ ID NO: 16028 - protein, 7 aa, synthetic construct
SPVNILD

SEQ ID NO: 16029 - protein, 7 aa, synthetic construct
ANPSTMG

SEQ ID NO: 16030 - protein, 7 aa, synthetic construct
VDMVQPQ

SEQ ID NO: 16031 - protein, 7 aa, synthetic construct
APHDESM

SEQ ID NO: 16032 - protein, 7 aa, synthetic construct
GLEDMRF

SEQ ID NO: 16033 - protein, 7 aa, synthetic construct
IQTWDDT

SEQ ID NO: 16034 - protein, 7 aa, synthetic construct
PRHHPEA

SEQ ID NO: 16035 - protein, 7 aa, synthetic construct
SDQDYTY

SEQ ID NO: 16036 - protein, 7 aa, synthetic construct
AGEPRES

SEQ ID NO: 16037 - protein, 7 aa, synthetic construct
HPEIEPS

SEQ ID NO: 16038 - protein, 7 aa, synthetic construct
FIDFSDG

SEQ ID NO: 16039 - protein, 7 aa, synthetic construct
NQEVPHE

SEQ ID NO: 16040 - protein, 7 aa, synthetic construct
HRNVGMH

SEQ ID NO: 16041 - protein, 7 aa, synthetic construct
DQDESRR

SEQ ID NO: 16042 - protein, 7 aa, synthetic construct
NEMPHYR

SEQ ID NO: 16043 - protein, 7 aa, synthetic construct
CSEHDCA

SEQ ID NO: 16044 - protein, 7 aa, synthetic construct
LEERMFS

SEQ ID NO: 16045 - protein, 7 aa, synthetic construct
TAEMTRH

SEQ ID NO: 16046 - protein, 7 aa, synthetic construct
KTKSEEM

SEQ ID NO: 16047 - protein, 7 aa, synthetic construct
RIPRPEV

SEQ ID NO: 16048 - protein, 7 aa, synthetic construct
PLHIPAR

SEQ ID NO: 16049 - protein, 7 aa, synthetic construct
DTEDTNA

SEQ ID NO: 16050 - protein, 7 aa, synthetic construct
ETSDMVY

SEQ ID NO: 16051 - protein, 7 aa, synthetic construct
MFDDGTE

SEQ ID NO: 16052 - protein, 7 aa, synthetic construct
GHDSFEG

SEQ ID NO: 16053 - protein, 7 aa, synthetic construct
TENVPAP

SEQ ID NO: 16054 - protein, 7 aa, synthetic construct
HKQFPAQ

SEQ ID NO: 16055 - protein, 7 aa, synthetic construct
FDAEHSQ

SEQ ID NO: 16056 - protein, 7 aa, synthetic construct
VEPKKWG

SEQ ID NO: 16057 - protein, 7 aa, synthetic construct
HVKKEIT

SEQ ID NO: 16058 - protein, 7 aa, synthetic construct
MADQIHE

SEQ ID NO: 16059 - protein, 7 aa, synthetic construct
RGTYVIP

SEQ ID NO: 16060 - protein, 7 aa, synthetic construct
ALDDDQE

SEQ ID NO: 16061 - protein, 7 aa, synthetic construct
NLIQPIR

SEQ ID NO: 16062 - protein, 7 aa, synthetic construct
PQYAAKL

SEQ ID NO: 16063 - protein, 7 aa, synthetic construct
HSLEGDV

SEQ ID NO: 16064 - protein, 7 aa, synthetic construct
HNIMRDE

SEQ ID NO: 16065 - protein, 7 aa, synthetic construct
ELNWKPD

SEQ ID NO: 16066 - protein, 7 aa, synthetic construct
FSLEGLK

SEQ ID NO: 16067 - protein, 7 aa, synthetic construct
MEGTNGN

SEQ ID NO: 16068 - protein, 7 aa, synthetic construct
LSKIPHS

SEQ ID NO: 16069 - protein, 7 aa, synthetic construct
NSPEDYE

SEQ ID NO: 16070 - protein, 7 aa, synthetic construct
PLDPDQA

SEQ ID NO: 16071 - protein, 7 aa, synthetic construct
ILQEMDY

SEQ ID NO: 16072 - protein, 7 aa, synthetic construct
QFDLNLE

SEQ ID NO: 16073 - protein, 7 aa, synthetic construct
VNDQLMN

SEQ ID NO: 16074 - protein, 7 aa, synthetic construct
DLQHTLT

SEQ ID NO: 16075 - protein, 7 aa, synthetic construct
ALIPYSE

SEQ ID NO: 16076 - protein, 7 aa, synthetic construct
CATAPMC

SEQ ID NO: 16077 - protein, 7 aa, synthetic construct
VEWSAME

SEQ ID NO: 16078 - protein, 7 aa, synthetic construct
EEDEVSK

SEQ ID NO: 16079 - protein, 7 aa, synthetic construct
DALRVMH

SEQ ID NO: 16080 - protein, 7 aa, synthetic construct
EMPNEHI

SEQ ID NO: 16081 - protein, 7 aa, synthetic construct
LFEGVYA

SEQ ID NO: 16082 - protein, 7 aa, synthetic construct
FATVTQT

SEQ ID NO: 16083 - protein, 7 aa, synthetic construct
MGDRYLY

SEQ ID NO: 16084 - protein, 7 aa, synthetic construct
MENFAYK

SEQ ID NO: 16085 - protein, 7 aa, synthetic construct
QLANDIN

SEQ ID NO: 16086 - protein, 7 aa, synthetic construct
DMQDNDY

SEQ ID NO: 16087 - protein, 7 aa, synthetic construct
EEEHRNQ

SEQ ID NO: 16088 - protein, 7 aa, synthetic construct
EYKVPSY

SEQ ID NO: 16089 - protein, 7 aa, synthetic construct
SAEGEHT

SEQ ID NO: 16090 - protein, 7 aa, synthetic construct
TTSDIRW

SEQ ID NO: 16091 - protein, 7 aa, synthetic construct
GPSGVFY

SEQ ID NO: 16092 - protein, 7 aa, synthetic construct
WAENDQM

SEQ ID NO: 16093 - protein, 7 aa, synthetic construct
RKQDYLQ

SEQ ID NO: 16094 - protein, 7 aa, synthetic construct
LTDSDRD

SEQ ID NO: 16095 - protein, 7 aa, synthetic construct
PEFTRVD

SEQ ID NO: 16096 - protein, 7 aa, synthetic construct
EALNDNM

SEQ ID NO: 16097 - protein, 7 aa, synthetic construct
VLHPAEI

SEQ ID NO: 16098 - protein, 7 aa, synthetic construct
KGDNDVI

SEQ ID NO: 16099 - protein, 7 aa, synthetic construct
IITESLK

SEQ ID NO: 16100 - protein, 7 aa, synthetic construct
DHEGQTS

SEQ ID NO: 16101 - protein, 7 aa, synthetic construct
PTKQKEC

SEQ ID NO: 16102 - protein, 7 aa, synthetic construct
DESVQVM

SEQ ID NO: 16103 - protein, 7 aa, synthetic construct
GQIISHS

SEQ ID NO: 16104 - protein, 7 aa, synthetic construct
SGMTRVH

SEQ ID NO: 16105 - protein, 7 aa, synthetic construct
ATHDMDW

SEQ ID NO: 16106 - protein, 7 aa, synthetic construct
SDVELYT

SEQ ID NO: 16107 - protein, 7 aa, synthetic construct
HFSQIQN

SEQ ID NO: 16108 - protein, 7 aa, synthetic construct
EENGTYH

SEQ ID NO: 16109 - protein, 7 aa, synthetic construct
IYPHTHH

SEQ ID NO: 16110 - protein, 7 aa, synthetic construct
KLTVMGM

SEQ ID NO: 16111 - protein, 7 aa, synthetic construct
PDLRNGE

SEQ ID NO: 16112 - protein, 7 aa, synthetic construct
HNFSKEH

SEQ ID NO: 16113 - protein, 7 aa, synthetic construct
APEPCCE

SEQ ID NO: 16114 - protein, 7 aa, synthetic construct
LFEVKQR

SEQ ID NO: 16115 - protein, 7 aa, synthetic construct
IMEGIMA

SEQ ID NO: 16116 - protein, 7 aa, synthetic construct
KSLRGSD

SEQ ID NO: 16117 - protein, 7 aa, synthetic construct
FGSKAAH

SEQ ID NO: 16118 - protein, 7 aa, synthetic construct
GTWNLQD

SEQ ID NO: 16119 - protein, 7 aa, synthetic construct
HYEDAPM

SEQ ID NO: 16120 - protein, 7 aa, synthetic construct
EADDRYE

SEQ ID NO: 16121 - protein, 7 aa, synthetic construct
HMLEDRI

SEQ ID NO: 16122 - protein, 7 aa, synthetic construct
RMNMVQM

SEQ ID NO: 16123 - protein, 7 aa, synthetic construct
DIDGDHW

SEQ ID NO: 16124 - protein, 7 aa, synthetic construct
GGKLNNQ

SEQ ID NO: 16125 - protein, 7 aa, synthetic construct
VGYDDSY

SEQ ID NO: 16126 - protein, 7 aa, synthetic construct
IYQTLVE

SEQ ID NO: 16127 - protein, 7 aa, synthetic construct
HSTPHNL

SEQ ID NO: 16128 - protein, 7 aa, synthetic construct
MYTEYEH

SEQ ID NO: 16129 - protein, 7 aa, synthetic construct
KEADPFF

SEQ ID NO: 16130 - protein, 7 aa, synthetic construct
YVEKNEM

SEQ ID NO: 16131 - protein, 7 aa, synthetic construct
LNDQRDE

SEQ ID NO: 16132 - protein, 7 aa, synthetic construct
SAHMFAG

SEQ ID NO: 16133 - protein, 7 aa, synthetic construct
DPFDEHD

SEQ ID NO: 16134 - protein, 7 aa, synthetic construct
FGELVSR

SEQ ID NO: 16135 - protein, 7 aa, synthetic construct
NWHGLDS

SEQ ID NO: 16136 - protein, 7 aa, synthetic construct
ANVTDEN

SEQ ID NO: 16137 - protein, 7 aa, synthetic construct
VQMNPVV

SEQ ID NO: 16138 - protein, 7 aa, synthetic construct
IQHSHFE

SEQ ID NO: 16139 - protein, 7 aa, synthetic construct
LDLNGIE

SEQ ID NO: 16140 - protein, 7 aa, synthetic construct
SHVDEFM

SEQ ID NO: 16141 - protein, 7 aa, synthetic construct
TQDAKHN

SEQ ID NO: 16142 - protein, 7 aa, synthetic construct
SEQEMQN

SEQ ID NO: 16143 - protein, 7 aa, synthetic construct
DAEGMPL

SEQ ID NO: 16144 - protein, 7 aa, synthetic construct
YLADEEE

SEQ ID NO: 16145 - protein, 7 aa, synthetic construct
FNADVYK

SEQ ID NO: 16146 - protein, 7 aa, synthetic construct
LAHEFKT

SEQ ID NO: 16147 - protein, 7 aa, synthetic construct
KIRVLEE

SEQ ID NO: 16148 - protein, 7 aa, synthetic construct
IEGAGPI

SEQ ID NO: 16149 - protein, 7 aa, synthetic construct
ILGREAF

SEQ ID NO: 16150 - protein, 7 aa, synthetic construct
TEAAVKY

SEQ ID NO: 16151 - protein, 7 aa, synthetic construct
EDNEFMA

SEQ ID NO: 16152 - protein, 7 aa, synthetic construct
VFPPHAD

SEQ ID NO: 16153 - protein, 7 aa, synthetic construct
DNLRKSF

SEQ ID NO: 16154 - protein, 7 aa, synthetic construct
KPIVHQI

SEQ ID NO: 16155 - protein, 7 aa, synthetic construct
IKMYEQH

SEQ ID NO: 16156 - protein, 7 aa, synthetic construct
INDIGAW

SEQ ID NO: 16157 - protein, 7 aa, synthetic construct
EFIRKDD

SEQ ID NO: 16158 - protein, 7 aa, synthetic construct
HTIVNAM

SEQ ID NO: 16159 - protein, 7 aa, synthetic construct
STEDQDS

SEQ ID NO: 16160 - protein, 7 aa, synthetic construct
VIGYMME

SEQ ID NO: 16161 - protein, 7 aa, synthetic construct
EPSMYMK

SEQ ID NO: 16162 - protein, 7 aa, synthetic construct
MMNGVDT

SEQ ID NO: 16163 - protein, 7 aa, synthetic construct
SSIDDKY

SEQ ID NO: 16164 - protein, 7 aa, synthetic construct
MAMAEPM

SEQ ID NO: 16165 - protein, 7 aa, synthetic construct
MMVRSEM

SEQ ID NO: 16166 - protein, 7 aa, synthetic construct
DRFAMQP

SEQ ID NO: 16167 - protein, 7 aa, synthetic construct
HEFKINS

SEQ ID NO: 16168 - protein, 7 aa, synthetic construct
QPGMRFP

SEQ ID NO: 16169 - protein, 7 aa, synthetic construct
QPGEEEN

SEQ ID NO: 16170 - protein, 7 aa, synthetic construct
AAEGKDQ

SEQ ID NO: 16171 - protein, 7 aa, synthetic construct
DDENAWN

SEQ ID NO: 16172 - protein, 7 aa, synthetic construct
TPALFDP

SEQ ID NO: 16173 - protein, 7 aa, synthetic construct
ARVFVSE

SEQ ID NO: 16174 - protein, 7 aa, synthetic construct
DDNAADR

SEQ ID NO: 16175 - protein, 7 aa, synthetic construct
DYSHQRS

SEQ ID NO: 16176 - protein, 7 aa, synthetic construct
SKSANWT

SEQ ID NO: 16177 - protein, 7 aa, synthetic construct
QNDMVLD

SEQ ID NO: 16178 - protein, 7 aa, synthetic construct
SFDQNIA

SEQ ID NO: 16179 - protein, 7 aa, synthetic construct
EVNQINT

SEQ ID NO: 16180 - protein, 7 aa, synthetic construct
WGAYEVQ

SEQ ID NO: 16181 - protein, 7 aa, synthetic construct
PTSTDIM

SEQ ID NO: 16182 - protein, 7 aa, synthetic construct
DGHTGDP

SEQ ID NO: 16183 - protein, 7 aa, synthetic construct
TISDSDI

SEQ ID NO: 16184 - protein, 7 aa, synthetic construct
SRQTTHW

SEQ ID NO: 16185 - protein, 7 aa, synthetic construct
FRKDSYI

SEQ ID NO: 16186 - protein, 7 aa, synthetic construct
NQMDNMA

SEQ ID NO: 16187 - protein, 7 aa, synthetic construct
GHDGMPF

SEQ ID NO: 16188 - protein, 7 aa, synthetic construct
AYKQTYT

SEQ ID NO: 16189 - protein, 7 aa, synthetic construct
HIPMDFP

SEQ ID NO: 16190 - protein, 7 aa, synthetic construct
DYVDLKN

SEQ ID NO: 16191 - protein, 7 aa, synthetic construct
MSDSNRE

SEQ ID NO: 16192 - protein, 7 aa, synthetic construct
YYETSIS

SEQ ID NO: 16193 - protein, 7 aa, synthetic construct
MAKNDQY

SEQ ID NO: 16194 - protein, 7 aa, synthetic construct
TEEHPTE

SEQ ID NO: 16195 - protein, 7 aa, synthetic construct
QNERAED

SEQ ID NO: 16196 - protein, 7 aa, synthetic construct
EGERESM

SEQ ID NO: 16197 - protein, 7 aa, synthetic construct
FARVPQN

SEQ ID NO: 16198 - protein, 7 aa, synthetic construct
EVGGKET

SEQ ID NO: 16199 - protein, 7 aa, synthetic construct
NYQEVIH

SEQ ID NO: 16200 - protein, 7 aa, synthetic construct
SDRDQSA

SEQ ID NO: 16201 - protein, 7 aa, synthetic construct
HAATSGE

SEQ ID NO: 16202 - protein, 7 aa, synthetic construct
YFNEVRK

SEQ ID NO: 16203 - protein, 7 aa, synthetic construct
TMQQMQK

SEQ ID NO: 16204 - protein, 7 aa, synthetic construct
NVPDPPE

SEQ ID NO: 16205 - protein, 7 aa, synthetic construct
LKDLGAQ

SEQ ID NO: 16206 - protein, 7 aa, synthetic construct
LLHQDQG

SEQ ID NO: 16207 - protein, 7 aa, synthetic construct
MEHDIAF

SEQ ID NO: 16208 - protein, 7 aa, synthetic construct
HHDNLGE

SEQ ID NO: 16209 - protein, 7 aa, synthetic construct
LQTEYVG

SEQ ID NO: 16210 - protein, 7 aa, synthetic construct
DNNDFQR

SEQ ID NO: 16211 - protein, 7 aa, synthetic construct
PMESHIL

SEQ ID NO: 16212 - protein, 7 aa, synthetic construct
LGNMLTA

SEQ ID NO: 16213 - protein, 7 aa, synthetic construct
FDHLHPR

SEQ ID NO: 16214 - protein, 7 aa, synthetic construct
PANESIP

SEQ ID NO: 16215 - protein, 7 aa, synthetic construct
SMDAFPR

SEQ ID NO: 16216 - protein, 7 aa, synthetic construct
RGDYSWD

SEQ ID NO: 16217 - protein, 7 aa, synthetic construct
WDYHQPE

SEQ ID NO: 16218 - protein, 7 aa, synthetic construct
YDDFTPN

SEQ ID NO: 16219 - protein, 7 aa, synthetic construct
RKAVMHD

SEQ ID NO: 16220 - protein, 7 aa, synthetic construct
TSARYSN

SEQ ID NO: 16221 - protein, 7 aa, synthetic construct
PAGKQFT

SEQ ID NO: 16222 - protein, 7 aa, synthetic construct
AGIQLGE

SEQ ID NO: 16223 - protein, 7 aa, synthetic construct
LDMHANE

SEQ ID NO: 16224 - protein, 7 aa, synthetic construct
DTQPIFP

SEQ ID NO: 16225 - protein, 7 aa, synthetic construct
NYMAING

SEQ ID NO: 16226 - protein, 7 aa, synthetic construct
AAIEREY

SEQ ID NO: 16227 - protein, 7 aa, synthetic construct
DVQKWEY

SEQ ID NO: 16228 - protein, 7 aa, synthetic construct
QDQFPEA

SEQ ID NO: 16229 - protein, 7 aa, synthetic construct
GIWVDAD

SEQ ID NO: 16230 - protein, 7 aa, synthetic construct
AMMDTPS

SEQ ID NO: 16231 - protein, 7 aa, synthetic construct
DTDSVTR

SEQ ID NO: 16232 - protein, 7 aa, synthetic construct
WTEPEYP

SEQ ID NO: 16233 - protein, 7 aa, synthetic construct
MDAEKTA

SEQ ID NO: 16234 - protein, 7 aa, synthetic construct
EHMDLLS

SEQ ID NO: 16235 - protein, 7 aa, synthetic construct
PIDAEDS

SEQ ID NO: 16236 - protein, 7 aa, synthetic construct
PHADHKL

SEQ ID NO: 16237 - protein, 7 aa, synthetic construct
VQTNAWM

SEQ ID NO: 16238 - protein, 7 aa, synthetic construct
PHKTWAD

SEQ ID NO: 16239 - protein, 7 aa, synthetic construct
ASSPNLW

SEQ ID NO: 16240 - protein, 7 aa, synthetic construct
LRHDNFV

SEQ ID NO: 16241 - protein, 7 aa, synthetic construct
DRDGEWQ

SEQ ID NO: 16242 - protein, 7 aa, synthetic construct
DTKAPKA

SEQ ID NO: 16243 - protein, 7 aa, synthetic construct
AVLAVAS

SEQ ID NO: 16244 - protein, 7 aa, synthetic construct
EFAMKRI

SEQ ID NO: 16245 - protein, 7 aa, synthetic construct
NLYENPR

SEQ ID NO: 16246 - protein, 7 aa, synthetic construct
PSIYKDD

SEQ ID NO: 16247 - protein, 7 aa, synthetic construct
VEGSTTN

SEQ ID NO: 16248 - protein, 7 aa, synthetic construct
VDYAHPF

SEQ ID NO: 16249 - protein, 7 aa, synthetic construct
HGPRMMN

SEQ ID NO: 16250 - protein, 7 aa, synthetic construct
WDYDNPV

SEQ ID NO: 16251 - protein, 7 aa, synthetic construct
SIHDKFQ

SEQ ID NO: 16252 - protein, 7 aa, synthetic construct
PHEGTDS

SEQ ID NO: 16253 - protein, 7 aa, synthetic construct
MDAYEVD

SEQ ID NO: 16254 - protein, 7 aa, synthetic construct
PHTREPL

SEQ ID NO: 16255 - protein, 7 aa, synthetic construct
LGDYVVA

SEQ ID NO: 16256 - protein, 7 aa, synthetic construct
LEIEGFT

SEQ ID NO: 16257 - protein, 7 aa, synthetic construct
WFQIEQE

SEQ ID NO: 16258 - protein, 7 aa, synthetic construct
NNQTIKH

SEQ ID NO: 16259 - protein, 7 aa, synthetic construct
MSVEHLV

SEQ ID NO: 16260 - protein, 7 aa, synthetic construct
WKEQLPR

SEQ ID NO: 16261 - protein, 7 aa, synthetic construct
KDIAVPE

SEQ ID NO: 16262 - protein, 7 aa, synthetic construct
ETTEFKW

SEQ ID NO: 16263 - protein, 7 aa, synthetic construct
YQSNVET

SEQ ID NO: 16264 - protein, 7 aa, synthetic construct
KLDDMIM

SEQ ID NO: 16265 - protein, 7 aa, synthetic construct
AIVEGRV

SEQ ID NO: 16266 - protein, 7 aa, synthetic construct
AVFDFEG

SEQ ID NO: 16267 - protein, 7 aa, synthetic construct
ALYDIER

SEQ ID NO: 16268 - protein, 7 aa, synthetic construct
IQPALLQ

SEQ ID NO: 16269 - protein, 7 aa, synthetic construct
DHNVLET

SEQ ID NO: 16270 - protein, 7 aa, synthetic construct
YNYEEIV

SEQ ID NO: 16271 - protein, 7 aa, synthetic construct
GEHISHM

SEQ ID NO: 16272 - protein, 7 aa, synthetic construct
VRLMEEA

SEQ ID NO: 16273 - protein, 7 aa, synthetic construct
AENHHIT

SEQ ID NO: 16274 - protein, 7 aa, synthetic construct
NGDQFLD

SEQ ID NO: 16275 - protein, 7 aa, synthetic construct
HIMTING

SEQ ID NO: 16276 - protein, 7 aa, synthetic construct
HKMHEAG

SEQ ID NO: 16277 - protein, 7 aa, synthetic construct
LEVDTQI

SEQ ID NO: 16278 - protein, 7 aa, synthetic construct
IFAHQGM

SEQ ID NO: 16279 - protein, 7 aa, synthetic construct
IGIDYEA

SEQ ID NO: 16280 - protein, 7 aa, synthetic construct
REFETEL

SEQ ID NO: 16281 - protein, 7 aa, synthetic construct
NEFENQK

SEQ ID NO: 16282 - protein, 7 aa, synthetic construct
SMQVAQK

SEQ ID NO: 16283 - protein, 7 aa, synthetic construct
AKFYDNE

SEQ ID NO: 16284 - protein, 7 aa, synthetic construct
FHKSGYT

SEQ ID NO: 16285 - protein, 7 aa, synthetic construct
AYAKDMN

SEQ ID NO: 16286 - protein, 7 aa, synthetic construct
DEYETSA

SEQ ID NO: 16287 - protein, 7 aa, synthetic construct
VDEIMPG

SEQ ID NO: 16288 - protein, 7 aa, synthetic construct
GRENTEE

SEQ ID NO: 16289 - protein, 7 aa, synthetic construct
VKHDFTI

SEQ ID NO: 16290 - protein, 7 aa, synthetic construct
EENALYR

SEQ ID NO: 16291 - protein, 7 aa, synthetic construct
FTYGGDH

SEQ ID NO: 16292 - protein, 7 aa, synthetic construct
LGEMRLL

SEQ ID NO: 16293 - protein, 7 aa, synthetic construct
TWEHEDA

SEQ ID NO: 16294 - protein, 7 aa, synthetic construct
QFTDPNT

SEQ ID NO: 16295 - protein, 7 aa, synthetic construct
SEFAPSK

SEQ ID NO: 16296 - protein, 7 aa, synthetic construct
YDVRGEI

SEQ ID NO: 16297 - protein, 7 aa, synthetic construct
LAGVYGG

SEQ ID NO: 16298 - protein, 7 aa, synthetic construct
AMDYVER

SEQ ID NO: 16299 - protein, 7 aa, synthetic construct
PPSFSQS

SEQ ID NO: 16300 - protein, 7 aa, synthetic construct
HNHTIML

SEQ ID NO: 16301 - protein, 7 aa, synthetic construct
HLSVHHP

SEQ ID NO: 16302 - protein, 7 aa, synthetic construct
ASENISG

SEQ ID NO: 16303 - protein, 7 aa, synthetic construct
MAEAVDG

SEQ ID NO: 16304 - protein, 7 aa, synthetic construct
STPIIPQ

SEQ ID NO: 16305 - protein, 7 aa, synthetic construct
FTHQGHH

SEQ ID NO: 16306 - protein, 7 aa, synthetic construct
VAPTLRP

SEQ ID NO: 16307 - protein, 7 aa, synthetic construct
YEVMDVP

SEQ ID NO: 16308 - protein, 7 aa, synthetic construct
EWRKNGA

SEQ ID NO: 16309 - protein, 7 aa, synthetic construct
GVSDQQW

SEQ ID NO: 16310 - protein, 7 aa, synthetic construct
MPDDDLR

SEQ ID NO: 16311 - protein, 7 aa, synthetic construct
ITMNLRS

SEQ ID NO: 16312 - protein, 7 aa, synthetic construct
GELVVTP

SEQ ID NO: 16313 - protein, 7 aa, synthetic construct
INAPELA

SEQ ID NO: 16314 - protein, 7 aa, synthetic construct
IEMDQPT

SEQ ID NO: 16315 - protein, 7 aa, synthetic construct
LDRNQDE

SEQ ID NO: 16316 - protein, 7 aa, synthetic construct
WDAHART

SEQ ID NO: 16317 - protein, 7 aa, synthetic construct
KYAQKEN

SEQ ID NO: 16318 - protein, 7 aa, synthetic construct
KQQESHF

SEQ ID NO: 16319 - protein, 7 aa, synthetic construct
EVTQAMV

SEQ ID NO: 16320 - protein, 7 aa, synthetic construct
NNTKMPH

SEQ ID NO: 16321 - protein, 7 aa, synthetic construct
MHEGRHW

SEQ ID NO: 16322 - protein, 7 aa, synthetic construct
DGTNLMD

SEQ ID NO: 16323 - protein, 7 aa, synthetic construct
FMSPINN

SEQ ID NO: 16324 - protein, 7 aa, synthetic construct
TSNDDVD

SEQ ID NO: 16325 - protein, 7 aa, synthetic construct
RSDNYAY

SEQ ID NO: 16326 - protein, 7 aa, synthetic construct
NEAASPI

SEQ ID NO: 16327 - protein, 7 aa, synthetic construct
WKEPFDT

SEQ ID NO: 16328 - protein, 7 aa, synthetic construct
NNMQVVD

SEQ ID NO: 16329 - protein, 7 aa, synthetic construct
VKQFEEM

SEQ ID NO: 16330 - protein, 7 aa, synthetic construct
EKMWVTE

SEQ ID NO: 16331 - protein, 7 aa, synthetic construct
PNDGDWG

SEQ ID NO: 16332 - protein, 7 aa, synthetic construct
QVLGERA

SEQ ID NO: 16333 - protein, 7 aa, synthetic construct
HEHSSEI

SEQ ID NO: 16334 - protein, 7 aa, synthetic construct
IMAQKYN

SEQ ID NO: 16335 - protein, 7 aa, synthetic construct
LSVYDGE

SEQ ID NO: 16336 - protein, 7 aa, synthetic construct
LLHAPGE

SEQ ID NO: 16337 - protein, 7 aa, synthetic construct
RMARDMM

SEQ ID NO: 16338 - protein, 7 aa, synthetic construct
MMTSGEE

SEQ ID NO: 16339 - protein, 7 aa, synthetic construct
HVMDLGG

SEQ ID NO: 16340 - protein, 7 aa, synthetic construct
YIVPSSG

SEQ ID NO: 16341 - protein, 7 aa, synthetic construct
DMISQDI

SEQ ID NO: 16342 - protein, 7 aa, synthetic construct
LMHLHTD

SEQ ID NO: 16343 - protein, 7 aa, synthetic construct
WQPKNMT

SEQ ID NO: 16344 - protein, 7 aa, synthetic construct
YHEILGN

SEQ ID NO: 16345 - protein, 7 aa, synthetic construct
VLMEGNN

SEQ ID NO: 16346 - protein, 7 aa, synthetic construct
LSSGDLF

SEQ ID NO: 16347 - protein, 7 aa, synthetic construct
KEMGDWA

SEQ ID NO: 16348 - protein, 7 aa, synthetic construct
YTLGYHD

SEQ ID NO: 16349 - protein, 7 aa, synthetic construct
TAGFGMA

SEQ ID NO: 16350 - protein, 7 aa, synthetic construct
EEPVGQI

SEQ ID NO: 16351 - protein, 7 aa, synthetic construct
TDWAYKP

SEQ ID NO: 16352 - protein, 7 aa, synthetic construct
MAGAWHA

SEQ ID NO: 16353 - protein, 7 aa, synthetic construct
SLEDVDH

SEQ ID NO: 16354 - protein, 7 aa, synthetic construct
QPDSFSI

SEQ ID NO: 16355 - protein, 7 aa, synthetic construct
MDQAFEA

SEQ ID NO: 16356 - protein, 7 aa, synthetic construct
WGINMMD

SEQ ID NO: 16357 - protein, 7 aa, synthetic construct
DLAVQGS

SEQ ID NO: 16358 - protein, 7 aa, synthetic construct
REDAIAT

SEQ ID NO: 16359 - protein, 7 aa, synthetic construct
NRQYASG

SEQ ID NO: 16360 - protein, 7 aa, synthetic construct
GLDWNEK

SEQ ID NO: 16361 - protein, 7 aa, synthetic construct
QESVEAE

SEQ ID NO: 16362 - protein, 7 aa, synthetic construct
GFQDAAL

SEQ ID NO: 16363 - protein, 7 aa, synthetic construct
EPPHGSE

SEQ ID NO: 16364 - protein, 7 aa, synthetic construct
TQVELLD

SEQ ID NO: 16365 - protein, 7 aa, synthetic construct
FNMHTMD

SEQ ID NO: 16366 - protein, 7 aa, synthetic construct
GEMMAHK

SEQ ID NO: 16367 - protein, 7 aa, synthetic construct
DDTPEMP

SEQ ID NO: 16368 - protein, 7 aa, synthetic construct
SFSVTMK

SEQ ID NO: 16369 - protein, 7 aa, synthetic construct
VAIPMAN

SEQ ID NO: 16370 - protein, 7 aa, synthetic construct
NYYSTQD

SEQ ID NO: 16371 - protein, 7 aa, synthetic construct
VRQMPLM

SEQ ID NO: 16372 - protein, 7 aa, synthetic construct
WKTNIHT

SEQ ID NO: 16373 - protein, 7 aa, synthetic construct
GDINGIP

SEQ ID NO: 16374 - protein, 7 aa, synthetic construct
QAGDGYT

SEQ ID NO: 16375 - protein, 7 aa, synthetic construct
PSHRTVL

SEQ ID NO: 16376 - protein, 7 aa, synthetic construct
TVLKNWD

SEQ ID NO: 16377 - protein, 7 aa, synthetic construct
LEQDPSV

SEQ ID NO: 16378 - protein, 7 aa, synthetic construct
NSSPEGE

SEQ ID NO: 16379 - protein, 7 aa, synthetic construct
IMHSVNS

SEQ ID NO: 16380 - protein, 7 aa, synthetic construct
DYIEQET

SEQ ID NO: 16381 - protein, 7 aa, synthetic construct
PPVTMRV

SEQ ID NO: 16382 - protein, 7 aa, synthetic construct
FAAIEAV

SEQ ID NO: 16383 - protein, 7 aa, synthetic construct
KHVQQQH

SEQ ID NO: 16384 - protein, 7 aa, synthetic construct
FPFDANP

SEQ ID NO: 16385 - protein, 7 aa, synthetic construct
QFHAARP

SEQ ID NO: 16386 - protein, 7 aa, synthetic construct
YELDTMR

SEQ ID NO: 16387 - protein, 7 aa, synthetic construct
RAQEMHY

SEQ ID NO: 16388 - protein, 7 aa, synthetic construct
QIHGFVE

SEQ ID NO: 16389 - protein, 7 aa, synthetic construct
VDQGVVI

SEQ ID NO: 16390 - protein, 7 aa, synthetic construct
KQVARDT

SEQ ID NO: 16391 - protein, 7 aa, synthetic construct
EDGVHHL

SEQ ID NO: 16392 - protein, 7 aa, synthetic construct
MIGKVEY

SEQ ID NO: 16393 - protein, 7 aa, synthetic construct
TQMHFAS

SEQ ID NO: 16394 - protein, 7 aa, synthetic construct
SHNEYHV

SEQ ID NO: 16395 - protein, 7 aa, synthetic construct
VMERTFH

SEQ ID NO: 16396 - protein, 7 aa, synthetic construct
MGIEVPI

SEQ ID NO: 16397 - protein, 7 aa, synthetic construct
GLDIGPN

SEQ ID NO: 16398 - protein, 7 aa, synthetic construct
DSQTSEF

SEQ ID NO: 16399 - protein, 7 aa, synthetic construct
LSTLESH

SEQ ID NO: 16400 - protein, 7 aa, synthetic construct
DFTESQD

SEQ ID NO: 16401 - protein, 7 aa, synthetic construct
SWQGSHS

SEQ ID NO: 16402 - protein, 7 aa, synthetic construct
PATMGET

SEQ ID NO: 16403 - protein, 7 aa, synthetic construct
HGMGLAK

SEQ ID NO: 16404 - protein, 7 aa, synthetic construct
ATFEHKA

SEQ ID NO: 16405 - protein, 7 aa, synthetic construct
PQASVIY

SEQ ID NO: 16406 - protein, 7 aa, synthetic construct
EAVNAAI

SEQ ID NO: 16407 - protein, 7 aa, synthetic construct
DPKVAGL

SEQ ID NO: 16408 - protein, 7 aa, synthetic construct
IVPTIVN

SEQ ID NO: 16409 - protein, 7 aa, synthetic construct
HEMKDPR

SEQ ID NO: 16410 - protein, 7 aa, synthetic construct
GEEILIA

SEQ ID NO: 16411 - protein, 7 aa, synthetic construct
IHEDTSK

SEQ ID NO: 16412 - protein, 7 aa, synthetic construct
HIDENTN

SEQ ID NO: 16413 - protein, 7 aa, synthetic construct
GASEGQT

SEQ ID NO: 16414 - protein, 7 aa, synthetic construct
ALEYENA

SEQ ID NO: 16415 - protein, 7 aa, synthetic construct
DYPGQAR

SEQ ID NO: 16416 - protein, 7 aa, synthetic construct
WDHEAHS

SEQ ID NO: 16417 - protein, 7 aa, synthetic construct
TLETAMT

SEQ ID NO: 16418 - protein, 7 aa, synthetic construct
AIDIGLK

SEQ ID NO: 16419 - protein, 7 aa, synthetic construct
DNTENQQ

SEQ ID NO: 16420 - protein, 7 aa, synthetic construct
SYPYLGE

SEQ ID NO: 16421 - protein, 7 aa, synthetic construct
SDGLTQD

SEQ ID NO: 16422 - protein, 7 aa, synthetic construct
NDQEINF

SEQ ID NO: 16423 - protein, 7 aa, synthetic construct
VDQVNWK

SEQ ID NO: 16424 - protein, 7 aa, synthetic construct
FDATEGV

SEQ ID NO: 16425 - protein, 7 aa, synthetic construct
IMTSSMN

SEQ ID NO: 16426 - protein, 7 aa, synthetic construct
MLSPVRE

SEQ ID NO: 16427 - protein, 7 aa, synthetic construct
WHASDLI

SEQ ID NO: 16428 - protein, 7 aa, synthetic construct
YHGEYIL

SEQ ID NO: 16429 - protein, 7 aa, synthetic construct
SDGSQLM

SEQ ID NO: 16430 - protein, 7 aa, synthetic construct
DVDGGDG

SEQ ID NO: 16431 - protein, 7 aa, synthetic construct
WFDKHED

SEQ ID NO: 16432 - protein, 7 aa, synthetic construct
YRLHTDL

SEQ ID NO: 16433 - protein, 7 aa, synthetic construct
TDDKDMK

SEQ ID NO: 16434 - protein, 7 aa, synthetic construct
STHYSHH

SEQ ID NO: 16435 - protein, 7 aa, synthetic construct
NEPTSEL

SEQ ID NO: 16436 - protein, 7 aa, synthetic construct
FWKVDSE

SEQ ID NO: 16437 - protein, 7 aa, synthetic construct
TDHIEHP

SEQ ID NO: 16438 - protein, 7 aa, synthetic construct
VLDNHQE

SEQ ID NO: 16439 - protein, 7 aa, synthetic construct
GYDDVTF

SEQ ID NO: 16440 - protein, 7 aa, synthetic construct
DFFDEVG

SEQ ID NO: 16441 - protein, 7 aa, synthetic construct
YTMEMRA

SEQ ID NO: 16442 - protein, 7 aa, synthetic construct
NLEKMEN

SEQ ID NO: 16443 - protein, 7 aa, synthetic construct
YELIGMP

SEQ ID NO: 16444 - protein, 7 aa, synthetic construct
YTQMALV

SEQ ID NO: 16445 - protein, 7 aa, synthetic construct
FEAEDFR

SEQ ID NO: 16446 - protein, 7 aa, synthetic construct
YKSWPVA

SEQ ID NO: 16447 - protein, 7 aa, synthetic construct
QGMVNDE

SEQ ID NO: 16448 - protein, 7 aa, synthetic construct
TFVQNEI

SEQ ID NO: 16449 - protein, 7 aa, synthetic construct
QHDVEAH

SEQ ID NO: 16450 - protein, 7 aa, synthetic construct
MAQIMGH

SEQ ID NO: 16451 - protein, 7 aa, synthetic construct
CMDNDAC

SEQ ID NO: 16452 - protein, 7 aa, synthetic construct
TLQKLMT

SEQ ID NO: 16453 - protein, 7 aa, synthetic construct
FQQSADK

SEQ ID NO: 16454 - protein, 7 aa, synthetic construct
TYNIHMG

SEQ ID NO: 16455 - protein, 7 aa, synthetic construct
DPINGEI

SEQ ID NO: 16456 - protein, 7 aa, synthetic construct
TEDLSMH

SEQ ID NO: 16457 - protein, 7 aa, synthetic construct
LFPVSKI

SEQ ID NO: 16458 - protein, 7 aa, synthetic construct
LSENFVP

SEQ ID NO: 16459 - protein, 7 aa, synthetic construct
NMAINNM

SEQ ID NO: 16460 - protein, 7 aa, synthetic construct
QAPEGEM

SEQ ID NO: 16461 - protein, 7 aa, synthetic construct
QDISVIG

SEQ ID NO: 16462 - protein, 7 aa, synthetic construct
AMYVSHA

SEQ ID NO: 16463 - protein, 7 aa, synthetic construct
PQQDDSV

SEQ ID NO: 16464 - protein, 7 aa, synthetic construct
ALGLRSA

SEQ ID NO: 16465 - protein, 7 aa, synthetic construct
HTKYHMA

SEQ ID NO: 16466 - protein, 7 aa, synthetic construct
MDDHPMV

SEQ ID NO: 16467 - protein, 7 aa, synthetic construct
ETSDMVR

SEQ ID NO: 16468 - protein, 7 aa, synthetic construct
SFVPSQR

SEQ ID NO: 16469 - protein, 7 aa, synthetic construct
FTEQYQR

SEQ ID NO: 16470 - protein, 7 aa, synthetic construct
NDYYMKA

SEQ ID NO: 16471 - protein, 7 aa, synthetic construct
QQTFTSV

SEQ ID NO: 16472 - protein, 7 aa, synthetic construct
PYVTNHM

SEQ ID NO: 16473 - protein, 7 aa, synthetic construct
FFAGHDH

SEQ ID NO: 16474 - protein, 7 aa, synthetic construct
SGHEMEE

SEQ ID NO: 16475 - protein, 7 aa, synthetic construct
NGENLTD

SEQ ID NO: 16476 - protein, 7 aa, synthetic construct
YTNIVEA

SEQ ID NO: 16477 - protein, 7 aa, synthetic construct
GSEINAV

SEQ ID NO: 16478 - protein, 7 aa, synthetic construct
GLDSWKD

SEQ ID NO: 16479 - protein, 7 aa, synthetic construct
NEDPEGF

SEQ ID NO: 16480 - protein, 7 aa, synthetic construct
WEPGQTQ

SEQ ID NO: 16481 - protein, 7 aa, synthetic construct
KSYAVSG

SEQ ID NO: 16482 - protein, 7 aa, synthetic construct
GLLYDLD

SEQ ID NO: 16483 - protein, 7 aa, synthetic construct
WAHKSGS

SEQ ID NO: 16484 - protein, 7 aa, synthetic construct
EITPETK

SEQ ID NO: 16485 - protein, 7 aa, synthetic construct
DLIVVKH

SEQ ID NO: 16486 - protein, 7 aa, synthetic construct
EPTDDWM

SEQ ID NO: 16487 - protein, 7 aa, synthetic construct
INVHAQS

SEQ ID NO: 16488 - protein, 7 aa, synthetic construct
NMQQDII

SEQ ID NO: 16489 - protein, 7 aa, synthetic construct
NVITDGS

SEQ ID NO: 16490 - protein, 7 aa, synthetic construct
SIAPPVT

SEQ ID NO: 16491 - protein, 7 aa, synthetic construct
GALVVYP

SEQ ID NO: 16492 - protein, 7 aa, synthetic construct
PDDYEGT

SEQ ID NO: 16493 - protein, 7 aa, synthetic construct
ATRDQYE

SEQ ID NO: 16494 - protein, 7 aa, synthetic construct
GMTYMKQ

SEQ ID NO: 16495 - protein, 7 aa, synthetic construct
MLYENTP

SEQ ID NO: 16496 - protein, 7 aa, synthetic construct
DIVRTES

SEQ ID NO: 16497 - protein, 7 aa, synthetic construct
KGIEDIG

SEQ ID NO: 16498 - protein, 7 aa, synthetic construct
VPEQDMF

SEQ ID NO: 16499 - protein, 7 aa, synthetic construct
SHQGNSQ

SEQ ID NO: 16500 - protein, 7 aa, synthetic construct
HPLIDVD

SEQ ID NO: 16501 - protein, 7 aa, synthetic construct
IMNDDLS

SEQ ID NO: 16502 - protein, 7 aa, synthetic construct
GWQQDED

SEQ ID NO: 16503 - protein, 7 aa, synthetic construct
DNHESPE

SEQ ID NO: 16504 - protein, 7 aa, synthetic construct
AWSNVPH

SEQ ID NO: 16505 - protein, 7 aa, synthetic construct
NGQIRYN

SEQ ID NO: 16506 - protein, 7 aa, synthetic construct
GGEDART

SEQ ID NO: 16507 - protein, 7 aa, synthetic construct
NYIEVEM

SEQ ID NO: 16508 - protein, 7 aa, synthetic construct
DAPLHMS

SEQ ID NO: 16509 - protein, 7 aa, synthetic construct
FGATEIS

SEQ ID NO: 16510 - protein, 7 aa, synthetic construct
PEDVNPM

SEQ ID NO: 16511 - protein, 7 aa, synthetic construct
QMTGVAT

SEQ ID NO: 16512 - protein, 7 aa, synthetic construct
YTITITD

SEQ ID NO: 16513 - protein, 7 aa, synthetic construct
NAYVMEE

SEQ ID NO: 16514 - protein, 7 aa, synthetic construct
QAFGERF

SEQ ID NO: 16515 - protein, 7 aa, synthetic construct
MFGGRDA

SEQ ID NO: 16516 - protein, 7 aa, synthetic construct
QREHTVR

SEQ ID NO: 16517 - protein, 7 aa, synthetic construct
PSHEDIP

SEQ ID NO: 16518 - protein, 7 aa, synthetic construct
EHVRYAD

SEQ ID NO: 16519 - protein, 7 aa, synthetic construct
PCGDQDC

SEQ ID NO: 16520 - protein, 7 aa, synthetic construct
EPIQYDS

SEQ ID NO: 16521 - protein, 7 aa, synthetic construct
TYEIAQG

SEQ ID NO: 16522 - protein, 7 aa, synthetic construct
NPGENLD

SEQ ID NO: 16523 - protein, 7 aa, synthetic construct
GGSLVDD

SEQ ID NO: 16524 - protein, 7 aa, synthetic construct
WQPESHD

SEQ ID NO: 16525 - protein, 7 aa, synthetic construct
YVTLVKN

SEQ ID NO: 16526 - protein, 7 aa, synthetic construct
IADGWEV

SEQ ID NO: 16527 - protein, 7 aa, synthetic construct
FNSTDLH

SEQ ID NO: 16528 - protein, 7 aa, synthetic construct
YQFTGQT

SEQ ID NO: 16529 - protein, 7 aa, synthetic construct
YGKVIDY

SEQ ID NO: 16530 - protein, 7 aa, synthetic construct
QAKLYDH

SEQ ID NO: 16531 - protein, 7 aa, synthetic construct
VSDDHGP

SEQ ID NO: 16532 - protein, 7 aa, synthetic construct
ATNHYLI

SEQ ID NO: 16533 - protein, 7 aa, synthetic construct
VTEPKVY

SEQ ID NO: 16534 - protein, 7 aa, synthetic construct
EYAQEIP

SEQ ID NO: 16535 - protein, 7 aa, synthetic construct
STFMDEA

SEQ ID NO: 16536 - protein, 7 aa, synthetic construct
SSGNIID

SEQ ID NO: 16537 - protein, 7 aa, synthetic construct
PDEMQDW

SEQ ID NO: 16538 - protein, 7 aa, synthetic construct
NNGTHDL

SEQ ID NO: 16539 - protein, 7 aa, synthetic construct
EGEQTQN

SEQ ID NO: 16540 - protein, 7 aa, synthetic construct
IPVDVIA

SEQ ID NO: 16541 - protein, 7 aa, synthetic construct
FQPTLDV

SEQ ID NO: 16542 - protein, 7 aa, synthetic construct
QAVDWEA

SEQ ID NO: 16543 - protein, 7 aa, synthetic construct
YAAQHSW

SEQ ID NO: 16544 - protein, 7 aa, synthetic construct
ADDENQQ

SEQ ID NO: 16545 - protein, 7 aa, synthetic construct
NNADVLA

SEQ ID NO: 16546 - protein, 7 aa, synthetic construct
ESVLNRF

SEQ ID NO: 16547 - protein, 7 aa, synthetic construct
QEGYIFD

SEQ ID NO: 16548 - protein, 7 aa, synthetic construct
SFSKFPT

SEQ ID NO: 16549 - protein, 7 aa, synthetic construct
NVEDDIW

SEQ ID NO: 16550 - protein, 7 aa, synthetic construct
PAFGIRE

SEQ ID NO: 16551 - protein, 7 aa, synthetic construct
PTDFPKK

SEQ ID NO: 16552 - protein, 7 aa, synthetic construct
MHLFPQG

SEQ ID NO: 16553 - protein, 7 aa, synthetic construct
NTNVEHV

SEQ ID NO: 16554 - protein, 7 aa, synthetic construct
HKVHNAP

SEQ ID NO: 16555 - protein, 7 aa, synthetic construct
KEQHVFH

SEQ ID NO: 16556 - protein, 7 aa, synthetic construct
QQIAGIT

SEQ ID NO: 16557 - protein, 7 aa, synthetic construct
AMLERLD

SEQ ID NO: 16558 - protein, 7 aa, synthetic construct
GFQPPNI

SEQ ID NO: 16559 - protein, 7 aa, synthetic construct
SEYTIEE

SEQ ID NO: 16560 - protein, 7 aa, synthetic construct
VGDDFQE

SEQ ID NO: 16561 - protein, 7 aa, synthetic construct
ATQEHDK

SEQ ID NO: 16562 - protein, 7 aa, synthetic construct
QKRWEAE

SEQ ID NO: 16563 - protein, 7 aa, synthetic construct
DARDPNA

SEQ ID NO: 16564 - protein, 7 aa, synthetic construct
MEKGTRF

SEQ ID NO: 16565 - protein, 7 aa, synthetic construct
LRTLPHT

SEQ ID NO: 16566 - protein, 7 aa, synthetic construct
DIPLIRN

SEQ ID NO: 16567 - protein, 7 aa, synthetic construct
MSSMAED

SEQ ID NO: 16568 - protein, 7 aa, synthetic construct
RFAAKEN

SEQ ID NO: 16569 - protein, 7 aa, synthetic construct
YNAAEMQ

SEQ ID NO: 16570 - protein, 7 aa, synthetic construct
VPLPAMN

SEQ ID NO: 16571 - protein, 7 aa, synthetic construct
KSRDAWL

SEQ ID NO: 16572 - protein, 7 aa, synthetic construct
QQLKHVF

SEQ ID NO: 16573 - protein, 7 aa, synthetic construct
MMHKVLT

SEQ ID NO: 16574 - protein, 7 aa, synthetic construct
ADVKLAH

SEQ ID NO: 16575 - protein, 7 aa, synthetic construct
LQNISED

SEQ ID NO: 16576 - protein, 7 aa, synthetic construct
DDYSRHK

SEQ ID NO: 16577 - protein, 7 aa, synthetic construct
SGIEDGP

SEQ ID NO: 16578 - protein, 7 aa, synthetic construct
NDLAGAI

SEQ ID NO: 16579 - protein, 7 aa, synthetic construct
MAIEMDK

SEQ ID NO: 16580 - protein, 7 aa, synthetic construct
PPLQEDD

SEQ ID NO: 16581 - protein, 7 aa, synthetic construct
MTSHRWD

SEQ ID NO: 16582 - protein, 7 aa, synthetic construct
SVESMDT

SEQ ID NO: 16583 - protein, 7 aa, synthetic construct
AVREVGN

SEQ ID NO: 16584 - protein, 7 aa, synthetic construct
DKQSDNR

SEQ ID NO: 16585 - protein, 7 aa, synthetic construct
SVEGWSM

SEQ ID NO: 16586 - protein, 7 aa, synthetic construct
STVVMFD

SEQ ID NO: 16587 - protein, 7 aa, synthetic construct
VWEGGMI

SEQ ID NO: 16588 - protein, 7 aa, synthetic construct
VVSVSTE

SEQ ID NO: 16589 - protein, 7 aa, synthetic construct
LEEHEQG

SEQ ID NO: 16590 - protein, 7 aa, synthetic construct
WPMNKLP

SEQ ID NO: 16591 - protein, 7 aa, synthetic construct
PDHNWHK

SEQ ID NO: 16592 - protein, 7 aa, synthetic construct
YADDGHW

SEQ ID NO: 16593 - protein, 7 aa, synthetic construct
QQVNHVI

SEQ ID NO: 16594 - protein, 7 aa, synthetic construct
PGDANIL

SEQ ID NO: 16595 - protein, 7 aa, synthetic construct
EEEFDHT

SEQ ID NO: 16596 - protein, 7 aa, synthetic construct
EGTTGYI

SEQ ID NO: 16597 - protein, 7 aa, synthetic construct
GASELVS

SEQ ID NO: 16598 - protein, 7 aa, synthetic construct
DMDWQVS

SEQ ID NO: 16599 - protein, 7 aa, synthetic construct
QTEEYIL

SEQ ID NO: 16600 - protein, 7 aa, synthetic construct
ADMEHRK

SEQ ID NO: 16601 - protein, 7 aa, synthetic construct
EPNKEWY

SEQ ID NO: 16602 - protein, 7 aa, synthetic construct
DSDRIDA

SEQ ID NO: 16603 - protein, 7 aa, synthetic construct
HGPYPHT

SEQ ID NO: 16604 - protein, 7 aa, synthetic construct
EGTPLEP

SEQ ID NO: 16605 - protein, 7 aa, synthetic construct
YNGFAHR

SEQ ID NO: 16606 - protein, 7 aa, synthetic construct
WSGFPDD

SEQ ID NO: 16607 - protein, 7 aa, synthetic construct
EGDEDGN

SEQ ID NO: 16608 - protein, 7 aa, synthetic construct
EVQNSNF

SEQ ID NO: 16609 - protein, 7 aa, synthetic construct
AYDATEW

SEQ ID NO: 16610 - protein, 7 aa, synthetic construct
SEAAHMN

SEQ ID NO: 16611 - protein, 7 aa, synthetic construct
LISEDRF

SEQ ID NO: 16612 - protein, 7 aa, synthetic construct
MDSQWNV

SEQ ID NO: 16613 - protein, 7 aa, synthetic construct
TVDSLTG

SEQ ID NO: 16614 - protein, 7 aa, synthetic construct
LENEAYN

SEQ ID NO: 16615 - protein, 7 aa, synthetic construct
HALRGSH

SEQ ID NO: 16616 - protein, 7 aa, synthetic construct
NIGERPR

SEQ ID NO: 16617 - protein, 7 aa, synthetic construct
RSAYLEV

SEQ ID NO: 16618 - protein, 7 aa, synthetic construct
LEFNFAD

SEQ ID NO: 16619 - protein, 7 aa, synthetic construct
VGMINSH

SEQ ID NO: 16620 - protein, 7 aa, synthetic construct
GVPAAEL

SEQ ID NO: 16621 - protein, 7 aa, synthetic construct
RVHSIDH

SEQ ID NO: 16622 - protein, 7 aa, synthetic construct
GEGGAGE

SEQ ID NO: 16623 - protein, 7 aa, synthetic construct
GTSDEDT

SEQ ID NO: 16624 - protein, 7 aa, synthetic construct
GLPISDI

SEQ ID NO: 16625 - protein, 7 aa, synthetic construct
AQDTSFP

SEQ ID NO: 16626 - protein, 7 aa, synthetic construct
VTDDHQV

SEQ ID NO: 16627 - protein, 7 aa, synthetic construct
FEENMRA

SEQ ID NO: 16628 - protein, 7 aa, synthetic construct
NQLQKQW

SEQ ID NO: 16629 - protein, 7 aa, synthetic construct
REEESIQ

SEQ ID NO: 16630 - protein, 7 aa, synthetic construct
AAQNQYT

SEQ ID NO: 16631 - protein, 7 aa, synthetic construct
GAHDDQV

SEQ ID NO: 16632 - protein, 7 aa, synthetic construct
GKMPNKP

SEQ ID NO: 16633 - protein, 7 aa, synthetic construct
EFKALHV

SEQ ID NO: 16634 - protein, 7 aa, synthetic construct
LNPRVLM

SEQ ID NO: 16635 - protein, 7 aa, synthetic construct
DDYEMHR

SEQ ID NO: 16636 - protein, 7 aa, synthetic construct
LNIAGDV

SEQ ID NO: 16637 - protein, 7 aa, synthetic construct
DNIYQPK

SEQ ID NO: 16638 - protein, 7 aa, synthetic construct
SFSGDLA

SEQ ID NO: 16639 - protein, 7 aa, synthetic construct
YMHTLPT

SEQ ID NO: 16640 - protein, 7 aa, synthetic construct
QEETDAN

SEQ ID NO: 16641 - protein, 7 aa, synthetic construct
GFTQTKM

SEQ ID NO: 16642 - protein, 7 aa, synthetic construct
EPPESRQ

SEQ ID NO: 16643 - protein, 7 aa, synthetic construct
TEGNMAP

SEQ ID NO: 16644 - protein, 7 aa, synthetic construct
VHPHREI

SEQ ID NO: 16645 - protein, 7 aa, synthetic construct
EHAMHPV

SEQ ID NO: 16646 - protein, 7 aa, synthetic construct
HVGEDNH

SEQ ID NO: 16647 - protein, 7 aa, synthetic construct
KIHRDFD

SEQ ID NO: 16648 - protein, 7 aa, synthetic construct
SEIGLVE

SEQ ID NO: 16649 - protein, 7 aa, synthetic construct
AEFNYGE

SEQ ID NO: 16650 - protein, 7 aa, synthetic construct
MQFDQPN

SEQ ID NO: 16651 - protein, 7 aa, synthetic construct
TQSALMM

SEQ ID NO: 16652 - protein, 7 aa, synthetic construct
TPEVVQP

SEQ ID NO: 16653 - protein, 7 aa, synthetic construct
KLVESKY

SEQ ID NO: 16654 - protein, 7 aa, synthetic construct
KEFPAMT

SEQ ID NO: 16655 - protein, 7 aa, synthetic construct
PVDNYDD

SEQ ID NO: 16656 - protein, 7 aa, synthetic construct
NTIGLME

SEQ ID NO: 16657 - protein, 7 aa, synthetic construct
AMEQYVE

SEQ ID NO: 16658 - protein, 7 aa, synthetic construct
QLEDRFF

SEQ ID NO: 16659 - protein, 7 aa, synthetic construct
TLDENTQ

SEQ ID NO: 16660 - protein, 7 aa, synthetic construct
TEHPPGY

SEQ ID NO: 16661 - protein, 7 aa, synthetic construct
NPSQSLI

SEQ ID NO: 16662 - protein, 7 aa, synthetic construct
TNMGHQD

SEQ ID NO: 16663 - protein, 7 aa, synthetic construct
DQNWHAK

SEQ ID NO: 16664 - protein, 7 aa, synthetic construct
STQLQGT

SEQ ID NO: 16665 - protein, 7 aa, synthetic construct
LVAEPMV

SEQ ID NO: 16666 - protein, 7 aa, synthetic construct
ERMVEFS

SEQ ID NO: 16667 - protein, 7 aa, synthetic construct
WDNALEV

SEQ ID NO: 16668 - protein, 7 aa, synthetic construct
KVFTTDI

SEQ ID NO: 16669 - protein, 7 aa, synthetic construct
RHGQERM

SEQ ID NO: 16670 - protein, 7 aa, synthetic construct
NTQDHWL

SEQ ID NO: 16671 - protein, 7 aa, synthetic construct
LEESHKE

SEQ ID NO: 16672 - protein, 7 aa, synthetic construct
PGTPYVK

SEQ ID NO: 16673 - protein, 7 aa, synthetic construct
KWNGDKM

SEQ ID NO: 16674 - protein, 7 aa, synthetic construct
EKITWGG

SEQ ID NO: 16675 - protein, 7 aa, synthetic construct
DENQLKD

SEQ ID NO: 16676 - protein, 7 aa, synthetic construct
NNRAGAW

SEQ ID NO: 16677 - protein, 7 aa, synthetic construct
ILTDNLD

SEQ ID NO: 16678 - protein, 7 aa, synthetic construct
KEKTLMW

SEQ ID NO: 16679 - protein, 7 aa, synthetic construct
QPKGIGY

SEQ ID NO: 16680 - protein, 7 aa, synthetic construct
EGFNMPI

SEQ ID NO: 16681 - protein, 7 aa, synthetic construct
VHDGGHD

SEQ ID NO: 16682 - protein, 7 aa, synthetic construct
PMGYVPV

SEQ ID NO: 16683 - protein, 7 aa, synthetic construct
VTSKKGP

SEQ ID NO: 16684 - protein, 7 aa, synthetic construct
PSSMIGM

SEQ ID NO: 16685 - protein, 7 aa, synthetic construct
STLEMHP

SEQ ID NO: 16686 - protein, 7 aa, synthetic construct
TDQGGWM

SEQ ID NO: 16687 - protein, 7 aa, synthetic construct
TSGYLGA

SEQ ID NO: 16688 - protein, 7 aa, synthetic construct
PQAAEFN

SEQ ID NO: 16689 - protein, 7 aa, synthetic construct
SIKIGVN

SEQ ID NO: 16690 - protein, 7 aa, synthetic construct
HQAEHLF

SEQ ID NO: 16691 - protein, 7 aa, synthetic construct
LAMETMQ

SEQ ID NO: 16692 - protein, 7 aa, synthetic construct
TLFRQEP

SEQ ID NO: 16693 - protein, 7 aa, synthetic construct
PNQAPQW

SEQ ID NO: 16694 - protein, 7 aa, synthetic construct
QKHDWAH

SEQ ID NO: 16695 - protein, 7 aa, synthetic construct
LMDMPDS

SEQ ID NO: 16696 - protein, 7 aa, synthetic construct
PSSYLEH

SEQ ID NO: 16697 - protein, 7 aa, synthetic construct
HTYPTQV

SEQ ID NO: 16698 - protein, 7 aa, synthetic construct
VNHSSVR

SEQ ID NO: 16699 - protein, 7 aa, synthetic construct
DFSDLMP

SEQ ID NO: 16700 - protein, 7 aa, synthetic construct
AEQHMFL

SEQ ID NO: 16701 - protein, 7 aa, synthetic construct
GDEGRTQ

SEQ ID NO: 16702 - protein, 7 aa, synthetic construct
NTMVEEI

SEQ ID NO: 16703 - protein, 7 aa, synthetic construct
SEQQTAY

SEQ ID NO: 16704 - protein, 7 aa, synthetic construct
LRHIEEY

SEQ ID NO: 16705 - protein, 7 aa, synthetic construct
PVNNMEG

SEQ ID NO: 16706 - protein, 7 aa, synthetic construct
RYTAPGM

SEQ ID NO: 16707 - protein, 7 aa, synthetic construct
FGVTNML

SEQ ID NO: 16708 - protein, 7 aa, synthetic construct
AELKEQY

SEQ ID NO: 16709 - protein, 7 aa, synthetic construct
LDERDTS

SEQ ID NO: 16710 - protein, 7 aa, synthetic construct
MMEDAPS

SEQ ID NO: 16711 - protein, 7 aa, synthetic construct
LEEDRLM

SEQ ID NO: 16712 - protein, 7 aa, synthetic construct
EKGLTIL

SEQ ID NO: 16713 - protein, 7 aa, synthetic construct
SVPAKWI

SEQ ID NO: 16714 - protein, 7 aa, synthetic construct
SDHDLII

SEQ ID NO: 16715 - protein, 7 aa, synthetic construct
SMFNKPI

SEQ ID NO: 16716 - protein, 7 aa, synthetic construct
HHETEHI

SEQ ID NO: 16717 - protein, 7 aa, synthetic construct
DFVENPV

SEQ ID NO: 16718 - protein, 7 aa, synthetic construct
DVQEGWY

SEQ ID NO: 16719 - protein, 7 aa, synthetic construct
SHETLEA

SEQ ID NO: 16720 - protein, 7 aa, synthetic construct
GEEDARK

SEQ ID NO: 16721 - protein, 7 aa, synthetic construct
KSVMYPL

SEQ ID NO: 16722 - protein, 7 aa, synthetic construct
GHREAYH

SEQ ID NO: 16723 - protein, 7 aa, synthetic construct
VSLNMHK

SEQ ID NO: 16724 - protein, 7 aa, synthetic construct
LSANLHK

SEQ ID NO: 16725 - protein, 7 aa, synthetic construct
EKGFNPG

SEQ ID NO: 16726 - protein, 7 aa, synthetic construct
ATMPTKV

SEQ ID NO: 16727 - protein, 7 aa, synthetic construct
SMAPQTM

SEQ ID NO: 16728 - protein, 7 aa, synthetic construct
EGNDEWD

SEQ ID NO: 16729 - protein, 7 aa, synthetic construct
MQHNMPT

SEQ ID NO: 16730 - protein, 7 aa, synthetic construct
SLRMQPM

SEQ ID NO: 16731 - protein, 7 aa, synthetic construct
IPYHSAA

SEQ ID NO: 16732 - protein, 7 aa, synthetic construct
AHQKSDQ

SEQ ID NO: 16733 - protein, 7 aa, synthetic construct
HFLKDGY

SEQ ID NO: 16734 - protein, 7 aa, synthetic construct
VDTGVHY

SEQ ID NO: 16735 - protein, 7 aa, synthetic construct
TQFIHHE

SEQ ID NO: 16736 - protein, 7 aa, synthetic construct
KDVGAFQ

SEQ ID NO: 16737 - protein, 7 aa, synthetic construct
MLSQEDR

SEQ ID NO: 16738 - protein, 7 aa, synthetic construct
MSTQLPY

SEQ ID NO: 16739 - protein, 7 aa, synthetic construct
NKDGFVM

SEQ ID NO: 16740 - protein, 7 aa, synthetic construct
NVQVFLE

SEQ ID NO: 16741 - protein, 7 aa, synthetic construct
MEHENEF

SEQ ID NO: 16742 - protein, 7 aa, synthetic construct
QFQDPHK

SEQ ID NO: 16743 - protein, 7 aa, synthetic construct
ETAHPIQ

SEQ ID NO: 16744 - protein, 7 aa, synthetic construct
VLMASDT

SEQ ID NO: 16745 - protein, 7 aa, synthetic construct
KSQEQHH

SEQ ID NO: 16746 - protein, 7 aa, synthetic construct
ALPFAPD

SEQ ID NO: 16747 - protein, 7 aa, synthetic construct
RGMDYEE

SEQ ID NO: 16748 - protein, 7 aa, synthetic construct
NPEAEPA

SEQ ID NO: 16749 - protein, 7 aa, synthetic construct
DGNTDAS

SEQ ID NO: 16750 - protein, 7 aa, synthetic construct
QQDMPSL

SEQ ID NO: 16751 - protein, 7 aa, synthetic construct
HVFDPHQ

SEQ ID NO: 16752 - protein, 7 aa, synthetic construct
TEDSKRE

SEQ ID NO: 16753 - protein, 7 aa, synthetic construct
WANLSSA

SEQ ID NO: 16754 - protein, 7 aa, synthetic construct
SPHIFPG

SEQ ID NO: 16755 - protein, 7 aa, synthetic construct
GMEDITA

SEQ ID NO: 16756 - protein, 7 aa, synthetic construct
SIDDWSK

SEQ ID NO: 16757 - protein, 7 aa, synthetic construct
HQQPLPL

SEQ ID NO: 16758 - protein, 7 aa, synthetic construct
AQLPPHQ

SEQ ID NO: 16759 - protein, 7 aa, synthetic construct
REEMLSV

SEQ ID NO: 16760 - protein, 7 aa, synthetic construct
DPSSLPR

SEQ ID NO: 16761 - protein, 7 aa, synthetic construct
YLFKDEK

SEQ ID NO: 16762 - protein, 7 aa, synthetic construct
PPLRASE

SEQ ID NO: 16763 - protein, 7 aa, synthetic construct
NEQIFGK

SEQ ID NO: 16764 - protein, 7 aa, synthetic construct
DIPLQAH

SEQ ID NO: 16765 - protein, 7 aa, synthetic construct
CDFQHCD

SEQ ID NO: 16766 - protein, 7 aa, synthetic construct
IDSGVMA

SEQ ID NO: 16767 - protein, 7 aa, synthetic construct
SDIVEMR

SEQ ID NO: 16768 - protein, 7 aa, synthetic construct
PEMIPKG

SEQ ID NO: 16769 - protein, 7 aa, synthetic construct
GSEDYIY

SEQ ID NO: 16770 - protein, 7 aa, synthetic construct
LEREQGH

SEQ ID NO: 16771 - protein, 7 aa, synthetic construct
YEAVDSV

SEQ ID NO: 16772 - protein, 7 aa, synthetic construct
DRDDNNF

SEQ ID NO: 16773 - protein, 7 aa, synthetic construct
CSRGGLE

SEQ ID NO: 16774 - protein, 7 aa, synthetic construct
DAKFVQD

SEQ ID NO: 16775 - protein, 7 aa, synthetic construct
AEQINFA

SEQ ID NO: 16776 - protein, 7 aa, synthetic construct
IPNNRLF

SEQ ID NO: 16777 - protein, 7 aa, synthetic construct
GATLHTY

SEQ ID NO: 16778 - protein, 7 aa, synthetic construct
SVNNQHQ

SEQ ID NO: 16779 - protein, 7 aa, synthetic construct
AHDVTSD

SEQ ID NO: 16780 - protein, 7 aa, synthetic construct
NIIAVRS

SEQ ID NO: 16781 - protein, 7 aa, synthetic construct
GVGDNAY

SEQ ID NO: 16782 - protein, 7 aa, synthetic construct
QQMPEIF

SEQ ID NO: 16783 - protein, 7 aa, synthetic construct
EPSNNPA

SEQ ID NO: 16784 - protein, 7 aa, synthetic construct
EPRYRFE

SEQ ID NO: 16785 - protein, 7 aa, synthetic construct
VGREDLE

SEQ ID NO: 16786 - protein, 7 aa, synthetic construct
ALQGALI

SEQ ID NO: 16787 - protein, 7 aa, synthetic construct
EWSSENL

SEQ ID NO: 16788 - protein, 7 aa, synthetic construct
DQYKEYQ

SEQ ID NO: 16789 - protein, 7 aa, synthetic construct
RYKQDLV

SEQ ID NO: 16790 - protein, 7 aa, synthetic construct
LMPIEEY

SEQ ID NO: 16791 - protein, 7 aa, synthetic construct
LGKTVHH

SEQ ID NO: 16792 - protein, 7 aa, synthetic construct
GMTDRAI

SEQ ID NO: 16793 - protein, 7 aa, synthetic construct
MAHTISQ

SEQ ID NO: 16794 - protein, 7 aa, synthetic construct
CNYAENC

SEQ ID NO: 16795 - protein, 7 aa, synthetic construct
VNLDDRS

SEQ ID NO: 16796 - protein, 7 aa, synthetic construct
HSVIRIE

SEQ ID NO: 16797 - protein, 7 aa, synthetic construct
GMFKLPS

SEQ ID NO: 16798 - protein, 7 aa, synthetic construct
KSTMYIA

SEQ ID NO: 16799 - protein, 7 aa, synthetic construct
SKEEVHE

SEQ ID NO: 16800 - protein, 7 aa, synthetic construct
QEPLYTH

SEQ ID NO: 16801 - protein, 7 aa, synthetic construct
PNPDVPL

SEQ ID NO: 16802 - protein, 7 aa, synthetic construct
PAPMFNA

SEQ ID NO: 16803 - protein, 7 aa, synthetic construct
FAENGKY

SEQ ID NO: 16804 - protein, 7 aa, synthetic construct
WNDMHMS

SEQ ID NO: 16805 - protein, 7 aa, synthetic construct
YLNPVTE

SEQ ID NO: 16806 - protein, 7 aa, synthetic construct
GESMDIL

SEQ ID NO: 16807 - protein, 7 aa, synthetic construct
PAMTAKP

SEQ ID NO: 16808 - protein, 7 aa, synthetic construct
HIASEES

SEQ ID NO: 16809 - protein, 7 aa, synthetic construct
RMEDITN

SEQ ID NO: 16810 - protein, 7 aa, synthetic construct
HDAYVDA

SEQ ID NO: 16811 - protein, 7 aa, synthetic construct
YNETLVS

SEQ ID NO: 16812 - protein, 7 aa, synthetic construct
SVDAFKH

SEQ ID NO: 16813 - protein, 7 aa, synthetic construct
GTQYLVP

SEQ ID NO: 16814 - protein, 7 aa, synthetic construct
FHKLEIH

SEQ ID NO: 16815 - protein, 7 aa, synthetic construct
QQSVESW

SEQ ID NO: 16816 - protein, 7 aa, synthetic construct
EREHAIF

SEQ ID NO: 16817 - protein, 7 aa, synthetic construct
PDETTIV

SEQ ID NO: 16818 - protein, 7 aa, synthetic construct
DPEMHAM

SEQ ID NO: 16819 - protein, 7 aa, synthetic construct
ILALIGE

SEQ ID NO: 16820 - protein, 7 aa, synthetic construct
DNFTQED

SEQ ID NO: 16821 - protein, 7 aa, synthetic construct
MASVLTM

SEQ ID NO: 16822 - protein, 7 aa, synthetic construct
TSIDPGH

SEQ ID NO: 16823 - protein, 7 aa, synthetic construct
AEHEHFK

SEQ ID NO: 16824 - protein, 7 aa, synthetic construct
HFNSITV

SEQ ID NO: 16825 - protein, 7 aa, synthetic construct
QIMGPDL

SEQ ID NO: 16826 - protein, 7 aa, synthetic construct
FNTMDEL

SEQ ID NO: 16827 - protein, 7 aa, synthetic construct
DFQQMDV

SEQ ID NO: 16828 - protein, 7 aa, synthetic construct
VGPDDRH

SEQ ID NO: 16829 - protein, 7 aa, synthetic construct
NRKDVHI

SEQ ID NO: 16830 - protein, 7 aa, synthetic construct
WIQKFEG

SEQ ID NO: 16831 - protein, 7 aa, synthetic construct
KDDDVRE

SEQ ID NO: 16832 - protein, 7 aa, synthetic construct
LEIPYDS

SEQ ID NO: 16833 - protein, 7 aa, synthetic construct
QDHVSGT

SEQ ID NO: 16834 - protein, 7 aa, synthetic construct
EIQVTDH

SEQ ID NO: 16835 - protein, 7 aa, synthetic construct
LGTENYF

SEQ ID NO: 16836 - protein, 7 aa, synthetic construct
YEMSFNV

SEQ ID NO: 16837 - protein, 7 aa, synthetic construct
THDGFDR

SEQ ID NO: 16838 - protein, 7 aa, synthetic construct
TLVEFEH

SEQ ID NO: 16839 - protein, 7 aa, synthetic construct
AMGNMLK

SEQ ID NO: 16840 - protein, 7 aa, synthetic construct
EQLGLGG

SEQ ID NO: 16841 - protein, 7 aa, synthetic construct
GAPMMEQ

SEQ ID NO: 16842 - protein, 7 aa, synthetic construct
SPTIHLH

SEQ ID NO: 16843 - protein, 7 aa, synthetic construct
DHFGGVP

SEQ ID NO: 16844 - protein, 7 aa, synthetic construct
TVWGQTD

SEQ ID NO: 16845 - protein, 7 aa, synthetic construct
VENEAQY

SEQ ID NO: 16846 - protein, 7 aa, synthetic construct
TGFAKLS

SEQ ID NO: 16847 - protein, 7 aa, synthetic construct
FPLNTNF

SEQ ID NO: 16848 - protein, 7 aa, synthetic construct
DMQIRSM

SEQ ID NO: 16849 - protein, 7 aa, synthetic construct
EIGPSEA

SEQ ID NO: 16850 - protein, 7 aa, synthetic construct
NIVPDAM

SEQ ID NO: 16851 - protein, 7 aa, synthetic construct
DKKYFNP

SEQ ID NO: 16852 - protein, 7 aa, synthetic construct
FDNAENK

SEQ ID NO: 16853 - protein, 7 aa, synthetic construct
EEIAYMS

SEQ ID NO: 16854 - protein, 7 aa, synthetic construct
DPEMVID

SEQ ID NO: 16855 - protein, 7 aa, synthetic construct
DPVNDWP

SEQ ID NO: 16856 - protein, 7 aa, synthetic construct
AFPRAPG

SEQ ID NO: 16857 - protein, 7 aa, synthetic construct
LSMMHNS

SEQ ID NO: 16858 - protein, 7 aa, synthetic construct
MLGFATP

SEQ ID NO: 16859 - protein, 7 aa, synthetic construct
FTFQETG

SEQ ID NO: 16860 - protein, 7 aa, synthetic construct
PYLPQDN

SEQ ID NO: 16861 - protein, 7 aa, synthetic construct
WRTDSRQ

SEQ ID NO: 16862 - protein, 7 aa, synthetic construct
IKWPSTD

SEQ ID NO: 16863 - protein, 7 aa, synthetic construct
PTNNNHK

SEQ ID NO: 16864 - protein, 7 aa, synthetic construct
SEDHGIH

SEQ ID NO: 16865 - protein, 7 aa, synthetic construct
VSQIHNT

SEQ ID NO: 16866 - protein, 7 aa, synthetic construct
MNIEFEI

SEQ ID NO: 16867 - protein, 7 aa, synthetic construct
VDIGMRH

SEQ ID NO: 16868 - protein, 7 aa, synthetic construct
IENHGWS

SEQ ID NO: 16869 - protein, 7 aa, synthetic construct
ALQQEIE

SEQ ID NO: 16870 - protein, 7 aa, synthetic construct
FTVKTGF

SEQ ID NO: 16871 - protein, 7 aa, synthetic construct
RMRHNEV

SEQ ID NO: 16872 - protein, 7 aa, synthetic construct
LYVPNGH

SEQ ID NO: 16873 - protein, 7 aa, synthetic construct
AKNWDTM

SEQ ID NO: 16874 - protein, 7 aa, synthetic construct
ISQAGSW

SEQ ID NO: 16875 - protein, 7 aa, synthetic construct
EFMGRSE

SEQ ID NO: 16876 - protein, 7 aa, synthetic construct
QFANVHV

SEQ ID NO: 16877 - protein, 7 aa, synthetic construct
AFDAVFE

SEQ ID NO: 16878 - protein, 7 aa, synthetic construct
PNPVTFK

SEQ ID NO: 16879 - protein, 7 aa, synthetic construct
TDQDSTI

SEQ ID NO: 16880 - protein, 7 aa, synthetic construct
TPEHNYS

SEQ ID NO: 16881 - protein, 7 aa, synthetic construct
QLFGEFK

SEQ ID NO: 16882 - protein, 7 aa, synthetic construct
WHRADAA

SEQ ID NO: 16883 - protein, 7 aa, synthetic construct
GNMIQEN

SEQ ID NO: 16884 - protein, 7 aa, synthetic construct
EFNPLAM

SEQ ID NO: 16885 - protein, 7 aa, synthetic construct
QDDNFGT

SEQ ID NO: 16886 - protein, 7 aa, synthetic construct
ALVGHDE

SEQ ID NO: 16887 - protein, 7 aa, synthetic construct
DAKDNED

SEQ ID NO: 16888 - protein, 7 aa, synthetic construct
TPLPIIK

SEQ ID NO: 16889 - protein, 7 aa, synthetic construct
PSDFTDD

SEQ ID NO: 16890 - protein, 7 aa, synthetic construct
FLHGGYT

SEQ ID NO: 16891 - protein, 7 aa, synthetic construct
PNEGTWD

SEQ ID NO: 16892 - protein, 7 aa, synthetic construct
LARNSIY

SEQ ID NO: 16893 - protein, 7 aa, synthetic construct
DGPALFV

SEQ ID NO: 16894 - protein, 7 aa, synthetic construct
EAEQFVR

SEQ ID NO: 16895 - protein, 7 aa, synthetic construct
HLDKDYI

SEQ ID NO: 16896 - protein, 7 aa, synthetic construct
VQGIDIH

SEQ ID NO: 16897 - protein, 7 aa, synthetic construct
RYVQMNE

SEQ ID NO: 16898 - protein, 7 aa, synthetic construct
PINGEEF

SEQ ID NO: 16899 - protein, 7 aa, synthetic construct
VTVDTAL

SEQ ID NO: 16900 - protein, 7 aa, synthetic construct
NAMVAVK

SEQ ID NO: 16901 - protein, 7 aa, synthetic construct
YLNGYTV

SEQ ID NO: 16902 - protein, 7 aa, synthetic construct
KQFAVNH

SEQ ID NO: 16903 - protein, 7 aa, synthetic construct
PTASEIF

SEQ ID NO: 16904 - protein, 7 aa, synthetic construct
FADKEDD

SEQ ID NO: 16905 - protein, 7 aa, synthetic construct
VSGTNPF

SEQ ID NO: 16906 - protein, 7 aa, synthetic construct
YAQNFRP

SEQ ID NO: 16907 - protein, 7 aa, synthetic construct
FSKIIAT

SEQ ID NO: 16908 - protein, 7 aa, synthetic construct
YMDPIGA

SEQ ID NO: 16909 - protein, 7 aa, synthetic construct
PKIVVME

SEQ ID NO: 16910 - protein, 7 aa, synthetic construct
VTATGNW

SEQ ID NO: 16911 - protein, 7 aa, synthetic construct
DPTVSKK

SEQ ID NO: 16912 - protein, 7 aa, synthetic construct
GMDTVPF

SEQ ID NO: 16913 - protein, 7 aa, synthetic construct
EWVTEIE

SEQ ID NO: 16914 - protein, 7 aa, synthetic construct
GGPIENE

SEQ ID NO: 16915 - protein, 7 aa, synthetic construct
HISKLMG

SEQ ID NO: 16916 - protein, 7 aa, synthetic construct
ETTYTDV

SEQ ID NO: 16917 - protein, 7 aa, synthetic construct
PEERLYT

SEQ ID NO: 16918 - protein, 7 aa, synthetic construct
GEQHTYE

SEQ ID NO: 16919 - protein, 7 aa, synthetic construct
YPTHEDF

SEQ ID NO: 16920 - protein, 7 aa, synthetic construct
VEYESYD

SEQ ID NO: 16921 - protein, 7 aa, synthetic construct
SIDMPYT

SEQ ID NO: 16922 - protein, 7 aa, synthetic construct
QSNDQNV

SEQ ID NO: 16923 - protein, 7 aa, synthetic construct
IFAVSDS

SEQ ID NO: 16924 - protein, 7 aa, synthetic construct
LFHNLKQ

SEQ ID NO: 16925 - protein, 7 aa, synthetic construct
RFPEMTR

SEQ ID NO: 16926 - protein, 7 aa, synthetic construct
TEELHNE

SEQ ID NO: 16927 - protein, 7 aa, synthetic construct
CSRFEVC

SEQ ID NO: 16928 - protein, 7 aa, synthetic construct
SWTTSIA

SEQ ID NO: 16929 - protein, 7 aa, synthetic construct
GRPEVTF

SEQ ID NO: 16930 - protein, 7 aa, synthetic construct
PDGEWHT

SEQ ID NO: 16931 - protein, 7 aa, synthetic construct
SATFVGH

SEQ ID NO: 16932 - protein, 7 aa, synthetic construct
AEVWGPK

SEQ ID NO: 16933 - protein, 7 aa, synthetic construct
PHGHDAW

SEQ ID NO: 16934 - protein, 7 aa, synthetic construct
GESPASG

SEQ ID NO: 16935 - protein, 7 aa, synthetic construct
KNQTHYT

SEQ ID NO: 16936 - protein, 7 aa, synthetic construct
ATDQLSW

SEQ ID NO: 16937 - protein, 7 aa, synthetic construct
GVMGFEV

SEQ ID NO: 16938 - protein, 7 aa, synthetic construct
FITAAVN

SEQ ID NO: 16939 - protein, 7 aa, synthetic construct
FITGFAP

SEQ ID NO: 16940 - protein, 7 aa, synthetic construct
TQHNIPV

SEQ ID NO: 16941 - protein, 7 aa, synthetic construct
MKVMPGI

SEQ ID NO: 16942 - protein, 7 aa, synthetic construct
QENVDYE

SEQ ID NO: 16943 - protein, 7 aa, synthetic construct
RGEEVSE

SEQ ID NO: 16944 - protein, 7 aa, synthetic construct
NHNDEDW

SEQ ID NO: 16945 - protein, 7 aa, synthetic construct
FDGNNVT

SEQ ID NO: 16946 - protein, 7 aa, synthetic construct
DDLPQSN

SEQ ID NO: 16947 - protein, 7 aa, synthetic construct
LYEELKQ

SEQ ID NO: 16948 - protein, 7 aa, synthetic construct
DGQTPEN

SEQ ID NO: 16949 - protein, 7 aa, synthetic construct
QDGHGGD

SEQ ID NO: 16950 - protein, 7 aa, synthetic construct
DFTMEGR

SEQ ID NO: 16951 - protein, 7 aa, synthetic construct
QMAANMQ

SEQ ID NO: 16952 - protein, 7 aa, synthetic construct
VVHPVPP

SEQ ID NO: 16953 - protein, 7 aa, synthetic construct
KSGQVWE

SEQ ID NO: 16954 - protein, 7 aa, synthetic construct
EDQPPTK

SEQ ID NO: 16955 - protein, 7 aa, synthetic construct
IHPEWRT

SEQ ID NO: 16956 - protein, 7 aa, synthetic construct
SIDYDLD

SEQ ID NO: 16957 - protein, 7 aa, synthetic construct
YTQVELR

SEQ ID NO: 16958 - protein, 7 aa, synthetic construct
HELDRSR

SEQ ID NO: 16959 - protein, 7 aa, synthetic construct
LVLTHGS

SEQ ID NO: 16960 - protein, 7 aa, synthetic construct
TMIPPHT

SEQ ID NO: 16961 - protein, 7 aa, synthetic construct
RGLNAAE

SEQ ID NO: 16962 - protein, 7 aa, synthetic construct
LGMPDFG

SEQ ID NO: 16963 - protein, 7 aa, synthetic construct
ENPKAMR

SEQ ID NO: 16964 - protein, 7 aa, synthetic construct
WQASFQE

SEQ ID NO: 16965 - protein, 7 aa, synthetic construct
KDDMTMI

SEQ ID NO: 16966 - protein, 7 aa, synthetic construct
NKVHHLG

SEQ ID NO: 16967 - protein, 7 aa, synthetic construct
DGEFEAE

SEQ ID NO: 16968 - protein, 7 aa, synthetic construct
DNTDAMY

SEQ ID NO: 16969 - protein, 7 aa, synthetic construct
SAEPPQI

SEQ ID NO: 16970 - protein, 7 aa, synthetic construct
IPEGMMF

SEQ ID NO: 16971 - protein, 7 aa, synthetic construct
IGDYFVS

SEQ ID NO: 16972 - protein, 7 aa, synthetic construct
NYEIKGW

SEQ ID NO: 16973 - protein, 7 aa, synthetic construct
IQVLSDR

SEQ ID NO: 16974 - protein, 7 aa, synthetic construct
LWDGPLT

SEQ ID NO: 16975 - protein, 7 aa, synthetic construct
VNMDSVL

SEQ ID NO: 16976 - protein, 7 aa, synthetic construct
NNYSMLP

SEQ ID NO: 16977 - protein, 7 aa, synthetic construct
NMEASVY

SEQ ID NO: 16978 - protein, 7 aa, synthetic construct
CSPEKCI

SEQ ID NO: 16979 - protein, 7 aa, synthetic construct
YSAGTEE

SEQ ID NO: 16980 - protein, 7 aa, synthetic construct
AIIGYEE

SEQ ID NO: 16981 - protein, 7 aa, synthetic construct
SQLENMT

SEQ ID NO: 16982 - protein, 7 aa, synthetic construct
WRTAQEK

SEQ ID NO: 16983 - protein, 7 aa, synthetic construct
ATNDMQS

SEQ ID NO: 16984 - protein, 7 aa, synthetic construct
ATVTPTI

SEQ ID NO: 16985 - protein, 7 aa, synthetic construct
DFGRLET

SEQ ID NO: 16986 - protein, 7 aa, synthetic construct
YGENMIP

SEQ ID NO: 16987 - protein, 7 aa, synthetic construct
GDINLIE

SEQ ID NO: 16988 - protein, 7 aa, synthetic construct
RMDDFVL

SEQ ID NO: 16989 - protein, 7 aa, synthetic construct
IEKAQIW

SEQ ID NO: 16990 - protein, 7 aa, synthetic construct
EHSHINN

SEQ ID NO: 16991 - protein, 7 aa, synthetic construct
LYNEIIT

SEQ ID NO: 16992 - protein, 7 aa, synthetic construct
VIYDPGA

SEQ ID NO: 16993 - protein, 7 aa, synthetic construct
QESMTAS

SEQ ID NO: 16994 - protein, 7 aa, synthetic construct
TDKPYVR

SEQ ID NO: 16995 - protein, 7 aa, synthetic construct
MGHKSYP

SEQ ID NO: 16996 - protein, 7 aa, synthetic construct
TAAFDQV

SEQ ID NO: 16997 - protein, 7 aa, synthetic construct
TNELNVW

SEQ ID NO: 16998 - protein, 7 aa, synthetic construct
SDEHVDI

SEQ ID NO: 16999 - protein, 7 aa, synthetic construct
DMDRDLD

SEQ ID NO: 17000 - protein, 7 aa, synthetic construct
SDAEYDL

SEQ ID NO: 17001 - protein, 7 aa, synthetic construct
KNHNENR

SEQ ID NO: 17002 - protein, 7 aa, synthetic construct
FWSHEQE

SEQ ID NO: 17003 - protein, 7 aa, synthetic construct
NFGPVTK

SEQ ID NO: 17004 - protein, 7 aa, synthetic construct
EWTTDRA

SEQ ID NO: 17005 - protein, 7 aa, synthetic construct
TFSMAPG

SEQ ID NO: 17006 - protein, 7 aa, synthetic construct
AERYEMI

SEQ ID NO: 17007 - protein, 7 aa, synthetic construct
QDQHEGW

SEQ ID NO: 17008 - protein, 7 aa, synthetic construct
WDISNRP

SEQ ID NO: 17009 - protein, 7 aa, synthetic construct
GTDMPFK

SEQ ID NO: 17010 - protein, 7 aa, synthetic construct
RKEAEFL

SEQ ID NO: 17011 - protein, 7 aa, synthetic construct
HSDIEIT

SEQ ID NO: 17012 - protein, 7 aa, synthetic construct
WPQGGIA

SEQ ID NO: 17013 - protein, 7 aa, synthetic construct
FRADMDS

SEQ ID NO: 17014 - protein, 7 aa, synthetic construct
QTQLSRY

SEQ ID NO: 17015 - protein, 7 aa, synthetic construct
ASHGLLP

SEQ ID NO: 17016 - protein, 7 aa, synthetic construct
ENTFEMV

SEQ ID NO: 17017 - protein, 7 aa, synthetic construct
IGLRNDM

SEQ ID NO: 17018 - protein, 7 aa, synthetic construct
IVNDDQS

SEQ ID NO: 17019 - protein, 7 aa, synthetic construct
NAEKVIY

SEQ ID NO: 17020 - protein, 7 aa, synthetic construct
FEIGDEN

SEQ ID NO: 17021 - protein, 7 aa, synthetic construct
QTDHGGW

SEQ ID NO: 17022 - protein, 7 aa, synthetic construct
QVRIYDD

SEQ ID NO: 17023 - protein, 7 aa, synthetic construct
LTEFTDK

SEQ ID NO: 17024 - protein, 7 aa, synthetic construct
NYVPPDM

SEQ ID NO: 17025 - protein, 7 aa, synthetic construct
QAVKQWQ

SEQ ID NO: 17026 - protein, 7 aa, synthetic construct
WHMTTIE

SEQ ID NO: 17027 - protein, 7 aa, synthetic construct
VEGLYDR

SEQ ID NO: 17028 - protein, 7 aa, synthetic construct
SLKDFNY

SEQ ID NO: 17029 - protein, 7 aa, synthetic construct
YPISSVH

SEQ ID NO: 17030 - protein, 7 aa, synthetic construct
VEIAHRP

SEQ ID NO: 17031 - protein, 7 aa, synthetic construct
VSENWNF

SEQ ID NO: 17032 - protein, 7 aa, synthetic construct
GSSDAIY

SEQ ID NO: 17033 - protein, 7 aa, synthetic construct
NNQYNRT

SEQ ID NO: 17034 - protein, 7 aa, synthetic construct
GGEWKLI

SEQ ID NO: 17035 - protein, 7 aa, synthetic construct
EDPPWAA

SEQ ID NO: 17036 - protein, 7 aa, synthetic construct
LNENLTR

SEQ ID NO: 17037 - protein, 7 aa, synthetic construct
VHDTDVG

SEQ ID NO: 17038 - protein, 7 aa, synthetic construct
MVEAFSE

SEQ ID NO: 17039 - protein, 7 aa, synthetic construct
TQRTLNF

SEQ ID NO: 17040 - protein, 7 aa, synthetic construct
GAIIKDH

SEQ ID NO: 17041 - protein, 7 aa, synthetic construct
RPYDHLN

SEQ ID NO: 17042 - protein, 7 aa, synthetic construct
MRVVEAQ

SEQ ID NO: 17043 - protein, 7 aa, synthetic construct
DVANAKD

SEQ ID NO: 17044 - protein, 7 aa, synthetic construct
KVSLSFE

SEQ ID NO: 17045 - protein, 7 aa, synthetic construct
PTNIYTS

SEQ ID NO: 17046 - protein, 7 aa, synthetic construct
KDPDWIY

SEQ ID NO: 17047 - protein, 7 aa, synthetic construct
PTTNNDW

SEQ ID NO: 17048 - protein, 7 aa, synthetic construct
MHAPFKV

SEQ ID NO: 17049 - protein, 7 aa, synthetic construct
CQECIEI

SEQ ID NO: 17050 - protein, 7 aa, synthetic construct
NAINDIK

SEQ ID NO: 17051 - protein, 7 aa, synthetic construct
DFDPRSF

SEQ ID NO: 17052 - protein, 7 aa, synthetic construct
NINFQGN

SEQ ID NO: 17053 - protein, 7 aa, synthetic construct
YEEMRHF

SEQ ID NO: 17054 - protein, 7 aa, synthetic construct
LEGDAQL

SEQ ID NO: 17055 - protein, 7 aa, synthetic construct
EALASDE

SEQ ID NO: 17056 - protein, 7 aa, synthetic construct
PDNQLIK

SEQ ID NO: 17057 - protein, 7 aa, synthetic construct
ENVVHMH

SEQ ID NO: 17058 - protein, 7 aa, synthetic construct
DQGKTWV

SEQ ID NO: 17059 - protein, 7 aa, synthetic construct
DLHEGTW

SEQ ID NO: 17060 - protein, 7 aa, synthetic construct
YDHELHL

SEQ ID NO: 17061 - protein, 7 aa, synthetic construct
FQNKFVM

SEQ ID NO: 17062 - protein, 7 aa, synthetic construct
YPVNPYA

SEQ ID NO: 17063 - protein, 7 aa, synthetic construct
PHLDKDY

SEQ ID NO: 17064 - protein, 7 aa, synthetic construct
NEQEMDW

SEQ ID NO: 17065 - protein, 7 aa, synthetic construct
KREGFFG

SEQ ID NO: 17066 - protein, 7 aa, synthetic construct
KYDSVDF

SEQ ID NO: 17067 - protein, 7 aa, synthetic construct
SHSGQAN

SEQ ID NO: 17068 - protein, 7 aa, synthetic construct
STKDWTR

SEQ ID NO: 17069 - protein, 7 aa, synthetic construct
GEPQPQD

SEQ ID NO: 17070 - protein, 7 aa, synthetic construct
IEMYTGD

SEQ ID NO: 17071 - protein, 7 aa, synthetic construct
VGVGPDV

SEQ ID NO: 17072 - protein, 7 aa, synthetic construct
FIVSHKS

SEQ ID NO: 17073 - protein, 7 aa, synthetic construct
FGDHDET

SEQ ID NO: 17074 - protein, 7 aa, synthetic construct
AEHVHKH

SEQ ID NO: 17075 - protein, 7 aa, synthetic construct
GEPEMWI

SEQ ID NO: 17076 - protein, 7 aa, synthetic construct
IHEHDHM

SEQ ID NO: 17077 - protein, 7 aa, synthetic construct
DQSTLIR

SEQ ID NO: 17078 - protein, 7 aa, synthetic construct
PTNVDQE

SEQ ID NO: 17079 - protein, 7 aa, synthetic construct
SVHTVIG

SEQ ID NO: 17080 - protein, 7 aa, synthetic construct
MGLTAVV

SEQ ID NO: 17081 - protein, 7 aa, synthetic construct
ALNQDGV

SEQ ID NO: 17082 - protein, 7 aa, synthetic construct
VSFEKFN

SEQ ID NO: 17083 - protein, 7 aa, synthetic construct
NDEWMMS

SEQ ID NO: 17084 - protein, 7 aa, synthetic construct
PTEDFNA

SEQ ID NO: 17085 - protein, 7 aa, synthetic construct
IDDDAAV

SEQ ID NO: 17086 - protein, 7 aa, synthetic construct
DVHAFKD

SEQ ID NO: 17087 - protein, 7 aa, synthetic construct
EEHSMNE

SEQ ID NO: 17088 - protein, 7 aa, synthetic construct
LLDGQLS

SEQ ID NO: 17089 - protein, 7 aa, synthetic construct
YTIGWQE

SEQ ID NO: 17090 - protein, 7 aa, synthetic construct
HHQEAYL

SEQ ID NO: 17091 - protein, 7 aa, synthetic construct
KEETVND

SEQ ID NO: 17092 - protein, 7 aa, synthetic construct
PMIEKVE

SEQ ID NO: 17093 - protein, 7 aa, synthetic construct
VVDIDHW

SEQ ID NO: 17094 - protein, 7 aa, synthetic construct
MANNYRV

SEQ ID NO: 17095 - protein, 7 aa, synthetic construct
EFSDPMR

SEQ ID NO: 17096 - protein, 7 aa, synthetic construct
NNEGEYP

SEQ ID NO: 17097 - protein, 7 aa, synthetic construct
HHVNRGI

SEQ ID NO: 17098 - protein, 7 aa, synthetic construct
DRLFNGE

SEQ ID NO: 17099 - protein, 7 aa, synthetic construct
NLDAGND

SEQ ID NO: 17100 - protein, 7 aa, synthetic construct
DSFAPDD

SEQ ID NO: 17101 - protein, 7 aa, synthetic construct
YIQANLG

SEQ ID NO: 17102 - protein, 7 aa, synthetic construct
GMEQDEY

SEQ ID NO: 17103 - protein, 7 aa, synthetic construct
QQMNSYL

SEQ ID NO: 17104 - protein, 7 aa, synthetic construct
EIGKLVV

SEQ ID NO: 17105 - protein, 7 aa, synthetic construct
GFAEVSY

SEQ ID NO: 17106 - protein, 7 aa, synthetic construct
FKELRNF

SEQ ID NO: 17107 - protein, 7 aa, synthetic construct
EWKQKPE

SEQ ID NO: 17108 - protein, 7 aa, synthetic construct
LLYKVSD

SEQ ID NO: 17109 - protein, 7 aa, synthetic construct
LNPHQLR

SEQ ID NO: 17110 - protein, 7 aa, synthetic construct
YEGKEEN

SEQ ID NO: 17111 - protein, 7 aa, synthetic construct
VNHIELG

SEQ ID NO: 17112 - protein, 7 aa, synthetic construct
EWETAEG

SEQ ID NO: 17113 - protein, 7 aa, synthetic construct
VFVDLDS

SEQ ID NO: 17114 - protein, 7 aa, synthetic construct
ETAPFDH

SEQ ID NO: 17115 - protein, 7 aa, synthetic construct
KTEDDDW

SEQ ID NO: 17116 - protein, 7 aa, synthetic construct
VMRMEPN

SEQ ID NO: 17117 - protein, 7 aa, synthetic construct
ADHNRLD

SEQ ID NO: 17118 - protein, 7 aa, synthetic construct
ISGQDLS

SEQ ID NO: 17119 - protein, 7 aa, synthetic construct
APKYVVS

SEQ ID NO: 17120 - protein, 7 aa, synthetic construct
PLADVAY

SEQ ID NO: 17121 - protein, 7 aa, synthetic construct
VMVESSV

SEQ ID NO: 17122 - protein, 7 aa, synthetic construct
EITKMQN

SEQ ID NO: 17123 - protein, 7 aa, synthetic construct
HREVSLM

SEQ ID NO: 17124 - protein, 7 aa, synthetic construct
HIQMGGN

SEQ ID NO: 17125 - protein, 7 aa, synthetic construct
FGKYEVP

SEQ ID NO: 17126 - protein, 7 aa, synthetic construct
VEQDVPS

SEQ ID NO: 17127 - protein, 7 aa, synthetic construct
SNTEPDI

SEQ ID NO: 17128 - protein, 7 aa, synthetic construct
QTDASDY

SEQ ID NO: 17129 - protein, 7 aa, synthetic construct
IDSVMIK

SEQ ID NO: 17130 - protein, 7 aa, synthetic construct
GLLNTLT

SEQ ID NO: 17131 - protein, 7 aa, synthetic construct
HEESVSS

SEQ ID NO: 17132 - protein, 7 aa, synthetic construct
PDANAQL

SEQ ID NO: 17133 - protein, 7 aa, synthetic construct
TQDMSNN

SEQ ID NO: 17134 - protein, 7 aa, synthetic construct
REGADTT

SEQ ID NO: 17135 - protein, 7 aa, synthetic construct
PLYPTQT

SEQ ID NO: 17136 - protein, 7 aa, synthetic construct
HPTTVYV

SEQ ID NO: 17137 - protein, 7 aa, synthetic construct
DDNGQDH

SEQ ID NO: 17138 - protein, 7 aa, synthetic construct
KEVSMVL

SEQ ID NO: 17139 - protein, 7 aa, synthetic construct
EVYKAEY

SEQ ID NO: 17140 - protein, 7 aa, synthetic construct
NVIESHT

SEQ ID NO: 17141 - protein, 7 aa, synthetic construct
REDQTLP

SEQ ID NO: 17142 - protein, 7 aa, synthetic construct
FQHSQQM

SEQ ID NO: 17143 - protein, 7 aa, synthetic construct
PVGLKFS

SEQ ID NO: 17144 - protein, 7 aa, synthetic construct
IENFSLL

SEQ ID NO: 17145 - protein, 7 aa, synthetic construct
YDETFVD

SEQ ID NO: 17146 - protein, 7 aa, synthetic construct
YEISAKM

SEQ ID NO: 17147 - protein, 7 aa, synthetic construct
LQATADV

SEQ ID NO: 17148 - protein, 7 aa, synthetic construct
YISKMQG

SEQ ID NO: 17149 - protein, 7 aa, synthetic construct
AATQGMD

SEQ ID NO: 17150 - protein, 7 aa, synthetic construct
GAYIYED

SEQ ID NO: 17151 - protein, 7 aa, synthetic construct
SVSEPLF

SEQ ID NO: 17152 - protein, 7 aa, synthetic construct
MHHGAAV

SEQ ID NO: 17153 - protein, 7 aa, synthetic construct
AEIHHPV

SEQ ID NO: 17154 - protein, 7 aa, synthetic construct
RLMIIKD

SEQ ID NO: 17155 - protein, 7 aa, synthetic construct
EIQDVNW

SEQ ID NO: 17156 - protein, 7 aa, synthetic construct
MTPMTFD

SEQ ID NO: 17157 - protein, 7 aa, synthetic construct
IDNVSIK

SEQ ID NO: 17158 - protein, 7 aa, synthetic construct
WISQEEI

SEQ ID NO: 17159 - protein, 7 aa, synthetic construct
DWGDQGT

SEQ ID NO: 17160 - protein, 7 aa, synthetic construct
AEEEKPR

SEQ ID NO: 17161 - protein, 7 aa, synthetic construct
YDNALTQ

SEQ ID NO: 17162 - protein, 7 aa, synthetic construct
GTGEPTE

SEQ ID NO: 17163 - protein, 7 aa, synthetic construct
MKMGNMV

SEQ ID NO: 17164 - protein, 7 aa, synthetic construct
MWDNLQP

SEQ ID NO: 17165 - protein, 7 aa, synthetic construct
WEHDKLP

SEQ ID NO: 17166 - protein, 7 aa, synthetic construct
YEGEAHL

SEQ ID NO: 17167 - protein, 7 aa, synthetic construct
VVGGLVE

SEQ ID NO: 17168 - protein, 7 aa, synthetic construct
TDMMEKE

SEQ ID NO: 17169 - protein, 7 aa, synthetic construct
TRAYPPV

SEQ ID NO: 17170 - protein, 7 aa, synthetic construct
DAHNYRQ

SEQ ID NO: 17171 - protein, 7 aa, synthetic construct
NQPEINW

SEQ ID NO: 17172 - protein, 7 aa, synthetic construct
SEIGDQK

SEQ ID NO: 17173 - protein, 7 aa, synthetic construct
QEAANDL

SEQ ID NO: 17174 - protein, 7 aa, synthetic construct
VPNEFTS

SEQ ID NO: 17175 - protein, 7 aa, synthetic construct
NMQFQRD

SEQ ID NO: 17176 - protein, 7 aa, synthetic construct
EPVFYEE

SEQ ID NO: 17177 - protein, 7 aa, synthetic construct
LGQYAGF

SEQ ID NO: 17178 - protein, 7 aa, synthetic construct
QTQDKMM

SEQ ID NO: 17179 - protein, 7 aa, synthetic construct
ATDQGKV

SEQ ID NO: 17180 - protein, 7 aa, synthetic construct
DDATGTQ

SEQ ID NO: 17181 - protein, 7 aa, synthetic construct
GAIVNAV

SEQ ID NO: 17182 - protein, 7 aa, synthetic construct
LVKNEWA

SEQ ID NO: 17183 - protein, 7 aa, synthetic construct
MNNPAIQ

SEQ ID NO: 17184 - protein, 7 aa, synthetic construct
TGRSGLF

SEQ ID NO: 17185 - protein, 7 aa, synthetic construct
GFSEVEI

SEQ ID NO: 17186 - protein, 7 aa, synthetic construct
ESKEEID

SEQ ID NO: 17187 - protein, 7 aa, synthetic construct
EPILNGR

SEQ ID NO: 17188 - protein, 7 aa, synthetic construct
HDDDHHW

SEQ ID NO: 17189 - protein, 7 aa, synthetic construct
EIPAAQD

SEQ ID NO: 17190 - protein, 7 aa, synthetic construct
DENSNWN

SEQ ID NO: 17191 - protein, 7 aa, synthetic construct
NMGRESD

SEQ ID NO: 17192 - protein, 7 aa, synthetic construct
PFKLHDE

SEQ ID NO: 17193 - protein, 7 aa, synthetic construct
FQKTLYE

SEQ ID NO: 17194 - protein, 7 aa, synthetic construct
GNGKWQE

SEQ ID NO: 17195 - protein, 7 aa, synthetic construct
NFGEQPL

SEQ ID NO: 17196 - protein, 7 aa, synthetic construct
NYNFVNE

SEQ ID NO: 17197 - protein, 7 aa, synthetic construct
RNHQDRI

SEQ ID NO: 17198 - protein, 7 aa, synthetic construct
IPEHAGV

SEQ ID NO: 17199 - protein, 7 aa, synthetic construct
SSHRDRI

SEQ ID NO: 17200 - protein, 7 aa, synthetic construct
GGGDFNE

SEQ ID NO: 17201 - protein, 7 aa, synthetic construct
WADVDHH

SEQ ID NO: 17202 - protein, 7 aa, synthetic construct
TQSAEFD

SEQ ID NO: 17203 - protein, 7 aa, synthetic construct
EAQIMEN

SEQ ID NO: 17204 - protein, 7 aa, synthetic construct
QSQEAFP

SEQ ID NO: 17205 - protein, 7 aa, synthetic construct
FTGFSNN

SEQ ID NO: 17206 - protein, 7 aa, synthetic construct
LDHEHYT

SEQ ID NO: 17207 - protein, 7 aa, synthetic construct
NLSLIIE

SEQ ID NO: 17208 - protein, 7 aa, synthetic construct
DMSNWDK

SEQ ID NO: 17209 - protein, 7 aa, synthetic construct
PMMSVMK

SEQ ID NO: 17210 - protein, 7 aa, synthetic construct
NWETAAN

SEQ ID NO: 17211 - protein, 7 aa, synthetic construct
FMDDTMH

SEQ ID NO: 17212 - protein, 7 aa, synthetic construct
AYDELSE

SEQ ID NO: 17213 - protein, 7 aa, synthetic construct
KPDHEVN

SEQ ID NO: 17214 - protein, 7 aa, synthetic construct
QAAMFPV

SEQ ID NO: 17215 - protein, 7 aa, synthetic construct
EGEMNLV

SEQ ID NO: 17216 - protein, 7 aa, synthetic construct
VPSDFYD

SEQ ID NO: 17217 - protein, 7 aa, synthetic construct
ILEPVDK

SEQ ID NO: 17218 - protein, 7 aa, synthetic construct
HESQILL

SEQ ID NO: 17219 - protein, 7 aa, synthetic construct
KDSWVEE

SEQ ID NO: 17220 - protein, 7 aa, synthetic construct
SVHDFQY

SEQ ID NO: 17221 - protein, 7 aa, synthetic construct
WDPHHLQ

SEQ ID NO: 17222 - protein, 7 aa, synthetic construct
QDLHPSH

SEQ ID NO: 17223 - protein, 7 aa, synthetic construct
QLDEKSG

SEQ ID NO: 17224 - protein, 7 aa, synthetic construct
DTYASDL

SEQ ID NO: 17225 - protein, 7 aa, synthetic construct
GYQADMK

SEQ ID NO: 17226 - protein, 7 aa, synthetic construct
ENHPYDG

SEQ ID NO: 17227 - protein, 7 aa, synthetic construct
YPNSLIV

SEQ ID NO: 17228 - protein, 7 aa, synthetic construct
ATKDALW

SEQ ID NO: 17229 - protein, 7 aa, synthetic construct
MNQVMMH

SEQ ID NO: 17230 - protein, 7 aa, synthetic construct
YRQTNTI

SEQ ID NO: 17231 - protein, 7 aa, synthetic construct
EMIGPAM

SEQ ID NO: 17232 - protein, 7 aa, synthetic construct
PAHVIST

SEQ ID NO: 17233 - protein, 7 aa, synthetic construct
ELQWQET

SEQ ID NO: 17234 - protein, 7 aa, synthetic construct
DDEGSRD

SEQ ID NO: 17235 - protein, 7 aa, synthetic construct
SFQHKVS

SEQ ID NO: 17236 - protein, 7 aa, synthetic construct
MSTSMKF

SEQ ID NO: 17237 - protein, 7 aa, synthetic construct
VVEDQLF

SEQ ID NO: 17238 - protein, 7 aa, synthetic construct
ANYEGVN

SEQ ID NO: 17239 - protein, 7 aa, synthetic construct
PWNPNQL

SEQ ID NO: 17240 - protein, 7 aa, synthetic construct
HLAYGDR

SEQ ID NO: 17241 - protein, 7 aa, synthetic construct
YMASDFV

SEQ ID NO: 17242 - protein, 7 aa, synthetic construct
LKMGIKP

SEQ ID NO: 17243 - protein, 7 aa, synthetic construct
DNNIGLM

SEQ ID NO: 17244 - protein, 7 aa, synthetic construct
EPYENIV

SEQ ID NO: 17245 - protein, 7 aa, synthetic construct
HPRDPRP

SEQ ID NO: 17246 - protein, 7 aa, synthetic construct
PATHQLH

SEQ ID NO: 17247 - protein, 7 aa, synthetic construct
AYPDGTD

SEQ ID NO: 17248 - protein, 7 aa, synthetic construct
GTGIFNP

SEQ ID NO: 17249 - protein, 7 aa, synthetic construct
RDQEANG

SEQ ID NO: 17250 - protein, 7 aa, synthetic construct
LVNYAPT

SEQ ID NO: 17251 - protein, 7 aa, synthetic construct
VEFNSHH

SEQ ID NO: 17252 - protein, 7 aa, synthetic construct
VNISDRW

SEQ ID NO: 17253 - protein, 7 aa, synthetic construct
NGDLVID

SEQ ID NO: 17254 - protein, 7 aa, synthetic construct
DEYPQDS

SEQ ID NO: 17255 - protein, 7 aa, synthetic construct
ARPVYTA

SEQ ID NO: 17256 - protein, 7 aa, synthetic construct
WEAPTSE

SEQ ID NO: 17257 - protein, 7 aa, synthetic construct
QFPTGLV

SEQ ID NO: 17258 - protein, 7 aa, synthetic construct
HGHMQLQ

SEQ ID NO: 17259 - protein, 7 aa, synthetic construct
STQLNAL

SEQ ID NO: 17260 - protein, 7 aa, synthetic construct
VIKFENM

SEQ ID NO: 17261 - protein, 7 aa, synthetic construct
NVMEQGH

SEQ ID NO: 17262 - protein, 7 aa, synthetic construct
SDDVHMF

SEQ ID NO: 17263 - protein, 7 aa, synthetic construct
ISQPFEE

SEQ ID NO: 17264 - protein, 7 aa, synthetic construct
HEHSPET

SEQ ID NO: 17265 - protein, 7 aa, synthetic construct
VNSPEEA

SEQ ID NO: 17266 - protein, 7 aa, synthetic construct
VSMHIVE

SEQ ID NO: 17267 - protein, 7 aa, synthetic construct
FHGEGEL

SEQ ID NO: 17268 - protein, 7 aa, synthetic construct
KDEFKGN

SEQ ID NO: 17269 - protein, 7 aa, synthetic construct
GWDDKNQ

SEQ ID NO: 17270 - protein, 7 aa, synthetic construct
LHIDDRG

SEQ ID NO: 17271 - protein, 7 aa, synthetic construct
DSNPNPP

SEQ ID NO: 17272 - protein, 7 aa, synthetic construct
VAQEETN

SEQ ID NO: 17273 - protein, 7 aa, synthetic construct
YVPTEYI

SEQ ID NO: 17274 - protein, 7 aa, synthetic construct
FQDGEFP

SEQ ID NO: 17275 - protein, 7 aa, synthetic construct
PYRPHIP

SEQ ID NO: 17276 - protein, 7 aa, synthetic construct
ETHMIIP

SEQ ID NO: 17277 - protein, 7 aa, synthetic construct
EEEPDFR

SEQ ID NO: 17278 - protein, 7 aa, synthetic construct
LFVDTHR

SEQ ID NO: 17279 - protein, 7 aa, synthetic construct
QSADWTG

SEQ ID NO: 17280 - protein, 7 aa, synthetic construct
GVSMNFK

SEQ ID NO: 17281 - protein, 7 aa, synthetic construct
DVAINGP

SEQ ID NO: 17282 - protein, 7 aa, synthetic construct
RDHPPYS

SEQ ID NO: 17283 - protein, 7 aa, synthetic construct
EGETMGF

SEQ ID NO: 17284 - protein, 7 aa, synthetic construct
FDTEESY

SEQ ID NO: 17285 - protein, 7 aa, synthetic construct
IEGGNYE

SEQ ID NO: 17286 - protein, 7 aa, synthetic construct
ALNHVYS

SEQ ID NO: 17287 - protein, 7 aa, synthetic construct
NEVFDNG

SEQ ID NO: 17288 - protein, 7 aa, synthetic construct
VHMYQTA

SEQ ID NO: 17289 - protein, 7 aa, synthetic construct
DMTQIGG

SEQ ID NO: 17290 - protein, 7 aa, synthetic construct
GAIYIPE

SEQ ID NO: 17291 - protein, 7 aa, synthetic construct
FMLGHEG

SEQ ID NO: 17292 - protein, 7 aa, synthetic construct
GAHQDEE

SEQ ID NO: 17293 - protein, 7 aa, synthetic construct
DETMSKR

SEQ ID NO: 17294 - protein, 7 aa, synthetic construct
SMFLKGD

SEQ ID NO: 17295 - protein, 7 aa, synthetic construct
TEGPEIP

SEQ ID NO: 17296 - protein, 7 aa, synthetic construct
VQDEQVR

SEQ ID NO: 17297 - protein, 7 aa, synthetic construct
LYDHIHS

SEQ ID NO: 17298 - protein, 7 aa, synthetic construct
NFTSLDR

SEQ ID NO: 17299 - protein, 7 aa, synthetic construct
FDISSGY

SEQ ID NO: 17300 - protein, 7 aa, synthetic construct
GRFHFEA

SEQ ID NO: 17301 - protein, 7 aa, synthetic construct
FDTSIMP

SEQ ID NO: 17302 - protein, 7 aa, synthetic construct
MDSTHYL

SEQ ID NO: 17303 - protein, 7 aa, synthetic construct
KLNNLHY

SEQ ID NO: 17304 - protein, 7 aa, synthetic construct
SSVPQYV

SEQ ID NO: 17305 - protein, 7 aa, synthetic construct
WHEIYES

SEQ ID NO: 17306 - protein, 7 aa, synthetic construct
IEMRPPA

SEQ ID NO: 17307 - protein, 7 aa, synthetic construct
DNAKFIQ

SEQ ID NO: 17308 - protein, 7 aa, synthetic construct
DTSVPEP

SEQ ID NO: 17309 - protein, 7 aa, synthetic construct
FNFPQKA

SEQ ID NO: 17310 - protein, 7 aa, synthetic construct
NPNNDFW

SEQ ID NO: 17311 - protein, 7 aa, synthetic construct
HYKDNKQ

SEQ ID NO: 17312 - protein, 7 aa, synthetic construct
QPQMEHW

SEQ ID NO: 17313 - protein, 7 aa, synthetic construct
LEQALGL

SEQ ID NO: 17314 - protein, 7 aa, synthetic construct
SMTEGIY

SEQ ID NO: 17315 - protein, 7 aa, synthetic construct
LQDEANN

SEQ ID NO: 17316 - protein, 7 aa, synthetic construct
MMKNVYD

SEQ ID NO: 17317 - protein, 7 aa, synthetic construct
TTWPDLE

SEQ ID NO: 17318 - protein, 7 aa, synthetic construct
FQPHVMI

SEQ ID NO: 17319 - protein, 7 aa, synthetic construct
RDFKMLQ

SEQ ID NO: 17320 - protein, 7 aa, synthetic construct
CDERVSC

SEQ ID NO: 17321 - protein, 7 aa, synthetic construct
PMQLDRL

SEQ ID NO: 17322 - protein, 7 aa, synthetic construct
QMHRDWV

SEQ ID NO: 17323 - protein, 7 aa, synthetic construct
LFDGLNR

SEQ ID NO: 17324 - protein, 7 aa, synthetic construct
WEQKEGQ

SEQ ID NO: 17325 - protein, 7 aa, synthetic construct
SLHEMGW

SEQ ID NO: 17326 - protein, 7 aa, synthetic construct
ALPLDNA

SEQ ID NO: 17327 - protein, 7 aa, synthetic construct
PGAWANA

SEQ ID NO: 17328 - protein, 7 aa, synthetic construct
EFHDMYK

SEQ ID NO: 17329 - protein, 7 aa, synthetic construct
EMHIEVH

SEQ ID NO: 17330 - protein, 7 aa, synthetic construct
REPSVRT

SEQ ID NO: 17331 - protein, 7 aa, synthetic construct
QGKWVTS

SEQ ID NO: 17332 - protein, 7 aa, synthetic construct
RLAITEY

SEQ ID NO: 17333 - protein, 7 aa, synthetic construct
DQFMTAG

SEQ ID NO: 17334 - protein, 7 aa, synthetic construct
DDELEVP

SEQ ID NO: 17335 - protein, 7 aa, synthetic construct
PTDEEYK

SEQ ID NO: 17336 - protein, 7 aa, synthetic construct
TINLMVA

SEQ ID NO: 17337 - protein, 7 aa, synthetic construct
FMDLAPS

SEQ ID NO: 17338 - protein, 7 aa, synthetic construct
YTDFTVY

SEQ ID NO: 17339 - protein, 7 aa, synthetic construct
HPSAPVY

SEQ ID NO: 17340 - protein, 7 aa, synthetic construct
SVYTGTT

SEQ ID NO: 17341 - protein, 7 aa, synthetic construct
LNHGILE

SEQ ID NO: 17342 - protein, 7 aa, synthetic construct
YFNSSEY

SEQ ID NO: 17343 - protein, 7 aa, synthetic construct
DENPKVF

SEQ ID NO: 17344 - protein, 7 aa, synthetic construct
MDGSHWE

SEQ ID NO: 17345 - protein, 7 aa, synthetic construct
TWDVGKA

SEQ ID NO: 17346 - protein, 7 aa, synthetic construct
NRDSLNW

SEQ ID NO: 17347 - protein, 7 aa, synthetic construct
ALPDWKH

SEQ ID NO: 17348 - protein, 7 aa, synthetic construct
FMTMTID

SEQ ID NO: 17349 - protein, 7 aa, synthetic construct
HFGIDAK

SEQ ID NO: 17350 - protein, 7 aa, synthetic construct
AETIGVG

SEQ ID NO: 17351 - protein, 7 aa, synthetic construct
PAWHEME

SEQ ID NO: 17352 - protein, 7 aa, synthetic construct
TWEDNFS

SEQ ID NO: 17353 - protein, 7 aa, synthetic construct
DIDYNES

SEQ ID NO: 17354 - protein, 7 aa, synthetic construct
FINGHKS

SEQ ID NO: 17355 - protein, 7 aa, synthetic construct
EPAEITS

SEQ ID NO: 17356 - protein, 7 aa, synthetic construct
FTATIFE

SEQ ID NO: 17357 - protein, 7 aa, synthetic construct
WDVGTQL

SEQ ID NO: 17358 - protein, 7 aa, synthetic construct
RPFDDAN

SEQ ID NO: 17359 - protein, 7 aa, synthetic construct
VAVMEIS

SEQ ID NO: 17360 - protein, 7 aa, synthetic construct
HQDSTSE

SEQ ID NO: 17361 - protein, 7 aa, synthetic construct
VIELGTG

SEQ ID NO: 17362 - protein, 7 aa, synthetic construct
GMTIRPN

SEQ ID NO: 17363 - protein, 7 aa, synthetic construct
QDPTDHF

SEQ ID NO: 17364 - protein, 7 aa, synthetic construct
NEWDFAG

SEQ ID NO: 17365 - protein, 7 aa, synthetic construct
NFSTKFP

SEQ ID NO: 17366 - protein, 7 aa, synthetic construct
DLRTPDT

SEQ ID NO: 17367 - protein, 7 aa, synthetic construct
YKNEILE

SEQ ID NO: 17368 - protein, 7 aa, synthetic construct
LTFGVQN

SEQ ID NO: 17369 - protein, 7 aa, synthetic construct
LPPTMVR

SEQ ID NO: 17370 - protein, 7 aa, synthetic construct
IETPWPD

SEQ ID NO: 17371 - protein, 7 aa, synthetic construct
IEFKIEE

SEQ ID NO: 17372 - protein, 7 aa, synthetic construct
THNEAFW

SEQ ID NO: 17373 - protein, 7 aa, synthetic construct
HNTDVEV

SEQ ID NO: 17374 - protein, 7 aa, synthetic construct
AEPSIMD

SEQ ID NO: 17375 - protein, 7 aa, synthetic construct
LFNAQLS

SEQ ID NO: 17376 - protein, 7 aa, synthetic construct
TADDSDP

SEQ ID NO: 17377 - protein, 7 aa, synthetic construct
EENGRDL

SEQ ID NO: 17378 - protein, 7 aa, synthetic construct
PDEHQKD

SEQ ID NO: 17379 - protein, 7 aa, synthetic construct
PAVVTSG

SEQ ID NO: 17380 - protein, 7 aa, synthetic construct
GYSKDNL

SEQ ID NO: 17381 - protein, 7 aa, synthetic construct
DHPETWK

SEQ ID NO: 17382 - protein, 7 aa, synthetic construct
FDKQGEE

SEQ ID NO: 17383 - protein, 7 aa, synthetic construct
PADDISV

SEQ ID NO: 17384 - protein, 7 aa, synthetic construct
MQMETES

SEQ ID NO: 17385 - protein, 7 aa, synthetic construct
PPLVSME

SEQ ID NO: 17386 - protein, 7 aa, synthetic construct
FEPNLTN

SEQ ID NO: 17387 - protein, 7 aa, synthetic construct
PEDRAIP

SEQ ID NO: 17388 - protein, 7 aa, synthetic construct
HVMQLEI

SEQ ID NO: 17389 - protein, 7 aa, synthetic construct
GTWEHNM

SEQ ID NO: 17390 - protein, 7 aa, synthetic construct
NPGIRHL

SEQ ID NO: 17391 - protein, 7 aa, synthetic construct
LDEAFIP

SEQ ID NO: 17392 - protein, 7 aa, synthetic construct
ESLPSQG

SEQ ID NO: 17393 - protein, 7 aa, synthetic construct
YDDTYHL

SEQ ID NO: 17394 - protein, 7 aa, synthetic construct
VTTPEAT

SEQ ID NO: 17395 - protein, 7 aa, synthetic construct
DMGVHVT

SEQ ID NO: 17396 - protein, 7 aa, synthetic construct
WGDVEDV

SEQ ID NO: 17397 - protein, 7 aa, synthetic construct
HHIVTKP

SEQ ID NO: 17398 - protein, 7 aa, synthetic construct
YGERMDH

SEQ ID NO: 17399 - protein, 7 aa, synthetic construct
YEVVEGF

SEQ ID NO: 17400 - protein, 7 aa, synthetic construct
TEDWEYL

SEQ ID NO: 17401 - protein, 7 aa, synthetic construct
QLEAAWA

SEQ ID NO: 17402 - protein, 7 aa, synthetic construct
THPKVQN

SEQ ID NO: 17403 - protein, 7 aa, synthetic construct
VNDHNAE

SEQ ID NO: 17404 - protein, 7 aa, synthetic construct
ELSNDPS

SEQ ID NO: 17405 - protein, 7 aa, synthetic construct
FQDMKWH

SEQ ID NO: 17406 - protein, 7 aa, synthetic construct
DHLRPKV

SEQ ID NO: 17407 - protein, 7 aa, synthetic construct
HDQIPEQ

SEQ ID NO: 17408 - protein, 7 aa, synthetic construct
KTEWHMD

SEQ ID NO: 17409 - protein, 7 aa, synthetic construct
ARVVPQP

SEQ ID NO: 17410 - protein, 7 aa, synthetic construct
SRMRGIE

SEQ ID NO: 17411 - protein, 7 aa, synthetic construct
GTFRNDF

SEQ ID NO: 17412 - protein, 7 aa, synthetic construct
WQNMRDK

SEQ ID NO: 17413 - protein, 7 aa, synthetic construct
PLGHVPL

SEQ ID NO: 17414 - protein, 7 aa, synthetic construct
EIMGHTP

SEQ ID NO: 17415 - protein, 7 aa, synthetic construct
PSIDETY

SEQ ID NO: 17416 - protein, 7 aa, synthetic construct
PNEFLMG

SEQ ID NO: 17417 - protein, 7 aa, synthetic construct
INLDEKG

SEQ ID NO: 17418 - protein, 7 aa, synthetic construct
NQEVDPI

SEQ ID NO: 17419 - protein, 7 aa, synthetic construct
RDQFNLH

SEQ ID NO: 17420 - protein, 7 aa, synthetic construct
YDSIEGM

SEQ ID NO: 17421 - protein, 7 aa, synthetic construct
YVSDVAH

SEQ ID NO: 17422 - protein, 7 aa, synthetic construct
AIENQGY

SEQ ID NO: 17423 - protein, 7 aa, synthetic construct
DDRGWQS

SEQ ID NO: 17424 - protein, 7 aa, synthetic construct
PGDFKLK

SEQ ID NO: 17425 - protein, 7 aa, synthetic construct
LSKMSFG

SEQ ID NO: 17426 - protein, 7 aa, synthetic construct
HQENWHQ

SEQ ID NO: 17427 - protein, 7 aa, synthetic construct
KLDNLMN

SEQ ID NO: 17428 - protein, 7 aa, synthetic construct
EENQVVI

SEQ ID NO: 17429 - protein, 7 aa, synthetic construct
NTKEFDD

SEQ ID NO: 17430 - protein, 7 aa, synthetic construct
EVVAGME

SEQ ID NO: 17431 - protein, 7 aa, synthetic construct
DETNLDR

SEQ ID NO: 17432 - protein, 7 aa, synthetic construct
IENYTHD

SEQ ID NO: 17433 - protein, 7 aa, synthetic construct
FLEDNSP

SEQ ID NO: 17434 - protein, 7 aa, synthetic construct
YEHVEIH

SEQ ID NO: 17435 - protein, 7 aa, synthetic construct
GSGYADI

SEQ ID NO: 17436 - protein, 7 aa, synthetic construct
KHTILSD

SEQ ID NO: 17437 - protein, 7 aa, synthetic construct
WLDTKVL

SEQ ID NO: 17438 - protein, 7 aa, synthetic construct
EIMAQTK

SEQ ID NO: 17439 - protein, 7 aa, synthetic construct
YSRIPEM

SEQ ID NO: 17440 - protein, 7 aa, synthetic construct
FPAKSSH

SEQ ID NO: 17441 - protein, 7 aa, synthetic construct
HLDHPHN

SEQ ID NO: 17442 - protein, 7 aa, synthetic construct
YDEREAE

SEQ ID NO: 17443 - protein, 7 aa, synthetic construct
NVRALAL

SEQ ID NO: 17444 - protein, 7 aa, synthetic construct
AVGDSLW

SEQ ID NO: 17445 - protein, 7 aa, synthetic construct
EIEGEVL

SEQ ID NO: 17446 - protein, 7 aa, synthetic construct
MRNEGAW

SEQ ID NO: 17447 - protein, 7 aa, synthetic construct
LDQDDGS

SEQ ID NO: 17448 - protein, 7 aa, synthetic construct
TEEEKLE

SEQ ID NO: 17449 - protein, 7 aa, synthetic construct
HSESRLD

SEQ ID NO: 17450 - protein, 7 aa, synthetic construct
AEVWSEG

SEQ ID NO: 17451 - protein, 7 aa, synthetic construct
RQFREQS

SEQ ID NO: 17452 - protein, 7 aa, synthetic construct
DMAHIEY

SEQ ID NO: 17453 - protein, 7 aa, synthetic construct
GHQQFNE

SEQ ID NO: 17454 - protein, 7 aa, synthetic construct
IDEQRYF

SEQ ID NO: 17455 - protein, 7 aa, synthetic construct
QNEIKWR

SEQ ID NO: 17456 - protein, 7 aa, synthetic construct
YFPDQFD

SEQ ID NO: 17457 - protein, 7 aa, synthetic construct
PYIQQGI

SEQ ID NO: 17458 - protein, 7 aa, synthetic construct
MTVKLGI

SEQ ID NO: 17459 - protein, 7 aa, synthetic construct
GKQVKAD

SEQ ID NO: 17460 - protein, 7 aa, synthetic construct
LEKYHYE

SEQ ID NO: 17461 - protein, 7 aa, synthetic construct
KDVDHDE

SEQ ID NO: 17462 - protein, 7 aa, synthetic construct
VMLANNE

SEQ ID NO: 17463 - protein, 7 aa, synthetic construct
LVNAVAI

SEQ ID NO: 17464 - protein, 7 aa, synthetic construct
DTFDETV

SEQ ID NO: 17465 - protein, 7 aa, synthetic construct
TLTYAEM

SEQ ID NO: 17466 - protein, 7 aa, synthetic construct
IQEFEKV

SEQ ID NO: 17467 - protein, 7 aa, synthetic construct
GKKSDER

SEQ ID NO: 17468 - protein, 7 aa, synthetic construct
PNEIHVL

SEQ ID NO: 17469 - protein, 7 aa, synthetic construct
FIDAKME

SEQ ID NO: 17470 - protein, 7 aa, synthetic construct
VMDVDFQ

SEQ ID NO: 17471 - protein, 7 aa, synthetic construct
YVNVRSV

SEQ ID NO: 17472 - protein, 7 aa, synthetic construct
YIHEGVI

SEQ ID NO: 17473 - protein, 7 aa, synthetic construct
IPQHSTR

SEQ ID NO: 17474 - protein, 7 aa, synthetic construct
VQGIETD

SEQ ID NO: 17475 - protein, 7 aa, synthetic construct
YDFPKFD

SEQ ID NO: 17476 - protein, 7 aa, synthetic construct
TAEPTSE

SEQ ID NO: 17477 - protein, 7 aa, synthetic construct
HARIQMS

SEQ ID NO: 17478 - protein, 7 aa, synthetic construct
VEMQDIE

SEQ ID NO: 17479 - protein, 7 aa, synthetic construct
EPQLVEK

SEQ ID NO: 17480 - protein, 7 aa, synthetic construct
MRDDIQF

SEQ ID NO: 17481 - protein, 7 aa, synthetic construct
WVITESP

SEQ ID NO: 17482 - protein, 7 aa, synthetic construct
DAKQTNP

SEQ ID NO: 17483 - protein, 7 aa, synthetic construct
IHLENIG

SEQ ID NO: 17484 - protein, 7 aa, synthetic construct
NQYGSHR

SEQ ID NO: 17485 - protein, 7 aa, synthetic construct
SENLNMF

SEQ ID NO: 17486 - protein, 7 aa, synthetic construct
AEGDTYL

SEQ ID NO: 17487 - protein, 7 aa, synthetic construct
QEKFDLQ

SEQ ID NO: 17488 - protein, 7 aa, synthetic construct
MTNNPEW

SEQ ID NO: 17489 - protein, 7 aa, synthetic construct
VWDIKAS

SEQ ID NO: 17490 - protein, 7 aa, synthetic construct
VGPNWQP

SEQ ID NO: 17491 - protein, 7 aa, synthetic construct
TIFAETK

SEQ ID NO: 17492 - protein, 7 aa, synthetic construct
AIIGMTK

SEQ ID NO: 17493 - protein, 7 aa, synthetic construct
VTIVKLE

SEQ ID NO: 17494 - protein, 7 aa, synthetic construct
SNFGKAH

SEQ ID NO: 17495 - protein, 7 aa, synthetic construct
TWKYPND

SEQ ID NO: 17496 - protein, 7 aa, synthetic construct
SQPLDTP

SEQ ID NO: 17497 - protein, 7 aa, synthetic construct
KGFDKVY

SEQ ID NO: 17498 - protein, 7 aa, synthetic construct
HMIESVH

SEQ ID NO: 17499 - protein, 7 aa, synthetic construct
PMSPLHR

SEQ ID NO: 17500 - protein, 7 aa, synthetic construct
LILNEQI

SEQ ID NO: 17501 - protein, 7 aa, synthetic construct
TFGTIKI

SEQ ID NO: 17502 - protein, 7 aa, synthetic construct
AADVATA

SEQ ID NO: 17503 - protein, 7 aa, synthetic construct
NQNDFVL

SEQ ID NO: 17504 - protein, 7 aa, synthetic construct
GHSVKIV

SEQ ID NO: 17505 - protein, 7 aa, synthetic construct
IMVENNG

SEQ ID NO: 17506 - protein, 7 aa, synthetic construct
YHQNWGA

SEQ ID NO: 17507 - protein, 7 aa, synthetic construct
LQGIDIG

SEQ ID NO: 17508 - protein, 7 aa, synthetic construct
DSMDMHV

SEQ ID NO: 17509 - protein, 7 aa, synthetic construct
NPLDVED

SEQ ID NO: 17510 - protein, 7 aa, synthetic construct
YDDRFEF

SEQ ID NO: 17511 - protein, 7 aa, synthetic construct
MPEDTNL

SEQ ID NO: 17512 - protein, 7 aa, synthetic construct
IAAQEPA

SEQ ID NO: 17513 - protein, 7 aa, synthetic construct
DYKVTHK

SEQ ID NO: 17514 - protein, 7 aa, synthetic construct
ESGATAQ

SEQ ID NO: 17515 - protein, 7 aa, synthetic construct
EQIQGGE

SEQ ID NO: 17516 - protein, 7 aa, synthetic construct
WIKKSNE

SEQ ID NO: 17517 - protein, 7 aa, synthetic construct
SQYGAIQ

SEQ ID NO: 17518 - protein, 7 aa, synthetic construct
EEMTLVR

SEQ ID NO: 17519 - protein, 7 aa, synthetic construct
CLQSHCI

SEQ ID NO: 17520 - protein, 7 aa, synthetic construct
AANSGPR

SEQ ID NO: 17521 - protein, 7 aa, synthetic construct
NAVEGPY

SEQ ID NO: 17522 - protein, 7 aa, synthetic construct
SYEPEND

SEQ ID NO: 17523 - protein, 7 aa, synthetic construct
KWHDGEV

SEQ ID NO: 17524 - protein, 7 aa, synthetic construct
TLRSVTY

SEQ ID NO: 17525 - protein, 7 aa, synthetic construct
DRDQVDG

SEQ ID NO: 17526 - protein, 7 aa, synthetic construct
PESDKED

SEQ ID NO: 17527 - protein, 7 aa, synthetic construct
DEWHISH

SEQ ID NO: 17528 - protein, 7 aa, synthetic construct
FEEGRNF

SEQ ID NO: 17529 - protein, 7 aa, synthetic construct
PIDNTSM

SEQ ID NO: 17530 - protein, 7 aa, synthetic construct
GPLVTDY

SEQ ID NO: 17531 - protein, 7 aa, synthetic construct
KIVFSDA

SEQ ID NO: 17532 - protein, 7 aa, synthetic construct
QMIDSKQ

SEQ ID NO: 17533 - protein, 7 aa, synthetic construct
SHTDTMD

SEQ ID NO: 17534 - protein, 7 aa, synthetic construct
SAHELPE

SEQ ID NO: 17535 - protein, 7 aa, synthetic construct
SFVVGGK

SEQ ID NO: 17536 - protein, 7 aa, synthetic construct
SVSQRIQ

SEQ ID NO: 17537 - protein, 7 aa, synthetic construct
YEHEQHW

SEQ ID NO: 17538 - protein, 7 aa, synthetic construct
RPTNPPM

SEQ ID NO: 17539 - protein, 7 aa, synthetic construct
LSDYALV

SEQ ID NO: 17540 - protein, 7 aa, synthetic construct
MFGELGI

SEQ ID NO: 17541 - protein, 7 aa, synthetic construct
GTEDQMH

SEQ ID NO: 17542 - protein, 7 aa, synthetic construct
SPVWMDA

SEQ ID NO: 17543 - protein, 7 aa, synthetic construct
PNYELHM

SEQ ID NO: 17544 - protein, 7 aa, synthetic construct
HAQTRKE

SEQ ID NO: 17545 - protein, 7 aa, synthetic construct
DRIPALY

SEQ ID NO: 17546 - protein, 7 aa, synthetic construct
ATLVPKP

SEQ ID NO: 17547 - protein, 7 aa, synthetic construct
HYESIEK

SEQ ID NO: 17548 - protein, 7 aa, synthetic construct
DESWAIE

SEQ ID NO: 17549 - protein, 7 aa, synthetic construct
GNSPMPI

SEQ ID NO: 17550 - protein, 7 aa, synthetic construct
EDAAMSF

SEQ ID NO: 17551 - protein, 7 aa, synthetic construct
PMSLDAY

SEQ ID NO: 17552 - protein, 7 aa, synthetic construct
SADVFEA

SEQ ID NO: 17553 - protein, 7 aa, synthetic construct
EPYPGTE

SEQ ID NO: 17554 - protein, 7 aa, synthetic construct
ANDSLSD

SEQ ID NO: 17555 - protein, 7 aa, synthetic construct
LADWMGA

SEQ ID NO: 17556 - protein, 7 aa, synthetic construct
KQEIMDV

SEQ ID NO: 17557 - protein, 7 aa, synthetic construct
RDTYAGQ

SEQ ID NO: 17558 - protein, 7 aa, synthetic construct
KRGYLDP

SEQ ID NO: 17559 - protein, 7 aa, synthetic construct
GNTDPTR

SEQ ID NO: 17560 - protein, 7 aa, synthetic construct
EDVEMYP

SEQ ID NO: 17561 - protein, 7 aa, synthetic construct
PWPIKGD

SEQ ID NO: 17562 - protein, 7 aa, synthetic construct
EDVVYAE

SEQ ID NO: 17563 - protein, 7 aa, synthetic construct
SYSVRRE

SEQ ID NO: 17564 - protein, 7 aa, synthetic construct
DTFEKRK

SEQ ID NO: 17565 - protein, 7 aa, synthetic construct
EEHVAEK

SEQ ID NO: 17566 - protein, 7 aa, synthetic construct
AFANQIM

SEQ ID NO: 17567 - protein, 7 aa, synthetic construct
NSSQWDS

SEQ ID NO: 17568 - protein, 7 aa, synthetic construct
TRLKDQF

SEQ ID NO: 17569 - protein, 7 aa, synthetic construct
VQGLNPL

SEQ ID NO: 17570 - protein, 7 aa, synthetic construct
SNGYRPG

SEQ ID NO: 17571 - protein, 7 aa, synthetic construct
ESYEQQS

SEQ ID NO: 17572 - protein, 7 aa, synthetic construct
GQPAWDD

SEQ ID NO: 17573 - protein, 7 aa, synthetic construct
LAFEDTG

SEQ ID NO: 17574 - protein, 7 aa, synthetic construct
HVFDMQI

SEQ ID NO: 17575 - protein, 7 aa, synthetic construct
QMVHVRT

SEQ ID NO: 17576 - protein, 7 aa, synthetic construct
DRSLTVK

SEQ ID NO: 17577 - protein, 7 aa, synthetic construct
EFDGDQT

SEQ ID NO: 17578 - protein, 7 aa, synthetic construct
DVEGTQA

SEQ ID NO: 17579 - protein, 7 aa, synthetic construct
DQEHSKR

SEQ ID NO: 17580 - protein, 7 aa, synthetic construct
TTMQHAN

SEQ ID NO: 17581 - protein, 7 aa, synthetic construct
CTFRECS

SEQ ID NO: 17582 - protein, 7 aa, synthetic construct
YEMDALD

SEQ ID NO: 17583 - protein, 7 aa, synthetic construct
LQTEALP

SEQ ID NO: 17584 - protein, 7 aa, synthetic construct
MPLTILA

SEQ ID NO: 17585 - protein, 7 aa, synthetic construct
HATDSLM

SEQ ID NO: 17586 - protein, 7 aa, synthetic construct
TIHPPMP

SEQ ID NO: 17587 - protein, 7 aa, synthetic construct
NMEDGAS

SEQ ID NO: 17588 - protein, 7 aa, synthetic construct
IHKLSEE

SEQ ID NO: 17589 - protein, 7 aa, synthetic construct
DESILIS

SEQ ID NO: 17590 - protein, 7 aa, synthetic construct
EQHVHAK

SEQ ID NO: 17591 - protein, 7 aa, synthetic construct
QNMTDAD

SEQ ID NO: 17592 - protein, 7 aa, synthetic construct
FPNVDFG

SEQ ID NO: 17593 - protein, 7 aa, synthetic construct
WSDAAHV

SEQ ID NO: 17594 - protein, 7 aa, synthetic construct
WKQDGRF

SEQ ID NO: 17595 - protein, 7 aa, synthetic construct
CKYQTQC

SEQ ID NO: 17596 - protein, 7 aa, synthetic construct
DVPPGWV

SEQ ID NO: 17597 - protein, 7 aa, synthetic construct
MEIPGND

SEQ ID NO: 17598 - protein, 7 aa, synthetic construct
TKSYKDI

SEQ ID NO: 17599 - protein, 7 aa, synthetic construct
SEDENKI

SEQ ID NO: 17600 - protein, 7 aa, synthetic construct
WEGVDED

SEQ ID NO: 17601 - protein, 7 aa, synthetic construct
MDEDGEK

SEQ ID NO: 17602 - protein, 7 aa, synthetic construct
DQVERNL

SEQ ID NO: 17603 - protein, 7 aa, synthetic construct
DFTKLSH

SEQ ID NO: 17604 - protein, 7 aa, synthetic construct
HRMDISQ

SEQ ID NO: 17605 - protein, 7 aa, synthetic construct
INPDLLK

SEQ ID NO: 17606 - protein, 7 aa, synthetic construct
VAELRDH

SEQ ID NO: 17607 - protein, 7 aa, synthetic construct
PALATKQ

SEQ ID NO: 17608 - protein, 7 aa, synthetic construct
DAPEGPE

SEQ ID NO: 17609 - protein, 7 aa, synthetic construct
NKEMMWK

SEQ ID NO: 17610 - protein, 7 aa, synthetic construct
VEGYENY

SEQ ID NO: 17611 - protein, 7 aa, synthetic construct
ADQLRPD

SEQ ID NO: 17612 - protein, 7 aa, synthetic construct
HPNHHKG

SEQ ID NO: 17613 - protein, 7 aa, synthetic construct
HPSVTEY

SEQ ID NO: 17614 - protein, 7 aa, synthetic construct
YPLKPHV

SEQ ID NO: 17615 - protein, 7 aa, synthetic construct
YTEDKRW

SEQ ID NO: 17616 - protein, 7 aa, synthetic construct
GNEDESV

SEQ ID NO: 17617 - protein, 7 aa, synthetic construct
EMHGYAR

SEQ ID NO: 17618 - protein, 7 aa, synthetic construct
NTEYLQR

SEQ ID NO: 17619 - protein, 7 aa, synthetic construct
KELAPRE

SEQ ID NO: 17620 - protein, 7 aa, synthetic construct
RWDESGQ

SEQ ID NO: 17621 - protein, 7 aa, synthetic construct
HSNTQDQ

SEQ ID NO: 17622 - protein, 7 aa, synthetic construct
VQMEGAN

SEQ ID NO: 17623 - protein, 7 aa, synthetic construct
DRREDMW

SEQ ID NO: 17624 - protein, 7 aa, synthetic construct
FGEGAYM

SEQ ID NO: 17625 - protein, 7 aa, synthetic construct
HFKMDNS

SEQ ID NO: 17626 - protein, 7 aa, synthetic construct
EIGRQEM

SEQ ID NO: 17627 - protein, 7 aa, synthetic construct
TYTVTNK

SEQ ID NO: 17628 - protein, 7 aa, synthetic construct
PVQHVPH

SEQ ID NO: 17629 - protein, 7 aa, synthetic construct
LVPDGEN

SEQ ID NO: 17630 - protein, 7 aa, synthetic construct
SEFKMFE

SEQ ID NO: 17631 - protein, 7 aa, synthetic construct
LNQVDEE

SEQ ID NO: 17632 - protein, 7 aa, synthetic construct
DLFPAEH

SEQ ID NO: 17633 - protein, 7 aa, synthetic construct
LLTVHTG

SEQ ID NO: 17634 - protein, 7 aa, synthetic construct
WGMADVE

SEQ ID NO: 17635 - protein, 7 aa, synthetic construct
DGRVEDI

SEQ ID NO: 17636 - protein, 7 aa, synthetic construct
QFNIEHE

SEQ ID NO: 17637 - protein, 7 aa, synthetic construct
PGFEPGV

SEQ ID NO: 17638 - protein, 7 aa, synthetic construct
VVGLDQY

SEQ ID NO: 17639 - protein, 7 aa, synthetic construct
NYGHNML

SEQ ID NO: 17640 - protein, 7 aa, synthetic construct
NAARLYP

SEQ ID NO: 17641 - protein, 7 aa, synthetic construct
IVAQIGR

SEQ ID NO: 17642 - protein, 7 aa, synthetic construct
AVGEGDP

SEQ ID NO: 17643 - protein, 7 aa, synthetic construct
MWLDGEL

SEQ ID NO: 17644 - protein, 7 aa, synthetic construct
VGPMTHT

SEQ ID NO: 17645 - protein, 7 aa, synthetic construct
DVADAML

SEQ ID NO: 17646 - protein, 7 aa, synthetic construct
IKRDLTY

SEQ ID NO: 17647 - protein, 7 aa, synthetic construct
DYDHNVT

SEQ ID NO: 17648 - protein, 7 aa, synthetic construct
QAPHKHA

SEQ ID NO: 17649 - protein, 7 aa, synthetic construct
ERAYQPM

SEQ ID NO: 17650 - protein, 7 aa, synthetic construct
SMQHTPP

SEQ ID NO: 17651 - protein, 7 aa, synthetic construct
AGIDTIT

SEQ ID NO: 17652 - protein, 7 aa, synthetic construct
VVDPETH

SEQ ID NO: 17653 - protein, 7 aa, synthetic construct
GAQPLQQ

SEQ ID NO: 17654 - protein, 7 aa, synthetic construct
DLQVMSA

SEQ ID NO: 17655 - protein, 7 aa, synthetic construct
YSIRSDL

SEQ ID NO: 17656 - protein, 7 aa, synthetic construct
AEDHQYS

SEQ ID NO: 17657 - protein, 7 aa, synthetic construct
TDKYAEH

SEQ ID NO: 17658 - protein, 7 aa, synthetic construct
PDLHHQD

SEQ ID NO: 17659 - protein, 7 aa, synthetic construct
DKEYIME

SEQ ID NO: 17660 - protein, 7 aa, synthetic construct
YDMIDAK

SEQ ID NO: 17661 - protein, 7 aa, synthetic construct
LNDNLII

SEQ ID NO: 17662 - protein, 7 aa, synthetic construct
WTDQVIK

SEQ ID NO: 17663 - protein, 7 aa, synthetic construct
HLPSVQM

SEQ ID NO: 17664 - protein, 7 aa, synthetic construct
YGYSHGH

SEQ ID NO: 17665 - protein, 7 aa, synthetic construct
MVHEVSR

SEQ ID NO: 17666 - protein, 7 aa, synthetic construct
ITLQTPL

SEQ ID NO: 17667 - protein, 7 aa, synthetic construct
AEGGITH

SEQ ID NO: 17668 - protein, 7 aa, synthetic construct
ITHNLRA

SEQ ID NO: 17669 - protein, 7 aa, synthetic construct
FDHKEIQ

SEQ ID NO: 17670 - protein, 7 aa, synthetic construct
PVAGDMW

SEQ ID NO: 17671 - protein, 7 aa, synthetic construct
DPDMLYV

SEQ ID NO: 17672 - protein, 7 aa, synthetic construct
IIAHDKL

SEQ ID NO: 17673 - protein, 7 aa, synthetic construct
EVDKQPK

SEQ ID NO: 17674 - protein, 7 aa, synthetic construct
VPLDQQM

SEQ ID NO: 17675 - protein, 7 aa, synthetic construct
FDVDAVA

SEQ ID NO: 17676 - protein, 7 aa, synthetic construct
VHLKDMM

SEQ ID NO: 17677 - protein, 7 aa, synthetic construct
VAWKAQI

SEQ ID NO: 17678 - protein, 7 aa, synthetic construct
IVHDEER

SEQ ID NO: 17679 - protein, 7 aa, synthetic construct
WEIGAET

SEQ ID NO: 17680 - protein, 7 aa, synthetic construct
AAPDIQM

SEQ ID NO: 17681 - protein, 7 aa, synthetic construct
DDEADYV

SEQ ID NO: 17682 - protein, 7 aa, synthetic construct
DIRSDRS

SEQ ID NO: 17683 - protein, 7 aa, synthetic construct
WVPTDVS

SEQ ID NO: 17684 - protein, 7 aa, synthetic construct
MDTEGMV

SEQ ID NO: 17685 - protein, 7 aa, synthetic construct
FMMHIEP

SEQ ID NO: 17686 - protein, 7 aa, synthetic construct
THPDEVM

SEQ ID NO: 17687 - protein, 7 aa, synthetic construct
YLGLTDN

SEQ ID NO: 17688 - protein, 7 aa, synthetic construct
VPNQNMR

SEQ ID NO: 17689 - protein, 7 aa, synthetic construct
AEIQPDK

SEQ ID NO: 17690 - protein, 7 aa, synthetic construct
QQLHAGF

SEQ ID NO: 17691 - protein, 7 aa, synthetic construct
DLSVQQV

SEQ ID NO: 17692 - protein, 7 aa, synthetic construct
SKWGADM

SEQ ID NO: 17693 - protein, 7 aa, synthetic construct
ADDVASN

SEQ ID NO: 17694 - protein, 7 aa, synthetic construct
IDVIVKD

SEQ ID NO: 17695 - protein, 7 aa, synthetic construct
MVGTIMN

SEQ ID NO: 17696 - protein, 7 aa, synthetic construct
FMEPTTY

SEQ ID NO: 17697 - protein, 7 aa, synthetic construct
QDEDNQP

SEQ ID NO: 17698 - protein, 7 aa, synthetic construct
TGQDILI

SEQ ID NO: 17699 - protein, 7 aa, synthetic construct
AATAWPE

SEQ ID NO: 17700 - protein, 7 aa, synthetic construct
EHMESQF

SEQ ID NO: 17701 - protein, 7 aa, synthetic construct
WGRMNPD

SEQ ID NO: 17702 - protein, 7 aa, synthetic construct
YGILAIQ

SEQ ID NO: 17703 - protein, 7 aa, synthetic construct
RLSMGHS

SEQ ID NO: 17704 - protein, 7 aa, synthetic construct
TIEIGVE

SEQ ID NO: 17705 - protein, 7 aa, synthetic construct
IWGNDGD

SEQ ID NO: 17706 - protein, 7 aa, synthetic construct
FRQISQH

SEQ ID NO: 17707 - protein, 7 aa, synthetic construct
GPPTLPR

SEQ ID NO: 17708 - protein, 7 aa, synthetic construct
YISTEPF

SEQ ID NO: 17709 - protein, 7 aa, synthetic construct
QRNYSLP

SEQ ID NO: 17710 - protein, 7 aa, synthetic construct
YQTFKNN

SEQ ID NO: 17711 - protein, 7 aa, synthetic construct
NMPAERR

SEQ ID NO: 17712 - protein, 7 aa, synthetic construct
VIDGPDT

SEQ ID NO: 17713 - protein, 7 aa, synthetic construct
LETVKII

SEQ ID NO: 17714 - protein, 7 aa, synthetic construct
LWSDERD

SEQ ID NO: 17715 - protein, 7 aa, synthetic construct
NFLNKER

SEQ ID NO: 17716 - protein, 7 aa, synthetic construct
AMQQEIY

SEQ ID NO: 17717 - protein, 7 aa, synthetic construct
EEQRREQ

SEQ ID NO: 17718 - protein, 7 aa, synthetic construct
EMINEHL

SEQ ID NO: 17719 - protein, 7 aa, synthetic construct
ISEFHNM

SEQ ID NO: 17720 - protein, 7 aa, synthetic construct
MGPTEND

SEQ ID NO: 17721 - protein, 7 aa, synthetic construct
DVMRLNV

SEQ ID NO: 17722 - protein, 7 aa, synthetic construct
NLVIVPE

SEQ ID NO: 17723 - protein, 7 aa, synthetic construct
VTTLHTM

SEQ ID NO: 17724 - protein, 7 aa, synthetic construct
FVDPKHF

SEQ ID NO: 17725 - protein, 7 aa, synthetic construct
EFDLKPQ

SEQ ID NO: 17726 - protein, 7 aa, synthetic construct
KEMKLHQ

SEQ ID NO: 17727 - protein, 7 aa, synthetic construct
ENQLQNS

SEQ ID NO: 17728 - protein, 7 aa, synthetic construct
YFSQPKM

SEQ ID NO: 17729 - protein, 7 aa, synthetic construct
FIDEHRE

SEQ ID NO: 17730 - protein, 7 aa, synthetic construct
WHEQSTY

SEQ ID NO: 17731 - protein, 7 aa, synthetic construct
QAMISLD

SEQ ID NO: 17732 - protein, 7 aa, synthetic construct
STEQDMI

SEQ ID NO: 17733 - protein, 7 aa, synthetic construct
GTQYPHM

SEQ ID NO: 17734 - protein, 7 aa, synthetic construct
SEGIENQ

SEQ ID NO: 17735 - protein, 7 aa, synthetic construct
GAQSEPD

SEQ ID NO: 17736 - protein, 7 aa, synthetic construct
CPQAVCA

SEQ ID NO: 17737 - protein, 7 aa, synthetic construct
LQHKDYK

SEQ ID NO: 17738 - protein, 7 aa, synthetic construct
DANFINS

SEQ ID NO: 17739 - protein, 7 aa, synthetic construct
LFNPGTI

SEQ ID NO: 17740 - protein, 7 aa, synthetic construct
YYPDLFD

SEQ ID NO: 17741 - protein, 7 aa, synthetic construct
SDQLPTY

SEQ ID NO: 17742 - protein, 7 aa, synthetic construct
ASVVRLD

SEQ ID NO: 17743 - protein, 7 aa, synthetic construct
PGFVTDH

SEQ ID NO: 17744 - protein, 7 aa, synthetic construct
SNRGPMW

SEQ ID NO: 17745 - protein, 7 aa, synthetic construct
FEEVNHV

SEQ ID NO: 17746 - protein, 7 aa, synthetic construct
VDHDLAY

SEQ ID NO: 17747 - protein, 7 aa, synthetic construct
DEKFHTD

SEQ ID NO: 17748 - protein, 7 aa, synthetic construct
SAASDVD

SEQ ID NO: 17749 - protein, 7 aa, synthetic construct
GITEESH

SEQ ID NO: 17750 - protein, 7 aa, synthetic construct
VKHSDGY

SEQ ID NO: 17751 - protein, 7 aa, synthetic construct
SHFVDVV

SEQ ID NO: 17752 - protein, 7 aa, synthetic construct
VHEVQHF

SEQ ID NO: 17753 - protein, 7 aa, synthetic construct
FQELDYA

SEQ ID NO: 17754 - protein, 7 aa, synthetic construct
RFPNHDQ

SEQ ID NO: 17755 - protein, 7 aa, synthetic construct
NWDAQRP

SEQ ID NO: 17756 - protein, 7 aa, synthetic construct
HEEQHPH

SEQ ID NO: 17757 - protein, 7 aa, synthetic construct
TSDTKPC

SEQ ID NO: 17758 - protein, 7 aa, synthetic construct
SDQNDFV

SEQ ID NO: 17759 - protein, 7 aa, synthetic construct
QGMEFKD

SEQ ID NO: 17760 - protein, 7 aa, synthetic construct
WEDAQRV

SEQ ID NO: 17761 - protein, 7 aa, synthetic construct
GVMNTYI

SEQ ID NO: 17762 - protein, 7 aa, synthetic construct
FPEIHAK

SEQ ID NO: 17763 - protein, 7 aa, synthetic construct
MMGIMAA

SEQ ID NO: 17764 - protein, 7 aa, synthetic construct
WDKGMGY

SEQ ID NO: 17765 - protein, 7 aa, synthetic construct
EQPEFPF

SEQ ID NO: 17766 - protein, 7 aa, synthetic construct
EDLERTY

SEQ ID NO: 17767 - protein, 7 aa, synthetic construct
SADHTID

SEQ ID NO: 17768 - protein, 7 aa, synthetic construct
MMPRTKD

SEQ ID NO: 17769 - protein, 7 aa, synthetic construct
SNRTANV

SEQ ID NO: 17770 - protein, 7 aa, synthetic construct
GIRERTQ

SEQ ID NO: 17771 - protein, 7 aa, synthetic construct
LEHKAML

SEQ ID NO: 17772 - protein, 7 aa, synthetic construct
QGVIRTP

SEQ ID NO: 17773 - protein, 7 aa, synthetic construct
QNETKNR

SEQ ID NO: 17774 - protein, 7 aa, synthetic construct
NNTIRSN

SEQ ID NO: 17775 - protein, 7 aa, synthetic construct
GQNTGPM

SEQ ID NO: 17776 - protein, 7 aa, synthetic construct
KHDTTKG

SEQ ID NO: 17777 - protein, 7 aa, synthetic construct
TTRIQGG

SEQ ID NO: 17778 - protein, 7 aa, synthetic construct
MRGFMEA

SEQ ID NO: 17779 - protein, 7 aa, synthetic construct
AVRNQSM

SEQ ID NO: 17780 - protein, 7 aa, synthetic construct
HQSAKGG

SEQ ID NO: 17781 - protein, 7 aa, synthetic construct
NKRDLDT

SEQ ID NO: 17782 - protein, 7 aa, synthetic construct
SRGITAG

SEQ ID NO: 17783 - protein, 7 aa, synthetic construct
VFSNGKN

SEQ ID NO: 17784 - protein, 7 aa, synthetic construct
VHDKMQF

SEQ ID NO: 17785 - protein, 7 aa, synthetic construct
KFKMENM

SEQ ID NO: 17786 - protein, 7 aa, synthetic construct
NSQKMNF

SEQ ID NO: 17787 - protein, 7 aa, synthetic construct
LIPHKPA

SEQ ID NO: 17788 - protein, 7 aa, synthetic construct
RQNPGHG

SEQ ID NO: 17789 - protein, 7 aa, synthetic construct
KQDRNPQ

SEQ ID NO: 17790 - protein, 7 aa, synthetic construct
YIKQAPS

SEQ ID NO: 17791 - protein, 7 aa, synthetic construct
TQGLSGH

SEQ ID NO: 17792 - protein, 7 aa, synthetic construct
GGDETKR

SEQ ID NO: 17793 - protein, 7 aa, synthetic construct
DPVRVDI

SEQ ID NO: 17794 - protein, 7 aa, synthetic construct
VFGKEVF

SEQ ID NO: 17795 - protein, 7 aa, synthetic construct
SIYRKTE

SEQ ID NO: 17796 - protein, 7 aa, synthetic construct
WHPRAQV

SEQ ID NO: 17797 - protein, 7 aa, synthetic construct
KVRMDVM

SEQ ID NO: 17798 - protein, 7 aa, synthetic construct
YASHKNM

SEQ ID NO: 17799 - protein, 7 aa, synthetic construct
MHSKIAG

SEQ ID NO: 17800 - protein, 7 aa, synthetic construct
KYSVVTD

SEQ ID NO: 17801 - protein, 7 aa, synthetic construct
RQGMKEY

SEQ ID NO: 17802 - protein, 7 aa, synthetic construct
LPHPKSG

SEQ ID NO: 17803 - protein, 7 aa, synthetic construct
ASNRTAV

SEQ ID NO: 17804 - protein, 7 aa, synthetic construct
HPMSKQG

SEQ ID NO: 17805 - protein, 7 aa, synthetic construct
TMSNRPW

SEQ ID NO: 17806 - protein, 7 aa, synthetic construct
DFKAPQR

SEQ ID NO: 17807 - protein, 7 aa, synthetic construct
MGNGKQG

SEQ ID NO: 17808 - protein, 7 aa, synthetic construct
TRTSLPQ

SEQ ID NO: 17809 - protein, 7 aa, synthetic construct
GHAKVYA

SEQ ID NO: 17810 - protein, 7 aa, synthetic construct
WQKTNSE

SEQ ID NO: 17811 - protein, 7 aa, synthetic construct
RITSQGY

SEQ ID NO: 17812 - protein, 7 aa, synthetic construct
EHKGRDQ

SEQ ID NO: 17813 - protein, 7 aa, synthetic construct
DQAYAKA

SEQ ID NO: 17814 - protein, 7 aa, synthetic construct
FKSPKLE

SEQ ID NO: 17815 - protein, 7 aa, synthetic construct
HPGAQQA

SEQ ID NO: 17816 - protein, 7 aa, synthetic construct
FREMDII

SEQ ID NO: 17817 - protein, 7 aa, synthetic construct
YARQQSA

SEQ ID NO: 17818 - protein, 7 aa, synthetic construct
MAYSQKD

SEQ ID NO: 17819 - protein, 7 aa, synthetic construct
WSKFQKE

SEQ ID NO: 17820 - protein, 7 aa, synthetic construct
SMGALGG

SEQ ID NO: 17821 - protein, 7 aa, synthetic construct
DTTRGKM

SEQ ID NO: 17822 - protein, 7 aa, synthetic construct
LGRPPPP

SEQ ID NO: 17823 - protein, 7 aa, synthetic construct
YTSGIKH

SEQ ID NO: 17824 - protein, 7 aa, synthetic construct
EKANKVA

SEQ ID NO: 17825 - protein, 7 aa, synthetic construct
RMPMTPA

SEQ ID NO: 17826 - protein, 7 aa, synthetic construct
IIQKNST

SEQ ID NO: 17827 - protein, 7 aa, synthetic construct
WHSGISA

SEQ ID NO: 17828 - protein, 7 aa, synthetic construct
YKTVATQ

SEQ ID NO: 17829 - protein, 7 aa, synthetic construct
NRAGTYV

SEQ ID NO: 17830 - protein, 7 aa, synthetic construct
HTSYVSP

SEQ ID NO: 17831 - protein, 7 aa, synthetic construct
VKHGTNF

SEQ ID NO: 17832 - protein, 7 aa, synthetic construct
IHGWSPD

SEQ ID NO: 17833 - protein, 7 aa, synthetic construct
NKPIKME

SEQ ID NO: 17834 - protein, 7 aa, synthetic construct
GGHGIPQ

SEQ ID NO: 17835 - protein, 7 aa, synthetic construct
TKWAATE

SEQ ID NO: 17836 - protein, 7 aa, synthetic construct
QPSVKSA

SEQ ID NO: 17837 - protein, 7 aa, synthetic construct
NAVKREG

SEQ ID NO: 17838 - protein, 7 aa, synthetic construct
KRDMDFV

SEQ ID NO: 17839 - protein, 7 aa, synthetic construct
HMGQRAG

SEQ ID NO: 17840 - protein, 7 aa, synthetic construct
WKGQGSA

SEQ ID NO: 17841 - protein, 7 aa, synthetic construct
DNHVRVI

SEQ ID NO: 17842 - protein, 7 aa, synthetic construct
QFEHKQS

SEQ ID NO: 17843 - protein, 7 aa, synthetic construct
RTQATFG

SEQ ID NO: 17844 - protein, 7 aa, synthetic construct
TVRATQL

SEQ ID NO: 17845 - protein, 7 aa, synthetic construct
SRATLDH

SEQ ID NO: 17846 - protein, 7 aa, synthetic construct
MHKSAAM

SEQ ID NO: 17847 - protein, 7 aa, synthetic construct
GPWSKEA

SEQ ID NO: 17848 - protein, 7 aa, synthetic construct
SQPKASQ

SEQ ID NO: 17849 - protein, 7 aa, synthetic construct
WNKGQNM

SEQ ID NO: 17850 - protein, 7 aa, synthetic construct
HEGHQVM

SEQ ID NO: 17851 - protein, 7 aa, synthetic construct
DKNWDAR

SEQ ID NO: 17852 - protein, 7 aa, synthetic construct
QHSSGRV

SEQ ID NO: 17853 - protein, 7 aa, synthetic construct
RSHELTY

SEQ ID NO: 17854 - protein, 7 aa, synthetic construct
NSKWGAA

SEQ ID NO: 17855 - protein, 7 aa, synthetic construct
KKAERPP

SEQ ID NO: 17856 - protein, 7 aa, synthetic construct
SRSNTAN

SEQ ID NO: 17857 - protein, 7 aa, synthetic construct
VKSHYNA

SEQ ID NO: 17858 - protein, 7 aa, synthetic construct
DAKVKFS

SEQ ID NO: 17859 - protein, 7 aa, synthetic construct
TAYTQRE

SEQ ID NO: 17860 - protein, 7 aa, synthetic construct
DERWKAS

SEQ ID NO: 17861 - protein, 7 aa, synthetic construct
SKINHTW

SEQ ID NO: 17862 - protein, 7 aa, synthetic construct
EPNHKMQ

SEQ ID NO: 17863 - protein, 7 aa, synthetic construct
HGPYKID

SEQ ID NO: 17864 - protein, 7 aa, synthetic construct
RDSQKMM

SEQ ID NO: 17865 - protein, 7 aa, synthetic construct
NINKVDI

SEQ ID NO: 17866 - protein, 7 aa, synthetic construct
KRHIEAE

SEQ ID NO: 17867 - protein, 7 aa, synthetic construct
RRDTGKE

SEQ ID NO: 17868 - protein, 7 aa, synthetic construct
QRGVNSF

SEQ ID NO: 17869 - protein, 7 aa, synthetic construct
YVQHRVD

SEQ ID NO: 17870 - protein, 7 aa, synthetic construct
FGKPQSA

SEQ ID NO: 17871 - protein, 7 aa, synthetic construct
MGKQILT

SEQ ID NO: 17872 - protein, 7 aa, synthetic construct
MNKETRQ

SEQ ID NO: 17873 - protein, 7 aa, synthetic construct
MPNISRQ

SEQ ID NO: 17874 - protein, 7 aa, synthetic construct
LKVVVAT

SEQ ID NO: 17875 - protein, 7 aa, synthetic construct
HGGLGTG

SEQ ID NO: 17876 - protein, 7 aa, synthetic construct
QPPYHDP

SEQ ID NO: 17877 - protein, 7 aa, synthetic construct
LQGTHKY

SEQ ID NO: 17878 - protein, 7 aa, synthetic construct
ARSKNEL

SEQ ID NO: 17879 - protein, 7 aa, synthetic construct
QKGVVVS

SEQ ID NO: 17880 - protein, 7 aa, synthetic construct
GVIKMGV

SEQ ID NO: 17881 - protein, 7 aa, synthetic construct
SQQYQKP

SEQ ID NO: 17882 - protein, 7 aa, synthetic construct
WGQQGTG

SEQ ID NO: 17883 - protein, 7 aa, synthetic construct
QDWSPRG

SEQ ID NO: 17884 - protein, 7 aa, synthetic construct
LKRQHEE

SEQ ID NO: 17885 - protein, 7 aa, synthetic construct
SRGHTHE

SEQ ID NO: 17886 - protein, 7 aa, synthetic construct
TIRAEAH

SEQ ID NO: 17887 - protein, 7 aa, synthetic construct
GPIKEWT

SEQ ID NO: 17888 - protein, 7 aa, synthetic construct
DGARPGF

SEQ ID NO: 17889 - protein, 7 aa, synthetic construct
LNHSKAA

SEQ ID NO: 17890 - protein, 7 aa, synthetic construct
ANETKKM

SEQ ID NO: 17891 - protein, 7 aa, synthetic construct
QAGSPFP

SEQ ID NO: 17892 - protein, 7 aa, synthetic construct
NYNATKT

SEQ ID NO: 17893 - protein, 7 aa, synthetic construct
GRMHVSP

SEQ ID NO: 17894 - protein, 7 aa, synthetic construct
YNTRVST

SEQ ID NO: 17895 - protein, 7 aa, synthetic construct
RPVAGKD

SEQ ID NO: 17896 - protein, 7 aa, synthetic construct
NRFRDTD

SEQ ID NO: 17897 - protein, 7 aa, synthetic construct
NTGKPHP

SEQ ID NO: 17898 - protein, 7 aa, synthetic construct
DPKFRQQ

SEQ ID NO: 17899 - protein, 7 aa, synthetic construct
PQPRASP

SEQ ID NO: 17900 - protein, 7 aa, synthetic construct
RPKMADF

SEQ ID NO: 17901 - protein, 7 aa, synthetic construct
FKSSATA

SEQ ID NO: 17902 - protein, 7 aa, synthetic construct
LHKHVDN

SEQ ID NO: 17903 - protein, 7 aa, synthetic construct
GSYAREA

SEQ ID NO: 17904 - protein, 7 aa, synthetic construct
DMHTKLG

SEQ ID NO: 17905 - protein, 7 aa, synthetic construct
DKQRIAI

SEQ ID NO: 17906 - protein, 7 aa, synthetic construct
MYTQKMD

SEQ ID NO: 17907 - protein, 7 aa, synthetic construct
THHKSLE

SEQ ID NO: 17908 - protein, 7 aa, synthetic construct
QNTIGSR

SEQ ID NO: 17909 - protein, 7 aa, synthetic construct
LGEKKNG

SEQ ID NO: 17910 - protein, 7 aa, synthetic construct
SRHSDET

SEQ ID NO: 17911 - protein, 7 aa, synthetic construct
GKSQATG

SEQ ID NO: 17912 - protein, 7 aa, synthetic construct
LARNTVS

SEQ ID NO: 17913 - protein, 7 aa, synthetic construct
TGKFTAN

SEQ ID NO: 17914 - protein, 7 aa, synthetic construct
ITAIQNG

SEQ ID NO: 17915 - protein, 7 aa, synthetic construct
NANKSAG

SEQ ID NO: 17916 - protein, 7 aa, synthetic construct
QASYKFE

SEQ ID NO: 17917 - protein, 7 aa, synthetic construct
HPSGQQT

SEQ ID NO: 17918 - protein, 7 aa, synthetic construct
NKPIQHM

SEQ ID NO: 17919 - protein, 7 aa, synthetic construct
IYKAGQQ

SEQ ID NO: 17920 - protein, 7 aa, synthetic construct
HNIMGPG

SEQ ID NO: 17921 - protein, 7 aa, synthetic construct
RPSYTVD

SEQ ID NO: 17922 - protein, 7 aa, synthetic construct
WMAAKTD

SEQ ID NO: 17923 - protein, 7 aa, synthetic construct
IKGMGSG

SEQ ID NO: 17924 - protein, 7 aa, synthetic construct
YGSYRSV

SEQ ID NO: 17925 - protein, 7 aa, synthetic construct
LKMVNSA

SEQ ID NO: 17926 - protein, 7 aa, synthetic construct
VKVRGIE

SEQ ID NO: 17927 - protein, 7 aa, synthetic construct
STKHGGG

SEQ ID NO: 17928 - protein, 7 aa, synthetic construct
KHGTVYI

SEQ ID NO: 17929 - protein, 7 aa, synthetic construct
DWLTKQA

SEQ ID NO: 17930 - protein, 7 aa, synthetic construct
TMGMRQG

SEQ ID NO: 17931 - protein, 7 aa, synthetic construct
KSERGPF

SEQ ID NO: 17932 - protein, 7 aa, synthetic construct
HVMARGS

SEQ ID NO: 17933 - protein, 7 aa, synthetic construct
NTGKPQG

SEQ ID NO: 17934 - protein, 7 aa, synthetic construct
PNMVRQN

SEQ ID NO: 17935 - protein, 7 aa, synthetic construct
KFATVEG

SEQ ID NO: 17936 - protein, 7 aa, synthetic construct
NNRGTER

SEQ ID NO: 17937 - protein, 7 aa, synthetic construct
YKQHTMV

SEQ ID NO: 17938 - protein, 7 aa, synthetic construct
SQFNRQV

SEQ ID NO: 17939 - protein, 7 aa, synthetic construct
HHPATTG

SEQ ID NO: 17940 - protein, 7 aa, synthetic construct
YVKAQLG

SEQ ID NO: 17941 - protein, 7 aa, synthetic construct
QHKATAG

SEQ ID NO: 17942 - protein, 7 aa, synthetic construct
TSSNGRN

SEQ ID NO: 17943 - protein, 7 aa, synthetic construct
GQQRSVM

SEQ ID NO: 17944 - protein, 7 aa, synthetic construct
MKGSPVN

SEQ ID NO: 17945 - protein, 7 aa, synthetic construct
TNMKATQ

SEQ ID NO: 17946 - protein, 7 aa, synthetic construct
TKWQQTA

SEQ ID NO: 17947 - protein, 7 aa, synthetic construct
WNTSAKG

SEQ ID NO: 17948 - protein, 7 aa, synthetic construct
YPMNTAG

SEQ ID NO: 17949 - protein, 7 aa, synthetic construct
HIPYTTA

SEQ ID NO: 17950 - protein, 7 aa, synthetic construct
RDKSIYA

SEQ ID NO: 17951 - protein, 7 aa, synthetic construct
RGNHPAG

SEQ ID NO: 17952 - protein, 7 aa, synthetic construct
AGMANRG

SEQ ID NO: 17953 - protein, 7 aa, synthetic construct
APNNKQM

SEQ ID NO: 17954 - protein, 7 aa, synthetic construct
FFPDKMG

SEQ ID NO: 17955 - protein, 7 aa, synthetic construct
HMATMKP

SEQ ID NO: 17956 - protein, 7 aa, synthetic construct
RRQDVFG

SEQ ID NO: 17957 - protein, 7 aa, synthetic construct
NYKHSDY

SEQ ID NO: 17958 - protein, 7 aa, synthetic construct
QQQMAQP

SEQ ID NO: 17959 - protein, 7 aa, synthetic construct
FAHQTLG

SEQ ID NO: 17960 - protein, 7 aa, synthetic construct
GDQRSMG

SEQ ID NO: 17961 - protein, 7 aa, synthetic construct
QFNRAGD

SEQ ID NO: 17962 - protein, 7 aa, synthetic construct
TMTHRVA

SEQ ID NO: 17963 - protein, 7 aa, synthetic construct
IKKPLEV

SEQ ID NO: 17964 - protein, 7 aa, synthetic construct
QSERQSM

SEQ ID NO: 17965 - protein, 7 aa, synthetic construct
MRGMNDM

SEQ ID NO: 17966 - protein, 7 aa, synthetic construct
IPGAGDH

SEQ ID NO: 17967 - protein, 7 aa, synthetic construct
ADKRLVI

SEQ ID NO: 17968 - protein, 7 aa, synthetic construct
SPHRVND

SEQ ID NO: 17969 - protein, 7 aa, synthetic construct
GANRPSM

SEQ ID NO: 17970 - protein, 7 aa, synthetic construct
SEFRKNA

SEQ ID NO: 17971 - protein, 7 aa, synthetic construct
KVSSQLI

SEQ ID NO: 17972 - protein, 7 aa, synthetic construct
RERQWNE

SEQ ID NO: 17973 - protein, 7 aa, synthetic construct
IYRGVEL

SEQ ID NO: 17974 - protein, 7 aa, synthetic construct
KYVPMGG

SEQ ID NO: 17975 - protein, 7 aa, synthetic construct
HRNQSEG

SEQ ID NO: 17976 - protein, 7 aa, synthetic construct
YGHSSGH

SEQ ID NO: 17977 - protein, 7 aa, synthetic construct
VLKSKDT

SEQ ID NO: 17978 - protein, 7 aa, synthetic construct
PEKYSGS

SEQ ID NO: 17979 - protein, 7 aa, synthetic construct
TLNNKME

SEQ ID NO: 17980 - protein, 7 aa, synthetic construct
ILNNKSN

SEQ ID NO: 17981 - protein, 7 aa, synthetic construct
LTKTNFG

SEQ ID NO: 17982 - protein, 7 aa, synthetic construct
YKQGYPL

SEQ ID NO: 17983 - protein, 7 aa, synthetic construct
HKIQHVE

SEQ ID NO: 17984 - protein, 7 aa, synthetic construct
EKLDGHG

SEQ ID NO: 17985 - protein, 7 aa, synthetic construct
MAAGKPM

SEQ ID NO: 17986 - protein, 7 aa, synthetic construct
FDKLHTN

SEQ ID NO: 17987 - protein, 7 aa, synthetic construct
ITNQRAN

SEQ ID NO: 17988 - protein, 7 aa, synthetic construct
MEKHSGW

SEQ ID NO: 17989 - protein, 7 aa, synthetic construct
WGNFVKD

SEQ ID NO: 17990 - protein, 7 aa, synthetic construct
AYQQVKQ

SEQ ID NO: 17991 - protein, 7 aa, synthetic construct
FLDVLGP

SEQ ID NO: 17992 - protein, 7 aa, synthetic construct
VTQRVSP

SEQ ID NO: 17993 - protein, 7 aa, synthetic construct
ITNSVRS

SEQ ID NO: 17994 - protein, 7 aa, synthetic construct
WKAGSQL

SEQ ID NO: 17995 - protein, 7 aa, synthetic construct
SVATSQH

SEQ ID NO: 17996 - protein, 7 aa, synthetic construct
TIRPSTG

SEQ ID NO: 17997 - protein, 7 aa, synthetic construct
KNYGDAW

SEQ ID NO: 17998 - protein, 7 aa, synthetic construct
IAGSRQS

SEQ ID NO: 17999 - protein, 7 aa, synthetic construct
SHVRNMD

SEQ ID NO: 18000 - protein, 7 aa, synthetic construct
IKMESGG

SEQ ID NO: 18001 - protein, 7 aa, synthetic construct
INNQAGR

SEQ ID NO: 18002 - protein, 7 aa, synthetic construct
DNKVKMS

SEQ ID NO: 18003 - protein, 7 aa, synthetic construct
YRPFGKD

SEQ ID NO: 18004 - protein, 7 aa, synthetic construct
IKHTGDN

SEQ ID NO: 18005 - protein, 7 aa, synthetic construct
AIGKQSS

SEQ ID NO: 18006 - protein, 7 aa, synthetic construct
LVPKGAI

SEQ ID NO: 18007 - protein, 7 aa, synthetic construct
HAWAKQD

SEQ ID NO: 18008 - protein, 7 aa, synthetic construct
KVNSHNS

SEQ ID NO: 18009 - protein, 7 aa, synthetic construct
STPVTKS

SEQ ID NO: 18010 - protein, 7 aa, synthetic construct
YTKMTPA

SEQ ID NO: 18011 - protein, 7 aa, synthetic construct
MQGGGSS

SEQ ID NO: 18012 - protein, 7 aa, synthetic construct
LVGKPRD

SEQ ID NO: 18013 - protein, 7 aa, synthetic construct
QVQNKIF

SEQ ID NO: 18014 - protein, 7 aa, synthetic construct
SRMGMVG

SEQ ID NO: 18015 - protein, 7 aa, synthetic construct
QFNKGKD

SEQ ID NO: 18016 - protein, 7 aa, synthetic construct
YGTSKGI

SEQ ID NO: 18017 - protein, 7 aa, synthetic construct
GNEAYKQ

SEQ ID NO: 18018 - protein, 7 aa, synthetic construct
AEPTQGG

SEQ ID NO: 18019 - protein, 7 aa, synthetic construct
WNREISG

SEQ ID NO: 18020 - protein, 7 aa, synthetic construct
GGGQQKT

SEQ ID NO: 18021 - protein, 7 aa, synthetic construct
PGTHGQG

SEQ ID NO: 18022 - protein, 7 aa, synthetic construct
VMRPSGP

SEQ ID NO: 18023 - protein, 7 aa, synthetic construct
YPHQGGT

SEQ ID NO: 18024 - protein, 7 aa, synthetic construct
KEARQGG

SEQ ID NO: 18025 - protein, 7 aa, synthetic construct
IPGTGHS

SEQ ID NO: 18026 - protein, 7 aa, synthetic construct
TVQNAQR

SEQ ID NO: 18027 - protein, 7 aa, synthetic construct
YTGHLVH

SEQ ID NO: 18028 - protein, 7 aa, synthetic construct
FLPRQKE

SEQ ID NO: 18029 - protein, 7 aa, synthetic construct
IAGYTQN

SEQ ID NO: 18030 - protein, 7 aa, synthetic construct
LSRNTMT

SEQ ID NO: 18031 - protein, 7 aa, synthetic construct
DSRTSKS

SEQ ID NO: 18032 - protein, 7 aa, synthetic construct
RGEKLPW

SEQ ID NO: 18033 - protein, 7 aa, synthetic construct
RPGRQES

SEQ ID NO: 18034 - protein, 7 aa, synthetic construct
TKAGREA

SEQ ID NO: 18035 - protein, 7 aa, synthetic construct
KQLRVYE

SEQ ID NO: 18036 - protein, 7 aa, synthetic construct
SGMKHVA

SEQ ID NO: 18037 - protein, 7 aa, synthetic construct
ISPVIKV

SEQ ID NO: 18038 - protein, 7 aa, synthetic construct
NQRGNMT

SEQ ID NO: 18039 - protein, 7 aa, synthetic construct
HSGRGPS

SEQ ID NO: 18040 - protein, 7 aa, synthetic construct
GWKVPDT

SEQ ID NO: 18041 - protein, 7 aa, synthetic construct
NRNGMAI

SEQ ID NO: 18042 - protein, 7 aa, synthetic construct
RPTVNAT

SEQ ID NO: 18043 - protein, 7 aa, synthetic construct
ELHSNRA

SEQ ID NO: 18044 - protein, 7 aa, synthetic construct
AVSRQIG

SEQ ID NO: 18045 - protein, 7 aa, synthetic construct
MAPKMSA

SEQ ID NO: 18046 - protein, 7 aa, synthetic construct
VAPKADY

SEQ ID NO: 18047 - protein, 7 aa, synthetic construct
WDIGKKM

SEQ ID NO: 18048 - protein, 7 aa, synthetic construct
PESKYAG

SEQ ID NO: 18049 - protein, 7 aa, synthetic construct
VGAVNMQ

SEQ ID NO: 18050 - protein, 7 aa, synthetic construct
QKQWDGE

SEQ ID NO: 18051 - protein, 7 aa, synthetic construct
LKGRQEP

SEQ ID NO: 18052 - protein, 7 aa, synthetic construct
GQGHTMV

SEQ ID NO: 18053 - protein, 7 aa, synthetic construct
GSAKPNG

SEQ ID NO: 18054 - protein, 7 aa, synthetic construct
STRGSTG

SEQ ID NO: 18055 - protein, 7 aa, synthetic construct
GHKTQQG

SEQ ID NO: 18056 - protein, 7 aa, synthetic construct
GTYMQKE

SEQ ID NO: 18057 - protein, 7 aa, synthetic construct
TVQHTPG

SEQ ID NO: 18058 - protein, 7 aa, synthetic construct
ISGTKYS

SEQ ID NO: 18059 - protein, 7 aa, synthetic construct
ALKPYSE

SEQ ID NO: 18060 - protein, 7 aa, synthetic construct
TNNEQRA

SEQ ID NO: 18061 - protein, 7 aa, synthetic construct
ARQDKQG

SEQ ID NO: 18062 - protein, 7 aa, synthetic construct
VEIRGIA

SEQ ID NO: 18063 - protein, 7 aa, synthetic construct
MTRLKEP

SEQ ID NO: 18064 - protein, 7 aa, synthetic construct
YNTLTRA

SEQ ID NO: 18065 - protein, 7 aa, synthetic construct
KVGKGDV

SEQ ID NO: 18066 - protein, 7 aa, synthetic construct
DLKRGAV

SEQ ID NO: 18067 - protein, 7 aa, synthetic construct
SQNQREA

SEQ ID NO: 18068 - protein, 7 aa, synthetic construct
ANKSGPP

SEQ ID NO: 18069 - protein, 7 aa, synthetic construct
MRTSQML

SEQ ID NO: 18070 - protein, 7 aa, synthetic construct
EPGKALM

SEQ ID NO: 18071 - protein, 7 aa, synthetic construct
MNKFEHP

SEQ ID NO: 18072 - protein, 7 aa, synthetic construct
RASVKPE

SEQ ID NO: 18073 - protein, 7 aa, synthetic construct
HDHLSPV

SEQ ID NO: 18074 - protein, 7 aa, synthetic construct
SIRLHEA

SEQ ID NO: 18075 - protein, 7 aa, synthetic construct
THDGHKV

SEQ ID NO: 18076 - protein, 7 aa, synthetic construct
GRESRPS

SEQ ID NO: 18077 - protein, 7 aa, synthetic construct
IWPNGEP

SEQ ID NO: 18078 - protein, 7 aa, synthetic construct
ERKGDTG

SEQ ID NO: 18079 - protein, 7 aa, synthetic construct
SKAHTDW

SEQ ID NO: 18080 - protein, 7 aa, synthetic construct
DDWGKRA

SEQ ID NO: 18081 - protein, 7 aa, synthetic construct
ANGMNKM

SEQ ID NO: 18082 - protein, 7 aa, synthetic construct
LGKYTIP

SEQ ID NO: 18083 - protein, 7 aa, synthetic construct
RPNFEER

SEQ ID NO: 18084 - protein, 7 aa, synthetic construct
NGVNATR

SEQ ID NO: 18085 - protein, 7 aa, synthetic construct
HPHRSVD

SEQ ID NO: 18086 - protein, 7 aa, synthetic construct
MQRDGFH

SEQ ID NO: 18087 - protein, 7 aa, synthetic construct
KQTNGQL

SEQ ID NO: 18088 - protein, 7 aa, synthetic construct
YGDRTTR

SEQ ID NO: 18089 - protein, 7 aa, synthetic construct
NTTKVSY

SEQ ID NO: 18090 - protein, 7 aa, synthetic construct
LSGGIHP

SEQ ID NO: 18091 - protein, 7 aa, synthetic construct
GPRVAHQ

SEQ ID NO: 18092 - protein, 7 aa, synthetic construct
NVAKVHG

SEQ ID NO: 18093 - protein, 7 aa, synthetic construct
NRMNHFD

SEQ ID NO: 18094 - protein, 7 aa, synthetic construct
NSNKVLT

SEQ ID NO: 18095 - protein, 7 aa, synthetic construct
LQNSKRE

SEQ ID NO: 18096 - protein, 7 aa, synthetic construct
WPVGTSN

SEQ ID NO: 18097 - protein, 7 aa, synthetic construct
LGGKFTQ

SEQ ID NO: 18098 - protein, 7 aa, synthetic construct
TRGIGYA

SEQ ID NO: 18099 - protein, 7 aa, synthetic construct
SFSPSLV

SEQ ID NO: 18100 - protein, 7 aa, synthetic construct
KSPNQFS

SEQ ID NO: 18101 - protein, 7 aa, synthetic construct
KNEMNIM

SEQ ID NO: 18102 - protein, 7 aa, synthetic construct
NPVARMP

SEQ ID NO: 18103 - protein, 7 aa, synthetic construct
DKHLVRG

SEQ ID NO: 18104 - protein, 7 aa, synthetic construct
QREIKMQ

SEQ ID NO: 18105 - protein, 7 aa, synthetic construct
RGGVNYD

SEQ ID NO: 18106 - protein, 7 aa, synthetic construct
GIKQNLS

SEQ ID NO: 18107 - protein, 7 aa, synthetic construct
IRHGISD

SEQ ID NO: 18108 - protein, 7 aa, synthetic construct
GGFYAKD

SEQ ID NO: 18109 - protein, 7 aa, synthetic construct
APKLNVQ

SEQ ID NO: 18110 - protein, 7 aa, synthetic construct
NDRGMTN

SEQ ID NO: 18111 - protein, 7 aa, synthetic construct
LQKSGYS

SEQ ID NO: 18112 - protein, 7 aa, synthetic construct
TQKSAHT

SEQ ID NO: 18113 - protein, 7 aa, synthetic construct
GADPSAW

SEQ ID NO: 18114 - protein, 7 aa, synthetic construct
RDQRAQL

SEQ ID NO: 18115 - protein, 7 aa, synthetic construct
RRIGDME

SEQ ID NO: 18116 - protein, 7 aa, synthetic construct
AGDRHGT

SEQ ID NO: 18117 - protein, 7 aa, synthetic construct
TRMNTPP

SEQ ID NO: 18118 - protein, 7 aa, synthetic construct
SHGHQVM

SEQ ID NO: 18119 - protein, 7 aa, synthetic construct
VPTVTTA

SEQ ID NO: 18120 - protein, 7 aa, synthetic construct
QPFGIPA

SEQ ID NO: 18121 - protein, 7 aa, synthetic construct
QQHLSRD

SEQ ID NO: 18122 - protein, 7 aa, synthetic construct
RNQHQPV

SEQ ID NO: 18123 - protein, 7 aa, synthetic construct
TSTARGG

SEQ ID NO: 18124 - protein, 7 aa, synthetic construct
NDQKYNP

SEQ ID NO: 18125 - protein, 7 aa, synthetic construct
RREPDMG

SEQ ID NO: 18126 - protein, 7 aa, synthetic construct
TKVGHQP

SEQ ID NO: 18127 - protein, 7 aa, synthetic construct
GKLMGNS

SEQ ID NO: 18128 - protein, 7 aa, synthetic construct
KSIQGLN

SEQ ID NO: 18129 - protein, 7 aa, synthetic construct
MSYKQAS

SEQ ID NO: 18130 - protein, 7 aa, synthetic construct
RPQQKLE

SEQ ID NO: 18131 - protein, 7 aa, synthetic construct
QRPLKHE

SEQ ID NO: 18132 - protein, 7 aa, synthetic construct
IASLKQG

SEQ ID NO: 18133 - protein, 7 aa, synthetic construct
GGNVRII

SEQ ID NO: 18134 - protein, 7 aa, synthetic construct
EQKSPSP

SEQ ID NO: 18135 - protein, 7 aa, synthetic construct
RGGTTYQ

SEQ ID NO: 18136 - protein, 7 aa, synthetic construct
SRNNASL

SEQ ID NO: 18137 - protein, 7 aa, synthetic construct
TRQGYID

SEQ ID NO: 18138 - protein, 7 aa, synthetic construct
NGVMMGK

SEQ ID NO: 18139 - protein, 7 aa, synthetic construct
IKVGFVG

SEQ ID NO: 18140 - protein, 7 aa, synthetic construct
IHAEGHN

SEQ ID NO: 18141 - protein, 7 aa, synthetic construct
KQVSSNP

SEQ ID NO: 18142 - protein, 7 aa, synthetic construct
WLHKEAP

SEQ ID NO: 18143 - protein, 7 aa, synthetic construct
NPPSGAK

SEQ ID NO: 18144 - protein, 7 aa, synthetic construct
AGRSIIP

SEQ ID NO: 18145 - protein, 7 aa, synthetic construct
AKLQSNA

SEQ ID NO: 18146 - protein, 7 aa, synthetic construct
ANDKMPG

SEQ ID NO: 18147 - protein, 7 aa, synthetic construct
QQAVKRD

SEQ ID NO: 18148 - protein, 7 aa, synthetic construct
NNSRQQP

SEQ ID NO: 18149 - protein, 7 aa, synthetic construct
TTIKGIN

SEQ ID NO: 18150 - protein, 7 aa, synthetic construct
VPQKNVL

SEQ ID NO: 18151 - protein, 7 aa, synthetic construct
WSGNAAK

SEQ ID NO: 18152 - protein, 7 aa, synthetic construct
RREMPPP

SEQ ID NO: 18153 - protein, 7 aa, synthetic construct
HEYKKIA

SEQ ID NO: 18154 - protein, 7 aa, synthetic construct
YAGNRSS

SEQ ID NO: 18155 - protein, 7 aa, synthetic construct
VRQALGV

SEQ ID NO: 18156 - protein, 7 aa, synthetic construct
NHIVMKP

SEQ ID NO: 18157 - protein, 7 aa, synthetic construct
QPGIPQQ

SEQ ID NO: 18158 - protein, 7 aa, synthetic construct
TMHMGHE

SEQ ID NO: 18159 - protein, 7 aa, synthetic construct
MARNQGF

SEQ ID NO: 18160 - protein, 7 aa, synthetic construct
HVQVNMG

SEQ ID NO: 18161 - protein, 7 aa, synthetic construct
GAKVQNP

SEQ ID NO: 18162 - protein, 7 aa, synthetic construct
GYSRSTP

SEQ ID NO: 18163 - protein, 7 aa, synthetic construct
TNGIQIR

SEQ ID NO: 18164 - protein, 7 aa, synthetic construct
NQMHKHD

SEQ ID NO: 18165 - protein, 7 aa, synthetic construct
RIVGPTG

SEQ ID NO: 18166 - protein, 7 aa, synthetic construct
MMNREHM

SEQ ID NO: 18167 - protein, 7 aa, synthetic construct
NTKAGNQ

SEQ ID NO: 18168 - protein, 7 aa, synthetic construct
VITLREG

SEQ ID NO: 18169 - protein, 7 aa, synthetic construct
GSSAWPP

SEQ ID NO: 18170 - protein, 7 aa, synthetic construct
RDPYVAS

SEQ ID NO: 18171 - protein, 7 aa, synthetic construct
SKGPGPM

SEQ ID NO: 18172 - protein, 7 aa, synthetic construct
GKPDQRN

SEQ ID NO: 18173 - protein, 7 aa, synthetic construct
YYTSGKV

SEQ ID NO: 18174 - protein, 7 aa, synthetic construct
MQKLAKD

SEQ ID NO: 18175 - protein, 7 aa, synthetic construct
LNMGQGR

SEQ ID NO: 18176 - protein, 7 aa, synthetic construct
LPTHKSQ

SEQ ID NO: 18177 - protein, 7 aa, synthetic construct
MNNPRSD

SEQ ID NO: 18178 - protein, 7 aa, synthetic construct
SRHTSMQ

SEQ ID NO: 18179 - protein, 7 aa, synthetic construct
DPRKGGM

SEQ ID NO: 18180 - protein, 7 aa, synthetic construct
QGTAGKQ

SEQ ID NO: 18181 - protein, 7 aa, synthetic construct
NNSRTSV

SEQ ID NO: 18182 - protein, 7 aa, synthetic construct
NRHDAGH

SEQ ID NO: 18183 - protein, 7 aa, synthetic construct
GMESKVG

SEQ ID NO: 18184 - protein, 7 aa, synthetic construct
SSNRGAD

SEQ ID NO: 18185 - protein, 7 aa, synthetic construct
VSNWSAS

SEQ ID NO: 18186 - protein, 7 aa, synthetic construct
NPKMEVF

SEQ ID NO: 18187 - protein, 7 aa, synthetic construct
GGTQTVR

SEQ ID NO: 18188 - protein, 7 aa, synthetic construct
GTSGGPA

SEQ ID NO: 18189 - protein, 7 aa, synthetic construct
NRHGIEL

SEQ ID NO: 18190 - protein, 7 aa, synthetic construct
QNKIQEA

SEQ ID NO: 18191 - protein, 7 aa, synthetic construct
MPSYGKQ

SEQ ID NO: 18192 - protein, 7 aa, synthetic construct
SLKRPTA

SEQ ID NO: 18193 - protein, 7 aa, synthetic construct
GMGNKAG

SEQ ID NO: 18194 - protein, 7 aa, synthetic construct
GHHIGSD

SEQ ID NO: 18195 - protein, 7 aa, synthetic construct
LGNRVAV

SEQ ID NO: 18196 - protein, 7 aa, synthetic construct
ARGGDSV

SEQ ID NO: 18197 - protein, 7 aa, synthetic construct
IRQFAQN

SEQ ID NO: 18198 - protein, 7 aa, synthetic construct
RSEKPTV

SEQ ID NO: 18199 - protein, 7 aa, synthetic construct
PSVRPTI

SEQ ID NO: 18200 - protein, 7 aa, synthetic construct
HGKTQLP

SEQ ID NO: 18201 - protein, 7 aa, synthetic construct
QSGTFQV

SEQ ID NO: 18202 - protein, 7 aa, synthetic construct
DGKARVP

SEQ ID NO: 18203 - protein, 7 aa, synthetic construct
WAGNASA

SEQ ID NO: 18204 - protein, 7 aa, synthetic construct
HDNGRHD

SEQ ID NO: 18205 - protein, 7 aa, synthetic construct
AASTKGW

SEQ ID NO: 18206 - protein, 7 aa, synthetic construct
ANPTKFG

SEQ ID NO: 18207 - protein, 7 aa, synthetic construct
VRQGPPA

SEQ ID NO: 18208 - protein, 7 aa, synthetic construct
DNKVLSH

SEQ ID NO: 18209 - protein, 7 aa, synthetic construct
RQQESRN

SEQ ID NO: 18210 - protein, 7 aa, synthetic construct
MGRMDGG

SEQ ID NO: 18211 - protein, 7 aa, synthetic construct
QRHGNSP

SEQ ID NO: 18212 - protein, 7 aa, synthetic construct
TSVAKTN

SEQ ID NO: 18213 - protein, 7 aa, synthetic construct
ERINHRE

SEQ ID NO: 18214 - protein, 7 aa, synthetic construct
TRQNSFP

SEQ ID NO: 18215 - protein, 7 aa, synthetic construct
DKQRQAA

SEQ ID NO: 18216 - protein, 7 aa, synthetic construct
TKEIPNK

SEQ ID NO: 18217 - protein, 7 aa, synthetic construct
LAKLNMQ

SEQ ID NO: 18218 - protein, 7 aa, synthetic construct
GDNQGSR

SEQ ID NO: 18219 - protein, 7 aa, synthetic construct
SPNGQRV

SEQ ID NO: 18220 - protein, 7 aa, synthetic construct
QMRGGMN

SEQ ID NO: 18221 - protein, 7 aa, synthetic construct
PKGHMGH

SEQ ID NO: 18222 - protein, 7 aa, synthetic construct
MRLNESA

SEQ ID NO: 18223 - protein, 7 aa, synthetic construct
INIKQSA

SEQ ID NO: 18224 - protein, 7 aa, synthetic construct
MQYSPAD

SEQ ID NO: 18225 - protein, 7 aa, synthetic construct
QQKTNSL

SEQ ID NO: 18226 - protein, 7 aa, synthetic construct
MGNAAGG

SEQ ID NO: 18227 - protein, 7 aa, synthetic construct
PHSPNGS

SEQ ID NO: 18228 - protein, 7 aa, synthetic construct
THGLVKA

SEQ ID NO: 18229 - protein, 7 aa, synthetic construct
EKAGKTT

SEQ ID NO: 18230 - protein, 7 aa, synthetic construct
LIGNAHP

SEQ ID NO: 18231 - protein, 7 aa, synthetic construct
VSPMVNA

SEQ ID NO: 18232 - protein, 7 aa, synthetic construct
PPGREDM

SEQ ID NO: 18233 - protein, 7 aa, synthetic construct
NGHQSQQ

SEQ ID NO: 18234 - protein, 7 aa, synthetic construct
YGMQKQI

SEQ ID NO: 18235 - protein, 7 aa, synthetic construct
IPRTREM

SEQ ID NO: 18236 - protein, 7 aa, synthetic construct
LKNVAGG

SEQ ID NO: 18237 - protein, 7 aa, synthetic construct
ANVRNEM

SEQ ID NO: 18238 - protein, 7 aa, synthetic construct
EWNKKEG

SEQ ID NO: 18239 - protein, 7 aa, synthetic construct
TGRNTAV

SEQ ID NO: 18240 - protein, 7 aa, synthetic construct
RVSAHSA

SEQ ID NO: 18241 - protein, 7 aa, synthetic construct
RTSTPAS

SEQ ID NO: 18242 - protein, 7 aa, synthetic construct
SSTALNK

SEQ ID NO: 18243 - protein, 7 aa, synthetic construct
SGPHGKI

SEQ ID NO: 18244 - protein, 7 aa, synthetic construct
SNKVSSV

SEQ ID NO: 18245 - protein, 7 aa, synthetic construct
MKTSAYH

SEQ ID NO: 18246 - protein, 7 aa, synthetic construct
VPTHQFN

SEQ ID NO: 18247 - protein, 7 aa, synthetic construct
KVHTGMS

SEQ ID NO: 18248 - protein, 7 aa, synthetic construct
PVSRTAD

SEQ ID NO: 18249 - protein, 7 aa, synthetic construct
YNAITRQ

SEQ ID NO: 18250 - protein, 7 aa, synthetic construct
HYGSTRD

SEQ ID NO: 18251 - protein, 7 aa, synthetic construct
KKPDVVS

SEQ ID NO: 18252 - protein, 7 aa, synthetic construct
IKNNNTM

SEQ ID NO: 18253 - protein, 7 aa, synthetic construct
TPNSHKH

SEQ ID NO: 18254 - protein, 7 aa, synthetic construct
RPNAMQG

SEQ ID NO: 18255 - protein, 7 aa, synthetic construct
NKGGLVA

SEQ ID NO: 18256 - protein, 7 aa, synthetic construct
SNPVKNN

SEQ ID NO: 18257 - protein, 7 aa, synthetic construct
ISAARYP

SEQ ID NO: 18258 - protein, 7 aa, synthetic construct
YSKTVTG

SEQ ID NO: 18259 - protein, 7 aa, synthetic construct
GKMPMAV

SEQ ID NO: 18260 - protein, 7 aa, synthetic construct
AVSGKIP

SEQ ID NO: 18261 - protein, 7 aa, synthetic construct
RLQGTTS

SEQ ID NO: 18262 - protein, 7 aa, synthetic construct
TRGLPKE

SEQ ID NO: 18263 - protein, 7 aa, synthetic construct
RREGDSG

SEQ ID NO: 18264 - protein, 7 aa, synthetic construct
KMGSIGH

SEQ ID NO: 18265 - protein, 7 aa, synthetic construct
EPKSHSM

SEQ ID NO: 18266 - protein, 7 aa, synthetic construct
KKPLGNG

SEQ ID NO: 18267 - protein, 7 aa, synthetic construct
LQGQKVN

SEQ ID NO: 18268 - protein, 7 aa, synthetic construct
IVPGPFT

SEQ ID NO: 18269 - protein, 7 aa, synthetic construct
KYPTSHP

SEQ ID NO: 18270 - protein, 7 aa, synthetic construct
RKDYSDH

SEQ ID NO: 18271 - protein, 7 aa, synthetic construct
FKDKSNM

SEQ ID NO: 18272 - protein, 7 aa, synthetic construct
PGRQDKP

SEQ ID NO: 18273 - protein, 7 aa, synthetic construct
WGRSGVS

SEQ ID NO: 18274 - protein, 7 aa, synthetic construct
WSTTSLA

SEQ ID NO: 18275 - protein, 7 aa, synthetic construct
DLKKPTT

SEQ ID NO: 18276 - protein, 7 aa, synthetic construct
GKQGGSG

SEQ ID NO: 18277 - protein, 7 aa, synthetic construct
KASTITQ

SEQ ID NO: 18278 - protein, 7 aa, synthetic construct
VWKKEES

SEQ ID NO: 18279 - protein, 7 aa, synthetic construct
GRESSIS

SEQ ID NO: 18280 - protein, 7 aa, synthetic construct
MGQSQKA

SEQ ID NO: 18281 - protein, 7 aa, synthetic construct
VNMNSGH

SEQ ID NO: 18282 - protein, 7 aa, synthetic construct
YPVGRSE

SEQ ID NO: 18283 - protein, 7 aa, synthetic construct
PTGKYTY

SEQ ID NO: 18284 - protein, 7 aa, synthetic construct
SQHGIMT

SEQ ID NO: 18285 - protein, 7 aa, synthetic construct
RPNAPPF

SEQ ID NO: 18286 - protein, 7 aa, synthetic construct
KTHLQKD

SEQ ID NO: 18287 - protein, 7 aa, synthetic construct
LPHRNHP

SEQ ID NO: 18288 - protein, 7 aa, synthetic construct
PDRKFGA

SEQ ID NO: 18289 - protein, 7 aa, synthetic construct
RPEFKNA

SEQ ID NO: 18290 - protein, 7 aa, synthetic construct
IGQTAKP

SEQ ID NO: 18291 - protein, 7 aa, synthetic construct
FATAKPS

SEQ ID NO: 18292 - protein, 7 aa, synthetic construct
WRGKNEG

SEQ ID NO: 18293 - protein, 7 aa, synthetic construct
QNVAWEK

SEQ ID NO: 18294 - protein, 7 aa, synthetic construct
AKSKDYF

SEQ ID NO: 18295 - protein, 7 aa, synthetic construct
DPVHKGG

SEQ ID NO: 18296 - protein, 7 aa, synthetic construct
DQKNGRV

SEQ ID NO: 18297 - protein, 7 aa, synthetic construct
GIDSIRS

SEQ ID NO: 18298 - protein, 7 aa, synthetic construct
QNPQRGQ

SEQ ID NO: 18299 - protein, 7 aa, synthetic construct
LRYGEQE

SEQ ID NO: 18300 - protein, 7 aa, synthetic construct
HKDPKQM

SEQ ID NO: 18301 - protein, 7 aa, synthetic construct
MGRNIGP

SEQ ID NO: 18302 - protein, 7 aa, synthetic construct
AKAREGT

SEQ ID NO: 18303 - protein, 7 aa, synthetic construct
VKSINYA

SEQ ID NO: 18304 - protein, 7 aa, synthetic construct
IHAQTQR

SEQ ID NO: 18305 - protein, 7 aa, synthetic construct
MPVSVGS

SEQ ID NO: 18306 - protein, 7 aa, synthetic construct
SPHRTAG

SEQ ID NO: 18307 - protein, 7 aa, synthetic construct
TLGPKGN

SEQ ID NO: 18308 - protein, 7 aa, synthetic construct
ITKTQGI

SEQ ID NO: 18309 - protein, 7 aa, synthetic construct
YAGQHIK

SEQ ID NO: 18310 - protein, 7 aa, synthetic construct
RMNENKQ

SEQ ID NO: 18311 - protein, 7 aa, synthetic construct
HKMQSGE

SEQ ID NO: 18312 - protein, 7 aa, synthetic construct
NNSAKND

SEQ ID NO: 18313 - protein, 7 aa, synthetic construct
EGRLKID

SEQ ID NO: 18314 - protein, 7 aa, synthetic construct
RHAAAID

SEQ ID NO: 18315 - protein, 7 aa, synthetic construct
EGRDHSA

SEQ ID NO: 18316 - protein, 7 aa, synthetic construct
QARIKEI

SEQ ID NO: 18317 - protein, 7 aa, synthetic construct
NPMNRTY

SEQ ID NO: 18318 - protein, 7 aa, synthetic construct
NNGSKGE

SEQ ID NO: 18319 - protein, 7 aa, synthetic construct
VKSKMDT

SEQ ID NO: 18320 - protein, 7 aa, synthetic construct
WSREWQN

SEQ ID NO: 18321 - protein, 7 aa, synthetic construct
QAQNKNT

SEQ ID NO: 18322 - protein, 7 aa, synthetic construct
YERITPN

SEQ ID NO: 18323 - protein, 7 aa, synthetic construct
TMVRQAM

SEQ ID NO: 18324 - protein, 7 aa, synthetic construct
QSMPPRG

SEQ ID NO: 18325 - protein, 7 aa, synthetic construct
NDRIHKE

SEQ ID NO: 18326 - protein, 7 aa, synthetic construct
HLDTKRA

SEQ ID NO: 18327 - protein, 7 aa, synthetic construct
KAASYHP

SEQ ID NO: 18328 - protein, 7 aa, synthetic construct
QKKLENH

SEQ ID NO: 18329 - protein, 7 aa, synthetic construct
MSGFHNP

SEQ ID NO: 18330 - protein, 7 aa, synthetic construct
RAVSGFD

SEQ ID NO: 18331 - protein, 7 aa, synthetic construct
AQNERNF

SEQ ID NO: 18332 - protein, 7 aa, synthetic construct
VGHAVKS

SEQ ID NO: 18333 - protein, 7 aa, synthetic construct
SAPYTQS

SEQ ID NO: 18334 - protein, 7 aa, synthetic construct
NHQFSPA

SEQ ID NO: 18335 - protein, 7 aa, synthetic construct
QLYSKGM

SEQ ID NO: 18336 - protein, 7 aa, synthetic construct
YKGPESS

SEQ ID NO: 18337 - protein, 7 aa, synthetic construct
KGIQAQP

SEQ ID NO: 18338 - protein, 7 aa, synthetic construct
GSAKHPP

SEQ ID NO: 18339 - protein, 7 aa, synthetic construct
GAKVLSQ

SEQ ID NO: 18340 - protein, 7 aa, synthetic construct
LKNQVDM

SEQ ID NO: 18341 - protein, 7 aa, synthetic construct
WNQEKNM

SEQ ID NO: 18342 - protein, 7 aa, synthetic construct
RGQDFKS

SEQ ID NO: 18343 - protein, 7 aa, synthetic construct
KYQATPP

SEQ ID NO: 18344 - protein, 7 aa, synthetic construct
NQPTNFG

SEQ ID NO: 18345 - protein, 7 aa, synthetic construct
FREPRAD

SEQ ID NO: 18346 - protein, 7 aa, synthetic construct
QFNKDNI

SEQ ID NO: 18347 - protein, 7 aa, synthetic construct
KPNASQG

SEQ ID NO: 18348 - protein, 7 aa, synthetic construct
MAREHTV

SEQ ID NO: 18349 - protein, 7 aa, synthetic construct
PKTDSRT

SEQ ID NO: 18350 - protein, 7 aa, synthetic construct
HKIMLGG

SEQ ID NO: 18351 - protein, 7 aa, synthetic construct
SKLPPVA

SEQ ID NO: 18352 - protein, 7 aa, synthetic construct
KQESGWV

SEQ ID NO: 18353 - protein, 7 aa, synthetic construct
GYVAPGH

SEQ ID NO: 18354 - protein, 7 aa, synthetic construct
ANYANGE

SEQ ID NO: 18355 - protein, 7 aa, synthetic construct
YFENRGQ

SEQ ID NO: 18356 - protein, 7 aa, synthetic construct
TSGLARM

SEQ ID NO: 18357 - protein, 7 aa, synthetic construct
MGMHKSQ

SEQ ID NO: 18358 - protein, 7 aa, synthetic construct
HNKPGTG

SEQ ID NO: 18359 - protein, 7 aa, synthetic construct
RPGAAQI

SEQ ID NO: 18360 - protein, 7 aa, synthetic construct
KTTNGIG

SEQ ID NO: 18361 - protein, 7 aa, synthetic construct
QMDWQKA

SEQ ID NO: 18362 - protein, 7 aa, synthetic construct
RPQQVKE

SEQ ID NO: 18363 - protein, 7 aa, synthetic construct
WNKHISP

SEQ ID NO: 18364 - protein, 7 aa, synthetic construct
SPMHGIN

SEQ ID NO: 18365 - protein, 7 aa, synthetic construct
QAAIMGA

SEQ ID NO: 18366 - protein, 7 aa, synthetic construct
YNISISK

SEQ ID NO: 18367 - protein, 7 aa, synthetic construct
GRAVSSG

SEQ ID NO: 18368 - protein, 7 aa, synthetic construct
FMDRLKG

SEQ ID NO: 18369 - protein, 7 aa, synthetic construct
SGSMPSR

SEQ ID NO: 18370 - protein, 7 aa, synthetic construct
HGVGNPK

SEQ ID NO: 18371 - protein, 7 aa, synthetic construct
FPYGDSI

SEQ ID NO: 18372 - protein, 7 aa, synthetic construct
SKAVPTS

SEQ ID NO: 18373 - protein, 7 aa, synthetic construct
FIRAGNE

SEQ ID NO: 18374 - protein, 7 aa, synthetic construct
RPINAQP

SEQ ID NO: 18375 - protein, 7 aa, synthetic construct
LSNGFRQ

SEQ ID NO: 18376 - protein, 7 aa, synthetic construct
WGHHAPE

SEQ ID NO: 18377 - protein, 7 aa, synthetic construct
QQAPVHG

SEQ ID NO: 18378 - protein, 7 aa, synthetic construct
INKMKET

SEQ ID NO: 18379 - protein, 7 aa, synthetic construct
MHSDHQR

SEQ ID NO: 18380 - protein, 7 aa, synthetic construct
FNSTKLA

SEQ ID NO: 18381 - protein, 7 aa, synthetic construct
TDIGNTR

SEQ ID NO: 18382 - protein, 7 aa, synthetic construct
FQSVKAQ

SEQ ID NO: 18383 - protein, 7 aa, synthetic construct
NQPVGAR

SEQ ID NO: 18384 - protein, 7 aa, synthetic construct
VPTNLKW

SEQ ID NO: 18385 - protein, 7 aa, synthetic construct
SGKYADQ

SEQ ID NO: 18386 - protein, 7 aa, synthetic construct
RSHNSTS

SEQ ID NO: 18387 - protein, 7 aa, synthetic construct
DIRNGFK

SEQ ID NO: 18388 - protein, 7 aa, synthetic construct
TDTAKKI

SEQ ID NO: 18389 - protein, 7 aa, synthetic construct
DPGWKTG

SEQ ID NO: 18390 - protein, 7 aa, synthetic construct
VRQPEKT

SEQ ID NO: 18391 - protein, 7 aa, synthetic construct
HTQYKNS

SEQ ID NO: 18392 - protein, 7 aa, synthetic construct
KFVRDGT

SEQ ID NO: 18393 - protein, 7 aa, synthetic construct
AYDHVKA

SEQ ID NO: 18394 - protein, 7 aa, synthetic construct
QNRFTVA

SEQ ID NO: 18395 - protein, 7 aa, synthetic construct
TNVKALM

SEQ ID NO: 18396 - protein, 7 aa, synthetic construct
KNAGYPH

SEQ ID NO: 18397 - protein, 7 aa, synthetic construct
PEKRTPS

SEQ ID NO: 18398 - protein, 7 aa, synthetic construct
LDRMGRE

SEQ ID NO: 18399 - protein, 7 aa, synthetic construct
GVPKTSN

SEQ ID NO: 18400 - protein, 7 aa, synthetic construct
IPGKGTP

SEQ ID NO: 18401 - protein, 7 aa, synthetic construct
VTGLKSQ

SEQ ID NO: 18402 - protein, 7 aa, synthetic construct
HQGVGRP

SEQ ID NO: 18403 - protein, 7 aa, synthetic construct
IQRMGSA

SEQ ID NO: 18404 - protein, 7 aa, synthetic construct
MNVRLSA

SEQ ID NO: 18405 - protein, 7 aa, synthetic construct
MNRSLQA

SEQ ID NO: 18406 - protein, 7 aa, synthetic construct
GFHVKVS

SEQ ID NO: 18407 - protein, 7 aa, synthetic construct
EYKISYG

SEQ ID NO: 18408 - protein, 7 aa, synthetic construct
VPGVTVP

SEQ ID NO: 18409 - protein, 7 aa, synthetic construct
TKRDSNE

SEQ ID NO: 18410 - protein, 7 aa, synthetic construct
QVNFRKE

SEQ ID NO: 18411 - protein, 7 aa, synthetic construct
KTGQNSH

SEQ ID NO: 18412 - protein, 7 aa, synthetic construct
THQVGKV

SEQ ID NO: 18413 - protein, 7 aa, synthetic construct
PRPDYSA

SEQ ID NO: 18414 - protein, 7 aa, synthetic construct
VKNPEGV

SEQ ID NO: 18415 - protein, 7 aa, synthetic construct
KGTHIGG

SEQ ID NO: 18416 - protein, 7 aa, synthetic construct
VNSVSHI

SEQ ID NO: 18417 - protein, 7 aa, synthetic construct
NASKNAH

SEQ ID NO: 18418 - protein, 7 aa, synthetic construct
MANQARQ

SEQ ID NO: 18419 - protein, 7 aa, synthetic construct
AGSEKRN

SEQ ID NO: 18420 - protein, 7 aa, synthetic construct
WGIVKAP

SEQ ID NO: 18421 - protein, 7 aa, synthetic construct
IGQRSQH

SEQ ID NO: 18422 - protein, 7 aa, synthetic construct
AKSDRIV

SEQ ID NO: 18423 - protein, 7 aa, synthetic construct
FSPITSS

SEQ ID NO: 18424 - protein, 7 aa, synthetic construct
MAYGASQ

SEQ ID NO: 18425 - protein, 7 aa, synthetic construct
RRAEHND

SEQ ID NO: 18426 - protein, 7 aa, synthetic construct
TRNFLPD

SEQ ID NO: 18427 - protein, 7 aa, synthetic construct
KQFGNDA

SEQ ID NO: 18428 - protein, 7 aa, synthetic construct
EHRIARE

SEQ ID NO: 18429 - protein, 7 aa, synthetic construct
MDSFSAP

SEQ ID NO: 18430 - protein, 7 aa, synthetic construct
MGHNRPD

SEQ ID NO: 18431 - protein, 7 aa, synthetic construct
GPSTARA

SEQ ID NO: 18432 - protein, 7 aa, synthetic construct
GFHMHGA

SEQ ID NO: 18433 - protein, 7 aa, synthetic construct
VANKKTD

SEQ ID NO: 18434 - protein, 7 aa, synthetic construct
SKTKFIE

SEQ ID NO: 18435 - protein, 7 aa, synthetic construct
TPYAKGG

SEQ ID NO: 18436 - protein, 7 aa, synthetic construct
TFHYQNG

SEQ ID NO: 18437 - protein, 7 aa, synthetic construct
GKSMTQA

SEQ ID NO: 18438 - protein, 7 aa, synthetic construct
YQKMSYD

SEQ ID NO: 18439 - protein, 7 aa, synthetic construct
AGHPGMS

SEQ ID NO: 18440 - protein, 7 aa, synthetic construct
TRPTMTS

SEQ ID NO: 18441 - protein, 7 aa, synthetic construct
NELKMRG

SEQ ID NO: 18442 - protein, 7 aa, synthetic construct
QRGNAAL

SEQ ID NO: 18443 - protein, 7 aa, synthetic construct
NKADSSY

SEQ ID NO: 18444 - protein, 7 aa, synthetic construct
RSQTYSS

SEQ ID NO: 18445 - protein, 7 aa, synthetic construct
AVMKQNS

SEQ ID NO: 18446 - protein, 7 aa, synthetic construct
EKKLSEA

SEQ ID NO: 18447 - protein, 7 aa, synthetic construct
NASFQVA

SEQ ID NO: 18448 - protein, 7 aa, synthetic construct
TIMIKAP

SEQ ID NO: 18449 - protein, 7 aa, synthetic construct
ISMRAEA

SEQ ID NO: 18450 - protein, 7 aa, synthetic construct
YHSVAHP

SEQ ID NO: 18451 - protein, 7 aa, synthetic construct
MGGTRMV

SEQ ID NO: 18452 - protein, 7 aa, synthetic construct
EGSYGRV

SEQ ID NO: 18453 - protein, 7 aa, synthetic construct
GVRTQYS

SEQ ID NO: 18454 - protein, 7 aa, synthetic construct
QHPGMIG

SEQ ID NO: 18455 - protein, 7 aa, synthetic construct
KPREQYQ

SEQ ID NO: 18456 - protein, 7 aa, synthetic construct
GPQHRMV

SEQ ID NO: 18457 - protein, 7 aa, synthetic construct
FHDARQP

SEQ ID NO: 18458 - protein, 7 aa, synthetic construct
RAMNSPA

SEQ ID NO: 18459 - protein, 7 aa, synthetic construct
VQGKLHA

SEQ ID NO: 18460 - protein, 7 aa, synthetic construct
SNVRPIV

SEQ ID NO: 18461 - protein, 7 aa, synthetic construct
PIHKSMD

SEQ ID NO: 18462 - protein, 7 aa, synthetic construct
AGAMVPV

SEQ ID NO: 18463 - protein, 7 aa, synthetic construct
MGVKWEV

SEQ ID NO: 18464 - protein, 7 aa, synthetic construct
MSGKDTA

SEQ ID NO: 18465 - protein, 7 aa, synthetic construct
TRYDNNG

SEQ ID NO: 18466 - protein, 7 aa, synthetic construct
SHIQSKN

SEQ ID NO: 18467 - protein, 7 aa, synthetic construct
AGMHNKT

SEQ ID NO: 18468 - protein, 7 aa, synthetic construct
NRNAAPV

SEQ ID NO: 18469 - protein, 7 aa, synthetic construct
GQPKAFH

SEQ ID NO: 18470 - protein, 7 aa, synthetic construct
MTTGQQK

SEQ ID NO: 18471 - protein, 7 aa, synthetic construct
RGGFTDN

SEQ ID NO: 18472 - protein, 7 aa, synthetic construct
GLSIKLG

SEQ ID NO: 18473 - protein, 7 aa, synthetic construct
TPVSPHP

SEQ ID NO: 18474 - protein, 7 aa, synthetic construct
KNFPNTD

SEQ ID NO: 18475 - protein, 7 aa, synthetic construct
RPENHIA

SEQ ID NO: 18476 - protein, 7 aa, synthetic construct
NMKKSET

SEQ ID NO: 18477 - protein, 7 aa, synthetic construct
VKIGGQA

SEQ ID NO: 18478 - protein, 7 aa, synthetic construct
QGKVMWE

SEQ ID NO: 18479 - protein, 7 aa, synthetic construct
GKSATNF

SEQ ID NO: 18480 - protein, 7 aa, synthetic construct
RSDGRLG

SEQ ID NO: 18481 - protein, 7 aa, synthetic construct
TQHTTAD

SEQ ID NO: 18482 - protein, 7 aa, synthetic construct
FLDTDRP

SEQ ID NO: 18483 - protein, 7 aa, synthetic construct
HNQQFDK

SEQ ID NO: 18484 - protein, 7 aa, synthetic construct
DGASNQR

SEQ ID NO: 18485 - protein, 7 aa, synthetic construct
LKPFTNS

SEQ ID NO: 18486 - protein, 7 aa, synthetic construct
GVSAPNK

SEQ ID NO: 18487 - protein, 7 aa, synthetic construct
KSLKQEE

SEQ ID NO: 18488 - protein, 7 aa, synthetic construct
VMGKQSF

SEQ ID NO: 18489 - protein, 7 aa, synthetic construct
NRKVDMP

SEQ ID NO: 18490 - protein, 7 aa, synthetic construct
MGKKEHT

SEQ ID NO: 18491 - protein, 7 aa, synthetic construct
LRNRELE

SEQ ID NO: 18492 - protein, 7 aa, synthetic construct
YPGARQA

SEQ ID NO: 18493 - protein, 7 aa, synthetic construct
RRDTMVV

SEQ ID NO: 18494 - protein, 7 aa, synthetic construct
FNRGSQD

SEQ ID NO: 18495 - protein, 7 aa, synthetic construct
NMRDNPK

SEQ ID NO: 18496 - protein, 7 aa, synthetic construct
TRTNDGG

SEQ ID NO: 18497 - protein, 7 aa, synthetic construct
SNMVYKA

SEQ ID NO: 18498 - protein, 7 aa, synthetic construct
RSPGAMH

SEQ ID NO: 18499 - protein, 7 aa, synthetic construct
QRTAPTT

SEQ ID NO: 18500 - protein, 7 aa, synthetic construct
IGAVVNP

SEQ ID NO: 18501 - protein, 7 aa, synthetic construct
MLQPRHD

SEQ ID NO: 18502 - protein, 7 aa, synthetic construct
TRPSQVD

SEQ ID NO: 18503 - protein, 7 aa, synthetic construct
SMAVNNM

SEQ ID NO: 18504 - protein, 7 aa, synthetic construct
LFAGHKD

SEQ ID NO: 18505 - protein, 7 aa, synthetic construct
ATATKSG

SEQ ID NO: 18506 - protein, 7 aa, synthetic construct
FVHGPKV

SEQ ID NO: 18507 - protein, 7 aa, synthetic construct
VATTLPP

SEQ ID NO: 18508 - protein, 7 aa, synthetic construct
YQEIKNG

SEQ ID NO: 18509 - protein, 7 aa, synthetic construct
FVKSATV

SEQ ID NO: 18510 - protein, 7 aa, synthetic construct
LRSGQYP

SEQ ID NO: 18511 - protein, 7 aa, synthetic construct
QSGKGHL

SEQ ID NO: 18512 - protein, 7 aa, synthetic construct
KMGNDQW

SEQ ID NO: 18513 - protein, 7 aa, synthetic construct
DARTPHR

SEQ ID NO: 18514 - protein, 7 aa, synthetic construct
TLPFNSA

SEQ ID NO: 18515 - protein, 7 aa, synthetic construct
YAPLKHD

SEQ ID NO: 18516 - protein, 7 aa, synthetic construct
INREMYG

SEQ ID NO: 18517 - protein, 7 aa, synthetic construct
NNLNKMQ

SEQ ID NO: 18518 - protein, 7 aa, synthetic construct
PEKYHQT

SEQ ID NO: 18519 - protein, 7 aa, synthetic construct
RMGPLSS

SEQ ID NO: 18520 - protein, 7 aa, synthetic construct
YSSGSGD

SEQ ID NO: 18521 - protein, 7 aa, synthetic construct
ATPTNSA

SEQ ID NO: 18522 - protein, 7 aa, synthetic construct
ERNERFQ

SEQ ID NO: 18523 - protein, 7 aa, synthetic construct
MPQPPSN

SEQ ID NO: 18524 - protein, 7 aa, synthetic construct
LGHPYRG

SEQ ID NO: 18525 - protein, 7 aa, synthetic construct
AHGPELY

SEQ ID NO: 18526 - protein, 7 aa, synthetic construct
PVSSSSN

SEQ ID NO: 18527 - protein, 7 aa, synthetic construct
TGHKVPA

SEQ ID NO: 18528 - protein, 7 aa, synthetic construct
SSRGGGW

SEQ ID NO: 18529 - protein, 7 aa, synthetic construct
PAGHMSS

SEQ ID NO: 18530 - protein, 7 aa, synthetic construct
QMNRATV

SEQ ID NO: 18531 - protein, 7 aa, synthetic construct
QNNRIHA

SEQ ID NO: 18532 - protein, 7 aa, synthetic construct
FLTNNNK

SEQ ID NO: 18533 - protein, 7 aa, synthetic construct
KDWKEKQ

SEQ ID NO: 18534 - protein, 7 aa, synthetic construct
SKMNAAY

SEQ ID NO: 18535 - protein, 7 aa, synthetic construct
SLRGNHG

SEQ ID NO: 18536 - protein, 7 aa, synthetic construct
TVKYGLE

SEQ ID NO: 18537 - protein, 7 aa, synthetic construct
PKMRPDT

SEQ ID NO: 18538 - protein, 7 aa, synthetic construct
ERNPNRE

SEQ ID NO: 18539 - protein, 7 aa, synthetic construct
TYKTQPP

SEQ ID NO: 18540 - protein, 7 aa, synthetic construct
TKGQPEL

SEQ ID NO: 18541 - protein, 7 aa, synthetic construct
TRQGQMH

SEQ ID NO: 18542 - protein, 7 aa, synthetic construct
GHSQFNA

SEQ ID NO: 18543 - protein, 7 aa, synthetic construct
RDPGQKP

SEQ ID NO: 18544 - protein, 7 aa, synthetic construct
GANPIGW

SEQ ID NO: 18545 - protein, 7 aa, synthetic construct
RGDNHTA

SEQ ID NO: 18546 - protein, 7 aa, synthetic construct
MAITVKE

SEQ ID NO: 18547 - protein, 7 aa, synthetic construct
SFNGPRV

SEQ ID NO: 18548 - protein, 7 aa, synthetic construct
LGKLQTG

SEQ ID NO: 18549 - protein, 7 aa, synthetic construct
EHKVASM

SEQ ID NO: 18550 - protein, 7 aa, synthetic construct
KVDKGIS

SEQ ID NO: 18551 - protein, 7 aa, synthetic construct
FQRDSGF

SEQ ID NO: 18552 - protein, 7 aa, synthetic construct
HKWSKGD

SEQ ID NO: 18553 - protein, 7 aa, synthetic construct
WQPSHAS

SEQ ID NO: 18554 - protein, 7 aa, synthetic construct
RAVHQSM

SEQ ID NO: 18555 - protein, 7 aa, synthetic construct
SMGPGTA

SEQ ID NO: 18556 - protein, 7 aa, synthetic construct
KITNVAG

SEQ ID NO: 18557 - protein, 7 aa, synthetic construct
KKMYEES

SEQ ID NO: 18558 - protein, 7 aa, synthetic construct
PKMSANL

SEQ ID NO: 18559 - protein, 7 aa, synthetic construct
QDVSKRE

SEQ ID NO: 18560 - protein, 7 aa, synthetic construct
RTFGANE

SEQ ID NO: 18561 - protein, 7 aa, synthetic construct
DRNTTPQ

SEQ ID NO: 18562 - protein, 7 aa, synthetic construct
TNPGPVN

SEQ ID NO: 18563 - protein, 7 aa, synthetic construct
PSEKTYF

SEQ ID NO: 18564 - protein, 7 aa, synthetic construct
NAKYVGS

SEQ ID NO: 18565 - protein, 7 aa, synthetic construct
IFVKSSD

SEQ ID NO: 18566 - protein, 7 aa, synthetic construct
VMPATGK

SEQ ID NO: 18567 - protein, 7 aa, synthetic construct
GPKMMQT

SEQ ID NO: 18568 - protein, 7 aa, synthetic construct
PMHSGPE

SEQ ID NO: 18569 - protein, 7 aa, synthetic construct
KDPRNMS

SEQ ID NO: 18570 - protein, 7 aa, synthetic construct
FPGTPYE

SEQ ID NO: 18571 - protein, 7 aa, synthetic construct
GTSNIHQ

SEQ ID NO: 18572 - protein, 7 aa, synthetic construct
ITKHYGE

SEQ ID NO: 18573 - protein, 7 aa, synthetic construct
ATEKNFG

SEQ ID NO: 18574 - protein, 7 aa, synthetic construct
GVNKQEW

SEQ ID NO: 18575 - protein, 7 aa, synthetic construct
WINKTTG

SEQ ID NO: 18576 - protein, 7 aa, synthetic construct
KDKTHIY

SEQ ID NO: 18577 - protein, 7 aa, synthetic construct
KLGANNI

SEQ ID NO: 18578 - protein, 7 aa, synthetic construct
HRGAQLT

SEQ ID NO: 18579 - protein, 7 aa, synthetic construct
RIMKEGF

SEQ ID NO: 18580 - protein, 7 aa, synthetic construct
GPNYGVP

SEQ ID NO: 18581 - protein, 7 aa, synthetic construct
AYKTQES

SEQ ID NO: 18582 - protein, 7 aa, synthetic construct
QNHTALV

SEQ ID NO: 18583 - protein, 7 aa, synthetic construct
QPYQQKN

SEQ ID NO: 18584 - protein, 7 aa, synthetic construct
VSRTHGD

SEQ ID NO: 18585 - protein, 7 aa, synthetic construct
AFQNRME

SEQ ID NO: 18586 - protein, 7 aa, synthetic construct
RPNMDFK

SEQ ID NO: 18587 - protein, 7 aa, synthetic construct
EPRRKDP

SEQ ID NO: 18588 - protein, 7 aa, synthetic construct
YERQTFS

SEQ ID NO: 18589 - protein, 7 aa, synthetic construct
KEFNSAP

SEQ ID NO: 18590 - protein, 7 aa, synthetic construct
RQQQYVG

SEQ ID NO: 18591 - protein, 7 aa, synthetic construct
TSTNKHI

SEQ ID NO: 18592 - protein, 7 aa, synthetic construct
SGALVAF

SEQ ID NO: 18593 - protein, 7 aa, synthetic construct
IVHTTKV

SEQ ID NO: 18594 - protein, 7 aa, synthetic construct
DHNPNMY

SEQ ID NO: 18595 - protein, 7 aa, synthetic construct
YMRNPIS

SEQ ID NO: 18596 - protein, 7 aa, synthetic construct
DLARQKV

SEQ ID NO: 18597 - protein, 7 aa, synthetic construct
KGVQHAM

SEQ ID NO: 18598 - protein, 7 aa, synthetic construct
QGHHTFD

SEQ ID NO: 18599 - protein, 7 aa, synthetic construct
FKQNGQN

SEQ ID NO: 18600 - protein, 7 aa, synthetic construct
RNSIIQP

SEQ ID NO: 18601 - protein, 7 aa, synthetic construct
VKGLDTA

SEQ ID NO: 18602 - protein, 7 aa, synthetic construct
NGGGNRA

SEQ ID NO: 18603 - protein, 7 aa, synthetic construct
GFGRDSA

SEQ ID NO: 18604 - protein, 7 aa, synthetic construct
FGVRTGD

SEQ ID NO: 18605 - protein, 7 aa, synthetic construct
ATKNVGN

SEQ ID NO: 18606 - protein, 7 aa, synthetic construct
FSSKNAH

SEQ ID NO: 18607 - protein, 7 aa, synthetic construct
IKEYGKT

SEQ ID NO: 18608 - protein, 7 aa, synthetic construct
QAVNFAG

SEQ ID NO: 18609 - protein, 7 aa, synthetic construct
MKHHSNP

SEQ ID NO: 18610 - protein, 7 aa, synthetic construct
HGSHTQG

SEQ ID NO: 18611 - protein, 7 aa, synthetic construct
RQKEFMS

SEQ ID NO: 18612 - protein, 7 aa, synthetic construct
MKTPLTM

SEQ ID NO: 18613 - protein, 7 aa, synthetic construct
YSKTDDR

SEQ ID NO: 18614 - protein, 7 aa, synthetic construct
DSHGPTD

SEQ ID NO: 18615 - protein, 7 aa, synthetic construct
LYTQKND

SEQ ID NO: 18616 - protein, 7 aa, synthetic construct
ANPRPQS

SEQ ID NO: 18617 - protein, 7 aa, synthetic construct
TVVQTSE

SEQ ID NO: 18618 - protein, 7 aa, synthetic construct
TRQEPVD

SEQ ID NO: 18619 - protein, 7 aa, synthetic construct
TNMRANI

SEQ ID NO: 18620 - protein, 7 aa, synthetic construct
WGVDAPP

SEQ ID NO: 18621 - protein, 7 aa, synthetic construct
MKFSNIN

SEQ ID NO: 18622 - protein, 7 aa, synthetic construct
ENTRTHS

SEQ ID NO: 18623 - protein, 7 aa, synthetic construct
MQLKSSS

SEQ ID NO: 18624 - protein, 7 aa, synthetic construct
AQGPYRP

SEQ ID NO: 18625 - protein, 7 aa, synthetic construct
VKMDRSE

SEQ ID NO: 18626 - protein, 7 aa, synthetic construct
IRVAQSD

SEQ ID NO: 18627 - protein, 7 aa, synthetic construct
NQKTDHV

SEQ ID NO: 18628 - protein, 7 aa, synthetic construct
INPRLLA

SEQ ID NO: 18629 - protein, 7 aa, synthetic construct
YEKGGNQ

SEQ ID NO: 18630 - protein, 7 aa, synthetic construct
LVDVRNP

SEQ ID NO: 18631 - protein, 7 aa, synthetic construct
QAHHIRE

SEQ ID NO: 18632 - protein, 7 aa, synthetic construct
EQNMSTK

SEQ ID NO: 18633 - protein, 7 aa, synthetic construct
TRLAYQD

SEQ ID NO: 18634 - protein, 7 aa, synthetic construct
VTPTDRR

SEQ ID NO: 18635 - protein, 7 aa, synthetic construct
KNTANTV

SEQ ID NO: 18636 - protein, 7 aa, synthetic construct
TGTVAYP

SEQ ID NO: 18637 - protein, 7 aa, synthetic construct
GLMREKS

SEQ ID NO: 18638 - protein, 7 aa, synthetic construct
TKAKYDL

SEQ ID NO: 18639 - protein, 7 aa, synthetic construct
TLHPSKN

SEQ ID NO: 18640 - protein, 7 aa, synthetic construct
ARQDKQN

SEQ ID NO: 18641 - protein, 7 aa, synthetic construct
KPIASEG

SEQ ID NO: 18642 - protein, 7 aa, synthetic construct
YQRTEDA

SEQ ID NO: 18643 - protein, 7 aa, synthetic construct
NHYTTSP

SEQ ID NO: 18644 - protein, 7 aa, synthetic construct
RGDMMTT

SEQ ID NO: 18645 - protein, 7 aa, synthetic construct
TMNRPHQ

SEQ ID NO: 18646 - protein, 7 aa, synthetic construct
MSSKDAI

SEQ ID NO: 18647 - protein, 7 aa, synthetic construct
MYPHQQP

SEQ ID NO: 18648 - protein, 7 aa, synthetic construct
QKGNLKE

SEQ ID NO: 18649 - protein, 7 aa, synthetic construct
HKDSAAQ

SEQ ID NO: 18650 - protein, 7 aa, synthetic construct
HFSKTEF

SEQ ID NO: 18651 - protein, 7 aa, synthetic construct
QAPSGFR

SEQ ID NO: 18652 - protein, 7 aa, synthetic construct
DPYLGRG

SEQ ID NO: 18653 - protein, 7 aa, synthetic construct
GRFQSAS

SEQ ID NO: 18654 - protein, 7 aa, synthetic construct
FKGRDSN

SEQ ID NO: 18655 - protein, 7 aa, synthetic construct
REQQPPA

SEQ ID NO: 18656 - protein, 7 aa, synthetic construct
YKNYREA

SEQ ID NO: 18657 - protein, 7 aa, synthetic construct
KSPYMES

SEQ ID NO: 18658 - protein, 7 aa, synthetic construct
YPGKAAV

SEQ ID NO: 18659 - protein, 7 aa, synthetic construct
TNTRLHA

SEQ ID NO: 18660 - protein, 7 aa, synthetic construct
MKDTHSD

SEQ ID NO: 18661 - protein, 7 aa, synthetic construct
ASGKAHS

SEQ ID NO: 18662 - protein, 7 aa, synthetic construct
NDNSKRP

SEQ ID NO: 18663 - protein, 7 aa, synthetic construct
GQSGPSV

SEQ ID NO: 18664 - protein, 7 aa, synthetic construct
NRIGAIE

SEQ ID NO: 18665 - protein, 7 aa, synthetic construct
TPSNKSN

SEQ ID NO: 18666 - protein, 7 aa, synthetic construct
NKKDAKD

SEQ ID NO: 18667 - protein, 7 aa, synthetic construct
ARHAQEH

SEQ ID NO: 18668 - protein, 7 aa, synthetic construct
AHRSAVE

SEQ ID NO: 18669 - protein, 7 aa, synthetic construct
IMGKGGP

SEQ ID NO: 18670 - protein, 7 aa, synthetic construct
LDRSKMP

SEQ ID NO: 18671 - protein, 7 aa, synthetic construct
MTKFAVA

SEQ ID NO: 18672 - protein, 7 aa, synthetic construct
KTNARFD

SEQ ID NO: 18673 - protein, 7 aa, synthetic construct
GNEKRLA

SEQ ID NO: 18674 - protein, 7 aa, synthetic construct
NAQTPDW

SEQ ID NO: 18675 - protein, 7 aa, synthetic construct
MQRQNGE

SEQ ID NO: 18676 - protein, 7 aa, synthetic construct
QGGHMRD

SEQ ID NO: 18677 - protein, 7 aa, synthetic construct
FVNKDHI

SEQ ID NO: 18678 - protein, 7 aa, synthetic construct
GAAQRNT

SEQ ID NO: 18679 - protein, 7 aa, synthetic construct
AAKTPPQ

SEQ ID NO: 18680 - protein, 7 aa, synthetic construct
MTMSKQF

SEQ ID NO: 18681 - protein, 7 aa, synthetic construct
TSPKFQV

SEQ ID NO: 18682 - protein, 7 aa, synthetic construct
VLQKADK

SEQ ID NO: 18683 - protein, 7 aa, synthetic construct
PNRGVHG

SEQ ID NO: 18684 - protein, 7 aa, synthetic construct
SHKYMNA

SEQ ID NO: 18685 - protein, 7 aa, synthetic construct
RYSEPKG

SEQ ID NO: 18686 - protein, 7 aa, synthetic construct
IKGATFS

SEQ ID NO: 18687 - protein, 7 aa, synthetic construct
ALKGGWS

SEQ ID NO: 18688 - protein, 7 aa, synthetic construct
VNMASMS

SEQ ID NO: 18689 - protein, 7 aa, synthetic construct
DKPSGYA

SEQ ID NO: 18690 - protein, 7 aa, synthetic construct
NKYHWED

SEQ ID NO: 18691 - protein, 7 aa, synthetic construct
PNKPPVG

SEQ ID NO: 18692 - protein, 7 aa, synthetic construct
QRSASIT

SEQ ID NO: 18693 - protein, 7 aa, synthetic construct
RTNREKE

SEQ ID NO: 18694 - protein, 7 aa, synthetic construct
LKMFVKE

SEQ ID NO: 18695 - protein, 7 aa, synthetic construct
EHQVTRS

SEQ ID NO: 18696 - protein, 7 aa, synthetic construct
FVNKDGY

SEQ ID NO: 18697 - protein, 7 aa, synthetic construct
RPTADIM

SEQ ID NO: 18698 - protein, 7 aa, synthetic construct
WIDREHG

SEQ ID NO: 18699 - protein, 7 aa, synthetic construct
YTKYGED

SEQ ID NO: 18700 - protein, 7 aa, synthetic construct
QRNTIGV

SEQ ID NO: 18701 - protein, 7 aa, synthetic construct
THVNTHI

SEQ ID NO: 18702 - protein, 7 aa, synthetic construct
VHNSATY

SEQ ID NO: 18703 - protein, 7 aa, synthetic construct
LAHPKVP

SEQ ID NO: 18704 - protein, 7 aa, synthetic construct
PSVKSYP

SEQ ID NO: 18705 - protein, 7 aa, synthetic construct
YAKSPQE

SEQ ID NO: 18706 - protein, 7 aa, synthetic construct
FDNNVRA

SEQ ID NO: 18707 - protein, 7 aa, synthetic construct
FGKNKME

SEQ ID NO: 18708 - protein, 7 aa, synthetic construct
RQFSPAE

SEQ ID NO: 18709 - protein, 7 aa, synthetic construct
IGHPKPE

SEQ ID NO: 18710 - protein, 7 aa, synthetic construct
TKVGGRD

SEQ ID NO: 18711 - protein, 7 aa, synthetic construct
VNGKGFT

SEQ ID NO: 18712 - protein, 7 aa, synthetic construct
QEKTQNW

SEQ ID NO: 18713 - protein, 7 aa, synthetic construct
TEGRYMP

SEQ ID NO: 18714 - protein, 7 aa, synthetic construct
RLTRIEM

SEQ ID NO: 18715 - protein, 7 aa, synthetic construct
GVTKFQG

SEQ ID NO: 18716 - protein, 7 aa, synthetic construct
SQPQMYG

SEQ ID NO: 18717 - protein, 7 aa, synthetic construct
RGTYGNG

SEQ ID NO: 18718 - protein, 7 aa, synthetic construct
MNQSNRM

SEQ ID NO: 18719 - protein, 7 aa, synthetic construct
WGHQKGE

SEQ ID NO: 18720 - protein, 7 aa, synthetic construct
GPAMHVA

SEQ ID NO: 18721 - protein, 7 aa, synthetic construct
MFVTASS

SEQ ID NO: 18722 - protein, 7 aa, synthetic construct
GMKVPGV

SEQ ID NO: 18723 - protein, 7 aa, synthetic construct
LGSKYGD

SEQ ID NO: 18724 - protein, 7 aa, synthetic construct
YSSMGIG

SEQ ID NO: 18725 - protein, 7 aa, synthetic construct
HGKSAVF

SEQ ID NO: 18726 - protein, 7 aa, synthetic construct
RNSQSSE

SEQ ID NO: 18727 - protein, 7 aa, synthetic construct
TFAGSIS

SEQ ID NO: 18728 - protein, 7 aa, synthetic construct
GAWGTTD

SEQ ID NO: 18729 - protein, 7 aa, synthetic construct
RGGMDMR

SEQ ID NO: 18730 - protein, 7 aa, synthetic construct
VPKMSSQ

SEQ ID NO: 18731 - protein, 7 aa, synthetic construct
DKPNSNR

SEQ ID NO: 18732 - protein, 7 aa, synthetic construct
GQFNHLG

SEQ ID NO: 18733 - protein, 7 aa, synthetic construct
APPKHDS

SEQ ID NO: 18734 - protein, 7 aa, synthetic construct
FDYNRTP

SEQ ID NO: 18735 - protein, 7 aa, synthetic construct
FVKKDTV

SEQ ID NO: 18736 - protein, 7 aa, synthetic construct
RLNSGGG

SEQ ID NO: 18737 - protein, 7 aa, synthetic construct
QRPIITA

SEQ ID NO: 18738 - protein, 7 aa, synthetic construct
QYKMNKD

SEQ ID NO: 18739 - protein, 7 aa, synthetic construct
YELRKHA

SEQ ID NO: 18740 - protein, 7 aa, synthetic construct
NTPSTKP

SEQ ID NO: 18741 - protein, 7 aa, synthetic construct
MGIALGG

SEQ ID NO: 18742 - protein, 7 aa, synthetic construct
MMQHSPG

SEQ ID NO: 18743 - protein, 7 aa, synthetic construct
QKGAGEG

SEQ ID NO: 18744 - protein, 7 aa, synthetic construct
AGGKTMD

SEQ ID NO: 18745 - protein, 7 aa, synthetic construct
KAAESVG

SEQ ID NO: 18746 - protein, 7 aa, synthetic construct
SKGQSLH

SEQ ID NO: 18747 - protein, 7 aa, synthetic construct
DRKPGGE

SEQ ID NO: 18748 - protein, 7 aa, synthetic construct
QDNQHRG

SEQ ID NO: 18749 - protein, 7 aa, synthetic construct
KTINTMV

SEQ ID NO: 18750 - protein, 7 aa, synthetic construct
MVNVRMA

SEQ ID NO: 18751 - protein, 7 aa, synthetic construct
NSDNISR

SEQ ID NO: 18752 - protein, 7 aa, synthetic construct
LVNKMSI

SEQ ID NO: 18753 - protein, 7 aa, synthetic construct
NGHQNYI

SEQ ID NO: 18754 - protein, 7 aa, synthetic construct
GRLALGS

SEQ ID NO: 18755 - protein, 7 aa, synthetic construct
LANLNGK

SEQ ID NO: 18756 - protein, 7 aa, synthetic construct
SVNRPGY

SEQ ID NO: 18757 - protein, 7 aa, synthetic construct
FSTGGKD

SEQ ID NO: 18758 - protein, 7 aa, synthetic construct
LKNRTND

SEQ ID NO: 18759 - protein, 7 aa, synthetic construct
AVDRTKI

SEQ ID NO: 18760 - protein, 7 aa, synthetic construct
KPPTVRD

SEQ ID NO: 18761 - protein, 7 aa, synthetic construct
RHEMKPG

SEQ ID NO: 18762 - protein, 7 aa, synthetic construct
LSQLPKA

SEQ ID NO: 18763 - protein, 7 aa, synthetic construct
EQKNQKA

SEQ ID NO: 18764 - protein, 7 aa, synthetic construct
FNEAKGV

SEQ ID NO: 18765 - protein, 7 aa, synthetic construct
GSNTHMG

SEQ ID NO: 18766 - protein, 7 aa, synthetic construct
PTQNAFK

SEQ ID NO: 18767 - protein, 7 aa, synthetic construct
HNQQKMP

SEQ ID NO: 18768 - protein, 7 aa, synthetic construct
KGGEYTS

SEQ ID NO: 18769 - protein, 7 aa, synthetic construct
SNGDATK

SEQ ID NO: 18770 - protein, 7 aa, synthetic construct
DMPSTRW

SEQ ID NO: 18771 - protein, 7 aa, synthetic construct
MDHQRER

SEQ ID NO: 18772 - protein, 7 aa, synthetic construct
TRKEPLQ

SEQ ID NO: 18773 - protein, 7 aa, synthetic construct
VERYIQS

SEQ ID NO: 18774 - protein, 7 aa, synthetic construct
PREFQPS

SEQ ID NO: 18775 - protein, 7 aa, synthetic construct
HREKQNL

SEQ ID NO: 18776 - protein, 7 aa, synthetic construct
TNTFQPS

SEQ ID NO: 18777 - protein, 7 aa, synthetic construct
ANGITKE

SEQ ID NO: 18778 - protein, 7 aa, synthetic construct
KTTGFHA

SEQ ID NO: 18779 - protein, 7 aa, synthetic construct
KDGLRRD

SEQ ID NO: 18780 - protein, 7 aa, synthetic construct
RSQHNGP

SEQ ID NO: 18781 - protein, 7 aa, synthetic construct
PYKTGGL

SEQ ID NO: 18782 - protein, 7 aa, synthetic construct
QYKEHKL

SEQ ID NO: 18783 - protein, 7 aa, synthetic construct
SHPAQAA

SEQ ID NO: 18784 - protein, 7 aa, synthetic construct
VRGPDGY

SEQ ID NO: 18785 - protein, 7 aa, synthetic construct
YFKEMPT

SEQ ID NO: 18786 - protein, 7 aa, synthetic construct
NDKRGEY

SEQ ID NO: 18787 - protein, 7 aa, synthetic construct
IRKPGSE

SEQ ID NO: 18788 - protein, 7 aa, synthetic construct
QRQPLKE

SEQ ID NO: 18789 - protein, 7 aa, synthetic construct
WGQHTQP

SEQ ID NO: 18790 - protein, 7 aa, synthetic construct
QRPKNEP

SEQ ID NO: 18791 - protein, 7 aa, synthetic construct
TSKDAKN

SEQ ID NO: 18792 - protein, 7 aa, synthetic construct
IDQWKNT

SEQ ID NO: 18793 - protein, 7 aa, synthetic construct
VLASTNP

SEQ ID NO: 18794 - protein, 7 aa, synthetic construct
MVRGHEL

SEQ ID NO: 18795 - protein, 7 aa, synthetic construct
FVNPGRG

SEQ ID NO: 18796 - protein, 7 aa, synthetic construct
VQMQQKI

SEQ ID NO: 18797 - protein, 7 aa, synthetic construct
DKPNTWS

SEQ ID NO: 18798 - protein, 7 aa, synthetic construct
ANKLTPH

SEQ ID NO: 18799 - protein, 7 aa, synthetic construct
TQRPREW

SEQ ID NO: 18800 - protein, 7 aa, synthetic construct
HLQMPHS

SEQ ID NO: 18801 - protein, 7 aa, synthetic construct
SRISVQE

SEQ ID NO: 18802 - protein, 7 aa, synthetic construct
QQRTNNN

SEQ ID NO: 18803 - protein, 7 aa, synthetic construct
GFKTNHE

SEQ ID NO: 18804 - protein, 7 aa, synthetic construct
RPSPQHG

SEQ ID NO: 18805 - protein, 7 aa, synthetic construct
KFNEYNK

SEQ ID NO: 18806 - protein, 7 aa, synthetic construct
KSTVTHL

SEQ ID NO: 18807 - protein, 7 aa, synthetic construct
TRPHAQV

SEQ ID NO: 18808 - protein, 7 aa, synthetic construct
NHSNKPA

SEQ ID NO: 18809 - protein, 7 aa, synthetic construct
DKRYNNG

SEQ ID NO: 18810 - protein, 7 aa, synthetic construct
NTNVHDA

SEQ ID NO: 18811 - protein, 7 aa, synthetic construct
NHLQKFP

SEQ ID NO: 18812 - protein, 7 aa, synthetic construct
AFNKTTT

SEQ ID NO: 18813 - protein, 7 aa, synthetic construct
KPHMQDG

SEQ ID NO: 18814 - protein, 7 aa, synthetic construct
IEPWDGL

SEQ ID NO: 18815 - protein, 7 aa, synthetic construct
VGKEMSA

SEQ ID NO: 18816 - protein, 7 aa, synthetic construct
WNPKATP

SEQ ID NO: 18817 - protein, 7 aa, synthetic construct
AQKKFDY

SEQ ID NO: 18818 - protein, 7 aa, synthetic construct
MRADTPY

SEQ ID NO: 18819 - protein, 7 aa, synthetic construct
HGHKGTP

SEQ ID NO: 18820 - protein, 7 aa, synthetic construct
MMQRTVP

SEQ ID NO: 18821 - protein, 7 aa, synthetic construct
HNRDMTG

SEQ ID NO: 18822 - protein, 7 aa, synthetic construct
GTVQGRA

SEQ ID NO: 18823 - protein, 7 aa, synthetic construct
HDRIVPP

SEQ ID NO: 18824 - protein, 7 aa, synthetic construct
IGLGRNS

SEQ ID NO: 18825 - protein, 7 aa, synthetic construct
GSQTTKV

SEQ ID NO: 18826 - protein, 7 aa, synthetic construct
ARRTDET

SEQ ID NO: 18827 - protein, 7 aa, synthetic construct
TKGQVQN

SEQ ID NO: 18828 - protein, 7 aa, synthetic construct
QGQWINQ

SEQ ID NO: 18829 - protein, 7 aa, synthetic construct
SVIHVHA

SEQ ID NO: 18830 - protein, 7 aa, synthetic construct
VDNNHYA

SEQ ID NO: 18831 - protein, 7 aa, synthetic construct
AQFRQSE

SEQ ID NO: 18832 - protein, 7 aa, synthetic construct
RNGVQPG

SEQ ID NO: 18833 - protein, 7 aa, synthetic construct
GKLHWGE

SEQ ID NO: 18834 - protein, 7 aa, synthetic construct
NKLQNES

SEQ ID NO: 18835 - protein, 7 aa, synthetic construct
ISKTITP

SEQ ID NO: 18836 - protein, 7 aa, synthetic construct
LTTHMAS

SEQ ID NO: 18837 - protein, 7 aa, synthetic construct
LNRQGGA

SEQ ID NO: 18838 - protein, 7 aa, synthetic construct
SVHQKSD

SEQ ID NO: 18839 - protein, 7 aa, synthetic construct
RSNFEQS

SEQ ID NO: 18840 - protein, 7 aa, synthetic construct
WRHPELG

SEQ ID NO: 18841 - protein, 7 aa, synthetic construct
VHMAFQG

SEQ ID NO: 18842 - protein, 7 aa, synthetic construct
WSISAKP

SEQ ID NO: 18843 - protein, 7 aa, synthetic construct
QFSARHI

SEQ ID NO: 18844 - protein, 7 aa, synthetic construct
RFNNNDM

SEQ ID NO: 18845 - protein, 7 aa, synthetic construct
SMRRDEG

SEQ ID NO: 18846 - protein, 7 aa, synthetic construct
MLNRPKD

SEQ ID NO: 18847 - protein, 7 aa, synthetic construct
QKAMPPH

SEQ ID NO: 18848 - protein, 7 aa, synthetic construct
AKKENLW

SEQ ID NO: 18849 - protein, 7 aa, synthetic construct
VRGFEAE

SEQ ID NO: 18850 - protein, 7 aa, synthetic construct
SRETMHL

SEQ ID NO: 18851 - protein, 7 aa, synthetic construct
NHPAIRE

SEQ ID NO: 18852 - protein, 7 aa, synthetic construct
MTAVMTG

SEQ ID NO: 18853 - protein, 7 aa, synthetic construct
TQYAAGG

SEQ ID NO: 18854 - protein, 7 aa, synthetic construct
GARVVPG

SEQ ID NO: 18855 - protein, 7 aa, synthetic construct
LRDSKQI

SEQ ID NO: 18856 - protein, 7 aa, synthetic construct
TMGKMHV

SEQ ID NO: 18857 - protein, 7 aa, synthetic construct
YSKQNSQ

SEQ ID NO: 18858 - protein, 7 aa, synthetic construct
GLHMKIE

SEQ ID NO: 18859 - protein, 7 aa, synthetic construct
DRRTPTE

SEQ ID NO: 18860 - protein, 7 aa, synthetic construct
GKADTRN

SEQ ID NO: 18861 - protein, 7 aa, synthetic construct
KGMSHGP

SEQ ID NO: 18862 - protein, 7 aa, synthetic construct
HSDKAQG

SEQ ID NO: 18863 - protein, 7 aa, synthetic construct
MNQNTRQ

SEQ ID NO: 18864 - protein, 7 aa, synthetic construct
NAKFDLG

SEQ ID NO: 18865 - protein, 7 aa, synthetic construct
QETRAVN

SEQ ID NO: 18866 - protein, 7 aa, synthetic construct
DRHASAS

SEQ ID NO: 18867 - protein, 7 aa, synthetic construct
MKYTPNH

SEQ ID NO: 18868 - protein, 7 aa, synthetic construct
AGRFADG

SEQ ID NO: 18869 - protein, 7 aa, synthetic construct
IRNSLGP

SEQ ID NO: 18870 - protein, 7 aa, synthetic construct
YGKGEHL

SEQ ID NO: 18871 - protein, 7 aa, synthetic construct
RQGYPME

SEQ ID NO: 18872 - protein, 7 aa, synthetic construct
SNNFSDK

SEQ ID NO: 18873 - protein, 7 aa, synthetic construct
LGPPSKN

SEQ ID NO: 18874 - protein, 7 aa, synthetic construct
GTHKDNP

SEQ ID NO: 18875 - protein, 7 aa, synthetic construct
VSANTKD

SEQ ID NO: 18876 - protein, 7 aa, synthetic construct
LRNREQE

SEQ ID NO: 18877 - protein, 7 aa, synthetic construct
WDSRHAY

SEQ ID NO: 18878 - protein, 7 aa, synthetic construct
LGHGVHL

SEQ ID NO: 18879 - protein, 7 aa, synthetic construct
STRPRDD

SEQ ID NO: 18880 - protein, 7 aa, synthetic construct
TRTSMHQ

SEQ ID NO: 18881 - protein, 7 aa, synthetic construct
PTRHRED

SEQ ID NO: 18882 - protein, 7 aa, synthetic construct
MMKITPM

SEQ ID NO: 18883 - protein, 7 aa, synthetic construct
FAAQVPP

SEQ ID NO: 18884 - protein, 7 aa, synthetic construct
HMMNASM

SEQ ID NO: 18885 - protein, 7 aa, synthetic construct
YIQGGLK

SEQ ID NO: 18886 - protein, 7 aa, synthetic construct
NKMVETQ

SEQ ID NO: 18887 - protein, 7 aa, synthetic construct
VLPRQAA

SEQ ID NO: 18888 - protein, 7 aa, synthetic construct
AGIKGNM

SEQ ID NO: 18889 - protein, 7 aa, synthetic construct
HEGFKYD

SEQ ID NO: 18890 - protein, 7 aa, synthetic construct
RIPSEHV

SEQ ID NO: 18891 - protein, 7 aa, synthetic construct
VHNKWEA

SEQ ID NO: 18892 - protein, 7 aa, synthetic construct
EYKIHKI

SEQ ID NO: 18893 - protein, 7 aa, synthetic construct
DKFQPRE

SEQ ID NO: 18894 - protein, 7 aa, synthetic construct
VTNSKFY

SEQ ID NO: 18895 - protein, 7 aa, synthetic construct
ARSVTDK

SEQ ID NO: 18896 - protein, 7 aa, synthetic construct
PPGRGAN

SEQ ID NO: 18897 - protein, 7 aa, synthetic construct
DSGKSGE

SEQ ID NO: 18898 - protein, 7 aa, synthetic construct
TGNNGRT

SEQ ID NO: 18899 - protein, 7 aa, synthetic construct
FKQVNAS

SEQ ID NO: 18900 - protein, 7 aa, synthetic construct
SDSMKVK

SEQ ID NO: 18901 - protein, 7 aa, synthetic construct
QTIGPSD

SEQ ID NO: 18902 - protein, 7 aa, synthetic construct
NRNTIAN

SEQ ID NO: 18903 - protein, 7 aa, synthetic construct
IQTSFGT

SEQ ID NO: 18904 - protein, 7 aa, synthetic construct
ASMSPSV

SEQ ID NO: 18905 - protein, 7 aa, synthetic construct
LPTMSKM

SEQ ID NO: 18906 - protein, 7 aa, synthetic construct
ASTSSSG

SEQ ID NO: 18907 - protein, 7 aa, synthetic construct
NAGDKTG

SEQ ID NO: 18908 - protein, 7 aa, synthetic construct
HPGTHKQ

SEQ ID NO: 18909 - protein, 7 aa, synthetic construct
IASHHAA

SEQ ID NO: 18910 - protein, 7 aa, synthetic construct
ARSPLNE

SEQ ID NO: 18911 - protein, 7 aa, synthetic construct
TPTRASP

SEQ ID NO: 18912 - protein, 7 aa, synthetic construct
HAQGPPM

SEQ ID NO: 18913 - protein, 7 aa, synthetic construct
DRDDTTR

SEQ ID NO: 18914 - protein, 7 aa, synthetic construct
ERRESSV

SEQ ID NO: 18915 - protein, 7 aa, synthetic construct
GSMKGNH

SEQ ID NO: 18916 - protein, 7 aa, synthetic construct
TLDAYGA

SEQ ID NO: 18917 - protein, 7 aa, synthetic construct
NNRMHPP

SEQ ID NO: 18918 - protein, 7 aa, synthetic construct
QMNKPTY

SEQ ID NO: 18919 - protein, 7 aa, synthetic construct
NFRSNAA

SEQ ID NO: 18920 - protein, 7 aa, synthetic construct
TTHERAG

SEQ ID NO: 18921 - protein, 7 aa, synthetic construct
RNMEYKN

SEQ ID NO: 18922 - protein, 7 aa, synthetic construct
SIRQRED

SEQ ID NO: 18923 - protein, 7 aa, synthetic construct
NEFNRTH

SEQ ID NO: 18924 - protein, 7 aa, synthetic construct
DGNHGMG

SEQ ID NO: 18925 - protein, 7 aa, synthetic construct
YRPPEGH

SEQ ID NO: 18926 - protein, 7 aa, synthetic construct
GNQMKPS

SEQ ID NO: 18927 - protein, 7 aa, synthetic construct
GVGVMIP

SEQ ID NO: 18928 - protein, 7 aa, synthetic construct
KNNSAIS

SEQ ID NO: 18929 - protein, 7 aa, synthetic construct
FAPSRES

SEQ ID NO: 18930 - protein, 7 aa, synthetic construct
TVSDRKQ

SEQ ID NO: 18931 - protein, 7 aa, synthetic construct
HKMGQAT

SEQ ID NO: 18932 - protein, 7 aa, synthetic construct
TTATAKE

SEQ ID NO: 18933 - protein, 7 aa, synthetic construct
MQEGWQA

SEQ ID NO: 18934 - protein, 7 aa, synthetic construct
TGSNRSE

SEQ ID NO: 18935 - protein, 7 aa, synthetic construct
ISQGPGM

SEQ ID NO: 18936 - protein, 7 aa, synthetic construct
MASRAPD

SEQ ID NO: 18937 - protein, 7 aa, synthetic construct
FGMNTSV

SEQ ID NO: 18938 - protein, 7 aa, synthetic construct
DYNPKKV

SEQ ID NO: 18939 - protein, 7 aa, synthetic construct
NNSRRDA

SEQ ID NO: 18940 - protein, 7 aa, synthetic construct
NSFKEGN

SEQ ID NO: 18941 - protein, 7 aa, synthetic construct
MKAAMRD

SEQ ID NO: 18942 - protein, 7 aa, synthetic construct
YIRSERI

SEQ ID NO: 18943 - protein, 7 aa, synthetic construct
RMDRATE

SEQ ID NO: 18944 - protein, 7 aa, synthetic construct
DRKQQNT

SEQ ID NO: 18945 - protein, 7 aa, synthetic construct
QRQQPLM

SEQ ID NO: 18946 - protein, 7 aa, synthetic construct
PFKSNMD

SEQ ID NO: 18947 - protein, 7 aa, synthetic construct
AMYPKNA

SEQ ID NO: 18948 - protein, 7 aa, synthetic construct
HSATYIA

SEQ ID NO: 18949 - protein, 7 aa, synthetic construct
FNSMPRE

SEQ ID NO: 18950 - protein, 7 aa, synthetic construct
WPPMKSD

SEQ ID NO: 18951 - protein, 7 aa, synthetic construct
AAGFAIG

SEQ ID NO: 18952 - protein, 7 aa, synthetic construct
GVFQTKG

SEQ ID NO: 18953 - protein, 7 aa, synthetic construct
FNALNKE

SEQ ID NO: 18954 - protein, 7 aa, synthetic construct
KGYTKEA

SEQ ID NO: 18955 - protein, 7 aa, synthetic construct
INREAVG

SEQ ID NO: 18956 - protein, 7 aa, synthetic construct
AMTIKDH

SEQ ID NO: 18957 - protein, 7 aa, synthetic construct
PSNKTGV

SEQ ID NO: 18958 - protein, 7 aa, synthetic construct
NQHTPMG

SEQ ID NO: 18959 - protein, 7 aa, synthetic construct
QRAHGMV

SEQ ID NO: 18960 - protein, 7 aa, synthetic construct
LTSVNNP

SEQ ID NO: 18961 - protein, 7 aa, synthetic construct
AAYKPTF

SEQ ID NO: 18962 - protein, 7 aa, synthetic construct
RQEHPMD

SEQ ID NO: 18963 - protein, 7 aa, synthetic construct
RTAKEIA

SEQ ID NO: 18964 - protein, 7 aa, synthetic construct
NIPQMAP

SEQ ID NO: 18965 - protein, 7 aa, synthetic construct
HTYVHST

SEQ ID NO: 18966 - protein, 7 aa, synthetic construct
NKALASV

SEQ ID NO: 18967 - protein, 7 aa, synthetic construct
VGHHINE

SEQ ID NO: 18968 - protein, 7 aa, synthetic construct
KYNMADL

SEQ ID NO: 18969 - protein, 7 aa, synthetic construct
ATTKQNY

SEQ ID NO: 18970 - protein, 7 aa, synthetic construct
PETYGRP

SEQ ID NO: 18971 - protein, 7 aa, synthetic construct
NKSDGRP

SEQ ID NO: 18972 - protein, 7 aa, synthetic construct
NLRTEEY

SEQ ID NO: 18973 - protein, 7 aa, synthetic construct
GIRTSPN

SEQ ID NO: 18974 - protein, 7 aa, synthetic construct
TATKPMF

SEQ ID NO: 18975 - protein, 7 aa, synthetic construct
FNPIKQG

SEQ ID NO: 18976 - protein, 7 aa, synthetic construct
SNFNLQG

SEQ ID NO: 18977 - protein, 7 aa, synthetic construct
AMSKIDY

SEQ ID NO: 18978 - protein, 7 aa, synthetic construct
QKQRGDA

SEQ ID NO: 18979 - protein, 7 aa, synthetic construct
QVHREVT

SEQ ID NO: 18980 - protein, 7 aa, synthetic construct
SGYQEAS

SEQ ID NO: 18981 - protein, 7 aa, synthetic construct
GRKIETS

SEQ ID NO: 18982 - protein, 7 aa, synthetic construct
IKYGEQV

SEQ ID NO: 18983 - protein, 7 aa, synthetic construct
RNPHHMQ

SEQ ID NO: 18984 - protein, 7 aa, synthetic construct
AQQPMDR

SEQ ID NO: 18985 - protein, 7 aa, synthetic construct
GSPANKN

SEQ ID NO: 18986 - protein, 7 aa, synthetic construct
FSKPGAT

SEQ ID NO: 18987 - protein, 7 aa, synthetic construct
GVRPENH

SEQ ID NO: 18988 - protein, 7 aa, synthetic construct
TLNREFK

SEQ ID NO: 18989 - protein, 7 aa, synthetic construct
VHQLKVP

SEQ ID NO: 18990 - protein, 7 aa, synthetic construct
TNQNLHS

SEQ ID NO: 18991 - protein, 7 aa, synthetic construct
NKIKHAE

SEQ ID NO: 18992 - protein, 7 aa, synthetic construct
DVGKVMS

SEQ ID NO: 18993 - protein, 7 aa, synthetic construct
GKKLEWD

SEQ ID NO: 18994 - protein, 7 aa, synthetic construct
WQRVKQE

SEQ ID NO: 18995 - protein, 7 aa, synthetic construct
RTTVGAL

SEQ ID NO: 18996 - protein, 7 aa, synthetic construct
NTIHITP

SEQ ID NO: 18997 - protein, 7 aa, synthetic construct
NNKADVA

SEQ ID NO: 18998 - protein, 7 aa, synthetic construct
QAYSKNE

SEQ ID NO: 18999 - protein, 7 aa, synthetic construct
HRNQVND

SEQ ID NO: 19000 - protein, 7 aa, synthetic construct
SNRTSGS

SEQ ID NO: 19001 - protein, 7 aa, synthetic construct
TRLKLEH

SEQ ID NO: 19002 - protein, 7 aa, synthetic construct
MGTREHG

SEQ ID NO: 19003 - protein, 7 aa, synthetic construct
SGHKSIN

SEQ ID NO: 19004 - protein, 7 aa, synthetic construct
RINGQNS

SEQ ID NO: 19005 - protein, 7 aa, synthetic construct
AMKHNEL

SEQ ID NO: 19006 - protein, 7 aa, synthetic construct
PKVGSHS

SEQ ID NO: 19007 - protein, 7 aa, synthetic construct
NVRSDDH

SEQ ID NO: 19008 - protein, 7 aa, synthetic construct
AHHKSAI

SEQ ID NO: 19009 - protein, 7 aa, synthetic construct
PGTMGMG

SEQ ID NO: 19010 - protein, 7 aa, synthetic construct
NGPYRDR

SEQ ID NO: 19011 - protein, 7 aa, synthetic construct
TGSSTRQ

SEQ ID NO: 19012 - protein, 7 aa, synthetic construct
ASARGSV

SEQ ID NO: 19013 - protein, 7 aa, synthetic construct
LEGFTVR

SEQ ID NO: 19014 - protein, 7 aa, synthetic construct
LEGRQGL

SEQ ID NO: 19015 - protein, 7 aa, synthetic construct
VATKMVA

SEQ ID NO: 19016 - protein, 7 aa, synthetic construct
KSPMITV

SEQ ID NO: 19017 - protein, 7 aa, synthetic construct
MLGTAMP

SEQ ID NO: 19018 - protein, 7 aa, synthetic construct
ETPKTER

SEQ ID NO: 19019 - protein, 7 aa, synthetic construct
VNSVMGV

SEQ ID NO: 19020 - protein, 7 aa, synthetic construct
LKDPTNG

SEQ ID NO: 19021 - protein, 7 aa, synthetic construct
GSIKATY

SEQ ID NO: 19022 - protein, 7 aa, synthetic construct
TRENQAT

SEQ ID NO: 19023 - protein, 7 aa, synthetic construct
YHPTIIG

SEQ ID NO: 19024 - protein, 7 aa, synthetic construct
KANMHFE

SEQ ID NO: 19025 - protein, 7 aa, synthetic construct
SKNTDSR

SEQ ID NO: 19026 - protein, 7 aa, synthetic construct
AKASEKV

SEQ ID NO: 19027 - protein, 7 aa, synthetic construct
QRASHQH

SEQ ID NO: 19028 - protein, 7 aa, synthetic construct
KDPRVHD

SEQ ID NO: 19029 - protein, 7 aa, synthetic construct
KYKEFSE

SEQ ID NO: 19030 - protein, 7 aa, synthetic construct
KMPSQIA

SEQ ID NO: 19031 - protein, 7 aa, synthetic construct
TVMHNAP

SEQ ID NO: 19032 - protein, 7 aa, synthetic construct
NKSTPTS

SEQ ID NO: 19033 - protein, 7 aa, synthetic construct
VTHKGEM

SEQ ID NO: 19034 - protein, 7 aa, synthetic construct
NNVYRES

SEQ ID NO: 19035 - protein, 7 aa, synthetic construct
TQYYAKA

SEQ ID NO: 19036 - protein, 7 aa, synthetic construct
RPEQLKQ

SEQ ID NO: 19037 - protein, 7 aa, synthetic construct
RGQVTWE

SEQ ID NO: 19038 - protein, 7 aa, synthetic construct
STQSRNQ

SEQ ID NO: 19039 - protein, 7 aa, synthetic construct
VSTVKIA

SEQ ID NO: 19040 - protein, 7 aa, synthetic construct
DKDFTAK

SEQ ID NO: 19041 - protein, 7 aa, synthetic construct
TPMKRDH

SEQ ID NO: 19042 - protein, 7 aa, synthetic construct
PVGIHNS

SEQ ID NO: 19043 - protein, 7 aa, synthetic construct
WTPGAPT

SEQ ID NO: 19044 - protein, 7 aa, synthetic construct
QHNPRYE

SEQ ID NO: 19045 - protein, 7 aa, synthetic construct
PTRDRLA

SEQ ID NO: 19046 - protein, 7 aa, synthetic construct
SDKDGYR

SEQ ID NO: 19047 - protein, 7 aa, synthetic construct
DKVREQQ

SEQ ID NO: 19048 - protein, 7 aa, synthetic construct
WPGHEPP

SEQ ID NO: 19049 - protein, 7 aa, synthetic construct
SIKTGRE

SEQ ID NO: 19050 - protein, 7 aa, synthetic construct
HKPPSGY

SEQ ID NO: 19051 - protein, 7 aa, synthetic construct
LFDKEAF

SEQ ID NO: 19052 - protein, 7 aa, synthetic construct
SSNMYKS

SEQ ID NO: 19053 - protein, 7 aa, synthetic construct
SYHRQQD

SEQ ID NO: 19054 - protein, 7 aa, synthetic construct
NKSHIGT

SEQ ID NO: 19055 - protein, 7 aa, synthetic construct
QDTPHNR

SEQ ID NO: 19056 - protein, 7 aa, synthetic construct
PDKKLVF

SEQ ID NO: 19057 - protein, 7 aa, synthetic construct
HTFKEQS

SEQ ID NO: 19058 - protein, 7 aa, synthetic construct
KTDKIMG

SEQ ID NO: 19059 - protein, 7 aa, synthetic construct
AKKENFG

SEQ ID NO: 19060 - protein, 7 aa, synthetic construct
GIVAGSG

SEQ ID NO: 19061 - protein, 7 aa, synthetic construct
MKRENYI

SEQ ID NO: 19062 - protein, 7 aa, synthetic construct
GKPVGVD

SEQ ID NO: 19063 - protein, 7 aa, synthetic construct
QKSGLID

SEQ ID NO: 19064 - protein, 7 aa, synthetic construct
AKSGGVH

SEQ ID NO: 19065 - protein, 7 aa, synthetic construct
EAAKPKM

SEQ ID NO: 19066 - protein, 7 aa, synthetic construct
YSRDHDG

SEQ ID NO: 19067 - protein, 7 aa, synthetic construct
AARQQQE

SEQ ID NO: 19068 - protein, 7 aa, synthetic construct
LATFVTE

SEQ ID NO: 19069 - protein, 7 aa, synthetic construct
RNTGADF

SEQ ID NO: 19070 - protein, 7 aa, synthetic construct
NPKFGEA

SEQ ID NO: 19071 - protein, 7 aa, synthetic construct
YSAYIAP

SEQ ID NO: 19072 - protein, 7 aa, synthetic construct
HNATTIV

SEQ ID NO: 19073 - protein, 7 aa, synthetic construct
NNSHVTA

SEQ ID NO: 19074 - protein, 7 aa, synthetic construct
WKGGESV

SEQ ID NO: 19075 - protein, 7 aa, synthetic construct
PPDGIRG

SEQ ID NO: 19076 - protein, 7 aa, synthetic construct
PKPDRQA

SEQ ID NO: 19077 - protein, 7 aa, synthetic construct
QNNSKHD

SEQ ID NO: 19078 - protein, 7 aa, synthetic construct
KQAHGMP

SEQ ID NO: 19079 - protein, 7 aa, synthetic construct
VMPGRAT

SEQ ID NO: 19080 - protein, 7 aa, synthetic construct
IATQGQA

SEQ ID NO: 19081 - protein, 7 aa, synthetic construct
NHEREFQ

SEQ ID NO: 19082 - protein, 7 aa, synthetic construct
FNKPQHN

SEQ ID NO: 19083 - protein, 7 aa, synthetic construct
LGIGEYS

SEQ ID NO: 19084 - protein, 7 aa, synthetic construct
DPNGRSV

SEQ ID NO: 19085 - protein, 7 aa, synthetic construct
LRPGNVH

SEQ ID NO: 19086 - protein, 7 aa, synthetic construct
GNTGRMM

SEQ ID NO: 19087 - protein, 7 aa, synthetic construct
FAMNKDA

SEQ ID NO: 19088 - protein, 7 aa, synthetic construct
QVNAQYS

SEQ ID NO: 19089 - protein, 7 aa, synthetic construct
IPKKVLE

SEQ ID NO: 19090 - protein, 7 aa, synthetic construct
QDRMGIR

SEQ ID NO: 19091 - protein, 7 aa, synthetic construct
FSTKGYD

SEQ ID NO: 19092 - protein, 7 aa, synthetic construct
APRVEMN

SEQ ID NO: 19093 - protein, 7 aa, synthetic construct
KTVTHNI

SEQ ID NO: 19094 - protein, 7 aa, synthetic construct
QAHHAVP

SEQ ID NO: 19095 - protein, 7 aa, synthetic construct
RSSNIEA

SEQ ID NO: 19096 - protein, 7 aa, synthetic construct
GTKEKFT

SEQ ID NO: 19097 - protein, 7 aa, synthetic construct
IGHSNHQ

SEQ ID NO: 19098 - protein, 7 aa, synthetic construct
RSQQENA

SEQ ID NO: 19099 - protein, 7 aa, synthetic construct
QPGNNGA

SEQ ID NO: 19100 - protein, 7 aa, synthetic construct
FHVGTAT

SEQ ID NO: 19101 - protein, 7 aa, synthetic construct
FQERGLM

SEQ ID NO: 19102 - protein, 7 aa, synthetic construct
GKDTQHP

SEQ ID NO: 19103 - protein, 7 aa, synthetic construct
IAPKWGE

SEQ ID NO: 19104 - protein, 7 aa, synthetic construct
TNPDRGY

SEQ ID NO: 19105 - protein, 7 aa, synthetic construct
ARSHPTP

SEQ ID NO: 19106 - protein, 7 aa, synthetic construct
RMLQPGS

SEQ ID NO: 19107 - protein, 7 aa, synthetic construct
HTAYARE

SEQ ID NO: 19108 - protein, 7 aa, synthetic construct
WKDYIGQ

SEQ ID NO: 19109 - protein, 7 aa, synthetic construct
AVKDQPG

SEQ ID NO: 19110 - protein, 7 aa, synthetic construct
IAAHMPS

SEQ ID NO: 19111 - protein, 7 aa, synthetic construct
HPRIPEY

SEQ ID NO: 19112 - protein, 7 aa, synthetic construct
HGRDVTS

SEQ ID NO: 19113 - protein, 7 aa, synthetic construct
TKERNIQ

SEQ ID NO: 19114 - protein, 7 aa, synthetic construct
GLYREDH

SEQ ID NO: 19115 - protein, 7 aa, synthetic construct
IHNMGIQ

SEQ ID NO: 19116 - protein, 7 aa, synthetic construct
QNHRTVP

SEQ ID NO: 19117 - protein, 7 aa, synthetic construct
HLDKVRP

SEQ ID NO: 19118 - protein, 7 aa, synthetic construct
NKGDAPY

SEQ ID NO: 19119 - protein, 7 aa, synthetic construct
HSYHNVD

SEQ ID NO: 19120 - protein, 7 aa, synthetic construct
EHQSPHD

SEQ ID NO: 19121 - protein, 7 aa, synthetic construct
LRDGYQQ

SEQ ID NO: 19122 - protein, 7 aa, synthetic construct
TKGVGAT

SEQ ID NO: 19123 - protein, 7 aa, synthetic construct
SFNNTVP

SEQ ID NO: 19124 - protein, 7 aa, synthetic construct
LHDKHTG

SEQ ID NO: 19125 - protein, 7 aa, synthetic construct
PTKPSAA

SEQ ID NO: 19126 - protein, 7 aa, synthetic construct
SRGVAVP

SEQ ID NO: 19127 - protein, 7 aa, synthetic construct
DPNKIDI

SEQ ID NO: 19128 - protein, 7 aa, synthetic construct
DQKGVKI

SEQ ID NO: 19129 - protein, 7 aa, synthetic construct
QWHKQEE

SEQ ID NO: 19130 - protein, 7 aa, synthetic construct
LGHQPQT

SEQ ID NO: 19131 - protein, 7 aa, synthetic construct
FQRPMEP

SEQ ID NO: 19132 - protein, 7 aa, synthetic construct
ETRMMEK

SEQ ID NO: 19133 - protein, 7 aa, synthetic construct
AVEMKLG

SEQ ID NO: 19134 - protein, 7 aa, synthetic construct
YPKGSEP

SEQ ID NO: 19135 - protein, 7 aa, synthetic construct
KYGTMPS

SEQ ID NO: 19136 - protein, 7 aa, synthetic construct
RPGTTLH

SEQ ID NO: 19137 - protein, 7 aa, synthetic construct
MNNNQVS

SEQ ID NO: 19138 - protein, 7 aa, synthetic construct
GKFSPSS

SEQ ID NO: 19139 - protein, 7 aa, synthetic construct
SVATRVV

SEQ ID NO: 19140 - protein, 7 aa, synthetic construct
MQHQSEV

SEQ ID NO: 19141 - protein, 7 aa, synthetic construct
KGAWTEM

SEQ ID NO: 19142 - protein, 7 aa, synthetic construct
QPSGGSG

SEQ ID NO: 19143 - protein, 7 aa, synthetic construct
FIGGGKV

SEQ ID NO: 19144 - protein, 7 aa, synthetic construct
AMTKAGF

SEQ ID NO: 19145 - protein, 7 aa, synthetic construct
YPPPRYE

SEQ ID NO: 19146 - protein, 7 aa, synthetic construct
WTGATPH

SEQ ID NO: 19147 - protein, 7 aa, synthetic construct
HNRETGI

SEQ ID NO: 19148 - protein, 7 aa, synthetic construct
QASHTKS

SEQ ID NO: 19149 - protein, 7 aa, synthetic construct
FSYAHGG

SEQ ID NO: 19150 - protein, 7 aa, synthetic construct
PSQNMKS

SEQ ID NO: 19151 - protein, 7 aa, synthetic construct
RGQGYAL

SEQ ID NO: 19152 - protein, 7 aa, synthetic construct
VPKTTMQ

SEQ ID NO: 19153 - protein, 7 aa, synthetic construct
SYPRNVD

SEQ ID NO: 19154 - protein, 7 aa, synthetic construct
MQSGTIM

SEQ ID NO: 19155 - protein, 7 aa, synthetic construct
EQANLRA

SEQ ID NO: 19156 - protein, 7 aa, synthetic construct
GRHPDAS

SEQ ID NO: 19157 - protein, 7 aa, synthetic construct
GYYSKPG

SEQ ID NO: 19158 - protein, 7 aa, synthetic construct
QMKEPHN

SEQ ID NO: 19159 - protein, 7 aa, synthetic construct
SKHMSAV

SEQ ID NO: 19160 - protein, 7 aa, synthetic construct
QVKEVAR

SEQ ID NO: 19161 - protein, 7 aa, synthetic construct
SKSNHTT

SEQ ID NO: 19162 - protein, 7 aa, synthetic construct
QSPRVPS

SEQ ID NO: 19163 - protein, 7 aa, synthetic construct
MPPVVTS

SEQ ID NO: 19164 - protein, 7 aa, synthetic construct
NDQIKFP

SEQ ID NO: 19165 - protein, 7 aa, synthetic construct
FVAFKTE

SEQ ID NO: 19166 - protein, 7 aa, synthetic construct
NNINQGG

SEQ ID NO: 19167 - protein, 7 aa, synthetic construct
NGKSFHV

SEQ ID NO: 19168 - protein, 7 aa, synthetic construct
YNMRMKD

SEQ ID NO: 19169 - protein, 7 aa, synthetic construct
HNRLQAD

SEQ ID NO: 19170 - protein, 7 aa, synthetic construct
KPTNWEH

SEQ ID NO: 19171 - protein, 7 aa, synthetic construct
PLRNNDT

SEQ ID NO: 19172 - protein, 7 aa, synthetic construct
KPQKTYD

SEQ ID NO: 19173 - protein, 7 aa, synthetic construct
MGKLFEK

SEQ ID NO: 19174 - protein, 7 aa, synthetic construct
HRAPPYD

SEQ ID NO: 19175 - protein, 7 aa, synthetic construct
ATPRNDH

SEQ ID NO: 19176 - protein, 7 aa, synthetic construct
AHGIHGA

SEQ ID NO: 19177 - protein, 7 aa, synthetic construct
TAYSSDH

SEQ ID NO: 19178 - protein, 7 aa, synthetic construct
LINQGKN

SEQ ID NO: 19179 - protein, 7 aa, synthetic construct
ALKQVMT

SEQ ID NO: 19180 - protein, 7 aa, synthetic construct
QPNSPYS

SEQ ID NO: 19181 - protein, 7 aa, synthetic construct
YRATHVE

SEQ ID NO: 19182 - protein, 7 aa, synthetic construct
KMGFSDQ

SEQ ID NO: 19183 - protein, 7 aa, synthetic construct
GPAIVAP

SEQ ID NO: 19184 - protein, 7 aa, synthetic construct
NGQFINS

SEQ ID NO: 19185 - protein, 7 aa, synthetic construct
YFSGTIN

SEQ ID NO: 19186 - protein, 7 aa, synthetic construct
FTMNKPG

SEQ ID NO: 19187 - protein, 7 aa, synthetic construct
TVQNANR

SEQ ID NO: 19188 - protein, 7 aa, synthetic construct
NLHNRVN

SEQ ID NO: 19189 - protein, 7 aa, synthetic construct
KNGMQDN

SEQ ID NO: 19190 - protein, 7 aa, synthetic construct
FGVRSPS

SEQ ID NO: 19191 - protein, 7 aa, synthetic construct
YTDSVKG

SEQ ID NO: 19192 - protein, 7 aa, synthetic construct
YISKIHP

SEQ ID NO: 19193 - protein, 7 aa, synthetic construct
NQPKNQI

SEQ ID NO: 19194 - protein, 7 aa, synthetic construct
RLGENPA

SEQ ID NO: 19195 - protein, 7 aa, synthetic construct
KEPTKPP

SEQ ID NO: 19196 - protein, 7 aa, synthetic construct
GSMSEKY

SEQ ID NO: 19197 - protein, 7 aa, synthetic construct
KHYIENV

SEQ ID NO: 19198 - protein, 7 aa, synthetic construct
MAHGPIL

SEQ ID NO: 19199 - protein, 7 aa, synthetic construct
HAMGAPG

SEQ ID NO: 19200 - protein, 7 aa, synthetic construct
KQTTVAS

SEQ ID NO: 19201 - protein, 7 aa, synthetic construct
KQYMHNA

SEQ ID NO: 19202 - protein, 7 aa, synthetic construct
LHREFNA

SEQ ID NO: 19203 - protein, 7 aa, synthetic construct
AKPMEPQ

SEQ ID NO: 19204 - protein, 7 aa, synthetic construct
RADQKHQ

SEQ ID NO: 19205 - protein, 7 aa, synthetic construct
SHDQIHG

SEQ ID NO: 19206 - protein, 7 aa, synthetic construct
YHRERSP

SEQ ID NO: 19207 - protein, 7 aa, synthetic construct
LQYNGGR

SEQ ID NO: 19208 - protein, 7 aa, synthetic construct
QGFGNNT

SEQ ID NO: 19209 - protein, 7 aa, synthetic construct
ANPAVAG

SEQ ID NO: 19210 - protein, 7 aa, synthetic construct
SFSHVNK

SEQ ID NO: 19211 - protein, 7 aa, synthetic construct
STEVNKH

SEQ ID NO: 19212 - protein, 7 aa, synthetic construct
MTPGSYA

SEQ ID NO: 19213 - protein, 7 aa, synthetic construct
RGTYAST

SEQ ID NO: 19214 - protein, 7 aa, synthetic construct
LKDMPKN

SEQ ID NO: 19215 - protein, 7 aa, synthetic construct
KTTEYMS

SEQ ID NO: 19216 - protein, 7 aa, synthetic construct
GLERKHD

SEQ ID NO: 19217 - protein, 7 aa, synthetic construct
KFDPGKP

SEQ ID NO: 19218 - protein, 7 aa, synthetic construct
LMRVKES

SEQ ID NO: 19219 - protein, 7 aa, synthetic construct
PVAPRND

SEQ ID NO: 19220 - protein, 7 aa, synthetic construct
TVERKTV

SEQ ID NO: 19221 - protein, 7 aa, synthetic construct
TWKHDND

SEQ ID NO: 19222 - protein, 7 aa, synthetic construct
SDRGTSN

SEQ ID NO: 19223 - protein, 7 aa, synthetic construct
DAPYQSR

SEQ ID NO: 19224 - protein, 7 aa, synthetic construct
DTPNRIM

SEQ ID NO: 19225 - protein, 7 aa, synthetic construct
PMQREPY

SEQ ID NO: 19226 - protein, 7 aa, synthetic construct
SSDRKVE

SEQ ID NO: 19227 - protein, 7 aa, synthetic construct
HGSTSQT

SEQ ID NO: 19228 - protein, 7 aa, synthetic construct
QNLRAGS

SEQ ID NO: 19229 - protein, 7 aa, synthetic construct
LPPHMGE

SEQ ID NO: 19230 - protein, 7 aa, synthetic construct
ANSGQIG

SEQ ID NO: 19231 - protein, 7 aa, synthetic construct
SMNNSTW

SEQ ID NO: 19232 - protein, 7 aa, synthetic construct
QGERIVN

SEQ ID NO: 19233 - protein, 7 aa, synthetic construct
HIQKDQA

SEQ ID NO: 19234 - protein, 7 aa, synthetic construct
EMGDNTR

SEQ ID NO: 19235 - protein, 7 aa, synthetic construct
MDLANRK

SEQ ID NO: 19236 - protein, 7 aa, synthetic construct
VRNIAPT

SEQ ID NO: 19237 - protein, 7 aa, synthetic construct
DRWEAKN

SEQ ID NO: 19238 - protein, 7 aa, synthetic construct
YQRNAND

SEQ ID NO: 19239 - protein, 7 aa, synthetic construct
GQNLGQT

SEQ ID NO: 19240 - protein, 7 aa, synthetic construct
EYRGSQV

SEQ ID NO: 19241 - protein, 7 aa, synthetic construct
NKYATNG

SEQ ID NO: 19242 - protein, 7 aa, synthetic construct
SKNHPDN

SEQ ID NO: 19243 - protein, 7 aa, synthetic construct
MPQKNTM

SEQ ID NO: 19244 - protein, 7 aa, synthetic construct
PAYKQQL

SEQ ID NO: 19245 - protein, 7 aa, synthetic construct
GIGTTRI

SEQ ID NO: 19246 - protein, 7 aa, synthetic construct
YQNHKAD

SEQ ID NO: 19247 - protein, 7 aa, synthetic construct
HGNNGVI

SEQ ID NO: 19248 - protein, 7 aa, synthetic construct
CLDKMCA

SEQ ID NO: 19249 - protein, 7 aa, synthetic construct
YIPSQKP

SEQ ID NO: 19250 - protein, 7 aa, synthetic construct
RSHGMGQ

SEQ ID NO: 19251 - protein, 7 aa, synthetic construct
QNGIEGR

SEQ ID NO: 19252 - protein, 7 aa, synthetic construct
HQRHSDP

SEQ ID NO: 19253 - protein, 7 aa, synthetic construct
LPRTRQE

SEQ ID NO: 19254 - protein, 7 aa, synthetic construct
ERTQQAI

SEQ ID NO: 19255 - protein, 7 aa, synthetic construct
TVRMASP

SEQ ID NO: 19256 - protein, 7 aa, synthetic construct
RRADSEQ

SEQ ID NO: 19257 - protein, 7 aa, synthetic construct
DYTNRHP

SEQ ID NO: 19258 - protein, 7 aa, synthetic construct
KPDVKVE

SEQ ID NO: 19259 - protein, 7 aa, synthetic construct
PNNGNQM

SEQ ID NO: 19260 - protein, 7 aa, synthetic construct
VAKNQVD

SEQ ID NO: 19261 - protein, 7 aa, synthetic construct
APGMNFT

SEQ ID NO: 19262 - protein, 7 aa, synthetic construct
YKVVRHE

SEQ ID NO: 19263 - protein, 7 aa, synthetic construct
MKAPSSS

SEQ ID NO: 19264 - protein, 7 aa, synthetic construct
HGIQTNG

SEQ ID NO: 19265 - protein, 7 aa, synthetic construct
DRQGKDP

SEQ ID NO: 19266 - protein, 7 aa, synthetic construct
THPYKNA

SEQ ID NO: 19267 - protein, 7 aa, synthetic construct
GSRAGNH

SEQ ID NO: 19268 - protein, 7 aa, synthetic construct
GPQLGMH

SEQ ID NO: 19269 - protein, 7 aa, synthetic construct
QPQIHKM

SEQ ID NO: 19270 - protein, 7 aa, synthetic construct
GDQAWRP

SEQ ID NO: 19271 - protein, 7 aa, synthetic construct
YVSGPGS

SEQ ID NO: 19272 - protein, 7 aa, synthetic construct
KKDYAQG

SEQ ID NO: 19273 - protein, 7 aa, synthetic construct
QNNMFRE

SEQ ID NO: 19274 - protein, 7 aa, synthetic construct
ITSMSKP

SEQ ID NO: 19275 - protein, 7 aa, synthetic construct
VQQRALN

SEQ ID NO: 19276 - protein, 7 aa, synthetic construct
YTARVTQ

SEQ ID NO: 19277 - protein, 7 aa, synthetic construct
VNTKTIP

SEQ ID NO: 19278 - protein, 7 aa, synthetic construct
KKSFEDQ

SEQ ID NO: 19279 - protein, 7 aa, synthetic construct
QVGSNAS

SEQ ID NO: 19280 - protein, 7 aa, synthetic construct
HMAINRD

SEQ ID NO: 19281 - protein, 7 aa, synthetic construct
VHGGVKD

SEQ ID NO: 19282 - protein, 7 aa, synthetic construct
AHDKYSP

SEQ ID NO: 19283 - protein, 7 aa, synthetic construct
VVHVMKG

SEQ ID NO: 19284 - protein, 7 aa, synthetic construct
QYKHYDE

SEQ ID NO: 19285 - protein, 7 aa, synthetic construct
VSPDRHT

SEQ ID NO: 19286 - protein, 7 aa, synthetic construct
GTKQHTM

SEQ ID NO: 19287 - protein, 7 aa, synthetic construct
LQINIKP

SEQ ID NO: 19288 - protein, 7 aa, synthetic construct
RQERQGM

SEQ ID NO: 19289 - protein, 7 aa, synthetic construct
GPQTMLH

SEQ ID NO: 19290 - protein, 7 aa, synthetic construct
NQRGFDI

SEQ ID NO: 19291 - protein, 7 aa, synthetic construct
RTNSSLE

SEQ ID NO: 19292 - protein, 7 aa, synthetic construct
MGGLKST

SEQ ID NO: 19293 - protein, 7 aa, synthetic construct
HAYESSV

SEQ ID NO: 19294 - protein, 7 aa, synthetic construct
THQHPKP

SEQ ID NO: 19295 - protein, 7 aa, synthetic construct
YTRHEDN

SEQ ID NO: 19296 - protein, 7 aa, synthetic construct
YHSAQNH

SEQ ID NO: 19297 - protein, 7 aa, synthetic construct
INSRGHA

SEQ ID NO: 19298 - protein, 7 aa, synthetic construct
YKSAQQF

SEQ ID NO: 19299 - protein, 7 aa, synthetic construct
GWRHDEA

SEQ ID NO: 19300 - protein, 7 aa, synthetic construct
NVGTMKS

SEQ ID NO: 19301 - protein, 7 aa, synthetic construct
HPFGELG

SEQ ID NO: 19302 - protein, 7 aa, synthetic construct
EIPGHRG

SEQ ID NO: 19303 - protein, 7 aa, synthetic construct
GKNSNDF

SEQ ID NO: 19304 - protein, 7 aa, synthetic construct
VYKGENN

SEQ ID NO: 19305 - protein, 7 aa, synthetic construct
TSTKSHM

SEQ ID NO: 19306 - protein, 7 aa, synthetic construct
DKIVPHG

SEQ ID NO: 19307 - protein, 7 aa, synthetic construct
KKSDDEQ

SEQ ID NO: 19308 - protein, 7 aa, synthetic construct
HQYPPNG

SEQ ID NO: 19309 - protein, 7 aa, synthetic construct
KNAPVNW

SEQ ID NO: 19310 - protein, 7 aa, synthetic construct
GVYKQEE

SEQ ID NO: 19311 - protein, 7 aa, synthetic construct
FKNGGSD

SEQ ID NO: 19312 - protein, 7 aa, synthetic construct
RVNSGTI

SEQ ID NO: 19313 - protein, 7 aa, synthetic construct
QQITTHA

SEQ ID NO: 19314 - protein, 7 aa, synthetic construct
PGAPNFG

SEQ ID NO: 19315 - protein, 7 aa, synthetic construct
GQARHSP

SEQ ID NO: 19316 - protein, 7 aa, synthetic construct
WITKDNS

SEQ ID NO: 19317 - protein, 7 aa, synthetic construct
RLKNDSF

SEQ ID NO: 19318 - protein, 7 aa, synthetic construct
AHEHTGS

SEQ ID NO: 19319 - protein, 7 aa, synthetic construct
HANAMRM

SEQ ID NO: 19320 - protein, 7 aa, synthetic construct
KWNTDDN

SEQ ID NO: 19321 - protein, 7 aa, synthetic construct
EPGNKYQ

SEQ ID NO: 19322 - protein, 7 aa, synthetic construct
TARPHDY

SEQ ID NO: 19323 - protein, 7 aa, synthetic construct
TGQGRVF

SEQ ID NO: 19324 - protein, 7 aa, synthetic construct
KTNWSEE

SEQ ID NO: 19325 - protein, 7 aa, synthetic construct
SSLQQKP

SEQ ID NO: 19326 - protein, 7 aa, synthetic construct
VKGGPQF

SEQ ID NO: 19327 - protein, 7 aa, synthetic construct
HHRTDND

SEQ ID NO: 19328 - protein, 7 aa, synthetic construct
VRAMSGE

SEQ ID NO: 19329 - protein, 7 aa, synthetic construct
FNQDMGR

SEQ ID NO: 19330 - protein, 7 aa, synthetic construct
WPKQTDA

SEQ ID NO: 19331 - protein, 7 aa, synthetic construct
ENRNAMP

SEQ ID NO: 19332 - protein, 7 aa, synthetic construct
HASSTMP

SEQ ID NO: 19333 - protein, 7 aa, synthetic construct
FKNNIMM

SEQ ID NO: 19334 - protein, 7 aa, synthetic construct
RFHSHEG

SEQ ID NO: 19335 - protein, 7 aa, synthetic construct
GKVMSSE

SEQ ID NO: 19336 - protein, 7 aa, synthetic construct
LIHAQAP

SEQ ID NO: 19337 - protein, 7 aa, synthetic construct
ERKHQIE

SEQ ID NO: 19338 - protein, 7 aa, synthetic construct
HPYKTDK

SEQ ID NO: 19339 - protein, 7 aa, synthetic construct
NQNKHNV

SEQ ID NO: 19340 - protein, 7 aa, synthetic construct
PQPSARL

SEQ ID NO: 19341 - protein, 7 aa, synthetic construct
KHNIGNA

SEQ ID NO: 19342 - protein, 7 aa, synthetic construct
ITTKNNN

SEQ ID NO: 19343 - protein, 7 aa, synthetic construct
GNHIPLA

SEQ ID NO: 19344 - protein, 7 aa, synthetic construct
RTVDMDV

SEQ ID NO: 19345 - protein, 7 aa, synthetic construct
YNSRANN

SEQ ID NO: 19346 - protein, 7 aa, synthetic construct
NNMAPRS

SEQ ID NO: 19347 - protein, 7 aa, synthetic construct
SKDPTKW

SEQ ID NO: 19348 - protein, 7 aa, synthetic construct
MKETHNF

SEQ ID NO: 19349 - protein, 7 aa, synthetic construct
VQHPAPA

SEQ ID NO: 19350 - protein, 7 aa, synthetic construct
IGAYPMP

SEQ ID NO: 19351 - protein, 7 aa, synthetic construct
QNSKMQA

SEQ ID NO: 19352 - protein, 7 aa, synthetic construct
RRDTNLV

SEQ ID NO: 19353 - protein, 7 aa, synthetic construct
IREYMQN

SEQ ID NO: 19354 - protein, 7 aa, synthetic construct
DKQGWNA

SEQ ID NO: 19355 - protein, 7 aa, synthetic construct
VSDLKPG

SEQ ID NO: 19356 - protein, 7 aa, synthetic construct
ASPHSIG

SEQ ID NO: 19357 - protein, 7 aa, synthetic construct
LTIKENS

SEQ ID NO: 19358 - protein, 7 aa, synthetic construct
AVAHGTN

SEQ ID NO: 19359 - protein, 7 aa, synthetic construct
TRIQIKD

SEQ ID NO: 19360 - protein, 7 aa, synthetic construct
AKQADGI

SEQ ID NO: 19361 - protein, 7 aa, synthetic construct
FERSNNV

SEQ ID NO: 19362 - protein, 7 aa, synthetic construct
YHTSAIN

SEQ ID NO: 19363 - protein, 7 aa, synthetic construct
PNSPGKP

SEQ ID NO: 19364 - protein, 7 aa, synthetic construct
KANRDNY

SEQ ID NO: 19365 - protein, 7 aa, synthetic construct
STKQDYA

SEQ ID NO: 19366 - protein, 7 aa, synthetic construct
HNRQSGS

SEQ ID NO: 19367 - protein, 7 aa, synthetic construct
QNKTMLH

SEQ ID NO: 19368 - protein, 7 aa, synthetic construct
DVPKATR

SEQ ID NO: 19369 - protein, 7 aa, synthetic construct
AIRGQDK

SEQ ID NO: 19370 - protein, 7 aa, synthetic construct
IDHPQKV

SEQ ID NO: 19371 - protein, 7 aa, synthetic construct
KAPIANQ

SEQ ID NO: 19372 - protein, 7 aa, synthetic construct
SRHVGEH

SEQ ID NO: 19373 - protein, 7 aa, synthetic construct
WNSPKAG

SEQ ID NO: 19374 - protein, 7 aa, synthetic construct
PNMTHPS

SEQ ID NO: 19375 - protein, 7 aa, synthetic construct
GGTAWTG

SEQ ID NO: 19376 - protein, 7 aa, synthetic construct
YPNNANS

SEQ ID NO: 19377 - protein, 7 aa, synthetic construct
KIKGTHD

SEQ ID NO: 19378 - protein, 7 aa, synthetic construct
GQGFTSG

SEQ ID NO: 19379 - protein, 7 aa, synthetic construct
SNHKQGL

SEQ ID NO: 19380 - protein, 7 aa, synthetic construct
LRAGSSY

SEQ ID NO: 19381 - protein, 7 aa, synthetic construct
KPQQVHA

SEQ ID NO: 19382 - protein, 7 aa, synthetic construct
GSGTGNK

SEQ ID NO: 19383 - protein, 7 aa, synthetic construct
ATSPNST

SEQ ID NO: 19384 - protein, 7 aa, synthetic construct
QPGHGTS

SEQ ID NO: 19385 - protein, 7 aa, synthetic construct
SRGTHPD

SEQ ID NO: 19386 - protein, 7 aa, synthetic construct
DAVKKTI

SEQ ID NO: 19387 - protein, 7 aa, synthetic construct
SFKPTQN

SEQ ID NO: 19388 - protein, 7 aa, synthetic construct
AFAGARE

SEQ ID NO: 19389 - protein, 7 aa, synthetic construct
MVERPGS

SEQ ID NO: 19390 - protein, 7 aa, synthetic construct
INQYRSD

SEQ ID NO: 19391 - protein, 7 aa, synthetic construct
KPAGQNS

SEQ ID NO: 19392 - protein, 7 aa, synthetic construct
PSRVAYA

SEQ ID NO: 19393 - protein, 7 aa, synthetic construct
QFRLVTD

SEQ ID NO: 19394 - protein, 7 aa, synthetic construct
TRMSHNA

SEQ ID NO: 19395 - protein, 7 aa, synthetic construct
QNNKWQE

SEQ ID NO: 19396 - protein, 7 aa, synthetic construct
ILHSQSE

SEQ ID NO: 19397 - protein, 7 aa, synthetic construct
RNEAGHQ

SEQ ID NO: 19398 - protein, 7 aa, synthetic construct
NIKAHEQ

SEQ ID NO: 19399 - protein, 7 aa, synthetic construct
YRLPSGA

SEQ ID NO: 19400 - protein, 7 aa, synthetic construct
HRTDANY

SEQ ID NO: 19401 - protein, 7 aa, synthetic construct
AQIKPLI

SEQ ID NO: 19402 - protein, 7 aa, synthetic construct
TQDRRAD

SEQ ID NO: 19403 - protein, 7 aa, synthetic construct
YGEHTRE

SEQ ID NO: 19404 - protein, 7 aa, synthetic construct
RESNFTG

SEQ ID NO: 19405 - protein, 7 aa, synthetic construct
GPVGSLG

SEQ ID NO: 19406 - protein, 7 aa, synthetic construct
IETNKQS

SEQ ID NO: 19407 - protein, 7 aa, synthetic construct
KHANNIT

SEQ ID NO: 19408 - protein, 7 aa, synthetic construct
QSNQAVS

SEQ ID NO: 19409 - protein, 7 aa, synthetic construct
DYEFKTA

SEQ ID NO: 19410 - protein, 7 aa, synthetic construct
THHHTRE

SEQ ID NO: 19411 - protein, 7 aa, synthetic construct
YGMDGRN

SEQ ID NO: 19412 - protein, 7 aa, synthetic construct
KGNTGMT

SEQ ID NO: 19413 - protein, 7 aa, synthetic construct
MFANGKN

SEQ ID NO: 19414 - protein, 7 aa, synthetic construct
VERPIAG

SEQ ID NO: 19415 - protein, 7 aa, synthetic construct
TSAWTNA

SEQ ID NO: 19416 - protein, 7 aa, synthetic construct
TMNYKGV

SEQ ID NO: 19417 - protein, 7 aa, synthetic construct
RHDGNQL

SEQ ID NO: 19418 - protein, 7 aa, synthetic construct
SGVLPKS

SEQ ID NO: 19419 - protein, 7 aa, synthetic construct
KAAGAYS

SEQ ID NO: 19420 - protein, 7 aa, synthetic construct
GEKNHYT

SEQ ID NO: 19421 - protein, 7 aa, synthetic construct
MHVRVAN

SEQ ID NO: 19422 - protein, 7 aa, synthetic construct
IRVPPEK

SEQ ID NO: 19423 - protein, 7 aa, synthetic construct
VSPKSER

SEQ ID NO: 19424 - protein, 7 aa, synthetic construct
KQESGRA

SEQ ID NO: 19425 - protein, 7 aa, synthetic construct
FRTNESI

SEQ ID NO: 19426 - protein, 7 aa, synthetic construct
ARNNAVM

SEQ ID NO: 19427 - protein, 7 aa, synthetic construct
VSKSQPI

SEQ ID NO: 19428 - protein, 7 aa, synthetic construct
YHGSKSE

SEQ ID NO: 19429 - protein, 7 aa, synthetic construct
TMPRISP

SEQ ID NO: 19430 - protein, 7 aa, synthetic construct
SDPMVRA

SEQ ID NO: 19431 - protein, 7 aa, synthetic construct
DRITRLG

SEQ ID NO: 19432 - protein, 7 aa, synthetic construct
KIDPPSG

SEQ ID NO: 19433 - protein, 7 aa, synthetic construct
PLQDKSR

SEQ ID NO: 19434 - protein, 7 aa, synthetic construct
VTKMHHP

SEQ ID NO: 19435 - protein, 7 aa, synthetic construct
DMMRARV

SEQ ID NO: 19436 - protein, 7 aa, synthetic construct
KQNITVL

SEQ ID NO: 19437 - protein, 7 aa, synthetic construct
WREGNSM

SEQ ID NO: 19438 - protein, 7 aa, synthetic construct
TPMDRRL

SEQ ID NO: 19439 - protein, 7 aa, synthetic construct
DRTHFED

SEQ ID NO: 19440 - protein, 7 aa, synthetic construct
IQGQSTD

SEQ ID NO: 19441 - protein, 7 aa, synthetic construct
SFPGMFE

SEQ ID NO: 19442 - protein, 7 aa, synthetic construct
QHKPGHA

SEQ ID NO: 19443 - protein, 7 aa, synthetic construct
LGGGKPH

SEQ ID NO: 19444 - protein, 7 aa, synthetic construct
HAQGRYE

SEQ ID NO: 19445 - protein, 7 aa, synthetic construct
RDKITMI

SEQ ID NO: 19446 - protein, 7 aa, synthetic construct
QAHIHRP

SEQ ID NO: 19447 - protein, 7 aa, synthetic construct
YKINNPH

SEQ ID NO: 19448 - protein, 7 aa, synthetic construct
YIGPETA

SEQ ID NO: 19449 - protein, 7 aa, synthetic construct
NRFGAER

SEQ ID NO: 19450 - protein, 7 aa, synthetic construct
ERSGDVG

SEQ ID NO: 19451 - protein, 7 aa, synthetic construct
KGPTPPL

SEQ ID NO: 19452 - protein, 7 aa, synthetic construct
QRESIKP

SEQ ID NO: 19453 - protein, 7 aa, synthetic construct
IKNQLAP

SEQ ID NO: 19454 - protein, 7 aa, synthetic construct
GRTFKEE

SEQ ID NO: 19455 - protein, 7 aa, synthetic construct
NGKQVNS

SEQ ID NO: 19456 - protein, 7 aa, synthetic construct
FPSDHIR

SEQ ID NO: 19457 - protein, 7 aa, synthetic construct
IFDRSNP

SEQ ID NO: 19458 - protein, 7 aa, synthetic construct
GYSMRNG

SEQ ID NO: 19459 - protein, 7 aa, synthetic construct
MQDARHS

SEQ ID NO: 19460 - protein, 7 aa, synthetic construct
WLDIIDT

SEQ ID NO: 19461 - protein, 7 aa, synthetic construct
YHNARYE

SEQ ID NO: 19462 - protein, 7 aa, synthetic construct
PVPRNAP

SEQ ID NO: 19463 - protein, 7 aa, synthetic construct
WMKISPD

SEQ ID NO: 19464 - protein, 7 aa, synthetic construct
GPSDKGS

SEQ ID NO: 19465 - protein, 7 aa, synthetic construct
VPNIRSH

SEQ ID NO: 19466 - protein, 7 aa, synthetic construct
PRSGITV

SEQ ID NO: 19467 - protein, 7 aa, synthetic construct
RMPNMMQ

SEQ ID NO: 19468 - protein, 7 aa, synthetic construct
LKYTTKE

SEQ ID NO: 19469 - protein, 7 aa, synthetic construct
SAPARTQ

SEQ ID NO: 19470 - protein, 7 aa, synthetic construct
MHKQGLS

SEQ ID NO: 19471 - protein, 7 aa, synthetic construct
VHQPRAT

SEQ ID NO: 19472 - protein, 7 aa, synthetic construct
WDEFNPR

SEQ ID NO: 19473 - protein, 7 aa, synthetic construct
PFGHDQG

SEQ ID NO: 19474 - protein, 7 aa, synthetic construct
SWNGNHA

SEQ ID NO: 19475 - protein, 7 aa, synthetic construct
ANGGIPQ

SEQ ID NO: 19476 - protein, 7 aa, synthetic construct
TVKDSRV

SEQ ID NO: 19477 - protein, 7 aa, synthetic construct
SQPGVHV

SEQ ID NO: 19478 - protein, 7 aa, synthetic construct
GHPKEQI

SEQ ID NO: 19479 - protein, 7 aa, synthetic construct
RTVHYME

SEQ ID NO: 19480 - protein, 7 aa, synthetic construct
LERFVTQ

SEQ ID NO: 19481 - protein, 7 aa, synthetic construct
YMKENRG

SEQ ID NO: 19482 - protein, 7 aa, synthetic construct
KSEKPGS

SEQ ID NO: 19483 - protein, 7 aa, synthetic construct
HTSSHNS

SEQ ID NO: 19484 - protein, 7 aa, synthetic construct
LVGTKGM

SEQ ID NO: 19485 - protein, 7 aa, synthetic construct
PMPHSGP

SEQ ID NO: 19486 - protein, 7 aa, synthetic construct
LQLSHKS

SEQ ID NO: 19487 - protein, 7 aa, synthetic construct
DKGAVDK

SEQ ID NO: 19488 - protein, 7 aa, synthetic construct
RGLPPSN

SEQ ID NO: 19489 - protein, 7 aa, synthetic construct
KVHPIAS

SEQ ID NO: 19490 - protein, 7 aa, synthetic construct
PHQNKTP

SEQ ID NO: 19491 - protein, 7 aa, synthetic construct
VWKDQHA

SEQ ID NO: 19492 - protein, 7 aa, synthetic construct
ANADNRS

SEQ ID NO: 19493 - protein, 7 aa, synthetic construct
RDTMVYS

SEQ ID NO: 19494 - protein, 7 aa, synthetic construct
GATSGTV

SEQ ID NO: 19495 - protein, 7 aa, synthetic construct
QSTRGNL

SEQ ID NO: 19496 - protein, 7 aa, synthetic construct
QFSSDKY

SEQ ID NO: 19497 - protein, 7 aa, synthetic construct
TSYGATG

SEQ ID NO: 19498 - protein, 7 aa, synthetic construct
MNHARDW

SEQ ID NO: 19499 - protein, 7 aa, synthetic construct
GDNKRIP

SEQ ID NO: 19500 - protein, 7 aa, synthetic construct
KAPWSED

SEQ ID NO: 19501 - protein, 7 aa, synthetic construct
MSQTHVD

SEQ ID NO: 19502 - protein, 7 aa, synthetic construct
QSGQSAA

SEQ ID NO: 19503 - protein, 7 aa, synthetic construct
RQHTQPA

SEQ ID NO: 19504 - protein, 7 aa, synthetic construct
YHGHNDA

SEQ ID NO: 19505 - protein, 7 aa, synthetic construct
DNHKNGW

SEQ ID NO: 19506 - protein, 7 aa, synthetic construct
VIHNSAA

SEQ ID NO: 19507 - protein, 7 aa, synthetic construct
VTQMHGP

SEQ ID NO: 19508 - protein, 7 aa, synthetic construct
WNGGNPV

SEQ ID NO: 19509 - protein, 7 aa, synthetic construct
TPKERDA

SEQ ID NO: 19510 - protein, 7 aa, synthetic construct
PNTRGSG

SEQ ID NO: 19511 - protein, 7 aa, synthetic construct
HHQQYDR

SEQ ID NO: 19512 - protein, 7 aa, synthetic construct
VQSKIHP

SEQ ID NO: 19513 - protein, 7 aa, synthetic construct
ISNNNAK

SEQ ID NO: 19514 - protein, 7 aa, synthetic construct
NVSNGRL

SEQ ID NO: 19515 - protein, 7 aa, synthetic construct
PNSTTRS

SEQ ID NO: 19516 - protein, 7 aa, synthetic construct
RGNGAID

SEQ ID NO: 19517 - protein, 7 aa, synthetic construct
MVISRTD

SEQ ID NO: 19518 - protein, 7 aa, synthetic construct
PGHGSTG

SEQ ID NO: 19519 - protein, 7 aa, synthetic construct
VLGLKDM

SEQ ID NO: 19520 - protein, 7 aa, synthetic construct
IGEKNHV

SEQ ID NO: 19521 - protein, 7 aa, synthetic construct
VQKIVAP

SEQ ID NO: 19522 - protein, 7 aa, synthetic construct
ERIKYPS

SEQ ID NO: 19523 - protein, 7 aa, synthetic construct
SRIHNAM

SEQ ID NO: 19524 - protein, 7 aa, synthetic construct
FMSTQMP

SEQ ID NO: 19525 - protein, 7 aa, synthetic construct
PKEHGVV

SEQ ID NO: 19526 - protein, 7 aa, synthetic construct
TSRGLSG

SEQ ID NO: 19527 - protein, 7 aa, synthetic construct
IFNTVQG

SEQ ID NO: 19528 - protein, 7 aa, synthetic construct
NHASNKF

SEQ ID NO: 19529 - protein, 7 aa, synthetic construct
NQKLNMA

SEQ ID NO: 19530 - protein, 7 aa, synthetic construct
AVGKVIL

SEQ ID NO: 19531 - protein, 7 aa, synthetic construct
SAGINGY

SEQ ID NO: 19532 - protein, 7 aa, synthetic construct
FGNQTGT

SEQ ID NO: 19533 - protein, 7 aa, synthetic construct
EAKQGFP

SEQ ID NO: 19534 - protein, 7 aa, synthetic construct
IENHGRP

SEQ ID NO: 19535 - protein, 7 aa, synthetic construct
QTRYMDA

SEQ ID NO: 19536 - protein, 7 aa, synthetic construct
QPGPKRE

SEQ ID NO: 19537 - protein, 7 aa, synthetic construct
RHPHGDD

SEQ ID NO: 19538 - protein, 7 aa, synthetic construct
GVDYTTP

SEQ ID NO: 19539 - protein, 7 aa, synthetic construct
QAPSSPS

SEQ ID NO: 19540 - protein, 7 aa, synthetic construct
SKLATAA

SEQ ID NO: 19541 - protein, 7 aa, synthetic construct
GADQKLY

SEQ ID NO: 19542 - protein, 7 aa, synthetic construct
GGKQNLM

SEQ ID NO: 19543 - protein, 7 aa, synthetic construct
TQIASQA

SEQ ID NO: 19544 - protein, 7 aa, synthetic construct
TTKSGNM

SEQ ID NO: 19545 - protein, 7 aa, synthetic construct
HTPNFGS

SEQ ID NO: 19546 - protein, 7 aa, synthetic construct
SNNVSGH

SEQ ID NO: 19547 - protein, 7 aa, synthetic construct
KDHGLTA

SEQ ID NO: 19548 - protein, 7 aa, synthetic construct
EPTQPKY

SEQ ID NO: 19549 - protein, 7 aa, synthetic construct
HHVKIAP

SEQ ID NO: 19550 - protein, 7 aa, synthetic construct
KQADPSD

SEQ ID NO: 19551 - protein, 7 aa, synthetic construct
TVWATES

SEQ ID NO: 19552 - protein, 7 aa, synthetic construct
HVNHAPD

SEQ ID NO: 19553 - protein, 7 aa, synthetic construct
RISDPNY

SEQ ID NO: 19554 - protein, 7 aa, synthetic construct
ERHKATP

SEQ ID NO: 19555 - protein, 7 aa, synthetic construct
DKWKADP

SEQ ID NO: 19556 - protein, 7 aa, synthetic construct
TMKVLQG

SEQ ID NO: 19557 - protein, 7 aa, synthetic construct
SQGQTAW

SEQ ID NO: 19558 - protein, 7 aa, synthetic construct
IQKNMSA

SEQ ID NO: 19559 - protein, 7 aa, synthetic construct
YGASMAV

SEQ ID NO: 19560 - protein, 7 aa, synthetic construct
KALMDKG

SEQ ID NO: 19561 - protein, 7 aa, synthetic construct
AGYHQPV

SEQ ID NO: 19562 - protein, 7 aa, synthetic construct
NKGPENQ

SEQ ID NO: 19563 - protein, 7 aa, synthetic construct
SLHMREP

SEQ ID NO: 19564 - protein, 7 aa, synthetic construct
NYGKAEA

SEQ ID NO: 19565 - protein, 7 aa, synthetic construct
VDSLHSH

SEQ ID NO: 19566 - protein, 7 aa, synthetic construct
NQSSTQP

SEQ ID NO: 19567 - protein, 7 aa, synthetic construct
NSTRMEM

SEQ ID NO: 19568 - protein, 7 aa, synthetic construct
NNMTPDK

SEQ ID NO: 19569 - protein, 7 aa, synthetic construct
DQNSHAK

SEQ ID NO: 19570 - protein, 7 aa, synthetic construct
FVPTNGR

SEQ ID NO: 19571 - protein, 7 aa, synthetic construct
GVRDQQR

SEQ ID NO: 19572 - protein, 7 aa, synthetic construct
ITDQSRG

SEQ ID NO: 19573 - protein, 7 aa, synthetic construct
KQGHASV

SEQ ID NO: 19574 - protein, 7 aa, synthetic construct
GFQADVK

SEQ ID NO: 19575 - protein, 7 aa, synthetic construct
GPTMSAG

SEQ ID NO: 19576 - protein, 7 aa, synthetic construct
TFNDTTG

SEQ ID NO: 19577 - protein, 7 aa, synthetic construct
APKNNIP

SEQ ID NO: 19578 - protein, 7 aa, synthetic construct
RSSAEVV

SEQ ID NO: 19579 - protein, 7 aa, synthetic construct
SGTGSPA

SEQ ID NO: 19580 - protein, 7 aa, synthetic construct
AGGPVPY

SEQ ID NO: 19581 - protein, 7 aa, synthetic construct
GYNMTGG

SEQ ID NO: 19582 - protein, 7 aa, synthetic construct
HPQHMTA

SEQ ID NO: 19583 - protein, 7 aa, synthetic construct
GYRQHEA

SEQ ID NO: 19584 - protein, 7 aa, synthetic construct
LLKAGSA

SEQ ID NO: 19585 - protein, 7 aa, synthetic construct
PVKTQNV

SEQ ID NO: 19586 - protein, 7 aa, synthetic construct
LSKTNYP

SEQ ID NO: 19587 - protein, 7 aa, synthetic construct
NAMTGKE

SEQ ID NO: 19588 - protein, 7 aa, synthetic construct
WGQFQDR

SEQ ID NO: 19589 - protein, 7 aa, synthetic construct
GQNKNVI

SEQ ID NO: 19590 - protein, 7 aa, synthetic construct
VTPNHAK

SEQ ID NO: 19591 - protein, 7 aa, synthetic construct
NGTQKGT

SEQ ID NO: 19592 - protein, 7 aa, synthetic construct
GGRAYDS

SEQ ID NO: 19593 - protein, 7 aa, synthetic construct
NVVWKAE

SEQ ID NO: 19594 - protein, 7 aa, synthetic construct
FIKMNAD

SEQ ID NO: 19595 - protein, 7 aa, synthetic construct
FKSAAGS

SEQ ID NO: 19596 - protein, 7 aa, synthetic construct
AVGRPPN

SEQ ID NO: 19597 - protein, 7 aa, synthetic construct
NPHAEVN

SEQ ID NO: 19598 - protein, 7 aa, synthetic construct
HMGRNFE

SEQ ID NO: 19599 - protein, 7 aa, synthetic construct
STHVDAG

SEQ ID NO: 19600 - protein, 7 aa, synthetic construct
SPRNKES

SEQ ID NO: 19601 - protein, 7 aa, synthetic construct
YSRQTIG

SEQ ID NO: 19602 - protein, 7 aa, synthetic construct
NPVPRDA

SEQ ID NO: 19603 - protein, 7 aa, synthetic construct
HPGPNNR

SEQ ID NO: 19604 - protein, 7 aa, synthetic construct
WTIKSEN

SEQ ID NO: 19605 - protein, 7 aa, synthetic construct
FEHSGDL

SEQ ID NO: 19606 - protein, 7 aa, synthetic construct
TRDKINS

SEQ ID NO: 19607 - protein, 7 aa, synthetic construct
QNHGIAG

SEQ ID NO: 19608 - protein, 7 aa, synthetic construct
THGRIEA

SEQ ID NO: 19609 - protein, 7 aa, synthetic construct
YANNFVA

SEQ ID NO: 19610 - protein, 7 aa, synthetic construct
GSKYGHA

SEQ ID NO: 19611 - protein, 7 aa, synthetic construct
SIRGQHI

SEQ ID NO: 19612 - protein, 7 aa, synthetic construct
HNKGMFG

SEQ ID NO: 19613 - protein, 7 aa, synthetic construct
RGSRDEN

SEQ ID NO: 19614 - protein, 7 aa, synthetic construct
KFNMGQD

SEQ ID NO: 19615 - protein, 7 aa, synthetic construct
AKVQGQF

SEQ ID NO: 19616 - protein, 7 aa, synthetic construct
SVYNHGP

SEQ ID NO: 19617 - protein, 7 aa, synthetic construct
IIDKRYM

SEQ ID NO: 19618 - protein, 7 aa, synthetic construct
PPTSRPE

SEQ ID NO: 19619 - protein, 7 aa, synthetic construct
LGAERSN

SEQ ID NO: 19620 - protein, 7 aa, synthetic construct
DMYKPAH

SEQ ID NO: 19621 - protein, 7 aa, synthetic construct
NHMHGIG

SEQ ID NO: 19622 - protein, 7 aa, synthetic construct
IRGWSAE

SEQ ID NO: 19623 - protein, 7 aa, synthetic construct
KGPEHYQ

SEQ ID NO: 19624 - protein, 7 aa, synthetic construct
GYTTTPS

SEQ ID NO: 19625 - protein, 7 aa, synthetic construct
AVGDWGS

SEQ ID NO: 19626 - protein, 7 aa, synthetic construct
GGKGHGL

SEQ ID NO: 19627 - protein, 7 aa, synthetic construct
YLREGRN

SEQ ID NO: 19628 - protein, 7 aa, synthetic construct
HNQTKEF

SEQ ID NO: 19629 - protein, 7 aa, synthetic construct
PEMHKSG

SEQ ID NO: 19630 - protein, 7 aa, synthetic construct
MANVKFD

SEQ ID NO: 19631 - protein, 7 aa, synthetic construct
QSKANSY

SEQ ID NO: 19632 - protein, 7 aa, synthetic construct
FWKTIGD

SEQ ID NO: 19633 - protein, 7 aa, synthetic construct
KSDQIQG

SEQ ID NO: 19634 - protein, 7 aa, synthetic construct
MKPQMTE

SEQ ID NO: 19635 - protein, 7 aa, synthetic construct
YHGGLLE

SEQ ID NO: 19636 - protein, 7 aa, synthetic construct
QTRYGEP

SEQ ID NO: 19637 - protein, 7 aa, synthetic construct
SHSTYDR

SEQ ID NO: 19638 - protein, 7 aa, synthetic construct
EPQTPWS

SEQ ID NO: 19639 - protein, 7 aa, synthetic construct
QKLGSMT

SEQ ID NO: 19640 - protein, 7 aa, synthetic construct
RINHDSY

SEQ ID NO: 19641 - protein, 7 aa, synthetic construct
MPQAEFR

SEQ ID NO: 19642 - protein, 7 aa, synthetic construct
QWTASGP

SEQ ID NO: 19643 - protein, 7 aa, synthetic construct
RNDAHGL

SEQ ID NO: 19644 - protein, 7 aa, synthetic construct
RGMHNNP

SEQ ID NO: 19645 - protein, 7 aa, synthetic construct
IHGISKP

SEQ ID NO: 19646 - protein, 7 aa, synthetic construct
VEPYNHG

SEQ ID NO: 19647 - protein, 7 aa, synthetic construct
KPNHGNT

SEQ ID NO: 19648 - protein, 7 aa, synthetic construct
YREKTSS

SEQ ID NO: 19649 - protein, 7 aa, synthetic construct
KVYGVME

SEQ ID NO: 19650 - protein, 7 aa, synthetic construct
YSPKSGG

SEQ ID NO: 19651 - protein, 7 aa, synthetic construct
KYANHTD

SEQ ID NO: 19652 - protein, 7 aa, synthetic construct
KFPQSHD

SEQ ID NO: 19653 - protein, 7 aa, synthetic construct
TQKTYTG

SEQ ID NO: 19654 - protein, 7 aa, synthetic construct
NADGPNW

SEQ ID NO: 19655 - protein, 7 aa, synthetic construct
VHKYSES

SEQ ID NO: 19656 - protein, 7 aa, synthetic construct
YKMETRP

SEQ ID NO: 19657 - protein, 7 aa, synthetic construct
LHGPFQA

SEQ ID NO: 19658 - protein, 7 aa, synthetic construct
KVPHSEK

SEQ ID NO: 19659 - protein, 7 aa, synthetic construct
FRDTSSN

SEQ ID NO: 19660 - protein, 7 aa, synthetic construct
FQNRQAM

SEQ ID NO: 19661 - protein, 7 aa, synthetic construct
ATKIVQE

SEQ ID NO: 19662 - protein, 7 aa, synthetic construct
YPPPKNA

SEQ ID NO: 19663 - protein, 7 aa, synthetic construct
FGADRRA

SEQ ID NO: 19664 - protein, 7 aa, synthetic construct
RPDTSVV

SEQ ID NO: 19665 - protein, 7 aa, synthetic construct
HLGAQRN

SEQ ID NO: 19666 - protein, 7 aa, synthetic construct
RAHTPTN

SEQ ID NO: 19667 - protein, 7 aa, synthetic construct
GHENRGW

SEQ ID NO: 19668 - protein, 7 aa, synthetic construct
STAKLES

SEQ ID NO: 19669 - protein, 7 aa, synthetic construct
INQFYKQ

SEQ ID NO: 19670 - protein, 7 aa, synthetic construct
IKHMRQD

SEQ ID NO: 19671 - protein, 7 aa, synthetic construct
FKTMTGD

SEQ ID NO: 19672 - protein, 7 aa, synthetic construct
FIHTGSG

SEQ ID NO: 19673 - protein, 7 aa, synthetic construct
AFPGTSK

SEQ ID NO: 19674 - protein, 7 aa, synthetic construct
AQRESRQ

SEQ ID NO: 19675 - protein, 7 aa, synthetic construct
LAFDKGG

SEQ ID NO: 19676 - protein, 7 aa, synthetic construct
HQKQSES

SEQ ID NO: 19677 - protein, 7 aa, synthetic construct
QVPINVS

SEQ ID NO: 19678 - protein, 7 aa, synthetic construct
QYERGQG

SEQ ID NO: 19679 - protein, 7 aa, synthetic construct
RYTQTQS

SEQ ID NO: 19680 - protein, 7 aa, synthetic construct
FSGSQGH

SEQ ID NO: 19681 - protein, 7 aa, synthetic construct
MATDASM

SEQ ID NO: 19682 - protein, 7 aa, synthetic construct
TVGQFHT

SEQ ID NO: 19683 - protein, 7 aa, synthetic construct
MPHGTLG

SEQ ID NO: 19684 - protein, 7 aa, synthetic construct
LSTNAKV

SEQ ID NO: 19685 - protein, 7 aa, synthetic construct
FGGSSEK

SEQ ID NO: 19686 - protein, 7 aa, synthetic construct
SPPTVRI

SEQ ID NO: 19687 - protein, 7 aa, synthetic construct
APKIDFV

SEQ ID NO: 19688 - protein, 7 aa, synthetic construct
AIGHSKI

SEQ ID NO: 19689 - protein, 7 aa, synthetic construct
SVSKFGE

SEQ ID NO: 19690 - protein, 7 aa, synthetic construct
AGMKFEP

SEQ ID NO: 19691 - protein, 7 aa, synthetic construct
SQSSLNV

SEQ ID NO: 19692 - protein, 7 aa, synthetic construct
NNQYQQI

SEQ ID NO: 19693 - protein, 7 aa, synthetic construct
RSASVEW

SEQ ID NO: 19694 - protein, 7 aa, synthetic construct
PTKVHHD

SEQ ID NO: 19695 - protein, 7 aa, synthetic construct
KGSAQPD

SEQ ID NO: 19696 - protein, 7 aa, synthetic construct
DPHKGIS

SEQ ID NO: 19697 - protein, 7 aa, synthetic construct
ADHRKHD

SEQ ID NO: 19698 - protein, 7 aa, synthetic construct
RQSQLSM

SEQ ID NO: 19699 - protein, 7 aa, synthetic construct
KGSYSIP

SEQ ID NO: 19700 - protein, 7 aa, synthetic construct
HDRQGGW

SEQ ID NO: 19701 - protein, 7 aa, synthetic construct
GATIPAS

SEQ ID NO: 19702 - protein, 7 aa, synthetic construct
PQNNHTK

SEQ ID NO: 19703 - protein, 7 aa, synthetic construct
VTNGHNV

SEQ ID NO: 19704 - protein, 7 aa, synthetic construct
KGPKQDA

SEQ ID NO: 19705 - protein, 7 aa, synthetic construct
KERVNPM

SEQ ID NO: 19706 - protein, 7 aa, synthetic construct
QRGSETV

SEQ ID NO: 19707 - protein, 7 aa, synthetic construct
SIASKTY

SEQ ID NO: 19708 - protein, 7 aa, synthetic construct
NHGAYPS

SEQ ID NO: 19709 - protein, 7 aa, synthetic construct
WRNFEHE

SEQ ID NO: 19710 - protein, 7 aa, synthetic construct
TNHNQYP

SEQ ID NO: 19711 - protein, 7 aa, synthetic construct
TAHLEHM

SEQ ID NO: 19712 - protein, 7 aa, synthetic construct
YNQKYEN

SEQ ID NO: 19713 - protein, 7 aa, synthetic construct
IKTEVAA

SEQ ID NO: 19714 - protein, 7 aa, synthetic construct
HRGVMEI

SEQ ID NO: 19715 - protein, 7 aa, synthetic construct
NFGHRNA

SEQ ID NO: 19716 - protein, 7 aa, synthetic construct
KIKALAD

SEQ ID NO: 19717 - protein, 7 aa, synthetic construct
AGSGKGQ

SEQ ID NO: 19718 - protein, 7 aa, synthetic construct
VTREMKS

SEQ ID NO: 19719 - protein, 7 aa, synthetic construct
FKKEDGT

SEQ ID NO: 19720 - protein, 7 aa, synthetic construct
NIAIRNV

SEQ ID NO: 19721 - protein, 7 aa, synthetic construct
EDRKAAS

SEQ ID NO: 19722 - protein, 7 aa, synthetic construct
TYENPKP

SEQ ID NO: 19723 - protein, 7 aa, synthetic construct
KMVPGDS

SEQ ID NO: 19724 - protein, 7 aa, synthetic construct
AIMGDRL

SEQ ID NO: 19725 - protein, 7 aa, synthetic construct
RTSLGGD

SEQ ID NO: 19726 - protein, 7 aa, synthetic construct
AQKIGMT

SEQ ID NO: 19727 - protein, 7 aa, synthetic construct
PMMQSMS

SEQ ID NO: 19728 - protein, 7 aa, synthetic construct
FDKPRVP

SEQ ID NO: 19729 - protein, 7 aa, synthetic construct
VNDFQSM

SEQ ID NO: 19730 - protein, 7 aa, synthetic construct
NRDVNSS

SEQ ID NO: 19731 - protein, 7 aa, synthetic construct
KFKQELS

SEQ ID NO: 19732 - protein, 7 aa, synthetic construct
TPVQKFT

SEQ ID NO: 19733 - protein, 7 aa, synthetic construct
NVIASRN

SEQ ID NO: 19734 - protein, 7 aa, synthetic construct
QLNLAKT

SEQ ID NO: 19735 - protein, 7 aa, synthetic construct
GDYKYKE

SEQ ID NO: 19736 - protein, 7 aa, synthetic construct
NMVYKVG

SEQ ID NO: 19737 - protein, 7 aa, synthetic construct
FYPASHE

SEQ ID NO: 19738 - protein, 7 aa, synthetic construct
MKHGTVI

SEQ ID NO: 19739 - protein, 7 aa, synthetic construct
FAQYEKN

SEQ ID NO: 19740 - protein, 7 aa, synthetic construct
PQSGTVF

SEQ ID NO: 19741 - protein, 7 aa, synthetic construct
FDNSAAG

SEQ ID NO: 19742 - protein, 7 aa, synthetic construct
IIRNGHQ

SEQ ID NO: 19743 - protein, 7 aa, synthetic construct
FTQKVYS

SEQ ID NO: 19744 - protein, 7 aa, synthetic construct
HKSQDGT

SEQ ID NO: 19745 - protein, 7 aa, synthetic construct
TTQQSGS

SEQ ID NO: 19746 - protein, 7 aa, synthetic construct
GSKTTTG

SEQ ID NO: 19747 - protein, 7 aa, synthetic construct
EHNRAER

SEQ ID NO: 19748 - protein, 7 aa, synthetic construct
NYKPNST

SEQ ID NO: 19749 - protein, 7 aa, synthetic construct
NNPGRVF

SEQ ID NO: 19750 - protein, 7 aa, synthetic construct
KIEIQTG

SEQ ID NO: 19751 - protein, 7 aa, synthetic construct
TLTAERT

SEQ ID NO: 19752 - protein, 7 aa, synthetic construct
DGIYKNA

SEQ ID NO: 19753 - protein, 7 aa, synthetic construct
ENRTNGI

SEQ ID NO: 19754 - protein, 7 aa, synthetic construct
EKKNNIT

SEQ ID NO: 19755 - protein, 7 aa, synthetic construct
VAKQSVY

SEQ ID NO: 19756 - protein, 7 aa, synthetic construct
VIHKERP

SEQ ID NO: 19757 - protein, 7 aa, synthetic construct
DKAQFGY

SEQ ID NO: 19758 - protein, 7 aa, synthetic construct
RPNNAPH

SEQ ID NO: 19759 - protein, 7 aa, synthetic construct
KDYNESM

SEQ ID NO: 19760 - protein, 7 aa, synthetic construct
YRPSNDD

SEQ ID NO: 19761 - protein, 7 aa, synthetic construct
IMPHPSG

SEQ ID NO: 19762 - protein, 7 aa, synthetic construct
HSGIAAG

SEQ ID NO: 19763 - protein, 7 aa, synthetic construct
DLRIGVT

SEQ ID NO: 19764 - protein, 7 aa, synthetic construct
VKYHPTP

SEQ ID NO: 19765 - protein, 7 aa, synthetic construct
QYKSGEN

SEQ ID NO: 19766 - protein, 7 aa, synthetic construct
IPGLKQT

SEQ ID NO: 19767 - protein, 7 aa, synthetic construct
TNGRYAL

SEQ ID NO: 19768 - protein, 7 aa, synthetic construct
KMNAKDQ

SEQ ID NO: 19769 - protein, 7 aa, synthetic construct
GTTPGKT

SEQ ID NO: 19770 - protein, 7 aa, synthetic construct
IAKTMAH

SEQ ID NO: 19771 - protein, 7 aa, synthetic construct
YQTSQGS

SEQ ID NO: 19772 - protein, 7 aa, synthetic construct
VPFKESA

SEQ ID NO: 19773 - protein, 7 aa, synthetic construct
ISKLQVA

SEQ ID NO: 19774 - protein, 7 aa, synthetic construct
SKDGWER

SEQ ID NO: 19775 - protein, 7 aa, synthetic construct
KGHFGSG

SEQ ID NO: 19776 - protein, 7 aa, synthetic construct
QTTVNAY

SEQ ID NO: 19777 - protein, 7 aa, synthetic construct
AMSDPSK

SEQ ID NO: 19778 - protein, 7 aa, synthetic construct
HQRAPQV

SEQ ID NO: 19779 - protein, 7 aa, synthetic construct
QKAGFGH

SEQ ID NO: 19780 - protein, 7 aa, synthetic construct
VHGPFNE

SEQ ID NO: 19781 - protein, 7 aa, synthetic construct
VIHHSDN

SEQ ID NO: 19782 - protein, 7 aa, synthetic construct
EGKFPRL

SEQ ID NO: 19783 - protein, 7 aa, synthetic construct
NPLMKVD

SEQ ID NO: 19784 - protein, 7 aa, synthetic construct
FLQRSAG

SEQ ID NO: 19785 - protein, 7 aa, synthetic construct
YNHHDAV

SEQ ID NO: 19786 - protein, 7 aa, synthetic construct
TGGDRRI

SEQ ID NO: 19787 - protein, 7 aa, synthetic construct
FKDRQKD

SEQ ID NO: 19788 - protein, 7 aa, synthetic construct
VMAQKRE

SEQ ID NO: 19789 - protein, 7 aa, synthetic construct
DKDHRQL

SEQ ID NO: 19790 - protein, 7 aa, synthetic construct
KLGTTAN

SEQ ID NO: 19791 - protein, 7 aa, synthetic construct
WNDRSWN

SEQ ID NO: 19792 - protein, 7 aa, synthetic construct
SNATIKG

SEQ ID NO: 19793 - protein, 7 aa, synthetic construct
GVSWHEA

SEQ ID NO: 19794 - protein, 7 aa, synthetic construct
NNRQYMD

SEQ ID NO: 19795 - protein, 7 aa, synthetic construct
SNSNYIM

SEQ ID NO: 19796 - protein, 7 aa, synthetic construct
RDIINPA

SEQ ID NO: 19797 - protein, 7 aa, synthetic construct
AVRVGTD

SEQ ID NO: 19798 - protein, 7 aa, synthetic construct
THQFSKS

SEQ ID NO: 19799 - protein, 7 aa, synthetic construct
NQSALSK

SEQ ID NO: 19800 - protein, 7 aa, synthetic construct
NHRNKEP

SEQ ID NO: 19801 - protein, 7 aa, synthetic construct
AQGNERR

SEQ ID NO: 19802 - protein, 7 aa, synthetic construct
SSQNPEK

SEQ ID NO: 19803 - protein, 7 aa, synthetic construct
AISRQHD

SEQ ID NO: 19804 - protein, 7 aa, synthetic construct
KLASTTW

SEQ ID NO: 19805 - protein, 7 aa, synthetic construct
PSPVFTG

SEQ ID NO: 19806 - protein, 7 aa, synthetic construct
TYNRGTS

SEQ ID NO: 19807 - protein, 7 aa, synthetic construct
KFPHQDW

SEQ ID NO: 19808 - protein, 7 aa, synthetic construct
VHGPDKP

SEQ ID NO: 19809 - protein, 7 aa, synthetic construct
IESNKFG

SEQ ID NO: 19810 - protein, 7 aa, synthetic construct
TGGQGLF

SEQ ID NO: 19811 - protein, 7 aa, synthetic construct
HQQDKHE

SEQ ID NO: 19812 - protein, 7 aa, synthetic construct
QWTDGRA

SEQ ID NO: 19813 - protein, 7 aa, synthetic construct
TWKPVDE

SEQ ID NO: 19814 - protein, 7 aa, synthetic construct
YEVMKNE

SEQ ID NO: 19815 - protein, 7 aa, synthetic construct
TIQHAPP

SEQ ID NO: 19816 - protein, 7 aa, synthetic construct
DYVAKTV

SEQ ID NO: 19817 - protein, 7 aa, synthetic construct
MWTGSNP

SEQ ID NO: 19818 - protein, 7 aa, synthetic construct
RSRVDVV

SEQ ID NO: 19819 - protein, 7 aa, synthetic construct
KSTNHLY

SEQ ID NO: 19820 - protein, 7 aa, synthetic construct
SYHASQP

SEQ ID NO: 19821 - protein, 7 aa, synthetic construct
GPMKQDI

SEQ ID NO: 19822 - protein, 7 aa, synthetic construct
DLPNTKS

SEQ ID NO: 19823 - protein, 7 aa, synthetic construct
KQGRATD

SEQ ID NO: 19824 - protein, 7 aa, synthetic construct
GENGSHV

SEQ ID NO: 19825 - protein, 7 aa, synthetic construct
KGNQVFN

SEQ ID NO: 19826 - protein, 7 aa, synthetic construct
EVRIARP

SEQ ID NO: 19827 - protein, 7 aa, synthetic construct
HPSRVVM

SEQ ID NO: 19828 - protein, 7 aa, synthetic construct
NQVKVMP

SEQ ID NO: 19829 - protein, 7 aa, synthetic construct
WERPIAN

SEQ ID NO: 19830 - protein, 7 aa, synthetic construct
MREKEQF

SEQ ID NO: 19831 - protein, 7 aa, synthetic construct
QKGYRVD

SEQ ID NO: 19832 - protein, 7 aa, synthetic construct
RPLHSDL

SEQ ID NO: 19833 - protein, 7 aa, synthetic construct
AKPVWND

SEQ ID NO: 19834 - protein, 7 aa, synthetic construct
GSKAFDS

SEQ ID NO: 19835 - protein, 7 aa, synthetic construct
GYTKMMH

SEQ ID NO: 19836 - protein, 7 aa, synthetic construct
VNGYKLG

SEQ ID NO: 19837 - protein, 7 aa, synthetic construct
TMGKEMG

SEQ ID NO: 19838 - protein, 7 aa, synthetic construct
MKTGNQL

SEQ ID NO: 19839 - protein, 7 aa, synthetic construct
HLKGMVG

SEQ ID NO: 19840 - protein, 7 aa, synthetic construct
TDMQRNM

SEQ ID NO: 19841 - protein, 7 aa, synthetic construct
HQYPGGD

SEQ ID NO: 19842 - protein, 7 aa, synthetic construct
SQHINIG

SEQ ID NO: 19843 - protein, 7 aa, synthetic construct
PTANPHE

SEQ ID NO: 19844 - protein, 7 aa, synthetic construct
QNPPDRW

SEQ ID NO: 19845 - protein, 7 aa, synthetic construct
HRIQAVG

SEQ ID NO: 19846 - protein, 7 aa, synthetic construct
MPPVSHE

SEQ ID NO: 19847 - protein, 7 aa, synthetic construct
TDGHQIG

SEQ ID NO: 19848 - protein, 7 aa, synthetic construct
FQKHSEQ

SEQ ID NO: 19849 - protein, 7 aa, synthetic construct
WNPQAKP

SEQ ID NO: 19850 - protein, 7 aa, synthetic construct
QKQFETP

SEQ ID NO: 19851 - protein, 7 aa, synthetic construct
YAKNGDW

SEQ ID NO: 19852 - protein, 7 aa, synthetic construct
QWDKEKG

SEQ ID NO: 19853 - protein, 7 aa, synthetic construct
FSRTSID

SEQ ID NO: 19854 - protein, 7 aa, synthetic construct
MFNAKEA

SEQ ID NO: 19855 - protein, 7 aa, synthetic construct
GTYAQTA

SEQ ID NO: 19856 - protein, 7 aa, synthetic construct
VQQYKEP

SEQ ID NO: 19857 - protein, 7 aa, synthetic construct
RVKDTTP

SEQ ID NO: 19858 - protein, 7 aa, synthetic construct
AKIHSQV

SEQ ID NO: 19859 - protein, 7 aa, synthetic construct
SKNGHKE

SEQ ID NO: 19860 - protein, 7 aa, synthetic construct
TYRPQHA

SEQ ID NO: 19861 - protein, 7 aa, synthetic construct
VEKANRN

SEQ ID NO: 19862 - protein, 7 aa, synthetic construct
ATHQPQF

SEQ ID NO: 19863 - protein, 7 aa, synthetic construct
TKSYAPE

SEQ ID NO: 19864 - protein, 7 aa, synthetic construct
CRSQCVQ

SEQ ID NO: 19865 - protein, 7 aa, synthetic construct
AYNKLVP

SEQ ID NO: 19866 - protein, 7 aa, synthetic construct
LGGVNGD

SEQ ID NO: 19867 - protein, 7 aa, synthetic construct
SPYQKQQ

SEQ ID NO: 19868 - protein, 7 aa, synthetic construct
LIGFQNG

SEQ ID NO: 19869 - protein, 7 aa, synthetic construct
RVPLTTI

SEQ ID NO: 19870 - protein, 7 aa, synthetic construct
SRGGHIV

SEQ ID NO: 19871 - protein, 7 aa, synthetic construct
NMFAQTP

SEQ ID NO: 19872 - protein, 7 aa, synthetic construct
GTPSLMK

SEQ ID NO: 19873 - protein, 7 aa, synthetic construct
GPKYEAH

SEQ ID NO: 19874 - protein, 7 aa, synthetic construct
SMQKTYS

SEQ ID NO: 19875 - protein, 7 aa, synthetic construct
QDRKFGV

SEQ ID NO: 19876 - protein, 7 aa, synthetic construct
VMKFEGA

SEQ ID NO: 19877 - protein, 7 aa, synthetic construct
ENVNKSD

SEQ ID NO: 19878 - protein, 7 aa, synthetic construct
KHSAVYT

SEQ ID NO: 19879 - protein, 7 aa, synthetic construct
IKLPMGN

SEQ ID NO: 19880 - protein, 7 aa, synthetic construct
LKMPHAQ

SEQ ID NO: 19881 - protein, 7 aa, synthetic construct
TPGKYAH

SEQ ID NO: 19882 - protein, 7 aa, synthetic construct
YNGRPVA

SEQ ID NO: 19883 - protein, 7 aa, synthetic construct
KTNDIQK

SEQ ID NO: 19884 - protein, 7 aa, synthetic construct
QNLRHAP

SEQ ID NO: 19885 - protein, 7 aa, synthetic construct
LNKHGIS

SEQ ID NO: 19886 - protein, 7 aa, synthetic construct
FQSVMKD

SEQ ID NO: 19887 - protein, 7 aa, synthetic construct
GEQMQRA

SEQ ID NO: 19888 - protein, 7 aa, synthetic construct
RNNNIIE

SEQ ID NO: 19889 - protein, 7 aa, synthetic construct
DMGQKLQ

SEQ ID NO: 19890 - protein, 7 aa, synthetic construct
TLQRHQQ

SEQ ID NO: 19891 - protein, 7 aa, synthetic construct
LLDMGSS

SEQ ID NO: 19892 - protein, 7 aa, synthetic construct
DKKEMFK

SEQ ID NO: 19893 - protein, 7 aa, synthetic construct
KSEWTSG

SEQ ID NO: 19894 - protein, 7 aa, synthetic construct
GSGGYEL

SEQ ID NO: 19895 - protein, 7 aa, synthetic construct
KVERSFN

SEQ ID NO: 19896 - protein, 7 aa, synthetic construct
IPKTFSE

SEQ ID NO: 19897 - protein, 7 aa, synthetic construct
RGHNTEY

SEQ ID NO: 19898 - protein, 7 aa, synthetic construct
PSRQLIP

SEQ ID NO: 19899 - protein, 7 aa, synthetic construct
SDRMRNV

SEQ ID NO: 19900 - protein, 7 aa, synthetic construct
SVQQHFE

SEQ ID NO: 19901 - protein, 7 aa, synthetic construct
KDGTHYT

SEQ ID NO: 19902 - protein, 7 aa, synthetic construct
QMPPTSR

SEQ ID NO: 19903 - protein, 7 aa, synthetic construct
MFPRDAG

SEQ ID NO: 19904 - protein, 7 aa, synthetic construct
TGVNWKG

SEQ ID NO: 19905 - protein, 7 aa, synthetic construct
HIAKNER

SEQ ID NO: 19906 - protein, 7 aa, synthetic construct
TAPVHSG

SEQ ID NO: 19907 - protein, 7 aa, synthetic construct
TQKPAAI

SEQ ID NO: 19908 - protein, 7 aa, synthetic construct
YRHHPSE

SEQ ID NO: 19909 - protein, 7 aa, synthetic construct
ANPHLGG

SEQ ID NO: 19910 - protein, 7 aa, synthetic construct
GYKHSTP

SEQ ID NO: 19911 - protein, 7 aa, synthetic construct
LATAMYG

SEQ ID NO: 19912 - protein, 7 aa, synthetic construct
PPTGVRF

SEQ ID NO: 19913 - protein, 7 aa, synthetic construct
AMNPIAA

SEQ ID NO: 19914 - protein, 7 aa, synthetic construct
APQRNSQ

SEQ ID NO: 19915 - protein, 7 aa, synthetic construct
SRVGYPA

SEQ ID NO: 19916 - protein, 7 aa, synthetic construct
AVDKFTY

SEQ ID NO: 19917 - protein, 7 aa, synthetic construct
SQKPGFA

SEQ ID NO: 19918 - protein, 7 aa, synthetic construct
GFPLNSG

SEQ ID NO: 19919 - protein, 7 aa, synthetic construct
QTVSRQG

SEQ ID NO: 19920 - protein, 7 aa, synthetic construct
TGTTWTP

SEQ ID NO: 19921 - protein, 7 aa, synthetic construct
MGLNKKD

SEQ ID NO: 19922 - protein, 7 aa, synthetic construct
PHGTPPQ

SEQ ID NO: 19923 - protein, 7 aa, synthetic construct
HNTSKNA

SEQ ID NO: 19924 - protein, 7 aa, synthetic construct
HKDRRDQ

SEQ ID NO: 19925 - protein, 7 aa, synthetic construct
KDRSQEM

SEQ ID NO: 19926 - protein, 7 aa, synthetic construct
IVKTHQG

SEQ ID NO: 19927 - protein, 7 aa, synthetic construct
ASASFGK

SEQ ID NO: 19928 - protein, 7 aa, synthetic construct
KMGVQQA

SEQ ID NO: 19929 - protein, 7 aa, synthetic construct
STNAGNG

SEQ ID NO: 19930 - protein, 7 aa, synthetic construct
IIGFKTA

SEQ ID NO: 19931 - protein, 7 aa, synthetic construct
EPRSMPQ

SEQ ID NO: 19932 - protein, 7 aa, synthetic construct
YGRREFD

SEQ ID NO: 19933 - protein, 7 aa, synthetic construct
ASKHVTI

SEQ ID NO: 19934 - protein, 7 aa, synthetic construct
KDGYARQ

SEQ ID NO: 19935 - protein, 7 aa, synthetic construct
NIDGAQR

SEQ ID NO: 19936 - protein, 7 aa, synthetic construct
GPQGMLH

SEQ ID NO: 19937 - protein, 7 aa, synthetic construct
APNSSVS

SEQ ID NO: 19938 - protein, 7 aa, synthetic construct
SHAKYNI

SEQ ID NO: 19939 - protein, 7 aa, synthetic construct
TSVTSSS

SEQ ID NO: 19940 - protein, 7 aa, synthetic construct
SRNESPD

SEQ ID NO: 19941 - protein, 7 aa, synthetic construct
HKEFITT

SEQ ID NO: 19942 - protein, 7 aa, synthetic construct
MVQNKAV

SEQ ID NO: 19943 - protein, 7 aa, synthetic construct
NGTHIER

SEQ ID NO: 19944 - protein, 7 aa, synthetic construct
AMHINAL

SEQ ID NO: 19945 - protein, 7 aa, synthetic construct
HDSWKLE

SEQ ID NO: 19946 - protein, 7 aa, synthetic construct
QGSSSIR

SEQ ID NO: 19947 - protein, 7 aa, synthetic construct
RSQSGFI

SEQ ID NO: 19948 - protein, 7 aa, synthetic construct
SQNIQAT

SEQ ID NO: 19949 - protein, 7 aa, synthetic construct
ANTQHNL

SEQ ID NO: 19950 - protein, 7 aa, synthetic construct
QNQQTGR

SEQ ID NO: 19951 - protein, 7 aa, synthetic construct
MNVRQSY

SEQ ID NO: 19952 - protein, 7 aa, synthetic construct
TPDARLT

SEQ ID NO: 19953 - protein, 7 aa, synthetic construct
DGFAMGK

SEQ ID NO: 19954 - protein, 7 aa, synthetic construct
VRHDSDS

SEQ ID NO: 19955 - protein, 7 aa, synthetic construct
MRDQGVH

SEQ ID NO: 19956 - protein, 7 aa, synthetic construct
GGKQQDV

SEQ ID NO: 19957 - protein, 7 aa, synthetic construct
EYKIRTE

SEQ ID NO: 19958 - protein, 7 aa, synthetic construct
QQHREGH

SEQ ID NO: 19959 - protein, 7 aa, synthetic construct
FGLGVSH

SEQ ID NO: 19960 - protein, 7 aa, synthetic construct
IIGMQGH

SEQ ID NO: 19961 - protein, 7 aa, synthetic construct
MKQSLGE

SEQ ID NO: 19962 - protein, 7 aa, synthetic construct
QGKQLPG

SEQ ID NO: 19963 - protein, 7 aa, synthetic construct
LGVHEVA

SEQ ID NO: 19964 - protein, 7 aa, synthetic construct
PIYNRQA

SEQ ID NO: 19965 - protein, 7 aa, synthetic construct
RADQMHG

SEQ ID NO: 19966 - protein, 7 aa, synthetic construct
HQTKLYS

SEQ ID NO: 19967 - protein, 7 aa, synthetic construct
GFGVNRA

SEQ ID NO: 19968 - protein, 7 aa, synthetic construct
FGAYHVA

SEQ ID NO: 19969 - protein, 7 aa, synthetic construct
VPNIADR

SEQ ID NO: 19970 - protein, 7 aa, synthetic construct
KTQITTT

SEQ ID NO: 19971 - protein, 7 aa, synthetic construct
DNMQRMR

SEQ ID NO: 19972 - protein, 7 aa, synthetic construct
VHSMGLA

SEQ ID NO: 19973 - protein, 7 aa, synthetic construct
AEWKQAV

SEQ ID NO: 19974 - protein, 7 aa, synthetic construct
MKHTDDM

SEQ ID NO: 19975 - protein, 7 aa, synthetic construct
IHSNQTT

SEQ ID NO: 19976 - protein, 7 aa, synthetic construct
VSQFYKD

SEQ ID NO: 19977 - protein, 7 aa, synthetic construct
VRKVIMD

SEQ ID NO: 19978 - protein, 7 aa, synthetic construct
QKGPYGF

SEQ ID NO: 19979 - protein, 7 aa, synthetic construct
RLSQDLD

SEQ ID NO: 19980 - protein, 7 aa, synthetic construct
LRQNLKP

SEQ ID NO: 19981 - protein, 7 aa, synthetic construct
RDHATAF

SEQ ID NO: 19982 - protein, 7 aa, synthetic construct
VITRSGN

SEQ ID NO: 19983 - protein, 7 aa, synthetic construct
KWQNQQT

SEQ ID NO: 19984 - protein, 7 aa, synthetic construct
RHHNGDP

SEQ ID NO: 19985 - protein, 7 aa, synthetic construct
LQGMNAA

SEQ ID NO: 19986 - protein, 7 aa, synthetic construct
SSDRQKI

SEQ ID NO: 19987 - protein, 7 aa, synthetic construct
MRHNNEI

SEQ ID NO: 19988 - protein, 7 aa, synthetic construct
MQTSLHE

SEQ ID NO: 19989 - protein, 7 aa, synthetic construct
PKHMSLD

SEQ ID NO: 19990 - protein, 7 aa, synthetic construct
SKNAVQG

SEQ ID NO: 19991 - protein, 7 aa, synthetic construct
FFRVGEG

SEQ ID NO: 19992 - protein, 7 aa, synthetic construct
PKGHVES

SEQ ID NO: 19993 - protein, 7 aa, synthetic construct
NHSVNKT

SEQ ID NO: 19994 - protein, 7 aa, synthetic construct
RMQNGNQ

SEQ ID NO: 19995 - protein, 7 aa, synthetic construct
NVMEYSG

SEQ ID NO: 19996 - protein, 7 aa, synthetic construct
SAHGYNM

SEQ ID NO: 19997 - protein, 7 aa, synthetic construct
NRMSTAV

SEQ ID NO: 19998 - protein, 7 aa, synthetic construct
QAAAPKH

SEQ ID NO: 19999 - protein, 7 aa, synthetic construct
DRDQYRA

SEQ ID NO: 20000 - protein, 7 aa, synthetic construct
QKANEHS

SEQ ID NO: 20001 - protein, 7 aa, synthetic construct
RGPHLHP

SEQ ID NO: 20002 - protein, 7 aa, synthetic construct
MFQGQIA

SEQ ID NO: 20003 - protein, 7 aa, synthetic construct
TPHHIHG

SEQ ID NO: 20004 - protein, 7 aa, synthetic construct
ASTSFQG

SEQ ID NO: 20005 - protein, 7 aa, synthetic construct
GSHITNY

SEQ ID NO: 20006 - protein, 7 aa, synthetic construct
NKLLPNM

SEQ ID NO: 20007 - protein, 7 aa, synthetic construct
GHPTIKN

SEQ ID NO: 20008 - protein, 7 aa, synthetic construct
NYDLEFI

SEQ ID NO: 20009 - protein, 7 aa, synthetic construct
KDNQHSN

SEQ ID NO: 20010 - protein, 7 aa, synthetic construct
VKSHYPM

SEQ ID NO: 20011 - protein, 7 aa, synthetic construct
LPVHHNV

SEQ ID NO: 20012 - protein, 7 aa, synthetic construct
PRQQFGA

SEQ ID NO: 20013 - protein, 7 aa, synthetic construct
YEDKKQH

SEQ ID NO: 20014 - protein, 7 aa, synthetic construct
QNRANNG

SEQ ID NO: 20015 - protein, 7 aa, synthetic construct
NPTITGK

SEQ ID NO: 20016 - protein, 7 aa, synthetic construct
QMGFRME

SEQ ID NO: 20017 - protein, 7 aa, synthetic construct
HSQDVKQ

SEQ ID NO: 20018 - protein, 7 aa, synthetic construct
QPHIGTV

SEQ ID NO: 20019 - protein, 7 aa, synthetic construct
FQDIRTQ

SEQ ID NO: 20020 - protein, 7 aa, synthetic construct
QSREMPI

SEQ ID NO: 20021 - protein, 7 aa, synthetic construct
NDGKKPN

SEQ ID NO: 20022 - protein, 7 aa, synthetic construct
ARAMVQD

SEQ ID NO: 20023 - protein, 7 aa, synthetic construct
WPKQFEG

SEQ ID NO: 20024 - protein, 7 aa, synthetic construct
DPAGVRL

SEQ ID NO: 20025 - protein, 7 aa, synthetic construct
LKNDSNH

SEQ ID NO: 20026 - protein, 7 aa, synthetic construct
QNHFVAE

SEQ ID NO: 20027 - protein, 7 aa, synthetic construct
PQTQKNF

SEQ ID NO: 20028 - protein, 7 aa, synthetic construct
HESRIQQ

SEQ ID NO: 20029 - protein, 7 aa, synthetic construct
NSYNVVS

SEQ ID NO: 20030 - protein, 7 aa, synthetic construct
NRGQIVG

SEQ ID NO: 20031 - protein, 7 aa, synthetic construct
IKPYQTM

SEQ ID NO: 20032 - protein, 7 aa, synthetic construct
KTALSYD

SEQ ID NO: 20033 - protein, 7 aa, synthetic construct
QSAHANI

SEQ ID NO: 20034 - protein, 7 aa, synthetic construct
TIQGRQL

SEQ ID NO: 20035 - protein, 7 aa, synthetic construct
MMQPNDK

SEQ ID NO: 20036 - protein, 7 aa, synthetic construct
PAYHGAM

SEQ ID NO: 20037 - protein, 7 aa, synthetic construct
EREAPNW

SEQ ID NO: 20038 - protein, 7 aa, synthetic construct
VVGKIQW

SEQ ID NO: 20039 - protein, 7 aa, synthetic construct
KGSGIDH

SEQ ID NO: 20040 - protein, 7 aa, synthetic construct
HYQSKTA

SEQ ID NO: 20041 - protein, 7 aa, synthetic construct
PDGYHNI

SEQ ID NO: 20042 - protein, 7 aa, synthetic construct
SASNFNV

SEQ ID NO: 20043 - protein, 7 aa, synthetic construct
PNRMQPH

SEQ ID NO: 20044 - protein, 7 aa, synthetic construct
LGNQFSR

SEQ ID NO: 20045 - protein, 7 aa, synthetic construct
PALHQNV

SEQ ID NO: 20046 - protein, 7 aa, synthetic construct
PHRNRDE

SEQ ID NO: 20047 - protein, 7 aa, synthetic construct
KEARTPT

SEQ ID NO: 20048 - protein, 7 aa, synthetic construct
QHPNLSQ

SEQ ID NO: 20049 - protein, 7 aa, synthetic construct
MGTVVNN

SEQ ID NO: 20050 - protein, 7 aa, synthetic construct
TRMEHNE

SEQ ID NO: 20051 - protein, 7 aa, synthetic construct
HFKGNMP

SEQ ID NO: 20052 - protein, 7 aa, synthetic construct
MGRNDVV

SEQ ID NO: 20053 - protein, 7 aa, synthetic construct
QVEGKHQ

SEQ ID NO: 20054 - protein, 7 aa, synthetic construct
VNIGHQT

SEQ ID NO: 20055 - protein, 7 aa, synthetic construct
GAQRYDL

SEQ ID NO: 20056 - protein, 7 aa, synthetic construct
LKSHMPA

SEQ ID NO: 20057 - protein, 7 aa, synthetic construct
AGNQSNG

SEQ ID NO: 20058 - protein, 7 aa, synthetic construct
TNYIQDA

SEQ ID NO: 20059 - protein, 7 aa, synthetic construct
TRDESKN

SEQ ID NO: 20060 - protein, 7 aa, synthetic construct
NDRTPNN

SEQ ID NO: 20061 - protein, 7 aa, synthetic construct
EQAGPQD

SEQ ID NO: 20062 - protein, 7 aa, synthetic construct
SKATWEK

SEQ ID NO: 20063 - protein, 7 aa, synthetic construct
EFGGSRG

SEQ ID NO: 20064 - protein, 7 aa, synthetic construct
SKTAFPH

SEQ ID NO: 20065 - protein, 7 aa, synthetic construct
QHASIPG

SEQ ID NO: 20066 - protein, 7 aa, synthetic construct
WGGTTTM

SEQ ID NO: 20067 - protein, 7 aa, synthetic construct
TAGQSQG

SEQ ID NO: 20068 - protein, 7 aa, synthetic construct
HATHFPP

SEQ ID NO: 20069 - protein, 7 aa, synthetic construct
IPDSAYR

SEQ ID NO: 20070 - protein, 7 aa, synthetic construct
FGKNLAV

SEQ ID NO: 20071 - protein, 7 aa, synthetic construct
EWSANRG

SEQ ID NO: 20072 - protein, 7 aa, synthetic construct
QQFMGRD

SEQ ID NO: 20073 - protein, 7 aa, synthetic construct
REGVYAV

SEQ ID NO: 20074 - protein, 7 aa, synthetic construct
TVNTSRF

SEQ ID NO: 20075 - protein, 7 aa, synthetic construct
ADQIKIS

SEQ ID NO: 20076 - protein, 7 aa, synthetic construct
RSPSWNA

SEQ ID NO: 20077 - protein, 7 aa, synthetic construct
KRSNENV

SEQ ID NO: 20078 - protein, 7 aa, synthetic construct
KPINSFG

SEQ ID NO: 20079 - protein, 7 aa, synthetic construct
ATQRAVQ

SEQ ID NO: 20080 - protein, 7 aa, synthetic construct
WTGLQIA

SEQ ID NO: 20081 - protein, 7 aa, synthetic construct
PMTKPIQ

SEQ ID NO: 20082 - protein, 7 aa, synthetic construct
TMSQFNE

SEQ ID NO: 20083 - protein, 7 aa, synthetic construct
MISGPHS

SEQ ID NO: 20084 - protein, 7 aa, synthetic construct
RGMVGAA

SEQ ID NO: 20085 - protein, 7 aa, synthetic construct
VPSLERA

SEQ ID NO: 20086 - protein, 7 aa, synthetic construct
YMTMQNP

SEQ ID NO: 20087 - protein, 7 aa, synthetic construct
QPKAPDI

SEQ ID NO: 20088 - protein, 7 aa, synthetic construct
NYAYTQE

SEQ ID NO: 20089 - protein, 7 aa, synthetic construct
VAKLAQP

SEQ ID NO: 20090 - protein, 7 aa, synthetic construct
KSPDWMA

SEQ ID NO: 20091 - protein, 7 aa, synthetic construct
LKSAQHN

SEQ ID NO: 20092 - protein, 7 aa, synthetic construct
KILASPE

SEQ ID NO: 20093 - protein, 7 aa, synthetic construct
SEYRPQP

SEQ ID NO: 20094 - protein, 7 aa, synthetic construct
QRQADSN

SEQ ID NO: 20095 - protein, 7 aa, synthetic construct
FNNNRIV

SEQ ID NO: 20096 - protein, 7 aa, synthetic construct
QSERFMA

SEQ ID NO: 20097 - protein, 7 aa, synthetic construct
KAHDRAA

SEQ ID NO: 20098 - protein, 7 aa, synthetic construct
KRMGDLN

SEQ ID NO: 20099 - protein, 7 aa, synthetic construct
TNLSGTL

SEQ ID NO: 20100 - protein, 7 aa, synthetic construct
VGIIGAG

SEQ ID NO: 20101 - protein, 7 aa, synthetic construct
VPDITRA

SEQ ID NO: 20102 - protein, 7 aa, synthetic construct
PFGLKDP

SEQ ID NO: 20103 - protein, 7 aa, synthetic construct
TMSTKET

SEQ ID NO: 20104 - protein, 7 aa, synthetic construct
WMTGHEV

SEQ ID NO: 20105 - protein, 7 aa, synthetic construct
LARATYQ

SEQ ID NO: 20106 - protein, 7 aa, synthetic construct
SPSGENR

SEQ ID NO: 20107 - protein, 7 aa, synthetic construct
NRGDTLT

SEQ ID NO: 20108 - protein, 7 aa, synthetic construct
AQTRNPP

SEQ ID NO: 20109 - protein, 7 aa, synthetic construct
EKYTTSQ

SEQ ID NO: 20110 - protein, 7 aa, synthetic construct
SFGNSES

SEQ ID NO: 20111 - protein, 7 aa, synthetic construct
EMQQSKS

SEQ ID NO: 20112 - protein, 7 aa, synthetic construct
QSVSRGN

SEQ ID NO: 20113 - protein, 7 aa, synthetic construct
GPMPGRE

SEQ ID NO: 20114 - protein, 7 aa, synthetic construct
SSGLTIS

SEQ ID NO: 20115 - protein, 7 aa, synthetic construct
QLSMRTD

SEQ ID NO: 20116 - protein, 7 aa, synthetic construct
RDITRSF

SEQ ID NO: 20117 - protein, 7 aa, synthetic construct
TQTSAAY

SEQ ID NO: 20118 - protein, 7 aa, synthetic construct
KNDKTSY

SEQ ID NO: 20119 - protein, 7 aa, synthetic construct
MLGQGMD

SEQ ID NO: 20120 - protein, 7 aa, synthetic construct
ITPYSAD

SEQ ID NO: 20121 - protein, 7 aa, synthetic construct
THMRNNI

SEQ ID NO: 20122 - protein, 7 aa, synthetic construct
QIGMREP

SEQ ID NO: 20123 - protein, 7 aa, synthetic construct
GMRGEYP

SEQ ID NO: 20124 - protein, 7 aa, synthetic construct
YNNHYHA

SEQ ID NO: 20125 - protein, 7 aa, synthetic construct
VPKFRMD

SEQ ID NO: 20126 - protein, 7 aa, synthetic construct
TSNHAIK

SEQ ID NO: 20127 - protein, 7 aa, synthetic construct
LGPNPST

SEQ ID NO: 20128 - protein, 7 aa, synthetic construct
EPKHHDQ

SEQ ID NO: 20129 - protein, 7 aa, synthetic construct
PSGNTHH

SEQ ID NO: 20130 - protein, 7 aa, synthetic construct
YDKAKSQ

SEQ ID NO: 20131 - protein, 7 aa, synthetic construct
QPPNPSG

SEQ ID NO: 20132 - protein, 7 aa, synthetic construct
QGPKGET

SEQ ID NO: 20133 - protein, 7 aa, synthetic construct
VREQTMN

SEQ ID NO: 20134 - protein, 7 aa, synthetic construct
DDQLKHP

SEQ ID NO: 20135 - protein, 7 aa, synthetic construct
QKSAQVS

SEQ ID NO: 20136 - protein, 7 aa, synthetic construct
GQKGTQI

SEQ ID NO: 20137 - protein, 7 aa, synthetic construct
AKPKVDE

SEQ ID NO: 20138 - protein, 7 aa, synthetic construct
MQKNQNW

SEQ ID NO: 20139 - protein, 7 aa, synthetic construct
TIRFQNA

SEQ ID NO: 20140 - protein, 7 aa, synthetic construct
PHNAAKN

SEQ ID NO: 20141 - protein, 7 aa, synthetic construct
YSQNASK

SEQ ID NO: 20142 - protein, 7 aa, synthetic construct
SRTDYRM

SEQ ID NO: 20143 - protein, 7 aa, synthetic construct
QQGAHLG

SEQ ID NO: 20144 - protein, 7 aa, synthetic construct
SRPPITQ

SEQ ID NO: 20145 - protein, 7 aa, synthetic construct
KTTHATP

SEQ ID NO: 20146 - protein, 7 aa, synthetic construct
EPMRRPI

SEQ ID NO: 20147 - protein, 7 aa, synthetic construct
GNDRMDM

SEQ ID NO: 20148 - protein, 7 aa, synthetic construct
SQARYSG

SEQ ID NO: 20149 - protein, 7 aa, synthetic construct
TMNQMKF

SEQ ID NO: 20150 - protein, 7 aa, synthetic construct
YRPDRNQ

SEQ ID NO: 20151 - protein, 7 aa, synthetic construct
AMPFGEA

SEQ ID NO: 20152 - protein, 7 aa, synthetic construct
IKHQLKD

SEQ ID NO: 20153 - protein, 7 aa, synthetic construct
YGAAYGM

SEQ ID NO: 20154 - protein, 7 aa, synthetic construct
KTVQMNF

SEQ ID NO: 20155 - protein, 7 aa, synthetic construct
MMGAQHP

SEQ ID NO: 20156 - protein, 7 aa, synthetic construct
VDKMPSK

SEQ ID NO: 20157 - protein, 7 aa, synthetic construct
VQGIKVD

SEQ ID NO: 20158 - protein, 7 aa, synthetic construct
VRHEIEP

SEQ ID NO: 20159 - protein, 7 aa, synthetic construct
DQAKHYE

SEQ ID NO: 20160 - protein, 7 aa, synthetic construct
FYGPTDG

SEQ ID NO: 20161 - protein, 7 aa, synthetic construct
THGVLTP

SEQ ID NO: 20162 - protein, 7 aa, synthetic construct
RFDQALG

SEQ ID NO: 20163 - protein, 7 aa, synthetic construct
HGIAGKS

SEQ ID NO: 20164 - protein, 7 aa, synthetic construct
YRAALTD

SEQ ID NO: 20165 - protein, 7 aa, synthetic construct
FAAHMIG

SEQ ID NO: 20166 - protein, 7 aa, synthetic construct
SHQENSR

SEQ ID NO: 20167 - protein, 7 aa, synthetic construct
EKSQKVG

SEQ ID NO: 20168 - protein, 7 aa, synthetic construct
QMRPPEP

SEQ ID NO: 20169 - protein, 7 aa, synthetic construct
SRGAETS

SEQ ID NO: 20170 - protein, 7 aa, synthetic construct
DKAEWDK

SEQ ID NO: 20171 - protein, 7 aa, synthetic construct
GPQGAIR

SEQ ID NO: 20172 - protein, 7 aa, synthetic construct
TTQDRHA

SEQ ID NO: 20173 - protein, 7 aa, synthetic construct
ANQHVVK

SEQ ID NO: 20174 - protein, 7 aa, synthetic construct
KTIGGIV

SEQ ID NO: 20175 - protein, 7 aa, synthetic construct
YMASSQD

SEQ ID NO: 20176 - protein, 7 aa, synthetic construct
YQPKTER

SEQ ID NO: 20177 - protein, 7 aa, synthetic construct
LPAKNYE

SEQ ID NO: 20178 - protein, 7 aa, synthetic construct
NGRDHGD

SEQ ID NO: 20179 - protein, 7 aa, synthetic construct
EPRWSIE

SEQ ID NO: 20180 - protein, 7 aa, synthetic construct
HKERQMI

SEQ ID NO: 20181 - protein, 7 aa, synthetic construct
VPSERAM

SEQ ID NO: 20182 - protein, 7 aa, synthetic construct
AMVKDTR

SEQ ID NO: 20183 - protein, 7 aa, synthetic construct
IVREEKY

SEQ ID NO: 20184 - protein, 7 aa, synthetic construct
VSVNHRG

SEQ ID NO: 20185 - protein, 7 aa, synthetic construct
PQRHGVG

SEQ ID NO: 20186 - protein, 7 aa, synthetic construct
EQHRASD

SEQ ID NO: 20187 - protein, 7 aa, synthetic construct
ATEAMKQ

SEQ ID NO: 20188 - protein, 7 aa, synthetic construct
DNRIMNS

SEQ ID NO: 20189 - protein, 7 aa, synthetic construct
SKQSGNY

SEQ ID NO: 20190 - protein, 7 aa, synthetic construct
YHPQQQA

SEQ ID NO: 20191 - protein, 7 aa, synthetic construct
KTIGGEV

SEQ ID NO: 20192 - protein, 7 aa, synthetic construct
KNQRWEE

SEQ ID NO: 20193 - protein, 7 aa, synthetic construct
VFKKTMD

SEQ ID NO: 20194 - protein, 7 aa, synthetic construct
MMGAVQT

SEQ ID NO: 20195 - protein, 7 aa, synthetic construct
HQRNFTE

SEQ ID NO: 20196 - protein, 7 aa, synthetic construct
KRESSGH

SEQ ID NO: 20197 - protein, 7 aa, synthetic construct
GARYEDL

SEQ ID NO: 20198 - protein, 7 aa, synthetic construct
PKSPTPL

SEQ ID NO: 20199 - protein, 7 aa, synthetic construct
WSEGKKV

SEQ ID NO: 20200 - protein, 7 aa, synthetic construct
FPSNVGH

SEQ ID NO: 20201 - protein, 7 aa, synthetic construct
FYTTEGA

SEQ ID NO: 20202 - protein, 7 aa, synthetic construct
RLERSLE

SEQ ID NO: 20203 - protein, 7 aa, synthetic construct
AQNQHQP

SEQ ID NO: 20204 - protein, 7 aa, synthetic construct
NLRTVER

SEQ ID NO: 20205 - protein, 7 aa, synthetic construct
KPTGDGS

SEQ ID NO: 20206 - protein, 7 aa, synthetic construct
SVSERTM

SEQ ID NO: 20207 - protein, 7 aa, synthetic construct
TMSNQKP

SEQ ID NO: 20208 - protein, 7 aa, synthetic construct
NSKTIHF

SEQ ID NO: 20209 - protein, 7 aa, synthetic construct
TGAQAFG

SEQ ID NO: 20210 - protein, 7 aa, synthetic construct
KMYHREE

SEQ ID NO: 20211 - protein, 7 aa, synthetic construct
SNHHTSV

SEQ ID NO: 20212 - protein, 7 aa, synthetic construct
GNKVTQP

SEQ ID NO: 20213 - protein, 7 aa, synthetic construct
HPGAGAI

SEQ ID NO: 20214 - protein, 7 aa, synthetic construct
YQPWNKD

SEQ ID NO: 20215 - protein, 7 aa, synthetic construct
AKQTLGN

SEQ ID NO: 20216 - protein, 7 aa, synthetic construct
RGEWFHE

SEQ ID NO: 20217 - protein, 7 aa, synthetic construct
VKTGHHP

SEQ ID NO: 20218 - protein, 7 aa, synthetic construct
LHTHAPD

SEQ ID NO: 20219 - protein, 7 aa, synthetic construct
VTTASHN

SEQ ID NO: 20220 - protein, 7 aa, synthetic construct
QIGWESK

SEQ ID NO: 20221 - protein, 7 aa, synthetic construct
DPQVPKD

SEQ ID NO: 20222 - protein, 7 aa, synthetic construct
WHRMSLD

SEQ ID NO: 20223 - protein, 7 aa, synthetic construct
SHRAQLN

SEQ ID NO: 20224 - protein, 7 aa, synthetic construct
RHPPHIE

SEQ ID NO: 20225 - protein, 7 aa, synthetic construct
FRNGPLD

SEQ ID NO: 20226 - protein, 7 aa, synthetic construct
IHRNVDP

SEQ ID NO: 20227 - protein, 7 aa, synthetic construct
HQAQREI

SEQ ID NO: 20228 - protein, 7 aa, synthetic construct
EEKMRYS

SEQ ID NO: 20229 - protein, 7 aa, synthetic construct
YAPATQA

SEQ ID NO: 20230 - protein, 7 aa, synthetic construct
CKPCSDL

SEQ ID NO: 20231 - protein, 7 aa, synthetic construct
MGKLYID

SEQ ID NO: 20232 - protein, 7 aa, synthetic construct
IMHEKAN

SEQ ID NO: 20233 - protein, 7 aa, synthetic construct
LSLNIRA

SEQ ID NO: 20234 - protein, 7 aa, synthetic construct
RVMDLKS

SEQ ID NO: 20235 - protein, 7 aa, synthetic construct
GNIGVPK

SEQ ID NO: 20236 - protein, 7 aa, synthetic construct
RPNEKIW

SEQ ID NO: 20237 - protein, 7 aa, synthetic construct
SPYQAKS

SEQ ID NO: 20238 - protein, 7 aa, synthetic construct
RKVDIGH

SEQ ID NO: 20239 - protein, 7 aa, synthetic construct
ITQLSAA

SEQ ID NO: 20240 - protein, 7 aa, synthetic construct
MFKIREA

SEQ ID NO: 20241 - protein, 7 aa, synthetic construct
EKQQARA

SEQ ID NO: 20242 - protein, 7 aa, synthetic construct
KAGAPTF

SEQ ID NO: 20243 - protein, 7 aa, synthetic construct
NLAGTGQ

SEQ ID NO: 20244 - protein, 7 aa, synthetic construct
LHGVKYV

SEQ ID NO: 20245 - protein, 7 aa, synthetic construct
VQAKDQS

SEQ ID NO: 20246 - protein, 7 aa, synthetic construct
SIYVKNA

SEQ ID NO: 20247 - protein, 7 aa, synthetic construct
TFHITAS

SEQ ID NO: 20248 - protein, 7 aa, synthetic construct
QIHTNQL

SEQ ID NO: 20249 - protein, 7 aa, synthetic construct
FPGYVVA

SEQ ID NO: 20250 - protein, 7 aa, synthetic construct
FQPHPNA

SEQ ID NO: 20251 - protein, 7 aa, synthetic construct
REVKETF

SEQ ID NO: 20252 - protein, 7 aa, synthetic construct
ISHAFKA

SEQ ID NO: 20253 - protein, 7 aa, synthetic construct
QEAGRAY

SEQ ID NO: 20254 - protein, 7 aa, synthetic construct
AMRNPEP

SEQ ID NO: 20255 - protein, 7 aa, synthetic construct
MSNKVEN

SEQ ID NO: 20256 - protein, 7 aa, synthetic construct
SRVVIGE

SEQ ID NO: 20257 - protein, 7 aa, synthetic construct
MTQKMHA

SEQ ID NO: 20258 - protein, 7 aa, synthetic construct
ENNFAKP

SEQ ID NO: 20259 - protein, 7 aa, synthetic construct
NPHSTWS

SEQ ID NO: 20260 - protein, 7 aa, synthetic construct
VNITNLG

SEQ ID NO: 20261 - protein, 7 aa, synthetic construct
HSEHHNS

SEQ ID NO: 20262 - protein, 7 aa, synthetic construct
VGRGGEL

SEQ ID NO: 20263 - protein, 7 aa, synthetic construct
EGDWKKH

SEQ ID NO: 20264 - protein, 7 aa, synthetic construct
QPQLTQS

SEQ ID NO: 20265 - protein, 7 aa, synthetic construct
MAKGGTF

SEQ ID NO: 20266 - protein, 7 aa, synthetic construct
EPPPRVE

SEQ ID NO: 20267 - protein, 7 aa, synthetic construct
IENRTQL

SEQ ID NO: 20268 - protein, 7 aa, synthetic construct
DTMMLKP

SEQ ID NO: 20269 - protein, 7 aa, synthetic construct
AQQVKGG

SEQ ID NO: 20270 - protein, 7 aa, synthetic construct
FTQHAKM

SEQ ID NO: 20271 - protein, 7 aa, synthetic construct
AMVQNDM

SEQ ID NO: 20272 - protein, 7 aa, synthetic construct
HEKWDNG

SEQ ID NO: 20273 - protein, 7 aa, synthetic construct
LRTMPTE

SEQ ID NO: 20274 - protein, 7 aa, synthetic construct
GHPTTAG

SEQ ID NO: 20275 - protein, 7 aa, synthetic construct
DKRVPMH

SEQ ID NO: 20276 - protein, 7 aa, synthetic construct
DTPKKYQ

SEQ ID NO: 20277 - protein, 7 aa, synthetic construct
VPKFPQA

SEQ ID NO: 20278 - protein, 7 aa, synthetic construct
FDRDKAA

SEQ ID NO: 20279 - protein, 7 aa, synthetic construct
INRTALN

SEQ ID NO: 20280 - protein, 7 aa, synthetic construct
LEGAGIR

SEQ ID NO: 20281 - protein, 7 aa, synthetic construct
VMNRIGP

SEQ ID NO: 20282 - protein, 7 aa, synthetic construct
GAREMVN

SEQ ID NO: 20283 - protein, 7 aa, synthetic construct
NRQASGM

SEQ ID NO: 20284 - protein, 7 aa, synthetic construct
LRASHVQ

SEQ ID NO: 20285 - protein, 7 aa, synthetic construct
RVNAVQS

SEQ ID NO: 20286 - protein, 7 aa, synthetic construct
AHEHQQG

SEQ ID NO: 20287 - protein, 7 aa, synthetic construct
QGRNQEL

SEQ ID NO: 20288 - protein, 7 aa, synthetic construct
NAVQHPM

SEQ ID NO: 20289 - protein, 7 aa, synthetic construct
SKDPGVA

SEQ ID NO: 20290 - protein, 7 aa, synthetic construct
TSSKFEH

SEQ ID NO: 20291 - protein, 7 aa, synthetic construct
SYNPHHD

SEQ ID NO: 20292 - protein, 7 aa, synthetic construct
AEHGMHG

SEQ ID NO: 20293 - protein, 7 aa, synthetic construct
RDPFMNG

SEQ ID NO: 20294 - protein, 7 aa, synthetic construct
GFHSKLS

SEQ ID NO: 20295 - protein, 7 aa, synthetic construct
CNGQCLP

SEQ ID NO: 20296 - protein, 7 aa, synthetic construct
EKQQQAP

SEQ ID NO: 20297 - protein, 7 aa, synthetic construct
PKKLDVE

SEQ ID NO: 20298 - protein, 7 aa, synthetic construct
LPNVKVY

SEQ ID NO: 20299 - protein, 7 aa, synthetic construct
QHQMARV

SEQ ID NO: 20300 - protein, 7 aa, synthetic construct
NKHRMEF

SEQ ID NO: 20301 - protein, 7 aa, synthetic construct
VVNFGKN

SEQ ID NO: 20302 - protein, 7 aa, synthetic construct
MQNQFPN

SEQ ID NO: 20303 - protein, 7 aa, synthetic construct
KSQAEMG

SEQ ID NO: 20304 - protein, 7 aa, synthetic construct
GASKGHI

SEQ ID NO: 20305 - protein, 7 aa, synthetic construct
KYRPGTE

SEQ ID NO: 20306 - protein, 7 aa, synthetic construct
SRQHGPA

SEQ ID NO: 20307 - protein, 7 aa, synthetic construct
KLHAMEE

SEQ ID NO: 20308 - protein, 7 aa, synthetic construct
TKMGSAY

SEQ ID NO: 20309 - protein, 7 aa, synthetic construct
DVHFATP

SEQ ID NO: 20310 - protein, 7 aa, synthetic construct
AKKTEEV

SEQ ID NO: 20311 - protein, 7 aa, synthetic construct
ERENWAS

SEQ ID NO: 20312 - protein, 7 aa, synthetic construct
MPKENVL

SEQ ID NO: 20313 - protein, 7 aa, synthetic construct
YKHNVEL

SEQ ID NO: 20314 - protein, 7 aa, synthetic construct
HTSQRDT

SEQ ID NO: 20315 - protein, 7 aa, synthetic construct
RLAAHAV

SEQ ID NO: 20316 - protein, 7 aa, synthetic construct
QDRPTIY

SEQ ID NO: 20317 - protein, 7 aa, synthetic construct
KTGFHMD

SEQ ID NO: 20318 - protein, 7 aa, synthetic construct
MRADIEI

SEQ ID NO: 20319 - protein, 7 aa, synthetic construct
SSYTGMS

SEQ ID NO: 20320 - protein, 7 aa, synthetic construct
VVKNQTG

SEQ ID NO: 20321 - protein, 7 aa, synthetic construct
PRPGKLT

SEQ ID NO: 20322 - protein, 7 aa, synthetic construct
PKAIQTM

SEQ ID NO: 20323 - protein, 7 aa, synthetic construct
NGDYSPR

SEQ ID NO: 20324 - protein, 7 aa, synthetic construct
TMQDKHT

SEQ ID NO: 20325 - protein, 7 aa, synthetic construct
KHQNQNT

SEQ ID NO: 20326 - protein, 7 aa, synthetic construct
FASKPHP

SEQ ID NO: 20327 - protein, 7 aa, synthetic construct
NIGWEKP

SEQ ID NO: 20328 - protein, 7 aa, synthetic construct
IQNSMAK

SEQ ID NO: 20329 - protein, 7 aa, synthetic construct
TDWGGAA

SEQ ID NO: 20330 - protein, 7 aa, synthetic construct
DRHVMTN

SEQ ID NO: 20331 - protein, 7 aa, synthetic construct
AKNAVVN

SEQ ID NO: 20332 - protein, 7 aa, synthetic construct
YGVKPLT

SEQ ID NO: 20333 - protein, 7 aa, synthetic construct
EKPQIHS

SEQ ID NO: 20334 - protein, 7 aa, synthetic construct
TKTRIFE

SEQ ID NO: 20335 - protein, 7 aa, synthetic construct
NSMAVRD

SEQ ID NO: 20336 - protein, 7 aa, synthetic construct
ERDRAIM

SEQ ID NO: 20337 - protein, 7 aa, synthetic construct
MGNANQV

SEQ ID NO: 20338 - protein, 7 aa, synthetic construct
MSDRAQA

SEQ ID NO: 20339 - protein, 7 aa, synthetic construct
RIKTSDA

SEQ ID NO: 20340 - protein, 7 aa, synthetic construct
NFKIPTG

SEQ ID NO: 20341 - protein, 7 aa, synthetic construct
VKPGEKE

SEQ ID NO: 20342 - protein, 7 aa, synthetic construct
NRSGIPL

SEQ ID NO: 20343 - protein, 7 aa, synthetic construct
NDRQLPR

SEQ ID NO: 20344 - protein, 7 aa, synthetic construct
FAERGTH

SEQ ID NO: 20345 - protein, 7 aa, synthetic construct
MQVGHDA

SEQ ID NO: 20346 - protein, 7 aa, synthetic construct
HANPTHI

SEQ ID NO: 20347 - protein, 7 aa, synthetic construct
PIPGKNN

SEQ ID NO: 20348 - protein, 7 aa, synthetic construct
PGSTRPT

SEQ ID NO: 20349 - protein, 7 aa, synthetic construct
MKPMERV

SEQ ID NO: 20350 - protein, 7 aa, synthetic construct
SQHMQNR

SEQ ID NO: 20351 - protein, 7 aa, synthetic construct
HGKTMGH

SEQ ID NO: 20352 - protein, 7 aa, synthetic construct
VTHHGEF

SEQ ID NO: 20353 - protein, 7 aa, synthetic construct
YERLDPS

SEQ ID NO: 20354 - protein, 7 aa, synthetic construct
NGRPDGR

SEQ ID NO: 20355 - protein, 7 aa, synthetic construct
GMKYTVV

SEQ ID NO: 20356 - protein, 7 aa, synthetic construct
SRSIPHD

SEQ ID NO: 20357 - protein, 7 aa, synthetic construct
KVGGEMK

SEQ ID NO: 20358 - protein, 7 aa, synthetic construct
LNVSTNQ

SEQ ID NO: 20359 - protein, 7 aa, synthetic construct
GNRGVHP

SEQ ID NO: 20360 - protein, 7 aa, synthetic construct
RAQPQES

SEQ ID NO: 20361 - protein, 7 aa, synthetic construct
QKTLSVY

SEQ ID NO: 20362 - protein, 7 aa, synthetic construct
SSMNAIS

SEQ ID NO: 20363 - protein, 7 aa, synthetic construct
QVVAQAS

SEQ ID NO: 20364 - protein, 7 aa, synthetic construct
QEAYHGA

SEQ ID NO: 20365 - protein, 7 aa, synthetic construct
EAQRSML

SEQ ID NO: 20366 - protein, 7 aa, synthetic construct
RPNANFN

SEQ ID NO: 20367 - protein, 7 aa, synthetic construct
LIKPSYN

SEQ ID NO: 20368 - protein, 7 aa, synthetic construct
SEKGKVM

SEQ ID NO: 20369 - protein, 7 aa, synthetic construct
GTPNAHV

SEQ ID NO: 20370 - protein, 7 aa, synthetic construct
LAGGQFQ

SEQ ID NO: 20371 - protein, 7 aa, synthetic construct
AANSAHG

SEQ ID NO: 20372 - protein, 7 aa, synthetic construct
HNSMKGG

SEQ ID NO: 20373 - protein, 7 aa, synthetic construct
FFQDGSL

SEQ ID NO: 20374 - protein, 7 aa, synthetic construct
GRNQTEF

SEQ ID NO: 20375 - protein, 7 aa, synthetic construct
MNPNNKT

SEQ ID NO: 20376 - protein, 7 aa, synthetic construct
GTGGNLI

SEQ ID NO: 20377 - protein, 7 aa, synthetic construct
ERIPAGE

SEQ ID NO: 20378 - protein, 7 aa, synthetic construct
VRDRDVG

SEQ ID NO: 20379 - protein, 7 aa, synthetic construct
YQSTIPP

SEQ ID NO: 20380 - protein, 7 aa, synthetic construct
VLDSRMF

SEQ ID NO: 20381 - protein, 7 aa, synthetic construct
SELQKSN

SEQ ID NO: 20382 - protein, 7 aa, synthetic construct
KDGMGQN

SEQ ID NO: 20383 - protein, 7 aa, synthetic construct
MQTKGHD

SEQ ID NO: 20384 - protein, 7 aa, synthetic construct
GGMGRSL

SEQ ID NO: 20385 - protein, 7 aa, synthetic construct
SAGGYVA

SEQ ID NO: 20386 - protein, 7 aa, synthetic construct
RLHSDVV

SEQ ID NO: 20387 - protein, 7 aa, synthetic construct
KKVEHFD

SEQ ID NO: 20388 - protein, 7 aa, synthetic construct
QLHDAPK

SEQ ID NO: 20389 - protein, 7 aa, synthetic construct
PAVKQEY

SEQ ID NO: 20390 - protein, 7 aa, synthetic construct
GARQVVY

SEQ ID NO: 20391 - protein, 7 aa, synthetic construct
WGPMREH

SEQ ID NO: 20392 - protein, 7 aa, synthetic construct
KERMILA

SEQ ID NO: 20393 - protein, 7 aa, synthetic construct
DGKRMIM

SEQ ID NO: 20394 - protein, 7 aa, synthetic construct
GFGPATV

SEQ ID NO: 20395 - protein, 7 aa, synthetic construct
WHPTFRD

SEQ ID NO: 20396 - protein, 7 aa, synthetic construct
SPYRQQG

SEQ ID NO: 20397 - protein, 7 aa, synthetic construct
KPKVPDH

SEQ ID NO: 20398 - protein, 7 aa, synthetic construct
VGHDPQR

SEQ ID NO: 20399 - protein, 7 aa, synthetic construct
GIVRHVD

SEQ ID NO: 20400 - protein, 7 aa, synthetic construct
INQTTMH

SEQ ID NO: 20401 - protein, 7 aa, synthetic construct
PSKNAYP

SEQ ID NO: 20402 - protein, 7 aa, synthetic construct
AGHGQVS

SEQ ID NO: 20403 - protein, 7 aa, synthetic construct
YKGKEIH

SEQ ID NO: 20404 - protein, 7 aa, synthetic construct
KLDKANF

SEQ ID NO: 20405 - protein, 7 aa, synthetic construct
EGPKLQA

SEQ ID NO: 20406 - protein, 7 aa, synthetic construct
KVHPNIA

SEQ ID NO: 20407 - protein, 7 aa, synthetic construct
EAPKHFA

SEQ ID NO: 20408 - protein, 7 aa, synthetic construct
PLTRNDF

SEQ ID NO: 20409 - protein, 7 aa, synthetic construct
NPRNGQQ

SEQ ID NO: 20410 - protein, 7 aa, synthetic construct
DKIAYPG

SEQ ID NO: 20411 - protein, 7 aa, synthetic construct
PQFKNVL

SEQ ID NO: 20412 - protein, 7 aa, synthetic construct
HQHTASK

SEQ ID NO: 20413 - protein, 7 aa, synthetic construct
AIREIRS

SEQ ID NO: 20414 - protein, 7 aa, synthetic construct
YWDHERA

SEQ ID NO: 20415 - protein, 7 aa, synthetic construct
SGNGTTT

SEQ ID NO: 20416 - protein, 7 aa, synthetic construct
SKLQNYP

SEQ ID NO: 20417 - protein, 7 aa, synthetic construct
WDVHIRQ

SEQ ID NO: 20418 - protein, 7 aa, synthetic construct
WAGHTEQ

SEQ ID NO: 20419 - protein, 7 aa, synthetic construct
DGSMGIG

SEQ ID NO: 20420 - protein, 7 aa, synthetic construct
DAIHRDH

SEQ ID NO: 20421 - protein, 7 aa, synthetic construct
PDVGAKK

SEQ ID NO: 20422 - protein, 7 aa, synthetic construct
RNMESNR

SEQ ID NO: 20423 - protein, 7 aa, synthetic construct
EKYGEKG

SEQ ID NO: 20424 - protein, 7 aa, synthetic construct
KMNIHYE

SEQ ID NO: 20425 - protein, 7 aa, synthetic construct
WSPHGQS

SEQ ID NO: 20426 - protein, 7 aa, synthetic construct
QERMANV

SEQ ID NO: 20427 - protein, 7 aa, synthetic construct
YNGRWAD

SEQ ID NO: 20428 - protein, 7 aa, synthetic construct
QVSYNQV

SEQ ID NO: 20429 - protein, 7 aa, synthetic construct
LPYDSPN

SEQ ID NO: 20430 - protein, 7 aa, synthetic construct
DSRHTIT

SEQ ID NO: 20431 - protein, 7 aa, synthetic construct
KIPKQVE

SEQ ID NO: 20432 - protein, 7 aa, synthetic construct
HHKEGAG

SEQ ID NO: 20433 - protein, 7 aa, synthetic construct
YNMNHET

SEQ ID NO: 20434 - protein, 7 aa, synthetic construct
FHTGGQT

SEQ ID NO: 20435 - protein, 7 aa, synthetic construct
YIGPSNE

SEQ ID NO: 20436 - protein, 7 aa, synthetic construct
IFPTGHA

SEQ ID NO: 20437 - protein, 7 aa, synthetic construct
KFAIQSS

SEQ ID NO: 20438 - protein, 7 aa, synthetic construct
NNVTKTE

SEQ ID NO: 20439 - protein, 7 aa, synthetic construct
KSKVENG

SEQ ID NO: 20440 - protein, 7 aa, synthetic construct
IRGTKQD

SEQ ID NO: 20441 - protein, 7 aa, synthetic construct
QTGHGVG

SEQ ID NO: 20442 - protein, 7 aa, synthetic construct
LKMNVGS

SEQ ID NO: 20443 - protein, 7 aa, synthetic construct
KAATDPS

SEQ ID NO: 20444 - protein, 7 aa, synthetic construct
YPGSQSF

SEQ ID NO: 20445 - protein, 7 aa, synthetic construct
DSKYYKP

SEQ ID NO: 20446 - protein, 7 aa, synthetic construct
GNAHMAW

SEQ ID NO: 20447 - protein, 7 aa, synthetic construct
KNPPTTH

SEQ ID NO: 20448 - protein, 7 aa, synthetic construct
QNEKKDN

SEQ ID NO: 20449 - protein, 7 aa, synthetic construct
YAKDGVH

SEQ ID NO: 20450 - protein, 7 aa, synthetic construct
QPTPPTM

SEQ ID NO: 20451 - protein, 7 aa, synthetic construct
NSHAVHG

SEQ ID NO: 20452 - protein, 7 aa, synthetic construct
ADTFSPR

SEQ ID NO: 20453 - protein, 7 aa, synthetic construct
PHMTDGS

SEQ ID NO: 20454 - protein, 7 aa, synthetic construct
MKQASEG

SEQ ID NO: 20455 - protein, 7 aa, synthetic construct
WSHRSQD

SEQ ID NO: 20456 - protein, 7 aa, synthetic construct
RDRGPID

SEQ ID NO: 20457 - protein, 7 aa, synthetic construct
RSSDTER

SEQ ID NO: 20458 - protein, 7 aa, synthetic construct
GDQVQKQ

SEQ ID NO: 20459 - protein, 7 aa, synthetic construct
DPGSQRQ

SEQ ID NO: 20460 - protein, 7 aa, synthetic construct
GGHGNMK

SEQ ID NO: 20461 - protein, 7 aa, synthetic construct
HNPKTDL

SEQ ID NO: 20462 - protein, 7 aa, synthetic construct
AHNFVKI

SEQ ID NO: 20463 - protein, 7 aa, synthetic construct
TYSGMHE

SEQ ID NO: 20464 - protein, 7 aa, synthetic construct
AIMVGGK

SEQ ID NO: 20465 - protein, 7 aa, synthetic construct
QMGTMIV

SEQ ID NO: 20466 - protein, 7 aa, synthetic construct
KSVQEQG

SEQ ID NO: 20467 - protein, 7 aa, synthetic construct
WANSNTQ

SEQ ID NO: 20468 - protein, 7 aa, synthetic construct
LKLASMG

SEQ ID NO: 20469 - protein, 7 aa, synthetic construct
FLSGSDI

SEQ ID NO: 20470 - protein, 7 aa, synthetic construct
TVADRMA

SEQ ID NO: 20471 - protein, 7 aa, synthetic construct
GLSSKSM

SEQ ID NO: 20472 - protein, 7 aa, synthetic construct
FHHDPAS

SEQ ID NO: 20473 - protein, 7 aa, synthetic construct
RSTYYKE

SEQ ID NO: 20474 - protein, 7 aa, synthetic construct
PRNDIRI

SEQ ID NO: 20475 - protein, 7 aa, synthetic construct
TEGAWVA

SEQ ID NO: 20476 - protein, 7 aa, synthetic construct
PSWHNGE

SEQ ID NO: 20477 - protein, 7 aa, synthetic construct
HGNSRVL

SEQ ID NO: 20478 - protein, 7 aa, synthetic construct
IKQDAVY

SEQ ID NO: 20479 - protein, 7 aa, synthetic construct
LQKIQPF

SEQ ID NO: 20480 - protein, 7 aa, synthetic construct
PRHINGN

SEQ ID NO: 20481 - protein, 7 aa, synthetic construct
YREGNPG

SEQ ID NO: 20482 - protein, 7 aa, synthetic construct
TMYRTAS

SEQ ID NO: 20483 - protein, 7 aa, synthetic construct
NMKQTDS

SEQ ID NO: 20484 - protein, 7 aa, synthetic construct
SYAIGRN

SEQ ID NO: 20485 - protein, 7 aa, synthetic construct
NKTHYST

SEQ ID NO: 20486 - protein, 7 aa, synthetic construct
NTANSKP

SEQ ID NO: 20487 - protein, 7 aa, synthetic construct
SPATLYP

SEQ ID NO: 20488 - protein, 7 aa, synthetic construct
NLSMREG

SEQ ID NO: 20489 - protein, 7 aa, synthetic construct
TEVHRQN

SEQ ID NO: 20490 - protein, 7 aa, synthetic construct
EKTMVNG

SEQ ID NO: 20491 - protein, 7 aa, synthetic construct
LQGPGQM

SEQ ID NO: 20492 - protein, 7 aa, synthetic construct
QKHELPI

SEQ ID NO: 20493 - protein, 7 aa, synthetic construct
NMRNNIH

SEQ ID NO: 20494 - protein, 7 aa, synthetic construct
KVPDQLE

SEQ ID NO: 20495 - protein, 7 aa, synthetic construct
DMRLADL

SEQ ID NO: 20496 - protein, 7 aa, synthetic construct
IEGNKWY

SEQ ID NO: 20497 - protein, 7 aa, synthetic construct
IPNQQHP

SEQ ID NO: 20498 - protein, 7 aa, synthetic construct
KEEKTYM

SEQ ID NO: 20499 - protein, 7 aa, synthetic construct
KGMMLKD

SEQ ID NO: 20500 - protein, 7 aa, synthetic construct
LDGAIRG

SEQ ID NO: 20501 - protein, 7 aa, synthetic construct
RDSVPMM

SEQ ID NO: 20502 - protein, 7 aa, synthetic construct
KAASMGN

SEQ ID NO: 20503 - protein, 7 aa, synthetic construct
WKDRTQV

SEQ ID NO: 20504 - protein, 7 aa, synthetic construct
WNSSSPP

SEQ ID NO: 20505 - protein, 7 aa, synthetic construct
PQKDRAY

SEQ ID NO: 20506 - protein, 7 aa, synthetic construct
HEYATAR

SEQ ID NO: 20507 - protein, 7 aa, synthetic construct
MQQGKVF

SEQ ID NO: 20508 - protein, 7 aa, synthetic construct
HAHLMSG

SEQ ID NO: 20509 - protein, 7 aa, synthetic construct
KAINFMG

SEQ ID NO: 20510 - protein, 7 aa, synthetic construct
FKPQTFE

SEQ ID NO: 20511 - protein, 7 aa, synthetic construct
GAQRGNS

SEQ ID NO: 20512 - protein, 7 aa, synthetic construct
HREFQQD

SEQ ID NO: 20513 - protein, 7 aa, synthetic construct
EQYSTKM

SEQ ID NO: 20514 - protein, 7 aa, synthetic construct
SRFTMHE

SEQ ID NO: 20515 - protein, 7 aa, synthetic construct
RHEVYPS

SEQ ID NO: 20516 - protein, 7 aa, synthetic construct
HDRTMSQ

SEQ ID NO: 20517 - protein, 7 aa, synthetic construct
TDTSRGS

SEQ ID NO: 20518 - protein, 7 aa, synthetic construct
SHPDVPG

SEQ ID NO: 20519 - protein, 7 aa, synthetic construct
HSMINSP

SEQ ID NO: 20520 - protein, 7 aa, synthetic construct
SKNMTDV

SEQ ID NO: 20521 - protein, 7 aa, synthetic construct
PYKHNMA

SEQ ID NO: 20522 - protein, 7 aa, synthetic construct
IKGWTEK

SEQ ID NO: 20523 - protein, 7 aa, synthetic construct
HVNGMPM

SEQ ID NO: 20524 - protein, 7 aa, synthetic construct
THNSRAL

SEQ ID NO: 20525 - protein, 7 aa, synthetic construct
YLHASQP

SEQ ID NO: 20526 - protein, 7 aa, synthetic construct
DRFEGGK

SEQ ID NO: 20527 - protein, 7 aa, synthetic construct
NSQIHPA

SEQ ID NO: 20528 - protein, 7 aa, synthetic construct
WAGIGNS

SEQ ID NO: 20529 - protein, 7 aa, synthetic construct
VAAHPRQ

SEQ ID NO: 20530 - protein, 7 aa, synthetic construct
FNNMSPA

SEQ ID NO: 20531 - protein, 7 aa, synthetic construct
LPPRLEA

SEQ ID NO: 20532 - protein, 7 aa, synthetic construct
QRIGTEM

SEQ ID NO: 20533 - protein, 7 aa, synthetic construct
HTKNAHD

SEQ ID NO: 20534 - protein, 7 aa, synthetic construct
WQQQGTD

SEQ ID NO: 20535 - protein, 7 aa, synthetic construct
AQAQHSD

SEQ ID NO: 20536 - protein, 7 aa, synthetic construct
GSASMIM

SEQ ID NO: 20537 - protein, 7 aa, synthetic construct
INNLRFD

SEQ ID NO: 20538 - protein, 7 aa, synthetic construct
SQGRMTT

SEQ ID NO: 20539 - protein, 7 aa, synthetic construct
KEKFVNH

SEQ ID NO: 20540 - protein, 7 aa, synthetic construct
APMGHPY

SEQ ID NO: 20541 - protein, 7 aa, synthetic construct
ARMEGSP

SEQ ID NO: 20542 - protein, 7 aa, synthetic construct
EIQRAMS

SEQ ID NO: 20543 - protein, 7 aa, synthetic construct
RTDKDLT

SEQ ID NO: 20544 - protein, 7 aa, synthetic construct
HKHGDPY

SEQ ID NO: 20545 - protein, 7 aa, synthetic construct
GDNPRPT

SEQ ID NO: 20546 - protein, 7 aa, synthetic construct
FPGQHSR

SEQ ID NO: 20547 - protein, 7 aa, synthetic construct
FAASHRN

SEQ ID NO: 20548 - protein, 7 aa, synthetic construct
STGTNYG

SEQ ID NO: 20549 - protein, 7 aa, synthetic construct
MNHIKTA

SEQ ID NO: 20550 - protein, 7 aa, synthetic construct
RRDFMVD

SEQ ID NO: 20551 - protein, 7 aa, synthetic construct
KSQTEAG

SEQ ID NO: 20552 - protein, 7 aa, synthetic construct
NLPTKPD

SEQ ID NO: 20553 - protein, 7 aa, synthetic construct
KDAKWSS

SEQ ID NO: 20554 - protein, 7 aa, synthetic construct
VQFSKMS

SEQ ID NO: 20555 - protein, 7 aa, synthetic construct
LGPYDRT

SEQ ID NO: 20556 - protein, 7 aa, synthetic construct
PAAKTMG

SEQ ID NO: 20557 - protein, 7 aa, synthetic construct
IAANTYT

SEQ ID NO: 20558 - protein, 7 aa, synthetic construct
REAFVTD

SEQ ID NO: 20559 - protein, 7 aa, synthetic construct
VKNVVSD

SEQ ID NO: 20560 - protein, 7 aa, synthetic construct
WQKADDY

SEQ ID NO: 20561 - protein, 7 aa, synthetic construct
TASTAGY

SEQ ID NO: 20562 - protein, 7 aa, synthetic construct
WKPMQPI

SEQ ID NO: 20563 - protein, 7 aa, synthetic construct
INDRSDY

SEQ ID NO: 20564 - protein, 7 aa, synthetic construct
YHSAPER

SEQ ID NO: 20565 - protein, 7 aa, synthetic construct
RANQPFS

SEQ ID NO: 20566 - protein, 7 aa, synthetic construct
ITANDVP

SEQ ID NO: 20567 - protein, 7 aa, synthetic construct
SFYGPED

SEQ ID NO: 20568 - protein, 7 aa, synthetic construct
GYFKKEA

SEQ ID NO: 20569 - protein, 7 aa, synthetic construct
HDPTMKQ

SEQ ID NO: 20570 - protein, 7 aa, synthetic construct
GAQQKQT

SEQ ID NO: 20571 - protein, 7 aa, synthetic construct
RDNRTDA

SEQ ID NO: 20572 - protein, 7 aa, synthetic construct
KFVDDNR

SEQ ID NO: 20573 - protein, 7 aa, synthetic construct
IANDWKP

SEQ ID NO: 20574 - protein, 7 aa, synthetic construct
HESHKWE

SEQ ID NO: 20575 - protein, 7 aa, synthetic construct
KIGTPQF

SEQ ID NO: 20576 - protein, 7 aa, synthetic construct
YQPKQYN

SEQ ID NO: 20577 - protein, 7 aa, synthetic construct
FHKEKIG

SEQ ID NO: 20578 - protein, 7 aa, synthetic construct
RDKESPR

SEQ ID NO: 20579 - protein, 7 aa, synthetic construct
WPREKNE

SEQ ID NO: 20580 - protein, 7 aa, synthetic construct
HQSDPSP

SEQ ID NO: 20581 - protein, 7 aa, synthetic construct
FQHKLQP

SEQ ID NO: 20582 - protein, 7 aa, synthetic construct
NGRGVYH

SEQ ID NO: 20583 - protein, 7 aa, synthetic construct
PLKMDMR

SEQ ID NO: 20584 - protein, 7 aa, synthetic construct
IEGYRAN

SEQ ID NO: 20585 - protein, 7 aa, synthetic construct
KSGYPAY

SEQ ID NO: 20586 - protein, 7 aa, synthetic construct
EHSRNPS

SEQ ID NO: 20587 - protein, 7 aa, synthetic construct
INTDAGR

SEQ ID NO: 20588 - protein, 7 aa, synthetic construct
EKEHKVH

SEQ ID NO: 20589 - protein, 7 aa, synthetic construct
YAPVKAD

SEQ ID NO: 20590 - protein, 7 aa, synthetic construct
HNQNSPI

SEQ ID NO: 20591 - protein, 7 aa, synthetic construct
DATQIRE

SEQ ID NO: 20592 - protein, 7 aa, synthetic construct
QGSRNMF

SEQ ID NO: 20593 - protein, 7 aa, synthetic construct
AYRHDED

SEQ ID NO: 20594 - protein, 7 aa, synthetic construct
EVTHQQK

SEQ ID NO: 20595 - protein, 7 aa, synthetic construct
DQPQHKG

SEQ ID NO: 20596 - protein, 7 aa, synthetic construct
DIQKHGG

SEQ ID NO: 20597 - protein, 7 aa, synthetic construct
SLPGTES

SEQ ID NO: 20598 - protein, 7 aa, synthetic construct
SDPTKAT

SEQ ID NO: 20599 - protein, 7 aa, synthetic construct
SRFQPQP

SEQ ID NO: 20600 - protein, 7 aa, synthetic construct
HPLGGGE

SEQ ID NO: 20601 - protein, 7 aa, synthetic construct
TGVKVRD

SEQ ID NO: 20602 - protein, 7 aa, synthetic construct
TEQFKGD

SEQ ID NO: 20603 - protein, 7 aa, synthetic construct
KSASELG

SEQ ID NO: 20604 - protein, 7 aa, synthetic construct
MKMLKND

SEQ ID NO: 20605 - protein, 7 aa, synthetic construct
KTKGEPY

SEQ ID NO: 20606 - protein, 7 aa, synthetic construct
DMRRLEL

SEQ ID NO: 20607 - protein, 7 aa, synthetic construct
MRLPEYK

SEQ ID NO: 20608 - protein, 7 aa, synthetic construct
YTAKDQN

SEQ ID NO: 20609 - protein, 7 aa, synthetic construct
WRHNVVQ

SEQ ID NO: 20610 - protein, 7 aa, synthetic construct
MHGVHQT

SEQ ID NO: 20611 - protein, 7 aa, synthetic construct
VQSYMKA

SEQ ID NO: 20612 - protein, 7 aa, synthetic construct
QLGHPTD

SEQ ID NO: 20613 - protein, 7 aa, synthetic construct
NSRTNVL

SEQ ID NO: 20614 - protein, 7 aa, synthetic construct
WRVNNEH

SEQ ID NO: 20615 - protein, 7 aa, synthetic construct
YFSNQHE

SEQ ID NO: 20616 - protein, 7 aa, synthetic construct
MFAEGRP

SEQ ID NO: 20617 - protein, 7 aa, synthetic construct
NKSSTQG

SEQ ID NO: 20618 - protein, 7 aa, synthetic construct
RANDQFH

SEQ ID NO: 20619 - protein, 7 aa, synthetic construct
FERTSSS

SEQ ID NO: 20620 - protein, 7 aa, synthetic construct
TSTHRPE

SEQ ID NO: 20621 - protein, 7 aa, synthetic construct
FPGPGEM

SEQ ID NO: 20622 - protein, 7 aa, synthetic construct
INHPAHA

SEQ ID NO: 20623 - protein, 7 aa, synthetic construct
PTGPHPF

SEQ ID NO: 20624 - protein, 7 aa, synthetic construct
LRNAHLT

SEQ ID NO: 20625 - protein, 7 aa, synthetic construct
RYRITDE

SEQ ID NO: 20626 - protein, 7 aa, synthetic construct
KMMDLMG

SEQ ID NO: 20627 - protein, 7 aa, synthetic construct
NDRNSRM

SEQ ID NO: 20628 - protein, 7 aa, synthetic construct
SGSGVTM

SEQ ID NO: 20629 - protein, 7 aa, synthetic construct
NNRANSY

SEQ ID NO: 20630 - protein, 7 aa, synthetic construct
RSQVTTT

SEQ ID NO: 20631 - protein, 7 aa, synthetic construct
VQAMRTN

SEQ ID NO: 20632 - protein, 7 aa, synthetic construct
THGHVRG

SEQ ID NO: 20633 - protein, 7 aa, synthetic construct
QMNQEHR

SEQ ID NO: 20634 - protein, 7 aa, synthetic construct
NNDNGKR

SEQ ID NO: 20635 - protein, 7 aa, synthetic construct
QQHTTAM

SEQ ID NO: 20636 - protein, 7 aa, synthetic construct
DRLHPTT

SEQ ID NO: 20637 - protein, 7 aa, synthetic construct
VYRTLEE

SEQ ID NO: 20638 - protein, 7 aa, synthetic construct
VAMRTID

SEQ ID NO: 20639 - protein, 7 aa, synthetic construct
QGNNKWN

SEQ ID NO: 20640 - protein, 7 aa, synthetic construct
QTSGAAK

SEQ ID NO: 20641 - protein, 7 aa, synthetic construct
LSKAVET

SEQ ID NO: 20642 - protein, 7 aa, synthetic construct
DQDRKST

SEQ ID NO: 20643 - protein, 7 aa, synthetic construct
STYRQPE

SEQ ID NO: 20644 - protein, 7 aa, synthetic construct
RPLHVGG

SEQ ID NO: 20645 - protein, 7 aa, synthetic construct
QEFSSNH

SEQ ID NO: 20646 - protein, 7 aa, synthetic construct
KLQTVDT

SEQ ID NO: 20647 - protein, 7 aa, synthetic construct
RREAQYQ

SEQ ID NO: 20648 - protein, 7 aa, synthetic construct
SRHGMDW

SEQ ID NO: 20649 - protein, 7 aa, synthetic construct
PWNEKSL

SEQ ID NO: 20650 - protein, 7 aa, synthetic construct
IQHRNMP

SEQ ID NO: 20651 - protein, 7 aa, synthetic construct
MNNTILG

SEQ ID NO: 20652 - protein, 7 aa, synthetic construct
MGQQSIF

SEQ ID NO: 20653 - protein, 7 aa, synthetic construct
VDRHLGT

SEQ ID NO: 20654 - protein, 7 aa, synthetic construct
TSAVMAK

SEQ ID NO: 20655 - protein, 7 aa, synthetic construct
FGGTHMD

SEQ ID NO: 20656 - protein, 7 aa, synthetic construct
ANQIRHV

SEQ ID NO: 20657 - protein, 7 aa, synthetic construct
AVMHPSA

SEQ ID NO: 20658 - protein, 7 aa, synthetic construct
MQTTGVR

SEQ ID NO: 20659 - protein, 7 aa, synthetic construct
TARISLS

SEQ ID NO: 20660 - protein, 7 aa, synthetic construct
MPGLVTV

SEQ ID NO: 20661 - protein, 7 aa, synthetic construct
NWKMTPG

SEQ ID NO: 20662 - protein, 7 aa, synthetic construct
HMQGASW

SEQ ID NO: 20663 - protein, 7 aa, synthetic construct
YTRMSVQ

SEQ ID NO: 20664 - protein, 7 aa, synthetic construct
YYKVQDG

SEQ ID NO: 20665 - protein, 7 aa, synthetic construct
SDSKREP

SEQ ID NO: 20666 - protein, 7 aa, synthetic construct
VNIARIE

SEQ ID NO: 20667 - protein, 7 aa, synthetic construct
IIGKATL

SEQ ID NO: 20668 - protein, 7 aa, synthetic construct
YKPGPEY

SEQ ID NO: 20669 - protein, 7 aa, synthetic construct
VTGNFTG

SEQ ID NO: 20670 - protein, 7 aa, synthetic construct
NPLAGTV

SEQ ID NO: 20671 - protein, 7 aa, synthetic construct
RDFPHPT

SEQ ID NO: 20672 - protein, 7 aa, synthetic construct
EKVNTKL

SEQ ID NO: 20673 - protein, 7 aa, synthetic construct
YSDTQKH

SEQ ID NO: 20674 - protein, 7 aa, synthetic construct
FAGKREN

SEQ ID NO: 20675 - protein, 7 aa, synthetic construct
GERFRDL

SEQ ID NO: 20676 - protein, 7 aa, synthetic construct
ISVHTHD

SEQ ID NO: 20677 - protein, 7 aa, synthetic construct
SNYPDPT

SEQ ID NO: 20678 - protein, 7 aa, synthetic construct
YNPPRAQ

SEQ ID NO: 20679 - protein, 7 aa, synthetic construct
NERQVKS

SEQ ID NO: 20680 - protein, 7 aa, synthetic construct
QSQQMVA

SEQ ID NO: 20681 - protein, 7 aa, synthetic construct
LRGHFNE

SEQ ID NO: 20682 - protein, 7 aa, synthetic construct
TRAQLVT

SEQ ID NO: 20683 - protein, 7 aa, synthetic construct
QKFMDSI

SEQ ID NO: 20684 - protein, 7 aa, synthetic construct
RDGIIRP

SEQ ID NO: 20685 - protein, 7 aa, synthetic construct
FRNGGGH

SEQ ID NO: 20686 - protein, 7 aa, synthetic construct
RTYDNNS

SEQ ID NO: 20687 - protein, 7 aa, synthetic construct
IQGQIQT

SEQ ID NO: 20688 - protein, 7 aa, synthetic construct
YDMMTRG

SEQ ID NO: 20689 - protein, 7 aa, synthetic construct
RGATQMF

SEQ ID NO: 20690 - protein, 7 aa, synthetic construct
MYGNGPQ

SEQ ID NO: 20691 - protein, 7 aa, synthetic construct
GRNFVEQ

SEQ ID NO: 20692 - protein, 7 aa, synthetic construct
QPYAHIP

SEQ ID NO: 20693 - protein, 7 aa, synthetic construct
KGMGEMG

SEQ ID NO: 20694 - protein, 7 aa, synthetic construct
SIQNKQA

SEQ ID NO: 20695 - protein, 7 aa, synthetic construct
TTQTLRP

SEQ ID NO: 20696 - protein, 7 aa, synthetic construct
SHQQNSN

SEQ ID NO: 20697 - protein, 7 aa, synthetic construct
RTSYENI

SEQ ID NO: 20698 - protein, 7 aa, synthetic construct
WEYSDRP

SEQ ID NO: 20699 - protein, 7 aa, synthetic construct
SKDMGIW

SEQ ID NO: 20700 - protein, 7 aa, synthetic construct
KHKVPYE

SEQ ID NO: 20701 - protein, 7 aa, synthetic construct
HKLNIIG

SEQ ID NO: 20702 - protein, 7 aa, synthetic construct
KAHGPYV

SEQ ID NO: 20703 - protein, 7 aa, synthetic construct
MRPHDAM

SEQ ID NO: 20704 - protein, 7 aa, synthetic construct
NTRQQHA

SEQ ID NO: 20705 - protein, 7 aa, synthetic construct
HRDINMT

SEQ ID NO: 20706 - protein, 7 aa, synthetic construct
HQQPSTL

SEQ ID NO: 20707 - protein, 7 aa, synthetic construct
ERLDFSK

SEQ ID NO: 20708 - protein, 7 aa, synthetic construct
NEGGIRI

SEQ ID NO: 20709 - protein, 7 aa, synthetic construct
YDQGKMT

SEQ ID NO: 20710 - protein, 7 aa, synthetic construct
TKTHQDS

SEQ ID NO: 20711 - protein, 7 aa, synthetic construct
HQADAYV

SEQ ID NO: 20712 - protein, 7 aa, synthetic construct
QVAGKFQ

SEQ ID NO: 20713 - protein, 7 aa, synthetic construct
LFPGGMN

SEQ ID NO: 20714 - protein, 7 aa, synthetic construct
PSIRSTD

SEQ ID NO: 20715 - protein, 7 aa, synthetic construct
ANMKIGI

SEQ ID NO: 20716 - protein, 7 aa, synthetic construct
QSANMAF

SEQ ID NO: 20717 - protein, 7 aa, synthetic construct
EKGRQDW

SEQ ID NO: 20718 - protein, 7 aa, synthetic construct
AAHGYGM

SEQ ID NO: 20719 - protein, 7 aa, synthetic construct
AINGNAS

SEQ ID NO: 20720 - protein, 7 aa, synthetic construct
DIRSSHI

SEQ ID NO: 20721 - protein, 7 aa, synthetic construct
TQRLNGD

SEQ ID NO: 20722 - protein, 7 aa, synthetic construct
VKFHTEV

SEQ ID NO: 20723 - protein, 7 aa, synthetic construct
KLNYANI

SEQ ID NO: 20724 - protein, 7 aa, synthetic construct
IQAHHGV

SEQ ID NO: 20725 - protein, 7 aa, synthetic construct
LPQHVPS

SEQ ID NO: 20726 - protein, 7 aa, synthetic construct
HPRSIVE

SEQ ID NO: 20727 - protein, 7 aa, synthetic construct
PMGSNYM

SEQ ID NO: 20728 - protein, 7 aa, synthetic construct
SMLAQKS

SEQ ID NO: 20729 - protein, 7 aa, synthetic construct
ISVTFPG

SEQ ID NO: 20730 - protein, 7 aa, synthetic construct
SRPNVVY

SEQ ID NO: 20731 - protein, 7 aa, synthetic construct
NKESQTV

SEQ ID NO: 20732 - protein, 7 aa, synthetic construct
EWKQNNI

SEQ ID NO: 20733 - protein, 7 aa, synthetic construct
QKINGSN

SEQ ID NO: 20734 - protein, 7 aa, synthetic construct
MRDNFDS

SEQ ID NO: 20735 - protein, 7 aa, synthetic construct
KMGPLNV

SEQ ID NO: 20736 - protein, 7 aa, synthetic construct
RVANHQA

SEQ ID NO: 20737 - protein, 7 aa, synthetic construct
HTTATEV

SEQ ID NO: 20738 - protein, 7 aa, synthetic construct
QENPRMM

SEQ ID NO: 20739 - protein, 7 aa, synthetic construct
NEERMPG

SEQ ID NO: 20740 - protein, 7 aa, synthetic construct
YVSSKVA

SEQ ID NO: 20741 - protein, 7 aa, synthetic construct
RPIIHQD

SEQ ID NO: 20742 - protein, 7 aa, synthetic construct
LKGQEER

SEQ ID NO: 20743 - protein, 7 aa, synthetic construct
KAEQRGP

SEQ ID NO: 20744 - protein, 7 aa, synthetic construct
IKPNWDH

SEQ ID NO: 20745 - protein, 7 aa, synthetic construct
QVIKQTS

SEQ ID NO: 20746 - protein, 7 aa, synthetic construct
HGAFMHP

SEQ ID NO: 20747 - protein, 7 aa, synthetic construct
YIKQERE

SEQ ID NO: 20748 - protein, 7 aa, synthetic construct
HTGHQPA

SEQ ID NO: 20749 - protein, 7 aa, synthetic construct
RSWGKDE

SEQ ID NO: 20750 - protein, 7 aa, synthetic construct
IPAGDPG

SEQ ID NO: 20751 - protein, 7 aa, synthetic construct
EPPVRND

SEQ ID NO: 20752 - protein, 7 aa, synthetic construct
AATRTSV

SEQ ID NO: 20753 - protein, 7 aa, synthetic construct
HAHRIIE

SEQ ID NO: 20754 - protein, 7 aa, synthetic construct
YGRTADL

SEQ ID NO: 20755 - protein, 7 aa, synthetic construct
DMGRITT

SEQ ID NO: 20756 - protein, 7 aa, synthetic construct
TQGSFNV

SEQ ID NO: 20757 - protein, 7 aa, synthetic construct
AGHPDVR

SEQ ID NO: 20758 - protein, 7 aa, synthetic construct
IQYDPMD

SEQ ID NO: 20759 - protein, 7 aa, synthetic construct
ISRDKTN

SEQ ID NO: 20760 - protein, 7 aa, synthetic construct
EKSERST

SEQ ID NO: 20761 - protein, 7 aa, synthetic construct
IGRQYNG

SEQ ID NO: 20762 - protein, 7 aa, synthetic construct
ALGATNK

SEQ ID NO: 20763 - protein, 7 aa, synthetic construct
FANVQVT

SEQ ID NO: 20764 - protein, 7 aa, synthetic construct
SSRNDDI

SEQ ID NO: 20765 - protein, 7 aa, synthetic construct
LQGLSGM

SEQ ID NO: 20766 - protein, 7 aa, synthetic construct
SKVNLMM

SEQ ID NO: 20767 - protein, 7 aa, synthetic construct
THKSSAY

SEQ ID NO: 20768 - protein, 7 aa, synthetic construct
INAKHHI

SEQ ID NO: 20769 - protein, 7 aa, synthetic construct
MFGGQAV

SEQ ID NO: 20770 - protein, 7 aa, synthetic construct
HVPRGGE

SEQ ID NO: 20771 - protein, 7 aa, synthetic construct
QNQHILG

SEQ ID NO: 20772 - protein, 7 aa, synthetic construct
ALGMKES

SEQ ID NO: 20773 - protein, 7 aa, synthetic construct
WEGKNIK

SEQ ID NO: 20774 - protein, 7 aa, synthetic construct
RSAQYPE

SEQ ID NO: 20775 - protein, 7 aa, synthetic construct
KSHVQTI

SEQ ID NO: 20776 - protein, 7 aa, synthetic construct
DNQRADR

SEQ ID NO: 20777 - protein, 7 aa, synthetic construct
HKPQPEQ

SEQ ID NO: 20778 - protein, 7 aa, synthetic construct
ARTDEAK

SEQ ID NO: 20779 - protein, 7 aa, synthetic construct
QEKALPR

SEQ ID NO: 20780 - protein, 7 aa, synthetic construct
MYPDKSV

SEQ ID NO: 20781 - protein, 7 aa, synthetic construct
HHNNVRN

SEQ ID NO: 20782 - protein, 7 aa, synthetic construct
YFKQAPI

SEQ ID NO: 20783 - protein, 7 aa, synthetic construct
ALDKYKD

SEQ ID NO: 20784 - protein, 7 aa, synthetic construct
NSFGTPY

SEQ ID NO: 20785 - protein, 7 aa, synthetic construct
HGNHQGP

SEQ ID NO: 20786 - protein, 7 aa, synthetic construct
DKGEIPQ

SEQ ID NO: 20787 - protein, 7 aa, synthetic construct
DAQLGMM

SEQ ID NO: 20788 - protein, 7 aa, synthetic construct
IHHAAEQ

SEQ ID NO: 20789 - protein, 7 aa, synthetic construct
SSKSFNS

SEQ ID NO: 20790 - protein, 7 aa, synthetic construct
AISKGQW

SEQ ID NO: 20791 - protein, 7 aa, synthetic construct
KANFPQG

SEQ ID NO: 20792 - protein, 7 aa, synthetic construct
VKHMSTG

SEQ ID NO: 20793 - protein, 7 aa, synthetic construct
QKDKMHN

SEQ ID NO: 20794 - protein, 7 aa, synthetic construct
QSKVLPQ

SEQ ID NO: 20795 - protein, 7 aa, synthetic construct
QFTNIQA

SEQ ID NO: 20796 - protein, 7 aa, synthetic construct
ERKDAIY

SEQ ID NO: 20797 - protein, 7 aa, synthetic construct
WMNVGLP

SEQ ID NO: 20798 - protein, 7 aa, synthetic construct
STYVRVD

SEQ ID NO: 20799 - protein, 7 aa, synthetic construct
QGHQRVE

SEQ ID NO: 20800 - protein, 7 aa, synthetic construct
SDPNWGG

SEQ ID NO: 20801 - protein, 7 aa, synthetic construct
MSTHSTA

SEQ ID NO: 20802 - protein, 7 aa, synthetic construct
NQPPYAG

SEQ ID NO: 20803 - protein, 7 aa, synthetic construct
SDKHRYA

SEQ ID NO: 20804 - protein, 7 aa, synthetic construct
FFKPDKD

SEQ ID NO: 20805 - protein, 7 aa, synthetic construct
YNRWAKD

SEQ ID NO: 20806 - protein, 7 aa, synthetic construct
ERGHIET

SEQ ID NO: 20807 - protein, 7 aa, synthetic construct
RVSTSVN

SEQ ID NO: 20808 - protein, 7 aa, synthetic construct
TGRMQTT

SEQ ID NO: 20809 - protein, 7 aa, synthetic construct
KAGLTEQ

SEQ ID NO: 20810 - protein, 7 aa, synthetic construct
KTKMEVD

SEQ ID NO: 20811 - protein, 7 aa, synthetic construct
RITETGE

SEQ ID NO: 20812 - protein, 7 aa, synthetic construct
AINAKND

SEQ ID NO: 20813 - protein, 7 aa, synthetic construct
TGRTGER

SEQ ID NO: 20814 - protein, 7 aa, synthetic construct
RKDGLAM

SEQ ID NO: 20815 - protein, 7 aa, synthetic construct
MTSEQRK

SEQ ID NO: 20816 - protein, 7 aa, synthetic construct
GRIREAE

SEQ ID NO: 20817 - protein, 7 aa, synthetic construct
KMDYVSQ

SEQ ID NO: 20818 - protein, 7 aa, synthetic construct
VGGVTNV

SEQ ID NO: 20819 - protein, 7 aa, synthetic construct
LSHRNTG

SEQ ID NO: 20820 - protein, 7 aa, synthetic construct
MGTRVNV

SEQ ID NO: 20821 - protein, 7 aa, synthetic construct
SRDSSND

SEQ ID NO: 20822 - protein, 7 aa, synthetic construct
QNDMRNM

SEQ ID NO: 20823 - protein, 7 aa, synthetic construct
FMQKFQA

SEQ ID NO: 20824 - protein, 7 aa, synthetic construct
RQSQKPD

SEQ ID NO: 20825 - protein, 7 aa, synthetic construct
PMIRMGL

SEQ ID NO: 20826 - protein, 7 aa, synthetic construct
SAAKGEP

SEQ ID NO: 20827 - protein, 7 aa, synthetic construct
SSGMAGH

SEQ ID NO: 20828 - protein, 7 aa, synthetic construct
RAGVIVG

SEQ ID NO: 20829 - protein, 7 aa, synthetic construct
QHNQKSN

SEQ ID NO: 20830 - protein, 7 aa, synthetic construct
ILRNQNE

SEQ ID NO: 20831 - protein, 7 aa, synthetic construct
KVRDPPP

SEQ ID NO: 20832 - protein, 7 aa, synthetic construct
KAMSSPI

SEQ ID NO: 20833 - protein, 7 aa, synthetic construct
TYKQWPA

SEQ ID NO: 20834 - protein, 7 aa, synthetic construct
VHRGDTW

SEQ ID NO: 20835 - protein, 7 aa, synthetic construct
QGSNVIL

SEQ ID NO: 20836 - protein, 7 aa, synthetic construct
SATTMVS

SEQ ID NO: 20837 - protein, 7 aa, synthetic construct
RPDNIVA

SEQ ID NO: 20838 - protein, 7 aa, synthetic construct
GQKQDAA

SEQ ID NO: 20839 - protein, 7 aa, synthetic construct
NEARNSD

SEQ ID NO: 20840 - protein, 7 aa, synthetic construct
SMGGNNE

SEQ ID NO: 20841 - protein, 7 aa, synthetic construct
KPHEPAL

SEQ ID NO: 20842 - protein, 7 aa, synthetic construct
QTKEAAA

SEQ ID NO: 20843 - protein, 7 aa, synthetic construct
GIKQVDT

SEQ ID NO: 20844 - protein, 7 aa, synthetic construct
QNGNREN

SEQ ID NO: 20845 - protein, 7 aa, synthetic construct
NNQLQGH

SEQ ID NO: 20846 - protein, 7 aa, synthetic construct
EAGRNGD

SEQ ID NO: 20847 - protein, 7 aa, synthetic construct
IHKVTEY

SEQ ID NO: 20848 - protein, 7 aa, synthetic construct
PDRQFAA

SEQ ID NO: 20849 - protein, 7 aa, synthetic construct
TGKNEKP

SEQ ID NO: 20850 - protein, 7 aa, synthetic construct
GHVKIDT

SEQ ID NO: 20851 - protein, 7 aa, synthetic construct
TTMIRGE

SEQ ID NO: 20852 - protein, 7 aa, synthetic construct
TYHSKAE

SEQ ID NO: 20853 - protein, 7 aa, synthetic construct
QKHNYNP

SEQ ID NO: 20854 - protein, 7 aa, synthetic construct
AMPPHHG

SEQ ID NO: 20855 - protein, 7 aa, synthetic construct
NDGSRGV

SEQ ID NO: 20856 - protein, 7 aa, synthetic construct
WRDPKSQ

SEQ ID NO: 20857 - protein, 7 aa, synthetic construct
PVPKIIP

SEQ ID NO: 20858 - protein, 7 aa, synthetic construct
KRDTNAN

SEQ ID NO: 20859 - protein, 7 aa, synthetic construct
QTHALNS

SEQ ID NO: 20860 - protein, 7 aa, synthetic construct
NGQWEQA

SEQ ID NO: 20861 - protein, 7 aa, synthetic construct
NNEHMRS

SEQ ID NO: 20862 - protein, 7 aa, synthetic construct
YSQQARM

SEQ ID NO: 20863 - protein, 7 aa, synthetic construct
SGRDGKV

SEQ ID NO: 20864 - protein, 7 aa, synthetic construct
DLKWDTG

SEQ ID NO: 20865 - protein, 7 aa, synthetic construct
HQIQTDK

SEQ ID NO: 20866 - protein, 7 aa, synthetic construct
WGQGVDS

SEQ ID NO: 20867 - protein, 7 aa, synthetic construct
RWDQKPT

SEQ ID NO: 20868 - protein, 7 aa, synthetic construct
IQKHDRA

SEQ ID NO: 20869 - protein, 7 aa, synthetic construct
QTPGLPD

SEQ ID NO: 20870 - protein, 7 aa, synthetic construct
NSTTPDK

SEQ ID NO: 20871 - protein, 7 aa, synthetic construct
GVNGLPH

SEQ ID NO: 20872 - protein, 7 aa, synthetic construct
MAVNRND

SEQ ID NO: 20873 - protein, 7 aa, synthetic construct
GQILKNA

SEQ ID NO: 20874 - protein, 7 aa, synthetic construct
EANRNQY

SEQ ID NO: 20875 - protein, 7 aa, synthetic construct
RPDKLGY

SEQ ID NO: 20876 - protein, 7 aa, synthetic construct
KNVVNPV

SEQ ID NO: 20877 - protein, 7 aa, synthetic construct
GSRLGYA

SEQ ID NO: 20878 - protein, 7 aa, synthetic construct
IVRGDAL

SEQ ID NO: 20879 - protein, 7 aa, synthetic construct
TKSDVTH

SEQ ID NO: 20880 - protein, 7 aa, synthetic construct
SHQTHDG

SEQ ID NO: 20881 - protein, 7 aa, synthetic construct
LHSIHQA

SEQ ID NO: 20882 - protein, 7 aa, synthetic construct
MQKMNDG

SEQ ID NO: 20883 - protein, 7 aa, synthetic construct
GSLDKSP

SEQ ID NO: 20884 - protein, 7 aa, synthetic construct
QAHISPD

SEQ ID NO: 20885 - protein, 7 aa, synthetic construct
TEPNTRN

SEQ ID NO: 20886 - protein, 7 aa, synthetic construct
KMKLQLE

SEQ ID NO: 20887 - protein, 7 aa, synthetic construct
MTTNGSK

SEQ ID NO: 20888 - protein, 7 aa, synthetic construct
GLYGGQG

SEQ ID NO: 20889 - protein, 7 aa, synthetic construct
QIHKNAD

SEQ ID NO: 20890 - protein, 7 aa, synthetic construct
VGSNKPV

SEQ ID NO: 20891 - protein, 7 aa, synthetic construct
PVQANGF

SEQ ID NO: 20892 - protein, 7 aa, synthetic construct
KQDMREG

SEQ ID NO: 20893 - protein, 7 aa, synthetic construct
NMQWQEK

SEQ ID NO: 20894 - protein, 7 aa, synthetic construct
TRYMING

SEQ ID NO: 20895 - protein, 7 aa, synthetic construct
ATTPGYY

SEQ ID NO: 20896 - protein, 7 aa, synthetic construct
FGRATMQ

SEQ ID NO: 20897 - protein, 7 aa, synthetic construct
LSMRNGD

SEQ ID NO: 20898 - protein, 7 aa, synthetic construct
GRFETQK

SEQ ID NO: 20899 - protein, 7 aa, synthetic construct
DKSRDLY

SEQ ID NO: 20900 - protein, 7 aa, synthetic construct
GDQRHPT

SEQ ID NO: 20901 - protein, 7 aa, synthetic construct
GTFQGTM

SEQ ID NO: 20902 - protein, 7 aa, synthetic construct
QSNQFNR

SEQ ID NO: 20903 - protein, 7 aa, synthetic construct
AAKDSPA

SEQ ID NO: 20904 - protein, 7 aa, synthetic construct
LKSSAGL

SEQ ID NO: 20905 - protein, 7 aa, synthetic construct
QAPQQMP

SEQ ID NO: 20906 - protein, 7 aa, synthetic construct
TIGRGLN

SEQ ID NO: 20907 - protein, 7 aa, synthetic construct
QDRTYVN

SEQ ID NO: 20908 - protein, 7 aa, synthetic construct
QREDRAP

SEQ ID NO: 20909 - protein, 7 aa, synthetic construct
ANFKNEL

SEQ ID NO: 20910 - protein, 7 aa, synthetic construct
HHGLVAI

SEQ ID NO: 20911 - protein, 7 aa, synthetic construct
PKEIKPQ

SEQ ID NO: 20912 - protein, 7 aa, synthetic construct
FKMQQES

SEQ ID NO: 20913 - protein, 7 aa, synthetic construct
YKHENSP

SEQ ID NO: 20914 - protein, 7 aa, synthetic construct
NFKRVSD

SEQ ID NO: 20915 - protein, 7 aa, synthetic construct
LVHAEVS

SEQ ID NO: 20916 - protein, 7 aa, synthetic construct
VKGMTVH

SEQ ID NO: 20917 - protein, 7 aa, synthetic construct
VHGQKMG

SEQ ID NO: 20918 - protein, 7 aa, synthetic construct
HAQAMSM

SEQ ID NO: 20919 - protein, 7 aa, synthetic construct
YVARDGL

SEQ ID NO: 20920 - protein, 7 aa, synthetic construct
LDSASGI

SEQ ID NO: 20921 - protein, 7 aa, synthetic construct
DAALTQR

SEQ ID NO: 20922 - protein, 7 aa, synthetic construct
HGPANYP

SEQ ID NO: 20923 - protein, 7 aa, synthetic construct
EHPKKGP

SEQ ID NO: 20924 - protein, 7 aa, synthetic construct
LPEVVRM

SEQ ID NO: 20925 - protein, 7 aa, synthetic construct
AMRPSQS

SEQ ID NO: 20926 - protein, 7 aa, synthetic construct
TNEKFHG

SEQ ID NO: 20927 - protein, 7 aa, synthetic construct
LHEKTAR

SEQ ID NO: 20928 - protein, 7 aa, synthetic construct
MQNAGRQ

SEQ ID NO: 20929 - protein, 7 aa, synthetic construct
QTPQDKP

SEQ ID NO: 20930 - protein, 7 aa, synthetic construct
SMSTLNP

SEQ ID NO: 20931 - protein, 7 aa, synthetic construct
QPQPPDR

SEQ ID NO: 20932 - protein, 7 aa, synthetic construct
QPKMMNY

SEQ ID NO: 20933 - protein, 7 aa, synthetic construct
RDKIWAE

SEQ ID NO: 20934 - protein, 7 aa, synthetic construct
FSNVLSG

SEQ ID NO: 20935 - protein, 7 aa, synthetic construct
MGNYLNV

SEQ ID NO: 20936 - protein, 7 aa, synthetic construct
NGSQQQS

SEQ ID NO: 20937 - protein, 7 aa, synthetic construct
KTQGDWE

SEQ ID NO: 20938 - protein, 7 aa, synthetic construct
STFGDKY

SEQ ID NO: 20939 - protein, 7 aa, synthetic construct
YKTWDND

SEQ ID NO: 20940 - protein, 7 aa, synthetic construct
QGARMNL

SEQ ID NO: 20941 - protein, 7 aa, synthetic construct
WGIRTGA

SEQ ID NO: 20942 - protein, 7 aa, synthetic construct
VGRSFDA

SEQ ID NO: 20943 - protein, 7 aa, synthetic construct
RFNEAYH

SEQ ID NO: 20944 - protein, 7 aa, synthetic construct
SADRAHQ

SEQ ID NO: 20945 - protein, 7 aa, synthetic construct
YVKSAAI

SEQ ID NO: 20946 - protein, 7 aa, synthetic construct
NGDQRSK

SEQ ID NO: 20947 - protein, 7 aa, synthetic construct
AHQQQHI

SEQ ID NO: 20948 - protein, 7 aa, synthetic construct
TGQQAKY

SEQ ID NO: 20949 - protein, 7 aa, synthetic construct
VYQQEEK

SEQ ID NO: 20950 - protein, 7 aa, synthetic construct
AAGQAVF

SEQ ID NO: 20951 - protein, 7 aa, synthetic construct
QSNKGYS

SEQ ID NO: 20952 - protein, 7 aa, synthetic construct
MQTQRIA

SEQ ID NO: 20953 - protein, 7 aa, synthetic construct
KKPSQDS

SEQ ID NO: 20954 - protein, 7 aa, synthetic construct
NTSLPMD

SEQ ID NO: 20955 - protein, 7 aa, synthetic construct
NAQHANA

SEQ ID NO: 20956 - protein, 7 aa, synthetic construct
DKRDARI

SEQ ID NO: 20957 - protein, 7 aa, synthetic construct
MTHPDRN

SEQ ID NO: 20958 - protein, 7 aa, synthetic construct
FTPMHKQ

SEQ ID NO: 20959 - protein, 7 aa, synthetic construct
TVSHQYA

SEQ ID NO: 20960 - protein, 7 aa, synthetic construct
GMVGHEA

SEQ ID NO: 20961 - protein, 7 aa, synthetic construct
LERLGIE

SEQ ID NO: 20962 - protein, 7 aa, synthetic construct
YVQKSEW

SEQ ID NO: 20963 - protein, 7 aa, synthetic construct
KQDHAWE

SEQ ID NO: 20964 - protein, 7 aa, synthetic construct
NTSPNRD

SEQ ID NO: 20965 - protein, 7 aa, synthetic construct
YYGESRH

SEQ ID NO: 20966 - protein, 7 aa, synthetic construct
LSGRSFM

SEQ ID NO: 20967 - protein, 7 aa, synthetic construct
LSYPDQK

SEQ ID NO: 20968 - protein, 7 aa, synthetic construct
KNMGGYV

SEQ ID NO: 20969 - protein, 7 aa, synthetic construct
AFSPKPG

SEQ ID NO: 20970 - protein, 7 aa, synthetic construct
SALTTGE

SEQ ID NO: 20971 - protein, 7 aa, synthetic construct
THYPPKG

SEQ ID NO: 20972 - protein, 7 aa, synthetic construct
ADQVYPG

SEQ ID NO: 20973 - protein, 7 aa, synthetic construct
GRFLSEQ

SEQ ID NO: 20974 - protein, 7 aa, synthetic construct
GYNRPEV

SEQ ID NO: 20975 - protein, 7 aa, synthetic construct
IQAIKAA

SEQ ID NO: 20976 - protein, 7 aa, synthetic construct
MAPRGDF

SEQ ID NO: 20977 - protein, 7 aa, synthetic construct
IKPDQAF

SEQ ID NO: 20978 - protein, 7 aa, synthetic construct
NGIQRDQ

SEQ ID NO: 20979 - protein, 7 aa, synthetic construct
AEPFTKV

SEQ ID NO: 20980 - protein, 7 aa, synthetic construct
GSSRLQG

SEQ ID NO: 20981 - protein, 7 aa, synthetic construct
YNQTHAV

SEQ ID NO: 20982 - protein, 7 aa, synthetic construct
KYMHQAP

SEQ ID NO: 20983 - protein, 7 aa, synthetic construct
NHGKGDD

SEQ ID NO: 20984 - protein, 7 aa, synthetic construct
VDEKRTT

SEQ ID NO: 20985 - protein, 7 aa, synthetic construct
FNHNKEL

SEQ ID NO: 20986 - protein, 7 aa, synthetic construct
TESKNVL

SEQ ID NO: 20987 - protein, 7 aa, synthetic construct
TGHMGNM

SEQ ID NO: 20988 - protein, 7 aa, synthetic construct
ADKDNYK

SEQ ID NO: 20989 - protein, 7 aa, synthetic construct
DTKQYPR

SEQ ID NO: 20990 - protein, 7 aa, synthetic construct
PSFRVES

SEQ ID NO: 20991 - protein, 7 aa, synthetic construct
VHHKEQG

SEQ ID NO: 20992 - protein, 7 aa, synthetic construct
MTHTRFV

SEQ ID NO: 20993 - protein, 7 aa, synthetic construct
RRDPLIL

SEQ ID NO: 20994 - protein, 7 aa, synthetic construct
NGGVMLR

SEQ ID NO: 20995 - protein, 7 aa, synthetic construct
LGAGSQS

SEQ ID NO: 20996 - protein, 7 aa, synthetic construct
VGNNYMA

SEQ ID NO: 20997 - protein, 7 aa, synthetic construct
AYPREPQ

SEQ ID NO: 20998 - protein, 7 aa, synthetic construct
EERPQKY

SEQ ID NO: 20999 - protein, 7 aa, synthetic construct
SEGAAVG

SEQ ID NO: 21000 - protein, 7 aa, synthetic construct
FSGVRRD

SEQ ID NO: 21001 - protein, 7 aa, synthetic construct
SKDTYHA

SEQ ID NO: 21002 - protein, 7 aa, synthetic construct
DFHNHKG

SEQ ID NO: 21003 - protein, 7 aa, synthetic construct
HMNQKQV

SEQ ID NO: 21004 - protein, 7 aa, synthetic construct
HYTQPIA

SEQ ID NO: 21005 - protein, 7 aa, synthetic construct
KTENNIR

SEQ ID NO: 21006 - protein, 7 aa, synthetic construct
HSMTGGV

SEQ ID NO: 21007 - protein, 7 aa, synthetic construct
SNAIAQS

SEQ ID NO: 21008 - protein, 7 aa, synthetic construct
TLTHNGH

SEQ ID NO: 21009 - protein, 7 aa, synthetic construct
APPAAIG

SEQ ID NO: 21010 - protein, 7 aa, synthetic construct
ARGAVSL

SEQ ID NO: 21011 - protein, 7 aa, synthetic construct
VNYKIVA

SEQ ID NO: 21012 - protein, 7 aa, synthetic construct
YVGSREK

SEQ ID NO: 21013 - protein, 7 aa, synthetic construct
ASRPMAN

SEQ ID NO: 21014 - protein, 7 aa, synthetic construct
NRPIATD

SEQ ID NO: 21015 - protein, 7 aa, synthetic construct
HAISRST

SEQ ID NO: 21016 - protein, 7 aa, synthetic construct
HIQTGAN

SEQ ID NO: 21017 - protein, 7 aa, synthetic construct
DPAHNAA

SEQ ID NO: 21018 - protein, 7 aa, synthetic construct
NQKIQLL

SEQ ID NO: 21019 - protein, 7 aa, synthetic construct
QESNRHG

SEQ ID NO: 21020 - protein, 7 aa, synthetic construct
HPGSAES

SEQ ID NO: 21021 - protein, 7 aa, synthetic construct
RDRDGTS

SEQ ID NO: 21022 - protein, 7 aa, synthetic construct
QQSHRMA

SEQ ID NO: 21023 - protein, 7 aa, synthetic construct
ERGMIPV

SEQ ID NO: 21024 - protein, 7 aa, synthetic construct
QSTGELR

SEQ ID NO: 21025 - protein, 7 aa, synthetic construct
PNPPKAH

SEQ ID NO: 21026 - protein, 7 aa, synthetic construct
PHGMKMV

SEQ ID NO: 21027 - protein, 7 aa, synthetic construct
VESFNHG

SEQ ID NO: 21028 - protein, 7 aa, synthetic construct
TDRTHMK

SEQ ID NO: 21029 - protein, 7 aa, synthetic construct
QNNIGVR

SEQ ID NO: 21030 - protein, 7 aa, synthetic construct
PQHQTAL

SEQ ID NO: 21031 - protein, 7 aa, synthetic construct
SQTKAEN

SEQ ID NO: 21032 - protein, 7 aa, synthetic construct
TGVIRTS

SEQ ID NO: 21033 - protein, 7 aa, synthetic construct
ESGITKV

SEQ ID NO: 21034 - protein, 7 aa, synthetic construct
PPGSKVA

SEQ ID NO: 21035 - protein, 7 aa, synthetic construct
MTKQNDT

SEQ ID NO: 21036 - protein, 7 aa, synthetic construct
GRKASEI

SEQ ID NO: 21037 - protein, 7 aa, synthetic construct
WEHSTER

SEQ ID NO: 21038 - protein, 7 aa, synthetic construct
TVHVPYD

SEQ ID NO: 21039 - protein, 7 aa, synthetic construct
QHTSGGT

SEQ ID NO: 21040 - protein, 7 aa, synthetic construct
LGKIMTD

SEQ ID NO: 21041 - protein, 7 aa, synthetic construct
ENRANGA

SEQ ID NO: 21042 - protein, 7 aa, synthetic construct
KVGINKD

SEQ ID NO: 21043 - protein, 7 aa, synthetic construct
LHFAAGE

SEQ ID NO: 21044 - protein, 7 aa, synthetic construct
YGTNVHG

SEQ ID NO: 21045 - protein, 7 aa, synthetic construct
LSRTYAE

SEQ ID NO: 21046 - protein, 7 aa, synthetic construct
SLKMPIN

SEQ ID NO: 21047 - protein, 7 aa, synthetic construct
TRDLQLN

SEQ ID NO: 21048 - protein, 7 aa, synthetic construct
LPEHKYS

SEQ ID NO: 21049 - protein, 7 aa, synthetic construct
CKNDSIC

SEQ ID NO: 21050 - protein, 7 aa, synthetic construct
RIQSESF

SEQ ID NO: 21051 - protein, 7 aa, synthetic construct
ALLDMDL

SEQ ID NO: 21052 - protein, 7 aa, synthetic construct
MSSEMKQ

SEQ ID NO: 21053 - protein, 7 aa, synthetic construct
HNTNGSP

SEQ ID NO: 21054 - protein, 7 aa, synthetic construct
GYPHHDS

SEQ ID NO: 21055 - protein, 7 aa, synthetic construct
TFGREAQ

SEQ ID NO: 21056 - protein, 7 aa, synthetic construct
KDQRDSS

SEQ ID NO: 21057 - protein, 7 aa, synthetic construct
TGSTPLI

SEQ ID NO: 21058 - protein, 7 aa, synthetic construct
RQAGINH

SEQ ID NO: 21059 - protein, 7 aa, synthetic construct
GSIERYA

SEQ ID NO: 21060 - protein, 7 aa, synthetic construct
SHHVKGI

SEQ ID NO: 21061 - protein, 7 aa, synthetic construct
HPHSGGH

SEQ ID NO: 21062 - protein, 7 aa, synthetic construct
ISKASFH

SEQ ID NO: 21063 - protein, 7 aa, synthetic construct
EGPMSLG

SEQ ID NO: 21064 - protein, 7 aa, synthetic construct
GHTIQQF

SEQ ID NO: 21065 - protein, 7 aa, synthetic construct
KISLGHL

SEQ ID NO: 21066 - protein, 7 aa, synthetic construct
DRPNLIP

SEQ ID NO: 21067 - protein, 7 aa, synthetic construct
KHTDGLV

SEQ ID NO: 21068 - protein, 7 aa, synthetic construct
QPKNPEQ

SEQ ID NO: 21069 - protein, 7 aa, synthetic construct
PNTHAGL

SEQ ID NO: 21070 - protein, 7 aa, synthetic construct
SPMPSRN

SEQ ID NO: 21071 - protein, 7 aa, synthetic construct
NEYTPIN

SEQ ID NO: 21072 - protein, 7 aa, synthetic construct
MHDKSAG

SEQ ID NO: 21073 - protein, 7 aa, synthetic construct
NFKGISH

SEQ ID NO: 21074 - protein, 7 aa, synthetic construct
MYINQKN

SEQ ID NO: 21075 - protein, 7 aa, synthetic construct
RSGHANS

SEQ ID NO: 21076 - protein, 7 aa, synthetic construct
GFNDNYD

SEQ ID NO: 21077 - protein, 7 aa, synthetic construct
SKREMPQ

SEQ ID NO: 21078 - protein, 7 aa, synthetic construct
RANTDLN

SEQ ID NO: 21079 - protein, 7 aa, synthetic construct
YEVHLPM

SEQ ID NO: 21080 - protein, 7 aa, synthetic construct
EKHYAQS

SEQ ID NO: 21081 - protein, 7 aa, synthetic construct
GSNNAPA

SEQ ID NO: 21082 - protein, 7 aa, synthetic construct
DFGRGVP

SEQ ID NO: 21083 - protein, 7 aa, synthetic construct
HGKWDDQ

SEQ ID NO: 21084 - protein, 7 aa, synthetic construct
QQILKEP

SEQ ID NO: 21085 - protein, 7 aa, synthetic construct
NQYTKGW

SEQ ID NO: 21086 - protein, 7 aa, synthetic construct
KVNDNHY

SEQ ID NO: 21087 - protein, 7 aa, synthetic construct
VVRELSA

SEQ ID NO: 21088 - protein, 7 aa, synthetic construct
SEDRGFK

SEQ ID NO: 21089 - protein, 7 aa, synthetic construct
SGNQIIL

SEQ ID NO: 21090 - protein, 7 aa, synthetic construct
LSDGRTH

SEQ ID NO: 21091 - protein, 7 aa, synthetic construct
IRGTATQ

SEQ ID NO: 21092 - protein, 7 aa, synthetic construct
TMAHVAK

SEQ ID NO: 21093 - protein, 7 aa, synthetic construct
THRMPAQ

SEQ ID NO: 21094 - protein, 7 aa, synthetic construct
GGNHEGS

SEQ ID NO: 21095 - protein, 7 aa, synthetic construct
WGPNADA

SEQ ID NO: 21096 - protein, 7 aa, synthetic construct
LIIERGG

SEQ ID NO: 21097 - protein, 7 aa, synthetic construct
HNVRIGS

SEQ ID NO: 21098 - protein, 7 aa, synthetic construct
RRGVDWE

SEQ ID NO: 21099 - protein, 7 aa, synthetic construct
QNHIQDG

SEQ ID NO: 21100 - protein, 7 aa, synthetic construct
SGGAISR

SEQ ID NO: 21101 - protein, 7 aa, synthetic construct
YLKMHDP

SEQ ID NO: 21102 - protein, 7 aa, synthetic construct
LIKHASI

SEQ ID NO: 21103 - protein, 7 aa, synthetic construct
DGYHKVN

SEQ ID NO: 21104 - protein, 7 aa, synthetic construct
TDGHAML

SEQ ID NO: 21105 - protein, 7 aa, synthetic construct
HIKVMVD

SEQ ID NO: 21106 - protein, 7 aa, synthetic construct
VHMNSRS

SEQ ID NO: 21107 - protein, 7 aa, synthetic construct
QGHYVES

SEQ ID NO: 21108 - protein, 7 aa, synthetic construct
VDSAYTI

SEQ ID NO: 21109 - protein, 7 aa, synthetic construct
WNGYKSD

SEQ ID NO: 21110 - protein, 7 aa, synthetic construct
TVHGVNV

SEQ ID NO: 21111 - protein, 7 aa, synthetic construct
QFKEPKQ

SEQ ID NO: 21112 - protein, 7 aa, synthetic construct
MQRFEGK

SEQ ID NO: 21113 - protein, 7 aa, synthetic construct
DVPNHQR

SEQ ID NO: 21114 - protein, 7 aa, synthetic construct
LKQKEFH

SEQ ID NO: 21115 - protein, 7 aa, synthetic construct
KVEHQQV

SEQ ID NO: 21116 - protein, 7 aa, synthetic construct
QPVQKEL

SEQ ID NO: 21117 - protein, 7 aa, synthetic construct
IHSHRMA

SEQ ID NO: 21118 - protein, 7 aa, synthetic construct
PVQFSRE

SEQ ID NO: 21119 - protein, 7 aa, synthetic construct
TKHVTYS

SEQ ID NO: 21120 - protein, 7 aa, synthetic construct
TYPKQDH

SEQ ID NO: 21121 - protein, 7 aa, synthetic construct
FRLGSQD

SEQ ID NO: 21122 - protein, 7 aa, synthetic construct
HTVAKNQ

SEQ ID NO: 21123 - protein, 7 aa, synthetic construct
NVRVNMV

SEQ ID NO: 21124 - protein, 7 aa, synthetic construct
TQQSHQH

SEQ ID NO: 21125 - protein, 7 aa, synthetic construct
PLDARNA

SEQ ID NO: 21126 - protein, 7 aa, synthetic construct
YPTYSTA

SEQ ID NO: 21127 - protein, 7 aa, synthetic construct
WMANKDS

SEQ ID NO: 21128 - protein, 7 aa, synthetic construct
RPGATHL

SEQ ID NO: 21129 - protein, 7 aa, synthetic construct
KMDRQFS

SEQ ID NO: 21130 - protein, 7 aa, synthetic construct
FAHNMEK

SEQ ID NO: 21131 - protein, 7 aa, synthetic construct
PVKNADL

SEQ ID NO: 21132 - protein, 7 aa, synthetic construct
MAANADS

SEQ ID NO: 21133 - protein, 7 aa, synthetic construct
PQNPPQH

SEQ ID NO: 21134 - protein, 7 aa, synthetic construct
TQKINFQ

SEQ ID NO: 21135 - protein, 7 aa, synthetic construct
KIKDEIG

SEQ ID NO: 21136 - protein, 7 aa, synthetic construct
HPNKGVD

SEQ ID NO: 21137 - protein, 7 aa, synthetic construct
WERNMNG

SEQ ID NO: 21138 - protein, 7 aa, synthetic construct
EPLKRVL

SEQ ID NO: 21139 - protein, 7 aa, synthetic construct
EMQGHRM

SEQ ID NO: 21140 - protein, 7 aa, synthetic construct
YMGRQTG

SEQ ID NO: 21141 - protein, 7 aa, synthetic construct
FEYRSGA

SEQ ID NO: 21142 - protein, 7 aa, synthetic construct
RFGGGIS

SEQ ID NO: 21143 - protein, 7 aa, synthetic construct
IHPNRIL

SEQ ID NO: 21144 - protein, 7 aa, synthetic construct
YIMGERQ

SEQ ID NO: 21145 - protein, 7 aa, synthetic construct
QKSEPQI

SEQ ID NO: 21146 - protein, 7 aa, synthetic construct
EHKPTMM

SEQ ID NO: 21147 - protein, 7 aa, synthetic construct
WPPNTRN

SEQ ID NO: 21148 - protein, 7 aa, synthetic construct
TSVDNHR

SEQ ID NO: 21149 - protein, 7 aa, synthetic construct
MAMHAKF

SEQ ID NO: 21150 - protein, 7 aa, synthetic construct
RAPFFAE

SEQ ID NO: 21151 - protein, 7 aa, synthetic construct
VVSQSGP

SEQ ID NO: 21152 - protein, 7 aa, synthetic construct
HGSHNFE

SEQ ID NO: 21153 - protein, 7 aa, synthetic construct
MNKADQA

SEQ ID NO: 21154 - protein, 7 aa, synthetic construct
GERLTQL

SEQ ID NO: 21155 - protein, 7 aa, synthetic construct
LVRETPQ

SEQ ID NO: 21156 - protein, 7 aa, synthetic construct
KTASNSS

SEQ ID NO: 21157 - protein, 7 aa, synthetic construct
GKHINYP

SEQ ID NO: 21158 - protein, 7 aa, synthetic construct
EKNMARD

SEQ ID NO: 21159 - protein, 7 aa, synthetic construct
DYRNGAR

SEQ ID NO: 21160 - protein, 7 aa, synthetic construct
WYKAGFE

SEQ ID NO: 21161 - protein, 7 aa, synthetic construct
LYSTPHA

SEQ ID NO: 21162 - protein, 7 aa, synthetic construct
KRANNQD

SEQ ID NO: 21163 - protein, 7 aa, synthetic construct
FQGQPGD

SEQ ID NO: 21164 - protein, 7 aa, synthetic construct
HLHDSGW

SEQ ID NO: 21165 - protein, 7 aa, synthetic construct
QNEQFKQ

SEQ ID NO: 21166 - protein, 7 aa, synthetic construct
EMDRVKP

SEQ ID NO: 21167 - protein, 7 aa, synthetic construct
YGQRSDA

SEQ ID NO: 21168 - protein, 7 aa, synthetic construct
NFQARMD

SEQ ID NO: 21169 - protein, 7 aa, synthetic construct
LEIRSSV

SEQ ID NO: 21170 - protein, 7 aa, synthetic construct
IHATEQN

SEQ ID NO: 21171 - protein, 7 aa, synthetic construct
IIPFGNE

SEQ ID NO: 21172 - protein, 7 aa, synthetic construct
TDPRFNK

SEQ ID NO: 21173 - protein, 7 aa, synthetic construct
HKLARSE

SEQ ID NO: 21174 - protein, 7 aa, synthetic construct
QGHVSHS

SEQ ID NO: 21175 - protein, 7 aa, synthetic construct
RIMDAPS

SEQ ID NO: 21176 - protein, 7 aa, synthetic construct
FPDKAQP

SEQ ID NO: 21177 - protein, 7 aa, synthetic construct
SPKHTLS

SEQ ID NO: 21178 - protein, 7 aa, synthetic construct
YHTGIKH

SEQ ID NO: 21179 - protein, 7 aa, synthetic construct
GRYGDAK

SEQ ID NO: 21180 - protein, 7 aa, synthetic construct
YQNAQEN

SEQ ID NO: 21181 - protein, 7 aa, synthetic construct
NRPTTPY

SEQ ID NO: 21182 - protein, 7 aa, synthetic construct
VTASGTG

SEQ ID NO: 21183 - protein, 7 aa, synthetic construct
ASPASAP

SEQ ID NO: 21184 - protein, 7 aa, synthetic construct
QLRHDSW

SEQ ID NO: 21185 - protein, 7 aa, synthetic construct
DVHRSAV

SEQ ID NO: 21186 - protein, 7 aa, synthetic construct
VRHIEIN

SEQ ID NO: 21187 - protein, 7 aa, synthetic construct
QAIQAGR

SEQ ID NO: 21188 - protein, 7 aa, synthetic construct
WASYHEE

SEQ ID NO: 21189 - protein, 7 aa, synthetic construct
GSIKHNN

SEQ ID NO: 21190 - protein, 7 aa, synthetic construct
LYNPTNT

SEQ ID NO: 21191 - protein, 7 aa, synthetic construct
RDRLSDH

SEQ ID NO: 21192 - protein, 7 aa, synthetic construct
PRNGHED

SEQ ID NO: 21193 - protein, 7 aa, synthetic construct
NAPPYQS

SEQ ID NO: 21194 - protein, 7 aa, synthetic construct
QNEPHSI

SEQ ID NO: 21195 - protein, 7 aa, synthetic construct
EAKLTSG

SEQ ID NO: 21196 - protein, 7 aa, synthetic construct
HEGVALS

SEQ ID NO: 21197 - protein, 7 aa, synthetic construct
HGDMRPV

SEQ ID NO: 21198 - protein, 7 aa, synthetic construct
NAPHMES

SEQ ID NO: 21199 - protein, 7 aa, synthetic construct
DKLASHP

SEQ ID NO: 21200 - protein, 7 aa, synthetic construct
YEKMEPM

SEQ ID NO: 21201 - protein, 7 aa, synthetic construct
PGMPANA

SEQ ID NO: 21202 - protein, 7 aa, synthetic construct
KNDPVKH

SEQ ID NO: 21203 - protein, 7 aa, synthetic construct
QYDRPRI

SEQ ID NO: 21204 - protein, 7 aa, synthetic construct
HVKNAEM

SEQ ID NO: 21205 - protein, 7 aa, synthetic construct
LNGYDKG

SEQ ID NO: 21206 - protein, 7 aa, synthetic construct
TESIRYS

SEQ ID NO: 21207 - protein, 7 aa, synthetic construct
TRDDNRA

SEQ ID NO: 21208 - protein, 7 aa, synthetic construct
ITMQTNI

SEQ ID NO: 21209 - protein, 7 aa, synthetic construct
KADNHEL

SEQ ID NO: 21210 - protein, 7 aa, synthetic construct
KIQSQMD

SEQ ID NO: 21211 - protein, 7 aa, synthetic construct
QGARNIP

SEQ ID NO: 21212 - protein, 7 aa, synthetic construct
GVQRPQS

SEQ ID NO: 21213 - protein, 7 aa, synthetic construct
RIGGVEN

SEQ ID NO: 21214 - protein, 7 aa, synthetic construct
VWGAETS

SEQ ID NO: 21215 - protein, 7 aa, synthetic construct
TLMHPRT

SEQ ID NO: 21216 - protein, 7 aa, synthetic construct
NLTYHRE

SEQ ID NO: 21217 - protein, 7 aa, synthetic construct
WDINGVP

SEQ ID NO: 21218 - protein, 7 aa, synthetic construct
VQRFEDT

SEQ ID NO: 21219 - protein, 7 aa, synthetic construct
TYGTEEH

SEQ ID NO: 21220 - protein, 7 aa, synthetic construct
SEKVKGD

SEQ ID NO: 21221 - protein, 7 aa, synthetic construct
HRLSTTG

SEQ ID NO: 21222 - protein, 7 aa, synthetic construct
RVVPPAT

SEQ ID NO: 21223 - protein, 7 aa, synthetic construct
DTGNMKY

SEQ ID NO: 21224 - protein, 7 aa, synthetic construct
HYDVQMK

SEQ ID NO: 21225 - protein, 7 aa, synthetic construct
DNKNAGR

SEQ ID NO: 21226 - protein, 7 aa, synthetic construct
KEMALKS

SEQ ID NO: 21227 - protein, 7 aa, synthetic construct
KGVPNPQ

SEQ ID NO: 21228 - protein, 7 aa, synthetic construct
NAQRMVA

SEQ ID NO: 21229 - protein, 7 aa, synthetic construct
SHNTVYG

SEQ ID NO: 21230 - protein, 7 aa, synthetic construct
DMIARHG

SEQ ID NO: 21231 - protein, 7 aa, synthetic construct
TNVNFKV

SEQ ID NO: 21232 - protein, 7 aa, synthetic construct
SHMMNKA

SEQ ID NO: 21233 - protein, 7 aa, synthetic construct
DVKGKFS

SEQ ID NO: 21234 - protein, 7 aa, synthetic construct
AFTEKPA

SEQ ID NO: 21235 - protein, 7 aa, synthetic construct
NKGSPLL

SEQ ID NO: 21236 - protein, 7 aa, synthetic construct
PRPHMGM

SEQ ID NO: 21237 - protein, 7 aa, synthetic construct
TQQAKAP

SEQ ID NO: 21238 - protein, 7 aa, synthetic construct
ANSFMKD

SEQ ID NO: 21239 - protein, 7 aa, synthetic construct
FAAKDDI

SEQ ID NO: 21240 - protein, 7 aa, synthetic construct
GSRVMLM

SEQ ID NO: 21241 - protein, 7 aa, synthetic construct
KEHGHYE

SEQ ID NO: 21242 - protein, 7 aa, synthetic construct
LDGSHNA

SEQ ID NO: 21243 - protein, 7 aa, synthetic construct
GIKPYQQ

SEQ ID NO: 21244 - protein, 7 aa, synthetic construct
DQRTTPL

SEQ ID NO: 21245 - protein, 7 aa, synthetic construct
ITGYPSP

SEQ ID NO: 21246 - protein, 7 aa, synthetic construct
QSKGEVM

SEQ ID NO: 21247 - protein, 7 aa, synthetic construct
NANYQMI

SEQ ID NO: 21248 - protein, 7 aa, synthetic construct
NTTYSEE

SEQ ID NO: 21249 - protein, 7 aa, synthetic construct
TIGPGIH

SEQ ID NO: 21250 - protein, 7 aa, synthetic construct
IVGREEL

SEQ ID NO: 21251 - protein, 7 aa, synthetic construct
GNEANKG

SEQ ID NO: 21252 - protein, 7 aa, synthetic construct
RQPHFMG

SEQ ID NO: 21253 - protein, 7 aa, synthetic construct
PLAKSFE

SEQ ID NO: 21254 - protein, 7 aa, synthetic construct
QDKRHDD

SEQ ID NO: 21255 - protein, 7 aa, synthetic construct
NHSKISD

SEQ ID NO: 21256 - protein, 7 aa, synthetic construct
GQLQAKP

SEQ ID NO: 21257 - protein, 7 aa, synthetic construct
NGSVGGS

SEQ ID NO: 21258 - protein, 7 aa, synthetic construct
RGSQGGH

SEQ ID NO: 21259 - protein, 7 aa, synthetic construct
ISMSTGD

SEQ ID NO: 21260 - protein, 7 aa, synthetic construct
FTDHGGF

SEQ ID NO: 21261 - protein, 7 aa, synthetic construct
KAKTPMG

SEQ ID NO: 21262 - protein, 7 aa, synthetic construct
NHYVPTE

SEQ ID NO: 21263 - protein, 7 aa, synthetic construct
QGVHFQE

SEQ ID NO: 21264 - protein, 7 aa, synthetic construct
QYKAASL

SEQ ID NO: 21265 - protein, 7 aa, synthetic construct
ADTNHQP

SEQ ID NO: 21266 - protein, 7 aa, synthetic construct
RDAIIMG

SEQ ID NO: 21267 - protein, 7 aa, synthetic construct
NAKMKVD

SEQ ID NO: 21268 - protein, 7 aa, synthetic construct
MPQAITP

SEQ ID NO: 21269 - protein, 7 aa, synthetic construct
HLISKHG

SEQ ID NO: 21270 - protein, 7 aa, synthetic construct
IALLRTE

SEQ ID NO: 21271 - protein, 7 aa, synthetic construct
NTNIVMS

SEQ ID NO: 21272 - protein, 7 aa, synthetic construct
SAPSPIG

SEQ ID NO: 21273 - protein, 7 aa, synthetic construct
QNTIQYS

SEQ ID NO: 21274 - protein, 7 aa, synthetic construct
RTNVAVP

SEQ ID NO: 21275 - protein, 7 aa, synthetic construct
SMSTKDL

SEQ ID NO: 21276 - protein, 7 aa, synthetic construct
ISGWKNE

SEQ ID NO: 21277 - protein, 7 aa, synthetic construct
YTSGLDG

SEQ ID NO: 21278 - protein, 7 aa, synthetic construct
ARQPNTA

SEQ ID NO: 21279 - protein, 7 aa, synthetic construct
VHSHVAV

SEQ ID NO: 21280 - protein, 7 aa, synthetic construct
EHRPKPL

SEQ ID NO: 21281 - protein, 7 aa, synthetic construct
VGTTISK

SEQ ID NO: 21282 - protein, 7 aa, synthetic construct
RGQVVPE

SEQ ID NO: 21283 - protein, 7 aa, synthetic construct
EHKIKDS

SEQ ID NO: 21284 - protein, 7 aa, synthetic construct
RATMGPV

SEQ ID NO: 21285 - protein, 7 aa, synthetic construct
STPHNMP

SEQ ID NO: 21286 - protein, 7 aa, synthetic construct
GQNYPMP

SEQ ID NO: 21287 - protein, 7 aa, synthetic construct
AFNFAEG

SEQ ID NO: 21288 - protein, 7 aa, synthetic construct
MSRHQNP

SEQ ID NO: 21289 - protein, 7 aa, synthetic construct
LSISQSP

SEQ ID NO: 21290 - protein, 7 aa, synthetic construct
MANDWKA

SEQ ID NO: 21291 - protein, 7 aa, synthetic construct
EKEISHR

SEQ ID NO: 21292 - protein, 7 aa, synthetic construct
WANSHKS

SEQ ID NO: 21293 - protein, 7 aa, synthetic construct
TRAELNG

SEQ ID NO: 21294 - protein, 7 aa, synthetic construct
QAFREIG

SEQ ID NO: 21295 - protein, 7 aa, synthetic construct
IQKSTLM

SEQ ID NO: 21296 - protein, 7 aa, synthetic construct
HNQSGQQ

SEQ ID NO: 21297 - protein, 7 aa, synthetic construct
SHTRVSM

SEQ ID NO: 21298 - protein, 7 aa, synthetic construct
PYGSAQS

SEQ ID NO: 21299 - protein, 7 aa, synthetic construct
RYGVDVE

SEQ ID NO: 21300 - protein, 7 aa, synthetic construct
IQRNQSE

SEQ ID NO: 21301 - protein, 7 aa, synthetic construct
MTPHAPI

SEQ ID NO: 21302 - protein, 7 aa, synthetic construct
MRHMGNE

SEQ ID NO: 21303 - protein, 7 aa, synthetic construct
VIKGLAP

SEQ ID NO: 21304 - protein, 7 aa, synthetic construct
RIANDRD

SEQ ID NO: 21305 - protein, 7 aa, synthetic construct
AVMSENV

SEQ ID NO: 21306 - protein, 7 aa, synthetic construct
TPSPRNY

SEQ ID NO: 21307 - protein, 7 aa, synthetic construct
VDNSRDR

SEQ ID NO: 21308 - protein, 7 aa, synthetic construct
TNVTSST

SEQ ID NO: 21309 - protein, 7 aa, synthetic construct
EAHQQRH

SEQ ID NO: 21310 - protein, 7 aa, synthetic construct
PNERQVP

SEQ ID NO: 21311 - protein, 7 aa, synthetic construct
LKQIVTP

SEQ ID NO: 21312 - protein, 7 aa, synthetic construct
TKSMIVE

SEQ ID NO: 21313 - protein, 7 aa, synthetic construct
ELMKQSS

SEQ ID NO: 21314 - protein, 7 aa, synthetic construct
MKTMDFK

SEQ ID NO: 21315 - protein, 7 aa, synthetic construct
LAVKAGG

SEQ ID NO: 21316 - protein, 7 aa, synthetic construct
DRNSNMD

SEQ ID NO: 21317 - protein, 7 aa, synthetic construct
PWERNSE

SEQ ID NO: 21318 - protein, 7 aa, synthetic construct
IKQIQQD

SEQ ID NO: 21319 - protein, 7 aa, synthetic construct
MNNEGLQ

SEQ ID NO: 21320 - protein, 7 aa, synthetic construct
HGDDMRT

SEQ ID NO: 21321 - protein, 7 aa, synthetic construct
MAPGAIV

SEQ ID NO: 21322 - protein, 7 aa, synthetic construct
YQPKFIN

SEQ ID NO: 21323 - protein, 7 aa, synthetic construct
FGRESGN

SEQ ID NO: 21324 - protein, 7 aa, synthetic construct
LRTFPTG

SEQ ID NO: 21325 - protein, 7 aa, synthetic construct
GMHSDKY

SEQ ID NO: 21326 - protein, 7 aa, synthetic construct
TNILRND

SEQ ID NO: 21327 - protein, 7 aa, synthetic construct
FMYHKAE

SEQ ID NO: 21328 - protein, 7 aa, synthetic construct
DPGFMRQ

SEQ ID NO: 21329 - protein, 7 aa, synthetic construct
HQTVAIE

SEQ ID NO: 21330 - protein, 7 aa, synthetic construct
GPRLHAV

SEQ ID NO: 21331 - protein, 7 aa, synthetic construct
AFGAGMN

SEQ ID NO: 21332 - protein, 7 aa, synthetic construct
KETSRIQ

SEQ ID NO: 21333 - protein, 7 aa, synthetic construct
KLAETKN

SEQ ID NO: 21334 - protein, 7 aa, synthetic construct
AGKFNPT

SEQ ID NO: 21335 - protein, 7 aa, synthetic construct
MSPSHNV

SEQ ID NO: 21336 - protein, 7 aa, synthetic construct
FQNIKGT

SEQ ID NO: 21337 - protein, 7 aa, synthetic construct
GKNPGAM

SEQ ID NO: 21338 - protein, 7 aa, synthetic construct
FKHLMPS

SEQ ID NO: 21339 - protein, 7 aa, synthetic construct
DMPFMQV

SEQ ID NO: 21340 - protein, 7 aa, synthetic construct
HKGYIQT

SEQ ID NO: 21341 - protein, 7 aa, synthetic construct
IVDTHRS

SEQ ID NO: 21342 - protein, 7 aa, synthetic construct
KEDYKVS

SEQ ID NO: 21343 - protein, 7 aa, synthetic construct
HRSMSTG

SEQ ID NO: 21344 - protein, 7 aa, synthetic construct
QASRMHA

SEQ ID NO: 21345 - protein, 7 aa, synthetic construct
QAHGTMQ

SEQ ID NO: 21346 - protein, 7 aa, synthetic construct
YQAQSVV

SEQ ID NO: 21347 - protein, 7 aa, synthetic construct
FADMSKH

SEQ ID NO: 21348 - protein, 7 aa, synthetic construct
WGGNGQR

SEQ ID NO: 21349 - protein, 7 aa, synthetic construct
RESQKEE

SEQ ID NO: 21350 - protein, 7 aa, synthetic construct
LRAQESR

SEQ ID NO: 21351 - protein, 7 aa, synthetic construct
QMGQKMS

SEQ ID NO: 21352 - protein, 7 aa, synthetic construct
KGGEASM

SEQ ID NO: 21353 - protein, 7 aa, synthetic construct
WRMTAEP

SEQ ID NO: 21354 - protein, 7 aa, synthetic construct
VNFTKPN

SEQ ID NO: 21355 - protein, 7 aa, synthetic construct
FSHPNHV

SEQ ID NO: 21356 - protein, 7 aa, synthetic construct
VPMNQTH

SEQ ID NO: 21357 - protein, 7 aa, synthetic construct
PRQKQDA

SEQ ID NO: 21358 - protein, 7 aa, synthetic construct
PGAKAHM

SEQ ID NO: 21359 - protein, 7 aa, synthetic construct
NFEIKAG

SEQ ID NO: 21360 - protein, 7 aa, synthetic construct
FSKNHTM

SEQ ID NO: 21361 - protein, 7 aa, synthetic construct
VSTNSHR

SEQ ID NO: 21362 - protein, 7 aa, synthetic construct
QHTTKDI

SEQ ID NO: 21363 - protein, 7 aa, synthetic construct
RTPESIM

SEQ ID NO: 21364 - protein, 7 aa, synthetic construct
HKGQFAV

SEQ ID NO: 21365 - protein, 7 aa, synthetic construct
HWPSEQT

SEQ ID NO: 21366 - protein, 7 aa, synthetic construct
RIHQGAE

SEQ ID NO: 21367 - protein, 7 aa, synthetic construct
NIINGKN

SEQ ID NO: 21368 - protein, 7 aa, synthetic construct
DNFQIRP

SEQ ID NO: 21369 - protein, 7 aa, synthetic construct
AMDVTHK

SEQ ID NO: 21370 - protein, 7 aa, synthetic construct
AGMKLSE

SEQ ID NO: 21371 - protein, 7 aa, synthetic construct
QMKPTST

SEQ ID NO: 21372 - protein, 7 aa, synthetic construct
MKMVHKD

SEQ ID NO: 21373 - protein, 7 aa, synthetic construct
YAPRMSD

SEQ ID NO: 21374 - protein, 7 aa, synthetic construct
QLAPNNK

SEQ ID NO: 21375 - protein, 7 aa, synthetic construct
NYSTPSP

SEQ ID NO: 21376 - protein, 7 aa, synthetic construct
ARLNSSY

SEQ ID NO: 21377 - protein, 7 aa, synthetic construct
GHRNQTQ

SEQ ID NO: 21378 - protein, 7 aa, synthetic construct
LPYLKDG

SEQ ID NO: 21379 - protein, 7 aa, synthetic construct
TKGHEFH

SEQ ID NO: 21380 - protein, 7 aa, synthetic construct
KDQHWAS

SEQ ID NO: 21381 - protein, 7 aa, synthetic construct
GVQTQTP

SEQ ID NO: 21382 - protein, 7 aa, synthetic construct
HVHTKLD

SEQ ID NO: 21383 - protein, 7 aa, synthetic construct
AMNHRSE

SEQ ID NO: 21384 - protein, 7 aa, synthetic construct
VETQKSA

SEQ ID NO: 21385 - protein, 7 aa, synthetic construct
MGATEGG

SEQ ID NO: 21386 - protein, 7 aa, synthetic construct
AHDKTHW

SEQ ID NO: 21387 - protein, 7 aa, synthetic construct
QMKVQSP

SEQ ID NO: 21388 - protein, 7 aa, synthetic construct
DGLRIQV

SEQ ID NO: 21389 - protein, 7 aa, synthetic construct
LQETKWT

SEQ ID NO: 21390 - protein, 7 aa, synthetic construct
NVHHTVV

SEQ ID NO: 21391 - protein, 7 aa, synthetic construct
ESGRHPS

SEQ ID NO: 21392 - protein, 7 aa, synthetic construct
VPLKLKP

SEQ ID NO: 21393 - protein, 7 aa, synthetic construct
LLPKYYD

SEQ ID NO: 21394 - protein, 7 aa, synthetic construct
AKNYMAD

SEQ ID NO: 21395 - protein, 7 aa, synthetic construct
NSSDARG

SEQ ID NO: 21396 - protein, 7 aa, synthetic construct
MPDHRSG

SEQ ID NO: 21397 - protein, 7 aa, synthetic construct
GANDGFY

SEQ ID NO: 21398 - protein, 7 aa, synthetic construct
TLKPDTR

SEQ ID NO: 21399 - protein, 7 aa, synthetic construct
SQTMPAH

SEQ ID NO: 21400 - protein, 7 aa, synthetic construct
ARHEGNG

SEQ ID NO: 21401 - protein, 7 aa, synthetic construct
KSTTVVL

SEQ ID NO: 21402 - protein, 7 aa, synthetic construct
YPVDPER

SEQ ID NO: 21403 - protein, 7 aa, synthetic construct
IGHGEHG

SEQ ID NO: 21404 - protein, 7 aa, synthetic construct
YLSFNAG

SEQ ID NO: 21405 - protein, 7 aa, synthetic construct
TSYSVHG

SEQ ID NO: 21406 - protein, 7 aa, synthetic construct
HKDHRIE

SEQ ID NO: 21407 - protein, 7 aa, synthetic construct
NNSGPEV

SEQ ID NO: 21408 - protein, 7 aa, synthetic construct
VRTDQHP

SEQ ID NO: 21409 - protein, 7 aa, synthetic construct
ESHEKRV

SEQ ID NO: 21410 - protein, 7 aa, synthetic construct
LNGVMIA

SEQ ID NO: 21411 - protein, 7 aa, synthetic construct
KPVAHED

SEQ ID NO: 21412 - protein, 7 aa, synthetic construct
VFPTQKF

SEQ ID NO: 21413 - protein, 7 aa, synthetic construct
PALKVIS

SEQ ID NO: 21414 - protein, 7 aa, synthetic construct
SIHNAEA

SEQ ID NO: 21415 - protein, 7 aa, synthetic construct
MTDKPHI

SEQ ID NO: 21416 - protein, 7 aa, synthetic construct
EDGLNQG

SEQ ID NO: 21417 - protein, 7 aa, synthetic construct
PQLARQL

SEQ ID NO: 21418 - protein, 7 aa, synthetic construct
TRINSEF

SEQ ID NO: 21419 - protein, 7 aa, synthetic construct
VSNYIQA

SEQ ID NO: 21420 - protein, 7 aa, synthetic construct
SQRETYL

SEQ ID NO: 21421 - protein, 7 aa, synthetic construct
HKSQVPV

SEQ ID NO: 21422 - protein, 7 aa, synthetic construct
YQGMYQP

SEQ ID NO: 21423 - protein, 7 aa, synthetic construct
YTGPGQL

SEQ ID NO: 21424 - protein, 7 aa, synthetic construct
FTQNPLM

SEQ ID NO: 21425 - protein, 7 aa, synthetic construct
LTTTPQN

SEQ ID NO: 21426 - protein, 7 aa, synthetic construct
KSSQDNT

SEQ ID NO: 21427 - protein, 7 aa, synthetic construct
TYRMAKE

SEQ ID NO: 21428 - protein, 7 aa, synthetic construct
EVKDRQG

SEQ ID NO: 21429 - protein, 7 aa, synthetic construct
KELGQGH

SEQ ID NO: 21430 - protein, 7 aa, synthetic construct
LNSYQQQ

SEQ ID NO: 21431 - protein, 7 aa, synthetic construct
RQQEYKI

SEQ ID NO: 21432 - protein, 7 aa, synthetic construct
KPNTVIF

SEQ ID NO: 21433 - protein, 7 aa, synthetic construct
LIANAPM

SEQ ID NO: 21434 - protein, 7 aa, synthetic construct
IPDKSYY

SEQ ID NO: 21435 - protein, 7 aa, synthetic construct
RNYSEHE

SEQ ID NO: 21436 - protein, 7 aa, synthetic construct
SDVIVKG

SEQ ID NO: 21437 - protein, 7 aa, synthetic construct
LMNPGSE

SEQ ID NO: 21438 - protein, 7 aa, synthetic construct
MRTESDV

SEQ ID NO: 21439 - protein, 7 aa, synthetic construct
GDKHMKM

SEQ ID NO: 21440 - protein, 7 aa, synthetic construct
MKFSEMM

SEQ ID NO: 21441 - protein, 7 aa, synthetic construct
TQGAVYS

SEQ ID NO: 21442 - protein, 7 aa, synthetic construct
ENRAMMI

SEQ ID NO: 21443 - protein, 7 aa, synthetic construct
FNEVSHS

SEQ ID NO: 21444 - protein, 7 aa, synthetic construct
LDGYHQV

SEQ ID NO: 21445 - protein, 7 aa, synthetic construct
MNSHQKS

SEQ ID NO: 21446 - protein, 7 aa, synthetic construct
FGSDFSS

SEQ ID NO: 21447 - protein, 7 aa, synthetic construct
LRADKQY

SEQ ID NO: 21448 - protein, 7 aa, synthetic construct
FDHGRSG

SEQ ID NO: 21449 - protein, 7 aa, synthetic construct
EQPRREM

SEQ ID NO: 21450 - protein, 7 aa, synthetic construct
MTDNSNR

SEQ ID NO: 21451 - protein, 7 aa, synthetic construct
WAGNGST

SEQ ID NO: 21452 - protein, 7 aa, synthetic construct
SNYAQGS

SEQ ID NO: 21453 - protein, 7 aa, synthetic construct
NPAANMQ

SEQ ID NO: 21454 - protein, 7 aa, synthetic construct
PMNHHNA

SEQ ID NO: 21455 - protein, 7 aa, synthetic construct
QRPTMHN

SEQ ID NO: 21456 - protein, 7 aa, synthetic construct
MWNKSGS

SEQ ID NO: 21457 - protein, 7 aa, synthetic construct
LRHDGEA

SEQ ID NO: 21458 - protein, 7 aa, synthetic construct
MTNHHQH

SEQ ID NO: 21459 - protein, 7 aa, synthetic construct
DTQHSRQ

SEQ ID NO: 21460 - protein, 7 aa, synthetic construct
ENAQTKS

SEQ ID NO: 21461 - protein, 7 aa, synthetic construct
NNSSPIP

SEQ ID NO: 21462 - protein, 7 aa, synthetic construct
HLNVNYE

SEQ ID NO: 21463 - protein, 7 aa, synthetic construct
DRFVNAH

SEQ ID NO: 21464 - protein, 7 aa, synthetic construct
KLHQSAL

SEQ ID NO: 21465 - protein, 7 aa, synthetic construct
DTKDGFR

SEQ ID NO: 21466 - protein, 7 aa, synthetic construct
YSRDFMG

SEQ ID NO: 21467 - protein, 7 aa, synthetic construct
DMRTSVS

SEQ ID NO: 21468 - protein, 7 aa, synthetic construct
HGVSLMA

SEQ ID NO: 21469 - protein, 7 aa, synthetic construct
SRGPPAD

SEQ ID NO: 21470 - protein, 7 aa, synthetic construct
QPNGHRH

SEQ ID NO: 21471 - protein, 7 aa, synthetic construct
NYHGYQG

SEQ ID NO: 21472 - protein, 7 aa, synthetic construct
WQRHDPT

SEQ ID NO: 21473 - protein, 7 aa, synthetic construct
NQNPVGH

SEQ ID NO: 21474 - protein, 7 aa, synthetic construct
FAPNHPE

SEQ ID NO: 21475 - protein, 7 aa, synthetic construct
IIAHNHM

SEQ ID NO: 21476 - protein, 7 aa, synthetic construct
YKNAMHM

SEQ ID NO: 21477 - protein, 7 aa, synthetic construct
TIERDRE

SEQ ID NO: 21478 - protein, 7 aa, synthetic construct
HFTGSMD

SEQ ID NO: 21479 - protein, 7 aa, synthetic construct
DGSKMGD

SEQ ID NO: 21480 - protein, 7 aa, synthetic construct
MGLHSTH

SEQ ID NO: 21481 - protein, 7 aa, synthetic construct
NQRELGD

SEQ ID NO: 21482 - protein, 7 aa, synthetic construct
HIVRTSG

SEQ ID NO: 21483 - protein, 7 aa, synthetic construct
DNWRSSG

SEQ ID NO: 21484 - protein, 7 aa, synthetic construct
LRGETIG

SEQ ID NO: 21485 - protein, 7 aa, synthetic construct
HIKLRND

SEQ ID NO: 21486 - protein, 7 aa, synthetic construct
DHKMVAR

SEQ ID NO: 21487 - protein, 7 aa, synthetic construct
SPIRVND

SEQ ID NO: 21488 - protein, 7 aa, synthetic construct
TDKKSLV

SEQ ID NO: 21489 - protein, 7 aa, synthetic construct
FKMDKMV

SEQ ID NO: 21490 - protein, 7 aa, synthetic construct
KHGTITI

SEQ ID NO: 21491 - protein, 7 aa, synthetic construct
DSRRGTT

SEQ ID NO: 21492 - protein, 7 aa, synthetic construct
GKYLHGP

SEQ ID NO: 21493 - protein, 7 aa, synthetic construct
HDPRKDS

SEQ ID NO: 21494 - protein, 7 aa, synthetic construct
FSKAWQA

SEQ ID NO: 21495 - protein, 7 aa, synthetic construct
GMKQLNN

SEQ ID NO: 21496 - protein, 7 aa, synthetic construct
DAPRQIH

SEQ ID NO: 21497 - protein, 7 aa, synthetic construct
NQGQFSG

SEQ ID NO: 21498 - protein, 7 aa, synthetic construct
IGNSNIM

SEQ ID NO: 21499 - protein, 7 aa, synthetic construct
GNKGVPN

SEQ ID NO: 21500 - protein, 7 aa, synthetic construct
FGPPKSE

SEQ ID NO: 21501 - protein, 7 aa, synthetic construct
PSVQNSR

SEQ ID NO: 21502 - protein, 7 aa, synthetic construct
RMAQPVG

SEQ ID NO: 21503 - protein, 7 aa, synthetic construct
VQANHGL

SEQ ID NO: 21504 - protein, 7 aa, synthetic construct
TYGEYQR

SEQ ID NO: 21505 - protein, 7 aa, synthetic construct
GYTSDAK

SEQ ID NO: 21506 - protein, 7 aa, synthetic construct
PNDRPVV

SEQ ID NO: 21507 - protein, 7 aa, synthetic construct
YGNPQAT

SEQ ID NO: 21508 - protein, 7 aa, synthetic construct
HQIQGGV

SEQ ID NO: 21509 - protein, 7 aa, synthetic construct
MADQKMN

SEQ ID NO: 21510 - protein, 7 aa, synthetic construct
THPREKD

SEQ ID NO: 21511 - protein, 7 aa, synthetic construct
NNGLSGD

SEQ ID NO: 21512 - protein, 7 aa, synthetic construct
LTFKATS

SEQ ID NO: 21513 - protein, 7 aa, synthetic construct
KEPSAVM

SEQ ID NO: 21514 - protein, 7 aa, synthetic construct
NREPHGH

SEQ ID NO: 21515 - protein, 7 aa, synthetic construct
PLTVNSM

SEQ ID NO: 21516 - protein, 7 aa, synthetic construct
IPDVSKV

SEQ ID NO: 21517 - protein, 7 aa, synthetic construct
FEMRHKG

SEQ ID NO: 21518 - protein, 7 aa, synthetic construct
MNMRQFV

SEQ ID NO: 21519 - protein, 7 aa, synthetic construct
VEGPYAS

SEQ ID NO: 21520 - protein, 7 aa, synthetic construct
YADNMYR

SEQ ID NO: 21521 - protein, 7 aa, synthetic construct
DEIRTTR

SEQ ID NO: 21522 - protein, 7 aa, synthetic construct
TAVNSTP

SEQ ID NO: 21523 - protein, 7 aa, synthetic construct
PRGISEK

SEQ ID NO: 21524 - protein, 7 aa, synthetic construct
AKDMTQP

SEQ ID NO: 21525 - protein, 7 aa, synthetic construct
TSQGHSH

SEQ ID NO: 21526 - protein, 7 aa, synthetic construct
DKDKERN

SEQ ID NO: 21527 - protein, 7 aa, synthetic construct
HANGKMW

SEQ ID NO: 21528 - protein, 7 aa, synthetic construct
SLKHATS

SEQ ID NO: 21529 - protein, 7 aa, synthetic construct
QFSKNVL

SEQ ID NO: 21530 - protein, 7 aa, synthetic construct
YMSNMGA

SEQ ID NO: 21531 - protein, 7 aa, synthetic construct
LYDQSTP

SEQ ID NO: 21532 - protein, 7 aa, synthetic construct
DRSPVVT

SEQ ID NO: 21533 - protein, 7 aa, synthetic construct
HATKFDT

SEQ ID NO: 21534 - protein, 7 aa, synthetic construct
QAKQQFL

SEQ ID NO: 21535 - protein, 7 aa, synthetic construct
MHPIQSD

SEQ ID NO: 21536 - protein, 7 aa, synthetic construct
VGMAGSL

SEQ ID NO: 21537 - protein, 7 aa, synthetic construct
WANTAFP

SEQ ID NO: 21538 - protein, 7 aa, synthetic construct
KSGVNDT

SEQ ID NO: 21539 - protein, 7 aa, synthetic construct
FNGKPAN

SEQ ID NO: 21540 - protein, 7 aa, synthetic construct
YNTSTDN

SEQ ID NO: 21541 - protein, 7 aa, synthetic construct
MLHRMVP

SEQ ID NO: 21542 - protein, 7 aa, synthetic construct
HPKLDKN

SEQ ID NO: 21543 - protein, 7 aa, synthetic construct
QAPQGFR

SEQ ID NO: 21544 - protein, 7 aa, synthetic construct
YQGHTMM

SEQ ID NO: 21545 - protein, 7 aa, synthetic construct
MMRVNAD

SEQ ID NO: 21546 - protein, 7 aa, synthetic construct
RKITAED

SEQ ID NO: 21547 - protein, 7 aa, synthetic construct
SAIKTQM

SEQ ID NO: 21548 - protein, 7 aa, synthetic construct
SQIRFDT

SEQ ID NO: 21549 - protein, 7 aa, synthetic construct
AERIHLV

SEQ ID NO: 21550 - protein, 7 aa, synthetic construct
RDNYEVP

SEQ ID NO: 21551 - protein, 7 aa, synthetic construct
GINTPNK

SEQ ID NO: 21552 - protein, 7 aa, synthetic construct
STGAPGR

SEQ ID NO: 21553 - protein, 7 aa, synthetic construct
LHSSIKT

SEQ ID NO: 21554 - protein, 7 aa, synthetic construct
WRTQNQE

SEQ ID NO: 21555 - protein, 7 aa, synthetic construct
HLHTESL

SEQ ID NO: 21556 - protein, 7 aa, synthetic construct
NHRGKIE

SEQ ID NO: 21557 - protein, 7 aa, synthetic construct
IISSNKV

SEQ ID NO: 21558 - protein, 7 aa, synthetic construct
DGRAVYG

SEQ ID NO: 21559 - protein, 7 aa, synthetic construct
WSTHSTY

SEQ ID NO: 21560 - protein, 7 aa, synthetic construct
VKYFAEA

SEQ ID NO: 21561 - protein, 7 aa, synthetic construct
FKKPQVD

SEQ ID NO: 21562 - protein, 7 aa, synthetic construct
WDPSSRP

SEQ ID NO: 21563 - protein, 7 aa, synthetic construct
RGKLEHE

SEQ ID NO: 21564 - protein, 7 aa, synthetic construct
TGNNVNQ

SEQ ID NO: 21565 - protein, 7 aa, synthetic construct
HLRDKMG

SEQ ID NO: 21566 - protein, 7 aa, synthetic construct
AGPGGNT

SEQ ID NO: 21567 - protein, 7 aa, synthetic construct
SVDMAAH

SEQ ID NO: 21568 - protein, 7 aa, synthetic construct
VIAHGSI

SEQ ID NO: 21569 - protein, 7 aa, synthetic construct
HKDPQTI

SEQ ID NO: 21570 - protein, 7 aa, synthetic construct
GYGANGA

SEQ ID NO: 21571 - protein, 7 aa, synthetic construct
VPYTKNP

SEQ ID NO: 21572 - protein, 7 aa, synthetic construct
MKSKQND

SEQ ID NO: 21573 - protein, 7 aa, synthetic construct
DNQAFKA

SEQ ID NO: 21574 - protein, 7 aa, synthetic construct
ISQKYDA

SEQ ID NO: 21575 - protein, 7 aa, synthetic construct
YLDLTDS

SEQ ID NO: 21576 - protein, 7 aa, synthetic construct
LGHPRTI

SEQ ID NO: 21577 - protein, 7 aa, synthetic construct
PSFRSAS

SEQ ID NO: 21578 - protein, 7 aa, synthetic construct
ALMQHGM

SEQ ID NO: 21579 - protein, 7 aa, synthetic construct
GMHNSSM

SEQ ID NO: 21580 - protein, 7 aa, synthetic construct
SYKEDRT

SEQ ID NO: 21581 - protein, 7 aa, synthetic construct
RSPEPPG

SEQ ID NO: 21582 - protein, 7 aa, synthetic construct
MEKHEQK

SEQ ID NO: 21583 - protein, 7 aa, synthetic construct
TMPHTGY

SEQ ID NO: 21584 - protein, 7 aa, synthetic construct
WLDKMDL

SEQ ID NO: 21585 - protein, 7 aa, synthetic construct
LSGMRGD

SEQ ID NO: 21586 - protein, 7 aa, synthetic construct
MGTSYDP

SEQ ID NO: 21587 - protein, 7 aa, synthetic construct
WQSGGEY

SEQ ID NO: 21588 - protein, 7 aa, synthetic construct
TNAHTTL

SEQ ID NO: 21589 - protein, 7 aa, synthetic construct
GTMDSRL

SEQ ID NO: 21590 - protein, 7 aa, synthetic construct
MNPQNRD

SEQ ID NO: 21591 - protein, 7 aa, synthetic construct
MRDMNHV

SEQ ID NO: 21592 - protein, 7 aa, synthetic construct
VAMRGFP

SEQ ID NO: 21593 - protein, 7 aa, synthetic construct
IVRDPLA

SEQ ID NO: 21594 - protein, 7 aa, synthetic construct
KLPRANE

SEQ ID NO: 21595 - protein, 7 aa, synthetic construct
GDRDRMV

SEQ ID NO: 21596 - protein, 7 aa, synthetic construct
IRETKGG

SEQ ID NO: 21597 - protein, 7 aa, synthetic construct
LMPSQNV

SEQ ID NO: 21598 - protein, 7 aa, synthetic construct
GSEYLGK

SEQ ID NO: 21599 - protein, 7 aa, synthetic construct
ARTSHYE

SEQ ID NO: 21600 - protein, 7 aa, synthetic construct
TMMRVNS

SEQ ID NO: 21601 - protein, 7 aa, synthetic construct
RVPSQNT

SEQ ID NO: 21602 - protein, 7 aa, synthetic construct
FSNPEKK

SEQ ID NO: 21603 - protein, 7 aa, synthetic construct
GLQSAFN

SEQ ID NO: 21604 - protein, 7 aa, synthetic construct
SYKEKHA

SEQ ID NO: 21605 - protein, 7 aa, synthetic construct
LPRIEID

SEQ ID NO: 21606 - protein, 7 aa, synthetic construct
SNNDTPR

SEQ ID NO: 21607 - protein, 7 aa, synthetic construct
KDNFRQS

SEQ ID NO: 21608 - protein, 7 aa, synthetic construct
TEKAVSR

SEQ ID NO: 21609 - protein, 7 aa, synthetic construct
LYMATGP

SEQ ID NO: 21610 - protein, 7 aa, synthetic construct
WKDNPDW

SEQ ID NO: 21611 - protein, 7 aa, synthetic construct
KAASKLE

SEQ ID NO: 21612 - protein, 7 aa, synthetic construct
HMNHNKS

SEQ ID NO: 21613 - protein, 7 aa, synthetic construct
KLNNFLG

SEQ ID NO: 21614 - protein, 7 aa, synthetic construct
FDNVPRM

SEQ ID NO: 21615 - protein, 7 aa, synthetic construct
DRKVAEA

SEQ ID NO: 21616 - protein, 7 aa, synthetic construct
KTHEQTQ

SEQ ID NO: 21617 - protein, 7 aa, synthetic construct
EAGVAQN

SEQ ID NO: 21618 - protein, 7 aa, synthetic construct
HKREEKG

SEQ ID NO: 21619 - protein, 7 aa, synthetic construct
TYVAGER

SEQ ID NO: 21620 - protein, 7 aa, synthetic construct
DSVTYFK

SEQ ID NO: 21621 - protein, 7 aa, synthetic construct
WTNTSIV

SEQ ID NO: 21622 - protein, 7 aa, synthetic construct
YVTNREM

SEQ ID NO: 21623 - protein, 7 aa, synthetic construct
HGDLIHG

SEQ ID NO: 21624 - protein, 7 aa, synthetic construct
YGSNQMH

SEQ ID NO: 21625 - protein, 7 aa, synthetic construct
RSNNYNA

SEQ ID NO: 21626 - protein, 7 aa, synthetic construct
LSDKEKG

SEQ ID NO: 21627 - protein, 7 aa, synthetic construct
INQQKPF

SEQ ID NO: 21628 - protein, 7 aa, synthetic construct
NAPFIQQ

SEQ ID NO: 21629 - protein, 7 aa, synthetic construct
MNIKGYN

SEQ ID NO: 21630 - protein, 7 aa, synthetic construct
AVNDTLY

SEQ ID NO: 21631 - protein, 7 aa, synthetic construct
PNASSHM

SEQ ID NO: 21632 - protein, 7 aa, synthetic construct
ILNDRPP

SEQ ID NO: 21633 - protein, 7 aa, synthetic construct
PKPTKEQ

SEQ ID NO: 21634 - protein, 7 aa, synthetic construct
AERPIGT

SEQ ID NO: 21635 - protein, 7 aa, synthetic construct
FHGSGAS

SEQ ID NO: 21636 - protein, 7 aa, synthetic construct
DKMASMK

SEQ ID NO: 21637 - protein, 7 aa, synthetic construct
QTVSGQV

SEQ ID NO: 21638 - protein, 7 aa, synthetic construct
VSNYIPE

SEQ ID NO: 21639 - protein, 7 aa, synthetic construct
MTKAGQI

SEQ ID NO: 21640 - protein, 7 aa, synthetic construct
MPIKGLS

SEQ ID NO: 21641 - protein, 7 aa, synthetic construct
SKMMLVE

SEQ ID NO: 21642 - protein, 7 aa, synthetic construct
NKAMGFG

SEQ ID NO: 21643 - protein, 7 aa, synthetic construct
TLSVVGH

SEQ ID NO: 21644 - protein, 7 aa, synthetic construct
KQASMED

SEQ ID NO: 21645 - protein, 7 aa, synthetic construct
KPDATVY

SEQ ID NO: 21646 - protein, 7 aa, synthetic construct
KYQTVPV

SEQ ID NO: 21647 - protein, 7 aa, synthetic construct
KDIKPPN

SEQ ID NO: 21648 - protein, 7 aa, synthetic construct
NAPMIIG

SEQ ID NO: 21649 - protein, 7 aa, synthetic construct
GPNIVRD

SEQ ID NO: 21650 - protein, 7 aa, synthetic construct
SSPNDKL

SEQ ID NO: 21651 - protein, 7 aa, synthetic construct
CSTMKAA

SEQ ID NO: 21652 - protein, 7 aa, synthetic construct
GKHYNGN

SEQ ID NO: 21653 - protein, 7 aa, synthetic construct
GMQMETK

SEQ ID NO: 21654 - protein, 7 aa, synthetic construct
QDRFYKD

SEQ ID NO: 21655 - protein, 7 aa, synthetic construct
NHDIPNS

SEQ ID NO: 21656 - protein, 7 aa, synthetic construct
QNANHTW

SEQ ID NO: 21657 - protein, 7 aa, synthetic construct
AREHVDG

SEQ ID NO: 21658 - protein, 7 aa, synthetic construct
VQIGPSG

SEQ ID NO: 21659 - protein, 7 aa, synthetic construct
LVNMNRP

SEQ ID NO: 21660 - protein, 7 aa, synthetic construct
EEKPTKI

SEQ ID NO: 21661 - protein, 7 aa, synthetic construct
TVVTSSS

SEQ ID NO: 21662 - protein, 7 aa, synthetic construct
TTQASGF

SEQ ID NO: 21663 - protein, 7 aa, synthetic construct
KKVEGVG

SEQ ID NO: 21664 - protein, 7 aa, synthetic construct
SRLVKID

SEQ ID NO: 21665 - protein, 7 aa, synthetic construct
HFETGRQ

SEQ ID NO: 21666 - protein, 7 aa, synthetic construct
RLQNEYR

SEQ ID NO: 21667 - protein, 7 aa, synthetic construct
LPTTGMV

SEQ ID NO: 21668 - protein, 7 aa, synthetic construct
YGQVQIN

SEQ ID NO: 21669 - protein, 7 aa, synthetic construct
PMYSGIG

SEQ ID NO: 21670 - protein, 7 aa, synthetic construct
NHSGQQR

SEQ ID NO: 21671 - protein, 7 aa, synthetic construct
MSMRQEY

SEQ ID NO: 21672 - protein, 7 aa, synthetic construct
RSADTQA

SEQ ID NO: 21673 - protein, 7 aa, synthetic construct
QQEQKFT

SEQ ID NO: 21674 - protein, 7 aa, synthetic construct
QPQNNGF

SEQ ID NO: 21675 - protein, 7 aa, synthetic construct
KDTNYSE

SEQ ID NO: 21676 - protein, 7 aa, synthetic construct
FKESPMD

SEQ ID NO: 21677 - protein, 7 aa, synthetic construct
AKGSGIP

SEQ ID NO: 21678 - protein, 7 aa, synthetic construct
ARASVLQ

SEQ ID NO: 21679 - protein, 7 aa, synthetic construct
YKTLHTY

SEQ ID NO: 21680 - protein, 7 aa, synthetic construct
AETAKLS

SEQ ID NO: 21681 - protein, 7 aa, synthetic construct
GMKLDTQ

SEQ ID NO: 21682 - protein, 7 aa, synthetic construct
DLTAQGR

SEQ ID NO: 21683 - protein, 7 aa, synthetic construct
GQPPNQI

SEQ ID NO: 21684 - protein, 7 aa, synthetic construct
NTQTMVR

SEQ ID NO: 21685 - protein, 7 aa, synthetic construct
PHHDQHM

SEQ ID NO: 21686 - protein, 7 aa, synthetic construct
SQNLMQA

SEQ ID NO: 21687 - protein, 7 aa, synthetic construct
GDLERSW

SEQ ID NO: 21688 - protein, 7 aa, synthetic construct
ASDYIRP

SEQ ID NO: 21689 - protein, 7 aa, synthetic construct
PFNPGKD

SEQ ID NO: 21690 - protein, 7 aa, synthetic construct
YKSAESD

SEQ ID NO: 21691 - protein, 7 aa, synthetic construct
ISQGHVH

SEQ ID NO: 21692 - protein, 7 aa, synthetic construct
RWEGTNT

SEQ ID NO: 21693 - protein, 7 aa, synthetic construct
IKGPVFQ

SEQ ID NO: 21694 - protein, 7 aa, synthetic construct
AMATKQY

SEQ ID NO: 21695 - protein, 7 aa, synthetic construct
QNVHHPL

SEQ ID NO: 21696 - protein, 7 aa, synthetic construct
RDESSTE

SEQ ID NO: 21697 - protein, 7 aa, synthetic construct
HLEGRKD

SEQ ID NO: 21698 - protein, 7 aa, synthetic construct
FDRKALD

SEQ ID NO: 21699 - protein, 7 aa, synthetic construct
VGGWHEP

SEQ ID NO: 21700 - protein, 7 aa, synthetic construct
IEKRYDN

SEQ ID NO: 21701 - protein, 7 aa, synthetic construct
YSPIKDY

SEQ ID NO: 21702 - protein, 7 aa, synthetic construct
TQTFDAA

SEQ ID NO: 21703 - protein, 7 aa, synthetic construct
TEDFRPR

SEQ ID NO: 21704 - protein, 7 aa, synthetic construct
QAHPNST

SEQ ID NO: 21705 - protein, 7 aa, synthetic construct
VPHTIKE

SEQ ID NO: 21706 - protein, 7 aa, synthetic construct
RGNDVDA

SEQ ID NO: 21707 - protein, 7 aa, synthetic construct
TGMQMHS

SEQ ID NO: 21708 - protein, 7 aa, synthetic construct
GVAGPLI

SEQ ID NO: 21709 - protein, 7 aa, synthetic construct
KWNDAEP

SEQ ID NO: 21710 - protein, 7 aa, synthetic construct
PMYHAEK

SEQ ID NO: 21711 - protein, 7 aa, synthetic construct
RNDRDNL

SEQ ID NO: 21712 - protein, 7 aa, synthetic construct
KTHWDEV

SEQ ID NO: 21713 - protein, 7 aa, synthetic construct
FADSPRP

SEQ ID NO: 21714 - protein, 7 aa, synthetic construct
WGAHKTQ

SEQ ID NO: 21715 - protein, 7 aa, synthetic construct
CRDRCDV

SEQ ID NO: 21716 - protein, 7 aa, synthetic construct
HAQAQAV

SEQ ID NO: 21717 - protein, 7 aa, synthetic construct
VDRVHDD

SEQ ID NO: 21718 - protein, 7 aa, synthetic construct
VVSQMAA

SEQ ID NO: 21719 - protein, 7 aa, synthetic construct
WGGSKEI

SEQ ID NO: 21720 - protein, 7 aa, synthetic construct
PKQLHLG

SEQ ID NO: 21721 - protein, 7 aa, synthetic construct
HWDSQND

SEQ ID NO: 21722 - protein, 7 aa, synthetic construct
WQKLDNQ

SEQ ID NO: 21723 - protein, 7 aa, synthetic construct
ESVKANW

SEQ ID NO: 21724 - protein, 7 aa, synthetic construct
QQPHGYD

SEQ ID NO: 21725 - protein, 7 aa, synthetic construct
YFDKIAS

SEQ ID NO: 21726 - protein, 7 aa, synthetic construct
LDHKKPA

SEQ ID NO: 21727 - protein, 7 aa, synthetic construct
MGKQPLD

SEQ ID NO: 21728 - protein, 7 aa, synthetic construct
VNKTAGP

SEQ ID NO: 21729 - protein, 7 aa, synthetic construct
PDARHMK

SEQ ID NO: 21730 - protein, 7 aa, synthetic construct
KIQNTDN

SEQ ID NO: 21731 - protein, 7 aa, synthetic construct
QAFKEQN

SEQ ID NO: 21732 - protein, 7 aa, synthetic construct
QYPQMNP

SEQ ID NO: 21733 - protein, 7 aa, synthetic construct
EHRQAKP

SEQ ID NO: 21734 - protein, 7 aa, synthetic construct
TYDPGTP

SEQ ID NO: 21735 - protein, 7 aa, synthetic construct
QLSQASF

SEQ ID NO: 21736 - protein, 7 aa, synthetic construct
ERHVMKD

SEQ ID NO: 21737 - protein, 7 aa, synthetic construct
RHPATFE

SEQ ID NO: 21738 - protein, 7 aa, synthetic construct
RNTQSST

SEQ ID NO: 21739 - protein, 7 aa, synthetic construct
FNKQSYV

SEQ ID NO: 21740 - protein, 7 aa, synthetic construct
PDPYKMG

SEQ ID NO: 21741 - protein, 7 aa, synthetic construct
KLPTTDH

SEQ ID NO: 21742 - protein, 7 aa, synthetic construct
IMGHKQE

SEQ ID NO: 21743 - protein, 7 aa, synthetic construct
QDPRKGV

SEQ ID NO: 21744 - protein, 7 aa, synthetic construct
SGKGNQN

SEQ ID NO: 21745 - protein, 7 aa, synthetic construct
HQKIHIT

SEQ ID NO: 21746 - protein, 7 aa, synthetic construct
AQQEYKT

SEQ ID NO: 21747 - protein, 7 aa, synthetic construct
RPGTDQP

SEQ ID NO: 21748 - protein, 7 aa, synthetic construct
PDNRALI

SEQ ID NO: 21749 - protein, 7 aa, synthetic construct
TTEYKVM

SEQ ID NO: 21750 - protein, 7 aa, synthetic construct
DKRNHQP

SEQ ID NO: 21751 - protein, 7 aa, synthetic construct
VYRNGTI

SEQ ID NO: 21752 - protein, 7 aa, synthetic construct
DRAFNKE

SEQ ID NO: 21753 - protein, 7 aa, synthetic construct
TAEQRTV

SEQ ID NO: 21754 - protein, 7 aa, synthetic construct
RAGNYNT

SEQ ID NO: 21755 - protein, 7 aa, synthetic construct
NPFKGQP

SEQ ID NO: 21756 - protein, 7 aa, synthetic construct
GPHQIKI

SEQ ID NO: 21757 - protein, 7 aa, synthetic construct
AQKRETW

SEQ ID NO: 21758 - protein, 7 aa, synthetic construct
ENPAIFA

SEQ ID NO: 21759 - protein, 7 aa, synthetic construct
MWEEKHT

SEQ ID NO: 21760 - protein, 7 aa, synthetic construct
YPHDTRI

SEQ ID NO: 21761 - protein, 7 aa, synthetic construct
YSTKDPP

SEQ ID NO: 21762 - protein, 7 aa, synthetic construct
MKTSSDR

SEQ ID NO: 21763 - protein, 7 aa, synthetic construct
VRIEQKQ

SEQ ID NO: 21764 - protein, 7 aa, synthetic construct
NAEMSGG

SEQ ID NO: 21765 - protein, 7 aa, synthetic construct
MQNETRE

SEQ ID NO: 21766 - protein, 7 aa, synthetic construct
WPDMKPA

SEQ ID NO: 21767 - protein, 7 aa, synthetic construct
QNEKTKG

SEQ ID NO: 21768 - protein, 7 aa, synthetic construct
FGHTNFD

SEQ ID NO: 21769 - protein, 7 aa, synthetic construct
NGAQHSQ

SEQ ID NO: 21770 - protein, 7 aa, synthetic construct
PYSGPTL

SEQ ID NO: 21771 - protein, 7 aa, synthetic construct
WNKEPNQ

SEQ ID NO: 21772 - protein, 7 aa, synthetic construct
TYIDGRY

SEQ ID NO: 21773 - protein, 7 aa, synthetic construct
NEKGPMI

SEQ ID NO: 21774 - protein, 7 aa, synthetic construct
AQSRPGG

SEQ ID NO: 21775 - protein, 7 aa, synthetic construct
HKIGRND

SEQ ID NO: 21776 - protein, 7 aa, synthetic construct
GTRASRD

SEQ ID NO: 21777 - protein, 7 aa, synthetic construct
TKEKPHD

SEQ ID NO: 21778 - protein, 7 aa, synthetic construct
QEARKMQ

SEQ ID NO: 21779 - protein, 7 aa, synthetic construct
QANFDIV

SEQ ID NO: 21780 - protein, 7 aa, synthetic construct
DLGHHNI

SEQ ID NO: 21781 - protein, 7 aa, synthetic construct
HVGGSSP

SEQ ID NO: 21782 - protein, 7 aa, synthetic construct
MGMQARV

SEQ ID NO: 21783 - protein, 7 aa, synthetic construct
VVAQVRP

SEQ ID NO: 21784 - protein, 7 aa, synthetic construct
FQSMNSR

SEQ ID NO: 21785 - protein, 7 aa, synthetic construct
NIKLEPS

SEQ ID NO: 21786 - protein, 7 aa, synthetic construct
AIARGET

SEQ ID NO: 21787 - protein, 7 aa, synthetic construct
EVRTHSY

SEQ ID NO: 21788 - protein, 7 aa, synthetic construct
VKQSPAV

SEQ ID NO: 21789 - protein, 7 aa, synthetic construct
MFKTGEW

SEQ ID NO: 21790 - protein, 7 aa, synthetic construct
FQEHKRN

SEQ ID NO: 21791 - protein, 7 aa, synthetic construct
QQTTRDK

SEQ ID NO: 21792 - protein, 7 aa, synthetic construct
FHEHSVP

SEQ ID NO: 21793 - protein, 7 aa, synthetic construct
TAANNIV

SEQ ID NO: 21794 - protein, 7 aa, synthetic construct
PQHMDRI

SEQ ID NO: 21795 - protein, 7 aa, synthetic construct
TGTQSHH

SEQ ID NO: 21796 - protein, 7 aa, synthetic construct
TPHSTHD

SEQ ID NO: 21797 - protein, 7 aa, synthetic construct
QRQGWPS

SEQ ID NO: 21798 - protein, 7 aa, synthetic construct
GQMAFNP

SEQ ID NO: 21799 - protein, 7 aa, synthetic construct
KATFNVG

SEQ ID NO: 21800 - protein, 7 aa, synthetic construct
YKAIYQD

SEQ ID NO: 21801 - protein, 7 aa, synthetic construct
EDHPRGP

SEQ ID NO: 21802 - protein, 7 aa, synthetic construct
SKSDLFM

SEQ ID NO: 21803 - protein, 7 aa, synthetic construct
WMDIRKD

SEQ ID NO: 21804 - protein, 7 aa, synthetic construct
QMIARNS

SEQ ID NO: 21805 - protein, 7 aa, synthetic construct
NLKDKHI

SEQ ID NO: 21806 - protein, 7 aa, synthetic construct
SGAGYPA

SEQ ID NO: 21807 - protein, 7 aa, synthetic construct
EDAYHLE

SEQ ID NO: 21808 - protein, 7 aa, synthetic construct
TANWEAS

SEQ ID NO: 21809 - protein, 7 aa, synthetic construct
LKGTYQE

SEQ ID NO: 21810 - protein, 7 aa, synthetic construct
GAEQLSG

SEQ ID NO: 21811 - protein, 7 aa, synthetic construct
STNSQLS

SEQ ID NO: 21812 - protein, 7 aa, synthetic construct
PTHAKMS

SEQ ID NO: 21813 - protein, 7 aa, synthetic construct
WAKGIQA

SEQ ID NO: 21814 - protein, 7 aa, synthetic construct
PKGDRNQ

SEQ ID NO: 21815 - protein, 7 aa, synthetic construct
GRIENTT

SEQ ID NO: 21816 - protein, 7 aa, synthetic construct
TREFIQG

SEQ ID NO: 21817 - protein, 7 aa, synthetic construct
DNAPKMS

SEQ ID NO: 21818 - protein, 7 aa, synthetic construct
IHRGPPL

SEQ ID NO: 21819 - protein, 7 aa, synthetic construct
LNRVQHQ

SEQ ID NO: 21820 - protein, 7 aa, synthetic construct
FEGPVAP

SEQ ID NO: 21821 - protein, 7 aa, synthetic construct
NMPKYLD

SEQ ID NO: 21822 - protein, 7 aa, synthetic construct
VGLQDHK

SEQ ID NO: 21823 - protein, 7 aa, synthetic construct
RVMQGLA

SEQ ID NO: 21824 - protein, 7 aa, synthetic construct
DAVNLKQ

SEQ ID NO: 21825 - protein, 7 aa, synthetic construct
TRTEVNA

SEQ ID NO: 21826 - protein, 7 aa, synthetic construct
MIPQMRQ

SEQ ID NO: 21827 - protein, 7 aa, synthetic construct
MMHKQDD

SEQ ID NO: 21828 - protein, 7 aa, synthetic construct
GAMGTPP

SEQ ID NO: 21829 - protein, 7 aa, synthetic construct
INQQIIQ

SEQ ID NO: 21830 - protein, 7 aa, synthetic construct
THTANHP

SEQ ID NO: 21831 - protein, 7 aa, synthetic construct
TDMQSQK

SEQ ID NO: 21832 - protein, 7 aa, synthetic construct
DPHHKIA

SEQ ID NO: 21833 - protein, 7 aa, synthetic construct
LKQDSYA

SEQ ID NO: 21834 - protein, 7 aa, synthetic construct
EARPGAM

SEQ ID NO: 21835 - protein, 7 aa, synthetic construct
NTDFVKN

SEQ ID NO: 21836 - protein, 7 aa, synthetic construct
KDYKEVY

SEQ ID NO: 21837 - protein, 7 aa, synthetic construct
MGNRHQP

SEQ ID NO: 21838 - protein, 7 aa, synthetic construct
TYDRVKT

SEQ ID NO: 21839 - protein, 7 aa, synthetic construct
GEHAMQL

SEQ ID NO: 21840 - protein, 7 aa, synthetic construct
TRPNNHM

SEQ ID NO: 21841 - protein, 7 aa, synthetic construct
DLHQVKG

SEQ ID NO: 21842 - protein, 7 aa, synthetic construct
VSMDSKK

SEQ ID NO: 21843 - protein, 7 aa, synthetic construct
TLGSLGQ

SEQ ID NO: 21844 - protein, 7 aa, synthetic construct
VANRDNN

SEQ ID NO: 21845 - protein, 7 aa, synthetic construct
ARQPPEV

SEQ ID NO: 21846 - protein, 7 aa, synthetic construct
PVHHHPG

SEQ ID NO: 21847 - protein, 7 aa, synthetic construct
TTDSKKG

SEQ ID NO: 21848 - protein, 7 aa, synthetic construct
WRNHLTS

SEQ ID NO: 21849 - protein, 7 aa, synthetic construct
RFENTQR

SEQ ID NO: 21850 - protein, 7 aa, synthetic construct
WSRQDTM

SEQ ID NO: 21851 - protein, 7 aa, synthetic construct
VDSPHRM

SEQ ID NO: 21852 - protein, 7 aa, synthetic construct
NPHNDIA

SEQ ID NO: 21853 - protein, 7 aa, synthetic construct
NGTGRDF

SEQ ID NO: 21854 - protein, 7 aa, synthetic construct
AGRNQSA

SEQ ID NO: 21855 - protein, 7 aa, synthetic construct
QPQMNKE

SEQ ID NO: 21856 - protein, 7 aa, synthetic construct
HQSYNID

SEQ ID NO: 21857 - protein, 7 aa, synthetic construct
WLADRGE

SEQ ID NO: 21858 - protein, 7 aa, synthetic construct
PMQSLPT

SEQ ID NO: 21859 - protein, 7 aa, synthetic construct
VLNRYPP

SEQ ID NO: 21860 - protein, 7 aa, synthetic construct
VTVKDWH

SEQ ID NO: 21861 - protein, 7 aa, synthetic construct
RINNDQP

SEQ ID NO: 21862 - protein, 7 aa, synthetic construct
VPERYNT

SEQ ID NO: 21863 - protein, 7 aa, synthetic construct
FLRDRDT

SEQ ID NO: 21864 - protein, 7 aa, synthetic construct
TMYTDRV

SEQ ID NO: 21865 - protein, 7 aa, synthetic construct
PIDHHAM

SEQ ID NO: 21866 - protein, 7 aa, synthetic construct
KHVKATD

SEQ ID NO: 21867 - protein, 7 aa, synthetic construct
ANYPSKG

SEQ ID NO: 21868 - protein, 7 aa, synthetic construct
TTDDRRL

SEQ ID NO: 21869 - protein, 7 aa, synthetic construct
TSIKLDG

SEQ ID NO: 21870 - protein, 7 aa, synthetic construct
LQPKDKE

SEQ ID NO: 21871 - protein, 7 aa, synthetic construct
HGIGAAR

SEQ ID NO: 21872 - protein, 7 aa, synthetic construct
MAKEGTA

SEQ ID NO: 21873 - protein, 7 aa, synthetic construct
MNMRVAH

SEQ ID NO: 21874 - protein, 7 aa, synthetic construct
HHVNLQE

SEQ ID NO: 21875 - protein, 7 aa, synthetic construct
HGLKGMD

SEQ ID NO: 21876 - protein, 7 aa, synthetic construct
QEFTAHE

SEQ ID NO: 21877 - protein, 7 aa, synthetic construct
LVTKKND

SEQ ID NO: 21878 - protein, 7 aa, synthetic construct
IHHLTEA

SEQ ID NO: 21879 - protein, 7 aa, synthetic construct
NRMRIDI

SEQ ID NO: 21880 - protein, 7 aa, synthetic construct
PFIAQES

SEQ ID NO: 21881 - protein, 7 aa, synthetic construct
YRVHAGA

SEQ ID NO: 21882 - protein, 7 aa, synthetic construct
FLDHLEG

SEQ ID NO: 21883 - protein, 7 aa, synthetic construct
WGYDNTK

SEQ ID NO: 21884 - protein, 7 aa, synthetic construct
EHMPVKS

SEQ ID NO: 21885 - protein, 7 aa, synthetic construct
FGKGTTP

SEQ ID NO: 21886 - protein, 7 aa, synthetic construct
SVYRAQP

SEQ ID NO: 21887 - protein, 7 aa, synthetic construct
YDTKRDP

SEQ ID NO: 21888 - protein, 7 aa, synthetic construct
WVAKSVG

SEQ ID NO: 21889 - protein, 7 aa, synthetic construct
HAHDLHM

SEQ ID NO: 21890 - protein, 7 aa, synthetic construct
KEEGGGP

SEQ ID NO: 21891 - protein, 7 aa, synthetic construct
MAQNAYV

SEQ ID NO: 21892 - protein, 7 aa, synthetic construct
FSMSTNP

SEQ ID NO: 21893 - protein, 7 aa, synthetic construct
LFTSDNP

SEQ ID NO: 21894 - protein, 7 aa, synthetic construct
EKTQKPL

SEQ ID NO: 21895 - protein, 7 aa, synthetic construct
MIIKYQE

SEQ ID NO: 21896 - protein, 7 aa, synthetic construct
GYGRPLQ

SEQ ID NO: 21897 - protein, 7 aa, synthetic construct
LPYLGGE

SEQ ID NO: 21898 - protein, 7 aa, synthetic construct
HKGPPAT

SEQ ID NO: 21899 - protein, 7 aa, synthetic construct
VKIVNMK

SEQ ID NO: 21900 - protein, 7 aa, synthetic construct
NRDMTVT

SEQ ID NO: 21901 - protein, 7 aa, synthetic construct
SANKGIG

SEQ ID NO: 21902 - protein, 7 aa, synthetic construct
QKWEQSV

SEQ ID NO: 21903 - protein, 7 aa, synthetic construct
AHTKVAM

SEQ ID NO: 21904 - protein, 7 aa, synthetic construct
TWEGFSP

SEQ ID NO: 21905 - protein, 7 aa, synthetic construct
QQSMREM

SEQ ID NO: 21906 - protein, 7 aa, synthetic construct
RGNDMAN

SEQ ID NO: 21907 - protein, 7 aa, synthetic construct
VHNTKGH

SEQ ID NO: 21908 - protein, 7 aa, synthetic construct
KPEVMAV

SEQ ID NO: 21909 - protein, 7 aa, synthetic construct
DHEKVKE

SEQ ID NO: 21910 - protein, 7 aa, synthetic construct
VNYTTVV

SEQ ID NO: 21911 - protein, 7 aa, synthetic construct
NPMVNHT

SEQ ID NO: 21912 - protein, 7 aa, synthetic construct
MNTRNDG

SEQ ID NO: 21913 - protein, 7 aa, synthetic construct
HFSSSDM

SEQ ID NO: 21914 - protein, 7 aa, synthetic construct
SKSMEKP

SEQ ID NO: 21915 - protein, 7 aa, synthetic construct
VIPKSML

SEQ ID NO: 21916 - protein, 7 aa, synthetic construct
GTRPPHM

SEQ ID NO: 21917 - protein, 7 aa, synthetic construct
KLVHHTI

SEQ ID NO: 21918 - protein, 7 aa, synthetic construct
DIHKSGD

SEQ ID NO: 21919 - protein, 7 aa, synthetic construct
FSSMKIV

SEQ ID NO: 21920 - protein, 7 aa, synthetic construct
GHPPSAR

SEQ ID NO: 21921 - protein, 7 aa, synthetic construct
LNPTKER

SEQ ID NO: 21922 - protein, 7 aa, synthetic construct
ISIQHAR

SEQ ID NO: 21923 - protein, 7 aa, synthetic construct
AFGIETR

SEQ ID NO: 21924 - protein, 7 aa, synthetic construct
TANQVNP

SEQ ID NO: 21925 - protein, 7 aa, synthetic construct
KNESYMM

SEQ ID NO: 21926 - protein, 7 aa, synthetic construct
PIKVNTN

SEQ ID NO: 21927 - protein, 7 aa, synthetic construct
PKPPKGV

SEQ ID NO: 21928 - protein, 7 aa, synthetic construct
SFHDKAH

SEQ ID NO: 21929 - protein, 7 aa, synthetic construct
ASAREML

SEQ ID NO: 21930 - protein, 7 aa, synthetic construct
DRDSRMG

SEQ ID NO: 21931 - protein, 7 aa, synthetic construct
WGHRQSS

SEQ ID NO: 21932 - protein, 7 aa, synthetic construct
VLAQESS

SEQ ID NO: 21933 - protein, 7 aa, synthetic construct
PPHFNAI

SEQ ID NO: 21934 - protein, 7 aa, synthetic construct
HSKSHVL

SEQ ID NO: 21935 - protein, 7 aa, synthetic construct
RNAQHEV

SEQ ID NO: 21936 - protein, 7 aa, synthetic construct
QIPPTGM

SEQ ID NO: 21937 - protein, 7 aa, synthetic construct
LLSYHDA

SEQ ID NO: 21938 - protein, 7 aa, synthetic construct
RHSDAMN

SEQ ID NO: 21939 - protein, 7 aa, synthetic construct
KAMYNPE

SEQ ID NO: 21940 - protein, 7 aa, synthetic construct
YDGLHFK

SEQ ID NO: 21941 - protein, 7 aa, synthetic construct
ATHNMTV

SEQ ID NO: 21942 - protein, 7 aa, synthetic construct
WHAMVND

SEQ ID NO: 21943 - protein, 7 aa, synthetic construct
YNRDTKH

SEQ ID NO: 21944 - protein, 7 aa, synthetic construct
KMLKTVD

SEQ ID NO: 21945 - protein, 7 aa, synthetic construct
TKYPHAI

SEQ ID NO: 21946 - protein, 7 aa, synthetic construct
ATGSENH

SEQ ID NO: 21947 - protein, 7 aa, synthetic construct
AGKYYVA

SEQ ID NO: 21948 - protein, 7 aa, synthetic construct
YLRGNVV

SEQ ID NO: 21949 - protein, 7 aa, synthetic construct
WRQQNQN

SEQ ID NO: 21950 - protein, 7 aa, synthetic construct
PHKTPMS

SEQ ID NO: 21951 - protein, 7 aa, synthetic construct
GKRDLSE

SEQ ID NO: 21952 - protein, 7 aa, synthetic construct
EMKLLSG

SEQ ID NO: 21953 - protein, 7 aa, synthetic construct
FMNHMEG

SEQ ID NO: 21954 - protein, 7 aa, synthetic construct
IATTHNF

SEQ ID NO: 21955 - protein, 7 aa, synthetic construct
LKMVPQE

SEQ ID NO: 21956 - protein, 7 aa, synthetic construct
QQVDKYD

SEQ ID NO: 21957 - protein, 7 aa, synthetic construct
PNQHMLA

SEQ ID NO: 21958 - protein, 7 aa, synthetic construct
QYKHDLT

SEQ ID NO: 21959 - protein, 7 aa, synthetic construct
NVKMEVQ

SEQ ID NO: 21960 - protein, 7 aa, synthetic construct
HWENAME

SEQ ID NO: 21961 - protein, 7 aa, synthetic construct
RYEAGFS

SEQ ID NO: 21962 - protein, 7 aa, synthetic construct
SYKETVA

SEQ ID NO: 21963 - protein, 7 aa, synthetic construct
GHKVDAH

SEQ ID NO: 21964 - protein, 7 aa, synthetic construct
NIHHNDI

SEQ ID NO: 21965 - protein, 7 aa, synthetic construct
TFAHPKD

SEQ ID NO: 21966 - protein, 7 aa, synthetic construct
KGEVNRG

SEQ ID NO: 21967 - protein, 7 aa, synthetic construct
HHNEHQA

SEQ ID NO: 21968 - protein, 7 aa, synthetic construct
WNEWKIA

SEQ ID NO: 21969 - protein, 7 aa, synthetic construct
LLGLTPP

SEQ ID NO: 21970 - protein, 7 aa, synthetic construct
HQYSTQE

SEQ ID NO: 21971 - protein, 7 aa, synthetic construct
VSTGSIR

SEQ ID NO: 21972 - protein, 7 aa, synthetic construct
GMKAYEV

SEQ ID NO: 21973 - protein, 7 aa, synthetic construct
FHGMDQA

SEQ ID NO: 21974 - protein, 7 aa, synthetic construct
MHNKAER

SEQ ID NO: 21975 - protein, 7 aa, synthetic construct
TGENHQG

SEQ ID NO: 21976 - protein, 7 aa, synthetic construct
PDTMQIK

SEQ ID NO: 21977 - protein, 7 aa, synthetic construct
KANFSIN

SEQ ID NO: 21978 - protein, 7 aa, synthetic construct
QYVNISE

SEQ ID NO: 21979 - protein, 7 aa, synthetic construct
KFPEGPA

SEQ ID NO: 21980 - protein, 7 aa, synthetic construct
HPAHQQN

SEQ ID NO: 21981 - protein, 7 aa, synthetic construct
YGHEWVG

SEQ ID NO: 21982 - protein, 7 aa, synthetic construct
FPVHSSA

SEQ ID NO: 21983 - protein, 7 aa, synthetic construct
PVQQGYY

SEQ ID NO: 21984 - protein, 7 aa, synthetic construct
RMDGAPW

SEQ ID NO: 21985 - protein, 7 aa, synthetic construct
AARSQAY

SEQ ID NO: 21986 - protein, 7 aa, synthetic construct
TNKEYMY

SEQ ID NO: 21987 - protein, 7 aa, synthetic construct
WTQKDSR

SEQ ID NO: 21988 - protein, 7 aa, synthetic construct
VFRKIES

SEQ ID NO: 21989 - protein, 7 aa, synthetic construct
DNQSRIL

SEQ ID NO: 21990 - protein, 7 aa, synthetic construct
VGETFKP

SEQ ID NO: 21991 - protein, 7 aa, synthetic construct
NKHRAEF

SEQ ID NO: 21992 - protein, 7 aa, synthetic construct
ATALAQG

SEQ ID NO: 21993 - protein, 7 aa, synthetic construct
EGSANVV

SEQ ID NO: 21994 - protein, 7 aa, synthetic construct
NQVQGSY

SEQ ID NO: 21995 - protein, 7 aa, synthetic construct
NKAMSKD

SEQ ID NO: 21996 - protein, 7 aa, synthetic construct
SSNLATI

SEQ ID NO: 21997 - protein, 7 aa, synthetic construct
MDPSRAL

SEQ ID NO: 21998 - protein, 7 aa, synthetic construct
IYAAVQE

SEQ ID NO: 21999 - protein, 7 aa, synthetic construct
LIRAGDM

SEQ ID NO: 22000 - protein, 7 aa, synthetic construct
TTNHRGL

SEQ ID NO: 22001 - protein, 7 aa, synthetic construct
KGPPSMP

SEQ ID NO: 22002 - protein, 7 aa, synthetic construct
PINEKYE

SEQ ID NO: 22003 - protein, 7 aa, synthetic construct
YVPPKQM

SEQ ID NO: 22004 - protein, 7 aa, synthetic construct
MREFKFS

SEQ ID NO: 22005 - protein, 7 aa, synthetic construct
NKDGFQI

SEQ ID NO: 22006 - protein, 7 aa, synthetic construct
DTSGHMI

SEQ ID NO: 22007 - protein, 7 aa, synthetic construct
QPGKDEV

SEQ ID NO: 22008 - protein, 7 aa, synthetic construct
GDVQKPS

SEQ ID NO: 22009 - protein, 7 aa, synthetic construct
GIGHMKE

SEQ ID NO: 22010 - protein, 7 aa, synthetic construct
YRPVIDK

SEQ ID NO: 22011 - protein, 7 aa, synthetic construct
SPYGANP

SEQ ID NO: 22012 - protein, 7 aa, synthetic construct
NLRHTDP

SEQ ID NO: 22013 - protein, 7 aa, synthetic construct
NMEPKRY

SEQ ID NO: 22014 - protein, 7 aa, synthetic construct
WQAPKAN

SEQ ID NO: 22015 - protein, 7 aa, synthetic construct
ELSTPRG

SEQ ID NO: 22016 - protein, 7 aa, synthetic construct
HLAPKSE

SEQ ID NO: 22017 - protein, 7 aa, synthetic construct
NRAQLDR

SEQ ID NO: 22018 - protein, 7 aa, synthetic construct
ATDTHEL

SEQ ID NO: 22019 - protein, 7 aa, synthetic construct
PVNKNSS

SEQ ID NO: 22020 - protein, 7 aa, synthetic construct
VSSMFQG

SEQ ID NO: 22021 - protein, 7 aa, synthetic construct
AKPYGHA

SEQ ID NO: 22022 - protein, 7 aa, synthetic construct
SDSTKDR

SEQ ID NO: 22023 - protein, 7 aa, synthetic construct
YQGPEFR

SEQ ID NO: 22024 - protein, 7 aa, synthetic construct
YDKHSKQ

SEQ ID NO: 22025 - protein, 7 aa, synthetic construct
MQVQRSS

SEQ ID NO: 22026 - protein, 7 aa, synthetic construct
NATAKQH

SEQ ID NO: 22027 - protein, 7 aa, synthetic construct
TPDYSAR

SEQ ID NO: 22028 - protein, 7 aa, synthetic construct
REGVQWE

SEQ ID NO: 22029 - protein, 7 aa, synthetic construct
LHTWRQE

SEQ ID NO: 22030 - protein, 7 aa, synthetic construct
DAKLTVA

SEQ ID NO: 22031 - protein, 7 aa, synthetic construct
LGGPDPI

SEQ ID NO: 22032 - protein, 7 aa, synthetic construct
VGKHDIV

SEQ ID NO: 22033 - protein, 7 aa, synthetic construct
TNNNLTI

SEQ ID NO: 22034 - protein, 7 aa, synthetic construct
NVNRHQG

SEQ ID NO: 22035 - protein, 7 aa, synthetic construct
PNSNQLL

SEQ ID NO: 22036 - protein, 7 aa, synthetic construct
RSQDGIP

SEQ ID NO: 22037 - protein, 7 aa, synthetic construct
YAHPFPA

SEQ ID NO: 22038 - protein, 7 aa, synthetic construct
NLMKVAV

SEQ ID NO: 22039 - protein, 7 aa, synthetic construct
QVNVKLL

SEQ ID NO: 22040 - protein, 7 aa, synthetic construct
SNPSLTY

SEQ ID NO: 22041 - protein, 7 aa, synthetic construct
KTGVEEM

SEQ ID NO: 22042 - protein, 7 aa, synthetic construct
PGHGYGI

SEQ ID NO: 22043 - protein, 7 aa, synthetic construct
EKNTMIG

SEQ ID NO: 22044 - protein, 7 aa, synthetic construct
TPTARGN

SEQ ID NO: 22045 - protein, 7 aa, synthetic construct
GRGQPQH

SEQ ID NO: 22046 - protein, 7 aa, synthetic construct
LTHQVYD

SEQ ID NO: 22047 - protein, 7 aa, synthetic construct
DETMVRI

SEQ ID NO: 22048 - protein, 7 aa, synthetic construct
YNHQRLQ

SEQ ID NO: 22049 - protein, 7 aa, synthetic construct
TLNAIQV

SEQ ID NO: 22050 - protein, 7 aa, synthetic construct
RNMHAEN

SEQ ID NO: 22051 - protein, 7 aa, synthetic construct
NPVKQQF

SEQ ID NO: 22052 - protein, 7 aa, synthetic construct
FHTSSRD

SEQ ID NO: 22053 - protein, 7 aa, synthetic construct
KPGQDWL

SEQ ID NO: 22054 - protein, 7 aa, synthetic construct
ATGRQLN

SEQ ID NO: 22055 - protein, 7 aa, synthetic construct
MRENHFE

SEQ ID NO: 22056 - protein, 7 aa, synthetic construct
WQSKQEE

SEQ ID NO: 22057 - protein, 7 aa, synthetic construct
KPTEKLL

SEQ ID NO: 22058 - protein, 7 aa, synthetic construct
ARDSAMD

SEQ ID NO: 22059 - protein, 7 aa, synthetic construct
ASPVNRG

SEQ ID NO: 22060 - protein, 7 aa, synthetic construct
PLHSRDI

SEQ ID NO: 22061 - protein, 7 aa, synthetic construct
PATQRMF

SEQ ID NO: 22062 - protein, 7 aa, synthetic construct
QPPMATK

SEQ ID NO: 22063 - protein, 7 aa, synthetic construct
VRAIDEN

SEQ ID NO: 22064 - protein, 7 aa, synthetic construct
QDKHGVG

SEQ ID NO: 22065 - protein, 7 aa, synthetic construct
FHSQNIP

SEQ ID NO: 22066 - protein, 7 aa, synthetic construct
FFNNRNP

SEQ ID NO: 22067 - protein, 7 aa, synthetic construct
FFNAKST

SEQ ID NO: 22068 - protein, 7 aa, synthetic construct
YVIRPTG

SEQ ID NO: 22069 - protein, 7 aa, synthetic construct
VYEAHGS

SEQ ID NO: 22070 - protein, 7 aa, synthetic construct
IVSRSSS

SEQ ID NO: 22071 - protein, 7 aa, synthetic construct
VNGRMGD

SEQ ID NO: 22072 - protein, 7 aa, synthetic construct
NWSVKVE

SEQ ID NO: 22073 - protein, 7 aa, synthetic construct
SKWVNNA

SEQ ID NO: 22074 - protein, 7 aa, synthetic construct
HVNPRTT

SEQ ID NO: 22075 - protein, 7 aa, synthetic construct
FTGFAAD

SEQ ID NO: 22076 - protein, 7 aa, synthetic construct
SGRADGI

SEQ ID NO: 22077 - protein, 7 aa, synthetic construct
FNKDFDT

SEQ ID NO: 22078 - protein, 7 aa, synthetic construct
HSHVMQA

SEQ ID NO: 22079 - protein, 7 aa, synthetic construct
TFAAEMA

SEQ ID NO: 22080 - protein, 7 aa, synthetic construct
IKESSRY

SEQ ID NO: 22081 - protein, 7 aa, synthetic construct
RDRNLEM

SEQ ID NO: 22082 - protein, 7 aa, synthetic construct
TMRSTEF

SEQ ID NO: 22083 - protein, 7 aa, synthetic construct
TTQNGTH

SEQ ID NO: 22084 - protein, 7 aa, synthetic construct
PFQGYAA

SEQ ID NO: 22085 - protein, 7 aa, synthetic construct
AVASLKG

SEQ ID NO: 22086 - protein, 7 aa, synthetic construct
QQSDLHR

SEQ ID NO: 22087 - protein, 7 aa, synthetic construct
GNAFLPM

SEQ ID NO: 22088 - protein, 7 aa, synthetic construct
NNMNQTS

SEQ ID NO: 22089 - protein, 7 aa, synthetic construct
KAQTHDR

SEQ ID NO: 22090 - protein, 7 aa, synthetic construct
ERNPVKE

SEQ ID NO: 22091 - protein, 7 aa, synthetic construct
VHQDNQW

SEQ ID NO: 22092 - protein, 7 aa, synthetic construct
IINHGHG

SEQ ID NO: 22093 - protein, 7 aa, synthetic construct
IKENMRV

SEQ ID NO: 22094 - protein, 7 aa, synthetic construct
RAAVSQH

SEQ ID NO: 22095 - protein, 7 aa, synthetic construct
MKNMQFI

SEQ ID NO: 22096 - protein, 7 aa, synthetic construct
EMRQVQS

SEQ ID NO: 22097 - protein, 7 aa, synthetic construct
EHYVGNS

SEQ ID NO: 22098 - protein, 7 aa, synthetic construct
YRFHGEN

SEQ ID NO: 22099 - protein, 7 aa, synthetic construct
RLDSMTK

SEQ ID NO: 22100 - protein, 7 aa, synthetic construct
WSEQTRQ

SEQ ID NO: 22101 - protein, 7 aa, synthetic construct
RPTEQSL

SEQ ID NO: 22102 - protein, 7 aa, synthetic construct
LRSTSPF

SEQ ID NO: 22103 - protein, 7 aa, synthetic construct
YLDHHRP

SEQ ID NO: 22104 - protein, 7 aa, synthetic construct
DGKGFAF

SEQ ID NO: 22105 - protein, 7 aa, synthetic construct
NRKGMTE

SEQ ID NO: 22106 - protein, 7 aa, synthetic construct
EPLDQNR

SEQ ID NO: 22107 - protein, 7 aa, synthetic construct
SMQRGIN

SEQ ID NO: 22108 - protein, 7 aa, synthetic construct
LIGIGQA

SEQ ID NO: 22109 - protein, 7 aa, synthetic construct
NHHPGSS

SEQ ID NO: 22110 - protein, 7 aa, synthetic construct
TMNEGIM

SEQ ID NO: 22111 - protein, 7 aa, synthetic construct
MDHGISS

SEQ ID NO: 22112 - protein, 7 aa, synthetic construct
HQKSLSH

SEQ ID NO: 22113 - protein, 7 aa, synthetic construct
KSASFTS

SEQ ID NO: 22114 - protein, 7 aa, synthetic construct
KNHQAGE

SEQ ID NO: 22115 - protein, 7 aa, synthetic construct
PAGDNQR

SEQ ID NO: 22116 - protein, 7 aa, synthetic construct
LENNPRV

SEQ ID NO: 22117 - protein, 7 aa, synthetic construct
QKHILSD

SEQ ID NO: 22118 - protein, 7 aa, synthetic construct
NDQMMRS

SEQ ID NO: 22119 - protein, 7 aa, synthetic construct
RSDKLVH

SEQ ID NO: 22120 - protein, 7 aa, synthetic construct
FDKQLRI

SEQ ID NO: 22121 - protein, 7 aa, synthetic construct
DQVSKKT

SEQ ID NO: 22122 - protein, 7 aa, synthetic construct
DAPRATF

SEQ ID NO: 22123 - protein, 7 aa, synthetic construct
NPNEKGA

SEQ ID NO: 22124 - protein, 7 aa, synthetic construct
FNHQHIK

SEQ ID NO: 22125 - protein, 7 aa, synthetic construct
WDNAIGT

SEQ ID NO: 22126 - protein, 7 aa, synthetic construct
EWNPENP

SEQ ID NO: 22127 - protein, 7 aa, synthetic construct
IGPNKLH

SEQ ID NO: 22128 - protein, 7 aa, synthetic construct
ERRYVNE

SEQ ID NO: 22129 - protein, 7 aa, synthetic construct
KMTDFNK

SEQ ID NO: 22130 - protein, 7 aa, synthetic construct
LQTSSKH

SEQ ID NO: 22131 - protein, 7 aa, synthetic construct
LYRATSG

SEQ ID NO: 22132 - protein, 7 aa, synthetic construct
GTKPIVF

SEQ ID NO: 22133 - protein, 7 aa, synthetic construct
NSDHISP

SEQ ID NO: 22134 - protein, 7 aa, synthetic construct
MHKPPEA

SEQ ID NO: 22135 - protein, 7 aa, synthetic construct
SAHPHEM

SEQ ID NO: 22136 - protein, 7 aa, synthetic construct
HPEKYDS

SEQ ID NO: 22137 - protein, 7 aa, synthetic construct
KATVQMS

SEQ ID NO: 22138 - protein, 7 aa, synthetic construct
VMKDMTQ

SEQ ID NO: 22139 - protein, 7 aa, synthetic construct
HHRQTTE

SEQ ID NO: 22140 - protein, 7 aa, synthetic construct
PRSDPEA

SEQ ID NO: 22141 - protein, 7 aa, synthetic construct
NSYDLGG

SEQ ID NO: 22142 - protein, 7 aa, synthetic construct
QDYTTKT

SEQ ID NO: 22143 - protein, 7 aa, synthetic construct
FNTQMQS

SEQ ID NO: 22144 - protein, 7 aa, synthetic construct
NEKWMDA

SEQ ID NO: 22145 - protein, 7 aa, synthetic construct
TLPFMVE

SEQ ID NO: 22146 - protein, 7 aa, synthetic construct
VNEKKEG

SEQ ID NO: 22147 - protein, 7 aa, synthetic construct
NSIEIRP

SEQ ID NO: 22148 - protein, 7 aa, synthetic construct
DSQGVRT

SEQ ID NO: 22149 - protein, 7 aa, synthetic construct
DNEYVRE

SEQ ID NO: 22150 - protein, 7 aa, synthetic construct
QPLQQHH

SEQ ID NO: 22151 - protein, 7 aa, synthetic construct
PDTGHFS

SEQ ID NO: 22152 - protein, 7 aa, synthetic construct
HNKLSTI

SEQ ID NO: 22153 - protein, 7 aa, synthetic construct
YHMTIRE

SEQ ID NO: 22154 - protein, 7 aa, synthetic construct
QAPVKVH

SEQ ID NO: 22155 - protein, 7 aa, synthetic construct
GIYTNLA

SEQ ID NO: 22156 - protein, 7 aa, synthetic construct
IRQFKQD

SEQ ID NO: 22157 - protein, 7 aa, synthetic construct
NPQKLTS

SEQ ID NO: 22158 - protein, 7 aa, synthetic construct
DPPKTAL

SEQ ID NO: 22159 - protein, 7 aa, synthetic construct
DGFTRNN

SEQ ID NO: 22160 - protein, 7 aa, synthetic construct
NYERTSM

SEQ ID NO: 22161 - protein, 7 aa, synthetic construct
MTEHWEA

SEQ ID NO: 22162 - protein, 7 aa, synthetic construct
QRNDHDG

SEQ ID NO: 22163 - protein, 7 aa, synthetic construct
IRDTMVK

SEQ ID NO: 22164 - protein, 7 aa, synthetic construct
HVTPNQI

SEQ ID NO: 22165 - protein, 7 aa, synthetic construct
NGSIMQL

SEQ ID NO: 22166 - protein, 7 aa, synthetic construct
QGVNNDP

SEQ ID NO: 22167 - protein, 7 aa, synthetic construct
RDVKPET

SEQ ID NO: 22168 - protein, 7 aa, synthetic construct
MVADETR

SEQ ID NO: 22169 - protein, 7 aa, synthetic construct
HIDGTRM

SEQ ID NO: 22170 - protein, 7 aa, synthetic construct
RVMDPQI

SEQ ID NO: 22171 - protein, 7 aa, synthetic construct
AVRHNEI

SEQ ID NO: 22172 - protein, 7 aa, synthetic construct
SFSILTD

SEQ ID NO: 22173 - protein, 7 aa, synthetic construct
TITYNKG

SEQ ID NO: 22174 - protein, 7 aa, synthetic construct
DTRQSKE

SEQ ID NO: 22175 - protein, 7 aa, synthetic construct
HLERMNG

SEQ ID NO: 22176 - protein, 7 aa, synthetic construct
STVQNKF

SEQ ID NO: 22177 - protein, 7 aa, synthetic construct
WPYQKHE

SEQ ID NO: 22178 - protein, 7 aa, synthetic construct
RSVPPIQ

SEQ ID NO: 22179 - protein, 7 aa, synthetic construct
IPTAERE

SEQ ID NO: 22180 - protein, 7 aa, synthetic construct
ITRAMPM

SEQ ID NO: 22181 - protein, 7 aa, synthetic construct
SHKAPPI

SEQ ID NO: 22182 - protein, 7 aa, synthetic construct
YQEYHKN

SEQ ID NO: 22183 - protein, 7 aa, synthetic construct
LSPVYGS

SEQ ID NO: 22184 - protein, 7 aa, synthetic construct
KPHSDFL

SEQ ID NO: 22185 - protein, 7 aa, synthetic construct
LHAVKQQ

SEQ ID NO: 22186 - protein, 7 aa, synthetic construct
KPDRAEE

SEQ ID NO: 22187 - protein, 7 aa, synthetic construct
FNAQGSN

SEQ ID NO: 22188 - protein, 7 aa, synthetic construct
AGSSMKI

SEQ ID NO: 22189 - protein, 7 aa, synthetic construct
AYPSKNN

SEQ ID NO: 22190 - protein, 7 aa, synthetic construct
ISEFKGM

SEQ ID NO: 22191 - protein, 7 aa, synthetic construct
DEKMGDR

SEQ ID NO: 22192 - protein, 7 aa, synthetic construct
HRAVTVE

SEQ ID NO: 22193 - protein, 7 aa, synthetic construct
NQKLSML

SEQ ID NO: 22194 - protein, 7 aa, synthetic construct
CGQTCEI

SEQ ID NO: 22195 - protein, 7 aa, synthetic construct
GPPDGVK

SEQ ID NO: 22196 - protein, 7 aa, synthetic construct
KAMPGFG

SEQ ID NO: 22197 - protein, 7 aa, synthetic construct
QTQGQYL

SEQ ID NO: 22198 - protein, 7 aa, synthetic construct
HVPPYTS

SEQ ID NO: 22199 - protein, 7 aa, synthetic construct
NNFPEKY

SEQ ID NO: 22200 - protein, 7 aa, synthetic construct
LNITAQP

SEQ ID NO: 22201 - protein, 7 aa, synthetic construct
SPTTDRA

SEQ ID NO: 22202 - protein, 7 aa, synthetic construct
RNLMPTL

SEQ ID NO: 22203 - protein, 7 aa, synthetic construct
RSATTAI

SEQ ID NO: 22204 - protein, 7 aa, synthetic construct
QHDNGGH

SEQ ID NO: 22205 - protein, 7 aa, synthetic construct
RTTMPAP

SEQ ID NO: 22206 - protein, 7 aa, synthetic construct
KPYDSPE

SEQ ID NO: 22207 - protein, 7 aa, synthetic construct
DSNVHGG

SEQ ID NO: 22208 - protein, 7 aa, synthetic construct
TSNHGFM

SEQ ID NO: 22209 - protein, 7 aa, synthetic construct
LTPNQSA

SEQ ID NO: 22210 - protein, 7 aa, synthetic construct
ISSMHRM

SEQ ID NO: 22211 - protein, 7 aa, synthetic construct
ITKQHNT

SEQ ID NO: 22212 - protein, 7 aa, synthetic construct
PVAKEWG

SEQ ID NO: 22213 - protein, 7 aa, synthetic construct
KPHLPLI

SEQ ID NO: 22214 - protein, 7 aa, synthetic construct
NGMQTLN

SEQ ID NO: 22215 - protein, 7 aa, synthetic construct
EEYRQGG

SEQ ID NO: 22216 - protein, 7 aa, synthetic construct
LSPTHGP

SEQ ID NO: 22217 - protein, 7 aa, synthetic construct
EIRGGTP

SEQ ID NO: 22218 - protein, 7 aa, synthetic construct
ILMQANG

SEQ ID NO: 22219 - protein, 7 aa, synthetic construct
RYDKPNF

SEQ ID NO: 22220 - protein, 7 aa, synthetic construct
GTHFTSG

SEQ ID NO: 22221 - protein, 7 aa, synthetic construct
VTRQTTH

SEQ ID NO: 22222 - protein, 7 aa, synthetic construct
YEGHQEK

SEQ ID NO: 22223 - protein, 7 aa, synthetic construct
WMKDRDY

SEQ ID NO: 22224 - protein, 7 aa, synthetic construct
LGNSQMM

SEQ ID NO: 22225 - protein, 7 aa, synthetic construct
RDVQSQR

SEQ ID NO: 22226 - protein, 7 aa, synthetic construct
VEKKDNH

SEQ ID NO: 22227 - protein, 7 aa, synthetic construct
MGTFRQQ

SEQ ID NO: 22228 - protein, 7 aa, synthetic construct
DQAMHSK

SEQ ID NO: 22229 - protein, 7 aa, synthetic construct
NESKSKI

SEQ ID NO: 22230 - protein, 7 aa, synthetic construct
HGSDFDK

SEQ ID NO: 22231 - protein, 7 aa, synthetic construct
HKAAGTA

SEQ ID NO: 22232 - protein, 7 aa, synthetic construct
FPMMHQE

SEQ ID NO: 22233 - protein, 7 aa, synthetic construct
THPNIQQ

SEQ ID NO: 22234 - protein, 7 aa, synthetic construct
YPAHYNS

SEQ ID NO: 22235 - protein, 7 aa, synthetic construct
VSLKTTP

SEQ ID NO: 22236 - protein, 7 aa, synthetic construct
IQAPHMP

SEQ ID NO: 22237 - protein, 7 aa, synthetic construct
DVGRSEQ

SEQ ID NO: 22238 - protein, 7 aa, synthetic construct
AKIRSDN

SEQ ID NO: 22239 - protein, 7 aa, synthetic construct
GNNAAPW

SEQ ID NO: 22240 - protein, 7 aa, synthetic construct
SSDHGSD

SEQ ID NO: 22241 - protein, 7 aa, synthetic construct
MKVTNML

SEQ ID NO: 22242 - protein, 7 aa, synthetic construct
NTTGMGD

SEQ ID NO: 22243 - protein, 7 aa, synthetic construct
DKRMTPV

SEQ ID NO: 22244 - protein, 7 aa, synthetic construct
AFKNDYI

SEQ ID NO: 22245 - protein, 7 aa, synthetic construct
HVKEQHN

SEQ ID NO: 22246 - protein, 7 aa, synthetic construct
FEKFAVE

SEQ ID NO: 22247 - protein, 7 aa, synthetic construct
RSAVPFD

SEQ ID NO: 22248 - protein, 7 aa, synthetic construct
MAPPPAA

SEQ ID NO: 22249 - protein, 7 aa, synthetic construct
IHMRSRE

SEQ ID NO: 22250 - protein, 7 aa, synthetic construct
PHKGTQQ

SEQ ID NO: 22251 - protein, 7 aa, synthetic construct
AMRIASG

SEQ ID NO: 22252 - protein, 7 aa, synthetic construct
EATNGQM

SEQ ID NO: 22253 - protein, 7 aa, synthetic construct
YPELTKE

SEQ ID NO: 22254 - protein, 7 aa, synthetic construct
MAMQSNS

SEQ ID NO: 22255 - protein, 7 aa, synthetic construct
ADQNQYK

SEQ ID NO: 22256 - protein, 7 aa, synthetic construct
KGVPTKD

SEQ ID NO: 22257 - protein, 7 aa, synthetic construct
GIGDLRG

SEQ ID NO: 22258 - protein, 7 aa, synthetic construct
TKQLVGY

SEQ ID NO: 22259 - protein, 7 aa, synthetic construct
SDVSRHP

SEQ ID NO: 22260 - protein, 7 aa, synthetic construct
SEKLSTS

SEQ ID NO: 22261 - protein, 7 aa, synthetic construct
VPNGINY

SEQ ID NO: 22262 - protein, 7 aa, synthetic construct
PTKSQLH

SEQ ID NO: 22263 - protein, 7 aa, synthetic construct
IMEKINP

SEQ ID NO: 22264 - protein, 7 aa, synthetic construct
SARKANE

SEQ ID NO: 22265 - protein, 7 aa, synthetic construct
PHPNEPG

SEQ ID NO: 22266 - protein, 7 aa, synthetic construct
DSSTFRQ

SEQ ID NO: 22267 - protein, 7 aa, synthetic construct
NIPMSAM

SEQ ID NO: 22268 - protein, 7 aa, synthetic construct
KTQQSYF

SEQ ID NO: 22269 - protein, 7 aa, synthetic construct
KDTEWRM

SEQ ID NO: 22270 - protein, 7 aa, synthetic construct
GRQYGEL

SEQ ID NO: 22271 - protein, 7 aa, synthetic construct
KDHSSAI

SEQ ID NO: 22272 - protein, 7 aa, synthetic construct
TDQTRVA

SEQ ID NO: 22273 - protein, 7 aa, synthetic construct
YGRITTP

SEQ ID NO: 22274 - protein, 7 aa, synthetic construct
HVVVGTT

SEQ ID NO: 22275 - protein, 7 aa, synthetic construct
NNLKTDI

SEQ ID NO: 22276 - protein, 7 aa, synthetic construct
KKSVAPD

SEQ ID NO: 22277 - protein, 7 aa, synthetic construct
VREHPTD

SEQ ID NO: 22278 - protein, 7 aa, synthetic construct
QHAIKGT

SEQ ID NO: 22279 - protein, 7 aa, synthetic construct
HYDPKKY

SEQ ID NO: 22280 - protein, 7 aa, synthetic construct
GDPTHYV

SEQ ID NO: 22281 - protein, 7 aa, synthetic construct
VTREMTK

SEQ ID NO: 22282 - protein, 7 aa, synthetic construct
DNVQKGA

SEQ ID NO: 22283 - protein, 7 aa, synthetic construct
FFDHSPA

SEQ ID NO: 22284 - protein, 7 aa, synthetic construct
QDAKPGS

SEQ ID NO: 22285 - protein, 7 aa, synthetic construct
TEAAKFA

SEQ ID NO: 22286 - protein, 7 aa, synthetic construct
NLRMDNM

SEQ ID NO: 22287 - protein, 7 aa, synthetic construct
RQYDNGS

SEQ ID NO: 22288 - protein, 7 aa, synthetic construct
QHKLEER

SEQ ID NO: 22289 - protein, 7 aa, synthetic construct
RSPKHDD

SEQ ID NO: 22290 - protein, 7 aa, synthetic construct
RLMVSEP

SEQ ID NO: 22291 - protein, 7 aa, synthetic construct
VKDTYMF

SEQ ID NO: 22292 - protein, 7 aa, synthetic construct
NFGQSQE

SEQ ID NO: 22293 - protein, 7 aa, synthetic construct
LSFKQVE

SEQ ID NO: 22294 - protein, 7 aa, synthetic construct
GHKSIHV

SEQ ID NO: 22295 - protein, 7 aa, synthetic construct
PPSQVST

SEQ ID NO: 22296 - protein, 7 aa, synthetic construct
SHNQILE

SEQ ID NO: 22297 - protein, 7 aa, synthetic construct
IDGPAKQ

SEQ ID NO: 22298 - protein, 7 aa, synthetic construct
DKYMHLV

SEQ ID NO: 22299 - protein, 7 aa, synthetic construct
DEPRMKE

SEQ ID NO: 22300 - protein, 7 aa, synthetic construct
LYGSVTE

SEQ ID NO: 22301 - protein, 7 aa, synthetic construct
ANQANIT

SEQ ID NO: 22302 - protein, 7 aa, synthetic construct
FPMNREV

SEQ ID NO: 22303 - protein, 7 aa, synthetic construct
TVRPLAI

SEQ ID NO: 22304 - protein, 7 aa, synthetic construct
IDRGPLD

SEQ ID NO: 22305 - protein, 7 aa, synthetic construct
LGTQLHV

SEQ ID NO: 22306 - protein, 7 aa, synthetic construct
MINPYDK

SEQ ID NO: 22307 - protein, 7 aa, synthetic construct
KEHNVML

SEQ ID NO: 22308 - protein, 7 aa, synthetic construct
SATIKSF

SEQ ID NO: 22309 - protein, 7 aa, synthetic construct
APGVKIA

SEQ ID NO: 22310 - protein, 7 aa, synthetic construct
MHHIVSK

SEQ ID NO: 22311 - protein, 7 aa, synthetic construct
AHTEAKE

SEQ ID NO: 22312 - protein, 7 aa, synthetic construct
EMPGGGG

SEQ ID NO: 22313 - protein, 7 aa, synthetic construct
FNKVNHL

SEQ ID NO: 22314 - protein, 7 aa, synthetic construct
YSDNRYP

SEQ ID NO: 22315 - protein, 7 aa, synthetic construct
LYTAQPG

SEQ ID NO: 22316 - protein, 7 aa, synthetic construct
WSRNLET

SEQ ID NO: 22317 - protein, 7 aa, synthetic construct
QKWSTGD

SEQ ID NO: 22318 - protein, 7 aa, synthetic construct
QPNHMTK

SEQ ID NO: 22319 - protein, 7 aa, synthetic construct
SKMEPAI

SEQ ID NO: 22320 - protein, 7 aa, synthetic construct
SYSSHTP

SEQ ID NO: 22321 - protein, 7 aa, synthetic construct
AGAGLVK

SEQ ID NO: 22322 - protein, 7 aa, synthetic construct
WTKGIAA

SEQ ID NO: 22323 - protein, 7 aa, synthetic construct
SNAKLGT

SEQ ID NO: 22324 - protein, 7 aa, synthetic construct
QTFVNAH

SEQ ID NO: 22325 - protein, 7 aa, synthetic construct
PTNPNPR

SEQ ID NO: 22326 - protein, 7 aa, synthetic construct
LDQFITR

SEQ ID NO: 22327 - protein, 7 aa, synthetic construct
HMADRTM

SEQ ID NO: 22328 - protein, 7 aa, synthetic construct
KIHNQNH

SEQ ID NO: 22329 - protein, 7 aa, synthetic construct
KVRLDPE

SEQ ID NO: 22330 - protein, 7 aa, synthetic construct
MPKKPLN

SEQ ID NO: 22331 - protein, 7 aa, synthetic construct
AIKHVVE

SEQ ID NO: 22332 - protein, 7 aa, synthetic construct
NNSYRVG

SEQ ID NO: 22333 - protein, 7 aa, synthetic construct
VRGAPQH

SEQ ID NO: 22334 - protein, 7 aa, synthetic construct
MPKKDLA

SEQ ID NO: 22335 - protein, 7 aa, synthetic construct
FNVSTIS

SEQ ID NO: 22336 - protein, 7 aa, synthetic construct
VSRSNTF

SEQ ID NO: 22337 - protein, 7 aa, synthetic construct
MFKTPEQ

SEQ ID NO: 22338 - protein, 7 aa, synthetic construct
IPLEHST

SEQ ID NO: 22339 - protein, 7 aa, synthetic construct
NPHVSDQ

SEQ ID NO: 22340 - protein, 7 aa, synthetic construct
TGNVLAH

SEQ ID NO: 22341 - protein, 7 aa, synthetic construct
HMEIVRG

SEQ ID NO: 22342 - protein, 7 aa, synthetic construct
CHGTQEC

SEQ ID NO: 22343 - protein, 7 aa, synthetic construct
QQDRMFD

SEQ ID NO: 22344 - protein, 7 aa, synthetic construct
AKNVKEV

SEQ ID NO: 22345 - protein, 7 aa, synthetic construct
RFHNQTP

SEQ ID NO: 22346 - protein, 7 aa, synthetic construct
QFAEMDN

SEQ ID NO: 22347 - protein, 7 aa, synthetic construct
QFTTKEF

SEQ ID NO: 22348 - protein, 7 aa, synthetic construct
SAEKPVG

SEQ ID NO: 22349 - protein, 7 aa, synthetic construct
YRDVGET

SEQ ID NO: 22350 - protein, 7 aa, synthetic construct
AQKGEQQ

SEQ ID NO: 22351 - protein, 7 aa, synthetic construct
IAQIHTQ

SEQ ID NO: 22352 - protein, 7 aa, synthetic construct
NHGKNVM

SEQ ID NO: 22353 - protein, 7 aa, synthetic construct
RLDKVAA

SEQ ID NO: 22354 - protein, 7 aa, synthetic construct
QDRLALN

SEQ ID NO: 22355 - protein, 7 aa, synthetic construct
FKESSAF

SEQ ID NO: 22356 - protein, 7 aa, synthetic construct
MQIQNRA

SEQ ID NO: 22357 - protein, 7 aa, synthetic construct
FMPQTAP

SEQ ID NO: 22358 - protein, 7 aa, synthetic construct
SPEMAYG

SEQ ID NO: 22359 - protein, 7 aa, synthetic construct
KDANRSM

SEQ ID NO: 22360 - protein, 7 aa, synthetic construct
FQSQGAH

SEQ ID NO: 22361 - protein, 7 aa, synthetic construct
MESSSRP

SEQ ID NO: 22362 - protein, 7 aa, synthetic construct
SSSAHKT

SEQ ID NO: 22363 - protein, 7 aa, synthetic construct
YKEMSQH

SEQ ID NO: 22364 - protein, 7 aa, synthetic construct
NQINWEV

SEQ ID NO: 22365 - protein, 7 aa, synthetic construct
LFTKDQE

SEQ ID NO: 22366 - protein, 7 aa, synthetic construct
MNNPDKN

SEQ ID NO: 22367 - protein, 7 aa, synthetic construct
PIGTTRN

SEQ ID NO: 22368 - protein, 7 aa, synthetic construct
AHSMMAG

SEQ ID NO: 22369 - protein, 7 aa, synthetic construct
NRLLDPD

SEQ ID NO: 22370 - protein, 7 aa, synthetic construct
QKVVGFQ

SEQ ID NO: 22371 - protein, 7 aa, synthetic construct
SMEHWKA

SEQ ID NO: 22372 - protein, 7 aa, synthetic construct
ATVGGQP

SEQ ID NO: 22373 - protein, 7 aa, synthetic construct
PKGDQTR

SEQ ID NO: 22374 - protein, 7 aa, synthetic construct
MDQIKTF

SEQ ID NO: 22375 - protein, 7 aa, synthetic construct
SHEHNLP

SEQ ID NO: 22376 - protein, 7 aa, synthetic construct
NIPKNLH

SEQ ID NO: 22377 - protein, 7 aa, synthetic construct
MDHTRYG

SEQ ID NO: 22378 - protein, 7 aa, synthetic construct
MERKQET

SEQ ID NO: 22379 - protein, 7 aa, synthetic construct
SYNPQHV

SEQ ID NO: 22380 - protein, 7 aa, synthetic construct
YEALAGH

SEQ ID NO: 22381 - protein, 7 aa, synthetic construct
MLVEKSM

SEQ ID NO: 22382 - protein, 7 aa, synthetic construct
FKQIHDS

SEQ ID NO: 22383 - protein, 7 aa, synthetic construct
HKLQTPV

SEQ ID NO: 22384 - protein, 7 aa, synthetic construct
NRDGAKH

SEQ ID NO: 22385 - protein, 7 aa, synthetic construct
VLYPNTL

SEQ ID NO: 22386 - protein, 7 aa, synthetic construct
SHAKYAM

SEQ ID NO: 22387 - protein, 7 aa, synthetic construct
FLTQVTG

SEQ ID NO: 22388 - protein, 7 aa, synthetic construct
RNNIMEM

SEQ ID NO: 22389 - protein, 7 aa, synthetic construct
RHQTPEP

SEQ ID NO: 22390 - protein, 7 aa, synthetic construct
TNKIVHH

SEQ ID NO: 22391 - protein, 7 aa, synthetic construct
HMKDRTT

SEQ ID NO: 22392 - protein, 7 aa, synthetic construct
KGEGEKK

SEQ ID NO: 22393 - protein, 7 aa, synthetic construct
HENTGSR

SEQ ID NO: 22394 - protein, 7 aa, synthetic construct
SPPVKGH

SEQ ID NO: 22395 - protein, 7 aa, synthetic construct
QFTHQAI

SEQ ID NO: 22396 - protein, 7 aa, synthetic construct
CSDSKCA

SEQ ID NO: 22397 - protein, 7 aa, synthetic construct
GFANNNT

SEQ ID NO: 22398 - protein, 7 aa, synthetic construct
QHAASKV

SEQ ID NO: 22399 - protein, 7 aa, synthetic construct
SMLMKAE

SEQ ID NO: 22400 - protein, 7 aa, synthetic construct
RGLNDDV

SEQ ID NO: 22401 - protein, 7 aa, synthetic construct
ATINSNL

SEQ ID NO: 22402 - protein, 7 aa, synthetic construct
LSVKPMN

SEQ ID NO: 22403 - protein, 7 aa, synthetic construct
TPFSPVR

SEQ ID NO: 22404 - protein, 7 aa, synthetic construct
DYKMASL

SEQ ID NO: 22405 - protein, 7 aa, synthetic construct
NGQRSGP

SEQ ID NO: 22406 - protein, 7 aa, synthetic construct
RNKGDDR

SEQ ID NO: 22407 - protein, 7 aa, synthetic construct
TLVNNNH

SEQ ID NO: 22408 - protein, 7 aa, synthetic construct
ASMPRGD

SEQ ID NO: 22409 - protein, 7 aa, synthetic construct
YPQPAKL

SEQ ID NO: 22410 - protein, 7 aa, synthetic construct
KHMDTKI

SEQ ID NO: 22411 - protein, 7 aa, synthetic construct
NVQMKTD

SEQ ID NO: 22412 - protein, 7 aa, synthetic construct
NPQTNPI

SEQ ID NO: 22413 - protein, 7 aa, synthetic construct
MGSKLLE

SEQ ID NO: 22414 - protein, 7 aa, synthetic construct
TPSPAFH

SEQ ID NO: 22415 - protein, 7 aa, synthetic construct
DAQTQYL

SEQ ID NO: 22416 - protein, 7 aa, synthetic construct
TKWSHDN

SEQ ID NO: 22417 - protein, 7 aa, synthetic construct
HYQEDSS

SEQ ID NO: 22418 - protein, 7 aa, synthetic construct
AHPKKFD

SEQ ID NO: 22419 - protein, 7 aa, synthetic construct
WAERAHL

SEQ ID NO: 22420 - protein, 7 aa, synthetic construct
DNAKRLH

SEQ ID NO: 22421 - protein, 7 aa, synthetic construct
VQMSHNN

SEQ ID NO: 22422 - protein, 7 aa, synthetic construct
LMPNSER

SEQ ID NO: 22423 - protein, 7 aa, synthetic construct
GHQNQRQ

SEQ ID NO: 22424 - protein, 7 aa, synthetic construct
YQGERGS

SEQ ID NO: 22425 - protein, 7 aa, synthetic construct
WSSYHGA

SEQ ID NO: 22426 - protein, 7 aa, synthetic construct
LKDKMSA

SEQ ID NO: 22427 - protein, 7 aa, synthetic construct
MPTIAGK

SEQ ID NO: 22428 - protein, 7 aa, synthetic construct
SQYKDKY

SEQ ID NO: 22429 - protein, 7 aa, synthetic construct
GKFIQQE

SEQ ID NO: 22430 - protein, 7 aa, synthetic construct
FDVGSLK

SEQ ID NO: 22431 - protein, 7 aa, synthetic construct
QLISQEK

SEQ ID NO: 22432 - protein, 7 aa, synthetic construct
LINTPVD

SEQ ID NO: 22433 - protein, 7 aa, synthetic construct
NDRFNKN

SEQ ID NO: 22434 - protein, 7 aa, synthetic construct
ELRKHGQ

SEQ ID NO: 22435 - protein, 7 aa, synthetic construct
KETIYHP

SEQ ID NO: 22436 - protein, 7 aa, synthetic construct
AIPFYSE

SEQ ID NO: 22437 - protein, 7 aa, synthetic construct
NYKHNLA

SEQ ID NO: 22438 - protein, 7 aa, synthetic construct
PPFGVKI

SEQ ID NO: 22439 - protein, 7 aa, synthetic construct
LHVQQGM

SEQ ID NO: 22440 - protein, 7 aa, synthetic construct
HQIPNGS

SEQ ID NO: 22441 - protein, 7 aa, synthetic construct
MNKLVEA

SEQ ID NO: 22442 - protein, 7 aa, synthetic construct
FAQSAKT

SEQ ID NO: 22443 - protein, 7 aa, synthetic construct
ETTRAYS

SEQ ID NO: 22444 - protein, 7 aa, synthetic construct
RMAHMGG

SEQ ID NO: 22445 - protein, 7 aa, synthetic construct
GEKAIQQ

SEQ ID NO: 22446 - protein, 7 aa, synthetic construct
NHYRESS

SEQ ID NO: 22447 - protein, 7 aa, synthetic construct
QSDKSII

SEQ ID NO: 22448 - protein, 7 aa, synthetic construct
HTNGQVG

SEQ ID NO: 22449 - protein, 7 aa, synthetic construct
PMGKQLE

SEQ ID NO: 22450 - protein, 7 aa, synthetic construct
YVARQQS

SEQ ID NO: 22451 - protein, 7 aa, synthetic construct
MEKPTNF

SEQ ID NO: 22452 - protein, 7 aa, synthetic construct
RSGDWAP

SEQ ID NO: 22453 - protein, 7 aa, synthetic construct
NGQHQMS

SEQ ID NO: 22454 - protein, 7 aa, synthetic construct
QGSPEMI

SEQ ID NO: 22455 - protein, 7 aa, synthetic construct
IGAEWHT

SEQ ID NO: 22456 - protein, 7 aa, synthetic construct
KNFDQPW

SEQ ID NO: 22457 - protein, 7 aa, synthetic construct
YTQGDGA

SEQ ID NO: 22458 - protein, 7 aa, synthetic construct
FHDRNPL

SEQ ID NO: 22459 - protein, 7 aa, synthetic construct
SQFETTP

SEQ ID NO: 22460 - protein, 7 aa, synthetic construct
PENIRSL

SEQ ID NO: 22461 - protein, 7 aa, synthetic construct
YGHHDTL

SEQ ID NO: 22462 - protein, 7 aa, synthetic construct
LIAGPKV

SEQ ID NO: 22463 - protein, 7 aa, synthetic construct
HPHQLQG

SEQ ID NO: 22464 - protein, 7 aa, synthetic construct
KNGAFLP

SEQ ID NO: 22465 - protein, 7 aa, synthetic construct
VPSPMLP

SEQ ID NO: 22466 - protein, 7 aa, synthetic construct
RYAAGVI

SEQ ID NO: 22467 - protein, 7 aa, synthetic construct
RTPEQHI

SEQ ID NO: 22468 - protein, 7 aa, synthetic construct
KLSEPHG

SEQ ID NO: 22469 - protein, 7 aa, synthetic construct
EFETRSH

SEQ ID NO: 22470 - protein, 7 aa, synthetic construct
PPRPNDS

SEQ ID NO: 22471 - protein, 7 aa, synthetic construct
LRERQHE

SEQ ID NO: 22472 - protein, 7 aa, synthetic construct
IKIRESN

SEQ ID NO: 22473 - protein, 7 aa, synthetic construct
DRPIGEH

SEQ ID NO: 22474 - protein, 7 aa, synthetic construct
TLYGPSD

SEQ ID NO: 22475 - protein, 7 aa, synthetic construct
HHPVHVP

SEQ ID NO: 22476 - protein, 7 aa, synthetic construct
ENHDKRV

SEQ ID NO: 22477 - protein, 7 aa, synthetic construct
NAWDKDR

SEQ ID NO: 22478 - protein, 7 aa, synthetic construct
LTAEVAR

SEQ ID NO: 22479 - protein, 7 aa, synthetic construct
FKHNSPT

SEQ ID NO: 22480 - protein, 7 aa, synthetic construct
GTNGMPW

SEQ ID NO: 22481 - protein, 7 aa, synthetic construct
REREADK

SEQ ID NO: 22482 - protein, 7 aa, synthetic construct
EQSNQQV

SEQ ID NO: 22483 - protein, 7 aa, synthetic construct
PDYSGHH

SEQ ID NO: 22484 - protein, 7 aa, synthetic construct
HYPDNQE

SEQ ID NO: 22485 - protein, 7 aa, synthetic construct
ILKSAMS

SEQ ID NO: 22486 - protein, 7 aa, synthetic construct
GMQPPEY

SEQ ID NO: 22487 - protein, 7 aa, synthetic construct
MMKEFPV

SEQ ID NO: 22488 - protein, 7 aa, synthetic construct
VHRSVDQ

SEQ ID NO: 22489 - protein, 7 aa, synthetic construct
GSMDAQK

SEQ ID NO: 22490 - protein, 7 aa, synthetic construct
QPSGDDM

SEQ ID NO: 22491 - protein, 7 aa, synthetic construct
ITKSTQI

SEQ ID NO: 22492 - protein, 7 aa, synthetic construct
VLPKSMT

SEQ ID NO: 22493 - protein, 7 aa, synthetic construct
NHPGQEV

SEQ ID NO: 22494 - protein, 7 aa, synthetic construct
GHRAPLI

SEQ ID NO: 22495 - protein, 7 aa, synthetic construct
MGGIGDT

SEQ ID NO: 22496 - protein, 7 aa, synthetic construct
IKSTHNL

SEQ ID NO: 22497 - protein, 7 aa, synthetic construct
TAHFTKQ

SEQ ID NO: 22498 - protein, 7 aa, synthetic construct
MFSSNER

SEQ ID NO: 22499 - protein, 7 aa, synthetic construct
SHDNPIV

SEQ ID NO: 22500 - protein, 7 aa, synthetic construct
VNYKEPV

SEQ ID NO: 22501 - protein, 7 aa, synthetic construct
TAKNDWS

SEQ ID NO: 22502 - protein, 7 aa, synthetic construct
QEIRTPT

SEQ ID NO: 22503 - protein, 7 aa, synthetic construct
YPAVNNH

SEQ ID NO: 22504 - protein, 7 aa, synthetic construct
PVKFDTN

SEQ ID NO: 22505 - protein, 7 aa, synthetic construct
EVGGTNA

SEQ ID NO: 22506 - protein, 7 aa, synthetic construct
KHVNAPA

SEQ ID NO: 22507 - protein, 7 aa, synthetic construct
PVGTKMF

SEQ ID NO: 22508 - protein, 7 aa, synthetic construct
EKVSTPY

SEQ ID NO: 22509 - protein, 7 aa, synthetic construct
GNFKTDY

SEQ ID NO: 22510 - protein, 7 aa, synthetic construct
NNTAPQF

SEQ ID NO: 22511 - protein, 7 aa, synthetic construct
DELHHND

SEQ ID NO: 22512 - protein, 7 aa, synthetic construct
MQAVTQQ

SEQ ID NO: 22513 - protein, 7 aa, synthetic construct
HQMRPSA

SEQ ID NO: 22514 - protein, 7 aa, synthetic construct
HSDHNPG

SEQ ID NO: 22515 - protein, 7 aa, synthetic construct
HANPVRQ

SEQ ID NO: 22516 - protein, 7 aa, synthetic construct
LTHGVHG

SEQ ID NO: 22517 - protein, 7 aa, synthetic construct
KHAPDNV

SEQ ID NO: 22518 - protein, 7 aa, synthetic construct
MRSAYDH

SEQ ID NO: 22519 - protein, 7 aa, synthetic construct
KSMMIGN

SEQ ID NO: 22520 - protein, 7 aa, synthetic construct
VSHRAQF

SEQ ID NO: 22521 - protein, 7 aa, synthetic construct
VTAIGAE

SEQ ID NO: 22522 - protein, 7 aa, synthetic construct
DMKIKYP

SEQ ID NO: 22523 - protein, 7 aa, synthetic construct
WKETKMH

SEQ ID NO: 22524 - protein, 7 aa, synthetic construct
KFNEEYS

SEQ ID NO: 22525 - protein, 7 aa, synthetic construct
VPNGLAS

SEQ ID NO: 22526 - protein, 7 aa, synthetic construct
KNLNEMK

SEQ ID NO: 22527 - protein, 7 aa, synthetic construct
RVNSPLE

SEQ ID NO: 22528 - protein, 7 aa, synthetic construct
FSPISIE

SEQ ID NO: 22529 - protein, 7 aa, synthetic construct
RFEPHSD

SEQ ID NO: 22530 - protein, 7 aa, synthetic construct
KTQTMVS

SEQ ID NO: 22531 - protein, 7 aa, synthetic construct
MKNQGDS

SEQ ID NO: 22532 - protein, 7 aa, synthetic construct
MTGAIPT

SEQ ID NO: 22533 - protein, 7 aa, synthetic construct
CPTIQCE

SEQ ID NO: 22534 - protein, 7 aa, synthetic construct
TASMFSG

SEQ ID NO: 22535 - protein, 7 aa, synthetic construct
GIPRIEK

SEQ ID NO: 22536 - protein, 7 aa, synthetic construct
SHMNTVH

SEQ ID NO: 22537 - protein, 7 aa, synthetic construct
NQKDMLN

SEQ ID NO: 22538 - protein, 7 aa, synthetic construct
GPGTIKY

SEQ ID NO: 22539 - protein, 7 aa, synthetic construct
LEYKAEN

SEQ ID NO: 22540 - protein, 7 aa, synthetic construct
TLKPHQT

SEQ ID NO: 22541 - protein, 7 aa, synthetic construct
MRGQAYG

SEQ ID NO: 22542 - protein, 7 aa, synthetic construct
ILQHAKG

SEQ ID NO: 22543 - protein, 7 aa, synthetic construct
AHEKYGA

SEQ ID NO: 22544 - protein, 7 aa, synthetic construct
MNRDADQ

SEQ ID NO: 22545 - protein, 7 aa, synthetic construct
VLNAIKV

SEQ ID NO: 22546 - protein, 7 aa, synthetic construct
QYKIVPN

SEQ ID NO: 22547 - protein, 7 aa, synthetic construct
TVITSGH

SEQ ID NO: 22548 - protein, 7 aa, synthetic construct
KVKNIGE

SEQ ID NO: 22549 - protein, 7 aa, synthetic construct
GANAHGG

SEQ ID NO: 22550 - protein, 7 aa, synthetic construct
SKIPMGM

SEQ ID NO: 22551 - protein, 7 aa, synthetic construct
FKEVVSA

SEQ ID NO: 22552 - protein, 7 aa, synthetic construct
YSHDNHP

SEQ ID NO: 22553 - protein, 7 aa, synthetic construct
SKQTLEG

SEQ ID NO: 22554 - protein, 7 aa, synthetic construct
QDSPSKL

SEQ ID NO: 22555 - protein, 7 aa, synthetic construct
QQFQSSY

SEQ ID NO: 22556 - protein, 7 aa, synthetic construct
QVPYFVE

SEQ ID NO: 22557 - protein, 7 aa, synthetic construct
FDKTTSV

SEQ ID NO: 22558 - protein, 7 aa, synthetic construct
QQPKHED

SEQ ID NO: 22559 - protein, 7 aa, synthetic construct
GNRQILT

SEQ ID NO: 22560 - protein, 7 aa, synthetic construct
KEQQPGQ

SEQ ID NO: 22561 - protein, 7 aa, synthetic construct
YKAQLDV

SEQ ID NO: 22562 - protein, 7 aa, synthetic construct
SMQRMEE

SEQ ID NO: 22563 - protein, 7 aa, synthetic construct
LKNKHEF

SEQ ID NO: 22564 - protein, 7 aa, synthetic construct
GKRETNY

SEQ ID NO: 22565 - protein, 7 aa, synthetic construct
ALEHQPH

SEQ ID NO: 22566 - protein, 7 aa, synthetic construct
KHAAIMI

SEQ ID NO: 22567 - protein, 7 aa, synthetic construct
KKESTYN

SEQ ID NO: 22568 - protein, 7 aa, synthetic construct
EVARSEL

SEQ ID NO: 22569 - protein, 7 aa, synthetic construct
DFETMRA

SEQ ID NO: 22570 - protein, 7 aa, synthetic construct
FTKADEN

SEQ ID NO: 22571 - protein, 7 aa, synthetic construct
LAVNSLR

SEQ ID NO: 22572 - protein, 7 aa, synthetic construct
VMTKPEH

SEQ ID NO: 22573 - protein, 7 aa, synthetic construct
IFDEKAY

SEQ ID NO: 22574 - protein, 7 aa, synthetic construct
VAGSKFV

SEQ ID NO: 22575 - protein, 7 aa, synthetic construct
TKMSNTE

SEQ ID NO: 22576 - protein, 7 aa, synthetic construct
KANLPFH

SEQ ID NO: 22577 - protein, 7 aa, synthetic construct
VHETRQS

SEQ ID NO: 22578 - protein, 7 aa, synthetic construct
SPYIQTS

SEQ ID NO: 22579 - protein, 7 aa, synthetic construct
MGSEPRY

SEQ ID NO: 22580 - protein, 7 aa, synthetic construct
SQNLKMT

SEQ ID NO: 22581 - protein, 7 aa, synthetic construct
GPHEPHR

SEQ ID NO: 22582 - protein, 7 aa, synthetic construct
VEHHNKS

SEQ ID NO: 22583 - protein, 7 aa, synthetic construct
PEIRGPA

SEQ ID NO: 22584 - protein, 7 aa, synthetic construct
NYYTAEA

SEQ ID NO: 22585 - protein, 7 aa, synthetic construct
TNVGQNM

SEQ ID NO: 22586 - protein, 7 aa, synthetic construct
QHKASSH

SEQ ID NO: 22587 - protein, 7 aa, synthetic construct
HVSAMRG

SEQ ID NO: 22588 - protein, 7 aa, synthetic construct
FKQAEDI

SEQ ID NO: 22589 - protein, 7 aa, synthetic construct
PLMRQQL

SEQ ID NO: 22590 - protein, 7 aa, synthetic construct
LINSASL

SEQ ID NO: 22591 - protein, 7 aa, synthetic construct
YAVASTL

SEQ ID NO: 22592 - protein, 7 aa, synthetic construct
IKSPLTD

SEQ ID NO: 22593 - protein, 7 aa, synthetic construct
EAQFKKY

SEQ ID NO: 22594 - protein, 7 aa, synthetic construct
MNDGHGL

SEQ ID NO: 22595 - protein, 7 aa, synthetic construct
AFQATHD

SEQ ID NO: 22596 - protein, 7 aa, synthetic construct
TNNKVEP

SEQ ID NO: 22597 - protein, 7 aa, synthetic construct
TGPIQTK

SEQ ID NO: 22598 - protein, 7 aa, synthetic construct
TTKDSTR

SEQ ID NO: 22599 - protein, 7 aa, synthetic construct
TFHRHDV

SEQ ID NO: 22600 - protein, 7 aa, synthetic construct
LNHQSPW

SEQ ID NO: 22601 - protein, 7 aa, synthetic construct
SEFAARD

SEQ ID NO: 22602 - protein, 7 aa, synthetic construct
KLPPASQ

SEQ ID NO: 22603 - protein, 7 aa, synthetic construct
NDGYRSV

SEQ ID NO: 22604 - protein, 7 aa, synthetic construct
ESMHAAP

SEQ ID NO: 22605 - protein, 7 aa, synthetic construct
KPDGMPP

SEQ ID NO: 22606 - protein, 7 aa, synthetic construct
PVSTGAF

SEQ ID NO: 22607 - protein, 7 aa, synthetic construct
KTTDTGA

SEQ ID NO: 22608 - protein, 7 aa, synthetic construct
HGVRVVD

SEQ ID NO: 22609 - protein, 7 aa, synthetic construct
QENHEYK

SEQ ID NO: 22610 - protein, 7 aa, synthetic construct
CYMSDDC

SEQ ID NO: 22611 - protein, 7 aa, synthetic construct
LRNQGEA

SEQ ID NO: 22612 - protein, 7 aa, synthetic construct
EIGKINM

SEQ ID NO: 22613 - protein, 7 aa, synthetic construct
QLNISPE

SEQ ID NO: 22614 - protein, 7 aa, synthetic construct
LNQAIRS

SEQ ID NO: 22615 - protein, 7 aa, synthetic construct
RDNWPGN

SEQ ID NO: 22616 - protein, 7 aa, synthetic construct
RLGREFN

SEQ ID NO: 22617 - protein, 7 aa, synthetic construct
WGERESK

SEQ ID NO: 22618 - protein, 7 aa, synthetic construct
QGESSYV

SEQ ID NO: 22619 - protein, 7 aa, synthetic construct
NHTAPMP

SEQ ID NO: 22620 - protein, 7 aa, synthetic construct
QQMVSVD

SEQ ID NO: 22621 - protein, 7 aa, synthetic construct
QKHMIPT

SEQ ID NO: 22622 - protein, 7 aa, synthetic construct
IVQTKGL

SEQ ID NO: 22623 - protein, 7 aa, synthetic construct
TRTPTED

SEQ ID NO: 22624 - protein, 7 aa, synthetic construct
YPGSAVG

SEQ ID NO: 22625 - protein, 7 aa, synthetic construct
FLNNSFA

SEQ ID NO: 22626 - protein, 7 aa, synthetic construct
DVSNSRE

SEQ ID NO: 22627 - protein, 7 aa, synthetic construct
SGPVRDF

SEQ ID NO: 22628 - protein, 7 aa, synthetic construct
TTYHNKA

SEQ ID NO: 22629 - protein, 7 aa, synthetic construct
KVGSEEV

SEQ ID NO: 22630 - protein, 7 aa, synthetic construct
RPHVKDC

SEQ ID NO: 22631 - protein, 7 aa, synthetic construct
YFENQKS

SEQ ID NO: 22632 - protein, 7 aa, synthetic construct
RKEDMVM

SEQ ID NO: 22633 - protein, 7 aa, synthetic construct
SQRPPPH

SEQ ID NO: 22634 - protein, 7 aa, synthetic construct
MMVKSDS

SEQ ID NO: 22635 - protein, 7 aa, synthetic construct
VQNQPFI

SEQ ID NO: 22636 - protein, 7 aa, synthetic construct
MHPGMMM

SEQ ID NO: 22637 - protein, 7 aa, synthetic construct
HRVSEKV

SEQ ID NO: 22638 - protein, 7 aa, synthetic construct
NSTPLYS

SEQ ID NO: 22639 - protein, 7 aa, synthetic construct
NAHAKVY

SEQ ID NO: 22640 - protein, 7 aa, synthetic construct
YVTQGNR

SEQ ID NO: 22641 - protein, 7 aa, synthetic construct
ISARMDS

SEQ ID NO: 22642 - protein, 7 aa, synthetic construct
KYELKTY

SEQ ID NO: 22643 - protein, 7 aa, synthetic construct
SALYPAA

SEQ ID NO: 22644 - protein, 7 aa, synthetic construct
KDGTTMF

SEQ ID NO: 22645 - protein, 7 aa, synthetic construct
NDAWHTP

SEQ ID NO: 22646 - protein, 7 aa, synthetic construct
ERHTMTP

SEQ ID NO: 22647 - protein, 7 aa, synthetic construct
YRHNDMT

SEQ ID NO: 22648 - protein, 7 aa, synthetic construct
SLYGQMG

SEQ ID NO: 22649 - protein, 7 aa, synthetic construct
IQNGIQK

SEQ ID NO: 22650 - protein, 7 aa, synthetic construct
WTDKTAT

SEQ ID NO: 22651 - protein, 7 aa, synthetic construct
PYEANRT

SEQ ID NO: 22652 - protein, 7 aa, synthetic construct
AEPKKIA

SEQ ID NO: 22653 - protein, 7 aa, synthetic construct
VMQQHSN

SEQ ID NO: 22654 - protein, 7 aa, synthetic construct
YTVKHQH

SEQ ID NO: 22655 - protein, 7 aa, synthetic construct
PKNQVSN

SEQ ID NO: 22656 - protein, 7 aa, synthetic construct
ELMKVPA

SEQ ID NO: 22657 - protein, 7 aa, synthetic construct
YAPHLAT

SEQ ID NO: 22658 - protein, 7 aa, synthetic construct
MSFKVQP

SEQ ID NO: 22659 - protein, 7 aa, synthetic construct
VRHQEME

SEQ ID NO: 22660 - protein, 7 aa, synthetic construct
GGLRDSS

SEQ ID NO: 22661 - protein, 7 aa, synthetic construct
SEMGTWE

SEQ ID NO: 22662 - protein, 7 aa, synthetic construct
YDMQATP

SEQ ID NO: 22663 - protein, 7 aa, synthetic construct
WGGHDFS

SEQ ID NO: 22664 - protein, 7 aa, synthetic construct
TEAKGLK

SEQ ID NO: 22665 - protein, 7 aa, synthetic construct
HTRPGHQ

SEQ ID NO: 22666 - protein, 7 aa, synthetic construct
HGGLRQG

SEQ ID NO: 22667 - protein, 7 aa, synthetic construct
ITQHREG

SEQ ID NO: 22668 - protein, 7 aa, synthetic construct
VRQDGDM

SEQ ID NO: 22669 - protein, 7 aa, synthetic construct
MMGKWDD

SEQ ID NO: 22670 - protein, 7 aa, synthetic construct
SIDNHRQ

SEQ ID NO: 22671 - protein, 7 aa, synthetic construct
NKSHARE

SEQ ID NO: 22672 - protein, 7 aa, synthetic construct
FKGEKTL

SEQ ID NO: 22673 - protein, 7 aa, synthetic construct
KFTTDMP

SEQ ID NO: 22674 - protein, 7 aa, synthetic construct
VDKRERD

SEQ ID NO: 22675 - protein, 7 aa, synthetic construct
AAAKSPS

SEQ ID NO: 22676 - protein, 7 aa, synthetic construct
IFDRHPK

SEQ ID NO: 22677 - protein, 7 aa, synthetic construct
IANPSKL

SEQ ID NO: 22678 - protein, 7 aa, synthetic construct
VESTTQP

SEQ ID NO: 22679 - protein, 7 aa, synthetic construct
LQGNGKI

SEQ ID NO: 22680 - protein, 7 aa, synthetic construct
IWKDNDK

SEQ ID NO: 22681 - protein, 7 aa, synthetic construct
TLLHHQP

SEQ ID NO: 22682 - protein, 7 aa, synthetic construct
FPHRNHP

SEQ ID NO: 22683 - protein, 7 aa, synthetic construct
HDTHAVK

SEQ ID NO: 22684 - protein, 7 aa, synthetic construct
TQSTIHW

SEQ ID NO: 22685 - protein, 7 aa, synthetic construct
RAGKAMD

SEQ ID NO: 22686 - protein, 7 aa, synthetic construct
IQPKVGI

SEQ ID NO: 22687 - protein, 7 aa, synthetic construct
ISHSGTR

SEQ ID NO: 22688 - protein, 7 aa, synthetic construct
NKHFITG

SEQ ID NO: 22689 - protein, 7 aa, synthetic construct
GEERQVQ

SEQ ID NO: 22690 - protein, 7 aa, synthetic construct
LNEKGVT

SEQ ID NO: 22691 - protein, 7 aa, synthetic construct
AAKFSID

SEQ ID NO: 22692 - protein, 7 aa, synthetic construct
LNRPSEM

SEQ ID NO: 22693 - protein, 7 aa, synthetic construct
QNAYRAA

SEQ ID NO: 22694 - protein, 7 aa, synthetic construct
VMKEAIM

SEQ ID NO: 22695 - protein, 7 aa, synthetic construct
SGINHQS

SEQ ID NO: 22696 - protein, 7 aa, synthetic construct
TNHHHVS

SEQ ID NO: 22697 - protein, 7 aa, synthetic construct
GHERNES

SEQ ID NO: 22698 - protein, 7 aa, synthetic construct
TKEYISN

SEQ ID NO: 22699 - protein, 7 aa, synthetic construct
MFDTQSR

SEQ ID NO: 22700 - protein, 7 aa, synthetic construct
IKHDSVM

SEQ ID NO: 22701 - protein, 7 aa, synthetic construct
YGTHMTI

SEQ ID NO: 22702 - protein, 7 aa, synthetic construct
KVGYPGQ

SEQ ID NO: 22703 - protein, 7 aa, synthetic construct
LGAPEPY

SEQ ID NO: 22704 - protein, 7 aa, synthetic construct
PIASYNR

SEQ ID NO: 22705 - protein, 7 aa, synthetic construct
DFKVEMG

SEQ ID NO: 22706 - protein, 7 aa, synthetic construct
SYFSGKE

SEQ ID NO: 22707 - protein, 7 aa, synthetic construct
WGDKTDM

SEQ ID NO: 22708 - protein, 7 aa, synthetic construct
GHNKGTY

SEQ ID NO: 22709 - protein, 7 aa, synthetic construct
NKESHQY

SEQ ID NO: 22710 - protein, 7 aa, synthetic construct
EHNLVPG

SEQ ID NO: 22711 - protein, 7 aa, synthetic construct
EPQMKID

SEQ ID NO: 22712 - protein, 7 aa, synthetic construct
MMPPEWE

SEQ ID NO: 22713 - protein, 7 aa, synthetic construct
RLSDGQD

SEQ ID NO: 22714 - protein, 7 aa, synthetic construct
PEGKFHS

SEQ ID NO: 22715 - protein, 7 aa, synthetic construct
NLRSTSM

SEQ ID NO: 22716 - protein, 7 aa, synthetic construct
VNNVNMM

SEQ ID NO: 22717 - protein, 7 aa, synthetic construct
QHPAPRY

SEQ ID NO: 22718 - protein, 7 aa, synthetic construct
HRTPMEA

SEQ ID NO: 22719 - protein, 7 aa, synthetic construct
YAPSMYK

SEQ ID NO: 22720 - protein, 7 aa, synthetic construct
PHNGFQA

SEQ ID NO: 22721 - protein, 7 aa, synthetic construct
SKDMKSD

SEQ ID NO: 22722 - protein, 7 aa, synthetic construct
RQGTIQS

SEQ ID NO: 22723 - protein, 7 aa, synthetic construct
TWNNNKV

SEQ ID NO: 22724 - protein, 7 aa, synthetic construct
MTHAGVA

SEQ ID NO: 22725 - protein, 7 aa, synthetic construct
DIKMESH

SEQ ID NO: 22726 - protein, 7 aa, synthetic construct
VLAKLQH

SEQ ID NO: 22727 - protein, 7 aa, synthetic construct
RKDQSDN

SEQ ID NO: 22728 - protein, 7 aa, synthetic construct
SQQRGSE

SEQ ID NO: 22729 - protein, 7 aa, synthetic construct
DFPSKKD

SEQ ID NO: 22730 - protein, 7 aa, synthetic construct
QQYKPVQ

SEQ ID NO: 22731 - protein, 7 aa, synthetic construct
VAAGVVI

SEQ ID NO: 22732 - protein, 7 aa, synthetic construct
SVGVHEI

SEQ ID NO: 22733 - protein, 7 aa, synthetic construct
ISHVQPE

SEQ ID NO: 22734 - protein, 7 aa, synthetic construct
FHEMGKG

SEQ ID NO: 22735 - protein, 7 aa, synthetic construct
AHRPDMM

SEQ ID NO: 22736 - protein, 7 aa, synthetic construct
QAQLQSV

SEQ ID NO: 22737 - protein, 7 aa, synthetic construct
AAYPQGN

SEQ ID NO: 22738 - protein, 7 aa, synthetic construct
QHTRTLM

SEQ ID NO: 22739 - protein, 7 aa, synthetic construct
HYGGKPQ

SEQ ID NO: 22740 - protein, 7 aa, synthetic construct
PGAAQMY

SEQ ID NO: 22741 - protein, 7 aa, synthetic construct
FMRDVAD

SEQ ID NO: 22742 - protein, 7 aa, synthetic construct
NMSADAF

SEQ ID NO: 22743 - protein, 7 aa, synthetic construct
LDVPGKW

SEQ ID NO: 22744 - protein, 7 aa, synthetic construct
KAVMQAT

SEQ ID NO: 22745 - protein, 7 aa, synthetic construct
PPKSSGE

SEQ ID NO: 22746 - protein, 7 aa, synthetic construct
TTNGFIK

SEQ ID NO: 22747 - protein, 7 aa, synthetic construct
LKDLGSV

SEQ ID NO: 22748 - protein, 7 aa, synthetic construct
YHHQKFA

SEQ ID NO: 22749 - protein, 7 aa, synthetic construct
HQEYSTG

SEQ ID NO: 22750 - protein, 7 aa, synthetic construct
GRLESRI

SEQ ID NO: 22751 - protein, 7 aa, synthetic construct
EYKTYAP

SEQ ID NO: 22752 - protein, 7 aa, synthetic construct
NKDFLYG

SEQ ID NO: 22753 - protein, 7 aa, synthetic construct
HPHDRMT

SEQ ID NO: 22754 - protein, 7 aa, synthetic construct
VHDTRVT

SEQ ID NO: 22755 - protein, 7 aa, synthetic construct
TRLMNAP

SEQ ID NO: 22756 - protein, 7 aa, synthetic construct
DEFKYKN

SEQ ID NO: 22757 - protein, 7 aa, synthetic construct
KSSGADQ

SEQ ID NO: 22758 - protein, 7 aa, synthetic construct
RIAHPAE

SEQ ID NO: 22759 - protein, 7 aa, synthetic construct
MVKASEK

SEQ ID NO: 22760 - protein, 7 aa, synthetic construct
KQELAVI

SEQ ID NO: 22761 - protein, 7 aa, synthetic construct
KHNDESR

SEQ ID NO: 22762 - protein, 7 aa, synthetic construct
EMRPSNV

SEQ ID NO: 22763 - protein, 7 aa, synthetic construct
GTRDFMT

SEQ ID NO: 22764 - protein, 7 aa, synthetic construct
WRGDIMQ

SEQ ID NO: 22765 - protein, 7 aa, synthetic construct
WMTQKDM

SEQ ID NO: 22766 - protein, 7 aa, synthetic construct
NIQREYA

SEQ ID NO: 22767 - protein, 7 aa, synthetic construct
YTSQIRA

SEQ ID NO: 22768 - protein, 7 aa, synthetic construct
PMRYEVS

SEQ ID NO: 22769 - protein, 7 aa, synthetic construct
NEYSQHP

SEQ ID NO: 22770 - protein, 7 aa, synthetic construct
QFGIGEE

SEQ ID NO: 22771 - protein, 7 aa, synthetic construct
GHGKFTS

SEQ ID NO: 22772 - protein, 7 aa, synthetic construct
LIQVPNG

SEQ ID NO: 22773 - protein, 7 aa, synthetic construct
EGGPAKS

SEQ ID NO: 22774 - protein, 7 aa, synthetic construct
PIRVEYN

SEQ ID NO: 22775 - protein, 7 aa, synthetic construct
MYGSPID

SEQ ID NO: 22776 - protein, 7 aa, synthetic construct
DNNLQKD

SEQ ID NO: 22777 - protein, 7 aa, synthetic construct
SSPSWGK

SEQ ID NO: 22778 - protein, 7 aa, synthetic construct
GQGMWRE

SEQ ID NO: 22779 - protein, 7 aa, synthetic construct
NKMHHMA

SEQ ID NO: 22780 - protein, 7 aa, synthetic construct
QNYKDQV

SEQ ID NO: 22781 - protein, 7 aa, synthetic construct
HDAFPKR

SEQ ID NO: 22782 - protein, 7 aa, synthetic construct
GAAALGG

SEQ ID NO: 22783 - protein, 7 aa, synthetic construct
YVSHVPP

SEQ ID NO: 22784 - protein, 7 aa, synthetic construct
IEPWAGG

SEQ ID NO: 22785 - protein, 7 aa, synthetic construct
DIKNSDT

SEQ ID NO: 22786 - protein, 7 aa, synthetic construct
YLKFTDN

SEQ ID NO: 22787 - protein, 7 aa, synthetic construct
DAFTNRI

SEQ ID NO: 22788 - protein, 7 aa, synthetic construct
LGKNNRD

SEQ ID NO: 22789 - protein, 7 aa, synthetic construct
DKRILEE

SEQ ID NO: 22790 - protein, 7 aa, synthetic construct
NMTTVTK

SEQ ID NO: 22791 - protein, 7 aa, synthetic construct
IKPDASG

SEQ ID NO: 22792 - protein, 7 aa, synthetic construct
FGAEKGN

SEQ ID NO: 22793 - protein, 7 aa, synthetic construct
KPQKEID

SEQ ID NO: 22794 - protein, 7 aa, synthetic construct
FNSQMQN

SEQ ID NO: 22795 - protein, 7 aa, synthetic construct
MLAAHGG

SEQ ID NO: 22796 - protein, 7 aa, synthetic construct
YKGWNDP

SEQ ID NO: 22797 - protein, 7 aa, synthetic construct
MDKHGSM

SEQ ID NO: 22798 - protein, 7 aa, synthetic construct
PEKDHGL

SEQ ID NO: 22799 - protein, 7 aa, synthetic construct
NVTSPYS

SEQ ID NO: 22800 - protein, 7 aa, synthetic construct
YQPSTLV

SEQ ID NO: 22801 - protein, 7 aa, synthetic construct
KFKVHDT

SEQ ID NO: 22802 - protein, 7 aa, synthetic construct
QFTPENS

SEQ ID NO: 22803 - protein, 7 aa, synthetic construct
KNPYNNE

SEQ ID NO: 22804 - protein, 7 aa, synthetic construct
HTPNSSI

SEQ ID NO: 22805 - protein, 7 aa, synthetic construct
VGPDHYE

SEQ ID NO: 22806 - protein, 7 aa, synthetic construct
RQQDMDT

SEQ ID NO: 22807 - protein, 7 aa, synthetic construct
QGAGSST

SEQ ID NO: 22808 - protein, 7 aa, synthetic construct
NYPEVSG

SEQ ID NO: 22809 - protein, 7 aa, synthetic construct
LDRDGYV

SEQ ID NO: 22810 - protein, 7 aa, synthetic construct
KIDGERD

SEQ ID NO: 22811 - protein, 7 aa, synthetic construct
HHGVTER

SEQ ID NO: 22812 - protein, 7 aa, synthetic construct
QMRPENW

SEQ ID NO: 22813 - protein, 7 aa, synthetic construct
ANNHIIT

SEQ ID NO: 22814 - protein, 7 aa, synthetic construct
APPGGVN

SEQ ID NO: 22815 - protein, 7 aa, synthetic construct
FGPSIPT

SEQ ID NO: 22816 - protein, 7 aa, synthetic construct
AMQFKEL

SEQ ID NO: 22817 - protein, 7 aa, synthetic construct
WTGDGQI

SEQ ID NO: 22818 - protein, 7 aa, synthetic construct
SLKVKTA

SEQ ID NO: 22819 - protein, 7 aa, synthetic construct
KIRDNTV

SEQ ID NO: 22820 - protein, 7 aa, synthetic construct
IMERNFA

SEQ ID NO: 22821 - protein, 7 aa, synthetic construct
QNFGQVG

SEQ ID NO: 22822 - protein, 7 aa, synthetic construct
SDKGGMF

SEQ ID NO: 22823 - protein, 7 aa, synthetic construct
YAHVTMT

SEQ ID NO: 22824 - protein, 7 aa, synthetic construct
MSRTAFV

SEQ ID NO: 22825 - protein, 7 aa, synthetic construct
AGHLASL

SEQ ID NO: 22826 - protein, 7 aa, synthetic construct
KNYGSSQ

SEQ ID NO: 22827 - protein, 7 aa, synthetic construct
MNTRQLV

SEQ ID NO: 22828 - protein, 7 aa, synthetic construct
KAKQDFV

SEQ ID NO: 22829 - protein, 7 aa, synthetic construct
GANVGVL

SEQ ID NO: 22830 - protein, 7 aa, synthetic construct
GRNMPTV

SEQ ID NO: 22831 - protein, 7 aa, synthetic construct
NRQFSDI

SEQ ID NO: 22832 - protein, 7 aa, synthetic construct
HNNPAEM

SEQ ID NO: 22833 - protein, 7 aa, synthetic construct
FSPRMHS

SEQ ID NO: 22834 - protein, 7 aa, synthetic construct
TANLKDY

SEQ ID NO: 22835 - protein, 7 aa, synthetic construct
PAMAMKM

SEQ ID NO: 22836 - protein, 7 aa, synthetic construct
TSEWRNS

SEQ ID NO: 22837 - protein, 7 aa, synthetic construct
FESSSQI

SEQ ID NO: 22838 - protein, 7 aa, synthetic construct
SLHETSL

SEQ ID NO: 22839 - protein, 7 aa, synthetic construct
WTQGSGP

SEQ ID NO: 22840 - protein, 7 aa, synthetic construct
HPAENHT

SEQ ID NO: 22841 - protein, 7 aa, synthetic construct
SMKMDTS

SEQ ID NO: 22842 - protein, 7 aa, synthetic construct
LSKNDQV

SEQ ID NO: 22843 - protein, 7 aa, synthetic construct
VDARHIT

SEQ ID NO: 22844 - protein, 7 aa, synthetic construct
AQDHNGK

SEQ ID NO: 22845 - protein, 7 aa, synthetic construct
SQTYDKS

SEQ ID NO: 22846 - protein, 7 aa, synthetic construct
TAMVKVI

SEQ ID NO: 22847 - protein, 7 aa, synthetic construct
NHFPEPV

SEQ ID NO: 22848 - protein, 7 aa, synthetic construct
YTTANTK

SEQ ID NO: 22849 - protein, 7 aa, synthetic construct
GNTQADA

SEQ ID NO: 22850 - protein, 7 aa, synthetic construct
TPEGRDS

SEQ ID NO: 22851 - protein, 7 aa, synthetic construct
HTEMLPR

SEQ ID NO: 22852 - protein, 7 aa, synthetic construct
EQTRHNE

SEQ ID NO: 22853 - protein, 7 aa, synthetic construct
AEKRAEI

SEQ ID NO: 22854 - protein, 7 aa, synthetic construct
YETKYQF

SEQ ID NO: 22855 - protein, 7 aa, synthetic construct
NTINVTG

SEQ ID NO: 22856 - protein, 7 aa, synthetic construct
YRGYGTN

SEQ ID NO: 22857 - protein, 7 aa, synthetic construct
NYQAIES

SEQ ID NO: 22858 - protein, 7 aa, synthetic construct
PAGHLNK

SEQ ID NO: 22859 - protein, 7 aa, synthetic construct
YDYDNME

SEQ ID NO: 22860 - protein, 7 aa, synthetic construct
MFGTVEP

SEQ ID NO: 22861 - protein, 7 aa, synthetic construct
YQGPIHG

SEQ ID NO: 22862 - protein, 7 aa, synthetic construct
PHSPGNV

SEQ ID NO: 22863 - protein, 7 aa, synthetic construct
KNHEIQE

SEQ ID NO: 22864 - protein, 7 aa, synthetic construct
RDKIMME

SEQ ID NO: 22865 - protein, 7 aa, synthetic construct
EKEQAYR

SEQ ID NO: 22866 - protein, 7 aa, synthetic construct
SYQPDQI

SEQ ID NO: 22867 - protein, 7 aa, synthetic construct
PAVPIPM

SEQ ID NO: 22868 - protein, 7 aa, synthetic construct
SSAGNLR

SEQ ID NO: 22869 - protein, 7 aa, synthetic construct
QRTLETT

SEQ ID NO: 22870 - protein, 7 aa, synthetic construct
SLHGDFV

SEQ ID NO: 22871 - protein, 7 aa, synthetic construct
QDTRKAI

SEQ ID NO: 22872 - protein, 7 aa, synthetic construct
KEVGHWE

SEQ ID NO: 22873 - protein, 7 aa, synthetic construct
ELQKQDI

SEQ ID NO: 22874 - protein, 7 aa, synthetic construct
VKQEKEV

SEQ ID NO: 22875 - protein, 7 aa, synthetic construct
NATEKGY

SEQ ID NO: 22876 - protein, 7 aa, synthetic construct
VRDMAGP

SEQ ID NO: 22877 - protein, 7 aa, synthetic construct
GHKQFSN

SEQ ID NO: 22878 - protein, 7 aa, synthetic construct
KDKYTQM

SEQ ID NO: 22879 - protein, 7 aa, synthetic construct
DNSQPKK

SEQ ID NO: 22880 - protein, 7 aa, synthetic construct
REGQISN

SEQ ID NO: 22881 - protein, 7 aa, synthetic construct
GTNTIQF

SEQ ID NO: 22882 - protein, 7 aa, synthetic construct
PPDRITH

SEQ ID NO: 22883 - protein, 7 aa, synthetic construct
VRETMSI

SEQ ID NO: 22884 - protein, 7 aa, synthetic construct
PKIHAMG

SEQ ID NO: 22885 - protein, 7 aa, synthetic construct
IMQQPKS

SEQ ID NO: 22886 - protein, 7 aa, synthetic construct
MAAEKTM

SEQ ID NO: 22887 - protein, 7 aa, synthetic construct
HSKDYRS

SEQ ID NO: 22888 - protein, 7 aa, synthetic construct
GTVNADA

SEQ ID NO: 22889 - protein, 7 aa, synthetic construct
LTGQNFN

SEQ ID NO: 22890 - protein, 7 aa, synthetic construct
RNPDIAY

SEQ ID NO: 22891 - protein, 7 aa, synthetic construct
MPDGQPR

SEQ ID NO: 22892 - protein, 7 aa, synthetic construct
HGATYQY

SEQ ID NO: 22893 - protein, 7 aa, synthetic construct
NEQQKLM

SEQ ID NO: 22894 - protein, 7 aa, synthetic construct
AKWTNQP

SEQ ID NO: 22895 - protein, 7 aa, synthetic construct
QDREGQR

SEQ ID NO: 22896 - protein, 7 aa, synthetic construct
ASYDHVK

SEQ ID NO: 22897 - protein, 7 aa, synthetic construct
GDGHLKH

SEQ ID NO: 22898 - protein, 7 aa, synthetic construct
ENSRHMI

SEQ ID NO: 22899 - protein, 7 aa, synthetic construct
QTTTEKN

SEQ ID NO: 22900 - protein, 7 aa, synthetic construct
QNYPGGM

SEQ ID NO: 22901 - protein, 7 aa, synthetic construct
QNMKFMQ

SEQ ID NO: 22902 - protein, 7 aa, synthetic construct
LSIIGHP

SEQ ID NO: 22903 - protein, 7 aa, synthetic construct
VQMPKQD

SEQ ID NO: 22904 - protein, 7 aa, synthetic construct
QDTKMGT

SEQ ID NO: 22905 - protein, 7 aa, synthetic construct
YRSAPTS

SEQ ID NO: 22906 - protein, 7 aa, synthetic construct
IRVHGPP

SEQ ID NO: 22907 - protein, 7 aa, synthetic construct
AYGGKAF

SEQ ID NO: 22908 - protein, 7 aa, synthetic construct
RDGPMSR

SEQ ID NO: 22909 - protein, 7 aa, synthetic construct
QGMATLE

SEQ ID NO: 22910 - protein, 7 aa, synthetic construct
YSLRTTA

SEQ ID NO: 22911 - protein, 7 aa, synthetic construct
YVTPVAE

SEQ ID NO: 22912 - protein, 7 aa, synthetic construct
FPDGVTF

SEQ ID NO: 22913 - protein, 7 aa, synthetic construct
SFASPGT

SEQ ID NO: 22914 - protein, 7 aa, synthetic construct
TAIHMSR

SEQ ID NO: 22915 - protein, 7 aa, synthetic construct
QDPRWPT

SEQ ID NO: 22916 - protein, 7 aa, synthetic construct
RFDEVTR

SEQ ID NO: 22917 - protein, 7 aa, synthetic construct
NANRYTP

SEQ ID NO: 22918 - protein, 7 aa, synthetic construct
TARDTPD

SEQ ID NO: 22919 - protein, 7 aa, synthetic construct
EAGQSVS

SEQ ID NO: 22920 - protein, 7 aa, synthetic construct
RGIDADI

SEQ ID NO: 22921 - protein, 7 aa, synthetic construct
TVKYPEM

SEQ ID NO: 22922 - protein, 7 aa, synthetic construct
KTHVEEM

SEQ ID NO: 22923 - protein, 7 aa, synthetic construct
EPPMHGR

SEQ ID NO: 22924 - protein, 7 aa, synthetic construct
YKHAQEQ

SEQ ID NO: 22925 - protein, 7 aa, synthetic construct
HIATSQD

SEQ ID NO: 22926 - protein, 7 aa, synthetic construct
HRVVNMA

SEQ ID NO: 22927 - protein, 7 aa, synthetic construct
LQNPTIG

SEQ ID NO: 22928 - protein, 7 aa, synthetic construct
GTGVVAW

SEQ ID NO: 22929 - protein, 7 aa, synthetic construct
NTQVNRN

SEQ ID NO: 22930 - protein, 7 aa, synthetic construct
FQALSNA

SEQ ID NO: 22931 - protein, 7 aa, synthetic construct
RLKGEVI

SEQ ID NO: 22932 - protein, 7 aa, synthetic construct
SANGRVW

SEQ ID NO: 22933 - protein, 7 aa, synthetic construct
IAEYVPR

SEQ ID NO: 22934 - protein, 7 aa, synthetic construct
RDLHLAT

SEQ ID NO: 22935 - protein, 7 aa, synthetic construct
ISYQNKD

SEQ ID NO: 22936 - protein, 7 aa, synthetic construct
KGEPINH

SEQ ID NO: 22937 - protein, 7 aa, synthetic construct
FTSMRTD

SEQ ID NO: 22938 - protein, 7 aa, synthetic construct
EGPTERS

SEQ ID NO: 22939 - protein, 7 aa, synthetic construct
TAHDRIM

SEQ ID NO: 22940 - protein, 7 aa, synthetic construct
THPERAA

SEQ ID NO: 22941 - protein, 7 aa, synthetic construct
VEITKKY

SEQ ID NO: 22942 - protein, 7 aa, synthetic construct
SASGPNL

SEQ ID NO: 22943 - protein, 7 aa, synthetic construct
SPYDPGT

SEQ ID NO: 22944 - protein, 7 aa, synthetic construct
QQPSTSF

SEQ ID NO: 22945 - protein, 7 aa, synthetic construct
VIGIATP

SEQ ID NO: 22946 - protein, 7 aa, synthetic construct
HDKMPGS

SEQ ID NO: 22947 - protein, 7 aa, synthetic construct
PKGQNTT

SEQ ID NO: 22948 - protein, 7 aa, synthetic construct
VKPNPDS

SEQ ID NO: 22949 - protein, 7 aa, synthetic construct
GYTGGNI

SEQ ID NO: 22950 - protein, 7 aa, synthetic construct
RAAAEEL

SEQ ID NO: 22951 - protein, 7 aa, synthetic construct
PGKTAAD

SEQ ID NO: 22952 - protein, 7 aa, synthetic construct
PVASRQM

SEQ ID NO: 22953 - protein, 7 aa, synthetic construct
WIPQGHE

SEQ ID NO: 22954 - protein, 7 aa, synthetic construct
WGKEMQS

SEQ ID NO: 22955 - protein, 7 aa, synthetic construct
IQMKNSN

SEQ ID NO: 22956 - protein, 7 aa, synthetic construct
EYRGHQS

SEQ ID NO: 22957 - protein, 7 aa, synthetic construct
HLGNDGW

SEQ ID NO: 22958 - protein, 7 aa, synthetic construct
EMQKHMH

SEQ ID NO: 22959 - protein, 7 aa, synthetic construct
KGEVKLI

SEQ ID NO: 22960 - protein, 7 aa, synthetic construct
KDNQHLI

SEQ ID NO: 22961 - protein, 7 aa, synthetic construct
TKDLGYR

SEQ ID NO: 22962 - protein, 7 aa, synthetic construct
TMPASNL

SEQ ID NO: 22963 - protein, 7 aa, synthetic construct
MRNAMTM

SEQ ID NO: 22964 - protein, 7 aa, synthetic construct
INLMKVN

SEQ ID NO: 22965 - protein, 7 aa, synthetic construct
YYSIKTP

SEQ ID NO: 22966 - protein, 7 aa, synthetic construct
WGTNRMH

SEQ ID NO: 22967 - protein, 7 aa, synthetic construct
QQDIPRF

SEQ ID NO: 22968 - protein, 7 aa, synthetic construct
TFKHFPQ

SEQ ID NO: 22969 - protein, 7 aa, synthetic construct
VNHTSAW

SEQ ID NO: 22970 - protein, 7 aa, synthetic construct
GKWEGLD

SEQ ID NO: 22971 - protein, 7 aa, synthetic construct
HQREFVD

SEQ ID NO: 22972 - protein, 7 aa, synthetic construct
EKHAKTQ

SEQ ID NO: 22973 - protein, 7 aa, synthetic construct
AGDYWEK

SEQ ID NO: 22974 - protein, 7 aa, synthetic construct
FGTQYEP

SEQ ID NO: 22975 - protein, 7 aa, synthetic construct
HGDFRQI

SEQ ID NO: 22976 - protein, 7 aa, synthetic construct
EHATSHY

SEQ ID NO: 22977 - protein, 7 aa, synthetic construct
QTMTVKD

SEQ ID NO: 22978 - protein, 7 aa, synthetic construct
AGPNGMN

SEQ ID NO: 22979 - protein, 7 aa, synthetic construct
YVAESSG

SEQ ID NO: 22980 - protein, 7 aa, synthetic construct
NKGDTGA

SEQ ID NO: 22981 - protein, 7 aa, synthetic construct
FLDITDM

SEQ ID NO: 22982 - protein, 7 aa, synthetic construct
QKIMDVL

SEQ ID NO: 22983 - protein, 7 aa, synthetic construct
QKIHAVT

SEQ ID NO: 22984 - protein, 7 aa, synthetic construct
ETGKGSF

SEQ ID NO: 22985 - protein, 7 aa, synthetic construct
KDGHSKE

SEQ ID NO: 22986 - protein, 7 aa, synthetic construct
WTDSRDR

SEQ ID NO: 22987 - protein, 7 aa, synthetic construct
ITRQDGQ

SEQ ID NO: 22988 - protein, 7 aa, synthetic construct
QNKQDLN

SEQ ID NO: 22989 - protein, 7 aa, synthetic construct
YQADRSM

SEQ ID NO: 22990 - protein, 7 aa, synthetic construct
MSDDTKG

SEQ ID NO: 22991 - protein, 7 aa, synthetic construct
IAPKHDM

SEQ ID NO: 22992 - protein, 7 aa, synthetic construct
EKQIQDL

SEQ ID NO: 22993 - protein, 7 aa, synthetic construct
KQYPNVS

SEQ ID NO: 22994 - protein, 7 aa, synthetic construct
NIMPRND

SEQ ID NO: 22995 - protein, 7 aa, synthetic construct
AKSDQVS

SEQ ID NO: 22996 - protein, 7 aa, synthetic construct
IYRANNG

SEQ ID NO: 22997 - protein, 7 aa, synthetic construct
QVEVHSL

SEQ ID NO: 22998 - protein, 7 aa, synthetic construct
HVPKTDN

SEQ ID NO: 22999 - protein, 7 aa, synthetic construct
LYHTSMD

SEQ ID NO: 23000 - protein, 7 aa, synthetic construct
TIELAAG

SEQ ID NO: 23001 - protein, 7 aa, synthetic construct
SMNPTWG

SEQ ID NO: 23002 - protein, 7 aa, synthetic construct
ANMEAHT

SEQ ID NO: 23003 - protein, 7 aa, synthetic construct
RFDKIDT

SEQ ID NO: 23004 - protein, 7 aa, synthetic construct
MPKEHAI

SEQ ID NO: 23005 - protein, 7 aa, synthetic construct
TMNHTIT

SEQ ID NO: 23006 - protein, 7 aa, synthetic construct
GQQMLPQ

SEQ ID NO: 23007 - protein, 7 aa, synthetic construct
ARLKDAY

SEQ ID NO: 23008 - protein, 7 aa, synthetic construct
PPQKLSI

SEQ ID NO: 23009 - protein, 7 aa, synthetic construct
VSSRTLL

SEQ ID NO: 23010 - protein, 7 aa, synthetic construct
NSDGSFG

SEQ ID NO: 23011 - protein, 7 aa, synthetic construct
QHSDSNF

SEQ ID NO: 23012 - protein, 7 aa, synthetic construct
MGAINQV

SEQ ID NO: 23013 - protein, 7 aa, synthetic construct
MPNKKDI

SEQ ID NO: 23014 - protein, 7 aa, synthetic construct
HGQTIMD

SEQ ID NO: 23015 - protein, 7 aa, synthetic construct
WKGVTQF

SEQ ID NO: 23016 - protein, 7 aa, synthetic construct
VTKKGEQ

SEQ ID NO: 23017 - protein, 7 aa, synthetic construct
WSSLHTD

SEQ ID NO: 23018 - protein, 7 aa, synthetic construct
KKQDEYN

SEQ ID NO: 23019 - protein, 7 aa, synthetic construct
NAQHKFE

SEQ ID NO: 23020 - protein, 7 aa, synthetic construct
HAGISSN

SEQ ID NO: 23021 - protein, 7 aa, synthetic construct
LQDKKWE

SEQ ID NO: 23022 - protein, 7 aa, synthetic construct
GREQKIE

SEQ ID NO: 23023 - protein, 7 aa, synthetic construct
LANLPTK

SEQ ID NO: 23024 - protein, 7 aa, synthetic construct
NITVTTK

SEQ ID NO: 23025 - protein, 7 aa, synthetic construct
MNNMFRD

SEQ ID NO: 23026 - protein, 7 aa, synthetic construct
GWNNQRD

SEQ ID NO: 23027 - protein, 7 aa, synthetic construct
DQQQTKI

SEQ ID NO: 23028 - protein, 7 aa, synthetic construct
EKREYYQ

SEQ ID NO: 23029 - protein, 7 aa, synthetic construct
TDKGVIH

SEQ ID NO: 23030 - protein, 7 aa, synthetic construct
IQRDNME

SEQ ID NO: 23031 - protein, 7 aa, synthetic construct
PQDPHKG

SEQ ID NO: 23032 - protein, 7 aa, synthetic construct
QGDTQYT

SEQ ID NO: 23033 - protein, 7 aa, synthetic construct
MGQNRSL

SEQ ID NO: 23034 - protein, 7 aa, synthetic construct
SNLRPSH

SEQ ID NO: 23035 - protein, 7 aa, synthetic construct
PTMKQLE

SEQ ID NO: 23036 - protein, 7 aa, synthetic construct
TYGGHET

SEQ ID NO: 23037 - protein, 7 aa, synthetic construct
YYPQAMG

SEQ ID NO: 23038 - protein, 7 aa, synthetic construct
QSHNREE

SEQ ID NO: 23039 - protein, 7 aa, synthetic construct
TTTKEFS

SEQ ID NO: 23040 - protein, 7 aa, synthetic construct
YPIREVT

SEQ ID NO: 23041 - protein, 7 aa, synthetic construct
INNPRND

SEQ ID NO: 23042 - protein, 7 aa, synthetic construct
MSPTRKE

SEQ ID NO: 23043 - protein, 7 aa, synthetic construct
DQTNFTR

SEQ ID NO: 23044 - protein, 7 aa, synthetic construct
VHLQEKQ

SEQ ID NO: 23045 - protein, 7 aa, synthetic construct
FVSGDSV

SEQ ID NO: 23046 - protein, 7 aa, synthetic construct
IHNSDKT

SEQ ID NO: 23047 - protein, 7 aa, synthetic construct
IRMDEGI

SEQ ID NO: 23048 - protein, 7 aa, synthetic construct
NATVKTL

SEQ ID NO: 23049 - protein, 7 aa, synthetic construct
RIERAYN

SEQ ID NO: 23050 - protein, 7 aa, synthetic construct
GWNQDKN

SEQ ID NO: 23051 - protein, 7 aa, synthetic construct
DLRDGHE

SEQ ID NO: 23052 - protein, 7 aa, synthetic construct
REQGHLS

SEQ ID NO: 23053 - protein, 7 aa, synthetic construct
LNETRMG

SEQ ID NO: 23054 - protein, 7 aa, synthetic construct
LPAGGNH

SEQ ID NO: 23055 - protein, 7 aa, synthetic construct
TGDIPRG

SEQ ID NO: 23056 - protein, 7 aa, synthetic construct
LPGNQVT

SEQ ID NO: 23057 - protein, 7 aa, synthetic construct
EISYSKG

SEQ ID NO: 23058 - protein, 7 aa, synthetic construct
WNRNMEP

SEQ ID NO: 23059 - protein, 7 aa, synthetic construct
MTERKIT

SEQ ID NO: 23060 - protein, 7 aa, synthetic construct
EQYTRMV

SEQ ID NO: 23061 - protein, 7 aa, synthetic construct
NISGKGL

SEQ ID NO: 23062 - protein, 7 aa, synthetic construct
YDGGKTY

SEQ ID NO: 23063 - protein, 7 aa, synthetic construct
SQYIKTV

SEQ ID NO: 23064 - protein, 7 aa, synthetic construct
HDAIRHA

SEQ ID NO: 23065 - protein, 7 aa, synthetic construct
DGKTPMK

SEQ ID NO: 23066 - protein, 7 aa, synthetic construct
MTPHREY

SEQ ID NO: 23067 - protein, 7 aa, synthetic construct
TPAGTQY

SEQ ID NO: 23068 - protein, 7 aa, synthetic construct
YLPNMRP

SEQ ID NO: 23069 - protein, 7 aa, synthetic construct
LERMTPY

SEQ ID NO: 23070 - protein, 7 aa, synthetic construct
HKPVESH

SEQ ID NO: 23071 - protein, 7 aa, synthetic construct
FLQGDPG

SEQ ID NO: 23072 - protein, 7 aa, synthetic construct
GLPWHNE

SEQ ID NO: 23073 - protein, 7 aa, synthetic construct
FNKPETY

SEQ ID NO: 23074 - protein, 7 aa, synthetic construct
SRHVNIN

SEQ ID NO: 23075 - protein, 7 aa, synthetic construct
GRDSPSR

SEQ ID NO: 23076 - protein, 7 aa, synthetic construct
VADPKGN

SEQ ID NO: 23077 - protein, 7 aa, synthetic construct
FNMRPEG

SEQ ID NO: 23078 - protein, 7 aa, synthetic construct
IWDRGVP

SEQ ID NO: 23079 - protein, 7 aa, synthetic construct
DSGRMEG

SEQ ID NO: 23080 - protein, 7 aa, synthetic construct
DQQKGGY

SEQ ID NO: 23081 - protein, 7 aa, synthetic construct
QVPNFHG

SEQ ID NO: 23082 - protein, 7 aa, synthetic construct
APDKRSY

SEQ ID NO: 23083 - protein, 7 aa, synthetic construct
TEARKGF

SEQ ID NO: 23084 - protein, 7 aa, synthetic construct
NVLTKLE

SEQ ID NO: 23085 - protein, 7 aa, synthetic construct
VVPGVHA

SEQ ID NO: 23086 - protein, 7 aa, synthetic construct
GGMHERT

SEQ ID NO: 23087 - protein, 7 aa, synthetic construct
MTHGYHA

SEQ ID NO: 23088 - protein, 7 aa, synthetic construct
FMKVMGA

SEQ ID NO: 23089 - protein, 7 aa, synthetic construct
GYHFQDG

SEQ ID NO: 23090 - protein, 7 aa, synthetic construct
NRDLHRN

SEQ ID NO: 23091 - protein, 7 aa, synthetic construct
QRNEGRT

SEQ ID NO: 23092 - protein, 7 aa, synthetic construct
YHGDMAG

SEQ ID NO: 23093 - protein, 7 aa, synthetic construct
LERMIAP

SEQ ID NO: 23094 - protein, 7 aa, synthetic construct
YVSPPQP

SEQ ID NO: 23095 - protein, 7 aa, synthetic construct
RPHMGME

SEQ ID NO: 23096 - protein, 7 aa, synthetic construct
EVLRSPY

SEQ ID NO: 23097 - protein, 7 aa, synthetic construct
NLKIIIP

SEQ ID NO: 23098 - protein, 7 aa, synthetic construct
DRLGDKK

SEQ ID NO: 23099 - protein, 7 aa, synthetic construct
HIRAEKV

SEQ ID NO: 23100 - protein, 7 aa, synthetic construct
SGHLHDA

SEQ ID NO: 23101 - protein, 7 aa, synthetic construct
NPEKANH

SEQ ID NO: 23102 - protein, 7 aa, synthetic construct
AKFQGHF

SEQ ID NO: 23103 - protein, 7 aa, synthetic construct
EWKRSND

SEQ ID NO: 23104 - protein, 7 aa, synthetic construct
GDYMKIP

SEQ ID NO: 23105 - protein, 7 aa, synthetic construct
PSMHQEL

SEQ ID NO: 23106 - protein, 7 aa, synthetic construct
IVRMEGK

SEQ ID NO: 23107 - protein, 7 aa, synthetic construct
YLNPKGT

SEQ ID NO: 23108 - protein, 7 aa, synthetic construct
HRDNMME

SEQ ID NO: 23109 - protein, 7 aa, synthetic construct
EGKMSTM

SEQ ID NO: 23110 - protein, 7 aa, synthetic construct
CSRLDDC

SEQ ID NO: 23111 - protein, 7 aa, synthetic construct
RSAMLSA

SEQ ID NO: 23112 - protein, 7 aa, synthetic construct
AQESTPW

SEQ ID NO: 23113 - protein, 7 aa, synthetic construct
QAAHIGP

SEQ ID NO: 23114 - protein, 7 aa, synthetic construct
QGYSNVT

SEQ ID NO: 23115 - protein, 7 aa, synthetic construct
RETAKEL

SEQ ID NO: 23116 - protein, 7 aa, synthetic construct
ILSQQVS

SEQ ID NO: 23117 - protein, 7 aa, synthetic construct
TKLDTNV

SEQ ID NO: 23118 - protein, 7 aa, synthetic construct
TPERINF

SEQ ID NO: 23119 - protein, 7 aa, synthetic construct
LLQKYQM

SEQ ID NO: 23120 - protein, 7 aa, synthetic construct
HTQGHAY

SEQ ID NO: 23121 - protein, 7 aa, synthetic construct
QKPIYVP

SEQ ID NO: 23122 - protein, 7 aa, synthetic construct
TNWMKTP

SEQ ID NO: 23123 - protein, 7 aa, synthetic construct
AKVDQFH

SEQ ID NO: 23124 - protein, 7 aa, synthetic construct
AGSKNNH

SEQ ID NO: 23125 - protein, 7 aa, synthetic construct
HGTGGEI

SEQ ID NO: 23126 - protein, 7 aa, synthetic construct
IVDSSLR

SEQ ID NO: 23127 - protein, 7 aa, synthetic construct
GHNNQFY

SEQ ID NO: 23128 - protein, 7 aa, synthetic construct
FKGPDIV

SEQ ID NO: 23129 - protein, 7 aa, synthetic construct
VPNIGRI

SEQ ID NO: 23130 - protein, 7 aa, synthetic construct
QTMMNAP

SEQ ID NO: 23131 - protein, 7 aa, synthetic construct
REKMNDD

SEQ ID NO: 23132 - protein, 7 aa, synthetic construct
INTLWQA

SEQ ID NO: 23133 - protein, 7 aa, synthetic construct
GGIEVKP

SEQ ID NO: 23134 - protein, 7 aa, synthetic construct
DILEKRV

SEQ ID NO: 23135 - protein, 7 aa, synthetic construct
NQQLSQE

SEQ ID NO: 23136 - protein, 7 aa, synthetic construct
GPRPIQF

SEQ ID NO: 23137 - protein, 7 aa, synthetic construct
MTRIHDP

SEQ ID NO: 23138 - protein, 7 aa, synthetic construct
SGRTHEI

SEQ ID NO: 23139 - protein, 7 aa, synthetic construct
QSREVVH

SEQ ID NO: 23140 - protein, 7 aa, synthetic construct
SERSHNL

SEQ ID NO: 23141 - protein, 7 aa, synthetic construct
GELERHS

SEQ ID NO: 23142 - protein, 7 aa, synthetic construct
ARDRIPE

SEQ ID NO: 23143 - protein, 7 aa, synthetic construct
NMMFGAE

SEQ ID NO: 23144 - protein, 7 aa, synthetic construct
TNKQMDF

SEQ ID NO: 23145 - protein, 7 aa, synthetic construct
LKNTALS

SEQ ID NO: 23146 - protein, 7 aa, synthetic construct
ESLKSHP

SEQ ID NO: 23147 - protein, 7 aa, synthetic construct
DLYTASP

SEQ ID NO: 23148 - protein, 7 aa, synthetic construct
GMIPRDY

SEQ ID NO: 23149 - protein, 7 aa, synthetic construct
HNGRTAY

SEQ ID NO: 23150 - protein, 7 aa, synthetic construct
DDFSSKP

SEQ ID NO: 23151 - protein, 7 aa, synthetic construct
AQVKTSP

SEQ ID NO: 23152 - protein, 7 aa, synthetic construct
MDRFEPV

SEQ ID NO: 23153 - protein, 7 aa, synthetic construct
IERLKVT

SEQ ID NO: 23154 - protein, 7 aa, synthetic construct
LQATVTR

SEQ ID NO: 23155 - protein, 7 aa, synthetic construct
HIPMAPS

SEQ ID NO: 23156 - protein, 7 aa, synthetic construct
NNMNINA

SEQ ID NO: 23157 - protein, 7 aa, synthetic construct
YHTEKVS

SEQ ID NO: 23158 - protein, 7 aa, synthetic construct
FAVSDKP

SEQ ID NO: 23159 - protein, 7 aa, synthetic construct
GGRNDPD

SEQ ID NO: 23160 - protein, 7 aa, synthetic construct
DTKQMVK

SEQ ID NO: 23161 - protein, 7 aa, synthetic construct
GMMATIA

SEQ ID NO: 23162 - protein, 7 aa, synthetic construct
YENRHQA

SEQ ID NO: 23163 - protein, 7 aa, synthetic construct
KVRANEH

SEQ ID NO: 23164 - protein, 7 aa, synthetic construct
FREPEAG

SEQ ID NO: 23165 - protein, 7 aa, synthetic construct
GTYTLQE

SEQ ID NO: 23166 - protein, 7 aa, synthetic construct
KNTQGGW

SEQ ID NO: 23167 - protein, 7 aa, synthetic construct
ELTWEKV

SEQ ID NO: 23168 - protein, 7 aa, synthetic construct
NAHMVAY

SEQ ID NO: 23169 - protein, 7 aa, synthetic construct
YMKEIQT

SEQ ID NO: 23170 - protein, 7 aa, synthetic construct
NGMKTEH

SEQ ID NO: 23171 - protein, 7 aa, synthetic construct
HNDNRNY

SEQ ID NO: 23172 - protein, 7 aa, synthetic construct
IQAMVAG

SEQ ID NO: 23173 - protein, 7 aa, synthetic construct
ENVYREV

SEQ ID NO: 23174 - protein, 7 aa, synthetic construct
TTVPRHD

SEQ ID NO: 23175 - protein, 7 aa, synthetic construct
ANIPVDR

SEQ ID NO: 23176 - protein, 7 aa, synthetic construct
YAKLQVA

SEQ ID NO: 23177 - protein, 7 aa, synthetic construct
HSLSSGP

SEQ ID NO: 23178 - protein, 7 aa, synthetic construct
MTPNIAK

SEQ ID NO: 23179 - protein, 7 aa, synthetic construct
YENGTTT

SEQ ID NO: 23180 - protein, 7 aa, synthetic construct
SMQANTS

SEQ ID NO: 23181 - protein, 7 aa, synthetic construct
VTHPTIP

SEQ ID NO: 23182 - protein, 7 aa, synthetic construct
TSANPAE

SEQ ID NO: 23183 - protein, 7 aa, synthetic construct
GKKMTDV

SEQ ID NO: 23184 - protein, 7 aa, synthetic construct
HLQKPPE

SEQ ID NO: 23185 - protein, 7 aa, synthetic construct
YNPNLKE

SEQ ID NO: 23186 - protein, 7 aa, synthetic construct
YSKNDDF

SEQ ID NO: 23187 - protein, 7 aa, synthetic construct
NDEHRLQ

SEQ ID NO: 23188 - protein, 7 aa, synthetic construct
KVMFSDA

SEQ ID NO: 23189 - protein, 7 aa, synthetic construct
SLHTYKP

SEQ ID NO: 23190 - protein, 7 aa, synthetic construct
FRTDYHS

SEQ ID NO: 23191 - protein, 7 aa, synthetic construct
HKPIFRD

SEQ ID NO: 23192 - protein, 7 aa, synthetic construct
RQMEQNR

SEQ ID NO: 23193 - protein, 7 aa, synthetic construct
YTVHTHK

SEQ ID NO: 23194 - protein, 7 aa, synthetic construct
AVWNGRE

SEQ ID NO: 23195 - protein, 7 aa, synthetic construct
KVHAYPT

SEQ ID NO: 23196 - protein, 7 aa, synthetic construct
IDKVTGL

SEQ ID NO: 23197 - protein, 7 aa, synthetic construct
HAPQRAI

SEQ ID NO: 23198 - protein, 7 aa, synthetic construct
TIIPKAT

SEQ ID NO: 23199 - protein, 7 aa, synthetic construct
SFDKMAG

SEQ ID NO: 23200 - protein, 7 aa, synthetic construct
TLRNHGP

SEQ ID NO: 23201 - protein, 7 aa, synthetic construct
MYKELPE

SEQ ID NO: 23202 - protein, 7 aa, synthetic construct
GPQRMDM

SEQ ID NO: 23203 - protein, 7 aa, synthetic construct
MNNKMPT

SEQ ID NO: 23204 - protein, 7 aa, synthetic construct
TYGHPKA

SEQ ID NO: 23205 - protein, 7 aa, synthetic construct
NPVDRQQ

SEQ ID NO: 23206 - protein, 7 aa, synthetic construct
EKSKEGE

SEQ ID NO: 23207 - protein, 7 aa, synthetic construct
TFGQMHN

SEQ ID NO: 23208 - protein, 7 aa, synthetic construct
EGKVHPN

SEQ ID NO: 23209 - protein, 7 aa, synthetic construct
TVAAQNY

SEQ ID NO: 23210 - protein, 7 aa, synthetic construct
FERNQYS

SEQ ID NO: 23211 - protein, 7 aa, synthetic construct
EMSAVRA

SEQ ID NO: 23212 - protein, 7 aa, synthetic construct
IMQFQEA

SEQ ID NO: 23213 - protein, 7 aa, synthetic construct
MPQVEHT

SEQ ID NO: 23214 - protein, 7 aa, synthetic construct
SQPARVD

SEQ ID NO: 23215 - protein, 7 aa, synthetic construct
VRSQESE

SEQ ID NO: 23216 - protein, 7 aa, synthetic construct
SGAVQVA

SEQ ID NO: 23217 - protein, 7 aa, synthetic construct
AGEKTTR

SEQ ID NO: 23218 - protein, 7 aa, synthetic construct
KNREFDP

SEQ ID NO: 23219 - protein, 7 aa, synthetic construct
HRHGKED

SEQ ID NO: 23220 - protein, 7 aa, synthetic construct
IPGDARN

SEQ ID NO: 23221 - protein, 7 aa, synthetic construct
NSNKMHI

SEQ ID NO: 23222 - protein, 7 aa, synthetic construct
TNEWVHV

SEQ ID NO: 23223 - protein, 7 aa, synthetic construct
LGMPKPY

SEQ ID NO: 23224 - protein, 7 aa, synthetic construct
STEHKDQ

SEQ ID NO: 23225 - protein, 7 aa, synthetic construct
GGQPGNL

SEQ ID NO: 23226 - protein, 7 aa, synthetic construct
AVKMAQS

SEQ ID NO: 23227 - protein, 7 aa, synthetic construct
GRDTQEY

SEQ ID NO: 23228 - protein, 7 aa, synthetic construct
QNSEKSD

SEQ ID NO: 23229 - protein, 7 aa, synthetic construct
LKIAGIN

SEQ ID NO: 23230 - protein, 7 aa, synthetic construct
KEIKDGW

SEQ ID NO: 23231 - protein, 7 aa, synthetic construct
WSHNRTG

SEQ ID NO: 23232 - protein, 7 aa, synthetic construct
PIPRNPN

SEQ ID NO: 23233 - protein, 7 aa, synthetic construct
AKNFDIT

SEQ ID NO: 23234 - protein, 7 aa, synthetic construct
TRASVEK

SEQ ID NO: 23235 - protein, 7 aa, synthetic construct
RGGVSEP

SEQ ID NO: 23236 - protein, 7 aa, synthetic construct
NSGVLRG

SEQ ID NO: 23237 - protein, 7 aa, synthetic construct
DGQARLP

SEQ ID NO: 23238 - protein, 7 aa, synthetic construct
NHISKFP

SEQ ID NO: 23239 - protein, 7 aa, synthetic construct
HVQQKAY

SEQ ID NO: 23240 - protein, 7 aa, synthetic construct
SHSIDGP

SEQ ID NO: 23241 - protein, 7 aa, synthetic construct
WGQREEP

SEQ ID NO: 23242 - protein, 7 aa, synthetic construct
GMERNER

SEQ ID NO: 23243 - protein, 7 aa, synthetic construct
KKDATMP

SEQ ID NO: 23244 - protein, 7 aa, synthetic construct
NGNPRLE

SEQ ID NO: 23245 - protein, 7 aa, synthetic construct
VDYVMVD

SEQ ID NO: 23246 - protein, 7 aa, synthetic construct
TSMKQLM

SEQ ID NO: 23247 - protein, 7 aa, synthetic construct
LYTQLNG

SEQ ID NO: 23248 - protein, 7 aa, synthetic construct
QKEHRPM

SEQ ID NO: 23249 - protein, 7 aa, synthetic construct
AIPSKIT

SEQ ID NO: 23250 - protein, 7 aa, synthetic construct
YHSNLNQ

SEQ ID NO: 23251 - protein, 7 aa, synthetic construct
MGQTQII

SEQ ID NO: 23252 - protein, 7 aa, synthetic construct
FFNETNP

SEQ ID NO: 23253 - protein, 7 aa, synthetic construct
PFKHKDM

SEQ ID NO: 23254 - protein, 7 aa, synthetic construct
SREFIQQ

SEQ ID NO: 23255 - protein, 7 aa, synthetic construct
GKSDETL

SEQ ID NO: 23256 - protein, 7 aa, synthetic construct
HQRNVML

SEQ ID NO: 23257 - protein, 7 aa, synthetic construct
DRNPLEL

SEQ ID NO: 23258 - protein, 7 aa, synthetic construct
FPIGGYG

SEQ ID NO: 23259 - protein, 7 aa, synthetic construct
QIKENSY

SEQ ID NO: 23260 - protein, 7 aa, synthetic construct
GVNRTED

SEQ ID NO: 23261 - protein, 7 aa, synthetic construct
CGVVKCS

SEQ ID NO: 23262 - protein, 7 aa, synthetic construct
KDMNAGS

SEQ ID NO: 23263 - protein, 7 aa, synthetic construct
WKESKNF

SEQ ID NO: 23264 - protein, 7 aa, synthetic construct
MDPIRNN

SEQ ID NO: 23265 - protein, 7 aa, synthetic construct
FNRDVVP

SEQ ID NO: 23266 - protein, 7 aa, synthetic construct
SKEWRES

SEQ ID NO: 23267 - protein, 7 aa, synthetic construct
FQKDKRD

SEQ ID NO: 23268 - protein, 7 aa, synthetic construct
EKSPPGI

SEQ ID NO: 23269 - protein, 7 aa, synthetic construct
TLKMGKT

SEQ ID NO: 23270 - protein, 7 aa, synthetic construct
AGDTKIT

SEQ ID NO: 23271 - protein, 7 aa, synthetic construct
GILSPKT

SEQ ID NO: 23272 - protein, 7 aa, synthetic construct
QTKSSFH

SEQ ID NO: 23273 - protein, 7 aa, synthetic construct
QEYKMQH

SEQ ID NO: 23274 - protein, 7 aa, synthetic construct
DNNLSKG

SEQ ID NO: 23275 - protein, 7 aa, synthetic construct
YSAWNES

SEQ ID NO: 23276 - protein, 7 aa, synthetic construct
PHVKYKE

SEQ ID NO: 23277 - protein, 7 aa, synthetic construct
GFDRVGA

SEQ ID NO: 23278 - protein, 7 aa, synthetic construct
LTMKDKL

SEQ ID NO: 23279 - protein, 7 aa, synthetic construct
GRGPGTS

SEQ ID NO: 23280 - protein, 7 aa, synthetic construct
KTSVVAL

SEQ ID NO: 23281 - protein, 7 aa, synthetic construct
DTVTRLF

SEQ ID NO: 23282 - protein, 7 aa, synthetic construct
TLNADDF

SEQ ID NO: 23283 - protein, 7 aa, synthetic construct
YATSTQD

SEQ ID NO: 23284 - protein, 7 aa, synthetic construct
QSRAWGE

SEQ ID NO: 23285 - protein, 7 aa, synthetic construct
QNQTLES

SEQ ID NO: 23286 - protein, 7 aa, synthetic construct
DQHSHDK

SEQ ID NO: 23287 - protein, 7 aa, synthetic construct
SSMTVNK

SEQ ID NO: 23288 - protein, 7 aa, synthetic construct
IHSDFRS

SEQ ID NO: 23289 - protein, 7 aa, synthetic construct
YKQIQMS

SEQ ID NO: 23290 - protein, 7 aa, synthetic construct
NNNDKMM

SEQ ID NO: 23291 - protein, 7 aa, synthetic construct
QELPINR

SEQ ID NO: 23292 - protein, 7 aa, synthetic construct
HNPTHAP

SEQ ID NO: 23293 - protein, 7 aa, synthetic construct
RPATMAH

SEQ ID NO: 23294 - protein, 7 aa, synthetic construct
LLVGEPM

SEQ ID NO: 23295 - protein, 7 aa, synthetic construct
QPFQELS

SEQ ID NO: 23296 - protein, 7 aa, synthetic construct
QSEMRQT

SEQ ID NO: 23297 - protein, 7 aa, synthetic construct
KFQHIDR

SEQ ID NO: 23298 - protein, 7 aa, synthetic construct
GKAVSML

SEQ ID NO: 23299 - protein, 7 aa, synthetic construct
FHSPKLP

SEQ ID NO: 23300 - protein, 7 aa, synthetic construct
TKYHYDP

SEQ ID NO: 23301 - protein, 7 aa, synthetic construct
VGTTGDG

SEQ ID NO: 23302 - protein, 7 aa, synthetic construct
RKEAAVM

SEQ ID NO: 23303 - protein, 7 aa, synthetic construct
FKDVVMH

SEQ ID NO: 23304 - protein, 7 aa, synthetic construct
AHSKFGE

SEQ ID NO: 23305 - protein, 7 aa, synthetic construct
NQTAGHL

SEQ ID NO: 23306 - protein, 7 aa, synthetic construct
NVQYTGP

SEQ ID NO: 23307 - protein, 7 aa, synthetic construct
SYGRIVT

SEQ ID NO: 23308 - protein, 7 aa, synthetic construct
VRNADML

SEQ ID NO: 23309 - protein, 7 aa, synthetic construct
TTMSRHV

SEQ ID NO: 23310 - protein, 7 aa, synthetic construct
WVAQPGN

SEQ ID NO: 23311 - protein, 7 aa, synthetic construct
DEKWKHL

SEQ ID NO: 23312 - protein, 7 aa, synthetic construct
DKSFQTS

SEQ ID NO: 23313 - protein, 7 aa, synthetic construct
PNDPLGK

SEQ ID NO: 23314 - protein, 7 aa, synthetic construct
VAANPDA

SEQ ID NO: 23315 - protein, 7 aa, synthetic construct
HVENKYV

SEQ ID NO: 23316 - protein, 7 aa, synthetic construct
LHKVDPV

SEQ ID NO: 23317 - protein, 7 aa, synthetic construct
APPHINE

SEQ ID NO: 23318 - protein, 7 aa, synthetic construct
SGSLEKK

SEQ ID NO: 23319 - protein, 7 aa, synthetic construct
LHRLDNS

SEQ ID NO: 23320 - protein, 7 aa, synthetic construct
TCKGQCV

SEQ ID NO: 23321 - protein, 7 aa, synthetic construct
PGGDRPI

SEQ ID NO: 23322 - protein, 7 aa, synthetic construct
WPIKREP

SEQ ID NO: 23323 - protein, 7 aa, synthetic construct
FGHTTIH

SEQ ID NO: 23324 - protein, 7 aa, synthetic construct
NSEFHHE

SEQ ID NO: 23325 - protein, 7 aa, synthetic construct
VQSKIQT

SEQ ID NO: 23326 - protein, 7 aa, synthetic construct
QNQKMDI

SEQ ID NO: 23327 - protein, 7 aa, synthetic construct
FKDIHAA

SEQ ID NO: 23328 - protein, 7 aa, synthetic construct
KLGHNGE

SEQ ID NO: 23329 - protein, 7 aa, synthetic construct
GKEGKYW

SEQ ID NO: 23330 - protein, 7 aa, synthetic construct
HNHRALD

SEQ ID NO: 23331 - protein, 7 aa, synthetic construct
SGPHMNE

SEQ ID NO: 23332 - protein, 7 aa, synthetic construct
AFHIAGE

SEQ ID NO: 23333 - protein, 7 aa, synthetic construct
IHHEKHN

SEQ ID NO: 23334 - protein, 7 aa, synthetic construct
KMIAQKE

SEQ ID NO: 23335 - protein, 7 aa, synthetic construct
WMKHPDT

SEQ ID NO: 23336 - protein, 7 aa, synthetic construct
PTPKEQF

SEQ ID NO: 23337 - protein, 7 aa, synthetic construct
RTDRYTG

SEQ ID NO: 23338 - protein, 7 aa, synthetic construct
FPQPGQT

SEQ ID NO: 23339 - protein, 7 aa, synthetic construct
YPNMRQG

SEQ ID NO: 23340 - protein, 7 aa, synthetic construct
YRPTQMV

SEQ ID NO: 23341 - protein, 7 aa, synthetic construct
KSEMKNM

SEQ ID NO: 23342 - protein, 7 aa, synthetic construct
VERNPSP

SEQ ID NO: 23343 - protein, 7 aa, synthetic construct
QAPTYTD

SEQ ID NO: 23344 - protein, 7 aa, synthetic construct
VISGVHP

SEQ ID NO: 23345 - protein, 7 aa, synthetic construct
TYATGNF

SEQ ID NO: 23346 - protein, 7 aa, synthetic construct
HHKTNED

SEQ ID NO: 23347 - protein, 7 aa, synthetic construct
NHSQAQL

SEQ ID NO: 23348 - protein, 7 aa, synthetic construct
NYMTEGS

SEQ ID NO: 23349 - protein, 7 aa, synthetic construct
GNRVQEL

SEQ ID NO: 23350 - protein, 7 aa, synthetic construct
KRDEFNS

SEQ ID NO: 23351 - protein, 7 aa, synthetic construct
WGMGDAA

SEQ ID NO: 23352 - protein, 7 aa, synthetic construct
DNLGTQP

SEQ ID NO: 23353 - protein, 7 aa, synthetic construct
FREPNRT

SEQ ID NO: 23354 - protein, 7 aa, synthetic construct
AVDQYRG

SEQ ID NO: 23355 - protein, 7 aa, synthetic construct
YKDKSPH

SEQ ID NO: 23356 - protein, 7 aa, synthetic construct
VLDKLKP

SEQ ID NO: 23357 - protein, 7 aa, synthetic construct
VQEQRMR

SEQ ID NO: 23358 - protein, 7 aa, synthetic construct
YGTMPVS

SEQ ID NO: 23359 - protein, 7 aa, synthetic construct
PQTSVHI

SEQ ID NO: 23360 - protein, 7 aa, synthetic construct
NHHDANI

SEQ ID NO: 23361 - protein, 7 aa, synthetic construct
RASDFVH

SEQ ID NO: 23362 - protein, 7 aa, synthetic construct
NAKNYVP

SEQ ID NO: 23363 - protein, 7 aa, synthetic construct
FTDIKNM

SEQ ID NO: 23364 - protein, 7 aa, synthetic construct
APSKSYG

SEQ ID NO: 23365 - protein, 7 aa, synthetic construct
FSKEQDH

SEQ ID NO: 23366 - protein, 7 aa, synthetic construct
SSPDGTK

SEQ ID NO: 23367 - protein, 7 aa, synthetic construct
IVNDNKV

SEQ ID NO: 23368 - protein, 7 aa, synthetic construct
QNYDTHE

SEQ ID NO: 23369 - protein, 7 aa, synthetic construct
MMIESQA

SEQ ID NO: 23370 - protein, 7 aa, synthetic construct
FGYAETV

SEQ ID NO: 23371 - protein, 7 aa, synthetic construct
QFQHTIV

SEQ ID NO: 23372 - protein, 7 aa, synthetic construct
LHQKHYA

SEQ ID NO: 23373 - protein, 7 aa, synthetic construct
DGKFGIT

SEQ ID NO: 23374 - protein, 7 aa, synthetic construct
IPKTAEE

SEQ ID NO: 23375 - protein, 7 aa, synthetic construct
WVHGHEG

SEQ ID NO: 23376 - protein, 7 aa, synthetic construct
IHGADQR

SEQ ID NO: 23377 - protein, 7 aa, synthetic construct
NNIGAIY

SEQ ID NO: 23378 - protein, 7 aa, synthetic construct
QASSGGT

SEQ ID NO: 23379 - protein, 7 aa, synthetic construct
EGIKGTE

SEQ ID NO: 23380 - protein, 7 aa, synthetic construct
KVTTLSG

SEQ ID NO: 23381 - protein, 7 aa, synthetic construct
SPTSHFT

SEQ ID NO: 23382 - protein, 7 aa, synthetic construct
YNDTSLM

SEQ ID NO: 23383 - protein, 7 aa, synthetic construct
SKEMHMP

SEQ ID NO: 23384 - protein, 7 aa, synthetic construct
YAYGQEG

SEQ ID NO: 23385 - protein, 7 aa, synthetic construct
YPGREIG

SEQ ID NO: 23386 - protein, 7 aa, synthetic construct
ANQKSDE

SEQ ID NO: 23387 - protein, 7 aa, synthetic construct
HNPQIIK

SEQ ID NO: 23388 - protein, 7 aa, synthetic construct
HAPQRDK

SEQ ID NO: 23389 - protein, 7 aa, synthetic construct
VVMKHDS

SEQ ID NO: 23390 - protein, 7 aa, synthetic construct
QAKEDDN

SEQ ID NO: 23391 - protein, 7 aa, synthetic construct
VWKTITE

SEQ ID NO: 23392 - protein, 7 aa, synthetic construct
LTQKHYN

SEQ ID NO: 23393 - protein, 7 aa, synthetic construct
LNISPEP

SEQ ID NO: 23394 - protein, 7 aa, synthetic construct
MYPSNDT

SEQ ID NO: 23395 - protein, 7 aa, synthetic construct
VNHTDSP

SEQ ID NO: 23396 - protein, 7 aa, synthetic construct
PVPQQPA

SEQ ID NO: 23397 - protein, 7 aa, synthetic construct
KKEHSSE

SEQ ID NO: 23398 - protein, 7 aa, synthetic construct
KSTNNDQ

SEQ ID NO: 23399 - protein, 7 aa, synthetic construct
QVRNNYM

SEQ ID NO: 23400 - protein, 7 aa, synthetic construct
KDQVMSA

SEQ ID NO: 23401 - protein, 7 aa, synthetic construct
FAKALAT

SEQ ID NO: 23402 - protein, 7 aa, synthetic construct
YQKPKEY

SEQ ID NO: 23403 - protein, 7 aa, synthetic construct
TGLPENG

SEQ ID NO: 23404 - protein, 7 aa, synthetic construct
TQLRAAM

SEQ ID NO: 23405 - protein, 7 aa, synthetic construct
GTVKIEA

SEQ ID NO: 23406 - protein, 7 aa, synthetic construct
IGTRSVE

SEQ ID NO: 23407 - protein, 7 aa, synthetic construct
DIYSRSA

SEQ ID NO: 23408 - protein, 7 aa, synthetic construct
GVYYTVD

SEQ ID NO: 23409 - protein, 7 aa, synthetic construct
NHTTGPN

SEQ ID NO: 23410 - protein, 7 aa, synthetic construct
EGREMVS

SEQ ID NO: 23411 - protein, 7 aa, synthetic construct
SNGNVYF

SEQ ID NO: 23412 - protein, 7 aa, synthetic construct
KYNTNHD

SEQ ID NO: 23413 - protein, 7 aa, synthetic construct
HHDKLRD

SEQ ID NO: 23414 - protein, 7 aa, synthetic construct
QAMVRED

SEQ ID NO: 23415 - protein, 7 aa, synthetic construct
YHTQKHA

SEQ ID NO: 23416 - protein, 7 aa, synthetic construct
YHDLGER

SEQ ID NO: 23417 - protein, 7 aa, synthetic construct
ISAVTNP

SEQ ID NO: 23418 - protein, 7 aa, synthetic construct
VVAPSMN

SEQ ID NO: 23419 - protein, 7 aa, synthetic construct
CKIEACL

SEQ ID NO: 23420 - protein, 7 aa, synthetic construct
AFAASAS

SEQ ID NO: 23421 - protein, 7 aa, synthetic construct
HHAPSGA

SEQ ID NO: 23422 - protein, 7 aa, synthetic construct
YNGNDAS

SEQ ID NO: 23423 - protein, 7 aa, synthetic construct
EYQFKPA

SEQ ID NO: 23424 - protein, 7 aa, synthetic construct
KQENLTQ

SEQ ID NO: 23425 - protein, 7 aa, synthetic construct
DTMGPPA

SEQ ID NO: 23426 - protein, 7 aa, synthetic construct
VSPGLLP

SEQ ID NO: 23427 - protein, 7 aa, synthetic construct
KQEEMGS

SEQ ID NO: 23428 - protein, 7 aa, synthetic construct
LRIEAGN

SEQ ID NO: 23429 - protein, 7 aa, synthetic construct
FKPSERF

SEQ ID NO: 23430 - protein, 7 aa, synthetic construct
KFRVSEM

SEQ ID NO: 23431 - protein, 7 aa, synthetic construct
GRHPYSS

SEQ ID NO: 23432 - protein, 7 aa, synthetic construct
WVENQAP

SEQ ID NO: 23433 - protein, 7 aa, synthetic construct
NELAKTM

SEQ ID NO: 23434 - protein, 7 aa, synthetic construct
GMGGASL

SEQ ID NO: 23435 - protein, 7 aa, synthetic construct
NTYAPNS

SEQ ID NO: 23436 - protein, 7 aa, synthetic construct
GSVPHVK

SEQ ID NO: 23437 - protein, 7 aa, synthetic construct
PNVHDIN

SEQ ID NO: 23438 - protein, 7 aa, synthetic construct
NSTQQFR

SEQ ID NO: 23439 - protein, 7 aa, synthetic construct
WLGTSNH

SEQ ID NO: 23440 - protein, 7 aa, synthetic construct
KLPDHHE

SEQ ID NO: 23441 - protein, 7 aa, synthetic construct
PVGIDRT

SEQ ID NO: 23442 - protein, 7 aa, synthetic construct
KRHEPEI

SEQ ID NO: 23443 - protein, 7 aa, synthetic construct
KAHEGVA

SEQ ID NO: 23444 - protein, 7 aa, synthetic construct
TEKAKMP

SEQ ID NO: 23445 - protein, 7 aa, synthetic construct
TKDIIRH

SEQ ID NO: 23446 - protein, 7 aa, synthetic construct
HNGMVRM

SEQ ID NO: 23447 - protein, 7 aa, synthetic construct
ERSGIKY

SEQ ID NO: 23448 - protein, 7 aa, synthetic construct
TPKPSPT

SEQ ID NO: 23449 - protein, 7 aa, synthetic construct
VRPNDRL

SEQ ID NO: 23450 - protein, 7 aa, synthetic construct
SLVFPKS

SEQ ID NO: 23451 - protein, 7 aa, synthetic construct
LHPTLPP

SEQ ID NO: 23452 - protein, 7 aa, synthetic construct
AFANVIR

SEQ ID NO: 23453 - protein, 7 aa, synthetic construct
GETSRLT

SEQ ID NO: 23454 - protein, 7 aa, synthetic construct
NHAHPKA

SEQ ID NO: 23455 - protein, 7 aa, synthetic construct
QQNQMAA

SEQ ID NO: 23456 - protein, 7 aa, synthetic construct
CLTQMCD

SEQ ID NO: 23457 - protein, 7 aa, synthetic construct
EHGTQNI

SEQ ID NO: 23458 - protein, 7 aa, synthetic construct
NRGVQIH

SEQ ID NO: 23459 - protein, 7 aa, synthetic construct
IQSTRIY

SEQ ID NO: 23460 - protein, 7 aa, synthetic construct
WNDQHAY

SEQ ID NO: 23461 - protein, 7 aa, synthetic construct
EKHDLKS

SEQ ID NO: 23462 - protein, 7 aa, synthetic construct
WKYPGPE

SEQ ID NO: 23463 - protein, 7 aa, synthetic construct
DEEHRAR

SEQ ID NO: 23464 - protein, 7 aa, synthetic construct
EGMNSRL

SEQ ID NO: 23465 - protein, 7 aa, synthetic construct
QMPVTQK

SEQ ID NO: 23466 - protein, 7 aa, synthetic construct
SRPEEAA

SEQ ID NO: 23467 - protein, 7 aa, synthetic construct
GPIQVLG

SEQ ID NO: 23468 - protein, 7 aa, synthetic construct
QNFRTQA

SEQ ID NO: 23469 - protein, 7 aa, synthetic construct
YDRPQQQ

SEQ ID NO: 23470 - protein, 7 aa, synthetic construct
LGPARAM

SEQ ID NO: 23471 - protein, 7 aa, synthetic construct
TDYHVSS

SEQ ID NO: 23472 - protein, 7 aa, synthetic construct
KGSQMLD

SEQ ID NO: 23473 - protein, 7 aa, synthetic construct
GIHTDRL

SEQ ID NO: 23474 - protein, 7 aa, synthetic construct
QGPYPTG

SEQ ID NO: 23475 - protein, 7 aa, synthetic construct
FPGAALD

SEQ ID NO: 23476 - protein, 7 aa, synthetic construct
GHRQGMT

SEQ ID NO: 23477 - protein, 7 aa, synthetic construct
LNIKVID

SEQ ID NO: 23478 - protein, 7 aa, synthetic construct
PQTGMHY

SEQ ID NO: 23479 - protein, 7 aa, synthetic construct
IIQHDGP

SEQ ID NO: 23480 - protein, 7 aa, synthetic construct
FQTREER

SEQ ID NO: 23481 - protein, 7 aa, synthetic construct
ADKQVTY

SEQ ID NO: 23482 - protein, 7 aa, synthetic construct
GQTMNTI

SEQ ID NO: 23483 - protein, 7 aa, synthetic construct
PPFNTGR

SEQ ID NO: 23484 - protein, 7 aa, synthetic construct
KVNIELE

SEQ ID NO: 23485 - protein, 7 aa, synthetic construct
RISESND

SEQ ID NO: 23486 - protein, 7 aa, synthetic construct
ISVKVDV

SEQ ID NO: 23487 - protein, 7 aa, synthetic construct
PVKAQMH

SEQ ID NO: 23488 - protein, 7 aa, synthetic construct
TYPHPEV

SEQ ID NO: 23489 - protein, 7 aa, synthetic construct
NVPEAAG

SEQ ID NO: 23490 - protein, 7 aa, synthetic construct
VRFESIV

SEQ ID NO: 23491 - protein, 7 aa, synthetic construct
DSAPKNQ

SEQ ID NO: 23492 - protein, 7 aa, synthetic construct
KVDMDFT

SEQ ID NO: 23493 - protein, 7 aa, synthetic construct
DVHATMR

SEQ ID NO: 23494 - protein, 7 aa, synthetic construct
HQGNPNM

SEQ ID NO: 23495 - protein, 7 aa, synthetic construct
DGHRSQE

SEQ ID NO: 23496 - protein, 7 aa, synthetic construct
MQAAMKI

SEQ ID NO: 23497 - protein, 7 aa, synthetic construct
YQNQIYS

SEQ ID NO: 23498 - protein, 7 aa, synthetic construct
ARPDPDY

SEQ ID NO: 23499 - protein, 7 aa, synthetic construct
EKTTDHF

SEQ ID NO: 23500 - protein, 7 aa, synthetic construct
FDRTGVD

SEQ ID NO: 23501 - protein, 7 aa, synthetic construct
VVDKWKV

SEQ ID NO: 23502 - protein, 7 aa, synthetic construct
TTAMERF

SEQ ID NO: 23503 - protein, 7 aa, synthetic construct
FQPAATR

SEQ ID NO: 23504 - protein, 7 aa, synthetic construct
LNHDKAM

SEQ ID NO: 23505 - protein, 7 aa, synthetic construct
DKKPTYF

SEQ ID NO: 23506 - protein, 7 aa, synthetic construct
TAVVAEK

SEQ ID NO: 23507 - protein, 7 aa, synthetic construct
LHHPAHP

SEQ ID NO: 23508 - protein, 7 aa, synthetic construct
STIASLT

SEQ ID NO: 23509 - protein, 7 aa, synthetic construct
VPQGKHT

SEQ ID NO: 23510 - protein, 7 aa, synthetic construct
FHQSDIA

SEQ ID NO: 23511 - protein, 7 aa, synthetic construct
STDQHVH

SEQ ID NO: 23512 - protein, 7 aa, synthetic construct
MIGQTQV

SEQ ID NO: 23513 - protein, 7 aa, synthetic construct
IHNRILA

SEQ ID NO: 23514 - protein, 7 aa, synthetic construct
ASIHSSA

SEQ ID NO: 23515 - protein, 7 aa, synthetic construct
NHHERYV

SEQ ID NO: 23516 - protein, 7 aa, synthetic construct
PKWEKST

SEQ ID NO: 23517 - protein, 7 aa, synthetic construct
MPQVAMQ

SEQ ID NO: 23518 - protein, 7 aa, synthetic construct
QGFRDNG

SEQ ID NO: 23519 - protein, 7 aa, synthetic construct
SPTTNLR

SEQ ID NO: 23520 - protein, 7 aa, synthetic construct
NLHTSNY

SEQ ID NO: 23521 - protein, 7 aa, synthetic construct
TERVNPP

SEQ ID NO: 23522 - protein, 7 aa, synthetic construct
PERHVTV

SEQ ID NO: 23523 - protein, 7 aa, synthetic construct
FGDYKVV

SEQ ID NO: 23524 - protein, 7 aa, synthetic construct
DRQMKRD

SEQ ID NO: 23525 - protein, 7 aa, synthetic construct
KKDDWSD

SEQ ID NO: 23526 - protein, 7 aa, synthetic construct
MNEHYPS

SEQ ID NO: 23527 - protein, 7 aa, synthetic construct
STPTKRA

SEQ ID NO: 23528 - protein, 7 aa, synthetic construct
PVADPRL

SEQ ID NO: 23529 - protein, 7 aa, synthetic construct
SDRNTVE

SEQ ID NO: 23530 - protein, 7 aa, synthetic construct
VQFPHNV

SEQ ID NO: 23531 - protein, 7 aa, synthetic construct
MEGARIT

SEQ ID NO: 23532 - protein, 7 aa, synthetic construct
QISAGKQ

SEQ ID NO: 23533 - protein, 7 aa, synthetic construct
WQKSDRI

SEQ ID NO: 23534 - protein, 7 aa, synthetic construct
SQEMRDH

SEQ ID NO: 23535 - protein, 7 aa, synthetic construct
WQGKDGM

SEQ ID NO: 23536 - protein, 7 aa, synthetic construct
YDKNHEG

SEQ ID NO: 23537 - protein, 7 aa, synthetic construct
IKKELEN

SEQ ID NO: 23538 - protein, 7 aa, synthetic construct
VHATNGD

SEQ ID NO: 23539 - protein, 7 aa, synthetic construct
SEFKTGQ

SEQ ID NO: 23540 - protein, 7 aa, synthetic construct
SHTNPDG

SEQ ID NO: 23541 - protein, 7 aa, synthetic construct
EQYSNIK

SEQ ID NO: 23542 - protein, 7 aa, synthetic construct
IKIKVQE

SEQ ID NO: 23543 - protein, 7 aa, synthetic construct
INTISVS

SEQ ID NO: 23544 - protein, 7 aa, synthetic construct
GVNSDKI

SEQ ID NO: 23545 - protein, 7 aa, synthetic construct
KSELTMR

SEQ ID NO: 23546 - protein, 7 aa, synthetic construct
IQQALKE

SEQ ID NO: 23547 - protein, 7 aa, synthetic construct
DPARGHL

SEQ ID NO: 23548 - protein, 7 aa, synthetic construct
NHLAPHA

SEQ ID NO: 23549 - protein, 7 aa, synthetic construct
MQGDKIV

SEQ ID NO: 23550 - protein, 7 aa, synthetic construct
CRSDAFC

SEQ ID NO: 23551 - protein, 7 aa, synthetic construct
VDANNFH

SEQ ID NO: 23552 - protein, 7 aa, synthetic construct
FKGPVEH

SEQ ID NO: 23553 - protein, 7 aa, synthetic construct
MGSTKIH

SEQ ID NO: 23554 - protein, 7 aa, synthetic construct
YEPKKLN

SEQ ID NO: 23555 - protein, 7 aa, synthetic construct
YERWAQS

SEQ ID NO: 23556 - protein, 7 aa, synthetic construct
PLQGAPN

SEQ ID NO: 23557 - protein, 7 aa, synthetic construct
AQAASRE

SEQ ID NO: 23558 - protein, 7 aa, synthetic construct
KDQSVLQ

SEQ ID NO: 23559 - protein, 7 aa, synthetic construct
EGLKVNS

SEQ ID NO: 23560 - protein, 7 aa, synthetic construct
RLDMVMA

SEQ ID NO: 23561 - protein, 7 aa, synthetic construct
ILPTHKM

SEQ ID NO: 23562 - protein, 7 aa, synthetic construct
VHESHML

SEQ ID NO: 23563 - protein, 7 aa, synthetic construct
EVQTLVA

SEQ ID NO: 23564 - protein, 7 aa, synthetic construct
PGHTLAP

SEQ ID NO: 23565 - protein, 7 aa, synthetic construct
PKDHEAR

SEQ ID NO: 23566 - protein, 7 aa, synthetic construct
DKHGDDY

SEQ ID NO: 23567 - protein, 7 aa, synthetic construct
HKQPYEY

SEQ ID NO: 23568 - protein, 7 aa, synthetic construct
HLHRPSA

SEQ ID NO: 23569 - protein, 7 aa, synthetic construct
YDAATNG

SEQ ID NO: 23570 - protein, 7 aa, synthetic construct
RYEDTNA

SEQ ID NO: 23571 - protein, 7 aa, synthetic construct
NGVLSIA

SEQ ID NO: 23572 - protein, 7 aa, synthetic construct
SSKVYGV

SEQ ID NO: 23573 - protein, 7 aa, synthetic construct
WHQNLEH

SEQ ID NO: 23574 - protein, 7 aa, synthetic construct
SMEARVI

SEQ ID NO: 23575 - protein, 7 aa, synthetic construct
YGVGIRS

SEQ ID NO: 23576 - protein, 7 aa, synthetic construct
VRSLNQH

SEQ ID NO: 23577 - protein, 7 aa, synthetic construct
WYASEHE

SEQ ID NO: 23578 - protein, 7 aa, synthetic construct
WTTSERS

SEQ ID NO: 23579 - protein, 7 aa, synthetic construct
LMHNVGE

SEQ ID NO: 23580 - protein, 7 aa, synthetic construct
NGKTSWE

SEQ ID NO: 23581 - protein, 7 aa, synthetic construct
QEHGNMS

SEQ ID NO: 23582 - protein, 7 aa, synthetic construct
PGHDNSK

SEQ ID NO: 23583 - protein, 7 aa, synthetic construct
TEERRHI

SEQ ID NO: 23584 - protein, 7 aa, synthetic construct
YKQVSPL

SEQ ID NO: 23585 - protein, 7 aa, synthetic construct
YPSHHAI

SEQ ID NO: 23586 - protein, 7 aa, synthetic construct
GQVVFRD

SEQ ID NO: 23587 - protein, 7 aa, synthetic construct
GVAIGQK

SEQ ID NO: 23588 - protein, 7 aa, synthetic construct
YGNEVTT

SEQ ID NO: 23589 - protein, 7 aa, synthetic construct
DHAVKEK

SEQ ID NO: 23590 - protein, 7 aa, synthetic construct
KAPNEDG

SEQ ID NO: 23591 - protein, 7 aa, synthetic construct
NKHNDIS

SEQ ID NO: 23592 - protein, 7 aa, synthetic construct
RHREDAH

SEQ ID NO: 23593 - protein, 7 aa, synthetic construct
LAKKYDA

SEQ ID NO: 23594 - protein, 7 aa, synthetic construct
AKMPDAS

SEQ ID NO: 23595 - protein, 7 aa, synthetic construct
KVGLEAA

SEQ ID NO: 23596 - protein, 7 aa, synthetic construct
INSGHEF

SEQ ID NO: 23597 - protein, 7 aa, synthetic construct
DRHIITG

SEQ ID NO: 23598 - protein, 7 aa, synthetic construct
SLYVANE

SEQ ID NO: 23599 - protein, 7 aa, synthetic construct
LGALQTM

SEQ ID NO: 23600 - protein, 7 aa, synthetic construct
FQQVQDA

SEQ ID NO: 23601 - protein, 7 aa, synthetic construct
MSNAAPA

SEQ ID NO: 23602 - protein, 7 aa, synthetic construct
GMNMISP

SEQ ID NO: 23603 - protein, 7 aa, synthetic construct
KSIEGNE

SEQ ID NO: 23604 - protein, 7 aa, synthetic construct
IRDGIVK

SEQ ID NO: 23605 - protein, 7 aa, synthetic construct
PKAQPIM

SEQ ID NO: 23606 - protein, 7 aa, synthetic construct
RVKESNY

SEQ ID NO: 23607 - protein, 7 aa, synthetic construct
FVKEHAE

SEQ ID NO: 23608 - protein, 7 aa, synthetic construct
QNGHDHE

SEQ ID NO: 23609 - protein, 7 aa, synthetic construct
STGERII

SEQ ID NO: 23610 - protein, 7 aa, synthetic construct
VNKKEFV

SEQ ID NO: 23611 - protein, 7 aa, synthetic construct
SASPDWI

SEQ ID NO: 23612 - protein, 7 aa, synthetic construct
NRLQNAT

SEQ ID NO: 23613 - protein, 7 aa, synthetic construct
ERHGTSE

SEQ ID NO: 23614 - protein, 7 aa, synthetic construct
HMEPDRY

SEQ ID NO: 23615 - protein, 7 aa, synthetic construct
QVMNGVA

SEQ ID NO: 23616 - protein, 7 aa, synthetic construct
VSNAMAH

SEQ ID NO: 23617 - protein, 7 aa, synthetic construct
WAEFTKQ

SEQ ID NO: 23618 - protein, 7 aa, synthetic construct
VVTNGQS

SEQ ID NO: 23619 - protein, 7 aa, synthetic construct
RKDTGVE

SEQ ID NO: 23620 - protein, 7 aa, synthetic construct
TFQTKMA

SEQ ID NO: 23621 - protein, 7 aa, synthetic construct
ITTNSYT

SEQ ID NO: 23622 - protein, 7 aa, synthetic construct
KVTDKWQ

SEQ ID NO: 23623 - protein, 7 aa, synthetic construct
HTKQERP

SEQ ID NO: 23624 - protein, 7 aa, synthetic construct
AHVDAQR

SEQ ID NO: 23625 - protein, 7 aa, synthetic construct
NAMEHFE

SEQ ID NO: 23626 - protein, 7 aa, synthetic construct
QSHEHEG

SEQ ID NO: 23627 - protein, 7 aa, synthetic construct
GTERFNG

SEQ ID NO: 23628 - protein, 7 aa, synthetic construct
GPTEHDR

SEQ ID NO: 23629 - protein, 7 aa, synthetic construct
LHEHNGT

SEQ ID NO: 23630 - protein, 7 aa, synthetic construct
VFGGQQD

SEQ ID NO: 23631 - protein, 7 aa, synthetic construct
ILAGTQA

SEQ ID NO: 23632 - protein, 7 aa, synthetic construct
GYKPGTN

SEQ ID NO: 23633 - protein, 7 aa, synthetic construct
IPQSFQD

SEQ ID NO: 23634 - protein, 7 aa, synthetic construct
PGHRIQD

SEQ ID NO: 23635 - protein, 7 aa, synthetic construct
RGAEMHM

SEQ ID NO: 23636 - protein, 7 aa, synthetic construct
EKQSIAN

SEQ ID NO: 23637 - protein, 7 aa, synthetic construct
TAIIDKE

SEQ ID NO: 23638 - protein, 7 aa, synthetic construct
DEQRMIG

SEQ ID NO: 23639 - protein, 7 aa, synthetic construct
VYQDKPQ

SEQ ID NO: 23640 - protein, 7 aa, synthetic construct
RKHQDKE

SEQ ID NO: 23641 - protein, 7 aa, synthetic construct
HMKPAQF

SEQ ID NO: 23642 - protein, 7 aa, synthetic construct
SNIPHTN

SEQ ID NO: 23643 - protein, 7 aa, synthetic construct
INKQGRV

SEQ ID NO: 23644 - protein, 7 aa, synthetic construct
YVSSGPR

SEQ ID NO: 23645 - protein, 7 aa, synthetic construct
YVKESNP

SEQ ID NO: 23646 - protein, 7 aa, synthetic construct
VHNIAHI

SEQ ID NO: 23647 - protein, 7 aa, synthetic construct
FGGQTLN

SEQ ID NO: 23648 - protein, 7 aa, synthetic construct
GWKSAEN

SEQ ID NO: 23649 - protein, 7 aa, synthetic construct
DFTDHRT

SEQ ID NO: 23650 - protein, 7 aa, synthetic construct
MDPHKVQ

SEQ ID NO: 23651 - protein, 7 aa, synthetic construct
KQQEPGY

SEQ ID NO: 23652 - protein, 7 aa, synthetic construct
NPGRDSG

SEQ ID NO: 23653 - protein, 7 aa, synthetic construct
DFVPSKK

SEQ ID NO: 23654 - protein, 7 aa, synthetic construct
QLKGFVG

SEQ ID NO: 23655 - protein, 7 aa, synthetic construct
QLNEKWP

SEQ ID NO: 23656 - protein, 7 aa, synthetic construct
SATPDWP

SEQ ID NO: 23657 - protein, 7 aa, synthetic construct
TAQQVYD

SEQ ID NO: 23658 - protein, 7 aa, synthetic construct
LVSGTGV

SEQ ID NO: 23659 - protein, 7 aa, synthetic construct
PRKDEAW

SEQ ID NO: 23660 - protein, 7 aa, synthetic construct
WNSGADL

SEQ ID NO: 23661 - protein, 7 aa, synthetic construct
SVYMPKS

SEQ ID NO: 23662 - protein, 7 aa, synthetic construct
SLDYSVA

SEQ ID NO: 23663 - protein, 7 aa, synthetic construct
TSGDMPF

SEQ ID NO: 23664 - protein, 7 aa, synthetic construct
YDTHGYD

SEQ ID NO: 23665 - protein, 7 aa, synthetic construct
IEQLAYG

SEQ ID NO: 23666 - protein, 7 aa, synthetic construct
SQTFSSS

SEQ ID NO: 23667 - protein, 7 aa, synthetic construct
SGVIAVQ

SEQ ID NO: 23668 - protein, 7 aa, synthetic construct
DQTRTEY

SEQ ID NO: 23669 - protein, 7 aa, synthetic construct
TQMAHPF

SEQ ID NO: 23670 - protein, 7 aa, synthetic construct
TAHHYEK

SEQ ID NO: 23671 - protein, 7 aa, synthetic construct
EIKGPVR

SEQ ID NO: 23672 - protein, 7 aa, synthetic construct
QMNYPTK

SEQ ID NO: 23673 - protein, 7 aa, synthetic construct
HPQPKGY

SEQ ID NO: 23674 - protein, 7 aa, synthetic construct
PDEGPRM

SEQ ID NO: 23675 - protein, 7 aa, synthetic construct
NVIQTIP

SEQ ID NO: 23676 - protein, 7 aa, synthetic construct
ETFPTNK

SEQ ID NO: 23677 - protein, 7 aa, synthetic construct
SPTISTI

SEQ ID NO: 23678 - protein, 7 aa, synthetic construct
DGAVPHK

SEQ ID NO: 23679 - protein, 7 aa, synthetic construct
YMAATSD

SEQ ID NO: 23680 - protein, 7 aa, synthetic construct
MRTNYIA

SEQ ID NO: 23681 - protein, 7 aa, synthetic construct
QSENAYP

SEQ ID NO: 23682 - protein, 7 aa, synthetic construct
QNQMGAQ

SEQ ID NO: 23683 - protein, 7 aa, synthetic construct
GRHPHMI

SEQ ID NO: 23684 - protein, 7 aa, synthetic construct
TSPSMTH

SEQ ID NO: 23685 - protein, 7 aa, synthetic construct
GMISTTH

SEQ ID NO: 23686 - protein, 7 aa, synthetic construct
NTGRSPW

SEQ ID NO: 23687 - protein, 7 aa, synthetic construct
IVRGNHG

SEQ ID NO: 23688 - protein, 7 aa, synthetic construct
NVFATER

SEQ ID NO: 23689 - protein, 7 aa, synthetic construct
AITGANK

SEQ ID NO: 23690 - protein, 7 aa, synthetic construct
MNGVRVD

SEQ ID NO: 23691 - protein, 7 aa, synthetic construct
PQLKQMI

SEQ ID NO: 23692 - protein, 7 aa, synthetic construct
NMTSNNP

SEQ ID NO: 23693 - protein, 7 aa, synthetic construct
GFTGAYP

SEQ ID NO: 23694 - protein, 7 aa, synthetic construct
VSTGNLT

SEQ ID NO: 23695 - protein, 7 aa, synthetic construct
SGGDARF

SEQ ID NO: 23696 - protein, 7 aa, synthetic construct
SGREVAA

SEQ ID NO: 23697 - protein, 7 aa, synthetic construct
IPLMTQD

SEQ ID NO: 23698 - protein, 7 aa, synthetic construct
INGNPYS

SEQ ID NO: 23699 - protein, 7 aa, synthetic construct
SKEPKDL

SEQ ID NO: 23700 - protein, 7 aa, synthetic construct
ANPVVPT

SEQ ID NO: 23701 - protein, 7 aa, synthetic construct
AIAHEPF

SEQ ID NO: 23702 - protein, 7 aa, synthetic construct
DLKNDTV

SEQ ID NO: 23703 - protein, 7 aa, synthetic construct
NPVGTPF

SEQ ID NO: 23704 - protein, 7 aa, synthetic construct
INEIKQT

SEQ ID NO: 23705 - protein, 7 aa, synthetic construct
IILRDEK

SEQ ID NO: 23706 - protein, 7 aa, synthetic construct
QLPAMAY

SEQ ID NO: 23707 - protein, 7 aa, synthetic construct
HSSYSVM

SEQ ID NO: 23708 - protein, 7 aa, synthetic construct
YMHTSEV

SEQ ID NO: 23709 - protein, 7 aa, synthetic construct
VETRHNT

SEQ ID NO: 23710 - protein, 7 aa, synthetic construct
QPTQKDL

SEQ ID NO: 23711 - protein, 7 aa, synthetic construct
YSQPFKN

SEQ ID NO: 23712 - protein, 7 aa, synthetic construct
RHGEDPG

SEQ ID NO: 23713 - protein, 7 aa, synthetic construct
RPPKHTE

SEQ ID NO: 23714 - protein, 7 aa, synthetic construct
TVNPSIH

SEQ ID NO: 23715 - protein, 7 aa, synthetic construct
NSPGGEK

SEQ ID NO: 23716 - protein, 7 aa, synthetic construct
ERARADW

SEQ ID NO: 23717 - protein, 7 aa, synthetic construct
DKYRFED

SEQ ID NO: 23718 - protein, 7 aa, synthetic construct
LIRAQDK

SEQ ID NO: 23719 - protein, 7 aa, synthetic construct
EWNRHAP

SEQ ID NO: 23720 - protein, 7 aa, synthetic construct
NEYPNSP

SEQ ID NO: 23721 - protein, 7 aa, synthetic construct
IIRDMPP

SEQ ID NO: 23722 - protein, 7 aa, synthetic construct
MPTYRDH

SEQ ID NO: 23723 - protein, 7 aa, synthetic construct
NHVLIQS

SEQ ID NO: 23724 - protein, 7 aa, synthetic construct
GVPKVDQ

SEQ ID NO: 23725 - protein, 7 aa, synthetic construct
QNMSMVP

SEQ ID NO: 23726 - protein, 7 aa, synthetic construct
TDHAARE

SEQ ID NO: 23727 - protein, 7 aa, synthetic construct
QMDMNRS

SEQ ID NO: 23728 - protein, 7 aa, synthetic construct
SKDPYYA

SEQ ID NO: 23729 - protein, 7 aa, synthetic construct
SSFVTEM

SEQ ID NO: 23730 - protein, 7 aa, synthetic construct
HAWSVVE

SEQ ID NO: 23731 - protein, 7 aa, synthetic construct
YNGGYNV

SEQ ID NO: 23732 - protein, 7 aa, synthetic construct
ELKESRS

SEQ ID NO: 23733 - protein, 7 aa, synthetic construct
GGKPQHH

SEQ ID NO: 23734 - protein, 7 aa, synthetic construct
WSSKAVH

SEQ ID NO: 23735 - protein, 7 aa, synthetic construct
NGNDGPY

SEQ ID NO: 23736 - protein, 7 aa, synthetic construct
EKGFKVD

SEQ ID NO: 23737 - protein, 7 aa, synthetic construct
YQTKAYN

SEQ ID NO: 23738 - protein, 7 aa, synthetic construct
HEKHMDR

SEQ ID NO: 23739 - protein, 7 aa, synthetic construct
SASTKIG

SEQ ID NO: 23740 - protein, 7 aa, synthetic construct
NIHDGNN

SEQ ID NO: 23741 - protein, 7 aa, synthetic construct
IASEQKQ

SEQ ID NO: 23742 - protein, 7 aa, synthetic construct
ERDSGQK

SEQ ID NO: 23743 - protein, 7 aa, synthetic construct
HGMAHEF

SEQ ID NO: 23744 - protein, 7 aa, synthetic construct
RVNASLF

SEQ ID NO: 23745 - protein, 7 aa, synthetic construct
ANATGID

SEQ ID NO: 23746 - protein, 7 aa, synthetic construct
PIMNVEK

SEQ ID NO: 23747 - protein, 7 aa, synthetic construct
LYMTKGS

SEQ ID NO: 23748 - protein, 7 aa, synthetic construct
TEKRVTH

SEQ ID NO: 23749 - protein, 7 aa, synthetic construct
PIEQRSP

SEQ ID NO: 23750 - protein, 7 aa, synthetic construct
TEYHGQF

SEQ ID NO: 23751 - protein, 7 aa, synthetic construct
TKLPDLL

SEQ ID NO: 23752 - protein, 7 aa, synthetic construct
EMKEPRA

SEQ ID NO: 23753 - protein, 7 aa, synthetic construct
RQYHIID

SEQ ID NO: 23754 - protein, 7 aa, synthetic construct
MITMGKG

SEQ ID NO: 23755 - protein, 7 aa, synthetic construct
QLKDHIP

SEQ ID NO: 23756 - protein, 7 aa, synthetic construct
NVEQGPH

SEQ ID NO: 23757 - protein, 7 aa, synthetic construct
LGNKSEW

SEQ ID NO: 23758 - protein, 7 aa, synthetic construct
MYKTEEI

SEQ ID NO: 23759 - protein, 7 aa, synthetic construct
VMREMNG

SEQ ID NO: 23760 - protein, 7 aa, synthetic construct
KNKIEYD

SEQ ID NO: 23761 - protein, 7 aa, synthetic construct
FRMHEPE

SEQ ID NO: 23762 - protein, 7 aa, synthetic construct
NYESAQS

SEQ ID NO: 23763 - protein, 7 aa, synthetic construct
QAAKNYT

SEQ ID NO: 23764 - protein, 7 aa, synthetic construct
TINNSQT

SEQ ID NO: 23765 - protein, 7 aa, synthetic construct
TQMNMVE

SEQ ID NO: 23766 - protein, 7 aa, synthetic construct
SHAINEN

SEQ ID NO: 23767 - protein, 7 aa, synthetic construct
RYMDTQI

SEQ ID NO: 23768 - protein, 7 aa, synthetic construct
YFAEHSG

SEQ ID NO: 23769 - protein, 7 aa, synthetic construct
QVIRGQP

SEQ ID NO: 23770 - protein, 7 aa, synthetic construct
TVQHMGL

SEQ ID NO: 23771 - protein, 7 aa, synthetic construct
DLYGQGR

SEQ ID NO: 23772 - protein, 7 aa, synthetic construct
SLQFPTA

SEQ ID NO: 23773 - protein, 7 aa, synthetic construct
IMANYVG

SEQ ID NO: 23774 - protein, 7 aa, synthetic construct
EVGKGSF

SEQ ID NO: 23775 - protein, 7 aa, synthetic construct
PGHRDRE

SEQ ID NO: 23776 - protein, 7 aa, synthetic construct
KHPQYSN

SEQ ID NO: 23777 - protein, 7 aa, synthetic construct
QATGHSE

SEQ ID NO: 23778 - protein, 7 aa, synthetic construct
DRMQRET

SEQ ID NO: 23779 - protein, 7 aa, synthetic construct
TRYQPDH

SEQ ID NO: 23780 - protein, 7 aa, synthetic construct
SRSGTIG

SEQ ID NO: 23781 - protein, 7 aa, synthetic construct
NKPEIPR

SEQ ID NO: 23782 - protein, 7 aa, synthetic construct
MVRFHPE

SEQ ID NO: 23783 - protein, 7 aa, synthetic construct
HVMGMTS

SEQ ID NO: 23784 - protein, 7 aa, synthetic construct
VYMRETS

SEQ ID NO: 23785 - protein, 7 aa, synthetic construct
VNPQNSI

SEQ ID NO: 23786 - protein, 7 aa, synthetic construct
SRQVSLG

SEQ ID NO: 23787 - protein, 7 aa, synthetic construct
IMRTTTH

SEQ ID NO: 23788 - protein, 7 aa, synthetic construct
MAGDVRT

SEQ ID NO: 23789 - protein, 7 aa, synthetic construct
HSNQRPL

SEQ ID NO: 23790 - protein, 7 aa, synthetic construct
STQVKGY

SEQ ID NO: 23791 - protein, 7 aa, synthetic construct
IHQHSAL

SEQ ID NO: 23792 - protein, 7 aa, synthetic construct
ESHSQRS

SEQ ID NO: 23793 - protein, 7 aa, synthetic construct
PDIRTTH

SEQ ID NO: 23794 - protein, 7 aa, synthetic construct
AKVMVHN

SEQ ID NO: 23795 - protein, 7 aa, synthetic construct
ESRNTEF

SEQ ID NO: 23796 - protein, 7 aa, synthetic construct
SQSVNLP

SEQ ID NO: 23797 - protein, 7 aa, synthetic construct
YQMNNIV

SEQ ID NO: 23798 - protein, 7 aa, synthetic construct
DQSGHKL

SEQ ID NO: 23799 - protein, 7 aa, synthetic construct
HQQERPN

SEQ ID NO: 23800 - protein, 7 aa, synthetic construct
FIHHDEV

SEQ ID NO: 23801 - protein, 7 aa, synthetic construct
QEGIGHR

SEQ ID NO: 23802 - protein, 7 aa, synthetic construct
QPTTLKN

SEQ ID NO: 23803 - protein, 7 aa, synthetic construct
VHPMTDV

SEQ ID NO: 23804 - protein, 7 aa, synthetic construct
GHINVPS

SEQ ID NO: 23805 - protein, 7 aa, synthetic construct
KQINNVP

SEQ ID NO: 23806 - protein, 7 aa, synthetic construct
QTESHSG

SEQ ID NO: 23807 - protein, 7 aa, synthetic construct
QYDRSLE

SEQ ID NO: 23808 - protein, 7 aa, synthetic construct
AIQHYKE

SEQ ID NO: 23809 - protein, 7 aa, synthetic construct
GYNEAIK

SEQ ID NO: 23810 - protein, 7 aa, synthetic construct
KLNMEHL

SEQ ID NO: 23811 - protein, 7 aa, synthetic construct
KNEGVEM

SEQ ID NO: 23812 - protein, 7 aa, synthetic construct
KDMPQIR

SEQ ID NO: 23813 - protein, 7 aa, synthetic construct
TGRIDQA

SEQ ID NO: 23814 - protein, 7 aa, synthetic construct
GDLNKQH

SEQ ID NO: 23815 - protein, 7 aa, synthetic construct
NSGISTT

SEQ ID NO: 23816 - protein, 7 aa, synthetic construct
ADGNSRE

SEQ ID NO: 23817 - protein, 7 aa, synthetic construct
GLTPLPA

SEQ ID NO: 23818 - protein, 7 aa, synthetic construct
IQGPSGE

SEQ ID NO: 23819 - protein, 7 aa, synthetic construct
ENPLKEG

SEQ ID NO: 23820 - protein, 7 aa, synthetic construct
TIQGNNT

SEQ ID NO: 23821 - protein, 7 aa, synthetic construct
AMPMQAR

SEQ ID NO: 23822 - protein, 7 aa, synthetic construct
YSKQDGM

SEQ ID NO: 23823 - protein, 7 aa, synthetic construct
WNGQNFH

SEQ ID NO: 23824 - protein, 7 aa, synthetic construct
KQTNGQE

SEQ ID NO: 23825 - protein, 7 aa, synthetic construct
MAHMDHA

SEQ ID NO: 23826 - protein, 7 aa, synthetic construct
FNPKSDA

SEQ ID NO: 23827 - protein, 7 aa, synthetic construct
DVRQYEY

SEQ ID NO: 23828 - protein, 7 aa, synthetic construct
TYTVRVE

SEQ ID NO: 23829 - protein, 7 aa, synthetic construct
MQNQSVV

SEQ ID NO: 23830 - protein, 7 aa, synthetic construct
KYRDEVA

SEQ ID NO: 23831 - protein, 7 aa, synthetic construct
RLGSDQE

SEQ ID NO: 23832 - protein, 7 aa, synthetic construct
SLHQPHT

SEQ ID NO: 23833 - protein, 7 aa, synthetic construct
NDRQRPP

SEQ ID NO: 23834 - protein, 7 aa, synthetic construct
KVMGDHL

SEQ ID NO: 23835 - protein, 7 aa, synthetic construct
VVGLRMQ

SEQ ID NO: 23836 - protein, 7 aa, synthetic construct
MHYERNE

SEQ ID NO: 23837 - protein, 7 aa, synthetic construct
QKDFLLS

SEQ ID NO: 23838 - protein, 7 aa, synthetic construct
NDANTAV

SEQ ID NO: 23839 - protein, 7 aa, synthetic construct
KLRMELD

SEQ ID NO: 23840 - protein, 7 aa, synthetic construct
QQRDVKA

SEQ ID NO: 23841 - protein, 7 aa, synthetic construct
TLAPNQV

SEQ ID NO: 23842 - protein, 7 aa, synthetic construct
LRVVTMD

SEQ ID NO: 23843 - protein, 7 aa, synthetic construct
WGVAVGT

SEQ ID NO: 23844 - protein, 7 aa, synthetic construct
KIQTIVH

SEQ ID NO: 23845 - protein, 7 aa, synthetic construct
GTKDQSR

SEQ ID NO: 23846 - protein, 7 aa, synthetic construct
NGIKQQY

SEQ ID NO: 23847 - protein, 7 aa, synthetic construct
FRDELHT

SEQ ID NO: 23848 - protein, 7 aa, synthetic construct
KNYREMP

SEQ ID NO: 23849 - protein, 7 aa, synthetic construct
QDMSGNR

SEQ ID NO: 23850 - protein, 7 aa, synthetic construct
NVTNPHH

SEQ ID NO: 23851 - protein, 7 aa, synthetic construct
SKHHEHE

SEQ ID NO: 23852 - protein, 7 aa, synthetic construct
GNRQVSD

SEQ ID NO: 23853 - protein, 7 aa, synthetic construct
TRQNEPD

SEQ ID NO: 23854 - protein, 7 aa, synthetic construct
YKQYNGD

SEQ ID NO: 23855 - protein, 7 aa, synthetic construct
QSPHLSE

SEQ ID NO: 23856 - protein, 7 aa, synthetic construct
YEKFFND

SEQ ID NO: 23857 - protein, 7 aa, synthetic construct
RMDDPNI

SEQ ID NO: 23858 - protein, 7 aa, synthetic construct
YFEQIHG

SEQ ID NO: 23859 - protein, 7 aa, synthetic construct
SGALYKT

SEQ ID NO: 23860 - protein, 7 aa, synthetic construct
HTTGNRD

SEQ ID NO: 23861 - protein, 7 aa, synthetic construct
QKDHYTM

SEQ ID NO: 23862 - protein, 7 aa, synthetic construct
VTKLNTT

SEQ ID NO: 23863 - protein, 7 aa, synthetic construct
GPRIPLH

SEQ ID NO: 23864 - protein, 7 aa, synthetic construct
DGNKSTE

SEQ ID NO: 23865 - protein, 7 aa, synthetic construct
AVRLEEM

SEQ ID NO: 23866 - protein, 7 aa, synthetic construct
SAAWGGG

SEQ ID NO: 23867 - protein, 7 aa, synthetic construct
RVPQPDA

SEQ ID NO: 23868 - protein, 7 aa, synthetic construct
TNNHADR

SEQ ID NO: 23869 - protein, 7 aa, synthetic construct
HLNGEPV

SEQ ID NO: 23870 - protein, 7 aa, synthetic construct
SSTQALP

SEQ ID NO: 23871 - protein, 7 aa, synthetic construct
TTQQDGF

SEQ ID NO: 23872 - protein, 7 aa, synthetic construct
IQTERSV

SEQ ID NO: 23873 - protein, 7 aa, synthetic construct
TYAMGDE

SEQ ID NO: 23874 - protein, 7 aa, synthetic construct
NQTKWKD

SEQ ID NO: 23875 - protein, 7 aa, synthetic construct
NELKPDW

SEQ ID NO: 23876 - protein, 7 aa, synthetic construct
WAEHVPQ

SEQ ID NO: 23877 - protein, 7 aa, synthetic construct
LQPTNMM

SEQ ID NO: 23878 - protein, 7 aa, synthetic construct
THSTDRL

SEQ ID NO: 23879 - protein, 7 aa, synthetic construct
AINKTFI

SEQ ID NO: 23880 - protein, 7 aa, synthetic construct
NRRDAQG

SEQ ID NO: 23881 - protein, 7 aa, synthetic construct
TKHDTHI

SEQ ID NO: 23882 - protein, 7 aa, synthetic construct
FMGTNIQ

SEQ ID NO: 23883 - protein, 7 aa, synthetic construct
GDGNGHN

SEQ ID NO: 23884 - protein, 7 aa, synthetic construct
QYMGKAV

SEQ ID NO: 23885 - protein, 7 aa, synthetic construct
TPTFVAT

SEQ ID NO: 23886 - protein, 7 aa, synthetic construct
YSAMGLN

SEQ ID NO: 23887 - protein, 7 aa, synthetic construct
QPAKQSD

SEQ ID NO: 23888 - protein, 7 aa, synthetic construct
PEPGNFR

SEQ ID NO: 23889 - protein, 7 aa, synthetic construct
TSQAQIA

SEQ ID NO: 23890 - protein, 7 aa, synthetic construct
GSNAIVN

SEQ ID NO: 23891 - protein, 7 aa, synthetic construct
ITTQLRT

SEQ ID NO: 23892 - protein, 7 aa, synthetic construct
TGHVEAP

SEQ ID NO: 23893 - protein, 7 aa, synthetic construct
ARTVYGP

SEQ ID NO: 23894 - protein, 7 aa, synthetic construct
DRDGHLS

SEQ ID NO: 23895 - protein, 7 aa, synthetic construct
RHRLVDG

SEQ ID NO: 23896 - protein, 7 aa, synthetic construct
VPKEGNV

SEQ ID NO: 23897 - protein, 7 aa, synthetic construct
KIGTEQW

SEQ ID NO: 23898 - protein, 7 aa, synthetic construct
TTTHDDY

SEQ ID NO: 23899 - protein, 7 aa, synthetic construct
VRERIMM

SEQ ID NO: 23900 - protein, 7 aa, synthetic construct
HDPNVSH

SEQ ID NO: 23901 - protein, 7 aa, synthetic construct
IIGVGID

SEQ ID NO: 23902 - protein, 7 aa, synthetic construct
DKMQPNK

SEQ ID NO: 23903 - protein, 7 aa, synthetic construct
SKQTVQD

SEQ ID NO: 23904 - protein, 7 aa, synthetic construct
DVHFALG

SEQ ID NO: 23905 - protein, 7 aa, synthetic construct
MQHSDFG

SEQ ID NO: 23906 - protein, 7 aa, synthetic construct
TKTYPLH

SEQ ID NO: 23907 - protein, 7 aa, synthetic construct
GHSSLIS

SEQ ID NO: 23908 - protein, 7 aa, synthetic construct
KDVIHLG

SEQ ID NO: 23909 - protein, 7 aa, synthetic construct
KHPVLNV

SEQ ID NO: 23910 - protein, 7 aa, synthetic construct
LDNKSQP

SEQ ID NO: 23911 - protein, 7 aa, synthetic construct
SYPPLGT

SEQ ID NO: 23912 - protein, 7 aa, synthetic construct
TSLFPAP

SEQ ID NO: 23913 - protein, 7 aa, synthetic construct
STNFQNH

SEQ ID NO: 23914 - protein, 7 aa, synthetic construct
TSQQVNE

SEQ ID NO: 23915 - protein, 7 aa, synthetic construct
WHEGGAL

SEQ ID NO: 23916 - protein, 7 aa, synthetic construct
FQPQAAR

SEQ ID NO: 23917 - protein, 7 aa, synthetic construct
FHFGNKE

SEQ ID NO: 23918 - protein, 7 aa, synthetic construct
PTRYSPE

SEQ ID NO: 23919 - protein, 7 aa, synthetic construct
NMIKQSV

SEQ ID NO: 23920 - protein, 7 aa, synthetic construct
SMLTKYT

SEQ ID NO: 23921 - protein, 7 aa, synthetic construct
PHQGVTS

SEQ ID NO: 23922 - protein, 7 aa, synthetic construct
AMGSRLP

SEQ ID NO: 23923 - protein, 7 aa, synthetic construct
REPSNSF

SEQ ID NO: 23924 - protein, 7 aa, synthetic construct
RNVVNEL

SEQ ID NO: 23925 - protein, 7 aa, synthetic construct
DQKNTRF

SEQ ID NO: 23926 - protein, 7 aa, synthetic construct
DILGGQK

SEQ ID NO: 23927 - protein, 7 aa, synthetic construct
ASPGNNL

SEQ ID NO: 23928 - protein, 7 aa, synthetic construct
HATQPNP

SEQ ID NO: 23929 - protein, 7 aa, synthetic construct
WGAHEKV

SEQ ID NO: 23930 - protein, 7 aa, synthetic construct
RPEDVRV

SEQ ID NO: 23931 - protein, 7 aa, synthetic construct
RMEGPMQ

SEQ ID NO: 23932 - protein, 7 aa, synthetic construct
FGSGKLY

SEQ ID NO: 23933 - protein, 7 aa, synthetic construct
IQHHVQM

SEQ ID NO: 23934 - protein, 7 aa, synthetic construct
PSHAEHV

SEQ ID NO: 23935 - protein, 7 aa, synthetic construct
IAANIKY

SEQ ID NO: 23936 - protein, 7 aa, synthetic construct
DLSSGMS

SEQ ID NO: 23937 - protein, 7 aa, synthetic construct
HPQLNQK

SEQ ID NO: 23938 - protein, 7 aa, synthetic construct
KADSFQP

SEQ ID NO: 23939 - protein, 7 aa, synthetic construct
NDRWSLE

SEQ ID NO: 23940 - protein, 7 aa, synthetic construct
IVRNFGS

SEQ ID NO: 23941 - protein, 7 aa, synthetic construct
IGESYGW

SEQ ID NO: 23942 - protein, 7 aa, synthetic construct
AQYHALP

SEQ ID NO: 23943 - protein, 7 aa, synthetic construct
HIKTEQR

SEQ ID NO: 23944 - protein, 7 aa, synthetic construct
HSTAKNT

SEQ ID NO: 23945 - protein, 7 aa, synthetic construct
RVSQIMG

SEQ ID NO: 23946 - protein, 7 aa, synthetic construct
RTASPNE

SEQ ID NO: 23947 - protein, 7 aa, synthetic construct
QYDKQDR

SEQ ID NO: 23948 - protein, 7 aa, synthetic construct
KSESASI

SEQ ID NO: 23949 - protein, 7 aa, synthetic construct
MNRLVGE

SEQ ID NO: 23950 - protein, 7 aa, synthetic construct
PSREVER

SEQ ID NO: 23951 - protein, 7 aa, synthetic construct
TDSWDRP

SEQ ID NO: 23952 - protein, 7 aa, synthetic construct
MGSESSH

SEQ ID NO: 23953 - protein, 7 aa, synthetic construct
ARTAELP

SEQ ID NO: 23954 - protein, 7 aa, synthetic construct
TTDRVVA

SEQ ID NO: 23955 - protein, 7 aa, synthetic construct
DVQRLRG

SEQ ID NO: 23956 - protein, 7 aa, synthetic construct
SIGDHRI

SEQ ID NO: 23957 - protein, 7 aa, synthetic construct
ESKWLDE

SEQ ID NO: 23958 - protein, 7 aa, synthetic construct
NNAESIN

SEQ ID NO: 23959 - protein, 7 aa, synthetic construct
KTQHFMG

SEQ ID NO: 23960 - protein, 7 aa, synthetic construct
GTVKNNG

SEQ ID NO: 23961 - protein, 7 aa, synthetic construct
WETSRID

SEQ ID NO: 23962 - protein, 7 aa, synthetic construct
MQENSGH

SEQ ID NO: 23963 - protein, 7 aa, synthetic construct
PAVVSHE

SEQ ID NO: 23964 - protein, 7 aa, synthetic construct
YANFKLI

SEQ ID NO: 23965 - protein, 7 aa, synthetic construct
GSNVDTP

SEQ ID NO: 23966 - protein, 7 aa, synthetic construct
AVPQPYA

SEQ ID NO: 23967 - protein, 7 aa, synthetic construct
HVYNSAD

SEQ ID NO: 23968 - protein, 7 aa, synthetic construct
NVSATGD

SEQ ID NO: 23969 - protein, 7 aa, synthetic construct
IRIIGGN

SEQ ID NO: 23970 - protein, 7 aa, synthetic construct
AYSVNTH

SEQ ID NO: 23971 - protein, 7 aa, synthetic construct
GIYSELG

SEQ ID NO: 23972 - protein, 7 aa, synthetic construct
WGGREQH

SEQ ID NO: 23973 - protein, 7 aa, synthetic construct
SEDPKKW

SEQ ID NO: 23974 - protein, 7 aa, synthetic construct
MYQGTGM

SEQ ID NO: 23975 - protein, 7 aa, synthetic construct
PGPALQH

SEQ ID NO: 23976 - protein, 7 aa, synthetic construct
WEMGKNP

SEQ ID NO: 23977 - protein, 7 aa, synthetic construct
FKKTEHL

SEQ ID NO: 23978 - protein, 7 aa, synthetic construct
YIQMAEP

SEQ ID NO: 23979 - protein, 7 aa, synthetic construct
KKSQNDG

SEQ ID NO: 23980 - protein, 7 aa, synthetic construct
VAGFIQG

SEQ ID NO: 23981 - protein, 7 aa, synthetic construct
NEKGPEQ

SEQ ID NO: 23982 - protein, 7 aa, synthetic construct
MGVAHHE

SEQ ID NO: 23983 - protein, 7 aa, synthetic construct
SSQDIRW

SEQ ID NO: 23984 - protein, 7 aa, synthetic construct
WEAQRHN

SEQ ID NO: 23985 - protein, 7 aa, synthetic construct
QIKENTR

SEQ ID NO: 23986 - protein, 7 aa, synthetic construct
RKNVSED

SEQ ID NO: 23987 - protein, 7 aa, synthetic construct
INSPEHA

SEQ ID NO: 23988 - protein, 7 aa, synthetic construct
CRTGTGG

SEQ ID NO: 23989 - protein, 7 aa, synthetic construct
GYEHKGD

SEQ ID NO: 23990 - protein, 7 aa, synthetic construct
HTDYAVH

SEQ ID NO: 23991 - protein, 7 aa, synthetic construct
SMRTMDF

SEQ ID NO: 23992 - protein, 7 aa, synthetic construct
DPSVVGR

SEQ ID NO: 23993 - protein, 7 aa, synthetic construct
DGWKLPE

SEQ ID NO: 23994 - protein, 7 aa, synthetic construct
GDAQHDR

SEQ ID NO: 23995 - protein, 7 aa, synthetic construct
HTDSSSF

SEQ ID NO: 23996 - protein, 7 aa, synthetic construct
NFPGKMA

SEQ ID NO: 23997 - protein, 7 aa, synthetic construct
MTMRAVD

SEQ ID NO: 23998 - protein, 7 aa, synthetic construct
MPSTESV

SEQ ID NO: 23999 - protein, 7 aa, synthetic construct
GQVVVMP

SEQ ID NO: 24000 - protein, 7 aa, synthetic construct
ISTHSDA

SEQ ID NO: 24001 - protein, 7 aa, synthetic construct
QDNGTFF

SEQ ID NO: 24002 - protein, 7 aa, synthetic construct
SVKVDVT

SEQ ID NO: 24003 - protein, 7 aa, synthetic construct
DKNHDHS

SEQ ID NO: 24004 - protein, 7 aa, synthetic construct
QPADIRR

SEQ ID NO: 24005 - protein, 7 aa, synthetic construct
INSVKIN

SEQ ID NO: 24006 - protein, 7 aa, synthetic construct
LWSKDEE

SEQ ID NO: 24007 - protein, 7 aa, synthetic construct
VSTPNIN

SEQ ID NO: 24008 - protein, 7 aa, synthetic construct
APVMNQN

SEQ ID NO: 24009 - protein, 7 aa, synthetic construct
GMHYAEA

SEQ ID NO: 24010 - protein, 7 aa, synthetic construct
YHMKEIV

SEQ ID NO: 24011 - protein, 7 aa, synthetic construct
GPLDGHK

SEQ ID NO: 24012 - protein, 7 aa, synthetic construct
FNDGKFF

SEQ ID NO: 24013 - protein, 7 aa, synthetic construct
QEHKAKF

SEQ ID NO: 24014 - protein, 7 aa, synthetic construct
QQHPAQP

SEQ ID NO: 24015 - protein, 7 aa, synthetic construct
LGYPGQH

SEQ ID NO: 24016 - protein, 7 aa, synthetic construct
VPTVKGV

SEQ ID NO: 24017 - protein, 7 aa, synthetic construct
ANHNITV

SEQ ID NO: 24018 - protein, 7 aa, synthetic construct
GTPEWRQ

SEQ ID NO: 24019 - protein, 7 aa, synthetic construct
HNSDGNA

SEQ ID NO: 24020 - protein, 7 aa, synthetic construct
PHSTNTW

SEQ ID NO: 24021 - protein, 7 aa, synthetic construct
FSGSQDK

SEQ ID NO: 24022 - protein, 7 aa, synthetic construct
MIRADSP

SEQ ID NO: 24023 - protein, 7 aa, synthetic construct
ESHNAPE

SEQ ID NO: 24024 - protein, 7 aa, synthetic construct
KIDHIGS

SEQ ID NO: 24025 - protein, 7 aa, synthetic construct
AQHNKDS

SEQ ID NO: 24026 - protein, 7 aa, synthetic construct
SGPAPFQ

SEQ ID NO: 24027 - protein, 7 aa, synthetic construct
PNQEKPQ

SEQ ID NO: 24028 - protein, 7 aa, synthetic construct
AREKGFE

SEQ ID NO: 24029 - protein, 7 aa, synthetic construct
SESARIM

SEQ ID NO: 24030 - protein, 7 aa, synthetic construct
HLHADNV

SEQ ID NO: 24031 - protein, 7 aa, synthetic construct
NGHNILM

SEQ ID NO: 24032 - protein, 7 aa, synthetic construct
SSESTVG

SEQ ID NO: 24033 - protein, 7 aa, synthetic construct
IHTSNNT

SEQ ID NO: 24034 - protein, 7 aa, synthetic construct
DNVGTPT

SEQ ID NO: 24035 - protein, 7 aa, synthetic construct
YNRILDE

SEQ ID NO: 24036 - protein, 7 aa, synthetic construct
VAHQSTM

SEQ ID NO: 24037 - protein, 7 aa, synthetic construct
SQAHLIS

SEQ ID NO: 24038 - protein, 7 aa, synthetic construct
VMSGTYK

SEQ ID NO: 24039 - protein, 7 aa, synthetic construct
KQFDKTG

SEQ ID NO: 24040 - protein, 7 aa, synthetic construct
EGRDGGM

SEQ ID NO: 24041 - protein, 7 aa, synthetic construct
WGQHHGA

SEQ ID NO: 24042 - protein, 7 aa, synthetic construct
IHELSQG

SEQ ID NO: 24043 - protein, 7 aa, synthetic construct
GEENYKA

SEQ ID NO: 24044 - protein, 7 aa, synthetic construct
QPRYDSK

SEQ ID NO: 24045 - protein, 7 aa, synthetic construct
LKEVGKV

SEQ ID NO: 24046 - protein, 7 aa, synthetic construct
YIENVHS

SEQ ID NO: 24047 - protein, 7 aa, synthetic construct
MFNNENL

SEQ ID NO: 24048 - protein, 7 aa, synthetic construct
GTNGTYK

SEQ ID NO: 24049 - protein, 7 aa, synthetic construct
YTKGEKH

SEQ ID NO: 24050 - protein, 7 aa, synthetic construct
GMVSQVR

SEQ ID NO: 24051 - protein, 7 aa, synthetic construct
VNYSNIP

SEQ ID NO: 24052 - protein, 7 aa, synthetic construct
HGKEMIQ

SEQ ID NO: 24053 - protein, 7 aa, synthetic construct
QHNMEGV

SEQ ID NO: 24054 - protein, 7 aa, synthetic construct
NMQSSAS

SEQ ID NO: 24055 - protein, 7 aa, synthetic construct
GYAEKII

SEQ ID NO: 24056 - protein, 7 aa, synthetic construct
HDTHTDT

SEQ ID NO: 24057 - protein, 7 aa, synthetic construct
MGGDWRP

SEQ ID NO: 24058 - protein, 7 aa, synthetic construct
WKIQPQA

SEQ ID NO: 24059 - protein, 7 aa, synthetic construct
QTHAILS

SEQ ID NO: 24060 - protein, 7 aa, synthetic construct
PYAYKHE

SEQ ID NO: 24061 - protein, 7 aa, synthetic construct
FVQTYEK

SEQ ID NO: 24062 - protein, 7 aa, synthetic construct
SMQGQFE

SEQ ID NO: 24063 - protein, 7 aa, synthetic construct
RALVTPA

SEQ ID NO: 24064 - protein, 7 aa, synthetic construct
VQPFHKV

SEQ ID NO: 24065 - protein, 7 aa, synthetic construct
YDFSKKA

SEQ ID NO: 24066 - protein, 7 aa, synthetic construct
IMTAHGD

SEQ ID NO: 24067 - protein, 7 aa, synthetic construct
RSEMNNF

SEQ ID NO: 24068 - protein, 7 aa, synthetic construct
HRDRQHA

SEQ ID NO: 24069 - protein, 7 aa, synthetic construct
SAGTTMI

SEQ ID NO: 24070 - protein, 7 aa, synthetic construct
VKFHPNP

SEQ ID NO: 24071 - protein, 7 aa, synthetic construct
NSGNFSH

SEQ ID NO: 24072 - protein, 7 aa, synthetic construct
TNVSPTK

SEQ ID NO: 24073 - protein, 7 aa, synthetic construct
MKEAQPG

SEQ ID NO: 24074 - protein, 7 aa, synthetic construct
LPGPIST

SEQ ID NO: 24075 - protein, 7 aa, synthetic construct
MPAKETR

SEQ ID NO: 24076 - protein, 7 aa, synthetic construct
YDPPHSD

SEQ ID NO: 24077 - protein, 7 aa, synthetic construct
GPEERGH

SEQ ID NO: 24078 - protein, 7 aa, synthetic construct
DLKVWQA

SEQ ID NO: 24079 - protein, 7 aa, synthetic construct
IATYNMH

SEQ ID NO: 24080 - protein, 7 aa, synthetic construct
ADQPKKI

SEQ ID NO: 24081 - protein, 7 aa, synthetic construct
HMEHHPM

SEQ ID NO: 24082 - protein, 7 aa, synthetic construct
ENMNHQG

SEQ ID NO: 24083 - protein, 7 aa, synthetic construct
WTRDISH

SEQ ID NO: 24084 - protein, 7 aa, synthetic construct
YGLQEQS

SEQ ID NO: 24085 - protein, 7 aa, synthetic construct
EQRQHNH

SEQ ID NO: 24086 - protein, 7 aa, synthetic construct
NTAHRNL

SEQ ID NO: 24087 - protein, 7 aa, synthetic construct
RYKDDPR

SEQ ID NO: 24088 - protein, 7 aa, synthetic construct
WTKLQFD

SEQ ID NO: 24089 - protein, 7 aa, synthetic construct
LQGHIVI

SEQ ID NO: 24090 - protein, 7 aa, synthetic construct
LQSHKHG

SEQ ID NO: 24091 - protein, 7 aa, synthetic construct
RDTKFAF

SEQ ID NO: 24092 - protein, 7 aa, synthetic construct
SPTTINV

SEQ ID NO: 24093 - protein, 7 aa, synthetic construct
DRFNPGM

SEQ ID NO: 24094 - protein, 7 aa, synthetic construct
MTTPLKQ

SEQ ID NO: 24095 - protein, 7 aa, synthetic construct
GGDSQNN

SEQ ID NO: 24096 - protein, 7 aa, synthetic construct
NPSVDYP

SEQ ID NO: 24097 - protein, 7 aa, synthetic construct
VIQSISS

SEQ ID NO: 24098 - protein, 7 aa, synthetic construct
LGEYSSV

SEQ ID NO: 24099 - protein, 7 aa, synthetic construct
YSTPADH

SEQ ID NO: 24100 - protein, 7 aa, synthetic construct
GIADYQG

SEQ ID NO: 24101 - protein, 7 aa, synthetic construct
RWTDLPA

SEQ ID NO: 24102 - protein, 7 aa, synthetic construct
RPPHPYQ

SEQ ID NO: 24103 - protein, 7 aa, synthetic construct
YQKTHND

SEQ ID NO: 24104 - protein, 7 aa, synthetic construct
LWGDTEK

SEQ ID NO: 24105 - protein, 7 aa, synthetic construct
RIKEHPY

SEQ ID NO: 24106 - protein, 7 aa, synthetic construct
AISTNTM

SEQ ID NO: 24107 - protein, 7 aa, synthetic construct
GDNPTQA

SEQ ID NO: 24108 - protein, 7 aa, synthetic construct
RQPYNPM

SEQ ID NO: 24109 - protein, 7 aa, synthetic construct
HSNQPHW

SEQ ID NO: 24110 - protein, 7 aa, synthetic construct
FKGPSAP

SEQ ID NO: 24111 - protein, 7 aa, synthetic construct
GIRASHV

SEQ ID NO: 24112 - protein, 7 aa, synthetic construct
AVNAQPY

SEQ ID NO: 24113 - protein, 7 aa, synthetic construct
DRGKLTG

SEQ ID NO: 24114 - protein, 7 aa, synthetic construct
NAGFNTI

SEQ ID NO: 24115 - protein, 7 aa, synthetic construct
SSPITRG

SEQ ID NO: 24116 - protein, 7 aa, synthetic construct
PLKGINT

SEQ ID NO: 24117 - protein, 7 aa, synthetic construct
DKHQTHM

SEQ ID NO: 24118 - protein, 7 aa, synthetic construct
EYHEIHA

SEQ ID NO: 24119 - protein, 7 aa, synthetic construct
SLQSAYS

SEQ ID NO: 24120 - protein, 7 aa, synthetic construct
DEKRQQH

SEQ ID NO: 24121 - protein, 7 aa, synthetic construct
MRDPTGD

SEQ ID NO: 24122 - protein, 7 aa, synthetic construct
IAMRSEH

SEQ ID NO: 24123 - protein, 7 aa, synthetic construct
NWARENH

SEQ ID NO: 24124 - protein, 7 aa, synthetic construct
KTDFVEY

SEQ ID NO: 24125 - protein, 7 aa, synthetic construct
DSIPYRG

SEQ ID NO: 24126 - protein, 7 aa, synthetic construct
MQTQAWA

SEQ ID NO: 24127 - protein, 7 aa, synthetic construct
DVSMQHH

SEQ ID NO: 24128 - protein, 7 aa, synthetic construct
KTVLNKD

SEQ ID NO: 24129 - protein, 7 aa, synthetic construct
PHRGIGV

SEQ ID NO: 24130 - protein, 7 aa, synthetic construct
VAKHAMF

SEQ ID NO: 24131 - protein, 7 aa, synthetic construct
TSESRLT

SEQ ID NO: 24132 - protein, 7 aa, synthetic construct
GDRTAMK

SEQ ID NO: 24133 - protein, 7 aa, synthetic construct
NVLGTDS

SEQ ID NO: 24134 - protein, 7 aa, synthetic construct
AIQNHVK

SEQ ID NO: 24135 - protein, 7 aa, synthetic construct
IEHHRPE

SEQ ID NO: 24136 - protein, 7 aa, synthetic construct
ISPMMGS

SEQ ID NO: 24137 - protein, 7 aa, synthetic construct
DFRKPTL

SEQ ID NO: 24138 - protein, 7 aa, synthetic construct
VPTDSKI

SEQ ID NO: 24139 - protein, 7 aa, synthetic construct
WENQGMG

SEQ ID NO: 24140 - protein, 7 aa, synthetic construct
PGQPQNW

SEQ ID NO: 24141 - protein, 7 aa, synthetic construct
LKPDMEM

SEQ ID NO: 24142 - protein, 7 aa, synthetic construct
GWGKVTS

SEQ ID NO: 24143 - protein, 7 aa, synthetic construct
TTMKPSP

SEQ ID NO: 24144 - protein, 7 aa, synthetic construct
ADKGALE

SEQ ID NO: 24145 - protein, 7 aa, synthetic construct
FYSPGSE

SEQ ID NO: 24146 - protein, 7 aa, synthetic construct
KYEKNYG

SEQ ID NO: 24147 - protein, 7 aa, synthetic construct
SQNEGVF

SEQ ID NO: 24148 - protein, 7 aa, synthetic construct
WANEPRS

SEQ ID NO: 24149 - protein, 7 aa, synthetic construct
FGQTGIV

SEQ ID NO: 24150 - protein, 7 aa, synthetic construct
QHYSDSV

SEQ ID NO: 24151 - protein, 7 aa, synthetic construct
NKREMEI

SEQ ID NO: 24152 - protein, 7 aa, synthetic construct
QMARHGS

SEQ ID NO: 24153 - protein, 7 aa, synthetic construct
ASHKYQP

SEQ ID NO: 24154 - protein, 7 aa, synthetic construct
VTSNHPT

SEQ ID NO: 24155 - protein, 7 aa, synthetic construct
QPLPGAQ

SEQ ID NO: 24156 - protein, 7 aa, synthetic construct
KFNMYEA

SEQ ID NO: 24157 - protein, 7 aa, synthetic construct
TGMANMR

SEQ ID NO: 24158 - protein, 7 aa, synthetic construct
GQTENRS

SEQ ID NO: 24159 - protein, 7 aa, synthetic construct
GPDHWAS

SEQ ID NO: 24160 - protein, 7 aa, synthetic construct
MSNADAH

SEQ ID NO: 24161 - protein, 7 aa, synthetic construct
IGNMTGP

SEQ ID NO: 24162 - protein, 7 aa, synthetic construct
EEPKFLG

SEQ ID NO: 24163 - protein, 7 aa, synthetic construct
IGRPDFT

SEQ ID NO: 24164 - protein, 7 aa, synthetic construct
YYKNQNV

SEQ ID NO: 24165 - protein, 7 aa, synthetic construct
NLTQRVA

SEQ ID NO: 24166 - protein, 7 aa, synthetic construct
LKDLMKQ

SEQ ID NO: 24167 - protein, 7 aa, synthetic construct
YLSREIS

SEQ ID NO: 24168 - protein, 7 aa, synthetic construct
SSNDVKN

SEQ ID NO: 24169 - protein, 7 aa, synthetic construct
REFKPHA

SEQ ID NO: 24170 - protein, 7 aa, synthetic construct
MDSNQGI

SEQ ID NO: 24171 - protein, 7 aa, synthetic construct
IDHTTKG

SEQ ID NO: 24172 - protein, 7 aa, synthetic construct
QKQYNII

SEQ ID NO: 24173 - protein, 7 aa, synthetic construct
QLNQMAA

SEQ ID NO: 24174 - protein, 7 aa, synthetic construct
DHVRTMT

SEQ ID NO: 24175 - protein, 7 aa, synthetic construct
TSPSNGN

SEQ ID NO: 24176 - protein, 7 aa, synthetic construct
DSHHSTH

SEQ ID NO: 24177 - protein, 7 aa, synthetic construct
HVPTRSI

SEQ ID NO: 24178 - protein, 7 aa, synthetic construct
DGHPAPI

SEQ ID NO: 24179 - protein, 7 aa, synthetic construct
FTLDMER

SEQ ID NO: 24180 - protein, 7 aa, synthetic construct
RIHTPIT

SEQ ID NO: 24181 - protein, 7 aa, synthetic construct
HHHFQDS

SEQ ID NO: 24182 - protein, 7 aa, synthetic construct
KLRDSTI

SEQ ID NO: 24183 - protein, 7 aa, synthetic construct
YGSTMYM

SEQ ID NO: 24184 - protein, 7 aa, synthetic construct
APTKEQK

SEQ ID NO: 24185 - protein, 7 aa, synthetic construct
MSGPVNF

SEQ ID NO: 24186 - protein, 7 aa, synthetic construct
VREDQSY

SEQ ID NO: 24187 - protein, 7 aa, synthetic construct
ALHHDIS

SEQ ID NO: 24188 - protein, 7 aa, synthetic construct
SLYQAPQ

SEQ ID NO: 24189 - protein, 7 aa, synthetic construct
PHDGPGH

SEQ ID NO: 24190 - protein, 7 aa, synthetic construct
FKIMNQP

SEQ ID NO: 24191 - protein, 7 aa, synthetic construct
IVGYERH

SEQ ID NO: 24192 - protein, 7 aa, synthetic construct
NMHNHDS

SEQ ID NO: 24193 - protein, 7 aa, synthetic construct
IGTHEDV

SEQ ID NO: 24194 - protein, 7 aa, synthetic construct
WNSEEYI

SEQ ID NO: 24195 - protein, 7 aa, synthetic construct
NGEKKMD

SEQ ID NO: 24196 - protein, 7 aa, synthetic construct
WEMKVGP

SEQ ID NO: 24197 - protein, 7 aa, synthetic construct
DLGPTKP

SEQ ID NO: 24198 - protein, 7 aa, synthetic construct
KGHAMDH

SEQ ID NO: 24199 - protein, 7 aa, synthetic construct
QLMPRDP

SEQ ID NO: 24200 - protein, 7 aa, synthetic construct
ARIAAES

SEQ ID NO: 24201 - protein, 7 aa, synthetic construct
QIHVNRN

SEQ ID NO: 24202 - protein, 7 aa, synthetic construct
NVERGPQ

SEQ ID NO: 24203 - protein, 7 aa, synthetic construct
AAKVLPH

SEQ ID NO: 24204 - protein, 7 aa, synthetic construct
QQDALRA

SEQ ID NO: 24205 - protein, 7 aa, synthetic construct
MPYPRDN

SEQ ID NO: 24206 - protein, 7 aa, synthetic construct
KFHQTPT

SEQ ID NO: 24207 - protein, 7 aa, synthetic construct
DLWGKSS

SEQ ID NO: 24208 - protein, 7 aa, synthetic construct
MHPQDPI

SEQ ID NO: 24209 - protein, 7 aa, synthetic construct
QNGGMLM

SEQ ID NO: 24210 - protein, 7 aa, synthetic construct
PVRSPQY

SEQ ID NO: 24211 - protein, 7 aa, synthetic construct
PAADVNR

SEQ ID NO: 24212 - protein, 7 aa, synthetic construct
IGHLRKD

SEQ ID NO: 24213 - protein, 7 aa, synthetic construct
MYNTAPP

SEQ ID NO: 24214 - protein, 7 aa, synthetic construct
SAENHQS

SEQ ID NO: 24215 - protein, 7 aa, synthetic construct
SAMRGGV

SEQ ID NO: 24216 - protein, 7 aa, synthetic construct
GGKDFAE

SEQ ID NO: 24217 - protein, 7 aa, synthetic construct
RQRDGVE

SEQ ID NO: 24218 - protein, 7 aa, synthetic construct
PPGHVTD

SEQ ID NO: 24219 - protein, 7 aa, synthetic construct
NNIRSIH

SEQ ID NO: 24220 - protein, 7 aa, synthetic construct
PDEAHQR

SEQ ID NO: 24221 - protein, 7 aa, synthetic construct
FHDKTET

SEQ ID NO: 24222 - protein, 7 aa, synthetic construct
EARNINN

SEQ ID NO: 24223 - protein, 7 aa, synthetic construct
PKTVHHL

SEQ ID NO: 24224 - protein, 7 aa, synthetic construct
THYSHEL

SEQ ID NO: 24225 - protein, 7 aa, synthetic construct
MMDTTKI

SEQ ID NO: 24226 - protein, 7 aa, synthetic construct
KSNHGDD

SEQ ID NO: 24227 - protein, 7 aa, synthetic construct
WSAPTQQ

SEQ ID NO: 24228 - protein, 7 aa, synthetic construct
QYEEKRE

SEQ ID NO: 24229 - protein, 7 aa, synthetic construct
VHAGSMT

SEQ ID NO: 24230 - protein, 7 aa, synthetic construct
DPLIASK

SEQ ID NO: 24231 - protein, 7 aa, synthetic construct
VGENGHH

SEQ ID NO: 24232 - protein, 7 aa, synthetic construct
DSQTHRS

SEQ ID NO: 24233 - protein, 7 aa, synthetic construct
PKKHDVA

SEQ ID NO: 24234 - protein, 7 aa, synthetic construct
GTNTEGV

SEQ ID NO: 24235 - protein, 7 aa, synthetic construct
RINQMHS

SEQ ID NO: 24236 - protein, 7 aa, synthetic construct
HPKPHPH

SEQ ID NO: 24237 - protein, 7 aa, synthetic construct
QNLKDGV

SEQ ID NO: 24238 - protein, 7 aa, synthetic construct
DPPTFTG

SEQ ID NO: 24239 - protein, 7 aa, synthetic construct
IEHVQAF

SEQ ID NO: 24240 - protein, 7 aa, synthetic construct
AKNAYGV

SEQ ID NO: 24241 - protein, 7 aa, synthetic construct
KVNEHKP

SEQ ID NO: 24242 - protein, 7 aa, synthetic construct
FNRLNGN

SEQ ID NO: 24243 - protein, 7 aa, synthetic construct
DFHGLKH

SEQ ID NO: 24244 - protein, 7 aa, synthetic construct
IPREQQV

SEQ ID NO: 24245 - protein, 7 aa, synthetic construct
FNRDNHE

SEQ ID NO: 24246 - protein, 7 aa, synthetic construct
LSNGYSV

SEQ ID NO: 24247 - protein, 7 aa, synthetic construct
VGKATGL

SEQ ID NO: 24248 - protein, 7 aa, synthetic construct
VFGPVKP

SEQ ID NO: 24249 - protein, 7 aa, synthetic construct
KPETKEL

SEQ ID NO: 24250 - protein, 7 aa, synthetic construct
MATDGGD

SEQ ID NO: 24251 - protein, 7 aa, synthetic construct
RSDYDVR

SEQ ID NO: 24252 - protein, 7 aa, synthetic construct
EHKDPRE

SEQ ID NO: 24253 - protein, 7 aa, synthetic construct
MYEQRKI

SEQ ID NO: 24254 - protein, 7 aa, synthetic construct
DWKREQP

SEQ ID NO: 24255 - protein, 7 aa, synthetic construct
REQFTDY

SEQ ID NO: 24256 - protein, 7 aa, synthetic construct
EPFQPMG

SEQ ID NO: 24257 - protein, 7 aa, synthetic construct
TNGREVL

SEQ ID NO: 24258 - protein, 7 aa, synthetic construct
VMGNSTR

SEQ ID NO: 24259 - protein, 7 aa, synthetic construct
TWRANQE

SEQ ID NO: 24260 - protein, 7 aa, synthetic construct
GQAPNVY

SEQ ID NO: 24261 - protein, 7 aa, synthetic construct
YNTRVES

SEQ ID NO: 24262 - protein, 7 aa, synthetic construct
GKYTMGN

SEQ ID NO: 24263 - protein, 7 aa, synthetic construct
VMRDIHK

SEQ ID NO: 24264 - protein, 7 aa, synthetic construct
QSQHSGY

SEQ ID NO: 24265 - protein, 7 aa, synthetic construct
RGMTPEL

SEQ ID NO: 24266 - protein, 7 aa, synthetic construct
KWEQMVE

SEQ ID NO: 24267 - protein, 7 aa, synthetic construct
QDKGHGK

SEQ ID NO: 24268 - protein, 7 aa, synthetic construct
KLEHMEM

SEQ ID NO: 24269 - protein, 7 aa, synthetic construct
PPHNNVI

SEQ ID NO: 24270 - protein, 7 aa, synthetic construct
KQVDRAY

SEQ ID NO: 24271 - protein, 7 aa, synthetic construct
YRSDNLI

SEQ ID NO: 24272 - protein, 7 aa, synthetic construct
FTNHHIG

SEQ ID NO: 24273 - protein, 7 aa, synthetic construct
FMRDHPE

SEQ ID NO: 24274 - protein, 7 aa, synthetic construct
NQNERRV

SEQ ID NO: 24275 - protein, 7 aa, synthetic construct
NMQHNQK

SEQ ID NO: 24276 - protein, 7 aa, synthetic construct
QAHQVIN

SEQ ID NO: 24277 - protein, 7 aa, synthetic construct
NSQVDHT

SEQ ID NO: 24278 - protein, 7 aa, synthetic construct
ATSQNAH

SEQ ID NO: 24279 - protein, 7 aa, synthetic construct
RMDGGSL

SEQ ID NO: 24280 - protein, 7 aa, synthetic construct
DASFDKK

SEQ ID NO: 24281 - protein, 7 aa, synthetic construct
DARPAMQ

SEQ ID NO: 24282 - protein, 7 aa, synthetic construct
WAKTGDA

SEQ ID NO: 24283 - protein, 7 aa, synthetic construct
YKQDQKQ

SEQ ID NO: 24284 - protein, 7 aa, synthetic construct
LNRDMSH

SEQ ID NO: 24285 - protein, 7 aa, synthetic construct
DLYDNSQ

SEQ ID NO: 24286 - protein, 7 aa, synthetic construct
QITNKDE

SEQ ID NO: 24287 - protein, 7 aa, synthetic construct
YVQIGGK

SEQ ID NO: 24288 - protein, 7 aa, synthetic construct
EVHDVAG

SEQ ID NO: 24289 - protein, 7 aa, synthetic construct
STPAERN

SEQ ID NO: 24290 - protein, 7 aa, synthetic construct
QIEGAGW

SEQ ID NO: 24291 - protein, 7 aa, synthetic construct
GRNPFPM

SEQ ID NO: 24292 - protein, 7 aa, synthetic construct
SYNGQRT

SEQ ID NO: 24293 - protein, 7 aa, synthetic construct
PGKEEGK

SEQ ID NO: 24294 - protein, 7 aa, synthetic construct
THSTYHP

SEQ ID NO: 24295 - protein, 7 aa, synthetic construct
QDGAARF

SEQ ID NO: 24296 - protein, 7 aa, synthetic construct
AHATAHH

SEQ ID NO: 24297 - protein, 7 aa, synthetic construct
NEGDSKY

SEQ ID NO: 24298 - protein, 7 aa, synthetic construct
WKHHQNV

SEQ ID NO: 24299 - protein, 7 aa, synthetic construct
HNVDHDG

SEQ ID NO: 24300 - protein, 7 aa, synthetic construct
NAFDSTP

SEQ ID NO: 24301 - protein, 7 aa, synthetic construct
DGKSLQG

SEQ ID NO: 24302 - protein, 7 aa, synthetic construct
AVENHSG

SEQ ID NO: 24303 - protein, 7 aa, synthetic construct
PMGVAFE

SEQ ID NO: 24304 - protein, 7 aa, synthetic construct
TMMPDKR

SEQ ID NO: 24305 - protein, 7 aa, synthetic construct
NGSFHAD

SEQ ID NO: 24306 - protein, 7 aa, synthetic construct
QQKIGMV

SEQ ID NO: 24307 - protein, 7 aa, synthetic construct
YPSVMHN

SEQ ID NO: 24308 - protein, 7 aa, synthetic construct
TMHQGTL

SEQ ID NO: 24309 - protein, 7 aa, synthetic construct
RSGDLEY

SEQ ID NO: 24310 - protein, 7 aa, synthetic construct
RHEPGST

SEQ ID NO: 24311 - protein, 7 aa, synthetic construct
GNSILAS

SEQ ID NO: 24312 - protein, 7 aa, synthetic construct
YYQVNGS

SEQ ID NO: 24313 - protein, 7 aa, synthetic construct
PVKSHSN

SEQ ID NO: 24314 - protein, 7 aa, synthetic construct
HRMNGFV

SEQ ID NO: 24315 - protein, 7 aa, synthetic construct
GSAGFHS

SEQ ID NO: 24316 - protein, 7 aa, synthetic construct
MANDHTT

SEQ ID NO: 24317 - protein, 7 aa, synthetic construct
FQGTDYE

SEQ ID NO: 24318 - protein, 7 aa, synthetic construct
NWTGHAP

SEQ ID NO: 24319 - protein, 7 aa, synthetic construct
LWTNKDA

SEQ ID NO: 24320 - protein, 7 aa, synthetic construct
QDGRIET

SEQ ID NO: 24321 - protein, 7 aa, synthetic construct
LGTNNGV

SEQ ID NO: 24322 - protein, 7 aa, synthetic construct
SQTPLRE

SEQ ID NO: 24323 - protein, 7 aa, synthetic construct
NTPQLHG

SEQ ID NO: 24324 - protein, 7 aa, synthetic construct
GSGMNQF

SEQ ID NO: 24325 - protein, 7 aa, synthetic construct
SHINKQY

SEQ ID NO: 24326 - protein, 7 aa, synthetic construct
WKTMPND

SEQ ID NO: 24327 - protein, 7 aa, synthetic construct
SNYQVGE

SEQ ID NO: 24328 - protein, 7 aa, synthetic construct
DPFHRDF

SEQ ID NO: 24329 - protein, 7 aa, synthetic construct
LKISGKE

SEQ ID NO: 24330 - protein, 7 aa, synthetic construct
HKITSVP

SEQ ID NO: 24331 - protein, 7 aa, synthetic construct
ISMRSGH

SEQ ID NO: 24332 - protein, 7 aa, synthetic construct
MDPQHAV

SEQ ID NO: 24333 - protein, 7 aa, synthetic construct
YPPMQLN

SEQ ID NO: 24334 - protein, 7 aa, synthetic construct
YNVRHQE

SEQ ID NO: 24335 - protein, 7 aa, synthetic construct
TTPGMGY

SEQ ID NO: 24336 - protein, 7 aa, synthetic construct
HINSKGP

SEQ ID NO: 24337 - protein, 7 aa, synthetic construct
GVEGRNQ

SEQ ID NO: 24338 - protein, 7 aa, synthetic construct
WQAANVS

SEQ ID NO: 24339 - protein, 7 aa, synthetic construct
YQSSYHV

SEQ ID NO: 24340 - protein, 7 aa, synthetic construct
NVGVVTA

SEQ ID NO: 24341 - protein, 7 aa, synthetic construct
PAKNTRD

SEQ ID NO: 24342 - protein, 7 aa, synthetic construct
TWTPGQE

SEQ ID NO: 24343 - protein, 7 aa, synthetic construct
FMERPPN

SEQ ID NO: 24344 - protein, 7 aa, synthetic construct
QGIKWES

SEQ ID NO: 24345 - protein, 7 aa, synthetic construct
YSEKRQH

SEQ ID NO: 24346 - protein, 7 aa, synthetic construct
FIRNVNE

SEQ ID NO: 24347 - protein, 7 aa, synthetic construct
FGDNGKF

SEQ ID NO: 24348 - protein, 7 aa, synthetic construct
NKAQNLN

SEQ ID NO: 24349 - protein, 7 aa, synthetic construct
PSPQMIP

SEQ ID NO: 24350 - protein, 7 aa, synthetic construct
TKSLMTG

SEQ ID NO: 24351 - protein, 7 aa, synthetic construct
IPNDTTG

SEQ ID NO: 24352 - protein, 7 aa, synthetic construct
KGSFMNQ

SEQ ID NO: 24353 - protein, 7 aa, synthetic construct
GRHLHSP

SEQ ID NO: 24354 - protein, 7 aa, synthetic construct
SGRDNEA

SEQ ID NO: 24355 - protein, 7 aa, synthetic construct
NHSIHGS

SEQ ID NO: 24356 - protein, 7 aa, synthetic construct
KHSNSEW

SEQ ID NO: 24357 - protein, 7 aa, synthetic construct
IAPTMQA

SEQ ID NO: 24358 - protein, 7 aa, synthetic construct
FVDYKDA

SEQ ID NO: 24359 - protein, 7 aa, synthetic construct
DKITKWN

SEQ ID NO: 24360 - protein, 7 aa, synthetic construct
IHKIFPP

SEQ ID NO: 24361 - protein, 7 aa, synthetic construct
QPHVLID

SEQ ID NO: 24362 - protein, 7 aa, synthetic construct
DGLKGTS

SEQ ID NO: 24363 - protein, 7 aa, synthetic construct
DRNIRQT

SEQ ID NO: 24364 - protein, 7 aa, synthetic construct
KINAVSI

SEQ ID NO: 24365 - protein, 7 aa, synthetic construct
AQAITFK

SEQ ID NO: 24366 - protein, 7 aa, synthetic construct
VRPVNFS

SEQ ID NO: 24367 - protein, 7 aa, synthetic construct
MRGDGDY

SEQ ID NO: 24368 - protein, 7 aa, synthetic construct
FNNPVLI

SEQ ID NO: 24369 - protein, 7 aa, synthetic construct
MTHQQHE

SEQ ID NO: 24370 - protein, 7 aa, synthetic construct
YHKHEQI

SEQ ID NO: 24371 - protein, 7 aa, synthetic construct
YDVSKPT

SEQ ID NO: 24372 - protein, 7 aa, synthetic construct
ETQSAKT

SEQ ID NO: 24373 - protein, 7 aa, synthetic construct
KTQVSHT

SEQ ID NO: 24374 - protein, 7 aa, synthetic construct
YFRSQSA

SEQ ID NO: 24375 - protein, 7 aa, synthetic construct
ADEGSYM

SEQ ID NO: 24376 - protein, 7 aa, synthetic construct
QEGKYYI

SEQ ID NO: 24377 - protein, 7 aa, synthetic construct
QILTGVG

SEQ ID NO: 24378 - protein, 7 aa, synthetic construct
NYQGPID

SEQ ID NO: 24379 - protein, 7 aa, synthetic construct
DTGHVSL

SEQ ID NO: 24380 - protein, 7 aa, synthetic construct
FPSYQES

SEQ ID NO: 24381 - protein, 7 aa, synthetic construct
DKLNGAL

SEQ ID NO: 24382 - protein, 7 aa, synthetic construct
SINTMTK

SEQ ID NO: 24383 - protein, 7 aa, synthetic construct
QASYHGR

SEQ ID NO: 24384 - protein, 7 aa, synthetic construct
ITYRQQA

SEQ ID NO: 24385 - protein, 7 aa, synthetic construct
LGNEQAH

SEQ ID NO: 24386 - protein, 7 aa, synthetic construct
SHEGNNF

SEQ ID NO: 24387 - protein, 7 aa, synthetic construct
LQPRVGE

SEQ ID NO: 24388 - protein, 7 aa, synthetic construct
FPSIQHP

SEQ ID NO: 24389 - protein, 7 aa, synthetic construct
YHQIPKQ

SEQ ID NO: 24390 - protein, 7 aa, synthetic construct
MLKQQIT

SEQ ID NO: 24391 - protein, 7 aa, synthetic construct
ASQAMDG

SEQ ID NO: 24392 - protein, 7 aa, synthetic construct
VLTDRKE

SEQ ID NO: 24393 - protein, 7 aa, synthetic construct
LHFKESD

SEQ ID NO: 24394 - protein, 7 aa, synthetic construct
ALGMSMG

SEQ ID NO: 24395 - protein, 7 aa, synthetic construct
QKNDYLR

SEQ ID NO: 24396 - protein, 7 aa, synthetic construct
KTQEAAS

SEQ ID NO: 24397 - protein, 7 aa, synthetic construct
RNFEQAP

SEQ ID NO: 24398 - protein, 7 aa, synthetic construct
EDTSRPR

SEQ ID NO: 24399 - protein, 7 aa, synthetic construct
VNLAGLE

SEQ ID NO: 24400 - protein, 7 aa, synthetic construct
DIKNPDY

SEQ ID NO: 24401 - protein, 7 aa, synthetic construct
ELRGEET

SEQ ID NO: 24402 - protein, 7 aa, synthetic construct
DFNVPTG

SEQ ID NO: 24403 - protein, 7 aa, synthetic construct
VHKQEAA

SEQ ID NO: 24404 - protein, 7 aa, synthetic construct
MRPGFHP

SEQ ID NO: 24405 - protein, 7 aa, synthetic construct
NEQSMQA

SEQ ID NO: 24406 - protein, 7 aa, synthetic construct
SFATEGS

SEQ ID NO: 24407 - protein, 7 aa, synthetic construct
PNKEARI

SEQ ID NO: 24408 - protein, 7 aa, synthetic construct
MRYDGMK

SEQ ID NO: 24409 - protein, 7 aa, synthetic construct
EANKVGT

SEQ ID NO: 24410 - protein, 7 aa, synthetic construct
NGRDFGD

SEQ ID NO: 24411 - protein, 7 aa, synthetic construct
KSHPDTE

SEQ ID NO: 24412 - protein, 7 aa, synthetic construct
SDSMQKM

SEQ ID NO: 24413 - protein, 7 aa, synthetic construct
SANSTEM

SEQ ID NO: 24414 - protein, 7 aa, synthetic construct
EQRIGQW

SEQ ID NO: 24415 - protein, 7 aa, synthetic construct
YAYHGPE

SEQ ID NO: 24416 - protein, 7 aa, synthetic construct
PLQTGVI

SEQ ID NO: 24417 - protein, 7 aa, synthetic construct
THIHGGS

SEQ ID NO: 24418 - protein, 7 aa, synthetic construct
QVDYTEM

SEQ ID NO: 24419 - protein, 7 aa, synthetic construct
QHHMPPA

SEQ ID NO: 24420 - protein, 7 aa, synthetic construct
DNWGESE

SEQ ID NO: 24421 - protein, 7 aa, synthetic construct
VQWGGNN

SEQ ID NO: 24422 - protein, 7 aa, synthetic construct
QTLGGDP

SEQ ID NO: 24423 - protein, 7 aa, synthetic construct
DPIHSEY

SEQ ID NO: 24424 - protein, 7 aa, synthetic construct
RSGSPEI

SEQ ID NO: 24425 - protein, 7 aa, synthetic construct
QMAQVNE

SEQ ID NO: 24426 - protein, 7 aa, synthetic construct
YEQPKKE

SEQ ID NO: 24427 - protein, 7 aa, synthetic construct
QSSLKAW

SEQ ID NO: 24428 - protein, 7 aa, synthetic construct
TPKMRDP

SEQ ID NO: 24429 - protein, 7 aa, synthetic construct
DRNPHIF

SEQ ID NO: 24430 - protein, 7 aa, synthetic construct
PFTHERG

SEQ ID NO: 24431 - protein, 7 aa, synthetic construct
LKFQNIP

SEQ ID NO: 24432 - protein, 7 aa, synthetic construct
GSGEHKH

SEQ ID NO: 24433 - protein, 7 aa, synthetic construct
WVDATKP

SEQ ID NO: 24434 - protein, 7 aa, synthetic construct
QGNSSNP

SEQ ID NO: 24435 - protein, 7 aa, synthetic construct
GKHSIQA

SEQ ID NO: 24436 - protein, 7 aa, synthetic construct
TRDSGVH

SEQ ID NO: 24437 - protein, 7 aa, synthetic construct
LTMDFEH

SEQ ID NO: 24438 - protein, 7 aa, synthetic construct
SSLNAFK

SEQ ID NO: 24439 - protein, 7 aa, synthetic construct
HYAVTQD

SEQ ID NO: 24440 - protein, 7 aa, synthetic construct
NPEYHVV

SEQ ID NO: 24441 - protein, 7 aa, synthetic construct
ITPTHPA

SEQ ID NO: 24442 - protein, 7 aa, synthetic construct
GRDPPLD

SEQ ID NO: 24443 - protein, 7 aa, synthetic construct
ETLIGEA

SEQ ID NO: 24444 - protein, 7 aa, synthetic construct
HGSVYPI

SEQ ID NO: 24445 - protein, 7 aa, synthetic construct
YESFKNI

SEQ ID NO: 24446 - protein, 7 aa, synthetic construct
TAQFNVL

SEQ ID NO: 24447 - protein, 7 aa, synthetic construct
APSELHY

SEQ ID NO: 24448 - protein, 7 aa, synthetic construct
QYQVKMS

SEQ ID NO: 24449 - protein, 7 aa, synthetic construct
SVQSSAP

SEQ ID NO: 24450 - protein, 7 aa, synthetic construct
VIDKPFK

SEQ ID NO: 24451 - protein, 7 aa, synthetic construct
TGNHHSE

SEQ ID NO: 24452 - protein, 7 aa, synthetic construct
WTIGDQV

SEQ ID NO: 24453 - protein, 7 aa, synthetic construct
QLQEKGQ

SEQ ID NO: 24454 - protein, 7 aa, synthetic construct
SQQLMSP

SEQ ID NO: 24455 - protein, 7 aa, synthetic construct
RQMTIEF

SEQ ID NO: 24456 - protein, 7 aa, synthetic construct
FKNETMP

SEQ ID NO: 24457 - protein, 7 aa, synthetic construct
WNKTDTT

SEQ ID NO: 24458 - protein, 7 aa, synthetic construct
VENSIVI

SEQ ID NO: 24459 - protein, 7 aa, synthetic construct
GVLSNEH

SEQ ID NO: 24460 - protein, 7 aa, synthetic construct
GSQKFKE

SEQ ID NO: 24461 - protein, 7 aa, synthetic construct
GNNHMML

SEQ ID NO: 24462 - protein, 7 aa, synthetic construct
INRISMG

SEQ ID NO: 24463 - protein, 7 aa, synthetic construct
GISNTGH

SEQ ID NO: 24464 - protein, 7 aa, synthetic construct
HPNRHLS

SEQ ID NO: 24465 - protein, 7 aa, synthetic construct
VLESKQV

SEQ ID NO: 24466 - protein, 7 aa, synthetic construct
YSPLGSE

SEQ ID NO: 24467 - protein, 7 aa, synthetic construct
HGVAFMG

SEQ ID NO: 24468 - protein, 7 aa, synthetic construct
IPKYGNV

SEQ ID NO: 24469 - protein, 7 aa, synthetic construct
PRPDEIR

SEQ ID NO: 24470 - protein, 7 aa, synthetic construct
DEYPKQG

SEQ ID NO: 24471 - protein, 7 aa, synthetic construct
YNASLSY

SEQ ID NO: 24472 - protein, 7 aa, synthetic construct
KQIGHNF

SEQ ID NO: 24473 - protein, 7 aa, synthetic construct
FLESMKN

SEQ ID NO: 24474 - protein, 7 aa, synthetic construct
YKVIDNV

SEQ ID NO: 24475 - protein, 7 aa, synthetic construct
SSVMKLA

SEQ ID NO: 24476 - protein, 7 aa, synthetic construct
YWDKHTV

SEQ ID NO: 24477 - protein, 7 aa, synthetic construct
QSASTLE

SEQ ID NO: 24478 - protein, 7 aa, synthetic construct
GHAYPIS

SEQ ID NO: 24479 - protein, 7 aa, synthetic construct
NTQENKF

SEQ ID NO: 24480 - protein, 7 aa, synthetic construct
NDRLRDN

SEQ ID NO: 24481 - protein, 7 aa, synthetic construct
QNIHTMR

SEQ ID NO: 24482 - protein, 7 aa, synthetic construct
MMTRAMQ

SEQ ID NO: 24483 - protein, 7 aa, synthetic construct
VTVYSKT

SEQ ID NO: 24484 - protein, 7 aa, synthetic construct
MQKQFHS

SEQ ID NO: 24485 - protein, 7 aa, synthetic construct
RPREMSE

SEQ ID NO: 24486 - protein, 7 aa, synthetic construct
PYEQRSH

SEQ ID NO: 24487 - protein, 7 aa, synthetic construct
EYTTQHP

SEQ ID NO: 24488 - protein, 7 aa, synthetic construct
HAIKRLE

SEQ ID NO: 24489 - protein, 7 aa, synthetic construct
HLGTEKT

SEQ ID NO: 24490 - protein, 7 aa, synthetic construct
LRHQING

SEQ ID NO: 24491 - protein, 7 aa, synthetic construct
QMTNDKP

SEQ ID NO: 24492 - protein, 7 aa, synthetic construct
SVRLDAS

SEQ ID NO: 24493 - protein, 7 aa, synthetic construct
PPENKRE

SEQ ID NO: 24494 - protein, 7 aa, synthetic construct
KMGPLPH

SEQ ID NO: 24495 - protein, 7 aa, synthetic construct
MNWDKTN

SEQ ID NO: 24496 - protein, 7 aa, synthetic construct
VQTNDHR

SEQ ID NO: 24497 - protein, 7 aa, synthetic construct
PHKDEIT

SEQ ID NO: 24498 - protein, 7 aa, synthetic construct
RAAEDVR

SEQ ID NO: 24499 - protein, 7 aa, synthetic construct
NMEAASR

SEQ ID NO: 24500 - protein, 7 aa, synthetic construct
MSYLNDK

SEQ ID NO: 24501 - protein, 7 aa, synthetic construct
PHAQEPK

SEQ ID NO: 24502 - protein, 7 aa, synthetic construct
HGYAQDT

SEQ ID NO: 24503 - protein, 7 aa, synthetic construct
EFPNREL

SEQ ID NO: 24504 - protein, 7 aa, synthetic construct
EKDAARA

SEQ ID NO: 24505 - protein, 7 aa, synthetic construct
YRNVINP

SEQ ID NO: 24506 - protein, 7 aa, synthetic construct
MYGAHSI

SEQ ID NO: 24507 - protein, 7 aa, synthetic construct
RIAGPDH

SEQ ID NO: 24508 - protein, 7 aa, synthetic construct
ATSVNTN

SEQ ID NO: 24509 - protein, 7 aa, synthetic construct
YKETQNW

SEQ ID NO: 24510 - protein, 7 aa, synthetic construct
VKVITDK

SEQ ID NO: 24511 - protein, 7 aa, synthetic construct
WVTRETV

SEQ ID NO: 24512 - protein, 7 aa, synthetic construct
LGLRDWE

SEQ ID NO: 24513 - protein, 7 aa, synthetic construct
DQGWNEP

SEQ ID NO: 24514 - protein, 7 aa, synthetic construct
WGDSFAK

SEQ ID NO: 24515 - protein, 7 aa, synthetic construct
EYRSNLA

SEQ ID NO: 24516 - protein, 7 aa, synthetic construct
PGPRESG

SEQ ID NO: 24517 - protein, 7 aa, synthetic construct
DKGPLIM

SEQ ID NO: 24518 - protein, 7 aa, synthetic construct
GPVAVMS

SEQ ID NO: 24519 - protein, 7 aa, synthetic construct
ITHQSQN

SEQ ID NO: 24520 - protein, 7 aa, synthetic construct
DKQMILS

SEQ ID NO: 24521 - protein, 7 aa, synthetic construct
RNTPHEE

SEQ ID NO: 24522 - protein, 7 aa, synthetic construct
NDHQLHF

SEQ ID NO: 24523 - protein, 7 aa, synthetic construct
QLDKHTN

SEQ ID NO: 24524 - protein, 7 aa, synthetic construct
FKNGAEA

SEQ ID NO: 24525 - protein, 7 aa, synthetic construct
LKNLDIP

SEQ ID NO: 24526 - protein, 7 aa, synthetic construct
ALEVSKT

SEQ ID NO: 24527 - protein, 7 aa, synthetic construct
RLVIPDF

SEQ ID NO: 24528 - protein, 7 aa, synthetic construct
FRNGWKD

SEQ ID NO: 24529 - protein, 7 aa, synthetic construct
SHTGLYG

SEQ ID NO: 24530 - protein, 7 aa, synthetic construct
SGITGMR

SEQ ID NO: 24531 - protein, 7 aa, synthetic construct
VDPYEME

SEQ ID NO: 24532 - protein, 7 aa, synthetic construct
SMHTPVI

SEQ ID NO: 24533 - protein, 7 aa, synthetic construct
MIKPPQM

SEQ ID NO: 24534 - protein, 7 aa, synthetic construct
RSIHDDT

SEQ ID NO: 24535 - protein, 7 aa, synthetic construct
PAFVTRE

SEQ ID NO: 24536 - protein, 7 aa, synthetic construct
PTIDHPG

SEQ ID NO: 24537 - protein, 7 aa, synthetic construct
PDTARKD

SEQ ID NO: 24538 - protein, 7 aa, synthetic construct
MNVSHSH

SEQ ID NO: 24539 - protein, 7 aa, synthetic construct
ILVHEQE

SEQ ID NO: 24540 - protein, 7 aa, synthetic construct
INLQTSL

SEQ ID NO: 24541 - protein, 7 aa, synthetic construct
RNIAHQN

SEQ ID NO: 24542 - protein, 7 aa, synthetic construct
SFKAILA

SEQ ID NO: 24543 - protein, 7 aa, synthetic construct
MNSTDMR

SEQ ID NO: 24544 - protein, 7 aa, synthetic construct
GRATLGH

SEQ ID NO: 24545 - protein, 7 aa, synthetic construct
KHHVQVQ

SEQ ID NO: 24546 - protein, 7 aa, synthetic construct
GPSDRLD

SEQ ID NO: 24547 - protein, 7 aa, synthetic construct
LSMMHGE

SEQ ID NO: 24548 - protein, 7 aa, synthetic construct
VKYPDTF

SEQ ID NO: 24549 - protein, 7 aa, synthetic construct
DKASAGV

SEQ ID NO: 24550 - protein, 7 aa, synthetic construct
QKKELAD

SEQ ID NO: 24551 - protein, 7 aa, synthetic construct
MNMHYKS

SEQ ID NO: 24552 - protein, 7 aa, synthetic construct
THETAHT

SEQ ID NO: 24553 - protein, 7 aa, synthetic construct
SLGLQGT

SEQ ID NO: 24554 - protein, 7 aa, synthetic construct
QATQIPR

SEQ ID NO: 24555 - protein, 7 aa, synthetic construct
SNRNGIW

SEQ ID NO: 24556 - protein, 7 aa, synthetic construct
DTRMVLM

SEQ ID NO: 24557 - protein, 7 aa, synthetic construct
HVQSSVA

SEQ ID NO: 24558 - protein, 7 aa, synthetic construct
HDKRTLH

SEQ ID NO: 24559 - protein, 7 aa, synthetic construct
HKDGTST

SEQ ID NO: 24560 - protein, 7 aa, synthetic construct
VMGIRNY

SEQ ID NO: 24561 - protein, 7 aa, synthetic construct
LGFSAID

SEQ ID NO: 24562 - protein, 7 aa, synthetic construct
PHTGEAF

SEQ ID NO: 24563 - protein, 7 aa, synthetic construct
QKIDLAL

SEQ ID NO: 24564 - protein, 7 aa, synthetic construct
AMTTYAK

SEQ ID NO: 24565 - protein, 7 aa, synthetic construct
MKPGDFS

SEQ ID NO: 24566 - protein, 7 aa, synthetic construct
DKSMHMH

SEQ ID NO: 24567 - protein, 7 aa, synthetic construct
RPLMERG

SEQ ID NO: 24568 - protein, 7 aa, synthetic construct
FAPPTQS

SEQ ID NO: 24569 - protein, 7 aa, synthetic construct
KAVVEEW

SEQ ID NO: 24570 - protein, 7 aa, synthetic construct
NGTATMY

SEQ ID NO: 24571 - protein, 7 aa, synthetic construct
IGEHMYK

SEQ ID NO: 24572 - protein, 7 aa, synthetic construct
MSSAAFT

SEQ ID NO: 24573 - protein, 7 aa, synthetic construct
EVHKQEY

SEQ ID NO: 24574 - protein, 7 aa, synthetic construct
APDQTTY

SEQ ID NO: 24575 - protein, 7 aa, synthetic construct
GVASPLH

SEQ ID NO: 24576 - protein, 7 aa, synthetic construct
TFASHTD

SEQ ID NO: 24577 - protein, 7 aa, synthetic construct
YAETANR

SEQ ID NO: 24578 - protein, 7 aa, synthetic construct
NINRTFD

SEQ ID NO: 24579 - protein, 7 aa, synthetic construct
LGKLNDK

SEQ ID NO: 24580 - protein, 7 aa, synthetic construct
VFTSEAG

SEQ ID NO: 24581 - protein, 7 aa, synthetic construct
AEYPGQR

SEQ ID NO: 24582 - protein, 7 aa, synthetic construct
PTQHDNT

SEQ ID NO: 24583 - protein, 7 aa, synthetic construct
EPKREME

SEQ ID NO: 24584 - protein, 7 aa, synthetic construct
QNQAHYL

SEQ ID NO: 24585 - protein, 7 aa, synthetic construct
LIGRYDK

SEQ ID NO: 24586 - protein, 7 aa, synthetic construct
RFAKIPE

SEQ ID NO: 24587 - protein, 7 aa, synthetic construct
WKLHSDE

SEQ ID NO: 24588 - protein, 7 aa, synthetic construct
SVDINKG

SEQ ID NO: 24589 - protein, 7 aa, synthetic construct
NKKYGEG

SEQ ID NO: 24590 - protein, 7 aa, synthetic construct
KPPHHIY

SEQ ID NO: 24591 - protein, 7 aa, synthetic construct
IPIIKGA

SEQ ID NO: 24592 - protein, 7 aa, synthetic construct
MLESTTR

SEQ ID NO: 24593 - protein, 7 aa, synthetic construct
NMRMEDH

SEQ ID NO: 24594 - protein, 7 aa, synthetic construct
RRTTDII

SEQ ID NO: 24595 - protein, 7 aa, synthetic construct
IQVRPLG

SEQ ID NO: 24596 - protein, 7 aa, synthetic construct
FNSGPPY

SEQ ID NO: 24597 - protein, 7 aa, synthetic construct
WPDRAVI

SEQ ID NO: 24598 - protein, 7 aa, synthetic construct
IGEIRSH

SEQ ID NO: 24599 - protein, 7 aa, synthetic construct
GMTAAMT

SEQ ID NO: 24600 - protein, 7 aa, synthetic construct
HLEAMNA

SEQ ID NO: 24601 - protein, 7 aa, synthetic construct
FSHGLQA

SEQ ID NO: 24602 - protein, 7 aa, synthetic construct
IVPKNFN

SEQ ID NO: 24603 - protein, 7 aa, synthetic construct
DMLDGKG

SEQ ID NO: 24604 - protein, 7 aa, synthetic construct
PALDVDF

SEQ ID NO: 24605 - protein, 7 aa, synthetic construct
IENTNNI

SEQ ID NO: 24606 - protein, 7 aa, synthetic construct
IRTNPMF

SEQ ID NO: 24607 - protein, 7 aa, synthetic construct
SKNYSPM

SEQ ID NO: 24608 - protein, 7 aa, synthetic construct
RNGGFAT

SEQ ID NO: 24609 - protein, 7 aa, synthetic construct
QVSTVRE

SEQ ID NO: 24610 - protein, 7 aa, synthetic construct
INRTFDK

SEQ ID NO: 24611 - protein, 7 aa, synthetic construct
KQMPVGE

SEQ ID NO: 24612 - protein, 7 aa, synthetic construct
IKDQHNK

SEQ ID NO: 24613 - protein, 7 aa, synthetic construct
SPVWVHE

SEQ ID NO: 24614 - protein, 7 aa, synthetic construct
YDQRPAV

SEQ ID NO: 24615 - protein, 7 aa, synthetic construct
VNNHEPR

SEQ ID NO: 24616 - protein, 7 aa, synthetic construct
PNTPATS

SEQ ID NO: 24617 - protein, 7 aa, synthetic construct
RRDMMDT

SEQ ID NO: 24618 - protein, 7 aa, synthetic construct
NKNLDSA

SEQ ID NO: 24619 - protein, 7 aa, synthetic construct
NNMIWKD

SEQ ID NO: 24620 - protein, 7 aa, synthetic construct
RAGPLHE

SEQ ID NO: 24621 - protein, 7 aa, synthetic construct
KTPRFDP

SEQ ID NO: 24622 - protein, 7 aa, synthetic construct
QQITNYP

SEQ ID NO: 24623 - protein, 7 aa, synthetic construct
KHTHLSG

SEQ ID NO: 24624 - protein, 7 aa, synthetic construct
GYEHNNR

SEQ ID NO: 24625 - protein, 7 aa, synthetic construct
GNVNAEH

SEQ ID NO: 24626 - protein, 7 aa, synthetic construct
YLHQSEM

SEQ ID NO: 24627 - protein, 7 aa, synthetic construct
SEHNLGS

SEQ ID NO: 24628 - protein, 7 aa, synthetic construct
GQQVELH

SEQ ID NO: 24629 - protein, 7 aa, synthetic construct
IYSQNVP

SEQ ID NO: 24630 - protein, 7 aa, synthetic construct
DYRDMVS

SEQ ID NO: 24631 - protein, 7 aa, synthetic construct
KAADTNL

SEQ ID NO: 24632 - protein, 7 aa, synthetic construct
FEKRPLM

SEQ ID NO: 24633 - protein, 7 aa, synthetic construct
YLAKGNS

SEQ ID NO: 24634 - protein, 7 aa, synthetic construct
VVPYEHE

SEQ ID NO: 24635 - protein, 7 aa, synthetic construct
GVRGIDE

SEQ ID NO: 24636 - protein, 7 aa, synthetic construct
FDNKIHF

SEQ ID NO: 24637 - protein, 7 aa, synthetic construct
LQGHQNT

SEQ ID NO: 24638 - protein, 7 aa, synthetic construct
HGKNLDH

SEQ ID NO: 24639 - protein, 7 aa, synthetic construct
THSDETF

SEQ ID NO: 24640 - protein, 7 aa, synthetic construct
WTKKDDD

SEQ ID NO: 24641 - protein, 7 aa, synthetic construct
NYKPREM

SEQ ID NO: 24642 - protein, 7 aa, synthetic construct
DPPWRYD

SEQ ID NO: 24643 - protein, 7 aa, synthetic construct
QMQHFTH

SEQ ID NO: 24644 - protein, 7 aa, synthetic construct
FTTNSAM

SEQ ID NO: 24645 - protein, 7 aa, synthetic construct
VNQVDMV

SEQ ID NO: 24646 - protein, 7 aa, synthetic construct
GATLRQS

SEQ ID NO: 24647 - protein, 7 aa, synthetic construct
HAESHHA

SEQ ID NO: 24648 - protein, 7 aa, synthetic construct
PTTMQQK

SEQ ID NO: 24649 - protein, 7 aa, synthetic construct
DRQHDYD

SEQ ID NO: 24650 - protein, 7 aa, synthetic construct
IHNQDHV

SEQ ID NO: 24651 - protein, 7 aa, synthetic construct
KLAMGQA

SEQ ID NO: 24652 - protein, 7 aa, synthetic construct
TRLNEEL

SEQ ID NO: 24653 - protein, 7 aa, synthetic construct
STGYVTA

SEQ ID NO: 24654 - protein, 7 aa, synthetic construct
SNPDNHS

SEQ ID NO: 24655 - protein, 7 aa, synthetic construct
DTAMPKN

SEQ ID NO: 24656 - protein, 7 aa, synthetic construct
QDFHYVE

SEQ ID NO: 24657 - protein, 7 aa, synthetic construct
EKQAGFN

SEQ ID NO: 24658 - protein, 7 aa, synthetic construct
DTFDTKA

SEQ ID NO: 24659 - protein, 7 aa, synthetic construct
VDQAMAL

SEQ ID NO: 24660 - protein, 7 aa, synthetic construct
HMSAAMQ

SEQ ID NO: 24661 - protein, 7 aa, synthetic construct
SMDYAGS

SEQ ID NO: 24662 - protein, 7 aa, synthetic construct
SHHHYQD

SEQ ID NO: 24663 - protein, 7 aa, synthetic construct
IKEKSVV

SEQ ID NO: 24664 - protein, 7 aa, synthetic construct
EIQKHDV

SEQ ID NO: 24665 - protein, 7 aa, synthetic construct
APSKYTN

SEQ ID NO: 24666 - protein, 7 aa, synthetic construct
DYPEMKR

SEQ ID NO: 24667 - protein, 7 aa, synthetic construct
SMAAESR

SEQ ID NO: 24668 - protein, 7 aa, synthetic construct
DDNWGKA

SEQ ID NO: 24669 - protein, 7 aa, synthetic construct
DATSLRH

SEQ ID NO: 24670 - protein, 7 aa, synthetic construct
VMNSTDW

SEQ ID NO: 24671 - protein, 7 aa, synthetic construct
HYKDGHW

SEQ ID NO: 24672 - protein, 7 aa, synthetic construct
MTSSHAH

SEQ ID NO: 24673 - protein, 7 aa, synthetic construct
DDRWLDW

SEQ ID NO: 24674 - protein, 7 aa, synthetic construct
TQNQQHF

SEQ ID NO: 24675 - protein, 7 aa, synthetic construct
GYHFDRP

SEQ ID NO: 24676 - protein, 7 aa, synthetic construct
KPDIAMH

SEQ ID NO: 24677 - protein, 7 aa, synthetic construct
AHSANDG

SEQ ID NO: 24678 - protein, 7 aa, synthetic construct
QYQSEPV

SEQ ID NO: 24679 - protein, 7 aa, synthetic construct
HHYNMTD

SEQ ID NO: 24680 - protein, 7 aa, synthetic construct
SSRIHQA

SEQ ID NO: 24681 - protein, 7 aa, synthetic construct
AATQENK

SEQ ID NO: 24682 - protein, 7 aa, synthetic construct
TLRFPNS

SEQ ID NO: 24683 - protein, 7 aa, synthetic construct
HIERFDG

SEQ ID NO: 24684 - protein, 7 aa, synthetic construct
KWETPLV

SEQ ID NO: 24685 - protein, 7 aa, synthetic construct
SVQPQAM

SEQ ID NO: 24686 - protein, 7 aa, synthetic construct
YRKPYME

SEQ ID NO: 24687 - protein, 7 aa, synthetic construct
IGDFRKY

SEQ ID NO: 24688 - protein, 7 aa, synthetic construct
YTGHMIE

SEQ ID NO: 24689 - protein, 7 aa, synthetic construct
TVIHNQE

SEQ ID NO: 24690 - protein, 7 aa, synthetic construct
KYYEDQE

SEQ ID NO: 24691 - protein, 7 aa, synthetic construct
ARPMIGL

SEQ ID NO: 24692 - protein, 7 aa, synthetic construct
VPASPSF

SEQ ID NO: 24693 - protein, 7 aa, synthetic construct
SGVNQKM

SEQ ID NO: 24694 - protein, 7 aa, synthetic construct
FKISEEF

SEQ ID NO: 24695 - protein, 7 aa, synthetic construct
EMSTYRT

SEQ ID NO: 24696 - protein, 7 aa, synthetic construct
NQQNLVG

SEQ ID NO: 24697 - protein, 7 aa, synthetic construct
IQDLSVM

SEQ ID NO: 24698 - protein, 7 aa, synthetic construct
VVNPPAP

SEQ ID NO: 24699 - protein, 7 aa, synthetic construct
NSNPNFS

SEQ ID NO: 24700 - protein, 7 aa, synthetic construct
TAPAVNN

SEQ ID NO: 24701 - protein, 7 aa, synthetic construct
NHAMRLD

SEQ ID NO: 24702 - protein, 7 aa, synthetic construct
KALNANH

SEQ ID NO: 24703 - protein, 7 aa, synthetic construct
YWTMEED

SEQ ID NO: 24704 - protein, 7 aa, synthetic construct
EGARNGE

SEQ ID NO: 24705 - protein, 7 aa, synthetic construct
LTQQRPW

SEQ ID NO: 24706 - protein, 7 aa, synthetic construct
MKTYSLE

SEQ ID NO: 24707 - protein, 7 aa, synthetic construct
FPHTSPA

SEQ ID NO: 24708 - protein, 7 aa, synthetic construct
NSYNGTK

SEQ ID NO: 24709 - protein, 7 aa, synthetic construct
SVGYTIQ

SEQ ID NO: 24710 - protein, 7 aa, synthetic construct
INTNNEM

SEQ ID NO: 24711 - protein, 7 aa, synthetic construct
HQNDHGL

SEQ ID NO: 24712 - protein, 7 aa, synthetic construct
EMAMMKS

SEQ ID NO: 24713 - protein, 7 aa, synthetic construct
GTQMEPK

SEQ ID NO: 24714 - protein, 7 aa, synthetic construct
FEKPDHA

SEQ ID NO: 24715 - protein, 7 aa, synthetic construct
DHSSVGE

SEQ ID NO: 24716 - protein, 7 aa, synthetic construct
FTASIKL

SEQ ID NO: 24717 - protein, 7 aa, synthetic construct
TQTFVVP

SEQ ID NO: 24718 - protein, 7 aa, synthetic construct
DYADNRA

SEQ ID NO: 24719 - protein, 7 aa, synthetic construct
KQEASQL

SEQ ID NO: 24720 - protein, 7 aa, synthetic construct
GLRATSS

SEQ ID NO: 24721 - protein, 7 aa, synthetic construct
IVVGTFG

SEQ ID NO: 24722 - protein, 7 aa, synthetic construct
FIEERQS

SEQ ID NO: 24723 - protein, 7 aa, synthetic construct
VLSHSEY

SEQ ID NO: 24724 - protein, 7 aa, synthetic construct
THPQFRV

SEQ ID NO: 24725 - protein, 7 aa, synthetic construct
SDEKPRN

SEQ ID NO: 24726 - protein, 7 aa, synthetic construct
FKEPHGT

SEQ ID NO: 24727 - protein, 7 aa, synthetic construct
GQMHVVT

SEQ ID NO: 24728 - protein, 7 aa, synthetic construct
VTPHHEE

SEQ ID NO: 24729 - protein, 7 aa, synthetic construct
PAGPSHN

SEQ ID NO: 24730 - protein, 7 aa, synthetic construct
NSNDINL

SEQ ID NO: 24731 - protein, 7 aa, synthetic construct
SVFNPDL

SEQ ID NO: 24732 - protein, 7 aa, synthetic construct
HARSANT

SEQ ID NO: 24733 - protein, 7 aa, synthetic construct
EKGFRMP

SEQ ID NO: 24734 - protein, 7 aa, synthetic construct
IVGIPNV

SEQ ID NO: 24735 - protein, 7 aa, synthetic construct
PEFSKVV

SEQ ID NO: 24736 - protein, 7 aa, synthetic construct
TNPSMRV

SEQ ID NO: 24737 - protein, 7 aa, synthetic construct
RVTTNPQ

SEQ ID NO: 24738 - protein, 7 aa, synthetic construct
INVNITD

SEQ ID NO: 24739 - protein, 7 aa, synthetic construct
MGFNGPV

SEQ ID NO: 24740 - protein, 7 aa, synthetic construct
LRGAIVH

SEQ ID NO: 24741 - protein, 7 aa, synthetic construct
FAIKSVD

SEQ ID NO: 24742 - protein, 7 aa, synthetic construct
NSSSGIH

SEQ ID NO: 24743 - protein, 7 aa, synthetic construct
GKEWDPG

SEQ ID NO: 24744 - protein, 7 aa, synthetic construct
MDQHISK

SEQ ID NO: 24745 - protein, 7 aa, synthetic construct
HDRLSYS

SEQ ID NO: 24746 - protein, 7 aa, synthetic construct
NAELKYT

SEQ ID NO: 24747 - protein, 7 aa, synthetic construct
RLNEKFM

SEQ ID NO: 24748 - protein, 7 aa, synthetic construct
PTIGYVK

SEQ ID NO: 24749 - protein, 7 aa, synthetic construct
TFSPVGP

SEQ ID NO: 24750 - protein, 7 aa, synthetic construct
DGHHDQG

SEQ ID NO: 24751 - protein, 7 aa, synthetic construct
DMDKYKD

SEQ ID NO: 24752 - protein, 7 aa, synthetic construct
GAKDWGY

SEQ ID NO: 24753 - protein, 7 aa, synthetic construct
LTSQDYS

SEQ ID NO: 24754 - protein, 7 aa, synthetic construct
VMVGSVH

SEQ ID NO: 24755 - protein, 7 aa, synthetic construct
IHSRGMP

SEQ ID NO: 24756 - protein, 7 aa, synthetic construct
GMSNAMA

SEQ ID NO: 24757 - protein, 7 aa, synthetic construct
WQLMRAD

SEQ ID NO: 24758 - protein, 7 aa, synthetic construct
KSEKLDL

SEQ ID NO: 24759 - protein, 7 aa, synthetic construct
EATKRVF

SEQ ID NO: 24760 - protein, 7 aa, synthetic construct
LGTQNAG

SEQ ID NO: 24761 - protein, 7 aa, synthetic construct
ADLQRTI

SEQ ID NO: 24762 - protein, 7 aa, synthetic construct
FYETMSV

SEQ ID NO: 24763 - protein, 7 aa, synthetic construct
VNSWTVQ

SEQ ID NO: 24764 - protein, 7 aa, synthetic construct
NEYFNSE

SEQ ID NO: 24765 - protein, 7 aa, synthetic construct
MMRTDTE

SEQ ID NO: 24766 - protein, 7 aa, synthetic construct
YPDHSDT

SEQ ID NO: 24767 - protein, 7 aa, synthetic construct
HEFANAH

SEQ ID NO: 24768 - protein, 7 aa, synthetic construct
YKMIQSA

SEQ ID NO: 24769 - protein, 7 aa, synthetic construct
FSPVKAQ

SEQ ID NO: 24770 - protein, 7 aa, synthetic construct
THMSAVT

SEQ ID NO: 24771 - protein, 7 aa, synthetic construct
THQQAYL

SEQ ID NO: 24772 - protein, 7 aa, synthetic construct
MKENDWH

SEQ ID NO: 24773 - protein, 7 aa, synthetic construct
ALPIIQQ

SEQ ID NO: 24774 - protein, 7 aa, synthetic construct
FNRSHVE

SEQ ID NO: 24775 - protein, 7 aa, synthetic construct
LHHTEKT

SEQ ID NO: 24776 - protein, 7 aa, synthetic construct
LKFSSEI

SEQ ID NO: 24777 - protein, 7 aa, synthetic construct
QIQHQKF

SEQ ID NO: 24778 - protein, 7 aa, synthetic construct
EMHKSAK

SEQ ID NO: 24779 - protein, 7 aa, synthetic construct
AHTTNNT

SEQ ID NO: 24780 - protein, 7 aa, synthetic construct
MDTGEKA

SEQ ID NO: 24781 - protein, 7 aa, synthetic construct
ERHKADW

SEQ ID NO: 24782 - protein, 7 aa, synthetic construct
VVKPLNS

SEQ ID NO: 24783 - protein, 7 aa, synthetic construct
PRVLDAH

SEQ ID NO: 24784 - protein, 7 aa, synthetic construct
QEMKKFE

SEQ ID NO: 24785 - protein, 7 aa, synthetic construct
PSFNKQT

SEQ ID NO: 24786 - protein, 7 aa, synthetic construct
EKHYETP

SEQ ID NO: 24787 - protein, 7 aa, synthetic construct
VFLGQAS

SEQ ID NO: 24788 - protein, 7 aa, synthetic construct
FKTWHED

SEQ ID NO: 24789 - protein, 7 aa, synthetic construct
APIVGHR

SEQ ID NO: 24790 - protein, 7 aa, synthetic construct
WEKNTDK

SEQ ID NO: 24791 - protein, 7 aa, synthetic construct
YSVDAEM

SEQ ID NO: 24792 - protein, 7 aa, synthetic construct
ETYIARE

SEQ ID NO: 24793 - protein, 7 aa, synthetic construct
AKLLNVE

SEQ ID NO: 24794 - protein, 7 aa, synthetic construct
HFSVLPP

SEQ ID NO: 24795 - protein, 7 aa, synthetic construct
INVMSGP

SEQ ID NO: 24796 - protein, 7 aa, synthetic construct
NAYARAT

SEQ ID NO: 24797 - protein, 7 aa, synthetic construct
SQGVIMP

SEQ ID NO: 24798 - protein, 7 aa, synthetic construct
RIEPLPS

SEQ ID NO: 24799 - protein, 7 aa, synthetic construct
KESVGDM

SEQ ID NO: 24800 - protein, 7 aa, synthetic construct
QFEPGIA

SEQ ID NO: 24801 - protein, 7 aa, synthetic construct
PTTNIQT

SEQ ID NO: 24802 - protein, 7 aa, synthetic construct
FPSAAAG

SEQ ID NO: 24803 - protein, 7 aa, synthetic construct
EINTPKA

SEQ ID NO: 24804 - protein, 7 aa, synthetic construct
SEKWAAK

SEQ ID NO: 24805 - protein, 7 aa, synthetic construct
IWKMREP

SEQ ID NO: 24806 - protein, 7 aa, synthetic construct
DNRDTGI

SEQ ID NO: 24807 - protein, 7 aa, synthetic construct
LSNLKVS

SEQ ID NO: 24808 - protein, 7 aa, synthetic construct
WFPESRV

SEQ ID NO: 24809 - protein, 7 aa, synthetic construct
TPGLSGK

SEQ ID NO: 24810 - protein, 7 aa, synthetic construct
LRNEAGE

SEQ ID NO: 24811 - protein, 7 aa, synthetic construct
PRDDVKL

SEQ ID NO: 24812 - protein, 7 aa, synthetic construct
DSDKYRG

SEQ ID NO: 24813 - protein, 7 aa, synthetic construct
STFAMME

SEQ ID NO: 24814 - protein, 7 aa, synthetic construct
QFGTGQK

SEQ ID NO: 24815 - protein, 7 aa, synthetic construct
MVESARL

SEQ ID NO: 24816 - protein, 7 aa, synthetic construct
TFRDYPA

SEQ ID NO: 24817 - protein, 7 aa, synthetic construct
EPELKNY

SEQ ID NO: 24818 - protein, 7 aa, synthetic construct
FAMGNND

SEQ ID NO: 24819 - protein, 7 aa, synthetic construct
PSDMSIG

SEQ ID NO: 24820 - protein, 7 aa, synthetic construct
LRRDGKD

SEQ ID NO: 24821 - protein, 7 aa, synthetic construct
ASDMHRL

SEQ ID NO: 24822 - protein, 7 aa, synthetic construct
DAYHKDS

SEQ ID NO: 24823 - protein, 7 aa, synthetic construct
PDRNGRI

SEQ ID NO: 24824 - protein, 7 aa, synthetic construct
GTKDIMI

SEQ ID NO: 24825 - protein, 7 aa, synthetic construct
NIFGEHI

SEQ ID NO: 24826 - protein, 7 aa, synthetic construct
QLRHNAI

SEQ ID NO: 24827 - protein, 7 aa, synthetic construct
LINAKGI

SEQ ID NO: 24828 - protein, 7 aa, synthetic construct
HAPPVSS

SEQ ID NO: 24829 - protein, 7 aa, synthetic construct
SSSQTAQ

SEQ ID NO: 24830 - protein, 7 aa, synthetic construct
NKMPEMG

SEQ ID NO: 24831 - protein, 7 aa, synthetic construct
KSQHFAN

SEQ ID NO: 24832 - protein, 7 aa, synthetic construct
YGQEERR

SEQ ID NO: 24833 - protein, 7 aa, synthetic construct
GAANTGF

SEQ ID NO: 24834 - protein, 7 aa, synthetic construct
WSQGEPL

SEQ ID NO: 24835 - protein, 7 aa, synthetic construct
TIVGNNI

SEQ ID NO: 24836 - protein, 7 aa, synthetic construct
ILDSRVQ

SEQ ID NO: 24837 - protein, 7 aa, synthetic construct
HVSLEGG

SEQ ID NO: 24838 - protein, 7 aa, synthetic construct
SRAKIEP

SEQ ID NO: 24839 - protein, 7 aa, synthetic construct
PIKTYAS

SEQ ID NO: 24840 - protein, 7 aa, synthetic construct
NGARWPQ

SEQ ID NO: 24841 - protein, 7 aa, synthetic construct
TEERVSA

SEQ ID NO: 24842 - protein, 7 aa, synthetic construct
KQLQDRL

SEQ ID NO: 24843 - protein, 7 aa, synthetic construct
RWQESNQ

SEQ ID NO: 24844 - protein, 7 aa, synthetic construct
MRASIMG

SEQ ID NO: 24845 - protein, 7 aa, synthetic construct
NQGFKVE

SEQ ID NO: 24846 - protein, 7 aa, synthetic construct
RNVHQMQ

SEQ ID NO: 24847 - protein, 7 aa, synthetic construct
HTTDHQR

SEQ ID NO: 24848 - protein, 7 aa, synthetic construct
KFVSGMS

SEQ ID NO: 24849 - protein, 7 aa, synthetic construct
RSTTHTY

SEQ ID NO: 24850 - protein, 7 aa, synthetic construct
KDKRQDY

SEQ ID NO: 24851 - protein, 7 aa, synthetic construct
NMAVVLK

SEQ ID NO: 24852 - protein, 7 aa, synthetic construct
EKGLVIE

SEQ ID NO: 24853 - protein, 7 aa, synthetic construct
NQFVAGV

SEQ ID NO: 24854 - protein, 7 aa, synthetic construct
RNGADAE

SEQ ID NO: 24855 - protein, 7 aa, synthetic construct
AMPHQSL

SEQ ID NO: 24856 - protein, 7 aa, synthetic construct
QVPIMNS

SEQ ID NO: 24857 - protein, 7 aa, synthetic construct
AAHPMIT

SEQ ID NO: 24858 - protein, 7 aa, synthetic construct
APMKTPD

SEQ ID NO: 24859 - protein, 7 aa, synthetic construct
NIAYKGQ

SEQ ID NO: 24860 - protein, 7 aa, synthetic construct
NWKTGAM

SEQ ID NO: 24861 - protein, 7 aa, synthetic construct
RNSPIDY

SEQ ID NO: 24862 - protein, 7 aa, synthetic construct
YENNPGH

SEQ ID NO: 24863 - protein, 7 aa, synthetic construct
AGMHNQI

SEQ ID NO: 24864 - protein, 7 aa, synthetic construct
VKDRSQI

SEQ ID NO: 24865 - protein, 7 aa, synthetic construct
WNREIQT

SEQ ID NO: 24866 - protein, 7 aa, synthetic construct
EKVMEPK

SEQ ID NO: 24867 - protein, 7 aa, synthetic construct
SKSDIPI

SEQ ID NO: 24868 - protein, 7 aa, synthetic construct
RHEAIVE

SEQ ID NO: 24869 - protein, 7 aa, synthetic construct
HHDDVRS

SEQ ID NO: 24870 - protein, 7 aa, synthetic construct
IIDMSAA

SEQ ID NO: 24871 - protein, 7 aa, synthetic construct
AQPNAMD

SEQ ID NO: 24872 - protein, 7 aa, synthetic construct
RISHDSQ

SEQ ID NO: 24873 - protein, 7 aa, synthetic construct
PWEGMTA

SEQ ID NO: 24874 - protein, 7 aa, synthetic construct
GTGPRHT

SEQ ID NO: 24875 - protein, 7 aa, synthetic construct
QTDLHER

SEQ ID NO: 24876 - protein, 7 aa, synthetic construct
ADQMRFV

SEQ ID NO: 24877 - protein, 7 aa, synthetic construct
PAREQNV

SEQ ID NO: 24878 - protein, 7 aa, synthetic construct
HSMDKEF

SEQ ID NO: 24879 - protein, 7 aa, synthetic construct
LWKDNAH

SEQ ID NO: 24880 - protein, 7 aa, synthetic construct
TIDIAQM

SEQ ID NO: 24881 - protein, 7 aa, synthetic construct
LYQAHDR

SEQ ID NO: 24882 - protein, 7 aa, synthetic construct
YATMTVE

SEQ ID NO: 24883 - protein, 7 aa, synthetic construct
MAPGNVV

SEQ ID NO: 24884 - protein, 7 aa, synthetic construct
HPSTKWV

SEQ ID NO: 24885 - protein, 7 aa, synthetic construct
LDFRHDS

SEQ ID NO: 24886 - protein, 7 aa, synthetic construct
QMWNGDP

SEQ ID NO: 24887 - protein, 7 aa, synthetic construct
NQHGVKE

SEQ ID NO: 24888 - protein, 7 aa, synthetic construct
DANNWKV

SEQ ID NO: 24889 - protein, 7 aa, synthetic construct
MEQTAHV

SEQ ID NO: 24890 - protein, 7 aa, synthetic construct
WQQGERA

SEQ ID NO: 24891 - protein, 7 aa, synthetic construct
RTVANHL

SEQ ID NO: 24892 - protein, 7 aa, synthetic construct
ASQDSMR

SEQ ID NO: 24893 - protein, 7 aa, synthetic construct
SSKMMDI

SEQ ID NO: 24894 - protein, 7 aa, synthetic construct
FSKVWEE

SEQ ID NO: 24895 - protein, 7 aa, synthetic construct
HQGGQKF

SEQ ID NO: 24896 - protein, 7 aa, synthetic construct
GYSIQNA

SEQ ID NO: 24897 - protein, 7 aa, synthetic construct
NKGFMMQ

SEQ ID NO: 24898 - protein, 7 aa, synthetic construct
DQPNASE

SEQ ID NO: 24899 - protein, 7 aa, synthetic construct
YNPKDAS

SEQ ID NO: 24900 - protein, 7 aa, synthetic construct
WTARTHV

SEQ ID NO: 24901 - protein, 7 aa, synthetic construct
PNNILPH

SEQ ID NO: 24902 - protein, 7 aa, synthetic construct
YTSRFIE

SEQ ID NO: 24903 - protein, 7 aa, synthetic construct
NELLKVN

SEQ ID NO: 24904 - protein, 7 aa, synthetic construct
DIEFHQK

SEQ ID NO: 24905 - protein, 7 aa, synthetic construct
EDTTYKA

SEQ ID NO: 24906 - protein, 7 aa, synthetic construct
RTDIQTN

SEQ ID NO: 24907 - protein, 7 aa, synthetic construct
IWSQDNE

SEQ ID NO: 24908 - protein, 7 aa, synthetic construct
EEKQMIS

SEQ ID NO: 24909 - protein, 7 aa, synthetic construct
KNSLVTE

SEQ ID NO: 24910 - protein, 7 aa, synthetic construct
TRFPIPA

SEQ ID NO: 24911 - protein, 7 aa, synthetic construct
NHGSVPQ

SEQ ID NO: 24912 - protein, 7 aa, synthetic construct
SVSQLAR

SEQ ID NO: 24913 - protein, 7 aa, synthetic construct
GQIVQQE

SEQ ID NO: 24914 - protein, 7 aa, synthetic construct
VKKNSTD

SEQ ID NO: 24915 - protein, 7 aa, synthetic construct
CHTSGCL

SEQ ID NO: 24916 - protein, 7 aa, synthetic construct
NRTQIST

SEQ ID NO: 24917 - protein, 7 aa, synthetic construct
LDTYGRR

SEQ ID NO: 24918 - protein, 7 aa, synthetic construct
HTEKYGV

SEQ ID NO: 24919 - protein, 7 aa, synthetic construct
VNDGAHP

SEQ ID NO: 24920 - protein, 7 aa, synthetic construct
YEDTPNW

SEQ ID NO: 24921 - protein, 7 aa, synthetic construct
GWQGVSN

SEQ ID NO: 24922 - protein, 7 aa, synthetic construct
QQRFMDV

SEQ ID NO: 24923 - protein, 7 aa, synthetic construct
MARPLGN

SEQ ID NO: 24924 - protein, 7 aa, synthetic construct
QTESVRK

SEQ ID NO: 24925 - protein, 7 aa, synthetic construct
SGKEDSL

SEQ ID NO: 24926 - protein, 7 aa, synthetic construct
IGNLGPK

SEQ ID NO: 24927 - protein, 7 aa, synthetic construct
VEMRHQY

SEQ ID NO: 24928 - protein, 7 aa, synthetic construct
PWNGTLS

SEQ ID NO: 24929 - protein, 7 aa, synthetic construct
ADNSLIE

SEQ ID NO: 24930 - protein, 7 aa, synthetic construct
AKQDKEM

SEQ ID NO: 24931 - protein, 7 aa, synthetic construct
IPAQVGH

SEQ ID NO: 24932 - protein, 7 aa, synthetic construct
QQSENSL

SEQ ID NO: 24933 - protein, 7 aa, synthetic construct
DRPHPML

SEQ ID NO: 24934 - protein, 7 aa, synthetic construct
TSKNQTD

SEQ ID NO: 24935 - protein, 7 aa, synthetic construct
REGGRAF

SEQ ID NO: 24936 - protein, 7 aa, synthetic construct
TDGTAHM

SEQ ID NO: 24937 - protein, 7 aa, synthetic construct
GKAVGVT

SEQ ID NO: 24938 - protein, 7 aa, synthetic construct
FDESYRT

SEQ ID NO: 24939 - protein, 7 aa, synthetic construct
GRDDIAG

SEQ ID NO: 24940 - protein, 7 aa, synthetic construct
NNHTGQA

SEQ ID NO: 24941 - protein, 7 aa, synthetic construct
AEGQMPR

SEQ ID NO: 24942 - protein, 7 aa, synthetic construct
CIDKSCD

SEQ ID NO: 24943 - protein, 7 aa, synthetic construct
MHKVSEK

SEQ ID NO: 24944 - protein, 7 aa, synthetic construct
EYNTSSS

SEQ ID NO: 24945 - protein, 7 aa, synthetic construct
FIVPETG

SEQ ID NO: 24946 - protein, 7 aa, synthetic construct
MDNPQPG

SEQ ID NO: 24947 - protein, 7 aa, synthetic construct
TREHPQW

SEQ ID NO: 24948 - protein, 7 aa, synthetic construct
QDSNPPG

SEQ ID NO: 24949 - protein, 7 aa, synthetic construct
LYRGLPM

SEQ ID NO: 24950 - protein, 7 aa, synthetic construct
KGQEPRH

SEQ ID NO: 24951 - protein, 7 aa, synthetic construct
IHEFDVN

SEQ ID NO: 24952 - protein, 7 aa, synthetic construct
VKPIFET

SEQ ID NO: 24953 - protein, 7 aa, synthetic construct
LSVLVGG

SEQ ID NO: 24954 - protein, 7 aa, synthetic construct
GVGVKDP

SEQ ID NO: 24955 - protein, 7 aa, synthetic construct
GKYSEYP

SEQ ID NO: 24956 - protein, 7 aa, synthetic construct
SDINSGK

SEQ ID NO: 24957 - protein, 7 aa, synthetic construct
VAAMPEY

SEQ ID NO: 24958 - protein, 7 aa, synthetic construct
KSVNHPT

SEQ ID NO: 24959 - protein, 7 aa, synthetic construct
TQNTVAR

SEQ ID NO: 24960 - protein, 7 aa, synthetic construct
PASNQLL

SEQ ID NO: 24961 - protein, 7 aa, synthetic construct
TQEKMST

SEQ ID NO: 24962 - protein, 7 aa, synthetic construct
YQNVNNV

SEQ ID NO: 24963 - protein, 7 aa, synthetic construct
FPVLVEE

SEQ ID NO: 24964 - protein, 7 aa, synthetic construct
ATATQWG

SEQ ID NO: 24965 - protein, 7 aa, synthetic construct
KQYSKYE

SEQ ID NO: 24966 - protein, 7 aa, synthetic construct
DLKTEPV

SEQ ID NO: 24967 - protein, 7 aa, synthetic construct
KHIEIEK

SEQ ID NO: 24968 - protein, 7 aa, synthetic construct
GTPGANH

SEQ ID NO: 24969 - protein, 7 aa, synthetic construct
NTQDKPR

SEQ ID NO: 24970 - protein, 7 aa, synthetic construct
AVVSNMT

SEQ ID NO: 24971 - protein, 7 aa, synthetic construct
RHKVAPD

SEQ ID NO: 24972 - protein, 7 aa, synthetic construct
QDGKVSL

SEQ ID NO: 24973 - protein, 7 aa, synthetic construct
DSKEASQ

SEQ ID NO: 24974 - protein, 7 aa, synthetic construct
SHPEGPE

SEQ ID NO: 24975 - protein, 7 aa, synthetic construct
SHDRQGP

SEQ ID NO: 24976 - protein, 7 aa, synthetic construct
IHPSDQN

SEQ ID NO: 24977 - protein, 7 aa, synthetic construct
MNKHADT

SEQ ID NO: 24978 - protein, 7 aa, synthetic construct
FGTGTVT

SEQ ID NO: 24979 - protein, 7 aa, synthetic construct
ASTEHKM

SEQ ID NO: 24980 - protein, 7 aa, synthetic construct
HASPTSN

SEQ ID NO: 24981 - protein, 7 aa, synthetic construct
AEPMKLN

SEQ ID NO: 24982 - protein, 7 aa, synthetic construct
NQLGHAF

SEQ ID NO: 24983 - protein, 7 aa, synthetic construct
EGPRIYV

SEQ ID NO: 24984 - protein, 7 aa, synthetic construct
AAKIATM

SEQ ID NO: 24985 - protein, 7 aa, synthetic construct
FAVRGLQ

SEQ ID NO: 24986 - protein, 7 aa, synthetic construct
RQLPSMV

SEQ ID NO: 24987 - protein, 7 aa, synthetic construct
WQDKRHN

SEQ ID NO: 24988 - protein, 7 aa, synthetic construct
ESMKKLF

SEQ ID NO: 24989 - protein, 7 aa, synthetic construct
KHEIHID

SEQ ID NO: 24990 - protein, 7 aa, synthetic construct
ERGTTDV

SEQ ID NO: 24991 - protein, 7 aa, synthetic construct
HTDHSGP

SEQ ID NO: 24992 - protein, 7 aa, synthetic construct
DLHSGHF

SEQ ID NO: 24993 - protein, 7 aa, synthetic construct
PGAFVKN

SEQ ID NO: 24994 - protein, 7 aa, synthetic construct
AQSDKEY

SEQ ID NO: 24995 - protein, 7 aa, synthetic construct
NLVMKHE

SEQ ID NO: 24996 - protein, 7 aa, synthetic construct
TQYIIGD

SEQ ID NO: 24997 - protein, 7 aa, synthetic construct
GVGANTW

SEQ ID NO: 24998 - protein, 7 aa, synthetic construct
ERSDKEY

SEQ ID NO: 24999 - protein, 7 aa, synthetic construct
QALGQTL

SEQ ID NO: 25000 - protein, 7 aa, synthetic construct
TDFGGAP

SEQ ID NO: 25001 - protein, 7 aa, synthetic construct
NNPLMRM

SEQ ID NO: 25002 - protein, 7 aa, synthetic construct
LGQTFQQ

SEQ ID NO: 25003 - protein, 7 aa, synthetic construct
KATVEAK

SEQ ID NO: 25004 - protein, 7 aa, synthetic construct
MHPTSAL

SEQ ID NO: 25005 - protein, 7 aa, synthetic construct
GNTAMGI

SEQ ID NO: 25006 - protein, 7 aa, synthetic construct
HFQVTKA

SEQ ID NO: 25007 - protein, 7 aa, synthetic construct
PPYGQSM

SEQ ID NO: 25008 - protein, 7 aa, synthetic construct
FHNQLSK

SEQ ID NO: 25009 - protein, 7 aa, synthetic construct
QKFGNTF

SEQ ID NO: 25010 - protein, 7 aa, synthetic construct
SIQHRSY

SEQ ID NO: 25011 - protein, 7 aa, synthetic construct
NGGLVEP

SEQ ID NO: 25012 - protein, 7 aa, synthetic construct
KGQDDIG

SEQ ID NO: 25013 - protein, 7 aa, synthetic construct
ANDNYPY

SEQ ID NO: 25014 - protein, 7 aa, synthetic construct
MNYSGQT

SEQ ID NO: 25015 - protein, 7 aa, synthetic construct
IKPRMLE

SEQ ID NO: 25016 - protein, 7 aa, synthetic construct
WSDSGVL

SEQ ID NO: 25017 - protein, 7 aa, synthetic construct
PSRETDY

SEQ ID NO: 25018 - protein, 7 aa, synthetic construct
LPTDQEK

SEQ ID NO: 25019 - protein, 7 aa, synthetic construct
VLRQGEW

SEQ ID NO: 25020 - protein, 7 aa, synthetic construct
ESFNRPI

SEQ ID NO: 25021 - protein, 7 aa, synthetic construct
EQQSDRE

SEQ ID NO: 25022 - protein, 7 aa, synthetic construct
ALRPDYS

SEQ ID NO: 25023 - protein, 7 aa, synthetic construct
IPSHETF

SEQ ID NO: 25024 - protein, 7 aa, synthetic construct
IREKSYT

SEQ ID NO: 25025 - protein, 7 aa, synthetic construct
KPQFIHN

SEQ ID NO: 25026 - protein, 7 aa, synthetic construct
EERSFNP

SEQ ID NO: 25027 - protein, 7 aa, synthetic construct
EYRAQER

SEQ ID NO: 25028 - protein, 7 aa, synthetic construct
QIGQEMR

SEQ ID NO: 25029 - protein, 7 aa, synthetic construct
NANSLVT

SEQ ID NO: 25030 - protein, 7 aa, synthetic construct
GDNSMAM

SEQ ID NO: 25031 - protein, 7 aa, synthetic construct
IDKVTSY

SEQ ID NO: 25032 - protein, 7 aa, synthetic construct
ATPHANV

SEQ ID NO: 25033 - protein, 7 aa, synthetic construct
IYRDMVA

SEQ ID NO: 25034 - protein, 7 aa, synthetic construct
YYASHVD

SEQ ID NO: 25035 - protein, 7 aa, synthetic construct
VSGMYKP

SEQ ID NO: 25036 - protein, 7 aa, synthetic construct
SNRYGLG

SEQ ID NO: 25037 - protein, 7 aa, synthetic construct
KVGSVLI

SEQ ID NO: 25038 - protein, 7 aa, synthetic construct
HAEPPHQ

SEQ ID NO: 25039 - protein, 7 aa, synthetic construct
TEIQNAG

SEQ ID NO: 25040 - protein, 7 aa, synthetic construct
QQAKTFE

SEQ ID NO: 25041 - protein, 7 aa, synthetic construct
APHDVEW

SEQ ID NO: 25042 - protein, 7 aa, synthetic construct
EYQNNSG

SEQ ID NO: 25043 - protein, 7 aa, synthetic construct
QHENHNT

SEQ ID NO: 25044 - protein, 7 aa, synthetic construct
RNIAQPT

SEQ ID NO: 25045 - protein, 7 aa, synthetic construct
FLARHAE

SEQ ID NO: 25046 - protein, 7 aa, synthetic construct
GADPRLD

SEQ ID NO: 25047 - protein, 7 aa, synthetic construct
VEPYFQQ

SEQ ID NO: 25048 - protein, 7 aa, synthetic construct
HSHQEER

SEQ ID NO: 25049 - protein, 7 aa, synthetic construct
DLYTSVS

SEQ ID NO: 25050 - protein, 7 aa, synthetic construct
QTLQMGG

SEQ ID NO: 25051 - protein, 7 aa, synthetic construct
QKPSEVV

SEQ ID NO: 25052 - protein, 7 aa, synthetic construct
SSMAGTF

SEQ ID NO: 25053 - protein, 7 aa, synthetic construct
EYAKAEG

SEQ ID NO: 25054 - protein, 7 aa, synthetic construct
WNTDLPS

SEQ ID NO: 25055 - protein, 7 aa, synthetic construct
WYDHASA

SEQ ID NO: 25056 - protein, 7 aa, synthetic construct
VSQRTSE

SEQ ID NO: 25057 - protein, 7 aa, synthetic construct
TGPEHKI

SEQ ID NO: 25058 - protein, 7 aa, synthetic construct
GPEYQIE

SEQ ID NO: 25059 - protein, 7 aa, synthetic construct
NTANSSM

SEQ ID NO: 25060 - protein, 7 aa, synthetic construct
RVGRGME

SEQ ID NO: 25061 - protein, 7 aa, synthetic construct
CPNWQCE

SEQ ID NO: 25062 - protein, 7 aa, synthetic construct
TVNSVDA

SEQ ID NO: 25063 - protein, 7 aa, synthetic construct
DKRHVED

SEQ ID NO: 25064 - protein, 7 aa, synthetic construct
WSNNSRT

SEQ ID NO: 25065 - protein, 7 aa, synthetic construct
LGTHWTA

SEQ ID NO: 25066 - protein, 7 aa, synthetic construct
QTPHATR

SEQ ID NO: 25067 - protein, 7 aa, synthetic construct
LVYKTNN

SEQ ID NO: 25068 - protein, 7 aa, synthetic construct
KNDPTTG

SEQ ID NO: 25069 - protein, 7 aa, synthetic construct
FHNMHDK

SEQ ID NO: 25070 - protein, 7 aa, synthetic construct
MQPNDHT

SEQ ID NO: 25071 - protein, 7 aa, synthetic construct
AMTMEGV

SEQ ID NO: 25072 - protein, 7 aa, synthetic construct
NNGADRF

SEQ ID NO: 25073 - protein, 7 aa, synthetic construct
TGGRQHQ

SEQ ID NO: 25074 - protein, 7 aa, synthetic construct
IVHDALK

SEQ ID NO: 25075 - protein, 7 aa, synthetic construct
NVSGLGK

SEQ ID NO: 25076 - protein, 7 aa, synthetic construct
DNGRVEH

SEQ ID NO: 25077 - protein, 7 aa, synthetic construct
GGHHEQL

SEQ ID NO: 25078 - protein, 7 aa, synthetic construct
DQKFPQS

SEQ ID NO: 25079 - protein, 7 aa, synthetic construct
SAEHMGP

SEQ ID NO: 25080 - protein, 7 aa, synthetic construct
KNMDITI

SEQ ID NO: 25081 - protein, 7 aa, synthetic construct
REAVADE

SEQ ID NO: 25082 - protein, 7 aa, synthetic construct
QQHHVHF

SEQ ID NO: 25083 - protein, 7 aa, synthetic construct
YEAQFGR

SEQ ID NO: 25084 - protein, 7 aa, synthetic construct
YVDMILA

SEQ ID NO: 25085 - protein, 7 aa, synthetic construct
GPREIPL

SEQ ID NO: 25086 - protein, 7 aa, synthetic construct
DQYDEFG

SEQ ID NO: 25087 - protein, 7 aa, synthetic construct
RTVQGHI

SEQ ID NO: 25088 - protein, 7 aa, synthetic construct
YFDKHIA

SEQ ID NO: 25089 - protein, 7 aa, synthetic construct
RYTDKQA

SEQ ID NO: 25090 - protein, 7 aa, synthetic construct
QSEQVRP

SEQ ID NO: 25091 - protein, 7 aa, synthetic construct
WSRHAEH

SEQ ID NO: 25092 - protein, 7 aa, synthetic construct
ERAFNQM

SEQ ID NO: 25093 - protein, 7 aa, synthetic construct
EYRTPVP

SEQ ID NO: 25094 - protein, 7 aa, synthetic construct
LGEFKVL

SEQ ID NO: 25095 - protein, 7 aa, synthetic construct
KNGIPYE

SEQ ID NO: 25096 - protein, 7 aa, synthetic construct
DREKMHK

SEQ ID NO: 25097 - protein, 7 aa, synthetic construct
SFNKMLH

SEQ ID NO: 25098 - protein, 7 aa, synthetic construct
VPASNGA

SEQ ID NO: 25099 - protein, 7 aa, synthetic construct
APGSKWG

SEQ ID NO: 25100 - protein, 7 aa, synthetic construct
NFQVTST

SEQ ID NO: 25101 - protein, 7 aa, synthetic construct
WRDANNL

SEQ ID NO: 25102 - protein, 7 aa, synthetic construct
NLNSKLV

SEQ ID NO: 25103 - protein, 7 aa, synthetic construct
FSDYPTK

SEQ ID NO: 25104 - protein, 7 aa, synthetic construct
PKVVEDV

SEQ ID NO: 25105 - protein, 7 aa, synthetic construct
WYNDEDY

SEQ ID NO: 25106 - protein, 7 aa, synthetic construct
ANEAMGG

SEQ ID NO: 25107 - protein, 7 aa, synthetic construct
STIKDDR

SEQ ID NO: 25108 - protein, 7 aa, synthetic construct
MSPVTMN

SEQ ID NO: 25109 - protein, 7 aa, synthetic construct
WNVNVRP

SEQ ID NO: 25110 - protein, 7 aa, synthetic construct
FKNPPPI

SEQ ID NO: 25111 - protein, 7 aa, synthetic construct
KDDLYVP

SEQ ID NO: 25112 - protein, 7 aa, synthetic construct
NSPSITD

SEQ ID NO: 25113 - protein, 7 aa, synthetic construct
YSQVKHV

SEQ ID NO: 25114 - protein, 7 aa, synthetic construct
NTSKWGD

SEQ ID NO: 25115 - protein, 7 aa, synthetic construct
VNMERPV

SEQ ID NO: 25116 - protein, 7 aa, synthetic construct
LKQEPND

SEQ ID NO: 25117 - protein, 7 aa, synthetic construct
IRNLYES

SEQ ID NO: 25118 - protein, 7 aa, synthetic construct
GIQNPGH

SEQ ID NO: 25119 - protein, 7 aa, synthetic construct
LAHLHTT

SEQ ID NO: 25120 - protein, 7 aa, synthetic construct
NHKNFDR

SEQ ID NO: 25121 - protein, 7 aa, synthetic construct
PYDSHKD

SEQ ID NO: 25122 - protein, 7 aa, synthetic construct
FPGGRQA

SEQ ID NO: 25123 - protein, 7 aa, synthetic construct
WKESRPY

SEQ ID NO: 25124 - protein, 7 aa, synthetic construct
TSRHGTT

SEQ ID NO: 25125 - protein, 7 aa, synthetic construct
WRSTINQ

SEQ ID NO: 25126 - protein, 7 aa, synthetic construct
PAISTRH

SEQ ID NO: 25127 - protein, 7 aa, synthetic construct
SVSIYKA

SEQ ID NO: 25128 - protein, 7 aa, synthetic construct
RLPYGAP

SEQ ID NO: 25129 - protein, 7 aa, synthetic construct
ADNTQHS

SEQ ID NO: 25130 - protein, 7 aa, synthetic construct
MSKETWK

SEQ ID NO: 25131 - protein, 7 aa, synthetic construct
HHLNDKD

SEQ ID NO: 25132 - protein, 7 aa, synthetic construct
KDMNDPI

SEQ ID NO: 25133 - protein, 7 aa, synthetic construct
TDSLFPR

SEQ ID NO: 25134 - protein, 7 aa, synthetic construct
NSSIVQV

SEQ ID NO: 25135 - protein, 7 aa, synthetic construct
TTDYYVS

SEQ ID NO: 25136 - protein, 7 aa, synthetic construct
PGAVHLM

SEQ ID NO: 25137 - protein, 7 aa, synthetic construct
DAKQVQE

SEQ ID NO: 25138 - protein, 7 aa, synthetic construct
TVMGPTH

SEQ ID NO: 25139 - protein, 7 aa, synthetic construct
SQIYTVS

SEQ ID NO: 25140 - protein, 7 aa, synthetic construct
NNRDGSQ

SEQ ID NO: 25141 - protein, 7 aa, synthetic construct
PSLNKLV

SEQ ID NO: 25142 - protein, 7 aa, synthetic construct
GQKEFQV

SEQ ID NO: 25143 - protein, 7 aa, synthetic construct
NSQHQEA

SEQ ID NO: 25144 - protein, 7 aa, synthetic construct
FTMKPFE

SEQ ID NO: 25145 - protein, 7 aa, synthetic construct
MMRAQVT

SEQ ID NO: 25146 - protein, 7 aa, synthetic construct
KRSTYEP

SEQ ID NO: 25147 - protein, 7 aa, synthetic construct
RAKLEED

SEQ ID NO: 25148 - protein, 7 aa, synthetic construct
IRGTGDR

SEQ ID NO: 25149 - protein, 7 aa, synthetic construct
VETIDKP

SEQ ID NO: 25150 - protein, 7 aa, synthetic construct
RVQTHEN

SEQ ID NO: 25151 - protein, 7 aa, synthetic construct
GGVRSDH

SEQ ID NO: 25152 - protein, 7 aa, synthetic construct
LEGDRAW

SEQ ID NO: 25153 - protein, 7 aa, synthetic construct
TEGQWAH

SEQ ID NO: 25154 - protein, 7 aa, synthetic construct
KAQGGIP

SEQ ID NO: 25155 - protein, 7 aa, synthetic construct
PAPPSEP

SEQ ID NO: 25156 - protein, 7 aa, synthetic construct
GTKAEEY

SEQ ID NO: 25157 - protein, 7 aa, synthetic construct
NPMQEIA

SEQ ID NO: 25158 - protein, 7 aa, synthetic construct
AQPQRIH

SEQ ID NO: 25159 - protein, 7 aa, synthetic construct
AGQPTHT

SEQ ID NO: 25160 - protein, 7 aa, synthetic construct
EHAGAQR

SEQ ID NO: 25161 - protein, 7 aa, synthetic construct
QTDEKTA

SEQ ID NO: 25162 - protein, 7 aa, synthetic construct
GEMFSQS

SEQ ID NO: 25163 - protein, 7 aa, synthetic construct
MNGSSEL

SEQ ID NO: 25164 - protein, 7 aa, synthetic construct
STSQVQF

SEQ ID NO: 25165 - protein, 7 aa, synthetic construct
SLPIHHP

SEQ ID NO: 25166 - protein, 7 aa, synthetic construct
REGHSYG

SEQ ID NO: 25167 - protein, 7 aa, synthetic construct
PKIQGYV

SEQ ID NO: 25168 - protein, 7 aa, synthetic construct
PPYYKVE

SEQ ID NO: 25169 - protein, 7 aa, synthetic construct
HTHSPNA

SEQ ID NO: 25170 - protein, 7 aa, synthetic construct
SKIYRDV

SEQ ID NO: 25171 - protein, 7 aa, synthetic construct
ARWNNAG

SEQ ID NO: 25172 - protein, 7 aa, synthetic construct
NRNNQLY

SEQ ID NO: 25173 - protein, 7 aa, synthetic construct
GAAKNEW

SEQ ID NO: 25174 - protein, 7 aa, synthetic construct
HILKMDA

SEQ ID NO: 25175 - protein, 7 aa, synthetic construct
WDKEMRM

SEQ ID NO: 25176 - protein, 7 aa, synthetic construct
NYEQGAE

SEQ ID NO: 25177 - protein, 7 aa, synthetic construct
DFPPKSY

SEQ ID NO: 25178 - protein, 7 aa, synthetic construct
NTIPNSL

SEQ ID NO: 25179 - protein, 7 aa, synthetic construct
SQVNPQR

SEQ ID NO: 25180 - protein, 7 aa, synthetic construct
RDYKVLN

SEQ ID NO: 25181 - protein, 7 aa, synthetic construct
GSKFVTF

SEQ ID NO: 25182 - protein, 7 aa, synthetic construct
LLRDDSI

SEQ ID NO: 25183 - protein, 7 aa, synthetic construct
VHPSNEM

SEQ ID NO: 25184 - protein, 7 aa, synthetic construct
LHAGPKH

SEQ ID NO: 25185 - protein, 7 aa, synthetic construct
HLPKLVQ

SEQ ID NO: 25186 - protein, 7 aa, synthetic construct
NQEAKIH

SEQ ID NO: 25187 - protein, 7 aa, synthetic construct
RHQQESN

SEQ ID NO: 25188 - protein, 7 aa, synthetic construct
TDVQKAH

SEQ ID NO: 25189 - protein, 7 aa, synthetic construct
LIQTTAH

SEQ ID NO: 25190 - protein, 7 aa, synthetic construct
PIHNQGI

SEQ ID NO: 25191 - protein, 7 aa, synthetic construct
PSNDKEH

SEQ ID NO: 25192 - protein, 7 aa, synthetic construct
RPSFSQE

SEQ ID NO: 25193 - protein, 7 aa, synthetic construct
MHLGYDA

SEQ ID NO: 25194 - protein, 7 aa, synthetic construct
MDVKGII

SEQ ID NO: 25195 - protein, 7 aa, synthetic construct
MPAHDGI

SEQ ID NO: 25196 - protein, 7 aa, synthetic construct
NQPNNDT

SEQ ID NO: 25197 - protein, 7 aa, synthetic construct
PGINQIH

SEQ ID NO: 25198 - protein, 7 aa, synthetic construct
KIGQIDY

SEQ ID NO: 25199 - protein, 7 aa, synthetic construct
WNGHDTS

SEQ ID NO: 25200 - protein, 7 aa, synthetic construct
SGETKAD

SEQ ID NO: 25201 - protein, 7 aa, synthetic construct
AHYQAQS

SEQ ID NO: 25202 - protein, 7 aa, synthetic construct
NMMKEAL

SEQ ID NO: 25203 - protein, 7 aa, synthetic construct
RFGEMQL

SEQ ID NO: 25204 - protein, 7 aa, synthetic construct
CKGNTCG

SEQ ID NO: 25205 - protein, 7 aa, synthetic construct
PLQDWQK

SEQ ID NO: 25206 - protein, 7 aa, synthetic construct
EAHAVTG

SEQ ID NO: 25207 - protein, 7 aa, synthetic construct
TWKIPEE

SEQ ID NO: 25208 - protein, 7 aa, synthetic construct
FSKKAVD

SEQ ID NO: 25209 - protein, 7 aa, synthetic construct
MYEAKPV

SEQ ID NO: 25210 - protein, 7 aa, synthetic construct
WRKELGA

SEQ ID NO: 25211 - protein, 7 aa, synthetic construct
KPRAFDT

SEQ ID NO: 25212 - protein, 7 aa, synthetic construct
NDGAEYS

SEQ ID NO: 25213 - protein, 7 aa, synthetic construct
WKNIQNS

SEQ ID NO: 25214 - protein, 7 aa, synthetic construct
VHTQNNK

SEQ ID NO: 25215 - protein, 7 aa, synthetic construct
LNDQWNP

SEQ ID NO: 25216 - protein, 7 aa, synthetic construct
IMPKQIE

SEQ ID NO: 25217 - protein, 7 aa, synthetic construct
LTEVPVG

SEQ ID NO: 25218 - protein, 7 aa, synthetic construct
VGYIHDE

SEQ ID NO: 25219 - protein, 7 aa, synthetic construct
GEPVHKP

SEQ ID NO: 25220 - protein, 7 aa, synthetic construct
PSHSQYI

SEQ ID NO: 25221 - protein, 7 aa, synthetic construct
SHGSIHL

SEQ ID NO: 25222 - protein, 7 aa, synthetic construct
MAEYMKD

SEQ ID NO: 25223 - protein, 7 aa, synthetic construct
FTAIKET

SEQ ID NO: 25224 - protein, 7 aa, synthetic construct
LPKGDYI

SEQ ID NO: 25225 - protein, 7 aa, synthetic construct
NQRMYKD

SEQ ID NO: 25226 - protein, 7 aa, synthetic construct
YSEIWQA

SEQ ID NO: 25227 - protein, 7 aa, synthetic construct
KETHLPE

SEQ ID NO: 25228 - protein, 7 aa, synthetic construct
HKGPIGT

SEQ ID NO: 25229 - protein, 7 aa, synthetic construct
AQEPPRR

SEQ ID NO: 25230 - protein, 7 aa, synthetic construct
WHGMQQV

SEQ ID NO: 25231 - protein, 7 aa, synthetic construct
YFGDGGT

SEQ ID NO: 25232 - protein, 7 aa, synthetic construct
KESYEQE

SEQ ID NO: 25233 - protein, 7 aa, synthetic construct
FFGDQHG

SEQ ID NO: 25234 - protein, 7 aa, synthetic construct
GVSGQML

SEQ ID NO: 25235 - protein, 7 aa, synthetic construct
SKYPDQE

SEQ ID NO: 25236 - protein, 7 aa, synthetic construct
NGTHKNW

SEQ ID NO: 25237 - protein, 7 aa, synthetic construct
NKDDSAN

SEQ ID NO: 25238 - protein, 7 aa, synthetic construct
AGSGHFA

SEQ ID NO: 25239 - protein, 7 aa, synthetic construct
MDGNRQD

SEQ ID NO: 25240 - protein, 7 aa, synthetic construct
FLKKNEI

SEQ ID NO: 25241 - protein, 7 aa, synthetic construct
YPSHDEV

SEQ ID NO: 25242 - protein, 7 aa, synthetic construct
EYNPAIR

SEQ ID NO: 25243 - protein, 7 aa, synthetic construct
PKQANAA

SEQ ID NO: 25244 - protein, 7 aa, synthetic construct
VSGRMAN

SEQ ID NO: 25245 - protein, 7 aa, synthetic construct
IHPTTEI

SEQ ID NO: 25246 - protein, 7 aa, synthetic construct
KLVNAVM

SEQ ID NO: 25247 - protein, 7 aa, synthetic construct
TNITTDK

SEQ ID NO: 25248 - protein, 7 aa, synthetic construct
GMAQALP

SEQ ID NO: 25249 - protein, 7 aa, synthetic construct
QAINMDK

SEQ ID NO: 25250 - protein, 7 aa, synthetic construct
ADHEGVR

SEQ ID NO: 25251 - protein, 7 aa, synthetic construct
RHYDNRN

SEQ ID NO: 25252 - protein, 7 aa, synthetic construct
LRGHITN

SEQ ID NO: 25253 - protein, 7 aa, synthetic construct
SAHFRSA

SEQ ID NO: 25254 - protein, 7 aa, synthetic construct
HEPEKQS

SEQ ID NO: 25255 - protein, 7 aa, synthetic construct
AIGTKNY

SEQ ID NO: 25256 - protein, 7 aa, synthetic construct
TYMAQDE

SEQ ID NO: 25257 - protein, 7 aa, synthetic construct
DDKLRKY

SEQ ID NO: 25258 - protein, 7 aa, synthetic construct
DKTEVLN

SEQ ID NO: 25259 - protein, 7 aa, synthetic construct
TKSQDPF

SEQ ID NO: 25260 - protein, 7 aa, synthetic construct
TDNNTQS

SEQ ID NO: 25261 - protein, 7 aa, synthetic construct
AMEQGTP

SEQ ID NO: 25262 - protein, 7 aa, synthetic construct
IRKIEGY

SEQ ID NO: 25263 - protein, 7 aa, synthetic construct
PPMRVAN

SEQ ID NO: 25264 - protein, 7 aa, synthetic construct
KAEYHTV

SEQ ID NO: 25265 - protein, 7 aa, synthetic construct
TLAYKAH

SEQ ID NO: 25266 - protein, 7 aa, synthetic construct
AMFQKDY

SEQ ID NO: 25267 - protein, 7 aa, synthetic construct
GRVIPPQ

SEQ ID NO: 25268 - protein, 7 aa, synthetic construct
RIDRTDI

SEQ ID NO: 25269 - protein, 7 aa, synthetic construct
VKINNEV

SEQ ID NO: 25270 - protein, 7 aa, synthetic construct
IMYSSQP

SEQ ID NO: 25271 - protein, 7 aa, synthetic construct
KGHTVLV

SEQ ID NO: 25272 - protein, 7 aa, synthetic construct
RWDMNDD

SEQ ID NO: 25273 - protein, 7 aa, synthetic construct
LNTAKVF

SEQ ID NO: 25274 - protein, 7 aa, synthetic construct
KIIPPDG

SEQ ID NO: 25275 - protein, 7 aa, synthetic construct
DEVHRAL

SEQ ID NO: 25276 - protein, 7 aa, synthetic construct
VSHIQHI

SEQ ID NO: 25277 - protein, 7 aa, synthetic construct
HNEEKIG

SEQ ID NO: 25278 - protein, 7 aa, synthetic construct
EKSNMNG

SEQ ID NO: 25279 - protein, 7 aa, synthetic construct
LIKTEKM

SEQ ID NO: 25280 - protein, 7 aa, synthetic construct
DFGISGR

SEQ ID NO: 25281 - protein, 7 aa, synthetic construct
MIPQLRA

SEQ ID NO: 25282 - protein, 7 aa, synthetic construct
VGTPSLV

SEQ ID NO: 25283 - protein, 7 aa, synthetic construct
AHNIAGP

SEQ ID NO: 25284 - protein, 7 aa, synthetic construct
RMSGGPL

SEQ ID NO: 25285 - protein, 7 aa, synthetic construct
QNAQLMH

SEQ ID NO: 25286 - protein, 7 aa, synthetic construct
GDAYKPE

SEQ ID NO: 25287 - protein, 7 aa, synthetic construct
LKETNFA

SEQ ID NO: 25288 - protein, 7 aa, synthetic construct
IMGGDQI

SEQ ID NO: 25289 - protein, 7 aa, synthetic construct
HLMTAGV

SEQ ID NO: 25290 - protein, 7 aa, synthetic construct
RQQWEAT

SEQ ID NO: 25291 - protein, 7 aa, synthetic construct
HAQQSDK

SEQ ID NO: 25292 - protein, 7 aa, synthetic construct
YARTQHI

SEQ ID NO: 25293 - protein, 7 aa, synthetic construct
HVVPYAD

SEQ ID NO: 25294 - protein, 7 aa, synthetic construct
DRNKETR

SEQ ID NO: 25295 - protein, 7 aa, synthetic construct
GTEKDRA

SEQ ID NO: 25296 - protein, 7 aa, synthetic construct
DHVERDF

SEQ ID NO: 25297 - protein, 7 aa, synthetic construct
FQGRLHG

SEQ ID NO: 25298 - protein, 7 aa, synthetic construct
MLGWDNA

SEQ ID NO: 25299 - protein, 7 aa, synthetic construct
VPMAREH

SEQ ID NO: 25300 - protein, 7 aa, synthetic construct
GSHPHHG

SEQ ID NO: 25301 - protein, 7 aa, synthetic construct
DRPQAEV

SEQ ID NO: 25302 - protein, 7 aa, synthetic construct
YNEWKDR

SEQ ID NO: 25303 - protein, 7 aa, synthetic construct
DRVPHEA

SEQ ID NO: 25304 - protein, 7 aa, synthetic construct
NVGHANY

SEQ ID NO: 25305 - protein, 7 aa, synthetic construct
KFDALHS

SEQ ID NO: 25306 - protein, 7 aa, synthetic construct
GYAIHRE

SEQ ID NO: 25307 - protein, 7 aa, synthetic construct
LRTELVV

SEQ ID NO: 25308 - protein, 7 aa, synthetic construct
ANYANTV

SEQ ID NO: 25309 - protein, 7 aa, synthetic construct
SGKTMDE

SEQ ID NO: 25310 - protein, 7 aa, synthetic construct
VMDGTSA

SEQ ID NO: 25311 - protein, 7 aa, synthetic construct
QESGPWS

SEQ ID NO: 25312 - protein, 7 aa, synthetic construct
RFSENLG

SEQ ID NO: 25313 - protein, 7 aa, synthetic construct
WQTASPN

SEQ ID NO: 25314 - protein, 7 aa, synthetic construct
LKAFASM

SEQ ID NO: 25315 - protein, 7 aa, synthetic construct
QMTNLHM

SEQ ID NO: 25316 - protein, 7 aa, synthetic construct
NPRNEWP

SEQ ID NO: 25317 - protein, 7 aa, synthetic construct
MTHEHQD

SEQ ID NO: 25318 - protein, 7 aa, synthetic construct
RKEHTEQ

SEQ ID NO: 25319 - protein, 7 aa, synthetic construct
TWKAPGD

SEQ ID NO: 25320 - protein, 7 aa, synthetic construct
LPVANRM

SEQ ID NO: 25321 - protein, 7 aa, synthetic construct
PNVDGND

SEQ ID NO: 25322 - protein, 7 aa, synthetic construct
GERDMAM

SEQ ID NO: 25323 - protein, 7 aa, synthetic construct
DKQYDQG

SEQ ID NO: 25324 - protein, 7 aa, synthetic construct
FNAVTVV

SEQ ID NO: 25325 - protein, 7 aa, synthetic construct
PATRLVE

SEQ ID NO: 25326 - protein, 7 aa, synthetic construct
VISPNTT

SEQ ID NO: 25327 - protein, 7 aa, synthetic construct
RNTTMFD

SEQ ID NO: 25328 - protein, 7 aa, synthetic construct
KMNALHV

SEQ ID NO: 25329 - protein, 7 aa, synthetic construct
YPSPPVD

SEQ ID NO: 25330 - protein, 7 aa, synthetic construct
QPLAVSR

SEQ ID NO: 25331 - protein, 7 aa, synthetic construct
DKSSHDY

SEQ ID NO: 25332 - protein, 7 aa, synthetic construct
EVMKSEY

SEQ ID NO: 25333 - protein, 7 aa, synthetic construct
YTDNVPT

SEQ ID NO: 25334 - protein, 7 aa, synthetic construct
RAGIKDY

SEQ ID NO: 25335 - protein, 7 aa, synthetic construct
MMQTKLM

SEQ ID NO: 25336 - protein, 7 aa, synthetic construct
PAGESSH

SEQ ID NO: 25337 - protein, 7 aa, synthetic construct
REFKQLD

SEQ ID NO: 25338 - protein, 7 aa, synthetic construct
IGGIDVK

SEQ ID NO: 25339 - protein, 7 aa, synthetic construct
LSHTERN

SEQ ID NO: 25340 - protein, 7 aa, synthetic construct
FLMQNAA

SEQ ID NO: 25341 - protein, 7 aa, synthetic construct
NSGIMLN

SEQ ID NO: 25342 - protein, 7 aa, synthetic construct
LGLITGA

SEQ ID NO: 25343 - protein, 7 aa, synthetic construct
DPFGRDH

SEQ ID NO: 25344 - protein, 7 aa, synthetic construct
VLSQASA

SEQ ID NO: 25345 - protein, 7 aa, synthetic construct
KDVQSLL

SEQ ID NO: 25346 - protein, 7 aa, synthetic construct
VTAPPYK

SEQ ID NO: 25347 - protein, 7 aa, synthetic construct
GDPSAPY

SEQ ID NO: 25348 - protein, 7 aa, synthetic construct
GEASKMT

SEQ ID NO: 25349 - protein, 7 aa, synthetic construct
HEGQWKQ

SEQ ID NO: 25350 - protein, 7 aa, synthetic construct
LKETWRE

SEQ ID NO: 25351 - protein, 7 aa, synthetic construct
IGMQHVM

SEQ ID NO: 25352 - protein, 7 aa, synthetic construct
TVYDRPY

SEQ ID NO: 25353 - protein, 7 aa, synthetic construct
IKEHQMT

SEQ ID NO: 25354 - protein, 7 aa, synthetic construct
IPPLQAN

SEQ ID NO: 25355 - protein, 7 aa, synthetic construct
KPEQPDL

SEQ ID NO: 25356 - protein, 7 aa, synthetic construct
DAQSRPQ

SEQ ID NO: 25357 - protein, 7 aa, synthetic construct
AAQRPQF

SEQ ID NO: 25358 - protein, 7 aa, synthetic construct
EVYRELP

SEQ ID NO: 25359 - protein, 7 aa, synthetic construct
LTERTNL

SEQ ID NO: 25360 - protein, 7 aa, synthetic construct
RGEETEG

SEQ ID NO: 25361 - protein, 7 aa, synthetic construct
KSERHLP

SEQ ID NO: 25362 - protein, 7 aa, synthetic construct
GVSQVMP

SEQ ID NO: 25363 - protein, 7 aa, synthetic construct
LGGTRED

SEQ ID NO: 25364 - protein, 7 aa, synthetic construct
LVRAYPA

SEQ ID NO: 25365 - protein, 7 aa, synthetic construct
VEQVGNI

SEQ ID NO: 25366 - protein, 7 aa, synthetic construct
NIIMPKV

SEQ ID NO: 25367 - protein, 7 aa, synthetic construct
YKPAWEQ

SEQ ID NO: 25368 - protein, 7 aa, synthetic construct
FEHRDYH

SEQ ID NO: 25369 - protein, 7 aa, synthetic construct
AKFSRND

SEQ ID NO: 25370 - protein, 7 aa, synthetic construct
HLHYVED

SEQ ID NO: 25371 - protein, 7 aa, synthetic construct
SKLVQDP

SEQ ID NO: 25372 - protein, 7 aa, synthetic construct
YGHKHAQ

SEQ ID NO: 25373 - protein, 7 aa, synthetic construct
YIEHMVA

SEQ ID NO: 25374 - protein, 7 aa, synthetic construct
MDVLGRS

SEQ ID NO: 25375 - protein, 7 aa, synthetic construct
VMNNPEY

SEQ ID NO: 25376 - protein, 7 aa, synthetic construct
DYTVRST

SEQ ID NO: 25377 - protein, 7 aa, synthetic construct
PSTKFHA

SEQ ID NO: 25378 - protein, 7 aa, synthetic construct
IERAGPG

SEQ ID NO: 25379 - protein, 7 aa, synthetic construct
SPKKLPS

SEQ ID NO: 25380 - protein, 7 aa, synthetic construct
TYMRASD

SEQ ID NO: 25381 - protein, 7 aa, synthetic construct
QKNPVNQ

SEQ ID NO: 25382 - protein, 7 aa, synthetic construct
QIQDTHW

SEQ ID NO: 25383 - protein, 7 aa, synthetic construct
IFRQEHE

SEQ ID NO: 25384 - protein, 7 aa, synthetic construct
PIVGKLG

SEQ ID NO: 25385 - protein, 7 aa, synthetic construct
LSAKHLH

SEQ ID NO: 25386 - protein, 7 aa, synthetic construct
ENYSDVP

SEQ ID NO: 25387 - protein, 7 aa, synthetic construct
ITMQQPS

SEQ ID NO: 25388 - protein, 7 aa, synthetic construct
FHRYKDD

SEQ ID NO: 25389 - protein, 7 aa, synthetic construct
NHEKDAF

SEQ ID NO: 25390 - protein, 7 aa, synthetic construct
IFPNGMN

SEQ ID NO: 25391 - protein, 7 aa, synthetic construct
ANSGGNT

SEQ ID NO: 25392 - protein, 7 aa, synthetic construct
RVNEYIV

SEQ ID NO: 25393 - protein, 7 aa, synthetic construct
DRNLFIE

SEQ ID NO: 25394 - protein, 7 aa, synthetic construct
MDKIKLH

SEQ ID NO: 25395 - protein, 7 aa, synthetic construct
AKHQHQN

SEQ ID NO: 25396 - protein, 7 aa, synthetic construct
PDIHKQA

SEQ ID NO: 25397 - protein, 7 aa, synthetic construct
VKPIGMT

SEQ ID NO: 25398 - protein, 7 aa, synthetic construct
IRNKGPD

SEQ ID NO: 25399 - protein, 7 aa, synthetic construct
FADQRTR

SEQ ID NO: 25400 - protein, 7 aa, synthetic construct
ERQYSNA

SEQ ID NO: 25401 - protein, 7 aa, synthetic construct
LQSMKWN

SEQ ID NO: 25402 - protein, 7 aa, synthetic construct
KQDAHKD

SEQ ID NO: 25403 - protein, 7 aa, synthetic construct
VDYEQER

SEQ ID NO: 25404 - protein, 7 aa, synthetic construct
IYKSEWQ

SEQ ID NO: 25405 - protein, 7 aa, synthetic construct
PSRMNMS

SEQ ID NO: 25406 - protein, 7 aa, synthetic construct
SERGKNS

SEQ ID NO: 25407 - protein, 7 aa, synthetic construct
QTHYDES

SEQ ID NO: 25408 - protein, 7 aa, synthetic construct
KAPQEQF

SEQ ID NO: 25409 - protein, 7 aa, synthetic construct
TEHHWSE

SEQ ID NO: 25410 - protein, 7 aa, synthetic construct
IIHEKLD

SEQ ID NO: 25411 - protein, 7 aa, synthetic construct
VYKAGDM

SEQ ID NO: 25412 - protein, 7 aa, synthetic construct
KSNSLLD

SEQ ID NO: 25413 - protein, 7 aa, synthetic construct
NPGHDNH

SEQ ID NO: 25414 - protein, 7 aa, synthetic construct
HYEMNEL

SEQ ID NO: 25415 - protein, 7 aa, synthetic construct
NHINGHE

SEQ ID NO: 25416 - protein, 7 aa, synthetic construct
NFPKDGQ

SEQ ID NO: 25417 - protein, 7 aa, synthetic construct
SQLTQGW

SEQ ID NO: 25418 - protein, 7 aa, synthetic construct
MMASMSR

SEQ ID NO: 25419 - protein, 7 aa, synthetic construct
APEKPQD

SEQ ID NO: 25420 - protein, 7 aa, synthetic construct
NGMPYGS

SEQ ID NO: 25421 - protein, 7 aa, synthetic construct
SGREEGM

SEQ ID NO: 25422 - protein, 7 aa, synthetic construct
QQRPYGS

SEQ ID NO: 25423 - protein, 7 aa, synthetic construct
AVAQRYS

SEQ ID NO: 25424 - protein, 7 aa, synthetic construct
KHDKKDF

SEQ ID NO: 25425 - protein, 7 aa, synthetic construct
LIGMGAT

SEQ ID NO: 25426 - protein, 7 aa, synthetic construct
PGDNKYK

SEQ ID NO: 25427 - protein, 7 aa, synthetic construct
LQTTHAH

SEQ ID NO: 25428 - protein, 7 aa, synthetic construct
DRASAAS

SEQ ID NO: 25429 - protein, 7 aa, synthetic construct
MGDAQAK

SEQ ID NO: 25430 - protein, 7 aa, synthetic construct
SYRPQMD

SEQ ID NO: 25431 - protein, 7 aa, synthetic construct
VRTDWTA

SEQ ID NO: 25432 - protein, 7 aa, synthetic construct
RDVKDLV

SEQ ID NO: 25433 - protein, 7 aa, synthetic construct
KPISHWE

SEQ ID NO: 25434 - protein, 7 aa, synthetic construct
RNTQNYN

SEQ ID NO: 25435 - protein, 7 aa, synthetic construct
QAKIHML

SEQ ID NO: 25436 - protein, 7 aa, synthetic construct
HMKVDVG

SEQ ID NO: 25437 - protein, 7 aa, synthetic construct
PIPVGNM

SEQ ID NO: 25438 - protein, 7 aa, synthetic construct
ASQWTEG

SEQ ID NO: 25439 - protein, 7 aa, synthetic construct
DHEHTKN

SEQ ID NO: 25440 - protein, 7 aa, synthetic construct
LVGYHSQ

SEQ ID NO: 25441 - protein, 7 aa, synthetic construct
LNKVLMP

SEQ ID NO: 25442 - protein, 7 aa, synthetic construct
QASLKID

SEQ ID NO: 25443 - protein, 7 aa, synthetic construct
DVGFIHP

SEQ ID NO: 25444 - protein, 7 aa, synthetic construct
EGERDGW

SEQ ID NO: 25445 - protein, 7 aa, synthetic construct
PGATQEY

SEQ ID NO: 25446 - protein, 7 aa, synthetic construct
RHGFAGP

SEQ ID NO: 25447 - protein, 7 aa, synthetic construct
IIAGYPT

SEQ ID NO: 25448 - protein, 7 aa, synthetic construct
GQPTMKL

SEQ ID NO: 25449 - protein, 7 aa, synthetic construct
TAHENSE

SEQ ID NO: 25450 - protein, 7 aa, synthetic construct
WGVHPEP

SEQ ID NO: 25451 - protein, 7 aa, synthetic construct
QEKYIHI

SEQ ID NO: 25452 - protein, 7 aa, synthetic construct
RDTPAVP

SEQ ID NO: 25453 - protein, 7 aa, synthetic construct
KRQNQDN

SEQ ID NO: 25454 - protein, 7 aa, synthetic construct
LDPSTFV

SEQ ID NO: 25455 - protein, 7 aa, synthetic construct
YKAIQDP

SEQ ID NO: 25456 - protein, 7 aa, synthetic construct
HQNSYAT

SEQ ID NO: 25457 - protein, 7 aa, synthetic construct
NEVRSEN

SEQ ID NO: 25458 - protein, 7 aa, synthetic construct
NSGYNTS

SEQ ID NO: 25459 - protein, 7 aa, synthetic construct
LNFTVGH

SEQ ID NO: 25460 - protein, 7 aa, synthetic construct
IFSSFKG

SEQ ID NO: 25461 - protein, 7 aa, synthetic construct
HNIDINL

SEQ ID NO: 25462 - protein, 7 aa, synthetic construct
PPNVSML

SEQ ID NO: 25463 - protein, 7 aa, synthetic construct
LPSYKSI

SEQ ID NO: 25464 - protein, 7 aa, synthetic construct
FETTVHI

SEQ ID NO: 25465 - protein, 7 aa, synthetic construct
VAQSAEN

SEQ ID NO: 25466 - protein, 7 aa, synthetic construct
PHTRTLD

SEQ ID NO: 25467 - protein, 7 aa, synthetic construct
EQKNLAR

SEQ ID NO: 25468 - protein, 7 aa, synthetic construct
GDREHAR

SEQ ID NO: 25469 - protein, 7 aa, synthetic construct
AYMTDKP

SEQ ID NO: 25470 - protein, 7 aa, synthetic construct
VQSASWS

SEQ ID NO: 25471 - protein, 7 aa, synthetic construct
RYISNSG

SEQ ID NO: 25472 - protein, 7 aa, synthetic construct
NTDHREM

SEQ ID NO: 25473 - protein, 7 aa, synthetic construct
PLNSSLM

SEQ ID NO: 25474 - protein, 7 aa, synthetic construct
AFNFEKE

SEQ ID NO: 25475 - protein, 7 aa, synthetic construct
PDQPKQR

SEQ ID NO: 25476 - protein, 7 aa, synthetic construct
DSPSIPQ

SEQ ID NO: 25477 - protein, 7 aa, synthetic construct
TRDSWTQ

SEQ ID NO: 25478 - protein, 7 aa, synthetic construct
SHPDGAA

SEQ ID NO: 25479 - protein, 7 aa, synthetic construct
MASGVTH

SEQ ID NO: 25480 - protein, 7 aa, synthetic construct
LGGNLEP

SEQ ID NO: 25481 - protein, 7 aa, synthetic construct
INCKGCM

SEQ ID NO: 25482 - protein, 7 aa, synthetic construct
DQPFKLK

SEQ ID NO: 25483 - protein, 7 aa, synthetic construct
INMSQKM

SEQ ID NO: 25484 - protein, 7 aa, synthetic construct
ADLNHHE

SEQ ID NO: 25485 - protein, 7 aa, synthetic construct
PGAMSKH

SEQ ID NO: 25486 - protein, 7 aa, synthetic construct
PTQQHGI

SEQ ID NO: 25487 - protein, 7 aa, synthetic construct
HFTNRQN

SEQ ID NO: 25488 - protein, 7 aa, synthetic construct
PFVTGGF

SEQ ID NO: 25489 - protein, 7 aa, synthetic construct
GPDPGQW

SEQ ID NO: 25490 - protein, 7 aa, synthetic construct
DVKLMED

SEQ ID NO: 25491 - protein, 7 aa, synthetic construct
LENMHPQ

SEQ ID NO: 25492 - protein, 7 aa, synthetic construct
RITNGVT

SEQ ID NO: 25493 - protein, 7 aa, synthetic construct
FTVSADI

SEQ ID NO: 25494 - protein, 7 aa, synthetic construct
MGATPSK

SEQ ID NO: 25495 - protein, 7 aa, synthetic construct
KEVKDIT

SEQ ID NO: 25496 - protein, 7 aa, synthetic construct
SNKSLLF

SEQ ID NO: 25497 - protein, 7 aa, synthetic construct
GEGVHYK

SEQ ID NO: 25498 - protein, 7 aa, synthetic construct
DFLPPND

SEQ ID NO: 25499 - protein, 7 aa, synthetic construct
GFKPMGD

SEQ ID NO: 25500 - protein, 7 aa, synthetic construct
DNKHSII

SEQ ID NO: 25501 - protein, 7 aa, synthetic construct
VWNDSMS

SEQ ID NO: 25502 - protein, 7 aa, synthetic construct
PYGTSPL

SEQ ID NO: 25503 - protein, 7 aa, synthetic construct
REPITAR

SEQ ID NO: 25504 - protein, 7 aa, synthetic construct
VAEVRNW

SEQ ID NO: 25505 - protein, 7 aa, synthetic construct
RDDQVQA

SEQ ID NO: 25506 - protein, 7 aa, synthetic construct
NDTIKQR

SEQ ID NO: 25507 - protein, 7 aa, synthetic construct
IRDNATH

SEQ ID NO: 25508 - protein, 7 aa, synthetic construct
FQPGETS

SEQ ID NO: 25509 - protein, 7 aa, synthetic construct
KTGRDAW

SEQ ID NO: 25510 - protein, 7 aa, synthetic construct
QVMSAQN

SEQ ID NO: 25511 - protein, 7 aa, synthetic construct
HLIGSDP

SEQ ID NO: 25512 - protein, 7 aa, synthetic construct
DKNESMS

SEQ ID NO: 25513 - protein, 7 aa, synthetic construct
MQQHVTT

SEQ ID NO: 25514 - protein, 7 aa, synthetic construct
IPEVRQQ

SEQ ID NO: 25515 - protein, 7 aa, synthetic construct
IYANDNY

SEQ ID NO: 25516 - protein, 7 aa, synthetic construct
FEVRDLA

SEQ ID NO: 25517 - protein, 7 aa, synthetic construct
MNHNSLH

SEQ ID NO: 25518 - protein, 7 aa, synthetic construct
MQGETHR

SEQ ID NO: 25519 - protein, 7 aa, synthetic construct
DRNTKYI

SEQ ID NO: 25520 - protein, 7 aa, synthetic construct
EYAEVRV

SEQ ID NO: 25521 - protein, 7 aa, synthetic construct
WSNISPA

SEQ ID NO: 25522 - protein, 7 aa, synthetic construct
PVKTHVY

SEQ ID NO: 25523 - protein, 7 aa, synthetic construct
QKLRENM

SEQ ID NO: 25524 - protein, 7 aa, synthetic construct
GHKSQEK

SEQ ID NO: 25525 - protein, 7 aa, synthetic construct
THEPVGY

SEQ ID NO: 25526 - protein, 7 aa, synthetic construct
PLDAGQR

SEQ ID NO: 25527 - protein, 7 aa, synthetic construct
AYDQHHI

SEQ ID NO: 25528 - protein, 7 aa, synthetic construct
VQGSGTS

SEQ ID NO: 25529 - protein, 7 aa, synthetic construct
IVGTGGY

SEQ ID NO: 25530 - protein, 7 aa, synthetic construct
NHHNIKN

SEQ ID NO: 25531 - protein, 7 aa, synthetic construct
AHEMKPP

SEQ ID NO: 25532 - protein, 7 aa, synthetic construct
TTDKTEV

SEQ ID NO: 25533 - protein, 7 aa, synthetic construct
DRNDPQD

SEQ ID NO: 25534 - protein, 7 aa, synthetic construct
VKLEQEW

SEQ ID NO: 25535 - protein, 7 aa, synthetic construct
EGGQSGM

SEQ ID NO: 25536 - protein, 7 aa, synthetic construct
KSPVMPV

SEQ ID NO: 25537 - protein, 7 aa, synthetic construct
AFSVDPK

SEQ ID NO: 25538 - protein, 7 aa, synthetic construct
IPKLNVH

SEQ ID NO: 25539 - protein, 7 aa, synthetic construct
GEPKTPK

SEQ ID NO: 25540 - protein, 7 aa, synthetic construct
KTMREQH

SEQ ID NO: 25541 - protein, 7 aa, synthetic construct
GHGEFVQ

SEQ ID NO: 25542 - protein, 7 aa, synthetic construct
YAPDKVP

SEQ ID NO: 25543 - protein, 7 aa, synthetic construct
DNYDTNR

SEQ ID NO: 25544 - protein, 7 aa, synthetic construct
QQNGSDP

SEQ ID NO: 25545 - protein, 7 aa, synthetic construct
TQYPAVM

SEQ ID NO: 25546 - protein, 7 aa, synthetic construct
RDDVTLA

SEQ ID NO: 25547 - protein, 7 aa, synthetic construct
SNNQMES

SEQ ID NO: 25548 - protein, 7 aa, synthetic construct
NGDVKPN

SEQ ID NO: 25549 - protein, 7 aa, synthetic construct
THVARAM

SEQ ID NO: 25550 - protein, 7 aa, synthetic construct
LNPNGES

SEQ ID NO: 25551 - protein, 7 aa, synthetic construct
WETDGAQ

SEQ ID NO: 25552 - protein, 7 aa, synthetic construct
DQFRNHM

SEQ ID NO: 25553 - protein, 7 aa, synthetic construct
VSQKSTH

SEQ ID NO: 25554 - protein, 7 aa, synthetic construct
QTQSINF

SEQ ID NO: 25555 - protein, 7 aa, synthetic construct
EERNMRS

SEQ ID NO: 25556 - protein, 7 aa, synthetic construct
REDKDVF

SEQ ID NO: 25557 - protein, 7 aa, synthetic construct
PYHKHND

SEQ ID NO: 25558 - protein, 7 aa, synthetic construct
YVAMSAS

SEQ ID NO: 25559 - protein, 7 aa, synthetic construct
TRSDIHI

SEQ ID NO: 25560 - protein, 7 aa, synthetic construct
KDNAMDT

SEQ ID NO: 25561 - protein, 7 aa, synthetic construct
FHNGKEM

SEQ ID NO: 25562 - protein, 7 aa, synthetic construct
WTAIGTD

SEQ ID NO: 25563 - protein, 7 aa, synthetic construct
KQTQAQD

SEQ ID NO: 25564 - protein, 7 aa, synthetic construct
VGEWPDL

SEQ ID NO: 25565 - protein, 7 aa, synthetic construct
YFNDTSM

SEQ ID NO: 25566 - protein, 7 aa, synthetic construct
GTFPGAS

SEQ ID NO: 25567 - protein, 7 aa, synthetic construct
PPRLQSY

SEQ ID NO: 25568 - protein, 7 aa, synthetic construct
SDRNSFE

SEQ ID NO: 25569 - protein, 7 aa, synthetic construct
LSQVPTC

SEQ ID NO: 25570 - protein, 7 aa, synthetic construct
LNQVPAY

SEQ ID NO: 25571 - protein, 7 aa, synthetic construct
RFVDGKA

SEQ ID NO: 25572 - protein, 7 aa, synthetic construct
PMQYPDR

SEQ ID NO: 25573 - protein, 7 aa, synthetic construct
AMYDSQR

SEQ ID NO: 25574 - protein, 7 aa, synthetic construct
KDKHTHQ

SEQ ID NO: 25575 - protein, 7 aa, synthetic construct
QGHPFNA

SEQ ID NO: 25576 - protein, 7 aa, synthetic construct
HYQRTSI

SEQ ID NO: 25577 - protein, 7 aa, synthetic construct
ISEKSGM

SEQ ID NO: 25578 - protein, 7 aa, synthetic construct
DQDSVKS

SEQ ID NO: 25579 - protein, 7 aa, synthetic construct
TEFQDRM

SEQ ID NO: 25580 - protein, 7 aa, synthetic construct
MTEGAQF

SEQ ID NO: 25581 - protein, 7 aa, synthetic construct
MDQRNTV

SEQ ID NO: 25582 - protein, 7 aa, synthetic construct
HIDDKMG

SEQ ID NO: 25583 - protein, 7 aa, synthetic construct
YKATISK

SEQ ID NO: 25584 - protein, 7 aa, synthetic construct
VEGANMA

SEQ ID NO: 25585 - protein, 7 aa, synthetic construct
DKNREDP

SEQ ID NO: 25586 - protein, 7 aa, synthetic construct
ATAPDNS

SEQ ID NO: 25587 - protein, 7 aa, synthetic construct
HLTDLAR

SEQ ID NO: 25588 - protein, 7 aa, synthetic construct
DVNWQKV

SEQ ID NO: 25589 - protein, 7 aa, synthetic construct
YEKETYQ

SEQ ID NO: 25590 - protein, 7 aa, synthetic construct
VNSVHEI

SEQ ID NO: 25591 - protein, 7 aa, synthetic construct
DFDTSKP

SEQ ID NO: 25592 - protein, 7 aa, synthetic construct
QQTYKSN

SEQ ID NO: 25593 - protein, 7 aa, synthetic construct
MGTFGAE

SEQ ID NO: 25594 - protein, 7 aa, synthetic construct
IKGDGVR

SEQ ID NO: 25595 - protein, 7 aa, synthetic construct
GKQMNSN

SEQ ID NO: 25596 - protein, 7 aa, synthetic construct
SPHSMKE

SEQ ID NO: 25597 - protein, 7 aa, synthetic construct
TAGPSEA

SEQ ID NO: 25598 - protein, 7 aa, synthetic construct
ASWGKDP

SEQ ID NO: 25599 - protein, 7 aa, synthetic construct
TNNHLAT

SEQ ID NO: 25600 - protein, 7 aa, synthetic construct
SHHSDAY

SEQ ID NO: 25601 - protein, 7 aa, synthetic construct
LHGKQFS

SEQ ID NO: 25602 - protein, 7 aa, synthetic construct
WTSNDNP

SEQ ID NO: 25603 - protein, 7 aa, synthetic construct
WMGGTGI

SEQ ID NO: 25604 - protein, 7 aa, synthetic construct
TQVTLPN

SEQ ID NO: 25605 - protein, 7 aa, synthetic construct
KSESSPW

SEQ ID NO: 25606 - protein, 7 aa, synthetic construct
KLAMLTN

SEQ ID NO: 25607 - protein, 7 aa, synthetic construct
CRNMCME

SEQ ID NO: 25608 - protein, 7 aa, synthetic construct
EFGQRIP

SEQ ID NO: 25609 - protein, 7 aa, synthetic construct
TSAEFYG

SEQ ID NO: 25610 - protein, 7 aa, synthetic construct
VIYPNDL

SEQ ID NO: 25611 - protein, 7 aa, synthetic construct
VGVEWPI

SEQ ID NO: 25612 - protein, 7 aa, synthetic construct
QEKPFPF

SEQ ID NO: 25613 - protein, 7 aa, synthetic construct
EIEKSTM

SEQ ID NO: 25614 - protein, 7 aa, synthetic construct
AHMRITE

SEQ ID NO: 25615 - protein, 7 aa, synthetic construct
TMEHGFE

SEQ ID NO: 25616 - protein, 7 aa, synthetic construct
PTPNQEA

SEQ ID NO: 25617 - protein, 7 aa, synthetic construct
WRPNEFE

SEQ ID NO: 25618 - protein, 7 aa, synthetic construct
LYGVTNL

SEQ ID NO: 25619 - protein, 7 aa, synthetic construct
KIIGFPD

SEQ ID NO: 25620 - protein, 7 aa, synthetic construct
YQSYTIN

SEQ ID NO: 25621 - protein, 7 aa, synthetic construct
TGNDIGY

SEQ ID NO: 25622 - protein, 7 aa, synthetic construct
YNQHLQK

SEQ ID NO: 25623 - protein, 7 aa, synthetic construct
DINRTSQ

SEQ ID NO: 25624 - protein, 7 aa, synthetic construct
NVPQEVS

SEQ ID NO: 25625 - protein, 7 aa, synthetic construct
HGKNPGA

SEQ ID NO: 25626 - protein, 7 aa, synthetic construct
SPAKGWS

SEQ ID NO: 25627 - protein, 7 aa, synthetic construct
IADYMHD

SEQ ID NO: 25628 - protein, 7 aa, synthetic construct
AMLGQAV

SEQ ID NO: 25629 - protein, 7 aa, synthetic construct
WKAKEER

SEQ ID NO: 25630 - protein, 7 aa, synthetic construct
QKAPPHI

SEQ ID NO: 25631 - protein, 7 aa, synthetic construct
RKANALD

SEQ ID NO: 25632 - protein, 7 aa, synthetic construct
QGGQVDV

SEQ ID NO: 25633 - protein, 7 aa, synthetic construct
GQASKYI

SEQ ID NO: 25634 - protein, 7 aa, synthetic construct
NVNYQHI

SEQ ID NO: 25635 - protein, 7 aa, synthetic construct
SEKHQRM

SEQ ID NO: 25636 - protein, 7 aa, synthetic construct
THRQTAH

SEQ ID NO: 25637 - protein, 7 aa, synthetic construct
ITPMVES

SEQ ID NO: 25638 - protein, 7 aa, synthetic construct
VILGKKE

SEQ ID NO: 25639 - protein, 7 aa, synthetic construct
FQAQKSH

SEQ ID NO: 25640 - protein, 7 aa, synthetic construct
IQFEGHD

SEQ ID NO: 25641 - protein, 7 aa, synthetic construct
SRPFGEN

SEQ ID NO: 25642 - protein, 7 aa, synthetic construct
TWAMAVE

SEQ ID NO: 25643 - protein, 7 aa, synthetic construct
ATRIANS

SEQ ID NO: 25644 - protein, 7 aa, synthetic construct
YHPMMSS

SEQ ID NO: 25645 - protein, 7 aa, synthetic construct
NMGDTIA

SEQ ID NO: 25646 - protein, 7 aa, synthetic construct
PHQYDGS

SEQ ID NO: 25647 - protein, 7 aa, synthetic construct
GYKEITM

SEQ ID NO: 25648 - protein, 7 aa, synthetic construct
YNRVEPE

SEQ ID NO: 25649 - protein, 7 aa, synthetic construct
KQDWGQP

SEQ ID NO: 25650 - protein, 7 aa, synthetic construct
FRQSSMQ

SEQ ID NO: 25651 - protein, 7 aa, synthetic construct
VQSSREI

SEQ ID NO: 25652 - protein, 7 aa, synthetic construct
PQTYPPP

SEQ ID NO: 25653 - protein, 7 aa, synthetic construct
TYDTHNM

SEQ ID NO: 25654 - protein, 7 aa, synthetic construct
TESIKSD

SEQ ID NO: 25655 - protein, 7 aa, synthetic construct
IYQPQDG

SEQ ID NO: 25656 - protein, 7 aa, synthetic construct
DVYQDYD

SEQ ID NO: 25657 - protein, 7 aa, synthetic construct
TINSNGV

SEQ ID NO: 25658 - protein, 7 aa, synthetic construct
DDYPHPV

SEQ ID NO: 25659 - protein, 7 aa, synthetic construct
RIHGEVY

SEQ ID NO: 25660 - protein, 7 aa, synthetic construct
GQHETGR

SEQ ID NO: 25661 - protein, 7 aa, synthetic construct
QVGQPNI

SEQ ID NO: 25662 - protein, 7 aa, synthetic construct
VNAPTEI

SEQ ID NO: 25663 - protein, 7 aa, synthetic construct
TENGHAW

SEQ ID NO: 25664 - protein, 7 aa, synthetic construct
WESWKME

SEQ ID NO: 25665 - protein, 7 aa, synthetic construct
YIQGEFT

SEQ ID NO: 25666 - protein, 7 aa, synthetic construct
FNDPNSY

SEQ ID NO: 25667 - protein, 7 aa, synthetic construct
HQMPSYP

SEQ ID NO: 25668 - protein, 7 aa, synthetic construct
MSEFTNH

SEQ ID NO: 25669 - protein, 7 aa, synthetic construct
LTGRDLG

SEQ ID NO: 25670 - protein, 7 aa, synthetic construct
GPNEVRI

SEQ ID NO: 25671 - protein, 7 aa, synthetic construct
PHTNENF

SEQ ID NO: 25672 - protein, 7 aa, synthetic construct
DYQDYHE

SEQ ID NO: 25673 - protein, 7 aa, synthetic construct
ANEPRLI

SEQ ID NO: 25674 - protein, 7 aa, synthetic construct
PRHQESF

SEQ ID NO: 25675 - protein, 7 aa, synthetic construct
PMPQETA

SEQ ID NO: 25676 - protein, 7 aa, synthetic construct
KFVPDRE

SEQ ID NO: 25677 - protein, 7 aa, synthetic construct
TPPNGMK

SEQ ID NO: 25678 - protein, 7 aa, synthetic construct
YGYRGIA

SEQ ID NO: 25679 - protein, 7 aa, synthetic construct
NHVKWPG

SEQ ID NO: 25680 - protein, 7 aa, synthetic construct
MMDFDKK

SEQ ID NO: 25681 - protein, 7 aa, synthetic construct
GMGKAQW

SEQ ID NO: 25682 - protein, 7 aa, synthetic construct
QPSQTDK

SEQ ID NO: 25683 - protein, 7 aa, synthetic construct
IPRDYKP

SEQ ID NO: 25684 - protein, 7 aa, synthetic construct
WHSDKTT

SEQ ID NO: 25685 - protein, 7 aa, synthetic construct
GGGHIPM

SEQ ID NO: 25686 - protein, 7 aa, synthetic construct
VFGEAMH

SEQ ID NO: 25687 - protein, 7 aa, synthetic construct
SAIPRGI

SEQ ID NO: 25688 - protein, 7 aa, synthetic construct
FARDSEF

SEQ ID NO: 25689 - protein, 7 aa, synthetic construct
TQTDHAS

SEQ ID NO: 25690 - protein, 7 aa, synthetic construct
EINREFI

SEQ ID NO: 25691 - protein, 7 aa, synthetic construct
ELQKMPA

SEQ ID NO: 25692 - protein, 7 aa, synthetic construct
RAEYPQI

SEQ ID NO: 25693 - protein, 7 aa, synthetic construct
IAGKFVT

SEQ ID NO: 25694 - protein, 7 aa, synthetic construct
ETGSSYH

SEQ ID NO: 25695 - protein, 7 aa, synthetic construct
YHSAFPE

SEQ ID NO: 25696 - protein, 7 aa, synthetic construct
HNSKFQA

SEQ ID NO: 25697 - protein, 7 aa, synthetic construct
KVLDAMS

SEQ ID NO: 25698 - protein, 7 aa, synthetic construct
AYKIEIG

SEQ ID NO: 25699 - protein, 7 aa, synthetic construct
FGLREVR

SEQ ID NO: 25700 - protein, 7 aa, synthetic construct
QIADNHP

SEQ ID NO: 25701 - protein, 7 aa, synthetic construct
KQDDKAG

SEQ ID NO: 25702 - protein, 7 aa, synthetic construct
VMVTPDP

SEQ ID NO: 25703 - protein, 7 aa, synthetic construct
DVKSPVL

SEQ ID NO: 25704 - protein, 7 aa, synthetic construct
LEGFQNF

SEQ ID NO: 25705 - protein, 7 aa, synthetic construct
MSGQSQK

SEQ ID NO: 25706 - protein, 7 aa, synthetic construct
FKETAQV

SEQ ID NO: 25707 - protein, 7 aa, synthetic construct
LDVMRQK

SEQ ID NO: 25708 - protein, 7 aa, synthetic construct
AMKIKHD

SEQ ID NO: 25709 - protein, 7 aa, synthetic construct
KSTYHNP

SEQ ID NO: 25710 - protein, 7 aa, synthetic construct
FSTIYPS

SEQ ID NO: 25711 - protein, 7 aa, synthetic construct
REQDKMI

SEQ ID NO: 25712 - protein, 7 aa, synthetic construct
VKEPHLD

SEQ ID NO: 25713 - protein, 7 aa, synthetic construct
TAFHHID

SEQ ID NO: 25714 - protein, 7 aa, synthetic construct
GIQIDGK

SEQ ID NO: 25715 - protein, 7 aa, synthetic construct
KEGRVHD

SEQ ID NO: 25716 - protein, 7 aa, synthetic construct
FSQVVTG

SEQ ID NO: 25717 - protein, 7 aa, synthetic construct
TEPKGNL

SEQ ID NO: 25718 - protein, 7 aa, synthetic construct
LQIPPQS

SEQ ID NO: 25719 - protein, 7 aa, synthetic construct
PVHASAM

SEQ ID NO: 25720 - protein, 7 aa, synthetic construct
QGHTVFI

SEQ ID NO: 25721 - protein, 7 aa, synthetic construct
IDFNGTP

SEQ ID NO: 25722 - protein, 7 aa, synthetic construct
QWDAEHS

SEQ ID NO: 25723 - protein, 7 aa, synthetic construct
DAGQTWS

SEQ ID NO: 25724 - protein, 7 aa, synthetic construct
DDHEYKE

SEQ ID NO: 25725 - protein, 7 aa, synthetic construct
GMETPTN

SEQ ID NO: 25726 - protein, 7 aa, synthetic construct
TSINETK

SEQ ID NO: 25727 - protein, 7 aa, synthetic construct
ASQYNDG

SEQ ID NO: 25728 - protein, 7 aa, synthetic construct
EGNRDEI

SEQ ID NO: 25729 - protein, 7 aa, synthetic construct
SIANKMI

SEQ ID NO: 25730 - protein, 7 aa, synthetic construct
SQNKSYE

SEQ ID NO: 25731 - protein, 7 aa, synthetic construct
ITPKNEK

SEQ ID NO: 25732 - protein, 7 aa, synthetic construct
IDKMDYA

SEQ ID NO: 25733 - protein, 7 aa, synthetic construct
SWKEGHE

SEQ ID NO: 25734 - protein, 7 aa, synthetic construct
ADAFHTP

SEQ ID NO: 25735 - protein, 7 aa, synthetic construct
LQVPGQS

SEQ ID NO: 25736 - protein, 7 aa, synthetic construct
EKVDPQS

SEQ ID NO: 25737 - protein, 7 aa, synthetic construct
NVADIKP

SEQ ID NO: 25738 - protein, 7 aa, synthetic construct
NQAKDAY

SEQ ID NO: 25739 - protein, 7 aa, synthetic construct
HFSSHNH

SEQ ID NO: 25740 - protein, 7 aa, synthetic construct
FQGYGSI

SEQ ID NO: 25741 - protein, 7 aa, synthetic construct
DVDKMKH

SEQ ID NO: 25742 - protein, 7 aa, synthetic construct
QFRDISD

SEQ ID NO: 25743 - protein, 7 aa, synthetic construct
LGVGGLG

SEQ ID NO: 25744 - protein, 7 aa, synthetic construct
QKDLIPS

SEQ ID NO: 25745 - protein, 7 aa, synthetic construct
RVEPQNP

SEQ ID NO: 25746 - protein, 7 aa, synthetic construct
ISSQLTN

SEQ ID NO: 25747 - protein, 7 aa, synthetic construct
EKFHTHS

SEQ ID NO: 25748 - protein, 7 aa, synthetic construct
TEPRHLE

SEQ ID NO: 25749 - protein, 7 aa, synthetic construct
LGMPNEH

SEQ ID NO: 25750 - protein, 7 aa, synthetic construct
KNRDGQC

SEQ ID NO: 25751 - protein, 7 aa, synthetic construct
VVKIKDI

SEQ ID NO: 25752 - protein, 7 aa, synthetic construct
PQSAADA

SEQ ID NO: 25753 - protein, 7 aa, synthetic construct
SPAESQA

SEQ ID NO: 25754 - protein, 7 aa, synthetic construct
SKFQEGF

SEQ ID NO: 25755 - protein, 7 aa, synthetic construct
GASGILH

SEQ ID NO: 25756 - protein, 7 aa, synthetic construct
ASFGQTS

SEQ ID NO: 25757 - protein, 7 aa, synthetic construct
WHMKPGA

SEQ ID NO: 25758 - protein, 7 aa, synthetic construct
LVQNFNA

SEQ ID NO: 25759 - protein, 7 aa, synthetic construct
DQQASFA

SEQ ID NO: 25760 - protein, 7 aa, synthetic construct
GREAEQG

SEQ ID NO: 25761 - protein, 7 aa, synthetic construct
YPIYHQD

SEQ ID NO: 25762 - protein, 7 aa, synthetic construct
FEMHPTG

SEQ ID NO: 25763 - protein, 7 aa, synthetic construct
YVPAYQA

SEQ ID NO: 25764 - protein, 7 aa, synthetic construct
GTHDSIN

SEQ ID NO: 25765 - protein, 7 aa, synthetic construct
AVTMPEH

SEQ ID NO: 25766 - protein, 7 aa, synthetic construct
ERHETPM

SEQ ID NO: 25767 - protein, 7 aa, synthetic construct
DSQSLTS

SEQ ID NO: 25768 - protein, 7 aa, synthetic construct
QSAYTHQ

SEQ ID NO: 25769 - protein, 7 aa, synthetic construct
RNKNDMP

SEQ ID NO: 25770 - protein, 7 aa, synthetic construct
SGLEGRG

SEQ ID NO: 25771 - protein, 7 aa, synthetic construct
RREQAFE

SEQ ID NO: 25772 - protein, 7 aa, synthetic construct
SIQPQDG

SEQ ID NO: 25773 - protein, 7 aa, synthetic construct
WSANSRL

SEQ ID NO: 25774 - protein, 7 aa, synthetic construct
FASQYKM

SEQ ID NO: 25775 - protein, 7 aa, synthetic construct
REPVQGE

SEQ ID NO: 25776 - protein, 7 aa, synthetic construct
GVQTLNV

SEQ ID NO: 25777 - protein, 7 aa, synthetic construct
ISENHRE

SEQ ID NO: 25778 - protein, 7 aa, synthetic construct
EMKSMQR

SEQ ID NO: 25779 - protein, 7 aa, synthetic construct
GFHRITA

SEQ ID NO: 25780 - protein, 7 aa, synthetic construct
NDHGSPQ

SEQ ID NO: 25781 - protein, 7 aa, synthetic construct
WDGHGKT

SEQ ID NO: 25782 - protein, 7 aa, synthetic construct
GFGEGLP

SEQ ID NO: 25783 - protein, 7 aa, synthetic construct
QGKVSLY

SEQ ID NO: 25784 - protein, 7 aa, synthetic construct
HIVNIRE

SEQ ID NO: 25785 - protein, 7 aa, synthetic construct
IYNAIDP

SEQ ID NO: 25786 - protein, 7 aa, synthetic construct
QHAAQDP

SEQ ID NO: 25787 - protein, 7 aa, synthetic construct
SSQIIQE

SEQ ID NO: 25788 - protein, 7 aa, synthetic construct
QQHTTLK

SEQ ID NO: 25789 - protein, 7 aa, synthetic construct
FRQDFAN

SEQ ID NO: 25790 - protein, 7 aa, synthetic construct
RMDIRSH

SEQ ID NO: 25791 - protein, 7 aa, synthetic construct
EFPSKTS

SEQ ID NO: 25792 - protein, 7 aa, synthetic construct
TFTARTI

SEQ ID NO: 25793 - protein, 7 aa, synthetic construct
QGKNPAF

SEQ ID NO: 25794 - protein, 7 aa, synthetic construct
GVWGNNH

SEQ ID NO: 25795 - protein, 7 aa, synthetic construct
TFNYAGG

SEQ ID NO: 25796 - protein, 7 aa, synthetic construct
DNTAAYR

SEQ ID NO: 25797 - protein, 7 aa, synthetic construct
KEIQFDG

SEQ ID NO: 25798 - protein, 7 aa, synthetic construct
VNYATQK

SEQ ID NO: 25799 - protein, 7 aa, synthetic construct
PWALREA

SEQ ID NO: 25800 - protein, 7 aa, synthetic construct
LNNPQQM

SEQ ID NO: 25801 - protein, 7 aa, synthetic construct
VLGLALP

SEQ ID NO: 25802 - protein, 7 aa, synthetic construct
MKTIDGG

SEQ ID NO: 25803 - protein, 7 aa, synthetic construct
VPNILRG

SEQ ID NO: 25804 - protein, 7 aa, synthetic construct
GFHGKNT

SEQ ID NO: 25805 - protein, 7 aa, synthetic construct
PARSDPD

SEQ ID NO: 25806 - protein, 7 aa, synthetic construct
PQSYRAE

SEQ ID NO: 25807 - protein, 7 aa, synthetic construct
ANPHERF

SEQ ID NO: 25808 - protein, 7 aa, synthetic construct
DHHYPSA

SEQ ID NO: 25809 - protein, 7 aa, synthetic construct
RAAPFTQ

SEQ ID NO: 25810 - protein, 7 aa, synthetic construct
TRLQGYT

SEQ ID NO: 25811 - protein, 7 aa, synthetic construct
TQPVQML

SEQ ID NO: 25812 - protein, 7 aa, synthetic construct
VAEYRPQ

SEQ ID NO: 25813 - protein, 7 aa, synthetic construct
QVPNQGV

SEQ ID NO: 25814 - protein, 7 aa, synthetic construct
ATSMAQE

SEQ ID NO: 25815 - protein, 7 aa, synthetic construct
LWNMDRP

SEQ ID NO: 25816 - protein, 7 aa, synthetic construct
VFKDEGV

SEQ ID NO: 25817 - protein, 7 aa, synthetic construct
QWDHSTE

SEQ ID NO: 25818 - protein, 7 aa, synthetic construct
ENAFIHP

SEQ ID NO: 25819 - protein, 7 aa, synthetic construct
PVDTKHP

SEQ ID NO: 25820 - protein, 7 aa, synthetic construct
ITGPGRT

SEQ ID NO: 25821 - protein, 7 aa, synthetic construct
MANQIHI

SEQ ID NO: 25822 - protein, 7 aa, synthetic construct
RDAIEEY

SEQ ID NO: 25823 - protein, 7 aa, synthetic construct
KSSYPEN

SEQ ID NO: 25824 - protein, 7 aa, synthetic construct
THFAVEH

SEQ ID NO: 25825 - protein, 7 aa, synthetic construct
YRTPEEV

SEQ ID NO: 25826 - protein, 7 aa, synthetic construct
TVLNPVN

SEQ ID NO: 25827 - protein, 7 aa, synthetic construct
GRDQLAI

SEQ ID NO: 25828 - protein, 7 aa, synthetic construct
QIMMNEP

SEQ ID NO: 25829 - protein, 7 aa, synthetic construct
KFAMGPI

SEQ ID NO: 25830 - protein, 7 aa, synthetic construct
QEAHQHD

SEQ ID NO: 25831 - protein, 7 aa, synthetic construct
KHSDENP

SEQ ID NO: 25832 - protein, 7 aa, synthetic construct
PMNMHQV

SEQ ID NO: 25833 - protein, 7 aa, synthetic construct
KSLAYME

SEQ ID NO: 25834 - protein, 7 aa, synthetic construct
GYYHNSD

SEQ ID NO: 25835 - protein, 7 aa, synthetic construct
HPGEQMF

SEQ ID NO: 25836 - protein, 7 aa, synthetic construct
IKDGDQP

SEQ ID NO: 25837 - protein, 7 aa, synthetic construct
HIMGALN

SEQ ID NO: 25838 - protein, 7 aa, synthetic construct
HNATANP

SEQ ID NO: 25839 - protein, 7 aa, synthetic construct
SSNSHLK

SEQ ID NO: 25840 - protein, 7 aa, synthetic construct
SGTSAVF

SEQ ID NO: 25841 - protein, 7 aa, synthetic construct
NSTIDIA

SEQ ID NO: 25842 - protein, 7 aa, synthetic construct
QDGHMLS

SEQ ID NO: 25843 - protein, 7 aa, synthetic construct
TGFESKY

SEQ ID NO: 25844 - protein, 7 aa, synthetic construct
VPNRSGW

SEQ ID NO: 25845 - protein, 7 aa, synthetic construct
TQREPSY

SEQ ID NO: 25846 - protein, 7 aa, synthetic construct
PKDMSFN

SEQ ID NO: 25847 - protein, 7 aa, synthetic construct
QGETRVE

SEQ ID NO: 25848 - protein, 7 aa, synthetic construct
ITDNSRY

SEQ ID NO: 25849 - protein, 7 aa, synthetic construct
PSFTDPK

SEQ ID NO: 25850 - protein, 7 aa, synthetic construct
DFPDHNP

SEQ ID NO: 25851 - protein, 7 aa, synthetic construct
GEYGLPQ

SEQ ID NO: 25852 - protein, 7 aa, synthetic construct
NEDHRTK

SEQ ID NO: 25853 - protein, 7 aa, synthetic construct
LVYRDTV

SEQ ID NO: 25854 - protein, 7 aa, synthetic construct
HRNTAPI

SEQ ID NO: 25855 - protein, 7 aa, synthetic construct
GHAPEVS

SEQ ID NO: 25856 - protein, 7 aa, synthetic construct
KNPEGQN

SEQ ID NO: 25857 - protein, 7 aa, synthetic construct
SEHVNKE

SEQ ID NO: 25858 - protein, 7 aa, synthetic construct
KDKGESR

SEQ ID NO: 25859 - protein, 7 aa, synthetic construct
GPTAAFK

SEQ ID NO: 25860 - protein, 7 aa, synthetic construct
LFKGAFS

SEQ ID NO: 25861 - protein, 7 aa, synthetic construct
FGPTVAG

SEQ ID NO: 25862 - protein, 7 aa, synthetic construct
IEVGNQR

SEQ ID NO: 25863 - protein, 7 aa, synthetic construct
QIGHLNK

SEQ ID NO: 25864 - protein, 7 aa, synthetic construct
EKIYNAR

SEQ ID NO: 25865 - protein, 7 aa, synthetic construct
QMMQKFD

SEQ ID NO: 25866 - protein, 7 aa, synthetic construct
TQYETAA

SEQ ID NO: 25867 - protein, 7 aa, synthetic construct
ILNMHPQ

SEQ ID NO: 25868 - protein, 7 aa, synthetic construct
FHVEKLA

SEQ ID NO: 25869 - protein, 7 aa, synthetic construct
MAIQEKP

SEQ ID NO: 25870 - protein, 7 aa, synthetic construct
HVHQLQP

SEQ ID NO: 25871 - protein, 7 aa, synthetic construct
MIVPEGN

SEQ ID NO: 25872 - protein, 7 aa, synthetic construct
SGSKLVQ

SEQ ID NO: 25873 - protein, 7 aa, synthetic construct
SDKKVLH

SEQ ID NO: 25874 - protein, 7 aa, synthetic construct
MTGMMEP

SEQ ID NO: 25875 - protein, 7 aa, synthetic construct
TGPNLMA

SEQ ID NO: 25876 - protein, 7 aa, synthetic construct
VHEAYHP

SEQ ID NO: 25877 - protein, 7 aa, synthetic construct
RIPNDML

SEQ ID NO: 25878 - protein, 7 aa, synthetic construct
PDRDEHH

SEQ ID NO: 25879 - protein, 7 aa, synthetic construct
DHNTRSV

SEQ ID NO: 25880 - protein, 7 aa, synthetic construct
KVVTENQ

SEQ ID NO: 25881 - protein, 7 aa, synthetic construct
EQRAPMG

SEQ ID NO: 25882 - protein, 7 aa, synthetic construct
LHHDPYP

SEQ ID NO: 25883 - protein, 7 aa, synthetic construct
MITSHAP

SEQ ID NO: 25884 - protein, 7 aa, synthetic construct
VKYYEQD

SEQ ID NO: 25885 - protein, 7 aa, synthetic construct
FNQIIDP

SEQ ID NO: 25886 - protein, 7 aa, synthetic construct
SASKDGF

SEQ ID NO: 25887 - protein, 7 aa, synthetic construct
AGHKQHI

SEQ ID NO: 25888 - protein, 7 aa, synthetic construct
TVQMGSF

SEQ ID NO: 25889 - protein, 7 aa, synthetic construct
HFQRPDD

SEQ ID NO: 25890 - protein, 7 aa, synthetic construct
EHHGIND

SEQ ID NO: 25891 - protein, 7 aa, synthetic construct
ATHLGNS

SEQ ID NO: 25892 - protein, 7 aa, synthetic construct
TAYASGT

SEQ ID NO: 25893 - protein, 7 aa, synthetic construct
TGEDMRF

SEQ ID NO: 25894 - protein, 7 aa, synthetic construct
IGQERHR

SEQ ID NO: 25895 - protein, 7 aa, synthetic construct
TAPTDTN

SEQ ID NO: 25896 - protein, 7 aa, synthetic construct
TFNKAPF

SEQ ID NO: 25897 - protein, 7 aa, synthetic construct
AAMMKPP

SEQ ID NO: 25898 - protein, 7 aa, synthetic construct
MHAVPKD

SEQ ID NO: 25899 - protein, 7 aa, synthetic construct
GSGTVGM

SEQ ID NO: 25900 - protein, 7 aa, synthetic construct
ASPVYHM

SEQ ID NO: 25901 - protein, 7 aa, synthetic construct
EPTKALF

SEQ ID NO: 25902 - protein, 7 aa, synthetic construct
RDNLHPV

SEQ ID NO: 25903 - protein, 7 aa, synthetic construct
FGIIQVE

SEQ ID NO: 25904 - protein, 7 aa, synthetic construct
QEMHQQM

SEQ ID NO: 25905 - protein, 7 aa, synthetic construct
VLAKEEF

SEQ ID NO: 25906 - protein, 7 aa, synthetic construct
NSASDKY

SEQ ID NO: 25907 - protein, 7 aa, synthetic construct
FKEWPAE

SEQ ID NO: 25908 - protein, 7 aa, synthetic construct
TVPQALE

SEQ ID NO: 25909 - protein, 7 aa, synthetic construct
QGQMMEH

SEQ ID NO: 25910 - protein, 7 aa, synthetic construct
WGHQAPA

SEQ ID NO: 25911 - protein, 7 aa, synthetic construct
GHNPVSM

SEQ ID NO: 25912 - protein, 7 aa, synthetic construct
HRQQVVS

SEQ ID NO: 25913 - protein, 7 aa, synthetic construct
LSPSPTK

SEQ ID NO: 25914 - protein, 7 aa, synthetic construct
YHVPEDP

SEQ ID NO: 25915 - protein, 7 aa, synthetic construct
TVHLAAM

SEQ ID NO: 25916 - protein, 7 aa, synthetic construct
SHLATNH

SEQ ID NO: 25917 - protein, 7 aa, synthetic construct
NVTHEFM

SEQ ID NO: 25918 - protein, 7 aa, synthetic construct
TARGMQY

SEQ ID NO: 25919 - protein, 7 aa, synthetic construct
SYDTDQG

SEQ ID NO: 25920 - protein, 7 aa, synthetic construct
CGRTQGV

SEQ ID NO: 25921 - protein, 7 aa, synthetic construct
MGNHRLT

SEQ ID NO: 25922 - protein, 7 aa, synthetic construct
MIRQESH

SEQ ID NO: 25923 - protein, 7 aa, synthetic construct
FAVDPQM

SEQ ID NO: 25924 - protein, 7 aa, synthetic construct
MFPTQPH

SEQ ID NO: 25925 - protein, 7 aa, synthetic construct
ISSKIDD

SEQ ID NO: 25926 - protein, 7 aa, synthetic construct
DPANKVD

SEQ ID NO: 25927 - protein, 7 aa, synthetic construct
IEQANMP

SEQ ID NO: 25928 - protein, 7 aa, synthetic construct
HSTSRGS

SEQ ID NO: 25929 - protein, 7 aa, synthetic construct
VKLLPKL

SEQ ID NO: 25930 - protein, 7 aa, synthetic construct
SIMPAST

SEQ ID NO: 25931 - protein, 7 aa, synthetic construct
DKIIQIK

SEQ ID NO: 25932 - protein, 7 aa, synthetic construct
DIPHNTA

SEQ ID NO: 25933 - protein, 7 aa, synthetic construct
VAPSKLA

SEQ ID NO: 25934 - protein, 7 aa, synthetic construct
WYQNAQA

SEQ ID NO: 25935 - protein, 7 aa, synthetic construct
FRVDTGI

SEQ ID NO: 25936 - protein, 7 aa, synthetic construct
HETLTYV

SEQ ID NO: 25937 - protein, 7 aa, synthetic construct
LKGAMIP

SEQ ID NO: 25938 - protein, 7 aa, synthetic construct
NFSPADE

SEQ ID NO: 25939 - protein, 7 aa, synthetic construct
MHDKSMI

SEQ ID NO: 25940 - protein, 7 aa, synthetic construct
DRYTRLA

SEQ ID NO: 25941 - protein, 7 aa, synthetic construct
MRQEHHT

SEQ ID NO: 25942 - protein, 7 aa, synthetic construct
VDYPHRL

SEQ ID NO: 25943 - protein, 7 aa, synthetic construct
ISQPMSL

SEQ ID NO: 25944 - protein, 7 aa, synthetic construct
TEKRSHV

SEQ ID NO: 25945 - protein, 7 aa, synthetic construct
TYKANFS

SEQ ID NO: 25946 - protein, 7 aa, synthetic construct
NMGVGTQ

SEQ ID NO: 25947 - protein, 7 aa, synthetic construct
INGIPMR

SEQ ID NO: 25948 - protein, 7 aa, synthetic construct
KTTVYID

SEQ ID NO: 25949 - protein, 7 aa, synthetic construct
VVKREHF

SEQ ID NO: 25950 - protein, 7 aa, synthetic construct
HDLHGRL

SEQ ID NO: 25951 - protein, 7 aa, synthetic construct
GMVQWKD

SEQ ID NO: 25952 - protein, 7 aa, synthetic construct
PHEQEMR

SEQ ID NO: 25953 - protein, 7 aa, synthetic construct
MLHGGQW

SEQ ID NO: 25954 - protein, 7 aa, synthetic construct
KGKFNND

SEQ ID NO: 25955 - protein, 7 aa, synthetic construct
HPRRVDL

SEQ ID NO: 25956 - protein, 7 aa, synthetic construct
FTPNVAK

SEQ ID NO: 25957 - protein, 7 aa, synthetic construct
KKHDFAE

SEQ ID NO: 25958 - protein, 7 aa, synthetic construct
YAIIHEG

SEQ ID NO: 25959 - protein, 7 aa, synthetic construct
SGDHPET

SEQ ID NO: 25960 - protein, 7 aa, synthetic construct
IQIKDEM

SEQ ID NO: 25961 - protein, 7 aa, synthetic construct
PQAVVVD

SEQ ID NO: 25962 - protein, 7 aa, synthetic construct
HNQELEK

SEQ ID NO: 25963 - protein, 7 aa, synthetic construct
EPRIYAK

SEQ ID NO: 25964 - protein, 7 aa, synthetic construct
LTSINTT

SEQ ID NO: 25965 - protein, 7 aa, synthetic construct
YDDKKGF

SEQ ID NO: 25966 - protein, 7 aa, synthetic construct
YVNNEQM

SEQ ID NO: 25967 - protein, 7 aa, synthetic construct
EHRHTTP

SEQ ID NO: 25968 - protein, 7 aa, synthetic construct
NIGEDKA

SEQ ID NO: 25969 - protein, 7 aa, synthetic construct
FLGNINP

SEQ ID NO: 25970 - protein, 7 aa, synthetic construct
SERTLAI

SEQ ID NO: 25971 - protein, 7 aa, synthetic construct
QNEYHHR

SEQ ID NO: 25972 - protein, 7 aa, synthetic construct
VAQDQQL

SEQ ID NO: 25973 - protein, 7 aa, synthetic construct
EDGKGTP

SEQ ID NO: 25974 - protein, 7 aa, synthetic construct
DSRDNQE

SEQ ID NO: 25975 - protein, 7 aa, synthetic construct
EPTQPFN

SEQ ID NO: 25976 - protein, 7 aa, synthetic construct
EKANTEA

SEQ ID NO: 25977 - protein, 7 aa, synthetic construct
SIRPQDS

SEQ ID NO: 25978 - protein, 7 aa, synthetic construct
VTWQGDR

SEQ ID NO: 25979 - protein, 7 aa, synthetic construct
RKMEHLI

SEQ ID NO: 25980 - protein, 7 aa, synthetic construct
QREDQLT

SEQ ID NO: 25981 - protein, 7 aa, synthetic construct
DKNDKKN

SEQ ID NO: 25982 - protein, 7 aa, synthetic construct
NYEDSKA

SEQ ID NO: 25983 - protein, 7 aa, synthetic construct
DNVSRQV

SEQ ID NO: 25984 - protein, 7 aa, synthetic construct
IQGFLEP

SEQ ID NO: 25985 - protein, 7 aa, synthetic construct
NTNVAPY

SEQ ID NO: 25986 - protein, 7 aa, synthetic construct
FDMASGR

SEQ ID NO: 25987 - protein, 7 aa, synthetic construct
IITRIRE

SEQ ID NO: 25988 - protein, 7 aa, synthetic construct
IQYVPHE

SEQ ID NO: 25989 - protein, 7 aa, synthetic construct
TQGINMP

SEQ ID NO: 25990 - protein, 7 aa, synthetic construct
EYAAQKE

SEQ ID NO: 25991 - protein, 7 aa, synthetic construct
TSHGIDK

SEQ ID NO: 25992 - protein, 7 aa, synthetic construct
LDSKSMG

SEQ ID NO: 25993 - protein, 7 aa, synthetic construct
GTPHRVH

SEQ ID NO: 25994 - protein, 7 aa, synthetic construct
QAGTLAW

SEQ ID NO: 25995 - protein, 7 aa, synthetic construct
SQDQLRV

SEQ ID NO: 25996 - protein, 7 aa, synthetic construct
YESQNEF

SEQ ID NO: 25997 - protein, 7 aa, synthetic construct
SNMQMQS

SEQ ID NO: 25998 - protein, 7 aa, synthetic construct
QGKKSDP

SEQ ID NO: 25999 - protein, 7 aa, synthetic construct
SIAIKLS

SEQ ID NO: 26000 - protein, 7 aa, synthetic construct
VSDIGRQ

SEQ ID NO: 26001 - protein, 7 aa, synthetic construct
NVNGSAP

SEQ ID NO: 26002 - protein, 7 aa, synthetic construct
IQGWEAT

SEQ ID NO: 26003 - protein, 7 aa, synthetic construct
EHIQRQE

SEQ ID NO: 26004 - protein, 7 aa, synthetic construct
VVTRDVI

SEQ ID NO: 26005 - protein, 7 aa, synthetic construct
PKSYGMD

SEQ ID NO: 26006 - protein, 7 aa, synthetic construct
TISPIQM

SEQ ID NO: 26007 - protein, 7 aa, synthetic construct
YVPNKIY

SEQ ID NO: 26008 - protein, 7 aa, synthetic construct
EFGPEVQ

SEQ ID NO: 26009 - protein, 7 aa, synthetic construct
FKFPKPE

SEQ ID NO: 26010 - protein, 7 aa, synthetic construct
NNHSGEI

SEQ ID NO: 26011 - protein, 7 aa, synthetic construct
FTDKEGH

SEQ ID NO: 26012 - protein, 7 aa, synthetic construct
LREIAYH

SEQ ID NO: 26013 - protein, 7 aa, synthetic construct
VQPMMRV

SEQ ID NO: 26014 - protein, 7 aa, synthetic construct
TVLNTQM

SEQ ID NO: 26015 - protein, 7 aa, synthetic construct
MSNFDQV

SEQ ID NO: 26016 - protein, 7 aa, synthetic construct
WFKDVTS

SEQ ID NO: 26017 - protein, 7 aa, synthetic construct
WGHDGIT

SEQ ID NO: 26018 - protein, 7 aa, synthetic construct
VPHKFTP

SEQ ID NO: 26019 - protein, 7 aa, synthetic construct
SFPPITA

SEQ ID NO: 26020 - protein, 7 aa, synthetic construct
GQDLNKR

SEQ ID NO: 26021 - protein, 7 aa, synthetic construct
VSWGEKT

SEQ ID NO: 26022 - protein, 7 aa, synthetic construct
IPFQEQM

SEQ ID NO: 26023 - protein, 7 aa, synthetic construct
FQDPTTP

SEQ ID NO: 26024 - protein, 7 aa, synthetic construct
VGNDRQV

SEQ ID NO: 26025 - protein, 7 aa, synthetic construct
HTEDAFR

SEQ ID NO: 26026 - protein, 7 aa, synthetic construct
IAGSYID

SEQ ID NO: 26027 - protein, 7 aa, synthetic construct
KPDVGAI

SEQ ID NO: 26028 - protein, 7 aa, synthetic construct
HVGVYEG

SEQ ID NO: 26029 - protein, 7 aa, synthetic construct
DGLGQAR

SEQ ID NO: 26030 - protein, 7 aa, synthetic construct
NVGGFNN

SEQ ID NO: 26031 - protein, 7 aa, synthetic construct
QNDNSVY

SEQ ID NO: 26032 - protein, 7 aa, synthetic construct
FARQNHQ

SEQ ID NO: 26033 - protein, 7 aa, synthetic construct
HRAVNGY

SEQ ID NO: 26034 - protein, 7 aa, synthetic construct
AGNSLMA

SEQ ID NO: 26035 - protein, 7 aa, synthetic construct
VVERLHA

SEQ ID NO: 26036 - protein, 7 aa, synthetic construct
EFGRINT

SEQ ID NO: 26037 - protein, 7 aa, synthetic construct
YRDTSAM

SEQ ID NO: 26038 - protein, 7 aa, synthetic construct
KNDADLM

SEQ ID NO: 26039 - protein, 7 aa, synthetic construct
VNRTATY

SEQ ID NO: 26040 - protein, 7 aa, synthetic construct
PLPTNGK

SEQ ID NO: 26041 - protein, 7 aa, synthetic construct
PTAIGLS

SEQ ID NO: 26042 - protein, 7 aa, synthetic construct
DSGAEAP

SEQ ID NO: 26043 - protein, 7 aa, synthetic construct
VNPMHEI

SEQ ID NO: 26044 - protein, 7 aa, synthetic construct
SDLRSIT

SEQ ID NO: 26045 - protein, 7 aa, synthetic construct
DRQSIND

SEQ ID NO: 26046 - protein, 7 aa, synthetic construct
AQHMNMP

SEQ ID NO: 26047 - protein, 7 aa, synthetic construct
KTHDQDW

SEQ ID NO: 26048 - protein, 7 aa, synthetic construct
VYTHNNI

SEQ ID NO: 26049 - protein, 7 aa, synthetic construct
MEQKRFN

SEQ ID NO: 26050 - protein, 7 aa, synthetic construct
AKDANED

SEQ ID NO: 26051 - protein, 7 aa, synthetic construct
VLQGNVN

SEQ ID NO: 26052 - protein, 7 aa, synthetic construct
TALDHHM

SEQ ID NO: 26053 - protein, 7 aa, synthetic construct
ANKDATN

SEQ ID NO: 26054 - protein, 7 aa, synthetic construct
NVETRNI

SEQ ID NO: 26055 - protein, 7 aa, synthetic construct
NVPDTAD

SEQ ID NO: 26056 - protein, 7 aa, synthetic construct
RGDNSDH

SEQ ID NO: 26057 - protein, 7 aa, synthetic construct
PHIYEKV

SEQ ID NO: 26058 - protein, 7 aa, synthetic construct
EGYGGQA

SEQ ID NO: 26059 - protein, 7 aa, synthetic construct
LPKPEME

SEQ ID NO: 26060 - protein, 7 aa, synthetic construct
GFHREMS

SEQ ID NO: 26061 - protein, 7 aa, synthetic construct
GPMGSYE

SEQ ID NO: 26062 - protein, 7 aa, synthetic construct
GPIIDKW

SEQ ID NO: 26063 - protein, 7 aa, synthetic construct
LVYEPKS

SEQ ID NO: 26064 - protein, 7 aa, synthetic construct
EPKYGLH

SEQ ID NO: 26065 - protein, 7 aa, synthetic construct
HDYIMTA

SEQ ID NO: 26066 - protein, 7 aa, synthetic construct
GVNPMNR

SEQ ID NO: 26067 - protein, 7 aa, synthetic construct
YAHSIRT

SEQ ID NO: 26068 - protein, 7 aa, synthetic construct
DKVDLAN

SEQ ID NO: 26069 - protein, 7 aa, synthetic construct
LSSDAHT

SEQ ID NO: 26070 - protein, 7 aa, synthetic construct
LAPITQD

SEQ ID NO: 26071 - protein, 7 aa, synthetic construct
TFGMKPI

SEQ ID NO: 26072 - protein, 7 aa, synthetic construct
DAVLGRV

SEQ ID NO: 26073 - protein, 7 aa, synthetic construct
KMYKIEG

SEQ ID NO: 26074 - protein, 7 aa, synthetic construct
KIMPDGF

SEQ ID NO: 26075 - protein, 7 aa, synthetic construct
FKYMENV

SEQ ID NO: 26076 - protein, 7 aa, synthetic construct
KDRKEIH

SEQ ID NO: 26077 - protein, 7 aa, synthetic construct
ETRQYNM

SEQ ID NO: 26078 - protein, 7 aa, synthetic construct
YVHNVRS

SEQ ID NO: 26079 - protein, 7 aa, synthetic construct
DTLHGRK

SEQ ID NO: 26080 - protein, 7 aa, synthetic construct
NDVNLRF

SEQ ID NO: 26081 - protein, 7 aa, synthetic construct
YKMTSMH

SEQ ID NO: 26082 - protein, 7 aa, synthetic construct
EQWKPET

SEQ ID NO: 26083 - protein, 7 aa, synthetic construct
VMEHAGK

SEQ ID NO: 26084 - protein, 7 aa, synthetic construct
PHNIKEI

SEQ ID NO: 26085 - protein, 7 aa, synthetic construct
QGMNSTM

SEQ ID NO: 26086 - protein, 7 aa, synthetic construct
LIKEGWD

SEQ ID NO: 26087 - protein, 7 aa, synthetic construct
DHHPMRP

SEQ ID NO: 26088 - protein, 7 aa, synthetic construct
QQQITHP

SEQ ID NO: 26089 - protein, 7 aa, synthetic construct
NEISKQM

SEQ ID NO: 26090 - protein, 7 aa, synthetic construct
PKAYPIQ

SEQ ID NO: 26091 - protein, 7 aa, synthetic construct
AEVQYSH

SEQ ID NO: 26092 - protein, 7 aa, synthetic construct
SATAQPW

SEQ ID NO: 26093 - protein, 7 aa, synthetic construct
KSAIMGM

SEQ ID NO: 26094 - protein, 7 aa, synthetic construct
ATDIIHV

SEQ ID NO: 26095 - protein, 7 aa, synthetic construct
GNTDVYV

SEQ ID NO: 26096 - protein, 7 aa, synthetic construct
NSSIDAM

SEQ ID NO: 26097 - protein, 7 aa, synthetic construct
NNDTAHQ

SEQ ID NO: 26098 - protein, 7 aa, synthetic construct
LKHPNDD

SEQ ID NO: 26099 - protein, 7 aa, synthetic construct
RNHATQH

SEQ ID NO: 26100 - protein, 7 aa, synthetic construct
HTAPAMI

SEQ ID NO: 26101 - protein, 7 aa, synthetic construct
IMPFAKN

SEQ ID NO: 26102 - protein, 7 aa, synthetic construct
RENSVFR

SEQ ID NO: 26103 - protein, 7 aa, synthetic construct
HSMVFAD

SEQ ID NO: 26104 - protein, 7 aa, synthetic construct
DYAISPR

SEQ ID NO: 26105 - protein, 7 aa, synthetic construct
GAIDKDY

SEQ ID NO: 26106 - protein, 7 aa, synthetic construct
HRYTIDP

SEQ ID NO: 26107 - protein, 7 aa, synthetic construct
FNYNSAP

SEQ ID NO: 26108 - protein, 7 aa, synthetic construct
IQQSQLG

SEQ ID NO: 26109 - protein, 7 aa, synthetic construct
FQITGNE

SEQ ID NO: 26110 - protein, 7 aa, synthetic construct
KLALPAI

SEQ ID NO: 26111 - protein, 7 aa, synthetic construct
TPVTDER

SEQ ID NO: 26112 - protein, 7 aa, synthetic construct
PDKMWKG

SEQ ID NO: 26113 - protein, 7 aa, synthetic construct
HGQQNPD

SEQ ID NO: 26114 - protein, 7 aa, synthetic construct
NQALDAL

SEQ ID NO: 26115 - protein, 7 aa, synthetic construct
IMTVEGT

SEQ ID NO: 26116 - protein, 7 aa, synthetic construct
WMDVSRT

SEQ ID NO: 26117 - protein, 7 aa, synthetic construct
APVKLEE

SEQ ID NO: 26118 - protein, 7 aa, synthetic construct
NTIGLSM

SEQ ID NO: 26119 - protein, 7 aa, synthetic construct
QIPDHPP

SEQ ID NO: 26120 - protein, 7 aa, synthetic construct
TEQAMRT

SEQ ID NO: 26121 - protein, 7 aa, synthetic construct
ISAPSAQ

SEQ ID NO: 26122 - protein, 7 aa, synthetic construct
WNHLQAN

SEQ ID NO: 26123 - protein, 7 aa, synthetic construct
AKPDNHL

SEQ ID NO: 26124 - protein, 7 aa, synthetic construct
MKDAMGV

SEQ ID NO: 26125 - protein, 7 aa, synthetic construct
KTYPDDM

SEQ ID NO: 26126 - protein, 7 aa, synthetic construct
HIETTAI

SEQ ID NO: 26127 - protein, 7 aa, synthetic construct
RDDNNFH

SEQ ID NO: 26128 - protein, 7 aa, synthetic construct
VNPVLES

SEQ ID NO: 26129 - protein, 7 aa, synthetic construct
AWENTNS

SEQ ID NO: 26130 - protein, 7 aa, synthetic construct
FTIGQKG

SEQ ID NO: 26131 - protein, 7 aa, synthetic construct
PSIHGQV

SEQ ID NO: 26132 - protein, 7 aa, synthetic construct
GDRAKEA

SEQ ID NO: 26133 - protein, 7 aa, synthetic construct
RPGVILE

SEQ ID NO: 26134 - protein, 7 aa, synthetic construct
DFQQFEK

SEQ ID NO: 26135 - protein, 7 aa, synthetic construct
WLATDGE

SEQ ID NO: 26136 - protein, 7 aa, synthetic construct
ENAGNAR

SEQ ID NO: 26137 - protein, 7 aa, synthetic construct
MSIAATG

SEQ ID NO: 26138 - protein, 7 aa, synthetic construct
MISQNVL

SEQ ID NO: 26139 - protein, 7 aa, synthetic construct
DIPGSLP

SEQ ID NO: 26140 - protein, 7 aa, synthetic construct
HDQILGS

SEQ ID NO: 26141 - protein, 7 aa, synthetic construct
AHPYSHV

SEQ ID NO: 26142 - protein, 7 aa, synthetic construct
DMVDRSA

SEQ ID NO: 26143 - protein, 7 aa, synthetic construct
MGVVVNQ

SEQ ID NO: 26144 - protein, 7 aa, synthetic construct
NSERMIY

SEQ ID NO: 26145 - protein, 7 aa, synthetic construct
LGDTNIL

SEQ ID NO: 26146 - protein, 7 aa, synthetic construct
YNRVYDE

SEQ ID NO: 26147 - protein, 7 aa, synthetic construct
AIAQVGR

SEQ ID NO: 26148 - protein, 7 aa, synthetic construct
TNWASEH

SEQ ID NO: 26149 - protein, 7 aa, synthetic construct
WIPGTAP

SEQ ID NO: 26150 - protein, 7 aa, synthetic construct
LPNKNLA

SEQ ID NO: 26151 - protein, 7 aa, synthetic construct
VHSGNLH

SEQ ID NO: 26152 - protein, 7 aa, synthetic construct
ISPDKFV

SEQ ID NO: 26153 - protein, 7 aa, synthetic construct
QESWPVG

SEQ ID NO: 26154 - protein, 7 aa, synthetic construct
TNTLNPM

SEQ ID NO: 26155 - protein, 7 aa, synthetic construct
ATMSGPF

SEQ ID NO: 26156 - protein, 7 aa, synthetic construct
RPNTILI

SEQ ID NO: 26157 - protein, 7 aa, synthetic construct
PMQPGVN

SEQ ID NO: 26158 - protein, 7 aa, synthetic construct
TRDGHHQ

SEQ ID NO: 26159 - protein, 7 aa, synthetic construct
FESHIND

SEQ ID NO: 26160 - protein, 7 aa, synthetic construct
VDWRNTE

SEQ ID NO: 26161 - protein, 7 aa, synthetic construct
FLAPKAL

SEQ ID NO: 26162 - protein, 7 aa, synthetic construct
PKGTETM

SEQ ID NO: 26163 - protein, 7 aa, synthetic construct
VEKTATF

SEQ ID NO: 26164 - protein, 7 aa, synthetic construct
AEGGINA

SEQ ID NO: 26165 - protein, 7 aa, synthetic construct
PGQGMLR

SEQ ID NO: 26166 - protein, 7 aa, synthetic construct
PNENKFT

SEQ ID NO: 26167 - protein, 7 aa, synthetic construct
VHSSDIH

SEQ ID NO: 26168 - protein, 7 aa, synthetic construct
DMSWDKI

SEQ ID NO: 26169 - protein, 7 aa, synthetic construct
LYDNTTM

SEQ ID NO: 26170 - protein, 7 aa, synthetic construct
VYGSAVE

SEQ ID NO: 26171 - protein, 7 aa, synthetic construct
YNGARYV

SEQ ID NO: 26172 - protein, 7 aa, synthetic construct
DKTFDEA

SEQ ID NO: 26173 - protein, 7 aa, synthetic construct
VDREFHH

SEQ ID NO: 26174 - protein, 7 aa, synthetic construct
HGIESND

SEQ ID NO: 26175 - protein, 7 aa, synthetic construct
TATLNQL

SEQ ID NO: 26176 - protein, 7 aa, synthetic construct
PSPTTHH

SEQ ID NO: 26177 - protein, 7 aa, synthetic construct
NLEKSLD

SEQ ID NO: 26178 - protein, 7 aa, synthetic construct
MHSDGDI

SEQ ID NO: 26179 - protein, 7 aa, synthetic construct
LSQAVES

SEQ ID NO: 26180 - protein, 7 aa, synthetic construct
HIEHRLT

SEQ ID NO: 26181 - protein, 7 aa, synthetic construct
DFEGYTK

SEQ ID NO: 26182 - protein, 7 aa, synthetic construct
RQMGDQL

SEQ ID NO: 26183 - protein, 7 aa, synthetic construct
HSPLRNG

SEQ ID NO: 26184 - protein, 7 aa, synthetic construct
MKINDKF

SEQ ID NO: 26185 - protein, 7 aa, synthetic construct
TEVYPKV

SEQ ID NO: 26186 - protein, 7 aa, synthetic construct
NMNQYPQ

SEQ ID NO: 26187 - protein, 7 aa, synthetic construct
LHEDGSM

SEQ ID NO: 26188 - protein, 7 aa, synthetic construct
GMPQLHE

SEQ ID NO: 26189 - protein, 7 aa, synthetic construct
LRDKHEN

SEQ ID NO: 26190 - protein, 7 aa, synthetic construct
GWKAEIS

SEQ ID NO: 26191 - protein, 7 aa, synthetic construct
MMDTIKG

SEQ ID NO: 26192 - protein, 7 aa, synthetic construct
EHQSPRT

SEQ ID NO: 26193 - protein, 7 aa, synthetic construct
GLGFAID

SEQ ID NO: 26194 - protein, 7 aa, synthetic construct
YVPGLHM

SEQ ID NO: 26195 - protein, 7 aa, synthetic construct
LNSETQL

SEQ ID NO: 26196 - protein, 7 aa, synthetic construct
KIAMDQV

SEQ ID NO: 26197 - protein, 7 aa, synthetic construct
SKWRDET

SEQ ID NO: 26198 - protein, 7 aa, synthetic construct
SSVSNNH

SEQ ID NO: 26199 - protein, 7 aa, synthetic construct
VQAAFHD

SEQ ID NO: 26200 - protein, 7 aa, synthetic construct
YAPQNVD

SEQ ID NO: 26201 - protein, 7 aa, synthetic construct
PTQNMLH

SEQ ID NO: 26202 - protein, 7 aa, synthetic construct
TSQHHLN

SEQ ID NO: 26203 - protein, 7 aa, synthetic construct
WEDMRVK

SEQ ID NO: 26204 - protein, 7 aa, synthetic construct
DMGHPRI

SEQ ID NO: 26205 - protein, 7 aa, synthetic construct
TQVAKIS

SEQ ID NO: 26206 - protein, 7 aa, synthetic construct
MKNMHYG

SEQ ID NO: 26207 - protein, 7 aa, synthetic construct
SRGQPIE

SEQ ID NO: 26208 - protein, 7 aa, synthetic construct
KSNDGEK

SEQ ID NO: 26209 - protein, 7 aa, synthetic construct
FPQNEHI

SEQ ID NO: 26210 - protein, 7 aa, synthetic construct
KTGDMQK

SEQ ID NO: 26211 - protein, 7 aa, synthetic construct
MSSQIYS

SEQ ID NO: 26212 - protein, 7 aa, synthetic construct
WVAHSHS

SEQ ID NO: 26213 - protein, 7 aa, synthetic construct
DTGPPLI

SEQ ID NO: 26214 - protein, 7 aa, synthetic construct
YHEAFAQ

SEQ ID NO: 26215 - protein, 7 aa, synthetic construct
SELLHKP

SEQ ID NO: 26216 - protein, 7 aa, synthetic construct
YNKMDRQ

SEQ ID NO: 26217 - protein, 7 aa, synthetic construct
AREKHEA

SEQ ID NO: 26218 - protein, 7 aa, synthetic construct
MDNALHK

SEQ ID NO: 26219 - protein, 7 aa, synthetic construct
KDAFVIV

SEQ ID NO: 26220 - protein, 7 aa, synthetic construct
VGNQMHH

SEQ ID NO: 26221 - protein, 7 aa, synthetic construct
FRHHQQD

SEQ ID NO: 26222 - protein, 7 aa, synthetic construct
DHDVNQK

SEQ ID NO: 26223 - protein, 7 aa, synthetic construct
HPKIDNQ

SEQ ID NO: 26224 - protein, 7 aa, synthetic construct
DGRGVTQ

SEQ ID NO: 26225 - protein, 7 aa, synthetic construct
TEKQHEP

SEQ ID NO: 26226 - protein, 7 aa, synthetic construct
SPYDSYV

SEQ ID NO: 26227 - protein, 7 aa, synthetic construct
GDLKQVE

SEQ ID NO: 26228 - protein, 7 aa, synthetic construct
LNSQQMI

SEQ ID NO: 26229 - protein, 7 aa, synthetic construct
RDEKEPG

SEQ ID NO: 26230 - protein, 7 aa, synthetic construct
TQFRQMN

SEQ ID NO: 26231 - protein, 7 aa, synthetic construct
EEGEYVG

SEQ ID NO: 26232 - protein, 7 aa, synthetic construct
VENQERY

SEQ ID NO: 26233 - protein, 7 aa, synthetic construct
EPHVHKF

SEQ ID NO: 26234 - protein, 7 aa, synthetic construct
MSPNNFE

SEQ ID NO: 26235 - protein, 7 aa, synthetic construct
APGIPQH

SEQ ID NO: 26236 - protein, 7 aa, synthetic construct
GTYHTND

SEQ ID NO: 26237 - protein, 7 aa, synthetic construct
KERVDWH

SEQ ID NO: 26238 - protein, 7 aa, synthetic construct
TEVWKKE

SEQ ID NO: 26239 - protein, 7 aa, synthetic construct
KKLDHHW

SEQ ID NO: 26240 - protein, 7 aa, synthetic construct
MSNHSYE

SEQ ID NO: 26241 - protein, 7 aa, synthetic construct
MESVFPG

SEQ ID NO: 26242 - protein, 7 aa, synthetic construct
TSSSHIN

SEQ ID NO: 26243 - protein, 7 aa, synthetic construct
SFNDGIH

SEQ ID NO: 26244 - protein, 7 aa, synthetic construct
MSNMYHA

SEQ ID NO: 26245 - protein, 7 aa, synthetic construct
HPADTAY

SEQ ID NO: 26246 - protein, 7 aa, synthetic construct
VEHYQPV

SEQ ID NO: 26247 - protein, 7 aa, synthetic construct
NHKQLYD

SEQ ID NO: 26248 - protein, 7 aa, synthetic construct
ERDARQY

SEQ ID NO: 26249 - protein, 7 aa, synthetic construct
LFPRASQ

SEQ ID NO: 26250 - protein, 7 aa, synthetic construct
TASEGWK

SEQ ID NO: 26251 - protein, 7 aa, synthetic construct
FNHVQID

SEQ ID NO: 26252 - protein, 7 aa, synthetic construct
PLTGDKT

SEQ ID NO: 26253 - protein, 7 aa, synthetic construct
RYDHIDR

SEQ ID NO: 26254 - protein, 7 aa, synthetic construct
GPHFTAD

SEQ ID NO: 26255 - protein, 7 aa, synthetic construct
HVPGRAV

SEQ ID NO: 26256 - protein, 7 aa, synthetic construct
SSSHDMD

SEQ ID NO: 26257 - protein, 7 aa, synthetic construct
PVDQGNG

SEQ ID NO: 26258 - protein, 7 aa, synthetic construct
PIGKAEH

SEQ ID NO: 26259 - protein, 7 aa, synthetic construct
FAAAKNH

SEQ ID NO: 26260 - protein, 7 aa, synthetic construct
EHASAQD

SEQ ID NO: 26261 - protein, 7 aa, synthetic construct
KNMNDSK

SEQ ID NO: 26262 - protein, 7 aa, synthetic construct
ITEGPRS

SEQ ID NO: 26263 - protein, 7 aa, synthetic construct
AGPVSMI

SEQ ID NO: 26264 - protein, 7 aa, synthetic construct
MVMAEPQ

SEQ ID NO: 26265 - protein, 7 aa, synthetic construct
DQDRATL

SEQ ID NO: 26266 - protein, 7 aa, synthetic construct
NDINHKK

SEQ ID NO: 26267 - protein, 7 aa, synthetic construct
GMTGGEP

SEQ ID NO: 26268 - protein, 7 aa, synthetic construct
VAQLMSQ

SEQ ID NO: 26269 - protein, 7 aa, synthetic construct
YQETHII

SEQ ID NO: 26270 - protein, 7 aa, synthetic construct
FDALKAS

SEQ ID NO: 26271 - protein, 7 aa, synthetic construct
EHTWIDE

SEQ ID NO: 26272 - protein, 7 aa, synthetic construct
NQNHVLD

SEQ ID NO: 26273 - protein, 7 aa, synthetic construct
KSHELVK

SEQ ID NO: 26274 - protein, 7 aa, synthetic construct
AFGSPFK

SEQ ID NO: 26275 - protein, 7 aa, synthetic construct
RTQHAVM

SEQ ID NO: 26276 - protein, 7 aa, synthetic construct
SEIKIKD

SEQ ID NO: 26277 - protein, 7 aa, synthetic construct
ATWAPEH

SEQ ID NO: 26278 - protein, 7 aa, synthetic construct
RIVDTYE

SEQ ID NO: 26279 - protein, 7 aa, synthetic construct
GGLRTAI

SEQ ID NO: 26280 - protein, 7 aa, synthetic construct
SHTHIGV

SEQ ID NO: 26281 - protein, 7 aa, synthetic construct
MFEGMVG

SEQ ID NO: 26282 - protein, 7 aa, synthetic construct
TQETLLQ

SEQ ID NO: 26283 - protein, 7 aa, synthetic construct
WMQNNTQ

SEQ ID NO: 26284 - protein, 7 aa, synthetic construct
GLMESKS

SEQ ID NO: 26285 - protein, 7 aa, synthetic construct
AQAENYK

SEQ ID NO: 26286 - protein, 7 aa, synthetic construct
MGPPTAK

SEQ ID NO: 26287 - protein, 7 aa, synthetic construct
TKDLAKH

SEQ ID NO: 26288 - protein, 7 aa, synthetic construct
IDLAHAA

SEQ ID NO: 26289 - protein, 7 aa, synthetic construct
WHETMKH

SEQ ID NO: 26290 - protein, 7 aa, synthetic construct
GHIDAPH

SEQ ID NO: 26291 - protein, 7 aa, synthetic construct
HVAMGQS

SEQ ID NO: 26292 - protein, 7 aa, synthetic construct
QLNEFPA

SEQ ID NO: 26293 - protein, 7 aa, synthetic construct
VAFNIDG

SEQ ID NO: 26294 - protein, 7 aa, synthetic construct
NKQPQYY

SEQ ID NO: 26295 - protein, 7 aa, synthetic construct
HTATGMQ

SEQ ID NO: 26296 - protein, 7 aa, synthetic construct
RSNHSYV

SEQ ID NO: 26297 - protein, 7 aa, synthetic construct
RDIKIGD

SEQ ID NO: 26298 - protein, 7 aa, synthetic construct
MPGSVTD

SEQ ID NO: 26299 - protein, 7 aa, synthetic construct
FEQTGRK

SEQ ID NO: 26300 - protein, 7 aa, synthetic construct
RSSDPKE

SEQ ID NO: 26301 - protein, 7 aa, synthetic construct
QHHLVAG

SEQ ID NO: 26302 - protein, 7 aa, synthetic construct
TEHFGHP

SEQ ID NO: 26303 - protein, 7 aa, synthetic construct
KERYEDQ

SEQ ID NO: 26304 - protein, 7 aa, synthetic construct
LFGNFPE

SEQ ID NO: 26305 - protein, 7 aa, synthetic construct
EVPKKEF

SEQ ID NO: 26306 - protein, 7 aa, synthetic construct
MDNSTGH

SEQ ID NO: 26307 - protein, 7 aa, synthetic construct
ESNKKAT

SEQ ID NO: 26308 - protein, 7 aa, synthetic construct
NKALEQS

SEQ ID NO: 26309 - protein, 7 aa, synthetic construct
NWETREP

SEQ ID NO: 26310 - protein, 7 aa, synthetic construct
MGVQMAG

SEQ ID NO: 26311 - protein, 7 aa, synthetic construct
RKDNQLH

SEQ ID NO: 26312 - protein, 7 aa, synthetic construct
SEMVAMD

SEQ ID NO: 26313 - protein, 7 aa, synthetic construct
GLRDFQG

SEQ ID NO: 26314 - protein, 7 aa, synthetic construct
AQTDMKE

SEQ ID NO: 26315 - protein, 7 aa, synthetic construct
LQIMHEE

SEQ ID NO: 26316 - protein, 7 aa, synthetic construct
GGALNHI

SEQ ID NO: 26317 - protein, 7 aa, synthetic construct
NNFTMEG

SEQ ID NO: 26318 - protein, 7 aa, synthetic construct
AHREFSK

SEQ ID NO: 26319 - protein, 7 aa, synthetic construct
KEDHHLP

SEQ ID NO: 26320 - protein, 7 aa, synthetic construct
STLMVRE

SEQ ID NO: 26321 - protein, 7 aa, synthetic construct
MMKDKHL

SEQ ID NO: 26322 - protein, 7 aa, synthetic construct
LTKPPGN

SEQ ID NO: 26323 - protein, 7 aa, synthetic construct
LQAVESY

SEQ ID NO: 26324 - protein, 7 aa, synthetic construct
WTDGSTN

SEQ ID NO: 26325 - protein, 7 aa, synthetic construct
MVNKFNV

SEQ ID NO: 26326 - protein, 7 aa, synthetic construct
SPDKAFI

SEQ ID NO: 26327 - protein, 7 aa, synthetic construct
GHQVHHG

SEQ ID NO: 26328 - protein, 7 aa, synthetic construct
TSIRENL

SEQ ID NO: 26329 - protein, 7 aa, synthetic construct
TKDDVRI

SEQ ID NO: 26330 - protein, 7 aa, synthetic construct
ERELTNG

SEQ ID NO: 26331 - protein, 7 aa, synthetic construct
DSVRTGV

SEQ ID NO: 26332 - protein, 7 aa, synthetic construct
GHWGHNE

SEQ ID NO: 26333 - protein, 7 aa, synthetic construct
ISSQMQY

SEQ ID NO: 26334 - protein, 7 aa, synthetic construct
YESIRLT

SEQ ID NO: 26335 - protein, 7 aa, synthetic construct
AFKTFTD

SEQ ID NO: 26336 - protein, 7 aa, synthetic construct
NPFVKDK

SEQ ID NO: 26337 - protein, 7 aa, synthetic construct
YKHEDPL

SEQ ID NO: 26338 - protein, 7 aa, synthetic construct
LRKIDSG

SEQ ID NO: 26339 - protein, 7 aa, synthetic construct
DEIPHRM

SEQ ID NO: 26340 - protein, 7 aa, synthetic construct
QKTERAM

SEQ ID NO: 26341 - protein, 7 aa, synthetic construct
GNIQRST

SEQ ID NO: 26342 - protein, 7 aa, synthetic construct
FDSAQNR

SEQ ID NO: 26343 - protein, 7 aa, synthetic construct
QTSPKDD

SEQ ID NO: 26344 - protein, 7 aa, synthetic construct
SESTGAF

SEQ ID NO: 26345 - protein, 7 aa, synthetic construct
AGQPMFE

SEQ ID NO: 26346 - protein, 7 aa, synthetic construct
FNLGHTH

SEQ ID NO: 26347 - protein, 7 aa, synthetic construct
RNEIEMQ

SEQ ID NO: 26348 - protein, 7 aa, synthetic construct
GSAPDFL

SEQ ID NO: 26349 - protein, 7 aa, synthetic construct
PSTDSVS

SEQ ID NO: 26350 - protein, 7 aa, synthetic construct
DEPKQPM

SEQ ID NO: 26351 - protein, 7 aa, synthetic construct
EKQGDIN

SEQ ID NO: 26352 - protein, 7 aa, synthetic construct
LFEGTGP

SEQ ID NO: 26353 - protein, 7 aa, synthetic construct
PESMKRF

SEQ ID NO: 26354 - protein, 7 aa, synthetic construct
PDTEYQP

SEQ ID NO: 26355 - protein, 7 aa, synthetic construct
RTTIPNG

SEQ ID NO: 26356 - protein, 7 aa, synthetic construct
IHPMHVE

SEQ ID NO: 26357 - protein, 7 aa, synthetic construct
RTKANHE

SEQ ID NO: 26358 - protein, 7 aa, synthetic construct
SGELSTA

SEQ ID NO: 26359 - protein, 7 aa, synthetic construct
IQLSSPK

SEQ ID NO: 26360 - protein, 7 aa, synthetic construct
QNDQAKI

SEQ ID NO: 26361 - protein, 7 aa, synthetic construct
EEFVPTE

SEQ ID NO: 26362 - protein, 7 aa, synthetic construct
FGQNLVA

SEQ ID NO: 26363 - protein, 7 aa, synthetic construct
TRSNQYN

SEQ ID NO: 26364 - protein, 7 aa, synthetic construct
QRIVINS

SEQ ID NO: 26365 - protein, 7 aa, synthetic construct
REVQSHP

SEQ ID NO: 26366 - protein, 7 aa, synthetic construct
LYEGQFK

SEQ ID NO: 26367 - protein, 7 aa, synthetic construct
SQAQETT

SEQ ID NO: 26368 - protein, 7 aa, synthetic construct
FAVNTSH

SEQ ID NO: 26369 - protein, 7 aa, synthetic construct
INGSVGL

SEQ ID NO: 26370 - protein, 7 aa, synthetic construct
DVNNMRV

SEQ ID NO: 26371 - protein, 7 aa, synthetic construct
QAERFPH

SEQ ID NO: 26372 - protein, 7 aa, synthetic construct
VSNKSYD

SEQ ID NO: 26373 - protein, 7 aa, synthetic construct
MAAVSHH

SEQ ID NO: 26374 - protein, 7 aa, synthetic construct
GFMYQQE

SEQ ID NO: 26375 - protein, 7 aa, synthetic construct
WTDSIKF

SEQ ID NO: 26376 - protein, 7 aa, synthetic construct
EYKVPNI

SEQ ID NO: 26377 - protein, 7 aa, synthetic construct
IWTANQD

SEQ ID NO: 26378 - protein, 7 aa, synthetic construct
SSMTHPV

SEQ ID NO: 26379 - protein, 7 aa, synthetic construct
YSATTSD

SEQ ID NO: 26380 - protein, 7 aa, synthetic construct
HGAGTIR

SEQ ID NO: 26381 - protein, 7 aa, synthetic construct
EKQHPPH

SEQ ID NO: 26382 - protein, 7 aa, synthetic construct
NNSPLLP

SEQ ID NO: 26383 - protein, 7 aa, synthetic construct
MNHMPMR

SEQ ID NO: 26384 - protein, 7 aa, synthetic construct
VAFGNGS

SEQ ID NO: 26385 - protein, 7 aa, synthetic construct
AAMHKSP

SEQ ID NO: 26386 - protein, 7 aa, synthetic construct
SGVQINA

SEQ ID NO: 26387 - protein, 7 aa, synthetic construct
GAEGMMD

SEQ ID NO: 26388 - protein, 7 aa, synthetic construct
AVPTQRM

SEQ ID NO: 26389 - protein, 7 aa, synthetic construct
EVQGHHT

SEQ ID NO: 26390 - protein, 7 aa, synthetic construct
ASKKQEH

SEQ ID NO: 26391 - protein, 7 aa, synthetic construct
QHIASDK

SEQ ID NO: 26392 - protein, 7 aa, synthetic construct
TMWNSES

SEQ ID NO: 26393 - protein, 7 aa, synthetic construct
SPPQFMN

SEQ ID NO: 26394 - protein, 7 aa, synthetic construct
KNVLNQP

SEQ ID NO: 26395 - protein, 7 aa, synthetic construct
WQKDHQP

SEQ ID NO: 26396 - protein, 7 aa, synthetic construct
IPPDAWK

SEQ ID NO: 26397 - protein, 7 aa, synthetic construct
HIETKFS

SEQ ID NO: 26398 - protein, 7 aa, synthetic construct
RRDSGDD

SEQ ID NO: 26399 - protein, 7 aa, synthetic construct
IFPNQIE

SEQ ID NO: 26400 - protein, 7 aa, synthetic construct
SHQMESM

SEQ ID NO: 26401 - protein, 7 aa, synthetic construct
INYLAGE

SEQ ID NO: 26402 - protein, 7 aa, synthetic construct
NHSERHM

SEQ ID NO: 26403 - protein, 7 aa, synthetic construct
MDGTGYN

SEQ ID NO: 26404 - protein, 7 aa, synthetic construct
HQVYEET

SEQ ID NO: 26405 - protein, 7 aa, synthetic construct
KEPVSVS

SEQ ID NO: 26406 - protein, 7 aa, synthetic construct
RVDNDER

SEQ ID NO: 26407 - protein, 7 aa, synthetic construct
HADMTAN

SEQ ID NO: 26408 - protein, 7 aa, synthetic construct
PEGQNKI

SEQ ID NO: 26409 - protein, 7 aa, synthetic construct
GVARDAR

SEQ ID NO: 26410 - protein, 7 aa, synthetic construct
DEQQHYK

SEQ ID NO: 26411 - protein, 7 aa, synthetic construct
WQDEANN

SEQ ID NO: 26412 - protein, 7 aa, synthetic construct
PHFSQGG

SEQ ID NO: 26413 - protein, 7 aa, synthetic construct
SMSSIYK

SEQ ID NO: 26414 - protein, 7 aa, synthetic construct
DEMKILE

SEQ ID NO: 26415 - protein, 7 aa, synthetic construct
SGEKAPN

SEQ ID NO: 26416 - protein, 7 aa, synthetic construct
EPATLKM

SEQ ID NO: 26417 - protein, 7 aa, synthetic construct
AATHPVV

SEQ ID NO: 26418 - protein, 7 aa, synthetic construct
QPTWATG

SEQ ID NO: 26419 - protein, 7 aa, synthetic construct
GVYPFEG

SEQ ID NO: 26420 - protein, 7 aa, synthetic construct
NLIGTVT

SEQ ID NO: 26421 - protein, 7 aa, synthetic construct
IWQRADD

SEQ ID NO: 26422 - protein, 7 aa, synthetic construct
LGHPAEI

SEQ ID NO: 26423 - protein, 7 aa, synthetic construct
QVKSSFP

SEQ ID NO: 26424 - protein, 7 aa, synthetic construct
WNIKTPM

SEQ ID NO: 26425 - protein, 7 aa, synthetic construct
QPMDMPA

SEQ ID NO: 26426 - protein, 7 aa, synthetic construct
ISEWQHQ

SEQ ID NO: 26427 - protein, 7 aa, synthetic construct
AETRNND

SEQ ID NO: 26428 - protein, 7 aa, synthetic construct
STQPRMH

SEQ ID NO: 26429 - protein, 7 aa, synthetic construct
DSHAMGH

SEQ ID NO: 26430 - protein, 7 aa, synthetic construct
VMNHGDP

SEQ ID NO: 26431 - protein, 7 aa, synthetic construct
RDSTRFI

SEQ ID NO: 26432 - protein, 7 aa, synthetic construct
GMEVSRT

SEQ ID NO: 26433 - protein, 7 aa, synthetic construct
PNATLVT

SEQ ID NO: 26434 - protein, 7 aa, synthetic construct
SDNPKTM

SEQ ID NO: 26435 - protein, 7 aa, synthetic construct
GPGGMDH

SEQ ID NO: 26436 - protein, 7 aa, synthetic construct
GNMHGSY

SEQ ID NO: 26437 - protein, 7 aa, synthetic construct
KAFPDTM

SEQ ID NO: 26438 - protein, 7 aa, synthetic construct
EAPDWAI

SEQ ID NO: 26439 - protein, 7 aa, synthetic construct
LIPQNDI

SEQ ID NO: 26440 - protein, 7 aa, synthetic construct
AERNPAY

SEQ ID NO: 26441 - protein, 7 aa, synthetic construct
GAAKLAT

SEQ ID NO: 26442 - protein, 7 aa, synthetic construct
SQTDWPA

SEQ ID NO: 26443 - protein, 7 aa, synthetic construct
QTMHKIM

SEQ ID NO: 26444 - protein, 7 aa, synthetic construct
AQEDKNK

SEQ ID NO: 26445 - protein, 7 aa, synthetic construct
PYPPLIE

SEQ ID NO: 26446 - protein, 7 aa, synthetic construct
QQDSWSA

SEQ ID NO: 26447 - protein, 7 aa, synthetic construct
TSRQERI

SEQ ID NO: 26448 - protein, 7 aa, synthetic construct
HSQAKDL

SEQ ID NO: 26449 - protein, 7 aa, synthetic construct
ILNAMER

SEQ ID NO: 26450 - protein, 7 aa, synthetic construct
MYSMKIA

SEQ ID NO: 26451 - protein, 7 aa, synthetic construct
QHGTDGP

SEQ ID NO: 26452 - protein, 7 aa, synthetic construct
NREIHGH

SEQ ID NO: 26453 - protein, 7 aa, synthetic construct
NTFNQDL

SEQ ID NO: 26454 - protein, 7 aa, synthetic construct
VGMAQAT

SEQ ID NO: 26455 - protein, 7 aa, synthetic construct
VFRPGHG

SEQ ID NO: 26456 - protein, 7 aa, synthetic construct
GNPGTHI

SEQ ID NO: 26457 - protein, 7 aa, synthetic construct
FGLEANS

SEQ ID NO: 26458 - protein, 7 aa, synthetic construct
FMGDRLD

SEQ ID NO: 26459 - protein, 7 aa, synthetic construct
KSDNWDP

SEQ ID NO: 26460 - protein, 7 aa, synthetic construct
ANDQRAK

SEQ ID NO: 26461 - protein, 7 aa, synthetic construct
VELQSNK

SEQ ID NO: 26462 - protein, 7 aa, synthetic construct
KPQHESK

SEQ ID NO: 26463 - protein, 7 aa, synthetic construct
LFDAHMA

SEQ ID NO: 26464 - protein, 7 aa, synthetic construct
HERISMI

SEQ ID NO: 26465 - protein, 7 aa, synthetic construct
EMMRGPF

SEQ ID NO: 26466 - protein, 7 aa, synthetic construct
PMTQNNM

SEQ ID NO: 26467 - protein, 7 aa, synthetic construct
TLWHSEE

SEQ ID NO: 26468 - protein, 7 aa, synthetic construct
TFKTDWD

SEQ ID NO: 26469 - protein, 7 aa, synthetic construct
QNDLHVS

SEQ ID NO: 26470 - protein, 7 aa, synthetic construct
EMEIRRN

SEQ ID NO: 26471 - protein, 7 aa, synthetic construct
EWTMEVP

SEQ ID NO: 26472 - protein, 7 aa, synthetic construct
TPSTENI

SEQ ID NO: 26473 - protein, 7 aa, synthetic construct
GEKQDKI

SEQ ID NO: 26474 - protein, 7 aa, synthetic construct
NPEGMVT

SEQ ID NO: 26475 - protein, 7 aa, synthetic construct
FNEHIKH

SEQ ID NO: 26476 - protein, 7 aa, synthetic construct
KPETPAH

SEQ ID NO: 26477 - protein, 7 aa, synthetic construct
HHGVHNG

SEQ ID NO: 26478 - protein, 7 aa, synthetic construct
DIHVPGK

SEQ ID NO: 26479 - protein, 7 aa, synthetic construct
KMDGHTW

SEQ ID NO: 26480 - protein, 7 aa, synthetic construct
YQPTGLF

SEQ ID NO: 26481 - protein, 7 aa, synthetic construct
AMPYHAS

SEQ ID NO: 26482 - protein, 7 aa, synthetic construct
QHSNIAF

SEQ ID NO: 26483 - protein, 7 aa, synthetic construct
MIQAHKI

SEQ ID NO: 26484 - protein, 7 aa, synthetic construct
YQTDINM

SEQ ID NO: 26485 - protein, 7 aa, synthetic construct
LYEDTGI

SEQ ID NO: 26486 - protein, 7 aa, synthetic construct
FEKSQHD

SEQ ID NO: 26487 - protein, 7 aa, synthetic construct
VQLPSKL

SEQ ID NO: 26488 - protein, 7 aa, synthetic construct
LPLSLSA

SEQ ID NO: 26489 - protein, 7 aa, synthetic construct
STRHAPG

SEQ ID NO: 26490 - protein, 7 aa, synthetic construct
DYSETQI

SEQ ID NO: 26491 - protein, 7 aa, synthetic construct
TPQRLKP

SEQ ID NO: 26492 - protein, 7 aa, synthetic construct
AKEGAVK

SEQ ID NO: 26493 - protein, 7 aa, synthetic construct
SNNVEAW

SEQ ID NO: 26494 - protein, 7 aa, synthetic construct
MSLEKEN

SEQ ID NO: 26495 - protein, 7 aa, synthetic construct
HMKPDLE

SEQ ID NO: 26496 - protein, 7 aa, synthetic construct
EHYGQSI

SEQ ID NO: 26497 - protein, 7 aa, synthetic construct
RPASELR

SEQ ID NO: 26498 - protein, 7 aa, synthetic construct
HHVEQMK

SEQ ID NO: 26499 - protein, 7 aa, synthetic construct
DESPSIM

SEQ ID NO: 26500 - protein, 7 aa, synthetic construct
WRDHIPT

SEQ ID NO: 26501 - protein, 7 aa, synthetic construct
TMTEKLD

SEQ ID NO: 26502 - protein, 7 aa, synthetic construct
PTGYIPP

SEQ ID NO: 26503 - protein, 7 aa, synthetic construct
YYNEGRI

SEQ ID NO: 26504 - protein, 7 aa, synthetic construct
YWQHGQT

SEQ ID NO: 26505 - protein, 7 aa, synthetic construct
LMHGGTG

SEQ ID NO: 26506 - protein, 7 aa, synthetic construct
IQHHAKA

SEQ ID NO: 26507 - protein, 7 aa, synthetic construct
THTHIGK

SEQ ID NO: 26508 - protein, 7 aa, synthetic construct
THAGRVD

SEQ ID NO: 26509 - protein, 7 aa, synthetic construct
PDSYGDI

SEQ ID NO: 26510 - protein, 7 aa, synthetic construct
HPHDSSE

SEQ ID NO: 26511 - protein, 7 aa, synthetic construct
NKPDENN

SEQ ID NO: 26512 - protein, 7 aa, synthetic construct
LAPGSAL

SEQ ID NO: 26513 - protein, 7 aa, synthetic construct
RDYLAHT

SEQ ID NO: 26514 - protein, 7 aa, synthetic construct
QITTTKP

SEQ ID NO: 26515 - protein, 7 aa, synthetic construct
SRDDIQY

SEQ ID NO: 26516 - protein, 7 aa, synthetic construct
FLGTQQV

SEQ ID NO: 26517 - protein, 7 aa, synthetic construct
SPTAEMH

SEQ ID NO: 26518 - protein, 7 aa, synthetic construct
QAYPAVK

SEQ ID NO: 26519 - protein, 7 aa, synthetic construct
PMEFKQI

SEQ ID NO: 26520 - protein, 7 aa, synthetic construct
IVKYSGA

SEQ ID NO: 26521 - protein, 7 aa, synthetic construct
VGGLPTE

SEQ ID NO: 26522 - protein, 7 aa, synthetic construct
HSTGINI

SEQ ID NO: 26523 - protein, 7 aa, synthetic construct
GPHDRAH

SEQ ID NO: 26524 - protein, 7 aa, synthetic construct
HQHMAPA

SEQ ID NO: 26525 - protein, 7 aa, synthetic construct
AITPPSG

SEQ ID NO: 26526 - protein, 7 aa, synthetic construct
QEDWYHE

SEQ ID NO: 26527 - protein, 7 aa, synthetic construct
HKNDRKD

SEQ ID NO: 26528 - protein, 7 aa, synthetic construct
HQGQGHW

SEQ ID NO: 26529 - protein, 7 aa, synthetic construct
TASPSNL

SEQ ID NO: 26530 - protein, 7 aa, synthetic construct
YEQPFPA

SEQ ID NO: 26531 - protein, 7 aa, synthetic construct
GINANHR

SEQ ID NO: 26532 - protein, 7 aa, synthetic construct
YLAKPDM

SEQ ID NO: 26533 - protein, 7 aa, synthetic construct
TPMVHGY

SEQ ID NO: 26534 - protein, 7 aa, synthetic construct
EFRETFA

SEQ ID NO: 26535 - protein, 7 aa, synthetic construct
RESIPDK

SEQ ID NO: 26536 - protein, 7 aa, synthetic construct
LYKSVHM

SEQ ID NO: 26537 - protein, 7 aa, synthetic construct
QPKVDFA

SEQ ID NO: 26538 - protein, 7 aa, synthetic construct
SDRGEYG

SEQ ID NO: 26539 - protein, 7 aa, synthetic construct
IDKNMVY

SEQ ID NO: 26540 - protein, 7 aa, synthetic construct
MPAQQVQ

SEQ ID NO: 26541 - protein, 7 aa, synthetic construct
FKKDCCI

SEQ ID NO: 26542 - protein, 7 aa, synthetic construct
LDGGWRS

SEQ ID NO: 26543 - protein, 7 aa, synthetic construct
AEGSVMS

SEQ ID NO: 26544 - protein, 7 aa, synthetic construct
IRSMNPM

SEQ ID NO: 26545 - protein, 7 aa, synthetic construct
RLNTHIA

SEQ ID NO: 26546 - protein, 7 aa, synthetic construct
HGAKGVM

SEQ ID NO: 26547 - protein, 7 aa, synthetic construct
ANQSRAS

SEQ ID NO: 26548 - protein, 7 aa, synthetic construct
FEGQRDE

SEQ ID NO: 26549 - protein, 7 aa, synthetic construct
ASHMPHD

SEQ ID NO: 26550 - protein, 7 aa, synthetic construct
ESPQPPF

SEQ ID NO: 26551 - protein, 7 aa, synthetic construct
IYTEGIP

SEQ ID NO: 26552 - protein, 7 aa, synthetic construct
YTDLGNP

SEQ ID NO: 26553 - protein, 7 aa, synthetic construct
IDKLTYV

SEQ ID NO: 26554 - protein, 7 aa, synthetic construct
ISNFRFE

SEQ ID NO: 26555 - protein, 7 aa, synthetic construct
NMNEAHN

SEQ ID NO: 26556 - protein, 7 aa, synthetic construct
LIAKDTN

SEQ ID NO: 26557 - protein, 7 aa, synthetic construct
WFNAKID

SEQ ID NO: 26558 - protein, 7 aa, synthetic construct
KKFGYPD

SEQ ID NO: 26559 - protein, 7 aa, synthetic construct
HEAVREF

SEQ ID NO: 26560 - protein, 7 aa, synthetic construct
GLIGFNE

SEQ ID NO: 26561 - protein, 7 aa, synthetic construct
QDINKTK

SEQ ID NO: 26562 - protein, 7 aa, synthetic construct
LPEDHRW

SEQ ID NO: 26563 - protein, 7 aa, synthetic construct
VSGPGYN

SEQ ID NO: 26564 - protein, 7 aa, synthetic construct
DQEHKKT

SEQ ID NO: 26565 - protein, 7 aa, synthetic construct
ANLTMEV

SEQ ID NO: 26566 - protein, 7 aa, synthetic construct
FMNSWKE

SEQ ID NO: 26567 - protein, 7 aa, synthetic construct
QDSFDRD

SEQ ID NO: 26568 - protein, 7 aa, synthetic construct
HSEAHER

SEQ ID NO: 26569 - protein, 7 aa, synthetic construct
AHEEMVN

SEQ ID NO: 26570 - protein, 7 aa, synthetic construct
SDDRHTA

SEQ ID NO: 26571 - protein, 7 aa, synthetic construct
ISPNITL

SEQ ID NO: 26572 - protein, 7 aa, synthetic construct
AQGMKSH

SEQ ID NO: 26573 - protein, 7 aa, synthetic construct
AEPLKVQ

SEQ ID NO: 26574 - protein, 7 aa, synthetic construct
SRVDYPA

SEQ ID NO: 26575 - protein, 7 aa, synthetic construct
NDSSLTA

SEQ ID NO: 26576 - protein, 7 aa, synthetic construct
TDPQNKQ

SEQ ID NO: 26577 - protein, 7 aa, synthetic construct
RRAPDIH

SEQ ID NO: 26578 - protein, 7 aa, synthetic construct
CKTLGGG

SEQ ID NO: 26579 - protein, 7 aa, synthetic construct
PHHNHST

SEQ ID NO: 26580 - protein, 7 aa, synthetic construct
YYGTIEE

SEQ ID NO: 26581 - protein, 7 aa, synthetic construct
SRQELGI

SEQ ID NO: 26582 - protein, 7 aa, synthetic construct
TEHRFST

SEQ ID NO: 26583 - protein, 7 aa, synthetic construct
KTNVNGI

SEQ ID NO: 26584 - protein, 7 aa, synthetic construct
HKINLQS

SEQ ID NO: 26585 - protein, 7 aa, synthetic construct
YGEAGFT

SEQ ID NO: 26586 - protein, 7 aa, synthetic construct
QNKDQGL

SEQ ID NO: 26587 - protein, 7 aa, synthetic construct
YPHFEAQ

SEQ ID NO: 26588 - protein, 7 aa, synthetic construct
WAQGKDP

SEQ ID NO: 26589 - protein, 7 aa, synthetic construct
PAFAPAP

SEQ ID NO: 26590 - protein, 7 aa, synthetic construct
FDKSATP

SEQ ID NO: 26591 - protein, 7 aa, synthetic construct
GLSGNNS

SEQ ID NO: 26592 - protein, 7 aa, synthetic construct
GAHDFYP

SEQ ID NO: 26593 - protein, 7 aa, synthetic construct
VPQMFKE

SEQ ID NO: 26594 - protein, 7 aa, synthetic construct
KMAHDLR

SEQ ID NO: 26595 - protein, 7 aa, synthetic construct
LMETKVV

SEQ ID NO: 26596 - protein, 7 aa, synthetic construct
EAVHGPS

SEQ ID NO: 26597 - protein, 7 aa, synthetic construct
PHLAANI

SEQ ID NO: 26598 - protein, 7 aa, synthetic construct
PGPSVLH

SEQ ID NO: 26599 - protein, 7 aa, synthetic construct
ALKNDVW

SEQ ID NO: 26600 - protein, 7 aa, synthetic construct
EPGPPQR

SEQ ID NO: 26601 - protein, 7 aa, synthetic construct
NRWGIND

SEQ ID NO: 26602 - protein, 7 aa, synthetic construct
FTEMSRE

SEQ ID NO: 26603 - protein, 7 aa, synthetic construct
RPEPVMR

SEQ ID NO: 26604 - protein, 7 aa, synthetic construct
NHIEENF

SEQ ID NO: 26605 - protein, 7 aa, synthetic construct
KTLPQTY

SEQ ID NO: 26606 - protein, 7 aa, synthetic construct
VMPEPEY

SEQ ID NO: 26607 - protein, 7 aa, synthetic construct
WGGPDLV

SEQ ID NO: 26608 - protein, 7 aa, synthetic construct
VPIQAVP

SEQ ID NO: 26609 - protein, 7 aa, synthetic construct
GIDPHYS

SEQ ID NO: 26610 - protein, 7 aa, synthetic construct
WFKKMDG

SEQ ID NO: 26611 - protein, 7 aa, synthetic construct
RNSPHHI

SEQ ID NO: 26612 - protein, 7 aa, synthetic construct
IEKSMIH

SEQ ID NO: 26613 - protein, 7 aa, synthetic construct
NNYHVED

SEQ ID NO: 26614 - protein, 7 aa, synthetic construct
GDNSQTH

SEQ ID NO: 26615 - protein, 7 aa, synthetic construct
NLKTHGT

SEQ ID NO: 26616 - protein, 7 aa, synthetic construct
QAKPMHG

SEQ ID NO: 26617 - protein, 7 aa, synthetic construct
HEQSNQI

SEQ ID NO: 26618 - protein, 7 aa, synthetic construct
DLHTTMH

SEQ ID NO: 26619 - protein, 7 aa, synthetic construct
AQMQVTK

SEQ ID NO: 26620 - protein, 7 aa, synthetic construct
AKMGVTD

SEQ ID NO: 26621 - protein, 7 aa, synthetic construct
MKQLLID

SEQ ID NO: 26622 - protein, 7 aa, synthetic construct
KDFKNVY

SEQ ID NO: 26623 - protein, 7 aa, synthetic construct
SPSAIYM

SEQ ID NO: 26624 - protein, 7 aa, synthetic construct
LTEGWAV

SEQ ID NO: 26625 - protein, 7 aa, synthetic construct
VGSITLD

SEQ ID NO: 26626 - protein, 7 aa, synthetic construct
PPPNERQ

SEQ ID NO: 26627 - protein, 7 aa, synthetic construct
EDKFHYK

SEQ ID NO: 26628 - protein, 7 aa, synthetic construct
MPPTTAY

SEQ ID NO: 26629 - protein, 7 aa, synthetic construct
AKDINLD

SEQ ID NO: 26630 - protein, 7 aa, synthetic construct
VATEYPP

SEQ ID NO: 26631 - protein, 7 aa, synthetic construct
HSTDNDS

SEQ ID NO: 26632 - protein, 7 aa, synthetic construct
ITNNWRG

SEQ ID NO: 26633 - protein, 7 aa, synthetic construct
THPATHV

SEQ ID NO: 26634 - protein, 7 aa, synthetic construct
PFRADNF

SEQ ID NO: 26635 - protein, 7 aa, synthetic construct
NATIQGI

SEQ ID NO: 26636 - protein, 7 aa, synthetic construct
VEYKVEG

SEQ ID NO: 26637 - protein, 7 aa, synthetic construct
NANFIVK

SEQ ID NO: 26638 - protein, 7 aa, synthetic construct
GAEYQSG

SEQ ID NO: 26639 - protein, 7 aa, synthetic construct
NHQNYSV

SEQ ID NO: 26640 - protein, 7 aa, synthetic construct
GTHIRSS

SEQ ID NO: 26641 - protein, 7 aa, synthetic construct
EMGNSVP

SEQ ID NO: 26642 - protein, 7 aa, synthetic construct
IVMEMEK

SEQ ID NO: 26643 - protein, 7 aa, synthetic construct
VASKDIK

SEQ ID NO: 26644 - protein, 7 aa, synthetic construct
EWRKNPE

SEQ ID NO: 26645 - protein, 7 aa, synthetic construct
YNVTDDR

SEQ ID NO: 26646 - protein, 7 aa, synthetic construct
YGFIETE

SEQ ID NO: 26647 - protein, 7 aa, synthetic construct
MHDSMRI

SEQ ID NO: 26648 - protein, 7 aa, synthetic construct
TDNQNIG

SEQ ID NO: 26649 - protein, 7 aa, synthetic construct
VVAGGNF

SEQ ID NO: 26650 - protein, 7 aa, synthetic construct
SINGQDL

SEQ ID NO: 26651 - protein, 7 aa, synthetic construct
APTFEHM

SEQ ID NO: 26652 - protein, 7 aa, synthetic construct
CKNPRDC

SEQ ID NO: 26653 - protein, 7 aa, synthetic construct
YFGMADE

SEQ ID NO: 26654 - protein, 7 aa, synthetic construct
PPFNDIP

SEQ ID NO: 26655 - protein, 7 aa, synthetic construct
KQAEVDF

SEQ ID NO: 26656 - protein, 7 aa, synthetic construct
TDHIRMI

SEQ ID NO: 26657 - protein, 7 aa, synthetic construct
PTVGGHE

SEQ ID NO: 26658 - protein, 7 aa, synthetic construct
FKDFEID

SEQ ID NO: 26659 - protein, 7 aa, synthetic construct
EEKEGSP

SEQ ID NO: 26660 - protein, 7 aa, synthetic construct
GTIIMTA

SEQ ID NO: 26661 - protein, 7 aa, synthetic construct
TPTATTL

SEQ ID NO: 26662 - protein, 7 aa, synthetic construct
LHTKTEW

SEQ ID NO: 26663 - protein, 7 aa, synthetic construct
QEFFGEA

SEQ ID NO: 26664 - protein, 7 aa, synthetic construct
EMRGHNG

SEQ ID NO: 26665 - protein, 7 aa, synthetic construct
SNHQDYK

SEQ ID NO: 26666 - protein, 7 aa, synthetic construct
IPTHQEV

SEQ ID NO: 26667 - protein, 7 aa, synthetic construct
ERIPQHD

SEQ ID NO: 26668 - protein, 7 aa, synthetic construct
CREMKCS

SEQ ID NO: 26669 - protein, 7 aa, synthetic construct
VGGPMIH

SEQ ID NO: 26670 - protein, 7 aa, synthetic construct
VNQMGNV

SEQ ID NO: 26671 - protein, 7 aa, synthetic construct
LYPQVQE

SEQ ID NO: 26672 - protein, 7 aa, synthetic construct
NADWKPM

SEQ ID NO: 26673 - protein, 7 aa, synthetic construct
REAPSVQ

SEQ ID NO: 26674 - protein, 7 aa, synthetic construct
LPGNREF

SEQ ID NO: 26675 - protein, 7 aa, synthetic construct
HFGLDQE

SEQ ID NO: 26676 - protein, 7 aa, synthetic construct
MIEWEHP

SEQ ID NO: 26677 - protein, 7 aa, synthetic construct
AKISESS

SEQ ID NO: 26678 - protein, 7 aa, synthetic construct
GNHPHEF

SEQ ID NO: 26679 - protein, 7 aa, synthetic construct
YQLPPDK

SEQ ID NO: 26680 - protein, 7 aa, synthetic construct
GGPQHHH

SEQ ID NO: 26681 - protein, 7 aa, synthetic construct
TPVPQSE

SEQ ID NO: 26682 - protein, 7 aa, synthetic construct
AQERDVT

SEQ ID NO: 26683 - protein, 7 aa, synthetic construct
RIQPHHS

SEQ ID NO: 26684 - protein, 7 aa, synthetic construct
NGVSMSR

SEQ ID NO: 26685 - protein, 7 aa, synthetic construct
AGENRDT

SEQ ID NO: 26686 - protein, 7 aa, synthetic construct
WFQGSQG

SEQ ID NO: 26687 - protein, 7 aa, synthetic construct
LTSPSSE

SEQ ID NO: 26688 - protein, 7 aa, synthetic construct
EKQTPPK

SEQ ID NO: 26689 - protein, 7 aa, synthetic construct
PSTHNYA

SEQ ID NO: 26690 - protein, 7 aa, synthetic construct
KPDWIKE

SEQ ID NO: 26691 - protein, 7 aa, synthetic construct
WFENIKD

SEQ ID NO: 26692 - protein, 7 aa, synthetic construct
RLELTHV

SEQ ID NO: 26693 - protein, 7 aa, synthetic construct
TTTYEKR

SEQ ID NO: 26694 - protein, 7 aa, synthetic construct
VPPANSA

SEQ ID NO: 26695 - protein, 7 aa, synthetic construct
IAKHGSM

SEQ ID NO: 26696 - protein, 7 aa, synthetic construct
KQQAPYI

SEQ ID NO: 26697 - protein, 7 aa, synthetic construct
VRMNEVD

SEQ ID NO: 26698 - protein, 7 aa, synthetic construct
EVTVSSS

SEQ ID NO: 26699 - protein, 7 aa, synthetic construct
YYGSLDP

SEQ ID NO: 26700 - protein, 7 aa, synthetic construct
PNTDQET

SEQ ID NO: 26701 - protein, 7 aa, synthetic construct
VDSQQGK

SEQ ID NO: 26702 - protein, 7 aa, synthetic construct
YKDLDPL

SEQ ID NO: 26703 - protein, 7 aa, synthetic construct
NYANHRP

SEQ ID NO: 26704 - protein, 7 aa, synthetic construct
QENHVSS

SEQ ID NO: 26705 - protein, 7 aa, synthetic construct
FGKTVGY

SEQ ID NO: 26706 - protein, 7 aa, synthetic construct
YWEGGGI

SEQ ID NO: 26707 - protein, 7 aa, synthetic construct
EMRENAH

SEQ ID NO: 26708 - protein, 7 aa, synthetic construct
RDPPFFE

SEQ ID NO: 26709 - protein, 7 aa, synthetic construct
EMMVEGR

SEQ ID NO: 26710 - protein, 7 aa, synthetic construct
SRNYIEH

SEQ ID NO: 26711 - protein, 7 aa, synthetic construct
GNFQRLS

SEQ ID NO: 26712 - protein, 7 aa, synthetic construct
QTEPLRE

SEQ ID NO: 26713 - protein, 7 aa, synthetic construct
HPTIDSA

SEQ ID NO: 26714 - protein, 7 aa, synthetic construct
NRNSGYM

SEQ ID NO: 26715 - protein, 7 aa, synthetic construct
AMQSQTK

SEQ ID NO: 26716 - protein, 7 aa, synthetic construct
PKGHEMQ

SEQ ID NO: 26717 - protein, 7 aa, synthetic construct
LDKEIHK

SEQ ID NO: 26718 - protein, 7 aa, synthetic construct
FETKEHG

SEQ ID NO: 26719 - protein, 7 aa, synthetic construct
LKRILDG

SEQ ID NO: 26720 - protein, 7 aa, synthetic construct
PHGATVT

SEQ ID NO: 26721 - protein, 7 aa, synthetic construct
MIGHIKV

SEQ ID NO: 26722 - protein, 7 aa, synthetic construct
DDSHREH

SEQ ID NO: 26723 - protein, 7 aa, synthetic construct
NEFIFKG

SEQ ID NO: 26724 - protein, 7 aa, synthetic construct
LVRMHNV

SEQ ID NO: 26725 - protein, 7 aa, synthetic construct
TDENPMG

SEQ ID NO: 26726 - protein, 7 aa, synthetic construct
NYQKEID

SEQ ID NO: 26727 - protein, 7 aa, synthetic construct
GIQHDMP

SEQ ID NO: 26728 - protein, 7 aa, synthetic construct
TAQYSSY

SEQ ID NO: 26729 - protein, 7 aa, synthetic construct
LYQNRTH

SEQ ID NO: 26730 - protein, 7 aa, synthetic construct
VDPLGGE

SEQ ID NO: 26731 - protein, 7 aa, synthetic construct
WFNENNP

SEQ ID NO: 26732 - protein, 7 aa, synthetic construct
GDQFARM

SEQ ID NO: 26733 - protein, 7 aa, synthetic construct
MPHIIQE

SEQ ID NO: 26734 - protein, 7 aa, synthetic construct
PETATYV

SEQ ID NO: 26735 - protein, 7 aa, synthetic construct
PAQEMNP

SEQ ID NO: 26736 - protein, 7 aa, synthetic construct
HPGHDIM

SEQ ID NO: 26737 - protein, 7 aa, synthetic construct
WVIDGHE

SEQ ID NO: 26738 - protein, 7 aa, synthetic construct
ASMEYKY

SEQ ID NO: 26739 - protein, 7 aa, synthetic construct
NEHPKTN

SEQ ID NO: 26740 - protein, 7 aa, synthetic construct
DEMPSRS

SEQ ID NO: 26741 - protein, 7 aa, synthetic construct
MVNRFHD

SEQ ID NO: 26742 - protein, 7 aa, synthetic construct
GMPRGNH

SEQ ID NO: 26743 - protein, 7 aa, synthetic construct
AHRSSIN

SEQ ID NO: 26744 - protein, 7 aa, synthetic construct
EQKEGKH

SEQ ID NO: 26745 - protein, 7 aa, synthetic construct
LDAFSRM

SEQ ID NO: 26746 - protein, 7 aa, synthetic construct
PYKAHQT

SEQ ID NO: 26747 - protein, 7 aa, synthetic construct
LESRNNL

SEQ ID NO: 26748 - protein, 7 aa, synthetic construct
DQSGELE

SEQ ID NO: 26749 - protein, 7 aa, synthetic construct
TLQGSLT

SEQ ID NO: 26750 - protein, 7 aa, synthetic construct
IQALSEK

SEQ ID NO: 26751 - protein, 7 aa, synthetic construct
VEPIVAG

SEQ ID NO: 26752 - protein, 7 aa, synthetic construct
VIKMMDS

SEQ ID NO: 26753 - protein, 7 aa, synthetic construct
HTDAQPA

SEQ ID NO: 26754 - protein, 7 aa, synthetic construct
AATGEDN

SEQ ID NO: 26755 - protein, 7 aa, synthetic construct
MRITVQD

SEQ ID NO: 26756 - protein, 7 aa, synthetic construct
EHASMTA

SEQ ID NO: 26757 - protein, 7 aa, synthetic construct
KEPPMQV

SEQ ID NO: 26758 - protein, 7 aa, synthetic construct
EGGMKVE

SEQ ID NO: 26759 - protein, 7 aa, synthetic construct
VYQAFSE

SEQ ID NO: 26760 - protein, 7 aa, synthetic construct
RGSMDKQ

SEQ ID NO: 26761 - protein, 7 aa, synthetic construct
DHSDWPA

SEQ ID NO: 26762 - protein, 7 aa, synthetic construct
MVMTMRE

SEQ ID NO: 26763 - protein, 7 aa, synthetic construct
EGVSVQK

SEQ ID NO: 26764 - protein, 7 aa, synthetic construct
PKMLELN

SEQ ID NO: 26765 - protein, 7 aa, synthetic construct
DAWKPGP

SEQ ID NO: 26766 - protein, 7 aa, synthetic construct
EKDNGYA

SEQ ID NO: 26767 - protein, 7 aa, synthetic construct
GLVSSDI

SEQ ID NO: 26768 - protein, 7 aa, synthetic construct
GVSFSVE

SEQ ID NO: 26769 - protein, 7 aa, synthetic construct
MVSAESM

SEQ ID NO: 26770 - protein, 7 aa, synthetic construct
VGQVMLH

SEQ ID NO: 26771 - protein, 7 aa, synthetic construct
VLSNGMT

SEQ ID NO: 26772 - protein, 7 aa, synthetic construct
ILHAMVE

SEQ ID NO: 26773 - protein, 7 aa, synthetic construct
IGEHREP

SEQ ID NO: 26774 - protein, 7 aa, synthetic construct
ILNSGSV

SEQ ID NO: 26775 - protein, 7 aa, synthetic construct
WKQNFSD

SEQ ID NO: 26776 - protein, 7 aa, synthetic construct
KYEKTLH

SEQ ID NO: 26777 - protein, 7 aa, synthetic construct
DTMSQGK

SEQ ID NO: 26778 - protein, 7 aa, synthetic construct
IAQVERM

SEQ ID NO: 26779 - protein, 7 aa, synthetic construct
YYEGTSR

SEQ ID NO: 26780 - protein, 7 aa, synthetic construct
KSEAVAN

SEQ ID NO: 26781 - protein, 7 aa, synthetic construct
LSMDSDM

SEQ ID NO: 26782 - protein, 7 aa, synthetic construct
ATHVSIP

SEQ ID NO: 26783 - protein, 7 aa, synthetic construct
YKAVDTR

SEQ ID NO: 26784 - protein, 7 aa, synthetic construct
IARPLQN

SEQ ID NO: 26785 - protein, 7 aa, synthetic construct
MNLHRNG

SEQ ID NO: 26786 - protein, 7 aa, synthetic construct
PNHDNIL

SEQ ID NO: 26787 - protein, 7 aa, synthetic construct
YKIKVIE

SEQ ID NO: 26788 - protein, 7 aa, synthetic construct
IKAGLHE

SEQ ID NO: 26789 - protein, 7 aa, synthetic construct
TGKPADD

SEQ ID NO: 26790 - protein, 7 aa, synthetic construct
MKVEQFQ

SEQ ID NO: 26791 - protein, 7 aa, synthetic construct
KTHFVEE

SEQ ID NO: 26792 - protein, 7 aa, synthetic construct
TVKDEYS

SEQ ID NO: 26793 - protein, 7 aa, synthetic construct
KNMRVDE

SEQ ID NO: 26794 - protein, 7 aa, synthetic construct
NHDIGNE

SEQ ID NO: 26795 - protein, 7 aa, synthetic construct
HFDNQDL

SEQ ID NO: 26796 - protein, 7 aa, synthetic construct
DDYAAHG

SEQ ID NO: 26797 - protein, 7 aa, synthetic construct
MHAHGSS

SEQ ID NO: 26798 - protein, 7 aa, synthetic construct
HQMGPGL

SEQ ID NO: 26799 - protein, 7 aa, synthetic construct
DGAPLRS

SEQ ID NO: 26800 - protein, 7 aa, synthetic construct
GGWNPVD

SEQ ID NO: 26801 - protein, 7 aa, synthetic construct
TGNHVVW

SEQ ID NO: 26802 - protein, 7 aa, synthetic construct
VKTGSHQ

SEQ ID NO: 26803 - protein, 7 aa, synthetic construct
QLMGHNE

SEQ ID NO: 26804 - protein, 7 aa, synthetic construct
DSLVKLA

SEQ ID NO: 26805 - protein, 7 aa, synthetic construct
NRNNQGS

SEQ ID NO: 26806 - protein, 7 aa, synthetic construct
QLRALQP

SEQ ID NO: 26807 - protein, 7 aa, synthetic construct
WGKEPAF

SEQ ID NO: 26808 - protein, 7 aa, synthetic construct
NVMNGQS

SEQ ID NO: 26809 - protein, 7 aa, synthetic construct
QAVNDMP

SEQ ID NO: 26810 - protein, 7 aa, synthetic construct
PAFAADP

SEQ ID NO: 26811 - protein, 7 aa, synthetic construct
NEKWDGN

SEQ ID NO: 26812 - protein, 7 aa, synthetic construct
AMAPVST

SEQ ID NO: 26813 - protein, 7 aa, synthetic construct
TNLLQHE

SEQ ID NO: 26814 - protein, 7 aa, synthetic construct
PVENQIH

SEQ ID NO: 26815 - protein, 7 aa, synthetic construct
QIANSHV

SEQ ID NO: 26816 - protein, 7 aa, synthetic construct
DPPWAQQ

SEQ ID NO: 26817 - protein, 7 aa, synthetic construct
NDPNVHR

SEQ ID NO: 26818 - protein, 7 aa, synthetic construct
RAAPAQI

SEQ ID NO: 26819 - protein, 7 aa, synthetic construct
PFHDNLK

SEQ ID NO: 26820 - protein, 7 aa, synthetic construct
TRENGNM

SEQ ID NO: 26821 - protein, 7 aa, synthetic construct
AEFGSGM

SEQ ID NO: 26822 - protein, 7 aa, synthetic construct
IAGDALR

SEQ ID NO: 26823 - protein, 7 aa, synthetic construct
DNSNHQF

SEQ ID NO: 26824 - protein, 7 aa, synthetic construct
FDQNRPD

SEQ ID NO: 26825 - protein, 7 aa, synthetic construct
KFSHGTP

SEQ ID NO: 26826 - protein, 7 aa, synthetic construct
PAFPATP

SEQ ID NO: 26827 - protein, 7 aa, synthetic construct
ILRADPM

SEQ ID NO: 26828 - protein, 7 aa, synthetic construct
PTIPKQV

SEQ ID NO: 26829 - protein, 7 aa, synthetic construct
DGTQGQG

SEQ ID NO: 26830 - protein, 7 aa, synthetic construct
IREYLPS

SEQ ID NO: 26831 - protein, 7 aa, synthetic construct
VPTDAHM

SEQ ID NO: 26832 - protein, 7 aa, synthetic construct
FMMAAEE

SEQ ID NO: 26833 - protein, 7 aa, synthetic construct
VPPNHSN

SEQ ID NO: 26834 - protein, 7 aa, synthetic construct
IANAPIQ

SEQ ID NO: 26835 - protein, 7 aa, synthetic construct
TNEQTAI

SEQ ID NO: 26836 - protein, 7 aa, synthetic construct
DFHHTTP

SEQ ID NO: 26837 - protein, 7 aa, synthetic construct
FFDGMSH

SEQ ID NO: 26838 - protein, 7 aa, synthetic construct
IVTAGAL

SEQ ID NO: 26839 - protein, 7 aa, synthetic construct
TYEKHDD

SEQ ID NO: 26840 - protein, 7 aa, synthetic construct
GKEFLHD

SEQ ID NO: 26841 - protein, 7 aa, synthetic construct
TGNPGWH

SEQ ID NO: 26842 - protein, 7 aa, synthetic construct
EHAQFPR

SEQ ID NO: 26843 - protein, 7 aa, synthetic construct
QDTLRKF

SEQ ID NO: 26844 - protein, 7 aa, synthetic construct
DWEPHAS

SEQ ID NO: 26845 - protein, 7 aa, synthetic construct
TGIWLED

SEQ ID NO: 26846 - protein, 7 aa, synthetic construct
GNNEKNP

SEQ ID NO: 26847 - protein, 7 aa, synthetic construct
EITNQPH

SEQ ID NO: 26848 - protein, 7 aa, synthetic construct
KQIVHVE

SEQ ID NO: 26849 - protein, 7 aa, synthetic construct
SPPSVLP

SEQ ID NO: 26850 - protein, 7 aa, synthetic construct
ASETNAA

SEQ ID NO: 26851 - protein, 7 aa, synthetic construct
GSHKVVF

SEQ ID NO: 26852 - protein, 7 aa, synthetic construct
KNDDIMT

SEQ ID NO: 26853 - protein, 7 aa, synthetic construct
NFKILNH

SEQ ID NO: 26854 - protein, 7 aa, synthetic construct
TNGQLAV

SEQ ID NO: 26855 - protein, 7 aa, synthetic construct
TSMGDFD

SEQ ID NO: 26856 - protein, 7 aa, synthetic construct
HHPDAVF

SEQ ID NO: 26857 - protein, 7 aa, synthetic construct
PDMSWQK

SEQ ID NO: 26858 - protein, 7 aa, synthetic construct
QNHNDHA

SEQ ID NO: 26859 - protein, 7 aa, synthetic construct
HINGYLG

SEQ ID NO: 26860 - protein, 7 aa, synthetic construct
VPPELGK

SEQ ID NO: 26861 - protein, 7 aa, synthetic construct
ESEYSSE

SEQ ID NO: 26862 - protein, 7 aa, synthetic construct
WHGIVER

SEQ ID NO: 26863 - protein, 7 aa, synthetic construct
DREARLY

SEQ ID NO: 26864 - protein, 7 aa, synthetic construct
GYAISEG

SEQ ID NO: 26865 - protein, 7 aa, synthetic construct
TMSDPFL

SEQ ID NO: 26866 - protein, 7 aa, synthetic construct
KGETIHR

SEQ ID NO: 26867 - protein, 7 aa, synthetic construct
VSPFKVQ

SEQ ID NO: 26868 - protein, 7 aa, synthetic construct
KVDYSPD

SEQ ID NO: 26869 - protein, 7 aa, synthetic construct
PQAQVPQ

SEQ ID NO: 26870 - protein, 7 aa, synthetic construct
ASSNQLF

SEQ ID NO: 26871 - protein, 7 aa, synthetic construct
QDKILKY

SEQ ID NO: 26872 - protein, 7 aa, synthetic construct
NRIQHEY

SEQ ID NO: 26873 - protein, 7 aa, synthetic construct
QQAKPGD

SEQ ID NO: 26874 - protein, 7 aa, synthetic construct
RHDLMIP

SEQ ID NO: 26875 - protein, 7 aa, synthetic construct
APPNNFP

SEQ ID NO: 26876 - protein, 7 aa, synthetic construct
WNQPNMI

SEQ ID NO: 26877 - protein, 7 aa, synthetic construct
YSNDRDD

SEQ ID NO: 26878 - protein, 7 aa, synthetic construct
YDRTLYP

SEQ ID NO: 26879 - protein, 7 aa, synthetic construct
VGQNQTI

SEQ ID NO: 26880 - protein, 7 aa, synthetic construct
KYRPQAE

SEQ ID NO: 26881 - protein, 7 aa, synthetic construct
DPAMPRF

SEQ ID NO: 26882 - protein, 7 aa, synthetic construct
ALLAYKG

SEQ ID NO: 26883 - protein, 7 aa, synthetic construct
QHAYQER

SEQ ID NO: 26884 - protein, 7 aa, synthetic construct
GIETVHV

SEQ ID NO: 26885 - protein, 7 aa, synthetic construct
PREDNSH

SEQ ID NO: 26886 - protein, 7 aa, synthetic construct
HSLSAVE

SEQ ID NO: 26887 - protein, 7 aa, synthetic construct
YMETWEP

SEQ ID NO: 26888 - protein, 7 aa, synthetic construct
IIVPSNT

SEQ ID NO: 26889 - protein, 7 aa, synthetic construct
IHQNHHH

SEQ ID NO: 26890 - protein, 7 aa, synthetic construct
KQILNQI

SEQ ID NO: 26891 - protein, 7 aa, synthetic construct
VKIDNVM

SEQ ID NO: 26892 - protein, 7 aa, synthetic construct
TFMTGGI

SEQ ID NO: 26893 - protein, 7 aa, synthetic construct
NTPLMGK

SEQ ID NO: 26894 - protein, 7 aa, synthetic construct
RYAEPDE

SEQ ID NO: 26895 - protein, 7 aa, synthetic construct
HFDKFGE

SEQ ID NO: 26896 - protein, 7 aa, synthetic construct
LPSQTMD

SEQ ID NO: 26897 - protein, 7 aa, synthetic construct
HSQPQTL

SEQ ID NO: 26898 - protein, 7 aa, synthetic construct
NEPTFHH

SEQ ID NO: 26899 - protein, 7 aa, synthetic construct
IKQPGET

SEQ ID NO: 26900 - protein, 7 aa, synthetic construct
WAEDKVG

SEQ ID NO: 26901 - protein, 7 aa, synthetic construct
DVTHVNS

SEQ ID NO: 26902 - protein, 7 aa, synthetic construct
QHKDITQ

SEQ ID NO: 26903 - protein, 7 aa, synthetic construct
NGMFVAS

SEQ ID NO: 26904 - protein, 7 aa, synthetic construct
RAQREND

SEQ ID NO: 26905 - protein, 7 aa, synthetic construct
QMRREII

SEQ ID NO: 26906 - protein, 7 aa, synthetic construct
LSVLIHD

SEQ ID NO: 26907 - protein, 7 aa, synthetic construct
VNGVGAI

SEQ ID NO: 26908 - protein, 7 aa, synthetic construct
VTGPLFK

SEQ ID NO: 26909 - protein, 7 aa, synthetic construct
MATNGPE

SEQ ID NO: 26910 - protein, 7 aa, synthetic construct
NPSPILA

SEQ ID NO: 26911 - protein, 7 aa, synthetic construct
CTKLAQC

SEQ ID NO: 26912 - protein, 7 aa, synthetic construct
MTPDSDQ

SEQ ID NO: 26913 - protein, 7 aa, synthetic construct
QVSHVFT

SEQ ID NO: 26914 - protein, 7 aa, synthetic construct
RRNHLDA

SEQ ID NO: 26915 - protein, 7 aa, synthetic construct
MKYSYEG

SEQ ID NO: 26916 - protein, 7 aa, synthetic construct
TFIEPKR

SEQ ID NO: 26917 - protein, 7 aa, synthetic construct
RTEQMDD

SEQ ID NO: 26918 - protein, 7 aa, synthetic construct
SVAAWHE

SEQ ID NO: 26919 - protein, 7 aa, synthetic construct
FHAHHAL

SEQ ID NO: 26920 - protein, 7 aa, synthetic construct
IMGEHPK

SEQ ID NO: 26921 - protein, 7 aa, synthetic construct
AEYNGPM

SEQ ID NO: 26922 - protein, 7 aa, synthetic construct
KISQEDR

SEQ ID NO: 26923 - protein, 7 aa, synthetic construct
NFQQLGD

SEQ ID NO: 26924 - protein, 7 aa, synthetic construct
CFKQIVC

SEQ ID NO: 26925 - protein, 7 aa, synthetic construct
RLEPEIH

SEQ ID NO: 26926 - protein, 7 aa, synthetic construct
HYQTNMT

SEQ ID NO: 26927 - protein, 7 aa, synthetic construct
ESERQNH

SEQ ID NO: 26928 - protein, 7 aa, synthetic construct
GQTVSHS

SEQ ID NO: 26929 - protein, 7 aa, synthetic construct
TMLMNNK

SEQ ID NO: 26930 - protein, 7 aa, synthetic construct
RILMQNP

SEQ ID NO: 26931 - protein, 7 aa, synthetic construct
DMHEASE

SEQ ID NO: 26932 - protein, 7 aa, synthetic construct
TYPRNLV

SEQ ID NO: 26933 - protein, 7 aa, synthetic construct
TGIERQD

SEQ ID NO: 26934 - protein, 7 aa, synthetic construct
SANMQGW

SEQ ID NO: 26935 - protein, 7 aa, synthetic construct
PHTHHIP

SEQ ID NO: 26936 - protein, 7 aa, synthetic construct
PKEFQDS

SEQ ID NO: 26937 - protein, 7 aa, synthetic construct
NQSRMAH

SEQ ID NO: 26938 - protein, 7 aa, synthetic construct
APNIVPE

SEQ ID NO: 26939 - protein, 7 aa, synthetic construct
HNGAMLR

SEQ ID NO: 26940 - protein, 7 aa, synthetic construct
QHGDGTK

SEQ ID NO: 26941 - protein, 7 aa, synthetic construct
YGNGGNP

SEQ ID NO: 26942 - protein, 7 aa, synthetic construct
ETNHLDP

SEQ ID NO: 26943 - protein, 7 aa, synthetic construct
PYDVRGA

SEQ ID NO: 26944 - protein, 7 aa, synthetic construct
QQYTRNV

SEQ ID NO: 26945 - protein, 7 aa, synthetic construct
VQKDNLD

SEQ ID NO: 26946 - protein, 7 aa, synthetic construct
NFKMHNQ

SEQ ID NO: 26947 - protein, 7 aa, synthetic construct
GDRSQMK

SEQ ID NO: 26948 - protein, 7 aa, synthetic construct
THTAEGW

SEQ ID NO: 26949 - protein, 7 aa, synthetic construct
ASPIHEF

SEQ ID NO: 26950 - protein, 7 aa, synthetic construct
NPIGMQQ

SEQ ID NO: 26951 - protein, 7 aa, synthetic construct
AKPEPYP

SEQ ID NO: 26952 - protein, 7 aa, synthetic construct
FGEHKGD

SEQ ID NO: 26953 - protein, 7 aa, synthetic construct
WAKQDNA

SEQ ID NO: 26954 - protein, 7 aa, synthetic construct
TDRSTRT

SEQ ID NO: 26955 - protein, 7 aa, synthetic construct
KNVKGIS

SEQ ID NO: 26956 - protein, 7 aa, synthetic construct
GRIDALL

SEQ ID NO: 26957 - protein, 7 aa, synthetic construct
KHGEKHV

SEQ ID NO: 26958 - protein, 7 aa, synthetic construct
KNFRTEG

SEQ ID NO: 26959 - protein, 7 aa, synthetic construct
LIQGASY

SEQ ID NO: 26960 - protein, 7 aa, synthetic construct
EMVPRTE

SEQ ID NO: 26961 - protein, 7 aa, synthetic construct
NHVREQD

SEQ ID NO: 26962 - protein, 7 aa, synthetic construct
LEPAKPN

SEQ ID NO: 26963 - protein, 7 aa, synthetic construct
TDTSKQY

SEQ ID NO: 26964 - protein, 7 aa, synthetic construct
GAAHHVK

SEQ ID NO: 26965 - protein, 7 aa, synthetic construct
HQVNQHD

SEQ ID NO: 26966 - protein, 7 aa, synthetic construct
KMARSEQ

SEQ ID NO: 26967 - protein, 7 aa, synthetic construct
ILDGSRV

SEQ ID NO: 26968 - protein, 7 aa, synthetic construct
FLPSRPE

SEQ ID NO: 26969 - protein, 7 aa, synthetic construct
ALPSSQW

SEQ ID NO: 26970 - protein, 7 aa, synthetic construct
DNMLKSP

SEQ ID NO: 26971 - protein, 7 aa, synthetic construct
ITRQTHF

SEQ ID NO: 26972 - protein, 7 aa, synthetic construct
NPAVAAQ

SEQ ID NO: 26973 - protein, 7 aa, synthetic construct
NMTNTHK

SEQ ID NO: 26974 - protein, 7 aa, synthetic construct
FRVEISN

SEQ ID NO: 26975 - protein, 7 aa, synthetic construct
KNHMGVP

SEQ ID NO: 26976 - protein, 7 aa, synthetic construct
WQQDSND

SEQ ID NO: 26977 - protein, 7 aa, synthetic construct
NQEGLVP

SEQ ID NO: 26978 - protein, 7 aa, synthetic construct
DLHKKQY

SEQ ID NO: 26979 - protein, 7 aa, synthetic construct
WTEAQMK

SEQ ID NO: 26980 - protein, 7 aa, synthetic construct
KHQDQID

SEQ ID NO: 26981 - protein, 7 aa, synthetic construct
EVDHPKS

SEQ ID NO: 26982 - protein, 7 aa, synthetic construct
SDAHGQP

SEQ ID NO: 26983 - protein, 7 aa, synthetic construct
EQSPQVI

SEQ ID NO: 26984 - protein, 7 aa, synthetic construct
RYMSVDT

SEQ ID NO: 26985 - protein, 7 aa, synthetic construct
AFNITHT

SEQ ID NO: 26986 - protein, 7 aa, synthetic construct
AASVNVF

SEQ ID NO: 26987 - protein, 7 aa, synthetic construct
ISMKDLI

SEQ ID NO: 26988 - protein, 7 aa, synthetic construct
WASAESM

SEQ ID NO: 26989 - protein, 7 aa, synthetic construct
HFSEEKG

SEQ ID NO: 26990 - protein, 7 aa, synthetic construct
LPRPVQT

SEQ ID NO: 26991 - protein, 7 aa, synthetic construct
ANHESMV

SEQ ID NO: 26992 - protein, 7 aa, synthetic construct
GQNAHYA

SEQ ID NO: 26993 - protein, 7 aa, synthetic construct
IGMSSKM

SEQ ID NO: 26994 - protein, 7 aa, synthetic construct
KHSQFDD

SEQ ID NO: 26995 - protein, 7 aa, synthetic construct
EQKYEQL

SEQ ID NO: 26996 - protein, 7 aa, synthetic construct
KPSTDLV

SEQ ID NO: 26997 - protein, 7 aa, synthetic construct
QTREVEL

SEQ ID NO: 26998 - protein, 7 aa, synthetic construct
YQKSMYT

SEQ ID NO: 26999 - protein, 7 aa, synthetic construct
RSLSKES

SEQ ID NO: 27000 - protein, 7 aa, synthetic construct
VHNTAYM

SEQ ID NO: 27001 - protein, 7 aa, synthetic construct
PKENNEY

SEQ ID NO: 27002 - protein, 7 aa, synthetic construct
KFDTKDK

SEQ ID NO: 27003 - protein, 7 aa, synthetic construct
LASADTR

SEQ ID NO: 27004 - protein, 7 aa, synthetic construct
PVVPTHK

SEQ ID NO: 27005 - protein, 7 aa, synthetic construct
KNQLSIV

SEQ ID NO: 27006 - protein, 7 aa, synthetic construct
GSRHDEA

SEQ ID NO: 27007 - protein, 7 aa, synthetic construct
WTDIKRM

SEQ ID NO: 27008 - protein, 7 aa, synthetic construct
VPVNAAK

SEQ ID NO: 27009 - protein, 7 aa, synthetic construct
AAAINAL

SEQ ID NO: 27010 - protein, 7 aa, synthetic construct
EIWTTSE

SEQ ID NO: 27011 - protein, 7 aa, synthetic construct
KEPRTFV

SEQ ID NO: 27012 - protein, 7 aa, synthetic construct
KTAPPQE

SEQ ID NO: 27013 - protein, 7 aa, synthetic construct
ENRHEKN

SEQ ID NO: 27014 - protein, 7 aa, synthetic construct
HGDAKDF

SEQ ID NO: 27015 - protein, 7 aa, synthetic construct
LLARSHQ

SEQ ID NO: 27016 - protein, 7 aa, synthetic construct
WQSTILK

SEQ ID NO: 27017 - protein, 7 aa, synthetic construct
HYKMNVQ

SEQ ID NO: 27018 - protein, 7 aa, synthetic construct
TVDNGYH

SEQ ID NO: 27019 - protein, 7 aa, synthetic construct
SMRVANM

SEQ ID NO: 27020 - protein, 7 aa, synthetic construct
RQEGYQF

SEQ ID NO: 27021 - protein, 7 aa, synthetic construct
MMPQPVR

SEQ ID NO: 27022 - protein, 7 aa, synthetic construct
NQNDHLN

SEQ ID NO: 27023 - protein, 7 aa, synthetic construct
DKADTRN

SEQ ID NO: 27024 - protein, 7 aa, synthetic construct
YKDKSLM

SEQ ID NO: 27025 - protein, 7 aa, synthetic construct
DCDGKRC

SEQ ID NO: 27026 - protein, 7 aa, synthetic construct
HPVPNAL

SEQ ID NO: 27027 - protein, 7 aa, synthetic construct
HGVAEYS

SEQ ID NO: 27028 - protein, 7 aa, synthetic construct
SRVADLR

SEQ ID NO: 27029 - protein, 7 aa, synthetic construct
DESYKLA

SEQ ID NO: 27030 - protein, 7 aa, synthetic construct
QNDSANN

SEQ ID NO: 27031 - protein, 7 aa, synthetic construct
RENHKLF

SEQ ID NO: 27032 - protein, 7 aa, synthetic construct
TISTIEG

SEQ ID NO: 27033 - protein, 7 aa, synthetic construct
QQTTDKE

SEQ ID NO: 27034 - protein, 7 aa, synthetic construct
QDVRSRS

SEQ ID NO: 27035 - protein, 7 aa, synthetic construct
NLGGEEH

SEQ ID NO: 27036 - protein, 7 aa, synthetic construct
LTNSPLS

SEQ ID NO: 27037 - protein, 7 aa, synthetic construct
EQKMDSH

SEQ ID NO: 27038 - protein, 7 aa, synthetic construct
YIQDQHF

SEQ ID NO: 27039 - protein, 7 aa, synthetic construct
PGEIRNF

SEQ ID NO: 27040 - protein, 7 aa, synthetic construct
TIMKEVN

SEQ ID NO: 27041 - protein, 7 aa, synthetic construct
DQSSSTS

SEQ ID NO: 27042 - protein, 7 aa, synthetic construct
HRHVHEQ

SEQ ID NO: 27043 - protein, 7 aa, synthetic construct
TNWDSEG

SEQ ID NO: 27044 - protein, 7 aa, synthetic construct
PNLGTHY

SEQ ID NO: 27045 - protein, 7 aa, synthetic construct
MTHMSQL

SEQ ID NO: 27046 - protein, 7 aa, synthetic construct
LYITTDS

SEQ ID NO: 27047 - protein, 7 aa, synthetic construct
VNVIVHE

SEQ ID NO: 27048 - protein, 7 aa, synthetic construct
RHERIIE

SEQ ID NO: 27049 - protein, 7 aa, synthetic construct
VLRMTEL

SEQ ID NO: 27050 - protein, 7 aa, synthetic construct
THDSIKL

SEQ ID NO: 27051 - protein, 7 aa, synthetic construct
DAPDTQK

SEQ ID NO: 27052 - protein, 7 aa, synthetic construct
KTPERPV

SEQ ID NO: 27053 - protein, 7 aa, synthetic construct
WDPFSAA

SEQ ID NO: 27054 - protein, 7 aa, synthetic construct
FNKLHGV

SEQ ID NO: 27055 - protein, 7 aa, synthetic construct
HNEGHRT

SEQ ID NO: 27056 - protein, 7 aa, synthetic construct
NGMKVEA

SEQ ID NO: 27057 - protein, 7 aa, synthetic construct
ANPDYIM

SEQ ID NO: 27058 - protein, 7 aa, synthetic construct
IDLKSKH

SEQ ID NO: 27059 - protein, 7 aa, synthetic construct
MHSPKMN

SEQ ID NO: 27060 - protein, 7 aa, synthetic construct
KDQPRGM

SEQ ID NO: 27061 - protein, 7 aa, synthetic construct
NHKDIVQ

SEQ ID NO: 27062 - protein, 7 aa, synthetic construct
TWNTQIE

SEQ ID NO: 27063 - protein, 7 aa, synthetic construct
HEKVKAE

SEQ ID NO: 27064 - protein, 7 aa, synthetic construct
VVQGDRV

SEQ ID NO: 27065 - protein, 7 aa, synthetic construct
EVVKGAI

SEQ ID NO: 27066 - protein, 7 aa, synthetic construct
EKGEPIM

SEQ ID NO: 27067 - protein, 7 aa, synthetic construct
NSNYQPV

SEQ ID NO: 27068 - protein, 7 aa, synthetic construct
TQKRVEF

SEQ ID NO: 27069 - protein, 7 aa, synthetic construct
GLVYTKS

SEQ ID NO: 27070 - protein, 7 aa, synthetic construct
PFIKGAE

SEQ ID NO: 27071 - protein, 7 aa, synthetic construct
QYDVAAG

SEQ ID NO: 27072 - protein, 7 aa, synthetic construct
DQHDYAS

SEQ ID NO: 27073 - protein, 7 aa, synthetic construct
WDNPAIA

SEQ ID NO: 27074 - protein, 7 aa, synthetic construct
SNPLHHI

SEQ ID NO: 27075 - protein, 7 aa, synthetic construct
RVFSEPD

SEQ ID NO: 27076 - protein, 7 aa, synthetic construct
QNSSDRD

SEQ ID NO: 27077 - protein, 7 aa, synthetic construct
NDFEGYS

SEQ ID NO: 27078 - protein, 7 aa, synthetic construct
NLTITKQ

SEQ ID NO: 27079 - protein, 7 aa, synthetic construct
EYAPHRM

SEQ ID NO: 27080 - protein, 7 aa, synthetic construct
AWSGDET

SEQ ID NO: 27081 - protein, 7 aa, synthetic construct
NMYPHHD

SEQ ID NO: 27082 - protein, 7 aa, synthetic construct
PKIAGIT

SEQ ID NO: 27083 - protein, 7 aa, synthetic construct
VLNQEMK

SEQ ID NO: 27084 - protein, 7 aa, synthetic construct
TGIVSLK

SEQ ID NO: 27085 - protein, 7 aa, synthetic construct
TSHKYHM

SEQ ID NO: 27086 - protein, 7 aa, synthetic construct
GTSQYDE

SEQ ID NO: 27087 - protein, 7 aa, synthetic construct
YQEKFGR

SEQ ID NO: 27088 - protein, 7 aa, synthetic construct
KVDNLYA

SEQ ID NO: 27089 - protein, 7 aa, synthetic construct
FERPHKV

SEQ ID NO: 27090 - protein, 7 aa, synthetic construct
AIRMEPV

SEQ ID NO: 27091 - protein, 7 aa, synthetic construct
QGAKPHD

SEQ ID NO: 27092 - protein, 7 aa, synthetic construct
KDIAVGN

SEQ ID NO: 27093 - protein, 7 aa, synthetic construct
QNHNQHA

SEQ ID NO: 27094 - protein, 7 aa, synthetic construct
SDVSYMA

SEQ ID NO: 27095 - protein, 7 aa, synthetic construct
EKDDLYP

SEQ ID NO: 27096 - protein, 7 aa, synthetic construct
MAYTGMI

SEQ ID NO: 27097 - protein, 7 aa, synthetic construct
ASRHFPV

SEQ ID NO: 27098 - protein, 7 aa, synthetic construct
SDNSFTG

SEQ ID NO: 27099 - protein, 7 aa, synthetic construct
QIIKDDM

SEQ ID NO: 27100 - protein, 7 aa, synthetic construct
QGASPPY

SEQ ID NO: 27101 - protein, 7 aa, synthetic construct
AAEKGTI

SEQ ID NO: 27102 - protein, 7 aa, synthetic construct
PSRFSES

SEQ ID NO: 27103 - protein, 7 aa, synthetic construct
GQLYLSE

SEQ ID NO: 27104 - protein, 7 aa, synthetic construct
EFKPEAT

SEQ ID NO: 27105 - protein, 7 aa, synthetic construct
DQLHHVV

SEQ ID NO: 27106 - protein, 7 aa, synthetic construct
WPDHNEF

SEQ ID NO: 27107 - protein, 7 aa, synthetic construct
KNHMLMG

SEQ ID NO: 27108 - protein, 7 aa, synthetic construct
FFPDATN

SEQ ID NO: 27109 - protein, 7 aa, synthetic construct
KGIIEGD

SEQ ID NO: 27110 - protein, 7 aa, synthetic construct
RHPQFYD

SEQ ID NO: 27111 - protein, 7 aa, synthetic construct
YQGHFID

SEQ ID NO: 27112 - protein, 7 aa, synthetic construct
LLTGVNE

SEQ ID NO: 27113 - protein, 7 aa, synthetic construct
NANMEKP

SEQ ID NO: 27114 - protein, 7 aa, synthetic construct
PDRIERV

SEQ ID NO: 27115 - protein, 7 aa, synthetic construct
FTQMFTG

SEQ ID NO: 27116 - protein, 7 aa, synthetic construct
ERKMHEI

SEQ ID NO: 27117 - protein, 7 aa, synthetic construct
KQAIGQY

SEQ ID NO: 27118 - protein, 7 aa, synthetic construct
LTNVGQM

SEQ ID NO: 27119 - protein, 7 aa, synthetic construct
FHDLNLK

SEQ ID NO: 27120 - protein, 7 aa, synthetic construct
WSLASEE

SEQ ID NO: 27121 - protein, 7 aa, synthetic construct
QTALFVE

SEQ ID NO: 27122 - protein, 7 aa, synthetic construct
WASTYSP

SEQ ID NO: 27123 - protein, 7 aa, synthetic construct
VHASVNS

SEQ ID NO: 27124 - protein, 7 aa, synthetic construct
NLTHQGN

SEQ ID NO: 27125 - protein, 7 aa, synthetic construct
NQVAAIH

SEQ ID NO: 27126 - protein, 7 aa, synthetic construct
SAYGPIV

SEQ ID NO: 27127 - protein, 7 aa, synthetic construct
NMKDPSY

SEQ ID NO: 27128 - protein, 7 aa, synthetic construct
ENPKTHF

SEQ ID NO: 27129 - protein, 7 aa, synthetic construct
PQPDSNV

SEQ ID NO: 27130 - protein, 7 aa, synthetic construct
ELKNHDL

SEQ ID NO: 27131 - protein, 7 aa, synthetic construct
NIYANAM

SEQ ID NO: 27132 - protein, 7 aa, synthetic construct
LHVVNSK

SEQ ID NO: 27133 - protein, 7 aa, synthetic construct
PSSEMPP

SEQ ID NO: 27134 - protein, 7 aa, synthetic construct
QNGITFT

SEQ ID NO: 27135 - protein, 7 aa, synthetic construct
SKIEFLG

SEQ ID NO: 27136 - protein, 7 aa, synthetic construct
KSETQYR

SEQ ID NO: 27137 - protein, 7 aa, synthetic construct
YVHENPV

SEQ ID NO: 27138 - protein, 7 aa, synthetic construct
EDARTAE

SEQ ID NO: 27139 - protein, 7 aa, synthetic construct
HQALDHE

SEQ ID NO: 27140 - protein, 7 aa, synthetic construct
AQFHSGM

SEQ ID NO: 27141 - protein, 7 aa, synthetic construct
QVAKLTH

SEQ ID NO: 27142 - protein, 7 aa, synthetic construct
ISNENRI

SEQ ID NO: 27143 - protein, 7 aa, synthetic construct
AYLQGGL

SEQ ID NO: 27144 - protein, 7 aa, synthetic construct
KEPSATK

SEQ ID NO: 27145 - protein, 7 aa, synthetic construct
EEVGYHH

SEQ ID NO: 27146 - protein, 7 aa, synthetic construct
MAQRMTQ

SEQ ID NO: 27147 - protein, 7 aa, synthetic construct
AAMRPML

SEQ ID NO: 27148 - protein, 7 aa, synthetic construct
MLRVMES

SEQ ID NO: 27149 - protein, 7 aa, synthetic construct
FMSGQIG

SEQ ID NO: 27150 - protein, 7 aa, synthetic construct
GSEAMIM

SEQ ID NO: 27151 - protein, 7 aa, synthetic construct
SDPTAPF

SEQ ID NO: 27152 - protein, 7 aa, synthetic construct
FDGTSNL

SEQ ID NO: 27153 - protein, 7 aa, synthetic construct
GGMEIGS

SEQ ID NO: 27154 - protein, 7 aa, synthetic construct
NLMMRFE

SEQ ID NO: 27155 - protein, 7 aa, synthetic construct
TVIMNAK

SEQ ID NO: 27156 - protein, 7 aa, synthetic construct
THDHPST

SEQ ID NO: 27157 - protein, 7 aa, synthetic construct
AMKSPMW

SEQ ID NO: 27158 - protein, 7 aa, synthetic construct
SGAIVYK

SEQ ID NO: 27159 - protein, 7 aa, synthetic construct
MGHSDDL

SEQ ID NO: 27160 - protein, 7 aa, synthetic construct
NDNQQRV

SEQ ID NO: 27161 - protein, 7 aa, synthetic construct
SHQPTDG

SEQ ID NO: 27162 - protein, 7 aa, synthetic construct
ETKRVHD

SEQ ID NO: 27163 - protein, 7 aa, synthetic construct
GVPGAPE

SEQ ID NO: 27164 - protein, 7 aa, synthetic construct
KKFDIQH

SEQ ID NO: 27165 - protein, 7 aa, synthetic construct
QLPQPEL

SEQ ID NO: 27166 - protein, 7 aa, synthetic construct
QLEIGRV

SEQ ID NO: 27167 - protein, 7 aa, synthetic construct
SGITGIY

SEQ ID NO: 27168 - protein, 7 aa, synthetic construct
DVGFIQG

SEQ ID NO: 27169 - protein, 7 aa, synthetic construct
IEAANTP

SEQ ID NO: 27170 - protein, 7 aa, synthetic construct
GMREYDL

SEQ ID NO: 27171 - protein, 7 aa, synthetic construct
HNFDKKN

SEQ ID NO: 27172 - protein, 7 aa, synthetic construct
DGERTQK

SEQ ID NO: 27173 - protein, 7 aa, synthetic construct
DKTEGLR

SEQ ID NO: 27174 - protein, 7 aa, synthetic construct
FTNQNHY

SEQ ID NO: 27175 - protein, 7 aa, synthetic construct
NDNYGES

SEQ ID NO: 27176 - protein, 7 aa, synthetic construct
FQNFVVS

SEQ ID NO: 27177 - protein, 7 aa, synthetic construct
AGYLANA

SEQ ID NO: 27178 - protein, 7 aa, synthetic construct
GKMLVGD

SEQ ID NO: 27179 - protein, 7 aa, synthetic construct
WHGDSGT

SEQ ID NO: 27180 - protein, 7 aa, synthetic construct
DPMRHKF

SEQ ID NO: 27181 - protein, 7 aa, synthetic construct
AKFHTIN

SEQ ID NO: 27182 - protein, 7 aa, synthetic construct
WNNYKEK

SEQ ID NO: 27183 - protein, 7 aa, synthetic construct
TNYGQAT

SEQ ID NO: 27184 - protein, 7 aa, synthetic construct
RDTITFV

SEQ ID NO: 27185 - protein, 7 aa, synthetic construct
MGAFSVT

SEQ ID NO: 27186 - protein, 7 aa, synthetic construct
ERDVQAQ

SEQ ID NO: 27187 - protein, 7 aa, synthetic construct
AGQMPSL

SEQ ID NO: 27188 - protein, 7 aa, synthetic construct
EVQRPPE

SEQ ID NO: 27189 - protein, 7 aa, synthetic construct
LKLEKME

SEQ ID NO: 27190 - protein, 7 aa, synthetic construct
WKTDQVY

SEQ ID NO: 27191 - protein, 7 aa, synthetic construct
ATKAING

SEQ ID NO: 27192 - protein, 7 aa, synthetic construct
YSVPSGR

SEQ ID NO: 27193 - protein, 7 aa, synthetic construct
PPGAQIE

SEQ ID NO: 27194 - protein, 7 aa, synthetic construct
KYANNAS

SEQ ID NO: 27195 - protein, 7 aa, synthetic construct
PISAVME

SEQ ID NO: 27196 - protein, 7 aa, synthetic construct
GSYKNTE

SEQ ID NO: 27197 - protein, 7 aa, synthetic construct
SSQGTEW

SEQ ID NO: 27198 - protein, 7 aa, synthetic construct
DHTNPIT

SEQ ID NO: 27199 - protein, 7 aa, synthetic construct
FFASENS

SEQ ID NO: 27200 - protein, 7 aa, synthetic construct
WIHGPKS

SEQ ID NO: 27201 - protein, 7 aa, synthetic construct
QVKNHDV

SEQ ID NO: 27202 - protein, 7 aa, synthetic construct
SDHKYTH

SEQ ID NO: 27203 - protein, 7 aa, synthetic construct
RHNNKDV

SEQ ID NO: 27204 - protein, 7 aa, synthetic construct
VGEHNRL

SEQ ID NO: 27205 - protein, 7 aa, synthetic construct
WDDIKKP

SEQ ID NO: 27206 - protein, 7 aa, synthetic construct
QAMDPKD

SEQ ID NO: 27207 - protein, 7 aa, synthetic construct
PGSQTSW

SEQ ID NO: 27208 - protein, 7 aa, synthetic construct
GYDATIP

SEQ ID NO: 27209 - protein, 7 aa, synthetic construct
NSTYPVR

SEQ ID NO: 27210 - protein, 7 aa, synthetic construct
ATSTELM

SEQ ID NO: 27211 - protein, 7 aa, synthetic construct
FISLRTD

SEQ ID NO: 27212 - protein, 7 aa, synthetic construct
NFGHDNT

SEQ ID NO: 27213 - protein, 7 aa, synthetic construct
PGISQNT

SEQ ID NO: 27214 - protein, 7 aa, synthetic construct
VMQFEFE

SEQ ID NO: 27215 - protein, 7 aa, synthetic construct
RLYGFKE

SEQ ID NO: 27216 - protein, 7 aa, synthetic construct
GIRSVMS

SEQ ID NO: 27217 - protein, 7 aa, synthetic construct
FNGAAMN

SEQ ID NO: 27218 - protein, 7 aa, synthetic construct
GTWQDQI

SEQ ID NO: 27219 - protein, 7 aa, synthetic construct
MESENGT

SEQ ID NO: 27220 - protein, 7 aa, synthetic construct
YLHGVNF

SEQ ID NO: 27221 - protein, 7 aa, synthetic construct
HMLNEYK

SEQ ID NO: 27222 - protein, 7 aa, synthetic construct
SNQGFIV

SEQ ID NO: 27223 - protein, 7 aa, synthetic construct
LSQQYPV

SEQ ID NO: 27224 - protein, 7 aa, synthetic construct
FGNINAT

SEQ ID NO: 27225 - protein, 7 aa, synthetic construct
NDQLAYK

SEQ ID NO: 27226 - protein, 7 aa, synthetic construct
SMGEQYK

SEQ ID NO: 27227 - protein, 7 aa, synthetic construct
YASHGEP

SEQ ID NO: 27228 - protein, 7 aa, synthetic construct
DHPTLMH

SEQ ID NO: 27229 - protein, 7 aa, synthetic construct
AREVVEG

SEQ ID NO: 27230 - protein, 7 aa, synthetic construct
GKLQAQE

SEQ ID NO: 27231 - protein, 7 aa, synthetic construct
SSATTLY

SEQ ID NO: 27232 - protein, 7 aa, synthetic construct
TNAIAPD

SEQ ID NO: 27233 - protein, 7 aa, synthetic construct
PRTMHPQ

SEQ ID NO: 27234 - protein, 7 aa, synthetic construct
PDGGGTW

SEQ ID NO: 27235 - protein, 7 aa, synthetic construct
HMFSKGA

SEQ ID NO: 27236 - protein, 7 aa, synthetic construct
AYNQDGL

SEQ ID NO: 27237 - protein, 7 aa, synthetic construct
WKSITTH

SEQ ID NO: 27238 - protein, 7 aa, synthetic construct
HIYQQEV

SEQ ID NO: 27239 - protein, 7 aa, synthetic construct
PDYPPME

SEQ ID NO: 27240 - protein, 7 aa, synthetic construct
PAARDWE

SEQ ID NO: 27241 - protein, 7 aa, synthetic construct
SYLRTPS

SEQ ID NO: 27242 - protein, 7 aa, synthetic construct
APVNMDT

SEQ ID NO: 27243 - protein, 7 aa, synthetic construct
SSEFLKP

SEQ ID NO: 27244 - protein, 7 aa, synthetic construct
PKHESQF

SEQ ID NO: 27245 - protein, 7 aa, synthetic construct
LFGNRLP

SEQ ID NO: 27246 - protein, 7 aa, synthetic construct
DSGQPQF

SEQ ID NO: 27247 - protein, 7 aa, synthetic construct
AISRSII

SEQ ID NO: 27248 - protein, 7 aa, synthetic construct
QGRATSL

SEQ ID NO: 27249 - protein, 7 aa, synthetic construct
GNMDGSF

SEQ ID NO: 27250 - protein, 7 aa, synthetic construct
VVNDMRE

SEQ ID NO: 27251 - protein, 7 aa, synthetic construct
QSYARPV

SEQ ID NO: 27252 - protein, 7 aa, synthetic construct
TLNQAFE

SEQ ID NO: 27253 - protein, 7 aa, synthetic construct
FRPTTVL

SEQ ID NO: 27254 - protein, 7 aa, synthetic construct
IETWNDS

SEQ ID NO: 27255 - protein, 7 aa, synthetic construct
ERQHEHR

SEQ ID NO: 27256 - protein, 7 aa, synthetic construct
GEAAAQH

SEQ ID NO: 27257 - protein, 7 aa, synthetic construct
TTTTHVN

SEQ ID NO: 27258 - protein, 7 aa, synthetic construct
QDHFQDA

SEQ ID NO: 27259 - protein, 7 aa, synthetic construct
YAQADGW

SEQ ID NO: 27260 - protein, 7 aa, synthetic construct
PGTEYPL

SEQ ID NO: 27261 - protein, 7 aa, synthetic construct
DVSMKLS

SEQ ID NO: 27262 - protein, 7 aa, synthetic construct
TRHFEGP

SEQ ID NO: 27263 - protein, 7 aa, synthetic construct
DHYDMSR

SEQ ID NO: 27264 - protein, 7 aa, synthetic construct
WVHQNTV

SEQ ID NO: 27265 - protein, 7 aa, synthetic construct
HIKNHLL

SEQ ID NO: 27266 - protein, 7 aa, synthetic construct
MGGLDDR

SEQ ID NO: 27267 - protein, 7 aa, synthetic construct
TAMLVPE

SEQ ID NO: 27268 - protein, 7 aa, synthetic construct
HVGANTS

SEQ ID NO: 27269 - protein, 7 aa, synthetic construct
ETHTKDN

SEQ ID NO: 27270 - protein, 7 aa, synthetic construct
NSMEANS

SEQ ID NO: 27271 - protein, 7 aa, synthetic construct
QTALMPL

SEQ ID NO: 27272 - protein, 7 aa, synthetic construct
NTNNMGE

SEQ ID NO: 27273 - protein, 7 aa, synthetic construct
GKLEDDM

SEQ ID NO: 27274 - protein, 7 aa, synthetic construct
KETFTEF

SEQ ID NO: 27275 - protein, 7 aa, synthetic construct
SHSKVVM

SEQ ID NO: 27276 - protein, 7 aa, synthetic construct
LAIMSKE

SEQ ID NO: 27277 - protein, 7 aa, synthetic construct
MYNPNDD

SEQ ID NO: 27278 - protein, 7 aa, synthetic construct
KKIGQGA

SEQ ID NO: 27279 - protein, 7 aa, synthetic construct
KNQWVAE

SEQ ID NO: 27280 - protein, 7 aa, synthetic construct
KPYGEDQ

SEQ ID NO: 27281 - protein, 7 aa, synthetic construct
VNHKAFS

SEQ ID NO: 27282 - protein, 7 aa, synthetic construct
YSVVAAK

SEQ ID NO: 27283 - protein, 7 aa, synthetic construct
EDVEKPK

SEQ ID NO: 27284 - protein, 7 aa, synthetic construct
PMHDFRE

SEQ ID NO: 27285 - protein, 7 aa, synthetic construct
QPQMHQV

SEQ ID NO: 27286 - protein, 7 aa, synthetic construct
NHYPSMP

SEQ ID NO: 27287 - protein, 7 aa, synthetic construct
DVSNGDM

SEQ ID NO: 27288 - protein, 7 aa, synthetic construct
SFEEMKP

SEQ ID NO: 27289 - protein, 7 aa, synthetic construct
RVYASSD

SEQ ID NO: 27290 - protein, 7 aa, synthetic construct
NDHEHGF

SEQ ID NO: 27291 - protein, 7 aa, synthetic construct
IGPKDHL

SEQ ID NO: 27292 - protein, 7 aa, synthetic construct
HSATLVP

SEQ ID NO: 27293 - protein, 7 aa, synthetic construct
GEGVFKN

SEQ ID NO: 27294 - protein, 7 aa, synthetic construct
MKTDTVD

SEQ ID NO: 27295 - protein, 7 aa, synthetic construct
IFPAKKE

SEQ ID NO: 27296 - protein, 7 aa, synthetic construct
HLTQATE

SEQ ID NO: 27297 - protein, 7 aa, synthetic construct
KFSEVDF

SEQ ID NO: 27298 - protein, 7 aa, synthetic construct
FKDYKNL

SEQ ID NO: 27299 - protein, 7 aa, synthetic construct
HAIVSIA

SEQ ID NO: 27300 - protein, 7 aa, synthetic construct
GQQIDVM

SEQ ID NO: 27301 - protein, 7 aa, synthetic construct
SHDVKAH

SEQ ID NO: 27302 - protein, 7 aa, synthetic construct
NMYPQQK

SEQ ID NO: 27303 - protein, 7 aa, synthetic construct
GRQIPVI

SEQ ID NO: 27304 - protein, 7 aa, synthetic construct
RYNGSVH

SEQ ID NO: 27305 - protein, 7 aa, synthetic construct
SNNSVPF

SEQ ID NO: 27306 - protein, 7 aa, synthetic construct
FHKSFMD

SEQ ID NO: 27307 - protein, 7 aa, synthetic construct
SLHSNTD

SEQ ID NO: 27308 - protein, 7 aa, synthetic construct
GSMHEHR

SEQ ID NO: 27309 - protein, 7 aa, synthetic construct
VAQHYQL

SEQ ID NO: 27310 - protein, 7 aa, synthetic construct
GVGEGQH

SEQ ID NO: 27311 - protein, 7 aa, synthetic construct
YSLHPQE

SEQ ID NO: 27312 - protein, 7 aa, synthetic construct
YDYAHIE

SEQ ID NO: 27313 - protein, 7 aa, synthetic construct
IHSDLQN

SEQ ID NO: 27314 - protein, 7 aa, synthetic construct
ARAAQTG

SEQ ID NO: 27315 - protein, 7 aa, synthetic construct
LYGLVNP

SEQ ID NO: 27316 - protein, 7 aa, synthetic construct
EKDPDRP

SEQ ID NO: 27317 - protein, 7 aa, synthetic construct
VTKDQFP

SEQ ID NO: 27318 - protein, 7 aa, synthetic construct
VVKIENL

SEQ ID NO: 27319 - protein, 7 aa, synthetic construct
HPFMRED

SEQ ID NO: 27320 - protein, 7 aa, synthetic construct
GAFDNNA

SEQ ID NO: 27321 - protein, 7 aa, synthetic construct
MYAKEVI

SEQ ID NO: 27322 - protein, 7 aa, synthetic construct
FQETTKQ

SEQ ID NO: 27323 - protein, 7 aa, synthetic construct
DPQFRYQ

SEQ ID NO: 27324 - protein, 7 aa, synthetic construct
TYQEIRA

SEQ ID NO: 27325 - protein, 7 aa, synthetic construct
QKYMLIE

SEQ ID NO: 27326 - protein, 7 aa, synthetic construct
EQNRPYM

SEQ ID NO: 27327 - protein, 7 aa, synthetic construct
YKDNWMS

SEQ ID NO: 27328 - protein, 7 aa, synthetic construct
MVSQGIT

SEQ ID NO: 27329 - protein, 7 aa, synthetic construct
KDFNNVI

SEQ ID NO: 27330 - protein, 7 aa, synthetic construct
IRGIPEE

SEQ ID NO: 27331 - protein, 7 aa, synthetic construct
HKSMDSH

SEQ ID NO: 27332 - protein, 7 aa, synthetic construct
AREIKAE

SEQ ID NO: 27333 - protein, 7 aa, synthetic construct
DPLDPQS

SEQ ID NO: 27334 - protein, 7 aa, synthetic construct
MYRENSL

SEQ ID NO: 27335 - protein, 7 aa, synthetic construct
LPERAFH

SEQ ID NO: 27336 - protein, 7 aa, synthetic construct
CMEKAII

SEQ ID NO: 27337 - protein, 7 aa, synthetic construct
GHSLNDV

SEQ ID NO: 27338 - protein, 7 aa, synthetic construct
EKFGENL

SEQ ID NO: 27339 - protein, 7 aa, synthetic construct
QTMDKVY

SEQ ID NO: 27340 - protein, 7 aa, synthetic construct
DAGVAAI

SEQ ID NO: 27341 - protein, 7 aa, synthetic construct
NVSQKSL

SEQ ID NO: 27342 - protein, 7 aa, synthetic construct
FYTDPVR

SEQ ID NO: 27343 - protein, 7 aa, synthetic construct
DQQVGFE

SEQ ID NO: 27344 - protein, 7 aa, synthetic construct
NNAVLGF

SEQ ID NO: 27345 - protein, 7 aa, synthetic construct
NSVFIVP

SEQ ID NO: 27346 - protein, 7 aa, synthetic construct
TDTKGPP

SEQ ID NO: 27347 - protein, 7 aa, synthetic construct
SGHHFKA

SEQ ID NO: 27348 - protein, 7 aa, synthetic construct
LGDFSQV

SEQ ID NO: 27349 - protein, 7 aa, synthetic construct
NWDNDNA

SEQ ID NO: 27350 - protein, 7 aa, synthetic construct
WHHERSS

SEQ ID NO: 27351 - protein, 7 aa, synthetic construct
QGIGMQI

SEQ ID NO: 27352 - protein, 7 aa, synthetic construct
TVDLKSA

SEQ ID NO: 27353 - protein, 7 aa, synthetic construct
DRLSHEK

SEQ ID NO: 27354 - protein, 7 aa, synthetic construct
WMDSQTS

SEQ ID NO: 27355 - protein, 7 aa, synthetic construct
IQQTTDS

SEQ ID NO: 27356 - protein, 7 aa, synthetic construct
PYKDAAD

SEQ ID NO: 27357 - protein, 7 aa, synthetic construct
YARISDV

SEQ ID NO: 27358 - protein, 7 aa, synthetic construct
YVMANPT

SEQ ID NO: 27359 - protein, 7 aa, synthetic construct
YPFHEAG

SEQ ID NO: 27360 - protein, 7 aa, synthetic construct
YNADIQY

SEQ ID NO: 27361 - protein, 7 aa, synthetic construct
HENHSQN

SEQ ID NO: 27362 - protein, 7 aa, synthetic construct
WSQTDPR

SEQ ID NO: 27363 - protein, 7 aa, synthetic construct
ILNDGPT

SEQ ID NO: 27364 - protein, 7 aa, synthetic construct
PVEEKGS

SEQ ID NO: 27365 - protein, 7 aa, synthetic construct
LRQPAFA

SEQ ID NO: 27366 - protein, 7 aa, synthetic construct
FNRETEI

SEQ ID NO: 27367 - protein, 7 aa, synthetic construct
CSITDCD

SEQ ID NO: 27368 - protein, 7 aa, synthetic construct
LMEHTMD

SEQ ID NO: 27369 - protein, 7 aa, synthetic construct
YDTQMLS

SEQ ID NO: 27370 - protein, 7 aa, synthetic construct
AHTVKPQ

SEQ ID NO: 27371 - protein, 7 aa, synthetic construct
EAPRVQI

SEQ ID NO: 27372 - protein, 7 aa, synthetic construct
EQDKFTF

SEQ ID NO: 27373 - protein, 7 aa, synthetic construct
DPADKMK

SEQ ID NO: 27374 - protein, 7 aa, synthetic construct
MLHNTRA

SEQ ID NO: 27375 - protein, 7 aa, synthetic construct
QAQHTIE

SEQ ID NO: 27376 - protein, 7 aa, synthetic construct
STEQSHY

SEQ ID NO: 27377 - protein, 7 aa, synthetic construct
AKAVVLA

SEQ ID NO: 27378 - protein, 7 aa, synthetic construct
VMQGDLS

SEQ ID NO: 27379 - protein, 7 aa, synthetic construct
HGHVTGI

SEQ ID NO: 27380 - protein, 7 aa, synthetic construct
NDDFEVR

SEQ ID NO: 27381 - protein, 7 aa, synthetic construct
NTSGPLM

SEQ ID NO: 27382 - protein, 7 aa, synthetic construct
VKSIVED

SEQ ID NO: 27383 - protein, 7 aa, synthetic construct
WKNVKDP

SEQ ID NO: 27384 - protein, 7 aa, synthetic construct
GMTSQHW

SEQ ID NO: 27385 - protein, 7 aa, synthetic construct
GETYVKK

SEQ ID NO: 27386 - protein, 7 aa, synthetic construct
PYIQPEA

SEQ ID NO: 27387 - protein, 7 aa, synthetic construct
VGPNHVE

SEQ ID NO: 27388 - protein, 7 aa, synthetic construct
WQFTREA

SEQ ID NO: 27389 - protein, 7 aa, synthetic construct
YSDAQGL

SEQ ID NO: 27390 - protein, 7 aa, synthetic construct
YHQRGMN

SEQ ID NO: 27391 - protein, 7 aa, synthetic construct
NEHRYDL

SEQ ID NO: 27392 - protein, 7 aa, synthetic construct
YNGHQLY

SEQ ID NO: 27393 - protein, 7 aa, synthetic construct
RETEKAP

SEQ ID NO: 27394 - protein, 7 aa, synthetic construct
ITGMYAQ

SEQ ID NO: 27395 - protein, 7 aa, synthetic construct
YPPNFVQ

SEQ ID NO: 27396 - protein, 7 aa, synthetic construct
QEYVDRH

SEQ ID NO: 27397 - protein, 7 aa, synthetic construct
WSPAKNR

SEQ ID NO: 27398 - protein, 7 aa, synthetic construct
ANPDMLQ

SEQ ID NO: 27399 - protein, 7 aa, synthetic construct
QSMQSLP

SEQ ID NO: 27400 - protein, 7 aa, synthetic construct
SSSSPQE

SEQ ID NO: 27401 - protein, 7 aa, synthetic construct
YVNTTVP

SEQ ID NO: 27402 - protein, 7 aa, synthetic construct
GSFGINM

SEQ ID NO: 27403 - protein, 7 aa, synthetic construct
QVVAPYD

SEQ ID NO: 27404 - protein, 7 aa, synthetic construct
FAMDSHP

SEQ ID NO: 27405 - protein, 7 aa, synthetic construct
VDNWKRT

SEQ ID NO: 27406 - protein, 7 aa, synthetic construct
KAPEYGK

SEQ ID NO: 27407 - protein, 7 aa, synthetic construct
KMVAAIP

SEQ ID NO: 27408 - protein, 7 aa, synthetic construct
HQENQWS

SEQ ID NO: 27409 - protein, 7 aa, synthetic construct
EWMTDKP

SEQ ID NO: 27410 - protein, 7 aa, synthetic construct
KINPHNS

SEQ ID NO: 27411 - protein, 7 aa, synthetic construct
DPDIHKD

SEQ ID NO: 27412 - protein, 7 aa, synthetic construct
TQPRSAH

SEQ ID NO: 27413 - protein, 7 aa, synthetic construct
MNQAKYS

SEQ ID NO: 27414 - protein, 7 aa, synthetic construct
LRSHPYS

SEQ ID NO: 27415 - protein, 7 aa, synthetic construct
DTEVRIF

SEQ ID NO: 27416 - protein, 7 aa, synthetic construct
GKMDDLV

SEQ ID NO: 27417 - protein, 7 aa, synthetic construct
APLSMAH

SEQ ID NO: 27418 - protein, 7 aa, synthetic construct
LAQKQAL

SEQ ID NO: 27419 - protein, 7 aa, synthetic construct
GRKFINE

SEQ ID NO: 27420 - protein, 7 aa, synthetic construct
SLNPHFS

SEQ ID NO: 27421 - protein, 7 aa, synthetic construct
WPPPPDA

SEQ ID NO: 27422 - protein, 7 aa, synthetic construct
PLTPNQA

SEQ ID NO: 27423 - protein, 7 aa, synthetic construct
EPQTHVE

SEQ ID NO: 27424 - protein, 7 aa, synthetic construct
KMTTATW

SEQ ID NO: 27425 - protein, 7 aa, synthetic construct
TFKVTGF

SEQ ID NO: 27426 - protein, 7 aa, synthetic construct
HYVASPV

SEQ ID NO: 27427 - protein, 7 aa, synthetic construct
DTYGTRY

SEQ ID NO: 27428 - protein, 7 aa, synthetic construct
MASMPLG

SEQ ID NO: 27429 - protein, 7 aa, synthetic construct
HKVVDRS

SEQ ID NO: 27430 - protein, 7 aa, synthetic construct
MERDQQL

SEQ ID NO: 27431 - protein, 7 aa, synthetic construct
EDKWKAG

SEQ ID NO: 27432 - protein, 7 aa, synthetic construct
MWHGKPS

SEQ ID NO: 27433 - protein, 7 aa, synthetic construct
FQPSTLK

SEQ ID NO: 27434 - protein, 7 aa, synthetic construct
GDKVYEI

SEQ ID NO: 27435 - protein, 7 aa, synthetic construct
TQHNKDI

SEQ ID NO: 27436 - protein, 7 aa, synthetic construct
KAAAQLF

SEQ ID NO: 27437 - protein, 7 aa, synthetic construct
AANMGDP

SEQ ID NO: 27438 - protein, 7 aa, synthetic construct
YIHNNSN

SEQ ID NO: 27439 - protein, 7 aa, synthetic construct
MPITKGA

SEQ ID NO: 27440 - protein, 7 aa, synthetic construct
TKLFSPE

SEQ ID NO: 27441 - protein, 7 aa, synthetic construct
RGAMLTS

SEQ ID NO: 27442 - protein, 7 aa, synthetic construct
VQKQEYW

SEQ ID NO: 27443 - protein, 7 aa, synthetic construct
NPMPHHY

SEQ ID NO: 27444 - protein, 7 aa, synthetic construct
MEKLSEH

SEQ ID NO: 27445 - protein, 7 aa, synthetic construct
HIEPKQT

SEQ ID NO: 27446 - protein, 7 aa, synthetic construct
ADMNGYE

SEQ ID NO: 27447 - protein, 7 aa, synthetic construct
NTDFIMP

SEQ ID NO: 27448 - protein, 7 aa, synthetic construct
LQAEMMG

SEQ ID NO: 27449 - protein, 7 aa, synthetic construct
ILKYDAD

SEQ ID NO: 27450 - protein, 7 aa, synthetic construct
RFMQSQP

SEQ ID NO: 27451 - protein, 7 aa, synthetic construct
IMTNVQY

SEQ ID NO: 27452 - protein, 7 aa, synthetic construct
YRTDIKH

SEQ ID NO: 27453 - protein, 7 aa, synthetic construct
WANAVVK

SEQ ID NO: 27454 - protein, 7 aa, synthetic construct
PTDETDF

SEQ ID NO: 27455 - protein, 7 aa, synthetic construct
NSGLFPQ

SEQ ID NO: 27456 - protein, 7 aa, synthetic construct
GDQREFK

SEQ ID NO: 27457 - protein, 7 aa, synthetic construct
NPGTTFH

SEQ ID NO: 27458 - protein, 7 aa, synthetic construct
YMQPERH

SEQ ID NO: 27459 - protein, 7 aa, synthetic construct
NDQAPDR

SEQ ID NO: 27460 - protein, 7 aa, synthetic construct
TTEWQAI

SEQ ID NO: 27461 - protein, 7 aa, synthetic construct
GPQGETK

SEQ ID NO: 27462 - protein, 7 aa, synthetic construct
QDYEMSR

SEQ ID NO: 27463 - protein, 7 aa, synthetic construct
SGYDPVA

SEQ ID NO: 27464 - protein, 7 aa, synthetic construct
GGSTQAE

SEQ ID NO: 27465 - protein, 7 aa, synthetic construct
DKHESIV

SEQ ID NO: 27466 - protein, 7 aa, synthetic construct
YAEYIMS

SEQ ID NO: 27467 - protein, 7 aa, synthetic construct
SHEPYPP

SEQ ID NO: 27468 - protein, 7 aa, synthetic construct
PKAEINS

SEQ ID NO: 27469 - protein, 7 aa, synthetic construct
NWNPGPN

SEQ ID NO: 27470 - protein, 7 aa, synthetic construct
EKNYQPK

SEQ ID NO: 27471 - protein, 7 aa, synthetic construct
GHLREED

SEQ ID NO: 27472 - protein, 7 aa, synthetic construct
DQAGRIE

SEQ ID NO: 27473 - protein, 7 aa, synthetic construct
NRKHEGA

SEQ ID NO: 27474 - protein, 7 aa, synthetic construct
RVSALSP

SEQ ID NO: 27475 - protein, 7 aa, synthetic construct
HHTESKV

SEQ ID NO: 27476 - protein, 7 aa, synthetic construct
LPFHSAN

SEQ ID NO: 27477 - protein, 7 aa, synthetic construct
MNHNHNH

SEQ ID NO: 27478 - protein, 7 aa, synthetic construct
IAEAKML

SEQ ID NO: 27479 - protein, 7 aa, synthetic construct
IVNTLTV

SEQ ID NO: 27480 - protein, 7 aa, synthetic construct
AHLPEDH

SEQ ID NO: 27481 - protein, 7 aa, synthetic construct
SRLNSLT

SEQ ID NO: 27482 - protein, 7 aa, synthetic construct
HEKVLAM

SEQ ID NO: 27483 - protein, 7 aa, synthetic construct
AHTDTRK

SEQ ID NO: 27484 - protein, 7 aa, synthetic construct
THPEVPQ

SEQ ID NO: 27485 - protein, 7 aa, synthetic construct
VSKWAVS

SEQ ID NO: 27486 - protein, 7 aa, synthetic construct
IGKFPMY

SEQ ID NO: 27487 - protein, 7 aa, synthetic construct
WKSPMNV

SEQ ID NO: 27488 - protein, 7 aa, synthetic construct
KEDHVAL

SEQ ID NO: 27489 - protein, 7 aa, synthetic construct
RSDTFVS

SEQ ID NO: 27490 - protein, 7 aa, synthetic construct
FPEFKAN

SEQ ID NO: 27491 - protein, 7 aa, synthetic construct
PVMLKTG

SEQ ID NO: 27492 - protein, 7 aa, synthetic construct
SDSPQVY

SEQ ID NO: 27493 - protein, 7 aa, synthetic construct
HELRVMG

SEQ ID NO: 27494 - protein, 7 aa, synthetic construct
GLGSLGN

SEQ ID NO: 27495 - protein, 7 aa, synthetic construct
NRAEAHY

SEQ ID NO: 27496 - protein, 7 aa, synthetic construct
SMAVDTV

SEQ ID NO: 27497 - protein, 7 aa, synthetic construct
KDPTFNI

SEQ ID NO: 27498 - protein, 7 aa, synthetic construct
MRRDYNS

SEQ ID NO: 27499 - protein, 7 aa, synthetic construct
HFSDKKN

SEQ ID NO: 27500 - protein, 7 aa, synthetic construct
QFQAHME

SEQ ID NO: 27501 - protein, 7 aa, synthetic construct
FMQQAHP

SEQ ID NO: 27502 - protein, 7 aa, synthetic construct
VYHAEEY

SEQ ID NO: 27503 - protein, 7 aa, synthetic construct
EGQFGQV

SEQ ID NO: 27504 - protein, 7 aa, synthetic construct
APMVAIT

SEQ ID NO: 27505 - protein, 7 aa, synthetic construct
DEKTKET

SEQ ID NO: 27506 - protein, 7 aa, synthetic construct
VVHPMQN

SEQ ID NO: 27507 - protein, 7 aa, synthetic construct
FMQSLDL

SEQ ID NO: 27508 - protein, 7 aa, synthetic construct
HVVGERV

SEQ ID NO: 27509 - protein, 7 aa, synthetic construct
ADYHMAA

SEQ ID NO: 27510 - protein, 7 aa, synthetic construct
MKLSNMY

SEQ ID NO: 27511 - protein, 7 aa, synthetic construct
TWDKSAH

SEQ ID NO: 27512 - protein, 7 aa, synthetic construct
KVNTIVN

SEQ ID NO: 27513 - protein, 7 aa, synthetic construct
EYDARHE

SEQ ID NO: 27514 - protein, 7 aa, synthetic construct
EERHKQL

SEQ ID NO: 27515 - protein, 7 aa, synthetic construct
APVNPER

SEQ ID NO: 27516 - protein, 7 aa, synthetic construct
HYREALS

SEQ ID NO: 27517 - protein, 7 aa, synthetic construct
HSMSDDK

SEQ ID NO: 27518 - protein, 7 aa, synthetic construct
GLSMNDT

SEQ ID NO: 27519 - protein, 7 aa, synthetic construct
RPQPALF

SEQ ID NO: 27520 - protein, 7 aa, synthetic construct
ISMAEHK

SEQ ID NO: 27521 - protein, 7 aa, synthetic construct
EAMTQRV

SEQ ID NO: 27522 - protein, 7 aa, synthetic construct
GVPPPGA

SEQ ID NO: 27523 - protein, 7 aa, synthetic construct
MNHNILV

SEQ ID NO: 27524 - protein, 7 aa, synthetic construct
TDIVYRA

SEQ ID NO: 27525 - protein, 7 aa, synthetic construct
YIQKFDG

SEQ ID NO: 27526 - protein, 7 aa, synthetic construct
VSNAWDR

SEQ ID NO: 27527 - protein, 7 aa, synthetic construct
HASHVFV

SEQ ID NO: 27528 - protein, 7 aa, synthetic construct
ADATSHE

SEQ ID NO: 27529 - protein, 7 aa, synthetic construct
AKNPSLR

SEQ ID NO: 27530 - protein, 7 aa, synthetic construct
VSKENAH

SEQ ID NO: 27531 - protein, 7 aa, synthetic construct
SHNTHRG

SEQ ID NO: 27532 - protein, 7 aa, synthetic construct
GQFEMQG

SEQ ID NO: 27533 - protein, 7 aa, synthetic construct
TKQVIQY

SEQ ID NO: 27534 - protein, 7 aa, synthetic construct
YHTLGPQ

SEQ ID NO: 27535 - protein, 7 aa, synthetic construct
HLNDMSN

SEQ ID NO: 27536 - protein, 7 aa, synthetic construct
HDGFVNP

SEQ ID NO: 27537 - protein, 7 aa, synthetic construct
LEGSVTP

SEQ ID NO: 27538 - protein, 7 aa, synthetic construct
VLDRMEN

SEQ ID NO: 27539 - protein, 7 aa, synthetic construct
EGSKDYI

SEQ ID NO: 27540 - protein, 7 aa, synthetic construct
INDGWSK

SEQ ID NO: 27541 - protein, 7 aa, synthetic construct
GYQSQMH

SEQ ID NO: 27542 - protein, 7 aa, synthetic construct
NLPAAGY

SEQ ID NO: 27543 - protein, 7 aa, synthetic construct
VQLPQNP

SEQ ID NO: 27544 - protein, 7 aa, synthetic construct
WSKDVTE

SEQ ID NO: 27545 - protein, 7 aa, synthetic construct
YLTITTS

SEQ ID NO: 27546 - protein, 7 aa, synthetic construct
ISQHYPM

SEQ ID NO: 27547 - protein, 7 aa, synthetic construct
NIEPTSN

SEQ ID NO: 27548 - protein, 7 aa, synthetic construct
HVPMRNH

SEQ ID NO: 27549 - protein, 7 aa, synthetic construct
IGYGGPL

SEQ ID NO: 27550 - protein, 7 aa, synthetic construct
MDFGKPE

SEQ ID NO: 27551 - protein, 7 aa, synthetic construct
PEINSHK

SEQ ID NO: 27552 - protein, 7 aa, synthetic construct
VYLVQKE

SEQ ID NO: 27553 - protein, 7 aa, synthetic construct
HAVRVSH

SEQ ID NO: 27554 - protein, 7 aa, synthetic construct
DHGSIGW

SEQ ID NO: 27555 - protein, 7 aa, synthetic construct
TNHMRMT

SEQ ID NO: 27556 - protein, 7 aa, synthetic construct
LQFHPVP

SEQ ID NO: 27557 - protein, 7 aa, synthetic construct
VVEVKTI

SEQ ID NO: 27558 - protein, 7 aa, synthetic construct
IKYVVGE

SEQ ID NO: 27559 - protein, 7 aa, synthetic construct
EDNPNTE

SEQ ID NO: 27560 - protein, 7 aa, synthetic construct
LTVKHQY

SEQ ID NO: 27561 - protein, 7 aa, synthetic construct
YKNDGQI

SEQ ID NO: 27562 - protein, 7 aa, synthetic construct
ESRDRFM

SEQ ID NO: 27563 - protein, 7 aa, synthetic construct
IPEVNHK

SEQ ID NO: 27564 - protein, 7 aa, synthetic construct
WSAAADL

SEQ ID NO: 27565 - protein, 7 aa, synthetic construct
RYTGIMG

SEQ ID NO: 27566 - protein, 7 aa, synthetic construct
QSDQQYV

SEQ ID NO: 27567 - protein, 7 aa, synthetic construct
CPKGFGC

SEQ ID NO: 27568 - protein, 7 aa, synthetic construct
IMGASNF

SEQ ID NO: 27569 - protein, 7 aa, synthetic construct
MMVPSDM

SEQ ID NO: 27570 - protein, 7 aa, synthetic construct
TGIRLHG

SEQ ID NO: 27571 - protein, 7 aa, synthetic construct
IAHGSIS

SEQ ID NO: 27572 - protein, 7 aa, synthetic construct
STDAGYR

SEQ ID NO: 27573 - protein, 7 aa, synthetic construct
VGIDHPP

SEQ ID NO: 27574 - protein, 7 aa, synthetic construct
GNGVTEE

SEQ ID NO: 27575 - protein, 7 aa, synthetic construct
PHLSVPQ

SEQ ID NO: 27576 - protein, 7 aa, synthetic construct
VDMKSMH

SEQ ID NO: 27577 - protein, 7 aa, synthetic construct
PVDEQWS

SEQ ID NO: 27578 - protein, 7 aa, synthetic construct
IVALANK

SEQ ID NO: 27579 - protein, 7 aa, synthetic construct
FKSTMYG

SEQ ID NO: 27580 - protein, 7 aa, synthetic construct
RQSDIWE

SEQ ID NO: 27581 - protein, 7 aa, synthetic construct
STISRNS

SEQ ID NO: 27582 - protein, 7 aa, synthetic construct
LFAEPNP

SEQ ID NO: 27583 - protein, 7 aa, synthetic construct
THQDFQM

SEQ ID NO: 27584 - protein, 7 aa, synthetic construct
IHKLPAQ

SEQ ID NO: 27585 - protein, 7 aa, synthetic construct
TIPPSIR

SEQ ID NO: 27586 - protein, 7 aa, synthetic construct
HMFKIKE

SEQ ID NO: 27587 - protein, 7 aa, synthetic construct
SAPVLQQ

SEQ ID NO: 27588 - protein, 7 aa, synthetic construct
GAMNVGQ

SEQ ID NO: 27589 - protein, 7 aa, synthetic construct
EHTNVMG

SEQ ID NO: 27590 - protein, 7 aa, synthetic construct
HAQYDHV

SEQ ID NO: 27591 - protein, 7 aa, synthetic construct
FEMHPAR

SEQ ID NO: 27592 - protein, 7 aa, synthetic construct
LNGLMNI

SEQ ID NO: 27593 - protein, 7 aa, synthetic construct
VKDVNHR

SEQ ID NO: 27594 - protein, 7 aa, synthetic construct
KEGNITT

SEQ ID NO: 27595 - protein, 7 aa, synthetic construct
YIEFMTP

SEQ ID NO: 27596 - protein, 7 aa, synthetic construct
ATSFPGN

SEQ ID NO: 27597 - protein, 7 aa, synthetic construct
NSEPAGL

SEQ ID NO: 27598 - protein, 7 aa, synthetic construct
ASHHGHF

SEQ ID NO: 27599 - protein, 7 aa, synthetic construct
TQEVHPV

SEQ ID NO: 27600 - protein, 7 aa, synthetic construct
EAAQSNH

SEQ ID NO: 27601 - protein, 7 aa, synthetic construct
IMKMMHN

SEQ ID NO: 27602 - protein, 7 aa, synthetic construct
TLGDPNG

SEQ ID NO: 27603 - protein, 7 aa, synthetic construct
IGSASLI

SEQ ID NO: 27604 - protein, 7 aa, synthetic construct
FVQSPKD

SEQ ID NO: 27605 - protein, 7 aa, synthetic construct
YHLESSR

SEQ ID NO: 27606 - protein, 7 aa, synthetic construct
PSPDRVE

SEQ ID NO: 27607 - protein, 7 aa, synthetic construct
GGREHKV

SEQ ID NO: 27608 - protein, 7 aa, synthetic construct
YPYDAAD

SEQ ID NO: 27609 - protein, 7 aa, synthetic construct
DMEHLHM

SEQ ID NO: 27610 - protein, 7 aa, synthetic construct
WDQTTYT

SEQ ID NO: 27611 - protein, 7 aa, synthetic construct
MQEALKA

SEQ ID NO: 27612 - protein, 7 aa, synthetic construct
PGWDGAT

SEQ ID NO: 27613 - protein, 7 aa, synthetic construct
YKHMDAN

SEQ ID NO: 27614 - protein, 7 aa, synthetic construct
AKTTLDK

SEQ ID NO: 27615 - protein, 7 aa, synthetic construct
SKPNNVA

SEQ ID NO: 27616 - protein, 7 aa, synthetic construct
ENDISKW

SEQ ID NO: 27617 - protein, 7 aa, synthetic construct
VHSRMMT

SEQ ID NO: 27618 - protein, 7 aa, synthetic construct
AGEPFQK

SEQ ID NO: 27619 - protein, 7 aa, synthetic construct
EYTNRHG

SEQ ID NO: 27620 - protein, 7 aa, synthetic construct
GAFADKG

SEQ ID NO: 27621 - protein, 7 aa, synthetic construct
SNGAPIT

SEQ ID NO: 27622 - protein, 7 aa, synthetic construct
CQQEVCE

SEQ ID NO: 27623 - protein, 7 aa, synthetic construct
WIPQSHA

SEQ ID NO: 27624 - protein, 7 aa, synthetic construct
HKAVQED

SEQ ID NO: 27625 - protein, 7 aa, synthetic construct
EWNQKYE

SEQ ID NO: 27626 - protein, 7 aa, synthetic construct
ILSARQI

SEQ ID NO: 27627 - protein, 7 aa, synthetic construct
MPFTNTP

SEQ ID NO: 27628 - protein, 7 aa, synthetic construct
KKHEADR

SEQ ID NO: 27629 - protein, 7 aa, synthetic construct
IKEQGRY

SEQ ID NO: 27630 - protein, 7 aa, synthetic construct
HMPMKLG

SEQ ID NO: 27631 - protein, 7 aa, synthetic construct
TDAENGT

SEQ ID NO: 27632 - protein, 7 aa, synthetic construct
RFGEDDM

SEQ ID NO: 27633 - protein, 7 aa, synthetic construct
HNKDMIH

SEQ ID NO: 27634 - protein, 7 aa, synthetic construct
IKPEWPT

SEQ ID NO: 27635 - protein, 7 aa, synthetic construct
LSRIDDE

SEQ ID NO: 27636 - protein, 7 aa, synthetic construct
IEHENRY

SEQ ID NO: 27637 - protein, 7 aa, synthetic construct
KDSQHQP

SEQ ID NO: 27638 - protein, 7 aa, synthetic construct
DPGIGHW

SEQ ID NO: 27639 - protein, 7 aa, synthetic construct
YNDLQIK

SEQ ID NO: 27640 - protein, 7 aa, synthetic construct
SQVEKSV

SEQ ID NO: 27641 - protein, 7 aa, synthetic construct
TADQRAN

SEQ ID NO: 27642 - protein, 7 aa, synthetic construct
IKVPLLT

SEQ ID NO: 27643 - protein, 7 aa, synthetic construct
THTQFTH

SEQ ID NO: 27644 - protein, 7 aa, synthetic construct
LPAGSHV

SEQ ID NO: 27645 - protein, 7 aa, synthetic construct
MMTPNGE

SEQ ID NO: 27646 - protein, 7 aa, synthetic construct
TTASVTT

SEQ ID NO: 27647 - protein, 7 aa, synthetic construct
PGSPASA

SEQ ID NO: 27648 - protein, 7 aa, synthetic construct
CIQPIEC

SEQ ID NO: 27649 - protein, 7 aa, synthetic construct
GNYSTGI

SEQ ID NO: 27650 - protein, 7 aa, synthetic construct
TEWIRQD

SEQ ID NO: 27651 - protein, 7 aa, synthetic construct
IHHAPKS

SEQ ID NO: 27652 - protein, 7 aa, synthetic construct
RHDDKVV

SEQ ID NO: 27653 - protein, 7 aa, synthetic construct
HMTHQSI

SEQ ID NO: 27654 - protein, 7 aa, synthetic construct
PANLAES

SEQ ID NO: 27655 - protein, 7 aa, synthetic construct
DIQYGDT

SEQ ID NO: 27656 - protein, 7 aa, synthetic construct
RFVDRNE

SEQ ID NO: 27657 - protein, 7 aa, synthetic construct
QNHPNTD

SEQ ID NO: 27658 - protein, 7 aa, synthetic construct
MEPSTNT

SEQ ID NO: 27659 - protein, 7 aa, synthetic construct
HDGQANA

SEQ ID NO: 27660 - protein, 7 aa, synthetic construct
LNMIQGN

SEQ ID NO: 27661 - protein, 7 aa, synthetic construct
PQVVSDY

SEQ ID NO: 27662 - protein, 7 aa, synthetic construct
DEVRLSM

SEQ ID NO: 27663 - protein, 7 aa, synthetic construct
EDPGNRG

SEQ ID NO: 27664 - protein, 7 aa, synthetic construct
HPSHEGH

SEQ ID NO: 27665 - protein, 7 aa, synthetic construct
SDFVKYH

SEQ ID NO: 27666 - protein, 7 aa, synthetic construct
AYNTVKS

SEQ ID NO: 27667 - protein, 7 aa, synthetic construct
GHYQNDG

SEQ ID NO: 27668 - protein, 7 aa, synthetic construct
IVLSQKP

SEQ ID NO: 27669 - protein, 7 aa, synthetic construct
HQNGWTS

SEQ ID NO: 27670 - protein, 7 aa, synthetic construct
AYEHDSR

SEQ ID NO: 27671 - protein, 7 aa, synthetic construct
QQYIYQE

SEQ ID NO: 27672 - protein, 7 aa, synthetic construct
QPDANYL

SEQ ID NO: 27673 - protein, 7 aa, synthetic construct
FVVQKQD

SEQ ID NO: 27674 - protein, 7 aa, synthetic construct
AEAKVFH

SEQ ID NO: 27675 - protein, 7 aa, synthetic construct
QERFTQK

SEQ ID NO: 27676 - protein, 7 aa, synthetic construct
KTELLKT

SEQ ID NO: 27677 - protein, 7 aa, synthetic construct
FLLGQRE

SEQ ID NO: 27678 - protein, 7 aa, synthetic construct
WRQNYAA

SEQ ID NO: 27679 - protein, 7 aa, synthetic construct
FMQNQLH

SEQ ID NO: 27680 - protein, 7 aa, synthetic construct
LDKLLSN

SEQ ID NO: 27681 - protein, 7 aa, synthetic construct
RVQMRDV

SEQ ID NO: 27682 - protein, 7 aa, synthetic construct
YIGHTEI

SEQ ID NO: 27683 - protein, 7 aa, synthetic construct
WTSGPSQ

SEQ ID NO: 27684 - protein, 7 aa, synthetic construct
MEIPRIS

SEQ ID NO: 27685 - protein, 7 aa, synthetic construct
WKAVKID

SEQ ID NO: 27686 - protein, 7 aa, synthetic construct
GATGSSF

SEQ ID NO: 27687 - protein, 7 aa, synthetic construct
YGPPLPS

SEQ ID NO: 27688 - protein, 7 aa, synthetic construct
GDKYHPL

SEQ ID NO: 27689 - protein, 7 aa, synthetic construct
PDKIYVS

SEQ ID NO: 27690 - protein, 7 aa, synthetic construct
DGMKIER

SEQ ID NO: 27691 - protein, 7 aa, synthetic construct
GEFMGNR

SEQ ID NO: 27692 - protein, 7 aa, synthetic construct
AYTDGTD

SEQ ID NO: 27693 - protein, 7 aa, synthetic construct
SPQIMTK

SEQ ID NO: 27694 - protein, 7 aa, synthetic construct
TTYTGNI

SEQ ID NO: 27695 - protein, 7 aa, synthetic construct
IIVDMKM

SEQ ID NO: 27696 - protein, 7 aa, synthetic construct
PPNGFTI

SEQ ID NO: 27697 - protein, 7 aa, synthetic construct
EQEKSVP

SEQ ID NO: 27698 - protein, 7 aa, synthetic construct
PIMGVAK

SEQ ID NO: 27699 - protein, 7 aa, synthetic construct
VVPVNRN

SEQ ID NO: 27700 - protein, 7 aa, synthetic construct
IDAFQTI

SEQ ID NO: 27701 - protein, 7 aa, synthetic construct
TLLMTAP

SEQ ID NO: 27702 - protein, 7 aa, synthetic construct
NVVPSRG

SEQ ID NO: 27703 - protein, 7 aa, synthetic construct
STVKFVD

SEQ ID NO: 27704 - protein, 7 aa, synthetic construct
SVGEMIR

SEQ ID NO: 27705 - protein, 7 aa, synthetic construct
ADLKPNQ

SEQ ID NO: 27706 - protein, 7 aa, synthetic construct
ASSAVKF

SEQ ID NO: 27707 - protein, 7 aa, synthetic construct
MERIEDQ

SEQ ID NO: 27708 - protein, 7 aa, synthetic construct
NPMGNAQ

SEQ ID NO: 27709 - protein, 7 aa, synthetic construct
METVAKS

SEQ ID NO: 27710 - protein, 7 aa, synthetic construct
WQQPENP

SEQ ID NO: 27711 - protein, 7 aa, synthetic construct
KEPKEYD

SEQ ID NO: 27712 - protein, 7 aa, synthetic construct
FMKPEEA

SEQ ID NO: 27713 - protein, 7 aa, synthetic construct
PQMPSLL

SEQ ID NO: 27714 - protein, 7 aa, synthetic construct
KQTIDMR

SEQ ID NO: 27715 - protein, 7 aa, synthetic construct
SDANNKH

SEQ ID NO: 27716 - protein, 7 aa, synthetic construct
LFKTINE

SEQ ID NO: 27717 - protein, 7 aa, synthetic construct
ADFIEPH

SEQ ID NO: 27718 - protein, 7 aa, synthetic construct
DPQDKGM

SEQ ID NO: 27719 - protein, 7 aa, synthetic construct
FDGEFNL

SEQ ID NO: 27720 - protein, 7 aa, synthetic construct
DEKNVMR

SEQ ID NO: 27721 - protein, 7 aa, synthetic construct
PQMGVGI

SEQ ID NO: 27722 - protein, 7 aa, synthetic construct
DNSVHHV

SEQ ID NO: 27723 - protein, 7 aa, synthetic construct
ATDTAIE

SEQ ID NO: 27724 - protein, 7 aa, synthetic construct
LGVLGQQ

SEQ ID NO: 27725 - protein, 7 aa, synthetic construct
TSREAVV

SEQ ID NO: 27726 - protein, 7 aa, synthetic construct
YHRIESN

SEQ ID NO: 27727 - protein, 7 aa, synthetic construct
TNMANMD

SEQ ID NO: 27728 - protein, 7 aa, synthetic construct
ISGVHFV

SEQ ID NO: 27729 - protein, 7 aa, synthetic construct
YHHGHAA

SEQ ID NO: 27730 - protein, 7 aa, synthetic construct
GVQVPAR

SEQ ID NO: 27731 - protein, 7 aa, synthetic construct
AHVAYKP

SEQ ID NO: 27732 - protein, 7 aa, synthetic construct
KDQWQRD

SEQ ID NO: 27733 - protein, 7 aa, synthetic construct
VMAKHID

SEQ ID NO: 27734 - protein, 7 aa, synthetic construct
QLEYSSV

SEQ ID NO: 27735 - protein, 7 aa, synthetic construct
YSADGLH

SEQ ID NO: 27736 - protein, 7 aa, synthetic construct
EGVNKAK

SEQ ID NO: 27737 - protein, 7 aa, synthetic construct
NDVKHIV

SEQ ID NO: 27738 - protein, 7 aa, synthetic construct
NLGIQIP

SEQ ID NO: 27739 - protein, 7 aa, synthetic construct
FGSQEQT

SEQ ID NO: 27740 - protein, 7 aa, synthetic construct
WDMKHHN

SEQ ID NO: 27741 - protein, 7 aa, synthetic construct
AGHTSQY

SEQ ID NO: 27742 - protein, 7 aa, synthetic construct
QPSMQAH

SEQ ID NO: 27743 - protein, 7 aa, synthetic construct
VVQGTQD

SEQ ID NO: 27744 - protein, 7 aa, synthetic construct
IVSETAG

SEQ ID NO: 27745 - protein, 7 aa, synthetic construct
AEKKAQQ

SEQ ID NO: 27746 - protein, 7 aa, synthetic construct
QSNPGWN

SEQ ID NO: 27747 - protein, 7 aa, synthetic construct
EAYKQNT

SEQ ID NO: 27748 - protein, 7 aa, synthetic construct
ALQPITD

SEQ ID NO: 27749 - protein, 7 aa, synthetic construct
PHPDRMH

SEQ ID NO: 27750 - protein, 7 aa, synthetic construct
SDHEIRI

SEQ ID NO: 27751 - protein, 7 aa, synthetic construct
VAAVASP

SEQ ID NO: 27752 - protein, 7 aa, synthetic construct
QMDRGMS

SEQ ID NO: 27753 - protein, 7 aa, synthetic construct
STGEWAE

SEQ ID NO: 27754 - protein, 7 aa, synthetic construct
QSTYLTS

SEQ ID NO: 27755 - protein, 7 aa, synthetic construct
LLLGQKH

SEQ ID NO: 27756 - protein, 7 aa, synthetic construct
QTTDMKF

SEQ ID NO: 27757 - protein, 7 aa, synthetic construct
PNQVADK

SEQ ID NO: 27758 - protein, 7 aa, synthetic construct
YDRGKHF

SEQ ID NO: 27759 - protein, 7 aa, synthetic construct
GQAQDHY

SEQ ID NO: 27760 - protein, 7 aa, synthetic construct
VAAPLQH

SEQ ID NO: 27761 - protein, 7 aa, synthetic construct
AMSPQLR

SEQ ID NO: 27762 - protein, 7 aa, synthetic construct
DHEETKN

SEQ ID NO: 27763 - protein, 7 aa, synthetic construct
NAINNHD

SEQ ID NO: 27764 - protein, 7 aa, synthetic construct
FRMDSEN

SEQ ID NO: 27765 - protein, 7 aa, synthetic construct
GTMEPTI

SEQ ID NO: 27766 - protein, 7 aa, synthetic construct
GFPAHHV

SEQ ID NO: 27767 - protein, 7 aa, synthetic construct
DGEHSIP

SEQ ID NO: 27768 - protein, 7 aa, synthetic construct
LAVHMTK

SEQ ID NO: 27769 - protein, 7 aa, synthetic construct
QQQMAME

SEQ ID NO: 27770 - protein, 7 aa, synthetic construct
DGNAMFK

SEQ ID NO: 27771 - protein, 7 aa, synthetic construct
LNSHAHF

SEQ ID NO: 27772 - protein, 7 aa, synthetic construct
ERNVIMK

SEQ ID NO: 27773 - protein, 7 aa, synthetic construct
KPSQVYM

SEQ ID NO: 27774 - protein, 7 aa, synthetic construct
LESFTID

SEQ ID NO: 27775 - protein, 7 aa, synthetic construct
SGGYKDY

SEQ ID NO: 27776 - protein, 7 aa, synthetic construct
IGLERPP

SEQ ID NO: 27777 - protein, 7 aa, synthetic construct
IGYAQEP

SEQ ID NO: 27778 - protein, 7 aa, synthetic construct
QPVIPRT

SEQ ID NO: 27779 - protein, 7 aa, synthetic construct
VHPPNVM

SEQ ID NO: 27780 - protein, 7 aa, synthetic construct
EARSFHT

SEQ ID NO: 27781 - protein, 7 aa, synthetic construct
DGIVAKY

SEQ ID NO: 27782 - protein, 7 aa, synthetic construct
NMDRDAK

SEQ ID NO: 27783 - protein, 7 aa, synthetic construct
QFGEAQM

SEQ ID NO: 27784 - protein, 7 aa, synthetic construct
HVMKFGG

SEQ ID NO: 27785 - protein, 7 aa, synthetic construct
MHHLTRP

SEQ ID NO: 27786 - protein, 7 aa, synthetic construct
TFEQREM

SEQ ID NO: 27787 - protein, 7 aa, synthetic construct
DLRLNHA

SEQ ID NO: 27788 - protein, 7 aa, synthetic construct
GLPHHHF

SEQ ID NO: 27789 - protein, 7 aa, synthetic construct
HNLTENR

SEQ ID NO: 27790 - protein, 7 aa, synthetic construct
WDMKVGM

SEQ ID NO: 27791 - protein, 7 aa, synthetic construct
HRSYNEF

SEQ ID NO: 27792 - protein, 7 aa, synthetic construct
AFQYDDE

SEQ ID NO: 27793 - protein, 7 aa, synthetic construct
AQEEGRH

SEQ ID NO: 27794 - protein, 7 aa, synthetic construct
TIKPKEL

SEQ ID NO: 27795 - protein, 7 aa, synthetic construct
IHISTPH

SEQ ID NO: 27796 - protein, 7 aa, synthetic construct
FLKGAQT

SEQ ID NO: 27797 - protein, 7 aa, synthetic construct
DAMYDRP

SEQ ID NO: 27798 - protein, 7 aa, synthetic construct
TTIGHEV

SEQ ID NO: 27799 - protein, 7 aa, synthetic construct
STFDHSL

SEQ ID NO: 27800 - protein, 7 aa, synthetic construct
NEQISPP

SEQ ID NO: 27801 - protein, 7 aa, synthetic construct
NIGGYQT

SEQ ID NO: 27802 - protein, 7 aa, synthetic construct
EQEFVNG

SEQ ID NO: 27803 - protein, 7 aa, synthetic construct
AYQPERT

SEQ ID NO: 27804 - protein, 7 aa, synthetic construct
NSPLGEA

SEQ ID NO: 27805 - protein, 7 aa, synthetic construct
EIMRAEA

SEQ ID NO: 27806 - protein, 7 aa, synthetic construct
QAQMFPD

SEQ ID NO: 27807 - protein, 7 aa, synthetic construct
GRESNIE

SEQ ID NO: 27808 - protein, 7 aa, synthetic construct
ESPDYWD

SEQ ID NO: 27809 - protein, 7 aa, synthetic construct
HGNQMKI

SEQ ID NO: 27810 - protein, 7 aa, synthetic construct
NVGGINY

SEQ ID NO: 27811 - protein, 7 aa, synthetic construct
MRQDTWL

SEQ ID NO: 27812 - protein, 7 aa, synthetic construct
PTHNTHM

SEQ ID NO: 27813 - protein, 7 aa, synthetic construct
ISDYQMV

SEQ ID NO: 27814 - protein, 7 aa, synthetic construct
HMIGNEH

SEQ ID NO: 27815 - protein, 7 aa, synthetic construct
ATGPRAI

SEQ ID NO: 27816 - protein, 7 aa, synthetic construct
ISPKMFH

SEQ ID NO: 27817 - protein, 7 aa, synthetic construct
KEYNEQH

SEQ ID NO: 27818 - protein, 7 aa, synthetic construct
QHSIAFK

SEQ ID NO: 27819 - protein, 7 aa, synthetic construct
SHRQLLT

SEQ ID NO: 27820 - protein, 7 aa, synthetic construct
NEGGKAG

SEQ ID NO: 27821 - protein, 7 aa, synthetic construct
PLKTPDL

SEQ ID NO: 27822 - protein, 7 aa, synthetic construct
RDHALDG

SEQ ID NO: 27823 - protein, 7 aa, synthetic construct
SRDEKQN

SEQ ID NO: 27824 - protein, 7 aa, synthetic construct
NFEHQGV

SEQ ID NO: 27825 - protein, 7 aa, synthetic construct
PVTGHDG

SEQ ID NO: 27826 - protein, 7 aa, synthetic construct
DMPMIGP

SEQ ID NO: 27827 - protein, 7 aa, synthetic construct
RSDVRAS

SEQ ID NO: 27828 - protein, 7 aa, synthetic construct
AHEGLTV

SEQ ID NO: 27829 - protein, 7 aa, synthetic construct
VMTVPVR

SEQ ID NO: 27830 - protein, 7 aa, synthetic construct
LPFHAKP

SEQ ID NO: 27831 - protein, 7 aa, synthetic construct
GFSSIHV

SEQ ID NO: 27832 - protein, 7 aa, synthetic construct
NQDYTFA

SEQ ID NO: 27833 - protein, 7 aa, synthetic construct
RMGSDMK

SEQ ID NO: 27834 - protein, 7 aa, synthetic construct
RQDLHHY

SEQ ID NO: 27835 - protein, 7 aa, synthetic construct
QERGDVM

SEQ ID NO: 27836 - protein, 7 aa, synthetic construct
QVDKGKW

SEQ ID NO: 27837 - protein, 7 aa, synthetic construct
HHNAHSA

SEQ ID NO: 27838 - protein, 7 aa, synthetic construct
GHDKDNP

SEQ ID NO: 27839 - protein, 7 aa, synthetic construct
SPAISIL

SEQ ID NO: 27840 - protein, 7 aa, synthetic construct
MAELKIE

SEQ ID NO: 27841 - protein, 7 aa, synthetic construct
KDDSVKE

SEQ ID NO: 27842 - protein, 7 aa, synthetic construct
TAYQQQT

SEQ ID NO: 27843 - protein, 7 aa, synthetic construct
YRKDKDL

SEQ ID NO: 27844 - protein, 7 aa, synthetic construct
KMLSHEL

SEQ ID NO: 27845 - protein, 7 aa, synthetic construct
SSGYRNP

SEQ ID NO: 27846 - protein, 7 aa, synthetic construct
DQKYDVG

SEQ ID NO: 27847 - protein, 7 aa, synthetic construct
GMGDTHR

SEQ ID NO: 27848 - protein, 7 aa, synthetic construct
AHNEPGY

SEQ ID NO: 27849 - protein, 7 aa, synthetic construct
GQMVKLN

SEQ ID NO: 27850 - protein, 7 aa, synthetic construct
PSEQKAF

SEQ ID NO: 27851 - protein, 7 aa, synthetic construct
YLNPNHK

SEQ ID NO: 27852 - protein, 7 aa, synthetic construct
IRFNGQQ

SEQ ID NO: 27853 - protein, 7 aa, synthetic construct
QQGSGDF

SEQ ID NO: 27854 - protein, 7 aa, synthetic construct
YEAPKRA

SEQ ID NO: 27855 - protein, 7 aa, synthetic construct
EEETKHP

SEQ ID NO: 27856 - protein, 7 aa, synthetic construct
TVFNEPK

SEQ ID NO: 27857 - protein, 7 aa, synthetic construct
KHSHDTH

SEQ ID NO: 27858 - protein, 7 aa, synthetic construct
MVGEVQY

SEQ ID NO: 27859 - protein, 7 aa, synthetic construct
MNEVVDI

SEQ ID NO: 27860 - protein, 7 aa, synthetic construct
QQGYDEY

SEQ ID NO: 27861 - protein, 7 aa, synthetic construct
GPENPVP

SEQ ID NO: 27862 - protein, 7 aa, synthetic construct
HAFMAEP

SEQ ID NO: 27863 - protein, 7 aa, synthetic construct
GTQVDGE

SEQ ID NO: 27864 - protein, 7 aa, synthetic construct
VKKPMQV

SEQ ID NO: 27865 - protein, 7 aa, synthetic construct
YRIQDHV

SEQ ID NO: 27866 - protein, 7 aa, synthetic construct
GMLRNEA

SEQ ID NO: 27867 - protein, 7 aa, synthetic construct
VERLDNH

SEQ ID NO: 27868 - protein, 7 aa, synthetic construct
DTEGHNT

SEQ ID NO: 27869 - protein, 7 aa, synthetic construct
MEAFAGS

SEQ ID NO: 27870 - protein, 7 aa, synthetic construct
YWGFEVD

SEQ ID NO: 27871 - protein, 7 aa, synthetic construct
DLPMNGA

SEQ ID NO: 27872 - protein, 7 aa, synthetic construct
NQVGWEA

SEQ ID NO: 27873 - protein, 7 aa, synthetic construct
MPTKNFL

SEQ ID NO: 27874 - protein, 7 aa, synthetic construct
PEGQPKS

SEQ ID NO: 27875 - protein, 7 aa, synthetic construct
QGNVAAP

SEQ ID NO: 27876 - protein, 7 aa, synthetic construct
STFINHP

SEQ ID NO: 27877 - protein, 7 aa, synthetic construct
NVQMQAS

SEQ ID NO: 27878 - protein, 7 aa, synthetic construct
ESGSSTA

SEQ ID NO: 27879 - protein, 7 aa, synthetic construct
STVTNGM

SEQ ID NO: 27880 - protein, 7 aa, synthetic construct
IFPTTIN

SEQ ID NO: 27881 - protein, 7 aa, synthetic construct
QVVPNEH

SEQ ID NO: 27882 - protein, 7 aa, synthetic construct
SPESQGF

SEQ ID NO: 27883 - protein, 7 aa, synthetic construct
VPDAVKN

SEQ ID NO: 27884 - protein, 7 aa, synthetic construct
MTIADDP

SEQ ID NO: 27885 - protein, 7 aa, synthetic construct
MHQSKIM

SEQ ID NO: 27886 - protein, 7 aa, synthetic construct
MAQNNFM

SEQ ID NO: 27887 - protein, 7 aa, synthetic construct
TQPMMEP

SEQ ID NO: 27888 - protein, 7 aa, synthetic construct
KYPDVKA

SEQ ID NO: 27889 - protein, 7 aa, synthetic construct
VGTEERR

SEQ ID NO: 27890 - protein, 7 aa, synthetic construct
IQMNQSE

SEQ ID NO: 27891 - protein, 7 aa, synthetic construct
FEHLQGV

SEQ ID NO: 27892 - protein, 7 aa, synthetic construct
GGETHYV

SEQ ID NO: 27893 - protein, 7 aa, synthetic construct
GVMQYQD

SEQ ID NO: 27894 - protein, 7 aa, synthetic construct
PVLRPGD

SEQ ID NO: 27895 - protein, 7 aa, synthetic construct
FMTSEPP

SEQ ID NO: 27896 - protein, 7 aa, synthetic construct
MIRINLD

SEQ ID NO: 27897 - protein, 7 aa, synthetic construct
WSNLHQK

SEQ ID NO: 27898 - protein, 7 aa, synthetic construct
MFNGALD

SEQ ID NO: 27899 - protein, 7 aa, synthetic construct
APNQGEI

SEQ ID NO: 27900 - protein, 7 aa, synthetic construct
DGQTVNS

SEQ ID NO: 27901 - protein, 7 aa, synthetic construct
WKVMATG

SEQ ID NO: 27902 - protein, 7 aa, synthetic construct
KMEHMQM

SEQ ID NO: 27903 - protein, 7 aa, synthetic construct
KEMNMQT

SEQ ID NO: 27904 - protein, 7 aa, synthetic construct
HPTSSEI

SEQ ID NO: 27905 - protein, 7 aa, synthetic construct
VNPYATS

SEQ ID NO: 27906 - protein, 7 aa, synthetic construct
GEPKNTW

SEQ ID NO: 27907 - protein, 7 aa, synthetic construct
PSFKEYK

SEQ ID NO: 27908 - protein, 7 aa, synthetic construct
HVNDEVM

SEQ ID NO: 27909 - protein, 7 aa, synthetic construct
QEIRPNV

SEQ ID NO: 27910 - protein, 7 aa, synthetic construct
NNTLEDT

SEQ ID NO: 27911 - protein, 7 aa, synthetic construct
GGLKPTM

SEQ ID NO: 27912 - protein, 7 aa, synthetic construct
YGRQPAN

SEQ ID NO: 27913 - protein, 7 aa, synthetic construct
FQHVLQT

SEQ ID NO: 27914 - protein, 7 aa, synthetic construct
WKMDSST

SEQ ID NO: 27915 - protein, 7 aa, synthetic construct
TARVDED

SEQ ID NO: 27916 - protein, 7 aa, synthetic construct
KQEGLNK

SEQ ID NO: 27917 - protein, 7 aa, synthetic construct
EEQHQDV

SEQ ID NO: 27918 - protein, 7 aa, synthetic construct
STEPHSH

SEQ ID NO: 27919 - protein, 7 aa, synthetic construct
LKALIAG

SEQ ID NO: 27920 - protein, 7 aa, synthetic construct
SQMHVNY

SEQ ID NO: 27921 - protein, 7 aa, synthetic construct
HKWTENQ

SEQ ID NO: 27922 - protein, 7 aa, synthetic construct
HKFTDNY

SEQ ID NO: 27923 - protein, 7 aa, synthetic construct
NTPNYME

SEQ ID NO: 27924 - protein, 7 aa, synthetic construct
PSMVLQG

SEQ ID NO: 27925 - protein, 7 aa, synthetic construct
KADGITQ

SEQ ID NO: 27926 - protein, 7 aa, synthetic construct
FDGHIQR

SEQ ID NO: 27927 - protein, 7 aa, synthetic construct
EGYMEER

SEQ ID NO: 27928 - protein, 7 aa, synthetic construct
YGDKIGM

SEQ ID NO: 27929 - protein, 7 aa, synthetic construct
RYVQETV

SEQ ID NO: 27930 - protein, 7 aa, synthetic construct
IFINGID

SEQ ID NO: 27931 - protein, 7 aa, synthetic construct
QVIPARP

SEQ ID NO: 27932 - protein, 7 aa, synthetic construct
TLNWDDA

SEQ ID NO: 27933 - protein, 7 aa, synthetic construct
HPDYEDT

SEQ ID NO: 27934 - protein, 7 aa, synthetic construct
TMRHTIS

SEQ ID NO: 27935 - protein, 7 aa, synthetic construct
NHTQDQG

SEQ ID NO: 27936 - protein, 7 aa, synthetic construct
KAENWRI

SEQ ID NO: 27937 - protein, 7 aa, synthetic construct
PSSPTTK

SEQ ID NO: 27938 - protein, 7 aa, synthetic construct
HPIMKDV

SEQ ID NO: 27939 - protein, 7 aa, synthetic construct
FVVERSE

SEQ ID NO: 27940 - protein, 7 aa, synthetic construct
PHFRPES

SEQ ID NO: 27941 - protein, 7 aa, synthetic construct
TTNSDKD

SEQ ID NO: 27942 - protein, 7 aa, synthetic construct
KTQTALL

SEQ ID NO: 27943 - protein, 7 aa, synthetic construct
VEANHQP

SEQ ID NO: 27944 - protein, 7 aa, synthetic construct
GKDAMPF

SEQ ID NO: 27945 - protein, 7 aa, synthetic construct
FPHHPVT

SEQ ID NO: 27946 - protein, 7 aa, synthetic construct
NNHTFNG

SEQ ID NO: 27947 - protein, 7 aa, synthetic construct
IWEEGKM

SEQ ID NO: 27948 - protein, 7 aa, synthetic construct
THDNSLA

SEQ ID NO: 27949 - protein, 7 aa, synthetic construct
GGSSYSH

SEQ ID NO: 27950 - protein, 7 aa, synthetic construct
IAHTDRS

SEQ ID NO: 27951 - protein, 7 aa, synthetic construct
DEHMQKR

SEQ ID NO: 27952 - protein, 7 aa, synthetic construct
GWGKADD

SEQ ID NO: 27953 - protein, 7 aa, synthetic construct
RHEIVIG

SEQ ID NO: 27954 - protein, 7 aa, synthetic construct
WRSKNDE

SEQ ID NO: 27955 - protein, 7 aa, synthetic construct
HQFGDTM

SEQ ID NO: 27956 - protein, 7 aa, synthetic construct
PQKQHWI

SEQ ID NO: 27957 - protein, 7 aa, synthetic construct
FTDPGGP

SEQ ID NO: 27958 - protein, 7 aa, synthetic construct
RLYHSDV

SEQ ID NO: 27959 - protein, 7 aa, synthetic construct
NTFQSND

SEQ ID NO: 27960 - protein, 7 aa, synthetic construct
NFPNAEN

SEQ ID NO: 27961 - protein, 7 aa, synthetic construct
EPKKWER

SEQ ID NO: 27962 - protein, 7 aa, synthetic construct
QQHLDIK

SEQ ID NO: 27963 - protein, 7 aa, synthetic construct
QDYKTLN

SEQ ID NO: 27964 - protein, 7 aa, synthetic construct
PFEMQGM

SEQ ID NO: 27965 - protein, 7 aa, synthetic construct
KAHPVLN

SEQ ID NO: 27966 - protein, 7 aa, synthetic construct
ITLGMTP

SEQ ID NO: 27967 - protein, 7 aa, synthetic construct
SPPGAQE

SEQ ID NO: 27968 - protein, 7 aa, synthetic construct
HLPMQRT

SEQ ID NO: 27969 - protein, 7 aa, synthetic construct
TNAPFDS

SEQ ID NO: 27970 - protein, 7 aa, synthetic construct
AQHAQAK

SEQ ID NO: 27971 - protein, 7 aa, synthetic construct
DSEGMKL

SEQ ID NO: 27972 - protein, 7 aa, synthetic construct
ILSGMSS

SEQ ID NO: 27973 - protein, 7 aa, synthetic construct
MMRTDRA

SEQ ID NO: 27974 - protein, 7 aa, synthetic construct
EEPHSVH

SEQ ID NO: 27975 - protein, 7 aa, synthetic construct
EKGDLTN

SEQ ID NO: 27976 - protein, 7 aa, synthetic construct
YGGLPES

SEQ ID NO: 27977 - protein, 7 aa, synthetic construct
QIKRLDN

SEQ ID NO: 27978 - protein, 7 aa, synthetic construct
RYHGAGI

SEQ ID NO: 27979 - protein, 7 aa, synthetic construct
NHHEPFK

SEQ ID NO: 27980 - protein, 7 aa, synthetic construct
DPLNPGA

SEQ ID NO: 27981 - protein, 7 aa, synthetic construct
MPMTGTH

SEQ ID NO: 27982 - protein, 7 aa, synthetic construct
SMLDAQR

SEQ ID NO: 27983 - protein, 7 aa, synthetic construct
IKNIYSV

SEQ ID NO: 27984 - protein, 7 aa, synthetic construct
DQNGDHG

SEQ ID NO: 27985 - protein, 7 aa, synthetic construct
FTQQGHE

SEQ ID NO: 27986 - protein, 7 aa, synthetic construct
VHERWKD

SEQ ID NO: 27987 - protein, 7 aa, synthetic construct
HPIHQSE

SEQ ID NO: 27988 - protein, 7 aa, synthetic construct
LDFTEPR

SEQ ID NO: 27989 - protein, 7 aa, synthetic construct
EWAKPHK

SEQ ID NO: 27990 - protein, 7 aa, synthetic construct
DAHMHKP

SEQ ID NO: 27991 - protein, 7 aa, synthetic construct
MVSTIGN

SEQ ID NO: 27992 - protein, 7 aa, synthetic construct
LGVEHNP

SEQ ID NO: 27993 - protein, 7 aa, synthetic construct
DARGHTT

SEQ ID NO: 27994 - protein, 7 aa, synthetic construct
APRGPLL

SEQ ID NO: 27995 - protein, 7 aa, synthetic construct
ADKTVQI

SEQ ID NO: 27996 - protein, 7 aa, synthetic construct
LHPVVDS

SEQ ID NO: 27997 - protein, 7 aa, synthetic construct
MQTEDKR

SEQ ID NO: 27998 - protein, 7 aa, synthetic construct
KGEHGVD

SEQ ID NO: 27999 - protein, 7 aa, synthetic construct
VIGYHAS

SEQ ID NO: 28000 - protein, 7 aa, synthetic construct
ADQMRPR

SEQ ID NO: 28001 - protein, 7 aa, synthetic construct
MASPTPL

SEQ ID NO: 28002 - protein, 7 aa, synthetic construct
IATMTSV

SEQ ID NO: 28003 - protein, 7 aa, synthetic construct
GDIKGWT

SEQ ID NO: 28004 - protein, 7 aa, synthetic construct
IVGSNLP

SEQ ID NO: 28005 - protein, 7 aa, synthetic construct
IMPKMLQ

SEQ ID NO: 28006 - protein, 7 aa, synthetic construct
WQHERHL

SEQ ID NO: 28007 - protein, 7 aa, synthetic construct
FPIASDE

SEQ ID NO: 28008 - protein, 7 aa, synthetic construct
LHQREHW

SEQ ID NO: 28009 - protein, 7 aa, synthetic construct
NGHFGST

SEQ ID NO: 28010 - protein, 7 aa, synthetic construct
LMMNGNE

SEQ ID NO: 28011 - protein, 7 aa, synthetic construct
NHEYMKI

SEQ ID NO: 28012 - protein, 7 aa, synthetic construct
KLQHTAI

SEQ ID NO: 28013 - protein, 7 aa, synthetic construct
CKQDRPG

SEQ ID NO: 28014 - protein, 7 aa, synthetic construct
PANVHIK

SEQ ID NO: 28015 - protein, 7 aa, synthetic construct
NAGVAFD

SEQ ID NO: 28016 - protein, 7 aa, synthetic construct
LLGESQM

SEQ ID NO: 28017 - protein, 7 aa, synthetic construct
DSNEWKP

SEQ ID NO: 28018 - protein, 7 aa, synthetic construct
ESHYPSK

SEQ ID NO: 28019 - protein, 7 aa, synthetic construct
QLSAKIY

SEQ ID NO: 28020 - protein, 7 aa, synthetic construct
NHTEGIK

SEQ ID NO: 28021 - protein, 7 aa, synthetic construct
PSYADDN

SEQ ID NO: 28022 - protein, 7 aa, synthetic construct
TFRDDDL

SEQ ID NO: 28023 - protein, 7 aa, synthetic construct
QDAAGMR

SEQ ID NO: 28024 - protein, 7 aa, synthetic construct
KTDENWE

SEQ ID NO: 28025 - protein, 7 aa, synthetic construct
IADGDAM

SEQ ID NO: 28026 - protein, 7 aa, synthetic construct
MLNSDRQ

SEQ ID NO: 28027 - protein, 7 aa, synthetic construct
GTQFETA

SEQ ID NO: 28028 - protein, 7 aa, synthetic construct
ESYRRDF

SEQ ID NO: 28029 - protein, 7 aa, synthetic construct
TAVEGRF

SEQ ID NO: 28030 - protein, 7 aa, synthetic construct
WVGDNRI

SEQ ID NO: 28031 - protein, 7 aa, synthetic construct
WGERPSK

SEQ ID NO: 28032 - protein, 7 aa, synthetic construct
REGMKGM

SEQ ID NO: 28033 - protein, 7 aa, synthetic construct
YMEDRNS

SEQ ID NO: 28034 - protein, 7 aa, synthetic construct
YPQEPFQ

SEQ ID NO: 28035 - protein, 7 aa, synthetic construct
THMLKNN

SEQ ID NO: 28036 - protein, 7 aa, synthetic construct
TPEAGDY

SEQ ID NO: 28037 - protein, 7 aa, synthetic construct
EHDGQRG

SEQ ID NO: 28038 - protein, 7 aa, synthetic construct
TKLIIDP

SEQ ID NO: 28039 - protein, 7 aa, synthetic construct
PEYPFNK

SEQ ID NO: 28040 - protein, 7 aa, synthetic construct
RQAADLV

SEQ ID NO: 28041 - protein, 7 aa, synthetic construct
GYHNQPF

SEQ ID NO: 28042 - protein, 7 aa, synthetic construct
EAIQHKY

SEQ ID NO: 28043 - protein, 7 aa, synthetic construct
TRADVYQ

SEQ ID NO: 28044 - protein, 7 aa, synthetic construct
GFPDSRH

SEQ ID NO: 28045 - protein, 7 aa, synthetic construct
GKGHFGP

SEQ ID NO: 28046 - protein, 7 aa, synthetic construct
VMESWER

SEQ ID NO: 28047 - protein, 7 aa, synthetic construct
KFEDHND

SEQ ID NO: 28048 - protein, 7 aa, synthetic construct
AQTMDQS

SEQ ID NO: 28049 - protein, 7 aa, synthetic construct
TEANYQS

SEQ ID NO: 28050 - protein, 7 aa, synthetic construct
RGAIQTT

SEQ ID NO: 28051 - protein, 7 aa, synthetic construct
AAQGDRT

SEQ ID NO: 28052 - protein, 7 aa, synthetic construct
WKANVFT

SEQ ID NO: 28053 - protein, 7 aa, synthetic construct
RRDAVLL

SEQ ID NO: 28054 - protein, 7 aa, synthetic construct
KTFDDEY

SEQ ID NO: 28055 - protein, 7 aa, synthetic construct
GHEAADI

SEQ ID NO: 28056 - protein, 7 aa, synthetic construct
HFDTRNT

SEQ ID NO: 28057 - protein, 7 aa, synthetic construct
KDAEYNQ

SEQ ID NO: 28058 - protein, 7 aa, synthetic construct
TNTNYDG

SEQ ID NO: 28059 - protein, 7 aa, synthetic construct
AYPHTVM

SEQ ID NO: 28060 - protein, 7 aa, synthetic construct
HMTDRFT

SEQ ID NO: 28061 - protein, 7 aa, synthetic construct
YVRDPPF

SEQ ID NO: 28062 - protein, 7 aa, synthetic construct
YIYTARD

SEQ ID NO: 28063 - protein, 7 aa, synthetic construct
KHQVQFN

SEQ ID NO: 28064 - protein, 7 aa, synthetic construct
DVRRPNY

SEQ ID NO: 28065 - protein, 7 aa, synthetic construct
AGAHITA

SEQ ID NO: 28066 - protein, 7 aa, synthetic construct
NLTVVEY

SEQ ID NO: 28067 - protein, 7 aa, synthetic construct
IGSFQDF

SEQ ID NO: 28068 - protein, 7 aa, synthetic construct
IHIVKAQ

SEQ ID NO: 28069 - protein, 7 aa, synthetic construct
EVRKWND

SEQ ID NO: 28070 - protein, 7 aa, synthetic construct
LVHATVH

SEQ ID NO: 28071 - protein, 7 aa, synthetic construct
HDTRKNS

SEQ ID NO: 28072 - protein, 7 aa, synthetic construct
QTIAPAD

SEQ ID NO: 28073 - protein, 7 aa, synthetic construct
EGPNDRY

SEQ ID NO: 28074 - protein, 7 aa, synthetic construct
YAQEMGK

SEQ ID NO: 28075 - protein, 7 aa, synthetic construct
PNFREEI

SEQ ID NO: 28076 - protein, 7 aa, synthetic construct
TTGDTNF

SEQ ID NO: 28077 - protein, 7 aa, synthetic construct
GADGEVP

SEQ ID NO: 28078 - protein, 7 aa, synthetic construct
FKDPPAH

SEQ ID NO: 28079 - protein, 7 aa, synthetic construct
GKDDIKW

SEQ ID NO: 28080 - protein, 7 aa, synthetic construct
RHMNGLN

SEQ ID NO: 28081 - protein, 7 aa, synthetic construct
YMHYTPN

SEQ ID NO: 28082 - protein, 7 aa, synthetic construct
LNDWRPV

SEQ ID NO: 28083 - protein, 7 aa, synthetic construct
SQNYLNN

SEQ ID NO: 28084 - protein, 7 aa, synthetic construct
QPQPAHS

SEQ ID NO: 28085 - protein, 7 aa, synthetic construct
KMSTPTH

SEQ ID NO: 28086 - protein, 7 aa, synthetic construct
QAQDMHD

SEQ ID NO: 28087 - protein, 7 aa, synthetic construct
RDTNILN

SEQ ID NO: 28088 - protein, 7 aa, synthetic construct
KMYNEAL

SEQ ID NO: 28089 - protein, 7 aa, synthetic construct
VGIGARQ

SEQ ID NO: 28090 - protein, 7 aa, synthetic construct
TVKVSVH

SEQ ID NO: 28091 - protein, 7 aa, synthetic construct
NWNKSPN

SEQ ID NO: 28092 - protein, 7 aa, synthetic construct
EFLNGGR

SEQ ID NO: 28093 - protein, 7 aa, synthetic construct
SVVENNS

SEQ ID NO: 28094 - protein, 7 aa, synthetic construct
ERNAEDP

SEQ ID NO: 28095 - protein, 7 aa, synthetic construct
EKPFMEQ

SEQ ID NO: 28096 - protein, 7 aa, synthetic construct
TAPALSD

SEQ ID NO: 28097 - protein, 7 aa, synthetic construct
DPMGNGK

SEQ ID NO: 28098 - protein, 7 aa, synthetic construct
SKIELLV

SEQ ID NO: 28099 - protein, 7 aa, synthetic construct
IITRDHD

SEQ ID NO: 28100 - protein, 7 aa, synthetic construct
THNHEKY

SEQ ID NO: 28101 - protein, 7 aa, synthetic construct
RTIAISA

SEQ ID NO: 28102 - protein, 7 aa, synthetic construct
DGYRLPI

SEQ ID NO: 28103 - protein, 7 aa, synthetic construct
LRQTDLK

SEQ ID NO: 28104 - protein, 7 aa, synthetic construct
IGESKLI

SEQ ID NO: 28105 - protein, 7 aa, synthetic construct
AIKVQEP

SEQ ID NO: 28106 - protein, 7 aa, synthetic construct
SSPLRQF

SEQ ID NO: 28107 - protein, 7 aa, synthetic construct
GVEQGMT

SEQ ID NO: 28108 - protein, 7 aa, synthetic construct
AATTPNT

SEQ ID NO: 28109 - protein, 7 aa, synthetic construct
PDYPATS

SEQ ID NO: 28110 - protein, 7 aa, synthetic construct
SNILKAP

SEQ ID NO: 28111 - protein, 7 aa, synthetic construct
WTTEPHK

SEQ ID NO: 28112 - protein, 7 aa, synthetic construct
ISTNFGQ

SEQ ID NO: 28113 - protein, 7 aa, synthetic construct
HDKEMAY

SEQ ID NO: 28114 - protein, 7 aa, synthetic construct
ETRDHQD

SEQ ID NO: 28115 - protein, 7 aa, synthetic construct
TSNHNAW

SEQ ID NO: 28116 - protein, 7 aa, synthetic construct
VRADVNE

SEQ ID NO: 28117 - protein, 7 aa, synthetic construct
PHIDGRI

SEQ ID NO: 28118 - protein, 7 aa, synthetic construct
YIHENVS

SEQ ID NO: 28119 - protein, 7 aa, synthetic construct
EHYAPSA

SEQ ID NO: 28120 - protein, 7 aa, synthetic construct
IEAAIAA

SEQ ID NO: 28121 - protein, 7 aa, synthetic construct
KPEWGDT

SEQ ID NO: 28122 - protein, 7 aa, synthetic construct
EPKYNDF

SEQ ID NO: 28123 - protein, 7 aa, synthetic construct
DYQSPQA

SEQ ID NO: 28124 - protein, 7 aa, synthetic construct
WNVTMQA

SEQ ID NO: 28125 - protein, 7 aa, synthetic construct
IVDPGGE

SEQ ID NO: 28126 - protein, 7 aa, synthetic construct
DQRYGYP

SEQ ID NO: 28127 - protein, 7 aa, synthetic construct
KIGSAYY

SEQ ID NO: 28128 - protein, 7 aa, synthetic construct
HTSMNEF

SEQ ID NO: 28129 - protein, 7 aa, synthetic construct
IPHSECC

SEQ ID NO: 28130 - protein, 7 aa, synthetic construct
AKETDLK

SEQ ID NO: 28131 - protein, 7 aa, synthetic construct
RVSDETW

SEQ ID NO: 28132 - protein, 7 aa, synthetic construct
GEIQKHR

SEQ ID NO: 28133 - protein, 7 aa, synthetic construct
MDALKEL

SEQ ID NO: 28134 - protein, 7 aa, synthetic construct
EQKADIS

SEQ ID NO: 28135 - protein, 7 aa, synthetic construct
NLHLKSM

SEQ ID NO: 28136 - protein, 7 aa, synthetic construct
ETGLRDG

SEQ ID NO: 28137 - protein, 7 aa, synthetic construct
SFKLDKA

SEQ ID NO: 28138 - protein, 7 aa, synthetic construct
GYEVSVP

SEQ ID NO: 28139 - protein, 7 aa, synthetic construct
SQDDHYH

SEQ ID NO: 28140 - protein, 7 aa, synthetic construct
KAVQLHF

SEQ ID NO: 28141 - protein, 7 aa, synthetic construct
ANNYTQR

SEQ ID NO: 28142 - protein, 7 aa, synthetic construct
RFSSLAT

SEQ ID NO: 28143 - protein, 7 aa, synthetic construct
RVDHQTW

SEQ ID NO: 28144 - protein, 7 aa, synthetic construct
PNAQGQP

SEQ ID NO: 28145 - protein, 7 aa, synthetic construct
FVRLSDE

SEQ ID NO: 28146 - protein, 7 aa, synthetic construct
MTNKIHF

SEQ ID NO: 28147 - protein, 7 aa, synthetic construct
SYDLNRE

SEQ ID NO: 28148 - protein, 7 aa, synthetic construct
REIEPEM

SEQ ID NO: 28149 - protein, 7 aa, synthetic construct
GTRSTRD

SEQ ID NO: 28150 - protein, 7 aa, synthetic construct
NESALLR

SEQ ID NO: 28151 - protein, 7 aa, synthetic construct
GPELTHQ

SEQ ID NO: 28152 - protein, 7 aa, synthetic construct
TENSQHH

SEQ ID NO: 28153 - protein, 7 aa, synthetic construct
KHEQFTK

SEQ ID NO: 28154 - protein, 7 aa, synthetic construct
FPGPPNN

SEQ ID NO: 28155 - protein, 7 aa, synthetic construct
TMPPLLQ

SEQ ID NO: 28156 - protein, 7 aa, synthetic construct
KAIENLH

SEQ ID NO: 28157 - protein, 7 aa, synthetic construct
RVEKVAL

SEQ ID NO: 28158 - protein, 7 aa, synthetic construct
SMHPKYV

SEQ ID NO: 28159 - protein, 7 aa, synthetic construct
QVTVSEI

SEQ ID NO: 28160 - protein, 7 aa, synthetic construct
TDMKSIK

SEQ ID NO: 28161 - protein, 7 aa, synthetic construct
IPPKVYI

SEQ ID NO: 28162 - protein, 7 aa, synthetic construct
AKIQIMD

SEQ ID NO: 28163 - protein, 7 aa, synthetic construct
DIQIGTG

SEQ ID NO: 28164 - protein, 7 aa, synthetic construct
LSLQNLK

SEQ ID NO: 28165 - protein, 7 aa, synthetic construct
SDPSHNV

SEQ ID NO: 28166 - protein, 7 aa, synthetic construct
FSAAYSN

SEQ ID NO: 28167 - protein, 7 aa, synthetic construct
PRQPLTA

SEQ ID NO: 28168 - protein, 7 aa, synthetic construct
DYQQQRM

SEQ ID NO: 28169 - protein, 7 aa, synthetic construct
TASKLMD

SEQ ID NO: 28170 - protein, 7 aa, synthetic construct
VHLIRQE

SEQ ID NO: 28171 - protein, 7 aa, synthetic construct
VAALVVP

SEQ ID NO: 28172 - protein, 7 aa, synthetic construct
YKVEVQH

SEQ ID NO: 28173 - protein, 7 aa, synthetic construct
TEWAVQS

SEQ ID NO: 28174 - protein, 7 aa, synthetic construct
FMDFQTS

SEQ ID NO: 28175 - protein, 7 aa, synthetic construct
ASVKNAN

SEQ ID NO: 28176 - protein, 7 aa, synthetic construct
AKTIDSE

SEQ ID NO: 28177 - protein, 7 aa, synthetic construct
PAMQDNY

SEQ ID NO: 28178 - protein, 7 aa, synthetic construct
QNVQHGE

SEQ ID NO: 28179 - protein, 7 aa, synthetic construct
HQEDMKG

SEQ ID NO: 28180 - protein, 7 aa, synthetic construct
WLYDPVE

SEQ ID NO: 28181 - protein, 7 aa, synthetic construct
HIPFTTS

SEQ ID NO: 28182 - protein, 7 aa, synthetic construct
PALIRAE

SEQ ID NO: 28183 - protein, 7 aa, synthetic construct
RDELTMQ

SEQ ID NO: 28184 - protein, 7 aa, synthetic construct
TLDQHGL

SEQ ID NO: 28185 - protein, 7 aa, synthetic construct
YMDNGHD

SEQ ID NO: 28186 - protein, 7 aa, synthetic construct
IISRYSE

SEQ ID NO: 28187 - protein, 7 aa, synthetic construct
VVPNSAF

SEQ ID NO: 28188 - protein, 7 aa, synthetic construct
QVNETKQ

SEQ ID NO: 28189 - protein, 7 aa, synthetic construct
SYAIVQG

SEQ ID NO: 28190 - protein, 7 aa, synthetic construct
VKTARPP

SEQ ID NO: 28191 - protein, 7 aa, synthetic construct
YFVKAHE

SEQ ID NO: 28192 - protein, 7 aa, synthetic construct
GRGHHLE

SEQ ID NO: 28193 - protein, 7 aa, synthetic construct
GGLYSVP

SEQ ID NO: 28194 - protein, 7 aa, synthetic construct
AGAVINE

SEQ ID NO: 28195 - protein, 7 aa, synthetic construct
WSAQPED

SEQ ID NO: 28196 - protein, 7 aa, synthetic construct
NFGGFVE

SEQ ID NO: 28197 - protein, 7 aa, synthetic construct
YNLMSRT

SEQ ID NO: 28198 - protein, 7 aa, synthetic construct
IKEWNVD

SEQ ID NO: 28199 - protein, 7 aa, synthetic construct
LQGLHAM

SEQ ID NO: 28200 - protein, 7 aa, synthetic construct
PGAEAYI

SEQ ID NO: 28201 - protein, 7 aa, synthetic construct
ENGNNHA

SEQ ID NO: 28202 - protein, 7 aa, synthetic construct
WPKDMDY

SEQ ID NO: 28203 - protein, 7 aa, synthetic construct
TQGDSME

SEQ ID NO: 28204 - protein, 7 aa, synthetic construct
IYQDVRR

SEQ ID NO: 28205 - protein, 7 aa, synthetic construct
YNYPSEQ

SEQ ID NO: 28206 - protein, 7 aa, synthetic construct
NGITPHI

SEQ ID NO: 28207 - protein, 7 aa, synthetic construct
PSTIDAY

SEQ ID NO: 28208 - protein, 7 aa, synthetic construct
GMQDFKL

SEQ ID NO: 28209 - protein, 7 aa, synthetic construct
YAQHDDP

SEQ ID NO: 28210 - protein, 7 aa, synthetic construct
TMPKSTN

SEQ ID NO: 28211 - protein, 7 aa, synthetic construct
ADLHKEA

SEQ ID NO: 28212 - protein, 7 aa, synthetic construct
YAHYQQT

SEQ ID NO: 28213 - protein, 7 aa, synthetic construct
IGHEDIR

SEQ ID NO: 28214 - protein, 7 aa, synthetic construct
PEKYQPE

SEQ ID NO: 28215 - protein, 7 aa, synthetic construct
GDISFSA

SEQ ID NO: 28216 - protein, 7 aa, synthetic construct
AQGDNEP

SEQ ID NO: 28217 - protein, 7 aa, synthetic construct
PLTLKPD

SEQ ID NO: 28218 - protein, 7 aa, synthetic construct
EYNHHKL

SEQ ID NO: 28219 - protein, 7 aa, synthetic construct
FLPGPHN

SEQ ID NO: 28220 - protein, 7 aa, synthetic construct
IKIKIDS

SEQ ID NO: 28221 - protein, 7 aa, synthetic construct
MENMQNS

SEQ ID NO: 28222 - protein, 7 aa, synthetic construct
RGTADER

SEQ ID NO: 28223 - protein, 7 aa, synthetic construct
EELGPMP

SEQ ID NO: 28224 - protein, 7 aa, synthetic construct
VSVPAKV

SEQ ID NO: 28225 - protein, 7 aa, synthetic construct
IDKSDGG

SEQ ID NO: 28226 - protein, 7 aa, synthetic construct
FNYDHDM

SEQ ID NO: 28227 - protein, 7 aa, synthetic construct
VQFPHPD

SEQ ID NO: 28228 - protein, 7 aa, synthetic construct
ADAMHDR

SEQ ID NO: 28229 - protein, 7 aa, synthetic construct
GTNAAEL

SEQ ID NO: 28230 - protein, 7 aa, synthetic construct
YSTGEDN

SEQ ID NO: 28231 - protein, 7 aa, synthetic construct
TESFKQI

SEQ ID NO: 28232 - protein, 7 aa, synthetic construct
ILMPAED

SEQ ID NO: 28233 - protein, 7 aa, synthetic construct
ILSTQGI

SEQ ID NO: 28234 - protein, 7 aa, synthetic construct
TVGYIED

SEQ ID NO: 28235 - protein, 7 aa, synthetic construct
VQMTSKQ

SEQ ID NO: 28236 - protein, 7 aa, synthetic construct
LLTSQQV

SEQ ID NO: 28237 - protein, 7 aa, synthetic construct
ENVGTEF

SEQ ID NO: 28238 - protein, 7 aa, synthetic construct
SVVAYDG

SEQ ID NO: 28239 - protein, 7 aa, synthetic construct
TDMSGSF

SEQ ID NO: 28240 - protein, 7 aa, synthetic construct
DFTQKMT

SEQ ID NO: 28241 - protein, 7 aa, synthetic construct
HVPPYDR

SEQ ID NO: 28242 - protein, 7 aa, synthetic construct
IHAKSWD

SEQ ID NO: 28243 - protein, 7 aa, synthetic construct
TDNTQAT

SEQ ID NO: 28244 - protein, 7 aa, synthetic construct
TQTITPS

SEQ ID NO: 28245 - protein, 7 aa, synthetic construct
RNVRVGD

SEQ ID NO: 28246 - protein, 7 aa, synthetic construct
GSLAGHH

SEQ ID NO: 28247 - protein, 7 aa, synthetic construct
NVKQMVN

SEQ ID NO: 28248 - protein, 7 aa, synthetic construct
KEAKWTN

SEQ ID NO: 28249 - protein, 7 aa, synthetic construct
KFTATTT

SEQ ID NO: 28250 - protein, 7 aa, synthetic construct
QPDVKNN

SEQ ID NO: 28251 - protein, 7 aa, synthetic construct
VTGFNPV

SEQ ID NO: 28252 - protein, 7 aa, synthetic construct
KIRIIPD

SEQ ID NO: 28253 - protein, 7 aa, synthetic construct
NEADVYS

SEQ ID NO: 28254 - protein, 7 aa, synthetic construct
QRYETMN

SEQ ID NO: 28255 - protein, 7 aa, synthetic construct
ATPTYLP

SEQ ID NO: 28256 - protein, 7 aa, synthetic construct
MPFNHPP

SEQ ID NO: 28257 - protein, 7 aa, synthetic construct
TNEKSMY

SEQ ID NO: 28258 - protein, 7 aa, synthetic construct
LMVNGHS

SEQ ID NO: 28259 - protein, 7 aa, synthetic construct
VEHYTVN

SEQ ID NO: 28260 - protein, 7 aa, synthetic construct
EWRDPDH

SEQ ID NO: 28261 - protein, 7 aa, synthetic construct
HKNVSHP

SEQ ID NO: 28262 - protein, 7 aa, synthetic construct
HQKSMRE

SEQ ID NO: 28263 - protein, 7 aa, synthetic construct
MNPHTDN

SEQ ID NO: 28264 - protein, 7 aa, synthetic construct
LFQPKIS

SEQ ID NO: 28265 - protein, 7 aa, synthetic construct
SLPPPHV

SEQ ID NO: 28266 - protein, 7 aa, synthetic construct
NQQHRMN

SEQ ID NO: 28267 - protein, 7 aa, synthetic construct
WEMHAKI

SEQ ID NO: 28268 - protein, 7 aa, synthetic construct
LTTSERD

SEQ ID NO: 28269 - protein, 7 aa, synthetic construct
HDEDHYG

SEQ ID NO: 28270 - protein, 7 aa, synthetic construct
ENLGHSD

SEQ ID NO: 28271 - protein, 7 aa, synthetic construct
HENAEGW

SEQ ID NO: 28272 - protein, 7 aa, synthetic construct
MYKSHHP

SEQ ID NO: 28273 - protein, 7 aa, synthetic construct
QAQGMAI

SEQ ID NO: 28274 - protein, 7 aa, synthetic construct
HSDTTEY

SEQ ID NO: 28275 - protein, 7 aa, synthetic construct
ASNRDDW

SEQ ID NO: 28276 - protein, 7 aa, synthetic construct
QEPAYRK

SEQ ID NO: 28277 - protein, 7 aa, synthetic construct
SINSTLL

SEQ ID NO: 28278 - protein, 7 aa, synthetic construct
MIQMGYG

SEQ ID NO: 28279 - protein, 7 aa, synthetic construct
HVAHPFQ

SEQ ID NO: 28280 - protein, 7 aa, synthetic construct
QDSVQLP

SEQ ID NO: 28281 - protein, 7 aa, synthetic construct
SEVIGRH

SEQ ID NO: 28282 - protein, 7 aa, synthetic construct
HDLTPMR

SEQ ID NO: 28283 - protein, 7 aa, synthetic construct
YVNPMNK

SEQ ID NO: 28284 - protein, 7 aa, synthetic construct
PDFVEKY

SEQ ID NO: 28285 - protein, 7 aa, synthetic construct
TKVTLHP

SEQ ID NO: 28286 - protein, 7 aa, synthetic construct
WTGGNAY

SEQ ID NO: 28287 - protein, 7 aa, synthetic construct
TVGFHGV

SEQ ID NO: 28288 - protein, 7 aa, synthetic construct
DYVHEPK

SEQ ID NO: 28289 - protein, 7 aa, synthetic construct
AISKTFD

SEQ ID NO: 28290 - protein, 7 aa, synthetic construct
LGASDMT

SEQ ID NO: 28291 - protein, 7 aa, synthetic construct
FSSDIGP

SEQ ID NO: 28292 - protein, 7 aa, synthetic construct
LPAHVHK

SEQ ID NO: 28293 - protein, 7 aa, synthetic construct
QDLHHPD

SEQ ID NO: 28294 - protein, 7 aa, synthetic construct
IEKWITK

SEQ ID NO: 28295 - protein, 7 aa, synthetic construct
VHEKYFE

SEQ ID NO: 28296 - protein, 7 aa, synthetic construct
DTPKDSS

SEQ ID NO: 28297 - protein, 7 aa, synthetic construct
QRQQHFV

SEQ ID NO: 28298 - protein, 7 aa, synthetic construct
LCVTGCA

SEQ ID NO: 28299 - protein, 7 aa, synthetic construct
MQKYDDW

SEQ ID NO: 28300 - protein, 7 aa, synthetic construct
TVREEEF

SEQ ID NO: 28301 - protein, 7 aa, synthetic construct
PIYSTPS

SEQ ID NO: 28302 - protein, 7 aa, synthetic construct
LIHMRVD

SEQ ID NO: 28303 - protein, 7 aa, synthetic construct
HNHAIMQ

SEQ ID NO: 28304 - protein, 7 aa, synthetic construct
YQPHIGY

SEQ ID NO: 28305 - protein, 7 aa, synthetic construct
FNQSQNE

SEQ ID NO: 28306 - protein, 7 aa, synthetic construct
YLGDRTR

SEQ ID NO: 28307 - protein, 7 aa, synthetic construct
PWSVNQL

SEQ ID NO: 28308 - protein, 7 aa, synthetic construct
ANNGYPI

SEQ ID NO: 28309 - protein, 7 aa, synthetic construct
DAYDQTG

SEQ ID NO: 28310 - protein, 7 aa, synthetic construct
RHEAYAD

SEQ ID NO: 28311 - protein, 7 aa, synthetic construct
QTENRFS

SEQ ID NO: 28312 - protein, 7 aa, synthetic construct
PNPERHK

SEQ ID NO: 28313 - protein, 7 aa, synthetic construct
PTNFSVA

SEQ ID NO: 28314 - protein, 7 aa, synthetic construct
IKMDDTI

SEQ ID NO: 28315 - protein, 7 aa, synthetic construct
KHNGYIQ

SEQ ID NO: 28316 - protein, 7 aa, synthetic construct
SSSFTDS

SEQ ID NO: 28317 - protein, 7 aa, synthetic construct
DAPNDRS

SEQ ID NO: 28318 - protein, 7 aa, synthetic construct
SKETQAF

SEQ ID NO: 28319 - protein, 7 aa, synthetic construct
QTLRDGL

SEQ ID NO: 28320 - protein, 7 aa, synthetic construct
EHNYNID

SEQ ID NO: 28321 - protein, 7 aa, synthetic construct
DQHKEQI

SEQ ID NO: 28322 - protein, 7 aa, synthetic construct
KVHAGAQ

SEQ ID NO: 28323 - protein, 7 aa, synthetic construct
WATYENH

SEQ ID NO: 28324 - protein, 7 aa, synthetic construct
KRDSQLT

SEQ ID NO: 28325 - protein, 7 aa, synthetic construct
MDHLGQN

SEQ ID NO: 28326 - protein, 7 aa, synthetic construct
NSDKLFQ

SEQ ID NO: 28327 - protein, 7 aa, synthetic construct
KNGLFED

SEQ ID NO: 28328 - protein, 7 aa, synthetic construct
DQPGTIM

SEQ ID NO: 28329 - protein, 7 aa, synthetic construct
RADMMDP

SEQ ID NO: 28330 - protein, 7 aa, synthetic construct
LQHADMS

SEQ ID NO: 28331 - protein, 7 aa, synthetic construct
FQASTTT

SEQ ID NO: 28332 - protein, 7 aa, synthetic construct
VTGPKAM

SEQ ID NO: 28333 - protein, 7 aa, synthetic construct
EFSEGNY

SEQ ID NO: 28334 - protein, 7 aa, synthetic construct
QTMEALG

SEQ ID NO: 28335 - protein, 7 aa, synthetic construct
EMQAPTR

SEQ ID NO: 28336 - protein, 7 aa, synthetic construct
MGSHYVV

SEQ ID NO: 28337 - protein, 7 aa, synthetic construct
IHAKTDW

SEQ ID NO: 28338 - protein, 7 aa, synthetic construct
FVTGRAF

SEQ ID NO: 28339 - protein, 7 aa, synthetic construct
VLSAEPA

SEQ ID NO: 28340 - protein, 7 aa, synthetic construct
MQFVDRA

SEQ ID NO: 28341 - protein, 7 aa, synthetic construct
MGEHDSG

SEQ ID NO: 28342 - protein, 7 aa, synthetic construct
YIELGNA

SEQ ID NO: 28343 - protein, 7 aa, synthetic construct
SDLMHKI

SEQ ID NO: 28344 - protein, 7 aa, synthetic construct
KSKHPES

SEQ ID NO: 28345 - protein, 7 aa, synthetic construct
TTSQQYT

SEQ ID NO: 28346 - protein, 7 aa, synthetic construct
SKLEVQA

SEQ ID NO: 28347 - protein, 7 aa, synthetic construct
EAHDSRA

SEQ ID NO: 28348 - protein, 7 aa, synthetic construct
VKELVTA

SEQ ID NO: 28349 - protein, 7 aa, synthetic construct
RHYQEQA

SEQ ID NO: 28350 - protein, 7 aa, synthetic construct
TKHPIMM

SEQ ID NO: 28351 - protein, 7 aa, synthetic construct
MENQGKK

SEQ ID NO: 28352 - protein, 7 aa, synthetic construct
EAGYDFD

SEQ ID NO: 28353 - protein, 7 aa, synthetic construct
FLVNHAP

SEQ ID NO: 28354 - protein, 7 aa, synthetic construct
TESFERI

SEQ ID NO: 28355 - protein, 7 aa, synthetic construct
QQLRNFP

SEQ ID NO: 28356 - protein, 7 aa, synthetic construct
NEHSAYF

SEQ ID NO: 28357 - protein, 7 aa, synthetic construct
QPAPTTV

SEQ ID NO: 28358 - protein, 7 aa, synthetic construct
HIHQEGY

SEQ ID NO: 28359 - protein, 7 aa, synthetic construct
EPNADRR

SEQ ID NO: 28360 - protein, 7 aa, synthetic construct
AHKDDSD

SEQ ID NO: 28361 - protein, 7 aa, synthetic construct
ATQIHGI

SEQ ID NO: 28362 - protein, 7 aa, synthetic construct
FELKQGE

SEQ ID NO: 28363 - protein, 7 aa, synthetic construct
YMSNEHG

SEQ ID NO: 28364 - protein, 7 aa, synthetic construct
EAVTVSD

SEQ ID NO: 28365 - protein, 7 aa, synthetic construct
LNQLYSS

SEQ ID NO: 28366 - protein, 7 aa, synthetic construct
FTSETGN

SEQ ID NO: 28367 - protein, 7 aa, synthetic construct
YKNVQHV

SEQ ID NO: 28368 - protein, 7 aa, synthetic construct
LRSDLMD

SEQ ID NO: 28369 - protein, 7 aa, synthetic construct
FAYTNDD

SEQ ID NO: 28370 - protein, 7 aa, synthetic construct
GHKEFEM

SEQ ID NO: 28371 - protein, 7 aa, synthetic construct
GDLAKYK

SEQ ID NO: 28372 - protein, 7 aa, synthetic construct
WESPSIA

SEQ ID NO: 28373 - protein, 7 aa, synthetic construct
KHLTLMP

SEQ ID NO: 28374 - protein, 7 aa, synthetic construct
SLTAIKV

SEQ ID NO: 28375 - protein, 7 aa, synthetic construct
YPAAISV

SEQ ID NO: 28376 - protein, 7 aa, synthetic construct
DRINNPE

SEQ ID NO: 28377 - protein, 7 aa, synthetic construct
RQQQIDE

SEQ ID NO: 28378 - protein, 7 aa, synthetic construct
ISGSQNP

SEQ ID NO: 28379 - protein, 7 aa, synthetic construct
PPTGAKD

SEQ ID NO: 28380 - protein, 7 aa, synthetic construct
QHHTEPE

SEQ ID NO: 28381 - protein, 7 aa, synthetic construct
DPMPTNI

SEQ ID NO: 28382 - protein, 7 aa, synthetic construct
SNVQIMS

SEQ ID NO: 28383 - protein, 7 aa, synthetic construct
AEKLPMK

SEQ ID NO: 28384 - protein, 7 aa, synthetic construct
YREIIVN

SEQ ID NO: 28385 - protein, 7 aa, synthetic construct
RGGIADA

SEQ ID NO: 28386 - protein, 7 aa, synthetic construct
WLQSHRA

SEQ ID NO: 28387 - protein, 7 aa, synthetic construct
KMHGGAW

SEQ ID NO: 28388 - protein, 7 aa, synthetic construct
DRTKVDL

SEQ ID NO: 28389 - protein, 7 aa, synthetic construct
YTEIRSD

SEQ ID NO: 28390 - protein, 7 aa, synthetic construct
LFHQHQN

SEQ ID NO: 28391 - protein, 7 aa, synthetic construct
NAATNDN

SEQ ID NO: 28392 - protein, 7 aa, synthetic construct
YQNTNEL

SEQ ID NO: 28393 - protein, 7 aa, synthetic construct
PGSVVID

SEQ ID NO: 28394 - protein, 7 aa, synthetic construct
THEGSNF

SEQ ID NO: 28395 - protein, 7 aa, synthetic construct
DLTAIQF

SEQ ID NO: 28396 - protein, 7 aa, synthetic construct
QINHQME

SEQ ID NO: 28397 - protein, 7 aa, synthetic construct
KTVGLEF

SEQ ID NO: 28398 - protein, 7 aa, synthetic construct
PQKFLPQ

SEQ ID NO: 28399 - protein, 7 aa, synthetic construct
HEDPRNV

SEQ ID NO: 28400 - protein, 7 aa, synthetic construct
QPNGGQL

SEQ ID NO: 28401 - protein, 7 aa, synthetic construct
APLERQD

SEQ ID NO: 28402 - protein, 7 aa, synthetic construct
LMQGKFP

SEQ ID NO: 28403 - protein, 7 aa, synthetic construct
ESGHGPA

SEQ ID NO: 28404 - protein, 7 aa, synthetic construct
LKEVLPM

SEQ ID NO: 28405 - protein, 7 aa, synthetic construct
MGDAEVV

SEQ ID NO: 28406 - protein, 7 aa, synthetic construct
LTQAPYD

SEQ ID NO: 28407 - protein, 7 aa, synthetic construct
RDADFAM

SEQ ID NO: 28408 - protein, 7 aa, synthetic construct
MGGFDST

SEQ ID NO: 28409 - protein, 7 aa, synthetic construct
GERMPYV

SEQ ID NO: 28410 - protein, 7 aa, synthetic construct
NGHPLEV

SEQ ID NO: 28411 - protein, 7 aa, synthetic construct
VPEGTRY

SEQ ID NO: 28412 - protein, 7 aa, synthetic construct
PSGMGHR

SEQ ID NO: 28413 - protein, 7 aa, synthetic construct
RSELNQE

SEQ ID NO: 28414 - protein, 7 aa, synthetic construct
FDHDTMK

SEQ ID NO: 28415 - protein, 7 aa, synthetic construct
RGDYMKV

SEQ ID NO: 28416 - protein, 7 aa, synthetic construct
VRDDNNG

SEQ ID NO: 28417 - protein, 7 aa, synthetic construct
TLRYPVQ

SEQ ID NO: 28418 - protein, 7 aa, synthetic construct
PNMHQES

SEQ ID NO: 28419 - protein, 7 aa, synthetic construct
SYLASNE

SEQ ID NO: 28420 - protein, 7 aa, synthetic construct
HFQIQTG

SEQ ID NO: 28421 - protein, 7 aa, synthetic construct
ENTNKWS

SEQ ID NO: 28422 - protein, 7 aa, synthetic construct
LRPPWAE

SEQ ID NO: 28423 - protein, 7 aa, synthetic construct
EIAQPQP

SEQ ID NO: 28424 - protein, 7 aa, synthetic construct
ANPPEDH

SEQ ID NO: 28425 - protein, 7 aa, synthetic construct
HNTMMNR

SEQ ID NO: 28426 - protein, 7 aa, synthetic construct
GNVAVEG

SEQ ID NO: 28427 - protein, 7 aa, synthetic construct
PHKYDER

SEQ ID NO: 28428 - protein, 7 aa, synthetic construct
NHSWNGV

SEQ ID NO: 28429 - protein, 7 aa, synthetic construct
PMQVPDL

SEQ ID NO: 28430 - protein, 7 aa, synthetic construct
WSTAIPY

SEQ ID NO: 28431 - protein, 7 aa, synthetic construct
MTQVKSE

SEQ ID NO: 28432 - protein, 7 aa, synthetic construct
SRGFTSS

SEQ ID NO: 28433 - protein, 7 aa, synthetic construct
ASPNPNL

SEQ ID NO: 28434 - protein, 7 aa, synthetic construct
VGVLYSE

SEQ ID NO: 28435 - protein, 7 aa, synthetic construct
TQEANSK

SEQ ID NO: 28436 - protein, 7 aa, synthetic construct
SPRPNEA

SEQ ID NO: 28437 - protein, 7 aa, synthetic construct
EQDMDPP

SEQ ID NO: 28438 - protein, 7 aa, synthetic construct
MLVSSQS

SEQ ID NO: 28439 - protein, 7 aa, synthetic construct
IDGVFER

SEQ ID NO: 28440 - protein, 7 aa, synthetic construct
KQVQEDH

SEQ ID NO: 28441 - protein, 7 aa, synthetic construct
ISPMSVK

SEQ ID NO: 28442 - protein, 7 aa, synthetic construct
AAGNEQI

SEQ ID NO: 28443 - protein, 7 aa, synthetic construct
SDQVIRD

SEQ ID NO: 28444 - protein, 7 aa, synthetic construct
HLVPTMS

SEQ ID NO: 28445 - protein, 7 aa, synthetic construct
AHDNSHH

SEQ ID NO: 28446 - protein, 7 aa, synthetic construct
TFPAALG

SEQ ID NO: 28447 - protein, 7 aa, synthetic construct
REVGFTE

SEQ ID NO: 28448 - protein, 7 aa, synthetic construct
KFNEKHH

SEQ ID NO: 28449 - protein, 7 aa, synthetic construct
PSHVIME

SEQ ID NO: 28450 - protein, 7 aa, synthetic construct
QMADSTA

SEQ ID NO: 28451 - protein, 7 aa, synthetic construct
NGNAQEF

SEQ ID NO: 28452 - protein, 7 aa, synthetic construct
QMMNAKH

SEQ ID NO: 28453 - protein, 7 aa, synthetic construct
YIPFNND

SEQ ID NO: 28454 - protein, 7 aa, synthetic construct
VNGANVP

SEQ ID NO: 28455 - protein, 7 aa, synthetic construct
PKVPLNF

SEQ ID NO: 28456 - protein, 7 aa, synthetic construct
GMDYQKV

SEQ ID NO: 28457 - protein, 7 aa, synthetic construct
DVRGEQV

SEQ ID NO: 28458 - protein, 7 aa, synthetic construct
HLNTPQS

SEQ ID NO: 28459 - protein, 7 aa, synthetic construct
AWNDKQV

SEQ ID NO: 28460 - protein, 7 aa, synthetic construct
MYNQHDI

SEQ ID NO: 28461 - protein, 7 aa, synthetic construct
RDGLRYP

SEQ ID NO: 28462 - protein, 7 aa, synthetic construct
YLGQHHH

SEQ ID NO: 28463 - protein, 7 aa, synthetic construct
KSQIVFS

SEQ ID NO: 28464 - protein, 7 aa, synthetic construct
VWGPDQV

SEQ ID NO: 28465 - protein, 7 aa, synthetic construct
APADWVG

SEQ ID NO: 28466 - protein, 7 aa, synthetic construct
KPSPHAQ

SEQ ID NO: 28467 - protein, 7 aa, synthetic construct
LAMSHSQ

SEQ ID NO: 28468 - protein, 7 aa, synthetic construct
YYAAEYA

SEQ ID NO: 28469 - protein, 7 aa, synthetic construct
RYDTKAI

SEQ ID NO: 28470 - protein, 7 aa, synthetic construct
IMAGDTH

SEQ ID NO: 28471 - protein, 7 aa, synthetic construct
KVIEQQF

SEQ ID NO: 28472 - protein, 7 aa, synthetic construct
IKASVMY

SEQ ID NO: 28473 - protein, 7 aa, synthetic construct
KDALAYL

SEQ ID NO: 28474 - protein, 7 aa, synthetic construct
VSTPELM

SEQ ID NO: 28475 - protein, 7 aa, synthetic construct
PVNESNF

SEQ ID NO: 28476 - protein, 7 aa, synthetic construct
NQVNMQI

SEQ ID NO: 28477 - protein, 7 aa, synthetic construct
TEKIGIK

SEQ ID NO: 28478 - protein, 7 aa, synthetic construct
VAQVMSS

SEQ ID NO: 28479 - protein, 7 aa, synthetic construct
WAHTQHQ

SEQ ID NO: 28480 - protein, 7 aa, synthetic construct
YHDTVYA

SEQ ID NO: 28481 - protein, 7 aa, synthetic construct
GSDNQSQ

SEQ ID NO: 28482 - protein, 7 aa, synthetic construct
RIEVGAM

SEQ ID NO: 28483 - protein, 7 aa, synthetic construct
KQYGEII

SEQ ID NO: 28484 - protein, 7 aa, synthetic construct
IQGVNFT

SEQ ID NO: 28485 - protein, 7 aa, synthetic construct
ISYTATT

SEQ ID NO: 28486 - protein, 7 aa, synthetic construct
EMHQPPA

SEQ ID NO: 28487 - protein, 7 aa, synthetic construct
SKNIIDA

SEQ ID NO: 28488 - protein, 7 aa, synthetic construct
ISVHPIP

SEQ ID NO: 28489 - protein, 7 aa, synthetic construct
VVQGVQY

SEQ ID NO: 28490 - protein, 7 aa, synthetic construct
GKHPYNA

SEQ ID NO: 28491 - protein, 7 aa, synthetic construct
HGEALAR

SEQ ID NO: 28492 - protein, 7 aa, synthetic construct
KNREFKE

SEQ ID NO: 28493 - protein, 7 aa, synthetic construct
WLMEVGD

SEQ ID NO: 28494 - protein, 7 aa, synthetic construct
HLGKMTM

SEQ ID NO: 28495 - protein, 7 aa, synthetic construct
AMGSTEK

SEQ ID NO: 28496 - protein, 7 aa, synthetic construct
DGEVRWD

SEQ ID NO: 28497 - protein, 7 aa, synthetic construct
MEYNVRP

SEQ ID NO: 28498 - protein, 7 aa, synthetic construct
KSMSVVY

SEQ ID NO: 28499 - protein, 7 aa, synthetic construct
AVNEFGF

SEQ ID NO: 28500 - protein, 7 aa, synthetic construct
IHPVRPY

SEQ ID NO: 28501 - protein, 7 aa, synthetic construct
TGTYVNT

SEQ ID NO: 28502 - protein, 7 aa, synthetic construct
EERPIPK

SEQ ID NO: 28503 - protein, 7 aa, synthetic construct
ALYQSIA

SEQ ID NO: 28504 - protein, 7 aa, synthetic construct
PPSSDNM

SEQ ID NO: 28505 - protein, 7 aa, synthetic construct
SDNNMSL

SEQ ID NO: 28506 - protein, 7 aa, synthetic construct
EHDRQMH

SEQ ID NO: 28507 - protein, 7 aa, synthetic construct
DFTSNKW

SEQ ID NO: 28508 - protein, 7 aa, synthetic construct
NANGIQY

SEQ ID NO: 28509 - protein, 7 aa, synthetic construct
VNRFSEF

SEQ ID NO: 28510 - protein, 7 aa, synthetic construct
NYSNNNE

SEQ ID NO: 28511 - protein, 7 aa, synthetic construct
MNATQDR

SEQ ID NO: 28512 - protein, 7 aa, synthetic construct
YQTNLDP

SEQ ID NO: 28513 - protein, 7 aa, synthetic construct
FNTIDKI

SEQ ID NO: 28514 - protein, 7 aa, synthetic construct
NHDKKQM

SEQ ID NO: 28515 - protein, 7 aa, synthetic construct
ETFAGAD

SEQ ID NO: 28516 - protein, 7 aa, synthetic construct
MESMRHV

SEQ ID NO: 28517 - protein, 7 aa, synthetic construct
SSVDTHG

SEQ ID NO: 28518 - protein, 7 aa, synthetic construct
SAVEYKY

SEQ ID NO: 28519 - protein, 7 aa, synthetic construct
SQYAAMK

SEQ ID NO: 28520 - protein, 7 aa, synthetic construct
MQNAPDG

SEQ ID NO: 28521 - protein, 7 aa, synthetic construct
IRKMELH

SEQ ID NO: 28522 - protein, 7 aa, synthetic construct
PHLSNHS

SEQ ID NO: 28523 - protein, 7 aa, synthetic construct
MDGSKIE

SEQ ID NO: 28524 - protein, 7 aa, synthetic construct
DLYHDAG

SEQ ID NO: 28525 - protein, 7 aa, synthetic construct
GYGQGTR

SEQ ID NO: 28526 - protein, 7 aa, synthetic construct
ALEHILS

SEQ ID NO: 28527 - protein, 7 aa, synthetic construct
KDWHKDH

SEQ ID NO: 28528 - protein, 7 aa, synthetic construct
QKDNTLI

SEQ ID NO: 28529 - protein, 7 aa, synthetic construct
AITPAAD

SEQ ID NO: 28530 - protein, 7 aa, synthetic construct
IDADPQT

SEQ ID NO: 28531 - protein, 7 aa, synthetic construct
FVPNKID

SEQ ID NO: 28532 - protein, 7 aa, synthetic construct
YMPDITS

SEQ ID NO: 28533 - protein, 7 aa, synthetic construct
NPEYANT

SEQ ID NO: 28534 - protein, 7 aa, synthetic construct
DHHPPKN

SEQ ID NO: 28535 - protein, 7 aa, synthetic construct
QIPGMAQ

SEQ ID NO: 28536 - protein, 7 aa, synthetic construct
PGEKDQI

SEQ ID NO: 28537 - protein, 7 aa, synthetic construct
HRNMNHN

SEQ ID NO: 28538 - protein, 7 aa, synthetic construct
LWKTGGY

SEQ ID NO: 28539 - protein, 7 aa, synthetic construct
RVDENVA

SEQ ID NO: 28540 - protein, 7 aa, synthetic construct
ERASWAE

SEQ ID NO: 28541 - protein, 7 aa, synthetic construct
SNGYASR

SEQ ID NO: 28542 - protein, 7 aa, synthetic construct
QLNIEQI

SEQ ID NO: 28543 - protein, 7 aa, synthetic construct
KGEQIGF

SEQ ID NO: 28544 - protein, 7 aa, synthetic construct
KLLQESV

SEQ ID NO: 28545 - protein, 7 aa, synthetic construct
TYGFEGS

SEQ ID NO: 28546 - protein, 7 aa, synthetic construct
KAPNMRG

SEQ ID NO: 28547 - protein, 7 aa, synthetic construct
TINQHKL

SEQ ID NO: 28548 - protein, 7 aa, synthetic construct
HMAPHYA

SEQ ID NO: 28549 - protein, 7 aa, synthetic construct
TYDHQED

SEQ ID NO: 28550 - protein, 7 aa, synthetic construct
DLRVFKE

SEQ ID NO: 28551 - protein, 7 aa, synthetic construct
HRWTEID

SEQ ID NO: 28552 - protein, 7 aa, synthetic construct
DARVECC

SEQ ID NO: 28553 - protein, 7 aa, synthetic construct
MSAWEVE

SEQ ID NO: 28554 - protein, 7 aa, synthetic construct
ITQSHLK

SEQ ID NO: 28555 - protein, 7 aa, synthetic construct
HMEGAFE

SEQ ID NO: 28556 - protein, 7 aa, synthetic construct
VIAVGTV

SEQ ID NO: 28557 - protein, 7 aa, synthetic construct
DADNWKV

SEQ ID NO: 28558 - protein, 7 aa, synthetic construct
EGNQTDV

SEQ ID NO: 28559 - protein, 7 aa, synthetic construct
YQYALSS

SEQ ID NO: 28560 - protein, 7 aa, synthetic construct
WMNGGQY

SEQ ID NO: 28561 - protein, 7 aa, synthetic construct
LDRGHDA

SEQ ID NO: 28562 - protein, 7 aa, synthetic construct
HQNTLED

SEQ ID NO: 28563 - protein, 7 aa, synthetic construct
EIIRNNQ

SEQ ID NO: 28564 - protein, 7 aa, synthetic construct
THLHSSK

SEQ ID NO: 28565 - protein, 7 aa, synthetic construct
NNSPNMT

SEQ ID NO: 28566 - protein, 7 aa, synthetic construct
ALLQRPA

SEQ ID NO: 28567 - protein, 7 aa, synthetic construct
SIADGDG

SEQ ID NO: 28568 - protein, 7 aa, synthetic construct
HTGGGPG

SEQ ID NO: 28569 - protein, 7 aa, synthetic construct
DQDVPRQ

SEQ ID NO: 28570 - protein, 7 aa, synthetic construct
IIGTDTM

SEQ ID NO: 28571 - protein, 7 aa, synthetic construct
GKSDMGP

SEQ ID NO: 28572 - protein, 7 aa, synthetic construct
DNRWNDS

SEQ ID NO: 28573 - protein, 7 aa, synthetic construct
MMNTPGI

SEQ ID NO: 28574 - protein, 7 aa, synthetic construct
HWSREAS

SEQ ID NO: 28575 - protein, 7 aa, synthetic construct
RLMKQDQ

SEQ ID NO: 28576 - protein, 7 aa, synthetic construct
DSQTGER

SEQ ID NO: 28577 - protein, 7 aa, synthetic construct
SQDDSPG

SEQ ID NO: 28578 - protein, 7 aa, synthetic construct
IHAIGHQ

SEQ ID NO: 28579 - protein, 7 aa, synthetic construct
ETSRTED

SEQ ID NO: 28580 - protein, 7 aa, synthetic construct
PSKMDRF

SEQ ID NO: 28581 - protein, 7 aa, synthetic construct
HMKQFDI

SEQ ID NO: 28582 - protein, 7 aa, synthetic construct
ASFAHKM

SEQ ID NO: 28583 - protein, 7 aa, synthetic construct
AIAKITP

SEQ ID NO: 28584 - protein, 7 aa, synthetic construct
GIYFANG

SEQ ID NO: 28585 - protein, 7 aa, synthetic construct
HYPTYED

SEQ ID NO: 28586 - protein, 7 aa, synthetic construct
PNHTEYM

SEQ ID NO: 28587 - protein, 7 aa, synthetic construct
TGHEGAV

SEQ ID NO: 28588 - protein, 7 aa, synthetic construct
HDGASVY

SEQ ID NO: 28589 - protein, 7 aa, synthetic construct
GDPYTAE

SEQ ID NO: 28590 - protein, 7 aa, synthetic construct
LDLANQK

SEQ ID NO: 28591 - protein, 7 aa, synthetic construct
VNGMVHE

SEQ ID NO: 28592 - protein, 7 aa, synthetic construct
VGVQVLH

SEQ ID NO: 28593 - protein, 7 aa, synthetic construct
SIKVEHM

SEQ ID NO: 28594 - protein, 7 aa, synthetic construct
SQAMPYV

SEQ ID NO: 28595 - protein, 7 aa, synthetic construct
QRDTPDH

SEQ ID NO: 28596 - protein, 7 aa, synthetic construct
HSAPHFP

SEQ ID NO: 28597 - protein, 7 aa, synthetic construct
EPGMPYK

SEQ ID NO: 28598 - protein, 7 aa, synthetic construct
RVIGLGE

SEQ ID NO: 28599 - protein, 7 aa, synthetic construct
FFENPAK

SEQ ID NO: 28600 - protein, 7 aa, synthetic construct
DLEGNKY

SEQ ID NO: 28601 - protein, 7 aa, synthetic construct
WHEERLS

SEQ ID NO: 28602 - protein, 7 aa, synthetic construct
QETTAVS

SEQ ID NO: 28603 - protein, 7 aa, synthetic construct
RYETPDF

SEQ ID NO: 28604 - protein, 7 aa, synthetic construct
LETVYQN

SEQ ID NO: 28605 - protein, 7 aa, synthetic construct
AMWDKQV

SEQ ID NO: 28606 - protein, 7 aa, synthetic construct
TMISQHK

SEQ ID NO: 28607 - protein, 7 aa, synthetic construct
KMVEQYR

SEQ ID NO: 28608 - protein, 7 aa, synthetic construct
AMDDTPK

SEQ ID NO: 28609 - protein, 7 aa, synthetic construct
TKGGVEY

SEQ ID NO: 28610 - protein, 7 aa, synthetic construct
IIGGHEN

SEQ ID NO: 28611 - protein, 7 aa, synthetic construct
LLPGKDA

SEQ ID NO: 28612 - protein, 7 aa, synthetic construct
WYAEGPV

SEQ ID NO: 28613 - protein, 7 aa, synthetic construct
YPKNDEW

SEQ ID NO: 28614 - protein, 7 aa, synthetic construct
PINGIIS

SEQ ID NO: 28615 - protein, 7 aa, synthetic construct
STAHEDQ

SEQ ID NO: 28616 - protein, 7 aa, synthetic construct
HDNTDAS

SEQ ID NO: 28617 - protein, 7 aa, synthetic construct
EAVDRHE

SEQ ID NO: 28618 - protein, 7 aa, synthetic construct
LRGDEWA

SEQ ID NO: 28619 - protein, 7 aa, synthetic construct
NLVNQAS

SEQ ID NO: 28620 - protein, 7 aa, synthetic construct
PETTMTA

SEQ ID NO: 28621 - protein, 7 aa, synthetic construct
QPDMVIG

SEQ ID NO: 28622 - protein, 7 aa, synthetic construct
TYPGMQR

SEQ ID NO: 28623 - protein, 7 aa, synthetic construct
YRVPGHE

SEQ ID NO: 28624 - protein, 7 aa, synthetic construct
QDVIMKE

SEQ ID NO: 28625 - protein, 7 aa, synthetic construct
ERQDLLK

SEQ ID NO: 28626 - protein, 7 aa, synthetic construct
DQGDRDK

SEQ ID NO: 28627 - protein, 7 aa, synthetic construct
FVHAGSV

SEQ ID NO: 28628 - protein, 7 aa, synthetic construct
EFEQKTN

SEQ ID NO: 28629 - protein, 7 aa, synthetic construct
DFGQTQK

SEQ ID NO: 28630 - protein, 7 aa, synthetic construct
GGIVNPI

SEQ ID NO: 28631 - protein, 7 aa, synthetic construct
GSAMPAI

SEQ ID NO: 28632 - protein, 7 aa, synthetic construct
TVLHKHD

SEQ ID NO: 28633 - protein, 7 aa, synthetic construct
LVQTPDM

SEQ ID NO: 28634 - protein, 7 aa, synthetic construct
VPPEGAD

SEQ ID NO: 28635 - protein, 7 aa, synthetic construct
NEYQDGA

SEQ ID NO: 28636 - protein, 7 aa, synthetic construct
NYHNHQH

SEQ ID NO: 28637 - protein, 7 aa, synthetic construct
NVWSDKT

SEQ ID NO: 28638 - protein, 7 aa, synthetic construct
DHSANFS

SEQ ID NO: 28639 - protein, 7 aa, synthetic construct
FNSGLPL

SEQ ID NO: 28640 - protein, 7 aa, synthetic construct
LAKHEWD

SEQ ID NO: 28641 - protein, 7 aa, synthetic construct
WKSEQEL

SEQ ID NO: 28642 - protein, 7 aa, synthetic construct
KLSVDVR

SEQ ID NO: 28643 - protein, 7 aa, synthetic construct
YNNILTH

SEQ ID NO: 28644 - protein, 7 aa, synthetic construct
DHSGTPD

SEQ ID NO: 28645 - protein, 7 aa, synthetic construct
WQVSPKP

SEQ ID NO: 28646 - protein, 7 aa, synthetic construct
GPTYDHD

SEQ ID NO: 28647 - protein, 7 aa, synthetic construct
LIGDQIM

SEQ ID NO: 28648 - protein, 7 aa, synthetic construct
DLSSYGS

SEQ ID NO: 28649 - protein, 7 aa, synthetic construct
AVMGDNV

SEQ ID NO: 28650 - protein, 7 aa, synthetic construct
GFHLGKP

SEQ ID NO: 28651 - protein, 7 aa, synthetic construct
DDQFAMK

SEQ ID NO: 28652 - protein, 7 aa, synthetic construct
EDPKHNH

SEQ ID NO: 28653 - protein, 7 aa, synthetic construct
AQNNMDK

SEQ ID NO: 28654 - protein, 7 aa, synthetic construct
KLPGVLQ

SEQ ID NO: 28655 - protein, 7 aa, synthetic construct
VRDDGFK

SEQ ID NO: 28656 - protein, 7 aa, synthetic construct
GNIVAHL

SEQ ID NO: 28657 - protein, 7 aa, synthetic construct
IHSIALN

SEQ ID NO: 28658 - protein, 7 aa, synthetic construct
HLSSKDV

SEQ ID NO: 28659 - protein, 7 aa, synthetic construct
KSYQEEA

SEQ ID NO: 28660 - protein, 7 aa, synthetic construct
TSGPAFH

SEQ ID NO: 28661 - protein, 7 aa, synthetic construct
PMNDTQA

SEQ ID NO: 28662 - protein, 7 aa, synthetic construct
LTAENNG

SEQ ID NO: 28663 - protein, 7 aa, synthetic construct
MPYDDEV

SEQ ID NO: 28664 - protein, 7 aa, synthetic construct
KPDRMLT

SEQ ID NO: 28665 - protein, 7 aa, synthetic construct
WDQKMAK

SEQ ID NO: 28666 - protein, 7 aa, synthetic construct
DIKHGHT

SEQ ID NO: 28667 - protein, 7 aa, synthetic construct
RGSKENQ

SEQ ID NO: 28668 - protein, 7 aa, synthetic construct
NVMGPGY

SEQ ID NO: 28669 - protein, 7 aa, synthetic construct
HEGMEKV

SEQ ID NO: 28670 - protein, 7 aa, synthetic construct
DRNLESF

SEQ ID NO: 28671 - protein, 7 aa, synthetic construct
QSFTHNP

SEQ ID NO: 28672 - protein, 7 aa, synthetic construct
YQDDANQ

SEQ ID NO: 28673 - protein, 7 aa, synthetic construct
LQESVGM

SEQ ID NO: 28674 - protein, 7 aa, synthetic construct
KGDPMWH

SEQ ID NO: 28675 - protein, 7 aa, synthetic construct
KNAGIQD

SEQ ID NO: 28676 - protein, 7 aa, synthetic construct
LQSDIRT

SEQ ID NO: 28677 - protein, 7 aa, synthetic construct
IEKQDNV

SEQ ID NO: 28678 - protein, 7 aa, synthetic construct
FRADTNT

SEQ ID NO: 28679 - protein, 7 aa, synthetic construct
IINQTEY

SEQ ID NO: 28680 - protein, 7 aa, synthetic construct
AVKKIWD

SEQ ID NO: 28681 - protein, 7 aa, synthetic construct
HDMGDKP

SEQ ID NO: 28682 - protein, 7 aa, synthetic construct
EPSGVRL

SEQ ID NO: 28683 - protein, 7 aa, synthetic construct
ILHQHED

SEQ ID NO: 28684 - protein, 7 aa, synthetic construct
RPDRVDV

SEQ ID NO: 28685 - protein, 7 aa, synthetic construct
WTPTWPS

SEQ ID NO: 28686 - protein, 7 aa, synthetic construct
KFGFPTE

SEQ ID NO: 28687 - protein, 7 aa, synthetic construct
GLFSTRD

SEQ ID NO: 28688 - protein, 7 aa, synthetic construct
EGQEKHN

SEQ ID NO: 28689 - protein, 7 aa, synthetic construct
YANATVI

SEQ ID NO: 28690 - protein, 7 aa, synthetic construct
MVHTVHP

SEQ ID NO: 28691 - protein, 7 aa, synthetic construct
NPNINNV

SEQ ID NO: 28692 - protein, 7 aa, synthetic construct
EGLQGHL

SEQ ID NO: 28693 - protein, 7 aa, synthetic construct
MTKHSNI

SEQ ID NO: 28694 - protein, 7 aa, synthetic construct
TVLSHEV

SEQ ID NO: 28695 - protein, 7 aa, synthetic construct
YNAATNH

SEQ ID NO: 28696 - protein, 7 aa, synthetic construct
KYPMETA

SEQ ID NO: 28697 - protein, 7 aa, synthetic construct
ESAPNHK

SEQ ID NO: 28698 - protein, 7 aa, synthetic construct
QPTILID

SEQ ID NO: 28699 - protein, 7 aa, synthetic construct
LHQGIDT

SEQ ID NO: 28700 - protein, 7 aa, synthetic construct
YNGAEPD

SEQ ID NO: 28701 - protein, 7 aa, synthetic construct
MQEMPMK

SEQ ID NO: 28702 - protein, 7 aa, synthetic construct
ESMDKAL

SEQ ID NO: 28703 - protein, 7 aa, synthetic construct
HMYSTQI

SEQ ID NO: 28704 - protein, 7 aa, synthetic construct
ATDKEQW

SEQ ID NO: 28705 - protein, 7 aa, synthetic construct
MITDERG

SEQ ID NO: 28706 - protein, 7 aa, synthetic construct
KEPWQAV

SEQ ID NO: 28707 - protein, 7 aa, synthetic construct
ISYAGDE

SEQ ID NO: 28708 - protein, 7 aa, synthetic construct
GFNTTDD

SEQ ID NO: 28709 - protein, 7 aa, synthetic construct
YGVQWAS

SEQ ID NO: 28710 - protein, 7 aa, synthetic construct
QAMEAPR

SEQ ID NO: 28711 - protein, 7 aa, synthetic construct
EPVTVRL

SEQ ID NO: 28712 - protein, 7 aa, synthetic construct
KPIQLAG

SEQ ID NO: 28713 - protein, 7 aa, synthetic construct
IMSAQMA

SEQ ID NO: 28714 - protein, 7 aa, synthetic construct
TPAEHAA

SEQ ID NO: 28715 - protein, 7 aa, synthetic construct
QAIPEYR

SEQ ID NO: 28716 - protein, 7 aa, synthetic construct
TNVEGKH

SEQ ID NO: 28717 - protein, 7 aa, synthetic construct
PYHALEE

SEQ ID NO: 28718 - protein, 7 aa, synthetic construct
HSTFAEE

SEQ ID NO: 28719 - protein, 7 aa, synthetic construct
PEISSIT

SEQ ID NO: 28720 - protein, 7 aa, synthetic construct
THSIRTF

SEQ ID NO: 28721 - protein, 7 aa, synthetic construct
TDPQNIL

SEQ ID NO: 28722 - protein, 7 aa, synthetic construct
GDHVAAF

SEQ ID NO: 28723 - protein, 7 aa, synthetic construct
DDWNAAE

SEQ ID NO: 28724 - protein, 7 aa, synthetic construct
EMTAVYR

SEQ ID NO: 28725 - protein, 7 aa, synthetic construct
ITRMEED

SEQ ID NO: 28726 - protein, 7 aa, synthetic construct
TMKLQPY

SEQ ID NO: 28727 - protein, 7 aa, synthetic construct
YPHIEPD

SEQ ID NO: 28728 - protein, 7 aa, synthetic construct
VPKLNGH

SEQ ID NO: 28729 - protein, 7 aa, synthetic construct
NIGIKWE

SEQ ID NO: 28730 - protein, 7 aa, synthetic construct
KDNTDAS

SEQ ID NO: 28731 - protein, 7 aa, synthetic construct
RDEPKQY

SEQ ID NO: 28732 - protein, 7 aa, synthetic construct
HVSFAQQ

SEQ ID NO: 28733 - protein, 7 aa, synthetic construct
AYSIKGE

SEQ ID NO: 28734 - protein, 7 aa, synthetic construct
GQVYQTH

SEQ ID NO: 28735 - protein, 7 aa, synthetic construct
NDHFMTV

SEQ ID NO: 28736 - protein, 7 aa, synthetic construct
HEAHHPI

SEQ ID NO: 28737 - protein, 7 aa, synthetic construct
YGVMKFN

SEQ ID NO: 28738 - protein, 7 aa, synthetic construct
SDKPEWH

SEQ ID NO: 28739 - protein, 7 aa, synthetic construct
YRDWVKQ

SEQ ID NO: 28740 - protein, 7 aa, synthetic construct
IAYDNSD

SEQ ID NO: 28741 - protein, 7 aa, synthetic construct
FEQMENG

SEQ ID NO: 28742 - protein, 7 aa, synthetic construct
WSVTKQA

SEQ ID NO: 28743 - protein, 7 aa, synthetic construct
HPASHVG

SEQ ID NO: 28744 - protein, 7 aa, synthetic construct
LEKTQWV

SEQ ID NO: 28745 - protein, 7 aa, synthetic construct
SIKSWDV

SEQ ID NO: 28746 - protein, 7 aa, synthetic construct
YENKMHD

SEQ ID NO: 28747 - protein, 7 aa, synthetic construct
ANMHATS

SEQ ID NO: 28748 - protein, 7 aa, synthetic construct
IAGTYKQ

SEQ ID NO: 28749 - protein, 7 aa, synthetic construct
FSNAADH

SEQ ID NO: 28750 - protein, 7 aa, synthetic construct
PNSAQWE

SEQ ID NO: 28751 - protein, 7 aa, synthetic construct
RPQLVAY

SEQ ID NO: 28752 - protein, 7 aa, synthetic construct
PQSSEIT

SEQ ID NO: 28753 - protein, 7 aa, synthetic construct
TLNRRAD

SEQ ID NO: 28754 - protein, 7 aa, synthetic construct
QWNTATG

SEQ ID NO: 28755 - protein, 7 aa, synthetic construct
MTPNRTW

SEQ ID NO: 28756 - protein, 7 aa, synthetic construct
WKSTPMH

SEQ ID NO: 28757 - protein, 7 aa, synthetic construct
EISIKDW

SEQ ID NO: 28758 - protein, 7 aa, synthetic construct
WPDRQKS

SEQ ID NO: 28759 - protein, 7 aa, synthetic construct
SDVPHNM

SEQ ID NO: 28760 - protein, 7 aa, synthetic construct
EQRMEEI

SEQ ID NO: 28761 - protein, 7 aa, synthetic construct
DLTLGRL

SEQ ID NO: 28762 - protein, 7 aa, synthetic construct
MVDDNTM

SEQ ID NO: 28763 - protein, 7 aa, synthetic construct
QYETKAH

SEQ ID NO: 28764 - protein, 7 aa, synthetic construct
HRSAEVW

SEQ ID NO: 28765 - protein, 7 aa, synthetic construct
NFEAHRL

SEQ ID NO: 28766 - protein, 7 aa, synthetic construct
ISPPHHS

SEQ ID NO: 28767 - protein, 7 aa, synthetic construct
MLGIYGP

SEQ ID NO: 28768 - protein, 7 aa, synthetic construct
FHEDRNK

SEQ ID NO: 28769 - protein, 7 aa, synthetic construct
LAHMLTN

SEQ ID NO: 28770 - protein, 7 aa, synthetic construct
VEMNINP

SEQ ID NO: 28771 - protein, 7 aa, synthetic construct
SDNGQIG

SEQ ID NO: 28772 - protein, 7 aa, synthetic construct
EILGNTA

SEQ ID NO: 28773 - protein, 7 aa, synthetic construct
WGMVHTT

SEQ ID NO: 28774 - protein, 7 aa, synthetic construct
IKDVPKP

SEQ ID NO: 28775 - protein, 7 aa, synthetic construct
AKGFDLI

SEQ ID NO: 28776 - protein, 7 aa, synthetic construct
QGTVWDK

SEQ ID NO: 28777 - protein, 7 aa, synthetic construct
YDDQTGH

SEQ ID NO: 28778 - protein, 7 aa, synthetic construct
KSKTPAE

SEQ ID NO: 28779 - protein, 7 aa, synthetic construct
LPTIGEA

SEQ ID NO: 28780 - protein, 7 aa, synthetic construct
GSALKHT

SEQ ID NO: 28781 - protein, 7 aa, synthetic construct
CKAKVCD

SEQ ID NO: 28782 - protein, 7 aa, synthetic construct
VEDTHRH

SEQ ID NO: 28783 - protein, 7 aa, synthetic construct
HALYMVD

SEQ ID NO: 28784 - protein, 7 aa, synthetic construct
DYNPSTE

SEQ ID NO: 28785 - protein, 7 aa, synthetic construct
NFSMAEA

SEQ ID NO: 28786 - protein, 7 aa, synthetic construct
AKDQIVL

SEQ ID NO: 28787 - protein, 7 aa, synthetic construct
AELNTHV

SEQ ID NO: 28788 - protein, 7 aa, synthetic construct
YLDYKHH

SEQ ID NO: 28789 - protein, 7 aa, synthetic construct
FDHHNRE

SEQ ID NO: 28790 - protein, 7 aa, synthetic construct
QQEQKFE

SEQ ID NO: 28791 - protein, 7 aa, synthetic construct
LSDRKHD

SEQ ID NO: 28792 - protein, 7 aa, synthetic construct
IGYVEVV

SEQ ID NO: 28793 - protein, 7 aa, synthetic construct
FYGNGGF

SEQ ID NO: 28794 - protein, 7 aa, synthetic construct
INPILGK

SEQ ID NO: 28795 - protein, 7 aa, synthetic construct
ELKHPQG

SEQ ID NO: 28796 - protein, 7 aa, synthetic construct
GDHDLHV

SEQ ID NO: 28797 - protein, 7 aa, synthetic construct
VSEAKHV

SEQ ID NO: 28798 - protein, 7 aa, synthetic construct
ETEFPVR

SEQ ID NO: 28799 - protein, 7 aa, synthetic construct
GTPPWMA

SEQ ID NO: 28800 - protein, 7 aa, synthetic construct
GWQNDRH

SEQ ID NO: 28801 - protein, 7 aa, synthetic construct
TDDGRKP

SEQ ID NO: 28802 - protein, 7 aa, synthetic construct
DPPRDER

SEQ ID NO: 28803 - protein, 7 aa, synthetic construct
SDTGHIF

SEQ ID NO: 28804 - protein, 7 aa, synthetic construct
AIIGMQD

SEQ ID NO: 28805 - protein, 7 aa, synthetic construct
HLSASIH

SEQ ID NO: 28806 - protein, 7 aa, synthetic construct
TNSQVNT

SEQ ID NO: 28807 - protein, 7 aa, synthetic construct
PVSADKD

SEQ ID NO: 28808 - protein, 7 aa, synthetic construct
ANGTWER

SEQ ID NO: 28809 - protein, 7 aa, synthetic construct
IMSHKHI

SEQ ID NO: 28810 - protein, 7 aa, synthetic construct
HDMGVMA

SEQ ID NO: 28811 - protein, 7 aa, synthetic construct
RSFRNDA

SEQ ID NO: 28812 - protein, 7 aa, synthetic construct
WKERMEH

SEQ ID NO: 28813 - protein, 7 aa, synthetic construct
EGKMVGE

SEQ ID NO: 28814 - protein, 7 aa, synthetic construct
RLELDMI

SEQ ID NO: 28815 - protein, 7 aa, synthetic construct
SHSAQSQ

SEQ ID NO: 28816 - protein, 7 aa, synthetic construct
DLATQHD

SEQ ID NO: 28817 - protein, 7 aa, synthetic construct
YRDGWVA

SEQ ID NO: 28818 - protein, 7 aa, synthetic construct
LPWDQDG

SEQ ID NO: 28819 - protein, 7 aa, synthetic construct
YDEMEHK

SEQ ID NO: 28820 - protein, 7 aa, synthetic construct
HQPVPNI

SEQ ID NO: 28821 - protein, 7 aa, synthetic construct
AYGSMFE

SEQ ID NO: 28822 - protein, 7 aa, synthetic construct
HIPQIGR

SEQ ID NO: 28823 - protein, 7 aa, synthetic construct
EGGYHMS

SEQ ID NO: 28824 - protein, 7 aa, synthetic construct
YSVKPVD

SEQ ID NO: 28825 - protein, 7 aa, synthetic construct
MNLIAAD

SEQ ID NO: 28826 - protein, 7 aa, synthetic construct
MDRPLDL

SEQ ID NO: 28827 - protein, 7 aa, synthetic construct
WTNPQPL

SEQ ID NO: 28828 - protein, 7 aa, synthetic construct
NMVVPYE

SEQ ID NO: 28829 - protein, 7 aa, synthetic construct
HTVVNSE

SEQ ID NO: 28830 - protein, 7 aa, synthetic construct
DHADEAI

SEQ ID NO: 28831 - protein, 7 aa, synthetic construct
IKAQEQH

SEQ ID NO: 28832 - protein, 7 aa, synthetic construct
VTESYRY

SEQ ID NO: 28833 - protein, 7 aa, synthetic construct
IKEYNDS

SEQ ID NO: 28834 - protein, 7 aa, synthetic construct
DRRNGPV

SEQ ID NO: 28835 - protein, 7 aa, synthetic construct
KTNPEND

SEQ ID NO: 28836 - protein, 7 aa, synthetic construct
VSDRNMM

SEQ ID NO: 28837 - protein, 7 aa, synthetic construct
RESRDDS

SEQ ID NO: 28838 - protein, 7 aa, synthetic construct
DYGTGKP

SEQ ID NO: 28839 - protein, 7 aa, synthetic construct
AEAVART

SEQ ID NO: 28840 - protein, 7 aa, synthetic construct
DNERFAN

SEQ ID NO: 28841 - protein, 7 aa, synthetic construct
NPEHVPN

SEQ ID NO: 28842 - protein, 7 aa, synthetic construct
RMADMPI

SEQ ID NO: 28843 - protein, 7 aa, synthetic construct
EIAPYKQ

SEQ ID NO: 28844 - protein, 7 aa, synthetic construct
HGEMNYS

SEQ ID NO: 28845 - protein, 7 aa, synthetic construct
WQKDIIM

SEQ ID NO: 28846 - protein, 7 aa, synthetic construct
AGLERHE

SEQ ID NO: 28847 - protein, 7 aa, synthetic construct
QAILHPA

SEQ ID NO: 28848 - protein, 7 aa, synthetic construct
RGDVGKE

SEQ ID NO: 28849 - protein, 7 aa, synthetic construct
LTVTTKT

SEQ ID NO: 28850 - protein, 7 aa, synthetic construct
IDEWNIA

SEQ ID NO: 28851 - protein, 7 aa, synthetic construct
GMDMSQP

SEQ ID NO: 28852 - protein, 7 aa, synthetic construct
RAEQMHM

SEQ ID NO: 28853 - protein, 7 aa, synthetic construct
VTPDPVV

SEQ ID NO: 28854 - protein, 7 aa, synthetic construct
YHFVSDP

SEQ ID NO: 28855 - protein, 7 aa, synthetic construct
NEHRIIS

SEQ ID NO: 28856 - protein, 7 aa, synthetic construct
FRIESMT

SEQ ID NO: 28857 - protein, 7 aa, synthetic construct
GNTSYKL

SEQ ID NO: 28858 - protein, 7 aa, synthetic construct
EDHHTPG

SEQ ID NO: 28859 - protein, 7 aa, synthetic construct
GTGHSNM

SEQ ID NO: 28860 - protein, 7 aa, synthetic construct
PPTIMQH

SEQ ID NO: 28861 - protein, 7 aa, synthetic construct
REPAFSY

SEQ ID NO: 28862 - protein, 7 aa, synthetic construct
GLRQIVN

SEQ ID NO: 28863 - protein, 7 aa, synthetic construct
FPFMDQA

SEQ ID NO: 28864 - protein, 7 aa, synthetic construct
IPHQAYT

SEQ ID NO: 28865 - protein, 7 aa, synthetic construct
DSDRRDN

SEQ ID NO: 28866 - protein, 7 aa, synthetic construct
VLSAKEK

SEQ ID NO: 28867 - protein, 7 aa, synthetic construct
QPLSMMA

SEQ ID NO: 28868 - protein, 7 aa, synthetic construct
DPHKTAK

SEQ ID NO: 28869 - protein, 7 aa, synthetic construct
LGHNHNF

SEQ ID NO: 28870 - protein, 7 aa, synthetic construct
QKMMSQI

SEQ ID NO: 28871 - protein, 7 aa, synthetic construct
IMNVDRI

SEQ ID NO: 28872 - protein, 7 aa, synthetic construct
KQHLTDR

SEQ ID NO: 28873 - protein, 7 aa, synthetic construct
REFHSEE

SEQ ID NO: 28874 - protein, 7 aa, synthetic construct
YLNLMKG

SEQ ID NO: 28875 - protein, 7 aa, synthetic construct
IVQDQMM

SEQ ID NO: 28876 - protein, 7 aa, synthetic construct
GDWPDGH

SEQ ID NO: 28877 - protein, 7 aa, synthetic construct
SVSDSAH

SEQ ID NO: 28878 - protein, 7 aa, synthetic construct
NQGEKVM

SEQ ID NO: 28879 - protein, 7 aa, synthetic construct
EQDRSVD

SEQ ID NO: 28880 - protein, 7 aa, synthetic construct
HRNPGFP

SEQ ID NO: 28881 - protein, 7 aa, synthetic construct
SSSQIEG

SEQ ID NO: 28882 - protein, 7 aa, synthetic construct
SNRNNHF

SEQ ID NO: 28883 - protein, 7 aa, synthetic construct
MEDYIKH

SEQ ID NO: 28884 - protein, 7 aa, synthetic construct
PYKNYDD

SEQ ID NO: 28885 - protein, 7 aa, synthetic construct
GNVSMAL

SEQ ID NO: 28886 - protein, 7 aa, synthetic construct
YGDTTTT

SEQ ID NO: 28887 - protein, 7 aa, synthetic construct
IGQQVNE

SEQ ID NO: 28888 - protein, 7 aa, synthetic construct
AGPQTKE

SEQ ID NO: 28889 - protein, 7 aa, synthetic construct
LQEKRLI

SEQ ID NO: 28890 - protein, 7 aa, synthetic construct
IENNKDK

SEQ ID NO: 28891 - protein, 7 aa, synthetic construct
YMPADIP

SEQ ID NO: 28892 - protein, 7 aa, synthetic construct
DNHPTNS

SEQ ID NO: 28893 - protein, 7 aa, synthetic construct
PHVPDDV

SEQ ID NO: 28894 - protein, 7 aa, synthetic construct
IAPSMPH

SEQ ID NO: 28895 - protein, 7 aa, synthetic construct
WGGEHMM

SEQ ID NO: 28896 - protein, 7 aa, synthetic construct
QPTEYDM

SEQ ID NO: 28897 - protein, 7 aa, synthetic construct
LTSILSD

SEQ ID NO: 28898 - protein, 7 aa, synthetic construct
INHDRQQ

SEQ ID NO: 28899 - protein, 7 aa, synthetic construct
NAHSQNA

SEQ ID NO: 28900 - protein, 7 aa, synthetic construct
LVAGQEQ

SEQ ID NO: 28901 - protein, 7 aa, synthetic construct
DVWNEHT

SEQ ID NO: 28902 - protein, 7 aa, synthetic construct
GQTNAFI

SEQ ID NO: 28903 - protein, 7 aa, synthetic construct
PTEAIPH

SEQ ID NO: 28904 - protein, 7 aa, synthetic construct
HEQKYMQ

SEQ ID NO: 28905 - protein, 7 aa, synthetic construct
EPDSMPR

SEQ ID NO: 28906 - protein, 7 aa, synthetic construct
NHKTKND

SEQ ID NO: 28907 - protein, 7 aa, synthetic construct
AMLPRVG

SEQ ID NO: 28908 - protein, 7 aa, synthetic construct
PTVPQEV

SEQ ID NO: 28909 - protein, 7 aa, synthetic construct
MNAHWSP

SEQ ID NO: 28910 - protein, 7 aa, synthetic construct
DIRWPDA

SEQ ID NO: 28911 - protein, 7 aa, synthetic construct
DDAPIKL

SEQ ID NO: 28912 - protein, 7 aa, synthetic construct
NEQSKGQ

SEQ ID NO: 28913 - protein, 7 aa, synthetic construct
YASLVGH

SEQ ID NO: 28914 - protein, 7 aa, synthetic construct
MQDFLES

SEQ ID NO: 28915 - protein, 7 aa, synthetic construct
NNVSNLI

SEQ ID NO: 28916 - protein, 7 aa, synthetic construct
QHPSENF

SEQ ID NO: 28917 - protein, 7 aa, synthetic construct
EIREVGS

SEQ ID NO: 28918 - protein, 7 aa, synthetic construct
GPVHRNY

SEQ ID NO: 28919 - protein, 7 aa, synthetic construct
RHFTNTA

SEQ ID NO: 28920 - protein, 7 aa, synthetic construct
RKEQFGH

SEQ ID NO: 28921 - protein, 7 aa, synthetic construct
GHESHEV

SEQ ID NO: 28922 - protein, 7 aa, synthetic construct
HKISSWD

SEQ ID NO: 28923 - protein, 7 aa, synthetic construct
GWSNYPA

SEQ ID NO: 28924 - protein, 7 aa, synthetic construct
PPYPVTA

SEQ ID NO: 28925 - protein, 7 aa, synthetic construct
WPNKLDF

SEQ ID NO: 28926 - protein, 7 aa, synthetic construct
KWDKHAM

SEQ ID NO: 28927 - protein, 7 aa, synthetic construct
TNEFHQI

SEQ ID NO: 28928 - protein, 7 aa, synthetic construct
FFAGKPM

SEQ ID NO: 28929 - protein, 7 aa, synthetic construct
DIVFGVA

SEQ ID NO: 28930 - protein, 7 aa, synthetic construct
EPEQTRY

SEQ ID NO: 28931 - protein, 7 aa, synthetic construct
TLRNHSF

SEQ ID NO: 28932 - protein, 7 aa, synthetic construct
QTNLYGE

SEQ ID NO: 28933 - protein, 7 aa, synthetic construct
GGKVPVG

SEQ ID NO: 28934 - protein, 7 aa, synthetic construct
EQFKDQH

SEQ ID NO: 28935 - protein, 7 aa, synthetic construct
LLQEKAM

SEQ ID NO: 28936 - protein, 7 aa, synthetic construct
MWDREEP

SEQ ID NO: 28937 - protein, 7 aa, synthetic construct
KVPLIYE

SEQ ID NO: 28938 - protein, 7 aa, synthetic construct
EGSTHNE

SEQ ID NO: 28939 - protein, 7 aa, synthetic construct
SIPSPKF

SEQ ID NO: 28940 - protein, 7 aa, synthetic construct
SGFDHNE

SEQ ID NO: 28941 - protein, 7 aa, synthetic construct
SLGQEAH

SEQ ID NO: 28942 - protein, 7 aa, synthetic construct
QTHYTTI

SEQ ID NO: 28943 - protein, 7 aa, synthetic construct
VDSKGND

SEQ ID NO: 28944 - protein, 7 aa, synthetic construct
QDHVDND

SEQ ID NO: 28945 - protein, 7 aa, synthetic construct
MLIGGTV

SEQ ID NO: 28946 - protein, 7 aa, synthetic construct
TQTMSTI

SEQ ID NO: 28947 - protein, 7 aa, synthetic construct
EPNEMYT

SEQ ID NO: 28948 - protein, 7 aa, synthetic construct
FETKEFK

SEQ ID NO: 28949 - protein, 7 aa, synthetic construct
SQRIEMH

SEQ ID NO: 28950 - protein, 7 aa, synthetic construct
REELWKD

SEQ ID NO: 28951 - protein, 7 aa, synthetic construct
NDPNAAH

SEQ ID NO: 28952 - protein, 7 aa, synthetic construct
NTPWKQD

SEQ ID NO: 28953 - protein, 7 aa, synthetic construct
NSTKVGC

SEQ ID NO: 28954 - protein, 7 aa, synthetic construct
TAPSMMP

SEQ ID NO: 28955 - protein, 7 aa, synthetic construct
REEFGPP

SEQ ID NO: 28956 - protein, 7 aa, synthetic construct
YLRHDEV

SEQ ID NO: 28957 - protein, 7 aa, synthetic construct
KTDLEIP

SEQ ID NO: 28958 - protein, 7 aa, synthetic construct
TTNKFDW

SEQ ID NO: 28959 - protein, 7 aa, synthetic construct
SPLQNIH

SEQ ID NO: 28960 - protein, 7 aa, synthetic construct
KPLDEQW

SEQ ID NO: 28961 - protein, 7 aa, synthetic construct
LTLVQDS

SEQ ID NO: 28962 - protein, 7 aa, synthetic construct
NLPVRDQ

SEQ ID NO: 28963 - protein, 7 aa, synthetic construct
AFGDPLL

SEQ ID NO: 28964 - protein, 7 aa, synthetic construct
KHKETVH

SEQ ID NO: 28965 - protein, 7 aa, synthetic construct
HRDRVWD

SEQ ID NO: 28966 - protein, 7 aa, synthetic construct
GPSHDEA

SEQ ID NO: 28967 - protein, 7 aa, synthetic construct
RAEEMVT

SEQ ID NO: 28968 - protein, 7 aa, synthetic construct
HGYSYAD

SEQ ID NO: 28969 - protein, 7 aa, synthetic construct
CPSQMCP

SEQ ID NO: 28970 - protein, 7 aa, synthetic construct
AWADQRD

SEQ ID NO: 28971 - protein, 7 aa, synthetic construct
ISVNMAY

SEQ ID NO: 28972 - protein, 7 aa, synthetic construct
DETREKN

SEQ ID NO: 28973 - protein, 7 aa, synthetic construct
SSHPDKR

SEQ ID NO: 28974 - protein, 7 aa, synthetic construct
SPMNQDE

SEQ ID NO: 28975 - protein, 7 aa, synthetic construct
NKAWEEL

SEQ ID NO: 28976 - protein, 7 aa, synthetic construct
SGVMSGS

SEQ ID NO: 28977 - protein, 7 aa, synthetic construct
MKEVPPE

SEQ ID NO: 28978 - protein, 7 aa, synthetic construct
MDFKQMT

SEQ ID NO: 28979 - protein, 7 aa, synthetic construct
NVKHVFT

SEQ ID NO: 28980 - protein, 7 aa, synthetic construct
HFRIANG

SEQ ID NO: 28981 - protein, 7 aa, synthetic construct
VDHPEPQ

SEQ ID NO: 28982 - protein, 7 aa, synthetic construct
ESERTQD

SEQ ID NO: 28983 - protein, 7 aa, synthetic construct
WEGSGFD

SEQ ID NO: 28984 - protein, 7 aa, synthetic construct
GFLAPES

SEQ ID NO: 28985 - protein, 7 aa, synthetic construct
HPQVDPI

SEQ ID NO: 28986 - protein, 7 aa, synthetic construct
LTMQTPL

SEQ ID NO: 28987 - protein, 7 aa, synthetic construct
LPKAYLS

SEQ ID NO: 28988 - protein, 7 aa, synthetic construct
ISMIKEM

SEQ ID NO: 28989 - protein, 7 aa, synthetic construct
APTEIRK

SEQ ID NO: 28990 - protein, 7 aa, synthetic construct
IWKLTHE

SEQ ID NO: 28991 - protein, 7 aa, synthetic construct
VEGSTTH

SEQ ID NO: 28992 - protein, 7 aa, synthetic construct
AAQVVQM

SEQ ID NO: 28993 - protein, 7 aa, synthetic construct
WIDKIKH

SEQ ID NO: 28994 - protein, 7 aa, synthetic construct
KMEPQLH

SEQ ID NO: 28995 - protein, 7 aa, synthetic construct
DEVVVYP

SEQ ID NO: 28996 - protein, 7 aa, synthetic construct
PDHWSKN

SEQ ID NO: 28997 - protein, 7 aa, synthetic construct
NLDPQHT

SEQ ID NO: 28998 - protein, 7 aa, synthetic construct
AVAHSYI

SEQ ID NO: 28999 - protein, 7 aa, synthetic construct
DERQFYH

SEQ ID NO: 29000 - protein, 7 aa, synthetic construct
HTEIKLF

SEQ ID NO: 29001 - protein, 7 aa, synthetic construct
YTQNDDV

SEQ ID NO: 29002 - protein, 7 aa, synthetic construct
SYAASLK

SEQ ID NO: 29003 - protein, 7 aa, synthetic construct
VNNEHNR

SEQ ID NO: 29004 - protein, 7 aa, synthetic construct
SAAIGVL

SEQ ID NO: 29005 - protein, 7 aa, synthetic construct
ISHMSHS

SEQ ID NO: 29006 - protein, 7 aa, synthetic construct
FVMASDK

SEQ ID NO: 29007 - protein, 7 aa, synthetic construct
VQMEGKK

SEQ ID NO: 29008 - protein, 7 aa, synthetic construct
LVSPPPK

SEQ ID NO: 29009 - protein, 7 aa, synthetic construct
HEAGEVN

SEQ ID NO: 29010 - protein, 7 aa, synthetic construct
SITTVMP

SEQ ID NO: 29011 - protein, 7 aa, synthetic construct
EGEFKMH

SEQ ID NO: 29012 - protein, 7 aa, synthetic construct
QAVRPQV

SEQ ID NO: 29013 - protein, 7 aa, synthetic construct
PNTEVKR

SEQ ID NO: 29014 - protein, 7 aa, synthetic construct
WQQNLAR

SEQ ID NO: 29015 - protein, 7 aa, synthetic construct
VENWMND

SEQ ID NO: 29016 - protein, 7 aa, synthetic construct
FIDKHNT

SEQ ID NO: 29017 - protein, 7 aa, synthetic construct
AKWTEQQ

SEQ ID NO: 29018 - protein, 7 aa, synthetic construct
HYDEDMI

SEQ ID NO: 29019 - protein, 7 aa, synthetic construct
GEGTLPV

SEQ ID NO: 29020 - protein, 7 aa, synthetic construct
HVAQNIK

SEQ ID NO: 29021 - protein, 7 aa, synthetic construct
SSKMHSY

SEQ ID NO: 29022 - protein, 7 aa, synthetic construct
YTAEIAV

SEQ ID NO: 29023 - protein, 7 aa, synthetic construct
GTFGQGQ

SEQ ID NO: 29024 - protein, 7 aa, synthetic construct
AANMQFT

SEQ ID NO: 29025 - protein, 7 aa, synthetic construct
ATPIYTE

SEQ ID NO: 29026 - protein, 7 aa, synthetic construct
HHRDRPT

SEQ ID NO: 29027 - protein, 7 aa, synthetic construct
IMSPPQR

SEQ ID NO: 29028 - protein, 7 aa, synthetic construct
TPFNYPE

SEQ ID NO: 29029 - protein, 7 aa, synthetic construct
SYSSIHA

SEQ ID NO: 29030 - protein, 7 aa, synthetic construct
QINPADL

SEQ ID NO: 29031 - protein, 7 aa, synthetic construct
ETRLEPT

SEQ ID NO: 29032 - protein, 7 aa, synthetic construct
YMDLKDY

SEQ ID NO: 29033 - protein, 7 aa, synthetic construct
INAQMYS

SEQ ID NO: 29034 - protein, 7 aa, synthetic construct
VSQGMML

SEQ ID NO: 29035 - protein, 7 aa, synthetic construct
PDEKQNG

SEQ ID NO: 29036 - protein, 7 aa, synthetic construct
YMLGWDE

SEQ ID NO: 29037 - protein, 7 aa, synthetic construct
DNVIGAY

SEQ ID NO: 29038 - protein, 7 aa, synthetic construct
TAPQHYQ

SEQ ID NO: 29039 - protein, 7 aa, synthetic construct
HGPIMHV

SEQ ID NO: 29040 - protein, 7 aa, synthetic construct
PKGVLKL

SEQ ID NO: 29041 - protein, 7 aa, synthetic construct
GKMYAST

SEQ ID NO: 29042 - protein, 7 aa, synthetic construct
SQSTSLM

SEQ ID NO: 29043 - protein, 7 aa, synthetic construct
KMVVEAK

SEQ ID NO: 29044 - protein, 7 aa, synthetic construct
YFGEDID

SEQ ID NO: 29045 - protein, 7 aa, synthetic construct
QNLAHAK

SEQ ID NO: 29046 - protein, 7 aa, synthetic construct
SDALNAS

SEQ ID NO: 29047 - protein, 7 aa, synthetic construct
AIYPASM

SEQ ID NO: 29048 - protein, 7 aa, synthetic construct
AAYDSSR

SEQ ID NO: 29049 - protein, 7 aa, synthetic construct
IQTGDHY

SEQ ID NO: 29050 - protein, 7 aa, synthetic construct
NIQHGHY

SEQ ID NO: 29051 - protein, 7 aa, synthetic construct
IMNAQHK

SEQ ID NO: 29052 - protein, 7 aa, synthetic construct
RGGDIYS

SEQ ID NO: 29053 - protein, 7 aa, synthetic construct
DNVRPLE

SEQ ID NO: 29054 - protein, 7 aa, synthetic construct
ELQGIAI

SEQ ID NO: 29055 - protein, 7 aa, synthetic construct
VRITTVD

SEQ ID NO: 29056 - protein, 7 aa, synthetic construct
YHMHRPA

SEQ ID NO: 29057 - protein, 7 aa, synthetic construct
HVNEFAL

SEQ ID NO: 29058 - protein, 7 aa, synthetic construct
LMSAAGL

SEQ ID NO: 29059 - protein, 7 aa, synthetic construct
DLLKQQI

SEQ ID NO: 29060 - protein, 7 aa, synthetic construct
ELELRNQ

SEQ ID NO: 29061 - protein, 7 aa, synthetic construct
LDPVKNW

SEQ ID NO: 29062 - protein, 7 aa, synthetic construct
EASTGNG

SEQ ID NO: 29063 - protein, 7 aa, synthetic construct
SGDNALQ

SEQ ID NO: 29064 - protein, 7 aa, synthetic construct
ETLKPPY

SEQ ID NO: 29065 - protein, 7 aa, synthetic construct
WKKFSVD

SEQ ID NO: 29066 - protein, 7 aa, synthetic construct
ALPTTVL

SEQ ID NO: 29067 - protein, 7 aa, synthetic construct
PRMVNQK

SEQ ID NO: 29068 - protein, 7 aa, synthetic construct
AIHAKSQ

SEQ ID NO: 29069 - protein, 7 aa, synthetic construct
GQVKMYE

SEQ ID NO: 29070 - protein, 7 aa, synthetic construct
WPGQQPF

SEQ ID NO: 29071 - protein, 7 aa, synthetic construct
FIHTIRD

SEQ ID NO: 29072 - protein, 7 aa, synthetic construct
ESMGPMA

SEQ ID NO: 29073 - protein, 7 aa, synthetic construct
VFQTTDI

SEQ ID NO: 29074 - protein, 7 aa, synthetic construct
FMQQTSV

SEQ ID NO: 29075 - protein, 7 aa, synthetic construct
IYEHGII

SEQ ID NO: 29076 - protein, 7 aa, synthetic construct
TLQPMGA

SEQ ID NO: 29077 - protein, 7 aa, synthetic construct
TIMSASG

SEQ ID NO: 29078 - protein, 7 aa, synthetic construct
SSGLYQE

SEQ ID NO: 29079 - protein, 7 aa, synthetic construct
RTVLKDQ

SEQ ID NO: 29080 - protein, 7 aa, synthetic construct
LNLVTAQ

SEQ ID NO: 29081 - protein, 7 aa, synthetic construct
PTGVEYY

SEQ ID NO: 29082 - protein, 7 aa, synthetic construct
RGAGTGL

SEQ ID NO: 29083 - protein, 7 aa, synthetic construct
DHEYKQY

SEQ ID NO: 29084 - protein, 7 aa, synthetic construct
YKMLAQE

SEQ ID NO: 29085 - protein, 7 aa, synthetic construct
WMGISPG

SEQ ID NO: 29086 - protein, 7 aa, synthetic construct
VNNQIVP

SEQ ID NO: 29087 - protein, 7 aa, synthetic construct
GNTFQTQ

SEQ ID NO: 29088 - protein, 7 aa, synthetic construct
GMWESEF

SEQ ID NO: 29089 - protein, 7 aa, synthetic construct
KVEHSHV

SEQ ID NO: 29090 - protein, 7 aa, synthetic construct
VPPPPDW

SEQ ID NO: 29091 - protein, 7 aa, synthetic construct
WRSSVPY

SEQ ID NO: 29092 - protein, 7 aa, synthetic construct
WMNDEGG

SEQ ID NO: 29093 - protein, 7 aa, synthetic construct
LPSPDSF

SEQ ID NO: 29094 - protein, 7 aa, synthetic construct
FTPGGMI

SEQ ID NO: 29095 - protein, 7 aa, synthetic construct
GIGMTMM

SEQ ID NO: 29096 - protein, 7 aa, synthetic construct
SMTAQSI

SEQ ID NO: 29097 - protein, 7 aa, synthetic construct
MEIHPGH

SEQ ID NO: 29098 - protein, 7 aa, synthetic construct
FDFEQSR

SEQ ID NO: 29099 - protein, 7 aa, synthetic construct
MGDFMGG

SEQ ID NO: 29100 - protein, 7 aa, synthetic construct
TEQISFR

SEQ ID NO: 29101 - protein, 7 aa, synthetic construct
VIPLKMS

SEQ ID NO: 29102 - protein, 7 aa, synthetic construct
YQKNYVH

SEQ ID NO: 29103 - protein, 7 aa, synthetic construct
RSQEWTY

SEQ ID NO: 29104 - protein, 7 aa, synthetic construct
METGYLE

SEQ ID NO: 29105 - protein, 7 aa, synthetic construct
MHSKMNH

SEQ ID NO: 29106 - protein, 7 aa, synthetic construct
DWPPTTA

SEQ ID NO: 29107 - protein, 7 aa, synthetic construct
ITVAATI

SEQ ID NO: 29108 - protein, 7 aa, synthetic construct
KDFQKTC

SEQ ID NO: 29109 - protein, 7 aa, synthetic construct
NRLRVSE

SEQ ID NO: 29110 - protein, 7 aa, synthetic construct
THALTGV

SEQ ID NO: 29111 - protein, 7 aa, synthetic construct
LPAEIAA

SEQ ID NO: 29112 - protein, 7 aa, synthetic construct
DHSTRYV

SEQ ID NO: 29113 - protein, 7 aa, synthetic construct
NFLPSDD

SEQ ID NO: 29114 - protein, 7 aa, synthetic construct
SYVQDEL

SEQ ID NO: 29115 - protein, 7 aa, synthetic construct
ITMNEQK

SEQ ID NO: 29116 - protein, 7 aa, synthetic construct
AQPHLYD

SEQ ID NO: 29117 - protein, 7 aa, synthetic construct
HADTIAS

SEQ ID NO: 29118 - protein, 7 aa, synthetic construct
LPAFQHT

SEQ ID NO: 29119 - protein, 7 aa, synthetic construct
QGNIQAM

SEQ ID NO: 29120 - protein, 7 aa, synthetic construct
NLGTDAT

SEQ ID NO: 29121 - protein, 7 aa, synthetic construct
KEHHPSE

SEQ ID NO: 29122 - protein, 7 aa, synthetic construct
QERSIAK

SEQ ID NO: 29123 - protein, 7 aa, synthetic construct
EGPVHNT

SEQ ID NO: 29124 - protein, 7 aa, synthetic construct
SFQSREL

SEQ ID NO: 29125 - protein, 7 aa, synthetic construct
MMDKYKQ

SEQ ID NO: 29126 - protein, 7 aa, synthetic construct
EKEHTSW

SEQ ID NO: 29127 - protein, 7 aa, synthetic construct
RADSQEE

SEQ ID NO: 29128 - protein, 7 aa, synthetic construct
AMAMFPP

SEQ ID NO: 29129 - protein, 7 aa, synthetic construct
LPNHDRL

SEQ ID NO: 29130 - protein, 7 aa, synthetic construct
LQNQQHW

SEQ ID NO: 29131 - protein, 7 aa, synthetic construct
QDAARIF

SEQ ID NO: 29132 - protein, 7 aa, synthetic construct
NSGDHFL

SEQ ID NO: 29133 - protein, 7 aa, synthetic construct
SDVKIVQ

SEQ ID NO: 29134 - protein, 7 aa, synthetic construct
ISPDGHL

SEQ ID NO: 29135 - protein, 7 aa, synthetic construct
QFEFERV

SEQ ID NO: 29136 - protein, 7 aa, synthetic construct
VPAHEFS

SEQ ID NO: 29137 - protein, 7 aa, synthetic construct
GFDAESR

SEQ ID NO: 29138 - protein, 7 aa, synthetic construct
AFDVKDS

SEQ ID NO: 29139 - protein, 7 aa, synthetic construct
AEYLEQI

SEQ ID NO: 29140 - protein, 7 aa, synthetic construct
HPQEWSA

SEQ ID NO: 29141 - protein, 7 aa, synthetic construct
EWQEHKD

SEQ ID NO: 29142 - protein, 7 aa, synthetic construct
RYGPSNS

SEQ ID NO: 29143 - protein, 7 aa, synthetic construct
SYKNEHR

SEQ ID NO: 29144 - protein, 7 aa, synthetic construct
KHEHGDY

SEQ ID NO: 29145 - protein, 7 aa, synthetic construct
LMRIGST

SEQ ID NO: 29146 - protein, 7 aa, synthetic construct
SHSSPHF

SEQ ID NO: 29147 - protein, 7 aa, synthetic construct
EPPSTEP

SEQ ID NO: 29148 - protein, 7 aa, synthetic construct
WVTNMPP

SEQ ID NO: 29149 - protein, 7 aa, synthetic construct
WHTENLA

SEQ ID NO: 29150 - protein, 7 aa, synthetic construct
DRERRFI

SEQ ID NO: 29151 - protein, 7 aa, synthetic construct
VASMYDV

SEQ ID NO: 29152 - protein, 7 aa, synthetic construct
DIISKSD

SEQ ID NO: 29153 - protein, 7 aa, synthetic construct
PIDGLKM

SEQ ID NO: 29154 - protein, 7 aa, synthetic construct
MISKHFD

SEQ ID NO: 29155 - protein, 7 aa, synthetic construct
WEIPKAE

SEQ ID NO: 29156 - protein, 7 aa, synthetic construct
DDKPIMA

SEQ ID NO: 29157 - protein, 7 aa, synthetic construct
EHSGNFE

SEQ ID NO: 29158 - protein, 7 aa, synthetic construct
VTVGAEP

SEQ ID NO: 29159 - protein, 7 aa, synthetic construct
RQVETDH

SEQ ID NO: 29160 - protein, 7 aa, synthetic construct
FYEDHQN

SEQ ID NO: 29161 - protein, 7 aa, synthetic construct
QPDYTDN

SEQ ID NO: 29162 - protein, 7 aa, synthetic construct
NYPVPAN

SEQ ID NO: 29163 - protein, 7 aa, synthetic construct
ERMEAMI

SEQ ID NO: 29164 - protein, 7 aa, synthetic construct
IFREMGP

SEQ ID NO: 29165 - protein, 7 aa, synthetic construct
HEKLTPM

SEQ ID NO: 29166 - protein, 7 aa, synthetic construct
PFLQGID

SEQ ID NO: 29167 - protein, 7 aa, synthetic construct
MTEVGAQ

SEQ ID NO: 29168 - protein, 7 aa, synthetic construct
HTMQVTI

SEQ ID NO: 29169 - protein, 7 aa, synthetic construct
DITAPQR

SEQ ID NO: 29170 - protein, 7 aa, synthetic construct
TVPEVKH

SEQ ID NO: 29171 - protein, 7 aa, synthetic construct
LNHHQIE

SEQ ID NO: 29172 - protein, 7 aa, synthetic construct
FKISEMR

SEQ ID NO: 29173 - protein, 7 aa, synthetic construct
PHEYHNG

SEQ ID NO: 29174 - protein, 7 aa, synthetic construct
NDNTGFW

SEQ ID NO: 29175 - protein, 7 aa, synthetic construct
INMQEPD

SEQ ID NO: 29176 - protein, 7 aa, synthetic construct
VSLEKDK

SEQ ID NO: 29177 - protein, 7 aa, synthetic construct
IMMEQKK

SEQ ID NO: 29178 - protein, 7 aa, synthetic construct
WYSNTTS

SEQ ID NO: 29179 - protein, 7 aa, synthetic construct
STAGMQD

SEQ ID NO: 29180 - protein, 7 aa, synthetic construct
THLSNFQ

SEQ ID NO: 29181 - protein, 7 aa, synthetic construct
GNSYPMN

SEQ ID NO: 29182 - protein, 7 aa, synthetic construct
RESIGTL

SEQ ID NO: 29183 - protein, 7 aa, synthetic construct
LYPATNN

SEQ ID NO: 29184 - protein, 7 aa, synthetic construct
MGAILEG

SEQ ID NO: 29185 - protein, 7 aa, synthetic construct
IVQKLEY

SEQ ID NO: 29186 - protein, 7 aa, synthetic construct
MGHALTF

SEQ ID NO: 29187 - protein, 7 aa, synthetic construct
RVTEHIT

SEQ ID NO: 29188 - protein, 7 aa, synthetic construct
YQIETIN

SEQ ID NO: 29189 - protein, 7 aa, synthetic construct
MIDGQPA

SEQ ID NO: 29190 - protein, 7 aa, synthetic construct
KDPHLGL

SEQ ID NO: 29191 - protein, 7 aa, synthetic construct
GSPHGHL

SEQ ID NO: 29192 - protein, 7 aa, synthetic construct
PDHGKHY

SEQ ID NO: 29193 - protein, 7 aa, synthetic construct
GPGPDCC

SEQ ID NO: 29194 - protein, 7 aa, synthetic construct
HDSAETH

SEQ ID NO: 29195 - protein, 7 aa, synthetic construct
QVAREAK

SEQ ID NO: 29196 - protein, 7 aa, synthetic construct
HSNFTLV

SEQ ID NO: 29197 - protein, 7 aa, synthetic construct
ITNDLNG

SEQ ID NO: 29198 - protein, 7 aa, synthetic construct
PGDDQWG

SEQ ID NO: 29199 - protein, 7 aa, synthetic construct
QTNSSIW

SEQ ID NO: 29200 - protein, 7 aa, synthetic construct
RQDGTTM

SEQ ID NO: 29201 - protein, 7 aa, synthetic construct
ISKERFE

SEQ ID NO: 29202 - protein, 7 aa, synthetic construct
RWQENMH

SEQ ID NO: 29203 - protein, 7 aa, synthetic construct
ISHLSSD

SEQ ID NO: 29204 - protein, 7 aa, synthetic construct
WPEQSQN

SEQ ID NO: 29205 - protein, 7 aa, synthetic construct
AEASRWG

SEQ ID NO: 29206 - protein, 7 aa, synthetic construct
EQNDPNG

SEQ ID NO: 29207 - protein, 7 aa, synthetic construct
GFQRDIK

SEQ ID NO: 29208 - protein, 7 aa, synthetic construct
YMHPNII

SEQ ID NO: 29209 - protein, 7 aa, synthetic construct
ILDPNGK

SEQ ID NO: 29210 - protein, 7 aa, synthetic construct
PLKEIQF

SEQ ID NO: 29211 - protein, 7 aa, synthetic construct
FPNQNDD

SEQ ID NO: 29212 - protein, 7 aa, synthetic construct
LHNVEEM

SEQ ID NO: 29213 - protein, 7 aa, synthetic construct
IQERSWQ

SEQ ID NO: 29214 - protein, 7 aa, synthetic construct
GNQYKVI

SEQ ID NO: 29215 - protein, 7 aa, synthetic construct
KNLVTSD

SEQ ID NO: 29216 - protein, 7 aa, synthetic construct
EKHGVYS

SEQ ID NO: 29217 - protein, 7 aa, synthetic construct
THSHQEG

SEQ ID NO: 29218 - protein, 7 aa, synthetic construct
ATDSNGY

SEQ ID NO: 29219 - protein, 7 aa, synthetic construct
ANIRGFT

SEQ ID NO: 29220 - protein, 7 aa, synthetic construct
PALKTLL

SEQ ID NO: 29221 - protein, 7 aa, synthetic construct
MPVGVVH

SEQ ID NO: 29222 - protein, 7 aa, synthetic construct
PVVHLKV

SEQ ID NO: 29223 - protein, 7 aa, synthetic construct
QEYHLQD

SEQ ID NO: 29224 - protein, 7 aa, synthetic construct
GKLDFSK

SEQ ID NO: 29225 - protein, 7 aa, synthetic construct
PLVGGII

SEQ ID NO: 29226 - protein, 7 aa, synthetic construct
EWMGPKP

SEQ ID NO: 29227 - protein, 7 aa, synthetic construct
DAMSQGK

SEQ ID NO: 29228 - protein, 7 aa, synthetic construct
HIDMMLA

SEQ ID NO: 29229 - protein, 7 aa, synthetic construct
EQVNKFV

SEQ ID NO: 29230 - protein, 7 aa, synthetic construct
ENIQVKK

SEQ ID NO: 29231 - protein, 7 aa, synthetic construct
AQPVNYA

SEQ ID NO: 29232 - protein, 7 aa, synthetic construct
ETYKHPK

SEQ ID NO: 29233 - protein, 7 aa, synthetic construct
ALKMEMW

SEQ ID NO: 29234 - protein, 7 aa, synthetic construct
EYQTKYM

SEQ ID NO: 29235 - protein, 7 aa, synthetic construct
ESMTMGS

SEQ ID NO: 29236 - protein, 7 aa, synthetic construct
NHHQSYT

SEQ ID NO: 29237 - protein, 7 aa, synthetic construct
LYRNIDV

SEQ ID NO: 29238 - protein, 7 aa, synthetic construct
KTTTHDW

SEQ ID NO: 29239 - protein, 7 aa, synthetic construct
RHPGTYA

SEQ ID NO: 29240 - protein, 7 aa, synthetic construct
GVKEDEM

SEQ ID NO: 29241 - protein, 7 aa, synthetic construct
SIKMGDP

SEQ ID NO: 29242 - protein, 7 aa, synthetic construct
NDHEYMK

SEQ ID NO: 29243 - protein, 7 aa, synthetic construct
DRMTVEV

SEQ ID NO: 29244 - protein, 7 aa, synthetic construct
DFAMGEH

SEQ ID NO: 29245 - protein, 7 aa, synthetic construct
NNFKVNS

SEQ ID NO: 29246 - protein, 7 aa, synthetic construct
GMDDHIA

SEQ ID NO: 29247 - protein, 7 aa, synthetic construct
DLEIQKT

SEQ ID NO: 29248 - protein, 7 aa, synthetic construct
SEDTFGR

SEQ ID NO: 29249 - protein, 7 aa, synthetic construct
RMYVAEP

SEQ ID NO: 29250 - protein, 7 aa, synthetic construct
FSDVPKQ

SEQ ID NO: 29251 - protein, 7 aa, synthetic construct
DYNTLQA

SEQ ID NO: 29252 - protein, 7 aa, synthetic construct
PLPNTML

SEQ ID NO: 29253 - protein, 7 aa, synthetic construct
IEEMQHT

SEQ ID NO: 29254 - protein, 7 aa, synthetic construct
VDSAIHV

SEQ ID NO: 29255 - protein, 7 aa, synthetic construct
PEWHKEG

SEQ ID NO: 29256 - protein, 7 aa, synthetic construct
QPTNDVI

SEQ ID NO: 29257 - protein, 7 aa, synthetic construct
DMKPFDK

SEQ ID NO: 29258 - protein, 7 aa, synthetic construct
EDKQDHG

SEQ ID NO: 29259 - protein, 7 aa, synthetic construct
TIYPEDV

SEQ ID NO: 29260 - protein, 7 aa, synthetic construct
TNNNVIM

SEQ ID NO: 29261 - protein, 7 aa, synthetic construct
GSETVRL

SEQ ID NO: 29262 - protein, 7 aa, synthetic construct
KGNEAQH

SEQ ID NO: 29263 - protein, 7 aa, synthetic construct
TIGGQHS

SEQ ID NO: 29264 - protein, 7 aa, synthetic construct
IVEKNQR

SEQ ID NO: 29265 - protein, 7 aa, synthetic construct
KHREAGV

SEQ ID NO: 29266 - protein, 7 aa, synthetic construct
KNMLNAM

SEQ ID NO: 29267 - protein, 7 aa, synthetic construct
KIDQGIT

SEQ ID NO: 29268 - protein, 7 aa, synthetic construct
NYTYANK

SEQ ID NO: 29269 - protein, 7 aa, synthetic construct
SIRDVEY

SEQ ID NO: 29270 - protein, 7 aa, synthetic construct
KDAKKDM

SEQ ID NO: 29271 - protein, 7 aa, synthetic construct
HTKTEEE

SEQ ID NO: 29272 - protein, 7 aa, synthetic construct
DNGSMFI

SEQ ID NO: 29273 - protein, 7 aa, synthetic construct
HYGQEVD

SEQ ID NO: 29274 - protein, 7 aa, synthetic construct
IEHFPLD

SEQ ID NO: 29275 - protein, 7 aa, synthetic construct
VPPAPES

SEQ ID NO: 29276 - protein, 7 aa, synthetic construct
SGSDFKN

SEQ ID NO: 29277 - protein, 7 aa, synthetic construct
VYQTQVV

SEQ ID NO: 29278 - protein, 7 aa, synthetic construct
EDLKQAM

SEQ ID NO: 29279 - protein, 7 aa, synthetic construct
QGKYDNM

SEQ ID NO: 29280 - protein, 7 aa, synthetic construct
QSSGNDN

SEQ ID NO: 29281 - protein, 7 aa, synthetic construct
FKPEIQT

SEQ ID NO: 29282 - protein, 7 aa, synthetic construct
EYILSGK

SEQ ID NO: 29283 - protein, 7 aa, synthetic construct
IERGDMH

SEQ ID NO: 29284 - protein, 7 aa, synthetic construct
RTSTHTW

SEQ ID NO: 29285 - protein, 7 aa, synthetic construct
VMDIDGL

SEQ ID NO: 29286 - protein, 7 aa, synthetic construct
GLFASPG

SEQ ID NO: 29287 - protein, 7 aa, synthetic construct
RGYEGDT

SEQ ID NO: 29288 - protein, 7 aa, synthetic construct
AVQATDW

SEQ ID NO: 29289 - protein, 7 aa, synthetic construct
QFAQRHS

SEQ ID NO: 29290 - protein, 7 aa, synthetic construct
LFGPLES

SEQ ID NO: 29291 - protein, 7 aa, synthetic construct
IHRGFKE

SEQ ID NO: 29292 - protein, 7 aa, synthetic construct
KNHEGGS

SEQ ID NO: 29293 - protein, 7 aa, synthetic construct
MLVNMPA

SEQ ID NO: 29294 - protein, 7 aa, synthetic construct
LGPENQI

SEQ ID NO: 29295 - protein, 7 aa, synthetic construct
NPFNPYE

SEQ ID NO: 29296 - protein, 7 aa, synthetic construct
DGRDNGG

SEQ ID NO: 29297 - protein, 7 aa, synthetic construct
TPQHKDI

SEQ ID NO: 29298 - protein, 7 aa, synthetic construct
TQHNWSP

SEQ ID NO: 29299 - protein, 7 aa, synthetic construct
RFNDEAK

SEQ ID NO: 29300 - protein, 7 aa, synthetic construct
GERGTDD

SEQ ID NO: 29301 - protein, 7 aa, synthetic construct
GMHGELT

SEQ ID NO: 29302 - protein, 7 aa, synthetic construct
YGYSQEH

SEQ ID NO: 29303 - protein, 7 aa, synthetic construct
NHAAESF

SEQ ID NO: 29304 - protein, 7 aa, synthetic construct
KHNTFSS

SEQ ID NO: 29305 - protein, 7 aa, synthetic construct
EYKNQEI

SEQ ID NO: 29306 - protein, 7 aa, synthetic construct
HQGDVNG

SEQ ID NO: 29307 - protein, 7 aa, synthetic construct
QRLTEGP

SEQ ID NO: 29308 - protein, 7 aa, synthetic construct
HQMVITS

SEQ ID NO: 29309 - protein, 7 aa, synthetic construct
LIQRFPQ

SEQ ID NO: 29310 - protein, 7 aa, synthetic construct
EAESRNR

SEQ ID NO: 29311 - protein, 7 aa, synthetic construct
MNLAMEM

SEQ ID NO: 29312 - protein, 7 aa, synthetic construct
ASQKDRE

SEQ ID NO: 29313 - protein, 7 aa, synthetic construct
GMEQQYR

SEQ ID NO: 29314 - protein, 7 aa, synthetic construct
PGTINFS

SEQ ID NO: 29315 - protein, 7 aa, synthetic construct
IVSLGQL

SEQ ID NO: 29316 - protein, 7 aa, synthetic construct
PAVMNVI

SEQ ID NO: 29317 - protein, 7 aa, synthetic construct
KEEINFR

SEQ ID NO: 29318 - protein, 7 aa, synthetic construct
PPPIATD

SEQ ID NO: 29319 - protein, 7 aa, synthetic construct
QFTNMYP

SEQ ID NO: 29320 - protein, 7 aa, synthetic construct
QLVEYSI

SEQ ID NO: 29321 - protein, 7 aa, synthetic construct
TIQIQEK

SEQ ID NO: 29322 - protein, 7 aa, synthetic construct
ELPQGHP

SEQ ID NO: 29323 - protein, 7 aa, synthetic construct
GDKRVGI

SEQ ID NO: 29324 - protein, 7 aa, synthetic construct
AFTHTQH

SEQ ID NO: 29325 - protein, 7 aa, synthetic construct
PAGAMGK

SEQ ID NO: 29326 - protein, 7 aa, synthetic construct
ETKQRFG

SEQ ID NO: 29327 - protein, 7 aa, synthetic construct
VANLQEL

SEQ ID NO: 29328 - protein, 7 aa, synthetic construct
FTPSSDH

SEQ ID NO: 29329 - protein, 7 aa, synthetic construct
VRMLTIE

SEQ ID NO: 29330 - protein, 7 aa, synthetic construct
DPHLGGD

SEQ ID NO: 29331 - protein, 7 aa, synthetic construct
FSMEKTD

SEQ ID NO: 29332 - protein, 7 aa, synthetic construct
WFEGSDD

SEQ ID NO: 29333 - protein, 7 aa, synthetic construct
QGLMKEK

SEQ ID NO: 29334 - protein, 7 aa, synthetic construct
KFDMEPL

SEQ ID NO: 29335 - protein, 7 aa, synthetic construct
WLHEKKA

SEQ ID NO: 29336 - protein, 7 aa, synthetic construct
KNVGVDL

SEQ ID NO: 29337 - protein, 7 aa, synthetic construct
IKHHQID

SEQ ID NO: 29338 - protein, 7 aa, synthetic construct
QGSPETV

SEQ ID NO: 29339 - protein, 7 aa, synthetic construct
KGVLASQ

SEQ ID NO: 29340 - protein, 7 aa, synthetic construct
FPFNQPS

SEQ ID NO: 29341 - protein, 7 aa, synthetic construct
TMVDSFK

SEQ ID NO: 29342 - protein, 7 aa, synthetic construct
VTGGLND

SEQ ID NO: 29343 - protein, 7 aa, synthetic construct
TIKWTTE

SEQ ID NO: 29344 - protein, 7 aa, synthetic construct
WKQVEGP

SEQ ID NO: 29345 - protein, 7 aa, synthetic construct
ATPMPPF

SEQ ID NO: 29346 - protein, 7 aa, synthetic construct
QIEDPFN

SEQ ID NO: 29347 - protein, 7 aa, synthetic construct
DGNFEQM

SEQ ID NO: 29348 - protein, 7 aa, synthetic construct
QEWEHSG

SEQ ID NO: 29349 - protein, 7 aa, synthetic construct
PFMIGGV

SEQ ID NO: 29350 - protein, 7 aa, synthetic construct
DQKQTSM

SEQ ID NO: 29351 - protein, 7 aa, synthetic construct
PGHTIRG

SEQ ID NO: 29352 - protein, 7 aa, synthetic construct
HIQDPRI

SEQ ID NO: 29353 - protein, 7 aa, synthetic construct
YGMMSAH

SEQ ID NO: 29354 - protein, 7 aa, synthetic construct
VFQRATQ

SEQ ID NO: 29355 - protein, 7 aa, synthetic construct
DSAHAQE

SEQ ID NO: 29356 - protein, 7 aa, synthetic construct
MITPNIV

SEQ ID NO: 29357 - protein, 7 aa, synthetic construct
QPEDKLV

SEQ ID NO: 29358 - protein, 7 aa, synthetic construct
GDQANDK

SEQ ID NO: 29359 - protein, 7 aa, synthetic construct
PFMDEDG

SEQ ID NO: 29360 - protein, 7 aa, synthetic construct
GSVAFPP

SEQ ID NO: 29361 - protein, 7 aa, synthetic construct
VADTKVK

SEQ ID NO: 29362 - protein, 7 aa, synthetic construct
HNRMMDQ

SEQ ID NO: 29363 - protein, 7 aa, synthetic construct
EIKHNVS

SEQ ID NO: 29364 - protein, 7 aa, synthetic construct
VPEHGNA

SEQ ID NO: 29365 - protein, 7 aa, synthetic construct
NALTKDT

SEQ ID NO: 29366 - protein, 7 aa, synthetic construct
AITGGPN

SEQ ID NO: 29367 - protein, 7 aa, synthetic construct
PNGRYQM

SEQ ID NO: 29368 - protein, 7 aa, synthetic construct
VPRTLVG

SEQ ID NO: 29369 - protein, 7 aa, synthetic construct
QFPDRVQ

SEQ ID NO: 29370 - protein, 7 aa, synthetic construct
KTFGLTD

SEQ ID NO: 29371 - protein, 7 aa, synthetic construct
HSKHFQQ

SEQ ID NO: 29372 - protein, 7 aa, synthetic construct
PRSDIFT

SEQ ID NO: 29373 - protein, 7 aa, synthetic construct
HLISVSA

SEQ ID NO: 29374 - protein, 7 aa, synthetic construct
YNNSPAL

SEQ ID NO: 29375 - protein, 7 aa, synthetic construct
SFKDMVD

SEQ ID NO: 29376 - protein, 7 aa, synthetic construct
YHRVDVA

SEQ ID NO: 29377 - protein, 7 aa, synthetic construct
VADYRMA

SEQ ID NO: 29378 - protein, 7 aa, synthetic construct
GWKVTYD

SEQ ID NO: 29379 - protein, 7 aa, synthetic construct
ERLNRQG

SEQ ID NO: 29380 - protein, 7 aa, synthetic construct
NKIEIQT

SEQ ID NO: 29381 - protein, 7 aa, synthetic construct
GQEFMKD

SEQ ID NO: 29382 - protein, 7 aa, synthetic construct
NSNATQM

SEQ ID NO: 29383 - protein, 7 aa, synthetic construct
EYKKNIH

SEQ ID NO: 29384 - protein, 7 aa, synthetic construct
GWDVSVD

SEQ ID NO: 29385 - protein, 7 aa, synthetic construct
KLMDSHD

SEQ ID NO: 29386 - protein, 7 aa, synthetic construct
SGPINDD

SEQ ID NO: 29387 - protein, 7 aa, synthetic construct
TSRNLIT

SEQ ID NO: 29388 - protein, 7 aa, synthetic construct
STRVQET

SEQ ID NO: 29389 - protein, 7 aa, synthetic construct
NMSGYPE

SEQ ID NO: 29390 - protein, 7 aa, synthetic construct
EIREAGY

SEQ ID NO: 29391 - protein, 7 aa, synthetic construct
TMPYTKG

SEQ ID NO: 29392 - protein, 7 aa, synthetic construct
PFMKLPT

SEQ ID NO: 29393 - protein, 7 aa, synthetic construct
STQVIVT

SEQ ID NO: 29394 - protein, 7 aa, synthetic construct
QEVIQAH

SEQ ID NO: 29395 - protein, 7 aa, synthetic construct
VQYQESD

SEQ ID NO: 29396 - protein, 7 aa, synthetic construct
GDFPLLS

SEQ ID NO: 29397 - protein, 7 aa, synthetic construct
VGVSTGW

SEQ ID NO: 29398 - protein, 7 aa, synthetic construct
RDNVTFY

SEQ ID NO: 29399 - protein, 7 aa, synthetic construct
PNDHSIK

SEQ ID NO: 29400 - protein, 7 aa, synthetic construct
MVDTRMM

SEQ ID NO: 29401 - protein, 7 aa, synthetic construct
FVNVTDN

SEQ ID NO: 29402 - protein, 7 aa, synthetic construct
LSSMATN

SEQ ID NO: 29403 - protein, 7 aa, synthetic construct
ISMARDF

SEQ ID NO: 29404 - protein, 7 aa, synthetic construct
KKSDSAH

SEQ ID NO: 29405 - protein, 7 aa, synthetic construct
FNVHTNS

SEQ ID NO: 29406 - protein, 7 aa, synthetic construct
GKPFDMH

SEQ ID NO: 29407 - protein, 7 aa, synthetic construct
WTFAGEE

SEQ ID NO: 29408 - protein, 7 aa, synthetic construct
WLRNGDV

SEQ ID NO: 29409 - protein, 7 aa, synthetic construct
PCKPGCA

SEQ ID NO: 29410 - protein, 7 aa, synthetic construct
VFTDNMS

SEQ ID NO: 29411 - protein, 7 aa, synthetic construct
IEDNQVS

SEQ ID NO: 29412 - protein, 7 aa, synthetic construct
KGWHGDA

SEQ ID NO: 29413 - protein, 7 aa, synthetic construct
IWAGQSI

SEQ ID NO: 29414 - protein, 7 aa, synthetic construct
MWNMPNS

SEQ ID NO: 29415 - protein, 7 aa, synthetic construct
HSDERAW

SEQ ID NO: 29416 - protein, 7 aa, synthetic construct
LAYQDLD

SEQ ID NO: 29417 - protein, 7 aa, synthetic construct
NQGEDPF

SEQ ID NO: 29418 - protein, 7 aa, synthetic construct
NDNFAEM

SEQ ID NO: 29419 - protein, 7 aa, synthetic construct
TLPAMNN

SEQ ID NO: 29420 - protein, 7 aa, synthetic construct
LSSNMFK

SEQ ID NO: 29421 - protein, 7 aa, synthetic construct
MLSEILG

SEQ ID NO: 29422 - protein, 7 aa, synthetic construct
VKPPASM

SEQ ID NO: 29423 - protein, 7 aa, synthetic construct
LTTQANW

SEQ ID NO: 29424 - protein, 7 aa, synthetic construct
PMDTQHR

SEQ ID NO: 29425 - protein, 7 aa, synthetic construct
VAESKFI

SEQ ID NO: 29426 - protein, 7 aa, synthetic construct
RWADDEY

SEQ ID NO: 29427 - protein, 7 aa, synthetic construct
TPEDYHY

SEQ ID NO: 29428 - protein, 7 aa, synthetic construct
MEVKQSM

SEQ ID NO: 29429 - protein, 7 aa, synthetic construct
MKMEYDP

SEQ ID NO: 29430 - protein, 7 aa, synthetic construct
VADGGIY

SEQ ID NO: 29431 - protein, 7 aa, synthetic construct
GIDMHKD

SEQ ID NO: 29432 - protein, 7 aa, synthetic construct
GFDQSGS

SEQ ID NO: 29433 - protein, 7 aa, synthetic construct
QQYGKML

SEQ ID NO: 29434 - protein, 7 aa, synthetic construct
NMNFPMA

SEQ ID NO: 29435 - protein, 7 aa, synthetic construct
FRSKNDF

SEQ ID NO: 29436 - protein, 7 aa, synthetic construct
RDFELGT

SEQ ID NO: 29437 - protein, 7 aa, synthetic construct
FRDLTTM

SEQ ID NO: 29438 - protein, 7 aa, synthetic construct
FELSEKL

SEQ ID NO: 29439 - protein, 7 aa, synthetic construct
VDGSHHV

SEQ ID NO: 29440 - protein, 7 aa, synthetic construct
LKNYKPP

SEQ ID NO: 29441 - protein, 7 aa, synthetic construct
IGVQAEQ

SEQ ID NO: 29442 - protein, 7 aa, synthetic construct
NLLSEST

SEQ ID NO: 29443 - protein, 7 aa, synthetic construct
DIVERMQ

SEQ ID NO: 29444 - protein, 7 aa, synthetic construct
YTGLVPD

SEQ ID NO: 29445 - protein, 7 aa, synthetic construct
TKQLAWN

SEQ ID NO: 29446 - protein, 7 aa, synthetic construct
KNLHIDY

SEQ ID NO: 29447 - protein, 7 aa, synthetic construct
MPEQVNF

SEQ ID NO: 29448 - protein, 7 aa, synthetic construct
LHAEMIS

SEQ ID NO: 29449 - protein, 7 aa, synthetic construct
TQKDANE

SEQ ID NO: 29450 - protein, 7 aa, synthetic construct
MHNPPFA

SEQ ID NO: 29451 - protein, 7 aa, synthetic construct
KKESFSV

SEQ ID NO: 29452 - protein, 7 aa, synthetic construct
SFPESIA

SEQ ID NO: 29453 - protein, 7 aa, synthetic construct
YDMLPNP

SEQ ID NO: 29454 - protein, 7 aa, synthetic construct
SYKEIMR

SEQ ID NO: 29455 - protein, 7 aa, synthetic construct
METNLSR

SEQ ID NO: 29456 - protein, 7 aa, synthetic construct
LSGEHRE

SEQ ID NO: 29457 - protein, 7 aa, synthetic construct
LQIRPHA

SEQ ID NO: 29458 - protein, 7 aa, synthetic construct
GMQGSFL

SEQ ID NO: 29459 - protein, 7 aa, synthetic construct
MNMDYKR

SEQ ID NO: 29460 - protein, 7 aa, synthetic construct
TLGDLAN

SEQ ID NO: 29461 - protein, 7 aa, synthetic construct
HGPAMEI

SEQ ID NO: 29462 - protein, 7 aa, synthetic construct
SDNESTR

SEQ ID NO: 29463 - protein, 7 aa, synthetic construct
DFNHKIK

SEQ ID NO: 29464 - protein, 7 aa, synthetic construct
VQQPQFR

SEQ ID NO: 29465 - protein, 7 aa, synthetic construct
SPTNADS

SEQ ID NO: 29466 - protein, 7 aa, synthetic construct
QPPREVE

SEQ ID NO: 29467 - protein, 7 aa, synthetic construct
LLESPVP

SEQ ID NO: 29468 - protein, 7 aa, synthetic construct
GMPADNK

SEQ ID NO: 29469 - protein, 7 aa, synthetic construct
MADKDVG

SEQ ID NO: 29470 - protein, 7 aa, synthetic construct
FAERNEF

SEQ ID NO: 29471 - protein, 7 aa, synthetic construct
DPNHEVF

SEQ ID NO: 29472 - protein, 7 aa, synthetic construct
SDPDGVF

SEQ ID NO: 29473 - protein, 7 aa, synthetic construct
HSPGWAD

SEQ ID NO: 29474 - protein, 7 aa, synthetic construct
PDLRTEH

SEQ ID NO: 29475 - protein, 7 aa, synthetic construct
WHHMRHE

SEQ ID NO: 29476 - protein, 7 aa, synthetic construct
HMDPGDS

SEQ ID NO: 29477 - protein, 7 aa, synthetic construct
HEDEHGF

SEQ ID NO: 29478 - protein, 7 aa, synthetic construct
MNDNGQI

SEQ ID NO: 29479 - protein, 7 aa, synthetic construct
KERNPVI

SEQ ID NO: 29480 - protein, 7 aa, synthetic construct
ASQAQYR

SEQ ID NO: 29481 - protein, 7 aa, synthetic construct
GYSDDNT

SEQ ID NO: 29482 - protein, 7 aa, synthetic construct
REDFFVG

SEQ ID NO: 29483 - protein, 7 aa, synthetic construct
HNPEPVH

SEQ ID NO: 29484 - protein, 7 aa, synthetic construct
IIHKHPF

SEQ ID NO: 29485 - protein, 7 aa, synthetic construct
YESMTAS

SEQ ID NO: 29486 - protein, 7 aa, synthetic construct
MPANENR

SEQ ID NO: 29487 - protein, 7 aa, synthetic construct
KKNPWEE

SEQ ID NO: 29488 - protein, 7 aa, synthetic construct
GAQTTAE

SEQ ID NO: 29489 - protein, 7 aa, synthetic construct
YHVDDEV

SEQ ID NO: 29490 - protein, 7 aa, synthetic construct
PIRRDIM

SEQ ID NO: 29491 - protein, 7 aa, synthetic construct
FLRGDGE

SEQ ID NO: 29492 - protein, 7 aa, synthetic construct
TFDEEKY

SEQ ID NO: 29493 - protein, 7 aa, synthetic construct
SPIFTAP

SEQ ID NO: 29494 - protein, 7 aa, synthetic construct
TQMHYIA

SEQ ID NO: 29495 - protein, 7 aa, synthetic construct
LANEQNE

SEQ ID NO: 29496 - protein, 7 aa, synthetic construct
WHRVQAA

SEQ ID NO: 29497 - protein, 7 aa, synthetic construct
ASMVSEF

SEQ ID NO: 29498 - protein, 7 aa, synthetic construct
GITQVMV

SEQ ID NO: 29499 - protein, 7 aa, synthetic construct
LFANDTI

SEQ ID NO: 29500 - protein, 7 aa, synthetic construct
VEGRPMD

SEQ ID NO: 29501 - protein, 7 aa, synthetic construct
LFTAHTD

SEQ ID NO: 29502 - protein, 7 aa, synthetic construct
TPEIYEK

SEQ ID NO: 29503 - protein, 7 aa, synthetic construct
MVTSAEL

SEQ ID NO: 29504 - protein, 7 aa, synthetic construct
RIEEAYL

SEQ ID NO: 29505 - protein, 7 aa, synthetic construct
GTGAVWT

SEQ ID NO: 29506 - protein, 7 aa, synthetic construct
KYNEVFK

SEQ ID NO: 29507 - protein, 7 aa, synthetic construct
MEPDAKI

SEQ ID NO: 29508 - protein, 7 aa, synthetic construct
IIQAELN

SEQ ID NO: 29509 - protein, 7 aa, synthetic construct
QKETVEF

SEQ ID NO: 29510 - protein, 7 aa, synthetic construct
GNEMASL

SEQ ID NO: 29511 - protein, 7 aa, synthetic construct
PTPLRDT

SEQ ID NO: 29512 - protein, 7 aa, synthetic construct
FIPRPDD

SEQ ID NO: 29513 - protein, 7 aa, synthetic construct
FEKQLVI

SEQ ID NO: 29514 - protein, 7 aa, synthetic construct
HTWEGAL

SEQ ID NO: 29515 - protein, 7 aa, synthetic construct
MAHEYQI

SEQ ID NO: 29516 - protein, 7 aa, synthetic construct
TLDRFPL

SEQ ID NO: 29517 - protein, 7 aa, synthetic construct
NIKTAYM

SEQ ID NO: 29518 - protein, 7 aa, synthetic construct
WKARSEF

SEQ ID NO: 29519 - protein, 7 aa, synthetic construct
GSEAAHN

SEQ ID NO: 29520 - protein, 7 aa, synthetic construct
TIIKAPM

SEQ ID NO: 29521 - protein, 7 aa, synthetic construct
NMVKLDH

SEQ ID NO: 29522 - protein, 7 aa, synthetic construct
WEREVAQ

SEQ ID NO: 29523 - protein, 7 aa, synthetic construct
ADPQRDS

SEQ ID NO: 29524 - protein, 7 aa, synthetic construct
ITEPTDN

SEQ ID NO: 29525 - protein, 7 aa, synthetic construct
TPLDNHH

SEQ ID NO: 29526 - protein, 7 aa, synthetic construct
MPTSRVW

SEQ ID NO: 29527 - protein, 7 aa, synthetic construct
IITMDHA

SEQ ID NO: 29528 - protein, 7 aa, synthetic construct
HAHKDGI

SEQ ID NO: 29529 - protein, 7 aa, synthetic construct
SAMPPVK

SEQ ID NO: 29530 - protein, 7 aa, synthetic construct
TENVQPP

SEQ ID NO: 29531 - protein, 7 aa, synthetic construct
SSPNPPS

SEQ ID NO: 29532 - protein, 7 aa, synthetic construct
ALFKGQL

SEQ ID NO: 29533 - protein, 7 aa, synthetic construct
PNNDTIN

SEQ ID NO: 29534 - protein, 7 aa, synthetic construct
QQDYEAQ

SEQ ID NO: 29535 - protein, 7 aa, synthetic construct
QLPDYQE

SEQ ID NO: 29536 - protein, 7 aa, synthetic construct
TQQQNIE

SEQ ID NO: 29537 - protein, 7 aa, synthetic construct
DQWKLNH

SEQ ID NO: 29538 - protein, 7 aa, synthetic construct
WVLDRPA

SEQ ID NO: 29539 - protein, 7 aa, synthetic construct
GIEIEHR

SEQ ID NO: 29540 - protein, 7 aa, synthetic construct
GHAELLN

SEQ ID NO: 29541 - protein, 7 aa, synthetic construct
SMTSEAT

SEQ ID NO: 29542 - protein, 7 aa, synthetic construct
AGKQPQM

SEQ ID NO: 29543 - protein, 7 aa, synthetic construct
PKEVPLI

SEQ ID NO: 29544 - protein, 7 aa, synthetic construct
GSTHNVN

SEQ ID NO: 29545 - protein, 7 aa, synthetic construct
FDSYNRE

SEQ ID NO: 29546 - protein, 7 aa, synthetic construct
KNIADQY

SEQ ID NO: 29547 - protein, 7 aa, synthetic construct
RLVDAGF

SEQ ID NO: 29548 - protein, 7 aa, synthetic construct
PSIPKRE

SEQ ID NO: 29549 - protein, 7 aa, synthetic construct
SFAELTS

SEQ ID NO: 29550 - protein, 7 aa, synthetic construct
KKEDDKI

SEQ ID NO: 29551 - protein, 7 aa, synthetic construct
NYGSEYE

SEQ ID NO: 29552 - protein, 7 aa, synthetic construct
PEGHFPL

SEQ ID NO: 29553 - protein, 7 aa, synthetic construct
KWSMDGP

SEQ ID NO: 29554 - protein, 7 aa, synthetic construct
MSSVAEY

SEQ ID NO: 29555 - protein, 7 aa, synthetic construct
MHETITL

SEQ ID NO: 29556 - protein, 7 aa, synthetic construct
ILHDAKS

SEQ ID NO: 29557 - protein, 7 aa, synthetic construct
NEMANRE

SEQ ID NO: 29558 - protein, 7 aa, synthetic construct
ADFDAGS

SEQ ID NO: 29559 - protein, 7 aa, synthetic construct
PSHGMDI

SEQ ID NO: 29560 - protein, 7 aa, synthetic construct
VMDTNTP

SEQ ID NO: 29561 - protein, 7 aa, synthetic construct
LGNYVQF

SEQ ID NO: 29562 - protein, 7 aa, synthetic construct
LFAGNSV

SEQ ID NO: 29563 - protein, 7 aa, synthetic construct
NSFQAPS

SEQ ID NO: 29564 - protein, 7 aa, synthetic construct
MHLDYGD

SEQ ID NO: 29565 - protein, 7 aa, synthetic construct
TVGEERF

SEQ ID NO: 29566 - protein, 7 aa, synthetic construct
ETHHLKL

SEQ ID NO: 29567 - protein, 7 aa, synthetic construct
GYQVHAA

SEQ ID NO: 29568 - protein, 7 aa, synthetic construct
DVPNTDM

SEQ ID NO: 29569 - protein, 7 aa, synthetic construct
KDHTVHV

SEQ ID NO: 29570 - protein, 7 aa, synthetic construct
TQQFKYT

SEQ ID NO: 29571 - protein, 7 aa, synthetic construct
FKHYISE

SEQ ID NO: 29572 - protein, 7 aa, synthetic construct
QRIEEAS

SEQ ID NO: 29573 - protein, 7 aa, synthetic construct
TEKFTQF

SEQ ID NO: 29574 - protein, 7 aa, synthetic construct
GMRFQNM

SEQ ID NO: 29575 - protein, 7 aa, synthetic construct
GAGDIHG

SEQ ID NO: 29576 - protein, 7 aa, synthetic construct
PNGIVAE

SEQ ID NO: 29577 - protein, 7 aa, synthetic construct
VDRDIAS

SEQ ID NO: 29578 - protein, 7 aa, synthetic construct
DVVNMKE

SEQ ID NO: 29579 - protein, 7 aa, synthetic construct
FVMGVQQ

SEQ ID NO: 29580 - protein, 7 aa, synthetic construct
FSNIMVA

SEQ ID NO: 29581 - protein, 7 aa, synthetic construct
GVANYGA

SEQ ID NO: 29582 - protein, 7 aa, synthetic construct
NHLGDIF

SEQ ID NO: 29583 - protein, 7 aa, synthetic construct
RHTHAHA

SEQ ID NO: 29584 - protein, 7 aa, synthetic construct
REEKALG

SEQ ID NO: 29585 - protein, 7 aa, synthetic construct
ATGMILE

SEQ ID NO: 29586 - protein, 7 aa, synthetic construct
GTDSYEE

SEQ ID NO: 29587 - protein, 7 aa, synthetic construct
MVDTMNL

SEQ ID NO: 29588 - protein, 7 aa, synthetic construct
QGLHMKV

SEQ ID NO: 29589 - protein, 7 aa, synthetic construct
PTPPTLE

SEQ ID NO: 29590 - protein, 7 aa, synthetic construct
GDESFVT

SEQ ID NO: 29591 - protein, 7 aa, synthetic construct
NHKDYMG

SEQ ID NO: 29592 - protein, 7 aa, synthetic construct
ALYTMTA

SEQ ID NO: 29593 - protein, 7 aa, synthetic construct
DKYNEHG

SEQ ID NO: 29594 - protein, 7 aa, synthetic construct
GEAFTPD

SEQ ID NO: 29595 - protein, 7 aa, synthetic construct
MSAPQFT

SEQ ID NO: 29596 - protein, 7 aa, synthetic construct
DWRISKD

SEQ ID NO: 29597 - protein, 7 aa, synthetic construct
QVKETKH

SEQ ID NO: 29598 - protein, 7 aa, synthetic construct
YKAVFDD

SEQ ID NO: 29599 - protein, 7 aa, synthetic construct
AWEASMP

SEQ ID NO: 29600 - protein, 7 aa, synthetic construct
WGPQRQE

SEQ ID NO: 29601 - protein, 7 aa, synthetic construct
IQDHGFR

SEQ ID NO: 29602 - protein, 7 aa, synthetic construct
HTDTSQM

SEQ ID NO: 29603 - protein, 7 aa, synthetic construct
QESRRVG

SEQ ID NO: 29604 - protein, 7 aa, synthetic construct
TPNMVFD

SEQ ID NO: 29605 - protein, 7 aa, synthetic construct
DTHTVED

SEQ ID NO: 29606 - protein, 7 aa, synthetic construct
TQVNGWI

SEQ ID NO: 29607 - protein, 7 aa, synthetic construct
DREYIQR

SEQ ID NO: 29608 - protein, 7 aa, synthetic construct
FRKEQLI

SEQ ID NO: 29609 - protein, 7 aa, synthetic construct
NDNMRAV

SEQ ID NO: 29610 - protein, 7 aa, synthetic construct
ANHTMPV

SEQ ID NO: 29611 - protein, 7 aa, synthetic construct
WDAIEGG

SEQ ID NO: 29612 - protein, 7 aa, synthetic construct
DSHATSL

SEQ ID NO: 29613 - protein, 7 aa, synthetic construct
DIDNQIQ

SEQ ID NO: 29614 - protein, 7 aa, synthetic construct
NAPMNSG

SEQ ID NO: 29615 - protein, 7 aa, synthetic construct
YAEPRYT

SEQ ID NO: 29616 - protein, 7 aa, synthetic construct
LMHSKIM

SEQ ID NO: 29617 - protein, 7 aa, synthetic construct
VLHNNKL

SEQ ID NO: 29618 - protein, 7 aa, synthetic construct
VLDASGT

SEQ ID NO: 29619 - protein, 7 aa, synthetic construct
MQGSDHP

SEQ ID NO: 29620 - protein, 7 aa, synthetic construct
TYYNEEQ

SEQ ID NO: 29621 - protein, 7 aa, synthetic construct
NRTYSHA

SEQ ID NO: 29622 - protein, 7 aa, synthetic construct
HMTNEIT

SEQ ID NO: 29623 - protein, 7 aa, synthetic construct
ITEHLVA

SEQ ID NO: 29624 - protein, 7 aa, synthetic construct
MHDPQAI

SEQ ID NO: 29625 - protein, 7 aa, synthetic construct
INVVRGL

SEQ ID NO: 29626 - protein, 7 aa, synthetic construct
FTNNILI

SEQ ID NO: 29627 - protein, 7 aa, synthetic construct
SADFKDS

SEQ ID NO: 29628 - protein, 7 aa, synthetic construct
TPQDKTW

SEQ ID NO: 29629 - protein, 7 aa, synthetic construct
ADPDRPH

SEQ ID NO: 29630 - protein, 7 aa, synthetic construct
HSHLMDS

SEQ ID NO: 29631 - protein, 7 aa, synthetic construct
TPASSLY

SEQ ID NO: 29632 - protein, 7 aa, synthetic construct
TYYIREE

SEQ ID NO: 29633 - protein, 7 aa, synthetic construct
NPDTSTQ

SEQ ID NO: 29634 - protein, 7 aa, synthetic construct
RFGLDAV

SEQ ID NO: 29635 - protein, 7 aa, synthetic construct
QHLDMTI

SEQ ID NO: 29636 - protein, 7 aa, synthetic construct
EVDSSVG

SEQ ID NO: 29637 - protein, 7 aa, synthetic construct
MDLPHSS

SEQ ID NO: 29638 - protein, 7 aa, synthetic construct
DVPVMRV

SEQ ID NO: 29639 - protein, 7 aa, synthetic construct
PQEKVKF

SEQ ID NO: 29640 - protein, 7 aa, synthetic construct
AMGGAVL

SEQ ID NO: 29641 - protein, 7 aa, synthetic construct
GDNHHYP

SEQ ID NO: 29642 - protein, 7 aa, synthetic construct
NVAMDYE

SEQ ID NO: 29643 - protein, 7 aa, synthetic construct
SEPLPTP

SEQ ID NO: 29644 - protein, 7 aa, synthetic construct
VGGDGLS

SEQ ID NO: 29645 - protein, 7 aa, synthetic construct
PHLPKAN

SEQ ID NO: 29646 - protein, 7 aa, synthetic construct
ADLANIA

SEQ ID NO: 29647 - protein, 7 aa, synthetic construct
DRPAEHE

SEQ ID NO: 29648 - protein, 7 aa, synthetic construct
AQETHYT

SEQ ID NO: 29649 - protein, 7 aa, synthetic construct
RQTPEMR

SEQ ID NO: 29650 - protein, 7 aa, synthetic construct
HEPGDGI

SEQ ID NO: 29651 - protein, 7 aa, synthetic construct
SHTLQNR

SEQ ID NO: 29652 - protein, 7 aa, synthetic construct
TEMTNMH

SEQ ID NO: 29653 - protein, 7 aa, synthetic construct
DKQFDRQ

SEQ ID NO: 29654 - protein, 7 aa, synthetic construct
AEKALPD

SEQ ID NO: 29655 - protein, 7 aa, synthetic construct
WIHRDME

SEQ ID NO: 29656 - protein, 7 aa, synthetic construct
VTAQDDT

SEQ ID NO: 29657 - protein, 7 aa, synthetic construct
GFYDVSP

SEQ ID NO: 29658 - protein, 7 aa, synthetic construct
INEMVSS

SEQ ID NO: 29659 - protein, 7 aa, synthetic construct
DQVDAPL

SEQ ID NO: 29660 - protein, 7 aa, synthetic construct
YKDPNYL

SEQ ID NO: 29661 - protein, 7 aa, synthetic construct
PQNSFKV

SEQ ID NO: 29662 - protein, 7 aa, synthetic construct
RDTIPKH

SEQ ID NO: 29663 - protein, 7 aa, synthetic construct
ANHAEGY

SEQ ID NO: 29664 - protein, 7 aa, synthetic construct
QDRQGPD

SEQ ID NO: 29665 - protein, 7 aa, synthetic construct
PMHQTRQ

SEQ ID NO: 29666 - protein, 7 aa, synthetic construct
PRHSIHP

SEQ ID NO: 29667 - protein, 7 aa, synthetic construct
TVMRVAT

SEQ ID NO: 29668 - protein, 7 aa, synthetic construct
EKFSQTM

SEQ ID NO: 29669 - protein, 7 aa, synthetic construct
YAQLQAI

SEQ ID NO: 29670 - protein, 7 aa, synthetic construct
EPHPEHG

SEQ ID NO: 29671 - protein, 7 aa, synthetic construct
QEGQNPI

SEQ ID NO: 29672 - protein, 7 aa, synthetic construct
NQNCGEC

SEQ ID NO: 29673 - protein, 7 aa, synthetic construct
IPDQPQH

SEQ ID NO: 29674 - protein, 7 aa, synthetic construct
LPANNQQ

SEQ ID NO: 29675 - protein, 7 aa, synthetic construct
YTKDHVE

SEQ ID NO: 29676 - protein, 7 aa, synthetic construct
DAPVPHS

SEQ ID NO: 29677 - protein, 7 aa, synthetic construct
FYPRLDA

SEQ ID NO: 29678 - protein, 7 aa, synthetic construct
YGVRHLP

SEQ ID NO: 29679 - protein, 7 aa, synthetic construct
TQGWERT

SEQ ID NO: 29680 - protein, 7 aa, synthetic construct
IGVANSR

SEQ ID NO: 29681 - protein, 7 aa, synthetic construct
LSNKLDP

SEQ ID NO: 29682 - protein, 7 aa, synthetic construct
NDRTADE

SEQ ID NO: 29683 - protein, 7 aa, synthetic construct
ANGFMET

SEQ ID NO: 29684 - protein, 7 aa, synthetic construct
SRVSFDG

SEQ ID NO: 29685 - protein, 7 aa, synthetic construct
QELMMRG

SEQ ID NO: 29686 - protein, 7 aa, synthetic construct
WNGASIS

SEQ ID NO: 29687 - protein, 7 aa, synthetic construct
FSTIRLN

SEQ ID NO: 29688 - protein, 7 aa, synthetic construct
RVDPVRS

SEQ ID NO: 29689 - protein, 7 aa, synthetic construct
IQGQEHT

SEQ ID NO: 29690 - protein, 7 aa, synthetic construct
IHEITGN

SEQ ID NO: 29691 - protein, 7 aa, synthetic construct
GDNFDAL

SEQ ID NO: 29692 - protein, 7 aa, synthetic construct
GMQDGPL

SEQ ID NO: 29693 - protein, 7 aa, synthetic construct
VPAFSDT

SEQ ID NO: 29694 - protein, 7 aa, synthetic construct
FVPHEMV

SEQ ID NO: 29695 - protein, 7 aa, synthetic construct
GNDAMYP

SEQ ID NO: 29696 - protein, 7 aa, synthetic construct
MEPATHE

SEQ ID NO: 29697 - protein, 7 aa, synthetic construct
PNGRHIV

SEQ ID NO: 29698 - protein, 7 aa, synthetic construct
SASEMPP

SEQ ID NO: 29699 - protein, 7 aa, synthetic construct
DGPKEIQ

SEQ ID NO: 29700 - protein, 7 aa, synthetic construct
HLKHIEY

SEQ ID NO: 29701 - protein, 7 aa, synthetic construct
AGTHFNG

SEQ ID NO: 29702 - protein, 7 aa, synthetic construct
FMGPGSI

SEQ ID NO: 29703 - protein, 7 aa, synthetic construct
SPDLDKG

SEQ ID NO: 29704 - protein, 7 aa, synthetic construct
TPAAYGM

SEQ ID NO: 29705 - protein, 7 aa, synthetic construct
WQEQFQS

SEQ ID NO: 29706 - protein, 7 aa, synthetic construct
NNTSYRS

SEQ ID NO: 29707 - protein, 7 aa, synthetic construct
TDTHDGD

SEQ ID NO: 29708 - protein, 7 aa, synthetic construct
PPTMEST

SEQ ID NO: 29709 - protein, 7 aa, synthetic construct
SNMFTVE

SEQ ID NO: 29710 - protein, 7 aa, synthetic construct
KESKVMM

SEQ ID NO: 29711 - protein, 7 aa, synthetic construct
QSPMKQT

SEQ ID NO: 29712 - protein, 7 aa, synthetic construct
KHDLAKM

SEQ ID NO: 29713 - protein, 7 aa, synthetic construct
TNAQMEY

SEQ ID NO: 29714 - protein, 7 aa, synthetic construct
NKTDSIY

SEQ ID NO: 29715 - protein, 7 aa, synthetic construct
NEEYIRM

SEQ ID NO: 29716 - protein, 7 aa, synthetic construct
HWNDQED

SEQ ID NO: 29717 - protein, 7 aa, synthetic construct
GEYYPIP

SEQ ID NO: 29718 - protein, 7 aa, synthetic construct
LTAIPEE

SEQ ID NO: 29719 - protein, 7 aa, synthetic construct
MLNPHQH

SEQ ID NO: 29720 - protein, 7 aa, synthetic construct
VIGIGMH

SEQ ID NO: 29721 - protein, 7 aa, synthetic construct
KTTYDNE

SEQ ID NO: 29722 - protein, 7 aa, synthetic construct
RMFEEHN

SEQ ID NO: 29723 - protein, 7 aa, synthetic construct
PQHFTSS

SEQ ID NO: 29724 - protein, 7 aa, synthetic construct
WTGNKGY

SEQ ID NO: 29725 - protein, 7 aa, synthetic construct
ISEIRFE

SEQ ID NO: 29726 - protein, 7 aa, synthetic construct
YEKSSDD

SEQ ID NO: 29727 - protein, 7 aa, synthetic construct
DPWTHSS

SEQ ID NO: 29728 - protein, 7 aa, synthetic construct
GMNANTQ

SEQ ID NO: 29729 - protein, 7 aa, synthetic construct
ENIAAKV

SEQ ID NO: 29730 - protein, 7 aa, synthetic construct
QYERDTV

SEQ ID NO: 29731 - protein, 7 aa, synthetic construct
LNKHGDV

SEQ ID NO: 29732 - protein, 7 aa, synthetic construct
WFKQQLP

SEQ ID NO: 29733 - protein, 7 aa, synthetic construct
TDYEMRL

SEQ ID NO: 29734 - protein, 7 aa, synthetic construct
GRNDTGQ

SEQ ID NO: 29735 - protein, 7 aa, synthetic construct
RDTHREH

SEQ ID NO: 29736 - protein, 7 aa, synthetic construct
WAAFLED

SEQ ID NO: 29737 - protein, 7 aa, synthetic construct
PAKDMYR

SEQ ID NO: 29738 - protein, 7 aa, synthetic construct
HWADRSA

SEQ ID NO: 29739 - protein, 7 aa, synthetic construct
LQYTEAM

SEQ ID NO: 29740 - protein, 7 aa, synthetic construct
YVLPMKP

SEQ ID NO: 29741 - protein, 7 aa, synthetic construct
VVQHLEG

SEQ ID NO: 29742 - protein, 7 aa, synthetic construct
WGMLERE

SEQ ID NO: 29743 - protein, 7 aa, synthetic construct
KAAYDDL

SEQ ID NO: 29744 - protein, 7 aa, synthetic construct
DVKTIGF

SEQ ID NO: 29745 - protein, 7 aa, synthetic construct
VWQGQIV

SEQ ID NO: 29746 - protein, 7 aa, synthetic construct
KFNPVKS

SEQ ID NO: 29747 - protein, 7 aa, synthetic construct
MTFTRAD

SEQ ID NO: 29748 - protein, 7 aa, synthetic construct
TEGMSAV

SEQ ID NO: 29749 - protein, 7 aa, synthetic construct
WGDQTPH

SEQ ID NO: 29750 - protein, 7 aa, synthetic construct
NNIVVRS

SEQ ID NO: 29751 - protein, 7 aa, synthetic construct
ESPTIME

SEQ ID NO: 29752 - protein, 7 aa, synthetic construct
ISSWEAV

SEQ ID NO: 29753 - protein, 7 aa, synthetic construct
AYHDEHD

SEQ ID NO: 29754 - protein, 7 aa, synthetic construct
PASPSFT

SEQ ID NO: 29755 - protein, 7 aa, synthetic construct
LTKTMIY

SEQ ID NO: 29756 - protein, 7 aa, synthetic construct
YYHNATQ

SEQ ID NO: 29757 - protein, 7 aa, synthetic construct
TYERDQI

SEQ ID NO: 29758 - protein, 7 aa, synthetic construct
NQWDHDG

SEQ ID NO: 29759 - protein, 7 aa, synthetic construct
LFTTVLD

SEQ ID NO: 29760 - protein, 7 aa, synthetic construct
IWEDKNF

SEQ ID NO: 29761 - protein, 7 aa, synthetic construct
LGMAITV

SEQ ID NO: 29762 - protein, 7 aa, synthetic construct
WANPHKN

SEQ ID NO: 29763 - protein, 7 aa, synthetic construct
GPHAASI

SEQ ID NO: 29764 - protein, 7 aa, synthetic construct
FHMNLDD

SEQ ID NO: 29765 - protein, 7 aa, synthetic construct
KPYSGQP

SEQ ID NO: 29766 - protein, 7 aa, synthetic construct
RGGINFP

SEQ ID NO: 29767 - protein, 7 aa, synthetic construct
EKTPGSE

SEQ ID NO: 29768 - protein, 7 aa, synthetic construct
AEPGIVH

SEQ ID NO: 29769 - protein, 7 aa, synthetic construct
FQSAFPV

SEQ ID NO: 29770 - protein, 7 aa, synthetic construct
GYKRPET

SEQ ID NO: 29771 - protein, 7 aa, synthetic construct
KASPRHE

SEQ ID NO: 29772 - protein, 7 aa, synthetic construct
LDTNADK

SEQ ID NO: 29773 - protein, 7 aa, synthetic construct
IETPNNT

SEQ ID NO: 29774 - protein, 7 aa, synthetic construct
NGLTQIT

SEQ ID NO: 29775 - protein, 7 aa, synthetic construct
KEQPQYP

SEQ ID NO: 29776 - protein, 7 aa, synthetic construct
NTVHDGH

SEQ ID NO: 29777 - protein, 7 aa, synthetic construct
RQVEHTF

SEQ ID NO: 29778 - protein, 7 aa, synthetic construct
GLLPSQG

SEQ ID NO: 29779 - protein, 7 aa, synthetic construct
IQSLNHN

SEQ ID NO: 29780 - protein, 7 aa, synthetic construct
HGPHPTD

SEQ ID NO: 29781 - protein, 7 aa, synthetic construct
LFPLKGP

SEQ ID NO: 29782 - protein, 7 aa, synthetic construct
LTPPSTE

SEQ ID NO: 29783 - protein, 7 aa, synthetic construct
ELQQDRG

SEQ ID NO: 29784 - protein, 7 aa, synthetic construct
AEVHRVF

SEQ ID NO: 29785 - protein, 7 aa, synthetic construct
SVPPYDV

SEQ ID NO: 29786 - protein, 7 aa, synthetic construct
QQGNENP

SEQ ID NO: 29787 - protein, 7 aa, synthetic construct
MDNPIEF

SEQ ID NO: 29788 - protein, 7 aa, synthetic construct
GKSLEDA

SEQ ID NO: 29789 - protein, 7 aa, synthetic construct
TSEREYV

SEQ ID NO: 29790 - protein, 7 aa, synthetic construct
RPIKGES

SEQ ID NO: 29791 - protein, 7 aa, synthetic construct
MTQEDTI

SEQ ID NO: 29792 - protein, 7 aa, synthetic construct
HENIQGI

SEQ ID NO: 29793 - protein, 7 aa, synthetic construct
HEYHTQR

SEQ ID NO: 29794 - protein, 7 aa, synthetic construct
VETTGEA

SEQ ID NO: 29795 - protein, 7 aa, synthetic construct
KKAEHVV

SEQ ID NO: 29796 - protein, 7 aa, synthetic construct
HQKPEEQ

SEQ ID NO: 29797 - protein, 7 aa, synthetic construct
YQEKIDK

SEQ ID NO: 29798 - protein, 7 aa, synthetic construct
KGEDKGI

SEQ ID NO: 29799 - protein, 7 aa, synthetic construct
HDLTSDP

SEQ ID NO: 29800 - protein, 7 aa, synthetic construct
TYVSDKY

SEQ ID NO: 29801 - protein, 7 aa, synthetic construct
PNPQEIV

SEQ ID NO: 29802 - protein, 7 aa, synthetic construct
AQAEYPH

SEQ ID NO: 29803 - protein, 7 aa, synthetic construct
WKEMTDP

SEQ ID NO: 29804 - protein, 7 aa, synthetic construct
AVFEPKD

SEQ ID NO: 29805 - protein, 7 aa, synthetic construct
LKDTHKM

SEQ ID NO: 29806 - protein, 7 aa, synthetic construct
GTRSMAH

SEQ ID NO: 29807 - protein, 7 aa, synthetic construct
DMIEQRV

SEQ ID NO: 29808 - protein, 7 aa, synthetic construct
SVIASQR

SEQ ID NO: 29809 - protein, 7 aa, synthetic construct
IYQEISN

SEQ ID NO: 29810 - protein, 7 aa, synthetic construct
PVGDGYH

SEQ ID NO: 29811 - protein, 7 aa, synthetic construct
RDEMTPV

SEQ ID NO: 29812 - protein, 7 aa, synthetic construct
PERNDPQ

SEQ ID NO: 29813 - protein, 7 aa, synthetic construct
HQVSGLA

SEQ ID NO: 29814 - protein, 7 aa, synthetic construct
TNYDQAI

SEQ ID NO: 29815 - protein, 7 aa, synthetic construct
LPDHAIH

SEQ ID NO: 29816 - protein, 7 aa, synthetic construct
FLGAFME

SEQ ID NO: 29817 - protein, 7 aa, synthetic construct
YEGIYIP

SEQ ID NO: 29818 - protein, 7 aa, synthetic construct
VPDINLN

SEQ ID NO: 29819 - protein, 7 aa, synthetic construct
KRYPMDF

SEQ ID NO: 29820 - protein, 7 aa, synthetic construct
VLEAQYP

SEQ ID NO: 29821 - protein, 7 aa, synthetic construct
DYGQRNE

SEQ ID NO: 29822 - protein, 7 aa, synthetic construct
EYKPRQS

SEQ ID NO: 29823 - protein, 7 aa, synthetic construct
TNIQLDE

SEQ ID NO: 29824 - protein, 7 aa, synthetic construct
MATDIHR

SEQ ID NO: 29825 - protein, 7 aa, synthetic construct
EYMSPLR

SEQ ID NO: 29826 - protein, 7 aa, synthetic construct
TLAEVQR

SEQ ID NO: 29827 - protein, 7 aa, synthetic construct
QIQNNYD

SEQ ID NO: 29828 - protein, 7 aa, synthetic construct
FPHEIQG

SEQ ID NO: 29829 - protein, 7 aa, synthetic construct
EYPHVMS

SEQ ID NO: 29830 - protein, 7 aa, synthetic construct
HVLNARV

SEQ ID NO: 29831 - protein, 7 aa, synthetic construct
GKNAPFV

SEQ ID NO: 29832 - protein, 7 aa, synthetic construct
YAEPQRG

SEQ ID NO: 29833 - protein, 7 aa, synthetic construct
QNIHALQ

SEQ ID NO: 29834 - protein, 7 aa, synthetic construct
MNLGDDV

SEQ ID NO: 29835 - protein, 7 aa, synthetic construct
IDNSMHD

SEQ ID NO: 29836 - protein, 7 aa, synthetic construct
ETNMVLH

SEQ ID NO: 29837 - protein, 7 aa, synthetic construct
VHDIHPM

SEQ ID NO: 29838 - protein, 7 aa, synthetic construct
IDTFIAN

SEQ ID NO: 29839 - protein, 7 aa, synthetic construct
ATNIALN

SEQ ID NO: 29840 - protein, 7 aa, synthetic construct
NIQFPPD

SEQ ID NO: 29841 - protein, 7 aa, synthetic construct
KNDTELT

SEQ ID NO: 29842 - protein, 7 aa, synthetic construct
PDVDKDT

SEQ ID NO: 29843 - protein, 7 aa, synthetic construct
YPELYGD

SEQ ID NO: 29844 - protein, 7 aa, synthetic construct
ASHHPKS

SEQ ID NO: 29845 - protein, 7 aa, synthetic construct
KTYSDEY

SEQ ID NO: 29846 - protein, 7 aa, synthetic construct
WNQNKAN

SEQ ID NO: 29847 - protein, 7 aa, synthetic construct
ILPTQQI

SEQ ID NO: 29848 - protein, 7 aa, synthetic construct
DEFLKDG

SEQ ID NO: 29849 - protein, 7 aa, synthetic construct
LMPDSNL

SEQ ID NO: 29850 - protein, 7 aa, synthetic construct
RIHSMGT

SEQ ID NO: 29851 - protein, 7 aa, synthetic construct
EQRDLPE

SEQ ID NO: 29852 - protein, 7 aa, synthetic construct
STDEESS

SEQ ID NO: 29853 - protein, 7 aa, synthetic construct
MRNMQYP

SEQ ID NO: 29854 - protein, 7 aa, synthetic construct
GGEWEPQ

SEQ ID NO: 29855 - protein, 7 aa, synthetic construct
YFQSDNI

SEQ ID NO: 29856 - protein, 7 aa, synthetic construct
VFDMRMS

SEQ ID NO: 29857 - protein, 7 aa, synthetic construct
WGQNWDA

SEQ ID NO: 29858 - protein, 7 aa, synthetic construct
KGIIFEP

SEQ ID NO: 29859 - protein, 7 aa, synthetic construct
AEVWMND

SEQ ID NO: 29860 - protein, 7 aa, synthetic construct
SKTDQES

SEQ ID NO: 29861 - protein, 7 aa, synthetic construct
MEKSVQP

SEQ ID NO: 29862 - protein, 7 aa, synthetic construct
FEMAGPP

SEQ ID NO: 29863 - protein, 7 aa, synthetic construct
PIGDSTD

SEQ ID NO: 29864 - protein, 7 aa, synthetic construct
QENHLDE

SEQ ID NO: 29865 - protein, 7 aa, synthetic construct
LQFNTGN

SEQ ID NO: 29866 - protein, 7 aa, synthetic construct
EKGTAKY

SEQ ID NO: 29867 - protein, 7 aa, synthetic construct
FTAHHPI

SEQ ID NO: 29868 - protein, 7 aa, synthetic construct
ERYTTDP

SEQ ID NO: 29869 - protein, 7 aa, synthetic construct
EAHQGYG

SEQ ID NO: 29870 - protein, 7 aa, synthetic construct
APRDLDI

SEQ ID NO: 29871 - protein, 7 aa, synthetic construct
QLDTMSI

SEQ ID NO: 29872 - protein, 7 aa, synthetic construct
KLDRIPE

SEQ ID NO: 29873 - protein, 7 aa, synthetic construct
QMTKYNT

SEQ ID NO: 29874 - protein, 7 aa, synthetic construct
QSQPFPV

SEQ ID NO: 29875 - protein, 7 aa, synthetic construct
MVGPDQN

SEQ ID NO: 29876 - protein, 7 aa, synthetic construct
DSPVKNV

SEQ ID NO: 29877 - protein, 7 aa, synthetic construct
SYGMDAD

SEQ ID NO: 29878 - protein, 7 aa, synthetic construct
IQNDSHW

SEQ ID NO: 29879 - protein, 7 aa, synthetic construct
TSHTERD

SEQ ID NO: 29880 - protein, 7 aa, synthetic construct
IHNEGWT

SEQ ID NO: 29881 - protein, 7 aa, synthetic construct
DLQTVTK

SEQ ID NO: 29882 - protein, 7 aa, synthetic construct
WQRLTTG

SEQ ID NO: 29883 - protein, 7 aa, synthetic construct
FLDSVHK

SEQ ID NO: 29884 - protein, 7 aa, synthetic construct
VRMHPVG

SEQ ID NO: 29885 - protein, 7 aa, synthetic construct
PHHGNVH

SEQ ID NO: 29886 - protein, 7 aa, synthetic construct
NLFANVN

SEQ ID NO: 29887 - protein, 7 aa, synthetic construct
PEEFKKT

SEQ ID NO: 29888 - protein, 7 aa, synthetic construct
NQDTQPL

SEQ ID NO: 29889 - protein, 7 aa, synthetic construct
DWEERSI

SEQ ID NO: 29890 - protein, 7 aa, synthetic construct
YHVAMSK

SEQ ID NO: 29891 - protein, 7 aa, synthetic construct
FMIQKNT

SEQ ID NO: 29892 - protein, 7 aa, synthetic construct
MSAFNLE

SEQ ID NO: 29893 - protein, 7 aa, synthetic construct
EDEYFDA

SEQ ID NO: 29894 - protein, 7 aa, synthetic construct
KDETVPV

SEQ ID NO: 29895 - protein, 7 aa, synthetic construct
AFEQTSR

SEQ ID NO: 29896 - protein, 7 aa, synthetic construct
GNRPIFG

SEQ ID NO: 29897 - protein, 7 aa, synthetic construct
DTYRNFA

SEQ ID NO: 29898 - protein, 7 aa, synthetic construct
YDIEMAP

SEQ ID NO: 29899 - protein, 7 aa, synthetic construct
IMQSDNF

SEQ ID NO: 29900 - protein, 7 aa, synthetic construct
PLNYTGE

SEQ ID NO: 29901 - protein, 7 aa, synthetic construct
MMQSDVI

SEQ ID NO: 29902 - protein, 7 aa, synthetic construct
YIPMSID

SEQ ID NO: 29903 - protein, 7 aa, synthetic construct
REQYNHD

SEQ ID NO: 29904 - protein, 7 aa, synthetic construct
KGVLPDS

SEQ ID NO: 29905 - protein, 7 aa, synthetic construct
VISATHP

SEQ ID NO: 29906 - protein, 7 aa, synthetic construct
ENHGMER

SEQ ID NO: 29907 - protein, 7 aa, synthetic construct
YVPFENN

SEQ ID NO: 29908 - protein, 7 aa, synthetic construct
WNAQAFT

SEQ ID NO: 29909 - protein, 7 aa, synthetic construct
EQQMDNP

SEQ ID NO: 29910 - protein, 7 aa, synthetic construct
FQNPGGD

SEQ ID NO: 29911 - protein, 7 aa, synthetic construct
TGAPDVR

SEQ ID NO: 29912 - protein, 7 aa, synthetic construct
FESSEFI

SEQ ID NO: 29913 - protein, 7 aa, synthetic construct
RDTKIIQ

SEQ ID NO: 29914 - protein, 7 aa, synthetic construct
TRTYKHE

SEQ ID NO: 29915 - protein, 7 aa, synthetic construct
MAAANDV

SEQ ID NO: 29916 - protein, 7 aa, synthetic construct
YMIDDEK

SEQ ID NO: 29917 - protein, 7 aa, synthetic construct
NDLGDRM

SEQ ID NO: 29918 - protein, 7 aa, synthetic construct
QHSQNVR

SEQ ID NO: 29919 - protein, 7 aa, synthetic construct
PMTYPHS

SEQ ID NO: 29920 - protein, 7 aa, synthetic construct
EQIAKEI

SEQ ID NO: 29921 - protein, 7 aa, synthetic construct
RENHDYT

SEQ ID NO: 29922 - protein, 7 aa, synthetic construct
SQIRADL

SEQ ID NO: 29923 - protein, 7 aa, synthetic construct
PNNGNHN

SEQ ID NO: 29924 - protein, 7 aa, synthetic construct
GTHPYAE

SEQ ID NO: 29925 - protein, 7 aa, synthetic construct
QETAQIE

SEQ ID NO: 29926 - protein, 7 aa, synthetic construct
YPSRQMH

SEQ ID NO: 29927 - protein, 7 aa, synthetic construct
GYYDVIE

SEQ ID NO: 29928 - protein, 7 aa, synthetic construct
QGQSVHR

SEQ ID NO: 29929 - protein, 7 aa, synthetic construct
PKGENEY

SEQ ID NO: 29930 - protein, 7 aa, synthetic construct
NIVFNEE

SEQ ID NO: 29931 - protein, 7 aa, synthetic construct
VTEQNNV

SEQ ID NO: 29932 - protein, 7 aa, synthetic construct
IDLRHTV

SEQ ID NO: 29933 - protein, 7 aa, synthetic construct
AKENYRS

SEQ ID NO: 29934 - protein, 7 aa, synthetic construct
FTVLEEM

SEQ ID NO: 29935 - protein, 7 aa, synthetic construct
EQYPNQD

SEQ ID NO: 29936 - protein, 7 aa, synthetic construct
DNRTETY

SEQ ID NO: 29937 - protein, 7 aa, synthetic construct
KLWNGDM

SEQ ID NO: 29938 - protein, 7 aa, synthetic construct
RQPAMMY

SEQ ID NO: 29939 - protein, 7 aa, synthetic construct
LSSPYGH

SEQ ID NO: 29940 - protein, 7 aa, synthetic construct
EQMNMGI

SEQ ID NO: 29941 - protein, 7 aa, synthetic construct
DWADHDS

SEQ ID NO: 29942 - protein, 7 aa, synthetic construct
KSHLLSE

SEQ ID NO: 29943 - protein, 7 aa, synthetic construct
CERASLP

SEQ ID NO: 29944 - protein, 7 aa, synthetic construct
DGERLWD

SEQ ID NO: 29945 - protein, 7 aa, synthetic construct
WADVRRA

SEQ ID NO: 29946 - protein, 7 aa, synthetic construct
AYMVNEI

SEQ ID NO: 29947 - protein, 7 aa, synthetic construct
FVDDRDV

SEQ ID NO: 29948 - protein, 7 aa, synthetic construct
GKDGQYD

SEQ ID NO: 29949 - protein, 7 aa, synthetic construct
PVPQGMI

SEQ ID NO: 29950 - protein, 7 aa, synthetic construct
NSASRLY

SEQ ID NO: 29951 - protein, 7 aa, synthetic construct
EMNAGTI

SEQ ID NO: 29952 - protein, 7 aa, synthetic construct
PEEKDYH

SEQ ID NO: 29953 - protein, 7 aa, synthetic construct
SKFEMQN

SEQ ID NO: 29954 - protein, 7 aa, synthetic construct
QYVGMQE

SEQ ID NO: 29955 - protein, 7 aa, synthetic construct
APETGRW

SEQ ID NO: 29956 - protein, 7 aa, synthetic construct
DKDEKGI

SEQ ID NO: 29957 - protein, 7 aa, synthetic construct
FGLHDLD

SEQ ID NO: 29958 - protein, 7 aa, synthetic construct
ESVHEET

SEQ ID NO: 29959 - protein, 7 aa, synthetic construct
WTVQSDH

SEQ ID NO: 29960 - protein, 7 aa, synthetic construct
PIQPAFS

SEQ ID NO: 29961 - protein, 7 aa, synthetic construct
RYADDYD

SEQ ID NO: 29962 - protein, 7 aa, synthetic construct
MTQETEK

SEQ ID NO: 29963 - protein, 7 aa, synthetic construct
YGTMATA

SEQ ID NO: 29964 - protein, 7 aa, synthetic construct
PLVYEEL

SEQ ID NO: 29965 - protein, 7 aa, synthetic construct
NVGMRTI

SEQ ID NO: 29966 - protein, 7 aa, synthetic construct
AKVAIDS

SEQ ID NO: 29967 - protein, 7 aa, synthetic construct
QGGHDLE

SEQ ID NO: 29968 - protein, 7 aa, synthetic construct
EETHQDV

SEQ ID NO: 29969 - protein, 7 aa, synthetic construct
TMPTEQN

SEQ ID NO: 29970 - protein, 7 aa, synthetic construct
LFEKVPL

SEQ ID NO: 29971 - protein, 7 aa, synthetic construct
MSDNQTK

SEQ ID NO: 29972 - protein, 7 aa, synthetic construct
RDMFESR

SEQ ID NO: 29973 - protein, 7 aa, synthetic construct
RHIAAKE

SEQ ID NO: 29974 - protein, 7 aa, synthetic construct
MVSTAID

SEQ ID NO: 29975 - protein, 7 aa, synthetic construct
DSQGQSG

SEQ ID NO: 29976 - protein, 7 aa, synthetic construct
GSMGSET

SEQ ID NO: 29977 - protein, 7 aa, synthetic construct
TVDTKMW

SEQ ID NO: 29978 - protein, 7 aa, synthetic construct
LPHQYQQ

SEQ ID NO: 29979 - protein, 7 aa, synthetic construct
IPQLFES

SEQ ID NO: 29980 - protein, 7 aa, synthetic construct
KSDTGEH

SEQ ID NO: 29981 - protein, 7 aa, synthetic construct
DSEMNGK

SEQ ID NO: 29982 - protein, 7 aa, synthetic construct
FTAGEDN

SEQ ID NO: 29983 - protein, 7 aa, synthetic construct
KEQVLIH

SEQ ID NO: 29984 - protein, 7 aa, synthetic construct
GIPPVTM

SEQ ID NO: 29985 - protein, 7 aa, synthetic construct
VRVNEKW

SEQ ID NO: 29986 - protein, 7 aa, synthetic construct
DSYDQNR

SEQ ID NO: 29987 - protein, 7 aa, synthetic construct
GNQSVDN

SEQ ID NO: 29988 - protein, 7 aa, synthetic construct
RVVDVNY

SEQ ID NO: 29989 - protein, 7 aa, synthetic construct
IEVNGSA

SEQ ID NO: 29990 - protein, 7 aa, synthetic construct
VSDVGDS

SEQ ID NO: 29991 - protein, 7 aa, synthetic construct
KSDVMYQ

SEQ ID NO: 29992 - protein, 7 aa, synthetic construct
AKFNAHT

SEQ ID NO: 29993 - protein, 7 aa, synthetic construct
HTHGKSN

SEQ ID NO: 29994 - protein, 7 aa, synthetic construct
NISDVAG

SEQ ID NO: 29995 - protein, 7 aa, synthetic construct
QNIAHEQ

SEQ ID NO: 29996 - protein, 7 aa, synthetic construct
TPTMIAV

SEQ ID NO: 29997 - protein, 7 aa, synthetic construct
EGFRQMQ

SEQ ID NO: 29998 - protein, 7 aa, synthetic construct
FGTDYPS

SEQ ID NO: 29999 - protein, 7 aa, synthetic construct
LPLMASK

SEQ ID NO: 30000 - protein, 7 aa, synthetic construct
HDEIAPP

SEQ ID NO: 30001 - protein, 7 aa, synthetic construct
MSAGRAS

SEQ ID NO: 30002 - protein, 7 aa, synthetic construct
KYDKPGM

SEQ ID NO: 30003 - protein, 7 aa, synthetic construct
VRNNAAM

SEQ ID NO: 30004 - protein, 7 aa, synthetic construct
KYNKDND

SEQ ID NO: 30005 - protein, 7 aa, synthetic construct
HPIKQNP

SEQ ID NO: 30006 - protein, 7 aa, synthetic construct
FKAGNAG

SEQ ID NO: 30007 - protein, 7 aa, synthetic construct
RMSNSNA

SEQ ID NO: 30008 - protein, 7 aa, synthetic construct
NQLHRAD

SEQ ID NO: 30009 - protein, 7 aa, synthetic construct
HSFKQVA

SEQ ID NO: 30010 - protein, 7 aa, synthetic construct
GAAHYSG

SEQ ID NO: 30011 - protein, 7 aa, synthetic construct
NTQKTQG

SEQ ID NO: 30012 - protein, 7 aa, synthetic construct
ATMKTAL

SEQ ID NO: 30013 - protein, 7 aa, synthetic construct
NKASVQA

SEQ ID NO: 30014 - protein, 7 aa, synthetic construct
GIKNTSS

SEQ ID NO: 30015 - protein, 7 aa, synthetic construct
RTPQQAA

SEQ ID NO: 30016 - protein, 7 aa, synthetic construct
KKMHEAG

SEQ ID NO: 30017 - protein, 7 aa, synthetic construct
ITMKSLG

SEQ ID NO: 30018 - protein, 7 aa, synthetic construct
RANTGFN

SEQ ID NO: 30019 - protein, 7 aa, synthetic construct
NFPGSMA

SEQ ID NO: 30020 - protein, 7 aa, synthetic construct
KVTHNDR

SEQ ID NO: 30021 - protein, 7 aa, synthetic construct
INASNKG

SEQ ID NO: 30022 - protein, 7 aa, synthetic construct
NQQQRSA

SEQ ID NO: 30023 - protein, 7 aa, synthetic construct
KRMNIDD

SEQ ID NO: 30024 - protein, 7 aa, synthetic construct
NKPTSNN

SEQ ID NO: 30025 - protein, 7 aa, synthetic construct
TQRMTQA

SEQ ID NO: 30026 - protein, 7 aa, synthetic construct
SGTRTGP

SEQ ID NO: 30027 - protein, 7 aa, synthetic construct
NNLQHRE

SEQ ID NO: 30028 - protein, 7 aa, synthetic construct
TKDRVQG

SEQ ID NO: 30029 - protein, 7 aa, synthetic construct
FAGKVNS

SEQ ID NO: 30030 - protein, 7 aa, synthetic construct
KKSSDDH

SEQ ID NO: 30031 - protein, 7 aa, synthetic construct
WQQWGKD

SEQ ID NO: 30032 - protein, 7 aa, synthetic construct
RNSTMTA

SEQ ID NO: 30033 - protein, 7 aa, synthetic construct
TSKSTQP

SEQ ID NO: 30034 - protein, 7 aa, synthetic construct
RGTGTAG

SEQ ID NO: 30035 - protein, 7 aa, synthetic construct
PKTGSVG

SEQ ID NO: 30036 - protein, 7 aa, synthetic construct
QQRGNQG

SEQ ID NO: 30037 - protein, 7 aa, synthetic construct
RQPGAGN

SEQ ID NO: 30038 - protein, 7 aa, synthetic construct
KGSTAPG

SEQ ID NO: 30039 - protein, 7 aa, synthetic construct
SRLQHSS

SEQ ID NO: 30040 - protein, 7 aa, synthetic construct
GPKQASN

SEQ ID NO: 30041 - protein, 7 aa, synthetic construct
AVGNTKT

SEQ ID NO: 30042 - protein, 7 aa, synthetic construct
MNGSRGA

SEQ ID NO: 30043 - protein, 7 aa, synthetic construct
NKLTPHM

SEQ ID NO: 30044 - protein, 7 aa, synthetic construct
KGPTAAF

SEQ ID NO: 30045 - protein, 7 aa, synthetic construct
LMTARPS

SEQ ID NO: 30046 - protein, 7 aa, synthetic construct
SRNPSGA

SEQ ID NO: 30047 - protein, 7 aa, synthetic construct
AAFQKAN

SEQ ID NO: 30048 - protein, 7 aa, synthetic construct
TIQTNTR

SEQ ID NO: 30049 - protein, 7 aa, synthetic construct
IGKQNGF

SEQ ID NO: 30050 - protein, 7 aa, synthetic construct
GVSIKIG

SEQ ID NO: 30051 - protein, 7 aa, synthetic construct
KTGVAAG

SEQ ID NO: 30052 - protein, 7 aa, synthetic construct
QHTTLRE

SEQ ID NO: 30053 - protein, 7 aa, synthetic construct
HAYSHTG

SEQ ID NO: 30054 - protein, 7 aa, synthetic construct
GKPHTYG

SEQ ID NO: 30055 - protein, 7 aa, synthetic construct
NVQQKWD

SEQ ID NO: 30056 - protein, 7 aa, synthetic construct
RPNNVGP

SEQ ID NO: 30057 - protein, 7 aa, synthetic construct
IKTTSGA

SEQ ID NO: 30058 - protein, 7 aa, synthetic construct
NHHTGMG

SEQ ID NO: 30059 - protein, 7 aa, synthetic construct
VTASLKG

SEQ ID NO: 30060 - protein, 7 aa, synthetic construct
KPMSGGA

SEQ ID NO: 30061 - protein, 7 aa, synthetic construct
GQRTQIY

SEQ ID NO: 30062 - protein, 7 aa, synthetic construct
DRKQGNV

SEQ ID NO: 30063 - protein, 7 aa, synthetic construct
QTGARAG

SEQ ID NO: 30064 - protein, 7 aa, synthetic construct
LANRNHN

SEQ ID NO: 30065 - protein, 7 aa, synthetic construct
YHQGGVR

SEQ ID NO: 30066 - protein, 7 aa, synthetic construct
FTKLFPS

SEQ ID NO: 30067 - protein, 7 aa, synthetic construct
NKPNIAG

SEQ ID NO: 30068 - protein, 7 aa, synthetic construct
KEKLSAP

SEQ ID NO: 30069 - protein, 7 aa, synthetic construct
HFSSAES

SEQ ID NO: 30070 - protein, 7 aa, synthetic construct
GKVAQGG

SEQ ID NO: 30071 - protein, 7 aa, synthetic construct
RGNFAEF

SEQ ID NO: 30072 - protein, 7 aa, synthetic construct
SPQRSTP

SEQ ID NO: 30073 - protein, 7 aa, synthetic construct
YKQFKNE

SEQ ID NO: 30074 - protein, 7 aa, synthetic construct
TTMRGVG

SEQ ID NO: 30075 - protein, 7 aa, synthetic construct
VATHINS

SEQ ID NO: 30076 - protein, 7 aa, synthetic construct
SRSTNAG

SEQ ID NO: 30077 - protein, 7 aa, synthetic construct
KNPSNPM

SEQ ID NO: 30078 - protein, 7 aa, synthetic construct
RTSNSTG

SEQ ID NO: 30079 - protein, 7 aa, synthetic construct
SQTRDAM

SEQ ID NO: 30080 - protein, 7 aa, synthetic construct
AGNKLPA

SEQ ID NO: 30081 - protein, 7 aa, synthetic construct
NRERTID

SEQ ID NO: 30082 - protein, 7 aa, synthetic construct
TGSTFRN

SEQ ID NO: 30083 - protein, 7 aa, synthetic construct
SIRNASM

SEQ ID NO: 30084 - protein, 7 aa, synthetic construct
FQKPTGG

SEQ ID NO: 30085 - protein, 7 aa, synthetic construct
VRNHQAD

SEQ ID NO: 30086 - protein, 7 aa, synthetic construct
YGAGKSP

SEQ ID NO: 30087 - protein, 7 aa, synthetic construct
MGMKIQG

SEQ ID NO: 30088 - protein, 7 aa, synthetic construct
KFKEPNS

SEQ ID NO: 30089 - protein, 7 aa, synthetic construct
PRKDNQG

SEQ ID NO: 30090 - protein, 7 aa, synthetic construct
TKNIKVE

SEQ ID NO: 30091 - protein, 7 aa, synthetic construct
QSNHNAS

SEQ ID NO: 30092 - protein, 7 aa, synthetic construct
TRPQSTS

SEQ ID NO: 30093 - protein, 7 aa, synthetic construct
KKEGISY

SEQ ID NO: 30094 - protein, 7 aa, synthetic construct
RMGNNLA

SEQ ID NO: 30095 - protein, 7 aa, synthetic construct
RMTGATA

SEQ ID NO: 30096 - protein, 7 aa, synthetic construct
SKGNMGF

SEQ ID NO: 30097 - protein, 7 aa, synthetic construct
QKPSTAM

SEQ ID NO: 30098 - protein, 7 aa, synthetic construct
VKTVGSG

SEQ ID NO: 30099 - protein, 7 aa, synthetic construct
VTNITTG

SEQ ID NO: 30100 - protein, 7 aa, synthetic construct
SQIRPTT

SEQ ID NO: 30101 - protein, 7 aa, synthetic construct
TGTGGKG

SEQ ID NO: 30102 - protein, 7 aa, synthetic construct
TVYAREA

SEQ ID NO: 30103 - protein, 7 aa, synthetic construct
YRPVNAD

SEQ ID NO: 30104 - protein, 7 aa, synthetic construct
GFKQDKV

SEQ ID NO: 30105 - protein, 7 aa, synthetic construct
QLQNKFG

SEQ ID NO: 30106 - protein, 7 aa, synthetic construct
ISQIGGG

SEQ ID NO: 30107 - protein, 7 aa, synthetic construct
IKQGGSG

SEQ ID NO: 30108 - protein, 7 aa, synthetic construct
NAATRAI

SEQ ID NO: 30109 - protein, 7 aa, synthetic construct
SKRETGG

SEQ ID NO: 30110 - protein, 7 aa, synthetic construct
RQGVNIN

SEQ ID NO: 30111 - protein, 7 aa, synthetic construct
GRSGYPI

SEQ ID NO: 30112 - protein, 7 aa, synthetic construct
QGRGEVQ

SEQ ID NO: 30113 - protein, 7 aa, synthetic construct
LNRGTTS

SEQ ID NO: 30114 - protein, 7 aa, synthetic construct
SYGKPML

SEQ ID NO: 30115 - protein, 7 aa, synthetic construct
YKQTQTG

SEQ ID NO: 30116 - protein, 7 aa, synthetic construct
VQKMAAG

SEQ ID NO: 30117 - protein, 7 aa, synthetic construct
LGPRELV

SEQ ID NO: 30118 - protein, 7 aa, synthetic construct
PKTSSVA

SEQ ID NO: 30119 - protein, 7 aa, synthetic construct
SNQRSQP

SEQ ID NO: 30120 - protein, 7 aa, synthetic construct
HGASNQA

SEQ ID NO: 30121 - protein, 7 aa, synthetic construct
NPGQQRP

SEQ ID NO: 30122 - protein, 7 aa, synthetic construct
QHYKLDG

SEQ ID NO: 30123 - protein, 7 aa, synthetic construct
WKTKPEF

SEQ ID NO: 30124 - protein, 7 aa, synthetic construct
NRKGEDS

SEQ ID NO: 30125 - protein, 7 aa, synthetic construct
FKTGPTP

SEQ ID NO: 30126 - protein, 7 aa, synthetic construct
PPKIGGA

SEQ ID NO: 30127 - protein, 7 aa, synthetic construct
DKFLGHN

SEQ ID NO: 30128 - protein, 7 aa, synthetic construct
NKAGQGS

SEQ ID NO: 30129 - protein, 7 aa, synthetic construct
AGKGTPA

SEQ ID NO: 30130 - protein, 7 aa, synthetic construct
KMMGTPN

SEQ ID NO: 30131 - protein, 7 aa, synthetic construct
YGSKMTA

SEQ ID NO: 30132 - protein, 7 aa, synthetic construct
FGHNRSE

SEQ ID NO: 30133 - protein, 7 aa, synthetic construct
HGRDVEV

SEQ ID NO: 30134 - protein, 7 aa, synthetic construct
TSGRQVA

SEQ ID NO: 30135 - protein, 7 aa, synthetic construct
IAKDMTK

SEQ ID NO: 30136 - protein, 7 aa, synthetic construct
KRLSDNN

SEQ ID NO: 30137 - protein, 7 aa, synthetic construct
PVAKGTF

SEQ ID NO: 30138 - protein, 7 aa, synthetic construct
RNQTTNA

SEQ ID NO: 30139 - protein, 7 aa, synthetic construct
KYKTEYI

SEQ ID NO: 30140 - protein, 7 aa, synthetic construct
LYAGGKG

SEQ ID NO: 30141 - protein, 7 aa, synthetic construct
ISNRIQI

SEQ ID NO: 30142 - protein, 7 aa, synthetic construct
KFNTIGA

SEQ ID NO: 30143 - protein, 7 aa, synthetic construct
NSKNVNP

SEQ ID NO: 30144 - protein, 7 aa, synthetic construct
MGGKATG

SEQ ID NO: 30145 - protein, 7 aa, synthetic construct
IGHTRQL

SEQ ID NO: 30146 - protein, 7 aa, synthetic construct
TDARKSF

SEQ ID NO: 30147 - protein, 7 aa, synthetic construct
SHRPEKY

SEQ ID NO: 30148 - protein, 7 aa, synthetic construct
MGKHQVP

SEQ ID NO: 30149 - protein, 7 aa, synthetic construct
MHNQQPG

SEQ ID NO: 30150 - protein, 7 aa, synthetic construct
QVPRSPP

SEQ ID NO: 30151 - protein, 7 aa, synthetic construct
WGHIRTP

SEQ ID NO: 30152 - protein, 7 aa, synthetic construct
ASSQKTN

SEQ ID NO: 30153 - protein, 7 aa, synthetic construct
QKTGMQA

SEQ ID NO: 30154 - protein, 7 aa, synthetic construct
RSSTATS

SEQ ID NO: 30155 - protein, 7 aa, synthetic construct
TTGRQNA

SEQ ID NO: 30156 - protein, 7 aa, synthetic construct
DVKYAHK

SEQ ID NO: 30157 - protein, 7 aa, synthetic construct
PYSSAQA

SEQ ID NO: 30158 - protein, 7 aa, synthetic construct
VKTSTAA

SEQ ID NO: 30159 - protein, 7 aa, synthetic construct
TKAMKMG

SEQ ID NO: 30160 - protein, 7 aa, synthetic construct
QKPIFES

SEQ ID NO: 30161 - protein, 7 aa, synthetic construct
RQNGQNV

SEQ ID NO: 30162 - protein, 7 aa, synthetic construct
KHAATLG

SEQ ID NO: 30163 - protein, 7 aa, synthetic construct
STVRPHS

SEQ ID NO: 30164 - protein, 7 aa, synthetic construct
FKNSGTG

SEQ ID NO: 30165 - protein, 7 aa, synthetic construct
QTRSSQP

SEQ ID NO: 30166 - protein, 7 aa, synthetic construct
VPNAKNM

SEQ ID NO: 30167 - protein, 7 aa, synthetic construct
NANKGQG

SEQ ID NO: 30168 - protein, 7 aa, synthetic construct
TKPSGMG

SEQ ID NO: 30169 - protein, 7 aa, synthetic construct
TKQTVGS

SEQ ID NO: 30170 - protein, 7 aa, synthetic construct
QQGRAPE

SEQ ID NO: 30171 - protein, 7 aa, synthetic construct
FAGNRPA

SEQ ID NO: 30172 - protein, 7 aa, synthetic construct
NKYTGNT

SEQ ID NO: 30173 - protein, 7 aa, synthetic construct
FKGNKES

SEQ ID NO: 30174 - protein, 7 aa, synthetic construct
KSNGSMG

SEQ ID NO: 30175 - protein, 7 aa, synthetic construct
NMKANNG

SEQ ID NO: 30176 - protein, 7 aa, synthetic construct
KIAPHAP

SEQ ID NO: 30177 - protein, 7 aa, synthetic construct
MQGQRIG

SEQ ID NO: 30178 - protein, 7 aa, synthetic construct
GFKAGQQ

SEQ ID NO: 30179 - protein, 7 aa, synthetic construct
IARIVGE

SEQ ID NO: 30180 - protein, 7 aa, synthetic construct
KGNFANS

SEQ ID NO: 30181 - protein, 7 aa, synthetic construct
KATSGQA

SEQ ID NO: 30182 - protein, 7 aa, synthetic construct
LNTLKPQ

SEQ ID NO: 30183 - protein, 7 aa, synthetic construct
KYPQTQG

SEQ ID NO: 30184 - protein, 7 aa, synthetic construct
FNNGHSA

SEQ ID NO: 30185 - protein, 7 aa, synthetic construct
LGRGGMG

SEQ ID NO: 30186 - protein, 7 aa, synthetic construct
FKSQNSS

SEQ ID NO: 30187 - protein, 7 aa, synthetic construct
TGKYTMI

SEQ ID NO: 30188 - protein, 7 aa, synthetic construct
PRSGGVA

SEQ ID NO: 30189 - protein, 7 aa, synthetic construct
TPPSKMS

SEQ ID NO: 30190 - protein, 7 aa, synthetic construct
PRSTPVS

SEQ ID NO: 30191 - protein, 7 aa, synthetic construct
AGHRASD

SEQ ID NO: 30192 - protein, 7 aa, synthetic construct
GTNVNKG

SEQ ID NO: 30193 - protein, 7 aa, synthetic construct
KPATSAM

SEQ ID NO: 30194 - protein, 7 aa, synthetic construct
VTNKNMG

SEQ ID NO: 30195 - protein, 7 aa, synthetic construct
SKYGTQA

SEQ ID NO: 30196 - protein, 7 aa, synthetic construct
TTTRTGG

SEQ ID NO: 30197 - protein, 7 aa, synthetic construct
NKNSNQG

SEQ ID NO: 30198 - protein, 7 aa, synthetic construct
WTTAAKA

SEQ ID NO: 30199 - protein, 7 aa, synthetic construct
GFHNSSS

SEQ ID NO: 30200 - protein, 7 aa, synthetic construct
KANQTRE

SEQ ID NO: 30201 - protein, 7 aa, synthetic construct
VQKMITA

SEQ ID NO: 30202 - protein, 7 aa, synthetic construct
GRALSQD

SEQ ID NO: 30203 - protein, 7 aa, synthetic construct
KGQSTGA

SEQ ID NO: 30204 - protein, 7 aa, synthetic construct
IPRERSV

SEQ ID NO: 30205 - protein, 7 aa, synthetic construct
NKANAQV

SEQ ID NO: 30206 - protein, 7 aa, synthetic construct
KVSQGMG

SEQ ID NO: 30207 - protein, 7 aa, synthetic construct
NATGRMA

SEQ ID NO: 30208 - protein, 7 aa, synthetic construct
TTGMRGA

SEQ ID NO: 30209 - protein, 7 aa, synthetic construct
MKAQSIA

SEQ ID NO: 30210 - protein, 7 aa, synthetic construct
NKDRVTG

SEQ ID NO: 30211 - protein, 7 aa, synthetic construct
EKQKSSD

SEQ ID NO: 30212 - protein, 7 aa, synthetic construct
MKGASQG

SEQ ID NO: 30213 - protein, 7 aa, synthetic construct
LVNQGRP

SEQ ID NO: 30214 - protein, 7 aa, synthetic construct
VSPVNTH

SEQ ID NO: 30215 - protein, 7 aa, synthetic construct
NQRGNGA

SEQ ID NO: 30216 - protein, 7 aa, synthetic construct
HATGARE

SEQ ID NO: 30217 - protein, 7 aa, synthetic construct
TTGKGMA

SEQ ID NO: 30218 - protein, 7 aa, synthetic construct
QPRNSGM

SEQ ID NO: 30219 - protein, 7 aa, synthetic construct
WPGKDAT

SEQ ID NO: 30220 - protein, 7 aa, synthetic construct
TQAKRDY

SEQ ID NO: 30221 - protein, 7 aa, synthetic construct
YFNKGHG

SEQ ID NO: 30222 - protein, 7 aa, synthetic construct
GNVVKST

SEQ ID NO: 30223 - protein, 7 aa, synthetic construct
WREAYKD

SEQ ID NO: 30224 - protein, 7 aa, synthetic construct
MSATKNS

SEQ ID NO: 30225 - protein, 7 aa, synthetic construct
QKSPGQP

SEQ ID NO: 30226 - protein, 7 aa, synthetic construct
QLKPQDM

SEQ ID NO: 30227 - protein, 7 aa, synthetic construct
IEGFKSR

SEQ ID NO: 30228 - protein, 7 aa, synthetic construct
MAKPSSS

SEQ ID NO: 30229 - protein, 7 aa, synthetic construct
FNKDWAS

SEQ ID NO: 30230 - protein, 7 aa, synthetic construct
KTPSNQA

SEQ ID NO: 30231 - protein, 7 aa, synthetic construct
KNTNNQT

SEQ ID NO: 30232 - protein, 7 aa, synthetic construct
LQVGPNQ

SEQ ID NO: 30233 - protein, 7 aa, synthetic construct
GPVAAKP

SEQ ID NO: 30234 - protein, 7 aa, synthetic construct
NFNSAKG

SEQ ID NO: 30235 - protein, 7 aa, synthetic construct
KAFPSRD

SEQ ID NO: 30236 - protein, 7 aa, synthetic construct
SKISMKA

SEQ ID NO: 30237 - protein, 7 aa, synthetic construct
MSGGSKG

SEQ ID NO: 30238 - protein, 7 aa, synthetic construct
TKFQQQG

SEQ ID NO: 30239 - protein, 7 aa, synthetic construct
GKNQISA

SEQ ID NO: 30240 - protein, 7 aa, synthetic construct
FDKTWSG

SEQ ID NO: 30241 - protein, 7 aa, synthetic construct
HGLGNMG

SEQ ID NO: 30242 - protein, 7 aa, synthetic construct
TLAKNSF

SEQ ID NO: 30243 - protein, 7 aa, synthetic construct
RSAARDV

SEQ ID NO: 30244 - protein, 7 aa, synthetic construct
KMNNSNP

SEQ ID NO: 30245 - protein, 7 aa, synthetic construct
NHTKVTQ

SEQ ID NO: 30246 - protein, 7 aa, synthetic construct
KGPHYSA

SEQ ID NO: 30247 - protein, 7 aa, synthetic construct
YEGRSYG

SEQ ID NO: 30248 - protein, 7 aa, synthetic construct
KPGGNTG

SEQ ID NO: 30249 - protein, 7 aa, synthetic construct
WRGGVVD

SEQ ID NO: 30250 - protein, 7 aa, synthetic construct
NKAVIGG

SEQ ID NO: 30251 - protein, 7 aa, synthetic construct
GKTSSTF

SEQ ID NO: 30252 - protein, 7 aa, synthetic construct
GYSQRTE

SEQ ID NO: 30253 - protein, 7 aa, synthetic construct
STHKNYG

SEQ ID NO: 30254 - protein, 7 aa, synthetic construct
LAMQRNN

SEQ ID NO: 30255 - protein, 7 aa, synthetic construct
QIRSIPL

SEQ ID NO: 30256 - protein, 7 aa, synthetic construct
TKQSGSS

SEQ ID NO: 30257 - protein, 7 aa, synthetic construct
NHRETGA

SEQ ID NO: 30258 - protein, 7 aa, synthetic construct
GRPPTNG

SEQ ID NO: 30259 - protein, 7 aa, synthetic construct
YSKSMPN

SEQ ID NO: 30260 - protein, 7 aa, synthetic construct
NNPLRMD

SEQ ID NO: 30261 - protein, 7 aa, synthetic construct
DAIAGKY

SEQ ID NO: 30262 - protein, 7 aa, synthetic construct
RSKDSQN

SEQ ID NO: 30263 - protein, 7 aa, synthetic construct
MLHRDSA

SEQ ID NO: 30264 - protein, 7 aa, synthetic construct
MKSAAAA

SEQ ID NO: 30265 - protein, 7 aa, synthetic construct
GKTSNSM

SEQ ID NO: 30266 - protein, 7 aa, synthetic construct
KTQSAAG

SEQ ID NO: 30267 - protein, 7 aa, synthetic construct
PYKIGPH

SEQ ID NO: 30268 - protein, 7 aa, synthetic construct
FMDNVKG

SEQ ID NO: 30269 - protein, 7 aa, synthetic construct
QERNPRS

SEQ ID NO: 30270 - protein, 7 aa, synthetic construct
NQTSVGK

SEQ ID NO: 30271 - protein, 7 aa, synthetic construct
PKGTSGS

SEQ ID NO: 30272 - protein, 7 aa, synthetic construct
TRDRGVG

SEQ ID NO: 30273 - protein, 7 aa, synthetic construct
RPKTVDD

SEQ ID NO: 30274 - protein, 7 aa, synthetic construct
NKSSAYA

SEQ ID NO: 30275 - protein, 7 aa, synthetic construct
QLHVKYN

SEQ ID NO: 30276 - protein, 7 aa, synthetic construct
KMPGMGG

SEQ ID NO: 30277 - protein, 7 aa, synthetic construct
FKQPGQG

SEQ ID NO: 30278 - protein, 7 aa, synthetic construct
RVTGRES

SEQ ID NO: 30279 - protein, 7 aa, synthetic construct
MTTKMQS

SEQ ID NO: 30280 - protein, 7 aa, synthetic construct
NRNAMQG

SEQ ID NO: 30281 - protein, 7 aa, synthetic construct
KPIAGKD

SEQ ID NO: 30282 - protein, 7 aa, synthetic construct
QPHSAGM

SEQ ID NO: 30283 - protein, 7 aa, synthetic construct
YSMETGR

SEQ ID NO: 30284 - protein, 7 aa, synthetic construct
RNSQNAQ

SEQ ID NO: 30285 - protein, 7 aa, synthetic construct
SAHLRQA

SEQ ID NO: 30286 - protein, 7 aa, synthetic construct
NKTSGNG

SEQ ID NO: 30287 - protein, 7 aa, synthetic construct
LQGSKHS

SEQ ID NO: 30288 - protein, 7 aa, synthetic construct
NGSTRQP

SEQ ID NO: 30289 - protein, 7 aa, synthetic construct
TIPAKPP

SEQ ID NO: 30290 - protein, 7 aa, synthetic construct
NIKVQKD

SEQ ID NO: 30291 - protein, 7 aa, synthetic construct
MGAKSSA

SEQ ID NO: 30292 - protein, 7 aa, synthetic construct
NKGQTFS

SEQ ID NO: 30293 - protein, 7 aa, synthetic construct
MPLGGVQ

SEQ ID NO: 30294 - protein, 7 aa, synthetic construct
KHTPTEI

SEQ ID NO: 30295 - protein, 7 aa, synthetic construct
TNAMPKY

SEQ ID NO: 30296 - protein, 7 aa, synthetic construct
VSNSKHG

SEQ ID NO: 30297 - protein, 7 aa, synthetic construct
GSANKTG

SEQ ID NO: 30298 - protein, 7 aa, synthetic construct
SQRSQSP

SEQ ID NO: 30299 - protein, 7 aa, synthetic construct
FGVRNRD

SEQ ID NO: 30300 - protein, 7 aa, synthetic construct
KDGIYTS

SEQ ID NO: 30301 - protein, 7 aa, synthetic construct
QKNTSQS

SEQ ID NO: 30302 - protein, 7 aa, synthetic construct
SKTSTQP

SEQ ID NO: 30303 - protein, 7 aa, synthetic construct
VQKRDES

SEQ ID NO: 30304 - protein, 7 aa, synthetic construct
YNSRANG

SEQ ID NO: 30305 - protein, 7 aa, synthetic construct
TKPSQAS

SEQ ID NO: 30306 - protein, 7 aa, synthetic construct
YSKMQPS

SEQ ID NO: 30307 - protein, 7 aa, synthetic construct
STGSQPM

SEQ ID NO: 30308 - protein, 7 aa, synthetic construct
GPRGVTG

SEQ ID NO: 30309 - protein, 7 aa, synthetic construct
SPRNNNA

SEQ ID NO: 30310 - protein, 7 aa, synthetic construct
KTGTSQS

SEQ ID NO: 30311 - protein, 7 aa, synthetic construct
IKVAPMN

SEQ ID NO: 30312 - protein, 7 aa, synthetic construct
RRTASDE

SEQ ID NO: 30313 - protein, 7 aa, synthetic construct
TKNMHPA

SEQ ID NO: 30314 - protein, 7 aa, synthetic construct
GQATKNG

SEQ ID NO: 30315 - protein, 7 aa, synthetic construct
TGQRNYE

SEQ ID NO: 30316 - protein, 7 aa, synthetic construct
MQRTGNP

SEQ ID NO: 30317 - protein, 7 aa, synthetic construct
QNRIPGY

SEQ ID NO: 30318 - protein, 7 aa, synthetic construct
YDTHYKG

SEQ ID NO: 30319 - protein, 7 aa, synthetic construct
LQVTKSS

SEQ ID NO: 30320 - protein, 7 aa, synthetic construct
FDMGKQR

SEQ ID NO: 30321 - protein, 7 aa, synthetic construct
QQRGIPP

SEQ ID NO: 30322 - protein, 7 aa, synthetic construct
KSNGGSP

SEQ ID NO: 30323 - protein, 7 aa, synthetic construct
IWKSGDA

SEQ ID NO: 30324 - protein, 7 aa, synthetic construct
RNQVGAG

SEQ ID NO: 30325 - protein, 7 aa, synthetic construct
RNSDNNG

SEQ ID NO: 30326 - protein, 7 aa, synthetic construct
QKSTSVA

SEQ ID NO: 30327 - protein, 7 aa, synthetic construct
KVQTGGA

SEQ ID NO: 30328 - protein, 7 aa, synthetic construct
GQAPRPG

SEQ ID NO: 30329 - protein, 7 aa, synthetic construct
RSKDTNV

SEQ ID NO: 30330 - protein, 7 aa, synthetic construct
TKQATTG

SEQ ID NO: 30331 - protein, 7 aa, synthetic construct
NRSPNQN

SEQ ID NO: 30332 - protein, 7 aa, synthetic construct
LRNHHDS

SEQ ID NO: 30333 - protein, 7 aa, synthetic construct
KTANGPG

SEQ ID NO: 30334 - protein, 7 aa, synthetic construct
KSDTSRN

SEQ ID NO: 30335 - protein, 7 aa, synthetic construct
RNPAVVP

SEQ ID NO: 30336 - protein, 7 aa, synthetic construct
FYPAKSD

SEQ ID NO: 30337 - protein, 7 aa, synthetic construct
WQNMGAH

SEQ ID NO: 30338 - protein, 7 aa, synthetic construct
RNGPTTG

SEQ ID NO: 30339 - protein, 7 aa, synthetic construct
VKPAANT

SEQ ID NO: 30340 - protein, 7 aa, synthetic construct
NPKYSGG

SEQ ID NO: 30341 - protein, 7 aa, synthetic construct
FGKTSAS

SEQ ID NO: 30342 - protein, 7 aa, synthetic construct
QTKAGDR

SEQ ID NO: 30343 - protein, 7 aa, synthetic construct
DQIAMRK

SEQ ID NO: 30344 - protein, 7 aa, synthetic construct
FAKTLKD

SEQ ID NO: 30345 - protein, 7 aa, synthetic construct
KSVNAAA

SEQ ID NO: 30346 - protein, 7 aa, synthetic construct
NKAPGSG

SEQ ID NO: 30347 - protein, 7 aa, synthetic construct
RSVDGTG

SEQ ID NO: 30348 - protein, 7 aa, synthetic construct
KTNGGIG

SEQ ID NO: 30349 - protein, 7 aa, synthetic construct
TQKTSNP

SEQ ID NO: 30350 - protein, 7 aa, synthetic construct
DHRGKMA

SEQ ID NO: 30351 - protein, 7 aa, synthetic construct
SKPAKSD

SEQ ID NO: 30352 - protein, 7 aa, synthetic construct
ASHQSPG

SEQ ID NO: 30353 - protein, 7 aa, synthetic construct
QGSKVAG

SEQ ID NO: 30354 - protein, 7 aa, synthetic construct
MKQDSAS

SEQ ID NO: 30355 - protein, 7 aa, synthetic construct
KHKPDES

SEQ ID NO: 30356 - protein, 7 aa, synthetic construct
DVPVQRR

SEQ ID NO: 30357 - protein, 7 aa, synthetic construct
QKPTNKE

SEQ ID NO: 30358 - protein, 7 aa, synthetic construct
MGHNANG

SEQ ID NO: 30359 - protein, 7 aa, synthetic construct
QPRIMQE

SEQ ID NO: 30360 - protein, 7 aa, synthetic construct
GTHRNGE

SEQ ID NO: 30361 - protein, 7 aa, synthetic construct
GKMSGGG

SEQ ID NO: 30362 - protein, 7 aa, synthetic construct
PVNKMQP

SEQ ID NO: 30363 - protein, 7 aa, synthetic construct
NQNRVGG

SEQ ID NO: 30364 - protein, 7 aa, synthetic construct
FSTEAGR

SEQ ID NO: 30365 - protein, 7 aa, synthetic construct
GQNRVNG

SEQ ID NO: 30366 - protein, 7 aa, synthetic construct
MKTQNSA

SEQ ID NO: 30367 - protein, 7 aa, synthetic construct
NRPSQSP

SEQ ID NO: 30368 - protein, 7 aa, synthetic construct
VRQGASG

SEQ ID NO: 30369 - protein, 7 aa, synthetic construct
NPRASQS

SEQ ID NO: 30370 - protein, 7 aa, synthetic construct
YKPNAQS

SEQ ID NO: 30371 - protein, 7 aa, synthetic construct
KVNNGSV

SEQ ID NO: 30372 - protein, 7 aa, synthetic construct
HKFGGSP

SEQ ID NO: 30373 - protein, 7 aa, synthetic construct
PKSVNQG

SEQ ID NO: 30374 - protein, 7 aa, synthetic construct
RGNNPAA

SEQ ID NO: 30375 - protein, 7 aa, synthetic construct
GVPGTTY

SEQ ID NO: 30376 - protein, 7 aa, synthetic construct
SNQRQNA

SEQ ID NO: 30377 - protein, 7 aa, synthetic construct
YGQVTRS

SEQ ID NO: 30378 - protein, 7 aa, synthetic construct
ANKTSQS

SEQ ID NO: 30379 - protein, 7 aa, synthetic construct
QNNTKSA

SEQ ID NO: 30380 - protein, 7 aa, synthetic construct
GPNGKFG

SEQ ID NO: 30381 - protein, 7 aa, synthetic construct
LPGQSAG

SEQ ID NO: 30382 - protein, 7 aa, synthetic construct
GVSDRKW

SEQ ID NO: 30383 - protein, 7 aa, synthetic construct
FNKGSTS

SEQ ID NO: 30384 - protein, 7 aa, synthetic construct
RTPNSGA

SEQ ID NO: 30385 - protein, 7 aa, synthetic construct
GKSNATM

SEQ ID NO: 30386 - protein, 7 aa, synthetic construct
MKNDNRA

SEQ ID NO: 30387 - protein, 7 aa, synthetic construct
QYFNGKE

SEQ ID NO: 30388 - protein, 7 aa, synthetic construct
SRTSPTA

SEQ ID NO: 30389 - protein, 7 aa, synthetic construct
IGRGGTV

SEQ ID NO: 30390 - protein, 7 aa, synthetic construct
RHGGLGA

SEQ ID NO: 30391 - protein, 7 aa, synthetic construct
QERIRSP

SEQ ID NO: 30392 - protein, 7 aa, synthetic construct
MHQMGDK

SEQ ID NO: 30393 - protein, 7 aa, synthetic construct
GSMKTGG

SEQ ID NO: 30394 - protein, 7 aa, synthetic construct
YGTKSQG

SEQ ID NO: 30395 - protein, 7 aa, synthetic construct
WTSSNSG

SEQ ID NO: 30396 - protein, 7 aa, synthetic construct
RNTSNGG

SEQ ID NO: 30397 - protein, 7 aa, synthetic construct
AKGAAGT

SEQ ID NO: 30398 - protein, 7 aa, synthetic construct
KSPGYQG

SEQ ID NO: 30399 - protein, 7 aa, synthetic construct
NIKGMKD

SEQ ID NO: 30400 - protein, 7 aa, synthetic construct
QASKGMG

SEQ ID NO: 30401 - protein, 7 aa, synthetic construct
MSKVSGG

SEQ ID NO: 30402 - protein, 7 aa, synthetic construct
SQNAQGG

SEQ ID NO: 30403 - protein, 7 aa, synthetic construct
YGSNRTG

SEQ ID NO: 30404 - protein, 7 aa, synthetic construct
NQKSMPG

SEQ ID NO: 30405 - protein, 7 aa, synthetic construct
RPNTVAG

SEQ ID NO: 30406 - protein, 7 aa, synthetic construct
NRNQVPA

SEQ ID NO: 30407 - protein, 7 aa, synthetic construct
KVGQSNA

SEQ ID NO: 30408 - protein, 7 aa, synthetic construct
KTQAVAG

SEQ ID NO: 30409 - protein, 7 aa, synthetic construct
KFAPSTE

SEQ ID NO: 30410 - protein, 7 aa, synthetic construct
ANRSLAS

SEQ ID NO: 30411 - protein, 7 aa, synthetic construct
HHAYSAG

SEQ ID NO: 30412 - protein, 7 aa, synthetic construct
YTSRFKD

SEQ ID NO: 30413 - protein, 7 aa, synthetic construct
GKGVGMN

SEQ ID NO: 30414 - protein, 7 aa, synthetic construct
TGTGKTA

SEQ ID NO: 30415 - protein, 7 aa, synthetic construct
ARNQTSA

SEQ ID NO: 30416 - protein, 7 aa, synthetic construct
KSTSNAS

SEQ ID NO: 30417 - protein, 7 aa, synthetic construct
MLNTYKE

SEQ ID NO: 30418 - protein, 7 aa, synthetic construct
HNQRMNA

SEQ ID NO: 30419 - protein, 7 aa, synthetic construct
IVSTQRI

SEQ ID NO: 30420 - protein, 7 aa, synthetic construct
GVTGRSF

SEQ ID NO: 30421 - protein, 7 aa, synthetic construct
VSSWHNE

SEQ ID NO: 30422 - protein, 7 aa, synthetic construct
YPRNQSM

SEQ ID NO: 30423 - protein, 7 aa, synthetic construct
TPLMRHG

SEQ ID NO: 30424 - protein, 7 aa, synthetic construct
QKSTGGG

SEQ ID NO: 30425 - protein, 7 aa, synthetic construct
TYTAVQH

SEQ ID NO: 30426 - protein, 7 aa, synthetic construct
GHPGPKS

SEQ ID NO: 30427 - protein, 7 aa, synthetic construct
NPSQRSG

SEQ ID NO: 30428 - protein, 7 aa, synthetic construct
IQNAAQK

SEQ ID NO: 30429 - protein, 7 aa, synthetic construct
WNMSGVG

SEQ ID NO: 30430 - protein, 7 aa, synthetic construct
YNSGGKG

SEQ ID NO: 30431 - protein, 7 aa, synthetic construct
FMPNTSH

SEQ ID NO: 30432 - protein, 7 aa, synthetic construct
PPQSRRE

SEQ ID NO: 30433 - protein, 7 aa, synthetic construct
DMGIGRG

SEQ ID NO: 30434 - protein, 7 aa, synthetic construct
KSNNATQ

SEQ ID NO: 30435 - protein, 7 aa, synthetic construct
IPTKANA

SEQ ID NO: 30436 - protein, 7 aa, synthetic construct
VNQLAKG

SEQ ID NO: 30437 - protein, 7 aa, synthetic construct
RTTGVGA

SEQ ID NO: 30438 - protein, 7 aa, synthetic construct
FRAGTPA

SEQ ID NO: 30439 - protein, 7 aa, synthetic construct
DSPPLMG

SEQ ID NO: 30440 - protein, 7 aa, synthetic construct
QRPNGPA

SEQ ID NO: 30441 - protein, 7 aa, synthetic construct
NRAATQA

SEQ ID NO: 30442 - protein, 7 aa, synthetic construct
PKGQSAP

SEQ ID NO: 30443 - protein, 7 aa, synthetic construct
NGIAMIG

SEQ ID NO: 30444 - protein, 7 aa, synthetic construct
SVKNSKE

SEQ ID NO: 30445 - protein, 7 aa, synthetic construct
RDKSSGV

SEQ ID NO: 30446 - protein, 7 aa, synthetic construct
TRANAAA

SEQ ID NO: 30447 - protein, 7 aa, synthetic construct
TRSQVQG

SEQ ID NO: 30448 - protein, 7 aa, synthetic construct
KAPGNYG

SEQ ID NO: 30449 - protein, 7 aa, synthetic construct
GNSRTAP

SEQ ID NO: 30450 - protein, 7 aa, synthetic construct
VTGYLHS

SEQ ID NO: 30451 - protein, 7 aa, synthetic construct
ATQKIDL

SEQ ID NO: 30452 - protein, 7 aa, synthetic construct
RTMNSQA

SEQ ID NO: 30453 - protein, 7 aa, synthetic construct
TPAKTQN

SEQ ID NO: 30454 - protein, 7 aa, synthetic construct
IPKRDMG

SEQ ID NO: 30455 - protein, 7 aa, synthetic construct
NYKMVNG

SEQ ID NO: 30456 - protein, 7 aa, synthetic construct
TRQSGQP

SEQ ID NO: 30457 - protein, 7 aa, synthetic construct
RIRNNDG

SEQ ID NO: 30458 - protein, 7 aa, synthetic construct
VRSLPAL

SEQ ID NO: 30459 - protein, 7 aa, synthetic construct
GHASPYV

SEQ ID NO: 30460 - protein, 7 aa, synthetic construct
IMPGRSG

SEQ ID NO: 30461 - protein, 7 aa, synthetic construct
KSYNGQA

SEQ ID NO: 30462 - protein, 7 aa, synthetic construct
MGRASHD

SEQ ID NO: 30463 - protein, 7 aa, synthetic construct
YKMHIRE

SEQ ID NO: 30464 - protein, 7 aa, synthetic construct
RGTNVGA

SEQ ID NO: 30465 - protein, 7 aa, synthetic construct
VKSPSNS

SEQ ID NO: 30466 - protein, 7 aa, synthetic construct
RTGPYNE

SEQ ID NO: 30467 - protein, 7 aa, synthetic construct
NAEWARS

SEQ ID NO: 30468 - protein, 7 aa, synthetic construct
EFSGRSG

SEQ ID NO: 30469 - protein, 7 aa, synthetic construct
RDNTKSG

SEQ ID NO: 30470 - protein, 7 aa, synthetic construct
YMRPHVD

SEQ ID NO: 30471 - protein, 7 aa, synthetic construct
RPPSTGM

SEQ ID NO: 30472 - protein, 7 aa, synthetic construct
KNIHVRE

SEQ ID NO: 30473 - protein, 7 aa, synthetic construct
SNASRLM

SEQ ID NO: 30474 - protein, 7 aa, synthetic construct
TKPMGGG

SEQ ID NO: 30475 - protein, 7 aa, synthetic construct
NAKSSVG

SEQ ID NO: 30476 - protein, 7 aa, synthetic construct
YGKQPTG

SEQ ID NO: 30477 - protein, 7 aa, synthetic construct
QGMNKQS

SEQ ID NO: 30478 - protein, 7 aa, synthetic construct
IRVGDMT

SEQ ID NO: 30479 - protein, 7 aa, synthetic construct
VFNGSNK

SEQ ID NO: 30480 - protein, 7 aa, synthetic construct
TASSKGQ

SEQ ID NO: 30481 - protein, 7 aa, synthetic construct
WADFASG

SEQ ID NO: 30482 - protein, 7 aa, synthetic construct
FQNKSSP

SEQ ID NO: 30483 - protein, 7 aa, synthetic construct
GPGKNMA

SEQ ID NO: 30484 - protein, 7 aa, synthetic construct
SMTGKGE

SEQ ID NO: 30485 - protein, 7 aa, synthetic construct
NSGPVRS

SEQ ID NO: 30486 - protein, 7 aa, synthetic construct
QKAQKEF

SEQ ID NO: 30487 - protein, 7 aa, synthetic construct
KSFNATS

SEQ ID NO: 30488 - protein, 7 aa, synthetic construct
NKSQGGN

SEQ ID NO: 30489 - protein, 7 aa, synthetic construct
TQSRSVG

SEQ ID NO: 30490 - protein, 7 aa, synthetic construct
RQGSTTA

SEQ ID NO: 30491 - protein, 7 aa, synthetic construct
PMSKHSE

SEQ ID NO: 30492 - protein, 7 aa, synthetic construct
NTSNWNP

SEQ ID NO: 30493 - protein, 7 aa, synthetic construct
ENKGRTF

SEQ ID NO: 30494 - protein, 7 aa, synthetic construct
SDHTLKR

SEQ ID NO: 30495 - protein, 7 aa, synthetic construct
REFKYQG

SEQ ID NO: 30496 - protein, 7 aa, synthetic construct
VVGNAKG

SEQ ID NO: 30497 - protein, 7 aa, synthetic construct
QITFQTG

SEQ ID NO: 30498 - protein, 7 aa, synthetic construct
TKVGSRE

SEQ ID NO: 30499 - protein, 7 aa, synthetic construct
TKDQHNR

SEQ ID NO: 30500 - protein, 7 aa, synthetic construct
SWQKNME

SEQ ID NO: 30501 - protein, 7 aa, synthetic construct
MGSGVKT

SEQ ID NO: 30502 - protein, 7 aa, synthetic construct
IKGTTKD

SEQ ID NO: 30503 - protein, 7 aa, synthetic construct
TPKQGVP

SEQ ID NO: 30504 - protein, 7 aa, synthetic construct
TTKQQSG

SEQ ID NO: 30505 - protein, 7 aa, synthetic construct
YHASAGV

SEQ ID NO: 30506 - protein, 7 aa, synthetic construct
IQTVKLP

SEQ ID NO: 30507 - protein, 7 aa, synthetic construct
GRRPDMD

SEQ ID NO: 30508 - protein, 7 aa, synthetic construct
ANNAKNG

SEQ ID NO: 30509 - protein, 7 aa, synthetic construct
MKNKPPE

SEQ ID NO: 30510 - protein, 7 aa, synthetic construct
VRSHQMQ

SEQ ID NO: 30511 - protein, 7 aa, synthetic construct
TKGSIPH

SEQ ID NO: 30512 - protein, 7 aa, synthetic construct
IHSNRPA

SEQ ID NO: 30513 - protein, 7 aa, synthetic construct
MGNQRQA

SEQ ID NO: 30514 - protein, 7 aa, synthetic construct
GPSVRQA

SEQ ID NO: 30515 - protein, 7 aa, synthetic construct
GPTRVAE

SEQ ID NO: 30516 - protein, 7 aa, synthetic construct
NTIKSNA

SEQ ID NO: 30517 - protein, 7 aa, synthetic construct
LGLKEAS

SEQ ID NO: 30518 - protein, 7 aa, synthetic construct
PRANSMA

SEQ ID NO: 30519 - protein, 7 aa, synthetic construct
FGGFGNA

SEQ ID NO: 30520 - protein, 7 aa, synthetic construct
IPVISKD

SEQ ID NO: 30521 - protein, 7 aa, synthetic construct
NKNNASV

SEQ ID NO: 30522 - protein, 7 aa, synthetic construct
TTRIGGQ

SEQ ID NO: 30523 - protein, 7 aa, synthetic construct
HPKGTTT

SEQ ID NO: 30524 - protein, 7 aa, synthetic construct
DARIKMA

SEQ ID NO: 30525 - protein, 7 aa, synthetic construct
GTRTSES

SEQ ID NO: 30526 - protein, 7 aa, synthetic construct
IAPYVKV

SEQ ID NO: 30527 - protein, 7 aa, synthetic construct
AYKTPTG

SEQ ID NO: 30528 - protein, 7 aa, synthetic construct
NIKIQVA

SEQ ID NO: 30529 - protein, 7 aa, synthetic construct
RAESRVG

SEQ ID NO: 30530 - protein, 7 aa, synthetic construct
FGNNIKE

SEQ ID NO: 30531 - protein, 7 aa, synthetic construct
IQHMSIG

SEQ ID NO: 30532 - protein, 7 aa, synthetic construct
VSVRMTG

SEQ ID NO: 30533 - protein, 7 aa, synthetic construct
QGSGTKG

SEQ ID NO: 30534 - protein, 7 aa, synthetic construct
KSANTTG

SEQ ID NO: 30535 - protein, 7 aa, synthetic construct
IASQMKG

SEQ ID NO: 30536 - protein, 7 aa, synthetic construct
NNMPTVG

SEQ ID NO: 30537 - protein, 7 aa, synthetic construct
EKKIERQ

SEQ ID NO: 30538 - protein, 7 aa, synthetic construct
FGMGSAP

SEQ ID NO: 30539 - protein, 7 aa, synthetic construct
MTGRATG

SEQ ID NO: 30540 - protein, 7 aa, synthetic construct
NKNPPGT

SEQ ID NO: 30541 - protein, 7 aa, synthetic construct
KKPSMSE

SEQ ID NO: 30542 - protein, 7 aa, synthetic construct
IGTWQKG

SEQ ID NO: 30543 - protein, 7 aa, synthetic construct
VGTYNRP

SEQ ID NO: 30544 - protein, 7 aa, synthetic construct
KGPNNNG

SEQ ID NO: 30545 - protein, 7 aa, synthetic construct
YSGHYAA

SEQ ID NO: 30546 - protein, 7 aa, synthetic construct
GQSNKFG

SEQ ID NO: 30547 - protein, 7 aa, synthetic construct
HMGHVAG

SEQ ID NO: 30548 - protein, 7 aa, synthetic construct
GTKSVGS

SEQ ID NO: 30549 - protein, 7 aa, synthetic construct
YSQSRKD

SEQ ID NO: 30550 - protein, 7 aa, synthetic construct
LRPTNKD

SEQ ID NO: 30551 - protein, 7 aa, synthetic construct
KAPNMYE

SEQ ID NO: 30552 - protein, 7 aa, synthetic construct
WMGQGHS

SEQ ID NO: 30553 - protein, 7 aa, synthetic construct
TSVNKQV

SEQ ID NO: 30554 - protein, 7 aa, synthetic construct
YTPSSKG

SEQ ID NO: 30555 - protein, 7 aa, synthetic construct
RVGQQTG

SEQ ID NO: 30556 - protein, 7 aa, synthetic construct
KLGTSTG

SEQ ID NO: 30557 - protein, 7 aa, synthetic construct
LFNMRAG

SEQ ID NO: 30558 - protein, 7 aa, synthetic construct
PYRQPTE

SEQ ID NO: 30559 - protein, 7 aa, synthetic construct
QTGRTNA

SEQ ID NO: 30560 - protein, 7 aa, synthetic construct
TKGQAAG

SEQ ID NO: 30561 - protein, 7 aa, synthetic construct
RQNTGMD

SEQ ID NO: 30562 - protein, 7 aa, synthetic construct
SHNHTGF

SEQ ID NO: 30563 - protein, 7 aa, synthetic construct
MRPHDST

SEQ ID NO: 30564 - protein, 7 aa, synthetic construct
RIQGGGS

SEQ ID NO: 30565 - protein, 7 aa, synthetic construct
HSPQSHN

SEQ ID NO: 30566 - protein, 7 aa, synthetic construct
VRQNQQF

SEQ ID NO: 30567 - protein, 7 aa, synthetic construct
VRPTAQS

SEQ ID NO: 30568 - protein, 7 aa, synthetic construct
KPGFSSP

SEQ ID NO: 30569 - protein, 7 aa, synthetic construct
MNTSIKP

SEQ ID NO: 30570 - protein, 7 aa, synthetic construct
KLAPNTE

SEQ ID NO: 30571 - protein, 7 aa, synthetic construct
GKMSNGP

SEQ ID NO: 30572 - protein, 7 aa, synthetic construct
YPGKHGI

SEQ ID NO: 30573 - protein, 7 aa, synthetic construct
TQPGRMA

SEQ ID NO: 30574 - protein, 7 aa, synthetic construct
NKTGGSP

SEQ ID NO: 30575 - protein, 7 aa, synthetic construct
HPTVGHG

SEQ ID NO: 30576 - protein, 7 aa, synthetic construct
AGTLAKP

SEQ ID NO: 30577 - protein, 7 aa, synthetic construct
QSSKGFG

SEQ ID NO: 30578 - protein, 7 aa, synthetic construct
NVKQKGE

SEQ ID NO: 30579 - protein, 7 aa, synthetic construct
WDRKTAD

SEQ ID NO: 30580 - protein, 7 aa, synthetic construct
RDNVVQK

SEQ ID NO: 30581 - protein, 7 aa, synthetic construct
PKGNAGV

SEQ ID NO: 30582 - protein, 7 aa, synthetic construct
SNQQRSP

SEQ ID NO: 30583 - protein, 7 aa, synthetic construct
YGAVKAA

SEQ ID NO: 30584 - protein, 7 aa, synthetic construct
VTNKQHY

SEQ ID NO: 30585 - protein, 7 aa, synthetic construct
KVSSMQG

SEQ ID NO: 30586 - protein, 7 aa, synthetic construct
TFKAMKD

SEQ ID NO: 30587 - protein, 7 aa, synthetic construct
IKSGNTG

SEQ ID NO: 30588 - protein, 7 aa, synthetic construct
AQVPKQG

SEQ ID NO: 30589 - protein, 7 aa, synthetic construct
QYNTKHG

SEQ ID NO: 30590 - protein, 7 aa, synthetic construct
PRQTQGM

SEQ ID NO: 30591 - protein, 7 aa, synthetic construct
SMKHGHA

SEQ ID NO: 30592 - protein, 7 aa, synthetic construct
RNGGKFE

SEQ ID NO: 30593 - protein, 7 aa, synthetic construct
MKMVQGT

SEQ ID NO: 30594 - protein, 7 aa, synthetic construct
KNTNVAS

SEQ ID NO: 30595 - protein, 7 aa, synthetic construct
SKFQLSE

SEQ ID NO: 30596 - protein, 7 aa, synthetic construct
NVHAKPS

SEQ ID NO: 30597 - protein, 7 aa, synthetic construct
GFIRHGE

SEQ ID NO: 30598 - protein, 7 aa, synthetic construct
DPPLKTG

SEQ ID NO: 30599 - protein, 7 aa, synthetic construct
MNGTGRG

SEQ ID NO: 30600 - protein, 7 aa, synthetic construct
EYRKGMG

SEQ ID NO: 30601 - protein, 7 aa, synthetic construct
MFKQNNG

SEQ ID NO: 30602 - protein, 7 aa, synthetic construct
TRTVTGA

SEQ ID NO: 30603 - protein, 7 aa, synthetic construct
YDRGTHT

SEQ ID NO: 30604 - protein, 7 aa, synthetic construct
QRPNSMA

SEQ ID NO: 30605 - protein, 7 aa, synthetic construct
NKANPAA

SEQ ID NO: 30606 - protein, 7 aa, synthetic construct
KQGNSAS

SEQ ID NO: 30607 - protein, 7 aa, synthetic construct
MNKGMKE

SEQ ID NO: 30608 - protein, 7 aa, synthetic construct
GKFGMQN

SEQ ID NO: 30609 - protein, 7 aa, synthetic construct
VHAKGAA

SEQ ID NO: 30610 - protein, 7 aa, synthetic construct
GKKDQNG

SEQ ID NO: 30611 - protein, 7 aa, synthetic construct
NKNEPQQ

SEQ ID NO: 30612 - protein, 7 aa, synthetic construct
GPSKNTA

SEQ ID NO: 30613 - protein, 7 aa, synthetic construct
STKSRFD

SEQ ID NO: 30614 - protein, 7 aa, synthetic construct
GTKSAAA

SEQ ID NO: 30615 - protein, 7 aa, synthetic construct
PNRGVTG

SEQ ID NO: 30616 - protein, 7 aa, synthetic construct
TSGGKTG

SEQ ID NO: 30617 - protein, 7 aa, synthetic construct
SADRIHG

SEQ ID NO: 30618 - protein, 7 aa, synthetic construct
NKNGMPG

SEQ ID NO: 30619 - protein, 7 aa, synthetic construct
RPTQSSP

SEQ ID NO: 30620 - protein, 7 aa, synthetic construct
VKQKGVD

SEQ ID NO: 30621 - protein, 7 aa, synthetic construct
TKAYQNE

SEQ ID NO: 30622 - protein, 7 aa, synthetic construct
KTGQSSS

SEQ ID NO: 30623 - protein, 7 aa, synthetic construct
RPTTADN

SEQ ID NO: 30624 - protein, 7 aa, synthetic construct
LRPASVG

SEQ ID NO: 30625 - protein, 7 aa, synthetic construct
LVNVKEH

SEQ ID NO: 30626 - protein, 7 aa, synthetic construct
HRQMGEA

SEQ ID NO: 30627 - protein, 7 aa, synthetic construct
NSSARSP

SEQ ID NO: 30628 - protein, 7 aa, synthetic construct
NAKSNAN

SEQ ID NO: 30629 - protein, 7 aa, synthetic construct
HQKPGDL

SEQ ID NO: 30630 - protein, 7 aa, synthetic construct
QGNPTSG

SEQ ID NO: 30631 - protein, 7 aa, synthetic construct
PRNSGAG

SEQ ID NO: 30632 - protein, 7 aa, synthetic construct
RPGNNVA

SEQ ID NO: 30633 - protein, 7 aa, synthetic construct
NGTYKGP

SEQ ID NO: 30634 - protein, 7 aa, synthetic construct
PRNTGAA

SEQ ID NO: 30635 - protein, 7 aa, synthetic construct
LIPFSKE

SEQ ID NO: 30636 - protein, 7 aa, synthetic construct
NVQRNQP

SEQ ID NO: 30637 - protein, 7 aa, synthetic construct
FGKVNSG

SEQ ID NO: 30638 - protein, 7 aa, synthetic construct
GKNTQNP

SEQ ID NO: 30639 - protein, 7 aa, synthetic construct
NARTTTP

SEQ ID NO: 30640 - protein, 7 aa, synthetic construct
HEKWKID

SEQ ID NO: 30641 - protein, 7 aa, synthetic construct
ARNHDII

SEQ ID NO: 30642 - protein, 7 aa, synthetic construct
NVRNAPF

SEQ ID NO: 30643 - protein, 7 aa, synthetic construct
FKAPSQG

SEQ ID NO: 30644 - protein, 7 aa, synthetic construct
PPGHEWK

SEQ ID NO: 30645 - protein, 7 aa, synthetic construct
LSKDLRG

SEQ ID NO: 30646 - protein, 7 aa, synthetic construct
HTDSGRM

SEQ ID NO: 30647 - protein, 7 aa, synthetic construct
MGGVKTA

SEQ ID NO: 30648 - protein, 7 aa, synthetic construct
HMMKQAQ

SEQ ID NO: 30649 - protein, 7 aa, synthetic construct
MSPNFNS

SEQ ID NO: 30650 - protein, 7 aa, synthetic construct
KQMGSAA

SEQ ID NO: 30651 - protein, 7 aa, synthetic construct
TAFVRGE

SEQ ID NO: 30652 - protein, 7 aa, synthetic construct
LNKQSGF

SEQ ID NO: 30653 - protein, 7 aa, synthetic construct
NKTDRSG

SEQ ID NO: 30654 - protein, 7 aa, synthetic construct
KAKAMGD

SEQ ID NO: 30655 - protein, 7 aa, synthetic construct
TVKHVSP

SEQ ID NO: 30656 - protein, 7 aa, synthetic construct
KVTNQQA

SEQ ID NO: 30657 - protein, 7 aa, synthetic construct
RVGIVKD

SEQ ID NO: 30658 - protein, 7 aa, synthetic construct
RPQGIGG

SEQ ID NO: 30659 - protein, 7 aa, synthetic construct
PTKTGGS

SEQ ID NO: 30660 - protein, 7 aa, synthetic construct
FKNGVAT

SEQ ID NO: 30661 - protein, 7 aa, synthetic construct
ARGLIQG

SEQ ID NO: 30662 - protein, 7 aa, synthetic construct
KMPTNTG

SEQ ID NO: 30663 - protein, 7 aa, synthetic construct
GGMKTGP

SEQ ID NO: 30664 - protein, 7 aa, synthetic construct
RGPSGPP

SEQ ID NO: 30665 - protein, 7 aa, synthetic construct
KNPQINM

SEQ ID NO: 30666 - protein, 7 aa, synthetic construct
GMTHRTE

SEQ ID NO: 30667 - protein, 7 aa, synthetic construct
HPNRNSE

SEQ ID NO: 30668 - protein, 7 aa, synthetic construct
PMQKPGM

SEQ ID NO: 30669 - protein, 7 aa, synthetic construct
NRSNQQG

SEQ ID NO: 30670 - protein, 7 aa, synthetic construct
MQKGFAD

SEQ ID NO: 30671 - protein, 7 aa, synthetic construct
SGKTMVG

SEQ ID NO: 30672 - protein, 7 aa, synthetic construct
RNNNAVG

SEQ ID NO: 30673 - protein, 7 aa, synthetic construct
NKQNIAS

SEQ ID NO: 30674 - protein, 7 aa, synthetic construct
MLKGYAE

SEQ ID NO: 30675 - protein, 7 aa, synthetic construct
DKSKVGA

SEQ ID NO: 30676 - protein, 7 aa, synthetic construct
NPTVRAP

SEQ ID NO: 30677 - protein, 7 aa, synthetic construct
ITKHGSP

SEQ ID NO: 30678 - protein, 7 aa, synthetic construct
KSQTGNQ

SEQ ID NO: 30679 - protein, 7 aa, synthetic construct
EMPKARN

SEQ ID NO: 30680 - protein, 7 aa, synthetic construct
MKKDTTG

SEQ ID NO: 30681 - protein, 7 aa, synthetic construct
QNSSSKV

SEQ ID NO: 30682 - protein, 7 aa, synthetic construct
TTTGKPG

SEQ ID NO: 30683 - protein, 7 aa, synthetic construct
KPTGQMA

SEQ ID NO: 30684 - protein, 7 aa, synthetic construct
GGPTQKA

SEQ ID NO: 30685 - protein, 7 aa, synthetic construct
LPGVKVS

SEQ ID NO: 30686 - protein, 7 aa, synthetic construct
IDRPGQG

SEQ ID NO: 30687 - protein, 7 aa, synthetic construct
KKGQHDD

SEQ ID NO: 30688 - protein, 7 aa, synthetic construct
YTKAQSG

SEQ ID NO: 30689 - protein, 7 aa, synthetic construct
SSGGRVV

SEQ ID NO: 30690 - protein, 7 aa, synthetic construct
FNKGSQG

SEQ ID NO: 30691 - protein, 7 aa, synthetic construct
LDKFSKM

SEQ ID NO: 30692 - protein, 7 aa, synthetic construct
NRTNQAP

SEQ ID NO: 30693 - protein, 7 aa, synthetic construct
MNRSQQA

SEQ ID NO: 30694 - protein, 7 aa, synthetic construct
ISASFSA

SEQ ID NO: 30695 - protein, 7 aa, synthetic construct
GSHVPSP

SEQ ID NO: 30696 - protein, 7 aa, synthetic construct
NWGREAS

SEQ ID NO: 30697 - protein, 7 aa, synthetic construct
FGNKNAG

SEQ ID NO: 30698 - protein, 7 aa, synthetic construct
TKKDAQS

SEQ ID NO: 30699 - protein, 7 aa, synthetic construct
PLKDQKA

SEQ ID NO: 30700 - protein, 7 aa, synthetic construct
SKVGNMG

SEQ ID NO: 30701 - protein, 7 aa, synthetic construct
SQPRNNS

SEQ ID NO: 30702 - protein, 7 aa, synthetic construct
GSNAKAG

SEQ ID NO: 30703 - protein, 7 aa, synthetic construct
THHVRSP

SEQ ID NO: 30704 - protein, 7 aa, synthetic construct
FGNVKAG

SEQ ID NO: 30705 - protein, 7 aa, synthetic construct
PTTQHRA

SEQ ID NO: 30706 - protein, 7 aa, synthetic construct
RPGGTQA

SEQ ID NO: 30707 - protein, 7 aa, synthetic construct
NSPKGQY

SEQ ID NO: 30708 - protein, 7 aa, synthetic construct
GKGTASG

SEQ ID NO: 30709 - protein, 7 aa, synthetic construct
FGHHAKE

SEQ ID NO: 30710 - protein, 7 aa, synthetic construct
QQRGMSP

SEQ ID NO: 30711 - protein, 7 aa, synthetic construct
KNAGVSA

SEQ ID NO: 30712 - protein, 7 aa, synthetic construct
FGKQSTN

SEQ ID NO: 30713 - protein, 7 aa, synthetic construct
SAVPKFN

SEQ ID NO: 30714 - protein, 7 aa, synthetic construct
TAKTTMP

SEQ ID NO: 30715 - protein, 7 aa, synthetic construct
MRPEQGN

SEQ ID NO: 30716 - protein, 7 aa, synthetic construct
YGNKGVG

SEQ ID NO: 30717 - protein, 7 aa, synthetic construct
KGNSVVA

SEQ ID NO: 30718 - protein, 7 aa, synthetic construct
HGNLHLA

SEQ ID NO: 30719 - protein, 7 aa, synthetic construct
NGRANMP

SEQ ID NO: 30720 - protein, 7 aa, synthetic construct
HTSHSKF

SEQ ID NO: 30721 - protein, 7 aa, synthetic construct
SFKLPMT

SEQ ID NO: 30722 - protein, 7 aa, synthetic construct
PKNVVGG

SEQ ID NO: 30723 - protein, 7 aa, synthetic construct
RMSSGNG

SEQ ID NO: 30724 - protein, 7 aa, synthetic construct
QKGPLSA

SEQ ID NO: 30725 - protein, 7 aa, synthetic construct
NRTMTQP

SEQ ID NO: 30726 - protein, 7 aa, synthetic construct
KYSNNQP

SEQ ID NO: 30727 - protein, 7 aa, synthetic construct
SPHYPAT

SEQ ID NO: 30728 - protein, 7 aa, synthetic construct
AVQSRTA

SEQ ID NO: 30729 - protein, 7 aa, synthetic construct
VHKRSDD

SEQ ID NO: 30730 - protein, 7 aa, synthetic construct
IKSPNNT

SEQ ID NO: 30731 - protein, 7 aa, synthetic construct
TKTNMGG

SEQ ID NO: 30732 - protein, 7 aa, synthetic construct
MAVHKSS

SEQ ID NO: 30733 - protein, 7 aa, synthetic construct
YRQHGMQ

SEQ ID NO: 30734 - protein, 7 aa, synthetic construct
GEKAFGG

SEQ ID NO: 30735 - protein, 7 aa, synthetic construct
RSYGIEG

SEQ ID NO: 30736 - protein, 7 aa, synthetic construct
WKDMRKD

SEQ ID NO: 30737 - protein, 7 aa, synthetic construct
PQKSGIA

SEQ ID NO: 30738 - protein, 7 aa, synthetic construct
QNMKMPI

SEQ ID NO: 30739 - protein, 7 aa, synthetic construct
YKGSTAP

SEQ ID NO: 30740 - protein, 7 aa, synthetic construct
MTPHTAA

SEQ ID NO: 30741 - protein, 7 aa, synthetic construct
GKHRDDS

SEQ ID NO: 30742 - protein, 7 aa, synthetic construct
NTVNLKS

SEQ ID NO: 30743 - protein, 7 aa, synthetic construct
FKQVTNA

SEQ ID NO: 30744 - protein, 7 aa, synthetic construct
YGSTRQS

SEQ ID NO: 30745 - protein, 7 aa, synthetic construct
SQIKGAN

SEQ ID NO: 30746 - protein, 7 aa, synthetic construct
MATRKHD

SEQ ID NO: 30747 - protein, 7 aa, synthetic construct
RGHNPDT

SEQ ID NO: 30748 - protein, 7 aa, synthetic construct
IKGALTP

SEQ ID NO: 30749 - protein, 7 aa, synthetic construct
PNRGGTA

SEQ ID NO: 30750 - protein, 7 aa, synthetic construct
IPRGGEF

SEQ ID NO: 30751 - protein, 7 aa, synthetic construct
IKPGATS

SEQ ID NO: 30752 - protein, 7 aa, synthetic construct
TARTSFG

SEQ ID NO: 30753 - protein, 7 aa, synthetic construct
LNSVVKQ

SEQ ID NO: 30754 - protein, 7 aa, synthetic construct
RSQSVAG

SEQ ID NO: 30755 - protein, 7 aa, synthetic construct
SKSPNAA

SEQ ID NO: 30756 - protein, 7 aa, synthetic construct
ETGARHG

SEQ ID NO: 30757 - protein, 7 aa, synthetic construct
NKQVNTA

SEQ ID NO: 30758 - protein, 7 aa, synthetic construct
GNNIRTQ

SEQ ID NO: 30759 - protein, 7 aa, synthetic construct
VTNKSSG

SEQ ID NO: 30760 - protein, 7 aa, synthetic construct
WAPHMSN

SEQ ID NO: 30761 - protein, 7 aa, synthetic construct
SPRTTGG

SEQ ID NO: 30762 - protein, 7 aa, synthetic construct
TIRTNME

SEQ ID NO: 30763 - protein, 7 aa, synthetic construct
FPHVKYS

SEQ ID NO: 30764 - protein, 7 aa, synthetic construct
LGKHQVN

SEQ ID NO: 30765 - protein, 7 aa, synthetic construct
KVQQKAD

SEQ ID NO: 30766 - protein, 7 aa, synthetic construct
TNARGGG

SEQ ID NO: 30767 - protein, 7 aa, synthetic construct
KDKSVSG

SEQ ID NO: 30768 - protein, 7 aa, synthetic construct
FSKQSQA

SEQ ID NO: 30769 - protein, 7 aa, synthetic construct
KNNAGDA

SEQ ID NO: 30770 - protein, 7 aa, synthetic construct
NQVGRQA

SEQ ID NO: 30771 - protein, 7 aa, synthetic construct
KTQGGIG

SEQ ID NO: 30772 - protein, 7 aa, synthetic construct
MNKNVDK

SEQ ID NO: 30773 - protein, 7 aa, synthetic construct
GQGSKSA

SEQ ID NO: 30774 - protein, 7 aa, synthetic construct
RQGSNGA

SEQ ID NO: 30775 - protein, 7 aa, synthetic construct
GKASHGT

SEQ ID NO: 30776 - protein, 7 aa, synthetic construct
TKSSPNT

SEQ ID NO: 30777 - protein, 7 aa, synthetic construct
QKIGDRQ

SEQ ID NO: 30778 - protein, 7 aa, synthetic construct
PEPHKPA

SEQ ID NO: 30779 - protein, 7 aa, synthetic construct
FHQHTSA

SEQ ID NO: 30780 - protein, 7 aa, synthetic construct
SKHNGNS

SEQ ID NO: 30781 - protein, 7 aa, synthetic construct
KSGTSYG

SEQ ID NO: 30782 - protein, 7 aa, synthetic construct
VQKVNNG

SEQ ID NO: 30783 - protein, 7 aa, synthetic construct
YKQTQGG

SEQ ID NO: 30784 - protein, 7 aa, synthetic construct
GKQYSTG

SEQ ID NO: 30785 - protein, 7 aa, synthetic construct
MKVGNRE

SEQ ID NO: 30786 - protein, 7 aa, synthetic construct
YLGGRAG

SEQ ID NO: 30787 - protein, 7 aa, synthetic construct
KPHQMGS

SEQ ID NO: 30788 - protein, 7 aa, synthetic construct
KAVNANM

SEQ ID NO: 30789 - protein, 7 aa, synthetic construct
DNRISVG

SEQ ID NO: 30790 - protein, 7 aa, synthetic construct
GMKYSNA

SEQ ID NO: 30791 - protein, 7 aa, synthetic construct
SPKQSAG

SEQ ID NO: 30792 - protein, 7 aa, synthetic construct
AAKANSG

SEQ ID NO: 30793 - protein, 7 aa, synthetic construct
RITKQDE

SEQ ID NO: 30794 - protein, 7 aa, synthetic construct
INMKISQ

SEQ ID NO: 30795 - protein, 7 aa, synthetic construct
TRIAKEP

SEQ ID NO: 30796 - protein, 7 aa, synthetic construct
GQNRTAA

SEQ ID NO: 30797 - protein, 7 aa, synthetic construct
KTQYATP

SEQ ID NO: 30798 - protein, 7 aa, synthetic construct
GKPSLGM

SEQ ID NO: 30799 - protein, 7 aa, synthetic construct
SGRVPRD

SEQ ID NO: 30800 - protein, 7 aa, synthetic construct
WHNAVVG

SEQ ID NO: 30801 - protein, 7 aa, synthetic construct
NRSQVSP

SEQ ID NO: 30802 - protein, 7 aa, synthetic construct
KATVQLG

SEQ ID NO: 30803 - protein, 7 aa, synthetic construct
QKAGMMG

SEQ ID NO: 30804 - protein, 7 aa, synthetic construct
GKTIRDQ

SEQ ID NO: 30805 - protein, 7 aa, synthetic construct
NRAGSNG

SEQ ID NO: 30806 - protein, 7 aa, synthetic construct
TGPVRSG

SEQ ID NO: 30807 - protein, 7 aa, synthetic construct
ASKNSMA

SEQ ID NO: 30808 - protein, 7 aa, synthetic construct
GITSKPT

SEQ ID NO: 30809 - protein, 7 aa, synthetic construct
WNKLGGG

SEQ ID NO: 30810 - protein, 7 aa, synthetic construct
TMKNTQP

SEQ ID NO: 30811 - protein, 7 aa, synthetic construct
KPAQSNS

SEQ ID NO: 30812 - protein, 7 aa, synthetic construct
PKGSNQS

SEQ ID NO: 30813 - protein, 7 aa, synthetic construct
KSGAQKE

SEQ ID NO: 30814 - protein, 7 aa, synthetic construct
GKYSQDS

SEQ ID NO: 30815 - protein, 7 aa, synthetic construct
YGNKAGG

SEQ ID NO: 30816 - protein, 7 aa, synthetic construct
TDKMKSA

SEQ ID NO: 30817 - protein, 7 aa, synthetic construct
NKYTQGP

SEQ ID NO: 30818 - protein, 7 aa, synthetic construct
KTANGFA

SEQ ID NO: 30819 - protein, 7 aa, synthetic construct
GGHTQGG

SEQ ID NO: 30820 - protein, 7 aa, synthetic construct
MSGTRMG

SEQ ID NO: 30821 - protein, 7 aa, synthetic construct
NKMSQNP

SEQ ID NO: 30822 - protein, 7 aa, synthetic construct
IHTVTHS

SEQ ID NO: 30823 - protein, 7 aa, synthetic construct
MVPKVNP

SEQ ID NO: 30824 - protein, 7 aa, synthetic construct
FAGHHHQ

SEQ ID NO: 30825 - protein, 7 aa, synthetic construct
YGRQKDD

SEQ ID NO: 30826 - protein, 7 aa, synthetic construct
EMDTTKQ

SEQ ID NO: 30827 - protein, 7 aa, synthetic construct
QRMPLQQ

SEQ ID NO: 30828 - protein, 7 aa, synthetic construct
TKVIKFP

SEQ ID NO: 30829 - protein, 7 aa, synthetic construct
SFRGGAI

SEQ ID NO: 30830 - protein, 7 aa, synthetic construct
KSSSSYL

SEQ ID NO: 30831 - protein, 7 aa, synthetic construct
NDSRGRM

SEQ ID NO: 30832 - protein, 7 aa, synthetic construct
QHGGSSR

SEQ ID NO: 30833 - protein, 7 aa, synthetic construct
RMRDGTA

SEQ ID NO: 30834 - protein, 7 aa, synthetic construct
PKATGGG

SEQ ID NO: 30835 - protein, 7 aa, synthetic construct
MANHLQP

SEQ ID NO: 30836 - protein, 7 aa, synthetic construct
ITATYAG

SEQ ID NO: 30837 - protein, 7 aa, synthetic construct
NNKASSP

SEQ ID NO: 30838 - protein, 7 aa, synthetic construct
MTSAGRG

SEQ ID NO: 30839 - protein, 7 aa, synthetic construct
RDRTIDG

SEQ ID NO: 30840 - protein, 7 aa, synthetic construct
TSKGPGG

SEQ ID NO: 30841 - protein, 7 aa, synthetic construct
ADQKMLG

SEQ ID NO: 30842 - protein, 7 aa, synthetic construct
TKNVNTG

SEQ ID NO: 30843 - protein, 7 aa, synthetic construct
VGKFVHM

SEQ ID NO: 30844 - protein, 7 aa, synthetic construct
HGVKWDA

SEQ ID NO: 30845 - protein, 7 aa, synthetic construct
AMNKMGS

SEQ ID NO: 30846 - protein, 7 aa, synthetic construct
RNSAQVG

SEQ ID NO: 30847 - protein, 7 aa, synthetic construct
KASTNVA

SEQ ID NO: 30848 - protein, 7 aa, synthetic construct
QDLTKSP

SEQ ID NO: 30849 - protein, 7 aa, synthetic construct
PPTKGMG

SEQ ID NO: 30850 - protein, 7 aa, synthetic construct
DKKGVGA

SEQ ID NO: 30851 - protein, 7 aa, synthetic construct
KANNNIS

SEQ ID NO: 30852 - protein, 7 aa, synthetic construct
SKANQSL

SEQ ID NO: 30853 - protein, 7 aa, synthetic construct
SRNSGVA

SEQ ID NO: 30854 - protein, 7 aa, synthetic construct
SGVSRQA

SEQ ID NO: 30855 - protein, 7 aa, synthetic construct
YTRTSPI

SEQ ID NO: 30856 - protein, 7 aa, synthetic construct
KGAQPTA

SEQ ID NO: 30857 - protein, 7 aa, synthetic construct
QMQGRQA

SEQ ID NO: 30858 - protein, 7 aa, synthetic construct
GKNIGQG

SEQ ID NO: 30859 - protein, 7 aa, synthetic construct
QNHKETM

SEQ ID NO: 30860 - protein, 7 aa, synthetic construct
FRTDTRA

SEQ ID NO: 30861 - protein, 7 aa, synthetic construct
KMANVSG

SEQ ID NO: 30862 - protein, 7 aa, synthetic construct
NNHFATG

SEQ ID NO: 30863 - protein, 7 aa, synthetic construct
LGHMSPH

SEQ ID NO: 30864 - protein, 7 aa, synthetic construct
AHKQHLP

SEQ ID NO: 30865 - protein, 7 aa, synthetic construct
TNARSTG

SEQ ID NO: 30866 - protein, 7 aa, synthetic construct
IILGMKE

SEQ ID NO: 30867 - protein, 7 aa, synthetic construct
QQAKAPA

SEQ ID NO: 30868 - protein, 7 aa, synthetic construct
KKDTSGY

SEQ ID NO: 30869 - protein, 7 aa, synthetic construct
STHRTAA

SEQ ID NO: 30870 - protein, 7 aa, synthetic construct
MHNGKSM

SEQ ID NO: 30871 - protein, 7 aa, synthetic construct
IYNHKMP

SEQ ID NO: 30872 - protein, 7 aa, synthetic construct
GGNSRGA

SEQ ID NO: 30873 - protein, 7 aa, synthetic construct
YGAQRPA

SEQ ID NO: 30874 - protein, 7 aa, synthetic construct
IVRQVAN

SEQ ID NO: 30875 - protein, 7 aa, synthetic construct
RPHDTHA

SEQ ID NO: 30876 - protein, 7 aa, synthetic construct
PQKAGNA

SEQ ID NO: 30877 - protein, 7 aa, synthetic construct
HVKFTNG

SEQ ID NO: 30878 - protein, 7 aa, synthetic construct
NSASRVG

SEQ ID NO: 30879 - protein, 7 aa, synthetic construct
GQVKTSG

SEQ ID NO: 30880 - protein, 7 aa, synthetic construct
GKSLTGG

SEQ ID NO: 30881 - protein, 7 aa, synthetic construct
PKSANNA

SEQ ID NO: 30882 - protein, 7 aa, synthetic construct
RDPHQFA

SEQ ID NO: 30883 - protein, 7 aa, synthetic construct
GKVPSYT

SEQ ID NO: 30884 - protein, 7 aa, synthetic construct
QKGWTND

SEQ ID NO: 30885 - protein, 7 aa, synthetic construct
IPSKNVI

SEQ ID NO: 30886 - protein, 7 aa, synthetic construct
YGTQKSQ

SEQ ID NO: 30887 - protein, 7 aa, synthetic construct
LTLGKSP

SEQ ID NO: 30888 - protein, 7 aa, synthetic construct
KLPVGSG

SEQ ID NO: 30889 - protein, 7 aa, synthetic construct
YKGQMFD

SEQ ID NO: 30890 - protein, 7 aa, synthetic construct
HSKVIIA

SEQ ID NO: 30891 - protein, 7 aa, synthetic construct
YGTAIKN

SEQ ID NO: 30892 - protein, 7 aa, synthetic construct
TKNVSTG

SEQ ID NO: 30893 - protein, 7 aa, synthetic construct
NARTTNG

SEQ ID NO: 30894 - protein, 7 aa, synthetic construct
IMTRVPQ

SEQ ID NO: 30895 - protein, 7 aa, synthetic construct
TNRQVGG

SEQ ID NO: 30896 - protein, 7 aa, synthetic construct
QRPNTAS

SEQ ID NO: 30897 - protein, 7 aa, synthetic construct
TKQGVGH

SEQ ID NO: 30898 - protein, 7 aa, synthetic construct
IDKKTMG

SEQ ID NO: 30899 - protein, 7 aa, synthetic construct
HVNGKGG

SEQ ID NO: 30900 - protein, 7 aa, synthetic construct
NSGKAGQ

SEQ ID NO: 30901 - protein, 7 aa, synthetic construct
RPSDTFT

SEQ ID NO: 30902 - protein, 7 aa, synthetic construct
YKTASKD

SEQ ID NO: 30903 - protein, 7 aa, synthetic construct
VGHSAFN

SEQ ID NO: 30904 - protein, 7 aa, synthetic construct
FQTNRGS

SEQ ID NO: 30905 - protein, 7 aa, synthetic construct
TFKNGIM

SEQ ID NO: 30906 - protein, 7 aa, synthetic construct
MRSGQQS

SEQ ID NO: 30907 - protein, 7 aa, synthetic construct
KGYKSEE

SEQ ID NO: 30908 - protein, 7 aa, synthetic construct
ERRPGNT

SEQ ID NO: 30909 - protein, 7 aa, synthetic construct
DNERTHW

SEQ ID NO: 30910 - protein, 7 aa, synthetic construct
SGKTAAA

SEQ ID NO: 30911 - protein, 7 aa, synthetic construct
PRSNGGA

SEQ ID NO: 30912 - protein, 7 aa, synthetic construct
IREKNSL

SEQ ID NO: 30913 - protein, 7 aa, synthetic construct
NMGRTQG

SEQ ID NO: 30914 - protein, 7 aa, synthetic construct
FERIVSN

SEQ ID NO: 30915 - protein, 7 aa, synthetic construct
KFPSSAG

SEQ ID NO: 30916 - protein, 7 aa, synthetic construct
RSNVQSI

SEQ ID NO: 30917 - protein, 7 aa, synthetic construct
SIRNHAS

SEQ ID NO: 30918 - protein, 7 aa, synthetic construct
YYRGAAA

SEQ ID NO: 30919 - protein, 7 aa, synthetic construct
QDVRYAH

SEQ ID NO: 30920 - protein, 7 aa, synthetic construct
QANGTKN

SEQ ID NO: 30921 - protein, 7 aa, synthetic construct
KQSSSQS

SEQ ID NO: 30922 - protein, 7 aa, synthetic construct
YSNPTTI

SEQ ID NO: 30923 - protein, 7 aa, synthetic construct
RFPAHNG

SEQ ID NO: 30924 - protein, 7 aa, synthetic construct
TRDGGRV

SEQ ID NO: 30925 - protein, 7 aa, synthetic construct
GQKASTG

SEQ ID NO: 30926 - protein, 7 aa, synthetic construct
FGQYNVG

SEQ ID NO: 30927 - protein, 7 aa, synthetic construct
HHNYAGA

SEQ ID NO: 30928 - protein, 7 aa, synthetic construct
KAKANLE

SEQ ID NO: 30929 - protein, 7 aa, synthetic construct
FRPGHGQ

SEQ ID NO: 30930 - protein, 7 aa, synthetic construct
TNVKMQP

SEQ ID NO: 30931 - protein, 7 aa, synthetic construct
DTRQVKA

SEQ ID NO: 30932 - protein, 7 aa, synthetic construct
IAPGTGR

SEQ ID NO: 30933 - protein, 7 aa, synthetic construct
FRNGNSG

SEQ ID NO: 30934 - protein, 7 aa, synthetic construct
QTLKPNP

SEQ ID NO: 30935 - protein, 7 aa, synthetic construct
HGILSHP

SEQ ID NO: 30936 - protein, 7 aa, synthetic construct
QRPNVNG

SEQ ID NO: 30937 - protein, 7 aa, synthetic construct
HFNATAK

SEQ ID NO: 30938 - protein, 7 aa, synthetic construct
GTFGQKS

SEQ ID NO: 30939 - protein, 7 aa, synthetic construct
GPRNNSA

SEQ ID NO: 30940 - protein, 7 aa, synthetic construct
MKTNSNS

SEQ ID NO: 30941 - protein, 7 aa, synthetic construct
TKGVTNG

SEQ ID NO: 30942 - protein, 7 aa, synthetic construct
KTKISDM

SEQ ID NO: 30943 - protein, 7 aa, synthetic construct
RVANFHG

SEQ ID NO: 30944 - protein, 7 aa, synthetic construct
SKPQYGS

SEQ ID NO: 30945 - protein, 7 aa, synthetic construct
FNPVSTP

SEQ ID NO: 30946 - protein, 7 aa, synthetic construct
SNKQTAP

SEQ ID NO: 30947 - protein, 7 aa, synthetic construct
KQTSYEG

SEQ ID NO: 30948 - protein, 7 aa, synthetic construct
YGHNGGP

SEQ ID NO: 30949 - protein, 7 aa, synthetic construct
DKKEKMY

SEQ ID NO: 30950 - protein, 7 aa, synthetic construct
PDKLRMG

SEQ ID NO: 30951 - protein, 7 aa, synthetic construct
IMQGRVS

SEQ ID NO: 30952 - protein, 7 aa, synthetic construct
ANDIKTK

SEQ ID NO: 30953 - protein, 7 aa, synthetic construct
RFPSLSE

SEQ ID NO: 30954 - protein, 7 aa, synthetic construct
HHGMRDS

SEQ ID NO: 30955 - protein, 7 aa, synthetic construct
KPGPTSA

SEQ ID NO: 30956 - protein, 7 aa, synthetic construct
IQMSRGA

SEQ ID NO: 30957 - protein, 7 aa, synthetic construct
MKNDQRS

SEQ ID NO: 30958 - protein, 7 aa, synthetic construct
TGNRAGA

SEQ ID NO: 30959 - protein, 7 aa, synthetic construct
GKQSSQA

SEQ ID NO: 30960 - protein, 7 aa, synthetic construct
SARNSLA

SEQ ID NO: 30961 - protein, 7 aa, synthetic construct
IGQHARV

SEQ ID NO: 30962 - protein, 7 aa, synthetic construct
KNNTTGN

SEQ ID NO: 30963 - protein, 7 aa, synthetic construct
MQPMKTG

SEQ ID NO: 30964 - protein, 7 aa, synthetic construct
SKMSTAA

SEQ ID NO: 30965 - protein, 7 aa, synthetic construct
NKQSPVG

SEQ ID NO: 30966 - protein, 7 aa, synthetic construct
HQGQRVV

SEQ ID NO: 30967 - protein, 7 aa, synthetic construct
FMKGMTN

SEQ ID NO: 30968 - protein, 7 aa, synthetic construct
PKDTPIN

SEQ ID NO: 30969 - protein, 7 aa, synthetic construct
HRPLDPG

SEQ ID NO: 30970 - protein, 7 aa, synthetic construct
SKMQEGH

SEQ ID NO: 30971 - protein, 7 aa, synthetic construct
KPGSQVS

SEQ ID NO: 30972 - protein, 7 aa, synthetic construct
NPHGARG

SEQ ID NO: 30973 - protein, 7 aa, synthetic construct
GGHRQQP

SEQ ID NO: 30974 - protein, 7 aa, synthetic construct
RAYGASE

SEQ ID NO: 30975 - protein, 7 aa, synthetic construct
THQGFNP

SEQ ID NO: 30976 - protein, 7 aa, synthetic construct
MSNTNRG

SEQ ID NO: 30977 - protein, 7 aa, synthetic construct
FEPPKRF

SEQ ID NO: 30978 - protein, 7 aa, synthetic construct
HHVLPEG

SEQ ID NO: 30979 - protein, 7 aa, synthetic construct
IYTAKTG

SEQ ID NO: 30980 - protein, 7 aa, synthetic construct
MHTSSKA

SEQ ID NO: 30981 - protein, 7 aa, synthetic construct
ITNGKNS

SEQ ID NO: 30982 - protein, 7 aa, synthetic construct
SKHQPMN

SEQ ID NO: 30983 - protein, 7 aa, synthetic construct
EIMYKNA

SEQ ID NO: 30984 - protein, 7 aa, synthetic construct
TGARIVH

SEQ ID NO: 30985 - protein, 7 aa, synthetic construct
NHTRMAD

SEQ ID NO: 30986 - protein, 7 aa, synthetic construct
RSNKEAY

SEQ ID NO: 30987 - protein, 7 aa, synthetic construct
QHRMLGA

SEQ ID NO: 30988 - protein, 7 aa, synthetic construct
SHQYLNE

SEQ ID NO: 30989 - protein, 7 aa, synthetic construct
RSNTSSV

SEQ ID NO: 30990 - protein, 7 aa, synthetic construct
NQKLSVG

SEQ ID NO: 30991 - protein, 7 aa, synthetic construct
SVNYSKN

SEQ ID NO: 30992 - protein, 7 aa, synthetic construct
YVGNKQG

SEQ ID NO: 30993 - protein, 7 aa, synthetic construct
QRAPTQS

SEQ ID NO: 30994 - protein, 7 aa, synthetic construct
GSATHNG

SEQ ID NO: 30995 - protein, 7 aa, synthetic construct
LKPNEPW

SEQ ID NO: 30996 - protein, 7 aa, synthetic construct
MKKLYHE

SEQ ID NO: 30997 - protein, 7 aa, synthetic construct
QRPNAAA

SEQ ID NO: 30998 - protein, 7 aa, synthetic construct
QNNARQG

SEQ ID NO: 30999 - protein, 7 aa, synthetic construct
RSQTVSA

SEQ ID NO: 31000 - protein, 7 aa, synthetic construct
RTNPNAG

SEQ ID NO: 31001 - protein, 7 aa, synthetic construct
AFPRSDP

SEQ ID NO: 31002 - protein, 7 aa, synthetic construct
YPGQKVT

SEQ ID NO: 31003 - protein, 7 aa, synthetic construct
TGPKSSG

SEQ ID NO: 31004 - protein, 7 aa, synthetic construct
MGAKMGG

SEQ ID NO: 31005 - protein, 7 aa, synthetic construct
KSTPQSS

SEQ ID NO: 31006 - protein, 7 aa, synthetic construct
MRHNVQG

SEQ ID NO: 31007 - protein, 7 aa, synthetic construct
AVSKAVM

SEQ ID NO: 31008 - protein, 7 aa, synthetic construct
QSRSQGA

SEQ ID NO: 31009 - protein, 7 aa, synthetic construct
NKNDRMG

SEQ ID NO: 31010 - protein, 7 aa, synthetic construct
NTNPIRI

SEQ ID NO: 31011 - protein, 7 aa, synthetic construct
KSPVGGG

SEQ ID NO: 31012 - protein, 7 aa, synthetic construct
KSGTTKD

SEQ ID NO: 31013 - protein, 7 aa, synthetic construct
QAKQNQN

SEQ ID NO: 31014 - protein, 7 aa, synthetic construct
GHPMTHA

SEQ ID NO: 31015 - protein, 7 aa, synthetic construct
RMGSGNG

SEQ ID NO: 31016 - protein, 7 aa, synthetic construct
RKDNVAG

SEQ ID NO: 31017 - protein, 7 aa, synthetic construct
SKAGTNG

SEQ ID NO: 31018 - protein, 7 aa, synthetic construct
VGKSMAA

SEQ ID NO: 31019 - protein, 7 aa, synthetic construct
RKPDMTG

SEQ ID NO: 31020 - protein, 7 aa, synthetic construct
TRNSQQA

SEQ ID NO: 31021 - protein, 7 aa, synthetic construct
MGNFRRE

SEQ ID NO: 31022 - protein, 7 aa, synthetic construct
MKTGLER

SEQ ID NO: 31023 - protein, 7 aa, synthetic construct
KNGGDKP

SEQ ID NO: 31024 - protein, 7 aa, synthetic construct
NKAVSKD

SEQ ID NO: 31025 - protein, 7 aa, synthetic construct
FGKQKEP

SEQ ID NO: 31026 - protein, 7 aa, synthetic construct
RGNTIAG

SEQ ID NO: 31027 - protein, 7 aa, synthetic construct
GAAHMHA

SEQ ID NO: 31028 - protein, 7 aa, synthetic construct
GSGQKGG

SEQ ID NO: 31029 - protein, 7 aa, synthetic construct
MRGQVTG

SEQ ID NO: 31030 - protein, 7 aa, synthetic construct
NTRANQA

SEQ ID NO: 31031 - protein, 7 aa, synthetic construct
YSKGVGH

SEQ ID NO: 31032 - protein, 7 aa, synthetic construct
RDQVNHR

SEQ ID NO: 31033 - protein, 7 aa, synthetic construct
VRTNSTA

SEQ ID NO: 31034 - protein, 7 aa, synthetic construct
NPKMNDY

SEQ ID NO: 31035 - protein, 7 aa, synthetic construct
NKGLGKD

SEQ ID NO: 31036 - protein, 7 aa, synthetic construct
YNKPEHR

SEQ ID NO: 31037 - protein, 7 aa, synthetic construct
RDRSAVA

SEQ ID NO: 31038 - protein, 7 aa, synthetic construct
VNNKNQG

SEQ ID NO: 31039 - protein, 7 aa, synthetic construct
RMDTKVG

SEQ ID NO: 31040 - protein, 7 aa, synthetic construct
ISHYKVS

SEQ ID NO: 31041 - protein, 7 aa, synthetic construct
NKQDRGG

SEQ ID NO: 31042 - protein, 7 aa, synthetic construct
KNVQHFS

SEQ ID NO: 31043 - protein, 7 aa, synthetic construct
IGKGGMV

SEQ ID NO: 31044 - protein, 7 aa, synthetic construct
TVKFDKN

SEQ ID NO: 31045 - protein, 7 aa, synthetic construct
GTKPQGG

SEQ ID NO: 31046 - protein, 7 aa, synthetic construct
VGKERSA

SEQ ID NO: 31047 - protein, 7 aa, synthetic construct
MQGDMSR

SEQ ID NO: 31048 - protein, 7 aa, synthetic construct
EMNGKPQ

SEQ ID NO: 31049 - protein, 7 aa, synthetic construct
NRSGMGS

SEQ ID NO: 31050 - protein, 7 aa, synthetic construct
TARSTIA

SEQ ID NO: 31051 - protein, 7 aa, synthetic construct
NPNLKIG

SEQ ID NO: 31052 - protein, 7 aa, synthetic construct
MGGVNKG

SEQ ID NO: 31053 - protein, 7 aa, synthetic construct
RQSQGMG

SEQ ID NO: 31054 - protein, 7 aa, synthetic construct
MRSAANA

SEQ ID NO: 31055 - protein, 7 aa, synthetic construct
TRPQNAI

SEQ ID NO: 31056 - protein, 7 aa, synthetic construct
YNKSMTG

SEQ ID NO: 31057 - protein, 7 aa, synthetic construct
DKTSRQG

SEQ ID NO: 31058 - protein, 7 aa, synthetic construct
RNGQSSA

SEQ ID NO: 31059 - protein, 7 aa, synthetic construct
YKGTSGQ

SEQ ID NO: 31060 - protein, 7 aa, synthetic construct
DFIHTKA

SEQ ID NO: 31061 - protein, 7 aa, synthetic construct
NKQGVGG

SEQ ID NO: 31062 - protein, 7 aa, synthetic construct
KVNAMKE

SEQ ID NO: 31063 - protein, 7 aa, synthetic construct
LGRNVQA

SEQ ID NO: 31064 - protein, 7 aa, synthetic construct
AKNNSSG

SEQ ID NO: 31065 - protein, 7 aa, synthetic construct
TESQYKF

SEQ ID NO: 31066 - protein, 7 aa, synthetic construct
QSKVSGG

SEQ ID NO: 31067 - protein, 7 aa, synthetic construct
VGSKNTA

SEQ ID NO: 31068 - protein, 7 aa, synthetic construct
LELKPVL

SEQ ID NO: 31069 - protein, 7 aa, synthetic construct
TNVSRSA

SEQ ID NO: 31070 - protein, 7 aa, synthetic construct
KTSIHEV

SEQ ID NO: 31071 - protein, 7 aa, synthetic construct
RTGGATG

SEQ ID NO: 31072 - protein, 7 aa, synthetic construct
HVNNVNN

SEQ ID NO: 31073 - protein, 7 aa, synthetic construct
QKDRQTT

SEQ ID NO: 31074 - protein, 7 aa, synthetic construct
VQNHMAG

SEQ ID NO: 31075 - protein, 7 aa, synthetic construct
GLGVLRE

SEQ ID NO: 31076 - protein, 7 aa, synthetic construct
ATNGKNG

SEQ ID NO: 31077 - protein, 7 aa, synthetic construct
PSRNVGP

SEQ ID NO: 31078 - protein, 7 aa, synthetic construct
MFAQKRD

SEQ ID NO: 31079 - protein, 7 aa, synthetic construct
QQPHAKI

SEQ ID NO: 31080 - protein, 7 aa, synthetic construct
NMKQSTS

SEQ ID NO: 31081 - protein, 7 aa, synthetic construct
QPKYGDK

SEQ ID NO: 31082 - protein, 7 aa, synthetic construct
KKPMAGD

SEQ ID NO: 31083 - protein, 7 aa, synthetic construct
MNFSKSV

SEQ ID NO: 31084 - protein, 7 aa, synthetic construct
GLEKRKD

SEQ ID NO: 31085 - protein, 7 aa, synthetic construct
FTGLNTA

SEQ ID NO: 31086 - protein, 7 aa, synthetic construct
TKMAAAG

SEQ ID NO: 31087 - protein, 7 aa, synthetic construct
NKPGGGG

SEQ ID NO: 31088 - protein, 7 aa, synthetic construct
RIPSADR

SEQ ID NO: 31089 - protein, 7 aa, synthetic construct
FNKSSQY

SEQ ID NO: 31090 - protein, 7 aa, synthetic construct
KNGMNQP

SEQ ID NO: 31091 - protein, 7 aa, synthetic construct
EFRQVNA

SEQ ID NO: 31092 - protein, 7 aa, synthetic construct
KITTQHV

SEQ ID NO: 31093 - protein, 7 aa, synthetic construct
KYPSAMA

SEQ ID NO: 31094 - protein, 7 aa, synthetic construct
FKNNTPA

SEQ ID NO: 31095 - protein, 7 aa, synthetic construct
RHGTTPA

SEQ ID NO: 31096 - protein, 7 aa, synthetic construct
GRVSNGF

SEQ ID NO: 31097 - protein, 7 aa, synthetic construct
GWKENSG

SEQ ID NO: 31098 - protein, 7 aa, synthetic construct
LNKVQNN

SEQ ID NO: 31099 - protein, 7 aa, synthetic construct
VNPTTSR

SEQ ID NO: 31100 - protein, 7 aa, synthetic construct
QNRPGQG

SEQ ID NO: 31101 - protein, 7 aa, synthetic construct
DGLKGFS

SEQ ID NO: 31102 - protein, 7 aa, synthetic construct
QQKTGAA

SEQ ID NO: 31103 - protein, 7 aa, synthetic construct
VYKNMEK

SEQ ID NO: 31104 - protein, 7 aa, synthetic construct
VRGNNNP

SEQ ID NO: 31105 - protein, 7 aa, synthetic construct
RGPGMQA

SEQ ID NO: 31106 - protein, 7 aa, synthetic construct
LLHITTA

SEQ ID NO: 31107 - protein, 7 aa, synthetic construct
TNKGPMS

SEQ ID NO: 31108 - protein, 7 aa, synthetic construct
NSTAVRH

SEQ ID NO: 31109 - protein, 7 aa, synthetic construct
IKNAQSH

SEQ ID NO: 31110 - protein, 7 aa, synthetic construct
RNPNAQA

SEQ ID NO: 31111 - protein, 7 aa, synthetic construct
QRATMVG

SEQ ID NO: 31112 - protein, 7 aa, synthetic construct
NNPQAKG

SEQ ID NO: 31113 - protein, 7 aa, synthetic construct
NTNRGTG

SEQ ID NO: 31114 - protein, 7 aa, synthetic construct
LKQPNTA

SEQ ID NO: 31115 - protein, 7 aa, synthetic construct
KNSGSPM

SEQ ID NO: 31116 - protein, 7 aa, synthetic construct
SHPGPGR

SEQ ID NO: 31117 - protein, 7 aa, synthetic construct
MGKSHPF

SEQ ID NO: 31118 - protein, 7 aa, synthetic construct
NFKTQPQ

SEQ ID NO: 31119 - protein, 7 aa, synthetic construct
TKQSTYA

SEQ ID NO: 31120 - protein, 7 aa, synthetic construct
AKGMTEV

SEQ ID NO: 31121 - protein, 7 aa, synthetic construct
NMKQVYS

SEQ ID NO: 31122 - protein, 7 aa, synthetic construct
KDGKAMG

SEQ ID NO: 31123 - protein, 7 aa, synthetic construct
TATTRGS

SEQ ID NO: 31124 - protein, 7 aa, synthetic construct
NRERPSA

SEQ ID NO: 31125 - protein, 7 aa, synthetic construct
VTGNRNA

SEQ ID NO: 31126 - protein, 7 aa, synthetic construct
MKNLQRD

SEQ ID NO: 31127 - protein, 7 aa, synthetic construct
QMAQKSS

SEQ ID NO: 31128 - protein, 7 aa, synthetic construct
MTGTKQG

SEQ ID NO: 31129 - protein, 7 aa, synthetic construct
YSSQKGM

SEQ ID NO: 31130 - protein, 7 aa, synthetic construct
KQMNSMD

SEQ ID NO: 31131 - protein, 7 aa, synthetic construct
RNNTTGS

SEQ ID NO: 31132 - protein, 7 aa, synthetic construct
YPGGGTM

SEQ ID NO: 31133 - protein, 7 aa, synthetic construct
TSGRTEL

SEQ ID NO: 31134 - protein, 7 aa, synthetic construct
NAKIEKS

SEQ ID NO: 31135 - protein, 7 aa, synthetic construct
KQSQTKD

SEQ ID NO: 31136 - protein, 7 aa, synthetic construct
RATQGGG

SEQ ID NO: 31137 - protein, 7 aa, synthetic construct
GKYSGTM

SEQ ID NO: 31138 - protein, 7 aa, synthetic construct
NRPSGMS

SEQ ID NO: 31139 - protein, 7 aa, synthetic construct
TNQQRVI

SEQ ID NO: 31140 - protein, 7 aa, synthetic construct
NAQHLSP

SEQ ID NO: 31141 - protein, 7 aa, synthetic construct
FAKTTSA

SEQ ID NO: 31142 - protein, 7 aa, synthetic construct
TTTNMRA

SEQ ID NO: 31143 - protein, 7 aa, synthetic construct
NKVTTTG

SEQ ID NO: 31144 - protein, 7 aa, synthetic construct
YGQIGHV

SEQ ID NO: 31145 - protein, 7 aa, synthetic construct
RALPVDT

SEQ ID NO: 31146 - protein, 7 aa, synthetic construct
KSKDNNA

SEQ ID NO: 31147 - protein, 7 aa, synthetic construct
QQYKVGM

SEQ ID NO: 31148 - protein, 7 aa, synthetic construct
VFQKDYH

SEQ ID NO: 31149 - protein, 7 aa, synthetic construct
NKMQQGG

SEQ ID NO: 31150 - protein, 7 aa, synthetic construct
MSKMASG

SEQ ID NO: 31151 - protein, 7 aa, synthetic construct
GRGQFAT

SEQ ID NO: 31152 - protein, 7 aa, synthetic construct
YGGKTTP

SEQ ID NO: 31153 - protein, 7 aa, synthetic construct
ALQNHSN

SEQ ID NO: 31154 - protein, 7 aa, synthetic construct
MKASHNG

SEQ ID NO: 31155 - protein, 7 aa, synthetic construct
MKMQTAA

SEQ ID NO: 31156 - protein, 7 aa, synthetic construct
KIGAGPA

SEQ ID NO: 31157 - protein, 7 aa, synthetic construct
QRHNQIN

SEQ ID NO: 31158 - protein, 7 aa, synthetic construct
TRAGLVS

SEQ ID NO: 31159 - protein, 7 aa, synthetic construct
QYKNGHS

SEQ ID NO: 31160 - protein, 7 aa, synthetic construct
NPTQKGG

SEQ ID NO: 31161 - protein, 7 aa, synthetic construct
RQQASTS

SEQ ID NO: 31162 - protein, 7 aa, synthetic construct
RGPASTP

SEQ ID NO: 31163 - protein, 7 aa, synthetic construct
VHQHNGA

SEQ ID NO: 31164 - protein, 7 aa, synthetic construct
TMHNMRD

SEQ ID NO: 31165 - protein, 7 aa, synthetic construct
KQGTPAG

SEQ ID NO: 31166 - protein, 7 aa, synthetic construct
FMKSTNG

SEQ ID NO: 31167 - protein, 7 aa, synthetic construct
TQPSMRP

SEQ ID NO: 31168 - protein, 7 aa, synthetic construct
KPHRQEL

SEQ ID NO: 31169 - protein, 7 aa, synthetic construct
FKGSNQS

SEQ ID NO: 31170 - protein, 7 aa, synthetic construct
VQSTKTA

SEQ ID NO: 31171 - protein, 7 aa, synthetic construct
TTAANKG

SEQ ID NO: 31172 - protein, 7 aa, synthetic construct
FTKMNGE

SEQ ID NO: 31173 - protein, 7 aa, synthetic construct
SRPPATP

SEQ ID NO: 31174 - protein, 7 aa, synthetic construct
KDGKTGA

SEQ ID NO: 31175 - protein, 7 aa, synthetic construct
GPTQGKS

SEQ ID NO: 31176 - protein, 7 aa, synthetic construct
PRNGTAG

SEQ ID NO: 31177 - protein, 7 aa, synthetic construct
MSKAGKD

SEQ ID NO: 31178 - protein, 7 aa, synthetic construct
NTKGGGA

SEQ ID NO: 31179 - protein, 7 aa, synthetic construct
FTVKHSG

SEQ ID NO: 31180 - protein, 7 aa, synthetic construct
YKPSQPQ

SEQ ID NO: 31181 - protein, 7 aa, synthetic construct
TPGKTDK

SEQ ID NO: 31182 - protein, 7 aa, synthetic construct
MKSQVTG

SEQ ID NO: 31183 - protein, 7 aa, synthetic construct
SAYVNSA

SEQ ID NO: 31184 - protein, 7 aa, synthetic construct
NSKVNSG

SEQ ID NO: 31185 - protein, 7 aa, synthetic construct
NKGTMKE

SEQ ID NO: 31186 - protein, 7 aa, synthetic construct
NKAVGNG

SEQ ID NO: 31187 - protein, 7 aa, synthetic construct
RTHGGAG

SEQ ID NO: 31188 - protein, 7 aa, synthetic construct
QGQSRAG

SEQ ID NO: 31189 - protein, 7 aa, synthetic construct
NKSTTGG

SEQ ID NO: 31190 - protein, 7 aa, synthetic construct
TKVTHGG

SEQ ID NO: 31191 - protein, 7 aa, synthetic construct
KLVGSVH

SEQ ID NO: 31192 - protein, 7 aa, synthetic construct
RDKSSQV

SEQ ID NO: 31193 - protein, 7 aa, synthetic construct
KGPTSMP

SEQ ID NO: 31194 - protein, 7 aa, synthetic construct
WTPTAKS

SEQ ID NO: 31195 - protein, 7 aa, synthetic construct
WKHMNVE

SEQ ID NO: 31196 - protein, 7 aa, synthetic construct
GPMRTEK

SEQ ID NO: 31197 - protein, 7 aa, synthetic construct
GAMSHGG

SEQ ID NO: 31198 - protein, 7 aa, synthetic construct
DASSPRG

SEQ ID NO: 31199 - protein, 7 aa, synthetic construct
ARTGFLG

SEQ ID NO: 31200 - protein, 7 aa, synthetic construct
MPGKTQP

SEQ ID NO: 31201 - protein, 7 aa, synthetic construct
IPGQIKG

SEQ ID NO: 31202 - protein, 7 aa, synthetic construct
SKSVMAG

SEQ ID NO: 31203 - protein, 7 aa, synthetic construct
NETLKRS

SEQ ID NO: 31204 - protein, 7 aa, synthetic construct
MHNEAKY

SEQ ID NO: 31205 - protein, 7 aa, synthetic construct
NPTNGKG

SEQ ID NO: 31206 - protein, 7 aa, synthetic construct
VPRGAQG

SEQ ID NO: 31207 - protein, 7 aa, synthetic construct
NSGNKNA

SEQ ID NO: 31208 - protein, 7 aa, synthetic construct
YPSTKTA

SEQ ID NO: 31209 - protein, 7 aa, synthetic construct
MANNGKT

SEQ ID NO: 31210 - protein, 7 aa, synthetic construct
LNQRGPV

SEQ ID NO: 31211 - protein, 7 aa, synthetic construct
KNNTTNP

SEQ ID NO: 31212 - protein, 7 aa, synthetic construct
MNKNMGG

SEQ ID NO: 31213 - protein, 7 aa, synthetic construct
HAEKSPF

SEQ ID NO: 31214 - protein, 7 aa, synthetic construct
RSSNMAP

SEQ ID NO: 31215 - protein, 7 aa, synthetic construct
MKMQPTG

SEQ ID NO: 31216 - protein, 7 aa, synthetic construct
KYPQQST

SEQ ID NO: 31217 - protein, 7 aa, synthetic construct
IGGRHDG

SEQ ID NO: 31218 - protein, 7 aa, synthetic construct
TITRYQE

SEQ ID NO: 31219 - protein, 7 aa, synthetic construct
KSNAKDP

SEQ ID NO: 31220 - protein, 7 aa, synthetic construct
DGIARQG

SEQ ID NO: 31221 - protein, 7 aa, synthetic construct
IAHKPQA

SEQ ID NO: 31222 - protein, 7 aa, synthetic construct
GTPNKMS

SEQ ID NO: 31223 - protein, 7 aa, synthetic construct
QAKTVKD

SEQ ID NO: 31224 - protein, 7 aa, synthetic construct
LSGKQSA

SEQ ID NO: 31225 - protein, 7 aa, synthetic construct
RNGPTMG

SEQ ID NO: 31226 - protein, 7 aa, synthetic construct
HGKNGNG

SEQ ID NO: 31227 - protein, 7 aa, synthetic construct
KKSDQLQ

SEQ ID NO: 31228 - protein, 7 aa, synthetic construct
QYKFEQS

SEQ ID NO: 31229 - protein, 7 aa, synthetic construct
VGRAYMP

SEQ ID NO: 31230 - protein, 7 aa, synthetic construct
RLNTAQG

SEQ ID NO: 31231 - protein, 7 aa, synthetic construct
QKATVRE

SEQ ID NO: 31232 - protein, 7 aa, synthetic construct
EHNKIKV

SEQ ID NO: 31233 - protein, 7 aa, synthetic construct
NVGSGRI

SEQ ID NO: 31234 - protein, 7 aa, synthetic construct
GGAMMHA

SEQ ID NO: 31235 - protein, 7 aa, synthetic construct
TKIAKFE

SEQ ID NO: 31236 - protein, 7 aa, synthetic construct
TARDVQR

SEQ ID NO: 31237 - protein, 7 aa, synthetic construct
RHPGWVD

SEQ ID NO: 31238 - protein, 7 aa, synthetic construct
QVGSKVG

SEQ ID NO: 31239 - protein, 7 aa, synthetic construct
QNRTQTG

SEQ ID NO: 31240 - protein, 7 aa, synthetic construct
HLRAEVG

SEQ ID NO: 31241 - protein, 7 aa, synthetic construct
QTGQRNG

SEQ ID NO: 31242 - protein, 7 aa, synthetic construct
NYKLAKD

SEQ ID NO: 31243 - protein, 7 aa, synthetic construct
SKPGAGV

SEQ ID NO: 31244 - protein, 7 aa, synthetic construct
YAPQKHM

SEQ ID NO: 31245 - protein, 7 aa, synthetic construct
KHASINA

SEQ ID NO: 31246 - protein, 7 aa, synthetic construct
KNNVSTA

SEQ ID NO: 31247 - protein, 7 aa, synthetic construct
QQGNKTG

SEQ ID NO: 31248 - protein, 7 aa, synthetic construct
NTSKASG

SEQ ID NO: 31249 - protein, 7 aa, synthetic construct
SAKGSTA

SEQ ID NO: 31250 - protein, 7 aa, synthetic construct
ENRNNNN

SEQ ID NO: 31251 - protein, 7 aa, synthetic construct
GNSAKSA

SEQ ID NO: 31252 - protein, 7 aa, synthetic construct
TGPSRVA

SEQ ID NO: 31253 - protein, 7 aa, synthetic construct
QRPGAMG

SEQ ID NO: 31254 - protein, 7 aa, synthetic construct
QGHSVMG

SEQ ID NO: 31255 - protein, 7 aa, synthetic construct
EKRSSDP

SEQ ID NO: 31256 - protein, 7 aa, synthetic construct
KMPSSMG

SEQ ID NO: 31257 - protein, 7 aa, synthetic construct
KKSDGYG

SEQ ID NO: 31258 - protein, 7 aa, synthetic construct
RNPMPTG

SEQ ID NO: 31259 - protein, 7 aa, synthetic construct
RTGGSTG

SEQ ID NO: 31260 - protein, 7 aa, synthetic construct
AYIQKSE

SEQ ID NO: 31261 - protein, 7 aa, synthetic construct
LAKGNDY

SEQ ID NO: 31262 - protein, 7 aa, synthetic construct
DGRNSIQ

SEQ ID NO: 31263 - protein, 7 aa, synthetic construct
KDKSTMG

SEQ ID NO: 31264 - protein, 7 aa, synthetic construct
QGYTKFD

SEQ ID NO: 31265 - protein, 7 aa, synthetic construct
HPKQPHD

SEQ ID NO: 31266 - protein, 7 aa, synthetic construct
GGATKMG

SEQ ID NO: 31267 - protein, 7 aa, synthetic construct
SEFRHSP

SEQ ID NO: 31268 - protein, 7 aa, synthetic construct
VKVGSTG

SEQ ID NO: 31269 - protein, 7 aa, synthetic construct
RPSTNAS

SEQ ID NO: 31270 - protein, 7 aa, synthetic construct
AKWKPEP

SEQ ID NO: 31271 - protein, 7 aa, synthetic construct
KNPNMSG

SEQ ID NO: 31272 - protein, 7 aa, synthetic construct
TAGTKSA

SEQ ID NO: 31273 - protein, 7 aa, synthetic construct
VVKSTMN

SEQ ID NO: 31274 - protein, 7 aa, synthetic construct
MGVAKAG

SEQ ID NO: 31275 - protein, 7 aa, synthetic construct
NRQHGSA

SEQ ID NO: 31276 - protein, 7 aa, synthetic construct
KPQTGVS

SEQ ID NO: 31277 - protein, 7 aa, synthetic construct
RKDPAGS

SEQ ID NO: 31278 - protein, 7 aa, synthetic construct
GKIHFDS

SEQ ID NO: 31279 - protein, 7 aa, synthetic construct
TPYKPIE

SEQ ID NO: 31280 - protein, 7 aa, synthetic construct
YAKGWPS

SEQ ID NO: 31281 - protein, 7 aa, synthetic construct
ISQQYKG

SEQ ID NO: 31282 - protein, 7 aa, synthetic construct
TGKSSSA

SEQ ID NO: 31283 - protein, 7 aa, synthetic construct
GKLVSAN

SEQ ID NO: 31284 - protein, 7 aa, synthetic construct
KSNMGSA

SEQ ID NO: 31285 - protein, 7 aa, synthetic construct
GPSHHAA

SEQ ID NO: 31286 - protein, 7 aa, synthetic construct
RIPAAYE

SEQ ID NO: 31287 - protein, 7 aa, synthetic construct
GGGLNPG

SEQ ID NO: 31288 - protein, 7 aa, synthetic construct
FKGGVAG

SEQ ID NO: 31289 - protein, 7 aa, synthetic construct
KKADVKD

SEQ ID NO: 31290 - protein, 7 aa, synthetic construct
NVIKQFG

SEQ ID NO: 31291 - protein, 7 aa, synthetic construct
GTMGSKA

SEQ ID NO: 31292 - protein, 7 aa, synthetic construct
AAKADKP

SEQ ID NO: 31293 - protein, 7 aa, synthetic construct
YHVNKVS

SEQ ID NO: 31294 - protein, 7 aa, synthetic construct
GKSVNSI

SEQ ID NO: 31295 - protein, 7 aa, synthetic construct
KPNAMKD

SEQ ID NO: 31296 - protein, 7 aa, synthetic construct
TKAMVIE

SEQ ID NO: 31297 - protein, 7 aa, synthetic construct
HPGHPNA

SEQ ID NO: 31298 - protein, 7 aa, synthetic construct
LSGTRTG

SEQ ID NO: 31299 - protein, 7 aa, synthetic construct
MGKTKDS

SEQ ID NO: 31300 - protein, 7 aa, synthetic construct
NAQKTMP

SEQ ID NO: 31301 - protein, 7 aa, synthetic construct
QTQHMAG

SEQ ID NO: 31302 - protein, 7 aa, synthetic construct
IGARSHT

SEQ ID NO: 31303 - protein, 7 aa, synthetic construct
FQQSTKY

SEQ ID NO: 31304 - protein, 7 aa, synthetic construct
MNKGGIH

SEQ ID NO: 31305 - protein, 7 aa, synthetic construct
MTTKYVA

SEQ ID NO: 31306 - protein, 7 aa, synthetic construct
SSSRPHY

SEQ ID NO: 31307 - protein, 7 aa, synthetic construct
NYDSKGG

SEQ ID NO: 31308 - protein, 7 aa, synthetic construct
NPKFTSQ

SEQ ID NO: 31309 - protein, 7 aa, synthetic construct
KVPASGG

SEQ ID NO: 31310 - protein, 7 aa, synthetic construct
TTHHPGR

SEQ ID NO: 31311 - protein, 7 aa, synthetic construct
MPSKASG

SEQ ID NO: 31312 - protein, 7 aa, synthetic construct
RNQQTAA

SEQ ID NO: 31313 - protein, 7 aa, synthetic construct
RTTTTSA

SEQ ID NO: 31314 - protein, 7 aa, synthetic construct
KVVHINS

SEQ ID NO: 31315 - protein, 7 aa, synthetic construct
LPHHQGM

SEQ ID NO: 31316 - protein, 7 aa, synthetic construct
YRQEQGN

SEQ ID NO: 31317 - protein, 7 aa, synthetic construct
KREMQNG

SEQ ID NO: 31318 - protein, 7 aa, synthetic construct
SHRMNDG

SEQ ID NO: 31319 - protein, 7 aa, synthetic construct
TKQTHVA

SEQ ID NO: 31320 - protein, 7 aa, synthetic construct
TSNQRMA

SEQ ID NO: 31321 - protein, 7 aa, synthetic construct
NFTNQMV

SEQ ID NO: 31322 - protein, 7 aa, synthetic construct
WDKRQNS

SEQ ID NO: 31323 - protein, 7 aa, synthetic construct
AEMNKLG

SEQ ID NO: 31324 - protein, 7 aa, synthetic construct
RNSMPTY

SEQ ID NO: 31325 - protein, 7 aa, synthetic construct
PRGSTEF

SEQ ID NO: 31326 - protein, 7 aa, synthetic construct
TAQSKTA

SEQ ID NO: 31327 - protein, 7 aa, synthetic construct
LKGWTQP

SEQ ID NO: 31328 - protein, 7 aa, synthetic construct
QSGRAVV

SEQ ID NO: 31329 - protein, 7 aa, synthetic construct
ANQKTMA

SEQ ID NO: 31330 - protein, 7 aa, synthetic construct
RSQNGMG

SEQ ID NO: 31331 - protein, 7 aa, synthetic construct
MQVAGKP

SEQ ID NO: 31332 - protein, 7 aa, synthetic construct
AKSHNNY

SEQ ID NO: 31333 - protein, 7 aa, synthetic construct
YQGKSNN

SEQ ID NO: 31334 - protein, 7 aa, synthetic construct
TQGRSVP

SEQ ID NO: 31335 - protein, 7 aa, synthetic construct
KPNNAQA

SEQ ID NO: 31336 - protein, 7 aa, synthetic construct
MGKITSG

SEQ ID NO: 31337 - protein, 7 aa, synthetic construct
RNNNQSA

SEQ ID NO: 31338 - protein, 7 aa, synthetic construct
RMQNAAY

SEQ ID NO: 31339 - protein, 7 aa, synthetic construct
QPQRNGA

SEQ ID NO: 31340 - protein, 7 aa, synthetic construct
KPNTAGY

SEQ ID NO: 31341 - protein, 7 aa, synthetic construct
AEKHLAA

SEQ ID NO: 31342 - protein, 7 aa, synthetic construct
FARMQQA

SEQ ID NO: 31343 - protein, 7 aa, synthetic construct
MERKQSF

SEQ ID NO: 31344 - protein, 7 aa, synthetic construct
KGYGSGD

SEQ ID NO: 31345 - protein, 7 aa, synthetic construct
VHASISP

SEQ ID NO: 31346 - protein, 7 aa, synthetic construct
QSMKMRE

SEQ ID NO: 31347 - protein, 7 aa, synthetic construct
TQANMKN

SEQ ID NO: 31348 - protein, 7 aa, synthetic construct
QRLDQDH

SEQ ID NO: 31349 - protein, 7 aa, synthetic construct
QFKNSNG

SEQ ID NO: 31350 - protein, 7 aa, synthetic construct
GYKKGPE

SEQ ID NO: 31351 - protein, 7 aa, synthetic construct
GNKIDNY

SEQ ID NO: 31352 - protein, 7 aa, synthetic construct
NVKSTQG

SEQ ID NO: 31353 - protein, 7 aa, synthetic construct
TKDNKQG

SEQ ID NO: 31354 - protein, 7 aa, synthetic construct
IGLDRGG

SEQ ID NO: 31355 - protein, 7 aa, synthetic construct
QTSRNGP

SEQ ID NO: 31356 - protein, 7 aa, synthetic construct
KDNKNGG

SEQ ID NO: 31357 - protein, 7 aa, synthetic construct
NNTAAKG

SEQ ID NO: 31358 - protein, 7 aa, synthetic construct
YAQNSKG

SEQ ID NO: 31359 - protein, 7 aa, synthetic construct
IPNFGRN

SEQ ID NO: 31360 - protein, 7 aa, synthetic construct
RLPRDPI

SEQ ID NO: 31361 - protein, 7 aa, synthetic construct
ENSRKDH

SEQ ID NO: 31362 - protein, 7 aa, synthetic construct
LREGIHG

SEQ ID NO: 31363 - protein, 7 aa, synthetic construct
LAHVIQE

SEQ ID NO: 31364 - protein, 7 aa, synthetic construct
NSKAQTS

SEQ ID NO: 31365 - protein, 7 aa, synthetic construct
ATQKSDH

SEQ ID NO: 31366 - protein, 7 aa, synthetic construct
PKTTMAP

SEQ ID NO: 31367 - protein, 7 aa, synthetic construct
RNSGVNG

SEQ ID NO: 31368 - protein, 7 aa, synthetic construct
HAPHKMM

SEQ ID NO: 31369 - protein, 7 aa, synthetic construct
RQPGSQA

SEQ ID NO: 31370 - protein, 7 aa, synthetic construct
YDGKKMP

SEQ ID NO: 31371 - protein, 7 aa, synthetic construct
NVASGMT

SEQ ID NO: 31372 - protein, 7 aa, synthetic construct
MQSHEGK

SEQ ID NO: 31373 - protein, 7 aa, synthetic construct
QTTTKSS

SEQ ID NO: 31374 - protein, 7 aa, synthetic construct
FFGKNDD

SEQ ID NO: 31375 - protein, 7 aa, synthetic construct
TKPGGMG

SEQ ID NO: 31376 - protein, 7 aa, synthetic construct
TQDQRLL

SEQ ID NO: 31377 - protein, 7 aa, synthetic construct
MPKMTSG

SEQ ID NO: 31378 - protein, 7 aa, synthetic construct
NRHNIGG

SEQ ID NO: 31379 - protein, 7 aa, synthetic construct
GLPVRSQ

SEQ ID NO: 31380 - protein, 7 aa, synthetic construct
TAKSSFG

SEQ ID NO: 31381 - protein, 7 aa, synthetic construct
DVRQKSE

SEQ ID NO: 31382 - protein, 7 aa, synthetic construct
RNNAQLP

SEQ ID NO: 31383 - protein, 7 aa, synthetic construct
VQNKTQG

SEQ ID NO: 31384 - protein, 7 aa, synthetic construct
RSDQWSG

SEQ ID NO: 31385 - protein, 7 aa, synthetic construct
KLLHQEA

SEQ ID NO: 31386 - protein, 7 aa, synthetic construct
GLHGLTA

SEQ ID NO: 31387 - protein, 7 aa, synthetic construct
MKSNAMA

SEQ ID NO: 31388 - protein, 7 aa, synthetic construct
SKNQIQT

SEQ ID NO: 31389 - protein, 7 aa, synthetic construct
SYHNNSG

SEQ ID NO: 31390 - protein, 7 aa, synthetic construct
FNAGMKG

SEQ ID NO: 31391 - protein, 7 aa, synthetic construct
TSREQHS

SEQ ID NO: 31392 - protein, 7 aa, synthetic construct
SKSPMHG

SEQ ID NO: 31393 - protein, 7 aa, synthetic construct
TQYKNMP

SEQ ID NO: 31394 - protein, 7 aa, synthetic construct
HKFMKYE

SEQ ID NO: 31395 - protein, 7 aa, synthetic construct
MKYQGGD

SEQ ID NO: 31396 - protein, 7 aa, synthetic construct
LPHHDMS

SEQ ID NO: 31397 - protein, 7 aa, synthetic construct
VQKNVGG

SEQ ID NO: 31398 - protein, 7 aa, synthetic construct
DGYKPNN

SEQ ID NO: 31399 - protein, 7 aa, synthetic construct
KPTIAKD

SEQ ID NO: 31400 - protein, 7 aa, synthetic construct
LGHKEMI

SEQ ID NO: 31401 - protein, 7 aa, synthetic construct
VSPLKQN

SEQ ID NO: 31402 - protein, 7 aa, synthetic construct
ATGGGRP

SEQ ID NO: 31403 - protein, 7 aa, synthetic construct
KPPSASN

SEQ ID NO: 31404 - protein, 7 aa, synthetic construct
YRGKSTD

SEQ ID NO: 31405 - protein, 7 aa, synthetic construct
TKLFRLE

SEQ ID NO: 31406 - protein, 7 aa, synthetic construct
LSPSMYG

SEQ ID NO: 31407 - protein, 7 aa, synthetic construct
PEQAPFR

SEQ ID NO: 31408 - protein, 7 aa, synthetic construct
SIGTAPH

SEQ ID NO: 31409 - protein, 7 aa, synthetic construct
RPNSGPA

SEQ ID NO: 31410 - protein, 7 aa, synthetic construct
KDKMFTE

SEQ ID NO: 31411 - protein, 7 aa, synthetic construct
IFTNRGV

SEQ ID NO: 31412 - protein, 7 aa, synthetic construct
STQSYAV

SEQ ID NO: 31413 - protein, 7 aa, synthetic construct
LNKAGGI

SEQ ID NO: 31414 - protein, 7 aa, synthetic construct
RQTANGG

SEQ ID NO: 31415 - protein, 7 aa, synthetic construct
SKSAVLV

SEQ ID NO: 31416 - protein, 7 aa, synthetic construct
WKPHMSV

SEQ ID NO: 31417 - protein, 7 aa, synthetic construct
SGKGGQS

SEQ ID NO: 31418 - protein, 7 aa, synthetic construct
PFKQSQD

SEQ ID NO: 31419 - protein, 7 aa, synthetic construct
AGKMHIN

SEQ ID NO: 31420 - protein, 7 aa, synthetic construct
IAAKSST

SEQ ID NO: 31421 - protein, 7 aa, synthetic construct
TQKTGQS

SEQ ID NO: 31422 - protein, 7 aa, synthetic construct
THQWSEA

SEQ ID NO: 31423 - protein, 7 aa, synthetic construct
HVALNQG

SEQ ID NO: 31424 - protein, 7 aa, synthetic construct
MKGARDV

SEQ ID NO: 31425 - protein, 7 aa, synthetic construct
TQVRGVH

SEQ ID NO: 31426 - protein, 7 aa, synthetic construct
NRNQGGA

SEQ ID NO: 31427 - protein, 7 aa, synthetic construct
TGERNNS

SEQ ID NO: 31428 - protein, 7 aa, synthetic construct
KLHGAPM

SEQ ID NO: 31429 - protein, 7 aa, synthetic construct
TKSATSP

SEQ ID NO: 31430 - protein, 7 aa, synthetic construct
MQKGQNA

SEQ ID NO: 31431 - protein, 7 aa, synthetic construct
IRPPPHQ

SEQ ID NO: 31432 - protein, 7 aa, synthetic construct
GKLAHPE

SEQ ID NO: 31433 - protein, 7 aa, synthetic construct
SLQMGHG

SEQ ID NO: 31434 - protein, 7 aa, synthetic construct
DKRDDPN

SEQ ID NO: 31435 - protein, 7 aa, synthetic construct
VNAHKSQ

SEQ ID NO: 31436 - protein, 7 aa, synthetic construct
EHYNKMS

SEQ ID NO: 31437 - protein, 7 aa, synthetic construct
TSKGQNG

SEQ ID NO: 31438 - protein, 7 aa, synthetic construct
HRPHQAM

SEQ ID NO: 31439 - protein, 7 aa, synthetic construct
DKNKANG

SEQ ID NO: 31440 - protein, 7 aa, synthetic construct
FKKVERD

SEQ ID NO: 31441 - protein, 7 aa, synthetic construct
KGFNTEY

SEQ ID NO: 31442 - protein, 7 aa, synthetic construct
VRGQQTE

SEQ ID NO: 31443 - protein, 7 aa, synthetic construct
RSPQNTG

SEQ ID NO: 31444 - protein, 7 aa, synthetic construct
TKSNNPM

SEQ ID NO: 31445 - protein, 7 aa, synthetic construct
NQKTPGA

SEQ ID NO: 31446 - protein, 7 aa, synthetic construct
TKPNITG

SEQ ID NO: 31447 - protein, 7 aa, synthetic construct
TRGTVNS

SEQ ID NO: 31448 - protein, 7 aa, synthetic construct
TNAQSNQ

SEQ ID NO: 31449 - protein, 7 aa, synthetic construct
FKQVLQG

SEQ ID NO: 31450 - protein, 7 aa, synthetic construct
WTHQTKQ

SEQ ID NO: 31451 - protein, 7 aa, synthetic construct
MKSQTMS

SEQ ID NO: 31452 - protein, 7 aa, synthetic construct
RMNVISA

SEQ ID NO: 31453 - protein, 7 aa, synthetic construct
SLKILPE

SEQ ID NO: 31454 - protein, 7 aa, synthetic construct
YKVSTKD

SEQ ID NO: 31455 - protein, 7 aa, synthetic construct
PTKGVMG

SEQ ID NO: 31456 - protein, 7 aa, synthetic construct
VTERPKL

SEQ ID NO: 31457 - protein, 7 aa, synthetic construct
DMLHQRG

SEQ ID NO: 31458 - protein, 7 aa, synthetic construct
NRQTTVG

SEQ ID NO: 31459 - protein, 7 aa, synthetic construct
SKIPVDH

SEQ ID NO: 31460 - protein, 7 aa, synthetic construct
FPKLGTH

SEQ ID NO: 31461 - protein, 7 aa, synthetic construct
VNVGFKG

SEQ ID NO: 31462 - protein, 7 aa, synthetic construct
MGRTTVG

SEQ ID NO: 31463 - protein, 7 aa, synthetic construct
KAKIGEW

SEQ ID NO: 31464 - protein, 7 aa, synthetic construct
PGKIRET

SEQ ID NO: 31465 - protein, 7 aa, synthetic construct
IGSMYRA

SEQ ID NO: 31466 - protein, 7 aa, synthetic construct
IANHPHA

SEQ ID NO: 31467 - protein, 7 aa, synthetic construct
PGSAPAL

SEQ ID NO: 31468 - protein, 7 aa, synthetic construct
GPAQKSN

SEQ ID NO: 31469 - protein, 7 aa, synthetic construct
QRAQINA

SEQ ID NO: 31470 - protein, 7 aa, synthetic construct
IHMKQMQ

SEQ ID NO: 31471 - protein, 7 aa, synthetic construct
MQPKTPQ

SEQ ID NO: 31472 - protein, 7 aa, synthetic construct
NQKVVSV

SEQ ID NO: 31473 - protein, 7 aa, synthetic construct
TSQYRQD

SEQ ID NO: 31474 - protein, 7 aa, synthetic construct
KNDNRVG

SEQ ID NO: 31475 - protein, 7 aa, synthetic construct
WAQTHSS

SEQ ID NO: 31476 - protein, 7 aa, synthetic construct
INKAQSN

SEQ ID NO: 31477 - protein, 7 aa, synthetic construct
FNPHNAG

SEQ ID NO: 31478 - protein, 7 aa, synthetic construct
WRDTNRT

SEQ ID NO: 31479 - protein, 7 aa, synthetic construct
FRGRDQA

SEQ ID NO: 31480 - protein, 7 aa, synthetic construct
TKVSQTE

SEQ ID NO: 31481 - protein, 7 aa, synthetic construct
VAHFKND

SEQ ID NO: 31482 - protein, 7 aa, synthetic construct
ATPRTTA

SEQ ID NO: 31483 - protein, 7 aa, synthetic construct
MGGNRSG

SEQ ID NO: 31484 - protein, 7 aa, synthetic construct
KLSSGSG

SEQ ID NO: 31485 - protein, 7 aa, synthetic construct
LFQRNQD

SEQ ID NO: 31486 - protein, 7 aa, synthetic construct
DWKGTDK

SEQ ID NO: 31487 - protein, 7 aa, synthetic construct
SGKVTVN

SEQ ID NO: 31488 - protein, 7 aa, synthetic construct
NSVTVRG

SEQ ID NO: 31489 - protein, 7 aa, synthetic construct
RQPTAQP

SEQ ID NO: 31490 - protein, 7 aa, synthetic construct
SNQTKAG

SEQ ID NO: 31491 - protein, 7 aa, synthetic construct
LQKSYSA

SEQ ID NO: 31492 - protein, 7 aa, synthetic construct
MTRTASV

SEQ ID NO: 31493 - protein, 7 aa, synthetic construct
KQPGSGD

SEQ ID NO: 31494 - protein, 7 aa, synthetic construct
KWKSEYG

SEQ ID NO: 31495 - protein, 7 aa, synthetic construct
YAKTTSS

SEQ ID NO: 31496 - protein, 7 aa, synthetic construct
RSQTNQM

SEQ ID NO: 31497 - protein, 7 aa, synthetic construct
INRPGNM

SEQ ID NO: 31498 - protein, 7 aa, synthetic construct
RPSATSN

SEQ ID NO: 31499 - protein, 7 aa, synthetic construct
QGSPSAH

SEQ ID NO: 31500 - protein, 7 aa, synthetic construct
PRNGQMA

SEQ ID NO: 31501 - protein, 7 aa, synthetic construct
DGPRNQP

SEQ ID NO: 31502 - protein, 7 aa, synthetic construct
YKGKEPT

SEQ ID NO: 31503 - protein, 7 aa, synthetic construct
KNTAAPG

SEQ ID NO: 31504 - protein, 7 aa, synthetic construct
SRSPGVG

SEQ ID NO: 31505 - protein, 7 aa, synthetic construct
VPHSSQA

SEQ ID NO: 31506 - protein, 7 aa, synthetic construct
VLPRFSG

SEQ ID NO: 31507 - protein, 7 aa, synthetic construct
MGKSTVA

SEQ ID NO: 31508 - protein, 7 aa, synthetic construct
GQKPMAA

SEQ ID NO: 31509 - protein, 7 aa, synthetic construct
QRPNGQA

SEQ ID NO: 31510 - protein, 7 aa, synthetic construct
GNTKTLP

SEQ ID NO: 31511 - protein, 7 aa, synthetic construct
HGIRGFE

SEQ ID NO: 31512 - protein, 7 aa, synthetic construct
NKDTRAA

SEQ ID NO: 31513 - protein, 7 aa, synthetic construct
NPAVFKG

SEQ ID NO: 31514 - protein, 7 aa, synthetic construct
MNKAMKD

SEQ ID NO: 31515 - protein, 7 aa, synthetic construct
MRNKMDM

SEQ ID NO: 31516 - protein, 7 aa, synthetic construct
WSKEITG

SEQ ID NO: 31517 - protein, 7 aa, synthetic construct
SAKTNGG

SEQ ID NO: 31518 - protein, 7 aa, synthetic construct
QGRNMGE

SEQ ID NO: 31519 - protein, 7 aa, synthetic construct
DFMKKMP

SEQ ID NO: 31520 - protein, 7 aa, synthetic construct
VFPKGKE

SEQ ID NO: 31521 - protein, 7 aa, synthetic construct
NGRFPVG

SEQ ID NO: 31522 - protein, 7 aa, synthetic construct
KPQGLTM

SEQ ID NO: 31523 - protein, 7 aa, synthetic construct
YGRNGTM

SEQ ID NO: 31524 - protein, 7 aa, synthetic construct
NANKSQA

SEQ ID NO: 31525 - protein, 7 aa, synthetic construct
KNVTNTA

SEQ ID NO: 31526 - protein, 7 aa, synthetic construct
GNQKASG

SEQ ID NO: 31527 - protein, 7 aa, synthetic construct
FVASHHA

SEQ ID NO: 31528 - protein, 7 aa, synthetic construct
KQSSSAT

SEQ ID NO: 31529 - protein, 7 aa, synthetic construct
MGKTEMF

SEQ ID NO: 31530 - protein, 7 aa, synthetic construct
RSNNTAP

SEQ ID NO: 31531 - protein, 7 aa, synthetic construct
SKNNAAG

SEQ ID NO: 31532 - protein, 7 aa, synthetic construct
INNRSRE

SEQ ID NO: 31533 - protein, 7 aa, synthetic construct
GIPHNVQ

SEQ ID NO: 31534 - protein, 7 aa, synthetic construct
GPKTQAS

SEQ ID NO: 31535 - protein, 7 aa, synthetic construct
TKASAQF

SEQ ID NO: 31536 - protein, 7 aa, synthetic construct
GKYQQVA

SEQ ID NO: 31537 - protein, 7 aa, synthetic construct
HSGPSPV

SEQ ID NO: 31538 - protein, 7 aa, synthetic construct
HMGSMKS

SEQ ID NO: 31539 - protein, 7 aa, synthetic construct
SKNSIGA

SEQ ID NO: 31540 - protein, 7 aa, synthetic construct
TKTMAAG

SEQ ID NO: 31541 - protein, 7 aa, synthetic construct
NKNVHNA

SEQ ID NO: 31542 - protein, 7 aa, synthetic construct
VNAQIKN

SEQ ID NO: 31543 - protein, 7 aa, synthetic construct
GVRPGQQ

SEQ ID NO: 31544 - protein, 7 aa, synthetic construct
DRNFKIG

SEQ ID NO: 31545 - protein, 7 aa, synthetic construct
TANSARG

SEQ ID NO: 31546 - protein, 7 aa, synthetic construct
NGVQRGA

SEQ ID NO: 31547 - protein, 7 aa, synthetic construct
FGGYRQE

SEQ ID NO: 31548 - protein, 7 aa, synthetic construct
KDKNGTG

SEQ ID NO: 31549 - protein, 7 aa, synthetic construct
SLPAAVS

SEQ ID NO: 31550 - protein, 7 aa, synthetic construct
SKQSAMA

SEQ ID NO: 31551 - protein, 7 aa, synthetic construct
QTHSGKV

SEQ ID NO: 31552 - protein, 7 aa, synthetic construct
SKASGRE

SEQ ID NO: 31553 - protein, 7 aa, synthetic construct
THKQNSA

SEQ ID NO: 31554 - protein, 7 aa, synthetic construct
TSNNKPA

SEQ ID NO: 31555 - protein, 7 aa, synthetic construct
YKSTPTN

SEQ ID NO: 31556 - protein, 7 aa, synthetic construct
THRGTNE

SEQ ID NO: 31557 - protein, 7 aa, synthetic construct
RQNTTPP

SEQ ID NO: 31558 - protein, 7 aa, synthetic construct
DRPGAYG

SEQ ID NO: 31559 - protein, 7 aa, synthetic construct
RTQQSNS

SEQ ID NO: 31560 - protein, 7 aa, synthetic construct
NVKSTSA

SEQ ID NO: 31561 - protein, 7 aa, synthetic construct
NTGSKGP

SEQ ID NO: 31562 - protein, 7 aa, synthetic construct
NGTGRQG

SEQ ID NO: 31563 - protein, 7 aa, synthetic construct
RMNGSTS

SEQ ID NO: 31564 - protein, 7 aa, synthetic construct
RDHLSNR

SEQ ID NO: 31565 - protein, 7 aa, synthetic construct
LSNGSLN

SEQ ID NO: 31566 - protein, 7 aa, synthetic construct
LNNSSKQ

SEQ ID NO: 31567 - protein, 7 aa, synthetic construct
NARAHGG

SEQ ID NO: 31568 - protein, 7 aa, synthetic construct
YNIVGKG

SEQ ID NO: 31569 - protein, 7 aa, synthetic construct
KPSGMNA

SEQ ID NO: 31570 - protein, 7 aa, synthetic construct
RVRVDSM

SEQ ID NO: 31571 - protein, 7 aa, synthetic construct
NKVGGGG

SEQ ID NO: 31572 - protein, 7 aa, synthetic construct
AGNHAKN

SEQ ID NO: 31573 - protein, 7 aa, synthetic construct
RQTNGAG

SEQ ID NO: 31574 - protein, 7 aa, synthetic construct
IVKGAGA

SEQ ID NO: 31575 - protein, 7 aa, synthetic construct
SMRTGTG

SEQ ID NO: 31576 - protein, 7 aa, synthetic construct
YGLSKVG

SEQ ID NO: 31577 - protein, 7 aa, synthetic construct
MGSKYGH

SEQ ID NO: 31578 - protein, 7 aa, synthetic construct
FGTKTSP

SEQ ID NO: 31579 - protein, 7 aa, synthetic construct
GKPNMNA

SEQ ID NO: 31580 - protein, 7 aa, synthetic construct
YGTKGSG

SEQ ID NO: 31581 - protein, 7 aa, synthetic construct
KVASQTF

SEQ ID NO: 31582 - protein, 7 aa, synthetic construct
FIGSRSS

SEQ ID NO: 31583 - protein, 7 aa, synthetic construct
TPTWSSP

SEQ ID NO: 31584 - protein, 7 aa, synthetic construct
IGGMKSG

SEQ ID NO: 31585 - protein, 7 aa, synthetic construct
RTNAQVP

SEQ ID NO: 31586 - protein, 7 aa, synthetic construct
NIKSTSG

SEQ ID NO: 31587 - protein, 7 aa, synthetic construct
NIANHAG

SEQ ID NO: 31588 - protein, 7 aa, synthetic construct
TEQTRYA

SEQ ID NO: 31589 - protein, 7 aa, synthetic construct
NARQNNA

SEQ ID NO: 31590 - protein, 7 aa, synthetic construct
TGKSVNS

SEQ ID NO: 31591 - protein, 7 aa, synthetic construct
SSSKSVG

SEQ ID NO: 31592 - protein, 7 aa, synthetic construct
SMKSNQY

SEQ ID NO: 31593 - protein, 7 aa, synthetic construct
VGQGRSA

SEQ ID NO: 31594 - protein, 7 aa, synthetic construct
TKAAAKE

SEQ ID NO: 31595 - protein, 7 aa, synthetic construct
VLNEVRS

SEQ ID NO: 31596 - protein, 7 aa, synthetic construct
DIRANTA

SEQ ID NO: 31597 - protein, 7 aa, synthetic construct
TKSSAAN

SEQ ID NO: 31598 - protein, 7 aa, synthetic construct
THRNLAL

SEQ ID NO: 31599 - protein, 7 aa, synthetic construct
KGRADFP

SEQ ID NO: 31600 - protein, 7 aa, synthetic construct
FGMKNGP

SEQ ID NO: 31601 - protein, 7 aa, synthetic construct
SRTQLIH

SEQ ID NO: 31602 - protein, 7 aa, synthetic construct
RNAGNAA

SEQ ID NO: 31603 - protein, 7 aa, synthetic construct
VIQRGDF

SEQ ID NO: 31604 - protein, 7 aa, synthetic construct
KASATAG

SEQ ID NO: 31605 - protein, 7 aa, synthetic construct
HEKYAKG

SEQ ID NO: 31606 - protein, 7 aa, synthetic construct
WNKVVKP

SEQ ID NO: 31607 - protein, 7 aa, synthetic construct
RVSSNSG

SEQ ID NO: 31608 - protein, 7 aa, synthetic construct
LTRQTVA

SEQ ID NO: 31609 - protein, 7 aa, synthetic construct
QPRTSGG

SEQ ID NO: 31610 - protein, 7 aa, synthetic construct
LTQRALN

SEQ ID NO: 31611 - protein, 7 aa, synthetic construct
NPYNKGM

SEQ ID NO: 31612 - protein, 7 aa, synthetic construct
NGRNVGS

SEQ ID NO: 31613 - protein, 7 aa, synthetic construct
NRGTASL

SEQ ID NO: 31614 - protein, 7 aa, synthetic construct
HMKQIEM

SEQ ID NO: 31615 - protein, 7 aa, synthetic construct
KSSVSAG

SEQ ID NO: 31616 - protein, 7 aa, synthetic construct
QRANSSL

SEQ ID NO: 31617 - protein, 7 aa, synthetic construct
SKQSSQT

SEQ ID NO: 31618 - protein, 7 aa, synthetic construct
RIVGDVG

SEQ ID NO: 31619 - protein, 7 aa, synthetic construct
QKTQSTG

SEQ ID NO: 31620 - protein, 7 aa, synthetic construct
KSRDFTS

SEQ ID NO: 31621 - protein, 7 aa, synthetic construct
KPTNPMA

SEQ ID NO: 31622 - protein, 7 aa, synthetic construct
WDKRSPT

SEQ ID NO: 31623 - protein, 7 aa, synthetic construct
GKGPATT

SEQ ID NO: 31624 - protein, 7 aa, synthetic construct
FRSYSQD

SEQ ID NO: 31625 - protein, 7 aa, synthetic construct
TLGVQKS

SEQ ID NO: 31626 - protein, 7 aa, synthetic construct
HTGRLAS

SEQ ID NO: 31627 - protein, 7 aa, synthetic construct
LREHQNF

SEQ ID NO: 31628 - protein, 7 aa, synthetic construct
KRAHDHE

SEQ ID NO: 31629 - protein, 7 aa, synthetic construct
GNGNGRF

SEQ ID NO: 31630 - protein, 7 aa, synthetic construct
SQKQATM

SEQ ID NO: 31631 - protein, 7 aa, synthetic construct
QKSKYPD

SEQ ID NO: 31632 - protein, 7 aa, synthetic construct
FGKYPMV

SEQ ID NO: 31633 - protein, 7 aa, synthetic construct
NASKSNP

SEQ ID NO: 31634 - protein, 7 aa, synthetic construct
AYAREAK

SEQ ID NO: 31635 - protein, 7 aa, synthetic construct
KSVNMSG

SEQ ID NO: 31636 - protein, 7 aa, synthetic construct
DKNRMGP

SEQ ID NO: 31637 - protein, 7 aa, synthetic construct
KPPTTGG

SEQ ID NO: 31638 - protein, 7 aa, synthetic construct
NKTGMNA

SEQ ID NO: 31639 - protein, 7 aa, synthetic construct
PQRQSHE

SEQ ID NO: 31640 - protein, 7 aa, synthetic construct
AANAHTY

SEQ ID NO: 31641 - protein, 7 aa, synthetic construct
RNPTLAG

SEQ ID NO: 31642 - protein, 7 aa, synthetic construct
TKPGTAG

SEQ ID NO: 31643 - protein, 7 aa, synthetic construct
KGSTMSG

SEQ ID NO: 31644 - protein, 7 aa, synthetic construct
TRSSVAP

SEQ ID NO: 31645 - protein, 7 aa, synthetic construct
SAGKTFG

SEQ ID NO: 31646 - protein, 7 aa, synthetic construct
IRPGKPD

SEQ ID NO: 31647 - protein, 7 aa, synthetic construct
KTQVKAP

SEQ ID NO: 31648 - protein, 7 aa, synthetic construct
QTKNVNA

SEQ ID NO: 31649 - protein, 7 aa, synthetic construct
QKLSNLS

SEQ ID NO: 31650 - protein, 7 aa, synthetic construct
YDRANSH

SEQ ID NO: 31651 - protein, 7 aa, synthetic construct
HKPSHID

SEQ ID NO: 31652 - protein, 7 aa, synthetic construct
KSGSPGA

SEQ ID NO: 31653 - protein, 7 aa, synthetic construct
HKWVNGD

SEQ ID NO: 31654 - protein, 7 aa, synthetic construct
EQKPHKY

SEQ ID NO: 31655 - protein, 7 aa, synthetic construct
TGTKAGV

SEQ ID NO: 31656 - protein, 7 aa, synthetic construct
YNKHGTF

SEQ ID NO: 31657 - protein, 7 aa, synthetic construct
GPRNSAD

SEQ ID NO: 31658 - protein, 7 aa, synthetic construct
DQIRRPG

SEQ ID NO: 31659 - protein, 7 aa, synthetic construct
MNKPVRD

SEQ ID NO: 31660 - protein, 7 aa, synthetic construct
PRHSANQ

SEQ ID NO: 31661 - protein, 7 aa, synthetic construct
KQLRPEN

SEQ ID NO: 31662 - protein, 7 aa, synthetic construct
KSRDVGV

SEQ ID NO: 31663 - protein, 7 aa, synthetic construct
HHPFKVA

SEQ ID NO: 31664 - protein, 7 aa, synthetic construct
MSRTSQP

SEQ ID NO: 31665 - protein, 7 aa, synthetic construct
EKAKGDH

SEQ ID NO: 31666 - protein, 7 aa, synthetic construct
NGGKNSA

SEQ ID NO: 31667 - protein, 7 aa, synthetic construct
WTGPGQA

SEQ ID NO: 31668 - protein, 7 aa, synthetic construct
STKHTVD

SEQ ID NO: 31669 - protein, 7 aa, synthetic construct
HSKYVIS

SEQ ID NO: 31670 - protein, 7 aa, synthetic construct
GYDRVQP

SEQ ID NO: 31671 - protein, 7 aa, synthetic construct
TPRYEGP

SEQ ID NO: 31672 - protein, 7 aa, synthetic construct
GLFGLKG

SEQ ID NO: 31673 - protein, 7 aa, synthetic construct
NGKSVVG

SEQ ID NO: 31674 - protein, 7 aa, synthetic construct
RMSSTSP

SEQ ID NO: 31675 - protein, 7 aa, synthetic construct
FAKAHES

SEQ ID NO: 31676 - protein, 7 aa, synthetic construct
NQRPTNA

SEQ ID NO: 31677 - protein, 7 aa, synthetic construct
YIMSGQG

SEQ ID NO: 31678 - protein, 7 aa, synthetic construct
SRTMKGD

SEQ ID NO: 31679 - protein, 7 aa, synthetic construct
RKDSSNP

SEQ ID NO: 31680 - protein, 7 aa, synthetic construct
IMDFSHG

SEQ ID NO: 31681 - protein, 7 aa, synthetic construct
MANMNAS

SEQ ID NO: 31682 - protein, 7 aa, synthetic construct
KAYQVQE

SEQ ID NO: 31683 - protein, 7 aa, synthetic construct
MKSLIPP

SEQ ID NO: 31684 - protein, 7 aa, synthetic construct
REFKQLQ

SEQ ID NO: 31685 - protein, 7 aa, synthetic construct
IEPFHNP

SEQ ID NO: 31686 - protein, 7 aa, synthetic construct
ANSGKPP

SEQ ID NO: 31687 - protein, 7 aa, synthetic construct
TQFNGER

SEQ ID NO: 31688 - protein, 7 aa, synthetic construct
EKKSGYV

SEQ ID NO: 31689 - protein, 7 aa, synthetic construct
VPLHGPA

SEQ ID NO: 31690 - protein, 7 aa, synthetic construct
KAMTQGG

SEQ ID NO: 31691 - protein, 7 aa, synthetic construct
TPWGSGP

SEQ ID NO: 31692 - protein, 7 aa, synthetic construct
AQKGGFA

SEQ ID NO: 31693 - protein, 7 aa, synthetic construct
TKSFQGG

SEQ ID NO: 31694 - protein, 7 aa, synthetic construct
GYRTPST

SEQ ID NO: 31695 - protein, 7 aa, synthetic construct
KQTNTGT

SEQ ID NO: 31696 - protein, 7 aa, synthetic construct
TANQRGA

SEQ ID NO: 31697 - protein, 7 aa, synthetic construct
LKEFTKQ

SEQ ID NO: 31698 - protein, 7 aa, synthetic construct
TNRILDI

SEQ ID NO: 31699 - protein, 7 aa, synthetic construct
VRGVIKE

SEQ ID NO: 31700 - protein, 7 aa, synthetic construct
SKTGISG

SEQ ID NO: 31701 - protein, 7 aa, synthetic construct
RSKADDH

SEQ ID NO: 31702 - protein, 7 aa, synthetic construct
KRDGGTG

SEQ ID NO: 31703 - protein, 7 aa, synthetic construct
KATNMNG

SEQ ID NO: 31704 - protein, 7 aa, synthetic construct
HEHLNKS

SEQ ID NO: 31705 - protein, 7 aa, synthetic construct
ARAQLTN

SEQ ID NO: 31706 - protein, 7 aa, synthetic construct
KPNPSNA

SEQ ID NO: 31707 - protein, 7 aa, synthetic construct
RVAGQSA

SEQ ID NO: 31708 - protein, 7 aa, synthetic construct
VSPHQGA

SEQ ID NO: 31709 - protein, 7 aa, synthetic construct
LGHAKGL

SEQ ID NO: 31710 - protein, 7 aa, synthetic construct
KSTGAAP

SEQ ID NO: 31711 - protein, 7 aa, synthetic construct
KYAGQFP

SEQ ID NO: 31712 - protein, 7 aa, synthetic construct
YPSNKNG

SEQ ID NO: 31713 - protein, 7 aa, synthetic construct
TNQRQTA

SEQ ID NO: 31714 - protein, 7 aa, synthetic construct
DPFHSAG

SEQ ID NO: 31715 - protein, 7 aa, synthetic construct
NSPGTKG

SEQ ID NO: 31716 - protein, 7 aa, synthetic construct
TKVGGSA

SEQ ID NO: 31717 - protein, 7 aa, synthetic construct
VPFKNNI

SEQ ID NO: 31718 - protein, 7 aa, synthetic construct
QRPDRGI

SEQ ID NO: 31719 - protein, 7 aa, synthetic construct
KTNDGIN

SEQ ID NO: 31720 - protein, 7 aa, synthetic construct
FGKTGSN

SEQ ID NO: 31721 - protein, 7 aa, synthetic construct
QKSSGFS

SEQ ID NO: 31722 - protein, 7 aa, synthetic construct
EFRIMDS

SEQ ID NO: 31723 - protein, 7 aa, synthetic construct
TSAVGGK

SEQ ID NO: 31724 - protein, 7 aa, synthetic construct
YPQMKAS

SEQ ID NO: 31725 - protein, 7 aa, synthetic construct
GQKAIQS

SEQ ID NO: 31726 - protein, 7 aa, synthetic construct
DIHRVPG

SEQ ID NO: 31727 - protein, 7 aa, synthetic construct
KQHHNAE

SEQ ID NO: 31728 - protein, 7 aa, synthetic construct
GGTKVTG

SEQ ID NO: 31729 - protein, 7 aa, synthetic construct
VVHRAAS

SEQ ID NO: 31730 - protein, 7 aa, synthetic construct
VKLSQER

SEQ ID NO: 31731 - protein, 7 aa, synthetic construct
KPNTSVA

SEQ ID NO: 31732 - protein, 7 aa, synthetic construct
SLSKGQS

SEQ ID NO: 31733 - protein, 7 aa, synthetic construct
KMPSPGN

SEQ ID NO: 31734 - protein, 7 aa, synthetic construct
GYPKANV

SEQ ID NO: 31735 - protein, 7 aa, synthetic construct
KQVPAGA

SEQ ID NO: 31736 - protein, 7 aa, synthetic construct
PGKEHTP

SEQ ID NO: 31737 - protein, 7 aa, synthetic construct
MPKSSVS

SEQ ID NO: 31738 - protein, 7 aa, synthetic construct
DKYKPES

SEQ ID NO: 31739 - protein, 7 aa, synthetic construct
HTSRTSP

SEQ ID NO: 31740 - protein, 7 aa, synthetic construct
KNPDMKV

SEQ ID NO: 31741 - protein, 7 aa, synthetic construct
NKPTQSA

SEQ ID NO: 31742 - protein, 7 aa, synthetic construct
SNMAIPR

SEQ ID NO: 31743 - protein, 7 aa, synthetic construct
HFAMKSP

SEQ ID NO: 31744 - protein, 7 aa, synthetic construct
KHAQGVN

SEQ ID NO: 31745 - protein, 7 aa, synthetic construct
RGSFTGD

SEQ ID NO: 31746 - protein, 7 aa, synthetic construct
KTPNQAG

SEQ ID NO: 31747 - protein, 7 aa, synthetic construct
RNATTMA

SEQ ID NO: 31748 - protein, 7 aa, synthetic construct
KSTSLQA

SEQ ID NO: 31749 - protein, 7 aa, synthetic construct
SYMIKTG

SEQ ID NO: 31750 - protein, 7 aa, synthetic construct
LETKKMA

SEQ ID NO: 31751 - protein, 7 aa, synthetic construct
YAPHMAN

SEQ ID NO: 31752 - protein, 7 aa, synthetic construct
MKAGASS

SEQ ID NO: 31753 - protein, 7 aa, synthetic construct
MTNKTQG

SEQ ID NO: 31754 - protein, 7 aa, synthetic construct
QKGNLPS

SEQ ID NO: 31755 - protein, 7 aa, synthetic construct
NPRQAQS

SEQ ID NO: 31756 - protein, 7 aa, synthetic construct
QEFTTKF

SEQ ID NO: 31757 - protein, 7 aa, synthetic construct
MGPKNGG

SEQ ID NO: 31758 - protein, 7 aa, synthetic construct
KITTPTT

SEQ ID NO: 31759 - protein, 7 aa, synthetic construct
RGQNNPA

SEQ ID NO: 31760 - protein, 7 aa, synthetic construct
YRQQVMS

SEQ ID NO: 31761 - protein, 7 aa, synthetic construct
WKGNWPA

SEQ ID NO: 31762 - protein, 7 aa, synthetic construct
GGHVPRE

SEQ ID NO: 31763 - protein, 7 aa, synthetic construct
TKPGLSG

SEQ ID NO: 31764 - protein, 7 aa, synthetic construct
KTSQVAG

SEQ ID NO: 31765 - protein, 7 aa, synthetic construct
MTAGTRG

SEQ ID NO: 31766 - protein, 7 aa, synthetic construct
MRSHQSE

SEQ ID NO: 31767 - protein, 7 aa, synthetic construct
LGQMGRA

SEQ ID NO: 31768 - protein, 7 aa, synthetic construct
LPARTSG

SEQ ID NO: 31769 - protein, 7 aa, synthetic construct
MNNPRQV

SEQ ID NO: 31770 - protein, 7 aa, synthetic construct
MRGQATA

SEQ ID NO: 31771 - protein, 7 aa, synthetic construct
KNNNAGF

SEQ ID NO: 31772 - protein, 7 aa, synthetic construct
SPRPMGA

SEQ ID NO: 31773 - protein, 7 aa, synthetic construct
KGHQISA

SEQ ID NO: 31774 - protein, 7 aa, synthetic construct
YSKPTNS

SEQ ID NO: 31775 - protein, 7 aa, synthetic construct
RSHLGQQ

SEQ ID NO: 31776 - protein, 7 aa, synthetic construct
QSRVTAS

SEQ ID NO: 31777 - protein, 7 aa, synthetic construct
HGQKGSY

SEQ ID NO: 31778 - protein, 7 aa, synthetic construct
NMRDASP

SEQ ID NO: 31779 - protein, 7 aa, synthetic construct
ISANNQG

SEQ ID NO: 31780 - protein, 7 aa, synthetic construct
KKESNAG

SEQ ID NO: 31781 - protein, 7 aa, synthetic construct
YHGKLGP

SEQ ID NO: 31782 - protein, 7 aa, synthetic construct
QSPKPNG

SEQ ID NO: 31783 - protein, 7 aa, synthetic construct
SQVKIHD

SEQ ID NO: 31784 - protein, 7 aa, synthetic construct
MQRVTTT

SEQ ID NO: 31785 - protein, 7 aa, synthetic construct
EVKAKAA

SEQ ID NO: 31786 - protein, 7 aa, synthetic construct
GHGAING

SEQ ID NO: 31787 - protein, 7 aa, synthetic construct
MNQRNKE

SEQ ID NO: 31788 - protein, 7 aa, synthetic construct
HLNPQRD

SEQ ID NO: 31789 - protein, 7 aa, synthetic construct
PSKTVAG

SEQ ID NO: 31790 - protein, 7 aa, synthetic construct
QKNASAM

SEQ ID NO: 31791 - protein, 7 aa, synthetic construct
YSSTQKI

SEQ ID NO: 31792 - protein, 7 aa, synthetic construct
QHANFAA

SEQ ID NO: 31793 - protein, 7 aa, synthetic construct
FRNSVSG

SEQ ID NO: 31794 - protein, 7 aa, synthetic construct
RNGTLSA

SEQ ID NO: 31795 - protein, 7 aa, synthetic construct
MRSGQSG

SEQ ID NO: 31796 - protein, 7 aa, synthetic construct
DRKSLGP

SEQ ID NO: 31797 - protein, 7 aa, synthetic construct
QAKYHHE

SEQ ID NO: 31798 - protein, 7 aa, synthetic construct
RNMSDQG

SEQ ID NO: 31799 - protein, 7 aa, synthetic construct
MQSSRGG

SEQ ID NO: 31800 - protein, 7 aa, synthetic construct
RPQNAAA

SEQ ID NO: 31801 - protein, 7 aa, synthetic construct
ISKSVTI

SEQ ID NO: 31802 - protein, 7 aa, synthetic construct
SKYEGKM

SEQ ID NO: 31803 - protein, 7 aa, synthetic construct
YPPKQGG

SEQ ID NO: 31804 - protein, 7 aa, synthetic construct
QPRRGDD

SEQ ID NO: 31805 - protein, 7 aa, synthetic construct
KPYSQGG

SEQ ID NO: 31806 - protein, 7 aa, synthetic construct
GPHNNSG

SEQ ID NO: 31807 - protein, 7 aa, synthetic construct
TLGKGNL

SEQ ID NO: 31808 - protein, 7 aa, synthetic construct
RNANENF

SEQ ID NO: 31809 - protein, 7 aa, synthetic construct
TKQAGVN

SEQ ID NO: 31810 - protein, 7 aa, synthetic construct
NTVRTSS

SEQ ID NO: 31811 - protein, 7 aa, synthetic construct
FQMQGKN

SEQ ID NO: 31812 - protein, 7 aa, synthetic construct
MNTKHQF

SEQ ID NO: 31813 - protein, 7 aa, synthetic construct
NAKGWPV

SEQ ID NO: 31814 - protein, 7 aa, synthetic construct
RPSMTAG

SEQ ID NO: 31815 - protein, 7 aa, synthetic construct
KDTGRMG

SEQ ID NO: 31816 - protein, 7 aa, synthetic construct
GATNKSY

SEQ ID NO: 31817 - protein, 7 aa, synthetic construct
FKGQSPG

SEQ ID NO: 31818 - protein, 7 aa, synthetic construct
YQSTRTG

SEQ ID NO: 31819 - protein, 7 aa, synthetic construct
KTTQARD

SEQ ID NO: 31820 - protein, 7 aa, synthetic construct
KMSTGQS

SEQ ID NO: 31821 - protein, 7 aa, synthetic construct
AQRSSTA

SEQ ID NO: 31822 - protein, 7 aa, synthetic construct
GMSQKQG

SEQ ID NO: 31823 - protein, 7 aa, synthetic construct
KQFKSPD

SEQ ID NO: 31824 - protein, 7 aa, synthetic construct
MTKPSQG

SEQ ID NO: 31825 - protein, 7 aa, synthetic construct
VYHTAQN

SEQ ID NO: 31826 - protein, 7 aa, synthetic construct
NKQRGDE

SEQ ID NO: 31827 - protein, 7 aa, synthetic construct
MARGTNA

SEQ ID NO: 31828 - protein, 7 aa, synthetic construct
TSSNRMG

SEQ ID NO: 31829 - protein, 7 aa, synthetic construct
QNQKKGP

SEQ ID NO: 31830 - protein, 7 aa, synthetic construct
NGARVQA

SEQ ID NO: 31831 - protein, 7 aa, synthetic construct
VTKADSG

SEQ ID NO: 31832 - protein, 7 aa, synthetic construct
AGNKQLG

SEQ ID NO: 31833 - protein, 7 aa, synthetic construct
KNASSVS

SEQ ID NO: 31834 - protein, 7 aa, synthetic construct
ILDITKG

SEQ ID NO: 31835 - protein, 7 aa, synthetic construct
IGVKTLN

SEQ ID NO: 31836 - protein, 7 aa, synthetic construct
SNKTGSG

SEQ ID NO: 31837 - protein, 7 aa, synthetic construct
TRSQEIP

SEQ ID NO: 31838 - protein, 7 aa, synthetic construct
TSQMTGY

SEQ ID NO: 31839 - protein, 7 aa, synthetic construct
LPSNIKG

SEQ ID NO: 31840 - protein, 7 aa, synthetic construct
RPQNMTG

SEQ ID NO: 31841 - protein, 7 aa, synthetic construct
NFKGNPV

SEQ ID NO: 31842 - protein, 7 aa, synthetic construct
NKTVSTA

SEQ ID NO: 31843 - protein, 7 aa, synthetic construct
QKAQTNG

SEQ ID NO: 31844 - protein, 7 aa, synthetic construct
NWKQVST

SEQ ID NO: 31845 - protein, 7 aa, synthetic construct
PRPQVMN

SEQ ID NO: 31846 - protein, 7 aa, synthetic construct
RNNSQAG

SEQ ID NO: 31847 - protein, 7 aa, synthetic construct
QAPVTSH

SEQ ID NO: 31848 - protein, 7 aa, synthetic construct
GTDRIHV

SEQ ID NO: 31849 - protein, 7 aa, synthetic construct
MGKGQSG

SEQ ID NO: 31850 - protein, 7 aa, synthetic construct
MKTSRDN

SEQ ID NO: 31851 - protein, 7 aa, synthetic construct
NLSLGHG

SEQ ID NO: 31852 - protein, 7 aa, synthetic construct
FNAGSKT

SEQ ID NO: 31853 - protein, 7 aa, synthetic construct
QRNSIGA

SEQ ID NO: 31854 - protein, 7 aa, synthetic construct
KAVKSDG

SEQ ID NO: 31855 - protein, 7 aa, synthetic construct
TRSQSQA

SEQ ID NO: 31856 - protein, 7 aa, synthetic construct
GVRDSFR

SEQ ID NO: 31857 - protein, 7 aa, synthetic construct
FAERNGS

SEQ ID NO: 31858 - protein, 7 aa, synthetic construct
PQMKGPA

SEQ ID NO: 31859 - protein, 7 aa, synthetic construct
RREIGTG

SEQ ID NO: 31860 - protein, 7 aa, synthetic construct
NANKVGG

SEQ ID NO: 31861 - protein, 7 aa, synthetic construct
TSKIAAE

SEQ ID NO: 31862 - protein, 7 aa, synthetic construct
DKKQTNS

SEQ ID NO: 31863 - protein, 7 aa, synthetic construct
LNQRQMA

SEQ ID NO: 31864 - protein, 7 aa, synthetic construct
TKTNTPG

SEQ ID NO: 31865 - protein, 7 aa, synthetic construct
QHDIRPG

SEQ ID NO: 31866 - protein, 7 aa, synthetic construct
GKPAASA

SEQ ID NO: 31867 - protein, 7 aa, synthetic construct
QVSPNHG

SEQ ID NO: 31868 - protein, 7 aa, synthetic construct
KPPGTAG

SEQ ID NO: 31869 - protein, 7 aa, synthetic construct
TNRTQVG

SEQ ID NO: 31870 - protein, 7 aa, synthetic construct
KDPGKFG

SEQ ID NO: 31871 - protein, 7 aa, synthetic construct
DKGKANP

SEQ ID NO: 31872 - protein, 7 aa, synthetic construct
HDLSHRG

SEQ ID NO: 31873 - protein, 7 aa, synthetic construct
MGKVASG

SEQ ID NO: 31874 - protein, 7 aa, synthetic construct
WAGAQSA

SEQ ID NO: 31875 - protein, 7 aa, synthetic construct
RMADRGA

SEQ ID NO: 31876 - protein, 7 aa, synthetic construct
RDKIKDA

SEQ ID NO: 31877 - protein, 7 aa, synthetic construct
NKPASNS

SEQ ID NO: 31878 - protein, 7 aa, synthetic construct
QVVQMKP

SEQ ID NO: 31879 - protein, 7 aa, synthetic construct
NPRANGA

SEQ ID NO: 31880 - protein, 7 aa, synthetic construct
TATGVKY

SEQ ID NO: 31881 - protein, 7 aa, synthetic construct
FKNTQAG

SEQ ID NO: 31882 - protein, 7 aa, synthetic construct
TGHHNER

SEQ ID NO: 31883 - protein, 7 aa, synthetic construct
HPNHHIA

SEQ ID NO: 31884 - protein, 7 aa, synthetic construct
QPKPGSA

SEQ ID NO: 31885 - protein, 7 aa, synthetic construct
AKSHTQG

SEQ ID NO: 31886 - protein, 7 aa, synthetic construct
RMKQDNL

SEQ ID NO: 31887 - protein, 7 aa, synthetic construct
VNSRAAP

SEQ ID NO: 31888 - protein, 7 aa, synthetic construct
SQKTGMG

SEQ ID NO: 31889 - protein, 7 aa, synthetic construct
HSKQQSP

SEQ ID NO: 31890 - protein, 7 aa, synthetic construct
QRSNVSG

SEQ ID NO: 31891 - protein, 7 aa, synthetic construct
QKVRIES

SEQ ID NO: 31892 - protein, 7 aa, synthetic construct
MNHGTVI

SEQ ID NO: 31893 - protein, 7 aa, synthetic construct
QREVLKA

SEQ ID NO: 31894 - protein, 7 aa, synthetic construct
KAQTSTG

SEQ ID NO: 31895 - protein, 7 aa, synthetic construct
GMRHTDL

SEQ ID NO: 31896 - protein, 7 aa, synthetic construct
TKPNGFS

SEQ ID NO: 31897 - protein, 7 aa, synthetic construct
TMQFGAG

SEQ ID NO: 31898 - protein, 7 aa, synthetic construct
KYSSDKG

SEQ ID NO: 31899 - protein, 7 aa, synthetic construct
LNSNRAS

SEQ ID NO: 31900 - protein, 7 aa, synthetic construct
QRDGPIK

SEQ ID NO: 31901 - protein, 7 aa, synthetic construct
MGPRGGI

SEQ ID NO: 31902 - protein, 7 aa, synthetic construct
YRGEVRI

SEQ ID NO: 31903 - protein, 7 aa, synthetic construct
YINQHPV

SEQ ID NO: 31904 - protein, 7 aa, synthetic construct
NNKQYKE

SEQ ID NO: 31905 - protein, 7 aa, synthetic construct
MGNVMKG

SEQ ID NO: 31906 - protein, 7 aa, synthetic construct
HKQASPV

SEQ ID NO: 31907 - protein, 7 aa, synthetic construct
MNKAVTG

SEQ ID NO: 31908 - protein, 7 aa, synthetic construct
RTPTSQG

SEQ ID NO: 31909 - protein, 7 aa, synthetic construct
PRGVTAG

SEQ ID NO: 31910 - protein, 7 aa, synthetic construct
NKQTMGG

SEQ ID NO: 31911 - protein, 7 aa, synthetic construct
ISRMTPV

SEQ ID NO: 31912 - protein, 7 aa, synthetic construct
SRTPAGA

SEQ ID NO: 31913 - protein, 7 aa, synthetic construct
FTQGNHG

SEQ ID NO: 31914 - protein, 7 aa, synthetic construct
RNTSQSP

SEQ ID NO: 31915 - protein, 7 aa, synthetic construct
TGQVANR

SEQ ID NO: 31916 - protein, 7 aa, synthetic construct
RMRMADT

SEQ ID NO: 31917 - protein, 7 aa, synthetic construct
LVRGQAL

SEQ ID NO: 31918 - protein, 7 aa, synthetic construct
VLADGIR

SEQ ID NO: 31919 - protein, 7 aa, synthetic construct
TTAGRPG

SEQ ID NO: 31920 - protein, 7 aa, synthetic construct
ANKMNQA

SEQ ID NO: 31921 - protein, 7 aa, synthetic construct
GPAKAMG

SEQ ID NO: 31922 - protein, 7 aa, synthetic construct
IKPNGKD

SEQ ID NO: 31923 - protein, 7 aa, synthetic construct
SKHMSGV

SEQ ID NO: 31924 - protein, 7 aa, synthetic construct
GQGRTNG

SEQ ID NO: 31925 - protein, 7 aa, synthetic construct
VHMAAGL

SEQ ID NO: 31926 - protein, 7 aa, synthetic construct
KLTGVAA

SEQ ID NO: 31927 - protein, 7 aa, synthetic construct
HGKYVMN

SEQ ID NO: 31928 - protein, 7 aa, synthetic construct
KSQHMIG

SEQ ID NO: 31929 - protein, 7 aa, synthetic construct
KNGNSQG

SEQ ID NO: 31930 - protein, 7 aa, synthetic construct
RPPMNIP

SEQ ID NO: 31931 - protein, 7 aa, synthetic construct
KSPNVVP

SEQ ID NO: 31932 - protein, 7 aa, synthetic construct
GQRSVTA

SEQ ID NO: 31933 - protein, 7 aa, synthetic construct
MQNTQRA

SEQ ID NO: 31934 - protein, 7 aa, synthetic construct
RDKGPVS

SEQ ID NO: 31935 - protein, 7 aa, synthetic construct
GRLPIAP

SEQ ID NO: 31936 - protein, 7 aa, synthetic construct
TKNTVSS

SEQ ID NO: 31937 - protein, 7 aa, synthetic construct
MATSRPT

SEQ ID NO: 31938 - protein, 7 aa, synthetic construct
LTRPSDT

SEQ ID NO: 31939 - protein, 7 aa, synthetic construct
NARQAGG

SEQ ID NO: 31940 - protein, 7 aa, synthetic construct
RMGQEQR

SEQ ID NO: 31941 - protein, 7 aa, synthetic construct
FPNKSSG

SEQ ID NO: 31942 - protein, 7 aa, synthetic construct
NRSHMPS

SEQ ID NO: 31943 - protein, 7 aa, synthetic construct
KGHTLYE

SEQ ID NO: 31944 - protein, 7 aa, synthetic construct
ESRLNTG

SEQ ID NO: 31945 - protein, 7 aa, synthetic construct
QKKEVNQ

SEQ ID NO: 31946 - protein, 7 aa, synthetic construct
AEYGGRM

SEQ ID NO: 31947 - protein, 7 aa, synthetic construct
YLRDRPV

SEQ ID NO: 31948 - protein, 7 aa, synthetic construct
SNKIGAI

SEQ ID NO: 31949 - protein, 7 aa, synthetic construct
MNQKAQV

SEQ ID NO: 31950 - protein, 7 aa, synthetic construct
YKPTSKE

SEQ ID NO: 31951 - protein, 7 aa, synthetic construct
HYKIMNP

SEQ ID NO: 31952 - protein, 7 aa, synthetic construct
RTNGNSA

SEQ ID NO: 31953 - protein, 7 aa, synthetic construct
GRTTASP

SEQ ID NO: 31954 - protein, 7 aa, synthetic construct
YLGGNLV

SEQ ID NO: 31955 - protein, 7 aa, synthetic construct
FNRASGE

SEQ ID NO: 31956 - protein, 7 aa, synthetic construct
KFQHAEQ

SEQ ID NO: 31957 - protein, 7 aa, synthetic construct
TMLAKGG

SEQ ID NO: 31958 - protein, 7 aa, synthetic construct
NKGVGSI

SEQ ID NO: 31959 - protein, 7 aa, synthetic construct
KRPDASG

SEQ ID NO: 31960 - protein, 7 aa, synthetic construct
KPPSMIH

SEQ ID NO: 31961 - protein, 7 aa, synthetic construct
RPQGTGM

SEQ ID NO: 31962 - protein, 7 aa, synthetic construct
GERKLGP

SEQ ID NO: 31963 - protein, 7 aa, synthetic construct
FKGIGSA

SEQ ID NO: 31964 - protein, 7 aa, synthetic construct
WSSKMTG

SEQ ID NO: 31965 - protein, 7 aa, synthetic construct
SKNSAHP

SEQ ID NO: 31966 - protein, 7 aa, synthetic construct
TGTSNKP

SEQ ID NO: 31967 - protein, 7 aa, synthetic construct
QKQTARE

SEQ ID NO: 31968 - protein, 7 aa, synthetic construct
SAFGVKD

SEQ ID NO: 31969 - protein, 7 aa, synthetic construct
CNRKEVC

SEQ ID NO: 31970 - protein, 7 aa, synthetic construct
DMHKSYS

SEQ ID NO: 31971 - protein, 7 aa, synthetic construct
QQKNNSA

SEQ ID NO: 31972 - protein, 7 aa, synthetic construct
QSGKVEI

SEQ ID NO: 31973 - protein, 7 aa, synthetic construct
GPMKSAG

SEQ ID NO: 31974 - protein, 7 aa, synthetic construct
PPYNVTP

SEQ ID NO: 31975 - protein, 7 aa, synthetic construct
ERSAAHS

SEQ ID NO: 31976 - protein, 7 aa, synthetic construct
YPSSKMG

SEQ ID NO: 31977 - protein, 7 aa, synthetic construct
GRPVQGG

SEQ ID NO: 31978 - protein, 7 aa, synthetic construct
TGTKQVV

SEQ ID NO: 31979 - protein, 7 aa, synthetic construct
VNGSRSG

SEQ ID NO: 31980 - protein, 7 aa, synthetic construct
KVAQNFG

SEQ ID NO: 31981 - protein, 7 aa, synthetic construct
TSRGIDM

SEQ ID NO: 31982 - protein, 7 aa, synthetic construct
RNAQASG

SEQ ID NO: 31983 - protein, 7 aa, synthetic construct
NRGTNQP

SEQ ID NO: 31984 - protein, 7 aa, synthetic construct
VNGRNSA

SEQ ID NO: 31985 - protein, 7 aa, synthetic construct
QRSSVSG

SEQ ID NO: 31986 - protein, 7 aa, synthetic construct
MTSSSRG

SEQ ID NO: 31987 - protein, 7 aa, synthetic construct
KTMPSQA

SEQ ID NO: 31988 - protein, 7 aa, synthetic construct
SQKHQTY

SEQ ID NO: 31989 - protein, 7 aa, synthetic construct
QLKVHDT

SEQ ID NO: 31990 - protein, 7 aa, synthetic construct
MSGNGNK

SEQ ID NO: 31991 - protein, 7 aa, synthetic construct
VGHNLHP

SEQ ID NO: 31992 - protein, 7 aa, synthetic construct
VSHEWRG

SEQ ID NO: 31993 - protein, 7 aa, synthetic construct
TAVFRTA

SEQ ID NO: 31994 - protein, 7 aa, synthetic construct
TGTAKMG

SEQ ID NO: 31995 - protein, 7 aa, synthetic construct
TVGPQKP

SEQ ID NO: 31996 - protein, 7 aa, synthetic construct
YSKTSSS

SEQ ID NO: 31997 - protein, 7 aa, synthetic construct
KNSVQVG

SEQ ID NO: 31998 - protein, 7 aa, synthetic construct
RLQPEKN

SEQ ID NO: 31999 - protein, 7 aa, synthetic construct
VRSNVSP

SEQ ID NO: 32000 - protein, 7 aa, synthetic construct
QFGQKSV

SEQ ID NO: 32001 - protein, 7 aa, synthetic construct
EKTHIHA

SEQ ID NO: 32002 - protein, 7 aa, synthetic construct
NPRSQGG

SEQ ID NO: 32003 - protein, 7 aa, synthetic construct
GQRTTGV

SEQ ID NO: 32004 - protein, 7 aa, synthetic construct
SKQGNNA

SEQ ID NO: 32005 - protein, 7 aa, synthetic construct
TRGSVQG

SEQ ID NO: 32006 - protein, 7 aa, synthetic construct
YPPKNNA

SEQ ID NO: 32007 - protein, 7 aa, synthetic construct
NKSSSAS

SEQ ID NO: 32008 - protein, 7 aa, synthetic construct
YKPGIMG

SEQ ID NO: 32009 - protein, 7 aa, synthetic construct
TRGQQTG

SEQ ID NO: 32010 - protein, 7 aa, synthetic construct
RPNGTMA

SEQ ID NO: 32011 - protein, 7 aa, synthetic construct
VKSAAMS

SEQ ID NO: 32012 - protein, 7 aa, synthetic construct
TKGNVNA

SEQ ID NO: 32013 - protein, 7 aa, synthetic construct
VKTQGSV

SEQ ID NO: 32014 - protein, 7 aa, synthetic construct
KRDQASV

SEQ ID NO: 32015 - protein, 7 aa, synthetic construct
AHHVRGD

SEQ ID NO: 32016 - protein, 7 aa, synthetic construct
RSTGQAA

SEQ ID NO: 32017 - protein, 7 aa, synthetic construct
VRVGNVA

SEQ ID NO: 32018 - protein, 7 aa, synthetic construct
RNDPVKS

SEQ ID NO: 32019 - protein, 7 aa, synthetic construct
TKTTMPS

SEQ ID NO: 32020 - protein, 7 aa, synthetic construct
GYMVTQA

SEQ ID NO: 32021 - protein, 7 aa, synthetic construct
RNPGAGA

SEQ ID NO: 32022 - protein, 7 aa, synthetic construct
PAGPQRG

SEQ ID NO: 32023 - protein, 7 aa, synthetic construct
NQGKSSG

SEQ ID NO: 32024 - protein, 7 aa, synthetic construct
FKLSPQG

SEQ ID NO: 32025 - protein, 7 aa, synthetic construct
NSNGRHE

SEQ ID NO: 32026 - protein, 7 aa, synthetic construct
WKPMMVG

SEQ ID NO: 32027 - protein, 7 aa, synthetic construct
LYQKGVH

SEQ ID NO: 32028 - protein, 7 aa, synthetic construct
THTGVGP

SEQ ID NO: 32029 - protein, 7 aa, synthetic construct
QDRVLKP

SEQ ID NO: 32030 - protein, 7 aa, synthetic construct
TSQRQQA

SEQ ID NO: 32031 - protein, 7 aa, synthetic construct
PRSANNG

SEQ ID NO: 32032 - protein, 7 aa, synthetic construct
KSNSNMA

SEQ ID NO: 32033 - protein, 7 aa, synthetic construct
QTMGDRP

SEQ ID NO: 32034 - protein, 7 aa, synthetic construct
MNKNGNP

SEQ ID NO: 32035 - protein, 7 aa, synthetic construct
GYTKIQA

SEQ ID NO: 32036 - protein, 7 aa, synthetic construct
DGRVTAS

SEQ ID NO: 32037 - protein, 7 aa, synthetic construct
LMKLSQA

SEQ ID NO: 32038 - protein, 7 aa, synthetic construct
RSPTSMG

SEQ ID NO: 32039 - protein, 7 aa, synthetic construct
ARERSGM

SEQ ID NO: 32040 - protein, 7 aa, synthetic construct
NTRPSGA

SEQ ID NO: 32041 - protein, 7 aa, synthetic construct
KTASTPA

SEQ ID NO: 32042 - protein, 7 aa, synthetic construct
IQSSQKT

SEQ ID NO: 32043 - protein, 7 aa, synthetic construct
RISHPRD

SEQ ID NO: 32044 - protein, 7 aa, synthetic construct
TRQSNNG

SEQ ID NO: 32045 - protein, 7 aa, synthetic construct
NKGQNSG

SEQ ID NO: 32046 - protein, 7 aa, synthetic construct
NFPNVNP

SEQ ID NO: 32047 - protein, 7 aa, synthetic construct
SNSSKQA

SEQ ID NO: 32048 - protein, 7 aa, synthetic construct
PNKAGNG

SEQ ID NO: 32049 - protein, 7 aa, synthetic construct
FPKPANG

SEQ ID NO: 32050 - protein, 7 aa, synthetic construct
KFKTSFD

SEQ ID NO: 32051 - protein, 7 aa, synthetic construct
KNPQAYN

SEQ ID NO: 32052 - protein, 7 aa, synthetic construct
TNRTNQA

SEQ ID NO: 32053 - protein, 7 aa, synthetic construct
VSKGVAA

SEQ ID NO: 32054 - protein, 7 aa, synthetic construct
MRGAQQA

SEQ ID NO: 32055 - protein, 7 aa, synthetic construct
TKVNINQ

SEQ ID NO: 32056 - protein, 7 aa, synthetic construct
GPASVKP

SEQ ID NO: 32057 - protein, 7 aa, synthetic construct
RKDQSMS

SEQ ID NO: 32058 - protein, 7 aa, synthetic construct
RAGDARY

SEQ ID NO: 32059 - protein, 7 aa, synthetic construct
FEKIFRE

SEQ ID NO: 32060 - protein, 7 aa, synthetic construct
NKGPIAA

SEQ ID NO: 32061 - protein, 7 aa, synthetic construct
TYGGNKG

SEQ ID NO: 32062 - protein, 7 aa, synthetic construct
TNTKGQA

SEQ ID NO: 32063 - protein, 7 aa, synthetic construct
NMKAMRD

SEQ ID NO: 32064 - protein, 7 aa, synthetic construct
RFNSSSP

SEQ ID NO: 32065 - protein, 7 aa, synthetic construct
IRLPRDV

SEQ ID NO: 32066 - protein, 7 aa, synthetic construct
QAPGART

SEQ ID NO: 32067 - protein, 7 aa, synthetic construct
ASPSNMI

SEQ ID NO: 32068 - protein, 7 aa, synthetic construct
TSLKALA

SEQ ID NO: 32069 - protein, 7 aa, synthetic construct
LTINSAP

SEQ ID NO: 32070 - protein, 7 aa, synthetic construct
NFRKDSA

SEQ ID NO: 32071 - protein, 7 aa, synthetic construct
TFNNNNG

SEQ ID NO: 32072 - protein, 7 aa, synthetic construct
TNFYKNG

SEQ ID NO: 32073 - protein, 7 aa, synthetic construct
GPRNSLA

SEQ ID NO: 32074 - protein, 7 aa, synthetic construct
MGTGRSE

SEQ ID NO: 32075 - protein, 7 aa, synthetic construct
NTKTMNA

SEQ ID NO: 32076 - protein, 7 aa, synthetic construct
QAKWVDP

SEQ ID NO: 32077 - protein, 7 aa, synthetic construct
YGSGKVG

SEQ ID NO: 32078 - protein, 7 aa, synthetic construct
NGSKVAM

SEQ ID NO: 32079 - protein, 7 aa, synthetic construct
PVRSQQP

SEQ ID NO: 32080 - protein, 7 aa, synthetic construct
FQHQTAA

SEQ ID NO: 32081 - protein, 7 aa, synthetic construct
MTNHSPM

SEQ ID NO: 32082 - protein, 7 aa, synthetic construct
NSHKNVG

SEQ ID NO: 32083 - protein, 7 aa, synthetic construct
KNASGSG

SEQ ID NO: 32084 - protein, 7 aa, synthetic construct
KGNQNTA

SEQ ID NO: 32085 - protein, 7 aa, synthetic construct
NLMRHAD

SEQ ID NO: 32086 - protein, 7 aa, synthetic construct
FSPHEHQ

SEQ ID NO: 32087 - protein, 7 aa, synthetic construct
RSGNMPP

SEQ ID NO: 32088 - protein, 7 aa, synthetic construct
DRQKDKQ

SEQ ID NO: 32089 - protein, 7 aa, synthetic construct
RPTSSGG

SEQ ID NO: 32090 - protein, 7 aa, synthetic construct
YQGSNKN

SEQ ID NO: 32091 - protein, 7 aa, synthetic construct
QMKTRES

SEQ ID NO: 32092 - protein, 7 aa, synthetic construct
NYKSGTN

SEQ ID NO: 32093 - protein, 7 aa, synthetic construct
FRNVGSD

SEQ ID NO: 32094 - protein, 7 aa, synthetic construct
QKPGIVG

SEQ ID NO: 32095 - protein, 7 aa, synthetic construct
PAVRFTE

SEQ ID NO: 32096 - protein, 7 aa, synthetic construct
NRGPLSS

SEQ ID NO: 32097 - protein, 7 aa, synthetic construct
TPPVGKG

SEQ ID NO: 32098 - protein, 7 aa, synthetic construct
RMQNATG

SEQ ID NO: 32099 - protein, 7 aa, synthetic construct
WPQKQSP

SEQ ID NO: 32100 - protein, 7 aa, synthetic construct
MQKGVKD

SEQ ID NO: 32101 - protein, 7 aa, synthetic construct
VNGLRSV

SEQ ID NO: 32102 - protein, 7 aa, synthetic construct
SIYGGHQ

SEQ ID NO: 32103 - protein, 7 aa, synthetic construct
LQFMNKG

SEQ ID NO: 32104 - protein, 7 aa, synthetic construct
QGTQVMG

SEQ ID NO: 32105 - protein, 7 aa, synthetic construct
KISSVES

SEQ ID NO: 32106 - protein, 7 aa, synthetic construct
AHTPVNN

SEQ ID NO: 32107 - protein, 7 aa, synthetic construct
TTNIRTA

SEQ ID NO: 32108 - protein, 7 aa, synthetic construct
KNTGKAE

SEQ ID NO: 32109 - protein, 7 aa, synthetic construct
LSTFSHA

SEQ ID NO: 32110 - protein, 7 aa, synthetic construct
VYPQRAQ

SEQ ID NO: 32111 - protein, 7 aa, synthetic construct
AMAWEGK

SEQ ID NO: 32112 - protein, 7 aa, synthetic construct
QQRSTAP

SEQ ID NO: 32113 - protein, 7 aa, synthetic construct
WSSGKPG

SEQ ID NO: 32114 - protein, 7 aa, synthetic construct
SFKGSTA

SEQ ID NO: 32115 - protein, 7 aa, synthetic construct
SVQSKAV

SEQ ID NO: 32116 - protein, 7 aa, synthetic construct
NGKSQNP

SEQ ID NO: 32117 - protein, 7 aa, synthetic construct
GKASHTA

SEQ ID NO: 32118 - protein, 7 aa, synthetic construct
MVKAIPA

SEQ ID NO: 32119 - protein, 7 aa, synthetic construct
SAQAKMA

SEQ ID NO: 32120 - protein, 7 aa, synthetic construct
YNIHKKD

SEQ ID NO: 32121 - protein, 7 aa, synthetic construct
PYKPSNA

SEQ ID NO: 32122 - protein, 7 aa, synthetic construct
IPKRAPE

SEQ ID NO: 32123 - protein, 7 aa, synthetic construct
RPNHNKE

SEQ ID NO: 32124 - protein, 7 aa, synthetic construct
FQKSNAS

SEQ ID NO: 32125 - protein, 7 aa, synthetic construct
PKQQNYA

SEQ ID NO: 32126 - protein, 7 aa, synthetic construct
GAGANYG

SEQ ID NO: 32127 - protein, 7 aa, synthetic construct
HFIKEPG

SEQ ID NO: 32128 - protein, 7 aa, synthetic construct
TMKGSNS

SEQ ID NO: 32129 - protein, 7 aa, synthetic construct
VSQRGPT

SEQ ID NO: 32130 - protein, 7 aa, synthetic construct
TASKHAT

SEQ ID NO: 32131 - protein, 7 aa, synthetic construct
KDKGNIP

SEQ ID NO: 32132 - protein, 7 aa, synthetic construct
KISNNPA

SEQ ID NO: 32133 - protein, 7 aa, synthetic construct
RTQAGVV

SEQ ID NO: 32134 - protein, 7 aa, synthetic construct
WKVTDQH

SEQ ID NO: 32135 - protein, 7 aa, synthetic construct
LGRDTIT

SEQ ID NO: 32136 - protein, 7 aa, synthetic construct
TSATKAG

SEQ ID NO: 32137 - protein, 7 aa, synthetic construct
TVSSSKG

SEQ ID NO: 32138 - protein, 7 aa, synthetic construct
FGKSQAQ

SEQ ID NO: 32139 - protein, 7 aa, synthetic construct
NSTRMNF

SEQ ID NO: 32140 - protein, 7 aa, synthetic construct
KQNNMAG

SEQ ID NO: 32141 - protein, 7 aa, synthetic construct
RPTNSSD

SEQ ID NO: 32142 - protein, 7 aa, synthetic construct
KSGNPMM

SEQ ID NO: 32143 - protein, 7 aa, synthetic construct
PRDRSLG

SEQ ID NO: 32144 - protein, 7 aa, synthetic construct
FDKIKNS

SEQ ID NO: 32145 - protein, 7 aa, synthetic construct
STPYYKD

SEQ ID NO: 32146 - protein, 7 aa, synthetic construct
MRTNVLS

SEQ ID NO: 32147 - protein, 7 aa, synthetic construct
TRTSTSN

SEQ ID NO: 32148 - protein, 7 aa, synthetic construct
NRINDRF

SEQ ID NO: 32149 - protein, 7 aa, synthetic construct
HLHKQAQ

SEQ ID NO: 32150 - protein, 7 aa, synthetic construct
KNNSTKD

SEQ ID NO: 32151 - protein, 7 aa, synthetic construct
TPKSGGG

SEQ ID NO: 32152 - protein, 7 aa, synthetic construct
TYPKPTN

SEQ ID NO: 32153 - protein, 7 aa, synthetic construct
MMRDANT

SEQ ID NO: 32154 - protein, 7 aa, synthetic construct
GWTKKET

SEQ ID NO: 32155 - protein, 7 aa, synthetic construct
KNMNTQA

SEQ ID NO: 32156 - protein, 7 aa, synthetic construct
YSLHQVS

SEQ ID NO: 32157 - protein, 7 aa, synthetic construct
VNHMKVP

SEQ ID NO: 32158 - protein, 7 aa, synthetic construct
QAPVSKD

SEQ ID NO: 32159 - protein, 7 aa, synthetic construct
FGAKGQN

SEQ ID NO: 32160 - protein, 7 aa, synthetic construct
RGNTFID

SEQ ID NO: 32161 - protein, 7 aa, synthetic construct
RPSVSTP

SEQ ID NO: 32162 - protein, 7 aa, synthetic construct
VRQQASG

SEQ ID NO: 32163 - protein, 7 aa, synthetic construct
TKPAGVG

SEQ ID NO: 32164 - protein, 7 aa, synthetic construct
GKGGSQV

SEQ ID NO: 32165 - protein, 7 aa, synthetic construct
KISTLMN

SEQ ID NO: 32166 - protein, 7 aa, synthetic construct
RHQGPQL

SEQ ID NO: 32167 - protein, 7 aa, synthetic construct
RPNGGQL

SEQ ID NO: 32168 - protein, 7 aa, synthetic construct
VLGIPRP

SEQ ID NO: 32169 - protein, 7 aa, synthetic construct
AKPNMSA

SEQ ID NO: 32170 - protein, 7 aa, synthetic construct
GKPNVQG

SEQ ID NO: 32171 - protein, 7 aa, synthetic construct
KPNASVP

SEQ ID NO: 32172 - protein, 7 aa, synthetic construct
LKPNHGM

SEQ ID NO: 32173 - protein, 7 aa, synthetic construct
TNKNNTG

SEQ ID NO: 32174 - protein, 7 aa, synthetic construct
MGPKVNG

SEQ ID NO: 32175 - protein, 7 aa, synthetic construct
MNGYFKA

SEQ ID NO: 32176 - protein, 7 aa, synthetic construct
TRHNAEL

SEQ ID NO: 32177 - protein, 7 aa, synthetic construct
MPPKSGS

SEQ ID NO: 32178 - protein, 7 aa, synthetic construct
AKTANSS

SEQ ID NO: 32179 - protein, 7 aa, synthetic construct
GARGSSM

SEQ ID NO: 32180 - protein, 7 aa, synthetic construct
VNGGRMA

SEQ ID NO: 32181 - protein, 7 aa, synthetic construct
SMMKTQP

SEQ ID NO: 32182 - protein, 7 aa, synthetic construct
KREMMGN

SEQ ID NO: 32183 - protein, 7 aa, synthetic construct
KHDSRNA

SEQ ID NO: 32184 - protein, 7 aa, synthetic construct
NRQTSAA

SEQ ID NO: 32185 - protein, 7 aa, synthetic construct
KDETKIL

SEQ ID NO: 32186 - protein, 7 aa, synthetic construct
RSQTQAA

SEQ ID NO: 32187 - protein, 7 aa, synthetic construct
TTRQTNA

SEQ ID NO: 32188 - protein, 7 aa, synthetic construct
TFMTKDG

SEQ ID NO: 32189 - protein, 7 aa, synthetic construct
GGVKTSA

SEQ ID NO: 32190 - protein, 7 aa, synthetic construct
AMVSHGM

SEQ ID NO: 32191 - protein, 7 aa, synthetic construct
TGKMATA

SEQ ID NO: 32192 - protein, 7 aa, synthetic construct
STNGKQG

SEQ ID NO: 32193 - protein, 7 aa, synthetic construct
MKPNSSP

SEQ ID NO: 32194 - protein, 7 aa, synthetic construct
SSIMSHG

SEQ ID NO: 32195 - protein, 7 aa, synthetic construct
KNTSHQP

SEQ ID NO: 32196 - protein, 7 aa, synthetic construct
TKQTGQQ

SEQ ID NO: 32197 - protein, 7 aa, synthetic construct
LSNAHVS

SEQ ID NO: 32198 - protein, 7 aa, synthetic construct
RNNAAYA

SEQ ID NO: 32199 - protein, 7 aa, synthetic construct
SIPNTMS

SEQ ID NO: 32200 - protein, 7 aa, synthetic construct
FGQAKNA

SEQ ID NO: 32201 - protein, 7 aa, synthetic construct
RNAQSHN

SEQ ID NO: 32202 - protein, 7 aa, synthetic construct
YKQQMKD

SEQ ID NO: 32203 - protein, 7 aa, synthetic construct
PTKGQSA

SEQ ID NO: 32204 - protein, 7 aa, synthetic construct
PFARMES

SEQ ID NO: 32205 - protein, 7 aa, synthetic construct
TATVPRG

SEQ ID NO: 32206 - protein, 7 aa, synthetic construct
TKQIMQV

SEQ ID NO: 32207 - protein, 7 aa, synthetic construct
KNMSAPP

SEQ ID NO: 32208 - protein, 7 aa, synthetic construct
YANTQKG

SEQ ID NO: 32209 - protein, 7 aa, synthetic construct
RGFGSDA

SEQ ID NO: 32210 - protein, 7 aa, synthetic construct
PKVSAGG

SEQ ID NO: 32211 - protein, 7 aa, synthetic construct
RSNNSTG

SEQ ID NO: 32212 - protein, 7 aa, synthetic construct
MKTGTGA

SEQ ID NO: 32213 - protein, 7 aa, synthetic construct
RDPIPYD

SEQ ID NO: 32214 - protein, 7 aa, synthetic construct
WMNKIAS

SEQ ID NO: 32215 - protein, 7 aa, synthetic construct
TNSMPSA

SEQ ID NO: 32216 - protein, 7 aa, synthetic construct
GKRETFG

SEQ ID NO: 32217 - protein, 7 aa, synthetic construct
QKNGTIG

SEQ ID NO: 32218 - protein, 7 aa, synthetic construct
LNQRTGG

SEQ ID NO: 32219 - protein, 7 aa, synthetic construct
SPSKALA

SEQ ID NO: 32220 - protein, 7 aa, synthetic construct
GSNNPVN

SEQ ID NO: 32221 - protein, 7 aa, synthetic construct
FGAYSTA

SEQ ID NO: 32222 - protein, 7 aa, synthetic construct
VTAMRQE

SEQ ID NO: 32223 - protein, 7 aa, synthetic construct
NQNRQQA

SEQ ID NO: 32224 - protein, 7 aa, synthetic construct
QPPYRGE

SEQ ID NO: 32225 - protein, 7 aa, synthetic construct
TNVKVPS

SEQ ID NO: 32226 - protein, 7 aa, synthetic construct
LASSARQ

SEQ ID NO: 32227 - protein, 7 aa, synthetic construct
DINHRSP

SEQ ID NO: 32228 - protein, 7 aa, synthetic construct
YGRSAYA

SEQ ID NO: 32229 - protein, 7 aa, synthetic construct
SFSSTTG

SEQ ID NO: 32230 - protein, 7 aa, synthetic construct
QMRPEPM

SEQ ID NO: 32231 - protein, 7 aa, synthetic construct
LEPRRNG

SEQ ID NO: 32232 - protein, 7 aa, synthetic construct
NAGHMHA

SEQ ID NO: 32233 - protein, 7 aa, synthetic construct
SKTGMNA

SEQ ID NO: 32234 - protein, 7 aa, synthetic construct
MYKGTNG

SEQ ID NO: 32235 - protein, 7 aa, synthetic construct
SKIGVAS

SEQ ID NO: 32236 - protein, 7 aa, synthetic construct
TARSPGS

SEQ ID NO: 32237 - protein, 7 aa, synthetic construct
RNSSGMS

SEQ ID NO: 32238 - protein, 7 aa, synthetic construct
NKSGMTG

SEQ ID NO: 32239 - protein, 7 aa, synthetic construct
ANKQSMG

SEQ ID NO: 32240 - protein, 7 aa, synthetic construct
RENTNVA

SEQ ID NO: 32241 - protein, 7 aa, synthetic construct
AGHGFGN

SEQ ID NO: 32242 - protein, 7 aa, synthetic construct
MYEHRGG

SEQ ID NO: 32243 - protein, 7 aa, synthetic construct
QAKVRES

SEQ ID NO: 32244 - protein, 7 aa, synthetic construct
TTRAPQA

SEQ ID NO: 32245 - protein, 7 aa, synthetic construct
HPNTVTG

SEQ ID NO: 32246 - protein, 7 aa, synthetic construct
FPGKAHY

SEQ ID NO: 32247 - protein, 7 aa, synthetic construct
MTNIKPA

SEQ ID NO: 32248 - protein, 7 aa, synthetic construct
QSGKMNA

SEQ ID NO: 32249 - protein, 7 aa, synthetic construct
RSSFGGE

SEQ ID NO: 32250 - protein, 7 aa, synthetic construct
VDMRHGG

SEQ ID NO: 32251 - protein, 7 aa, synthetic construct
LPRSNNA

SEQ ID NO: 32252 - protein, 7 aa, synthetic construct
VNGGNNR

SEQ ID NO: 32253 - protein, 7 aa, synthetic construct
IPAQPRD

SEQ ID NO: 32254 - protein, 7 aa, synthetic construct
QNKASSM

SEQ ID NO: 32255 - protein, 7 aa, synthetic construct
SKREIQA

SEQ ID NO: 32256 - protein, 7 aa, synthetic construct
GISYSKD

SEQ ID NO: 32257 - protein, 7 aa, synthetic construct
NKQMANA

SEQ ID NO: 32258 - protein, 7 aa, synthetic construct
SPPKNQA

SEQ ID NO: 32259 - protein, 7 aa, synthetic construct
MSKMATG

SEQ ID NO: 32260 - protein, 7 aa, synthetic construct
RANVTGG

SEQ ID NO: 32261 - protein, 7 aa, synthetic construct
QGSKGQA

SEQ ID NO: 32262 - protein, 7 aa, synthetic construct
GTRTTGA

SEQ ID NO: 32263 - protein, 7 aa, synthetic construct
RKNDENS

SEQ ID NO: 32264 - protein, 7 aa, synthetic construct
PGNKHAY

SEQ ID NO: 32265 - protein, 7 aa, synthetic construct
KFTHAPD

SEQ ID NO: 32266 - protein, 7 aa, synthetic construct
THVVGNR

SEQ ID NO: 32267 - protein, 7 aa, synthetic construct
LVPHMTK

SEQ ID NO: 32268 - protein, 7 aa, synthetic construct
RGMGPTG

SEQ ID NO: 32269 - protein, 7 aa, synthetic construct
FERQRME

SEQ ID NO: 32270 - protein, 7 aa, synthetic construct
GKNMASA

SEQ ID NO: 32271 - protein, 7 aa, synthetic construct
KFPNQGA

SEQ ID NO: 32272 - protein, 7 aa, synthetic construct
YHAARNG

SEQ ID NO: 32273 - protein, 7 aa, synthetic construct
MRGQDVR

SEQ ID NO: 32274 - protein, 7 aa, synthetic construct
KNSNASS

SEQ ID NO: 32275 - protein, 7 aa, synthetic construct
WSAVNKP

SEQ ID NO: 32276 - protein, 7 aa, synthetic construct
NKGNGAM

SEQ ID NO: 32277 - protein, 7 aa, synthetic construct
TSSKGVA

SEQ ID NO: 32278 - protein, 7 aa, synthetic construct
ALRGMNS

SEQ ID NO: 32279 - protein, 7 aa, synthetic construct
NKDQRFP

SEQ ID NO: 32280 - protein, 7 aa, synthetic construct
VGNRTTG

SEQ ID NO: 32281 - protein, 7 aa, synthetic construct
LHTKVQP

SEQ ID NO: 32282 - protein, 7 aa, synthetic construct
QPPNRQG

SEQ ID NO: 32283 - protein, 7 aa, synthetic construct
TNQKMGP

SEQ ID NO: 32284 - protein, 7 aa, synthetic construct
TNPKSGN

SEQ ID NO: 32285 - protein, 7 aa, synthetic construct
ERNAHHG

SEQ ID NO: 32286 - protein, 7 aa, synthetic construct
KTNGTAV

SEQ ID NO: 32287 - protein, 7 aa, synthetic construct
QMKSVGG

SEQ ID NO: 32288 - protein, 7 aa, synthetic construct
KNTTPNG

SEQ ID NO: 32289 - protein, 7 aa, synthetic construct
LRTKDEH

SEQ ID NO: 32290 - protein, 7 aa, synthetic construct
RNSGAVL

SEQ ID NO: 32291 - protein, 7 aa, synthetic construct
QMHYVAE

SEQ ID NO: 32292 - protein, 7 aa, synthetic construct
NGYPTPT

SEQ ID NO: 32293 - protein, 7 aa, synthetic construct
QKNNLGV

SEQ ID NO: 32294 - protein, 7 aa, synthetic construct
TGKYMNA

SEQ ID NO: 32295 - protein, 7 aa, synthetic construct
EKFHHQS

SEQ ID NO: 32296 - protein, 7 aa, synthetic construct
SPRMGTG

SEQ ID NO: 32297 - protein, 7 aa, synthetic construct
TTMIRLE

SEQ ID NO: 32298 - protein, 7 aa, synthetic construct
KMTNSSV

SEQ ID NO: 32299 - protein, 7 aa, synthetic construct
YPKRDNT

SEQ ID NO: 32300 - protein, 7 aa, synthetic construct
MNVSKPG

SEQ ID NO: 32301 - protein, 7 aa, synthetic construct
MGKPQTA

SEQ ID NO: 32302 - protein, 7 aa, synthetic construct
PRAQGTG

SEQ ID NO: 32303 - protein, 7 aa, synthetic construct
GPSGIKG

SEQ ID NO: 32304 - protein, 7 aa, synthetic construct
YGKASEG

SEQ ID NO: 32305 - protein, 7 aa, synthetic construct
QSRGGTY

SEQ ID NO: 32306 - protein, 7 aa, synthetic construct
KVWDKGE

SEQ ID NO: 32307 - protein, 7 aa, synthetic construct
NPATSKG

SEQ ID NO: 32308 - protein, 7 aa, synthetic construct
KEHAANM

SEQ ID NO: 32309 - protein, 7 aa, synthetic construct
IRPSTQA

SEQ ID NO: 32310 - protein, 7 aa, synthetic construct
TPTARGG

SEQ ID NO: 32311 - protein, 7 aa, synthetic construct
NSQKATG

SEQ ID NO: 32312 - protein, 7 aa, synthetic construct
AKEVRGP

SEQ ID NO: 32313 - protein, 7 aa, synthetic construct
NVNKSLS

SEQ ID NO: 32314 - protein, 7 aa, synthetic construct
NQYGGAM

SEQ ID NO: 32315 - protein, 7 aa, synthetic construct
KWNGHEA

SEQ ID NO: 32316 - protein, 7 aa, synthetic construct
YKNASQG

SEQ ID NO: 32317 - protein, 7 aa, synthetic construct
HDVRRQP

SEQ ID NO: 32318 - protein, 7 aa, synthetic construct
KDRSTGG

SEQ ID NO: 32319 - protein, 7 aa, synthetic construct
PQRNGGV

SEQ ID NO: 32320 - protein, 7 aa, synthetic construct
QKHDSST

SEQ ID NO: 32321 - protein, 7 aa, synthetic construct
KGNVSQG

SEQ ID NO: 32322 - protein, 7 aa, synthetic construct
NAMQRQM

SEQ ID NO: 32323 - protein, 7 aa, synthetic construct
RAQSTAG

SEQ ID NO: 32324 - protein, 7 aa, synthetic construct
YPGQKNQ

SEQ ID NO: 32325 - protein, 7 aa, synthetic construct
FIGKDTN

SEQ ID NO: 32326 - protein, 7 aa, synthetic construct
GWAQHAG

SEQ ID NO: 32327 - protein, 7 aa, synthetic construct
GKHPSQY

SEQ ID NO: 32328 - protein, 7 aa, synthetic construct
RYVNNGA

SEQ ID NO: 32329 - protein, 7 aa, synthetic construct
KVSSSQS

SEQ ID NO: 32330 - protein, 7 aa, synthetic construct
QRQAGSG

SEQ ID NO: 32331 - protein, 7 aa, synthetic construct
IIRDTAK

SEQ ID NO: 32332 - protein, 7 aa, synthetic construct
RDRDNLH

SEQ ID NO: 32333 - protein, 7 aa, synthetic construct
INGRSDA

SEQ ID NO: 32334 - protein, 7 aa, synthetic construct
DGRSRDT

SEQ ID NO: 32335 - protein, 7 aa, synthetic construct
IGKAVVN

SEQ ID NO: 32336 - protein, 7 aa, synthetic construct
KDNNRGG

SEQ ID NO: 32337 - protein, 7 aa, synthetic construct
YMGQQKP

SEQ ID NO: 32338 - protein, 7 aa, synthetic construct
TSKQVTT

SEQ ID NO: 32339 - protein, 7 aa, synthetic construct
AKPAGQH

SEQ ID NO: 32340 - protein, 7 aa, synthetic construct
LSGIRAS

SEQ ID NO: 32341 - protein, 7 aa, synthetic construct
SKVKLSD

SEQ ID NO: 32342 - protein, 7 aa, synthetic construct
YAKPTKD

SEQ ID NO: 32343 - protein, 7 aa, synthetic construct
TKTVINM

SEQ ID NO: 32344 - protein, 7 aa, synthetic construct
KTAQASA

SEQ ID NO: 32345 - protein, 7 aa, synthetic construct
RTSTGVG

SEQ ID NO: 32346 - protein, 7 aa, synthetic construct
TGGFGRD

SEQ ID NO: 32347 - protein, 7 aa, synthetic construct
GPKQNNG

SEQ ID NO: 32348 - protein, 7 aa, synthetic construct
KPAMGGG

SEQ ID NO: 32349 - protein, 7 aa, synthetic construct
QTGQKVG

SEQ ID NO: 32350 - protein, 7 aa, synthetic construct
GQKKEQA

SEQ ID NO: 32351 - protein, 7 aa, synthetic construct
QEWRKVD

SEQ ID NO: 32352 - protein, 7 aa, synthetic construct
NYTHGPL

SEQ ID NO: 32353 - protein, 7 aa, synthetic construct
DKKMSSQ

SEQ ID NO: 32354 - protein, 7 aa, synthetic construct
YTHKQDQ

SEQ ID NO: 32355 - protein, 7 aa, synthetic construct
TSRMLAG

SEQ ID NO: 32356 - protein, 7 aa, synthetic construct
ELKRKDE

SEQ ID NO: 32357 - protein, 7 aa, synthetic construct
PSSRGQF

SEQ ID NO: 32358 - protein, 7 aa, synthetic construct
RPTSSTA

SEQ ID NO: 32359 - protein, 7 aa, synthetic construct
GGQKSAG

SEQ ID NO: 32360 - protein, 7 aa, synthetic construct
FEVRAPA

SEQ ID NO: 32361 - protein, 7 aa, synthetic construct
SIAHAHS

SEQ ID NO: 32362 - protein, 7 aa, synthetic construct
TKSASSN

SEQ ID NO: 32363 - protein, 7 aa, synthetic construct
QNKTPAA

SEQ ID NO: 32364 - protein, 7 aa, synthetic construct
RDSQKGG

SEQ ID NO: 32365 - protein, 7 aa, synthetic construct
GRATMVA

SEQ ID NO: 32366 - protein, 7 aa, synthetic construct
TSRQSAG

SEQ ID NO: 32367 - protein, 7 aa, synthetic construct
KTAPGSG

SEQ ID NO: 32368 - protein, 7 aa, synthetic construct
IKQGSAG

SEQ ID NO: 32369 - protein, 7 aa, synthetic construct
GQPKGNG

SEQ ID NO: 32370 - protein, 7 aa, synthetic construct
IMQHGPG

SEQ ID NO: 32371 - protein, 7 aa, synthetic construct
QRAKYDE

SEQ ID NO: 32372 - protein, 7 aa, synthetic construct
NMGNKQG

SEQ ID NO: 32373 - protein, 7 aa, synthetic construct
ISHRAEA

SEQ ID NO: 32374 - protein, 7 aa, synthetic construct
TRFGDVV

SEQ ID NO: 32375 - protein, 7 aa, synthetic construct
KQSGVKD

SEQ ID NO: 32376 - protein, 7 aa, synthetic construct
HPGLIKE

SEQ ID NO: 32377 - protein, 7 aa, synthetic construct
TQNKGSM

SEQ ID NO: 32378 - protein, 7 aa, synthetic construct
KLHVSTN

SEQ ID NO: 32379 - protein, 7 aa, synthetic construct
QMGVQSA

SEQ ID NO: 32380 - protein, 7 aa, synthetic construct
TIYQKSM

SEQ ID NO: 32381 - protein, 7 aa, synthetic construct
SAMTHPG

SEQ ID NO: 32382 - protein, 7 aa, synthetic construct
AKNQAPA

SEQ ID NO: 32383 - protein, 7 aa, synthetic construct
NGPQTKP

SEQ ID NO: 32384 - protein, 7 aa, synthetic construct
FSMAGSS

SEQ ID NO: 32385 - protein, 7 aa, synthetic construct
STQSKMS

SEQ ID NO: 32386 - protein, 7 aa, synthetic construct
YKVQQVG

SEQ ID NO: 32387 - protein, 7 aa, synthetic construct
STKNMGA

SEQ ID NO: 32388 - protein, 7 aa, synthetic construct
ITNPRMH

SEQ ID NO: 32389 - protein, 7 aa, synthetic construct
GSKMTTG

SEQ ID NO: 32390 - protein, 7 aa, synthetic construct
GTHNTYG

SEQ ID NO: 32391 - protein, 7 aa, synthetic construct
TYAAAQG

SEQ ID NO: 32392 - protein, 7 aa, synthetic construct
TVGASSG

SEQ ID NO: 32393 - protein, 7 aa, synthetic construct
NGYATKA

SEQ ID NO: 32394 - protein, 7 aa, synthetic construct
MASGRKD

SEQ ID NO: 32395 - protein, 7 aa, synthetic construct
VQATIKS

SEQ ID NO: 32396 - protein, 7 aa, synthetic construct
MRINMVP

SEQ ID NO: 32397 - protein, 7 aa, synthetic construct
NHPFTIA

SEQ ID NO: 32398 - protein, 7 aa, synthetic construct
VPTMANN

SEQ ID NO: 32399 - protein, 7 aa, synthetic construct
KPGSQMS

SEQ ID NO: 32400 - protein, 7 aa, synthetic construct
IRPGGFH

SEQ ID NO: 32401 - protein, 7 aa, synthetic construct
PKNVNGG

SEQ ID NO: 32402 - protein, 7 aa, synthetic construct
YNSARAP

SEQ ID NO: 32403 - protein, 7 aa, synthetic construct
YGVRTGM

SEQ ID NO: 32404 - protein, 7 aa, synthetic construct
DKSKTGA

SEQ ID NO: 32405 - protein, 7 aa, synthetic construct
TAVVKNY

SEQ ID NO: 32406 - protein, 7 aa, synthetic construct
AKPVNSS

SEQ ID NO: 32407 - protein, 7 aa, synthetic construct
SRKESEN

SEQ ID NO: 32408 - protein, 7 aa, synthetic construct
IKPTRFD

SEQ ID NO: 32409 - protein, 7 aa, synthetic construct
VGHQQMG

SEQ ID NO: 32410 - protein, 7 aa, synthetic construct
LKLNKTP

SEQ ID NO: 32411 - protein, 7 aa, synthetic construct
KNYTTEP

SEQ ID NO: 32412 - protein, 7 aa, synthetic construct
FEHLNKG

SEQ ID NO: 32413 - protein, 7 aa, synthetic construct
NNLKTKP

SEQ ID NO: 32414 - protein, 7 aa, synthetic construct
TPTQKTG

SEQ ID NO: 32415 - protein, 7 aa, synthetic construct
GKTSSPT

SEQ ID NO: 32416 - protein, 7 aa, synthetic construct
KQPMTQA

SEQ ID NO: 32417 - protein, 7 aa, synthetic construct
SKAGSFA

SEQ ID NO: 32418 - protein, 7 aa, synthetic construct
NSSVTRA

SEQ ID NO: 32419 - protein, 7 aa, synthetic construct
TRMGQGV

SEQ ID NO: 32420 - protein, 7 aa, synthetic construct
PHVSVPG

SEQ ID NO: 32421 - protein, 7 aa, synthetic construct
NKTSQGS

SEQ ID NO: 32422 - protein, 7 aa, synthetic construct
RSGNIPD

SEQ ID NO: 32423 - protein, 7 aa, synthetic construct
HVHRGME

SEQ ID NO: 32424 - protein, 7 aa, synthetic construct
TRPSSGA

SEQ ID NO: 32425 - protein, 7 aa, synthetic construct
KMMKDLV

SEQ ID NO: 32426 - protein, 7 aa, synthetic construct
HMRELHA

SEQ ID NO: 32427 - protein, 7 aa, synthetic construct
YSGKHTG

SEQ ID NO: 32428 - protein, 7 aa, synthetic construct
NKGYTTG

SEQ ID NO: 32429 - protein, 7 aa, synthetic construct
QTGGKTY

SEQ ID NO: 32430 - protein, 7 aa, synthetic construct
VKQTDYS

SEQ ID NO: 32431 - protein, 7 aa, synthetic construct
FTPQAGT

SEQ ID NO: 32432 - protein, 7 aa, synthetic construct
SRVLHNP

SEQ ID NO: 32433 - protein, 7 aa, synthetic construct
YQATKTG

SEQ ID NO: 32434 - protein, 7 aa, synthetic construct
YKTAKGE

SEQ ID NO: 32435 - protein, 7 aa, synthetic construct
SGPRQGA

SEQ ID NO: 32436 - protein, 7 aa, synthetic construct
QHRPSTV

SEQ ID NO: 32437 - protein, 7 aa, synthetic construct
MNPKASG

SEQ ID NO: 32438 - protein, 7 aa, synthetic construct
SNSAHKI

SEQ ID NO: 32439 - protein, 7 aa, synthetic construct
HYGGAQG

SEQ ID NO: 32440 - protein, 7 aa, synthetic construct
TKPSISQ

SEQ ID NO: 32441 - protein, 7 aa, synthetic construct
MPNSAKS

SEQ ID NO: 32442 - protein, 7 aa, synthetic construct
GKNGSVV

SEQ ID NO: 32443 - protein, 7 aa, synthetic construct
EKDMNFM

SEQ ID NO: 32444 - protein, 7 aa, synthetic construct
QRQQAQA

SEQ ID NO: 32445 - protein, 7 aa, synthetic construct
WATKPDR

SEQ ID NO: 32446 - protein, 7 aa, synthetic construct
YRERSNI

SEQ ID NO: 32447 - protein, 7 aa, synthetic construct
TTQSKQG

SEQ ID NO: 32448 - protein, 7 aa, synthetic construct
SPKLQGG

SEQ ID NO: 32449 - protein, 7 aa, synthetic construct
QVLNNRG

SEQ ID NO: 32450 - protein, 7 aa, synthetic construct
SKQNAKD

SEQ ID NO: 32451 - protein, 7 aa, synthetic construct
RSSQEIY

SEQ ID NO: 32452 - protein, 7 aa, synthetic construct
TRPSGTA

SEQ ID NO: 32453 - protein, 7 aa, synthetic construct
NSKPMNG

SEQ ID NO: 32454 - protein, 7 aa, synthetic construct
RHTGDAG

SEQ ID NO: 32455 - protein, 7 aa, synthetic construct
QPYGANS

SEQ ID NO: 32456 - protein, 7 aa, synthetic construct
TVKTSTG

SEQ ID NO: 32457 - protein, 7 aa, synthetic construct
HMKTHQE

SEQ ID NO: 32458 - protein, 7 aa, synthetic construct
KLSNTKE

SEQ ID NO: 32459 - protein, 7 aa, synthetic construct
RNDFHTP

SEQ ID NO: 32460 - protein, 7 aa, synthetic construct
RPGEKTV

SEQ ID NO: 32461 - protein, 7 aa, synthetic construct
MSKSPNS

SEQ ID NO: 32462 - protein, 7 aa, synthetic construct
KRDQSGS

SEQ ID NO: 32463 - protein, 7 aa, synthetic construct
ARHKEDA

SEQ ID NO: 32464 - protein, 7 aa, synthetic construct
VHTNKTG

SEQ ID NO: 32465 - protein, 7 aa, synthetic construct
GGGGKVG

SEQ ID NO: 32466 - protein, 7 aa, synthetic construct
YQKTPQG

SEQ ID NO: 32467 - protein, 7 aa, synthetic construct
RTANAQG

SEQ ID NO: 32468 - protein, 7 aa, synthetic construct
FKPGMSN

SEQ ID NO: 32469 - protein, 7 aa, synthetic construct
TANGPNW

SEQ ID NO: 32470 - protein, 7 aa, synthetic construct
YGRPSIP

SEQ ID NO: 32471 - protein, 7 aa, synthetic construct
PHIKKDA

SEQ ID NO: 32472 - protein, 7 aa, synthetic construct
VYKQTEN

SEQ ID NO: 32473 - protein, 7 aa, synthetic construct
PFKSSNG

SEQ ID NO: 32474 - protein, 7 aa, synthetic construct
YKNHTGL

SEQ ID NO: 32475 - protein, 7 aa, synthetic construct
IGLRHID

SEQ ID NO: 32476 - protein, 7 aa, synthetic construct
TNRGKDP

SEQ ID NO: 32477 - protein, 7 aa, synthetic construct
SIQKSVP

SEQ ID NO: 32478 - protein, 7 aa, synthetic construct
MRQSSQS

SEQ ID NO: 32479 - protein, 7 aa, synthetic construct
RSPTTVG

SEQ ID NO: 32480 - protein, 7 aa, synthetic construct
LKLANMP

SEQ ID NO: 32481 - protein, 7 aa, synthetic construct
MTYKASN

SEQ ID NO: 32482 - protein, 7 aa, synthetic construct
TGVTRIG

SEQ ID NO: 32483 - protein, 7 aa, synthetic construct
NKMDTNM

SEQ ID NO: 32484 - protein, 7 aa, synthetic construct
FPGSKTH

SEQ ID NO: 32485 - protein, 7 aa, synthetic construct
SKSFGQG

SEQ ID NO: 32486 - protein, 7 aa, synthetic construct
NSRNAVA

SEQ ID NO: 32487 - protein, 7 aa, synthetic construct
ADRHKGM

SEQ ID NO: 32488 - protein, 7 aa, synthetic construct
QARGSVG

SEQ ID NO: 32489 - protein, 7 aa, synthetic construct
RMNNGGG

SEQ ID NO: 32490 - protein, 7 aa, synthetic construct
SHVKYKD

SEQ ID NO: 32491 - protein, 7 aa, synthetic construct
MKKHPEE

SEQ ID NO: 32492 - protein, 7 aa, synthetic construct
FKNMMPA

SEQ ID NO: 32493 - protein, 7 aa, synthetic construct
NRTTTGA

SEQ ID NO: 32494 - protein, 7 aa, synthetic construct
LGTRNVP

SEQ ID NO: 32495 - protein, 7 aa, synthetic construct
MTSKSPP

SEQ ID NO: 32496 - protein, 7 aa, synthetic construct
QQKVAAG

SEQ ID NO: 32497 - protein, 7 aa, synthetic construct
KPNSTYG

SEQ ID NO: 32498 - protein, 7 aa, synthetic construct
VSKGTAG

SEQ ID NO: 32499 - protein, 7 aa, synthetic construct
IRGPDIP

SEQ ID NO: 32500 - protein, 7 aa, synthetic construct
TGNNSKP

SEQ ID NO: 32501 - protein, 7 aa, synthetic construct
VRTGTVG

SEQ ID NO: 32502 - protein, 7 aa, synthetic construct
ASMGNKP

SEQ ID NO: 32503 - protein, 7 aa, synthetic construct
QQSNTGR

SEQ ID NO: 32504 - protein, 7 aa, synthetic construct
DMGKGKG

SEQ ID NO: 32505 - protein, 7 aa, synthetic construct
KWKTPTE

SEQ ID NO: 32506 - protein, 7 aa, synthetic construct
HVGGLKP

SEQ ID NO: 32507 - protein, 7 aa, synthetic construct
NAGTRAP

SEQ ID NO: 32508 - protein, 7 aa, synthetic construct
STANTQR

SEQ ID NO: 32509 - protein, 7 aa, synthetic construct
KIYDEKG

SEQ ID NO: 32510 - protein, 7 aa, synthetic construct
MNAGRPG

SEQ ID NO: 32511 - protein, 7 aa, synthetic construct
GMVPNRT

SEQ ID NO: 32512 - protein, 7 aa, synthetic construct
PNGRLPE

SEQ ID NO: 32513 - protein, 7 aa, synthetic construct
AEPHKAQ

SEQ ID NO: 32514 - protein, 7 aa, synthetic construct
HAPAAKM

SEQ ID NO: 32515 - protein, 7 aa, synthetic construct
FTKTTQA

SEQ ID NO: 32516 - protein, 7 aa, synthetic construct
NARGTIG

SEQ ID NO: 32517 - protein, 7 aa, synthetic construct
YKETMAG

SEQ ID NO: 32518 - protein, 7 aa, synthetic construct
KPTGGMM

SEQ ID NO: 32519 - protein, 7 aa, synthetic construct
HADVVRS

SEQ ID NO: 32520 - protein, 7 aa, synthetic construct
MSNQVKA

SEQ ID NO: 32521 - protein, 7 aa, synthetic construct
GRSPYVE

SEQ ID NO: 32522 - protein, 7 aa, synthetic construct
NQRNVQG

SEQ ID NO: 32523 - protein, 7 aa, synthetic construct
VKSQLGD

SEQ ID NO: 32524 - protein, 7 aa, synthetic construct
LKHKTME

SEQ ID NO: 32525 - protein, 7 aa, synthetic construct
TNKASGA

SEQ ID NO: 32526 - protein, 7 aa, synthetic construct
KPNVAVG

SEQ ID NO: 32527 - protein, 7 aa, synthetic construct
YTHKLDV

SEQ ID NO: 32528 - protein, 7 aa, synthetic construct
TKYDVPT

SEQ ID NO: 32529 - protein, 7 aa, synthetic construct
GKGMTAA

SEQ ID NO: 32530 - protein, 7 aa, synthetic construct
HTSHGSS

SEQ ID NO: 32531 - protein, 7 aa, synthetic construct
GRTNNMP

SEQ ID NO: 32532 - protein, 7 aa, synthetic construct
LRAYKDS

SEQ ID NO: 32533 - protein, 7 aa, synthetic construct
GRAAFGE

SEQ ID NO: 32534 - protein, 7 aa, synthetic construct
IPRFPTN

SEQ ID NO: 32535 - protein, 7 aa, synthetic construct
GPKQPYD

SEQ ID NO: 32536 - protein, 7 aa, synthetic construct
LYKVDQI

SEQ ID NO: 32537 - protein, 7 aa, synthetic construct
RPGGYAD

SEQ ID NO: 32538 - protein, 7 aa, synthetic construct
WRGVNQQ

SEQ ID NO: 32539 - protein, 7 aa, synthetic construct
TMGVKIQ

SEQ ID NO: 32540 - protein, 7 aa, synthetic construct
QAYAQSA

SEQ ID NO: 32541 - protein, 7 aa, synthetic construct
TASRASP

SEQ ID NO: 32542 - protein, 7 aa, synthetic construct
MGRNQGA

SEQ ID NO: 32543 - protein, 7 aa, synthetic construct
KNDKIPP

SEQ ID NO: 32544 - protein, 7 aa, synthetic construct
DHRLPSK

SEQ ID NO: 32545 - protein, 7 aa, synthetic construct
FGGVMGV

SEQ ID NO: 32546 - protein, 7 aa, synthetic construct
TSYKMNV

SEQ ID NO: 32547 - protein, 7 aa, synthetic construct
TTSQRMG

SEQ ID NO: 32548 - protein, 7 aa, synthetic construct
QHPKNQI

SEQ ID NO: 32549 - protein, 7 aa, synthetic construct
ARDHKDY

SEQ ID NO: 32550 - protein, 7 aa, synthetic construct
GHRTTFA

SEQ ID NO: 32551 - protein, 7 aa, synthetic construct
TRGQMAG

SEQ ID NO: 32552 - protein, 7 aa, synthetic construct
KSMGTQS

SEQ ID NO: 32553 - protein, 7 aa, synthetic construct
QKQMIQE

SEQ ID NO: 32554 - protein, 7 aa, synthetic construct
MMAKNNA

SEQ ID NO: 32555 - protein, 7 aa, synthetic construct
MGISRIP

SEQ ID NO: 32556 - protein, 7 aa, synthetic construct
VNRSQQG

SEQ ID NO: 32557 - protein, 7 aa, synthetic construct
GANRQNG

SEQ ID NO: 32558 - protein, 7 aa, synthetic construct
KTSTNNG

SEQ ID NO: 32559 - protein, 7 aa, synthetic construct
RDKTQSG

SEQ ID NO: 32560 - protein, 7 aa, synthetic construct
GASARTV

SEQ ID NO: 32561 - protein, 7 aa, synthetic construct
GKVSQAG

SEQ ID NO: 32562 - protein, 7 aa, synthetic construct
NRNLTAA

SEQ ID NO: 32563 - protein, 7 aa, synthetic construct
AMRGIKD

SEQ ID NO: 32564 - protein, 7 aa, synthetic construct
GKPGMTM

SEQ ID NO: 32565 - protein, 7 aa, synthetic construct
GKFVNNP

SEQ ID NO: 32566 - protein, 7 aa, synthetic construct
MKYANAE

SEQ ID NO: 32567 - protein, 7 aa, synthetic construct
IQGIKAA

SEQ ID NO: 32568 - protein, 7 aa, synthetic construct
TRTADNA

SEQ ID NO: 32569 - protein, 7 aa, synthetic construct
VNAARNG

SEQ ID NO: 32570 - protein, 7 aa, synthetic construct
KQSMGNA

SEQ ID NO: 32571 - protein, 7 aa, synthetic construct
NSYQKID

SEQ ID NO: 32572 - protein, 7 aa, synthetic construct
GLHMGPH

SEQ ID NO: 32573 - protein, 7 aa, synthetic construct
HHKGTQD

SEQ ID NO: 32574 - protein, 7 aa, synthetic construct
THNSPAV

SEQ ID NO: 32575 - protein, 7 aa, synthetic construct
PSPQTPG

SEQ ID NO: 32576 - protein, 7 aa, synthetic construct
MRGPDFA

SEQ ID NO: 32577 - protein, 7 aa, synthetic construct
RQNGTNS

SEQ ID NO: 32578 - protein, 7 aa, synthetic construct
WNVTDRK

SEQ ID NO: 32579 - protein, 7 aa, synthetic construct
PGPTQAG

SEQ ID NO: 32580 - protein, 7 aa, synthetic construct
TPRSQQS

SEQ ID NO: 32581 - protein, 7 aa, synthetic construct
RNSMGSG

SEQ ID NO: 32582 - protein, 7 aa, synthetic construct
SQSKGSG

SEQ ID NO: 32583 - protein, 7 aa, synthetic construct
GNAARVG

SEQ ID NO: 32584 - protein, 7 aa, synthetic construct
THHNSRA

SEQ ID NO: 32585 - protein, 7 aa, synthetic construct
MKQGVQG

SEQ ID NO: 32586 - protein, 7 aa, synthetic construct
IKVAGHQ

SEQ ID NO: 32587 - protein, 7 aa, synthetic construct
KISHGGA

SEQ ID NO: 32588 - protein, 7 aa, synthetic construct
LSGRSMQ

SEQ ID NO: 32589 - protein, 7 aa, synthetic construct
RMMQSPP

SEQ ID NO: 32590 - protein, 7 aa, synthetic construct
RFDRNQL

SEQ ID NO: 32591 - protein, 7 aa, synthetic construct
NTSQSRV

SEQ ID NO: 32592 - protein, 7 aa, synthetic construct
DKSKAVP

SEQ ID NO: 32593 - protein, 7 aa, synthetic construct
SKQPSKD

SEQ ID NO: 32594 - protein, 7 aa, synthetic construct
TRPVTTS

SEQ ID NO: 32595 - protein, 7 aa, synthetic construct
QIPAKQS

SEQ ID NO: 32596 - protein, 7 aa, synthetic construct
GKDMRTA

SEQ ID NO: 32597 - protein, 7 aa, synthetic construct
TKQTIKA

SEQ ID NO: 32598 - protein, 7 aa, synthetic construct
INGSGKG

SEQ ID NO: 32599 - protein, 7 aa, synthetic construct
RNMSSQA

SEQ ID NO: 32600 - protein, 7 aa, synthetic construct
MAPRHPS

SEQ ID NO: 32601 - protein, 7 aa, synthetic construct
VTTNAKG

SEQ ID NO: 32602 - protein, 7 aa, synthetic construct
KGSAQMS

SEQ ID NO: 32603 - protein, 7 aa, synthetic construct
GARAQTA

SEQ ID NO: 32604 - protein, 7 aa, synthetic construct
HGRNGAG

SEQ ID NO: 32605 - protein, 7 aa, synthetic construct
NKAFQGS

SEQ ID NO: 32606 - protein, 7 aa, synthetic construct
YNKGVTP

SEQ ID NO: 32607 - protein, 7 aa, synthetic construct
INAGSKP

SEQ ID NO: 32608 - protein, 7 aa, synthetic construct
GQKSSGG

SEQ ID NO: 32609 - protein, 7 aa, synthetic construct
LGNAHMH

SEQ ID NO: 32610 - protein, 7 aa, synthetic construct
MKSYQGE

SEQ ID NO: 32611 - protein, 7 aa, synthetic construct
QKGHTSP

SEQ ID NO: 32612 - protein, 7 aa, synthetic construct
TPVTARP

SEQ ID NO: 32613 - protein, 7 aa, synthetic construct
QRPNMSQ

SEQ ID NO: 32614 - protein, 7 aa, synthetic construct
QSKSNQS

SEQ ID NO: 32615 - protein, 7 aa, synthetic construct
QASVTHS

SEQ ID NO: 32616 - protein, 7 aa, synthetic construct
TNRGSNP

SEQ ID NO: 32617 - protein, 7 aa, synthetic construct
DTQIPGR

SEQ ID NO: 32618 - protein, 7 aa, synthetic construct
NPRQQGL

SEQ ID NO: 32619 - protein, 7 aa, synthetic construct
VMKVTQG

SEQ ID NO: 32620 - protein, 7 aa, synthetic construct
YNKTKDS

SEQ ID NO: 32621 - protein, 7 aa, synthetic construct
FSHRNET

SEQ ID NO: 32622 - protein, 7 aa, synthetic construct
SSSSGGN

SEQ ID NO: 32623 - protein, 7 aa, synthetic construct
STKGQNP

SEQ ID NO: 32624 - protein, 7 aa, synthetic construct
YKTSMGG

SEQ ID NO: 32625 - protein, 7 aa, synthetic construct
RQNTQNA

SEQ ID NO: 32626 - protein, 7 aa, synthetic construct
SKQGSGS

SEQ ID NO: 32627 - protein, 7 aa, synthetic construct
REGTHQP

SEQ ID NO: 32628 - protein, 7 aa, synthetic construct
KYATNQG

SEQ ID NO: 32629 - protein, 7 aa, synthetic construct
IKALGSS

SEQ ID NO: 32630 - protein, 7 aa, synthetic construct
DVRRSDP

SEQ ID NO: 32631 - protein, 7 aa, synthetic construct
NSGNRMA

SEQ ID NO: 32632 - protein, 7 aa, synthetic construct
RQNVSTG

SEQ ID NO: 32633 - protein, 7 aa, synthetic construct
LEGNHRS

SEQ ID NO: 32634 - protein, 7 aa, synthetic construct
GGRTLNA

SEQ ID NO: 32635 - protein, 7 aa, synthetic construct
TMGPDKR

SEQ ID NO: 32636 - protein, 7 aa, synthetic construct
KSQNGGS

SEQ ID NO: 32637 - protein, 7 aa, synthetic construct
KDKPATA

SEQ ID NO: 32638 - protein, 7 aa, synthetic construct
HLGQMNP

SEQ ID NO: 32639 - protein, 7 aa, synthetic construct
TKVAIRE

SEQ ID NO: 32640 - protein, 7 aa, synthetic construct
VHSQMKG

SEQ ID NO: 32641 - protein, 7 aa, synthetic construct
RQGGTSA

SEQ ID NO: 32642 - protein, 7 aa, synthetic construct
NQTKSST

SEQ ID NO: 32643 - protein, 7 aa, synthetic construct
QRYPAEA

SEQ ID NO: 32644 - protein, 7 aa, synthetic construct
QRTAQSA

SEQ ID NO: 32645 - protein, 7 aa, synthetic construct
QNGKYIS

SEQ ID NO: 32646 - protein, 7 aa, synthetic construct
RADRMNG

SEQ ID NO: 32647 - protein, 7 aa, synthetic construct
ITGRTNG

SEQ ID NO: 32648 - protein, 7 aa, synthetic construct
WAPSKGD

SEQ ID NO: 32649 - protein, 7 aa, synthetic construct
SSQKSMG

SEQ ID NO: 32650 - protein, 7 aa, synthetic construct
QWINGES

SEQ ID NO: 32651 - protein, 7 aa, synthetic construct
PKTQAVA

SEQ ID NO: 32652 - protein, 7 aa, synthetic construct
INKSGSN

SEQ ID NO: 32653 - protein, 7 aa, synthetic construct
KLKLHEA

SEQ ID NO: 32654 - protein, 7 aa, synthetic construct
AARHQGD

SEQ ID NO: 32655 - protein, 7 aa, synthetic construct
TPSNREQ

SEQ ID NO: 32656 - protein, 7 aa, synthetic construct
TGYSVNP

SEQ ID NO: 32657 - protein, 7 aa, synthetic construct
SIGRSTP

SEQ ID NO: 32658 - protein, 7 aa, synthetic construct
QGKNQVG

SEQ ID NO: 32659 - protein, 7 aa, synthetic construct
GLQRNQP

SEQ ID NO: 32660 - protein, 7 aa, synthetic construct
AFNTTHD

SEQ ID NO: 32661 - protein, 7 aa, synthetic construct
ISGMNRI

SEQ ID NO: 32662 - protein, 7 aa, synthetic construct
MYTGRTE

SEQ ID NO: 32663 - protein, 7 aa, synthetic construct
NLQHHVP

SEQ ID NO: 32664 - protein, 7 aa, synthetic construct
TKNAARE

SEQ ID NO: 32665 - protein, 7 aa, synthetic construct
SPSVRTF

SEQ ID NO: 32666 - protein, 7 aa, synthetic construct
QGGKMVG

SEQ ID NO: 32667 - protein, 7 aa, synthetic construct
KNTNSSM

SEQ ID NO: 32668 - protein, 7 aa, synthetic construct
ARQNQAS

SEQ ID NO: 32669 - protein, 7 aa, synthetic construct
NASHPHI

SEQ ID NO: 32670 - protein, 7 aa, synthetic construct
KQNTPIG

SEQ ID NO: 32671 - protein, 7 aa, synthetic construct
NKSVGNA

SEQ ID NO: 32672 - protein, 7 aa, synthetic construct
LSKGAQS

SEQ ID NO: 32673 - protein, 7 aa, synthetic construct
RYSDNKD

SEQ ID NO: 32674 - protein, 7 aa, synthetic construct
AVFKRPE

SEQ ID NO: 32675 - protein, 7 aa, synthetic construct
VKTTSTG

SEQ ID NO: 32676 - protein, 7 aa, synthetic construct
KASSHDI

SEQ ID NO: 32677 - protein, 7 aa, synthetic construct
GVQTPKG

SEQ ID NO: 32678 - protein, 7 aa, synthetic construct
TKGAQSG

SEQ ID NO: 32679 - protein, 7 aa, synthetic construct
LSRSGRD

SEQ ID NO: 32680 - protein, 7 aa, synthetic construct
NSPKAQG

SEQ ID NO: 32681 - protein, 7 aa, synthetic construct
YVDKNRG

SEQ ID NO: 32682 - protein, 7 aa, synthetic construct
SKANTMV

SEQ ID NO: 32683 - protein, 7 aa, synthetic construct
QGAPRND

SEQ ID NO: 32684 - protein, 7 aa, synthetic construct
KPGSSMS

SEQ ID NO: 32685 - protein, 7 aa, synthetic construct
GHTTVAG

SEQ ID NO: 32686 - protein, 7 aa, synthetic construct
MGKPLSG

SEQ ID NO: 32687 - protein, 7 aa, synthetic construct
AKHATVG

SEQ ID NO: 32688 - protein, 7 aa, synthetic construct
FKSGNST

SEQ ID NO: 32689 - protein, 7 aa, synthetic construct
HISTGAG

SEQ ID NO: 32690 - protein, 7 aa, synthetic construct
MAKPSNG

SEQ ID NO: 32691 - protein, 7 aa, synthetic construct
PRPNVAG

SEQ ID NO: 32692 - protein, 7 aa, synthetic construct
TKQTYTQ

SEQ ID NO: 32693 - protein, 7 aa, synthetic construct
MGIIGAP

SEQ ID NO: 32694 - protein, 7 aa, synthetic construct
QNGTRNG

SEQ ID NO: 32695 - protein, 7 aa, synthetic construct
RTSNSTP

SEQ ID NO: 32696 - protein, 7 aa, synthetic construct
SKSSTDR

SEQ ID NO: 32697 - protein, 7 aa, synthetic construct
FNGTRMV

SEQ ID NO: 32698 - protein, 7 aa, synthetic construct
KDQNKQY

SEQ ID NO: 32699 - protein, 7 aa, synthetic construct
VNGKGSA

SEQ ID NO: 32700 - protein, 7 aa, synthetic construct
RPAGDKL

SEQ ID NO: 32701 - protein, 7 aa, synthetic construct
RVSGTSG

SEQ ID NO: 32702 - protein, 7 aa, synthetic construct
KNSGMKE

SEQ ID NO: 32703 - protein, 7 aa, synthetic construct
MSVTRSE

SEQ ID NO: 32704 - protein, 7 aa, synthetic construct
WGHLHTA

SEQ ID NO: 32705 - protein, 7 aa, synthetic construct
QKQWESH

SEQ ID NO: 32706 - protein, 7 aa, synthetic construct
STYGREA

SEQ ID NO: 32707 - protein, 7 aa, synthetic construct
YQKNTQS

SEQ ID NO: 32708 - protein, 7 aa, synthetic construct
SVGMRVD

SEQ ID NO: 32709 - protein, 7 aa, synthetic construct
PRPGNGM

SEQ ID NO: 32710 - protein, 7 aa, synthetic construct
IRPKMFE

SEQ ID NO: 32711 - protein, 7 aa, synthetic construct
MPRASMD

SEQ ID NO: 32712 - protein, 7 aa, synthetic construct
GKPYGGA

SEQ ID NO: 32713 - protein, 7 aa, synthetic construct
LTRTMTD

SEQ ID NO: 32714 - protein, 7 aa, synthetic construct
QKGAGAG

SEQ ID NO: 32715 - protein, 7 aa, synthetic construct
QMGVSKN

SEQ ID NO: 32716 - protein, 7 aa, synthetic construct
YGPLNSK

SEQ ID NO: 32717 - protein, 7 aa, synthetic construct
LKGSYNI

SEQ ID NO: 32718 - protein, 7 aa, synthetic construct
TKVMGKE

SEQ ID NO: 32719 - protein, 7 aa, synthetic construct
NRQAMGG

SEQ ID NO: 32720 - protein, 7 aa, synthetic construct
GRQNGNG

SEQ ID NO: 32721 - protein, 7 aa, synthetic construct
GEKVRSD

SEQ ID NO: 32722 - protein, 7 aa, synthetic construct
SQNNKQA

SEQ ID NO: 32723 - protein, 7 aa, synthetic construct
NVHKPTG

SEQ ID NO: 32724 - protein, 7 aa, synthetic construct
MKNGSSN

SEQ ID NO: 32725 - protein, 7 aa, synthetic construct
TKQGSGY

SEQ ID NO: 32726 - protein, 7 aa, synthetic construct
NQRGTQI

SEQ ID NO: 32727 - protein, 7 aa, synthetic construct
TRQSGPP

SEQ ID NO: 32728 - protein, 7 aa, synthetic construct
YREHNQK

SEQ ID NO: 32729 - protein, 7 aa, synthetic construct
HLTYVKG

SEQ ID NO: 32730 - protein, 7 aa, synthetic construct
ISRGLEK

SEQ ID NO: 32731 - protein, 7 aa, synthetic construct
VTKAAGA

SEQ ID NO: 32732 - protein, 7 aa, synthetic construct
FNNRLNG

SEQ ID NO: 32733 - protein, 7 aa, synthetic construct
RRDTLAV

SEQ ID NO: 32734 - protein, 7 aa, synthetic construct
YQKGLLG

SEQ ID NO: 32735 - protein, 7 aa, synthetic construct
ITNKFGV

SEQ ID NO: 32736 - protein, 7 aa, synthetic construct
NNIHHVA

SEQ ID NO: 32737 - protein, 7 aa, synthetic construct
TNKGSQM

SEQ ID NO: 32738 - protein, 7 aa, synthetic construct
LSRQQGT

SEQ ID NO: 32739 - protein, 7 aa, synthetic construct
GQQQQIA

SEQ ID NO: 32740 - protein, 7 aa, synthetic construct
KDKANIG

SEQ ID NO: 32741 - protein, 7 aa, synthetic construct
FKPIQAA

SEQ ID NO: 32742 - protein, 7 aa, synthetic construct
VQSHNRM

SEQ ID NO: 32743 - protein, 7 aa, synthetic construct
MRNNNTG

SEQ ID NO: 32744 - protein, 7 aa, synthetic construct
KSKPAME

SEQ ID NO: 32745 - protein, 7 aa, synthetic construct
AVMHNQI

SEQ ID NO: 32746 - protein, 7 aa, synthetic construct
NSVKAGG

SEQ ID NO: 32747 - protein, 7 aa, synthetic construct
TNGMYPV

SEQ ID NO: 32748 - protein, 7 aa, synthetic construct
NSHRNAP

SEQ ID NO: 32749 - protein, 7 aa, synthetic construct
KNTMGGG

SEQ ID NO: 32750 - protein, 7 aa, synthetic construct
MKFQSPT

SEQ ID NO: 32751 - protein, 7 aa, synthetic construct
KSNITMV

SEQ ID NO: 32752 - protein, 7 aa, synthetic construct
REYKNAE

SEQ ID NO: 32753 - protein, 7 aa, synthetic construct
NTTSKTP

SEQ ID NO: 32754 - protein, 7 aa, synthetic construct
SKPTGAS

SEQ ID NO: 32755 - protein, 7 aa, synthetic construct
PKPNATA

SEQ ID NO: 32756 - protein, 7 aa, synthetic construct
RSQGGSG

SEQ ID NO: 32757 - protein, 7 aa, synthetic construct
VPNQQAR

SEQ ID NO: 32758 - protein, 7 aa, synthetic construct
RPSTREY

SEQ ID NO: 32759 - protein, 7 aa, synthetic construct
KASSNFG

SEQ ID NO: 32760 - protein, 7 aa, synthetic construct
PGIVGSG

SEQ ID NO: 32761 - protein, 7 aa, synthetic construct
QNAKQTA

SEQ ID NO: 32762 - protein, 7 aa, synthetic construct
QKGSARE

SEQ ID NO: 32763 - protein, 7 aa, synthetic construct
GVPIRIS

SEQ ID NO: 32764 - protein, 7 aa, synthetic construct
PKSSPVS

SEQ ID NO: 32765 - protein, 7 aa, synthetic construct
KTNQMVG

SEQ ID NO: 32766 - protein, 7 aa, synthetic construct
ISQTWKG

SEQ ID NO: 32767 - protein, 7 aa, synthetic construct
GKNSTAM

SEQ ID NO: 32768 - protein, 7 aa, synthetic construct
DHPRFNG

SEQ ID NO: 32769 - protein, 7 aa, synthetic construct
KNGTLTS

SEQ ID NO: 32770 - protein, 7 aa, synthetic construct
PTKQMGA

SEQ ID NO: 32771 - protein, 7 aa, synthetic construct
KVQTGNA

SEQ ID NO: 32772 - protein, 7 aa, synthetic construct
LKMQNNF

SEQ ID NO: 32773 - protein, 7 aa, synthetic construct
GHGIGMK

SEQ ID NO: 32774 - protein, 7 aa, synthetic construct
IIAHGHK

SEQ ID NO: 32775 - protein, 7 aa, synthetic construct
FKTYDAR

SEQ ID NO: 32776 - protein, 7 aa, synthetic construct
GGIKVQS

SEQ ID NO: 32777 - protein, 7 aa, synthetic construct
AKGNTAG

SEQ ID NO: 32778 - protein, 7 aa, synthetic construct
LPSRGDS

SEQ ID NO: 32779 - protein, 7 aa, synthetic construct
GPYGREG

SEQ ID NO: 32780 - protein, 7 aa, synthetic construct
YHSNVNG

SEQ ID NO: 32781 - protein, 7 aa, synthetic construct
RQAGSAM

SEQ ID NO: 32782 - protein, 7 aa, synthetic construct
DKNYGNA

SEQ ID NO: 32783 - protein, 7 aa, synthetic construct
VGTARVG

SEQ ID NO: 32784 - protein, 7 aa, synthetic construct
IRAMDHR

SEQ ID NO: 32785 - protein, 7 aa, synthetic construct
LQRFGNE

SEQ ID NO: 32786 - protein, 7 aa, synthetic construct
RGSTTAA

SEQ ID NO: 32787 - protein, 7 aa, synthetic construct
TRNYGSM

SEQ ID NO: 32788 - protein, 7 aa, synthetic construct
MKTQMSP

SEQ ID NO: 32789 - protein, 7 aa, synthetic construct
KHGNQYA

SEQ ID NO: 32790 - protein, 7 aa, synthetic construct
TTNRGVG

SEQ ID NO: 32791 - protein, 7 aa, synthetic construct
KMAPSKD

SEQ ID NO: 32792 - protein, 7 aa, synthetic construct
SWKGMGP

SEQ ID NO: 32793 - protein, 7 aa, synthetic construct
KNGSIVT

SEQ ID NO: 32794 - protein, 7 aa, synthetic construct
RPSASTN

SEQ ID NO: 32795 - protein, 7 aa, synthetic construct
GKSSSTI

SEQ ID NO: 32796 - protein, 7 aa, synthetic construct
NKNSPIA

SEQ ID NO: 32797 - protein, 7 aa, synthetic construct
RTTNGTG

SEQ ID NO: 32798 - protein, 7 aa, synthetic construct
QRQHYAS

SEQ ID NO: 32799 - protein, 7 aa, synthetic construct
MVDFVKE

SEQ ID NO: 32800 - protein, 7 aa, synthetic construct
RNMSTQP

SEQ ID NO: 32801 - protein, 7 aa, synthetic construct
RPAQNNG

SEQ ID NO: 32802 - protein, 7 aa, synthetic construct
RVQQSGT

SEQ ID NO: 32803 - protein, 7 aa, synthetic construct
DQKKPMF

SEQ ID NO: 32804 - protein, 7 aa, synthetic construct
PGTHMRD

SEQ ID NO: 32805 - protein, 7 aa, synthetic construct
QQKSMVG

SEQ ID NO: 32806 - protein, 7 aa, synthetic construct
RGDKQGM

SEQ ID NO: 32807 - protein, 7 aa, synthetic construct
DKMKGPA

SEQ ID NO: 32808 - protein, 7 aa, synthetic construct
QIGKREG

SEQ ID NO: 32809 - protein, 7 aa, synthetic construct
AKSTGGG

SEQ ID NO: 32810 - protein, 7 aa, synthetic construct
QSDHGRG

SEQ ID NO: 32811 - protein, 7 aa, synthetic construct
QSQRNTV

SEQ ID NO: 32812 - protein, 7 aa, synthetic construct
QQSNKGF

SEQ ID NO: 32813 - protein, 7 aa, synthetic construct
QLPIQNR

SEQ ID NO: 32814 - protein, 7 aa, synthetic construct
STNKVSV

SEQ ID NO: 32815 - protein, 7 aa, synthetic construct
KFERQHS

SEQ ID NO: 32816 - protein, 7 aa, synthetic construct
PRSNTTF

SEQ ID NO: 32817 - protein, 7 aa, synthetic construct
QPAPSTS

SEQ ID NO: 32818 - protein, 7 aa, synthetic construct
RATHQLG

SEQ ID NO: 32819 - protein, 7 aa, synthetic construct
NKDYHTG

SEQ ID NO: 32820 - protein, 7 aa, synthetic construct
GARGPSI

SEQ ID NO: 32821 - protein, 7 aa, synthetic construct
NSKHDHA

SEQ ID NO: 32822 - protein, 7 aa, synthetic construct
DSNFRQA

SEQ ID NO: 32823 - protein, 7 aa, synthetic construct
NSQKTTG

SEQ ID NO: 32824 - protein, 7 aa, synthetic construct
KYHSVND

SEQ ID NO: 32825 - protein, 7 aa, synthetic construct
TPNSKLD

SEQ ID NO: 32826 - protein, 7 aa, synthetic construct
QSVVKFA

SEQ ID NO: 32827 - protein, 7 aa, synthetic construct
NKQNSKD

SEQ ID NO: 32828 - protein, 7 aa, synthetic construct
KPNAAYG

SEQ ID NO: 32829 - protein, 7 aa, synthetic construct
THVTLKA

SEQ ID NO: 32830 - protein, 7 aa, synthetic construct
NARSGGA

SEQ ID NO: 32831 - protein, 7 aa, synthetic construct
WMPHKVN

SEQ ID NO: 32832 - protein, 7 aa, synthetic construct
NARGSAE

SEQ ID NO: 32833 - protein, 7 aa, synthetic construct
GNKTSNG

SEQ ID NO: 32834 - protein, 7 aa, synthetic construct
PKGGAET

SEQ ID NO: 32835 - protein, 7 aa, synthetic construct
HMVGPKP

SEQ ID NO: 32836 - protein, 7 aa, synthetic construct
RPPGNIG

SEQ ID NO: 32837 - protein, 7 aa, synthetic construct
KVPSNTG

SEQ ID NO: 32838 - protein, 7 aa, synthetic construct
KFQNFGP

SEQ ID NO: 32839 - protein, 7 aa, synthetic construct
FHERMAG

SEQ ID NO: 32840 - protein, 7 aa, synthetic construct
TKMGAHV

SEQ ID NO: 32841 - protein, 7 aa, synthetic construct
WVPLGRE

SEQ ID NO: 32842 - protein, 7 aa, synthetic construct
QNAARAS

SEQ ID NO: 32843 - protein, 7 aa, synthetic construct
TGPIRTP

SEQ ID NO: 32844 - protein, 7 aa, synthetic construct
GQFKTAG

SEQ ID NO: 32845 - protein, 7 aa, synthetic construct
IRPEHMS

SEQ ID NO: 32846 - protein, 7 aa, synthetic construct
DTHKVAV

SEQ ID NO: 32847 - protein, 7 aa, synthetic construct
RHPIPVN

SEQ ID NO: 32848 - protein, 7 aa, synthetic construct
MPKSNSG

SEQ ID NO: 32849 - protein, 7 aa, synthetic construct
TSQNHNV

SEQ ID NO: 32850 - protein, 7 aa, synthetic construct
NPARDTM

SEQ ID NO: 32851 - protein, 7 aa, synthetic construct
QQSPKSI

SEQ ID NO: 32852 - protein, 7 aa, synthetic construct
QWKPAGD

SEQ ID NO: 32853 - protein, 7 aa, synthetic construct
MGEKAEI

SEQ ID NO: 32854 - protein, 7 aa, synthetic construct
AQSTRTD

SEQ ID NO: 32855 - protein, 7 aa, synthetic construct
DLLAKHG

SEQ ID NO: 32856 - protein, 7 aa, synthetic construct
RQINSEA

SEQ ID NO: 32857 - protein, 7 aa, synthetic construct
HHGNLMG

SEQ ID NO: 32858 - protein, 7 aa, synthetic construct
KVALEVR

SEQ ID NO: 32859 - protein, 7 aa, synthetic construct
QRGSSVP

SEQ ID NO: 32860 - protein, 7 aa, synthetic construct
QARFANE

SEQ ID NO: 32861 - protein, 7 aa, synthetic construct
TRSMNQG

SEQ ID NO: 32862 - protein, 7 aa, synthetic construct
WAGHGPV

SEQ ID NO: 32863 - protein, 7 aa, synthetic construct
GKPQKFE

SEQ ID NO: 32864 - protein, 7 aa, synthetic construct
QKGHIMP

SEQ ID NO: 32865 - protein, 7 aa, synthetic construct
APHSHRD

SEQ ID NO: 32866 - protein, 7 aa, synthetic construct
SQRGTVG

SEQ ID NO: 32867 - protein, 7 aa, synthetic construct
QGGPNRT

SEQ ID NO: 32868 - protein, 7 aa, synthetic construct
RAQTSVG

SEQ ID NO: 32869 - protein, 7 aa, synthetic construct
KSTQNGL

SEQ ID NO: 32870 - protein, 7 aa, synthetic construct
NGILERK

SEQ ID NO: 32871 - protein, 7 aa, synthetic construct
VKSASGA

SEQ ID NO: 32872 - protein, 7 aa, synthetic construct
PKQMGQG

SEQ ID NO: 32873 - protein, 7 aa, synthetic construct
NGKPSQA

SEQ ID NO: 32874 - protein, 7 aa, synthetic construct
KGTQSQV

SEQ ID NO: 32875 - protein, 7 aa, synthetic construct
DKLRGWD

SEQ ID NO: 32876 - protein, 7 aa, synthetic construct
GVGKYLG

SEQ ID NO: 32877 - protein, 7 aa, synthetic construct
MRGNTQS

SEQ ID NO: 32878 - protein, 7 aa, synthetic construct
MRSNQSA

SEQ ID NO: 32879 - protein, 7 aa, synthetic construct
RQGATSP

SEQ ID NO: 32880 - protein, 7 aa, synthetic construct
RTPGTSG

SEQ ID NO: 32881 - protein, 7 aa, synthetic construct
NVNRQQV

SEQ ID NO: 32882 - protein, 7 aa, synthetic construct
QGPKQLA

SEQ ID NO: 32883 - protein, 7 aa, synthetic construct
GKYSNNG

SEQ ID NO: 32884 - protein, 7 aa, synthetic construct
VQQRGIG

SEQ ID NO: 32885 - protein, 7 aa, synthetic construct
NRQNGNS

SEQ ID NO: 32886 - protein, 7 aa, synthetic construct
PKSNVSS

SEQ ID NO: 32887 - protein, 7 aa, synthetic construct
GSKAASS

SEQ ID NO: 32888 - protein, 7 aa, synthetic construct
DFKRMNT

SEQ ID NO: 32889 - protein, 7 aa, synthetic construct
TFPSQNP

SEQ ID NO: 32890 - protein, 7 aa, synthetic construct
HKGGQAI

SEQ ID NO: 32891 - protein, 7 aa, synthetic construct
GKPQFGG

SEQ ID NO: 32892 - protein, 7 aa, synthetic construct
IQSNMPG

SEQ ID NO: 32893 - protein, 7 aa, synthetic construct
LIPTYKQ

SEQ ID NO: 32894 - protein, 7 aa, synthetic construct
LASRGMA

SEQ ID NO: 32895 - protein, 7 aa, synthetic construct
YGGVGGP

SEQ ID NO: 32896 - protein, 7 aa, synthetic construct
MGEYRSP

SEQ ID NO: 32897 - protein, 7 aa, synthetic construct
VSAGRVG

SEQ ID NO: 32898 - protein, 7 aa, synthetic construct
GKNNGTM

SEQ ID NO: 32899 - protein, 7 aa, synthetic construct
PRANATN

SEQ ID NO: 32900 - protein, 7 aa, synthetic construct
ANKTTTG

SEQ ID NO: 32901 - protein, 7 aa, synthetic construct
ADGQKIW

SEQ ID NO: 32902 - protein, 7 aa, synthetic construct
WNVHVGA

SEQ ID NO: 32903 - protein, 7 aa, synthetic construct
SLQRNMH

SEQ ID NO: 32904 - protein, 7 aa, synthetic construct
SRGTTNP

SEQ ID NO: 32905 - protein, 7 aa, synthetic construct
FKSQNNS

SEQ ID NO: 32906 - protein, 7 aa, synthetic construct
VQNGNRP

SEQ ID NO: 32907 - protein, 7 aa, synthetic construct
NTHHSTS

SEQ ID NO: 32908 - protein, 7 aa, synthetic construct
NKTSTQG

SEQ ID NO: 32909 - protein, 7 aa, synthetic construct
MGYQNAG

SEQ ID NO: 32910 - protein, 7 aa, synthetic construct
SILRTTN

SEQ ID NO: 32911 - protein, 7 aa, synthetic construct
NIYNATM

SEQ ID NO: 32912 - protein, 7 aa, synthetic construct
RMDKTNV

SEQ ID NO: 32913 - protein, 7 aa, synthetic construct
KPSSAAV

SEQ ID NO: 32914 - protein, 7 aa, synthetic construct
MSPSVKS

SEQ ID NO: 32915 - protein, 7 aa, synthetic construct
SQTSIRP

SEQ ID NO: 32916 - protein, 7 aa, synthetic construct
MSPNQTP

SEQ ID NO: 32917 - protein, 7 aa, synthetic construct
QRPMSAP

SEQ ID NO: 32918 - protein, 7 aa, synthetic construct
TANMQKV

SEQ ID NO: 32919 - protein, 7 aa, synthetic construct
NMRIQAN

SEQ ID NO: 32920 - protein, 7 aa, synthetic construct
KQSMQSG

SEQ ID NO: 32921 - protein, 7 aa, synthetic construct
VNQGMRG

SEQ ID NO: 32922 - protein, 7 aa, synthetic construct
WGARVVN

SEQ ID NO: 32923 - protein, 7 aa, synthetic construct
WTHTKNN

SEQ ID NO: 32924 - protein, 7 aa, synthetic construct
GANVKAV

SEQ ID NO: 32925 - protein, 7 aa, synthetic construct
QQRSIHD

SEQ ID NO: 32926 - protein, 7 aa, synthetic construct
PKNGNAP

SEQ ID NO: 32927 - protein, 7 aa, synthetic construct
RPGVKGP

SEQ ID NO: 32928 - protein, 7 aa, synthetic construct
NAPHSNL

SEQ ID NO: 32929 - protein, 7 aa, synthetic construct
SVIARSG

SEQ ID NO: 32930 - protein, 7 aa, synthetic construct
AHPIKGG

SEQ ID NO: 32931 - protein, 7 aa, synthetic construct
QRDKTQA

SEQ ID NO: 32932 - protein, 7 aa, synthetic construct
TSKNNMG

SEQ ID NO: 32933 - protein, 7 aa, synthetic construct
EGNVTRP

SEQ ID NO: 32934 - protein, 7 aa, synthetic construct
PKPHAVS

SEQ ID NO: 32935 - protein, 7 aa, synthetic construct
QKVQLAG

SEQ ID NO: 32936 - protein, 7 aa, synthetic construct
LTNGYKG

SEQ ID NO: 32937 - protein, 7 aa, synthetic construct
FVKQIDQ

SEQ ID NO: 32938 - protein, 7 aa, synthetic construct
QHGHPAT

SEQ ID NO: 32939 - protein, 7 aa, synthetic construct
GKSTMAS

SEQ ID NO: 32940 - protein, 7 aa, synthetic construct
TVKNTVT

SEQ ID NO: 32941 - protein, 7 aa, synthetic construct
TKQSTER

SEQ ID NO: 32942 - protein, 7 aa, synthetic construct
RDTTKQM

SEQ ID NO: 32943 - protein, 7 aa, synthetic construct
HNILAKN

SEQ ID NO: 32944 - protein, 7 aa, synthetic construct
SRSTTMG

SEQ ID NO: 32945 - protein, 7 aa, synthetic construct
YNGIKSS

SEQ ID NO: 32946 - protein, 7 aa, synthetic construct
MTAKSTG

SEQ ID NO: 32947 - protein, 7 aa, synthetic construct
MPRGTTA

SEQ ID NO: 32948 - protein, 7 aa, synthetic construct
NMRATNG

SEQ ID NO: 32949 - protein, 7 aa, synthetic construct
NAQGQKL

SEQ ID NO: 32950 - protein, 7 aa, synthetic construct
QGSYTAA

SEQ ID NO: 32951 - protein, 7 aa, synthetic construct
VFHSGTI

SEQ ID NO: 32952 - protein, 7 aa, synthetic construct
TAPRSQP

SEQ ID NO: 32953 - protein, 7 aa, synthetic construct
NSQVKNG

SEQ ID NO: 32954 - protein, 7 aa, synthetic construct
KVDHQAR

SEQ ID NO: 32955 - protein, 7 aa, synthetic construct
SKTPSQS

SEQ ID NO: 32956 - protein, 7 aa, synthetic construct
FKSASAV

SEQ ID NO: 32957 - protein, 7 aa, synthetic construct
KLNSSTG

SEQ ID NO: 32958 - protein, 7 aa, synthetic construct
GVPKGNY

SEQ ID NO: 32959 - protein, 7 aa, synthetic construct
MGLHGRP

SEQ ID NO: 32960 - protein, 7 aa, synthetic construct
QNLHMKD

SEQ ID NO: 32961 - protein, 7 aa, synthetic construct
RSNAGQG

SEQ ID NO: 32962 - protein, 7 aa, synthetic construct
TKPQGQD

SEQ ID NO: 32963 - protein, 7 aa, synthetic construct
LRGDRSS

SEQ ID NO: 32964 - protein, 7 aa, synthetic construct
RAQKSEG

SEQ ID NO: 32965 - protein, 7 aa, synthetic construct
QDKGKHG

SEQ ID NO: 32966 - protein, 7 aa, synthetic construct
FPSFKEH

SEQ ID NO: 32967 - protein, 7 aa, synthetic construct
FKTSNVS

SEQ ID NO: 32968 - protein, 7 aa, synthetic construct
QNKHLAD

SEQ ID NO: 32969 - protein, 7 aa, synthetic construct
IRSANIA

SEQ ID NO: 32970 - protein, 7 aa, synthetic construct
MKQNMSA

SEQ ID NO: 32971 - protein, 7 aa, synthetic construct
HKMQADP

SEQ ID NO: 32972 - protein, 7 aa, synthetic construct
QGHNHVS

SEQ ID NO: 32973 - protein, 7 aa, synthetic construct
GVPKYDT

SEQ ID NO: 32974 - protein, 7 aa, synthetic construct
KFNPNAA

SEQ ID NO: 32975 - protein, 7 aa, synthetic construct
RQNNTSA

SEQ ID NO: 32976 - protein, 7 aa, synthetic construct
TMPGSRA

SEQ ID NO: 32977 - protein, 7 aa, synthetic construct
SSAARTP

SEQ ID NO: 32978 - protein, 7 aa, synthetic construct
LFKSIEG

SEQ ID NO: 32979 - protein, 7 aa, synthetic construct
NDKFFPG

SEQ ID NO: 32980 - protein, 7 aa, synthetic construct
RKPDDPM

SEQ ID NO: 32981 - protein, 7 aa, synthetic construct
YGRFHLD

SEQ ID NO: 32982 - protein, 7 aa, synthetic construct
NGSKNVA

SEQ ID NO: 32983 - protein, 7 aa, synthetic construct
RNTGDKA

SEQ ID NO: 32984 - protein, 7 aa, synthetic construct
IVQTTQG

SEQ ID NO: 32985 - protein, 7 aa, synthetic construct
VGYQNQM

SEQ ID NO: 32986 - protein, 7 aa, synthetic construct
KTQTVSA

SEQ ID NO: 32987 - protein, 7 aa, synthetic construct
GQGTKSG

SEQ ID NO: 32988 - protein, 7 aa, synthetic construct
QSGRHVP

SEQ ID NO: 32989 - protein, 7 aa, synthetic construct
DNVMKMK

SEQ ID NO: 32990 - protein, 7 aa, synthetic construct
QTTKGTA

SEQ ID NO: 32991 - protein, 7 aa, synthetic construct
TIKSAKD

SEQ ID NO: 32992 - protein, 7 aa, synthetic construct
APSRSND

SEQ ID NO: 32993 - protein, 7 aa, synthetic construct
TVSGRAP

SEQ ID NO: 32994 - protein, 7 aa, synthetic construct
RETVRVP

SEQ ID NO: 32995 - protein, 7 aa, synthetic construct
VKQANHI

SEQ ID NO: 32996 - protein, 7 aa, synthetic construct
KTQVHNI

SEQ ID NO: 32997 - protein, 7 aa, synthetic construct
MKDMRNH

SEQ ID NO: 32998 - protein, 7 aa, synthetic construct
SKDGRNG

SEQ ID NO: 32999 - protein, 7 aa, synthetic construct
QWKGNGP

SEQ ID NO: 33000 - protein, 7 aa, synthetic construct
NMRLNRD

SEQ ID NO: 33001 - protein, 7 aa, synthetic construct
KGHNGVG

SEQ ID NO: 33002 - protein, 7 aa, synthetic construct
MKSSTPA

SEQ ID NO: 33003 - protein, 7 aa, synthetic construct
MGGKAWE

SEQ ID NO: 33004 - protein, 7 aa, synthetic construct
KGNNNAG

SEQ ID NO: 33005 - protein, 7 aa, synthetic construct
KPHISDA

SEQ ID NO: 33006 - protein, 7 aa, synthetic construct
TKVQDGS

SEQ ID NO: 33007 - protein, 7 aa, synthetic construct
VHGAKVG

SEQ ID NO: 33008 - protein, 7 aa, synthetic construct
QHVRPLG

SEQ ID NO: 33009 - protein, 7 aa, synthetic construct
YVMSPTG

SEQ ID NO: 33010 - protein, 7 aa, synthetic construct
FGKGATG

SEQ ID NO: 33011 - protein, 7 aa, synthetic construct
PGIGNRG

SEQ ID NO: 33012 - protein, 7 aa, synthetic construct
KGSSTTP

SEQ ID NO: 33013 - protein, 7 aa, synthetic construct
KSTQWLD

SEQ ID NO: 33014 - protein, 7 aa, synthetic construct
KIAATKD

SEQ ID NO: 33015 - protein, 7 aa, synthetic construct
VPRKHDD

SEQ ID NO: 33016 - protein, 7 aa, synthetic construct
VRNGNVG

SEQ ID NO: 33017 - protein, 7 aa, synthetic construct
AKNASLG

SEQ ID NO: 33018 - protein, 7 aa, synthetic construct
NRTGAMA

SEQ ID NO: 33019 - protein, 7 aa, synthetic construct
SITGKQG

SEQ ID NO: 33020 - protein, 7 aa, synthetic construct
MGGAMIA

SEQ ID NO: 33021 - protein, 7 aa, synthetic construct
FGRINSN

SEQ ID NO: 33022 - protein, 7 aa, synthetic construct
LDKRQFE

SEQ ID NO: 33023 - protein, 7 aa, synthetic construct
SVFAQKQ

SEQ ID NO: 33024 - protein, 7 aa, synthetic construct
QARATES

SEQ ID NO: 33025 - protein, 7 aa, synthetic construct
VNSSRGG

SEQ ID NO: 33026 - protein, 7 aa, synthetic construct
NRANSNI

SEQ ID NO: 33027 - protein, 7 aa, synthetic construct
NSQSRQG

SEQ ID NO: 33028 - protein, 7 aa, synthetic construct
WSMKHDG

SEQ ID NO: 33029 - protein, 7 aa, synthetic construct
KPTAGFA

SEQ ID NO: 33030 - protein, 7 aa, synthetic construct
QVHGTGN

SEQ ID NO: 33031 - protein, 7 aa, synthetic construct
GFAHGPV

SEQ ID NO: 33032 - protein, 7 aa, synthetic construct
TRDGFAQ

SEQ ID NO: 33033 - protein, 7 aa, synthetic construct
KFASTSG

SEQ ID NO: 33034 - protein, 7 aa, synthetic construct
GYSRGVD

SEQ ID NO: 33035 - protein, 7 aa, synthetic construct
SRGVSAA

SEQ ID NO: 33036 - protein, 7 aa, synthetic construct
VGQSNQG

SEQ ID NO: 33037 - protein, 7 aa, synthetic construct
SMGTRAG

SEQ ID NO: 33038 - protein, 7 aa, synthetic construct
TNQSQRP

SEQ ID NO: 33039 - protein, 7 aa, synthetic construct
DHHDNTR

SEQ ID NO: 33040 - protein, 7 aa, synthetic construct
KQSTLSG

SEQ ID NO: 33041 - protein, 7 aa, synthetic construct
RVTELKA

SEQ ID NO: 33042 - protein, 7 aa, synthetic construct
MTPGRSA

SEQ ID NO: 33043 - protein, 7 aa, synthetic construct
NRSNATG

SEQ ID NO: 33044 - protein, 7 aa, synthetic construct
SSRTSVG

SEQ ID NO: 33045 - protein, 7 aa, synthetic construct
TNRGNDT

SEQ ID NO: 33046 - protein, 7 aa, synthetic construct
HYPKGMQ

SEQ ID NO: 33047 - protein, 7 aa, synthetic construct
HLRQPQI

SEQ ID NO: 33048 - protein, 7 aa, synthetic construct
KNQPPSS

SEQ ID NO: 33049 - protein, 7 aa, synthetic construct
YHKVSSA

SEQ ID NO: 33050 - protein, 7 aa, synthetic construct
QRTGSVA

SEQ ID NO: 33051 - protein, 7 aa, synthetic construct
FKGASSV

SEQ ID NO: 33052 - protein, 7 aa, synthetic construct
IGGAKQG

SEQ ID NO: 33053 - protein, 7 aa, synthetic construct
FRPNHAQ

SEQ ID NO: 33054 - protein, 7 aa, synthetic construct
IQGRVVP

SEQ ID NO: 33055 - protein, 7 aa, synthetic construct
NLRGQAA

SEQ ID NO: 33056 - protein, 7 aa, synthetic construct
VKPSGQA

SEQ ID NO: 33057 - protein, 7 aa, synthetic construct
STYTSIG

SEQ ID NO: 33058 - protein, 7 aa, synthetic construct
TRQPMAP

SEQ ID NO: 33059 - protein, 7 aa, synthetic construct
RPNAERN

SEQ ID NO: 33060 - protein, 7 aa, synthetic construct
LVHPSER

SEQ ID NO: 33061 - protein, 7 aa, synthetic construct
IMPANKP

SEQ ID NO: 33062 - protein, 7 aa, synthetic construct
NKNSQQG

SEQ ID NO: 33063 - protein, 7 aa, synthetic construct
IGKVLRE

SEQ ID NO: 33064 - protein, 7 aa, synthetic construct
KRVDDIH

SEQ ID NO: 33065 - protein, 7 aa, synthetic construct
TAKNQFG

SEQ ID NO: 33066 - protein, 7 aa, synthetic construct
MAERAMG

SEQ ID NO: 33067 - protein, 7 aa, synthetic construct
SKNSSGG

SEQ ID NO: 33068 - protein, 7 aa, synthetic construct
KMNANQG

SEQ ID NO: 33069 - protein, 7 aa, synthetic construct
KQAQTNM

SEQ ID NO: 33070 - protein, 7 aa, synthetic construct
PRTSGQI

SEQ ID NO: 33071 - protein, 7 aa, synthetic construct
KGGGYEV

SEQ ID NO: 33072 - protein, 7 aa, synthetic construct
TQHGARD

SEQ ID NO: 33073 - protein, 7 aa, synthetic construct
RPTTVAA

SEQ ID NO: 33074 - protein, 7 aa, synthetic construct
HGLQHTP

SEQ ID NO: 33075 - protein, 7 aa, synthetic construct
KFSNQAA

SEQ ID NO: 33076 - protein, 7 aa, synthetic construct
NPARGQA

SEQ ID NO: 33077 - protein, 7 aa, synthetic construct
LKNAAGN

SEQ ID NO: 33078 - protein, 7 aa, synthetic construct
ARSTASV

SEQ ID NO: 33079 - protein, 7 aa, synthetic construct
FGAKTVG

SEQ ID NO: 33080 - protein, 7 aa, synthetic construct
LPNKTTN

SEQ ID NO: 33081 - protein, 7 aa, synthetic construct
AKTGIGG

SEQ ID NO: 33082 - protein, 7 aa, synthetic construct
QPRGPME

SEQ ID NO: 33083 - protein, 7 aa, synthetic construct
RPQFAAG

SEQ ID NO: 33084 - protein, 7 aa, synthetic construct
NKNYGAP

SEQ ID NO: 33085 - protein, 7 aa, synthetic construct
GTHHAAP

SEQ ID NO: 33086 - protein, 7 aa, synthetic construct
QQSVRAS

SEQ ID NO: 33087 - protein, 7 aa, synthetic construct
RPSGMAG

SEQ ID NO: 33088 - protein, 7 aa, synthetic construct
VTSRSQP

SEQ ID NO: 33089 - protein, 7 aa, synthetic construct
KVANTVS

SEQ ID NO: 33090 - protein, 7 aa, synthetic construct
TLKAPQD

SEQ ID NO: 33091 - protein, 7 aa, synthetic construct
TGNRTVA

SEQ ID NO: 33092 - protein, 7 aa, synthetic construct
MKERVSP

SEQ ID NO: 33093 - protein, 7 aa, synthetic construct
ISPVSNN

SEQ ID NO: 33094 - protein, 7 aa, synthetic construct
PKPNSMG

SEQ ID NO: 33095 - protein, 7 aa, synthetic construct
PTKSTFP

SEQ ID NO: 33096 - protein, 7 aa, synthetic construct
RHMSTPE

SEQ ID NO: 33097 - protein, 7 aa, synthetic construct
LHRLGTE

SEQ ID NO: 33098 - protein, 7 aa, synthetic construct
KDKRPDW

SEQ ID NO: 33099 - protein, 7 aa, synthetic construct
TGMKSNP

SEQ ID NO: 33100 - protein, 7 aa, synthetic construct
SGREHNG

SEQ ID NO: 33101 - protein, 7 aa, synthetic construct
STRSGAM

SEQ ID NO: 33102 - protein, 7 aa, synthetic construct
NLGFDAT

SEQ ID NO: 33103 - protein, 7 aa, synthetic construct
QQEKGVR

SEQ ID NO: 33104 - protein, 7 aa, synthetic construct
RPSSMSP

SEQ ID NO: 33105 - protein, 7 aa, synthetic construct
QGKITPV

SEQ ID NO: 33106 - protein, 7 aa, synthetic construct
QSRVAQA

SEQ ID NO: 33107 - protein, 7 aa, synthetic construct
KRLPDTD

SEQ ID NO: 33108 - protein, 7 aa, synthetic construct
QLGKHDS

SEQ ID NO: 33109 - protein, 7 aa, synthetic construct
GQFTHTT

SEQ ID NO: 33110 - protein, 7 aa, synthetic construct
MGQGMKS

SEQ ID NO: 33111 - protein, 7 aa, synthetic construct
KTVNTTY

SEQ ID NO: 33112 - protein, 7 aa, synthetic construct
RQPNGVS

SEQ ID NO: 33113 - protein, 7 aa, synthetic construct
RGPTQQN

SEQ ID NO: 33114 - protein, 7 aa, synthetic construct
KQSGTYG

SEQ ID NO: 33115 - protein, 7 aa, synthetic construct
KVNPNGG

SEQ ID NO: 33116 - protein, 7 aa, synthetic construct
RPSSTGS

SEQ ID NO: 33117 - protein, 7 aa, synthetic construct
VNGQKSA

SEQ ID NO: 33118 - protein, 7 aa, synthetic construct
STNKVSP

SEQ ID NO: 33119 - protein, 7 aa, synthetic construct
RTKSVDP

SEQ ID NO: 33120 - protein, 7 aa, synthetic construct
LQKSHIL

SEQ ID NO: 33121 - protein, 7 aa, synthetic construct
PNRNSND

SEQ ID NO: 33122 - protein, 7 aa, synthetic construct
KGQQQGH

SEQ ID NO: 33123 - protein, 7 aa, synthetic construct
FKYGPTS

SEQ ID NO: 33124 - protein, 7 aa, synthetic construct
MHVSGTG

SEQ ID NO: 33125 - protein, 7 aa, synthetic construct
NVTGQKA

SEQ ID NO: 33126 - protein, 7 aa, synthetic construct
QVKGAEN

SEQ ID NO: 33127 - protein, 7 aa, synthetic construct
NANTNSN

SEQ ID NO: 33128 - protein, 7 aa, synthetic construct
NKAVTKD

SEQ ID NO: 33129 - protein, 7 aa, synthetic construct
ITSRVQQ

SEQ ID NO: 33130 - protein, 7 aa, synthetic construct
MGARTQP

SEQ ID NO: 33131 - protein, 7 aa, synthetic construct
GNAQFKG

SEQ ID NO: 33132 - protein, 7 aa, synthetic construct
VSPKSNG

SEQ ID NO: 33133 - protein, 7 aa, synthetic construct
ARNANEM

SEQ ID NO: 33134 - protein, 7 aa, synthetic construct
TTGRSAA

SEQ ID NO: 33135 - protein, 7 aa, synthetic construct
TTTGTKG

SEQ ID NO: 33136 - protein, 7 aa, synthetic construct
QRAPMAG

SEQ ID NO: 33137 - protein, 7 aa, synthetic construct
LAKLPTT

SEQ ID NO: 33138 - protein, 7 aa, synthetic construct
SVQKKWE

SEQ ID NO: 33139 - protein, 7 aa, synthetic construct
ATNLRPG

SEQ ID NO: 33140 - protein, 7 aa, synthetic construct
TKGTKFE

SEQ ID NO: 33141 - protein, 7 aa, synthetic construct
HHMKPHG

SEQ ID NO: 33142 - protein, 7 aa, synthetic construct
TVRVTGE

SEQ ID NO: 33143 - protein, 7 aa, synthetic construct
HTRERQG

SEQ ID NO: 33144 - protein, 7 aa, synthetic construct
FQKLGVA

SEQ ID NO: 33145 - protein, 7 aa, synthetic construct
TRTNGAI

SEQ ID NO: 33146 - protein, 7 aa, synthetic construct
KFHDRIP

SEQ ID NO: 33147 - protein, 7 aa, synthetic construct
TGTRLSP

SEQ ID NO: 33148 - protein, 7 aa, synthetic construct
FKQSSMA

SEQ ID NO: 33149 - protein, 7 aa, synthetic construct
SGLKLTG

SEQ ID NO: 33150 - protein, 7 aa, synthetic construct
NPARAQG

SEQ ID NO: 33151 - protein, 7 aa, synthetic construct
SFKNQDK

SEQ ID NO: 33152 - protein, 7 aa, synthetic construct
LFKGTRE

SEQ ID NO: 33153 - protein, 7 aa, synthetic construct
IGTKAGA

SEQ ID NO: 33154 - protein, 7 aa, synthetic construct
AARTVGS

SEQ ID NO: 33155 - protein, 7 aa, synthetic construct
VAKTSVH

SEQ ID NO: 33156 - protein, 7 aa, synthetic construct
NGIRVVS

SEQ ID NO: 33157 - protein, 7 aa, synthetic construct
HFHKQPD

SEQ ID NO: 33158 - protein, 7 aa, synthetic construct
QRPDKTS

SEQ ID NO: 33159 - protein, 7 aa, synthetic construct
STFSKSE

SEQ ID NO: 33160 - protein, 7 aa, synthetic construct
MPKYGDT

SEQ ID NO: 33161 - protein, 7 aa, synthetic construct
SKFYNQG

SEQ ID NO: 33162 - protein, 7 aa, synthetic construct
HFSASVA

SEQ ID NO: 33163 - protein, 7 aa, synthetic construct
SLPRGSQ

SEQ ID NO: 33164 - protein, 7 aa, synthetic construct
RNPAGTS

SEQ ID NO: 33165 - protein, 7 aa, synthetic construct
HSMRAIG

SEQ ID NO: 33166 - protein, 7 aa, synthetic construct
ASSNTGM

SEQ ID NO: 33167 - protein, 7 aa, synthetic construct
TLGRVHG

SEQ ID NO: 33168 - protein, 7 aa, synthetic construct
FGKHTAD

SEQ ID NO: 33169 - protein, 7 aa, synthetic construct
IIRGKFE

SEQ ID NO: 33170 - protein, 7 aa, synthetic construct
QPSPTRS

SEQ ID NO: 33171 - protein, 7 aa, synthetic construct
YHGGKND

SEQ ID NO: 33172 - protein, 7 aa, synthetic construct
KVGNAAA

SEQ ID NO: 33173 - protein, 7 aa, synthetic construct
QGGQVHP

SEQ ID NO: 33174 - protein, 7 aa, synthetic construct
NMPGGVR

SEQ ID NO: 33175 - protein, 7 aa, synthetic construct
LGQMKTV

SEQ ID NO: 33176 - protein, 7 aa, synthetic construct
MKNTGNA

SEQ ID NO: 33177 - protein, 7 aa, synthetic construct
NNAARQP

SEQ ID NO: 33178 - protein, 7 aa, synthetic construct
QKQQVAA

SEQ ID NO: 33179 - protein, 7 aa, synthetic construct
KPVANSG

SEQ ID NO: 33180 - protein, 7 aa, synthetic construct
WGVHGPS

SEQ ID NO: 33181 - protein, 7 aa, synthetic construct
HKPTGDH

SEQ ID NO: 33182 - protein, 7 aa, synthetic construct
FKATAQG

SEQ ID NO: 33183 - protein, 7 aa, synthetic construct
PKSSSTV

SEQ ID NO: 33184 - protein, 7 aa, synthetic construct
ATKGGQG

SEQ ID NO: 33185 - protein, 7 aa, synthetic construct
KSTQNGA

SEQ ID NO: 33186 - protein, 7 aa, synthetic construct
KGTSAGP

SEQ ID NO: 33187 - protein, 7 aa, synthetic construct
RNGSSNG

SEQ ID NO: 33188 - protein, 7 aa, synthetic construct
TKSVANS

SEQ ID NO: 33189 - protein, 7 aa, synthetic construct
IPHKTAL

SEQ ID NO: 33190 - protein, 7 aa, synthetic construct
TQKFQQP

SEQ ID NO: 33191 - protein, 7 aa, synthetic construct
KASDKVW

SEQ ID NO: 33192 - protein, 7 aa, synthetic construct
YGATNKA

SEQ ID NO: 33193 - protein, 7 aa, synthetic construct
VNGKKDG

SEQ ID NO: 33194 - protein, 7 aa, synthetic construct
MGKQTAA

SEQ ID NO: 33195 - protein, 7 aa, synthetic construct
QKTGPGA

SEQ ID NO: 33196 - protein, 7 aa, synthetic construct
IPKGSSP

SEQ ID NO: 33197 - protein, 7 aa, synthetic construct
RPATSGP

SEQ ID NO: 33198 - protein, 7 aa, synthetic construct
TTRRDEM

SEQ ID NO: 33199 - protein, 7 aa, synthetic construct
SRQGNTA

SEQ ID NO: 33200 - protein, 7 aa, synthetic construct
KPSMGVG

SEQ ID NO: 33201 - protein, 7 aa, synthetic construct
TTHKMAI

SEQ ID NO: 33202 - protein, 7 aa, synthetic construct
NQPAKGG

SEQ ID NO: 33203 - protein, 7 aa, synthetic construct
LKSGGTA

SEQ ID NO: 33204 - protein, 7 aa, synthetic construct
NISAHPG

SEQ ID NO: 33205 - protein, 7 aa, synthetic construct
RSTSGMG

SEQ ID NO: 33206 - protein, 7 aa, synthetic construct
GVQGQTQ

SEQ ID NO: 33207 - protein, 7 aa, synthetic construct
WKSEGFG

SEQ ID NO: 33208 - protein, 7 aa, synthetic construct
INPRDQG

SEQ ID NO: 33209 - protein, 7 aa, synthetic construct
MHATAPS

SEQ ID NO: 33210 - protein, 7 aa, synthetic construct
TSNRGSV

SEQ ID NO: 33211 - protein, 7 aa, synthetic construct
NARTGTG

SEQ ID NO: 33212 - protein, 7 aa, synthetic construct
AKYGTEK

SEQ ID NO: 33213 - protein, 7 aa, synthetic construct
KTAGVVG

SEQ ID NO: 33214 - protein, 7 aa, synthetic construct
SRTTTGP

SEQ ID NO: 33215 - protein, 7 aa, synthetic construct
HKMTGNE

SEQ ID NO: 33216 - protein, 7 aa, synthetic construct
TKAVPMA

SEQ ID NO: 33217 - protein, 7 aa, synthetic construct
RVNTNMA

SEQ ID NO: 33218 - protein, 7 aa, synthetic construct
LKGKHEV

SEQ ID NO: 33219 - protein, 7 aa, synthetic construct
FQATKSA

SEQ ID NO: 33220 - protein, 7 aa, synthetic construct
ITKMARD

SEQ ID NO: 33221 - protein, 7 aa, synthetic construct
TRTNGRE

SEQ ID NO: 33222 - protein, 7 aa, synthetic construct
YQSGKQS

SEQ ID NO: 33223 - protein, 7 aa, synthetic construct
RNAGLNA

SEQ ID NO: 33224 - protein, 7 aa, synthetic construct
YKSMVKE

SEQ ID NO: 33225 - protein, 7 aa, synthetic construct
YEHNKNV

SEQ ID NO: 33226 - protein, 7 aa, synthetic construct
FAKSQIN

SEQ ID NO: 33227 - protein, 7 aa, synthetic construct
YAGGHNG

SEQ ID NO: 33228 - protein, 7 aa, synthetic construct
RSGSTVA

SEQ ID NO: 33229 - protein, 7 aa, synthetic construct
RHKLEEV

SEQ ID NO: 33230 - protein, 7 aa, synthetic construct
KPASGPG

SEQ ID NO: 33231 - protein, 7 aa, synthetic construct
GTRDKFG

SEQ ID NO: 33232 - protein, 7 aa, synthetic construct
GQGQRVA

SEQ ID NO: 33233 - protein, 7 aa, synthetic construct
KPSNPGM

SEQ ID NO: 33234 - protein, 7 aa, synthetic construct
MIPKVVT

SEQ ID NO: 33235 - protein, 7 aa, synthetic construct
QRTPPNV

SEQ ID NO: 33236 - protein, 7 aa, synthetic construct
KTQGSIS

SEQ ID NO: 33237 - protein, 7 aa, synthetic construct
IGRFVGE

SEQ ID NO: 33238 - protein, 7 aa, synthetic construct
PKAPVTA

SEQ ID NO: 33239 - protein, 7 aa, synthetic construct
DAKQQLP

SEQ ID NO: 33240 - protein, 7 aa, synthetic construct
KNQMGVG

SEQ ID NO: 33241 - protein, 7 aa, synthetic construct
VRGGYNA

SEQ ID NO: 33242 - protein, 7 aa, synthetic construct
SRGPTAG

SEQ ID NO: 33243 - protein, 7 aa, synthetic construct
NQTGNKG

SEQ ID NO: 33244 - protein, 7 aa, synthetic construct
RLDHKAN

SEQ ID NO: 33245 - protein, 7 aa, synthetic construct
TQNQSKG

SEQ ID NO: 33246 - protein, 7 aa, synthetic construct
MYINGTP

SEQ ID NO: 33247 - protein, 7 aa, synthetic construct
PKNANGS

SEQ ID NO: 33248 - protein, 7 aa, synthetic construct
PKTSGIG

SEQ ID NO: 33249 - protein, 7 aa, synthetic construct
QKPGTNS

SEQ ID NO: 33250 - protein, 7 aa, synthetic construct
LGPHHGF

SEQ ID NO: 33251 - protein, 7 aa, synthetic construct
TARSASP

SEQ ID NO: 33252 - protein, 7 aa, synthetic construct
DSRTPAK

SEQ ID NO: 33253 - protein, 7 aa, synthetic construct
ERDQVRN

SEQ ID NO: 33254 - protein, 7 aa, synthetic construct
VPAKNLN

SEQ ID NO: 33255 - protein, 7 aa, synthetic construct
TIRSISL

SEQ ID NO: 33256 - protein, 7 aa, synthetic construct
FLKLQTD

SEQ ID NO: 33257 - protein, 7 aa, synthetic construct
AMKQNSP

SEQ ID NO: 33258 - protein, 7 aa, synthetic construct
TPRTGAG

SEQ ID NO: 33259 - protein, 7 aa, synthetic construct
KPPNMPS

SEQ ID NO: 33260 - protein, 7 aa, synthetic construct
RQSIKID

SEQ ID NO: 33261 - protein, 7 aa, synthetic construct
INKAARD

SEQ ID NO: 33262 - protein, 7 aa, synthetic construct
VSIAFRE

SEQ ID NO: 33263 - protein, 7 aa, synthetic construct
NRAARDP

SEQ ID NO: 33264 - protein, 7 aa, synthetic construct
PPTGKGT

SEQ ID NO: 33265 - protein, 7 aa, synthetic construct
KTQATVG

SEQ ID NO: 33266 - protein, 7 aa, synthetic construct
YKGGVTN

SEQ ID NO: 33267 - protein, 7 aa, synthetic construct
MPKMDRN

SEQ ID NO: 33268 - protein, 7 aa, synthetic construct
KGPVGQA

SEQ ID NO: 33269 - protein, 7 aa, synthetic construct
RNAHENP

SEQ ID NO: 33270 - protein, 7 aa, synthetic construct
NKMKSGD

SEQ ID NO: 33271 - protein, 7 aa, synthetic construct
QNNAKQP

SEQ ID NO: 33272 - protein, 7 aa, synthetic construct
ARGGPLL

SEQ ID NO: 33273 - protein, 7 aa, synthetic construct
QMSSAKG

SEQ ID NO: 33274 - protein, 7 aa, synthetic construct
HTGKGQG

SEQ ID NO: 33275 - protein, 7 aa, synthetic construct
NVRMNNN

SEQ ID NO: 33276 - protein, 7 aa, synthetic construct
PNSNIPS

SEQ ID NO: 33277 - protein, 7 aa, synthetic construct
PNKAHMG

SEQ ID NO: 33278 - protein, 7 aa, synthetic construct
AGTKGLQ

SEQ ID NO: 33279 - protein, 7 aa, synthetic construct
SQGNNRA

SEQ ID NO: 33280 - protein, 7 aa, synthetic construct
QKTVAVG

SEQ ID NO: 33281 - protein, 7 aa, synthetic construct
MMGNRQG

SEQ ID NO: 33282 - protein, 7 aa, synthetic construct
MARDSHS

SEQ ID NO: 33283 - protein, 7 aa, synthetic construct
RVNQAPA

SEQ ID NO: 33284 - protein, 7 aa, synthetic construct
TKNNNNG

SEQ ID NO: 33285 - protein, 7 aa, synthetic construct
TNRDKGL

SEQ ID NO: 33286 - protein, 7 aa, synthetic construct
NLNASTA

SEQ ID NO: 33287 - protein, 7 aa, synthetic construct
NDHKAYS

SEQ ID NO: 33288 - protein, 7 aa, synthetic construct
RNSQAES

SEQ ID NO: 33289 - protein, 7 aa, synthetic construct
QPQYKDA

SEQ ID NO: 33290 - protein, 7 aa, synthetic construct
MHRSLAL

SEQ ID NO: 33291 - protein, 7 aa, synthetic construct
MVMDPND

SEQ ID NO: 33292 - protein, 7 aa, synthetic construct
GTALNHF

SEQ ID NO: 33293 - protein, 7 aa, synthetic construct
FGVNAKG

SEQ ID NO: 33294 - protein, 7 aa, synthetic construct
NTKITVP

SEQ ID NO: 33295 - protein, 7 aa, synthetic construct
VLMVKAD

SEQ ID NO: 33296 - protein, 7 aa, synthetic construct
GKSLTRE

SEQ ID NO: 33297 - protein, 7 aa, synthetic construct
RSGPHSD

SEQ ID NO: 33298 - protein, 7 aa, synthetic construct
FPRSTPN

SEQ ID NO: 33299 - protein, 7 aa, synthetic construct
DAHMPKA

SEQ ID NO: 33300 - protein, 7 aa, synthetic construct
LSKGMEG

SEQ ID NO: 33301 - protein, 7 aa, synthetic construct
VPKNTQA

SEQ ID NO: 33302 - protein, 7 aa, synthetic construct
SGKVNQG

SEQ ID NO: 33303 - protein, 7 aa, synthetic construct
HFSGTAS

SEQ ID NO: 33304 - protein, 7 aa, synthetic construct
KGVQTGG

SEQ ID NO: 33305 - protein, 7 aa, synthetic construct
RGTGVPM

SEQ ID NO: 33306 - protein, 7 aa, synthetic construct
GKNIQSA

SEQ ID NO: 33307 - protein, 7 aa, synthetic construct
IARATEM

SEQ ID NO: 33308 - protein, 7 aa, synthetic construct
HSNHPAM

SEQ ID NO: 33309 - protein, 7 aa, synthetic construct
STLGSKP

SEQ ID NO: 33310 - protein, 7 aa, synthetic construct
PVKNGAG

SEQ ID NO: 33311 - protein, 7 aa, synthetic construct
DKGGKVM

SEQ ID NO: 33312 - protein, 7 aa, synthetic construct
SPAKPYE

SEQ ID NO: 33313 - protein, 7 aa, synthetic construct
TPHKGSV

SEQ ID NO: 33314 - protein, 7 aa, synthetic construct
AKKPGDY

SEQ ID NO: 33315 - protein, 7 aa, synthetic construct
FGKNMQA

SEQ ID NO: 33316 - protein, 7 aa, synthetic construct
RAPGAQP

SEQ ID NO: 33317 - protein, 7 aa, synthetic construct
SKSSVGS

SEQ ID NO: 33318 - protein, 7 aa, synthetic construct
ARIGLGN

SEQ ID NO: 33319 - protein, 7 aa, synthetic construct
TSFRGSE

SEQ ID NO: 33320 - protein, 7 aa, synthetic construct
IVMNHRG

SEQ ID NO: 33321 - protein, 7 aa, synthetic construct
ASKMNQG

SEQ ID NO: 33322 - protein, 7 aa, synthetic construct
AKKSVTE

SEQ ID NO: 33323 - protein, 7 aa, synthetic construct
TRTPNSG

SEQ ID NO: 33324 - protein, 7 aa, synthetic construct
KPNSSQA

SEQ ID NO: 33325 - protein, 7 aa, synthetic construct
KFGTTFD

SEQ ID NO: 33326 - protein, 7 aa, synthetic construct
MAVHKDR

SEQ ID NO: 33327 - protein, 7 aa, synthetic construct
PAKMVAG

SEQ ID NO: 33328 - protein, 7 aa, synthetic construct
TFSMSKP

SEQ ID NO: 33329 - protein, 7 aa, synthetic construct
SDMKFTH

SEQ ID NO: 33330 - protein, 7 aa, synthetic construct
EHRTGSG

SEQ ID NO: 33331 - protein, 7 aa, synthetic construct
LMKDTFG

SEQ ID NO: 33332 - protein, 7 aa, synthetic construct
TKDNKSG

SEQ ID NO: 33333 - protein, 7 aa, synthetic construct
PPKGSGV

SEQ ID NO: 33334 - protein, 7 aa, synthetic construct
IEKRLNV

SEQ ID NO: 33335 - protein, 7 aa, synthetic construct
GFGSNHA

SEQ ID NO: 33336 - protein, 7 aa, synthetic construct
GALKHVP

SEQ ID NO: 33337 - protein, 7 aa, synthetic construct
QGSKAPN

SEQ ID NO: 33338 - protein, 7 aa, synthetic construct
VLGFEKQ

SEQ ID NO: 33339 - protein, 7 aa, synthetic construct
FRAGPSS

SEQ ID NO: 33340 - protein, 7 aa, synthetic construct
LQSTRAD

SEQ ID NO: 33341 - protein, 7 aa, synthetic construct
NMHLMKA

SEQ ID NO: 33342 - protein, 7 aa, synthetic construct
NAKISRE

SEQ ID NO: 33343 - protein, 7 aa, synthetic construct
MRLGMTP

SEQ ID NO: 33344 - protein, 7 aa, synthetic construct
FNVTHKD

SEQ ID NO: 33345 - protein, 7 aa, synthetic construct
SGVKGNL

SEQ ID NO: 33346 - protein, 7 aa, synthetic construct
VKTVVHG

SEQ ID NO: 33347 - protein, 7 aa, synthetic construct
YKPIAKD

SEQ ID NO: 33348 - protein, 7 aa, synthetic construct
NFHKTGS

SEQ ID NO: 33349 - protein, 7 aa, synthetic construct
KSYGGMD

SEQ ID NO: 33350 - protein, 7 aa, synthetic construct
AERPYPK

SEQ ID NO: 33351 - protein, 7 aa, synthetic construct
AKSNTNP

SEQ ID NO: 33352 - protein, 7 aa, synthetic construct
GPNKGTP

SEQ ID NO: 33353 - protein, 7 aa, synthetic construct
STKVTVG

SEQ ID NO: 33354 - protein, 7 aa, synthetic construct
MPRLTRD

SEQ ID NO: 33355 - protein, 7 aa, synthetic construct
LMRVTNE

SEQ ID NO: 33356 - protein, 7 aa, synthetic construct
LGSHWEK

SEQ ID NO: 33357 - protein, 7 aa, synthetic construct
NVGGRTP

SEQ ID NO: 33358 - protein, 7 aa, synthetic construct
SKFSSAA

SEQ ID NO: 33359 - protein, 7 aa, synthetic construct
KQPQSIA

SEQ ID NO: 33360 - protein, 7 aa, synthetic construct
VGFRDSP

SEQ ID NO: 33361 - protein, 7 aa, synthetic construct
NKWTMAD

SEQ ID NO: 33362 - protein, 7 aa, synthetic construct
MKPGGKD

SEQ ID NO: 33363 - protein, 7 aa, synthetic construct
PDRIGTL

SEQ ID NO: 33364 - protein, 7 aa, synthetic construct
ATHGPGA

SEQ ID NO: 33365 - protein, 7 aa, synthetic construct
GAPYKEA

SEQ ID NO: 33366 - protein, 7 aa, synthetic construct
LQKSYTG

SEQ ID NO: 33367 - protein, 7 aa, synthetic construct
RAKDTSA

SEQ ID NO: 33368 - protein, 7 aa, synthetic construct
KDRPGQA

SEQ ID NO: 33369 - protein, 7 aa, synthetic construct
TASGKFG

SEQ ID NO: 33370 - protein, 7 aa, synthetic construct
MMKFESS

SEQ ID NO: 33371 - protein, 7 aa, synthetic construct
KVPQGHP

SEQ ID NO: 33372 - protein, 7 aa, synthetic construct
TTKYAQM

SEQ ID NO: 33373 - protein, 7 aa, synthetic construct
GKTAGTA

SEQ ID NO: 33374 - protein, 7 aa, synthetic construct
TAAKQGT

SEQ ID NO: 33375 - protein, 7 aa, synthetic construct
TFKPLPY

SEQ ID NO: 33376 - protein, 7 aa, synthetic construct
HGQFKID

SEQ ID NO: 33377 - protein, 7 aa, synthetic construct
WANKINA

SEQ ID NO: 33378 - protein, 7 aa, synthetic construct
FENRAAA

SEQ ID NO: 33379 - protein, 7 aa, synthetic construct
NKQTTVA

SEQ ID NO: 33380 - protein, 7 aa, synthetic construct
HGRNPEN

SEQ ID NO: 33381 - protein, 7 aa, synthetic construct
NRANQQG

SEQ ID NO: 33382 - protein, 7 aa, synthetic construct
GNTKNAG

SEQ ID NO: 33383 - protein, 7 aa, synthetic construct
YKPPASG

SEQ ID NO: 33384 - protein, 7 aa, synthetic construct
TQSRPMG

SEQ ID NO: 33385 - protein, 7 aa, synthetic construct
KHNTNQA

SEQ ID NO: 33386 - protein, 7 aa, synthetic construct
SKANGMG

SEQ ID NO: 33387 - protein, 7 aa, synthetic construct
FPPLKSN

SEQ ID NO: 33388 - protein, 7 aa, synthetic construct
QNKNNNG

SEQ ID NO: 33389 - protein, 7 aa, synthetic construct
AKGGKPD

SEQ ID NO: 33390 - protein, 7 aa, synthetic construct
RPNGQMS

SEQ ID NO: 33391 - protein, 7 aa, synthetic construct
RAYGNMA

SEQ ID NO: 33392 - protein, 7 aa, synthetic construct
APGKGAV

SEQ ID NO: 33393 - protein, 7 aa, synthetic construct
QANNHHK

SEQ ID NO: 33394 - protein, 7 aa, synthetic construct
NMKNSAP

SEQ ID NO: 33395 - protein, 7 aa, synthetic construct
FGGKIQG

SEQ ID NO: 33396 - protein, 7 aa, synthetic construct
TRTQMNG

SEQ ID NO: 33397 - protein, 7 aa, synthetic construct
ENAMDWE

SEQ ID NO: 33398 - protein, 7 aa, synthetic construct
TGKASQG

SEQ ID NO: 33399 - protein, 7 aa, synthetic construct
ATQAPNN

SEQ ID NO: 33400 - protein, 7 aa, synthetic construct
RTTTSSA

SEQ ID NO: 33401 - protein, 7 aa, synthetic construct
VEPKKYY

SEQ ID NO: 33402 - protein, 7 aa, synthetic construct
GNKGKDA

SEQ ID NO: 33403 - protein, 7 aa, synthetic construct
NKPSGAN

SEQ ID NO: 33404 - protein, 7 aa, synthetic construct
SLNNINR

SEQ ID NO: 33405 - protein, 7 aa, synthetic construct
WAGIGEN

SEQ ID NO: 33406 - protein, 7 aa, synthetic construct
QHPRTMV

SEQ ID NO: 33407 - protein, 7 aa, synthetic construct
NGRANTG

SEQ ID NO: 33408 - protein, 7 aa, synthetic construct
YKKQVEG

SEQ ID NO: 33409 - protein, 7 aa, synthetic construct
RMPAAAH

SEQ ID NO: 33410 - protein, 7 aa, synthetic construct
APPRDNP

SEQ ID NO: 33411 - protein, 7 aa, synthetic construct
NSDIRPG

SEQ ID NO: 33412 - protein, 7 aa, synthetic construct
QARQVQM

SEQ ID NO: 33413 - protein, 7 aa, synthetic construct
MNVTKQT

SEQ ID NO: 33414 - protein, 7 aa, synthetic construct
STRLHNT

SEQ ID NO: 33415 - protein, 7 aa, synthetic construct
QKSTGVG

SEQ ID NO: 33416 - protein, 7 aa, synthetic construct
HTVQRTT

SEQ ID NO: 33417 - protein, 7 aa, synthetic construct
QVGTSKG

SEQ ID NO: 33418 - protein, 7 aa, synthetic construct
LYTQSGP

SEQ ID NO: 33419 - protein, 7 aa, synthetic construct
DNKSNKG

SEQ ID NO: 33420 - protein, 7 aa, synthetic construct
KHSTVVA

SEQ ID NO: 33421 - protein, 7 aa, synthetic construct
GNNSSVR

SEQ ID NO: 33422 - protein, 7 aa, synthetic construct
GKQSAIW

SEQ ID NO: 33423 - protein, 7 aa, synthetic construct
TQKTSNG

SEQ ID NO: 33424 - protein, 7 aa, synthetic construct
AQYPNKT

SEQ ID NO: 33425 - protein, 7 aa, synthetic construct
FDMMAKK

SEQ ID NO: 33426 - protein, 7 aa, synthetic construct
SNKGGTA

SEQ ID NO: 33427 - protein, 7 aa, synthetic construct
LKQGPTF

SEQ ID NO: 33428 - protein, 7 aa, synthetic construct
NKVTQSA

SEQ ID NO: 33429 - protein, 7 aa, synthetic construct
GMNAQNG

SEQ ID NO: 33430 - protein, 7 aa, synthetic construct
MNKINQV

SEQ ID NO: 33431 - protein, 7 aa, synthetic construct
SQSQRFL

SEQ ID NO: 33432 - protein, 7 aa, synthetic construct
QGINFVA

SEQ ID NO: 33433 - protein, 7 aa, synthetic construct
KPPTSGT

SEQ ID NO: 33434 - protein, 7 aa, synthetic construct
QKNQSPG

SEQ ID NO: 33435 - protein, 7 aa, synthetic construct
FKPSNGN

SEQ ID NO: 33436 - protein, 7 aa, synthetic construct
MKNAGVG

SEQ ID NO: 33437 - protein, 7 aa, synthetic construct
KSNPVRD

SEQ ID NO: 33438 - protein, 7 aa, synthetic construct
MSGKNQS

SEQ ID NO: 33439 - protein, 7 aa, synthetic construct
YTSHKIP

SEQ ID NO: 33440 - protein, 7 aa, synthetic construct
QKMGGGA

SEQ ID NO: 33441 - protein, 7 aa, synthetic construct
KQNNAGM

SEQ ID NO: 33442 - protein, 7 aa, synthetic construct
TSHMSTI

SEQ ID NO: 33443 - protein, 7 aa, synthetic construct
VQKVGVS

SEQ ID NO: 33444 - protein, 7 aa, synthetic construct
QPHRDPG

SEQ ID NO: 33445 - protein, 7 aa, synthetic construct
TPKPGNG

SEQ ID NO: 33446 - protein, 7 aa, synthetic construct
GEKQGGS

SEQ ID NO: 33447 - protein, 7 aa, synthetic construct
RQTTSSG

SEQ ID NO: 33448 - protein, 7 aa, synthetic construct
GKINTQA

SEQ ID NO: 33449 - protein, 7 aa, synthetic construct
IEMRQKS

SEQ ID NO: 33450 - protein, 7 aa, synthetic construct
KSANNPS

SEQ ID NO: 33451 - protein, 7 aa, synthetic construct
YRGPTTE

SEQ ID NO: 33452 - protein, 7 aa, synthetic construct
TIPQGKP

SEQ ID NO: 33453 - protein, 7 aa, synthetic construct
NAPKHGD

SEQ ID NO: 33454 - protein, 7 aa, synthetic construct
SPKQMGG

SEQ ID NO: 33455 - protein, 7 aa, synthetic construct
SVVQRRD

SEQ ID NO: 33456 - protein, 7 aa, synthetic construct
RPNSQSA

SEQ ID NO: 33457 - protein, 7 aa, synthetic construct
NSHHTLP

SEQ ID NO: 33458 - protein, 7 aa, synthetic construct
FKNMSKE

SEQ ID NO: 33459 - protein, 7 aa, synthetic construct
PSRYNEP

SEQ ID NO: 33460 - protein, 7 aa, synthetic construct
YSKTASA

SEQ ID NO: 33461 - protein, 7 aa, synthetic construct
QNKNNAG

SEQ ID NO: 33462 - protein, 7 aa, synthetic construct
HKPGFFE

SEQ ID NO: 33463 - protein, 7 aa, synthetic construct
GLHGRHA

SEQ ID NO: 33464 - protein, 7 aa, synthetic construct
QTPQQKY

SEQ ID NO: 33465 - protein, 7 aa, synthetic construct
YGTNKGG

SEQ ID NO: 33466 - protein, 7 aa, synthetic construct
YPGKNSA

SEQ ID NO: 33467 - protein, 7 aa, synthetic construct
LRTFKPD

SEQ ID NO: 33468 - protein, 7 aa, synthetic construct
SNKTSTT

SEQ ID NO: 33469 - protein, 7 aa, synthetic construct
QSRPGMG

SEQ ID NO: 33470 - protein, 7 aa, synthetic construct
SNRWKDG

SEQ ID NO: 33471 - protein, 7 aa, synthetic construct
FGQAKTG

SEQ ID NO: 33472 - protein, 7 aa, synthetic construct
RSTVSGG

SEQ ID NO: 33473 - protein, 7 aa, synthetic construct
YAKSANA

SEQ ID NO: 33474 - protein, 7 aa, synthetic construct
SQTIHHA

SEQ ID NO: 33475 - protein, 7 aa, synthetic construct
ANMSRGA

SEQ ID NO: 33476 - protein, 7 aa, synthetic construct
KTPGTNG

SEQ ID NO: 33477 - protein, 7 aa, synthetic construct
FAKSMKD

SEQ ID NO: 33478 - protein, 7 aa, synthetic construct
FRMIQDA

SEQ ID NO: 33479 - protein, 7 aa, synthetic construct
IKTTMQN

SEQ ID NO: 33480 - protein, 7 aa, synthetic construct
PKQRPEG

SEQ ID NO: 33481 - protein, 7 aa, synthetic construct
IKDSIGR

SEQ ID NO: 33482 - protein, 7 aa, synthetic construct
MGQGSHG

SEQ ID NO: 33483 - protein, 7 aa, synthetic construct
YAPKGSA

SEQ ID NO: 33484 - protein, 7 aa, synthetic construct
PQHAHQF

SEQ ID NO: 33485 - protein, 7 aa, synthetic construct
KRHGESD

SEQ ID NO: 33486 - protein, 7 aa, synthetic construct
DYGNRGG

SEQ ID NO: 33487 - protein, 7 aa, synthetic construct
QAHNRPP

SEQ ID NO: 33488 - protein, 7 aa, synthetic construct
VKGTANG

SEQ ID NO: 33489 - protein, 7 aa, synthetic construct
GTQSKSP

SEQ ID NO: 33490 - protein, 7 aa, synthetic construct
KTTPASN

SEQ ID NO: 33491 - protein, 7 aa, synthetic construct
TPTNAKS

SEQ ID NO: 33492 - protein, 7 aa, synthetic construct
RNAATSS

SEQ ID NO: 33493 - protein, 7 aa, synthetic construct
AKMGLMS

SEQ ID NO: 33494 - protein, 7 aa, synthetic construct
KQQMVAA

SEQ ID NO: 33495 - protein, 7 aa, synthetic construct
RLVPDAG

SEQ ID NO: 33496 - protein, 7 aa, synthetic construct
NKHETKG

SEQ ID NO: 33497 - protein, 7 aa, synthetic construct
GKTMANA

SEQ ID NO: 33498 - protein, 7 aa, synthetic construct
FKNSQAP

SEQ ID NO: 33499 - protein, 7 aa, synthetic construct
GRNTSPA

SEQ ID NO: 33500 - protein, 7 aa, synthetic construct
TVKHPDQ

SEQ ID NO: 33501 - protein, 7 aa, synthetic construct
YGNLGGK

SEQ ID NO: 33502 - protein, 7 aa, synthetic construct
HDRLMPA

SEQ ID NO: 33503 - protein, 7 aa, synthetic construct
NQVNRPG

SEQ ID NO: 33504 - protein, 7 aa, synthetic construct
KSPGSGG

SEQ ID NO: 33505 - protein, 7 aa, synthetic construct
RQKGALE

SEQ ID NO: 33506 - protein, 7 aa, synthetic construct
FKSSQMG

SEQ ID NO: 33507 - protein, 7 aa, synthetic construct
DKVSKTA

SEQ ID NO: 33508 - protein, 7 aa, synthetic construct
YKRDDPS

SEQ ID NO: 33509 - protein, 7 aa, synthetic construct
SRTPQQP

SEQ ID NO: 33510 - protein, 7 aa, synthetic construct
RTNASGP

SEQ ID NO: 33511 - protein, 7 aa, synthetic construct
GPSGKTG

SEQ ID NO: 33512 - protein, 7 aa, synthetic construct
NTKIWQD

SEQ ID NO: 33513 - protein, 7 aa, synthetic construct
LLQGSGG

SEQ ID NO: 33514 - protein, 7 aa, synthetic construct
KPVRDAP

SEQ ID NO: 33515 - protein, 7 aa, synthetic construct
MDRSPRD

SEQ ID NO: 33516 - protein, 7 aa, synthetic construct
YAGFGNN

SEQ ID NO: 33517 - protein, 7 aa, synthetic construct
EGHARPM

SEQ ID NO: 33518 - protein, 7 aa, synthetic construct
NGLKGAQ

SEQ ID NO: 33519 - protein, 7 aa, synthetic construct
PRGGNNP

SEQ ID NO: 33520 - protein, 7 aa, synthetic construct
QSMQHTG

SEQ ID NO: 33521 - protein, 7 aa, synthetic construct
LGKFNNP

SEQ ID NO: 33522 - protein, 7 aa, synthetic construct
RPDKGMG

SEQ ID NO: 33523 - protein, 7 aa, synthetic construct
MTKSQPI

SEQ ID NO: 33524 - protein, 7 aa, synthetic construct
MRPNTIM

SEQ ID NO: 33525 - protein, 7 aa, synthetic construct
IRSPTGG

SEQ ID NO: 33526 - protein, 7 aa, synthetic construct
KYVKHEI

SEQ ID NO: 33527 - protein, 7 aa, synthetic construct
MKKGLDP

SEQ ID NO: 33528 - protein, 7 aa, synthetic construct
SMEKRDS

SEQ ID NO: 33529 - protein, 7 aa, synthetic construct
AKQSGMG

SEQ ID NO: 33530 - protein, 7 aa, synthetic construct
KTQGSTS

SEQ ID NO: 33531 - protein, 7 aa, synthetic construct
ILGTKQT

SEQ ID NO: 33532 - protein, 7 aa, synthetic construct
GAYRTNG

SEQ ID NO: 33533 - protein, 7 aa, synthetic construct
HPISRKE

SEQ ID NO: 33534 - protein, 7 aa, synthetic construct
KSSMAVS

SEQ ID NO: 33535 - protein, 7 aa, synthetic construct
KQSPQAG

SEQ ID NO: 33536 - protein, 7 aa, synthetic construct
GHPIMRA

SEQ ID NO: 33537 - protein, 7 aa, synthetic construct
FMGPGKA

SEQ ID NO: 33538 - protein, 7 aa, synthetic construct
MQKASNA

SEQ ID NO: 33539 - protein, 7 aa, synthetic construct
KDLSTQG

SEQ ID NO: 33540 - protein, 7 aa, synthetic construct
FKSGQTN

SEQ ID NO: 33541 - protein, 7 aa, synthetic construct
APKISKD

SEQ ID NO: 33542 - protein, 7 aa, synthetic construct
KNVNVTA

SEQ ID NO: 33543 - protein, 7 aa, synthetic construct
TPRTGNA

SEQ ID NO: 33544 - protein, 7 aa, synthetic construct
SKGTSAG

SEQ ID NO: 33545 - protein, 7 aa, synthetic construct
IVDFQKQ

SEQ ID NO: 33546 - protein, 7 aa, synthetic construct
RANSTGG

SEQ ID NO: 33547 - protein, 7 aa, synthetic construct
HRKEVLA

SEQ ID NO: 33548 - protein, 7 aa, synthetic construct
TSQKSTG

SEQ ID NO: 33549 - protein, 7 aa, synthetic construct
KAAQGVM

SEQ ID NO: 33550 - protein, 7 aa, synthetic construct
LNKTPLH

SEQ ID NO: 33551 - protein, 7 aa, synthetic construct
FSTGRDS

SEQ ID NO: 33552 - protein, 7 aa, synthetic construct
QRAGGMG

SEQ ID NO: 33553 - protein, 7 aa, synthetic construct
KFNAGSA

SEQ ID NO: 33554 - protein, 7 aa, synthetic construct
YGKNAQS

SEQ ID NO: 33555 - protein, 7 aa, synthetic construct
THIPRTE

SEQ ID NO: 33556 - protein, 7 aa, synthetic construct
GNVVVTK

SEQ ID NO: 33557 - protein, 7 aa, synthetic construct
FGHQRVD

SEQ ID NO: 33558 - protein, 7 aa, synthetic construct
WAGKGQV

SEQ ID NO: 33559 - protein, 7 aa, synthetic construct
TSTIHQS

SEQ ID NO: 33560 - protein, 7 aa, synthetic construct
KTANGAG

SEQ ID NO: 33561 - protein, 7 aa, synthetic construct
KSMNSVA

SEQ ID NO: 33562 - protein, 7 aa, synthetic construct
HSAKAEP

SEQ ID NO: 33563 - protein, 7 aa, synthetic construct
QPPGRFD

SEQ ID NO: 33564 - protein, 7 aa, synthetic construct
NARANQP

SEQ ID NO: 33565 - protein, 7 aa, synthetic construct
KPQSANT

SEQ ID NO: 33566 - protein, 7 aa, synthetic construct
KNMGQVG

SEQ ID NO: 33567 - protein, 7 aa, synthetic construct
NSYKTET

SEQ ID NO: 33568 - protein, 7 aa, synthetic construct
MPQKSMG

SEQ ID NO: 33569 - protein, 7 aa, synthetic construct
LEWMKNE

SEQ ID NO: 33570 - protein, 7 aa, synthetic construct
SYDKTQG

SEQ ID NO: 33571 - protein, 7 aa, synthetic construct
GMGKVQG

SEQ ID NO: 33572 - protein, 7 aa, synthetic construct
GPHVSKW

SEQ ID NO: 33573 - protein, 7 aa, synthetic construct
LGTSRNP

SEQ ID NO: 33574 - protein, 7 aa, synthetic construct
SYEHTKS

SEQ ID NO: 33575 - protein, 7 aa, synthetic construct
NYARSKD

SEQ ID NO: 33576 - protein, 7 aa, synthetic construct
FVGVKTQ

SEQ ID NO: 33577 - protein, 7 aa, synthetic construct
TTAATQA

SEQ ID NO: 33578 - protein, 7 aa, synthetic construct
IMTKFQA

SEQ ID NO: 33579 - protein, 7 aa, synthetic construct
WSHKTTN

SEQ ID NO: 33580 - protein, 7 aa, synthetic construct
LKSTTSA

SEQ ID NO: 33581 - protein, 7 aa, synthetic construct
KTNNGAT

SEQ ID NO: 33582 - protein, 7 aa, synthetic construct
QMKNSAG

SEQ ID NO: 33583 - protein, 7 aa, synthetic construct
YKSHPVN

SEQ ID NO: 33584 - protein, 7 aa, synthetic construct
VKGVSQA

SEQ ID NO: 33585 - protein, 7 aa, synthetic construct
PTNRSME

SEQ ID NO: 33586 - protein, 7 aa, synthetic construct
RPTSSVG

SEQ ID NO: 33587 - protein, 7 aa, synthetic construct
YGKQYDI

SEQ ID NO: 33588 - protein, 7 aa, synthetic construct
WNGMQKP

SEQ ID NO: 33589 - protein, 7 aa, synthetic construct
HGIGKMQ

SEQ ID NO: 33590 - protein, 7 aa, synthetic construct
KMMRAET

SEQ ID NO: 33591 - protein, 7 aa, synthetic construct
SKTNNVA

SEQ ID NO: 33592 - protein, 7 aa, synthetic construct
RQAPYGG

SEQ ID NO: 33593 - protein, 7 aa, synthetic construct
SKPYLSD

SEQ ID NO: 33594 - protein, 7 aa, synthetic construct
NKAGFTG

SEQ ID NO: 33595 - protein, 7 aa, synthetic construct
HNTQSAS

SEQ ID NO: 33596 - protein, 7 aa, synthetic construct
HGAQTHN

SEQ ID NO: 33597 - protein, 7 aa, synthetic construct
EQRPRPQ

SEQ ID NO: 33598 - protein, 7 aa, synthetic construct
MPKHAAG

SEQ ID NO: 33599 - protein, 7 aa, synthetic construct
GAPRQQV

SEQ ID NO: 33600 - protein, 7 aa, synthetic construct
AGVRGQY

SEQ ID NO: 33601 - protein, 7 aa, synthetic construct
DRKAGPD

SEQ ID NO: 33602 - protein, 7 aa, synthetic construct
SVRNVSL

SEQ ID NO: 33603 - protein, 7 aa, synthetic construct
QNARAQA

SEQ ID NO: 33604 - protein, 7 aa, synthetic construct
MLTKDAH

SEQ ID NO: 33605 - protein, 7 aa, synthetic construct
HKPHSTF

SEQ ID NO: 33606 - protein, 7 aa, synthetic construct
FDRPVAR

SEQ ID NO: 33607 - protein, 7 aa, synthetic construct
SKTTNTG

SEQ ID NO: 33608 - protein, 7 aa, synthetic construct
PPSVKAG

SEQ ID NO: 33609 - protein, 7 aa, synthetic construct
YNPHNPL

SEQ ID NO: 33610 - protein, 7 aa, synthetic construct
TKNPSQS

SEQ ID NO: 33611 - protein, 7 aa, synthetic construct
LERGIHT

SEQ ID NO: 33612 - protein, 7 aa, synthetic construct
QKMQAAH

SEQ ID NO: 33613 - protein, 7 aa, synthetic construct
LPTRQHM

SEQ ID NO: 33614 - protein, 7 aa, synthetic construct
VIAKLNG

SEQ ID NO: 33615 - protein, 7 aa, synthetic construct
RKSVADE

SEQ ID NO: 33616 - protein, 7 aa, synthetic construct
TKGTVTL

SEQ ID NO: 33617 - protein, 7 aa, synthetic construct
YPQTKGG

SEQ ID NO: 33618 - protein, 7 aa, synthetic construct
FPNHKTP

SEQ ID NO: 33619 - protein, 7 aa, synthetic construct
ITGTLGG

SEQ ID NO: 33620 - protein, 7 aa, synthetic construct
NKAMNGG

SEQ ID NO: 33621 - protein, 7 aa, synthetic construct
ARAGMDS

SEQ ID NO: 33622 - protein, 7 aa, synthetic construct
ATNGSKA

SEQ ID NO: 33623 - protein, 7 aa, synthetic construct
HKIEGFM

SEQ ID NO: 33624 - protein, 7 aa, synthetic construct
SQTNRQP

SEQ ID NO: 33625 - protein, 7 aa, synthetic construct
RKVGDTL

SEQ ID NO: 33626 - protein, 7 aa, synthetic construct
DKKWNNS

SEQ ID NO: 33627 - protein, 7 aa, synthetic construct
IDHAVRS

SEQ ID NO: 33628 - protein, 7 aa, synthetic construct
THKYPSP

SEQ ID NO: 33629 - protein, 7 aa, synthetic construct
QMNTKMD

SEQ ID NO: 33630 - protein, 7 aa, synthetic construct
DNFKYTA

SEQ ID NO: 33631 - protein, 7 aa, synthetic construct
NKMKAND

SEQ ID NO: 33632 - protein, 7 aa, synthetic construct
FRGGQDM

SEQ ID NO: 33633 - protein, 7 aa, synthetic construct
HNIPMPP

SEQ ID NO: 33634 - protein, 7 aa, synthetic construct
AEDIKRR

SEQ ID NO: 33635 - protein, 7 aa, synthetic construct
MFTRDKA

SEQ ID NO: 33636 - protein, 7 aa, synthetic construct
YKPPRPD

SEQ ID NO: 33637 - protein, 7 aa, synthetic construct
NRITLKE

SEQ ID NO: 33638 - protein, 7 aa, synthetic construct
KGATQNP

SEQ ID NO: 33639 - protein, 7 aa, synthetic construct
KTQPVGG

SEQ ID NO: 33640 - protein, 7 aa, synthetic construct
QHNNRPD

SEQ ID NO: 33641 - protein, 7 aa, synthetic construct
GQNKAGG

SEQ ID NO: 33642 - protein, 7 aa, synthetic construct
EPGVNKG

SEQ ID NO: 33643 - protein, 7 aa, synthetic construct
KNSPVGG

SEQ ID NO: 33644 - protein, 7 aa, synthetic construct
HHNVTRN

SEQ ID NO: 33645 - protein, 7 aa, synthetic construct
YNVAIRQ

SEQ ID NO: 33646 - protein, 7 aa, synthetic construct
RNSGTIA

SEQ ID NO: 33647 - protein, 7 aa, synthetic construct
RPPGTGA

SEQ ID NO: 33648 - protein, 7 aa, synthetic construct
TMKNKDT

SEQ ID NO: 33649 - protein, 7 aa, synthetic construct
KDKAMAG

SEQ ID NO: 33650 - protein, 7 aa, synthetic construct
QKATPSG

SEQ ID NO: 33651 - protein, 7 aa, synthetic construct
KYPGGEW

SEQ ID NO: 33652 - protein, 7 aa, synthetic construct
HQNKAVA

SEQ ID NO: 33653 - protein, 7 aa, synthetic construct
TRGTTVA

SEQ ID NO: 33654 - protein, 7 aa, synthetic construct
WAKTKDE

SEQ ID NO: 33655 - protein, 7 aa, synthetic construct
NKDKTGG

SEQ ID NO: 33656 - protein, 7 aa, synthetic construct
TVIGKKE

SEQ ID NO: 33657 - protein, 7 aa, synthetic construct
TKNGATS

SEQ ID NO: 33658 - protein, 7 aa, synthetic construct
KMGAVAG

SEQ ID NO: 33659 - protein, 7 aa, synthetic construct
VFGRIKD

SEQ ID NO: 33660 - protein, 7 aa, synthetic construct
KISGMSG

SEQ ID NO: 33661 - protein, 7 aa, synthetic construct
LNMGLKA

SEQ ID NO: 33662 - protein, 7 aa, synthetic construct
LPIGPKT

SEQ ID NO: 33663 - protein, 7 aa, synthetic construct
RKDIGNL

SEQ ID NO: 33664 - protein, 7 aa, synthetic construct
FKRSEEG

SEQ ID NO: 33665 - protein, 7 aa, synthetic construct
GSKIPEV

SEQ ID NO: 33666 - protein, 7 aa, synthetic construct
YKDKGGS

SEQ ID NO: 33667 - protein, 7 aa, synthetic construct
GFSISKA

SEQ ID NO: 33668 - protein, 7 aa, synthetic construct
LPGKIPN

SEQ ID NO: 33669 - protein, 7 aa, synthetic construct
IDRGKAA

SEQ ID NO: 33670 - protein, 7 aa, synthetic construct
AGFPNKG

SEQ ID NO: 33671 - protein, 7 aa, synthetic construct
TEQPKKF

SEQ ID NO: 33672 - protein, 7 aa, synthetic construct
GNASIKS

SEQ ID NO: 33673 - protein, 7 aa, synthetic construct
QVKVSQA

SEQ ID NO: 33674 - protein, 7 aa, synthetic construct
GPNKTAG

SEQ ID NO: 33675 - protein, 7 aa, synthetic construct
PNKMHTM

SEQ ID NO: 33676 - protein, 7 aa, synthetic construct
YATGSKG

SEQ ID NO: 33677 - protein, 7 aa, synthetic construct
AGFQMSS

SEQ ID NO: 33678 - protein, 7 aa, synthetic construct
NLDIRGS

SEQ ID NO: 33679 - protein, 7 aa, synthetic construct
KRNPDFM

SEQ ID NO: 33680 - protein, 7 aa, synthetic construct
MGSSRTA

SEQ ID NO: 33681 - protein, 7 aa, synthetic construct
KMAGSSG

SEQ ID NO: 33682 - protein, 7 aa, synthetic construct
AVIRPQP

SEQ ID NO: 33683 - protein, 7 aa, synthetic construct
QKDSKHQ

SEQ ID NO: 33684 - protein, 7 aa, synthetic construct
GPGNPVT

SEQ ID NO: 33685 - protein, 7 aa, synthetic construct
GPKQSSP

SEQ ID NO: 33686 - protein, 7 aa, synthetic construct
PGSIGYK

SEQ ID NO: 33687 - protein, 7 aa, synthetic construct
AGTKTPG

SEQ ID NO: 33688 - protein, 7 aa, synthetic construct
TPKRDPP

SEQ ID NO: 33689 - protein, 7 aa, synthetic construct
AGTPPRD

SEQ ID NO: 33690 - protein, 7 aa, synthetic construct
QNKAVNG

SEQ ID NO: 33691 - protein, 7 aa, synthetic construct
FSNHVAN

SEQ ID NO: 33692 - protein, 7 aa, synthetic construct
RSPQNNG

SEQ ID NO: 33693 - protein, 7 aa, synthetic construct
QRNNANV

SEQ ID NO: 33694 - protein, 7 aa, synthetic construct
ARQVKEN

SEQ ID NO: 33695 - protein, 7 aa, synthetic construct
RSGVTVG

SEQ ID NO: 33696 - protein, 7 aa, synthetic construct
NDPKRGD

SEQ ID NO: 33697 - protein, 7 aa, synthetic construct
ITGSKGA

SEQ ID NO: 33698 - protein, 7 aa, synthetic construct
PIHRHSE

SEQ ID NO: 33699 - protein, 7 aa, synthetic construct
VRTGNSA

SEQ ID NO: 33700 - protein, 7 aa, synthetic construct
SSKQGNH

SEQ ID NO: 33701 - protein, 7 aa, synthetic construct
ELANKQL

SEQ ID NO: 33702 - protein, 7 aa, synthetic construct
RSMGGMG

SEQ ID NO: 33703 - protein, 7 aa, synthetic construct
SPPSTRP

SEQ ID NO: 33704 - protein, 7 aa, synthetic construct
VRPDTTA

SEQ ID NO: 33705 - protein, 7 aa, synthetic construct
RQNRTSE

SEQ ID NO: 33706 - protein, 7 aa, synthetic construct
KDSGKSA

SEQ ID NO: 33707 - protein, 7 aa, synthetic construct
TNNRSSA

SEQ ID NO: 33708 - protein, 7 aa, synthetic construct
MRQADSR

SEQ ID NO: 33709 - protein, 7 aa, synthetic construct
TLKTSGA

SEQ ID NO: 33710 - protein, 7 aa, synthetic construct
TAHSLRE

SEQ ID NO: 33711 - protein, 7 aa, synthetic construct
NKMPSSG

SEQ ID NO: 33712 - protein, 7 aa, synthetic construct
PKAQSIG

SEQ ID NO: 33713 - protein, 7 aa, synthetic construct
LTRNNND

SEQ ID NO: 33714 - protein, 7 aa, synthetic construct
YATKQSI

SEQ ID NO: 33715 - protein, 7 aa, synthetic construct
SQGNNRS

SEQ ID NO: 33716 - protein, 7 aa, synthetic construct
FKNNVSS

SEQ ID NO: 33717 - protein, 7 aa, synthetic construct
QGSKTVA

SEQ ID NO: 33718 - protein, 7 aa, synthetic construct
RQQATQG

SEQ ID NO: 33719 - protein, 7 aa, synthetic construct
QQTTSSG

SEQ ID NO: 33720 - protein, 7 aa, synthetic construct
TKNQASS

SEQ ID NO: 33721 - protein, 7 aa, synthetic construct
WSGKTHV

SEQ ID NO: 33722 - protein, 7 aa, synthetic construct
STKQPHG

SEQ ID NO: 33723 - protein, 7 aa, synthetic construct
MGKAVNG

SEQ ID NO: 33724 - protein, 7 aa, synthetic construct
MKQQNKI

SEQ ID NO: 33725 - protein, 7 aa, synthetic construct
QNNSRNG

SEQ ID NO: 33726 - protein, 7 aa, synthetic construct
YVMGAKA

SEQ ID NO: 33727 - protein, 7 aa, synthetic construct
MIGPERR

SEQ ID NO: 33728 - protein, 7 aa, synthetic construct
YPTTMKV

SEQ ID NO: 33729 - protein, 7 aa, synthetic construct
TSTKTQP

SEQ ID NO: 33730 - protein, 7 aa, synthetic construct
DTLYNKA

SEQ ID NO: 33731 - protein, 7 aa, synthetic construct
RVDGRGN

SEQ ID NO: 33732 - protein, 7 aa, synthetic construct
KNYPNNG

SEQ ID NO: 33733 - protein, 7 aa, synthetic construct
KHIGVSG

SEQ ID NO: 33734 - protein, 7 aa, synthetic construct
TTGKVTP

SEQ ID NO: 33735 - protein, 7 aa, synthetic construct
GNKSLSI

SEQ ID NO: 33736 - protein, 7 aa, synthetic construct
KAGSYSV

SEQ ID NO: 33737 - protein, 7 aa, synthetic construct
GNKVTTG

SEQ ID NO: 33738 - protein, 7 aa, synthetic construct
LNGRMAM

SEQ ID NO: 33739 - protein, 7 aa, synthetic construct
AAGYKFG

SEQ ID NO: 33740 - protein, 7 aa, synthetic construct
DGTMRPP

SEQ ID NO: 33741 - protein, 7 aa, synthetic construct
GKSQTNA

SEQ ID NO: 33742 - protein, 7 aa, synthetic construct
QNTGRTA

SEQ ID NO: 33743 - protein, 7 aa, synthetic construct
YNKTPAG

SEQ ID NO: 33744 - protein, 7 aa, synthetic construct
MTKMNEG

SEQ ID NO: 33745 - protein, 7 aa, synthetic construct
VNNRAGG

SEQ ID NO: 33746 - protein, 7 aa, synthetic construct
HQGRLMA

SEQ ID NO: 33747 - protein, 7 aa, synthetic construct
NRVVLHD

SEQ ID NO: 33748 - protein, 7 aa, synthetic construct
ILPVGQQ

SEQ ID NO: 33749 - protein, 7 aa, synthetic construct
TNKATQG

SEQ ID NO: 33750 - protein, 7 aa, synthetic construct
TNTQNKA

SEQ ID NO: 33751 - protein, 7 aa, synthetic construct
GPGTKPG

SEQ ID NO: 33752 - protein, 7 aa, synthetic construct
GQFKTLD

SEQ ID NO: 33753 - protein, 7 aa, synthetic construct
TQMDIRS

SEQ ID NO: 33754 - protein, 7 aa, synthetic construct
KSNTGSS

SEQ ID NO: 33755 - protein, 7 aa, synthetic construct
QAKPPTG

SEQ ID NO: 33756 - protein, 7 aa, synthetic construct
PYRGKED

SEQ ID NO: 33757 - protein, 7 aa, synthetic construct
RDRFADH

SEQ ID NO: 33758 - protein, 7 aa, synthetic construct
GKTDKQS

SEQ ID NO: 33759 - protein, 7 aa, synthetic construct
SNAIKPC

SEQ ID NO: 33760 - protein, 7 aa, synthetic construct
HQKGSNF

SEQ ID NO: 33761 - protein, 7 aa, synthetic construct
NSSKQVG

SEQ ID NO: 33762 - protein, 7 aa, synthetic construct
NIKLKPV

SEQ ID NO: 33763 - protein, 7 aa, synthetic construct
QEYKKQP

SEQ ID NO: 33764 - protein, 7 aa, synthetic construct
YSKVRGE

SEQ ID NO: 33765 - protein, 7 aa, synthetic construct
TKNPPGG

SEQ ID NO: 33766 - protein, 7 aa, synthetic construct
PGVTGLK

SEQ ID NO: 33767 - protein, 7 aa, synthetic construct
YTKFGQD

SEQ ID NO: 33768 - protein, 7 aa, synthetic construct
KPHAQTG

SEQ ID NO: 33769 - protein, 7 aa, synthetic construct
FPMVGKD

SEQ ID NO: 33770 - protein, 7 aa, synthetic construct
KMVAGAN

SEQ ID NO: 33771 - protein, 7 aa, synthetic construct
MQGAHKN

SEQ ID NO: 33772 - protein, 7 aa, synthetic construct
KIPTAVY

SEQ ID NO: 33773 - protein, 7 aa, synthetic construct
GSGPLAE

SEQ ID NO: 33774 - protein, 7 aa, synthetic construct
RTSNNNG

SEQ ID NO: 33775 - protein, 7 aa, synthetic construct
GKSAQNG

SEQ ID NO: 33776 - protein, 7 aa, synthetic construct
RPLSNTG

SEQ ID NO: 33777 - protein, 7 aa, synthetic construct
QAKVNDR

SEQ ID NO: 33778 - protein, 7 aa, synthetic construct
FSNKPHQ

SEQ ID NO: 33779 - protein, 7 aa, synthetic construct
GKKDAGG

SEQ ID NO: 33780 - protein, 7 aa, synthetic construct
KPTHLDT

SEQ ID NO: 33781 - protein, 7 aa, synthetic construct
KPAMVGG

SEQ ID NO: 33782 - protein, 7 aa, synthetic construct
GKSTTMG

SEQ ID NO: 33783 - protein, 7 aa, synthetic construct
IARHTGI

SEQ ID NO: 33784 - protein, 7 aa, synthetic construct
KLGQGNS

SEQ ID NO: 33785 - protein, 7 aa, synthetic construct
KVTSQQA

SEQ ID NO: 33786 - protein, 7 aa, synthetic construct
SLQASGR

SEQ ID NO: 33787 - protein, 7 aa, synthetic construct
YAANRSQ

SEQ ID NO: 33788 - protein, 7 aa, synthetic construct
KPQALVG

SEQ ID NO: 33789 - protein, 7 aa, synthetic construct
YGMGKPS

SEQ ID NO: 33790 - protein, 7 aa, synthetic construct
YKPQGWQ

SEQ ID NO: 33791 - protein, 7 aa, synthetic construct
LKGVGTA

SEQ ID NO: 33792 - protein, 7 aa, synthetic construct
DYGKMKS

SEQ ID NO: 33793 - protein, 7 aa, synthetic construct
KVAGNQI

SEQ ID NO: 33794 - protein, 7 aa, synthetic construct
HQFIGKG

SEQ ID NO: 33795 - protein, 7 aa, synthetic construct
NGNQTKG

SEQ ID NO: 33796 - protein, 7 aa, synthetic construct
QSMAVKA

SEQ ID NO: 33797 - protein, 7 aa, synthetic construct
TFQYQSP

SEQ ID NO: 33798 - protein, 7 aa, synthetic construct
IKSYNHN

SEQ ID NO: 33799 - protein, 7 aa, synthetic construct
FKDNKSG

SEQ ID NO: 33800 - protein, 7 aa, synthetic construct
FNPQKQA

SEQ ID NO: 33801 - protein, 7 aa, synthetic construct
LQQAQGG

SEQ ID NO: 33802 - protein, 7 aa, synthetic construct
KFNASLV

SEQ ID NO: 33803 - protein, 7 aa, synthetic construct
RNNNGMG

SEQ ID NO: 33804 - protein, 7 aa, synthetic construct
YPGGKTS

SEQ ID NO: 33805 - protein, 7 aa, synthetic construct
WRNMDQG

SEQ ID NO: 33806 - protein, 7 aa, synthetic construct
KAQVMAE

SEQ ID NO: 33807 - protein, 7 aa, synthetic construct
SSQQRNG

SEQ ID NO: 33808 - protein, 7 aa, synthetic construct
YPLDSKN

SEQ ID NO: 33809 - protein, 7 aa, synthetic construct
RGSTNMG

SEQ ID NO: 33810 - protein, 7 aa, synthetic construct
MQKQRVE

SEQ ID NO: 33811 - protein, 7 aa, synthetic construct
IVMARQE

SEQ ID NO: 33812 - protein, 7 aa, synthetic construct
DPIRNKH

SEQ ID NO: 33813 - protein, 7 aa, synthetic construct
HGKPSMP

SEQ ID NO: 33814 - protein, 7 aa, synthetic construct
GTNVRGG

SEQ ID NO: 33815 - protein, 7 aa, synthetic construct
SSTSGIR

SEQ ID NO: 33816 - protein, 7 aa, synthetic construct
IKAVQVA

SEQ ID NO: 33817 - protein, 7 aa, synthetic construct
DPKSKQF

SEQ ID NO: 33818 - protein, 7 aa, synthetic construct
RDKSANA

SEQ ID NO: 33819 - protein, 7 aa, synthetic construct
TGPYNPP

SEQ ID NO: 33820 - protein, 7 aa, synthetic construct
KPAMSVG

SEQ ID NO: 33821 - protein, 7 aa, synthetic construct
TPRIGNG

SEQ ID NO: 33822 - protein, 7 aa, synthetic construct
SYRSVEG

SEQ ID NO: 33823 - protein, 7 aa, synthetic construct
FAHSNTL

SEQ ID NO: 33824 - protein, 7 aa, synthetic construct
THGVKAA

SEQ ID NO: 33825 - protein, 7 aa, synthetic construct
NHVKQGN

SEQ ID NO: 33826 - protein, 7 aa, synthetic construct
NKPPMGA

SEQ ID NO: 33827 - protein, 7 aa, synthetic construct
IAKAKTE

SEQ ID NO: 33828 - protein, 7 aa, synthetic construct
SNQRGNG

SEQ ID NO: 33829 - protein, 7 aa, synthetic construct
KPSNMAA

SEQ ID NO: 33830 - protein, 7 aa, synthetic construct
NKSTTQA

SEQ ID NO: 33831 - protein, 7 aa, synthetic construct
GSKFTIA

SEQ ID NO: 33832 - protein, 7 aa, synthetic construct
MNQFKEV

SEQ ID NO: 33833 - protein, 7 aa, synthetic construct
RHNSLTE

SEQ ID NO: 33834 - protein, 7 aa, synthetic construct
SKAQTSG

SEQ ID NO: 33835 - protein, 7 aa, synthetic construct
DKVHHFA

SEQ ID NO: 33836 - protein, 7 aa, synthetic construct
RAQHMPH

SEQ ID NO: 33837 - protein, 7 aa, synthetic construct
KSQNSQA

SEQ ID NO: 33838 - protein, 7 aa, synthetic construct
GGSAKVG

SEQ ID NO: 33839 - protein, 7 aa, synthetic construct
TKGHMAG

SEQ ID NO: 33840 - protein, 7 aa, synthetic construct
TNRHPSM

SEQ ID NO: 33841 - protein, 7 aa, synthetic construct
LHKNAMG

SEQ ID NO: 33842 - protein, 7 aa, synthetic construct
NKTMQNA

SEQ ID NO: 33843 - protein, 7 aa, synthetic construct
RQSAALN

SEQ ID NO: 33844 - protein, 7 aa, synthetic construct
WGRDKSA

SEQ ID NO: 33845 - protein, 7 aa, synthetic construct
PKAGNFG

SEQ ID NO: 33846 - protein, 7 aa, synthetic construct
KATMTRV

SEQ ID NO: 33847 - protein, 7 aa, synthetic construct
YKQQSSN

SEQ ID NO: 33848 - protein, 7 aa, synthetic construct
RNGQPTP

SEQ ID NO: 33849 - protein, 7 aa, synthetic construct
QGKYAEP

SEQ ID NO: 33850 - protein, 7 aa, synthetic construct
VLKYTDH

SEQ ID NO: 33851 - protein, 7 aa, synthetic construct
MARPTGV

SEQ ID NO: 33852 - protein, 7 aa, synthetic construct
RTSTHEI

SEQ ID NO: 33853 - protein, 7 aa, synthetic construct
MASRTQA

SEQ ID NO: 33854 - protein, 7 aa, synthetic construct
IPAMAHS

SEQ ID NO: 33855 - protein, 7 aa, synthetic construct
VAKSNGG

SEQ ID NO: 33856 - protein, 7 aa, synthetic construct
LHTGYPS

SEQ ID NO: 33857 - protein, 7 aa, synthetic construct
GTRGVSG

SEQ ID NO: 33858 - protein, 7 aa, synthetic construct
QTHMGEK

SEQ ID NO: 33859 - protein, 7 aa, synthetic construct
KTYETVG

SEQ ID NO: 33860 - protein, 7 aa, synthetic construct
ADGVTRA

SEQ ID NO: 33861 - protein, 7 aa, synthetic construct
KMQPNQS

SEQ ID NO: 33862 - protein, 7 aa, synthetic construct
GHNSLKG

SEQ ID NO: 33863 - protein, 7 aa, synthetic construct
NSGQMKA

SEQ ID NO: 33864 - protein, 7 aa, synthetic construct
PTNRQGA

SEQ ID NO: 33865 - protein, 7 aa, synthetic construct
KLNSAGG

SEQ ID NO: 33866 - protein, 7 aa, synthetic construct
IRQNSGY

SEQ ID NO: 33867 - protein, 7 aa, synthetic construct
QGETRNN

SEQ ID NO: 33868 - protein, 7 aa, synthetic construct
FKNQYPA

SEQ ID NO: 33869 - protein, 7 aa, synthetic construct
KASSPGG

SEQ ID NO: 33870 - protein, 7 aa, synthetic construct
SSNFGKS

SEQ ID NO: 33871 - protein, 7 aa, synthetic construct
PIRGHAE

SEQ ID NO: 33872 - protein, 7 aa, synthetic construct
QMRTNQP

SEQ ID NO: 33873 - protein, 7 aa, synthetic construct
YNKGDSI

SEQ ID NO: 33874 - protein, 7 aa, synthetic construct
TMNARQA

SEQ ID NO: 33875 - protein, 7 aa, synthetic construct
VKANHTP

SEQ ID NO: 33876 - protein, 7 aa, synthetic construct
FKPSTAP

SEQ ID NO: 33877 - protein, 7 aa, synthetic construct
NPTNRSG

SEQ ID NO: 33878 - protein, 7 aa, synthetic construct
FKSNMQA

SEQ ID NO: 33879 - protein, 7 aa, synthetic construct
FASHIAP

SEQ ID NO: 33880 - protein, 7 aa, synthetic construct
HRGLNLE

SEQ ID NO: 33881 - protein, 7 aa, synthetic construct
WKSGNLT

SEQ ID NO: 33882 - protein, 7 aa, synthetic construct
GRNHIMP

SEQ ID NO: 33883 - protein, 7 aa, synthetic construct
IHGNYGA

SEQ ID NO: 33884 - protein, 7 aa, synthetic construct
GFGNKTG

SEQ ID NO: 33885 - protein, 7 aa, synthetic construct
PQTASRG

SEQ ID NO: 33886 - protein, 7 aa, synthetic construct
EPNRIAP

SEQ ID NO: 33887 - protein, 7 aa, synthetic construct
QTPQRGA

SEQ ID NO: 33888 - protein, 7 aa, synthetic construct
QNTARQG

SEQ ID NO: 33889 - protein, 7 aa, synthetic construct
TKTSSVP

SEQ ID NO: 33890 - protein, 7 aa, synthetic construct
MFGNLSP

SEQ ID NO: 33891 - protein, 7 aa, synthetic construct
QKNNPSG

SEQ ID NO: 33892 - protein, 7 aa, synthetic construct
FKKNGVE

SEQ ID NO: 33893 - protein, 7 aa, synthetic construct
SRNSVQT

SEQ ID NO: 33894 - protein, 7 aa, synthetic construct
ISSTHSG

SEQ ID NO: 33895 - protein, 7 aa, synthetic construct
IIEKMHF

SEQ ID NO: 33896 - protein, 7 aa, synthetic construct
YSHAKDP

SEQ ID NO: 33897 - protein, 7 aa, synthetic construct
MGMGRGT

SEQ ID NO: 33898 - protein, 7 aa, synthetic construct
RTNAGKD

SEQ ID NO: 33899 - protein, 7 aa, synthetic construct
YPNQVKG

SEQ ID NO: 33900 - protein, 7 aa, synthetic construct
HPRYEQA

SEQ ID NO: 33901 - protein, 7 aa, synthetic construct
PTDRKQM

SEQ ID NO: 33902 - protein, 7 aa, synthetic construct
ANNKQNG

SEQ ID NO: 33903 - protein, 7 aa, synthetic construct
IKTNNNV

SEQ ID NO: 33904 - protein, 7 aa, synthetic construct
QNIHGPS

SEQ ID NO: 33905 - protein, 7 aa, synthetic construct
RMGAAPS

SEQ ID NO: 33906 - protein, 7 aa, synthetic construct
YKPQMSN

SEQ ID NO: 33907 - protein, 7 aa, synthetic construct
QMGKGQF

SEQ ID NO: 33908 - protein, 7 aa, synthetic construct
KNGAVGG

SEQ ID NO: 33909 - protein, 7 aa, synthetic construct
NNIREMG

SEQ ID NO: 33910 - protein, 7 aa, synthetic construct
KNNDAKG

SEQ ID NO: 33911 - protein, 7 aa, synthetic construct
YANHVYS

SEQ ID NO: 33912 - protein, 7 aa, synthetic construct
ITGYMKE

SEQ ID NO: 33913 - protein, 7 aa, synthetic construct
PMRTAQG

SEQ ID NO: 33914 - protein, 7 aa, synthetic construct
QVKVTAP

SEQ ID NO: 33915 - protein, 7 aa, synthetic construct
FSRATDA

SEQ ID NO: 33916 - protein, 7 aa, synthetic construct
YRSEWSA

SEQ ID NO: 33917 - protein, 7 aa, synthetic construct
NERIARD

SEQ ID NO: 33918 - protein, 7 aa, synthetic construct
VTRNNPA

SEQ ID NO: 33919 - protein, 7 aa, synthetic construct
TNSRGTV

SEQ ID NO: 33920 - protein, 7 aa, synthetic construct
MFTSSPA

SEQ ID NO: 33921 - protein, 7 aa, synthetic construct
KRVNELA

SEQ ID NO: 33922 - protein, 7 aa, synthetic construct
KAYNGQA

SEQ ID NO: 33923 - protein, 7 aa, synthetic construct
IAMGKTN

SEQ ID NO: 33924 - protein, 7 aa, synthetic construct
PTNKGTG

SEQ ID NO: 33925 - protein, 7 aa, synthetic construct
GTPRMVA

SEQ ID NO: 33926 - protein, 7 aa, synthetic construct
TVKSQQS

SEQ ID NO: 33927 - protein, 7 aa, synthetic construct
PQSMKIA

SEQ ID NO: 33928 - protein, 7 aa, synthetic construct
NQARSVG

SEQ ID NO: 33929 - protein, 7 aa, synthetic construct
EIIRNGN

SEQ ID NO: 33930 - protein, 7 aa, synthetic construct
MGGKVQA

SEQ ID NO: 33931 - protein, 7 aa, synthetic construct
TNRGSVP

SEQ ID NO: 33932 - protein, 7 aa, synthetic construct
QKSNQTA

SEQ ID NO: 33933 - protein, 7 aa, synthetic construct
LKIGKIS

SEQ ID NO: 33934 - protein, 7 aa, synthetic construct
MQPTKSS

SEQ ID NO: 33935 - protein, 7 aa, synthetic construct
PHNTHKQ

SEQ ID NO: 33936 - protein, 7 aa, synthetic construct
MQPGKNY

SEQ ID NO: 33937 - protein, 7 aa, synthetic construct
SVKSSTG

SEQ ID NO: 33938 - protein, 7 aa, synthetic construct
KFGQTSG

SEQ ID NO: 33939 - protein, 7 aa, synthetic construct
IKPAHSP

SEQ ID NO: 33940 - protein, 7 aa, synthetic construct
YHPKMPQ

SEQ ID NO: 33941 - protein, 7 aa, synthetic construct
VFDGRTG

SEQ ID NO: 33942 - protein, 7 aa, synthetic construct
YPRAQVG

SEQ ID NO: 33943 - protein, 7 aa, synthetic construct
KPGSMTP

SEQ ID NO: 33944 - protein, 7 aa, synthetic construct
LGRSVMP

SEQ ID NO: 33945 - protein, 7 aa, synthetic construct
NKPSPGA

SEQ ID NO: 33946 - protein, 7 aa, synthetic construct
YQGRQDS

SEQ ID NO: 33947 - protein, 7 aa, synthetic construct
IKGNSQG

SEQ ID NO: 33948 - protein, 7 aa, synthetic construct
SAQKMDR

SEQ ID NO: 33949 - protein, 7 aa, synthetic construct
AYLKMKD

SEQ ID NO: 33950 - protein, 7 aa, synthetic construct
RQPSGSV

SEQ ID NO: 33951 - protein, 7 aa, synthetic construct
AKGGRES

SEQ ID NO: 33952 - protein, 7 aa, synthetic construct
SDTYSKI

SEQ ID NO: 33953 - protein, 7 aa, synthetic construct
QSNKSQA

SEQ ID NO: 33954 - protein, 7 aa, synthetic construct
NTSQTKV

SEQ ID NO: 33955 - protein, 7 aa, synthetic construct
KTQVSNA

SEQ ID NO: 33956 - protein, 7 aa, synthetic construct
WGKKNDG

SEQ ID NO: 33957 - protein, 7 aa, synthetic construct
CMSTRCE

SEQ ID NO: 33958 - protein, 7 aa, synthetic construct
NGPKPMT

SEQ ID NO: 33959 - protein, 7 aa, synthetic construct
QTHRPGL

SEQ ID NO: 33960 - protein, 7 aa, synthetic construct
MISQPRS

SEQ ID NO: 33961 - protein, 7 aa, synthetic construct
YNSNKAG

SEQ ID NO: 33962 - protein, 7 aa, synthetic construct
QKHPVGF

SEQ ID NO: 33963 - protein, 7 aa, synthetic construct
THAAVKD

SEQ ID NO: 33964 - protein, 7 aa, synthetic construct
IMKDRIA

SEQ ID NO: 33965 - protein, 7 aa, synthetic construct
TSKTATM

SEQ ID NO: 33966 - protein, 7 aa, synthetic construct
KNSSVQM

SEQ ID NO: 33967 - protein, 7 aa, synthetic construct
PYKKTEH

SEQ ID NO: 33968 - protein, 7 aa, synthetic construct
RPGATNS

SEQ ID NO: 33969 - protein, 7 aa, synthetic construct
TKAPNRE

SEQ ID NO: 33970 - protein, 7 aa, synthetic construct
KPQSGGS

SEQ ID NO: 33971 - protein, 7 aa, synthetic construct
MGHRLGA

SEQ ID NO: 33972 - protein, 7 aa, synthetic construct
ELAGRRE

SEQ ID NO: 33973 - protein, 7 aa, synthetic construct
HAASSKA

SEQ ID NO: 33974 - protein, 7 aa, synthetic construct
GQGVFHQ

SEQ ID NO: 33975 - protein, 7 aa, synthetic construct
FNKSSAS

SEQ ID NO: 33976 - protein, 7 aa, synthetic construct
IYPRGGN

SEQ ID NO: 33977 - protein, 7 aa, synthetic construct
PRTQNPM

SEQ ID NO: 33978 - protein, 7 aa, synthetic construct
EKNGAVS

SEQ ID NO: 33979 - protein, 7 aa, synthetic construct
STQSQKG

SEQ ID NO: 33980 - protein, 7 aa, synthetic construct
VWSGKSS

SEQ ID NO: 33981 - protein, 7 aa, synthetic construct
RGADPNQ

SEQ ID NO: 33982 - protein, 7 aa, synthetic construct
VQGRNLA

SEQ ID NO: 33983 - protein, 7 aa, synthetic construct
FNARQGE

SEQ ID NO: 33984 - protein, 7 aa, synthetic construct
NHPPFSK

SEQ ID NO: 33985 - protein, 7 aa, synthetic construct
VNSKSQG

SEQ ID NO: 33986 - protein, 7 aa, synthetic construct
KQPSNYG

SEQ ID NO: 33987 - protein, 7 aa, synthetic construct
LQMKPVS

SEQ ID NO: 33988 - protein, 7 aa, synthetic construct
TKARGDP

SEQ ID NO: 33989 - protein, 7 aa, synthetic construct
GKWVSEN

SEQ ID NO: 33990 - protein, 7 aa, synthetic construct
VNHANAG

SEQ ID NO: 33991 - protein, 7 aa, synthetic construct
KPATMKD

SEQ ID NO: 33992 - protein, 7 aa, synthetic construct
EASKLRY

SEQ ID NO: 33993 - protein, 7 aa, synthetic construct
RGPNISG

SEQ ID NO: 33994 - protein, 7 aa, synthetic construct
SPRTGVY

SEQ ID NO: 33995 - protein, 7 aa, synthetic construct
PRPTAGT

SEQ ID NO: 33996 - protein, 7 aa, synthetic construct
TPPNQYL

SEQ ID NO: 33997 - protein, 7 aa, synthetic construct
TAPTRTG

SEQ ID NO: 33998 - protein, 7 aa, synthetic construct
QQRTGVG

SEQ ID NO: 33999 - protein, 7 aa, synthetic construct
WNTGKSA

SEQ ID NO: 34000 - protein, 7 aa, synthetic construct
NTKAMRD

SEQ ID NO: 34001 - protein, 7 aa, synthetic construct
NKTHQSL

SEQ ID NO: 34002 - protein, 7 aa, synthetic construct
VRGVVAV

SEQ ID NO: 34003 - protein, 7 aa, synthetic construct
QSARSQI

SEQ ID NO: 34004 - protein, 7 aa, synthetic construct
TKNQVSA

SEQ ID NO: 34005 - protein, 7 aa, synthetic construct
LKPAVGM

SEQ ID NO: 34006 - protein, 7 aa, synthetic construct
SASFTVA

SEQ ID NO: 34007 - protein, 7 aa, synthetic construct
IHQRIMP

SEQ ID NO: 34008 - protein, 7 aa, synthetic construct
SSLTKNY

SEQ ID NO: 34009 - protein, 7 aa, synthetic construct
IKKPHTD

SEQ ID NO: 34010 - protein, 7 aa, synthetic construct
FRNNHEL

SEQ ID NO: 34011 - protein, 7 aa, synthetic construct
THMRPVE

SEQ ID NO: 34012 - protein, 7 aa, synthetic construct
SGKTNQV

SEQ ID NO: 34013 - protein, 7 aa, synthetic construct
YSSSAKV

SEQ ID NO: 34014 - protein, 7 aa, synthetic construct
LANWEKN

SEQ ID NO: 34015 - protein, 7 aa, synthetic construct
FPKSTAG

SEQ ID NO: 34016 - protein, 7 aa, synthetic construct
KSNNSQS

SEQ ID NO: 34017 - protein, 7 aa, synthetic construct
EPQFPKT

SEQ ID NO: 34018 - protein, 7 aa, synthetic construct
DRRSQEA

SEQ ID NO: 34019 - protein, 7 aa, synthetic construct
LVRGTMT

SEQ ID NO: 34020 - protein, 7 aa, synthetic construct
TNKNSTG

SEQ ID NO: 34021 - protein, 7 aa, synthetic construct
KEGHMVG

SEQ ID NO: 34022 - protein, 7 aa, synthetic construct
YKDSDQI

SEQ ID NO: 34023 - protein, 7 aa, synthetic construct
QQRQTNP

SEQ ID NO: 34024 - protein, 7 aa, synthetic construct
WKMQNKD

SEQ ID NO: 34025 - protein, 7 aa, synthetic construct
NKSAIKD

SEQ ID NO: 34026 - protein, 7 aa, synthetic construct
DVHHHKP

SEQ ID NO: 34027 - protein, 7 aa, synthetic construct
QKDPGRA

SEQ ID NO: 34028 - protein, 7 aa, synthetic construct
QASRAVI

SEQ ID NO: 34029 - protein, 7 aa, synthetic construct
TMHARPE

SEQ ID NO: 34030 - protein, 7 aa, synthetic construct
NRSSNAP

SEQ ID NO: 34031 - protein, 7 aa, synthetic construct
WGTQRDG

SEQ ID NO: 34032 - protein, 7 aa, synthetic construct
TNTFPGP

SEQ ID NO: 34033 - protein, 7 aa, synthetic construct
GANQRMG

SEQ ID NO: 34034 - protein, 7 aa, synthetic construct
TRQPAYG

SEQ ID NO: 34035 - protein, 7 aa, synthetic construct
KSQQTGG

SEQ ID NO: 34036 - protein, 7 aa, synthetic construct
MSKMSAG

SEQ ID NO: 34037 - protein, 7 aa, synthetic construct
KKSDGTS

SEQ ID NO: 34038 - protein, 7 aa, synthetic construct
VNVVARE

SEQ ID NO: 34039 - protein, 7 aa, synthetic construct
ANIHVNK

SEQ ID NO: 34040 - protein, 7 aa, synthetic construct
KEKTMSG

SEQ ID NO: 34041 - protein, 7 aa, synthetic construct
KKWEPPE

SEQ ID NO: 34042 - protein, 7 aa, synthetic construct
MMGAARN

SEQ ID NO: 34043 - protein, 7 aa, synthetic construct
NKSQSMN

SEQ ID NO: 34044 - protein, 7 aa, synthetic construct
QFKGPLH

SEQ ID NO: 34045 - protein, 7 aa, synthetic construct
GPNMVKS

SEQ ID NO: 34046 - protein, 7 aa, synthetic construct
TNRSSPP

SEQ ID NO: 34047 - protein, 7 aa, synthetic construct
TVRQTSP

SEQ ID NO: 34048 - protein, 7 aa, synthetic construct
IRDINKH

SEQ ID NO: 34049 - protein, 7 aa, synthetic construct
ARVANGM

SEQ ID NO: 34050 - protein, 7 aa, synthetic construct
QKSSAQS

SEQ ID NO: 34051 - protein, 7 aa, synthetic construct
MSRMRDE

SEQ ID NO: 34052 - protein, 7 aa, synthetic construct
QKPPQPS

SEQ ID NO: 34053 - protein, 7 aa, synthetic construct
ATGKGNG

SEQ ID NO: 34054 - protein, 7 aa, synthetic construct
RTTSGSP

SEQ ID NO: 34055 - protein, 7 aa, synthetic construct
RMPTNQS

SEQ ID NO: 34056 - protein, 7 aa, synthetic construct
IQNQRQG

SEQ ID NO: 34057 - protein, 7 aa, synthetic construct
VNPRNQG

SEQ ID NO: 34058 - protein, 7 aa, synthetic construct
INRPNKE

SEQ ID NO: 34059 - protein, 7 aa, synthetic construct
PRNAVAG

SEQ ID NO: 34060 - protein, 7 aa, synthetic construct
NTSHQLV

SEQ ID NO: 34061 - protein, 7 aa, synthetic construct
QPPRTGL

SEQ ID NO: 34062 - protein, 7 aa, synthetic construct
TLIQNKF

SEQ ID NO: 34063 - protein, 7 aa, synthetic construct
SQGVTNP

SEQ ID NO: 34064 - protein, 7 aa, synthetic construct
IPNMGNG

SEQ ID NO: 34065 - protein, 7 aa, synthetic construct
YHKAMQN

SEQ ID NO: 34066 - protein, 7 aa, synthetic construct
RMGVGDG

SEQ ID NO: 34067 - protein, 7 aa, synthetic construct
KASASAA

SEQ ID NO: 34068 - protein, 7 aa, synthetic construct
MGKGGKD

SEQ ID NO: 34069 - protein, 7 aa, synthetic construct
KFQNNGA

SEQ ID NO: 34070 - protein, 7 aa, synthetic construct
NMRTGHV

SEQ ID NO: 34071 - protein, 7 aa, synthetic construct
KTSSMMG

SEQ ID NO: 34072 - protein, 7 aa, synthetic construct
SKMAGKE

SEQ ID NO: 34073 - protein, 7 aa, synthetic construct
NRSTSQG

SEQ ID NO: 34074 - protein, 7 aa, synthetic construct
QPRHGPD

SEQ ID NO: 34075 - protein, 7 aa, synthetic construct
VVKLPMK

SEQ ID NO: 34076 - protein, 7 aa, synthetic construct
LHIHSKS

SEQ ID NO: 34077 - protein, 7 aa, synthetic construct
KYDGGQA

SEQ ID NO: 34078 - protein, 7 aa, synthetic construct
RASATMG

SEQ ID NO: 34079 - protein, 7 aa, synthetic construct
QSKQVNA

SEQ ID NO: 34080 - protein, 7 aa, synthetic construct
QRTQVQG

SEQ ID NO: 34081 - protein, 7 aa, synthetic construct
QSGNKQA

SEQ ID NO: 34082 - protein, 7 aa, synthetic construct
GVQRTAP

SEQ ID NO: 34083 - protein, 7 aa, synthetic construct
RNTTSTS

SEQ ID NO: 34084 - protein, 7 aa, synthetic construct
INKNASG

SEQ ID NO: 34085 - protein, 7 aa, synthetic construct
TVGKGVG

SEQ ID NO: 34086 - protein, 7 aa, synthetic construct
MNKMTMD

SEQ ID NO: 34087 - protein, 7 aa, synthetic construct
FRQMGAA

SEQ ID NO: 34088 - protein, 7 aa, synthetic construct
QRATSQP

SEQ ID NO: 34089 - protein, 7 aa, synthetic construct
MNKNAGS

SEQ ID NO: 34090 - protein, 7 aa, synthetic construct
KGNHNQM

SEQ ID NO: 34091 - protein, 7 aa, synthetic construct
SKSPSNG

SEQ ID NO: 34092 - protein, 7 aa, synthetic construct
THATQQN

SEQ ID NO: 34093 - protein, 7 aa, synthetic construct
TSQHTKN

SEQ ID NO: 34094 - protein, 7 aa, synthetic construct
VNVGGGK

SEQ ID NO: 34095 - protein, 7 aa, synthetic construct
GATRTPS

SEQ ID NO: 34096 - protein, 7 aa, synthetic construct
ERQREGK

SEQ ID NO: 34097 - protein, 7 aa, synthetic construct
YHRTADP

SEQ ID NO: 34098 - protein, 7 aa, synthetic construct
HYKGLGE

SEQ ID NO: 34099 - protein, 7 aa, synthetic construct
MIVTGKS

SEQ ID NO: 34100 - protein, 7 aa, synthetic construct
NNRTAPG

SEQ ID NO: 34101 - protein, 7 aa, synthetic construct
RFHADSS

SEQ ID NO: 34102 - protein, 7 aa, synthetic construct
YATRSLD

SEQ ID NO: 34103 - protein, 7 aa, synthetic construct
RSPGSSP

SEQ ID NO: 34104 - protein, 7 aa, synthetic construct
WPGHGSV

SEQ ID NO: 34105 - protein, 7 aa, synthetic construct
MRQNSNP

SEQ ID NO: 34106 - protein, 7 aa, synthetic construct
YSQVKTM

SEQ ID NO: 34107 - protein, 7 aa, synthetic construct
RNTATVG

SEQ ID NO: 34108 - protein, 7 aa, synthetic construct
QMKSGGA

SEQ ID NO: 34109 - protein, 7 aa, synthetic construct
MTNRGQP

SEQ ID NO: 34110 - protein, 7 aa, synthetic construct
MRPNHAT

SEQ ID NO: 34111 - protein, 7 aa, synthetic construct
KQNKEHM

SEQ ID NO: 34112 - protein, 7 aa, synthetic construct
MSIGSMK

SEQ ID NO: 34113 - protein, 7 aa, synthetic construct
TRQQGVT

SEQ ID NO: 34114 - protein, 7 aa, synthetic construct
MDARAKT

SEQ ID NO: 34115 - protein, 7 aa, synthetic construct
TPGYSIP

SEQ ID NO: 34116 - protein, 7 aa, synthetic construct
HHMMAKG

SEQ ID NO: 34117 - protein, 7 aa, synthetic construct
RLDKGGG

SEQ ID NO: 34118 - protein, 7 aa, synthetic construct
WREKTVT

SEQ ID NO: 34119 - protein, 7 aa, synthetic construct
WHNHHPA

SEQ ID NO: 34120 - protein, 7 aa, synthetic construct
IVGVNQN

SEQ ID NO: 34121 - protein, 7 aa, synthetic construct
NSSQSKV

SEQ ID NO: 34122 - protein, 7 aa, synthetic construct
SRVVGSM

SEQ ID NO: 34123 - protein, 7 aa, synthetic construct
ASVGKTP

SEQ ID NO: 34124 - protein, 7 aa, synthetic construct
NKWNEGQ

SEQ ID NO: 34125 - protein, 7 aa, synthetic construct
MFKNAQS

SEQ ID NO: 34126 - protein, 7 aa, synthetic construct
FTKFSPD

SEQ ID NO: 34127 - protein, 7 aa, synthetic construct
TFKETKG

SEQ ID NO: 34128 - protein, 7 aa, synthetic construct
NGLHSLP

SEQ ID NO: 34129 - protein, 7 aa, synthetic construct
ERYGKPS

SEQ ID NO: 34130 - protein, 7 aa, synthetic construct
YSGFQKD

SEQ ID NO: 34131 - protein, 7 aa, synthetic construct
HSSHSKA

SEQ ID NO: 34132 - protein, 7 aa, synthetic construct
YMKSVYA

SEQ ID NO: 34133 - protein, 7 aa, synthetic construct
TRPGISA

SEQ ID NO: 34134 - protein, 7 aa, synthetic construct
TKPSMVA

SEQ ID NO: 34135 - protein, 7 aa, synthetic construct
KPNQASS

SEQ ID NO: 34136 - protein, 7 aa, synthetic construct
HLKDMNY

SEQ ID NO: 34137 - protein, 7 aa, synthetic construct
NKMAHQA

SEQ ID NO: 34138 - protein, 7 aa, synthetic construct
TTSAASV

SEQ ID NO: 34139 - protein, 7 aa, synthetic construct
FQQLSIG

SEQ ID NO: 34140 - protein, 7 aa, synthetic construct
GFGREHA

SEQ ID NO: 34141 - protein, 7 aa, synthetic construct
RSTSTQS

SEQ ID NO: 34142 - protein, 7 aa, synthetic construct
IMAGPNK

SEQ ID NO: 34143 - protein, 7 aa, synthetic construct
QTGGTAP

SEQ ID NO: 34144 - protein, 7 aa, synthetic construct
YPSSKNG

SEQ ID NO: 34145 - protein, 7 aa, synthetic construct
RTAQYAD

SEQ ID NO: 34146 - protein, 7 aa, synthetic construct
YAVLKTQ

SEQ ID NO: 34147 - protein, 7 aa, synthetic construct
GWATHAA

SEQ ID NO: 34148 - protein, 7 aa, synthetic construct
AFQGAKQ

SEQ ID NO: 34149 - protein, 7 aa, synthetic construct
RSPHAPY

SEQ ID NO: 34150 - protein, 7 aa, synthetic construct
VRPSLAG

SEQ ID NO: 34151 - protein, 7 aa, synthetic construct
GIHTVNR

SEQ ID NO: 34152 - protein, 7 aa, synthetic construct
HMVRSQN

SEQ ID NO: 34153 - protein, 7 aa, synthetic construct
QPTKMVG

SEQ ID NO: 34154 - protein, 7 aa, synthetic construct
QGSGTKW

SEQ ID NO: 34155 - protein, 7 aa, synthetic construct
GPRTNSP

SEQ ID NO: 34156 - protein, 7 aa, synthetic construct
VIERPRH

SEQ ID NO: 34157 - protein, 7 aa, synthetic construct
SKSNAGS

SEQ ID NO: 34158 - protein, 7 aa, synthetic construct
SFSAKSP

SEQ ID NO: 34159 - protein, 7 aa, synthetic construct
TGGKTAS

SEQ ID NO: 34160 - protein, 7 aa, synthetic construct
YERQRGD

SEQ ID NO: 34161 - protein, 7 aa, synthetic construct
NKGSSGF

SEQ ID NO: 34162 - protein, 7 aa, synthetic construct
MSSHMNS

SEQ ID NO: 34163 - protein, 7 aa, synthetic construct
MKTQTQG

SEQ ID NO: 34164 - protein, 7 aa, synthetic construct
LKGGPPW

SEQ ID NO: 34165 - protein, 7 aa, synthetic construct
AKNTTAP

SEQ ID NO: 34166 - protein, 7 aa, synthetic construct
FKTTGTA

SEQ ID NO: 34167 - protein, 7 aa, synthetic construct
KATAVQG

SEQ ID NO: 34168 - protein, 7 aa, synthetic construct
KTAGKQE

SEQ ID NO: 34169 - protein, 7 aa, synthetic construct
KTGMASG

SEQ ID NO: 34170 - protein, 7 aa, synthetic construct
HRGLPPP

SEQ ID NO: 34171 - protein, 7 aa, synthetic construct
VANRLQA

SEQ ID NO: 34172 - protein, 7 aa, synthetic construct
MSKNLTP

SEQ ID NO: 34173 - protein, 7 aa, synthetic construct
VKSSSQG

SEQ ID NO: 34174 - protein, 7 aa, synthetic construct
HQRQVTG

SEQ ID NO: 34175 - protein, 7 aa, synthetic construct
STRNMTM

SEQ ID NO: 34176 - protein, 7 aa, synthetic construct
MPRAQAG

SEQ ID NO: 34177 - protein, 7 aa, synthetic construct
LWTGMKE

SEQ ID NO: 34178 - protein, 7 aa, synthetic construct
DGHKILG

SEQ ID NO: 34179 - protein, 7 aa, synthetic construct
NQSARMA

SEQ ID NO: 34180 - protein, 7 aa, synthetic construct
TNKTGQG

SEQ ID NO: 34181 - protein, 7 aa, synthetic construct
FNRQGTA

SEQ ID NO: 34182 - protein, 7 aa, synthetic construct
KAHGPVV

SEQ ID NO: 34183 - protein, 7 aa, synthetic construct
EYRNVPE

SEQ ID NO: 34184 - protein, 7 aa, synthetic construct
FAGVMTS

SEQ ID NO: 34185 - protein, 7 aa, synthetic construct
GKTNTPG

SEQ ID NO: 34186 - protein, 7 aa, synthetic construct
MPANMKA

SEQ ID NO: 34187 - protein, 7 aa, synthetic construct
IGNKPWD

SEQ ID NO: 34188 - protein, 7 aa, synthetic construct
LPAYTKQ

SEQ ID NO: 34189 - protein, 7 aa, synthetic construct
SGTTPKV

SEQ ID NO: 34190 - protein, 7 aa, synthetic construct
KSTSNTA

SEQ ID NO: 34191 - protein, 7 aa, synthetic construct
GMNKSGI

SEQ ID NO: 34192 - protein, 7 aa, synthetic construct
DKRANGT

SEQ ID NO: 34193 - protein, 7 aa, synthetic construct
DQNKWNG

SEQ ID NO: 34194 - protein, 7 aa, synthetic construct
AMTGMRD

SEQ ID NO: 34195 - protein, 7 aa, synthetic construct
MIGKQYH

SEQ ID NO: 34196 - protein, 7 aa, synthetic construct
RAVGNGN

SEQ ID NO: 34197 - protein, 7 aa, synthetic construct
MAPFSAP

SEQ ID NO: 34198 - protein, 7 aa, synthetic construct
NYGNKQA

SEQ ID NO: 34199 - protein, 7 aa, synthetic construct
RAAMGVL

SEQ ID NO: 34200 - protein, 7 aa, synthetic construct
MPWRKEE

SEQ ID NO: 34201 - protein, 7 aa, synthetic construct
HKQQVPS

SEQ ID NO: 34202 - protein, 7 aa, synthetic construct
DLRPLKQ

SEQ ID NO: 34203 - protein, 7 aa, synthetic construct
SNHTQNI

SEQ ID NO: 34204 - protein, 7 aa, synthetic construct
ARHGQQI

SEQ ID NO: 34205 - protein, 7 aa, synthetic construct
RIQSAQT

SEQ ID NO: 34206 - protein, 7 aa, synthetic construct
WDKRIAP

SEQ ID NO: 34207 - protein, 7 aa, synthetic construct
FKSATQN

SEQ ID NO: 34208 - protein, 7 aa, synthetic construct
TVQVGRA

SEQ ID NO: 34209 - protein, 7 aa, synthetic construct
KPSTANS

SEQ ID NO: 34210 - protein, 7 aa, synthetic construct
SAKPHAM

SEQ ID NO: 34211 - protein, 7 aa, synthetic construct
INHVYRG

SEQ ID NO: 34212 - protein, 7 aa, synthetic construct
VRNNQSQ

SEQ ID NO: 34213 - protein, 7 aa, synthetic construct
NRPSEPG

SEQ ID NO: 34214 - protein, 7 aa, synthetic construct
IWTTGTD

SEQ ID NO: 34215 - protein, 7 aa, synthetic construct
YKGAVNG

SEQ ID NO: 34216 - protein, 7 aa, synthetic construct
YISHAKE

SEQ ID NO: 34217 - protein, 7 aa, synthetic construct
QSHQKQW

SEQ ID NO: 34218 - protein, 7 aa, synthetic construct
HVSNTRA

SEQ ID NO: 34219 - protein, 7 aa, synthetic construct
QNVVKGG

SEQ ID NO: 34220 - protein, 7 aa, synthetic construct
MNKYVIQ

SEQ ID NO: 34221 - protein, 7 aa, synthetic construct
YMKSDKP

SEQ ID NO: 34222 - protein, 7 aa, synthetic construct
FTKSLNA

SEQ ID NO: 34223 - protein, 7 aa, synthetic construct
NKVAGSA

SEQ ID NO: 34224 - protein, 7 aa, synthetic construct
LVRSGQA

SEQ ID NO: 34225 - protein, 7 aa, synthetic construct
HMLRDTG

SEQ ID NO: 34226 - protein, 7 aa, synthetic construct
GAGGNKA

SEQ ID NO: 34227 - protein, 7 aa, synthetic construct
TSKSPSG

SEQ ID NO: 34228 - protein, 7 aa, synthetic construct
GTNSRGI

SEQ ID NO: 34229 - protein, 7 aa, synthetic construct
QPKMQHM

SEQ ID NO: 34230 - protein, 7 aa, synthetic construct
VQRSSQN

SEQ ID NO: 34231 - protein, 7 aa, synthetic construct
DVRRVPP

SEQ ID NO: 34232 - protein, 7 aa, synthetic construct
TKNNGQN

SEQ ID NO: 34233 - protein, 7 aa, synthetic construct
NGGNRAG

SEQ ID NO: 34234 - protein, 7 aa, synthetic construct
QKGNSPA

SEQ ID NO: 34235 - protein, 7 aa, synthetic construct
HGPHVKS

SEQ ID NO: 34236 - protein, 7 aa, synthetic construct
KNPSGPP

SEQ ID NO: 34237 - protein, 7 aa, synthetic construct
DAKRQPP

SEQ ID NO: 34238 - protein, 7 aa, synthetic construct
LHRSGMP

SEQ ID NO: 34239 - protein, 7 aa, synthetic construct
RSGHTSF

SEQ ID NO: 34240 - protein, 7 aa, synthetic construct
RSSGVTG

SEQ ID NO: 34241 - protein, 7 aa, synthetic construct
NMPKIPG

SEQ ID NO: 34242 - protein, 7 aa, synthetic construct
QSKSFQG

SEQ ID NO: 34243 - protein, 7 aa, synthetic construct
EMRPSNG

SEQ ID NO: 34244 - protein, 7 aa, synthetic construct
MKASTGS

SEQ ID NO: 34245 - protein, 7 aa, synthetic construct
MTNRPAE

SEQ ID NO: 34246 - protein, 7 aa, synthetic construct
YNGVKQG

SEQ ID NO: 34247 - protein, 7 aa, synthetic construct
FQHREKP

SEQ ID NO: 34248 - protein, 7 aa, synthetic construct
ERNQSHA

SEQ ID NO: 34249 - protein, 7 aa, synthetic construct
TNRTTNG

SEQ ID NO: 34250 - protein, 7 aa, synthetic construct
YQKATSA

SEQ ID NO: 34251 - protein, 7 aa, synthetic construct
LRHHDSG

SEQ ID NO: 34252 - protein, 7 aa, synthetic construct
VVNNKTP

SEQ ID NO: 34253 - protein, 7 aa, synthetic construct
GIGKNGS

SEQ ID NO: 34254 - protein, 7 aa, synthetic construct
QHRNDDR

SEQ ID NO: 34255 - protein, 7 aa, synthetic construct
LNQLMRD

SEQ ID NO: 34256 - protein, 7 aa, synthetic construct
QTGKVAN

SEQ ID NO: 34257 - protein, 7 aa, synthetic construct
TPGAVRA

SEQ ID NO: 34258 - protein, 7 aa, synthetic construct
MSVKAGE

SEQ ID NO: 34259 - protein, 7 aa, synthetic construct
NRYGGPV

SEQ ID NO: 34260 - protein, 7 aa, synthetic construct
MPRDVKG

SEQ ID NO: 34261 - protein, 7 aa, synthetic construct
SKSVSKE

SEQ ID NO: 34262 - protein, 7 aa, synthetic construct
KGNTGSG

SEQ ID NO: 34263 - protein, 7 aa, synthetic construct
QNKWAVA

SEQ ID NO: 34264 - protein, 7 aa, synthetic construct
RIGTTIT

SEQ ID NO: 34265 - protein, 7 aa, synthetic construct
YSSKSSG

SEQ ID NO: 34266 - protein, 7 aa, synthetic construct
YGKSTTS

SEQ ID NO: 34267 - protein, 7 aa, synthetic construct
QSKAQLN

SEQ ID NO: 34268 - protein, 7 aa, synthetic construct
KTKTEWV

SEQ ID NO: 34269 - protein, 7 aa, synthetic construct
SRPSIIN

SEQ ID NO: 34270 - protein, 7 aa, synthetic construct
KNANQNG

SEQ ID NO: 34271 - protein, 7 aa, synthetic construct
GNNRSGA

SEQ ID NO: 34272 - protein, 7 aa, synthetic construct
NKTGSAP

SEQ ID NO: 34273 - protein, 7 aa, synthetic construct
GSVQKAP

SEQ ID NO: 34274 - protein, 7 aa, synthetic construct
QKGGGFA

SEQ ID NO: 34275 - protein, 7 aa, synthetic construct
NSGNNRW

SEQ ID NO: 34276 - protein, 7 aa, synthetic construct
FNKGNSP

SEQ ID NO: 34277 - protein, 7 aa, synthetic construct
GGPNKGS

SEQ ID NO: 34278 - protein, 7 aa, synthetic construct
YSKTIGP

SEQ ID NO: 34279 - protein, 7 aa, synthetic construct
RIDKFHG

SEQ ID NO: 34280 - protein, 7 aa, synthetic construct
TKGGGNA

SEQ ID NO: 34281 - protein, 7 aa, synthetic construct
TSEHKRD

SEQ ID NO: 34282 - protein, 7 aa, synthetic construct
SVKPMGA

SEQ ID NO: 34283 - protein, 7 aa, synthetic construct
ASQHLQV

SEQ ID NO: 34284 - protein, 7 aa, synthetic construct
SHKPTVD

SEQ ID NO: 34285 - protein, 7 aa, synthetic construct
HDRTVRI

SEQ ID NO: 34286 - protein, 7 aa, synthetic construct
STSTKMS

SEQ ID NO: 34287 - protein, 7 aa, synthetic construct
MKKHDEF

SEQ ID NO: 34288 - protein, 7 aa, synthetic construct
AKGAMGP

SEQ ID NO: 34289 - protein, 7 aa, synthetic construct
FSKLNSE

SEQ ID NO: 34290 - protein, 7 aa, synthetic construct
DEHRFKN

SEQ ID NO: 34291 - protein, 7 aa, synthetic construct
MKSQSQA

SEQ ID NO: 34292 - protein, 7 aa, synthetic construct
LRYNTAT

SEQ ID NO: 34293 - protein, 7 aa, synthetic construct
HTQKQDS

SEQ ID NO: 34294 - protein, 7 aa, synthetic construct
QQRGSNP

SEQ ID NO: 34295 - protein, 7 aa, synthetic construct
ATKGSQV

SEQ ID NO: 34296 - protein, 7 aa, synthetic construct
VKPWIQD

SEQ ID NO: 34297 - protein, 7 aa, synthetic construct
RPFGDQP

SEQ ID NO: 34298 - protein, 7 aa, synthetic construct
KDSKAQT

SEQ ID NO: 34299 - protein, 7 aa, synthetic construct
RSSTAAA

SEQ ID NO: 34300 - protein, 7 aa, synthetic construct
SRQSSSG

SEQ ID NO: 34301 - protein, 7 aa, synthetic construct
MHQQERQ

SEQ ID NO: 34302 - protein, 7 aa, synthetic construct
NRPQNSA

SEQ ID NO: 34303 - protein, 7 aa, synthetic construct
MAGKNYL

SEQ ID NO: 34304 - protein, 7 aa, synthetic construct
YPKFRTD

SEQ ID NO: 34305 - protein, 7 aa, synthetic construct
SKLGNAG

SEQ ID NO: 34306 - protein, 7 aa, synthetic construct
NKETLAV

SEQ ID NO: 34307 - protein, 7 aa, synthetic construct
RAKDTNA

SEQ ID NO: 34308 - protein, 7 aa, synthetic construct
NYKHQAT

SEQ ID NO: 34309 - protein, 7 aa, synthetic construct
NQNANIR

SEQ ID NO: 34310 - protein, 7 aa, synthetic construct
TTSQRNS

SEQ ID NO: 34311 - protein, 7 aa, synthetic construct
MKPARPD

SEQ ID NO: 34312 - protein, 7 aa, synthetic construct
MSSWQRE

SEQ ID NO: 34313 - protein, 7 aa, synthetic construct
DFNKNRA

SEQ ID NO: 34314 - protein, 7 aa, synthetic construct
FGTGKAG

SEQ ID NO: 34315 - protein, 7 aa, synthetic construct
VAPRFQP

SEQ ID NO: 34316 - protein, 7 aa, synthetic construct
YSKREAD

SEQ ID NO: 34317 - protein, 7 aa, synthetic construct
KATSIAG

SEQ ID NO: 34318 - protein, 7 aa, synthetic construct
YAVKNVS

SEQ ID NO: 34319 - protein, 7 aa, synthetic construct
RPMSATP

SEQ ID NO: 34320 - protein, 7 aa, synthetic construct
MVQGSSG

SEQ ID NO: 34321 - protein, 7 aa, synthetic construct
NKTGTGS

SEQ ID NO: 34322 - protein, 7 aa, synthetic construct
YSGKMQG

SEQ ID NO: 34323 - protein, 7 aa, synthetic construct
MVGNTMH

SEQ ID NO: 34324 - protein, 7 aa, synthetic construct
AATLYKG

SEQ ID NO: 34325 - protein, 7 aa, synthetic construct
MPRSAAP

SEQ ID NO: 34326 - protein, 7 aa, synthetic construct
YHARIPA

SEQ ID NO: 34327 - protein, 7 aa, synthetic construct
PGKSMTA

SEQ ID NO: 34328 - protein, 7 aa, synthetic construct
GVAYTAG

SEQ ID NO: 34329 - protein, 7 aa, synthetic construct
TKTTTGG

SEQ ID NO: 34330 - protein, 7 aa, synthetic construct
FRGSTVG

SEQ ID NO: 34331 - protein, 7 aa, synthetic construct
FSKIYAA

SEQ ID NO: 34332 - protein, 7 aa, synthetic construct
RVASINN

SEQ ID NO: 34333 - protein, 7 aa, synthetic construct
MQRKEWE

SEQ ID NO: 34334 - protein, 7 aa, synthetic construct
QRIDPVL

SEQ ID NO: 34335 - protein, 7 aa, synthetic construct
RGGTMLQ

SEQ ID NO: 34336 - protein, 7 aa, synthetic construct
VLKLKEY

SEQ ID NO: 34337 - protein, 7 aa, synthetic construct
SKHITTP

SEQ ID NO: 34338 - protein, 7 aa, synthetic construct
LGQGTRY

SEQ ID NO: 34339 - protein, 7 aa, synthetic construct
PRKVEQE

SEQ ID NO: 34340 - protein, 7 aa, synthetic construct
VSARHPD

SEQ ID NO: 34341 - protein, 7 aa, synthetic construct
RTTSQTH

SEQ ID NO: 34342 - protein, 7 aa, synthetic construct
QQRNVGG

SEQ ID NO: 34343 - protein, 7 aa, synthetic construct
QVGFTPN

SEQ ID NO: 34344 - protein, 7 aa, synthetic construct
TMSGRQA

SEQ ID NO: 34345 - protein, 7 aa, synthetic construct
IQRTPER

SEQ ID NO: 34346 - protein, 7 aa, synthetic construct
SARSNMA

SEQ ID NO: 34347 - protein, 7 aa, synthetic construct
KHIQNIG

SEQ ID NO: 34348 - protein, 7 aa, synthetic construct
RPSNSVA

SEQ ID NO: 34349 - protein, 7 aa, synthetic construct
AKSFTQA

SEQ ID NO: 34350 - protein, 7 aa, synthetic construct
REPSYGG

SEQ ID NO: 34351 - protein, 7 aa, synthetic construct
LLAKGTD

SEQ ID NO: 34352 - protein, 7 aa, synthetic construct
GAKSQQA

SEQ ID NO: 34353 - protein, 7 aa, synthetic construct
KDAGQRQ

SEQ ID NO: 34354 - protein, 7 aa, synthetic construct
TNKQTQS

SEQ ID NO: 34355 - protein, 7 aa, synthetic construct
TIGKTGY

SEQ ID NO: 34356 - protein, 7 aa, synthetic construct
RQQSRDY

SEQ ID NO: 34357 - protein, 7 aa, synthetic construct
VHSKVTG

SEQ ID NO: 34358 - protein, 7 aa, synthetic construct
YNGWVKA

SEQ ID NO: 34359 - protein, 7 aa, synthetic construct
KNNPGNP

SEQ ID NO: 34360 - protein, 7 aa, synthetic construct
TKSSVSA

SEQ ID NO: 34361 - protein, 7 aa, synthetic construct
SNQSAIQ

SEQ ID NO: 34362 - protein, 7 aa, synthetic construct
RQGATNA

SEQ ID NO: 34363 - protein, 7 aa, synthetic construct
RHGTGSQ

SEQ ID NO: 34364 - protein, 7 aa, synthetic construct
MAKSANG

SEQ ID NO: 34365 - protein, 7 aa, synthetic construct
TKSSSFL

SEQ ID NO: 34366 - protein, 7 aa, synthetic construct
RLHGTVE

SEQ ID NO: 34367 - protein, 7 aa, synthetic construct
TPSRQAY

SEQ ID NO: 34368 - protein, 7 aa, synthetic construct
QSRPGGG

SEQ ID NO: 34369 - protein, 7 aa, synthetic construct
GGHIKAS

SEQ ID NO: 34370 - protein, 7 aa, synthetic construct
AKNNTDA

SEQ ID NO: 34371 - protein, 7 aa, synthetic construct
NNGVRVG

SEQ ID NO: 34372 - protein, 7 aa, synthetic construct
GLRMKSD

SEQ ID NO: 34373 - protein, 7 aa, synthetic construct
IRASGTE

SEQ ID NO: 34374 - protein, 7 aa, synthetic construct
TMKSNNA

SEQ ID NO: 34375 - protein, 7 aa, synthetic construct
QHNVKMN

SEQ ID NO: 34376 - protein, 7 aa, synthetic construct
GNYAHNM

SEQ ID NO: 34377 - protein, 7 aa, synthetic construct
DSRHANS

SEQ ID NO: 34378 - protein, 7 aa, synthetic construct
KSSGNVP

SEQ ID NO: 34379 - protein, 7 aa, synthetic construct
LGHGPER

SEQ ID NO: 34380 - protein, 7 aa, synthetic construct
FTHVRES

SEQ ID NO: 34381 - protein, 7 aa, synthetic construct
NRGQMSA

SEQ ID NO: 34382 - protein, 7 aa, synthetic construct
VKSYGDH

SEQ ID NO: 34383 - protein, 7 aa, synthetic construct
LGMTNHS

SEQ ID NO: 34384 - protein, 7 aa, synthetic construct
MGNGYQG

SEQ ID NO: 34385 - protein, 7 aa, synthetic construct
MKGGAVA

SEQ ID NO: 34386 - protein, 7 aa, synthetic construct
NPPGTSA

SEQ ID NO: 34387 - protein, 7 aa, synthetic construct
TNNPRQG

SEQ ID NO: 34388 - protein, 7 aa, synthetic construct
ISTVRSA

SEQ ID NO: 34389 - protein, 7 aa, synthetic construct
QKNSPGA

SEQ ID NO: 34390 - protein, 7 aa, synthetic construct
TTSGKIN

SEQ ID NO: 34391 - protein, 7 aa, synthetic construct
SYPGFKP

SEQ ID NO: 34392 - protein, 7 aa, synthetic construct
MRGTNMG

SEQ ID NO: 34393 - protein, 7 aa, synthetic construct
WERKVMD

SEQ ID NO: 34394 - protein, 7 aa, synthetic construct
FKMSSQA

SEQ ID NO: 34395 - protein, 7 aa, synthetic construct
QEPPMRR

SEQ ID NO: 34396 - protein, 7 aa, synthetic construct
WTQQAQG

SEQ ID NO: 34397 - protein, 7 aa, synthetic construct
GQYRNGD

SEQ ID NO: 34398 - protein, 7 aa, synthetic construct
HSKATTG

SEQ ID NO: 34399 - protein, 7 aa, synthetic construct
MRTGQSP

SEQ ID NO: 34400 - protein, 7 aa, synthetic construct
SSGKITA

SEQ ID NO: 34401 - protein, 7 aa, synthetic construct
KRDVGDY

SEQ ID NO: 34402 - protein, 7 aa, synthetic construct
IKHAGDW

SEQ ID NO: 34403 - protein, 7 aa, synthetic construct
NNIKQIQ

SEQ ID NO: 34404 - protein, 7 aa, synthetic construct
ERTVKVG

SEQ ID NO: 34405 - protein, 7 aa, synthetic construct
TGKSMGS

SEQ ID NO: 34406 - protein, 7 aa, synthetic construct
GMAEKKW

SEQ ID NO: 34407 - protein, 7 aa, synthetic construct
AGQQQKG

SEQ ID NO: 34408 - protein, 7 aa, synthetic construct
NPSYQVS

SEQ ID NO: 34409 - protein, 7 aa, synthetic construct
QQVKAVV

SEQ ID NO: 34410 - protein, 7 aa, synthetic construct
QTNRTGG

SEQ ID NO: 34411 - protein, 7 aa, synthetic construct
QKTGSTG

SEQ ID NO: 34412 - protein, 7 aa, synthetic construct
INARDYG

SEQ ID NO: 34413 - protein, 7 aa, synthetic construct
HMPLSRN

SEQ ID NO: 34414 - protein, 7 aa, synthetic construct
FKGGNQT

SEQ ID NO: 34415 - protein, 7 aa, synthetic construct
AKNSMQG

SEQ ID NO: 34416 - protein, 7 aa, synthetic construct
MQKSNQM

SEQ ID NO: 34417 - protein, 7 aa, synthetic construct
KGNSQNG

SEQ ID NO: 34418 - protein, 7 aa, synthetic construct
DKNRHHE

SEQ ID NO: 34419 - protein, 7 aa, synthetic construct
YKNVVTI

SEQ ID NO: 34420 - protein, 7 aa, synthetic construct
RTTTSTA

SEQ ID NO: 34421 - protein, 7 aa, synthetic construct
TKNVAVS

SEQ ID NO: 34422 - protein, 7 aa, synthetic construct
TRGNMTA

SEQ ID NO: 34423 - protein, 7 aa, synthetic construct
LAQRSME

SEQ ID NO: 34424 - protein, 7 aa, synthetic construct
PPMRPDL

SEQ ID NO: 34425 - protein, 7 aa, synthetic construct
QVPGTKG

SEQ ID NO: 34426 - protein, 7 aa, synthetic construct
NRQIKSE

SEQ ID NO: 34427 - protein, 7 aa, synthetic construct
IRQMGSL

SEQ ID NO: 34428 - protein, 7 aa, synthetic construct
NRSQSVP

SEQ ID NO: 34429 - protein, 7 aa, synthetic construct
NTRLAGS

SEQ ID NO: 34430 - protein, 7 aa, synthetic construct
TQRDGDH

SEQ ID NO: 34431 - protein, 7 aa, synthetic construct
IQHIQAP

SEQ ID NO: 34432 - protein, 7 aa, synthetic construct
SRGATGP

SEQ ID NO: 34433 - protein, 7 aa, synthetic construct
NPRQSAE

SEQ ID NO: 34434 - protein, 7 aa, synthetic construct
RPPSGNM

SEQ ID NO: 34435 - protein, 7 aa, synthetic construct
LINQKKE

SEQ ID NO: 34436 - protein, 7 aa, synthetic construct
DRKTVSG

SEQ ID NO: 34437 - protein, 7 aa, synthetic construct
AAMMKNN

SEQ ID NO: 34438 - protein, 7 aa, synthetic construct
LQQGGSP

SEQ ID NO: 34439 - protein, 7 aa, synthetic construct
FGNAPTM

SEQ ID NO: 34440 - protein, 7 aa, synthetic construct
VHANIPN

SEQ ID NO: 34441 - protein, 7 aa, synthetic construct
VQSRAQG

SEQ ID NO: 34442 - protein, 7 aa, synthetic construct
NWTDKQP

SEQ ID NO: 34443 - protein, 7 aa, synthetic construct
QMHKQSS

SEQ ID NO: 34444 - protein, 7 aa, synthetic construct
INGGRMG

SEQ ID NO: 34445 - protein, 7 aa, synthetic construct
MKQGQAG

SEQ ID NO: 34446 - protein, 7 aa, synthetic construct
KANSTAP

SEQ ID NO: 34447 - protein, 7 aa, synthetic construct
VRPNGVA

SEQ ID NO: 34448 - protein, 7 aa, synthetic construct
NTSKIYG

SEQ ID NO: 34449 - protein, 7 aa, synthetic construct
IGQHAKQ

SEQ ID NO: 34450 - protein, 7 aa, synthetic construct
GMRQLRE

SEQ ID NO: 34451 - protein, 7 aa, synthetic construct
NKISTSG

SEQ ID NO: 34452 - protein, 7 aa, synthetic construct
YRNGESV

SEQ ID NO: 34453 - protein, 7 aa, synthetic construct
HQWSNAS

SEQ ID NO: 34454 - protein, 7 aa, synthetic construct
GHNPTGL

SEQ ID NO: 34455 - protein, 7 aa, synthetic construct
KGTNNSA

SEQ ID NO: 34456 - protein, 7 aa, synthetic construct
RTGTAGI

SEQ ID NO: 34457 - protein, 7 aa, synthetic construct
TRYLDRE

SEQ ID NO: 34458 - protein, 7 aa, synthetic construct
RNPANGS

SEQ ID NO: 34459 - protein, 7 aa, synthetic construct
WRDGPMS

SEQ ID NO: 34460 - protein, 7 aa, synthetic construct
SYARSQD

SEQ ID NO: 34461 - protein, 7 aa, synthetic construct
YAGKQMP

SEQ ID NO: 34462 - protein, 7 aa, synthetic construct
NTIKADA

SEQ ID NO: 34463 - protein, 7 aa, synthetic construct
MVSAKQA

SEQ ID NO: 34464 - protein, 7 aa, synthetic construct
QGKSVPA

SEQ ID NO: 34465 - protein, 7 aa, synthetic construct
QASGKMG

SEQ ID NO: 34466 - protein, 7 aa, synthetic construct
NPKSPQA

SEQ ID NO: 34467 - protein, 7 aa, synthetic construct
IRNTHPP

SEQ ID NO: 34468 - protein, 7 aa, synthetic construct
PVMSTGG

SEQ ID NO: 34469 - protein, 7 aa, synthetic construct
FAPGMNM

SEQ ID NO: 34470 - protein, 7 aa, synthetic construct
NMRPMAG

SEQ ID NO: 34471 - protein, 7 aa, synthetic construct
YPKGSVA

SEQ ID NO: 34472 - protein, 7 aa, synthetic construct
QFRNHQV

SEQ ID NO: 34473 - protein, 7 aa, synthetic construct
RQTTTTG

SEQ ID NO: 34474 - protein, 7 aa, synthetic construct
MQRSQLD

SEQ ID NO: 34475 - protein, 7 aa, synthetic construct
YDKFSSH

SEQ ID NO: 34476 - protein, 7 aa, synthetic construct
TQGVAPN

SEQ ID NO: 34477 - protein, 7 aa, synthetic construct
QPKSAMA

SEQ ID NO: 34478 - protein, 7 aa, synthetic construct
RMNATTG

SEQ ID NO: 34479 - protein, 7 aa, synthetic construct
HKPMVIG

SEQ ID NO: 34480 - protein, 7 aa, synthetic construct
KSTKAAE

SEQ ID NO: 34481 - protein, 7 aa, synthetic construct
KAQGSPT

SEQ ID NO: 34482 - protein, 7 aa, synthetic construct
KSGSSTA

SEQ ID NO: 34483 - protein, 7 aa, synthetic construct
MFNLTSG

SEQ ID NO: 34484 - protein, 7 aa, synthetic construct
MNDWQKQ

SEQ ID NO: 34485 - protein, 7 aa, synthetic construct
KNNTGAS

SEQ ID NO: 34486 - protein, 7 aa, synthetic construct
MDPINKG

SEQ ID NO: 34487 - protein, 7 aa, synthetic construct
RQIKDQI

SEQ ID NO: 34488 - protein, 7 aa, synthetic construct
ISHGKSL

SEQ ID NO: 34489 - protein, 7 aa, synthetic construct
MQKTGQG

SEQ ID NO: 34490 - protein, 7 aa, synthetic construct
TDTPFKA

SEQ ID NO: 34491 - protein, 7 aa, synthetic construct
MTNKQVP

SEQ ID NO: 34492 - protein, 7 aa, synthetic construct
QKTHPVQ

SEQ ID NO: 34493 - protein, 7 aa, synthetic construct
KDKREQA

SEQ ID NO: 34494 - protein, 7 aa, synthetic construct
YSKTNGV

SEQ ID NO: 34495 - protein, 7 aa, synthetic construct
REWKDAI

SEQ ID NO: 34496 - protein, 7 aa, synthetic construct
LMKQHMT

SEQ ID NO: 34497 - protein, 7 aa, synthetic construct
FKPGGQA

SEQ ID NO: 34498 - protein, 7 aa, synthetic construct
SGIKTGG

SEQ ID NO: 34499 - protein, 7 aa, synthetic construct
SPKSVPS

SEQ ID NO: 34500 - protein, 7 aa, synthetic construct
QNKTPSG

SEQ ID NO: 34501 - protein, 7 aa, synthetic construct
TNSRGNG

SEQ ID NO: 34502 - protein, 7 aa, synthetic construct
TMGTRQP

SEQ ID NO: 34503 - protein, 7 aa, synthetic construct
VAIKNAL

SEQ ID NO: 34504 - protein, 7 aa, synthetic construct
VVPLVKD

SEQ ID NO: 34505 - protein, 7 aa, synthetic construct
NSQGKGT

SEQ ID NO: 34506 - protein, 7 aa, synthetic construct
KPQTAPA

SEQ ID NO: 34507 - protein, 7 aa, synthetic construct
TLVLRQG

SEQ ID NO: 34508 - protein, 7 aa, synthetic construct
VDKYYQK

SEQ ID NO: 34509 - protein, 7 aa, synthetic construct
SNKNTMG

SEQ ID NO: 34510 - protein, 7 aa, synthetic construct
YAKLEKE

SEQ ID NO: 34511 - protein, 7 aa, synthetic construct
RKDPMNG

SEQ ID NO: 34512 - protein, 7 aa, synthetic construct
GQKSASP

SEQ ID NO: 34513 - protein, 7 aa, synthetic construct
QKSMNNA

SEQ ID NO: 34514 - protein, 7 aa, synthetic construct
RSNTVTA

SEQ ID NO: 34515 - protein, 7 aa, synthetic construct
KSTQSRD

SEQ ID NO: 34516 - protein, 7 aa, synthetic construct
GQHMAQA

SEQ ID NO: 34517 - protein, 7 aa, synthetic construct
WKHGTGV

SEQ ID NO: 34518 - protein, 7 aa, synthetic construct
PKGSNVT

SEQ ID NO: 34519 - protein, 7 aa, synthetic construct
KSPGPTA

SEQ ID NO: 34520 - protein, 7 aa, synthetic construct
TKSQSHF

SEQ ID NO: 34521 - protein, 7 aa, synthetic construct
RARSDEA

SEQ ID NO: 34522 - protein, 7 aa, synthetic construct
FRGQADM

SEQ ID NO: 34523 - protein, 7 aa, synthetic construct
TLHGPKG

SEQ ID NO: 34524 - protein, 7 aa, synthetic construct
IRNVNGS

SEQ ID NO: 34525 - protein, 7 aa, synthetic construct
SKSTPHP

SEQ ID NO: 34526 - protein, 7 aa, synthetic construct
FGKSYAD

SEQ ID NO: 34527 - protein, 7 aa, synthetic construct
KSPQSNS

SEQ ID NO: 34528 - protein, 7 aa, synthetic construct
LGNHYVG

SEQ ID NO: 34529 - protein, 7 aa, synthetic construct
FNREKNN

SEQ ID NO: 34530 - protein, 7 aa, synthetic construct
NSRGSYP

SEQ ID NO: 34531 - protein, 7 aa, synthetic construct
DGQGSRS

SEQ ID NO: 34532 - protein, 7 aa, synthetic construct
KTSAVVG

SEQ ID NO: 34533 - protein, 7 aa, synthetic construct
MKNQGNA

SEQ ID NO: 34534 - protein, 7 aa, synthetic construct
KSSSAST

SEQ ID NO: 34535 - protein, 7 aa, synthetic construct
HNKNTTV

SEQ ID NO: 34536 - protein, 7 aa, synthetic construct
VMPYKDQ

SEQ ID NO: 34537 - protein, 7 aa, synthetic construct
PQHRMAA

SEQ ID NO: 34538 - protein, 7 aa, synthetic construct
SPLRTDP

SEQ ID NO: 34539 - protein, 7 aa, synthetic construct
IGKNSNH

SEQ ID NO: 34540 - protein, 7 aa, synthetic construct
PHKYGDL

SEQ ID NO: 34541 - protein, 7 aa, synthetic construct
MTNGSKG

SEQ ID NO: 34542 - protein, 7 aa, synthetic construct
QFGKGTA

SEQ ID NO: 34543 - protein, 7 aa, synthetic construct
PGSRSTG

SEQ ID NO: 34544 - protein, 7 aa, synthetic construct
FATRTQQ

SEQ ID NO: 34545 - protein, 7 aa, synthetic construct
MKHGQSF

SEQ ID NO: 34546 - protein, 7 aa, synthetic construct
QANNKTH

SEQ ID NO: 34547 - protein, 7 aa, synthetic construct
KSGNTMP

SEQ ID NO: 34548 - protein, 7 aa, synthetic construct
LLMGVKG

SEQ ID NO: 34549 - protein, 7 aa, synthetic construct
NPKSGMS

SEQ ID NO: 34550 - protein, 7 aa, synthetic construct
RGVHGDM

SEQ ID NO: 34551 - protein, 7 aa, synthetic construct
TMAKSSA

SEQ ID NO: 34552 - protein, 7 aa, synthetic construct
SIRGYEI

SEQ ID NO: 34553 - protein, 7 aa, synthetic construct
KKDSSSG

SEQ ID NO: 34554 - protein, 7 aa, synthetic construct
NKQTVAT

SEQ ID NO: 34555 - protein, 7 aa, synthetic construct
SGTKQLL

SEQ ID NO: 34556 - protein, 7 aa, synthetic construct
FKGIHGV

SEQ ID NO: 34557 - protein, 7 aa, synthetic construct
LTKIGGS

SEQ ID NO: 34558 - protein, 7 aa, synthetic construct
TGANTSS

SEQ ID NO: 34559 - protein, 7 aa, synthetic construct
YRKSEGG

SEQ ID NO: 34560 - protein, 7 aa, synthetic construct
VPHKQMG

SEQ ID NO: 34561 - protein, 7 aa, synthetic construct
GTQNRSP

SEQ ID NO: 34562 - protein, 7 aa, synthetic construct
PFHGSKS

SEQ ID NO: 34563 - protein, 7 aa, synthetic construct
LRTSNHQ

SEQ ID NO: 34564 - protein, 7 aa, synthetic construct
KTTSSGG

SEQ ID NO: 34565 - protein, 7 aa, synthetic construct
QKSGNSS

SEQ ID NO: 34566 - protein, 7 aa, synthetic construct
VQGPSKG

SEQ ID NO: 34567 - protein, 7 aa, synthetic construct
AKSPTVT

SEQ ID NO: 34568 - protein, 7 aa, synthetic construct
GHYKLPI

SEQ ID NO: 34569 - protein, 7 aa, synthetic construct
INQQNRV

SEQ ID NO: 34570 - protein, 7 aa, synthetic construct
SDRIVAG

SEQ ID NO: 34571 - protein, 7 aa, synthetic construct
TRSYNSD

SEQ ID NO: 34572 - protein, 7 aa, synthetic construct
ASGKGMP

SEQ ID NO: 34573 - protein, 7 aa, synthetic construct
RAGDGNG

SEQ ID NO: 34574 - protein, 7 aa, synthetic construct
YKGTTNP

SEQ ID NO: 34575 - protein, 7 aa, synthetic construct
GHRGKQE

SEQ ID NO: 34576 - protein, 7 aa, synthetic construct
RPQGTSG

SEQ ID NO: 34577 - protein, 7 aa, synthetic construct
NRVTQNA

SEQ ID NO: 34578 - protein, 7 aa, synthetic construct
KKVNDSG

SEQ ID NO: 34579 - protein, 7 aa, synthetic construct
GVNSRAP

SEQ ID NO: 34580 - protein, 7 aa, synthetic construct
YQKNFQA

SEQ ID NO: 34581 - protein, 7 aa, synthetic construct
SYERSQG

SEQ ID NO: 34582 - protein, 7 aa, synthetic construct
KSQQTTG

SEQ ID NO: 34583 - protein, 7 aa, synthetic construct
LNPKYSE

SEQ ID NO: 34584 - protein, 7 aa, synthetic construct
TPFMKDF

SEQ ID NO: 34585 - protein, 7 aa, synthetic construct
MAKMAGI

SEQ ID NO: 34586 - protein, 7 aa, synthetic construct
FGASHST

SEQ ID NO: 34587 - protein, 7 aa, synthetic construct
VNRGSNA

SEQ ID NO: 34588 - protein, 7 aa, synthetic construct
MQPKFMA

SEQ ID NO: 34589 - protein, 7 aa, synthetic construct
ITAGSVN

SEQ ID NO: 34590 - protein, 7 aa, synthetic construct
TPRTSAP

SEQ ID NO: 34591 - protein, 7 aa, synthetic construct
INHQGEK

SEQ ID NO: 34592 - protein, 7 aa, synthetic construct
YRGTQAG

SEQ ID NO: 34593 - protein, 7 aa, synthetic construct
TKSNAFG

SEQ ID NO: 34594 - protein, 7 aa, synthetic construct
QKPASVQ

SEQ ID NO: 34595 - protein, 7 aa, synthetic construct
YHGHSMT

SEQ ID NO: 34596 - protein, 7 aa, synthetic construct
MGPVKSG

SEQ ID NO: 34597 - protein, 7 aa, synthetic construct
TKNTTKE

SEQ ID NO: 34598 - protein, 7 aa, synthetic construct
TGKSNSP

SEQ ID NO: 34599 - protein, 7 aa, synthetic construct
MERGTGV

SEQ ID NO: 34600 - protein, 7 aa, synthetic construct
TMGGKQG

SEQ ID NO: 34601 - protein, 7 aa, synthetic construct
TQAKNNY

SEQ ID NO: 34602 - protein, 7 aa, synthetic construct
TGKPMSA

SEQ ID NO: 34603 - protein, 7 aa, synthetic construct
PRRGTED

SEQ ID NO: 34604 - protein, 7 aa, synthetic construct
VSNQKSG

SEQ ID NO: 34605 - protein, 7 aa, synthetic construct
QSRSMIG

SEQ ID NO: 34606 - protein, 7 aa, synthetic construct
QKNPASA

SEQ ID NO: 34607 - protein, 7 aa, synthetic construct
LIPMKNP

SEQ ID NO: 34608 - protein, 7 aa, synthetic construct
VHTQNRA

SEQ ID NO: 34609 - protein, 7 aa, synthetic construct
QKPNNSM

SEQ ID NO: 34610 - protein, 7 aa, synthetic construct
YGKKEVT

SEQ ID NO: 34611 - protein, 7 aa, synthetic construct
INNGRGG

SEQ ID NO: 34612 - protein, 7 aa, synthetic construct
IAIGRGV

SEQ ID NO: 34613 - protein, 7 aa, synthetic construct
RSLQSAP

SEQ ID NO: 34614 - protein, 7 aa, synthetic construct
SKLLTKG

SEQ ID NO: 34615 - protein, 7 aa, synthetic construct
QDKQSKG

SEQ ID NO: 34616 - protein, 7 aa, synthetic construct
PVGGHGH

SEQ ID NO: 34617 - protein, 7 aa, synthetic construct
KQNGPVP

SEQ ID NO: 34618 - protein, 7 aa, synthetic construct
HQVNTAT

SEQ ID NO: 34619 - protein, 7 aa, synthetic construct
HWTNKAD

SEQ ID NO: 34620 - protein, 7 aa, synthetic construct
SPGRVDT

SEQ ID NO: 34621 - protein, 7 aa, synthetic construct
QGRINES

SEQ ID NO: 34622 - protein, 7 aa, synthetic construct
MNPRSAG

SEQ ID NO: 34623 - protein, 7 aa, synthetic construct
KNNTSAT

SEQ ID NO: 34624 - protein, 7 aa, synthetic construct
KNTGPQG

SEQ ID NO: 34625 - protein, 7 aa, synthetic construct
TTMVHQG

SEQ ID NO: 34626 - protein, 7 aa, synthetic construct
MDRPPGR

SEQ ID NO: 34627 - protein, 7 aa, synthetic construct
NLKMIPP

SEQ ID NO: 34628 - protein, 7 aa, synthetic construct
ITAALKG

SEQ ID NO: 34629 - protein, 7 aa, synthetic construct
RDKNVAG

SEQ ID NO: 34630 - protein, 7 aa, synthetic construct
QGTRGQA

SEQ ID NO: 34631 - protein, 7 aa, synthetic construct
NNHTKDI

SEQ ID NO: 34632 - protein, 7 aa, synthetic construct
REAHSKN

SEQ ID NO: 34633 - protein, 7 aa, synthetic construct
QKKWMEE

SEQ ID NO: 34634 - protein, 7 aa, synthetic construct
QPRANGA

SEQ ID NO: 34635 - protein, 7 aa, synthetic construct
QTRSAPG

SEQ ID NO: 34636 - protein, 7 aa, synthetic construct
SKAQKNE

SEQ ID NO: 34637 - protein, 7 aa, synthetic construct
YSGKGNN

SEQ ID NO: 34638 - protein, 7 aa, synthetic construct
LYGSIKD

SEQ ID NO: 34639 - protein, 7 aa, synthetic construct
SKYSVSE

SEQ ID NO: 34640 - protein, 7 aa, synthetic construct
VHNRVLN

SEQ ID NO: 34641 - protein, 7 aa, synthetic construct
RPGSQMP

SEQ ID NO: 34642 - protein, 7 aa, synthetic construct
IAGAIQS

SEQ ID NO: 34643 - protein, 7 aa, synthetic construct
TNKNVSA

SEQ ID NO: 34644 - protein, 7 aa, synthetic construct
YHKHGSA

SEQ ID NO: 34645 - protein, 7 aa, synthetic construct
GNGKAVQ

SEQ ID NO: 34646 - protein, 7 aa, synthetic construct
ARNQAAA

SEQ ID NO: 34647 - protein, 7 aa, synthetic construct
YQGNPRS

SEQ ID NO: 34648 - protein, 7 aa, synthetic construct
KMNGVQA

SEQ ID NO: 34649 - protein, 7 aa, synthetic construct
KNFKDYG

SEQ ID NO: 34650 - protein, 7 aa, synthetic construct
TKLHTNA

SEQ ID NO: 34651 - protein, 7 aa, synthetic construct
RQPGVKE

SEQ ID NO: 34652 - protein, 7 aa, synthetic construct
KNSGQSG

SEQ ID NO: 34653 - protein, 7 aa, synthetic construct
RIAGLTQ

SEQ ID NO: 34654 - protein, 7 aa, synthetic construct
QGRSLNP

SEQ ID NO: 34655 - protein, 7 aa, synthetic construct
TKSQSFS

SEQ ID NO: 34656 - protein, 7 aa, synthetic construct
KVAGRLD

SEQ ID NO: 34657 - protein, 7 aa, synthetic construct
TTAKNGM

SEQ ID NO: 34658 - protein, 7 aa, synthetic construct
AGKTPER

SEQ ID NO: 34659 - protein, 7 aa, synthetic construct
FDKKGPG

SEQ ID NO: 34660 - protein, 7 aa, synthetic construct
MNQKSTG

SEQ ID NO: 34661 - protein, 7 aa, synthetic construct
GQQARMG

SEQ ID NO: 34662 - protein, 7 aa, synthetic construct
FEAMRRN

SEQ ID NO: 34663 - protein, 7 aa, synthetic construct
ASSTRNP

SEQ ID NO: 34664 - protein, 7 aa, synthetic construct
TNRAPQG

SEQ ID NO: 34665 - protein, 7 aa, synthetic construct
GLAPKLI

SEQ ID NO: 34666 - protein, 7 aa, synthetic construct
LYMKKEG

SEQ ID NO: 34667 - protein, 7 aa, synthetic construct
VRQSTAA

SEQ ID NO: 34668 - protein, 7 aa, synthetic construct
NSVLKSG

SEQ ID NO: 34669 - protein, 7 aa, synthetic construct
NRPSTLP

SEQ ID NO: 34670 - protein, 7 aa, synthetic construct
NPMHKYA

SEQ ID NO: 34671 - protein, 7 aa, synthetic construct
KGNNNTG

SEQ ID NO: 34672 - protein, 7 aa, synthetic construct
MRNSIGS

SEQ ID NO: 34673 - protein, 7 aa, synthetic construct
RGASTTG

SEQ ID NO: 34674 - protein, 7 aa, synthetic construct
NKNPQNA

SEQ ID NO: 34675 - protein, 7 aa, synthetic construct
RGVPSQP

SEQ ID NO: 34676 - protein, 7 aa, synthetic construct
WTKAEPI

SEQ ID NO: 34677 - protein, 7 aa, synthetic construct
SKHRDNG

SEQ ID NO: 34678 - protein, 7 aa, synthetic construct
NNHNKVA

SEQ ID NO: 34679 - protein, 7 aa, synthetic construct
QMNHHSA

SEQ ID NO: 34680 - protein, 7 aa, synthetic construct
AMGMGHG

SEQ ID NO: 34681 - protein, 7 aa, synthetic construct
HQMGPKG

SEQ ID NO: 34682 - protein, 7 aa, synthetic construct
VAKSTMN

SEQ ID NO: 34683 - protein, 7 aa, synthetic construct
IVGVLKD

SEQ ID NO: 34684 - protein, 7 aa, synthetic construct
INQRSSG

SEQ ID NO: 34685 - protein, 7 aa, synthetic construct
NQRNTAG

SEQ ID NO: 34686 - protein, 7 aa, synthetic construct
TLIAGRP

SEQ ID NO: 34687 - protein, 7 aa, synthetic construct
RGVSQIA

SEQ ID NO: 34688 - protein, 7 aa, synthetic construct
NNTKGQG

SEQ ID NO: 34689 - protein, 7 aa, synthetic construct
PKQANGG

SEQ ID NO: 34690 - protein, 7 aa, synthetic construct
TNPGQSS

SEQ ID NO: 34691 - protein, 7 aa, synthetic construct
GHHNPVK

SEQ ID NO: 34692 - protein, 7 aa, synthetic construct
YKFQQRE

SEQ ID NO: 34693 - protein, 7 aa, synthetic construct
DVKHKTY

SEQ ID NO: 34694 - protein, 7 aa, synthetic construct
KGQNNTA

SEQ ID NO: 34695 - protein, 7 aa, synthetic construct
WMKNQED

SEQ ID NO: 34696 - protein, 7 aa, synthetic construct
WAEVGRD

SEQ ID NO: 34697 - protein, 7 aa, synthetic construct
HTKGAVS

SEQ ID NO: 34698 - protein, 7 aa, synthetic construct
KEPYSRD

SEQ ID NO: 34699 - protein, 7 aa, synthetic construct
PQSGQRT

SEQ ID NO: 34700 - protein, 7 aa, synthetic construct
LMKVVQG

SEQ ID NO: 34701 - protein, 7 aa, synthetic construct
GATRGSE

SEQ ID NO: 34702 - protein, 7 aa, synthetic construct
SPKNLTA

SEQ ID NO: 34703 - protein, 7 aa, synthetic construct
QGSQRQA

SEQ ID NO: 34704 - protein, 7 aa, synthetic construct
HTTKNLG

SEQ ID NO: 34705 - protein, 7 aa, synthetic construct
GQKNSNA

SEQ ID NO: 34706 - protein, 7 aa, synthetic construct
GRGKDGV

SEQ ID NO: 34707 - protein, 7 aa, synthetic construct
GYHSKNS

SEQ ID NO: 34708 - protein, 7 aa, synthetic construct
TPKMAQG

SEQ ID NO: 34709 - protein, 7 aa, synthetic construct
TGIKKDA

SEQ ID NO: 34710 - protein, 7 aa, synthetic construct
KMGNSGG

SEQ ID NO: 34711 - protein, 7 aa, synthetic construct
TATNHRE

SEQ ID NO: 34712 - protein, 7 aa, synthetic construct
DRKPGVA

SEQ ID NO: 34713 - protein, 7 aa, synthetic construct
DKRHPSE

SEQ ID NO: 34714 - protein, 7 aa, synthetic construct
SERSSAS

SEQ ID NO: 34715 - protein, 7 aa, synthetic construct
HPVYKTH

SEQ ID NO: 34716 - protein, 7 aa, synthetic construct
GKNSMNV

SEQ ID NO: 34717 - protein, 7 aa, synthetic construct
VRTSTVG

SEQ ID NO: 34718 - protein, 7 aa, synthetic construct
QSGGKFG

SEQ ID NO: 34719 - protein, 7 aa, synthetic construct
SKGQSEG

SEQ ID NO: 34720 - protein, 7 aa, synthetic construct
GLVDPRQ

SEQ ID NO: 34721 - protein, 7 aa, synthetic construct
QIHHPAD

SEQ ID NO: 34722 - protein, 7 aa, synthetic construct
TNPHFPM

SEQ ID NO: 34723 - protein, 7 aa, synthetic construct
SLPAARQ

SEQ ID NO: 34724 - protein, 7 aa, synthetic construct
NMKVVPN

SEQ ID NO: 34725 - protein, 7 aa, synthetic construct
NPRNTQP

SEQ ID NO: 34726 - protein, 7 aa, synthetic construct
MATRTDR

SEQ ID NO: 34727 - protein, 7 aa, synthetic construct
TKQQKNE

SEQ ID NO: 34728 - protein, 7 aa, synthetic construct
SALRPQP

SEQ ID NO: 34729 - protein, 7 aa, synthetic construct
QGRSASP

SEQ ID NO: 34730 - protein, 7 aa, synthetic construct
YRNHQDT

SEQ ID NO: 34731 - protein, 7 aa, synthetic construct
ISSWIKD

SEQ ID NO: 34732 - protein, 7 aa, synthetic construct
AFPAIAS

SEQ ID NO: 34733 - protein, 7 aa, synthetic construct
KGMQSGG

SEQ ID NO: 34734 - protein, 7 aa, synthetic construct
GFKAQQN

SEQ ID NO: 34735 - protein, 7 aa, synthetic construct
GVNNKTG

SEQ ID NO: 34736 - protein, 7 aa, synthetic construct
GKGPSHD

SEQ ID NO: 34737 - protein, 7 aa, synthetic construct
VTGSIKP

SEQ ID NO: 34738 - protein, 7 aa, synthetic construct
ANATRYQ

SEQ ID NO: 34739 - protein, 7 aa, synthetic construct
FKGASGN

SEQ ID NO: 34740 - protein, 7 aa, synthetic construct
LKASFGG

SEQ ID NO: 34741 - protein, 7 aa, synthetic construct
LKRQETG

SEQ ID NO: 34742 - protein, 7 aa, synthetic construct
VEPWAKA

SEQ ID NO: 34743 - protein, 7 aa, synthetic construct
HPSKERL

SEQ ID NO: 34744 - protein, 7 aa, synthetic construct
IKTGTGG

SEQ ID NO: 34745 - protein, 7 aa, synthetic construct
FQGKSIL

SEQ ID NO: 34746 - protein, 7 aa, synthetic construct
VSGTRQG

SEQ ID NO: 34747 - protein, 7 aa, synthetic construct
QRVTNNA

SEQ ID NO: 34748 - protein, 7 aa, synthetic construct
YKQQQTS

SEQ ID NO: 34749 - protein, 7 aa, synthetic construct
TTQRAAG

SEQ ID NO: 34750 - protein, 7 aa, synthetic construct
RSPGVSA

SEQ ID NO: 34751 - protein, 7 aa, synthetic construct
KANIPHG

SEQ ID NO: 34752 - protein, 7 aa, synthetic construct
KNAGTGA

SEQ ID NO: 34753 - protein, 7 aa, synthetic construct
NKVTGSA

SEQ ID NO: 34754 - protein, 7 aa, synthetic construct
NNGKNLG

SEQ ID NO: 34755 - protein, 7 aa, synthetic construct
SVSRAAP

SEQ ID NO: 34756 - protein, 7 aa, synthetic construct
LKPGRED

SEQ ID NO: 34757 - protein, 7 aa, synthetic construct
QGKQAPA

SEQ ID NO: 34758 - protein, 7 aa, synthetic construct
TRNQNSG

SEQ ID NO: 34759 - protein, 7 aa, synthetic construct
RPTGSVE

SEQ ID NO: 34760 - protein, 7 aa, synthetic construct
WHGVDKV

SEQ ID NO: 34761 - protein, 7 aa, synthetic construct
NAKQAHS

SEQ ID NO: 34762 - protein, 7 aa, synthetic construct
TLRRMEE

SEQ ID NO: 34763 - protein, 7 aa, synthetic construct
GQGERYA

SEQ ID NO: 34764 - protein, 7 aa, synthetic construct
TIQKQNF

SEQ ID NO: 34765 - protein, 7 aa, synthetic construct
QYASAQG

SEQ ID NO: 34766 - protein, 7 aa, synthetic construct
KSPRPET

SEQ ID NO: 34767 - protein, 7 aa, synthetic construct
KKDISPQ

SEQ ID NO: 34768 - protein, 7 aa, synthetic construct
FKPHQAS

SEQ ID NO: 34769 - protein, 7 aa, synthetic construct
TNRLQMT

SEQ ID NO: 34770 - protein, 7 aa, synthetic construct
KNMAQQA

SEQ ID NO: 34771 - protein, 7 aa, synthetic construct
MSNAGFG

SEQ ID NO: 34772 - protein, 7 aa, synthetic construct
KASGKLE

SEQ ID NO: 34773 - protein, 7 aa, synthetic construct
RNPQGAG

SEQ ID NO: 34774 - protein, 7 aa, synthetic construct
NKYGQGL

SEQ ID NO: 34775 - protein, 7 aa, synthetic construct
AGQQKVM

SEQ ID NO: 34776 - protein, 7 aa, synthetic construct
QTHMQRG

SEQ ID NO: 34777 - protein, 7 aa, synthetic construct
DHRGMQV

SEQ ID NO: 34778 - protein, 7 aa, synthetic construct
SKPMQSG

SEQ ID NO: 34779 - protein, 7 aa, synthetic construct
FNKAMRD

SEQ ID NO: 34780 - protein, 7 aa, synthetic construct
MPRMNGG

SEQ ID NO: 34781 - protein, 7 aa, synthetic construct
IGQVQKV

SEQ ID NO: 34782 - protein, 7 aa, synthetic construct
NGATRNG

SEQ ID NO: 34783 - protein, 7 aa, synthetic construct
TKSGTNG

SEQ ID NO: 34784 - protein, 7 aa, synthetic construct
RPGLQFE

SEQ ID NO: 34785 - protein, 7 aa, synthetic construct
KQTGMTG

SEQ ID NO: 34786 - protein, 7 aa, synthetic construct
TEAYKSA

SEQ ID NO: 34787 - protein, 7 aa, synthetic construct
QPRAMTG

SEQ ID NO: 34788 - protein, 7 aa, synthetic construct
EPKWKHE

SEQ ID NO: 34789 - protein, 7 aa, synthetic construct
NPRAGAG

SEQ ID NO: 34790 - protein, 7 aa, synthetic construct
HREPVFN

SEQ ID NO: 34791 - protein, 7 aa, synthetic construct
VRAMGNE

SEQ ID NO: 34792 - protein, 7 aa, synthetic construct
FRPSGAN

SEQ ID NO: 34793 - protein, 7 aa, synthetic construct
KNSVTAS

SEQ ID NO: 34794 - protein, 7 aa, synthetic construct
SIKTPVQ

SEQ ID NO: 34795 - protein, 7 aa, synthetic construct
SHLKTDF

SEQ ID NO: 34796 - protein, 7 aa, synthetic construct
KFGINTD

SEQ ID NO: 34797 - protein, 7 aa, synthetic construct
VNNGGKG

SEQ ID NO: 34798 - protein, 7 aa, synthetic construct
IRPFKEN

SEQ ID NO: 34799 - protein, 7 aa, synthetic construct
KNSATSA

SEQ ID NO: 34800 - protein, 7 aa, synthetic construct
ESKQSRM

SEQ ID NO: 34801 - protein, 7 aa, synthetic construct
TRVTGDS

SEQ ID NO: 34802 - protein, 7 aa, synthetic construct
GPKSQSA

SEQ ID NO: 34803 - protein, 7 aa, synthetic construct
MNKPGQS

SEQ ID NO: 34804 - protein, 7 aa, synthetic construct
FRNVIDG

SEQ ID NO: 34805 - protein, 7 aa, synthetic construct
TRAHGSI

SEQ ID NO: 34806 - protein, 7 aa, synthetic construct
RGMKNDP

SEQ ID NO: 34807 - protein, 7 aa, synthetic construct
YSSSNNK

SEQ ID NO: 34808 - protein, 7 aa, synthetic construct
NRTNIVS

SEQ ID NO: 34809 - protein, 7 aa, synthetic construct
FTASKQN

SEQ ID NO: 34810 - protein, 7 aa, synthetic construct
DDRRSKD

SEQ ID NO: 34811 - protein, 7 aa, synthetic construct
NRSGGTG

SEQ ID NO: 34812 - protein, 7 aa, synthetic construct
QGRKDDS

SEQ ID NO: 34813 - protein, 7 aa, synthetic construct
AKPGPQN

SEQ ID NO: 34814 - protein, 7 aa, synthetic construct
FKAKGVD

SEQ ID NO: 34815 - protein, 7 aa, synthetic construct
SARSTAA

SEQ ID NO: 34816 - protein, 7 aa, synthetic construct
NSKMSVG

SEQ ID NO: 34817 - protein, 7 aa, synthetic construct
KPEFHRN

SEQ ID NO: 34818 - protein, 7 aa, synthetic construct
NRAQGPM

SEQ ID NO: 34819 - protein, 7 aa, synthetic construct
VNRSSTV

SEQ ID NO: 34820 - protein, 7 aa, synthetic construct
SHTRTGE

SEQ ID NO: 34821 - protein, 7 aa, synthetic construct
RQSTNVA

SEQ ID NO: 34822 - protein, 7 aa, synthetic construct
TMHRVTG

SEQ ID NO: 34823 - protein, 7 aa, synthetic construct
SKNEFRG

SEQ ID NO: 34824 - protein, 7 aa, synthetic construct
GKKDTAA

SEQ ID NO: 34825 - protein, 7 aa, synthetic construct
RMPGQTP

SEQ ID NO: 34826 - protein, 7 aa, synthetic construct
TRQMSQP

SEQ ID NO: 34827 - protein, 7 aa, synthetic construct
RDQVWNA

SEQ ID NO: 34828 - protein, 7 aa, synthetic construct
YNHAHAM

SEQ ID NO: 34829 - protein, 7 aa, synthetic construct
TGSTKFA

SEQ ID NO: 34830 - protein, 7 aa, synthetic construct
MRAGPHE

SEQ ID NO: 34831 - protein, 7 aa, synthetic construct
RPLGMLE

SEQ ID NO: 34832 - protein, 7 aa, synthetic construct
QGAKADK

SEQ ID NO: 34833 - protein, 7 aa, synthetic construct
RHPPSEG

SEQ ID NO: 34834 - protein, 7 aa, synthetic construct
KPTPGMA

SEQ ID NO: 34835 - protein, 7 aa, synthetic construct
NQGGTKG

SEQ ID NO: 34836 - protein, 7 aa, synthetic construct
LTSRKDP

SEQ ID NO: 34837 - protein, 7 aa, synthetic construct
NHDNKFG

SEQ ID NO: 34838 - protein, 7 aa, synthetic construct
TQVARPA

SEQ ID NO: 34839 - protein, 7 aa, synthetic construct
AHAKSVY

SEQ ID NO: 34840 - protein, 7 aa, synthetic construct
FPTAAAH

SEQ ID NO: 34841 - protein, 7 aa, synthetic construct
IEFTKKG

SEQ ID NO: 34842 - protein, 7 aa, synthetic construct
YAPGTKG

SEQ ID NO: 34843 - protein, 7 aa, synthetic construct
VSHSERG

SEQ ID NO: 34844 - protein, 7 aa, synthetic construct
RPPNSNS

SEQ ID NO: 34845 - protein, 7 aa, synthetic construct
KMIAPDG

SEQ ID NO: 34846 - protein, 7 aa, synthetic construct
RHPDGLQ

SEQ ID NO: 34847 - protein, 7 aa, synthetic construct
LPEHKLY

SEQ ID NO: 34848 - protein, 7 aa, synthetic construct
NKMTSGA

SEQ ID NO: 34849 - protein, 7 aa, synthetic construct
MQPQPSG

SEQ ID NO: 34850 - protein, 7 aa, synthetic construct
NGNSKNP

SEQ ID NO: 34851 - protein, 7 aa, synthetic construct
AHRPLPE

SEQ ID NO: 34852 - protein, 7 aa, synthetic construct
TRFPSQE

SEQ ID NO: 34853 - protein, 7 aa, synthetic construct
ISGYHSS

SEQ ID NO: 34854 - protein, 7 aa, synthetic construct
PTNKHYS

SEQ ID NO: 34855 - protein, 7 aa, synthetic construct
MMGGALA

SEQ ID NO: 34856 - protein, 7 aa, synthetic construct
RPGKALE

SEQ ID NO: 34857 - protein, 7 aa, synthetic construct
KNPISQP

SEQ ID NO: 34858 - protein, 7 aa, synthetic construct
RANWPTD

SEQ ID NO: 34859 - protein, 7 aa, synthetic construct
EKTHMTA

SEQ ID NO: 34860 - protein, 7 aa, synthetic construct
LGKMIEI

SEQ ID NO: 34861 - protein, 7 aa, synthetic construct
MYGKSTP

SEQ ID NO: 34862 - protein, 7 aa, synthetic construct
KPPASNS

SEQ ID NO: 34863 - protein, 7 aa, synthetic construct
NAHGKSP

SEQ ID NO: 34864 - protein, 7 aa, synthetic construct
AYKYTME

SEQ ID NO: 34865 - protein, 7 aa, synthetic construct
TTQKASA

SEQ ID NO: 34866 - protein, 7 aa, synthetic construct
LHNKIRD

SEQ ID NO: 34867 - protein, 7 aa, synthetic construct
WVIGKEG

SEQ ID NO: 34868 - protein, 7 aa, synthetic construct
FQKNASG

SEQ ID NO: 34869 - protein, 7 aa, synthetic construct
VKHAVEN

SEQ ID NO: 34870 - protein, 7 aa, synthetic construct
DNHMKKD

SEQ ID NO: 34871 - protein, 7 aa, synthetic construct
KMRLEGT

SEQ ID NO: 34872 - protein, 7 aa, synthetic construct
LQMHKMG

SEQ ID NO: 34873 - protein, 7 aa, synthetic construct
VHGRFGE

SEQ ID NO: 34874 - protein, 7 aa, synthetic construct
PIQKLEG

SEQ ID NO: 34875 - protein, 7 aa, synthetic construct
NQRAKEP

SEQ ID NO: 34876 - protein, 7 aa, synthetic construct
ILSGKKD

SEQ ID NO: 34877 - protein, 7 aa, synthetic construct
GKNTSNS

SEQ ID NO: 34878 - protein, 7 aa, synthetic construct
SDRGFHG

SEQ ID NO: 34879 - protein, 7 aa, synthetic construct
MAAGNSR

SEQ ID NO: 34880 - protein, 7 aa, synthetic construct
NNKAAQS

SEQ ID NO: 34881 - protein, 7 aa, synthetic construct
STPQRIM

SEQ ID NO: 34882 - protein, 7 aa, synthetic construct
PKSPGYG

SEQ ID NO: 34883 - protein, 7 aa, synthetic construct
RSQNAAV

SEQ ID NO: 34884 - protein, 7 aa, synthetic construct
KSSNNRD

SEQ ID NO: 34885 - protein, 7 aa, synthetic construct
MHKGPPA

SEQ ID NO: 34886 - protein, 7 aa, synthetic construct
KKPDVAG

SEQ ID NO: 34887 - protein, 7 aa, synthetic construct
IGNRAND

SEQ ID NO: 34888 - protein, 7 aa, synthetic construct
SIPKSKD

SEQ ID NO: 34889 - protein, 7 aa, synthetic construct
MMPGTAG

SEQ ID NO: 34890 - protein, 7 aa, synthetic construct
QRGREFA

SEQ ID NO: 34891 - protein, 7 aa, synthetic construct
NSRNVGM

SEQ ID NO: 34892 - protein, 7 aa, synthetic construct
IAGNNRG

SEQ ID NO: 34893 - protein, 7 aa, synthetic construct
TSRGMTG

SEQ ID NO: 34894 - protein, 7 aa, synthetic construct
VKYEKGP

SEQ ID NO: 34895 - protein, 7 aa, synthetic construct
TKTLVQH

SEQ ID NO: 34896 - protein, 7 aa, synthetic construct
TIGFPKE

SEQ ID NO: 34897 - protein, 7 aa, synthetic construct
QAKAYGP

SEQ ID NO: 34898 - protein, 7 aa, synthetic construct
FNQPHNQ

SEQ ID NO: 34899 - protein, 7 aa, synthetic construct
NNHSGHA

SEQ ID NO: 34900 - protein, 7 aa, synthetic construct
NKSMKPV

SEQ ID NO: 34901 - protein, 7 aa, synthetic construct
LSGRSHQ

SEQ ID NO: 34902 - protein, 7 aa, synthetic construct
QKSNHEI

SEQ ID NO: 34903 - protein, 7 aa, synthetic construct
IRTMQTP

SEQ ID NO: 34904 - protein, 7 aa, synthetic construct
ESRATSG

SEQ ID NO: 34905 - protein, 7 aa, synthetic construct
KGTAATF

SEQ ID NO: 34906 - protein, 7 aa, synthetic construct
NHVPNMG

SEQ ID NO: 34907 - protein, 7 aa, synthetic construct
GNQGKSP

SEQ ID NO: 34908 - protein, 7 aa, synthetic construct
FGGKNNG

SEQ ID NO: 34909 - protein, 7 aa, synthetic construct
RDTIRTT

SEQ ID NO: 34910 - protein, 7 aa, synthetic construct
ITHGMGS

SEQ ID NO: 34911 - protein, 7 aa, synthetic construct
RQSSVMG

SEQ ID NO: 34912 - protein, 7 aa, synthetic construct
QRSSPTG

SEQ ID NO: 34913 - protein, 7 aa, synthetic construct
SMQRNQP

SEQ ID NO: 34914 - protein, 7 aa, synthetic construct
QRQAAGA

SEQ ID NO: 34915 - protein, 7 aa, synthetic construct
HNSNKFI

SEQ ID NO: 34916 - protein, 7 aa, synthetic construct
FHLSRTP

SEQ ID NO: 34917 - protein, 7 aa, synthetic construct
RSTSATG

SEQ ID NO: 34918 - protein, 7 aa, synthetic construct
WDRGPGS

SEQ ID NO: 34919 - protein, 7 aa, synthetic construct
MQGWQQS

SEQ ID NO: 34920 - protein, 7 aa, synthetic construct
SISGFVA

SEQ ID NO: 34921 - protein, 7 aa, synthetic construct
RTGSVAP

SEQ ID NO: 34922 - protein, 7 aa, synthetic construct
TKNQNQA

SEQ ID NO: 34923 - protein, 7 aa, synthetic construct
HIQNKYT

SEQ ID NO: 34924 - protein, 7 aa, synthetic construct
HKGNHSG

SEQ ID NO: 34925 - protein, 7 aa, synthetic construct
GKRSSEP

SEQ ID NO: 34926 - protein, 7 aa, synthetic construct
MQYGPQG

SEQ ID NO: 34927 - protein, 7 aa, synthetic construct
SKNGPVG

SEQ ID NO: 34928 - protein, 7 aa, synthetic construct
QNKGQMS

SEQ ID NO: 34929 - protein, 7 aa, synthetic construct
GKVNSSA

SEQ ID NO: 34930 - protein, 7 aa, synthetic construct
MAGHQEM

SEQ ID NO: 34931 - protein, 7 aa, synthetic construct
AKSNVTG

SEQ ID NO: 34932 - protein, 7 aa, synthetic construct
HITTTKL

SEQ ID NO: 34933 - protein, 7 aa, synthetic construct
IHIKFGG

SEQ ID NO: 34934 - protein, 7 aa, synthetic construct
YNNSRGA

SEQ ID NO: 34935 - protein, 7 aa, synthetic construct
SKTGNNP

SEQ ID NO: 34936 - protein, 7 aa, synthetic construct
GYANRHP

SEQ ID NO: 34937 - protein, 7 aa, synthetic construct
SEKHHNF

SEQ ID NO: 34938 - protein, 7 aa, synthetic construct
HNRQGDQ

SEQ ID NO: 34939 - protein, 7 aa, synthetic construct
IGKSMTG

SEQ ID NO: 34940 - protein, 7 aa, synthetic construct
SPKQSAS

SEQ ID NO: 34941 - protein, 7 aa, synthetic construct
GVKTTFL

SEQ ID NO: 34942 - protein, 7 aa, synthetic construct
GKSSATN

SEQ ID NO: 34943 - protein, 7 aa, synthetic construct
KQQNVVG

SEQ ID NO: 34944 - protein, 7 aa, synthetic construct
MSGKTSM

SEQ ID NO: 34945 - protein, 7 aa, synthetic construct
QPRNGEH

SEQ ID NO: 34946 - protein, 7 aa, synthetic construct
QTKGMTA

SEQ ID NO: 34947 - protein, 7 aa, synthetic construct
DVSTKHP

SEQ ID NO: 34948 - protein, 7 aa, synthetic construct
KHPPYEV

SEQ ID NO: 34949 - protein, 7 aa, synthetic construct
PGKGLGY

SEQ ID NO: 34950 - protein, 7 aa, synthetic construct
RFVSGQP

SEQ ID NO: 34951 - protein, 7 aa, synthetic construct
RNIVTQA

SEQ ID NO: 34952 - protein, 7 aa, synthetic construct
TNGRGGP

SEQ ID NO: 34953 - protein, 7 aa, synthetic construct
AFNQPKD

SEQ ID NO: 34954 - protein, 7 aa, synthetic construct
VPLQNKP

SEQ ID NO: 34955 - protein, 7 aa, synthetic construct
QTPKTYP

SEQ ID NO: 34956 - protein, 7 aa, synthetic construct
TQAKKDG

SEQ ID NO: 34957 - protein, 7 aa, synthetic construct
PGTKGTF

SEQ ID NO: 34958 - protein, 7 aa, synthetic construct
YKLNDAM

SEQ ID NO: 34959 - protein, 7 aa, synthetic construct
HTSTTSN

SEQ ID NO: 34960 - protein, 7 aa, synthetic construct
ERDFRPG

SEQ ID NO: 34961 - protein, 7 aa, synthetic construct
RGASQSF

SEQ ID NO: 34962 - protein, 7 aa, synthetic construct
SRNQQEF

SEQ ID NO: 34963 - protein, 7 aa, synthetic construct
LGSAHAP

SEQ ID NO: 34964 - protein, 7 aa, synthetic construct
TPRPVGG

SEQ ID NO: 34965 - protein, 7 aa, synthetic construct
QRNMTAS

SEQ ID NO: 34966 - protein, 7 aa, synthetic construct
DIPQTKR

SEQ ID NO: 34967 - protein, 7 aa, synthetic construct
QRNQATA

SEQ ID NO: 34968 - protein, 7 aa, synthetic construct
YQTPKGG

SEQ ID NO: 34969 - protein, 7 aa, synthetic construct
NRPQGNG

SEQ ID NO: 34970 - protein, 7 aa, synthetic construct
RGPSVGG

SEQ ID NO: 34971 - protein, 7 aa, synthetic construct
HPANRQF

SEQ ID NO: 34972 - protein, 7 aa, synthetic construct
SKPQAAG

SEQ ID NO: 34973 - protein, 7 aa, synthetic construct
KTQTHAQ

SEQ ID NO: 34974 - protein, 7 aa, synthetic construct
KGNNQSA

SEQ ID NO: 34975 - protein, 7 aa, synthetic construct
INLGNYS

SEQ ID NO: 34976 - protein, 7 aa, synthetic construct
FTPGHKQ

SEQ ID NO: 34977 - protein, 7 aa, synthetic construct
HINPRAP

SEQ ID NO: 34978 - protein, 7 aa, synthetic construct
SNHIKSA

SEQ ID NO: 34979 - protein, 7 aa, synthetic construct
KNGIKSE

SEQ ID NO: 34980 - protein, 7 aa, synthetic construct
GIVMKAT

SEQ ID NO: 34981 - protein, 7 aa, synthetic construct
MRNAAPT

SEQ ID NO: 34982 - protein, 7 aa, synthetic construct
DTRAAPG

SEQ ID NO: 34983 - protein, 7 aa, synthetic construct
ISHGSRN

SEQ ID NO: 34984 - protein, 7 aa, synthetic construct
QPKMLGG

SEQ ID NO: 34985 - protein, 7 aa, synthetic construct
NGGRTNG

SEQ ID NO: 34986 - protein, 7 aa, synthetic construct
PNTQKSG

SEQ ID NO: 34987 - protein, 7 aa, synthetic construct
QAVTIRD

SEQ ID NO: 34988 - protein, 7 aa, synthetic construct
LQPVIRG

SEQ ID NO: 34989 - protein, 7 aa, synthetic construct
TKVGPGS

SEQ ID NO: 34990 - protein, 7 aa, synthetic construct
GGWGNNE

SEQ ID NO: 34991 - protein, 7 aa, synthetic construct
SEYVRGD

SEQ ID NO: 34992 - protein, 7 aa, synthetic construct
RDKGVSG

SEQ ID NO: 34993 - protein, 7 aa, synthetic construct
QRGAANG

SEQ ID NO: 34994 - protein, 7 aa, synthetic construct
SAHNAGS

SEQ ID NO: 34995 - protein, 7 aa, synthetic construct
ERRESKV

SEQ ID NO: 34996 - protein, 7 aa, synthetic construct
NGERPRA

SEQ ID NO: 34997 - protein, 7 aa, synthetic construct
WQKTGKE

SEQ ID NO: 34998 - protein, 7 aa, synthetic construct
SRTSVQA

SEQ ID NO: 34999 - protein, 7 aa, synthetic construct
IGNIERG

SEQ ID NO: 35000 - protein, 7 aa, synthetic construct
NIKNQMG

SEQ ID NO: 35001 - protein, 7 aa, synthetic construct
IRTKGDF

SEQ ID NO: 35002 - protein, 7 aa, synthetic construct
ARPQTMG

SEQ ID NO: 35003 - protein, 7 aa, synthetic construct
SIHGNQG

SEQ ID NO: 35004 - protein, 7 aa, synthetic construct
KTNAGGS

SEQ ID NO: 35005 - protein, 7 aa, synthetic construct
WPGRAQP

SEQ ID NO: 35006 - protein, 7 aa, synthetic construct
GKGPSVA

SEQ ID NO: 35007 - protein, 7 aa, synthetic construct
IRQPNQQ

SEQ ID NO: 35008 - protein, 7 aa, synthetic construct
NRPTQQT

SEQ ID NO: 35009 - protein, 7 aa, synthetic construct
YGAGIMS

SEQ ID NO: 35010 - protein, 7 aa, synthetic construct
NREQKLD

SEQ ID NO: 35011 - protein, 7 aa, synthetic construct
FKKIYAE

SEQ ID NO: 35012 - protein, 7 aa, synthetic construct
LSNRPSA

SEQ ID NO: 35013 - protein, 7 aa, synthetic construct
RKDTGNA

SEQ ID NO: 35014 - protein, 7 aa, synthetic construct
RDKMNGG

SEQ ID NO: 35015 - protein, 7 aa, synthetic construct
VPRAQQD

SEQ ID NO: 35016 - protein, 7 aa, synthetic construct
VRAPTSA

SEQ ID NO: 35017 - protein, 7 aa, synthetic construct
IKYKDYS

SEQ ID NO: 35018 - protein, 7 aa, synthetic construct
PMKAGIL

SEQ ID NO: 35019 - protein, 7 aa, synthetic construct
VQNMAHF

SEQ ID NO: 35020 - protein, 7 aa, synthetic construct
PQKSGSG

SEQ ID NO: 35021 - protein, 7 aa, synthetic construct
NKILRNE

SEQ ID NO: 35022 - protein, 7 aa, synthetic construct
NAGNKLN

SEQ ID NO: 35023 - protein, 7 aa, synthetic construct
GKNKQDP

SEQ ID NO: 35024 - protein, 7 aa, synthetic construct
YQKGKDG

SEQ ID NO: 35025 - protein, 7 aa, synthetic construct
HPKKVEI

SEQ ID NO: 35026 - protein, 7 aa, synthetic construct
NSKQTSA

SEQ ID NO: 35027 - protein, 7 aa, synthetic construct
RGPNLGS

SEQ ID NO: 35028 - protein, 7 aa, synthetic construct
TGHLMGP

SEQ ID NO: 35029 - protein, 7 aa, synthetic construct
RVLSQSD

SEQ ID NO: 35030 - protein, 7 aa, synthetic construct
RQSNSMD

SEQ ID NO: 35031 - protein, 7 aa, synthetic construct
VKNAIAG

SEQ ID NO: 35032 - protein, 7 aa, synthetic construct
VRPTPIA

SEQ ID NO: 35033 - protein, 7 aa, synthetic construct
QRPSIAT

SEQ ID NO: 35034 - protein, 7 aa, synthetic construct
SNLAKQG

SEQ ID NO: 35035 - protein, 7 aa, synthetic construct
SNNKNMP

SEQ ID NO: 35036 - protein, 7 aa, synthetic construct
GHHSKAG

SEQ ID NO: 35037 - protein, 7 aa, synthetic construct
AGGGSGM

SEQ ID NO: 35038 - protein, 7 aa, synthetic construct
HQAFEKG

SEQ ID NO: 35039 - protein, 7 aa, synthetic construct
MARNPDS

SEQ ID NO: 35040 - protein, 7 aa, synthetic construct
ILRLNSA

SEQ ID NO: 35041 - protein, 7 aa, synthetic construct
TPNHQAR

SEQ ID NO: 35042 - protein, 7 aa, synthetic construct
GYQKMRD

SEQ ID NO: 35043 - protein, 7 aa, synthetic construct
GPGQRTG

SEQ ID NO: 35044 - protein, 7 aa, synthetic construct
KNTSQQA

SEQ ID NO: 35045 - protein, 7 aa, synthetic construct
SQKAVAG

SEQ ID NO: 35046 - protein, 7 aa, synthetic construct
VKYDTAP

SEQ ID NO: 35047 - protein, 7 aa, synthetic construct
DMKFSGK

SEQ ID NO: 35048 - protein, 7 aa, synthetic construct
RPKSFLD

SEQ ID NO: 35049 - protein, 7 aa, synthetic construct
YGGKSQN

SEQ ID NO: 35050 - protein, 7 aa, synthetic construct
WNTGVVG

SEQ ID NO: 35051 - protein, 7 aa, synthetic construct
GQARTMG

SEQ ID NO: 35052 - protein, 7 aa, synthetic construct
QKTSGAA

SEQ ID NO: 35053 - protein, 7 aa, synthetic construct
VKNGDAR

SEQ ID NO: 35054 - protein, 7 aa, synthetic construct
FNYSKET

SEQ ID NO: 35055 - protein, 7 aa, synthetic construct
TKLVGDR

SEQ ID NO: 35056 - protein, 7 aa, synthetic construct
NTGTKSP

SEQ ID NO: 35057 - protein, 7 aa, synthetic construct
FDTVHHP

SEQ ID NO: 35058 - protein, 7 aa, synthetic construct
SNTKVSG

SEQ ID NO: 35059 - protein, 7 aa, synthetic construct
NKFTAEM

SEQ ID NO: 35060 - protein, 7 aa, synthetic construct
ANQRQQA

SEQ ID NO: 35061 - protein, 7 aa, synthetic construct
LKPVVQG

SEQ ID NO: 35062 - protein, 7 aa, synthetic construct
PIQQRST

SEQ ID NO: 35063 - protein, 7 aa, synthetic construct
KLAGPIN

SEQ ID NO: 35064 - protein, 7 aa, synthetic construct
TRSSAQS

SEQ ID NO: 35065 - protein, 7 aa, synthetic construct
MPGKSQA

SEQ ID NO: 35066 - protein, 7 aa, synthetic construct
DKQHLMP

SEQ ID NO: 35067 - protein, 7 aa, synthetic construct
KMAPNNV

SEQ ID NO: 35068 - protein, 7 aa, synthetic construct
ANRGTII

SEQ ID NO: 35069 - protein, 7 aa, synthetic construct
QNKATKE

SEQ ID NO: 35070 - protein, 7 aa, synthetic construct
KGTSLAG

SEQ ID NO: 35071 - protein, 7 aa, synthetic construct
PPHNPKM

SEQ ID NO: 35072 - protein, 7 aa, synthetic construct
VKPPHSS

SEQ ID NO: 35073 - protein, 7 aa, synthetic construct
TEHNRVG

SEQ ID NO: 35074 - protein, 7 aa, synthetic construct
GKPGNPA

SEQ ID NO: 35075 - protein, 7 aa, synthetic construct
NIPHRPE

SEQ ID NO: 35076 - protein, 7 aa, synthetic construct
KTMSAQP

SEQ ID NO: 35077 - protein, 7 aa, synthetic construct
QDPVRGG

SEQ ID NO: 35078 - protein, 7 aa, synthetic construct
TSSAKQA

SEQ ID NO: 35079 - protein, 7 aa, synthetic construct
SNQHAAL

SEQ ID NO: 35080 - protein, 7 aa, synthetic construct
GSGGQVY

SEQ ID NO: 35081 - protein, 7 aa, synthetic construct
PRDYSQN

SEQ ID NO: 35082 - protein, 7 aa, synthetic construct
RSQGNNA

SEQ ID NO: 35083 - protein, 7 aa, synthetic construct
KDPNGRA

SEQ ID NO: 35084 - protein, 7 aa, synthetic construct
QPRSAVP

SEQ ID NO: 35085 - protein, 7 aa, synthetic construct
SSSKGTG

SEQ ID NO: 35086 - protein, 7 aa, synthetic construct
KMNPNSA

SEQ ID NO: 35087 - protein, 7 aa, synthetic construct
HQNKINS

SEQ ID NO: 35088 - protein, 7 aa, synthetic construct
RSLQAME

SEQ ID NO: 35089 - protein, 7 aa, synthetic construct
MPTGRTH

SEQ ID NO: 35090 - protein, 7 aa, synthetic construct
VQRMNSN

SEQ ID NO: 35091 - protein, 7 aa, synthetic construct
KNPGSGN

SEQ ID NO: 35092 - protein, 7 aa, synthetic construct
MPKALHT

SEQ ID NO: 35093 - protein, 7 aa, synthetic construct
QTKTAQG

SEQ ID NO: 35094 - protein, 7 aa, synthetic construct
TAGNNRI

SEQ ID NO: 35095 - protein, 7 aa, synthetic construct
WAGSQIK

SEQ ID NO: 35096 - protein, 7 aa, synthetic construct
GSTKMAG

SEQ ID NO: 35097 - protein, 7 aa, synthetic construct
GTRTGVG

SEQ ID NO: 35098 - protein, 7 aa, synthetic construct
KYSNGMG

SEQ ID NO: 35099 - protein, 7 aa, synthetic construct
SRATNAP

SEQ ID NO: 35100 - protein, 7 aa, synthetic construct
NTNRGLA

SEQ ID NO: 35101 - protein, 7 aa, synthetic construct
NPGRRDD

SEQ ID NO: 35102 - protein, 7 aa, synthetic construct
GRYKSDE

SEQ ID NO: 35103 - protein, 7 aa, synthetic construct
RNQTATA

SEQ ID NO: 35104 - protein, 7 aa, synthetic construct
RQPGIGG

SEQ ID NO: 35105 - protein, 7 aa, synthetic construct
NKMPSTS

SEQ ID NO: 35106 - protein, 7 aa, synthetic construct
FVSAQSP

SEQ ID NO: 35107 - protein, 7 aa, synthetic construct
MHERNGA

SEQ ID NO: 35108 - protein, 7 aa, synthetic construct
LKSGHKE

SEQ ID NO: 35109 - protein, 7 aa, synthetic construct
KKFSMIE

SEQ ID NO: 35110 - protein, 7 aa, synthetic construct
NQGGGTL

SEQ ID NO: 35111 - protein, 7 aa, synthetic construct
IGHNPNK

SEQ ID NO: 35112 - protein, 7 aa, synthetic construct
NGTIARP

SEQ ID NO: 35113 - protein, 7 aa, synthetic construct
SKATNGA

SEQ ID NO: 35114 - protein, 7 aa, synthetic construct
KSTAGQQ

SEQ ID NO: 35115 - protein, 7 aa, synthetic construct
YNVKGQN

SEQ ID NO: 35116 - protein, 7 aa, synthetic construct
RGPSGTG

SEQ ID NO: 35117 - protein, 7 aa, synthetic construct
SGSYKND

SEQ ID NO: 35118 - protein, 7 aa, synthetic construct
LSHHFQG

SEQ ID NO: 35119 - protein, 7 aa, synthetic construct
RPMQGAA

SEQ ID NO: 35120 - protein, 7 aa, synthetic construct
SERMGKY

SEQ ID NO: 35121 - protein, 7 aa, synthetic construct
TGKTATV

SEQ ID NO: 35122 - protein, 7 aa, synthetic construct
DNYSKIG

SEQ ID NO: 35123 - protein, 7 aa, synthetic construct
FPKTQNG

SEQ ID NO: 35124 - protein, 7 aa, synthetic construct
NEFIKGF

SEQ ID NO: 35125 - protein, 7 aa, synthetic construct
IKPTQMN

SEQ ID NO: 35126 - protein, 7 aa, synthetic construct
FVHGSPG

SEQ ID NO: 35127 - protein, 7 aa, synthetic construct
MRMKGDS

SEQ ID NO: 35128 - protein, 7 aa, synthetic construct
ITQGQKM

SEQ ID NO: 35129 - protein, 7 aa, synthetic construct
KTNNSNT

SEQ ID NO: 35130 - protein, 7 aa, synthetic construct
KGVQKYE

SEQ ID NO: 35131 - protein, 7 aa, synthetic construct
QAHQARD

SEQ ID NO: 35132 - protein, 7 aa, synthetic construct
TQRSSVA

SEQ ID NO: 35133 - protein, 7 aa, synthetic construct
KQSIKEG

SEQ ID NO: 35134 - protein, 7 aa, synthetic construct
RPGGTNV

SEQ ID NO: 35135 - protein, 7 aa, synthetic construct
PRATGSA

SEQ ID NO: 35136 - protein, 7 aa, synthetic construct
NRIQNPV

SEQ ID NO: 35137 - protein, 7 aa, synthetic construct
KPPGYGA

SEQ ID NO: 35138 - protein, 7 aa, synthetic construct
FGGVRNP

SEQ ID NO: 35139 - protein, 7 aa, synthetic construct
MSRVMYE

SEQ ID NO: 35140 - protein, 7 aa, synthetic construct
KRSDVQM

SEQ ID NO: 35141 - protein, 7 aa, synthetic construct
IKFIQTE

SEQ ID NO: 35142 - protein, 7 aa, synthetic construct
NRSSGLN

SEQ ID NO: 35143 - protein, 7 aa, synthetic construct
YKPYADS

SEQ ID NO: 35144 - protein, 7 aa, synthetic construct
VKPYSQA

SEQ ID NO: 35145 - protein, 7 aa, synthetic construct
GGGNFRD

SEQ ID NO: 35146 - protein, 7 aa, synthetic construct
NSTTKNA

SEQ ID NO: 35147 - protein, 7 aa, synthetic construct
SKPGYGA

SEQ ID NO: 35148 - protein, 7 aa, synthetic construct
AGKSQNS

SEQ ID NO: 35149 - protein, 7 aa, synthetic construct
PLYRGTP

SEQ ID NO: 35150 - protein, 7 aa, synthetic construct
NQFGKNL

SEQ ID NO: 35151 - protein, 7 aa, synthetic construct
GVSAKTG

SEQ ID NO: 35152 - protein, 7 aa, synthetic construct
KAPANMS

SEQ ID NO: 35153 - protein, 7 aa, synthetic construct
NHNAKQG

SEQ ID NO: 35154 - protein, 7 aa, synthetic construct
VQRTTGG

SEQ ID NO: 35155 - protein, 7 aa, synthetic construct
YNGKQSA

SEQ ID NO: 35156 - protein, 7 aa, synthetic construct
FSAHGHG

SEQ ID NO: 35157 - protein, 7 aa, synthetic construct
GNGQRNQ

SEQ ID NO: 35158 - protein, 7 aa, synthetic construct
LRHQHAT

SEQ ID NO: 35159 - protein, 7 aa, synthetic construct
KQASTIS

SEQ ID NO: 35160 - protein, 7 aa, synthetic construct
FERKGVD

SEQ ID NO: 35161 - protein, 7 aa, synthetic construct
RDNRNPL

SEQ ID NO: 35162 - protein, 7 aa, synthetic construct
DGYRGVP

SEQ ID NO: 35163 - protein, 7 aa, synthetic construct
SRKTEGG

SEQ ID NO: 35164 - protein, 7 aa, synthetic construct
FTKDTRN

SEQ ID NO: 35165 - protein, 7 aa, synthetic construct
FLRQNKD

SEQ ID NO: 35166 - protein, 7 aa, synthetic construct
LKSGLSG

SEQ ID NO: 35167 - protein, 7 aa, synthetic construct
WGNTKVG

SEQ ID NO: 35168 - protein, 7 aa, synthetic construct
VKGAMGG

SEQ ID NO: 35169 - protein, 7 aa, synthetic construct
VVGGNKG

SEQ ID NO: 35170 - protein, 7 aa, synthetic construct
RVSAEVA

SEQ ID NO: 35171 - protein, 7 aa, synthetic construct
SKSGTSM

SEQ ID NO: 35172 - protein, 7 aa, synthetic construct
KATGSMA

SEQ ID NO: 35173 - protein, 7 aa, synthetic construct
RMNTNGS

SEQ ID NO: 35174 - protein, 7 aa, synthetic construct
YHGGVPK

SEQ ID NO: 35175 - protein, 7 aa, synthetic construct
TMLSKGP

SEQ ID NO: 35176 - protein, 7 aa, synthetic construct
ARSETRP

SEQ ID NO: 35177 - protein, 7 aa, synthetic construct
KDKFGVG

SEQ ID NO: 35178 - protein, 7 aa, synthetic construct
FPKSNVT

SEQ ID NO: 35179 - protein, 7 aa, synthetic construct
FQTPARD

SEQ ID NO: 35180 - protein, 7 aa, synthetic construct
GRQSATP

SEQ ID NO: 35181 - protein, 7 aa, synthetic construct
SKGSSMQ

SEQ ID NO: 35182 - protein, 7 aa, synthetic construct
GKTNNMA

SEQ ID NO: 35183 - protein, 7 aa, synthetic construct
KPKPTEQ

SEQ ID NO: 35184 - protein, 7 aa, synthetic construct
TKQSKVE

SEQ ID NO: 35185 - protein, 7 aa, synthetic construct
GVGRPMQ

SEQ ID NO: 35186 - protein, 7 aa, synthetic construct
TTRAMSS

SEQ ID NO: 35187 - protein, 7 aa, synthetic construct
RNTQTSG

SEQ ID NO: 35188 - protein, 7 aa, synthetic construct
NRTLEKS

SEQ ID NO: 35189 - protein, 7 aa, synthetic construct
VKSQEKL

SEQ ID NO: 35190 - protein, 7 aa, synthetic construct
TRSNSAP

SEQ ID NO: 35191 - protein, 7 aa, synthetic construct
NGMPSMK

SEQ ID NO: 35192 - protein, 7 aa, synthetic construct
QKWQPNA

SEQ ID NO: 35193 - protein, 7 aa, synthetic construct
RAYPQHD

SEQ ID NO: 35194 - protein, 7 aa, synthetic construct
RNMSAGG

SEQ ID NO: 35195 - protein, 7 aa, synthetic construct
RVTMKEG

SEQ ID NO: 35196 - protein, 7 aa, synthetic construct
SKALKQD

SEQ ID NO: 35197 - protein, 7 aa, synthetic construct
LSTKTEW

SEQ ID NO: 35198 - protein, 7 aa, synthetic construct
IFKEVRP

SEQ ID NO: 35199 - protein, 7 aa, synthetic construct
KGHSHSG

SEQ ID NO: 35200 - protein, 7 aa, synthetic construct
LAGTMKG

SEQ ID NO: 35201 - protein, 7 aa, synthetic construct
NSRNSTP

SEQ ID NO: 35202 - protein, 7 aa, synthetic construct
MFRDQSK

SEQ ID NO: 35203 - protein, 7 aa, synthetic construct
INKTGNN

SEQ ID NO: 35204 - protein, 7 aa, synthetic construct
MPHKFDP

SEQ ID NO: 35205 - protein, 7 aa, synthetic construct
QRSNVMV

SEQ ID NO: 35206 - protein, 7 aa, synthetic construct
SVKNGLY

SEQ ID NO: 35207 - protein, 7 aa, synthetic construct
QYKMGIA

SEQ ID NO: 35208 - protein, 7 aa, synthetic construct
RSNPANP

SEQ ID NO: 35209 - protein, 7 aa, synthetic construct
RTGASGM

SEQ ID NO: 35210 - protein, 7 aa, synthetic construct
RPHAVSV

SEQ ID NO: 35211 - protein, 7 aa, synthetic construct
TSKSATP

SEQ ID NO: 35212 - protein, 7 aa, synthetic construct
RGMRMEM

SEQ ID NO: 35213 - protein, 7 aa, synthetic construct
NSFMTSP

SEQ ID NO: 35214 - protein, 7 aa, synthetic construct
GMGNRQA

SEQ ID NO: 35215 - protein, 7 aa, synthetic construct
MQRNGNP

SEQ ID NO: 35216 - protein, 7 aa, synthetic construct
NTGRGAT

SEQ ID NO: 35217 - protein, 7 aa, synthetic construct
LKSATRD

SEQ ID NO: 35218 - protein, 7 aa, synthetic construct
FRGAGPS

SEQ ID NO: 35219 - protein, 7 aa, synthetic construct
KRDLISS

SEQ ID NO: 35220 - protein, 7 aa, synthetic construct
RSQTGPA

SEQ ID NO: 35221 - protein, 7 aa, synthetic construct
TTKIMQP

SEQ ID NO: 35222 - protein, 7 aa, synthetic construct
QTGSRQG

SEQ ID NO: 35223 - protein, 7 aa, synthetic construct
KVDKRGE

SEQ ID NO: 35224 - protein, 7 aa, synthetic construct
TNTRQSG

SEQ ID NO: 35225 - protein, 7 aa, synthetic construct
IKAMDGN

SEQ ID NO: 35226 - protein, 7 aa, synthetic construct
MMKPTNA

SEQ ID NO: 35227 - protein, 7 aa, synthetic construct
QPMFAGG

SEQ ID NO: 35228 - protein, 7 aa, synthetic construct
IVTQGGA

SEQ ID NO: 35229 - protein, 7 aa, synthetic construct
QRASSSP

SEQ ID NO: 35230 - protein, 7 aa, synthetic construct
KNMATMA

SEQ ID NO: 35231 - protein, 7 aa, synthetic construct
TMSNTKG

SEQ ID NO: 35232 - protein, 7 aa, synthetic construct
SFKTVQN

SEQ ID NO: 35233 - protein, 7 aa, synthetic construct
GRGPASE

SEQ ID NO: 35234 - protein, 7 aa, synthetic construct
HTKQVPQ

SEQ ID NO: 35235 - protein, 7 aa, synthetic construct
YPTGKTG

SEQ ID NO: 35236 - protein, 7 aa, synthetic construct
SRTTSNG

SEQ ID NO: 35237 - protein, 7 aa, synthetic construct
GKNMQTA

SEQ ID NO: 35238 - protein, 7 aa, synthetic construct
VHGLYPE

SEQ ID NO: 35239 - protein, 7 aa, synthetic construct
KPYGQNP

SEQ ID NO: 35240 - protein, 7 aa, synthetic construct
RTATQNG

SEQ ID NO: 35241 - protein, 7 aa, synthetic construct
QKHSFGE

SEQ ID NO: 35242 - protein, 7 aa, synthetic construct
QPNAVKN

SEQ ID NO: 35243 - protein, 7 aa, synthetic construct
QRPMSVG

SEQ ID NO: 35244 - protein, 7 aa, synthetic construct
RVNGQLG

SEQ ID NO: 35245 - protein, 7 aa, synthetic construct
TQKGVVA

SEQ ID NO: 35246 - protein, 7 aa, synthetic construct
VQRQHSE

SEQ ID NO: 35247 - protein, 7 aa, synthetic construct
WSTFGRE

SEQ ID NO: 35248 - protein, 7 aa, synthetic construct
ATRYQSP

SEQ ID NO: 35249 - protein, 7 aa, synthetic construct
IVGNLGK

SEQ ID NO: 35250 - protein, 7 aa, synthetic construct
HNGKGMI

SEQ ID NO: 35251 - protein, 7 aa, synthetic construct
YHNKSER

SEQ ID NO: 35252 - protein, 7 aa, synthetic construct
KTGPQAA

SEQ ID NO: 35253 - protein, 7 aa, synthetic construct
QVKDGKG

SEQ ID NO: 35254 - protein, 7 aa, synthetic construct
TSYVKTD

SEQ ID NO: 35255 - protein, 7 aa, synthetic construct
GINRHQP

SEQ ID NO: 35256 - protein, 7 aa, synthetic construct
RGYLQPE

SEQ ID NO: 35257 - protein, 7 aa, synthetic construct
LRGTNNI

SEQ ID NO: 35258 - protein, 7 aa, synthetic construct
RDGQQAL

SEQ ID NO: 35259 - protein, 7 aa, synthetic construct
SNPVQMG

SEQ ID NO: 35260 - protein, 7 aa, synthetic construct
GYGHTHA

SEQ ID NO: 35261 - protein, 7 aa, synthetic construct
NMKQGNG

SEQ ID NO: 35262 - protein, 7 aa, synthetic construct
MQHKMLD

SEQ ID NO: 35263 - protein, 7 aa, synthetic construct
KTTTNTS

SEQ ID NO: 35264 - protein, 7 aa, synthetic construct
TKMMGRE

SEQ ID NO: 35265 - protein, 7 aa, synthetic construct
IKDRKEF

SEQ ID NO: 35266 - protein, 7 aa, synthetic construct
NQTQSHT

SEQ ID NO: 35267 - protein, 7 aa, synthetic construct
RPTQANS

SEQ ID NO: 35268 - protein, 7 aa, synthetic construct
IGSHKTI

SEQ ID NO: 35269 - protein, 7 aa, synthetic construct
DLRFKAA

SEQ ID NO: 35270 - protein, 7 aa, synthetic construct
GRTLGVA

SEQ ID NO: 35271 - protein, 7 aa, synthetic construct
ARQASTN

SEQ ID NO: 35272 - protein, 7 aa, synthetic construct
IKYNNGA

SEQ ID NO: 35273 - protein, 7 aa, synthetic construct
MGRTDIP

SEQ ID NO: 35274 - protein, 7 aa, synthetic construct
LPPYLKA

SEQ ID NO: 35275 - protein, 7 aa, synthetic construct
SRNAQTG

SEQ ID NO: 35276 - protein, 7 aa, synthetic construct
RPTPATA

SEQ ID NO: 35277 - protein, 7 aa, synthetic construct
YNTSGKG

SEQ ID NO: 35278 - protein, 7 aa, synthetic construct
TIGRMAE

SEQ ID NO: 35279 - protein, 7 aa, synthetic construct
QKYGTQG

SEQ ID NO: 35280 - protein, 7 aa, synthetic construct
MKMTSAG

SEQ ID NO: 35281 - protein, 7 aa, synthetic construct
KNNSATS

SEQ ID NO: 35282 - protein, 7 aa, synthetic construct
KGNSSNV

SEQ ID NO: 35283 - protein, 7 aa, synthetic construct
YGPNKNP

SEQ ID NO: 35284 - protein, 7 aa, synthetic construct
NSPRVIE

SEQ ID NO: 35285 - protein, 7 aa, synthetic construct
KDKPTSA

SEQ ID NO: 35286 - protein, 7 aa, synthetic construct
YGNSTRG

SEQ ID NO: 35287 - protein, 7 aa, synthetic construct
RNSSQGS

SEQ ID NO: 35288 - protein, 7 aa, synthetic construct
FMTVQKG

SEQ ID NO: 35289 - protein, 7 aa, synthetic construct
RQPGSSA

SEQ ID NO: 35290 - protein, 7 aa, synthetic construct
TTKNGNA

SEQ ID NO: 35291 - protein, 7 aa, synthetic construct
KYLSNGP

SEQ ID NO: 35292 - protein, 7 aa, synthetic construct
VIKTAAG

SEQ ID NO: 35293 - protein, 7 aa, synthetic construct
GNIPSRV

SEQ ID NO: 35294 - protein, 7 aa, synthetic construct
NNKSGQG

SEQ ID NO: 35295 - protein, 7 aa, synthetic construct
NKGPAAP

SEQ ID NO: 35296 - protein, 7 aa, synthetic construct
RSYTVGE

SEQ ID NO: 35297 - protein, 7 aa, synthetic construct
MTARAVS

SEQ ID NO: 35298 - protein, 7 aa, synthetic construct
FKPGGNG

SEQ ID NO: 35299 - protein, 7 aa, synthetic construct
MNRSPMA

SEQ ID NO: 35300 - protein, 7 aa, synthetic construct
VSTSGRA

SEQ ID NO: 35301 - protein, 7 aa, synthetic construct
IKSPSEM

SEQ ID NO: 35302 - protein, 7 aa, synthetic construct
KYGGSQD

SEQ ID NO: 35303 - protein, 7 aa, synthetic construct
LNQAITT

SEQ ID NO: 35304 - protein, 7 aa, synthetic construct
MNQQKLV

SEQ ID NO: 35305 - protein, 7 aa, synthetic construct
YPGGNKT

SEQ ID NO: 35306 - protein, 7 aa, synthetic construct
KNMSEHG

SEQ ID NO: 35307 - protein, 7 aa, synthetic construct
KDPGKSA

SEQ ID NO: 35308 - protein, 7 aa, synthetic construct
GTKTTGG

SEQ ID NO: 35309 - protein, 7 aa, synthetic construct
GQAHFKE

SEQ ID NO: 35310 - protein, 7 aa, synthetic construct
KNPSMGS

SEQ ID NO: 35311 - protein, 7 aa, synthetic construct
PRKMLDN

SEQ ID NO: 35312 - protein, 7 aa, synthetic construct
AYPKQGN

SEQ ID NO: 35313 - protein, 7 aa, synthetic construct
NTSSRTP

SEQ ID NO: 35314 - protein, 7 aa, synthetic construct
GVNHMQA

SEQ ID NO: 35315 - protein, 7 aa, synthetic construct
IQGVMAN

SEQ ID NO: 35316 - protein, 7 aa, synthetic construct
NTGANKP

SEQ ID NO: 35317 - protein, 7 aa, synthetic construct
DNRFVSG

SEQ ID NO: 35318 - protein, 7 aa, synthetic construct
YSTSSKF

SEQ ID NO: 35319 - protein, 7 aa, synthetic construct
RNSLEGV

SEQ ID NO: 35320 - protein, 7 aa, synthetic construct
QNAKKQE

SEQ ID NO: 35321 - protein, 7 aa, synthetic construct
WMEKIRG

SEQ ID NO: 35322 - protein, 7 aa, synthetic construct
TTVSRGF

SEQ ID NO: 35323 - protein, 7 aa, synthetic construct
SNKPQGT

SEQ ID NO: 35324 - protein, 7 aa, synthetic construct
SNPHIMN

SEQ ID NO: 35325 - protein, 7 aa, synthetic construct
QGTGKQA

SEQ ID NO: 35326 - protein, 7 aa, synthetic construct
TKTGTVG

SEQ ID NO: 35327 - protein, 7 aa, synthetic construct
IDRPATR

SEQ ID NO: 35328 - protein, 7 aa, synthetic construct
IRNMLSA

SEQ ID NO: 35329 - protein, 7 aa, synthetic construct
YEAYKHN

SEQ ID NO: 35330 - protein, 7 aa, synthetic construct
KQNQTAS

SEQ ID NO: 35331 - protein, 7 aa, synthetic construct
QPTKGHM

SEQ ID NO: 35332 - protein, 7 aa, synthetic construct
KLDNRGS

SEQ ID NO: 35333 - protein, 7 aa, synthetic construct
TNRSQTP

SEQ ID NO: 35334 - protein, 7 aa, synthetic construct
ETRELDI

SEQ ID NO: 35335 - protein, 7 aa, synthetic construct
KDGFNNM

SEQ ID NO: 35336 - protein, 7 aa, synthetic construct
DQRHMKS

SEQ ID NO: 35337 - protein, 7 aa, synthetic construct
NRSNGNG

SEQ ID NO: 35338 - protein, 7 aa, synthetic construct
GVTMVKP

SEQ ID NO: 35339 - protein, 7 aa, synthetic construct
PVKNTQG

SEQ ID NO: 35340 - protein, 7 aa, synthetic construct
ERHVKDI

SEQ ID NO: 35341 - protein, 7 aa, synthetic construct
RMSTQTG

SEQ ID NO: 35342 - protein, 7 aa, synthetic construct
KPGMDPV

SEQ ID NO: 35343 - protein, 7 aa, synthetic construct
KMGSGSN

SEQ ID NO: 35344 - protein, 7 aa, synthetic construct
KMNHQVG

SEQ ID NO: 35345 - protein, 7 aa, synthetic construct
FPDKKQA

SEQ ID NO: 35346 - protein, 7 aa, synthetic construct
LGHIQNQ

SEQ ID NO: 35347 - protein, 7 aa, synthetic construct
INNQMIK

SEQ ID NO: 35348 - protein, 7 aa, synthetic construct
KDNTHTG

SEQ ID NO: 35349 - protein, 7 aa, synthetic construct
LNAKMTV

SEQ ID NO: 35350 - protein, 7 aa, synthetic construct
LRSFSKD

SEQ ID NO: 35351 - protein, 7 aa, synthetic construct
KTSQYGP

SEQ ID NO: 35352 - protein, 7 aa, synthetic construct
KSPNQMG

SEQ ID NO: 35353 - protein, 7 aa, synthetic construct
GRNANIA

SEQ ID NO: 35354 - protein, 7 aa, synthetic construct
FMNMHDK

SEQ ID NO: 35355 - protein, 7 aa, synthetic construct
FKSGGAS

SEQ ID NO: 35356 - protein, 7 aa, synthetic construct
IGFREAT

SEQ ID NO: 35357 - protein, 7 aa, synthetic construct
RQYAETG

SEQ ID NO: 35358 - protein, 7 aa, synthetic construct
FPHAIAD

SEQ ID NO: 35359 - protein, 7 aa, synthetic construct
IPLHKQE

SEQ ID NO: 35360 - protein, 7 aa, synthetic construct
KVDSPAD

SEQ ID NO: 35361 - protein, 7 aa, synthetic construct
LRSMVQN

SEQ ID NO: 35362 - protein, 7 aa, synthetic construct
TGGVGQG

SEQ ID NO: 35363 - protein, 7 aa, synthetic construct
NVNGEKS

SEQ ID NO: 35364 - protein, 7 aa, synthetic construct
YPKTSTN

SEQ ID NO: 35365 - protein, 7 aa, synthetic construct
EPRANKT

SEQ ID NO: 35366 - protein, 7 aa, synthetic construct
PVQGQKV

SEQ ID NO: 35367 - protein, 7 aa, synthetic construct
RKNTLEA

SEQ ID NO: 35368 - protein, 7 aa, synthetic construct
MGYKMGQ

SEQ ID NO: 35369 - protein, 7 aa, synthetic construct
GNKDKAG

SEQ ID NO: 35370 - protein, 7 aa, synthetic construct
FKSHMEH

SEQ ID NO: 35371 - protein, 7 aa, synthetic construct
RDMAKPG

SEQ ID NO: 35372 - protein, 7 aa, synthetic construct
QPRGMTG

SEQ ID NO: 35373 - protein, 7 aa, synthetic construct
KAWNKEG

SEQ ID NO: 35374 - protein, 7 aa, synthetic construct
DKKWEGP

SEQ ID NO: 35375 - protein, 7 aa, synthetic construct
PRGTGQI

SEQ ID NO: 35376 - protein, 7 aa, synthetic construct
NTSAKHY

SEQ ID NO: 35377 - protein, 7 aa, synthetic construct
YRKPDDR

SEQ ID NO: 35378 - protein, 7 aa, synthetic construct
KIQLTAG

SEQ ID NO: 35379 - protein, 7 aa, synthetic construct
MHREQKD

SEQ ID NO: 35380 - protein, 7 aa, synthetic construct
WGMHTQA

SEQ ID NO: 35381 - protein, 7 aa, synthetic construct
GTQQIKG

SEQ ID NO: 35382 - protein, 7 aa, synthetic construct
HPGSPRP

SEQ ID NO: 35383 - protein, 7 aa, synthetic construct
TSGQKMG

SEQ ID NO: 35384 - protein, 7 aa, synthetic construct
FPGYAAP

SEQ ID NO: 35385 - protein, 7 aa, synthetic construct
CMKKADC

SEQ ID NO: 35386 - protein, 7 aa, synthetic construct
MSRGQQA

SEQ ID NO: 35387 - protein, 7 aa, synthetic construct
KQPNGAG

SEQ ID NO: 35388 - protein, 7 aa, synthetic construct
MIPKPDR

SEQ ID NO: 35389 - protein, 7 aa, synthetic construct
VSNSRQP

SEQ ID NO: 35390 - protein, 7 aa, synthetic construct
KEKGPVN

SEQ ID NO: 35391 - protein, 7 aa, synthetic construct
GRPSNGA

SEQ ID NO: 35392 - protein, 7 aa, synthetic construct
TGRIAPD

SEQ ID NO: 35393 - protein, 7 aa, synthetic construct
EGTRGQS

SEQ ID NO: 35394 - protein, 7 aa, synthetic construct
MKGSYNG

SEQ ID NO: 35395 - protein, 7 aa, synthetic construct
QGVQRGM

SEQ ID NO: 35396 - protein, 7 aa, synthetic construct
EIVRSHG

SEQ ID NO: 35397 - protein, 7 aa, synthetic construct
FPKSSSP

SEQ ID NO: 35398 - protein, 7 aa, synthetic construct
HMKGTDR

SEQ ID NO: 35399 - protein, 7 aa, synthetic construct
QRSSTNG

SEQ ID NO: 35400 - protein, 7 aa, synthetic construct
WNPGREG

SEQ ID NO: 35401 - protein, 7 aa, synthetic construct
PVKSMGA

SEQ ID NO: 35402 - protein, 7 aa, synthetic construct
MQGMANN

SEQ ID NO: 35403 - protein, 7 aa, synthetic construct
EFPPNHG

SEQ ID NO: 35404 - protein, 7 aa, synthetic construct
SKGNSQG

SEQ ID NO: 35405 - protein, 7 aa, synthetic construct
QTANRGH

SEQ ID NO: 35406 - protein, 7 aa, synthetic construct
NSIKTLT

SEQ ID NO: 35407 - protein, 7 aa, synthetic construct
AGHAAPR

SEQ ID NO: 35408 - protein, 7 aa, synthetic construct
GQTVNKG

SEQ ID NO: 35409 - protein, 7 aa, synthetic construct
KNNSVGP

SEQ ID NO: 35410 - protein, 7 aa, synthetic construct
FQKAATG

SEQ ID NO: 35411 - protein, 7 aa, synthetic construct
INRAATQ

SEQ ID NO: 35412 - protein, 7 aa, synthetic construct
VPMVSQH

SEQ ID NO: 35413 - protein, 7 aa, synthetic construct
AGNKNNI

SEQ ID NO: 35414 - protein, 7 aa, synthetic construct
PGHGGVM

SEQ ID NO: 35415 - protein, 7 aa, synthetic construct
KGAHNLM

SEQ ID NO: 35416 - protein, 7 aa, synthetic construct
TRMSTDA

SEQ ID NO: 35417 - protein, 7 aa, synthetic construct
PKSSMAS

SEQ ID NO: 35418 - protein, 7 aa, synthetic construct
GPSHVHA

SEQ ID NO: 35419 - protein, 7 aa, synthetic construct
ERGGGSF

SEQ ID NO: 35420 - protein, 7 aa, synthetic construct
KNAGARD

SEQ ID NO: 35421 - protein, 7 aa, synthetic construct
YPSIKIA

SEQ ID NO: 35422 - protein, 7 aa, synthetic construct
KPNAGQQ

SEQ ID NO: 35423 - protein, 7 aa, synthetic construct
NVSTHNG

SEQ ID NO: 35424 - protein, 7 aa, synthetic construct
GQGAKAG

SEQ ID NO: 35425 - protein, 7 aa, synthetic construct
TLQSKAG

SEQ ID NO: 35426 - protein, 7 aa, synthetic construct
HKLAPLG

SEQ ID NO: 35427 - protein, 7 aa, synthetic construct
HMGINLV

SEQ ID NO: 35428 - protein, 7 aa, synthetic construct
NLKNSNP

SEQ ID NO: 35429 - protein, 7 aa, synthetic construct
QTRGPAT

SEQ ID NO: 35430 - protein, 7 aa, synthetic construct
NQQPKIT

SEQ ID NO: 35431 - protein, 7 aa, synthetic construct
INQHFRA

SEQ ID NO: 35432 - protein, 7 aa, synthetic construct
TPGVIMA

SEQ ID NO: 35433 - protein, 7 aa, synthetic construct
GLIRQVE

SEQ ID NO: 35434 - protein, 7 aa, synthetic construct
TTKIQSS

SEQ ID NO: 35435 - protein, 7 aa, synthetic construct
YHNFSKP

SEQ ID NO: 35436 - protein, 7 aa, synthetic construct
KPQHMQG

SEQ ID NO: 35437 - protein, 7 aa, synthetic construct
TNGYKLG

SEQ ID NO: 35438 - protein, 7 aa, synthetic construct
PKSAGRD

SEQ ID NO: 35439 - protein, 7 aa, synthetic construct
HPQFSNA

SEQ ID NO: 35440 - protein, 7 aa, synthetic construct
WTSHPGT

SEQ ID NO: 35441 - protein, 7 aa, synthetic construct
QARTMMA

SEQ ID NO: 35442 - protein, 7 aa, synthetic construct
GRQASVG

SEQ ID NO: 35443 - protein, 7 aa, synthetic construct
FSKNTAS

SEQ ID NO: 35444 - protein, 7 aa, synthetic construct
TRASKDP

SEQ ID NO: 35445 - protein, 7 aa, synthetic construct
GKGNGFG

SEQ ID NO: 35446 - protein, 7 aa, synthetic construct
NNSNRTA

SEQ ID NO: 35447 - protein, 7 aa, synthetic construct
IGNWNNS

SEQ ID NO: 35448 - protein, 7 aa, synthetic construct
MSANHKN

SEQ ID NO: 35449 - protein, 7 aa, synthetic construct
GMKNSVG

SEQ ID NO: 35450 - protein, 7 aa, synthetic construct
TGRSKDD

SEQ ID NO: 35451 - protein, 7 aa, synthetic construct
NKSSVQM

SEQ ID NO: 35452 - protein, 7 aa, synthetic construct
VLPNLGH

SEQ ID NO: 35453 - protein, 7 aa, synthetic construct
EPPRSNG

SEQ ID NO: 35454 - protein, 7 aa, synthetic construct
TRQVSTA

SEQ ID NO: 35455 - protein, 7 aa, synthetic construct
NNTSNKP

SEQ ID NO: 35456 - protein, 7 aa, synthetic construct
NRNPPPG

SEQ ID NO: 35457 - protein, 7 aa, synthetic construct
LWPAGAT

SEQ ID NO: 35458 - protein, 7 aa, synthetic construct
YGLKQLA

SEQ ID NO: 35459 - protein, 7 aa, synthetic construct
NQALSAP

SEQ ID NO: 35460 - protein, 7 aa, synthetic construct
ITQNQTN

SEQ ID NO: 35461 - protein, 7 aa, synthetic construct
LGHRPVQ

SEQ ID NO: 35462 - protein, 7 aa, synthetic construct
KRDGTTG

SEQ ID NO: 35463 - protein, 7 aa, synthetic construct
MKSASSA

SEQ ID NO: 35464 - protein, 7 aa, synthetic construct
VGNRATP

SEQ ID NO: 35465 - protein, 7 aa, synthetic construct
FGASNKG

SEQ ID NO: 35466 - protein, 7 aa, synthetic construct
QSKGNAG

SEQ ID NO: 35467 - protein, 7 aa, synthetic construct
KIPQAGA

SEQ ID NO: 35468 - protein, 7 aa, synthetic construct
NGMGQKG

SEQ ID NO: 35469 - protein, 7 aa, synthetic construct
QKWMPEE

SEQ ID NO: 35470 - protein, 7 aa, synthetic construct
FSQQKQA

SEQ ID NO: 35471 - protein, 7 aa, synthetic construct
GSRNGVE

SEQ ID NO: 35472 - protein, 7 aa, synthetic construct
NFKHIVT

SEQ ID NO: 35473 - protein, 7 aa, synthetic construct
SGKMSAV

SEQ ID NO: 35474 - protein, 7 aa, synthetic construct
GNGGNIR

SEQ ID NO: 35475 - protein, 7 aa, synthetic construct
MSNKGNA

SEQ ID NO: 35476 - protein, 7 aa, synthetic construct
RRGYEID

SEQ ID NO: 35477 - protein, 7 aa, synthetic construct
KPSHTQG

SEQ ID NO: 35478 - protein, 7 aa, synthetic construct
NAMRPSA

SEQ ID NO: 35479 - protein, 7 aa, synthetic construct
QKQMSKD

SEQ ID NO: 35480 - protein, 7 aa, synthetic construct
ISGGMGS

SEQ ID NO: 35481 - protein, 7 aa, synthetic construct
FSKGDPP

SEQ ID NO: 35482 - protein, 7 aa, synthetic construct
LRMPMGE

SEQ ID NO: 35483 - protein, 7 aa, synthetic construct
RPNQNGP

SEQ ID NO: 35484 - protein, 7 aa, synthetic construct
AKGVPGV

SEQ ID NO: 35485 - protein, 7 aa, synthetic construct
HNNNSIL

SEQ ID NO: 35486 - protein, 7 aa, synthetic construct
MVGLVKT

SEQ ID NO: 35487 - protein, 7 aa, synthetic construct
VTKTAFG

SEQ ID NO: 35488 - protein, 7 aa, synthetic construct
ARANHSF

SEQ ID NO: 35489 - protein, 7 aa, synthetic construct
KSDMARS

SEQ ID NO: 35490 - protein, 7 aa, synthetic construct
PRTIHAT

SEQ ID NO: 35491 - protein, 7 aa, synthetic construct
GAQGGMK

SEQ ID NO: 35492 - protein, 7 aa, synthetic construct
KMGNHSE

SEQ ID NO: 35493 - protein, 7 aa, synthetic construct
MRNSGQS

SEQ ID NO: 35494 - protein, 7 aa, synthetic construct
IVGLRNS

SEQ ID NO: 35495 - protein, 7 aa, synthetic construct
RPGGVMA

SEQ ID NO: 35496 - protein, 7 aa, synthetic construct
NRANATA

SEQ ID NO: 35497 - protein, 7 aa, synthetic construct
KLTSGET

SEQ ID NO: 35498 - protein, 7 aa, synthetic construct
GKQTPVG

SEQ ID NO: 35499 - protein, 7 aa, synthetic construct
RQALSDF

SEQ ID NO: 35500 - protein, 7 aa, synthetic construct
ARTTLHG

SEQ ID NO: 35501 - protein, 7 aa, synthetic construct
QLHDSPK

SEQ ID NO: 35502 - protein, 7 aa, synthetic construct
PVKPAQS

SEQ ID NO: 35503 - protein, 7 aa, synthetic construct
QMKPTGA

SEQ ID NO: 35504 - protein, 7 aa, synthetic construct
KTPGSKD

SEQ ID NO: 35505 - protein, 7 aa, synthetic construct
KTQNPQS

SEQ ID NO: 35506 - protein, 7 aa, synthetic construct
ASKAGTV

SEQ ID NO: 35507 - protein, 7 aa, synthetic construct
IYLNKTP

SEQ ID NO: 35508 - protein, 7 aa, synthetic construct
SRSVNMP

SEQ ID NO: 35509 - protein, 7 aa, synthetic construct
NNARASS

SEQ ID NO: 35510 - protein, 7 aa, synthetic construct
KATNMGA

SEQ ID NO: 35511 - protein, 7 aa, synthetic construct
ILGRQSF

SEQ ID NO: 35512 - protein, 7 aa, synthetic construct
TARAEPF

SEQ ID NO: 35513 - protein, 7 aa, synthetic construct
AAYKSMG

SEQ ID NO: 35514 - protein, 7 aa, synthetic construct
EWQTKPI

SEQ ID NO: 35515 - protein, 7 aa, synthetic construct
REMHNAD

SEQ ID NO: 35516 - protein, 7 aa, synthetic construct
FSSKVSS

SEQ ID NO: 35517 - protein, 7 aa, synthetic construct
GQGGRFE

SEQ ID NO: 35518 - protein, 7 aa, synthetic construct
SNVQKQA

SEQ ID NO: 35519 - protein, 7 aa, synthetic construct
NKGSTPS

SEQ ID NO: 35520 - protein, 7 aa, synthetic construct
GFKGPSP

SEQ ID NO: 35521 - protein, 7 aa, synthetic construct
DMMGKRF

SEQ ID NO: 35522 - protein, 7 aa, synthetic construct
RNNGITV

SEQ ID NO: 35523 - protein, 7 aa, synthetic construct
VEPYRMG

SEQ ID NO: 35524 - protein, 7 aa, synthetic construct
ANNIAKD

SEQ ID NO: 35525 - protein, 7 aa, synthetic construct
KMAGGTS

SEQ ID NO: 35526 - protein, 7 aa, synthetic construct
NGTGRSS

SEQ ID NO: 35527 - protein, 7 aa, synthetic construct
QNAYTNV

SEQ ID NO: 35528 - protein, 7 aa, synthetic construct
SISNAKS

SEQ ID NO: 35529 - protein, 7 aa, synthetic construct
SHVPRMG

SEQ ID NO: 35530 - protein, 7 aa, synthetic construct
GRPAQNP

SEQ ID NO: 35531 - protein, 7 aa, synthetic construct
IIGVRGD

SEQ ID NO: 35532 - protein, 7 aa, synthetic construct
WKGNVTG

SEQ ID NO: 35533 - protein, 7 aa, synthetic construct
FQGKNQM

SEQ ID NO: 35534 - protein, 7 aa, synthetic construct
FQKAGQG

SEQ ID NO: 35535 - protein, 7 aa, synthetic construct
ASNKGYG

SEQ ID NO: 35536 - protein, 7 aa, synthetic construct
MKAYETV

SEQ ID NO: 35537 - protein, 7 aa, synthetic construct
KPTVQDP

SEQ ID NO: 35538 - protein, 7 aa, synthetic construct
GNAKTTM

SEQ ID NO: 35539 - protein, 7 aa, synthetic construct
RFKEQYV

SEQ ID NO: 35540 - protein, 7 aa, synthetic construct
GHFGNLS

SEQ ID NO: 35541 - protein, 7 aa, synthetic construct
KTTNATS

SEQ ID NO: 35542 - protein, 7 aa, synthetic construct
MKQGLST

SEQ ID NO: 35543 - protein, 7 aa, synthetic construct
SKTHTMA

SEQ ID NO: 35544 - protein, 7 aa, synthetic construct
RNVKPVD

SEQ ID NO: 35545 - protein, 7 aa, synthetic construct
LNSVTTG

SEQ ID NO: 35546 - protein, 7 aa, synthetic construct
GQMNSAV

SEQ ID NO: 35547 - protein, 7 aa, synthetic construct
HSNMQKA

SEQ ID NO: 35548 - protein, 7 aa, synthetic construct
NSSGQKV

SEQ ID NO: 35549 - protein, 7 aa, synthetic construct
SAKGVPG

SEQ ID NO: 35550 - protein, 7 aa, synthetic construct
KPQSTVA

SEQ ID NO: 35551 - protein, 7 aa, synthetic construct
KMGVARE

SEQ ID NO: 35552 - protein, 7 aa, synthetic construct
FRSDSSP

SEQ ID NO: 35553 - protein, 7 aa, synthetic construct
GYMRAQG

SEQ ID NO: 35554 - protein, 7 aa, synthetic construct
VSKVASS

SEQ ID NO: 35555 - protein, 7 aa, synthetic construct
DRYGQSP

SEQ ID NO: 35556 - protein, 7 aa, synthetic construct
AGTHGMG

SEQ ID NO: 35557 - protein, 7 aa, synthetic construct
NYKGESY

SEQ ID NO: 35558 - protein, 7 aa, synthetic construct
QPKTPGS

SEQ ID NO: 35559 - protein, 7 aa, synthetic construct
NTFSKPG

SEQ ID NO: 35560 - protein, 7 aa, synthetic construct
RYPEQPS

SEQ ID NO: 35561 - protein, 7 aa, synthetic construct
ADRNKVA

SEQ ID NO: 35562 - protein, 7 aa, synthetic construct
MSRSGSP

SEQ ID NO: 35563 - protein, 7 aa, synthetic construct
PKVKTQE

SEQ ID NO: 35564 - protein, 7 aa, synthetic construct
RPPNKSE

SEQ ID NO: 35565 - protein, 7 aa, synthetic construct
QDFRTNG

SEQ ID NO: 35566 - protein, 7 aa, synthetic construct
KSTTATA

SEQ ID NO: 35567 - protein, 7 aa, synthetic construct
FNKQVVA

SEQ ID NO: 35568 - protein, 7 aa, synthetic construct
TGKAPNG

SEQ ID NO: 35569 - protein, 7 aa, synthetic construct
IGPAHNK

SEQ ID NO: 35570 - protein, 7 aa, synthetic construct
SHYRMQE

SEQ ID NO: 35571 - protein, 7 aa, synthetic construct
AGKMSVY

SEQ ID NO: 35572 - protein, 7 aa, synthetic construct
MKPASSN

SEQ ID NO: 35573 - protein, 7 aa, synthetic construct
VPRQAGA

SEQ ID NO: 35574 - protein, 7 aa, synthetic construct
PKPMSGA

SEQ ID NO: 35575 - protein, 7 aa, synthetic construct
STAVAKN

SEQ ID NO: 35576 - protein, 7 aa, synthetic construct
LIIHGAG

SEQ ID NO: 35577 - protein, 7 aa, synthetic construct
GKETKAG

SEQ ID NO: 35578 - protein, 7 aa, synthetic construct
QNSPSNL

SEQ ID NO: 35579 - protein, 7 aa, synthetic construct
DPGMKLA

SEQ ID NO: 35580 - protein, 7 aa, synthetic construct
ERRDANS

SEQ ID NO: 35581 - protein, 7 aa, synthetic construct
KTYQVED

SEQ ID NO: 35582 - protein, 7 aa, synthetic construct
IVHKVDG

SEQ ID NO: 35583 - protein, 7 aa, synthetic construct
VGTSVRT

SEQ ID NO: 35584 - protein, 7 aa, synthetic construct
NNRDSKI

SEQ ID NO: 35585 - protein, 7 aa, synthetic construct
VMGIRNT

SEQ ID NO: 35586 - protein, 7 aa, synthetic construct
GATLRPA

SEQ ID NO: 35587 - protein, 7 aa, synthetic construct
IERIPRA

SEQ ID NO: 35588 - protein, 7 aa, synthetic construct
QGSKTNS

SEQ ID NO: 35589 - protein, 7 aa, synthetic construct
MGRNVQG

SEQ ID NO: 35590 - protein, 7 aa, synthetic construct
SNSKPPI

SEQ ID NO: 35591 - protein, 7 aa, synthetic construct
TKSQKGE

SEQ ID NO: 35592 - protein, 7 aa, synthetic construct
KAGTSAM

SEQ ID NO: 35593 - protein, 7 aa, synthetic construct
LIRSVHA

SEQ ID NO: 35594 - protein, 7 aa, synthetic construct
TSNQKPP

SEQ ID NO: 35595 - protein, 7 aa, synthetic construct
PRGNQEW

SEQ ID NO: 35596 - protein, 7 aa, synthetic construct
AANYHDR

SEQ ID NO: 35597 - protein, 7 aa, synthetic construct
FGNTKTG

SEQ ID NO: 35598 - protein, 7 aa, synthetic construct
KPGVTPN

SEQ ID NO: 35599 - protein, 7 aa, synthetic construct
NNTAKMI

SEQ ID NO: 35600 - protein, 7 aa, synthetic construct
SRGIAEF

SEQ ID NO: 35601 - protein, 7 aa, synthetic construct
WDDKLRS

SEQ ID NO: 35602 - protein, 7 aa, synthetic construct
QGRTVPQ

SEQ ID NO: 35603 - protein, 7 aa, synthetic construct
STTGGSN

SEQ ID NO: 35604 - protein, 7 aa, synthetic construct
LGMRGSD

SEQ ID NO: 35605 - protein, 7 aa, synthetic construct
SPRQTHQ

SEQ ID NO: 35606 - protein, 7 aa, synthetic construct
QWKIRED

SEQ ID NO: 35607 - protein, 7 aa, synthetic construct
VKNQSNP

SEQ ID NO: 35608 - protein, 7 aa, synthetic construct
PPKISMN

SEQ ID NO: 35609 - protein, 7 aa, synthetic construct
STVVKNF

SEQ ID NO: 35610 - protein, 7 aa, synthetic construct
RLNNHGN

SEQ ID NO: 35611 - protein, 7 aa, synthetic construct
GKNMGTY

SEQ ID NO: 35612 - protein, 7 aa, synthetic construct
SNTKHTP

SEQ ID NO: 35613 - protein, 7 aa, synthetic construct
MQKSSQN

SEQ ID NO: 35614 - protein, 7 aa, synthetic construct
GNIYSRE

SEQ ID NO: 35615 - protein, 7 aa, synthetic construct
GEKGMRN

SEQ ID NO: 35616 - protein, 7 aa, synthetic construct
TREKATS

SEQ ID NO: 35617 - protein, 7 aa, synthetic construct
GAKKPDG

SEQ ID NO: 35618 - protein, 7 aa, synthetic construct
SPGRNMH

SEQ ID NO: 35619 - protein, 7 aa, synthetic construct
EKSKMAY

SEQ ID NO: 35620 - protein, 7 aa, synthetic construct
KTQNGSI

SEQ ID NO: 35621 - protein, 7 aa, synthetic construct
MGTASKI

SEQ ID NO: 35622 - protein, 7 aa, synthetic construct
QGTRNSP

SEQ ID NO: 35623 - protein, 7 aa, synthetic construct
WSTLNKS

SEQ ID NO: 35624 - protein, 7 aa, synthetic construct
KLHQEGY

SEQ ID NO: 35625 - protein, 7 aa, synthetic construct
VYIGKDA

SEQ ID NO: 35626 - protein, 7 aa, synthetic construct
ERVSRSE

SEQ ID NO: 35627 - protein, 7 aa, synthetic construct
QNSAGKG

SEQ ID NO: 35628 - protein, 7 aa, synthetic construct
SKMSMSG

SEQ ID NO: 35629 - protein, 7 aa, synthetic construct
SGKFNMG

SEQ ID NO: 35630 - protein, 7 aa, synthetic construct
RQSTTAA

SEQ ID NO: 35631 - protein, 7 aa, synthetic construct
SKGNNAA

SEQ ID NO: 35632 - protein, 7 aa, synthetic construct
VNLKAGM

SEQ ID NO: 35633 - protein, 7 aa, synthetic construct
TRNAQTG

SEQ ID NO: 35634 - protein, 7 aa, synthetic construct
DMQYHKA

SEQ ID NO: 35635 - protein, 7 aa, synthetic construct
GMNKGKD

SEQ ID NO: 35636 - protein, 7 aa, synthetic construct
RNTFMTD

SEQ ID NO: 35637 - protein, 7 aa, synthetic construct
MREEWSA

SEQ ID NO: 35638 - protein, 7 aa, synthetic construct
LGQMAQR

SEQ ID NO: 35639 - protein, 7 aa, synthetic construct
VTKGNSL

SEQ ID NO: 35640 - protein, 7 aa, synthetic construct
PSNSTTL

SEQ ID NO: 35641 - protein, 7 aa, synthetic construct
TIQGPKA

SEQ ID NO: 35642 - protein, 7 aa, synthetic construct
KNPDARG

SEQ ID NO: 35643 - protein, 7 aa, synthetic construct
GMRTTAG

SEQ ID NO: 35644 - protein, 7 aa, synthetic construct
LAKQANI

SEQ ID NO: 35645 - protein, 7 aa, synthetic construct
TKQSQGA

SEQ ID NO: 35646 - protein, 7 aa, synthetic construct
MKGNSAP

SEQ ID NO: 35647 - protein, 7 aa, synthetic construct
LRAFVDG

SEQ ID NO: 35648 - protein, 7 aa, synthetic construct
QPGSSAR

SEQ ID NO: 35649 - protein, 7 aa, synthetic construct
DHFTKKS

SEQ ID NO: 35650 - protein, 7 aa, synthetic construct
YKQNVVG

SEQ ID NO: 35651 - protein, 7 aa, synthetic construct
FDQLSNR

SEQ ID NO: 35652 - protein, 7 aa, synthetic construct
AHPVAKN

SEQ ID NO: 35653 - protein, 7 aa, synthetic construct
STKVTIT

SEQ ID NO: 35654 - protein, 7 aa, synthetic construct
FKDKPYV

SEQ ID NO: 35655 - protein, 7 aa, synthetic construct
NKSGAVG

SEQ ID NO: 35656 - protein, 7 aa, synthetic construct
MRGSNTV

SEQ ID NO: 35657 - protein, 7 aa, synthetic construct
RPPSGLA

SEQ ID NO: 35658 - protein, 7 aa, synthetic construct
NNAQRSA

SEQ ID NO: 35659 - protein, 7 aa, synthetic construct
SMQSAAR

SEQ ID NO: 35660 - protein, 7 aa, synthetic construct
GAPQRSP

SEQ ID NO: 35661 - protein, 7 aa, synthetic construct
TGPGQAK

SEQ ID NO: 35662 - protein, 7 aa, synthetic construct
LGSQTQH

SEQ ID NO: 35663 - protein, 7 aa, synthetic construct
TDMRTPM

SEQ ID NO: 35664 - protein, 7 aa, synthetic construct
NMGNSKP

SEQ ID NO: 35665 - protein, 7 aa, synthetic construct
NHGRNQT

SEQ ID NO: 35666 - protein, 7 aa, synthetic construct
LQSRTAS

SEQ ID NO: 35667 - protein, 7 aa, synthetic construct
LGLAHGP

SEQ ID NO: 35668 - protein, 7 aa, synthetic construct
YGAPIRE

SEQ ID NO: 35669 - protein, 7 aa, synthetic construct
LGSQRQY

SEQ ID NO: 35670 - protein, 7 aa, synthetic construct
LDRVGHQ

SEQ ID NO: 35671 - protein, 7 aa, synthetic construct
GLKVDLG

SEQ ID NO: 35672 - protein, 7 aa, synthetic construct
MNTRYGP

SEQ ID NO: 35673 - protein, 7 aa, synthetic construct
YPKTPTA

SEQ ID NO: 35674 - protein, 7 aa, synthetic construct
TNAQSKG

SEQ ID NO: 35675 - protein, 7 aa, synthetic construct
MPRGDKG

SEQ ID NO: 35676 - protein, 7 aa, synthetic construct
EKYRGEG

SEQ ID NO: 35677 - protein, 7 aa, synthetic construct
DTHYVMK

SEQ ID NO: 35678 - protein, 7 aa, synthetic construct
YAPAVAT

SEQ ID NO: 35679 - protein, 7 aa, synthetic construct
YGTTKQG

SEQ ID NO: 35680 - protein, 7 aa, synthetic construct
NQIHDKI

SEQ ID NO: 35681 - protein, 7 aa, synthetic construct
QPKGLMA

SEQ ID NO: 35682 - protein, 7 aa, synthetic construct
TPSMKTS

SEQ ID NO: 35683 - protein, 7 aa, synthetic construct
RQVEPAK

SEQ ID NO: 35684 - protein, 7 aa, synthetic construct
VSGHWKE

SEQ ID NO: 35685 - protein, 7 aa, synthetic construct
NATRLSP

SEQ ID NO: 35686 - protein, 7 aa, synthetic construct
MQGVVSR

SEQ ID NO: 35687 - protein, 7 aa, synthetic construct
MINGIGK

SEQ ID NO: 35688 - protein, 7 aa, synthetic construct
KPTSGSA

SEQ ID NO: 35689 - protein, 7 aa, synthetic construct
MTKMAKD

SEQ ID NO: 35690 - protein, 7 aa, synthetic construct
AMPSKAD

SEQ ID NO: 35691 - protein, 7 aa, synthetic construct
GKREIYG

SEQ ID NO: 35692 - protein, 7 aa, synthetic construct
VGKTYPH

SEQ ID NO: 35693 - protein, 7 aa, synthetic construct
SYKAHDG

SEQ ID NO: 35694 - protein, 7 aa, synthetic construct
DHSRVLP

SEQ ID NO: 35695 - protein, 7 aa, synthetic construct
WQKNEQK

SEQ ID NO: 35696 - protein, 7 aa, synthetic construct
LAGFKHN

SEQ ID NO: 35697 - protein, 7 aa, synthetic construct
MLPKEKG

SEQ ID NO: 35698 - protein, 7 aa, synthetic construct
NKDNYNK

SEQ ID NO: 35699 - protein, 7 aa, synthetic construct
SNKQTSS

SEQ ID NO: 35700 - protein, 7 aa, synthetic construct
GQQAKGG

SEQ ID NO: 35701 - protein, 7 aa, synthetic construct
YPKSISN

SEQ ID NO: 35702 - protein, 7 aa, synthetic construct
SSRNALN

SEQ ID NO: 35703 - protein, 7 aa, synthetic construct
IDYRVKT

SEQ ID NO: 35704 - protein, 7 aa, synthetic construct
GKGSNMG

SEQ ID NO: 35705 - protein, 7 aa, synthetic construct
VKHDMAT

SEQ ID NO: 35706 - protein, 7 aa, synthetic construct
KQMRLEA

SEQ ID NO: 35707 - protein, 7 aa, synthetic construct
NKASTSN

SEQ ID NO: 35708 - protein, 7 aa, synthetic construct
MGRGVQM

SEQ ID NO: 35709 - protein, 7 aa, synthetic construct
TITMHSS

SEQ ID NO: 35710 - protein, 7 aa, synthetic construct
MDQKQAG

SEQ ID NO: 35711 - protein, 7 aa, synthetic construct
AILHGGG

SEQ ID NO: 35712 - protein, 7 aa, synthetic construct
NHIRAKE

SEQ ID NO: 35713 - protein, 7 aa, synthetic construct
MNSTRSP

SEQ ID NO: 35714 - protein, 7 aa, synthetic construct
NPKSSYG

SEQ ID NO: 35715 - protein, 7 aa, synthetic construct
RGSTVVG

SEQ ID NO: 35716 - protein, 7 aa, synthetic construct
GGRALEW

SEQ ID NO: 35717 - protein, 7 aa, synthetic construct
QTSGIHG

SEQ ID NO: 35718 - protein, 7 aa, synthetic construct
NKAQISG

SEQ ID NO: 35719 - protein, 7 aa, synthetic construct
TSRSTQI

SEQ ID NO: 35720 - protein, 7 aa, synthetic construct
KYSTTAD

SEQ ID NO: 35721 - protein, 7 aa, synthetic construct
NSKGATN

SEQ ID NO: 35722 - protein, 7 aa, synthetic construct
GSHMVRG

SEQ ID NO: 35723 - protein, 7 aa, synthetic construct
DKKTSNA

SEQ ID NO: 35724 - protein, 7 aa, synthetic construct
TIASRGG

SEQ ID NO: 35725 - protein, 7 aa, synthetic construct
DQYTKTG

SEQ ID NO: 35726 - protein, 7 aa, synthetic construct
VNTQRGA

SEQ ID NO: 35727 - protein, 7 aa, synthetic construct
LGPRQQL

SEQ ID NO: 35728 - protein, 7 aa, synthetic construct
NRGDMMA

SEQ ID NO: 35729 - protein, 7 aa, synthetic construct
YGSQKAT

SEQ ID NO: 35730 - protein, 7 aa, synthetic construct
QNEVRNG

SEQ ID NO: 35731 - protein, 7 aa, synthetic construct
NGASRQS

SEQ ID NO: 35732 - protein, 7 aa, synthetic construct
MASPTFA

SEQ ID NO: 35733 - protein, 7 aa, synthetic construct
QHSVGGP

SEQ ID NO: 35734 - protein, 7 aa, synthetic construct
DMGRPKN

SEQ ID NO: 35735 - protein, 7 aa, synthetic construct
NERIRTD

SEQ ID NO: 35736 - protein, 7 aa, synthetic construct
TKSSIGG

SEQ ID NO: 35737 - protein, 7 aa, synthetic construct
GVPYAQN

SEQ ID NO: 35738 - protein, 7 aa, synthetic construct
DEKGWGG

SEQ ID NO: 35739 - protein, 7 aa, synthetic construct
YPAKTGN

SEQ ID NO: 35740 - protein, 7 aa, synthetic construct
HAPKYAA

SEQ ID NO: 35741 - protein, 7 aa, synthetic construct
NKGTPMG

SEQ ID NO: 35742 - protein, 7 aa, synthetic construct
METYLKK

SEQ ID NO: 35743 - protein, 7 aa, synthetic construct
IATTQKA

SEQ ID NO: 35744 - protein, 7 aa, synthetic construct
AQKQGFY

SEQ ID NO: 35745 - protein, 7 aa, synthetic construct
TVKAMHG

SEQ ID NO: 35746 - protein, 7 aa, synthetic construct
NKLQQPQ

SEQ ID NO: 35747 - protein, 7 aa, synthetic construct
AYKTPGT

SEQ ID NO: 35748 - protein, 7 aa, synthetic construct
RGPIIAG

SEQ ID NO: 35749 - protein, 7 aa, synthetic construct
NGKKWDP

SEQ ID NO: 35750 - protein, 7 aa, synthetic construct
MKSPMQA

SEQ ID NO: 35751 - protein, 7 aa, synthetic construct
TNMKAGG

SEQ ID NO: 35752 - protein, 7 aa, synthetic construct
QVRPAGY

SEQ ID NO: 35753 - protein, 7 aa, synthetic construct
KISIRHD

SEQ ID NO: 35754 - protein, 7 aa, synthetic construct
KGNAAMG

SEQ ID NO: 35755 - protein, 7 aa, synthetic construct
QRQPEIG

SEQ ID NO: 35756 - protein, 7 aa, synthetic construct
NNWSKQE

SEQ ID NO: 35757 - protein, 7 aa, synthetic construct
KTQQGGA

SEQ ID NO: 35758 - protein, 7 aa, synthetic construct
YTQITPS

SEQ ID NO: 35759 - protein, 7 aa, synthetic construct
DNLTTVR

SEQ ID NO: 35760 - protein, 7 aa, synthetic construct
RMPAQND

SEQ ID NO: 35761 - protein, 7 aa, synthetic construct
GANKGIM

SEQ ID NO: 35762 - protein, 7 aa, synthetic construct
NVRGVTG

SEQ ID NO: 35763 - protein, 7 aa, synthetic construct
MEVRGHT

SEQ ID NO: 35764 - protein, 7 aa, synthetic construct
EYPVPSG

SEQ ID NO: 35765 - protein, 7 aa, synthetic construct
HTATRTA

SEQ ID NO: 35766 - protein, 7 aa, synthetic construct
NKQGQQL

SEQ ID NO: 35767 - protein, 7 aa, synthetic construct
HMHSTHS

SEQ ID NO: 35768 - protein, 7 aa, synthetic construct
KIQTMPG

SEQ ID NO: 35769 - protein, 7 aa, synthetic construct
ILSKYQA

SEQ ID NO: 35770 - protein, 7 aa, synthetic construct
TFRHDSQ

SEQ ID NO: 35771 - protein, 7 aa, synthetic construct
GKNGTMA

SEQ ID NO: 35772 - protein, 7 aa, synthetic construct
GIKYNSS

SEQ ID NO: 35773 - protein, 7 aa, synthetic construct
KMATGRD

SEQ ID NO: 35774 - protein, 7 aa, synthetic construct
QVNAMRG

SEQ ID NO: 35775 - protein, 7 aa, synthetic construct
RVDGAYA

SEQ ID NO: 35776 - protein, 7 aa, synthetic construct
NQFKSTP

SEQ ID NO: 35777 - protein, 7 aa, synthetic construct
VFKTGYG

SEQ ID NO: 35778 - protein, 7 aa, synthetic construct
FKGAVHS

SEQ ID NO: 35779 - protein, 7 aa, synthetic construct
QKGGTNN

SEQ ID NO: 35780 - protein, 7 aa, synthetic construct
RFDQNPV

SEQ ID NO: 35781 - protein, 7 aa, synthetic construct
NGGRSVG

SEQ ID NO: 35782 - protein, 7 aa, synthetic construct
IGHVRSA

SEQ ID NO: 35783 - protein, 7 aa, synthetic construct
VKGHAPM

SEQ ID NO: 35784 - protein, 7 aa, synthetic construct
YKTASTP

SEQ ID NO: 35785 - protein, 7 aa, synthetic construct
GFSRFGA

SEQ ID NO: 35786 - protein, 7 aa, synthetic construct
TKMAKAE

SEQ ID NO: 35787 - protein, 7 aa, synthetic construct
GGGGYSA

SEQ ID NO: 35788 - protein, 7 aa, synthetic construct
INPRVVT

SEQ ID NO: 35789 - protein, 7 aa, synthetic construct
DPVRVNS

SEQ ID NO: 35790 - protein, 7 aa, synthetic construct
NVKQSGG

SEQ ID NO: 35791 - protein, 7 aa, synthetic construct
QPGHSKS

SEQ ID NO: 35792 - protein, 7 aa, synthetic construct
DFKGLRP

SEQ ID NO: 35793 - protein, 7 aa, synthetic construct
SKPKTGE

SEQ ID NO: 35794 - protein, 7 aa, synthetic construct
RRDQPEA

SEQ ID NO: 35795 - protein, 7 aa, synthetic construct
ANRPSHD

SEQ ID NO: 35796 - protein, 7 aa, synthetic construct
GRVTVIQ

SEQ ID NO: 35797 - protein, 7 aa, synthetic construct
NSRATAA

SEQ ID NO: 35798 - protein, 7 aa, synthetic construct
NRQEVKG

SEQ ID NO: 35799 - protein, 7 aa, synthetic construct
MSKVAGG

SEQ ID NO: 35800 - protein, 7 aa, synthetic construct
VHVAGAM

SEQ ID NO: 35801 - protein, 7 aa, synthetic construct
QHTQNRG

SEQ ID NO: 35802 - protein, 7 aa, synthetic construct
KQPNVTA

SEQ ID NO: 35803 - protein, 7 aa, synthetic construct
YASKMSG

SEQ ID NO: 35804 - protein, 7 aa, synthetic construct
FNNTAGN

SEQ ID NO: 35805 - protein, 7 aa, synthetic construct
NLSTHVH

SEQ ID NO: 35806 - protein, 7 aa, synthetic construct
NYRQHEG

SEQ ID NO: 35807 - protein, 7 aa, synthetic construct
FYSNKHG

SEQ ID NO: 35808 - protein, 7 aa, synthetic construct
IPSGQMG

SEQ ID NO: 35809 - protein, 7 aa, synthetic construct
KGLNQTS

SEQ ID NO: 35810 - protein, 7 aa, synthetic construct
RKDVNGS

SEQ ID NO: 35811 - protein, 7 aa, synthetic construct
AAVQNVH

SEQ ID NO: 35812 - protein, 7 aa, synthetic construct
NKATTQS

SEQ ID NO: 35813 - protein, 7 aa, synthetic construct
VSSKQAG

SEQ ID NO: 35814 - protein, 7 aa, synthetic construct
NQGGKNP

SEQ ID NO: 35815 - protein, 7 aa, synthetic construct
SNKVNNG

SEQ ID NO: 35816 - protein, 7 aa, synthetic construct
GHAAIRA

SEQ ID NO: 35817 - protein, 7 aa, synthetic construct
KYPTVTG

SEQ ID NO: 35818 - protein, 7 aa, synthetic construct
TNQVVSH

SEQ ID NO: 35819 - protein, 7 aa, synthetic construct
WNHGVKA

SEQ ID NO: 35820 - protein, 7 aa, synthetic construct
KHAVQMD

SEQ ID NO: 35821 - protein, 7 aa, synthetic construct
KPGGRGE

SEQ ID NO: 35822 - protein, 7 aa, synthetic construct
PKVNTQG

SEQ ID NO: 35823 - protein, 7 aa, synthetic construct
PQKTPGG

SEQ ID NO: 35824 - protein, 7 aa, synthetic construct
VGVRWPD

SEQ ID NO: 35825 - protein, 7 aa, synthetic construct
IKSTPGT

SEQ ID NO: 35826 - protein, 7 aa, synthetic construct
RQQGMNS

SEQ ID NO: 35827 - protein, 7 aa, synthetic construct
NASKIQA

SEQ ID NO: 35828 - protein, 7 aa, synthetic construct
THFSSSA

SEQ ID NO: 35829 - protein, 7 aa, synthetic construct
LGSLNGA

SEQ ID NO: 35830 - protein, 7 aa, synthetic construct
ASGHSIP

SEQ ID NO: 35831 - protein, 7 aa, synthetic construct
LQNHAKF

SEQ ID NO: 35832 - protein, 7 aa, synthetic construct
KLHYANA

SEQ ID NO: 35833 - protein, 7 aa, synthetic construct
GSMAPRG

SEQ ID NO: 35834 - protein, 7 aa, synthetic construct
GKYATSG

SEQ ID NO: 35835 - protein, 7 aa, synthetic construct
TNGHMAS

SEQ ID NO: 35836 - protein, 7 aa, synthetic construct
TNKVNLG

SEQ ID NO: 35837 - protein, 7 aa, synthetic construct
IVSRHMA

SEQ ID NO: 35838 - protein, 7 aa, synthetic construct
LQNRNFD

SEQ ID NO: 35839 - protein, 7 aa, synthetic construct
NLQKAPA

SEQ ID NO: 35840 - protein, 7 aa, synthetic construct
MSYGSSG

SEQ ID NO: 35841 - protein, 7 aa, synthetic construct
KETPARS

SEQ ID NO: 35842 - protein, 7 aa, synthetic construct
YMGHIEV

SEQ ID NO: 35843 - protein, 7 aa, synthetic construct
TYSNMSV

SEQ ID NO: 35844 - protein, 7 aa, synthetic construct
TWGKEQD

SEQ ID NO: 35845 - protein, 7 aa, synthetic construct
NYASNRP

SEQ ID NO: 35846 - protein, 7 aa, synthetic construct
GKPHKDS

SEQ ID NO: 35847 - protein, 7 aa, synthetic construct
TTAHSAA

SEQ ID NO: 35848 - protein, 7 aa, synthetic construct
NRPSTNP

SEQ ID NO: 35849 - protein, 7 aa, synthetic construct
RDKFSND

SEQ ID NO: 35850 - protein, 7 aa, synthetic construct
QYPPYKQ

SEQ ID NO: 35851 - protein, 7 aa, synthetic construct
FGKTVKD

SEQ ID NO: 35852 - protein, 7 aa, synthetic construct
YQSKSNP

SEQ ID NO: 35853 - protein, 7 aa, synthetic construct
HQIPGGP

SEQ ID NO: 35854 - protein, 7 aa, synthetic construct
MNSMTNH

SEQ ID NO: 35855 - protein, 7 aa, synthetic construct
TASKVSP

SEQ ID NO: 35856 - protein, 7 aa, synthetic construct
HSKQDGA

SEQ ID NO: 35857 - protein, 7 aa, synthetic construct
MPSGYPG

SEQ ID NO: 35858 - protein, 7 aa, synthetic construct
NKANISG

SEQ ID NO: 35859 - protein, 7 aa, synthetic construct
FTPGRTE

SEQ ID NO: 35860 - protein, 7 aa, synthetic construct
SKTQMTG

SEQ ID NO: 35861 - protein, 7 aa, synthetic construct
TKEKDRT

SEQ ID NO: 35862 - protein, 7 aa, synthetic construct
KQGNMLI

SEQ ID NO: 35863 - protein, 7 aa, synthetic construct
RNPSTNV

SEQ ID NO: 35864 - protein, 7 aa, synthetic construct
YGARTTG

SEQ ID NO: 35865 - protein, 7 aa, synthetic construct
RPTQQAA

SEQ ID NO: 35866 - protein, 7 aa, synthetic construct
HNHRLES

SEQ ID NO: 35867 - protein, 7 aa, synthetic construct
KQASSIA

SEQ ID NO: 35868 - protein, 7 aa, synthetic construct
QGVTQHG

SEQ ID NO: 35869 - protein, 7 aa, synthetic construct
MKNQMSA

SEQ ID NO: 35870 - protein, 7 aa, synthetic construct
KGTTAQG

SEQ ID NO: 35871 - protein, 7 aa, synthetic construct
KQASNMN

SEQ ID NO: 35872 - protein, 7 aa, synthetic construct
SKPISKD

SEQ ID NO: 35873 - protein, 7 aa, synthetic construct
QMKSNSA

SEQ ID NO: 35874 - protein, 7 aa, synthetic construct
TAMSKNA

SEQ ID NO: 35875 - protein, 7 aa, synthetic construct
YNPPAKA

SEQ ID NO: 35876 - protein, 7 aa, synthetic construct
EAKGKAF

SEQ ID NO: 35877 - protein, 7 aa, synthetic construct
KVARGGE

SEQ ID NO: 35878 - protein, 7 aa, synthetic construct
TGFHTSM

SEQ ID NO: 35879 - protein, 7 aa, synthetic construct
YSKHNMD

SEQ ID NO: 35880 - protein, 7 aa, synthetic construct
RPPVSGG

SEQ ID NO: 35881 - protein, 7 aa, synthetic construct
KAKSSED

SEQ ID NO: 35882 - protein, 7 aa, synthetic construct
VNQRGQA

SEQ ID NO: 35883 - protein, 7 aa, synthetic construct
QKQHPNV

SEQ ID NO: 35884 - protein, 7 aa, synthetic construct
KTASVAG

SEQ ID NO: 35885 - protein, 7 aa, synthetic construct
PRPVFQD

SEQ ID NO: 35886 - protein, 7 aa, synthetic construct
PFRAQPI

SEQ ID NO: 35887 - protein, 7 aa, synthetic construct
GPWAGPP

SEQ ID NO: 35888 - protein, 7 aa, synthetic construct
VGYRTHE

SEQ ID NO: 35889 - protein, 7 aa, synthetic construct
MIQPVKG

SEQ ID NO: 35890 - protein, 7 aa, synthetic construct
RQSSGTG

SEQ ID NO: 35891 - protein, 7 aa, synthetic construct
HGNQYMS

SEQ ID NO: 35892 - protein, 7 aa, synthetic construct
DRYKAHS

SEQ ID NO: 35893 - protein, 7 aa, synthetic construct
TKNNQAA

SEQ ID NO: 35894 - protein, 7 aa, synthetic construct
NYRDVPI

SEQ ID NO: 35895 - protein, 7 aa, synthetic construct
MNKTGVA

SEQ ID NO: 35896 - protein, 7 aa, synthetic construct
TKNWASG

SEQ ID NO: 35897 - protein, 7 aa, synthetic construct
VRSTSPA

SEQ ID NO: 35898 - protein, 7 aa, synthetic construct
PTKGAQG

SEQ ID NO: 35899 - protein, 7 aa, synthetic construct
FKSGASA

SEQ ID NO: 35900 - protein, 7 aa, synthetic construct
NAANQKG

SEQ ID NO: 35901 - protein, 7 aa, synthetic construct
GNKQRAE

SEQ ID NO: 35902 - protein, 7 aa, synthetic construct
MLPMLAS

SEQ ID NO: 35903 - protein, 7 aa, synthetic construct
IGAKPVT

SEQ ID NO: 35904 - protein, 7 aa, synthetic construct
FNVGSTI

SEQ ID NO: 35905 - protein, 7 aa, synthetic construct
KPVILKN

SEQ ID NO: 35906 - protein, 7 aa, synthetic construct
KMSGSNV

SEQ ID NO: 35907 - protein, 7 aa, synthetic construct
LVPKHNG

SEQ ID NO: 35908 - protein, 7 aa, synthetic construct
VFTETRA

SEQ ID NO: 35909 - protein, 7 aa, synthetic construct
YIQRYGE

SEQ ID NO: 35910 - protein, 7 aa, synthetic construct
RQAQGNP

SEQ ID NO: 35911 - protein, 7 aa, synthetic construct
GIKMATP

SEQ ID NO: 35912 - protein, 7 aa, synthetic construct
GPGHSHA

SEQ ID NO: 35913 - protein, 7 aa, synthetic construct
KAGEKVQ

SEQ ID NO: 35914 - protein, 7 aa, synthetic construct
PTKSASG

SEQ ID NO: 35915 - protein, 7 aa, synthetic construct
MRSGQGG

SEQ ID NO: 35916 - protein, 7 aa, synthetic construct
GQKSNTP

SEQ ID NO: 35917 - protein, 7 aa, synthetic construct
KPQTGFA

SEQ ID NO: 35918 - protein, 7 aa, synthetic construct
ADSGGSW

SEQ ID NO: 35919 - protein, 7 aa, synthetic construct
HDRNTSQ

SEQ ID NO: 35920 - protein, 7 aa, synthetic construct
NGGRTAP

SEQ ID NO: 35921 - protein, 7 aa, synthetic construct
KKDPSRD

SEQ ID NO: 35922 - protein, 7 aa, synthetic construct
QMKSTGG

SEQ ID NO: 35923 - protein, 7 aa, synthetic construct
MKTWKEA

SEQ ID NO: 35924 - protein, 7 aa, synthetic construct
HGIYREN

SEQ ID NO: 35925 - protein, 7 aa, synthetic construct
WKPHQKD

SEQ ID NO: 35926 - protein, 7 aa, synthetic construct
RKIVTSE

SEQ ID NO: 35927 - protein, 7 aa, synthetic construct
HPPNYGG

SEQ ID NO: 35928 - protein, 7 aa, synthetic construct
NEKGRNS

SEQ ID NO: 35929 - protein, 7 aa, synthetic construct
FKNTNSE

SEQ ID NO: 35930 - protein, 7 aa, synthetic construct
SYGRTEI

SEQ ID NO: 35931 - protein, 7 aa, synthetic construct
ARGTTVG

SEQ ID NO: 35932 - protein, 7 aa, synthetic construct
IANYGLG

SEQ ID NO: 35933 - protein, 7 aa, synthetic construct
DNGVKKG

SEQ ID NO: 35934 - protein, 7 aa, synthetic construct
QHNQKTE

SEQ ID NO: 35935 - protein, 7 aa, synthetic construct
QGNDKRG

SEQ ID NO: 35936 - protein, 7 aa, synthetic construct
KDKNSTS

SEQ ID NO: 35937 - protein, 7 aa, synthetic construct
KGNSTVP

SEQ ID NO: 35938 - protein, 7 aa, synthetic construct
TRTGKGE

SEQ ID NO: 35939 - protein, 7 aa, synthetic construct
QKTVSPG

SEQ ID NO: 35940 - protein, 7 aa, synthetic construct
SVSGSRP

SEQ ID NO: 35941 - protein, 7 aa, synthetic construct
YKDKHGF

SEQ ID NO: 35942 - protein, 7 aa, synthetic construct
QAKPSSG

SEQ ID NO: 35943 - protein, 7 aa, synthetic construct
LKSGNVG

SEQ ID NO: 35944 - protein, 7 aa, synthetic construct
FGRGNHD

SEQ ID NO: 35945 - protein, 7 aa, synthetic construct
NAQRIGG

SEQ ID NO: 35946 - protein, 7 aa, synthetic construct
RDKSSQN

SEQ ID NO: 35947 - protein, 7 aa, synthetic construct
NAHRNAD

SEQ ID NO: 35948 - protein, 7 aa, synthetic construct
TEWHGSE

SEQ ID NO: 35949 - protein, 7 aa, synthetic construct
KPNHTMA

SEQ ID NO: 35950 - protein, 7 aa, synthetic construct
THLGQKI

SEQ ID NO: 35951 - protein, 7 aa, synthetic construct
FKGRDDG

SEQ ID NO: 35952 - protein, 7 aa, synthetic construct
NPTARHE

SEQ ID NO: 35953 - protein, 7 aa, synthetic construct
YNKQMKD

SEQ ID NO: 35954 - protein, 7 aa, synthetic construct
STLGNKM

SEQ ID NO: 35955 - protein, 7 aa, synthetic construct
SGASRLA

SEQ ID NO: 35956 - protein, 7 aa, synthetic construct
KNASPQG

SEQ ID NO: 35957 - protein, 7 aa, synthetic construct
NKYKQSE

SEQ ID NO: 35958 - protein, 7 aa, synthetic construct
RMNSVGG

SEQ ID NO: 35959 - protein, 7 aa, synthetic construct
VRQTSPP

SEQ ID NO: 35960 - protein, 7 aa, synthetic construct
ATRESSF

SEQ ID NO: 35961 - protein, 7 aa, synthetic construct
SRGGLMN

SEQ ID NO: 35962 - protein, 7 aa, synthetic construct
VKNGNAY

SEQ ID NO: 35963 - protein, 7 aa, synthetic construct
TGKAAQG

SEQ ID NO: 35964 - protein, 7 aa, synthetic construct
QTPNNSA

SEQ ID NO: 35965 - protein, 7 aa, synthetic construct
DPRKHLQ

SEQ ID NO: 35966 - protein, 7 aa, synthetic construct
LNHGQIQ

SEQ ID NO: 35967 - protein, 7 aa, synthetic construct
QRNNSVA

SEQ ID NO: 35968 - protein, 7 aa, synthetic construct
NGYSKEP

SEQ ID NO: 35969 - protein, 7 aa, synthetic construct
NIYTHHD

SEQ ID NO: 35970 - protein, 7 aa, synthetic construct
TQFVPSG

SEQ ID NO: 35971 - protein, 7 aa, synthetic construct
VRSQQAG

SEQ ID NO: 35972 - protein, 7 aa, synthetic construct
MKQSMAA

SEQ ID NO: 35973 - protein, 7 aa, synthetic construct
MTSQRAG

SEQ ID NO: 35974 - protein, 7 aa, synthetic construct
QNKQGSA

SEQ ID NO: 35975 - protein, 7 aa, synthetic construct
TKTDRSG

SEQ ID NO: 35976 - protein, 7 aa, synthetic construct
QRSNSMA

SEQ ID NO: 35977 - protein, 7 aa, synthetic construct
NQTRPSV

SEQ ID NO: 35978 - protein, 7 aa, synthetic construct
KMTGATS

SEQ ID NO: 35979 - protein, 7 aa, synthetic construct
GMIDTGR

SEQ ID NO: 35980 - protein, 7 aa, synthetic construct
DTGHKMA

SEQ ID NO: 35981 - protein, 7 aa, synthetic construct
NQGRIQA

SEQ ID NO: 35982 - protein, 7 aa, synthetic construct
FKTAIEE

SEQ ID NO: 35983 - protein, 7 aa, synthetic construct
AIKGTFG

SEQ ID NO: 35984 - protein, 7 aa, synthetic construct
SGRQERV

SEQ ID NO: 35985 - protein, 7 aa, synthetic construct
PTHTAMH

SEQ ID NO: 35986 - protein, 7 aa, synthetic construct
MQVGRRD

SEQ ID NO: 35987 - protein, 7 aa, synthetic construct
QTGKSNA

SEQ ID NO: 35988 - protein, 7 aa, synthetic construct
TQRIEHI

SEQ ID NO: 35989 - protein, 7 aa, synthetic construct
NKIGNPQ

SEQ ID NO: 35990 - protein, 7 aa, synthetic construct
EATMRMS

SEQ ID NO: 35991 - protein, 7 aa, synthetic construct
QHLRAYE

SEQ ID NO: 35992 - protein, 7 aa, synthetic construct
MKGTNSP

SEQ ID NO: 35993 - protein, 7 aa, synthetic construct
GNKVPDN

SEQ ID NO: 35994 - protein, 7 aa, synthetic construct
YVGPKSP

SEQ ID NO: 35995 - protein, 7 aa, synthetic construct
LNPLGQH

SEQ ID NO: 35996 - protein, 7 aa, synthetic construct
TGESRAG

SEQ ID NO: 35997 - protein, 7 aa, synthetic construct
EGKLVPP

SEQ ID NO: 35998 - protein, 7 aa, synthetic construct
KQGGTTA

SEQ ID NO: 35999 - protein, 7 aa, synthetic construct
TREGWKD

SEQ ID NO: 36000 - protein, 7 aa, synthetic construct
TTGRGNG

SEQ ID NO: 36001 - protein, 7 aa, synthetic construct
VLGSNQG

SEQ ID NO: 36002 - protein, 7 aa, synthetic construct
IQTKPSS

SEQ ID NO: 36003 - protein, 7 aa, synthetic construct
TGRTFAP

SEQ ID NO: 36004 - protein, 7 aa, synthetic construct
TSQVRQG

SEQ ID NO: 36005 - protein, 7 aa, synthetic construct
KVNNTAG

SEQ ID NO: 36006 - protein, 7 aa, synthetic construct
TGKPPQA

SEQ ID NO: 36007 - protein, 7 aa, synthetic construct
MNQNAKG

SEQ ID NO: 36008 - protein, 7 aa, synthetic construct
GTRTANG

SEQ ID NO: 36009 - protein, 7 aa, synthetic construct
MGSNNNK

SEQ ID NO: 36010 - protein, 7 aa, synthetic construct
AMKVSSG

SEQ ID NO: 36011 - protein, 7 aa, synthetic construct
ERDQIMG

SEQ ID NO: 36012 - protein, 7 aa, synthetic construct
ITRGREP

SEQ ID NO: 36013 - protein, 7 aa, synthetic construct
SRTTNNG

SEQ ID NO: 36014 - protein, 7 aa, synthetic construct
YNGLRTQ

SEQ ID NO: 36015 - protein, 7 aa, synthetic construct
GPKPNTG

SEQ ID NO: 36016 - protein, 7 aa, synthetic construct
VNKHDPQ

SEQ ID NO: 36017 - protein, 7 aa, synthetic construct
TGKSTGA

SEQ ID NO: 36018 - protein, 7 aa, synthetic construct
HVQHKDI

SEQ ID NO: 36019 - protein, 7 aa, synthetic construct
GASQKNG

SEQ ID NO: 36020 - protein, 7 aa, synthetic construct
RNPTAAG

SEQ ID NO: 36021 - protein, 7 aa, synthetic construct
QNPPKQN

SEQ ID NO: 36022 - protein, 7 aa, synthetic construct
SGYKTGH

SEQ ID NO: 36023 - protein, 7 aa, synthetic construct
RSGSTQA

SEQ ID NO: 36024 - protein, 7 aa, synthetic construct
KGPVRSD

SEQ ID NO: 36025 - protein, 7 aa, synthetic construct
RPSGALG

SEQ ID NO: 36026 - protein, 7 aa, synthetic construct
ASPRFLG

SEQ ID NO: 36027 - protein, 7 aa, synthetic construct
KQPSNMQ

SEQ ID NO: 36028 - protein, 7 aa, synthetic construct
INRQAGA

SEQ ID NO: 36029 - protein, 7 aa, synthetic construct
GGVRAQS

SEQ ID NO: 36030 - protein, 7 aa, synthetic construct
RKEGPGA

SEQ ID NO: 36031 - protein, 7 aa, synthetic construct
YFGANAK

SEQ ID NO: 36032 - protein, 7 aa, synthetic construct
VQPRRDA

SEQ ID NO: 36033 - protein, 7 aa, synthetic construct
WLKDRSG

SEQ ID NO: 36034 - protein, 7 aa, synthetic construct
MKNAVRE

SEQ ID NO: 36035 - protein, 7 aa, synthetic construct
KGTGTGG

SEQ ID NO: 36036 - protein, 7 aa, synthetic construct
MTTKGGG

SEQ ID NO: 36037 - protein, 7 aa, synthetic construct
NKPTGTM

SEQ ID NO: 36038 - protein, 7 aa, synthetic construct
NRQSANV

SEQ ID NO: 36039 - protein, 7 aa, synthetic construct
VVKNFSA

SEQ ID NO: 36040 - protein, 7 aa, synthetic construct
STQRQNA

SEQ ID NO: 36041 - protein, 7 aa, synthetic construct
YMGNRNS

SEQ ID NO: 36042 - protein, 7 aa, synthetic construct
SMSKSTP

SEQ ID NO: 36043 - protein, 7 aa, synthetic construct
ARNTLPQ

SEQ ID NO: 36044 - protein, 7 aa, synthetic construct
VKNAQTS

SEQ ID NO: 36045 - protein, 7 aa, synthetic construct
VHGNATL

SEQ ID NO: 36046 - protein, 7 aa, synthetic construct
GNIRGDL

SEQ ID NO: 36047 - protein, 7 aa, synthetic construct
TDMRAKG

SEQ ID NO: 36048 - protein, 7 aa, synthetic construct
KAQQVHV

SEQ ID NO: 36049 - protein, 7 aa, synthetic construct
LGNRGQG

SEQ ID NO: 36050 - protein, 7 aa, synthetic construct
TPKVNQA

SEQ ID NO: 36051 - protein, 7 aa, synthetic construct
FAVSGHG

SEQ ID NO: 36052 - protein, 7 aa, synthetic construct
IGGRTGN

SEQ ID NO: 36053 - protein, 7 aa, synthetic construct
AGTTNKS

SEQ ID NO: 36054 - protein, 7 aa, synthetic construct
SKPNWVE

SEQ ID NO: 36055 - protein, 7 aa, synthetic construct
IQGMNNP

SEQ ID NO: 36056 - protein, 7 aa, synthetic construct
TGEHRTS

SEQ ID NO: 36057 - protein, 7 aa, synthetic construct
DRQTPGH

SEQ ID NO: 36058 - protein, 7 aa, synthetic construct
AHKVMGD

SEQ ID NO: 36059 - protein, 7 aa, synthetic construct
NVYKDSL

SEQ ID NO: 36060 - protein, 7 aa, synthetic construct
KKYQDNT

SEQ ID NO: 36061 - protein, 7 aa, synthetic construct
RVSATLS

SEQ ID NO: 36062 - protein, 7 aa, synthetic construct
IPLQRME

SEQ ID NO: 36063 - protein, 7 aa, synthetic construct
GNSKFNG

SEQ ID NO: 36064 - protein, 7 aa, synthetic construct
KKPGALD

SEQ ID NO: 36065 - protein, 7 aa, synthetic construct
LVTKPAG

SEQ ID NO: 36066 - protein, 7 aa, synthetic construct
QQGGWTG

SEQ ID NO: 36067 - protein, 7 aa, synthetic construct
MKNSTGQ

SEQ ID NO: 36068 - protein, 7 aa, synthetic construct
HDGKPGA

SEQ ID NO: 36069 - protein, 7 aa, synthetic construct
VPKQSIG

SEQ ID NO: 36070 - protein, 7 aa, synthetic construct
QHGRVVL

SEQ ID NO: 36071 - protein, 7 aa, synthetic construct
WTKEGKA

SEQ ID NO: 36072 - protein, 7 aa, synthetic construct
QKMANQA

SEQ ID NO: 36073 - protein, 7 aa, synthetic construct
IQKAGKD

SEQ ID NO: 36074 - protein, 7 aa, synthetic construct
VGQPQHP

SEQ ID NO: 36075 - protein, 7 aa, synthetic construct
NKTMTKE

SEQ ID NO: 36076 - protein, 7 aa, synthetic construct
KPNAGPY

SEQ ID NO: 36077 - protein, 7 aa, synthetic construct
KTTAGAM

SEQ ID NO: 36078 - protein, 7 aa, synthetic construct
YVPPREG

SEQ ID NO: 36079 - protein, 7 aa, synthetic construct
NRAGNTP

SEQ ID NO: 36080 - protein, 7 aa, synthetic construct
VGDKMHG

SEQ ID NO: 36081 - protein, 7 aa, synthetic construct
IQRERMS

SEQ ID NO: 36082 - protein, 7 aa, synthetic construct
GPSKSVA

SEQ ID NO: 36083 - protein, 7 aa, synthetic construct
VNMTKPI

SEQ ID NO: 36084 - protein, 7 aa, synthetic construct
QRSEHHG

SEQ ID NO: 36085 - protein, 7 aa, synthetic construct
TGKPGVA

SEQ ID NO: 36086 - protein, 7 aa, synthetic construct
HNPGMKA

SEQ ID NO: 36087 - protein, 7 aa, synthetic construct
RAYDPID

SEQ ID NO: 36088 - protein, 7 aa, synthetic construct
TSSNTFQ

SEQ ID NO: 36089 - protein, 7 aa, synthetic construct
MQKSTGG

SEQ ID NO: 36090 - protein, 7 aa, synthetic construct
QPKGVAG

SEQ ID NO: 36091 - protein, 7 aa, synthetic construct
QSHKGTD

SEQ ID NO: 36092 - protein, 7 aa, synthetic construct
NAMQHVP

SEQ ID NO: 36093 - protein, 7 aa, synthetic construct
RDRQSEN

SEQ ID NO: 36094 - protein, 7 aa, synthetic construct
GAVSRNP

SEQ ID NO: 36095 - protein, 7 aa, synthetic construct
AKRLNEM

SEQ ID NO: 36096 - protein, 7 aa, synthetic construct
TRQSNTG

SEQ ID NO: 36097 - protein, 7 aa, synthetic construct
MRGSGMG

SEQ ID NO: 36098 - protein, 7 aa, synthetic construct
HRNMGVA

SEQ ID NO: 36099 - protein, 7 aa, synthetic construct
QKQNSQA

SEQ ID NO: 36100 - protein, 7 aa, synthetic construct
HTGPNKG

SEQ ID NO: 36101 - protein, 7 aa, synthetic construct
TMTSGRP

SEQ ID NO: 36102 - protein, 7 aa, synthetic construct
VRAGEHG

SEQ ID NO: 36103 - protein, 7 aa, synthetic construct
GGKANVG

SEQ ID NO: 36104 - protein, 7 aa, synthetic construct
NPKYGQA

SEQ ID NO: 36105 - protein, 7 aa, synthetic construct
YVGFPKG

SEQ ID NO: 36106 - protein, 7 aa, synthetic construct
PQKNSSG

SEQ ID NO: 36107 - protein, 7 aa, synthetic construct
QRNNQYV

SEQ ID NO: 36108 - protein, 7 aa, synthetic construct
GQKSPTA

SEQ ID NO: 36109 - protein, 7 aa, synthetic construct
QISPGSN

SEQ ID NO: 36110 - protein, 7 aa, synthetic construct
TRAGNVS

SEQ ID NO: 36111 - protein, 7 aa, synthetic construct
QNKAQVT

SEQ ID NO: 36112 - protein, 7 aa, synthetic construct
SKSQFNG

SEQ ID NO: 36113 - protein, 7 aa, synthetic construct
RGPIHLG

SEQ ID NO: 36114 - protein, 7 aa, synthetic construct
WMKDGRN

SEQ ID NO: 36115 - protein, 7 aa, synthetic construct
RMNNAGA

SEQ ID NO: 36116 - protein, 7 aa, synthetic construct
TLTKVNS

SEQ ID NO: 36117 - protein, 7 aa, synthetic construct
INGALQG

SEQ ID NO: 36118 - protein, 7 aa, synthetic construct
HKHSPDQ

SEQ ID NO: 36119 - protein, 7 aa, synthetic construct
QAPFTSS

SEQ ID NO: 36120 - protein, 7 aa, synthetic construct
MVQLKRE

SEQ ID NO: 36121 - protein, 7 aa, synthetic construct
FGNNVKG

SEQ ID NO: 36122 - protein, 7 aa, synthetic construct
MMGKHTV

SEQ ID NO: 36123 - protein, 7 aa, synthetic construct
LRDYSNA

SEQ ID NO: 36124 - protein, 7 aa, synthetic construct
KQPNQGS

SEQ ID NO: 36125 - protein, 7 aa, synthetic construct
TKKMLDM

SEQ ID NO: 36126 - protein, 7 aa, synthetic construct
DDKKHFG

SEQ ID NO: 36127 - protein, 7 aa, synthetic construct
KSQGKFD

SEQ ID NO: 36128 - protein, 7 aa, synthetic construct
SKQSPGG

SEQ ID NO: 36129 - protein, 7 aa, synthetic construct
KSNNPAA

SEQ ID NO: 36130 - protein, 7 aa, synthetic construct
MKLSVNG

SEQ ID NO: 36131 - protein, 7 aa, synthetic construct
TKQQSNS

SEQ ID NO: 36132 - protein, 7 aa, synthetic construct
PQKPMVG

SEQ ID NO: 36133 - protein, 7 aa, synthetic construct
QVPSGKD

SEQ ID NO: 36134 - protein, 7 aa, synthetic construct
TYGGRGE

SEQ ID NO: 36135 - protein, 7 aa, synthetic construct
TNKGVQG

SEQ ID NO: 36136 - protein, 7 aa, synthetic construct
QNKWIHE

SEQ ID NO: 36137 - protein, 7 aa, synthetic construct
RSTSITG

SEQ ID NO: 36138 - protein, 7 aa, synthetic construct
MRSTNGA

SEQ ID NO: 36139 - protein, 7 aa, synthetic construct
QPMVPKE

SEQ ID NO: 36140 - protein, 7 aa, synthetic construct
SKNNAAA

SEQ ID NO: 36141 - protein, 7 aa, synthetic construct
VMLQKTS

SEQ ID NO: 36142 - protein, 7 aa, synthetic construct
HITGYTP

SEQ ID NO: 36143 - protein, 7 aa, synthetic construct
TDVLKYT

SEQ ID NO: 36144 - protein, 7 aa, synthetic construct
RTPFLNE

SEQ ID NO: 36145 - protein, 7 aa, synthetic construct
NNNKTSP

SEQ ID NO: 36146 - protein, 7 aa, synthetic construct
MKQISLG

SEQ ID NO: 36147 - protein, 7 aa, synthetic construct
HVGQQSV

SEQ ID NO: 36148 - protein, 7 aa, synthetic construct
AKSQREH

SEQ ID NO: 36149 - protein, 7 aa, synthetic construct
KTTQSTP

SEQ ID NO: 36150 - protein, 7 aa, synthetic construct
QMGQRQA

SEQ ID NO: 36151 - protein, 7 aa, synthetic construct
VPNKNQG

SEQ ID NO: 36152 - protein, 7 aa, synthetic construct
GKTEIRG

SEQ ID NO: 36153 - protein, 7 aa, synthetic construct
SASKTSG

SEQ ID NO: 36154 - protein, 7 aa, synthetic construct
HGRGHDA

SEQ ID NO: 36155 - protein, 7 aa, synthetic construct
SKQPTSS

SEQ ID NO: 36156 - protein, 7 aa, synthetic construct
NNMQVKS

SEQ ID NO: 36157 - protein, 7 aa, synthetic construct
VKVPPDF

SEQ ID NO: 36158 - protein, 7 aa, synthetic construct
SNASQYR

SEQ ID NO: 36159 - protein, 7 aa, synthetic construct
YSKQHLP

SEQ ID NO: 36160 - protein, 7 aa, synthetic construct
SYKDGKQ

SEQ ID NO: 36161 - protein, 7 aa, synthetic construct
SSSKATG

SEQ ID NO: 36162 - protein, 7 aa, synthetic construct
SRTPATA

SEQ ID NO: 36163 - protein, 7 aa, synthetic construct
MKPTAFV

SEQ ID NO: 36164 - protein, 7 aa, synthetic construct
PNYPGGG

SEQ ID NO: 36165 - protein, 7 aa, synthetic construct
IKTNHTG

SEQ ID NO: 36166 - protein, 7 aa, synthetic construct
ARNSNMG

SEQ ID NO: 36167 - protein, 7 aa, synthetic construct
MRVSEEH

SEQ ID NO: 36168 - protein, 7 aa, synthetic construct
RFQEVGG

SEQ ID NO: 36169 - protein, 7 aa, synthetic construct
RNKLEFM

SEQ ID NO: 36170 - protein, 7 aa, synthetic construct
HNTGISV

SEQ ID NO: 36171 - protein, 7 aa, synthetic construct
KMGGSAG

SEQ ID NO: 36172 - protein, 7 aa, synthetic construct
DFSRQKF

SEQ ID NO: 36173 - protein, 7 aa, synthetic construct
KTTVQRE

SEQ ID NO: 36174 - protein, 7 aa, synthetic construct
MAQSITP

SEQ ID NO: 36175 - protein, 7 aa, synthetic construct
MPNRQGA

SEQ ID NO: 36176 - protein, 7 aa, synthetic construct
RGAAGNP

SEQ ID NO: 36177 - protein, 7 aa, synthetic construct
FKPQQTG

SEQ ID NO: 36178 - protein, 7 aa, synthetic construct
KANAPIA

SEQ ID NO: 36179 - protein, 7 aa, synthetic construct
KTMHVHP

SEQ ID NO: 36180 - protein, 7 aa, synthetic construct
TKSVSSN

SEQ ID NO: 36181 - protein, 7 aa, synthetic construct
DERTNRY

SEQ ID NO: 36182 - protein, 7 aa, synthetic construct
NAHQSHQ

SEQ ID NO: 36183 - protein, 7 aa, synthetic construct
DRYHIES

SEQ ID NO: 36184 - protein, 7 aa, synthetic construct
QTNRPPA

SEQ ID NO: 36185 - protein, 7 aa, synthetic construct
GQKAGYI

SEQ ID NO: 36186 - protein, 7 aa, synthetic construct
IKQSSQA

SEQ ID NO: 36187 - protein, 7 aa, synthetic construct
PRTSAQP

SEQ ID NO: 36188 - protein, 7 aa, synthetic construct
QNTRVAG

SEQ ID NO: 36189 - protein, 7 aa, synthetic construct
MKPSPSG

SEQ ID NO: 36190 - protein, 7 aa, synthetic construct
ILNQSNG

SEQ ID NO: 36191 - protein, 7 aa, synthetic construct
FNTKPQL

SEQ ID NO: 36192 - protein, 7 aa, synthetic construct
GPHNTSM

SEQ ID NO: 36193 - protein, 7 aa, synthetic construct
PQKQNIM

SEQ ID NO: 36194 - protein, 7 aa, synthetic construct
RGRIDGD

SEQ ID NO: 36195 - protein, 7 aa, synthetic construct
PKGGALN

SEQ ID NO: 36196 - protein, 7 aa, synthetic construct
KANTSSP

SEQ ID NO: 36197 - protein, 7 aa, synthetic construct
LGANNGY

SEQ ID NO: 36198 - protein, 7 aa, synthetic construct
VGGHPDR

SEQ ID NO: 36199 - protein, 7 aa, synthetic construct
TKWAVNA

SEQ ID NO: 36200 - protein, 7 aa, synthetic construct
WERVKGA

SEQ ID NO: 36201 - protein, 7 aa, synthetic construct
MRTGNSP

SEQ ID NO: 36202 - protein, 7 aa, synthetic construct
LPTRHLD

SEQ ID NO: 36203 - protein, 7 aa, synthetic construct
GELRLSG

SEQ ID NO: 36204 - protein, 7 aa, synthetic construct
MAPRTYN

SEQ ID NO: 36205 - protein, 7 aa, synthetic construct
MKYTAPD

SEQ ID NO: 36206 - protein, 7 aa, synthetic construct
NTITKNS

SEQ ID NO: 36207 - protein, 7 aa, synthetic construct
HNAKMSP

SEQ ID NO: 36208 - protein, 7 aa, synthetic construct
NIIKKDP

SEQ ID NO: 36209 - protein, 7 aa, synthetic construct
TRVHVNV

SEQ ID NO: 36210 - protein, 7 aa, synthetic construct
VPYNTHA

SEQ ID NO: 36211 - protein, 7 aa, synthetic construct
GNARGGV

SEQ ID NO: 36212 - protein, 7 aa, synthetic construct
QMPTQRA

SEQ ID NO: 36213 - protein, 7 aa, synthetic construct
SPGKITG

SEQ ID NO: 36214 - protein, 7 aa, synthetic construct
MINRAHS

SEQ ID NO: 36215 - protein, 7 aa, synthetic construct
IKQGYKE

SEQ ID NO: 36216 - protein, 7 aa, synthetic construct
RMDPMKN

SEQ ID NO: 36217 - protein, 7 aa, synthetic construct
WHQITSD

SEQ ID NO: 36218 - protein, 7 aa, synthetic construct
LQPHAPM

SEQ ID NO: 36219 - protein, 7 aa, synthetic construct
SNLKEHA

SEQ ID NO: 36220 - protein, 7 aa, synthetic construct
TRDFKTG

SEQ ID NO: 36221 - protein, 7 aa, synthetic construct
HSKYPET

SEQ ID NO: 36222 - protein, 7 aa, synthetic construct
FPDPRKG

SEQ ID NO: 36223 - protein, 7 aa, synthetic construct
ATQMTIG

SEQ ID NO: 36224 - protein, 7 aa, synthetic construct
NQRGVTG

SEQ ID NO: 36225 - protein, 7 aa, synthetic construct
TRNTDAV

SEQ ID NO: 36226 - protein, 7 aa, synthetic construct
VNKPNVQ

SEQ ID NO: 36227 - protein, 7 aa, synthetic construct
DFGRVKL

SEQ ID NO: 36228 - protein, 7 aa, synthetic construct
GIKNTDI

SEQ ID NO: 36229 - protein, 7 aa, synthetic construct
SYQRAQV

SEQ ID NO: 36230 - protein, 7 aa, synthetic construct
TVPHTVT

SEQ ID NO: 36231 - protein, 7 aa, synthetic construct
TKFDKVG

SEQ ID NO: 36232 - protein, 7 aa, synthetic construct
QKNNVMG

SEQ ID NO: 36233 - protein, 7 aa, synthetic construct
YDRTNHH

SEQ ID NO: 36234 - protein, 7 aa, synthetic construct
MAKFDNK

SEQ ID NO: 36235 - protein, 7 aa, synthetic construct
WKGSVSN

SEQ ID NO: 36236 - protein, 7 aa, synthetic construct
TKTIGGG

SEQ ID NO: 36237 - protein, 7 aa, synthetic construct
RNEQNGG

SEQ ID NO: 36238 - protein, 7 aa, synthetic construct
HDRRYTD

SEQ ID NO: 36239 - protein, 7 aa, synthetic construct
PNKVQGG

SEQ ID NO: 36240 - protein, 7 aa, synthetic construct
QLKTSDA

SEQ ID NO: 36241 - protein, 7 aa, synthetic construct
LQYKAVI

SEQ ID NO: 36242 - protein, 7 aa, synthetic construct
KTNTGGV

SEQ ID NO: 36243 - protein, 7 aa, synthetic construct
MKSHQAP

SEQ ID NO: 36244 - protein, 7 aa, synthetic construct
SGTQKYN

SEQ ID NO: 36245 - protein, 7 aa, synthetic construct
DKHAVFA

SEQ ID NO: 36246 - protein, 7 aa, synthetic construct
KDSRYAM

SEQ ID NO: 36247 - protein, 7 aa, synthetic construct
TKSPATS

SEQ ID NO: 36248 - protein, 7 aa, synthetic construct
TKPTGQN

SEQ ID NO: 36249 - protein, 7 aa, synthetic construct
QHLGTIP

SEQ ID NO: 36250 - protein, 7 aa, synthetic construct
GFTSGRG

SEQ ID NO: 36251 - protein, 7 aa, synthetic construct
IGKIVPQ

SEQ ID NO: 36252 - protein, 7 aa, synthetic construct
FNAHRNS

SEQ ID NO: 36253 - protein, 7 aa, synthetic construct
FGQYAVE

SEQ ID NO: 36254 - protein, 7 aa, synthetic construct
QKTSPMN

SEQ ID NO: 36255 - protein, 7 aa, synthetic construct
GMKGSTL

SEQ ID NO: 36256 - protein, 7 aa, synthetic construct
TKTAVQN

SEQ ID NO: 36257 - protein, 7 aa, synthetic construct
NYNNHLA

SEQ ID NO: 36258 - protein, 7 aa, synthetic construct
KSKDYAG

SEQ ID NO: 36259 - protein, 7 aa, synthetic construct
IAGVIKI

SEQ ID NO: 36260 - protein, 7 aa, synthetic construct
LAVGPQQ

SEQ ID NO: 36261 - protein, 7 aa, synthetic construct
VGNKSSG

SEQ ID NO: 36262 - protein, 7 aa, synthetic construct
RHENAKN

SEQ ID NO: 36263 - protein, 7 aa, synthetic construct
VKWDPEK

SEQ ID NO: 36264 - protein, 7 aa, synthetic construct
QTKNVQI

SEQ ID NO: 36265 - protein, 7 aa, synthetic construct
NRGIKAE

SEQ ID NO: 36266 - protein, 7 aa, synthetic construct
QNRGSPD

SEQ ID NO: 36267 - protein, 7 aa, synthetic construct
HGPAQAV

SEQ ID NO: 36268 - protein, 7 aa, synthetic construct
VKEWMAE

SEQ ID NO: 36269 - protein, 7 aa, synthetic construct
RNAQVGG

SEQ ID NO: 36270 - protein, 7 aa, synthetic construct
DKFNPTI

SEQ ID NO: 36271 - protein, 7 aa, synthetic construct
FANGKGQ

SEQ ID NO: 36272 - protein, 7 aa, synthetic construct
KNAQSGN

SEQ ID NO: 36273 - protein, 7 aa, synthetic construct
QGAAKVG

SEQ ID NO: 36274 - protein, 7 aa, synthetic construct
GTSAKNG

SEQ ID NO: 36275 - protein, 7 aa, synthetic construct
NKVGNPG

SEQ ID NO: 36276 - protein, 7 aa, synthetic construct
TGQKVYG

SEQ ID NO: 36277 - protein, 7 aa, synthetic construct
TAGAKGG

SEQ ID NO: 36278 - protein, 7 aa, synthetic construct
RGSQSQE

SEQ ID NO: 36279 - protein, 7 aa, synthetic construct
TYGTKQP

SEQ ID NO: 36280 - protein, 7 aa, synthetic construct
RPGSNQP

SEQ ID NO: 36281 - protein, 7 aa, synthetic construct
YPQKANS

SEQ ID NO: 36282 - protein, 7 aa, synthetic construct
NAQRTQA

SEQ ID NO: 36283 - protein, 7 aa, synthetic construct
IAAAMPG

SEQ ID NO: 36284 - protein, 7 aa, synthetic construct
GSKNQMA

SEQ ID NO: 36285 - protein, 7 aa, synthetic construct
NVTTKRD

SEQ ID NO: 36286 - protein, 7 aa, synthetic construct
SKATTKE

SEQ ID NO: 36287 - protein, 7 aa, synthetic construct
NDGKMKP

SEQ ID NO: 36288 - protein, 7 aa, synthetic construct
KLHSSEP

SEQ ID NO: 36289 - protein, 7 aa, synthetic construct
AHRDRHP

SEQ ID NO: 36290 - protein, 7 aa, synthetic construct
NQHHRGD

SEQ ID NO: 36291 - protein, 7 aa, synthetic construct
YNNNRSV

SEQ ID NO: 36292 - protein, 7 aa, synthetic construct
QQTSSQS

SEQ ID NO: 36293 - protein, 7 aa, synthetic construct
IRMSGSP

SEQ ID NO: 36294 - protein, 7 aa, synthetic construct
QFTIRSE

SEQ ID NO: 36295 - protein, 7 aa, synthetic construct
KDHTSTA

SEQ ID NO: 36296 - protein, 7 aa, synthetic construct
RVYSDAG

SEQ ID NO: 36297 - protein, 7 aa, synthetic construct
RDKVIHA

SEQ ID NO: 36298 - protein, 7 aa, synthetic construct
STKASAA

SEQ ID NO: 36299 - protein, 7 aa, synthetic construct
GKHVNTY

SEQ ID NO: 36300 - protein, 7 aa, synthetic construct
VKLSGPG

SEQ ID NO: 36301 - protein, 7 aa, synthetic construct
KNVNSVS

SEQ ID NO: 36302 - protein, 7 aa, synthetic construct
INRTQTN

SEQ ID NO: 36303 - protein, 7 aa, synthetic construct
NKGAKME

SEQ ID NO: 36304 - protein, 7 aa, synthetic construct
GPQSHMG

SEQ ID NO: 36305 - protein, 7 aa, synthetic construct
RTFGQAD

SEQ ID NO: 36306 - protein, 7 aa, synthetic construct
KNSGNLG

SEQ ID NO: 36307 - protein, 7 aa, synthetic construct
IQRTHPD

SEQ ID NO: 36308 - protein, 7 aa, synthetic construct
QPQRVGG

SEQ ID NO: 36309 - protein, 7 aa, synthetic construct
VKGSQSA

SEQ ID NO: 36310 - protein, 7 aa, synthetic construct
MKINQPN

SEQ ID NO: 36311 - protein, 7 aa, synthetic construct
IIAVAKN

SEQ ID NO: 36312 - protein, 7 aa, synthetic construct
GYSQQSG

SEQ ID NO: 36313 - protein, 7 aa, synthetic construct
NKSTSGS

SEQ ID NO: 36314 - protein, 7 aa, synthetic construct
NNYQNKP

SEQ ID NO: 36315 - protein, 7 aa, synthetic construct
KPTNVST

SEQ ID NO: 36316 - protein, 7 aa, synthetic construct
ITQKSMQ

SEQ ID NO: 36317 - protein, 7 aa, synthetic construct
GFQGLMN

SEQ ID NO: 36318 - protein, 7 aa, synthetic construct
MNATKTG

SEQ ID NO: 36319 - protein, 7 aa, synthetic construct
QFNQARD

SEQ ID NO: 36320 - protein, 7 aa, synthetic construct
NGPQHRT

SEQ ID NO: 36321 - protein, 7 aa, synthetic construct
ETWPGKS

SEQ ID NO: 36322 - protein, 7 aa, synthetic construct
THGSQMV

SEQ ID NO: 36323 - protein, 7 aa, synthetic construct
QMRRDQM

SEQ ID NO: 36324 - protein, 7 aa, synthetic construct
IKNWKIE

SEQ ID NO: 36325 - protein, 7 aa, synthetic construct
IKIGPAG

SEQ ID NO: 36326 - protein, 7 aa, synthetic construct
MSSNRQA

SEQ ID NO: 36327 - protein, 7 aa, synthetic construct
KGASGMA

SEQ ID NO: 36328 - protein, 7 aa, synthetic construct
HHGTPRI

SEQ ID NO: 36329 - protein, 7 aa, synthetic construct
LPPKSMG

SEQ ID NO: 36330 - protein, 7 aa, synthetic construct
TFKGGEQ

SEQ ID NO: 36331 - protein, 7 aa, synthetic construct
RVMMGES

SEQ ID NO: 36332 - protein, 7 aa, synthetic construct
GDFTSRS

SEQ ID NO: 36333 - protein, 7 aa, synthetic construct
TNNKMQL

SEQ ID NO: 36334 - protein, 7 aa, synthetic construct
ANHGQSA

SEQ ID NO: 36335 - protein, 7 aa, synthetic construct
NANSTKS

SEQ ID NO: 36336 - protein, 7 aa, synthetic construct
YRAPRDE

SEQ ID NO: 36337 - protein, 7 aa, synthetic construct
SAVFTKE

SEQ ID NO: 36338 - protein, 7 aa, synthetic construct
NAKSNVG

SEQ ID NO: 36339 - protein, 7 aa, synthetic construct
QDHTKVF

SEQ ID NO: 36340 - protein, 7 aa, synthetic construct
LNYRPVE

SEQ ID NO: 36341 - protein, 7 aa, synthetic construct
YDRKAAM

SEQ ID NO: 36342 - protein, 7 aa, synthetic construct
NQQGNPP

SEQ ID NO: 36343 - protein, 7 aa, synthetic construct
MSGRENG

SEQ ID NO: 36344 - protein, 7 aa, synthetic construct
QTNTVQR

SEQ ID NO: 36345 - protein, 7 aa, synthetic construct
TNKMYPE

SEQ ID NO: 36346 - protein, 7 aa, synthetic construct
LGRNVSN

SEQ ID NO: 36347 - protein, 7 aa, synthetic construct
TNTSPKP

SEQ ID NO: 36348 - protein, 7 aa, synthetic construct
RGTANGP

SEQ ID NO: 36349 - protein, 7 aa, synthetic construct
GKNVSQG

SEQ ID NO: 36350 - protein, 7 aa, synthetic construct
LLGRYPQ

SEQ ID NO: 36351 - protein, 7 aa, synthetic construct
LSINNIG

SEQ ID NO: 36352 - protein, 7 aa, synthetic construct
HKLGTPM

SEQ ID NO: 36353 - protein, 7 aa, synthetic construct
MQKSVTG

SEQ ID NO: 36354 - protein, 7 aa, synthetic construct
PMKGPSA

SEQ ID NO: 36355 - protein, 7 aa, synthetic construct
NKISSNG

SEQ ID NO: 36356 - protein, 7 aa, synthetic construct
MKSSAMA

SEQ ID NO: 36357 - protein, 7 aa, synthetic construct
MLGTKVQ

SEQ ID NO: 36358 - protein, 7 aa, synthetic construct
SKTAGYG

SEQ ID NO: 36359 - protein, 7 aa, synthetic construct
DGSDYTK

SEQ ID NO: 36360 - protein, 7 aa, synthetic construct
MNRMHDG

SEQ ID NO: 36361 - protein, 7 aa, synthetic construct
RHSTTAT

SEQ ID NO: 36362 - protein, 7 aa, synthetic construct
SYPGVSH

SEQ ID NO: 36363 - protein, 7 aa, synthetic construct
RVRGEDV

SEQ ID NO: 36364 - protein, 7 aa, synthetic construct
KNASIKD

SEQ ID NO: 36365 - protein, 7 aa, synthetic construct
NNGKSQP

SEQ ID NO: 36366 - protein, 7 aa, synthetic construct
QQLRIPE

SEQ ID NO: 36367 - protein, 7 aa, synthetic construct
KTAASGT

SEQ ID NO: 36368 - protein, 7 aa, synthetic construct
VMLRGVE

SEQ ID NO: 36369 - protein, 7 aa, synthetic construct
SAKSNNG

SEQ ID NO: 36370 - protein, 7 aa, synthetic construct
IMSAMGS

SEQ ID NO: 36371 - protein, 7 aa, synthetic construct
NKQATNI

SEQ ID NO: 36372 - protein, 7 aa, synthetic construct
QHGMKLP

SEQ ID NO: 36373 - protein, 7 aa, synthetic construct
LSAGKIG

SEQ ID NO: 36374 - protein, 7 aa, synthetic construct
KQSNMGS

SEQ ID NO: 36375 - protein, 7 aa, synthetic construct
RENYTTE

SEQ ID NO: 36376 - protein, 7 aa, synthetic construct
MISSRLD

SEQ ID NO: 36377 - protein, 7 aa, synthetic construct
FPNSSKG

SEQ ID NO: 36378 - protein, 7 aa, synthetic construct
GMLKYRE

SEQ ID NO: 36379 - protein, 7 aa, synthetic construct
TSNKSGT

SEQ ID NO: 36380 - protein, 7 aa, synthetic construct
SFKQHVS

SEQ ID NO: 36381 - protein, 7 aa, synthetic construct
VTQKTNS

SEQ ID NO: 36382 - protein, 7 aa, synthetic construct
IVTLSAS

SEQ ID NO: 36383 - protein, 7 aa, synthetic construct
VLTNKII

SEQ ID NO: 36384 - protein, 7 aa, synthetic construct
RGDHSQA

SEQ ID NO: 36385 - protein, 7 aa, synthetic construct
VRKNDEF

SEQ ID NO: 36386 - protein, 7 aa, synthetic construct
QNRTNWE

SEQ ID NO: 36387 - protein, 7 aa, synthetic construct
RNQQQMS

SEQ ID NO: 36388 - protein, 7 aa, synthetic construct
GMRVSIA

SEQ ID NO: 36389 - protein, 7 aa, synthetic construct
DKHSAQS

SEQ ID NO: 36390 - protein, 7 aa, synthetic construct
HPQRYAA

SEQ ID NO: 36391 - protein, 7 aa, synthetic construct
YLPTKKE

SEQ ID NO: 36392 - protein, 7 aa, synthetic construct
KPTGNGM

SEQ ID NO: 36393 - protein, 7 aa, synthetic construct
MGKNKDP

SEQ ID NO: 36394 - protein, 7 aa, synthetic construct
YGHSPSG

SEQ ID NO: 36395 - protein, 7 aa, synthetic construct
KTNSSMP

SEQ ID NO: 36396 - protein, 7 aa, synthetic construct
KGSATTV

SEQ ID NO: 36397 - protein, 7 aa, synthetic construct
NKQGVNP

SEQ ID NO: 36398 - protein, 7 aa, synthetic construct
YPSKSIN

SEQ ID NO: 36399 - protein, 7 aa, synthetic construct
LGQGIHN

SEQ ID NO: 36400 - protein, 7 aa, synthetic construct
SQSKMNG

SEQ ID NO: 36401 - protein, 7 aa, synthetic construct
GKASTQN

SEQ ID NO: 36402 - protein, 7 aa, synthetic construct
SKYSQNG

SEQ ID NO: 36403 - protein, 7 aa, synthetic construct
GSIQQQV

SEQ ID NO: 36404 - protein, 7 aa, synthetic construct
QHFHKSD

SEQ ID NO: 36405 - protein, 7 aa, synthetic construct
TQGVGHK

SEQ ID NO: 36406 - protein, 7 aa, synthetic construct
FKSGTGN

SEQ ID NO: 36407 - protein, 7 aa, synthetic construct
SQIRAGA

SEQ ID NO: 36408 - protein, 7 aa, synthetic construct
SKHSSME

SEQ ID NO: 36409 - protein, 7 aa, synthetic construct
YMKVQDG

SEQ ID NO: 36410 - protein, 7 aa, synthetic construct
DNHIKPS

SEQ ID NO: 36411 - protein, 7 aa, synthetic construct
LTHIYRD

SEQ ID NO: 36412 - protein, 7 aa, synthetic construct
RTTSAQP

SEQ ID NO: 36413 - protein, 7 aa, synthetic construct
QVGSKMG

SEQ ID NO: 36414 - protein, 7 aa, synthetic construct
RGPGMNS

SEQ ID NO: 36415 - protein, 7 aa, synthetic construct
RETGKYS

SEQ ID NO: 36416 - protein, 7 aa, synthetic construct
GIAKNVA

SEQ ID NO: 36417 - protein, 7 aa, synthetic construct
MEKGPRL

SEQ ID NO: 36418 - protein, 7 aa, synthetic construct
ILNPAKG

SEQ ID NO: 36419 - protein, 7 aa, synthetic construct
MRAPSQG

SEQ ID NO: 36420 - protein, 7 aa, synthetic construct
MGGKSVG

SEQ ID NO: 36421 - protein, 7 aa, synthetic construct
SYKDTRL

SEQ ID NO: 36422 - protein, 7 aa, synthetic construct
DMRYSEK

SEQ ID NO: 36423 - protein, 7 aa, synthetic construct
MKQTSQV

SEQ ID NO: 36424 - protein, 7 aa, synthetic construct
KGNMAAV

SEQ ID NO: 36425 - protein, 7 aa, synthetic construct
QPMKQVP

SEQ ID NO: 36426 - protein, 7 aa, synthetic construct
NKTPVAA

SEQ ID NO: 36427 - protein, 7 aa, synthetic construct
ISVHKGG

SEQ ID NO: 36428 - protein, 7 aa, synthetic construct
GKAAHQY

SEQ ID NO: 36429 - protein, 7 aa, synthetic construct
QWGGKTS

SEQ ID NO: 36430 - protein, 7 aa, synthetic construct
SVGKIHD

SEQ ID NO: 36431 - protein, 7 aa, synthetic construct
TSAKNVS

SEQ ID NO: 36432 - protein, 7 aa, synthetic construct
PQRPITE

SEQ ID NO: 36433 - protein, 7 aa, synthetic construct
KSMNTVG

SEQ ID NO: 36434 - protein, 7 aa, synthetic construct
LQEFKTP

SEQ ID NO: 36435 - protein, 7 aa, synthetic construct
IAPHFKT

SEQ ID NO: 36436 - protein, 7 aa, synthetic construct
PQRQNAA

SEQ ID NO: 36437 - protein, 7 aa, synthetic construct
GSNKTNP

SEQ ID NO: 36438 - protein, 7 aa, synthetic construct
VGYKNAP

SEQ ID NO: 36439 - protein, 7 aa, synthetic construct
WKVDDKF

SEQ ID NO: 36440 - protein, 7 aa, synthetic construct
SKMTGVI

SEQ ID NO: 36441 - protein, 7 aa, synthetic construct
QGNLKGE

SEQ ID NO: 36442 - protein, 7 aa, synthetic construct
HRENYQG

SEQ ID NO: 36443 - protein, 7 aa, synthetic construct
AIYSSHG

SEQ ID NO: 36444 - protein, 7 aa, synthetic construct
FGASFIG

SEQ ID NO: 36445 - protein, 7 aa, synthetic construct
KRDGANP

SEQ ID NO: 36446 - protein, 7 aa, synthetic construct
VLRVKSE

SEQ ID NO: 36447 - protein, 7 aa, synthetic construct
QRGQSMG

SEQ ID NO: 36448 - protein, 7 aa, synthetic construct
LKDRTTH

SEQ ID NO: 36449 - protein, 7 aa, synthetic construct
KQAGAVA

SEQ ID NO: 36450 - protein, 7 aa, synthetic construct
KLQRDNT

SEQ ID NO: 36451 - protein, 7 aa, synthetic construct
LRGSFND

SEQ ID NO: 36452 - protein, 7 aa, synthetic construct
KPQSISA

SEQ ID NO: 36453 - protein, 7 aa, synthetic construct
LYTRDNA

SEQ ID NO: 36454 - protein, 7 aa, synthetic construct
QTQSHFA

SEQ ID NO: 36455 - protein, 7 aa, synthetic construct
HRAQDPS

SEQ ID NO: 36456 - protein, 7 aa, synthetic construct
HKYPSSS

SEQ ID NO: 36457 - protein, 7 aa, synthetic construct
RNKDTGA

SEQ ID NO: 36458 - protein, 7 aa, synthetic construct
IWKDALP

SEQ ID NO: 36459 - protein, 7 aa, synthetic construct
LGAMNIQ

SEQ ID NO: 36460 - protein, 7 aa, synthetic construct
YGSKGTA

SEQ ID NO: 36461 - protein, 7 aa, synthetic construct
LSQMKMQ

SEQ ID NO: 36462 - protein, 7 aa, synthetic construct
SKTSTGG

SEQ ID NO: 36463 - protein, 7 aa, synthetic construct
TKTAVAG

SEQ ID NO: 36464 - protein, 7 aa, synthetic construct
SKNQTSP

SEQ ID NO: 36465 - protein, 7 aa, synthetic construct
RTTAAQA

SEQ ID NO: 36466 - protein, 7 aa, synthetic construct
GYKSVGS

SEQ ID NO: 36467 - protein, 7 aa, synthetic construct
ADKGHHG

SEQ ID NO: 36468 - protein, 7 aa, synthetic construct
KIPQGQF

SEQ ID NO: 36469 - protein, 7 aa, synthetic construct
VRQSSNV

SEQ ID NO: 36470 - protein, 7 aa, synthetic construct
RNPSAGV

SEQ ID NO: 36471 - protein, 7 aa, synthetic construct
THDNKAT

SEQ ID NO: 36472 - protein, 7 aa, synthetic construct
AARGPAV

SEQ ID NO: 36473 - protein, 7 aa, synthetic construct
GHARGSD

SEQ ID NO: 36474 - protein, 7 aa, synthetic construct
PGRTSTD

SEQ ID NO: 36475 - protein, 7 aa, synthetic construct
MQHSGQA

SEQ ID NO: 36476 - protein, 7 aa, synthetic construct
HNHPSTI

SEQ ID NO: 36477 - protein, 7 aa, synthetic construct
MGKVKEM

SEQ ID NO: 36478 - protein, 7 aa, synthetic construct
ERVPAQS

SEQ ID NO: 36479 - protein, 7 aa, synthetic construct
SVAGGVP

SEQ ID NO: 36480 - protein, 7 aa, synthetic construct
FKDTKNG

SEQ ID NO: 36481 - protein, 7 aa, synthetic construct
SQSKGGG

SEQ ID NO: 36482 - protein, 7 aa, synthetic construct
LTPLHQQ

SEQ ID NO: 36483 - protein, 7 aa, synthetic construct
MKGHPEA

SEQ ID NO: 36484 - protein, 7 aa, synthetic construct
LRVGVHD

SEQ ID NO: 36485 - protein, 7 aa, synthetic construct
RPNSQFG

SEQ ID NO: 36486 - protein, 7 aa, synthetic construct
IATRMKE

SEQ ID NO: 36487 - protein, 7 aa, synthetic construct
NIHGKFM

SEQ ID NO: 36488 - protein, 7 aa, synthetic construct
MSSHQNL

SEQ ID NO: 36489 - protein, 7 aa, synthetic construct
FKTSVVT

SEQ ID NO: 36490 - protein, 7 aa, synthetic construct
TRQSQQD

SEQ ID NO: 36491 - protein, 7 aa, synthetic construct
NPRASVP

SEQ ID NO: 36492 - protein, 7 aa, synthetic construct
ATGPVSS

SEQ ID NO: 36493 - protein, 7 aa, synthetic construct
ERTRTVA

SEQ ID NO: 36494 - protein, 7 aa, synthetic construct
QSKSRMD

SEQ ID NO: 36495 - protein, 7 aa, synthetic construct
LRRDATN

SEQ ID NO: 36496 - protein, 7 aa, synthetic construct
RVNRPEV

SEQ ID NO: 36497 - protein, 7 aa, synthetic construct
NTGRTNP

SEQ ID NO: 36498 - protein, 7 aa, synthetic construct
YGAYAKN

SEQ ID NO: 36499 - protein, 7 aa, synthetic construct
PNVSRAA

SEQ ID NO: 36500 - protein, 7 aa, synthetic construct
LGGTWKG

SEQ ID NO: 36501 - protein, 7 aa, synthetic construct
GQGGNHF

SEQ ID NO: 36502 - protein, 7 aa, synthetic construct
KPGMGKD

SEQ ID NO: 36503 - protein, 7 aa, synthetic construct
QQSARSP

SEQ ID NO: 36504 - protein, 7 aa, synthetic construct
SGHITHY

SEQ ID NO: 36505 - protein, 7 aa, synthetic construct
SQGKPAA

SEQ ID NO: 36506 - protein, 7 aa, synthetic construct
VAIYGKE

SEQ ID NO: 36507 - protein, 7 aa, synthetic construct
VKGLWKE

SEQ ID NO: 36508 - protein, 7 aa, synthetic construct
EIVKHKE

SEQ ID NO: 36509 - protein, 7 aa, synthetic construct
NKQGAKD

SEQ ID NO: 36510 - protein, 7 aa, synthetic construct
MKGPMTG

SEQ ID NO: 36511 - protein, 7 aa, synthetic construct
NQRGIPA

SEQ ID NO: 36512 - protein, 7 aa, synthetic construct
HRQHTIS

SEQ ID NO: 36513 - protein, 7 aa, synthetic construct
KATPSTA

SEQ ID NO: 36514 - protein, 7 aa, synthetic construct
HAARNET

SEQ ID NO: 36515 - protein, 7 aa, synthetic construct
RPMAQPE

SEQ ID NO: 36516 - protein, 7 aa, synthetic construct
VDKKWHP

SEQ ID NO: 36517 - protein, 7 aa, synthetic construct
NKSTTAP

SEQ ID NO: 36518 - protein, 7 aa, synthetic construct
QSGGKNG

SEQ ID NO: 36519 - protein, 7 aa, synthetic construct
VRSSAST

SEQ ID NO: 36520 - protein, 7 aa, synthetic construct
KSQTVVG

SEQ ID NO: 36521 - protein, 7 aa, synthetic construct
VRGQTNA

SEQ ID NO: 36522 - protein, 7 aa, synthetic construct
GQHHRIV

SEQ ID NO: 36523 - protein, 7 aa, synthetic construct
SRSSTAS

SEQ ID NO: 36524 - protein, 7 aa, synthetic construct
RSQGNIG

SEQ ID NO: 36525 - protein, 7 aa, synthetic construct
KTYTTQV

SEQ ID NO: 36526 - protein, 7 aa, synthetic construct
QWNKGTP

SEQ ID NO: 36527 - protein, 7 aa, synthetic construct
GKSTGDS

SEQ ID NO: 36528 - protein, 7 aa, synthetic construct
SRTPQTG

SEQ ID NO: 36529 - protein, 7 aa, synthetic construct
KGSSQGG

SEQ ID NO: 36530 - protein, 7 aa, synthetic construct
NMARPPS

SEQ ID NO: 36531 - protein, 7 aa, synthetic construct
INAASNR

SEQ ID NO: 36532 - protein, 7 aa, synthetic construct
IYGDNGR

SEQ ID NO: 36533 - protein, 7 aa, synthetic construct
RNPTTTG

SEQ ID NO: 36534 - protein, 7 aa, synthetic construct
EQKEKRP

SEQ ID NO: 36535 - protein, 7 aa, synthetic construct
DDLKKLP

SEQ ID NO: 36536 - protein, 7 aa, synthetic construct
RKDVNTA

SEQ ID NO: 36537 - protein, 7 aa, synthetic construct
GVAKSPM

SEQ ID NO: 36538 - protein, 7 aa, synthetic construct
HIMKAQE

SEQ ID NO: 36539 - protein, 7 aa, synthetic construct
STAQRTA

SEQ ID NO: 36540 - protein, 7 aa, synthetic construct
RLTYANE

SEQ ID NO: 36541 - protein, 7 aa, synthetic construct
PPGHSTP

SEQ ID NO: 36542 - protein, 7 aa, synthetic construct
QANGSMA

SEQ ID NO: 36543 - protein, 7 aa, synthetic construct
KNYGNSA

SEQ ID NO: 36544 - protein, 7 aa, synthetic construct
RQSNSDS

SEQ ID NO: 36545 - protein, 7 aa, synthetic construct
KDRHGLV

SEQ ID NO: 36546 - protein, 7 aa, synthetic construct
PVRAPIS

SEQ ID NO: 36547 - protein, 7 aa, synthetic construct
KQGSSMS

SEQ ID NO: 36548 - protein, 7 aa, synthetic construct
NAVKGPS

SEQ ID NO: 36549 - protein, 7 aa, synthetic construct
SGGRFQA

SEQ ID NO: 36550 - protein, 7 aa, synthetic construct
QHMNKEN

SEQ ID NO: 36551 - protein, 7 aa, synthetic construct
TNKSTSG

SEQ ID NO: 36552 - protein, 7 aa, synthetic construct
KQNTSIA

SEQ ID NO: 36553 - protein, 7 aa, synthetic construct
NTYTATV

SEQ ID NO: 36554 - protein, 7 aa, synthetic construct
HAKLIGG

SEQ ID NO: 36555 - protein, 7 aa, synthetic construct
HKGWQQS

SEQ ID NO: 36556 - protein, 7 aa, synthetic construct
KNRDSNA

SEQ ID NO: 36557 - protein, 7 aa, synthetic construct
TKNGHIM

SEQ ID NO: 36558 - protein, 7 aa, synthetic construct
GQYRNQM

SEQ ID NO: 36559 - protein, 7 aa, synthetic construct
KPTAMGA

SEQ ID NO: 36560 - protein, 7 aa, synthetic construct
RGQQTSA

SEQ ID NO: 36561 - protein, 7 aa, synthetic construct
LPGKSVD

SEQ ID NO: 36562 - protein, 7 aa, synthetic construct
NRMNGQA

SEQ ID NO: 36563 - protein, 7 aa, synthetic construct
RNQSQNG

SEQ ID NO: 36564 - protein, 7 aa, synthetic construct
QRAQQTS

SEQ ID NO: 36565 - protein, 7 aa, synthetic construct
GRMGSNV

SEQ ID NO: 36566 - protein, 7 aa, synthetic construct
MRTGNDS

SEQ ID NO: 36567 - protein, 7 aa, synthetic construct
SMTQNQS

SEQ ID NO: 36568 - protein, 7 aa, synthetic construct
MDGKKPS

SEQ ID NO: 36569 - protein, 7 aa, synthetic construct
VKPNNTP

SEQ ID NO: 36570 - protein, 7 aa, synthetic construct
MKSVATG

SEQ ID NO: 36571 - protein, 7 aa, synthetic construct
KQGSSVL

SEQ ID NO: 36572 - protein, 7 aa, synthetic construct
KIYDLPQ

SEQ ID NO: 36573 - protein, 7 aa, synthetic construct
VFRMESK

SEQ ID NO: 36574 - protein, 7 aa, synthetic construct
LFKGERN

SEQ ID NO: 36575 - protein, 7 aa, synthetic construct
ADYRDRE

SEQ ID NO: 36576 - protein, 7 aa, synthetic construct
YSGGKDT

SEQ ID NO: 36577 - protein, 7 aa, synthetic construct
NVKPSNQ

SEQ ID NO: 36578 - protein, 7 aa, synthetic construct
GSMQQSR

SEQ ID NO: 36579 - protein, 7 aa, synthetic construct
KTSNVGP

SEQ ID NO: 36580 - protein, 7 aa, synthetic construct
NGQHTMG

SEQ ID NO: 36581 - protein, 7 aa, synthetic construct
EIQSKRA

SEQ ID NO: 36582 - protein, 7 aa, synthetic construct
QGQSSGK

SEQ ID NO: 36583 - protein, 7 aa, synthetic construct
KMASTKD

SEQ ID NO: 36584 - protein, 7 aa, synthetic construct
HPNIMPQ

SEQ ID NO: 36585 - protein, 7 aa, synthetic construct
KDSKASG

SEQ ID NO: 36586 - protein, 7 aa, synthetic construct
TSISRMT

SEQ ID NO: 36587 - protein, 7 aa, synthetic construct
KNDRHGD

SEQ ID NO: 36588 - protein, 7 aa, synthetic construct
MGGSKSP

SEQ ID NO: 36589 - protein, 7 aa, synthetic construct
AKRDNVA

SEQ ID NO: 36590 - protein, 7 aa, synthetic construct
YGKTHIL

SEQ ID NO: 36591 - protein, 7 aa, synthetic construct
KSSNGKE

SEQ ID NO: 36592 - protein, 7 aa, synthetic construct
FSAFAKD

SEQ ID NO: 36593 - protein, 7 aa, synthetic construct
DRMQQRA

SEQ ID NO: 36594 - protein, 7 aa, synthetic construct
RKEMASG

SEQ ID NO: 36595 - protein, 7 aa, synthetic construct
RTQPGNA

SEQ ID NO: 36596 - protein, 7 aa, synthetic construct
RPKDSMV

SEQ ID NO: 36597 - protein, 7 aa, synthetic construct
TRQTPQG

SEQ ID NO: 36598 - protein, 7 aa, synthetic construct
GVQNRSP

SEQ ID NO: 36599 - protein, 7 aa, synthetic construct
FQQGSTS

SEQ ID NO: 36600 - protein, 7 aa, synthetic construct
KTTQLGG

SEQ ID NO: 36601 - protein, 7 aa, synthetic construct
ITSSSTW

SEQ ID NO: 36602 - protein, 7 aa, synthetic construct
GSKNMSA

SEQ ID NO: 36603 - protein, 7 aa, synthetic construct
HGMAMTP

SEQ ID NO: 36604 - protein, 7 aa, synthetic construct
NQMNGRA

SEQ ID NO: 36605 - protein, 7 aa, synthetic construct
QAGVGMF

SEQ ID NO: 36606 - protein, 7 aa, synthetic construct
NRQDPIR

SEQ ID NO: 36607 - protein, 7 aa, synthetic construct
HRSARDD

SEQ ID NO: 36608 - protein, 7 aa, synthetic construct
GQGVKQG

SEQ ID NO: 36609 - protein, 7 aa, synthetic construct
IKPNVHG

SEQ ID NO: 36610 - protein, 7 aa, synthetic construct
KNHNPGV

SEQ ID NO: 36611 - protein, 7 aa, synthetic construct
NGRGSTV

SEQ ID NO: 36612 - protein, 7 aa, synthetic construct
KLGLTHN

SEQ ID NO: 36613 - protein, 7 aa, synthetic construct
NGQKMGA

SEQ ID NO: 36614 - protein, 7 aa, synthetic construct
QSRTNAS

SEQ ID NO: 36615 - protein, 7 aa, synthetic construct
HTNYRAD

SEQ ID NO: 36616 - protein, 7 aa, synthetic construct
ITARNTG

SEQ ID NO: 36617 - protein, 7 aa, synthetic construct
PSATKTA

SEQ ID NO: 36618 - protein, 7 aa, synthetic construct
QKPRMEG

SEQ ID NO: 36619 - protein, 7 aa, synthetic construct
PQKGPNV

SEQ ID NO: 36620 - protein, 7 aa, synthetic construct
NSGKNGG

SEQ ID NO: 36621 - protein, 7 aa, synthetic construct
QNRSQAP

SEQ ID NO: 36622 - protein, 7 aa, synthetic construct
TGNPMKG

SEQ ID NO: 36623 - protein, 7 aa, synthetic construct
PKQSGAG

SEQ ID NO: 36624 - protein, 7 aa, synthetic construct
DNRSGIQ

SEQ ID NO: 36625 - protein, 7 aa, synthetic construct
AAKSAVN

SEQ ID NO: 36626 - protein, 7 aa, synthetic construct
KTTQARE

SEQ ID NO: 36627 - protein, 7 aa, synthetic construct
YGKTVSA

SEQ ID NO: 36628 - protein, 7 aa, synthetic construct
KVGIHPT

SEQ ID NO: 36629 - protein, 7 aa, synthetic construct
RYVEHTG

SEQ ID NO: 36630 - protein, 7 aa, synthetic construct
YRGDDSK

SEQ ID NO: 36631 - protein, 7 aa, synthetic construct
KYSKSEI

SEQ ID NO: 36632 - protein, 7 aa, synthetic construct
RDVIAHQ

SEQ ID NO: 36633 - protein, 7 aa, synthetic construct
PKNSASS

SEQ ID NO: 36634 - protein, 7 aa, synthetic construct
QVRELRP

SEQ ID NO: 36635 - protein, 7 aa, synthetic construct
AAFSAKA

SEQ ID NO: 36636 - protein, 7 aa, synthetic construct
LGSKTLS

SEQ ID NO: 36637 - protein, 7 aa, synthetic construct
SRDKTAG

SEQ ID NO: 36638 - protein, 7 aa, synthetic construct
SNRNQGP

SEQ ID NO: 36639 - protein, 7 aa, synthetic construct
FAKSTSP

SEQ ID NO: 36640 - protein, 7 aa, synthetic construct
GILGRVQ

SEQ ID NO: 36641 - protein, 7 aa, synthetic construct
NNVGNKG

SEQ ID NO: 36642 - protein, 7 aa, synthetic construct
RGPNTQA

SEQ ID NO: 36643 - protein, 7 aa, synthetic construct
TREKSYQ

SEQ ID NO: 36644 - protein, 7 aa, synthetic construct
SAGQTKN

SEQ ID NO: 36645 - protein, 7 aa, synthetic construct
YDHAIKQ

SEQ ID NO: 36646 - protein, 7 aa, synthetic construct
TKTMGNG

SEQ ID NO: 36647 - protein, 7 aa, synthetic construct
GAKLDRP

SEQ ID NO: 36648 - protein, 7 aa, synthetic construct
IASTKPG

SEQ ID NO: 36649 - protein, 7 aa, synthetic construct
HPNVPYT

SEQ ID NO: 36650 - protein, 7 aa, synthetic construct
TDKTKRD

SEQ ID NO: 36651 - protein, 7 aa, synthetic construct
VKVIGMA

SEQ ID NO: 36652 - protein, 7 aa, synthetic construct
INHQKVH

SEQ ID NO: 36653 - protein, 7 aa, synthetic construct
WQPVQSG

SEQ ID NO: 36654 - protein, 7 aa, synthetic construct
KKSDHMG

SEQ ID NO: 36655 - protein, 7 aa, synthetic construct
TLMTTKN

SEQ ID NO: 36656 - protein, 7 aa, synthetic construct
RTNPTAA

SEQ ID NO: 36657 - protein, 7 aa, synthetic construct
WNSRGNE

SEQ ID NO: 36658 - protein, 7 aa, synthetic construct
YTGNRNG

SEQ ID NO: 36659 - protein, 7 aa, synthetic construct
HSKHSGD

SEQ ID NO: 36660 - protein, 7 aa, synthetic construct
LRDVHGI

SEQ ID NO: 36661 - protein, 7 aa, synthetic construct
TDLRGSA

SEQ ID NO: 36662 - protein, 7 aa, synthetic construct
RVTSGAP

SEQ ID NO: 36663 - protein, 7 aa, synthetic construct
AMKSGGG

SEQ ID NO: 36664 - protein, 7 aa, synthetic construct
TTRNNNG

SEQ ID NO: 36665 - protein, 7 aa, synthetic construct
AKNQTAA

SEQ ID NO: 36666 - protein, 7 aa, synthetic construct
TMSNKST

SEQ ID NO: 36667 - protein, 7 aa, synthetic construct
IFTPNNP

SEQ ID NO: 36668 - protein, 7 aa, synthetic construct
DIHTQFG

SEQ ID NO: 36669 - protein, 7 aa, synthetic construct
KTVRDPT

SEQ ID NO: 36670 - protein, 7 aa, synthetic construct
IDVGAKK

SEQ ID NO: 36671 - protein, 7 aa, synthetic construct
NHKINEW

SEQ ID NO: 36672 - protein, 7 aa, synthetic construct
KPDAKTM

SEQ ID NO: 36673 - protein, 7 aa, synthetic construct
QYVGAKT

SEQ ID NO: 36674 - protein, 7 aa, synthetic construct
KMPSTNS

SEQ ID NO: 36675 - protein, 7 aa, synthetic construct
YKADYGH

SEQ ID NO: 36676 - protein, 7 aa, synthetic construct
LSPSGKT

SEQ ID NO: 36677 - protein, 7 aa, synthetic construct
TKQITQF

SEQ ID NO: 36678 - protein, 7 aa, synthetic construct
LATAHKE

SEQ ID NO: 36679 - protein, 7 aa, synthetic construct
FIAKGPP

SEQ ID NO: 36680 - protein, 7 aa, synthetic construct
QSKPTSA

SEQ ID NO: 36681 - protein, 7 aa, synthetic construct
ANVKSQG

SEQ ID NO: 36682 - protein, 7 aa, synthetic construct
QHNKWGD

SEQ ID NO: 36683 - protein, 7 aa, synthetic construct
QSKNMVF

SEQ ID NO: 36684 - protein, 7 aa, synthetic construct
KVASGKD

SEQ ID NO: 36685 - protein, 7 aa, synthetic construct
GGRGIVT

SEQ ID NO: 36686 - protein, 7 aa, synthetic construct
QYKPNGA

SEQ ID NO: 36687 - protein, 7 aa, synthetic construct
MAHGKPA

SEQ ID NO: 36688 - protein, 7 aa, synthetic construct
HAHRSQP

SEQ ID NO: 36689 - protein, 7 aa, synthetic construct
SGHQKEF

SEQ ID NO: 36690 - protein, 7 aa, synthetic construct
RNNERTP

SEQ ID NO: 36691 - protein, 7 aa, synthetic construct
VTQKPSL

SEQ ID NO: 36692 - protein, 7 aa, synthetic construct
NNLAQGH

SEQ ID NO: 36693 - protein, 7 aa, synthetic construct
TNKADKM

SEQ ID NO: 36694 - protein, 7 aa, synthetic construct
DVVSRSP

SEQ ID NO: 36695 - protein, 7 aa, synthetic construct
PQSKSQA

SEQ ID NO: 36696 - protein, 7 aa, synthetic construct
MRPASQN

SEQ ID NO: 36697 - protein, 7 aa, synthetic construct
TIGGPRD

SEQ ID NO: 36698 - protein, 7 aa, synthetic construct
TNHKAFM

SEQ ID NO: 36699 - protein, 7 aa, synthetic construct
PGDRLGG

SEQ ID NO: 36700 - protein, 7 aa, synthetic construct
VMPKQIA

SEQ ID NO: 36701 - protein, 7 aa, synthetic construct
LNKTQKD

SEQ ID NO: 36702 - protein, 7 aa, synthetic construct
ASHIVPG

SEQ ID NO: 36703 - protein, 7 aa, synthetic construct
EKVRPIF

SEQ ID NO: 36704 - protein, 7 aa, synthetic construct
MAQSQRV

SEQ ID NO: 36705 - protein, 7 aa, synthetic construct
NNKGHMN

SEQ ID NO: 36706 - protein, 7 aa, synthetic construct
RPSSSVN

SEQ ID NO: 36707 - protein, 7 aa, synthetic construct
DRDGKHG

SEQ ID NO: 36708 - protein, 7 aa, synthetic construct
TAKNSPF

SEQ ID NO: 36709 - protein, 7 aa, synthetic construct
VSKLATP

SEQ ID NO: 36710 - protein, 7 aa, synthetic construct
TNKGSSA

SEQ ID NO: 36711 - protein, 7 aa, synthetic construct
THDAFRP

SEQ ID NO: 36712 - protein, 7 aa, synthetic construct
QQQGRAQ

SEQ ID NO: 36713 - protein, 7 aa, synthetic construct
KYHDVHP

SEQ ID NO: 36714 - protein, 7 aa, synthetic construct
KVMDKQF

SEQ ID NO: 36715 - protein, 7 aa, synthetic construct
AGLQSRG

SEQ ID NO: 36716 - protein, 7 aa, synthetic construct
NPRSGDG

SEQ ID NO: 36717 - protein, 7 aa, synthetic construct
AKNLPHI

SEQ ID NO: 36718 - protein, 7 aa, synthetic construct
HAGKMTD

SEQ ID NO: 36719 - protein, 7 aa, synthetic construct
RPSFISE

SEQ ID NO: 36720 - protein, 7 aa, synthetic construct
YMGVTSP

SEQ ID NO: 36721 - protein, 7 aa, synthetic construct
VKMNGAA

SEQ ID NO: 36722 - protein, 7 aa, synthetic construct
LSNKMSA

SEQ ID NO: 36723 - protein, 7 aa, synthetic construct
VLAQSNH

SEQ ID NO: 36724 - protein, 7 aa, synthetic construct
MGKPPGL

SEQ ID NO: 36725 - protein, 7 aa, synthetic construct
NSNLHVG

SEQ ID NO: 36726 - protein, 7 aa, synthetic construct
EYRNGQG

SEQ ID NO: 36727 - protein, 7 aa, synthetic construct
EKQKNWS

SEQ ID NO: 36728 - protein, 7 aa, synthetic construct
QDRKFNA

SEQ ID NO: 36729 - protein, 7 aa, synthetic construct
MKKDTVM

SEQ ID NO: 36730 - protein, 7 aa, synthetic construct
NIRDLAI

SEQ ID NO: 36731 - protein, 7 aa, synthetic construct
FKPHAVN

SEQ ID NO: 36732 - protein, 7 aa, synthetic construct
KPGAAYS

SEQ ID NO: 36733 - protein, 7 aa, synthetic construct
LGLGVKG

SEQ ID NO: 36734 - protein, 7 aa, synthetic construct
NMNGHKA

SEQ ID NO: 36735 - protein, 7 aa, synthetic construct
HNTIGRA

SEQ ID NO: 36736 - protein, 7 aa, synthetic construct
EWPGKTG

SEQ ID NO: 36737 - protein, 7 aa, synthetic construct
QRNPNVT

SEQ ID NO: 36738 - protein, 7 aa, synthetic construct
QPAGRMA

SEQ ID NO: 36739 - protein, 7 aa, synthetic construct
KDIMITA

SEQ ID NO: 36740 - protein, 7 aa, synthetic construct
VTSHRQE

SEQ ID NO: 36741 - protein, 7 aa, synthetic construct
KTVNNTA

SEQ ID NO: 36742 - protein, 7 aa, synthetic construct
ARGTSNT

SEQ ID NO: 36743 - protein, 7 aa, synthetic construct
PGSGARV

SEQ ID NO: 36744 - protein, 7 aa, synthetic construct
HHLKHDS

SEQ ID NO: 36745 - protein, 7 aa, synthetic construct
FQNTQMA

SEQ ID NO: 36746 - protein, 7 aa, synthetic construct
AGPSFLG

SEQ ID NO: 36747 - protein, 7 aa, synthetic construct
TRNRPGD

SEQ ID NO: 36748 - protein, 7 aa, synthetic construct
STHSHPS

SEQ ID NO: 36749 - protein, 7 aa, synthetic construct
NHATLPA

SEQ ID NO: 36750 - protein, 7 aa, synthetic construct
TPPSTSG

SEQ ID NO: 36751 - protein, 7 aa, synthetic construct
HKMTGQG

SEQ ID NO: 36752 - protein, 7 aa, synthetic construct
GKQSVAS

SEQ ID NO: 36753 - protein, 7 aa, synthetic construct
EKPFLQA

SEQ ID NO: 36754 - protein, 7 aa, synthetic construct
NMPHKTV

SEQ ID NO: 36755 - protein, 7 aa, synthetic construct
GMSTHHG

SEQ ID NO: 36756 - protein, 7 aa, synthetic construct
QRPPQGG

SEQ ID NO: 36757 - protein, 7 aa, synthetic construct
RTSGVGN

SEQ ID NO: 36758 - protein, 7 aa, synthetic construct
MVRVPEK

SEQ ID NO: 36759 - protein, 7 aa, synthetic construct
RTANSGP

SEQ ID NO: 36760 - protein, 7 aa, synthetic construct
TPGAGKI

SEQ ID NO: 36761 - protein, 7 aa, synthetic construct
MMKGSTP

SEQ ID NO: 36762 - protein, 7 aa, synthetic construct
QKPAGVG

SEQ ID NO: 36763 - protein, 7 aa, synthetic construct
NVKGMQG

SEQ ID NO: 36764 - protein, 7 aa, synthetic construct
NGRVIQP

SEQ ID NO: 36765 - protein, 7 aa, synthetic construct
KQPIRQD

SEQ ID NO: 36766 - protein, 7 aa, synthetic construct
VTRGQMG

SEQ ID NO: 36767 - protein, 7 aa, synthetic construct
NMGIHNG

SEQ ID NO: 36768 - protein, 7 aa, synthetic construct
RNPPTGS

SEQ ID NO: 36769 - protein, 7 aa, synthetic construct
RGQASQG

SEQ ID NO: 36770 - protein, 7 aa, synthetic construct
QNQRAQA

SEQ ID NO: 36771 - protein, 7 aa, synthetic construct
FSNFKAS

SEQ ID NO: 36772 - protein, 7 aa, synthetic construct
TKNMVKD

SEQ ID NO: 36773 - protein, 7 aa, synthetic construct
GTNHKMG

SEQ ID NO: 36774 - protein, 7 aa, synthetic construct
PHKHDAP

SEQ ID NO: 36775 - protein, 7 aa, synthetic construct
VRKERDA

SEQ ID NO: 36776 - protein, 7 aa, synthetic construct
NSTKTPA

SEQ ID NO: 36777 - protein, 7 aa, synthetic construct
YGPKTAS

SEQ ID NO: 36778 - protein, 7 aa, synthetic construct
KISTHQE

SEQ ID NO: 36779 - protein, 7 aa, synthetic construct
TGKGGGT

SEQ ID NO: 36780 - protein, 7 aa, synthetic construct
LQGPNRN

SEQ ID NO: 36781 - protein, 7 aa, synthetic construct
YRGLTAD

SEQ ID NO: 36782 - protein, 7 aa, synthetic construct
TMNATNG

SEQ ID NO: 36783 - protein, 7 aa, synthetic construct
KTGSFQG

SEQ ID NO: 36784 - protein, 7 aa, synthetic construct
FEKWMPN

SEQ ID NO: 36785 - protein, 7 aa, synthetic construct
TVTFRDN

SEQ ID NO: 36786 - protein, 7 aa, synthetic construct
RFPHADS

SEQ ID NO: 36787 - protein, 7 aa, synthetic construct
ITMHKNA

SEQ ID NO: 36788 - protein, 7 aa, synthetic construct
LPKSMGN

SEQ ID NO: 36789 - protein, 7 aa, synthetic construct
FINGLPQ

SEQ ID NO: 36790 - protein, 7 aa, synthetic construct
SMKIPSV

SEQ ID NO: 36791 - protein, 7 aa, synthetic construct
PTRSNGA

SEQ ID NO: 36792 - protein, 7 aa, synthetic construct
VVNHVPN

SEQ ID NO: 36793 - protein, 7 aa, synthetic construct
TRQTTNG

SEQ ID NO: 36794 - protein, 7 aa, synthetic construct
KKAFHED

SEQ ID NO: 36795 - protein, 7 aa, synthetic construct
IQNRGAS

SEQ ID NO: 36796 - protein, 7 aa, synthetic construct
PTRGQNV

SEQ ID NO: 36797 - protein, 7 aa, synthetic construct
NKMVQQG

SEQ ID NO: 36798 - protein, 7 aa, synthetic construct
VYGTKNG

SEQ ID NO: 36799 - protein, 7 aa, synthetic construct
WRQEAKQ

SEQ ID NO: 36800 - protein, 7 aa, synthetic construct
VKNSGGS

SEQ ID NO: 36801 - protein, 7 aa, synthetic construct
NHMRAIG

SEQ ID NO: 36802 - protein, 7 aa, synthetic construct
LAVRNNA

SEQ ID NO: 36803 - protein, 7 aa, synthetic construct
QNSRQGS

SEQ ID NO: 36804 - protein, 7 aa, synthetic construct
KSQMQPA

SEQ ID NO: 36805 - protein, 7 aa, synthetic construct
KDRSMQG

SEQ ID NO: 36806 - protein, 7 aa, synthetic construct
TRITPVE

SEQ ID NO: 36807 - protein, 7 aa, synthetic construct
WPHDTAL

SEQ ID NO: 36808 - protein, 7 aa, synthetic construct
AKDAGKQ

SEQ ID NO: 36809 - protein, 7 aa, synthetic construct
FSVEGSH

SEQ ID NO: 36810 - protein, 7 aa, synthetic construct
GKNAQAA

SEQ ID NO: 36811 - protein, 7 aa, synthetic construct
FQERHMK

SEQ ID NO: 36812 - protein, 7 aa, synthetic construct
VNQLKSP

SEQ ID NO: 36813 - protein, 7 aa, synthetic construct
IRNAGHV

SEQ ID NO: 36814 - protein, 7 aa, synthetic construct
NRDGRAP

SEQ ID NO: 36815 - protein, 7 aa, synthetic construct
EMTRTNS

SEQ ID NO: 36816 - protein, 7 aa, synthetic construct
HLPHSVA

SEQ ID NO: 36817 - protein, 7 aa, synthetic construct
LVKQTQG

SEQ ID NO: 36818 - protein, 7 aa, synthetic construct
NGQAKQN

SEQ ID NO: 36819 - protein, 7 aa, synthetic construct
GKTQTAS

SEQ ID NO: 36820 - protein, 7 aa, synthetic construct
RPGVMNV

SEQ ID NO: 36821 - protein, 7 aa, synthetic construct
MSHQKEI

SEQ ID NO: 36822 - protein, 7 aa, synthetic construct
NRQGGSI

SEQ ID NO: 36823 - protein, 7 aa, synthetic construct
NQKNTAA

SEQ ID NO: 36824 - protein, 7 aa, synthetic construct
RSTFIKD

SEQ ID NO: 36825 - protein, 7 aa, synthetic construct
WKKMDMG

SEQ ID NO: 36826 - protein, 7 aa, synthetic construct
VKPSIAG

SEQ ID NO: 36827 - protein, 7 aa, synthetic construct
NNWNGQG

SEQ ID NO: 36828 - protein, 7 aa, synthetic construct
VRPNTNA

SEQ ID NO: 36829 - protein, 7 aa, synthetic construct
NQQRPSA

SEQ ID NO: 36830 - protein, 7 aa, synthetic construct
NRTAGGP

SEQ ID NO: 36831 - protein, 7 aa, synthetic construct
GKKQEGG

SEQ ID NO: 36832 - protein, 7 aa, synthetic construct
HFKKAGD

SEQ ID NO: 36833 - protein, 7 aa, synthetic construct
VTAQRSI

SEQ ID NO: 36834 - protein, 7 aa, synthetic construct
SLVGNRM

SEQ ID NO: 36835 - protein, 7 aa, synthetic construct
MVKAHEH

SEQ ID NO: 36836 - protein, 7 aa, synthetic construct
TKGVLAP

SEQ ID NO: 36837 - protein, 7 aa, synthetic construct
MKSSKGD

SEQ ID NO: 36838 - protein, 7 aa, synthetic construct
TNSMKNG

SEQ ID NO: 36839 - protein, 7 aa, synthetic construct
TTQKSNA

SEQ ID NO: 36840 - protein, 7 aa, synthetic construct
YQSMVRG

SEQ ID NO: 36841 - protein, 7 aa, synthetic construct
EKFDLKN

SEQ ID NO: 36842 - protein, 7 aa, synthetic construct
GVSKTSG

SEQ ID NO: 36843 - protein, 7 aa, synthetic construct
EVFKASA

SEQ ID NO: 36844 - protein, 7 aa, synthetic construct
PKDSKFG

SEQ ID NO: 36845 - protein, 7 aa, synthetic construct
NKPHISQ

SEQ ID NO: 36846 - protein, 7 aa, synthetic construct
RKTGDVD

SEQ ID NO: 36847 - protein, 7 aa, synthetic construct
VSKKSEV

SEQ ID NO: 36848 - protein, 7 aa, synthetic construct
WDAKDGK

SEQ ID NO: 36849 - protein, 7 aa, synthetic construct
KFEKHLG

SEQ ID NO: 36850 - protein, 7 aa, synthetic construct
TPKNAVG

SEQ ID NO: 36851 - protein, 7 aa, synthetic construct
SNAMQIG

SEQ ID NO: 36852 - protein, 7 aa, synthetic construct
TNKQQSG

SEQ ID NO: 36853 - protein, 7 aa, synthetic construct
PIGKQTA

SEQ ID NO: 36854 - protein, 7 aa, synthetic construct
NTVRSAA

SEQ ID NO: 36855 - protein, 7 aa, synthetic construct
NNKSIQA

SEQ ID NO: 36856 - protein, 7 aa, synthetic construct
GGSKMQA

SEQ ID NO: 36857 - protein, 7 aa, synthetic construct
HHNKGTD

SEQ ID NO: 36858 - protein, 7 aa, synthetic construct
VKNNGQS

SEQ ID NO: 36859 - protein, 7 aa, synthetic construct
MLKYGTQ

SEQ ID NO: 36860 - protein, 7 aa, synthetic construct
THNRTDA

SEQ ID NO: 36861 - protein, 7 aa, synthetic construct
LAYHSKD

SEQ ID NO: 36862 - protein, 7 aa, synthetic construct
HLTFQKE

SEQ ID NO: 36863 - protein, 7 aa, synthetic construct
MTKQLTA

SEQ ID NO: 36864 - protein, 7 aa, synthetic construct
QLPKSNA

SEQ ID NO: 36865 - protein, 7 aa, synthetic construct
YGAALAN

SEQ ID NO: 36866 - protein, 7 aa, synthetic construct
KKSEMVG

SEQ ID NO: 36867 - protein, 7 aa, synthetic construct
IRSVENR

SEQ ID NO: 36868 - protein, 7 aa, synthetic construct
MKASSMA

SEQ ID NO: 36869 - protein, 7 aa, synthetic construct
GNIQGKA

SEQ ID NO: 36870 - protein, 7 aa, synthetic construct
INNMKAG

SEQ ID NO: 36871 - protein, 7 aa, synthetic construct
VEGRHQG

SEQ ID NO: 36872 - protein, 7 aa, synthetic construct
RRDLQQT

SEQ ID NO: 36873 - protein, 7 aa, synthetic construct
QFRMVPE

SEQ ID NO: 36874 - protein, 7 aa, synthetic construct
KPSTVSL

SEQ ID NO: 36875 - protein, 7 aa, synthetic construct
ERKSPST

SEQ ID NO: 36876 - protein, 7 aa, synthetic construct
MDVKALI

SEQ ID NO: 36877 - protein, 7 aa, synthetic construct
SMPNKTA

SEQ ID NO: 36878 - protein, 7 aa, synthetic construct
TGTARQG

SEQ ID NO: 36879 - protein, 7 aa, synthetic construct
MPQKGFA

SEQ ID NO: 36880 - protein, 7 aa, synthetic construct
NIKLGVA

SEQ ID NO: 36881 - protein, 7 aa, synthetic construct
HGVTKNV

SEQ ID NO: 36882 - protein, 7 aa, synthetic construct
TQVGQRF

SEQ ID NO: 36883 - protein, 7 aa, synthetic construct
SGSKHHE

SEQ ID NO: 36884 - protein, 7 aa, synthetic construct
GMNKNNP

SEQ ID NO: 36885 - protein, 7 aa, synthetic construct
IEKIFSA

SEQ ID NO: 36886 - protein, 7 aa, synthetic construct
INSMMGA

SEQ ID NO: 36887 - protein, 7 aa, synthetic construct
VTSKAFM

SEQ ID NO: 36888 - protein, 7 aa, synthetic construct
LIGRKDD

SEQ ID NO: 36889 - protein, 7 aa, synthetic construct
MRALPTP

SEQ ID NO: 36890 - protein, 7 aa, synthetic construct
MQPGSQN

SEQ ID NO: 36891 - protein, 7 aa, synthetic construct
FKQPNSG

SEQ ID NO: 36892 - protein, 7 aa, synthetic construct
LYKDRPI

SEQ ID NO: 36893 - protein, 7 aa, synthetic construct
ANQRGVE

SEQ ID NO: 36894 - protein, 7 aa, synthetic construct
NVNVTNV

SEQ ID NO: 36895 - protein, 7 aa, synthetic construct
AIKTHPP

SEQ ID NO: 36896 - protein, 7 aa, synthetic construct
TTQGKTG

SEQ ID NO: 36897 - protein, 7 aa, synthetic construct
QTKGAYA

SEQ ID NO: 36898 - protein, 7 aa, synthetic construct
TPPGARG

SEQ ID NO: 36899 - protein, 7 aa, synthetic construct
GKQSSAP

SEQ ID NO: 36900 - protein, 7 aa, synthetic construct
QRSASAA

SEQ ID NO: 36901 - protein, 7 aa, synthetic construct
SQKNPNY

SEQ ID NO: 36902 - protein, 7 aa, synthetic construct
MKSSMRD

SEQ ID NO: 36903 - protein, 7 aa, synthetic construct
PGRQLPV

SEQ ID NO: 36904 - protein, 7 aa, synthetic construct
MKSVSAP

SEQ ID NO: 36905 - protein, 7 aa, synthetic construct
KNQGATA

SEQ ID NO: 36906 - protein, 7 aa, synthetic construct
TSGIKGG

SEQ ID NO: 36907 - protein, 7 aa, synthetic construct
SEINRGG

SEQ ID NO: 36908 - protein, 7 aa, synthetic construct
GITARQA

SEQ ID NO: 36909 - protein, 7 aa, synthetic construct
GTFRSSE

SEQ ID NO: 36910 - protein, 7 aa, synthetic construct
GPTNKTA

SEQ ID NO: 36911 - protein, 7 aa, synthetic construct
AASRANF

SEQ ID NO: 36912 - protein, 7 aa, synthetic construct
KHKVQDS

SEQ ID NO: 36913 - protein, 7 aa, synthetic construct
GPSGYGI

SEQ ID NO: 36914 - protein, 7 aa, synthetic construct
GKPTTMS

SEQ ID NO: 36915 - protein, 7 aa, synthetic construct
GHPRTHE

SEQ ID NO: 36916 - protein, 7 aa, synthetic construct
TGKVDHR

SEQ ID NO: 36917 - protein, 7 aa, synthetic construct
QRSGGSV

SEQ ID NO: 36918 - protein, 7 aa, synthetic construct
RMGLDGI

SEQ ID NO: 36919 - protein, 7 aa, synthetic construct
LFSEKKG

SEQ ID NO: 36920 - protein, 7 aa, synthetic construct
QGPNHSG

SEQ ID NO: 36921 - protein, 7 aa, synthetic construct
GMKHAGP

SEQ ID NO: 36922 - protein, 7 aa, synthetic construct
GKQQRDG

SEQ ID NO: 36923 - protein, 7 aa, synthetic construct
AGGKGNP

SEQ ID NO: 36924 - protein, 7 aa, synthetic construct
SRSTASS

SEQ ID NO: 36925 - protein, 7 aa, synthetic construct
IATLSRN

SEQ ID NO: 36926 - protein, 7 aa, synthetic construct
RNIGGTS

SEQ ID NO: 36927 - protein, 7 aa, synthetic construct
QNNKATS

SEQ ID NO: 36928 - protein, 7 aa, synthetic construct
QNSINQK

SEQ ID NO: 36929 - protein, 7 aa, synthetic construct
SSRVTAI

SEQ ID NO: 36930 - protein, 7 aa, synthetic construct
MNKNVSI

SEQ ID NO: 36931 - protein, 7 aa, synthetic construct
NNKEPSR

SEQ ID NO: 36932 - protein, 7 aa, synthetic construct
RTGANSA

SEQ ID NO: 36933 - protein, 7 aa, synthetic construct
EHSQTRG

SEQ ID NO: 36934 - protein, 7 aa, synthetic construct
MELNFKG

SEQ ID NO: 36935 - protein, 7 aa, synthetic construct
GQWKLTA

SEQ ID NO: 36936 - protein, 7 aa, synthetic construct
SEHRWPA

SEQ ID NO: 36937 - protein, 7 aa, synthetic construct
MQNTIHH

SEQ ID NO: 36938 - protein, 7 aa, synthetic construct
FRNKGME

SEQ ID NO: 36939 - protein, 7 aa, synthetic construct
NKYRMGD

SEQ ID NO: 36940 - protein, 7 aa, synthetic construct
IAKQHMN

SEQ ID NO: 36941 - protein, 7 aa, synthetic construct
SQAGSKS

SEQ ID NO: 36942 - protein, 7 aa, synthetic construct
RNNATTG

SEQ ID NO: 36943 - protein, 7 aa, synthetic construct
RQMGGNA

SEQ ID NO: 36944 - protein, 7 aa, synthetic construct
SRQQSQV

SEQ ID NO: 36945 - protein, 7 aa, synthetic construct
KRQSNDD

SEQ ID NO: 36946 - protein, 7 aa, synthetic construct
NGPTIRI

SEQ ID NO: 36947 - protein, 7 aa, synthetic construct
PNRPLPN

SEQ ID NO: 36948 - protein, 7 aa, synthetic construct
MAVNSNV

SEQ ID NO: 36949 - protein, 7 aa, synthetic construct
ALLAREA

SEQ ID NO: 36950 - protein, 7 aa, synthetic construct
YLDHTHA

SEQ ID NO: 36951 - protein, 7 aa, synthetic construct
SKQTGQG

SEQ ID NO: 36952 - protein, 7 aa, synthetic construct
RYATNSM

SEQ ID NO: 36953 - protein, 7 aa, synthetic construct
RTKNEYD

SEQ ID NO: 36954 - protein, 7 aa, synthetic construct
DMSQKTL

SEQ ID NO: 36955 - protein, 7 aa, synthetic construct
AQYKDRA

SEQ ID NO: 36956 - protein, 7 aa, synthetic construct
RNANGTG

SEQ ID NO: 36957 - protein, 7 aa, synthetic construct
QKPVNSD

SEQ ID NO: 36958 - protein, 7 aa, synthetic construct
SNFSPRV

SEQ ID NO: 36959 - protein, 7 aa, synthetic construct
LPKQLPQ

SEQ ID NO: 36960 - protein, 7 aa, synthetic construct
WRPEKPP

SEQ ID NO: 36961 - protein, 7 aa, synthetic construct
QKSIAGN

SEQ ID NO: 36962 - protein, 7 aa, synthetic construct
QTMRSVE

SEQ ID NO: 36963 - protein, 7 aa, synthetic construct
QPQNKFG

SEQ ID NO: 36964 - protein, 7 aa, synthetic construct
RPVNVGG

SEQ ID NO: 36965 - protein, 7 aa, synthetic construct
GPNAKNP

SEQ ID NO: 36966 - protein, 7 aa, synthetic construct
GNQGFKP

SEQ ID NO: 36967 - protein, 7 aa, synthetic construct
FNKGAQN

SEQ ID NO: 36968 - protein, 7 aa, synthetic construct
YATHKPT

SEQ ID NO: 36969 - protein, 7 aa, synthetic construct
TIPHTQG

SEQ ID NO: 36970 - protein, 7 aa, synthetic construct
ASVPSRA

SEQ ID NO: 36971 - protein, 7 aa, synthetic construct
MDGMNKP

SEQ ID NO: 36972 - protein, 7 aa, synthetic construct
PQAGKFG

SEQ ID NO: 36973 - protein, 7 aa, synthetic construct
YDRKMDI

SEQ ID NO: 36974 - protein, 7 aa, synthetic construct
MPSTKQG

SEQ ID NO: 36975 - protein, 7 aa, synthetic construct
QKAPRGD

SEQ ID NO: 36976 - protein, 7 aa, synthetic construct
WGGARVG

SEQ ID NO: 36977 - protein, 7 aa, synthetic construct
KSQMNGI

SEQ ID NO: 36978 - protein, 7 aa, synthetic construct
KRNTDQP

SEQ ID NO: 36979 - protein, 7 aa, synthetic construct
SFTVTHG

SEQ ID NO: 36980 - protein, 7 aa, synthetic construct
QTASGRP

SEQ ID NO: 36981 - protein, 7 aa, synthetic construct
SKGISTG

SEQ ID NO: 36982 - protein, 7 aa, synthetic construct
AAWGGHE

SEQ ID NO: 36983 - protein, 7 aa, synthetic construct
HHNKYQA

SEQ ID NO: 36984 - protein, 7 aa, synthetic construct
LAFRIKD

SEQ ID NO: 36985 - protein, 7 aa, synthetic construct
KKSVLME

SEQ ID NO: 36986 - protein, 7 aa, synthetic construct
NNRNNTG

SEQ ID NO: 36987 - protein, 7 aa, synthetic construct
ITNRTNS

SEQ ID NO: 36988 - protein, 7 aa, synthetic construct
NFPQSHA

SEQ ID NO: 36989 - protein, 7 aa, synthetic construct
LHTRESA

SEQ ID NO: 36990 - protein, 7 aa, synthetic construct
TGPQMKG

SEQ ID NO: 36991 - protein, 7 aa, synthetic construct
TGHKEWG

SEQ ID NO: 36992 - protein, 7 aa, synthetic construct
MHPAAIG

SEQ ID NO: 36993 - protein, 7 aa, synthetic construct
AMNNGKY

SEQ ID NO: 36994 - protein, 7 aa, synthetic construct
PIKGTSA

SEQ ID NO: 36995 - protein, 7 aa, synthetic construct
VLQLNGK

SEQ ID NO: 36996 - protein, 7 aa, synthetic construct
MGNLTTQ

SEQ ID NO: 36997 - protein, 7 aa, synthetic construct
QFGREPK

SEQ ID NO: 36998 - protein, 7 aa, synthetic construct
WPQIQKE

SEQ ID NO: 36999 - protein, 7 aa, synthetic construct
STKMAKD

SEQ ID NO: 37000 - protein, 7 aa, synthetic construct
RERPAGS

SEQ ID NO: 37001 - protein, 7 aa, synthetic construct
RHAGNQM

SEQ ID NO: 37002 - protein, 7 aa, synthetic construct
VLPFQNQ

SEQ ID NO: 37003 - protein, 7 aa, synthetic construct
GKDTGSM

SEQ ID NO: 37004 - protein, 7 aa, synthetic construct
KKSDIAM

SEQ ID NO: 37005 - protein, 7 aa, synthetic construct
MPKPTTG

SEQ ID NO: 37006 - protein, 7 aa, synthetic construct
AKGPVLA

SEQ ID NO: 37007 - protein, 7 aa, synthetic construct
KTPSQFG

SEQ ID NO: 37008 - protein, 7 aa, synthetic construct
KRQADDN

SEQ ID NO: 37009 - protein, 7 aa, synthetic construct
DQGIVRS

SEQ ID NO: 37010 - protein, 7 aa, synthetic construct
RQDSRTA

SEQ ID NO: 37011 - protein, 7 aa, synthetic construct
FRNNQMG

SEQ ID NO: 37012 - protein, 7 aa, synthetic construct
RVSVAHS

SEQ ID NO: 37013 - protein, 7 aa, synthetic construct
GKYVSHN

SEQ ID NO: 37014 - protein, 7 aa, synthetic construct
PSRNGMG

SEQ ID NO: 37015 - protein, 7 aa, synthetic construct
PQAKNTA

SEQ ID NO: 37016 - protein, 7 aa, synthetic construct
THVHGGF

SEQ ID NO: 37017 - protein, 7 aa, synthetic construct
RPGTIPA

SEQ ID NO: 37018 - protein, 7 aa, synthetic construct
SHIHNVP

SEQ ID NO: 37019 - protein, 7 aa, synthetic construct
HRERNPE

SEQ ID NO: 37020 - protein, 7 aa, synthetic construct
ATITSVP

SEQ ID NO: 37021 - protein, 7 aa, synthetic construct
MVRVSEA

SEQ ID NO: 37022 - protein, 7 aa, synthetic construct
QGGKASP

SEQ ID NO: 37023 - protein, 7 aa, synthetic construct
TMGVGGP

SEQ ID NO: 37024 - protein, 7 aa, synthetic construct
HNNILPI

SEQ ID NO: 37025 - protein, 7 aa, synthetic construct
GTKVQTS

SEQ ID NO: 37026 - protein, 7 aa, synthetic construct
QMTNTYL

SEQ ID NO: 37027 - protein, 7 aa, synthetic construct
SGRPIPM

SEQ ID NO: 37028 - protein, 7 aa, synthetic construct
IRPGQDK

SEQ ID NO: 37029 - protein, 7 aa, synthetic construct
TTGSRVG

SEQ ID NO: 37030 - protein, 7 aa, synthetic construct
VQKMQSN

SEQ ID NO: 37031 - protein, 7 aa, synthetic construct
KYNTASD

SEQ ID NO: 37032 - protein, 7 aa, synthetic construct
YPGGSSA

SEQ ID NO: 37033 - protein, 7 aa, synthetic construct
FGTNKNP

SEQ ID NO: 37034 - protein, 7 aa, synthetic construct
FQDYQKV

SEQ ID NO: 37035 - protein, 7 aa, synthetic construct
SRKTDQD

SEQ ID NO: 37036 - protein, 7 aa, synthetic construct
QSNRTDS

SEQ ID NO: 37037 - protein, 7 aa, synthetic construct
SWDIKIS

SEQ ID NO: 37038 - protein, 7 aa, synthetic construct
NKHRMED

SEQ ID NO: 37039 - protein, 7 aa, synthetic construct
YKQIDGQ

SEQ ID NO: 37040 - protein, 7 aa, synthetic construct
YKSQVVG

SEQ ID NO: 37041 - protein, 7 aa, synthetic construct
YMRQQNH

SEQ ID NO: 37042 - protein, 7 aa, synthetic construct
ASNRVID

SEQ ID NO: 37043 - protein, 7 aa, synthetic construct
SNPKGTM

SEQ ID NO: 37044 - protein, 7 aa, synthetic construct
HMGPPKA

SEQ ID NO: 37045 - protein, 7 aa, synthetic construct
NVKNSQS

SEQ ID NO: 37046 - protein, 7 aa, synthetic construct
VGQMRGS

SEQ ID NO: 37047 - protein, 7 aa, synthetic construct
TKSFGTA

SEQ ID NO: 37048 - protein, 7 aa, synthetic construct
ALSNSTH

SEQ ID NO: 37049 - protein, 7 aa, synthetic construct
QPGQKSA

SEQ ID NO: 37050 - protein, 7 aa, synthetic construct
FVGRVPN

SEQ ID NO: 37051 - protein, 7 aa, synthetic construct
GRSAHHP

SEQ ID NO: 37052 - protein, 7 aa, synthetic construct
LVKNNRE

SEQ ID NO: 37053 - protein, 7 aa, synthetic construct
VPKATSG

SEQ ID NO: 37054 - protein, 7 aa, synthetic construct
GSGKPHY

SEQ ID NO: 37055 - protein, 7 aa, synthetic construct
NGSNRTP

SEQ ID NO: 37056 - protein, 7 aa, synthetic construct
KFPTSNG

SEQ ID NO: 37057 - protein, 7 aa, synthetic construct
GVAPTSK

SEQ ID NO: 37058 - protein, 7 aa, synthetic construct
NSKNTQV

SEQ ID NO: 37059 - protein, 7 aa, synthetic construct
HNPKRME

SEQ ID NO: 37060 - protein, 7 aa, synthetic construct
FTSNIQH

SEQ ID NO: 37061 - protein, 7 aa, synthetic construct
NQFKQGD

SEQ ID NO: 37062 - protein, 7 aa, synthetic construct
YPKQPTN

SEQ ID NO: 37063 - protein, 7 aa, synthetic construct
TRMREPP

SEQ ID NO: 37064 - protein, 7 aa, synthetic construct
IGRQVSN

SEQ ID NO: 37065 - protein, 7 aa, synthetic construct
NPGMKAM

SEQ ID NO: 37066 - protein, 7 aa, synthetic construct
PKNYGTD

SEQ ID NO: 37067 - protein, 7 aa, synthetic construct
RQSNNIS

SEQ ID NO: 37068 - protein, 7 aa, synthetic construct
KMQASTN

SEQ ID NO: 37069 - protein, 7 aa, synthetic construct
MPSFQHN

SEQ ID NO: 37070 - protein, 7 aa, synthetic construct
QSRSGEM

SEQ ID NO: 37071 - protein, 7 aa, synthetic construct
YPGKQSP

SEQ ID NO: 37072 - protein, 7 aa, synthetic construct
QNKPQQG

SEQ ID NO: 37073 - protein, 7 aa, synthetic construct
EYGKGKP

SEQ ID NO: 37074 - protein, 7 aa, synthetic construct
QHRNHDS

SEQ ID NO: 37075 - protein, 7 aa, synthetic construct
LRHQQEQ

SEQ ID NO: 37076 - protein, 7 aa, synthetic construct
YKSINKD

SEQ ID NO: 37077 - protein, 7 aa, synthetic construct
MHDPKLA

SEQ ID NO: 37078 - protein, 7 aa, synthetic construct
TDAFSKP

SEQ ID NO: 37079 - protein, 7 aa, synthetic construct
YGYGTQK

SEQ ID NO: 37080 - protein, 7 aa, synthetic construct
NQTGKQA

SEQ ID NO: 37081 - protein, 7 aa, synthetic construct
NRMGSTG

SEQ ID NO: 37082 - protein, 7 aa, synthetic construct
VLDIKIG

SEQ ID NO: 37083 - protein, 7 aa, synthetic construct
TKPSVGA

SEQ ID NO: 37084 - protein, 7 aa, synthetic construct
KMQGITN

SEQ ID NO: 37085 - protein, 7 aa, synthetic construct
IHPPGHT

SEQ ID NO: 37086 - protein, 7 aa, synthetic construct
GKQPNAG

SEQ ID NO: 37087 - protein, 7 aa, synthetic construct
IMNERFG

SEQ ID NO: 37088 - protein, 7 aa, synthetic construct
NHPAVPR

SEQ ID NO: 37089 - protein, 7 aa, synthetic construct
MHQLGGH

SEQ ID NO: 37090 - protein, 7 aa, synthetic construct
IKVFHAE

SEQ ID NO: 37091 - protein, 7 aa, synthetic construct
HMTRQEP

SEQ ID NO: 37092 - protein, 7 aa, synthetic construct
ENRYKVE

SEQ ID NO: 37093 - protein, 7 aa, synthetic construct
KSQQSPN

SEQ ID NO: 37094 - protein, 7 aa, synthetic construct
RHPVVSP

SEQ ID NO: 37095 - protein, 7 aa, synthetic construct
HMRELNM

SEQ ID NO: 37096 - protein, 7 aa, synthetic construct
GNVQHSA

SEQ ID NO: 37097 - protein, 7 aa, synthetic construct
KDRAGTA

SEQ ID NO: 37098 - protein, 7 aa, synthetic construct
FHKQADG

SEQ ID NO: 37099 - protein, 7 aa, synthetic construct
GKSHIGA

SEQ ID NO: 37100 - protein, 7 aa, synthetic construct
VKPSMAG

SEQ ID NO: 37101 - protein, 7 aa, synthetic construct
KTPAKFD

SEQ ID NO: 37102 - protein, 7 aa, synthetic construct
MQSGHKF

SEQ ID NO: 37103 - protein, 7 aa, synthetic construct
TSRQDAY

SEQ ID NO: 37104 - protein, 7 aa, synthetic construct
VAKTNSS

SEQ ID NO: 37105 - protein, 7 aa, synthetic construct
ATRQTNP

SEQ ID NO: 37106 - protein, 7 aa, synthetic construct
RPSMAQA

SEQ ID NO: 37107 - protein, 7 aa, synthetic construct
RSTTTMP

SEQ ID NO: 37108 - protein, 7 aa, synthetic construct
AMSYNAS

SEQ ID NO: 37109 - protein, 7 aa, synthetic construct
NHKYESP

SEQ ID NO: 37110 - protein, 7 aa, synthetic construct
GRISQDN

SEQ ID NO: 37111 - protein, 7 aa, synthetic construct
WNGVAKM

SEQ ID NO: 37112 - protein, 7 aa, synthetic construct
NLAKQPS

SEQ ID NO: 37113 - protein, 7 aa, synthetic construct
NPKNAAA

SEQ ID NO: 37114 - protein, 7 aa, synthetic construct
MRDHQEF

SEQ ID NO: 37115 - protein, 7 aa, synthetic construct
SKPVMTG

SEQ ID NO: 37116 - protein, 7 aa, synthetic construct
NQPMSVS

SEQ ID NO: 37117 - protein, 7 aa, synthetic construct
MYHREDK

SEQ ID NO: 37118 - protein, 7 aa, synthetic construct
GPNSVQA

SEQ ID NO: 37119 - protein, 7 aa, synthetic construct
TPRQVQG

SEQ ID NO: 37120 - protein, 7 aa, synthetic construct
VNSGTKG

SEQ ID NO: 37121 - protein, 7 aa, synthetic construct
FHSRDPP

SEQ ID NO: 37122 - protein, 7 aa, synthetic construct
PRPTNGN

SEQ ID NO: 37123 - protein, 7 aa, synthetic construct
KVSNPTQ

SEQ ID NO: 37124 - protein, 7 aa, synthetic construct
HANLKSP

SEQ ID NO: 37125 - protein, 7 aa, synthetic construct
RLHPKFD

SEQ ID NO: 37126 - protein, 7 aa, synthetic construct
SPYKNEV

SEQ ID NO: 37127 - protein, 7 aa, synthetic construct
IKIKEES

SEQ ID NO: 37128 - protein, 7 aa, synthetic construct
HHEPKQG

SEQ ID NO: 37129 - protein, 7 aa, synthetic construct
NGQKNSA

SEQ ID NO: 37130 - protein, 7 aa, synthetic construct
TGKSQGT

SEQ ID NO: 37131 - protein, 7 aa, synthetic construct
AQNARGA

SEQ ID NO: 37132 - protein, 7 aa, synthetic construct
NMKQQGA

SEQ ID NO: 37133 - protein, 7 aa, synthetic construct
NKHTQNG

SEQ ID NO: 37134 - protein, 7 aa, synthetic construct
FKNPTTS

SEQ ID NO: 37135 - protein, 7 aa, synthetic construct
TKKDMNA

SEQ ID NO: 37136 - protein, 7 aa, synthetic construct
SGKTSGA

SEQ ID NO: 37137 - protein, 7 aa, synthetic construct
KNSTNPF

SEQ ID NO: 37138 - protein, 7 aa, synthetic construct
MKQVVNE

SEQ ID NO: 37139 - protein, 7 aa, synthetic construct
VSKPLGM

SEQ ID NO: 37140 - protein, 7 aa, synthetic construct
SKSVAYA

SEQ ID NO: 37141 - protein, 7 aa, synthetic construct
FSSPSSP

SEQ ID NO: 37142 - protein, 7 aa, synthetic construct
KMNSTQA

SEQ ID NO: 37143 - protein, 7 aa, synthetic construct
LTGNSRG

SEQ ID NO: 37144 - protein, 7 aa, synthetic construct
MQKDHTG

SEQ ID NO: 37145 - protein, 7 aa, synthetic construct
HVNNGHG

SEQ ID NO: 37146 - protein, 7 aa, synthetic construct
QMGSKQV

SEQ ID NO: 37147 - protein, 7 aa, synthetic construct
HGLQRLD

SEQ ID NO: 37148 - protein, 7 aa, synthetic construct
DLDFRTP

SEQ ID NO: 37149 - protein, 7 aa, synthetic construct
HKQHVEA

SEQ ID NO: 37150 - protein, 7 aa, synthetic construct
RSQASLP

SEQ ID NO: 37151 - protein, 7 aa, synthetic construct
KNHSMPL

SEQ ID NO: 37152 - protein, 7 aa, synthetic construct
LPRNHVG

SEQ ID NO: 37153 - protein, 7 aa, synthetic construct
QAGVHPS

SEQ ID NO: 37154 - protein, 7 aa, synthetic construct
RKDSSAM

SEQ ID NO: 37155 - protein, 7 aa, synthetic construct
QKTLAPN

SEQ ID NO: 37156 - protein, 7 aa, synthetic construct
NVGGRQP

SEQ ID NO: 37157 - protein, 7 aa, synthetic construct
SAYGGTV

SEQ ID NO: 37158 - protein, 7 aa, synthetic construct
GVTQRSG

SEQ ID NO: 37159 - protein, 7 aa, synthetic construct
SRLANGG

SEQ ID NO: 37160 - protein, 7 aa, synthetic construct
QKDKPYA

SEQ ID NO: 37161 - protein, 7 aa, synthetic construct
HGSYQSS

SEQ ID NO: 37162 - protein, 7 aa, synthetic construct
NRGKDGI

SEQ ID NO: 37163 - protein, 7 aa, synthetic construct
DIKSNRA

SEQ ID NO: 37164 - protein, 7 aa, synthetic construct
KTASVKE

SEQ ID NO: 37165 - protein, 7 aa, synthetic construct
DRYRTAD

SEQ ID NO: 37166 - protein, 7 aa, synthetic construct
RPASAQQ

SEQ ID NO: 37167 - protein, 7 aa, synthetic construct
KPGNGAF

SEQ ID NO: 37168 - protein, 7 aa, synthetic construct
YGMQAIQ

SEQ ID NO: 37169 - protein, 7 aa, synthetic construct
IDHKGGV

SEQ ID NO: 37170 - protein, 7 aa, synthetic construct
RHIGPNS

SEQ ID NO: 37171 - protein, 7 aa, synthetic construct
VMDIGRN

SEQ ID NO: 37172 - protein, 7 aa, synthetic construct
PNRMTQA

SEQ ID NO: 37173 - protein, 7 aa, synthetic construct
QVKGRDA

SEQ ID NO: 37174 - protein, 7 aa, synthetic construct
INAHLSN

SEQ ID NO: 37175 - protein, 7 aa, synthetic construct
NYSKLQA

SEQ ID NO: 37176 - protein, 7 aa, synthetic construct
YGIHGIS

SEQ ID NO: 37177 - protein, 7 aa, synthetic construct
VHRLRPD

SEQ ID NO: 37178 - protein, 7 aa, synthetic construct
TSANRTP

SEQ ID NO: 37179 - protein, 7 aa, synthetic construct
MNKGSSN

SEQ ID NO: 37180 - protein, 7 aa, synthetic construct
YPANQAR

SEQ ID NO: 37181 - protein, 7 aa, synthetic construct
HGANHKD

SEQ ID NO: 37182 - protein, 7 aa, synthetic construct
AVKGGTP

SEQ ID NO: 37183 - protein, 7 aa, synthetic construct
TPIRDTG

SEQ ID NO: 37184 - protein, 7 aa, synthetic construct
YQKKEWA

SEQ ID NO: 37185 - protein, 7 aa, synthetic construct
KEKQGFV

SEQ ID NO: 37186 - protein, 7 aa, synthetic construct
NGGRTGT

SEQ ID NO: 37187 - protein, 7 aa, synthetic construct
KQINAIP

SEQ ID NO: 37188 - protein, 7 aa, synthetic construct
NAQMKSP

SEQ ID NO: 37189 - protein, 7 aa, synthetic construct
RPGVSGP

SEQ ID NO: 37190 - protein, 7 aa, synthetic construct
STLIPRP

SEQ ID NO: 37191 - protein, 7 aa, synthetic construct
RPNHGEG

SEQ ID NO: 37192 - protein, 7 aa, synthetic construct
IDKFAPS

SEQ ID NO: 37193 - protein, 7 aa, synthetic construct
SAHGSSP

SEQ ID NO: 37194 - protein, 7 aa, synthetic construct
PRNGSQA

SEQ ID NO: 37195 - protein, 7 aa, synthetic construct
PNTRSGP

SEQ ID NO: 37196 - protein, 7 aa, synthetic construct
KHEPGWS

SEQ ID NO: 37197 - protein, 7 aa, synthetic construct
RSNPAQA

SEQ ID NO: 37198 - protein, 7 aa, synthetic construct
GQQKANA

SEQ ID NO: 37199 - protein, 7 aa, synthetic construct
ELQMPRK

SEQ ID NO: 37200 - protein, 7 aa, synthetic construct
YTGLTKP

SEQ ID NO: 37201 - protein, 7 aa, synthetic construct
YKGGSQG

SEQ ID NO: 37202 - protein, 7 aa, synthetic construct
QSIKAAG

SEQ ID NO: 37203 - protein, 7 aa, synthetic construct
PKSQTVS

SEQ ID NO: 37204 - protein, 7 aa, synthetic construct
HAVQISA

SEQ ID NO: 37205 - protein, 7 aa, synthetic construct
HPGKEFS

SEQ ID NO: 37206 - protein, 7 aa, synthetic construct
MPKNNQS

SEQ ID NO: 37207 - protein, 7 aa, synthetic construct
YKQVSKE

SEQ ID NO: 37208 - protein, 7 aa, synthetic construct
RMEQKSD

SEQ ID NO: 37209 - protein, 7 aa, synthetic construct
NSRMVQG

SEQ ID NO: 37210 - protein, 7 aa, synthetic construct
NDLKWGA

SEQ ID NO: 37211 - protein, 7 aa, synthetic construct
YARGILS

SEQ ID NO: 37212 - protein, 7 aa, synthetic construct
IRGEKIV

SEQ ID NO: 37213 - protein, 7 aa, synthetic construct
KQAGPSM

SEQ ID NO: 37214 - protein, 7 aa, synthetic construct
PKTVSTG

SEQ ID NO: 37215 - protein, 7 aa, synthetic construct
YRDKGTN

SEQ ID NO: 37216 - protein, 7 aa, synthetic construct
HAKINVT

SEQ ID NO: 37217 - protein, 7 aa, synthetic construct
MNQSWPS

SEQ ID NO: 37218 - protein, 7 aa, synthetic construct
GAKIPAP

SEQ ID NO: 37219 - protein, 7 aa, synthetic construct
SKNQQQS

SEQ ID NO: 37220 - protein, 7 aa, synthetic construct
NVRVKDD

SEQ ID NO: 37221 - protein, 7 aa, synthetic construct
PWPEKRE

SEQ ID NO: 37222 - protein, 7 aa, synthetic construct
GKVNQGG

SEQ ID NO: 37223 - protein, 7 aa, synthetic construct
KPTDNRP

SEQ ID NO: 37224 - protein, 7 aa, synthetic construct
GKPPSGG

SEQ ID NO: 37225 - protein, 7 aa, synthetic construct
SKSFTQG

SEQ ID NO: 37226 - protein, 7 aa, synthetic construct
GRESYRD

SEQ ID NO: 37227 - protein, 7 aa, synthetic construct
KPQQQKV

SEQ ID NO: 37228 - protein, 7 aa, synthetic construct
KGIQGLS

SEQ ID NO: 37229 - protein, 7 aa, synthetic construct
KTMGGVS

SEQ ID NO: 37230 - protein, 7 aa, synthetic construct
YQAKGSA

SEQ ID NO: 37231 - protein, 7 aa, synthetic construct
GTYPTPV

SEQ ID NO: 37232 - protein, 7 aa, synthetic construct
YGQGRTQ

SEQ ID NO: 37233 - protein, 7 aa, synthetic construct
KYTSQQG

SEQ ID NO: 37234 - protein, 7 aa, synthetic construct
NKQNVSG

SEQ ID NO: 37235 - protein, 7 aa, synthetic construct
WGIIAKN

SEQ ID NO: 37236 - protein, 7 aa, synthetic construct
TAHTKYN

SEQ ID NO: 37237 - protein, 7 aa, synthetic construct
TRGANNV

SEQ ID NO: 37238 - protein, 7 aa, synthetic construct
ITPGPRA

SEQ ID NO: 37239 - protein, 7 aa, synthetic construct
VPQTKQG

SEQ ID NO: 37240 - protein, 7 aa, synthetic construct
MRSPTGA

SEQ ID NO: 37241 - protein, 7 aa, synthetic construct
AHKQGPI

SEQ ID NO: 37242 - protein, 7 aa, synthetic construct
RNSNGTG

SEQ ID NO: 37243 - protein, 7 aa, synthetic construct
RVSNVSA

SEQ ID NO: 37244 - protein, 7 aa, synthetic construct
SMIGSQP

SEQ ID NO: 37245 - protein, 7 aa, synthetic construct
GNQGKFL

SEQ ID NO: 37246 - protein, 7 aa, synthetic construct
NHNHGIA

SEQ ID NO: 37247 - protein, 7 aa, synthetic construct
PYKAVHV

SEQ ID NO: 37248 - protein, 7 aa, synthetic construct
QHNQMAG

SEQ ID NO: 37249 - protein, 7 aa, synthetic construct
ISHNGKA

SEQ ID NO: 37250 - protein, 7 aa, synthetic construct
RTNAATP

SEQ ID NO: 37251 - protein, 7 aa, synthetic construct
ERGYAED

SEQ ID NO: 37252 - protein, 7 aa, synthetic construct
HRDAAKN

SEQ ID NO: 37253 - protein, 7 aa, synthetic construct
QRMPGPH

SEQ ID NO: 37254 - protein, 7 aa, synthetic construct
IKYKEEV

SEQ ID NO: 37255 - protein, 7 aa, synthetic construct
TMSRTKD

SEQ ID NO: 37256 - protein, 7 aa, synthetic construct
TQRTVAG

SEQ ID NO: 37257 - protein, 7 aa, synthetic construct
ANGKTSV

SEQ ID NO: 37258 - protein, 7 aa, synthetic construct
NPMTHGA

SEQ ID NO: 37259 - protein, 7 aa, synthetic construct
GNHAQPV

SEQ ID NO: 37260 - protein, 7 aa, synthetic construct
GKGTFSA

SEQ ID NO: 37261 - protein, 7 aa, synthetic construct
QQKTSHA

SEQ ID NO: 37262 - protein, 7 aa, synthetic construct
HTITKNA

SEQ ID NO: 37263 - protein, 7 aa, synthetic construct
TRSNSTG

SEQ ID NO: 37264 - protein, 7 aa, synthetic construct
KNSNYGG

SEQ ID NO: 37265 - protein, 7 aa, synthetic construct
TGAGKMG

SEQ ID NO: 37266 - protein, 7 aa, synthetic construct
EGKGAMF

SEQ ID NO: 37267 - protein, 7 aa, synthetic construct
TKQHNHM

SEQ ID NO: 37268 - protein, 7 aa, synthetic construct
MNKKPEY

SEQ ID NO: 37269 - protein, 7 aa, synthetic construct
KTVTAGG

SEQ ID NO: 37270 - protein, 7 aa, synthetic construct
MGMSAKP

SEQ ID NO: 37271 - protein, 7 aa, synthetic construct
VAVGHRE

SEQ ID NO: 37272 - protein, 7 aa, synthetic construct
GNAHGNA

SEQ ID NO: 37273 - protein, 7 aa, synthetic construct
TMSSGKG

SEQ ID NO: 37274 - protein, 7 aa, synthetic construct
GGYSGRE

SEQ ID NO: 37275 - protein, 7 aa, synthetic construct
EAIRNHG

SEQ ID NO: 37276 - protein, 7 aa, synthetic construct
KTGTGKE

SEQ ID NO: 37277 - protein, 7 aa, synthetic construct
QPVNKFA

SEQ ID NO: 37278 - protein, 7 aa, synthetic construct
QPKTGYG

SEQ ID NO: 37279 - protein, 7 aa, synthetic construct
IKMKYSE

SEQ ID NO: 37280 - protein, 7 aa, synthetic construct
YAEHNKG

SEQ ID NO: 37281 - protein, 7 aa, synthetic construct
APNSIRG

SEQ ID NO: 37282 - protein, 7 aa, synthetic construct
MPPWQKD

SEQ ID NO: 37283 - protein, 7 aa, synthetic construct
TSQVNRG

SEQ ID NO: 37284 - protein, 7 aa, synthetic construct
YQKTSSY

SEQ ID NO: 37285 - protein, 7 aa, synthetic construct
MKPSGNG

SEQ ID NO: 37286 - protein, 7 aa, synthetic construct
KVPNSQA

SEQ ID NO: 37287 - protein, 7 aa, synthetic construct
KYKEVNG

SEQ ID NO: 37288 - protein, 7 aa, synthetic construct
KNGQSTS

SEQ ID NO: 37289 - protein, 7 aa, synthetic construct
MKLGNME

SEQ ID NO: 37290 - protein, 7 aa, synthetic construct
IWKQEQK

SEQ ID NO: 37291 - protein, 7 aa, synthetic construct
FGKNPLE

SEQ ID NO: 37292 - protein, 7 aa, synthetic construct
WKTHTQM

SEQ ID NO: 37293 - protein, 7 aa, synthetic construct
TSSTKGG

SEQ ID NO: 37294 - protein, 7 aa, synthetic construct
VDKVRGV

SEQ ID NO: 37295 - protein, 7 aa, synthetic construct
QHYKQVE

SEQ ID NO: 37296 - protein, 7 aa, synthetic construct
YMKGQSP

SEQ ID NO: 37297 - protein, 7 aa, synthetic construct
MKPHLMP

SEQ ID NO: 37298 - protein, 7 aa, synthetic construct
HNKVDYL

SEQ ID NO: 37299 - protein, 7 aa, synthetic construct
FETPRGT

SEQ ID NO: 37300 - protein, 7 aa, synthetic construct
FHPRGVG

SEQ ID NO: 37301 - protein, 7 aa, synthetic construct
TPHLKEY

SEQ ID NO: 37302 - protein, 7 aa, synthetic construct
QKTSSGM

SEQ ID NO: 37303 - protein, 7 aa, synthetic construct
NSNKPNS

SEQ ID NO: 37304 - protein, 7 aa, synthetic construct
KSNVGAA

SEQ ID NO: 37305 - protein, 7 aa, synthetic construct
SVMKTGG

SEQ ID NO: 37306 - protein, 7 aa, synthetic construct
MAGILQA

SEQ ID NO: 37307 - protein, 7 aa, synthetic construct
LKDTTRG

SEQ ID NO: 37308 - protein, 7 aa, synthetic construct
QKSGNQG

SEQ ID NO: 37309 - protein, 7 aa, synthetic construct
SWHGMEI

SEQ ID NO: 37310 - protein, 7 aa, synthetic construct
NKPTVQA

SEQ ID NO: 37311 - protein, 7 aa, synthetic construct
GTWKQTE

SEQ ID NO: 37312 - protein, 7 aa, synthetic construct
WGKTRDD

SEQ ID NO: 37313 - protein, 7 aa, synthetic construct
GPRQGVG

SEQ ID NO: 37314 - protein, 7 aa, synthetic construct
TSEDRKR

SEQ ID NO: 37315 - protein, 7 aa, synthetic construct
YKGSLPP

SEQ ID NO: 37316 - protein, 7 aa, synthetic construct
TQRSKDP

SEQ ID NO: 37317 - protein, 7 aa, synthetic construct
SKMTMKE

SEQ ID NO: 37318 - protein, 7 aa, synthetic construct
SNRQLTA

SEQ ID NO: 37319 - protein, 7 aa, synthetic construct
APKKEYS

SEQ ID NO: 37320 - protein, 7 aa, synthetic construct
WKTGTPT

SEQ ID NO: 37321 - protein, 7 aa, synthetic construct
TRVNTQA

SEQ ID NO: 37322 - protein, 7 aa, synthetic construct
QPKYQGG

SEQ ID NO: 37323 - protein, 7 aa, synthetic construct
QPTGRTP

SEQ ID NO: 37324 - protein, 7 aa, synthetic construct
NHIVIHG

SEQ ID NO: 37325 - protein, 7 aa, synthetic construct
AMPYQTE

SEQ ID NO: 37326 - protein, 7 aa, synthetic construct
RPTNGAN

SEQ ID NO: 37327 - protein, 7 aa, synthetic construct
WANKSVA

SEQ ID NO: 37328 - protein, 7 aa, synthetic construct
WQNGYSN

SEQ ID NO: 37329 - protein, 7 aa, synthetic construct
LHQHLKS

SEQ ID NO: 37330 - protein, 7 aa, synthetic construct
QAEKNPY

SEQ ID NO: 37331 - protein, 7 aa, synthetic construct
NDKKGGM

SEQ ID NO: 37332 - protein, 7 aa, synthetic construct
HIKAVAQ

SEQ ID NO: 37333 - protein, 7 aa, synthetic construct
KNPSTMS

SEQ ID NO: 37334 - protein, 7 aa, synthetic construct
VEGRSSQ

SEQ ID NO: 37335 - protein, 7 aa, synthetic construct
SDNSHKG

SEQ ID NO: 37336 - protein, 7 aa, synthetic construct
MGHDVLS

SEQ ID NO: 37337 - protein, 7 aa, synthetic construct
PNRNAGA

SEQ ID NO: 37338 - protein, 7 aa, synthetic construct
FNKHEQY

SEQ ID NO: 37339 - protein, 7 aa, synthetic construct
TGAGRTA

SEQ ID NO: 37340 - protein, 7 aa, synthetic construct
IGQWPQG

SEQ ID NO: 37341 - protein, 7 aa, synthetic construct
NPTSHER

SEQ ID NO: 37342 - protein, 7 aa, synthetic construct
KGIQQQT

SEQ ID NO: 37343 - protein, 7 aa, synthetic construct
RQEITKG

SEQ ID NO: 37344 - protein, 7 aa, synthetic construct
FSGAKSG

SEQ ID NO: 37345 - protein, 7 aa, synthetic construct
HMREKSA

SEQ ID NO: 37346 - protein, 7 aa, synthetic construct
RKSMNGE

SEQ ID NO: 37347 - protein, 7 aa, synthetic construct
NHKPMIS

SEQ ID NO: 37348 - protein, 7 aa, synthetic construct
IGYPMGG

SEQ ID NO: 37349 - protein, 7 aa, synthetic construct
YMNGIVN

SEQ ID NO: 37350 - protein, 7 aa, synthetic construct
PNKGAGA

SEQ ID NO: 37351 - protein, 7 aa, synthetic construct
YRRDDRD

SEQ ID NO: 37352 - protein, 7 aa, synthetic construct
AHARSDP

SEQ ID NO: 37353 - protein, 7 aa, synthetic construct
RSSTSMP

SEQ ID NO: 37354 - protein, 7 aa, synthetic construct
SSAYKGE

SEQ ID NO: 37355 - protein, 7 aa, synthetic construct
QSQKPGA

SEQ ID NO: 37356 - protein, 7 aa, synthetic construct
FKAPQKD

SEQ ID NO: 37357 - protein, 7 aa, synthetic construct
QRRDPDS

SEQ ID NO: 37358 - protein, 7 aa, synthetic construct
VPMANSP

SEQ ID NO: 37359 - protein, 7 aa, synthetic construct
GQKQVSG

SEQ ID NO: 37360 - protein, 7 aa, synthetic construct
DSRISYA

SEQ ID NO: 37361 - protein, 7 aa, synthetic construct
LVSGSSL

SEQ ID NO: 37362 - protein, 7 aa, synthetic construct
KYGKEFI

SEQ ID NO: 37363 - protein, 7 aa, synthetic construct
VNDRTRI

SEQ ID NO: 37364 - protein, 7 aa, synthetic construct
RNKHESG

SEQ ID NO: 37365 - protein, 7 aa, synthetic construct
KQTSTTA

SEQ ID NO: 37366 - protein, 7 aa, synthetic construct
HKSMTTD

SEQ ID NO: 37367 - protein, 7 aa, synthetic construct
NQARTAP

SEQ ID NO: 37368 - protein, 7 aa, synthetic construct
QSKLGQG

SEQ ID NO: 37369 - protein, 7 aa, synthetic construct
SFPKNEA

SEQ ID NO: 37370 - protein, 7 aa, synthetic construct
NMKASKD

SEQ ID NO: 37371 - protein, 7 aa, synthetic construct
RSNVPFN

SEQ ID NO: 37372 - protein, 7 aa, synthetic construct
LMDRMRS

SEQ ID NO: 37373 - protein, 7 aa, synthetic construct
VHSSIKG

SEQ ID NO: 37374 - protein, 7 aa, synthetic construct
LEKGRPY

SEQ ID NO: 37375 - protein, 7 aa, synthetic construct
TRTNANP

SEQ ID NO: 37376 - protein, 7 aa, synthetic construct
RRDLNTV

SEQ ID NO: 37377 - protein, 7 aa, synthetic construct
QARGFGP

SEQ ID NO: 37378 - protein, 7 aa, synthetic construct
VRAQGVP

SEQ ID NO: 37379 - protein, 7 aa, synthetic construct
VARAGAP

SEQ ID NO: 37380 - protein, 7 aa, synthetic construct
VYDRGKN

SEQ ID NO: 37381 - protein, 7 aa, synthetic construct
FSKTMTS

SEQ ID NO: 37382 - protein, 7 aa, synthetic construct
AGYNTKP

SEQ ID NO: 37383 - protein, 7 aa, synthetic construct
YGRIDVG

SEQ ID NO: 37384 - protein, 7 aa, synthetic construct
LPMRADA

SEQ ID NO: 37385 - protein, 7 aa, synthetic construct
RYANVPV

SEQ ID NO: 37386 - protein, 7 aa, synthetic construct
ISERLYG

SEQ ID NO: 37387 - protein, 7 aa, synthetic construct
LPQRGHT

SEQ ID NO: 37388 - protein, 7 aa, synthetic construct
AYKTSTS

SEQ ID NO: 37389 - protein, 7 aa, synthetic construct
HSRGIDM

SEQ ID NO: 37390 - protein, 7 aa, synthetic construct
YFDQIVS

SEQ ID NO: 37391 - protein, 7 aa, synthetic construct
FKSPNKE

SEQ ID NO: 37392 - protein, 7 aa, synthetic construct
STRDGKY

SEQ ID NO: 37393 - protein, 7 aa, synthetic construct
MKNGKME

SEQ ID NO: 37394 - protein, 7 aa, synthetic construct
KGMHGIA

SEQ ID NO: 37395 - protein, 7 aa, synthetic construct
NEKWVKE

SEQ ID NO: 37396 - protein, 7 aa, synthetic construct
LPAGQAP

SEQ ID NO: 37397 - protein, 7 aa, synthetic construct
IGKTAGN

SEQ ID NO: 37398 - protein, 7 aa, synthetic construct
HKANTYA

SEQ ID NO: 37399 - protein, 7 aa, synthetic construct
SRDIVHN

SEQ ID NO: 37400 - protein, 7 aa, synthetic construct
FDKSRVG

SEQ ID NO: 37401 - protein, 7 aa, synthetic construct
KSNSVAT

SEQ ID NO: 37402 - protein, 7 aa, synthetic construct
TYNKGTG

SEQ ID NO: 37403 - protein, 7 aa, synthetic construct
MGAGRNG

SEQ ID NO: 37404 - protein, 7 aa, synthetic construct
HFSNGRT

SEQ ID NO: 37405 - protein, 7 aa, synthetic construct
QLKVLQA

SEQ ID NO: 37406 - protein, 7 aa, synthetic construct
SATGNVR

SEQ ID NO: 37407 - protein, 7 aa, synthetic construct
FPRDTTS

SEQ ID NO: 37408 - protein, 7 aa, synthetic construct
RATSGMA

SEQ ID NO: 37409 - protein, 7 aa, synthetic construct
QRQPPNV

SEQ ID NO: 37410 - protein, 7 aa, synthetic construct
PKRLDLM

SEQ ID NO: 37411 - protein, 7 aa, synthetic construct
TRGSEQY

SEQ ID NO: 37412 - protein, 7 aa, synthetic construct
KSNMATG

SEQ ID NO: 37413 - protein, 7 aa, synthetic construct
DLHKVHT

SEQ ID NO: 37414 - protein, 7 aa, synthetic construct
MTSGTKG

SEQ ID NO: 37415 - protein, 7 aa, synthetic construct
NPNGGKG

SEQ ID NO: 37416 - protein, 7 aa, synthetic construct
RTNGQNG

SEQ ID NO: 37417 - protein, 7 aa, synthetic construct
DGTRRMA

SEQ ID NO: 37418 - protein, 7 aa, synthetic construct
TDIKART

SEQ ID NO: 37419 - protein, 7 aa, synthetic construct
FKGSLSL

SEQ ID NO: 37420 - protein, 7 aa, synthetic construct
ALGVAAA

SEQ ID NO: 37421 - protein, 7 aa, synthetic construct
SGKAMTG

SEQ ID NO: 37422 - protein, 7 aa, synthetic construct
KTMTQGM

SEQ ID NO: 37423 - protein, 7 aa, synthetic construct
VKNASMA

SEQ ID NO: 37424 - protein, 7 aa, synthetic construct
TKTGSTI

SEQ ID NO: 37425 - protein, 7 aa, synthetic construct
YSPNAKP

SEQ ID NO: 37426 - protein, 7 aa, synthetic construct
VSKGPWS

SEQ ID NO: 37427 - protein, 7 aa, synthetic construct
TSPNRHA

SEQ ID NO: 37428 - protein, 7 aa, synthetic construct
IDDKRKG

SEQ ID NO: 37429 - protein, 7 aa, synthetic construct
QLKPHQE

SEQ ID NO: 37430 - protein, 7 aa, synthetic construct
HQGGQTS

SEQ ID NO: 37431 - protein, 7 aa, synthetic construct
TKTYPME

SEQ ID NO: 37432 - protein, 7 aa, synthetic construct
HRGLMPQ

SEQ ID NO: 37433 - protein, 7 aa, synthetic construct
IAMGRVS

SEQ ID NO: 37434 - protein, 7 aa, synthetic construct
RVQQGGL

SEQ ID NO: 37435 - protein, 7 aa, synthetic construct
ITTKSML

SEQ ID NO: 37436 - protein, 7 aa, synthetic construct
GHKWVKE

SEQ ID NO: 37437 - protein, 7 aa, synthetic construct
RNAMTEG

SEQ ID NO: 37438 - protein, 7 aa, synthetic construct
KSIHVDV

SEQ ID NO: 37439 - protein, 7 aa, synthetic construct
GLGPYKV

SEQ ID NO: 37440 - protein, 7 aa, synthetic construct
EARGIRD

SEQ ID NO: 37441 - protein, 7 aa, synthetic construct
IPRDGMV

SEQ ID NO: 37442 - protein, 7 aa, synthetic construct
GGNNKFA

SEQ ID NO: 37443 - protein, 7 aa, synthetic construct
IGNWVNE

SEQ ID NO: 37444 - protein, 7 aa, synthetic construct
RGKKDED

SEQ ID NO: 37445 - protein, 7 aa, synthetic construct
AWKDYPP

SEQ ID NO: 37446 - protein, 7 aa, synthetic construct
GQHYRME

SEQ ID NO: 37447 - protein, 7 aa, synthetic construct
TKGSSQT

SEQ ID NO: 37448 - protein, 7 aa, synthetic construct
HKPQYAS

SEQ ID NO: 37449 - protein, 7 aa, synthetic construct
TGGIAKQ

SEQ ID NO: 37450 - protein, 7 aa, synthetic construct
KPTPSAS

SEQ ID NO: 37451 - protein, 7 aa, synthetic construct
RQTSMSP

SEQ ID NO: 37452 - protein, 7 aa, synthetic construct
FRNMSVE

SEQ ID NO: 37453 - protein, 7 aa, synthetic construct
PSRGYME

SEQ ID NO: 37454 - protein, 7 aa, synthetic construct
NGNFRAP

SEQ ID NO: 37455 - protein, 7 aa, synthetic construct
FQKGSAY

SEQ ID NO: 37456 - protein, 7 aa, synthetic construct
RAASQNM

SEQ ID NO: 37457 - protein, 7 aa, synthetic construct
YKQGDKT

SEQ ID NO: 37458 - protein, 7 aa, synthetic construct
AKSYAKD

SEQ ID NO: 37459 - protein, 7 aa, synthetic construct
NKPHVGN

SEQ ID NO: 37460 - protein, 7 aa, synthetic construct
AARIAHS

SEQ ID NO: 37461 - protein, 7 aa, synthetic construct
KNHQSIS

SEQ ID NO: 37462 - protein, 7 aa, synthetic construct
KMSQPDL

SEQ ID NO: 37463 - protein, 7 aa, synthetic construct
FQKAASG

SEQ ID NO: 37464 - protein, 7 aa, synthetic construct
VFQKAVD

SEQ ID NO: 37465 - protein, 7 aa, synthetic construct
RSVHMHG

SEQ ID NO: 37466 - protein, 7 aa, synthetic construct
KQISNRE

SEQ ID NO: 37467 - protein, 7 aa, synthetic construct
AFGARGG

SEQ ID NO: 37468 - protein, 7 aa, synthetic construct
HSHMQKG

SEQ ID NO: 37469 - protein, 7 aa, synthetic construct
THPIEFS

SEQ ID NO: 37470 - protein, 7 aa, synthetic construct
LGGRVDH

SEQ ID NO: 37471 - protein, 7 aa, synthetic construct
GGKSTSS

SEQ ID NO: 37472 - protein, 7 aa, synthetic construct
INKEYLR

SEQ ID NO: 37473 - protein, 7 aa, synthetic construct
QRQGGSA

SEQ ID NO: 37474 - protein, 7 aa, synthetic construct
SKMNNTM

SEQ ID NO: 37475 - protein, 7 aa, synthetic construct
MYSRQGG

SEQ ID NO: 37476 - protein, 7 aa, synthetic construct
RKIEISN

SEQ ID NO: 37477 - protein, 7 aa, synthetic construct
TRPGTGN

SEQ ID NO: 37478 - protein, 7 aa, synthetic construct
PDNTKTV

SEQ ID NO: 37479 - protein, 7 aa, synthetic construct
LQPNHGG

SEQ ID NO: 37480 - protein, 7 aa, synthetic construct
RTQKDWG

SEQ ID NO: 37481 - protein, 7 aa, synthetic construct
RYHADGA

SEQ ID NO: 37482 - protein, 7 aa, synthetic construct
NKAQNAG

SEQ ID NO: 37483 - protein, 7 aa, synthetic construct
RNTTGAP

SEQ ID NO: 37484 - protein, 7 aa, synthetic construct
LHMKTLD

SEQ ID NO: 37485 - protein, 7 aa, synthetic construct
SHPPYNK

SEQ ID NO: 37486 - protein, 7 aa, synthetic construct
PEYPAKG

SEQ ID NO: 37487 - protein, 7 aa, synthetic construct
TQKQSWN

SEQ ID NO: 37488 - protein, 7 aa, synthetic construct
SSAKSSA

SEQ ID NO: 37489 - protein, 7 aa, synthetic construct
LNPIATN

SEQ ID NO: 37490 - protein, 7 aa, synthetic construct
RSAGQQS

SEQ ID NO: 37491 - protein, 7 aa, synthetic construct
SNHLSKN

SEQ ID NO: 37492 - protein, 7 aa, synthetic construct
LGHPNKN

SEQ ID NO: 37493 - protein, 7 aa, synthetic construct
RTGNNTP

SEQ ID NO: 37494 - protein, 7 aa, synthetic construct
MRGNASP

SEQ ID NO: 37495 - protein, 7 aa, synthetic construct
DHYKRDM

SEQ ID NO: 37496 - protein, 7 aa, synthetic construct
QSQSIPA

SEQ ID NO: 37497 - protein, 7 aa, synthetic construct
KQSVSHV

SEQ ID NO: 37498 - protein, 7 aa, synthetic construct
GTIHSER

SEQ ID NO: 37499 - protein, 7 aa, synthetic construct
MFRERQA

SEQ ID NO: 37500 - protein, 7 aa, synthetic construct
VSGKAFT

SEQ ID NO: 37501 - protein, 7 aa, synthetic construct
KPNQGGA

SEQ ID NO: 37502 - protein, 7 aa, synthetic construct
GKGTNSG

SEQ ID NO: 37503 - protein, 7 aa, synthetic construct
YKTQGQS

SEQ ID NO: 37504 - protein, 7 aa, synthetic construct
QKSHMLA

SEQ ID NO: 37505 - protein, 7 aa, synthetic construct
KSGHPRD

SEQ ID NO: 37506 - protein, 7 aa, synthetic construct
FLPHHRA

SEQ ID NO: 37507 - protein, 7 aa, synthetic construct
DRKAVGV

SEQ ID NO: 37508 - protein, 7 aa, synthetic construct
IKQGIGS

SEQ ID NO: 37509 - protein, 7 aa, synthetic construct
GTNGKNS

SEQ ID NO: 37510 - protein, 7 aa, synthetic construct
QMKNVAG

SEQ ID NO: 37511 - protein, 7 aa, synthetic construct
AKNFNGP

SEQ ID NO: 37512 - protein, 7 aa, synthetic construct
RFKDHSG

SEQ ID NO: 37513 - protein, 7 aa, synthetic construct
NKGPMPN

SEQ ID NO: 37514 - protein, 7 aa, synthetic construct
GLSYIRE

SEQ ID NO: 37515 - protein, 7 aa, synthetic construct
SGYKNFD

SEQ ID NO: 37516 - protein, 7 aa, synthetic construct
FRPHHGD

SEQ ID NO: 37517 - protein, 7 aa, synthetic construct
MKGASKE

SEQ ID NO: 37518 - protein, 7 aa, synthetic construct
TSKMSSA

SEQ ID NO: 37519 - protein, 7 aa, synthetic construct
DSTNTNS

SEQ ID NO: 37520 - protein, 7 aa, synthetic construct
NMQASPL

SEQ ID NO: 37521 - protein, 7 aa, synthetic construct
SNRMKPE

SEQ ID NO: 37522 - protein, 7 aa, synthetic construct
RTSNPQG

SEQ ID NO: 37523 - protein, 7 aa, synthetic construct
PPKTGRD

SEQ ID NO: 37524 - protein, 7 aa, synthetic construct
RSTGHDT

SEQ ID NO: 37525 - protein, 7 aa, synthetic construct
QATRNMT

SEQ ID NO: 37526 - protein, 7 aa, synthetic construct
KSKDSTG

SEQ ID NO: 37527 - protein, 7 aa, synthetic construct
KNAVSSA

SEQ ID NO: 37528 - protein, 7 aa, synthetic construct
DPLLRTG

SEQ ID NO: 37529 - protein, 7 aa, synthetic construct
MNHQGMG

SEQ ID NO: 37530 - protein, 7 aa, synthetic construct
SKYGTDG

SEQ ID NO: 37531 - protein, 7 aa, synthetic construct
AVKVQAG

SEQ ID NO: 37532 - protein, 7 aa, synthetic construct
GGVTGAH

SEQ ID NO: 37533 - protein, 7 aa, synthetic construct
TGRSFNE

SEQ ID NO: 37534 - protein, 7 aa, synthetic construct
LLKLKIP

SEQ ID NO: 37535 - protein, 7 aa, synthetic construct
GWKKALD

SEQ ID NO: 37536 - protein, 7 aa, synthetic construct
YIQNKHG

SEQ ID NO: 37537 - protein, 7 aa, synthetic construct
VRAGAGV

SEQ ID NO: 37538 - protein, 7 aa, synthetic construct
STGKNAG

SEQ ID NO: 37539 - protein, 7 aa, synthetic construct
KQLSKTD

SEQ ID NO: 37540 - protein, 7 aa, synthetic construct
TIKKADV

SEQ ID NO: 37541 - protein, 7 aa, synthetic construct
YQHKKDD

SEQ ID NO: 37542 - protein, 7 aa, synthetic construct
KTGTSMA

SEQ ID NO: 37543 - protein, 7 aa, synthetic construct
GKMGLTI

SEQ ID NO: 37544 - protein, 7 aa, synthetic construct
TIPREII

SEQ ID NO: 37545 - protein, 7 aa, synthetic construct
FYKNQQE

SEQ ID NO: 37546 - protein, 7 aa, synthetic construct
ITHAEMI

SEQ ID NO: 37547 - protein, 7 aa, synthetic construct
KNTQSNT

SEQ ID NO: 37548 - protein, 7 aa, synthetic construct
TSASGKT

SEQ ID NO: 37549 - protein, 7 aa, synthetic construct
RMQMTGA

SEQ ID NO: 37550 - protein, 7 aa, synthetic construct
ANGMAKD

SEQ ID NO: 37551 - protein, 7 aa, synthetic construct
SLRSTEI

SEQ ID NO: 37552 - protein, 7 aa, synthetic construct
MSAAITP

SEQ ID NO: 37553 - protein, 7 aa, synthetic construct
SQVKSGS

SEQ ID NO: 37554 - protein, 7 aa, synthetic construct
DISKLSI

SEQ ID NO: 37555 - protein, 7 aa, synthetic construct
AGGVKPG

SEQ ID NO: 37556 - protein, 7 aa, synthetic construct
PKYGSQD

SEQ ID NO: 37557 - protein, 7 aa, synthetic construct
INGRMGG

SEQ ID NO: 37558 - protein, 7 aa, synthetic construct
RNSNGMG

SEQ ID NO: 37559 - protein, 7 aa, synthetic construct
MGHGSAY

SEQ ID NO: 37560 - protein, 7 aa, synthetic construct
KLVGSKE

SEQ ID NO: 37561 - protein, 7 aa, synthetic construct
YMKNHGA

SEQ ID NO: 37562 - protein, 7 aa, synthetic construct
FKGSANG

SEQ ID NO: 37563 - protein, 7 aa, synthetic construct
GGATRLY

SEQ ID NO: 37564 - protein, 7 aa, synthetic construct
KTQQMSA

SEQ ID NO: 37565 - protein, 7 aa, synthetic construct
SKVQVSN

SEQ ID NO: 37566 - protein, 7 aa, synthetic construct
NKGPSGI

SEQ ID NO: 37567 - protein, 7 aa, synthetic construct
LQQKLRE

SEQ ID NO: 37568 - protein, 7 aa, synthetic construct
RSPVATG

SEQ ID NO: 37569 - protein, 7 aa, synthetic construct
HHKDSAI

SEQ ID NO: 37570 - protein, 7 aa, synthetic construct
TLERGMP

SEQ ID NO: 37571 - protein, 7 aa, synthetic construct
MGRIQVN

SEQ ID NO: 37572 - protein, 7 aa, synthetic construct
PNEPRRQ

SEQ ID NO: 37573 - protein, 7 aa, synthetic construct
INGRVGG

SEQ ID NO: 37574 - protein, 7 aa, synthetic construct
HRERLTG

SEQ ID NO: 37575 - protein, 7 aa, synthetic construct
DNVVRAH

SEQ ID NO: 37576 - protein, 7 aa, synthetic construct
NRSAMQA

SEQ ID NO: 37577 - protein, 7 aa, synthetic construct
FGSSYTV

SEQ ID NO: 37578 - protein, 7 aa, synthetic construct
AMHKHTG

SEQ ID NO: 37579 - protein, 7 aa, synthetic construct
KGIVGFE

SEQ ID NO: 37580 - protein, 7 aa, synthetic construct
NPGTSAP

SEQ ID NO: 37581 - protein, 7 aa, synthetic construct
VGTNKTG

SEQ ID NO: 37582 - protein, 7 aa, synthetic construct
SKNVNQS

SEQ ID NO: 37583 - protein, 7 aa, synthetic construct
FGGPNIR

SEQ ID NO: 37584 - protein, 7 aa, synthetic construct
SEKHMRF

SEQ ID NO: 37585 - protein, 7 aa, synthetic construct
DIRVSQG

SEQ ID NO: 37586 - protein, 7 aa, synthetic construct
KQNGVSG

SEQ ID NO: 37587 - protein, 7 aa, synthetic construct
RSKDGIW

SEQ ID NO: 37588 - protein, 7 aa, synthetic construct
TRQAIQG

SEQ ID NO: 37589 - protein, 7 aa, synthetic construct
VGQKSMG

SEQ ID NO: 37590 - protein, 7 aa, synthetic construct
SDHGGRM

SEQ ID NO: 37591 - protein, 7 aa, synthetic construct
GVGTYSM

SEQ ID NO: 37592 - protein, 7 aa, synthetic construct
QQSRSVP

SEQ ID NO: 37593 - protein, 7 aa, synthetic construct
RQNAHQD

SEQ ID NO: 37594 - protein, 7 aa, synthetic construct
RQSPVIG

SEQ ID NO: 37595 - protein, 7 aa, synthetic construct
IKATVAS

SEQ ID NO: 37596 - protein, 7 aa, synthetic construct
AGIQKIP

SEQ ID NO: 37597 - protein, 7 aa, synthetic construct
GTKSNAP

SEQ ID NO: 37598 - protein, 7 aa, synthetic construct
QQRGVNG

SEQ ID NO: 37599 - protein, 7 aa, synthetic construct
WKHSDPQ

SEQ ID NO: 37600 - protein, 7 aa, synthetic construct
FKPSTSS

SEQ ID NO: 37601 - protein, 7 aa, synthetic construct
YQAKNNS

SEQ ID NO: 37602 - protein, 7 aa, synthetic construct
VETWKTP

SEQ ID NO: 37603 - protein, 7 aa, synthetic construct
TMKAPRE

SEQ ID NO: 37604 - protein, 7 aa, synthetic construct
KSNSSMM

SEQ ID NO: 37605 - protein, 7 aa, synthetic construct
TKHVDGV

SEQ ID NO: 37606 - protein, 7 aa, synthetic construct
GWGVHQA

SEQ ID NO: 37607 - protein, 7 aa, synthetic construct
NTTGRTA

SEQ ID NO: 37608 - protein, 7 aa, synthetic construct
MSSTRAA

SEQ ID NO: 37609 - protein, 7 aa, synthetic construct
TANHHQF

SEQ ID NO: 37610 - protein, 7 aa, synthetic construct
YKSGPGG

SEQ ID NO: 37611 - protein, 7 aa, synthetic construct
SKNNPGG

SEQ ID NO: 37612 - protein, 7 aa, synthetic construct
GPNYKQE

SEQ ID NO: 37613 - protein, 7 aa, synthetic construct
LSAQKTQ

SEQ ID NO: 37614 - protein, 7 aa, synthetic construct
EQRVAPG

SEQ ID NO: 37615 - protein, 7 aa, synthetic construct
LRGEMSP

SEQ ID NO: 37616 - protein, 7 aa, synthetic construct
DKKGANP

SEQ ID NO: 37617 - protein, 7 aa, synthetic construct
KQQILGG

SEQ ID NO: 37618 - protein, 7 aa, synthetic construct
QGPQFHS

SEQ ID NO: 37619 - protein, 7 aa, synthetic construct
IARANSV

SEQ ID NO: 37620 - protein, 7 aa, synthetic construct
PMHRSSD

SEQ ID NO: 37621 - protein, 7 aa, synthetic construct
DYRNTIS

SEQ ID NO: 37622 - protein, 7 aa, synthetic construct
GKMQSAA

SEQ ID NO: 37623 - protein, 7 aa, synthetic construct
HRPTNME

SEQ ID NO: 37624 - protein, 7 aa, synthetic construct
QSKSLVA

SEQ ID NO: 37625 - protein, 7 aa, synthetic construct
NMKTSPS

SEQ ID NO: 37626 - protein, 7 aa, synthetic construct
YTASNQK

SEQ ID NO: 37627 - protein, 7 aa, synthetic construct
YGTKHIM

SEQ ID NO: 37628 - protein, 7 aa, synthetic construct
GHAITQG

SEQ ID NO: 37629 - protein, 7 aa, synthetic construct
FFRDGPS

SEQ ID NO: 37630 - protein, 7 aa, synthetic construct
KLPYYQE

SEQ ID NO: 37631 - protein, 7 aa, synthetic construct
ARRDMVS

SEQ ID NO: 37632 - protein, 7 aa, synthetic construct
NNAQPIA

SEQ ID NO: 37633 - protein, 7 aa, synthetic construct
GARPKDG

SEQ ID NO: 37634 - protein, 7 aa, synthetic construct
INTRLTG

SEQ ID NO: 37635 - protein, 7 aa, synthetic construct
KVGAQMG

SEQ ID NO: 37636 - protein, 7 aa, synthetic construct
NKPSSTM

SEQ ID NO: 37637 - protein, 7 aa, synthetic construct
TKPNQFA

SEQ ID NO: 37638 - protein, 7 aa, synthetic construct
RNNAIVG

SEQ ID NO: 37639 - protein, 7 aa, synthetic construct
KTQGMES

SEQ ID NO: 37640 - protein, 7 aa, synthetic construct
QKNGIQG

SEQ ID NO: 37641 - protein, 7 aa, synthetic construct
WVAGGPS

SEQ ID NO: 37642 - protein, 7 aa, synthetic construct
RNSAGTG

SEQ ID NO: 37643 - protein, 7 aa, synthetic construct
KNNNPTA

SEQ ID NO: 37644 - protein, 7 aa, synthetic construct
ALIHKAP

SEQ ID NO: 37645 - protein, 7 aa, synthetic construct
TRQPSNS

SEQ ID NO: 37646 - protein, 7 aa, synthetic construct
THKQIGP

SEQ ID NO: 37647 - protein, 7 aa, synthetic construct
DRGSTNR

SEQ ID NO: 37648 - protein, 7 aa, synthetic construct
SKNTTQT

SEQ ID NO: 37649 - protein, 7 aa, synthetic construct
NYVKNHP

SEQ ID NO: 37650 - protein, 7 aa, synthetic construct
NNNNREA

SEQ ID NO: 37651 - protein, 7 aa, synthetic construct
RIPKENW

SEQ ID NO: 37652 - protein, 7 aa, synthetic construct
RSQSFNG

SEQ ID NO: 37653 - protein, 7 aa, synthetic construct
TKSPGPY

SEQ ID NO: 37654 - protein, 7 aa, synthetic construct
TRNAGAA

SEQ ID NO: 37655 - protein, 7 aa, synthetic construct
RNQLGDS

SEQ ID NO: 37656 - protein, 7 aa, synthetic construct
RSERSGG

SEQ ID NO: 37657 - protein, 7 aa, synthetic construct
FTQKQGG

SEQ ID NO: 37658 - protein, 7 aa, synthetic construct
SLKSSNS

SEQ ID NO: 37659 - protein, 7 aa, synthetic construct
VQINQKV

SEQ ID NO: 37660 - protein, 7 aa, synthetic construct
PSRNHHD

SEQ ID NO: 37661 - protein, 7 aa, synthetic construct
AKDMKLD

SEQ ID NO: 37662 - protein, 7 aa, synthetic construct
LGVKGAH

SEQ ID NO: 37663 - protein, 7 aa, synthetic construct
QKTTHMG

SEQ ID NO: 37664 - protein, 7 aa, synthetic construct
PAKSAQA

SEQ ID NO: 37665 - protein, 7 aa, synthetic construct
NNGRNSI

SEQ ID NO: 37666 - protein, 7 aa, synthetic construct
RFDRMPE

SEQ ID NO: 37667 - protein, 7 aa, synthetic construct
STTPRMM

SEQ ID NO: 37668 - protein, 7 aa, synthetic construct
VQAGRAM

SEQ ID NO: 37669 - protein, 7 aa, synthetic construct
VTSRAAP

SEQ ID NO: 37670 - protein, 7 aa, synthetic construct
KYNSTSA

SEQ ID NO: 37671 - protein, 7 aa, synthetic construct
AEMVKHS

SEQ ID NO: 37672 - protein, 7 aa, synthetic construct
PRKDTVD

SEQ ID NO: 37673 - protein, 7 aa, synthetic construct
TKNVQLG

SEQ ID NO: 37674 - protein, 7 aa, synthetic construct
KNTNEVR

SEQ ID NO: 37675 - protein, 7 aa, synthetic construct
PKQSNAG

SEQ ID NO: 37676 - protein, 7 aa, synthetic construct
VDNLVRS

SEQ ID NO: 37677 - protein, 7 aa, synthetic construct
SSHRSHE

SEQ ID NO: 37678 - protein, 7 aa, synthetic construct
QKVGNNG

SEQ ID NO: 37679 - protein, 7 aa, synthetic construct
NRDTGKV

SEQ ID NO: 37680 - protein, 7 aa, synthetic construct
MIIGKQD

SEQ ID NO: 37681 - protein, 7 aa, synthetic construct
QAKIPSL

SEQ ID NO: 37682 - protein, 7 aa, synthetic construct
VKIAASN

SEQ ID NO: 37683 - protein, 7 aa, synthetic construct
GFKNQER

SEQ ID NO: 37684 - protein, 7 aa, synthetic construct
QQKGPNA

SEQ ID NO: 37685 - protein, 7 aa, synthetic construct
KSPTVGT

SEQ ID NO: 37686 - protein, 7 aa, synthetic construct
KSGGATV

SEQ ID NO: 37687 - protein, 7 aa, synthetic construct
GVSNKNV

SEQ ID NO: 37688 - protein, 7 aa, synthetic construct
LAGTATF

SEQ ID NO: 37689 - protein, 7 aa, synthetic construct
TGTFMKP

SEQ ID NO: 37690 - protein, 7 aa, synthetic construct
RIRGDEL

SEQ ID NO: 37691 - protein, 7 aa, synthetic construct
VKVNTSG

SEQ ID NO: 37692 - protein, 7 aa, synthetic construct
FHKSQAN

SEQ ID NO: 37693 - protein, 7 aa, synthetic construct
RKDAVID

SEQ ID NO: 37694 - protein, 7 aa, synthetic construct
FKDARAA

SEQ ID NO: 37695 - protein, 7 aa, synthetic construct
NDKSRVP

SEQ ID NO: 37696 - protein, 7 aa, synthetic construct
KTNNAMS

SEQ ID NO: 37697 - protein, 7 aa, synthetic construct
GDFHRNP

SEQ ID NO: 37698 - protein, 7 aa, synthetic construct
NKFVHAP

SEQ ID NO: 37699 - protein, 7 aa, synthetic construct
VNKQPQA

SEQ ID NO: 37700 - protein, 7 aa, synthetic construct
THGQKDY

SEQ ID NO: 37701 - protein, 7 aa, synthetic construct
TQRGNAG

SEQ ID NO: 37702 - protein, 7 aa, synthetic construct
NRSNSQP

SEQ ID NO: 37703 - protein, 7 aa, synthetic construct
IRRELPA

SEQ ID NO: 37704 - protein, 7 aa, synthetic construct
GPKPTAA

SEQ ID NO: 37705 - protein, 7 aa, synthetic construct
AQNSKPD

SEQ ID NO: 37706 - protein, 7 aa, synthetic construct
PRNATGT

SEQ ID NO: 37707 - protein, 7 aa, synthetic construct
KYTQSGA

SEQ ID NO: 37708 - protein, 7 aa, synthetic construct
GQEHRLA

SEQ ID NO: 37709 - protein, 7 aa, synthetic construct
INKVKDS

SEQ ID NO: 37710 - protein, 7 aa, synthetic construct
TYRIATA

SEQ ID NO: 37711 - protein, 7 aa, synthetic construct
SAGGVIV

SEQ ID NO: 37712 - protein, 7 aa, synthetic construct
TGTKGAS

SEQ ID NO: 37713 - protein, 7 aa, synthetic construct
QSAARSP

SEQ ID NO: 37714 - protein, 7 aa, synthetic construct
KMPTSNA

SEQ ID NO: 37715 - protein, 7 aa, synthetic construct
VNKWTME

SEQ ID NO: 37716 - protein, 7 aa, synthetic construct
KFNGAGG

SEQ ID NO: 37717 - protein, 7 aa, synthetic construct
NKGQVNG

SEQ ID NO: 37718 - protein, 7 aa, synthetic construct
NAIQGFG

SEQ ID NO: 37719 - protein, 7 aa, synthetic construct
SKNSQQP

SEQ ID NO: 37720 - protein, 7 aa, synthetic construct
QKMSTNG

SEQ ID NO: 37721 - protein, 7 aa, synthetic construct
DHRPKYP

SEQ ID NO: 37722 - protein, 7 aa, synthetic construct
YKNQQMI

SEQ ID NO: 37723 - protein, 7 aa, synthetic construct
GHHQMQS

SEQ ID NO: 37724 - protein, 7 aa, synthetic construct
RIPMKAD

SEQ ID NO: 37725 - protein, 7 aa, synthetic construct
QQSLANP

SEQ ID NO: 37726 - protein, 7 aa, synthetic construct
WNKQWTD

SEQ ID NO: 37727 - protein, 7 aa, synthetic construct
FNKPGNN

SEQ ID NO: 37728 - protein, 7 aa, synthetic construct
AFKHSSA

SEQ ID NO: 37729 - protein, 7 aa, synthetic construct
NLGHRYE

SEQ ID NO: 37730 - protein, 7 aa, synthetic construct
VDNKVRV

SEQ ID NO: 37731 - protein, 7 aa, synthetic construct
MKDWNVA

SEQ ID NO: 37732 - protein, 7 aa, synthetic construct
RMHQAGP

SEQ ID NO: 37733 - protein, 7 aa, synthetic construct
MQTGQNH

SEQ ID NO: 37734 - protein, 7 aa, synthetic construct
KQNSSMP

SEQ ID NO: 37735 - protein, 7 aa, synthetic construct
MQQAKVP

SEQ ID NO: 37736 - protein, 7 aa, synthetic construct
YDMTKKE

SEQ ID NO: 37737 - protein, 7 aa, synthetic construct
VPQQQHL

SEQ ID NO: 37738 - protein, 7 aa, synthetic construct
AFTRSDM

SEQ ID NO: 37739 - protein, 7 aa, synthetic construct
SKPNNTG

SEQ ID NO: 37740 - protein, 7 aa, synthetic construct
KGYPSGT

SEQ ID NO: 37741 - protein, 7 aa, synthetic construct
TGGNKMG

SEQ ID NO: 37742 - protein, 7 aa, synthetic construct
QKGNQYA

SEQ ID NO: 37743 - protein, 7 aa, synthetic construct
YANIMKT

SEQ ID NO: 37744 - protein, 7 aa, synthetic construct
IMNAIPG

SEQ ID NO: 37745 - protein, 7 aa, synthetic construct
HQKVQVG

SEQ ID NO: 37746 - protein, 7 aa, synthetic construct
VQKKHDA

SEQ ID NO: 37747 - protein, 7 aa, synthetic construct
LKTSMKD

SEQ ID NO: 37748 - protein, 7 aa, synthetic construct
NMTHTQA

SEQ ID NO: 37749 - protein, 7 aa, synthetic construct
KTQTPGQ

SEQ ID NO: 37750 - protein, 7 aa, synthetic construct
FNAQSKG

SEQ ID NO: 37751 - protein, 7 aa, synthetic construct
HTKTVTN

SEQ ID NO: 37752 - protein, 7 aa, synthetic construct
DKYNNAA

SEQ ID NO: 37753 - protein, 7 aa, synthetic construct
TIINGSR

SEQ ID NO: 37754 - protein, 7 aa, synthetic construct
KSPPSNG

SEQ ID NO: 37755 - protein, 7 aa, synthetic construct
NTGHQSG

SEQ ID NO: 37756 - protein, 7 aa, synthetic construct
SKPSHMG

SEQ ID NO: 37757 - protein, 7 aa, synthetic construct
LPGNTRQ

SEQ ID NO: 37758 - protein, 7 aa, synthetic construct
WGKSNEH

SEQ ID NO: 37759 - protein, 7 aa, synthetic construct
HKYNAEG

SEQ ID NO: 37760 - protein, 7 aa, synthetic construct
AQQRPTI

SEQ ID NO: 37761 - protein, 7 aa, synthetic construct
YPKLMQG

SEQ ID NO: 37762 - protein, 7 aa, synthetic construct
TTNKVAG

SEQ ID NO: 37763 - protein, 7 aa, synthetic construct
TPAKQVA

SEQ ID NO: 37764 - protein, 7 aa, synthetic construct
YNKYIVE

SEQ ID NO: 37765 - protein, 7 aa, synthetic construct
RMGTNAG

SEQ ID NO: 37766 - protein, 7 aa, synthetic construct
GSKTPVG

SEQ ID NO: 37767 - protein, 7 aa, synthetic construct
KKSDNGG

SEQ ID NO: 37768 - protein, 7 aa, synthetic construct
GVAHHHG

SEQ ID NO: 37769 - protein, 7 aa, synthetic construct
LVSHTKP

SEQ ID NO: 37770 - protein, 7 aa, synthetic construct
TSRKPFE

SEQ ID NO: 37771 - protein, 7 aa, synthetic construct
TQSRSQA

SEQ ID NO: 37772 - protein, 7 aa, synthetic construct
QTNRVER

SEQ ID NO: 37773 - protein, 7 aa, synthetic construct
PLHNGQP

SEQ ID NO: 37774 - protein, 7 aa, synthetic construct
GYGQHHS

SEQ ID NO: 37775 - protein, 7 aa, synthetic construct
NAGNRVA

SEQ ID NO: 37776 - protein, 7 aa, synthetic construct
VGSKSNA

SEQ ID NO: 37777 - protein, 7 aa, synthetic construct
NTNQRQP

SEQ ID NO: 37778 - protein, 7 aa, synthetic construct
KYNNAAG

SEQ ID NO: 37779 - protein, 7 aa, synthetic construct
TGTSRTG

SEQ ID NO: 37780 - protein, 7 aa, synthetic construct
KSSNGVS

SEQ ID NO: 37781 - protein, 7 aa, synthetic construct
KASQVGA

SEQ ID NO: 37782 - protein, 7 aa, synthetic construct
YFNGRGD

SEQ ID NO: 37783 - protein, 7 aa, synthetic construct
MIPGGKE

SEQ ID NO: 37784 - protein, 7 aa, synthetic construct
KGSAHLA

SEQ ID NO: 37785 - protein, 7 aa, synthetic construct
THLHGLA

SEQ ID NO: 37786 - protein, 7 aa, synthetic construct
NNGTGRM

SEQ ID NO: 37787 - protein, 7 aa, synthetic construct
MSKSTGI

SEQ ID NO: 37788 - protein, 7 aa, synthetic construct
NSKATAG

SEQ ID NO: 37789 - protein, 7 aa, synthetic construct
NQTTGRG

SEQ ID NO: 37790 - protein, 7 aa, synthetic construct
PKHHNFS

SEQ ID NO: 37791 - protein, 7 aa, synthetic construct
TTRPTAG

SEQ ID NO: 37792 - protein, 7 aa, synthetic construct
AQHAGPH

SEQ ID NO: 37793 - protein, 7 aa, synthetic construct
VTNNKRE

SEQ ID NO: 37794 - protein, 7 aa, synthetic construct
HIRQLNA

SEQ ID NO: 37795 - protein, 7 aa, synthetic construct
SSTQTGR

SEQ ID NO: 37796 - protein, 7 aa, synthetic construct
MNGAKSG

SEQ ID NO: 37797 - protein, 7 aa, synthetic construct
WGKNMGM

SEQ ID NO: 37798 - protein, 7 aa, synthetic construct
PIHKSGM

SEQ ID NO: 37799 - protein, 7 aa, synthetic construct
TKYLDES

SEQ ID NO: 37800 - protein, 7 aa, synthetic construct
FTKSTGT

SEQ ID NO: 37801 - protein, 7 aa, synthetic construct
FRKEDNT

SEQ ID NO: 37802 - protein, 7 aa, synthetic construct
IRYSGDA

SEQ ID NO: 37803 - protein, 7 aa, synthetic construct
WKSGTNP

SEQ ID NO: 37804 - protein, 7 aa, synthetic construct
VSSNRSQ

SEQ ID NO: 37805 - protein, 7 aa, synthetic construct
FVKGMQE

SEQ ID NO: 37806 - protein, 7 aa, synthetic construct
KQPNGNG

SEQ ID NO: 37807 - protein, 7 aa, synthetic construct
NRTTVNG

SEQ ID NO: 37808 - protein, 7 aa, synthetic construct
PQPRQSN

SEQ ID NO: 37809 - protein, 7 aa, synthetic construct
TNGVQRG

SEQ ID NO: 37810 - protein, 7 aa, synthetic construct
TKNGIGA

SEQ ID NO: 37811 - protein, 7 aa, synthetic construct
RKPPFEM

SEQ ID NO: 37812 - protein, 7 aa, synthetic construct
YANSHMG

SEQ ID NO: 37813 - protein, 7 aa, synthetic construct
TMTNSKA

SEQ ID NO: 37814 - protein, 7 aa, synthetic construct
YNNNARS

SEQ ID NO: 37815 - protein, 7 aa, synthetic construct
YPKQMSN

SEQ ID NO: 37816 - protein, 7 aa, synthetic construct
GYNAKQA

SEQ ID NO: 37817 - protein, 7 aa, synthetic construct
YMPSRNE

SEQ ID NO: 37818 - protein, 7 aa, synthetic construct
GKISGQT

SEQ ID NO: 37819 - protein, 7 aa, synthetic construct
HNKGSGM

SEQ ID NO: 37820 - protein, 7 aa, synthetic construct
MLTQSKG

SEQ ID NO: 37821 - protein, 7 aa, synthetic construct
RIVVGAE

SEQ ID NO: 37822 - protein, 7 aa, synthetic construct
NKTTAGM

SEQ ID NO: 37823 - protein, 7 aa, synthetic construct
MGYQNQV

SEQ ID NO: 37824 - protein, 7 aa, synthetic construct
QYGKSQP

SEQ ID NO: 37825 - protein, 7 aa, synthetic construct
KVNSNQS

SEQ ID NO: 37826 - protein, 7 aa, synthetic construct
QGQMNNR

SEQ ID NO: 37827 - protein, 7 aa, synthetic construct
HKKNEQE

SEQ ID NO: 37828 - protein, 7 aa, synthetic construct
FELKRQP

SEQ ID NO: 37829 - protein, 7 aa, synthetic construct
DRQVPAY

SEQ ID NO: 37830 - protein, 7 aa, synthetic construct
ILPAHTQ

SEQ ID NO: 37831 - protein, 7 aa, synthetic construct
GNGKSTA

SEQ ID NO: 37832 - protein, 7 aa, synthetic construct
HKSKQEE

SEQ ID NO: 37833 - protein, 7 aa, synthetic construct
AKTGQFG

SEQ ID NO: 37834 - protein, 7 aa, synthetic construct
QKNSVRE

SEQ ID NO: 37835 - protein, 7 aa, synthetic construct
MRVTNAT

SEQ ID NO: 37836 - protein, 7 aa, synthetic construct
VARNMGV

SEQ ID NO: 37837 - protein, 7 aa, synthetic construct
TNTAAKG

SEQ ID NO: 37838 - protein, 7 aa, synthetic construct
KNHSDKN

SEQ ID NO: 37839 - protein, 7 aa, synthetic construct
QGMKTGY

SEQ ID NO: 37840 - protein, 7 aa, synthetic construct
RTSGNSV

SEQ ID NO: 37841 - protein, 7 aa, synthetic construct
QKNPGGG

SEQ ID NO: 37842 - protein, 7 aa, synthetic construct
FDKVHMP

SEQ ID NO: 37843 - protein, 7 aa, synthetic construct
QKNSGYA

SEQ ID NO: 37844 - protein, 7 aa, synthetic construct
KTTGGQA

SEQ ID NO: 37845 - protein, 7 aa, synthetic construct
KSNNGNP

SEQ ID NO: 37846 - protein, 7 aa, synthetic construct
HGTERKD

SEQ ID NO: 37847 - protein, 7 aa, synthetic construct
PNKIWQE

SEQ ID NO: 37848 - protein, 7 aa, synthetic construct
QGVKMGA

SEQ ID NO: 37849 - protein, 7 aa, synthetic construct
ETARQTS

SEQ ID NO: 37850 - protein, 7 aa, synthetic construct
TGPPTKG

SEQ ID NO: 37851 - protein, 7 aa, synthetic construct
NPRTTQG

SEQ ID NO: 37852 - protein, 7 aa, synthetic construct
NKSTMSG

SEQ ID NO: 37853 - protein, 7 aa, synthetic construct
RSNHQVP

SEQ ID NO: 37854 - protein, 7 aa, synthetic construct
VKERSGI

SEQ ID NO: 37855 - protein, 7 aa, synthetic construct
LFATATP

SEQ ID NO: 37856 - protein, 7 aa, synthetic construct
TMGQKGG

SEQ ID NO: 37857 - protein, 7 aa, synthetic construct
TPYGDHK

SEQ ID NO: 37858 - protein, 7 aa, synthetic construct
QQRGATV

SEQ ID NO: 37859 - protein, 7 aa, synthetic construct
HKKSFSE

SEQ ID NO: 37860 - protein, 7 aa, synthetic construct
MLVNRND

SEQ ID NO: 37861 - protein, 7 aa, synthetic construct
RQFSKES

SEQ ID NO: 37862 - protein, 7 aa, synthetic construct
RVQGDVR

SEQ ID NO: 37863 - protein, 7 aa, synthetic construct
GLKDHRP

SEQ ID NO: 37864 - protein, 7 aa, synthetic construct
RGRFNEE

SEQ ID NO: 37865 - protein, 7 aa, synthetic construct
IFKQHEN

SEQ ID NO: 37866 - protein, 7 aa, synthetic construct
DGVKAIR

SEQ ID NO: 37867 - protein, 7 aa, synthetic construct
AHDRNSG

SEQ ID NO: 37868 - protein, 7 aa, synthetic construct
VHFTNTE

SEQ ID NO: 37869 - protein, 7 aa, synthetic construct
TRHQTFE

SEQ ID NO: 37870 - protein, 7 aa, synthetic construct
GKDHKWN

SEQ ID NO: 37871 - protein, 7 aa, synthetic construct
QNKTNVA

SEQ ID NO: 37872 - protein, 7 aa, synthetic construct
GPKQGMA

SEQ ID NO: 37873 - protein, 7 aa, synthetic construct
GSNKPQG

SEQ ID NO: 37874 - protein, 7 aa, synthetic construct
RNNSPTS

SEQ ID NO: 37875 - protein, 7 aa, synthetic construct
FGIVGNG

SEQ ID NO: 37876 - protein, 7 aa, synthetic construct
VLAPHRP

SEQ ID NO: 37877 - protein, 7 aa, synthetic construct
MAKAPHQ

SEQ ID NO: 37878 - protein, 7 aa, synthetic construct
QSGQKNG

SEQ ID NO: 37879 - protein, 7 aa, synthetic construct
LGLGQQR

SEQ ID NO: 37880 - protein, 7 aa, synthetic construct
VDRKMQA

SEQ ID NO: 37881 - protein, 7 aa, synthetic construct
LALVHKD

SEQ ID NO: 37882 - protein, 7 aa, synthetic construct
SSTTRAP

SEQ ID NO: 37883 - protein, 7 aa, synthetic construct
NHEHKAG

SEQ ID NO: 37884 - protein, 7 aa, synthetic construct
ILPGGPL

SEQ ID NO: 37885 - protein, 7 aa, synthetic construct
NGTKTSA

SEQ ID NO: 37886 - protein, 7 aa, synthetic construct
QPKPTMS

SEQ ID NO: 37887 - protein, 7 aa, synthetic construct
INDKSAM

SEQ ID NO: 37888 - protein, 7 aa, synthetic construct
SHERISK

SEQ ID NO: 37889 - protein, 7 aa, synthetic construct
ASKSNQG

SEQ ID NO: 37890 - protein, 7 aa, synthetic construct
GRTTTAP

SEQ ID NO: 37891 - protein, 7 aa, synthetic construct
VKEKSWS

SEQ ID NO: 37892 - protein, 7 aa, synthetic construct
GKTGNVG

SEQ ID NO: 37893 - protein, 7 aa, synthetic construct
NKVVQLK

SEQ ID NO: 37894 - protein, 7 aa, synthetic construct
DQSAKKM

SEQ ID NO: 37895 - protein, 7 aa, synthetic construct
YSSRVTT

SEQ ID NO: 37896 - protein, 7 aa, synthetic construct
NRMQSNP

SEQ ID NO: 37897 - protein, 7 aa, synthetic construct
TISTKMA

SEQ ID NO: 37898 - protein, 7 aa, synthetic construct
LQANSRI

SEQ ID NO: 37899 - protein, 7 aa, synthetic construct
YKVQMKN

SEQ ID NO: 37900 - protein, 7 aa, synthetic construct
PVKSGRD

SEQ ID NO: 37901 - protein, 7 aa, synthetic construct
TAAQRQG

SEQ ID NO: 37902 - protein, 7 aa, synthetic construct
RPASSNP

SEQ ID NO: 37903 - protein, 7 aa, synthetic construct
SMKGTQG

SEQ ID NO: 37904 - protein, 7 aa, synthetic construct
RNSAHYE

SEQ ID NO: 37905 - protein, 7 aa, synthetic construct
RNSSQAP

SEQ ID NO: 37906 - protein, 7 aa, synthetic construct
YAGRNQI

SEQ ID NO: 37907 - protein, 7 aa, synthetic construct
VKNPGGL

SEQ ID NO: 37908 - protein, 7 aa, synthetic construct
LAQNKQY

SEQ ID NO: 37909 - protein, 7 aa, synthetic construct
GTQSPHP

SEQ ID NO: 37910 - protein, 7 aa, synthetic construct
TPVNKSP

SEQ ID NO: 37911 - protein, 7 aa, synthetic construct
TTNSHKT

SEQ ID NO: 37912 - protein, 7 aa, synthetic construct
RNGSQQA

SEQ ID NO: 37913 - protein, 7 aa, synthetic construct
VKMKVQE

SEQ ID NO: 37914 - protein, 7 aa, synthetic construct
TKPHLTA

SEQ ID NO: 37915 - protein, 7 aa, synthetic construct
WKARIDA

SEQ ID NO: 37916 - protein, 7 aa, synthetic construct
SRQSTSI

SEQ ID NO: 37917 - protein, 7 aa, synthetic construct
HTVHIKP

SEQ ID NO: 37918 - protein, 7 aa, synthetic construct
ERHITIA

SEQ ID NO: 37919 - protein, 7 aa, synthetic construct
KNQSAPS

SEQ ID NO: 37920 - protein, 7 aa, synthetic construct
KNYIAES

SEQ ID NO: 37921 - protein, 7 aa, synthetic construct
RQKDSFA

SEQ ID NO: 37922 - protein, 7 aa, synthetic construct
MRNQMSG

SEQ ID NO: 37923 - protein, 7 aa, synthetic construct
KPSRTLE

SEQ ID NO: 37924 - protein, 7 aa, synthetic construct
GGQNKFM

SEQ ID NO: 37925 - protein, 7 aa, synthetic construct
TNGARTM

SEQ ID NO: 37926 - protein, 7 aa, synthetic construct
NKPPYGG

SEQ ID NO: 37927 - protein, 7 aa, synthetic construct
GNSKAVG

SEQ ID NO: 37928 - protein, 7 aa, synthetic construct
QQKNSVG

SEQ ID NO: 37929 - protein, 7 aa, synthetic construct
ADGRFQK

SEQ ID NO: 37930 - protein, 7 aa, synthetic construct
HIKQGPP

SEQ ID NO: 37931 - protein, 7 aa, synthetic construct
LYHVANE

SEQ ID NO: 37932 - protein, 7 aa, synthetic construct
SKWNKDE

SEQ ID NO: 37933 - protein, 7 aa, synthetic construct
KPNNGLG

SEQ ID NO: 37934 - protein, 7 aa, synthetic construct
TTPKQGQ

SEQ ID NO: 37935 - protein, 7 aa, synthetic construct
KMGPGTA

SEQ ID NO: 37936 - protein, 7 aa, synthetic construct
SPKLVKG

SEQ ID NO: 37937 - protein, 7 aa, synthetic construct
VTGSQKG

SEQ ID NO: 37938 - protein, 7 aa, synthetic construct
KQPGMVA

SEQ ID NO: 37939 - protein, 7 aa, synthetic construct
QRMNMPH

SEQ ID NO: 37940 - protein, 7 aa, synthetic construct
TKTQTAS

SEQ ID NO: 37941 - protein, 7 aa, synthetic construct
KVGVSQV

SEQ ID NO: 37942 - protein, 7 aa, synthetic construct
AKPSSSD

SEQ ID NO: 37943 - protein, 7 aa, synthetic construct
INSHLPV

SEQ ID NO: 37944 - protein, 7 aa, synthetic construct
NDGLRTG

SEQ ID NO: 37945 - protein, 7 aa, synthetic construct
GYKSTNG

SEQ ID NO: 37946 - protein, 7 aa, synthetic construct
SAAQTAG

SEQ ID NO: 37947 - protein, 7 aa, synthetic construct
KQPPTAA

SEQ ID NO: 37948 - protein, 7 aa, synthetic construct
SQRTNVD

SEQ ID NO: 37949 - protein, 7 aa, synthetic construct
RGQVLTS

SEQ ID NO: 37950 - protein, 7 aa, synthetic construct
KSPATMG

SEQ ID NO: 37951 - protein, 7 aa, synthetic construct
DRHKMNG

SEQ ID NO: 37952 - protein, 7 aa, synthetic construct
MPLHPAD

SEQ ID NO: 37953 - protein, 7 aa, synthetic construct
TSRRELE

SEQ ID NO: 37954 - protein, 7 aa, synthetic construct
AERHTST

SEQ ID NO: 37955 - protein, 7 aa, synthetic construct
QFVKTHP

SEQ ID NO: 37956 - protein, 7 aa, synthetic construct
SPQKSGG

SEQ ID NO: 37957 - protein, 7 aa, synthetic construct
ATRTPQM

SEQ ID NO: 37958 - protein, 7 aa, synthetic construct
VSQRTQG

SEQ ID NO: 37959 - protein, 7 aa, synthetic construct
TQQTRQS

SEQ ID NO: 37960 - protein, 7 aa, synthetic construct
KPPATTP

SEQ ID NO: 37961 - protein, 7 aa, synthetic construct
YQKQSSS

SEQ ID NO: 37962 - protein, 7 aa, synthetic construct
TGAAAGR

SEQ ID NO: 37963 - protein, 7 aa, synthetic construct
LKFLNTP

SEQ ID NO: 37964 - protein, 7 aa, synthetic construct
ANRSQNA

SEQ ID NO: 37965 - protein, 7 aa, synthetic construct
LQRQAHS

SEQ ID NO: 37966 - protein, 7 aa, synthetic construct
MTHIREN

SEQ ID NO: 37967 - protein, 7 aa, synthetic construct
TQRNQNV

SEQ ID NO: 37968 - protein, 7 aa, synthetic construct
FNAKADK

SEQ ID NO: 37969 - protein, 7 aa, synthetic construct
KNPNQQT

SEQ ID NO: 37970 - protein, 7 aa, synthetic construct
RLANIQS

SEQ ID NO: 37971 - protein, 7 aa, synthetic construct
MSRTGNG

SEQ ID NO: 37972 - protein, 7 aa, synthetic construct
QRAIQVA

SEQ ID NO: 37973 - protein, 7 aa, synthetic construct
RTGSLDR

SEQ ID NO: 37974 - protein, 7 aa, synthetic construct
HKSQTVI

SEQ ID NO: 37975 - protein, 7 aa, synthetic construct
MHPKHSA

SEQ ID NO: 37976 - protein, 7 aa, synthetic construct
TLYGAHA

SEQ ID NO: 37977 - protein, 7 aa, synthetic construct
TDIRKTS

SEQ ID NO: 37978 - protein, 7 aa, synthetic construct
PSNASKV

SEQ ID NO: 37979 - protein, 7 aa, synthetic construct
PGQAKSG

SEQ ID NO: 37980 - protein, 7 aa, synthetic construct
NGAKSTG

SEQ ID NO: 37981 - protein, 7 aa, synthetic construct
SPPHSGN

SEQ ID NO: 37982 - protein, 7 aa, synthetic construct
SNSFERD

SEQ ID NO: 37983 - protein, 7 aa, synthetic construct
SQFKGSA

SEQ ID NO: 37984 - protein, 7 aa, synthetic construct
NGPNARS

SEQ ID NO: 37985 - protein, 7 aa, synthetic construct
PKSSVMG

SEQ ID NO: 37986 - protein, 7 aa, synthetic construct
MKDPRYT

SEQ ID NO: 37987 - protein, 7 aa, synthetic construct
SLAAKTG

SEQ ID NO: 37988 - protein, 7 aa, synthetic construct
MKMGNSS

SEQ ID NO: 37989 - protein, 7 aa, synthetic construct
HGQMKMA

SEQ ID NO: 37990 - protein, 7 aa, synthetic construct
QAVGPNR

SEQ ID NO: 37991 - protein, 7 aa, synthetic construct
MHKPNTS

SEQ ID NO: 37992 - protein, 7 aa, synthetic construct
NTKKSDA

SEQ ID NO: 37993 - protein, 7 aa, synthetic construct
YLGSNFS

SEQ ID NO: 37994 - protein, 7 aa, synthetic construct
KTSQGMG

SEQ ID NO: 37995 - protein, 7 aa, synthetic construct
KNTSNNV

SEQ ID NO: 37996 - protein, 7 aa, synthetic construct
NTRSVTG

SEQ ID NO: 37997 - protein, 7 aa, synthetic construct
QPRAASM

SEQ ID NO: 37998 - protein, 7 aa, synthetic construct
QTRHAEE

SEQ ID NO: 37999 - protein, 7 aa, synthetic construct
CPPRAQC

SEQ ID NO: 38000 - protein, 7 aa, synthetic construct
KTPTMAG

SEQ ID NO: 38001 - protein, 7 aa, synthetic construct
TSKQQSA

SEQ ID NO: 38002 - protein, 7 aa, synthetic construct
SKQHMGD

SEQ ID NO: 38003 - protein, 7 aa, synthetic construct
IRDIVNG

SEQ ID NO: 38004 - protein, 7 aa, synthetic construct
YSNTRDA

SEQ ID NO: 38005 - protein, 7 aa, synthetic construct
HQMMSKN

SEQ ID NO: 38006 - protein, 7 aa, synthetic construct
VQNQFKN

SEQ ID NO: 38007 - protein, 7 aa, synthetic construct
HPKQNSA

SEQ ID NO: 38008 - protein, 7 aa, synthetic construct
KGVNMAM

SEQ ID NO: 38009 - protein, 7 aa, synthetic construct
TGVHPRS

SEQ ID NO: 38010 - protein, 7 aa, synthetic construct
NFKAGSV

SEQ ID NO: 38011 - protein, 7 aa, synthetic construct
HNAERGT

SEQ ID NO: 38012 - protein, 7 aa, synthetic construct
QVHLKGE

SEQ ID NO: 38013 - protein, 7 aa, synthetic construct
SKGDRAA

SEQ ID NO: 38014 - protein, 7 aa, synthetic construct
KNMMSQA

SEQ ID NO: 38015 - protein, 7 aa, synthetic construct
TRNMNGF

SEQ ID NO: 38016 - protein, 7 aa, synthetic construct
ILRLTDG

SEQ ID NO: 38017 - protein, 7 aa, synthetic construct
MYPGKDR

SEQ ID NO: 38018 - protein, 7 aa, synthetic construct
MFNRAES

SEQ ID NO: 38019 - protein, 7 aa, synthetic construct
FKSQERA

SEQ ID NO: 38020 - protein, 7 aa, synthetic construct
HGQGPMV

SEQ ID NO: 38021 - protein, 7 aa, synthetic construct
RPNTQSG

SEQ ID NO: 38022 - protein, 7 aa, synthetic construct
QQGKTHL

SEQ ID NO: 38023 - protein, 7 aa, synthetic construct
SYTAKSP

SEQ ID NO: 38024 - protein, 7 aa, synthetic construct
AAQNGHG

SEQ ID NO: 38025 - protein, 7 aa, synthetic construct
QHKPMQD

SEQ ID NO: 38026 - protein, 7 aa, synthetic construct
IEIRRVE

SEQ ID NO: 38027 - protein, 7 aa, synthetic construct
QFANRMG

SEQ ID NO: 38028 - protein, 7 aa, synthetic construct
AMSKPLN

SEQ ID NO: 38029 - protein, 7 aa, synthetic construct
GSNFAIP

SEQ ID NO: 38030 - protein, 7 aa, synthetic construct
NAREHGW

SEQ ID NO: 38031 - protein, 7 aa, synthetic construct
SQRTSST

SEQ ID NO: 38032 - protein, 7 aa, synthetic construct
KGGTLMS

SEQ ID NO: 38033 - protein, 7 aa, synthetic construct
MRQAGPI

SEQ ID NO: 38034 - protein, 7 aa, synthetic construct
DRADPRR

SEQ ID NO: 38035 - protein, 7 aa, synthetic construct
NQNRRFD

SEQ ID NO: 38036 - protein, 7 aa, synthetic construct
QKWAMAE

SEQ ID NO: 38037 - protein, 7 aa, synthetic construct
TMTAKYG

SEQ ID NO: 38038 - protein, 7 aa, synthetic construct
SVPSIKF

SEQ ID NO: 38039 - protein, 7 aa, synthetic construct
QKNSQAG

SEQ ID NO: 38040 - protein, 7 aa, synthetic construct
EWQAKNG

SEQ ID NO: 38041 - protein, 7 aa, synthetic construct
NNSKGGG

SEQ ID NO: 38042 - protein, 7 aa, synthetic construct
KVPMKQE

SEQ ID NO: 38043 - protein, 7 aa, synthetic construct
LKHLHES

SEQ ID NO: 38044 - protein, 7 aa, synthetic construct
ISSTDRN

SEQ ID NO: 38045 - protein, 7 aa, synthetic construct
KSGMGQG

SEQ ID NO: 38046 - protein, 7 aa, synthetic construct
RNQNNQA

SEQ ID NO: 38047 - protein, 7 aa, synthetic construct
NAIHKRD

SEQ ID NO: 38048 - protein, 7 aa, synthetic construct
MNGGFSG

SEQ ID NO: 38049 - protein, 7 aa, synthetic construct
QYNGRVA

SEQ ID NO: 38050 - protein, 7 aa, synthetic construct
TQKGDHN

SEQ ID NO: 38051 - protein, 7 aa, synthetic construct
FGHTNVN

SEQ ID NO: 38052 - protein, 7 aa, synthetic construct
YAQDPFK

SEQ ID NO: 38053 - protein, 7 aa, synthetic construct
TSKPSGA

SEQ ID NO: 38054 - protein, 7 aa, synthetic construct
DFSGGKN

SEQ ID NO: 38055 - protein, 7 aa, synthetic construct
NAGGKGA

SEQ ID NO: 38056 - protein, 7 aa, synthetic construct
YEQRHAS

SEQ ID NO: 38057 - protein, 7 aa, synthetic construct
TAKMSTN

SEQ ID NO: 38058 - protein, 7 aa, synthetic construct
KNNTGTP

SEQ ID NO: 38059 - protein, 7 aa, synthetic construct
YVKATEK

SEQ ID NO: 38060 - protein, 7 aa, synthetic construct
YKHGNIE

SEQ ID NO: 38061 - protein, 7 aa, synthetic construct
RGPSTAV

SEQ ID NO: 38062 - protein, 7 aa, synthetic construct
NQSQSST

SEQ ID NO: 38063 - protein, 7 aa, synthetic construct
TRSAHDV

SEQ ID NO: 38064 - protein, 7 aa, synthetic construct
SKSAKDA

SEQ ID NO: 38065 - protein, 7 aa, synthetic construct
PYKTHID

SEQ ID NO: 38066 - protein, 7 aa, synthetic construct
YSGPNPR

SEQ ID NO: 38067 - protein, 7 aa, synthetic construct
MPSRQGA

SEQ ID NO: 38068 - protein, 7 aa, synthetic construct
QGGVTKP

SEQ ID NO: 38069 - protein, 7 aa, synthetic construct
ASALKGG

SEQ ID NO: 38070 - protein, 7 aa, synthetic construct
KHVSNNP

SEQ ID NO: 38071 - protein, 7 aa, synthetic construct
QQVRVEG

SEQ ID NO: 38072 - protein, 7 aa, synthetic construct
REHKPQS

SEQ ID NO: 38073 - protein, 7 aa, synthetic construct
KHDMVFS

SEQ ID NO: 38074 - protein, 7 aa, synthetic construct
WSATSTF

SEQ ID NO: 38075 - protein, 7 aa, synthetic construct
TLAVQTG

SEQ ID NO: 38076 - protein, 7 aa, synthetic construct
PKTNIGG

SEQ ID NO: 38077 - protein, 7 aa, synthetic construct
KLNNSLA

SEQ ID NO: 38078 - protein, 7 aa, synthetic construct
RQDRLQS

SEQ ID NO: 38079 - protein, 7 aa, synthetic construct
NLSGRDP

SEQ ID NO: 38080 - protein, 7 aa, synthetic construct
LGGYAQG

SEQ ID NO: 38081 - protein, 7 aa, synthetic construct
YVSTKSG

SEQ ID NO: 38082 - protein, 7 aa, synthetic construct
PRGIPSE

SEQ ID NO: 38083 - protein, 7 aa, synthetic construct
QMGNMKA

SEQ ID NO: 38084 - protein, 7 aa, synthetic construct
LFAALPS

SEQ ID NO: 38085 - protein, 7 aa, synthetic construct
MGNTRFG

SEQ ID NO: 38086 - protein, 7 aa, synthetic construct
KQNATVG

SEQ ID NO: 38087 - protein, 7 aa, synthetic construct
VARQTIQ

SEQ ID NO: 38088 - protein, 7 aa, synthetic construct
RDHFAAG

SEQ ID NO: 38089 - protein, 7 aa, synthetic construct
GRPIVTG

SEQ ID NO: 38090 - protein, 7 aa, synthetic construct
YGVVKQG

SEQ ID NO: 38091 - protein, 7 aa, synthetic construct
FKTGVAA

SEQ ID NO: 38092 - protein, 7 aa, synthetic construct
KDQQRHG

SEQ ID NO: 38093 - protein, 7 aa, synthetic construct
GNGPQKA

SEQ ID NO: 38094 - protein, 7 aa, synthetic construct
FGKSGVN

SEQ ID NO: 38095 - protein, 7 aa, synthetic construct
LAGGSIA

SEQ ID NO: 38096 - protein, 7 aa, synthetic construct
LHGREGL

SEQ ID NO: 38097 - protein, 7 aa, synthetic construct
SRQLNNA

SEQ ID NO: 38098 - protein, 7 aa, synthetic construct
WTQESPS

SEQ ID NO: 38099 - protein, 7 aa, synthetic construct
WNHTGPL

SEQ ID NO: 38100 - protein, 7 aa, synthetic construct
PQKQTMA

SEQ ID NO: 38101 - protein, 7 aa, synthetic construct
PDSHSRV

SEQ ID NO: 38102 - protein, 7 aa, synthetic construct
NSRAGNW

SEQ ID NO: 38103 - protein, 7 aa, synthetic construct
HLIGING

SEQ ID NO: 38104 - protein, 7 aa, synthetic construct
QKTPNPS

SEQ ID NO: 38105 - protein, 7 aa, synthetic construct
RFHGQIE

SEQ ID NO: 38106 - protein, 7 aa, synthetic construct
GMRNEQM

SEQ ID NO: 38107 - protein, 7 aa, synthetic construct
KGHNGDT

SEQ ID NO: 38108 - protein, 7 aa, synthetic construct
GPSKMNA

SEQ ID NO: 38109 - protein, 7 aa, synthetic construct
SGQTRVG

SEQ ID NO: 38110 - protein, 7 aa, synthetic construct
KKMPAEG

SEQ ID NO: 38111 - protein, 7 aa, synthetic construct
HKAADVG

SEQ ID NO: 38112 - protein, 7 aa, synthetic construct
QQYHASA

SEQ ID NO: 38113 - protein, 7 aa, synthetic construct
TPKGGMA

SEQ ID NO: 38114 - protein, 7 aa, synthetic construct
YTSQGKG

SEQ ID NO: 38115 - protein, 7 aa, synthetic construct
GQSQPNK

SEQ ID NO: 38116 - protein, 7 aa, synthetic construct
IDGIRTR

SEQ ID NO: 38117 - protein, 7 aa, synthetic construct
VQRNTNA

SEQ ID NO: 38118 - protein, 7 aa, synthetic construct
RQGTGGA

SEQ ID NO: 38119 - protein, 7 aa, synthetic construct
GRPPGIS

SEQ ID NO: 38120 - protein, 7 aa, synthetic construct
MKHGIQD

SEQ ID NO: 38121 - protein, 7 aa, synthetic construct
TGTAKMN

SEQ ID NO: 38122 - protein, 7 aa, synthetic construct
DFAKHKV

SEQ ID NO: 38123 - protein, 7 aa, synthetic construct
TGTARAG

SEQ ID NO: 38124 - protein, 7 aa, synthetic construct
FPLLSTA

SEQ ID NO: 38125 - protein, 7 aa, synthetic construct
YKAPGSN

SEQ ID NO: 38126 - protein, 7 aa, synthetic construct
KPSQNTP

SEQ ID NO: 38127 - protein, 7 aa, synthetic construct
NSPKSQS

SEQ ID NO: 38128 - protein, 7 aa, synthetic construct
HTSQRTG

SEQ ID NO: 38129 - protein, 7 aa, synthetic construct
VYNLSGG

SEQ ID NO: 38130 - protein, 7 aa, synthetic construct
MTGARQT

SEQ ID NO: 38131 - protein, 7 aa, synthetic construct
NRPSVAP

SEQ ID NO: 38132 - protein, 7 aa, synthetic construct
LKKFDFE

SEQ ID NO: 38133 - protein, 7 aa, synthetic construct
DKGGTRV

SEQ ID NO: 38134 - protein, 7 aa, synthetic construct
NPNHRPP

SEQ ID NO: 38135 - protein, 7 aa, synthetic construct
TVPTKLH

SEQ ID NO: 38136 - protein, 7 aa, synthetic construct
DGMKMYK

SEQ ID NO: 38137 - protein, 7 aa, synthetic construct
FTGGHGI

SEQ ID NO: 38138 - protein, 7 aa, synthetic construct
LRTTPQT

SEQ ID NO: 38139 - protein, 7 aa, synthetic construct
KTTGIRE

SEQ ID NO: 38140 - protein, 7 aa, synthetic construct
RNPSSAG

SEQ ID NO: 38141 - protein, 7 aa, synthetic construct
WKQAGPA

SEQ ID NO: 38142 - protein, 7 aa, synthetic construct
NRPAAGF

SEQ ID NO: 38143 - protein, 7 aa, synthetic construct
YKAGMKE

SEQ ID NO: 38144 - protein, 7 aa, synthetic construct
PAVGVSG

SEQ ID NO: 38145 - protein, 7 aa, synthetic construct
KPQHQDW

SEQ ID NO: 38146 - protein, 7 aa, synthetic construct
SSPPYKY

SEQ ID NO: 38147 - protein, 7 aa, synthetic construct
GRQSTAA

SEQ ID NO: 38148 - protein, 7 aa, synthetic construct
GTHSNQS

SEQ ID NO: 38149 - protein, 7 aa, synthetic construct
VLSNTER

SEQ ID NO: 38150 - protein, 7 aa, synthetic construct
NSKPTNM

SEQ ID NO: 38151 - protein, 7 aa, synthetic construct
PRPTGAA

SEQ ID NO: 38152 - protein, 7 aa, synthetic construct
KSMGNAS

SEQ ID NO: 38153 - protein, 7 aa, synthetic construct
LKTSPAG

SEQ ID NO: 38154 - protein, 7 aa, synthetic construct
RGDKGPS

SEQ ID NO: 38155 - protein, 7 aa, synthetic construct
DHKAAMG

SEQ ID NO: 38156 - protein, 7 aa, synthetic construct
KGPSMAT

SEQ ID NO: 38157 - protein, 7 aa, synthetic construct
LRERTER

SEQ ID NO: 38158 - protein, 7 aa, synthetic construct
NRTTNSA

SEQ ID NO: 38159 - protein, 7 aa, synthetic construct
HHPRQLD

SEQ ID NO: 38160 - protein, 7 aa, synthetic construct
KPISNAG

SEQ ID NO: 38161 - protein, 7 aa, synthetic construct
HKSYPTI

SEQ ID NO: 38162 - protein, 7 aa, synthetic construct
TVPNGKG

SEQ ID NO: 38163 - protein, 7 aa, synthetic construct
KTHQSVE

SEQ ID NO: 38164 - protein, 7 aa, synthetic construct
MSPIYKQ

SEQ ID NO: 38165 - protein, 7 aa, synthetic construct
MNAKAGM

SEQ ID NO: 38166 - protein, 7 aa, synthetic construct
AHPMRPA

SEQ ID NO: 38167 - protein, 7 aa, synthetic construct
KFQTSTG

SEQ ID NO: 38168 - protein, 7 aa, synthetic construct
VGTSRGP

SEQ ID NO: 38169 - protein, 7 aa, synthetic construct
TNIMTQA

SEQ ID NO: 38170 - protein, 7 aa, synthetic construct
GTRTASI

SEQ ID NO: 38171 - protein, 7 aa, synthetic construct
MNPRGNA

SEQ ID NO: 38172 - protein, 7 aa, synthetic construct
QKNYAEA

SEQ ID NO: 38173 - protein, 7 aa, synthetic construct
THMHSRA

SEQ ID NO: 38174 - protein, 7 aa, synthetic construct
GANYPNH

SEQ ID NO: 38175 - protein, 7 aa, synthetic construct
RQSATQG

SEQ ID NO: 38176 - protein, 7 aa, synthetic construct
TMKITTE

SEQ ID NO: 38177 - protein, 7 aa, synthetic construct
MRGTGVN

SEQ ID NO: 38178 - protein, 7 aa, synthetic construct
VADKRGG

SEQ ID NO: 38179 - protein, 7 aa, synthetic construct
SKQSGYG

SEQ ID NO: 38180 - protein, 7 aa, synthetic construct
KFGSMPV

SEQ ID NO: 38181 - protein, 7 aa, synthetic construct
HIKHSAM

SEQ ID NO: 38182 - protein, 7 aa, synthetic construct
CHKLNCA

SEQ ID NO: 38183 - protein, 7 aa, synthetic construct
QPKNMTG

SEQ ID NO: 38184 - protein, 7 aa, synthetic construct
KMPGQID

SEQ ID NO: 38185 - protein, 7 aa, synthetic construct
NTAKSGG

SEQ ID NO: 38186 - protein, 7 aa, synthetic construct
RTNGFVG

SEQ ID NO: 38187 - protein, 7 aa, synthetic construct
PRGNGGA

SEQ ID NO: 38188 - protein, 7 aa, synthetic construct
YQPKKEG

SEQ ID NO: 38189 - protein, 7 aa, synthetic construct
SNFVQTP

SEQ ID NO: 38190 - protein, 7 aa, synthetic construct
KTSSAKE

SEQ ID NO: 38191 - protein, 7 aa, synthetic construct
QNQRVGG

SEQ ID NO: 38192 - protein, 7 aa, synthetic construct
TKTVARE

SEQ ID NO: 38193 - protein, 7 aa, synthetic construct
AMPRMMD

SEQ ID NO: 38194 - protein, 7 aa, synthetic construct
AFQAQTV

SEQ ID NO: 38195 - protein, 7 aa, synthetic construct
MQGRNVA

SEQ ID NO: 38196 - protein, 7 aa, synthetic construct
MKQSTQN

SEQ ID NO: 38197 - protein, 7 aa, synthetic construct
HLNRGAG

SEQ ID NO: 38198 - protein, 7 aa, synthetic construct
SPGKPGA

SEQ ID NO: 38199 - protein, 7 aa, synthetic construct
GKQQTMG

SEQ ID NO: 38200 - protein, 7 aa, synthetic construct
AGTNRSS

SEQ ID NO: 38201 - protein, 7 aa, synthetic construct
NNKDKQG

SEQ ID NO: 38202 - protein, 7 aa, synthetic construct
QYKNAHP

SEQ ID NO: 38203 - protein, 7 aa, synthetic construct
QFSASDR

SEQ ID NO: 38204 - protein, 7 aa, synthetic construct
TRGIDKG

SEQ ID NO: 38205 - protein, 7 aa, synthetic construct
VNTGRVY

SEQ ID NO: 38206 - protein, 7 aa, synthetic construct
SKPSYHD

SEQ ID NO: 38207 - protein, 7 aa, synthetic construct
IGTLYRS

SEQ ID NO: 38208 - protein, 7 aa, synthetic construct
NNFDRKD

SEQ ID NO: 38209 - protein, 7 aa, synthetic construct
DSSKKSE

SEQ ID NO: 38210 - protein, 7 aa, synthetic construct
KTNTQAS

SEQ ID NO: 38211 - protein, 7 aa, synthetic construct
KPTNGTP

SEQ ID NO: 38212 - protein, 7 aa, synthetic construct
QSSGSGK

SEQ ID NO: 38213 - protein, 7 aa, synthetic construct
HMSARLG

SEQ ID NO: 38214 - protein, 7 aa, synthetic construct
AWQGTGP

SEQ ID NO: 38215 - protein, 7 aa, synthetic construct
VRTEHHG

SEQ ID NO: 38216 - protein, 7 aa, synthetic construct
NPRAQNP

SEQ ID NO: 38217 - protein, 7 aa, synthetic construct
APKKNGD

SEQ ID NO: 38218 - protein, 7 aa, synthetic construct
KPTGSVS

SEQ ID NO: 38219 - protein, 7 aa, synthetic construct
NFQSHKT

SEQ ID NO: 38220 - protein, 7 aa, synthetic construct
IKPTQRD

SEQ ID NO: 38221 - protein, 7 aa, synthetic construct
ASRISNT

SEQ ID NO: 38222 - protein, 7 aa, synthetic construct
LRPNVSG

SEQ ID NO: 38223 - protein, 7 aa, synthetic construct
TSNKTVA

SEQ ID NO: 38224 - protein, 7 aa, synthetic construct
QKAVSVH

SEQ ID NO: 38225 - protein, 7 aa, synthetic construct
NYSAKNG

SEQ ID NO: 38226 - protein, 7 aa, synthetic construct
ERHPHPP

SEQ ID NO: 38227 - protein, 7 aa, synthetic construct
KYPNAQS

SEQ ID NO: 38228 - protein, 7 aa, synthetic construct
YKMSAKD

SEQ ID NO: 38229 - protein, 7 aa, synthetic construct
TQRATMG

SEQ ID NO: 38230 - protein, 7 aa, synthetic construct
SFKHNNH

SEQ ID NO: 38231 - protein, 7 aa, synthetic construct
IKSSSNP

SEQ ID NO: 38232 - protein, 7 aa, synthetic construct
EFKVKYN

SEQ ID NO: 38233 - protein, 7 aa, synthetic construct
RFVNNTE

SEQ ID NO: 38234 - protein, 7 aa, synthetic construct
NYVNRQP

SEQ ID NO: 38235 - protein, 7 aa, synthetic construct
MPKMSQS

SEQ ID NO: 38236 - protein, 7 aa, synthetic construct
MQHGYTA

SEQ ID NO: 38237 - protein, 7 aa, synthetic construct
PPTPTKW

SEQ ID NO: 38238 - protein, 7 aa, synthetic construct
NVAHRSM

SEQ ID NO: 38239 - protein, 7 aa, synthetic construct
HRTSETN

SEQ ID NO: 38240 - protein, 7 aa, synthetic construct
GSAKPLF

SEQ ID NO: 38241 - protein, 7 aa, synthetic construct
PYSSTTI

SEQ ID NO: 38242 - protein, 7 aa, synthetic construct
RPGGGYE

SEQ ID NO: 38243 - protein, 7 aa, synthetic construct
RPSSANS

SEQ ID NO: 38244 - protein, 7 aa, synthetic construct
VHKMNNF

SEQ ID NO: 38245 - protein, 7 aa, synthetic construct
QPTTSRE

SEQ ID NO: 38246 - protein, 7 aa, synthetic construct
HPVKTGA

SEQ ID NO: 38247 - protein, 7 aa, synthetic construct
GYNRITA

SEQ ID NO: 38248 - protein, 7 aa, synthetic construct
WEKPKNS

SEQ ID NO: 38249 - protein, 7 aa, synthetic construct
MNGRAIP

SEQ ID NO: 38250 - protein, 7 aa, synthetic construct
GNPAVGS

SEQ ID NO: 38251 - protein, 7 aa, synthetic construct
GPRATVA

SEQ ID NO: 38252 - protein, 7 aa, synthetic construct
NGPRVGG

SEQ ID NO: 38253 - protein, 7 aa, synthetic construct
NENFRSP

SEQ ID NO: 38254 - protein, 7 aa, synthetic construct
ATPYGDA

SEQ ID NO: 38255 - protein, 7 aa, synthetic construct
FKPGGMA

SEQ ID NO: 38256 - protein, 7 aa, synthetic construct
PRNADVI

SEQ ID NO: 38257 - protein, 7 aa, synthetic construct
HSMAQNG

SEQ ID NO: 38258 - protein, 7 aa, synthetic construct
AAMHTME

SEQ ID NO: 38259 - protein, 7 aa, synthetic construct
KTGANGA

SEQ ID NO: 38260 - protein, 7 aa, synthetic construct
QPPFHPD

SEQ ID NO: 38261 - protein, 7 aa, synthetic construct
FDTYRKA

SEQ ID NO: 38262 - protein, 7 aa, synthetic construct
NSQIRSN

SEQ ID NO: 38263 - protein, 7 aa, synthetic construct
GPMKSAA

SEQ ID NO: 38264 - protein, 7 aa, synthetic construct
RMAIGAE

SEQ ID NO: 38265 - protein, 7 aa, synthetic construct
TAQNRSA

SEQ ID NO: 38266 - protein, 7 aa, synthetic construct
RLYGQLD

SEQ ID NO: 38267 - protein, 7 aa, synthetic construct
NKHLVMA

SEQ ID NO: 38268 - protein, 7 aa, synthetic construct
TRSVNNA

SEQ ID NO: 38269 - protein, 7 aa, synthetic construct
KMAQVNA

SEQ ID NO: 38270 - protein, 7 aa, synthetic construct
DRLHVPP

SEQ ID NO: 38271 - protein, 7 aa, synthetic construct
TAQPKWG

SEQ ID NO: 38272 - protein, 7 aa, synthetic construct
PRSSRDE

SEQ ID NO: 38273 - protein, 7 aa, synthetic construct
RGDTRSW

SEQ ID NO: 38274 - protein, 7 aa, synthetic construct
YPTSDNR

SEQ ID NO: 38275 - protein, 7 aa, synthetic construct
ESRSHAM

SEQ ID NO: 38276 - protein, 7 aa, synthetic construct
YGSKVGG

SEQ ID NO: 38277 - protein, 7 aa, synthetic construct
KSNPSNG

SEQ ID NO: 38278 - protein, 7 aa, synthetic construct
NRSAPMG

SEQ ID NO: 38279 - protein, 7 aa, synthetic construct
QARNQNP

SEQ ID NO: 38280 - protein, 7 aa, synthetic construct
DNGIAKL

SEQ ID NO: 38281 - protein, 7 aa, synthetic construct
YQKQNLG

SEQ ID NO: 38282 - protein, 7 aa, synthetic construct
HKERNKE

SEQ ID NO: 38283 - protein, 7 aa, synthetic construct
GKASTTA

SEQ ID NO: 38284 - protein, 7 aa, synthetic construct
PSKTNSF

SEQ ID NO: 38285 - protein, 7 aa, synthetic construct
KKDSGAA

SEQ ID NO: 38286 - protein, 7 aa, synthetic construct
YSTNYSI

SEQ ID NO: 38287 - protein, 7 aa, synthetic construct
KPPNAAQ

SEQ ID NO: 38288 - protein, 7 aa, synthetic construct
PMPLPKP

SEQ ID NO: 38289 - protein, 7 aa, synthetic construct
TDQGRKE

SEQ ID NO: 38290 - protein, 7 aa, synthetic construct
SNSKTGP

SEQ ID NO: 38291 - protein, 7 aa, synthetic construct
NHPQEYV

SEQ ID NO: 38292 - protein, 7 aa, synthetic construct
FNKTKSE

SEQ ID NO: 38293 - protein, 7 aa, synthetic construct
RTSQNNG

SEQ ID NO: 38294 - protein, 7 aa, synthetic construct
MRTSGVG

SEQ ID NO: 38295 - protein, 7 aa, synthetic construct
KPTHVAA

SEQ ID NO: 38296 - protein, 7 aa, synthetic construct
KVTSIPT

SEQ ID NO: 38297 - protein, 7 aa, synthetic construct
TMKGWNG

SEQ ID NO: 38298 - protein, 7 aa, synthetic construct
KTNSVAN

SEQ ID NO: 38299 - protein, 7 aa, synthetic construct
GKDQRSA

SEQ ID NO: 38300 - protein, 7 aa, synthetic construct
HPPTIRN

SEQ ID NO: 38301 - protein, 7 aa, synthetic construct
AQPYMTG

SEQ ID NO: 38302 - protein, 7 aa, synthetic construct
TSSVHRE

SEQ ID NO: 38303 - protein, 7 aa, synthetic construct
SWPTGTG

SEQ ID NO: 38304 - protein, 7 aa, synthetic construct
QSANGKP

SEQ ID NO: 38305 - protein, 7 aa, synthetic construct
KLARYAE

SEQ ID NO: 38306 - protein, 7 aa, synthetic construct
VNHDGRM

SEQ ID NO: 38307 - protein, 7 aa, synthetic construct
SQERGYG

SEQ ID NO: 38308 - protein, 7 aa, synthetic construct
RNQAVGA

SEQ ID NO: 38309 - protein, 7 aa, synthetic construct
SMFHQGG

SEQ ID NO: 38310 - protein, 7 aa, synthetic construct
SGRSPTE

SEQ ID NO: 38311 - protein, 7 aa, synthetic construct
QPGIHAP

SEQ ID NO: 38312 - protein, 7 aa, synthetic construct
RKHGDEG

SEQ ID NO: 38313 - protein, 7 aa, synthetic construct
LQHKSLF

SEQ ID NO: 38314 - protein, 7 aa, synthetic construct
EFRAHEP

SEQ ID NO: 38315 - protein, 7 aa, synthetic construct
NMAGQKG

SEQ ID NO: 38316 - protein, 7 aa, synthetic construct
KTQGSMQ

SEQ ID NO: 38317 - protein, 7 aa, synthetic construct
KPDKIPK

SEQ ID NO: 38318 - protein, 7 aa, synthetic construct
TRSSGTP

SEQ ID NO: 38319 - protein, 7 aa, synthetic construct
KPPTNVS

SEQ ID NO: 38320 - protein, 7 aa, synthetic construct
EGRRYEM

SEQ ID NO: 38321 - protein, 7 aa, synthetic construct
SIRNLVP

SEQ ID NO: 38322 - protein, 7 aa, synthetic construct
LHTRYGE

SEQ ID NO: 38323 - protein, 7 aa, synthetic construct
MLRKSID

SEQ ID NO: 38324 - protein, 7 aa, synthetic construct
LPPYAKM

SEQ ID NO: 38325 - protein, 7 aa, synthetic construct
LGKQAND

SEQ ID NO: 38326 - protein, 7 aa, synthetic construct
IDSRPMS

SEQ ID NO: 38327 - protein, 7 aa, synthetic construct
MPDTTKM

SEQ ID NO: 38328 - protein, 7 aa, synthetic construct
QHEARGS

SEQ ID NO: 38329 - protein, 7 aa, synthetic construct
RSNNGYG

SEQ ID NO: 38330 - protein, 7 aa, synthetic construct
KVTDWNA

SEQ ID NO: 38331 - protein, 7 aa, synthetic construct
LFRNGGQ

SEQ ID NO: 38332 - protein, 7 aa, synthetic construct
GKQMSNP

SEQ ID NO: 38333 - protein, 7 aa, synthetic construct
SEPKRQI

SEQ ID NO: 38334 - protein, 7 aa, synthetic construct
NARTNNG

SEQ ID NO: 38335 - protein, 7 aa, synthetic construct
TMAPAKG

SEQ ID NO: 38336 - protein, 7 aa, synthetic construct
RYGKDTQ

SEQ ID NO: 38337 - protein, 7 aa, synthetic construct
HTPHTGP

SEQ ID NO: 38338 - protein, 7 aa, synthetic construct
EGTFKMA

SEQ ID NO: 38339 - protein, 7 aa, synthetic construct
FFKKGTE

SEQ ID NO: 38340 - protein, 7 aa, synthetic construct
LENRYAH

SEQ ID NO: 38341 - protein, 7 aa, synthetic construct
KYSQGQA

SEQ ID NO: 38342 - protein, 7 aa, synthetic construct
FDRQHLH

SEQ ID NO: 38343 - protein, 7 aa, synthetic construct
KPSGAGA

SEQ ID NO: 38344 - protein, 7 aa, synthetic construct
YHENRSG

SEQ ID NO: 38345 - protein, 7 aa, synthetic construct
KSNSVKE

SEQ ID NO: 38346 - protein, 7 aa, synthetic construct
VYTHSGE

SEQ ID NO: 38347 - protein, 7 aa, synthetic construct
QHNTKGL

SEQ ID NO: 38348 - protein, 7 aa, synthetic construct
NSRTSVA

SEQ ID NO: 38349 - protein, 7 aa, synthetic construct
NTAARSD

SEQ ID NO: 38350 - protein, 7 aa, synthetic construct
YKAHIEL

SEQ ID NO: 38351 - protein, 7 aa, synthetic construct
HERLGQK

SEQ ID NO: 38352 - protein, 7 aa, synthetic construct
LRNAHVN

SEQ ID NO: 38353 - protein, 7 aa, synthetic construct
FRDGKQA

SEQ ID NO: 38354 - protein, 7 aa, synthetic construct
IGTKANV

SEQ ID NO: 38355 - protein, 7 aa, synthetic construct
VKKDATG

SEQ ID NO: 38356 - protein, 7 aa, synthetic construct
HFPQAKA

SEQ ID NO: 38357 - protein, 7 aa, synthetic construct
QNNSNQG

SEQ ID NO: 38358 - protein, 7 aa, synthetic construct
PSQKGVG

SEQ ID NO: 38359 - protein, 7 aa, synthetic construct
TRGNPAS

SEQ ID NO: 38360 - protein, 7 aa, synthetic construct
ARGARDP

SEQ ID NO: 38361 - protein, 7 aa, synthetic construct
IKGSSNV

SEQ ID NO: 38362 - protein, 7 aa, synthetic construct
MSKSAGV

SEQ ID NO: 38363 - protein, 7 aa, synthetic construct
IFKLHTE

SEQ ID NO: 38364 - protein, 7 aa, synthetic construct
FKRELQF

SEQ ID NO: 38365 - protein, 7 aa, synthetic construct
FPNQRQQ

SEQ ID NO: 38366 - protein, 7 aa, synthetic construct
GPGTVHQ

SEQ ID NO: 38367 - protein, 7 aa, synthetic construct
TQRPTAG

SEQ ID NO: 38368 - protein, 7 aa, synthetic construct
GIPTKPW

SEQ ID NO: 38369 - protein, 7 aa, synthetic construct
QMSFNKG

SEQ ID NO: 38370 - protein, 7 aa, synthetic construct
TRTMNGA

SEQ ID NO: 38371 - protein, 7 aa, synthetic construct
RAEVKEI

SEQ ID NO: 38372 - protein, 7 aa, synthetic construct
DRNKIIP

SEQ ID NO: 38373 - protein, 7 aa, synthetic construct
STLKPGI

SEQ ID NO: 38374 - protein, 7 aa, synthetic construct
MNGAPKG

SEQ ID NO: 38375 - protein, 7 aa, synthetic construct
GSMKADG

SEQ ID NO: 38376 - protein, 7 aa, synthetic construct
AMNHQPA

SEQ ID NO: 38377 - protein, 7 aa, synthetic construct
RDNSNFH

SEQ ID NO: 38378 - protein, 7 aa, synthetic construct
NTMFVKE

SEQ ID NO: 38379 - protein, 7 aa, synthetic construct
HVRDMSL

SEQ ID NO: 38380 - protein, 7 aa, synthetic construct
AASHQQG

SEQ ID NO: 38381 - protein, 7 aa, synthetic construct
PKPSQGM

SEQ ID NO: 38382 - protein, 7 aa, synthetic construct
HLPNIGG

SEQ ID NO: 38383 - protein, 7 aa, synthetic construct
TGPKAAN

SEQ ID NO: 38384 - protein, 7 aa, synthetic construct
SLRHNEH

SEQ ID NO: 38385 - protein, 7 aa, synthetic construct
IKVIVPD

SEQ ID NO: 38386 - protein, 7 aa, synthetic construct
VHGQANN

SEQ ID NO: 38387 - protein, 7 aa, synthetic construct
SKNGNTA

SEQ ID NO: 38388 - protein, 7 aa, synthetic construct
HNQHRLP

SEQ ID NO: 38389 - protein, 7 aa, synthetic construct
HNHNTIP

SEQ ID NO: 38390 - protein, 7 aa, synthetic construct
VFRDSGR

SEQ ID NO: 38391 - protein, 7 aa, synthetic construct
KTAHQMP

SEQ ID NO: 38392 - protein, 7 aa, synthetic construct
LMARAAP

SEQ ID NO: 38393 - protein, 7 aa, synthetic construct
RDPLPFD

SEQ ID NO: 38394 - protein, 7 aa, synthetic construct
KVGSGAA

SEQ ID NO: 38395 - protein, 7 aa, synthetic construct
QFGQKAD

SEQ ID NO: 38396 - protein, 7 aa, synthetic construct
DTKQHYM

SEQ ID NO: 38397 - protein, 7 aa, synthetic construct
IGSKSQA

SEQ ID NO: 38398 - protein, 7 aa, synthetic construct
QLPLNYE

SEQ ID NO: 38399 - protein, 7 aa, synthetic construct
HWVSEEY

SEQ ID NO: 38400 - protein, 7 aa, synthetic construct
KRVEHGD

SEQ ID NO: 38401 - protein, 7 aa, synthetic construct
TNQNRGD

SEQ ID NO: 38402 - protein, 7 aa, synthetic construct
SHRTIHL

SEQ ID NO: 38403 - protein, 7 aa, synthetic construct
VRGHFSE

SEQ ID NO: 38404 - protein, 7 aa, synthetic construct
NVIRVNP

SEQ ID NO: 38405 - protein, 7 aa, synthetic construct
NKKDVKE

SEQ ID NO: 38406 - protein, 7 aa, synthetic construct
TKAATPG

SEQ ID NO: 38407 - protein, 7 aa, synthetic construct
IKTHAMI

SEQ ID NO: 38408 - protein, 7 aa, synthetic construct
MQGKSNA

SEQ ID NO: 38409 - protein, 7 aa, synthetic construct
RPTSSVS

SEQ ID NO: 38410 - protein, 7 aa, synthetic construct
NMVRGEF

SEQ ID NO: 38411 - protein, 7 aa, synthetic construct
GQQGHAL

SEQ ID NO: 38412 - protein, 7 aa, synthetic construct
NLQKDQI

SEQ ID NO: 38413 - protein, 7 aa, synthetic construct
YARQDQS

SEQ ID NO: 38414 - protein, 7 aa, synthetic construct
KFPGGQG

SEQ ID NO: 38415 - protein, 7 aa, synthetic construct
EVLLRQS

SEQ ID NO: 38416 - protein, 7 aa, synthetic construct
KVGGMAG

SEQ ID NO: 38417 - protein, 7 aa, synthetic construct
GRPYSAD

SEQ ID NO: 38418 - protein, 7 aa, synthetic construct
YKKDVNG

SEQ ID NO: 38419 - protein, 7 aa, synthetic construct
STNARNG

SEQ ID NO: 38420 - protein, 7 aa, synthetic construct
RFMDQTE

SEQ ID NO: 38421 - protein, 7 aa, synthetic construct
MSQTKVQ

SEQ ID NO: 38422 - protein, 7 aa, synthetic construct
VTTTRGT

SEQ ID NO: 38423 - protein, 7 aa, synthetic construct
SRENHRV

SEQ ID NO: 38424 - protein, 7 aa, synthetic construct
WDKVRNH

SEQ ID NO: 38425 - protein, 7 aa, synthetic construct
IVPSQHA

SEQ ID NO: 38426 - protein, 7 aa, synthetic construct
QSRIESS

SEQ ID NO: 38427 - protein, 7 aa, synthetic construct
IEKKYST

SEQ ID NO: 38428 - protein, 7 aa, synthetic construct
YVKAMMN

SEQ ID NO: 38429 - protein, 7 aa, synthetic construct
YTGKISP

SEQ ID NO: 38430 - protein, 7 aa, synthetic construct
QQGSGQT

SEQ ID NO: 38431 - protein, 7 aa, synthetic construct
PKSTMSG

SEQ ID NO: 38432 - protein, 7 aa, synthetic construct
VAFKTME

SEQ ID NO: 38433 - protein, 7 aa, synthetic construct
RPMQSTG

SEQ ID NO: 38434 - protein, 7 aa, synthetic construct
VPRNSQA

SEQ ID NO: 38435 - protein, 7 aa, synthetic construct
TRPVRDE

SEQ ID NO: 38436 - protein, 7 aa, synthetic construct
HQHRNNS

SEQ ID NO: 38437 - protein, 7 aa, synthetic construct
PNDHYKV

SEQ ID NO: 38438 - protein, 7 aa, synthetic construct
STTSVKV

SEQ ID NO: 38439 - protein, 7 aa, synthetic construct
FSNYLKG

SEQ ID NO: 38440 - protein, 7 aa, synthetic construct
QMGMTYA

SEQ ID NO: 38441 - protein, 7 aa, synthetic construct
YVGNKNG

SEQ ID NO: 38442 - protein, 7 aa, synthetic construct
IRSDPQK

SEQ ID NO: 38443 - protein, 7 aa, synthetic construct
IKGNSNP

SEQ ID NO: 38444 - protein, 7 aa, synthetic construct
GKNQTSG

SEQ ID NO: 38445 - protein, 7 aa, synthetic construct
YQGVGDH

SEQ ID NO: 38446 - protein, 7 aa, synthetic construct
KMGQTAA

SEQ ID NO: 38447 - protein, 7 aa, synthetic construct
QGPKMTA

SEQ ID NO: 38448 - protein, 7 aa, synthetic construct
HPVGTRD

SEQ ID NO: 38449 - protein, 7 aa, synthetic construct
HGNSNIP

SEQ ID NO: 38450 - protein, 7 aa, synthetic construct
VPPRVQH

SEQ ID NO: 38451 - protein, 7 aa, synthetic construct
TTSKNAA

SEQ ID NO: 38452 - protein, 7 aa, synthetic construct
QNHKRDA

SEQ ID NO: 38453 - protein, 7 aa, synthetic construct
HAVRNGD

SEQ ID NO: 38454 - protein, 7 aa, synthetic construct
GTEQFRG

SEQ ID NO: 38455 - protein, 7 aa, synthetic construct
TDAMAKM

SEQ ID NO: 38456 - protein, 7 aa, synthetic construct
DANKSYR

SEQ ID NO: 38457 - protein, 7 aa, synthetic construct
HNMTEPL

SEQ ID NO: 38458 - protein, 7 aa, synthetic construct
TGSTKGG

SEQ ID NO: 38459 - protein, 7 aa, synthetic construct
PAQRNFM

SEQ ID NO: 38460 - protein, 7 aa, synthetic construct
RMSEKPG

SEQ ID NO: 38461 - protein, 7 aa, synthetic construct
TLSQRGS

SEQ ID NO: 38462 - protein, 7 aa, synthetic construct
STQSRQG

SEQ ID NO: 38463 - protein, 7 aa, synthetic construct
IGQQTRG

SEQ ID NO: 38464 - protein, 7 aa, synthetic construct
LSSQHSH

SEQ ID NO: 38465 - protein, 7 aa, synthetic construct
GIRHANA

SEQ ID NO: 38466 - protein, 7 aa, synthetic construct
KGDKAMN

SEQ ID NO: 38467 - protein, 7 aa, synthetic construct
PKVNNGA

SEQ ID NO: 38468 - protein, 7 aa, synthetic construct
KNNSNSA

SEQ ID NO: 38469 - protein, 7 aa, synthetic construct
KGNTQSS

SEQ ID NO: 38470 - protein, 7 aa, synthetic construct
SSKIVGP

SEQ ID NO: 38471 - protein, 7 aa, synthetic construct
EAAARKI

SEQ ID NO: 38472 - protein, 7 aa, synthetic construct
RMNSGQG

SEQ ID NO: 38473 - protein, 7 aa, synthetic construct
GKSGSGQ

SEQ ID NO: 38474 - protein, 7 aa, synthetic construct
VKGISSG

SEQ ID NO: 38475 - protein, 7 aa, synthetic construct
KTGPGFG

SEQ ID NO: 38476 - protein, 7 aa, synthetic construct
SSSNHRM

SEQ ID NO: 38477 - protein, 7 aa, synthetic construct
SLKSAMI

SEQ ID NO: 38478 - protein, 7 aa, synthetic construct
YQHNMNA

SEQ ID NO: 38479 - protein, 7 aa, synthetic construct
QNKNQVL

SEQ ID NO: 38480 - protein, 7 aa, synthetic construct
PNKAVGS

SEQ ID NO: 38481 - protein, 7 aa, synthetic construct
TQKNARE

SEQ ID NO: 38482 - protein, 7 aa, synthetic construct
HGRPETK

SEQ ID NO: 38483 - protein, 7 aa, synthetic construct
GNTVGHP

SEQ ID NO: 38484 - protein, 7 aa, synthetic construct
NMKTKVG

SEQ ID NO: 38485 - protein, 7 aa, synthetic construct
PHMNVGG

SEQ ID NO: 38486 - protein, 7 aa, synthetic construct
HSQPFTA

SEQ ID NO: 38487 - protein, 7 aa, synthetic construct
FRQGASD

SEQ ID NO: 38488 - protein, 7 aa, synthetic construct
DSRMKDG

SEQ ID NO: 38489 - protein, 7 aa, synthetic construct
KPDFMSN

SEQ ID NO: 38490 - protein, 7 aa, synthetic construct
GFKYQPE

SEQ ID NO: 38491 - protein, 7 aa, synthetic construct
TPINTKN

SEQ ID NO: 38492 - protein, 7 aa, synthetic construct
SKPTKEM

SEQ ID NO: 38493 - protein, 7 aa, synthetic construct
WQNLGHG

SEQ ID NO: 38494 - protein, 7 aa, synthetic construct
TGQFKDM

SEQ ID NO: 38495 - protein, 7 aa, synthetic construct
WQRVTPE

SEQ ID NO: 38496 - protein, 7 aa, synthetic construct
KIYDAER

SEQ ID NO: 38497 - protein, 7 aa, synthetic construct
SATVHKG

SEQ ID NO: 38498 - protein, 7 aa, synthetic construct
YKHNFQG

SEQ ID NO: 38499 - protein, 7 aa, synthetic construct
GTAQKSG

SEQ ID NO: 38500 - protein, 7 aa, synthetic construct
SQIKWPE

SEQ ID NO: 38501 - protein, 7 aa, synthetic construct
KREKSFD

SEQ ID NO: 38502 - protein, 7 aa, synthetic construct
FIPGGFN

SEQ ID NO: 38503 - protein, 7 aa, synthetic construct
KDSQLRV

SEQ ID NO: 38504 - protein, 7 aa, synthetic construct
SRSTPHP

SEQ ID NO: 38505 - protein, 7 aa, synthetic construct
YQGKNSA

SEQ ID NO: 38506 - protein, 7 aa, synthetic construct
RHLSSGP

SEQ ID NO: 38507 - protein, 7 aa, synthetic construct
MEPARAQ

SEQ ID NO: 38508 - protein, 7 aa, synthetic construct
KDRSIAG

SEQ ID NO: 38509 - protein, 7 aa, synthetic construct
TGTRTVS

SEQ ID NO: 38510 - protein, 7 aa, synthetic construct
NNGVNKG

SEQ ID NO: 38511 - protein, 7 aa, synthetic construct
LKNFEST

SEQ ID NO: 38512 - protein, 7 aa, synthetic construct
RAQSNGA

SEQ ID NO: 38513 - protein, 7 aa, synthetic construct
FPGIVKT

SEQ ID NO: 38514 - protein, 7 aa, synthetic construct
LKKDSDK

SEQ ID NO: 38515 - protein, 7 aa, synthetic construct
DRIGVVK

SEQ ID NO: 38516 - protein, 7 aa, synthetic construct
WNTSSRM

SEQ ID NO: 38517 - protein, 7 aa, synthetic construct
TKDGKRD

SEQ ID NO: 38518 - protein, 7 aa, synthetic construct
KGELYSG

SEQ ID NO: 38519 - protein, 7 aa, synthetic construct
LKSSQHG

SEQ ID NO: 38520 - protein, 7 aa, synthetic construct
VNIKKME

SEQ ID NO: 38521 - protein, 7 aa, synthetic construct
PKMGSVP

SEQ ID NO: 38522 - protein, 7 aa, synthetic construct
HLKPGIG

SEQ ID NO: 38523 - protein, 7 aa, synthetic construct
SSMMKSA

SEQ ID NO: 38524 - protein, 7 aa, synthetic construct
GKMGTLG

SEQ ID NO: 38525 - protein, 7 aa, synthetic construct
NVSGAAI

SEQ ID NO: 38526 - protein, 7 aa, synthetic construct
AQYKDGH

SEQ ID NO: 38527 - protein, 7 aa, synthetic construct
RKTFQQD

SEQ ID NO: 38528 - protein, 7 aa, synthetic construct
MPNGGRQ

SEQ ID NO: 38529 - protein, 7 aa, synthetic construct
KPPSAAS

SEQ ID NO: 38530 - protein, 7 aa, synthetic construct
WHAKPEH

SEQ ID NO: 38531 - protein, 7 aa, synthetic construct
ARIPRVE

SEQ ID NO: 38532 - protein, 7 aa, synthetic construct
QATGMPQ

SEQ ID NO: 38533 - protein, 7 aa, synthetic construct
KDINKQP

SEQ ID NO: 38534 - protein, 7 aa, synthetic construct
KISKVVE

SEQ ID NO: 38535 - protein, 7 aa, synthetic construct
SSRVAPA

SEQ ID NO: 38536 - protein, 7 aa, synthetic construct
QRTNANG

SEQ ID NO: 38537 - protein, 7 aa, synthetic construct
TNSNSKG

SEQ ID NO: 38538 - protein, 7 aa, synthetic construct
GNYKSDE

SEQ ID NO: 38539 - protein, 7 aa, synthetic construct
SWKNNPP

SEQ ID NO: 38540 - protein, 7 aa, synthetic construct
NKTNSVP

SEQ ID NO: 38541 - protein, 7 aa, synthetic construct
SYKATNN

SEQ ID NO: 38542 - protein, 7 aa, synthetic construct
LANGMKS

SEQ ID NO: 38543 - protein, 7 aa, synthetic construct
VHSAGRM

SEQ ID NO: 38544 - protein, 7 aa, synthetic construct
EKHANHV

SEQ ID NO: 38545 - protein, 7 aa, synthetic construct
QNARGTP

SEQ ID NO: 38546 - protein, 7 aa, synthetic construct
KTSQSNP

SEQ ID NO: 38547 - protein, 7 aa, synthetic construct
SSNAAKA

SEQ ID NO: 38548 - protein, 7 aa, synthetic construct
LPIASSH

SEQ ID NO: 38549 - protein, 7 aa, synthetic construct
DPWPNKS

SEQ ID NO: 38550 - protein, 7 aa, synthetic construct
NFDPARA

SEQ ID NO: 38551 - protein, 7 aa, synthetic construct
NHEKPMN

SEQ ID NO: 38552 - protein, 7 aa, synthetic construct
FGKTSGS

SEQ ID NO: 38553 - protein, 7 aa, synthetic construct
KQSAAMA

SEQ ID NO: 38554 - protein, 7 aa, synthetic construct
MHSSHAS

SEQ ID NO: 38555 - protein, 7 aa, synthetic construct
NFSAGPG

SEQ ID NO: 38556 - protein, 7 aa, synthetic construct
KREMKDD

SEQ ID NO: 38557 - protein, 7 aa, synthetic construct
MAHKSGP

SEQ ID NO: 38558 - protein, 7 aa, synthetic construct
RHLENLG

SEQ ID NO: 38559 - protein, 7 aa, synthetic construct
GTQRANA

SEQ ID NO: 38560 - protein, 7 aa, synthetic construct
GEDKAVI

SEQ ID NO: 38561 - protein, 7 aa, synthetic construct
NTAARNA

SEQ ID NO: 38562 - protein, 7 aa, synthetic construct
MSSGTNA

SEQ ID NO: 38563 - protein, 7 aa, synthetic construct
NQKGMNA

SEQ ID NO: 38564 - protein, 7 aa, synthetic construct
NPQSKQG

SEQ ID NO: 38565 - protein, 7 aa, synthetic construct
QNTRGNP

SEQ ID NO: 38566 - protein, 7 aa, synthetic construct
FGQKSVS

SEQ ID NO: 38567 - protein, 7 aa, synthetic construct
KSMNVMM

SEQ ID NO: 38568 - protein, 7 aa, synthetic construct
KGKLDST

SEQ ID NO: 38569 - protein, 7 aa, synthetic construct
SKAPVNG

SEQ ID NO: 38570 - protein, 7 aa, synthetic construct
FTNVGNV

SEQ ID NO: 38571 - protein, 7 aa, synthetic construct
KTMTGGP

SEQ ID NO: 38572 - protein, 7 aa, synthetic construct
SKQQTQA

SEQ ID NO: 38573 - protein, 7 aa, synthetic construct
GPGPVVA

SEQ ID NO: 38574 - protein, 7 aa, synthetic construct
TMESVKP

SEQ ID NO: 38575 - protein, 7 aa, synthetic construct
SDPRILR

SEQ ID NO: 38576 - protein, 7 aa, synthetic construct
LPMKSMG

SEQ ID NO: 38577 - protein, 7 aa, synthetic construct
GMSQKPA

SEQ ID NO: 38578 - protein, 7 aa, synthetic construct
SLSGRAE

SEQ ID NO: 38579 - protein, 7 aa, synthetic construct
RPSQPQT

SEQ ID NO: 38580 - protein, 7 aa, synthetic construct
FKNSGTM

SEQ ID NO: 38581 - protein, 7 aa, synthetic construct
RSQASQA

SEQ ID NO: 38582 - protein, 7 aa, synthetic construct
KPTNTQS

SEQ ID NO: 38583 - protein, 7 aa, synthetic construct
QAKPSNA

SEQ ID NO: 38584 - protein, 7 aa, synthetic construct
KTVKLIE

SEQ ID NO: 38585 - protein, 7 aa, synthetic construct
RQSSQMG

SEQ ID NO: 38586 - protein, 7 aa, synthetic construct
TQPSRQG

SEQ ID NO: 38587 - protein, 7 aa, synthetic construct
YKIGAKD

SEQ ID NO: 38588 - protein, 7 aa, synthetic construct
QRNAQPH

SEQ ID NO: 38589 - protein, 7 aa, synthetic construct
KSPSLIH

SEQ ID NO: 38590 - protein, 7 aa, synthetic construct
LTAHRTT

SEQ ID NO: 38591 - protein, 7 aa, synthetic construct
MKNVQGA

SEQ ID NO: 38592 - protein, 7 aa, synthetic construct
SKASVAG

SEQ ID NO: 38593 - protein, 7 aa, synthetic construct
RPQSATG

SEQ ID NO: 38594 - protein, 7 aa, synthetic construct
SRGNAGA

SEQ ID NO: 38595 - protein, 7 aa, synthetic construct
IHASNLI

SEQ ID NO: 38596 - protein, 7 aa, synthetic construct
SDQIYKG

SEQ ID NO: 38597 - protein, 7 aa, synthetic construct
MREGNRG

SEQ ID NO: 38598 - protein, 7 aa, synthetic construct
KQNGAAN

SEQ ID NO: 38599 - protein, 7 aa, synthetic construct
GYANKTA

SEQ ID NO: 38600 - protein, 7 aa, synthetic construct
QHFDANR

SEQ ID NO: 38601 - protein, 7 aa, synthetic construct
TKGTMPS

SEQ ID NO: 38602 - protein, 7 aa, synthetic construct
QERPVGA

SEQ ID NO: 38603 - protein, 7 aa, synthetic construct
RGSHFAA

SEQ ID NO: 38604 - protein, 7 aa, synthetic construct
YKPFFEE

SEQ ID NO: 38605 - protein, 7 aa, synthetic construct
MAKNQGN

SEQ ID NO: 38606 - protein, 7 aa, synthetic construct
KPNAPTG

SEQ ID NO: 38607 - protein, 7 aa, synthetic construct
LQRGEPP

SEQ ID NO: 38608 - protein, 7 aa, synthetic construct
NERMTTS

SEQ ID NO: 38609 - protein, 7 aa, synthetic construct
SGVRNAV

SEQ ID NO: 38610 - protein, 7 aa, synthetic construct
RNHGSVP

SEQ ID NO: 38611 - protein, 7 aa, synthetic construct
LSTLHTS

SEQ ID NO: 38612 - protein, 7 aa, synthetic construct
RPTYESG

SEQ ID NO: 38613 - protein, 7 aa, synthetic construct
KYLQEHP

SEQ ID NO: 38614 - protein, 7 aa, synthetic construct
GEGQKSP

SEQ ID NO: 38615 - protein, 7 aa, synthetic construct
RKNTSEP

SEQ ID NO: 38616 - protein, 7 aa, synthetic construct
HKPMPEA

SEQ ID NO: 38617 - protein, 7 aa, synthetic construct
DVRFKLE

SEQ ID NO: 38618 - protein, 7 aa, synthetic construct
NPIHKDR

SEQ ID NO: 38619 - protein, 7 aa, synthetic construct
KQGTASA

SEQ ID NO: 38620 - protein, 7 aa, synthetic construct
PGRTNMD

SEQ ID NO: 38621 - protein, 7 aa, synthetic construct
TPRGTMT

SEQ ID NO: 38622 - protein, 7 aa, synthetic construct
DKYRMNS

SEQ ID NO: 38623 - protein, 7 aa, synthetic construct
IKGNAVA

SEQ ID NO: 38624 - protein, 7 aa, synthetic construct
MPPKMYH

SEQ ID NO: 38625 - protein, 7 aa, synthetic construct
TYQKHAT

SEQ ID NO: 38626 - protein, 7 aa, synthetic construct
NGIGQRS

SEQ ID NO: 38627 - protein, 7 aa, synthetic construct
YNDIKSG

SEQ ID NO: 38628 - protein, 7 aa, synthetic construct
PTKTQSG

SEQ ID NO: 38629 - protein, 7 aa, synthetic construct
PIGQHRM

SEQ ID NO: 38630 - protein, 7 aa, synthetic construct
KAKDTGP

SEQ ID NO: 38631 - protein, 7 aa, synthetic construct
AKAQSGI

SEQ ID NO: 38632 - protein, 7 aa, synthetic construct
TKKEQSG

SEQ ID NO: 38633 - protein, 7 aa, synthetic construct
QNARTPQ

SEQ ID NO: 38634 - protein, 7 aa, synthetic construct
SPSKSVA

SEQ ID NO: 38635 - protein, 7 aa, synthetic construct
QRQTYMD

SEQ ID NO: 38636 - protein, 7 aa, synthetic construct
MKQKSGE

SEQ ID NO: 38637 - protein, 7 aa, synthetic construct
WLGKDKP

SEQ ID NO: 38638 - protein, 7 aa, synthetic construct
YRTEGHN

SEQ ID NO: 38639 - protein, 7 aa, synthetic construct
LTTFNVE

SEQ ID NO: 38640 - protein, 7 aa, synthetic construct
HSPTMTS

SEQ ID NO: 38641 - protein, 7 aa, synthetic construct
YSGHPHG

SEQ ID NO: 38642 - protein, 7 aa, synthetic construct
FHRNTHD

SEQ ID NO: 38643 - protein, 7 aa, synthetic construct
KFANGSA

SEQ ID NO: 38644 - protein, 7 aa, synthetic construct
TSRNDNP

SEQ ID NO: 38645 - protein, 7 aa, synthetic construct
RSSSATS

SEQ ID NO: 38646 - protein, 7 aa, synthetic construct
HNGSKIE

SEQ ID NO: 38647 - protein, 7 aa, synthetic construct
NHMKQGS

SEQ ID NO: 38648 - protein, 7 aa, synthetic construct
YKRELLS

SEQ ID NO: 38649 - protein, 7 aa, synthetic construct
NKGFAEP

SEQ ID NO: 38650 - protein, 7 aa, synthetic construct
HKMSVIS

SEQ ID NO: 38651 - protein, 7 aa, synthetic construct
NIHTSNF

SEQ ID NO: 38652 - protein, 7 aa, synthetic construct
PTPRQGG

SEQ ID NO: 38653 - protein, 7 aa, synthetic construct
SYDHSKS

SEQ ID NO: 38654 - protein, 7 aa, synthetic construct
HYGAPKT

SEQ ID NO: 38655 - protein, 7 aa, synthetic construct
VRPATQA

SEQ ID NO: 38656 - protein, 7 aa, synthetic construct
NQSARTG

SEQ ID NO: 38657 - protein, 7 aa, synthetic construct
KATPSNA

SEQ ID NO: 38658 - protein, 7 aa, synthetic construct
VPKLYNG

SEQ ID NO: 38659 - protein, 7 aa, synthetic construct
HAKVWAD

SEQ ID NO: 38660 - protein, 7 aa, synthetic construct
TTKRDDP

SEQ ID NO: 38661 - protein, 7 aa, synthetic construct
HGPNWER

SEQ ID NO: 38662 - protein, 7 aa, synthetic construct
LRTNNDI

SEQ ID NO: 38663 - protein, 7 aa, synthetic construct
ARSQQMG

SEQ ID NO: 38664 - protein, 7 aa, synthetic construct
VANMIHG

SEQ ID NO: 38665 - protein, 7 aa, synthetic construct
TYGTKQA

SEQ ID NO: 38666 - protein, 7 aa, synthetic construct
LNSQKQY

SEQ ID NO: 38667 - protein, 7 aa, synthetic construct
KSSASIG

SEQ ID NO: 38668 - protein, 7 aa, synthetic construct
YKSHMAD

SEQ ID NO: 38669 - protein, 7 aa, synthetic construct
QHKQIME

SEQ ID NO: 38670 - protein, 7 aa, synthetic construct
KYGNATA

SEQ ID NO: 38671 - protein, 7 aa, synthetic construct
MAQSRPT

SEQ ID NO: 38672 - protein, 7 aa, synthetic construct
QDVRQTK

SEQ ID NO: 38673 - protein, 7 aa, synthetic construct
EPGKMPG

SEQ ID NO: 38674 - protein, 7 aa, synthetic construct
TQGRVNI

SEQ ID NO: 38675 - protein, 7 aa, synthetic construct
VAGKVHF

SEQ ID NO: 38676 - protein, 7 aa, synthetic construct
GPALVKG

SEQ ID NO: 38677 - protein, 7 aa, synthetic construct
MRQSNVA

SEQ ID NO: 38678 - protein, 7 aa, synthetic construct
HANAGSG

SEQ ID NO: 38679 - protein, 7 aa, synthetic construct
NKWAASE

SEQ ID NO: 38680 - protein, 7 aa, synthetic construct
TKSAVQG

SEQ ID NO: 38681 - protein, 7 aa, synthetic construct
THSRTDH

SEQ ID NO: 38682 - protein, 7 aa, synthetic construct
TYSNKTG

SEQ ID NO: 38683 - protein, 7 aa, synthetic construct
MAPASHA

SEQ ID NO: 38684 - protein, 7 aa, synthetic construct
LSNKHTE

SEQ ID NO: 38685 - protein, 7 aa, synthetic construct
TSSKAMG

SEQ ID NO: 38686 - protein, 7 aa, synthetic construct
SYKQQLT

SEQ ID NO: 38687 - protein, 7 aa, synthetic construct
DPKFATE

SEQ ID NO: 38688 - protein, 7 aa, synthetic construct
WKGHSQD

SEQ ID NO: 38689 - protein, 7 aa, synthetic construct
GSGYQQA

SEQ ID NO: 38690 - protein, 7 aa, synthetic construct
VNSARNG

SEQ ID NO: 38691 - protein, 7 aa, synthetic construct
NMDYGKS

SEQ ID NO: 38692 - protein, 7 aa, synthetic construct
YPGALHT

SEQ ID NO: 38693 - protein, 7 aa, synthetic construct
QWQKQPS

SEQ ID NO: 38694 - protein, 7 aa, synthetic construct
RNNQMQG

SEQ ID NO: 38695 - protein, 7 aa, synthetic construct
FGKTTSG

SEQ ID NO: 38696 - protein, 7 aa, synthetic construct
VMKSGAG

SEQ ID NO: 38697 - protein, 7 aa, synthetic construct
ALKPEYG

SEQ ID NO: 38698 - protein, 7 aa, synthetic construct
PVKPPTA

SEQ ID NO: 38699 - protein, 7 aa, synthetic construct
WHQIAKG

SEQ ID NO: 38700 - protein, 7 aa, synthetic construct
AGTKIQF

SEQ ID NO: 38701 - protein, 7 aa, synthetic construct
MKNAPGG

SEQ ID NO: 38702 - protein, 7 aa, synthetic construct
SPRSPQH

SEQ ID NO: 38703 - protein, 7 aa, synthetic construct
RKETWGD

SEQ ID NO: 38704 - protein, 7 aa, synthetic construct
QIFTGKE

SEQ ID NO: 38705 - protein, 7 aa, synthetic construct
GKMMGKD

SEQ ID NO: 38706 - protein, 7 aa, synthetic construct
RTSQSSI

SEQ ID NO: 38707 - protein, 7 aa, synthetic construct
GVNRGTP

SEQ ID NO: 38708 - protein, 7 aa, synthetic construct
KNTNGIL

SEQ ID NO: 38709 - protein, 7 aa, synthetic construct
HMKNQVV

SEQ ID NO: 38710 - protein, 7 aa, synthetic construct
DVPRAAS

SEQ ID NO: 38711 - protein, 7 aa, synthetic construct
NLSVRDK

SEQ ID NO: 38712 - protein, 7 aa, synthetic construct
RYNVGPA

SEQ ID NO: 38713 - protein, 7 aa, synthetic construct
FAKVNTS

SEQ ID NO: 38714 - protein, 7 aa, synthetic construct
IVGRVTH

SEQ ID NO: 38715 - protein, 7 aa, synthetic construct
QRPSGFN

SEQ ID NO: 38716 - protein, 7 aa, synthetic construct
DQIPTRR

SEQ ID NO: 38717 - protein, 7 aa, synthetic construct
ARPVVDH

SEQ ID NO: 38718 - protein, 7 aa, synthetic construct
ATRAMSP

SEQ ID NO: 38719 - protein, 7 aa, synthetic construct
SKQDLTF

SEQ ID NO: 38720 - protein, 7 aa, synthetic construct
YPKVNFS

SEQ ID NO: 38721 - protein, 7 aa, synthetic construct
ARQTSTG

SEQ ID NO: 38722 - protein, 7 aa, synthetic construct
WHGTPPD

SEQ ID NO: 38723 - protein, 7 aa, synthetic construct
TNAKTVG

SEQ ID NO: 38724 - protein, 7 aa, synthetic construct
GRNTNAN

SEQ ID NO: 38725 - protein, 7 aa, synthetic construct
ADRKYAE

SEQ ID NO: 38726 - protein, 7 aa, synthetic construct
HYHNHGP

SEQ ID NO: 38727 - protein, 7 aa, synthetic construct
QARGNFV

SEQ ID NO: 38728 - protein, 7 aa, synthetic construct
RQSAYEG

SEQ ID NO: 38729 - protein, 7 aa, synthetic construct
RPQAQTV

SEQ ID NO: 38730 - protein, 7 aa, synthetic construct
WDKLTRM

SEQ ID NO: 38731 - protein, 7 aa, synthetic construct
QFPVTSG

SEQ ID NO: 38732 - protein, 7 aa, synthetic construct
WGKDLNF

SEQ ID NO: 38733 - protein, 7 aa, synthetic construct
IFNNINR

SEQ ID NO: 38734 - protein, 7 aa, synthetic construct
QMRSQQS

SEQ ID NO: 38735 - protein, 7 aa, synthetic construct
KNQPSQN

SEQ ID NO: 38736 - protein, 7 aa, synthetic construct
KQGASSP

SEQ ID NO: 38737 - protein, 7 aa, synthetic construct
GQGSSPG

SEQ ID NO: 38738 - protein, 7 aa, synthetic construct
QPLLHGG

SEQ ID NO: 38739 - protein, 7 aa, synthetic construct
TNGGLGG

SEQ ID NO: 38740 - protein, 7 aa, synthetic construct
FKPTGSS

SEQ ID NO: 38741 - protein, 7 aa, synthetic construct
YGGQRVS

SEQ ID NO: 38742 - protein, 7 aa, synthetic construct
SMKMNQG

SEQ ID NO: 38743 - protein, 7 aa, synthetic construct
NPQYHQS

SEQ ID NO: 38744 - protein, 7 aa, synthetic construct
YKGIANA

SEQ ID NO: 38745 - protein, 7 aa, synthetic construct
DEMRVKA

SEQ ID NO: 38746 - protein, 7 aa, synthetic construct
PNIKMGQ

SEQ ID NO: 38747 - protein, 7 aa, synthetic construct
IGQEKSQ

SEQ ID NO: 38748 - protein, 7 aa, synthetic construct
SKGTQAT

SEQ ID NO: 38749 - protein, 7 aa, synthetic construct
KDRSTHF

SEQ ID NO: 38750 - protein, 7 aa, synthetic construct
RQMGNNG

SEQ ID NO: 38751 - protein, 7 aa, synthetic construct
SKGTPQA

SEQ ID NO: 38752 - protein, 7 aa, synthetic construct
RLEQLTA

SEQ ID NO: 38753 - protein, 7 aa, synthetic construct
VKNNSGP

SEQ ID NO: 38754 - protein, 7 aa, synthetic construct
YNHDHKG

SEQ ID NO: 38755 - protein, 7 aa, synthetic construct
FANHTQG

SEQ ID NO: 38756 - protein, 7 aa, synthetic construct
GGSGKSG

SEQ ID NO: 38757 - protein, 7 aa, synthetic construct
KNGTYHP

SEQ ID NO: 38758 - protein, 7 aa, synthetic construct
GKNPNGA

SEQ ID NO: 38759 - protein, 7 aa, synthetic construct
NGPYSSG

SEQ ID NO: 38760 - protein, 7 aa, synthetic construct
KTSAQKE

SEQ ID NO: 38761 - protein, 7 aa, synthetic construct
PPKYNDP

SEQ ID NO: 38762 - protein, 7 aa, synthetic construct
FKNSPSS

SEQ ID NO: 38763 - protein, 7 aa, synthetic construct
PAIRATA

SEQ ID NO: 38764 - protein, 7 aa, synthetic construct
MPRGNQV

SEQ ID NO: 38765 - protein, 7 aa, synthetic construct
PTKGAHA

SEQ ID NO: 38766 - protein, 7 aa, synthetic construct
SQGRGDG

SEQ ID NO: 38767 - protein, 7 aa, synthetic construct
VGNRAGP

SEQ ID NO: 38768 - protein, 7 aa, synthetic construct
TRVKDLE

SEQ ID NO: 38769 - protein, 7 aa, synthetic construct
KQGAKQE

SEQ ID NO: 38770 - protein, 7 aa, synthetic construct
MNGSARG

SEQ ID NO: 38771 - protein, 7 aa, synthetic construct
AKMYTVD

SEQ ID NO: 38772 - protein, 7 aa, synthetic construct
RHHGYME

SEQ ID NO: 38773 - protein, 7 aa, synthetic construct
MVGMERS

SEQ ID NO: 38774 - protein, 7 aa, synthetic construct
QKTTAHP

SEQ ID NO: 38775 - protein, 7 aa, synthetic construct
VGKAIVG

SEQ ID NO: 38776 - protein, 7 aa, synthetic construct
NDMKYMK

SEQ ID NO: 38777 - protein, 7 aa, synthetic construct
YKNLTGA

SEQ ID NO: 38778 - protein, 7 aa, synthetic construct
LGPRTTG

SEQ ID NO: 38779 - protein, 7 aa, synthetic construct
HFTETSR

SEQ ID NO: 38780 - protein, 7 aa, synthetic construct
NKPTGQG

SEQ ID NO: 38781 - protein, 7 aa, synthetic construct
TPKGYQG

SEQ ID NO: 38782 - protein, 7 aa, synthetic construct
VGIKKDP

SEQ ID NO: 38783 - protein, 7 aa, synthetic construct
YGTKSTP

SEQ ID NO: 38784 - protein, 7 aa, synthetic construct
WKQHDNN

SEQ ID NO: 38785 - protein, 7 aa, synthetic construct
KKPGGVP

SEQ ID NO: 38786 - protein, 7 aa, synthetic construct
GNQQKNA

SEQ ID NO: 38787 - protein, 7 aa, synthetic construct
MNKNMQG

SEQ ID NO: 38788 - protein, 7 aa, synthetic construct
LPGQRLS

SEQ ID NO: 38789 - protein, 7 aa, synthetic construct
SMKSIGA

SEQ ID NO: 38790 - protein, 7 aa, synthetic construct
KTKMNED

SEQ ID NO: 38791 - protein, 7 aa, synthetic construct
ATSIRQG

SEQ ID NO: 38792 - protein, 7 aa, synthetic construct
MPKMEHW

SEQ ID NO: 38793 - protein, 7 aa, synthetic construct
SANHRPE

SEQ ID NO: 38794 - protein, 7 aa, synthetic construct
ISSKKDG

SEQ ID NO: 38795 - protein, 7 aa, synthetic construct
NKFQSPA

SEQ ID NO: 38796 - protein, 7 aa, synthetic construct
MPRTFQE

SEQ ID NO: 38797 - protein, 7 aa, synthetic construct
GNHPIIP

SEQ ID NO: 38798 - protein, 7 aa, synthetic construct
MMKVSAP

SEQ ID NO: 38799 - protein, 7 aa, synthetic construct
NRAPTGA

SEQ ID NO: 38800 - protein, 7 aa, synthetic construct
KTQGSMP

SEQ ID NO: 38801 - protein, 7 aa, synthetic construct
SAGIKIG

SEQ ID NO: 38802 - protein, 7 aa, synthetic construct
AKQVPAG

SEQ ID NO: 38803 - protein, 7 aa, synthetic construct
TRKEFQS

SEQ ID NO: 38804 - protein, 7 aa, synthetic construct
GELSPYP

SEQ ID NO: 38805 - protein, 7 aa, synthetic construct
QTKQGKD

SEQ ID NO: 38806 - protein, 7 aa, synthetic construct
GVKATSG

SEQ ID NO: 38807 - protein, 7 aa, synthetic construct
GKQSIKE

SEQ ID NO: 38808 - protein, 7 aa, synthetic construct
TVSTHQA

SEQ ID NO: 38809 - protein, 7 aa, synthetic construct
MRTPNIS

SEQ ID NO: 38810 - protein, 7 aa, synthetic construct
GLRAEPK

SEQ ID NO: 38811 - protein, 7 aa, synthetic construct
SMKHNQP

SEQ ID NO: 38812 - protein, 7 aa, synthetic construct
NLSKKDQ

SEQ ID NO: 38813 - protein, 7 aa, synthetic construct
SLHITTA

SEQ ID NO: 38814 - protein, 7 aa, synthetic construct
LTTGGVG

SEQ ID NO: 38815 - protein, 7 aa, synthetic construct
MRAGAQM

SEQ ID NO: 38816 - protein, 7 aa, synthetic construct
GAPNMSG

SEQ ID NO: 38817 - protein, 7 aa, synthetic construct
MKVKYDS

SEQ ID NO: 38818 - protein, 7 aa, synthetic construct
RDQMNGK

SEQ ID NO: 38819 - protein, 7 aa, synthetic construct
TDKRQQA

SEQ ID NO: 38820 - protein, 7 aa, synthetic construct
KMMNGEG

SEQ ID NO: 38821 - protein, 7 aa, synthetic construct
SMPGQAP

SEQ ID NO: 38822 - protein, 7 aa, synthetic construct
HIVKAGH

SEQ ID NO: 38823 - protein, 7 aa, synthetic construct
TRTHGSD

SEQ ID NO: 38824 - protein, 7 aa, synthetic construct
MRDSPPP

SEQ ID NO: 38825 - protein, 7 aa, synthetic construct
NSNIRNS

SEQ ID NO: 38826 - protein, 7 aa, synthetic construct
HQGKLSG

SEQ ID NO: 38827 - protein, 7 aa, synthetic construct
VSTKNGM

SEQ ID NO: 38828 - protein, 7 aa, synthetic construct
YAMNKGH

SEQ ID NO: 38829 - protein, 7 aa, synthetic construct
DNHITMK

SEQ ID NO: 38830 - protein, 7 aa, synthetic construct
GAKQGSN

SEQ ID NO: 38831 - protein, 7 aa, synthetic construct
PSIGGKQ

SEQ ID NO: 38832 - protein, 7 aa, synthetic construct
RGISGNI

SEQ ID NO: 38833 - protein, 7 aa, synthetic construct
SQHSAYS

SEQ ID NO: 38834 - protein, 7 aa, synthetic construct
RSNSAQP

SEQ ID NO: 38835 - protein, 7 aa, synthetic construct
MGKQLTQ

SEQ ID NO: 38836 - protein, 7 aa, synthetic construct
QFLQGKA

SEQ ID NO: 38837 - protein, 7 aa, synthetic construct
TPKASNG

SEQ ID NO: 38838 - protein, 7 aa, synthetic construct
QTKGGQG

SEQ ID NO: 38839 - protein, 7 aa, synthetic construct
KTSRDDG

SEQ ID NO: 38840 - protein, 7 aa, synthetic construct
QQTYTKN

SEQ ID NO: 38841 - protein, 7 aa, synthetic construct
LKVQGPH

SEQ ID NO: 38842 - protein, 7 aa, synthetic construct
VGPLAGG

SEQ ID NO: 38843 - protein, 7 aa, synthetic construct
NGNKAQG

SEQ ID NO: 38844 - protein, 7 aa, synthetic construct
THAHIVS

SEQ ID NO: 38845 - protein, 7 aa, synthetic construct
QRGMNGD

SEQ ID NO: 38846 - protein, 7 aa, synthetic construct
ERQGGPK

SEQ ID NO: 38847 - protein, 7 aa, synthetic construct
YIKHAHD

SEQ ID NO: 38848 - protein, 7 aa, synthetic construct
AKENKYV

SEQ ID NO: 38849 - protein, 7 aa, synthetic construct
GASMKTG

SEQ ID NO: 38850 - protein, 7 aa, synthetic construct
QKNTTTS

SEQ ID NO: 38851 - protein, 7 aa, synthetic construct
QKYGQAP

SEQ ID NO: 38852 - protein, 7 aa, synthetic construct
KASMGMN

SEQ ID NO: 38853 - protein, 7 aa, synthetic construct
PYKMQAE

SEQ ID NO: 38854 - protein, 7 aa, synthetic construct
FRNIHDE

SEQ ID NO: 38855 - protein, 7 aa, synthetic construct
DWTGKRT

SEQ ID NO: 38856 - protein, 7 aa, synthetic construct
FATTQNW

SEQ ID NO: 38857 - protein, 7 aa, synthetic construct
TNGRIQT

SEQ ID NO: 38858 - protein, 7 aa, synthetic construct
FGNAKQT

SEQ ID NO: 38859 - protein, 7 aa, synthetic construct
SHRDPTS

SEQ ID NO: 38860 - protein, 7 aa, synthetic construct
AKAANTY

SEQ ID NO: 38861 - protein, 7 aa, synthetic construct
QKAAVKD

SEQ ID NO: 38862 - protein, 7 aa, synthetic construct
INPNSMS

SEQ ID NO: 38863 - protein, 7 aa, synthetic construct
EQQIRIA

SEQ ID NO: 38864 - protein, 7 aa, synthetic construct
MSGNRVG

SEQ ID NO: 38865 - protein, 7 aa, synthetic construct
SHKRDED

SEQ ID NO: 38866 - protein, 7 aa, synthetic construct
YDQTARA

SEQ ID NO: 38867 - protein, 7 aa, synthetic construct
TRSATAG

SEQ ID NO: 38868 - protein, 7 aa, synthetic construct
RQPVDRV

SEQ ID NO: 38869 - protein, 7 aa, synthetic construct
TRNNMQD

SEQ ID NO: 38870 - protein, 7 aa, synthetic construct
STQRAAG

SEQ ID NO: 38871 - protein, 7 aa, synthetic construct
STGNSRS

SEQ ID NO: 38872 - protein, 7 aa, synthetic construct
KNTSIAA

SEQ ID NO: 38873 - protein, 7 aa, synthetic construct
HPAKGNP

SEQ ID NO: 38874 - protein, 7 aa, synthetic construct
RYQPNDK

SEQ ID NO: 38875 - protein, 7 aa, synthetic construct
YLDYINA

SEQ ID NO: 38876 - protein, 7 aa, synthetic construct
LTKPQDR

SEQ ID NO: 38877 - protein, 7 aa, synthetic construct
IRTIEME

SEQ ID NO: 38878 - protein, 7 aa, synthetic construct
PSNRTGD

SEQ ID NO: 38879 - protein, 7 aa, synthetic construct
GQKSVSS

SEQ ID NO: 38880 - protein, 7 aa, synthetic construct
GMRGEAS

SEQ ID NO: 38881 - protein, 7 aa, synthetic construct
IATYKNS

SEQ ID NO: 38882 - protein, 7 aa, synthetic construct
LSVNIPP

SEQ ID NO: 38883 - protein, 7 aa, synthetic construct
HHPHFTG

SEQ ID NO: 38884 - protein, 7 aa, synthetic construct
KLKGTVD

SEQ ID NO: 38885 - protein, 7 aa, synthetic construct
TLGSLKL

SEQ ID NO: 38886 - protein, 7 aa, synthetic construct
YGSTKMN

SEQ ID NO: 38887 - protein, 7 aa, synthetic construct
KQSAPQN

SEQ ID NO: 38888 - protein, 7 aa, synthetic construct
LNKHIMN

SEQ ID NO: 38889 - protein, 7 aa, synthetic construct
SKTSQQP

SEQ ID NO: 38890 - protein, 7 aa, synthetic construct
ARQHNQT

SEQ ID NO: 38891 - protein, 7 aa, synthetic construct
FDHHTPP

SEQ ID NO: 38892 - protein, 7 aa, synthetic construct
PYPGGRD

SEQ ID NO: 38893 - protein, 7 aa, synthetic construct
NAKATFI

SEQ ID NO: 38894 - protein, 7 aa, synthetic construct
KIRDATS

SEQ ID NO: 38895 - protein, 7 aa, synthetic construct
MSSGSKA

SEQ ID NO: 38896 - protein, 7 aa, synthetic construct
NKAGPNM

SEQ ID NO: 38897 - protein, 7 aa, synthetic construct
NMGAMRM

SEQ ID NO: 38898 - protein, 7 aa, synthetic construct
TSRSQGM

SEQ ID NO: 38899 - protein, 7 aa, synthetic construct
RQPNQTG

SEQ ID NO: 38900 - protein, 7 aa, synthetic construct
NMHTKSD

SEQ ID NO: 38901 - protein, 7 aa, synthetic construct
MGPRTGA

SEQ ID NO: 38902 - protein, 7 aa, synthetic construct
GGHKEVG

SEQ ID NO: 38903 - protein, 7 aa, synthetic construct
VSGMKTG

SEQ ID NO: 38904 - protein, 7 aa, synthetic construct
VKIPNFI

SEQ ID NO: 38905 - protein, 7 aa, synthetic construct
HFAHGHA

SEQ ID NO: 38906 - protein, 7 aa, synthetic construct
ERKTMAA

SEQ ID NO: 38907 - protein, 7 aa, synthetic construct
HGRPSLE

SEQ ID NO: 38908 - protein, 7 aa, synthetic construct
MVSTMKG

SEQ ID NO: 38909 - protein, 7 aa, synthetic construct
NEYQRAG

SEQ ID NO: 38910 - protein, 7 aa, synthetic construct
VKSVQSG

SEQ ID NO: 38911 - protein, 7 aa, synthetic construct
MVSGRQI

SEQ ID NO: 38912 - protein, 7 aa, synthetic construct
VVKYEKG

SEQ ID NO: 38913 - protein, 7 aa, synthetic construct
QLKWSVE

SEQ ID NO: 38914 - protein, 7 aa, synthetic construct
GQSVHNM

SEQ ID NO: 38915 - protein, 7 aa, synthetic construct
SNQVHHH

SEQ ID NO: 38916 - protein, 7 aa, synthetic construct
TGPTRRD

SEQ ID NO: 38917 - protein, 7 aa, synthetic construct
QQSGGNM

SEQ ID NO: 38918 - protein, 7 aa, synthetic construct
NPGKAMS

SEQ ID NO: 38919 - protein, 7 aa, synthetic construct
KFNNQGA

SEQ ID NO: 38920 - protein, 7 aa, synthetic construct
VHAFGVD

SEQ ID NO: 38921 - protein, 7 aa, synthetic construct
SKVSTGG

SEQ ID NO: 38922 - protein, 7 aa, synthetic construct
VRTGGAD

SEQ ID NO: 38923 - protein, 7 aa, synthetic construct
YGNMNNS

SEQ ID NO: 38924 - protein, 7 aa, synthetic construct
KTNMVSG

SEQ ID NO: 38925 - protein, 7 aa, synthetic construct
QVVKFPG

SEQ ID NO: 38926 - protein, 7 aa, synthetic construct
RAGMNYI

SEQ ID NO: 38927 - protein, 7 aa, synthetic construct
TGKQTTA

SEQ ID NO: 38928 - protein, 7 aa, synthetic construct
LSGMRQV

SEQ ID NO: 38929 - protein, 7 aa, synthetic construct
GTGNNKN

SEQ ID NO: 38930 - protein, 7 aa, synthetic construct
HTKGPNN

SEQ ID NO: 38931 - protein, 7 aa, synthetic construct
YTAKSSL

SEQ ID NO: 38932 - protein, 7 aa, synthetic construct
EKMTPKS

SEQ ID NO: 38933 - protein, 7 aa, synthetic construct
QIPQNQG

SEQ ID NO: 38934 - protein, 7 aa, synthetic construct
AQKTSAA

SEQ ID NO: 38935 - protein, 7 aa, synthetic construct
INNSMPK

SEQ ID NO: 38936 - protein, 7 aa, synthetic construct
TRGTQDG

SEQ ID NO: 38937 - protein, 7 aa, synthetic construct
NTGVNKG

SEQ ID NO: 38938 - protein, 7 aa, synthetic construct
MRNTEQR

SEQ ID NO: 38939 - protein, 7 aa, synthetic construct
FNKAAHM

SEQ ID NO: 38940 - protein, 7 aa, synthetic construct
GGSIRET

SEQ ID NO: 38941 - protein, 7 aa, synthetic construct
GPPNKSL

SEQ ID NO: 38942 - protein, 7 aa, synthetic construct
WGQRGND

SEQ ID NO: 38943 - protein, 7 aa, synthetic construct
TKSAAKE

SEQ ID NO: 38944 - protein, 7 aa, synthetic construct
NAKYSQG

SEQ ID NO: 38945 - protein, 7 aa, synthetic construct
LTRPNSF

SEQ ID NO: 38946 - protein, 7 aa, synthetic construct
VVKGQGQ

SEQ ID NO: 38947 - protein, 7 aa, synthetic construct
WIQKHDM

SEQ ID NO: 38948 - protein, 7 aa, synthetic construct
VKTNMSG

SEQ ID NO: 38949 - protein, 7 aa, synthetic construct
SAPTHQG

SEQ ID NO: 38950 - protein, 7 aa, synthetic construct
QAALHKT

SEQ ID NO: 38951 - protein, 7 aa, synthetic construct
PRSTGQG

SEQ ID NO: 38952 - protein, 7 aa, synthetic construct
NYNHIQN

SEQ ID NO: 38953 - protein, 7 aa, synthetic construct
NLNSIRG

SEQ ID NO: 38954 - protein, 7 aa, synthetic construct
RMDRMGD

SEQ ID NO: 38955 - protein, 7 aa, synthetic construct
FPKTADG

SEQ ID NO: 38956 - protein, 7 aa, synthetic construct
KKVANQE

SEQ ID NO: 38957 - protein, 7 aa, synthetic construct
VRNMGQA

SEQ ID NO: 38958 - protein, 7 aa, synthetic construct
SKGQVAM

SEQ ID NO: 38959 - protein, 7 aa, synthetic construct
PRQSSGM

SEQ ID NO: 38960 - protein, 7 aa, synthetic construct
TEHGHKA

SEQ ID NO: 38961 - protein, 7 aa, synthetic construct
RREGLGM

SEQ ID NO: 38962 - protein, 7 aa, synthetic construct
QRDTHYA

SEQ ID NO: 38963 - protein, 7 aa, synthetic construct
QGRPETF

SEQ ID NO: 38964 - protein, 7 aa, synthetic construct
ILSAKDT

SEQ ID NO: 38965 - protein, 7 aa, synthetic construct
LGKTSGG

SEQ ID NO: 38966 - protein, 7 aa, synthetic construct
HGAYNTP

SEQ ID NO: 38967 - protein, 7 aa, synthetic construct
DGRSSVA

SEQ ID NO: 38968 - protein, 7 aa, synthetic construct
TYKNHLP

SEQ ID NO: 38969 - protein, 7 aa, synthetic construct
KSVSNQA

SEQ ID NO: 38970 - protein, 7 aa, synthetic construct
QDGKRQF

SEQ ID NO: 38971 - protein, 7 aa, synthetic construct
ESRSNQG

SEQ ID NO: 38972 - protein, 7 aa, synthetic construct
TKPAMAG

SEQ ID NO: 38973 - protein, 7 aa, synthetic construct
PKNSNGS

SEQ ID NO: 38974 - protein, 7 aa, synthetic construct
MPQRRID

SEQ ID NO: 38975 - protein, 7 aa, synthetic construct
PYRSSEG

SEQ ID NO: 38976 - protein, 7 aa, synthetic construct
YHPKYTG

SEQ ID NO: 38977 - protein, 7 aa, synthetic construct
TPKNQPS

SEQ ID NO: 38978 - protein, 7 aa, synthetic construct
YPAGATN

SEQ ID NO: 38979 - protein, 7 aa, synthetic construct
KGMAMNS

SEQ ID NO: 38980 - protein, 7 aa, synthetic construct
LNAARPP

SEQ ID NO: 38981 - protein, 7 aa, synthetic construct
QKPVPMQ

SEQ ID NO: 38982 - protein, 7 aa, synthetic construct
PNGQRQG

SEQ ID NO: 38983 - protein, 7 aa, synthetic construct
QPKSAHT

SEQ ID NO: 38984 - protein, 7 aa, synthetic construct
LGNKYNG

SEQ ID NO: 38985 - protein, 7 aa, synthetic construct
SVSPSVK

SEQ ID NO: 38986 - protein, 7 aa, synthetic construct
WHPKAQP

SEQ ID NO: 38987 - protein, 7 aa, synthetic construct
GKATMRE

SEQ ID NO: 38988 - protein, 7 aa, synthetic construct
NHSAKVV

SEQ ID NO: 38989 - protein, 7 aa, synthetic construct
KNQPGMA

SEQ ID NO: 38990 - protein, 7 aa, synthetic construct
KQNIGAM

SEQ ID NO: 38991 - protein, 7 aa, synthetic construct
TRIHGMA

SEQ ID NO: 38992 - protein, 7 aa, synthetic construct
TGSSAKL

SEQ ID NO: 38993 - protein, 7 aa, synthetic construct
NQKPSQG

SEQ ID NO: 38994 - protein, 7 aa, synthetic construct
KSINSQI

SEQ ID NO: 38995 - protein, 7 aa, synthetic construct
LNTNKLY

SEQ ID NO: 38996 - protein, 7 aa, synthetic construct
NHYMVKG

SEQ ID NO: 38997 - protein, 7 aa, synthetic construct
GALQSRQ

SEQ ID NO: 38998 - protein, 7 aa, synthetic construct
MHGPNVA

SEQ ID NO: 38999 - protein, 7 aa, synthetic construct
HGKATSE

SEQ ID NO: 39000 - protein, 7 aa, synthetic construct
SSQTKLP

SEQ ID NO: 39001 - protein, 7 aa, synthetic construct
YANKQYT

SEQ ID NO: 39002 - protein, 7 aa, synthetic construct
QHPKYQM

SEQ ID NO: 39003 - protein, 7 aa, synthetic construct
RNPNVNA

SEQ ID NO: 39004 - protein, 7 aa, synthetic construct
HSQGMKM

SEQ ID NO: 39005 - protein, 7 aa, synthetic construct
TKMNGSG

SEQ ID NO: 39006 - protein, 7 aa, synthetic construct
PFKEKGM

SEQ ID NO: 39007 - protein, 7 aa, synthetic construct
SQRSHIG

SEQ ID NO: 39008 - protein, 7 aa, synthetic construct
RIGARME

SEQ ID NO: 39009 - protein, 7 aa, synthetic construct
SQNRQSF

SEQ ID NO: 39010 - protein, 7 aa, synthetic construct
PTRQSNG

SEQ ID NO: 39011 - protein, 7 aa, synthetic construct
PPKQSGG

SEQ ID NO: 39012 - protein, 7 aa, synthetic construct
QSPNRAA

SEQ ID NO: 39013 - protein, 7 aa, synthetic construct
WGRDTRQ

SEQ ID NO: 39014 - protein, 7 aa, synthetic construct
HPGGREG

SEQ ID NO: 39015 - protein, 7 aa, synthetic construct
GQGSQKA

SEQ ID NO: 39016 - protein, 7 aa, synthetic construct
LPSRGDH

SEQ ID NO: 39017 - protein, 7 aa, synthetic construct
VQMKSNA

SEQ ID NO: 39018 - protein, 7 aa, synthetic construct
HFDMMKN

SEQ ID NO: 39019 - protein, 7 aa, synthetic construct
SQPPFLG

SEQ ID NO: 39020 - protein, 7 aa, synthetic construct
NGAAKAG

SEQ ID NO: 39021 - protein, 7 aa, synthetic construct
VGHRGDG

SEQ ID NO: 39022 - protein, 7 aa, synthetic construct
GTREKER

SEQ ID NO: 39023 - protein, 7 aa, synthetic construct
TNRAPGL

SEQ ID NO: 39024 - protein, 7 aa, synthetic construct
RPTGMSG

SEQ ID NO: 39025 - protein, 7 aa, synthetic construct
KYPMGKD

SEQ ID NO: 39026 - protein, 7 aa, synthetic construct
QPTMHSG

SEQ ID NO: 39027 - protein, 7 aa, synthetic construct
PGKSTTG

SEQ ID NO: 39028 - protein, 7 aa, synthetic construct
YERHSIN

SEQ ID NO: 39029 - protein, 7 aa, synthetic construct
TAVKYLE

SEQ ID NO: 39030 - protein, 7 aa, synthetic construct
ALPKDGH

SEQ ID NO: 39031 - protein, 7 aa, synthetic construct
NSKQNAG

SEQ ID NO: 39032 - protein, 7 aa, synthetic construct
QQTGRSP

SEQ ID NO: 39033 - protein, 7 aa, synthetic construct
KPAGGGS

SEQ ID NO: 39034 - protein, 7 aa, synthetic construct
FTRQANS

SEQ ID NO: 39035 - protein, 7 aa, synthetic construct
LTNASSH

SEQ ID NO: 39036 - protein, 7 aa, synthetic construct
QKNVPTA

SEQ ID NO: 39037 - protein, 7 aa, synthetic construct
NYNDKKL

SEQ ID NO: 39038 - protein, 7 aa, synthetic construct
FGQTKGG

SEQ ID NO: 39039 - protein, 7 aa, synthetic construct
MKSSFTG

SEQ ID NO: 39040 - protein, 7 aa, synthetic construct
ERGRGTE

SEQ ID NO: 39041 - protein, 7 aa, synthetic construct
LANRNEH

SEQ ID NO: 39042 - protein, 7 aa, synthetic construct
ARTTAGG

SEQ ID NO: 39043 - protein, 7 aa, synthetic construct
SKNGNAA

SEQ ID NO: 39044 - protein, 7 aa, synthetic construct
RAVAAHG

SEQ ID NO: 39045 - protein, 7 aa, synthetic construct
RHYDPKD

SEQ ID NO: 39046 - protein, 7 aa, synthetic construct
TLQFAGM

SEQ ID NO: 39047 - protein, 7 aa, synthetic construct
YAKSTQA

SEQ ID NO: 39048 - protein, 7 aa, synthetic construct
MSNGRVG

SEQ ID NO: 39049 - protein, 7 aa, synthetic construct
VQHVRHS

SEQ ID NO: 39050 - protein, 7 aa, synthetic construct
NKPAYQG

SEQ ID NO: 39051 - protein, 7 aa, synthetic construct
ATPGARG

SEQ ID NO: 39052 - protein, 7 aa, synthetic construct
SANTTFR

SEQ ID NO: 39053 - protein, 7 aa, synthetic construct
KPAGQGQ

SEQ ID NO: 39054 - protein, 7 aa, synthetic construct
NHKTHEG

SEQ ID NO: 39055 - protein, 7 aa, synthetic construct
NKSYSSG

SEQ ID NO: 39056 - protein, 7 aa, synthetic construct
MNQHMIG

SEQ ID NO: 39057 - protein, 7 aa, synthetic construct
HHQMGQV

SEQ ID NO: 39058 - protein, 7 aa, synthetic construct
RQSSVAP

SEQ ID NO: 39059 - protein, 7 aa, synthetic construct
LYKEVPG

SEQ ID NO: 39060 - protein, 7 aa, synthetic construct
YGVTHKE

SEQ ID NO: 39061 - protein, 7 aa, synthetic construct
RTNQTSS

SEQ ID NO: 39062 - protein, 7 aa, synthetic construct
TPSHIAG

SEQ ID NO: 39063 - protein, 7 aa, synthetic construct
MTLRSVP

SEQ ID NO: 39064 - protein, 7 aa, synthetic construct
SMKGAAG

SEQ ID NO: 39065 - protein, 7 aa, synthetic construct
AWNTAGP

SEQ ID NO: 39066 - protein, 7 aa, synthetic construct
MNNSMGG

SEQ ID NO: 39067 - protein, 7 aa, synthetic construct
KTQNGSA

SEQ ID NO: 39068 - protein, 7 aa, synthetic construct
HDRQRPG

SEQ ID NO: 39069 - protein, 7 aa, synthetic construct
TTKSKDA

SEQ ID NO: 39070 - protein, 7 aa, synthetic construct
QNSQAKS

SEQ ID NO: 39071 - protein, 7 aa, synthetic construct
QIGAKIE

SEQ ID NO: 39072 - protein, 7 aa, synthetic construct
NRVSTNA

SEQ ID NO: 39073 - protein, 7 aa, synthetic construct
VPKNIKE

SEQ ID NO: 39074 - protein, 7 aa, synthetic construct
TKTAPAV

SEQ ID NO: 39075 - protein, 7 aa, synthetic construct
NKSSASA

SEQ ID NO: 39076 - protein, 7 aa, synthetic construct
TMQRQSS

SEQ ID NO: 39077 - protein, 7 aa, synthetic construct
MVVNTQG

SEQ ID NO: 39078 - protein, 7 aa, synthetic construct
STQRQVG

SEQ ID NO: 39079 - protein, 7 aa, synthetic construct
TGHKLTG

SEQ ID NO: 39080 - protein, 7 aa, synthetic construct
TPRTGNP

SEQ ID NO: 39081 - protein, 7 aa, synthetic construct
GEKKTGN

SEQ ID NO: 39082 - protein, 7 aa, synthetic construct
GQDQRKD

SEQ ID NO: 39083 - protein, 7 aa, synthetic construct
NLKTSQG

SEQ ID NO: 39084 - protein, 7 aa, synthetic construct
TKPMKNE

SEQ ID NO: 39085 - protein, 7 aa, synthetic construct
SKAHVVG

SEQ ID NO: 39086 - protein, 7 aa, synthetic construct
DNRKSTY

SEQ ID NO: 39087 - protein, 7 aa, synthetic construct
TRGPPSN

SEQ ID NO: 39088 - protein, 7 aa, synthetic construct
FVHLKGS

SEQ ID NO: 39089 - protein, 7 aa, synthetic construct
VKNMSQV

SEQ ID NO: 39090 - protein, 7 aa, synthetic construct
GPEMRMQ

SEQ ID NO: 39091 - protein, 7 aa, synthetic construct
NAGRTSA

SEQ ID NO: 39092 - protein, 7 aa, synthetic construct
FMAHKVA

SEQ ID NO: 39093 - protein, 7 aa, synthetic construct
HGMVITG

SEQ ID NO: 39094 - protein, 7 aa, synthetic construct
RQHQVLD

SEQ ID NO: 39095 - protein, 7 aa, synthetic construct
VAQNRPQ

SEQ ID NO: 39096 - protein, 7 aa, synthetic construct
NQKASSP

SEQ ID NO: 39097 - protein, 7 aa, synthetic construct
MRGSSAA

SEQ ID NO: 39098 - protein, 7 aa, synthetic construct
KSSSAGY

SEQ ID NO: 39099 - protein, 7 aa, synthetic construct
MARTMDV

SEQ ID NO: 39100 - protein, 7 aa, synthetic construct
MVMNEKR

SEQ ID NO: 39101 - protein, 7 aa, synthetic construct
KNNGNSP

SEQ ID NO: 39102 - protein, 7 aa, synthetic construct
HTLKNIQ

SEQ ID NO: 39103 - protein, 7 aa, synthetic construct
TAAKMAS

SEQ ID NO: 39104 - protein, 7 aa, synthetic construct
PPAGGHH

SEQ ID NO: 39105 - protein, 7 aa, synthetic construct
HWKDPHG

SEQ ID NO: 39106 - protein, 7 aa, synthetic construct
KETRTVG

SEQ ID NO: 39107 - protein, 7 aa, synthetic construct
LFPREHT

SEQ ID NO: 39108 - protein, 7 aa, synthetic construct
AKSKLTE

SEQ ID NO: 39109 - protein, 7 aa, synthetic construct
GFADQHK

SEQ ID NO: 39110 - protein, 7 aa, synthetic construct
FQSGGQS

SEQ ID NO: 39111 - protein, 7 aa, synthetic construct
KGNLGSV

SEQ ID NO: 39112 - protein, 7 aa, synthetic construct
NFSKAGG

SEQ ID NO: 39113 - protein, 7 aa, synthetic construct
ITKFSHN

SEQ ID NO: 39114 - protein, 7 aa, synthetic construct
NHARSNP

SEQ ID NO: 39115 - protein, 7 aa, synthetic construct
GFLGQHA

SEQ ID NO: 39116 - protein, 7 aa, synthetic construct
TQGVKKD

SEQ ID NO: 39117 - protein, 7 aa, synthetic construct
MARTQAG

SEQ ID NO: 39118 - protein, 7 aa, synthetic construct
VKNTSGP

SEQ ID NO: 39119 - protein, 7 aa, synthetic construct
SRAISHM

SEQ ID NO: 39120 - protein, 7 aa, synthetic construct
KATNQMG

SEQ ID NO: 39121 - protein, 7 aa, synthetic construct
REITGKG

SEQ ID NO: 39122 - protein, 7 aa, synthetic construct
LETKTKL

SEQ ID NO: 39123 - protein, 7 aa, synthetic construct
QKKDTSS

SEQ ID NO: 39124 - protein, 7 aa, synthetic construct
QNRNNGG

SEQ ID NO: 39125 - protein, 7 aa, synthetic construct
EKKQNQA

SEQ ID NO: 39126 - protein, 7 aa, synthetic construct
PKTQSIG

SEQ ID NO: 39127 - protein, 7 aa, synthetic construct
KAKEINT

SEQ ID NO: 39128 - protein, 7 aa, synthetic construct
AKPGKPA

SEQ ID NO: 39129 - protein, 7 aa, synthetic construct
NQKSQAG

SEQ ID NO: 39130 - protein, 7 aa, synthetic construct
QGPAYKI

SEQ ID NO: 39131 - protein, 7 aa, synthetic construct
FGIGDTK

SEQ ID NO: 39132 - protein, 7 aa, synthetic construct
RNNIHIQ

SEQ ID NO: 39133 - protein, 7 aa, synthetic construct
KNSDKQG

SEQ ID NO: 39134 - protein, 7 aa, synthetic construct
ISKFIDR

SEQ ID NO: 39135 - protein, 7 aa, synthetic construct
QKQNGQP

SEQ ID NO: 39136 - protein, 7 aa, synthetic construct
GRFSQSM

SEQ ID NO: 39137 - protein, 7 aa, synthetic construct
LYLSTNP

SEQ ID NO: 39138 - protein, 7 aa, synthetic construct
NRNSGNV

SEQ ID NO: 39139 - protein, 7 aa, synthetic construct
QMARPMQ

SEQ ID NO: 39140 - protein, 7 aa, synthetic construct
DMSAKRE

SEQ ID NO: 39141 - protein, 7 aa, synthetic construct
AHSTKSP

SEQ ID NO: 39142 - protein, 7 aa, synthetic construct
VQAQKSP

SEQ ID NO: 39143 - protein, 7 aa, synthetic construct
WRDGKGH

SEQ ID NO: 39144 - protein, 7 aa, synthetic construct
TAQNKTP

SEQ ID NO: 39145 - protein, 7 aa, synthetic construct
QRKEVVS

SEQ ID NO: 39146 - protein, 7 aa, synthetic construct
RPGSNMV

SEQ ID NO: 39147 - protein, 7 aa, synthetic construct
VRNQQQA

SEQ ID NO: 39148 - protein, 7 aa, synthetic construct
NAPRIGA

SEQ ID NO: 39149 - protein, 7 aa, synthetic construct
PKYNEQG

SEQ ID NO: 39150 - protein, 7 aa, synthetic construct
FQTTKPD

SEQ ID NO: 39151 - protein, 7 aa, synthetic construct
QKEKMSG

SEQ ID NO: 39152 - protein, 7 aa, synthetic construct
MWDQGLA

SEQ ID NO: 39153 - protein, 7 aa, synthetic construct
KGARFDS

SEQ ID NO: 39154 - protein, 7 aa, synthetic construct
YKTNTTN

SEQ ID NO: 39155 - protein, 7 aa, synthetic construct
NREGVHF

SEQ ID NO: 39156 - protein, 7 aa, synthetic construct
YGASKTP

SEQ ID NO: 39157 - protein, 7 aa, synthetic construct
KEQANTA

SEQ ID NO: 39158 - protein, 7 aa, synthetic construct
KKETFAG

SEQ ID NO: 39159 - protein, 7 aa, synthetic construct
LSNPKTP

SEQ ID NO: 39160 - protein, 7 aa, synthetic construct
SGRHSDD

SEQ ID NO: 39161 - protein, 7 aa, synthetic construct
SSVKRDV

SEQ ID NO: 39162 - protein, 7 aa, synthetic construct
YAGQSIT

SEQ ID NO: 39163 - protein, 7 aa, synthetic construct
RVGAGQV

SEQ ID NO: 39164 - protein, 7 aa, synthetic construct
TQTGRSP

SEQ ID NO: 39165 - protein, 7 aa, synthetic construct
MHTATTM

SEQ ID NO: 39166 - protein, 7 aa, synthetic construct
YHKQHNE

SEQ ID NO: 39167 - protein, 7 aa, synthetic construct
DRRDGYS

SEQ ID NO: 39168 - protein, 7 aa, synthetic construct
KTSGVGY

SEQ ID NO: 39169 - protein, 7 aa, synthetic construct
TTTQPYA

SEQ ID NO: 39170 - protein, 7 aa, synthetic construct
TIVQGQP

SEQ ID NO: 39171 - protein, 7 aa, synthetic construct
LGKHDAF

SEQ ID NO: 39172 - protein, 7 aa, synthetic construct
MTEITRN

SEQ ID NO: 39173 - protein, 7 aa, synthetic construct
IKPRPYE

SEQ ID NO: 39174 - protein, 7 aa, synthetic construct
LKEGKLG

SEQ ID NO: 39175 - protein, 7 aa, synthetic construct
VNPRHDA

SEQ ID NO: 39176 - protein, 7 aa, synthetic construct
MKFDHAN

SEQ ID NO: 39177 - protein, 7 aa, synthetic construct
APRVANV

SEQ ID NO: 39178 - protein, 7 aa, synthetic construct
IPFPSQE

SEQ ID NO: 39179 - protein, 7 aa, synthetic construct
SKIGNPV

SEQ ID NO: 39180 - protein, 7 aa, synthetic construct
FVPTRQQ

SEQ ID NO: 39181 - protein, 7 aa, synthetic construct
YPGATLN

SEQ ID NO: 39182 - protein, 7 aa, synthetic construct
PYKVSTQ

SEQ ID NO: 39183 - protein, 7 aa, synthetic construct
MGKHPIT

SEQ ID NO: 39184 - protein, 7 aa, synthetic construct
QTSRQGH

SEQ ID NO: 39185 - protein, 7 aa, synthetic construct
NTAAGHS

SEQ ID NO: 39186 - protein, 7 aa, synthetic construct
REKGGSW

SEQ ID NO: 39187 - protein, 7 aa, synthetic construct
GLAVGQG

SEQ ID NO: 39188 - protein, 7 aa, synthetic construct
TAKTGGA

SEQ ID NO: 39189 - protein, 7 aa, synthetic construct
QVKNGGG

SEQ ID NO: 39190 - protein, 7 aa, synthetic construct
YNGGMAS

SEQ ID NO: 39191 - protein, 7 aa, synthetic construct
AKTMSQN

SEQ ID NO: 39192 - protein, 7 aa, synthetic construct
VRNSEPG

SEQ ID NO: 39193 - protein, 7 aa, synthetic construct
TRINMSQ

SEQ ID NO: 39194 - protein, 7 aa, synthetic construct
SKPAVSA

SEQ ID NO: 39195 - protein, 7 aa, synthetic construct
PPTQMER

SEQ ID NO: 39196 - protein, 7 aa, synthetic construct
FLKMTSA

SEQ ID NO: 39197 - protein, 7 aa, synthetic construct
KSQQSIT

SEQ ID NO: 39198 - protein, 7 aa, synthetic construct
VTARPTN

SEQ ID NO: 39199 - protein, 7 aa, synthetic construct
TYHKEHA

SEQ ID NO: 39200 - protein, 7 aa, synthetic construct
SKQMHIP

SEQ ID NO: 39201 - protein, 7 aa, synthetic construct
VRPFDQE

SEQ ID NO: 39202 - protein, 7 aa, synthetic construct
RSNGVVT

SEQ ID NO: 39203 - protein, 7 aa, synthetic construct
LKNSAPA

SEQ ID NO: 39204 - protein, 7 aa, synthetic construct
RARTEGG

SEQ ID NO: 39205 - protein, 7 aa, synthetic construct
NNANKAA

SEQ ID NO: 39206 - protein, 7 aa, synthetic construct
KNSAVNG

SEQ ID NO: 39207 - protein, 7 aa, synthetic construct
DGLRKTN

SEQ ID NO: 39208 - protein, 7 aa, synthetic construct
GMSPSKG

SEQ ID NO: 39209 - protein, 7 aa, synthetic construct
HTALGAD

SEQ ID NO: 39210 - protein, 7 aa, synthetic construct
HVPRHAG

SEQ ID NO: 39211 - protein, 7 aa, synthetic construct
MSRSPTS

SEQ ID NO: 39212 - protein, 7 aa, synthetic construct
NGKVSHT

SEQ ID NO: 39213 - protein, 7 aa, synthetic construct
NKPSMDL

SEQ ID NO: 39214 - protein, 7 aa, synthetic construct
TVQARQG

SEQ ID NO: 39215 - protein, 7 aa, synthetic construct
GYNKPHN

SEQ ID NO: 39216 - protein, 7 aa, synthetic construct
TTHAAGV

SEQ ID NO: 39217 - protein, 7 aa, synthetic construct
HMAGRMA

SEQ ID NO: 39218 - protein, 7 aa, synthetic construct
NPGGKIG

SEQ ID NO: 39219 - protein, 7 aa, synthetic construct
QRDGWSP

SEQ ID NO: 39220 - protein, 7 aa, synthetic construct
GHQTVMQ

SEQ ID NO: 39221 - protein, 7 aa, synthetic construct
QHFKPPS

SEQ ID NO: 39222 - protein, 7 aa, synthetic construct
SVTHTQN

SEQ ID NO: 39223 - protein, 7 aa, synthetic construct
KANTASA

SEQ ID NO: 39224 - protein, 7 aa, synthetic construct
DKARGPL

SEQ ID NO: 39225 - protein, 7 aa, synthetic construct
RAHQEAF

SEQ ID NO: 39226 - protein, 7 aa, synthetic construct
STMKFHE

SEQ ID NO: 39227 - protein, 7 aa, synthetic construct
YHDMNGK

SEQ ID NO: 39228 - protein, 7 aa, synthetic construct
NPGTKMG

SEQ ID NO: 39229 - protein, 7 aa, synthetic construct
GSPSKTA

SEQ ID NO: 39230 - protein, 7 aa, synthetic construct
PMSGHTI

SEQ ID NO: 39231 - protein, 7 aa, synthetic construct
TLKVPNI

SEQ ID NO: 39232 - protein, 7 aa, synthetic construct
AIGIHTD

SEQ ID NO: 39233 - protein, 7 aa, synthetic construct
TSRNNVA

SEQ ID NO: 39234 - protein, 7 aa, synthetic construct
FKGGIAA

SEQ ID NO: 39235 - protein, 7 aa, synthetic construct
GGRFNGD

SEQ ID NO: 39236 - protein, 7 aa, synthetic construct
MMKSGQG

SEQ ID NO: 39237 - protein, 7 aa, synthetic construct
IGKVVVA

SEQ ID NO: 39238 - protein, 7 aa, synthetic construct
RSQTSQM

SEQ ID NO: 39239 - protein, 7 aa, synthetic construct
MLKAIPN

SEQ ID NO: 39240 - protein, 7 aa, synthetic construct
YELNKTR

SEQ ID NO: 39241 - protein, 7 aa, synthetic construct
ELGNRGA

SEQ ID NO: 39242 - protein, 7 aa, synthetic construct
QAAGSGH

SEQ ID NO: 39243 - protein, 7 aa, synthetic construct
HGQHYGS

SEQ ID NO: 39244 - protein, 7 aa, synthetic construct
IRPAGSV

SEQ ID NO: 39245 - protein, 7 aa, synthetic construct
HFHEPDR

SEQ ID NO: 39246 - protein, 7 aa, synthetic construct
DTHFSPR

SEQ ID NO: 39247 - protein, 7 aa, synthetic construct
SGKTQMA

SEQ ID NO: 39248 - protein, 7 aa, synthetic construct
RTGNSTP

SEQ ID NO: 39249 - protein, 7 aa, synthetic construct
ASSIKTS

SEQ ID NO: 39250 - protein, 7 aa, synthetic construct
VKNPANG

SEQ ID NO: 39251 - protein, 7 aa, synthetic construct
NQKSPGS

SEQ ID NO: 39252 - protein, 7 aa, synthetic construct
RFQGQST

SEQ ID NO: 39253 - protein, 7 aa, synthetic construct
TGTRSNP

SEQ ID NO: 39254 - protein, 7 aa, synthetic construct
HATGMGF

SEQ ID NO: 39255 - protein, 7 aa, synthetic construct
DNYAHKA

SEQ ID NO: 39256 - protein, 7 aa, synthetic construct
KNNQVSG

SEQ ID NO: 39257 - protein, 7 aa, synthetic construct
HWTAKGD

SEQ ID NO: 39258 - protein, 7 aa, synthetic construct
LGKGADG

SEQ ID NO: 39259 - protein, 7 aa, synthetic construct
FDKGIQM

SEQ ID NO: 39260 - protein, 7 aa, synthetic construct
IKTSMKD

SEQ ID NO: 39261 - protein, 7 aa, synthetic construct
KPSGVVG

SEQ ID NO: 39262 - protein, 7 aa, synthetic construct
KLHTEPG

SEQ ID NO: 39263 - protein, 7 aa, synthetic construct
QAQNVNF

SEQ ID NO: 39264 - protein, 7 aa, synthetic construct
INGKFSP

SEQ ID NO: 39265 - protein, 7 aa, synthetic construct
TKGSGIV

SEQ ID NO: 39266 - protein, 7 aa, synthetic construct
PVHKSQS

SEQ ID NO: 39267 - protein, 7 aa, synthetic construct
YGANKDK

SEQ ID NO: 39268 - protein, 7 aa, synthetic construct
DSIYAKA

SEQ ID NO: 39269 - protein, 7 aa, synthetic construct
KTSGIGA

SEQ ID NO: 39270 - protein, 7 aa, synthetic construct
SMKQSNP

SEQ ID NO: 39271 - protein, 7 aa, synthetic construct
MIKQGIP

SEQ ID NO: 39272 - protein, 7 aa, synthetic construct
KGNNTET

SEQ ID NO: 39273 - protein, 7 aa, synthetic construct
HKPTNSP

SEQ ID NO: 39274 - protein, 7 aa, synthetic construct
MDHMSRS

SEQ ID NO: 39275 - protein, 7 aa, synthetic construct
KGTHGPD

SEQ ID NO: 39276 - protein, 7 aa, synthetic construct
LIPHVIG

SEQ ID NO: 39277 - protein, 7 aa, synthetic construct
KNPSAMP

SEQ ID NO: 39278 - protein, 7 aa, synthetic construct
VRNMSEN

SEQ ID NO: 39279 - protein, 7 aa, synthetic construct
HPSAKTA

SEQ ID NO: 39280 - protein, 7 aa, synthetic construct
TRHPGTH

SEQ ID NO: 39281 - protein, 7 aa, synthetic construct
FGVIKNM

SEQ ID NO: 39282 - protein, 7 aa, synthetic construct
ESIHSNK

SEQ ID NO: 39283 - protein, 7 aa, synthetic construct
GKYGENK

SEQ ID NO: 39284 - protein, 7 aa, synthetic construct
SNMTRVG

SEQ ID NO: 39285 - protein, 7 aa, synthetic construct
MRNNATP

SEQ ID NO: 39286 - protein, 7 aa, synthetic construct
TKNVTQG

SEQ ID NO: 39287 - protein, 7 aa, synthetic construct
NKTLGKD

SEQ ID NO: 39288 - protein, 7 aa, synthetic construct
AFRRGEE

SEQ ID NO: 39289 - protein, 7 aa, synthetic construct
RNNTSAA

SEQ ID NO: 39290 - protein, 7 aa, synthetic construct
QNFRGPD

SEQ ID NO: 39291 - protein, 7 aa, synthetic construct
PKIGNMG

SEQ ID NO: 39292 - protein, 7 aa, synthetic construct
HYANHIG

SEQ ID NO: 39293 - protein, 7 aa, synthetic construct
SFSTLRD

SEQ ID NO: 39294 - protein, 7 aa, synthetic construct
YSEGKRV

SEQ ID NO: 39295 - protein, 7 aa, synthetic construct
QNKHQMQ

SEQ ID NO: 39296 - protein, 7 aa, synthetic construct
KNNSPAS

SEQ ID NO: 39297 - protein, 7 aa, synthetic construct
LSGQRSP

SEQ ID NO: 39298 - protein, 7 aa, synthetic construct
QKVVPGN

SEQ ID NO: 39299 - protein, 7 aa, synthetic construct
HPYVKDE

SEQ ID NO: 39300 - protein, 7 aa, synthetic construct
TGAKLIG

SEQ ID NO: 39301 - protein, 7 aa, synthetic construct
KTSTANG

SEQ ID NO: 39302 - protein, 7 aa, synthetic construct
YGKSGTA

SEQ ID NO: 39303 - protein, 7 aa, synthetic construct
LQSHTAM

SEQ ID NO: 39304 - protein, 7 aa, synthetic construct
KPVSGNA

SEQ ID NO: 39305 - protein, 7 aa, synthetic construct
TGVKMGN

SEQ ID NO: 39306 - protein, 7 aa, synthetic construct
KVPMNQG

SEQ ID NO: 39307 - protein, 7 aa, synthetic construct
RNPSNTP

SEQ ID NO: 39308 - protein, 7 aa, synthetic construct
FNGNRNG

SEQ ID NO: 39309 - protein, 7 aa, synthetic construct
ISGQLAS

SEQ ID NO: 39310 - protein, 7 aa, synthetic construct
EHKTSHY

SEQ ID NO: 39311 - protein, 7 aa, synthetic construct
QVAHAIA

SEQ ID NO: 39312 - protein, 7 aa, synthetic construct
DPNVVRP

SEQ ID NO: 39313 - protein, 7 aa, synthetic construct
KGYNTVV

SEQ ID NO: 39314 - protein, 7 aa, synthetic construct
GTNLKGN

SEQ ID NO: 39315 - protein, 7 aa, synthetic construct
KNMQGAA

SEQ ID NO: 39316 - protein, 7 aa, synthetic construct
KNQSVAG

SEQ ID NO: 39317 - protein, 7 aa, synthetic construct
QEGAKWP

SEQ ID NO: 39318 - protein, 7 aa, synthetic construct
SQQALHS

SEQ ID NO: 39319 - protein, 7 aa, synthetic construct
LQRGTQL

SEQ ID NO: 39320 - protein, 7 aa, synthetic construct
AYKSTVS

SEQ ID NO: 39321 - protein, 7 aa, synthetic construct
ALRTSHN

SEQ ID NO: 39322 - protein, 7 aa, synthetic construct
SAMPIPR

SEQ ID NO: 39323 - protein, 7 aa, synthetic construct
TKIHPEY

SEQ ID NO: 39324 - protein, 7 aa, synthetic construct
TKNQPLG

SEQ ID NO: 39325 - protein, 7 aa, synthetic construct
KNPSAGS

SEQ ID NO: 39326 - protein, 7 aa, synthetic construct
KKASGFD

SEQ ID NO: 39327 - protein, 7 aa, synthetic construct
SHFNSAS

SEQ ID NO: 39328 - protein, 7 aa, synthetic construct
WTGSGDK

SEQ ID NO: 39329 - protein, 7 aa, synthetic construct
IHKPANY

SEQ ID NO: 39330 - protein, 7 aa, synthetic construct
WSPVSSS

SEQ ID NO: 39331 - protein, 7 aa, synthetic construct
SSAALPH

SEQ ID NO: 39332 - protein, 7 aa, synthetic construct
KGTSNAA

SEQ ID NO: 39333 - protein, 7 aa, synthetic construct
GANRLGA

SEQ ID NO: 39334 - protein, 7 aa, synthetic construct
KGDKSQA

SEQ ID NO: 39335 - protein, 7 aa, synthetic construct
TKTNVRD

SEQ ID NO: 39336 - protein, 7 aa, synthetic construct
KDRYSNE

SEQ ID NO: 39337 - protein, 7 aa, synthetic construct
QTMGLIS

SEQ ID NO: 39338 - protein, 7 aa, synthetic construct
NKTAARE

SEQ ID NO: 39339 - protein, 7 aa, synthetic construct
SKQSTNS

SEQ ID NO: 39340 - protein, 7 aa, synthetic construct
TNQRAQG

SEQ ID NO: 39341 - protein, 7 aa, synthetic construct
RETANAS

SEQ ID NO: 39342 - protein, 7 aa, synthetic construct
NPPSKGA

SEQ ID NO: 39343 - protein, 7 aa, synthetic construct
REPMRTQ

SEQ ID NO: 39344 - protein, 7 aa, synthetic construct
RGPGNGP

SEQ ID NO: 39345 - protein, 7 aa, synthetic construct
NYKSNSA

SEQ ID NO: 39346 - protein, 7 aa, synthetic construct
IMSVGGH

SEQ ID NO: 39347 - protein, 7 aa, synthetic construct
FAGSVKP

SEQ ID NO: 39348 - protein, 7 aa, synthetic construct
QITPRSQ

SEQ ID NO: 39349 - protein, 7 aa, synthetic construct
HREGRSG

SEQ ID NO: 39350 - protein, 7 aa, synthetic construct
SMKQAGG

SEQ ID NO: 39351 - protein, 7 aa, synthetic construct
LDIVKTA

SEQ ID NO: 39352 - protein, 7 aa, synthetic construct
MNSKTSP

SEQ ID NO: 39353 - protein, 7 aa, synthetic construct
MPTKVKD

SEQ ID NO: 39354 - protein, 7 aa, synthetic construct
KSYKPEI

SEQ ID NO: 39355 - protein, 7 aa, synthetic construct
NFKGTEA

SEQ ID NO: 39356 - protein, 7 aa, synthetic construct
LSSNSVK

SEQ ID NO: 39357 - protein, 7 aa, synthetic construct
KQQSNLA

SEQ ID NO: 39358 - protein, 7 aa, synthetic construct
RDLKHIG

SEQ ID NO: 39359 - protein, 7 aa, synthetic construct
NKQTNAS

SEQ ID NO: 39360 - protein, 7 aa, synthetic construct
TKWEMHP

SEQ ID NO: 39361 - protein, 7 aa, synthetic construct
TSRGEDH

SEQ ID NO: 39362 - protein, 7 aa, synthetic construct
YRQQDAE

SEQ ID NO: 39363 - protein, 7 aa, synthetic construct
DNKLSMI

SEQ ID NO: 39364 - protein, 7 aa, synthetic construct
LDMNYAK

SEQ ID NO: 39365 - protein, 7 aa, synthetic construct
PPKNNGG

SEQ ID NO: 39366 - protein, 7 aa, synthetic construct
IKYKVSD

SEQ ID NO: 39367 - protein, 7 aa, synthetic construct
RSPAIKD

SEQ ID NO: 39368 - protein, 7 aa, synthetic construct
IKRNEAE

SEQ ID NO: 39369 - protein, 7 aa, synthetic construct
ANAKTGH

SEQ ID NO: 39370 - protein, 7 aa, synthetic construct
QFRTHGP

SEQ ID NO: 39371 - protein, 7 aa, synthetic construct
VNNKQQG

SEQ ID NO: 39372 - protein, 7 aa, synthetic construct
RVAQLGG

SEQ ID NO: 39373 - protein, 7 aa, synthetic construct
LGKHIYA

SEQ ID NO: 39374 - protein, 7 aa, synthetic construct
PVRHQNM

SEQ ID NO: 39375 - protein, 7 aa, synthetic construct
SRSSTQS

SEQ ID NO: 39376 - protein, 7 aa, synthetic construct
KHRNEHD

SEQ ID NO: 39377 - protein, 7 aa, synthetic construct
WGNYSEG

SEQ ID NO: 39378 - protein, 7 aa, synthetic construct
MTKSSNV

SEQ ID NO: 39379 - protein, 7 aa, synthetic construct
QVTAKNT

SEQ ID NO: 39380 - protein, 7 aa, synthetic construct
LTAQAQQ

SEQ ID NO: 39381 - protein, 7 aa, synthetic construct
QGIQHLG

SEQ ID NO: 39382 - protein, 7 aa, synthetic construct
NGLNKSP

SEQ ID NO: 39383 - protein, 7 aa, synthetic construct
NKEVGTW

SEQ ID NO: 39384 - protein, 7 aa, synthetic construct
HLGVSRN

SEQ ID NO: 39385 - protein, 7 aa, synthetic construct
NAHARPF

SEQ ID NO: 39386 - protein, 7 aa, synthetic construct
SSRIKEF

SEQ ID NO: 39387 - protein, 7 aa, synthetic construct
SKQPMKD

SEQ ID NO: 39388 - protein, 7 aa, synthetic construct
DYNRNNA

SEQ ID NO: 39389 - protein, 7 aa, synthetic construct
KPAGNMA

SEQ ID NO: 39390 - protein, 7 aa, synthetic construct
MPRSQNP

SEQ ID NO: 39391 - protein, 7 aa, synthetic construct
RMDNHKV

SEQ ID NO: 39392 - protein, 7 aa, synthetic construct
SSTMKIS

SEQ ID NO: 39393 - protein, 7 aa, synthetic construct
FRGGAND

SEQ ID NO: 39394 - protein, 7 aa, synthetic construct
SKTPSPP

SEQ ID NO: 39395 - protein, 7 aa, synthetic construct
GKPTSYI

SEQ ID NO: 39396 - protein, 7 aa, synthetic construct
MKPVNMQ

SEQ ID NO: 39397 - protein, 7 aa, synthetic construct
SKPFRDP

SEQ ID NO: 39398 - protein, 7 aa, synthetic construct
IKDAGPN

SEQ ID NO: 39399 - protein, 7 aa, synthetic construct
STANQRA

SEQ ID NO: 39400 - protein, 7 aa, synthetic construct
SQFSQHG

SEQ ID NO: 39401 - protein, 7 aa, synthetic construct
VKVTTEP

SEQ ID NO: 39402 - protein, 7 aa, synthetic construct
GKGTASQ

SEQ ID NO: 39403 - protein, 7 aa, synthetic construct
NREIRTT

SEQ ID NO: 39404 - protein, 7 aa, synthetic construct
RQTTTSN

SEQ ID NO: 39405 - protein, 7 aa, synthetic construct
KPTHMNE

SEQ ID NO: 39406 - protein, 7 aa, synthetic construct
STPKNGA

SEQ ID NO: 39407 - protein, 7 aa, synthetic construct
AHMNNTP

SEQ ID NO: 39408 - protein, 7 aa, synthetic construct
NSRATGP

SEQ ID NO: 39409 - protein, 7 aa, synthetic construct
VAKGMSG

SEQ ID NO: 39410 - protein, 7 aa, synthetic construct
QAALKMA

SEQ ID NO: 39411 - protein, 7 aa, synthetic construct
KGDKSMG

SEQ ID NO: 39412 - protein, 7 aa, synthetic construct
KMQQSQN

SEQ ID NO: 39413 - protein, 7 aa, synthetic construct
LEQKYIK

SEQ ID NO: 39414 - protein, 7 aa, synthetic construct
TKAQSNA

SEQ ID NO: 39415 - protein, 7 aa, synthetic construct
FKHDRAE

SEQ ID NO: 39416 - protein, 7 aa, synthetic construct
GPNMRAA

SEQ ID NO: 39417 - protein, 7 aa, synthetic construct
TMKTTGY

SEQ ID NO: 39418 - protein, 7 aa, synthetic construct
VLATKAG

SEQ ID NO: 39419 - protein, 7 aa, synthetic construct
LILGKPP

SEQ ID NO: 39420 - protein, 7 aa, synthetic construct
PGKPLAP

SEQ ID NO: 39421 - protein, 7 aa, synthetic construct
AYGAAVE

SEQ ID NO: 39422 - protein, 7 aa, synthetic construct
PQFNAER

SEQ ID NO: 39423 - protein, 7 aa, synthetic construct
VPGIVQN

SEQ ID NO: 39424 - protein, 7 aa, synthetic construct
SRPKPDN

SEQ ID NO: 39425 - protein, 7 aa, synthetic construct
RNAAQTA

SEQ ID NO: 39426 - protein, 7 aa, synthetic construct
KNSITPS

SEQ ID NO: 39427 - protein, 7 aa, synthetic construct
LERHNPS

SEQ ID NO: 39428 - protein, 7 aa, synthetic construct
YAKESST

SEQ ID NO: 39429 - protein, 7 aa, synthetic construct
ATQPKSG

SEQ ID NO: 39430 - protein, 7 aa, synthetic construct
KKEGFVG

SEQ ID NO: 39431 - protein, 7 aa, synthetic construct
TARQSGF

SEQ ID NO: 39432 - protein, 7 aa, synthetic construct
KLTSVAS

SEQ ID NO: 39433 - protein, 7 aa, synthetic construct
SHNPRGY

SEQ ID NO: 39434 - protein, 7 aa, synthetic construct
QKFKVHE

SEQ ID NO: 39435 - protein, 7 aa, synthetic construct
LQGVRPE

SEQ ID NO: 39436 - protein, 7 aa, synthetic construct
PRQGGAP

SEQ ID NO: 39437 - protein, 7 aa, synthetic construct
DDRRTMN

SEQ ID NO: 39438 - protein, 7 aa, synthetic construct
TGNRGQP

SEQ ID NO: 39439 - protein, 7 aa, synthetic construct
GRMEPQA

SEQ ID NO: 39440 - protein, 7 aa, synthetic construct
NPKQNTG

SEQ ID NO: 39441 - protein, 7 aa, synthetic construct
FTGPNTN

SEQ ID NO: 39442 - protein, 7 aa, synthetic construct
MQSKGQA

SEQ ID NO: 39443 - protein, 7 aa, synthetic construct
LKIQPTV

SEQ ID NO: 39444 - protein, 7 aa, synthetic construct
KPGSGTV

SEQ ID NO: 39445 - protein, 7 aa, synthetic construct
HQAVSRD

SEQ ID NO: 39446 - protein, 7 aa, synthetic construct
LNRPKDQ

SEQ ID NO: 39447 - protein, 7 aa, synthetic construct
SAQSRAG

SEQ ID NO: 39448 - protein, 7 aa, synthetic construct
HVNPRLM

SEQ ID NO: 39449 - protein, 7 aa, synthetic construct
MTHRAQT

SEQ ID NO: 39450 - protein, 7 aa, synthetic construct
FKTGSGA

SEQ ID NO: 39451 - protein, 7 aa, synthetic construct
SSFNMVP

SEQ ID NO: 39452 - protein, 7 aa, synthetic construct
PSKSTTM

SEQ ID NO: 39453 - protein, 7 aa, synthetic construct
TDHLRQP

SEQ ID NO: 39454 - protein, 7 aa, synthetic construct
HVMTGVN

SEQ ID NO: 39455 - protein, 7 aa, synthetic construct
KKDQEIH

SEQ ID NO: 39456 - protein, 7 aa, synthetic construct
KGKDNQG

SEQ ID NO: 39457 - protein, 7 aa, synthetic construct
GQSKATG

SEQ ID NO: 39458 - protein, 7 aa, synthetic construct
RNSSNGN

SEQ ID NO: 39459 - protein, 7 aa, synthetic construct
QEGHYAA

SEQ ID NO: 39460 - protein, 7 aa, synthetic construct
KGKSDES

SEQ ID NO: 39461 - protein, 7 aa, synthetic construct
AFGHLQP

SEQ ID NO: 39462 - protein, 7 aa, synthetic construct
MAGYGAA

SEQ ID NO: 39463 - protein, 7 aa, synthetic construct
IRQRSDM

SEQ ID NO: 39464 - protein, 7 aa, synthetic construct
SKVVSGG

SEQ ID NO: 39465 - protein, 7 aa, synthetic construct
YLNRGDA

SEQ ID NO: 39466 - protein, 7 aa, synthetic construct
SSQSKAG

SEQ ID NO: 39467 - protein, 7 aa, synthetic construct
FGNSARA

SEQ ID NO: 39468 - protein, 7 aa, synthetic construct
GARPQKE

SEQ ID NO: 39469 - protein, 7 aa, synthetic construct
PMNRSMD

SEQ ID NO: 39470 - protein, 7 aa, synthetic construct
RSPAGSA

SEQ ID NO: 39471 - protein, 7 aa, synthetic construct
IRSAVSG

SEQ ID NO: 39472 - protein, 7 aa, synthetic construct
IGQAKWA

SEQ ID NO: 39473 - protein, 7 aa, synthetic construct
PKDFVGP

SEQ ID NO: 39474 - protein, 7 aa, synthetic construct
KNGMGMA

SEQ ID NO: 39475 - protein, 7 aa, synthetic construct
KPISNHT

SEQ ID NO: 39476 - protein, 7 aa, synthetic construct
TQQKNTS

SEQ ID NO: 39477 - protein, 7 aa, synthetic construct
EQKRPYF

SEQ ID NO: 39478 - protein, 7 aa, synthetic construct
LTATKDI

SEQ ID NO: 39479 - protein, 7 aa, synthetic construct
QKTAMSA

SEQ ID NO: 39480 - protein, 7 aa, synthetic construct
RVNAVGE

SEQ ID NO: 39481 - protein, 7 aa, synthetic construct
IHEFKHS

SEQ ID NO: 39482 - protein, 7 aa, synthetic construct
KPAMHMV

SEQ ID NO: 39483 - protein, 7 aa, synthetic construct
ILKIHTE

SEQ ID NO: 39484 - protein, 7 aa, synthetic construct
LHVNAKG

SEQ ID NO: 39485 - protein, 7 aa, synthetic construct
QMKTQNG

SEQ ID NO: 39486 - protein, 7 aa, synthetic construct
NKGSGGG

SEQ ID NO: 39487 - protein, 7 aa, synthetic construct
PTKGPQA

SEQ ID NO: 39488 - protein, 7 aa, synthetic construct
SDKRTVM

SEQ ID NO: 39489 - protein, 7 aa, synthetic construct
RRDENMN

SEQ ID NO: 39490 - protein, 7 aa, synthetic construct
FKSTTSA

SEQ ID NO: 39491 - protein, 7 aa, synthetic construct
SNDFQTK

SEQ ID NO: 39492 - protein, 7 aa, synthetic construct
RPGTAVA

SEQ ID NO: 39493 - protein, 7 aa, synthetic construct
ILSPGQV

SEQ ID NO: 39494 - protein, 7 aa, synthetic construct
KSSTMDG

SEQ ID NO: 39495 - protein, 7 aa, synthetic construct
YRPNFHG

SEQ ID NO: 39496 - protein, 7 aa, synthetic construct
LGGHIMV

SEQ ID NO: 39497 - protein, 7 aa, synthetic construct
TGNAKGG

SEQ ID NO: 39498 - protein, 7 aa, synthetic construct
HKKDIEG

SEQ ID NO: 39499 - protein, 7 aa, synthetic construct
NATQHRN

SEQ ID NO: 39500 - protein, 7 aa, synthetic construct
TQGQQNG

SEQ ID NO: 39501 - protein, 7 aa, synthetic construct
RNMSTTA

SEQ ID NO: 39502 - protein, 7 aa, synthetic construct
KPNGASF

SEQ ID NO: 39503 - protein, 7 aa, synthetic construct
HKTGTRD

SEQ ID NO: 39504 - protein, 7 aa, synthetic construct
IGGNRFN

SEQ ID NO: 39505 - protein, 7 aa, synthetic construct
PVGTFGP

SEQ ID NO: 39506 - protein, 7 aa, synthetic construct
NKGTRDP

SEQ ID NO: 39507 - protein, 7 aa, synthetic construct
VAGSQQG

SEQ ID NO: 39508 - protein, 7 aa, synthetic construct
KSSSAVG

SEQ ID NO: 39509 - protein, 7 aa, synthetic construct
TSNSQKG

SEQ ID NO: 39510 - protein, 7 aa, synthetic construct
TRNPATS

SEQ ID NO: 39511 - protein, 7 aa, synthetic construct
IHGINSS

SEQ ID NO: 39512 - protein, 7 aa, synthetic construct
GPYHLEG

SEQ ID NO: 39513 - protein, 7 aa, synthetic construct
RQTPTGA

SEQ ID NO: 39514 - protein, 7 aa, synthetic construct
QDHKHPY

SEQ ID NO: 39515 - protein, 7 aa, synthetic construct
QMPRISE

SEQ ID NO: 39516 - protein, 7 aa, synthetic construct
RMTSASP

SEQ ID NO: 39517 - protein, 7 aa, synthetic construct
GKSAGTA

SEQ ID NO: 39518 - protein, 7 aa, synthetic construct
KHGNNMD

SEQ ID NO: 39519 - protein, 7 aa, synthetic construct
VAQSKAF

SEQ ID NO: 39520 - protein, 7 aa, synthetic construct
KKQTGID

SEQ ID NO: 39521 - protein, 7 aa, synthetic construct
VGVKSIP

SEQ ID NO: 39522 - protein, 7 aa, synthetic construct
GNQSSRP

SEQ ID NO: 39523 - protein, 7 aa, synthetic construct
SHINTGS

SEQ ID NO: 39524 - protein, 7 aa, synthetic construct
WGEHRTY

SEQ ID NO: 39525 - protein, 7 aa, synthetic construct
LHDPQRG

SEQ ID NO: 39526 - protein, 7 aa, synthetic construct
THPEMRR

SEQ ID NO: 39527 - protein, 7 aa, synthetic construct
SSKFNSE

SEQ ID NO: 39528 - protein, 7 aa, synthetic construct
NHLQQLP

SEQ ID NO: 39529 - protein, 7 aa, synthetic construct
FKSGTNS

SEQ ID NO: 39530 - protein, 7 aa, synthetic construct
QRAGTQW

SEQ ID NO: 39531 - protein, 7 aa, synthetic construct
YKGDSMV

SEQ ID NO: 39532 - protein, 7 aa, synthetic construct
MMTNEKR

SEQ ID NO: 39533 - protein, 7 aa, synthetic construct
IIHSRQP

SEQ ID NO: 39534 - protein, 7 aa, synthetic construct
GKNAGTQ

SEQ ID NO: 39535 - protein, 7 aa, synthetic construct
DKTTATV

SEQ ID NO: 39536 - protein, 7 aa, synthetic construct
SSKHLHA

SEQ ID NO: 39537 - protein, 7 aa, synthetic construct
LYNSTSD

SEQ ID NO: 39538 - protein, 7 aa, synthetic construct
RQDFGTS

SEQ ID NO: 39539 - protein, 7 aa, synthetic construct
MMTAGAT

SEQ ID NO: 39540 - protein, 7 aa, synthetic construct
QSTANSS

SEQ ID NO: 39541 - protein, 7 aa, synthetic construct
GKKSTDA

SEQ ID NO: 39542 - protein, 7 aa, synthetic construct
KPPGMSG

SEQ ID NO: 39543 - protein, 7 aa, synthetic construct
IWSKGDN

SEQ ID NO: 39544 - protein, 7 aa, synthetic construct
SLGHNNV

SEQ ID NO: 39545 - protein, 7 aa, synthetic construct
NVGSQKA

SEQ ID NO: 39546 - protein, 7 aa, synthetic construct
KFQNAQA

SEQ ID NO: 39547 - protein, 7 aa, synthetic construct
NKNSTTV

SEQ ID NO: 39548 - protein, 7 aa, synthetic construct
HRTSSED

SEQ ID NO: 39549 - protein, 7 aa, synthetic construct
VKVGGIS

SEQ ID NO: 39550 - protein, 7 aa, synthetic construct
GKNSIQA

SEQ ID NO: 39551 - protein, 7 aa, synthetic construct
NNAKGNF

SEQ ID NO: 39552 - protein, 7 aa, synthetic construct
NGRNLPN

SEQ ID NO: 39553 - protein, 7 aa, synthetic construct
NFQKVDL

SEQ ID NO: 39554 - protein, 7 aa, synthetic construct
SAQNRNQ

SEQ ID NO: 39555 - protein, 7 aa, synthetic construct
HSRDNRM

SEQ ID NO: 39556 - protein, 7 aa, synthetic construct
TPTHAFQ

SEQ ID NO: 39557 - protein, 7 aa, synthetic construct
SPKNGVG

SEQ ID NO: 39558 - protein, 7 aa, synthetic construct
EIRNPQK

SEQ ID NO: 39559 - protein, 7 aa, synthetic construct
GQDHHPS

SEQ ID NO: 39560 - protein, 7 aa, synthetic construct
TKHNNLD

SEQ ID NO: 39561 - protein, 7 aa, synthetic construct
QTKGAIA

SEQ ID NO: 39562 - protein, 7 aa, synthetic construct
YNSTKVG

SEQ ID NO: 39563 - protein, 7 aa, synthetic construct
MMHSANG

SEQ ID NO: 39564 - protein, 7 aa, synthetic construct
TVVERMN

SEQ ID NO: 39565 - protein, 7 aa, synthetic construct
KQTTPSH

SEQ ID NO: 39566 - protein, 7 aa, synthetic construct
RPQSAMS

SEQ ID NO: 39567 - protein, 7 aa, synthetic construct
FMGTKST

SEQ ID NO: 39568 - protein, 7 aa, synthetic construct
IPRATAA

SEQ ID NO: 39569 - protein, 7 aa, synthetic construct
KTQFMNP

SEQ ID NO: 39570 - protein, 7 aa, synthetic construct
KSVASVV

SEQ ID NO: 39571 - protein, 7 aa, synthetic construct
QSHGIGT

SEQ ID NO: 39572 - protein, 7 aa, synthetic construct
NPNRSGG

SEQ ID NO: 39573 - protein, 7 aa, synthetic construct
WQKNHSQ

SEQ ID NO: 39574 - protein, 7 aa, synthetic construct
SQLRALP

SEQ ID NO: 39575 - protein, 7 aa, synthetic construct
RNVDTYG

SEQ ID NO: 39576 - protein, 7 aa, synthetic construct
VLRGAQN

SEQ ID NO: 39577 - protein, 7 aa, synthetic construct
QMGRNPG

SEQ ID NO: 39578 - protein, 7 aa, synthetic construct
VHLIQKA

SEQ ID NO: 39579 - protein, 7 aa, synthetic construct
HTYVSQA

SEQ ID NO: 39580 - protein, 7 aa, synthetic construct
MTGSQRM

SEQ ID NO: 39581 - protein, 7 aa, synthetic construct
RPNVQNG

SEQ ID NO: 39582 - protein, 7 aa, synthetic construct
IKIGDGG

SEQ ID NO: 39583 - protein, 7 aa, synthetic construct
IPTSMKH

SEQ ID NO: 39584 - protein, 7 aa, synthetic construct
QGGVNVQ

SEQ ID NO: 39585 - protein, 7 aa, synthetic construct
KPNAASG

SEQ ID NO: 39586 - protein, 7 aa, synthetic construct
ETGGTGK

SEQ ID NO: 39587 - protein, 7 aa, synthetic construct
PRTAQGS

SEQ ID NO: 39588 - protein, 7 aa, synthetic construct
NRTANTG

SEQ ID NO: 39589 - protein, 7 aa, synthetic construct
IYSVRSP

SEQ ID NO: 39590 - protein, 7 aa, synthetic construct
IKNRPYD

SEQ ID NO: 39591 - protein, 7 aa, synthetic construct
YQGTRGS

SEQ ID NO: 39592 - protein, 7 aa, synthetic construct
QMLDRRG

SEQ ID NO: 39593 - protein, 7 aa, synthetic construct
TMGVNTQ

SEQ ID NO: 39594 - protein, 7 aa, synthetic construct
KSTNSPG

SEQ ID NO: 39595 - protein, 7 aa, synthetic construct
DSAIARA

SEQ ID NO: 39596 - protein, 7 aa, synthetic construct
RTISSGA

SEQ ID NO: 39597 - protein, 7 aa, synthetic construct
YMSSIRP

SEQ ID NO: 39598 - protein, 7 aa, synthetic construct
RRQNDDA

SEQ ID NO: 39599 - protein, 7 aa, synthetic construct
VHAGRAD

SEQ ID NO: 39600 - protein, 7 aa, synthetic construct
TRHGHPS

SEQ ID NO: 39601 - protein, 7 aa, synthetic construct
RYQSNQG

SEQ ID NO: 39602 - protein, 7 aa, synthetic construct
MKNSGSV

SEQ ID NO: 39603 - protein, 7 aa, synthetic construct
VAYSPED

SEQ ID NO: 39604 - protein, 7 aa, synthetic construct
PQNAMKG

SEQ ID NO: 39605 - protein, 7 aa, synthetic construct
KGGVEMR

SEQ ID NO: 39606 - protein, 7 aa, synthetic construct
KTNSPAG

SEQ ID NO: 39607 - protein, 7 aa, synthetic construct
MGRFIDA

SEQ ID NO: 39608 - protein, 7 aa, synthetic construct
TPSRGIA

SEQ ID NO: 39609 - protein, 7 aa, synthetic construct
TKPEHNS

SEQ ID NO: 39610 - protein, 7 aa, synthetic construct
QRSSMGP

SEQ ID NO: 39611 - protein, 7 aa, synthetic construct
LRVDKAL

SEQ ID NO: 39612 - protein, 7 aa, synthetic construct
RPNIQTA

SEQ ID NO: 39613 - protein, 7 aa, synthetic construct
QHVSRQD

SEQ ID NO: 39614 - protein, 7 aa, synthetic construct
RHGHPNA

SEQ ID NO: 39615 - protein, 7 aa, synthetic construct
TANAIIG

SEQ ID NO: 39616 - protein, 7 aa, synthetic construct
MSSILRA

SEQ ID NO: 39617 - protein, 7 aa, synthetic construct
SLRIKEN

SEQ ID NO: 39618 - protein, 7 aa, synthetic construct
MKTIRME

SEQ ID NO: 39619 - protein, 7 aa, synthetic construct
HGIRGAT

SEQ ID NO: 39620 - protein, 7 aa, synthetic construct
MKNVREA

SEQ ID NO: 39621 - protein, 7 aa, synthetic construct
SVRDKTV

SEQ ID NO: 39622 - protein, 7 aa, synthetic construct
AKDHGNS

SEQ ID NO: 39623 - protein, 7 aa, synthetic construct
NQQQPKF

SEQ ID NO: 39624 - protein, 7 aa, synthetic construct
HIHTQVA

SEQ ID NO: 39625 - protein, 7 aa, synthetic construct
NVSRVTG

SEQ ID NO: 39626 - protein, 7 aa, synthetic construct
GAATRTG

SEQ ID NO: 39627 - protein, 7 aa, synthetic construct
SRTVTQA

SEQ ID NO: 39628 - protein, 7 aa, synthetic construct
VNTRGPP

SEQ ID NO: 39629 - protein, 7 aa, synthetic construct
SRHLGTA

SEQ ID NO: 39630 - protein, 7 aa, synthetic construct
SYQGPNP

SEQ ID NO: 39631 - protein, 7 aa, synthetic construct
HGMGYQS

SEQ ID NO: 39632 - protein, 7 aa, synthetic construct
IQHGGRE

SEQ ID NO: 39633 - protein, 7 aa, synthetic construct
YTGGKGG

SEQ ID NO: 39634 - protein, 7 aa, synthetic construct
YNTGKTN

SEQ ID NO: 39635 - protein, 7 aa, synthetic construct
LNPNAPM

SEQ ID NO: 39636 - protein, 7 aa, synthetic construct
VAAERTG

SEQ ID NO: 39637 - protein, 7 aa, synthetic construct
QMTKEHA

SEQ ID NO: 39638 - protein, 7 aa, synthetic construct
QKNSMIG

SEQ ID NO: 39639 - protein, 7 aa, synthetic construct
QRDFMSE

SEQ ID NO: 39640 - protein, 7 aa, synthetic construct
WTGKSTD

SEQ ID NO: 39641 - protein, 7 aa, synthetic construct
KESHKSP

SEQ ID NO: 39642 - protein, 7 aa, synthetic construct
NNTKSSG

SEQ ID NO: 39643 - protein, 7 aa, synthetic construct
QGSKPGA

SEQ ID NO: 39644 - protein, 7 aa, synthetic construct
AFVKDAS

SEQ ID NO: 39645 - protein, 7 aa, synthetic construct
YPKISEE

SEQ ID NO: 39646 - protein, 7 aa, synthetic construct
APDFGHR

SEQ ID NO: 39647 - protein, 7 aa, synthetic construct
YNKVAKE

SEQ ID NO: 39648 - protein, 7 aa, synthetic construct
GFKNQNA

SEQ ID NO: 39649 - protein, 7 aa, synthetic construct
NTKSGLG

SEQ ID NO: 39650 - protein, 7 aa, synthetic construct
MKSTAAS

SEQ ID NO: 39651 - protein, 7 aa, synthetic construct
NTGKNQP

SEQ ID NO: 39652 - protein, 7 aa, synthetic construct
TRPMKGE

SEQ ID NO: 39653 - protein, 7 aa, synthetic construct
HKMIDNM

SEQ ID NO: 39654 - protein, 7 aa, synthetic construct
DVRQRLE

SEQ ID NO: 39655 - protein, 7 aa, synthetic construct
MEARHAS

SEQ ID NO: 39656 - protein, 7 aa, synthetic construct
RPGTTNS

SEQ ID NO: 39657 - protein, 7 aa, synthetic construct
KFSTQNG

SEQ ID NO: 39658 - protein, 7 aa, synthetic construct
SPKSINA

SEQ ID NO: 39659 - protein, 7 aa, synthetic construct
MRPSQTG

SEQ ID NO: 39660 - protein, 7 aa, synthetic construct
RASGTTA

SEQ ID NO: 39661 - protein, 7 aa, synthetic construct
KTAPTNG

SEQ ID NO: 39662 - protein, 7 aa, synthetic construct
KSNSSVT

SEQ ID NO: 39663 - protein, 7 aa, synthetic construct
KSPSIPQ

SEQ ID NO: 39664 - protein, 7 aa, synthetic construct
YNVKHDR

SEQ ID NO: 39665 - protein, 7 aa, synthetic construct
QPLHAEA

SEQ ID NO: 39666 - protein, 7 aa, synthetic construct
TNQEKMG

SEQ ID NO: 39667 - protein, 7 aa, synthetic construct
NAQSKIA

SEQ ID NO: 39668 - protein, 7 aa, synthetic construct
GPAPNKT

SEQ ID NO: 39669 - protein, 7 aa, synthetic construct
PPRGLHT

SEQ ID NO: 39670 - protein, 7 aa, synthetic construct
KQITVDG

SEQ ID NO: 39671 - protein, 7 aa, synthetic construct
SLKGPPT

SEQ ID NO: 39672 - protein, 7 aa, synthetic construct
VPSINQQ

SEQ ID NO: 39673 - protein, 7 aa, synthetic construct
LHPSHKE

SEQ ID NO: 39674 - protein, 7 aa, synthetic construct
QKGTQTN

SEQ ID NO: 39675 - protein, 7 aa, synthetic construct
RNHSQDS

SEQ ID NO: 39676 - protein, 7 aa, synthetic construct
HRAIGVQ

SEQ ID NO: 39677 - protein, 7 aa, synthetic construct
SKGYPLS

SEQ ID NO: 39678 - protein, 7 aa, synthetic construct
ARSTLDG

SEQ ID NO: 39679 - protein, 7 aa, synthetic construct
VSVHMAM

SEQ ID NO: 39680 - protein, 7 aa, synthetic construct
HKGTVMV

SEQ ID NO: 39681 - protein, 7 aa, synthetic construct
LEKGPSG

SEQ ID NO: 39682 - protein, 7 aa, synthetic construct
PTVGRAP

SEQ ID NO: 39683 - protein, 7 aa, synthetic construct
AYQHREL

SEQ ID NO: 39684 - protein, 7 aa, synthetic construct
YKSTANG

SEQ ID NO: 39685 - protein, 7 aa, synthetic construct
VRNAQGA

SEQ ID NO: 39686 - protein, 7 aa, synthetic construct
SHTVPSL

SEQ ID NO: 39687 - protein, 7 aa, synthetic construct
TKSIQRE

SEQ ID NO: 39688 - protein, 7 aa, synthetic construct
QKHLSID

SEQ ID NO: 39689 - protein, 7 aa, synthetic construct
LVTKWTE

SEQ ID NO: 39690 - protein, 7 aa, synthetic construct
KSMATQG

SEQ ID NO: 39691 - protein, 7 aa, synthetic construct
LKDGRSA

SEQ ID NO: 39692 - protein, 7 aa, synthetic construct
ETFKTMT

SEQ ID NO: 39693 - protein, 7 aa, synthetic construct
MKSAGVL

SEQ ID NO: 39694 - protein, 7 aa, synthetic construct
VSNNKDR

SEQ ID NO: 39695 - protein, 7 aa, synthetic construct
TKVAVRD

SEQ ID NO: 39696 - protein, 7 aa, synthetic construct
SQFSRIG

SEQ ID NO: 39697 - protein, 7 aa, synthetic construct
DLNAKRW

SEQ ID NO: 39698 - protein, 7 aa, synthetic construct
SQKSSHL

SEQ ID NO: 39699 - protein, 7 aa, synthetic construct
VEKHNYR

SEQ ID NO: 39700 - protein, 7 aa, synthetic construct
NGKTSGG

SEQ ID NO: 39701 - protein, 7 aa, synthetic construct
PKVNSSG

SEQ ID NO: 39702 - protein, 7 aa, synthetic construct
KPSSQSA

SEQ ID NO: 39703 - protein, 7 aa, synthetic construct
KTSNAGS

SEQ ID NO: 39704 - protein, 7 aa, synthetic construct
IMNRRHE

SEQ ID NO: 39705 - protein, 7 aa, synthetic construct
KMAGKTD

SEQ ID NO: 39706 - protein, 7 aa, synthetic construct
STGATHG

SEQ ID NO: 39707 - protein, 7 aa, synthetic construct
TRNFEVM

SEQ ID NO: 39708 - protein, 7 aa, synthetic construct
MGPNRGS

SEQ ID NO: 39709 - protein, 7 aa, synthetic construct
AFGPREP

SEQ ID NO: 39710 - protein, 7 aa, synthetic construct
VPQWSRE

SEQ ID NO: 39711 - protein, 7 aa, synthetic construct
KAPNHYM

SEQ ID NO: 39712 - protein, 7 aa, synthetic construct
IAPAMHA

SEQ ID NO: 39713 - protein, 7 aa, synthetic construct
KFGDKSG

SEQ ID NO: 39714 - protein, 7 aa, synthetic construct
AAASRNF

SEQ ID NO: 39715 - protein, 7 aa, synthetic construct
AMKQQAP

SEQ ID NO: 39716 - protein, 7 aa, synthetic construct
MGNAVKG

SEQ ID NO: 39717 - protein, 7 aa, synthetic construct
MKNVQSA

SEQ ID NO: 39718 - protein, 7 aa, synthetic construct
IFAVHQD

SEQ ID NO: 39719 - protein, 7 aa, synthetic construct
DRRASES

SEQ ID NO: 39720 - protein, 7 aa, synthetic construct
THQGRQY

SEQ ID NO: 39721 - protein, 7 aa, synthetic construct
GLARESR

SEQ ID NO: 39722 - protein, 7 aa, synthetic construct
KITSTFV

SEQ ID NO: 39723 - protein, 7 aa, synthetic construct
SQGHSII

SEQ ID NO: 39724 - protein, 7 aa, synthetic construct
PSGMRSD

SEQ ID NO: 39725 - protein, 7 aa, synthetic construct
LKDPKMM

SEQ ID NO: 39726 - protein, 7 aa, synthetic construct
VNGGKGG

SEQ ID NO: 39727 - protein, 7 aa, synthetic construct
TPKGTFG

SEQ ID NO: 39728 - protein, 7 aa, synthetic construct
SRSTVGG

SEQ ID NO: 39729 - protein, 7 aa, synthetic construct
KPPSMAA

SEQ ID NO: 39730 - protein, 7 aa, synthetic construct
NMGKALP

SEQ ID NO: 39731 - protein, 7 aa, synthetic construct
NKSATAG

SEQ ID NO: 39732 - protein, 7 aa, synthetic construct
KYHATAE

SEQ ID NO: 39733 - protein, 7 aa, synthetic construct
PRNASTE

SEQ ID NO: 39734 - protein, 7 aa, synthetic construct
EYQKYPA

SEQ ID NO: 39735 - protein, 7 aa, synthetic construct
QSSRVSP

SEQ ID NO: 39736 - protein, 7 aa, synthetic construct
FSDYGGK

SEQ ID NO: 39737 - protein, 7 aa, synthetic construct
TRGLQID

SEQ ID NO: 39738 - protein, 7 aa, synthetic construct
MHHISEA

SEQ ID NO: 39739 - protein, 7 aa, synthetic construct
MPFKEVP

SEQ ID NO: 39740 - protein, 7 aa, synthetic construct
MGGMKNP

SEQ ID NO: 39741 - protein, 7 aa, synthetic construct
FKVSTGG

SEQ ID NO: 39742 - protein, 7 aa, synthetic construct
SFKRVQE

SEQ ID NO: 39743 - protein, 7 aa, synthetic construct
QTSQRAP

SEQ ID NO: 39744 - protein, 7 aa, synthetic construct
NQYNNVK

SEQ ID NO: 39745 - protein, 7 aa, synthetic construct
GEKHNNS

SEQ ID NO: 39746 - protein, 7 aa, synthetic construct
YHKSGDA

SEQ ID NO: 39747 - protein, 7 aa, synthetic construct
RPNSASA

SEQ ID NO: 39748 - protein, 7 aa, synthetic construct
GSVRSNP

SEQ ID NO: 39749 - protein, 7 aa, synthetic construct
KNNSGPV

SEQ ID NO: 39750 - protein, 7 aa, synthetic construct
SPGNHVA

SEQ ID NO: 39751 - protein, 7 aa, synthetic construct
IGGQYGG

SEQ ID NO: 39752 - protein, 7 aa, synthetic construct
YYKSEHS

SEQ ID NO: 39753 - protein, 7 aa, synthetic construct
MTGALRV

SEQ ID NO: 39754 - protein, 7 aa, synthetic construct
SGTMTKG

SEQ ID NO: 39755 - protein, 7 aa, synthetic construct
TRGAMGI

SEQ ID NO: 39756 - protein, 7 aa, synthetic construct
TTKGAFG

SEQ ID NO: 39757 - protein, 7 aa, synthetic construct
QSKQNKE

SEQ ID NO: 39758 - protein, 7 aa, synthetic construct
INRNMMP

SEQ ID NO: 39759 - protein, 7 aa, synthetic construct
SITQHRP

SEQ ID NO: 39760 - protein, 7 aa, synthetic construct
DQGKQPA

SEQ ID NO: 39761 - protein, 7 aa, synthetic construct
MHNTSTA

SEQ ID NO: 39762 - protein, 7 aa, synthetic construct
PYKNVTV

SEQ ID NO: 39763 - protein, 7 aa, synthetic construct
TNGGLKG

SEQ ID NO: 39764 - protein, 7 aa, synthetic construct
KTAPNSS

SEQ ID NO: 39765 - protein, 7 aa, synthetic construct
PKGQTQG

SEQ ID NO: 39766 - protein, 7 aa, synthetic construct
MGSKWGD

SEQ ID NO: 39767 - protein, 7 aa, synthetic construct
TKGTGRD

SEQ ID NO: 39768 - protein, 7 aa, synthetic construct
RESWSNG

SEQ ID NO: 39769 - protein, 7 aa, synthetic construct
NFAAHKQ

SEQ ID NO: 39770 - protein, 7 aa, synthetic construct
GARGAMQ

SEQ ID NO: 39771 - protein, 7 aa, synthetic construct
GGKQNLI

SEQ ID NO: 39772 - protein, 7 aa, synthetic construct
TGTAVPQ

SEQ ID NO: 39773 - protein, 7 aa, synthetic construct
QKDGTQY

SEQ ID NO: 39774 - protein, 7 aa, synthetic construct
EKWRTDS

SEQ ID NO: 39775 - protein, 7 aa, synthetic construct
TKGSGYA

SEQ ID NO: 39776 - protein, 7 aa, synthetic construct
GHRTLTN

SEQ ID NO: 39777 - protein, 7 aa, synthetic construct
GHQKSQS

SEQ ID NO: 39778 - protein, 7 aa, synthetic construct
NPNPGNA

SEQ ID NO: 39779 - protein, 7 aa, synthetic construct
IAGKHNF

SEQ ID NO: 39780 - protein, 7 aa, synthetic construct
AIPLHMP

SEQ ID NO: 39781 - protein, 7 aa, synthetic construct
SQKQTGA

SEQ ID NO: 39782 - protein, 7 aa, synthetic construct
RSVSWEA

SEQ ID NO: 39783 - protein, 7 aa, synthetic construct
DRHAREG

SEQ ID NO: 39784 - protein, 7 aa, synthetic construct
FGNWMKE

SEQ ID NO: 39785 - protein, 7 aa, synthetic construct
KPTSASD

SEQ ID NO: 39786 - protein, 7 aa, synthetic construct
TGQGHNQ

SEQ ID NO: 39787 - protein, 7 aa, synthetic construct
ILSRNQA

SEQ ID NO: 39788 - protein, 7 aa, synthetic construct
YTEKHMT

SEQ ID NO: 39789 - protein, 7 aa, synthetic construct
GRTVSVG

SEQ ID NO: 39790 - protein, 7 aa, synthetic construct
RKDNVSL

SEQ ID NO: 39791 - protein, 7 aa, synthetic construct
LKSYNAM

SEQ ID NO: 39792 - protein, 7 aa, synthetic construct
PKSNSAS

SEQ ID NO: 39793 - protein, 7 aa, synthetic construct
SGRQDPP

SEQ ID NO: 39794 - protein, 7 aa, synthetic construct
KGPKQDG

SEQ ID NO: 39795 - protein, 7 aa, synthetic construct
HKPTMFD

SEQ ID NO: 39796 - protein, 7 aa, synthetic construct
YGPYVNN

SEQ ID NO: 39797 - protein, 7 aa, synthetic construct
MGVQHPA

SEQ ID NO: 39798 - protein, 7 aa, synthetic construct
VQKQSSA

SEQ ID NO: 39799 - protein, 7 aa, synthetic construct
HHSNANY

SEQ ID NO: 39800 - protein, 7 aa, synthetic construct
TTPGRGA

SEQ ID NO: 39801 - protein, 7 aa, synthetic construct
SPRQYKE

SEQ ID NO: 39802 - protein, 7 aa, synthetic construct
NKPGKDG

SEQ ID NO: 39803 - protein, 7 aa, synthetic construct
RGVNNDT

SEQ ID NO: 39804 - protein, 7 aa, synthetic construct
RDAKSTG

SEQ ID NO: 39805 - protein, 7 aa, synthetic construct
GANTKSA

SEQ ID NO: 39806 - protein, 7 aa, synthetic construct
LIHSQPD

SEQ ID NO: 39807 - protein, 7 aa, synthetic construct
NVQRAQA

SEQ ID NO: 39808 - protein, 7 aa, synthetic construct
KKNDARE

SEQ ID NO: 39809 - protein, 7 aa, synthetic construct
WQKGYGA

SEQ ID NO: 39810 - protein, 7 aa, synthetic construct
YQTVGRT

SEQ ID NO: 39811 - protein, 7 aa, synthetic construct
SNAPVTA

SEQ ID NO: 39812 - protein, 7 aa, synthetic construct
VILSKMG

SEQ ID NO: 39813 - protein, 7 aa, synthetic construct
MAGADKQ

SEQ ID NO: 39814 - protein, 7 aa, synthetic construct
IAGMGGK

SEQ ID NO: 39815 - protein, 7 aa, synthetic construct
YGFLSQD

SEQ ID NO: 39816 - protein, 7 aa, synthetic construct
VPTLQVA

SEQ ID NO: 39817 - protein, 7 aa, synthetic construct
ISRSFAQ

SEQ ID NO: 39818 - protein, 7 aa, synthetic construct
QGKSMVH

SEQ ID NO: 39819 - protein, 7 aa, synthetic construct
QKNTSQP

SEQ ID NO: 39820 - protein, 7 aa, synthetic construct
NQKGQTN

SEQ ID NO: 39821 - protein, 7 aa, synthetic construct
DLPISKH

SEQ ID NO: 39822 - protein, 7 aa, synthetic construct
RKDQPIS

SEQ ID NO: 39823 - protein, 7 aa, synthetic construct
TGKYGAG

SEQ ID NO: 39824 - protein, 7 aa, synthetic construct
GTKVNQG

SEQ ID NO: 39825 - protein, 7 aa, synthetic construct
YENKPHK

SEQ ID NO: 39826 - protein, 7 aa, synthetic construct
RSTDPMG

SEQ ID NO: 39827 - protein, 7 aa, synthetic construct
QNLRDHV

SEQ ID NO: 39828 - protein, 7 aa, synthetic construct
NKKDSAG

SEQ ID NO: 39829 - protein, 7 aa, synthetic construct
ETGRKTE

SEQ ID NO: 39830 - protein, 7 aa, synthetic construct
HPAGRKD

SEQ ID NO: 39831 - protein, 7 aa, synthetic construct
RKNDRQE

SEQ ID NO: 39832 - protein, 7 aa, synthetic construct
GPKGAMN

SEQ ID NO: 39833 - protein, 7 aa, synthetic construct
ARTSVGG

SEQ ID NO: 39834 - protein, 7 aa, synthetic construct
GPPVKPF

SEQ ID NO: 39835 - protein, 7 aa, synthetic construct
GIYTISA

SEQ ID NO: 39836 - protein, 7 aa, synthetic construct
TNTGKYG

SEQ ID NO: 39837 - protein, 7 aa, synthetic construct
YLADAAK

SEQ ID NO: 39838 - protein, 7 aa, synthetic construct
KTTTSGN

SEQ ID NO: 39839 - protein, 7 aa, synthetic construct
TSIKYPD

SEQ ID NO: 39840 - protein, 7 aa, synthetic construct
SMVELKP

SEQ ID NO: 39841 - protein, 7 aa, synthetic construct
RMNSNSP

SEQ ID NO: 39842 - protein, 7 aa, synthetic construct
GNKTSPM

SEQ ID NO: 39843 - protein, 7 aa, synthetic construct
SRVTSQV

SEQ ID NO: 39844 - protein, 7 aa, synthetic construct
TTNRERA

SEQ ID NO: 39845 - protein, 7 aa, synthetic construct
QATGSKV

SEQ ID NO: 39846 - protein, 7 aa, synthetic construct
QAVQGRA

SEQ ID NO: 39847 - protein, 7 aa, synthetic construct
KTKGDHP

SEQ ID NO: 39848 - protein, 7 aa, synthetic construct
GMRTSTP

SEQ ID NO: 39849 - protein, 7 aa, synthetic construct
MNRAYEG

SEQ ID NO: 39850 - protein, 7 aa, synthetic construct
SPKPYGG

SEQ ID NO: 39851 - protein, 7 aa, synthetic construct
KANGNGG

SEQ ID NO: 39852 - protein, 7 aa, synthetic construct
YKMKDLE

SEQ ID NO: 39853 - protein, 7 aa, synthetic construct
QPISHKN

SEQ ID NO: 39854 - protein, 7 aa, synthetic construct
ERHKMYD

SEQ ID NO: 39855 - protein, 7 aa, synthetic construct
MRPASGA

SEQ ID NO: 39856 - protein, 7 aa, synthetic construct
GKQGSNS

SEQ ID NO: 39857 - protein, 7 aa, synthetic construct
EKHLDPP

SEQ ID NO: 39858 - protein, 7 aa, synthetic construct
NTHSSRL

SEQ ID NO: 39859 - protein, 7 aa, synthetic construct
ITNGRPF

SEQ ID NO: 39860 - protein, 7 aa, synthetic construct
KDKVGAA

SEQ ID NO: 39861 - protein, 7 aa, synthetic construct
KNSNSAG

SEQ ID NO: 39862 - protein, 7 aa, synthetic construct
YMGTQRV

SEQ ID NO: 39863 - protein, 7 aa, synthetic construct
KNVGTGQ

SEQ ID NO: 39864 - protein, 7 aa, synthetic construct
MSKTPNA

SEQ ID NO: 39865 - protein, 7 aa, synthetic construct
YAVTGQS

SEQ ID NO: 39866 - protein, 7 aa, synthetic construct
FGKGSSG

SEQ ID NO: 39867 - protein, 7 aa, synthetic construct
KPTSSDL

SEQ ID NO: 39868 - protein, 7 aa, synthetic construct
PRPTASG

SEQ ID NO: 39869 - protein, 7 aa, synthetic construct
KQFSGAP

SEQ ID NO: 39870 - protein, 7 aa, synthetic construct
SDAARAQ

SEQ ID NO: 39871 - protein, 7 aa, synthetic construct
SRTQPQG

SEQ ID NO: 39872 - protein, 7 aa, synthetic construct
GKGNVRD

SEQ ID NO: 39873 - protein, 7 aa, synthetic construct
NKMGLTS

SEQ ID NO: 39874 - protein, 7 aa, synthetic construct
TKIWVED

SEQ ID NO: 39875 - protein, 7 aa, synthetic construct
NKQPAAA

SEQ ID NO: 39876 - protein, 7 aa, synthetic construct
VLYKHAN

SEQ ID NO: 39877 - protein, 7 aa, synthetic construct
RQSGIEY

SEQ ID NO: 39878 - protein, 7 aa, synthetic construct
PQRTGVS

SEQ ID NO: 39879 - protein, 7 aa, synthetic construct
TKHDFKA

SEQ ID NO: 39880 - protein, 7 aa, synthetic construct
KSGGVNS

SEQ ID NO: 39881 - protein, 7 aa, synthetic construct
QPGHSNL

SEQ ID NO: 39882 - protein, 7 aa, synthetic construct
NMGRSQG

SEQ ID NO: 39883 - protein, 7 aa, synthetic construct
EQQRRTP

SEQ ID NO: 39884 - protein, 7 aa, synthetic construct
GFGKDGY

SEQ ID NO: 39885 - protein, 7 aa, synthetic construct
SYNTTKP

SEQ ID NO: 39886 - protein, 7 aa, synthetic construct
DKNKQGA

SEQ ID NO: 39887 - protein, 7 aa, synthetic construct
VMAPREG

SEQ ID NO: 39888 - protein, 7 aa, synthetic construct
NGMKAGA

SEQ ID NO: 39889 - protein, 7 aa, synthetic construct
GQKGSMQ

SEQ ID NO: 39890 - protein, 7 aa, synthetic construct
KRNSVED

SEQ ID NO: 39891 - protein, 7 aa, synthetic construct
LYPQSKP

SEQ ID NO: 39892 - protein, 7 aa, synthetic construct
MKSSVKE

SEQ ID NO: 39893 - protein, 7 aa, synthetic construct
LLNTKDK

SEQ ID NO: 39894 - protein, 7 aa, synthetic construct
PATGMAS

SEQ ID NO: 39895 - protein, 7 aa, synthetic construct
VNYAAKG

SEQ ID NO: 39896 - protein, 7 aa, synthetic construct
MNNPKSS

SEQ ID NO: 39897 - protein, 7 aa, synthetic construct
LRTYDQA

SEQ ID NO: 39898 - protein, 7 aa, synthetic construct
MQKSLGG

SEQ ID NO: 39899 - protein, 7 aa, synthetic construct
RDKATGG

SEQ ID NO: 39900 - protein, 7 aa, synthetic construct
PKQPTGG

SEQ ID NO: 39901 - protein, 7 aa, synthetic construct
VTKVSTG

SEQ ID NO: 39902 - protein, 7 aa, synthetic construct
YKQQPQS

SEQ ID NO: 39903 - protein, 7 aa, synthetic construct
PTKNVGP

SEQ ID NO: 39904 - protein, 7 aa, synthetic construct
LPEKARY

SEQ ID NO: 39905 - protein, 7 aa, synthetic construct
TRSQSTG

SEQ ID NO: 39906 - protein, 7 aa, synthetic construct
QPKPGQG

SEQ ID NO: 39907 - protein, 7 aa, synthetic construct
TSGAVKQ

SEQ ID NO: 39908 - protein, 7 aa, synthetic construct
MQIGAST

SEQ ID NO: 39909 - protein, 7 aa, synthetic construct
IKPMNAE

SEQ ID NO: 39910 - protein, 7 aa, synthetic construct
IREHHAS

SEQ ID NO: 39911 - protein, 7 aa, synthetic construct
KTMSSSA

SEQ ID NO: 39912 - protein, 7 aa, synthetic construct
DRHAPQT

SEQ ID NO: 39913 - protein, 7 aa, synthetic construct
TRSANQS

SEQ ID NO: 39914 - protein, 7 aa, synthetic construct
TNGQRQP

SEQ ID NO: 39915 - protein, 7 aa, synthetic construct
NGGTRGG

SEQ ID NO: 39916 - protein, 7 aa, synthetic construct
LQRADIQ

SEQ ID NO: 39917 - protein, 7 aa, synthetic construct
TKAVNQG

SEQ ID NO: 39918 - protein, 7 aa, synthetic construct
SRDGYAA

SEQ ID NO: 39919 - protein, 7 aa, synthetic construct
AGAVAIA

SEQ ID NO: 39920 - protein, 7 aa, synthetic construct
KTTPNTA

SEQ ID NO: 39921 - protein, 7 aa, synthetic construct
YPGPKVA

SEQ ID NO: 39922 - protein, 7 aa, synthetic construct
SGQRQES

SEQ ID NO: 39923 - protein, 7 aa, synthetic construct
VQNMHKP

SEQ ID NO: 39924 - protein, 7 aa, synthetic construct
DGMKNRE

SEQ ID NO: 39925 - protein, 7 aa, synthetic construct
STTHRPV

SEQ ID NO: 39926 - protein, 7 aa, synthetic construct
MNQRATA

SEQ ID NO: 39927 - protein, 7 aa, synthetic construct
GSGPHRF

SEQ ID NO: 39928 - protein, 7 aa, synthetic construct
YESRGGH

SEQ ID NO: 39929 - protein, 7 aa, synthetic construct
MSTTAKS

SEQ ID NO: 39930 - protein, 7 aa, synthetic construct
TPTAQRQ

SEQ ID NO: 39931 - protein, 7 aa, synthetic construct
NQNVTRN

SEQ ID NO: 39932 - protein, 7 aa, synthetic construct
QMKGHNG

SEQ ID NO: 39933 - protein, 7 aa, synthetic construct
MRPKPDQ

SEQ ID NO: 39934 - protein, 7 aa, synthetic construct
KGPTINP

SEQ ID NO: 39935 - protein, 7 aa, synthetic construct
LSKLVTD

SEQ ID NO: 39936 - protein, 7 aa, synthetic construct
QHSQHPA

SEQ ID NO: 39937 - protein, 7 aa, synthetic construct
VAKSIKD

SEQ ID NO: 39938 - protein, 7 aa, synthetic construct
WIRTTGE

SEQ ID NO: 39939 - protein, 7 aa, synthetic construct
RIMGERQ

SEQ ID NO: 39940 - protein, 7 aa, synthetic construct
TTKSQSA

SEQ ID NO: 39941 - protein, 7 aa, synthetic construct
IKNTRAE

SEQ ID NO: 39942 - protein, 7 aa, synthetic construct
KQSQMIP

SEQ ID NO: 39943 - protein, 7 aa, synthetic construct
NAMKRHE

SEQ ID NO: 39944 - protein, 7 aa, synthetic construct
DHSRTSG

SEQ ID NO: 39945 - protein, 7 aa, synthetic construct
HKSNPPD

SEQ ID NO: 39946 - protein, 7 aa, synthetic construct
YGGNRDL

SEQ ID NO: 39947 - protein, 7 aa, synthetic construct
DMQPKSI

SEQ ID NO: 39948 - protein, 7 aa, synthetic construct
SKTGPSA

SEQ ID NO: 39949 - protein, 7 aa, synthetic construct
PSSIMQG

SEQ ID NO: 39950 - protein, 7 aa, synthetic construct
NRSAMAA

SEQ ID NO: 39951 - protein, 7 aa, synthetic construct
FTNRTVA

SEQ ID NO: 39952 - protein, 7 aa, synthetic construct
HNVIQGS

SEQ ID NO: 39953 - protein, 7 aa, synthetic construct
NKQSTPG

SEQ ID NO: 39954 - protein, 7 aa, synthetic construct
VHRTTEH

SEQ ID NO: 39955 - protein, 7 aa, synthetic construct
LPRSGAP

SEQ ID NO: 39956 - protein, 7 aa, synthetic construct
SRHQNAY

SEQ ID NO: 39957 - protein, 7 aa, synthetic construct
WDGKHPG

SEQ ID NO: 39958 - protein, 7 aa, synthetic construct
LASMQKV

SEQ ID NO: 39959 - protein, 7 aa, synthetic construct
IKSTSQS

SEQ ID NO: 39960 - protein, 7 aa, synthetic construct
TLGSGNM

SEQ ID NO: 39961 - protein, 7 aa, synthetic construct
HAKGSTG

SEQ ID NO: 39962 - protein, 7 aa, synthetic construct
KTTAAKE

SEQ ID NO: 39963 - protein, 7 aa, synthetic construct
FNKAVNH

SEQ ID NO: 39964 - protein, 7 aa, synthetic construct
KSSGIQG

SEQ ID NO: 39965 - protein, 7 aa, synthetic construct
HAQYPRA

SEQ ID NO: 39966 - protein, 7 aa, synthetic construct
AADQRGG

SEQ ID NO: 39967 - protein, 7 aa, synthetic construct
SKGTMVG

SEQ ID NO: 39968 - protein, 7 aa, synthetic construct
KPNQAYG

SEQ ID NO: 39969 - protein, 7 aa, synthetic construct
FRAANQN

SEQ ID NO: 39970 - protein, 7 aa, synthetic construct
TSAKSSA

SEQ ID NO: 39971 - protein, 7 aa, synthetic construct
TFGQQQE

SEQ ID NO: 39972 - protein, 7 aa, synthetic construct
KTANGIG

SEQ ID NO: 39973 - protein, 7 aa, synthetic construct
RMSAPEE

SEQ ID NO: 39974 - protein, 7 aa, synthetic construct
QVRDNNK

SEQ ID NO: 39975 - protein, 7 aa, synthetic construct
KIITGTA

SEQ ID NO: 39976 - protein, 7 aa, synthetic construct
SIHPTTH

SEQ ID NO: 39977 - protein, 7 aa, synthetic construct
NSLKTSH

SEQ ID NO: 39978 - protein, 7 aa, synthetic construct
AGKTSGA

SEQ ID NO: 39979 - protein, 7 aa, synthetic construct
YPQSKSS

SEQ ID NO: 39980 - protein, 7 aa, synthetic construct
TAVLIHG

SEQ ID NO: 39981 - protein, 7 aa, synthetic construct
ADRTSNA

SEQ ID NO: 39982 - protein, 7 aa, synthetic construct
GQNKMGS

SEQ ID NO: 39983 - protein, 7 aa, synthetic construct
PKQNARE

SEQ ID NO: 39984 - protein, 7 aa, synthetic construct
KLYKQDG

SEQ ID NO: 39985 - protein, 7 aa, synthetic construct
QGKAAQG

SEQ ID NO: 39986 - protein, 7 aa, synthetic construct
QGSTKQG

SEQ ID NO: 39987 - protein, 7 aa, synthetic construct
QGQRSAS

SEQ ID NO: 39988 - protein, 7 aa, synthetic construct
VKQTVGG

SEQ ID NO: 39989 - protein, 7 aa, synthetic construct
QTSNRAP

SEQ ID NO: 39990 - protein, 7 aa, synthetic construct
MSTGNQR

SEQ ID NO: 39991 - protein, 7 aa, synthetic construct
NKTPMKE

SEQ ID NO: 39992 - protein, 7 aa, synthetic construct
HRSSTGS

SEQ ID NO: 39993 - protein, 7 aa, synthetic construct
NSKMSAD

SEQ ID NO: 39994 - protein, 7 aa, synthetic construct
GHANGVA

SEQ ID NO: 39995 - protein, 7 aa, synthetic construct
DMRARHE

SEQ ID NO: 39996 - protein, 7 aa, synthetic construct
TTTTNKA

SEQ ID NO: 39997 - protein, 7 aa, synthetic construct
YQYHSDM

SEQ ID NO: 39998 - protein, 7 aa, synthetic construct
GKQWSGE

SEQ ID NO: 39999 - protein, 7 aa, synthetic construct
NRNNAVG

SEQ ID NO: 40000 - protein, 7 aa, synthetic construct
FPAKTDL

SEQ ID NO: 40001 - protein, 7 aa, synthetic construct
MSAGRAS

SEQ ID NO: 40002 - protein, 7 aa, synthetic construct
KYDKPGM

SEQ ID NO: 40003 - protein, 7 aa, synthetic construct
VRNNAAM

SEQ ID NO: 40004 - protein, 7 aa, synthetic construct
KYNKDND

SEQ ID NO: 40005 - protein, 7 aa, synthetic construct
HPIKQNP

SEQ ID NO: 40006 - protein, 7 aa, synthetic construct
FKAGNAG

SEQ ID NO: 40007 - protein, 7 aa, synthetic construct
RMSNSNA

SEQ ID NO: 40008 - protein, 7 aa, synthetic construct
NQLHRAD

SEQ ID NO: 40009 - protein, 7 aa, synthetic construct
HSFKQVA

SEQ ID NO: 40010 - protein, 7 aa, synthetic construct
GAAHYSG

SEQ ID NO: 40011 - protein, 7 aa, synthetic construct
NTQKTQG

SEQ ID NO: 40012 - protein, 7 aa, synthetic construct
ATMKTAL

SEQ ID NO: 40013 - protein, 7 aa, synthetic construct
NKASVQA

SEQ ID NO: 40014 - protein, 7 aa, synthetic construct
GIKNTSS

SEQ ID NO: 40015 - protein, 7 aa, synthetic construct
RTPQQAA

SEQ ID NO: 40016 - protein, 7 aa, synthetic construct
KKMHEAG

SEQ ID NO: 40017 - protein, 7 aa, synthetic construct
ITMKSLG

SEQ ID NO: 40018 - protein, 7 aa, synthetic construct
RANTGFN

SEQ ID NO: 40019 - protein, 7 aa, synthetic construct
NFPGSMA

SEQ ID NO: 40020 - protein, 7 aa, synthetic construct
KVTHNDR

SEQ ID NO: 40021 - protein, 7 aa, synthetic construct
INASNKG

SEQ ID NO: 40022 - protein, 7 aa, synthetic construct
NQQQRSA

SEQ ID NO: 40023 - protein, 7 aa, synthetic construct
KRMNIDD

SEQ ID NO: 40024 - protein, 7 aa, synthetic construct
NKPTSNN

SEQ ID NO: 40025 - protein, 7 aa, synthetic construct
TQRMTQA

SEQ ID NO: 40026 - protein, 7 aa, synthetic construct
SGTRTGP

SEQ ID NO: 40027 - protein, 7 aa, synthetic construct
NNLQHRE

SEQ ID NO: 40028 - protein, 7 aa, synthetic construct
TKDRVQG

SEQ ID NO: 40029 - protein, 7 aa, synthetic construct
FAGKVNS

SEQ ID NO: 40030 - protein, 7 aa, synthetic construct
KKSSDDH

SEQ ID NO: 40031 - protein, 7 aa, synthetic construct
WQQWGKD

SEQ ID NO: 40032 - protein, 7 aa, synthetic construct
RNSTMTA

SEQ ID NO: 40033 - protein, 7 aa, synthetic construct
TSKSTQP

SEQ ID NO: 40034 - protein, 7 aa, synthetic construct
RGTGTAG

SEQ ID NO: 40035 - protein, 7 aa, synthetic construct
PKTGSVG

SEQ ID NO: 40036 - protein, 7 aa, synthetic construct
QQRGNQG

SEQ ID NO: 40037 - protein, 7 aa, synthetic construct
RQPGAGN

SEQ ID NO: 40038 - protein, 7 aa, synthetic construct
KGSTAPG

SEQ ID NO: 40039 - protein, 7 aa, synthetic construct
SRLQHSS

SEQ ID NO: 40040 - protein, 7 aa, synthetic construct
GPKQASN

SEQ ID NO: 40041 - protein, 7 aa, synthetic construct
AVGNTKT

SEQ ID NO: 40042 - protein, 7 aa, synthetic construct
MNGSRGA

SEQ ID NO: 40043 - protein, 7 aa, synthetic construct
NKLTPHM

SEQ ID NO: 40044 - protein, 7 aa, synthetic construct
KGPTAAF

SEQ ID NO: 40045 - protein, 7 aa, synthetic construct
LMTARPS

SEQ ID NO: 40046 - protein, 7 aa, synthetic construct
SRNPSGA

SEQ ID NO: 40047 - protein, 7 aa, synthetic construct
AAFQKAN

SEQ ID NO: 40048 - protein, 7 aa, synthetic construct
TIQTNTR

SEQ ID NO: 40049 - protein, 7 aa, synthetic construct
IGKQNGF

SEQ ID NO: 40050 - protein, 7 aa, synthetic construct
GVSIKIG

SEQ ID NO: 40051 - protein, 7 aa, synthetic construct
KTGVAAG

SEQ ID NO: 40052 - protein, 7 aa, synthetic construct
QHTTLRE

SEQ ID NO: 40053 - protein, 7 aa, synthetic construct
HAYSHTG

SEQ ID NO: 40054 - protein, 7 aa, synthetic construct
GKPHTYG

SEQ ID NO: 40055 - protein, 7 aa, synthetic construct
NVQQKWD

SEQ ID NO: 40056 - protein, 7 aa, synthetic construct
RPNNVGP

SEQ ID NO: 40057 - protein, 7 aa, synthetic construct
IKTTSGA

SEQ ID NO: 40058 - protein, 7 aa, synthetic construct
NHHTGMG

SEQ ID NO: 40059 - protein, 7 aa, synthetic construct
VTASLKG

SEQ ID NO: 40060 - protein, 7 aa, synthetic construct
KPMSGGA

SEQ ID NO: 40061 - protein, 7 aa, synthetic construct
GQRTQIY

SEQ ID NO: 40062 - protein, 7 aa, synthetic construct
DRKQGNV

SEQ ID NO: 40063 - protein, 7 aa, synthetic construct
QTGARAG

SEQ ID NO: 40064 - protein, 7 aa, synthetic construct
LANRNHN

SEQ ID NO: 40065 - protein, 7 aa, synthetic construct
YHQGGVR

SEQ ID NO: 40066 - protein, 7 aa, synthetic construct
FTKLFPS

SEQ ID NO: 40067 - protein, 7 aa, synthetic construct
NKPNIAG

SEQ ID NO: 40068 - protein, 7 aa, synthetic construct
KEKLSAP

SEQ ID NO: 40069 - protein, 7 aa, synthetic construct
HFSSAES

SEQ ID NO: 40070 - protein, 7 aa, synthetic construct
GKVAQGG

SEQ ID NO: 40071 - protein, 7 aa, synthetic construct
RGNFAEF

SEQ ID NO: 40072 - protein, 7 aa, synthetic construct
SPQRSTP

SEQ ID NO: 40073 - protein, 7 aa, synthetic construct
YKQFKNE

SEQ ID NO: 40074 - protein, 7 aa, synthetic construct
TTMRGVG

SEQ ID NO: 40075 - protein, 7 aa, synthetic construct
VATHINS

SEQ ID NO: 40076 - protein, 7 aa, synthetic construct
SRSTNAG

SEQ ID NO: 40077 - protein, 7 aa, synthetic construct
KNPSNPM

SEQ ID NO: 40078 - protein, 7 aa, synthetic construct
RTSNSTG

SEQ ID NO: 40079 - protein, 7 aa, synthetic construct
SQTRDAM

SEQ ID NO: 40080 - protein, 7 aa, synthetic construct
AGNKLPA

SEQ ID NO: 40081 - protein, 7 aa, synthetic construct
NRERTID

SEQ ID NO: 40082 - protein, 7 aa, synthetic construct
TGSTFRN

SEQ ID NO: 40083 - protein, 7 aa, synthetic construct
SIRNASM

SEQ ID NO: 40084 - protein, 7 aa, synthetic construct
FQKPTGG

SEQ ID NO: 40085 - protein, 7 aa, synthetic construct
VRNHQAD

SEQ ID NO: 40086 - protein, 7 aa, synthetic construct
YGAGKSP

SEQ ID NO: 40087 - protein, 7 aa, synthetic construct
MGMKIQG

SEQ ID NO: 40088 - protein, 7 aa, synthetic construct
KFKEPNS

SEQ ID NO: 40089 - protein, 7 aa, synthetic construct
PRKDNQG

SEQ ID NO: 40090 - protein, 7 aa, synthetic construct
TKNIKVE

SEQ ID NO: 40091 - protein, 7 aa, synthetic construct
QSNHNAS

SEQ ID NO: 40092 - protein, 7 aa, synthetic construct
TRPQSTS

SEQ ID NO: 40093 - protein, 7 aa, synthetic construct
KKEGISY

SEQ ID NO: 40094 - protein, 7 aa, synthetic construct
RMGNNLA

SEQ ID NO: 40095 - protein, 7 aa, synthetic construct
RMTGATA

SEQ ID NO: 40096 - protein, 7 aa, synthetic construct
SKGNMGF

SEQ ID NO: 40097 - protein, 7 aa, synthetic construct
QKPSTAM

SEQ ID NO: 40098 - protein, 7 aa, synthetic construct
VKTVGSG

SEQ ID NO: 40099 - protein, 7 aa, synthetic construct
VTNITTG

SEQ ID NO: 40100 - protein, 7 aa, synthetic construct
SQIRPTT

SEQ ID NO: 40101 - protein, 7 aa, synthetic construct
TGTGGKG

SEQ ID NO: 40102 - protein, 7 aa, synthetic construct
TVYAREA

SEQ ID NO: 40103 - protein, 7 aa, synthetic construct
YRPVNAD

SEQ ID NO: 40104 - protein, 7 aa, synthetic construct
GFKQDKV

SEQ ID NO: 40105 - protein, 7 aa, synthetic construct
QLQNKFG

SEQ ID NO: 40106 - protein, 7 aa, synthetic construct
ISQIGGG

SEQ ID NO: 40107 - protein, 7 aa, synthetic construct
IKQGGSG

SEQ ID NO: 40108 - protein, 7 aa, synthetic construct
NAATRAI

SEQ ID NO: 40109 - protein, 7 aa, synthetic construct
SKRETGG

SEQ ID NO: 40110 - protein, 7 aa, synthetic construct
RQGVNIN

SEQ ID NO: 40111 - protein, 7 aa, synthetic construct
GRSGYPI

SEQ ID NO: 40112 - protein, 7 aa, synthetic construct
QGRGEVQ

SEQ ID NO: 40113 - protein, 7 aa, synthetic construct
LNRGTTS

SEQ ID NO: 40114 - protein, 7 aa, synthetic construct
SYGKPML

SEQ ID NO: 40115 - protein, 7 aa, synthetic construct
YKQTQTG

SEQ ID NO: 40116 - protein, 7 aa, synthetic construct
VQKMAAG

SEQ ID NO: 40117 - protein, 7 aa, synthetic construct
LGPRELV

SEQ ID NO: 40118 - protein, 7 aa, synthetic construct
PKTSSVA

SEQ ID NO: 40119 - protein, 7 aa, synthetic construct
SNQRSQP

SEQ ID NO: 40120 - protein, 7 aa, synthetic construct
HGASNQA

SEQ ID NO: 40121 - protein, 7 aa, synthetic construct
NPGQQRP

SEQ ID NO: 40122 - protein, 7 aa, synthetic construct
QHYKLDG

SEQ ID NO: 40123 - protein, 7 aa, synthetic construct
WKTKPEF

SEQ ID NO: 40124 - protein, 7 aa, synthetic construct
NRKGEDS

SEQ ID NO: 40125 - protein, 7 aa, synthetic construct
FKTGPTP

SEQ ID NO: 40126 - protein, 7 aa, synthetic construct
PPKIGGA

SEQ ID NO: 40127 - protein, 7 aa, synthetic construct
DKFLGHN

SEQ ID NO: 40128 - protein, 7 aa, synthetic construct
NKAGQGS

SEQ ID NO: 40129 - protein, 7 aa, synthetic construct
AGKGTPA

SEQ ID NO: 40130 - protein, 7 aa, synthetic construct
KMMGTPN

SEQ ID NO: 40131 - protein, 7 aa, synthetic construct
YGSKMTA

SEQ ID NO: 40132 - protein, 7 aa, synthetic construct
FGHNRSE

SEQ ID NO: 40133 - protein, 7 aa, synthetic construct
HGRDVEV

SEQ ID NO: 40134 - protein, 7 aa, synthetic construct
TSGRQVA

SEQ ID NO: 40135 - protein, 7 aa, synthetic construct
IAKDMTK

SEQ ID NO: 40136 - protein, 7 aa, synthetic construct
KRLSDNN

SEQ ID NO: 40137 - protein, 7 aa, synthetic construct
PVAKGTF

SEQ ID NO: 40138 - protein, 7 aa, synthetic construct
RNQTTNA

SEQ ID NO: 40139 - protein, 7 aa, synthetic construct
KYKTEYI

SEQ ID NO: 40140 - protein, 7 aa, synthetic construct
LYAGGKG

SEQ ID NO: 40141 - protein, 7 aa, synthetic construct
ISNRIQI

SEQ ID NO: 40142 - protein, 7 aa, synthetic construct
KFNTIGA

SEQ ID NO: 40143 - protein, 7 aa, synthetic construct
NSKNVNP

SEQ ID NO: 40144 - protein, 7 aa, synthetic construct
MGGKATG

SEQ ID NO: 40145 - protein, 7 aa, synthetic construct
IGHTRQL

SEQ ID NO: 40146 - protein, 7 aa, synthetic construct
TDARKSF

SEQ ID NO: 40147 - protein, 7 aa, synthetic construct
SHRPEKY

SEQ ID NO: 40148 - protein, 7 aa, synthetic construct
MGKHQVP

SEQ ID NO: 40149 - protein, 7 aa, synthetic construct
MHNQQPG

SEQ ID NO: 40150 - protein, 7 aa, synthetic construct
QVPRSPP

SEQ ID NO: 40151 - protein, 7 aa, synthetic construct
WGHIRTP

SEQ ID NO: 40152 - protein, 7 aa, synthetic construct
ASSQKTN

SEQ ID NO: 40153 - protein, 7 aa, synthetic construct
QKTGMQA

SEQ ID NO: 40154 - protein, 7 aa, synthetic construct
RSSTATS

SEQ ID NO: 40155 - protein, 7 aa, synthetic construct
TTGRQNA

SEQ ID NO: 40156 - protein, 7 aa, synthetic construct
DVKYAHK

SEQ ID NO: 40157 - protein, 7 aa, synthetic construct
PYSSAQA

SEQ ID NO: 40158 - protein, 7 aa, synthetic construct
VKTSTAA

SEQ ID NO: 40159 - protein, 7 aa, synthetic construct
TKAMKMG

SEQ ID NO: 40160 - protein, 7 aa, synthetic construct
QKPIFES

SEQ ID NO: 40161 - protein, 7 aa, synthetic construct
RQNGQNV

SEQ ID NO: 40162 - protein, 7 aa, synthetic construct
KHAATLG

SEQ ID NO: 40163 - protein, 7 aa, synthetic construct
STVRPHS

SEQ ID NO: 40164 - protein, 7 aa, synthetic construct
FKNSGTG

SEQ ID NO: 40165 - protein, 7 aa, synthetic construct
QTRSSQP

SEQ ID NO: 40166 - protein, 7 aa, synthetic construct
VPNAKNM

SEQ ID NO: 40167 - protein, 7 aa, synthetic construct
NANKGQG

SEQ ID NO: 40168 - protein, 7 aa, synthetic construct
TKPSGMG

SEQ ID NO: 40169 - protein, 7 aa, synthetic construct
TKQTVGS

SEQ ID NO: 40170 - protein, 7 aa, synthetic construct
QQGRAPE

SEQ ID NO: 40171 - protein, 7 aa, synthetic construct
FAGNRPA

SEQ ID NO: 40172 - protein, 7 aa, synthetic construct
NKYTGNT

SEQ ID NO: 40173 - protein, 7 aa, synthetic construct
FKGNKES

SEQ ID NO: 40174 - protein, 7 aa, synthetic construct
KSNGSMG

SEQ ID NO: 40175 - protein, 7 aa, synthetic construct
NMKANNG

SEQ ID NO: 40176 - protein, 7 aa, synthetic construct
KIAPHAP

SEQ ID NO: 40177 - protein, 7 aa, synthetic construct
MQGQRIG

SEQ ID NO: 40178 - protein, 7 aa, synthetic construct
GFKAGQQ

SEQ ID NO: 40179 - protein, 7 aa, synthetic construct
IARIVGE

SEQ ID NO: 40180 - protein, 7 aa, synthetic construct
KGNFANS

SEQ ID NO: 40181 - protein, 7 aa, synthetic construct
KATSGQA

SEQ ID NO: 40182 - protein, 7 aa, synthetic construct
LNTLKPQ

SEQ ID NO: 40183 - protein, 7 aa, synthetic construct
KYPQTQG

SEQ ID NO: 40184 - protein, 7 aa, synthetic construct
FNNGHSA

SEQ ID NO: 40185 - protein, 7 aa, synthetic construct
LGRGGMG

SEQ ID NO: 40186 - protein, 7 aa, synthetic construct
FKSQNSS

SEQ ID NO: 40187 - protein, 7 aa, synthetic construct
TGKYTMI

SEQ ID NO: 40188 - protein, 7 aa, synthetic construct
PRSGGVA

SEQ ID NO: 40189 - protein, 7 aa, synthetic construct
TPPSKMS

SEQ ID NO: 40190 - protein, 7 aa, synthetic construct
PRSTPVS

SEQ ID NO: 40191 - protein, 7 aa, synthetic construct
AGHRASD

SEQ ID NO: 40192 - protein, 7 aa, synthetic construct
GTNVNKG

SEQ ID NO: 40193 - protein, 7 aa, synthetic construct
KPATSAM

SEQ ID NO: 40194 - protein, 7 aa, synthetic construct
VTNKNMG

SEQ ID NO: 40195 - protein, 7 aa, synthetic construct
SKYGTQA

SEQ ID NO: 40196 - protein, 7 aa, synthetic construct
TTTRTGG

SEQ ID NO: 40197 - protein, 7 aa, synthetic construct
NKNSNQG

SEQ ID NO: 40198 - protein, 7 aa, synthetic construct
WTTAAKA

SEQ ID NO: 40199 - protein, 7 aa, synthetic construct
GFHNSSS

SEQ ID NO: 40200 - protein, 7 aa, synthetic construct
KANQTRE

SEQ ID NO: 40201 - protein, 7 aa, synthetic construct
VQKMITA

SEQ ID NO: 40202 - protein, 7 aa, synthetic construct
GRALSQD

SEQ ID NO: 40203 - protein, 7 aa, synthetic construct
KGQSTGA

SEQ ID NO: 40204 - protein, 7 aa, synthetic construct
IPRERSV

SEQ ID NO: 40205 - protein, 7 aa, synthetic construct
NKANAQV

SEQ ID NO: 40206 - protein, 7 aa, synthetic construct
KVSQGMG

SEQ ID NO: 40207 - protein, 7 aa, synthetic construct
NATGRMA

SEQ ID NO: 40208 - protein, 7 aa, synthetic construct
TTGMRGA

SEQ ID NO: 40209 - protein, 7 aa, synthetic construct
MKAQSIA

SEQ ID NO: 40210 - protein, 7 aa, synthetic construct
NKDRVTG

SEQ ID NO: 40211 - protein, 7 aa, synthetic construct
EKQKSSD

SEQ ID NO: 40212 - protein, 7 aa, synthetic construct
MKGASQG

SEQ ID NO: 40213 - protein, 7 aa, synthetic construct
LVNQGRP

SEQ ID NO: 40214 - protein, 7 aa, synthetic construct
VSPVNTH

SEQ ID NO: 40215 - protein, 7 aa, synthetic construct
NQRGNGA

SEQ ID NO: 40216 - protein, 7 aa, synthetic construct
HATGARE

SEQ ID NO: 40217 - protein, 7 aa, synthetic construct
TTGKGMA

SEQ ID NO: 40218 - protein, 7 aa, synthetic construct
QPRNSGM

SEQ ID NO: 40219 - protein, 7 aa, synthetic construct
WPGKDAT

SEQ ID NO: 40220 - protein, 7 aa, synthetic construct
TQAKRDY

SEQ ID NO: 40221 - protein, 7 aa, synthetic construct
YFNKGHG

SEQ ID NO: 40222 - protein, 7 aa, synthetic construct
GNVVKST

SEQ ID NO: 40223 - protein, 7 aa, synthetic construct
WREAYKD

SEQ ID NO: 40224 - protein, 7 aa, synthetic construct
MSATKNS

SEQ ID NO: 40225 - protein, 7 aa, synthetic construct
QKSPGQP

SEQ ID NO: 40226 - protein, 7 aa, synthetic construct
QLKPQDM

SEQ ID NO: 40227 - protein, 7 aa, synthetic construct
IEGFKSR

SEQ ID NO: 40228 - protein, 7 aa, synthetic construct
MAKPSSS

SEQ ID NO: 40229 - protein, 7 aa, synthetic construct
FNKDWAS

SEQ ID NO: 40230 - protein, 7 aa, synthetic construct
KTPSNQA

SEQ ID NO: 40231 - protein, 7 aa, synthetic construct
KNTNNQT

SEQ ID NO: 40232 - protein, 7 aa, synthetic construct
LQVGPNQ

SEQ ID NO: 40233 - protein, 7 aa, synthetic construct
GPVAAKP

SEQ ID NO: 40234 - protein, 7 aa, synthetic construct
NFNSAKG

SEQ ID NO: 40235 - protein, 7 aa, synthetic construct
KAFPSRD

SEQ ID NO: 40236 - protein, 7 aa, synthetic construct
SKISMKA

SEQ ID NO: 40237 - protein, 7 aa, synthetic construct
MSGGSKG

SEQ ID NO: 40238 - protein, 7 aa, synthetic construct
TKFQQQG

SEQ ID NO: 40239 - protein, 7 aa, synthetic construct
GKNQISA

SEQ ID NO: 40240 - protein, 7 aa, synthetic construct
FDKTWSG

SEQ ID NO: 40241 - protein, 7 aa, synthetic construct
HGLGNMG

SEQ ID NO: 40242 - protein, 7 aa, synthetic construct
TLAKNSF

SEQ ID NO: 40243 - protein, 7 aa, synthetic construct
RSAARDV

SEQ ID NO: 40244 - protein, 7 aa, synthetic construct
KMNNSNP

SEQ ID NO: 40245 - protein, 7 aa, synthetic construct
NHTKVTQ

SEQ ID NO: 40246 - protein, 7 aa, synthetic construct
KGPHYSA

SEQ ID NO: 40247 - protein, 7 aa, synthetic construct
YEGRSYG

SEQ ID NO: 40248 - protein, 7 aa, synthetic construct
KPGGNTG

SEQ ID NO: 40249 - protein, 7 aa, synthetic construct
WRGGVVD

SEQ ID NO: 40250 - protein, 7 aa, synthetic construct
NKAVIGG

SEQ ID NO: 40251 - protein, 7 aa, synthetic construct
GKTSSTF

SEQ ID NO: 40252 - protein, 7 aa, synthetic construct
GYSQRTE

SEQ ID NO: 40253 - protein, 7 aa, synthetic construct
STHKNYG

SEQ ID NO: 40254 - protein, 7 aa, synthetic construct
LAMQRNN

SEQ ID NO: 40255 - protein, 7 aa, synthetic construct
QIRSIPL

SEQ ID NO: 40256 - protein, 7 aa, synthetic construct
TKQSGSS

SEQ ID NO: 40257 - protein, 7 aa, synthetic construct
NHRETGA

SEQ ID NO: 40258 - protein, 7 aa, synthetic construct
GRPPTNG

SEQ ID NO: 40259 - protein, 7 aa, synthetic construct
YSKSMPN

SEQ ID NO: 40260 - protein, 7 aa, synthetic construct
NNPLRMD

SEQ ID NO: 40261 - protein, 7 aa, synthetic construct
DAIAGKY

SEQ ID NO: 40262 - protein, 7 aa, synthetic construct
RSKDSQN

SEQ ID NO: 40263 - protein, 7 aa, synthetic construct
MLHRDSA

SEQ ID NO: 40264 - protein, 7 aa, synthetic construct
MKSAAAA

SEQ ID NO: 40265 - protein, 7 aa, synthetic construct
GKTSNSM

SEQ ID NO: 40266 - protein, 7 aa, synthetic construct
KTQSAAG

SEQ ID NO: 40267 - protein, 7 aa, synthetic construct
PYKIGPH

SEQ ID NO: 40268 - protein, 7 aa, synthetic construct
FMDNVKG

SEQ ID NO: 40269 - protein, 7 aa, synthetic construct
QERNPRS

SEQ ID NO: 40270 - protein, 7 aa, synthetic construct
NQTSVGK

SEQ ID NO: 40271 - protein, 7 aa, synthetic construct
PKGTSGS

SEQ ID NO: 40272 - protein, 7 aa, synthetic construct
TRDRGVG

SEQ ID NO: 40273 - protein, 7 aa, synthetic construct
RPKTVDD

SEQ ID NO: 40274 - protein, 7 aa, synthetic construct
NKSSAYA

SEQ ID NO: 40275 - protein, 7 aa, synthetic construct
QLHVKYN

SEQ ID NO: 40276 - protein, 7 aa, synthetic construct
KMPGMGG

SEQ ID NO: 40277 - protein, 7 aa, synthetic construct
FKQPGQG

SEQ ID NO: 40278 - protein, 7 aa, synthetic construct
RVTGRES

SEQ ID NO: 40279 - protein, 7 aa, synthetic construct
MTTKMQS

SEQ ID NO: 40280 - protein, 7 aa, synthetic construct
NRNAMQG

SEQ ID NO: 40281 - protein, 7 aa, synthetic construct
KPIAGKD

SEQ ID NO: 40282 - protein, 7 aa, synthetic construct
QPHSAGM

SEQ ID NO: 40283 - protein, 7 aa, synthetic construct
YSMETGR

SEQ ID NO: 40284 - protein, 7 aa, synthetic construct
RNSQNAQ

SEQ ID NO: 40285 - protein, 7 aa, synthetic construct
SAHLRQA

SEQ ID NO: 40286 - protein, 7 aa, synthetic construct
NKTSGNG

SEQ ID NO: 40287 - protein, 7 aa, synthetic construct
LQGSKHS

SEQ ID NO: 40288 - protein, 7 aa, synthetic construct
NGSTRQP

SEQ ID NO: 40289 - protein, 7 aa, synthetic construct
TIPAKPP

SEQ ID NO: 40290 - protein, 7 aa, synthetic construct
NIKVQKD

SEQ ID NO: 40291 - protein, 7 aa, synthetic construct
MGAKSSA

SEQ ID NO: 40292 - protein, 7 aa, synthetic construct
NKGQTFS

SEQ ID NO: 40293 - protein, 7 aa, synthetic construct
MPLGGVQ

SEQ ID NO: 40294 - protein, 7 aa, synthetic construct
KHTPTEI

SEQ ID NO: 40295 - protein, 7 aa, synthetic construct
TNAMPKY

SEQ ID NO: 40296 - protein, 7 aa, synthetic construct
VSNSKHG

SEQ ID NO: 40297 - protein, 7 aa, synthetic construct
GSANKTG

SEQ ID NO: 40298 - protein, 7 aa, synthetic construct
SQRSQSP

SEQ ID NO: 40299 - protein, 7 aa, synthetic construct
FGVRNRD

SEQ ID NO: 40300 - protein, 7 aa, synthetic construct
KDGIYTS

SEQ ID NO: 40301 - protein, 7 aa, synthetic construct
QKNTSQS

SEQ ID NO: 40302 - protein, 7 aa, synthetic construct
SKTSTQP

SEQ ID NO: 40303 - protein, 7 aa, synthetic construct
VQKRDES

SEQ ID NO: 40304 - protein, 7 aa, synthetic construct
YNSRANG

SEQ ID NO: 40305 - protein, 7 aa, synthetic construct
TKPSQAS

SEQ ID NO: 40306 - protein, 7 aa, synthetic construct
YSKMQPS

SEQ ID NO: 40307 - protein, 7 aa, synthetic construct
STGSQPM

SEQ ID NO: 40308 - protein, 7 aa, synthetic construct
GPRGVTG

SEQ ID NO: 40309 - protein, 7 aa, synthetic construct
SPRNNNA

SEQ ID NO: 40310 - protein, 7 aa, synthetic construct
KTGTSQS

SEQ ID NO: 40311 - protein, 7 aa, synthetic construct
IKVAPMN

SEQ ID NO: 40312 - protein, 7 aa, synthetic construct
RRTASDE

SEQ ID NO: 40313 - protein, 7 aa, synthetic construct
TKNMHPA

SEQ ID NO: 40314 - protein, 7 aa, synthetic construct
GQATKNG

SEQ ID NO: 40315 - protein, 7 aa, synthetic construct
TGQRNYE

SEQ ID NO: 40316 - protein, 7 aa, synthetic construct
MQRTGNP

SEQ ID NO: 40317 - protein, 7 aa, synthetic construct
QNRIPGY

SEQ ID NO: 40318 - protein, 7 aa, synthetic construct
YDTHYKG

SEQ ID NO: 40319 - protein, 7 aa, synthetic construct
LQVTKSS

SEQ ID NO: 40320 - protein, 7 aa, synthetic construct
FDMGKQR

SEQ ID NO: 40321 - protein, 7 aa, synthetic construct
QQRGIPP

SEQ ID NO: 40322 - protein, 7 aa, synthetic construct
KSNGGSP

SEQ ID NO: 40323 - protein, 7 aa, synthetic construct
IWKSGDA

SEQ ID NO: 40324 - protein, 7 aa, synthetic construct
RNQVGAG

SEQ ID NO: 40325 - protein, 7 aa, synthetic construct
RNSDNNG

SEQ ID NO: 40326 - protein, 7 aa, synthetic construct
QKSTSVA

SEQ ID NO: 40327 - protein, 7 aa, synthetic construct
KVQTGGA

SEQ ID NO: 40328 - protein, 7 aa, synthetic construct
GQAPRPG

SEQ ID NO: 40329 - protein, 7 aa, synthetic construct
RSKDTNV

SEQ ID NO: 40330 - protein, 7 aa, synthetic construct
TKQATTG

SEQ ID NO: 40331 - protein, 7 aa, synthetic construct
NRSPNQN

SEQ ID NO: 40332 - protein, 7 aa, synthetic construct
LRNHHDS

SEQ ID NO: 40333 - protein, 7 aa, synthetic construct
KTANGPG

SEQ ID NO: 40334 - protein, 7 aa, synthetic construct
KSDTSRN

SEQ ID NO: 40335 - protein, 7 aa, synthetic construct
RNPAVVP

SEQ ID NO: 40336 - protein, 7 aa, synthetic construct
FYPAKSD

SEQ ID NO: 40337 - protein, 7 aa, synthetic construct
WQNMGAH

SEQ ID NO: 40338 - protein, 7 aa, synthetic construct
RNGPTTG

SEQ ID NO: 40339 - protein, 7 aa, synthetic construct
VKPAANT

SEQ ID NO: 40340 - protein, 7 aa, synthetic construct
NPKYSGG

SEQ ID NO: 40341 - protein, 7 aa, synthetic construct
FGKTSAS

SEQ ID NO: 40342 - protein, 7 aa, synthetic construct
QTKAGDR

SEQ ID NO: 40343 - protein, 7 aa, synthetic construct
DQIAMRK

SEQ ID NO: 40344 - protein, 7 aa, synthetic construct
FAKTLKD

SEQ ID NO: 40345 - protein, 7 aa, synthetic construct
KSVNAAA

SEQ ID NO: 40346 - protein, 7 aa, synthetic construct
NKAPGSG

SEQ ID NO: 40347 - protein, 7 aa, synthetic construct
RSVDGTG

SEQ ID NO: 40348 - protein, 7 aa, synthetic construct
KTNGGIG

SEQ ID NO: 40349 - protein, 7 aa, synthetic construct
TQKTSNP

SEQ ID NO: 40350 - protein, 7 aa, synthetic construct
DHRGKMA

SEQ ID NO: 40351 - protein, 7 aa, synthetic construct
SKPAKSD

SEQ ID NO: 40352 - protein, 7 aa, synthetic construct
ASHQSPG

SEQ ID NO: 40353 - protein, 7 aa, synthetic construct
QGSKVAG

SEQ ID NO: 40354 - protein, 7 aa, synthetic construct
MKQDSAS

SEQ ID NO: 40355 - protein, 7 aa, synthetic construct
KHKPDES

SEQ ID NO: 40356 - protein, 7 aa, synthetic construct
DVPVQRR

SEQ ID NO: 40357 - protein, 7 aa, synthetic construct
QKPTNKE

SEQ ID NO: 40358 - protein, 7 aa, synthetic construct
MGHNANG

SEQ ID NO: 40359 - protein, 7 aa, synthetic construct
QPRIMQE

SEQ ID NO: 40360 - protein, 7 aa, synthetic construct
GTHRNGE

SEQ ID NO: 40361 - protein, 7 aa, synthetic construct
GKMSGGG

SEQ ID NO: 40362 - protein, 7 aa, synthetic construct
PVNKMQP

SEQ ID NO: 40363 - protein, 7 aa, synthetic construct
NQNRVGG

SEQ ID NO: 40364 - protein, 7 aa, synthetic construct
FSTEAGR

SEQ ID NO: 40365 - protein, 7 aa, synthetic construct
GQNRVNG

SEQ ID NO: 40366 - protein, 7 aa, synthetic construct
MKTQNSA

SEQ ID NO: 40367 - protein, 7 aa, synthetic construct
NRPSQSP

SEQ ID NO: 40368 - protein, 7 aa, synthetic construct
VRQGASG

SEQ ID NO: 40369 - protein, 7 aa, synthetic construct
NPRASQS

SEQ ID NO: 40370 - protein, 7 aa, synthetic construct
YKPNAQS

SEQ ID NO: 40371 - protein, 7 aa, synthetic construct
KVNNGSV

SEQ ID NO: 40372 - protein, 7 aa, synthetic construct
HKFGGSP

SEQ ID NO: 40373 - protein, 7 aa, synthetic construct
PKSVNQG

SEQ ID NO: 40374 - protein, 7 aa, synthetic construct
RGNNPAA

SEQ ID NO: 40375 - protein, 7 aa, synthetic construct
GVPGTTY

SEQ ID NO: 40376 - protein, 7 aa, synthetic construct
SNQRQNA

SEQ ID NO: 40377 - protein, 7 aa, synthetic construct
YGQVTRS

SEQ ID NO: 40378 - protein, 7 aa, synthetic construct
ANKTSQS

SEQ ID NO: 40379 - protein, 7 aa, synthetic construct
QNNTKSA

SEQ ID NO: 40380 - protein, 7 aa, synthetic construct
GPNGKFG

SEQ ID NO: 40381 - protein, 7 aa, synthetic construct
LPGQSAG

SEQ ID NO: 40382 - protein, 7 aa, synthetic construct
GVSDRKW

SEQ ID NO: 40383 - protein, 7 aa, synthetic construct
FNKGSTS

SEQ ID NO: 40384 - protein, 7 aa, synthetic construct
RTPNSGA

SEQ ID NO: 40385 - protein, 7 aa, synthetic construct
GKSNATM

SEQ ID NO: 40386 - protein, 7 aa, synthetic construct
MKNDNRA

SEQ ID NO: 40387 - protein, 7 aa, synthetic construct
QYFNGKE

SEQ ID NO: 40388 - protein, 7 aa, synthetic construct
SRTSPTA

SEQ ID NO: 40389 - protein, 7 aa, synthetic construct
IGRGGTV

SEQ ID NO: 40390 - protein, 7 aa, synthetic construct
RHGGLGA

SEQ ID NO: 40391 - protein, 7 aa, synthetic construct
QERIRSP

SEQ ID NO: 40392 - protein, 7 aa, synthetic construct
MHQMGDK

SEQ ID NO: 40393 - protein, 7 aa, synthetic construct
GSMKTGG

SEQ ID NO: 40394 - protein, 7 aa, synthetic construct
YGTKSQG

SEQ ID NO: 40395 - protein, 7 aa, synthetic construct
WTSSNSG

SEQ ID NO: 40396 - protein, 7 aa, synthetic construct
RNTSNGG

SEQ ID NO: 40397 - protein, 7 aa, synthetic construct
AKGAAGT

SEQ ID NO: 40398 - protein, 7 aa, synthetic construct
KSPGYQG

SEQ ID NO: 40399 - protein, 7 aa, synthetic construct
NIKGMKD

SEQ ID NO: 40400 - protein, 7 aa, synthetic construct
QASKGMG

SEQ ID NO: 40401 - protein, 7 aa, synthetic construct
MSKVSGG

SEQ ID NO: 40402 - protein, 7 aa, synthetic construct
SQNAQGG

SEQ ID NO: 40403 - protein, 7 aa, synthetic construct
YGSNRTG

SEQ ID NO: 40404 - protein, 7 aa, synthetic construct
NQKSMPG

SEQ ID NO: 40405 - protein, 7 aa, synthetic construct
RPNTVAG

SEQ ID NO: 40406 - protein, 7 aa, synthetic construct
NRNQVPA

SEQ ID NO: 40407 - protein, 7 aa, synthetic construct
KVGQSNA

SEQ ID NO: 40408 - protein, 7 aa, synthetic construct
KTQAVAG

SEQ ID NO: 40409 - protein, 7 aa, synthetic construct
KFAPSTE

SEQ ID NO: 40410 - protein, 7 aa, synthetic construct
ANRSLAS

SEQ ID NO: 40411 - protein, 7 aa, synthetic construct
HHAYSAG

SEQ ID NO: 40412 - protein, 7 aa, synthetic construct
YTSRFKD

SEQ ID NO: 40413 - protein, 7 aa, synthetic construct
GKGVGMN

SEQ ID NO: 40414 - protein, 7 aa, synthetic construct
TGTGKTA

SEQ ID NO: 40415 - protein, 7 aa, synthetic construct
ARNQTSA

SEQ ID NO: 40416 - protein, 7 aa, synthetic construct
KSTSNAS

SEQ ID NO: 40417 - protein, 7 aa, synthetic construct
MLNTYKE

SEQ ID NO: 40418 - protein, 7 aa, synthetic construct
HNQRMNA

SEQ ID NO: 40419 - protein, 7 aa, synthetic construct
IVSTQRI

SEQ ID NO: 40420 - protein, 7 aa, synthetic construct
GVTGRSF

SEQ ID NO: 40421 - protein, 7 aa, synthetic construct
VSSWHNE

SEQ ID NO: 40422 - protein, 7 aa, synthetic construct
YPRNQSM

SEQ ID NO: 40423 - protein, 7 aa, synthetic construct
TPLMRHG

SEQ ID NO: 40424 - protein, 7 aa, synthetic construct
QKSTGGG

SEQ ID NO: 40425 - protein, 7 aa, synthetic construct
TYTAVQH

SEQ ID NO: 40426 - protein, 7 aa, synthetic construct
GHPGPKS

SEQ ID NO: 40427 - protein, 7 aa, synthetic construct
NPSQRSG

SEQ ID NO: 40428 - protein, 7 aa, synthetic construct
IQNAAQK

SEQ ID NO: 40429 - protein, 7 aa, synthetic construct
WNMSGVG

SEQ ID NO: 40430 - protein, 7 aa, synthetic construct
YNSGGKG

SEQ ID NO: 40431 - protein, 7 aa, synthetic construct
FMPNTSH

SEQ ID NO: 40432 - protein, 7 aa, synthetic construct
PPQSRRE

SEQ ID NO: 40433 - protein, 7 aa, synthetic construct
DMGIGRG

SEQ ID NO: 40434 - protein, 7 aa, synthetic construct
KSNNATQ

SEQ ID NO: 40435 - protein, 7 aa, synthetic construct
IPTKANA

SEQ ID NO: 40436 - protein, 7 aa, synthetic construct
VNQLAKG

SEQ ID NO: 40437 - protein, 7 aa, synthetic construct
RTTGVGA

SEQ ID NO: 40438 - protein, 7 aa, synthetic construct
FRAGTPA

SEQ ID NO: 40439 - protein, 7 aa, synthetic construct
DSPPLMG

SEQ ID NO: 40440 - protein, 7 aa, synthetic construct
QRPNGPA

SEQ ID NO: 40441 - protein, 7 aa, synthetic construct
NRAATQA

SEQ ID NO: 40442 - protein, 7 aa, synthetic construct
PKGQSAP

SEQ ID NO: 40443 - protein, 7 aa, synthetic construct
NGIAMIG

SEQ ID NO: 40444 - protein, 7 aa, synthetic construct
SVKNSKE

SEQ ID NO: 40445 - protein, 7 aa, synthetic construct
RDKSSGV

SEQ ID NO: 40446 - protein, 7 aa, synthetic construct
TRANAAA

SEQ ID NO: 40447 - protein, 7 aa, synthetic construct
TRSQVQG

SEQ ID NO: 40448 - protein, 7 aa, synthetic construct
KAPGNYG

SEQ ID NO: 40449 - protein, 7 aa, synthetic construct
GNSRTAP

SEQ ID NO: 40450 - protein, 7 aa, synthetic construct
VTGYLHS

SEQ ID NO: 40451 - protein, 7 aa, synthetic construct
ATQKIDL

SEQ ID NO: 40452 - protein, 7 aa, synthetic construct
RTMNSQA

SEQ ID NO: 40453 - protein, 7 aa, synthetic construct
TPAKTQN

SEQ ID NO: 40454 - protein, 7 aa, synthetic construct
IPKRDMG

SEQ ID NO: 40455 - protein, 7 aa, synthetic construct
NYKMVNG

SEQ ID NO: 40456 - protein, 7 aa, synthetic construct
TRQSGQP

SEQ ID NO: 40457 - protein, 7 aa, synthetic construct
RIRNNDG

SEQ ID NO: 40458 - protein, 7 aa, synthetic construct
VRSLPAL

SEQ ID NO: 40459 - protein, 7 aa, synthetic construct
GHASPYV

SEQ ID NO: 40460 - protein, 7 aa, synthetic construct
IMPGRSG

SEQ ID NO: 40461 - protein, 7 aa, synthetic construct
KSYNGQA

SEQ ID NO: 40462 - protein, 7 aa, synthetic construct
MGRASHD

SEQ ID NO: 40463 - protein, 7 aa, synthetic construct
YKMHIRE

SEQ ID NO: 40464 - protein, 7 aa, synthetic construct
RGTNVGA

SEQ ID NO: 40465 - protein, 7 aa, synthetic construct
VKSPSNS

SEQ ID NO: 40466 - protein, 7 aa, synthetic construct
RTGPYNE

SEQ ID NO: 40467 - protein, 7 aa, synthetic construct
NAEWARS

SEQ ID NO: 40468 - protein, 7 aa, synthetic construct
EFSGRSG

SEQ ID NO: 40469 - protein, 7 aa, synthetic construct
RDNTKSG

SEQ ID NO: 40470 - protein, 7 aa, synthetic construct
YMRPHVD

SEQ ID NO: 40471 - protein, 7 aa, synthetic construct
RPPSTGM

SEQ ID NO: 40472 - protein, 7 aa, synthetic construct
KNIHVRE

SEQ ID NO: 40473 - protein, 7 aa, synthetic construct
SNASRLM

SEQ ID NO: 40474 - protein, 7 aa, synthetic construct
TKPMGGG

SEQ ID NO: 40475 - protein, 7 aa, synthetic construct
NAKSSVG

SEQ ID NO: 40476 - protein, 7 aa, synthetic construct
YGKQPTG

SEQ ID NO: 40477 - protein, 7 aa, synthetic construct
QGMNKQS

SEQ ID NO: 40478 - protein, 7 aa, synthetic construct
IRVGDMT

SEQ ID NO: 40479 - protein, 7 aa, synthetic construct
VFNGSNK

SEQ ID NO: 40480 - protein, 7 aa, synthetic construct
TASSKGQ

SEQ ID NO: 40481 - protein, 7 aa, synthetic construct
WADFASG

SEQ ID NO: 40482 - protein, 7 aa, synthetic construct
FQNKSSP

SEQ ID NO: 40483 - protein, 7 aa, synthetic construct
GPGKNMA

SEQ ID NO: 40484 - protein, 7 aa, synthetic construct
SMTGKGE

SEQ ID NO: 40485 - protein, 7 aa, synthetic construct
NSGPVRS

SEQ ID NO: 40486 - protein, 7 aa, synthetic construct
QKAQKEF

SEQ ID NO: 40487 - protein, 7 aa, synthetic construct
KSFNATS

SEQ ID NO: 40488 - protein, 7 aa, synthetic construct
NKSQGGN

SEQ ID NO: 40489 - protein, 7 aa, synthetic construct
TQSRSVG

SEQ ID NO: 40490 - protein, 7 aa, synthetic construct
RQGSTTA

SEQ ID NO: 40491 - protein, 7 aa, synthetic construct
PMSKHSE

SEQ ID NO: 40492 - protein, 7 aa, synthetic construct
NTSNWNP

SEQ ID NO: 40493 - protein, 7 aa, synthetic construct
ENKGRTF

SEQ ID NO: 40494 - protein, 7 aa, synthetic construct
SDHTLKR

SEQ ID NO: 40495 - protein, 7 aa, synthetic construct
REFKYQG

SEQ ID NO: 40496 - protein, 7 aa, synthetic construct
VVGNAKG

SEQ ID NO: 40497 - protein, 7 aa, synthetic construct
QITFQTG

SEQ ID NO: 40498 - protein, 7 aa, synthetic construct
TKVGSRE

SEQ ID NO: 40499 - protein, 7 aa, synthetic construct
TKDQHNR

SEQ ID NO: 40500 - protein, 7 aa, synthetic construct
SWQKNME

SEQ ID NO: 40501 - protein, 7 aa, synthetic construct
MGSGVKT

SEQ ID NO: 40502 - protein, 7 aa, synthetic construct
IKGTTKD

SEQ ID NO: 40503 - protein, 7 aa, synthetic construct
TPKQGVP

SEQ ID NO: 40504 - protein, 7 aa, synthetic construct
TTKQQSG

SEQ ID NO: 40505 - protein, 7 aa, synthetic construct
YHASAGV

SEQ ID NO: 40506 - protein, 7 aa, synthetic construct
IQTVKLP

SEQ ID NO: 40507 - protein, 7 aa, synthetic construct
GRRPDMD

SEQ ID NO: 40508 - protein, 7 aa, synthetic construct
ANNAKNG

SEQ ID NO: 40509 - protein, 7 aa, synthetic construct
MKNKPPE

SEQ ID NO: 40510 - protein, 7 aa, synthetic construct
VRSHQMQ

SEQ ID NO: 40511 - protein, 7 aa, synthetic construct
TKGSIPH

SEQ ID NO: 40512 - protein, 7 aa, synthetic construct
IHSNRPA

SEQ ID NO: 40513 - protein, 7 aa, synthetic construct
MGNQRQA

SEQ ID NO: 40514 - protein, 7 aa, synthetic construct
GPSVRQA

SEQ ID NO: 40515 - protein, 7 aa, synthetic construct
GPTRVAE

SEQ ID NO: 40516 - protein, 7 aa, synthetic construct
NTIKSNA

SEQ ID NO: 40517 - protein, 7 aa, synthetic construct
LGLKEAS

SEQ ID NO: 40518 - protein, 7 aa, synthetic construct
PRANSMA

SEQ ID NO: 40519 - protein, 7 aa, synthetic construct
FGGFGNA

SEQ ID NO: 40520 - protein, 7 aa, synthetic construct
IPVISKD

SEQ ID NO: 40521 - protein, 7 aa, synthetic construct
NKNNASV

SEQ ID NO: 40522 - protein, 7 aa, synthetic construct
TTRIGGQ

SEQ ID NO: 40523 - protein, 7 aa, synthetic construct
HPKGTTT

SEQ ID NO: 40524 - protein, 7 aa, synthetic construct
DARIKMA

SEQ ID NO: 40525 - protein, 7 aa, synthetic construct
GTRTSES

SEQ ID NO: 40526 - protein, 7 aa, synthetic construct
IAPYVKV

SEQ ID NO: 40527 - protein, 7 aa, synthetic construct
AYKTPTG

SEQ ID NO: 40528 - protein, 7 aa, synthetic construct
NIKIQVA

SEQ ID NO: 40529 - protein, 7 aa, synthetic construct
RAESRVG

SEQ ID NO: 40530 - protein, 7 aa, synthetic construct
FGNNIKE

SEQ ID NO: 40531 - protein, 7 aa, synthetic construct
IQHMSIG

SEQ ID NO: 40532 - protein, 7 aa, synthetic construct
VSVRMTG

SEQ ID NO: 40533 - protein, 7 aa, synthetic construct
QGSGTKG

SEQ ID NO: 40534 - protein, 7 aa, synthetic construct
KSANTTG

SEQ ID NO: 40535 - protein, 7 aa, synthetic construct
IASQMKG

SEQ ID NO: 40536 - protein, 7 aa, synthetic construct
NNMPTVG

SEQ ID NO: 40537 - protein, 7 aa, synthetic construct
EKKIERQ

SEQ ID NO: 40538 - protein, 7 aa, synthetic construct
FGMGSAP

SEQ ID NO: 40539 - protein, 7 aa, synthetic construct
MTGRATG

SEQ ID NO: 40540 - protein, 7 aa, synthetic construct
NKNPPGT

SEQ ID NO: 40541 - protein, 7 aa, synthetic construct
KKPSMSE

SEQ ID NO: 40542 - protein, 7 aa, synthetic construct
IGTWQKG

SEQ ID NO: 40543 - protein, 7 aa, synthetic construct
VGTYNRP

SEQ ID NO: 40544 - protein, 7 aa, synthetic construct
KGPNNNG

SEQ ID NO: 40545 - protein, 7 aa, synthetic construct
YSGHYAA

SEQ ID NO: 40546 - protein, 7 aa, synthetic construct
GQSNKFG

SEQ ID NO: 40547 - protein, 7 aa, synthetic construct
HMGHVAG

SEQ ID NO: 40548 - protein, 7 aa, synthetic construct
GTKSVGS

SEQ ID NO: 40549 - protein, 7 aa, synthetic construct
YSQSRKD

SEQ ID NO: 40550 - protein, 7 aa, synthetic construct
LRPTNKD

SEQ ID NO: 40551 - protein, 7 aa, synthetic construct
KAPNMYE

SEQ ID NO: 40552 - protein, 7 aa, synthetic construct
WMGQGHS

SEQ ID NO: 40553 - protein, 7 aa, synthetic construct
TSVNKQV

SEQ ID NO: 40554 - protein, 7 aa, synthetic construct
YTPSSKG

SEQ ID NO: 40555 - protein, 7 aa, synthetic construct
RVGQQTG

SEQ ID NO: 40556 - protein, 7 aa, synthetic construct
KLGTSTG

SEQ ID NO: 40557 - protein, 7 aa, synthetic construct
LFNMRAG

SEQ ID NO: 40558 - protein, 7 aa, synthetic construct
PYRQPTE

SEQ ID NO: 40559 - protein, 7 aa, synthetic construct
QTGRTNA

SEQ ID NO: 40560 - protein, 7 aa, synthetic construct
TKGQAAG

SEQ ID NO: 40561 - protein, 7 aa, synthetic construct
RQNTGMD

SEQ ID NO: 40562 - protein, 7 aa, synthetic construct
SHNHTGF

SEQ ID NO: 40563 - protein, 7 aa, synthetic construct
MRPHDST

SEQ ID NO: 40564 - protein, 7 aa, synthetic construct
RIQGGGS

SEQ ID NO: 40565 - protein, 7 aa, synthetic construct
HSPQSHN

SEQ ID NO: 40566 - protein, 7 aa, synthetic construct
VRQNQQF

SEQ ID NO: 40567 - protein, 7 aa, synthetic construct
VRPTAQS

SEQ ID NO: 40568 - protein, 7 aa, synthetic construct
KPGFSSP

SEQ ID NO: 40569 - protein, 7 aa, synthetic construct
MNTSIKP

SEQ ID NO: 40570 - protein, 7 aa, synthetic construct
KLAPNTE

SEQ ID NO: 40571 - protein, 7 aa, synthetic construct
GKMSNGP

SEQ ID NO: 40572 - protein, 7 aa, synthetic construct
YPGKHGI

SEQ ID NO: 40573 - protein, 7 aa, synthetic construct
TQPGRMA

SEQ ID NO: 40574 - protein, 7 aa, synthetic construct
NKTGGSP

SEQ ID NO: 40575 - protein, 7 aa, synthetic construct
HPTVGHG

SEQ ID NO: 40576 - protein, 7 aa, synthetic construct
AGTLAKP

SEQ ID NO: 40577 - protein, 7 aa, synthetic construct
QSSKGFG

SEQ ID NO: 40578 - protein, 7 aa, synthetic construct
NVKQKGE

SEQ ID NO: 40579 - protein, 7 aa, synthetic construct
WDRKTAD

SEQ ID NO: 40580 - protein, 7 aa, synthetic construct
RDNVVQK

SEQ ID NO: 40581 - protein, 7 aa, synthetic construct
PKGNAGV

SEQ ID NO: 40582 - protein, 7 aa, synthetic construct
SNQQRSP

SEQ ID NO: 40583 - protein, 7 aa, synthetic construct
YGAVKAA

SEQ ID NO: 40584 - protein, 7 aa, synthetic construct
VTNKQHY

SEQ ID NO: 40585 - protein, 7 aa, synthetic construct
KVSSMQG

SEQ ID NO: 40586 - protein, 7 aa, synthetic construct
TFKAMKD

SEQ ID NO: 40587 - protein, 7 aa, synthetic construct
IKSGNTG

SEQ ID NO: 40588 - protein, 7 aa, synthetic construct
AQVPKQG

SEQ ID NO: 40589 - protein, 7 aa, synthetic construct
QYNTKHG

SEQ ID NO: 40590 - protein, 7 aa, synthetic construct
PRQTQGM

SEQ ID NO: 40591 - protein, 7 aa, synthetic construct
SMKHGHA

SEQ ID NO: 40592 - protein, 7 aa, synthetic construct
RNGGKFE

SEQ ID NO: 40593 - protein, 7 aa, synthetic construct
MKMVQGT

SEQ ID NO: 40594 - protein, 7 aa, synthetic construct
KNTNVAS

SEQ ID NO: 40595 - protein, 7 aa, synthetic construct
SKFQLSE

SEQ ID NO: 40596 - protein, 7 aa, synthetic construct
NVHAKPS

SEQ ID NO: 40597 - protein, 7 aa, synthetic construct
GFIRHGE

SEQ ID NO: 40598 - protein, 7 aa, synthetic construct
DPPLKTG

SEQ ID NO: 40599 - protein, 7 aa, synthetic construct
MNGTGRG

SEQ ID NO: 40600 - protein, 7 aa, synthetic construct
EYRKGMG

SEQ ID NO: 40601 - protein, 7 aa, synthetic construct
MFKQNNG

SEQ ID NO: 40602 - protein, 7 aa, synthetic construct
TRTVTGA

SEQ ID NO: 40603 - protein, 7 aa, synthetic construct
YDRGTHT

SEQ ID NO: 40604 - protein, 7 aa, synthetic construct
QRPNSMA

SEQ ID NO: 40605 - protein, 7 aa, synthetic construct
NKANPAA

SEQ ID NO: 40606 - protein, 7 aa, synthetic construct
KQGNSAS

SEQ ID NO: 40607 - protein, 7 aa, synthetic construct
MNKGMKE

SEQ ID NO: 40608 - protein, 7 aa, synthetic construct
GKFGMQN

SEQ ID NO: 40609 - protein, 7 aa, synthetic construct
VHAKGAA

SEQ ID NO: 40610 - protein, 7 aa, synthetic construct
GKKDQNG

SEQ ID NO: 40611 - protein, 7 aa, synthetic construct
NKNEPQQ

SEQ ID NO: 40612 - protein, 7 aa, synthetic construct
GPSKNTA

SEQ ID NO: 40613 - protein, 7 aa, synthetic construct
STKSRFD

SEQ ID NO: 40614 - protein, 7 aa, synthetic construct
GTKSAAA

SEQ ID NO: 40615 - protein, 7 aa, synthetic construct
PNRGVTG

SEQ ID NO: 40616 - protein, 7 aa, synthetic construct
TSGGKTG

SEQ ID NO: 40617 - protein, 7 aa, synthetic construct
SADRIHG

SEQ ID NO: 40618 - protein, 7 aa, synthetic construct
NKNGMPG

SEQ ID NO: 40619 - protein, 7 aa, synthetic construct
RPTQSSP

SEQ ID NO: 40620 - protein, 7 aa, synthetic construct
VKQKGVD

SEQ ID NO: 40621 - protein, 7 aa, synthetic construct
TKAYQNE

SEQ ID NO: 40622 - protein, 7 aa, synthetic construct
KTGQSSS

SEQ ID NO: 40623 - protein, 7 aa, synthetic construct
RPTTADN

SEQ ID NO: 40624 - protein, 7 aa, synthetic construct
LRPASVG

SEQ ID NO: 40625 - protein, 7 aa, synthetic construct
LVNVKEH

SEQ ID NO: 40626 - protein, 7 aa, synthetic construct
HRQMGEA

SEQ ID NO: 40627 - protein, 7 aa, synthetic construct
NSSARSP

SEQ ID NO: 40628 - protein, 7 aa, synthetic construct
NAKSNAN

SEQ ID NO: 40629 - protein, 7 aa, synthetic construct
HQKPGDL

SEQ ID NO: 40630 - protein, 7 aa, synthetic construct
QGNPTSG

SEQ ID NO: 40631 - protein, 7 aa, synthetic construct
PRNSGAG

SEQ ID NO: 40632 - protein, 7 aa, synthetic construct
RPGNNVA

SEQ ID NO: 40633 - protein, 7 aa, synthetic construct
NGTYKGP

SEQ ID NO: 40634 - protein, 7 aa, synthetic construct
PRNTGAA

SEQ ID NO: 40635 - protein, 7 aa, synthetic construct
LIPFSKE

SEQ ID NO: 40636 - protein, 7 aa, synthetic construct
NVQRNQP

SEQ ID NO: 40637 - protein, 7 aa, synthetic construct
FGKVNSG

SEQ ID NO: 40638 - protein, 7 aa, synthetic construct
GKNTQNP

SEQ ID NO: 40639 - protein, 7 aa, synthetic construct
NARTTTP

SEQ ID NO: 40640 - protein, 7 aa, synthetic construct
HEKWKID

SEQ ID NO: 40641 - protein, 7 aa, synthetic construct
ARNHDII

SEQ ID NO: 40642 - protein, 7 aa, synthetic construct
NVRNAPF

SEQ ID NO: 40643 - protein, 7 aa, synthetic construct
FKAPSQG

SEQ ID NO: 40644 - protein, 7 aa, synthetic construct
PPGHEWK

SEQ ID NO: 40645 - protein, 7 aa, synthetic construct
LSKDLRG

SEQ ID NO: 40646 - protein, 7 aa, synthetic construct
HTDSGRM

SEQ ID NO: 40647 - protein, 7 aa, synthetic construct
MGGVKTA

SEQ ID NO: 40648 - protein, 7 aa, synthetic construct
HMMKQAQ

SEQ ID NO: 40649 - protein, 7 aa, synthetic construct
MSPNFNS

SEQ ID NO: 40650 - protein, 7 aa, synthetic construct
KQMGSAA

SEQ ID NO: 40651 - protein, 7 aa, synthetic construct
TAFVRGE

SEQ ID NO: 40652 - protein, 7 aa, synthetic construct
LNKQSGF

SEQ ID NO: 40653 - protein, 7 aa, synthetic construct
NKTDRSG

SEQ ID NO: 40654 - protein, 7 aa, synthetic construct
KAKAMGD

SEQ ID NO: 40655 - protein, 7 aa, synthetic construct
TVKHVSP

SEQ ID NO: 40656 - protein, 7 aa, synthetic construct
KVTNQQA

SEQ ID NO: 40657 - protein, 7 aa, synthetic construct
RVGIVKD

SEQ ID NO: 40658 - protein, 7 aa, synthetic construct
RPQGIGG

SEQ ID NO: 40659 - protein, 7 aa, synthetic construct
PTKTGGS

SEQ ID NO: 40660 - protein, 7 aa, synthetic construct
FKNGVAT

SEQ ID NO: 40661 - protein, 7 aa, synthetic construct
ARGLIQG

SEQ ID NO: 40662 - protein, 7 aa, synthetic construct
KMPTNTG

SEQ ID NO: 40663 - protein, 7 aa, synthetic construct
GGMKTGP

SEQ ID NO: 40664 - protein, 7 aa, synthetic construct
RGPSGPP

SEQ ID NO: 40665 - protein, 7 aa, synthetic construct
KNPQINM

SEQ ID NO: 40666 - protein, 7 aa, synthetic construct
GMTHRTE

SEQ ID NO: 40667 - protein, 7 aa, synthetic construct
HPNRNSE

SEQ ID NO: 40668 - protein, 7 aa, synthetic construct
PMQKPGM

SEQ ID NO: 40669 - protein, 7 aa, synthetic construct
NRSNQQG

SEQ ID NO: 40670 - protein, 7 aa, synthetic construct
MQKGFAD

SEQ ID NO: 40671 - protein, 7 aa, synthetic construct
SGKTMVG

SEQ ID NO: 40672 - protein, 7 aa, synthetic construct
RNNNAVG

SEQ ID NO: 40673 - protein, 7 aa, synthetic construct
NKQNIAS

SEQ ID NO: 40674 - protein, 7 aa, synthetic construct
MLKGYAE

SEQ ID NO: 40675 - protein, 7 aa, synthetic construct
DKSKVGA

SEQ ID NO: 40676 - protein, 7 aa, synthetic construct
NPTVRAP

SEQ ID NO: 40677 - protein, 7 aa, synthetic construct
ITKHGSP

SEQ ID NO: 40678 - protein, 7 aa, synthetic construct
KSQTGNQ

SEQ ID NO: 40679 - protein, 7 aa, synthetic construct
EMPKARN

SEQ ID NO: 40680 - protein, 7 aa, synthetic construct
MKKDTTG

SEQ ID NO: 40681 - protein, 7 aa, synthetic construct
QNSSSKV

SEQ ID NO: 40682 - protein, 7 aa, synthetic construct
TTTGKPG

SEQ ID NO: 40683 - protein, 7 aa, synthetic construct
KPTGQMA

SEQ ID NO: 40684 - protein, 7 aa, synthetic construct
GGPTQKA

SEQ ID NO: 40685 - protein, 7 aa, synthetic construct
LPGVKVS

SEQ ID NO: 40686 - protein, 7 aa, synthetic construct
IDRPGQG

SEQ ID NO: 40687 - protein, 7 aa, synthetic construct
KKGQHDD

SEQ ID NO: 40688 - protein, 7 aa, synthetic construct
YTKAQSG

SEQ ID NO: 40689 - protein, 7 aa, synthetic construct
SSGGRVV

SEQ ID NO: 40690 - protein, 7 aa, synthetic construct
FNKGSQG

SEQ ID NO: 40691 - protein, 7 aa, synthetic construct
LDKFSKM

SEQ ID NO: 40692 - protein, 7 aa, synthetic construct
NRTNQAP

SEQ ID NO: 40693 - protein, 7 aa, synthetic construct
MNRSQQA

SEQ ID NO: 40694 - protein, 7 aa, synthetic construct
ISASFSA

SEQ ID NO: 40695 - protein, 7 aa, synthetic construct
GSHVPSP

SEQ ID NO: 40696 - protein, 7 aa, synthetic construct
NWGREAS

SEQ ID NO: 40697 - protein, 7 aa, synthetic construct
FGNKNAG

SEQ ID NO: 40698 - protein, 7 aa, synthetic construct
TKKDAQS

SEQ ID NO: 40699 - protein, 7 aa, synthetic construct
PLKDQKA

SEQ ID NO: 40700 - protein, 7 aa, synthetic construct
SKVGNMG

SEQ ID NO: 40701 - protein, 7 aa, synthetic construct
SQPRNNS

SEQ ID NO: 40702 - protein, 7 aa, synthetic construct
GSNAKAG

SEQ ID NO: 40703 - protein, 7 aa, synthetic construct
THHVRSP

SEQ ID NO: 40704 - protein, 7 aa, synthetic construct
FGNVKAG

SEQ ID NO: 40705 - protein, 7 aa, synthetic construct
PTTQHRA

SEQ ID NO: 40706 - protein, 7 aa, synthetic construct
RPGGTQA

SEQ ID NO: 40707 - protein, 7 aa, synthetic construct
NSPKGQY

SEQ ID NO: 40708 - protein, 7 aa, synthetic construct
GKGTASG

SEQ ID NO: 40709 - protein, 7 aa, synthetic construct
FGHHAKE

SEQ ID NO: 40710 - protein, 7 aa, synthetic construct
QQRGMSP

SEQ ID NO: 40711 - protein, 7 aa, synthetic construct
KNAGVSA

SEQ ID NO: 40712 - protein, 7 aa, synthetic construct
FGKQSTN

SEQ ID NO: 40713 - protein, 7 aa, synthetic construct
SAVPKFN

SEQ ID NO: 40714 - protein, 7 aa, synthetic construct
TAKTTMP

SEQ ID NO: 40715 - protein, 7 aa, synthetic construct
MRPEQGN

SEQ ID NO: 40716 - protein, 7 aa, synthetic construct
YGNKGVG

SEQ ID NO: 40717 - protein, 7 aa, synthetic construct
KGNSVVA

SEQ ID NO: 40718 - protein, 7 aa, synthetic construct
HGNLHLA

SEQ ID NO: 40719 - protein, 7 aa, synthetic construct
NGRANMP

SEQ ID NO: 40720 - protein, 7 aa, synthetic construct
HTSHSKF

SEQ ID NO: 40721 - protein, 7 aa, synthetic construct
SFKLPMT

SEQ ID NO: 40722 - protein, 7 aa, synthetic construct
PKNVVGG

SEQ ID NO: 40723 - protein, 7 aa, synthetic construct
RMSSGNG

SEQ ID NO: 40724 - protein, 7 aa, synthetic construct
QKGPLSA

SEQ ID NO: 40725 - protein, 7 aa, synthetic construct
NRTMTQP

SEQ ID NO: 40726 - protein, 7 aa, synthetic construct
KYSNNQP

SEQ ID NO: 40727 - protein, 7 aa, synthetic construct
SPHYPAT

SEQ ID NO: 40728 - protein, 7 aa, synthetic construct
AVQSRTA

SEQ ID NO: 40729 - protein, 7 aa, synthetic construct
VHKRSDD

SEQ ID NO: 40730 - protein, 7 aa, synthetic construct
IKSPNNT

SEQ ID NO: 40731 - protein, 7 aa, synthetic construct
TKTNMGG

SEQ ID NO: 40732 - protein, 7 aa, synthetic construct
MAVHKSS

SEQ ID NO: 40733 - protein, 7 aa, synthetic construct
YRQHGMQ

SEQ ID NO: 40734 - protein, 7 aa, synthetic construct
GEKAFGG

SEQ ID NO: 40735 - protein, 7 aa, synthetic construct
RSYGIEG

SEQ ID NO: 40736 - protein, 7 aa, synthetic construct
WKDMRKD

SEQ ID NO: 40737 - protein, 7 aa, synthetic construct
PQKSGIA

SEQ ID NO: 40738 - protein, 7 aa, synthetic construct
QNMKMPI

SEQ ID NO: 40739 - protein, 7 aa, synthetic construct
YKGSTAP

SEQ ID NO: 40740 - protein, 7 aa, synthetic construct
MTPHTAA

SEQ ID NO: 40741 - protein, 7 aa, synthetic construct
GKHRDDS

SEQ ID NO: 40742 - protein, 7 aa, synthetic construct
NTVNLKS

SEQ ID NO: 40743 - protein, 7 aa, synthetic construct
FKQVTNA

SEQ ID NO: 40744 - protein, 7 aa, synthetic construct
YGSTRQS

SEQ ID NO: 40745 - protein, 7 aa, synthetic construct
SQIKGAN

SEQ ID NO: 40746 - protein, 7 aa, synthetic construct
MATRKHD

SEQ ID NO: 40747 - protein, 7 aa, synthetic construct
RGHNPDT

SEQ ID NO: 40748 - protein, 7 aa, synthetic construct
IKGALTP

SEQ ID NO: 40749 - protein, 7 aa, synthetic construct
PNRGGTA

SEQ ID NO: 40750 - protein, 7 aa, synthetic construct
IPRGGEF

SEQ ID NO: 40751 - protein, 7 aa, synthetic construct
IKPGATS

SEQ ID NO: 40752 - protein, 7 aa, synthetic construct
TARTSFG

SEQ ID NO: 40753 - protein, 7 aa, synthetic construct
LNSVVKQ

SEQ ID NO: 40754 - protein, 7 aa, synthetic construct
RSQSVAG

SEQ ID NO: 40755 - protein, 7 aa, synthetic construct
SKSPNAA

SEQ ID NO: 40756 - protein, 7 aa, synthetic construct
ETGARHG

SEQ ID NO: 40757 - protein, 7 aa, synthetic construct
NKQVNTA

SEQ ID NO: 40758 - protein, 7 aa, synthetic construct
GNNIRTQ

SEQ ID NO: 40759 - protein, 7 aa, synthetic construct
VTNKSSG

SEQ ID NO: 40760 - protein, 7 aa, synthetic construct
WAPHMSN

SEQ ID NO: 40761 - protein, 7 aa, synthetic construct
SPRTTGG

SEQ ID NO: 40762 - protein, 7 aa, synthetic construct
TIRTNME

SEQ ID NO: 40763 - protein, 7 aa, synthetic construct
FPHVKYS

SEQ ID NO: 40764 - protein, 7 aa, synthetic construct
LGKHQVN

SEQ ID NO: 40765 - protein, 7 aa, synthetic construct
KVQQKAD

SEQ ID NO: 40766 - protein, 7 aa, synthetic construct
TNARGGG

SEQ ID NO: 40767 - protein, 7 aa, synthetic construct
KDKSVSG

SEQ ID NO: 40768 - protein, 7 aa, synthetic construct
FSKQSQA

SEQ ID NO: 40769 - protein, 7 aa, synthetic construct
KNNAGDA

SEQ ID NO: 40770 - protein, 7 aa, synthetic construct
NQVGRQA

SEQ ID NO: 40771 - protein, 7 aa, synthetic construct
KTQGGIG

SEQ ID NO: 40772 - protein, 7 aa, synthetic construct
MNKNVDK

SEQ ID NO: 40773 - protein, 7 aa, synthetic construct
GQGSKSA

SEQ ID NO: 40774 - protein, 7 aa, synthetic construct
RQGSNGA

SEQ ID NO: 40775 - protein, 7 aa, synthetic construct
GKASHGT

SEQ ID NO: 40776 - protein, 7 aa, synthetic construct
TKSSPNT

SEQ ID NO: 40777 - protein, 7 aa, synthetic construct
QKIGDRQ

SEQ ID NO: 40778 - protein, 7 aa, synthetic construct
PEPHKPA

SEQ ID NO: 40779 - protein, 7 aa, synthetic construct
FHQHTSA

SEQ ID NO: 40780 - protein, 7 aa, synthetic construct
SKHNGNS

SEQ ID NO: 40781 - protein, 7 aa, synthetic construct
KSGTSYG

SEQ ID NO: 40782 - protein, 7 aa, synthetic construct
VQKVNNG

SEQ ID NO: 40783 - protein, 7 aa, synthetic construct
YKQTQGG

SEQ ID NO: 40784 - protein, 7 aa, synthetic construct
GKQYSTG

SEQ ID NO: 40785 - protein, 7 aa, synthetic construct
MKVGNRE

SEQ ID NO: 40786 - protein, 7 aa, synthetic construct
YLGGRAG

SEQ ID NO: 40787 - protein, 7 aa, synthetic construct
KPHQMGS

SEQ ID NO: 40788 - protein, 7 aa, synthetic construct
KAVNANM

SEQ ID NO: 40789 - protein, 7 aa, synthetic construct
DNRISVG

SEQ ID NO: 40790 - protein, 7 aa, synthetic construct
GMKYSNA

SEQ ID NO: 40791 - protein, 7 aa, synthetic construct
SPKQSAG

SEQ ID NO: 40792 - protein, 7 aa, synthetic construct
AAKANSG

SEQ ID NO: 40793 - protein, 7 aa, synthetic construct
RITKQDE

SEQ ID NO: 40794 - protein, 7 aa, synthetic construct
INMKISQ

SEQ ID NO: 40795 - protein, 7 aa, synthetic construct
TRIAKEP

SEQ ID NO: 40796 - protein, 7 aa, synthetic construct
GQNRTAA

SEQ ID NO: 40797 - protein, 7 aa, synthetic construct
KTQYATP

SEQ ID NO: 40798 - protein, 7 aa, synthetic construct
GKPSLGM

SEQ ID NO: 40799 - protein, 7 aa, synthetic construct
SGRVPRD

SEQ ID NO: 40800 - protein, 7 aa, synthetic construct
WHNAVVG

SEQ ID NO: 40801 - protein, 7 aa, synthetic construct
NRSQVSP

SEQ ID NO: 40802 - protein, 7 aa, synthetic construct
KATVQLG

SEQ ID NO: 40803 - protein, 7 aa, synthetic construct
QKAGMMG

SEQ ID NO: 40804 - protein, 7 aa, synthetic construct
GKTIRDQ

SEQ ID NO: 40805 - protein, 7 aa, synthetic construct
NRAGSNG

SEQ ID NO: 40806 - protein, 7 aa, synthetic construct
TGPVRSG

SEQ ID NO: 40807 - protein, 7 aa, synthetic construct
ASKNSMA

SEQ ID NO: 40808 - protein, 7 aa, synthetic construct
GITSKPT

SEQ ID NO: 40809 - protein, 7 aa, synthetic construct
WNKLGGG

SEQ ID NO: 40810 - protein, 7 aa, synthetic construct
TMKNTQP

SEQ ID NO: 40811 - protein, 7 aa, synthetic construct
KPAQSNS

SEQ ID NO: 40812 - protein, 7 aa, synthetic construct
PKGSNQS

SEQ ID NO: 40813 - protein, 7 aa, synthetic construct
KSGAQKE

SEQ ID NO: 40814 - protein, 7 aa, synthetic construct
GKYSQDS

SEQ ID NO: 40815 - protein, 7 aa, synthetic construct
YGNKAGG

SEQ ID NO: 40816 - protein, 7 aa, synthetic construct
TDKMKSA

SEQ ID NO: 40817 - protein, 7 aa, synthetic construct
NKYTQGP

SEQ ID NO: 40818 - protein, 7 aa, synthetic construct
KTANGFA

SEQ ID NO: 40819 - protein, 7 aa, synthetic construct
GGHTQGG

SEQ ID NO: 40820 - protein, 7 aa, synthetic construct
MSGTRMG

SEQ ID NO: 40821 - protein, 7 aa, synthetic construct
NKMSQNP

SEQ ID NO: 40822 - protein, 7 aa, synthetic construct
IHTVTHS

SEQ ID NO: 40823 - protein, 7 aa, synthetic construct
MVPKVNP

SEQ ID NO: 40824 - protein, 7 aa, synthetic construct
FAGHHHQ

SEQ ID NO: 40825 - protein, 7 aa, synthetic construct
YGRQKDD

SEQ ID NO: 40826 - protein, 7 aa, synthetic construct
EMDTTKQ

SEQ ID NO: 40827 - protein, 7 aa, synthetic construct
QRMPLQQ

SEQ ID NO: 40828 - protein, 7 aa, synthetic construct
TKVIKFP

SEQ ID NO: 40829 - protein, 7 aa, synthetic construct
SFRGGAI

SEQ ID NO: 40830 - protein, 7 aa, synthetic construct
KSSSSYL

SEQ ID NO: 40831 - protein, 7 aa, synthetic construct
NDSRGRM

SEQ ID NO: 40832 - protein, 7 aa, synthetic construct
QHGGSSR

SEQ ID NO: 40833 - protein, 7 aa, synthetic construct
RMRDGTA

SEQ ID NO: 40834 - protein, 7 aa, synthetic construct
PKATGGG

SEQ ID NO: 40835 - protein, 7 aa, synthetic construct
MANHLQP

SEQ ID NO: 40836 - protein, 7 aa, synthetic construct
ITATYAG

SEQ ID NO: 40837 - protein, 7 aa, synthetic construct
NNKASSP

SEQ ID NO: 40838 - protein, 7 aa, synthetic construct
MTSAGRG

SEQ ID NO: 40839 - protein, 7 aa, synthetic construct
RDRTIDG

SEQ ID NO: 40840 - protein, 7 aa, synthetic construct
TSKGPGG

SEQ ID NO: 40841 - protein, 7 aa, synthetic construct
ADQKMLG

SEQ ID NO: 40842 - protein, 7 aa, synthetic construct
TKNVNTG

SEQ ID NO: 40843 - protein, 7 aa, synthetic construct
VGKFVHM

SEQ ID NO: 40844 - protein, 7 aa, synthetic construct
HGVKWDA

SEQ ID NO: 40845 - protein, 7 aa, synthetic construct
AMNKMGS

SEQ ID NO: 40846 - protein, 7 aa, synthetic construct
RNSAQVG

SEQ ID NO: 40847 - protein, 7 aa, synthetic construct
KASTNVA

SEQ ID NO: 40848 - protein, 7 aa, synthetic construct
QDLTKSP

SEQ ID NO: 40849 - protein, 7 aa, synthetic construct
PPTKGMG

SEQ ID NO: 40850 - protein, 7 aa, synthetic construct
DKKGVGA

SEQ ID NO: 40851 - protein, 7 aa, synthetic construct
KANNNIS

SEQ ID NO: 40852 - protein, 7 aa, synthetic construct
SKANQSL

SEQ ID NO: 40853 - protein, 7 aa, synthetic construct
SRNSGVA

SEQ ID NO: 40854 - protein, 7 aa, synthetic construct
SGVSRQA

SEQ ID NO: 40855 - protein, 7 aa, synthetic construct
YTRTSPI

SEQ ID NO: 40856 - protein, 7 aa, synthetic construct
KGAQPTA

SEQ ID NO: 40857 - protein, 7 aa, synthetic construct
QMQGRQA

SEQ ID NO: 40858 - protein, 7 aa, synthetic construct
GKNIGQG

SEQ ID NO: 40859 - protein, 7 aa, synthetic construct
QNHKETM

SEQ ID NO: 40860 - protein, 7 aa, synthetic construct
FRTDTRA

SEQ ID NO: 40861 - protein, 7 aa, synthetic construct
KMANVSG

SEQ ID NO: 40862 - protein, 7 aa, synthetic construct
NNHFATG

SEQ ID NO: 40863 - protein, 7 aa, synthetic construct
LGHMSPH

SEQ ID NO: 40864 - protein, 7 aa, synthetic construct
AHKQHLP

SEQ ID NO: 40865 - protein, 7 aa, synthetic construct
TNARSTG

SEQ ID NO: 40866 - protein, 7 aa, synthetic construct
IILGMKE

SEQ ID NO: 40867 - protein, 7 aa, synthetic construct
QQAKAPA

SEQ ID NO: 40868 - protein, 7 aa, synthetic construct
KKDTSGY

SEQ ID NO: 40869 - protein, 7 aa, synthetic construct
STHRTAA

SEQ ID NO: 40870 - protein, 7 aa, synthetic construct
MHNGKSM

SEQ ID NO: 40871 - protein, 7 aa, synthetic construct
IYNHKMP

SEQ ID NO: 40872 - protein, 7 aa, synthetic construct
GGNSRGA

SEQ ID NO: 40873 - protein, 7 aa, synthetic construct
YGAQRPA

SEQ ID NO: 40874 - protein, 7 aa, synthetic construct
IVRQVAN

SEQ ID NO: 40875 - protein, 7 aa, synthetic construct
RPHDTHA

SEQ ID NO: 40876 - protein, 7 aa, synthetic construct
PQKAGNA

SEQ ID NO: 40877 - protein, 7 aa, synthetic construct
HVKFTNG

SEQ ID NO: 40878 - protein, 7 aa, synthetic construct
NSASRVG

SEQ ID NO: 40879 - protein, 7 aa, synthetic construct
GQVKTSG

SEQ ID NO: 40880 - protein, 7 aa, synthetic construct
GKSLTGG

SEQ ID NO: 40881 - protein, 7 aa, synthetic construct
PKSANNA

SEQ ID NO: 40882 - protein, 7 aa, synthetic construct
RDPHQFA

SEQ ID NO: 40883 - protein, 7 aa, synthetic construct
GKVPSYT

SEQ ID NO: 40884 - protein, 7 aa, synthetic construct
QKGWTND

SEQ ID NO: 40885 - protein, 7 aa, synthetic construct
IPSKNVI

SEQ ID NO: 40886 - protein, 7 aa, synthetic construct
YGTQKSQ

SEQ ID NO: 40887 - protein, 7 aa, synthetic construct
LTLGKSP

SEQ ID NO: 40888 - protein, 7 aa, synthetic construct
KLPVGSG

SEQ ID NO: 40889 - protein, 7 aa, synthetic construct
YKGQMFD

SEQ ID NO: 40890 - protein, 7 aa, synthetic construct
HSKVIIA

SEQ ID NO: 40891 - protein, 7 aa, synthetic construct
YGTAIKN

SEQ ID NO: 40892 - protein, 7 aa, synthetic construct
TKNVSTG

SEQ ID NO: 40893 - protein, 7 aa, synthetic construct
NARTTNG

SEQ ID NO: 40894 - protein, 7 aa, synthetic construct
IMTRVPQ

SEQ ID NO: 40895 - protein, 7 aa, synthetic construct
TNRQVGG

SEQ ID NO: 40896 - protein, 7 aa, synthetic construct
QRPNTAS

SEQ ID NO: 40897 - protein, 7 aa, synthetic construct
TKQGVGH

SEQ ID NO: 40898 - protein, 7 aa, synthetic construct
IDKKTMG

SEQ ID NO: 40899 - protein, 7 aa, synthetic construct
HVNGKGG

SEQ ID NO: 40900 - protein, 7 aa, synthetic construct
NSGKAGQ

SEQ ID NO: 40901 - protein, 7 aa, synthetic construct
RPSDTFT

SEQ ID NO: 40902 - protein, 7 aa, synthetic construct
YKTASKD

SEQ ID NO: 40903 - protein, 7 aa, synthetic construct
VGHSAFN

SEQ ID NO: 40904 - protein, 7 aa, synthetic construct
FQTNRGS

SEQ ID NO: 40905 - protein, 7 aa, synthetic construct
TFKNGIM

SEQ ID NO: 40906 - protein, 7 aa, synthetic construct
MRSGQQS

SEQ ID NO: 40907 - protein, 7 aa, synthetic construct
KGYKSEE

SEQ ID NO: 40908 - protein, 7 aa, synthetic construct
ERRPGNT

SEQ ID NO: 40909 - protein, 7 aa, synthetic construct
DNERTHW

SEQ ID NO: 40910 - protein, 7 aa, synthetic construct
SGKTAAA

SEQ ID NO: 40911 - protein, 7 aa, synthetic construct
PRSNGGA

SEQ ID NO: 40912 - protein, 7 aa, synthetic construct
IREKNSL

SEQ ID NO: 40913 - protein, 7 aa, synthetic construct
NMGRTQG

SEQ ID NO: 40914 - protein, 7 aa, synthetic construct
FERIVSN

SEQ ID NO: 40915 - protein, 7 aa, synthetic construct
KFPSSAG

SEQ ID NO: 40916 - protein, 7 aa, synthetic construct
RSNVQSI

SEQ ID NO: 40917 - protein, 7 aa, synthetic construct
SIRNHAS

SEQ ID NO: 40918 - protein, 7 aa, synthetic construct
YYRGAAA

SEQ ID NO: 40919 - protein, 7 aa, synthetic construct
QDVRYAH

SEQ ID NO: 40920 - protein, 7 aa, synthetic construct
QANGTKN

SEQ ID NO: 40921 - protein, 7 aa, synthetic construct
KQSSSQS

SEQ ID NO: 40922 - protein, 7 aa, synthetic construct
YSNPTTI

SEQ ID NO: 40923 - protein, 7 aa, synthetic construct
RFPAHNG

SEQ ID NO: 40924 - protein, 7 aa, synthetic construct
TRDGGRV

SEQ ID NO: 40925 - protein, 7 aa, synthetic construct
GQKASTG

SEQ ID NO: 40926 - protein, 7 aa, synthetic construct
FGQYNVG

SEQ ID NO: 40927 - protein, 7 aa, synthetic construct
HHNYAGA

SEQ ID NO: 40928 - protein, 7 aa, synthetic construct
KAKANLE

SEQ ID NO: 40929 - protein, 7 aa, synthetic construct
FRPGHGQ

SEQ ID NO: 40930 - protein, 7 aa, synthetic construct
TNVKMQP

SEQ ID NO: 40931 - protein, 7 aa, synthetic construct
DTRQVKA

SEQ ID NO: 40932 - protein, 7 aa, synthetic construct
IAPGTGR

SEQ ID NO: 40933 - protein, 7 aa, synthetic construct
FRNGNSG

SEQ ID NO: 40934 - protein, 7 aa, synthetic construct
QTLKPNP

SEQ ID NO: 40935 - protein, 7 aa, synthetic construct
HGILSHP

SEQ ID NO: 40936 - protein, 7 aa, synthetic construct
QRPNVNG

SEQ ID NO: 40937 - protein, 7 aa, synthetic construct
HFNATAK

SEQ ID NO: 40938 - protein, 7 aa, synthetic construct
GTFGQKS

SEQ ID NO: 40939 - protein, 7 aa, synthetic construct
GPRNNSA

SEQ ID NO: 40940 - protein, 7 aa, synthetic construct
MKTNSNS

SEQ ID NO: 40941 - protein, 7 aa, synthetic construct
TKGVTNG

SEQ ID NO: 40942 - protein, 7 aa, synthetic construct
KTKISDM

SEQ ID NO: 40943 - protein, 7 aa, synthetic construct
RVANFHG

SEQ ID NO: 40944 - protein, 7 aa, synthetic construct
SKPQYGS

SEQ ID NO: 40945 - protein, 7 aa, synthetic construct
FNPVSTP

SEQ ID NO: 40946 - protein, 7 aa, synthetic construct
SNKQTAP

SEQ ID NO: 40947 - protein, 7 aa, synthetic construct
KQTSYEG

SEQ ID NO: 40948 - protein, 7 aa, synthetic construct
YGHNGGP

SEQ ID NO: 40949 - protein, 7 aa, synthetic construct
DKKEKMY

SEQ ID NO: 40950 - protein, 7 aa, synthetic construct
PDKLRMG

SEQ ID NO: 40951 - protein, 7 aa, synthetic construct
IMQGRVS

SEQ ID NO: 40952 - protein, 7 aa, synthetic construct
ANDIKTK

SEQ ID NO: 40953 - protein, 7 aa, synthetic construct
RFPSLSE

SEQ ID NO: 40954 - protein, 7 aa, synthetic construct
HHGMRDS

SEQ ID NO: 40955 - protein, 7 aa, synthetic construct
KPGPTSA

SEQ ID NO: 40956 - protein, 7 aa, synthetic construct
IQMSRGA

SEQ ID NO: 40957 - protein, 7 aa, synthetic construct
MKNDQRS

SEQ ID NO: 40958 - protein, 7 aa, synthetic construct
TGNRAGA

SEQ ID NO: 40959 - protein, 7 aa, synthetic construct
GKQSSQA

SEQ ID NO: 40960 - protein, 7 aa, synthetic construct
SARNSLA

SEQ ID NO: 40961 - protein, 7 aa, synthetic construct
IGQHARV

SEQ ID NO: 40962 - protein, 7 aa, synthetic construct
KNNTTGN

SEQ ID NO: 40963 - protein, 7 aa, synthetic construct
MQPMKTG

SEQ ID NO: 40964 - protein, 7 aa, synthetic construct
SKMSTAA

SEQ ID NO: 40965 - protein, 7 aa, synthetic construct
NKQSPVG

SEQ ID NO: 40966 - protein, 7 aa, synthetic construct
HQGQRVV

SEQ ID NO: 40967 - protein, 7 aa, synthetic construct
FMKGMTN

SEQ ID NO: 40968 - protein, 7 aa, synthetic construct
PKDTPIN

SEQ ID NO: 40969 - protein, 7 aa, synthetic construct
HRPLDPG

SEQ ID NO: 40970 - protein, 7 aa, synthetic construct
SKMQEGH

SEQ ID NO: 40971 - protein, 7 aa, synthetic construct
KPGSQVS

SEQ ID NO: 40972 - protein, 7 aa, synthetic construct
NPHGARG

SEQ ID NO: 40973 - protein, 7 aa, synthetic construct
GGHRQQP

SEQ ID NO: 40974 - protein, 7 aa, synthetic construct
RAYGASE

SEQ ID NO: 40975 - protein, 7 aa, synthetic construct
THQGFNP

SEQ ID NO: 40976 - protein, 7 aa, synthetic construct
MSNTNRG

SEQ ID NO: 40977 - protein, 7 aa, synthetic construct
FEPPKRF

SEQ ID NO: 40978 - protein, 7 aa, synthetic construct
HHVLPEG

SEQ ID NO: 40979 - protein, 7 aa, synthetic construct
IYTAKTG

SEQ ID NO: 40980 - protein, 7 aa, synthetic construct
MHTSSKA

SEQ ID NO: 40981 - protein, 7 aa, synthetic construct
ITNGKNS

SEQ ID NO: 40982 - protein, 7 aa, synthetic construct
SKHQPMN

SEQ ID NO: 40983 - protein, 7 aa, synthetic construct
EIMYKNA

SEQ ID NO: 40984 - protein, 7 aa, synthetic construct
TGARIVH

SEQ ID NO: 40985 - protein, 7 aa, synthetic construct
NHTRMAD

SEQ ID NO: 40986 - protein, 7 aa, synthetic construct
RSNKEAY

SEQ ID NO: 40987 - protein, 7 aa, synthetic construct
QHRMLGA

SEQ ID NO: 40988 - protein, 7 aa, synthetic construct
SHQYLNE

SEQ ID NO: 40989 - protein, 7 aa, synthetic construct
RSNTSSV

SEQ ID NO: 40990 - protein, 7 aa, synthetic construct
NQKLSVG

SEQ ID NO: 40991 - protein, 7 aa, synthetic construct
SVNYSKN

SEQ ID NO: 40992 - protein, 7 aa, synthetic construct
YVGNKQG

SEQ ID NO: 40993 - protein, 7 aa, synthetic construct
QRAPTQS

SEQ ID NO: 40994 - protein, 7 aa, synthetic construct
GSATHNG

SEQ ID NO: 40995 - protein, 7 aa, synthetic construct
LKPNEPW

SEQ ID NO: 40996 - protein, 7 aa, synthetic construct
MKKLYHE

SEQ ID NO: 40997 - protein, 7 aa, synthetic construct
QRPNAAA

SEQ ID NO: 40998 - protein, 7 aa, synthetic construct
QNNARQG

SEQ ID NO: 40999 - protein, 7 aa, synthetic construct
RSQTVSA

SEQ ID NO: 41000 - protein, 7 aa, synthetic construct
RTNPNAG

SEQ ID NO: 41001 - protein, 7 aa, synthetic construct
AFPRSDP

SEQ ID NO: 41002 - protein, 7 aa, synthetic construct
YPGQKVT

SEQ ID NO: 41003 - protein, 7 aa, synthetic construct
TGPKSSG

SEQ ID NO: 41004 - protein, 7 aa, synthetic construct
MGAKMGG

SEQ ID NO: 41005 - protein, 7 aa, synthetic construct
KSTPQSS

SEQ ID NO: 41006 - protein, 7 aa, synthetic construct
MRHNVQG

SEQ ID NO: 41007 - protein, 7 aa, synthetic construct
AVSKAVM

SEQ ID NO: 41008 - protein, 7 aa, synthetic construct
QSRSQGA

SEQ ID NO: 41009 - protein, 7 aa, synthetic construct
NKNDRMG

SEQ ID NO: 41010 - protein, 7 aa, synthetic construct
NTNPIRI

SEQ ID NO: 41011 - protein, 7 aa, synthetic construct
KSPVGGG

SEQ ID NO: 41012 - protein, 7 aa, synthetic construct
KSGTTKD

SEQ ID NO: 41013 - protein, 7 aa, synthetic construct
QAKQNQN

SEQ ID NO: 41014 - protein, 7 aa, synthetic construct
GHPMTHA

SEQ ID NO: 41015 - protein, 7 aa, synthetic construct
RMGSGNG

SEQ ID NO: 41016 - protein, 7 aa, synthetic construct
RKDNVAG

SEQ ID NO: 41017 - protein, 7 aa, synthetic construct
SKAGTNG

SEQ ID NO: 41018 - protein, 7 aa, synthetic construct
VGKSMAA

SEQ ID NO: 41019 - protein, 7 aa, synthetic construct
RKPDMTG

SEQ ID NO: 41020 - protein, 7 aa, synthetic construct
TRNSQQA

SEQ ID NO: 41021 - protein, 7 aa, synthetic construct
MGNFRRE

SEQ ID NO: 41022 - protein, 7 aa, synthetic construct
MKTGLER

SEQ ID NO: 41023 - protein, 7 aa, synthetic construct
KNGGDKP

SEQ ID NO: 41024 - protein, 7 aa, synthetic construct
NKAVSKD

SEQ ID NO: 41025 - protein, 7 aa, synthetic construct
FGKQKEP

SEQ ID NO: 41026 - protein, 7 aa, synthetic construct
RGNTIAG

SEQ ID NO: 41027 - protein, 7 aa, synthetic construct
GAAHMHA

SEQ ID NO: 41028 - protein, 7 aa, synthetic construct
GSGQKGG

SEQ ID NO: 41029 - protein, 7 aa, synthetic construct
MRGQVTG

SEQ ID NO: 41030 - protein, 7 aa, synthetic construct
NTRANQA

SEQ ID NO: 41031 - protein, 7 aa, synthetic construct
YSKGVGH

SEQ ID NO: 41032 - protein, 7 aa, synthetic construct
RDQVNHR

SEQ ID NO: 41033 - protein, 7 aa, synthetic construct
VRTNSTA

SEQ ID NO: 41034 - protein, 7 aa, synthetic construct
NPKMNDY

SEQ ID NO: 41035 - protein, 7 aa, synthetic construct
NKGLGKD

SEQ ID NO: 41036 - protein, 7 aa, synthetic construct
YNKPEHR

SEQ ID NO: 41037 - protein, 7 aa, synthetic construct
RDRSAVA

SEQ ID NO: 41038 - protein, 7 aa, synthetic construct
VNNKNQG

SEQ ID NO: 41039 - protein, 7 aa, synthetic construct
RMDTKVG

SEQ ID NO: 41040 - protein, 7 aa, synthetic construct
ISHYKVS

SEQ ID NO: 41041 - protein, 7 aa, synthetic construct
NKQDRGG

SEQ ID NO: 41042 - protein, 7 aa, synthetic construct
KNVQHFS

SEQ ID NO: 41043 - protein, 7 aa, synthetic construct
IGKGGMV

SEQ ID NO: 41044 - protein, 7 aa, synthetic construct
TVKFDKN

SEQ ID NO: 41045 - protein, 7 aa, synthetic construct
GTKPQGG

SEQ ID NO: 41046 - protein, 7 aa, synthetic construct
VGKERSA

SEQ ID NO: 41047 - protein, 7 aa, synthetic construct
MQGDMSR

SEQ ID NO: 41048 - protein, 7 aa, synthetic construct
EMNGKPQ

SEQ ID NO: 41049 - protein, 7 aa, synthetic construct
NRSGMGS

SEQ ID NO: 41050 - protein, 7 aa, synthetic construct
TARSTIA

SEQ ID NO: 41051 - protein, 7 aa, synthetic construct
NPNLKIG

SEQ ID NO: 41052 - protein, 7 aa, synthetic construct
MGGVNKG

SEQ ID NO: 41053 - protein, 7 aa, synthetic construct
RQSQGMG

SEQ ID NO: 41054 - protein, 7 aa, synthetic construct
MRSAANA

SEQ ID NO: 41055 - protein, 7 aa, synthetic construct
TRPQNAI

SEQ ID NO: 41056 - protein, 7 aa, synthetic construct
YNKSMTG

SEQ ID NO: 41057 - protein, 7 aa, synthetic construct
DKTSRQG

SEQ ID NO: 41058 - protein, 7 aa, synthetic construct
RNGQSSA

SEQ ID NO: 41059 - protein, 7 aa, synthetic construct
YKGTSGQ

SEQ ID NO: 41060 - protein, 7 aa, synthetic construct
DFIHTKA

SEQ ID NO: 41061 - protein, 7 aa, synthetic construct
NKQGVGG

SEQ ID NO: 41062 - protein, 7 aa, synthetic construct
KVNAMKE

SEQ ID NO: 41063 - protein, 7 aa, synthetic construct
LGRNVQA

SEQ ID NO: 41064 - protein, 7 aa, synthetic construct
AKNNSSG

SEQ ID NO: 41065 - protein, 7 aa, synthetic construct
TESQYKF

SEQ ID NO: 41066 - protein, 7 aa, synthetic construct
QSKVSGG

SEQ ID NO: 41067 - protein, 7 aa, synthetic construct
VGSKNTA

SEQ ID NO: 41068 - protein, 7 aa, synthetic construct
LELKPVL

SEQ ID NO: 41069 - protein, 7 aa, synthetic construct
TNVSRSA

SEQ ID NO: 41070 - protein, 7 aa, synthetic construct
KTSIHEV

SEQ ID NO: 41071 - protein, 7 aa, synthetic construct
RTGGATG

SEQ ID NO: 41072 - protein, 7 aa, synthetic construct
HVNNVNN

SEQ ID NO: 41073 - protein, 7 aa, synthetic construct
QKDRQTT

SEQ ID NO: 41074 - protein, 7 aa, synthetic construct
VQNHMAG

SEQ ID NO: 41075 - protein, 7 aa, synthetic construct
GLGVLRE

SEQ ID NO: 41076 - protein, 7 aa, synthetic construct
ATNGKNG

SEQ ID NO: 41077 - protein, 7 aa, synthetic construct
PSRNVGP

SEQ ID NO: 41078 - protein, 7 aa, synthetic construct
MFAQKRD

SEQ ID NO: 41079 - protein, 7 aa, synthetic construct
QQPHAKI

SEQ ID NO: 41080 - protein, 7 aa, synthetic construct
NMKQSTS

SEQ ID NO: 41081 - protein, 7 aa, synthetic construct
QPKYGDK

SEQ ID NO: 41082 - protein, 7 aa, synthetic construct
KKPMAGD

SEQ ID NO: 41083 - protein, 7 aa, synthetic construct
MNFSKSV

SEQ ID NO: 41084 - protein, 7 aa, synthetic construct
GLEKRKD

SEQ ID NO: 41085 - protein, 7 aa, synthetic construct
FTGLNTA

SEQ ID NO: 41086 - protein, 7 aa, synthetic construct
TKMAAAG

SEQ ID NO: 41087 - protein, 7 aa, synthetic construct
NKPGGGG

SEQ ID NO: 41088 - protein, 7 aa, synthetic construct
RIPSADR

SEQ ID NO: 41089 - protein, 7 aa, synthetic construct
FNKSSQY

SEQ ID NO: 41090 - protein, 7 aa, synthetic construct
KNGMNQP

SEQ ID NO: 41091 - protein, 7 aa, synthetic construct
EFRQVNA

SEQ ID NO: 41092 - protein, 7 aa, synthetic construct
KITTQHV

SEQ ID NO: 41093 - protein, 7 aa, synthetic construct
KYPSAMA

SEQ ID NO: 41094 - protein, 7 aa, synthetic construct
FKNNTPA

SEQ ID NO: 41095 - protein, 7 aa, synthetic construct
RHGTTPA

SEQ ID NO: 41096 - protein, 7 aa, synthetic construct
GRVSNGF

SEQ ID NO: 41097 - protein, 7 aa, synthetic construct
GWKENSG

SEQ ID NO: 41098 - protein, 7 aa, synthetic construct
LNKVQNN

SEQ ID NO: 41099 - protein, 7 aa, synthetic construct
VNPTTSR

SEQ ID NO: 41100 - protein, 7 aa, synthetic construct
QNRPGQG

SEQ ID NO: 41101 - protein, 7 aa, synthetic construct
DGLKGFS

SEQ ID NO: 41102 - protein, 7 aa, synthetic construct
QQKTGAA

SEQ ID NO: 41103 - protein, 7 aa, synthetic construct
VYKNMEK

SEQ ID NO: 41104 - protein, 7 aa, synthetic construct
VRGNNNP

SEQ ID NO: 41105 - protein, 7 aa, synthetic construct
RGPGMQA

SEQ ID NO: 41106 - protein, 7 aa, synthetic construct
LLHITTA

SEQ ID NO: 41107 - protein, 7 aa, synthetic construct
TNKGPMS

SEQ ID NO: 41108 - protein, 7 aa, synthetic construct
NSTAVRH

SEQ ID NO: 41109 - protein, 7 aa, synthetic construct
IKNAQSH

SEQ ID NO: 41110 - protein, 7 aa, synthetic construct
RNPNAQA

SEQ ID NO: 41111 - protein, 7 aa, synthetic construct
QRATMVG

SEQ ID NO: 41112 - protein, 7 aa, synthetic construct
NNPQAKG

SEQ ID NO: 41113 - protein, 7 aa, synthetic construct
NTNRGTG

SEQ ID NO: 41114 - protein, 7 aa, synthetic construct
LKQPNTA

SEQ ID NO: 41115 - protein, 7 aa, synthetic construct
KNSGSPM

SEQ ID NO: 41116 - protein, 7 aa, synthetic construct
SHPGPGR

SEQ ID NO: 41117 - protein, 7 aa, synthetic construct
MGKSHPF

SEQ ID NO: 41118 - protein, 7 aa, synthetic construct
NFKTQPQ

SEQ ID NO: 41119 - protein, 7 aa, synthetic construct
TKQSTYA

SEQ ID NO: 41120 - protein, 7 aa, synthetic construct
AKGMTEV

SEQ ID NO: 41121 - protein, 7 aa, synthetic construct
NMKQVYS

SEQ ID NO: 41122 - protein, 7 aa, synthetic construct
KDGKAMG

SEQ ID NO: 41123 - protein, 7 aa, synthetic construct
TATTRGS

SEQ ID NO: 41124 - protein, 7 aa, synthetic construct
NRERPSA

SEQ ID NO: 41125 - protein, 7 aa, synthetic construct
VTGNRNA

SEQ ID NO: 41126 - protein, 7 aa, synthetic construct
MKNLQRD

SEQ ID NO: 41127 - protein, 7 aa, synthetic construct
QMAQKSS

SEQ ID NO: 41128 - protein, 7 aa, synthetic construct
MTGTKQG

SEQ ID NO: 41129 - protein, 7 aa, synthetic construct
YSSQKGM

SEQ ID NO: 41130 - protein, 7 aa, synthetic construct
KQMNSMD

SEQ ID NO: 41131 - protein, 7 aa, synthetic construct
RNNTTGS

SEQ ID NO: 41132 - protein, 7 aa, synthetic construct
YPGGGTM

SEQ ID NO: 41133 - protein, 7 aa, synthetic construct
TSGRTEL

SEQ ID NO: 41134 - protein, 7 aa, synthetic construct
NAKIEKS

SEQ ID NO: 41135 - protein, 7 aa, synthetic construct
KQSQTKD

SEQ ID NO: 41136 - protein, 7 aa, synthetic construct
RATQGGG

SEQ ID NO: 41137 - protein, 7 aa, synthetic construct
GKYSGTM

SEQ ID NO: 41138 - protein, 7 aa, synthetic construct
NRPSGMS

SEQ ID NO: 41139 - protein, 7 aa, synthetic construct
TNQQRVI

SEQ ID NO: 41140 - protein, 7 aa, synthetic construct
NAQHLSP

SEQ ID NO: 41141 - protein, 7 aa, synthetic construct
FAKTTSA

SEQ ID NO: 41142 - protein, 7 aa, synthetic construct
TTTNMRA

SEQ ID NO: 41143 - protein, 7 aa, synthetic construct
NKVTTTG

SEQ ID NO: 41144 - protein, 7 aa, synthetic construct
YGQIGHV

SEQ ID NO: 41145 - protein, 7 aa, synthetic construct
RALPVDT

SEQ ID NO: 41146 - protein, 7 aa, synthetic construct
KSKDNNA

SEQ ID NO: 41147 - protein, 7 aa, synthetic construct
QQYKVGM

SEQ ID NO: 41148 - protein, 7 aa, synthetic construct
VFQKDYH

SEQ ID NO: 41149 - protein, 7 aa, synthetic construct
NKMQQGG

SEQ ID NO: 41150 - protein, 7 aa, synthetic construct
MSKMASG

SEQ ID NO: 41151 - protein, 7 aa, synthetic construct
GRGQFAT

SEQ ID NO: 41152 - protein, 7 aa, synthetic construct
YGGKTTP

SEQ ID NO: 41153 - protein, 7 aa, synthetic construct
ALQNHSN

SEQ ID NO: 41154 - protein, 7 aa, synthetic construct
MKASHNG

SEQ ID NO: 41155 - protein, 7 aa, synthetic construct
MKMQTAA

SEQ ID NO: 41156 - protein, 7 aa, synthetic construct
KIGAGPA

SEQ ID NO: 41157 - protein, 7 aa, synthetic construct
QRHNQIN

SEQ ID NO: 41158 - protein, 7 aa, synthetic construct
TRAGLVS

SEQ ID NO: 41159 - protein, 7 aa, synthetic construct
QYKNGHS

SEQ ID NO: 41160 - protein, 7 aa, synthetic construct
NPTQKGG

SEQ ID NO: 41161 - protein, 7 aa, synthetic construct
RQQASTS

SEQ ID NO: 41162 - protein, 7 aa, synthetic construct
RGPASTP

SEQ ID NO: 41163 - protein, 7 aa, synthetic construct
VHQHNGA

SEQ ID NO: 41164 - protein, 7 aa, synthetic construct
TMHNMRD

SEQ ID NO: 41165 - protein, 7 aa, synthetic construct
KQGTPAG

SEQ ID NO: 41166 - protein, 7 aa, synthetic construct
FMKSTNG

SEQ ID NO: 41167 - protein, 7 aa, synthetic construct
TQPSMRP

SEQ ID NO: 41168 - protein, 7 aa, synthetic construct
KPHRQEL

SEQ ID NO: 41169 - protein, 7 aa, synthetic construct
FKGSNQS

SEQ ID NO: 41170 - protein, 7 aa, synthetic construct
VQSTKTA

SEQ ID NO: 41171 - protein, 7 aa, synthetic construct
TTAANKG

SEQ ID NO: 41172 - protein, 7 aa, synthetic construct
FTKMNGE

SEQ ID NO: 41173 - protein, 7 aa, synthetic construct
SRPPATP

SEQ ID NO: 41174 - protein, 7 aa, synthetic construct
KDGKTGA

SEQ ID NO: 41175 - protein, 7 aa, synthetic construct
GPTQGKS

SEQ ID NO: 41176 - protein, 7 aa, synthetic construct
PRNGTAG

SEQ ID NO: 41177 - protein, 7 aa, synthetic construct
MSKAGKD

SEQ ID NO: 41178 - protein, 7 aa, synthetic construct
NTKGGGA

SEQ ID NO: 41179 - protein, 7 aa, synthetic construct
FTVKHSG

SEQ ID NO: 41180 - protein, 7 aa, synthetic construct
YKPSQPQ

SEQ ID NO: 41181 - protein, 7 aa, synthetic construct
TPGKTDK

SEQ ID NO: 41182 - protein, 7 aa, synthetic construct
MKSQVTG

SEQ ID NO: 41183 - protein, 7 aa, synthetic construct
SAYVNSA

SEQ ID NO: 41184 - protein, 7 aa, synthetic construct
NSKVNSG

SEQ ID NO: 41185 - protein, 7 aa, synthetic construct
NKGTMKE

SEQ ID NO: 41186 - protein, 7 aa, synthetic construct
NKAVGNG

SEQ ID NO: 41187 - protein, 7 aa, synthetic construct
RTHGGAG

SEQ ID NO: 41188 - protein, 7 aa, synthetic construct
QGQSRAG

SEQ ID NO: 41189 - protein, 7 aa, synthetic construct
NKSTTGG

SEQ ID NO: 41190 - protein, 7 aa, synthetic construct
TKVTHGG

SEQ ID NO: 41191 - protein, 7 aa, synthetic construct
KLVGSVH

SEQ ID NO: 41192 - protein, 7 aa, synthetic construct
RDKSSQV

SEQ ID NO: 41193 - protein, 7 aa, synthetic construct
KGPTSMP

SEQ ID NO: 41194 - protein, 7 aa, synthetic construct
WTPTAKS

SEQ ID NO: 41195 - protein, 7 aa, synthetic construct
WKHMNVE

SEQ ID NO: 41196 - protein, 7 aa, synthetic construct
GPMRTEK

SEQ ID NO: 41197 - protein, 7 aa, synthetic construct
GAMSHGG

SEQ ID NO: 41198 - protein, 7 aa, synthetic construct
DASSPRG

SEQ ID NO: 41199 - protein, 7 aa, synthetic construct
ARTGFLG

SEQ ID NO: 41200 - protein, 7 aa, synthetic construct
MPGKTQP

SEQ ID NO: 41201 - protein, 7 aa, synthetic construct
IPGQIKG

SEQ ID NO: 41202 - protein, 7 aa, synthetic construct
SKSVMAG

SEQ ID NO: 41203 - protein, 7 aa, synthetic construct
NETLKRS

SEQ ID NO: 41204 - protein, 7 aa, synthetic construct
MHNEAKY

SEQ ID NO: 41205 - protein, 7 aa, synthetic construct
NPTNGKG

SEQ ID NO: 41206 - protein, 7 aa, synthetic construct
VPRGAQG

SEQ ID NO: 41207 - protein, 7 aa, synthetic construct
NSGNKNA

SEQ ID NO: 41208 - protein, 7 aa, synthetic construct
YPSTKTA

SEQ ID NO: 41209 - protein, 7 aa, synthetic construct
MANNGKT

SEQ ID NO: 41210 - protein, 7 aa, synthetic construct
LNQRGPV

SEQ ID NO: 41211 - protein, 7 aa, synthetic construct
KNNTTNP

SEQ ID NO: 41212 - protein, 7 aa, synthetic construct
MNKNMGG

SEQ ID NO: 41213 - protein, 7 aa, synthetic construct
HAEKSPF

SEQ ID NO: 41214 - protein, 7 aa, synthetic construct
RSSNMAP

SEQ ID NO: 41215 - protein, 7 aa, synthetic construct
MKMQPTG

SEQ ID NO: 41216 - protein, 7 aa, synthetic construct
KYPQQST

SEQ ID NO: 41217 - protein, 7 aa, synthetic construct
IGGRHDG

SEQ ID NO: 41218 - protein, 7 aa, synthetic construct
TITRYQE

SEQ ID NO: 41219 - protein, 7 aa, synthetic construct
KSNAKDP

SEQ ID NO: 41220 - protein, 7 aa, synthetic construct
DGIARQG

SEQ ID NO: 41221 - protein, 7 aa, synthetic construct
IAHKPQA

SEQ ID NO: 41222 - protein, 7 aa, synthetic construct
GTPNKMS

SEQ ID NO: 41223 - protein, 7 aa, synthetic construct
QAKTVKD

SEQ ID NO: 41224 - protein, 7 aa, synthetic construct
LSGKQSA

SEQ ID NO: 41225 - protein, 7 aa, synthetic construct
RNGPTMG

SEQ ID NO: 41226 - protein, 7 aa, synthetic construct
HGKNGNG

SEQ ID NO: 41227 - protein, 7 aa, synthetic construct
KKSDQLQ

SEQ ID NO: 41228 - protein, 7 aa, synthetic construct
QYKFEQS

SEQ ID NO: 41229 - protein, 7 aa, synthetic construct
VGRAYMP

SEQ ID NO: 41230 - protein, 7 aa, synthetic construct
RLNTAQG

SEQ ID NO: 41231 - protein, 7 aa, synthetic construct
QKATVRE

SEQ ID NO: 41232 - protein, 7 aa, synthetic construct
EHNKIKV

SEQ ID NO: 41233 - protein, 7 aa, synthetic construct
NVGSGRI

SEQ ID NO: 41234 - protein, 7 aa, synthetic construct
GGAMMHA

SEQ ID NO: 41235 - protein, 7 aa, synthetic construct
TKIAKFE

SEQ ID NO: 41236 - protein, 7 aa, synthetic construct
TARDVQR

SEQ ID NO: 41237 - protein, 7 aa, synthetic construct
RHPGWVD

SEQ ID NO: 41238 - protein, 7 aa, synthetic construct
QVGSKVG

SEQ ID NO: 41239 - protein, 7 aa, synthetic construct
QNRTQTG

SEQ ID NO: 41240 - protein, 7 aa, synthetic construct
HLRAEVG

SEQ ID NO: 41241 - protein, 7 aa, synthetic construct
QTGQRNG

SEQ ID NO: 41242 - protein, 7 aa, synthetic construct
NYKLAKD

SEQ ID NO: 41243 - protein, 7 aa, synthetic construct
SKPGAGV

SEQ ID NO: 41244 - protein, 7 aa, synthetic construct
YAPQKHM

SEQ ID NO: 41245 - protein, 7 aa, synthetic construct
KHASINA

SEQ ID NO: 41246 - protein, 7 aa, synthetic construct
KNNVSTA

SEQ ID NO: 41247 - protein, 7 aa, synthetic construct
QQGNKTG

SEQ ID NO: 41248 - protein, 7 aa, synthetic construct
NTSKASG

SEQ ID NO: 41249 - protein, 7 aa, synthetic construct
SAKGSTA

SEQ ID NO: 41250 - protein, 7 aa, synthetic construct
ENRNNNN

SEQ ID NO: 41251 - protein, 7 aa, synthetic construct
GNSAKSA

SEQ ID NO: 41252 - protein, 7 aa, synthetic construct
TGPSRVA

SEQ ID NO: 41253 - protein, 7 aa, synthetic construct
QRPGAMG

SEQ ID NO: 41254 - protein, 7 aa, synthetic construct
QGHSVMG

SEQ ID NO: 41255 - protein, 7 aa, synthetic construct
EKRSSDP

SEQ ID NO: 41256 - protein, 7 aa, synthetic construct
KMPSSMG

SEQ ID NO: 41257 - protein, 7 aa, synthetic construct
KKSDGYG

SEQ ID NO: 41258 - protein, 7 aa, synthetic construct
RNPMPTG

SEQ ID NO: 41259 - protein, 7 aa, synthetic construct
RTGGSTG

SEQ ID NO: 41260 - protein, 7 aa, synthetic construct
AYIQKSE

SEQ ID NO: 41261 - protein, 7 aa, synthetic construct
LAKGNDY

SEQ ID NO: 41262 - protein, 7 aa, synthetic construct
DGRNSIQ

SEQ ID NO: 41263 - protein, 7 aa, synthetic construct
KDKSTMG

SEQ ID NO: 41264 - protein, 7 aa, synthetic construct
QGYTKFD

SEQ ID NO: 41265 - protein, 7 aa, synthetic construct
HPKQPHD

SEQ ID NO: 41266 - protein, 7 aa, synthetic construct
GGATKMG

SEQ ID NO: 41267 - protein, 7 aa, synthetic construct
SEFRHSP

SEQ ID NO: 41268 - protein, 7 aa, synthetic construct
VKVGSTG

SEQ ID NO: 41269 - protein, 7 aa, synthetic construct
RPSTNAS

SEQ ID NO: 41270 - protein, 7 aa, synthetic construct
AKWKPEP

SEQ ID NO: 41271 - protein, 7 aa, synthetic construct
KNPNMSG

SEQ ID NO: 41272 - protein, 7 aa, synthetic construct
TAGTKSA

SEQ ID NO: 41273 - protein, 7 aa, synthetic construct
VVKSTMN

SEQ ID NO: 41274 - protein, 7 aa, synthetic construct
MGVAKAG

SEQ ID NO: 41275 - protein, 7 aa, synthetic construct
NRQHGSA

SEQ ID NO: 41276 - protein, 7 aa, synthetic construct
KPQTGVS

SEQ ID NO: 41277 - protein, 7 aa, synthetic construct
RKDPAGS

SEQ ID NO: 41278 - protein, 7 aa, synthetic construct
GKIHFDS

SEQ ID NO: 41279 - protein, 7 aa, synthetic construct
TPYKPIE

SEQ ID NO: 41280 - protein, 7 aa, synthetic construct
YAKGWPS

SEQ ID NO: 41281 - protein, 7 aa, synthetic construct
ISQQYKG

SEQ ID NO: 41282 - protein, 7 aa, synthetic construct
TGKSSSA

SEQ ID NO: 41283 - protein, 7 aa, synthetic construct
GKLVSAN

SEQ ID NO: 41284 - protein, 7 aa, synthetic construct
KSNMGSA

SEQ ID NO: 41285 - protein, 7 aa, synthetic construct
GPSHHAA

SEQ ID NO: 41286 - protein, 7 aa, synthetic construct
RIPAAYE

SEQ ID NO: 41287 - protein, 7 aa, synthetic construct
GGGLNPG

SEQ ID NO: 41288 - protein, 7 aa, synthetic construct
FKGGVAG

SEQ ID NO: 41289 - protein, 7 aa, synthetic construct
KKADVKD

SEQ ID NO: 41290 - protein, 7 aa, synthetic construct
NVIKQFG

SEQ ID NO: 41291 - protein, 7 aa, synthetic construct
GTMGSKA

SEQ ID NO: 41292 - protein, 7 aa, synthetic construct
AAKADKP

SEQ ID NO: 41293 - protein, 7 aa, synthetic construct
YHVNKVS

SEQ ID NO: 41294 - protein, 7 aa, synthetic construct
GKSVNSI

SEQ ID NO: 41295 - protein, 7 aa, synthetic construct
KPNAMKD

SEQ ID NO: 41296 - protein, 7 aa, synthetic construct
TKAMVIE

SEQ ID NO: 41297 - protein, 7 aa, synthetic construct
HPGHPNA

SEQ ID NO: 41298 - protein, 7 aa, synthetic construct
LSGTRTG

SEQ ID NO: 41299 - protein, 7 aa, synthetic construct
MGKTKDS

SEQ ID NO: 41300 - protein, 7 aa, synthetic construct
NAQKTMP

SEQ ID NO: 41301 - protein, 7 aa, synthetic construct
QTQHMAG

SEQ ID NO: 41302 - protein, 7 aa, synthetic construct
IGARSHT

SEQ ID NO: 41303 - protein, 7 aa, synthetic construct
FQQSTKY

SEQ ID NO: 41304 - protein, 7 aa, synthetic construct
MNKGGIH

SEQ ID NO: 41305 - protein, 7 aa, synthetic construct
MTTKYVA

SEQ ID NO: 41306 - protein, 7 aa, synthetic construct
SSSRPHY

SEQ ID NO: 41307 - protein, 7 aa, synthetic construct
NYDSKGG

SEQ ID NO: 41308 - protein, 7 aa, synthetic construct
NPKFTSQ

SEQ ID NO: 41309 - protein, 7 aa, synthetic construct
KVPASGG

SEQ ID NO: 41310 - protein, 7 aa, synthetic construct
TTHHPGR

SEQ ID NO: 41311 - protein, 7 aa, synthetic construct
MPSKASG

SEQ ID NO: 41312 - protein, 7 aa, synthetic construct
RNQQTAA

SEQ ID NO: 41313 - protein, 7 aa, synthetic construct
RTTTTSA

SEQ ID NO: 41314 - protein, 7 aa, synthetic construct
KVVHINS

SEQ ID NO: 41315 - protein, 7 aa, synthetic construct
LPHHQGM

SEQ ID NO: 41316 - protein, 7 aa, synthetic construct
YRQEQGN

SEQ ID NO: 41317 - protein, 7 aa, synthetic construct
KREMQNG

SEQ ID NO: 41318 - protein, 7 aa, synthetic construct
SHRMNDG

SEQ ID NO: 41319 - protein, 7 aa, synthetic construct
TKQTHVA

SEQ ID NO: 41320 - protein, 7 aa, synthetic construct
TSNQRMA

SEQ ID NO: 41321 - protein, 7 aa, synthetic construct
NFTNQMV

SEQ ID NO: 41322 - protein, 7 aa, synthetic construct
WDKRQNS

SEQ ID NO: 41323 - protein, 7 aa, synthetic construct
AEMNKLG

SEQ ID NO: 41324 - protein, 7 aa, synthetic construct
RNSMPTY

SEQ ID NO: 41325 - protein, 7 aa, synthetic construct
PRGSTEF

SEQ ID NO: 41326 - protein, 7 aa, synthetic construct
TAQSKTA

SEQ ID NO: 41327 - protein, 7 aa, synthetic construct
LKGWTQP

SEQ ID NO: 41328 - protein, 7 aa, synthetic construct
QSGRAVV

SEQ ID NO: 41329 - protein, 7 aa, synthetic construct
ANQKTMA

SEQ ID NO: 41330 - protein, 7 aa, synthetic construct
RSQNGMG

SEQ ID NO: 41331 - protein, 7 aa, synthetic construct
MQVAGKP

SEQ ID NO: 41332 - protein, 7 aa, synthetic construct
AKSHNNY

SEQ ID NO: 41333 - protein, 7 aa, synthetic construct
YQGKSNN

SEQ ID NO: 41334 - protein, 7 aa, synthetic construct
TQGRSVP

SEQ ID NO: 41335 - protein, 7 aa, synthetic construct
KPNNAQA

SEQ ID NO: 41336 - protein, 7 aa, synthetic construct
MGKITSG

SEQ ID NO: 41337 - protein, 7 aa, synthetic construct
RNNNQSA

SEQ ID NO: 41338 - protein, 7 aa, synthetic construct
RMQNAAY

SEQ ID NO: 41339 - protein, 7 aa, synthetic construct
QPQRNGA

SEQ ID NO: 41340 - protein, 7 aa, synthetic construct
KPNTAGY

SEQ ID NO: 41341 - protein, 7 aa, synthetic construct
AEKHLAA

SEQ ID NO: 41342 - protein, 7 aa, synthetic construct
FARMQQA

SEQ ID NO: 41343 - protein, 7 aa, synthetic construct
MERKQSF

SEQ ID NO: 41344 - protein, 7 aa, synthetic construct
KGYGSGD

SEQ ID NO: 41345 - protein, 7 aa, synthetic construct
VHASISP

SEQ ID NO: 41346 - protein, 7 aa, synthetic construct
QSMKMRE

SEQ ID NO: 41347 - protein, 7 aa, synthetic construct
TQANMKN

SEQ ID NO: 41348 - protein, 7 aa, synthetic construct
QRLDQDH

SEQ ID NO: 41349 - protein, 7 aa, synthetic construct
QFKNSNG

SEQ ID NO: 41350 - protein, 7 aa, synthetic construct
GYKKGPE

SEQ ID NO: 41351 - protein, 7 aa, synthetic construct
GNKIDNY

SEQ ID NO: 41352 - protein, 7 aa, synthetic construct
NVKSTQG

SEQ ID NO: 41353 - protein, 7 aa, synthetic construct
TKDNKQG

SEQ ID NO: 41354 - protein, 7 aa, synthetic construct
IGLDRGG

SEQ ID NO: 41355 - protein, 7 aa, synthetic construct
QTSRNGP

SEQ ID NO: 41356 - protein, 7 aa, synthetic construct
KDNKNGG

SEQ ID NO: 41357 - protein, 7 aa, synthetic construct
NNTAAKG

SEQ ID NO: 41358 - protein, 7 aa, synthetic construct
YAQNSKG

SEQ ID NO: 41359 - protein, 7 aa, synthetic construct
IPNFGRN

SEQ ID NO: 41360 - protein, 7 aa, synthetic construct
RLPRDPI

SEQ ID NO: 41361 - protein, 7 aa, synthetic construct
ENSRKDH

SEQ ID NO: 41362 - protein, 7 aa, synthetic construct
LREGIHG

SEQ ID NO: 41363 - protein, 7 aa, synthetic construct
LAHVIQE

SEQ ID NO: 41364 - protein, 7 aa, synthetic construct
NSKAQTS

SEQ ID NO: 41365 - protein, 7 aa, synthetic construct
ATQKSDH

SEQ ID NO: 41366 - protein, 7 aa, synthetic construct
PKTTMAP

SEQ ID NO: 41367 - protein, 7 aa, synthetic construct
RNSGVNG

SEQ ID NO: 41368 - protein, 7 aa, synthetic construct
HAPHKMM

SEQ ID NO: 41369 - protein, 7 aa, synthetic construct
RQPGSQA

SEQ ID NO: 41370 - protein, 7 aa, synthetic construct
YDGKKMP

SEQ ID NO: 41371 - protein, 7 aa, synthetic construct
NVASGMT

SEQ ID NO: 41372 - protein, 7 aa, synthetic construct
MQSHEGK

SEQ ID NO: 41373 - protein, 7 aa, synthetic construct
QTTTKSS

SEQ ID NO: 41374 - protein, 7 aa, synthetic construct
FFGKNDD

SEQ ID NO: 41375 - protein, 7 aa, synthetic construct
TKPGGMG

SEQ ID NO: 41376 - protein, 7 aa, synthetic construct
TQDQRLL

SEQ ID NO: 41377 - protein, 7 aa, synthetic construct
MPKMTSG

SEQ ID NO: 41378 - protein, 7 aa, synthetic construct
NRHNIGG

SEQ ID NO: 41379 - protein, 7 aa, synthetic construct
GLPVRSQ

SEQ ID NO: 41380 - protein, 7 aa, synthetic construct
TAKSSFG

SEQ ID NO: 41381 - protein, 7 aa, synthetic construct
DVRQKSE

SEQ ID NO: 41382 - protein, 7 aa, synthetic construct
RNNAQLP

SEQ ID NO: 41383 - protein, 7 aa, synthetic construct
VQNKTQG

SEQ ID NO: 41384 - protein, 7 aa, synthetic construct
RSDQWSG

SEQ ID NO: 41385 - protein, 7 aa, synthetic construct
KLLHQEA

SEQ ID NO: 41386 - protein, 7 aa, synthetic construct
GLHGLTA

SEQ ID NO: 41387 - protein, 7 aa, synthetic construct
MKSNAMA

SEQ ID NO: 41388 - protein, 7 aa, synthetic construct
SKNQIQT

SEQ ID NO: 41389 - protein, 7 aa, synthetic construct
SYHNNSG

SEQ ID NO: 41390 - protein, 7 aa, synthetic construct
FNAGMKG

SEQ ID NO: 41391 - protein, 7 aa, synthetic construct
TSREQHS

SEQ ID NO: 41392 - protein, 7 aa, synthetic construct
SKSPMHG

SEQ ID NO: 41393 - protein, 7 aa, synthetic construct
TQYKNMP

SEQ ID NO: 41394 - protein, 7 aa, synthetic construct
HKFMKYE

SEQ ID NO: 41395 - protein, 7 aa, synthetic construct
MKYQGGD

SEQ ID NO: 41396 - protein, 7 aa, synthetic construct
LPHHDMS

SEQ ID NO: 41397 - protein, 7 aa, synthetic construct
VQKNVGG

SEQ ID NO: 41398 - protein, 7 aa, synthetic construct
DGYKPNN

SEQ ID NO: 41399 - protein, 7 aa, synthetic construct
KPTIAKD

SEQ ID NO: 41400 - protein, 7 aa, synthetic construct
LGHKEMI

SEQ ID NO: 41401 - protein, 7 aa, synthetic construct
VSPLKQN

SEQ ID NO: 41402 - protein, 7 aa, synthetic construct
ATGGGRP

SEQ ID NO: 41403 - protein, 7 aa, synthetic construct
KPPSASN

SEQ ID NO: 41404 - protein, 7 aa, synthetic construct
YRGKSTD

SEQ ID NO: 41405 - protein, 7 aa, synthetic construct
TKLFRLE

SEQ ID NO: 41406 - protein, 7 aa, synthetic construct
LSPSMYG

SEQ ID NO: 41407 - protein, 7 aa, synthetic construct
PEQAPFR

SEQ ID NO: 41408 - protein, 7 aa, synthetic construct
SIGTAPH

SEQ ID NO: 41409 - protein, 7 aa, synthetic construct
RPNSGPA

SEQ ID NO: 41410 - protein, 7 aa, synthetic construct
KDKMFTE

SEQ ID NO: 41411 - protein, 7 aa, synthetic construct
IFTNRGV

SEQ ID NO: 41412 - protein, 7 aa, synthetic construct
STQSYAV

SEQ ID NO: 41413 - protein, 7 aa, synthetic construct
LNKAGGI

SEQ ID NO: 41414 - protein, 7 aa, synthetic construct
RQTANGG

SEQ ID NO: 41415 - protein, 7 aa, synthetic construct
SKSAVLV

SEQ ID NO: 41416 - protein, 7 aa, synthetic construct
WKPHMSV

SEQ ID NO: 41417 - protein, 7 aa, synthetic construct
SGKGGQS

SEQ ID NO: 41418 - protein, 7 aa, synthetic construct
PFKQSQD

SEQ ID NO: 41419 - protein, 7 aa, synthetic construct
AGKMHIN

SEQ ID NO: 41420 - protein, 7 aa, synthetic construct
IAAKSST

SEQ ID NO: 41421 - protein, 7 aa, synthetic construct
TQKTGQS

SEQ ID NO: 41422 - protein, 7 aa, synthetic construct
THQWSEA

SEQ ID NO: 41423 - protein, 7 aa, synthetic construct
HVALNQG

SEQ ID NO: 41424 - protein, 7 aa, synthetic construct
MKGARDV

SEQ ID NO: 41425 - protein, 7 aa, synthetic construct
TQVRGVH

SEQ ID NO: 41426 - protein, 7 aa, synthetic construct
NRNQGGA

SEQ ID NO: 41427 - protein, 7 aa, synthetic construct
TGERNNS

SEQ ID NO: 41428 - protein, 7 aa, synthetic construct
KLHGAPM

SEQ ID NO: 41429 - protein, 7 aa, synthetic construct
TKSATSP

SEQ ID NO: 41430 - protein, 7 aa, synthetic construct
MQKGQNA

SEQ ID NO: 41431 - protein, 7 aa, synthetic construct
IRPPPHQ

SEQ ID NO: 41432 - protein, 7 aa, synthetic construct
GKLAHPE

SEQ ID NO: 41433 - protein, 7 aa, synthetic construct
SLQMGHG

SEQ ID NO: 41434 - protein, 7 aa, synthetic construct
DKRDDPN

SEQ ID NO: 41435 - protein, 7 aa, synthetic construct
VNAHKSQ

SEQ ID NO: 41436 - protein, 7 aa, synthetic construct
EHYNKMS

SEQ ID NO: 41437 - protein, 7 aa, synthetic construct
TSKGQNG

SEQ ID NO: 41438 - protein, 7 aa, synthetic construct
HRPHQAM

SEQ ID NO: 41439 - protein, 7 aa, synthetic construct
DKNKANG

SEQ ID NO: 41440 - protein, 7 aa, synthetic construct
FKKVERD

SEQ ID NO: 41441 - protein, 7 aa, synthetic construct
KGFNTEY

SEQ ID NO: 41442 - protein, 7 aa, synthetic construct
VRGQQTE

SEQ ID NO: 41443 - protein, 7 aa, synthetic construct
RSPQNTG

SEQ ID NO: 41444 - protein, 7 aa, synthetic construct
TKSNNPM

SEQ ID NO: 41445 - protein, 7 aa, synthetic construct
NQKTPGA

SEQ ID NO: 41446 - protein, 7 aa, synthetic construct
TKPNITG

SEQ ID NO: 41447 - protein, 7 aa, synthetic construct
TRGTVNS

SEQ ID NO: 41448 - protein, 7 aa, synthetic construct
TNAQSNQ

SEQ ID NO: 41449 - protein, 7 aa, synthetic construct
FKQVLQG

SEQ ID NO: 41450 - protein, 7 aa, synthetic construct
WTHQTKQ

SEQ ID NO: 41451 - protein, 7 aa, synthetic construct
MKSQTMS

SEQ ID NO: 41452 - protein, 7 aa, synthetic construct
RMNVISA

SEQ ID NO: 41453 - protein, 7 aa, synthetic construct
SLKILPE

SEQ ID NO: 41454 - protein, 7 aa, synthetic construct
YKVSTKD

SEQ ID NO: 41455 - protein, 7 aa, synthetic construct
PTKGVMG

SEQ ID NO: 41456 - protein, 7 aa, synthetic construct
VTERPKL

SEQ ID NO: 41457 - protein, 7 aa, synthetic construct
DMLHQRG

SEQ ID NO: 41458 - protein, 7 aa, synthetic construct
NRQTTVG

SEQ ID NO: 41459 - protein, 7 aa, synthetic construct
SKIPVDH

SEQ ID NO: 41460 - protein, 7 aa, synthetic construct
FPKLGTH

SEQ ID NO: 41461 - protein, 7 aa, synthetic construct
VNVGFKG

SEQ ID NO: 41462 - protein, 7 aa, synthetic construct
MGRTTVG

SEQ ID NO: 41463 - protein, 7 aa, synthetic construct
KAKIGEW

SEQ ID NO: 41464 - protein, 7 aa, synthetic construct
PGKIRET

SEQ ID NO: 41465 - protein, 7 aa, synthetic construct
IGSMYRA

SEQ ID NO: 41466 - protein, 7 aa, synthetic construct
IANHPHA

SEQ ID NO: 41467 - protein, 7 aa, synthetic construct
PGSAPAL

SEQ ID NO: 41468 - protein, 7 aa, synthetic construct
GPAQKSN

SEQ ID NO: 41469 - protein, 7 aa, synthetic construct
QRAQINA

SEQ ID NO: 41470 - protein, 7 aa, synthetic construct
IHMKQMQ

SEQ ID NO: 41471 - protein, 7 aa, synthetic construct
MQPKTPQ

SEQ ID NO: 41472 - protein, 7 aa, synthetic construct
NQKVVSV

SEQ ID NO: 41473 - protein, 7 aa, synthetic construct
TSQYRQD

SEQ ID NO: 41474 - protein, 7 aa, synthetic construct
KNDNRVG

SEQ ID NO: 41475 - protein, 7 aa, synthetic construct
WAQTHSS

SEQ ID NO: 41476 - protein, 7 aa, synthetic construct
INKAQSN

SEQ ID NO: 41477 - protein, 7 aa, synthetic construct
FNPHNAG

SEQ ID NO: 41478 - protein, 7 aa, synthetic construct
WRDTNRT

SEQ ID NO: 41479 - protein, 7 aa, synthetic construct
FRGRDQA

SEQ ID NO: 41480 - protein, 7 aa, synthetic construct
TKVSQTE

SEQ ID NO: 41481 - protein, 7 aa, synthetic construct
VAHFKND

SEQ ID NO: 41482 - protein, 7 aa, synthetic construct
ATPRTTA

SEQ ID NO: 41483 - protein, 7 aa, synthetic construct
MGGNRSG

SEQ ID NO: 41484 - protein, 7 aa, synthetic construct
KLSSGSG

SEQ ID NO: 41485 - protein, 7 aa, synthetic construct
LFQRNQD

SEQ ID NO: 41486 - protein, 7 aa, synthetic construct
DWKGTDK

SEQ ID NO: 41487 - protein, 7 aa, synthetic construct
SGKVTVN

SEQ ID NO: 41488 - protein, 7 aa, synthetic construct
NSVTVRG

SEQ ID NO: 41489 - protein, 7 aa, synthetic construct
RQPTAQP

SEQ ID NO: 41490 - protein, 7 aa, synthetic construct
SNQTKAG

SEQ ID NO: 41491 - protein, 7 aa, synthetic construct
LQKSYSA

SEQ ID NO: 41492 - protein, 7 aa, synthetic construct
MTRTASV

SEQ ID NO: 41493 - protein, 7 aa, synthetic construct
KQPGSGD

SEQ ID NO: 41494 - protein, 7 aa, synthetic construct
KWKSEYG

SEQ ID NO: 41495 - protein, 7 aa, synthetic construct
YAKTTSS

SEQ ID NO: 41496 - protein, 7 aa, synthetic construct
RSQTNQM

SEQ ID NO: 41497 - protein, 7 aa, synthetic construct
INRPGNM

SEQ ID NO: 41498 - protein, 7 aa, synthetic construct
RPSATSN

SEQ ID NO: 41499 - protein, 7 aa, synthetic construct
QGSPSAH

SEQ ID NO: 41500 - protein, 7 aa, synthetic construct
PRNGQMA

SEQ ID NO: 41501 - protein, 7 aa, synthetic construct
DGPRNQP

SEQ ID NO: 41502 - protein, 7 aa, synthetic construct
YKGKEPT

SEQ ID NO: 41503 - protein, 7 aa, synthetic construct
KNTAAPG

SEQ ID NO: 41504 - protein, 7 aa, synthetic construct
SRSPGVG

SEQ ID NO: 41505 - protein, 7 aa, synthetic construct
VPHSSQA

SEQ ID NO: 41506 - protein, 7 aa, synthetic construct
VLPRFSG

SEQ ID NO: 41507 - protein, 7 aa, synthetic construct
MGKSTVA

SEQ ID NO: 41508 - protein, 7 aa, synthetic construct
GQKPMAA

SEQ ID NO: 41509 - protein, 7 aa, synthetic construct
QRPNGQA

SEQ ID NO: 41510 - protein, 7 aa, synthetic construct
GNTKTLP

SEQ ID NO: 41511 - protein, 7 aa, synthetic construct
HGIRGFE

SEQ ID NO: 41512 - protein, 7 aa, synthetic construct
NKDTRAA

SEQ ID NO: 41513 - protein, 7 aa, synthetic construct
NPAVFKG

SEQ ID NO: 41514 - protein, 7 aa, synthetic construct
MNKAMKD

SEQ ID NO: 41515 - protein, 7 aa, synthetic construct
MRNKMDM

SEQ ID NO: 41516 - protein, 7 aa, synthetic construct
WSKEITG

SEQ ID NO: 41517 - protein, 7 aa, synthetic construct
SAKTNGG

SEQ ID NO: 41518 - protein, 7 aa, synthetic construct
QGRNMGE

SEQ ID NO: 41519 - protein, 7 aa, synthetic construct
DFMKKMP

SEQ ID NO: 41520 - protein, 7 aa, synthetic construct
VFPKGKE

SEQ ID NO: 41521 - protein, 7 aa, synthetic construct
NGRFPVG

SEQ ID NO: 41522 - protein, 7 aa, synthetic construct
KPQGLTM

SEQ ID NO: 41523 - protein, 7 aa, synthetic construct
YGRNGTM

SEQ ID NO: 41524 - protein, 7 aa, synthetic construct
NANKSQA

SEQ ID NO: 41525 - protein, 7 aa, synthetic construct
KNVTNTA

SEQ ID NO: 41526 - protein, 7 aa, synthetic construct
GNQKASG

SEQ ID NO: 41527 - protein, 7 aa, synthetic construct
FVASHHA

SEQ ID NO: 41528 - protein, 7 aa, synthetic construct
KQSSSAT

SEQ ID NO: 41529 - protein, 7 aa, synthetic construct
MGKTEMF

SEQ ID NO: 41530 - protein, 7 aa, synthetic construct
RSNNTAP

SEQ ID NO: 41531 - protein, 7 aa, synthetic construct
SKNNAAG

SEQ ID NO: 41532 - protein, 7 aa, synthetic construct
INNRSRE

SEQ ID NO: 41533 - protein, 7 aa, synthetic construct
GIPHNVQ

SEQ ID NO: 41534 - protein, 7 aa, synthetic construct
GPKTQAS

SEQ ID NO: 41535 - protein, 7 aa, synthetic construct
TKASAQF

SEQ ID NO: 41536 - protein, 7 aa, synthetic construct
GKYQQVA

SEQ ID NO: 41537 - protein, 7 aa, synthetic construct
HSGPSPV

SEQ ID NO: 41538 - protein, 7 aa, synthetic construct
HMGSMKS

SEQ ID NO: 41539 - protein, 7 aa, synthetic construct
SKNSIGA

SEQ ID NO: 41540 - protein, 7 aa, synthetic construct
TKTMAAG

SEQ ID NO: 41541 - protein, 7 aa, synthetic construct
NKNVHNA

SEQ ID NO: 41542 - protein, 7 aa, synthetic construct
VNAQIKN

SEQ ID NO: 41543 - protein, 7 aa, synthetic construct
GVRPGQQ

SEQ ID NO: 41544 - protein, 7 aa, synthetic construct
DRNFKIG

SEQ ID NO: 41545 - protein, 7 aa, synthetic construct
TANSARG

SEQ ID NO: 41546 - protein, 7 aa, synthetic construct
NGVQRGA

SEQ ID NO: 41547 - protein, 7 aa, synthetic construct
FGGYRQE

SEQ ID NO: 41548 - protein, 7 aa, synthetic construct
KDKNGTG

SEQ ID NO: 41549 - protein, 7 aa, synthetic construct
SLPAAVS

SEQ ID NO: 41550 - protein, 7 aa, synthetic construct
SKQSAMA

SEQ ID NO: 41551 - protein, 7 aa, synthetic construct
QTHSGKV

SEQ ID NO: 41552 - protein, 7 aa, synthetic construct
SKASGRE

SEQ ID NO: 41553 - protein, 7 aa, synthetic construct
THKQNSA

SEQ ID NO: 41554 - protein, 7 aa, synthetic construct
TSNNKPA

SEQ ID NO: 41555 - protein, 7 aa, synthetic construct
YKSTPTN

SEQ ID NO: 41556 - protein, 7 aa, synthetic construct
THRGTNE

SEQ ID NO: 41557 - protein, 7 aa, synthetic construct
RQNTTPP

SEQ ID NO: 41558 - protein, 7 aa, synthetic construct
DRPGAYG

SEQ ID NO: 41559 - protein, 7 aa, synthetic construct
RTQQSNS

SEQ ID NO: 41560 - protein, 7 aa, synthetic construct
NVKSTSA

SEQ ID NO: 41561 - protein, 7 aa, synthetic construct
NTGSKGP

SEQ ID NO: 41562 - protein, 7 aa, synthetic construct
NGTGRQG

SEQ ID NO: 41563 - protein, 7 aa, synthetic construct
RMNGSTS

SEQ ID NO: 41564 - protein, 7 aa, synthetic construct
RDHLSNR

SEQ ID NO: 41565 - protein, 7 aa, synthetic construct
LSNGSLN

SEQ ID NO: 41566 - protein, 7 aa, synthetic construct
LNNSSKQ

SEQ ID NO: 41567 - protein, 7 aa, synthetic construct
NARAHGG

SEQ ID NO: 41568 - protein, 7 aa, synthetic construct
YNIVGKG

SEQ ID NO: 41569 - protein, 7 aa, synthetic construct
KPSGMNA

SEQ ID NO: 41570 - protein, 7 aa, synthetic construct
RVRVDSM

SEQ ID NO: 41571 - protein, 7 aa, synthetic construct
NKVGGGG

SEQ ID NO: 41572 - protein, 7 aa, synthetic construct
AGNHAKN

SEQ ID NO: 41573 - protein, 7 aa, synthetic construct
RQTNGAG

SEQ ID NO: 41574 - protein, 7 aa, synthetic construct
IVKGAGA

SEQ ID NO: 41575 - protein, 7 aa, synthetic construct
SMRTGTG

SEQ ID NO: 41576 - protein, 7 aa, synthetic construct
YGLSKVG

SEQ ID NO: 41577 - protein, 7 aa, synthetic construct
MGSKYGH

SEQ ID NO: 41578 - protein, 7 aa, synthetic construct
FGTKTSP

SEQ ID NO: 41579 - protein, 7 aa, synthetic construct
GKPNMNA

SEQ ID NO: 41580 - protein, 7 aa, synthetic construct
YGTKGSG

SEQ ID NO: 41581 - protein, 7 aa, synthetic construct
KVASQTF

SEQ ID NO: 41582 - protein, 7 aa, synthetic construct
FIGSRSS

SEQ ID NO: 41583 - protein, 7 aa, synthetic construct
TPTWSSP

SEQ ID NO: 41584 - protein, 7 aa, synthetic construct
IGGMKSG

SEQ ID NO: 41585 - protein, 7 aa, synthetic construct
RTNAQVP

SEQ ID NO: 41586 - protein, 7 aa, synthetic construct
NIKSTSG

SEQ ID NO: 41587 - protein, 7 aa, synthetic construct
NIANHAG

SEQ ID NO: 41588 - protein, 7 aa, synthetic construct
TEQTRYA

SEQ ID NO: 41589 - protein, 7 aa, synthetic construct
NARQNNA

SEQ ID NO: 41590 - protein, 7 aa, synthetic construct
TGKSVNS

SEQ ID NO: 41591 - protein, 7 aa, synthetic construct
SSSKSVG

SEQ ID NO: 41592 - protein, 7 aa, synthetic construct
SMKSNQY

SEQ ID NO: 41593 - protein, 7 aa, synthetic construct
VGQGRSA

SEQ ID NO: 41594 - protein, 7 aa, synthetic construct
TKAAAKE

SEQ ID NO: 41595 - protein, 7 aa, synthetic construct
VLNEVRS

SEQ ID NO: 41596 - protein, 7 aa, synthetic construct
DIRANTA

SEQ ID NO: 41597 - protein, 7 aa, synthetic construct
TKSSAAN

SEQ ID NO: 41598 - protein, 7 aa, synthetic construct
THRNLAL

SEQ ID NO: 41599 - protein, 7 aa, synthetic construct
KGRADFP

SEQ ID NO: 41600 - protein, 7 aa, synthetic construct
FGMKNGP

SEQ ID NO: 41601 - protein, 7 aa, synthetic construct
SRTQLIH

SEQ ID NO: 41602 - protein, 7 aa, synthetic construct
RNAGNAA

SEQ ID NO: 41603 - protein, 7 aa, synthetic construct
VIQRGDF

SEQ ID NO: 41604 - protein, 7 aa, synthetic construct
KASATAG

SEQ ID NO: 41605 - protein, 7 aa, synthetic construct
HEKYAKG

SEQ ID NO: 41606 - protein, 7 aa, synthetic construct
WNKVVKP

SEQ ID NO: 41607 - protein, 7 aa, synthetic construct
RVSSNSG

SEQ ID NO: 41608 - protein, 7 aa, synthetic construct
LTRQTVA

SEQ ID NO: 41609 - protein, 7 aa, synthetic construct
QPRTSGG

SEQ ID NO: 41610 - protein, 7 aa, synthetic construct
LTQRALN

SEQ ID NO: 41611 - protein, 7 aa, synthetic construct
NPYNKGM

SEQ ID NO: 41612 - protein, 7 aa, synthetic construct
NGRNVGS

SEQ ID NO: 41613 - protein, 7 aa, synthetic construct
NRGTASL

SEQ ID NO: 41614 - protein, 7 aa, synthetic construct
HMKQIEM

SEQ ID NO: 41615 - protein, 7 aa, synthetic construct
KSSVSAG

SEQ ID NO: 41616 - protein, 7 aa, synthetic construct
QRANSSL

SEQ ID NO: 41617 - protein, 7 aa, synthetic construct
SKQSSQT

SEQ ID NO: 41618 - protein, 7 aa, synthetic construct
RIVGDVG

SEQ ID NO: 41619 - protein, 7 aa, synthetic construct
QKTQSTG

SEQ ID NO: 41620 - protein, 7 aa, synthetic construct
KSRDFTS

SEQ ID NO: 41621 - protein, 7 aa, synthetic construct
KPTNPMA

SEQ ID NO: 41622 - protein, 7 aa, synthetic construct
WDKRSPT

SEQ ID NO: 41623 - protein, 7 aa, synthetic construct
GKGPATT

SEQ ID NO: 41624 - protein, 7 aa, synthetic construct
FRSYSQD

SEQ ID NO: 41625 - protein, 7 aa, synthetic construct
TLGVQKS

SEQ ID NO: 41626 - protein, 7 aa, synthetic construct
HTGRLAS

SEQ ID NO: 41627 - protein, 7 aa, synthetic construct
LREHQNF

SEQ ID NO: 41628 - protein, 7 aa, synthetic construct
KRAHDHE

SEQ ID NO: 41629 - protein, 7 aa, synthetic construct
GNGNGRF

SEQ ID NO: 41630 - protein, 7 aa, synthetic construct
SQKQATM

SEQ ID NO: 41631 - protein, 7 aa, synthetic construct
QKSKYPD

SEQ ID NO: 41632 - protein, 7 aa, synthetic construct
FGKYPMV

SEQ ID NO: 41633 - protein, 7 aa, synthetic construct
NASKSNP

SEQ ID NO: 41634 - protein, 7 aa, synthetic construct
AYAREAK

SEQ ID NO: 41635 - protein, 7 aa, synthetic construct
KSVNMSG

SEQ ID NO: 41636 - protein, 7 aa, synthetic construct
DKNRMGP

SEQ ID NO: 41637 - protein, 7 aa, synthetic construct
KPPTTGG

SEQ ID NO: 41638 - protein, 7 aa, synthetic construct
NKTGMNA

SEQ ID NO: 41639 - protein, 7 aa, synthetic construct
PQRQSHE

SEQ ID NO: 41640 - protein, 7 aa, synthetic construct
AANAHTY

SEQ ID NO: 41641 - protein, 7 aa, synthetic construct
RNPTLAG

SEQ ID NO: 41642 - protein, 7 aa, synthetic construct
TKPGTAG

SEQ ID NO: 41643 - protein, 7 aa, synthetic construct
KGSTMSG

SEQ ID NO: 41644 - protein, 7 aa, synthetic construct
TRSSVAP

SEQ ID NO: 41645 - protein, 7 aa, synthetic construct
SAGKTFG

SEQ ID NO: 41646 - protein, 7 aa, synthetic construct
IRPGKPD

SEQ ID NO: 41647 - protein, 7 aa, synthetic construct
KTQVKAP

SEQ ID NO: 41648 - protein, 7 aa, synthetic construct
QTKNVNA

SEQ ID NO: 41649 - protein, 7 aa, synthetic construct
QKLSNLS

SEQ ID NO: 41650 - protein, 7 aa, synthetic construct
YDRANSH

SEQ ID NO: 41651 - protein, 7 aa, synthetic construct
HKPSHID

SEQ ID NO: 41652 - protein, 7 aa, synthetic construct
KSGSPGA

SEQ ID NO: 41653 - protein, 7 aa, synthetic construct
HKWVNGD

SEQ ID NO: 41654 - protein, 7 aa, synthetic construct
EQKPHKY

SEQ ID NO: 41655 - protein, 7 aa, synthetic construct
TGTKAGV

SEQ ID NO: 41656 - protein, 7 aa, synthetic construct
YNKHGTF

SEQ ID NO: 41657 - protein, 7 aa, synthetic construct
GPRNSAD

SEQ ID NO: 41658 - protein, 7 aa, synthetic construct
DQIRRPG

SEQ ID NO: 41659 - protein, 7 aa, synthetic construct
MNKPVRD

SEQ ID NO: 41660 - protein, 7 aa, synthetic construct
PRHSANQ

SEQ ID NO: 41661 - protein, 7 aa, synthetic construct
KQLRPEN

SEQ ID NO: 41662 - protein, 7 aa, synthetic construct
KSRDVGV

SEQ ID NO: 41663 - protein, 7 aa, synthetic construct
HHPFKVA

SEQ ID NO: 41664 - protein, 7 aa, synthetic construct
MSRTSQP

SEQ ID NO: 41665 - protein, 7 aa, synthetic construct
EKAKGDH

SEQ ID NO: 41666 - protein, 7 aa, synthetic construct
NGGKNSA

SEQ ID NO: 41667 - protein, 7 aa, synthetic construct
WTGPGQA

SEQ ID NO: 41668 - protein, 7 aa, synthetic construct
STKHTVD

SEQ ID NO: 41669 - protein, 7 aa, synthetic construct
HSKYVIS

SEQ ID NO: 41670 - protein, 7 aa, synthetic construct
GYDRVQP

SEQ ID NO: 41671 - protein, 7 aa, synthetic construct
TPRYEGP

SEQ ID NO: 41672 - protein, 7 aa, synthetic construct
GLFGLKG

SEQ ID NO: 41673 - protein, 7 aa, synthetic construct
NGKSVVG

SEQ ID NO: 41674 - protein, 7 aa, synthetic construct
RMSSTSP

SEQ ID NO: 41675 - protein, 7 aa, synthetic construct
FAKAHES

SEQ ID NO: 41676 - protein, 7 aa, synthetic construct
NQRPTNA

SEQ ID NO: 41677 - protein, 7 aa, synthetic construct
YIMSGQG

SEQ ID NO: 41678 - protein, 7 aa, synthetic construct
SRTMKGD

SEQ ID NO: 41679 - protein, 7 aa, synthetic construct
RKDSSNP

SEQ ID NO: 41680 - protein, 7 aa, synthetic construct
IMDFSHG

SEQ ID NO: 41681 - protein, 7 aa, synthetic construct
MANMNAS

SEQ ID NO: 41682 - protein, 7 aa, synthetic construct
KAYQVQE

SEQ ID NO: 41683 - protein, 7 aa, synthetic construct
MKSLIPP

SEQ ID NO: 41684 - protein, 7 aa, synthetic construct
REFKQLQ

SEQ ID NO: 41685 - protein, 7 aa, synthetic construct
IEPFHNP

SEQ ID NO: 41686 - protein, 7 aa, synthetic construct
ANSGKPP

SEQ ID NO: 41687 - protein, 7 aa, synthetic construct
TQFNGER

SEQ ID NO: 41688 - protein, 7 aa, synthetic construct
EKKSGYV

SEQ ID NO: 41689 - protein, 7 aa, synthetic construct
VPLHGPA

SEQ ID NO: 41690 - protein, 7 aa, synthetic construct
KAMTQGG

SEQ ID NO: 41691 - protein, 7 aa, synthetic construct
TPWGSGP

SEQ ID NO: 41692 - protein, 7 aa, synthetic construct
AQKGGFA

SEQ ID NO: 41693 - protein, 7 aa, synthetic construct
TKSFQGG

SEQ ID NO: 41694 - protein, 7 aa, synthetic construct
GYRTPST

SEQ ID NO: 41695 - protein, 7 aa, synthetic construct
KQTNTGT

SEQ ID NO: 41696 - protein, 7 aa, synthetic construct
TANQRGA

SEQ ID NO: 41697 - protein, 7 aa, synthetic construct
LKEFTKQ

SEQ ID NO: 41698 - protein, 7 aa, synthetic construct
TNRILDI

SEQ ID NO: 41699 - protein, 7 aa, synthetic construct
VRGVIKE

SEQ ID NO: 41700 - protein, 7 aa, synthetic construct
SKTGISG

SEQ ID NO: 41701 - protein, 7 aa, synthetic construct
RSKADDH

SEQ ID NO: 41702 - protein, 7 aa, synthetic construct
KRDGGTG

SEQ ID NO: 41703 - protein, 7 aa, synthetic construct
KATNMNG

SEQ ID NO: 41704 - protein, 7 aa, synthetic construct
HEHLNKS

SEQ ID NO: 41705 - protein, 7 aa, synthetic construct
ARAQLTN

SEQ ID NO: 41706 - protein, 7 aa, synthetic construct
KPNPSNA

SEQ ID NO: 41707 - protein, 7 aa, synthetic construct
RVAGQSA

SEQ ID NO: 41708 - protein, 7 aa, synthetic construct
VSPHQGA

SEQ ID NO: 41709 - protein, 7 aa, synthetic construct
LGHAKGL

SEQ ID NO: 41710 - protein, 7 aa, synthetic construct
KSTGAAP

SEQ ID NO: 41711 - protein, 7 aa, synthetic construct
KYAGQFP

SEQ ID NO: 41712 - protein, 7 aa, synthetic construct
YPSNKNG

SEQ ID NO: 41713 - protein, 7 aa, synthetic construct
TNQRQTA

SEQ ID NO: 41714 - protein, 7 aa, synthetic construct
DPFHSAG

SEQ ID NO: 41715 - protein, 7 aa, synthetic construct
NSPGTKG

SEQ ID NO: 41716 - protein, 7 aa, synthetic construct
TKVGGSA

SEQ ID NO: 41717 - protein, 7 aa, synthetic construct
VPFKNNI

SEQ ID NO: 41718 - protein, 7 aa, synthetic construct
QRPDRGI

SEQ ID NO: 41719 - protein, 7 aa, synthetic construct
KTNDGIN

SEQ ID NO: 41720 - protein, 7 aa, synthetic construct
FGKTGSN

SEQ ID NO: 41721 - protein, 7 aa, synthetic construct
QKSSGFS

SEQ ID NO: 41722 - protein, 7 aa, synthetic construct
EFRIMDS

SEQ ID NO: 41723 - protein, 7 aa, synthetic construct
TSAVGGK

SEQ ID NO: 41724 - protein, 7 aa, synthetic construct
YPQMKAS

SEQ ID NO: 41725 - protein, 7 aa, synthetic construct
GQKAIQS

SEQ ID NO: 41726 - protein, 7 aa, synthetic construct
DIHRVPG

SEQ ID NO: 41727 - protein, 7 aa, synthetic construct
KQHHNAE

SEQ ID NO: 41728 - protein, 7 aa, synthetic construct
GGTKVTG

SEQ ID NO: 41729 - protein, 7 aa, synthetic construct
VVHRAAS

SEQ ID NO: 41730 - protein, 7 aa, synthetic construct
VKLSQER

SEQ ID NO: 41731 - protein, 7 aa, synthetic construct
KPNTSVA

SEQ ID NO: 41732 - protein, 7 aa, synthetic construct
SLSKGQS

SEQ ID NO: 41733 - protein, 7 aa, synthetic construct
KMPSPGN

SEQ ID NO: 41734 - protein, 7 aa, synthetic construct
GYPKANV

SEQ ID NO: 41735 - protein, 7 aa, synthetic construct
KQVPAGA

SEQ ID NO: 41736 - protein, 7 aa, synthetic construct
PGKEHTP

SEQ ID NO: 41737 - protein, 7 aa, synthetic construct
MPKSSVS

SEQ ID NO: 41738 - protein, 7 aa, synthetic construct
DKYKPES

SEQ ID NO: 41739 - protein, 7 aa, synthetic construct
HTSRTSP

SEQ ID NO: 41740 - protein, 7 aa, synthetic construct
KNPDMKV

SEQ ID NO: 41741 - protein, 7 aa, synthetic construct
NKPTQSA

SEQ ID NO: 41742 - protein, 7 aa, synthetic construct
SNMAIPR

SEQ ID NO: 41743 - protein, 7 aa, synthetic construct
HFAMKSP

SEQ ID NO: 41744 - protein, 7 aa, synthetic construct
KHAQGVN

SEQ ID NO: 41745 - protein, 7 aa, synthetic construct
RGSFTGD

SEQ ID NO: 41746 - protein, 7 aa, synthetic construct
KTPNQAG

SEQ ID NO: 41747 - protein, 7 aa, synthetic construct
RNATTMA

SEQ ID NO: 41748 - protein, 7 aa, synthetic construct
KSTSLQA

SEQ ID NO: 41749 - protein, 7 aa, synthetic construct
SYMIKTG

SEQ ID NO: 41750 - protein, 7 aa, synthetic construct
LETKKMA

SEQ ID NO: 41751 - protein, 7 aa, synthetic construct
YAPHMAN

SEQ ID NO: 41752 - protein, 7 aa, synthetic construct
MKAGASS

SEQ ID NO: 41753 - protein, 7 aa, synthetic construct
MTNKTQG

SEQ ID NO: 41754 - protein, 7 aa, synthetic construct
QKGNLPS

SEQ ID NO: 41755 - protein, 7 aa, synthetic construct
NPRQAQS

SEQ ID NO: 41756 - protein, 7 aa, synthetic construct
QEFTTKF

SEQ ID NO: 41757 - protein, 7 aa, synthetic construct
MGPKNGG

SEQ ID NO: 41758 - protein, 7 aa, synthetic construct
KITTPTT

SEQ ID NO: 41759 - protein, 7 aa, synthetic construct
RGQNNPA

SEQ ID NO: 41760 - protein, 7 aa, synthetic construct
YRQQVMS

SEQ ID NO: 41761 - protein, 7 aa, synthetic construct
WKGNWPA

SEQ ID NO: 41762 - protein, 7 aa, synthetic construct
GGHVPRE

SEQ ID NO: 41763 - protein, 7 aa, synthetic construct
TKPGLSG

SEQ ID NO: 41764 - protein, 7 aa, synthetic construct
KTSQVAG

SEQ ID NO: 41765 - protein, 7 aa, synthetic construct
MTAGTRG

SEQ ID NO: 41766 - protein, 7 aa, synthetic construct
MRSHQSE

SEQ ID NO: 41767 - protein, 7 aa, synthetic construct
LGQMGRA

SEQ ID NO: 41768 - protein, 7 aa, synthetic construct
LPARTSG

SEQ ID NO: 41769 - protein, 7 aa, synthetic construct
MNNPRQV

SEQ ID NO: 41770 - protein, 7 aa, synthetic construct
MRGQATA

SEQ ID NO: 41771 - protein, 7 aa, synthetic construct
KNNNAGF

SEQ ID NO: 41772 - protein, 7 aa, synthetic construct
SPRPMGA

SEQ ID NO: 41773 - protein, 7 aa, synthetic construct
KGHQISA

SEQ ID NO: 41774 - protein, 7 aa, synthetic construct
YSKPTNS

SEQ ID NO: 41775 - protein, 7 aa, synthetic construct
RSHLGQQ

SEQ ID NO: 41776 - protein, 7 aa, synthetic construct
QSRVTAS

SEQ ID NO: 41777 - protein, 7 aa, synthetic construct
HGQKGSY

SEQ ID NO: 41778 - protein, 7 aa, synthetic construct
NMRDASP

SEQ ID NO: 41779 - protein, 7 aa, synthetic construct
ISANNQG

SEQ ID NO: 41780 - protein, 7 aa, synthetic construct
KKESNAG

SEQ ID NO: 41781 - protein, 7 aa, synthetic construct
YHGKLGP

SEQ ID NO: 41782 - protein, 7 aa, synthetic construct
QSPKPNG

SEQ ID NO: 41783 - protein, 7 aa, synthetic construct
SQVKIHD

SEQ ID NO: 41784 - protein, 7 aa, synthetic construct
MQRVTTT

SEQ ID NO: 41785 - protein, 7 aa, synthetic construct
EVKAKAA

SEQ ID NO: 41786 - protein, 7 aa, synthetic construct
GHGAING

SEQ ID NO: 41787 - protein, 7 aa, synthetic construct
MNQRNKE

SEQ ID NO: 41788 - protein, 7 aa, synthetic construct
HLNPQRD

SEQ ID NO: 41789 - protein, 7 aa, synthetic construct
PSKTVAG

SEQ ID NO: 41790 - protein, 7 aa, synthetic construct
QKNASAM

SEQ ID NO: 41791 - protein, 7 aa, synthetic construct
YSSTQKI

SEQ ID NO: 41792 - protein, 7 aa, synthetic construct
QHANFAA

SEQ ID NO: 41793 - protein, 7 aa, synthetic construct
FRNSVSG

SEQ ID NO: 41794 - protein, 7 aa, synthetic construct
RNGTLSA

SEQ ID NO: 41795 - protein, 7 aa, synthetic construct
MRSGQSG

SEQ ID NO: 41796 - protein, 7 aa, synthetic construct
DRKSLGP

SEQ ID NO: 41797 - protein, 7 aa, synthetic construct
QAKYHHE

SEQ ID NO: 41798 - protein, 7 aa, synthetic construct
RNMSDQG

SEQ ID NO: 41799 - protein, 7 aa, synthetic construct
MQSSRGG

SEQ ID NO: 41800 - protein, 7 aa, synthetic construct
RPQNAAA

SEQ ID NO: 41801 - protein, 7 aa, synthetic construct
ISKSVTI

SEQ ID NO: 41802 - protein, 7 aa, synthetic construct
SKYEGKM

SEQ ID NO: 41803 - protein, 7 aa, synthetic construct
YPPKQGG

SEQ ID NO: 41804 - protein, 7 aa, synthetic construct
QPRRGDD

SEQ ID NO: 41805 - protein, 7 aa, synthetic construct
KPYSQGG

SEQ ID NO: 41806 - protein, 7 aa, synthetic construct
GPHNNSG

SEQ ID NO: 41807 - protein, 7 aa, synthetic construct
TLGKGNL

SEQ ID NO: 41808 - protein, 7 aa, synthetic construct
RNANENF

SEQ ID NO: 41809 - protein, 7 aa, synthetic construct
TKQAGVN

(The sequence listing continues in the following parts.)

1. An adeno-associated virus (AAV) capsid polypeptide comprising a peptide inserted within the capsid polypeptide, wherein the peptide comprises an amino acid sequence selected from the group consisting of RPNRDTS (SEQ ID NO: 144800); MDGQRRI (SEQ ID NO: 132518); ETNRAGR (SEQ ID NO: 116028); TGRVDSR (SEQ ID NO: 149619); NMTRARD (SEQ ID NO: 136472); GEKPKFT (SEQ ID NO: 164722); MEPRQRT (SEQ ID NO: 132640); and variants thereof comprising a substitution or deletion of one or two amino acids.

2. The capsid polypeptide of claim 1, wherein the capsid is an AAV1, AAV2, AAV3, AAV3b, AAV4, AAV5, AAV6, AAV7, AAV8, AAV9, AAV9 K449R, rh.10, rh.8, or LK03 capsid polypeptide.

3. The capsid polypeptide of claim 1,
wherein the peptide is inserted in Loop VIII of the capsid polypeptide;
wherein the peptide is inserted between amino acids 565 and 605 of an AAV9 K449R amino acid sequence, or at an equivalent insertion position in another AAV polypeptide;
wherein the peptide is inserted between amino acids 575 and 595 and 600 of an AAV9 K449R amino acid sequence, or at an equivalent insertion position in another AAV polypeptide;
and/or wherein the peptide is inserted between amino acids 588 and 589 of an AAV9 K449R amino acid sequence, or at an equivalent insertion position in another AAV polypeptide.

4-6. (canceled)

7. The capsid polypeptide of claim 1, wherein a viral particle comprising an AAV capsid comprising the peptide has increased transduction efficiency for a cell of interest relative to an AAV capsid lacking the peptide.

8. The capsid polypeptide of claim 7, wherein the cell of interest is a liver cell, brain cell, brain endothelial cell, kidney cell, spinal cord cell, spleen cell, nerve cell, or a cell of the spinal cord, heart, or lungs.

9. The capsid polypeptide of claim 7, wherein transduction efficiency is increased by at least about 10%, 25%, 50%, 100%, 200% or more relative to an AAV capsid lacking the peptide.

10. The capsid polypeptide of claim 1, wherein a viral particle comprising an AAV capsid comprising the peptide has increased production fitness relative to an AAV capsid lacking the peptide; and/or wherein a viral particle comprising an AAV capsid comprising the peptide has increased biodistribution in an organ of interest relative to an AAV capsid lacking the peptide.

11-13. (canceled)

14. An adeno-associated virus (AAV) capsid polypeptide comprising a peptide inserted within the capsid polypeptide, wherein the peptide comprises a motif selected from those listed in Tables 2-27.

15. The capsid polypeptide of claim 8, wherein the AAV capsid polypeptide is an AAV9 K449R capsid polypeptide and shares at least 85% sequence identity to an amino acid sequence selected from the group consisting of:
AAV-BI151
(SEQ ID NO: 199456)
MAADGYLPDWLEDNLSEGIREWWALKPGAPQPKANQQHQDNARGLVLPGYKYLGPGNGLDKGEP
VNAADAAALEHDKAYDQQLKAGDNPYLKYNHADAEFQERLKEDTSFGGNLGRAVFQAKKRLLEP
LGLVEEAAKTAPGKKRPVEQSPQEPDSSAGIGKSGAQPAKKRLNFGQTGDTESVPDPQPIGEPP
AAPSGVGSLTMASGGGAPVADNNEGADGVGSSSGNWHCDSQWLGDRVITTSTRTWALPTYNNHL
YKQISNSTSGGSSNDNAYFGYSTPWGYFDENRFHCHESPRDWQRLINNNWGFRPKRLNFKLFNI
QVKEVTDNNGVKTIANNLTSTVQVFTDSDYQLPYVLGSAHEGCLPPFPADVEMIPQYGYLTLND
GSQAVGRSSFYCLEYFPSQMLRTGNNFQFSYEFENVPFHSSYAHSQSLDRLMNPLIDQYLYYLS
RTINGSGQNQQTLKFSVAGPSNMAVQGRNYIPGPSYRQQRVSTTVTQNNNSEFAWPGASSWALN
GRNSLMNPGPAMASHKEGEDRFFPLSGSLIFGKQGTGRDNVDADKVMITNEEEIKTTNPVATES
YGQVATNHQSAQRPNRDTSAQAQTGWVQNQGILPGMVWQDRDVYLQGPIWAKIPHTDGNFHPSP
LMGGFGMKHPPPQILIKNTPVPADPPTAFNKDKLNSFITQYSTGQVSVEIEWELQKENSKRWNP
EIQYTSNYYKSNNVEFAVNTEGVYSEPRPIGTRYLTRNL;
AAV-BI152
(SEQ ID NO: 199457)
MAADGYLPDWLEDNLSEGIREWWALKPGAPQPKANQQHQDNARGLVLPGYKYLGPGNGLDKGEP
VNAADAAALEHDKAYDQQLKAGDNPYLKYNHADAEFQERLKEDTSFGGNLGRAVFQAKKRLLEP
LGLVEEAAKTAPGKKRPVEQSPQEPDSSAGIGKSGAQPAKKRLNFGQTGDTESVPDPQPIGEPP
AAPSGVGSLTMASGGGAPVADNNEGADGVGSSSGNWHCDSQWLGDRVITTSTRTWALPTYNNHL
YKQISNSTSGGSSNDNAYFGYSTPWGYFDFNRFHCHESPRDWQRLINNNWGFRPKRLNFKLFNI
QVKEVTDNNGVKTIANNLTSTVQVFTDSDYQLPYVLGSAHEGCLPPFPADVFMIPQYGYLTLND
GSQAVGRSSFYCLEYFPSQMLRTGNNFQFSYEFENVPFHSSYAHSQSLDRLMNPLIDQYLYYLS
RTINGSGQNQQTLKFSVAGPSNMAVQGRNYIPGPSYRQQRVSTTVTQNNNSEFAWPGASSWALN
GRNSLMNPGPAMASHKEGEDRFFPLSGSLIFGKQGTGRDNVDADKVMITNEEEIKTTNPVATES
YGQVATNHQSAQMDGQRRIAQAQTGWVQNQGILPGMVWQDRDVYLQGPIWAKIPHTDGNFHPSP
LMGGFGMKHPPPQILIKNTPVPADPPTAFNKDKLNSFITQYSTGQVSVEIEWELQKENSKRWNP
EIQYTSNYYKSNNVEFAVNTEGVYSEPRPIGTRYLTRNL;
AAV-BI153
(SEQ ID NO: 199458)
MAADGYLPDWLEDNLSEGIREWWALKPGAPQPKANQQHQDNARGLVLPGYKYLGPGNGLDKGEP
VNAADAAALEHDKAYDQQLKAGDNPYLKYNHADAEFQERLKEDTSFGGNLGRAVFQAKKRLLEP
LGLVEEAAKTAPGKKRPVEQSPQEPDSSAGIGKSGAQPAKKRLNFGQTGDTESVPDPQPIGEPP
AAPSGVGSLTMASGGGAPVADNNEGADGVGSSSGNWHCDSQWLGDRVITTSTRTWALPTYNNHL
YKQISNSTSGGSSNDNAYFGYSTPWGYFDENRFHCHESPRDWQRLINNNWGFRPKRLNFKLFNI
QVKEVTDNNGVKTIANNLTSTVQVFTDSDYQLPYVLGSAHEGCLPPFPADVEMIPQYGYLTLND
GSQAVGRSSFYCLEYFPSQMLRTGNNFQFSYEFENVPFHSSYAHSQSLDRLMNPLIDQYLYYLS
RTINGSGQNQQTLKFSVAGPSNMAVQGRNYIPGPSYRQQRVSTTVTQNNNSEFAWPGASSWALN
GRNSLMNPGPAMASHKEGEDRFFPLSGSLIFGKQGTGRDNVDADKVMITNEEEIKTTNPVATES
YGQVATNHQSAQETNRAGRAQAQTGWVQNQGILPGMVWQDRDVYLQGPIWAKIPHTDGNFHPSP
LMGGFGMKHPPPQILIKNTPVPADPPTAFNKDKLNSFITQYSTGQVSVEIEWELQKENSKRWNP
EIQYTSNYYKSNNVEFAVNTEGVYSEPRPIGTRYLTRNL;
AAV-BI154
(SEQ ID NO: 199459)
MAADGYLPDWLEDNLSEGIREWWALKPGAPQPKANQQHQDNARGLVLPGYKYLGPGNGLDKGEP
VNAADAAALEHDKAYDQQLKAGDNPYLKYNHADAEFQERLKEDTSFGGNLGRAVFQAKKRLLEP
LGLVEEAAKTAPGKKRPVEQSPQEPDSSAGIGKSGAQPAKKRLNFGQTGDTESVPDPQPIGEPP
AAPSGVGSLTMASGGGAPVADNNEGADGVGSSSGNWHCDSQWLGDRVITTSTRTWALPTYNNHL
YKQISNSTSGGSSNDNAYFGYSTPWGYFDENRFHCHESPRDWQRLINNNWGFRPKRLNFKLENI
QVKEVTDNNGVKTIANNLTSTVQVFTDSDYQLPYVLGSAHEGCLPPFPADVEMIPQYGYLTLND
GSQAVGRSSFYCLEYFPSQMLRTGNNFQFSYEFENVPFHSSYAHSQSLDRLMNPLIDQYLYYLS
RTINGSGQNQQTLKFSVAGPSNMAVQGRNYIPGPSYRQQRVSTTVTQNNNSEFAWPGASSWALN
GRNSLMNPGPAMASHKEGEDRFFPLSGSLIFGKQGTGRDNVDADKVMITNEEEIKTTNPVATES
YGQVATNHQSAQTGRVDSRAQAQTGWVQNQGILPGMVWQDRDVYLQGPIWAKIPHTDGNFHPSP
LMGGFGMKHPPPQILIKNTPVPADPPTAFNKDKLNSFITQYSTGQVSVEIEWELQKENSKRWNP
EIQYTSNYYKSNNVEFAVNTEGVYSEPRPIGTRYLTRNL;
AAV-BI155
(SEQ ID NO: 199460)
MAADGYLPDWLEDNLSEGIREWWALKPGAPQPKANQQHQDNARGLVLPGYKYLGPGNGLDKGEP
VNAADAAALEHDKAYDQQLKAGDNPYLKYNHADAEFQERLKEDTSFGGNLGRAVFQAKKRLLEP
LGLVEEAAKTAPGKKRPVEQSPQEPDSSAGIGKSGAQPAKKRLNFGQTGDTESVPDPQPIGEPP
AAPSGVGSLTMASGGGAPVADNNEGADGVGSSSGNWHCDSQWLGDRVITTSTRTWALPTYNNHL
YKQISNSTSGGSSNDNAYFGYSTPWGYFDENRFHCHFSPRDWQRLINNNWGFRPKRLNFKLFNI
QVKEVTDNNGVKTIANNLTSTVQVFTDSDYQLPYVLGSAHEGCLPPFPADVEMIPQYGYLTLND
GSQAVGRSSFYCLEYFPSQMLRTGNNFQFSYEFENVPFHSSYAHSQSLDRLMNPLIDQYLYYLS
RTINGSGQNQQTLKFSVAGPSNMAVQGRNYIPGPSYRQQRVSTTVTQNNNSEFAWPGASSWALN
GRNSLMNPGPAMASHKEGEDRFFPLSGSLIFGKQGTGRDNVDADKVMITNEEEIKTTNPVATES
YGQVATNHQSAQNMTRARDAQAQTGWVQNQGILPGMVWQDRDVYLQGPIWAKIPHTDGNFHPSP
LMGGFGMKHPPPQILIKNTPVPADPPTAFNKDKLNSFITQYSTGQVSVEIEWELQKENSKRWNP
EIQYTSNYYKSNNVEFAVNTEGVYSEPRPIGTRYLTRNL;
AAV-BI156
(SEQ ID NO: 199461)
MAADGYLPDWLEDNLSEGIREWWALKPGAPQPKANQQHQDNARGLVLPGYKYLGPGNGLDKGEP
VNAADAAALEHDKAYDQQLKAGDNPYLKYNHADAEFQERLKEDTSFGGNLGRAVFQAKKRLLEP
LGLVEEAAKTAPGKKRPVEQSPQEPDSSAGIGKSGAQPAKKRLNFGQTGDTESVPDPQPIGEPP
AAPSGVGSLTMASGGGAPVADNNEGADGVGSSSGNWHCDSQWLGDRVITTSTRTWALPTYNNHL
YKQISNSTSGGSSNDNAYFGYSTPWGYFDFNRFHCHFSPRDWQRLINNNWGFRPKRLNFKLENI
QVKEVTDNNGVKTIANNLTSTVQVFTDSDYQLPYVLGSAHEGCLPPFPADVEMIPQYGYLTLND
GSQAVGRSSFYCLEYFPSQMLRTGNNFQFSYEFENVPFHSSYAHSQSLDRLMNPLIDQYLYYLS
RTINGSGQNQQTLKFSVAGPSNMAVQGRNYIPGPSYRQQRVSTTVTQNNNSEFAWPGASSWALN
GRNSLMNPGPAMASHKEGEDRFFPLSGSLIFGKQGTGRDNVDADKVMITNEEEIKTTNPVATES
YGQVATNHQSAQGEKPKFTAQAQTGWVQNQGILPGMVWQDRDVYLQGPIWAKIPHTDGNFHPSP
LMGGFGMKHPPPQILIKNTPVPADPPTAFNKDKLNSFITQYSTGQVSVEIEWELQKENSKRWNP
EIQYTSNYYKSNNVEFAVNTEGVYSEPRPIGTRYLTRNL;
and
AAV-BI157
(SEQ ID NO: 199462)
MAADGYLPDWLEDNLSEGIREWWALKPGAPQPKANQQHQDNARGLVLPGYKYLGPGNGLDKGEP
VNAADAAALEHDKAYDQQLKAGDNPYLKYNHADAEFQERLKEDTSFGGNLGRAVFQAKKRLLEP
LGLVEEAAKTAPGKKRPVEQSPQEPDSSAGIGKSGAQPAKKRLNFGQTGDTESVPDPQPIGEPP
AAPSGVGSLTMASGGGAPVADNNEGADGVGSSSGNWHCDSQWLGDRVITTSTRTWALPTYNNHL
YKQISNSTSGGSSNDNAYFGYSTPWGYFDFNRFHCHFSPRDWQRLINNNWGFRPKRLNFKLENI
QVKEVTDNNGVKTIANNLTSTVQVFTDSDYQLPYVLGSAHEGCLPPFPADVEMIPQYGYLTLND
GSQAVGRSSFYCLEYFPSQMLRTGNNFQFSYEFENVPFHSSYAHSQSLDRLMNPLIDQYLYYLS
RTINGSGQNQQTLKFSVAGPSNMAVQGRNYIPGPSYRQQRVSTTVTQNNNSEFAWPGASSWALN
GRNSLMNPGPAMASHKEGEDRFFPLSGSLIFGKQGTGRDNVDADKVMITNEEEIKTTNPVATES
YGQVATNHQSAQMEPRQRTAQAQTGWVQNQGILPGMVWQDRDVYLQGPIWAKIPHTDGNFHPSP
LMGGFGMKHPPPQILIKNTPVPADPPTAFNKDKLNSFITQYSTGQVSVEIEWELQKENSKRWNP
EIQYTSNYYKSNNVEFAVNTEGVYSEPRPIGTRYLTRNL*.

16. A viral particle comprising the AAV capsid polypeptide of claim 8.

17. A polynucleotide encoding the capsid polypeptide of claim 1.

18. A library of adeno-associated virus (AAV) capsid polypeptides or polynucleotides encoding the same, wherein the library comprises two or more capsid polypeptides of claim 1; or wherein the library comprises two or more capsid polypeptides each comprising a peptide with a sequence selected from the group consisting of SEQ ID NOs: 1-199427 and 200028-201544.

19-25. (canceled)

26. The library of claim 12, wherein the capsid is an AAV1, AAV2, AAV3, AAV3b, AAV4, AAV5, AAV6, AAV7, AAV8, AAV9, AAV9 K449R, rh.10, rh.8, or LK03 capsid polypeptide.

27. (canceled)

28. The library of claim 12, wherein the library comprises an amino acid sequence motif selected from the group consisting of:
[RQMT] [RNQP] [RQPS] [ANQGST] **G; [QTV] [ANQGKP] [RNGSTY] * [ARGT] * [GP];
[RKSV] [FPS] ** [RT] [QGS] [GS]; [GST] * [QT] [NQ]R*G; [TV] ** [NS]R[QGM]G;
[RNQT] [ANPS] [RNS] ** [NQGS]G; T [NGS] **R[AQS]G; NR** [NG] [QG]A;
R**QGGG (SEQ ID NO: 199501); [QF] [KS] [RN] ** [NP] [AP]; QR**S [TV]A (SEQ ID NO: 199502); [QKM] *G[RSV] [KT] *G;
[QMTV] [RN] * [ANV] [RQS] * [GS]; [NQ]R[NGP] [NQS] **A;
[QT] * [RT] [RT] * [NQG] [AG]; NTR**SA (SEQ ID NO: 199503);
QRP* [AS] * [AS]; RQ**TNA (SEQ ID NO: 199504); QRP** [MV] [AS];
[RN] *N[RS] *[QG]G; [MTV]R[PS] *[QT] *G; [RY]S*[QK] *Q[GS]; MRG**MG (SEQ ID NO: 199505); [GV] *[NT] *R[QS]G; [ST] [RQ] [RS]T**A; R*S*STP (SEQ ID NO: 199506); QR**TNG (SEQ ID NO: 199507); Q*RQT*P (SEQ ID NO: 199508); [NQ]RQ*[GS] *A; TR**NNA (SEQ ID NO: 199509);
[RT]S*[RQ] [QS] *A; GQ*RV*G (SEQ ID NO: 199510); T*TSR*G (SEQ ID NO: 199511); TRG**TG (SEQ ID NO: 199512); NR* [GT] * [TV]G; T*RT*SA (SEQ ID NO: 199513); MG*R*GA (SEQ ID NO: 199514); [NQ]R*[NQ]S*A;
RQ*PT*A (SEQ ID NO: 199515); T*T*RSG (SEQ ID NO: 199516); T*RGS*P (SEQ ID NO: 199517); TR**TMG (SEQ ID NO: 199518); R*TS*SP (SEQ ID NO: 199519); N**QRSA (SEQ ID NO: 199520); [QT] [RK] *S* [TY]A;
QR*PA*G (SEQ ID NO: 199521); RS*S*GG (SEQ ID NO: 199522); RTS*S*P (SEQ ID NO: 199523); TRQ*T*G (SEQ ID NO: 199524); QR*S*TG (SEQ ID NO: 199525); R*NS*SP (SEQ ID NO: 199526); MR*G*QS (SEQ ID NO: 199527); N**SRQG (SEQ ID NO: 199528); NR*ST*A (SEQ ID NO: 199529);
RSQ*G*G (SEQ ID NO: 199530); T*RTN*A (SEQ ID NO: 199531); T*S*RMG (SEQ ID NO: 199532); TR**TQA (SEQ ID NO: 199533); and TRT**SG (SEQ ID NO: 199534); YSGK**G (SEQ ID NO: 199535); or polynucleotides encoding the same, where “*” represents any amino acid and square brackets denote a list of amino acids that may occur at a position; and/or
wherein the library comprises an amino acid sequence motif selected from the group consisting of: [RQGKST] [ARNQGFPST] ** [ARNQGKMTV] [ANQGMSV]G;
[\hat{ }ADCEHILKPW] [ARNQGKPS] [ARNQGKST] [ARNQKPSTV] **[NDGPS];
[NQKMFSTY] [RNGKT] [\hat{ }CEHILKFSWY] ** [RNQKMPSTV] [ANDEPS];
[\hat{ }ARDCEHILW] [RGLKPSY] * [NQGKPSTV] * [ANQGFST]G;
[\hat{ }ARDCEHILPW] [ARQGKPT] [RQGKPST] ** [ANGMST]G;
[\hat{ }ADCQEHILW] [NQGLKMPST] * [\hat{ }NCEHILMFWY] [ARNQGMTV] * [GS];
[RGMY] [ANQGPS] [NQKPST] ** [ANGKMST]G;
[NQGKFSTV] [RNQGKS] ** [ARNGKT] [NQGKFSYV] [ANDGS];
[\hat{ }ARDCEHILFW] * [ARNQGKMPT] [RQGKPSTV] * [AQGST]G;
[\hat{ }ARDCEHILPW] * [RNGKPST] * [ARNGKSV] [NQGKMST]G;
[RNKT] [RNQPS] *[RQGPS] [RQGS] *[APS];
[RNMPY] [RNQKPS] * [ANQTV] * [ANQGKTV] [DGPS];
[NQGKMFTV] [ARQGKMPTV] [RNQGKPTY] * [ARQKMST] *G;
[RNQMFST] [RNQGKT] *[ARNQPST] *[AQGSTY] [APS];
[QGKMSTV] * [ARNQGKMPT] [RNQGKT] [ARNSTV] *G;
[RMT] * [NQKT] * [ARQGT] [ANQS] [GP];
[RKMSV] **L[ANQGKPS] [NGMSTV] [ANGKSTV] [DGS];
[NQKMPTYV] * [ARGKPTV] [NGST] [RNQKST] * [GPS];
[RNQKMSY] [RQKST] [ADQKPST] * [AKSTV] * [ADPS]; [RK] ** [NG] [AS] [GT]A;
[RQ] * [RNPST] [AQGST] [AQGSTV] * [GPS]; R[QPS] *S* [QGV]G;
[RKV] [NGKP] *N[ANGT] *G; [NQGLKFT] [NGKS] [QKMS] ** [ARQKSV] [ANDEG];
[RQMS] * [RNQKST] [NPST] * [ARNQGMS] [DGP]; [RKT] ** [PST] [QT] [ANG]G;
[NQKMT] [ARDKPST] [RNGKP] *G*G;
[RNQKMFT] [RDGKPST] [RNQGKPT] *[NQGST] *[AS];
[RNQMST] [RNDQKST] [RGKPST] [AQGKPST] **[APSV];
[QKT] * [KS] * [AQGS] [NQS] [AS]; [KFV] * [ANK] * [ST] [KS] [AD];
[RQKMTYV] [RNDKPS] [RQGPS] [NDQGPST] ** [GP];
[NQMT]R*[NGPTV] [AQGS] *[GS]; [QMSY] [RKP] **S[AQGKV] [ADGS];
R[NS] ** [ANQ] [AQT]A; R[QS] **T [NQ] [AS]; [RQ] * [KPT] [GST] * [ANQGT]G;
[RN] [RQP] * [GPS]T*A; [RNMPT] * [RNGKST] [ANDQKPST] [RNGST] *A;
K[QPS] *[NMS] *[QV] [GS]; K*[NQG] *[NT] [AST]G; RN*Q*SG (SEQ ID NO: 199536); K* [ANGST] [NST] * [AMS] [GS]; KT*S*GA (SEQ ID NO: 199537);
[RKMT] [RQKPST]S*[ARSTV] *G; [KM] *N*GNA (SEQ ID NO: 199538);
N**S [GT] [GM]A; K* [GPS] [GT] [AT] *A; [QG]K* [GTV] [AMS] * [AN];
[RQT] * [RNQPT] [RNST] * [QGS]A; [NQ] [RK] ** [GS]TA; [TV] **NRQG (SEQ ID NO: 199539); R[AGPS] [NQPT] *[NGST] *G; R[MST]N**[QT] [GP];
[RNQ] * [PT] [GT] [RS] *A; RS**NTG (SEQ ID NO: 199540);
[RK] *[PS]G*[NQGT]A; Q*KSA*A (SEQ ID NO: 199541); KN*G*TA (SEQ ID NO: 199542); K*S*[AS]GA (SEQ ID NO: 199543); [NG]K*[AS] [GT] *A;
[GV]NS*[RK] *G; KT*S*SA (SEQ ID NO: 199544); [RM] [KP] *[AS]S*G;
VK**STG (SEQ ID NO: 199545); [QKT] [RQGMSTV] [AGKP] [NGST] **A;
PR*AT*G (SEQ ID NO: 199546); TRS*T*M (SEQ ID NO: 199547); T**RQQA (SEQ ID NO: 199548); KN*S*SG (SEQ ID NO: 199549); RNS*[AG] *G (SEQ ID NO: 199550); R*S* [AS]T [PS]; [RG] [KS]S* [GT] * [AG]; QR*NS*A (SEQ ID NO: 199551); R*SN*TG (SEQ ID NO: 199552); R*[NS] *[GT]GG;
RAP**NS (SEQ ID NO: 199553); R*NNS*G (SEQ ID NO: 199554);
[NK] * [GKP] [GST] * [GS]A; QK*GT*G (SEQ ID NO: 199555); T**NRGG (SEQ ID NO: 199556); VK*AS*A (SEQ ID NO: 199557); K*P*TGG (SEQ ID NO: 199558); K**QNQG (SEQ ID NO: 199559); R*S*TAP (SEQ ID NO: 199560);
K*S[NG] *[GS] [GS]; R*SN*NA (SEQ ID NO: 199561); RMP**GA (SEQ ID NO: 199562); [RW] [ANP]N[AKS] **A; KT**SGG (SEQ ID NO: 199563); R*P*TGA (SEQ ID NO: 199564); N**QRSA (SEQ ID NO: 199520); K*[NQ]ST*A (SEQ ID NO: 199565); MKN[TV] **A (SEQ ID NO: 199566); KGNN**G (SEQ ID NO: 199567); TKP**AA (SEQ ID NO: 199568); TR*GT*G (SEQ ID NO: 199569); KN*G*SA (SEQ ID NO: 199570); K*ASS*A (SEQ ID NO: 199571);
KLNS**G (SEQ ID NO: 199572); N**SRQG (SEQ ID NO: 199528); and
QNR*A*P (SEQ ID NO: 199573); R*P*AGA (SEQ ID NO: 199574); RT**STP (SEQ ID NO: 199575); SRTT*NG (SEQ ID NO: 199576); T*RT*NA (SEQ ID NO: 199577); TK*NS*G (SEQ ID NO: 199578); TRP**AA (SEQ ID NO: 199579); or polynucleotides encoding the same, where “*” represents any amino acid, square brackets surrounding a list of amino acids not preceded by the symbol “\hat{ }” denote a list of amino acids that may occur at a position, and square brackets surrounding a list of amino acids preceded by the symbol “\hat{ }” denote a list of amino acids that may not occur at a position.

29. (canceled)

30. The library 14, wherein a viral particle having a capsid comprising the motif has increased binding to a cell of interest relative to a control viral particle.

31. The library of claim 14, wherein the library comprises an amino acid sequence motif selected from the group consisting of: QSRT**P (SEQ ID NO: 199580); K[HP] [NT] *P* [NS]; RN*P*TS (SEQ ID NO: 199581); K**GPKD (SEQ ID NO: 199582); NRGQ**A (SEQ ID NO: 199583); A**NEKR (SEQ ID NO: 199584); TG**RSG (SEQ ID NO: 199585); TAN*R*G (SEQ ID NO: 199586); T*TNR*G (SEQ ID NO: 199587); QSR**NP (SEQ ID NO: 199588); T*T*RSG (SEQ ID NO: 199516); K**NPAN (SEQ ID NO: 199589); KM**PKD (SEQ ID NO: 199590); MSRN**A (SEQ ID NO: 199591); NDA**KK (SEQ ID NO: 199592); QR*GP*M (SEQ ID NO: 199593); RS*P*NA (SEQ ID NO: 199594); T*S*RMG (SEQ ID NO: 199532); T*TSR*G (SEQ ID NO: 199511); VAR* H*G (SEQ ID NO: 199595); or polynucleotides encoding the same, where “*” represents any amino acid and square brackets denote a list of amino acids that may occur at a position; and
wherein a viral particle having a capsid comprising the motif has increased binding to a liver cell relative to a control viral particle;
wherein the library comprises an amino acid sequence motif selected from the group consisting of: [GKMFSTYV] [NGKST] ** [ARNGKSV] [AQMFST]G;
[RNQKTY] *[NQGKPST] [ANGPST] *[NQGTV]G; [QLMFPSTYV]K* [GPSTV] * [QGST]G;
[RNQGKMPTY] [ARNQGPST] [ARNQGKPT] ** [AGKMSTV]G;
[RQGMTV] *[RQGKPST] [QGPST] *[ARQMPS] [DGPS];
[RNQGKMPST] * [AQGKMPSTV] [RNQGST] [ARNQGKST] *G;
[NGKTV] ** [RNQGPSTV] [ARQGKMST] [ANQGKFST] [AGPS];
[RNGKMFSTY] [ANQLKMPT] * [ARDQGSTV] [ARQGKTV] * [GS];
[RQGKMFTV] [ARNQGPST] [RGKPST] * [\hat{ }DCEILFPWY] *G;
[RNQGIKMST] [RDLKMFST] [ANDQHMPST] ** [ARNGKMSV] [ANDEKPS];
[RNQGIKFV] * [ARNQPST] * [ARGKMTV] [ARNQGT] [DEGS];
[\hat{ }ARNCEHILP] [ANQGKMPST] [RNQGHKMST] [ARNQGKPTV] ** [ARGS];
[RNQGIMFT] [RKPSTV] [AQGHKPST] *[ARNIKST] *[EGPS];
[NQKMFSTV] [RKS] **[AGST] [ARNDKSTV] [ADEK];
[RNQKMSTY] [RNGKST] * [ARNQMPSTV] * [\hat{ }CEHILKFPWV] [ADPST];
K* [GMP] [QST] * [AQM] [GS]; [RQKTY] * [ARQKPST] [QGST] [ANGST] * [ADPS];
[NQFTY] * [KST] * [ARGS] [AQGKMTV]G; [RT] [RPT] ** [ANST] [NQT] [APS];
[RNKMPY] [ARNGLKS] * [ANQKST] * [AQGSV]G; [RNQSY] [KPST] ** [RNGMS] [QG]G;
[RKT] [PS] * [RPST] [QGS] *A; [RNQEKMS] [RNQT] [RGIPST] [NQGKPT] ** [AEGFP];
[NQT]K* [AGPST] [GMS] * [AS]; [RNK] [RDLS] [RNPT]S** [GP];
[RK] * [NP] [GV] * [GT]A; [RQGMFSY] [KS] [NQGMPS] ** [NQGS] [GS];
[MFPV]K[ANPS]S**[GS]; [MF]K[NT] **[QPT]A;
[GFT] *[GKT] *[RNQK] [KSTV] [GS]; [QGM] [RKS] [NGPS] *[AST] *A;
[RT] * [KP] * [QT] [QG]A; [GM] [HP]K** [AP]A; [TV] * [NK] *S [NS] [AS];
[QGMT] [RK] * [GPTV] [AS] *G; [RV] [KP] *NT*G; M*SKS*A (SEQ ID NO: 199596); A**NEKR (SEQ ID NO: 199584); PR*AT*G (SEQ ID NO: 199546);
NK[AGP] [AQV] **[DGS]; [MS] **K[ST] [GT]G; [RQK] [ARF] **T[AGS]G;
[QF]K**[AN] [QS]S; [NMT]K[ANP] *G*G; R**KEEK (SEQ ID NO: 199597);
[RGV] [KP] *[AS] [ST] *[AS]; NK[NS] *G*A (SEQ ID NO: 200021); QK*GT*G (SEQ ID NO: 199555); TK*NS*G (SEQ ID NO: 199578); TGK**[AT]A (SEQ ID NO: 199598); R**AGVG (SEQ ID NO: 199599); [NT]K* [TV] *KD;
MKS**TG (SEQ ID NO: 199600); G*KSV*G (SEQ ID NO: 199601);
[KM] * [NS] * [GS] [NG]A; TNK**QG (SEQ ID NO: 199602);
K[DKPS] [RNDQ] *[GK] *[AD]; NAR*T*G (SEQ ID NO: 199603); MR*NQ*G (SEQ ID NO: 199604); [FT] *K[AT] *QA; KT**GGA (SEQ ID NO: 199605);
V*NKV*G (SEQ ID NO: 199606); FKG**SA (SEQ ID NO: 199607); FNK**QG (SEQ ID NO: 199608); GPK*T*A (SEQ ID NO: 199609); KQS*S*P (SEQ ID NO: 199610); [NS] *KG* [ST]A; GP*G*KG (SEQ ID NO: 199611); RDKS**A (SEQ ID NO: 199612); R*S*STP (SEQ ID NO: 199506); KT**AGG (SEQ ID NO: 199613); FK**TQG (SEQ ID NO: 199614); FGK**TG (SEQ ID NO: 199615); NKTG**A (SEQ ID NO: 199616); TK**TYG (SEQ ID NO: 199617);
TKPG**G (SEQ ID NO: 199618); KP*T*GG (SEQ ID NO: 199619); TGK**SA (SEQ ID NO: 199620); KPN*S*A (SEQ ID NO: 199621); TGKS**A (SEQ ID NO: 199622); T*RT*SA (SEQ ID NO: 199513); V*KS*TG (SEQ ID NO: 199623); F*K*TSA (SEQ ID NO: 199624); FGK**SG (SEQ ID NO: 199625);
K*GG*AG (SEQ ID NO: 199626); KPS*N*A (SEQ ID NO: 199627); QR*NS*A (SEQ ID NO: 199551); R**QGGG (SEQ ID NO: 199501); RP*N*GG (SEQ ID NO: 199628); TK**TQG (SEQ ID NO: 199629); TKSS**A (SEQ ID NO: 199630); and V*KSQ*G (SEQ ID NO: 199631); or polynucleotides encoding the same, where “*” represents any amino acid, square brackets surrounding a list of amino acids not preceded by the symbol “\hat{ }” denote a list of amino acids that may occur at a position, and square brackets surrounding a list of amino acids preceded by the symbol “\hat{ }” denote a list of amino acids that may not occur at a position, wherein a viral particle having a capsid comprising the motif has increased transduction efficiency for a liver cell relative to a control viral particle;
wherein the library comprises an amino acid sequence motif selected from the group consisting of: [ARDTV] ** [NKP] [REG] [QEGK] [RGK]; NAR**GG (SEQ ID NO: 199632); N[AR] [RG]Q** [AG]; VR**SSA (SEQ ID NO: 199633); TG**RSG (SEQ ID NO: 199585); R*KDS*A (SEQ ID NO: 199634); T*T*RSG (SEQ ID NO: 199516); T*TNR*G (SEQ ID NO: 199587); T*TSR*G (SEQ ID NO: 199511); G**SIRS (SEQ ID NO: 199635); GQSS**R (SEQ ID NO: 199636); M*KP*RD (SEQ ID NO: 199637); NDA**KK (SEQ ID NO: 199592); NK*DR*G (SEQ ID NO: 199638); QRP*A*A (SEQ ID NO: 199639); SP**RGG (SEQ ID NO: 199640); V*N*SSA (SEQ ID NO: 199641); or polynucleotides encoding the same, where “*” represents any amino acid and square brackets denote a list of amino acids that may occur at a position, wherein a viral particle having a capsid comprising the motif has increased binding to a liver cell relative to a control viral particle;
wherein the library comprises an amino acid sequence motif selected from the group consisting of:
[NDGILST]K* [RNGHKPSTV] * [ANDGKFSY] [ADQST];
[RQGKMFPS] [RNGHPST] [RQGKPST] ** [ARQGMPSTV] [AEGS];
[MFTYV]K** [ANST] [AQSTY]G;
[NQGKMFSYV] [RQGLKS] * [ANDQKPS] [ARNQGMSTV] *G;
[RDQEK] [ARGLMST] * [ANGKPT] * [RNKMS] [AELM];
[\hat{ }ARDCEHFPWV]K [ANDQMPST] ** [RQGKMT] [NDEG];
[\hat{ }ACGHILPW] [RNDQGLKS] [\hat{ }DCELKFWYV] [\hat{ }RNCEILMFWY] **[RNDEGKFPS];
[NKMSTW] [ARKSTV] [NQGPS] [AQGKSV] **A;
[RNQGKTYV] * [ANQGMPST] [ANQGKST] * [AQGKMS] [AEGS];
[NQGIKFSTY]K[NDQHPS] *[ARNGKT] *[ADEPS];
[NMFTYV] [KPS] * [AQGKPTV] * [AQGKS] [DEGS];
[\hat{ }ADCEHILPW] [ARNQGKFPT] ** [ARNQKMSTY] [ARNQGMS] [ADEGPS];
[NQIKFY] [ADQLK] [ANGHM] **[ARQK] [NDGK];
[ARNDQGSTV] ** [RNQGKP] [RQEGKMT] [NEGKFS] [ARGK];
[NQGMT]K* [AQGPSTV] [AGMST] * [ANGS]; [DQKS] [QKMST] **[AGST]K[DEK];
[NQWV]K[GST] **SG; K** [ANQS] [ANQT] [ADGK] [ARDEG];
K**[NQSTY]S[AQGKT] [EGPS]; [RNQGT] *[AGST] [QGKT] [RGKT] *G;
[RNQGMST] [RNQGKPSV] [ANGPST] * [ARQGIKST] * [AGS];
[RNQGKTV] [RNQGKPS] * [ANQGSTV] [NGKMST] * [AGPS];
[QGKMT] [GFP]K* [NQEGTY] * [AQGY]; [NT] [AD] *K[RS] * [LP];
[NQMFTV] *K* [AQGMS] [AQGKTV] [EG];
[RGIKF] * [ARNQGT] * [AKMT] [ARGKS] [DEG];
[QMFT] [RNQGMPS] [RKP] [ANGST] **G; [NGMFT] [NGKS]K[DQT] **[GSW];
[GKFTY] *[AKPT] *[RNQST] [AGKST] [GS]; [QFS]K[GT] **[ST]A;
T [RNS] [ARGK] ** [RQGT] [EG]; T*N*SKG (SEQ ID NO: 199642);
[GSTYV] *K[QT] [NGS] * [GS]; [KMFPSY] [LK] *S* [ANQIST]G; K[KS] [DST] *S*G;
[RNQMPTV] *[GKT]S[ARQKS] *[AGS]; G*K*TAA (SEQ ID NO: 199643);
K* [ANS] [GS] [GT] * [ADP]; [RQGKP] * [GKP] [NDPT] [AQMS] *A;
[MFT] *K[APT] *[RQ] [ADS]; M*SKS*A (SEQ ID NO: 199596);
TK[NMP] **[ANQ]A; [NQGS]K**G[QGF]G; [NQF] [QS]K*[AS] *G;
GK[GT] [QT] **G; [RGT] [DGP]K[NQS] **A; TGK**[AST]A (SEQ ID NO: 199644); K[DS] [RN] *G* [AG]; [GMPTV] *K[ASTV] * [QST]G;
[ST]K* [AQ] * [QS]A; K*A[TV] * [RK]D; [MF]KN** [QP]A; Q [RQY] [KP] [ST] **A;
[NT] *KS* [ST] [AP]; TG**MKG (SEQ ID NO: 199645);
[QT] [RG] *S* [KT] [AP]; [FV] *K*TSA (SEQ ID NO: 199646);
QK[GT] [NS] **A; T**KS[GS]G (SEQ ID NO: 200022); [NP]K*S*GG (SEQ ID NO: 199647); NK**G[ST]A (SEQ ID NO: 199648); [QG]KN**SA (SEQ ID NO: 199649); TKS**SN (SEQ ID NO: 199650); MKNT**A (SEQ ID NO: 199651); Q*K[GS] *[NV]G; Q**KSNA (SEQ ID NO: 199652); NN**SKG (SEQ ID NO: 199653); M*N*GNA (SEQ ID NO: 199654); KTQ*S*S (SEQ ID NO: 199655); T**SGTP (SEQ ID NO: 199656); RS*S*GG (SEQ ID NO: 199522);
MG*R*GA (SEQ ID NO: 199514); [QT] *K[NS] [ST] *G; Q*KP*QG (SEQ ID NO: 199657); KA**GDR (SEQ ID NO: 199658); V*N*SSA (SEQ ID NO: 199641);
K*TG*RE (SEQ ID NO: 199659); M*K*TSG (SEQ ID NO: 199660); T*K*SSA (SEQ ID NO: 199661); YQK*S*S (SEQ ID NO: 199662); MK*T*TA (SEQ ID NO: 199663); KPN*S*A (SEQ ID NO: 199621); TK**GMG (SEQ ID NO: 199664); MPK*S*S (SEQ ID NO: 199665); DL*KP*K (SEQ ID NO: 199666);
KGNT**A (SEQ ID NO: 199667); MK*G*TG (SEQ ID NO: 199668); N**STMA (SEQ ID NO: 199669); NK**SDK (SEQ ID NO: 199670); T*K*SNS (SEQ ID NO: 199671); T*KG*VG (SEQ ID NO: 199672); TKQ**SA (SEQ ID NO: 199673); and V*NKV*G (SEQ ID NO: 199606); or polynucleotides encoding the same, where “*” represents any amino acid, square brackets surrounding a list of amino acids not preceded by the symbol “\hat{ }” denote a list of amino acids that may occur at a position, and square brackets surrounding a list of amino acids preceded by the symbol “\hat{ }” denote a list of amino acids that may not occur at a position, wherein a viral particle having a capsid comprising the motif has increased binding to a liver cell relative to a control viral particle;
wherein the library comprises an amino acid sequence motif selected from the group consisting of: KQ**AKD (SEQ ID NO: 199674); NR**GGA (SEQ ID NO: 199675); KKD**RD (SEQ ID NO: 199676); QRNS**A (SEQ ID NO: 199677); NRGQ**A (SEQ ID NO: 199583); KKD**KD (SEQ ID NO: 199678); R*KDS*A (SEQ ID NO: 199634); RN**SGA (SEQ ID NO: 199679); RQ*PT*A (SEQ ID NO: 199515): or polynucleotides encoding the same, where “*” represents any amino acid and square brackets denote a list of amino acids that may occur at a position, wherein a viral particle having a capsid comprising the motif has increased binding to a brain endothelial cell relative to a control viral particle;
wherein the library comprises an amino acid sequence motif selected from the group consisting of: [QKMPT] [NKMPT] [ARGKS] [AQGT] ** [AG]; [TV]KPS**G (SEQ ID NO: 199680); [QT] [KS] *G [NKT] *G; [KMT] [RT] [GS] ** [NMT]G; [RQMT] [RQGK] [QPST] * [RGTV] *G; [GM]K[PS] ** [NT]G; KPT**MA (SEQ ID NO: 199681); [QGKT] * [GPT] [NQGT] [RKT] *G; [KT] [KS]SS** [AG]; [NGS] [AK] * [GKS] [NST] * [AP]; [GK] *T* [RT] [QS]G; [QKT] [GKF] ** [RGT] [GSY]G; [QKS] [RGKT] * [NT] [ANGT] *G; T**NRGG (SEQ ID NO: 199556); [NK] [RY] *T*[TV]G; Q*PTS*A (SEQ ID NO: 199682); [FS] [NG]K*[GS] *G; QR**STA (SEQ ID NO: 199683); [QMS]K*G*[NT]G; K*ST*NG (SEQ ID NO: 199684); QRSS**G (SEQ ID NO: 199685); [KV] [NK] *[GV] *S[AG]; N[RT] [AR] *[NT] *A; KN*GQ*G (SEQ ID NO: 199686); K*S*QSA (SEQ ID NO: 199687); [RN] [ST] [KS] *S* [GP]; QKN*A*A (SEQ ID NO: 199688); RP**MAG (SEQ ID NO: 199689); N**STMA (SEQ ID NO: 199669); N*K*GGG (SEQ ID NO: 199690); KTT**GG (SEQ ID NO: 199691); YKQ**GG (SEQ ID NO: 199692); N*K*SNP (SEQ ID NO: 199693); NKN*G*A (SEQ ID NO: 199694); S**KTGG (SEQ ID NO: 199695); GN*VK*G (SEQ ID NO: 199696); M*SKS*A (SEQ ID NO: 199596); MK**SAG (SEQ ID NO: 199697); N*K*SQG (SEQ ID NO: 199698); NRPS**P (SEQ ID NO: 199699); QKT**GG (SEQ ID NO: 199700); RS*Q*QS (SEQ ID NO: 199701); and T*RT*GG (SEQ ID NO: 199702); or polynucleotides encoding the same, where “*” represents any amino acid and square brackets denote a list of amino acids that may occur at a position, wherein a viral particle having a capsid comprising the motif has increased binding to a brain endothelial cell relative to a control viral particle;
wherein the library comprises an amino acid sequence motif selected from the group consisting of: QSRT**P (SEQ ID NO: 199580); MSRN**A (SEQ ID NO: 199591); KKD**RD (SEQ ID NO: 199676); NRGQ**A (SEQ ID NO: 199583); KKD**KD (SEQ ID NO: 199678); KKD*K*D (SEQ ID NO: 199703); NR**GGA (SEQ ID NO: 199675); and R*KDS*A (SEQ ID NO: 199634); or polynucleotides encoding the same, where “*” represents any amino acid and square brackets denote a list of amino acids that may occur at a position, wherein a viral particle having a capsid comprising the motif has increased binding to a brain endothelial cell relative to a control viral particle;
wherein the library an amino acid sequence motif selected from the group consisting of: NR**GGA (SEQ ID NO: 199675); [STY] [KP] * [QS] [GSV] *G; [GM] **[GT] [GK] [NF]G; QRPN**A (SEQ ID NO: 199704); [QS]K[GT] *S*G; Q*K*AQG (SEQ ID NO: 199705); Q* [GK] [NS] [KS] *G; [QY] [RK]P*[AT] *[AP]; [QM]K*G*TG (SEQ ID NO: 199706); TK*N*QG (SEQ ID NO: 199707); K*ST*SG (SEQ ID NO: 199708); KN*G*SA (SEQ ID NO: 199570); KN*GQ*G (SEQ ID NO: 199686); MK**SQG (SEQ ID NO: 199709); TGT*R*G (SEQ ID NO: 199710); GK*ST*A (SEQ ID NO: 199711); MK*GS*G (SEQ ID NO: 199712); MSK**AG (SEQ ID NO: 199713); K*PTT*G (SEQ ID NO: 199714); KP*T*GG (SEQ ID NO: 199619); MP**SGS (SEQ ID NO: 199715); Q*K*SNG (SEQ ID NO: 199716); QKY*T*G (SEQ ID NO: 199717); R*PS*QG (SEQ ID NO: 199718); T**PTAG (SEQ ID NO: 199719); and TGKS**A (SEQ ID NO: 199622); or polynucleotides encoding the same, where “*” represents any amino acid and square brackets denote a list of amino acids that may occur at a position, wherein a viral particle having a capsid comprising the motif has increased transduction efficiency for a brain endothelial cell relative to a control viral particle;
wherein the library comprises an amino acid sequence motif selected from the group consisting of: N**SRQG (SEQ ID NO: 199528); SP**RGG (SEQ ID NO: 199640); NQ**RSA (SEQ ID NO: 199720); QKY*T*G (SEQ ID NO: 199717); S*QQR*G (SEQ ID NO: 199721); MRG**MG (SEQ ID NO: 199505); NR**GGA (SEQ ID NO: 199675); NRGQ**A (SEQ ID NO: 199583); T**NRGG (SEQ ID NO: 199556); T*S*RMG (SEQ ID NO: 199532); T*TNR*G (SEQ ID NO: 199587); and TAN*R*G (SEQ ID NO: 199586); or polynucleotides encoding the same, where “*” represents any amino acid and square brackets denote a list of amino acids that may occur at a position, wherein a viral particle having a capsid comprising the motif has increased binding to a brain endothelial cell relative to a control viral particle;
wherein the library comprises an amino acid sequence motif selected from the group consisting of: [QKMFT] [RNQP] [RQKPS] [ARDG] **G;
[RQGMSTY] [ARNKP] [RNGKPST] **[RNQGKMST] [AEG];
[QGF] [GPT] [RK] * [NMS] *G; [RK] [NQ] [PT] ** [AT]G;
[RMT] [RQGT] [NPST] * [RQV] *G; [KMST] * [NQGT] [RQGS] [RQT] *G;
[RNY] [RKP]Q** [QGT] [AG]; [NQKT] [RKP] ** [NGS] [NQGTV]A;
[RKMST] [NGKPS] * [ARQS] * [ANQGTY] [AS]; [RKMP] [NKS] * [ANQS] * [AGSV]G;
[RGMFT] [NK] * [AGPV] [NGKTV] *G; [RKMTY] * [RKPST] [AGST] [GST] * [GPS];
SK*GN*A (SEQ ID NO: 199722); KP[AP] **G[AG]; [NST] [RK] *T* [NGV]G;
[RNT] * [GKT] * [ARGK] [QMST]G; [GK] [NP] [KS] * [NS] * [AS]; QK*GT*G (SEQ ID NO: 199555); [RQK] ** [ANT] [RT] [GT]G; [RK] [NF] ** [GTV]SG;
[GK] [KP] *[SV]S* [NP]; TG*NK*A (SEQ ID NO: 199723);
[NT] [RT] [PS] [KS] ** [AP]; QKY*T*G (SEQ ID NO: 199717); RS**TQS (SEQ ID NO: 199724); [RN] *[NT] [RS] *GG; KTQ**AS (SEQ ID NO: 199725);
RS**GGG (SEQ ID NO: 199726); KPP*T*G (SEQ ID NO: 199727);
[KY] * [QP]T* [GT]G; S*TT*NG (SEQ ID NO: 199728); KSPT**A (SEQ ID NO: 199729); SRTT**G (SEQ ID NO: 199730); [GY]K[QT] [QT] **G; Q**KSNA (SEQ ID NO: 199652); K*NST*A (SEQ ID NO: 199731); TRS*T*G (SEQ ID NO: 199732); K*S*SGA (SEQ ID NO: 199733); N**SRQG (SEQ ID NO: 199528); VRP*T*G (SEQ ID NO: 199734); Y*T*SKG (SEQ ID NO: 199735);
TR*VS*G (SEQ ID NO: 199736); TG**RSG (SEQ ID NO: 199585); K*P*SGG (SEQ ID NO: 199737); KTS**GG (SEQ ID NO: 199738); N**GQKG (SEQ ID NO: 199739); N*GNR*A (SEQ ID NO: 199740); QR*NS*A (SEQ ID NO: 199551); QRP*S*A (SEQ ID NO: 199741); R*QN*TG (SEQ ID NO: 199742);
RP*T*AP (SEQ ID NO: 199743); SRTT*NG (SEQ ID NO: 199576); and
TKSS**A (SEQ ID NO: 199630); or polynucleotides encoding the same, where “*” represents any amino acid and square brackets denote a list of amino acids that may occur at a position, wherein a viral particle having a capsid comprising the motif has increased transduction efficiency for a brain endothelial cell relative to a control viral particle;
wherein the library comprises an amino acid sequence motif selected from the group consisting of: [\hat{ }ADCEGHILWY] * [\hat{ }DCEGHILFWY] [ARNGKMPST] [ARNQGISTV] *G;
[\hat{ }ADCEHILMWY] [\hat{ }DCEHILFPWY] [\hat{ }RCEHILMFW] *[\hat{ }NDCEHLFPWY] *G;
[\hat{ }ADCEHILMW] [\hat{ }CEGHIFWYV] [\hat{ }CEHILFPW] [\hat{ }CEHILKMFWY] **G;
[RNDQKMPV] [ARNQMPST] ** [ARNQGKST] [ARNDQGKTV] [ARDIKPS];
[\hat{ }ARDCEHILW] [ARQGKPST] ** [ARNQKMSTV] [ANQGKMTYV]G;
[\hat{ }ACEHILMFSW] [\hat{ }CEHIKFWYV] *[\hat{ }DCQEHLFWY] [\hat{ }DCEHLFTWY] *[AEGLKP];
[RQKMSTV] ** [ARNQKPSTV] [ARNQGMSTV] [ARNQGSTV]G;
[\hat{ }RDCEHLPW] [\hat{ }CEHILMPSWV] [\hat{ }ANCEILMFWV] * [\hat{ }DCQILMFWV] * [NDQEGMPSY];
[RNQGKMS] [RQKST] [\hat{ }RDCEHILFWY] * [ARNMSTV] * [APS];
[\hat{ }ADCEHLFPW] * [ARNQGPST] [RQGKSTY] * [ANGKMSTV]G;
[\hat{ }ADCEHIK] [\hat{ }CQEHILFWY] [ARNQGKMPS] ** [ANQGKMSV]G;
[\hat{ }ADCEHPTWV] [\hat{ }ARCEIFWYV] [\hat{ }CILFTWY] ** [ARQGKPSTV] [ANDQEGKMS];
[RNQGSTV] **[RNGKSTV] [\hat{ }ADCHLMFPWY] [\hat{ }CHILKPWYV] [AGKPSV];
[RNGKFTYV] * [ARNQGPST] * [ARNQKPSTV] [ADQGKMSTV]G;
[ANQMFSTV] *K* [AQGST] [ANQGMST]G;
[\hat{ }ADCEHILW] * [\hat{ }ACEHILFWYV] [ANQGKPSTV] * [\hat{ }DCEHILKFWY] [ANDGPSY];
[\hat{ }ADCEHITW] [\hat{ }DCEGHIMFWY] * [ANQGMPSTV] * [\hat{ }RDCEHLPTWY]G;
[RNQILKFSV] [QGKPST]T** [ARQGKMST] [ADEGS];
[\hat{ }ACHILKW] [\hat{ }CEHILMFPWY] [\hat{ }NDCELFWYV] [\hat{ }RNCEILMFWY] ** [\hat{ }CQHILKMPTY];
[RNQGKMSY] [\hat{ }RDCGHILMWY] ** [ARGKMSTV] [\hat{ }NDCEHLPWYV] [DGPS];
[\hat{ }ARCEHILWY] [ARQGKST] *[\hat{ }CQEHILMFWY] [ARNGPST] *[NDGPS];
TK[ANQMST] ** [QKS] [NDS];
[NQGKMST] * [ARNQGKPS] [ARNQGPTV] [RNQHKMT] * [NGPS];
[NGFST]K** [ANGSTY] [ANGMPT]A; [RQMFS] [RKPT] ** [NQGT] [NQS] [NGS];
[\hat{ }ADCEHPTW] [RNQLKMPST] * [\hat{ }CEILKFWY] * [\hat{ }CEHILPSWY] [ANDQEKPS];
[QT] * [QT]R*QA; [RNGT] * [RNGKST] [ARNQGT] [RNQGKMT] * [AG];
[DQEMPST] [ARGK] *[ARNQGKS] *[ADQGKSY] [ADLMPT];
[NGIKFTV] * [ARNGKTY] * [NQKMSTV] [ARNIKSV] [ADEPS];
[RNQKMFST] [RDQKS] [RNQPST] *[AGS] *[AS];
[RQGKS] [QKST] [RNQST] ** [NT] [GPS];
K** [ANGSTY] [QGMST] [ANGKMT] [ADEGP];
[RKM] [RNQGPS] * [ANQST] [NQST] * [GS]; [RQGIKT] [PS] [RKPS] * [ANGMT] *G;
[RQKM] * [NPS] * [AQGT] [ANQGST] [APS];
[ADK] ** [NGPST] [AEGMST] [ANQGKT] [ARS]; [QKMPTV] * [NKPS] [QGKPT]S*A;
[RNQGST] * [RNQGKSV] * [RNQGK] [AGKTV]G; [NQGKT] [RNK] * [ANGST] [ANGMT] *A;
[RNQGKMY] [RNQGS] * [NQGKS] * [AQGST] [AG]; [NK] **G [QT] [KS]G;
[RKMTY] [RP] [RNGKPS] * [ANQST] * [GPST];
[QKMFPYV] [RNGKPST] [RNGPST] [ARDQGKST] ** [GPS];
[RNQGKWV] [ANQKPSTV] [ARNQGKST] [AQGKST] ** [AP]; TK* [GSTV] * [QGV]G;
T[RGS] [RGKT] **[RNST] [EGP]; [RGV]P[RNK] *[QST] *A;
[RKMV] * [ANPST]S [GKST] * [DGPS];
[NQMSTV] [RNQGHK] ** [ARGIKMST] [ARQKSV] [ADE]; [NQK] * [NKT] *S [NV]G;
[RNQFT] [RQK] [QGKST]N** [APS]; [NT] [GK] [NKMS] ** [ANQT]A;
[RQK] * [ANQGPST] [NGS] [ANGKPT] * [AGP]; [TYV] * [RK] [QGT]S* [GPS];
[NK] [RNP] [PT] [NS] ** [GP]; K* [NG] [AY] *KE; [NQ]R[NQGT] ** [NQT]A;
MKN* [GS] *G (SEQ ID NO: 199744); [QGKM] * [GS] * [KS] [NG] [AG];
[RNGMTYV] [RGKS] * [AQKPS] [NGS] *A; [QMTYV] [GK] * [NGKS] *TG;
[QKM] [RKMS] [NDP] [GSTV] **A; [NQSY]K* [QS] [ANQSV] *G; [QMT]RP** [AMS]A;
K*T [GI] * [RK] [DE]; [RQP] * [KPT] [DQGS] [AS] *A; TKP** [AQ]A (SEQ ID NO: 199745); T [RK] ** [NGL] [NMS] [AG]; K**Q[AS] [GK] [DS]; RQ* [NP]T*A (SEQ ID NO: 199746); [KS] [GY] *T* [TV]G; K* [QT] [GT] [GS] * [AS]; RT*T*SA (SEQ ID NO: 199747); K*A[NV] *[RS] [DG]; [NK] **Q[AR]S[AS];
[QG] [RP] [KP]N**A; [RT] [GS] ** [RN] [ST]G; MRPN**G (SEQ ID NO: 199748); G*KSV*G (SEQ ID NO: 199601); NK*T*SA (SEQ ID NO: 199749);
[NF] * [NK] * [NG]T [AS]; [GK] [KP] [NQT] * [GS] *A; MRT**SP (SEQ ID NO: 199750); [NM]K*QT* [GS]; GN**KNG (SEQ ID NO: 199751);
[NT] [GT] [RK] *N*A; K*ASS*A (SEQ ID NO: 199571); RT*GT*G (SEQ ID NO: 199752); [RQS] [AR] [PT] ** [NV] [GS]; RPT*S*[GS](SEQ ID NO: 199753);
K**GKSA (SEQ ID NO: 199754); [GV]KP**NA (SEQ ID NO: 199755);
TK*T* [KS] [AD]; TGK*G*A (SEQ ID NO: 199756); KP*GT*G (SEQ ID NO: 199757); RP*QQ*A (SEQ ID NO: 199758); KPNN**P (SEQ ID NO: 199759);
TGK**SA (SEQ ID NO: 199620); G**QKSG (SEQ ID NO: 199760); TG**KTA (SEQ ID NO: 199761); TN**RQG (SEQ ID NO: 199762); TG*K*SG (SEQ ID NO: 199763); I*AR*KE (SEQ ID NO: 199764); N*K*NNG (SEQ ID NO: 199765); R*S*STP (SEQ ID NO: 199506); KGNN**G (SEQ ID NO: 199567);
TK*N*QG (SEQ ID NO: 199707); G**QKGG (SEQ ID NO: 199766); K*AT*KD (SEQ ID NO: 199767); K*NQS*G (SEQ ID NO: 199768); KPS*N*A (SEQ ID NO: 199627); R*S*NVA (SEQ ID NO: 199769); RP*GT*A (SEQ ID NO: 199770); SRTT*NG (SEQ ID NO: 199576); TKQ**SA (SEQ ID NO: 199673); and TS**RTP (SEQ ID NO: 199771); or polynucleotides encoding the same, where “*” represents any amino acid, square brackets surrounding a list of amino acids not preceded by the symbol “\hat{ }” denote a list of amino acids that may occur at a position, and square brackets surrounding a list of amino acids preceded by the symbol “\hat{ }” denote a list of amino acids that may not occur at a position, wherein a viral particle having a capsid comprising the motif has increased biodistribution to liver relative to a control viral particle;
wherein the library comprises an amino acid sequence motif selected from the group consisting of:
RQSA**T (SEQ ID NO: 199772); RAHS**A (SEQ ID NO: 199773); DG*K*KL (SEQ ID NO: 199774); NR*A*DK (SEQ ID NO: 199775); G*N*ANR (SEQ ID NO: 199776); RQ**NST (SEQ ID NO: 199777); [RKT] [STV] [RQE] **R[ADE];
T*GG*RN (SEQ ID NO: 199778); Q*G*VRG (SEQ ID NO: 199779); MDK**QR (SEQ ID NO: 199780); NGG**GR (SEQ ID NO: 199781); V*RQ*AG (SEQ ID NO: 199782); L*REG*R (SEQ ID NO: 199783); QAG**RG (SEQ ID NO: 199784); QR*VV*A (SEQ ID NO: 199785); RE**ARG (SEQ ID NO: 199786);
RQMA**A (SEQ ID NO: 199787); S**REIR (SEQ ID NO: 199788); TK*R*DT (SEQ ID NO: 199789); V*R*SAG (SEQ ID NO: 199790); V*RS*GG (SEQ ID NO: 199791); and VQR* S*G (SEQ ID NO: 199792); or polynucleotides encoding the same, where “*” represents any amino acid and square brackets denote a list of amino acids that may occur at a position, wherein a viral particle having a capsid comprising the motif has increased transduction efficiency for a liver cell relative to a control viral particle;
wherein the library comprises an amino acid sequence motif selected from the group consisting of:
[RNGPS] * [GKSTY] [RNGKST] * [ANGMSTV]A;
[RNGKST] [NQGKP] * [NQGKPS] [NQKMSTV] *A; K** [AS] [AS] [AK] [EPS];
[RNQGKPSTV] [ARNGKPSTV] [ANDQGPSTY] [NQGKPST] ** [AMPSV];
[RQGKPST] [RQLKPT] [NDQST] * [ANQGSV] * [AGSV];
[RGKMST] [NKPST] ** [AQGKSTV] [ANDQG] [RDGPS];
[RKMPST] [ARGKPST] [ANQPSTYV] ** [ARNGKMST] [ADMPS];
[NDGPT]K* [NQGKPT] * [NQG]A; [KP] [RNGPT] * [QGST] [ANQT] * [GPS];
[QGPS] [QK] ** [ANST] [GMST]A; [NGPT] [NQGK] [NKV] ** [ANGST]A;
[NPST] * [NK] [AQKT] * [QS] [PS]; [RNGK] * [NQST] [ANQGKST] [ARNGPT] *A;
[RNQPST] [QGK] *S* [ANQGKS] [GP]; K[NPT] * [ANGS] * [QTV]A;
[RQPT] [NDGKT] [KS] [AGST] **A; [RNQK] [PST] [NQKT] ** [NQT] [APS];
[KP] [RQP] *T [GT] *A; [RKP] [QS] [NGKPS] * [GT] *A; K* [NS] [AQGT] * [QGS]A;
[RN] [ANSV] [NGK] ** [QMV]G; [NK] [KST] ** [NGP] [AQGT]A;
[NGK] * [QKT] * [NQGP] [QGMTV] [AGS]; [QPST]K* [NGPS] [AMST] * [AG];
[KT] [RT] *SG* [PV]; KQ[GT] [QT] **A; [NKMT] * [RNQPS] [NGK] [ARGT] * [GMPV];
K*N* [NG] [NGV]A; R[PS] * [PS]G*A; [GST] [QGS]K*N*A;
[KS] * [NT] * [GS] [IS] [AP]; NKPA**S (SEQ ID NO: 199793);
[GKPS] [RKST] * [AQS] * [NS] [AGS]; [NK] ** [NPST] [GPT] [ANM]A;
[NQP] *K[PST] [ST] *A; [PT] *KG[AG] *A; SK[MT] **Q[AP]; NTR**SA (SEQ ID NO: 199503); PKS**SG (SEQ ID NO: 199794); TK*PS*S (SEQ ID NO: 199795); [NG] *K[ST] [QT] *[GP]; FGKQ**S (SEQ ID NO: 199796);
[NQ] [RKPSTV] [ARNKT] * [NGT] * [AGM]; [RK] * [NT] [NS] * [NS]P; K*N[QT]S*A (SEQ ID NO: 199797); [KMS] ** [GS] [AN] [NQT] [AG]; [NQ]K* [AT] [AG] *A;
KQ**AKD (SEQ ID NO: 199674); K*[PT]S*[AQG]A; [NMS] *K[PS] *[NG]G;
NAKS**G (SEQ ID NO: 199798); KQ**TQA (SEQ ID NO: 199799);
[NK] [ST] [NK] *[AT] *P; K*TQ*GA (SEQ ID NO: 199800); T**QSGF (SEQ ID NO: 199801); KTQ*T*G (SEQ ID NO: 199802); QK**GAP (SEQ ID NO: 199803); SK**NAA (SEQ ID NO: 199804); K*AT*KD (SEQ ID NO: 199767);
R*N*ANP (SEQ ID NO: 199805); GKQ*S*P (SEQ ID NO: 199806); PQKS**A (SEQ ID NO: 199807); N[GK] *[KT] *SA; SQ**TNP (SEQ ID NO: 199808);
PR*Q*SP (SEQ ID NO: 199809); NG*R*TP (SEQ ID NO: 199810); TKM**QA (SEQ ID NO: 199811); NK*TN*S (SEQ ID NO: 199812); N*K*NNG (SEQ ID NO: 199765); PK*GN*A (SEQ ID NO: 199813); FQKA**G (SEQ ID NO: 199814); G*KT*QA (SEQ ID NO: 199815); K**TSQS (SEQ ID NO: 199816);
K*ASS*A (SEQ ID NO: 199571); MNQ*R*P (SEQ ID NO: 199817); RQ*A*TS (SEQ ID NO: 199818); SK**NQP (SEQ ID NO: 199819); and TKN**QS (SEQ ID NO: 199820); or polynucleotides encoding the same, where “*” represents any amino acid and square brackets denote a list of amino acids that may occur at a position, wherein a viral particle having a capsid comprising the motif has increased biodistribution to heart relative to a control viral particle;
wherein the library comprises an amino acid sequence motif selected from the group consisting of:
[GFTW] [AKM] [NQKPT] [QGKP] ** [AG]; [MT] [RGP] [RQP] [KS] **G;
[QMT] [RGP] [RQGP] * [QKMT] *G; [QG] * [AGP] [GT]K*G; [RF] [KP] ** [AQ] [NQ]G;
KT [AS] ** [GK] [AEP]; G**TKMG (SEQ ID NO: 199821);
[GK] * [PT] [QG] * [QS]G; [GT] [NG] ** [RK]SG; [QT] * [RG]S [KT] *G;
[QK] * [GP] * [KST] [GSV]G; [RM]SS [KT] ** [AS]; [RM] [NQG]S* [GKV] *G;
[MT] *STK*G (SEQ ID NO: 200023); K[GT]S[QT] **G; K*P[NS] *GA (SEQ ID NO: 199822); K[MST] [PS] [GT] **A; K[DT] [AR]S** [AG]; [IY]KP** [KS] [ND];
R[NQ]S [AS] **G; M*SKS*A (SEQ ID NO: 199596); K*S [AN] * [AGS] [AS];
[QGF] [NKS] * [GPV] [NGK] *G; [RK] [DST] [RS] * [GS] * [AGP];
[KT] [GY] *[KT] *TG; R*SN*TG (SEQ ID NO: 199552); AKY*K*E (SEQ ID NO: 199823); [KT] [QG] [AT] **[ST]G; MR*NQ*G (SEQ ID NO: 199604); K*PT*TG (SEQ ID NO: 199824); NRPS**P (SEQ ID NO: 199699); KRPD**G (SEQ ID NO: 199825); R*SSV*G (SEQ ID NO: 199826); KSSS**G (SEQ ID NO: 199827); TK*S*YA (SEQ ID NO: 199828); FK*S*QG (SEQ ID NO: 199829);
K**NTTG (SEQ ID NO: 199830); FK*P*QG (SEQ ID NO: 199831); FKM**QG (SEQ ID NO: 199832); GK*VS*N (SEQ ID NO: 199833); K*SSV*G (SEQ ID NO: 199834); K*ST*NG (SEQ ID NO: 199684); KF**TSG (SEQ ID NO: 199835); KGSS**P (SEQ ID NO: 199836); N*K*GMG (SEQ ID NO: 199837);
and YKP*T*P (SEQ ID NO: 199838); or polynucleotides encoding the same, where “*” represents any amino acid and square brackets denote a list of amino acids that may occur at a position, wherein a viral particle having a capsid comprising the motif has increased biodistribution to spleen relative to a control viral particle;
wherein the library comprises an amino acid sequence motif selected from the group consisting of:
[NEGKMFTWY] [ARDKPST] [ARNQGST] [ANQKPST] ** [AGFS];
[ARQLKM] [ANGHIT] * [RQGHP] * [AGKST] [ARDKS];
[GKFTY] [GKT] **[ARGV] [AQFS]G;
[NGKT] **[NGKMPT] [LKPST] [NGHKMFT] [RDGSY];
[RNQKMT] [RNGIL]P [NDHKST] ** [ANGKPV];
[DEGKMFT] [GKMFP] [ARHMF] ** [NQGKST] [DGKP];
[RQGFYV] * [RGLKPS] [RNGS] * [ANDQPT] [RGKPY];
[RQKM] [RGT] * [NGP] [AQGPV] * [GMY];
[RQGIKMTYV] [RNDQGHPST] [\hat{ }DCEILMFWYV] * [\hat{ }DCEHLKFWY] * [ANGKFPS];
[RGKMSTV] *[ARNHMST] [NQKST] [ARGKTV] *[ARG]; K*PG*QG (SEQ ID NO: 199839); [QGFT] [ANK] * [APTV] [ARNGKP] * [GV]; [TY]KP*T* [PY];
[QGTY] [RK]P** [AGMS] [ANG]; [GLMTY]K* [HPS] * [NFSY] [AQG];
[NKT] [RGY] * [KT] * [TV]G; [RM] [HP] [KP] ** [HP] [AM];
[RKMTY] * [GPT] * [ARNST] [QGKS]G; Q* [RP] [QG] [KT] * [GP]; S*NAH*R (SEQ ID NO: 199840); R**VRDV (SEQ ID NO: 199841); KM**PKD (SEQ ID NO: 199590); RP**[QG] [NG]G; SP**RGG (SEQ ID NO: 199640);
[MST] [HKY] [GP] [AQ] ** [KY]; [QFV] [QP] [RNG]H** [KV];
[RY]P*[KS]S*[AGS]; FK*[PS] *QG (SEQ ID NO: 199842); MGS*K*G (SEQ ID NO: 199843); [NK] * [RS] * [TV] [TY] [GM]; G*TQ*SG (SEQ ID NO: 199844);
TR*VS*G (SEQ ID NO: 199736); YKPP**G (SEQ ID NO: 199845); QR*S*TG (SEQ ID NO: 199525); SK**YGA (SEQ ID NO: 199846); TK*VS*N (SEQ ID NO: 199847); QK*PS*A (SEQ ID NO: 199848); GK*ST*A (SEQ ID NO: 199711); QKS*S*G (SEQ ID NO: 199849); K*TI*KD (SEQ ID NO: 199850);
GK*PS*A (SEQ ID NO: 199851); AKY*K*E (SEQ ID NO: 199823); FK*T*MS (SEQ ID NO: 199852); GK*VS*N (SEQ ID NO: 199833); K*MQ*QG (SEQ ID NO: 199853); Q*KPH*N (SEQ ID NO: 199854); QKT**GG (SEQ ID NO: 199700); QPRG**G (SEQ ID NO: 199855); R**SVAG (SEQ ID NO: 199856);
R*Q*APF (SEQ ID NO: 199857); and SK**NQP (SEQ ID NO: 199819); or polynucleotides encoding the same, where “*” represents any amino acid, square brackets surrounding a list of amino acids not preceded by the symbol “\hat{ }” denote a list of amino acids that may occur at a position, and square brackets surrounding a list of amino acids preceded by the symbol “\hat{ }” denote a list of amino acids that may not occur at a position, wherein a viral particle having a capsid comprising the motif has increased biodistribution to kidney relative to a control viral particle;
wherein with the library comprises an amino acid sequence motif selected from the group consisting of: YMNN**K (SEQ ID NO: 199858); I*RS*TG (SEQ ID NO: 199859); NGG**GR (SEQ ID NO: 199781); and RQMA**A (SEQ ID NO: 199787): or polynucleotides encoding the same, where “*” represents any amino acid and square brackets denote a list of amino acids that may occur at a position, wherein a viral particle having a capsid comprising the motif is capable of transducing kidney cells in vivo.
wherein the library comprises an amino acid sequence motif selected from the group consisting of:
GK** [ST] [NMT] [AP]; [NK] * [NS] [KT] [NS] *A; [NGP] [QKS] [KT] * [NGS] * [AG];
K*N[AN] * [NQG] [AP]; [NQKPS] [NQKT] [AQGKST] [AQGST] ** [AGS];
[KP] [KPST] ** [ANK] [ANDG] [ADPS]; [NKV] [NG] * [GK] * [KST] [AG];
[GP] [RNK] [NKPT] ** [GS] [AM]; K*TS* [AS] [AV];
[NGPST] [GK] *[NQGKS] [NKT] *A; PR*Q*SP (SEQ ID NO: 199809);
[NP] [RKS] [NK] * [GT] * [APV]; [NG] [QK] [KT]N**A;
[RPST] [KT] [NMS] ** [AQT] [PS]; [NT] *KS* [ST] [AP];
[KM] [NPT] **G[QG] [ARS]; K*N* [GS] [NI]A;
[RNPS] [ARNK] [ANG] [QGKS] ** [AGP]; K[LKPT] [ND] * [AGS] *A;
KT [NQ] ** [AQGMS] [AS]; K[NQT] * [GPS] [AQGV] * [APV]; [PS] *K[AQ] *QS;
[NP] *KS[ST] *A; KQ[GT] *[TV] *A; K*TS*QA (SEQ ID NO: 199860);
[KT] * [NKP] [NG] [AG] * [AMP]; P*KG*GV (SEQ ID NO: 199861);
[NP] [RG] * [QS] [QK] *P; KP [QS] [NT] ** [AM]; K**PGMA (SEQ ID NO: 199862); N*K*NNG (SEQ ID NO: 199765); RPNN**P (SEQ ID NO: 199863);
K*T*QQA (SEQ ID NO: 199864); [PS]K[PT] **[QG] [AS]; PK*PS*A (SEQ ID NO: 199865); KTV**KD (SEQ ID NO: 199866); KA*TN*A (SEQ ID NO: 199867); KN*A*QA (SEQ ID NO: 199868); K*QTG*A (SEQ ID NO: 199869);
KTNG**P (SEQ ID NO: 199870); K*T*NTS (SEQ ID NO: 199871); KTN*A*P (SEQ ID NO: 199872); KST**TA (SEQ ID NO: 199873); DK*K*GA (SEQ ID NO: 199874); KPNN**P (SEQ ID NO: 199759); KTQ*S*S (SEQ ID NO: 199655); N*QKT*G (SEQ ID NO: 199875); K**TGNA (SEQ ID NO: 199876);
K*N*NVA (SEQ ID NO: 199877); KP*TN*S (SEQ ID NO: 199878); KPA**GA (SEQ ID NO: 199879); P*KG*SA (SEQ ID NO: 199880); QK**GAP (SEQ ID NO: 199803); SK*S*QP (SEQ ID NO: 199881); or polynucleotides encoding the same, where “*” represents any amino acid and square brackets denote a list of amino acids that may occur at a position, wherein a viral particle having a capsid comprising the motif has increased biodistribution to serum relative to a control viral particle;
wherein the library comprises an amino acid sequence motif selected from the group consisting of:
[RQKP] [RQPT] ** [ANGT] [ANGS] [AS];
[RNQKP] [RGST] [RNQKPV] ** [ARNGKMST] [RDGMPS]; K* [NQT] * [QGS] [NQIM]A;
[EGKMPST] [RGKPST] [ANQPSTYV] **L[ANGST] [AKPS];
[RNQGKPW] [ARNQGPST] [ANDQGKS] [NQGKT] ** [AKMPS];
[NGT] * [KS] [NGKS] [ANGMT] *A;
[RNGHKMP] * [NQGPSTYV] [ARNQGK] * [ANQGKS] [ARDG];
[NKT] *[NQPS] [NGK] [ARGT] *L[GMP]; [NGPS] *[NQK] [AQKT] *[NQST] [GPS];
[NQGMPSV] [KS] [ANKSTY] [ANQGT] ** [AP];
[RGKMPSV] [QKPST] [NDQKST] * [ANQGSV] *A; [KMPT] [RPT] [NK] * [GS] * [GPSV];
[QGPSTV]K* [NQGPSV] [ANMST] * [AGPS]; [QK] * [NG] [NS] * [NGV] [GP];
[RGTV] ** [NQS] [QGTY] [NMT] [AKP]; [NPS] *K[GS] * [ST]A;
K** [QG]A [QS] [AS]; [NQPT] [KV] [NQKT] * [AGS] * [GMS];
[RNGKT] [QGPST] * [NQGKS] [ANQGKTV] * [AGV]; [QGT] [GT]K** [AT]A;
[NDKS] * [RKT] * [NGMS] [NPST] [KPS]; [NK] [AGT] * [GKS] [AKS] *P;
[GK] * [QHK] * [NP] [LTV] [AQ]; [QKP] * [ANK] [QST]S*A;
[NV] [RS] [AKP] * [NT] *A; [NST]K[MPT] ** [QG] [AP];
[NQKST] [RNK] [ANDQST]S**A; T**SSNR (SEQ ID NO: 199882);
[KP] [ARQ] *T [NGT] *A; [NQG] [QK] * [KST] [ANGS] * [AM]; [SV] [RK]TS** [GP];
K**GTNA (SEQ ID NO: 199883); NK[NQ] *[AG] *A; K*[PT]S*[QGS] [AV];
[KTW] [NKT] [QGS] **Q[ANKS]; [RNKP] [RNGT] * [QGKPS] * [GST] [APS]; PKS**SG (SEQ ID NO: 199794); RDKS**A (SEQ ID NO: 199612);
[RY] * [ST] [KS] * [ST] [AP]; [GF] *K[QT]T* [PS]; [RN] * [AP] [GK]S* [AG];
RNGS**G (SEQ ID NO: 199884); KT [NQG] * [AS] * [GPS]; K*NSS* [PT](SEQ ID NO: 199885); Q*GSK*G (SEQ ID NO: 199886); KVS*T*A (SEQ ID NO: 199887); NSK*T*P (SEQ ID NO: 199888); [NGP]K* [NGPST] * [ANQG]A;
K[NT] * [AG] *QA; [GKP] [QKT] ** [ANST] [NGMT] [AP]; QK**GAP (SEQ ID NO: 199803); FQK*A*G (SEQ ID NO: 199889); K*QTG*A (SEQ ID NO: 199869);
[KS] [QK] **[QT]Q [AP]; KQTQ**A (SEQ ID NO: 199890);
[GP] *K[GT] *[QG] [AV]; [SV] *[RK] *SAG; MN**GQR (SEQ ID NO: 199891);
[NS]K*A*S[AG]; K**TGNA (SEQ ID NO: 199876); N*K*GQG (SEQ ID NO: 199892); TK*V*QG (SEQ ID NO: 199893); QK*TS*P (SEQ ID NO: 199894);
QK*S*[QS] [PS]; NKV**SA (SEQ ID NO: 199895); K*SGT*A (SEQ ID NO: 199896); PK*S*AG (SEQ ID NO: 199897); G*Q*TQG (SEQ ID NO: 199898);
K**TSQS (SEQ ID NO: 199816); K*TST*A (SEQ ID NO: 199899); KNGS**G (SEQ ID NO: 199900); KQG*T*A (SEQ ID NO: 199901); NVK**QG (SEQ ID NO: 199902); PR*QQ*P (SEQ ID NO: 199903); SN**KSA (SEQ ID NO: 199904); and T*KS* T P (SEQ ID NO: 199905); or polynucleotides encoding the same, where “*” represents any amino acid and square brackets denote a list of amino acids that may occur at a position, wherein a viral particle having a capsid comprising the motif has increased biodistribution to brain relative to a control viral particle.
wherein the library comprises an amino acid sequence motif selected from the group consisting of:
[NPT]K[PY] [GP] **A; KT**PQA (SEQ ID NO: 199906); KT**AKE (SEQ ID NO: 199907); [KPTY] [RQKT] [APSY] ** [AGKS] [ANE];
[RQK] [QPST] [KS] [MST] **G; K* [AGS] [NS] [AST] * [AP];
[RK] [GST] [AS] [GST] ** [APS]; Q*GSK*G (SEQ ID NO: 199886);
[RKMT] [RQGKS] [PS] * [QKSTV] *G; [RKY] [QKT] [PST] * [STV] * [AP];
[NK] [RMS]P[GST] **[AP]; [MT]PK*[AT] *G; K*TTG*G (SEQ ID NO: 199908);
[TV]KP[GS] **G; PK**NGA (SEQ ID NO: 199909); PK*PS*A (SEQ ID NO: 199865); TPR*G*G (SEQ ID NO: 199910); KTQ**QA (SEQ ID NO: 199911);
QPK*G*G (SEQ ID NO: 199912); RNS**NG (SEQ ID NO: 199913); K**NTTG (SEQ ID NO: 199830); K*ST*[NS]G (SEQ ID NO: 199914); YKPP**G (SEQ ID NO: 199845); K*SSV*G (SEQ ID NO: 199834);
[RNQ] *[GKS] *[GK] [MTV]G; KQ*SV*A (SEQ ID NO: 199915); PR*Q*SP (SEQ ID NO: 199809); R*SN* [NT] [AG]; K*PS*QA (SEQ ID NO: 199916);
FK*TA*G (SEQ ID NO: 199917); GK*PS*A (SEQ ID NO: 199851); K*GS*MS (SEQ ID NO: 199918); K*SN*GS (SEQ ID NO: 199919); FK**AQG (SEQ ID NO: 199920); GQ*RV*G (SEQ ID NO: 199510); K*ASG*A (SEQ ID NO: 199921); K*SN*AA (SEQ ID NO: 199922); KY*T*TG (SEQ ID NO: 199923);
P*R*NGA (SEQ ID NO: 199924); QPR*M*G (SEQ ID NO: 199925); RPQ**TG (SEQ ID NO: 199926); T**VNRG (SEQ ID NO: 199927); and TPRS**G (SEQ ID NO: 199928); or polynucleotides encoding the same, where “*” represents any amino acid and square brackets denote a list of amino acids that may occur at a position, wherein a viral particle having a capsid comprising the motif has increased biodistribution to lung relative to a control viral particle;
wherein the library comprises an amino acid sequence motif selected from the group consisting of:
[RNGKS] [KPTV] [NQGS] * [ANQST] *A; K** [NST] [QS] [AQK] [DS];
[NGMPSTW] [RNQGK] [QGKMSTV] ** [AQKST] [ARNDGKP];
[RGKP] [QKPT] ** [NQST] [NQGMT]A; [NMPS] * [NQKS] [AQGHK] * [QGS] [RIPSV];
[RNLPS] [RGHKS] * [AQGKPT] * [ANGS] [ARGP];
[RQGMS] [NDQK] **[NGKS] [NQGS] [ARQKPT];
[RNQGKPSW] [ARNGKPT] [ANQGST] [ANQGKST] ** [AGKMPS];
K[NQT] * [AGS] *Q[AS]; [RKT] [KT] [NQV] ** [ARQKT] [DPS];
[RNGKMPS] [RQST] [NGHKT] * [NQGTV] * [AKYV]; [GT] ** [QS] [SY] [NM] [RK];
[KFSY] * [ANHKP] [NQS] [AGST] * [RMST]; [NKP] [ARGK] [GHPS] ** [AG] [RMST];
[GP]K* [NS] * [AQ] [AG]; [RKP] ** [QT] [QGS] [NG]A;
[QGKP] * [NKS] [KPST] [AS] *A; [GK] * [NQHT] * [NGPV] [QLMTV] [AQS];
[GK] * [NKPS] [ANGTV] * [AQT] [AM]; K*TS* [AQ]A (SEQ ID NO: 199929);
N* [ST] [GK] [RN] *A; [GK]Q [QGT] [QGT] ** [AM]; K*NN*NP (SEQ ID NO: 199930); K[PT] [QS] ** [AQS]A; [QKP] [NST] [KT] ** [GT]A;
[KV] [QT] [QK] *S* [AS]; [RNQGKS] [AQGKPT] * [NGKST] [ANGKTV] * [AMSV];
KN*G*SA (SEQ ID NO: 199570); T**GPGR (SEQ ID NO: 199931); K*TG*KD (SEQ ID NO: 199932); K**G[AT] [NQ]A; [QT] [NQK]K[DT] **A;
[NK]K[ND] *G*A; N*QKT*G (SEQ ID NO: 199875); K[GT]N**[GT]A; GKN**SA (SEQ ID NO: 199933); K[ST] ** [AK] [ND] [DP]; PK* [NGP] [ANS] *A; TK*V*QG (SEQ ID NO: 199893); K*SGT*A (SEQ ID NO: 199896); N*K* [NS]N[GP];
[NG]KT*G* [AM]; [MP] [GK]T*S* [RG]; [NP] *KS* [GS]A; KP** [AG] [AG]S;
SK*S*QP (SEQ ID NO: 199881); S*T*GSP (SEQ ID NO: 199934); HQKP**L (SEQ ID NO: 199935); N*N*GTA (SEQ ID NO: 199936); SRTP**A (SEQ ID NO: 199937); PR*QQ*P (SEQ ID NO: 199903); P*KG*SA (SEQ ID NO: 199880); VK*NN*P (SEQ ID NO: 199938); K*N*SIA (SEQ ID NO: 199939);
KPT*P*S (SEQ ID NO: 199940); T*KS*TP (SEQ ID NO: 199905); N*KST*A (SEQ ID NO: 199941); R*TS*SP (SEQ ID NO: 199519); K*N*GNA (SEQ ID NO: 199942); KTN**GS (SEQ ID NO: 199943); N**GRTA (SEQ ID NO: 199944); NKPP**A (SEQ ID NO: 199945); SK**TNS (SEQ ID NO: 199946);
SK*V*TS (SEQ ID NO: 199947); and TK*QN*A (SEQ ID NO: 199948);
TKQ*S*S (SEQ ID NO: 199949); or polynucleotides encoding the same, where “*” represents any amino acid and square brackets denote a list of amino acids that may occur at a position, wherein a viral particle having a capsid comprising the motif has increased biodistribution to spinal cord relative to a control viral particle;
wherein the library comprises an amino acid sequence motif selected from the group consisting of: GAG**MR (SEQ ID NO: 199950); LQSN**R (SEQ ID NO: 199951); NN*TT*R (SEQ ID NO: 199952); NQ*Q*TK (SEQ ID NO: 199953); and RVG**DK (SEQ ID NO: 199954); Y*AG*SR (SEQ ID NO: 199955); or polynucleotides encoding the same, where “*” represents any amino acid and square brackets denote a list of amino acids that may occur at a position, wherein a viral particle having a capsid comprising the motif has increased biodistribution to kidney relative to a control viral particle;
wherein the library comprises an amino acid sequence motif selected from the group consisting of:
WNG**QK (SEQ ID NO: 199956); [DY] [KT] [FS] ** [QK] [GK];
[QSWY] [NIKM] [NGP] [NQH] ** [KY]; IKH*R*E (SEQ ID NO: 199957);
[IT] [LK] * [DH] * [KV] [RN]; [KF] * [KS] * [PT] [NY] [LM]; YKD**PR (SEQ ID NO: 199958); HN*N*GK (SEQ ID NO: 199959); KFK*E*Y (SEQ ID NO: 199960); NGQ**AR (SEQ ID NO: 199961); QI*H*AK (SEQ ID NO: 199962);
R**NGIQ (SEQ ID NO: 199963); REKP**M (SEQ ID NO: 199964); Y*H*MKG (SEQ ID NO: 199965); or polynucleotides encoding the same, where “*” represents any amino acid and square brackets denote a list of amino acids that may occur at a position, wherein a viral particle having a capsid comprising the motif has increased liver transduction efficiencies relative to a control viral particle; or
wherein the library comprises an amino acid sequence motif selected from the group consisting of:
[\hat{ }ADCEHILKW] [ARNQGKST] [ARNQGKPTV] [ARNQKPSTV] **[NGPS];
[RNQKSV] * [ANQGPST] * [ARNQKT] [ANQGKT] [EGPS];
[\hat{ }ANDCEHILFW] * [ANQGKPST] [ARDQGKPST] [ARNQGKSV] * [ADGS];
[NQGFST] * [NGKT] * [ARNQKST] [ANQGKSTV] [GP];
[NQGKMSTY] [RQGKPST] * [ARDQGKSTV] [\hat{ }ADCEHILFWY] *G;
[RNGKMPT] ** [AQGKST] [ARNQGSV] [AQGKMST] [EGPS];
[NQGKFST] [ARQGKPST] [ADQGKPST] *[ARNQIKST] *G;
[RNQGHKPTV] * [ARNQGMPST] [ARNQKST] * [ANQGKMS] [DEGPSV];
[\hat{ }ARDCEHILKW]K* [ANQGST] * [ANQIKMSTV] [DGPS];
[RNGKTV] [ANQGSV] ** [ARGKSTV] [AQGKMS]G;
[\hat{ }ADCQEHFWY] [ARNQGKMPS] [\hat{ }CEHILKFWYV] ** [ANQGKMSV] [NDGPS];
[RNQGMPSTV] [ARDQGKPST] [NQGKST] [ANGKPST] ** [APS];
[RNGKMST] [RGKST] [RNQMT] **[ARNQMST] [ADPS];
[RNQGMPSTV] *[AQGKST] [AQGKPSTV] *[NQGKSTV] [GPSV];
[NQST] * [QKT] * [GKT] [NQMS] [GP]; [RNQKSTY] [RKPT] [ANQGST] ** [ANQGT]G;
[RNQMTYV] [NQKP] [RNQGS]G**G; [RGKMT] ** [NT] [RNGKS] [ANGT]G;
[RNGT] * [ANGKT] [ARNKMST] [RNQGKS] *G;
[RQGKMPST] [NQKPST] ** [ARNKST] [\hat{ }RCQEHILFPW] [DGPS];
[RKS] [NQGPST] [ANQGKT] [ANQGT] ** [APS];
[RNMPSTY] [ARNQGKSV] * [ANQKST] * [ANGKSTV] [GPS];
[NQGKPSTV] [ARQGKST] * [AQGKPST] [ANKSTV] * [APS];
[RNQGKTY] [RNQGLPST] [ARNQKPST] * [ANQSTV] * [APS];
[NQGFST] [ANGSV] [RK] ** [NQSV] [GP]; K[NQGLKST] [NDQGMPT] [NQST] **G;
[NQGKMFPST] [RQGKPS] [RDQKPST] *G* [AM];
[RQGKMST] [QKP] [NDQGS] * [ANKST] * [ADEPS]; K* [QT] * [QG] [QMT]A;
[NKMST] [ANGKP] [NGKP] * [ARNMPST] *G; [RNQPST] [RNK] ** [ARNGS] [ANGSTV]A;
[QGS]K** [GT] [AMT] [APS]; [NQGMST] [NK] ** [AQGSV] [QKMFS] [RDGPS];
[RDKST] [NQKP] *[AGKS] *[AGSTV]A;
[NQGKSTV] [RNQGK] * [NQGKS] [ANQKST] * [GPS]; [QK] [NKSV] [NDGKT] [ST] **A;
[RKMT] ** [GPS] [AT] [ANGS]G; [RKM] * [NPST] [AGT]T* [GV];
[RKV] ** [NGT] [AGST] [NQG]A; [QKST] [QKT] * [NG]G* [DG];
[RQGKT] * [RNQGPST] [RQGST] * [QGMS]A; [KV] *N* [NS] [AISV]A;
[NQKPT] [RKP] * [AGST]G* [AP]; [RNQKS] [ANMPSV] [RNQK] *G*G;
[RNST] * [QKMST] [RGS] [ARST] * [AP]; [NKS] [KST] [NK] * [NG] * [AS];
[RNGT] * [RQGKST] [NKST] [RNMT] * [AG]; [RKT] [RQT] ** [GT] [NQG]A;
[RNIK] [RNQV] *[AGS] *[NQGT] [GS]; [RGKP] [NKT] [NQTV] **G[AS];
[RNQST] [RQK]S [ANQKS] **G; R[NST] * [ANQG] [ANTV] *G; [QK] [QT] **N[GS]A;
[QPT] [RGK] *N[AKS] *A; [QGT] [QGT]K** [AT]A; RP* [NG] [NT] *G;
[FT]K**NQ[NG]; [NGS] *[GKS] [RGKS] *[AGST]A;
[ANGS] [RGK] * [NKPT] * [ANGS]A; [MT]K* [QM] *QA; [KP] [NP] [KS] ** [AG]A;
[NM] * [NK] [NK] * [QT]G; [RK] **NT [GS]G; RN* [AN] [AN] *A;
N** [NQS] [RGK] [QGS]A; [KT] * [NGT] * [GSV] [ANST] [GS];
K* [NQM] [NG] [ANG] * [GP]; [NQ] * [AGK]G [QT] *G; QKN**SA (SEQ ID NO: 199966); Q*[NK]G* [AN]G; K[NT] *[AG] *QA; F*KT*QA (SEQ ID NO: 199967);
[NST]K[GPT] *G*G; RP*[ST]G*A (SEQ ID NO: 200024); PTK**SG (SEQ ID NO: 199968); R**QQNA (SEQ ID NO: 199969); QPK**GG (SEQ ID NO: 199970); KN*ST*A (SEQ ID NO: 199971); RQ*PT*A (SEQ ID NO: 199515);
K[NQG] *N* [AT]G; R[AN] [QS] * [AT] *G; [NQ] [RN] [GKP] [NQS] **A;
KP[GP]G**G (SEQ ID NO: 199972); KPS[NGS] **[AM]; RS*PG*A (SEQ ID NO: 199973); K*[NQT]ST*A (SEQ ID NO: 199974); [RK] *[NS] [AG]T*A;
KPSQ**P (SEQ ID NO: 199975); [NKM] *N* [GS] [NT]A; RSS*G*A (SEQ ID NO: 199976); RN*PG*G (SEQ ID NO: 199977); K[NQ] *[GS] *SG;
[NT] *K* [QPS] [NGS]A; N*RNT*P (SEQ ID NO: 199978); K* [NG]A* [QG]A;
K*GNQ*A (SEQ ID NO: 199979); S**STQS (SEQ ID NO: 199980);
NK**[GT]GG (SEQ ID NO: 199981); RN**NQA (SEQ ID NO: 199982);
NR**GQA (SEQ ID NO: 199983); K* [NT] [NS] *AA; [RK] [NT] *N*QA; NR*N*QG (SEQ ID NO: 199984); N**STMA (SEQ ID NO: 199669); N*KA*AG (SEQ ID NO: 199985); NKQ*A*A (SEQ ID NO: 199986); MKQ*G*G (SEQ ID NO: 199987); RGN*T*G (SEQ ID NO: 199988); K*NSS*P (SEQ ID NO: 199989);
K*NNP*A (SEQ ID NO: 199990); MKN*G*G (SEQ ID NO: 199991); RN*NG*G (SEQ ID NO: 199992); G*K*NVA (SEQ ID NO: 199993); K*GG*AG (SEQ ID NO: 199626); N**GTKG (SEQ ID NO: 199994); NN**NKG (SEQ ID NO: 199995); RDK**GG (SEQ ID NO: 199996); RQ*N*QG (SEQ ID NO: 199997);
SRTT*NG (SEQ ID NO: 199576); and TSKG**G (SEQ ID NO: 199998); or polynucleotides encoding the same, where “*” represents any amino acid, square brackets surrounding a list of amino acids not preceded by the symbol “\hat{ }” denote a list of amino acids that may occur at a position, and square brackets surrounding a list of amino acids preceded by the symbol “\hat{ }” denote a list of amino acids that may not occur at a position, wherein a viral particle having a capsid comprising the motif has reduced spleen biodistribution relative to a control viral particle.
wherein the capsid polypeptides are capable of forming viral particles with two or more of the following traits: 1) binding to liver cell; 2) transducing liver cell; and 3) biodistributing to the liver of an organism, and wherein the library comprises an amino acid sequence motif selected from the group consisting of:
[NQGIKT] [DGKFPS] [NEHKS] *[RDEHY] *[RQEKY];
[RDS] [DQE] *[RPT] [RNK] *[RKV];
[RDKMSY] ** [RNKSV] [ARDEP] [ARNDEIKS] [ARNKMYV]; Q [RE] ** [RK] [DI] [IK];
[NMT] [RDK] * [ARGTV] * [RDSY] [ANKT]; [GLFTY] * [HKY] * [NMPY] [NKS] [AQGL];
[ANGST] * [ADEG] [RNGH] * [RK] [RNESV];
[REKFY] [ARLTYV] [DGHKP] [RDHIKS] **[ARNEIFT];
[ANQKT] [ARKPS] [RGKM] ** [RSV] [DEGY]; [RMS] * [EK] * [RV] [DPT] [DKT];
[QY] *G*V[RK]G; [IPT] [DEGP]R[AQHV] **[ANK]; IRA**EK (SEQ ID NO: 199999); [DK] *R[NE] * [KT] [AQ]; [QI] [RD] *K[MP] * [RE]; D*KPR*Q (SEQ ID NO: 200000); [ST] [QY] [EK] * [RS] * [NK]; [EY] [ET] *K*RN; ILH**KN (SEQ ID NO: 200001); V*RSD*K (SEQ ID NO: 200002);
[ADE] [ADG] * [GK] *K[LMY]; [KV] [QLT]R* [DS] * [GI]; TD*KR*L (SEQ ID NO: 200003); [RELF] [EK] ** [AQ] [RD] [DGKS]; EK**TRQ (SEQ ID NO: 200004);
[MV] *R* [SV] [AD] [GK]; IL*H*KN (SEQ ID NO: 200005); V*KG*YN (SEQ ID NO: 200006); G**HKQL (SEQ ID NO: 200007); Y*SH*KG (SEQ ID NO: 200008); D[NK] [RH] [KV] ** [RV]; I*RS*TG (SEQ ID NO: 199859);
[IK] [GP]R*[DT] *[AG]; QGR*L*A (SEQ ID NO: 200009); YTS**KG (SEQ ID NO: 200010); G**ETRK (SEQ ID NO: 200011); V*RQ*AG (SEQ ID NO: 199782); DL*K*RA (SEQ ID NO: 200012); D*RPK*V (SEQ ID NO: 200013);
DR**VKQ (SEQ ID NO: 200014); G**TEKK (SEQ ID NO: 200015); I*R*MRE (SEQ ID NO: 200016); NDMR**K (SEQ ID NO: 200017); NE*KR*V (SEQ ID NO: 200018); QAR*E*R (SEQ ID NO: 200019); V*RS*GG (SEQ ID NO: 199791); YTE**KK (SEQ ID NO: 200020); or polynucleotides encoding the same, where “*” represents any amino acid and square brackets denote a list of amino acids that may occur at a position.

32-80. (canceled)

81. A composition comprising an adeno-associated virus (AAV) capsid of claim 1.

82. (canceled)

83. A method for screening a library of adeno-associated virus (AAV) capsid polypeptides for a trait of interest, the method comprising:
A) administering to an organism or contacting a population of cells with AAV particles comprising the library of claim 14;
B) identifying in the library those particles demonstrating the trait of interest in the organism and/or in/on the cells.

84-89. (canceled)

90. A viral particle identified by the method of claim 19.

91. A kit suitable for use in the method of claim 20, wherein the kit comprises adeno-associated virus (AAV) particles comprising the capsid polypeptides of claim 8, or polynucleotides encoding the same.
